United States Patent Application Publication US 2003/0165831 A1 - sequence listing, part 2

SEQ ID NO: 5476 - DNA, 307 bp, Homo sapiens
  misc_feature 120, 126, 127, 133, 139, 144, 164, 171, 179, 187, 190, 192,199, 201, 214, 225, 227, 229, 232, 236, 240, 249, 258, 262,275, 280, 286, 291, 293, 306: n = A,T,C or G
cccttagcgtggtcgcggccgaggaccgttgactcaggtaaagagggagacagcaagaacagagtagaaaggcagcataaaactggtggaaccaaacacagactaagtaaaaaaaaaaanggtaannttcccnacaacnccttntcccaggaaaaaaaatccantaaaaancaaaggcntttaccanggntnccaaaananttccggggaaaanggatttttttntnantantcancagngggacaagnggaaatccncaancaaaaaaatgaanctggncccctncttcncnttttttttaaaant

SEQ ID NO: 5477 - DNA, 400 bp, Homo sapiens
gagcggccgcccgggcaggtacatgtgatgcagaaaagtcttacgaagtattactgagctttgtgataagtgaactgtttaaaggaaagttataccatgaagaaggaactcaggaatgtgcaatggttaaccctattgcttggtctcctgaatccatggaaaaatgcttacaggacttctgcttaccttttctcagaatcaccagccttcttcagcaccacctttttggggaagatttacctagctgccaggaagaagaagaattttcagttcttgccagctgcctgggacttctgccaacgttttaccaaacagaacatccattcatcagtgcctcctgtctggattggccagttccagcatttgatattataactcagtggtgttttgagataaaatc

SEQ ID NO: 5478 - DNA, 675 bp, Homo sapiens
  misc_feature 493, 513, 552, 572, 604, 622, 662: n = A,T,C or G
cccttagcgtggtcgcggccgaggtacacgacatttctgcatatggtctgctaatggcaccgatgcttcacattccaggaaatggttacttagggaaggttgatatgtgctgcagcataataggaacttaattcaaaccagagcaaccagaaaggatactggaggcaaaagccaaaatacaatttaaaatcttaaaaaaataaggaacggtttaaaggtaattaatgaacttttcctcacctagtgtaaacatttcataagaagtaatattttgtggtcacaaaaaaagcacagatacctcttttagaatattcatgatgctcttgtgtatgaacttaagttttcatgaaatgctttcacctcaaaaccccgtattcaagaatcaagaaggccaagcacgatggctcatgtctatagtcccatcacgttgggaggcccaggcgggtggatcacttgaaagtcaggagtttgagaccagcctgtccaacataancaaaccctgtctctactaanaatacaaaaattagctgggccttgtggccgggtgccagnaatcctagctctcaagcggncaaggcaggacaatcctttgaacccaggaacngaggctgcgtgagctganacatgccctgcctccaccttggggacagagcaggaatccnttcaaaaaaagaa

SEQ ID NO: 5479 - DNA, 319 bp, Homo sapiens
cccttagcgtggtcgcggccgaggtacattattaatcaacagtgtcccaccaactcagaagttttctaaattggctgctttctctgcatttagtaagtttataaccaatgactcaatcaaagaatgtgcttgtaataggctgctggtttaattttagaatcaaaagttttatattgggctactttcaaatatagaaatgctatgagtgacatatgaactattaattttgtttcccattacctacaggaagaatttattcaaataaaattttacaagacaaaatgcaaatctatatacctatatagagatgtatatatgt

SEQ ID NO: 5480 - DNA, 645 bp, Homo sapiens
  misc_feature 451, 556, 580, 584, 585, 587, 593, 597, 605, 614, 619, 620,621, 631: n = A,T,C or G
ggtacactaaaaagtatcctttttcagatatatttagtgctgttttttttcacatttttgtgcttttaattggtaatttcactgtttaaacactatattgtgacatctgaaatcattttgacctcagaatttgaaagaatggataaaagaatttggaaacatgtttttctttgttgttgttttttttgtttttttaggtaacattttaaaaattgtttattcctaccaagacccagttaataaaaaattttaccttatgggtaaaggatacacaggagctttccatatctgcaacttttccgtaaatctaaaattatttaaaaagaaattatctaaaagaatttagtctgtaatgaattttccacattatagaccactctcccaagtgtttgggagagggcccaatgaaaagatgggacattttggcgtcatcaataattgcttggcctanacctgtgcattcttggagatctgggatgggcatataactcctaactgaaaatcagtggttatggggagcaattcttaataataagaacatgtccttggtgtaggnttaagccccaaaaaaaaaggtggngggnncnctgaanccanatattccncaagggttnttttnnncccaagggtntttaggtttaaaaa

SEQ ID NO: 5481 - DNA, 346 bp, Homo sapiens
  misc_feature 74, 136, 157, 167, 170, 182, 183, 192, 205, 232, 245, 253,272, 276, 283, 302, 321, 336: n = A,T,C or G
cgaattcgcccttagcgtggtcgcggccgaggtacacttatccctaccttcatgttccagtggaagaccttagnaaaatcaaagatcagtgagttcatctgtaatatttttttcacttgctttcttattgacagcnaccaggaatttttttatcctnccgagccaanttnttcaaaaatgtnnaatacttcntcctgcttaacangtccttggaactcattctgatccatgnttcaccagcaggntggacagnatataatttcgcatcattnttgncccttgnaaatcaagatgctctgcanattatttccttataacggncggacttttggctgntttcctaatg

SEQ ID NO: 5482 - DNA, 330 bp, Homo sapiens
cccttagcgtggtcgcggccgaggtacttgtaattagcacttggtgaaagctggaaggaagataaataacactaaactatgctatttgatttttcttcttgaaagagtaaggtttacctgttacattttcaagttaattcatgtaaaaaatgatagtgattttgatgtaatttatctcttgtttgaatctgtcattcaaaggccaataatttaagttgctatcagctgatattagtagctttgcaaccctgatagagtaaataaattttatgggtgggtgccaaatactgctgtgaatctatttgtatagtatccatgaatgaatttatg

SEQ ID NO: 5483 - DNA, 329 bp, Homo sapiens
ccctttcgagcggccgcccgggcaggtactcttgcaatgaaaccaaatagtatcatagacacaacctctgtagcacattttaggtggaaaacactgtccagaattttaactaccagatctgttttaggccatacagtttgctcttagttttatcaagagaatttttaaggcttgctgcgacactgctatgtgtccttttcaaaatctgttcctttcattacttacttagaataagatctctctaaaattttaaattaatagcacagagagagaggctgggaaagcagcctttttatgtaaatgaaacctcttaggtagtaaaaaaaacc

SEQ ID NO: 5484 - DNA, 345 bp, Homo sapiens
  misc_feature 117, 122: n = A,T,C or G
ccctttcgagcggccgcccgggcaggtactttgggaggccaaggcggccggcctgacctcaatttcttagtgctgagacaacaggggagctaactccctatcccccatcacacacanaaaanggaagcctcaactacgaagttgttactttattagatagtagctctgccatcacagcttcccatctaccgcctaactctgcaacagaaacatttcccaggactgactggaaagaggaatcttatctaaagatactgtagttacaagggctgataagggtctttggtataaaagcaatatccagaaataagataattaactttggaactaaggggatataaatga

SEQ ID NO: 5485 - DNA, 298 bp, Homo sapiens
  misc_feature 62, 103: n = A,T,C or G
ccctttcgagcggccgcccgggcaggtactttttttttttttttttttttttttctgataanacccgaaaaaggaaaattcttttaattttctataaatttanatgtctgatcctcatctttttaaaaaccaaaatgataaaacatatttcttaaactgttgggttctgaaaaagtcacccaatggaatcagctagttcacatttgaaaatgcaactgctaaaagctgtgggatattgcaatttaagtcctgcagctcacaaggcaaagtgtgtaattctaagaagcatcaaaagata

SEQ ID NO: 5486 - DNA, 407 bp, Homo sapiens
  misc_feature 67, 169, 275: n = A,T,C or G
attcgccctttcgagcggccgcccgggcaggtactccccaatggtggatttattactattaaagaanccagggaaaatattaattttaatattataacaccctgaaaataatggaaaagaaggtttttgaatttttttttttaaataaacaccttcttaagtgcatganaatggtttgatggtttgctgcattaaaggtattttgggcaaacaaaattggagggcaagtgactgcagttttgagaatcagttttgcctttgatgatttttgtttncactgtggaaataaatgtttgtaaataaagtgtaataaaaatccctttgcattctttctggaccttaaatggtagaagaaaaggctcgtgaacccatttgtttcttttggctgggtatagttgctaattcta

SEQ ID NO: 5487 - DNA, 280 bp, Homo sapiens
  misc_feature 129, 131, 162, 164, 167, 171, 185, 187, 190, 191, 202, 204,210, 217, 224, 226, 228, 230, 232, 237, 240, 263: n = A,T,C or G
cgccagtgtgatgggatatctgcagaattcgcccttagcgtggtcgcggcccgaggtacacgccctccatcagcaaaccgctagcaaagggagaagtctcgggtttgacaaaggacttcagaaatggcntngggaaccagctgagttcagggatcccacacntntgntgcntctcagtgtgactnancannttccaaatggngnttgccnatcccanggttacntnananantgccnctnagagatgtcccgtggcccttggntctgctgggtctttttt

SEQ ID NO: 5488 - DNA, 309 bp, Homo sapiens
cccttagcgtggtcgcggcccgaggtacttttttttttttttttttttttgggtgcaggtcatttattttggatgcgatctcaggaggcaacagtaagagagtgagaaagtgaggccaggaagggaaggcaagacaggggtgtcaatgagcaggttaccagggttggacaatgggagcttgagcctgctggggacttgtgggagattgcatagagcacatctcagggctgttccacctgagaggggaggaagctgagaatgtatccaccagctccatttgtcattggtagagagctacttctaagggca

SEQ ID NO: 5489 - DNA, 329 bp, Homo sapiens
ccctttcgagcggccgcccgggcaggtacgcgggtcatagcaacaagaatgtgcctcagcacgattactcaaaaagcagagatggatattgctctaggcttgcttgtgttctcctaaaattcatatgttgaattgaatttcatcacccaaagtgacggcacttgcagatgggcctttgggagctaattatgttgagatgaggttgtgagggtagtgccctcatgatgaggctacaacccttatacaaagagtcaccagagagcttgctttctcccaatctccaccatgtgtggacacagggagaaggcagccatctgcaaaccagaaaa

SEQ ID NO: 5490 - DNA, 329 bp, Homo sapiens
ccctttcgagcggccgcccgggcaggtacttcatcctgtttgttctgggcgagggaagacaatcttagagttggaagagatgtaatccggctcagcctcccaggataaaggaacttccttttgaaacaccctggatggctactctctgcttgagtgttttgagcggagggcactctgtgtctgacagggtgattatgagccaggatgtgcctacctctaatgctcacatttgccccagagtcagggtgctccctggcatggttgctcctcttactcttagacccaccagctggttttctccagataggaacagggctaggagaaatctt

SEQ ID NO: 5491 - DNA, 414 bp, Homo sapiens
  misc_feature 68, 127, 260, 269, 277, 278, 279, 280, 292, 298, 301, 304,311, 315, 336, 341, 349, 352, 353, 359, 360, 361, 366, 371,372, 375, 377, 380, 383, 391, 392, 393, 394, 399, 400, 403,406, 410: n = A,T,C or G
caccaaagaatttggttcttcttgaggtccccacaaaccagccgttatcacacttttccatgacatcnatgacatcactttctctgagctccagctcatcttcattcctgggagtatagttatacanagcctgaaacggttcccctccgtgaaagtgtggattcctacttcctgctctaagctttgacacgtcaaaatgtgggatcagaaagaaaaaaatcatgatatttaaaaatggtcaaatatttgaggcacgaaanaaaaaaaanaaaaaaannnntttttttttttnaaaaanctncanttccccncccntttttttttttttttaaaaancaaanaatttttncannttttcnnnccccnggggnnggngnccnccnttaactgnnnnctttnnggnttncccnttaa

SEQ ID NO: 5492 - DNA, 305 bp, Homo sapiens
cccttgagcggccgcccgggcaggtacgcggggtgtttggagctggagacggcctgggtgctggcgaagcggaggccggagttaatacacgaggaactcatgcaaaggaggggactttcggaaatccaaacttagagtgccttgtatttagaatccggaaggaaaaggaaatgaaatgtgaagaaactcatgcaccaaactcgaactggtaagaagactgttagaatgccctcggtaacacagaggctgagagatcctgacataaatccttgtttgtcgatcctgttctaccttttaaatgatgc

SEQ ID NO: 5493 - DNA, 223 bp, Homo sapiens
accaaattaaaggtttgttcccaactggaagcagaggtttgggaatgctggaagttaggtctgtcatccgagatcctccacctactgccatcactactgcttgaaattccatttttacaaaccgggtcagccagcttgtgtgcggcctggcagggcagaagtcacagctataactcagctccccgcacgccgcaaccgctcccagcgatctcccccgcgtacc

SEQ ID NO: 5494 - DNA, 299 bp, Homo sapiens
ccctttcgagcggccgcccgggcaggtaccatctatgaaccaaaaaacctcagacattgattctgctggcaacttggatcttagaattcccagtctccagaactgtaagaattaaatttctgttgcttatatgttatttcattatagcagcctgaatggactaagatatttgccagtaacatttgacttcaggtcctctgctcttgcttttcctctctcaggaacactttctacccagcctttcacatggctatcttctcaccctcagctctttggctgaaatgtcagagggtcttccc

SEQ ID NO: 5495 - DNA, 539 bp, Homo sapiens
  misc_feature 125, 129, 130, 133, 134, 135, 136, 142, 145, 147, 148, 149,163, 164, 165, 166, 167, 169, 170, 171, 174, 175, 178, 183,184, 189, 190, 201, 216, 222, 227, 228, 230, 231, 232, 233,234, 241, 248, 249, 251, 253, 258, 259, 264, 265, 268: n = A,T,C or G
  misc_feature 271, 273, 276, 289, 296, 304, 306, 308, 316, 321, 324, 325,326, 336, 345, 351, 352, 356, 357, 358, 377, 379, 397, 406,408, 410, 422, 425, 430, 439, 440, 441, 448, 450, 451, 452,456, 458, 461, 462, 469, 478, 479, 483, 490, 491, 503: n = A,T,C or G
  misc_feature 509, 510, 513, 521, 529: n = A,T,C or G
ccctttcgagcggccgcccgggcaggtactttttttttttttttttttttttttttttttttttttttttttttttttttttttttttttttttttttttttttttttttttttttttttttttncccnnccnnnncctaanttnannnaaaaaaaaaaaaannnnncnnntannaanaaaannacccnnggggggggggnccccccccccctttnaaaaanaaaanncnnnnnatataanatacccnncncnccccnnggggnngancananctnatacttaattaangttttanacacaccngntncccagggngggcncannnaaaaagaagngggggaggngttatnncccnnngggggggaaaaaaaaacantntttttaaaaaaaaaaaangggcccgcncnanactgtaaacaanaanccagngggcccccnnnccccggngnnngggntnacnnccccggnggggggggnnatanaaaaggnnagccccccgcanaaaaannctntgggggtnaaaaaaanttaaaaattt

SEQ ID NO: 5496 - DNA, 339 bp, Homo sapiens
  misc_feature 199, 207, 219, 234, 252, 279: n = A,T,C or G
cccttagcgtggtcgcggccgaggtactctgtaaacaaaacaaagttatatcaccaagtgccttccccgaattcgctccctcaaaccaaccacacagttctgaccactctacagtcatggcctgtcatcagagctttgtatgaaattaagtcaaagtgtggagctccttttactcattttttttttctccttaaaaaanaaaagaancaaatgttccangtaaaaacaaacgtntcccaaagcatgtgtgcnttgaaaagtaaagaaacattataacancttcataaaaactgacttaaaagtttaaaaggaaaaaaacatgtttctaagtccctctga

SEQ ID NO: 5497 - DNA, 436 bp, Homo sapiens
  misc_feature 27, 162, 177, 189, 206, 239, 264, 285, 311, 340, 350, 362,363, 373, 380, 396, 413, 414, 415, 424, 426: n = A,T,C or G
ccctttcgagcggccgtccgggcaggnacatgttttaatctttttttaaaaaattattttattagagtcagggtctcactatgttgcccaggctggtcctgaacaattggactcaagtgatctgcccgcctgggcctcccaaagtgctgggattacagttgnaagccaccatgccangccacatttctncattcttaataaagtcngtggaatctacttcgaatgcaattttaatttanatttcaatctatgaagatattgggntggtgcaaaactaactgcggntttggactgtgaattttaaatcattntaactagggctcaacgcatttttattaantcaaaaatanggaaccattacnntcaacacatntggtttncaataagaaattaagnttggtttatttccttgnnncgggaaaanancttgtgcttt

SEQ ID NO: 5498 - DNA, 425 bp, Homo sapiens
  misc_feature 55, 56, 60, 116, 117, 118, 129, 134, 135, 136, 138, 151,153, 156, 157, 158, 160, 161, 162, 164, 167, 170, 171, 172,175, 176, 179, 197, 198, 199, 200, 201, 204, 207, 208, 209,212, 215, 217, 225, 231, 233, 235, 238, 240, 249, 250: n = A,T,C or G
  misc_feature 254, 257, 259, 260, 273, 278, 282, 287, 289, 291, 300, 304,313, 316, 322, 323, 326, 330, 333, 336, 340, 346, 350, 354,359, 373, 382, 385, 389, 390, 391, 392, 393, 414, 418: n = A,T,C or G
ccctttcgagcggccgcccgggcaggtactttttttttttttttttttttttttnntttntttttttttttttttttttttttttttttttttttttttttttttttttttttttnnnttttttttttnttttnnnanttttttttttttntnttnnngnnnanggnacnnnccnnttnttttaaaaaaaaaaaaannnnnggnggnnnaanggnanaaacaaanctttantnantancncaaaaaaanntcanaantnntataaaaaaaaanaaaanaagnggttntnangaaacccanccancaattcttnttntttttnntgngcanaanaanaaanaaaaanaccncccnagaanaaaaaaaaaaaagnggggggggnggngggnnnnnaccctatcttttttttggaanaganaaaaaaa

SEQ ID NO: 5499 - DNA, 257 bp, Homo sapiens
  misc_feature 26, 27, 45, 54, 60, 72, 74, 75, 85, 86, 92, 96, 101, 110,114, 127, 128, 134, 135, 139, 143, 152, 158, 161, 162, 167,168, 173, 174, 179, 184, 185, 191, 192, 195, 196, 197, 205,211, 219, 222, 230, 233, 234, 235, 241: n = A,T,C or G
actttttttttttttttttttttttnnaaaaaaaaaaaaaaaaanttttttttnaaaaangggggggggggncnntttttttttnnaaaaangggnccctntttttaaancccnttttttttttttnnaaaaannaaangggnaaagggggntttttnccnnccccnnttttnntttanggggnncctttnnaannntttttttnaaaaanggggcccnaanttcccccnaannnttttanggggccccccccccgg

SEQ ID NO: 5500 - DNA, 568 bp, Homo sapiens
  misc_feature 322, 363, 374, 376, 405, 407, 422, 429, 451, 459, 466, 484,493, 498, 519, 521, 536, 539, 540, 542, 549: n = A,T,C or G
cccttagcgtggtcgcggcccgaggtacggtagtaagaaacctttgagatctttctgacttttcaaaattagagaaagcaaatgggatggatagatttttttttcttttcaaggggggcaggaaggtaatggtttgagtagcctttgtttaaaaaaaaactaaatatatttaaaaggccacatttatatttttttcacaagaaccacataataaattccacttcttgacctgaatttggaaatccgaaattactaatccaggccaggtgtggtggctcatgcctgtaatcccagcactttgagaggccgaggtgggcaaatnactttgaggccttggagttcaagaccaccttggcgaacacngtgaaaccccntntttcaaaaaaatcaaaaattaaccaggcntnggtggcaccttgccntgtagtncccagcttcttgggaaggctangtcaaganaattggnttgaactttgggaaaatngaggttgcnaagancccaaaaattgcaccccttgnanttccaaccctggggnggnngnaaatggngacttttccaaaaaaaaaa

SEQ ID NO: 5501 - DNA, 812 bp, Homo sapiens
  misc_feature 23, 58, 122, 128, 133, 141, 143, 149, 154, 155, 163, 167,170, 174, 178, 181, 182, 199, 210, 212, 215, 219, 221, 222,223, 226, 227, 228, 232, 233, 235, 236, 238, 243, 245, 248,252, 262, 265, 279, 280, 281, 293, 297, 298, 305, 309: n = A,T,C or G
  misc_feature 311, 312, 319, 321, 324, 325, 327, 335, 353, 360, 363, 372,374, 382, 385, 387, 388, 390, 392, 398, 436, 437, 438, 442,449, 458, 459, 462, 464, 465, 474, 475, 476, 480, 482, 490,502, 503, 510, 511, 520, 521, 528, 535, 537, 541, 544: n = A,T,C or G
  misc_feature 547, 557, 593, 596, 601, 607, 609, 614, 617, 630, 632, 648,652, 653, 655, 664, 666, 679, 685, 701, 704, 706, 708, 709,711, 717, 719, 720, 726, 730, 732, 734, 740, 762, 765, 776,784, 794, 795, 796: n = A,T,C or G
acgcgggaaagaagaaaatacanagagtgagtgtgtggaagagggagagaaacagganagaaacaggagggagagagagagagagagagagagagagagagagagagagagagagagacacncgaganagagngggggggngngagagngaatnncactagantgtngcnctgnaaanagnntctccccctctctcacncccgggggggngngtntgcncnnngtnnnatanncnngnggggngnagngacnctccccacanaangtgtgtgtgtgtgnnncccccccccttntctnncttaaanaaangnnccacacntnggnngnatctcccnctctctctctgtatatantagagcnccngctctctcntnccatatanagngnntntntctctngggggggggggttttttttttacagcccccctatatannntggnggtgganatccccccnnctncnnttgtggtgnnnaccntnagaagagnttatattctccnngggggcnntgttttttnnttttttncccccanangggnaantanccgaagtggnggagaaaagttgttttgctttttttttgtggggaanaanagggnggttcncntttgnaancccccctttttgngnggggggggagattttnacanntnttttttccngngggggtttttttnttttcncccccccccccccccnttntntnngngggtgntnntttaantttncntnggggcnccccccccctttgggggggttnttntcccccccctntggggggncttttttttnnngggacccccccccccc

SEQ ID NO: 5502 - DNA, 670 bp, Homo sapiens
  misc_feature 15, 19, 24, 42, 43, 50, 51, 54, 82, 201, 213, 244, 251, 255,289, 301, 313, 315, 316, 325, 337, 375, 383, 396, 398, 419,423, 463, 472, 479, 495, 497, 513, 529, 531, 532, 539, 548,550, 557, 562, 564, 571, 573, 576, 583, 587, 591: n = A,T,C or G
  misc_feature 594, 595, 597, 600, 612, 621, 622, 633, 650, 653: n = A,T,C or G
ccctttcggccgccntttnaggtnctggcatcagtcaatgtnntggagtnnttnggtccccaatgttggctatgaagctatnggcttgtggacagtagtggcccacagttggtgtttttgcaaaagcaactgcacaagacaaccccaaatctgccacagagcagtcaggaactggtatccgatcagggagtgagacagagnccgaggcctcanaaattactattcctcccagcaccccggcagntccacangctnccgtccagggggaggactaccgcaaaggtgtcancttctacctcanggacaaagtggncnnggggaatgngctatggaacanctttaacccgaatgcccatagcaagggaagaatcattnaggacggngagcagcatgaananctcaattgaagtagccaaacnatcnacattcatgaaaactggaaaccccaccagtggaaattggnaaaacccantgggggncctgagaaggaaggtncnaaaggggtaaaagganccattttttttatccncnnactttcntttggggantnaaagganaatgnancaaaatncnttngggaatntttnaacngtnnanggnaaatttcttatngttcaaatnnggaaaaaaaanctgaaaacctcccaaanaanggaaaaagaaaaaaaaa

SEQ ID NO: 5503 - DNA, 754 bp, Homo sapiens
  misc_feature 155, 180, 193, 357, 417, 454, 473, 482, 536, 550, 552, 560,566, 567, 568, 571, 574, 576, 594, 609, 610, 626, 633, 638,648, 651, 654, 659, 668, 674, 675, 680, 692, 701, 708, 713,732, 735: n = A,T,C or G
gatatctgcagaattcgcccttagcgtggtcgcggcccgaggtaccggtggctcacacctgtaatcccagcactttgggaggccaaggtgggtggatcatttgagcccagccaggagttgagaccagcctgggcaacatagtgagaccctgtctncacaaacaaaaaatacaaatattancccgggtgtgggnggcacgcacctgtgggtcccagctattcaggacgctgaggtatgaaggatcacttgagcccaggacatggaggttgcttgtgagcccagatcatgctactggactccacctgggtgacagaacgagaccctgtctcaaaaaaaaaaattaaaaaaattattaancctttatatggagaatgtctatttggggatcttggtaagaaaactggacacctaaagaanctaccaagaactcagtggatctatataggaacttttnttgatctacagcgggaggnttgcataanaaaaaaaagcgtttgcctaccctttttggagacatacatgcaaattggtagaantaatggaatttcantnacttaatntttgannnacnttngngcatttagtgagaacaangggggggaatgcctnnttataattgagaaaangggggangtttntaatattaantanggnatttnattaatttnttgccnnatcancctaattaactntactaattntttaaantttgntttactttattaaaaaatnctntttcccattttttttaaaa

SEQ ID NO: 5504 - DNA, 312 bp, Homo sapiens
ccctttcgagcggccgcccgggcaggtactcaaattaatcaatagttcatcttatttacaatctctcaagcagctcattttatgttagttgcacaatctggaggtctggagttcttcacatgaaatttaataaattatcatgcaagctcatttttattcccattttttttacccagggagaatcagtctaccagggcaaataatgaggttaccaccttagtccctcttcccaaccccattttttagttactttcctttcattaaaatatccttatgcacttacaaataaaactaagtcccaagagggcaaca

SEQ ID NO: 5505 - DNA, 318 bp, Homo sapiens
  misc_feature 26: n = A,T,C or G
cccttagcgtggtcgcggccgaggtnctaagattaaggacagagttccctccattgttcattgatttgtaaaccaaaatgtatctgtgacaggtattaatcaattgagaagagttttttatttttatttatttatttattttttgccaaggttcaggacagatccaggtgtctttctccaaagatgattatgatggtgttaatatttaaaggggaaagtggcctagaggggaacaagggagggtatgatcatattactgtatccacatgttgcaggagaaatggagcatgtacctgcccgggcggccgctcgaaaggg

SEQ ID NO: 5506 - DNA, 631 bp, Homo sapiens
  misc_feature 375, 376, 377, 378, 379, 380, 381, 382, 383, 384, 385, 386,387, 388, 389, 390, 391, 392, 393, 394, 395, 396, 397, 398,399, 400, 401, 402, 403, 404, 405, 406, 407, 408, 409, 410,411, 412, 413, 414, 415, 416, 417, 418, 419, 420, 421: n = A,T,C or G
  misc_feature 422, 423, 424, 425, 426, 427, 428, 429, 430, 431, 432, 433,434, 435, 436, 437, 438, 439, 440, 441, 442, 443, 444, 445,446, 447, 448, 449, 450, 451, 452, 453, 454, 455, 456, 457,458, 459, 460, 461, 462, 463, 464, 465, 466, 467, 468: n = A,T,C or G
  misc_feature 469, 470, 471, 472, 473, 474, 475, 476, 477, 478, 479, 480,481, 482, 483, 484, 485, 486, 487, 488, 489, 490, 491, 492,493, 494, 495, 496, 497, 498, 499, 500, 501, 516, 517, 518,519, 520, 521, 522, 523, 524, 525, 526, 527, 528, 529: n = A,T,C or G
  misc_feature 530, 531, 532, 533, 534, 535, 536, 537, 538, 539, 540, 541,542, 577, 584, 587, 602, 624: n = A,T,C or G
cccttagcgtggtcgcggccgaggtaccactttttaaagctagctgtgtcgagttaaagaaaaaatcagcagttttttctcccagaaatgtaattgcaaacactattcatccccatcttaagttttacaaggtgatgtaatcagcttgttgtaagtgatgctggccaaatggtgctcagcaggtgagaacaaaaaaaccccagatttcagtgaactaatacacagcttgagccgtttccatgtgctaatgttgcacacttactaaaaaactttggaaatggaaaataatgtattaagtgcaacagttgatgtgcttctttgggcaaagatataagttttgttccacaatttgtacctgcccgggcggccgaaggnnnnnnnnnnnnnnnnnnnnnnnnnnnnnnnnnnnnnnnnnnnnnnnnnnnnnnnnnnnnnnnnnnnnnnnnnnnnnnnnnnnnnnnnnnnnnnnnnnnnnnnnnnnnnnnnnnnnnnnnnnnnnnncaacccggaagcatnnnnnnnnnnnnnnnnnnnnnnnnnnnagggagctactccattaattggggtgcctcactgnccctttncancgggaaacctgtccngcccactgcttaatgaatcggncaacccc

SEQ ID NO: 5507 - DNA, 331 bp, Homo sapiens
cccttagcgtggtcgcggccgaggtactacaagaagcaaaggtgttgttgctctgccaatcaacatccaatgctggtgctgaatgaaaaggaaactgttgcttggcttcaccagtatgtgcgtcccaaataattgtagtcttgtctactccagcacttaggatgaaatttcctttcttattccattttaatgcaaatatagggcctttatgctgccctaaggtgctagcaaggttaccatctttagtccatattctggcaaacccatcataggaaccagttgctagaagtgtacctgcccgggcggccgctcgaaagggcgaattccagca

SEQ ID NO: 5508 - DNA, 668 bp, Homo sapiens
  misc_feature 49, 69, 76, 77, 78, 117, 138, 144, 151, 159, 167, 177, 183,193, 202, 208, 217, 223, 226, 228, 234, 263, 267, 294, 317,338, 348, 350, 351, 360, 368, 375, 399, 405, 411, 439, 445,448, 473, 479, 493, 512, 520, 540, 541, 546, 552, 570: n = A,T,C or G
  misc_feature 579, 629, 644, 649: n = A,T,C or G
gatatctgcagaattcgcccttagcgtggtcgcggcccgaggtactttntttttttttttttttttttntgggggnnnaattttttttttttttttttttttttttttttttctaancattactttttattttgaaanatttgngaaactnttcacatnatgggganagtttgtatnattaanaaaaaccacntttttcatnaaatgnttggaggtnaacaanttntnaccctntgaaatcccccatcccattaactttaaantttnttttgattaataaaaaaaaaaaggggngggtgaaaaaaaggaggaacttncttaaacccttataacaatcntccaaatttnannaaaaaacancccattcnccaactncactttttttattttacaactttntacatntcactnttaattttggccttcctggctaaaacanccctgncantccctaaggcccctaaaaaaaaccntgtttntccaaaaaacaaangagggaaaacccttccaanaaaccctnacccctttccaaaaaaaccnncaatncctttnttccaaaaattttaaccnaccccctanttttaaaaaaaactccctttaaaggtaaaaggaagaaatgttataacctnccctttttttaaaanttttnttttttttaaaaaacccca

SEQ ID NO: 5509 - DNA, 469 bp, Homo sapiens
cccttagcgtggtcgcggccgaggtacttttttttttttttttttttttggatcttctcattggagagagctaagatatcttggtatgcacacatacacacatttaaagacaaactgtgccctgagtgcatactgacaattcctatgcaaattcaaaactgtagggattttaacctcctttatcttacatctttatcctctttcaactatgttttcagaagagttgtatattttaaggcatattgactaaggaaaagtgacgttattaaccagccgtgtgaatgactagcctggccttttagatcatgtttgagaggtagcacaagcactgccactctccccatactagagtgctataaatacagtttaaaagtgaactggcttgagacctagttttgcaaagggttgaacctttaaatatatgaaaaaatgttcgcagtgttgggctccttagtttgatttggccaag

SEQ ID NO: 5510 - DNA, 539 bp, Homo sapiens
  misc_feature 134, 151, 157, 390, 447, 493: n = A,T,C or G
cccttagcgtggtcgcggccgaggtacctgtattagttttctatgctgctgtaacaaattgtcacaaattagttatcttccagttctggaggtcaaagtctaaaatcaaggtgtcagcaggactgcattccttntggaggctctagggaanaattcntttccttgcccttttcagcttctacaggccaccaatgcttcttggctcatgaccccctttcacatcactccaacctcttgggttcattactaccgtctcctgctaccactctgagccgcctgcctctcatttagaaacaccttttggggccatcttgaaaaaatcaaaattgctctccccatctcgagacacttaaatttaattattatatgaaaaggtctttttgctatggnagggagggtatacctcacaggtggccatagattaggaatgtgggggatctttgaaangtgttgttggtaaacctggcacaaattccccacgaactcacacttnaatgtgtggattttttctgccctgggtttttctgggtcaattcttg

SEQ ID NO: 5511 - DNA, 627 bp, Homo sapiens
  misc_feature 19, 26, 36, 42, 61, 66, 77, 78, 80, 83, 181, 218, 227, 237,244, 308, 316, 404, 435, 441, 463, 482, 491, 509, 521, 538,544, 545, 553, 556, 557, 559, 566, 591: n = A,T,C or G
atgctcgagcggcgcgtcngtgtganggatatctgnagaatncgccctttcgagcggccgnccggncaggtacaacnnangcntgggaagatcatgataatgttttacatcacattttacagcattttattttaatcagtatttgtagaaaacaaggatgctgagttcttgaacactgcantcacaaactcaaactaaaatttccaaaaaaaggaaanaaaacactnaactacttgntcaactnaacatctttaataataaatgtaaccaaacctaaccaaataaatattccactgaaatcacacttnaatgtatngtttttaatgtgttcccaaaaccattaaattattttaatcaattttttaacttccaccccaaaaacaaaaccattccttttttttttnccttaaataaatttaattcttaaaaaattancctttnaaaaaaccaaaaacctttcttnttttaaaaaaaaaattttnttcttttanctttttaaacctttcttnttaacccacccnaaactttaatttaaaancccccnnccttaccnttnnancaaaatnccttcccaaaccaaccccaaaattntccaaaacccccttttttttttcctttaaaaaattt

SEQ ID NO: 5512 - DNA, 850 bp, Homo sapiens
  misc_feature 422, 424, 444, 469, 471, 500, 509, 521, 564, 590, 598, 601,625, 640, 647, 649, 662, 667, 679, 680, 714, 718, 724, 727,728, 743, 744, 764, 784, 803, 815, 816, 817, 819, 826, 833: n = A,T,C or G
cccttagcgtggtcgcggccgaggtacgcgggtattaatatgatactgaaacatttattgctgaacataaatttagaacttactttgcctacctattacagaagaacaaaagatatttgggcctattaaacctttcctctgccatttcctgtcctgtgtcataggactaggaatcgtgtttctagaaagtatgaaatcgtgtgcttgcaaacttggaagaaaacagttcatgactgcataccttctagttctctagtgttcactggaaattaaagacactaaaagttaacaattcttattaattaatcatattaatgtaattggaatttctagaaatattaggggaagcaactttatacgcaaagcataacagaaaaataaggtgtattttttctttgaaacctatgaaatatactggccangnaccggtggctcatgcttgtnatcccagcacttttgggaagctgangnggtggatcacctgagctcaggagttcganaccagcctngccaacatgttnaaaccattgtctctactaaaaattcaaaaattagccagtcatnggtggcaggggccctgtaacccccangtactccngangctgaggtggggagaaatcgcttngacccaggagggggnaggttgnantgaaccaaaatancaccnttgcactccagnntgggcgacaaaaaaagactttttttaaaaaaacnaaangaattnacnnaaaactttttgccannaaaggtgggttttgtaaaantaaaaataatatgggttaanttggaaatattcaaaggtngttcaaatgagnnntnaaaactntacctgngaaaaaaaaaaaaaaaa

SEQ ID NO: 5513 - DNA, 350 bp, Homo sapiens
  misc_feature 119: n = A,T,C or G
ccctttcgagcggccgcccgggcaggtacaagtcttccacatgttttatttggtttatggctaacaattttatatttgttaatggtattggaaataacatttttaaaatttcaatttcntgattgtttaatattaaaaaaataccctttgatttgtgtatattaatcttgaactctgccaccttgctaactcacttattagttctaataagcttttatttcatggattccatggactggtgtacagtgtgagtctccgaccttcacagttggccgtggcaccccaaaaggcctctgctggcatttgcctgtgatgacaaagacggcaaatatgacagcagccggggaagc

SEQ ID NO: 5514 - DNA, 291 bp, Homo sapiens
ccctttcgagcggccgcccgggcaggtacctagcatagtatctgacccacgacagtcatttattaaatatctattaagtgaatgaatgaatgaatgaattgcagccatttggcaaatgaaagcattgctttggtagattattatttcatatttagtatcttgtaatagtatagctgagcctccctaatcccaggccctctatctgcttgcacaccagtgctaagattatggttcctaaattctttttttctttctctttttttttttttttttggttttttttgagatgga

SEQ ID NO: 5515 - DNA, 302 bp, Homo sapiens
  misc_feature 91, 105, 115, 178, 238, 251, 266, 271: n = A,T,C or G
cccttagcgtggtcgcggcccgaggtaccttttttctgagctctggtttgcctttcttgactgtgggccatcaccatgttacccacaccancagcggggaaagtnttgttcagcncgtcccttgaatcccctttcacgggaaaatgatatacagggtttttggctccttgtgtttgtnagcacaaattgattacaagcttcctaccgggaagacccaaaggaaattctggaaattcgnaaccaaaaggaanccaacaccgtcctcnctttntacatttttgaacgccggaaaaaaaaaaaaa

SEQ ID NO: 5516 - DNA, 554 bp, Homo sapiens
  misc_feature 508, 515, 516, 517, 518, 519, 520, 521, 522, 523, 524, 525,526, 527, 528, 529, 530, 531, 532: n = A,T,C or G
cccttagcgtggtcgcggccgaggtactgataggggttcatgcttaataaacatgtcacaatacagtaagtaaagtggttttgtttgtttctttgagatggagtcttgctctgtcacccaggctggagtgcggtggcgcaatctcggctcactgcatcctctgcctcccgggttcaagcaattctcctgcctcagcttcccaagtagctgggattacaggcacgtgccaccacgcccagctaatttttgtatttttagtagagatggggtttcaccatattggtcacgtcacgttggtcttgaactcctgaccttgtgatccaccccgccttggcctccaaagtgctgggattacaggtgtgagccaccgtgcccggccaaataaaatgttttttaaaatggttatgtgcattattcataaaaaataatggtgtccaatctttttaaacttgtaaaagacacatcttatttgaataaaagagatgagagcttaaagtttgtaaaaaanaaaaaannnnnnnnnnnnnnnnnnggtccttttttttttttttttt

SEQ ID NO: 5517 - DNA, 625 bp, Homo sapiens
  misc_feature 565, 604, 612: n = A,T,C or G
ccctcgagcggccgcccgggcaggtactttcttcatctccacctttgcccaagtcatctgctttttcatggaccaccagtgtgcggccaatgatgcaatggtctcctgagagtgagatcacagaatcttcaatagacacatcggccacaccatctttgtcagcagtcacattgcccaagtctccaacatgcctctcttcatcctttggcccaccgtgttttctggatagaggattaaagtgaggacctgcactggtactgggattatataggcatgagccactgagcctggccctgaagcgtttttctcaaaggccctcagtgagataaattagatttggcatctcctgtcctgggccagggatctctctacaagagcccctgcccctctgttggaggcacagttttagaataaggaggaggagggaggaaagaaaaaatgtaaaggagggagatctttcccaggccgcaccatttctgtcactcacatggacccaagataaaagaatggccaaaccctcacaacccctgatgtttgaagagttccaagttgaagggaaacaaanaagtgttttgatggtgccagaaaagggcttgctcttccnaaaagctnaaatttaaatttc

SEQ ID NO: 5518 - DNA, 499 bp, Homo sapiens
  misc_feature 444: n = A,T,C or G
ccctttcgagcggccgcccgggcaggtacctctgtttctcatttccaaaatctgaggttgcacctgtgtttctcatttccaaagcctgaggatgcacctctgttcctcgtctccaaagcccgaggtcccacttctgttcctcatctccaaagcctgaggttgcacctctgtttctcgtctccaaagcccgaggtcgcacttctgtttcttgtctccaaagcccgaggttgcagctctgtttctcacctccaaagcctgaggttgcacctctgttcctcgtttccaaagcctgaggttgcctgcaagtctcttgaggattttttggtgtaaacaggttgagtttctggataggtgggcatattggcagctgaatatgtgggttttgagtgtgaaatacaggttcttagctatgacccagcaatcttctacttgttctgtgctctnccacataaaattgctttttcttgattgtatttcatagagcaatttctgaggctgg

SEQ ID NO: 5519 - DNA, 362 bp, Homo sapiens
  misc_feature 113, 116, 121, 124, 351: n = A,T,C or G
ccctttggccgcccgggcaggtaccaagttttcccagacagtttatactagcaatgtgattgatggtgaatacctgcttttcactggaggtctagaacttgaataactaaggncantcttntanggcctacatgacttgataagggctatatgctgagtcttgggtcctgtgagtccttttggcaaatctgcaggcctgaggatagtcaggcattcctgccacagtctaaagagctattcacctaatactacaataccaggggggttcaccacgtatatataagctaaccaactcattaccttttgtgttcttgtttatgatcttggccgtcaattttttctttttttttnttggcctgtga

SEQ ID NO: 5520 - DNA, 667 bp, Homo sapiens
  misc_feature 374, 379, 401, 415, 423, 436, 496, 506, 510, 514, 515, 519,550, 551, 565, 572, 574, 582, 586, 589, 600, 605, 610, 613,619, 626, 629, 630, 631, 645: n = A,T,C or G
cccttagcgtggtcgcggccgaggtacaagtctgttataacatgtctgaacaggctgtagttgaaggcactcagaaggataagacataagtttgaaaagagactctatcaaagtaaaataaattctgctaaaattgaaacaaaaagaaacatcaaatttatgatgagatcagatgcagtgtcaccacaccctgctaatttttgtatttttagtagagatggggtttcaccatattggccaggctggtcttgaactcgtgacctcgtgatccacccgcctcggcctcccaaagtgctgggattacagggcatgagccacccgcacctggcccacatcagttttacaaaaaaaaattaaccttgtttgtgccgcantgaanaggactgacaggtaacaagcanaaattgttatttanggagttcnagaacaggcttgnttaacatgggtggaaaccccccgttttttcttaaaaattccaaaaattaaacttggggtntggtggcaanaatnccannaatnccaacttcttggaaaggttgaaccctaaaannacttgaaccctcanaaggcananggttgcantagnccnaaatggccccntttgnaattnaanccttgnccaaaanaannnaaaacttttttttnaaaaaaaaaaaaaaaaaaaaag

SEQ ID NO: 5521 - DNA, 319 bp, Homo sapiens
cccttagcggccgcccgggcaggtactctggagtcaccagcctctggtagattatcaagcatctcttcctcatcagccttttgtttctgtcttgcatgcttctctgtccactgtctggcattcttgaggaaggctggcttattatatttaaattctgaggactgagatgaaatcaaagaaaagagttaatggagaaaaacatgatttgcagtggttagagctgctgcagctatcctcacacagggagagttagcggtatagacaaggtaggatatgtgttgcagaggaaaatggggatatttactatgtcagccatgag

SEQ ID NO: 5522 - DNA, 319 bp, Homo sapiens
  misc_feature 266, 298, 306: n = A,T,C or G
ccctttcgagcggccgcccgggcaggtacataattttataacattgtgcattgatcatttggaaaatattggttcattgagttatggagatctttcaaatgttggcacatttaattatacaatataaaaaattcattaacataatcaccaatttatcagaatggtctttatgtatctggaaattattaaaattgtagtagacaaacatttttcaaaattttagtttcacttgaaagcctgaatttatcagtggcaacaaatattgncagttatcttccttgaagtgtgaaggaaaccngactctgncaccccaaaatat

SEQ ID NO: 5523 - DNA, 342 bp, Homo sapiens
  misc_feature 109, 115, 130, 139, 160, 199, 200, 207, 250, 326, 327: n = A,T,C or G
cccttagcgtggtcgcggccgaggtacagtgtcaaaggaggcatttaaactagaaggtttaaatatggtccagaatctcataacaccccaaatgtccaggtttcaattnaaaaantcaccaaatctaagntttgagttnaaaaaaagaaaaaaccatgtnggacattaaaaccacttgaaatggacaaaagatgtttannaaattantttggataatatatttttaaagcagctcatcatagagaacacnttcagtgaagcaagtcctaagcacactgaaaacaatgaaaattttagggaatcagttagagatacaaagaaatgannaatttggtaactgaa

SEQ ID NO: 5524 - DNA, 654 bp, Homo sapiens
  misc_feature 83, 126, 148, 177, 210, 219, 270, 292, 305, 322, 329, 335,475, 490, 491, 506, 520, 531, 532, 561, 571, 578, 606, 608,618, 621, 635: n = A,T,C or G
cccttagcgtggtcgcggccgaggtacgcgggcggttccagatgtggatttggcaaaacctcatttaagtaaaaggttagcanagcaaagtgcggtgctttagctgctgcttgtgccgctgtggcngtcagggaggctcctgcctgancttccttccccaactttgctgtctgaaangaaccataacaagcccacaagccggaaaaagcntatctaacncctatctaagctttggtaactgcagacaaattacttttaccttatttaatnatacatttcattaaagtccaantataaatattttnttaatatttattaaatnactatanaatgcnacctccatttaccaataacttattttaaatattcctaataaccacatatttaatataatttctaaaaacaaaccatcttataaaatatattaatcctttgaaaaatattaaagccttaataatattaaagtttgtcaccnaataaaacattcctnnaaaactttttaccanaatttccttagaanaattaattaannaattttattaattgaacccttaaaatatnttaatatttncccaccnatttttaaattcaaatatttaattactnantatctatctnctntatataaaaaatcntttaattcaaaacccctta

SEQ ID NO: 5525 - DNA, 324 bp, Homo sapiens
  misc_feature 164, 231, 302: n = A,T,C or G
cccttagcgtggtcgcggccgaggtactaatgatacagatatttaagttttgttgatttgtatgtagtttccccataagaggttttttgtttttttttttttgagacagagtttacttctcactgctcaggctggagtgctatggcatggtcttggctcactgngacctctgcctcctggtttaaagcgattctctgcctcacctcccaagtagctgggattgcaggcacncccacccgcctggctaattttggacttctgtctgcagatagtaggatggttctgattctcccaaataatgngggtctagagaaaaggaaaaag

SEQ ID NO: 5526 - DNA, 326 bp, Homo sapiens
cccttagcgtggtcgcggccgaggacgcggggattcctgaagctgacagcattcgggccgagatgtctcgctccgtggccttagctgtgctcgcgctactctctctttctggcctggaggctatccagggtacaacactctgcgtctggctgagccacaaagccagggaaatagccaggtgctactggatgcccctatccagttgtcaaagataacggagaactacgactgtggaaccaaacttccaggactgctaaagagggaacagtcctcgacagtgaatgcaaagaagttagagaaggccgaggctcgacttaaggcaaagc

SEQ ID NO: 5527 - DNA, 310 bp, Homo sapiens
  misc_feature 12, 173, 187, 192, 279, 281, 309: n = A,T,C or G
attcgcccttancgtggtcgcggccgaggtaccgtgcaccccgctcttaccctaagtccaactcttccaaggagtatgtgtgacctgggatctccttgccccacctgacaaggctatgggggtgtctagaatgtctgaaaagggcctggggctgaactcaagcctgtgggcanggtgcccgacaaangcctnctggtcactctgtcccctgcactccatgtataagtccctcttgggttggggggtgggggggtgcccttggtgggaaaaacaaaaaananggaaaatgtgctttttgtaccttgcccng

SEQ ID NO: 5528 - DNA, 156 bp, Homo sapiens
  misc_feature 106, 118, 125, 129: n = A,T,C or G
cccttagcgtggtcgcggccgaggtacaaggaagcctggttgaagtcttttccttgagaggcctggatttgttcacatattcagatttcaactggctttataacangttttctttaangtggccntaanaatttggccttccaggttcacttgggt

SEQ ID NO: 5529 - DNA, 149 bp, Homo sapiens
  misc_feature 57, 103, 109, 112: n = A,T,C or G
cccttagcgtggtcgcggccgaggtactttttttttttttttttttttttgctttanagcatattatattttaatagttattaacataaatctttgatttgtnctgggntgnggagatggggtataacattattagcaacatttaccca

SEQ ID NO: 5530 - DNA, 226 bp, Homo sapiens
  misc_feature 117, 119, 128, 148, 155, 156, 161, 194, 197, 206, 212, 222: n = A,T,C or G
cccttagcgtggtcgcggccgaggtactttttttttttttttttttttttttttttttttctttgtttttttttttgctcctcgaatgacaatcagttttattgcatgagttatggngnccaaatganttaatttgcttttttcaccntctgaannaaaanaaggcccccctgccggccctcaatgcaaaaaanggnaaaaaactnggatanatgatttaangccc

SEQ ID NO: 5531 - DNA, 646 bp, Homo sapiens
  misc_feature 145, 153, 223, 285, 296, 330, 388, 392, 400, 445, 521, 524,555, 558, 561, 576, 596, 616, 630, 634: n = A,T,C or G
cccttagcgtggtcgcggccgaggtacacctgcaaggctgtcaacagtcttggagaagccacctgcacagcagagctcattgtggaaacgatggaggaaggtgaaggggaaggggaagaggaagaagagtgaaacaaagccaganaaaagcantttctaagtcatattaaaaggactatttctctaaaactcaaaaaaaaaaaaaaactcaaaataataaaancacctaatgtgataaattatcggttaagtcatttgtgggttgattcttcaaaaacaacattnatacctaacancattattgatggccattaatctattttaatttgncaccttaaaatctaataccacctaaatttcattttaaggaaaatcacccattaacttnactnaccaattnatttttaaaaaaaaaaattaacccaacccaaatatttatctttanccaaaatcattaaaattcttccacttttaattcccctcatttaaaaaataaagcccaaaaccaaaaatttcttganccnccaacttcaaacccaaaaggttccctggggnatnagnaaagccctttttttnttccccaccccccttacttntaaaaaaacttaattttttnttcccaataccctncccnaaccaaccccct

SEQ ID NO: 5532 - DNA, 203 bp, Homo sapiens
  misc_feature 171: n = A,T,C or G
cccttagcgtggtcgcggccgaggtactttaatcggcacaccaatagacatcttggcaggaagagagttcggctctggcctacttttcttctcttcggtccgctgcgaaagatgctacggcgaaggcgtgagtcaagcgaatggcccccgcgtacctgcccgggcggccgntcgaaagggcgaattccagcacactggcggct

SEQ ID NO: 5533 - DNA, 638 bp, Homo sapiens
  misc_feature 93, 101, 102, 104, 109, 110, 111, 113, 115, 117, 119, 120,124, 125, 128, 132, 133, 134, 142, 143, 155, 159, 160, 161,162, 163, 165, 167, 177, 178, 179, 187, 189, 193, 195, 196,199, 201, 205, 207, 216, 220, 223, 224, 227, 229, 234: n = A,T,C or G
  misc_feature 239, 240, 241, 248, 250, 251, 253, 255, 273, 275, 276, 280,290, 294, 301, 308, 310, 315, 316, 318, 325, 326, 328, 331,333, 342, 350, 351, 352, 355, 356, 357, 358, 359, 374, 377,380, 391, 392, 395, 398, 403, 404, 407, 410, 418, 419: n = A,T,C or G
  misc_feature 420, 428, 430, 432, 433, 435, 436, 438, 442, 443, 446, 449,454, 456, 457, 462, 475, 478, 480, 492, 493, 495, 506, 510,519, 524, 537, 538, 545, 551, 553, 554, 555, 560, 561, 562,569, 582, 583, 584, 589, 590, 592, 593, 601, 609, 612: n = A,T,C or G
  misc_feature 613, 615, 618, 620: n = A,T,C or G
actttttttttttttttttttttttttttttttttttttttttttttttttttttttttttttttttttttttttttttttttttaaaaaaanaaaaaaannanaaaannncntngngnncccnnaanaccnnngggggggnnaaaaaaaaaaanaccnnnnntntntttggggggnnnaaaaaaantnaaananncancncatntntaaaaaaanaaanaannaangnaaaanttatnnnttttagncnncncncaccagagaaaaaaaaanannaggnttttttaccnccanccccccnccaaaanantgaanngncaggggnngnggnancaaaaaaancccccccnnnggnnnnngaaaaaaaaaaaatngtnggnaaattatttanngcnggnaaagnntanatnaataaagnnncaaaaacncnannanncncccnnagnggncattnannggagnagcaaaaaaaaanctncncccccaccaacnnanaagatgataantttngaaagagcnacaanaacagaaaaaacnnttttatntttatnannngagannnaagaganattaaaatatagnnnacacnncnntaccaaanaaaaaaancanncncgngnaaaaaaaaaaaaaaaaaa

SEQ ID NO: 5534 - DNA, 208 bp, Homo sapiens
  misc_feature 21, 30, 38, 43, 56, 82, 91, 115, 134, 167, 208: n = A,T,C or G
ccagcggccgcccgggcaggnacgcgggangccacttncggcntagccatggcggntaacgctactaccaacccgtctcagntgctgccgntagagcttgtggacaaatgtatangatcaagaattcacatcgngatgaagagtgataaggaaattgttggtacctnggccgcgaccacgctaagggcgaattccagcacactggcan

SEQ ID NO: 5535 - DNA, 369 bp, Homo sapiens
  misc_feature 349: n = A,T,C or G
ccctttcgagcggccgcccgggcaggtaccctgaagggccagagtttcagctgctgttagtgatacagccatcctagtctgcactagctctgcagaaggctcataccagctggaatcttgcaagggccccagtagaggaagaaagtcaaatatgctttgtctctggggtgggtggaggaacgatttctagtcttgtccggtgaagctcggctgttcgtttccattgccagggtgagggaggccacctgggggcatatgttgctttctatcttgcagctcacaggaccaggaggttccatcggggcgctgccgcgaatcgcgccacttacagccctcccccgcgtacctnggccgcgaccacgctaaggg

SEQ ID NO: 5536 - DNA, 771 bp, Homo sapiens
  misc_feature 179, 198, 203, 219, 242, 264, 282, 292, 306, 310, 311, 331,358, 359, 370, 377, 393, 401, 403, 444, 453, 464, 468, 540,556, 584, 628, 629, 666, 679, 686, 695, 705, 706, 728, 730,731, 746, 747, 761: n = A,T,C or G
gatatctgcagaattcgcccttagcgtggtcgcggccgaggtacttttttttttttttttttaactgtgctatgggagtaagaagcaggaggttttcaacctaatcacagagcacacctaccccctcctcctttccacacctgcaaactcttttacttgggcttgaatatttaatgtanttacatctcaacttttaanggctnctgtggcaaattcccngattaaaaagttccctggttgtnaaaatacattaaataaatcatnaaagccactatcatcctncttctgcttncacaaatttcctgngctnnacccatttcaacaaaaaaancttattttacttttattctaaaaaaannaaagcttctanaataaanccccaaaaatttcttnataacccncnacttctaaccccttccctaaaacccaatataccccctttcncttttcaanacccttcttcnaaanaatcccaatattcttaatttaaagtcctaaacaaaaaacccaaaaaaatcttttcccctttaccacaaactntttcttaaacccttcnaaaaccaaccaaaaataaccccaaaatncaaaaaattataaaactttttaaaaaacccttaaaaaacccttnncccccttttaatttctttttcaaacaaattaaaattnaccaaaaatttantccctanaaccttttnaccccttttnntaaaaatttaaaccaacttttntnntttcccaaaaaattnncttaaaaaaaattnccaaaaaaaa

SEQ ID NO: 5537 - DNA, 423 bp, Homo sapiens
  misc_feature 10, 11, 12, 19, 21, 35, 130, 142, 145, 146, 155, 172, 224,251, 271, 272, 292, 345: n = A,T,C or G
cccttagcgnnngcccggncnaggaccggaacacncgctcagtggtctcatcattggggtaggtgtccaggaagatggctaagccgaggaagttatctttgcttccaaacacccgcgtacataaatgcancattttggattnggnnatttatatnttcatcctcattaaaangaaatgtgccactgaggctcacatagatgataactcccactgaccacatatntagggaacggttgtaacctttgctccngagaacttcacgggctaagnntgctggagttactaccacanatctcctgaatgacttttcaccaatgatgcgtgcaaatccaaagtcacacagnttcacctgaggaaatggctctgctgatgcaggcagcacattttctggctttaaatcacagtgcacaatattcttaaaa

SEQ ID NO: 5538 - DNA, 422 bp, Homo sapiens
  misc_feature 55, 75, 89, 260, 306, 359: n = A,T,C or G
cccttagcgtggtcgcggccgaggtactttctttagtgaagtgaatgtatggttntaaggacatacaaccaccgnttgacgaggtccanccttgatattcagttgtccacacaacatcattccagctatggcatacctgttttcctgcattcgttaaggaacaagggtcttgatagggggagccttttatcttaaaggggcagagatacttctctgagtctgagagttacttttgactttggagatctccacagggtatnacaagacatgcatcgaaggtaatagtttggggtgagcttgacctgnttacattaataatgaggtggtcagccatataatgaggaaagaagaaggagtantataatagatgaaggagagttaaactttttcttaaccgttagtttggtagggttttcccctgg

SEQ ID NO: 5539 - DNA, 389 bp, Homo sapiens
  misc_feature 125, 211, 222, 223, 224, 225, 226, 227, 228, 229, 230, 231,232, 233, 234, 235, 236, 237, 238, 239, 240, 241, 242, 243,244, 245, 246, 247, 248, 249, 250, 251, 252, 253, 254, 255,256, 257, 258, 259, 260, 261, 262, 263, 264, 265, 266: n = A,T,C or G
  misc_feature 267, 268, 269, 270, 271, 272, 273, 274, 275, 276, 277, 278,279, 280, 281, 282, 283, 284, 285, 286, 287, 288, 289, 290,291, 292, 293, 294, 295, 296, 297, 298, 302, 303, 304, 305,306, 307, 308, 309, 310, 311, 312, 313, 314, 315, 316: n = A,T,C or G
  misc_feature 317, 318, 319, 320, 321, 322, 323, 324, 325, 326, 327, 328,329, 330, 331, 332, 333, 334, 335, 336, 350, 357: n = A,T,C or G
cccttagcgtggtcgcggccgaggtactgaagccagccacgctgcgcccggccctgccccgggccttcctcgtgcctgggaggtcgttctagggatgctcctgacctccgtctcttggacctaanatggaatgtgtccccagctcagggattgcctgaaccaagaggccaggagcccccatgggccgcccagtacctgcccgggcggccgntcgaaagggcnnnnnnnnnnnnnnnnnnnnnnnnnnnnnnnnnnnnnnnnnnnnnnnnnnnnnnnnnnnnnnnnnnnnnnnnnnnnntgtnnnnnnnnnnnnnnnnnnnnnnnnnnnnnnnnnnncacacaaacatacntagccgnaagcataaaaagtgtaaagccctgggggtgcc

SEQ ID NO: 5540 - DNA, 426 bp, Homo sapiens
  misc_feature 137, 139, 142, 144, 147, 152, 155, 158, 168, 170, 171, 179,183, 229, 319, 356, 362, 382, 385: n = A,T,C or G
cccttagcgtggtcgcggccgaggtactttttttttttttttttttttggaatcacaatgtttattgatagatacaagtatataaaatcagggcatgaacatgacttgataaattaagtagacttaatttcaatacntntananggnggggnccnaanttcaaatttntnncccatttngttncacacccacaaaaaaccactttcaagggggcattaaccgatcctcntcaaaactggatcagttttttgtgcaaagtaaaccatggttttctttttaaaaaagacttggtgccccttgccccagggctcaagggatntttaaaaatctagcaacattaaaggccccattactangaggtngaaataccaggccaatattnctnttaacgggcaacaaccatcaaattacaggtttaaagaaatt

SEQ ID NO: 5541 - DNA, 465 bp, Homo sapiens
ccctttcgagcggccgcccgggcaggtactccaaagattcaggtttactcacgtcatccagcagagaatggaaagtcaaatttcctgaattgctatgtgtctgggtttcatccatccgacattgaagttgacttactgaagaatggagagagaattgaaaaagtggagcattcagacttgtctttcagcaaggactggtctttctatctcttgtacatgggccacggtgggaagccctgggtctccgacttcagtcaccctcattacctggctgggagaagagccatgaagacagtttttggtgttgagccagacttgaccagggaaggcggcagtattcccgtgaccttgacctttcaggaggccacgggcaagaacgtcatgctgctgcctgtggggtcagcggatgacggagtccactcccagaatgaaaagctcaacaggtataactacatagagggaacc

SEQ ID NO: 5542 - DNA, 447 bp, Homo sapiens
cccttagcgtggtcgcggccgaggtactttgtgctgataaagaaaactggacgttatttttggtataaattctttttctgtcttatgtccctgagaactcgtcagtcttgagtgggccttgattttatcctattacacgtgggaacattagattacttaaggcaattatattttcctatacatttctgatgtttctccaaggtgtcacaagctgactctgaagatattgttgcattagggaagaagtgtgtcattgtaaatgaagcagttcttaatttatatgcaataaaatttttaaaagcttatcttcctaaagcatatacacacgcaaaacacacccaatacactgtcatagcatacggaaaatgtaaaagggttggaaaatataagttgactgacatcaaaaagttaatattcctaaaacatcttattcattgataaatcatc

SEQ ID NO: 5543 - DNA, 418 bp, Homo sapiens
  misc_feature 55, 59, 68, 71, 74, 75, 188, 261, 300, 328, 383, 413: n = A,T,C or G
cccttagcgtggtcgcggccgaggtacgcggggagacccttttccggctgacttntganaaggttgcncancanntgtgcccggcagtctagaggcgcagaagaggaagccatccgcctggccccggctctctggaccttgtctcgctcgggagcggaaacagcggcagccagagaactgttttaatnatggacaaacaaaactcacagatgaatgcttctcacccggaaacaaacttgccagttgggtatcctcctcagnatccaccgacagcattccaagtttttaacaggttttganaactaataacaaattttgaaaattaagnaacagcttttgggaccagaaggggtttacttttgcaagcgggaagataccttganttggcttggtacctggcccgggccgggccngcttc

SEQ ID NO: 5544 - DNA, 349 bp, Homo sapiens
  misc_feature 326: n = A,T,C or G
cccttagcgtggtcgcggccgaggtacacattcccagcttacactgccttcttgtttcagttctcaatactctcaacagtgttcttttcatggtctatttaatgcacattttttgcattttgtgcttcttcttgatgatcgtgctgctcaaaaggagccccaagcatagtgctgaagtgccgtctagtgttcctaagtgcaagaaagctgttatgtgtctcacagagaaaatacatgtgttagataaactcagttcaggcatgggtttgaccgctattgaccataagtagattaaaaaaggtgtctttaaaacagaaacacatgangattatgtataggtcggtcaaaa

SEQ ID NO: 5545 - DNA, 185 bp, Homo sapiens
  misc_feature 40: n = A,T,C or G
cccttggccgcccgggcaggtacagctcaaggcggccganaaatagtaaccttccagctgcgccattccagctcccacagccactgcccaagaacctactcctggaaaattctgagcctggaaacccgagctggaaacttgggctcgaaatgccccgcgtacctcggccgcgaccacgctaaggg

SEQ ID NO: 5546 - DNA, 570 bp, Homo sapiens
  misc_feature 355, 446, 470, 559: n = A,T,C or G
cccttagcgtggtcgcggccgaggtaccaccacgcctagataattttttgtatttttaatagagacagagtttcaccacgttggccaggccggctaaactcctgacctcaagtgatctgcctgcctgggcctcccaaagtgctgggactacaggcataagccagcacacctggccgttaaactagttattttaatcatgctacacaaagaagacatttctccaaaggaaatatataaagggaaacactgttgaaataaatggaaagctaaaagtctcagcatagaagctataaaaagaaacaagtggaaattgtagaactgaaaatacaataccaaatttactgggaagggtctnaacacaatgaaaaatgacttgagggaaagaagtcagtaaattttgaagatccttgagccggaaattattttagttcttgaatgaccggaanaaaaaaaagtggaaaaaaaatggngaaaaaccttttgggggatctgggggggacaattttgaaaacaggtcttaatattcatggtcttaaggagccccaaaaaaagaacaaanttgggaagaaa

SEQ ID NO: 5547 - DNA, 430 bp, Homo sapiens
  misc_feature 196, 397: n = A,T,C or G
ggtacgcgggatgtattttaattagattgtgtctaattagtttctatctaaagtgctatgtattaggataattaatatttaattatcttccttcatgaactgtagagcttcctatggagagcatttgtggtagccacgcaaatcctttagtaaatctttcattctctttattaaccttggaataatttgaaagggnttttgaattgggactatttctttttttttcaatccactcaacatttattaaattccttaataaatcatcggaggaaagcagtgatatttttgagaatattgcaattaattattgaggatgagaagaaatggtttgacttaagatattatagataacttaagggccacttaaactttttttcccctatgtaagaaataaagngcccttggaaaataccaaaaaaaaaaaaaaaaa

SEQ ID NO: 5548 - DNA, 295 bp, Homo sapiens
  misc_feature 250: n = A,T,C or G
cccttggccgcccgggcaggtacattctgtgctgctgtaacagaattgaaggctaggaagttcaatctcaagggactggcatctagtgagggccctcttgctacgtcatcccatggtggaaggcaaaagggcaaagagggggtgagctcatccttttatataagggaaccattcctgtgataatggcattaatccattcatgaaggaagagccctcctgtttgaaccacttcttaaaggtcacacctcanaacacattgcattcaggattaagtttccaacacgtgaactctggg

SEQ ID NO: 5549 - DNA, 262 bp, Homo sapiens
  misc_feature 118: n = A,T,C or G
ccctttcgagcggccgcccgggcaggtacccacacgtgcacgcactgaggccattgttaaaggagctctttcctacctgtgtgagtcagagccctctgggtttgtgggaagcacacangcctgcccctctccagccagctccctggagtcgtgtgtcctggcggtgtccctgcaagaactggttctgccaagcctgctcaattttgggcctagctgtttttgatgaagccttttgtctggttctccttccaccctgctggct

SEQ ID NO: 5550 - DNA, 239 bp, Homo sapiens
  misc_feature 214: n = A,T,C or G
cccttagcgtggtcgcggccgaggtactgatttacgaagagaatgatcatgaagggcaaatggcggtgaagcaagaagagctggcttcaggctcagaagagaatgctgtgcctcttcctcatggtttgcggtgccctgcatgttcagagaaacttctctagtaatgaatgaactatagaaatgatccctgacaaaaaaaaaaaaaaaaaaaaanccctttttttttttttttttttttt

SEQ ID NO: 5551 - DNA, 633 bp, Homo sapiens
  misc_feature 331, 497, 498, 541, 553, 581, 586, 604, 611: n = A,T,C or G
cccttagcgtggtcgcggccgaggtacgcggggcgggagagaggccgagatggcagatgagattgccaaggctcaggtcgctcggctggtggcgacacgatctttgggaagatcatccgcaaggaaataccagccaaaatcatttttgaggatgaccggtgccttgctttccatgacatttcccctcaagcaccaacacattttctggtgatacccaagaaacatatatcccagatttctgtggcagaagatgatgatgaaagtcttcttggacacttaatgattgttggcaagaaatgtgctgctgatctgggcctgaataagggttatngaatggtggtgaatgaagggttcagatggtggacagtctgtctatcacgttcatctcatgttctttggaggtcggcaaaatgcattggcctcctggttaaacaccgtttttgggggataaatttttctcttctttaggccaatgattaaatttagggccatttttnngttttgttaaaggttaccaccccttattttttgcctggggtgntgggagaggatnccaaagaaaataaatttttaaacccgcnttccnttattaaaaagaccttgnttgcatnggcttaaaaaaaaaaaaaaaaa

SEQ ID NO: 5552 - DNA, 498 bp, Homo sapiens
  misc_feature 42, 72, 80, 102, 103, 166, 183, 234, 237, 251, 266, 283,293, 352, 370, 384, 388, 403, 439, 453, 460, 476, 491: n = A,T,C or G
cccttagcgtggtcgcggccgaggtacaaaatacatcttatnataacataggatgagaagttttcaagaatnaaaatgtnccttgaaaagtttcacacactnnttctcacaattggttaaacaatcatttttttttcttctcttttcctctcatttaaatctcatnaccctaaaaaaaaaatnccttccaatctctattaaccccccatactttaaaattaaaattaaacaaanatnttacctttaaaaanagaaaacttatattntctttttcaaaattatnaaaaaatttncccccctctttataaaaatataatctttttcccctcctcctaatttttatcaaattatnaaaccattttaaccccancaacccatttattntaanaaaaaaaaccacccnacccctccaattaaaacttaaaaaaccctcaatctnaataaacttaaaanttcctcnacaaaaaaaaatttanaaataccccctttcnccaataa

SEQ ID NO: 5553 - DNA, 474 bp, Homo sapiens
  misc_feature 312, 328, 332, 346, 347, 348, 349, 350, 351, 352, 353, 354,355, 356, 357, 358, 359, 360, 361, 362, 363, 364, 365, 366,367, 368, 369, 370, 371, 372, 373, 374, 375, 376, 377, 378,379, 380, 381, 382, 383, 384, 385, 425, 466: n = A,T,C or G
ccctttcgagcggccgcccgggcaggtacacctgaaaaaggcagaaaatgcctggaagccaagccaaaaacgagacagccaagccgatgatcccgaaacataaaacccaggagctttttagaaaagttcgaagtatcttaaataaattgacaccacagatgttcaatcaactgatgaagcaagtgtcagggacttactgttgacacagaaggagcggctgaaaggagttattgacctggtctttgagaaggctattgatgaacccagtttctctgtggcttacgcaaacatgttgtcgatgtctagtaaccnctgaaagtacctcggnccgnaccacgctaagggnnnnnnnnnnnnnnnnnnnnnnnnnnnnnnnnnnnnnnnnctcggtaccaacttgggcgtaatcatgggtcatactgttnctgtgtgaaaatggtatccgtcacaattccacacacatacnagccggaa

SEQ ID NO: 5554 - DNA, 587 bp, Homo sapiens
  misc_feature 67, 74, 99, 101, 114, 116, 117, 126, 134, 136, 142, 144,157, 165, 171, 195, 211, 218, 230, 235, 240, 251, 254, 265,267, 273, 286, 312, 317, 320, 321, 343, 348, 349, 357, 360,364, 366, 367, 377, 394, 404, 412, 421, 426, 429, 433: n = A,T,C or G
  misc_feature 435, 438, 466, 468, 471, 472, 502, 504, 505, 507, 518, 527,533, 537, 541, 555, 557, 568, 573, 580, 587: n = A,T,C or G
ccctttcgagcggccgcccgggcaggtactttttttttttttttttttttttttttttccacttttnaaatggncatttctttaatttttaaaaatatncncagggaaaagccntnngtttttacntaaggaantnccccancntttaatccaaaancctttttntttaantaggttttttcccaaaaaaccctnttatttattattcaanttccccnaaaaattttatnaaaantttanaatttctattnagnaaatctccttnanaaaagnttaaagaaattgnaaaatttccccctggaaaacctaacnggggnaanntgccccaacttttttttttccnaaaannttcaaaantgnaaancnnggaggggatntttggggattggtgggnttttagttgnataaaaantaaaggagngtttnatntggnanaancctttttattgtggccccttgtttaggncnttnntaaaaaaaatggcccaaactttttaacttngnngnccctttttggncataaaacnaggggnattnaccnatttttttttttananaaaaaaaattnttggnatcccanaaaaaan

SEQ ID NO: 5555 - DNA, 304 bp, Homo sapiens
ccctttcgagcggccgcccgggcaggtacgcgggcaaaggatagatttttgcctgtttatggggaaatcacaaccagaaatattcaacttgagaagaaactaatgggcctagcaacttaatatagagcagactcacaccagaactacattccctggccccctgcctgtgtgcttctggccaggccttggttggcaagtctgacctgagaaaaggatctgcagaaaatcagactatgggatcactttgtttgtgcattgggaatgacattctttcccaccccaggaaaacctttgggactttcag

SEQ ID NO: 5556 - DNA, 651 bp, Homo sapiens
  misc_feature 34, 35, 36, 37, 38, 39, 40, 46, 63, 153, 168, 184, 198, 200,213, 233, 245, 259, 261, 275, 283, 299, 313, 325, 343, 375,379, 387, 390, 397, 419, 429, 445, 450, 451, 466, 471, 489,503, 506, 507, 520, 523, 538, 568, 571, 574, 579: n = A,T,C or G
  misc_feature 586, 607, 610, 611, 625, 627: n = A,T,C or G
cccttagcgtggtcgcggccgagggactcagaannnnnnntttttnttgtttttcgaagaaanagtgttcactcttgttgcccatgctggagtgcaatggcaccatcttggctcactgcaaccttcgtcccccgggtttgagagattctcctnactcaacctcccaantatttgggattacaancaccccccaacacntntggccaatttttntatttttaataaaaacagantttccccacttntagccaatcttttntntaaccccttacttntagcaatncaccctccttatcctnccaaaattttaaanattacaagcatnaaccacttccccccaacnacaatttttttttaaaaagaaaacaaacctcncttnttttactnaantttttcnaaggtcaaagcaaaattccaanaaccaacttnccaagcttttttaaanaaagnncaataaacccttccncttcntttttcctaaaattaaanaaaactttttttcnggnnactttaatttccnaanaaaaaaaaaaccttnaaattattttttttaataaattctaaaaanctnaantttcnctttttnaaccaaccccaataacacaanttnnataacctcctaaananaaaccattctttctaaataaaaaa

SEQ ID NO: 5557 - DNA, 363 bp, Homo sapiens
  misc_feature 68, 108, 178, 246, 260, 292, 313, 314, 340: n = A,T,C or G
ccctttcgagcggccgcccgggcaggtacatagtaggtatatcacattctactttgatgtttaactgnaagtataaaattaaatttctcttagatcggattttacctnttgtatacgagaaactacattcttagtttatttgggttctttatgaagtttcaaaccacatgccaactgngatgcttgttttatttgaaacatttaggctgtgtccagtttgggaggtctaccgttttcctgaatttntacacccttccccnagatatacctacacttttaaaaaaatttgctncattgcatctgggactcatgnnatttatttactaccaacaacttttanaaaatattttaattggccccctt

SEQ ID NO: 5558 - DNA, 391 bp, Homo sapiens
cccttagcgtggtcgcggccgaggtacagctgccttattctccaactccatgggctgctgcccaggctctgactcagttttgccctggaaatgtcctcttgctttcccttttagtaacttattcatcaaatcatctgtaaggctgactcccacatgcccaagccttaatttggctacattttcagccggcgtggcttctctattaaatggtaatggcttcaggttaacatcaagctggacctctaagtcagaagatcgggtatgaggcaaaatcatatggtgcttgacgtacagctggaaacgctgagtattcgaggaaataacattcggtattttattctaccagacagtttacctctggatacactacttgtggatgttgaacctaagg

SEQ ID NO: 5559 - DNA, 649 bp, Homo sapiens
  misc_feature 31, 33, 36, 39, 46, 48, 53, 57, 72, 81, 87, 92, 94, 119,124, 132, 137, 146, 148, 149, 165, 168, 170, 171, 173, 179,180, 181, 182, 188, 196, 201, 204, 208, 213, 215, 220, 223,226, 227, 238, 280, 321, 344, 388, 396, 405, 410, 426: n = A,T,C or G
  misc_feature 435, 456, 458, 480, 487, 494, 499, 530, 552, 563, 569, 575,577, 590, 591, 592, 593, 594, 598, 599, 602, 619: n = A,T,C or G
cccttgagcggccgcccgggcaggtacattntnatnctntctaccnantggcngctnttccaaaatagctgntttaaactntgattnaattntnaatatttggtttcatttatcaacangccangaggcctntggtnatgaagtgntnnatatatatatatgacngantnncnctgtgnnnnccacgntacattgnaccgnctntatnttggntntcttnaanctnngccttgaaggntgacaacaattctcctgcctcagcctccttaatagctgggancacatcacatattgagccacacggcagggtaactttctgtntctgggtacatacggggttagcncatattgactgggctggtctgaaactccagagctcaatgattcnccccctanggtatcccnaaagngctgggattacatgcntgagccacnacacttggcctacattttcangntataaaccagaacatctataancagaccntgtacantggtnaggaaaaagataatggggaatccaggccggngggggtctactacagaatgcanaaacgggtctnttcaanatctangntttgcttagcatnnnnntggnnttnttggcagaatatttaanaaaaacattttaaaacacatttttttaaaa

SEQ ID NO: 5560 - DNA, 411 bp, Homo sapiens
  misc_feature 357, 366, 406: n = A,T,C or G
cccttagcggccgcccgggcaggtacattgttactatcttttaccaacacccttgagtaaggtgggataggttgaagttagtggcatgataatacttcactgaatgcacaattggtcttaacatgttaaaaaaaaagtttaattaaaaaattaagttcacaataatctaaaattttttaaatgtgctgcattttattacataaaagtagttagtaaaatgatatactactaattttaatttaattttaactaaaataaaagatattttcactagaatgcagaatattcctctgaacacttccctcattacatcattcaatattataaaattaaacacaaaggagcctcttcccttanatttttatnatgcatcctacattggaatggtctttactccttccattanaaaaa

SEQ ID NO: 5561 - DNA, 410 bp, Homo sapiens
  misc_feature 46, 81, 112, 144, 166, 177, 192, 193, 201, 209, 241, 254,292, 328, 330, 336, 349, 351, 367, 369, 376, 383, 387, 389,394: n = A,T,C or G
cccttcgagcggcccgcccgggcaggtactaaggaaggttattgcncagctccttaactgatccggggtcaagggcagaanggtcactttccccacagccaggctctgattngcctcctgtgaaagacaccatgcctagcacangctgacggggcggctgcagtcnaaccttgcctncagattatgaaccannataagtancacaattntcgtggctactttcacttcaaagtgtcatgtntattgatgcgganctttctgaatagggaggttaaagcacacctgcttgaanaaaacaaatatttcttgtgtatccgttctaagattngnaggcangcaagtcaatggntnaaaataaactttcagnangcatgtntccctgncaangntatantggcagcccctggctc

SEQ ID NO: 5562 - DNA, 328 bp, Homo sapiens
cccttagcgtggtcgcggccgaggtacggaagcgtgtggtctgcaagcgtggggtctgcgtcactgttcgcggagtttggtatcagaagttcccgggtgctgccttcagtgctgccgaatcacgtggaacgcatgaagaaagcagtgtcactgataaatgcaatagatacaggaagatttccacggttgctcactcggattcttcaaaaacttcacctgaaggctgagagcagtttcagtgaagaagaggaagaaaaacttcaagcggcattttctctagagaaacaagatcttcacctagttcttgaaacaatatcatttattttag

SEQ ID NO: 5563 - DNA, 570 bp, Homo sapiens
  misc_feature 25, 45, 90, 112, 135, 162, 200, 202, 267, 388, 438, 472,486, 503, 544, 549, 559: n = A,T,C or G
cccttagcggccgcccgggcaggtncagggacctgcacataggtngaaggaagtttaccagattgagttcaaagtattgaagatggtctntgaaaatctaaacttacgaganctcttgaagtagtctggcatttncaagaagtaacaattagttggaatatncctgtggttattaatgccaatgttagatgaaacttatntncagtagaatcctcaaatgatagcaaaagtcagacgtgccagttatgtaataattagaggcttatncaccttaatgaaatttaatcacacttagaccaatagcattatagaaagcatccacactttataatattctaagtaacaaaaattcagtttagcagccgaaagcaagcatgaaatgaggaangaaaacaggaagaagagcgaatggttatgttttctggtgccttggggaangtggggggggccctgtttaactaatgtgaataancctctaaacacttnctgaagacttaaaaganggggcaccaagaattctttaacctcttggtggatacaccantcaanggttaactgncttcatttaaa

SEQ ID NO: 5564 - DNA, 260 bp, Homo sapiens
  misc_feature 51, 57, 68, 86, 119, 124, 133, 138, 142, 154, 160, 211, 213,220: n = A,T,C or G
cccttagcgtggtcgcggccgaggtactttttttttttttttttttttttntttttnagggttttggnaatttattcacagttcangcttactcactggacttaacgacatgaggaaanaaatnacccaactnggctnagtnaactaaacattnattttnaaaaatcacaaaactgaaacaaagcaaagatgatcctaaaatttccacttntnaagaagngtaattttaaacaaataccaaaagctttatttaagcaaaa

SEQ ID NO: 5565 - DNA, 512 bp, Homo sapiens
  misc_feature 357, 390, 419, 463, 493: n = A,T,C or G
cccttagcgtggtcgcggccgaggtacaaccaacactatctccctgataacatccaaccattaattaaaatcaacctcaaaaatctgaaaacgttgtgcacaccataattactaagctaaaattactatatttctcagtttacaggaaaacaagtaaacatttactttctgcttttggacaaacagattaaattatttttaagaatgttcttgcctccatatgactcaagcttactgtgggatgcagaacacctaagtgaggaggaccaagggctctagacctccctaaaaacccaacctgcaccactccctcctaccagcagggtcctgaatgggccacctgggtatctcctccangctcacattcttgacaccagataccatgtaccncggggaggcattgaggcagccagccgcangggcttctgctgagggggcaggcggagcttgaaggaaaccgcanataaagtttttttcttctttgaaaagatanaagattaataccaactact

SEQ ID NO: 5566 - DNA, 419 bp, Homo sapiens
  misc_feature 181: n = A,T,C or G
cccttagcgtggtcgcggccgaggtacaatggacatccaataaaacaggtagatgtcttgggaactgtcattggagtgagagaaagagatgctttctacagttatggagtggatgacagcactggagttataaacttgcatctgctggaaaaagttgaatacttgagtctgtatcagctgntccaagtgcagcaagagagctcagcttaacctcacaacttaagaagctacaagagaccattgagcagaaaacaaagatagagatcggggacacgatccgagtcagaggcagtatccgcacatacagagaagagcgagagattcatgccaccgcttactataaagtggacgacccagtgtggaacattcaaattgcaaggatgcttgagctgcccactatctacaggaaagtttatgac

SEQ ID NO: 5567 - DNA, 397 bp, Homo sapiens
  misc_feature 33, 57, 94, 104, 107, 131, 136, 138, 139, 142, 143, 151,160, 161, 168, 176, 177, 178, 180, 185, 186, 204, 205, 208,214, 215, 217, 220, 230, 231, 235, 244, 247, 248, 250, 251,254, 264, 265, 267, 269, 276, 281, 283, 284, 288, 289: n = A,T,C or G
  misc_feature 290, 293, 299, 300, 301, 302, 307, 308, 324, 325, 326, 335,338, 344, 346, 349, 353, 357, 358, 359, 363, 367, 375: n = A,T,C or G
ccctttcgagcggccgcccgggcaggtactttntttttttttttttttttttttttnctttttttttttttttttttttttttttttttttttnttattttttnttntttttttttttttttggggaattnatcanannttnnttaaaaanaattttttnntttttanaaaaaaannntnccttnntttaaaaaaaattttttnntcncccccnncnccnattttcaaannaaanttaaattanaanntnnttnattttaaaanntntnatccaanaaaantnnaaannnaancttttnnnnttttnnaaaaaaaaaaaaaaannnccaaagccnttnggatcntnggnttgntggnnnatanatangggaaccnattttttttttttaaaaaaaaa

SEQ ID NO: 5568 - DNA, 376 bp, Homo sapiens
  misc_feature 188, 275, 376: n = A,T,C or G
cccttgagcggccgcccgggcaggtactgtcacctgtggccttggctataaggaggagaccgtctgtgaggtgggccctgatggagtgagaaggaaatgtcagactcagcgcttagaatgtctgaccaactggatctgtgggatgctccatttcaccattcccattggcaaggaaatttgagcttaancttgtctgagttcatacatcttggattttgacaggaagcttttcccggttcacctggagaacttggctcgaggttgtcattcttccnacttgaaccaatgaaggtctttcaaaaccctttttcaagccaacatcccactttgttgaaagtttttaaaatattgcttcaagggaagtattgacttcttn

SEQ ID NO: 5569 - DNA, 579 bp, Homo sapiens
  misc_feature 60, 61, 62, 121, 136, 139, 140, 143, 144, 145, 146, 147,148, 159, 161, 162, 164, 165, 166, 167, 168, 185, 188, 189,190, 193, 194, 195, 196, 197, 199, 200, 202, 204, 207, 210,226, 227, 229, 232, 234, 251, 254, 256, 258, 260, 263: n = A,T,C or G
  misc_feature 266, 268, 269, 271, 285, 286, 288, 289, 291, 292, 296, 299,300, 303, 304, 305, 311, 312, 317, 336, 337, 339, 341, 343,349, 352, 353, 355, 356, 362, 363, 366, 369, 379, 380, 381,382, 383, 385, 396, 404, 405, 407, 408, 415, 419, 420: n = A,T,C or G
  misc_feature 421, 423, 425, 429, 434, 435, 437, 438, 440, 441, 442, 443,444, 445, 448, 449, 450, 458, 459, 460, 461, 462, 469, 475,489, 490, 491, 493, 494, 495, 496, 497, 499, 504, 507, 508,509, 511, 512, 513, 517, 525, 527, 533, 534, 544, 545: n = A,T,C or G
  misc_feature 550, 552, 556, 558, 563, 564, 571: n = A,T,C or G
ccctttcgagcggccgcccgggcaggtacttttttttttttttttttttttttttttttnnnttttttttttttttttttttttttttttttttttttttttttttttttttttttttttnttttttttttttttnttnnaannnnnntttttttttantnntnnnnnttttttttttttttttnttnnnttnnnnnannananagnganaaaatttttttttttnnanaananacaaaaaaaaaaaaaanaantntngnttnttntnntnaaaaaaaaaaaagnnannannatanttnnttnnnaaaacnnccaantaaaaaaaaaaaaaaaaanncncntngtgggnatnnanntttggnntanttnttttttgtgnnnnnanaaaaaaaaaanaaaaattnntnntggaatnaaannnantnaggngatanntnntnnnnnnaannngaaaaaannnnngaaattnttatgnaaaaaaaaaaaacnnngnnnnngnccccnttnnntnnngggnaaatttcncnaaaagnnaagagggggnntgganangggncnctttnnaaaaaanaaaaaaaa

SEQ ID NO: 5570 - DNA, 298 bp, Homo sapiens
  misc_feature 52, 111, 113, 114, 115, 116, 124, 133, 134, 139, 143, 144,148, 154, 156, 157, 165, 166, 174, 192, 195, 203, 204, 215,216, 217, 218, 222, 229, 230, 231, 232, 233, 234, 236, 238,240, 242, 256, 257, 266, 268: n = A,T,C or G
ccctttcgagcggccgcccgggcaggtacttttttttttttttttttttttngggttttttttttttttttttttttttttttttttttttttttttttttttttttcccncnnnnaaaaaaanttttttttnnttttnaaanngggntttttntnnaaaaaaanntttttttnaaaaaaaagggggggggnaantttttttnnaaaaaaaaatnnnntttnggggggnnnnnnanantnanaaaaaaaaaaaaannccccccccntnaaaaaaaaaaaaaggggggggttttttttt

SEQ ID NO: 5571 - DNA, 580 bp, Homo sapiens
cccttagcgtggtcgcggcccgaggtactatgacaaacgtgctttattcttctaacgcagtaagaattaggtggaattttttccttcaaccaagtgcaagaaagccctgtgtgtcttggtttagttatggtttcatttctagccatacaattgatgaattgtgtacttactgagctatagcatagctgcttagttgtttttgagattttttagtcaacacataatggaaacttctttcttctaaaagttgccagtgccacttttaagaagtgaatcactatatgtgatgtaaaagttattacactaaacaggataaacttttgactccccttttgttcatttgtggattaagtggtataatacttaattttggcatttgactcttaagattatgtaacctagctactttgggatggtcttagaatatttttctgataacttgttccttttcctgactcctccttgcaaacaaaatgatagttgacactttatcctgatttttttcttctttttggttatgtctatttctaattaaatatgtataaataaaagttacattttaattctgtctaaaaaaaaa

SEQ ID NO: 5572 - DNA, 304 bp, Homo sapiens
cccttagcggccgcccgggcaggtacatgtgcatatacaggtttaacacaggtctgatcctaggtgttcatttagaacatagtttccagctgtaagaaaatttaaaaccctcattgtaagtgtattactagtaataggaacttgcttgctgctcccctgtatattatatttgctccttcaaatgataaaaggttttgtaagctaccatggttcagcagaaaacttcaacacaagtatattacataaaatactatcactctgtctcacaaaaagactcaaaaagtaaaaaaaaaaaaaaaaaaaa

SEQ ID NO: 5573 - DNA, 326 bp, Homo sapiens
ccctttcgagcggccgcccgggcaggtacctggggagctgagaggggggttgcaaattggagtggtgtggatccaggtgaggttcatagctggccattgtgtgaggtgccaaggctgctttggttttaaagctagatgtcctagctgcgtctggtccatcttttccataggagatgcaggagaggaagcagctgaatcactgtggtggcttggaaaatgcttggtcagccgatgcttgccaccacccaatgatgacttctgggcagctatttgtggaaaccaagtctttaacatcccttctacctgtagcaaggttcctaggtaac

SEQ ID NO: 5574 - DNA, 344 bp, Homo sapiens
cccttggccgcccgggcaggtacgcggggacacagaggccaggccttagcacggctcagccatgagcaacaggagtagcttttcccggctcacctggttcaggaagcagaggaaagctgtggtcagcaccagcgacaagaagatgcccaacggaatcttggaggagcaagagcagcaaagggtgatgctgctcagcaggtcaccctcagggcccaagaagtattttcccatccccgtggagcacctggaggaggagatccgtatcagatccgccgacgactgcaagcagtttcgggaggagttcaactcattgccatctggacacatacaaggaacttttgaac

SEQ ID NO: 5575 - DNA, 415 bp, Homo sapiens
ccctttcgagcggccgcccgggcaggtacggaggcgtcttacagctctcttgttctcactgatgtccttcttatgcttgcgcttaaactcagcaataaaatggttgaccattcggttgtcaaaatcttctccacccaagtgggtgtctccagctgtagacttgacctcaaagattccatcctcaatagtgaggattgacacatcaaaagtgccacctcccaggtcaaagatgagcacgtttctttctgctccaacctttttgtctaagccgtaagcaatagcagcagcagttggctcattaataattctaagtacaaccatatccagttgtctagtaatttaatgcctggctgtgactactcactttttaaggatggtattgagcctatgtgggaagatgagaaaaacaaacggg

SEQ ID NO: 5576 - DNA, 378 bp, Homo sapiens
cccttagcggccgcccgggcaggtaccccgcaaacacatacacctactacgcacccatagagataaaaaaaaaacttaccatgggacaaattggcatcataagctgcctgacatgatgcattgagaactacacattacctaggtaggatttttccaaaaaacgttaaactttgtgtaatccaaatccaaatagagggtcattctcaggtcaaagtttggagaggactattccacctcctagatcacactttccttcccgaaagccgcttctctctccggcctctcccctcctcctccctcatctgtttggcgggaggcttcctcacattgccgctccgcgtaagtccccgcgtacctcggccgcgaccacgctaaggg

SEQ ID NO: 5577 - DNA, 103 bp, Homo sapiens
  misc_feature 75: n = A,T,C or G
cccttagcgtggtcgcggccgaggtacactttaaccagctagggtttttgtctggatctttaaagtatattgatnaaaaatgcacatacacatttattttttc

SEQ ID NO: 5578 - DNA, 606 bp, Homo sapiens
  misc_feature 44, 53, 56, 71, 73, 82, 89, 103, 105, 110, 129, 165, 168,169, 183, 184, 185, 233, 249, 261, 267, 269, 274, 280, 288,294, 333, 339, 345, 377, 394, 395, 397, 414, 419, 421, 428,440, 453, 464, 467, 470, 476, 492, 508, 537, 552, 563: n = A,T,C or G
  misc_feature 574, 603: n = A,T,C or G
cccttagcgtggtcgcggccgaggtactttttctcttttttgtngatcaatcnggnatcagaaaatatatngngagctaggntgacttnttatttgagagatncncaatntagcataacagttatattntgtacgaaccttggagtccagatgggtttaaacctncanngagggtggatttannncccgtatttaaaaatattgaatttaaaaattaccccaaaaaattttantttttgaaggcccttnttccaaaaaaanaggttnanatttntttttncaaaactnaccaantttttttaaggctttaattttaaccttaattaaaatttnccaagntttccnccaaaaaattttttttttcttaattccaattntttaaaaccccccaagnntntttaattaaattttttnttggntnaggcccnattttccaattncgggctttggaanccaattttaanttncanattttntttttaacccccccantccccttttaaatttnttaattttttaattttttaaaaatttttnttaaaaaaaattttnggcagggttanttaagcaattnttttttttcctttcttccccttccaattnttt

SEQ ID NO: 5579 - DNA, 206 bp, Homo sapiens
  misc_feature 84, 113, 128, 180, 189: n = A,T,C or G
ggcaggtacgcggggctttttcgcaacgggtttgccgccagaacacaggtgtcgtagaaaactacccctaaaagccaaaatggnaaaggaaaagactcatatcaacattgtangtcatttggacaccntaaattccgggcaagttcaccactactggccatctgatctataaaatgcagntggcattcnacaaaaagaaaccattg

SEQ ID NO: 5580 - DNA, 420 bp, Homo sapiens
  misc_feature 7, 10, 11, 13, 15, 26, 33, 38, 41, 48, 52, 55, 56, 57, 61,62, 66, 72, 82, 83, 88, 89, 94, 95, 98, 101, 110, 115, 120,121, 127, 132, 148, 159, 161, 180, 186, 189, 191, 193, 194,208, 211, 223, 224, 229, 243, 396: n = A,T,C or G
cccttancgnngncncggccgacgtncgcgggngctanttncattatnaatnggnnngctnnaatncacttngaaactattnntctgnnttccnnganctnaaatcttanatttnatgtnntattangctgnaaaactaccaaaatantaagcattgantnaatgcccattcaaaaaaanaatgcnctncngnngctgaatttaagcnggnattttaaggttnngtggntcctcggccacaangggtgatgtcactgatagaacgaagctgagtttccaagggtttggggctgtgcaagagtaaacactagagcttgagttgttatccagctggcaagcacggaagtctttgaagaatgtaatgtaaaaagggaaaagaatgtaaagctttttgtncctcggccgcgaccacgctaaggg

SEQ ID NO: 5581 - DNA, 387 bp, Homo sapiens
  misc_feature 364: n = A,T,C or G
cccttagcgtggtcgcggccgaggtaccctgcgctggctccgtgaaccttagggacaacaccgggacacccgcgaggccggaaaatggactcagtggcttttgaggatgtgtctgtgagcttcagccaggaggagtgggctctgctggctccttcacagaagaaactctacagagatgtgatgcaggaaacattcaagaacctggcatctataggggaaaaatgggaagacccgaatgtttgaagatcaacacaaaaaccaagggacgaaaatctaagaagccatacggggagagagactcttgttgaaggtaaagaaggtagtcaatgtgcagaaaacttcagtcccaatctcagtgtgaccnaaaaagactgccggagtaaaaac

SEQ ID NO: 5582 - DNA, 384 bp, Homo sapiens
  misc_feature 90, 102, 169, 204, 227, 237, 283, 346, 352, 384: n = A,T,C or G
cccttcgagcggccgcccgggcaggtactttttttttttttttttttttttttcgtttggggcacttttatttacagccaaggaaaaaanaaaactagcatntatttaaaatgggaaagcatgtttgtatgaaaacaaatatttcatcatcacttattttctatactgnttgcaactaagttttacatttttcattttcaacanagatttgaattttaatgtcccanaaatataaanaagatggcattaaaatgtcctatatgttggcagtcctaccctgaanactttttttgcttatcttttgttctgaactacagtcttcgcagaaactaaattagtgactggncaacanaagaaaatagaccatcctgggctaaaaatggn

SEQ ID NO: 5583 - DNA, 310 bp, Homo sapiens
cccttagcggccgcccgggcaggtgagaggcagaaggactggaaagagggcacagtgaagggccatggtgggggataccaggcaacactggcaagcaagtggacagtgatgagtgaggaggtagaggaaggtcccctcttagctgggacattatgcctctataggacgctgaacaaagtaacctgcggaggtgttactttgtgggaatgtagactgtgaaactgaaggaactgttttatccacctccccgtagtttgctctgtgctgaggctgctgtacctcggccgcgaccacgctaagggcgaattcc

SEQ ID NO: 5584 - DNA, 483 bp, Homo sapiens
  misc_feature 134, 181, 183, 433: n = A,T,C or G
cccttagcgtggtcgcggccgaggtacgcgggagacttcgggcttgttcgctggtggcgtcggagccgagccggactggtcaggatgatcacggacgtgcagctcgccatcttcgccaacatgctgggcgtgtncgctcttcttgcttgtcgtctctatcactacgtggccgtcaacaatncnaagaagcaggaatgaaagtggcgctttcttccgccccagggttccaggacatagtctgaggcaagatggagggtatgaaggggccttcacacttcacttattcctttctacccatcacaaacattcaaagcagctacacctggatttttccaaacaacttttatttctcagagtcttccttaatcctatggaacaaagaagctgccacttgaataagggcccagtatagggggcttgctttttttactcnctccccccaatataaaaatttagaactttcaaaaaaaaaaaaaaaaaaaa

SEQ ID NO: 5585 - DNA, 168 bp, Homo sapiens
cccttggccgcccgggcaggtacgcgggaaggttggcagagtcagcatatatgattccaaaaggcaatccgggaaggctaaggagacaagcgtcaactggtgtctggctgatggctatgacctggagatcctggacggtacctcggccgcgaccacgcttaagggcga

SEQ ID NO: 5586 - DNA, 592 bp, Homo sapiens
  misc_feature 38, 530, 536, 577, 583: n = A,T,C or G
ggtactgaaaaccacttccagagtctaaagcagctcanatgttatctctgggggaattagtgttcccctcatttagcaacctccataccacaaggtctctgtctgtagttactgggattatccagatacactatcaatgatacaaattcataggagtattaatgcatttctttaaacacaacttgattaagaagcaaatatgttaagcagttttctttttctgctgctaaattacagttagacacttcagtatcttctctttacatgtgtatataaattagtaagaacctgcatccaaagcaatgtagtgtgtgtatgtatctatatatatttattctaactcagcacttcagaagcctttttgagttacaacaatattttagtttgcctcatctgtagaggtaaaatttctatattaccaagctccagaggaatatgatattttacaggccaattttctggccgtagtccctggggcattcatttgctggcctccatgggaatgctgttaaaacattgttaccgcaganaagaangctaccaggacagcatttataattgttgaatgggagccttnttcctntcccttcac

SEQ ID NO: 5587 - DNA, 317 bp, Homo sapiens
  misc_feature 114, 115, 116, 118, 119, 121, 124, 126, 129, 130, 131, 136,137, 149, 162, 163, 165, 167, 169, 170, 171, 174, 175, 182,188, 192, 198, 206, 211, 214, 216, 218, 219, 229, 231, 234,235, 249, 255, 258, 272, 274, 275, 276, 280, 281, 286: n = A,T,C or G
  misc_feature 288, 293, 297, 298, 303, 309: n = A,T,C or G
cccttagcgtggtcgcggccgaggtactttttttttttttttttttttttttttttcttttttttttttttttttttttttttttttttttttttttttttttttttttttttnnnannanggnanttnnnttttnnaaaagggggccnccctgcttaaatnntnancnnnggnnccccctnaacaangganggaaanggttttantcccnaananannccctaccttngngtnncccccccaggggcnggggtnggncccctttttttaantnnncccnntgggntntttgnaaannctttnccaaanaaggaagg

SEQ ID NO: 5588 - DNA, 348 bp, Homo sapiens
  misc_feature 95, 117, 123, 125, 128, 157, 196, 205, 253, 258, 282: n = A,T,C or G
cccttagcgtggtcgcggccgaggtaccatgttttataaacctcttgatttccagcaacatactatagaaaacacctgctactcaaaacacaacnttctcaggtgtcatccatttgntggcgngnagnagacaaccatatcaattatcttggtatgntgcaagcttttcaaagatagccctgaaacttaaaaagtntggttgcanttagttgtatctgatggatataaatttgcctcctagttcactttgtgntcaangagctaaaactgtgaacctaactntctcttattggtggggtaataactgaaaataaagattttattttcatgctccacttttctttaaaa

SEQ ID NO: 5589 - DNA, 399 bp, Homo sapiens
  misc_feature 210, 278: n = A,T,C or G
cccttagcgtggtcgcggcccgaggtaccttaggatagaacatgggcttagaacacctgtaagcctgttttaaagatggcccagcaaactggttgcatgtcttgggagcttgaccttgtaaccatttggcagtagtttctcttggtctccaccatcacaacagtggccctggtcaagggttcaattcccggcttaagggaatgatacttnatcttcttgctgctaagtattctatgtattatgtgtgtgtaaacataaaaagaagctttaattaattngtttaaaaaattaataaagagccttaaatcaaacattttgtcacaaaaattaaaaagtataattgccttttagttcacgtgacttaaataatcttttggggaaataaaatctttggtctaa

SEQ ID NO: 5590 - DNA, 413 bp, Homo sapiens
cccttagcgtggtcgcggccgaggtacaggtttttatgtgaacatacattttcattttctgggataaatgctcaaaagggcaactgttgggttgtatggtaaacacatatatttttgtaagaaactaccctactctttttccagagtggctctactttttacatacagccactcatacaattcagacagcaatgtatgattgatccagtttcttcacatcctcaccagcatttggtattactactattttttatcttaaccattcacatagatgtgtgtaatgataccacatgtggttttaatttgcatttccaatggctaatgatgttgagtatctttttgtgtgctaatttgccatctatgtatcctcttcggtgaaatgtcttcatgtcttttgtctattttctatttag

SEQ ID NO: 5591 - DNA, 484 bp, Homo sapiens
  misc_feature 22, 24, 311, 328, 334, 343, 469, 472, 476: n = A,T,C or G
cccttagcgtggtcgcggccgntntaccatttgcctcccgggctcaagcgattctcctgcctcagcctcccaagtagctgggattacaggcacctgccatcatgcccggctaatttttgtaattttagtagagacagggtttcaccatgttgcccaggctggtttcggaactcctgacctcaggtgatccacccgcctcggcctcccaaagtgctgggattacaggcttgagcccccgcgcccagccatcaaaatgctttttatttctgcatatgttgaatactttttacaatttaaaaaaatgatctggntttgaaggcaaaaattngcaaantcttgaaanttaagaaaggccaaaaatgtaaaggagtcaaaactataaatcatagtatttggggaagtgaagactggaaagcttaatttgcatttaattcacaaaacttttatactctgtcctgaatatacattnttntttntttaaaaa

SEQ ID NO: 5592 - DNA, 562 bp, Homo sapiens
  misc_feature 17, 71, 76, 156, 172, 195, 222, 227, 231, 243, 252, 256,278, 280, 287, 289, 300, 304, 317, 319, 325, 339, 361, 377,381, 396, 402, 415, 431, 441, 462, 475, 483, 484, 487, 488,490, 496, 504, 508, 510, 515, 520, 526, 531, 556: n = A,T,C or G
ccctttcgagcggccgnccgggcaggtacgcggggctcttcgttaagtcggccttcccaacatggcgcagnctatnaacatcacggagctgaatctgccgcagctagaaatgctcaagaaccagcttggaccagatgtatgtccctggggaaagcntgcattgaatgtgggnaacaaccgttgctcatcggatgnggggggaacctggggggtacccttccngggcnccgncgaccccaaccnccttaaagngggnccggaaaatttccccaggcccncnaactttngnggccggggccnccgnttttaaccttaangntggggnaatcccccgaaagncctcccggggttaaccccaaangccttttgggggccgntaanaattcaattgggggngaccantaaagccttggtnttttcccttggttggntggaaaaaanttttggttttaatttcccggnctttcacccaaanttttcccnnccnncnaaaacnattaaccnggangnccccnggggnaaaagncccantttaaaaaggtttggttaaaaaagncccccc

SEQ ID NO: 5593 - DNA, 521 bp, Homo sapiens
ccctttcgagcggccgcccgggcaggtactgaattaaaaatacagaacctactaacactactgtattaacaagctgactcctataatcttttggagatggcagatgatactggtttttaaaatacccaatcacatatatgcattcaagaaaatattttgtctttatttttattacaagtgcgctagctcccatttcctcagtgctctttagcaatgagtttttatgttaaacacttccaactgtcagtattaccatgaaatcaacattagaaaataaggtagaaaactgagtgttttgcttaaaaaataaaaaaggattaaatagctgttgtatccaaacatcacgttctgcttccatctctacattccactttccccattcttggagattaaaaaaacagggttaggaactttaatatctgacagactacaaagggcaaagacgtggcacatggccagtgccacacctacctggttgccacaacattctgaaacagaccacactttcaggaaaatgacta

SEQ ID NO: 5594 - DNA, 332 bp, Homo sapiens
  misc_feature 57, 145, 153, 163, 178, 179, 189, 199, 208, 215, 219, 220,221, 234, 236, 239, 250, 251, 252, 253, 263, 272, 288, 289,290, 291, 296, 297, 298, 307, 322: n = A,T,C or G
cccttagcgtggtcgcggccgaggtacttttttttttttttttttttttttttttanattttttttttttttttttttttttttttttttttttttttttttttttttttttttttttttttttttttttttttttaaaaaaatnaaaaaaantttttttttnaaaaaaaaagggggnncaaaaaaaantttttttttnaaaaatttnccccccnaaannncttttttttttgnanccnggaaaaaaaannnnttaaaaaaantttttttanaaaaaaaaaggttttnnnnttttnnngggaaaaanatttttttaaaaaanaaaaaaaaaa

SEQ ID NO: 5595 - DNA, 299 bp, Homo sapiens
ccctttcgagcggccgcccgggcaggtacacttcaccacaaatacagagaagcttcaaaaactgaagctcgaatatgagactcaaattaagaagatgctatgctcaaaagatagcctgggactaaaagaggaactgacagatgaagacagagaaaaggttgcagtgcacgaggggattaactcaggaacagccatgtcaagaggattgtatcaaccagcaacaatctttatgggccgccaaatgtcagccatcttaagcatgagagatttcagtacctcggccgcgaccacgctaaggg

SEQ ID NO: 5596 - DNA, 434 bp, Homo sapiens
ccctttcgagcggccgcccgggcaggtacgcgggggaggcgtcagtgtgaagggaaggctaaggacgcatcggtgctggagagttgagaatatgccttccctccacccccaacccagtcaccttatttgaaaaaaaattaaaaaacaccttttatttaaaaacctaaccctggaagtttgctcgctgcctgaaaatcatatgcgtggtttttcctgtttcctgctctgtagctgacatcaggggagcaacgtgaacgcaggaaaatggaaatcaacatttgaaacttttaaatggaagctttattggggttccacatatgggaaaactgcaaatagcagaagtatgtgactcaataaattattctggagtgaccacatcctctaactgccttccaggacaagacggaaaaatgtgaacaatgctcctgaaggcc

SEQ ID NO: 5597 - DNA, 675 bp, Homo sapiens
  misc_feature 26, 37, 41, 47, 51, 52, 54, 55, 57, 61, 62, 69, 70, 73, 74,75, 80, 83, 89, 94, 97, 107, 112, 113, 115, 118, 121, 124,133, 136, 165, 180, 187, 434, 447, 465, 478, 480, 502, 529,538, 577, 602, 630, 639, 643, 655, 663: n = A,T,C or G
cccttagcgtggtcgcggccgagganctttttttttntttnttttgngganntnncntttnnttttttnnacnnnttatnttnaccttngcctnttngagcttcacnttctnntntanaangcncacatgganaanattataatacaatgttgtaaatccaatantaaaagataaccagnttatttnggggagcaaagagaaagggtccctaaccccagactgcctgcgaagaggtgaaatggaattgaatgggattatggtcagccaaggcttcctagtggagctgctacctgaactgagttttaagaggggtaggaaagaaaaaatgtagtgggtcataatggcattccaaatacaggggacacaaacagctctgtgtttatgaactacaaccagttgttgacttttgtttcaagtggctccccttccccantgctgtgtggacnatggactgaaaaaggaanaaggctgggagcnanggaccagtaagctggagcaacnaaatgcacgtgagaatatggaggcctnaactctgcngggggttggacaaaccattagaagagcccaagagccaanaaattcgtccaaatagtttatccancacccaatttttttttttaaaaaacagnaggctcacntttntttaacccaagncctggaantaccctgccccg

SEQ ID NO: 5598 - DNA, 287 bp, Homo sapiens
  misc_feature 58, 61, 80, 81, 102, 103, 107, 110, 111, 113, 116, 117, 118,119, 120, 123, 145, 146, 147, 152, 170, 171, 172, 174, 175,176, 177, 178, 179, 188, 189, 190, 194, 196, 197, 198, 206,207, 208, 209, 210, 213, 214, 218, 219, 221, 222: n = A,T,C or G
  misc_feature 223, 224, 225, 226, 227, 232, 233, 235, 236, 237, 238, 243,244, 245, 248, 249, 250, 255, 257, 258, 261, 264, 265, 266,273, 274, 278, 283: n = A,T,C or G
cccttagcgtggtcgcggccgaggtacttttttttttttttttttttttttttttttnccnttttttttttttttttttnntttttttttttttttttttcnnaaanttnngnggnnnnnaangggggggggaaaaaaaaaaaannnccccnaaaaaaaaaaaaaaaaannntnnnnnnaaaaaaaannncccngnnnaaaaaaannnnnaanngggnncnnnnnnntttcnncnnnnttttnnnggnnnaaaantnnccnttnnngggcccnnaaanttttnaaaa

SEQ ID NO: 5599 - DNA, 586 bp, Homo sapiens
  misc_feature 257, 288, 419, 485, 494, 516, 533: n = A,T,C or G
cccttagcgtggtcgcggccgaggtacagaggggaaataatgaatagtattaaagaaacattctcgtcttcctttacctttaatcccctaatacctagtctactttttaaattttcagacttcactgctttttgaattcataattctaattttcacattattgttaatggaaaatcatatctaataaaggttttagttattcccatgcacagtatgaaaattctcatttgctgagggtttgtttcgaagaaaatgtnttggcatgtctttgagaacatgttttattgnctcctgtgtcatataatccaaactaatctccgtttacagactttaacttggaattagaccttataattaaactatttaaataggtgttcaaaagataagtttctaatgcatcaaaatatataccctcaagntttcatggatttcctttaaccattattaatttgggatagatcaaagaatcttaacatgttttcaantttctaaangaaggctgcaagattttttggnaaacctttttggaatgnattttaccaatattctcttggtaattagcctacataagggacctggccttttt

SEQ ID NO: 5600 - DNA, 561 bp, Homo sapiens
  misc_feature 460: n = A,T,C or G
cccttagcgtggtcgcggccgaggtactgctcggaggttgggttctgctccgaggtcgccccaaccgaaatttttaatgcaggtttggtagtttaggacctgtgggtttgttaggtaccctaaaacctagtatctttttctcttctatggaaaatccgaaggtctaaacttgacttttttgaggtcttctcaacttgactacagttgtgctcataattgtccttgcctttccagcttaattattttaaggaacaaatgaaaactctgggctgggtggagtggctcatacctgtaatcccagcactttgggaggctacggtgggcagatcatctgaggccaggagttcgagacctgcctggccaacatggcaacaccccgtctctaataaaaatataaaaattagcctggcatggtagcatgcccctatagtcccagctgctcaggaggctgaggcatganaatcgcttgaacctaggaggtggaggttgcattcaactgagatcataccacttcattccagcctgggtgacaagagcaagactcttgtctcaaaaaaaaaa

SEQ ID NO: 5601 - DNA, 309 bp, Homo sapiens
cccttagcgtggtcgcggccgaggtactttgggcttcatcatggaggactacctgcagggttgtcgagctgctctgcaggagtcccgacctctacatgttgtgctgggaaatgaagcccgtgatttggactccacagtgtctgctcttgccctggctttttacctagcaaagacaactgaggctgaggaagtctttgtgccagttttaaatataaaacgttctgaactacctctgcgaggtgacattgtcttctttcttcagaaggttcatattccagagagtatcttgatttttcgggatgagattga

SEQ ID NO: 5602 - DNA, 130 bp, Homo sapiens
  misc_feature 84, 89, 130: n = A,T,C or G
cccttcggccgcccgggcaggtacttttttttttttttttttttttttttggggttttactgctaatcactctggggaaaacanaggcnggttggggagggataacaagtaacaaacatgggggagtgtn

SEQ ID NO: 5603 - DNA, 420 bp, Homo sapiens
cccttagcgtggtcgcggccgaggtacaggcaaccatcacagatgtccatcaaagctggattagatgaagacaaacaacgcaggctttgaggataaactgaaggtgcagctcaaaagtttccttttcttatccaagggcattataggaccattgtcttcctccctcatgaagacagacttgttcctgtcctctttggctactgaaatgcagctctaatgactctgtcactaagaggttgagtgggccgaaagttgtctcccaaaatcccatcacagccttccacaagttctgcccccttaacatgtgtccccagccttcgaaattcttctatagaaataaccggcatccccactttacgtccagactttccattctccacacctgtagctgggatatagttaaagggtatcggaataata

SEQ ID NO: 5604 - DNA, 366 bp, Homo sapiens
ccctttcgagcggccgcccgggcaggtacgacctggacggaaatggctatatcagcaaggcagagatgctagagatcgtgcaggcaatctataagatggtttcctctgtaatgaaaatgcctgaagatgagtcaaccccagagaaaagaacagaaaagatcttccgccagatggacaccaatagagacggaaaactctccctggaagagttcatccgaggagccaaaagcgacccgtccattgtgcgcctcctgcagtgcgacccgagcagtgccggccagttctgagccctgcgcccaccaatcgaaattgtagagctgcttgtgttcccttttgattcttctttttaacaattttttttttttg

SEQ ID NO: 5605 - DNA, 250 bp, Homo sapiens
cccttagcgtggtcgcggccgaggtacgcggggatatttgctaagagcaccatgcgcgcagcagccatctccactccaaagttagacaaaatgccaggaatgttcttctctgctaacccaaaggaattgaaaggaaccactcattcacttctagacgacaaaatgcaaaaaaggaggccaaagactttgtaagtttgttcagagtctcactttgtgaattttaacaaattatctttaatggcagaaggat

SEQ ID NO: 5606 - DNA, 281 bp, Homo sapiens
ccctttcgagcggccgcccgggcaggtaccccgggttgtggggcctcaaatactgctttgccttgctctgctaaccagctgcattttacagatcccagtatgaactctagtgttcttcagaacatacctttaagaggggaagccgcgcactgccacaatgcaaacactaactttgttcacagtaacagtccagtccccaaccaccatcttgcaggtttaataaatcagattcaggctagcgggaactgtgggatgctcagtcagtcgggcatggctttagg

SEQ ID NO: 5607 - DNA, 149 bp, Homo sapiens
  misc_feature 32, 40, 42, 43, 46, 47, 48, 49, 50, 51, 52, 53, 54, 78, 111,113, 114, 117, 119, 125: n = A,T,C or G
cccttagcgtggtcgcggcccgaggtactttntttttttntnnatnnnnnnnnntttaaacaatcagtaaatttattnaggacaagaatttaccatataacatttttttantnnaantnttgctncccccttttttccccttttttaaa

SEQ ID NO: 5608 - DNA, 780 bp, Homo sapiens
  misc_feature 652, 695, 720, 723, 732, 768, 772, 779: n = A,T,C or G
cgccagtgtgatgggatatctgcagaattcgcccttagcgtggtcgcggcccgaggtacattagtatgcttgatgatgtctcacagccctctcaggttttttttcctaaatattttttttctttcttctcctttggataatttcaattattttctcttcaaattcactgttctcttcttttgcatgcccaaatctttgttgaatccctctagtgggttttccatttcagggattatactttttagctctagaatttgtttggttcctttttataatttctatctctttattgatattctcattttgttcatgcatggttttcctgatttcctttaagttcttcgccatggtttcctttaactcgctgaacatacctaaagaaaggttgatttaatgtctttggggtaataatccaatgtctgggacttcctcaaggatggtgcctgtcaattttttttcctgggaatgggaccatgggttttctatttctttttaatggtttggaaatttttggtgagaaccgggacattatgaagtattacattggtggtaactgagaatctaattctggcatgcctcaaaaaaatgctgattttgctttattgagggctggagccaaactatttggggactttttcaactatttttgggnaagggggtattctttgcagtatggggcaagtgaaagtttctgntggggaaatcctctgggggtaaccnagngacccaaanatttccctaaatatcgggcttgcccaaagggggggntttnggaaaana

SEQ ID NO: 5609 - DNA, 324 bp, Homo sapiens
cccttagcgtggtcgcggccgaggtaccctggagaaacttcttcacatcagcaataatttctctgaagacaaattggtctttctgaacctcaaaccaccccaacttagtgattttagcaatgacttgaataagagcttggatgacaaagggagccagcttgggctgtgatgccacgtaattcagaatgtagtttctgatgtccatcctctgctcaacaggtaaaggactgactcggctgacaagttttgaaagacatgttgctgcaaggagctgagcataggatgttgttccttgttctaataaaagttgacacttgctgagac

SEQ ID NO: 5610 - DNA, 206 bp, Homo sapiens
  misc_feature 40, 56, 72, 82, 83, 124, 127, 152, 155, 158, 175, 177, 189: n = A,T,C or G
ccttagcgtggtcgcggccgaggtactgggatttatatangcatgagcccactganccctggcccctgaaancgtttttctnnaaaggccctcagtgagataaattaagaatttgggcaatctnctntccctggggccagggatctctctanaanaancccttgcccctctgttngnaggcacagtttnaaaataaggaggaggag

SEQ ID NO: 5611 - DNA, 607 bp, Homo sapiens
  misc_feature 33, 49, 77, 81, 87, 90, 101, 107, 118, 139, 142, 154, 159,161, 166, 176, 184, 190, 191, 194, 196, 199, 203, 204, 221,225, 234, 235, 237, 252, 256, 268, 273, 275, 287, 288, 292,296, 297, 307, 308, 311, 314, 319, 335, 336, 352, 355: n = A,T,C or G
  misc_feature 356, 357, 358, 363, 364, 373, 377, 379, 380, 383, 384, 388,394, 399, 401, 406, 410, 415, 416, 418, 419, 420, 426, 435,436, 437, 443, 448, 454, 456, 457, 458, 462, 464, 465, 466,469, 482, 483, 484, 493, 495, 506, 508, 516, 518, 533: n = A,T,C or G
  misc_feature 537, 539, 540, 544, 549, 557, 564, 569, 570, 571, 572, 575,582, 591, 592, 603: n = A,T,C or G
ccctttcgagcggccgcccgggcaggtactttntttttttttttttttntttttttctttacttttttttttttttntttnttattnttnaacttgtttantttttnttttttttttntttttttttttgttttttgcnaanaaaaaaaaaaanatttntnccccnaaaaaaaaanaagggggnaaaaannttncntantttnnaaaaaaaaaaaaatttnaacnaaaaaatgnntntttttttttttaaangggnaaaaaaattttntttgntnctcaaaaaaatnntttnttgnnaaaaaaaaannctnttnaaaangccctggggttttttnnttttaaaaaaaaaaanaannnnggaannttttttttntggnannggnnggtntaaacncccananaaaantttnttttnnannncctttntttttttannncaaccntatanaacccncnnngccncnnnaanttggaaaaaaaannnttttagggngnattttatttanantgaaaaananttttttttttttccnaaancnnaaanaaaanttggggtntttattnccttnnnnggncccccanaaaaaaaannttttttttttnaaaa

SEQ ID NO: 5612 - DNA, 348 bp, Homo sapiens
  misc_feature 137, 152, 162, 166, 167, 195, 197, 198, 201, 211, 212, 219,221, 223, 228, 229, 231, 232, 233, 234, 236, 239, 240, 241,246, 247, 249, 253, 256, 258, 259, 260, 263, 264, 269, 271,273, 278, 279, 280, 281, 282, 285, 287, 293, 294, 298: n = A,T,C or G
  misc_feature 300, 305, 306, 309, 310, 311, 312, 313, 317, 321, 324, 325,328, 329, 330, 331, 332, 335, 336: n = A,T,C or G
ccctttcgagcggccgcccgggcaggtacttttttttttttttttttttttttttcctttttttttttttttttttttttttttttttttttttttttttttttttttttttttttttttttttttttttctttttngggaaaaaaaaatantttaaaaagngggnnaaaattttttttttttttaaaaaaaaancnnggngaaaaaaatnnaatggtntncnaaaanntnnnncnaannnggggnncnaaanttnannnaannttttntnangggcnnnnnaangnaaaaanntttnantcccnnttnnnnngaanaaanaannccnnnnnttnnttaaaaaaaaaa

SEQ ID NO: 5613 - DNA, 436 bp, Homo sapiens
ccctttcgagcggccgcccgggcaggtacctgtttctgatactcagaaacttaaaaatctaccttttaagacttctggcttggaaactaccaagaagagaaaccgcatttctgatgatgatactgattctgaagatgaattgagaatgatgattgcgaaagaggaaaacttacagagaactacacaaccctcaataaatgaatctgaaagtgatccttttgaagttgtaagggatgatttcaaatcaggcgttcacaaactgcattctttaataggtttaggtatcaaaaatcgtgtctcttgccatgatagtgatgatgatattatgagaaaatgatcgtgaagtatgactcaggagatacagatgaaattattgcgatgaaaaaaatgttgctaaggtcaaaaacagtacctcggcccgcgaccacgctaaggg

SEQ ID NO: 5614 - DNA, 307 bp, Homo sapiens
cccttggccgcccgggcaggtacattctgtgctgctgtaacagaattgaaggctaggaagttcaatctcaagggactggcatctagtgagggccctcttgctacgtcatcccatggtggaaggcaaaagggcaaagagggggtgagctcatccttttatataagggaaccattcctgtgataatggcattaatccattcatgaaggaagagccctcctgtttgaaccacttcttaaaggtcacacctcagaacacattgcattcaggattaagtttccaacacgtgaactctggggaacacattcaa

SEQ ID NO: 5615 - DNA, 214 bp, Homo sapiens
  misc_feature 198, 205: n = A,T,C or G
cccttagcgtggtcgcggcccgaggtaccctgtaagagtaaagacttcaaagagggataaattaggaaatatatgtggagggatgatggttttggatatgtagaacttgaagctctgtgatggagatctctttggatcaagtagaaatgtgttggagctcaaaggtaaaggctaaaatattaatttgggagtaagttncattaantgaaaggtg

SEQ ID NO: 5616 - DNA, 354 bp, Homo sapiens
  misc_feature 127, 220, 266, 301, 316, 319, 322, 323, 324, 341: n = A,T,C or G
cccttagcgtggtcgcggccgaggtacagcctagaagaaaacagagagatgagcagcttctgacaaatgtcctggaaacacttcgaggtgatggaaatgtgttaatagcagtggacacagcaggcanagttttggaacttgctcaacttcttgatcagatttggaggactaaaaatgcaggattgggtgtttactcattggcactcctaaataatgtcanttcaatgtgggtggaagttttctaaatcccaagtagaatggatgantgataaattgatgaaaatgttttgaaaacaaaaanaaataatcccgtttnaanttnnncatcttttttttatgtnatgggcctttctg

SEQ ID NO: 5617 - DNA, 291 bp, Homo sapiens
  misc_feature 209, 245, 259, 269, 278, 280, 284: n = A,T,C or G
cccttagcgtggtcgcggccgaggtacgcgggttaagacatctttttttaaatttgagatttctgaatgtgaatatctaaatgagataccattatgtgtccctgctgtaggtgacactcatatttttatttaagttaaaaatcacaaaagaaccgctacgcatggtggctcatgcctgtaatttcagcactttgggaggccgaggtggnggattgcctgaggtcaggagttcaagaccagccctnaccaacatggtganaccccgtctntctaaaaantncaanaattaac

SEQ ID NO: 5618 - DNA, 330 bp, Homo sapiens
ccctttcgagcggccgcccgggcaggtaccacacaaattcaaagctcaagaccagatagctgcaggatttgaatcaatattttggtgggtaactatcagtaaaaacatagattggataaattacatctattataaccagcagcggtttattaactacactagagatgctgtcaaaggaatagctgaacagttagggcctactagccagatggcttgggaaaacagaatggccctagacatgatattagccaaaaaaggtggagtttgtgttatgatcaaaactcaatgttgtacctcggccgcgaccacgctaagggcgaattccagcac

SEQ ID NO: 5619 - DNA, 669 bp, Homo sapiens
  misc_feature 116, 167, 168, 288, 393, 411, 413, 512, 605, 640: n = A,T,C or G
cccttagcgtggtcgcggcccgaggtacaggtggaacaatccaaagttttaatcaaagaaggtggtgttcagttgctgctcacaatagttgataccccaggattggaagatgcagnggataatagtaattgctggcagcctgttatcgctacattgatagtaaattnngggctcctaaatgccagaatcacgagtgaacagacgtcagatcctgataacagggtgcagggttgtttatacttcattgcttccttcaaggacatggacttaaaccattggatattgagnttatgaaagcgttgcatgaaaaaagtgaattatcatcccacttattgccaaagcagacacactcacaccaggaggaatgccaaccagtttaaaaaacaaggggancaggatgtgttaacccangnttcttataccgtctcataatttgcaagttttactatttttaagtataatgtgttgcaatccatcctcttactgctttactatattggcatttatactgnattagaaataactcttcaatcttctgctttgtcaagttttaaatatggctggtttaagggtctctaataaccccccacacaagacaatttctncccatctctttaaaataatttgctttttctttttncttttctcttttcttttcttttttttttt

SEQ ID NO: 5620 - DNA, 411 bp, Homo sapiens
gccgcccgggcaggtacgcggggctccgccccgaaaccttctgactactaacctaccaagatcactccatggatgaaatgacagctgtggtgaaaattgaaaaaggagttggtggcaataatgggggcaatggtaatggtggtggtgccttttcacaggctcgaagtagcagcacaggcagtagcagcagcactggaggaggagggcaggagtcccagccatcccctttggctctgctggcagcaacttgcagcagaattgagtcacccaatgagaacagcaacaactcccagggcccgagtcagtcagggggaacaggtgaagcttgacctcacagccacacaactttcacagggtgccaatggctggcagatcatctcttcctcctctggggctacccctacctcaaag

SEQ ID NO: 5621 - DNA, 503 bp, Homo sapiens
cccttagcgtggtcgcggccgaggtacagtggcacaatcttggctcactgcaaactccacctcccgggttcaagcgattctcctgcctcagcctcccaagtagctgggattacaggcatgcgccaccacacccggctaatttttgtatatttagtagagacggggttttcaccatgttggccaggctggtctcaactccttacctcaagtaatccacctgcctcagcctcccaaagtgctaggattacaggcattagccaccgcacccggcccaatcaatattattttatgcagttctgtagggaactactccaagacttagaataatattgtttaggaaacaatgaaatagaagcctcatacatatataataaaaacctattatgttaaaggcctacatcttgaaaaagggtaataagacacacaggaaaatgtcctccctcctcaaggggtggggaaagaattacctaagcaggtaacagtgccaggcaagtgaaaaaaaa

SEQ ID NO: 5622 - DNA, 390 bp, Homo sapiens
ggccgcccgggcaggtacaccaaacagaggagtttggctttctcctgaaagttcctgaagtcactgaaggatattagggagtaacactgtcagagtgcttctagaaagcctgctgtggtaacattgagcaacagagaggagaccagctaggtataggaggcaggttagtactggaataaacagtgagcatatctggtatatgtcattatttattgttaaattacatttttaagctccatgtgcatataaaggttatgaaacatatcatggtaatgacagatgcaagttattttatttgcttatttttataattaaagatgccatagcataatattgaagcctttggtgaattccttctaagataaaaataataataaagtgttaccgttt

SEQ ID NO: 5623 - DNA, 387 bp, Homo sapiens
  misc_feature 144: n = A,T,C or G
cccttcgagcggccgcccgggcaggtacaaacttagaagaaaattggaagatagaaacaagatagaaaatgaaaatattgtcaagagtttcagatagaaaatgaaaaacaagctaagacaagtattggagaagtatagaagatngaaaaattttaaagcccaaaaatttggataaaatagcactgaaaaaatgaggaaattattgggtaaccaatttattttaaaagcccatcaatttaatttctggtggtgcagaaattagaagataaaaacatacttttagaagaaaaaagataaattttaaacctgaaaagtaggaagcagaagaaaaaagacaagctaggaaacaaaaagctaagggcaaaatgcacaaacttagaagaaaat

SEQ ID NO: 5624 - DNA, 426 bp, Homo sapiens
  misc_feature 16, 19, 22, 33, 323, 372, 382, 401: n = A,T,C or G
cccttagcgtgggccnggncanaggtactaaanatacaaaaattagcctggcctggtgatgcgcacctgtagtcccagccactttggaggctgagacaggagactcacttgaacccaggaggcagaggttgcagtgagctgagattgcaccactgcactccagcctgggtgacagagcaagactccatctcaaaaaacaaaacaaaacaaaaaactacaatagagatgtatgtcaaagagaatataagttcttaagaagctgcgtctaattagtgaagctctcccttcccatattcagtgatccaagaaactgaaatttaaanggaaaaatgaatctgtaaagttatagatgtcaaattctcagattcttcnttgttatttnccaagtggaaaaggattanaaataatagaatttttattgatttt

SEQ ID NO: 5625 - DNA, 422 bp, Homo sapiens
cccttagcgtggtcgcggccgaggtacttgccggagtctagggataagaatgcactacaaaatcaaagccaaagggttgatgagctggtggcatgcattgaaattatacagaccctagtattgatgttcagaagaaacagaaaaccgagtcatcacgcctgaacacattggcagctaagaagggagcactatttaatctcttggtaattttaattagtgagcctcagattccaaaatcttgtcctgtgtttgatatccagttggtggctgattcagctttagtcagaatgtcttttgacgctgagttacagaagcttattctggagtatacaaatactgctacagcacttttatatgagatacttcttgtctttcagcaggggaaatctcggattgggatccacaaagttttgctattagct

SEQ ID NO: 5626 - DNA, 188 bp, Homo sapiens
  misc_feature 30, 128: n = A,T,C or G
cccttagcgtggtcgcggccgaggtacttnattttttttttttttttttgggtataatataggatcttagtgcttaaatttgcctccaagcatacattagctgcaactccctgattctgatatatcgngttttcattttcagctcaatgaactttccaatttctcttttgatttcttatttgaataat

SEQ ID NO: 5627 - DNA, 549 bp, Homo sapiens
  misc_feature 278, 330, 338, 497, 500: n = A,T,C or G
tgcagaaattcgcccttagcgtggtcgcggccgaggtaccgtcctgagggcatacaacttaatttctacaaaaacatactttttcaaaagggctatgagagtatcaattgacaaaagcagaacaagtagcatgattagacagagaagtcttaattgcttaacacaagataaactcagcaggttttaaagtgtctgtatccattttaaatgattagtccaggggtagaaaagatgaggatggtttcatcatactttgaaaaggaaactcccactggagnctaaaacaaacttacaggccagggttattaagaatccaagttacatagtagnattattanactatttattttcatacccaagttcattgcttaaggcaataaagaaaatccctgttttgcagcatttaatttacatgttaatttcaggttttccaggccaccatagttttaggagggtcacaacaccagggccagaagaaaaggaaccaaaatgccccngcnccaagatcaatcttcaactggccctcagttcccaagccaagccccagtg

SEQ ID NO: 5628 - DNA, 302 bp, Homo sapiens
  misc_feature 144: n = A,T,C or G
cccttagcgtggtcgcggccgaggtacagttatgactgacctgaaggatgcaaaggctccacctggttgtctcaccccagagagaattccagaggtccatcacatttcccaagatcctctgcactacagcatcgcgtcagtctntgcttctcagaagatcagagaactagagtctatgatcggcatagacccagggaaccgggggattgggcacctgctctgtaaagatgagctgctgaaggcctctctctcgctgtcccatgcccgctcagtgctcatcaccactgggttccccacacatt

SEQ ID NO: 5629 - DNA, 566 bp, Homo sapiens
  misc_feature 502, 509, 510, 513, 514, 525, 528, 535, 538, 539, 543, 548,557: n = A,T,C or G
cccttagcgtggtcgcggccgaggtactaccctgaatgcacctgatattgtctgaagtctaataacagactataggaaaaacagatctattgtgatataagtcaggaagtggttgaacggtgagagacagggtgagaagtgattgtaaaggggcacaaagaaattttctgaggtgatgaagctgttctgtatcttgttttggatgaagataacataggtgtatagaattgttgaagctcattgaactgggcacttagatctgtagattgtatacatagtatatttcaattaaaaagattaaaaggagtaaataaaactatgtgtttccctcaaaattttaatttgagggatttctttggtagaaagtcacccgcactttaagaacagtttttgaaaattagggaaatgctataaaatatagcccagaagaaattctgtaaaagacccaattgcaaattaaaaacttaagcctatccatatgagttttttttttttttttggnacggganntcnnttgggcccccnccnctgaaanccnngggngaaanccccttttnaaaaaaaaa

SEQ ID NO: 5630 - DNA, 489 bp, Homo sapiens
  misc_feature 479: n = A,T,C or G
ccctttcgagcggccgcccgggcaggtacacagaaaggcagaagttgaaattagtttgaagactacattgtatattacacaatatacattgcttaagcatcagcaacgtgaagcaacatcaatgccgtttctggatggttacagcagttatgtcaaaattagatttttaaaagtaaaaggcaaagaaatttgccacatatttaataattactcttgggaatgactgcaaattagagatgttaggtattattgattcatttattctttagcaaatgtgtattgaacacatactatgtatcaggcaaatggatatcacctcccctactatggaagaataacagtaatcagataattaaaaattatatactccagggtggcagaatgacaatcagtaatcaaaattattacaaattatatactacaaggaaaacaaagaaataaaggattatggaggatttaccctagggtggttagaaaanggttttttag

SEQ ID NO: 5631 - DNA, 761 bp, Homo sapiens
  misc_feature 325, 374, 464, 518, 546, 580, 598, 610, 631, 636, 645, 653,662, 667, 689, 692, 736, 761: n = A,T,C or G
cccttagcgtggtcgcggccgaggtacaccataaatcttgacttaccaccctacaaaagatggcatgaattgatgcttgacaaggcaccagtgctaaaggttatagtgaattctctgaagaatatgataaatacattcgtgccaagtggaaaaattatgcaggtggtggatgaaaaattgcctgcctacttggcaactttcctggcccttttgaagaagaaatgaagggtattgcccgctgttactgatatacctttaggtaaagttcacttagaagctttaaaaaaaaagtaattaaattcttttacaagtttccattgagggngtgatatacatacagcacaggtgctgtatgtcttaaatatacagcacangtgctgtatgtcttaaatatacagcacaggtgcccaggtcttaaatatacagctcaatgaaagcttcaaaaatgcatgcatgccttgtangcccttgactcaagatcaaagatccggaagaacccagcacttccaccgatgctncatcatgcccctttgcaaaaaaaactgnctcctccagtaacacttttctgatgccactatanataagttttgcctttcgngaactttgtatnaataaaactgacaattgaacnggccnggggaatcntggatttnaatatgggnggggngcttttgattacaagggatttnggngggtttaaaattttgtttttaccataaaggaatttaaatttggngttaaaaaaaaaaaaaaaaaaaaan

SEQ ID NO: 5632 - DNA, 430 bp, Homo sapiens
cccttagcgtggtcgcggccgaggtacaaagatttaggcttgcatacccgaaaaccacagttaggaagaaaaatcatttcaggaaacaacatcagaacaagaacacatataaattaaaggcatactgtttatcattccacttcattgcacatataagaaaacaatactgccgtcattcttgagtaagaaagtttccaatgaaagaggaagttccacaatgaatacaggtgcagacagtcttattaccacaaatttagttatatcaaaacacttggtggtgtcactaagttaattaaattatctatactttttactggaaaggtaatcatttccctgccttcatatgttaacttaaaatcacttacaaatggaaatatagattcagtagaaaagacttcacatgcaatcctatacaatgcattctggtttt

SEQ ID NO: 5633 - DNA, 214 bp, Homo sapiens
  misc_feature 1, 14, 205: n = A,T,C or G
ncccttagcgtggncgcggccgaggtactttgtttttttatttttaatgattttctttttgttattaatatttttctctgttcctttgttattacttgcatggtttggcgtcagaagtccttacctctttatattgtttgcaggtttaaataaaacagtgtggtgccaaaaaaaaaaaaaaaaaagtacctgcccgggcggccgntcgaaaggg

SEQ ID NO: 5634 - DNA, 270 bp, Homo sapiens
  misc_feature 105, 106, 121, 122, 129, 130, 133, 141, 153, 155, 162, 164,169, 182, 185, 195, 196, 201, 202, 211, 229, 232, 233, 236,251, 254: n = A,T,C or G
cccttagcggccgcccgggcaggtactttttttttttttttttttttttttcttttttctttttttttttttttttttttttttttttttttttttaaaaagcannatttttttttttttnnaaaaaannaantttttaanttttttttggtntnccgggtnanggggnaaaaaaaaaaagnggnccattttttnnaaaannttaaaaaancctttttttaaaaaattncgnnggntttttttttttaaanggncccttttttttttttt

SEQ ID NO: 5635 - DNA, 433 bp, Homo sapiens
  misc_feature 274, 296: n = A,T,C or G
cccttgagcggccgcccgggcaggtacgcggggattatacagacgcataactggaggtgggatccacacagctcagaacagctggatcttgctcagtctctgccaggggaagattccttggaggaggccctgcagcgacatggagggagctgctttgctgagagtctctgtcctctgcatctggatgagtgcacttttccttggtgtgggagtgagggcagaggaagctggagcgagggtgcaacaaagcgttccaagtgggacaagatactgnagatcctcaaagtaagcccctngtgtgactgggcttgctggcaccatggacccagaagagcagtatcttttattgaggatgccattaaggtatttcaaggaaaaagtgagcacacagaaatctgctacttcctgctgactgataatgaggcctggaacg

SEQ ID NO: 5636 - DNA, 467 bp, Homo sapiens
  misc_feature 126, 283, 328, 350, 360, 362, 375, 385, 386, 424, 429, 443: n = A,T,C or G
cccttagcgtggtcgcggccgaggtacaaaatggtcctatttttgtgaagagggacataagataaaatgatgttatacatcaatatgtatatatgtatttctatatagacttggagaatactgccnaaacatttatgacaagctgtatcactgccttcgtttatattttttttaactgtgataatccccacaggcacattaactgttgcacttttgaatgtccaaaaatttatattttagaaataataaaaaagaaaggatacttacatgttcccaaaacaantggtgtggtgaatgtgttgagaaaaacctaacttgatagggtccnaccaatccaaaattgtattacnaatgcccctngntcatgtttttggntttaaaaacnnggtaaattgaagatcttttttattttcaattaaaatgnatatnataatttttaaaangccaaaaaaaaaaaaaaaaaaaaa

SEQ ID NO: 5637 - DNA, 301 bp, Homo sapiens
cccttagcgtggtcgcggccgaggtacgcggggggggagccgcccgttcgcgctgccagcagcttccgcctgctacggtcctggcaagcacctcgggatcccattccttcacagggaccctagccagttaaagctgatacattcctgtgggtcaactatgcaactaactcagattttgaggagtctctgcattagttggacagctcttctggaattatcttctaagccaactgtgggttgggtaggtggctctgctgatttttcgctggacttccacatttgggaccagttggctgtcatc

SEQ ID NO: 5638 - DNA, 459 bp, Homo sapiens
cccttagcgtggtcgcggccgaggtacatgtgactaagctttcagagcagaaaaagaaccatctgaaaggaatagaggatttgtagaaaccattccaggaacagtgcttgatcccaacaaccagactggagaaacccataatttgtgtggatattagtttcctgaggccacaaacttggtggctaaaaccagtagaaaattacttgctcatacttgtagaagccagaagtccacaatcagttttactgaggcaaaatcaatgtgctagcagggtcttgctccctccagaggctctaaaagataattacttattgcccctttgtttctaggagctgctggtattccttgacattgggccacatcactggaatctctgcctttatggctgcattacctcctcttctgggtgtcaaatctacctctctttcttaaaaagacacttgtaattggattataacc

SEQ ID NO: 5639 - DNA, 329 bp, Homo sapiens
ccctttcgagcggccgcccgggcaggtaccactaataaattgtttgccaaatccttgtaataacatcttaattttagacaatcatgtcactgtttttaatgtttattttttgtgtgtgttgcgtgtatcatgtatttatttgttggcaaactattgtttgttgattaaaatagcactgttccagtcagccactactttatgacgtctgaggcacacccctttccgaatttcaaggaccaaggtgacccgacctgtgtatgagagtgccaaatggtgtttggcttttcttaacattcctttttgtttgtttgttttgttttccttcttaa

SEQ ID NO: 5640 - DNA, 528 bp, Homo sapiens
  misc_feature 122, 137, 157, 228, 356, 398, 435: n = A,T,C or G
ccctttcgagcggccgcccgggcaggtacgcgggtcctgtgttacattctgttcttaaatctgaatgccttctcatttaattctgaggaaatatcacacaggtgtcttcattgaccttgaanaaatgtatatacagntgccttataaaacaacatanatttagaccataacttttatagagaaagggttttgtcaaatgttttctgaaaatctgagtaattcaaagcntgcctctgcccctttaatatttttaataacctgcattgttgctgtctgccaaatattaaattgaaatcttcatttcaattttattatctggaaagggcactggattgctctgcaaccaaagaaagcantatggaatgaaaaaactcattcacttttgtcttatttccttnttaaggtgtattggcatgtaatttgcatagagaaggncctctggttagtctctcaaattgaggctgtttagggaaatccttattcagttggtggcagggggttggtttaaagtaaaaaggaataaggatc

SEQ ID NO: 5641 - DNA, 240 bp, Homo sapiens
  misc_feature 192, 220, 222: n = A,T,C or G
ccctttcgagcggccgcccgggcaggtacgcgggcaagtgatgggagggttggacctttcagccctaatcactaacctttgagaagtgaggcagggatggagattaagctctataaaaactcttgaactaagagattcaacaagcttccaggttgatggatgcatctaggtgctgggagggtggcacacctnaatttcacatggacagaaaactccactnangacccttcctggccttgc

SEQ ID NO: 5642 - DNA, 401 bp, Homo sapiens
  misc_feature 140, 141, 253, 279, 303, 306, 365, 384: n = A,T,C or G
ccctttcgagcggccgcccgggcaggtacacctttgactacagctgcagaagtgttcctttagacaaagttgtgacccattttactctggataagggcagaaacggttcacattccattatttggaaaggttacctgctnnttagctttcattattttttgctacactcatttttatttggtatttaaaatgttttaggcaacctaagaacaaatgtaaaaagttaaaagatgccagggaaaaaatgaaattngcttgggtatttcatttaccttcatngtatatttcaaggcaccaaggcanttnaaaaccaaaaaaaaccccatggtaattttaaaacttttttttttaagggaatttttttngcctttttttggtgggaanttttttttttttttttt

SEQ ID NO: 5643 - DNA, 479 bp, Homo sapiens
cccttagcgtggtcgcggcccgaggtactcttgcaatgaaaccaaatagtatcatagacacaacctctgtagcacattttaggtggcaaacactgtcacagaattttaactaccagatctgttttaggccatacagtttgctcttagttttatcaagagaatttttaaggcttgctgcgacactgctatgtgtccttttcaaaatctgttcttttcattacttacttagaataagatctctctaaaattttaaattaatagcacagagagagagactgggaaagcagcctttttatgtaaatgaaacctcttaggtagtaaaaaaaaccccaaaaagctgagaaagtgatcacacagtttaaatacagtcaagatctctgagcataagaagaggtcagagccagctgatagtaaaccttgatcttcagctaccaaatctcaaaaatgaaactccaaatgagtttgttattggagatggg

SEQ ID NO: 5644 - DNA, 520 bp, Homo sapiens
  misc_feature 401, 500, 519: n = A,T,C or G
ccctttcgagcggccgcccgggcaggtactgaaaggaagttgttcatggatcagaaatgtgggaggcccttccttgcccaaggcaagtcgctgtagatggttaaactgataccaaggataggtaagggaaattccaaattccattggaagatggccttttactgacactgcagacatgtagataacaatagtttaatgtcctctgaaaaggtaaaaattccataaatccttgcaaacaatttttagcaatattgtttattgctaccacagccaagaatgggtatttcaaagccagggttttttttattttgttttgttttgttttgtttttttttttttttggctacacttttttgggggggaccttttaatttgggaagaaaatgttgagtatacttttntttcacaaccattgcaaaacccaggtagccctgggagttttctttttttctcatcaatcattggttttgttttttttatggttcaaagactttttccantccatgaaattaaaaaatna

SEQ ID NO: 5645 - DNA, 283 bp, Homo sapiens
  misc_feature 246, 268: n = A,T,C or G
ccctttcgagcggccgcccgggcaggtactattttcaatccctgaccgagggaccttccagaagaccatgggggctgggcgggcagtggcagagcaagtgatatttaggtggtcttcagagaatttgtagtgaagggatactatgggcatagacggtgaggcaggccgttcctgagatcttcccaaaaccaaaggtatttgaagagacacatgtaacacccttcatcctccagggtgatattccanaaggtgatggttggagtttttnggagttcccaagcct

SEQ ID NO: 5646 - DNA, 393 bp, Homo sapiens
cccttagcgtggtcgcggccgaggtacttttttttttttttttttttttttctaatcagaatgggggaataaaaccacaaaggaatcagctaactgtccctgttggcccagcatctcaaggattgtgttgcagcagctatcctgaggtgtgcccttccacatctgggcaagcaaacgtctctttattggttggtggttatgttaagcatgttgaacttggaaccagaagatctaccaattctggacacagctccttccctaagtagtctatgaccttgggatagtcacataagacctttggatgccagtttcataaaccagagttttcaataactaatgcctcacatttaatgaggtccatatggtacctgcccgggcggccgctcgaaaggg

SEQ ID NO: 5647 - DNA, 549 bp, Homo sapiens
  misc_feature 185, 371, 495, 500, 508: n = A,T,C or G
ccctttcgagcggccgcccgggcaggtacttttttttttttttttttttttttaggaattttaccaattgctcagtaagaggtatttagatctcctactgaatggtgaaattgtttatttctccctttatctgccaatttctgctttatgtattctgaaactttgttactggatgcacacacatntgtgatgaatgataataaaatgtctttatcgcagttaattctttttgttttgaagtctattttatcttatattaatatatgcactcaaaccttcttatacttagtgcttccgtaatcttttttaatacatttacttacaacatgcctgcatctttatatgttaaatgcatttcttgcagagagcanatagttatgcttttcaaaaattcattctgcttatttctaactttaattggagaatttaatccaattaaatgtattccaagtattgatataatgggtattaaggactggttcttccttctggggnttggnccctttgncccccctttccttattacgtggattaaattgaatatttctt

SEQ ID NO: 5648 - DNA, 246 bp, Homo sapiens
  misc_feature 89, 116, 144, 145, 146, 152, 160, 161, 166, 168, 169, 179,180, 184, 190, 194, 198, 199, 200, 203, 205, 214, 219, 220,221, 230, 232, 233, 234, 242: n = A,T,C or G
cccttcgagcggccgcccgggcaggtacttttttttttttttttttttttttttttatttttttttttttttttttttttttttttttnttttttttttttttttttttttttttnttttttttttttttttttttttttttannnttttcnctttattnnaaaanannaaaaaaaatnnaggngttatntttnaaannngantnggaaaatantaaannnaaaaaaaantnnnttaaaaantttt

SEQ ID NO: 5649 - DNA, 342 bp, Homo sapiens
  misc_feature 274: n = A,T,C or G
cccttgagcggccgcccgggcaggtacatttggctacctgatggaccatttaacatttataaagggatttcattcaattgtcattttcaatgcatgttttctgtttgtataaaagctttcccatgcaagagggctgatgttacaacagtagattattgtgcaacagtgtattttcacctagtaaaaaaatcttttcatggttcactaaggacaatcccttcatgatctagagcctgaaggtaggatcttctgagaacatcagaaaaagactatntctaccatccacactacagcaaaactttgggagcccttgaaccttggggttcataatctcacaatggg

SEQ ID NO: 5650 - DNA, 657 bp, Homo sapiens
  misc_feature 427, 467, 508, 518, 519, 528, 542, 556, 562, 585, 592, 615,624, 632: n = A,T,C or G
cccttagcgtggtcgcggccgaggtacgcgggctacaaacggcagaatgaaggaaatcctgaaagagataaagagaggcctgtccagtctttgaaaacatcaagagatacttcaccctcaagtggttcagcagtttcttcatcaaaggtgttagacaaacccagtaggctaactgaaaaggaacttgctgaggctgcaagcaagtgggctgctgaaaagctagagaaatcaggtgaaagtaacttgcctgaaatttctgagtatgaggcgggatccacagcaccattgtttactgaccagccagaggaacctgagtcaaacacaacacatgggatagaattatttgaagatagtcagctaaccactcgctctaaagcaatagcatcaaaaaccaaagagattgaacaggtttacccgacaagactgngaaactttcgggatggtggtgaaaatgctgattgaaaaanatccttctttagaaaagtctttcaggttgcatttgaggcanaatttacatnnaaataggtnaaccggtgtgtttnaaaaaactcaagcntttcanttgcagaagtatggatcctttcncctcaanaattttggggaagccctttttanaattttttntggttcanggctaaaaaaaaaaaaaaaaaaaaa

SEQ ID NO: 5651 - DNA, 677 bp, Homo sapiens
  misc_feature 480, 493: n = A,T,C or G
gatatctgcagaattcgcccttagcgtggtcgcggcccgaggtacagaccctagactcagaaacacaacagatttgagctaagacagctctggtgaaacagtaatagagggaggaggaacacgaggtattcatgtctgggccagagctgccatccagggccccacaccccacctttggtccagatggcccattggcccaggtgtccctgctgccagaacaccgtggactggggtactcattgtcagcttgtaggatctttggccattctgtccacagaagtatcagttttactgttaacatttctgacattggaaaaatacatctgcattgtctatccttttagatgtgtgagacctggaaaatgcagaacaattacagttctgattctcatttggattactggttttatagtggctttcattccattgagcaataaggaatttttcaaaaactactatggcaccaatggagtatgcttncctcttcattcanaagatacagaaagtattggagcccagatttattcagtggcaatttttcttggtattaatttggcccgcatttatcatcatagtttttcctatggaacatgttttatagtgttcatcaaagtgccataacagcactgaaatacggaatcaagttaaaaaagagatgatccttggccaaccgtttt

SEQ ID NO: 5652 - DNA, 300 bp, Homo sapiens
  misc_feature 173: n = A,T,C or G
cccttagcgtggtcgcggccgaggtacgcggggggcatttacctaaaggcaatgttagagtcatcgaaagtttttaatcaggcaagtggtatgatcagttttttgttttgttttgttttttttgagacggagtctggctatatcgccaggctggaatgcaatggcgcgatctntcctcactgcaacctccgcctcccgggttcaagcgattctcctgcctcagcacctcgagtagctgggactacaggcgcgcgccaccacgcccagatgagaaaactgaggcacagagaggtgaaataa

SEQ ID NO: 5653 - DNA, 640 bp, Homo sapiens
  misc_feature 267, 289, 326, 412, 461, 488, 490, 494, 511, 531, 546, 548,576, 600, 602, 615, 617, 621, 623, 629: n = A,T,C or G
ccctttcgagcggccgcccgggcaggtacgcgggatgagtgtgaagtagcctctggtgtcatttggatttgcatttctctgatgagtgatgctatcaagcacctttgtggtgctgttggccatatgtgtatgttccctggagaagtgtctgtgctgagccttggcccactttttaattaggcgtttgtctttttattactgagttgtaagagttctttatatattctggattctagacccttatcagatcatggtttgcaaatattntctcccattctgtgggttgtgntttcactttatcgataatgtccttagacatataatanatttgtattttaaaaagtgacttgatttggctgtgcaaggtgggctcacgctttgtaatcccagcactttgggagactgaggtggntggaacatatgaggaggctaggagttcgaggtcagcctggccagcatantgaaaacttgtctctacttaaaaatananaaantagtcaggcatggtggngcaccgactggtaaaaccancttctcaggaggctnangcacgaggaatcacttgaaccccatgangaggggggttgcatagagcttganantaatgccagggcnanaagnanggagantttggtttaaa

SEQ ID NO: 5654 - DNA, 415 bp, Homo sapiens
cgccagtgtgatgggatatctgcagaattcgcccttagcgtggtcgcggccgaggacgcgggtaaggagaaggatgttgacgactgttggttctattttacgtattcagtgaatgggagcaacgaggtcatggttcatgttgtggagaatccagagtgtcccactggtccagacatcattccaattgtagctggtgtggttgctggaattgttcttattggccttgcattactgctgatatggaagcttttaatgataattcatgacagaagggagtttgctaaatttgaaaaggagaaaatgaataccaaatgggacacgagatggtcacataacattgtgaatgtaattaatgccactgaaacaaagtggctttaattgcaaaaaagaaaatgaaaaggcaggacatagtggg

SEQ ID NO: 5655 - DNA, 261 bp, Homo sapiens
  misc_feature 64, 66, 141, 149, 151, 178, 184, 206, 212, 222, 237, 238,240: n = A,T,C or G
cccttagcgtggtcgcggccgaggtacgcgggtgtatgtgtgcctatttttttttttggtaacnanaagtttcctgtggctcttttcactctctaaaaggccaggacctgcttcctctgaatctgcctggattcactccanttgttggnanggagaaattaagttccaagtgtaaganacatangcactgaaaactaaataatagntcttgnaactatttgnttttttttttggtannanataagtgaagttcatttggtt

SEQ ID NO: 5656 - DNA, 118 bp, Homo sapiens
cccttagcgtggtcgcggccgaggtacagaggagttgctttgcaaacaagccaggtagataagacataatgaacaggcttctgggaatggtatagctgtcgttggtcctaaaacatga

SEQ ID NO: 5657 - DNA, 398 bp, Homo sapiens
cccttagcgtggtcgcggccgaggtactcacagggaaaacttttggtggacttatggtcatttctcaaaccattatgtcattcttacactaatcaataagaaaaataagctaatttttgaaaacagtaactagaaagactgttgcaaaatatttaaagattctagtccactcaaatttgtcaaataaaatcagaaccattttaaatgaaaagatcctggttcctctgaacattatataatgccggcaaggcacggtagctcatgcctgtaatctcagcactctgggaggctgaggttggaagatcttttgagaccagcctagcaacatagcaaggatctcatttatgccaaaaaaaaaaaaaaaaaaaaaagtcctgcccgggcggccgctcgaaagg

SEQ ID NO: 5658 - DNA, 215 bp, Homo sapiens
  misc_feature 19, 30, 55, 82, 83, 84, 86, 87, 124, 174: n = A,T,C or G
ccctttcgagcggccgccnggcaggtacanaaagaatactcttacttcaacatancggttaatctctgcaaaaggagactannnannagatgtaggagttttatctggatccataatattaatnttattaacaaacaattttggagcaaataagataaaacgttaacatatctnaaatctatgacacagttctcaatgtatccgagaaattctgg

SEQ ID NO: 5659 - DNA, 352 bp, Homo sapiens
  misc_feature 249, 250, 277, 282, 300, 315, 326: n = A,T,C or G
cccttagcgtggtcgcggccgaggtacgcgggctctttaggagagggtggtggtggcggccagtaaagggactgtttgaaatccacagacacctttctccagactgaaaacctggggaccagactgagagtctggagaaactgaggtatcctaggtccaagaaatgaagcgtaaaataatagcaacagtaattgctgtgaaatgtatgcttgtgagaaggaatgaagcacttactggttcaagtgatgnnccttttactggaactcactctaactgnggttnactgagcctttggacttnttaaaagggaggtgntgcccatgaancttccctcttttaaaaaaaaaaaatg

SEQ ID NO: 5660 - DNA, 659 bp, Homo sapiens
cccttagcgtggtcgcggccgaggtacgcgggttgccacccttacccccatcccagtgaatatttgcaattcctaaagacgtgttttgattgtcacacctgggtggggaacgtgctactggcatctaatgcatagagggcagtaatgctgctaaacatctttcaacgcacaggacagagccccacaaaagagaattatctagccccaaatgtccataacactgctgttgagaaaacctaccgcaggatcttactgggcttcataggtaagcttgcctttgttctggcttctgtagatatataaaataaagacactgcccagtccctccctcaacgtcccgagccagggctcaaggcaattccaataacagtagaatgaacactaaatattgatttcaaaatctcagcaactagaagaatgaccaaccatcctggttggcctgggactgtcctagttttagcattgaaagtttcaggttccaggaaagccctcaggcctgggctgctggtcaccctagcagctgagggactcttcaatacagaaattagtcttgtgcactggagatgaatattcctttaatttgtaacatgtgaaaacatctataaacatctactgaagcctgtttttgttgcaccgacattttcattggagtaccctgc

SEQ ID NO: 5661 - DNA, 326 bp, Homo sapiens
cccttagcgtggtcgcggccgaggtaccaataatagagctaaatacaatgacatttgcttttaaaaggtggatattttatttctgctttttgaaaatcttatttagtattgacttggaagccaatttggtcctttaataagtaaagaaaataatatgtttaaaaatgtaaatgttttacaaatttgaaactttcataattgtattaatcagaaaacaagcacattgccattctttgaaactcatgtttctagacatgacagcagtaataaaaggatgaaaacaaggtgtcttcactaagccgtatggccaataaatgggacccaaa

SEQ ID NO: 5662 - DNA, 601 bp, Homo sapiens
  misc_feature 448, 539: n = A,T,C or G
ccctttcgagcggccgcccgggcaggtactttagtggtaacaattatttgctaataatccagaacctacaaataacagaaggaaacagcacactcttaaataaataatgggacaaggaagaaactacaaagtcaattagaaaatactttaagattatgtagaatgagggcccaacacacgaaaatgtattgaatgcagtgaaatggtgcataaagggaaatttattatttaaatgtttgtatctaaaaagaagtaagggctcatataaataaacccaatcttccacatacaattctggaaaaagaagagcaactaaacctaaagtgagcagaaggaaagaactaataaaatgttaagtgaaaaataaaggagagaatacaaaaacaataggtagaataaacaaatctaaaagttggtacatgttccaaggcaggtgactgtgaacttnctctgagtgaaggcatcccctccacacctttcagcctgctagttaggacgacccggccgccaccctccaggacctccagcccttgcactgnctttccttttttttaaataattcttcattgagttctaatatgtaaaaaaaaaaaaaaggaaa

SEQ ID NO: 5663 - DNA, 497 bp, Homo sapiens
  misc_feature 405, 411, 412, 414, 415, 417, 418, 419, 423, 427, 428, 429,450, 474: n = A,T,C or G
ccctttcgagcggccgcccgggcaggtaccacttccattgtaagtcccaaagtattatatatttgataataatgctaatcataattggaaagtaacattctatatgtaaatgtaaaatttatttgccaactgaatataggcaatgatagtgtgtcactatagggaacacagatttttgagatcttgtcctctggaagctggtaacaattaaaaacaatcttaaggcagggtgcagtggctcatgcctataatcccagcactttgggaagcccaggtgggctgatcactggaggccaggaattggggaccagcctggccaacacaacaaaaccccatctgttaaaaaaacaaaacaaaaccaaaaaaaacaagtaaccttggtggatgtctactcaagttttctgnactttnntnntnnntttntttnnnttttgactctaaagggggtanagggggtgctatagggtaaatacnggccctatttcaaaaatttttag

SEQ ID NO: 5664 - DNA, 848 bp, Homo sapiens
  misc_feature 284, 376, 418, 545, 551, 557, 591, 606, 620, 633, 641, 645,657, 658, 668, 677, 684, 696, 697, 710, 713, 716, 727, 731,732, 738, 739, 740, 744, 749, 763, 765, 785, 787, 792, 803,804, 808, 821, 822, 830, 832: n = A,T,C or G
gatatctgcagaattcgccctttcgagcggccgcccgggcaggtacgcgggtggtaactgtatatttttgaggaactgccaaactattttcccacgtccatgcaccatttcacattcccaccagtaagtaagagggttccaatttctgcgcattcttgccaacactagttattatctgactttctggttataatcattctaatgagtgtgaagtagcctctggtgtcatttggatttgcatttctctgatgagtgatgctatcaagcacctttgctggtgctgntgggccatatgtgtatgttccctggaagaagtgtctgtgctgaacccttggcccacttttttaattaggcgtttgtcttttattactgagtngtaagaagtctttatatattctggattctagacccttatcangaacatggtttggcaaaatattttctcccattctggtggggttggtggttttcactttatcgataatggtccttagacatataataaatttgtattttaaaagtgacttggatttggctggtgcaangggggntcaccnttggtaatcccagcactttggggagaactgaggnggggtgggatcatantgaaggagggctanggagtttcgaagngcaagccntggnccagccatagcnnaaaaacttgncttttactnaaaaatncaaaaaatttannccagggcattggnggngcnccgtttttaanaccnncttttnnngganggctngaagccccaaggancncttgaacccaaaaggagggngntccantaattttaaanntgcnagggcaacaaatnnaactttgntnaaaaaaaaaaaaaaaa

SEQ ID NO: 5665 - DNA, 718 bp, Homo sapiens
cccttagcgtggtcgcggccgaggtacataacctctcacggccaacttaaatccttgctcctcaacataaatttctgactatctgataacattatatttgaccgaaagtgttaaaaaaaataaacaaataattgaaggttgctgaaaaacagatgtgtgatcttataactatgtgtagttcaaataagttaataacttcaaccaatttttttaataaaaagatacccccaaaagggaaaaccgataagaaacagattttcaaagtgttctgctaacatgtatgtttagtgtccaatggcttaaatttactcatttcagaaaacgtttacaatgaaagtattttataatttgcttctaatgctttctaagcgtgccttgttgtttcattactgtctgcttttaaagaataaattctaacttaaacttatctgaaaacaatgttgttagctctctgctctaagctaatgcttcacatatagacatgagtcaaaagcggactggttttcctaagattacctcctagaaaaaaaaccccttacaaattcatgatttcccctctccttacgatgagttgtgtaaggtgacagcaactggtaaccactgtttgaacctttgggtggcctatttaaaagaatggaaaaaaattgggggaagaaagattcaagatttgccttgcattacaaggggccagctgctcaatgctgtgtcgggaccttaa

SEQ ID NO: 5666 - DNA, 465 bp, Homo sapiens
  misc_feature 250, 270, 399, 410, 438: n = A,T,C or G
gatatctgcagaattcgccctttgcgtggtcgcggccgaggtactttttttttttttttttttttttttaaccctaagaaaaagtagatcttttacatggcttggctcacaatttaagtggttaaatatatatacatatgatatagtggtataaatagatttataaatatacatcattttttgctacactttgaacaccaacatgtaatctttgggcttagcagaataaaagatagaataacacaaagtntatcttgctggagcacattnactcggtttctcctttagagaagcaaatcattagataagacatcatttcctgcactactgggacacactcaatgagggtaactgttggttgaacaacttttgcaatgccctttcatcttccattaaatnaaccataaaangtaaaaacacaaaatactgaggaaaatntgagttttacagaaaaaatacaattga

SEQ ID NO: 5667 - DNA, 404 bp, Homo sapiens
  misc_feature 175, 200, 290: n = A,T,C or G
ccctttcgagcggcccgcccgggcaggtactttttttttttttttttttttttttttttctgtaaaataggagatagaagactaaacactaggattttatgctttttgaaaatgaaaacgtagcatgagaaatattgcctgatataggaaaaagagtgcagggcttaaagtctanattcaaagagctctgcggtcttaanaaagtcactttacctctctgagcttcacatttctaatcaataaagtgatgctgtgaggccagctgctctccaatttcccttgcagcttanaaagcctaagatgtctactctagctaaaaaataaaccaaccttataaagaatttaaaacagataaaaattgtctggtatatcagctagtgttggtgaattttcctgttaatttg

SEQ ID NO: 5668 - DNA, 313 bp, Homo sapiens
cccttagcgtggtcgcggccgaggtacaagtcactgattatgccaatacaacaaagataaccacatgtttgaggattgcaatgtgccagacattcactgaaaaaaaaaaaaaaacacacaactaaacaaaatccacacaacaaacatctgagaatctggacacttcacatcagtgttttgaagtgtttcattaatatcttaagacaagtgtatcaaaaccttggcacccgccatctggttagaagagtgggcataactcttaattaagaatttagcagaagacatttctagattttgaataactttcctctgc

SEQ ID NO: 5669 - DNA, 295 bp, Homo sapiens
  misc_feature 52, 73, 136, 159, 170, 261: n = A,T,C or G
cccttagcgtggtcgcggccgaggtacttttttttttttttttttttttttnggcttggttttttgttttganatggagtctcactctattcccaggctggagtgcagtggcttgatctggggtccctgcaacctntgcctcccaggttcaagcaattntcctgccttancctcctgcacatgttggttttaataacaataaaaaaacccacttgggcgtagccataatccagcgttactaaaggaactaattctacccanagttaaagtatctcgccttttggctattaatgtc

SEQ ID NO: 5670 - DNA, 486 bp, Homo sapiens
cccttagcgtggtcgcggccgaggtacgctcatctaacatgatttgagaaattcataaccaggcactcaaatatccttgtagcctacgaaaagtgagtagggtaataatttttgctttgtagggagaactacaaattgatatcttttaatctggccattttttaacatttagctcaatattaacagagaaatgtagtcagtatttagtaaaataaatgtatttttaaaatatttttaggaagctgcagaatggcgactgagtgcttcttgataagtctgcagtgttagttctatataggctcccttctgtgcttctgtttttgcaaagacctgtttaaattaaaaagaaaattttaaaacaataggacatatgctatttataaagtttttcagttttaagacatcattagcatttctgtagtagcaaagagtcctacttaaaaagggctttcagatttcacaatttttccccgattatacaataat

SEQ ID NO: 5671 - DNA, 548 bp, Homo sapiens
  misc_feature 43, 44, 45, 46, 91, 136, 166, 301, 325, 331, 380, 403, 411,415, 431, 441, 446, 450, 485, 505, 512, 527: n = A,T,C or G
ccctttcgagcggccgccgggcaggtacccagcaggtgctggnnnngggaagagacacagaagcctaaacctactgttttctgcacccggnggctaaaaacctgagccagagagatcctaaaattgggtcacaaanaaagagggggcattacctgtggagaaatangtcacttattggatccacttttcaccttcttcaggaaaacggggaatgtaaggaaattagctatcttttttgtctttgcctgtaagaacaaaagactgaaaaatatttaatctttttgcaaaatcttctcttaanttctgtgttatatcccgtattggntacttntgcactggttatttgtgggatcatttcaaattaaccaaattaattgagntaaataggtaaatcaaaaatatnattaaatnaaantaaggttttaagtctntatttttgtntggcntgtnatatacccccaaaaattcttttaaacctaatggcnagaataaatgaccaaccttncatagtngagagagttcccctntctgcttcattaccttttttt

SEQ ID NO: 5672 - DNA, 269 bp, Homo sapiens
  misc_feature 98, 100, 101, 102, 105, 131, 132, 145, 146, 149, 160, 171,172, 173, 174, 175, 176, 178, 181, 186, 190, 191, 192, 203,207, 212, 213, 214, 222, 225, 226, 236, 239, 246, 247, 249,255: n = A,T,C or G
ccctttcgagcggccgcccgggcaggtacttttttttttttttttttttttttccttttttttttttttttttttttttttttttttttttttttttntnnngtntttttttttttttttttttttttttnnccccccggggccnnggnccctttttttngaaaaaaaaannnnnntnccnggggnaaannnctttttttaanttcnaaaannnaacccccnaanngggggggggnaanccccccnncnttccangggggaagggggcc

SEQ ID NO: 5673 - DNA, 616 bp, Homo sapiens
  misc_feature 542: n = A,T,C or G
cccttagcgtggtcgcggccgaggtacaagttcacagttccttatttgaaatcattggggctatatatgtatttaggaatatggtttcttgttttggttttttaattttagaaatgttaggccaggcacagtggctcacgcctgtaatcccagcactctggggggtcgaggcgggcagattgcttgagcccgggagttcgagaccaacctgggcagcatggagaaatgctgtttctaccaaaaatagaaaacttagccagcatggtggtgtgtgcctatagtcccagctacttgggaggctgaggtggcaggatcacctgagccagggatgctgaggttgagtgagctgagattgcaccacaccactgcactctagcagcctgggtcacataccaaaaccaggtctcaaaaaacaaaacaaaaaaaagaaatgtgatgggcacaaatattttatatttcattctacttctcaaggctatttcaaactctacaatcagatcattaatatttctttagtgacatgtattgaaccatgcctggtnagaagttttaagactgtaaaatggcttttcattcagggtttggtggcattttgaattttaatgcaaaaaaattt

SEQ ID NO: 5674 - DNA, 628 bp, Homo sapiens
  misc_feature 66, 267, 332, 336, 345, 373, 380, 411, 425, 447, 500, 524,559, 560, 589: n = A,T,C or G
cccttagcgtggtcgcggcccgaggtactccgttgagttcatgatgctctccggcccattcttcanatgcaagctgccagggccgggtctgaagagggcctctgcgttggtgttgatggttgtggtgagctgcttggcgtcatcgggcaccgtctttgccaccatcacaaaccggtccagatcgtcacacttgttctggggcttgttgatggccaagatattcagggaccagctgcactcatttaagtcatggctggtttgactcangatctggtgggagtcttcgactcgttgcagctcccgcttcatcttgttgtggaggatgaattccnggangcaggcagnatttgcaacagcttccttgacaaaatgnaggtacnccgggagggaacgagagcgggaaagagaganagagagagaacganagcgagaaccagaacgggagcnagagagagcgagagagggaaccggagccagaaaatagaaaaagacaaaaaacnggacccgagaagaagatgaagaanatgcataccaacgaagaaaacttgaaagaaaactnntagagaaaaaaagcttcttatcaaaaccnccttaagaattgggaaaatagagaacgaaagaaaaaccc

SEQ ID NO: 5675 - DNA, 661 bp, Homo sapiens
  misc_feature 585, 616: n = A,T,C or G
cccttagcgtggtcgcggccgaggtactgtagaactggaaaataaagctaaatacccccctccccccatgcaactatttagactttcagatgtgtttctaagagaatgaacctaactttaaaaaatctgttactcaccacagcaaagacaaagtctagatacttaatggtgctgctattgagtctaagtagagcagtgtgagaacggcagctgcctgtggagtgagttgtattggggttgatgttaataactgaagcaaccttatcctgagtgatgttcagctgcagccccatggtagccagcagacaagtatcattgccattattaactgaataggttccagcttctggtttttcctttggagtaggtgttgtagtaggagatggcacagtggtgtgtatggtgggtgccactgttgaagttttgtctttatcacacaggaactcatttgtgctcactgtgccattttggacaaaagcttgtactcttcaatcaacaagacctgatgcaaaaaaaacagaaaaggggaagatgtgagggatcagtcagagtggtgggctcaagagtggacttaatgagggctgnctcaaggttctgtaataaataaacagagtangcagcaaaaaaaaaaaaaaaaaaaaagtacctgcccggccggccg

SEQ ID NO: 5676 - DNA, 643 bp, Homo sapiens
  misc_feature 111, 216, 265, 314, 405, 420, 477, 482, 496, 547, 563, 589,600: n = A,T,C or G
ccctttcgagcggccgcccgggcaggtacatctccccattaattcaggtcatcttttgtatcctttaatgcaattttgtgtgtgtgtgttttttttttttgatggactttngccctgtcacccaggctggagtgtaatggcacgatctcagctcactgcaacctccacctcccaggttcaagcgattcttctgtctcagcctcctgagtagctganattacagacgtgtgtcaccagacccagctaatttttgtatttttagtanagatggggtttcgccatgttagcctggctggtctcggactcctgacctntggtgatccgcccccctcggcctcccagagtgctggggttacaggcatgagctaccgcacctagctagaccttatgttttgaaccaagtangggaacgagcataanctttgtggccaggcagaggtgggccctgcccaggcaaatgacctcacttctcaactnccttnatcccatcttcagnatgggaggaggataaaaccctcctggggttttataaaccgggggtgggcancttggaaaaaaaaatnagatgatccgtggagtttgcctaacntcgcataaggnctatttaaatggtagctgctagccgaaaatgccaaaatttttt

SEQ ID NO: 5677 - DNA, 298 bp, Homo sapiens
ccctttcgagcggccgcccgggcaggtacaaggcattttgctcaaaactgagcttatatttggacattgtatcttcatcataatcctgtggtaatgctattatcgtaagtaacaggtaagaaacctgaagaggaggggatagcaaatcatgtatttggacatatttccattttttttttttggttttgtgatgctagaagaatgaccagaatgagtcataggaagagtatcattcctgtagtattttgcaggacagaggtgtgacctcctagagtcctcggccgcgaccacgctaagg

SEQ ID NO: 5678 - DNA, 339 bp, Homo sapiens
  misc_feature 76, 135, 136, 137, 138, 141, 142, 160, 218, 219, 220, 221,222, 223, 224, 225, 226, 227, 228, 229, 230, 231, 232, 233,234, 235, 236, 237, 238, 239, 240, 241, 242, 243, 244, 245,246, 247, 248, 249, 267, 286, 300, 309, 317: n = A,T,C or G
cccttagcgtggtcgcggccgaggtacatggatgggagcagctttgccaacccttgcaaagaggactctgaagaanacgacaagccttgttccggtcacacccggaagctgactggttcaccgcattggcctaannnnttnngaaaacctcattcgcggnaataatttttccttaaaatttggacttgtaccttgcccgggcggccgctcgaaagggnnnnnnnnnnnnnnnnnnnnnnnnnnnnnnnntggatcccgagctcggtnccaaagcttggcgttaatnatggtcatagcttnttttttctntgtgaaantttgtttattcccggcttcaca

SEQ ID NO: 5679 - DNA, 283 bp, Homo sapiens
ccctttcgagcggccgcccgggcaggtactcttctgtccccagaaagtcacacatcctttagtggagaggccaggttagtctcataaaaaggcctgctatagctgtgtaataaaaggtgaaatttaaaggcataaatccaagacaagaacaaacaatgcctgcaatcttcgcagactgccctgtgaaggctcagagtgagtcaagagtccccgcgtactgatttcctgacaaatgatcttctccagcttctgatcgccatccttgaacagggcaaaggtggcc

SEQ ID NO: 5680 - DNA, 390 bp, Homo sapiens
ccctttcgagcggccgccgggcaggtacaatattctttcccttacatattctttttaaatataagatatttttattgaaatgggtgattatgacaaaggccttaggagagctcggtccaggggagcaatagagaagaactcagagaaaaagacaggctttgttttcccaaacattttccttatatccctggcttgctctttcccctgtgagcaccctggagctccagccctccgtcaccttctttctcccattttgcctgtgacttaggaatgaacgtgatggttaagctaccttcattaagcagcatgaccgcttcctgagctcctgctgccgcatttaggccctgtcagctgtgaggccactggtgctgagtcagagggaaaagctca

SEQ ID NO: 5681 - DNA, 488 bp, Homo sapiens
  misc_feature 293, 432, 448: n = A,T,C or G
cccttagcgtggtcgcggccgaggtacgcgggtccctcactgggagcttccccatcctccctgccttccccagtgggaagttagggaagctcaggagcctgggaccccgcatgtcccaaaatgggattggagaagctggagagaaagcagaagaggccgaggagtgaggcagcagcctctatgcttgatttccacaccgggtccgtgcagaggaaacagaaactcccaactgtccttacccaccgacatcacagcccctatgaagaaagtagccacaatctcaaataacaaangggaatgttctaaaactttttcttccttaaaaaatggagaaaattgcacttgtgcttgctgtgtgggtatataaaccaggattaggtcccagggtcgtgaggtttctggtgaaaagggttaaaatcgtagaagctagtntttttttttatatttntgtaaacaaattggctttttttcatggggggaggcggggg

SEQ ID NO: 5682 - DNA, 487 bp, Homo sapiens
  misc_feature 83, 111, 122, 128, 137, 145, 146, 147, 155, 163, 165, 171,173, 176, 177, 178, 179, 180, 182, 187, 189, 193, 194, 195,219, 221, 223, 234, 240, 241, 242, 245, 258, 259, 266, 268,269, 279, 289, 290, 294, 298, 304, 306, 308, 317, 319: n = A,T,C or G
  misc_feature 320, 322, 326, 328, 332, 333, 335, 339, 347, 357, 364, 375,377, 378, 379, 381, 385, 388, 398, 415, 416, 421, 425, 427,429, 434, 435, 436, 444, 454, 455, 467, 469, 476: n = A,T,C or G
cccttagcgtggtcgcggccgaggtacttttttttttttttttttttgttttttttttttttttttttttttttttttttttntttttttttttttttttttttttttttnaaaaaaaattntttaanaaaattttnaaaaaaannncttttttnaaaaaaantntttttntnaannnnngnaaatngntttnnnttttccccccccaaaaaaaaaaantncnaatttttttancccccnnnacnttttttttccccnnaaaaaanannccgggggggncttttttttnnaaanaaanaaaatntntnttccaaaanannantctngnaaanncncgcnaaaaaaanaaaaaaaaanaattttncccataaaaangnnngntttnggnggggggggtntaatttttttttttctnncaaanaaancncnctttnnnaaaaaaanaaaataaaanncctttttttcanancaaaaanttttttttttt

SEQ ID NO: 5683 - DNA, 549 bp, Homo sapiens
ccctttcgagcggccgcccgggcaggtacaaatacatttgtaggatagagtgctagaagtgaaactgctgagtcaagacgtgcattttagattatgatagattcaccacattgctcttttctgaagtcgttaagaatttacactcccatcaaaaaagtatgagtcttgcttagagtaggatgtcaagtgctgactgatcaatgtggaaaatgaactagaataaaaaaaatacaaattttgcaaccatcacagtaaacattagtccaggcaagcaccgtcaatggatatttgatctaaggggagagacttcagtcagtaggatatttttatggtcttaaagtgtatcccaagattgcttaaatacaaagggaaaaaaacagtaaccatatggtaataagacaaaatcttcatggattgatcaaaataatatcgccattgaaagacagacagtgtacatgtggttagcaggagtttaggatgagaagaaatttagtggacccgagaaatagtctaaatatcaagttttaatttgtgaaagaaaaataaaaa

SEQ ID NO: 5684 - DNA, 317 bp, Homo sapiens
  misc_feature 79, 243: n = A,T,C or G
cccttagcgtggtcgcggccgaggtacaatataaaataatacatatgaagccacaatattcaattacagttcaaactanaaattactaactacatgtagctgcttcatttttcgttttgcattttggcccctaatttcattattttacaactggatacctgctgagaaaaagatccaaacttttaaactttgtatgttttgtggagggtgcacaatttcttctaatttatcttcaagtgtttnaaaatttaatttgtttttaatcataagatatcatcatggccaagagactgggaaaataaacaattttattcttt

SEQ ID NO: 5685 - DNA, 346 bp, Homo sapiens
  misc_feature 276, 312, 325: n = A,T,C or G
ccctttcgagcggccgcccgggcaggtactgtattaatattaccgttggttcaaaagtaattgtgggttttgccattacttttaattggcatttaatggcatttgccattacttttaataggtgtttaatattggcaatatcttaattggcattaatattacattggtgcaaaagtaattgtgggttttgccattacttttaatgccattgcgggtcttgccattacttttaattggcatttaatggcatttgctagtacgcggggagaaaagctntataagttcaagggctgtaaaatatgaactacttanggtcgtttgcctntcatgggaacttggctagact

SEQ ID NO: 5686 - DNA, 624 bp, Homo sapiens
  misc_feature 57, 84, 119, 136, 179, 181, 193, 251, 253, 255, 311, 318,334, 462, 464, 477, 488, 500, 523, 524, 528, 529, 585, 590,591, 597, 607: n = A,T,C or G
cccttagcgtggtcgcggccgaggtactttatttttttttttttttttttttttttnaactgggttattttatttatttttganacagtgtctctcttgttgcataggctggagtgtantggcataatcacagctnactgcagccccgacctcccaggctcaagcgatcctcccacctnantctcttgagtanctgggacttcaggtgtgcaccaacatgcctggctaatttttgtattttttgtttttgnananatggggtttcaccatgctacccaggctggtctcaaactcctgggctcaaagcaatntacctgnctcggcctcccaaagngctaggattataggcttgagccaccgtgcccggcccaaaatggaaatttttaggaagttaggttttgcttgtgaaagtgatcatacgctgtcctaccactatcattttactgtgggtgcaggaaaagnanaaataaggatttnctccttaatanataacccttggngttatttgactttaaaatgaaannttanncttaaaaaacctttaaaaatcacaggcttgctaaaatattaattaaccaaatgccnctccnngctctntttaaaatanatttttcaaaaatgtaa

SEQ ID NO: 5687 - DNA, 424 bp, Homo sapiens
  misc_feature 31, 32, 43, 50, 66, 103: n = A,T,C or G
ccctttcgagcggccgcccgggcaggtactnnatttttttttnggatttntttttacttccggtancacattgacacaggggatcttgttatggtattgctgncaaaaattaaaaatgtgaaggttgaaaatactataggtgtaatgcccaagtttacataaaataccagtgaagttcctattgatagtgaatcttgggtctgtcttctaattcaaggaaggcaaccaattaaaacttcatttactttgccaaaaaggtaacacagaatcacttcaaaaacataagattcttggcacaggtaaaagaatatgatgatctaaaattcatttctaaatttttgcttctagcccctggcctaccagctcaaggttgttcccaacaacataaactaaagtgtctttggtcatttatttattgggtggg

SEQ ID NO: 5688 - DNA, 537 bp, Homo sapiens
  misc_feature 484: n = A,T,C or G
cccttagcgtggtcgcggccgaggtacatgcatgctagacattgagatgttataaattaactgtaaatattattgagattgtcaatatttctgggaaaaaaatgtattgggataatgctgcatatcatattctgtcagaaaagatctatacttaaaggcaaagattgggggatgttagttttcctaagtagggagggtagaattgggaaggggtagtaaaatgataggttgctctttacataaataaaaaggttttttatttaaaaaaaaaaaaaagtcttttctctctgatttaggcttgaccaaagctaacgccagacttctatgctaaaagcaatatgaggtatatgttaattagtttgagcatcataacatcaataaacaattaatattctgtaacccaattaagcctctgcttcctctaagttaaagagaggtcacagagggaaaaaaataattttattaaaatctaatatactaatcngaagggatggggaaaacaaaagtccctgcccgggcggcccgctcgaaagggcg

SEQ ID NO: 5689 - DNA, 552 bp, Homo sapiens
  misc_feature 14, 15, 42, 109, 372, 384, 447, 495, 520: n = A,T,C or G
cagaattcgccctnncgagcggccgcccgggcaggtactganatcaaggaggaggttaagactttttatttataccactttgtaaattattatttctgagtatgggctnaaactaaactccagctggagtctatctctatagttccaagcctcccggaatgaaactttttaaatattatcttggctggggtgctgtgaggagtaactaagacagtgcctctgggtgacacacaggctttaactgcaacctcaaaaattccattactcccatggcgatgagccggaggggagaattaccaactgctatttatggcttcttttaaatagtttatttcaatcacaaaagttacagttttataaaaggcaggggangaaggagaaaanaatgaattaaagaaaagatcacacactctaaaaaagcctgagctaactctgagaaagggttangtaagatttcagactcttcacattttatgaaacctattaatagagatnggtgctggccctgcccgggttcaantgactgatttttattttttaaattttttaaaa

SEQ ID NO: 5690 - DNA, 548 bp, Homo sapiens
  misc_feature 327, 388, 513: n = A,T,C or G
cgcccagtgtgatgggatatctgcagaattccccttagccgtgggtcgcggcccgaggtactattgacccagcgatgggggcttcgacatgggctttagggagtcataagtggagtccgtaaagaggtatctttctataaaagctattgtgtaagctagtcatattaagttgttggctcaggagttttgatagttcttgggcagtgagaagtgagtagtagaatgtttagtgagcctagggtgttgtgaagtgtaaatcagtgcgatgaagtaggggaagggagcctactaggggtgtagaataggaaagtatgtgcctgcgttcangcgttctggctggtgccctcatcgggtgatgatagccaaggtggggataaatgtggtttcnaagaaagatataaaatatgattaagttctgtggttgtgaatgttataattaaaggagatttgtaggggagattagtatagagaggtagaagtttttttcgtgataagtggttcactggataaatnggcgttggcttgcccatgattgtgaaggggtagga

SEQ ID NO: 5691 - DNA, 252 bp, Homo sapiens
  misc_feature 25, 76, 139, 146, 178, 202, 205, 218, 227, 234, 239, 242: n = A,T,C or G
cccttagcgtggtcgcggccgaggnacaactgtctagaatctagccgtcaggaccccatcgtggactggctttccnactggcattggcgttggccatggtgggttgtggttcttgttacttgtgcttctgattctcctnagcttancctgattctgaaacctctaccaattatgtatntcccatttatctgcaaagggtatnttnctaaaactgggtntgaaattgnatgccanatatngangaaaagttaa

SEQ ID NO: 5692 - DNA, 488 bp, Homo sapiens
cgccagtgtgatgggatatctgcagaattcgccctttcgagcggccgcccgggcaggtacaaatggactaagacaagggggaagaaatttgcattcctgatcttcccaacttcttcaaattcacaacacttgaatgacagtcttatttcagcacttactgctatcacctattacttttatgtgtgtcttacctatttgagatgccagattccttggaagtagagaccgtgtctgaatcatcattgtattaagccactcatccttaacaaatgcccaagccatggttaaagttcaataaatactttgttgaatttattaataaaatggcagaaatgtcattctcttccatatatgtttaataaatccctgataggtgctaaagcactgcactaggtaaaaattctcttctgatgctgctttttggccaaccatttttttatcatttattcattagctgacatttgctaagtgctttggaggggtcaaaa

SEQ ID NO: 5693 - DNA, 333 bp, Homo sapiens
  misc_feature 187, 225, 240: n = A,T,C or G
cccttcgagcggccgcccgggcaggtactttttttttttttttttttttttgggagtttgattattgaatgtcttgaagtagtcttaatgtgttaaatccacttggtgttctattactttcttaaacttgaatattgataactttctttaggtttcaaaagttcactgttattatttctttgaatanacttttaccccaacctcttgctatacctcctcttttanaccagtaatgattanatttttttgaggcctttttctagatcttgttggtttacttcattctttttcatccttttttcttttgctttctcttactgtgcattttcagta

SEQ ID NO: 5694 - DNA, 551 bp, Homo sapiens
  misc_feature 53, 118, 120, 122, 123, 124, 128, 131, 134, 138, 140, 141,150, 151, 158, 159, 161, 162, 163, 166, 169, 178, 184, 193,199, 206, 207, 208, 213, 218, 219, 222, 227, 230, 249, 254,256, 262, 266, 267, 268, 274, 279, 284, 285, 289, 290: n = A,T,C or G
  misc_feature 295, 303, 309, 315, 324, 339, 341, 342, 344, 345, 346, 352,353, 355, 377, 380, 381, 394, 405, 408, 425, 426, 436, 441,443, 447, 449, 455, 456, 461, 474, 475, 476, 477, 478, 480,489, 490, 492, 493, 495, 496, 500, 511, 512, 513, 524: n = A,T,C or G
  misc_feature 525, 536, 551: n = A,T,C or G
cccttagcgtggtcgcggccgaggtactttttttttttttttttttttgggtngggttttttttttttttttttttttttttttttttttttttttttttaataaaaaaaaacctttntnannngggnctngcngttngnngcctttttnnaaaaaannannntgnaanctttttttncaaatnaaaaaggangttttnaaaaatnnnacctngcccnnttntgaancantttaaaaccctttaagggngtttngnaaaaancccnnntttttnaaaanacccnntttnnttttncaaaaaanagaacntttttnggaaaaaanaaaaaaacccccctncnncnnnaataanncnaattgttttttttattttgggnaanngggcaaaaaagcnggccccttttnggncttcccctccaaacttnnggtccatttnttatngngggnantttcannttttnttcgggggggggnnnnnanaccccgggnnanngnnaaanatggaaacccnnnttttttttttnnccccggttccnttccccgggggggcn

SEQ ID NO: 5695 - DNA, 731 bp, Homo sapiens
  misc_feature 105, 272, 340, 350, 458, 468, 483, 487, 514, 519, 534, 552,587, 601, 608, 609, 614, 622, 642, 664, 677, 678, 689, 698,711: n = A,T,C or G
ttcgccctttcgagcggcccgcccgggcaggtacgcgggattctccctgaatcttaccaacaaaacactcctgaggagaaagaaagagagggagggagagaaaangagagagagagaagcaaaaaaccaaagagagagaaaaaatgaattcatctaaatcatctgaaacacaatgcacagagagaggatgcttctcttcccaaatgttcttatggactgttgctgggatccccatcctatttctcagtgcctgtttcatcaccagatgtgtngtgacatttcgcatctttcaaacctgtgatgagaaaaagtttcagctcctgagaatttcacagagctnttctgctacnattatggatcaggttcaagtcaagaattgttgtccattgaactggggaatattttcaatccaactgctcttcttttctactgacaccatttcctgggcgttaagtttnaaagaactgntcagccatggggctnactngtggttatcaacttacaggaggaaccnggaanttcttttcttccaanaaaccttaaaattgaganaagttttttattggactggcaaaaccaggtttttnaggggtaatgggcnaattggnnggacnggacaccntttgacaaaggtcttttganctttttgggaatttgggggagncccaacaacattnntttccctgggngggcttggncccccatgagaanaatttttcaaaccccaaggg

SEQ ID NO: 5696 - DNA, 522 bp, Homo sapiens
  misc_feature 33, 34, 35, 40, 42, 48, 49, 50, 52, 54, 56, 72, 73, 126,168, 195, 223, 349, 366, 504: n = A,T,C or G
ccctttcgagcggcccgcccgggcaggtacttnnnttttntntttttnnntntntngcttaaaaaaagtgtnnaaatgtgtttttccctgaagatttccagtgattccacagtgtttaaaaaatantttccccaaaaatatatcttgaaagcatttgacacagtggtntttgtggcgtatctggcgcttgtcagngtggggcccaggcctgatgagccaccancccagcacccgaatgcctgctgaaggtggcgcacacgtgtgcctgggatgtccggctcttcacaggggatcagacccgcgtaccaagtgaatttaaataattggtgtggattggtcagtaactaantgggcttttaaagagtnttgaaaattgaaagggtttttctttcttttttaaaaaagaaaaacaaactattgattgtaaataatgaaaagctagggtttgccctcttcatgtctactctccttccaaatagttttatccaaaactgtttttccctntcccctaccttgcccccc

SEQ ID NO: 5697 - DNA, 389 bp, Homo sapiens
  misc_feature 268: n = A,T,C or G
ccctttcgagcggcccgcccgggcaggtactgagctccacaaacgtggccatggttggtgcggaaatgattctgagtgagcaggtagaagtctcacgtcctgctgtgtcagagttggttccttccagagggttcgtggtctcgctggcttcaagaatgaagccgtggaccttcacagtgtgtgttacagctgttaaagatgttgtgtctggagtttgttccttcagatgtgtctggagtttctcccttctggtgggtttgtggtgtcnctgacttcaagaatgaagccccagactgtcgtggtgatccgttgtaactcttaaaggtggtgtggacccaaagaagtgagcagcagcaagatttttcgtcaagagggtaaagaacaaagtt

SEQ ID NO: 5698 - DNA, 155 bp, Homo sapiens
  misc_feature 32, 92, 100, 103, 136: n = A,T,C or G
ccctttcgagcggccgcccgggcaggtactantgaagaaacagtttatgtgcaaggtgtataaaaaaatatacctttgataaaaagattatnaggaggcntangaatgtagaattttttacctacattaaataggntttaaaaaaaattatttgg

SEQ ID NO: 5699 - DNA, 767 bp, Homo sapiens
  misc_feature 7, 18, 20, 22, 24, 25, 31, 35, 36, 39, 41, 50, 51, 52, 53,54, 56, 58, 67, 69, 72, 73, 74, 76, 78, 80, 85, 86, 87,91, 111, 120, 133, 134, 138, 164, 165, 166, 167, 168, 172,185, 199, 201, 206, 208, 486, 503, 553, 589, 612, 615, 623: n = A,T,C or G
  misc_feature 627, 633, 642, 644, 657, 658, 688, 713, 717, 729, 735: n = A,T,C or G
cccttancagcggccggncngncnngctcanagcnnatnangctgaaccnnnnnantntgatgatgntnacnnntnangnagacnnnactnaacacattaccccaattgcntttgagtcnggaaagacctagnntatncacaaattgactgtttaacttattgnnnnnaganccaaaatgtgatnctaaacagcttctngntgatncntactggcaacctggaatggagacttttatctacttctctctctctgaagatgtcaaaatcgtggtttaagatcaaatatatttcaagctataaaagcaggaggttatctgtgcagggggctggcatcatgtatttaggggcaagtaataatggaatgctactaagatactccatattcttccccgaatcacacagacaggtttctgacaggcgcaactccttcattttcctcccgcaggtgagaaccctgtggagatgagtcaatgccattgactganaaggaaccgacccctanttgagagcaccttgcaatttcccgaagaactttttgattcacaagtcttnattttgacagcatgaaatggtctcttggaaacatancttttttaaataatcttttttcnttntactcctncctntgactnttaaaaatntnttttttggaatcnntttgacccaagaaggcggaggttgcaattnagccaaaggtatgccacttgacttntaanctggggggcaanaacgangacttcattaccaaaaaaaaaaaaaaaaaaaa

SEQ ID NO: 5700 - DNA, 503 bp, Homo sapiens
  misc_feature 414, 444, 449, 453, 478: n = A,T,C or G
ccctttcgagcggcccgcccgggcaggtactaaatttcatgtagaaatgtcttagttgaaaagccattttaagtcctatataagctaacagtgattttactcttagttcttcactcataaggattttccctgcttcatgaaataaacagtgttgccaccatggtttgaggtctcaatgtggcaaatttagctttcatgttgaccactctgctactaatagaaataccaaataaagagaagcagccataccagttagacatattcaaaataaatccaaagatgctatttattataagtttcatagaaatgattatcaaaaacacttgcatgccaatgttttcttgtgccatttctttctacaataaatctatttggcttctgtttcaccttagctgtcatagacctgttggtcanggatcatattggcagtaccatacagaagtnaaatnccangaactatgaacactagaccttatgngggttattccttcaatcatttcaaa

SEQ ID NO: 5701 - DNA, 192 bp, Homo sapiens
  misc_feature 32, 131, 136: n = A,T,C or G
taaggataaacaagaaaaggaaaaaagcaganaaatgcattattgtcaaaaagcagtcctacattcaaggagtcatgagataaaatgaagtgcctgggggaaactttgagaagcttagtttgaatgaacanagganaattgggacttcttaaagagcgataacactggaaatgtgtggaagagtccaaacca

SEQ ID NO: 5702 - DNA, 515 bp, Homo sapiens
  misc_feature 80, 314: n = A,T,C or G
ccctttcgagcggcccgcccgggcaggtacgcggggtatgttgtccttgaaagggcataggtctgtgggaggcatccggncctctctgtataatgctgcacaattgaagacgttcagaagctggccgccttcatgaaaaaatttttggagatgcatcagctatgaacacatcctaaccaggatatactctgttcttgaacaacatacaaagtttaaaagtaacttggggatggctacaaaaagttaacacaagtatttttctcaaatgaacatgtttattgcagattcttctttttttgaaagaacaacagcanaacatccacaactctgtaaagctggtgggacctaatgtcaccttaattctgacttgaactggaagcattttaaagaaatcttggtggcttttctaacaaattcccgcgtatttttgcctttgctgctactttttctagttagatttcaaacttgcctgtggaccttaataatgcaaggttggcgatttaattatttctggg

SEQ ID NO: 5703 - DNA, 599 bp, Homo sapiens
cgccagtgtgatgggatatctgcagaattcgcccttagcgtggtcgcggccgaggtacctgagcccctaaaaggtaaagactcatccaagctgttctgagattccctccaggcagggaaatgactatctggatctgagattatgtcatcttcatcaagttcttctttaaccagagaggcttcgggtttcagacacacagaagcataattctggccatacaaaaacctcaatgtttcttctgtcttccactcaatcaaagtctccttcaaaactttaagtaagtttctctttccaacttcaggacacacctgcactgaactagacactgacctagacacttggtttgatttggcaaattttctcttaaaatgctctgcacttttcttacttatgcctactagagttatttctgacctactgtattcactttcagaattttctgacgcttttaatctttcaggcaaagtgctatttgaagaactctgagtatttactttctgtaaaggaagttcacatgtagcatctttctcctgactatctaatttgcaatcgcctaactgctcaatgacatctactactggctggtctttggctttggg

SEQ ID NO: 5704 - DNA, 447 bp, Homo sapiens
  misc_feature 386: n = A,T,C or G
cccttagcgtggtcgcggccgaggtacaggcgctaattgttgtgataatttgtaattgtgacttgttctccccggctggcagcgtagtggggctgcaggccccagctttgttccctggtccccctgaagcctgcaaacgttgtcatcgaagggaagggtggggggcagctgcggtggggagctataaaaatgacaactaaaaaaaaaaaaaaaaaaaaaaaaaaaaggtccttactgtcgttggatcccatgctaatgaggtcatcagaatcaacattgtgaactatggctgccttgtatcctgctctctgggcatttaaaacctttatatcaaaattacaatcaagtcttctaattaacacgatgaaagtgccagatgaattgtnttttactggtggaggcactatgggttcacaggcattctctggttttgagttaatcaaaaaa

SEQ ID NO: 5705 - DNA, 334 bp, Homo sapiens
  misc_feature 11, 63, 101, 125, 131, 132, 166: n = A,T,C or G
cccttagcgtngtcgcggccgaggtaccttgactttgttcacagcatgtagggtgatgagcantcacaattgttgactaaaatgctgcttttaaaacatangaaagtagaatggttggagttgcnaatccnnttaccccaaagaattaaattggagctaggttaanggcaaatgcaggtaataatagtcatgattctatgtaatggtaaaccagaaaaaataaatgttcattgatttcaagatgttatattaaagaaaaactttaaaaattattatattatttatagcaaagtttatcttaaattatgaatttcctgttgtaatttaaatgact

SEQ ID NO: 5706 - DNA, 381 bp, Homo sapiens
  misc_feature 36, 317, 332: n = A,T,C or G
ccctttcgagcggccgcccgggcaggtaccctgacnccaaaaccagaaaaagacacaacaaaaaaggaaaactatgtgccagaacttaaagtataactttaaaaaaaagacgtaaatgcaataaacagatatcaatagaaacaacaaaaaattagaaagtttggggtgatggagttaaaagtttataaattgtatgagttatttattagttgggtttttttgcaatcagaattaaattgtcatcagtttaatatgatcatttataaaatgtcgtttcaagcctcatggtaaaccttcaaattaaaagacctacagtngacatacaaaaaaantaaaaaagcatggaaattaaaacacaccataaggagaaaaataccttta

SEQ ID NO: 5707 - DNA, 368 bp, Homo sapiens
  misc_feature 135, 181, 287, 300, 301, 336, 357: n = A,T,C or G
cccttagcgtggtcgcggccgaggtactaaacatccctcattatcattctcagggaaaagatgaatgtagaatctctgctgagctagtatttcctgacaccctgtttatgtgccttgtgaattgtgggcattgcnttgtggggttatttcatttcatcttcacaatcaccctccaaaagtnaaaaaacaaagactgcctcactcaaatgtccactgccatcagtgccccatgagtatatatacggtgccaagctctgccattgatctctccagagaagagggaagtnaaaccaaaagaanntgaaagacgtgtctgactgggaaagggaacatctngtgacacctttctttttcccnaatggttctta

SEQ ID NO: 5708 - DNA, 265 bp, Homo sapiens
ccctttcgagcggccgcccgggcaggtactgggacatccgcgggctggcccacgccatccgcctgctcctggaatacacagactcaagctatgaggaaaagaagtacgcgggtatgatctttgtataggacgtgtgttgtcattatttgtagtagtaactacatatccaatacagctgtatgtttctttttcttttctaatttggtggcactggtataaccacacattaaagtcagtagtacctcggccgcgaccacgctaaggg

SEQ ID NO: 5709 - DNA, 392 bp, Homo sapiens
ccctttcgagcggccgcccgggcaggtacaattcagtgacatttattatatttacaatgttgtgcaaccatcaccactaattcatcaaattttaataatcttttaatttttgagccagatttagcaagtgaggggctatataccaactttaatgacactaatgttaataagttctgataacccactaccatcagaccagctgtaattcatccaattttcatcatcctaaaaggaatccccatacgcattacgcagtcactcccttttcaccccctccctagttcctgataactactaattggctttgtcaccatggatttgcctatttttggatatttcatataaatggaatcatgtggctgggcttctttccacttagcatgctttcttaa

SEQ ID NO: 5710 - DNA, 460 bp, Homo sapiens
  misc_feature 27, 37, 42, 45, 46, 48, 49, 50, 54, 55, 56, 65, 67, 68, 69,75, 85, 93, 148, 159, 185, 190, 198, 201, 227, 260, 290,310, 311, 333, 356, 385, 390, 437, 449, 458: n = A,T,C or G
ccctttcgagcggccgcccgggcaggnactttttttngtttnttnngnnntttnnnggcaaacanannnaaactntttcacccangctggagngcaggggcacggtctcggctcactacaacctctgcctcctgggttcaagtgattnttttgcctcantctcctgagtagctgggattacaggngtgcnccaccaanccnggctaatttttatgtttttagtaaanacggggtttcaccatgttgatcaggctggtctnaaactcctgaccttgtgatattttcttaanacttccttttactttactgnntggactcaccctgaattttttnttgagcaaaatccaaaaaccctnttttggggcttggattgggacctctttcnggtanaactctgcacattttcttatttttccaattaaaagaatcaagctgcntttgtcttcagnggtctaaanaa

SEQ ID NO: 5711 - DNA, 282 bp, Homo sapiens
  misc_feature 96, 119, 135, 142, 145, 160, 164, 173, 193, 211, 259: n = A,T,C or G
cccttagcgtggtcgcggccgaggtacttttttttttttttttttttttttttttagagacaggttcttgctgtgttgcccaggctggagtgcagnggtgtgatcatggctcactgtanccttgacccccggggntttaaanaantccgcctgcctaaancctnttggagtanctgggaccacaaggcatgcnccaccctgcctgggcaantatttcttttcttttctttctttttttttttttggaatgataaagacnttttaaatgggccctagtgatga

SEQ ID NO: 5712 - DNA, 540 bp, Homo sapiens
  misc_feature 420, 422, 426, 437, 443, 465, 467, 476: n = A,T,C or G
ccctttcgagcggcccgcccgggcaggtacaggaatagtcaattatgtgttcttctcatgctcagtaaatcagaactttacataagttcaggtgaacatagagtagctacctggggagatatttcacctttttatctgtagcgctctgcttaagaacaaaggaaaaaacagcttcttgcatgattcaactttcagcttaatttttttctttaggcatagtgaattggggtcccaggtttttatttttctttcacaaaattaaaactgatatttagactatttctcggtccactaaatttctcttatcctaaactcctgctaaccacatgtagtctctctggtcatttccctatttatttatatcaacattttcttcttggtgccacttcaatgccccattaggggaaaacaacagaaatntnacancctgggatccnttaganaaaacagaaagaccttcagacntntttttgganaaactccggggttttttttggttggttggttgggtgggtggggttttttggggggtttttttgg

SEQ ID NO: 5713 - DNA, 436 bp, Homo sapiens
ccctttcgagcggccgcccgggcaggtacaaaaagttaaaaagacagccctattgtgatcagtggagatggagatttgaaagaagtttcaatttaatgaatgtgtttggtaaaagggtgagaaatagtttaacagtagatcacatcaggtttaatgaccattcattcattggaaaaagaatcgcactcattggcgcgcagcttcatttgtcaaatcatggttgaatcgaaactataggttggcaatggatataagagttggcaaaacttgggctgagtgcagtggctcacgtctgtaatcccagcactttgggaggccgaggcatgtggatcacctgatgtcaggggtttgaaaccagcctggccaacatggtgaaaccccatctctactaaaaatacaaaactggccaggtgcagttggctcatgcctgtaatcc

SEQ ID NO: 5714 - DNA, 443 bp, Homo sapiens
  misc_feature 424: n = A,T,C or G
cccttagcgtggtcgcggccgaggtactgtgtgacattagctctgatttcaaagagcttacaacagagctagataaaacaagaccaggatatttagaacatttggagaataacgagaggatatataataaagggctaaactgaatataattaaatgtcagcctgcatggtgccatgagcaacagttaattaaatccaggccataatccatgtcctggttctaagaaaagagtctcctacaatctcttactttccactgtaactaatacctggagttcagtccagtaacgtaatttagcaatggctatatttccatgctcaaaagggaactctgttgatcttgaaatgtgtatgtatgtttaaaaatgtctatttaattttggggggaggaaaggtagcttttgattgcacttggtgattgagtnttcaaacttaatgcttctg

SEQ ID NO: 5715 - DNA, 636 bp, Homo sapiens
  misc_feature 270, 433, 451, 514, 560, 623: n = A,T,C or G
gatatctgcagaattcgcccttagcggccgcccgggcaggtactgggattacaggtgtgagccaccacacccgggctctgtgatttgtttgttttttgagatggagtctcgcactgtcatcaggctggagtgcaatgggtgcaatctctgctcactgcaaactccgcctccctggctcaagtgattctcctgcctcagcctcccgagtagctgggattacaggcacatgccactgcgccaagctaatttttgtatttttagtaagaaacngggtttcaccatgttgcctgggctggtcttgaattcctgacctcaggtgatacttgcctcgccctcccaaagtgcttgggttacaggcgtgagccagtgcgcccagccgcctctgtgattttttaaattgtgtcactcacactaaatttaacagcaatttttnttgataactcattttttntggaagtctttccaagaacattaaacttagttttcatagaaattgcaattctctttggatttnaattaaacttacataaattaaaaataacactggcataaaacagacnttggggaaaacttaaacctctttgggaaagtttaaaacctcaattgaagtggagtagaaagtntcccgaaaaaaaa

SEQ ID NO: 5716 - DNA, 556 bp, Homo sapiens
  misc_feature 224, 225, 334, 401, 481, 482, 494, 515, 541, 545, 555: n = A,T,C or G
ccctttcgagcggccgcccgggcaggtactttttttttttttttttttttttttttttgggattttagcttattttattaatagcttatttccttacaaatatttccccacacgtttatttagtcgcagacttcatgcatacaaaatgcacactgctatgatcatcgtaaccatcagcaagcaggcattgtcatcagcgcttctttatttctgtggtttctcannctcttttattttctttctttaaaaaagaaaaaaaacttttttttcctggtcaacagggcctgggcaacatggcaagactgtctctttaaaaaaggaagaaaaaaattanccaggtgtggtggtgcgtgcctgtgcttccagctacttgagaggttgagataggaggatcgcttcancatgggaggtcaaagccacagtgagtcgtgtaaaataaaaacattcagatgctcttaagtgactttcagtgtcctcagtnnaaatcccaaatngatggcttggcttatagtcangatttgaccttaagtaactttttaanccgnattttcccana

SEQ ID NO: 5717 - DNA, 336 bp, Homo sapiens
ccctttcgagcggccgcccgggcaggtacgcgggtaagactgacgtatccgtatacttaagtgttcctgaaggtcccaggaaatcctagtgcaatgctatgaaagtctttggagtctttgaatgcatctactttacaggcctctgcatggacctgggaagctttggaaagatgtgtcccccagaacatctaaggcatattagaaaagttgtttacacaaatgcatgggagagttaaatattttgtcaacaattgtctaaaatgttaattgttagcttaagaaagtcaaacaagttaaatcattgccagagtacctcggccgcgaccacgctaaggg

SEQ ID NO: 5718 - DNA, 382 bp, Homo sapiens
ccctttcgagcggccgcccgggcaggtacgcgggtattccacctgttctttgagctggtccagtgttgctggagagctctgcttgctgccttggtctgcagtggcagctgtgctttcctacaagcccaacttcatatattctgtggttttgggttttgaatgtttcctagtttaatcaaggatgggcatttctgtttccattttgtgttatttttagttatccatggaaagatagaaacagaactatctttagtattaaaattacaagtttccaggaatcagttctgaaattattttgcatctttgaagtgtcttaaattttaaaaattggtcttggccaggtgcggtggctcaccgcctgtaatcccagcacttcggaggc

SEQ ID NO: 5719 - DNA, 570 bp, Homo sapiens
  misc_feature 127, 152, 154, 157, 158, 160, 161, 173, 174, 175, 180, 182,186, 195, 200, 201, 203, 207, 208, 211, 214, 218, 241, 243,245, 247, 252, 253, 269, 277, 291, 293, 294, 298, 317, 318,332, 345, 352, 392, 396, 399, 408, 411, 414, 430, 437: n = A,T,C or G
  misc_feature 441, 443, 451, 467, 481, 492, 493, 494, 498, 508, 509, 533,534, 535, 536, 542, 558: n = A,T,C or G
ccctttcgagcggccgcccgggcaggtactttatttttttttttttttttctttttttttttttttttttttttttttttttttttttttttttttttttttttttttttttttttttttttttttnttttttttttttttttttttttttnanaanncnnaaaaaaaaaaannnttttncncccnaaaaaaaanttctnnanaaannttnttntttntttaaaaaaaaaaaaattttttnanananaaaanntttttttttttttttnaaaggggnaaaaaatttttttngnncccncaaaaaatttttttttganngaaaaaaaaaacanttttaaaaacccnggggggntttttatttttttttataaaaaaaaaaaaaaaaaaaaacncccntgntttttttanaanggnggggggttttttttgnaagcccnaaananaaattttntttttttaaaaccccnttttttttttcccnaccaaaaatannnaccnttttttcccnnaaaaaaagggggaaaaaaaacccnnnntggggntttttttattttgganaaaaaaaatttt

SEQ ID NO: 5720 - DNA, 535 bp, Homo sapiens
  misc_feature 362, 398: n = A,T,C or G
ccctttcgagcggccgcccgggcaggtacccagccatgtgaggtgtcagtctgcccctgctggggggtgcctcccatttagactgctcggggatcaggggtcagggacccacttgagtagtcagtctgcccattctcagatctccagctgcgtgccgggagaaccacttctctcttcaaagctcagatggaaatgcagaaatcacccgtcttctgcgttgctcacgctgggagatgtagaccggagctgttcctattcggccatcttggctcctccccgattttgcccaaattaatgtcagataccaaaccagttattcaggaaggttggactacaccaagaaaaattgatgccaaaaaaantcccccatacctaggtatattatttgtaaacctcanaaaagcaaaagtaaaaaatgtcctgaaagaagaccaaagaaaaaacaccttaccaatagagaaacaaaggtgagaattaaatctgtcttttcagaaaaccatgcaagcaaggagaagagtgaagtgccaaaattcat

SEQ ID NO: 5721 - DNA, 299 bp, Homo sapiens
  misc_feature 136, 137, 147, 149, 158, 159, 172, 182, 185, 187, 210, 215,229, 231, 254, 257, 272, 273, 285: n = A,T,C or G
ccctttcgagcggccgcccggacaggtacgcgggggtagtcgggtatgagaacgattgcaagcaaaagcagctgagggacgctgtccaaggagtaggctcagtagcacgaactgcaaatacttgagaagggaaaanntcagcccttntnctggaaaannggttttatccttncttgggaaanctngnttttttttggcttttgggtaagnccctnacaaactttttggncncccaacttaactttgggcccttnttngtggaaccttcaaannaattttcccttncttccttttaaaaa

SEQ ID NO: 5722 - DNA, 685 bp, Homo sapiens
  misc_feature 221, 287, 359, 389, 501, 510, 517, 525, 527, 534, 562, 564,570, 585, 608, 610, 649, 655, 669, 672: n = A,T,C or G
ccctttcgagcggccgcccgggcaggtacacccggagcccgaggcttgcggcgaccacgagcagcaatggactcttgtggctgacttcactcaccatgctcacactgcctccttgtcagcagtagctgtaaatagtcgttttgtggtcactgggagcaaagatgaaacaattcacatttatgacatgaaaaaaaagattgagcatggggctctagtgcatnacagtggtacttttttttttttttttttttgtagagctagggtttcaccatgttgcccaggcttgngattttgatgtctatgattatagactaataggaataattatttctaaacatctgatttacacatacagaganggattaggtattttttttaaaaagtttatnttaaaacacatatgctcattaataggtatgaattcattacctttcttgctgagtctgcgtttaagttccattttgcttcttggtccccttcttcaatcctttctggttaatnaaaggaggnaaagtcntggatacngntaccttnaaatgaattcatattcagaaaaaggttntnaggccncgaatcatgtgactnttaccaaataatggatcaaaccncnccacccaccattgttaaaaagttgtaaaaaaattttggngggaanggtggtttttttanccnccccccctttccc

SEQ ID NO: 5723 - DNA, 261 bp, Homo sapiens
  misc_feature 40, 44, 64, 68, 91, 102, 122, 123, 129, 143, 144, 145, 147,149, 150, 161, 165, 176, 194, 199, 201, 204, 212, 218, 219,225, 230, 239, 245, 249: n = A,T,C or G
ccctttcgagcggcccgcccgggcaggtacggggggggtncgtntgctgggtttgcggagcaantacntactcggcgggatctcccggcangatgggtaaanagataaagaaggaagtatannctcctnctaaggatgtgttnnncncnntaatgattganagcnaaaaagcaccntctgtggtgttaatgctnaattntncanaagagganattttnnctaaancatgngaagccatntataantttnctttaaaaggtg

SEQ ID NO: 5724 - DNA, 263 bp, Homo sapiens
ccctttcgagcggccgcccgggcaggtacacactccacagggtgggagtggtcctagcacacgggctcaagagcccagttacagaattttgtggggtttaaataccctctagaggtttccattggttacttccattggtttatattggtgtatgccctgtgtaatgaagagcatgaagttaagttacaaagtcatctactctgtgtatagccctatgtcaatggagagggtattacctgtcatcacttgaagtgtttccattt

SEQ ID NO: 5725 - DNA, 516 bp, Homo sapiens
cccttagcgtggtcgcggcccgaggtactctaggaatttaaaaagacacaaaattatttttttccagactagtgtgccatggatttctgataagaattaacattcttgaacaaaggtatcaagaaagggtaactcgagttgaaggtttgtgaatagaaggggaaatgtgatagaagattattcagaacaaaataagtagacaaaataacaaaagacaggaaaataagtctctttgtatccttattaatcatttgaaattatgctataatattttttaaaactcacctgtttggttctgggtgaagcagttcctgaaggagtgttttgtcagaatatattgttaggagaatagagggttctgtggccaagtaagtttgggaaatagtgggttagacaaagttgagttactgttggcctttcagacctttgatacgctaatgtgcattttaaatctccaagaagcacctctattttatacatcatttcctaatttattttaatatggatttcttggtt

SEQ ID NO: 5726 - DNA, 666 bp, Homo sapiens
  misc_feature 32, 51, 52, 442, 488, 490, 501, 512, 530, 549, 612: n = A,T,C or G
cccttagcgtggtcgcggcccgaggtactttnttttttttttttttttttnncttgagacagggtctcactctgtcactcaggttggagagcagtggtgtaatcacagctcacggcagccttgaactcctgggcacaagtgatcgtcctgtcacagcctcctgagtagctaggactacaggtgcatgccactatgcctggttaattttttaaatttttgtagagacatggtctcattatgttgacaaggctgggatgttccccccacctcctgtgagaagtctcattgtcacccaggctggaatgcagtggtgtgatcttggctcactgcaacctccgcctcccaagttcaagtgattcttgtgcctcggcctcccaaagtagctgaaattacatgcgtgcgtcaccacacctggctaatttttgtatttttggtaaagacngggtttccccatgttggccagtctgggctcgaactcctgacctcangngaactgcctgncttggcctccnaaagtgttgggattacangcgtgagccactattcccngccctttttgaattttaaaaaaagactttagttgatcaacaccaaaccccccaatttgtcccnttttcttggcaagtaaaaacataaccctggaagcctgaattaattaattttttt

SEQ ID NO: 5727 - DNA, 277 bp, Homo sapiens
  misc_feature 39, 45, 47, 55, 62, 76, 87, 90, 92, 93, 95, 113, 161: n = A,T,C or G
cccttagcgtgggtcgcggcccgaggtactgaaactgtngcccangngaaaaagnggggcangtgcacaaagaaanaaacatttttnttntnncnggggcgggggcggcgggntagtccacacttacacaccagcaggtatgctggggaagggccccccangtggagttgcctgacatagggctcgctccagaggccgcctgactcataagctctgaaagaggtgtctacttgaggtggggagggagtaccttcccgggcggtcgatcgaaagggcg

SEQ ID NO: 5728 - DNA, 677 bp, Homo sapiens
  misc_feature 55, 111, 128, 129, 132, 136, 143, 152, 153, 157, 158, 159,160, 162, 163, 169, 170, 171, 176, 177, 178, 179, 181, 182,187, 192, 193, 199, 200, 202, 203, 208, 209, 210, 215, 216,218, 228, 230, 232, 233, 235, 243, 244, 245, 246, 249: n = A,T,C or G
  misc_feature 250, 254, 255, 264, 267, 268, 280, 281, 282, 283, 290, 293,297, 301, 305, 317, 318, 320, 321, 325, 329, 332, 335, 336,348, 354, 357, 367, 372, 376, 383, 393, 396, 416, 420, 436,446, 449, 459, 484, 486, 489, 494, 504, 507, 512, 521: n = A,T,C or G
  misc_feature 525, 530, 531, 532, 533, 536, 537, 557, 566, 580, 583, 592,597, 617, 638, 641, 644, 645, 659, 676: n = A,T,C or G
ccctttcgagcggcccgcccgggcaggtacttttttttttttttttttttttttnaaaattaaattttttttttttttttttttttttttttttttttttttttttttttntttttttttttttgaannggnttcnaaaaaanttttttttnnaaannnntnntttttnnnttttnnnnannaaaanttttnnaaattnntnnaaaannnccaannanttttaattcngnannanggtttttnnnnttnnaaannatttttttnggnngggggcccattnnnnatccttnaanggcncccncccnaatttttcctgnngnngggncccnccnaannaaaacctttttnaagaanttnaaattcccangggtntttnttttggnaaaaaataanttnaaattttcccttttggcctntggnccaaaaccccaaaaangggggggganggnctgttttttnttttaaaaaaattggccctttgggnanccnccccnttttttttanaanaaaanaaacccccnattntttannnnggnnaaaaaataaaagaaacctcntttttaaanaaaaaaaaaaaaanccnttttaaaangcccnttttttttaaaaccccaaanttttttttaaaaaaaattttnggnccnnaaaaaaattaaaanttttttaaaaaaaaaant

SEQ ID NO: 5729 - DNA, 729 bp, Homo sapiens
  misc_feature 458, 470, 480, 497, 529, 540, 564, 598, 624, 630, 645, 652,692: n = A,T,C or G
ccctttcgagcggccgcccgggcaggtacgcgggtatatactgttatgcataaagaaccttaggtgttcattcgtttgcttctattgatactacattaaatttacttataatcataggttaatagtttaatgaaagcataaaaatttagtatgcctatgtttttctctttctttccagacggattccatttctaggtatgttttatttattttttaactgacatttttttcttatttttatctttgttaaaaatgtgttgctaggaatttatggattttgtaagtttatagaattatttgataataaaaaacaaattttgatggccttatcattgttactagctttctttggtaaaggctttacttcaagatcactagtcagagcaagtaaagaattttccccaaatctctacaacaaaggtattccaaagtttcttaaggtagttcaactatctcantattaacatcanggactggatnaaacccacactttggcnggaaatgtatttggattaaatattcaaaaacnttttttggaancctggcttttaaacaaaagaaaancagtggaaaacactttttaaaaaagggtatctanctcaaacccttaatcctaaccacttngggganggctgaaggcagganccttacnttggggtcccggaagttgaaaaacaaccttggccaaattnaagaattcatttttttccaaaaaaaaaaaaaaaaaaa

SEQ ID NO: 5730 - DNA, 373 bp, Homo sapiens
  misc_feature 125, 133, 135, 137, 138, 149, 213, 218, 220, 244, 284, 327,352, 363: n = A,T,C or G
cccttagcgtggtcgcggccgaggtacttgttagctgtatatgtcagaattgattaaagagaaccaactattcttgtgcaagggatggtattgtagttaattatgacatttggagaaactaattnctgtctgntngnncttatctctgnttccatttagacttaagagactttacatggggcaatgctttgactttttgcattcatgcaccanaaaangnttaagttaattccacttgtggttnaaaaatatttaaacctaaaattttataatggactttcttngacctgctgtaaggtaggaagaaatatttatcattataaagcnacccatttttcctgaaatttttttntgtttactacnataatttttt

SEQ ID NO: 5731 - DNA, 121 bp, Homo sapiens
  misc_feature 76, 80: n = A,T,C or G
agatggatatctgcagaattcgcccttagcgtggtcgcggccgaggtacctatatgttggagttaatgtgccatcncttntacacacacacacacacacacacacacccttacctatttag

SEQ ID NO: 5732 - DNA, 521 bp, Homo sapiens
cccttagcgtggtcgcggccgaggtacgattcacgctgtgcctgttggaaatcagtctgaacagtgtgatcccacgacgtcctgagaagcatctctctactcaaaacaggcaatcagttcctactgcaccatgccatgggaatgatattcaagggtggtgacatgactgaggtagtaaatcctttatcatcatgactgagaggatgcagaaatctgtgcggaagaaaagagattgtgagctttttgaggcagtgacaatatatgatatgaatctccatattcataatttgcatatagaagctgctcaatgaatatttaagttaaaaaaaaatacagtccttcatggcaaggaatttcatcccagtctctgccaacaagaagaactcttctgtaatgggccatggggcaggccaggccctccttggctctgtggctctggactgggcagcagcaactctcatccctgtgtggagccatcatatcccctgtgaactgcatgtacctgcccgggcggccgctcg

SEQ ID NO: 5733 - DNA, 803 bp, Homo sapiens
  misc_feature 470, 569, 621, 649, 663, 665, 680, 699, 706, 723, 726, 733,749, 770, 781: n = A,T,C or G
gatatctgcagaattcgccctttcgagcggccgcccgggcaggtacaggttgtgtctgccagttcagtccacagctcagagtatcaccttgtcctcattccatggtataagctgtgcgggggggcaggtctgcgggtccgtggattcactggactggatgggacatgatccagaactccgctccgtttggcttccaaggatcccaccaactcattctaatcaagtgatcactgaggaaatgcattgtattcctattcactatttcaaagatcaggtctacctcattggcatattaagaaagtttctcaagtatatttaagtgtttatcattttactatagttcttcaaatgtctgacattcatccttttccctacctctacattcctttctttttcacattatctttcttggattgctttttaatagaaaaaaccaaaccaaagacatgggatttactgggcatattaancaagaatccatactggaaaatgcaatggaggtttcatatacacccacttacaggtaagtaaatacctcaaaagtataaagtcgaaaagaaagaatctgnaaatattagacttggttctggaaataagcttacctaggatgataccactttnacttaatcaaggatttcccaacctattnaacagtggcaaatntnaaaaaatctggtagnttaaaataccccagcaatnccttcanattacttggcttccttnaanccacttnaactttttgaagaacnagggctttttttaaggtttgnttcccctttangttttaatagaaaaaaaaaaaa

SEQ ID NO: 5734 - DNA, 140 bp, Homo sapiens
  misc_feature 17, 109: n = A,T,C or G
ccctttcgagcggccgnccgggcaggtaccaagacagagaacctgctcgggagctatttccccaagaagatttctcgagctggatgcatttttaaaggagccagctctnaatgaagccaactttgagcaatctgaaggcc

SEQ ID NO: 5735 - DNA, 499 bp, Homo sapiens
  misc_feature 182, 252, 254, 285, 344, 354, 407, 421, 446: n = A,T,C or G
ccctttcgagcggccgcccgggcaggtacaattgttttagaagataatttgtttttctctcttcagtttcgcatattactaaagacaaatcatggtaggattggtttgtttattatacttggcctaactatttgtatacaatgcaacaagaatgattattttttacttaggcttttaagtangctctgatggaactttgttccataacaagaatctcaaataaaactttgtaaaacccgtaaaacccaaccnanccatggatttatgccattaaatacccatganttgggtgaaatttcctctccttttgagggcccaaaataaacctggggcttctgcacttntcaaaaaatnatattctttacttacacaatccataaacccttttcaaggactgtatataccanaatattaagccaanttttccaaagactttatttgctccntaaatcaaattttaatttccttataaagaaaaccccattattccaatcaaaac

SEQ ID NO: 5736 - DNA, 606 bp, Homo sapiens
  misc_feature 533, 572, 575: n = A,T,C or G
cccttagcgtggtcgcggccgaggtacgcgggaagaaatcaaaagagaaattggaaagttcattgagctgaaaatgaaaacacgatatatcagaatcagggagttgcagctaatgtatgcttggaggcaaatttaagcactaagatcctatattataacaaaaaagaaaggtctcaaatcagtgacctgagttttcaccttcagaaactggaaagggaagagcaaattaaacacaatgtaagcagataaagaaaataataaaaagaacagaaatcaatgaaagaaaaaagggaaaattataagaaaaatccaagaaagtaaatgctaatcattttaaacaatcaattaaattgttagacttctagtcagctgatcaagaaaaaagtaaaaaggcacgaattaccaataccaggaatgaaagggtgggtgtcaccaaatcttctacagtaattataaggaaacaatggactactgtaagccatttttttctaataaatttgataacttagatgaaatgaacacattccttgggnggcataaactatcaaagttccttcaggaagaaatagatnccngagtttctattggcaaaatcaagtttttaat

SEQ ID NO: 5737 - DNA, 461 bp, Homo sapiens
  misc_feature 90, 138, 152, 154, 166, 167, 186, 193, 208, 212, 214, 226,243, 246, 266, 272, 285, 299, 306, 312, 315, 319, 327, 345,351, 353, 355, 367, 369, 371, 393, 401, 416, 417, 422, 423,434, 446, 452: n = A,T,C or G
cgccagtgtgatggatatcttgcagaattcgcccttagcggtggtccgcggccgaggtacttttttttttttttttttttttttttcgancagttaacattcctttattttaatttcaaggggcgggggaagggaaanagggaaaaaaaatncngggaaacttacnncaaattttttactgtttanagctttnttggggaaaaaaacncatncnccaatccctggngttaggaatattttaanccnttatcttcaatattattcanccaagnactgaagtaagtnctgatgcaggaaangagtgantttcanagntttntgagcccntacttggcccaaggaagncccaantngnaccttctttaantncntgccttttaaaaaggacacccncaaactgntgttgggaacccgtnngggcnntctgttctgcntttttcctgctnggttanggggggaaa

SEQ ID NO: 5738 - DNA, 471 bp, Homo sapiens
  misc_feature 72, 75, 101, 127, 129, 134, 144, 169, 170, 171, 204, 205,207, 209, 213, 258, 262, 275, 290, 292, 298, 306, 312, 327,354, 361, 374, 378, 389, 396, 400, 409, 414, 417, 423, 437,438, 445, 447, 452, 456, 464, 466, 468: n = A,T,C or G
cccttagcgtggtcgcggccgaggtactatcagaacaaatacataaaataacttcccatagagaacaggatntancaataatagctccttagatactcagnggcattctgactccaatcaagggtcntngtttnaaattaatantaggttaaaaaattaaaaacccaannnaatttaaaaattatttaatttccaaagttgggnntncntttnttaaaagccaattggttggaaattgcattgaatagcccaccttgnaaanaataattggttantttgtcttaaaattngnactggnaatccttnttattnttaaattttcccccnaattttttttttggcctcccttttaangttttanaaccaattttttnaacnttggggctggncctttcnaacnccttaaganggatnttnggggcnttaatttatccttnngaggggngnaaatnttgncccaattnangnaaa

SEQ ID NO: 5739 - DNA, 803 bp, Homo sapiens
  misc_feature 191, 387, 410, 412, 420, 431, 448, 457, 460, 461, 479, 500,532, 547, 549, 561, 599, 600, 602, 612, 650, 681, 688, 693,694, 712, 715, 722, 724, 750, 757, 758, 767, 768, 770, 784,795: n = A,T,C or G
ccctttcgagcggccgcccgggcaggtacacacctgtagtcctagctactcaggaggctgaggcaggggaatcgcttgaacccgggaggtagaggttgcagtgagccaaaattgcgccactgcactccggcctgggcaacagagcgagactccgtctcaaatacaaacaaacaaaaaaaaacaaaaaacanaacaaaacaaaacaaaaaattagttcagcagtctgccagaaaaaaaaaaaagcatcgcaactaggtgggctccctcagaaaactcatcaaataattgatgacccgattaaaggagaagtatgctcatttcaatggctcttataggggccaagttcttggccctctgaaggtcactggaaaatacctacaaaaggtnggttaattaggaaaaaaaaaggntncaaatgtntttaatgtgtntacccaggagtctttanaatgaaaanccnnagatcccggagaaattgncccttttaatgcttatttttnaacaaagtccgattttttctaccaaatccagntggtttcaacttttnangggctggtttanaacttactttttccctttttttaaaaatttcctgaatnngnaaaaaccttnggtttaacccatttttcgggtttttttcaatttccttngggagccttaagggcgggccaattaaaaaanttttttnacctnnaaatttttccttttgttnccnttgaaananccccttttttttttaatttcccgttnttttttnntcttttaanncncccaaaaaaattgnttttttttttnaaaaaaaa

SEQ ID NO: 5740 - DNA, 782 bp, Homo sapiens
  misc_feature 452, 488, 495, 515, 520, 524, 532, 547, 557, 558, 559, 560,565, 569, 570, 574, 598, 621, 624, 628, 631, 634, 639, 655,656, 658, 672, 705, 717, 728, 733, 735, 737, 742, 745, 749,750, 754, 755, 757, 760, 765, 767, 768, 771, 779: n = A,T,C or G
cccttagcgtggtcgcggccgaggtacaaatacttgagtcagttattacggtgtggtatgaaatttcaattgttttcaatgcataaaaacagatattatgatatagttcattatactatgtgattttgttactttacaatcctattatactgtgtgattttgttaccttaaaatccttatgtttatgttaagaatgattcattctttggatgagcttggtggctcatgcctgtaatcccagcgcttgggaggccgaggtgggtggatcatctgaggctggtctggggatcctgacctcaagtgatctgtctaccttggccttctaaaatgctgaaaatacaggccttgaatcactgtgcccaacccaagtttactattattattaaaaatactggtggccttgaaatcagtgtaaaataataatgtcatctttttaggaataaaaatactgnttttcccatgccccactggcttgtaggaaaattgangggaaanggttggtattttctctttgnaggtnggantactgaancctcggagtgagatnacctgggagnnnnaattnattnnaatnatttcaatttaattaatttggganacagatcttactttttggtccangcntganaanccnccatngaacttcaacctgggnnanaaaacaagactccnccttaaaaaaaaaaaaaaaaaaaaaggtccttncccggcgggccntttaaaagggnaaatncncnaaccnggnggcnntctnngnggncccancnnggncccaactnggg

SEQ ID NO: 5741 - DNA, 408 bp, Homo sapiens
  misc_feature 123, 127, 129, 131, 132, 135, 143, 152, 155, 303, 361, 369,376, 377: n = A,T,C or G
ccctttcgagcggccgcccgggcaggtactggaacaactaggtcagctacaggacttgggggatcggatgccctgtggggaggagaggattaaggagtggggcagacaaacccgggaccaatnttanantnnatnaaaagggnttaccaacnaancttaaaatttccactattactgcagactcaggcccagaagaacccggattgggctgcgctcatgcaatgggtgcatctccagtgaggacatctaggcatccagggaaccatggcttggggacagcaaagagggatatcatttaccganggatgtggttcacacaactttatcccaacgcactacacgccaacagttaaaaactaanccagttcnttaaaannggttttgggggcacatttcataggggggaaa

SEQ ID NO: 5742 - DNA, 560 bp, Homo sapiens
  misc_feature 184, 419, 543: n = A,T,C or G
cccttagcgtggtcgcggccgaggtactttaagtaagtgtgatgaaggaatcatctagcaacttccttcttagaaaaaaaggaagtgccttcatatttccttgaaatttaaacttgttccattctattctaagcaaaaattaaaaggacacagttcagaagagctctttcagcaaataaataantgtttcacaaaagcactgctgtaaacaagatcactttgatggccagagacacttatgttttcaaccaatggcaaccttaaacacttccaagtatagatacacagggtatatatgggcaaaaggcaatacatcattaatcaatcaactaataaaaattaattataagcttgttgcttggtcaaatatgcttttgttctctatgtttttttaattggtcagaaaacttaaactgtantgatctaaaaccctgtatctactctgaaagtaactacaacctagaatggttggccactgtagttttgacattagttagaaaattctaaattattctaagcaatgtaaaccaagcccccaaattnggtgaattgaaaaaaaa

SEQ ID NO: 5743 - DNA, 617 bp, Homo sapiens
  misc_feature 246, 457, 460, 476, 559: n = A,T,C or G
cccttagcgtggtcgcggccgaggtacagctgatgtctgctgtgcggcagggtaagtgggaccagcagcttgccggtgcctcgagtctttattggtaaagattgtataggcggatgcagtgatctagtctctttgcaacagagtggggaactgctgacgcggctaaagcagattggagctctgcagtaaccacagatctcataggaaatgttcaacaattctgtgaaaggtcacaggacccaattngagaaatcatatgaaaagcatagttggtcttggtgtcatatggatcagaggcacaagtgcagaggctgtggtcatgcggaacactctgttatttaagatggctatccagataatcctgaacactgtgtatttattttatttagactaccagcaaagattaaagcatgaaatgtaaaacatctgataaacttacagccccctacaccaaaangtntatcttgtgaaaagancttcctaccacttttgaaaaaccttaaagaattcctttatcaatgaaagtttgcctggttctaagaattggtaagaattggtnaattttccttcaatcttttaggggacaaccaccttaaatttcttttttttattaaaaa

SEQ ID NO: 5744 - DNA, 326 bp, Homo sapiens
  misc_feature 88, 258, 263, 280, 297, 301, 318, 320: n = A,T,C or G
cccttagcgtggtcgcggccgaggtacctggcatatgagttactgtggtcaacagcttgtggaaggtctcgaccttacagactttcanaggtagggggaaggtcttgttagcgggacagcagcaagacccacccaccagtttagactgaactgtgaacgtgtcaccaattgaaaatcagtagccataccacctcactcctacctcccacatgtaatgtgttgaaaaagcatgggtaacggtgtcctttgttctccaantatgngatgaagggaagagctnaccacacaagctgatanaatncttttctgcatcgaagnancactat

SEQ ID NO: 5745 - DNA, 420 bp, Homo sapiens
  misc_feature 329: n = A,T,C or G
cccttagcgtggtcgcggccgaggtactactggccatatctacgattccaccagttggacgggccacagcacccacaagcccttttccaattcctttaaagaatccagcagctccttcctttttggcaccttccacaggttttgttattattccaagtcactccaccaacaactcctcgcagaaagccctttctcctctggccaggctgtctccaaaatctctgggctgtcgactcaactcttctcttcttttttgctgatattccttgtccattgtaattgctgccaaacctttcccaacaagaaccggtgattcgaagatacaactnctgctgcaccacctactgtgtgtccaaagaggcttcttacttcaatcactaacccctctgcaaattcttcaaggccttgaacaagcaccct

SEQ ID NO: 5746 - DNA, 441 bp, Homo sapiens
  misc_feature 54: n = A,T,C or G
ccctttcgagcggccgcccgggcaggtacgcgggtccttctgggggcaaaaccngtgtttttctttatggaaccctaagagtataaacaagttcctctcagatcttaaactccttgcttctatattttgttttctgattttttttaactgaaatagttattattacaggggctactcttgggagtttagaataagaaagggtgcttagacactcaagcaacatctttgtaacaaagtaacaccataaaagcattatgtggcctagtcccatgatttctctctcctttttggagacccaggattgaatgtgggctgtgctcagagctcagagatccagttaaaacagagactacgtttaaaactatctaagtgcgattggtctctttatacaatcctgtggtagatttctgtaattttatgtttgacttggtatccattttt

SEQ ID NO: 5747 - DNA, 624 bp, Homo sapiens
  misc_feature 115, 141, 146, 226, 317, 405, 411, 509, 552, 576, 581, 587,591, 601, 604, 609, 610: n = A,T,C or G
cccttagcgtggtcgcggcccgaggtaccggtgttcttttggttaccagagccctgtagtgaaatttcaaataaggtaatgtgattcttccagttttgttatttttttttctcanaaaggccttggatatttttgggtttntttgngtgcgtgggtccatataaatggtaggattaagttttttggttggtttaaaattctgtgaaaagtgtcattggtattttgntagggattgcctcaaatctgtagtattttggatagtatggaaattttaacaatatttgattcttttaaaatcccatgaaccataattttgnggggtgtggggttcttttcaatttctttcatcaatgctttatagttttctttgtagagatctctcatatttttggttaaagttaattnctaggnggcttattttatttgtatctattggaaatgaaattactttcttgatttctttttcagaattttttgcctttggcatggagaaatgctaatgaatttgnatgttgactttgcatctgcaactttactgggttcgtcattaantatcatagtttttttgggggaaanaattnggggtntttntaaaaataanacnatttnnatcagccaattaaa

SEQ ID NO: 5748 - DNA, 450 bp, Homo sapiens
  misc_feature 292: n = A,T,C or G
ccctttcgagcggcccgcccgggcaggtactatgaggcaactataggtatctgccaaagatttcaaatggcatccctatctgccaacgaaactttaaggattattggatgtgctagatcatatgactcaagtggcagagtagcttgcacagcaagcccagacctgttgcagtgacttcttgggccctactcaaaactatcagcttctcgtgtcatttggtagatgagctagagtaacatatcaacatgattgatatgattccttcaaaatatctccagagatgcagtattgnttttagtatactatcttcctgtgaggaatctgttctattagcttccacttgccctttcccaccataacattaccccactccacaagttcaaggataagcaatgtattggattctgccagatgctgagtgtgcctactctaaatatgcattcaggaact

SEQ ID NO: 5749 - DNA, 318 bp, Homo sapiens
  misc_feature 147, 297, 314: n = A,T,C or G
ccctttcgagcggccgcccgggcaggtacgcgggggagtataaggaggaggctggctggccgctgcaggcctctcacagatctatccctgctcactatcctgcagcagacagagagacaagaccccagccagcccctgtccaggcangcatgagcagctcatcacaggcaaggaagatgctgccaaataactattgcctgggggccactacaccattgggaaggagttcatcgacctgctactggaccggattcggaagcttgctgaccagtgcacaggacttcagggcttcctggngtaccacagcctttggncggg

SEQ ID NO: 5750 - DNA, 786 bp, Homo sapiens
  misc_feature 23, 71, 229, 273, 314, 324, 420, 432, 451, 475, 489, 502,506, 529, 533, 536, 539, 542, 544, 548, 556, 559, 562, 563,567, 568, 579, 582, 591, 593, 599, 601, 604, 607, 614, 623,624, 629, 633, 646, 653, 661, 666, 668, 672, 673, 678: n = A,T,C or G
  misc_feature 681, 688, 693, 702, 709, 712, 723, 730, 733, 734, 735, 736,737, 742, 744, 745, 746, 747, 751, 752, 754, 758, 762, 765,766, 768, 776, 785: n = A,T,C or G
cccttagcgtggtcgcggccgangtacttgcccccaggcccagataatttatttaaaaactttttttgtanagacagggtctcactatgttgcccaggctggtctcaaactcctggcctcaaacaatcctctacctcaacccccctaagtgctggcattacaggcatcagctgccatgcctggctacaaatcttaatgttttccccatggcttctttttctggcgttcntttctcacgtaatggaagtgggcagagaatgatcctttccctangcttcagtgtgtaagaattaaagaaaagaggaaaggaaacncaatggcttnatggtcgaaggacagggtttattttaaagaaaacaaacccaagagtggctttctggcttgagttagatcagaggcatgctctcttacagacttaanaagttttttaanggattcaggggtgggagangtttaccaagaaggctttggactngcttcctgggggcntctttaagggggncctntcttgggaagggaactggggttnctgnttncanacnantttnccttgaanccnggnnggannaaccccaaggnctnggtttatancntccccntnttnatnccccttnaagggaaannaattngccnttttaagcccccnttgtttncctggggnccaantntttnnagggnaantttggcnatttnccaaaaaanttaaccnccncctccctttgngtccaanaannnnnaattnannnnaatnngntggntttnttnngnttttttanaaaaaaaant

SEQ ID NO: 5751 - DNA, 752 bp, Homo sapiens
  misc_feature 301, 368, 371, 400, 594, 601, 614, 630, 633, 678, 700, 709,726, 737: n = A,T,C or G
cccttagcgtggtcgcggccgaggtacttcgaatttgagtttgaggcttaagaagctggatctcctgccgggcgtggtggctcatgcctgtaatcccaccactttttttttaaggcaggcggatcacctgaggtcaggagtttaagaccagcctgaccaacatggagaaacctcgtctctactaaaaatacaaaaattagccaggcatggtggcacacgcctatggtcccagctactcaggaggctgaggcaggaggatcacttaaatccaggaggtcaaggctgcagtgagccatgatcntgccactgtgctccagcttgggcgacagtgtgagaccctatctccaaaaaaagaaaaaaaaaaaaangcntacacagagcagctctgagaaattagttnctactaaaagcacattcatgttacattcagagaaatggaaaatttaattacattacttttctaccctgcataaataggacaacagccagatgttgtcctatttgaagtagatatgacaccctactttaaaaagcacaggtgaaaatgacacttggaaatgccacattggtagataacacattttccagaagttngatattngggggaatagcanctagaataaatgggancanccaggaaaattaaggagaatcctcatgccaataacctattggaanaaaaaaaaaagcatgttgaatnaaaatggcnaaggggaaacctgacanctgccttcaantattaaaattttttt

SEQ ID NO: 5752 - DNA, 519 bp, Homo sapiens
ccctttcgagcggccgcccgggcaggtacttcctatggaaacctaaaaactgtttatttagttttccatactgtgaaatgctcagacataagagttcatagtagaacaaagcatattaatgatctgaaagtttccagaatactagttagaaagtaactttcaatgcttctagtgcaacactaaaaactgcagtatattaatgcattgttgctcctatttgtattctcaaaaagaaattttaataaaaagacaaaattcaaatcttatgttgaagattgcatttcaaaagacatttaaaaagttcaatcatcagagaagttgatctcatcagatatcatcttctgctaaatgcaatataaagcttttcaaatgagatttgtgatcttctaaaagaacatacttcagaacagggatctctgaggaaaaaagaaaaccactaaaaaggattcatggtgattagttttaatttggcaaaatggggatgaaagcatctttatgtaataaactaaaacacaacta

SEQ ID NO: 5753 - DNA, 350 bp, Homo sapiens
  misc_feature 137, 145, 146, 148, 152, 156, 157, 158, 159, 166, 172, 178,180, 182, 189, 190, 194, 202, 203, 204, 206, 209, 211, 216,220, 221, 224, 226, 240, 252, 256, 265, 269, 271, 280, 281,285, 286, 287, 288, 299, 300, 303, 319, 321, 327, 329: n = A,T,C or G
  misc_feature 331, 332, 333, 334: n = A,T,C or G
ccctttcgagcggccgcccgggcaggtacttttttttttttttttttttttttttctttttttttttttttttttttttttttttttttttttttttttttttttttttttttttttttttttttttaaaaaaaaanaaaaatcnnantttntttnnnnttttttnggaaanaaaaancntnggggggnncaantttaacannntntantnaaaantaannttncntaaaaaaaaatttnttttttttttcnaggnaattttttnaatnanttttaaaanncccnnnnaaattttttgnnaanaaaaaaaaaaattttngngagaanantnnnnttttgccaaaattttt

SEQ ID NO: 5754 - DNA, 324 bp, Homo sapiens
  misc_feature 97, 238, 292, 320: n = A,T,C or G
cccttagcgtggtcgcggccgaggtactttttttttttttttttttttggggcagcatcacactgatttccttgtcagttttcctcattcattcatnaattcattcaagcattccacaaacatttattgaacatccaatacatgacaatcagtgttccaggcacaggatgtaaagttcccaggcacagtgaggatacaacaataaacaaaacaaagtcccaattatcatgaagcttancttttagtagggcacaaaatcagcacgtaacgtgtaataaaatgccaggcaatnttaaatcctgtgaagaaaagtaaaacanaata

SEQ ID NO: 5755 - DNA, 211 bp, Homo sapiens
  misc_feature 23, 54, 66, 82, 90, 103, 107, 129, 143, 147, 149, 150, 157,159, 166, 167: n = A,T,C or G
cccttagcgtggtcgcggccgangtactaccaagataaaatatattcaagcggngtgggactttgngaccatgaattaaagntgattctncacaaaatgtttnggcnttctctatcatttaaatttgcncgagatccttttantttntnnagaccanancgataanncttttttaaaaccaataatgaaaaagaagtattttgaaaacaaa

SEQ ID NO: 5756 - DNA, 803 bp, Homo sapiens
  misc_feature 25, 134, 232, 388, 462, 506, 538, 542, 577, 637, 640, 647,653, 697, 706, 710, 712, 724, 753, 783: n = A,T,C or G
gatgcatgctcgagcggcccgccangtgtgatgggatatctgcagaattcgccctttcgagcggccgcccgggcaggtacgcccagcattggcgggggaaaatattcctaggaatgctttaagagaagaggcanctggaagcttgcaatattccaaggcatgcccgtgcttcctgggaaagtggtctgtgtcatcctgcccggtgaaacctttgctattgcttgagtagctnccttaacccagtctggctggttctagacttccaactgccggaaaaagtgatacacttccagggaggcaactttccttgccttgcccgcctgcagctggcttaaagtgcaagatgggaagatggctgggcattatctgcaagcttcaatcacacttnccgtggcactgggaaactgcagttttcaactcctacccttacaaatgtttcaccaaatcctttatgttcacctntttgccctctgagggggaaaaggggacattcagatcacaaaggnaagaatctcaaaaaaggaaaaaagggaaagtnaaangggtctgcttaatcccacaaatgaaatttttcagnccctgacatggatccaaaagttgacttgaaacctaatcaaaaaccgcaagaagggcaagngtnccaaacnccaaangggaaaagggaatgggaaacaaattcaaaaacaaacttttaaanaaggaaatnggancncaagggcctcanggactatttattccttttgggtaaaaaanaaaaaaaaaacttcttaagggttttggccncttcactttgggggaaaaaa

SEQ ID NO: 5757 - DNA, 462 bp, Homo sapiens
  misc_feature 127, 152, 197, 237, 238, 330, 357, 365, 367, 424: n = A,T,C or G
cccttagcgtggtcgcggcccgaggtacaggaatagatgaagaaattgtttttgagtataatataaacataaacaaatctcttaacagcacgagtgtcaacaaatgcttttcggttgtgcaaaaacnagtctcaaaaaggagtggggacaanggaactggacaagggagaaatgagctattttttcatcttccaaantgcctttctggccacggtcttaacactgcaaatgttgcannactggtgcagcagagttcatgctgggcattgggcaggcactccttgtggaacatgtgcccgcaatggaagaccaccacgcctgaaggcttanctgcattcctaaaacttgagaaccctnaacttctnanccaattggcagcacccagcatttccacttgaaccaggattgggaagccacaaccacnttctcttccactggggttaattcctgatgggaagaaat

SEQ ID NO: 5758 - DNA, 671 bp, Homo sapiens
  misc_feature 269, 272, 290, 339, 399, 411, 431, 505, 510, 601, 629, 633,636, 645, 650, 651: n = A,T,C or G
ccctttcgagcggccgcccgggcaggtacatacttattttctaattggatttgaaatcagcatgattttgtttgacaaagcaaagtttaagattgaggtcagaaatactttaatggagcaaagacacataccaactttacatgacggtgtgagaaatagtcctataaactggtctcttcatcatttatgctctcactttaaatatccaaatattaaaaggcaggctgacctgtatcacacagaattaaggcagtaattttctgcttcantanatcaagggtagggctaangcatcctgtggtaattcttgattcacagctagatttgggaaacacaaanttagggaatggctatatgtgatttgctagttggagcaatcaaagtcttaactatcaaaanttgtgaattttnaatcatggcacctaagtcangggtgctatggattgaaatgaccttaattctcaaaggaaatgatttatccctcatttttcaaattgaaggaatnaaacnctttaccatcattttcaagtttgtttctttaaaaaccctaaataccaaattccaattttttttaaaaaccttaccaaaaggccctattttnaaatccttttaaaaatttaacccaaatnaatntantttttcctnttaanntaaaaaatttaaaaaaaaaa

SEQ ID NO: 5759 - DNA, 808 bp, Homo sapiens
  misc_feature 330, 361, 362, 404, 412, 454, 483, 486, 493, 508, 519, 550,553, 583, 584, 587, 606, 608, 612, 622, 626, 630, 631, 648,661, 670, 673, 684, 700, 706, 709, 712, 718, 786: n = A,T,C or G
cccttagcgtggtcgcggccgaggtacttccccaggtataccagcccatatgcaaagcagatctatgttaagacctctggaactatctttacccagccaaacgtcatactctgaaaatgaaattttaaagaaagagttagaagcaatgcgaactttctgtgagtcagcaaaacaagaccgactgaagctccaaaatgaactggcacacaaagtggcagaatgtaaagctttagcattagaatgtgaaagggtcaaggaggattcagatgaacagataaagccattagaagatgcattaaaagatgtgccagaagaagatgtatgagtcanaaaggtaaaggtaaacaaaatgccggacccnnttttttttgccctttaaagaacacctttacaaggtgaaagcngcccttangggaaattcccaaactaacccggggaacttgaagggatcaanttgaaaagacttgaaagtaaaatttgaanggngcttcancaaaaagtggggggnaatttagaaancccaatcaaaccaaatgagattgattttttnaanaagtttaaaaagggattaaaggccaacctnnttnaaaaaaaattaaccgtttncngaangggactttantttntttnnaaaatgggggccgaganaaaaaaaaggaanaaaagggcncanaaaattggaangccccgccaaaaaaantttcancgnaantttggnccttttcctttccgcctgaaaaattgaaaacatgaagagctttttttcaatgaagggttgggaaagcnaaaaaaaaaaaaaaaaaaaaaa

SEQ ID NO: 5760 - DNA, 570 bp, Homo sapiens
  misc_feature 53, 55, 285, 352, 403, 466, 480, 512, 516, 521, 533, 549,552, 566: n = A,T,C or G
cccttagcgtggtcgcggcccgaggtactttttttttttttttttttttttgntnccccttcctttcttttttcttcctttctttttctttcttcttttttcctctttctttctttctttttcctctttctttctttttctttctttctctttccttctttcttcctttttttatttttcttttttgagacagagtctcactctgtcacccaggctggagtgcagtggcatgatcttagctcactgcaatctctgcctccctggctgaaacaattctcctgcctnaacggccctccccatcatcccgcccccaaataagctgggactacaggtgaagttccaccatgcctgnctaatttttgtattttgggtaaagacggggtttcaccatgttgcccaaaantggaaaaaataatgttttccattgcttcacaaaaataacatttgtgaggtttgaaaaaaaaancaggggcttttatncctatttcatagtcaggggaacctaaaaccanctanaaagnaaaatgctcaantccacacaatggaacnaangggggtcttggctntttc

SEQ ID NO: 5761 - DNA, 482 bp, Homo sapiens
  misc_feature 408, 425, 449, 460, 468: n = A,T,C or G
cccttagcgtggtcgcggccgaggtactaattttgcaaattttctgtttgaagttatttcaagtaaaatgttattcaaagtgatcatgctgggcataagaaagaaaaaggaaaactgattgatgttaataagttatgcggtcatgccatctatactagcttttctggttttctgaccttagcctcttttttgaattattagtgcttataaagagctcaagactttttttttttttctttacattttacttctaactgcattgatggtcttttctattgattattgtttcaaaattaaatgtctttttttctatgaataaagttaaaagttcccaggcctcatttcagatcaaagcattttatgggcattggtataaatggtaactctcctgctttctatctggtctgnaaaaaaatcttgggccnttccatccagtgaggttgttttgnaacaaaaaganatctgggncaatttggcttgcc

SEQ ID NO: 5762 - DNA, 598 bp, Homo sapiens
  misc_feature 135, 136, 147, 153, 193, 204, 206, 221, 259, 261, 282, 299,303, 312, 326, 342, 351, 352, 360, 377, 379, 381, 386, 391,397, 411, 413, 447, 449, 454, 458, 464, 474, 494, 496, 511,532, 560, 595: n = A,T,C or G
ccctttcgagcggccgcccgggcaggtaccatatctgtttcttatctgcagagatctgttttcaatgcagttttattctacttcttattctgatttaagatgggatgatagttttgacaaaatttgaaacttaannggttaaaattncttggngtccttggattttttttttcaatttttaaccttggtaagngaagccttggntntgcgtgggttggaantgaaccttttggaaatttttttttttctttttttaaantnggggggggaaaaataaaaaanaacccctttcaattggnaagnccaattccnttgtccttaattgngaacctttccttaagncaaattggnnttttaagntttccaacccttggaanangncccanaaaanttttanggttgggttacggntnttggttaaaggtaattggattttggccacacggntnaaaantaantttttntttttaaagngaattaaggtaacccttggncnccaaggattggggcncttaattgggttggggggganggccccctttttttttaatattttttanccaatttttaaggggttaaagggcctttttccttnggg

SEQ ID NO: 5763 - DNA, 231 bp, Homo sapiens
  misc_feature 86, 90, 91, 169, 176, 184: n = A,T,C or G
cgccatgtgatggatatctgcaaaattcgcccttagcgtggtcgcggccgacgatctccttattcttattaaaaaaggcatgaggngtanncgagcactataaaccatgaattggaagttgatggtcagagaacagataaacagagtaatatgaggaaatttatgtcangcttganaatgatanggttcacgatgcttcaaaataacttttataaaaacttcccttgaaaa

SEQ ID NO: 5764 - DNA, 719 bp, Homo sapiens
  misc_feature 23, 157, 206, 293, 471, 474, 500, 511, 538, 579, 610, 611,613, 624, 628, 657, 663, 692, 696, 703, 705, 708, 713: n = A,T,C or G
cccttagcgtggtcgcggccgangtacccctgatatagagtattgagatggctagtttatgtagacaccaaaaccaattttcagctttaagaaagaaaactgagtcattcagagatcttttatttgaggggaaaatgtatgaccgtcactacaagangctaatcattttcatttaaatggatgatttaaaactaagaagttttcangaatttcagactacaataaaaaaattcagatttaaatcctgctttccatagcttcaatcctaaaccaagagagttcaggaattttanataaagcaaagataaattaaaataagacccgttacaacaacctagccattataaaaagggcagtgacccagatagaaagagaagcctttccgtggatatttttctccaccaattgcatacggtaaattttcctaaaggtaattaccttttttgcaaaacccatccaaaatgaagaccnggnggggaaattcttcgccttaagccttnccccatattgnagtttaagggcccattatttccaaaanttgggggtaacaaaaggaacccttttttgagggtgatttgnggaccaacccagggggccatgataaatcaannangaacaaagccncctnctttccaaagaagcctgcaaccatgatancactgntttcttgatttcatactgagatttggcantatngtatgcnanttnttttnaaaaaa

SEQ ID NO: 5765 - DNA, 478 bp, Homo sapiens
  misc_feature 321, 376, 396, 469: n = A,T,C or G
ccctttcgagcggccgcccgggcaggtacgcggggggcatctcaggtcttcagggtcttccatctggaactatataaagttcagaaaacatgtctcgaagatatgactccagggaccactatattttcttccagaaggtcgcttatccaagttgaatatgccatggaagctattgggcatgcaggccctgtttgggaattttagcaaatgatggtgtttgcttgcagcagagagacgcaacatccacaagcttcttgatgaaagtctttttttctgaaaaaattataaactcaatgaggacatggcttgcaagtgtggcangcataacttctgatgctaatgttctgactaatgaactaaagctcattgctcaaangtatttattacaagtatcangagccaataccttgtgagcaagttggttacagcgctgtgtgatatcaaacaaagcttatacacaatttgggangaaaacgtc

SEQ ID NO: 5766 - DNA, 337 bp, Homo sapiens
ccctttcgagcggccgcccgggcaggtacaatgaactattctcatgaaaaattgtataaatgtttctaaaaaattaaattataatccagcatttgaattttagaatatttatttggaataattgtaatcagagtttcaaaaagatattatcacttccatgttcatttcagcactatttataaaagccaagatatggaaacaacccaaatctctatcaatgaatggttttttaagtggtatataatataaaagaaattgttcacttttaaaaaagaaagaaatcctaaatttgtgacaatgtaaatgaaccatgaagatattacgttgattcaaaaga

SEQ ID NO: 5767 - DNA, 417 bp, Homo sapiens
  misc_feature 299, 311, 374, 386, 397: n = A,T,C or G
ccctttcgagcggccgcccgggcaggtacgcgggtattctgactcagcttattaatgatatctttaaattatattacttttattctgttttccctctttgctgctcatgtgaaataaatatgaatcttatgtttgcacttatgctataaaagaaattatccttggggttaattattaagggatggggaaattaagagctaagagacaggaaaatgagttgtgaggaattggggtcaccagatttcattaaaaatttgaaaatatcactgtttctctaaactttaatttttatttgttgnatttttagcggntaagaagattgtctaccaaattatagaacagaaaagatatatcccacagccactgaaaaaaanaacatataaaanaatggttcctnggccgcgaccacgctaaggg

SEQ ID NO: 5768 - DNA, 329 bp, Homo sapiens
  misc_feature 28, 140, 171, 187, 218, 237, 250, 271, 275, 277, 296, 305,309: n = A,T,C or G
cgccagtgtggatggatatctgcagaanttcgccctttcgagcggccgcccgggcaggtacagatgtgatattggaagaaaaaagatcaagcttgatgaggttagagatacccaggccctttggacttaaagatcactantgtctaaaattccatcgatggcattttcaantacttataaggtaaancttttccctgggaaagctgggaattttgggnagaacaggtttttaattcnaattcttggaatntaatttgggggcctttttacngttnanttaagggttcccttttaanggggaaagnccangcttttaaccccttggaaaa

SEQ ID NO: 5769 - DNA, 559 bp, Homo sapiens
  misc_feature 514: n = A,T,C or G
cccttagcgtggtcgcggccgaggtacaacgtgggcaagcatctgtgcatatgaaatgctgtttttctaaaagatttctcacattggcaaactgagagattttttctggaacacaggaaagattatattaatgcttatagccataccatgtctgaatatgggaggatgacagacacagaacgagaccagatagaccaggatgcccagatattcatgaggacctgttcagaagcaattcagcaactacgaacagaagctcacaaggagatacattcccagcaagtgaaggagcacaggaccgctgttttggatttcattgaagattacttgaaaagagtatgtaaactttactcagaacagagagccatccgagttaaaagagtggtggataagaaaagattatctaagctggaaccagaaccaaatacaaagacaagagaatccacatcttctgagaaagtttcacagagtccttcaaaagactctgaagaaaaccctgccctgaagaaccgtncagaaaaaattttggctgaaacacaacctgaattggggaacgtgg

SEQ ID NO: 5770 - DNA, 208 bp, Homo sapiens
  misc_feature 46, 110, 135, 138, 142, 148, 176, 189, 190, 192, 194: n = A,T,C or G
ccctttcgagcggccgcccgggcaggtacgcggggacagcggcttncttgatccttgccacccgcgactgaacaccgacagcagccagccttcacccatggaagattgcntgatggttcctttatgcttggctgngcnctcntcttcncccaagtcaccttgtcttaactgccatnggccttctttggnncntngctccctcttttaa

SEQ ID NO: 5771 - DNA, 327 bp, Homo sapiens
ccctttcgagcggccgcccgggcaggtacttggatatcactgctggttattcaggtcccaaagacacttcaattagcatgtaatgaaggccttcaaggcagggggttaccttctggcctagaatgtgtctagaaatgttgtctaagagctagatcctggaatggggacctcgtgactatgactggtgccctattctactgtggctgatctggtatctaggaagcaagacaaagccttcccctctcttccttctcctcttctcaagtaaaaggaaagggtgtcttttggagtcatgagctgtgaagcctgtagttaagggaggggtga

SEQ ID NO: 5772 - DNA, 246 bp, Homo sapiens
  misc_feature 51, 61, 112, 124, 144, 147, 185, 222: n = A,T,C or G
cccttgagcggccgcccgggcaggtactttttttttttttttttttttggntatatgtttnaattctttgcttttttatttctagtatgtctattataggttcttgctttgngattaccatganacttaaaaaaaatcttatanctntaacaagttactttaaactgatgacaaactaagtttgnttgcaaagaaagcaaacaaaaactaacaaactttacnttttaactccatccccaaattttg

SEQ ID NO: 5773 - DNA, 333 bp, Homo sapiens
ccctttcgagcggccgccgggcaggtacgcgggtataaatatattaaaaaggaaaatgtttcggatgtttatttgtataattacttgattcacacagtgagaaaaaatgaatgtattcctgtttttgaaagagaagaataatttttttttctctagggagaggtcagtgtttatattttggagcctcctgaaggtgtaaaattgtaaatatttttatctatgagtaaatgttaaagtagttgttttaaaatacttaataaaataattcttttcctgtggaagagaaaaaaaaaacaaaaaaaaaaaagtcctcggccgcgaccacgctaaggg

SEQ ID NO: 5774 - DNA, 568 bp, Homo sapiens
  misc_feature 227, 274, 350, 387, 448, 449, 454, 461, 472, 486, 499, 525,529, 533, 535, 545: n = A,T,C or G
cccttagcgtggtcgcggccgaggtacagttactcccggaccggcggcgtgaaagtcgtgatatcatcgttgaactattagctttgaagtttaaatccaatggagaagactcaagaacagtccaaagaattcttctagaaccctataaatacttacttcagttaccaggtaaacaagtgagaaccaactttcacaggcatttaatcatttggctgaaagttccagangacaagctacagattattattgaagcgacagaaatgttgcataatgncagttacttatcgatgatattgaagacacttaaaacttcgacgtggcttttccagtggccacacatctatggaatnccatctgtcatcaattcttgccaattacctgtatttnctttggcttggaaaaaagtcttaacccttgatcacccaaattccagtgaactttttaaccnnccgcnttttggnacctccatcangggcaaaggcctanatatttactgganggataattaccttgttcccactggangganaatntnaagctttggngcttgggaaaaaaaaaaaaaaaa

SEQ ID NO: 5775 - DNA, 326 bp, Homo sapiens
ccctttcgagcggccgcccgggcaggtacatatggctcacttgtgcccagagggagaataaagccatgtcgaaactatctacgattccttgagtgtttttccagctacctgccacttgcccacccactcccctcagatctcagttagaacatgacaattgggctcatgaacaggatcctgagtggttgcaggtgaacaagcagttggcacaagggcaaagtgatcacatcctgattgagtggctatggacagccatacagactgtgtggaacaacgctggtgaaatacccaaaccgtcccagaacaatgcctggcatgcaataaat

SEQ ID NO: 5776 - DNA, 406 bp, Homo sapiens
  misc_feature 108, 126, 138, 145, 192, 203, 210, 231, 232, 234, 235, 242,261, 269, 276, 372: n = A,T,C or G
ccctttcgagcggccgcccgggcaggtacgcgggatgatgtgaggtgtaaggcttatgacttcattatgagaaggatgaagacttgaataagatttggcacattttangacaactagtctaactgnaagtgaaaaacngactgtnggtaaccaatggtgaaggacgatcatgatttgaactaaaatggtatnaacggacatantaagganttgagaaataaagaggaagtnntnnttgattntggatatgttttgagagtnaaacaacntaatttnctgagagtttggatctagagtgcaacaaacgtagagtcaaaaacaattaactttttggtttcaactacttgatgaatggtaatgccactaaataanacaaaccaactcttgaaggatgaaaaatttgaga

SEQ ID NO: 5777 - DNA, 381 bp, Homo sapiens
ccctttcgagcggccgcccgggcaggtacgcggtaggcatctatgtaaagtgagaaaaatatgtttcgtaaatatttgcatctttaatattgttagtaagtagtaaacaggtgttttgctgattgaaaggaagttatcttggtaaattgagactcaaagtgaaatacaaaaatgaaaatatttataataggactcgacttggagaaattgctattcttcctgttgtccaaaccataaatctgaggataacctgggcttttctctttcctcttctcctaaccagtttttcaccaagtcctgtgccatttcacctcctaacgtctgtcagctatccttttgcctttacctcaccactattaccctagagaagactttcattta

SEQ ID NO: 5778 - DNA, 545 bp, Homo sapiens
  misc_feature 469, 495, 505, 520: n = A,T,C or G
cccttagcgtggtcgcggccgaggtaccagctgccggtatgggtgacctgggcacaggcaaggccatcatcatcacacactgtgtgcaccagaactcctcttggcatctccaagccagttcaccattgtgtgaactgtgcactgaaggagctccactgggactcagaggccttggcacaactgcagctgtggaacattgcgatgaggaaagattgggaaaatgacaagagcccattgtctggaattcataggtgcattgattgtcttcagtatcaccagcccagccccatttgaagcagagccaaagtggaaaaatgatttggactaaacgttaactcatggcagaccagtttctgtggttctgttggccaagaaatgtgaccatgggaggatgaatgcagaaacagcagcctcaagatgggccagatctacatggaacatagttttgtaggataaattgaaacatcancaaaagaaaatgtgaacttttgatgnaagcctccangtgcctggatgccanatagacaaattccaggaattttagg

SEQ ID NO: 5779 - DNA, 678 bp, Homo sapiens
  misc_feature 317, 321, 323, 432, 453, 511, 562, 579, 582, 605, 643, 664: n = A,T,C or G
ccctttcgagcggccgccgggcaggtacagaatatgattattctcaatgatgtggtggttctggagactcaggattctttggatccatgcgtgggcctcacacatctcttccacgttgaatcccatcagattgatggcaggagatctagcttcaagcccattttctcttttctcctctctggttgactgggggacactgtaattgttcaaactcagcatcttggacctctttgccatttcagaactgaaagcctacaagaagcaaaacagagcagagagtcataaacagggctgatagccattgtcattaaagtctncctntntgcacacacaggcacttgacttcatccactctgtcagtcccattcctactaccacaaatctaaagcagcctttaggaaagtcccagagaagaggacctcagtctattanaacacggaaagaataagcatnggaaaaatgggagatgaaatcaaaatctggtataaataaagaagactatacattccgngacaaaatataacccgtgcattcattaaacagaatttaatgccctgcttgngctaaactaaagctggnggntttgtcactgaagaaaaaaactntaggtactaataaaacaccaattcatttaaaaaatggntttcacaccaaaactttggtntgtaaaatgaataa

SEQ ID NO: 5780 - DNA, 468 bp, Homo sapiens
  misc_feature 221, 285, 316, 323, 400, 411: n = A,T,C or G
cccttagcgtggtcgcggccgaggtactctcacaatgtgatttttgtatttcgaaagcttgaattgtcccctgagtgtgagagacagagggggagcgtccgatcagcggcgctgctgttcaccaggccatgaaactcctcccaggccttgatgctgtcggtgtgagttttgtattccataatggtgttgggaggtaggttaagcactcgccgaagtgtgtnccggattcgggctgtggttgcttggtcactggcagtcttattccatattgaaataatgtcttcntgaaacggacaaacaccacaaccccaataantctcctncccaaccatgaactgtttcccccagcatgggccaaaatgaagattctcccagcaaccgggaggccaagcccttcccncagcccgaatnatccacttgccaccatttttatttcatcatcctcccacatggggtttaattcctttc

SEQ ID NO: 5781 - DNA, 145 bp, Homo sapiens
  misc_feature 108: n = A,T,C or G
ccctttcgagcggccgcccgggcaggtactttggtgttacctgcttttgaaaaataaagtctttggttcacccggtgaaaaaaaaaaaaaaaaaaaaaaagtacctcnggccgcggaccacgctaagggcgaattccagcacact

SEQ ID NO: 5782 - DNA, 613 bp, Homo sapiens
  misc_feature 377, 497, 514, 521, 550, 557, 562, 575, 587, 594, 601, 613: n = A,T,C or G
cccttagcgtggtcgcggccgaggtacgcgggggcaggcgccatgtccggccgcgaaggtggcaagaagaagccactgaaacagcccaagaagcaggccaaggagatggacgaggaagataaggctttcaagcagaaacaaaaagaggagcagaagaaactcgaggagctaaaagcgaaggccgcggggaaggggcccttggccacaggtggaattaagaaatctggcaaaaagtaagctgttccttgtgcctgaggagatggtgaccctttatttcatctgtatttaaacctctctattccctgccataacatcttttgccacgtatagctggaattaagtgttgtcttggagctgttgtaccaactccaaacctntgatctcttgacaatgggaagtagagctgagccttcattttttttcatctataaaagtgggaagaataaattgtatttgcttattttggcagggctccccaaaaactactcccaggctcngtgagcccctacattanacctcancaggactcgggaagtcttttattatctantggtttntgggngtatttaccaatngaaaggattttnaagcaanattcagncaaaaaaaaaan

SEQ ID NO: 5783 - DNA, 333 bp, Homo sapiens
  misc_feature 29, 31, 62, 211, 218, 231: n = A,T,C or G
cccttagcgtggtcgcggccgaggtactntnttttttttttttttttttttcaccagtgttncttgccaaattaaactaaaattcttagatgtttatttgagctagaaaaacatctaatagaactaaagattgctttaagaaacaaatatatcatgattccaaaaacaaaaacaaacttaggaaaaaactgttaaatatagcatgctccanaaaaganatctttatacttnggtctagatatctgcattttaaactactttggattatattttaggaagatctatagcctagaaataaataatttaaaaatctactgataaggaagcaaatca

SEQ ID NO: 5784 - DNA, 490 bp, Homo sapiens
  misc_feature 461, 470: n = A,T,C or G
cccttagcgtggtcgcggccgaggtaccactttaagttatcataattatgtttctatgctgtttttattaattaacccatttatttattaagaagccatgttaaatttttcctggaacaaggtaggatatatatttttaaaataaatattcacatgtattctttgttaataataagaaaggtcccaggcaaaattctagagcagagtaagtgctagtaaataaaacaaaagcaatatattagtttatcagaaagttaataaccacaaatattaacagaagtaacagaagtggggcttttattagaatttcggattgtggaacaggtgcaagaagagaaggttgaaattccaaagtaactaatgagatattatgtttctgacagccccaaaaagaggagtggactgggacatgaccttgggttctggtctattaaggaatatatatgcattccacctccttnccaacattnagaggcaatatttgaaaaaa

SEQ ID NO: 5785 - DNA, 514 bp, Homo sapiens
  misc_feature 502: n = A,T,C or G
ccctttcgagcggccgcccgggcaggtactgaacggtttaatccccatgatattcgcttgatattaagtgatgatgtcttgatggaaaaatacgaagaatttatgcttagacggtggcttgttgcagatcctgattgtaggtggtgtccagctccagactgtggatatgctgtgatagcatttggatgtgccagctgtccaaaattaacttgtgggcgagagggctgtggaacagagttttgctaccactgtaaacagatttggcaccccaaccagacctgtgatgctgctcgacaagagagagcccagagcttacgtttgagaactatacgttcttcatccattagttatagtcaagagtctggagcagcagctgatgatataaagccatgtccacgatgtgctgcttatataataaagatgaatgatgggagctgcaatcacatgacatgtgctgtttgtggttgtgagttttgttggttgtgtatgaaagaaatctcanatttgcattatc

SEQ ID NO: 5786 - DNA, 618 bp, Homo sapiens
  misc_feature 294, 352, 374, 395, 420, 471, 490, 555, 557, 565, 566, 601: n = A,T,C or G
cccttagcgtggtcgcggccgaggtacttgttatactttggcagcttcttcacgtcggtcctctccgcgcgcgggtaggaaccgtccacggcttaaagaacctcctcaccagccatacttcccattgcctccagttgttgcacggagggtttcacatcatatttcagaaaggctcctggaaagaagtgaatatgtgtcgcatccagagagctgatggggattgtgacttggctgctgtcatccttcatgtcaagcgcagaagaatctgtgtcagcccgcacaaccatactggtnagcagtgggatgaaagtgcaagctgccaagaaaaatggtaaaggaaatgtttgcacangaagaaacaccatggcaaagangaacagttaacagggcacatnaaggggaaacaccaaaccccgtctntattaaaaaatacaaatatttaatttgggtgtggtggtgccttgccttcantcccaagctacttaagganggctgaagtaggagaaatcgctttgaacccaggaagcaaaaggttgcaatgagcttaaaattgcncntggtgctnntccaagcctggggcaacaaaatgaggacttggttnaaaaaaaaaaaaaaaaa

SEQ ID NO: 5787 - DNA, 300 bp, Homo sapiens
cgccagtgtgatgggatatctgcagaattcgccctttcgagcggcccgcccgggcaggtacgcgggtgtgctttccttataaggaatcaaacttgacttacggagccaataaagcccttggaaaaactggcctcatattctgtatacacagtccctgaacagggtttctgactgtgtaagtaaagaatatcactttttgacaagtgcagacgccccaggtttatcttgggccctcaaaaggagaggaaatttcacccaactcatgggtatttaatggcataaatccatggctcggctggg

SEQ ID NO: 5788 - DNA, 622 bp, Homo sapiens
  misc_feature 489, 552, 560, 562, 586, 589, 599, 620: n = A,T,C or G
ccctttcgagcggcccgcccgggcaggtacatatcacatcatatcatatcatagctagctctgaagatgcagcataggaaagagacgagaaggctgtgccctcacccgtgtggagagctgtgtgaaacggagtggcctccagacacagcttttattgccagtattcatccactgatggacatttgggttactcccaccttttggctcagctgtgaacatgggttacaagtgtctgttccagcgccctatttcagttctttccagtatatgtcaagaggcaggatcgctgggtcgtttggcaattctgtttagttttgtgaggaactcccatactgttttccccagcagctgcgccattttacatccccaacaacagtccacaagggtttcaatttcttacatcctcgcccacatttcttattttttggtggtggggtatttttaaaaaataacacctaatgaagtggtgacgtgggatcttattttaanctttgatttgcattttcctaatgaataagggatgttaaacatgttttcatgaaccttattggncatttggngngctttttaaaaaaaggctattttnggnctggtggccnattttttaattggggtgggantt

SEQ ID NO: 5789 - DNA, 506 bp, Homo sapiens
  misc_feature 425: n = A,T,C or G
attcgcccttagcgtggtcgcggccgaggtaccgtattacttttctattgcttctttaccaaataaatacaagctttgcagtttaaaacaacagaaatttaatttttatagttctgagggtcagtaacctaaaactgatcttatgaaataaagttaaatcttggggatatgggtgtggacagggctggtttcttctggggctctgatggtaaaatttgcttccttgccttttctccttctagggagcctgcattccctgcctcctagtggcttcctcccatcactcgaacctctggttccagcctcagggattcctaatgtgactctgaccgtttcatctcccgtttatgaggacgcttctggattgctaagatcatacggtgacactatggaagttaacttgaagattaaaaccctgaaaaatngaaagaatcttctatggtatatcacagagattacaagggcctgaattagagtgggtgacattttcatcccttgaaaatgga

SEQ ID NO: 5790 - DNA, 378 bp, Homo sapiens
  misc_feature 33, 57, 101, 102, 105, 106, 107, 108, 109, 110, 134, 135,136, 142, 143, 145, 157, 169, 170, 171, 178, 180, 181, 185,186, 191, 193, 197, 205, 210, 212, 215, 218, 226, 227, 228,229, 237, 241, 246, 252, 255, 257, 267, 275, 279, 281: n = A,T,C or G
  misc_feature 283, 300, 302, 306, 309, 310, 311, 312, 313, 318, 321, 345,347, 359, 360, 362, 364, 371, 372: n = A,T,C or G
ccctttcgagcggccgcccgggcaggtactttntttttttttttttttttttttttnattttttttttttttttttttttttttttttttttttttttttnntannnnnnttttttttttttttttttaaaaannnaaaaannantttttttttttnaaaaaaattttnnnaaaaagntnntttnnttttngnggantttttttngggcncnccnaanttatttgnnnnatttggcntttnttttnaaaaanggncnttaaattttngaaaaaancggncncncaaaaaaaaaaaatttncntccnttnnnnncccanttnaaaaaaaaaaatttggggccaagncnttaaaaaaaaanncncnttggggnnttttta

SEQ ID NO: 5791 - DNA, 501 bp, Homo sapiens
  misc_feature 426: n = A,T,C or G
cccttagcgtggtcgcggccgaggtactagatttattgaaacagtctaagataatactcctataatttttttaaagtgttaaaataaaaatacttcactcaattaacttacccacataaagccaccgaaaaaatgctttgaagtttttcatactactatctataactctaaagagataaaaacaaaaaatcagaaataagattagtgtgtgggggattcatacatcctactcaactgtcaggaaatatcataatccttactgttctattttatcctatctgggtgacatttaagtctttagaacagcagatattacaaatcaaacgcctacctaaaaataaaatttcaaaaaagaaaatactgattataaaaataaagcaaataacttagattccaactggttacaagagccttgccacaaactgngtaatagtctttcttatgactcagtaaagcatgaactccttttctacttttgccaattaaaggaaatcagaaaaa

SEQ ID NO: 5792 - DNA, 406 bp, Homo sapiens
  misc_feature 349, 369, 392, 398: n = A,T,C or G
cccttagcgtggtcgcggccgaggtacttttagttgagacagggtttcaccatgttggccgggctggccttgaactcttgacctcaggtgatctacccacctcagcctcccaagtgctggtattacaggcgtgagccactgcgccctgccaagctactgcattctaaccacacacacacacacacacaccccaaaattttatgaagattaaagaaaaccttttattgaggtataacttacaataaatagtgcacatttaagtgtgcagctcctttaattttttacatatgaatacatcattgagactttctgtaacccactttatactgtagtttgcaagtgagctaanatcgtgccattgcactccancctgggcaacaagagtgaaactncatctnaaaagaaa

SEQ ID NO: 5793 - DNA, 594 bp, Homo sapiens
  misc_feature 380, 384, 503, 511, 521, 552, 571: n = A,T,C or G
gatatctgcagaattcgccctttcgagcggcccgcccgggcaggtacataacagatgtttcctcagctgggtgtgaggtatactctaagcaggaggctttttcagccttctctctcttttttttttttttttttttttgagatggaattttgctcttttgcccagtctggagtgcagtggcatgatctcagctcactgcaacctccacccactgggttcaagcgattcttctgcctcagcctcccgagtagctgggattaccggcacccaccaccacgcctggctaatttttcaattttctttttcaagtaaagacgggttcaccgtgttggccaggctggtcttgaactcctgacctcaggtgatacccgcccccccgnctanccttccaaagtgctgggattacaggcgtgaagccaccgtgcctggccctgtctctcttaagagtaggttcattggctggcttagagtcacttctattgcaactcattttctttttccanggcacaanattgaccaanctgccggtcccttttctgcaggacaggactnttctaacatacctggcttngtcccccaagccggggtttgggg

SEQ ID NO: 5794 - DNA, 231 bp, Homo sapiens
  misc_feature 24, 34, 37, 51, 54, 62, 63, 64, 72, 81, 82, 85, 88, 92, 121: n = A,T,C or G
cccttagcgtggtcgcggcccgangtacaggtgngcntcactaaggggcangcngttcatannnaaaaaaanatttttttnnttnttnccgngtggggcaggggacgcccgttaactgcanatgtctgctgagcatgtccagggtgggtatgggagctgggattcatcattttgtatgagatgcctggctgccataaggttgacatgacccgaattagggcccatcatgac

SEQ ID NO: 5795 - DNA, 740 bp, Homo sapiens
  misc_feature 484, 488, 499, 502, 534, 549, 551, 561, 574, 594, 600, 605,618, 626, 639, 641, 647, 654, 657, 658, 664, 665, 666, 675,680, 682, 688, 689, 693, 696, 697, 705, 707: n = A,T,C or G
ccctttcgagcggccgcccgggcaggtacacttgtttatggaactttctgtggccacctacgaaagacaagttaacaaactgtcatggaggctgtgttgcccagccagggcccgctgcattttgacaacatttccaccctggccactcagcacatttcatggaggtcatgtcttttcactgatacttttttgatagtttttatataacaaaatccttattctatttataacttaagatgataaggcactataaattaatgacctaaaataatatatttgtctgttatcttttgctattctacttcactttaatttttagctgtaaaattggtaaatggattcttacaactatctctttccatttcttactatttggttttcaaatttcatttaaatgtcagaatttccttttttaggaacaatgtgtatttcattgcctatttaaaaataaactcaaatttgcatgccatatgcccattttgantacnattttatttcnttnatgaaaaggcatgaaccaacttcaaatccttnatactgtttgggtgntnattctacatnacgacaatctatnatattatttctatacctttnaagggnttgcnaaggatgggtagngggaattntggaaattaattngntaatgncttgggnatnncctaannntggaaaggnaggtncncaattnnccanggnntttaacantnaaaactttttttccctcccaaaaaaaaaaaaaa

SEQ ID NO: 5796 - DNA, 551 bp, Homo sapiens
  misc_feature 522: n = A,T,C or G
cccttagcgtggtcgcggccgaggtaccataatatctatcatccaagtttcagggttttttgaaagttgataattaggaaagtgacattttacttttcttagtgccctttgcctgtttgatttccattgagaaagagcagtcaccaaagttcctcaagtgtcggaagaccaccaccatcagaatcagtgcttgtttaaaaaataaaaatccctaggttccagacctactgaattggactctttggacatgagactcagcaatctacatctttaaaaaggcttcccaggtggtttttgtgcatactgtttgagagtcactaagttatatatatatcctaccttctgtaaagtgaaatgaggccccaaaaagctaaagaggtagagctgctacctcgtttttagttgattcatcatctagtctatatcacccaaaagaatttggaaataggtattcaaacaaaaacctgtatacaagtattcatagaagcactacttacaatagccgaaaggtagaaaccaacnaaatggtctatcaactgatgaatggataa

SEQ ID NO: 5797 - DNA, 453 bp, Homo sapiens
  misc_feature 121, 122, 131, 143, 146, 147, 149, 152, 156, 157, 161, 164,165, 169, 170, 178, 195, 202, 205, 206, 209, 211, 212, 215,230, 233, 236, 239, 244, 248, 249, 252, 253, 256, 257, 258,265, 273, 275, 280, 290, 292, 294, 295, 309, 311, 325: n = A,T,C or G
  misc_feature 330, 332, 333, 334, 335, 336, 337, 343, 348, 350, 351, 352,357, 359, 360, 361, 377, 381, 392, 397, 401, 406, 408, 409,412, 417, 418, 422, 423, 426, 429, 430: n = A,T,C or G
ccctttcgagcggccgcccgggcaggtactttttttttttttttttttttttttttttttttttttttttttttttttttttttttttttttttttttttttttttttttttttttccccnnaaaaaaaanttttttttaaanccnntnaanaaanncccnttnnttcnnaaaaaaanaaacttttttttaaaanaaaaaanatnnctnanntgntgaggttattttccnggnccnttnaaaanaaannttnnccnnntgtgccnaaaaaaangntttgncaaaagaaananannggatgcaagtttgntnagcttttttttttnaaggncnnnnnntttttncaaantnnnaaaanannnttttttttttttcccntaanaaaaaaaccgnttttngggnttaanannacnccccnngggnnaanttnntgggggtttataaaaaaaaaaaa

SEQ ID NO: 5798 - DNA, 228 bp, Homo sapiens
  misc_feature 9, 119, 154, 162, 170, 172, 174, 175, 179, 197, 200, 216: n = A,T,C or G
tgatggatntctgcagaattcgcccttagcgtggtcgcggccgaggtacccatttcctgatagagacttgagatcgttacctttgaaaatggaaccccaatcaccaggttgaagtaaanaaactgcatgaaggggcagccttttgaagttcccncccttttnaatttttntncnnaccntttacgccgtaaaatggnganttggaggaaagccccnttttggactttc

SEQ ID NO: 5799 - DNA, 325 bp, Homo sapiens
  misc_feature 79, 129, 140, 144, 148, 161, 170, 199, 254, 282: n = A,T,C or G
cccttagcgtggtcgcggccgaggtacgcgggtgagtccaaacttgaagatggtaacaaagaacagagaacagacaaancaaatcttggtggaaaaggaaaatatgattttacaaatggtgagaagganaagaagaaaangaantggngattctcacacantaatttgtnagccaaggaggacagtatttcatattttngaatgaggaatatgaaacccaaatttaaaaaccaagaaaaaaaagatggaaaaanttaagcagaaagcaaaggagttgcaagnaaaccgtttaaggaaaaaaattactgggatcagggaaagccaa

SEQ ID NO: 5800 - DNA, 103 bp, Homo sapiens
  misc_feature 30, 32, 36: n = A,T,C or G
cccttagcgtggtcgcggccgaggtactcngngatnaatacaccattgctacatttctatcactctcatgttccttggcctgtcttctatctttgtgtgtgtg

SEQ ID NO: 5801 - DNA, 569 bp, Homo sapiens
  misc_feature 474, 501, 558: n = A,T,C or G
cccttagcgtggtcgcggccgaggtaccttaaaacaattacaatgttaataacaaagataagtaatcacagagcactatgtcagatataatactaatttaaaaagtttgaaatataatgacaattaacaaaatgtgactaggaggctcaaagtgagcacatgctgttggtaaaatgatgctaacagacttgcttaatgtagggttgccacaaacagaagtaaaaagtgcttatttgccgacaaccttgccaaatattgactctataaaatggtttaaaattatttatattacagatactttgctttgctatttctaattctcttattttgtaaacagtgttattttagccacatatgtatttctttcgctctggatttctcatttcattttaattttgtgtgtatgtccttgatggattctttgaatttttgttttcattgcatctttctgtataattattcctgggatattgngtcatttttaaaaattgcatttcgtangatggattcctaatactttcttaacatgtgcttttatgttattttatttccctggcntattactaaaa

SEQ ID NO: 5802 - DNA, 128 bp, Homo sapiens
ccctttcgagcggccgcccgggcaggtacgcgggggatactctgattttggttttgattttggtttggtgtaaactgcaagagtgtgtatgccctttttacctgtttttttgtttgtggcatgtgtgt

SEQ ID NO: 5803 - DNA, 397 bp, Homo sapiens
ccctttcgagcggccgcccgggcaggtacttccatttacaaaacatagtcatccttgattgccgaaaatgacaaatcctagaaaacgtagcattcctatgcaagatgttaacatggttcttagttgttggccaaagatccatttgatgaatttaatttttctgaaatagacaattctgatgattcagatgattctgatgttagttctgtttagaaataactccaagaatagtttttatattttattttcacattgaaaatcaatcagggccaggtgcagtggttcacgcctgcaatcccagcactttgggaagctgaggtgggtggatcacttgaggtcaggagttcaaagaccagcctgacaagcatggcaaaaccctgtttctactaaaaataca

SEQ ID NO: 5804 - DNA, 362 bp, Homo sapiens
  misc_feature 275, 300, 325: n = A,T,C or G
cccttagcgtggtcgcggccgaggtaccagcagtggttacttgcattgtgtagtgtttttcaagaggtctgggtcttaacaaaatgttttcctttatctcagtgctcttctgcctctttttggtggtgtccttttgaaaaacaatacaccttctattccttcattttgggttacacctttccttgttgacatttaagcgagtttcaaacttacttccatatgaggctaagaaaccctcaaatttcaggaattggggaaaaaataaaaattagcancttgccagaaaggtagccaaccaanatggggaaaaatgcccttggatttngacaattttttcttttcaagcatttttaaaaaatttt

SEQ ID NO: 5805 - DNA, 195 bp, Homo sapiens
  misc_feature 30, 34, 36, 39, 41, 44, 45, 47, 48, 49, 51, 59, 73, 78, 80,84, 88, 91, 120, 146, 167, 168, 172, 173, 176: n = A,T,C or G
cccttagcgtggtcgcggccgaggtacttntttntnttntntcnntnnncngtttgcantttttgttctttanaattntntttnacantanaacatgttttccaccatgtattattcatntatttaagaaatatttattgagcctntgtgaagggacaggtaccagnnatgnnctntcaacaattaaggatgcct

SEQ ID NO: 5806 - DNA, 495 bp, Homo sapiens
  misc_feature 27, 39, 300, 303, 306, 315, 334, 393, 397, 416, 433: n = A,T,C or G
gatggatatctgcagaattcgcccttnccagcggccgcncgggcgggcacagcaatttttcttgccacaaacctgaattaaccttacagattttttaataggagccctgagatataattttactttttggagaatatacttacccttttaatagcttttcttttttagaataaaaatgtttggaaaactagactcctgtttctccagattagaaatgaaatttgatcctgtggtggcagtttttctccctctcatcattacatatgttagaaattctgataaggagattgttagaagcanaanatnaagattatntaaaagagagaggagactnaaaaggaggtgaaatgtaattttacaattccctgcaccacttatttatttcctaaaatnttgnctcacacaaaagacatcanagacagaaagttttctntgtccacatctcccatatgggcaaaggtagcttaccatttcttggaaaataaagaaaaaatg

SEQ ID NO: 5807 - DNA, 570 bp, Homo sapiens
  misc_feature 112, 122, 126, 128, 136, 144, 148, 152, 161, 163, 165, 169,173, 179, 211, 225, 253, 258, 263, 265, 267, 279, 280, 288,290, 299, 301, 303, 317, 321, 325, 336, 342, 348, 349, 356,361, 364, 365, 374, 389, 391, 397, 412, 417, 423, 424: n = A,T,C or G
  misc_feature 427, 443, 455, 483, 489, 493, 504, 514, 530, 537, 548, 552,553, 555, 557, 561: n = A,T,C or G
cccttagcgtggtcgcggccgaggtactttttttttttttttttttttttcttttttttttttttttttttttttttttttttttttttttttttttttttttttaaaaaantttccttttnactntnatccttanatttccanaaantttntttaaaaangntnaccntttnaaccanaaaatttttttttttttaaaaattttttaatnattgaaaaaggccntttcatcattttttaaccaattttttanaaaanatttncntncccaaacaaccnnttaaaaananaaattccancncnctttcaacccttantaanaaanccaaacctatnccaaanttaacnnaaacatnatcanaanntttttcctnaaaaaaaaatttttntnccctcnaaaattccacaaaanattcnaaaccnnaancttaaaattaaacctnaaatccctaaanaaaaaaaccctaacccccctttaatttnctttancccnaacatcccctnttttcaaatnaaaaaaaccttttttnccccttnttattaaaaanaatnncncnaccncccaaaaaa

SEQ ID NO: 5808 - DNA, 289 bp, Homo sapiens
ccctttcgagcggccgcccgggcaggtaccttctttgctattcagttgattttttgtaataacacacttttaatttttttatttccttttgtgcatattctatagatattgtttgaggttaccatgagagttatgtataacatccaaagttacaacaatctattttgaattgataacaagttagttaattgatagcaaatcactttcttagttaagttaattcctaggtgtttcattttatttgtagctattgtaaatgggagtacctcggccgcgaccacgctaaggg

SEQ ID NO: 5809 - DNA, 724 bp, Homo sapiens
  misc_feature 611, 627, 629, 649, 663, 691: n = A,T,C or G
ccctttcgagcggccgcccgggcaggtacagtaataccttaaggaaccggaaaatactaaatgtctttggctatacaactaaaaggccattctttcaaaagaatagggcatattcatttcagaatcaactaaaaaaaacagaaagcataacagaaatatgcatagaatttaagtatactttgtcttgccttcttttcccattctacccacataagcaaggagaatgcaatttatataatctttccagatgagactcaatagcactacaaagaaaatacccaaatttctgcaaaggcaaagtgaattaaaataattacacaactaggtgaagactgaaagggacaaatgttatttgcaattttctttttaacttgtttttaagccttacaagtgtagaaattatagctaataaacaaaaagtcacaatcttcacaaatggaactcaatagaaaaataaatcaaatgaaacacttagtaataaatgaagcctattttattacttcaaggtgttaatgataaaaaaatttcagcacaagctggtggcttttaaaaaagtgaaactacatactatgtttctagctcagtaaacaggatgaacctgatggtctttnaatggacattaccaantngagcattggacctcctcaanccactctcctaaangattgggaacaaaaagccaaccaaaaangaaatctctcttttaaaatggaataaaatggtt

SEQ ID NO: 5810 - DNA, 636 bp, Homo sapiens
  misc_feature 359, 542, 573, 601, 602, 617, 625, 626: n = A,T,C or G
ccctttcgagcggccgcccgggcaggtacaacttaataaattttaacaaagtaagcacaactcttgtgcttaccacaagattaaggaatagaatagtcgctgggcatgggggctcacgtgtgtaatcccagcactttgggaggcaatgcaggcagatcacctgaggccagaagtttgagaccagcctggccaacaaggcaaaaccccatctctactaaaaatacaaaaattagctggccacggtggtgcacacctataatcccagctactcaggtggctgaggcttaagaattgcttgaacccaggaggtggaggttgcaagtgagtccagattgcactattgcactccagcactccancctgggcgacagagtgagactcccgtctaaaaaaaaaaaaaaagaaaattcttactggtctagtctgctttgctggcacttcctgagatttgatttttatgacattttcttattaaactttacatttcacttggttggcatatagttttggaagaaatatattttttctgtatctagttaaanctcctttctcattcataaccgtatattaccngctttttttttctaatttattattattnncttggtgggcatacncttttgtnnaaaaaaaatt

SEQ ID NO: 5811 - DNA, 595 bp, Homo sapiens
  misc_feature 319, 323, 368, 379, 380, 388, 413, 432, 442, 453, 455, 458,463, 470, 477, 512, 523, 528, 530, 537, 544, 550, 551, 564,571, 572, 573, 575, 582, 583: n = A,T,C or G
cccttagcgtggtcgcggcccgaggtacagtggcacgatctcggctcactgcaagctccgcctcccgggttcacgccattctcctgcctcagcctcccaagtagctgggactacaggcgcccgccactacgcccggctaattttttgtatttttagtagagacggggtttcaccgttttagccgggatggtctcgatctcctgacctcgtgatccgccgcctcggcctccaaagtgctgggattacaggcgtgagcaattactgtgtttcttatccatgtagtgtgcatgcagtgaccggcatcctaatacgggtcctncttntagcatagatatggggatcaagcacaaacaaaagcaaacaggtancatttttacanncagcatgnacagtaaagggcattaagggggttngttaaacaattatcccaangagccatatnattgaataatncnaangaatnttactgngcctaanaatttttggccacatttaattcattttttttaccntttctttaaanctttngnccgtgcnatttaantaattnnagtttcttgggtnttgactnnnancaatggnntttgtttttttt

SEQ ID NO: 5812 - DNA, 537 bp, Homo sapiens
  misc_feature 255, 257, 261, 262, 263, 264, 265, 266, 267, 268, 269, 270,271, 272, 276, 278, 280, 281, 282, 283, 284, 285, 287, 288,289, 290, 291, 294, 295, 301, 337, 357, 403, 404, 451, 457,460, 462, 476, 477, 494, 495, 506, 517: n = A,T,C or G
cccttagcgtggtcgcggccgaggtacgcgggtgacccaagcattggtatctacggcctggacttctatgtggtgttgggtaggccaggtttcagcatcgcagacaagaagcgcaggacaggctgcattggggccaaacacagaatcagcaaagaggaggccatgcgctggttccagcagaagtatgatgggatcatccttcctggcaaataaattcccgtttctatccaaaagacaataaaaagttttcagaananaaannnnnnnnnnnnaaananannnnnnannnnnaannggtccnggaagccgttcttgacaaaatggggtgaaatgaccntcacccgcattggacaggcncttgctgcccttattaacctggctcatgccctcggacgtcctggannaatgcttttgctccttttttggacaagcaatatgaatttgggttacncaaaanaantncgggcagctttttnnaattaaaaccttgaaannggaatgttttnaaggccaacanccaatgaaaggtttttttgg

SEQ ID NO: 5813 - DNA, 421 bp, Homo sapiens
ccctttcgagcggcccgcccgggcaggtactaactctgttgcattaatgcttcaaaaaatcatcaaatgattcatgggggcctgatttgtatttgaaaaatgtttgaaattaagagtctcatttgtttcaggaatgcagctacctgagttttttgtcttggcaaagtcacaaagcccatatactcacattgtgtgtctatatttgccaattaattctaaacttctaggaaatatgccctctcttaaaggagaattttttttaaatctctgagaaatgagattctgagtttatttcaactaaaaggttgcaattcttctgaagatatctcaaatataaggttgaaagttaagtgttaataatttttgtgaatttatacacacctaaaccgttaagtacctcggccgcgaccacgctaagggg

SEQ ID NO: 5814 - DNA, 665 bp, Homo sapiens
  misc_feature 10, 39, 86, 99, 105, 123, 127, 170, 231, 296, 363, 388, 394,401, 403, 443, 455, 462, 511, 520, 525, 552, 574, 589, 590,598, 602, 604, 606, 617, 623, 630, 632, 634, 639, 648, 649,653, 655, 656: n = A,T,C or G
gagcggccgnccgggcaggtacgcgggggttggctgcantaagagctcagtctcttcaccaggggctcccagtccttccatctggnaggccaaggcggnttcacnttctgagaatagacagancctntgttactctgtgaccggcaggcaccgggagatccgtagctcanacgccaggacatcccggaagctgggaaatgggactgttgacattcagggatgtggccatanaattctctcgggaggagtgggaacacctggactcagatcagaacttttatatggggatgtgatgntagagaactacggaaacctggtctctctgggtctcgctgtctctaatccggacctgatcaccttttnggagcaaaggaaagagccctggaangtgaanagtgcananacagtaccatcaccagatatcttttctcatgatactcaangcctcttaaganagaagcntataaaaacatcattccaaaaagtgatattggatggatatgggaactgnggcccttanaattnaaacttaaaggaagaatgggaaaagtnaaggccaaaataatcctatggngaaaaaaaatcaacnngatatctntgcntnanaaaaaggcccnagaccngtgaatntntnagggngataaaganntggntnnaaaaggggg

SEQ ID NO: 5815 - DNA, 249 bp, Homo sapiens
  misc_feature 102, 105, 113, 116, 121, 122, 134, 136, 145, 152, 153, 174,175, 177, 178, 180, 182, 186, 192, 199, 205, 207, 212, 219,227, 235, 237, 242: n = A,T,C or G
cccttagcgtggtcgcggccgaggtactttttttttttttttttttttttttttttttttttttttttttttgttttttttttttttttttttttaaacatnacnaatttatntanaaaannaaaaattatttngncaaaatttnttccggnnaaaaagttttgggcaaattanntnntnangaancaaaanaattatntaaagnanaaaancaggggnagtatctnaagaaaangnaaatnttttaaa

SEQ ID NO: 5816 - DNA, 390 bp, Homo sapiens
  misc_feature 160, 193, 246, 267, 319, 361: n = A,T,C or G
cccttagcgtggtcgcggccgaggtacgcgggggcagcaggaggaggcagagcacagcatcgtcgggaccagactcgtctaagccagttgcagcttctcagccaaacgccgaccaaggaaactcactaccatgagaattgcagtgatttgtttttgcctnctaggcatacctgtgcccgtaccagttaaacanggcttgattcttggaagttcttgaggaaaacagcttttacaacaaatacccanatgctgtggccacatgggctnaaccctgacccatctcagaacagaatctctacccacagaatgctgtgtcctntgaagaaccaatgcttttaacaagagacccttcaagtaagtncaacgaaagccatgaccacatggatgata

SEQ ID NO: 5817 - DNA, 251 bp, Homo sapiens
cccttagcgtggtcgcggccgaggtactgagctccacaaacgtggccatggttggtgccggaaatgattctgagtgagcaggtagaagtctcacgtctgctgtgtccagagttggttccttccagagggttcgtggtctcgctggcttcaagaatgaagcccgtggaccttcacaagtgtgtgttacaagctgttaaagatgttgtgtctggagtttgttccttcagatgtgtctggagtttctcccttct

SEQ ID NO: 5818 - DNA, 305 bp, Homo sapiens
  misc_feature 60, 107, 109, 121, 136, 141, 143, 144, 145, 160, 170, 178,181, 182, 185, 201, 204, 207, 211, 212, 213, 218, 219, 227,228, 232, 242, 244, 248, 254, 256, 261, 268, 276, 288, 290,294, 302: n = A,T,C or G
ccctttcgagcggccgcccgggcaggtacttttttttttttttttttttttttttgggtnttttttttttttttttttttttttttttttttttttttttttttatncnctactttaaaanattaaaaactttttntttgnannnaaaaaaaattgggcnttccaaaaanaaaaaaanttnnaanaaaaaaaaatggcccnttnatnaaannnttttnnaccctggnngaanccttgggccnanttgntttaantnaaaanttcggtnggggcccnccccattttttncncccnattttttnttt

SEQ ID NO: 5819 - DNA, 447 bp, Homo sapiens
  misc_feature 239, 428: n = A,T,C or G
cccttagcgtggtcgcggccgaggtactcccgattggagacgtagaaccgttacttgtcgagggccttagcggccgccgtgaccctctcggggatcccacgatgttcttctacctgagcaagaaaatttccattcccaataacgtgaagctgcagtgtgtatcctggaacaaggaacaagggttcatagcatgcggtggtgaagatggattactgaaagttttgaaattagagacgcanacagatgatgcaaaattgaggggccttgcagcccccagtaacctttctatgaatcagactcttgaaggtcatagtggttctgttcaagttgtaacatggaatgagcagtatcagaagttgactaccagtgatgaaaacgggcttatcattgtgtggatgttatataaaggctcttggattgaggagatnatcaacaattcgaaataaa

SEQ ID NO: 5820 - DNA, 311 bp, Homo sapiens
cagtgtgatgggatatctgcagaattcgccctttcgagcggcccgcccgggcaggtactggtgaaacagttttaataccctaacatacacagtaatgattcattcttgtttaaaacaagaggtgatttcgacttgggattgggatttttattttttgagatggagttttgttcttgttgcccaggctggagtgcaatggcacaatcctggctcactgcaacctccgcctcctgggttcaagcaattctcctgcctcagcctcctgagtagatgatgggattacaggcatgcaccaccacgcccaggtaatt

SEQ ID NO: 5821 - DNA, 523 bp, Homo sapiens
  misc_feature 451, 501: n = A,T,C or G
cgccagtgtgatgggatatctgcagaattcgccctttcgagcggcccgccgggcaggttgctgtgttttccgtgggcccgtcactttcccctctgtttactgggtatctcacccagctgtgaatattcatggcccaaggtgttttaagacacctttttaaagggtgtgggattatcactttatttcagaagttgtgaagaacaaataagtgacttgaccaagatccaatagactttttagaaatataaacatctgatttcagggtctgtgccgtaatttcttttcttttttttttcaaatatttaagacttcaaggagatgagcttaatttcataatggagcattcctcttaaaagtttctggagtaatgaccccattaagacaatacaaggccaagtcctaaaagcccttgggtattcaggacttctgaaagccacccagactccctggnggagccatgaaacttccaaactcttccctgtgtcatgctggcaagccatnccaaaggattgaggtggggcaa

SEQ ID NO: 5822 - DNA, 184 bp, Homo sapiens
  misc_feature 13, 47, 48, 49, 63, 74, 134, 157, 173: n = A,T,C or G
gccagtgtgatgngatatctgcagaattcgcccttagcgtcctcgcnnncactatacattgcnatttatccaanaagctgattttcccttcaacaattaccttaacatgctatacactgtttctggtaacagcnagtatgaggttatcacatcctgnatggaaaacatgccanaatgaaaatgg

SEQ ID NO: 5823 - DNA, 534 bp, Homo sapiens
  misc_feature 435: n = A,T,C or G
cccttagcgtggtcgcggccgaggtacttatgaagcccatctaagtaagatcatttcttctaattcaattttctaaaatcatttgtgttttagaaatctcatgattcccaggaaaaaaattttaaattgtgatacaggtttgacagccttttagtcaaataagttaaaacacacacacaaactcatttactcactttgccattataattcaatcacaaagaaattttggccaggccgtggtggcttaccgcctgtaatcccagcactttgggaggccgaggcaggtggatcaccgaggtcaggggatcaagatcatcctggctaacatgtgaaaccccgtctctattaaaaataaaaaattagcctggtgtggtggcgggtgcctgtagtcccagctactcgggaggctgaggcagcagaatggcgtgaactcangaggcggagcttgcagtgaagcccagaatcgcgccactgcactccagcctggatgacaagaaccgagactcccgctcaaaaaaaaaaaaaaaaaaaaaa

SEQ ID NO: 5824 - DNA, 663 bp, Homo sapiens
  misc_feature 71, 73, 76, 79, 82, 394, 455, 477, 484, 502, 521, 539, 550,600, 608: n = A,T,C or G
ccctttcgagcggccgcccgggcaggtaccaaaagtaaactgggtagaatccaaaggaaattgtatacaantnttncanttnttttatagcatttttgttgccaaattataagtaaattgtaggtatttattaatatcattccaaggaatgactagcagtgcaaaaaataggtactacactgaattcacccccactgaaaaagatgagtatgcctgccgtgtgaaccatgtgactttgtcacagcccaagatagttaagtgggatcgagacatgtaagcagcatcatggaggtttgaagatgcccgcatttggattggatgaattccaaattctgcttgcttgctttttaatattgatatgcttatacacttacactttatgcacaaaatgtangggtataataatgttaacatggacatgatcttctttataattctactttgagtgctgtctncatgtttgatgtatctgaacangttgctncacaggtagctctaacanggctggcaacttaaagggngggagccaaagaattctnttatcaacatnaaaatttggcagaattgaactcttaatctctgcctcaaaagcttggtaanaagttaancggccttaagttaaccttccaattacatactctggttaaaatttggggggaaaat

SEQ ID NO: 5825 - DNA, 319 bp, Homo sapiens
ccctttcgagcggccgcccgggcaggtacatgatagggaggagtgaggcaggtgggcactggagggctgtttcctctggcacagttgaactagagggtcactttccactcataattggtttcctaggtctaagtcaccacacctggggctgaagcaagtcttgcctgtgcaccaagcgtggccttggaccctggagagatgcaaggctcagttctccagtgttgaagtggaaggactcccaactgaaggagatcttcctctccccacctccagctcttttcccttacaaatgaccagggtgcaagtcgagaggcagagg

SEQ ID NO: 5826 - DNA, 264 bp, Homo sapiens
  misc_feature 111, 114, 123, 133, 136, 137, 141, 143, 145, 147, 156, 159,160, 161, 164, 165, 168, 173, 174, 179, 180, 185, 186, 187,189, 191, 193, 194, 195, 197, 207, 209, 212, 216, 220, 227,239, 245: n = A,T,C or G
cccttagcgtggtcgcggccgaggtactttttttttttttttttttttttttctttttttttttttttttttttttttttttttttttttttttttttttttttttttttnttnttttttttnttttcttttnttnngagngngnanaaaaaaaanggnnnttnnttntaaannaatgnngggannncncncnnngnaaaaaaaaanantantatnttcnccccccnaaattttttttnttattnaaaaaaaaaaaattttttc

SEQ ID NO: 5827 - DNA, 241 bp, Homo sapiens
  misc_feature 92, 95, 100, 117, 123, 131, 141, 142, 153, 156, 157, 162,170, 174, 175, 177, 182, 188, 192, 203, 214, 221, 229, 240: n = A,T,C or G
cccttagcgtggtcgcggccgaggtacctttttttttttttttttttttttttttttttttttttttttttttttttttttttaaaaaaaanaanatttnttttttcccaaaaaaanaaaatnaaaattgntaaaaaaaanntggctcatttnaannaattnaattactnaaanncnttcanattttnattnaaaaaaaaaanaaacactcttnctttttnaattttanttcctttcccna

SEQ ID NO: 5828 - DNA, 106 bp, Homo sapiens
  misc_feature 39, 87: n = A,T,C or G
cccttagcgtggtcgcggccgaggtacgcgggtcagcanacgccccctgctagatgtgctggatcatgggaaagcatttccatttgntactagattgttcagaagt

SEQ ID NO: 5829 - DNA, 570 bp, Homo sapiens
ccctttcgagcggccgcccgggcaggtactaagtggtgccagagctattgtattaacttgtttcatctctcttttaattctttgttctctctactataaaatggagaacagggaaaaattccttgttctgtatactgtaaaaagcaaacagggagatatagatgaccacagcaattacctttgttgagaaaagccacatataaaccaaaaaaatgggtattgtctttgttccattttgcatctgcctacaaacttcccaggttcaaaaacaaaaacaattagtgaaataacaaaccaccttacctcctttgccaggctagagattttatttctcttaaggttctgtctgttacctagtggttttcttgtaaaggggaatgaaaagtgtgaattaaaagtcacacattgttttgtcctgagtcctaatcacagtgtaaaagcaaacaagtttatcaggaacagagaagtggcagatatcgggcctgattacgttatttttgaggtcttatatcaagaaactccattccattaaaaatgttcagttttatgggaaagacagaggaaaaggaa

SEQ ID NO: 5830 - DNA, 231 bp, Homo sapiens
  misc_feature 124, 137, 219: n = A,T,C or G
cccttagcgtggtcgcggccgaggtacattacggtatgccaatcgtgctaagaatattaaaaataaagctagaattaatgaagatccaaaggatgctttgctgcgtcagttccagaaaagaaanagaagaacctttnaaaagaaagcttgaagaaaggagaaagaaaatatcacggctctgatatcaagttgggtcagagggaagaatgatgatgaaanagggtgaggttt

SEQ ID NO: 5831 - DNA, 500 bp, Homo sapiens
  misc_feature 55, 60, 122, 129, 135, 147, 149, 154, 161, 167, 181, 182,184, 193, 194, 198, 200, 208, 209, 217, 218, 230, 239, 248,257, 258, 260, 261, 262, 263, 275, 293, 298, 305, 307, 313,314, 329, 330, 333, 334, 348, 351, 352, 356, 360, 371: n = A,T,C or G
  misc_feature 372, 377, 378, 382, 384, 388, 400, 408, 415, 417, 418, 425,432, 433, 435, 436, 439, 466, 473, 483, 486, 487, 488, 494: n = A,T,C or G
cccttagcgtggtcgcggccgaggtactttttttttttttttttttttttttttnctttntttttttttttttttttttttttttttttttttttttttaattttttttatttttttttttnttatttntcaaanggggggaaaatnanttttntttaaanaaaaanctttatttaatttnngnagaaaaatnnaaantnttttttannccaaaaannttttaaaaaaantttttccanttttttttnaaaaaattnntnnnnttaaaccaaaantttttttttttttttttncaaanttttttntntttttnnaaaaaaattaaaaannttnncctaaataaaaaanttnncaancctnaattttttaannccttnncttntnttcntaaaaaaaaacnaaatcttntttattnanntaaaaanaaaaaannannttnaaaaaaccaactttttttttttttttnaattttnaaaaataaanttnnnaaaatntttttt

SEQ ID NO: 5832 - DNA, 336 bp, Homo sapiens
  misc_feature 19, 90, 97, 99, 116, 134: n = A,T,C or G
ccgtgcaaaggtagcatantcacttgttccttaattagggacctgtatgaatggctccacgagggttcagctgtctcttacttttaaccngtgaaantngatcctgccccttgaanaaggcgggcatgacacantcaagacgagaagaccctatggagctttaatttattaatgcaaacggtacgcgggtataccctttatgttcctgactgatgcgcagaactttgggggaaatctacagcaatatacaggtttgcaaatgctgatgacacaacagcaatcctctcctctacgttggacttactgttgtttttttaattattattggaatgggat

SEQ ID NO: 5833 - DNA, 438 bp, Homo sapiens
  misc_feature 24, 28, 63, 73, 83, 93, 99, 103, 104, 106, 107, 110, 113,344, 346: n = A,T,C or G
cgacagtgtgatggatatctgcanaatncgcccttagcgtggtcgcggccgaggtactccatnctgcccagangggactaccnagttggccgnaaattntttnntnnttnttncaccagtggtttgtgaactccttggcagggtcatgtcctaccccatgagtgtcttgcttcagtgtcaccctgagagcctgagtgataccattctccttccggccgaggcctttgccttgagtccatccatgctttagcagctgctcctcaacaaacttcatcccacgactcttgacctctggggtgacattcatggtgagaaaaaagtctctatcctcagactctcaccananaaagaagaaggtgatatcattcgtcattgctgggtccgctccgcggaaacatgtgcccggacctgacttgtgcgccgccatcttccccccgc

SEQ ID NO: 5834 - DNA, 460 bp, Homo sapiens
  misc_feature 246, 453, 459: n = A,T,C or G
ccctttcgagcggccgcccgggcaggtactcatttcccctgtgtcttcctgggaatttaacttagtctcagaggcccaatgggctgagtgtggtggattttgcatttcaaagttaagccctaaacccagcaaacaaccaagtaaagatggttattaacccaactcagactgactctgagtttatccatttttctaggactatttaagaaacaactgaggcatcagaccaactttccccacaaagtnctcggtaaggaactaagtccagtcgcatgtagagagggggatcctggccttctggctgcttccttacctagaccccacacaaagggtggtgggaggaggcggggggcagatctggaggaaatgcctatgaaaactgagatctagggcttgtgcagcaagaactcagcattctactttgcttgtcctgtagggacagcccaatgcctnggtttng

SEQ ID NO: 5835 - DNA, 603 bp, Homo sapiens
  misc_feature 59, 69, 139, 204, 209, 290, 341, 413, 424, 448, 467, 522,580: n = A,T,C or G
ccctttcgagcggccgcccgggcaggtactttttttttttttttttttttttttttttngagggacacnctagagtgcagtgacatgatcacatgtactgcagcctcagcctccaaggttcaaaagatcctcccacctnagcctcccgagtagctgggactacaggtgtgcaccatatccagccaattttttaattttttgcanagacnaggtctcaccatgttgcccagggtggtcttgaacctcctaactcaagtgatcctcccacgttggcctcccaaagtgctaanattacaggcatgagccaccgtgcctgccatcattttttttttttaaagaanacaaaatactagtgatgcacttagtcactggtacattaataaaaattgttacagctggtgattcttttgcanatcaaaaactntggtggacttgagaatatagtcanaaaggcacacaaaagtcanagtaaataataatgggaagagactttttgccaatatttcaccctgtccacaggtngatcccaaacaattcatttttcccaccccaagggacaggcggctggataatgcttggngatttgcttgaaggggggtttgc

SEQ ID NO: 5836 - DNA, 118 bp, Homo sapiens
cccttagcgtggtcgcggccgaggtacaattgttcttagaagataatttgtttttctctcttcagtttcgcatattactaaagacaaatcatggtaggattggtttgtttattatacc

SEQ ID NO: 5837 - DNA, 493 bp, Homo sapiens
  misc_feature 445, 446, 447, 449, 450, 451, 452, 453, 454, 455, 456, 459: n = A,T,C or G
cccttagcgtggtcgcggccgaggtacacaacattttatatatgaaaagaatgctgtagactgacttgcaaataacattctaagattcccattacctttaagaggagtcagctgtcattttggaaaaattaagatttcaacaattttacacatattttgaaaataattttgataatgaaaaatgttcaatcttaaatcgtgtaaataagtaaatagagaggtaaaataaagagcttgatgtttatgtgatattgagaaaaaatcttttttaaaagtaaaatacagattaaaatacaactttgtgctttaactgaagggtgtccctactccctgatgtgtttgagactgtcacaaacctgaacccatttggacaatacatgaaataatcattttgcatcatttcactattggggaaatgataacttcttacattaaatgaaaaagnnnannnnnnnnaanaaaagtacctgcccgggcggcccgctcgaaaggg

SEQ ID NO: 5838 - DNA, 132 bp, Homo sapiens
cccttagcgtggtcgcggccgaggtacaagtgtcagtcatgtatcattatatagtctgttgatctttccatttgcaaaaaattaatagttttcccccacaaatgtacctgcccgggcggccgctcgaaaggg

SEQ ID NO: 5839 - DNA, 327 bp, Homo sapiens
ccctttcgagcggccgcccgggcaggtactgctttttctattccctgtgagtttataattatttcacaataaaagttcaaaaacacttattggatggacgtcacagtcagaacataatagaagacagaatcagtgaattataggtctgtttaatagaaatgactcaaactgacacacaaagcaaaaaaaaaaaaaaaaaaagtacgcgggtctgtaatgatactgattatgaaatgtcccctcaaactcattgcagcagataacttttttgagtcattgacttcattttatatttaaaaaattatggaatatcattctgtcattata

SEQ ID NO: 5840 - DNA, 175 bp, Homo sapiens
ccctttcgagcggccgcccgggcaggtccgggcaggtacttgcatttcttttttgtgcactctataaggctggttgtgacccagatcagcttaactttttatattatgttatttcactaactgctacagtcaaaatgatcaaatctttgtacctcggccgcgaccacgctaaggg

SEQ ID NO: 5841 - DNA, 436 bp, Homo sapiens
  misc_feature 417: n = A,T,C or G
agcggccgcccgggcaggtacaagctgatctccccgctaaatgaaaaagggcaagatactggggccaccattgacttggtgatcggctatgatccgccttctgctccacatccaaatgacctgagcgggcccagcgtgccaggcatgggaggagatggggaagaagatgaaggtgatgaagacaggttggacaatgcagtcaggggccctgggcccaaggggccagttgggacggtgtcggaagctcagcttgctcggaggctcaccaaagtaaagaacagccggcggatgctgtcaaataagccacaggacttccagatccgcgtccgagtgattgagggccgacagttaagtggtaacaacataaggcctgtggtcaaagttcacgtctgtggccagacacaccgaacaagaatnaagagaggaaacaaccctt

SEQ ID NO: 5842 - DNA, 356 bp, Homo sapiens
  misc_feature 102, 116, 120, 123, 140, 142, 148, 150, 169, 171, 186, 193,217, 221, 223, 231, 233, 237, 241, 252, 260, 282, 285, 299,328, 333: n = A,T,C or G
ccctttcgagcggccgcccgggcaggtacagttgaatctaccattttggctgtggtagaccacatctttgggtatcaatgggagatcagcttagtaaggtanaaaacaactcaatnttgnccngttattttgaggggcanangacctnanaaggcattagtttttctcntnctctggtaaaaaaancttatcntaatgggctattaatttataaagnggcnanaataattnancaangttngtttggggggnagggaatngttaaaaaaattaaaagccgantcncaggtccaccttgnattaggatatatttaacctttttcttttnggtancccccctttcttcttgggaattt

SEQ ID NO: 5843 - DNA, 155 bp, Homo sapiens
  misc_feature 82, 106, 130: n = A,T,C or G
agggcgaattgggccctctagtatgcatgcttcgagcggccgccagtgttgatggatatctgcagaattcgccctttcgagncggcccgcccgggcaggtacaacngccaaaaccaccgactggtcgtangcaggtatcaaaaaggggtcttgga

SEQ ID NO: 5844 - DNA, 475 bp, Homo sapiens
  misc_feature 78, 138, 196, 198, 203, 264, 301, 302, 315, 336, 432, 466: n = A,T,C or G
cccttagcgtggtcgcggccgaggtactttgagttctcacgtgcgtcttaaggcatgagtgttcactgaagacttctncacattgctcacagtcacagagttcccttccattgtgttttccttccaattgtatcccantggatgtctgacccctcaaaaaagtcctgctgaagtatagaccactgggtttcaagtngnatttnccatccttggagaactctccctgaactgtccttgactcttcttgtccaaccaagagattanactgggtttgatgatctgacctcctactgtggccagnntcttgtagttctncaacatcacgtcactgtaaangcttctctgagttgagtccagtaaaagtccactcctcctggggtgaagtccacagccacatcgtcaaaggtcactgaatccatgggacaaaatcancagctgccatcccgcgaggtgagaaacgtgtcanaaccctcct

SEQ ID NO: 5845 - DNA, 377 bp, Homo sapiens
  misc_feature 35, 63, 161, 169, 183, 194, 198, 222, 232, 234, 254, 255,261, 262, 263, 266, 269, 270, 271, 282, 288, 294, 299, 300,303, 306, 308, 309, 315, 318, 336, 349, 358, 359, 367: n = A,T,C or G
tttcgagcggccgaccgggcaggtacaaactgttnaatttgtcaataagtgacaaaagaattncacaaaatcatggaactctcaaactcaagtaaaccaaaaaatagttaaccaaataatgatctccgtcagacagtgattttgaatgagagatcatatcngtaagttnaaaaagtaaaattnaaatgcaatgngatngaaatacctctgagttttacatanactccttatntnttataataaaagagaggatnngtgtgnnnaanttnnnagacatttcanaggtcntactgnaaatnnatnctntnntatgtngcntaactgaaggaacaagtnttttaagcctctnaggcacatnntgacactnatgccaggaa

SEQ ID NO: 5846 - DNA, 810 bp, Homo sapiens
  misc_feature 163, 165, 172, 174, 185, 186, 189, 192, 199, 200, 211, 212,216, 222, 224, 229, 230, 231, 232, 233, 240, 241, 243, 266,268, 287, 291, 292, 294, 296, 299, 301, 317, 326, 330, 333,338, 339, 341, 345, 346, 354, 357, 375, 378, 388, 389: n = A,T,C or G
  misc_feature 403, 412, 430, 431, 433, 445, 447, 461, 468, 469, 470, 476,485, 497, 500, 501, 502, 507, 521, 523, 534, 535, 536, 538,544, 554, 555, 560, 569, 582, 584, 585, 600, 603, 614, 621,624, 628, 629, 634, 635, 636, 637, 641, 645, 647, 648: n = A,T,C or G
  misc_feature 649, 659, 663, 664, 689, 690, 691, 692, 696, 697, 698, 704,710, 721, 727, 728, 732, 733, 734, 736, 737, 738, 739, 746,752, 754, 767, 768, 777, 783, 784, 785, 796, 798, 800, 805: n = A,T,C or G
ccctttcgagcggccgcccgggcaggtacttttttttttttttttttttttttctttttttttttttttttttttttttttttttttttttttttttttttttttttttttttttttttttttttttttttttttttttttttttttttttgggggggcaaananttttttngnaaaaaaaaaannttnttntaaaaannttttttttttnngggntaaaantnggggnnnnnccaaaanncnaaaaaaaaaaaggggggggaaangnaaaaaaatttttttaaaangggnncntnaananaaaattttttttttanttttaaaangggnttncaaanntngggnngaaaaaanaanaaagggggggggggggtntantttttttaanngggggggaaaaccnaatttgggnaaaaattttttaaaaagnnangggccaaaaatntnaaaaaaaaattttnaaaaagnnnttttgnaaaaaaaangggggaattttngtnnnttttnggggaaaaaaaganancttttaaaccnnngngggggngaaaattttnnggganatttttttnaaaaaaaattttncnnccaaaaaaaaaaggnccnttttttttaanggggggnccnaaanngggannnntaanaaantnnngggggggggngggnncctatttttaaaaaaaaaaaaattnnnngggnnnttttanaaaaanagaaatttttnattttnnaaannnannnnttttttngggggngnttaaattttaaanngggggtggngggaannnttttttaaaanananttttnaaaaa

SEQ ID NO: 5847 - DNA, 569 bp, Homo sapiens
  misc_feature 479: n = A,T,C or G
ccctttcgagcggccgcccgggcaggtactacctacctagaggttatgtgttttctctttctccccgctttcacctctttctttcccaattcaaaacagccaagtgagccctgttctggtattttgaatcattagagaaaagaaagggagtggctgttttgagttgtcctttctttgcagaaaggagaaaatgtgattgtgttttttttttaccagcctacttctaagtgtcactgcctggtttttctcttttttaaggattagaactaagaggacacaccagcatcggagtgtattaagcccctgaaacacatggtagctagggactgaacacaggaaccgtatgacagcagcacaaacccccaaaggatgttcctgccttgtgggcccctgagccccttgggagactgagaatcatgaccagattcatccagaactgctgcagtgttaagtgaaaatcctctgtagttgttctgcanaggaaccttccttccattaaaaaatttctgctcaatacagaatggtccacatcacccaaaagtgcactgttggagatgctgtgaaaatta

SEQ ID NO: 5848 - DNA, 470 bp, Homo sapiens
  misc_feature 409: n = A,T,C or G
cgccagtgtgatgggatatctgcagaattcgcccttagcgtggtcgcggccgaggtacagcggtgcctggaatatttgggctatctaggctattcaatattgactgagcaagagtctcaagcttcagctgttacagtgacaagagataaaaagatagacctgcagaaaaaacaaactcaaagaaatgtgttcagatgtaatgtaattggagtgaaaaactgtgggaaaagtggagttcttcaggctcttcttggaagaaacttaatgaggcagaagaaaattcgtgaagatcataaatcctactatgcgattaacactgtttatgtatatggacaagagaaatacttgttgttgcatgatatctcagaatcggaattctaactgaagctgaaatcatttgtgatgttgnatgcctggtatatgatgtcagcaatcccaaatcctttgaatactggccagggatttttaag

SEQ ID NO: 5849 - DNA, 678 bp, Homo sapiens
  misc_feature 23, 587, 597, 650: n = A,T,C or G
cccttagcgtggtcgcggccgangtaccagctagtggacaagatagtgcactgcatgagaccgttgatacagccagaaaacagggagatcttgaggcatggagtatccggtaatgttacaaccgataccggccgggaaggggccaggaaagggagtcaagcaggagcgtctgtccgaacggaggctaggtaagaatatttcaccatgaaaatgttaaaagacataaaggaaggagctaaacaatatggacccaactctccttatatgagaacgttattagattccattgctcatggaaatagacttattccttatgattgggaaattttacctaaatcttccctttcaccctctcagtatctacagtttaaaacctggtgggctgatgaagctcaaactcaggtaagagaaaacacacaagcacagccacctgtgcctgttttcttttgaacagctaatgggagttggccctaattggggttgattagaaaattaagcagtaatgaagaatgttgccattgttcagctgtgcactgtgtgcttacaggcatggaaaaagaattaagtgttacaggggaaaaaatatncttctttcanttgttttgacttaacttgccaaaccagtttggggtggagccaatggccacttnaaacaggaaaaacctagaggcttttaaa

SEQ ID NO: 5850 - DNA, 643 bp, Homo sapiens
  misc_feature 619, 622, 630: n = A,T,C or G
ccctttcgagcggcccgcccgggcaggtacgcgggggagttctcagcaggagtgccaaagaaagaagtaaactgaagttgcaaagcaacagtaatactgcattcctcgttcagtattgaaagattggcgtaaagtcaagaagctgaagcaaactggggaatcctttttacaggatgactcctgctgtgagatagggcctaatttacaaaagtgtcgagaatgtagacttattcgcagtaaaaaggagaagaaccagctcactcaccagtattttgtagattttactactttagacggttgtcatttagtaaaaacggagtagttagaatagatggtttctcttctcctgaccaatatgatgatgaagctatgagtttgtggacacatgaaaattttgaagatgatgaactagatatagagacttctaaatatatcttggatataataggtgataagttctgtcaattagtaacatctgaaaaaacagctttgtcctgggtgaaaaaggatgccaaaattgcctggaaaagagcagtgagaggagtcccgggagatgtgtgatgcatgtgaagcaaccattgttaacattcactggggtctgcccaaaatgtggatttgnggnctgcttanatggtacaaggca

SEQ ID NO: 5851 - DNA, 574 bp, Homo sapiens
  misc_feature 484: n = A,T,C or G
cccttagcgtggtcgcggccgaggtacagaatgtaaattatatctcaataaagctgatatgtgcatacacacacacgcacacccaacagcagaagaaaatcctaaaaggtaatgaacaaaagcattcagattaaagcatgagaatctgaaggtttggtcatctacatcttgttccatagataagcatggactgtctactaaacacagttgtcaacttgatccaaaaatcttcgctggattctgtttctttcaagactgtttctagaggggtccacaaataattatctttgaagtttctgattaggacatctttccagggattctaagattatttatgcctctttaattaaaagactttaaggatcaatatattggagttgccctcttgtgtccattattagcaagtatttgatatcaactttttcattccgtgttctagagctttttctcttatttctttaaagtcagaacaccagatcttcangtttacgatcatgcaagtttttagggaagattatgagaaaaggttgcctgtgcctgtggatcataaggttgaatgtggtgcattaattcc

SEQ ID NO: 5852 - DNA, 539 bp, Homo sapiens
  misc_feature 74, 82, 152, 171, 177, 190, 195, 198, 207, 210, 215, 216,222, 223, 224, 228, 230, 232, 241, 242, 245, 253, 254, 273,293, 294, 296, 300, 302, 310, 312, 317, 319, 321, 325, 331,333, 335, 336, 346, 348, 352, 369, 373, 375, 383, 388: n = A,T,C or G
  misc_feature 393, 394, 403, 404, 409, 423, 425, 428, 443, 446, 447, 449,451, 455, 465, 468, 469, 472, 474, 475, 478, 481, 488, 490,491, 495, 496, 504, 513, 515, 518, 525, 526: n = A,T,C or G
cccttcgagcggcccgcccgggcaggtactttttttttttttttttttttgggttttttttttttttttttttntttttttntttttttttttttattttttttttttttttttttttttttttttttttttttttttttttttttattttnttttttgaaaaaaaaaaantttttntaaaaaaaatatnaaaanggngcaaaaaangtnaaaanngactannncccnananaattttttnnggngggataanntttttgatgaaaaaaaaanaatttttttttttttttcannanattntnaatatttntnaaatntnanattnttttgnangnnaaaaaaaaantncccnaaaaaaaaaaattgttntgcntntttttttntttgnggcgnnttttttttnnggggnaaaaaaaaaccccntnttnttttttaaaaaaggnggnntngntganaaaaaaaaanaannccncnnggnggnggttttncnnaaanntttttttnaaaaaaaananccnttttttnnaaaaaaaaggggg

SEQ ID NO: 5853 - DNA, 711 bp, Homo sapiens
  misc_feature 84, 424, 545, 574, 644, 669: n = A,T,C or G
ccctttcgagcggccgcccgggcaggtacgcgggagttattatctgactttctggttataatcattctaatgagtgtgaagtancctctggtgtcatttggatttgcatttctctgatgagtgatgctatcaagcacctttgctggtgctgttggccatatgtgtatgttccctggagaagtgtctgtgctgagccttggcccactttttaattaggcgtttgtctttttattactgagttgtaagagttctttatatattctggattctagacccttatcagatacatggtttgcaaatattttctcccattctgtgggttgtgttttcactttatcgataatgtccttagacatataataaatttgtattttaaaagtgacttgatttggctgtgcaaggtggctcacgcttgtaatcccancactttgggagactgaggggggtggatcatatgaggaggctaggagttcgaggtcagccctggcccagcataaccaaaacttggctctactaaaaatccaaaaattaagtcaaggcattgngggtgcacctctggtaataccaagctttntcaagaaggcttgaggcacgaaggatccacttgaaccccaagaaggaaggaggttgccaatgagcctganaacatgccagggcaacaaaaatganacttttgtttaaaaaaaaaaaaaaaagtgacttgatttaaag

SEQ ID NO: 5854 - DNA, 533 bp, Homo sapiens
  misc_feature 461, 502: n = A,T,C or G
ccctttcgagcggcccgcccgggcaggtacagttgctccttctgtaattcttgcactaaaactccattaaagaccatcaatgagccaaatagtgtgctagccttgaggatggagttcttagctacttaatgattcttttcttctggaaatcttctagtggataatttttaaaagcttcttttaaactgctcagtaaaacattgccatacattaactctccatttctgcattaatttcatttgctggaaagaaattattttgttaatgaaccaaacccagccattaagttatgtgaattcaccttctctagacacattgaggtatggcagagaagacacatattccctggcctagagtgggctgacaatattgttgcctcccctaaattgactcaatcttgagaaccacatactgcagtgacaagttgatcatggatcaagaaatattcctttttctcctanaggaaatccctcatggcattatcattccctaaggcaatgangatgtcccttcgctcaaatcctaaagccccc

SEQ ID NO: 5855 - DNA, 472 bp, Homo sapiens
  misc_feature 90, 91, 114, 116, 129, 132, 134, 136, 137, 142, 145, 146,147, 156, 179, 186, 187, 203, 214, 215, 220, 223, 225, 228,230, 231, 233, 237, 247, 249, 250, 255, 257, 258, 260, 262,271, 272, 273, 274, 279, 280, 283, 285, 302, 307, 311: n = A,T,C or G
  misc_feature 312, 315, 316, 319, 320, 322, 323, 324, 335, 347, 349, 352,362, 363, 365, 377, 378, 380, 382, 393, 394, 397, 399, 402,403, 405, 406, 407, 421, 423, 425, 427, 428, 429, 437, 438,442, 443, 448, 450, 469, 471: n = A,T,C or G
ccctttcgagcggccgcccgggcaggtacttttttttttttttttttttttttttttttttttttttttttttttttttttttttttttnnacacaaaaaaaaaaatttttttncnccccaaaaaaatnttncnannaaaanttnnnctttttttnaaaaaaaaaaattttttgggcanaaaaagnntttttttttttttaangggggaaaaannttttnttngngcntnnanaaantttttttttngnnaaaanannananttttaaaannnnggggnnggngngttttttttttaaaaanaaaanaaanntannccnnannntttttttttanagggggtttttntnaanccccaaaatnnantttttttttaanncntntttttttttcnnacncnaanntnnnccccttttccccananantnnnaaaaaaanntttnnggggntnttttattttgggaaaaaanant

SEQ ID NO: 5856 - DNA, 462 bp, Homo sapiens
ccctttcgagcggccgcccgggcaggtaccccagaagccctcctctttccccatcttaacactgtcttctttcttgctgaaagttactatcctgacttctaaaatcatagattagttttgcctgttttttattttatgtaaatgtaatcatacataatacactttttttcattcatcatttttgtgaatattttagtttcttgttgccactgtaacaaattaccacaaacttagtgacttaaaacaacacagatttattcttttatagtcctggagatcagaagtccaaaaatcagtttcattaggcctaaatcaaagtatcaagcagggttggctctttattgaggttgtgagggagaatgttttcttcccttttttggcttccagtgacggcctgtatttatgggcttgtgaccccttcctctctatgatcaaagcttgcttttgtcattatatcatctt

SEQ ID NO: 5857 - DNA, 364 bp, Homo sapiens
  misc_feature 127, 133, 135, 328: n = A,T,C or G
ccctttcgagcggccgcccgggcaggtacactaggtaataaaactgattcatacagtctaatgatatcaccgctgttagggttttataaaactgcatttaaaaaaagatctatgaccagatattctnctgggngnctcctcaaaaggaacacctattaaagggttcatttggaaatgtttttcaatccatttgccttcccattgatccttctaacatgctggttggcatcacacctaatattcagagggaatgggcaaggtatgagggaagggaaataaaaaataaaattaatataaaatagaatgacacaaattttgagtttttgtngaacctcctgaacagtatggtcttaagggaccgttt

SEQ ID NO: 5858 - DNA, 618 bp, Homo sapiens
  misc_feature 553: n = A,T,C or G
cccttagcgtggtcgcggccgaggtacttgtttgcaatttttttatctgtgaaaatattttaaagctcttacaaaacttaaatttttaaaaaatcagctcaaaaattttttccatgttgttgggcataccactgctgtctctgctttcggttttccaactctgtaagaagggcttgtctgtatgcttcatacattttaacaatctgctccaattctttcatgaagagcaactttagcattccctggtatgtatccaggtcagccagctggaagagttcccacttcagaatgtggtcatatctgttttaaaacacaatcatatatatgttcacaacacatacataaacatgtatttctagcaagaaactagtctgttttttaaaatgtcaactttatttataactaaacaaaccataagttttaattaaaaataactgggcacagtgggtggcgcctattatagtcccagctacttgggaggctgaggtgggaggctgagattaactttgggaaccacccgcgcccggcctacatataattcttctaagccaangagaaaaactgcttaatattacttcatttcaatttaagttaaaagaatacctatttctttaaatt

SEQ ID NO: 5859 - DNA, 320 bp, Homo sapiens
  misc_feature 45: n = A,T,C or G
ccctttcgagcggccgcccgggcaggtaccattcatttaaaggcntaaatgtccaatggggccatcttgtgatacatgcactgtcacaggaaaagtttccaggaaaagtcaagccagggcttcacagaagatcaaaagaaagagacaaggggaagctaagtgtattagtcaggattctctaagggacagaactaatagaatatatatacacacacaaacacacacacacacacacatatatatacatataaataaaaggggagtttattaaggagtattaactcacacaatcacaaggtcccacaacaggccgggccatc

SEQ ID NO: 5860 - DNA, 339 bp, Homo sapiens
  misc_feature 97, 101, 104, 115, 130, 140, 175, 242, 266, 268, 276, 283,289, 295, 311, 322: n = A,T,C or G
ccctttcgagcggccgcccgggcaggtacttttttttttttttttttttttggaaggtgatgatgcaaaggattttattaggcagtggaagtagctntcancanaaggggagctnaaaggggggtgcaanaaagaaaggngaatcctttccttgaaagcctgggtcgtctccatntgggctcctctccaaagttgtgccgtctgaagttaagtcgcatctatccatagtctcaaatgcccanttgcttcttcacctcttgatattnanctgcttgngttgctntgccanctgaantctgttgtgggcacanaataggggcanactgggccaaaaaggca

SEQ ID NO: 5861 - DNA, 739 bp, Homo sapiens
  misc_feature 229, 535, 542, 560, 597, 650, 659, 688, 723: n = A,T,C or G
ccctttcgagcggcccgcccgggcaggtactttttttttttttttttttttttttttttggggacggaatcttgctctgtcacccaggctggagtgcaatggtgcggtctcagctgactgtaacctccgcctcctgggttcgagattctcctgcctcagcctcccaagtagctgggactacaggcacccaccaccacacctggctaatttttttgtatttttagtaaanacggggtttcactatgttggccaggctggtctcgaactcctgacctcgtgatccacccaccttggcctcccaatcttatttgctttacaagtcctgcttcagggttaccttccctgaccactgctgcctccctcccagcatttgccagggactgtcattgccttagtttattttttctgttttgttttttttttgtcgtttttggttttttttgagacagcgtcttattctgtcgccaaggctggagtgcaatggcgcaatcaaaagcttgctgcagccttgaactcctgggctcaagcaatcctnttacctnagcaactaaggactacangcacatgccaccacgcttggccttctaaattaatttntgggggcaacaaaaataaaactcaggcctaggaatagctttgggttcaaaaantcacaagangggacctaatttttcccattaataccaantgggaaaccattaaagttcatcatccggatgattnaaagggaaaaaaaaaa

SEQ ID NO: 5862 - DNA, 576 bp, Homo sapiens
  misc_feature 426, 427, 428, 429, 430, 431, 432, 433, 434, 435, 436, 437,438, 439, 440, 441, 442, 443, 444, 445, 446, 447, 448, 449,450, 451, 452, 453, 454, 455, 456, 457, 458, 459, 460, 461,462, 463, 464, 465, 466, 467, 468, 469, 470, 471, 472: n = A,T,C or G
  misc_feature 473, 474, 475, 476, 477, 478, 479, 480, 481, 482, 483, 484,485, 486, 487, 488, 489, 490, 491, 492, 493, 494, 495, 496,497, 498, 499, 517, 520, 541, 552, 555: n = A,T,C or G
ccctttcgagcggccgcccgggcaggtacgcggggggactctgaagtgaaaatggattttcagaggattgaattggctggtgctgtgggaagcaaggaggaacttgaagtagactttaaaaaactaaagcaaattaaaaacaggatgaaaaagactgattggctcttcctcaatgcttgtgtggggttcctgaaattgtgccagccgactccaggtccaccctgaccccacagcataaaccatgctgtgatgtcacagctaccatagaactccagggtagtgttgggctggcccatgtgggctcaggggttgtagaaggtgatttaactgccatagaagcatacaagtcatcaggaggaggcattgcacgtcagctcaccgcagatgaagtacctcggccgcgaccacgctaagggcgaattcaannnnnnnnnnnnnnnnnnnnnnnnnnnnnnnnnnnnnnnnnnnnnnnnnnnnnnnnnnnnnnnnnnnnnnnnnntagggtgaaattggtatnccntcacaattcccacaacattcnagcagggagcnttnaagtgttaaacctgggggtgc

SEQ ID NO: 5863 - DNA, 744 bp, Homo sapiens
  misc_feature 579, 585, 591, 595, 597, 637, 649, 658, 715, 722: n = A,T,C or G
ccctttcgagcggccgcccgggcaggtacaaagtccaggcccggcacggtggctcacacctataatcccagcaccctgggaggccaaggcgggtggatcacccgaggtcagtcaggagtttgagaccagcctgccaaaatggcaaaaccctgtctccactaaaaataacaaaaaattaggcgggtgtggtggcaggtgcctgtaatcccagctactcaggaggctgaggcaggagaatcacttgaacccgggaggtagaggttgcaatgagccaagattgtgccactacagtccagcctgggcaacaagaccgaaacgcccgtctctttaaaaaaaaaaaaaaaaaaaagtgcaaagtcctatgtattcttcaaagttgttaggaaagaaaacaaataaggttagctacatatttagctaaccttaaatttaataaactattaagttatttaggtcaaaaagaatactaaatggatgcttcaaatttcaaccagtattttcgattttttgaggtctatcatctgaacccttagtggcaaacaattccaaaattcaacatatttttatttgttaaatatntgaatnttattnaatntnttccttaataaactgactggacaaaactagaaaacaaccntttcaatctcanttaactttnaaatgatttaccttgaattttctactaccatcttaaatccgtttgaattccttccantacttcnatttctaaatgctttttttttt

SEQ ID NO: 5864 - DNA, 388 bp, Homo sapiens
ccctttcgagcggccgcccgggcaggtaccattcatttaaaggcataaatgtccaatggggccatcttgtgatacatgcactgtcacaggaaaagtttccaggaaaagtcaagccagggcttcacagaagatcaaaagaaagagacaaggagaagctaagtgtattagtcaggattctctaagggacagaactaatagaatatatatacacacacaaacacacacacacacacatatatatacatataaataaaagggagtttattaaggagtattaactcacacaatcacaaggtcccacaacaggccgggccatctgtaagctgaggaacaaggaagccagtctgaatcccaaagatgacaaacttggagttcaatgttcaagggc

SEQ ID NO: 5865 - DNA, 473 bp, Homo sapiens
  misc_feature 77, 91, 299, 416: n = A,T,C or G
ccctttcgagcggccgcccgggcaggtactttttttttttttttttttttgagacagagtctcgctcagtcgcccangcagagcttgcagngagcagagatcacaccactgcactccagcctgggcgactcagggagcctccgtctcaaaaacaactttttttcatccatggacaattgttgtcttgttttggtcctctttaggaggtggttttataatcagctataaaactccaataggtgctcttgaatgcaggtttctgataactttggagattgtgacaacaggaatagaggaangaaccttcaggactcatggagagctaaatgttcatgagtatcaagcaggaattaacaggaattaactgcatggactgaaccaatcttttttactttttgctcaaaatatttgctggncctttggatttgcgtttccgagtcttatgacttttcttttgagctactgacaaattt

SEQ ID NO: 5866 - DNA, 573 bp, Homo sapiens
  misc_feature 410, 512, 520, 542, 559: n = A,T,C or G
ccctttcgagcggccgcccgggcaggtacttggatatcactgctggttattcaggtcccaaagacacttcaattagcatgtaatgaaggccttcaaggcagggggttaccttctggcctagaatgtgtctagaaatgttgtctaagagctagatcctggaatggggacctcgtgactacgactggtgccctattctactgtggctgatctggtatctaggaagcaagacaaagccttccctctcttccttctcctcttctcaagtaaaaggaaagggtgtcttttggagtcatgagctgtgaagcctgtagttaagggaggggtgacactagcactcccttggctgtcccagctggtgtctcaatatgtcgtctgctccccctagttcactgtctctgggcctagttcanctctaggattcacctaagagttacagtccttatggcctaaactgcctttcaagtttacttagagaccaagagcactttgactctcaatggcaaggtctgcangcactcantcttggaccactaagatctacnggttcccctctgactanggttggtttaagtg

SEQ ID NO: 5867 - DNA, 612 bp, Homo sapiens
  misc_feature 362, 411, 415, 484, 486, 554, 571: n = A,T,C or G
cccttagcgtggtcgcggcccgaggtactttttttttttttttttttttgtagagacagagtcttgctttgttatgcaggttggagtgctgtggcacaatcttagatcatcacagcactgaactctaggctcaagtgatccttcctgcttcagcctccccaatagctgggactacaggtccggttgatttttagaatttttttgtagagacagagttctcactatgttgcccaggttggttttgaatgcctgacctcaaacaatcctcctgcctcaacctcccaaagtgctgggatttcgggcgtgagacaccatgcctggccaacgttaagcatctattcatgttcttactggccatttgnggattttcttgcctatccaaattctttaccatttttataccgggattanttgnctttttattattaaagttggaaagaagtctttatatattctaaaaatattcctgctgaaccccataaananacatggtttacaaatattttccctcattttgaggggtatcttttatccttcactttcctgacaggggnctttgaagtatgaacanttttaaattttgatgaaaagcccaatttaatctattttttt

SEQ ID NO: 5868 - DNA, 270 bp, Homo sapiens
ccctttcgagcggccgcccgggcaggtactttaaatcacctctagattacttgttatacctactacaatgtaaatgctatgtaaatggttgctatactatattgtttgtttgttgttattgttgttggattgttattttttattgtgagtttcttttttctgaatatatttaatccagggttggttgaacctgcagatgcagaactcccagatacaaaggtccaactgtatacatattttaaaacaatatgttatacataataaatatat

SEQ ID NO: 5869 - DNA, 328 bp, Homo sapiens
ccctttcgagcggccgcccgggcaggtacatgctgagagattgggagaagcttttgattctcagctggttattggagtaagagaatcctatgttaacctttgttctaatcctgaggataaacttcaaatttatagggacaattttgagaaggcatacttggattcaacagagagattttatagaacacaagcaccctcgtatttacaacaaaatggtgtacctacacagggcccctacagcatggtatcgtctactcaggaggttcttctgatacgatctgtgacctgttgggagccaagggaaaagacattttgtatattggagatc

SEQ ID NO: 5870 - DNA, 674 bp, Homo sapiens
  misc_feature 504, 532, 558, 581, 621, 635: n = A,T,C or G
cccttagcgtggtcgcggccgaggtactgtttattccagtaaatgctgtaagattatattccagatttttaaggaaaaaagttaagtcaagcctgcaagatcagctttctcaagtgtctacaatgccagtatgaaaataaaaaattaagttacactgatacatccaagttttttttaatatgcagtgatgagcacaaacattaatagagataaaatactgatgcaaataacacaccccaaagtaacaaatgcaattattttccaccatttacaatacagtagttacaatgacactccaaacagaaaagcaaagtaaaaaatcaaaaccccaatttctattcatgtaattagacttatacagaaattagaaggctaaataacaactagttaatcacctaatttcacagctatctgaagtggcaatcgttatatagcagcttatctatgatacattcaagataaaatgatacaatttattacttgcctgtaagctaaaaacacagnctcaatttaataccctttccttaaattncaactttacactacaatatacttganggctatgcaaaaaggaacttccntttatataaggaaatggatggattaagtctttggggctgnaaaaagccaacttnttttaaaccgaacttaaccacttccattaccaccaccca

SEQ ID NO: 5871 - DNA, 272 bp, Homo sapiens
  misc_feature 117, 134, 144, 191, 272: n = A,T,C or G
ccctttcgagcggccgcccgggcaggtacttttttttttttttttttttttttttatatttttagtagggacagggtttcaccatgttggccaggctggtttcgaactcctgacctnaagtggtccgccccccntgggcctccnaaagtggcttaggattataggtgtggaaccaccgcacctggccccanataattttttaatagtctctcgtattactgagttttttcatattatatataaagattctgtatttgtttgttgttttctgn

SEQ ID NO: 5872 - DNA, 512 bp, Homo sapiens
  misc_feature 51, 239, 377, 456: n = A,T,C or G
gatatctgcagaattcgccctttcgagcggcccgcccgggcaggtactttntttttttttttttttttttttttggggggggtgtgtgtgtgtatcttattagttctgtccctctaagagaaccctgactaatacaaccttcaacttagaaaagttaagaaaagagcaaataggaataatataaaaattgagaagataaagacaagaggaagaaattaataaaacagaaagcaaagatngactagaaggaaacaacagagccaaatattggttctttgcaaaaactaataaaattggcatacctctggcaaaagtgaatgagaaatacagaaagagggcacaaataatattatgaatcaaaaagggacacaactacngatgtagcagatattaaaaaggtaataagagaaatttactaaattccttaggtgaaatagacatattcctaggaaagtntgaactccaatatgggctcaaaaagattcaaaaaatctctaatttaaaaattaaag

SEQ ID NO: 5873 - DNA, 545 bp, Homo sapiens
ccctttcgagcggccgcccgggcaggtacatcatcagaacatactaaaatggaagtcctttggattatagttttgtttatggatattacacaatgaatgcttgtctgaacagttcttacttgccagttccactattcttcatcttcaccaccttctactggtcagtctttcatcacttaaaaaaaaaaaaaaaaaaatcacacatcattgtggtttttttcccccttaattctgtctcttctagccagaagcatctggcttaagcatatttcatcaacttctctgttatttcttttaaagatctttatctctgaaattttcccagaagatacaagttttggtaatattatcaataggaattttggagacttgggcattcatctttgtctcaaaaacaaacagaaagccaaccttcaaataaaacaaatttgaaagttttagctcaataatttggggacattttacttaaattacaaaagaacataattatgattttatgatccgatattagtggtaggtttatttcccccttactggcattaaat

SEQ ID NO: 5874 - DNA, 629 bp, Homo sapiens
  misc_feature 26, 467, 508, 574, 590, 592: n = A,T,C or G
cccttagcgtggtcgcggccgaggtncctttctatatacagattttaaaatagaagtttttttaatattgaaaacaatccagatttgatggaagacacaatctgcagattcataatgaacctaaatccatgataaatctatagctagacatataataaaaactgcgtatctccaaagtaaaagatattatcttagaacagctcaagagatgtcagttctaaatctacagctctaaggacataatttcagaaggtataaagaattctcctagaaggaacatctgacacacaagaaaaaaggtaagcccccccatgtcccatcaaaaaaataaacattgactatataaaatactaataatatccaatttggagatttaataaagaacttgtggaatttaattagaattaatgttatttcaatacctttgtgttgtttggaaagaggggtagcatttttagatgtttaangataatcaaaaggacttgtacattcacattccaaatcagtnaagggaaaatatatgattaaatagaaaacccaactgatccccaaagataggaggagagataaaggngggaaagaagcccacntnggaaaagaaattttttaaaaataggatggcaaaaata

SEQ ID NO: 5875 - DNA, 549 bp, Homo sapiens
  misc_feature 405: n = A,T,C or G
cccttagcgtggtcgcggccgaggtaccatatataaatgcagtatgacgaaaagttatcaataaaaaatatggaaatagagtcaacatttgtgtagactacctttactaatatctaatcaggaatgatcactgaatattatcttgagccagaaagatctttttaaaaattctttgtcaatctattgccaagaagtccatttccacagctctttaactttaataaactatttttggcaatgggaaaaaagaaaatggaaaaagaaatcaagtggaaattatcataacaaaataaaagtgacacaatgagaaagaatcttaaaaattaatcccccaccctgatattttgggggaaaaacactcaatttttctatcatatatatttttcttttctctctctcctctgngcgtgtgtgtgtatgtgtgtgtgtctgtgtgtgtgtgcattttccatactaccaatgggaggctgaaagcaatgaaagacaaaacattgtaaagcatttttaaatattcaaaataaaatacaaaataaatgtacctgccccggg

SEQ ID NO: 5876 - DNA, 345 bp, Homo sapiens
  misc_feature 129, 132, 135: n = A,T,C or G
cccttagcgtggtcgcggccgaggtacaacagtcctgtttgtgctaagattctttcaaatatactcctaattccacttatcaaccaagtttaaaagaaaaaaatatgaaaataaactatattttaaagntgncantggtttctgcttgaaaattgattcttcttttacaaacctcctaaaaacttattttctaccttaaattgaaaattcacctaagtcacagcacttatgtttaaataaggaccctctgttgctcattttttgacatttttgaaatccagagtgactctgtttttcttatgcttattaaggctattattactataattattgggataataaatt

SEQ ID NO: 5877 - DNA, 425 bp, Homo sapiens
  misc_feature 3: n = A,T,C or G
canctttcgagcggcccgcccgggcaggtaccccagaatgtattgacaagctgctccgtcccagactaatggggcagggactttcccattaagcttagtgcaggccaagagcagtggtgccctctcaaggcaggccgatgctgaagaggcccaggtgacagcgggatatgtcaacctgtgtccataatctatggtaagtatgttcttacttaactccttaattaggcaagtcccttccagggggaagaatgaatgaggagacagaaggaagccaggagatgacgtatgtcctctttcaaggaagaaaacttctgtaatggagaataagtctacttcaatcaataattaaaaattggtcatatttattagaagcaaatggtgagaggggagactttgaggttttcattttacctggacgaacaatt

SEQ ID NO: 5878 - DNA, 607 bp, Homo sapiens
  misc_feature 469, 571, 588, 591: n = A,T,C or G
cccttagcgtggtcgcggccgaggtacgacctggacggaaatggctatatcagcaaggcagagatgctagagatcgtgcaggcaatctataagatggtttcctctgtaatgaaaatgcctgaagatgagtcaaccccagagaaaagaacagaaaagatcttccgccagatggacaccaatagagacggaaaactctccctggaagagttcatccgaggagccaaaagcgacccgtccattgtgcgcctcctgcagtgcgacccgagcagtgccggccagttctgagccctgcgcccaccaatcgaattgtagagctgcttgtgttcccttttgattcttctttttaacaattttttttttttttgccaaacaatatcaatggtgatgccgtcccctgtgcggtctgatgcgccttctccgtgacgccttcagcttcttttgtccgtggatgcttcgtgggaatgcccanagccccaatgtgctttgtggagagcatggacagacttcgggggggtcattggttgatgaattttaatcgtactataatttttttttattctaaaggctctgntcttaaaacgtaaagantcngggggttggggccaaa

SEQ ID NO: 5879 - DNA, 303 bp, Homo sapiens
ccctttcgagcggccgcccgggcaggtacgcgggggctaggaccatgcaggatgtgggcaaacaagaggagaaggctgcctctcatgttcctccccctcggtccccacgcttagggagatgtggggctggcgatgggaaagctgtatggcaacgacttcagccagaccaccatctcacgatttgaggccctcaacctgagcttcaagaacatgtgcaagctcaagcccctgctggagaagtggctgaatgatgcagagtcctctccgtcagacccctcagtgagcacgcccagctcctacccc

SEQ ID NO: 5880 - DNA, 354 bp, Homo sapiens
  misc_feature 282: n = A,T,C or G
gatatctgcagaattcgcccttagcgtggtcgcggccgaggtactgtggagagctcggtggacaaatcaaagccctggagtaggtccatcgaggacctgcacagagggagcaacctgcctcacctgtgggcaacagtgtctcccgctctggaagacattctgcactgcgatataatacattgccaagcagaagaactctgaaaaattcaagattagtgagtaagaaagatgatgtgcatgtctgtatcatgtgtttacgtgccatcatgaattatcagtatngtttcaacatggcatgtctcatcacacgctgcaatgagattgcctaacctgaacaacaagaatcccagaaca

SEQ ID NO: 5881 - DNA, 650 bp, Homo sapiens
  misc_feature 114, 224, 291, 300, 316, 317, 348, 353, 359, 361, 367, 372,390, 398, 416, 429, 436, 437, 446, 458, 473, 477, 480, 481,485, 488, 498, 521, 527, 549, 558, 571, 578, 591, 593, 602,603, 616, 618, 627, 643, 646: n = A,T,C or G
ccctttcgagcggccgcccgggcaggtactttttttttttttttttttttttttttttgtaaagataggggtatcactatgttgcccaggctggtctcaaactccaggcctcancatcccaaagtgttaggattacaggcatgagccaccatgactggcactaattttattattacatacctaggtatgattatatttgtttattctatttaaagttcactgantttcttggatctgaaagtttatggttatcatcaaatttggaaaatttataatcactgtttctttttnttttttaangaaattgcccaaactnntcttaaactcctatactcaaaaaatcctttnatttnaacctntnaaaatnctggnattacaagcattaagcanaaaaatcnttttaacccaaaaattcnaatccaacctaancaacatnncaaaaactnccatttttaaanaaaagattaaaaaanaaanacnnattnccnataaaccttnaaaatttcttaacttcattcaanaatcanaaaaacattttaaaacaaaatnctatttctnaatattatacttnccaaatnttttaaaaattantnaccccccannccttttttaaatntnaaaaaaaanccttctttaccctttnaanaaaa

SEQ ID NO: 5882 - DNA, 468 bp, Homo sapiens
  misc_feature 242, 328, 402, 444, 447: n = A,T,C or G
cccttagcgtggtcgcggccgaggtacgcgggtagtgaaaccccgtctctactaaaaaatacaaaaaattagccaggcgtggtggcggccgcctgtagtgcagctactcccgaagctgaaggcaggagaatggcgtgaacccaggaggcggagcttgtagtgagctgagattgcgccactgcactccaacctgggcgacagagtgagactccgtcccaaaaaaaaaaaaaaaaaaaaaaaangtacgcggggatgtgtgtagtcgggtatgagaacgattgcaagcaaaagcagctgagggacgctgtccaaggagtaggctcagtancacgaactgcaaatacttgagaagggaaaagttcaacctcgtgctggaaagtggtttaacatgctggaactggntttctgcttggtagccctacaactttggcccaactacttggnctntgggacttaaattcctccttt

SEQ ID NO: 5883 - DNA, 559 bp, Homo sapiens
ccctttcgagcggcccgcccgggcaggtacaggtagcattttaccccactttcctctgtccaaagcgacatacaagtaacgggcctgcttcgtgctgcattagaacaggcataaaaagcaaatcatttactttccggaaacagagtccaactgcacagagcattcgcggttattcccttgttctatcattttctaccacccaacaacattcagcaaaacgagttaataatagttactggtgtttgaggaagggtaaaaaaataaaataaaataaaataaaactaaagaacacacatggcagagatcgatattactgcaaaagcaggtgaatgcgggaacatccttggcttgccaggctttatgtgaagcttgcactgcaagttaaaaaacaaaacaaaaaagttagaaataataataaattaaaaagaaaggaaaattaggagcgacagcaccagcattcaagtgatggtgaatgctcatgcaatgattatggaattgacagaaattaaaaccaaaaatttgagaaggctactctacatgacaagccaaagcaaaattt

SEQ ID NO: 5884 - DNA, 444 bp, Homo sapiens
cccttggccgcccgggcaggtacgcggggaataacattcggaaataaacattcagaagataagcccagtatatgtaagaatctaataagataaatatatttcaaattaatagggaaattatagttattctacatttacagaagattttggaagaaggtgctggctatttgttatggggaaaggatggattaattgctgccccatatttaagtatgttcttttttccttttttgtaatggcagtttgtcagtgtgaaataaaatgttcttttttaattaaaatctaaattaaaaattaaacatggagacaaaaggaaaataggctggcatttttacagtgtcaggggtgggttagccaaaagacatgatatcagaagcagaaaataaagtggatcccgtttggctaaatagaaaccaaaacatatagcagagacttgtaaataaa

SEQ ID NO: 5885 - DNA, 235 bp, Homo sapiens
  misc_feature 101, 109, 120, 121, 122, 124, 137, 138, 140, 141, 143, 148,155, 166, 170, 174, 181, 182, 185, 186, 201, 205, 206, 217,221, 223, 226: n = A,T,C or G
cccttagcgtggtcgcggccgaggtacttttttttttttttttttttttttttgttttttttttttttttttttttttttttttttttttttttttttttntttttttnttttttttttnnntntttattgtggtanntnntnaaaancttaaantatataaacangacnatangttatanngannttttgacttaatcanattnnggtttgataanaacntntantaaggcttt

SEQ ID NO: 5886 - DNA, 173 bp, Homo sapiens
  misc_feature 162, 168: n = A,T,C or G
ccctttcgagcggccgcccgggcaggtacagaaatatactggcctagcagaggcaaaaaaaaaaaatgaattttattttacttgtcacacctgtcttataaactggagttttgctacaaaaaaaaaaaaaaaaaaaaaaagtacgtacgctggatgcaggcnaagganttttt

SEQ ID NO: 5887 - DNA, 761 bp, Homo sapiens
  misc_feature 50, 51, 296, 370, 386, 447, 491, 497, 522, 558, 563, 579,623, 631, 649, 664, 666, 674, 690, 699, 713, 714: n = A,T,C or G
cccttagcgtggtcgcggcccgaggtactttttttttttttttttttttnngctcttgcattgaaattggttttactgtgctgagctctgtgcaaaggagaaaagtgaagtttgaaattcactaacacctgcagaaaatctcttactgctctttaacacacaagcaccaggacttgactcacattattacaactcaatccacttgaacactaattggcctgcctgcttcatgccaggtctataaataggtgatcaaaatgatcatcaaaatgaacagggagtgccaaggtcctgancagagaacggaatgacagcaaaggaaatgagaccttgggtgaggtgaaccctgggtggacgctcaacaaagganaagggcaccagggctntggagtcctgaactacccaaagaaaagcggagaacaatgattaggcactgaggactcaaanaaagccagagtccacagggaaaggggaacagccccaaggtcatntcccgnacccctcttccagggcaagcaagtnctgtcccctgaacccaactccaaaccctgccaggtnacagnaccttttttgtgaacncttccagttatgggggaaatcacaggactggtcacttctatttntgaccttnccttaaattgtttaaaangtttttattaaagtntntatttttnttttattcaaaccctnggttttagntttttaatcttggnntacaaaaaaaaacccggttgcggccacctggaaccaatttaaaaaaa

SEQ ID NO: 5888 - DNA, 315 bp, Homo sapiens
  misc_feature 46, 50, 52, 53, 54, 55, 56, 57, 62, 203: n = A,T,C or G
ccctttcgagcggcccgcccgggcaggtactttttttttttttttngttntnnnnnnggggncattgatttctgttctttttattattttctttatctgcttacattgtgtttaatttgctcttctctttccagtttctgaaggtgaaaactcaggtcactgatttgagacctttcttttttgttataatataggatcttagngcttaaatttgcctccaaagcatacattagttgcaactccctgattctgatatatcggggttttcattttcagctcaatgaactttccaatttctcttttgatttcttattt

SEQ ID NO: 5889 - DNA, 548 bp, Homo sapiens
cccttagcgtggtcgcggccgaggtaccagcatggaattatagcaccaccttgtggttaacatgccagtattttaccttttgttaaaacaagtgatttcccatcaaacaggataatattttttcccttttgaaaaactcaattttaaaaagaaacatttttgaagttttcttatggaagatagaaaaaaagttaagtctctttctaccctttctttttttctttatatagtgcagatatacacacagagaagggacttaaaacatttctaatctcctagtttatatacagtgtgcaaaatataagtaagtatatattgaaaatataaaatatttcatatatgttatcaggtggaaatttagaatccaaattttcttaaactttaataacttgtctaacaactctctaatagggactaaaaatcaactcaatatatcatacatttacacttacaaagagtctttagacaacataatttttggaaaaataaagcaaattcaactttattggagttattggacagatcagcaaattgttattttaaaaagt

SEQ ID NO: 5890 - DNA, 498 bp, Homo sapiens
cccttagcgtggtcgcggccgaggtacaataataaatacaagttagtagctccaaaaaactactttccctaaaaagtcatttctgtcgaacaatttaaggagcaaagcatccttaaaatgaaaatgcactaatcttttttacaacctgcacaattaagtatttcagaaaaacaaaaacttgtgcaaaatggtaagaaacgcccacctatacaaatttaatattaaatcagatgagaacatgaatttataagtaaaaaacaatttaatattaataatatatagagaaattaaatattgaaattttaactttgtatcactaataatctcagcttcagtgaaataatttaaaaaaagctgtcaaacactaatttcctaaataaactgaaacctatgaattgacagtaaatacttcagaatctctaacaatgaagacctgcaaaatcagcctaattattttccagtgtgtgtgtacctgcccgggcggccgctcgaaagggc

SEQ ID NO: 5891 - DNA, 348 bp, Homo sapiens
  misc_feature 31, 33, 45, 54, 67, 70, 98, 105, 113, 128, 138, 140, 141,143, 149, 170, 175, 176, 177, 180, 181, 205, 221, 236, 242,246, 249, 261, 275, 282, 283, 291, 300, 305, 322, 348: n = A,T,C or G
ccctttcgagcggccgcccgggcaggtactnanaatttattaacncttctttantacagtggaacanttntgcccatgggtcccagaacattgggacnatggagnctggatgnatgggaaagaattgncagagatttnannanggcgcntaactgaaggagccaaaatgncattnnntgnnttggtaaagagtggtgtgttgganataggcacgcgtctgngagccattgctaaanagatgntgangcngaggtcatgtgngggagaggcaaggngactatnnaaaaactnacttcacantcttnatgtgagggacagcgancctactggaacttaaagaacaagaan

SEQ ID NO: 5892 - DNA, 615 bp, Homo sapiens
  misc_feature 178, 208, 215, 219, 317, 338, 380, 429, 441, 445, 452, 469,471, 485, 499, 502, 510, 514, 526, 528, 575, 578, 596, 602: n = A,T,C or G
ccctttcgagcggccgcccgggcaggtacttagacatgccagcacagaaggtgtgttcattcagtatgggctgcacccctacagggctcttcggtgtcttcttttcggggactgtgctgccttcataatgccttatgcattggtcttggtcagccacaggcagcatgacatacttcanatggtcagtaaatttaaaattggcatttcncccccanccanaaacataacccacaccccctacttctgcataatcctttgaaagtaggcaaatgggcatcactctctcattaacaaacaccttctgtttgaatttgatnagctcaatatctacctgggantatttagggtgtaaaaacaaccttctcaatctctacaaactnctttttccccacataaaaatgttaaaataagggcaatgtctttcacttnttacattttctnaatngttcaanaaaaaaatttttaaccntnatcaacaaccattnttcattaatcaacnttncacctttngttnaaattattgttngnaaaccatctttaaccttccaaaaaaaaacttcctttaacattcaaanatnccacccaaaaatcccctncacttnatttcccaaattc

SEQ ID NO: 5893 - DNA, 540 bp, Homo sapiens
  misc_feature 53, 76, 77, 105, 117, 165, 215, 217, 218, 221, 230, 244,246, 339, 411, 413, 442, 465, 480, 486, 488, 514: n = A,T,C or G
ccctttcgagcggcccgcccgggcaggtacaggctgtgatacatgtggcgatngatcttcttagattcacggcatnntctgatcatccggcgcataatcccatcngctcatccatgngaccttctctggcattcgggcattggctgtacaatggggacgcctcanacccttgccactctcttcagaaatcatctctgttacagactgttcctgangnnccnacattaaanaactttgtggaatncntttgctatggcgacggccacctggtcttctattacagccttctgagttcaaagtaaaaccaaaggaaggcaggactctgcgtggctgatctcngttaactgtcactctgatctttggatagtcacttattccattaggagatttattacccagtttcagcatgtngntccaggatccagaacctgtcagttcacangatgaagagttccaaaatacctntcctggaaggggccncattcngngtttcattacaagcaaaatttccatnggctttgtgggcagctggaatgggaa

SEQ ID NO: 5894 - DNA, 746 bp, Homo sapiens
  misc_feature 138, 141, 149, 161, 162, 163, 164, 165, 167, 181, 188, 189,197, 198, 199, 203, 210, 213, 214, 215, 216, 217, 221, 222,227, 230, 235, 239, 242, 243, 244, 248, 249, 250, 252, 255,256, 263, 268, 269, 271, 272, 273, 282, 283, 289, 291: n = A,T,C or G
  misc_feature 292, 295, 296, 301, 303, 304, 307, 308, 318, 334, 336, 343,345, 353, 362, 370, 389, 394, 399, 400, 409, 410, 419, 421,423, 432, 433, 437, 439, 443, 451, 454, 457, 458, 483, 490,493, 494, 495, 503, 506, 507, 509, 513, 527, 530, 533: n = A,T,C or G
  misc_feature 543, 545, 553, 555, 569, 571, 572, 573, 577, 583, 584, 585,589, 591, 592, 596, 597, 598, 599, 602, 606, 607, 613, 616,631, 637, 681, 692, 695, 702, 709, 718, 719, 727, 733: n = A,T,C or G
ccctttcgagcggccgcccgggcaggtactttattttttttttttttttttttctttttttttttttttttttttttttttttttttttttttttttaattttttttttttttttttttttttttttttttttttttnttngaaaaaanaaaaattttttnnnnngnaaaaaaaaaaaaanttttttnnaaaaaacnnntttnaaaaaanttnnnnnaaannttttncanttctncctnggnnngaannncnttnnggggaanttccnncnnnctggggggnntttttntnnganncaaantnngcnnaaatttgggnaaaaaaagggaaaaantntttcctngngaaaaatnttttccccnaaaaattncaaaaaaaaataaagccgnaaaanaaaannttaaaaccnnggggccctnangngggggcccnncccnanttanttgggggnggnccnnattccccctttttaaaaaaaaaaanctttttngcnnntttttttnaannanttcnccaacccccggggnggnggngggttttttntntttggggncnttttttcctttttntnnnaaanaaaaannnttancnngggnnnnttngggnngggggnagngggtttttattttcntaaaangggggtttctgttttttcccaaaaatatggggggtttccccagnaaaaaaatttnttnaaaaaangccccanaaaaaggcnnaaaccctnaaaaangcccttttttttg

SEQ ID NO: 5895 - DNA, 556 bp, Homo sapiens
  misc_feature 530: n = A,T,C or G
gatatctgcagaattcgcccttagcgtggtcgcggccgaggtacaatttaaaataactaaaagaatataactggattgtttgtaacacaaatgataaacgcttgaggtaatggatcgatatttaccctgatgtaattattcacattgcaccgtctgtattcaaaataccccatctaactcataaatatttatatctactatctacacaaaaaattaaaaattaaaaaaatttttgcatgatgatcttaactgaatttttcaataataaaacattgtctgttttcattaagttcaatttagcaatttcaattatgtttaattattttgcatcctgaataaaaaatcttcttatactgcaagattttgaaggcaatctagacttacttctagaattggtatgttctacctgtataatcaggctacaattcatgtccaattaattttcatatgtaaaggtgagttatatttttcatgaagtggttcagtttttcagccccacttaaaaaaatgtagaaatggttcttgctcangttaaaccggacctgcttttttttaa

SEQ ID NO: 5896 - DNA, 825 bp, Homo sapiens
  misc_feature 7, 9, 10, 19, 20, 21, 23, 33, 58, 64, 80, 95, 117, 124, 218,222, 250, 511, 518, 580, 585, 597, 615, 623, 625, 649, 673,696, 707, 728, 729, 738, 752, 764, 767, 770, 771, 774, 780,791, 803, 807: n = A,T,C or G
gccgtgngnnggggttttnnncnaaattcgccntttcgagcggccgcccgggcaggtnctttanagccacaaagtctaanacgatgccttaaatncaagaaggctgagggactcctnaggtganctgatgccagaataggcagaatgaaaaaaaatgaactcgaagacatgaagaacaacacacaacagccacggtttggcaagagaccaacctcagntcanactttccatctgagcacagccgtttggntatgagctttttactgaattttatagcaactctgatttcttcctttaaatgattggaggctttttaaagatcttatggggctcaaatactaacttcataaatggccttttgaatacagcagcaaataatctctcagctgatatttcaatttactaagggaagcacaaattaaaacattcctgctacacagtcatggtctggccacacactggggtgaatactggccctggtgaacaactgtagtgccacaagttagaagtnctatgtnaacacattcagcaaaccttttgggagcagcaacattatgaatcttttctttttttgagaacngagtnctgctttgtcanccaagctggagtgcaatngtgcaatntnaattactggagccttcacctccanggtcaagcttttttctggcttaancctccaagtaggttgggcttcanggacacccccncacccccggggtactttttgnntttttaggngagacacttcctcnaaaaccaaaaanccnaanncanggtttnggacccttaanttaaactacttntttnaccttaatttttttttta

SEQ ID NO: 5897 - DNA, 313 bp, Homo sapiens
  misc_feature 19, 205: n = A,T,C or G
cccttagcgtggtcgcggncgaggtacgtatgtataaaaaccgtgcccttgttcactgccaacacaacatctgggtggacatgaactcattacaacaaatcttatgtggatgttgtaagaagtcactcaatgtctgtggatttaataagtcacttcacaccacagaaaatatttaataaatccaaaaaaaggaaagaagaatatnaccgacagaagagcttctgtctcagttctctgaaactgagtcccccataggaaactggtcccaaagttctcgaggggtcattgaagaaacttcggtttgctaattttt

SEQ ID NO: 5898 - DNA, 544 bp, Homo sapiens
  misc_feature 493: n = A,T,C or G
ccctttcgagcggccgcccgggcaggtacttgttctcaagggaatcttcagcttaggtggctcttttaataacaaaaaaatcctttccttcgaaagtaacatcctctcaaggccaggaattccattagtagaaagccttcctaaaaaacaaaattcctggccaggcatgggttcacgtctgtaatctcagcactctgggaggccgaggcgggaagatcacttgatgtcaggagtcgaggcgggaagatcacttgacatcaggagttcgagactggcccggccaacatggtgaaaccccatctccactaaaaatacaaaaattagcctggtgtggtggtgggcacctataatcccagcgacttgggaggctaaggcaggagaatttcttgaacccaggaggcagaggttgcaagtgaccagcaaggttgcgccattgcaccccacctgggcgataagagtgaaaactccatctcaaaaaaaaaaaaaaaaattnctttgggaaggccttctacataaaaatctttaacatgaaactgggaaaaaa

SEQ ID NO: 5899 - DNA, 342 bp, Homo sapiens
  misc_feature 122, 123, 133, 134, 136, 289, 300: n = A,T,C or G
ccctttcgagcggccgcccgggcaggtacgcgggtattaatggaatactaagtccctctgtagtttatgaaccaagctattcctaggcctgagttttattttgttgacacagaaataaattnnaaggcccaanncntggtggcattgtgccttgtagtcctagttgctgaggtaagaggattgcttgagcccaggagttcaaggctgcagcaagctttgattgcgccactgcactccagccttggcgacagactaagacgctgtcccaaaaaaaaaaaaacgactatanaaaaaacaaanacagaaaaaataaactaaggcaatgacagtccctggcaaatg

SEQ ID NO: 5900 - DNA, 560 bp, Homo sapiens
  misc_feature 125, 139, 199, 226, 260, 262, 263, 287, 291, 316, 319, 320,350, 352, 359, 367, 370, 372, 392, 396, 400, 408, 416, 418,447, 460, 470, 473, 475, 485, 498, 516, 529, 531, 552: n = A,T,C or G
cccttagcgtggtcgcggccgaggtacaactaaaattttattagaaatcgctcagcttacacactccaatcaggaagttatttaaatcacctcagataaaacctttgtgacctaacctaatacantccttattgccggnatcatggaattacttttcaggaaaaaaggaaaatccatttttccaaattatggttcaaangggaccaataagttaatccttaattgntggaaaataaaaaaaatggtgggtggccttttananntgggttcttcaaccttggttaaangggnaaataaaaaaaaaataaatttccangtnncaagggggccttttctattaatttcaaaantnttaaggnaaccaatnccntnttttttaacccttaaaaaantggnaagnaaaaaaanacccttancnaattttttttaaaaaaaaacccggttggncctttttttaaanaaaaacccanaananaaccgggggnaaaattttaatgnaaaaaaaaaaaaaaaggnaacccattaattngnccattttctttttaaaaaggnaaaacctt

SEQ ID NO: 5901 - DNA, 633 bp, Homo sapiens
  misc_feature 567: n = A,T,C or G
cgccagtgtgatgggatatctgcagaattcgccctttcgagcggccgcccgggcaggtacttttaaattcaatacagatgctgctgaattcattcctcaggagaaaaaaaattctggtctaaattgtgggactcaaaggagactagactctaataggattggtagaagaaattacagttcaccacctccctgtcacctttccaggcaggtcccttatgatgaaatctctgctgttcatcagcatagttatcatccgtcaggaagcaaacctaagagtcagcagacgtctttccagtcctctccttgtaataaatcgcccaagagccatggccttcagaatcaaccttggcagaaattgaggaatgagaagcaccatatcagagtcaagaaagcacagagtcttgctgagcagacctcagatacagctggattagagagctcgaccagatcagagagtgggacagacctcagagagcatagtccttctgagagtgagaaggaagttgtggggtgcagatcccaggggagcaaaacccaaaaaagcaacacaggttgtatacagctatnggtagaggaccaaaagttcaaggggaaactcaaaatgtgaatgggagtaacccgaacaacttccaa

SEQ ID NO: 5902 - DNA, 318 bp, Homo sapiens
  misc_feature 99, 102, 103, 126, 130, 131, 132, 133, 134, 135, 136, 139,140, 142, 144, 152, 155, 156, 157, 159, 160, 161, 162, 164,168, 171, 179, 182, 184, 188, 189, 195, 198, 200, 201, 204,205, 208, 209, 223, 257, 259, 262, 267, 277, 294, 297: n = A,T,C or G
  misc_feature 300, 306: n = A,T,C or G
ccctttcgagcggccgcccgggcaggtactttttttttttttttttttttctttttttttttttttttttttttttttttttttttttttttttttttntannttttttttttttttttttttttncccnnnnnnnaanntncntttttttnggnnntnnnnancccnttnttttcccnttntntaanngggaangtntnnaannttnnttaaaaaggggggnaaaaaaatttttttaaaaaaaaaatggggggggnanggnttttnaaaaaagggnaaaaaaaaaaaaccttnaantcnaaaaantttttttttttt

SEQ ID NO: 5903 - DNA, 688 bp, Homo sapiens
  misc_feature 260, 280, 343, 352, 356, 417, 481, 495, 542, 565, 570, 571,584, 589, 592, 596, 607, 624, 626, 630, 651, 660, 662, 667: n = A,T,C or G
cccttagcgtggtcgcggccgaggtacgcggggactgaagccttaagcactgttgcgcctccatgtgctttggatcagcaaccccagtggtgttctaccagagcattgtgggaaagcagatgtatagtcaggtcccaacagcaaattgttgggtgtgagagttctaaagtataggggtgagggaagagaaggatatgaactcctctgaccttaagccagcattcattcaacttttatgtctacttaacaagagaacctgnagaaaactaccgtattcaanagattaatcaaaatcaagtgttttagccaggcgatgacagagaagcaccattcctcacccttncattcttgnaatntctgtaataaatttcaagtgcgtcaaggatggatgaacccaagatccagtgaatgattcanctgttccaagcctttacatttttcaatcattcatcatccaattcttaattcagtgttaaccttnttgcacttattggnggttaaattttatgtaaaaccaagtttaatgttttttttttttaaanatggtgccctatggtaaataaangtttnnaacacctgggctnttttnttntaanagggggagggnttttggtttttaagttngnttcntactgaataatatcccttttnttgagcctntnaaaantggaattatttaattaaaaaa

SEQ ID NO: 5904 - DNA, 600 bp, Homo sapiens
  misc_feature 368, 394, 412, 458, 494, 523, 529, 540, 549, 555, 593, 600: n = A,T,C or G
cccttagcgtggtcgcggcccgaggtacaatatgttttgacatacatatatattgtgaaatgattgccacaatccagctaattaacatatccatcccttatataggtattgaaaaattaaacaaaattaattaatctttagtcagactaaaaaaacatgagtgaagatctaaataaaattggaaatgacaagttaatagaactgatactgcagaaatttaaaggacattagtggctactatgaggaactattaatatatgctaacaaactggaaaatctagaataaatggaaacattctgagatacttacaacctaccaaaattgaaccgagaagaaattcaaatactgaatagaccaataacaagtnacaagatcaaagccgtaaaaaaaaangcttccagttaaaaaatnaaaattaaaattaaaaaattaaagcctgggcctgatggcttcctgntgagttctcccaacattaaaccaggaaattattccnagtttactcaaccatttccaaaaataaangagaangggataccttnaaacttatntatganggccattttggccttattcccaaacccaaggccccttnaaaaaan

SEQ ID NO: 5905 - DNA, 410 bp, Homo sapiens
  misc_feature 71, 75, 96, 148, 154, 176, 225, 235, 286, 292, 300, 394,398, 405: n = A,T,C or G
cccttagcgtggtcgcggccgaggtactttttttttttttttttttttttttcctatttaatagttatttnattnatattctaatctttattattnacttcattatgctaactttgggtttagttagtttctctttttctaattgttnatttgnaaagttaggttgttcgagttanatctttcttattttttaatgtaggtatttatcactgtaacatttccctnttagcacttnttttattgaatcctgtaagttttgttgagttgtatgttcatttttgtttgnctcaanatattttnaaaattcccttttgatttcttcttttacccaatggttgtttaagcatgtgttgtttagtttctgcatttttgaaaatgttcctgttttctttgntatngactttnaattt

SEQ ID NO: 5906 - DNA, 778 bp, Homo sapiens
  misc_feature 588, 642, 654, 687, 694, 715, 716: n = A,T,C or G
cccttagcgtggtcgcggccgaggtacaaggtgtcagagtatgcacggcgctttggtgttccggtcattgctgatggaggaatccaaaatgtgggtcatattgcgaaagccttggcccttggggcctccacagtcatgatgggctctctcctggctgccaccactgaggcccctggtgaatacttcttttccgatgggatccggctaaagaaatatcgcggtatgggttctctcgatgccatggacaagcacctcagcagccagaacagatatttcagtgaagctgacaaaatcaaagtggcccagggagtgtctggtgctgtgcaggacaaagggtcaatccacaaatttgtcccttacctgattgctggcatccaacactcatgccaggacattggtgccaagagcttgacccaagtccgagccatgatgtacacatttcactttaaacagaaaatctttcttcaaagaaatgactttactttctctttgcactgccagcaccgtgagatactaacttttttaactaggtggtcttcttctaagtctctaccgttaattagaaattttttgcttttcataatgtgnaacctttaagcaggaagaagaaaaatgtttttcagatagtttcaaaatacaccnaaaaatgtttgnaacacaaaaattcttgggaatcaaaccataatncacttantgaatatataagttgggatannatttgttctgaaaaataaattatttgaaatttaacttttaaaaaaaaaaaaaaaaaaaaaaa

SEQ ID NO: 5907 - DNA, 287 bp, Homo sapiens
  misc_feature 68, 183, 196: n = A,T,C or G
ccctttcgagcggccgcccgggcaggtacttttttttttttttttttttttctttcattgatttctgncctttttattattttctttatctgcttacgttgggtttaatttgctcttctctttccagtttctgaaggggaaaactcaggtcactgatttgagacctttcttttttgttataanataggatcttagngcttaaatttgcctccaagcatacattaactgcaactccgtgattctgatatatcgggttttcattttcagctcaatgaactttccaattt

SEQ ID NO: 5908 - DNA, 466 bp, Homo sapiens
  misc_feature 114, 126, 140, 161, 173, 181, 200, 208, 245, 249, 262, 273,290, 307, 311, 316, 317, 338, 351, 361, 377, 382, 385, 393,397, 410, 415, 419, 421, 435: n = A,T,C or G
ccctttcgagcggccgcccgggcaggtacgcgggaacaatggtaatgagacaaattatcaagaaattggagctgggattccttaaagaaaacagagaagatgccagactccttntgggggcaaaancttttgtttttttncttattggaaccccttaggantattaaaacaangttccttntcaaatcttaaaacctccnttggcttnctataatttttggttttcctggattttttttttaaancttngaaaataaggttnatttatttacnaggggggccttacctcntttgggggagttttaanaaanttaannaaaaaaggggttgcttttaantaaccaccttcanagccaaaacnattttttttggttaanccaanagnttaaaccncccncttaaaaaagccnttttnttgntngggcccctaaggtncccccaatgggaattttcctccttctttcct

SEQ ID NO: 5909 - DNA, 332 bp, Homo sapiens
  misc_feature 263, 321, 328: n = A,T,C or G
cccttcgagcggccgcccgggcaggtactgagctccacaaacgtggccatggttggtgcggaaatgattctgagtgagcaggtagaagtctcgcgtcctgctgtgtccagagttggttccttccagagggttcgtggtctcgctggcttcaagaatgaagccgtggaccttcacagtgtgtgttacaagctgttaaagatgttgtgtctggagtttgttccttcagatgtgtcttggagtttctcccttctggtgggtttggnggtgtcgcttgactttcaaagaattgaagcccgcaagactgtccgtgggttgaatccnttggtancctc

SEQ ID NO: 5910 - DNA, 651 bp, Homo sapiens
  misc_feature 62, 528, 566, 584, 616, 641: n = A,T,C or G
cccttagcgtggtcgcggccgaggtactgcaaacagacaccagagggtgcaagagactgtanactcctgaaaaagaaaccagaaaactttgtctggttgtgaaattacacacataggctcagaaaaaattcatctctgtaaaaggtttgagagaccgccagaatctctagctgggctgattggtgaagatctttttccatccaaaaccagtctgtaaagactggaagaggtgaccgtttattcaaatacaaaaattacaacaaaatataaggcacacaaacagggaaaatatggtccaatcagaagaacaaaataactgtccgtaaactgacccaaaagaaatggagatctatgaattacctgacaaatagtttaaaaggaacattttaaattagtgcactacaagaaaaacatatacaatgaaactgtgaataaaatgagaatatcaattaagagatgggaaactgtaaagatccaaacaggaattctaaataactaaacaggaattctgaagctgaagaatcagtnactgatttgagaaaaaaaattataggggatcaccagcngactttatttagccagangaaagaaatcagcaaacttaaaagcaggtcantttgaaattattgggttagtggacnaaaaaaaaaa

SEQ ID NO: 5911 - DNA, 489 bp, Homo sapiens
cccttagcgtggtcgcggcccgaggtacccagcctgcattagtgaattctttataactcaaaaaaagataactccctcattaaatgatcgaaagcatggaatggggggaagaggagctatataatttatttcatgatttaatggaattttggccctaaaacataaaagataatacagcttaaatttttaaaaaagaaaagaaaaaggaaacaaaactgtaagtttcccttacatatgaaacccaactaaacaatatttagatcaaatacactgacctgcctcctatgtagatcagctagcctctgagggggcaaaaccacactggcttccccattccatgtccccacagaagaataacagctctctgtatttgaaccctgctttgtgctctaccagaagttcccatttcattagctgctcccagcagccctgtgaggtggggtcattggggtatcctaatgtctactttagggatgaagaaaaatgaaa

SEQ ID NO: 5912 - DNA, 622 bp, Homo sapiens
  misc_feature 466, 477, 491, 495, 502, 537, 561, 564, 594, 611, 622: n = A,T,C or G
gtggtccgcggcccgaggtcaaaatattggggaatcactaaaatggattaagcctaattacaaattttgatcatttctaaataactcacactgcagaagtcttttcacaagaatgagtcacatagtttctctctatcttggtgcagggattttaaatcttattcaaaacagttcctcttcatttctagatttttgtaagtataaaatattttaaaacaaaggtatgtccgtccttagctagagaactattcttccactgactcctggaagagaaaaaaaaagattcccatttcttcctctacctcaaaaacacaaagcaaacccaaacaatccaattcctaatgtaagtgtcacatagaacccagggcctgaaacaatatttcatgctagttttcctgctatatgcagagaacaatttaagttatttacattattgagaaaatctatttaacagcctaaaatcatnctaagggcttncatcagcagaaggnttgnttaaaanggcgtgagccagcggcgtctgcgaatgggaacatnaaagactctcctcggcttttcctnttnatcatcttcatctggatcatccatatctgntggaatcatcaatcctngcttcctcctn

SEQ ID NO: 5913 - DNA, 633 bp, Homo sapiens
  misc_feature 248, 369, 543, 550, 575: n = A,T,C or G
ccctttcgagcggccgcccgggcaggtacgcggggaggcattgaggcagccagcgcaggggcttctgctgagggggcaggcggagcttgaggaaaccgcagataagtttttttctctttgaaagatagagattaatacaactacttaaaaaatatagtcaataggttactaagatattgcttagccgttaaagtttttaaccgtaattttaatagcttaagattttaagagaaaatatgaagacttanaagagtagcatgaggaaggaaaagataaaagggttctaaaacattgaccgaaggttgaagatgaagcttctcatggagtaaaaaaattgtatttaaaagaaaattgagaagaaaggactancagagccccccgaattaatacccaatagaagggcaatgcttttagattaaaaatgaaggtgacttaaaacagcttaaagtttaagtttaaaagttgtaggtgattaaaaataatttgaaggcgaatcttttaaaaaagagaattaaacccgaaggtgaattaaaaagacccttngaaaatncattgaccccaggggagaaattgcngtcatttaaagcctaattaaccccatttacttaaacccagaccaaaaatggaaagatt

SEQ ID NO: 5914 - DNA, 279 bp, Homo sapiens
  misc_feature 122, 124, 134, 136, 138, 140, 144, 145, 147, 150, 154, 156,158, 167, 176, 182, 188, 191, 202, 205, 206, 207, 229, 230,231, 235, 243, 244, 245, 248, 249, 251, 256, 260, 263, 265,267: n = A,T,C or G
ccctttcgagcggccgcccgggcaggtacttttttttttttttttttttttttttctttttttttttttttttctttttttttttttttttttttttttttttttttttttttttttttaangnaaaaaaaaangntntntttnntnaantggngnanaaccggggnaaaaaaaanaaacanttgacnccnccaaatttttnttnnnttaaaaaaaaaaaattttttcnnncccnaaaaaaannntcnnancaaantttnccntnanttaaaaaaaaaa

SEQ ID NO: 5915 - DNA, 477 bp, Homo sapiens
  misc_feature 133, 194, 232, 252, 290, 311, 340, 354, 386, 388, 394, 421,443, 465, 471: n = A,T,C or G
gcagaattcgccctttcgagcggcccgcccgggcaggtacactactcaggtgaccggtgcagtaaaatctcagacttcactactgtagaattcatctatatgaccaaaagccatttgtccaaaccaggattcncccccagcaccagcaccaaagaagtatccgtccaattaagagggaaggctcaatagcagtntccagatgaagagagatgaggaggaaaatatgattatntttccgaggagaaatctaangtaaaaccaacacttggatgaataaagaaggaacctgngaggatgaaaggaacttaatntgaaaggccttcgaactgacatgtttcancttttctgagagcngtgactcagaaaattcaaattaggagaattantngattanttcctcagaaccagaagcccggagaantgaaattggaaaataaaaaatncttccaaaaaataaatgggagnaagaanggaaaa

SEQ ID NO: 5916 - DNA, 675 bp, Homo sapiens
  misc_feature 303, 310, 413, 497, 571, 610, 620, 638, 640, 651: n = A,T,C or G
cccttagcgtggtcgcggcccgaggtacgcgggggaggccgaggcgggcagatcatgaggtcaggaggtcagcagatctagactatcctggctaacacagtgaaccccatatctactaaaaataaaaaaattacccgggcatggtagcacacacctgtagtccagtcccagctactcaggaggctgaggcaggataatagcttgaatccaggaggcggaggttgtagtgagccaagatcacaccactgcactccagcttgagtgacagagcgagactccatctcaaaaaaaaaaaaaaaaaanaaagganttacatttacaacagcattaaaaaaattagaaataagcttaaccaagagggcaacagatttgaacacagaaaactacaaaacactgttgaaagaaattaaatncaaataagtgaaaagaaaagctgggtttgcagattagatgatttcatcttggaatgatgtcaacactactcgaagtgacctaanattcaatacaatccttatacagattccaatggacatttttgataaaacagaaaaacctatcttaaaattcatantggaatctccagggcccattgaatagggcaaattaattnttggaaacanaaaaaaaatttaagggtntnaaaacaatttncaaacctgcaattggccaaaaaaa

SEQ ID NO: 5917 - DNA, 327 bp, Homo sapiens
  misc_feature 153, 249, 269, 276, 300, 320: n = A,T,C or G
cccttagcgtggtcgcggccgaggtacttttttttttttttttttttttttggatttgatttgctaaaattttaaggctctttgcttctctattcgtgagaatattgctctgtaattttttttcaggaagaaagatttctttatgaggtttcngtttttaagtattttgctgagcctgaataaaaataaagttcagcccgtatttcccttcccctctatttttttgaggaagttcaccgtaagattagngttactctgtccttgaaggngtaatanaattcactagtgaaactatctgancctaggggtttcttctgganaaagctt

SEQ ID NO: 5918 - DNA, 408 bp, Homo sapiens
  misc_feature 344, 375: n = A,T,C or G
ccctttcgagcggccgcccgggcaggtacatcttacacatattgattgatgtctcatgtctctctaaaatgtataaaccaagccatgccccgaccaccttgggcacatgtcaccagggcctcctgaggctatgttacaggcacatgtccttaactttgggaaaataaactttctaaattgactgggatctttctcagatatttggaactcactctacacagacacacagacacacacacaaacacactcacaaacatgcacacacaaatacacatatatgtatatttgtgttataaaccgtattagtcctttttctgtaatacagattttaagtaaactccagngcttcatttggctttttactttgcttatcgntctttttttcttttaagttttaaaacactttag

SEQ ID NO: 5919 - DNA, 549 bp, Homo sapiens
cccttagcgtggtcgcggcccgaggtacctgatgagagacttcttcctgcatccttacatggtggaagacaaaagagtggcagagaatgaatatactcccagtccttcgagagggaagagccctcacctcatcacttccctgaggcctcaccttctaatactatcaccttggtgataagatttcaacataggaattagaggggaatacatacatccagactattgcagatgggattatgtaatactttgttcctgtttggcttatttcttagcacaatatctttctggtatgtgcatgtttctgcaaatggcaagattttcttcctttttaaggctgagtaataattcattgcatgtatagaccacattttctttatgcattcattattagtgagagttcttattacaaatggcgaagtgggtttttaatattgatttaatttttgttattaaaaacatttttagatggttagattcctttttagaataaatatacttcattagttaaggcagttttaacttcacagcagaattaagaagtcctgcccg

SEQ ID NO: 5920 - DNA, 268 bp, Homo sapiens
  misc_feature 81, 127, 130, 136, 149, 207: n = A,T,C or G
cccttagcgtggtcgcggccgaggtacagaactcagaggaaaaaagaaattaaattttagctttctggagagcagcccctntctggcaccatcaaacacttctttgtttcccttcaacttggaactnttnaaacancaaggggttgggnagggtttgggccatttctttttatcttggggtccatgtgagtggacagaaatggtgcnggcctgggaaagatctccctcctttacacccgcgtacctgcccgggcggccgctcgaaagg

SEQ ID NO: 5921 - DNA, 412 bp, Homo sapiens
  misc_feature 54, 83, 90, 324, 410: n = A,T,C or G
cccttagcgtggtcgcggcccgaggtacacagcttgaaatattacctatgcccntaaattactttattttgcagagtatatgntttaaantggaagacagtgaacaagcagtagataaactagtaaaggatgtaaacagattaaaacgagaaattgagaaaaggagaggagcacagattcaggcagcaagtaagtaaacaacacatctctactttctgtgctaaaaatttttatttatttatttatttttgagacggagtctcgctctgtcgcctaggttggagtgcaaaggtgtgatctcaagtttactgcaacctctgcctnctggggtcaagcgattctcctgcctcaacctcctgaaacgctgggattccaggtgcctgccaccatgcctggctaattttttttgnat

SEQ ID NO: 5922 - DNA, 574 bp, Homo sapiens
  misc_feature 80, 133, 136, 162, 167, 177, 186, 187, 194, 195, 208, 210,211, 213, 224, 230, 232, 238, 239, 248, 250, 252, 269, 274,283, 285, 286, 293, 295, 296, 309, 310, 312, 313, 319, 326,327, 331, 334, 339, 340, 342, 343, 356, 363, 364, 365: n = A,T,C or G
  misc_feature 367, 369, 372, 403, 404, 405, 406, 407, 408, 413, 414, 418,428, 451, 452, 456, 459, 463, 468, 471, 472, 473, 480, 481,489, 494, 495, 497, 502, 527, 543, 547, 549, 551, 556, 559,560, 566, 570: n = A,T,C or G
cgccagtgtgatgggatatctgcagaattcgccctttcgagcggcccgcccgggcaggtacttttttttttttttttttngattttttttttttttttttttttttttttttttttttttttttttttttttnaanttttttattttttttttttttttttntaaantcttttatanttttttttnntttcttnnaagagaaaaaagngnngnaaaaatttttntttttnanaaaaannggggggggntnanaaaatttttttttttanttttnataaaaaantnngtaaaananntaaaaattttttnngnncctttnaaatttnnttgnaanaaaannannttttttttttatnacccccnnngnanaanaaaaaaaaaattttttataattttttcaaannnnnnggggnntttnaaaaaaaaantaacacccttctttttttctttnngggntgntttnaaaancannnacccccnntaaaaaanagggnntnttttncttttttttttgttaaaaaaaaaanatttttttttttaatntaanancngggtnggnnaaaaanaaantttt

SEQ ID NO: 5923 - DNA, 168 bp, Homo sapiens
  misc_feature 47, 155: n = A,T,C or G
ccctttcgagcggccgcccgggcaggtacaacgtgggcaagcatctngtgcatatgaaatgctgtttttctaaaagatttctcacattggcaaactgagagattttcttctggaacacaggaaagattatattaatgctcatagccataccatgnctgaatatgggag

SEQ ID NO: 5924 - DNA, 499 bp, Homo sapiens
  misc_feature 115, 148, 324, 333, 339, 345, 357, 416, 454, 475, 483, 486: n = A,T,C or G
cccttagcgtggtcgcggccgaggtacacgctcatgtgcttctgaaacaacgtggtaagaccaaagactagattttaatgcaacttaattacaaaagagaaagagacaaaagatnagagacttttctcctctatctatcccacacccntaaaagagctttgggttttaaaaatacagaaaagcactcactcaatgaaattatatcactcaagtgatattttcagggcatggctacacaaaaatagataccactaaaaactgggctatttagagaaagaggcatatttgtttcataactccctgacattgtctcatcttacattncactatatntattantaaaanggcaacatcatnactcttttttgaagaaggcaagaaggaattcatctgattagattaaatcaagtattcangaataccatgtctaagggggttcaagtaaaaataatgnatctaaaattattttgaaaangacacaanatnttttagagggctg

SEQ ID NO: 5925 - DNA, 482 bp, Homo sapiens
ccctttcgagcggccgcccgggcaggtacaatgataggcactcccagcaaccgctgcccagtcagcccaatggccagtggcacagactggatttcacagaattccgtaggcaatgcccttagaacgacgtgagttccgatctgaaatgatacgtactcgaggttcctgaagctaaggcagctgtttcagaggagggggaggaggtagcagatgtcaagggatttccatttctctttcgatgccgacatacttcagggcatcagcctggctgtatctgtaatcaaaaaacagctcttcgccagtctggatggctctcttggcaaaaatacctatcctgtgatcaccgttaaccatcataactgcaaagagacacactggtgtcagtgagcatgaagacgggccacggggggttaactgacttgttcacataacaaacaactatcccagaagtattcaagtccatcatcacaggactgaaaagg

SEQ ID NO: 5926 - DNA, 580 bp, Homo sapiens
cccttagcgtggtcgcggcccgaggtacaagtgacgaggaagattctgttttgggtatagccagagaaaacaaggatggagaaaaatctaggacagtgtcttctgagaaaccaccaggcttgaaggctacaagtgatgagaaagattctgttttgaatataaccagaggaaaaaaggatggagaaaaaactaggacagtgtcttctcggaaaaaaccagccttgaagtgtcttctcagaaacaaccagcattgaaggctatctgtgacaaggaagattctgttccgaatatggccacggaaaaaaaggatgaacaaatatctgggacaatgtcttctcagaaacaaccagccttgaaggctacaagtgacaagaaagattctgtttcgaatatacccacagaaataaaggatggacaacaatctggaacagtgtcttctcagaaacaacccggcctggaaggctacaagtgtcaagaaagattctgtttcgaatatagcccacagaaataaagggatggacaaatacgtgggacagtgtcttcctcagaaacaatcggcccagaagggtatatttaaaaa

SEQ ID NO: 5927 - DNA, 647 bp, Homo sapiens
  misc_feature 418, 511, 531, 551, 562, 570, 633, 645: n = A,T,C or G
cccttagcgtggtcgcggcccgaggtacttgatgtcactaaccaagttgtagaaggagcctgttataattctgcaagatctgtgaatagcattataaatctggggcaggtgcctgtaatcccagcactttgggaagccaaggcaggtggattgcttgagcccaggagttcgacaccaacctgagcaacatggcgaaaccccgtctgtaataaaaatacaaaaaaattagctgggcatggtggcatgtgcctgtaatcccagttactggggaggctgaggcaggagaatcacttgaacctgggagatggagattgcagtgagcggagattgtgccactgcactccagccagagtgacagaacaaggacttcatcttaaaaaataataataaaaataaacaaatctgtttaaattactgncgcctttcaacattagactttgagtttaataactaccaattgagactgctcacaatattaactttttttgggaggttattttgggtggttaanataacttgccttccttagangagcatttcaaggaagaatnaaagaccttancttccatntaatgatatgaaccatttcaaaaaaatgtccaagaaagccaaaattcattatttggaactctnaatttctggggntt

SEQ ID NO: 5928 - DNA, 537 bp, Homo sapiens
cccttagcgtggtcgcggccgaggtacagccaaggaccaactggccctgggcctaggaaaagtccttaggccaacttggcctagtgatccaatctttctgtgcctcagtttcttcatctgtagcatgcagctaataataataaatacataaatctctaccttatagggaggctgtgaatagcaaatggatacacacgtaattaatttatatgttatatatgaatatataaaatgtatattatatacacctatagttaatatatgcagatgtgtgtatttaaatatggacacacatcttttaagatgacttgcaccaaggacatgtaagtgctaagttggtatctgctatcattatttgttcactatttgtggctgccaatgagcttatgatacagacaggggagagatagagaacatattgcatcgtgattacatgtgtagaatctgaagttagatggccttgggaaatttatttgaccttttaaaaagactatttgtcacaagtaccttgccccgggccgggccgttcgaaaaggg

SEQ ID NO: 5929 - DNA, 361 bp, Homo sapiens
  misc_feature 10, 108, 123, 129, 222, 283, 339, 351: n = A,T,C or G
cccttagcgnggtcgcggccgaggtacatggttggacaagctttcttgtccttgctggaaagaaaatgactacttactaatatattttgggaaaaatatttgtaagantattaataagcttgntttccnggacctatttaagaaaaataccacgttttaatgcagattctggctattccatccattctgattcagaaagtcaggtaagattgaatagatacnatacacactattttaattagttttcaaatagtagctaaaaagtaggaataaaatgcaaagnattaattgctctaaggaagtatgaagtctgttgctttaaaacatcttttctccaantaatagtttgtnaataaacaaa

SEQ ID NO: 5930 - DNA, 467 bp, Homo sapiens
  misc_feature 303: n = A,T,C or G
cccttagcgtggtcgcggccgaggtactattaaataaacataatatttgaatttactacaattatctggatatgcattttcaagtataagcaagcatctagatataagttacagtgaaaatcttatattcttttgtctccctgtttctttgcacccctgtaatctttttctgtaacagcaactagaataatccttttaacaagaaatcaagtcatatcactcctctctgcttaaaatggtttttgcctcatttagagtaaaagccaaagcccttccaataggtccatatgggccctccacaantggcctcattacctctttgatctcaccttctaccactttgccccctttgctcattctgttctaaccatactagcctccttactgttcttaaaacacttcaaacacattgcctcctagagcctttacactagttggttccccttgcctggactactgctacccta

SEQ ID NO: 5931 - DNA, 382 bp, Homo sapiens
  misc_feature 135, 142, 274, 299, 326, 380: n = A,T,C or G
ccctttcgagcggccgcccgggcaggtacgcctaaccgctaacattactgcaggccacctactcatgcacctaattggaagcgccaccctagcaatatcaaccattaaccttccctctacacttattaatctttnacaattnttaattctactgactatcctagaaatcgctgtcgccttaatccaagcctacgttttcacacttctagtaagcctctacctgcacgacaacacataaaaaaaaaaggaaaaaaaaaaaaaaaaaaaaaaaaangtactgggaacacttgctagctcanaatgcaatattggtagaatttgctaanaattcaaccaagggattgcccgaaggcattcgccaagctggaggctcgtttttntg

SEQ ID NO: 5932 - DNA, 534 bp, Homo sapiens
  misc_feature 128, 181, 182, 184, 186, 195, 198, 201, 203, 210, 212, 216,221, 229, 230, 245, 246, 248, 251, 252, 257, 262, 272, 274,275, 281, 282, 283, 287, 294, 296, 297, 306, 314, 325, 329,339, 342, 343, 347, 353, 363, 364, 374, 380, 384, 385: n = A,T,C or G
  misc_feature 400, 419, 424, 427, 432, 444, 449, 454, 467, 475, 480, 481,490, 507, 514, 516, 517, 525: n = A,T,C or G
ggcgaattggcccctctagatgcctgcctcgagccgcccgccagtgtgatgggatatctgcagaattcgcccttagcgtggtcgcggcccgaggtacttttttttttttttttttttttttttttttnctttatttttttttttttttttttttttttttttttttttttttttttttaanncngntttttgggnatnatntntttttantnatanaaaantcttttgnnttattttttaaattnntnggnngtaanttttnttttaatttngnngggggnnnttanatttccntnnccctatttntttaagtnttttttttttngaantatttttggnacnntaantttttnaaatttaaanncacttttttntttttntcanngttttttttaataanctcccaatttttttactgngtgtntgngtttntaaataataaantgtcntttanttttcttattttnattttttnatttnnttttttttnacaatatcttgttaggnttttttnanntccacttnttttttttt

SEQ ID NO: 5933 - DNA, 450 bp, Homo sapiens
  misc_feature 328, 329, 330, 331, 332, 333, 334, 335, 336, 337, 338, 339,340, 341, 342, 343, 344, 345, 346, 347, 348, 349, 350, 351,352, 353, 354, 355, 356, 357, 358, 359, 360, 361, 362, 363,364, 365, 366, 367, 368, 369, 370, 371, 372, 373, 374: n = A,T,C or G
  misc_feature 375, 376, 377, 378, 379, 380, 381, 382, 383, 384, 385, 386,387, 388, 389, 390, 391, 392, 393, 394, 402, 447: n = A,T,C or G
ccctttcgagcggcccgcccgggcaggtacgcgggggcccttgttcactagaagcaaggagtcccctgacccccttcttcaaaacatactcttcagtctttgtctttattcccgccttggtcctcctttgttcagtccagcaaggtccacagcaaagtgctgcccgaaaacagggtcttgaggacatgaacaaagaaggtctgctggagcagaggaagtgaaattgaccagatgaacagggaccctgggatgaatctgctggcagtggatataaggtcagtgctctaaagaagtacctcggcccgcgaccacgctaagggccaaattnnnnnnnnnnnnnnnnnnnnnnnnnnnnnnnnnnnnnnnnnnnnnnnnnnnnnnnnnnnnnnnnnnnaagctgtntcctgtgtgaaattgtttcccctcacaattccacacaacattacnagc

SEQ ID NO: 5934 - DNA, 759 bp, Homo sapiens
  misc_feature 33, 191, 264, 289, 391, 431, 454, 462, 467, 469, 479, 497,514, 520, 522, 525, 529, 538, 542, 544, 558, 563, 571, 574,583, 585, 586, 587, 589, 596, 598, 599, 600, 601, 604, 605,608, 609, 624, 632, 633, 634, 636, 643, 657, 663, 665: n = A,T,C or G
  misc_feature 667, 673, 676, 677, 678, 679, 681, 698, 700, 702, 704, 712,714, 726, 737, 738, 739, 740, 742, 743, 745, 746: n = A,T,C or G
ccctttcgagcggccgcccgggcaggtactttnttttttttttttttttttttgtgaattgtctgttcatatctattgctaatttttttctaatcaattgtcctttttcttcctgatttgtaggagctctttttatgttgtaggtgttaattatttaatatgtattaggaaaatattttctgccaggttgncatttgtctttagctttgtttaaaatatgcttgatcatacagagattttaaatttttatctattcaaatttgntacttttccttttgactgccttggntttctgtcatgctgaaagagccttctctaccccaagattatttttaaaaagcccatattttctccctatgtggatttaagtgttaccctttccacctacctncttaacctaacaggaatttattcactttgtggaactaaanaaataccatgtggcttaaaccangggaaaantggtnanaacttagctngaaaaggtgggacaaggnggcatgccaagggaggngaagtntnaancatnaaaaccatnatantnacaaaaggcttatnagggncaaacaanaanttttactanannncnaaaaacngnnnnaannttnnacaaaattaaaaaanaaaacttnnnanaaaaaanggaattttaaaaancttatnantnaaaaanacnnnnanaaaggggaaagggccgnancnanttttttancnttcccaaattanttttaaaaaannnnanntnntttttttaaaaaa

SEQ ID NO: 5935 - DNA, 408 bp, Homo sapiens
gatatctgcagaattcgcccttagcgtggtcgcggcccgaggtactttttttttttttttttttgaagtgtggacggaatatttaatccattccatccaggcatttgcatcttgatatcctgtttaattgctaaagtttgttttaggtcatttacttctacaatatctattttggttttatctttgggtggaggaagaacagaacattgggggataatgtagaaggaatgtaggaggtgaaggagtaataaaacatatctcaaaatatccaataagatgtgcccctgctatttcggctcccatgccatataagcaacttaaagtaggtttaagggtcagtagaagttggaatgagaatagaaaattgcactgggattacattgggttatacctggcaattatgggggg

SEQ ID NO: 5936 - DNA, 600 bp, Homo sapiens
  misc_feature 32, 41, 44, 46, 53, 76, 452, 454, 483, 502, 524, 535, 537,568, 573, 585: n = A,T,C or G
cccttagcgtggtcgcggcccgaggtactttnttttttttnttngnttttttnagttcacaagtaaatcttgattnattggtttaaaaatggttgaaaaaataaaattagaaatatcttcaaaagtgtcaacatacattctcacttgagtttactggtcacacagttttatatatgcctctgctagatcttttaatgtaataaggtgataaagcctaaaacaacataatctttaaccctttgataagattaatttaatattgttgctttaataaaatcagccatgtctcctgacttattgacaggatttatacaataggacttattgacctatgtatttaaccttaaagttcttacttaggtaaattcctgatattaacaggcaataaaattcgttaataaaaacctaataactagctatgtctagtatctcaattttcataggtaatcaangnataattggtaaaaaataaataaattaggnaattgcaacagagtaagcntttaccaataaattttcatgtnatttaaaaacntnaaaggtatggtaaaattaaaaatacccattnaatgnctggagcccctnttccaattagaaaaa

SEQ ID NO: 5937 - DNA, 550 bp, Homo sapiens
  misc_feature 1, 392, 393, 394, 396, 398, 399, 401, 402, 403, 404, 405,406, 407, 408, 409, 410, 411, 412, 413, 414, 416, 497, 521,531, 534: n = A,T,C or G
ncgccagtgtgatgggatatctgcagaattcgcccttagcgtggtcgcggcccgaggtacttttttttttttttttttttttttgatcttctgtgaagccctggcttgacttttcctggaaacttttcctgtgacagtgcatgtatcacaagatggccatttaaaatttaattgcccagatatataacgatctaccactacagcggtagctattagtgcattggggtaattccatggttgattcattttacttttgcagctgaaaaaacctcatgctgagcagagaggcatctaatttgctcatcatccatgctggaagctttttttgtctattagctttgacctttatgacccattggacatttatgccttttaaatgaatggtacttttnnntntnntnnnnnnnnnnnnnntnaagggggcatttggtttttattagaaaaccccttagtaagcactttttttaacccaaaatagacactgggtatcctccaanaggtcccaaagctttcatttcatnttccaccctnttntgaaaagggggaggca

SEQ ID NO: 5938 - DNA, 444 bp, Homo sapiens
  misc_feature 55, 88, 89, 90, 91, 92, 93, 94, 95, 96, 97, 98, 106, 107,113, 117, 125, 129, 134, 135, 146, 153, 154, 156, 164, 165,169, 171, 176, 177, 179, 182, 188, 190, 191, 199, 200, 209,210, 216, 217, 219, 230, 234, 240, 242, 252, 260, 273: n = A,T,C or G
  misc_feature 283, 293, 296, 297, 298, 299, 305, 306, 312, 325, 326, 327,344, 350, 359, 367, 376, 380, 383, 394, 401, 404, 407, 409,412, 413, 417, 421, 423, 433, 436: n = A,T,C or G
ccctttcgagcggccgcccgggcaggtactttttttttttttttttttttttttncctttttttttttcctttttttttttttttttnnnnnnnnnnnggggggannaaaaantttnttttttancaanttttnngggggggtgantcatcanntntaaaatgnngccntncatcnngntantttgcnanntttttttnngaggaaaannttttcnntntttgggggaanaaanaaaaanantattctgttnttgccagnacattttgtcatnaacttttttnaaaaaaaaangannnntggtgnnaaaaantatttttttcccnnnatgaactattttttttnttcaanaaggggctngcttcctncttttaaanaaanatnttttttttttnaaaaaanctnccngnttnnaagncagntncttttttttnatnaaaaaatt

SEQ ID NO: 5939 - DNA, 435 bp, Homo sapiens
  misc_feature 53, 127, 138, 162, 165, 180, 221, 223, 255, 328, 421: n = A,T,C or G
cccttagcgtggtcgcggccgaggtactttttttttttttttttttttttttncagggtctcactttgtcacctggctggagtgcagtgtcgtgatcttggtactgcagccttgacctcctgggctntaaaaatcctntggcctcagccacccccgaccaantanaggggactacaggcntgtgccaccgtgaccagctaatttttttgtattttttgtananacggggttttgccattggcccaagctggtctnaaactcctgagctcaagggatccacctacctcagcctcccaaagtgctaggattacaggcatgagctgccacncctggcctaaaagtaaagcttaaagttgtgactcaattactgtaatctcatgataaaactttaacaaataaggagttgcttttaatggatgtncaaaaaaggtaggg

SEQ ID NO: 5940 - DNA, 296 bp, Homo sapiens
  misc_feature 147, 157, 158, 159, 168, 171, 172, 180, 182, 183, 187, 188,189, 193, 195, 196, 207, 210, 212, 218, 221, 222, 224, 227,236, 240, 241, 242, 243, 244, 254, 257, 262, 269, 278, 279,280, 281, 282, 283, 285: n = A,T,C or G
cccttagcgtggtcgcggccgaggtactttttttttttttttttttttgtttttttttttttttttttttttttttttttttttttttttttttttttttttttttttttttttttttttttttttttttaaaaaaaaaaaaaaaantttttttttnnnaaaaaaaanttnnaaaaaaantnntttnnntttngnngtttttttttnggncncccccnacnnanttngaaaatttngccnnnnnttttaaaaanggnccttnaattttngaaaaaaannnnnnanaaaaaaaaaaa

SEQ ID NO: 5941 - DNA, 792 bp, Homo sapiens
  misc_feature 376, 512, 577, 578, 580, 623, 683, 692, 744, 769, 781: n = A,T,C or G
atatctgcagaattcgcccttagcgtggtcgcggccgaggtaccagggcaataaacaacaaacagttatttggtagagtgataaaagcaagcattgctattgacaatggaagagcagctgagttcgccgaaggcgaaactactttgataaatctaagtgttatgaatgtggggaaagtggacacttaagttatgcctgtccgaaaaatatgctcggagaacgtgagcctccaaagaagaaagaaaaaaagaaaaaaaagaaagctcctgaaccagaagaagaaattgaggaagtagaagaaagtgaagatgaaggggaggatcctgctcttgacagcctcagtcaggccatagcattccagcaagccaaaattgangaagaacaaaaaaaatggaaacccagttcaggagtcccctcaacatcagatgattcaagacgcccaaggataaagaaaagcccatatttcagtgatgaggaagaacttagtgattaaaatcttgccccagccagtnataaaaatccagaattgttagtaacaatcttgaagagcttattttaattaaagttagaaaaattnntnctatcatggttaatactattattggcctcccagaaaaaagatnttttaaaaatttatttgaaaagtcattattagggctttattcaatgcctggacctggttnctggagggncttcttgaaattaattcttaaaaccaactttcttgaaaaccccaaaagttgnaaggatttaatgggtccttatattnaaaaacttttcnaaaaaaaaaaa

SEQ ID NO: 5942 - DNA, 611 bp, Homo sapiens
  misc_feature 571, 596: n = A,T,C or G
ccctttcgagcggccgcccgggcaggtacagtggcaccatcttggctcactgcaacttccgcctcctgggttcaaacgattcttctgcctcagcatcccaagtaactgggactacaggtgcctgccaccacacctagctaattttttctattttttagtagagacagggtttcaccgtgttagccaggatggtctcgatctcctgacctcgtgatctgcccacctcggcctcccaaagtgctgggattacaggcgtgagccaccgcgcctggctagtatatggtatttttcttttatgtttatatgatgatgagaaatttgaaattattgtttgtttgtctttagtttttattcttgttaatggagaaaccaaactccgtgaaatattttaaagaggcttcttctgagccaatatgagtgaccaccatctttgggaaaaacaagtcttaaggagccctgagaaagtgtagctgatttctgttttacattaatgggtggccaagttgtgcctaaactccgaaaggggaagggggtattatgaagttttttctgatccctcttcccatcatancctgaaactcagtttttgagggttntctgggggtcccttg

SEQ ID NO: 5943 - DNA, 413 bp, Homo sapiens
  misc_feature 114, 124, 128, 129, 154, 155, 159, 161, 163, 164, 169, 170,179, 190, 191, 196, 202, 210, 214, 226, 227, 236, 250, 258,266, 277, 283, 286, 289, 291, 293, 294, 305, 309, 310, 318,335, 348, 350, 352, 353, 362, 370, 393, 395: n = A,T,C or G
ccctttcgagcggccgcccgggcaggtacttttttttttttttttttttttttttttttttttttttttttttttttttttttttttttttttttttttttttttttttttttnttatattttngggnnaaaaaaaaaagggtttttttttttnntttntngnnaaaanncccgggggnaaaaaaaaaanntttcnatttcncccccccnaaantttttttttttnnttttataanaaaaaaaaaaaaantttttttncccccccnaaaaaaaaaantttttnttnccnancnnaaaaattttcncccnntttttttnaaaaaaaaaaaaaaaanaaattttttttgngncnnaataaaaangggggggnatatttccccctttttttaaaangnggggggaaaaaaaaaaaa

SEQ ID NO: 5944 - DNA, 588 bp, Homo sapiens
  misc_feature 33, 34, 35, 44, 45, 46, 52, 53, 171, 220, 222, 292, 313,341, 465, 471, 496, 504, 553, 579, 585: n = A,T,C or G
ccctttcgagcggccgcccgggcaggtactttnnnttttttttnnntttttnnaattcaaactgtgaacccaaaagtatttgaggcaggtttcaatcaattagaaagtttattttgccaaggttaaggattcacatatgataaagccattcatatggtttggggaccttanaattttattttgttttaacattctccctcttctggccaaggtttgccananacagcatcaatggcctccaaatgtttattttgttccataacattgccagggctaaaggactgtctgcctnaggtccatcctgtccctcggngggacactctgtggcagagggacttaanagtcaagagacttatagccaattaaatattccaggccagacaggaatgaacatggacaggcattcattatcccgtaatttttttggtggtttaaagagccaacaaacaaaaagccgaaggcganggtacnaaactgaattatatttaacttctgngtgttganctgctgcaatctttgggtttaagttaccagacattaaaacaattccctnttttaaagccttaacattggttctgnaaaaanaaa

SEQ ID NO: 5945 - DNA, 491 bp, Homo sapiens
  misc_feature 327, 421: n = A,T,C or G
cccttagcgtggtcgcggccgaggtacgttgctcagctcctcccgcttcctcttggcgcggatgtgcgtccccacccttttcttgataaatttgagggcccgtttgtccttggagaccttcagtaactccatggcgcgccgctcgtactcggagctggatgaggatgagtcgcaggctccctatgaccccaacggcaagccagaaaggttttactacaatgtggagtcctgtggctctctgcgtcctgaaaccattgtcctgtcagccctccaggattgaagaagaaactgagtgatttacaaactcaattaagccacgagatccanagtgatgtgctaaccataaattaactgcagcttgcctgcttcagcaaaaacggagattcaggccagcagctggatatgggggtctctcttcaanactcttctcgtttctgaagaaatctaagtctactgttggttgagcttctttggcaagacatcaagtacct

SEQ ID NO: 5946 - DNA, 505 bp, Homo sapiens
  misc_feature 57, 67, 70, 73, 75, 77, 79, 122, 123: n = A,T,C or G
ggatatctgcagaattcgcccttcgagcggccgcccgggcaggtacatcaatatggncctaacatanagnggncnantnatattttgaaatcaactctaggaaaagaatgttttactaaagnnattcatgaaaaataagtggtgaatttaaaccccagggctatattatatagaattatttttaaattgaaaagttatgttcacatgttccactcaacaaataaaataattataccttttgtgagccatgaggtctgtaatttatgagagactcattaagttttatagatgtgaagaatctagaggcaaatttgcaaactgcttatttaaaaatattgtaaaaaacaaaacaaaaaggaaaaacaataacttccctaaccgtgcttagaaaactttctggtcactatgtagcacagaaacccaaataccttattaagcacatggatataagaggacttatattatttaaaaaaaaaaagtacctcggccgcgaccacgctaaggg

SEQ ID NO: 5947 - DNA, 263 bp, Homo sapiens
  misc_feature 227, 236: n = A,T,C or G
cccttagcgtggtcgcggccgaggtacccagtaatcacataaattctgcaatcatctgtttatttagcttaactgtttttttttatttgttgaagttgtgttgtatttcaagtctttttcttattgggttgaccagacttggtaaaatctgtaagaaaagttccataattatggggaagatttctctgaattggctaaattcctgtagctgaaaaaaaaaagaaaanaaaaaaacnccagcaaaaaaaaaaaaaaaaaaaaag

SEQ ID NO: 5948 - DNA, 467 bp, Homo sapiens
  misc_feature 454: n = A,T,C or G
cccttagcgtggtcgcggccgaggtacagttgttacataattatataaaataaagcttgtaaaagttctattctatctactctataaagtttatacagattgagcatccctaatctgaaaatccaaaatccaaaatgctccaagatttgaaacttttgtggctctgatatgacatcaaaagtggaaaattcccacctgacatgttgctttctgatgattcaatgtacctttctgcttaatagttagaaatgagattataaaacactgacattgatttttcttgtgactgattaaatgagtcacactagtttatattcatatcatatatgtatagcattccagagtaaaactcttagacatgtttcaaaggggagtggaacatttgttaaaatcctggttcctcactgggaaagttggaaaggccagaaattggagctaacagtgaatctaagangtagaactagacc

SEQ ID NO: 5949 - DNA, 608 bp, Homo sapiens
  misc_feature 501, 547, 594: n = A,T,C or G
ccctttcgagcggccgcccgggcaggtaccattcatttaaaggcataaatgtccaatggggccatcttgtgatacatgcactgtcacaggaaaagtttccaggaaaagtcaagccagggcttcacagaagatcaaaagaaagagacaaggagaagctaagtgtattagtcaggattctctaagggacagaactaatagaatatatatacacacacaaacacacacacacacacatatatatacatataaataaaagggagtttattaaggagtattaactcacacaatcacaaggtcccacaacagggccgggccatctgtaagctgaggaacaaggaagccagtctgaatcccaaagatgacaaacttggagttcaatgttcaagggcaggaagcatccaacacaggagatagatgtaggctgggaggctaagccagtcaagacttttcacgtttttctgcctgtttcatatcctagctgcaatggcagctgattagatngtgcccaccccagattaagggtgggtcttgcctttcccagcacacntgctcaatgtttatcttctttggcaacacccttacagacacactcanggattaatattttt

SEQ ID NO: 5950 - DNA, 178 bp, Homo sapiens
  misc_feature 47, 63, 111, 114, 118, 119, 126, 149, 174: n = A,T,C or G
cccttagcgtggtcgcggctcgaggtaccaacggcacaaaagatggngcttggccttgcccanctctttccctgctactttcactgttgagctatatcttacctctacttnccntcanncattgtnggactctttcaccattctggatntaggaacagttacctatgtgtgaanctta

SEQ ID NO: 5951 - DNA, 437 bp, Homo sapiens
  misc_feature 262, 364: n = A,T,C or G
ccctttcgagcggccgcccgggcaggtacttgttactcttacagatgtctcaattaattttaacctctatccctaatggtgtttaaattttggtaaagaaaaattcattttttctttattttccaagaaatgggtaagctatctttgtccctatgggagatgtggacagagaaaactttctgtctctgatgtcttttgtgtgagacaagattttaggaaataaataagtggtgcagggaattgtgagattacatttcacctncttttctggctctctctcttttatataatctttatctctgcttctaacaatctccttatcagaatttctaacatatgtaatgatgagagagagaaaaactgncccacaggatcaaatttcatttctaatctggagaaacaggagtctagttttccaaacatttttattctaaaaa

SEQ ID NO: 5952 - DNA, 610 bp, Homo sapiens
  misc_feature 377, 576, 594, 610: n = A,T,C or G
ccctttcgagcggccgcccgggcaggtactaacaggtccatctggttttctcatgttttctccattcattaaaaaagaaaaattaaggtcttttatatatttccaaagacaagaaaaaaactacagtctctattagtaagaattcatgctccatgcatgagaagtttgacactgttttaaaggatcctgttcctgccacttgttgtcccccagggccaagtcctactgacacctgttggaatttcttgcacttaggagcggctctctatggagagaggtccacatcaaaatttagacgttgtcaccttttttgaactagataaaaccagtaaggatacagacaataataaaaggctttccaactcagcagaattaanaactagctcttggagtatatacatttgcactccaatatcaacactagcctatccactttgagtcaaaatttgaaaggtaagaatgtaattatgaaaatgtgcacaaaatgttaaatactaatggcaaataaatatatcttaatatgttctaacaagcaaacatatattcaagataatcagccctgctttattaaagaangaaaagatccaaattgtntttgtggggtggggcn

SEQ ID NO: 5953 - DNA, 311 bp, Homo sapiens
ccctttcgagcggccgcccgggcaggtacgcgggtcatagttaagatctgtgatacgaaccatagatattgtctgacaaagcagaaatcaccaagtttcccccttttgaattaccaccaagaagtgttgaaacaccaaatagatatcatgttattttgggcatttgcagttttcttccctgctgcatgtaatgtctcagaatcaacattcttttaaaatctagactatattttgaggcaatgaattacttatattcaacttaggcttgttttgacattcagtagaactttaagttcaatctaaaggcttca

SEQ ID NO: 5954 - DNA, 591 bp, Homo sapiens
  misc_feature 21, 23, 24, 33, 38, 40, 47, 157, 170, 217, 222, 265, 284,308, 330, 332, 340, 343, 357, 368, 378, 389, 390, 394, 414,423, 432, 438, 451, 455, 460, 468, 469, 480, 492, 497, 498,509, 510, 526, 529, 544, 567, 572, 579: n = A,T,C or G
cccttacgagcggccgccggncnngtaccgcangggananatgaaanattataaccaagcataatatatcaaggactaacccctataccttctgcataatgaattaactagaaataacttgtgcaaggagagccaaagcttacacccccgaaaccanacgagctacctangaacagcttaaagagcacaccccgtctatgtagcaaaatagtgggangattnataggtagaggcgacaaacctaccgagcctggtgatagctggntgccaaaatagaatcttanttcaactttaaatttgccacaganccctttaaatcccttggaaatntnaactgttngtnccaaagaggaaacngtttttttggncactatgganaaaaaccttgnnatanaagaagtaataaatttaccncccatggtnggccttaanaagcangccaccaattttngaanagcgnttaaggcnnaacacccactnccttaaaaaatncccannacttttaactnnaactcctcaacacccnaantggaaccattctatnaccctatatgaagaaactaatgntagtnttatttnacattgaaaaac

SEQ ID NO: 5955 - DNA, 285 bp, Homo sapiens
  misc_feature 56, 111: n = A,T,C or G
cccttcgagcggcccgcccgggcaggtacttgcttttttttttttttttttttttnggagacggagtcttgcactgtactccagcctgggtgacagagcgagactcctctnaaaaaaaaaaaatccaaataaagtcttctgtaaagtatggacacctatgccaagtaatgacataggaaaaaactacaggttttatagttttaagagatgacaggattataaaaagcaggtaagaattagtaaatttgggcccttcctttgagatattatgattaagaatcttta

SEQ ID NO: 5956 - DNA, 640 bp, Homo sapiens
  misc_feature 75, 106, 109, 120, 129, 133, 135, 142, 146, 153, 160, 167,172, 176, 178, 183, 193, 202, 216, 218, 220, 228, 242, 250,260, 261, 264, 269, 286, 296, 298, 310, 318, 323, 327, 329,336, 340, 341, 354, 362, 369, 370, 377, 379, 380, 387: n = A,T,C or G
  misc_feature 392, 393, 396, 399, 407, 415, 418, 420, 426, 427, 428, 435,437, 442, 443, 457, 462, 463, 469, 471, 484, 488, 496, 500,501, 509, 519, 525, 527, 530, 551, 558, 569, 570, 577, 592,607, 616, 619, 626, 627: n = A,T,C or G
gatatctgcagaattcgccctttcgagcggcccgcccgggcaggtactttttttttttttttttttttttttttntttcctttttttttttttttttttttttttnccnatttatcgttntttattatnaaantnatgaccngggngtaaacntacttgngaaaatntacancaantnggggnttataacacntgaccaaanatgacattaacacntncnctgttcanattttggggtttanaggtcaanaacaaagatnncanacaanactttttctaaacgggnccccttgcantnggtcccgaattncaaaaatntccanttcnancttgggncagnncgggaatttttancaaaaaangaaaccnnagcaaantnnttttttnaaccnnttnagnaaacaagntttttatnacncnttttgnnnaggcccncnccccnnaaataaccttttanaaaannaatttntntttttttgggttnaaanaaggtttntaannggtgggcntataaaaccntggggncnagnacccctttggtttttgcaaanccccccnaaaaaaaaaanngggtttnccccccctttttttnttaaaaaaaaaaatnttttagggnccntaaaaannggcccaaaaaaaa

SEQ ID NO: 5957 - DNA, 133 bp, Homo sapiens
  misc_feature 90, 94, 107: n = A,T,C or G
cccttagcgtggtcgcggcccgaggtactttttttttttttttttttttttgagcagttaacattcctttattttagtttcaagggcggnggangggagagaggganaaaagatacacggaaacttacagcaa

SEQ ID NO: 5958 - DNA, 370 bp, Homo sapiens
  misc_feature 236, 252, 254, 313, 322, 329: n = A,T,C or G
cccttagcgtggtcgcggccgaggtacttaagaaaaaaacagtataccctattcctttaaaagccaaggtaaatttgaaacctataattgataattaaaggtattcttcgtaaccctgtaacactctaataccactttgttgtcaagtgtagtcagtgtaaacaagggcgtatcccgaaagcactgaggccttcctatcaaaaatccttaacccagtaacccgcaagatggcccanatgcatttcaatctgnantggcaagctgctttgctaatgaaaaaaaaaaaaaaaagccttctataccaattctaagntaattttanactaaancaagggtcttattaatagccaaagggataattggaaaatcc

SEQ ID NO: 5959 - DNA, 790 bp, Homo sapiens
  misc_feature 565, 594, 622, 664, 691, 697, 701, 749, 754, 755, 760, 769,770, 772, 786: n = A,T,C or G
cccttagcgtggtcgcggccgaggtacaaggattttgaagaaaacgaatgtggagattaggccactggactcagaaataaaatccagaataatgtaaaccacattctgaagctgtcactcatatctgagtctcaccttgtgttgcagatagtcgccatgtcctcagcacaggaacaggtggctgtcttaatgtcattgatgtgcagacaggaatgctcatctcctccatgacatcagatgagccccagaggtatagtttgtgagttactgggggcgaagacatttacagacatgttcatgatcacttcatttggggcttacattggccagttcaacatatccttccttcatgatgaaagaaaggactatttctaaatcattcttgcaggtgctttgtctgggatggaaattcccgttttatctggcagtcagtctggtgaactgctcgtttgggacctccttggagcaaaaaatcagtgagagaatacagggccacacaggtaagcagctactgcagttgccttgatctttgctctcaagataatgaactcaagcctgccttttncatcaggggaacaatacctcttttttggnccaaaaaacaccccatggtttttcattntcgtaaaacatgttcctggagccttttgattggccaagtgantctgcattttgtaggtacctcaagganttaaanttanttttaaccagcccattgggcctccaaaaaggaagtctttacttttatnttggnnaattnaaaaccatnntnaagctattattttnttaa

SEQ ID NO: 5960 - DNA, 471 bp, Homo sapiens
  misc_feature 223, 289, 303, 345, 370, 407, 433: n = A,T,C or G
ccctttcgagcggcccgcccgggcaggtacttttttttttttttttttttttttttggagatggagtctcactctgttgccaggctggagtgcagcggtgtgatcttggctcactgcaacttccgccccctgggttcaagtgattctcctgcctcagccctccaagtagctgggattacaggcatgcaccaccacacctggctaatttttgtatctttagtanagacggggtttcaccatgttggccaggatggtcttgaatctcctgacctggtgatcttcctgcctnaagccttccaaagngctgggaaacagggtgtgaacccacccggccctgggccctantgaattttttttttttaaacccacnccataaatctaaagcaaagggtattgccaaagatttnagcttggggccagggtcttgaccccnaccctgagcatcttattagctttcccatcaaggggaat

SEQ ID NO: 5961 - DNA, 186 bp, Homo sapiens
  misc_feature 54, 102, 116, 122, 123, 138, 139, 141, 147, 148, 156, 164,171, 172, 175: n = A,T,C or G
cccttagcgtggtcgcggcccgaggtacttttttttttttttttttttttattncttttttttattttttttttttttttattttttttttttttttttggnaaaaacccccaaanttttanngtttaataatgaatnncncaactnnccaaggtncaaaaatntgaaaannccntttttaaaaaa

SEQ ID NO: 5962 - DNA, 422 bp, Homo sapiens
cccttagcgtggtcgcggccgaggtacatacctgttggcaaagattgggcagcaagccttgtggaccaaactggggttactctccaggaaagagcaaattagtggtcacaacattcagatcttagagccagaagaacaggactacagcagagcctcacttcaagacaactcggaggcgctggctcctctgaaacccagacgctgtcaactccctgggcccaggagtcacaaccgctttcgtgctctgggttcttcacttcttgtgatcagctccacatatttttctgatgatgtcacccattctgacttcctacattttgaaagttgatctacaagtaaaatctttcgtgaggcttaaaaaaaagaagaaaagaaataaaaggtgtgctatagggagatggagaggaagagaaaggcccgtt

SEQ ID NO: 5963 - DNA, 786 bp, Homo sapiens
  misc_feature 33, 45, 46, 56, 65, 74, 79, 81, 87, 99, 110, 158, 159, 179,200, 208, 209, 210, 212, 222, 226, 228, 229, 230, 232, 233,237, 242, 243, 251, 254, 255, 259, 260, 261, 264, 274, 279,283, 299, 329, 342, 345, 362, 387, 391, 394, 405, 410: n = A,T,C or G
  misc_feature 420, 442, 449, 453, 465, 468, 470, 471, 476, 491, 499, 512,533, 538, 545, 556, 558, 559, 564, 574, 586, 617, 627, 628,629, 630, 633, 652, 658, 682, 685, 692, 695, 699, 700, 732,759, 771, 775: n = A,T,C or G
ccctttcgagcggccgcccgggcaggtacctgnctcaaggcaaanntatgactganttcatcctnacctctggnggccngnaaaagngggttatagaanaacaagaggcntctagatctttcactgggttatttggagagaaacatctcctacacganngccagtttaacaagactggncaaggagggtatcttatctanttcacagnnntnaacacattgngtcncnnnanntganacacnnaaacactntanntgannnaanatatgtcttntgaanccanccctaatgaaatgaanatgtgtgattaacctgacaggaacattagngagagcaaccgtntanagtctctgggagcaacncatgaacaaactgagaattttcatnttanaanataacagatancaatntgtttttaanttggaagaaatacattaactgnactcaanaatntaatgtgtccancanannaattngttgaagcagaaganaggggctntcaaaactttggngaataggccattgggaaatcntggtnatggggngggggaaaaanannaaaanggattggaanattttttaaagnggacttttggagaccttcctcaaaggagggntaaatttttnnnnttnccggaatgggggaagattngagggnaaaagggacagaaaaacttttttngangaaattntgntcannaaaacctcattttttttggcaaggggaataanaaaattttgatcttagaaatcccccancatcaggggttngganaaaacccaggg

SEQ ID NO: 5964 - DNA, 297 bp, Homo sapiens
  misc_feature 95, 100, 204, 263, 267: n = A,T,C or G
cccttagcggccgcccgggcaggtacttttaggcagctcacagagctgatctcaactttgagcaccatgggaggtaaagacctcagggcagttgnctctngtgcagctaaagtgtttagaaagccagaacgaagtgaaaggaagaccctagagtgggtcagctttctgccaaagatagagaatatagctatagaatgctcccancctacagtatagagctgttgttgggaagtggctgctcaaccagtgcctgtatgccctancctntcacacagttggactacatgactagttctt

SEQ ID NO: 5965 - DNA, 160 bp, Homo sapiens
  misc_feature 104, 114, 127: n = A,T,C or G
cccttagcgtggtcgcggccgaggtacgcggggagagcaccttggcgcgcggagctggcaccttggcgctgttggtggcggcggagacagctgtgaagtgtgangttctttgtntgctggcagctangggcgacgaggcgggacgtcatggaagtgaagg

SEQ ID NO: 5966 - DNA, 316 bp, Homo sapiens
cccttagcgtggtcgcggccgaggtacccatatactaaccagtttggggcacataaatgttacaagggagaaaaaaagatttagactagcatgtgaatttcatcaagcagagacaccttggttaaaaagcaaaacttgtggggtggagaggaaggaaaaaaggaaaacgtaagaaaaaggaccggagtgctcactgtttatcattatcagcccttttttttgagacggagtctcgctctgtcacccaggctggagtgcagaggcactatctcggctcactgcaagctccgcctcctgggttcacaccattctcctg

SEQ ID NO: 5967 - DNA, 306 bp, Homo sapiens
cccttagcgtggtcgcggccgaggtacaaactgttaaatttgtcaataagtgacaaaagaattccacaaaatcatggaactctcaaactcaagtaaaccaaaaaatagttaaccaaataatgatctccgtcagacagtgatttgaatgagagatcatatcgtaagtttaaaaagtaaaattcaaatgtaatgtgattgaaatacctctgagttttacattactcctcatctgtataataaaagagaggatgagtgtgaaaaagttaagagacatttaaaaggtcatactggaaatttatctttgga

SEQ ID NO: 5968 - DNA, 418 bp, Homo sapiens
  misc_feature 100, 106, 112, 123, 124, 140, 141, 165, 181, 182, 183, 189,206, 217, 218, 226, 232, 236, 239, 263, 273, 274, 281, 284,286, 290, 298, 301, 307, 316, 317, 331, 337, 339, 340, 342,350, 363, 382, 396, 416: n = A,T,C or G
cccttcgtggtcgcggccgaggtacgcgggtattgggagaatctgctgccagcttcaggcagacctttctgtccttcgctgtcaaagccagacttataangagtangtgaangcaaaaccctnnaaaattattcgaacanngaaaaaaaaagttttgcctcttcnagccctggacccttgnnnaactcngtttccctcaccctttncaattcacttnnacccaatngtcccncttngcnttattccttccacaagccttggcntagatgacanntcttggnagngnttgnccttggcnaanacctcncactattanncactttttcccaangacccncnnanccaaaatnttgttaggttggnccaattaattttggaaganccttccccttggcnttagtagggggtattaaaanac

SEQ ID NO: 5969 - DNA, 326 bp, Homo sapiens
cccttagcgtggtcgcggccgaggtacctgtaatcataccaggcttctgattttacaatccgggtttaagctgtttacatttccaaagtaatcaacttttgctctcctaaatccctcgtaatattcaaagtaaaactgatggaattttttgataagttactacaagtttagcatcactgattaccttcaatgcacttgcaagtgaaccacagctaatctgtaaattaagaattcatctacaaatggaagcaagaaagaaaaaaagttgtttttcttaagcaaagttggaaataaacagaaaatctttttctttaaaggatggtgga

SEQ ID NO: 5970 - DNA, 406 bp, Homo sapiens
  misc_feature 126, 131, 174, 378, 381, 389, 395: n = A,T,C or G
ccctttctagcggccgcccgggcaggtacttttttcttatgatgattggtgtagaaatgtgtgatttgggtgggcttttacatcttgcctaccattgcatgaaacattggggtttcttcaaaatgngtgtngttcataacttcttttggggaggggggttgttttcattctgtntattttctgaggactcctacaggagccaaatttgtaatttaagagacacttaattttgttaatcctgtctgggacacttaagtaacatctaaagcattattgctttagaatgttcaaataaaatttcctgaccaaattgttttgtggaaaataagatgtgttttgcaatttgaagataatcctatcctgttcccaggaaaggcncanaaaggtangcgganatggccccatt

SEQ ID NO: 5971 - DNA, 765 bp, Homo sapiens
  misc_feature 279, 300, 329, 336, 372, 374, 382, 383, 393, 403, 408, 421,422, 424, 464, 510, 538, 554, 596, 607, 636, 699, 754: n = A,T,C or G
cgccagtgtgatgggatatctgcagaattcgccctttcgagcggccgcccgggcaggtacacattccatgctgggtcatacctgagtgccagtgggaatataatttggaaggaatacgttgttgaaaaacatcctcttcagacaaatatgaccaatgccttagtcatctattggttatgacaatatcctcttgaacaaaattggtttcgggtctgggttctggggtaccaggattttattttcactggaaggggctttgtgtggtgggccaagaaaacnccttaccgcttcaaatggatnccatgggacctgagaaaatgtcaacatcnaacccanatgaatgagaagccaccagtggaagaaagggcttcnanatagcttnnttcgggattnggaaattcanaaaanggcagccattgannantcaattttcttatgaagacccctgaaaagtcagaaaattncttgacaaattggatttttgggggaaaaaagaaactggcagattantgcttgatgaacaccattcccggaaccnccttcttttggaatgnttttctttaacctgagtaatgccatcatgggcaggggggatnctgggcttggnctatgccctggccaccccaggggaccatnttttttataatcaatgctgcttgcttggggcaatattattccttgaattcagtcaccttttantaaaaacagccaaggaaggaggggtctttgattattaaaaattaggagaaaaggnttttggatggc

SEQ ID NO: 5972 - DNA, 254 bp, Homo sapiens
  misc_feature 33, 45, 51, 53, 54, 55, 96, 197: n = A,T,C or G
ccctttcgagcggccgcccgggcaggtactttntttttttttttntttttntnnncttatataaaattatttttcttcaagctttttttacctcanaaaaatcctctttatttttacaactttctttacatatttttttatttcctggttccatttaccttgttttatacataatgtttaaataagctttgaattanacataaatttttcacttttctttttaaaaggacacacttctctgtttttgttttttt

SEQ ID NO: 5973 - DNA, 127 bp, Homo sapiens
  misc_feature 53, 97, 119: n = A,T,C or G
ctctagtatgcatagctcgagcggccagccagtgtagataggatatcttgcanaattcgccctttcgagcggccgcccgggcaggtacgcggggcangatgatggaagaaaaattactncatgctga

SEQ ID NO: 5974 - DNA, 599 bp, Homo sapiens
  misc_feature 452, 461: n = A,T,C or G
gatatctgcagaattcgcccttagcgtggtcgcggccgaggtacataatacacgtaacataaaaaatatgtattaactgtttatgttatcagtaaggtttctggtcaacaggttactagagttatgttttggaggagtcaaaagttctatgcagattttcaactgcacagagtcgatactgctaatccccaagttgttttagggtcaagtctgtattcaaatgcattcgcaggagttgcctttaacatctacttagactgatttaaccacccctatttactttgccaagaatgtagaggtatattaaaatcaaccaccaacactgtttctaccaatgtctttctgttattcaaatgattatagttttgtcgacttttagtatttggcacatgtgttatctagcttgcataaaataatcttcactgccttgttttaatcattttttattctgnattcgtgtnttgtttaacaataatacttttcttctcacctcttctgggctaaggaataacacatacatatttgctaatctgttactttcaagctttctatcctgctgtcttaagaaacttcatatgtacctgcccgggcggccggtc

SEQ ID NO: 5975 - DNA, 176 bp, Homo sapiens
  misc_feature 87, 93, 113, 115, 117, 118, 120, 126, 128, 137, 140, 153: n = A,T,C or G
cccttagcgtggtcgcggccgaggtacaatatcattattgtgaagatatgctatagctgatgcgagactttgaatgatccaccttgnctattntcttgagaaatgccctaatntntnnanaatatntntgagttctncancctcacaaagctncatcacaagatacattttctttg

SEQ ID NO: 5976 - DNA, 458 bp, Homo sapiens
  misc_feature 221, 223, 242, 243, 244, 245, 246, 247, 248, 249, 250, 251,252, 253, 254, 255, 256, 257, 258, 259, 260, 261, 262, 263,264, 265, 266, 267, 268, 269, 270, 271, 272, 273, 274, 275,276, 277, 278, 279, 280, 281, 282, 283, 284, 285, 286: n = A,T,C or G
  misc_feature 287, 288, 289, 290, 291, 292, 293, 294, 295, 296, 297, 298,299, 300, 301, 302, 303, 304, 305, 306, 307, 308, 309, 310,311, 312, 313, 314, 315, 316, 317, 318, 319, 320, 321, 322,323, 324, 325, 326, 327, 328, 329, 330, 331, 332, 333: n = A,T,C or G
  misc_feature 334, 335, 336, 337, 338, 339, 340, 341, 342, 343, 344, 345,346, 347, 348, 349, 350, 351, 352, 353, 354, 355, 356, 357,358, 359, 360, 361, 362, 363, 366, 370, 371, 376, 392, 395,397, 429, 446: n = A,T,C or G
cccttagcgtggtcgcggccgaggtacgcgggtgcctgtcttcatgagagcactgttgtctgcgccgggaaatcatcctctgacctgttcacaagtcttctagatgaagattttcagcgggtttggatctatttaaaaagcggtaactgcaaagaggcacctaatccacttgatttgcctgtttttgagattctgattatcctgttacatgtacctgcccngncggccgctcaaaagggctnnnnnnnnnnnnnnnnnnnnnnnnnnnnnnnnnnnnnnnnnnnnnnnnnnnnnnnnnnnnnnnnnnnnnnnnnnnnnnnnnnnnnnnnnnnnnnnnnnnnnnnnnnnnnnnnnnnnnnnnnnaancccnnaaccntaaaatataaaacctnaantncctaataaattaactaactcacattaattacntttcccctcactacccncttttcaatcca

SEQ ID NO: 5977 - DNA, 303 bp, Homo sapiens
ccctttcgagcggccgcccgggcaggtacgcgggctcgaaaatgtggtgaaggtctcagttgttatttcagaaatgaaaccaaaagaaacacaatagccgaataagaacaatagagaatcccttaaaagactagaaggttaaaaggaggaaaattattaaattaaaaagaaaggaagaatgatcaaaagcagcaaccactgaagatatgcagagcagatctagcatacggataataggagtcactgaagaaggaaaccaaagcaagaaagcaagccaacacttaaaattataactccaaaaaa

SEQ ID NO: 5978 - DNA, 430 bp, Homo sapiens
  misc_feature 390: n = A,T,C or G
ccctttcgagcggcccgcccgggcaggtactttttttttttttttttttttgataaaagtatttttggaatctaatttaatgttcagggatccattaagcatttcaaggaagacactgacattactaaattgttcagcaatgcacagaatttgaaaatacacttgaaaaatagaactttgatataaacttgtaaaatacgtaggatgtataccactgattaaataaattaaaaaactccattcccctattcagtgctgtgttgggtagaaaaggggtaagtgaacaaacaagtggaaaagaaagttaaggaagaacatagagaaaaggattgttttgcgcagacatctggctttgcttccccaaagctactgagtacaaaatttattgcngtaaagagattaaaactatttcttatgtaaaccaaaatca

SEQ ID NO: 5979 - DNA, 308 bp, Homo sapiens
cccttagcgtggtcgcggccgaggtactcttattaaagaaaagtctttactgttgagggcactgggtctctggagtagatttagaagacacatatagaatagggtgtgatttcttacaagtttctttttccaatttgcttgaagtttcttttccttctttaacttctgtttgaagctttgattcagcagctaacctgggagagttaggggtgtttccacttctttcacttaaggcctcagcgtcagcgggagctcctatgagtttcacacatttcttttccttcttcagctgcatatccacgggcaga

SEQ ID NO: 5980 - DNA, 567 bp, Homo sapiens
  misc_feature 429, 533: n = A,T,C or G
ccctttcgagcggcccgcccgggcaggtacttaacaatttgtttctgtttttttcttatttggatatggctcagacatttaatgagtattatttaatttaacataactttaagattttaaattacatgaaaatttatttgtaaatgcttactctgtttgcaattacctaatttatttattttttaacaattataccttgattacctatgaaaattgagatactagacatagctagttattaggtttttattaacgaattttattgcctgttaatatcaggaatttacctaagtaagaactttaaggttaaatacataggtcaataagtcctattgtataaatcctgtcaataagtcaggagacatggctgattttattaaagcaacaatattaaattaatcttatcaaaggggttaaagattatgttgntttaggctttatcaccttattacattaaaagatctagcagaggcatatataaaactgtgtgaccagtaaactcaagtgagaatgtatgttgacacttttgaagnatatttctaattttatttttcaaccattttttaa

SEQ ID NO: 5981 - DNA, 664 bp, Homo sapiens
  misc_feature 378, 443, 476, 530, 580, 642: n = A,T,C or G
cccttagcgtggtcgcggccgaggtacagatggggtttcgccgcgctagccaggatggtctcgatctcctgatctcgtgatctgcccacctcgacctcccaaagcgctgggatgacaggcgtgagccaccatgcctggcccgtatctggataattttaaaaaatttttttgtagagacaaggtctcactatgttgcccaggctggtattaaactcctgggctcaagcaatccgcccgcctctcaaagtgctgggattataggcgtgagccaccatgccaaagccaaaagagtaatttttaatatataaaaagctcaggataaaaaaaggcaggaaggataccaagcagaaaaataggcaaaagttgagctgggctcancagcacatgcctgtaatccctgctacttgtgaagattgaggtggggaggaaatgcttgacccaangagcttcaagaccagcctggggccgacaccagnaccgacccccatcttaaaaattaaaagaaaaaatagggccaaaaattacaagcnagatgccgttcacaaacaggaaataccaatggcttcatataaaatctggngtccaaccttactaaataatccaaagatgtcaaaaattgaatacttattctttcatggtttnggaaaacatgtaaattaaaaaa

SEQ ID NO: 5982 - DNA, 414 bp, Homo sapiens
  misc_feature 137, 167, 266, 267, 268, 269, 270, 271, 272, 273, 274, 275,276, 277, 278, 279, 280, 281, 282, 283, 284, 285, 286, 287,288, 289, 290, 291, 292, 293, 294, 295, 296, 297, 298, 299,300, 301, 302, 303, 304, 305, 306, 307, 308, 309, 310: n = A,T,C or G
  misc_feature 311, 312, 313, 314, 315, 316, 317, 318, 319, 320, 321, 322,323, 324, 360, 370, 372, 400, 403: n = A,T,C or G
ccctttcgagcggccgcccgggcaggtacagtaatttatttgtcgttagtgttaaagattaagcatagtaactgactcttaagtgttaaataatgtagaagtaaaaaaattttttttaaaaggcttaattttggganggggggggactttatttttctgtttacagngtaattacccttccttccctcctcttctccccccacacccaacaaaatacagtttggaattcactgaaacagtacctcggccgcgaccacgctaagggnnnnnnnnnnnnnnnnnnnnnnnnnnnnnnnnnnnnnnnnnnnnnnnnnnnnnnnnnnngcgtaatcatggggtcatagctgtttccctgtgtgnaaattgttantncgagtcacaattttcccaccacaaccantancgaagccgggg

SEQ ID NO: 5983 - DNA, 767 bp, Homo sapiens
  misc_feature 330, 394, 400, 433, 453, 503, 516, 549, 561, 654, 660, 675,680, 728, 738: n = A,T,C or G
cccttagcgtggtcgcggccgaggtacgcgggaaactgtcaggttgccgtctaggtagcggttgtgcttgctgaggctgcacttgctgacactgcagctgcgacgcggctaagaggcgcagagcgaggagtcgggatttggtcgcgagcggcgacgagcatttgtgcagaatgtcatcagatgaggagaaatactcacttccagttgtgcaaaatgactccagtcgaggcagttctgtctcttcgaatcttcaggaagaatatgaagaactgcttcattatgctatagtgactccaaatattgaaccctgtgcttcacagtcatctcatnctaaggggagaattggtgccagatgtcagaatttctacaattcatgatattcttcatagtcaangaaatnactctgaagtaagaagaaactgcaatatgaaanttggaaaaggatgtgatttncatatttcaagtcattcaaagacagatgagtcatccccagtggtattcgncaaggaagccttnttacccagtcatggatttttttcagttcacatntttagctgactntttcttaccagcaacaaaatctagtcatccagaagcccatgaaatacttggggagcgaatttcttgtttttgatgaaaaccttcgaaaaaggnaaatgngcttgatctttgggngtcanggcttaaacaaaccttttatttttactaataaatggagacttaatttntttacttgcnccccaatgggaatgagaaaaaaaaaaaaa

SEQ ID NO: 5984 - DNA, 361 bp, Homo sapiens
  misc_feature 133, 155, 197, 227: n = A,T,C or G
cccttagcgtggtcgcggccgaggtacccttacgaatgccacgattgtgggagaaccttcaggaggaggtcgaatctgacacagcgcataagaactcatactggagaaaaaccctacacatgtaatgaggtgngggggaaaatccttaaccaatnagctttttcttcttacaattcacagggagaaatacataatgngagaagaaatcctatgagtgcagtggattngtgggaaaatcctttaatgttctctcgtccgttaagaaacacatgagaacttcacacctggaaaaaaaaccctatgaattgtaatttatttgccggggaaaaatccttcacaaggtaactcctaccttttctgt

SEQ ID NO: 5985 - DNA, 525 bp, Homo sapiens
ccctttcgagcggccgcccgggcaggtacacattcttttcttcagcatgtggatcattctcaaagatagatcacattttaggccacaaaacaagtcttaaaacttccaaaaagagaaggaaattatatcaagcatgtcctctgaccaaaattgaataaaactagaaatcaataacaaaaggaactttggaaactatacaaacacatggaaattaatcaatatgctcctgaatgactagttggtcaataaaaaaatttaaaaattaaaattttttgaaacaaatgaaaatagtaataaaacatatcaaaatttatggaatacagcaaaccatcactaagaaaaggtttacagcagtaagtaactgcattaaaaaggtagaaaaatttcaaataaacaatgatgcatcttaaagaactaggaaagcacctactaagcaaaccaaaagttagtagaagaaaagaaataataaagatcagagcagaagtagtgaaattaaaactaaaatcaattacaaaatattaatga

SEQ ID NO: 5986 - DNA, 653 bp, Homo sapiens
  misc_feature 46, 47, 51, 94, 115, 116, 122, 127, 135, 151, 160, 177, 227,247, 248, 287, 296, 297, 304, 305, 309, 316, 324, 327, 328,336, 337, 355, 367, 369, 373, 395, 406, 412, 414, 417, 425,427, 447, 466, 468, 469, 470, 474, 480, 496, 501: n = A,T,C or G
  misc_feature 516, 520, 523, 531, 537, 540, 542, 543, 548, 552, 567, 569,574, 590, 610, 617, 630, 641, 642, 648: n = A,T,C or G
cccttagcgtggtcgcggccgaggtacacccggcagcacaacgagnncagncacaactttgagagcatgtcacctgccaagccagtccagcctnacagagaacggaaaagagccnncaaatncagcnagcacagnatgagttagaactcanactcccatnaacttagacttactagnaccatcctgctttacagatttgattgctttggaaagacttcaagccttgncacttgctgtttttctcacnngaaaagtatatggctttctgcttttgatccaaaccccancaaagcctnncttaagnntccngaccttnctttgggnaannaggttttnnctttttcaaggtttttcnaagatgtaaggntnttcnttgaatgcaattttggcatttnaaattccacgnattccngnaantttaaatncntaattggttcctaaaaagantgttggttcttttaacctncnnnggantccatntttatttttaaaccantaaangggctttcttaaaanggcnctncattttanctgggnccnannccctnttcntaaacaaaacttccntnaaaanccggttaaaaaaaatnttgttggcatgaatctttancagtacncttttaaaaaggngctttttttgnncccttncccgg

SEQ ID NO: 5987 - DNA, 614 bp, Homo sapiens
  misc_feature 159, 211, 226, 243, 256, 313, 338, 416, 447, 451, 468, 548,553, 565, 570, 577, 578, 581, 589: n = A,T,C or G
cccttagcgtggtcgcggccgaggtacagttatgcagtcatggctcactggagccttgacctcctgggctcaggcagtcttctcaccttagccttctcagtagctgggactacaggcatgcaccaccacacctggctaatttttaaattttttataaanacagggtcttactttgttgcctgggctggtctcaaattcctgggctcaaggnatcatcccacttcancctctcaaaaactctanaattataaatttnaaccaccatacccacccccatcatcttcttataaagacactaattattgaattcaanacacacactaaatccaatttaattncatctcaaaatccttaactaattataactccaaaaactctctttccaaataaaataacattcttaaattctaaataanccctttaaattttaaaaaaattcttcacaanttanaaaccacaaaaaaacanttaatttataacaaatactcattaaaaatttcataaaaaaaaaaacatttccacttaaacttaaaaaaaaatcaaaattntttcnacccagaaaaanttttncccaaannaantctaaatnccttttttttttttttttttttttt

SEQ ID NO: 5988 - DNA, 288 bp, Homo sapiens
  misc_feature 31: n = A,T,C or G
ccctttcgagcggcccgcccgggcaggtacncgggggaacaacggaggcagaggagctgaagactccagtatgcaactgactacaaggaggtttgtgaggcttcagttgatcgtgagtgtaagtgcttcagtgcgatcaaagttctacgtgcgagagccgccgaatgccaaacctgactggctgaaagttgggttcaccttgggcaccactgtcttcttgtggatctatctcatcaaacaacacaatgaagatattttagagtacctcggccgcgaccacgctaaggg

SEQ ID NO: 5989 - DNA, 711 bp, Homo sapiens
  misc_feature 108, 312, 432, 533, 537, 540, 544, 623, 638: n = A,T,C or G
cccttagcgtggtcgcggccgaggtacgcgggaacaaaaggaactttggaaactatacaaacacatggaaattaatcaatatgctcctgaatgactagttggtcaatnaaaaaaatttaaaaattaaaattttttgaaacaaatgaaaatagtaataaaacatatcaaaatttatggaatacaacaaaccatcactaagaaaaggtttacagcagtaagtaactacattaaaaaggtagaaaaatttcaaataaacaatgatgcatcttaaagaactaggaaagcacctactaagcaaaccaaaagttagtngaaagaaaaagaaataataaagatcagagcagaagtagtgaaattaaaactaaaatcaattacaaaatattaatgaaaggaaaggttggtgttcataaaagataaagtcaacaaacttanggcaaactaaaaaaccaaggagatattaaaataagttaataaaatccagaaaatcaaaagagattttcaactgatcctgcgaaattcaaaggttattagtnactnctngagncaggtttatgccattaaattgggaataaggaaaccaaacccttaccaccagatccaaggccttattaaaaagtctcctntcgagaaaagtcccngattcatggacttcccaggttgaatttactaaacctttttaaaagaactaattccattcttcctcaaattttt

SEQ ID NO: 5990 - DNA, 631 bp, Homo sapiens
  misc_feature 600: n = A,T,C or G
cccttagcgtggtcgcggccgaggtacagtgttttttcaaccagtttatgagagaatgaaaagaatgaaagtgaaaattttacttaacttagggttatgtagctctaggtaatctcttcagaactcccttgcttcaccttctcaagttaatcaacagtggctagtttataactagaaaccacttaccaaattgcctaaacaagaaaactttttaaaataacaatttgctgatctgtccaataactccaataaagttgaatttgctttatttttccaaaaattatgttgtctagataaagactctttgtaagtgtaaatgtatgatatattgagttgatttttagtccctattagagagttgttagacaagttattaaagtttaagaaaatttggattctaaatttccacctgataacatatatgaaatattttatattttcaatatatacttacttatattttgcacactgtatataaactagggagattaagaaatggtttaaggcccttctctggggggatatctgccctatataaaggaaaaaaagaaagggtagaaagagacttaactttttttctatcttccataaaaaacttcnaaaatgttctttttaaaatggaatttttcaa

SEQ ID NO: 5991 - DNA, 470 bp, Homo sapiens
cccttagcgtggtcgcggccgaggtacatctacagtggcaacagcctgcaggataccaaggctcccatgatgcctctgagctgtttcctgggcaatgtctatgctgagagtgtagatgttcttcgagatggaactggacctgcaggtttacgacttcgcctacttgctgcaggttgtggacctggcctattagcagatgccaagatgcgggtatttgaacgttcagtgtattttggtgattcctgccaagatgttcttagcatgcttggctctccacacaaagtcttctataaatcagaagacaagatgaaaattcattctccttcccctcataaacaagttccatcgaagtgtaatgactacttttttaactacttcactcttggagtggacatcctctttgatgcgaatacacacaaagtgaagaagtttgttctacacaccaattaccctgggcattataatttcaa

SEQ ID NO: 5992 - DNA, 310 bp, Homo sapiens
  misc_feature 71, 139, 292: n = A,T,C or G
cccttgcgtggtcgcggccgaggtacagttacctccagtctcttgtgtatctggaatgcacttacttcctnttaaggttcttagagtgtaaggaaaacaaaagctgtagagttctgcatccatggggactgagacagancaaagcacttcctagtatgttcaactggaacatggcccacactgatccatggtcacagtttggaatgtgctgagaagcttcatctacaatcaagtttctcagtaagaagtccccgcagagggagggagtccactgtgtacctgcccgggcggncgctcgaaagggcgaatt

SEQ ID NO: 5993 - DNA, 631 bp, Homo sapiens
  misc_feature 33, 138, 157, 163, 164, 165, 166, 167, 168, 179, 180, 183,184, 192, 193, 198, 199, 200, 202, 214, 220, 248, 252, 259,268, 273, 306, 318, 327, 328, 331, 360, 381, 391, 395, 397,402, 406, 408, 425, 426, 442, 443, 444, 455, 461, 463: n = A,T,C or G
  misc_feature 465, 474, 490, 493, 502, 505, 529, 530, 532, 533, 543, 548,555, 566, 568, 572, 576, 578, 614, 615, 617, 621: n = A,T,C or G
ccctttcgagcggccgcccgggcaggtactttnttttttttttttttttttttttttttttttttttttttttttttttttttttttttttttttttttttttttttttttttttttttttttttttttttttttttnaaaaaaaaaaaaaaaaaantttttnnnnnnaaaaaaaaaannttnnaaaaaaanntttcnnntnttaaaaaaaaantttttnggaaaaaaaattttttttttttttaaangggnaaaaaanttttttttnttttnaaaaaaaatttttttttgaaaaaaaaaaaaaanttttaaaaaccngggggggtnnttntttttttaaaaaaaaaaaaaaaaaaaaanccctaaattttttttttaaanggggtttttntttngnccccnaaantnaatttttttttaaacanntttttttttttcaaannnaaaaaaaaacnctttcnancnaaattatgnaaaaaaaaaatttttnttntttttttanttnagaaaaaaaaaaattttttttttnnannaaaaaaaaanggganaattttntttttttttcntnaaanaaanantctaaaaaaagttttttttttttttttgaaaaaacnnantttnggggtttttt

SEQ ID NO: 5994 - DNA, 264 bp, Homo sapiens
ccctttcgagcggccgcccgggcaggtacgcgggatatttaaaagaaaatagttcccaagaaatgaaactggctccagaaagctgacagctcatcctgtccatgacacttacccacttccagggtcacctgcaaacaccaacttcctagccttacagtatgtgatcttctttgcctggaacccgagggcgcatccagctgctgctatttttgtccctggctttgggctgaactaataatgttatgagaaattttaagaatttgt

SEQ ID NO: 5995 - DNA, 648 bp, Homo sapiens
  misc_feature 143, 270, 384, 437, 515, 561, 595: n = A,T,C or G
cccttagcgtggtcgcggccgaggtactttttttttttttttttttttttttgggaaatgaatgtttatagcagcattagtcacaacagccaacaagcagaaaaaacctaaatgcccatcaattgaatggacaaacaatatgnggtatattcatacaatggaatattatgcagtcataaaaaggaaagaaatactaatacatcaacaaggatgagccttgaaagcattatgctaagtgaaagaagctgggcataaaagaccacatattgnatgattctatttaaatgaaatgtccagaataagcaaatccatagagacagaaagtagacgagtagttgtcgggggctggtaggaggggataatagggagtgatagctagggatntggggtttctttacgggagggagcttaaaaacgttctgcaattagtgatgatngctgccacaactttgtgaaaatgaaaaagggaaattttatgggggggtaaatttttatctcaattttaaaatcctttnatgaacacctgctattagcacaaacagactttcctaagccctgaantaatattggcccttgttgactgcctaacccaatnggttttttacaaatgttttccttctcctttaaaacattaaggggattttttta

SEQ ID NO: 5996 - DNA, 347 bp, Homo sapiens
  misc_feature 63, 74, 343: n = A,T,C or G
ccctttcgagcggccgcccgggcaggtacctaggaggaatatttgctctgtgccatcagccgngtagaaactanaataaccagctgccatattgtgagctgattatgaagaggaccatgtggcaagacactgagggagatctccagccaacaacaactcataagcaactaaatcttgtgatgaaccactggagtcatctggaaagaggatcctctcaccttcaatctttgaaatggctagagctctgatgacagttggattacagccttaggagaaacagagagccggggaaatttgtgcccaggttcctttcccacagacattgtcagataataaatatctntgcg

SEQ ID NO: 5997 - DNA, 366 bp, Homo sapiens
ccctttcgagcggcccgcccgggcaggtactggaaggtgatattaaaggtgaacgtgtattataatggggctgtgttgatttctataagtggttcatattttttcctgcgaatttcttaggatgtaaccattactaacgatggtgcaaccatcctgaagttactggaggtagaacatcctgcagctaaagttctttgtgagctggctgatctgcaagacaaagaagctggagatggaactacttcagtggtaggtagactggctaaagaatgatcatttttctaaaaacgacccgactttcagaaagttgaagccataagtgggtcatttgtgctgtgtcagaaataagttacatattctgaatgc

SEQ ID NO: 5998 - DNA, 692 bp, Homo sapiens
  misc_feature 556, 572, 590, 668, 672: n = A,T,C or G
ccctttcgagcggcccgcccgggcaggtactttcagaccacagctgcagaggggatcgtggtgaatttcaatgaaaatccatttgaatcttgaggttcagatcttaaaaagcaaaggacatgagagaagtaatattgttgcttgaaatttcattgcttatatctaaaagaaactcctatttttaagagaaatgttgaatctttgcaacgtggtggacgctcccacaaaactttctcctgaaataggagataaatgttggaaagaggcaatgtattgagtatgctgatagaggtggagttcagagacaggcaagcatacataagagtcaggatgtttttcaagtattatctttacaaatgagtttcttacagtggtcaatgacaaaccaatttcattcaaagcttgcttcaataggcaatgggtttgatgccaatatgttagctatttactttgaccaccgtatgcattaaaaagaaagaaaaattaaagaatactcaagcagaacctcaacttaaatagccttttcacaaaaagtaatggagggatagactgaaanttaatgggatcaggtntgtgatgaggatctcaanaagtggtttgcacaataatgcaaaatcctcattttaaacagagtcttaaggattggggacctaattaaaattatttgnattnaaaaaaaaaaaaaaaaaaaa

SEQ ID NO: 5999 - DNA, 375 bp, Homo sapiens
  misc_feature 156: n = A,T,C or G
cccttagcgtggtcgcggccgaggtacgctgattgttgctaactgtcctccgggggaacttcaatttagtggtcagcctcaggtgtgtgccattgtaacaaatagcagttaagcttcatattgggtggacaaaagtttccacccactttcagacangttacaaagatatgtagctacactgagcataaaaggaggaaaattgatgaacactatggacagaaagcaggtgaattgctagaactttggctggtttgcttgggttggttgcttaaagattaaggaagaatggaaatagctgagccatcttactacttagtccctcctatagtctgtcatgccaaccttagatccctttggagatgacactaaaagtaa

SEQ ID NO: 6000 - DNA, 397 bp, Homo sapiens
  misc_feature 196, 232, 282, 365: n = A,T,C or G
cccttagcgtggtcgcggcccgaggtacaaaaattagctgggcgtggtggtgggcgcctgtaatcccagctactctggaggctgaggcaggagaatcgcttgaacctggtaggtggaggttgcagtgagctgaggccgtgccattgcactcccagcctgggcaacaagagtgaaactccatttcaaaagaaaggangaaaaaacaaaagcaaaaacaagaaaaacagaacantttattgccccataaggctacctttgatgtatcatagtaaaagaaagcangacaaaaatcagttatgctagaaaagagataacttacggaagttcacttaagggaaatacaacaaaatgctctttgtttttantagaaatattaaaagtatggggtgtggatttt

SEQ ID NO: 6001 - DNA, 485 bp, Homo sapiens
  misc_feature 55, 64: n = A,T,C or G
cccttagcgtggtcgcggccgaggtactttttttttttttttttttttttttagntttgcttanaattagtaatatgtatctttggtaaattggtatctatattttaattttaaatacagtatatatgcatttaagaaaaattcataacaaggcagttgtgctgtgtcattataaaataattatttactgatttcagtatgtcactctgggctaaaaactccaacaaccagaacttgaacaccgtaacccttctttggcctcgctggactcttctacttgaatagactaaaaactctaaaggcataaaaattaggaagaccaattagctaatcttactctttttgaaattcagaaattaacttttttcatattaaagaagatatcttgggctatcgcatataagaaagagttctcctgatgggcaacagcatgtcttttctttgatgtccaacacaaccacttgggtctgatcattgcaatttat

SEQ ID NO: 6002 - DNA, 695 bp, Homo sapiens
  misc_feature 27, 33, 57, 64, 92, 95, 96, 97, 98, 99, 100, 106, 127, 131,136, 144, 147, 150, 152, 163, 169, 171, 181, 195, 198, 200,202, 216, 222, 225, 226, 229, 230, 233, 243, 245, 250, 259,262, 266, 268, 272, 274, 276, 287, 291, 292, 295, 307: n = A,T,C or G
  misc_feature 317, 326, 333, 336, 343, 357, 365, 367, 385, 389, 392, 396,407, 430, 438, 452, 458, 480, 481, 486, 493, 498, 502, 510,512, 517, 521, 526, 528, 531, 532, 535, 541, 550, 552, 578,590, 601, 623, 627, 631, 639, 642, 654, 662, 668, 674: n = A,T,C or G
  misc_feature 675, 687, 690: n = A,T,C or G
ccctttcgagcggccgcccgggcaggnactttntttttttttttttttttttttttnccctttntttttttttttttttttttttttttttnttnnnnnntttttnttttttttttttaaaaaaaanaaantttgnaaaaattnatnatntnatttttaaaanaaaaanancattaaaatnggtttttttaaaanttnancntccaatcaaaaacncaaggnccnnggnnccnccccatttcnangggtnaaagggcanttnccancngggngntnttttccaaaantttnnaantttttttttttnaaattttganaaccgaggnaaaatgnttncccaaancctggtgttacttngatcccgnantttttgggaaaaaaaaantttnttnattnaaaaaattcanttttttttttttttttcaaaatnaaaatttnaagaaaattttctnaacccntttaattttttttaaacagcgnnctttnattttanaaaanattnggccccangnaaaancccnttatngncgnnaanttgggntggtggttntnaaaaaaaccccaaaaatgggggggtntttttttttttnaagggaggttntcccttgggggggaaacacccnttangggngaaatttnaanaaaatggggggngttaattntggganaccaanntgggaacaaaanttnggggg

SEQ ID NO: 6003 - DNA, 328 bp, Homo sapiens
cccttagcgtggtcgcggccgaggtacaaaactcaaatagatgaacttttaagacaaagtctcagttaacttgtgaaaattgaattcccatcaaactgaatgtaagcatttaatatctaaacatttaatgtggacttccaataaattcttttatagaattagaaagtgggatttactgtagagtgtaaaaatttttttaaaattgttttacactatgtagtaatatttacagttaaattattttgtgcaatatttgaactttatttttgaaactattctttaaagatttattttttaaagcattcattttttttccttgaatagcaca

SEQ ID NO: 6004 - DNA, 380 bp, Homo sapiens
cccttagcgtggtcgcggccgaggtactggagagtgtctgcaaagagtcctgtgatgtgatctgtctccaggtctctcaggcgtggataccagcacttactctggtggaggtaacaggggtgtgaagtagattctgtgaaggtccttggttgtatttttgttaagtgcgctggttttgtattggctggcctccagccaggagttggcacttacaagagcacatcaagctacagttgtataaaactggattttttttaactgaagatccgtgcatatcattacatgttaattttatttcaataaaaataaaaagcatcttattactcatagactgatctcatctcattatttaaactatatctcatatacacattatgttg

SEQ ID NO: 6005 - DNA, 372 bp, Homo sapiens
  misc_feature 150, 186: n = A,T,C or G
cccttagcgtggtcgcggccgaggtacacttgaaaatggaatggaatctccaggagtgagggtttccatggaagccagcactatccttggggacaccactgaccattaacagattaggaagatgtgcccatttttacacaccagagaaancagcccagagtttcagttgcccttgcttcagggcangagaccaagttggggagtcaggaactgaaagctgtcttaagccagtttgggggcagggtggggtctcaggcctttggcccctgtgactccaggtttaaggcatatatgaaggctagtgagctggggttgggatgggatggcagggttgaaaggtcagcatatttcctgcctgcaaaccccctcccc

SEQ ID NO: 6006 - DNA, 553 bp, Homo sapiens
  misc_feature 293, 296: n = A,T,C or G
ccctttcgagcggccgcccgggcaggtactccctgctgttccgcaggacctccaccttcgccctcaccatcatcgtgggcgtcatgttcttcgagcgcgccttcgatcaaggcgcggacgctatctacgaccacatcaacgagggggtgagggcctgtgccatccctgaccttggacccgcctgaggggtgacagtggagtagagaagctgtggaaacacatcaagcacaagtatgagaacaagtagttccttggaggcccccatccaggccagaaggaccaggtccacccancanctgtttgcccagagctggagcctcagcttgaagatgatgctcaaggtacgcgggggtgagatctaaagctgtctgaaccgtttatccatgccaaatcacttactcaaccaggaaggcccacccttggcatttttggaagaagacttttatttcaggtttattttgttctctcttaaatagttaattcattggccccagcttcaaagtgagaaaacaaacaaaaaacagtgagacagaaaaaaaaaactgaatcctac

SEQ ID NO: 6007 - DNA, 119 bp, Homo sapiens
cccttagcgtggtcgcggccgaggtactgcaaacagacaccagagggtgcaagagactgtagactcctgaaaaagaaaccagaaaactttgtctggttagtgaaattacacacataggc

SEQ ID NO: 6008 - DNA, 851 bp, Homo sapiens
  misc_feature 34, 422, 516, 518, 541, 577, 592, 596, 599, 604, 649, 652,661, 668, 674, 682, 690, 697, 704, 712, 729, 730, 734, 741,757, 765, 766, 772, 773, 775, 776, 777, 780, 781, 783, 789,791, 794, 798, 799, 804, 805, 806, 807, 818, 819, 820: n = A,T,C or G
  misc_feature 824, 828, 835, 836, 837: n = A,T,C or G
ccctttcgagcggcccgcccgggcaggtactttnttttttttttttttttttttgggagagacagggtttctccatgttagccaggctggtctaaaactcctggcctaagtgatcctctctccttggcctcccaaagtgctgggattacaggcatgaacaaccacacctggcttgcccccttttattatcataaatgcccctcttcatctcccaaaacatttgggatgccattttattcattcatttctagatgctgacatatacattatgtgtactaaataggtgggttaaatgtggtaattctagttcaagtgtcttaccctgaaaaagaaagttgtaggttggctgttgaaattcattccttaaatatgatcagtttgattgcccggctttattgcctttacaggaatgtgatactcanggcttactctatacaccaatgagtcttctttgatcctaaaaccaccactgaagttggttaggttcttttggacaaacatgataaactttttcananacttttttttttcctttggcaanaaagggttttgcttcaggtaactaatgaaaaaagtnggcaaccacaaagtntttnaanaaaanaaaaaattcttgacctttttttttttttttttttttttttggggnttnggaaaaaanaatgggntggttnttcccctnggccccantttttgngagctgntacttttngaggacccttttttttnnatanggggaanaaaaaaatttggtggntttttttnnaacaanngnnnggnntncccttnanttncacnnggggnnnnaaaactttttnnnaatngggnccaaaannnattttttttaaaaa

SEQ ID NO: 6009 - DNA, 485 bp, Homo sapiens
ccctttcgagcggccgcccgggcaggtacctggatgccagcacccatagataactgagggccaatgcatcctaattaggaagggataaaaataaatatatccataaaatataaatatcccccaatatgcctgggacctgctgttggatgtttacagattgactcacaggcctggttggcagtagtccccaaaaaaattaaatcatgggctgctttgcatatgatttcggggcatagtttaaaatataatcattcccatcccaaaaccctgcagttccatctgaataagttcaaatataaacaaaatagagtttaaaggtgtggattcttgaacttgggaagattgtatggcaagtaaggctgaggtgctacaaaataattcctatggagtcatcattaattagcctcctaatgggatcttttaaaaaaaattgcaccagaaggccttcttgtagaacaaatataataaacccgatgtaaccactg

SEQ ID NO: 6010 - DNA, 735 bp, Homo sapiens
  misc_feature 610, 623, 636, 654, 665, 679, 682, 697, 698, 702, 715, 733: n = A,T,C or G
ccctttcgagcggcccgcccgggcaggtaccaacaagggccaatggaaagatcacaggggccatgtgttcaacgtgaaagtgaggagccggagagagagatggcctgtgggccaaggcctttacagggatccggggtgttacccaaggaactttcctgtggagagttctaattcatgggtttaaaacgagcattcagtggggccatactgtgactaagaggtgatcattaagacatatctatgcagtccatgtggagtgtgggagtctgtggggcaagtcaagtagattgtatctctaaatcccacagggaggtgatcaccagatgtataaggcagatatctgtcttttataatgaaaaactgggaggaagcagaaaagtgtaaattgtgttaagaataactaagccttgcttctggtatgagaaagttaaacatattttcaaaatggataccaaggtgacataaaattacaagaattcactacagcctacataaaaagcaggcgagatctacagagagttccacctgaatcttccactgagtaatggctgtgcatgagtgtgatgaattaatcaagaccaaggaaagaaaccccccaaagaggccagangaaaagctgtgangctcacaaatggncagaaacagtttgtgttnccactaaacanggtgaaaaatgtcntcntattcatgaaccttnnggtngaggcctcaggangctttccctgaatagggngg

SEQ ID NO: 6011 - DNA, 516 bp, Homo sapiens
gatatctgcagaattcgccctttcgagcggccgcccgggcaggtacagttaaaaagtaagcattgtagtaaatagtggattctctggtgtgtattttttatctcagtgttgaaaattggaaaagaatggactgaagtctaaaaactggaataatgaaggacactaaatgcctttattgtagatactatgtttgtaagtctatagctaagcaacttaagccaaaaaggtctttcaactgaagctttaatcaacttattttggagatgttctcttcccttatctcatgcgtcatccctaaaataataagatacatgggatcaaatagcccttgccttttcaacacaaatcaagttggaaaattatggtttgagtcctgttgctgccatggcttctgtttctcagaaatgagtgtgtatgaacataccaatctatgtaataggctacctttttttgtcttctttggaactttgtacctcggccgcgaccacgctaagggcgaattccagcacactggcg

SEQ ID NO: 6012 - DNA, 439 bp, Homo sapiens
  misc_feature 14, 327: n = A,T,C or G
cgccagtgtgatgngatatctgcagaattcgccctttcgagcggcccgcccgggcaggtactatgttgaccaggctggtcttgaactcctgaccttgtgatcccctgcctcggcctcgcaaagtgactgggattacaggcgtgagccactgtgccagcccacttatattatttcaattgtattaaattcatttttggcccaggatattgtttctattggtaaatgttctgtgtgcacttgaaaagaatgtgtcttctgctcttgcagggttgagtgttctataagggtcaattagaccaagttgattgacagtgttttttctactgnatccttcctgattttctgtcttaatctaccaagttcttgagagtggtcttgaaatctctgattgtcaatttgaagtttttctccttgaaagttttatcaatttttgcttcat

SEQ ID NO: 6013 - DNA, 456 bp, Homo sapiens
  misc_feature 63, 130, 131, 133, 136, 141, 142, 146, 179, 225, 251, 256,320, 322, 341, 342, 349, 351, 357, 362, 364, 365, 366, 368,382, 389, 399, 401, 406: n = A,T,C or G
cccttagcgtggtcgcggccgaggtacaaataagcccaccccactaggaactatgttaaaaanaaattcaagaaagaatttaagggagattacagtgttactgtgacaccaggaaaacttagaacttttnntngtnaaatnnactnggccagcattagaaggtggggtttggccatcanaaaggaagcctggacaggtcccttgtttcaaaggtattgacacaangtaacccgtaaagccaaggcacccanaccantttccatacatagaaagttacagctgcttttatacccccttggccccgcccaaccgtatgtttnanaagaacaggcatcaataannccgggcntnggcatnaaggncnnnangggaaaatgaaccnatgtttngaaggaaaananaaaanaagggccccattttttattaccccaaatttctttaaaggtttaaaaattt

SEQ ID NO: 6014 - DNA, 307 bp, Homo sapiens
cccttagcgtggtcgcggccgaggtacattttgctggggggttcagacaagcaagtatctcttttcaccaaggatggagtgcggcttgggactgttggggagcagaactcctgggtgtggacgtgtcaagcgaaaccggattccaactatgtggtggtcggctgccaggacggcaccatttccttctaccagcttattttcagcacaatccatgggctttacaaggaccgctatgcctacagggatagcatgactgacgtcattgtgcagcacctgatcactgagcagaaagttcggattaaatgca

SEQ ID NO: 6015 - DNA, 676 bp, Homo sapiens
  misc_feature 430, 486, 545, 572, 602: n = A,T,C or G
cccttagcgtggtcgcggccgaggtacagtaggtaattctttggggctttggtttttttttcactcagcataattattttgagattcatccatgttgtttttctgtgtatcatagttcctttttaaaattgctgagtagtattcaattgtatggatatactaaagtatatttgttcctcaattaaaggacatttgggtttccattttggcaattatgaataaagctgctataaacatttacatacagatttttgtaggtttttatttcacttggataaataactaggagtgggattgctggatcttatggtaagcatatgtttaactttataagaaactgccaaactattttctagaatagccacaccattttgcatttccaccagcaatgtatgagactctcagttactcctcattctcgtcagcactngccattgtcagtttcttttttaaaaattttaagctatttgaacaggatgtggtggnatctaaattggggggctttttaaataccacattttttaattaaaaaaaaatttaaaatnggctggatgcaatggctcacatctgtnatccccagcacttttaaaagtcttgagcanggtggatcaattgcactcaggaaatttgaaaccaccctgggccaacatgggaaaactctgtctttccaaaataa

SEQ ID NO: 6016 - DNA, 479 bp, Homo sapiens
cccttagcgtggtcgcggcccgaggtactagcagtttcagttgtctgatgagagttgctctttgcttcccagatcacactttttgttgcatcctgcaggggaaaccaatgctgtgtcctcacatagcagaaggcagaaaagtaacagagcccagtgttgcctgaagcctttttatgaagaacttaatctcattaatgagggaggagccctcatggcttgatcatctcttaaaggctcaccaacatctgaattttagagggagcacattcaaaccatagaaaacctaattgaaaaaaaaattgtctttttttgtaaagcagtgcaagaattccttggaaagagggaagaaagcagcctttgttaagaaaacgctatgacaacccggctgtaaggtggagggtagtgactaggactgagtgtcagactggcaaccagaagctcttgaagaagaaggcatttgctctccctgaaaagggaga

SEQ ID NO: 6017 - DNA, 142 bp, Homo sapiens
  misc_feature 69, 70, 82, 87, 89, 95, 102, 108, 115, 116, 122, 129, 132,133: n = A,T,C or G
cccttagcgtggtcgcggcccgaggtactttttttttttttttttttggaggtactttgattttttttnnattttttttttnttttntncttttnctgctgnttaatnctacccnntttttnaaagcanaanngggacttgg

SEQ ID NO: 6018 - DNA, 478 bp, Homo sapiens
  misc_feature 59, 85, 140, 190, 250, 272, 276, 314, 322, 338, 339, 340,341, 342, 343, 344, 345, 346, 347, 348, 349, 350, 351, 352,353, 354, 355, 356, 357, 358, 359, 360, 361, 362, 363, 364,365, 366, 367, 368, 369, 370, 371, 372, 373, 374, 375: n = A,T,C or G
  misc_feature 376, 377, 378, 379, 380, 381, 382, 383, 384, 385, 386, 387,388, 399, 412, 428, 453: n = A,T,C or G
cccttagcgtggtcgcggccgaggtaccgggaacaaaatacagagctcaagctttcagnggtgctattttattactgccatcaanaaatcatacaccattcttttttcctaaagcagcaggggaaaaaaaaaaacctttntttatgcgtttttaacttagaattattcaagcaaatattagaaatatgtntatgctaataccaagtagcagtttgacccatgcctggagagaagagctttctttgctctntgactacagtgatatataaaancatntcattaatgaaaaagtacctgcccgggcggcccgctcnaaagggcnaattccagcacactgnnnnnnnnnnnnnnnnnnnnnnnnnnnnnnnnnnnnnnnnnnnnnnnnnnntggtaaatagntggttcctggggngaaaatggttatccgntcacaatttcccacacaacattacngagccggtaagcattaaaagtggta

SEQ ID NO: 6019 - DNA, 335 bp, Homo sapiens
  misc_feature 265, 267: n = A,T,C or G
cccttagcgtggtcgcggccgaggtactgatggaagttttatttcaaatgtaataatactcttcaatagatggggtaaaataaagattgttttcctccccactccccaaccccccagccaaatgaaatggctttggttatgtttctttactttttttttttttttttttaatacaaacaacttggggaaggtagataagtgcaatgggagggaggattgaattgaatagtaaaacgtaagcgtatgtgatttcttactttggaananaggccctttgttataataaaaaaaaaatcgagaaagagaaaacaaataaaaacaacaacaataaacca

SEQ ID NO: 6020 - DNA, 380 bp, Homo sapiens
  misc_feature 125, 178, 264, 269, 318, 330, 331: n = A,T,C or G
cccttagcgtggtcgcggcccgaggtccaagttattaagtaacataatttttaaaatttaaagaatgtgtcttcaactaaaaactttattctttagcattttatttatatttctctggagggtgntccctgtgacaatgggctctttagtttgctctttcaagagatactttacagangtttgagatggctgccctgcatttccagctaatctctttctgctctaaatatttaaaaacaggttcttctcaaacattttcattcngaaangctttctgaaaggttccctatccctctttaccataatttttttaaatgntagccacattgnnatagtaaaacttcatatataatggagggcttcatattttttggttatgg

SEQ ID NO: 6021 - DNA, 528 bp, Homo sapiens
ccctttcgagcggccgcccgggcaggtacattatcagtaataattctaattgttatgttaaattattttgtgccacagaggtaacaacttttcttgtcaattgtgtctttgacagtggcttccctaaaacttttgtcatccatgaacaattgtcttattttgatcctctttagaaggtggtttcataatcagatataaaattctaacagatgctttgaatgcaggtttctgataactttggaagttgtgacatcagaatacaggaaaaattttcaagactcatggagatctgaaatgttcatgaatatcaagcagaacaagaattagctgcattaactaaactcatagaagtctgaagtaatctttttaactttttgcttaaaaccgtcgctgatcctttggtttgttttttagagttacaaaaacttttcttttaaagctatttacagctgttaacaactgagtggaagtatatgaacagaatttggagcttacttaatctctaccttgatttctacagaaatttgg

SEQ ID NO: 6022 - DNA, 475 bp, Homo sapiens
  misc_feature 436, 461, 469: n = A,T,C or G
ccctttcgagcggccgcccgggcaggtacgcgggtcatagtgtaaagtttgtgtggtgtttctgctttttgtaatgtttggaacttgcctctgcaggtaaaatcccagaggaatccaaagccctctctttattggctcctgctccaaccatgacaagtctgatgcctggtgcaggattgcttccaataccgaccccaaatcctttgactactcttggtgtttcacttagcagtttgggagctataccagcagcagcactagaccccaacattgcaacacttggagagataccacagccaccacttatgggaaacgtggatccttccaaaatagatgaaattaggagaacggtttatgttggaaatctgaattcccagacaacgacagctgatcaactacttgaattttttaaacaagttggagaagtgaagtttgngccgatggcaagtgatgagactcanccaactcnggtttg

SEQ ID NO: 6023 - DNA, 594 bp, Homo sapiens
  misc_feature 50, 51, 65, 69, 120, 132, 135, 160, 173, 264, 355: n = A,T,C or G
gatatctgcagaattcgccctttcgagcggccgcccgggcaggtacactnnaaaaaaaaacttantgantggactcaacagcagaatggagataaaggaaagaaatagtgactggtgatngaacaatagtanctncttagtctaaactgcagagagaaanttgaggaaacaantgaacactacctcagggacttataggactgtaacaaaagctgcgttatatgatgcatcataagtcctagaaggagaggaaaaaggaatggntctgaaaaatactcaaagaaataatggctgaaaacttcttaaatgtggcaaaaagtatataaacctacagattgaagacagccccaaaganggttaaacccagacaaatccacatgatgacgaacctctgtatggtcaaatttctgaacgtgaaagacagaaaaaaaaaatcttgaaagcagcaaaaaatagcaccctacatataggggaaaaacagttctaatgatagcagatttctcagcaaaccaccatggccatgtatacctatgtaacaaacctgcactttctgccatgtttcctagaacttaaaatttaaaaaataaataattt

SEQ ID NO: 6024 - DNA, 330 bp, Homo sapiens
  misc_feature 274: n = A,T,C or G
cccttaggtggtcgcggccgaggtacgcgggctgggctgtagtgcgctatgctgatcaggtgtccacactaaattcagcatcaatatggcgacctgccatgaacaaaggaccatcaggttaccaaaggaggagtgaactggcccaggttagaaatggagcaggtcaaaactcctgtgctcatcagtagtgggatcacgcccgtcccaatgttttgggaggccaagacgggaggatcacttgaggccagaggttcaaaaccagcctgagaaacanagacagacccccatctccacaaaaaaaaagaaaaactttaaaatttggcaggtgtg

SEQ ID NO: 6025 - DNA, 328 bp, Homo sapiens
  misc_feature 44, 143: n = A,T,C or G
ccctttcgagcggccgcccgggcaggtacgcgggttcttagttnttttcaaccagttctatgtggaaagaaaggtattttatttgacagtgatactaacattgaaggagtgtttcctagggcctggctcccgccaagcatctnttgggcagcaaatgccctgtttgtccctcacatcagccctgggcagatgtattttcccttttcctgttttactgatgagggagcttaaaatttagggagattaaggacctccccaagatcatagagtttatcaccaatattttactgactctccataatatagagagctcttatcttaaatgaat

SEQ ID NO: 6026 - DNA, 444 bp, Homo sapiens
  misc_feature 324, 362, 428, 432: n = A,T,C or G
cccttagcgtggtcgcggccgaggtaccaagattaaggacagagttccctccattgttcattgatttgtaaaccaaaatgtatctgtgacaggtattaatcaattgagaagagttttttatttttatttatttatttatttttttgccaaggttcaggacagatccaggtgtctttctccaaagatgattatgatggtgttaatatttaaaggggaaagtggcctagaggggaacaagggagggtatgatcatattactgtatccacatgttgcaggagaaatggagcaggtacttgttctcttacagatgtctcaattaattntaacctctatccctaatggtgtttaaattttggtaaanaaaaattcattttttctttattttccaagaaatggtaagctatctttggcccctatgggagatgtngacnagagaaaacttt

SEQ ID NO: 6027 - DNA, 513 bp, Homo sapiens
  misc_feature 38, 52, 73, 82, 94, 95, 100, 249, 445, 455, 490, 501: n = A,T,C or G
cccttagcgtggtcgcggccgaggtacaagaaaggaantaatgaagagcaangccgaagatattaaaaaaacnttttttttnttgatgaacccnngagtnggtttttttgaaaagataagcagaattgacaaaccttagctagattaagaaatgaaaaaagacccaaatatataacatcagaaatgaaaaaggagacattacagctgataccacagaaatataatggatcataagagactattatgcancatctctatgccaacaaattggataacctaaaaatgtataaattcctagacacatagaatctaacatgaatcatgaagaaatagaaaattggaactaaccaatagcaagtaaagagattaaaacagtaataaagtcccccatcaaaggaaagcccagcacctgatgacttcactgtcctgcccgggcggccgctcnaaagggcganttccagcacactggcgggccgttaactagtggatnccgagctcggnaccaagcttggc

SEQ ID NO: 6028 - DNA, 654 bp, Homo sapiens
  misc_feature 342, 521, 533, 535, 541, 595, 626, 641: n = A,T,C or G
ccctttcgagcggccgcccgggcaggtacaatgacaggatctcggctcactgcaagctctgcctcccgggttcaagcgattctcctgcctcagcctcccaagtagctgggattacaggcacccaccacctcacccagctaatttttgtattttcagtagagacggggtttcaccatgttggccaggctactctcaaactcctgacctcaggtgatctgcccacctcggcttcccaaagtgctggaattacaggcctgagccaccccacccggcctattttcttaaaggggaacaaatgatcttgacaacatattattccataaaaccagtttaggggcacangccagttcctgattaagaacacaggacctgtgggagggactatcagagatgcaaaaattacttcaagatgaagtttattggtttcatttgtattgcaaaagttagaagtcattttacaaattaaaaaaacatttttttcttggtagtttttaaaaattaggggattgaaaaggatccangatgggctttgngngggggnctcaaaatctcatttattaatgagccccctgtgtatttatataaattacaaggngatcattaaggggaaacattttgcatgggtnaaagcttcatgaaantctttttaaaaaa

SEQ ID NO: 6029 - DNA, 413 bp, Homo sapiens
cccttagcgtggtcgcggccgaggtacatgtgctgaaggctttcccacatgcatcacacttatacggcttttcaccagtgtgtattttttgatggttaatgagatcagaacgccgactaaagcttttgccacactcatcacatggatttggtttcttcccagtgtggattctctggtgtagggtaagagctgagcactgactgaaagccttcctgcacccgcgtacaggttcttggtccccaaaatgaggcttcccattcactgcaaagagcaagcctggtatatatgaaattgcaaatacatttcttccaaatgatgaatgcttaatctctctcacaaattctttggtgtcaagttttaaaacactggatccgaccattttcccggtctgccacacataattggcccaaaag

SEQ ID NO: 6030 - DNA, 673 bp, Homo sapiens
  misc_feature 473, 554, 555, 556, 557, 558, 560, 561, 562, 563, 564, 565,566, 567, 568, 569, 570, 571, 572, 578, 582, 586, 617, 621,625: n = A,T,C or G
gatatctgcagaattcgcccttagcgtggtcgcggccgaggtaccagaatctctgggatgcagctaaagaagtgttaagacagaaattaatagcactaaatgcccacatcaaaaagctagaaagatctcaagttaacaacatcacaactaaaatagagaaccaaaaacaaaccccaaagctagcagaatacaggaaataagatcagagcagaactcaaggagacagagacacaaaaaatctttcaaaaattaacaaatccaggagctggttttttgaaaaaaattaatagactgcttactagactaataaagaagaaaagagagaagaatccacacaatcagaaatgataaaggggatatcaccactgacccccagaaatacaagccaccatcagagaatattataaacacctctctgccataaactagaaaatctagaaaaagagaataaatttctggaaacatacaccctnctaaggctgaacctggaagaaattgaatccttgaatagaccaataacgcttctgaaattgaggcagtaatagtctccttannnnnannnnnnnnnnnnnaaagtncccngggnaatgatgagaagccccacctccgtgtgtctntttngtanaatgtcacagaccccccctgctagatgggctggatcatggggaaagcc

SEQ ID NO: 6031 - DNA, 268 bp, Homo sapiens
  misc_feature 42, 45, 46, 49, 52, 53, 58, 66, 71, 72, 74, 75, 79, 80: n = A,T,C or G
cccttagcgtggtcgcggccgaggtacttttttttttttttnggnngtngtnnatatngataaaanccttnntnntttnntatatctttacatttttttattatggaatgttttaaataaaattttagggtattaaataaattcttaaaaaaaaatgtaatcccagcactttgggaggctgaagcgggcagatcacctgaggtcaggagtttgagaccagcctggccaacatggtgaaaccccatctctacttaaaatacaaaaatta

SEQ ID NO: 6032 - DNA, 414 bp, Homo sapiens
  misc_feature 32, 33, 44, 45, 46, 47, 48, 50, 51, 52: n = A,T,C or G
ccctttcgagcggccgcccgggcaggtacttnnttttttttttnnnnntnnntttctgcttcctacttttcaggtttaaatttatcttttttcttctaaaagtatgtttttatcttctaattccctatcttctctattctttcttcgccttcccgtacaactaacgcaaccaagtgtgctaaaaatgagcttgattaaatcaaccacctatttttgacatggaaatgaagcagggtttcttttcttcactcaaattttggcgaatctcaaaattagatcctaagatgtgtcttatttttataacatctttattgaaattctatttataatacaaaatcttgttttgaaaataacctaattaatatattaaaaattccaaattcatggcatgcttaaattttaactaaattttaa

SEQ ID NO: 6033 - DNA, 544 bp, Homo sapiens
  misc_feature 59, 62, 64, 112, 115, 119, 125, 145, 149, 152, 153, 156,157, 160, 162, 169, 170, 177, 186, 189, 196, 203, 204, 212,228, 246, 247, 252, 259, 263, 272, 275, 284, 287, 291, 296,298, 303, 311, 315, 319, 328, 341, 353, 354, 356, 370: n = A,T,C or G
  misc_feature 373, 386, 392, 393, 398, 410, 422, 423, 437, 449, 451, 471,484, 491, 497, 501, 504, 511, 515: n = A,T,C or G
ccctttcgagcggccgcccgggcaggtacttttttttttttttttttttttttttttantananacggggtttcaccatgttacccaggatgatctcagatctcctgacctngtnatcntgcccncaccttgggggcccttcccnaaanagnnggnntgnanaaatttnncaaaaanctgtggagnccncaccccnggtggcnnttcggggncccttttttctttttnttttttaagagggaaatnntatanttttcanattnttaaaggtntangggtttttntanttcncttananaatanaaaattgntccnatgntttacatangcacttataacanaattccatccanntnggggaaaaaaaccnttnttttttccaaccnctttgnnaaaanggaaccaaaacncttttttttttnnttggaatattaggngtgccacttggncnaacaaaaaaacaagtccaanattttttttccgnaaaaacntatttncccngcnaacccancaanccaagaaaaaaattttttttttttttttt

SEQ ID NO: 6034 - DNA, 535 bp, Homo sapiens
  misc_feature 512: n = A,T,C or G
ccctttcgagcggccgcccgggcaggtaccttaagatattttaaaaataagaaaatgtagtttgtatatgtatgcattcacatatatatatacatactaatatgaaggttttaacataaaatagcagttaaagacccaatatagggtaagttttaagagtttttcatgtcagaccactagttatgctaccaaaagaataagcaccattcctccagcacagcaacaataacagcagaagttccccacccccaaaaaagtattatcttcaaaatttgtcctaaaataacaattcttttaactttaagaatggtttcaatagtttggttgcaataattttccacagctatgaagcagaaaaaaaaatataaaagtttattcttgggtttaggacttattaagaaaatttcccctcccatttctatcaaattcacctgatcaaccgcagggtgatgctaatactcatttatattccatagtatttccaagaaaatatacatgtatgtattcttggngtcagggaaccaagtcagggaat

SEQ ID NO: 6035 - DNA, 418 bp, Homo sapiens
  misc_feature 69, 103, 124, 129, 152, 187, 204, 217, 276, 296, 298, 354,367, 376, 418: n = A,T,C or G
ccctttcgagcggccgcccgggcaggtacgcgggaagcagtggtaacaacgcagactactttactttantttttttttttttttttggataactcagtttcanataaaccatcttggttactgngcttnattttgggaccaaaattttattnagcttaatatggacactgacacattttggggggtntacattagacatatcanagcagtgtatttntggatcattttttaaatgacctcttctaaaacataactgtcacttacctgaaatgctgnatcctaaaattccaaaattntnttgagcaatcgccaaggcctaaagccaactgacttaaaggtaaatcattttagctnaagattaaatttnaaaaggctnaaagaatgttattagaagcttagtttttttaaaaataaaatn

SEQ ID NO: 6036 - DNA, 302 bp, Homo sapiens
  misc_feature 120, 123, 126, 149, 157, 165, 167, 170, 186, 197, 201, 207,240, 249, 257, 259, 262, 284, 297: n = A,T,C or G
cccttagcgtggtcgcggccgaggtactcctgctactagcccgtcccccagggtcaccatctttaattcttttccttattttcttctggagaggcacaaggaagaattttaagggggtcncanggnattcagtccattggccccccttngtaaaatnttaaaaancntgncaaggaattcgggaangggaaaaccanggcnccttgnaggaattaattgaaggctattggaaggcctccnaatattatntggggggngnttnataggccccatttttggtgatntcaaccctttttnaaatt

SEQ ID NO: 6037 - DNA, 151 bp, Homo sapiens
  misc_feature 50, 68, 75, 81, 91, 94, 95, 97, 131: n = A,T,C or G
cccttagcgtggtcgcggccgaggtacttttttttttttttttttttttntttctttttttttttttnttcagtnaccctnattacctgtntgnnanaagagcctgaagacagtttttggtgttgagccanacttgaccagggaaggcggc

SEQ ID NO: 6038 - DNA, 311 bp, Homo sapiens
  misc_feature 108, 167, 175, 215, 241, 265, 299: n = A,T,C or G
ccctttcgagcggccgcccgggcaggtacgcggggctacatgaaaagggatggtttcttggagcttccacaaacttaaaaccatgaaacatctattattgtctattgngtgtttttctagttaagtcccaaggtgtcaaccacaaatgaggagggtttcttcagtgnccgtggtnatccgaccccttgacaaagaagagagaagaggctcccagncttgaggcctgccccaccgcccatangtggagggtggctatcgggctcgnccagccaaagcagcttgccacttaaaagaaagtngaaagaaaagcc

SEQ ID NO: 6039 - DNA, 300 bp, Homo sapiens
  misc_feature 269: n = A,T,C or G
ccctttcgagcggcccgcccgggcaggtacttgaatattcttggttggtggatgtaaaatatgtaatctctgatttatagttaacaataaaaataaaaatttagggtgagtggaaagcagtgattaaaattaacagtgtcctttgaaaacctaatcacagttaagtgatggcatggcaatgaatttaatcatattagggaataaaatactagatttagtgtataccaattagatatatgttaattgagcccctacaaagcctgaaagcntaaccaaagtgggggctataactagtaattt

SEQ ID NO: 6040 - DNA, 449 bp, Homo sapiens
  misc_feature 272, 385, 435: n = A,T,C or G
ccctttcgagcggcccgcccgggcaggtactttttttttttttttttttttttctgtcccctcttactgtgtattttcaaataacctgtatccaaacttactaattcattcttctgcttgaccagttctgctattgagagactctgatgcattctttagcatgttaattgcatctttcagctctagaatttctacttcattttaaaattatttcaatctctgttaaatttgtctaataggaccctgaattccttctctgtgttatcctgaanatcactgagtttcctcaaggcagttgttttgaattctctgtgtgaaagtttacatctctgtcattctgggattgatcactggtgccttatttagttttttgttgagggttggntttcctggatggtcttaatgcttatggatatttgctgatgtctgggcatngaaaaatggggtgt

SEQ ID NO: 6041 - DNA, 227 bp, Homo sapiens
  misc_feature 48, 200, 219: n = A,T,C or G
cccttagcgtggtcgcggccgaggtacttttttttttttttttttttntttggcagactaataggtagtaaagtaatatctcattatttttctgatttctaaggagaggcagcatattttcatgtcattttccaaatctgaaagttttcttctttgaaaattttccctattttttttttttttaccatttttctattganccttatttgtttttcctgnggatttga

SEQ ID NO: 6042 - DNA, 548 bp, Homo sapiens
  misc_feature 388, 442, 468, 478, 503, 540: n = A,T,C or G
cccttagcgtggtcgcggccgaggtacttagaaataatcaaatttgtttatttgccattgaacactttggcatggttttcttttttctgtttttggtaatctctttcttctagatcagagcttggcaagctgtagtccacagggtggctgcctgtttttgtgaacaaagttttggtgttttgttttgtttccttttttttttttttttttaataagacagggtctcgctatgttgcccaggctggtcttgaactggtagactcaagggatcctctgcctcaacctcctgcatacctgggaccataggcacatgctactgtgcctggcttcaatttttgtaaacaaagttttattagaacacagccatgctcattcttttacctattgnctgggactactacaaaggcaacttgggcccctcaaggcccaaaaatattactantctggtcctttaaaaaaaagttttgntgaccggttnttctatataattgaagccttttctntaggcttaattctttaattggcacccaccaacttttnggcccctt

SEQ ID NO: 6043 - DNA, 608 bp, Homo sapiens
  misc_feature 568, 577, 580, 589: n = A,T,C or G
cccttagcgtggtcgcggccgaggtactatcccagccccccaggttcgcctaatagtcttggctacttccctacagctgctaatcttagcggtgtccctccacagcctggcacggtggtcagaatgcagggcctggcctacaatactggagttaaggaaattcttaacttcttccaaggttaccagtatgcaaccgaggatggacttatacacacaaatgaccaggccaggactctacccaaagaatgggtttgtatttaagggccccagcagttagaacatcctcagaaaagaagtgtttgaaagatgtatggtgatcttgaaacctccagacacaagaaaacttctagtaaattcaggggaagtttgtctacactcaggcttgcagtattttcagcaaacttgattggacaaacgggcctgtgccttatcttttggtggagtgaaaaaatttgagctagtgaagccaaatcgtaacttacaagcaaagcaagcatgcagcatacctggctctttgctgattgcaaataggcattttaaaaatgtgaaatttggaatcagatgtctncattacttncangttaaaagnggcattataggtgtttcct

SEQ ID NO: 6044 - DNA, 384 bp, Homo sapiens
  misc_feature 138, 145, 153, 154, 164: n = A,T,C or G
ccctttcgagcggccgcccgggcaggtacttttttttttttttttttttgcaaaataaatactttattgttttaatatatatatattttagaaatcagcctttgtgtgatatttcaagcatttataaagcccttttanaaaattntttcaaannaaacactggntaacaaactcaaccactttttgattaaaaatatcacacacaaagaaaacaccaataggagtttgaaaaaattataaatgctagaagaaaaattctaataacatttggtggttactttacacatttatttaacacatataaaacccaaatgggaaaccattttccttttttttcataaaaacaaagttttcactgggttaaaaacctggaacctaaaaatc

SEQ ID NO: 6045 - DNA, 339 bp, Homo sapiens
ccctttcgagcggccgcccgggcaggtacgcggggagcagggaaccgctcagatacccttccacaccgtggaaactttgttcttaccctcttgacgaaaaatcttgctgctgctcactctttgggtccacaccacctttaagagctacaacgatcaccacgacagtctgcggcttcattcttgaagtcagcgacaccacaaacccaccagaagggagaaactccagacacatctgaaggaacaaactccagacacaacatctttaacagctgcaacacacactgtggaaggtccacggcttcattcttgaagccagcgaggaccacgaacccttctgga

SEQ ID NO: 6046 - DNA, 190 bp, Homo sapiens
  misc_feature 27, 67, 68, 82, 84, 86, 90, 91, 92, 94, 97, 99, 100, 101,102, 104, 106, 107, 108, 109, 110, 111, 112, 113, 114, 115,116, 117, 118, 119, 131, 144, 153, 155, 157, 159, 160, 162,175: n = A,T,C or G
ccctttcgagcggccgcccgggcaggnactttttttttttttttttttttttttttttttttaaatnntttttttttttttntntntttnnntnttntnnnntntnnnnnnnnnnnnnnaaaaaaaaaaanttttttccccccnaaaaaaaantntncnnanaaaaatttttccncttttttaaaaaaaa

SEQ ID NO: 6047 - DNA, 324 bp, Homo sapiens
  misc_feature 63, 72, 77, 165, 179, 245, 264, 267, 289, 323: n = A,T,C or G
cccttagcgtggtcgcggccgaggtacttttttttttttttttttttttttttttttaaaaantgaatgtgnaaaantgggtttatttatatgagcccttacttctttttttaaatacaaacatttaaataataaatttccctttatgcaccatttcactgcatncaatacattttcgngtgttgggccctcattctacataatcttaaagtattttctaattgactttggagtttcttccttgncccattatttatttaaaantgngctgtttccttctgttatttgnaaggttctggattacccgcgtacctgcccgggcng

SEQ ID NO: 6048 - DNA, 604 bp, Homo sapiens
  misc_feature 425, 467, 514, 536, 568, 579: n = A,T,C or G
ccctttcgagcggccgcccgggcaggtacgccgggtagctacactacaccattctagggtcattgctgccactacacgtggcttcatagagcctgggatactgccaatttttatcatctcagagtccagagtcaccactgcatggtgccttatccccccaggatctaagttgtctctgagccctgttgggtctggttcccaaactgatgcctaccctgctccctaggtccaaactttcagagcatttctagggcagaagtgctctgaaggtttgcacctggggagcagggtagactagaacagagtctcagctacaaccaaattcccttggtctgaactgcgaggggtgcctcaaaagtcatgggtgctgcttctgtgggcaatctatatccaacactgtcacagagagtggatctgcaccttangacccatatgccacaagtaggttcatgaggacctgagcctangacctcactttacaagctgctctgaataactgcaccctggaacccancactaagtgtggctacttgcangtcatgtcagactgacacaaaagaaggatctncatggcttaantttccccattggtgggggaaaatga

SEQ ID NO: 6049 - DNA, 321 bp, Homo sapiens
  misc_feature 28, 49, 58, 70, 73, 114, 121, 128, 131, 135, 136, 145, 148,150, 162, 163, 165, 166, 171, 175, 177, 192, 195, 196, 201,202, 203, 205, 208, 211, 215, 217, 219, 221, 222, 223, 226,234, 239, 243, 252, 258, 259, 263, 265, 269, 279, 293: n = A,T,C or G
cccttagcgtggtcgcggccgaggtacncaatatttatgcacaatttgntagtttagnagtagacagacnggnagaggcttactgggaacatgaaaacgtcggcttggattaangccacanctatttntangatnntcaatgaanatncnattgataaaatnntnnaattntagngnagggtaatggtgganttnntaggnnngnctntcnattngnancnnnaanctgtggcngcttnatgnaaccatgantgtaannttgnanttcngtctgaaaancataacgagacctnttttttgacacatatgtgaaaagttttt

SEQ ID NO: 6050 - DNA, 314 bp, Homo sapiens
  misc_feature 301, 312: n = A,T,C or G
cccttagcgtggtcgcggccgaggtacttttttttttttttttttttttttttaaagttcctcttgtggataacgcgtggcctttcaggctgagaactatgaaacaggcaggctactagttaggattaataaaaaaataccttgatctgctgtcttcgtagcatggcaaattctctcatgtctcggaatggctgtagtaaatactgatagagttcggttgtagcttctgcaaggctgctgtaggcttcatcctccaactgatacaagtccagaagctccaccatgctctctgtattcttgngcttatccaanag

SEQ ID NO: 6051 - DNA, 230 bp, Homo sapiens
  misc_feature 51, 52, 55, 67, 73, 83, 84, 89, 104, 106, 111: n = A,T,C or G
cccttagcgtggtcgcggccgacgtacgcggggagtgtagccggccgctgnnagngcgcgtggctgncggagntaaaatgttnnttaanctctttcaactcctntngcttnttacgtttaacgagaaacgacaatcactgttttatattgattaaagtccagttacactttggcaatggctgccatccggaagaaactggtgattgttggtgatggagcctgtggaaaga

SEQ ID NO: 6052 - DNA, 695 bp, Homo sapiens
  misc_feature 51, 129, 165, 195, 213, 225, 242, 247, 255, 269, 293, 295,329, 359, 385, 438, 487, 490, 509, 510, 511, 512, 524, 532,539, 617, 619, 649, 662, 664, 684: n = A,T,C or G
ccctttcgagcggccgcccgggcaggtactttttttttttttttttttttngctctttttgtttttttttttttaatgaactgcttggactgacaaaatctagcctggccaacatggcaaaaccccatntttactaaaaatacaaaaattagctgggcgtggtancatgcccctgtaatcccaactacttggganactgaggcatgaaaatcntttgaacccggnaggtggaggttacagtnagccnaaatcgtnccactgcccaccancctgggcaactgattgaggcaccntntcaaaaaacaaacaaattaaaaaaacaaaattanaatatttatcaaatcctttacttaccaatnaaaaactttttccaaaaatgttgggnaaatcataatattcattattataacccacatttaaagtaaataaattcaaaancccataatattaataaatttcataaccctttaaaaacatataatactcnctntaaaatttccaaaaaattnnnntacaaaccccancccaaatnaaaaatncttcccaacattttaaactaaaaatttaatttccaaaaaatttattaaatttaaaaatttcaaaaattacctttcccncnttttttataacttcccaaaacctaaatttnttttaaaattttntnaaccaaaaattctaaaaacntttaaaaaaaa

SEQ ID NO: 6053 - DNA, 518 bp, Homo sapiens
  misc_feature 460, 484: n = A,T,C or G
cccttagcgtggtcgcggccgaggtacaaatttaattacatcatcttactgaacactactgactttactgaatctattccttgatttgatgttacctttcatacaaatcacagtagaaaaacgtatgaatttttttcaatacagccaagatgctggcttctcacctgtgaatatagttttcacgattgggtaggtagatcataatttataaccaaagacacttgttgcacatcaatcccgcgagcctgaaacacaatggcatgttttaaaaattgattcaaaaaaacttgacacctgtcatgtaggccacaaaatagtagccgaactatactaagtggtatagcccactgtggagtgtgggtctttttactcttccaaatagcccaagttggcaaaggttacttaaaaacctgccccccaaaaagctaactttttggtagattttttaaaaaggcattangagacttaccaacaagtcagtagntgatcagaaacacgacttgacccttgaccgggaa

SEQ ID NO: 6054 - DNA, 491 bp, Homo sapiens
cccttagcgtggtcgcggccgaggtacgcgggtgacatgaagagtgtgaagcatagatccaacaaagacaatctgagagaggccttcagaattgcagaacaagaattaaaaatccccagattgctggaaccagaagatgtggatgttgttgatcctgatgaaaagtccatcatgacctatgtggcacagtttctgcagtattccaaagatgcccctgggactggagaggaggctcagggaaaggtgaaagatgctatgggctggttaactctgcaaaaggaaaaactacagaagttgctaaaggattcagagaatgatacctactttaaaaagtataatagcctgctgtcctttatggagtcattcaatgaagaaaaaaagtcctttttggatgtcctgtcaataaaacgggatctggatgagctggacaaggatcatttacagttgaaaagaagcctgggatggcctcgatcaccagattaatgcatgga

SEQ ID NO: 6055 - DNA, 395 bp, Homo sapiens
  misc_feature 140, 143, 144: n = A,T,C or G
ccctttcgagcggccgcccgggcaggtacgcgggggcgtgctcccaacgtcgccccggtttgacgcacacggcaccaaactgtttgatttaattttggatgagatcgttcttgcagcaagatgttaataaagacaaaatnttnnactaaaatggtgttaaaatggggcttgccaacaatatggatgatttgaagataaacacccgatattactggtgctaaagaagaactcctagatgacaacaattttatctcagacaaagagggccggagttcataagccaaaagattgtcaaacatcatttcagaaaaataatacgttgactcttgcctgaagaactgtcaaaggacaaatctgaaaacgccttaagtggaggccagtctagtctattttat

SEQ ID NO: 6056 - DNA, 835 bp, Homo sapiens
  misc_feature 32, 81, 220, 327, 336, 471, 493, 505, 515, 535, 545, 610,617, 619, 621, 655, 661, 662, 714, 721, 731, 732, 771, 806: n = A,T,C or G
cccttagcgtggtcgcggcccgaggtactttnttttttttttttttttttttttttctgacagtctcactctgttgcccanactggaatacagtggtgcgatctcggtcactgcaacctccaactccctggttcaagtgattctcctgtctcagccgcccaagtaacagggattacaggcacgcaccaccacgcccagctaatttttgtatttttagtanagacagggtttcaccatgttggccaggatggtctcaatttcctgacctcgtgatctgcccacctcggcctccaaagtgctgggattacaggtgtgagccactgcgtncaacctggngaaaattacttttatgcattcatttcatatttcttaaactagcaaaacttgtaaatgcacagtttttatctaccctgagaaacaaaaatttaccttttggcatacatgaaaagaccgaagctgcaaggataactntcaagtaaacattggtggcttnattccaggcttngtgaacagtntaatcaatagaaccattggnacccatactncataacccccaccatgggggctgtaaaaaaaaaaaaaaaacagggttcttttaattaatgatggnaaccctntntngaaaaagggtggcaaacattttggctactgggcnaatcanncccccccctgtttgggggccggcccttagccaaaaaggggattaactttctnaaggggncattttaaanngggcagttggccctttcatttgaagggtttggatccatnattaaccaattgggaagggaaatttggggaaaaancaatttttaaaaaaccttttccccctttt

SEQ ID NO: 6057 - DNA, 670 bp, Homo sapiens
  misc_feature 45, 180, 196, 294, 457, 463, 478, 484, 516, 519, 532, 556,557, 570, 572, 573, 584, 615, 632, 652: n = A,T,C or G
gatatctgcagaattcgcccttagcgtggtcgcggcccgaggttntcttcacattcacttactccttagcaaagattgctcttgaatgggagaggttgcggaaagagccaaagccaatttggagaagtgagaaacttacaggtttgaggaatggtgaaagtcagcgaaggatctagcctncttagatgatgaacangcaaagtcagagaaaggaaccacaggtgagagaattggcatatgcccctaataaaaatcacacaacttcaagacacacacacagacacacaaatattnatgcgttatacccattcaagtaactggatatttaattcattctatgcaatgaacagtcaaaatgcttggaaaggccccatagttttttggcccttttggaaagcaacatatgtctttttcttgcaggaatgtctgagttgcacaagtcaaagatccgtgctgntcaatnggtcctttttctcanctcttncaagttaactggttacttgaccaccacttaanttnaacctttacagangtgaccaagcccaggccagaaatnnaaaatgggatttngnntgcaccttcangaaaagttatttatggtgtgcttccaaagantcacttacctaaaaatnggttcttcaattggtaattngggacaaaatttttaaat

SEQ ID NO: 6058 - DNA, 356 bp, Homo sapiens
ccctttcgagcggccgcccgggcaggtaccatttgcctcccgggctcaagcgattctcctgcctcagcctcccaagtagctgggattacaggcacctgccaccatgcccggctaatttttgtaattttagtagagacagggtttcaccatgttgcccaggctggtttcgaactcctgacctcaggtgatccacccgcctcggcctccaaagtgctgggattacaggcttgagcccccgcgcccagccatcaaaatgctttttatttctgcatatgttgaatctttttacaatttaaaaaaatgatctgttttgaaggcaaaaattgcaaatcttgaagttaagaaggcaaaaaatg

SEQ ID NO: 6059 - DNA, 351 bp, Homo sapiens
  misc_feature 55, 80, 85, 112, 114, 119, 150, 189, 230, 255, 275, 320: n = A,T,C or G
cccttagcgtggtcgcggccgaggtacaacacattctttttttaaatttattttnttagagatggcctcttgctgtgctncccangctgaagtgcggcggtgcaatcacagntnactgnagtctcaaactcctggggttagggaatcctnccaccttagcctcctgagactgtatctttcttatagacngcattcattgaaaatagttctataaaagtttataaccaacntaattacaaagagttttaaagactnctactgaaaaatcacacctncctaatccagtagggttttttttttttcagatgaagaaatgcatngcttttggaggatcataacccaatttttttt

SEQ ID NO: 6060 - DNA, 128 bp, Homo sapiens
  misc_feature 19, 23, 24, 26, 29, 30, 63, 98: n = A,T,C or G
ccctttcgagcggccgccnggcnngnacnncgccgcaaaagctaagatgttgaggaagaggancagacaccccgacatgcaatggtgacacttaattnggtggaataatctccgtttggtttcaattg

SEQ ID NO: 6061 - DNA, 458 bp, Homo sapiens
  misc_feature 444, 451: n = A,T,C or G
cggcccgccagtgtgatgggatatctgcagaattcgcccttagcgtggtcgcggcccgaggtactaattttgcaaattttctgtttgaagttatttcaagtaaaatgttattcaaagtgatcatgctgggcataagaaagaaaaaggaaaactgattgatgttaataagttatgcggtcatgccatctatactagcttttctggttttctgaccttagcctcttttttgaattattagtgcttataaagagctcaagactttttttttctttttctttacattttacttctaactgcattgatggtcttttctattgattattggttcaaaattaaatgtctttttttctatgaataaagttaaaagttcccaggcctcatttcagatcagagcattttatgggcattgttataattggtaactctccttgctttctatcttgntctgaanaaaactc

SEQ ID NO: 6062 - DNA, 468 bp, Homo sapiens
  misc_feature 458: n = A,T,C or G
ccctttcgagcggccgcccgggcaggtaccatttgcctcccgggctcaagcgattctcctgcctcagcctcccaagtagctgggattacaggcacctgccaccatgcccggctaatttttgtaattttagtagagacagggtttcaccatgttgcccaggctggtttcgaactcctgacctcaggtgatccacccgcctcggcctcccaaagtgctgggattacaggcttgagcccccgcgcccagccatcaaaatgctttttatttctgcatatgttgaatactttttacaatttaaaaaaatgatctgttttgaaggcaaaattgcaaatctttgaaattaagaaggcaaaaatgtaaaggagtcaaaactataaatcaagtatttgggaaagtgaagactggaagctaatttgcattaaattcacaaacttttatctctttctggatatacattntttttcttta

SEQ ID NO: 6063 - DNA, 251 bp, Homo sapiens
  misc_feature 53, 87, 194, 227: n = A,T,C or G
cccttagcgtggtcgcggcccgaggtacttttttttttttttttttttttttncaattgacatcttagctccaaaattaaaagagcntattttaatgggagctggtttaaaacaatttgacataagttagataacagtttggcaaatgtgtctgtgctcagttttgcttccaaatttggacttttagacttatngtcagcctcagaaagaaataagaagctgtgcanataattaaacatttgccttggggg

SEQ ID NO: 6064 - DNA, 127 bp, Homo sapiens
cccttagcgtggtcgcggccgaggtactttttttttttttttttttttttttgggtctgttcctctattgggggggccacagtagggtgttttttcaggatggggggaagaaggaaggagtttttgt

SEQ ID NO: 6065 - DNA, 159 bp, Homo sapiens
  misc_feature 64, 73, 87, 91, 94, 95, 100, 147: n = A,T,C or G
cgccagtgtgatgggatatctgcagaattcgccctttcgagcggccgcccgggcaggtactttnttttttttntttttttttagacnattnctnnttttntttttttttttttttatacttcaaaagcaattttcctttattaaaanaatgcttataaa

SEQ ID NO: 6066 - DNA, 348 bp, Homo sapiens
gatatctgcagaattcgcccttagcgtggtcgcggccgaggtactgtcttactcagctcaggctgctagaacaaagcaccctacactgggtggcttataaagaacagaaattcatgtctcacagttctggaggctggaagtctgagatcaggtactttttttttttttttttttttgccgacaattcttcaatgtgtctcaactttctgacttattacaaacattttttttctttaaacaccagttagtttatttcaggacaagaatttaccatataacactctttttacataaattctgtctccccccacttttttttttttgaagataaccattcctttttttttt

SEQ ID NO: 6067 - DNA, 350 bp, Homo sapiens
  misc_feature 64, 128, 233, 343: n = A,T,C or G
ccctttcgagcggccgcccgggcaggtacgacgagtcctgacaggcctggacctcctaccagancgcttgtcaaaggcccagttacatctcatggctttagtgtcaaatggggtatgttttgctgctncttgcttactggttttttttttttttttttcctttgagatagaatttttaaaaaatgattcattttagtagtgacaagccaaaaaaattgtggatggtatttgcngaagttttctgcattcggaatatatgtgtgagaaacatcctgagaattctacaaattggaatggacaatttcattaaaatgtaatcgtaatggacaattaaatttttagnggaaatt

SEQ ID NO: 6068 - DNA, 308 bp, Homo sapiens
ccctttcgagcggccgcccgggcaggtacgtgggtgagttatttattagttgggtttttttgcaatcagaattaaattgtcatcagtttaatatgatcatttataaaatgtcgtttacaagcctcatggtaacctcaaatcaaaagacctacagtagacatacaaaaaataaaaagcatgaaattaaaacacaccataagagaaaaatcacctttatacaaatgaagataaaggaagaaagaagggcgataacaccaaaaaagtcagaaaacaaataacaaaatgtcagtaaagtcctcacatatcaa

SEQ ID NO: 6069 - DNA, 550 bp, Homo sapiens
cccttgagcggccgcccgggcaggtacatacaaacaatgaaaacaaatcacatccttaggttccatgattaccgagatgatttcccctgccctaagtgctttattatatttcttaaaaaatataggagcagcagcttatcacaagtctccacaagtgcattaatgatggaatcaaaacaacacaacagattcataaggatgagagaactgcagaacaaccagaagtcagttttatgcttcttcttgttctggataattcagaattttgcggtgtgcctgtcgtaaatattgctgctgtttgaagtaaactttaaatgctccttttatggcaacaaacgcaattccacccaagattgtcctttgtaaattagaagttaacactactgaacatcaatttaccaactattgtagcaatagtaggaaagacaagggctccacacaagattcgagtagcggagacatgatctgctaaaggattggcctcagctggaattcgaggaacaggacaacctatccctggaaatatactatttaaaatttggtagtttat

SEQ ID NO: 6070 - DNA, 307 bp, Homo sapiens
  misc_feature 229: n = A,T,C or G
cccttagcgtggtcgcggccgaggtacaaagtagcactgatatctcaggtgagtgttccgaaaataatgtctaaggaaccacaggctacttgtttttgcttatgagtcaaggcttcattcagaacttttttttttttttttttttttggaaatgtaaaatatttttatagtttgttcatactatatgaggttctattttaaatgactttctggatttttaaaaaatttntttaaatacaatcatttttgtaatatttattttatgcttatgatctagataattacagaatatcattttatctgactc

SEQ ID NO: 6071 - DNA, 313 bp, Homo sapiens
  misc_feature 116, 125, 129, 136, 147, 156, 165, 175, 185, 189, 193, 197,213, 230, 237, 246, 262, 278, 292: n = A,T,C or G
cccttagcgtggtcgcggccgaggtacttttttttttttttttttttttttgtttttttttttttttttttttttttttttttttttgccgatgctactattttattgcaggaggngggggtgtntgcnccgcacnccggggctttnaaaaacaanaaggaaggngggagggcanagccccttgntgancaanaaangccgcctgctgccttntttgtctgtctcctggngcaggcncatgggganaccccgcgtacctatnaagcctttttttattnttcatgaataactnaaaatcatgcctcattttatt

SEQ ID NO: 6072 - DNA, 309 bp, Homo sapiens
cccttagcgtggtcgcggccgaggtactggggggatgcacttgagtgccatttctgatactgtcattgtatgactactgatgctcgtttatgttgttctttggaagctatagtgagcctgatgttttcacattttaaaaaatgcttcctgagacttctttaagctcctctaacttcttcagtgcatttgggatcaaacttagctcttagatcagcaaacctgacttgcttctacttttgcaatttttcaggccttaccatatttcttatctctgtcttcccacctgataggaaaatcttgcagatttga

SEQ ID NO: 6073 - DNA, 723 bp, Homo sapiens
  misc_feature 49, 96, 135, 137, 138, 139, 140, 145, 149, 157, 158, 159,162, 165, 167, 172, 173, 186, 198, 210, 214, 233, 234, 236,242, 248, 250, 256, 258, 259, 260, 262, 263, 271, 272, 273,279, 282, 283, 293, 297, 298, 302, 303, 316, 320, 324: n = A,T,C or G
  misc_feature 349, 358, 372, 378, 385, 386, 397, 404, 405, 406, 409, 415,418, 419, 424, 425, 429, 430, 433, 438, 441, 444, 451, 457,460, 497, 498, 506, 512, 514, 515, 532, 533, 537, 546, 563,571, 574, 575, 576, 585, 591, 594, 596, 611, 613, 616: n = A,T,C or G
  misc_feature 629, 634, 635, 636, 637, 645, 658, 666, 688, 691, 692, 708,713, 714: n = A,T,C or G
gatatctgcagaattcgcccttagcgtggtcgcggcccgaggtactttnttttttttttttttttttttttttttttatttttttttttttttttntttttttttttttttttttttttttttttttttgggggnannnnttttnaaantttttttnnnacngtncnagggnnaaaaaattttttngaaaaaaaaaantttttttttctntggnccccaaaaaaaaaaaaatnnanttttcngggggntntttttnannngnntttttttnnnaaaaanaannaatttttttntacnncccnnttaaaaaaacccncaantttntttaaaaaaaaaaaaaagggggccnaattgggtnctcccccttttttnaaaaanaattttnnttcccccaagnggttccnnngangggggnggnnaaaanntttnnaanccccnggnttntttaaantgaaanggnttaaaaaaggtttttgggccccccaaaaatttttaanncccctttnaaaaancnntcccaaagttttttttnngcanttaaaaaanattttttcttccccaanaaaaaccncgnnngggggtttngggggnccntnaagggggagaccccncnacncccttttttaaanggggnnnncccccccncaaaggggggggnggggatanaaaattttttaaaccctttttnggnnaaaaaaaaaaaaaaanggggnnaaaaaaaaa

SEQ ID NO: 6074 - DNA, 387 bp, Homo sapiens
  misc_feature 146: n = A,T,C or G
ccctttcgagcggccgcccgggcaggtacagggattacaggcgtgatccacgataccaggtctaacctctcattttattttaaaagaataatgctatttcaaatcctattgctctaaaaataaacttagtttcacaagaacactancattatcaaccaattcctggattttctttgagcagctctagaattaatgttaataccaatttttcttctctgttatttactgtcatgtggtatcccaaaattattaacaagtgaagcaactattattaattttaaaaagattagggttttcgaccttaatgttttcaaacctttataattggacacatctgattaaagctaaaaaaaaaaaaactttattaatctagtagaatggttcatt

SEQ ID NO: 6075 - DNA, 575 bp, Homo sapiens
  misc_feature 480, 488, 494, 497, 523, 533, 547, 562, 563: n = A,T,C or G
cccttagcgtggtcgcggccgaggtacatgtgcacattgtgcaggttacaaataattattatttattgaaaaagaaactacagttgacccttgaacaacacagatttgaactgcgctggtccacttatatgtggattttttttctaaccaaaagaggattgaaaatacagtattctcaggatgcaaaatctgcatatactaagggctgacttttcacatacatgggctctgcaaggacttgcatatgcactgatttgggtttacacgggggtgatgatttggatataggcaggtggtcctgaaacccgaattccccgagcatgctgaggggatgactgtatatgtgaataagacttaaattatatttccaaacttgggatggaatcaaacattttagtaacaattctgttgattacacttctatttttaatcttgtaggactgtatttattttttatttttggggtttgaatatgggggngtgtatgngtggtnggntcgggaaacaattataaaagatttgngaattatttngggatgtatgcctnttcccaaatactccnntttcccttcttt

SEQ ID NO: 6076 - DNA, 355 bp, Homo sapiens
  misc_feature 97, 115, 130, 133, 136, 142, 143, 152, 159, 163, 170, 179,209, 213, 240, 248, 277, 297, 309, 323, 328, 335, 348: n = A,T,C or G
cccttagcgtggtcgcggccgaggtacttttttttttttttttttttttttccctgaaggaaggttttcaacttgaatgtatggtgacaagtttttnttgttgtggcaacctacnatcttttaatacttntanggnattccnngccattttnaaagggntgtnttgttanaaactattntgttttaaaaaaaaaataaattcgtttaangttntttatggggttaaaagggaagaaaatncaaatttncatttctttacataaaaaaaagaaaccgngcaaggagggggactcaggnaaaaaaattttncaaaccaattttancaacnttgaaanagcccaagggaanatttcat

SEQ ID NO: 6077 - DNA, 641 bp, Homo sapiens
  misc_feature 17, 23, 125, 149, 224, 400, 402, 420, 451, 486, 506, 514,535, 554, 574, 585, 589, 590, 624, 631: n = A,T,C or G
cagaattcgccctttcnagcggncgcccgggcaggtactggatttatgcaaatgtcttttctgcgtcttttgagatgagtatcaggttttttttttttccttttatcatctgatgatgaacttantgtttccatttgtattaatgggantactaagtccctcttgtgatttctgaaccaagctattcctaaggcctgagttttattttgttgacacagaaaatnaattagaaggccaagccgtggtggcatgtgcctgtagtcctaagttgctgaggtaagaaggattggcttgagccccaggaattcgaaggcttgcagccaagcttttgattgcgccacttgcacttcaaccctttggcgacagactaaagacgcttgtctcaaaaaaaaaaccaaanancgaccaaaaaaaaacaanaccaggaaaaaataaacctaaggcaatgacnagtccctggcaaatgctgggaagggaaggcaccantgggtcagggaaaggtaccntgaaacangggcttgtaaaacaaaataanaattggggagggccaaggntgggtggatccacgaaggtnaggagttcganaccnncctggcccaacaaaagtgaaacccccgttttttnttaaaantcccaaaaaa

SEQ ID NO: 6078 - DNA, 512 bp, Homo sapiens
  misc_feature 487: n = A,T,C or G
cccttagcgtggtcgcggccgaggtacaatacagtgttcaatagtttttattgcagtgatgtttttccaataatttaagtaattctctttctagtataatacagttttcataaataatgtttacttgctttctttacattttcaaataaaattaaaatgctcgagcacttcctttcagaaagttataaaattaaaaataattattttaaatgctcattcaaatgtgtctgtatacttgctatgcccctttttctataattccaaactgagactgatttttcaagagatttttaactttaataattttaaatctagaatcaagtgaaacagatatgttaaatactgagtctagttttcttccatcttatggagcttcatggaataagaaactaatctagtgcaaatgaagattaaatatttctgggtgatggagagatagtcaacaaatttatttatccatcctctgcacatcagtccactggggcangagttctaccattaaaaatgtaatg

SEQ ID NO: 6079 - DNA, 303 bp, Homo sapiens
  misc_feature 57, 98, 99, 100, 101, 109, 111, 113, 117, 126, 139, 158,172, 174, 178, 190, 191, 195, 197, 198, 201, 202, 204, 205,208, 212, 213, 214, 218, 221, 224, 228, 244, 249, 254, 255,257, 262, 275, 276, 288: n = A,T,C or G
ccctttcgagcggccgcccgggcaggtacttttttttttttttttttttttttttanttttttttttttttttttttttttttttttttttttttttnnnncccaaccnananaatnttttttttnaaaaaaaacaaancaggtaaaaaaaaaaaaantttcctttttcctntnggcncttttttgtaanntaangnntgnncnnaancccnnngggnccngtnaatntttttttgtttgaaanaaaanagganngntttgntttttttccaaanncaaaaatttttngtttttaaaaaaaaa

SEQ ID NO: 6080 - DNA, 345 bp, Homo sapiens
  misc_feature 205, 209, 229, 234, 266, 300, 313: n = A,T,C or G
cccttagcgtggtcgcggccgaggtacgagtccctctgaaaattgtcagtgttccttcagttctctttgggtcaacttcagtctaagaataggtcttatgccagtcaagctgtacgcgggcaacaacagccagcggctcctcaatgtcatcgacatggccatcttcgacttcttgatagggaatatggaccggcaccattatganatgntcaccaagttcggggatgangggtnccttattcaccttgacaacgccagagggttcngacgacactcccatgatgaaatctccatcctctngcctctctcccantgctgcatgataaaaaagaaaacacttttgca

SEQ ID NO: 6081 - DNA, 468 bp, Homo sapiens
cccttagcgtggtcgcggccgaggtactcagagcttattactagaagttgatgcaacatctaagtattctgttgctatttctaccagcgaagtggcctgaccataagctacatttgaaagaagatccaaatttaattagcgtgaataattttgaagattgcagtttgtgtcccagtgttcccattgaacatggatttcgtagacaacagtctaagtcaaataatgttgaagagactgaaatacattggaaactgattccaattacaggagggaatgcaagaagcccagaagaccagctggggaaacatggtgagaaacaaacaccaggtgagaaggcttgctttgcttttcttcccaagtgtgcccttcttcagagttgctacttgcatttctgatactccatcaatagggcattgacttaaatttttttaattacagaaaatttggacagtagcatatttatttata

SEQ ID NO: 6082 - DNA, 303 bp, Homo sapiens
  misc_feature 110, 294: n = A,T,C or G
tgtgatgggatatctgcagaattcgcccttagcgtggtcgcggcccgaggtactgagctccacaaacgtggccatggttggtgcggaaatgattctgagtgagcaggtanaagtctcacgtcctgctgtgtccagagttggttccttccagagggttcgtggtctcgctggcttcaagaatgaagcccgtggaccttcacagtgtgtgttacagctgttaaagatgttgtgtctggagtttgttccttcaagatgtgtctggagtttctcccttctggtgggtttgtggtgtcncttgacttc

SEQ ID NO: 6083 - DNA, 417 bp, Homo sapiens
  misc_feature 367, 369, 398: n = A,T,C or G
cccttagcgtggtcgcggcccgaggtactcaagtaacagagttgaaccttccttttgacagagccgttttgaaacagtctttttgtagaatctggaagtagattttggatacctttgaggatttctttggaaacgggatatcttcatataaaatctagacagaagcattctcagaaacttctttgtgctgtatgtcctcccgcgtactatcacagaagacaagaggagctcaagagattggaagaaaatgatgatgatgcctatttaaactcaccatgggcggataacactgctttgaaaagacattttcatgggagtgaaagacataaagtggagaccaagatgaagttcaccagctgatgacacntnccaaagagattagctcacctttctcctangcaattataatttaaaaaa

SEQ ID NO: 6084 - DNA, 445 bp, Homo sapiens
  misc_feature 72, 111, 120, 233, 246, 300, 311, 317, 332, 336, 346, 357,368, 387, 428: n = A,T,C or G
ccctttcgagcggcccgcccgggcaggtactttttttttttttttttttttttaacagcatagcaaggagtntttactaggatggaggcaggggatgcgaggcaggtccanagcaagtanaatgggccaagaccatgccatggcacgccaccctgcgcgacaagagcaaaactgtcaaaaaaaaaaaaaaaaagaaaatgagttttaaagtgatggcagtaagcttatttganaggataaaccctnttccaacttgtggagataccccaaagcagttgatgtggaaagtccttggcgtcnccctcctcctnttgganaatatttgtccaatntttntccccgaggntgacaacaacnccaaaccccanatactccggactcgtcctnaccccccgcccaggagcagcgagaccgaggtggcggcgganatccagggcaggaaaag

SEQ ID NO: 6085 - DNA, 464 bp, Homo sapiens
cccttagcgtggtcgcggcccgaggtactttttttttttttttttttttgaaaggtgatgatgcagaggattttattaggcagtggaagtagctctcagcagaaggggagctgaaaggggggtgcaagaagaaggtgatctttccttgaagcctggtcgtctccatctgggctcctctccaaagttgtgccgtctgaagttaagtcacatctatccatagtctcagatgcccagttgcttcttcacctcttgatattcagctgcttgtgttgctctgccagctgaagtctgttgtggggcacagaataggggcagacttatgatgtgattcaggttacagaacttgaggtcagaggattctcctgaatgatgtagaggctcccaatcaaatcacaggagtccttagaatggagaatctttttggctgcttctctgtgccacctaaatcagagtagcttcatttt

SEQ ID NO: 6086 - DNA, 205 bp, Homo sapiens
  misc_feature 31, 32, 82, 93, 96, 97, 98, 102, 104, 106, 107, 109, 113,117, 121, 127, 129, 130, 137, 138, 146, 149, 159, 161, 166,170, 171, 174: n = A,T,C or G
cccttagcgtggtcgcggcccgaggtacttnntttttttttttttttttttttttttttttttttttttttttttttttttnttttttttttnttnnntaanantnnanaaanattncacntttttnanngttgatnnttgaaaanaangaaaaaaaangnttaantggnnttnaaaaacttttaaaacttttaaacatttttta

SEQ ID NO: 6087 - DNA, 246 bp, Homo sapiens
  misc_feature 7, 15, 25, 31, 43, 45, 49, 79, 81, 110, 117: n = A,T,C or G
gaatctnacttcttnccaccacccncactgntaccactctagncnaacnagtaacatctatccatgaactattctaatngncttgggaattactcatcttacctcagctnttgcccntctacacaggagctagtgattattctaaaatataagtactcattatgttattctctactcaaaacaatcttacttcctatctctgacagaatgaaattcactctttaacataacttacaacaccctatt

SEQ ID NO: 6088 - DNA, 396 bp, Homo sapiens
ccctttcgagcggcccgcccgggcaggtacagcagtagcagttcatacatatctgatatgctttcacaccaggattcagtaaacaacaataaatataatttcccctcttcaaaacaaaaaatggatttatacggaaaaagggttaatttacttggggtttatcagcacaccatttttaatgtgctttgaaagaattaaaaaccatgaaactgtattcactgaataccggtccatagttatattttttcttttaacgtggcttaaatacatacatcatgtctttctattaaaatccttaaatctatggggatgtgtggtagataagactatattaaaaatttttcctcattaacaatttcattaaattaaaaaaaaatctgacatttcccttaaatg

SEQ ID NO: 6089 - DNA, 352 bp, Homo sapiens
  misc_feature 337: n = A,T,C or G
cgccagtgtgatgggatatctgcagaattcgcccttagcgtggtcgcggcccgaggtacttttttttttttgttttttttttttaattttgaacaactgaagaatactaaatcagagagtagctgaagcctctgccccggtgaccattggcaagccagggacaggccttgaacaactcttttccctgttagatgtaaagttaagactaagtgcttagtagctctgaataaatacttttctctgtcagtaaagtgtctgcattaataataaatattaattatatgggacagttttgacaggtggaactgcctgcttcatggaaaaattcagaaattgnttaaaattgggaaca

SEQ ID NO: 6090 - DNA, 291 bp, Homo sapiens
  misc_feature 117, 121, 128, 135, 148, 149, 150, 152, 160, 177, 178, 180,181, 191, 200, 203, 211, 222, 224, 226, 229, 231, 232, 243,244, 245, 266, 268, 270, 271, 282: n = A,T,C or G
ccctttcgagcggccgcccgggcaggtactttttttttttttttttttttttctttttttttttttttttttttttttttttttttttttttttttttttttttttttttttttttnattnaatattntttaatnaaattttattatnnntnataaaggnaaaaaaaaaaaaaaagnntnnttttattttnaaaaaaacntgngaaaaaanaaaaaaaaaangngnggngnncaaactttttnnnataaaaaaaaaaaaaaagggntntnnaaaaaaacagngattttttt

SEQ ID NO: 6091 - DNA, 795 bp, Homo sapiens
  misc_feature 31, 37, 43, 44, 45, 46, 48, 49, 50, 52, 54, 85, 245, 270,301, 309, 352, 358, 363, 366, 369, 390, 402, 410, 412, 424,428, 456, 470, 473, 480, 482, 487, 511, 526, 531, 540, 544,550, 554, 600, 601, 614, 618, 633, 638, 645, 661, 662: n = A,T,C or G
  misc_feature 666, 667, 669, 672, 690, 697, 703, 705, 708, 710, 714, 717,720, 721, 722, 739, 771, 773, 777, 779, 782, 791, 792: n = A,T,C or G
cccttagcgtggtcgcggccgaggtactttntttttntttttnnnntnnntncnacgacttttgcagacaatttttcaacatgtnttaactttttgacttattacattttttctttaaacaattaagttaatttatttcaggacgagaatttactatataacactctttttacataaattttgcctcccccgccgcccttctcttttttaaagcgaactttctttatgtctttggactaaactgnctaaggccacaagattagaaggttnctataatacatgttacactggtaacttttancaaacttnacttttggttgaaaaccttggaaggttggggattcaaattatnccttgnctatnaanaanaacttggttaagcttgaaatnaacttaaaaatnggtataananggcccttttttntctntgggggggcttttccttgcctttggcancccaattaatgctnggngggcctntnaaccngctgttggggggggaaagggggtntaaaaactagcttgnaaccngtttttgtntggnaaaccnggcntgggggcccttgggcttaaaagggtacccttgggcccaaacctttnnaaaaaaggggacntgtncaaggcttttctttnaaaanggccaancccccttttaatgggnngccnntntgntttcccccaaagtttaangtttccngggggncnaanancccnggnaannncccttaagttttttttnaaaaaaaattttttttttcaaaaaaaaaaaanangttnanccnaaaaatttnnaaa

SEQ ID NO: 6092 - DNA, 567 bp, Homo sapiens
cccttagcgtggtcgcggcccgaggtacctattattatttcaaatttaaaaacttcttcttttttaagagatagggtatcactatgttgcccaggctgatcttgaactcttggcctcagatgatcctcctgcttcagggttaccttccctgaccactgctgcctccctcccagcatttgccagggactgtcattgccttagtttattttttctgttttgttttttttttgtcgtttttgttttttttgagacagcgtcttagtctgtcgccaaggctggagtgcagtggcgcaatcaaagcttgctgcagccttgaactcctgggctcaagcaatcctcttacctcaagcaactaggactacaggcacatgccaccacgcttggccttctaatttatttctggggtcaacaaaataaaactcaggcctaggaaatagcttgggttcagaaatcacaagagggacttaagtattccattaatacaaatggaaacattaagctcatcatcagaatgaataaaagggaaaaaaaaaaaagtacctgcccgggccgggccgttcgaaaggg

SEQ ID NO: 6093 - DNA, 609 bp, Homo sapiens
  misc_feature 425, 484, 555, 556, 559: n = A,T,C or G
cccttagcgtggtcgcggccgaggtactcacctcagacataaaaagttatttacctaagtctcttctatctaacagcatagagttacccaaacaaggccaataaagaccctttcaatatccttttcttaaatttggctctaaaatgactgttaataatggtaataaatgtctttttattaaacagacaattttatcttatgcaatttagggaaataaacataaaatctacctttaaatgaagaaaataataatttcccactctaactatggctgattcattccctgagcatgaatcccattttaccctcattgtttttaactataaactgagctggaaatctgctcacaggtgaaactagtattttagatggagaatgatattaccaagtaatcatatttattactttttggagtaattatttcnactcactgggggcatttaatggtttcatctgtaactctctatcacaatgccctcttatngaagcagcaatagtgaaaaacataactacacttttgggggaaaaaaaaaaaaaaaaaccggggaaaaaacnngantaacttttaaaggtgggatccttttatccaaattccaataaaaaaagcca

SEQ ID NO: 6094 - DNA, 370 bp, Homo sapiens
gatatctgcagaattcgcccttagcgtggtcgcggcccgaggtactcccaaagcccttgccatgtaaatgccaactatgtctgtgtgaaataataacttggaccatcttaaggctttttttccaaagtccttgtggaatttgaaatcatttttgtgactgctgagaatgacatttagagactataacatttccttttattcactttttttttttcagtgtttgaaagatgtatggtgatcttgaaacctccagacacaagaaaacttctagcaaattcaggggaagtttgtctacactcaggctgcagtattttcagcaaacttgattggacaaacgggcctgtgccttatcttttggtggaggtgaaaa

SEQ ID NO: 6095 - DNA, 599 bp, Homo sapiens
  misc_feature 56, 122, 128, 129, 136, 139, 140, 148, 149, 150, 151, 152,154, 155, 160, 162, 163, 166, 179, 180, 182, 183, 184, 185,187, 189, 197, 200, 209, 210, 214, 224, 231, 238, 239, 243,245, 247, 251, 253, 254, 255, 256, 259, 263, 267, 270: n = A,T,C or G
  misc_feature 288, 294, 295, 298, 299, 305, 306, 307, 314, 315, 323, 324,329, 336, 340, 347, 348, 352, 353, 360, 370, 371, 379, 382,383, 392, 394, 409, 424, 425, 427, 432, 433, 434, 435, 439,444, 445, 453, 454, 458, 469, 471, 474, 475, 486, 487: n = A,T,C or G
  misc_feature 493, 499, 502, 504, 505, 515, 518, 519, 529, 530, 532, 549,561, 563, 567, 569, 571, 580, 586, 589: n = A,T,C or G
ccctttcgagcggccgccgggcaggtacttttttttttttttttttttttttttcntttttttttttttttttttttttttttttttgtttttttttttttttttttttttttttttttttngggggnnaaaaaanggnntttttttnnnnntnnggggnannccnggggaaaaaaaannannnntngncccccccnaanttttttttnntttnaaaaaaaaanttttttnccccccnnaaananantctncnnnnaantttncccnttnttaaaaaaaaaaaaattnttgtgnnccnnaaaaannnttttttnnttttttannggggnaaaaaantttnggggggnntccnnaaaaatntttttcgggnnaaaaaaanaannttttaaaancngggggggggggggcntttttttttttaaanngnaaatnnnncttnccccnnagtttttnntttncagggggggtntntanngccccccaccnnaaccanttttanaancnntttttttttnccnnaaccaaaaannanccctttccccaaaaaancggggaaaaaanancctntngnggccttttnatttgnggnaaaaaaaaat

SEQ ID NO: 6096 - DNA, 392 bp, Homo sapiens
  misc_feature 292, 306, 325, 353, 389: n = A,T,C or G
ccctttcgagcggcccgcccgggcaggtaccagggtcaggaagcatgtggttcatcctttggaaatggtagtaggaaaccatacagtctttggcatttcgagctacataaaggaaattgtctgaagttcttgaggtctgactcttccatgggttctttctgaagactgcatctcatggtggcttgttcttttgtgtattttgtaatgtgggatggtgagctcaagtggggatcctatgggggtctgagttgcagctgtgtccctacagagcggacctgggaacactggctgnggggaccaccttgnggaatgtctctgcttgtantttcttcatgtcctatttgaaactgttnaaggtgaatgtcctgctgaatgtagaactttatggnttt

SEQ ID NO: 6097 - DNA, 501 bp, Homo sapiens
  misc_feature 330, 335, 372, 373, 378, 391, 396, 407, 412, 413, 423, 424,445, 448, 453, 454, 456, 460, 461, 471, 476, 482: n = A,T,C or G
cccttagcgtggtcgcggcccgaggtacacttttattactgattaatttcaaagctttttattggtctgtttagggtatcaattccttcctgtttaatcttagggggtcatccagtttgtgtgcatagatgtgctcataatagtctctgagggttttttttttttttttttttttgtatttctgtggggtcagtggtaatggccactttgtcatttctggttgtgttttttcatatattctcttttttatcttgattagtctatctagcagtctaccaatcttattcattccttcaaagagctaaattttaagttttggtgatcttctgnatggntttttcacatctcaatttcactcattttaaaacccannttggntatttcttttggnatggnacattggggantgggnnaatgcctggnnttcttttttcttttttttggnacnttggnncntttnncctttaatanaaacnttaaantttaaggggaccctgcccg

SEQ ID NO: 6098 - DNA, 486 bp, Homo sapiens
  misc_feature 190, 273, 292, 379, 403, 440: n = A,T,C or G
ccctttcgagcggccgcccgggcaggtaccgtattacttttctattgcttctttaccaaataaatacaagctttgcagtttaaaacaacagaaatttaattttttatagttctgagggtcagtaacctaaaactgatcttatgaaataaagttaaatcttggggatatgggtgtggacagggctggtttnttctggggctctgatggtaaaatttgcttccttgccttttctccttctagggagcctgcattccctgcctcctagtgggcttnctcccatcactcgaacctntgtttccagcctcaggattcctaatgtgactctgatgtttcatctcccgtttatgaggacgcttctgattgctaagatacatacggngacactatggaagttaacttgaanattaaaaccctgaaaaatagaaagaatcttctatggnatatcacaagagattacaagggcctgaattagagtggtgacatttt

SEQ ID NO: 6099 - DNA, 139 bp, Homo sapiens
  misc_feature 8, 27, 35, 47, 53, 89, 107: n = A,T,C or G
ccctttcnagcggccgcccgggcaggnacttgctncttttttaatgntttttntatggtagaaatatcccagaaatttatttgatgttngcttgaatacattttatntaaaaagattgggattgtttgccttggatgcc

SEQ ID NO: 6100 - DNA, 758 bp, Homo sapiens
  misc_feature 558, 652, 680, 689, 694, 702, 730: n = A,T,C or G
cccttagcgtggtcgcggccgaggtactttattgcaatacacatctgcagtgaaaaagaagaaagatctcaagtaaatagtctaacttcgtgcctcaaggagaggagaagaagatgaagaagaagaggaactaagcctaaaattagtgaaggaaataacaaagattagagtaggaaccaagaaaatacagaatagaaaagcaatagaaaaaaaatcaacaaattttttgaaaagaataacaaaagaattggttttttgaaaagataaacaaaatcaacaaatccttagttaggctaagtaagaaagagagaagactcaaataaacaatatcagaaataaaagaggagacattacaactgatgccacagaaataaaaacatgaggctataatgaacaattctattccaacaaactggataatctagaagaaatgaataaattcacaaaaccttccaatctacgatgactgaatcatgaagaaatacaaagtctgaacagacttataactaatgtggaggtttagtcaataatcaaaaatgttccccaaacgaagaagtncaggaccagatggcttcacaggtgaatctttccaacatctcaagaagaattaatgcccgttcttcttaaactatttttaaaaattgaagaaganggcccactttcaaatttatttatgtggncacattttnccganccaagccnaccaagcccccccagaaatgaaactgcnggcaatttcttggtgaatttccttttaa

SEQ ID NO: 6101 - DNA, 226 bp, Homo sapiens
ccctttcgagcggccgcccgggcaggtacggcaacatcaaccaagatttttccactaactcagaaggaaaagcagaatgagtcaactaatggtaattcagaagtcacacctaatgtcaatcaaggaaggcataacaaattagagtcagctatccattctcctatgaacgatcagcaaatctcacaggagtcaaggaatagtacctcggccgcgaccacgctaaggg

SEQ ID NO: 6102 - DNA, 167 bp, Homo sapiens
  misc_feature 49, 128, 133, 135, 140, 157: n = A,T,C or G
ccctttcgagcggccgcccgggcaggtacgcggggaggcattgaggcanccagcgcaggggcttctgctgagggggcaaggcaggagcttgaggaaaccgcagataagttttttttctctttgaaaanaatangnaaganttaaattaccaacctancttttaaaaa

SEQ ID NO: 6103 - DNA, 313 bp, Homo sapiens
  misc_feature 75, 111, 273: n = A,T,C or G
ccctttcgagcggccgcccgggcaggtactttttttttttttttttttttattggctgtcaatctggttgatcanattactaatttctactctactggaagtgatctttanaaaaacaggtctgccatgtttgcattacagagatattaacaataataatgatttttaaaaagtaaaccaaacataaataaacaggaaaagaaaccaccatatttgagtccagtctttgtcctgcctagtgaaacatctgtcttatacctttttgacaggcanaaataaggtccttcacatcgccccatctctctgataaatc

SEQ ID NO: 6104 - DNA, 264 bp, Homo sapiens
  misc_feature 59, 118, 152, 170, 246: n = A,T,C or G
ccctttcgagcggcccgcccgggcaggtacttttttttttttttttttttttttttcancaaggcaatttacttctgcagaagggtgctgcctgcatcaatcatgaatcacaggagcncccctgaacaaaggaaggaaaaggtttttatccntaacacagtccctacctntgtgtcactcccccaggggctggggttggacccgctcattctaaagttgacccgattggctatttgtgaatctttnccaaataaggaagggaag

SEQ ID NO: 6105 - DNA, 772 bp, Homo sapiens
  misc_feature 31, 32, 34, 49, 50, 51, 52, 58, 59, 62, 63, 70, 72, 74, 76,78, 81, 82, 84, 87, 88, 89, 90, 101, 109, 110, 117, 119,120, 121, 137, 139, 140, 141, 142, 143, 145, 175, 188, 190,194, 197, 199, 202, 205, 209, 218, 243, 249, 250, 263: n = A,T,C or G
  misc_feature 267, 269, 275, 276, 280, 281, 282, 284, 287, 290, 291, 293,294, 296, 319, 320, 355, 360, 365, 373, 378, 379, 380, 406,415, 425, 432, 433, 434, 442, 451, 452, 457, 467, 477, 479,481, 486, 495, 496, 502, 509, 528, 532, 549, 552, 559: n = A,T,C or G
  misc_feature 571, 580, 583, 591, 592, 596, 597, 612, 629, 633, 634, 638,655, 658, 659, 660, 663, 669, 679, 680, 681, 698, 700, 705,720, 721, 722, 723, 726, 728, 729, 733, 734, 737, 739, 747,751, 758, 759, 769: n = A,T,C or G
agaaatcgcccctcgagcggccgccccggcnngncccggggggggaaannnnggggcnnccnnggggggnananananacnntnctnnnnaacttccgggngggaaaannaagaccntnnngcattaaccaccacancnnnnncnaacaccaaaacaattctctctttctccacncccccaccacccncngggnccncnttncancacncccgacccncccccctggcaaagcccccctcccnggggcnncatcccggggcgncccncnccaacnnaagnnncnccnggnncnncncccggcacccaaccccccccccnntctcaatcttgccacctaatttctcccgcccaaanaaccnggggnagcccccnctcgnnnccctaaaaaaaaaaaaaaacacaacncaaccccantgggggatcnctgcccnnncaccggcnccaaccccnnccttnaacaaccaanaaaacccccncnantaaanggaaagaannaaaaanccggaancggcaaacccaagggggtngggncccccaccggggggcanctncccaaanccccccgggggncccttccanttntaaaaggnncccnncctccacggaccacntaataaacaaccgggancccnntccnacccctttggacaaaanggnnnggncccttngggggagggnnncttccttgggagagccncnccaantttcccaaacccagnnnnaangnnaagnnacngnaaaacccnaccnaaagggnnccaacccccnccc

SEQ ID NO: 6106 - DNA, 410 bp, Homo sapiens
  misc_feature 24, 350, 401, 403: n = A,T,C or G
cccttagcgtggtcgcggcccgangtactttttttttttttttttttttttttgggacggaatcttgctctgtcacccaggctggagtgcaatggtgcggtctcagctgactgtaacctccgcctcctgggttcgagattctcctgcctcagcctcccaagtagctgggactacaggcacccaccaccacacctggctaatttttttgtatttttagtaaagacggggtttcactatgttggccaggctggtctcgaactcctgaccccgtgatccacccaccttggcctccaatcttatttgctttacaagtcctgcttcagggttaccttcctgaccactgctgcctncctcccacattgccagggactgtcattgccttagtttattttttctgtttngnttttttt

SEQ ID NO: 6107 - DNA, 302 bp, Homo sapiens
  misc_feature 16, 17, 18, 20, 21, 23, 26, 49, 51, 54, 57, 60, 200, 203,208, 214, 224, 229, 231, 233, 239, 260: n = A,T,C or G
catgctcgagcgggcnnnanngnganggatatctgcacgaagcggcccntncgngcnggnacgcggggcttggcctgttgcttcagcctgagctcggttagggcctcacttccctgcttccacacctcagggaggcctcggtgattttgccagagcctcagcctccatcgctctgtaacctgcgggtattggatgattcntanctaanacttcncgacaccctngaagntnanaaatgnaacccttaacattcatggatntggccatagaattctctccagaagagtggaaatgcctggacc

SEQ ID NO: 6108 - DNA, 668 bp, Homo sapiens
  misc_feature 85, 88, 89, 97, 98, 99, 100, 101, 105, 117, 118, 121, 125,132, 136, 137, 148, 149, 152, 160, 179, 182, 186, 200, 204,211, 218, 227, 240, 242, 248, 255, 259, 265, 268, 276, 280,283, 286, 290, 291, 300, 301, 302, 306, 310, 314, 315: n = A,T,C or G
  misc_feature 321, 324, 338, 339, 347, 348, 353, 356, 365, 380, 383, 398,414, 421, 432, 438, 444, 446, 448, 457, 460, 463, 471, 478,496, 505, 512, 520, 521, 533, 574, 584, 591, 594, 600, 602,605, 618, 627, 632, 661: n = A,T,C or G
cccttagcgtggtcgcggccgaggtactttttttttttttttttttttttttacttttttttttttttttttttttttttttttnttnnttttttannnnngggngggcccaaaaannaantttntttgggnaatnntgacggcaaannttntccaaaanaaacaagatgggaaagttnctnaaanaaaaaaccctaggnaaantttaggntaaatanaaaattcanacagggaaaggcncngctttngggaaantggnaaggtnctnaaccattnaacnccntgnggannagctttttnnngttnaaanaacnnttgttntcnttatgccctgccannaaaatttnnacttnttncttgggaantttttcacccagtgnganaaaaaacatgccggnttttaccccccatganggggccnttttttttttngaaaanacccanantnctttaaaanaanccncatagggnccctggnccttttttttggccaatntttttcaanattgggnaaaaagtnnttaaagtccacncctttaaaattaattttaaaaactttttgggggtcccccangacctttgancaccttnggnttttgnanggnttttggccccaangcccttttnaaatncccaaacttgggttgaaccttccccgggngggccct

SEQ ID NO: 6109 - DNA, 346 bp, Homo sapiens
  misc_feature 121, 126, 132, 144: n = A,T,C or G
cccttagcgtggtcgcggccgaggtaccctgcacgcctgctggactcaattcagctgcttcctcagcaagctgccatggcttctattttgcccacagctattgtcaatagtaagtgctcantgctntgtaancccaccttttanaggtgatggggaatttatgggagaaaaaaatgtctactgacaagaaaccaggaacagacctttttccttcagtgttgtggtttcattttatcttttttctttttaaatatttaatttgagaaaatgatgttactttttttttatactttaagttttaggatacatgtgcacaatgtgcaggttagttacattatggtataca

SEQ ID NO: 6110 - DNA, 587 bp, Homo sapiens
  misc_feature 512: n = A,T,C or G
ggatatctgcagaattcgccctttcgagcggccgcccgggcaggtacatagatctcatatttaaattaaaaaatggactttttttctagtatcaaaatagttatttttaaaataccttgaaaaactttaatacaatttttaatatattaaatattcacctgaactctcagccatttatctcccatctctctttgctagaatcttgccttaccatcactatcattcttttgtttttttttctttttggcatctttaatgcttatcccagaaaagcattaaaaataaaatatttttctttaagtccacaatttaaaaaaaaaagaaagaaaaaggaaaagccattgacagtatttgacacgacattgaagattcttattaaaccagcctcatcttgtttgcccacatccaaaactctttagtaaatatcagttcttgccctgaaactggtaatactgacccaatagcatcctctagtggccaaactgtagcaaagcacccaatgatgcaggaanggtttcgaccttgggttatatggacctgggtggtggaaggctaagatatggagacccccccccacaaaaaaaaaa

SEQ ID NO: 6111 - DNA, 439 bp, Homo sapiens
  misc_feature 55, 121, 142, 163, 277, 284, 285, 377, 417, 422: n = A,T,C or G
ccctttcgagcggccgcccgggcaggtacgcgggtatccactcaatacttgtgtntcacttggcaattggcatacgtgactgttcctctatttttccatctacctaatttcaaaggatttncagaaggaaaagaagatttanatgcttcatttcaaatatttntgagttttgacaaaggtgccaagaccacacattggagaaaatacagtcttttcaataaatggttctgggaaaataaaatatccacatgtagaagaatgagattacacccctccntcttgcnntatacaaaaaccaactcaaaatgaattcaagacttaaatgtaagatgcaaaactatgaaactactatgaagaaaacataaggggaatacttnaccacattgggcttggcaaagattttttaaataacacctnttaanatacaggcaaccaaaag

SEQ ID NO: 6112 - DNA, 658 bp, Homo sapiens
  misc_feature 602, 640: n = A,T,C or G
ccctttcgagcggccgcccgggcaggtacttcaagatgttgcagtatttcacagttattattatttaaaattacttcaactttgtgtttttaaatgttttgcgatttcaatacaagataaaaaggatagtgaatcattctttacatgcaaacattttccagttacttaactgatcagtttattattgatacatcactccattaatgtaaagtcataggtcattattgcatatcagtaatctcttggactttgttaaatattttactgtggtaatataagagaagaattaaagcaagaaaatctgaagtattgtcttgtttttaaaaaatacagttcctagtgtttttagaagtcacttaatttgtctcatttttccacctggaaattaggaataatgtagaatgcaaggcagtaatttccttttggaaaggactctgaaggcagaaaagaagggagagaacctcatgggcagaatattataaaaagagtgtcatattccagcatttgaattggaaagagaagagtgaagatccaagttgcattattaatctgccctgtgttttttccttttaacaatcaatttgagctgctggctggtatgnagtttctcatcaagaagaaagccctaatatgttaaagnccaaatccgatttaaatt

SEQ ID NO: 6113 - DNA, 642 bp, Homo sapiens
  misc_feature 18, 44, 107, 131, 364, 365, 382, 392, 416, 473, 496, 513,514, 557, 559, 560, 564: n = A,T,C or G
ccctttcgagcggcccgnccgggcaggtacagttataaaaaaanaaagaaaaagaaaagtttgccaggcctaaagggaaaagtaactggagtgttttaaataatgancattagttacaggatgaaaaacangaaatacacaaagaaaaacatgccagaggtaggtgcaggcccatcttatatgagaagcagggttctaggcccggcgcagtggctcaagcctgtaatcccagaactttgggaggcccaggcgggtggatcacgaggtcaggagatccgagaccatcttcgctaatgccgtgaaaccccgtctctcctaaaaatacaaaaaaaataagccaagcgtggtggtggggcaccttgtnntcccaactactcaagangctgaggcangagaatggcgtgaactcaaaaagngggagcttgcaatgagcttaagatcctgccacttgccttcaacctgggccacagaancgaagactccgcctcaaaaaaanaaaaaaaaaggagaganncagggtttttttttttggccttgggttggccaaacaaaattgngnngggnggactttcaaccctttttttcttttttaatgggttaacccaagaatccctcactaaaggttaaaaaaaaaaaaaaaaa

SEQ ID NO: 6114 - DNA, 427 bp, Homo sapiens
ccctttcgagcggccgcccgggcaggtactttctttagtgaagtgaatgtatggttttaaggacatacaaccaccggttgacgaggtccagccttgatattcagttgccacacaacatcattccagctatggcagacgtgttttcctgcattcgttaaggaacaagggtcttgatagggggagccttttatcttaaaggggcagagatacttctctgagtctgagagttgcttttgactttggagatctccacagggtatgacaagacatgcatcgaaggtaatagtttggggtgagcttgacctggttacattaataatgaggtggtcagccatagaatgaggaaagaagaaggagtaatagaatagaatgaaggagaagttaaacttttcttagcgttagtttggtagggttttcccctgggata

SEQ ID NO: 6115 - DNA, 319 bp, Homo sapiens
  misc_feature 33, 50, 53, 115, 157, 159, 163, 165, 167, 170, 179, 181,183, 184, 189, 191, 192, 194, 196, 202, 203, 212, 222, 229,240, 241, 248, 249, 257, 259, 260, 261, 273, 275, 277, 281,296, 304, 306, 307, 308, 310, 312: n = A,T,C or G
ccctttcgagcggccgcccgggcaggtactttnttttttttttttttttncgntttttttttttttttttttttttttttttttttttttttttttttttttttttttttttttntttttttttttttttttttttttttttttttttttttttttngnaaanancnccncaaaaaaanantnnttttntnntntnaaaaannaaaaaaaantttttggatntaaatanaaaaaaaaatnnaaaaaanntttttttncnnnaaaaaaaaaaanancnattntaaaaaaaaaaaagngggggccnannnantnaaaaaaa

SEQ ID NO: 6116 - DNA, 518 bp, Homo sapiens
  misc_feature 402, 487, 494, 503: n = A,T,C or G
ccctttcgagcggccgcccgggcaggtacgcgggtaacttctttaagcctccatgtttcctcatctgtaaaatgaggataatagatagtatggacctgttgcaaggattaaacataatcagtgtaaagtgttggtcccatgcttgccacataagaaaatatttgtcaacagagtggtagttgtcattaccattgtctcagtttgcctgtaactagttgtgtgatctgagacaaacactaattttgaacttgagtttccccacatgtaaaatgaaagattgataatagaaagtaaatcaattttttctagcattaaaaatagtatgcatttaataaaaatcttattcttaatgatctagcttacctccaacttgccctagtcactttggcgatcttgtctctnaatagaacctagaaaacacttaaatgtgtgtttccttgcaatataactttttctttttttatttaaataaggtcttataaatgtngggaaanaattatctngtgttcccttaattt

SEQ ID NO: 6117 - DNA, 288 bp, Homo sapiens
  misc_feature 31, 32, 51, 240: n = A,T,C or G
cccttagcgtggtcgcggcccgaggtacttnnttttttttttttttttttnttttaaagcagaatggggttttgctatgttgcctgggctggtctcaaactcctggcctcaagtgatccgcccgcctcagcctcccaaagtgctgggattataggcatgagctgctgcgccaggccttaattttttaaaaacaatgatggggtgggggtgggggacaagtccacaaaatggatagaacanctgtgaaggaaacatagaactcagaaaggatatggttaacaaaaatgc

SEQ ID NO: 6118 - DNA, 609 bp, Homo sapiens
  misc_feature 409, 419, 449, 542, 559, 588, 595: n = A,T,C or G
ccctttcgagcggcccgcccgggcaggtacgcgggggggagcgccagttccgtctgtgtgttcgagtggacaaaatggcgaagatcgccaagactcacgaagatattgaagcacggattcgagaaattcaaggcaagaaggcagctcttgatgaagttcaaggagtgggcctcgattctacaggttattatgaccaggaaatttatggtggaagtgacagcagatttgctggatacgtgacatcaattgctgcaactgaacttgaagatgatgacgatgactattcatcatctacgaagtttgcttggtcagaaagaagccaggatatcacgcccctgtggcattgcttaatgatataccacaagtcaacaagaacaagtatgatccatttgctgaacacagaccttcnaagattgcanaccgggaagatgaatacaaaaagcatagcngaccatgataatttccccaaaagcgtctttgatccttttgcagatggtaattcttttccacttttctattaagtattcaaaaaattaatttgnatttaagtggcctttancccttgatttttttttggcatgcttctgnaattgcnttttcttttttaaa

SEQ ID NO: 6119 - DNA, 422 bp, Homo sapiens
  misc_feature 153, 319, 324, 326, 333, 335, 336, 346, 347, 348, 353, 354,356, 357, 358, 373, 381: n = A,T,C or G
ccctttcgagcggccgcccgggcaggtacttatagataagaaaaatattcaaatttattttaggctaaaaagcataatttcaacaactaaaatgctatgctttattatgaattattgatttacttaatatattatttattatatttcaggttngaagaaactgcagagttactgaaatgtccaaatcactacttgtaggattttctacatgaacttttttctaggactttggttactatacatattgtatattttaagaattctttatacaatgttaatatactgcaatactgcagtttttgacaatttggattccatntggtntntgaattntnngcattcattnnnggggnncnnntttaatatttttgancaatgatnatactgctttaccttgtgtcactttttttttaggaaaaact

SEQ ID NO: 6120 - DNA, 511 bp, Homo sapiens
  misc_feature 442, 472, 492: n = A,T,C or G
cccttagcgtggtcgcggccgaggtaccaggatagtggggcactgttataaagatacttgaaaatgtaaaaagaactttggaactggttagcaagtagaggttggacagtttggaggggtcagaagaagataagatgacgcaggaaagtttggaacttccttgagatttttttgaataattttgaccaaaatggtaatagtgatatggacaagaaagtccagggcgaggtgttctcaggtggagatgaagaacttattgggaactggagtaaatgttattcttgctaagctttaggaaaagactggtggcattgtgcccctgttctagggatctgtggaactttgaacctgggagagatgatttagtgtatctggtggaagaaatttctaagcagtaaaacattcaagatgtggcatggctgcttgtaacaccctagctcanatgtgtgaggaaagaaataacctcaggttngaacttatatttaaaggggnagcagagaaattaggaaat

SEQ ID NO: 6121 - DNA, 593 bp, Homo sapiens
  misc_feature 585: n = A,T,C or G
ccctttcgagcggccgcccgggcaggtacggtttccttcaagaccaacacggggtatcactgagtgaattttcacagcgctcagtgactgctggtcattaaatggggatgattgtcatcagtataagtatcacactatttgtcctgctaaatgcaagttaaaagatacttatggatgccactaccacatattctgacaaataagggaaacactaggcttttaaaagattcttagagtgttttccctatattgcactttctagataacacaattttaacaatgatataatgtgatcttggttctagacacagcagtggggaacacatgaatttacctttttcttgttccttttcttaaagtttttagtatagtctcaggaatatagcaaggagaaataacaaaatatacatgtgctttgggcttctgaggaaaaaagaccacccacacacatttttaaaagactaaaatagacgtctcttctgctttagccatttcattttcacaactgaaaataaggaactactatatatttgatgtccctaactcattaaacatagcattgccataaatgcactggtctgcggnaaactttt

SEQ ID NO: 6122 - DNA, 475 bp, Homo sapiens
  misc_feature 383: n = A,T,C or G
gatatctgcagaattcgcccttagcgtggtcgcggcccgaggtacctatggaccataggcagtcttcagggaccagtgtctccaatttggatccctttctgtgtgtcaggggcatccaatcttttgcttccctgggctgcactggaagaagcattttcttgggccacacataaaatacactaacactaacaatagctgatgagcttaaaaaaaatcccaaaaaaactcataatgttttaagaaagtttacgaatttgcgttgggccgcattcaaagccatcctgggctgcatgcggcctgtgggctttgggttggacaagcttgcatgtgactgagtttgttcttaaactggtaaggaaactttgtcaggcagtatttatttncataagtggtgttttcctaccaatcagcacatggtgaaaaatgaggggctatttatatttaaggtgcagaattaaattggtttaaaatatct

SEQ ID NO: 6123 - DNA, 447 bp, Homo sapiens
  misc_feature 28, 98, 205, 297, 298, 360, 409: n = A,T,C or G
cccttagcgtggtcccggcccaggtacnccggggaaagcttcctgggacctctcctcatctgtgcaccgactaagtggccaattctgaatccagctgntgtttcccagtctggtgatgaatcctccacagctggtgagtgtaaatgtatataaatgtatgtatatactttttccttctcccttcccattaaaatttgtttggtgnatcatttgcttattatatctatattgccatatactcggggtaaaagctgttacctttaaaagtattgggtggttcttttctttcctcacacnnttcccacacagaacacacatatgcaccatggaatactatgccgctacctgttctcacttgtnaatgggagctaaaataatgaagaacttatgaaccccaagggaaccaacngaccaacagacactggggggtctaccttaaccggggaa

SEQ ID NO: 6124 - DNA, 521 bp, Homo sapiens
  misc_feature 503: n = A,T,C or G
ccctttcgagcggccgcccgggcaggtaccagtcgaggaagagcaaggagaaggagcacatcacgaggaagaagaggatccacacgcggaagccagcgttgttttaatgggcctctcttatgtcttcgttgccttccttgatattttcaagttgcccccacaactaactggtgaatgctgtcaatctcagcttcctgttgcaaaaccttttccgtgaatatctcttggagtctggaaatctcaaccactctcccttcgatttgcctcacttcatcaaacaagctgttcatttcaccaattagtcgctgattttcctgttcaaacatttgtatttcttctggggataactcatcttcgcctttgccatctccccacgttcccaattcaggttatgtttcagccaaaattttttctggacgttcttcaatggcagggttttcttcaaaagtcttttgaaaggactcttgtgaaactttcttcaagaaagatgtggattctcttgnctttggaatttgggtctg

SEQ ID NO: 6125 - DNA, 526 bp, Homo sapiens
  misc_feature 479, 480, 488, 490, 494, 495, 496, 497, 498, 499, 500, 502,503: n = A,T,C or G
cccttcgagcggcccgcccgggcaggtaccagcattccagctccaaccatggctgcaaaggtcacaccaattgtcacccaagagcctctcatcatgaagttcatgagaacaggcgttctgctgattgctatggcagacaaagctgttaaaccaatactccctgctaagtacgcgggtcactctctgggggtgggacttttaatacatcaataacttttaaaactttctaggtcattctgatgtgcagctgagtttgagatctaataagttaaagatactaaaaagaagcaatcgaccaaatccagaatgtgaggcattttataaaacagaaggttcaagttcctcaacaaataaatggcatttttaccaaaaggagtgggagggaatgggaactgtcatagattagaagactgaacagacttatcaaataaatgcaaatggtgaaccatattcggaccccactgaaaacaacaactgtnnaaaaaaananatannnnnnnannggtccagtccaaattttaaggaa

SEQ ID NO: 6126 - DNA, 614 bp, Homo sapiens
  misc_feature 220, 275, 306, 327, 356, 436, 580, 604: n = A,T,C or G
cccttagcgtggtcgcggccgaggtactttttttttttttttttttttttcttgagacagggtctcactctgtcactcaggttggagagcagtggtgtaatcacagctcacggcagccttgaactcctgggcacaagtgatcgtcctgtcacagcctcctgagtagctaggactacaggtgcatgccactatgcctggttaattttttaaatttttgtanagacatggtctcattatgttgacaaggctgggatgttccccccacctcctgtganagtctcattgtcacccaggctggaatgcagnggtgtgatcttggctcactgnaacctccgcctcccaagttcaagtgattnttgtgcctcggcctcccaagtagctgagattacatgcgtgcgtcaccacacctgggctaatttttgtatttttggtaganacggggtttccccatgttggccagtctgggctcgaactcctgacctcagggggaatctgcctgcctttggccttccaaaattgttgggattccaggccttgagcccactatgcccgggcacttttttgaaattttcaaaaaaangactttaaggtagaatcaaacaanaaaccccagc

SEQ ID NO: 6127 - DNA, 728 bp, Homo sapiens
  misc_feature 65, 254, 378, 408, 413, 419, 449, 453, 455, 512, 517, 526,536, 548, 556, 564, 568, 576, 585, 597, 599, 603, 619, 642,645, 651, 652, 662, 663, 669, 673, 679, 704, 707, 709, 720: n = A,T,C or G
cccttagcgtggtcgcggcccgaggtactttttttttttttttttttttttttggagacggaatnttgctctgtcacccaggctggagtgcaatggtgcggtctcagctgactgtaacctccgcctcctgggttcgagattctcctgcctcagcctcccaagtagctgggactacaggcacccaccaccacacctggctaatttttttgtatttttagtaaagacggggtttcactatgttggccaggctggtntcgaactcctgacctcgtgatccacccaccttggcctcccaatcttatttgctttacaagtcctgcttcagggttaccttccctgaccactgctgcctccctcccagcatttgccagggactgncattgccttagtttattttttctgttttgnttttnttttgnccgtttttgtttttttttgaaacaagcgtnttantntgtcgccaaggctggagtgcagtggtgcaattaaagcttgcttcaaccttgaacttntgggntcaagcaanttcttttacnttaagaaatttnggactacnggcccatnccancaaccttnggccttttnaaatttaatttntngggncaacaaaaaaaaaaantaaggcctaagaaataccttggntcnaaaaannccaaaagggnnctaaanaatnccattnaaaccaaatgggaaactttaagttnttnantcaaaggatanaaagggaa

SEQ ID NO: 6128 - DNA, 186 bp, Homo sapiens
  misc_feature 58, 63, 75, 167: n = A,T,C or G
ccctttcgagcggccgcccgggcaggtactttttttttttttttttttttttttccanataanaccatttctganaaattgacaggtgtctataactcacaaatagctttccaaaaatactaggatctcagtacttttttttttttttttttttttgcagtctgctntttatttgaatggaaaatg

SEQ ID NO: 6129 - DNA, 409 bp, Homo sapiens
cccttagcgtggtcgcggccgaggtacttgaaatcatcactaatgagacagcaaatatgttagacttgctggcccagcaagccacagaaataaggatcacctctattagaatagactggcttcagactgcctcctagcccaaaaagaaggattatgtggaaagttgagcctgatgaattgctgcctagaaattaatgataacaggaaagccatcatagaaatagctgccaggatgtggaagatagctcatgtcccagttcagacctggaacccagatggtctccagattccctcttaggaggttggttttcatcctttggtggttttaaaacattaggggtagtgttggctatattaaaaggttgcttaatgttcccttgcctcttaggcctcctcatcagaaacatcc

SEQ ID NO: 6130 - DNA, 253 bp, Homo sapiens
  misc_feature 228: n = A,T,C or G
ccctttcgagcggccgcccgggcaggtactgagctccacaaacgtggccatggttggtgcggaaatgattctgagtgagcaggtagaagtctcacgtcctgctgtgtccagagttggttccttccagagggttcgtggtctcgctggcttcaagaatgaagcccgtggaccttcacagtgtgtgttacaagctgttaaagatgttgtgtctggagtttgttccttcanatgtgtctggagtttctcccttctg

SEQ ID NO: 6131 - DNA, 239 bp, Homo sapiens
  misc_feature 91, 130, 148, 154, 158, 173, 175, 193, 203, 225, 226: n = A,T,C or G
ccctttcgagcggccgcccgggcaggtacgcggggactagagaagggcgagcggcgcggcagagtgcggcgcagcgcagctcctgaggttnatggttatgaacaggattcggattcaccgtctttgccancccaaacggggggaggantcactnccangtgccccaggtcttnanagaaaccttctgtcttgngcattcactnattcgtccatgctctcaccctnntaatggaggggca

SEQ ID NO: 6132 - DNA, 398 bp, Homo sapiens
  misc_feature 230, 241, 258, 355: n = A,T,C or G
cccttagcgtggtcgcggccgaggtacgcgggggacttggccctgggggacaacaagtggcaggaacaggatcctttaaaacagtgtcaaacttctcatgcatggagcatgaattcttactaatagagactgtagtttttttcttgtctttggtaaatatataaaagaccttaatttttcttttttaatgaatggagaaaacatgagaaaaccagatggacctgttaganctgtagtcctncttcatttttggataangaatcctccacatttaagggatattagatcattcctaccaataaaaaactatttatttaaaaatgaaaactaagcctttgcgtagaatttaaaaagnatttgtcttagagtgaaaactggagtgaaaaaatttaaagtcc

SEQ ID NO: 6133 - DNA, 546 bp, Homo sapiens
  misc_feature 396, 426, 437, 439, 440, 453, 467, 485, 489, 495, 498, 502,512, 517, 521, 526, 528, 530, 532, 535: n = A,T,C or G
ccctttcgagcggccgcccgggcaggtaccttctctccttccctggctctgaacatcattcagaacaggaacatggggaagccagcccagcctgcctgagccgggaggagctggaagcactcttctcccctatgacctgaagcggctggagatgtattcacggaatatggtggactatcacctcatcatggacatgatcccggccatctctcgcatctatttcctgaaccagctgggggacctggccctgtctgcggcttcagtcggctcttctcttggggattgggcctgcagcataaagtctgtggaccagctggaaaaggagattgagctgcctcgggccagttgatgggactttttcaaccggatcatccgcaaagttgtgaaagctatttnatgaaattcaggaaaaggcccttggaggancaaatgggggnanntaaagatgtgggncatgggagcccccnatgaaaaacccttagtgnccgncctagntgnaacncccaaggganttttngggngaaancncncnaanggaatttgggg

SEQ ID NO: 6134 - DNA, 314 bp, Homo sapiens
cccttagcgtggtcgcggccgaggtacgcgggggcgtctgccaggagctacggccggaagatggcggcggccgcagagttgtcgctactggagaagtccctgggactgagtaaggggaataaatacagtgctcagggcgagcgacagattccagttcttcagacaaacaatggtccaagtctaacaggattgactactatagcagctcatctagtcaagcaagccaacaaagaatatttgctggggagtacaaagagaggaattttacagctgggctgctggcggtgacatcacatgtcagtagggccctgatg

SEQ ID NO: 6135 - DNA, 664 bp, Homo sapiens
  misc_feature 444, 531, 560, 567, 605, 625, 646: n = A,T,C or G
ccctttcgagcggccgcccgggcaggtactgttggttaaatgacaatttatgtggattttgcatgtaatacacagtgagacacagtaattttatctaaattacagtgcagtttagttaatctattaatactgactcagtgtctgcctttaaatacaaatgatatgttgaaaacttaaggaagcaaatgctacatatatgcaatataaaatagtaatgtgatgctgatgctgttaaccaaagggcagaataaataagcaaaatgccaaaaggggtcttaattgaaatgaaaatttaattttgtttttaaaatattgtttatctttatttattttgtggtaatatagtaagtttttttaagaaagacaattttcataacttgataaattataagttttgtttgttagaaaaagttgctcttaaaagatgtaaatagatgacaaacnatgtaaataattttgtaagaagcttcaaaatggtttatacctggaaacacacctaccttgaaaaagcaagaaatccggttgctggtntggcttctttttccctcttatttttggantgggggncattttcctatgccaataatgggagcaaacaactgtantaagttgtagaatttttganaagaatgaaatgtttattttnttaaccacaatttttttt

SEQ ID NO: 6136 - DNA, 239 bp, Homo sapiens
  misc_feature 7, 9, 13, 15, 25, 42, 43, 45, 48, 50, 51, 55, 57, 59, 61,65, 68, 72, 73, 74, 75, 80, 81, 82, 85, 102, 110, 114, 115,120, 128, 130, 135, 138, 139, 143, 155, 160, 174, 178, 180,223, 225: n = A,T,C or G
cccttancntggncncggccgacgnactcatttttttttttnntnttntnntttntntntntttnttntttnnnnttttnnnttnttttattttttttatantttttganttgnnttatnggtctttngntccanccnngcantgactggctcantgtantaagggccaaaccntttntnatacaaaaagttggccaccatgctcatgagggtacctcgaacngngaccacgctaaggg

SEQ ID NO: 6137 - DNA, 365 bp, Homo sapiens
  misc_feature 351: n = A,T,C or G
ccctttcgagcggccgcccgggcaggtacaatacaatcatagcaattttaaagtaacattaaagagaagacctctagttctgtggcggttttgctttatttataatctacaagggatgggagggtttgttttccacatttttaccctcaagttttaaaatttttcccacctcctttttacctacagagctcaaactaaataatgcacttttgaaccaccggtccgcttggagctaacataaataaataccagtgtccaccgatgcagtcctcagatgaacactttctcaaattattttttccttttttttttctataaaaagtcaaatgatacccgcgtacctcggcccgngaccacgctaaggg

SEQ ID NO: 6138 - DNA, 578 bp, Homo sapiens
  misc_feature 329, 518: n = A,T,C or G
cccttagcgtggtcgcggccgaggtactctaatcaggatgattcctaacaagtcagtcatttgtgaacttagtggactttttggttactttaatttgcatatattctccagttacatcggactctatctgtggccttgttcttcatttcagtgttaatcagctaaacagaagttgttgcttatgatgtgtgagtgaacatatgccactgcctggcctttttttcttcagagcttgttgtctttttccgctatattagactttgcagtatgcccagaagctttccttcataaaatagaaagaaaaaaacatttggcttatttttcactgnagctagtcttttatacaataatcttgtaaagaaaatttcttgaattctaaatattactctttctagatttttgaaatcaaaaagttttcagtaaaaaagtttcttactttattttattatattaggtaagtaaaaaatgtagggttatttaccataacctgttcattaatatcagaaatttacaatagncattttaagaccatagtaggattctagcataccgggtagtactttttttttttttttttt

SEQ ID NO: 6139 - DNA, 462 bp, Homo sapiens
  misc_feature 295: n = A,T,C or G
ccctttcgagcggccgcccgggcaggtacagattcaagaatactgtaccccaaagcctagatgaagatatcctttggaaaactgcaagatgttttccttaaaaaatttatacatctttccccctaaagaaaagtctatgtagtgtagggcagctgaaagtcaagcagaaaatcagagtcttactggcttgaagtatcaggggatggaagttaagtggccagaaataggataaatcgcagaaaggagggagttatggtaagtaacttccaaaaatctgtgggtaaactcccttcanatatctagatgtcccctagaactgtgcttgggagattccaaggagttcagtggaaaacaacagctggcaggcagaaaaatctaaatagagattttagctaatggcttctgcaggggtgacagaatttggtgtttgattcccacaagatagaagggattggtaaacat

SEQ ID NO: 6140 - DNA, 521 bp, Homo sapiens
ccctttcgagcggccgcccgggcaggtactgaatttgaaagattccaagcccttcccaactcaaagagtagaaacacatgcctccattttaaatcatctttcatttgtaaaaatacatatatgtttcatggaaaaaacacatttccatcaagctagagggaggattgctattttgcatcttttttgcaatgcacattctccaacagataatccacgtgtgaagtttttttgccctccttccacacaaatctgttattacctttttctttctttttaacttttaattgtattgttttgttttaatgcccagatagcacaagcattcctcctttacttgccttttcacaagcccgtaatcaatatctgtaaaagttaaaattagtttccacagaaacattgatttcaaagcaaacactatcttaatgagcctaactctggtaaattaaaaatataaatggcactattaagagaggccaaggaaacaatacgtaatatttaagcgggatctctaatattctaat

SEQ ID NO: 6141 - DNA, 250 bp, Homo sapiens
  misc_feature 33: n = A,T,C or G
cccttcgagcggcccgcccgggcaggtactttntttttttttttttttttttttgcacaatgaaatacattacctcttcaaaaaaatttttgtgaattaatcaaaaccaagtttgatatgaaaataagaataacacactaaaatgatatgcagcagacaggtcgcaaacttggagtgatatttacaattcaaaaacctaaatgattaatgtcaaaatacataaaagactcctacaaatcagtgaaagaaa

SEQ ID NO: 6142 - DNA, 515 bp, Homo sapiens
  misc_feature 138, 139, 140, 153, 154, 160, 165, 167, 170, 172, 186, 190,191, 195, 196, 214, 216, 229, 243, 257, 259, 262, 265, 269,271, 280, 283, 288, 289, 312, 313, 314, 323, 331, 332, 347,356, 362, 363, 367, 368, 369, 379, 389, 393, 394, 395: n = A,T,C or G
  misc_feature 423, 426, 441, 445, 446, 450, 467, 468, 478, 484, 493, 495,497, 500, 501, 503, 504, 505, 511: n = A,T,C or G
ccctttcgagcggccgcccgggcaggtacttttttttttttttttttttttttttctttttttttttttttttttttttttttttttttttttttttttttttttttttttttttttttttttttttttttttaaaannnaaaaaaaattttnnttaaanccccncnaantnaaaaattttttctnggannaaanntttttttttttttaaaantngtttttttttaanggccccaaaaaatntttttttttccccnanggnagnaaancncccttgccnaantttgnngggggtttaaaaaaattaaaagnnnatttttttnaaaacccnncttttttttttcccnaaaaaaaanattttnnaaannngaaccccccntttttttttnccannnaaaaaattttttaaaaaaaaaaaaaaanttntttttctttttcccnaaannaaanaaaccccccccaaaaannttttaatttntttttnaaaaaaaantntnatnnannnaaaaantttt

SEQ ID NO: 6143 - DNA, 327 bp, Homo sapiens
  misc_feature 76, 99, 122, 140, 154, 166, 206, 210, 237, 241, 267, 285,311: n = A,T,C or G
agaattcgcccttagcgtggtcgcggccgaggtacgcgggtgcttctttctcagtttattggttgaatgtgtatgngtttgagtctggaaataactgangtgtttgataattagtttagttngtggcattcatggaaacntgccttgtaaaccnaaaagccttcangggtttattgtcgaatgtttcattctatagaaaggaaatngccnaactatcactgggattttaatatttgntatnctctcatgaatagaaatttatgtagncgcaaacaaaatactttnacccacttaaaaagagaatataacantttatgtcactataat

SEQ ID NO: 6144 - DNA, 284 bp, Homo sapiens
  misc_feature 87, 95, 104, 114, 129, 142, 153, 159, 175, 205, 206, 208,211, 229, 238: n = A,T,C or G
cccttagcgtggtcgcggccgaggtacaaaatcatcttgcttaacagagaaaggatgtctgagagctcccgaatgaaacaatttttntgaaatanagggcccanaattggtctntgacaatttaaatanagccattcaatanttggcaaaaantgattnttttatatctttaggngctcaattatctacccagtttttaataatnntnaancaaggttcttggtgagcntctgaactntggcagaatttggtgggcaacataagactttttggatttttccaaa

SEQ ID NO: 6145 - DNA, 329 bp, Homo sapiens
  misc_feature 27, 30, 52, 58, 59, 76, 90, 100, 104, 105, 111, 113, 114,115, 117, 126, 148, 157, 159, 166, 172, 175, 176, 180, 186,201, 205, 216, 224, 235, 244, 247, 254, 255, 261, 269, 277,279, 285, 307, 309: n = A,T,C or G
ccctttctagcggccgcccgggcaggnacngaaaataaactttgctatttcntttggnnaatcatccaggataccntgtggacataaagnaattcactcnctcnnctgggntnnnantaacaggtnaggctgccttttccacctgcanatacaattntntaaaacnaaaatnctnnaggngggttnttattgcatatggancacntgaccccaagnaggatttncacaaaccttnccagagaanttnatcattnncaaggncctgccanacacatcnangccaancaaaggtcgccttgcatttcangnaggacaagtatggtaaaact

SEQ ID NO: 6146 - DNA, 590 bp, Homo sapiens
  misc_feature 339, 349, 355, 451, 477, 479, 548, 554, 559: n = A,T,C or G
cccttagcgtggtcgcggccgaggtacaaaaaattccaggcaaaaaaaaaatatttctcttgatctctactatcatacataaggtgtccagttttcaacaaacaagagatatacggaaggcaaggaaaaaacaacatacttccaagaggcaaagaatcaacagaaccagctaattatgacacagatgttggaactatctcatagggaatttaaaaggactataattaggtatgttcaagacactaatggacaagatggatgccacgcaaggtcagattggtgatttcagcagagagctggaactgtaagaatgaacccagggcaattgctagaaataangaacattgtnacaganacaaagaatgccttcaaaaagttcaactgtagatgacacaaaccaagtaagggaatccatgaacttgaagacagttcaacagaaattacccaaacnaaaatcacaaaaaggaaaaaatggcntnaaaaaaacccagaacggaatttccaagaagctgtgggataacatcaaacagtctaacataggcataacngggctncagangaaggagaagagaatgggaccagaagaaaga

SEQ ID NO: 6147 - DNA, 361 bp, Homo sapiens
  misc_feature 310: n = A,T,C or G
cccttcgagcggccgcccgggcaggtacttgaatgttgatatctttctctagacttgggaaatcctctgatattacacctttgactagactttctacctccatctctttctctacctcttctttaaggccaatagctcttagattcacccctttaaggctagtttttagatcctgtaggcatgctttattatttttatttttattggctcctctaactgacctggcttcaagctcactaaattctttcttctgcttggacaattctgctatttgagagactttggatactttctttcagcatgtcagtancagttttcaactcttagaaatttctcttggatcttattccaatcttttggt

SEQ ID NO: 6148 - DNA, 330 bp, Homo sapiens
ccctttcgagcggccgcccgggcaggtacaggttatccccaatgtcttccacccaggaaggcctactggctatgcagctacttggactcccgttcaggtgcagagaaccgcacaactcagggttagctctcagggtcttctctggctcctcagtcccactaatgcagagagaaccctggctactcggaaacggctgtcctggggctaatccactgctaattccgttagttcctgtcaagcactggccattcctgctttccatcccactgagcggggtcgtggaggggaagtccaaatgtccattgatgacacatccatttgtcaatgtat

SEQ ID NO: 6149 - DNA, 519 bp, Homo sapiens
  misc_feature 442, 507: n = A,T,C or G
cccttagcgtggtcgcggccgaggtacgcggggtagtccagccttccaggtggcgtgagaggcaatgactcgttacctgccgcccatcaccttggaggccttcctggccttgagtagaaaagtcggggatcggggcaagagaggctgagtacagagactttccatagagtctcttgaagtgtgcccggatatccaacatgtcaatttctgctcgagaaaccatcactctgatgagggtgttatcatcggtgcccaagcccttcatcgatttatagagcttttcaagcaaaatatgcagatttgttcctcatgcactttactatagccagcagagcatcttcaaagctaccagatgtttcagatttaatactctgttcaatatccttctgtgatatccttttggtattcatcaaacacatgcaacagggtgatttcggttccnggaacagagaacagttaagaaatttcaccctcatctgtccccccattttcttcttttccaccctnatacagggtcct

SEQ ID NO: 6150 - DNA, 243 bp, Homo sapiens
  misc_feature 57, 111, 165, 174, 189: n = A,T,C or G
ccctttcgagcggccgcccgggcaggtacttttttttttttttttttttttttttanaatgatatattcagtgttggcaaggaataggaaaataggcacggtcctacactnttggcaagaatgtatgccgatcccatcattctggagggggaattggcacaattntatgtctanaaacgtagtctaaanacaggaatcagctgggcacagtggctcatgcctgtaattccagcactttgggag

SEQ ID NO: 6151 - DNA, 556 bp, Homo sapiens
  misc_feature 460: n = A,T,C or G
cccttagcgtggtcgcggccgaggtaccttggagatttcagccagccctgtagcatagataccagctaattaaatggctctcagttaaatggcaaatggttattgagcaaaaggtgttatggtaaatactagacattcaaagacaatcaagacagtctgatctccccaaaagcgtgctgtctactagaggagaaagatgtgtaccaagtcattatttctgacagcattgtgtattagaaggaacactggatttaatcaaaagataggagtttgaatcccgatgccacctcttaccaactgggtaaccttggataggaattgcataacttctctgagcctgttctcaaattgcctccctcataaggttgctgtgaaagaataaatgcatgatggtttctgaagcacttatcccctgccgttagatctcctgagctgcatttctgtttaacacggcccccantttgtcagccaagcagctcaaatatatgaagtctaaaaatgaaagtaatgacccttttatgatctctttctattggtctcaatcaagttccttttt

SEQ ID NO: 6152 - DNA, 551 bp, Homo sapiens
  misc_feature 426, 452: n = A,T,C or G
ccctttcgagcggccgcccgggcaggtacaaagaaataggaataagtttcatatactaattatgctgagttttaagcctacatatcacaaaatatttagaattgtataaccttttcatatatttataacttttaatgtctttttaaaagatgtgggaccaaaaatatatttataatttggaaatgtgactgcataccaataagaaaacttaccttattttgaaatttatctgggatattaaagaatctaccaattcttaaaaacacagatttatactttaagcttattttaaaattaaagaatatataccaattcttaagaaacactttaaggactactcttaaataacttaaatatcagagttttgtttgtaatattaaaatttaccatgggaaatcactgttggtcagctatcaccttaattgngtatgaatatggataaatggtttaancagtaaaagctatcttaaagaatttaatgggaaaagtttaaatttgaaagatgtaaccaaaaaattctggcccacaggttggattctggaatttttaaa

SEQ ID NO: 6153 - DNA, 328 bp, Homo sapiens
  misc_feature 145: n = A,T,C or G
cccttagcgtggtcgcggccgaggtacaatatttatgcagggatacacaaatacatcagtgctacaaaccatagaaccagaaagactcacgtgtattagaaaacttgatatatgctggaggaggcattgcaagtcagtgtacgcnggggtggtaggtagaaatataagatgactcccaagatttttgcaccctggcatacacatatgcttttccagttgttgaaacactaatttaggtgctgctgtgaagggattttgtagatgtgaataatgttccaaatcagttggccttaagatagaaagatgatcctggatgggccagatctta

SEQ ID NO: 6154 - DNA, 402 bp, Homo sapiens
  misc_feature 75: n = A,T,C or G
ccctttcgagcggccgcccgggcaggtactgaagagtaggggtcagaaagaggactgggggatttcccctaattnttctcactaatccttattgcttttttattgcaaaaaggaaagaatattgttatgcatactcaaattgttttttttcccctgttaaaccatgattatacatagattttgtctccctctctcgtgggtattagaaccctgcatggttttctctgtgtggtggggccatagctttcttctaggatagttattaaaatgcataccactttcaattgtgtatccggcattctttccgtgatgttcaagtgcctcgctagtcattttcatttaaagaggcccaaatacttccatagaacaagtacctcggccgcgaccacgctaagggcgaat

SEQ ID NO: 6155 - DNA, 768 bp, Homo sapiens
  misc_feature 170, 314, 327, 331, 340, 381, 419, 430, 456, 467, 497, 505,512, 592, 597, 599, 601, 606, 614, 664, 668, 676, 684, 685,689, 706, 708, 710, 712, 714, 721, 723, 724, 727, 733, 735,741, 742: n = A,T,C or G
ccctttcgagcggccgcccgggcaggtactttttttttttttttttttttttttttgagcagttaacattcctttattttagtttcaggggcgggggaagggagagagggagagaagatacagggaaacttacagcaaatttttcactgtttatagctttcttggggaanaaaacacatgcacgaatcctggtgttaggaatattttaagcgtatatcttcaatattattcatccaggactgaagtaagtcctgatgcaggaaatgagtgagtttcacagctttctgagcccctacttgacccaggaagcccanctggcacctcctntcantcctgcctntaaacaggacaccccaactgctgttgggaaccgtgtggcantcgttctggctacttcctgctggttaggggtgaaaaangggccctgcantttggtgtcctcaaaagggaattttntagggtaattnagggaccagcgggttgatccaagggtcctnggtagaanccgtganctgactcatttgaggttcatttgtaaaaacatttgtagcttgatggctttgatctgcatgatgaactaaaataccttttntggantntnctgtntgggctcnccaaaaatttaacacctgaggttttttgccaaccccaccaaaaaaattgntgtngggcttanccccattnngtgnaaaaaaacttggacttnanantnanaaaaaantnngcntttttnancaaaanngaaaatcttttttttttttttttttt

SEQ ID NO: 6156 - DNA, 723 bp, Homo sapiens
  misc_feature 470, 485, 529, 543, 548, 556, 571, 602, 616, 632, 649, 674,688, 691, 709: n = A,T,C or G
cccttgcgtggtcgcggccgaggtacaaaaaaataaaaaggaggctggtgggagaactgcttgagccccagagtttgaggttacagtgagctatgatcacatcactgcatcccaggcctgggcgatggagcgaaactgtctcttaaaaaatggcagggagttggggagctgggcaggtgcagtggctcatgtctgtaatcccaatactctgggaggccaagatgggaggatcacttgagcccaggagtttgagaccagcctgggtaacacagggagaccccgtctcaaatatttaaaaaattagtcatgcgtagtggtgcatgcctgtggtcccagctacttgggaggctgaggtgcaaggatagcttgagcctgggaggacaaggctgcagtgagctgtgattgcaccactgcactccagcctggcccgatagaatgagaccctgtcttaaaaaaaaaaaaaggcaganggaccaccagtgtanttaatgaacaaaagcccacaaattttttttaaaaaaattttttncccaaaacaaccgnacctngagtagcntgctttttccccttnttttttaaaagtgaaacaaaaattccttaanaaaatttgcaaggngctgggtgaacccttntgatgctaaagtggttnttttggaattttaaaaatttgggtnttttttggacatcnccnccatgttaagaagtgatnggaaaaaaaaaaaa

SEQ ID NO: 6157 - DNA, 376 bp, Homo sapiens
cccttagcgtggtcgcggccgaggtacgcgggtatgttagaaattctgataaggagattgttagaagcagagataaagattatataaaagagagaggagacagaaaaggaggtgaaatgtaatctcacaattccctgcaccacttatttatttcctaaaatcttgtctcacacaaaagacatcagagacagaaagttttctctgtccacatctcccatagggacaaaggtagcttaccatttcttggaaaataaagaaaaaatgaatttttctttaccaaaatttaaacaccattagggatagaggttaaaattaattgagacatctgtaagaagtaacaagtacctgcccgggcggccgctcgaaagggcgaatt

SEQ ID NO: 6158 - DNA, 349 bp, Homo sapiens
  misc_feature 188, 216, 220, 224, 289, 321: n = A,T,C or G
ccctttcgagcggccgcccgggcaggtacgcgggatggcacatgcagcgcaagtaggtctacaagacgctacttcccctatcatagaagagcttatcacctttcgtgatcacgccctcataatcatttttccttaacttgctatccctaagtcctgtatggcccttttcctaaacacttcacaaacanaaactaaacctaatactaacatacttangacncttnagggaaatatgaaaccgtcttgaaactatcctgcccgccatcatcctaaggtcctcatcgccctnccatccctacgcatcctttacataaacagacnaggtcaacgatccctccctttaccatca

SEQ ID NO: 6159 - DNA, 409 bp, Homo sapiens
  misc_feature 169, 170, 172, 225, 231, 281, 315, 323, 339, 344, 345, 392: n = A,T,C or G
gatatctgcagaattcgcccttagcgtggtcgcggcccgaggtacacggtattccttaggtcccttccattggtagtgatgctgcgagttattactggagaaaaggaattctagagcttaacttggcagattaaaagtacttttttttttttttttttttttttttggnngnttgtttgtttttggtgtagaaggggaatgttgtgaaagagaacagttggaaancccaanaatatacaaatcgacaaatacttagtttatgtctataaacaaagaaaaanccttttacttatctttagaaatgaaaagtataangcacaaanacaatttgatcaaatnattanntttgtggtcttctactggagagtttgacccatgttatttttaggttntacataaagaaaaaata

SEQ ID NO: 6160 - DNA, 439 bp, Homo sapiens
cccttagcgtggtcgcggccgaggtacgcggggggtgatatcacttaggtagaatcagactactaccatatcttcattccagtaaggaacgacaaaaattccgctcagggtgttaggaaagactggaagactggcaggtcagcagcgctgttgagggctgactttatttggaacagagaatggaaaaactcactcctaaaaggtgttttcaaaaacggtagagatctttatgttgaacaactagtgggaagctaatagttcatgtaactagaagcaacgaattaaatggcagaccagccagaagtttaacagacagaatcaaggggagagacagctaaaaagagtcctgttaagatcactgggggtcaggatggcatgcacatgtgctacactgcattgactcaaaagcaaccagaaagtgtacctgcccgggcggccc

SEQ ID NO: 6161 - DNA, 216 bp, Homo sapiens
cccttagcgtggtcgcggccgaggtactaacctctggaacttttattgttttttattcctttgctgtatttcaggggtcatcgaatatcttcactgtctctgtaacatatacattttcaagccagaaaactgactccattagctaaattaaactgtttgcgaaagcctttttccactgccatgtcttatttctatttcagtttctctggtgggata

SEQ ID NO: 6162 - DNA, 702 bp, Homo sapiens
  misc_feature 112, 236, 256, 288, 297, 305, 313, 342, 360, 418, 425, 435,439, 448, 454, 463, 464, 467, 470, 473, 475, 486, 490, 527,544, 548, 549, 550, 551, 552, 553, 554, 555, 557, 558, 559,560, 561, 562, 563, 564, 565, 566, 567, 568, 569, 571: n = A,T,C or G
  misc_feature 572, 573, 574, 575, 576, 577, 607, 612, 627, 628, 655, 658,668, 669, 682, 695: n = A,T,C or G
ggatatctgcagaattcgcccttagcgtggtcgcggccgaggtaccgaaaagaacagaggaaactaaggcaagctgtgaaagatgctgtgtctaagaaacccattccattgnagaacccaaaggaaaagcgaccaggtaaaaggattgagagggaagaaggggaagaagaagaagcccttcctttagatatgatggatgaagatgacttacagttaatgaaggatttaggacaaanagtatcttttctaacaaganatctttcttctaatgagcctgttcatgccaanaaacggaancatgaacncattatanataaatattaaaaaataccaataactctncaaactgcaccaaaaaangaactgattcatttacttcctatcaaaaataaaaatggtataaatcccacaaactaanaaaaaanccaatttctnatantaaccaaanattaanaagatccannaanaanaananggaactttaangaanaaatcatttaaaaatcctattcaaaaacttaccatanaaaaacattttatttanaaannnnnnnntnnnnnnnnnnnnntnnnnnnnttccttccccaacccaccctttcaaaaagnccaanttccaccccctttcnncccttttctaattaaatcccaacctcnttncccaaccttnnccttaatcataancataacctttttnccttttt

SEQ ID NO: 6163 - DNA, 606 bp, Homo sapiens
  misc_feature 477, 491, 504, 541, 556: n = A,T,C or G
cccttagcgtggtcgcggccgaggtacaatatctcatctatatgccagcagtttaaatgctatttgttcagtctcgaacattttcaaacaaatgacagttatcacttaactaacacaatctttctattatttcactgacaaaagaggcagtttcctgcagtggaaagaggagatggcttggagttagaagagctagattctgaacccagctctactcattctgagccttagtttccttatgaggatcaagtgagacgaaagtgctttgtaaaggagtaataaccacaagaaataatattctagagtccatctcttccatcaactgatggatccctaatttgcacatgtattttgcaagtaaaatcttacctcttaaagtaaatatatgatgcatattcaccacatgcagctgaaatgtgcaagttgggttacatagatgggaaaagagtatgtattaaaaaagcctttaagacttgnatacctcttgatgngcctggatttaanagccatttaaaaattttattggggttaaacacatgtnccttttatattaatnggaaccctctttggaataaacttaagcctttaaaggtaatttttttttaa

SEQ ID NO: 6164 - DNA, 370 bp, Homo sapiens
  misc_feature 202, 309, 337, 338, 355: n = A,T,C or G
cccttagcgtggtcgcggccgaggtaccagagtattgtatagtcaatgttaaataaaagccaaaactggaatgtgcagaaagtaggctttggttaatttgtggattcatttttatttttgtctttgtttaaacttttttaaaaaaaataaagaatttctgggagtaagattgggtatatttctgtttaaaagactttacagntgaatccatttttgctttacacctgtttgccatcaccaaaggggactcacccaaggggaccatggacctgctggtgttgtgtgtatatttacaaaaaacaaaacttncaaaccacccattgggatattaaggtannaattcaccaaactaaanacttgcgggctttgg

SEQ ID NO: 6165 - DNA, 429 bp, Homo sapiens
  misc_feature 130, 131, 135, 136, 150, 153, 154, 180, 192, 201, 204, 205,208, 211, 234, 245, 251, 301, 311, 332, 341, 346, 353, 354,365, 384, 386, 387, 388, 406, 413, 414, 422: n = A,T,C or G
ccctttcgagcggccgcccgggcaggtacctaagctcagtatgcaaaagcccaaactagtgcagaaactgtaaactgtgcctttcaaagaactggccctaggtgaacaggaaaacaattgaaggttttgnnatgnntaaaatttggcaanaannccataaaatttttaaatttttttttngggaaagccccntttttttcnagnncanttnatttaaaacccgggccatggaantgggggggccnttcaanggggaattccttaattttttttaaaattaatttttttcaaaaatttaaanttttcctttntccccattttttttcaattanattaatatnggaanttccaannaaaagggccantggggggggggggttattntnnngccaaaatttttaccccnggttttnnaaaaaaanttttttt

SEQ ID NO: 6166 - DNA, 694 bp, Homo sapiens
  misc_feature 512, 542, 578, 642, 654, 665: n = A,T,C or G
cccttagcgtggtcgcggccgaggtacggggtcacaatcctaaacatatatgcacctaacactggagctcccaaatttataaaaccatcactaatagacctaagaaatgagatagacagtaacacaataatagtgggggacttcaatatgtcactgacagcactagacaggccaatgagacagaaagtcaacaaagaaacaatggatttaaactataccctggaacacatggacttaacacatatatacagaacattccatccaacaactgcagaatatacattctattcaacagtgcatggaactttctccaagatagaccacgtggtaggccacaaaacaagccgcaataaatttaagaaaattgaaattttatcaagcactctctcagaccacagtggaataaaactggaaatcaactccaaaaggagctttcaaaaccatgcaaatacatggaaattaacctgctcctgaatgatcatgaaaatcgagatgggaaattaaaagaaatnattaaattgaacaaaaaatagtgataccancctatcaaaaagaagtggaatcagcaaaagtcagtngctaaaaggaaggttcatattcctaaacacctccttcaaaaaagtcttaaaagaggcccaaacnggccattcaaanggtcccacttncaggggacctggggaaaccaggaccaacc

SEQ ID NO: 6167 - DNA, 499 bp, Homo sapiens
ccctttcgagcggccgcccgggcaggtaccgaacctgtaataatataaaggaaatgggggatgactcctgagtgcagggtttcctttaggggtgatgaaaatggcctgaaattgatggtggcgcacaacagtgggtggttgcataactctgtgaatatactaaaaaccacggaactgtgcacttttaattggtgaaatgtgtggtatgtgaattctatctcataaggctaatattaaaaagaatcatataaaacatttgctttgctatgatggccagtatgccatccctccaagtagctctgacattcattcatttattcatccattcattcattctacagatatttcttgatagtccactatatatgtggctctgtgctaagcactgggatacagagttgaagaagatagacattgtccccatcctcatgctattgggaacatagactttagataaaaaattgcactgaggtgtgatgaattttttattatggaaagt

SEQ ID NO: 6168 - DNA, 303 bp, Homo sapiens
cccttagcgtggtcgcggccgaggtacaatgtttaataaaagtgatgagagtagatatctttaccttgttatcaattttaggaagacatagatttttgtgtagatggcctgcatcctatgaggactcttcattttatccctggttttctgagggcttttaatcatgactcaatgttgggttttactaagtgctttttctattaagatgatcatatgcatttttctttttagtccactaatatggtaaagttcatttattgatttttgaacccgcgtacctgcccgggcggccgctcgaaaggg

SEQ ID NO: 6169 - DNA, 682 bp, Homo sapiens
  misc_feature 23, 31, 44, 47, 56, 65, 66, 75, 85, 99, 102, 104, 121, 144,167, 237, 299, 302, 313, 326, 340, 415, 476, 493, 510, 524,529, 536, 558, 564, 572, 590, 597, 622, 660, 663: n = A,T,C or G
cccttagcgtggtcgcggccgangtacttgnttcaccatacttnatncacaccagngaaagagtnntgcatttanttggagtatntaaagccagtggcngtntntgctcatacttggacanttagggaagggtttgccaagttntaagagaagatgtgatttatttngaaatcgtttctgttttgtttttaaatcaaactgcaaaacttaaaactgaaaaattttattggtaggatntatatctaagtttggttagccttagtttctcagacttgttgtctattatctgtaggtggaanaantttaggaagcnaaatattacagtnttgcattggtgggnctcaatccttaacatatttgcacaattttatagcacaaaactttaaattcaagctgctttggacaactgacgatntgattttaaatttgaagatgggatgtgtacctcaaatggaaatgcataaatcaccccgctnctgcgtcgctcacgctnggaactgaacaccgganctgttcctattggnccatnttggctnctgctactactgaaatcttgangtgtanttaacttnctatctgtgatttggganagggaanaacttaacccaaatgttttaccttngaaaaataccatgggaactatgccaatcttttgttttnaanctaaaaaaaaaaaaaaaaa

SEQ ID NO: 6170 - DNA, 330 bp, Homo sapiens
ccctttcgagcggccgcccgggcaggtactaactttcactccccctctctgtaataaatgccttaagcaatttaaataagcagaatgtttaatttcattctgtcccattgttaccctggttcttctgagtgcccagcttacccgccgagcttctttcagtcatcctcggtgtcctctgacaatgcatcttctgcttccacatgctctagcattccttcaccggggtcttcatagccccatgttgggcgccagaaatgttggggtgatcagacccaacaccaggccgtgggggctacgaagtccggaggagtcaaaggaatgagaaaagac

SEQ ID NO: 6171 - DNA, 639 bp, Homo sapiens
  misc_feature 37, 127, 128, 129, 130, 159, 172, 181, 182, 187, 188, 190,217, 218, 219, 228, 229, 230, 232, 233, 234, 239, 240, 253,272, 276, 299, 300, 307, 314, 323, 324, 325, 328, 330, 359,363, 364, 368, 383, 388, 423, 424, 428, 429, 430, 439: n = A,T,C or G
  misc_feature 444, 447, 452, 458, 463, 464, 470, 472, 474, 481, 482, 484,485, 494, 508, 512, 516, 530, 533, 535, 536, 544, 545, 548,553, 559, 564, 565, 567, 570, 571, 583, 587, 590, 597, 599,608, 610, 613, 614, 619, 623, 624, 634: n = A,T,C or G
tgggatatctgcagaattcgccctttcgagcggccgnccgggcaggtaccttttttttttttttttttttttttttgggtttttttttttttttttttttttttttttttttttttttttttttttnnnnttttttttttttttttttttttttttttnttttttttatttnttttttttnnctcannanaaaaaaaaaaaaaatttttttcccccnnnaaaaaaaannncnnnaaaannttttttttttttnaaaaaaaaaaaaatttttngcanaaaaaattttttttttttttttnnaaagggnaaaaaanttttttggnnnccnanaaaaatttttttttttgggaaaaaaaaanattnntttnaaacccggggggggnggggnttttttttttaataaaaaaaaaaaaaaaaaaaaanncccnnnttttttttnttatnaangaggnggtttnttaanncccccncnanaaattanntnntttataaancccctttttttttntccnaaancaataaaaaaaacnccncnncaaaaaanntanaaaanaaaaanctttnnanggnntttttttttttntatnaanaaaaaantnttttttttntnccnnacacnaagnngaaaaaattnttttt

SEQ ID NO: 6172 - DNA, 130 bp, Homo sapiens
  misc_feature 49, 52, 55, 58, 69, 71, 86, 121: n = A,T,C or G
cccttagcgtggacgcggccgacgtaccacaactcccaggattggtgcnggnggnaancttgtatctgntntgcaaatattgtttntattgttttgagcgacgtgggccctcctgaacatnttattttaa

SEQ ID NO: 6173 - DNA, 603 bp, Homo sapiens
  misc_feature 412, 423, 436, 474, 499, 507, 516, 518, 521, 523, 525, 531,534, 542, 544, 554, 555, 557, 560, 563, 565, 571, 574, 576,581, 584, 585, 586, 593: n = A,T,C or G
cccttagcgtggtcgcggcccgaggtacgcgggtgtcatttggatttgcatttctctgatgagtgatgctatcaagcacctttgctggtgctgttggccatatgtgtatgttccctggagaagtgtctgtgctgagccttggcccactttttaattaggcgtttgtctttttattactgagttgtaagagttctttatatattctggattctagacccttatcagatacatggtttgcaaatattttctcccattctgtgggttgtgttttcactttatcgataatgtccttagacatataataaatttgtattttaaaagtgacttgatttggctgtgcaaggtggctcacgcttgtaatcccagcactttgggagactgaggtgggtggatcatatgaggaggctagganttcgaggtcancctgccagcatancgaaaactgtctctactaaaaaatcaaaaattagtcangcatggtggtgcacgtttgtaatanccactttnaagaagctnangcncnangatcanttnaacccaanangaggaggtgnnanganctnanatcatnccngnaacanaannnaactttntttaaaaaaa

SEQ ID NO: 6174 - DNA, 277 bp, Homo sapiens
  misc_feature 97, 119, 120, 161, 179, 190, 193, 228, 268: n = A,T,C or G
cccttagcgtggtcgcggccgaggtacgcggtcaaggcctgaggggcgcattgtcaataaagcacagctggctaaaaaaaaaaaaaaaaaaaaaaangtaccacgaaaaatcaatgtcnncccaacaccttacagattactcaaagactgtcctggtttcntgtttacccctcaaccangggaggaactnccnccaaacttccctagtgaaatccccggaatctgccnttttctggatgcttaccaacaaggaacaaactcaaaaccntgcttccaa

SEQ ID NO: 6175 - DNA, 507 bp, Homo sapiens
  misc_feature 76, 429: n = A,T,C or G
ccctttcgagcggcccgcccgggcaggtacggggtaaatggattttgcacaaaaccacaggaaagtcccggagctncatcccgcacttacaacagagtgcctttcacaaacctacggattggcagaaaaagatcctcatatggtcaggtcgcttcaaaaaggaagatgaaatcccagagactgtttcgttggagatgcttgatgctgcaaagaacaagatgcgagtgaagatcagctatctaatgattgccctgacggtggtaggatgcatcttcatggttattgagggcaagaaggctgcccaaagacacgagactttaacaagcttgaacttagaaaagaaagctcgtctgaaagaggaagcagctatgaaggccaaaacagagtagcagaggtattcccgtgttggctggatttttgaaaatcccnggaattatgtttaacgtgcctgtttaaaaaaggatgtggtattgaaggatcccatttcataaaagtatggatttgccc

SEQ ID NO: 6176 - DNA, 617 bp, Homo sapiens
  misc_feature 537, 592, 612: n = A,T,C or G
cccttagcgtggtcgcggccgaggtactgcttttgttgtatcccaccggtatgttcccattatcatttatttcaataaatatttcaatttccttcttaatctcttcattgacctacgggtcatctgggagcatttccatgtagttgtataacttccaaaactcctcttgctattaatttctagttttattccattgtggccagagaagatgctttattctattgtggtcagagaagatacttcatattatttcaggttttttttaaatgttttaagatttgttctgtggcctaacattatggtttgtccttgagaatgatcatgttctgagaaagagaatgtgtattctgcagctcttgaatgaaatgtccagtaaatatctattagaaccttttggtcaatagtgaatatttaagtctaatgtttctttgctgatttttccctgggaagatcgatcaaattctgaaagtgggatgttaaagtctctagcttttattggattggggccagtctatctctttagctctaataatattncctttatatatctgggggcctcaggggtggggtgcctatatatttaaaattggtnatattcctcttggataaatngaccc

SEQ ID NO: 6177 - DNA, 316 bp, Homo sapiens
cccttagcgtggtcgcggccgaggtacgagggccatagctagcaagatcctccaaacatgaggtagaacttggtgcctcctgcctcagagcttctggaagccttggggaaggcaagcgtgttcctgggcagaagaggagcaggaagcactggatctgctgaatcttcagttttctgtctgaggctggcttgaggcgagggatgcggaagaatgttctccaagggggtcattcactcaaggcaccatcccgtgcacccggctcccgctcctgctcccgccctccccgcgtacctgcccgggcggccgctcgaaaggg

SEQ ID NO: 6178 - DNA, 209 bp, Homo sapiens
cccttagcgtggtcgcggccgaggtacactctgaattataactaaacaactacatgttactgacaaatttgtgattctttgagtctaaacaacacagaaactagaagatccctttcctagatttatatacttgattttcttataaaaataacttcagttattatgtcaatatttacccgcgtacctgcccgggcggccgctcgaaaggg

SEQ ID NO: 6179 - DNA, 209 bp, Homo sapiens
  misc_feature 42, 46, 59, 61: n = A,T,C or G
cgccagtgtgatgggatatctgcagaattcgcccttagcgtngtcncggccgacgtacncnggtgtcattgtttacttgtcctgtcactggatctgggctaaagtcctccaccaccactctggacctaagacctggggttaagtgtgggttgtgcatccccaatccagataataaagactttgtaaaacatgaataaaacacattttat

SEQ ID NO: 6180 - DNA, 469 bp, Homo sapiens
  misc_feature 46, 63, 84, 391, 439: n = A,T,C or G
gatatctgcagaattcgcccttagcgtggtcgcggccgaggtgcanatacaccgaaacggctngtaaaacaaaggactttgttntctgagctattatgtaacaccttttcattcacctcaccataaggaatttcctgcttcccatacaattaagagaaaataattactaagaggattatgatacctcgtgaccaagcctcctgagtataatactcttagttatgagttgtgcagataaatatatatttaaaatttatttttcagaacaatgttatgctttatataagtgaattgttttatgtctgtaactaaaaccaagattgcagcagctcaacacacagaagttaaatataattcagttttgtaacctcgccttcggctttttgtttgntggctctttaaaacaacaaaaaaaattatgggataatgaatgcctggncatgttcattcctgcctggcctggaatatt

SEQ ID NO: 6181 - DNA, 491 bp, Homo sapiens
  misc_feature 102, 130, 134, 137, 141, 162, 163, 167, 172, 173, 181, 184,191, 195, 201, 221, 225, 248, 290, 301, 306, 325, 330, 347,364, 379, 381, 394, 402, 411, 423, 429, 444, 446, 448, 452,457, 471: n = A,T,C or G
cccttagcgtggtcgcggccgaggtactcttgctcttttagctagagtgtatgtgaaaataaagaaatacatcattgtattcacaaccatgtgtcttcattnataactttatgcttaaaaaatttttaanttcnaanggtntaaagtttcatttggatattnnatcnctctnnaatgccantanaaagggnttgnggccangaaaaattcttacttccatngtgnacaattcttgcccaccaagtgtncttattttttgaaagaccttttctcctttcctaaaattgggnccaaattgatntttgntctctttaaccccaagggnatttntaaatttcttattaggnaaattttgggttctccntccaaaacttcttgncnttatttttccttncccagatntttcccagncaattaaaaacnggttcnccttttaaaggaacncnanttcnttggntgttcaaagggggnggttttccaacaaaaaaaaa

SEQ ID NO: 6182 - DNA, 802 bp, Homo sapiens
  misc_feature 211, 358, 567, 568, 616, 634, 637, 639, 644, 648, 651, 655,660, 666, 669, 672, 673, 683, 689, 696, 705, 712, 729, 732,742, 751, 758, 766, 770, 772, 777, 778, 780, 783: n = A,T,C or G
ccctttcgagcggccgcccgggcaggtactagttgggcgagacctaaaattccctgggcacaggttgcacctgggtgtgagcacttaatcactcaacgctttgttttcttacacttcgaaaatcaagggaaagagtagtacgcgggatgtatatttctaacgtaaaaaacataatttttttcttttcaagattttttcttaaaaagatganagaaacatattttttcaggaaaaacaaactttaaaaaaaaagaggagaaataaaaccttttctcccctttccccatcctctatctatccctctttcccaggaacaaatcaaaaggtggattatcttctgaacaatggaaactgccangttcagaatgatgtctttttctcaatgcagtgagttatagattctctagttttctccctagggatgggaagggggcattgaggcaagcctgggagaggagcccggggagcaagggtcattgaacttttttctttagtgaaggaggaatacaatcaagggttttgtattcaaaatggttgggccaatattttgggaatggggacattggnnggggttaagaggattttaggtttaaaaaccaaaacaaaaaggaattgntccaaatttttaaccttnggncnggganccangcntaanggccnaattcncancannactgggcggnccgttncctaagnggatcccgncctcggnacccaaaccttgggggnaancaaggggcantatttgccnccctggngtgaaaangggnanccccnnanaanttccccccccccccccccc

SEQ ID NO: 6183 - DNA, 761 bp, Homo sapiens
  misc_feature 441, 460, 488, 544, 550, 618, 633, 671, 717, 724, 732, 736,743, 744, 745, 751, 761: n = A,T,C or G
cccttagcgtggtcgcggccgaggtacatgtgcacattgtgcaggttacaaataattattatttattgaaaaagaaactacagttgacccttgaacaacacagatttgaactgcgctggtccacttatatgtggattttttttctaaccaaaagaggattgaaaatacagtattctcaggatgcaaaatctgcatatactaagggctgacttttcacatacatgggctctgcaaggacttgcatatgcactgatttgggtttacacgggggtgatgatttggatataggcaggtggtcctgaaaccgaattcccgagcatgctgagggatgactgtatatgtgaataagacttaaattatatttccaaacttgggatggaatcaaacattttagtaacaattctgttgattacacttctatttttaatcttgtaggactgnatttattttttatttttgngtttgaatatgtgtgtgtgtatgtgtgntggtttggggaaacaattataaaagatttgtgaattattttggatgtatgctattnccaaanactcctgtttcccttcttttttttttttttaaggtcttccttgaattgggcaatcataatttacaganaattggttactatanctttgaataccttatagggtaccctggttattattttnaaaagcatgcctaatttaacattttaccatatgccctttatttttnaaaaatngggtaaantggnttttaannntaagcnttaaattgan

SEQ ID NO: 6184 - DNA, 184 bp, Homo sapiens
  misc_feature 81, 152, 154: n = A,T,C or G
ccctttcgagcggcccgcccgggcaggtactttatttttttttttttttttttttcttttttttttttttttttttttaanaccataattattttattaactaaattacagctgctttgaataaaaacttaactaacaatcacgtaagggtntnataggtgacaaccagttacttttcttggtt

SEQ ID NO: 6185 - DNA, 544 bp, Homo sapiens
  misc_feature 65, 69, 77, 80, 96, 97, 100, 103, 105, 117, 118, 138, 143,150, 155, 160, 161, 162, 170, 171, 172, 173, 178, 181, 185,214, 223, 225, 230, 232, 234, 237, 241, 245, 249, 252, 255,257, 258, 264, 267, 268, 269, 270, 271, 274, 276, 277: n = A,T,C or G
  misc_feature 279, 282, 291, 302, 313, 315, 323, 326, 327, 340, 345, 355,362, 363, 370, 383, 385, 387, 392, 400, 403, 412, 414, 416,424, 426, 431, 440, 442, 449, 478, 479, 494, 501, 505, 520: n = A,T,C or G
cgccagtgtgatgggatatctgcagaattcgccctttcgagcggccgcccgggcaggtacttttntttnttttttanttnattttaacctttattnntantgntntttaaattttgnnaagaaaaattcattttttcnagagngggcaanaaatnttaannnaaaaaagnnnntatgnaanatgnaaacagagaaaactttctgttttgatgtnttttgggtnanacaananantangaantttntaancgnttnannaaaatnttnnnnngcntnncnccnaaaaaaaanaatcctatatntttataaaacngngttctgcnccnncaattgggttggnggagnggtaaatatncaaggannatttttntaaaaaactgttntnanaagancaaatttngangttttaaancncngaaacatnancctantttaaaaantnttttttnttttaaaaaaaaaaaaagaagcttttccnngggtaaaaaattttnaaaaacnccgnaaaatttttttttgnaaaaaaaaaaattaaaaaaatttt

SEQ ID NO: 6186 - DNA, 575 bp, Homo sapiens
  misc_feature 473, 497, 547, 573: n = A,T,C or G
ccctttcgagcggccgcccgggcaggtacttggtttttgtttaatagaacaaataatcagtgtttcacttatattactaaatgtgaaaaacataatgtgaaaagttacatacattaacttggttgtaaaacccattttaagtgttcatgtaatgtggtaagtttaaaaagtgaagtgagctgttttactacaatgaattcgtttgactcaaagattaaaatgcccctccccctatgtgtatctcttatggcctgtaataattgaaagcaatgtttttgcagtttatataatgcaatttttaatctgtgttcaaaaatggagttcatatgggcttaacacatgaaatgggtggcacagatccacttgcagaacccaaagatacacaatcagttttgaaatgcaacttaagccattaattgttggtgtgaatttaaaattttctagtgtttgtatggtgggtatgctgcctaaanagcaaagcatcctctgcacaaaangaaaattactgtagtggctttcgattttaattagaattttctccctgggngtttctttatagacctaaagcaaaantc

SEQ ID NO: 6187 - DNA, 575 bp, Homo sapiens
  misc_feature 221, 553: n = A,T,C or G
gatatctgcagaattcgcccttagcgtggtcgcggccgaggtacagggaaaaactttttccttccctacaggggtcagggcaacataagtattaaggtcatatggcttgctggcctgtaaataacttgtaaataattaagttctttgtctctgaaccattaatcttacgtctcctaccatccataaaactatgacaaaatgatcaacctgttatcttccangaagggtgaaagatcagacccctaataatttgacttttaatcaagtacttttatctttttgttctctcccatttattttttaaagattgttttccatgagccataattttgcccaccccaccccaaccaggttacttaatttctggacttcatttttctcctctgtatgatgacaataataatagtattgaaactgcccttgcaaatattataacaatgagaaaattatcacaatgaaagagatgtgacctaaccaactctatcttatctttaacctccaagcctggtcattcttggttttttcaccaaactcattttgggaggaatttaanttttgtcctgcccgggcggccg

SEQ ID NO: 6188 - DNA, 666 bp, Homo sapiens
  misc_feature 369, 385, 410, 428, 431, 436, 441, 450, 459, 515, 583, 605,617, 648, 658: n = A,T,C or G
ccctttcgagcggccgcccgggcaggtacttaagtgtgatgttgtggtaacaggtattgttcttttgtttccacatttagaacttccttaaagatttcttgaaggttggtctaatggtaacaaattcccttagcaattacttatctgaaaaaatattttattttaccttcacatatgaagctcaacttggcaggatatgaaattcttggttggaatgtctttcctttgagaatgctgaaaatagaccctcaatctcttctggcttgtaaggtttctgctgaaaagtccactgttagcctgatgggggtccctttgtatgtgatctgacctttttctctaattgcatttaaaattttttctttaatgctngccttaaacaatctgntgcctatatgccctaatgatgttcnttttgtgtaaaaatccancangtgtnctctngattcttgnatctgggtntctacctctctaaccaaaattacaaaagttttattctattattcccctcaaatttntttcccaaaattgaatacctttttctcctgctctcttaaaaaattccaacactttttatttttaatgnctttaccataatcccatatttnttaaaaactttnttcattttttaaaaataatctttacttttancctacctaangtttaaaa

SEQ ID NO: 6189 - DNA, 387 bp, Homo sapiens
ccctttcgagcggccgcccgggcaggtactatcattataccctttccctcaatgccatcttacattttagggataagttttaagccaaactataaggctacctggaatgctgagacaacacacaaattctgctgagtccccgtcacagactacttctgaaggtcaccagtgagggcctaaacaagagtccacttcttgttagtataataactttttatttgacatctacaagattttggcatcttgcagctttttaccaggtttatacaatctcgatttttcaatagtgcaacctgtgggaagcaaaaaaaaaaaaaaaaaaagaagaagtacctggtgttcggttatggagcctctctcctctgcaacctgataggatttggctac

SEQ ID NO: 6190 - DNA, 304 bp, Homo sapiens
  misc_feature 44, 94: n = A,T,C or G
agcggccgcccgggcaggtacttaatacccattatatctcccantcagctcccgacatctggcacaaactctaaaagctaaagaaggccctcanccccacaacgagaccttctcaacctggttttcaaagtcttcaataatagggatgagcaggaaaaaataaataaggcccaatgagattgtgccaaataccaagctactagccatggctatttgccaacctggcaatagcacccaagggcacaaaggacccgatagcaagtcttcctcctgctttaagagttgacaaagagatgtggttatg

SEQ ID NO: 6191 - DNA, 216 bp, Homo sapiens
  misc_feature 27, 130, 164, 187, 196: n = A,T,C or G
cccttagcgtggtcgcggcccgaggtncaacttaatttggttaaatcaggctaaagcgaaggacttacactccttgatcaagggaagagttttcttgttttctctttctcctgctagatatgaccaggtntgcacatgtttacttgacacttgaagggaactgnccttaaggtgaaacctttgacangaagagcanaagagggaaggaaagacatg

SEQ ID NO: 6192 - DNA, 102 bp, Homo sapiens
  misc_feature 28: n = A,T,C or G
cccttagcgtggtcgcggccgaggtacnccgggggagaactgcaggagactatctttctaaacaaggcagttgatgaggagggagcgcttgagggggactgg

SEQ ID NO: 6193 - DNA, 632 bp, Homo sapiens
  misc_feature 36, 190, 262, 270, 317, 371, 427, 504, 525, 561, 571, 594,597, 598, 603, 615: n = A,T,C or G
ccctttcgagcggccgcccgggcaggtactaaaacntgcagtcacatttttcacaaattagggaaaagtttgatactcttgtttctttccttctttctttcggataagtggaaacttctaagaaatatgaataagtagaaacttctaagaaataggaaagaagtaaatatgtgcctatattcttagaatnaatcagtatatttttaataaatcaagattttcttcataaaccaattgtaggggtgtaggtaggtagaccagntgatgggnaactggtaagtcatcctggggaaaaagaaatacgttaggtctttatncattgcatataataatataaattcaatgcaaaatcatggctattgaaaatatcnaactatagaaaaaggtaaacacacttgatttattatttcgagtttctgaatgggtnaagactctctaagcttaaaaacaattgaaaaaggtggtaagttttattaactacataaaaagcaaaaagcccatatngccaatataaaaaacagtgangtaaaaaaaaaagccacttggtcccagaaaggagcnttaccccctnaatttttaaaaaggggtattatnttnnaagtnagaatcccaagncctgaatgttttgggaa

SEQ ID NO: 6194 - DNA, 268 bp, Homo sapiens
cccttagcgtggtcgcggccgaggtacattctccacagatcatattaaggagtttgtaggtgaagtttaatctgtgcatagtgggtagagacatgaatagggtcaaaggggaggaaaaaggaaaaaaacaaaacaaaaacagtcacaggaaaataaaaatacaccacaggttaccagaaccttcagatttaaaataaaaagaaagaaaaagcagaagcagtgagcatcgacatcaactgtacctgcccgggcggcccgctcgaaaggg

SEQ ID NO: 6195 - DNA, 274 bp, Homo sapiens
  misc_feature 25, 31, 51, 195, 233: n = A,T,C or G
cccttagcgtggtcgcggccgaggnactttntttttttttttttttttttntttttccgctatttctcttttcttcttttcattctctaattgtgcccttaaaaggaattgcaattgctgttacaaattaatacacaaaaatattattcatgtgatggaatactactctgccataaaaagtaacaaaataatgtnttttgcagcaacttggatgaagctggaggccatgattntaagtgaagtaactcaaaacatacaaatgccacccgcgtac

SEQ ID NO: 6196 - DNA, 704 bp, Homo sapiens
  misc_feature 667, 694: n = A,T,C or G
cccttagcgtggtcgcggccgaggtactcagtaaatactaagttttcccccaggttctaagttttctgtaatgcatcattttacttttaccattaaaaaatgttttattgttaagctgctctatttctgaaaaaccctcttacgatcatacacatagaaaatataaaagaattgacaaaataactcctggaaccaataagcaattatagcaaagttgtagcatacaaggttaatatacaaaggtccagtggctttcctatatatcagtaatgaacaagagacatttgaaattaaaaacatattgctgtttacattagcatcaaaataaatgaaatatttagctataaatctatcaaaatatgtataaggtctatatgaagagcaaaaactctgatgaaaggtatcaaagaagaactaaataaatgaagagataatccatgttcatgaagaggagaactcaatattgtcaagatgtcagtgcgtcccagcttgttctaatgcaattccaatcaaaatcccaggaagttattttgtggatatcaacaaaagtaatttgaaacttcctatgaaaaaacaaacgactcagaatagcaaacccaatatcgaagggaaagaatagagccaggaggactgaaatcacttgagttcaagacttactatgaagccncagtgatcaagacaatgtggttttggnccaaaaaaaa

SEQ ID NO: 6197 - DNA, 472 bp, Homo sapiens
ccctttcgagcggccgcccgggcaggtactaaggtatactactggacatttctatttttttaagtgtattctttttctgacttacagtaaaatttcaggaagttgatagatactaagaacttatgattggtctcagaggtaacaatgaaatactcataattttgtctgtggaactctggcagaattatgttacacatttggcgaagttgtctcttgtaatttatattttaaatgaaaaagtattttagagcttttaatgaaggggaagagtataaactttctttcatattcactctgtagttacagaccgtctcataaatcaagattgtgcattattagagttctcagagacaggatacttccatatggacccctgttcatttttcttatttactagatattttgctaaatttagcacactagcaattaagaagtttaaaaaaagaagaaacgttataggaaagggaaactg

SEQ ID NO: 6198 - DNA, 314 bp, Homo sapiens
  misc_feature 44, 81, 82, 98, 104, 106, 109, 112, 127, 130, 131, 133, 136,141, 147, 153, 159, 182, 183, 192, 193, 203, 211, 212, 213,214, 215, 216, 220, 221, 222, 228, 230, 231, 232, 233, 234,235, 236, 237, 238, 240, 241, 242, 243, 244, 245: n = A,T,C or G
  misc_feature 278, 287, 291, 292, 295, 297: n = A,T,C or G
gatggatatcttgcagaaatttccgcccccctttttaaagcccnggtttggggggtttccgccgggcccgaaggtaccagnngggttccctttttttnaaaaangnttnggnaacttttttaaaaanttnnanccntgggntttttnaacttncccctnggttttttttaaaaaaatttttnnaaaaaaaanncccccccccnaaaaaaannnnnncccnnntttttntnnnnnnnnncnnnnnnaaagggcccaaaaaaaaaaaaaaaaatggggtncccccccancccnnccntnaaaaaaagggggggggg

SEQ ID NO: 6199 - DNA, 215 bp, Homo sapiens
  misc_feature 1, 26, 35, 37, 38, 98, 119, 130, 141, 155, 159, 180, 187: n = A,T,C or G
ncccttagcgtggtcgcggccgaggnaccagggtnannaagcatgtggttcatcctttggaaatggtagtaggaaaccatacagtcttttggcatttngagctacataaaggaacttgnagtttgttttnccagaaagacngtggcaagcaagcntganatggaaaggtgagtcttttantatccgngggagagggcattgctttggctttttcc

SEQ ID NO: 6200 - DNA, 179 bp, Homo sapiens
  misc_feature 33, 93, 94, 116, 121, 141, 154, 170: n = A,T,C or G
cggccgaggtacgcggggactggagacactgantaagcaggggcccttaagagtcttgtttgccaaacagatttgcagatcaaggagacccannaatttcaaagaagcgctattanaggtntcttgagatcctttcactanctacattcctcanggtaagaaggaaagantggctttcc

SEQ ID NO: 6201 - DNA, 254 bp, Homo sapiens
cccttagcgtggtcgcggccgaggtactatcaaatactaggtcttattattctttctaactatttttattttgatacaagtctttcaggtctgtcttaaagtcataggatgctaagggctaaaaaggcccagagagagcagtaagttgcccaaatttgcccaactagagaggggcagaattcaaatgagaacccgggtttctgatgccaagctgcctcctcccgcgtacctgcccgggcggccgctcgaaaggg

SEQ ID NO: 6202 - DNA, 149 bp, Homo sapiens
  misc_feature 45, 98, 128: n = A,T,C or G
ccctttcgagcggccgcccgggcaggtacacctgactcgaccttnaccagatagagagctggtcattaagtgtgaacaagctgacttgaatgtttcangacagctccctcctctgtaaaatgggaatnataacactattcttagggaga

SEQ ID NO: 6203 - DNA, 589 bp, Homo sapiens
  misc_feature 101, 118, 128, 130, 138, 164, 168, 202, 220, 224, 228, 235,243, 249, 255, 256, 260, 265, 267, 269, 285, 291, 298, 305,307, 317, 326, 341, 352, 353, 358, 377, 379, 383, 399, 411,416, 426, 428, 446, 450, 452, 453, 489, 518, 520, 526: n = A,T,C or G
  misc_feature 537, 547, 552, 556, 561, 562, 566, 572: n = A,T,C or G
cccttagcgtggtcgcggccgaggtacaggtttcactattacaaatatatgatgtgaaactaacaaactcatgaccttcaaaggatgtgcttcgtcccacngcaccacacattttgcnaatttggtgntncccatttnggcttaatttttcccccttttctttnctantaaaatacttttcaaaaaatttattaataaggtntaattggcaatatggagntatncccncgtaatngccaattnattcancactcnntacnttcancntnttttaattccttctanggcccntttcttncaaatancnttttttggcnccaattttnctaactttacctttntgccttggggnnaaaanattataaccccaaggtccnancaanaactaaaatttttctncaaggcccaaanccaanaacctttggncnttaatttccacccccaanccanannccccacccaaattaaatccaaaggcccaatattttnatccacccccccaggatcttttttttttnantaaacnccccttgggcntattttgggnaggtnaaanttttnncagnggtttnggcttttttttttttca

SEQ ID NO: 6204 - DNA, 714 bp, Homo sapiens
  misc_feature 253, 322, 392, 402, 421, 422, 424, 426, 431, 432, 440, 441,453, 455, 470, 476, 478, 482, 497, 532, 546, 547, 552, 561,576, 582, 587, 594, 597, 599, 602, 610, 611, 616, 619, 633,634, 640, 642, 644, 652, 662, 676, 678, 681, 694, 695: n = A,T,C or G
  misc_feature 705: n = A,T,C or G
ccctttcgagcggccgcccgggcaggtacagtgggtccttttcaaaagtggacttctagactcacctgttctcactcctgtttaattcaaccccaccctgccaatgccaaataatagaattggctccctaccaacttgaacaagggaggagtctgtgcagtttctgacacttgttgttgaacatggctaaatacaatggggtatcgctgagactaagttgtagaaattaacaaatgtgctgcttggttaaaantggctacactcatctgactcattcttaattctatttaagttgggttggaatcttgcctaaggtgcgtantccaactcttgggaattcccctcctaataagtcatacctagtagtcatacctccctgggggtagtggtantctcttaaancctttaaaggtttgcattnnancnagccnntaaaatannggaatgggcttntntttgcttggaatacnaaaacntnaaanaaatggtgttcattnaggagaaaattcttaccccctggaaggataaaaanccccaaatgggggnnactgnaaaataacncctaatgcctttaanaaattnggccnccctttnccncnagngaaccccnnttaanccncggggggcttaaanncccatnancnccacctgnaatttttaanggaaaaaaaattantnccnttttaaaaaaaannttaaaacccntttttaaaa

SEQ ID NO: 6205 - DNA, 158 bp, Homo sapiens
  misc_feature 35, 38, 51, 57, 59, 76, 87, 89, 91, 93, 101, 102, 104, 126,136: n = A,T,C or G
cccttagcgtggtcgcggccgaggtactcgggganagnattctaatccaancaaggngnctcaaaacctactattntgactgcacancntnanaaggctgnngntaggataaacaaagtcaaacanctttattttntctaggacccctgggaactttt

SEQ ID NO: 6206 - DNA, 356 bp, Homo sapiens
  misc_feature 170, 196, 219, 252, 254, 259, 264, 269, 275, 283, 285, 286,293, 296, 301, 309, 317, 343: n = A,T,C or G
cccttagcgtggtcgcggccgaggtacgcggggccctcacagctgccctgtgaggtgggtgccattactgtcctcttattatagattgggaaacggaggctccgaggtgccagagcttgcaaaccgatggaggttggccagacttcatgagccacactctgaatattccntttgaggcacaaacaacagaatcaanaaggaggccacgcgcgggggctnacacctgcaatcccaacacttttgggaaggccnangcaanaaagngatcnactttntagggttnanngagtttnaanaaccnagccttanccccaaanattgggtataaaaccccccatttttnttacttaaaaaaa

SEQ ID NO: 6207 - DNA, 648 bp, Homo sapiens
  misc_feature 199, 243, 256, 408, 428, 471, 482, 491, 506, 518, 533, 557,573, 584, 592, 595, 598, 610, 618, 620, 627, 629: n = A,T,C or G
cccttagcgtggtcgcggccgaggtactcttggtttatcaatgggacgttccagcaatccacacaagagctctttatccccaacatcactgtgaataatagcggatcctatatgtgccaagcccataactcagccactggcctcaataggaccacagtcacgatgatcacagtctctggaagtgctcctgtcctctcanctgtggccaccgtcggcatcacgattggagtgctggccagggtnggctctgatatancagccctggtgtattttcgatatttcaggaagactggcagattggaccagaccctgaattcttctagctcctccaatcccatttttatcccatgggaaccactaaaaacaaggttctgctctgcttcctgaaagccctatattgcctggganatggaccaacctcaaatggnaaaattttaaaagggaaaaaccccttcatggccttgagggtgntgtgcccactncagaagacnttcaccctaacttanaagacaaggccnaacttgcaaaaaccnattggttgagaaaaattgaacgantttcacaactattggnacagctttttncccaaagnatnttncaaacaaagaantcctttantnaatgganantggggttttttacccccct

SEQ ID NO: 6208 - DNA, 500 bp, Homo sapiens
  misc_feature 260, 327: n = A,T,C or G
cccttagcgtggtcgcggcccgaggtacgcggggagtcctgagctgcgtcccggagcccacggtggtcatggctgccagagcgctctgcatgctggggctggcctggccttgctgtcctccagctctgctgaggagtactttttttttttttttttttttgacagagtctcactctgtcacctaggctggagtgcagtagtgtgatcttggctcactgcaacctccacctcctggggttcaagtgattctcctgcctcancctcctgagtagctgggattacaggcgcccaccaccatgcctggctaatttttgtattttctaatanagacggggtttcaccatgttggccaaggctaagtctcaaactcctgacatcaggtgatccgccctccttggcctcccaaagtgctgggattacaggtgtgagccactgcgcccagcctacagctcatttctttttatctctgcataatatcccattggatgaatgtacctgcc

SEQ ID NO: 6209 - DNA, 275 bp, Homo sapiens
ccctttcgagcggccgcccgggcaggtacgcgggataccattgcacttactttgaagaagagatgctgaatattattaaaccattgtgttccctggtgggctgatggactgtgattttataaggtggtctcagccaattgcagcagctgttccctgtcagaggggctagaggtttggtgagagcagtggatgaggtgcagtggtgtgtttgttcactagaagcaagtgggagaaagctttgcctctttgtacctcggccgcgaccacgctaaggg

SEQ ID NO: 6210 - DNA, 349 bp, Homo sapiens
cccttagcgtggtcgcggccgaggtacgcgggggcagttgccaagcaacgagtgtaaacagcacaagatcatggccactaactacagtgccaaccagtatgaaaagactttctcatccaagtatctgcagaactggtctcccactaagccaacaaaagagagcatctcttctcatgaaggctacactcaaattattgccaacgatcgtggtcatctactgccttctgtgccccgttccaaggcaaatccttggggttccttcatgggcacctggcaaatgcctctgaagataccccctgctcgggtgaccctgacctcccgtacctgcccgggcggccgctcgaaaggg

SEQ ID NO: 6211 - DNA, 621 bp, Homo sapiens
  misc_feature 482, 516, 543, 550, 589, 592, 595, 607: n = A,T,C or G
ccctttcgagcggccgcccgggcaggtacgcgggtgctaaagaaaggactacttaaaatcattactaaaaattatagaacatgggagatatcttgaccttcgcataaaactgattttttctttatggttaaattcagtctataattgactttttgaggggcaatatctcagcagtgatgttgtgttcttctttgtgcatcagcacatcataaaaatttattctagtgttgttgatgttaataatttgcttggttaaagagctctctgactttttttcactatagagttaattgtttttctctttattgttaagtatctttatgtagctaataaactatcacatttaatctggcacctgcccttttttcttaggtttttttgtttgttttttgcacatatgtggtctttggaaaatgaaaggcttctttatctttggtttacaggaccaaaaaaatttggggaaaaaacaccaatcctctttnactttacctgaaatggtcttgacaaaaaaagtcntttctgggggtcaaaaaacatttggcnatttgcntaggtacccctttggttaggaaatttttaaaaaaaaccncanacntttttatttccnagaatctttttggg

SEQ ID NO: 6212 - DNA, 188 bp, Homo sapiens
  misc_feature 15, 23, 69, 71, 75, 91, 103, 119, 122, 127, 156, 158, 162,179: n = A,T,C or G
cccttagcgtggtcncggccgangtacacaatggtttattaaaggaatgtttggcccacatcaacctancntggnttctactgggtaaacnttcccatggccnaaggaaaaacaagccnganttgantgactgggggtggggtgcaggcaatgaananaggncataagggtgtataaantaagggggc

SEQ ID NO: 6213 - DNA, 396 bp, Homo sapiens
  misc_feature 53, 60, 125, 126, 140, 144, 156, 158, 180, 183, 190, 250,318, 326, 336, 339, 363, 377: n = A,T,C or G
cccttagcgtggtcgcggccgaggtaccttttaactaatgagacaagattcanaaatctnaagcaacttgcccaagggcatgtggaggaggtttatttaaatgtaacctcattgaaaaattgaannttaaattggacttnttanaacacacatacncnggaaaacaaccataaatataanganaaatgcngaaaaatggaaaatgagatgactccagggataaggtataataataatttcatgttataanaaataaaaagtgagccactctgacagtcattttggtcaatgaggggaaagtgacctttattaaaattnacattttncattacattnaantcagattaaattgcttgggaactnagatttttcccggntttgttctgagccctttaa

SEQ ID NO: 6214 - DNA, 614 bp, Homo sapiens
  misc_feature 571, 590, 597, 606, 609: n = A,T,C or G
ccctttcgagcggccgcccgggcaggtacggaaaaccactttcatatccgctggaaattcatgtaaaagttaaagatattaatgataatccacctacatgtccgtcaccagtaaccgtatttgaggtccaggagaatgaacgactgggtaacagtatcgggacccttactgcacatgacagggatgaagaaaatactgccaacagttttctaaactacaggattgtggagcaaactcccaaacttcccatggatggactcttcctaatccaaacctatgctggaatgttacagttagctaaacagtccttgaagaagcaagatactcctcagtacagaaggtagaagtgagtaacttttttcttgctccagagcaatccctgagtaactaagcctgcattattaacttacatgaccaaattattcataaaattaatttttgataaatacagagtgagaacaaagaaaattgaaaaatcttaccgaatatatatgtatatcatccgggttggaatcaatatagaaaattatctctattcagttataaaacatactttttaggaaactaacantaaatgtgggccatgtggngggaccncaacattcnttnaaaaa

SEQ ID NO: 6215 - DNA, 153 bp, Homo sapiens
  misc_feature 70, 71, 72, 74, 75, 90: n = A,T,C or G
tttcgagcggccgcccgggcaggtactaaggatcaaccaggtttgggaagcccaaggacagatatatgcnnncnnaaatcatttctaatnctgccatttcatgctttcttgggctttctgaggagattccttgccacttctgtggggaaaaca

SEQ ID NO: 6216 - DNA, 473 bp, Homo sapiens
ccctttcgagcggcccgcccgggcaggtacgcggaagagatagtgctaatatagtaaaaacaaaaatccacatgaactacagcaaaatttttaaaaagttgaatttcaccagggacttggaatccattagaaaaccatcaaagggaaatcctaaacctaaaaactataataaaaattaagaactcaaaagatagtcttaatgggagattagtgaaaacagaacagaggattcttaaaatggaagactggttactagaaagcatccaaatgaatacacaaaaaaaaaaaaaaaaaaaaagaatggaaacagaatagagtgcaaaagacatatgtaatccagtggaaaggcctaaaaaaaaagtatagagtccccttatgagaatggaaggccaagatggatggatcacctgaggtcaggagttcaagaccagcctggccaacagctgaaactctgtcttttattaaaaaatccc

SEQ ID NO: 6217 - DNA, 404 bp, Homo sapiens
  misc_feature 335: n = A,T,C or G
ccctttcgagcggccgcccgggcaggtacaaaaggatgtgggtagaactacaattgtgcattcagacatgataattcctactaactgggggtaggagggcccacaggagtgtagactagaagtagaaagaatgaggaaaataagtcttttgtagctgtatggcgattgaagaggagataaaacaaactctccagcttttcaggttgggtgacttgcagcgccatcgtctgacaaagccgccaaaatctttcaatgtccctaggaataaagttgccctgagtagggccactcaggatgacgccagatgatatcccttattatagttttaggggaanctcttcctaccttcgccagtcctgcagtgaaaaaatgtacctcggccgcgaccacgctaagggcgaatt

SEQ ID NO: 6218 - DNA, 289 bp, Homo sapiens
  misc_feature 1, 45, 79, 115, 146, 190, 196, 217, 228, 235, 245, 246, 256,289: n = A,T,C or G
nccttagcgtggtcgcggccgaggtacccaccaccactgtatgangctcatgagctctggcatgccatgaagggagtanggcactgatgagaattgcctcattgaaatactagcnttcaagaacaaatggagaaattttccatgangccgaagaagcctacttgcttgcaatacaagcaaataaactctnccaaanaggaccaattttaatttcatngggaccctttngggaacnacttttcaannagtattaacnttctttcaatggaaaaccttttgggttccccan

SEQ ID NO: 6219 - DNA, 747 bp, Homo sapiens
  misc_feature 52, 201, 211, 215, 272, 283, 330, 335, 340, 351, 367, 371,372, 390, 394, 405, 412, 422, 430, 440, 448, 450, 453, 455,459, 460, 466, 470, 478, 481, 489, 522, 523, 524, 530, 531,537, 554, 567, 569, 579, 582, 586, 600, 612, 616, 631: n = A,T,C or G
  misc_feature 633, 650, 664, 669, 683, 685, 690, 692, 697, 701, 705, 713,717, 718, 737: n = A,T,C or G
cccttagcgtggtcgcggccgaggtacagattcagggattatcatcacttanatggcatttacattcatgagatggatgggatgggatatgggatgggatggaatgggagacaatgggatgggataatatgtttaatggaaaagataataagctcaaggactaagccctgtggccctcagttagaggtttaaataataganggaatggccngaantgtggaaaataaactagtgaattgtggtcccgcgtacctgcccgggcggtcgattcnaaagggcgaanttccaacacactggcggcccgtatactaggtggattccagagcttcngttcncaatncttggcgtaantcattggtcattagcntgtnntcctgtgtggaaaattgntatnccgcttcaacnatttccnacaccaaacntttctgangctcgggaangcattaananttntnaaanncctcgngggnggccctanatngaagtgancctaaaccttcaacatttttatttggcgttttnnnctttannttggtnccgcctttttttagtgnggggaatactctntntcttgccccntcntgcnttttaaagaaattngggccccacctnctcnccctaaggtgaagcncntttgaagcccagtgggngcctaaatgccttnattanttttaaacttgaanangcccncnccccnaccncccnaatcccantttnnaaaaacccttaaaaacccnatttttaaaa

SEQ ID NO: 6220 - DNA, 430 bp, Homo sapiens
  misc_feature 1, 32, 86, 131, 132, 160, 161, 165, 172, 180, 198, 222, 240,307, 310, 327, 329, 331, 332, 335, 349, 383, 385: n = A,T,C or G
ncccttagcgtggtcgcggccgaggtactctnaccttcattcttcaattcagtccaggaaaccatgctgtttctctatcaagaagnaagacagagatttttaaacagatgttaaccaagaggggactcctnnggcacatgcttagcaccatattggggcnntccnagccttnggggcctnggaacacacacattcggngtgctctgttgcatgtgagcttgngggttagaggaacaaatntctagacattcaatcttcactctttcaattgtgcattcatttaataaatagatactgaacacaaaanatnaaatgcctaaaaaggtncncnnatntcatttaaaccccntgacaacatttgggaggacagattcttccatttntnatcatttttacatattgaaggaagagggggggttcaaaaaaaaag

SEQ ID NO: 6221 - DNA, 334 bp, Homo sapiens
  misc_feature 219, 249, 255: n = A,T,C or G
ccctttcgagcggccgcccgggcaggtacttattcttaattattccacttctgagagacttatttgactgacccaagccagctctagaaacatttgaagcctcatgtttccgtctggcctggaggacgctgagcttacagaattccaagccaacgcagagacttttctttagaattgagatgaggagcgtggtgtttatttatttattttttttttcgnttttgggtattttgtttttttttcctacanacttgngtttcaggaaaaaataatcagtgtcaggcaattgttttcagggagtgtggtcttctgttgtatgtttttaaaacttcag

SEQ ID NO: 6222 - DNA, 314 bp, Homo sapiens
  misc_feature 50, 51, 75, 136, 164, 182, 197, 217, 257: n = A,T,C or G
gatatctgcagaattcgccctttcgagcggcccgcccgggcaggtacttnntttttttttttttttttttttttncgggcctaactgtgtttggatttcttattgggagtgttgttcagcatatgcaaaaaaacanatgccattaccggcgttttatataaaanatgccatcttctcagganaaaacatagccccanactcttctttcatttgtctnataccgattctctttttctttttcttcctttattctctgnctaactgggtttggatttcttattgggcccgcgtacctttttttttttttttttttt

SEQ ID NO: 6223 - DNA, 172 bp, Homo sapiens
  misc_feature 53, 94, 99, 102, 123, 128, 147, 160: n = A,T,C or G
cccttagcgtggtcgcggccgaggtacttttttttttttttttttttttggtnatttttttttttttttttttttttttttttttcaaaattanaaagnggnttatttgcaatttacatggantcctntactttgggagggttagtntaattgaaatgtnttgcaattttca

SEQ ID NO: 6224 - DNA, 353 bp, Homo sapiens
cccttagcgtggtcgcggccgaggtacccggttaactgccaggtgggtgacagtgatgccaggctcgcccactactgcactggacacagcctcaccaatgccaccttcataataatggtcctccacggtgaggatcctgcccttggtggcacgagcgctgtcgagaatgagttttctgtccaggggcttgatggtgaaggggtccagcacgcggatgttgatcttttctttcttcagcaagttcggtagccgcgtactgttttctaactgaataatcatgagcacattacttaacctctcagaggcttaatttctttatctatacatggggtcaataacgttctcgtgttgag

SEQ ID NO: 6225 - DNA, 188 bp, Homo sapiens
  misc_feature 99, 101, 105, 111, 118, 135, 164: n = A,T,C or G
ccctttcgagcggccgcccgggcaggtacttttttttttttttttttttttttttttttctaaaatttaggtttgattatttttaatacattccaattntntagngaaatnttccatntttaacagtattttttnaaaccttttcctttatattcttgaacatnttataattatttcaaagtcccttg

SEQ ID NO: 6226 - DNA, 756 bp, Homo sapiens
  misc_feature 148, 150, 151, 157, 160, 174, 191, 199, 203, 205, 207, 215,216, 221, 222, 223, 224, 225, 227, 236, 242, 252, 255, 257,261, 262, 265, 272, 273, 275, 278, 298, 306, 314, 321, 331,334, 338, 340, 341, 342, 349, 364, 376, 380, 398, 407: n = A,T,C or G
  misc_feature 432, 436, 437, 441, 454, 472, 481, 483, 484, 491, 492, 493,494, 504, 509, 516, 517, 527, 536, 544, 545, 548, 549, 550,551, 561, 570, 571, 572, 573, 579, 593, 605, 609, 610, 611,612, 619, 620, 621, 631, 634, 643, 644, 647, 669, 670: n = A,T,C or G
  misc_feature 671, 675, 676, 684, 686, 689, 690, 709, 715, 716, 729, 733,740, 741, 742, 744: n = A,T,C or G
ccctttcgagcggccgcccgggcaggtacttttttttttttttttttttttttttttttttttttttttttttttttttttttttttttttttttttttttttttttttttttttttttttttttttttttttttttttttttttttngnntttttntanttttttttttttgnggaaaaaaaaaaaaaantttttttnaaantngngaaaaaannttttnnnnntnaaaaaaaantttttnaaaaattttnccnanattnnggnccccccnnanggnaaaaaaaaaaattttttttntttttttncaaaaaanttttttnttaaaaaaantanaaangnnngtttatntaaaaaaaaaaaaantttttaaaaaangggnaaaaaaaattttaaaaanttttaaaantttttaaaaaaaaatttttaaaacntttnncccnttttttttttttncccaaaaaaaaaaaaaanatttttttntnnaaaaaannnnggggaaaaanttttnaaaaaanngggaaatttntaaataaanaaaaaaanngtnnnnaaaaaaaaanaaaaaaaannnngggggntttttaaaaaaaanttttttttttanaagnnnntttttgnnnaaaaaacccnttnggggggggnnatnaaaaaaaaaaaaaagggggggnnnttanntttttttntnaanntttttttaaaaaaaaatgntggggnnaaaaaaaaaaaanaaanttttccnnngnaaaaaaaatttt

SEQ ID NO: 6227 - DNA, 348 bp, Homo sapiens
ccctttcgagcggccgcccgggcaggtaccctggatgatggtgaatacaaccccactgatgataggccttccagggctgaccagtttgagtatgtaatgtatggaaaagtgtacagcatgtggagctggagagaggagtgggcagcagtgtagataaacaggcctggccgtgtgtggatgggttgtcagggctgagtggagttgcaaagggatttattataccatgatctctgcttgtgcatatgtttggagattttcataatcaaatgtgaaaattttttgattttcataatcaaaaatcaatacaaaatatgaatgtataacgtaattcctccatcatgacggtgg

SEQ ID NO: 6228 - DNA, 197 bp, Homo sapiens
cgccagtgtgatgggatatctgcagaattcgccctttcgagcggcccgcccgggcaggtacataatcggaggtgcagaatcttggaattgtctgaacacagtagaacgatacaatcctgaaaataatacctggactttaattgcacccatgaatgtggctaggcgaggagctggagtggctgttcttaatggaaaac

SEQ ID NO: 6229 - DNA, 328 bp, Homo sapiens
cccttagcgtggtcgcggccgaggtacaatgtttaataaaagtgatgagagtagatatctttaccttgttctcaattttaggaagacatagatttttgtgtagatggcctgcatcctatgaggactcttcattttatccccggttttctgagggcctttaatcatgactcaatgttgggttttactaagtgctttttctattaagatgatcatatgcatttttctttttagtccactaatatggtaaagttcatttattgatttttgaatgttaaatcaactttatcttcctgcaataaagtacctgcccgggcggccgctcgaaggg

SEQ ID NO: 6230 - DNA, 359 bp, Homo sapiens
  misc_feature 97, 98, 99, 100, 119, 120, 126, 127, 128, 129, 136, 146,157, 158, 162, 163, 171, 172, 173, 174, 178, 183, 184, 189,193, 196, 199, 200, 208, 213, 214, 215, 217, 218, 222, 223,230, 231, 232, 246, 249, 254, 257, 262, 263, 266, 271: n = A,T,C or G
  misc_feature 281, 282, 285, 286, 287, 288, 294, 295, 296, 307, 308, 315,324, 325, 326, 327, 328, 329, 332, 335, 347: n = A,T,C or G
cccttagcgtggtcgcggccgaggtactttttttttttttttttttttttttttttccttttttttttttttttttttttttttttttttttttttnnnnttttttttttttttttttnnaaaaannnnttttaantttttttttnaaaaggggggnnaaannttttaaannnncaanttttnnaaatngggnttngannttaaaggnaaaannncnnaaannttttttnnnaatttttttaaaanccnaaaanccnttttnnttnccccnggggggttcnnaannnnggcctnnnaaaaaaaaaannttaaaanatttttttnnnnnncgnccnaaaaaaaaaaanaaaatttttttt

SEQ ID NO: 6231 - DNA, 235 bp, Homo sapiens
cccttagcgtggtcgcggccgaggtactagcctttaattacttttatttactttatttaattttctcctgcaaccagtggataccctcaaatagaaccattttagaagtttgagcatttaggtaagagaaggaatttgggatgggattgggtataatggacagttatgcagggaaatgagaaatatcaatggaccagaccacccgcgtacctgcccgggcggccgctcgaaaggg

SEQ ID NO: 6232 - DNA, 746 bp, Homo sapiens
  misc_feature 19, 22, 38, 104, 113, 124, 128, 165, 177, 268, 318, 325,335, 337, 339, 343, 344, 347, 354, 361, 369, 371, 379, 380,386, 399, 415, 424, 425, 426, 434, 440, 441, 454, 458, 462,473, 479, 483, 492, 500, 501, 511, 512, 514, 517, 530: n = A,T,C or G
  misc_feature 541, 543, 545, 546, 553, 563, 577, 578, 585, 595, 639, 645,646, 652, 660, 663, 668, 700, 727, 735, 737: n = A,T,C or G
cttttagattaaaatgaanggngacttaaaacagcttnaaagttttagtttaaaagtttgtaggtgatttaaataattttgaaggcgatctttttaaaaaaganattaaaccnaaaggtgattnaaangacctttgaaatccatgaccccagggagaatttgccnttatttgaaagncctagtttaaacgccattttacttaaacgcaagaccgaaaatgggaaaagattaaatttgggggagtggttaggattgaaaacaatttttnggaagaaagaatacgaaagttttggaaagttgggaaaaacctgggaaagnacaaganaggttttcangntntttnnacntcctggnaaatgtnctatattngntaaccttnnggcccnggggaacccaccncctaaaggggccgganatttccccnnnccaccacntttggnngggcccggttttncttnggtngggaatcccgnagcctntggntacccaaancttttggnnggtaaaatcnntnggngccattagccttngcgtctccccngngnngaaaaantttggttttnttcccgggtttaannaaatttngaaaaaaaancactcaccccccccccccccccccttttttttttttcccccccntttgtnngttttnttttaccnganggggncccccccccccccccttttccccccccccctngggtccccccccccccccccttttttntttttgananacccccccc

SEQ ID NO: 6233 - DNA, 392 bp, Homo sapiens
  misc_feature 298, 353, 359: n = A,T,C or G
ccctttcgagcggccgcccgggcaggtacaaacgaggaccggtctggcttagcatccactgaatcttcatttgctgaatcctcaaccccctgctcttcaatacagccctgatcatctgccatcgttcccacggcggtagggcggctgggactggcacagtctctctccgtcgctccgcagcaagggtctggggcccctttagcgaaagcgaaactaaaagtctcccccgcgtaccttttacgctgccagaatgaatgtagggctgctatgccagctagcatattaccctttttactgncctcaccgcagttcagtgtttgccaaagtgtgaaccagaactgcttgtatcacanaatctnttgggacagggcctggcgttcttaattttaaaa

SEQ ID NO: 6234 - DNA, 423 bp, Homo sapiens
cccttagcgtggtcgcggccgaggtactacctattaactttgatggagaaagattccctgtatcactttcatattttaaggggaaggtttcagtttcttcttagtagtttttctaagccagcactgaattcgaggaactctgatttgggttgaacaattgtttccctcacaatttcttccacttcctgagggaggcctttgccatattgagcaacaatggaagcaaatgagctaagcgtctggtctgatggagacatttgggcagctaaataagatccaacttcatgagttttatcaggaactacattggaggaataaaaatccttcctgtctggaactatggtgtccatcgtagcccatggtgacccgcgtacctgcccgggcggccgctcgaaagggcgaattccaacacactggcggccg

SEQ ID NO: 6235 - DNA, 715 bp, Homo sapiens
  misc_feature 271, 282, 295, 296, 298, 448, 494, 570, 588, 591, 602, 609,666, 669, 691, 701: n = A,T,C or G
cccttagcgtggtcgcggccgaggtacttggcctcgctgatccgttccgtggtcgccctgcacaacctcatcaacaacaagattgccaaccgggatgcagagaagaaagaagggcaggagaaagaagagagcaaaaaggataggaaagaggacaaggagaaagataaagataaggaaaagagtgatgtaaagaaagaggagaaaaaggagaaaaagtaaaacatgtattaaatagcttttttaatttgtaaattaaaatcttacaaaccanataaaaaaaanaaaaaaaaaaaannangtccacaatggtttattaaaggaatgtatggcccacatcaacctagcaaggattctactggtaaaccttcctatggtcaaaggaaaaacaagcaggagttgagtggctggggtggggtgcaggcaatggagagagggcagaagggtgtanaagctgaaggggtctagaagcttactcctgagtttcttccttctgncttcaaatctttacttcttatggccaaagacccagcttgttttcataaggctgggaatgcactctttttaaactgnttcgagaacaccccaganacnaggggagggangggaaanaaagggttacttgtgggaaagggattggcgggggcaaacattttagagctttgaaanccncttcttgggcccatgcttaaanttttcttttnttttaaaccctaaa

SEQ ID NO: 6236 - DNA, 365 bp, Homo sapiens
  misc_feature 3, 35, 61, 83, 114, 164, 165, 175, 179, 182, 193, 201, 218,278, 280, 304, 316: n = A,T,C or G
atnactaatgctggtcctctggctgctcagtgaanggatcacgaagaaccaggcggtgaanaacatgccaatggccaaaagcnccacggtcagatgggggaagacagctgggtncactgggctggtatatctgctcatggcctcagagctccattttgccccgnnaaggctaatnctgncgntccgccacccnccgcagtnctcttgaatacaagttnctgataccactgcactgggctgagaatttccaaaactttaatgaactaactgacagcttnangaaactgtccaccaagatcaagcngagaaaatgatnaatttcatgggactaaatgaactaatgaggataatattttcataatttt

SEQ ID NO: 6237 - DNA, 321 bp, Homo sapiens
ccctttcgagcggccgcccgggcaggtacctctactgatgcatttttatttttttctaggcgggagtcaggtaaatcatttaaaaggtaaatcagattgtgccattacctcacctgctcaaaagtctccagtggcctatcacactttgactaatatccaaattgctggggcagaaaagttcttgatgatctggcttttctccttcccatttcctcctcataaatcactctcccatgcactatttctatgtcttggcatttttctttcatgatatttatgtcatagagccttttctcataggtcactcctttactttctttt

SEQ ID NO: 6238 - DNA, 398 bp, Homo sapiens
  misc_feature 25, 47, 117, 136, 366: n = A,T,C or G
ccctttcgagcggccgcccgggcanggtacgcgggtgagccttggtnggaaggaacctctcttgttgatatttaaagaagtgaggtctgtgggtattcattggttagaaaatgccanttcacttttaaaccatatncaagtcttctagggttggtagaaaggggaaaaggaagggaagtggtccccaagtgaattctaagatcttggttggggaaaacttcttgcctcatgactcttgtccttttgaagtccctttggacagcagcacaaaacataacaatttttattttttaaaacagacccattcttttttgatcccacaggaagcttgtgggttgggtccggcccgtaaccccccgggatgtngggtttaaggtggattactggctaacttgagc

SEQ ID NO: 6239 - DNA, 394 bp, Homo sapiens
  misc_feature 1, 6, 20, 29: n = A,T,C or G
nccgcnagtggtggatgggntatctgcanaattcgccctttcgagcggccgcccgggcaggtactttttttttttttttttaattttttaaatctctatggcatatttttccaatttctgcttttctttttttttcttttctgcttagcacctatggacataattcaacatgatgccctctttcttctggaggggtgtgataactgcttgataataagcactttttcaggcctattgagaatgtggttaatgattctaaacttgatttttcataacttgtaaaatagagctgacagtattatagttctgaaaacagtttttgcgttatttggggtatcaaaataaagtttgaaacaattaggatgggatttgcaaataacctttcacaaaacat

SEQ ID NO: 6240 - DNA, 349 bp, Homo sapiens
  misc_feature 120, 280, 299: n = A,T,C or G
cccttagcgtggtcgcggccgaggtaccttcagcagttgtaggagaagaactggcttcagcagaagtggtgacaggtgtgctggtgtcaacaggagttgttgaaagggtgctagcctcanaattggccaacagcgtggtgctgacaagtatatttgttaatggagtgcttctttcaccaggagttgaggttggcatgctgctaccttcagcagttgtaggagatgaactggttccagtggaagtggtcacaagtgtcctggtgttcaacaggagttgttnaaaggggtgctagcctcanaactggccactggcatggtgctgacaagtatacttgttaatgaaagtacc

SEQ ID NO: 6241 - DNA, 378 bp, Homo sapiens
  misc_feature 31, 121, 153, 154: n = A,T,C or G
gtgatgggatatctgcagaattcgcccttancgtggtcgcggccgaggtacgcgggactttatgattttattaatcaaaggtcaaaaacagtccaaattaatttatgctgttagaaatcanggtagttgttacctttggaaagggggagggtnnggtgactggaacaggtaaggagaggacctccaggtgctggtaatgtcctctttcttgatctggggactggttacatgtgtgtgcttagttttcaaaaattcaaactaaggctgggcgcataggcccccaggattttggacggcccgagttgggaggatcacctgaagccaggagtttgagaccagcctggccaacatggtgaaaccccgtctctactaaaaata

SEQ ID NO: 6242 - DNA, 386 bp, Homo sapiens
  misc_feature 247, 274, 350, 359: n = A,T,C or G
cccttagcgtggtcgcggccgaggtactttttttttttttttttttttttggacttttaaaataacctttattttttaaaagttagtatgtgcattataggaaattgaaaaacacaagcaaagaacaaagtcattcacaatcacaagcagtttatagtttgacatattcttctagatcctgtgtgtaggcacaacatccaattttatgggactgagactgtacacaatggtttattaaaggaatgtntggcccacatcaacctggcaaggattntactggtaaaccttcctatggccaaaggaaaaacaagcaggagttgagtggctggggtggggtgcaggcaatgganagagggcanaagggtgttaagctgaaggggtctaaa

SEQ ID NO: 6243 - DNA, 171 bp, Homo sapiens
cccttagcgtggtcgcggccgaggtacaaagacttaagcagagcaaatagggttaaaaaaagaatttggaagaaagtaatggatatacattttcaaggtgagagagaagaataccatagagtggagaaagcataaacaaaggcatggaaatgggaactggaaagcccacca

SEQ ID NO: 6244 - DNA, 355 bp, Homo sapiens
ccctttcgagcggccgcccgggcaggtacgcggggatccctgactcggggtcgcctttggagcagagaggaggcaatggccaccatggagaacaaggtgatctgcgccctggtcctggtgtccatgctggccctcggcaccctggccgaggcccagacagagacgtgtacagtgcatattggcggcgcacgcctcattacgattcgcctgtttgcttctcctgttcaatcgtttctttggaaggcagtggatttttctcttgcgtctctgtcttcttcagtttcgacttatcgaatttctcgatctcagccatatcgggtttgtcagacatggttgcgggaggaaaagcgaagcg

SEQ ID NO: 6245 - DNA, 510 bp, Homo sapiens
  misc_feature 136, 137, 150, 163, 164, 167, 171, 176, 177, 186, 194, 199,200, 201, 203, 204, 205, 216, 220, 237, 241, 244, 251, 254,260, 261, 262, 265, 266, 279, 291, 295, 297, 308, 315, 316,318, 319, 320, 324, 325, 326, 328, 331, 334, 335, 338: n = A,T,C or G
  misc_feature 339, 349, 355, 357, 358, 359, 362, 365, 367, 377, 386, 399,400, 401, 403, 416, 417, 436, 443, 449, 452, 455, 457, 458,487, 488, 489, 490, 491, 496, 499, 502: n = A,T,C or G
ccctttcgagcggccgcccgggcaggtactttttttttttttttttttttttgggttttttttttttttttttttttttttttttttttttttttttttttttttttttttttttttttttttttttttttttttnnttttttttttttnttttttttttttnntanaaangtggnnatttttttntttttttntggannngnnnaaaaaaaaaantaanttttttttttaaagggntaanaantgctggnccnccacannnggnnaaaatttaaaggnttaatttttttncacnanaaaacgtaaanaaaaaanncnnntttnnntnctnatnnttnncaaaaaaaanaaaatntnnnttntcntnggggggaaanttttttttntaaaaaaaaaaannntntttttataaaccnngaaaaaaaaaaatttttanagcctgngtttcnttnatnannaaaaaaaaaaataaatttttttttttttnnnnntaatnggnccnataaaaaa

SEQ ID NO: 6246 - DNA, 151 bp, Homo sapiens
  misc_feature 104, 123: n = A,T,C or G
gcgggagaacaagcgcagtttgccctccgctcacgcagagcctctccgtggcttccgcaccttgagcattaggccagttctcctcttctctctaatccatccgncacctctcctgtcatccgnttccatgccgtgaggtccattcacagaa

SEQ ID NO: 6247 - DNA, 295 bp, Homo sapiens
  misc_feature 15, 16, 48, 99, 151, 163, 167, 208, 225, 255, 256, 271, 277,287, 291: n = A,T,C or G
tatctgcataattcnnccttagccgtggtcgcggccgaggcacagccngacatgatgacattctactttcatgtcggacatgctgcagggaaaattctntaagtgtcctaataggctggaatcatttgctagggtgaaccccatctttggngctcacttttcngttntcttataattagctttattctaagcaaatccatgtctattntatttatctgtttattnacttatttatatgtatggaaaaacactttnntttatttacttattnatttanagacagggtntccntctg

SEQ ID NO: 6248 - DNA, 410 bp, Homo sapiens
  misc_feature 25, 28, 31, 39, 41: n = A,T,C or G
cactatagggcgaatcgtgctctancgntcnatgctgtnanggatatctgcagaattcgccctttcgagcggccgcccgggcaggtacgcggggtgcacctgtaattccagctatttgggaggctgaggcagaggaatcaattgaacccagaagacggaggttgcagtgagccaagatagcgccattgctttccagcctgggcgacagagcaagactccatctaaaaaaaaaaaaaaaaagacggaataatggaatagaattttgggaaagtttgtcaaaaatatcagaggtttaaaaatacttgattaaagtagatcacagatcacttgaagtaatacctactgatttaaccagagtggtaatttagagacaaatatagaaagttacacagttgcttaaaaaaaaaaaa

SEQ ID NO: 6249 - DNA, 391 bp, Homo sapiens
  misc_feature 361, 380, 382: n = A,T,C or G
cccttagcgtggtcgcggcccgaggtacgcgggtattcatatgttgatctgatataactatgttgttaggaatgtatgagacacatatatttgggtttctgaaacagatatgaactgaagacaatttttttcaagttattagcatcttccaggtgggtagttggaatactgaaatggattaaatcacctgatcatctgtagacattaaagaaggctaaggacagagtccctgaagtaacaacatttaaggatcatgcagaaaaagaatcagcaaaagaaaaaacaaaccaggaaggtaaggaagatttaggagagtgatgtcagaaatggaaagaagtttcaaaaaaaaaaaaaaaaaaangtacctgcccgggcggccngntcgaaaggg

SEQ ID NO: 6250 - DNA, 446 bp, Homo sapiens
  misc_feature 305, 376, 406: n = A,T,C or G
cccttagcgtggtcgcggccgaggtacgtgcctctttattccagtaggtggctctaaagtccaattgtttatttttctataacaagaccggagcacaaaattgtgctaaatttgaaaaataacttaatgaggagtattttctgcttagcttctttcctgtcaaaataaaataattttttttcattcaatagtagttgaaccacctgaagctggtttatagaaaacaatgctaaacataaaatgttgctataatatgttataatataacctaagattctttgtatttgtccacagatagaatccangactaacttggcaaaattactcctcattatgtgctgtttctataaaaaaaatagtttatttgcactttggnatcctattaaccctagctgttcacattttnttttccttggaagtacctgcccgggcggccgctcgaaagg

SEQ ID NO: 6251 - DNA, 222 bp, Homo sapiens
  misc_feature 72, 79, 95, 121, 128, 143, 158, 187, 199, 211, 222: n = A,T,C or G
cccttagcgtggtcgcggccgaggtacgcggggagaattgcagctgtccacttgtcgtgtggctctgtgtcnacactgngcgccaccatggccgngactgcctgtcagggcttggggttcntggtttnactgattgggattgngggcatcattgctgncacctgcatggaccagtggagcacccaanacttgtacctgnccgggcggccgntcgaaagggcn

SEQ ID NO: 6252 - DNA, 160 bp, Homo sapiens
  misc_feature 29, 31, 87, 145, 146: n = A,T,C or G
cccttagcgtggtcgcggccgaggtacancngggactggagacactgaagaaggcaggggcccttagagtcttggtatgccaaacanatttgcagatcaaggagaacccatgtagtttcaaagaagcgctagtaaggtctctgannatcctttgcactag

SEQ ID NO: 6253 - DNA, 271 bp, Homo sapiens
  misc_feature 43, 46, 48, 77, 94, 98, 119, 160, 178, 207: n = A,T,C or G
cccttagcgtggtcgcggccgaggtaccaagactccagacctnagntntgtgactatactgtgccttcccgtttctnagaaaccaaagccatantcgnaacaagctagtttgcatcttntgccctgaagccaaggtctctctctgggtacttggggtggntgggaacagagccaggcntccaccgtgcacgctgaagggtggcccanaggtgttcatctgggctataagttgtcttttacccattcaatcaggttgtttgggatttagggt

SEQ ID NO: 6254 - DNA, 466 bp, Homo sapiens
  misc_feature 14, 35, 38, 41, 53, 55, 146, 173, 189, 212, 249, 256, 258,266, 279, 282, 289, 292, 298, 301, 311, 320, 321, 327, 332,334, 335, 339, 345, 351, 353, 377, 386, 402, 407, 415, 418,422: n = A,T,C or G
ggcgaatcgggccntttagaggcatgctcgagcgnctngangcatgcatggangnctgcagaattcggccttagcgtggtcgcggcccgaggtacagatggggtttcacccgtgttagccaggatggtctcaaatctcctgacttnatgatccacctgctcggcctccaaagngctgggattacaggcngtgaacaaccgagcccagccaangttttaattttcattccaaacccaatcttggtgcctntaattgntnagggtttncaatagccccaanggngcacatnagnccggtnttncttggggggnttcccttanncatgcnaaggngnngggnttttanttcttntngggttctggccatttatctatcangaaactaancctttgatttaacatntcccnattatgcntgntttntcctcttcccatcccttttattggtgaaaggggttatgcctttt

SEQ ID NO: 6255 - DNA, 562 bp, Homo sapiens
  misc_feature 125, 126, 127, 128, 129, 134, 135, 136, 150, 157, 163, 167,170, 171, 176, 177, 179, 183, 184, 187, 188, 189, 193, 196,199, 200, 205, 206, 207, 212, 213, 214, 215, 216, 217, 218,221, 223, 224, 229, 246, 249, 254, 257, 262, 263, 265: n = A,T,C or G
  misc_feature 279, 281, 283, 284, 289, 290, 293, 294, 295, 305, 306, 309,315, 316, 323, 325, 326, 327, 328, 330, 332, 335, 347, 351,369, 372, 378, 387, 395, 400, 401, 402, 404, 406, 407, 408,410, 412, 414, 420, 421, 422, 423, 425, 426, 429, 432: n = A,T,C or G
  misc_feature 434, 435, 441, 444, 450, 466, 467, 468, 471, 477, 478, 480,484, 487, 488, 501, 504, 505, 506, 508, 514, 515, 517, 533: n = A,T,C or G
cccttagcgtggtcgcggccgaggtacttttttttttttttttttttttttttttttttttttttttttttttttttttttttttttttttttttttttttttgtctttttttttttttaaaaannnnnttttnnntttttttttaaaanggggggnaaaaantttnaannccccnntntttnnaannngggnttnaannttaannnaaaannnnnnnaancnnttttnttaaatttttttaaaanccnaaaanccnttttnntncccccgggggggtncnannccccnnccnnnaaaaaaaaannccncaaaannttttttntnnnncncnccnaaaaaaaaaaanaaantttttttttttttaaaanggncccggnttaaaaaangggaaaanttttnnncnannncngntncccctnnnntnngcnctntnncccagnggntttttntaaaaaaaaaaaaaannnctncccttnngncccnccnnaaaaatttttttnatnnncnaaaagnncnttttaaaaaaaatctntttgggaaaataaaaaaaatttttttttt

SEQ ID NO: 6256 - DNA, 360 bp, Homo sapiens
  misc_feature 303: n = A,T,C or G
ccctttcgagcggcccgcccgggcaggtacgcggggaaagcggagccgggagtttttgctacagttttcgccaccgtgagtcgcagctataatgatgagctgagttcttggagaagatcaataaaaactgctggaggattaagaagggcttcgtgcccaacatgcaggttgaaggtgttttctatgtgaatgatgctctggagaaattgatgtttgaggaattaaggaatgcctgtcatggagcgggccgtgcattgtcccgagcaaaatctcgacgtaatttagatttccaggatgtcttanacaaattggcagatatggaaattgcgatccgtgttgcctcacccaaactggttatgg

SEQ ID NO: 6257 - DNA, 398 bp, Homo sapiens
ccctttcgagcggccgcccgggcaggtacgccggggagctcacacctgtaatcccagcactttggaaggccgaggtgggcggatcacctgagctcaggagtttgagaccagcctgtctctactaacaatataaaaattagctgggagtcacggtgggcgcctgtagtcccagctactcgggaggctgaggcaggagaattgcttgaacccaggagacagaggttgtagtgagctgagatcgcaccactgcactctagccttggcaacagtgcaagactgtctcaaaaacagcaacagagagcaggacgtgagacttctacctgctcactcagaatcatttctgcccaaccatggcccgtttgtggagctcagtacctcggccgcgaccacgctaaggg

SEQ ID NO: 6258 - DNA, 600 bp, Homo sapiens
  misc_feature 32, 113, 150, 182, 216, 231, 241, 265, 386, 428, 454, 498: n = A,T,C or G
cccttcgagcggccgtccgggcaggtactttnttttttttttttttttttttagtatcgatctcttttaatttttaggccaattttgagtagtcaaagtcagagcagtcaatntgtgttgtgagccgaggcacagctgcaaaagcgtgtntgaggtgtccggtggaggtggcagccgagctntgggactaatcaccgtgctggggacggcaccgcntcaggatgcaggcanatccctgcanaagtgtctaaaattcacgctcctnttctggagggacgtcgatggtattaggatagaagcaccaggggaccccacgaacggtgtcgtcgaaacagcagcccttatttgcacactgggagggcgtgacaccaggaaaaccacaattntgtctttcacggggggccactgtacaagtgcgaaaataccanaactcaaccttatagggttgttgaanattaaattttttacagtgcttaaaacaaaacctggcctgtaaanatatgctcaataaatactaactttctatcatcattcatttaaaaactggatgccttttttacttctacactctattctttggttactttttttttttttttt

SEQ ID NO: 6259 - DNA, 150 bp, Homo sapiens
  misc_feature 122, 150: n = A,T,C or G
cccttagcgtggtcgcggccgaggtacattgacattgatattcaccatggtgacggcgtggaagaggccttctacaccacggaccgggtcatgactgtgtcctttcataagtatggagagtncctgcccgggcggccgctcgaaagggcn

SEQ ID NO: 6260 - DNA, 214 bp, Homo sapiens
ccctttcgagcggccgcccgggcaggtacacaccagaatacaagacagtattggacaatgccaccgaagtagtgaaagagaaaatcacaaaagtgaccacacagcaaataatgattaatgatatttgctcagacatgatgtgtttcaacaccactggcacccaagtgcaaaacattacggtgacccagtacctcggccgcgaccacgctaaggg

SEQ ID NO: 6261 - DNA, 303 bp, Homo sapiens
  misc_feature 250: n = A,T,C or G
cccttagcgtggtcgcggccgaggtacacagaagtcaataattgaagtttgggaacctctgcctagatttcagaggatgcatggaaatgcctggatatccaggcagaaatctgctacagatgcagtgccctcattgtgaacctctgctagggcagtgtggaagggaaatgtggggttggagcccccacacagagtccccactgtggtactgtgcaggtgggttagaggctgcgtggcaggagaggttcanattttcccctggaccggttattggcctttgagggggaaatggtgggggccatc

SEQ ID NO: 6262 - DNA, 374 bp, Homo sapiens
  misc_feature 257, 258, 259, 260, 261, 262, 263, 264, 265, 266, 267, 268,269, 270, 271, 272, 273, 274, 275, 276, 277, 278, 279, 280,281, 282, 283, 284, 285, 286, 287, 288, 289, 290, 291, 292,293, 294, 295, 296, 297, 298, 299, 300, 301, 302, 303: n = A,T,C or G
  misc_feature 304, 305, 306, 307, 308, 309, 310, 311, 312, 313, 314, 315,316, 317, 318, 319, 320, 321, 322, 323, 343, 347, 351: n = A,T,C or G
ccctttcgagcggcccgcccgggcaggtacccttgaggaggtgggtagggtccccccataggtcctggacccattggttgtggtggataaggtgggtatggggccgttggaccagggcctggatatggtggagggttctcttggttcattggggacctgtaaagtgcacctctgctctccacgaaccgactggataacggtcgggtctgaacctccccgcgtacctcggccgcgaccacgctaagggcgaattccannnnnnnnnnnnnnnnnnnnnnnnnnnnnnnnnnnnnnnnnnnnnnnnnnnnnnnnnnnnnnnnnnntgtttcctgtgtgaaattgntatnacgntcacaattccacacaacatacta

SEQ ID NO: 6263 - DNA, 191 bp, Homo sapiens
  misc_feature 75, 104, 111, 171, 177, 178: n = A,T,C or G
cccttagcgtggtcgcggccgaggtacgcgggggaatgtataaatgtccattgccatcgaggttctgctattttngagaagctgaagcaactccaaggacacanttcacanaaatttggttcttcagccccaaaatacttgattgaattggggacaattacaaggactctnttggcnnaaaaacccttgaa

SEQ ID NO: 6264 - DNA, 504 bp, Homo sapiens
  misc_feature 20, 32, 54, 109, 114, 117, 122, 124, 126, 132, 136, 139,140, 141, 145, 146, 147, 148, 156, 159, 168, 189, 198, 199,206, 212, 213, 214, 215, 216, 220, 222, 225, 229, 230, 236,237, 238, 240, 254, 261, 262, 273, 276, 279, 281, 284: n = A,T,C or G
  misc_feature 306, 320, 321, 324, 342, 345, 346, 348, 357, 358, 361, 362,366, 368, 381, 385, 400, 402, 405, 408, 425, 427, 429, 430,434, 435, 436, 440, 444, 448, 455, 458, 459, 460, 472, 482,484, 492: n = A,T,C or G
cccttagcgtggtcgcggcncgaggtactttntttttttttttttttttttttnaattatttttttttttttttttttttttttttttttttttttttttttttttaantttanaanttttnanantgtttntttntannntttnnnnactgaagncgnttttttaanttaaaaaaaaaaaaaaaaagntttttttcnntaaaaanaaacannnnncccncnccnaaannaatttnnntnttcctattgggggntcctatnntaaaaaggggnaanttntnaantttggggttttttttttggaantcgttaaaaagaannaantgtttttttattaaaaanttnnanctgtttttnnggnnaaanantttttaaattttnaaanataacacaaaaaaantnaanttntaattttaaaatttttntngnngtgnnngggnttanaggntaattcnccnnnaatttttaaatnggtatttaananattttccntttttaaaaaaa

SEQ ID NO: 6265 - DNA, 200 bp, Homo sapiens
  misc_feature 63, 72, 130, 167: n = A,T,C or G
cccttagcgtggtcgcggccgaggtactttttttttttttttttttttttttttgggctctanagggggtanagggggtgctatagggtaaatacggccctatttcaaagatttttaggggaattaattntaggacgatgggcatgaaactgtggtttgctccacanatttcaaagcattgaccgtagtatacccccggt

SEQ ID NO: 6266 - DNA, 272 bp, Homo sapiens
ccctttcgagcggccgcccgggcaggtacatcttcagagcagatacatggacagcttttattctgaaatgtcttcttaagtgtgtttgcatggcaaacagttttggaaggtaaagataatgtctccctccaaagcaaaggacagatttgctttctatttagaataataaagataatgtctctttccagggcaaaggatggacaagctactggcaagtccctttaaaagtctgctatctcctaagctcagggaatctcacctcttatataaag

SEQ ID NO: 6267 - DNA, 347 bp, Homo sapiens
  misc_feature 86, 172, 213, 225, 243, 255, 257, 319, 323: n = A,T,C or G
cccttagcgtggtcgcggccgaggtacatttattgattcatttattttaaatatttaatatttttcttgctatagtgaatggcatnttgttaaaactacctgatctatatggttcttgcttatatataggaaagctattgagttttaaatgtttacttgatctggacagtgncatgaatatatgattaggtctaatagttattcataagttgncaataattttgntggttagaaatgatgtcntatattaataangnggggttttatccttttttctacaatctttatacctcatttattttttcttgtctcatttcanttgngctggaaccttcatagtgatattt

SEQ ID NO: 6268 - DNA, 591 bp, Homo sapiens
  misc_feature 191, 290, 447, 490, 515, 560, 575: n = A,T,C or G
ccctttcgagcggccgcccgggcaggtaccttcagctctcacacaaggactcagttacatacagttgctttgagagcaagttcgtaatgttagataagatttgcagcttcctttgggtgcctgctttgagcacagatcacaaatatgactcccacaacactacataagtctcaagttaaacaaaagagtcnaaataaacaaggatagcacaatcatggtaaagacaaagaaacaatttgagttacttcaattctatcatttttatgtgactccttggagtttttatttgnggttgaaatttaaaacagccgaaaacagtgcacaaactgcaaagttagtcattttgttggataagggcaaattttagctttgttcatgaaacgttttactggctgtaaggactattttttaaattaaaacggtattttttcttattttggtagttgntttaaaaattaaagactacatctagaaataattaaacattaantcaagggaaataattaattttaatngattattccatgggtactattggaaaaataatttttgttttatangatgagaggaaaatnttttaaaaaaaaaaaa

SEQ ID NO: 6269 - DNA, 338 bp, Homo sapiens
cccttagcgtggtcgcggccgaggtaccacaaattactgatttcagcaccagggagcaaaaagacaaatatccctgtcctgtggcacttacattctaatggctagacagagaaacaacaatatgcattaaagtaattcattcacgcaatgctataaagagattagatgtgtggggaaattttagagggatgtagtgaaccagtgggaggaaaagtggaaatgtaaattatttaaatggagttgccaggacagaacttctccagaagatgattagaaccatttgacttttcagagccctgaaagtcaaaagtacctgcccgggcggccgctcgaaaggg

SEQ ID NO: 6270 - DNA, 254 bp, Homo sapiens
  misc_feature 224: n = A,T,C or G
ccctttcgagcggccgcccgggcaggtacttacaatattgttttatatgttttatggaaggaaagaactcctcctagctttaaagtaaaatagagcaaaactgacttgaccccgattttcctttaaatccgtatctcaaagtattttaaatctgaagtaaagactacttgtgtcaatgcaacatatatttttgtagacctttgttccttgttgtccaccacttntatgtacctcggccgcgaccacgctaaggg

SEQ ID NO: 6271 - DNA, 209 bp, Homo sapiens
  misc_feature 89, 105, 108, 168, 181: n = A,T,C or G
cccttagcgtggtcgcggccgaggtacttttttttttttttttttttttttgctaaaaggaactagaagatataaaacctcagagcctntatccacccagtcttnatntgagaaaagcgcaaataacagattctttcagtttgcctgtgtctctcaccactaagctgnaagaagctccctncaaatgagaacgtgacacatgcagggac

SEQ ID NO: 6272 - DNA, 165 bp, Homo sapiens
  misc_feature 84, 138: n = A,T,C or G
cccttagcgtggtcgcggccgaggtacgcggggcctctgaagccgtggatacagaaatctctgcaggcaagttgcttcccaagnagcatattgcaggacaagcctgtaaccgaatagttaaattcacggcatctgggnttcctaatccctttttcccgaaaaaat

SEQ ID NO: 6273 - DNA, 337 bp, Homo sapiens
  misc_feature 17, 18, 19, 31, 35, 77, 304: n = A,T,C or G
cgcccgggcaggtactnnntttttttttttntggntttttttgagatggaatcttgctctgtaagttttgtattttnagtagagacggagttttgccatgttggcaaggctggtctcgaactcctgacctcaggtgatccgcccgccttgcctcccaaagtgctggattagaaggcgtgagccactgtgcccggcctaaaggcatttactttttattaaatcataattttgggacagatgtgaatttcagcaaaagccatgttacatttaatctaaccactggtatttataattactttgaatnttttacaaaagaatttgctcataattttcattt

SEQ ID NO: 6274 - DNA, 119 bp, Homo sapiens
  misc_feature 8, 74, 75, 81, 84, 89, 90, 111: n = A,T,C or G
ccctttcnagcggcccgcccgggcaggtacttattccttttgaaaaaccggacttcacctctgtcggcaaattnntaatgnctnttcanncccatttggagatggggacanaaaacaga

SEQ ID NO: 6275 - DNA, 572 bp, Homo sapiens
cccttagcgtggtcgcggccgaggtacatttggcatgatctgggcctatgcggtcttacaatccctgtataaaactagacaatgaaaaacagaaaacaaaacaaacaaacaaaaaaacaagaacgaagcacctaccacatgccagctactgaggctatgaaggtattctcccgccttagaaagcccaggattaatgcaggattgcgacatttaaacagaacatttccatacagcatgagtataaatgactttcccaagtttacactgagagtaactgacacagcaaccccagcaaagtctgagctgagtcctgaataattgtataaaaaggggagagaaacagagtgaagaaagggtttcccagactctgtcccaggaaagaaaatgagctcgtggagaggaatagactttctctatgaaaacagagggaacaaagaggaagatgtctgggaaccgaggagtaatagagacctgagtttacatcactactctgccactccctaggtacctgcccgggcggccgctcgaaagggcgaattccagcacactgggcgccgtttactagtgggaat

SEQ ID NO: 6276 - DNA, 409 bp, Homo sapiens
ccctttcgagcggccgcccgggcaggtaccatcatgaaatatcatgccatcctactctgtcccacccaggagagaaaccatccctttgtccgcagtatctatactgtatataccacccttccactagttacttagtagccatttctattagattggctgtcatggtatcatagtaattgagtccaagtaattcttattttacttaataatagctccaaagcagaaaagtaatgatgctggcaatttggatatgtcaaatagaagttgccaagttctacctttaagtgaaaatgtaaaacttcttgaattggtaaggaaaggaaaaaaatatataccaaggatgctaagatctatgctaagaatgattcttctatccatgaaactgtgaattagaaaaaggaaatttgtg

SEQ ID NO: 6277 - DNA, 386 bp, Homo sapiens
  misc_feature 255, 330, 341: n = A,T,C or G
cccttagcgtggtcgcggccgaggtacatgtgactttatacattttacatttgtaataaaaaaatcatgaaaagtatgctttgaacctgttggtaaattctaaaaaggaactaatttgaaagatttataaatcaaatttgttaagtggccaaactattttttattttgaaaataacaaaattccaactcgagcaaagctggttggaaagaaggaataactgccttttctaagctttatcagctaggaagcagatnggaattaataattccaagaagagaagaagttttatgaaaagaaattgtagtcgtcatgctgtagagtctgagcangctcatcttcngaggtttaaacgggtccatctcccccacagcagccacaacactgg

SEQ ID NO: 6278 - DNA, 392 bp, Homo sapiens
  misc_feature 13, 17, 22, 24, 26: n = A,T,C or G
cgggcccgccagnggtnatggntntntgcagaattcgcccttagcgtggtcgcggccgaggtacaccaaatgagatactatttggaaaggcaataaagggagtgtaaaagcctaggtagcttaaatacaggctctggaatttccttcgcaggaaggtgaagcaccaatgatggcaaaaattaaataaatacatcatcttaaaaaggcagagggtaggctgcgtgcagtggtttacgcctataatcccagcactttgggaagccaaggcgggcacattgcttgagctcaggagtttgagaccagcctggacaaccccatctctacaaaaaaataaaaatcggccaggtgtgatgggggcaaacctgtggtctcagctacttgggagggtgggt

SEQ ID NO: 6279 - DNA, 641 bp, Homo sapiens
  misc_feature 419, 467: n = A,T,C or G
cccttagcgtggtcgcggccgaggtaccgaccatagagcaagaatcaagattctgctaactcctgcacagccccgtcctcttcctttctgctagcctggctaaatctgctcattatttcagaggggaaacctagcaaactaagagtgataagggccctactacactggcttttttaggcttagagacagaaactttagcattggcccagtagtggcttctagctctaaatgtttgccccgccatccctttccacagtatccttagcgtggtccgcggccgaggtaccgcggggagaagcttggaccgcatcctagccgccgactcacacaaggcagagttgccatggagaaaattccagtgtcagcattcttgctccttgtggccctctcctacactctggccagagataccacagtcnaacctggagccaaaaaggacacaaaggactctcgacccaaactgcccnaagaccctctccagaggttggggtgaccaacttcatctggactcagacatatgaagaagctctatataaatcccaagacaagcaacaaaacccttggatgattatttcatcacttggatgagtgcccacacaagtcaagctttaaagaaagtgtttggctgaaaataaagaaat

SEQ ID NO: 6280 - DNA, 125 bp, Homo sapiens
  misc_feature 8, 24, 103, 104, 108, 109: n = A,T,C or G
ccctttcnagcggccgcccgggcnggtactcttggtttgtcaatgggactttccagcaatccacccaagagctctttatccccaacatcactgtgaataatgnnggannctataccgtgccaagc

SEQ ID NO: 6281 - DNA, 314 bp, Homo sapiens
  misc_feature 42, 273: n = A,T,C or G
tagaaagtttaaatacagaaataatcttgaaagaaggcaganaaaaatgacacattaacgtatagaaaaaaaatgactactgacatcataaaaaataataaatgccagaacacagtagaaatacacattgcaagtgctaaaaaaagctttcaaatgagattatatgctccaaatatatcatttaagaatgaaagcaaaattacactttcagttatgatggagtaacaaggactacatatacttcaactctaaacaataagaagacacaactgnattcattcatttcatttaagaagacaagagtctggcttttg

SEQ ID NO: 6282 - DNA, 311 bp, Homo sapiens
ccctttcgagcggccgcccgggcaggtacaagagatagaaagaccagtccttgctgaaagacaagtctgaatgctccactttttcaattctctctccattcttcagtaagtcaacttcaatgtcggatggatgaaacccagacacatagcaattcaggaaatttgactttccattctctgctggatgacgtgagtaaacctgaatctttggagtacaatctcatccttccaagcacgactatgtgtaatgctctaagacctctcagcacgggcggaagaaactcccggagagctcacccaaaaaacaagga

SEQ ID NO: 6283 - DNA, 244 bp, Homo sapiens
  misc_feature 6, 26, 43, 57, 90, 115, 125, 126, 176, 182, 188, 192, 213,224, 232, 233: n = A,T,C or G
ccgaantttgggggcccctcttaaanaaaaggcccatttgggnccctttcccggaanaccgggccccgcccaagttggttgaatgggganttattccttggcaaagaaaaaaaantttttttccnngggcccccttttttccgaaagccgggcccgccccccgggggccagggttncccccngggggnttcnaaaaattaaccggggaagggncttttgggggntatttctnnggggggggggg

SEQ ID NO: 6284 - DNA, 410 bp, Homo sapiens
  misc_feature 122, 242, 248, 343, 372: n = A,T,C or G
cccttagcgtggtcgcggccgaggtacagatagaaaaatgatgtattatgaaaacagttatatgaaggctggagtaactatattaacatcagataaaatatgcttcaagacaaaaagtagtnacagagataaaaagggacatttcattatgaaaaaaagtttaattcattagcaagatatcacaatcataaatatgtatgtggttagcacaaagttaaaaatgcatgaagcaaaaactaatngaagtnaaagaaggaatagacaatttcacaacaaacattaaagattataacactcttctcctgccaattaatagaataactagacaaaacataattatccngattatctgaagattatcaaccatcttgnctttaattgatatttatagcacaatttgcagaatacaa

SEQ ID NO: 6285 - DNA, 289 bp, Homo sapiens
  misc_feature 144, 148, 181, 193, 206, 219, 222, 230, 235, 236, 246, 268,272, 274: n = A,T,C or G
cccttagcgtggtcgcggccgaggtactggagatgtatttgataaccaaggttttaggtaaattttcacccagtattagttttatttgcaaacctgaaaaaagttggtagcttaatgtaaaataacccctttagtgaacctttntttnttttaaaaaaaaaaggcctattttggttcccgntttttgaaaaanattatttgtttgnaagggaaaaaatnggnaggggganctttnncttaattccncccccttaatgggaaaaaaaanaaantnggccttaaaaaggaa

SEQ ID NO: 6286 - DNA, 520 bp, Homo sapiens
  misc_feature 410, 452, 495, 501: n = A,T,C or G
cccttagcgtggtcgcggccgaggtacattcaatttaggttttggacacttagttggataaacaagtttatttgtaaatttagtcaacatacataattgacctaaaaacttcagtaaattttaaaaccacttggaaggccatctctataaaaatgattttcccaggacagtaaccagatgtaacctaacccaacaccatcttaattggcagaggttcagtgggctggagttttgtgctcctcccccacaccaagtttttataatacaaatgccacaagaaaaagaacttcggtacacaatggtttattaaaggaatgtatggcccacatcaacctagcaaggattctactggtaaaccttgctatggccaaaggaaaaacaagcaggagttgagtggctggggtggggtncaggcaatgggagagaggggcagaagggtgtagaagctgaangggtcttagaaagcttacctcctgagttttcttccctttctgnccttcnaaaatcttttactttcttt

SEQ ID NO: 6287 - DNA, 244 bp, Homo sapiens
  misc_feature 17, 77, 78, 106, 124, 128, 223, 231: n = A,T,C or G
cccttagcgtggtcgcngcccgaggtaccttaatagctacccaacaagtcattaacatacaagaaacatgcattttnnaagcaggaagcatcacccatcccttctngcatattagcaacttgtnactncctgagcaacagtgctcacatcactgaggtctgtgaacagtcctttttcgattcatcctgagtgaaagatgggaatgacttaagtacctggcccngggccggncggcttcgaaaag

SEQ ID NO: 6288 - DNA, 290 bp, Homo sapiens
  misc_feature 60, 135: n = A,T,C or G
ccctttcgagcggccgcccgggcaggtacgcgggataggagtaagtgtggcagcaatttnccagaaactgtatattatattgaacctgtgagtctttaccatgtatatatatttcctttttcattcatataactntaaaaaaatcaaatttattaataactaagatagtatccttcttgacagcaatgcatcaaaaacttaggctgaaattatttttaattttgccttactttcctttggaaatggtatattatggtataaggtacctcggcccgcgaccacgctaaggg

SEQ ID NO: 6289 - DNA, 338 bp, Homo sapiens
  misc_feature 331: n = A,T,C or G
cccttagcgtggtcgcggccgaggtactttagtttgccttaacctactttttgttgtatttgtttaatttcttctactggattataattcccctgagtagacaagtatttgtctaactatcttagagtgctgagaagagtgtgtggctcagactatgggtgtaattcagttgacacatggtgcatgcctataaggatattctgagagtgacaaagttaagacagacatcagacgtaattagtaaacacacatattacacagttccatattatatatgaatgtaaaacattcagataaggaatatgcccgcgtacctgcccgggcggcccgntcgaaag

SEQ ID NO: 6290 - DNA, 123 bp, Homo sapiens
  misc_feature 40, 51, 58, 61, 69, 94: n = A,T,C or G
ccctttcgagcggccgcccggcaggtacttattatttttnttttttatttntttgctntanagggggtngagggggggctataaggtaaatacnggccctatttaaagatttttaggggaatt

SEQ ID NO: 6291 - DNA, 383 bp, Homo sapiens
cccttagcgtggtcgcggccgaggtactcgaatatatgccagcatgaagtgcccagaccagaagtgtctatatacctgtcagatcaaggatggtggtgtgcagcctcagtttgaaattgttcctgaagatgacccccagaatgccattgtcagctcttctgcagatgcttgtcatgcagaactgctcaggactataagcactactatggggaaactaatgcctaacctgcttccagctggagctgacttttttggattttctcatccagccatccacaacctgatccagagctgtccaggagctcgaaaatgcatcaattaccagtgggtgaaatttgatgtgtgcaaacctggagatgggcagctacctgaggggctgccgg

SEQ ID NO: 6292 - DNA, 590 bp, Homo sapiens
  misc_feature 31, 61, 83, 136, 160, 170, 186, 190, 195, 211, 244, 275,284, 290, 323, 332, 347, 355, 363, 422, 425, 438, 497, 510,535, 546, 566, 579: n = A,T,C or G
cccttagcgtggtcgcggccgaggaactttnttttttttttttttttttttttttttacanagtgggaaacaactttaatganaaacccagtttcccagtttccctttcatttcaagactatgacattccgacttntttgagggcttccattgcctaggnggcctttttnttgtagttaggcattnttanagctntgggcatgggcttgtnttggccaaaatgtcttttagcaaagtaatcatntatgccaataggcaaatagtgagcaaggcanatccacaantaagcncctttccctggcgtgtaataggcaaaagggctnttcgccaanatagcatgctggatntcccgcancaccgganagaagtccttgctggctaacgagttgatcaataggaggaaattccgctgtgctaaaatntantcctggcccgtantctttcctgtactatacagctttattttaacccctatggtgattaaaaatttaacaaanaattttttttttntttaaaaaaggcatttttttagttngctttttcaanaataataactttttacctantcccgttctttgntttttttttaa

SEQ ID NO: 6293 - DNA, 186 bp, Homo sapiens
  misc_feature 118, 119, 120, 121, 122, 123, 129, 130, 131, 135, 170: n = A,T,C or G
ccctttcgagcggccgcccgggcaggtacttcaaccagcctacaagctggcacttgctaacaaatcagaaatatgacaattaatgattaaagactgtgattgccacctaagaaaaaannnnnngctatnnnaaanaaagtacttgggctggaaggccaagacagcaccanaaactagcaacattta

SEQ ID NO: 6294 - DNA, 266 bp, Homo sapiens
  misc_feature 212: n = A,T,C or G
cgccagtgtgatgggatatctgcagaattcgcccttagcgtggtcgcggcccgaggtactttttttttttttttttttttttttgagtctttcttaaaaaacaaacaaataaaaaactcttcaacaaatcctaaagaccaggaaataaacatctgctgagttttctgctcagggtccattcatgatttttctggtaacaatactgccagttncttagggggcaaccccctgactctagagccatgtagcttagtggagtgaacccc

SEQ ID NO: 6295 - DNA, 388 bp, Homo sapiens
  misc_feature 286, 310, 311, 312: n = A,T,C or G
cccttagcgtggtcgcggccgaggtacgcgggtgattccaaaaagttgaggagaagggacttctccctaactcattctatgaggccagcatcatcctgatacctggcagagatacaacaacaaaaacaaaaacttcaggccaatatccttgatgaacatcaatgtaaaaattctcaagaaaatactggcaaatcaaatccagcaagcacatcaaaaagcttatccaccacaagcaagtaaactttctcatggttatcaaccttatgcaaggttggttaaacatacnccaaatcaagaaatgtgattcatnnncataaacagaactaaaagacaaaaaagcaccatgatttatcccaatagatgcagaaaagggcttttttcaataaaa

SEQ ID NO: 6296 - DNA, 616 bp, Homo sapiens
  misc_feature 47, 251, 272, 304, 335, 385, 406, 423, 453, 484, 497, 523,540, 554, 578, 581, 582, 590, 594, 598, 604, 608: n = A,T,C or G
cccttagcgtggtcgcggccgaggtacctgtgactttgtcaccaatncaaatcacagctgttttcgtatcacattctcattgttacaaatatctttagatgtttacattcaacacaactttgaagttgaagcaattattcccaatgctagaccttgttagttaataataaataagccaccatgcccggccagtgatttacacttctatatactctcttcttttattaaatacttagggaaaaagcccagtnttgatgcttaaaaaaactgangccgggcgcggtggctccccctgtaatcccancgctttgggaggccgaggcggggggatcacngaggtcaggagatcgggaccatcctggccaacatggtgaaaccccgtctntaataaaaatgcaaaaattanccgggcgtggaggcacncatctgtaatctcagctattcaggaggctnaggaggcaggagaatcacttgaacccaggangcggaggttgcantgagctgaaatcacaccaccgcactncaacctggcaacaagantgagacttggtatnaaaaatatatattattttttggcntcnnaaataaanaatngaanctggcnaaanggataaaa

SEQ ID NO: 6297 - DNA, 798 bp, Homo sapiens
  misc_feature 235, 357, 377, 480, 486, 490, 496, 501, 506, 507, 511, 524,530, 545, 555, 570, 572, 573, 576, 588, 589, 598, 599, 603,605, 621, 637, 639, 651, 652, 654, 655, 662, 664, 667, 668,671, 673, 678, 680, 683, 686, 688, 690, 694, 695, 697: n = A,T,C or G
  misc_feature 698, 700, 702, 707, 711, 712, 715, 718, 722, 724, 725, 728,731, 732, 734, 741, 744, 745, 747, 748, 749, 752, 753, 754,755, 768, 769, 771, 773, 774, 783, 786, 789, 791: n = A,T,C or G
gatatctgcagaattcgcccttagcgtggtcgcggccgaggtacttctttttttttttttttttttgagacagtctcgctctgtcgcccaggctggagtgcagtggcgcaatctcggctcactgcaacctccacctcccgggttcacgccattctcctgcctcagcctcccgagtagctgggattacgggcgcccgccaccacgcccggctaattttttgtatttttaagtaganacagggtttcaccgtgttaaccaggatggtctcgatctcctgaccttgtgatccacccacctcggcctcccaaagtgctgggattacaggcgtgagccactgcgcccggccacattcagttnttatcaaagaaataacccanactttaatcttgaatgatacgattatgcccaatattaaagtaaaaaatttaagaaaagggtattcttaaatagatcttaaggcaaaataccagcttgatgaanggattntgangccttnatttngtcanncttntcccaaaaacaantaaaanaaccacttttttgtngggcaatttnaaaattttaaagggntnnaantcccaattgatnnaaacaaacnngccngnaattgaaaaaatttgntttttaaaaggggggntnttttaaaatggnngnnccttaantnggnnaantnaaatnanggntangnanaaanngnngnanaggancttnnagnttngaantnntcnaannantcccaanggnnannnttnnnntttaaaaaacaanntntnnattaaaggnttnaancnaaaaaaa

SEQ ID NO: 6298 - DNA, 463 bp, Homo sapiens
  misc_feature 36, 37: n = A,T,C or G
ccctttcgagcggccgcccgggcaggtactcacccnngattgataaattctggggtgcatagccattgatgaagaggctatccctgtccaggacatagaagcccagttgggtgacaccatgggtcagctgactcagctcccagtaaagctgctgtatgtccagcccggggcccacagggtcagggtggtaggtgcaggtggtgtccacaccagtggctgccccatccttctcaggcctgagggagatcagttggcaacccaagtagaaggggcccatgctgctcttctggaacaagggtctgagcaggtgctgaaggaccccctcggtggagttgaatgtagctgaacccttgcccatatctggtgaatactggagattggagatggtgaagttgagtgtgagggtctttcaggtggtacctcggccgcgaccacgctaagggcgaattccagcacactggcg

SEQ ID NO: 6299 - DNA, 353 bp, Homo sapiens
  misc_feature 88, 91, 95, 96, 262, 281, 332, 337: n = A,T,C or G
ccctttcgagcggccgcccgggcaggtactatgtggtatccatattcgttgcaaaaatgataattactggaattttccaaacatcaantgngggnngatcaatgggttaccactatcgttttcaaccaatatacagatgttcgctcaaggtctagggtttatttctacatagtagtattcacatgagttccctattctgaagtattatcaaaacgaggacccttgaacccgcgtcccaagggtggtggagacctctaattangatatacttctgatcagangcttcagacattaaccaaagagaacttgacctttttactgcaaaatatggncttanttatttaaaaaaaaaa

SEQ ID NO: 6300 - DNA, 191 bp, Homo sapiens
  misc_feature 158: n = A,T,C or G
ccctttcgagcggccgcccgggcaggtactccaatctgggtgatagagcaagaccttgtcttgaaaacaagataaaacaagataaaacctttccctcatcaaccatttgcccaggaaagaagacaattacttggggttttgtttcctttgtttaccanttttcagaatgagttggtaccatcagccctggc

SEQ ID NO: 6301 - DNA, 320 bp, Homo sapiens
cccttagcgtggtcgcggccgaggtacgcgggtaaggaaggaattcctcctgatcagcagagactgatctttgctggcaagcagctggaagatggacgtaccgaagtatagagggctgctgtatttgcagagctaagtcctccagttctcgattcactgacagtaaacgctatgaaaaggacttccagagctgttttggattgcatgagactcgttcaggagacatctgcaatgcctgtgtcctgcttgtgaaaagatggaagaagttgccagcaggatcaaaaaaaaactggaaccatgtggtagatgcaagggctgga

SEQ ID NO: 6302 - DNA, 358 bp, Homo sapiens
  misc_feature 114, 115, 119, 146, 155, 158, 160, 162, 163, 167, 172, 173,175, 183, 184, 188, 189, 200, 202, 204, 208, 214, 222, 230,236, 242, 244, 245, 248, 250, 253, 254, 257, 261, 262, 264,267, 276, 277, 280, 284, 289, 293, 294, 304, 305, 313: n = A,T,C or G
  misc_feature 314, 316, 317, 318, 331, 332, 333, 337, 338, 341, 345: n = A,T,C or G
ccctttcgagcggccgcccgggcaggtacttttttttttttttttttttttccttttttttttttttttttttttttttttttttttttttttttttttttttttttaaaaaannaccntttttaatttttaggccaattttgagnagtcaaagnaanancnnccantttgnntngggagccnnggcnnaattgcaaaancntntttnaggggnccgggggngggggaanccgacntttggnannaananccnngcngggnncnggncccttttannaancagncaaancccnncaaaaggggnnaaaattcnncnnnttttttggggggnnncaannggnattnagaaaaaaacccc

SEQ ID NO: 6303 - DNA, 343 bp, Homo sapiens
  misc_feature 14, 17, 73, 79, 80, 81, 84, 90, 114, 123, 191, 206, 244,245, 256, 258, 276, 280, 285, 286, 287, 288, 289, 290, 291,292, 293, 294, 295, 296, 298, 299, 300, 302, 303, 304, 305,306, 307, 308, 309, 310, 312, 315, 316, 317, 318, 319: n = A,T,C or G
  misc_feature 320, 321, 322, 323, 324, 325, 326, 327, 328, 330: n = A,T,C or G
cgaacttcaacttnttnagggggggccgggaaaaatatattttggggggggggggggggcccccccccccccntttttnnnttntttttnaaaagtatggccttggctttccgnaggccgggncccgcccaagttggttggaattgggattattcttgggccaaaaaaatttccgccccctttttttccgnaagccggggccccgncccccgggggcccaagggtttacccccccggggggggnnggttttccccngnggggaaaaaaaaaaaaanaatnggggnnnnnnnnnnnncnnncnnnnnnnnngnggnnnnnnnnnnnnnnanaaaaaaaaaaaaa

SEQ ID NO: 6304 - DNA, 292 bp, Homo sapiens
  misc_feature 47, 68, 69, 70, 92, 93, 99, 100, 101, 103, 110, 111, 113,118, 119, 120, 121, 123, 124, 125, 126, 127, 129, 130, 131,132, 133, 134, 142, 144, 166, 167, 178, 188, 199, 200, 203,209, 210, 216, 218, 219, 234, 254, 261, 272, 273, 276: n = A,T,C or G
  misc_feature 277, 278: n = A,T,C or G
cgccagtgtgatggatattctgcagaattcgcccctttcgagccggnccgcccgggccagggaccttnnntttttttttttttttttttttnnaaaaannntnttttttnntnttttnnnntnnnnntnnnnnnaaaaaaancnaccctttttttttttgaaattnntttttaaaagnggggtttttnggggggggcgnnaancccttnnaaaaangnnaaaaacccctttttntaacctttgggggggggggnaaaaatnaattttaatanntcnnnaaaagggggggggg

SEQ ID NO: 6305 - DNA, 426 bp, Homo sapiens
  misc_feature 406, 418: n = A,T,C or G
ccctttcgagcggccgcccgggcaggtacgcgggagacagcagaaggatcactgggctggaagctctaacaggcattgccagcctagctacctgcagtttgaggcaagggcagggtcacttaccctgctgtctgaatgtctcctgggacaacaggaggctgcactcactggctgagttcagacagaagagggatcatcggactggaagctctggcaggtatggctagcctggttacccgtagtgagaatggagagggccacctgcccagctacacagatgtttcccaggacaacaggaggctgtgtccactgacagttcagacagaagtggaaccactggaccggaagctctagcaagtgttgcccacctggctactagtgagccttgaaaccagcgaaacaattnatcaaagagcanttctgtca

SEQ ID NO: 6306 - DNA, 279 bp, Homo sapiens
  misc_feature 131, 132, 147, 152, 155, 158, 164, 177, 181, 182, 183, 186,192, 193, 203, 206, 209, 211, 219, 220, 221, 224, 230, 231,237, 238, 239, 241, 250, 254, 256, 258, 267, 268, 276: n = A,T,C or G
cccttagcgtggtcgcggccgaggtactttgttttttttttttttttttttttttacttttttttttttttttttttttttttttttttttttttttttttttttttttttttttattttttttttttttnnttttttttctttttncttanaancanaataanttttttaaaaaanaggnnncanaggccnnttgggtaaantgnggnanataaaaannnttngttttnntagacnnncnaattttttnttanananaaaaaaaanntttttttnttt

SEQ ID NO: 6307 - DNA, 467 bp, Homo sapiens
  misc_feature 34, 109, 122, 146, 190, 195, 238, 253, 296, 317, 333, 343,375, 387, 393, 404: n = A,T,C or G
ccctttcgagcggccgcccgggcaggtacgcggnggccaaagtggcgagcctgagaggaatggagttcaggggtgcgccagcactcaggttgaatcagaaaataaccangaagaccagaaanccggtgcgcttaccagaaagccgnctgacaccatgggaggtgtgggtttattggcaaagaaaaagaanacctnaccggttgcacttgaaactctagaggaattaaatcaccacttngaaaaagaaaagaantggaagaaccttgaaaaaagaaagataattgctgaagaaaacncaaggaatgggtttcaaaaanaagaattggccaaaanggaaaggaangaggaaccaaaaaattattaaagaaattgggnggaaaaaagccnccaaanggacctggagnaaagaattctttccaagaaaaaaccaaaagaaaaattttcaagaatgggttaaagaaaaaaaa

SEQ ID NO: 6308 - DNA, 290 bp, Homo sapiens
cccttagcgtggtcgcggccgaggtacgcgggtaacatataagaaacaaaagttcaattttgcttcagaaatgcaaggtaggccatttgaatttgtgacacgtgacaaaatgagttaacagtatggtggctgaaataatcctttggtaatcatcactttatagaaatatctttaattgctaaaggaaagggtagacaaattcttctccgttgcttttggtccaagtagggcttctgattaatactgaagagcatttaaaaagtacctgcccgggcggccgctcgaaaggg

SEQ ID NO: 6309 - DNA, 299 bp, Homo sapiens
  misc_feature 24, 49: n = A,T,C or G
gatatctgcagaattcgcccttancgtggtcgcggccgaggtacaagancatcctttagtctagggctagatttccactctacccaatgtcccatgaattatgaggctttccactctggctggtgggaacaggcactattcctagaccactattccaagcttcctaaatctcggccagaacaaattcattaatttatttagaaagatttattaagcaccttcatgttaatagcactaaggactgttccctctcatccttttaaagtggttcttttcccagcattatgtatcttcttcat

SEQ ID NO: 6310 - DNA, 287 bp, Homo sapiens
  misc_feature 246: n = A,T,C or G
cccttagcgtggtcgcggccgaggtacttcttatacaggaggctgaaacagaatgaaagggtgaaaattaggtttaatttacttaggaaacaagaaatagaaagtcatagctataacactccactttcaggtgcccatgaagtagccttcaatggagattccccatagttgtttcacagcacagtgttaaaattttattacaagccctgtgtacctgcccgggcggccgctcgaaagggcgaattncagcacactggcggcccgttactagtggatcccgagctcgg

SEQ ID NO: 6311 - DNA, 388 bp, Homo sapiens
ccctttcgagcggccgcccgggcaggtacattatcagtaacaataatcattttcatgttaaaattattgtgtgccacagaggtaacaaatattcttgtcagttgtgtcttttaactatggctttccttaaaacttcttttattcatcaatagacaattgtcttattttgtcttgtttttaaccctctttaaaaggtttacaatcagatataaaactctaacaagtgcacttaaatgcagattttctgataactttgaaaattgtgacattgaaataaagggaaaaatttcagaactgtaatgggagagctgaaatgttcatgactatcaaacagaacaggagttaactgaattaattgaacccaacagaaaaccctaagttatctttt

SEQ ID NO: 6312 - DNA, 447 bp, Homo sapiens
  misc_feature 164, 174: n = A,T,C or G
ccctttcgagcggccgcccgggcaggtacatactatcagtgtgacttattactgttagtgttaatcttgataacctagccgagatagtgtttatcagatttctccactacaaagttattttccccctttccatatgtaatttttggaaggaagtcactattcanctcacactanagaagtaggaagttctgctccatatccttgagggcagagttcataaattatttggaattcttcttcatgggagattcatctattctaccccatttattaatgtattcaattttctggcactacaagaatatatatatatatttttgtaatcgactttaaaataattaggaaaatgatagaacattttaatataagaacaagatatggtaaattgatgaatattattagacattatcagtaacaagagctttgtatcttaagttgttttgagtt

SEQ ID NO: 6313 - DNA, 273 bp, Homo sapiens
  misc_feature 69, 71, 121, 122, 123, 125, 126, 131, 132, 136, 138, 142,151, 154, 155, 156, 157, 163, 165, 169, 170, 171, 175, 178,179, 180, 185, 189, 191, 194, 196, 198, 199, 200, 206, 217,220, 223, 224, 229, 230, 237, 244, 248, 249, 252, 255: n = A,T,C or G
  misc_feature 262: n = A,T,C or G
ccctttcgagcggccgcccgggcaggtactttttttttttttttttttctttttttttttttttttttntnttttttttttttttttttttttttttggaccttaactttctattttttannngnntatannaaangnctcnaaaaaaaanagnnnntttttngntttnnnaaanaannnaaggngggntnaangngnnnttgggnttttttttttnggnccnnggaanntttaaanttttatnattnnccnggnaaaaaantttttttttga

SEQ ID NO: 6314 - DNA, 159 bp, Homo sapiens
  misc_feature 32, 43, 55, 56, 61, 86, 107, 111, 115, 122, 143: n = A,T,C or G
cccttagcgtggtccgcggccgaggtacaagnggtggccacanaagtaggggggnnagccnaagctctcttactttatgctaaccngctaaatctgatcattatttnagangggnaacagcntgaaactaaaaattgatatanggccctactacactgg

SEQ ID NO: 6315 - DNA, 320 bp, Homo sapiens
  misc_feature 320: n = A,T,C or G
cccttagcgtggtcgcggccgaggtacctgggacatactaagtaatataattgttaactcttactagcattctgtcccttttatttcctaaatatctctcatgcccatctcctaaatatctctttcctaaatatctctcatgcttttggcttaagacctcttttcctccttatccattgactggactgcggcaaatgcctgctaatcgttatttttgtgttcattcatttagcaagccaatttattacgcgcttagggtgctgccagggctacaaaagctgttgagactgtacctgcccgggcggccgctcgaaagggcn

SEQ ID NO: 6316 - DNA, 352 bp, Homo sapiens
  misc_feature 105, 107, 109, 111, 112, 137, 141, 146, 148, 150, 152, 163,164, 165, 169, 172, 175, 181, 184, 186, 194, 196, 200, 209,220, 236, 241, 245, 246, 256, 258, 259, 264, 266, 274, 275,278, 281, 294, 295, 305, 306, 307, 310, 318, 320, 329: n = A,T,C or G
  misc_feature 342: n = A,T,C or G
ccctttcgagcggccgcccgggcaggtacttttttttttttttttttttttttttttatttttttttttttttttttttttttttttttttttttttttaaaaancnancnnttttaatttttaggccaattttgantagncaaantnanancattcaatttnnnttgnganccnaggcanaantncaaaaacntntttnaggggtccnggggagggggnaacccagctttgggantaaanaccnngctggggacngnnccccntnaggatgcnngcnaanccctgcaaaaatnnttaaaattcnnnctncttttttngngggacctcnatgggtttagganaaaaaacccc

SEQ ID NO: 6317 - DNA, 278 bp, Homo sapiens
  misc_feature 216, 237, 239, 242, 260, 262: n = A,T,C or G
cccttagcgtggtcgcggccgaggtacgcggggaggtctgaaaattgaacaagatggacgggtccaggaaagaggaggaggaagacagcacattcaccaacatttctcttgcagatgacataggaagaccaaccccttctcttcctccttctcctcagcttgttcaatgtgaaaatgaagaagatgaagactttcatgatgacccacttccacgtnataccattcctcaagaatttngnatncaaggcccaaaagtttgntncccaagatgatgaatg

SEQ ID NO: 6318 - DNA, 473 bp, Homo sapiens
  misc_feature 127, 134, 136, 138, 139, 145, 152, 155, 157, 159, 165, 166,167, 168, 169, 175, 177, 182, 187, 188, 192, 194, 197, 198,201, 204, 205, 209, 210, 212, 215, 229, 230, 233, 234, 235,243, 249, 251, 256, 257, 261, 266, 271, 275, 277, 278: n = A,T,C or G
  misc_feature 282, 284, 287, 288, 295, 298, 299, 301, 302, 306, 310, 326,333, 335, 336, 337, 353, 354, 359, 361, 362, 369, 371, 381,386, 399, 406, 426, 427, 428, 429, 430, 431, 442, 445, 446,450, 457, 460: n = A,T,C or G
ccctttcgagcggccgcccgggcaggtacttttttttttttttttttttttttttttttttttttcttttttttttttttttttttttttttttttttttttttttttttttttttttttttttttnaaaaaancnanntttttnaattttnagncnanttttgnnnnntaaaantnaaaanatttnntttntnttnnganccnnggcnnanttnaaaaaacttttttnnggnnnccgggggngggggnanccaanntttngaaanaaaanccgngnngggnanggnnccctttnagnntnnaggnaaanccctgaaaaatttttnaaaattnannnttttttttgggggggnnctttntnnttttagnanaaaaaccccnggggnccccaaaaagggntttttanaaaaaaaccccctttttttnnnnnngggggggggtnaanncaanaaaaacnaanatttttttttttt

SEQ ID NO: 6319 - DNA, 352 bp, Homo sapiens
cccttagcgtggtcgcggccgaggtacaggtcagagtcttcttttcttttctttttgagatggagtcttgctctgttgccagactggagtgcagtggtgcgatctgggctcactgcaatctccacctcccgggttcaagcgactctcctgcctcagcctcccgagtaactgggactacaggtgcgcgccaccaagcccagctcatccttgtatttttagtagagatggggtttcaccgatgttggctaggatggtctcgatctctggtcagagtcttttctgtaaatatccttggtaaagaagcaattttagactgtaagctgttgcaaatgctttaaggaagaaagcaaaa

SEQ ID NO: 6320 - DNA, 535 bp, Homo sapiens
cccttagcgtggtcgcggccgaggtacatttggcatgatctgggcctatgcggtcttgcaatccctgtataaaactagacaatgaaaaacagaaaacaaaacaaacaaacaaaaaaacaagaacgaagcacctaccacatgccagctactgaggctatgaaggtattctccggccttagaaagcccaggattaatgcaggattgcgatatttaaacagaacatttccatacagcatgagtataaatgactttcccaagtttacactgagagtaactgacacagcaaccccagcaaagtctgagctgagtcctgaataattgtataaaaaggggagagaaacagagtgaagaaagggtttcccagactctgtcccaggaaagaaaatgagctcgtggagaggaatagactttctctatgaaaacagagggaacaaagaggaagatgtctgggaaccgaggagtaatagagacctgagtttacatcactactcttgccactccctaggtacctgcccgggcggccgctcgaaagggc

SEQ ID NO: 6321 - DNA, 342 bp, Homo sapiens
  misc_feature 8, 9, 21, 23, 339: n = A,T,C or G
ccctttcnntcggccgcccgntnaggtacattgtatctttgttctcactggtttcaaagaacatctttatttctgccttcatttcgttatttaaccggtagtcattcgggagcaggttgttcagtttccttgtagttgtgcggttttgagtgagtttcttaatcctgagttctaatttgcccgcgtactccttcctcctgtccacatcatcccggcacacccccacgcgccaccttttattgtgtcctccgtccacctccagtaatgtttcctgcttggaaactctgagaagccaccacactcttccttgtaaatctcttctcagaagtgaggcacctnctg

SEQ ID NO: 6322 - DNA, 364 bp, Homo sapiens
  misc_feature 94, 140, 141, 143, 145, 146, 147, 160, 162, 165, 166, 168,169, 201, 202, 205, 209, 217, 231, 236, 237, 238, 241, 242,243, 244, 251, 255, 256, 258, 267, 268, 269, 270, 271, 275,277, 281, 289, 298, 303, 322, 325, 326, 327, 334, 335: n = A,T,C or G
  misc_feature 359: n = A,T,C or G
cccttagcgtggtcgggccgaggtactttttttttttttttttgtttttttttttttttttttttttttttttttttttttttttttttttttntttttttttttttttttttttttttttttttttttttttttttttnntntnnnttttttttttttntnttnncnnccaaaaaaaaaaaatttttttttttttttttnnacncccnaatttttnaaaaaaaaaaaaanccccnnnttnnnnaaaaaancaanncnaaaaaaaannnnngtananaaanattggggnggggataanttttnttaaaaaaaaaaaaaatanccnnnttttttnnaaaaaaaaatttttttttttttanaaaaa

SEQ ID NO: 6323 - DNA, 329 bp, Homo sapiens
  misc_feature 7, 14, 23, 36, 73, 108, 144, 154, 189, 207, 213, 215, 223,246, 260, 277, 278, 280, 282, 290, 294, 296, 305, 307: n = A,T,C or G
cccttancgtggcnggggccgangtactaaataaanattattggaatgaacagccgaagcgactgacttctanatggagcactattgctcatttcacttctgttcctngcacctaaacaaacctttacatcctcactggtctgngaggccaganaacaggtgtggccttggtgtgataagaaatgctanttttatacaaaactgaanccaatncntgggcctnaaactcttgaccccccaaatgcnccttcaaaaatggnattcaattggagcccanngngnagggcttngaangnaaagggagngnaagccaattcatggcccccttt

SEQ ID NO: 6324 - DNA, 426 bp, Homo sapiens
cccttgagcggcccgcccgggcaggtacttcccttatcataacacctatcatgctttattattatgcctattatattagtttcctatttcttctgtaacaaattacaccaatttttttttgcttaaaacagcacaaatttattatacttctggagctcaaaagtctaaaataggctagcagtgccattttccttctggaggatatacaagataatcaatttctttatcttttacagcttttagaggctacctgtattctttggcttgtggtcccttcctctatcttcaaagtcagcaggccatctttaactttctgtcttctgacctctgcttctattttcacattgccttcccacattgattttctgcctctctcgttctcttataaggatcttggtgattacattgggcccacctaggtaatcc

SEQ ID NO: 6325 - DNA, 399 bp, Homo sapiens
  misc_feature 54, 346, 389: n = A,T,C or G
ccctttcgagcggccgcccgggcaggtacttttcagttccatatttttgtttgnttctttttatgttttgcatctctttactgatatttcactaatatattatttttgtgggttttccacatcttcctttagtttactgagcatctttaagagatttcttttaaagactttttctagtaaattgggcattggtcttatgaacagtttctgttgattttatatttatttggatggaccatactttcttattttttgaatactttgtgatttttttgttgaaaattggacatttgaatctaagaatgtggtactttggaaatcagattctcgtcctttcctaggtttntggggtgtgtgtgtgagtgttaaatttttactctttctttaancttaaaactg

SEQ ID NO: 6326 - DNA, 655 bp, Homo sapiens
  misc_feature 151, 240, 264, 279, 304, 366, 435, 443, 450, 510, 635: n = A,T,C or G
cccttcgagcggccgcccgggcagggtaccccgggctagcactcttgacctagcagtcaacatgaaaggctctcattgtctggggcttgcctcctttctggtaccgggccaaggcaaggtctttgaaagggtgtgagttggccaagaactnttaaaaaaatgggaatggattgcttcaggggaatcaacctaaccaacttgatgtgtttggcccaatgggaagaatggttacaacacacnaagctacaaactacaatgcttganacagaaacacttgantattgggatatttcaagatcaatancccgctactggtgtaatgatggcaaaaccccaaggaacaagttaaatgcctgtcatttaatnctgcagtgcttttgcttgcaagataaccatcgctgatgcttgtaaccttggtgcaaaagaagggttgtnccgtgatnccacaanggcatttaaaaccattgggttggcattggaaaaaatcgtttgtcaaaaacagaaaatgtnccgtcagtattgttcaaaggttggtggagtgtaacttccaaaaatttttccttcttcaagctcaattttggcctctcttcacatttaaagggagtagggaatttaagtggaaaggtcacacctanccatttatttttccccttca

SEQ ID NO: 6327 - DNA, 295 bp, Homo sapiens
  misc_feature 151: n = A,T,C or G
ccctttcgagcggccgcccgggcaggtactcctgcaggatcttgctgtcggtggtctgcgggaagccaaagtccatgagctcgtccagcaactcgtagacgatgacaaagttgtcccggatgctctcctcctccagctccttgaagtattngcagaatacctctattgtcttatacaggaaggagtacttcccacttttcataacgagttggagcctagagttgatcgactccagcgactttttcgtcttctttgcggccaccatcttcctgccttaggagcgggacggccccaa

SEQ ID NO: 6328 - DNA, 540 bp, Homo sapiens
  misc_feature 321, 480, 521: n = A,T,C or G
ccctttcgagcggccgcccgggcaggtactgggatggaattctactgtcttggaaggaatttagactttctgctcaaaagggcagtgatgtaagctcagggaaggtgtgtggttgcaaagagctttcagttttgcccaaacatctgatggtccaaccactctaggtgaattcagagaagtgaacagctctcagagtaacaaaactgaccaccagctagttgtgatggcgcacacctgtaattccagctacttgggaggccagggtagaagaattgcttgagtgcaggagtttgaggccagcctggaaagtgagaccccgtntttaaacaaagcaaaacaaaacaaaaccgaccacagtgccaggaaagtgctactgctaactggcagtgggcttgtaaccatgcaaaatgtggatacctgtcactttggaaacattacatttaaattcaagcttaacttttttttttttttttttaaaanaattagttttaaacctacttcctagggacttggcttgggtnccattaattaattttttaa

SEQ ID NO: 6329 - DNA, 110 bp, Homo sapiens
  misc_feature 7, 48: n = A,T,C or G
agaattngcccttagcgttttcgcggccgaggtacaaatgacacaatnagagagaaaagagtgacaaaaagcaaagagatgaatactgattataacttattcccacaaca

SEQ ID NO: 6330 - DNA, 407 bp, Homo sapiens
  misc_feature 9, 11, 13, 16, 18, 25, 26, 29, 35, 38, 39, 107, 363: n = A,T,C or G
cccttagcntngnccngnccgacgnncanataggnaannctttctcccacttgcttctagtgaacaaacacaccactgcacctcatccactgctctcaccaaacctntagcccctttgacagggaacagttgcttgcaattggctgagaccaccttataaaatcacagtccatcagcccaccagggaacacaatggtttaataatattcagcatctcttcttcaaagtaagtgcaatggtataaaccaataaatatttgtatatccttctattaaagaagttttggcttaaatttaaacaacaaagcagaacaaaaaattccatacttgcagagaaaagtttaaaaaaagtggagcataaagngggttcccaattctgtttctctattatctcttcaaccctttttt

SEQ ID NO: 6331 - DNA, 187 bp, Homo sapiens
  misc_feature 94, 148: n = A,T,C or G
ccctttcgagcggccgcccgggcaggtatagattaaatagcttaaaggaagaaaaaatcatcatagtaaaagaatttgagaagatacaaagccngggaagaaatggagaaagaagatgaaaattttgagagaaagccctgaagaattncgtaaagaaatattgcagaagaaattagaaattaaaatt

SEQ ID NO: 6332 - DNA, 289 bp, Homo sapiens
  misc_feature 30, 33, 48, 53, 69, 81, 89, 97, 98, 105, 108, 117, 167, 171,177, 184, 185, 205, 215, 216, 245: n = A,T,C or G
ccctttcgagcggccgcccgggcaggtacncgnggaaagtaaatgacnatttntaattttatgtgatantttttaaaactntgtgttanctagggtnntaggaanccngatgtccanaaccaatcatgtggggctgttcagactgggatccactcagggtccccganccgntcccangaacttnnggcctgggcagaaaacatangaaaagccanngttctaataatacccaaactatatcagtntttgagttcaatttgttgtacctcggccgcgaccactctaaggg

SEQ ID NO: 6333 - DNA, 326 bp, Homo sapiens
  misc_feature 172, 207, 256, 308, 309: n = A,T,C or G
ccctttcgagcggccgcccgggcaggtacgcggggggatattggagcagcaagaggctgggaagccatcacttaccttgcactgagaaagaagacaaaggccagtatgcacagctttcctccactgctgctgctgttctggggtgtggtgtctcacagcttcccagcgactntagaaacacaagagcaagatgtggacttagtccanaaatacctggaaaaatactacaacctgaagaatgatgggaggcaagttnaaaagcgggaagaaaatagttggctcccagtggtttgaaaaaaatttgaaanncaaattgccaggaaatt

SEQ ID NO: 6334 - DNA, 426 bp, Homo sapiens
cccttagcgtggtcgcggccgaggtaccgactggagtccatatgcagaccaaagcatcaaagtgaggataagcctaaaatcagctcttggagataaagcattgaatggaacgacaatgaaatgtacgcggggagtccgagtggagagagcgagctgagtggttgtgtggtcgcgtctcggaaaccggtagcgcttgcagcatggctgaccaactgactgaagagcagattgcagaattcaaagaaactttttcactatttgacaaagatggtgatggaactataacaacaaaggaattgggaactgtaatgagatctcttgggcagaatcccacagaagcagagttacaggacatgattaatgaagtagatgctgatggtaatggcacaattgacttcctgaatttctgacaatgatggcaaagaa

SEQ ID NO: 6335 - DNA, 631 bp, Homo sapiens
  misc_feature 32, 52, 57, 66, 68, 73, 74, 75, 76, 85, 89, 95, 101, 102,103, 109, 131, 132, 135, 138, 142, 147, 160, 179, 209, 220,226, 244, 290, 301, 310, 330, 333, 393, 434, 445, 465, 472,479, 487, 491, 502, 520, 528, 529, 537, 553, 568, 592: n = A,T,C or G
  misc_feature 593, 600, 602, 631: n = A,T,C or G
cccttagcgtggtcgcggccgaggtactcggngctagcactctgacctagcngccancatgaaggntntaatnnnnctggggctngtcntccttnctgtannnccacangcaagtgtctttgaaaggtgtnngtntgnccanaactntgaaaagattgtntaatggatggctacaggcngaatcatcctagcaaactggatgtgtttgnccaaatggganagtggntcaacacacgatctacanaactacaatgcttggagacagaagcactgattatgggatatttcanatcatatagcncgctactgntgtaatgatggcaaaacccnaangagcagttaatgcctgtcatttatcctgcagtgcttttcttgcaagataaccatcgctgntgctgtaacttgtgcaaaagagggtttgtcccgtgatccanaatggcattanaagcatgggtggcaatggantaaatcngtttgtnaaaaacanagtntgttccttcantatgttcaaagggttganggaagtgnnaactccanaaaattatccttcttnaagctcaattttgantttcttcaccattaaagggagttnngaaattnanttgaaaaggttcacaactaccattatttn

SEQ ID NO: 6336 - DNA, 375 bp, Homo sapiens
  misc_feature 13, 16, 18, 21, 25, 89, 92, 106, 117, 154, 187, 192, 242,244, 259, 270, 283, 285, 297, 298, 301, 311, 315, 318, 342,358: n = A,T,C or G
cccttagcgtggngcngnggncgangtactacaggctgaccttctctgtttgccaattctggaaccaaaatatgcagttgaaaaaatantanaagctattctacangaaaaaatgtncctgcccgggcggccgctcgaaagggccgaattccangcacactggccggctcgtttactagtggatccngagcntcggttaccaagcttggcgtaatcaatggttcataggctggtttccctgngnggaaaatttgttatntcgcttcacanatttccacaacanancattaccgaagnncgngaaggcattnttangtngtaaaaaggccctggggggttgcncttaaattgaagttgnaggcctaaccttcacca

SEQ ID NO: 6337 - DNA, 169 bp, Homo sapiens
  misc_feature 56, 69, 97, 98, 123, 128, 131, 132, 142, 160: n = A,T,C or G
ccctttcgagcggcccgcccgggcaggtacttttttttttttttttttttactttnttttttttttttntttttttttttttttttttttttttttnnatttgggaatgaaaaaataactttnttttnttnnggggagcggnccccccctgggaggggtnacccggccc

SEQ ID NO: 6338 - DNA, 599 bp, Homo sapiens
  misc_feature 502: n = A,T,C or G
cccttagcgtggtcgcggccgaggtactgggatggaattctactgtcttggaaggaatttagactttctgctcaaaagggcagtgatgtaagctcagggaaggtgtgtggttgcaaagagctttcagttttgcccaaacatctgatggtccaaccactctaggtgaattcagagaagtgaacagctctcagagtaacaaaactgaccaccagctagctgtgatggcgcacacctgtaattccagctacttgggaggccagggtagaagaattgcttgagtgcaggagtttgaggccagcctggaaagtgagaccccgtctctaaacaaagcaaaacaaaacaaaacccgaccacagtgccaggaaagtgctactgctaactggcagtggcttgtaaccatgcaaatgtggatacctgtcacttggaaacattacatttaattcaggctcaacttttttttttttaaagaattagttttaacctacttcctaggacttgctgngttccattatttattttttatttttttagacaggatctcgctatgtcacctggctggagtgcagtgggtgtgatcatggctcactgcaaccccaacc

SEQ ID NO: 6339 - DNA, 230 bp, Homo sapiens
  misc_feature 1, 16, 89, 98, 101, 129, 140, 147, 167, 185, 190, 195, 212: n = A,T,C or G
ncccttagcgtggtcncggccgaggtaccaactgcagagccaggaaaacttttgaagccttcatgaaggcaatcggtctgccggaaganctcatccanaangggttaaggatattcaaagggggttgtngggaaaattcnggccaanaattggtgaagccactttcnaatgtttcacccattccncccgnttggngtttcccaaaaagatgnaattcccaaaaaaaccga

SEQ ID NO: 6340 - DNA, 178 bp, Homo sapiens
  misc_feature 107, 145: n = A,T,C or G
cccttaagcgtggtcgcggccgaggtactttccaggggaaccgcatggagatcccttaagttgaaactggacaaaaccagaaaccaagttgggatggtctagctganatctgggatagtttcttgaattcaaaagtgttcaccancccatttggatttttttaacttgggaaaccccc

SEQ ID NO: 6341 - DNA, 282 bp, Homo sapiens
ccctttcgagcggcccgcccgggcaggtacgcggggtggcctagcctcccagcctacatctttctcccatgctggatgcttcctgccctcaaacactggactccaggttcttgttttgggacttggactggctctccttgctcctcagcttacagatgcctattgtaggaccttgtgatagtaaaggagatgggtgtatgagttctgcagaagtccaccaaatgtgggccagggttatttccctggtgatgctctgaagcttttgccaaaggacaaatggaa

SEQ ID NO: 6342 - DNA, 487 bp, Homo sapiens
  misc_feature 186, 202, 203, 247, 249: n = A,T,C or G
actcactatagggcgaatgggcccttagatgcatgctcgagccggccgcaatggtgaatggatttctgcagaattcgcccttcagccggccgcccggccaggtccccggaaatggtggatataatggtaatatcatattaaataataagagaaagggattttggttaaatgaaaaatggttaaccnagaatctggtctattnnattgggacttgcccctttggtcaaagtattttctttaaggcttngnattgtgaacagctcttacttggcccagtgacagatcagtggtcttcttttcccagttgaacagtgcatacgcagtagctattattggggtaatctttacttctcttcatggtagaaaccaaagtcttctctgctggctggggctgaaaagagggctggggttatctccttctgatcttcaaaaacaaagaagagaagaccttggaatacactgactctttccaccctttttttttttc

SEQ ID NO: 6343 - DNA, 317 bp, Homo sapiens
ccctttcgagcggccgcccgggcaggtaccactttgggctacaaagtagagaatttattttgacttctttagccccatcaaggctcgtggttctccctgacacccctcaccacctcatgtcttcatctgcagactgtgctgggatgctaggctgttcctcccgttaggagcagctcagtgggagcagattcaagtagaaggagagaggaatctgcatgcattgggctgacggtgatttgttcatttcttagagtaatcagtaacatcttgattgatgcattcttagtttagtacctcggccgcgaccacgctaaggg

SEQ ID NO: 6344 - DNA, 456 bp, Homo sapiens
  misc_feature 223, 410: n = A,T,C or G
ccctttcgagcggccgcccgggcaggtacttttttttttttttttttttttttgaaactgagttttgctcttcttgcctaggctggagtgcagtggtgctgtctcggctcactgcagcctccacctcctgggttcaagcgattctcctgcctcagcctcccgagtagttgggattacaggtgcccaccaccacgcccggctaatttttctatttttagtaaanacggggtttcaccatgttggccaggctggtcttgaactccggacctcaggtgatccgcccaccttgctctcccaaagtgctgggattagaggcatgagccaccatggcacctggctatatctaacttctgttacagcaaatgatgctgatttcctctttaaatgaatgatataaacttgcattttanaatgcattcacaatattctgtatttaacaaataatagatttaaaga

SEQ ID NO: 6345 - DNA, 258 bp, Homo sapiens
  misc_feature 29, 31, 62, 63, 66, 71, 79, 85, 104, 108, 117, 134, 143,204, 224: n = A,T,C or G
cccttagcgtggtcgcggccgaggtgctngnggatgattcacgtggcaaaggacgcccattnnctncattnttattgtntacaanttgctacttttgctacttnaaancattcattnaaaaaatatgtattaanaatcatctnaataagctattagtgctagatgctaaagatatagcagtgaacaacagtctctgctgacatnaaccttgtagtctactgaangagacaactaataaataaggaaaccaaatgtaaa

SEQ ID NO: 6346 - DNA, 743 bp, Homo sapiens
  misc_feature 112, 115, 125, 126, 128, 140, 145, 146, 152, 153, 162, 168,170, 172, 174, 175, 180, 181, 183, 184, 185, 186, 188, 191,192, 195, 196, 197, 202, 208, 211, 216, 217, 220, 221, 222,230, 233, 236, 237, 238, 243, 244, 246, 249, 250, 261: n = A,T,C or G
  misc_feature 265, 268, 274, 278, 279, 284, 286, 289, 293, 294, 301, 302,303, 304, 312, 314, 324, 325, 326, 327, 328, 329, 336, 338,347, 349, 358, 364, 370, 374, 375, 382, 386, 389, 390, 392,402, 403, 405, 409, 421, 422, 426, 431, 433, 436, 437: n = A,T,C or G
  misc_feature 474, 475, 478, 497, 501, 503, 510, 519, 521, 524, 526, 530,535, 536, 539, 560, 564, 580, 589, 590, 591, 598, 600, 601,602, 607, 611, 612, 629, 640, 642, 648, 661, 662, 663, 671,685, 687, 690, 692, 694, 700, 705, 720, 721, 722, 731: n = A,T,C or G
cccttagcgtggtcgcggccgaggtactttttttttttttttttttttctttcttttttttttttttttttttttttttttttttttttttttttttttttttttagatttntanaaaaaacaanntntttaaattttanggccnnttttgnntatcaaaantaaaancntnanntttgnntnnnnanccnnggnnnaattnaaaaanctnttttnnggnnnccgggggnggnggnnnccaanntntgnnattaataaccnggcnggngacggncccnngttananttnaggnnaaacccnnnnaaaagggntntaaaattcannnnnnttttttngnggaccctcnanggttttaanaaaaanacccangggnnccccccncaanggnntnttttaaaacnnantccnttttttaacccnngggnggggngnganncccaaaaaaccccattttttttttttagggggggccnnttnacactttttttttggggcnttancnagggttncgagggccnanttngncccncagtnncgngggcaaaaacccctttttttnaaangggggccaattacctnttttttttnnnaaaaggncnnnccctnttannaggtaacccggatttcncgggccctttntntttaanaaaaaaaaaaaannntttccctnaaaaaaattttttntngancncntaggtntttangggaattccttattnnnaaaaataangttttttttttt

SEQ ID NO: 6347 - DNA, 253 bp, Homo sapiens
  misc_feature 83, 232: n = A,T,C or G
cccttagcgtggtcgcggccgaggtacgcgggtgacttaaagctgagagtggagcaggcactaggggaaaacctggcatgcanatccccacccccagagggatatgaagcttgtggtaggtgccctgatggtaaccagagcaacagtaaggctcaaacccagtccagcttctaatgaaattaactcgattcttgcactaatagcttagcaggagggaaaaaccttgtaggtntattagtaggaattacccatg

SEQ ID NO: 6348 - DNA, 480 bp, Homo sapiens
  misc_feature 68, 82, 94, 100, 122, 128, 130, 132, 133, 134, 146, 151,158, 179, 188, 195, 205, 216, 221, 239, 248, 249, 257, 275,278, 285, 309, 313, 342, 343, 344, 346, 347, 350, 354, 355,356, 357, 370, 378, 382, 388, 392, 393, 394, 399, 402: n = A,T,C or G
  misc_feature 406, 408, 409, 411, 412, 413, 415, 416, 418, 440, 452, 453,457, 460, 464, 467, 468, 469: n = A,T,C or G
cccttagcgtggtcgcggccgaggtactttttttttttgtttttcttgattttttttttttttttttntttttttttttttntttttttatttntttttnttattttttttttttttttttntttttnantnnntagatttttttnttttnttttttntatgaagtttttttttttaanaaaattttnttttttnacacaaaaanattttagattnttttntggatacacacattgctngggagttgnnttatatantaattgaattcatttatnttnagggggnaacaattgtaaagaaacaaaaaangtcnagatgaatgtatgctacaaataaaagttnnnannttnttgnnnnaaaaaaaaaaatntttataanaaanaaaaantatnnnaaatnttnaaananngnnntnnanatatttttttttttctttattnaaaaaaaaaaannaaanttncatnatnnntttttaataaa

SEQ ID NO: 6349 - DNA, 533 bp, Homo sapiens
  misc_feature 9, 121, 128, 144, 148, 150, 151, 153, 154, 177, 190, 193,201, 218, 229, 233, 235, 237, 254, 255, 260, 266, 269, 270,273, 280, 281, 290, 299, 305, 313, 339, 341, 351, 417, 423,427, 428, 431, 433, 437, 454, 457, 467, 474, 476, 477: n = A,T,C or G
  misc_feature 490, 491, 494, 530: n = A,T,C or G
cccttagcntggtcgcggccgaggtacctaatgctgcctttagatgaagtcacattcagtctgctttgaaatgaaatatctttaagtaatctgttctgccaggctagaaaaatgtcaccancattttnctgatgcatggagatntggnanntnntaaactactatttagagaggaanagaattggagcanaantgactggncaacagtttcaagagantcaaaatttgntttntntnaaatttaattaaaacanncactncattcngcnnaanaatatgnncaatttagngcagtaggnaaaatnaacagaangaattaatttcatggagcaaaggtangngcttttttanttactattcactgggaaaaaaacttatttgccctaaccaaataaaatttggtttcaacagaaagtncctgcnccgnngcngnccgnctgggccgggcaccttnaantttaatattnttatttntnnatttatacaaggnnacnattcctttgttttttttttttcttcaataaaaaacnaac

SEQ ID NO: 6350 - DNA, 355 bp, Homo sapiens
  misc_feature 329, 349: n = A,T,C or G
cccttagcgtggtcgcggccgaggtactgttcaatacatttttgttgagcaaattatagctcagaataaagaagtgatatattctaaattgtattgaaataaaagcacatgacaaaatagctaagtatttttatttattttttccccctgtgatagaacaagtaagaagtttgcgacagagcactattgccaagcgttcaaatgcagcaccattaagtaacacaaaaaaaagcatctgggaagactgtatctactgctaaagcaggagtgaaacaaccagaaaggagtcaggttaaagaagaagtatgtatgtcactgaaacctgagtncctgcccgggcggccgctcnaaaggg

SEQ ID NO: 6351 - DNA, 335 bp, Homo sapiens
cccttagcgtggtcgcggccgaggtacacattcaataagctcagcaaatcctaagtaggatgaactcaaagaaaccactcccagatacataactaacctgttgaaaaactaatataactaaagaatgaaaacagagaaaaatgtcacattatgtgtagggagaaaacaatttaaagaccacatatttttcatcacaaactatgaagactagcatacagtggaacaatatctttaaatctgcaaaagaaaagaattataaacttagaattttataccctgtgaaactgtccttcaggaatgaggcaaaaagaaaatatcctcagaggaaggaaaat

SEQ ID NO: 6352 - DNA, 221 bp, Homo sapiens
  misc_feature 26, 60, 164, 219: n = A,T,C or G
ccgtgtgatggatgtctgcagaattngcccttagcgtggtcgcgccgaggtacggcccantttgcttggctctacaaggcccaaaacggtttggacttttccacttaaggaagacatttctgatggtacccaccaccactgtatgatgctcatgagctctggcntgccatgaagggagtaggcacttgatgagaattgcctcattgaaatactagcttnaa

SEQ ID NO: 6353 - DNA, 232 bp, Homo sapiens
  misc_feature 5, 13, 42, 85, 105, 109, 146, 177, 184, 187, 223, 225, 232: n = A,T,C or G
ggggnccggaaanttttggggggggccccccttttctttaanggaaaaagggcccatttgggggcccctttttccccgggaaagnccgggggccccggccccaangttngggtttgggaattggggaattatttccttggccaagnaaaaattttcccgccccccttttttaaaaanccccggnttngggggttccccgcccggggcccggaagggaaccttntnttttttn

SEQ ID NO: 6354 - DNA, 303 bp, Homo sapiens
ccctttcgagcggccgcccgggcaggtacgcggggacagaagggacgacagctgcttgctggggagaggcggagccctgagctcctggcagaacctgaagggaagaatatttctcagccctccgttctcaagacagatgagtgctttagaaagaggactctgcagcggcgaggaggatggaatgacaggcaaagcacgcaggaccaggagatggcttcgctccctcaatcactcatccaaagacgtttaatgagcacctattgtgtgtcaggcattgtacctcggccgcgaccacgctaaggg

SEQ ID NO: 6355 - DNA, 423 bp, Homo sapiens
  misc_feature 403: n = A,T,C or G
cccttagcgtggtcgcggccgaggtacatatgctcagtgtttaaattacatttctatacaggtctattgatctatatttttggtcaatatatctcatgcctgtaatcccagcactttgggaggccgaggcgagcatatcacgaggtcaggagttcgagatcagcctggtcaacacggtgaaaccccgtctctactaaaaatacagaaattagctgggtagagtggcaggcacctgtaatcccagctactcaggaggctgaggcagggggatggtttgaacccgggaggcagaggttgcagtgagccaagatggcgccactgtacacgatagtggattggagtgcagggtcccagtaataagtgtaatgccagcttggggtcagtgaaggccagagacaagcanattgggcctgacccccacca

SEQ ID NO: 6356 - DNA, 691 bp, Homo sapiens
  misc_feature 25, 35, 37, 40, 42, 43, 249, 266, 399, 407, 414, 416, 417,424, 428, 459, 462, 475, 478, 490, 491, 503, 513, 514, 526,532, 534, 535, 542, 550, 557, 583, 584, 607, 612, 613, 619,628, 641, 645, 652, 653, 660, 673, 674, 676, 680, 681: n = A,T,C or G
cccttagcgtggtcgcggccgaggnacacacactntntcntnntattcatctccaagccacagaaggatgtatcagccctgtagctaaaaggatgtgtggcggaatcgtttggtaatggcagttttgaagatgaagtctgaaaaatgtaagatgattttgccatcttcttgaaatctttaaacagggtggaagacttagaattatgcagtgcagctccagtgcgtacgggaaggcgaagaaaagaatanagaagatagggaaattngaagataaaaacatacttttagaagaaaaaagataaatttaaacctgaaaagtaggaagcagaagaaaaaagacaagctaggaaacaaaaagctaagggcaaaatgtacctgcccgggcggcccgccgggcangtactttnttttttntnngtttttncctngccccatttaaatttttttaccttaaaaggntcnttttaaaaggaantanaaaatttgcccnntttttttgaatncaacttggtnnattaaagggaanccaaangnnttgtttnaaaggggngcccccntttaaattttaaaaaattttccatcnntagggaaattttggggggaaccnttttnnccctcntgtttttanaaaaaaaaacccntccncgggttnnttttttnggaaacagcaagnntntttnnggtttttttt

SEQ ID NO: 6357 - DNA, 325 bp, Homo sapiens
  misc_feature 307: n = A,T,C or G
cccttagcgtggtcgcggccgaggtacctttattgagcttaattataatactgtcaaattgccacgatctcactaaaggatttctatttgctgtcagttaaaaataaagccctaaatacatttttattctttctactgagggcattgtctgttttctttgtaaatgccgtacgcggggagacacactctgccccaaccatcctgaagctacaggtgctccctcctggaatctccaatggatttcagtcgcagaagcttccacagaagcctgagctcctccttgcaggcccctgtagtcagtactttntttttttttttttttttt

SEQ ID NO: 6358 - DNA, 497 bp, Homo sapiens
  misc_feature 434, 475, 493: n = A,T,C or G
cccttagcgtggtcgcggccgaggtacgacatagctttcagtattgtatcttctaatattttaatatctgataggctagtctccattttcttcggagattttttcttttttttctgcgtttgcttaattgttatttcttttttttttttttttttgagatggaattttgctcttgtcgcccaggctggagtgcaatggtgtgagctcagctcactgcaacctctgcctcccaggtttaagtgattctcctgcctcagtctctggagtgggttaggattacgggctcccgccacagctaatttttgtatttttagtagagatggggtttcaccatgttggccaggctggtctcaaactcctgaccttaggtgatctacccacctcagcctcccaaagtgctgggattacaggtgtgggtcaccacgcctggccgntttaattggtatttctacatgaactttaaaatcagcttgtntaatttaaaaaaaaaaanggaa

SEQ ID NO: 6359 - DNA, 578 bp, Homo sapiens
cccttagcgtggtcgcggccgaggtacaatcatgcactggggtaaagaagattcatctgctcttagctacctaccatgccaacactcctgagaaagctcacagaggcccatgatgcccacctggatctgaggacctagaaagccacaacaggcaaccataatctgggtcttccctcagccaactcccctgcataaagtgaatgaatgaaaaacccatcttatattaatcagagttctctagagaaaaagaaccaatcagatgtgtatatatagaaagagagaattattttagggaattagctcacatcattatgcaggctggtcaatcaaaaatctgtggagtgggctagcaggctggagacccagggaaaggctaaattgcagtttagatcagaaggtcatctactggcagaattccctcatcttccaggaaggtggatctttttctaccaaggccttcagtttattagattaggcccatgaacatgctggagggtaatctgctttactcaatacatactgatttgaatgttagtatcatcaaaaagaccttccagaaacatctaaaataatgtttg

SEQ ID NO: 6360 - DNA, 311 bp, Homo sapiens
cccttagcgtggtcgcggccgaggtacgcgggtcactaacactataataaaataatttttttaaagagtcataaacctttaaggatgataagagtggtagaagagactatagaaacaaaattttggaagctgaaaagcaggtagatgagtggtaatgacttaggaggtctgagaaagtcagattccaaattagcagtggtgaaagctgaggacctgttcagtttacttggcagaatcttcagaagttttagaaattgctatctttaggaacctctggaagttgaggtatgggtagggctaaagtacgcggg

SEQ ID NO: 6361 - DNA, 130 bp, Homo sapiens
  misc_feature 99: n = A,T,C or G
cccttagcgtggtcgcggcccgaggacgcgggggagtcagagcctctttctctaagtcacgggaactgcccttgctacttgtgacctgcctttactcancagttttttggtctgggaagccctgggattc

SEQ ID NO: 6362 - DNA, 419 bp, Homo sapiens
  misc_feature 317: n = A,T,C or G
cccttagcgtggtcgcggccgaggtacgcgggggtgtctcgatggagtagactctcagaacagtgcagtttgccctccgctcacgcagagcctctccgtggcttccgcaccttgagcattaggccagttctcctcttctctctaatccatccgtcacctctcctgtcatccgtttccatgccgtgaggtccattcacagaacacatccatggctctcatgctcagtttggttctgagtctcctcaagctgggatcagggcagtggcaggtgtttgggccagacaagcctgtccaggccttggtgggggaggacgcancattctcctgtttcctgtctcttaaggccaatgcagaggccatggaagtgcggttcttcaggggccagttctctagcgtggtccacctctacagggacggga

SEQ ID NO: 6363 - DNA, 614 bp, Homo sapiens
  misc_feature 523, 555, 563, 565, 566, 570, 571, 572, 573, 574, 575, 576,577, 578, 579, 580, 581, 582, 583, 584, 585, 586, 587: n = A,T,C or G
cccttagcgtggtcgcggccgaggtacgcggggtaatagatattctagcctttattttttttcctatttttcctggaggcattgcaatattgcatttaaaaaaaaacctttctgccatattgagcaaaagcagcatgattaaagtaacaaatggaaacaaaacatgaggatggcattttaggattacaaaatgctttcctgacaaattttcatttcatgtttaccacatttttttaaagattaggttattattcctgttttaaagatggggaaactaagtatcagaaaggtaaagtgggccgggcacagtagctcactctgataatcctagcactttgggaggctgtggcgggtggatcgcttgggaccagcctggccaacatggtgaaaccctgtctctactaaaaatacaaaaatgagggtgtggcacacaacagtaatttcagcctctcaggaggcttaggcacaagaatcttcttgaacttgggaggcaaaggttgcaagtgagctgaaatcgcgcctntgcactcgagcctgggcaacaaagcaagactntgtttcanannaaannnnnnnnnnnnnnnnnnggtacctgcccggccggccgcccgggc

SEQ ID NO: 6364 - DNA, 318 bp, Homo sapiens
  misc_feature 17, 137, 141, 236, 240, 274, 293, 304: n = A,T,C or G
cccttagcgtggtcgtngccgaggtacaggtgcatgccatgatgccctggaaatttttttgtatttttagacggggattcaccatattggtcaggctggtctcgagctcctgacctcaggtgatctgcccaccttancctnccaaagtgctgggattacgggtgtgagccaccgcgcccaacctctttattcttttaatggaaatactttagagatcattatttctgttatttctncaantctttttgtaatatttacttaataattttatcantattatggatcaacaaccnagtaaactgtncaagatcctgggtc

SEQ ID NO: 6365 - DNA, 286 bp, Homo sapiens
  misc_feature 16, 26, 46, 49, 65, 78, 79, 80, 81, 82, 83, 84, 85, 86, 87,88, 89, 90, 91, 92, 93, 94, 95, 96, 97, 98, 99, 100, 101,102, 103, 104, 105, 106, 107, 108, 109, 110, 111, 112, 113,114, 115, 116, 117, 118, 119, 120, 121, 122, 123, 124: n = A,T,C or G
  misc_feature 203, 209, 241, 247: n = A,T,C or G
tttttttttttttttnttattttttnttttttgtgtttacgtactncancttttagggcgaattngggccctctagtnnnnnnnnnnnnnnnnnnnnnnnnnnnnnnnnnnnnnnnnnnnnnnnccctttcgagcggccgcccgggcaggtacctagaagtggactacactcatgaggccgtcaccataaagtgcaccttctncgcaancggatgcccttctgagcaaccaacatgcctgnggtttngctacggtgctcaccagcctgagaacctgtgcttggacg

SEQ ID NO: 6366 - DNA, 303 bp, Homo sapiens
  misc_feature 297: n = A,T,C or G
cccttagcgtggtcgcggccgaggtacatattttatttatattacaggtgggagaaaagtccaattggtcatggaatttgatagacttttccccagccaactgctacagtgtattataatcccgactgcccccctgtgaaaagaaaaaaaaaatgtccaagagcaaatttaacattttacaaacaataaagtccaaactcctctatgcacatatttatagcttatcacttcattttctgtgccagtgaaggggtggccagaaaaaaaatcccaagtacctgcccgggcggccgctcnaaaggg

SEQ ID NO: 6367 - DNA, 245 bp, Homo sapiens
  misc_feature 144, 172, 182: n = A,T,C or G
cccttagcgtggtcgcggccgaggtacattaaaaggggaatggttaaataaatcatggaatgtgaaaatattaaaaagaacaaagtaactatatatgctgatgtggaaagctgctcacactgttttaggaatgaagaaggttgngaaatattttacactaaaattctatttntgaaaaaaanagtcaatatattttgtttgcaaatgcactgaaactatcaaggaaagataaaaaagggagcttt

SEQ ID NO: 6368 - DNA, 360 bp, Homo sapiens
  misc_feature 310, 332, 350: n = A,T,C or G
cccttagcgtggtcgcggccgaggtaccagctagcatgaggatcaattgattttatgttaaatccattttatcagttggagaaattcaagattaatgttggagaaacagtataaagctctagtttttcaggctgtagaatataaaatcatcagacaaaacctaaaaaggcaagatattagatgtaagaaatgtcttgaaatgaatgtgaagtgaattgaaaagagccgtgaataaagcaaaaaccactaggaattcaattttgttggctatttctgacattcacaagtagacgtaccttgcccgggcggncgctcgaaagggcgaattccancacactggcggcccgttnctagtggatc

SEQ ID NO: 6369 - DNA, 479 bp, Homo sapiens
  misc_feature 1, 285, 287, 288, 290, 291, 292, 293, 294, 296, 297, 301,309, 315, 348, 353, 412, 466: n = A,T,C or G
nccctttcgagcggccgcccgggcaggtactttgagaggctgaggcagccgtatcagttgaggccaggagtttgagaccagcctgccaacatggcaaaacccccatctctactaaaaaataaaaaaattagccgggtgttgtggcgggcgcctgtgatcccagctatttgggaggatgaggcatgagaattgattgaatctgggaggcagaggttgcagttagctgagattgtgccactgcagtccagcctgggcgacagagcgagactgtcacaaaaaaaaaanannannnnnannaaangtcccggntaaganatatatacaattttatcttaatgcaaaaattanaaatntgtaaccaaagtagcaattaaataaatctagccacttgtaaattgaaataaaccttttntcctaaccagcagttttgaatcaaaggaaaaataaaatgtgtgattctaagttnttcaaaaaaacca

SEQ ID NO: 6370 - DNA, 116 bp, Homo sapiens
  misc_feature 25, 27, 29, 106: n = A,T,C or G
ggatatctgcagaattcgcccttancntngtcgcggcccgaggtaccggatgctacttgtccaatgatggtaaaagggtagcttactggtttgtcctccgattcangttagaatga

SEQ ID NO: 6371 - DNA, 197 bp, Homo sapiens
ccctttcgagcggccgcccgggcaggtacttcttcctgggtaagcagttatgaccagagatggaaccggcaactctttggccagaaagctgtatccaaaagacagagaagatgagaaacagggagggcaaaggcgaaaaagcaattggacatgatagctagatttgtttcaggaaaacatcctgctttccaaggatt

SEQ ID NO: 6372 - DNA, 543 bp, Homo sapiens
  misc_feature 452, 530, 534: n = A,T,C or G
cccttagcgtggtcgcggccgaggtacatgatagtaagtgtaagccatgtaaaaagtaaataatgtctgggcacagtggctcacgcctgtaatcctagcactttgggaggctgaggaggaaggatcacttgagcccagaagttcgagactagcctgggcaacatggagaagccctgtctctacaaaatacagagagaaaaaatcagccagtcatggtggcctacacctgtagtcccagcattccgggaggctgaggtgggaggatcacttgagcccagggaggttggggctgcagtgagccatgatcacaccactgcactccagccaggtgacatagcgagatcctgtctaaaaaaataaaaaataaataatggaacacagcaagtcctaggaagtaggttaaaactaattctttaaaaaaaaaaaaaaaagttgagcctgaattaaatgtnatgtttccaagtgacaggtatccacatttgcattggttaccaaccccttgccagttaaccagtagccctttcctggcnctgngggcggttt

SEQ ID NO: 6373 - DNA, 149 bp, Homo sapiens
  misc_feature 92: n = A,T,C or G
ggtcgcggccgaggtaccatatagacaatgtcaaagcaattattttttcatttccttctatccacatgtaggggtgaggctatttcacaganatagtgtatcattttactaaaacattatttattttaactatatttaggacttaaatt

SEQ ID NO: 6374 - DNA, 312 bp, Homo sapiens
  misc_feature 27, 45, 273, 296, 297, 312: n = A,T,C or G
ccctttcgagcggccgcccgggcaggnacctgtaaaatgggagtnataataaaatctcccacataaggctgttgtagggtgaaaccaaataaaggatgcagcaagtaaacagtaagtatgagtcattattaccatgcaggtgtgtaagtgcttcccatatttccgagttattttccaaaaattccgctgtaaacttgtttattggaaattaaaatgcaggtttgcccacaagaaaccggtttataaaatgggagtgattggaccaaagcccantagaaaggtctttcattttccgnntgaaatggtaagtan

SEQ ID NO: 6375 - DNA, 316 bp, Homo sapiens
  misc_feature 8, 235, 238, 288: n = A,T,C or G
ccctttcnagcggccgcccgggcaggtactccaatctgggtgatagagcaagaccttgtcttgaaaacaagataaaacaagataaaacctttccctcatcaaccatttgcccaggaaagaagacaattacttggggttttgtttcctttgtttaccagttttcagaatgagttggtaccatcagccctggcccttaggccagcccagtccacgggctctgagtgtggaggctgcntancaccaggaagcggctctgctgaggtcaaggggccccagcacagtgtggcntccgttcagcttttggttggtccaagga

SEQ ID NO: 6376 - DNA, 601 bp, Homo sapiens
  misc_feature 393, 394, 395, 396, 397, 398, 399, 400, 401, 402, 403, 404,405, 406, 407, 408, 409, 410, 411, 412, 413, 414, 415, 416,417, 418, 419, 420, 421, 422, 423, 424, 425, 426, 427, 428,429, 430, 431, 432, 433, 434, 435, 436, 437, 438, 439: n = A,T,C or G
  misc_feature 440, 441, 442, 443, 444, 445, 446, 447, 448, 449, 450, 451,452, 453, 454, 455, 456, 457, 458, 459, 460, 461, 462, 463,464, 465, 466, 467, 468, 469, 470, 483, 501, 509, 510, 551,565, 584, 592: n = A,T,C or G
cccttagcgtggtcgcggccgaggtaccttcatatacccagaaatgcactggaaatcgggacattttgtttcttcgtctttaataagttgtgtttgaagtcctacattgagccaaaattcatacctggaaactgaattctagaaagattattttggaaagcctgtagttacgtgtattaccactagatgaccttccctcattattgtctctaaagtggagctgctagttatatggactttccagaggactgtaggaaatttatgaataatccctctaaagcaacaacgacaacaacaacaaaaaagtctactttatatggtgttgagtgtacctgcccgggcggccgctaagggcgaattccagcacactggccggccgttactagtggatcnnnnnnnnnnnnnnnnnnnnnnnnnnnnnnnnnnnnnnnnnnnnnnnnnnnnnnnnnnnnnnnnnnnnnnnnnnnnnnccaacaaccatancgaagcccggaaagccantaaaagtnntaaagccctggggggggcctaatgaggtgaacctaactcancatttaatttgcgnttggggcctttattgggtngggttttnagggggggg

SEQ ID NO: 6377 - DNA, 549 bp, Homo sapiens
  misc_feature 529, 531: n = A,T,C or G
cccttagcgtggtcgcggccgaggtactccaaagattcaggtttactcacgtcatccagcagagaatggaaagtcaaatttcctgaattgctatgtgtctgggtttcatccatccgacattgaagttgacttactgaagaatggagagagaattgaaaaagtggagcattcagacttgtctttcagcaaggactggtctttctatctcttgtacatggtcttattctcccatcgcacagtgcagctcccgtcagtagagctgtcccagaagcaggaacttgctgtgtgtaatccagctccattcttctgcataattacacgggtcacgatgtatttaaatggttttcccagcttggtgagttggcttaaagtttgttctactacatttgtggtccactggttcactttgctgtgttgataagcgttaccaccaattgcgctttctatagcctcttttacaatgttgctcactttcatcaacaacaaaagcagtcttcctccgcacctggtagtctttccatcttttctncngcgccgtcggccttccgg

SEQ ID NO: 6378 - DNA, 657 bp, Homo sapiens
  misc_feature 537, 547, 575, 577, 607, 621: n = A,T,C or G
cccttagcgtggtcgcggccgaggtactttttttttttttttttttggacaaacaaaaaagaagtttactaaatttaaacactgacatcctgtgaagatgccagtctttacaggcgtttgtaaaagtagactgtggggagtatgttacactaatacaaagttttacaaatgaatacaagtgaaatatataaattacaatgaaatagaggaagattgtggctctgtcctgggctggttcttttagcagtcatattgctgttggtgagagcagcaaaagccacatatgcctccaagcactccatttattacttgaataagacacaagatgaattcaattccaccaagagccaagaggatagaaaacagagatacattccattccacaatgtgcttgggttcagtgcactcggaccatgtggaggtatccagaaggtcagtgatagctccccctgggcaatacaatacaagaacagtgggttttgtcaaattggaacaaggaaacagaaccccagaaataaatacattggttaacatcanattagttcangttacttttttgtaaaaagttaaagtanangggacttctgtattatgctaactcaagtanaattggaatctccnggggtcctttttttttttaaattgggtttaattttt

SEQ ID NO: 6379 - DNA, 175 bp, Homo sapiens
cccttagcgtggtcgcggccgaggtacgcgggggactgtggaaggcccaggcaagagggcgcgtggcagcccaaggccatggcgggacacccaaaagagaaggtgattccagatgaggtccatcagaaccagatcttgcgggaactgtgcctgcccgggcggccgctcgaaaggg

SEQ ID NO: 6380 - DNA, 482 bp, Homo sapiens
ccctttcgagcggccgcccgggcaggtacagcggggctcaggtccgcgtgctctccgcaccaccccacttccattttggccaaaccaaccgcacccctgaatttctccgcaaatttcctgccggcaaggtcccagcatttgagggtgatgatggattctgtgtgtttgagagcaacgccattgcctactatgtgagcaatgaggagctgcggggaagtacccagcaccacctaggaagtatttttgccacaaaatcagacctccagatctaactaccattttataggaaagataagttcagagaaccatgtcaaatgacacctcgggatttcaaccagcaacgttcaaatgtgctaaactctgtagatggaaagagacttacagacatttcaaataaatgcaatatatgggccttgcttgaatcctaatacaaacaatccaactacaaaaacagccaaacatttgtgggacaattggggaga

SEQ ID NO: 6381 - DNA, 265 bp, Homo sapiens
  misc_feature 15, 19, 21, 22, 24, 31, 37, 38, 54, 56, 79, 80, 81, 82, 83,84, 85, 86, 87, 88, 89, 90, 91, 92, 93, 94, 95, 96, 97,98, 99, 100, 101, 102, 103, 104, 105, 106, 107, 108, 109,110, 111, 112, 113, 114, 115, 116, 117, 118, 119, 120, 121: n = A,T,C or G
  misc_feature 122, 123, 124, 125, 204: n = A,T,C or G
ttttttttttttttntttntnntnaataaanaaaatnngtataacgactcactntnagggcgaattgggccctctagtnnnnnnnnnnnnnnnnnnnnnnnnnnnnnnnnnnnnnnnnnnnnnnnccctttcgagcggccgcccgggcaggtacttttttttttttttttttttttttttttaaaataagtttattttcatcanacttggtctcattcttttcataactgcagcaagagtagtgactgaccacataaactttttt

SEQ ID NO: 6382 - DNA, 437 bp, Homo sapiens
  misc_feature 164, 185, 186, 187, 188, 189, 190, 191, 192, 193, 194, 195,196, 197, 198, 199, 200, 201, 202, 203, 204, 205, 206, 207,208, 209, 210, 211, 212, 213, 214, 215, 216, 257, 262, 292,404, 437: n = A,T,C or G
ccctttcgagcggccgcccgggcaggtactgattatctcccaaatgagaagtcattaactggaaatctccctagaatactttcatcactttggaaacaaagataggctctttcgtgctgtgttatctttatagcaacactcatccttaaccaactaggtacctnggccgcgaccacgctaagggnnnnnnnnnnnnnnnnnnnnnnnnnnnnnnnntggatcccgagctcggtaccaagcttgggcgtaaatcatgntcatnagcctgtttcctggtggtgaaaatttgttnatccccgttcaacaattttcccacacaaaacaattaccgaagccccgggaaagccctttaaaaaggtgttaaaaaagcccttgggggggttggccccttaaaattggaggtngaagccttaaaccttccaacaatttaaaatttn

SEQ ID NO: 6383 - DNA, 228 bp, Homo sapiens
  misc_feature 2, 5, 23, 24, 33, 47, 48, 49, 70, 79, 80, 115, 127, 129,133, 152, 162, 170, 175, 179, 184, 198, 201, 214, 220: n = A,T,C or G
angcncgagcggccgccagtgtnntggaggggngcaaaacccgcccnnncgagcggccgcccgggcaggnacgcgggcnntttggcaggggaccagggggggcccccagcaaaangggaagggggcngngaanggcagcaacgaccaagcgngggaaacagnggggggtntgagnaaanttttntttggaccaggagnagngcccggcaaaaangcccanggagaagc

SEQ ID NO: 6384 - DNA, 664 bp, Homo sapiens
  misc_feature 58, 59, 60, 61, 90, 91, 92, 93, 94, 96, 101, 103, 109, 110,114, 125, 126, 128, 129, 133, 135, 137, 138, 139, 140, 141,142, 146, 147, 148, 149, 154, 155, 164, 169, 188, 196, 204,211, 215, 216, 217, 222, 233, 235, 236, 251, 252, 253: n = A,T,C or G
  misc_feature 255, 269, 282, 289, 296, 317, 321, 324, 328, 329, 330, 331,356, 363, 365, 370, 377, 389, 408, 419, 445, 451, 452, 453,455, 459, 463, 468, 484, 492, 493, 501, 503, 513, 514, 515,526, 538, 552, 568, 578, 589, 599, 605, 607, 609, 616: n = A,T,C or G
  misc_feature 617, 618, 619, 623, 626, 634, 644: n = A,T,C or G
ccctttcgagcggccgcccgggcaggtactttatttttttttttttttttttttccgnnnnttttttttttttttttttttttttttttnnnnntnggggnantttttnntttntttttttaatnntnntttntnannnnnntttnnnnggggnnaaaaaaaanttttnaaaaaaattttaaaaaaancctttttnaaaaaaanttttttnaaannnaaatnttttttttttncnnccccaaaaaaaaaannnanttttttcccccccnattttttttcctnaaaaaanaaggggntttttttttaaaaaaaaaatntttnaanaaannnnaaaccccaaaaaaaaaaaaaaattncaaaaangntttgnggggggntttttttttttnaaaaacttttaaaaaaaanaaaattttttnaaaaaaaaattttttttttttttttnaaaaannntnaaancccnttttnaaaaaaaaaaaaaccnaaaaaaanntttttttnancccctacccnnnaaaaaaacccnttttggggcaantttttttttttttnctaaaaaaaaaaaaanggaaaatttnaaaaatttccngggttttttngccccncntnaaaattnnnnaaanttnttttaatnaaaacaaaanttttttttaaaaaaaaaaaa

SEQ ID NO: 6385 - DNA, 537 bp, Homo sapiens
  misc_feature 477, 501: n = A,T,C or G
ccctttcgagcggccgcccgggcaggtacatacacattggcattgtaaagatgctgagaagtcctggatagcagacctctgtagctttgtttaacacggtattttcaaatgtagaaatatacttgaaagatttctagaacactttttttgtttaagacagggtcttgctttgtcacccaggctgaagtgcagtggcacaaccacggctcactgcagcctcatcctcctgggctcaagtgatcctcttgcctcagcctcccaagtagctgggactacaggcatgtgccaccacatttgctaaattttttatgattgtttgtagagacaagatctggctatgctgcccaggctggcctcaaactcctgggatcaagcaagtcttcccactttggcctcccaaagtgctaggtttacaggcatgagccaccatgtgcagcctagaacactttcaaaggcatatttattaacatgcctcanaacaattttctgcagaacggtgtnccacaagacatgtacttttttttttttttttttttt

SEQ ID NO: 6386 - DNA, 263 bp, Homo sapiens
  misc_feature 59: n = A,T,C or G
cccttagcgtggtcgcggccgaggtacgcgggtgggagctcttgttgtggagagcatantaaattttcagagaacttgaagccaaaaggatttaaaaccgctgctctaaagaaaagaaaactggaggctgggcgcagtggctcacgcctgtaatcccagaggctgaggcaggcggatcacctggggtcgggagttcaggatcagcctgaccaacatggagaaaccctactggaagtacctgcccgggcggccgctcgaaaggg

SEQ ID NO: 6387 - DNA, 182 bp, Homo sapiens
cccttagcgtggtcgcggccgaggtaccaaaatggataagtggggcatttttgggggggaattacttagcttgttatctggtagtaggtgtgcaatagattataattatcatcattctctgaaaatgtcatttttgctttctggtgctccatttctagtacctgcccgggcggccgcaaggg

SEQ ID NO: 6388 - DNA, 348 bp, Homo sapiens
  misc_feature 57, 108, 115, 117, 122, 163, 169, 182, 229, 274, 285, 301: n = A,T,C or G
ccctttcgagcggccgcccgggcaggtactttttttttttttttttttttttttganacagggttgcactatgttgcccaggctggacttgaactcctgggtttaagnggttctntnacctnagcctcctgagtagctgggactacaggtgcactccatcaanaccagntggttgcctttancccaggtttgccctgtcactgaagcttttccaaccaatccctccttnttccattcacttcccccaccctttgaaaaattaaatggtccccanagccagttganaacagtccaaatgctntgccctagcaagtcctcacaggtgaggtccccacccgctgtgttgcc

SEQ ID NO: 6389 - DNA, 318 bp, Homo sapiens
  misc_feature 121, 123, 124, 125, 126, 129, 134, 157, 158, 159, 160, 161,172, 179, 180, 183, 194, 205, 210, 211, 213, 216, 219, 220,225, 226, 227, 235, 241, 243, 248, 250, 267, 268, 272, 277,282, 287, 293, 302: n = A,T,C or G
ccctttcgagcggccgcccgggcaggtacttttttttttttttttttttttttggttttttttttttttttttttttttttttttttttttttttttttttttttttttttttaaaaaaanannnnggncccantttttttttttttttttaaaaannnnnaaaattttttnaaaaaannttntttttaaaaantttaaaaaaanttaanncntanttnnttttnnntttttttntttggncntaaangnaaaattcccattttttnnaaanggccnaattnaatcngaaccnttttttttnggggggggggaaaaaa

SEQ ID NO: 6390 - DNA, 504 bp, Homo sapiens
  misc_feature 21, 375, 437: n = A,T,C or G
cccttagcgtggtcgcggccnaggtacttgaaatgtgggtatgggcagctgaggaacttaactcaatgttttaatttattaatttgaattacccatatgggctagcccagtgggtacccatattggacagaaccagatgtagactagtagagtgtcagtttcaagtcatttgaaccatacatttgaacccatagctgagaaccagaaaatcagtaaataaagcctctgaacagaataaatactggtgtataatatcaaagaatccatgtaaagatcgtattttactgataggagctcctgtctggtaagtccttagagtgtgttgctctttactataccaagattggtttccaaacttcagtggatgagaagtancagattggccttgtttattgcaagtaagtttttgaggattttccctcacgcttcaacacggngtaagtaattggatctttagtgagaagattggtgacctcaagggaaagcctaaaattgggattccat

SEQ ID NO: 6391 - DNA, 558 bp, Homo sapiens
  misc_feature 370, 513: n = A,T,C or G
cccttagcgtggtcgcggccgaggtacactggatgcagccatgcatggatggtttttctttatttttcagtgatttcctctgaagcagctgcactgatacatttgggagttggtggcttgactttgtccataaggggcgtggccacttcacatgatggcgggcctttaagagcacaaagaagtttaatatggacaacaacaggaaaaagcaagaagaaaacaagtagggaaaaacagctaacctggagagaaagaatttctttaacctttatgttcttcattaaaaatcttatcttggactgatttgagggatttttagaaacatggccttattttatataagcattaccttcccaggaatctttgttgnatattaatttttgataaccatttgattaactttaaaattaagtatatgtgtgtatatatacatatgtatgtttatatacacacatgtatctggatagttttatatatacatatattcacattgacatacagaagaacccactncttttgtaataagtgtcctgccccgggccggccgctcgaaagggg

SEQ ID NO: 6392 - DNA, 219 bp, Homo sapiens
ccctttcgagcggccgcccgggcaggtacaagtcttgggtgctccactggtccatgcaggtggcagcaatgatgcccgcaatcccaatcagtgaaaccacgaaccccaagccctgacaggcagtcacggccatggtggcgcacagtgtcgacacagagccgcacgacaagtggacagcgcaattctccccgcgtacctcggccgcgaccacgctaaggg

SEQ ID NO: 6393 - DNA, 205 bp, Homo sapiens
  misc_feature 1, 39, 50, 58, 66, 67, 71, 73, 83, 128, 150, 152, 185: n = A,T,C or G
ncccttagcgtggtcgcggccgaggtactcagggccagnacgctcctgcntatgcggnataagccnntcanancagaccatgntggaaggatcagggatctgagcaaagccaagttacttaagctaancccttgttctgggtcaagcagntngtttttaataagcatcattcctgatcattagancaaagggatgaatgctcctt

SEQ ID NO: 6394 - DNA, 413 bp, Homo sapiens
cccttagcgtggtcgcggccgaggtacaaggaaacatgagtcctcaatatgcttagagtgcacctgggaaaatcagacacaaatagaattatgatggaaaataattggtaaaagataataaagaccaaatgaagaaaacacgtagtaagaattaaaggatgttagtaggtggtagattgctcagagaaggtattatggaacccacgagtccagagtcagccctgaatgagtttcggtgagcagggcaagaggggagcagggatggtatagaaaaaaaggcagaaaagtgcaaggtgtgaagccatggcttgcacggttagtagagagcaaagagactagctgcagttgactcgtccactgatcaaatgatcagcttgtagggctgtacctgcccgggcggccgctcgaaaggg

SEQ ID NO: 6395 - DNA, 394 bp, Homo sapiens
cccttagcgtggtcgcggcccgaggtacgcgggccatgggtctttttatcaattttgtttgaatactcccagaggcaggtggcataacaccattgcaatccagaaggcaaataatctatgaatatatgcccagttgtctccaggaagtaagaaatttaccttgtctacacccatggttttatatgctgcccatatattaatagagggaagagggagagggtcctcagtaatcagtaattgtaaacattcatgcttgttggaatggtcttcccatggcccagggaggttgcagcctgtcaggagaccacatgccatggggaagggcacagcactcctggttccagaacagggtcccttaatcagagtgttgtccatagaaacactctgattaagc

SEQ ID NO: 6396 - DNA, 424 bp, Homo sapiens
cccttagcgtggtcgcggccgaggtacttcttcctgggtaagcagttatgaccagagatggaaccggcaactctttggccagaaagctgtatccaaaagacagagaagatgagaaacagggagggcaaaggcgaaaaagcaattggacatgatagctagatttgtttcaggaaaacatcctgctttccaaggatttagatgaatgtttttgttcactggtgactcaggtaacacgtcttcaagaagccatagggaggttgagggagggaagtcaagaagggaggttgaggactgcacttttgatttacttctgacttcacgagtcactttctgccaaagaaatctctccttttgcttctagcacccgactagatttccttcagcttgatgattgactcccagaattcgaaagaaactggagtcc

SEQ ID NO: 6397 - DNA, 271 bp, Homo sapiens
  misc_feature 117, 236, 239, 253: n = A,T,C or G
cccttagcgtggtcgcggccgaggtacatgtgactttatacattttacatttgtaataaaaaaatcatgaaaagtatgctttgaacctgttggtaaattctaaaaaggaactaattntgaaagatttataaatcaaatttgttaagtggccaaactattttttatttgaaaataacaaaattctaactcgagcaaagctggttggaaagaaggaataactgccttttctaagcttnatnatgctaggaagcanataggaatttaataattc

SEQ ID NO: 6398 - DNA, 253 bp, Homo sapiens
  misc_feature 115, 136, 187: n = A,T,C or G
cccttagcgtggtcgcggccgaggtacagccccagtctttgcaatttatcatcgatgcgtttaagggacaggtatttgccttatccacacatcttatggctgccgagtgattcanagaatcctggagcactgtctncctgaccagacactccctattttagaggagcttcaccagcacacagagcancttgtacagtggtccttttcagagttggacttctagactcacctgttctcactccctgttttaatt

SEQ ID NO: 6399 - DNA, 546 bp, Homo sapiens; identical to SEQ ID NO: 1
  misc_feature 502, 531, 535: n = A,T,C or G

SEQ ID NO: 6400 - DNA, 416 bp, Homo sapiens; identical to SEQ ID NO: 2
  misc_feature 194, 201, 261, 361: n = A,T,C or G

SEQ ID NO: 6401 - DNA, 526 bp, Homo sapiens; identical to SEQ ID NO: 3
  misc_feature 1: n = A,T,C or G

SEQ ID NO: 6402 - DNA, 347 bp, Homo sapiens; identical to SEQ ID NO: 4
  misc_feature 5, 25: n = A,T,C or G

SEQ ID NO: 6403 - DNA, 455 bp, Homo sapiens; identical to SEQ ID NO: 5
  misc_feature 3, 448: n = A,T,C or G

SEQ ID NO: 6404 - DNA, 490 bp, Homo sapiens; identical to SEQ ID NO: 6
  misc_feature 333, 419, 420, 464, 482: n = A,T,C or G

SEQ ID NO: 6405 - DNA, 504 bp, Homo sapiens; identical to SEQ ID NO: 7
  misc_feature 1, 401, 487: n = A,T,C or G

SEQ ID NO: 6406 - DNA, 458 bp, Homo sapiens; identical to SEQ ID NO: 8

SEQ ID NO: 6407 - DNA, 801 bp, Homo sapiens; identical to SEQ ID NO: 9
  misc_feature 30, 47, 52, 60, 62, 79, 102, 104, 108, 110, 118, 144, 149,151, 155, 158, 256, 268, 280, 294, 302, 306, 316, 320, 321,334, 335, 341, 356, 366, 374, 387, 408, 410, 417, 420, 435,436, 440, 451, 452, 485, 497, 503, 505, 507, 560, 574: n = A,T,C or G
  misc_feature 583, 599, 600, 601, 627, 639, 644, 654, 663, 668, 669, 678,685, 697, 698, 704, 715, 718, 732, 770, 771, 772, 774: n = A,T,C or G

SEQ ID NO: 6408 - DNA, 415 bp, Homo sapiens; identical to SEQ ID NO: 10
  misc_feature 1, 122, 312, 369: n = A,T,C or G

SEQ ID NO: 6409 - DNA, 570 bp, Homo sapiens; identical to SEQ ID NO: 11
  misc_feature 5, 368, 383, 423, 445, 485, 500, 538, 542, 549, 558: n = A,T,C or G

SEQ ID NO: 6410 - DNA, 447 bp, Homo sapiens; identical to SEQ ID NO: 12

SEQ ID NO: 6411 - DNA, 485 bp, Homo sapiens; identical to SEQ ID NO: 13
  misc_feature 144, 290, 374, 377, 379, 394, 434: n = A,T,C or G

SEQ ID NO: 6412 - DNA, 527 bp, Homo sapiens; identical to SEQ ID NO: 14
  misc_feature 4: n = A,T,C or G

SEQ ID NO: 6413 - DNA, 504 bp, Homo sapiens; identical to SEQ ID NO: 15
  misc_feature 116, 129, 217, 257, 275, 372, 404, 439, 447: n = A,T,C or G

SEQ ID NO: 6414 - DNA, 513 bp, Homo sapiens; identical to SEQ ID NO: 16
  misc_feature 1, 31, 41, 47, 51, 332, 407, 475: n = A,T,C or G

SEQ ID NO: 6415 - DNA, 319 bp, Homo sapiens; identical to SEQ ID NO: 17
  misc_feature 149, 216, 271, 276, 307: n = A,T,C or G

SEQ ID NO: 6416 - DNA, 505 bp, Homo sapiens; identical to SEQ ID NO: 18
  misc_feature 12: n = A,T,C or G

SEQ ID NO: 6417 - DNA, 420 bp, Homo sapiens; identical to SEQ ID NO: 19
  misc_feature 1, 6, 8, 9, 11, 21, 24, 28, 41, 54, 88, 99, 122, 164, 168,171, 179, 185, 217, 222, 223, 251, 255, 264, 274, 290, 301,314, 336, 340, 355, 359, 364, 388, 399: n = A,T,C or G

SEQ ID NO: 6418 - DNA, 514 bp, Homo sapiens; identical to SEQ ID NO: 20
  misc_feature 15: n = A,T,C or G

SEQ ID NO: 6419 - DNA, 458 bp, Homo sapiens; identical to SEQ ID NO: 21

SEQ ID NO: 6420 - DNA, 502 bp, Homo sapiens; identical to SEQ ID NO: 22

SEQ ID NO: 6421 - DNA, 502 bp, Homo sapiens; identical to SEQ ID NO: 23
  misc_feature 20: n = A,T,C or G

SEQ ID NO: 6422 - DNA, 489 bp, Homo sapiens; identical to SEQ ID NO: 24
  misc_feature 12: n = A,T,C or G

SEQ ID NO: 6423 - DNA, 435 bp, Homo sapiens; identical to SEQ ID NO: 25
  misc_feature 11: n = A,T,C or G

SEQ ID NO: 6424 - DNA, 392 bp, Homo sapiens; identical to SEQ ID NO: 26

SEQ ID NO: 6425 - DNA, 341 bp, Homo sapiens; identical to SEQ ID NO: 27
  misc_feature 1, 4, 292: n = A,T,C or G

SEQ ID NO: 6426 - DNA, 264 bp, Homo sapiens; identical to SEQ ID NO: 28
  misc_feature 10, 122, 128, 242: n = A,T,C or G

SEQ ID NO: 6427 - DNA, 395 bp, Homo sapiens; identical to SEQ ID NO: 29
  misc_feature 18, 369: n = A,T,C or G

SEQ ID NO: 6428 - DNA, 479 bp, Homo sapiens; identical to SEQ ID NO: 30
  misc_feature 7, 13, 14, 18: n = A,T,C or G

SEQ ID NO: 6429 - DNA, 508 bp, Homo sapiens; identical to SEQ ID NO: 31

SEQ ID NO: 6430 - DNA, 491 bp, Homo sapiens; identical to SEQ ID NO: 32
  misc_feature 1, 20, 324, 407, 450, 454: n = A,T,C or G

SEQ ID NO: 6431 - DNA, 510 bp, Homo sapiens; identical to SEQ ID NO: 33
  misc_feature 442: n = A,T,C or G

SEQ ID NO: 6432 - DNA, 480 bp, Homo sapiens; identical to SEQ ID NO: 34
  misc_feature 29, 397: n = A,T,C or G

SEQ ID NO: 6433 - DNA, 535 bp, Homo sapiens; identical to SEQ ID NO: 35
  misc_feature 489: n = A,T,C or G

SEQ ID NO: 6434 - DNA, 443 bp, Homo sapiens; identical to SEQ ID NO: 36
  misc_feature 2: n = A,T,C or G

SEQ ID NO: 6435 - DNA, 652 bp, Homo sapiens; identical to SEQ ID NO: 37
  misc_feature 77, 96, 102, 170, 179, 197, 232, 244, 245, 256, 261, 265,266, 283, 303, 305, 309, 323, 327, 330, 336, 343, 356, 359,364, 373, 378, 383, 393, 400, 402, 416, 423, 425, 427, 432,434, 440, 443, 452, 458, 467, 471, 474, 477, 479, 486: n = A,T,C or G
  misc_feature 505, 506, 508, 510, 518, 534, 541, 564, 567, 569, 571, 583,586, 596, 601, 602, 606, 613, 620, 626, 637, 645: n = A,T,C or G

SEQ ID NO: 6436 - DNA, 408 bp, Homo sapiens; identical to SEQ ID NO: 38
  misc_feature 2: n = A,T,C or G

SEQ ID NO: 6437 - DNA, 517 bp, Homo sapiens; identical to SEQ ID NO: 39
  misc_feature 1, 489: n = A,T,C or G

SEQ ID NO: 6438 - DNA, 356 bp, Homo sapiens; identical to SEQ ID NO: 40
  misc_feature 6, 7, 176, 194, 309: n = A,T,C or G

SEQ ID NO: 6439 - DNA, 438 bp, Homo sapiens; identical to SEQ ID NO: 41
  misc_feature 2, 381, 394: n = A,T,C or G

SEQ ID NO: 6440 - DNA, 521 bp, Homo sapiens; identical to SEQ ID NO: 42
  misc_feature 11, 28, 456, 498: n = A,T,C or G

SEQ ID NO: 6441 - DNA, 496 bp, Homo sapiens; identical to SEQ ID NO: 43
  misc_feature 461, 467: n = A,T,C or G

SEQ ID NO: 6442 - DNA, 498 bp, Homo sapiens; identical to SEQ ID NO: 44
  misc_feature 150, 167, 180, 252: n = A,T,C or G

SEQ ID NO: 6443 - DNA, 452 bp, Homo sapiens; identical to SEQ ID NO: 45

SEQ ID NO: 6444 - DNA, 498 bp, Homo sapiens; identical to SEQ ID NO: 46
  misc_feature 39: n = A,T,C or G

SEQ ID NO: 6445 - DNA, 490 bp, Homo sapiens; identical to SEQ ID NO: 47
  misc_feature 60, 71, 155, 246, 306, 315, 365, 395, 435, 453, 466, 468,474: n = A,T,C or G

SEQ ID NO: 6446 - DNA, 402 bp, Homo sapiens; identical to SEQ ID NO: 48

SEQ ID NO: 6447 - DNA, 428 bp, Homo sapiens; identical to SEQ ID NO: 50
  misc_feature 1, 35, 231, 246, 258: n = A,T,C or G

SEQ ID NO: 6448 - DNA, 245 bp, Homo sapiens; identical to SEQ ID NO: 51

SEQ ID NO: 6449 - DNA, 491 bp, Homo sapiens; identical to SEQ ID NO: 52
  misc_feature 8: n = A,T,C or G

SEQ ID NO: 6450 - DNA, 533 bp, Homo sapiens; identical to SEQ ID NO: 53
  misc_feature 7, 483: n = A,T,C or G

SEQ ID NO: 6451 - DNA, 509 bp, Homo sapiens; identical to SEQ ID NO: 54
  misc_feature 2, 15, 73, 457: n = A,T,C or G

SEQ ID NO: 6452 - DNA, 525 bp, Homo sapiens; identical to SEQ ID NO: 55
  misc_feature 8, 504: n = A,T,C or G

SEQ ID NO: 6453 - DNA, 503 bp, Homo sapiens; identical to SEQ ID NO: 56
  misc_feature 4: n = A,T,C or G

SEQ ID NO: 6454 - DNA, 487 bp, Homo sapiens; identical to SEQ ID NO: 57

SEQ ID NO: 6455 - DNA, 499 bp, Homo sapiens; identical to SEQ ID NO: 58
  misc_feature 3: n = A,T,C or G

SEQ ID NO: 6456 - DNA, 401 bp, Homo sapiens; identical to SEQ ID NO: 59
  misc_feature 304, 368: n = A,T,C or G

SEQ ID NO: 6457 - DNA, 491 bp, Homo sapiens; identical to SEQ ID NO: 60

SEQ ID NO: 6458 - DNA, 549 bp, Homo sapiens; identical to SEQ ID NO: 61
  misc_feature 531: n = A,T,C or G

SEQ ID NO: 6459 - DNA, 434 bp, Homo sapiens; identical to SEQ ID NO: 62
  misc_feature 1, 17, 392: n = A,T,C or G

SEQ ID NO: 6460 - DNA, 320 bp, Homo sapiens; identical to SEQ ID NO: 63
  misc_feature 88, 116, 267, 284: n = A,T,C or G

SEQ ID NO: 6461 - DNA, 547 bp, Homo sapiens; identical to SEQ ID NO: 64
  misc_feature 1, 444: n = A,T,C or G

SEQ ID NO: 6462 - DNA, 543 bp, Homo sapiens; identical to SEQ ID NO: 65
  misc_feature 541: n = A,T,C or G

SEQ ID NO: 6463 - DNA, 719 bp, Homo sapiens; identical to SEQ ID NO: 66
  misc_feature 159, 622, 643, 692, 699, 701, 714: n = A,T,C or G

SEQ ID NO: 6464 - DNA, 473 bp, Homo sapiens; identical to SEQ ID NO: 67

SEQ ID NO: 6465 - DNA, 492 bp, Homo sapiens; identical to SEQ ID NO: 68
  misc_feature 481: n = A,T,C or G

SEQ ID NO: 6466 - DNA, 535 bp, Homo sapiens; identical to SEQ ID NO: 69
  misc_feature 6, 34, 61, 73, 100, 119, 167, 198, 226, 245, 280, 287, 290,299, 310, 327, 330, 349, 358, 359, 360, 365, 392, 413, 415,420, 429, 445, 461, 469, 471, 488, 490, 491: n = A,T,C or G

SEQ ID NO: 6467 - DNA, 498 bp, Homo sapiens; identical to SEQ ID NO: 70

SEQ ID NO: 6468 - DNA, 134 bp, Homo sapiens; identical to SEQ ID NO: 71
  misc_feature 94: n = A,T,C or G

SEQ ID NO: 6469 - DNA, 427 bp, Homo sapiens; identical to SEQ ID NO: 72

SEQ ID NO: 6470 - DNA, 511 bp, Homo sapiens; identical to SEQ ID NO: 73
  misc_feature 8, 315, 476: n = A,T,C or G

SEQ ID NO: 6471 - DNA, 379 bp, Homo sapiens; identical to SEQ ID NO: 75
  misc_feature 42, 46, 94, 323, 329, 364: n = A,T,C or G

SEQ ID NO: 6472 - DNA, 490 bp, Homo sapiens; identical to SEQ ID NO: 76
  misc_feature 2: n = A,T,C or G

SEQ ID NO: 6473 - DNA, 453 bp, Homo sapiens; identical to SEQ ID NO: 77
  misc_feature 402: n = A,T,C or G

SEQ ID NO: 6474 - DNA, 381 bp, Homo sapiens; identical to SEQ ID NO: 78

SEQ ID NO: 6475 - DNA, 479 bp, Homo sapiens; identical to SEQ ID NO: 79

SEQ ID NO: 6476 - DNA, 504 bp, Homo sapiens; identical to SEQ ID NO: 80
  misc_feature 2, 174, 437, 446: n = A,T,C or G

SEQ ID NO: 6477 - DNA, 409 bp, Homo sapiens; identical to SEQ ID NO: 82

SEQ ID NO: 6478 - DNA, 435 bp, Homo sapiens; identical to SEQ ID NO: 83

SEQ ID NO: 6479 - DNA, 425 bp, Homo sapiens; identical to SEQ ID NO: 84

SEQ ID NO: 6480 - DNA, 514 bp, Homo sapiens; identical to SEQ ID NO: 85
  misc_feature 302, 318, 331, 348, 354, 356, 362, 373, 374, 385, 400, 404,414, 422, 434, 438, 439, 443, 444, 448, 454, 473, 474, 477,481, 494, 503, 504: n = A,T,C or G

SEQ ID NO: 6481 - DNA, 423 bp, Homo sapiens; identical to SEQ ID NO: 86
  misc_feature 92, 126, 144, 152, 162, 192, 299, 329, 378, 387, 403: n = A,T,C or G

SEQ ID NO: 6482 - DNA, 419 bp, Homo sapiens; identical to SEQ ID NO: 87
  misc_feature 219, 281, 287, 327, 334, 361, 372, 401: n = A,T,C or G

SEQ ID NO: 6483 - DNA, 508 bp, Homo sapiens; identical to SEQ ID NO: 88

SEQ ID NO: 6484 - DNA, 496 bp, Homo sapiens; identical to SEQ ID NO: 89
  misc_feature 1: n = A,T,C or G

SEQ ID NO: 6485 - DNA, 538 bp, Homo sapiens; identical to SEQ ID NO: 90
  misc_feature 98, 99, 109: n = A,T,C or G

SEQ ID NO: 6486 - DNA, 402 bp, Homo sapiens; identical to SEQ ID NO: 91
  misc_feature 42, 88: n = A,T,C or G

SEQ ID NO: 6487 - DNA, 480 bp, Homo sapiens; identical to SEQ ID NO: 92

SEQ ID NO: 6488 - DNA, 285 bp, Homo sapiens; identical to SEQ ID NO: 93
  misc_feature 1, 24, 268, 282: n = A,T,C or G

SEQ ID NO: 6489 - DNA, 342 bp, Homo sapiens; identical to SEQ ID NO: 94
  misc_feature 34: n = A,T,C or G

SEQ ID NO: 6490 - DNA, 561 bp, Homo sapiens; identical to SEQ ID NO: 95

SEQ ID NO: 6491 - DNA, 540 bp, Homo sapiens; identical to SEQ ID NO: 96
  misc_feature 14, 526: n = A,T,C or G

SEQ ID NO: 6492 - DNA, 411 bp, Homo sapiens; identical to SEQ ID NO: 97
  misc_feature 4, 383: n = A,T,C or G

SEQ ID NO: 6493 - DNA, 485 bp, Homo sapiens; identical to SEQ ID NO: 98
  misc_feature 5, 413, 478: n = A,T,C or G

SEQ ID NO: 6494 - DNA, 253 bp, Homo sapiens; identical to SEQ ID NO: 99
  misc_feature 2, 27, 73, 75, 82, 86, 90, 97, 111, 114, 115, 122, 126, 160,197: n = A,T,C or G

SEQ ID NO: 6495 - DNA, 494 bp, Homo sapiens; identical to SEQ ID NO: 100

SEQ ID NO: 6496 - DNA, 434 bp, Homo sapiens; identical to SEQ ID NO: 101
  misc_feature 325, 381: n = A,T,C or G

SEQ ID NO: 6497 - DNA, 456 bp, Homo sapiens; identical to SEQ ID NO: 103
  misc_feature 1, 188, 376: n = A,T,C or G

SEQ ID NO: 6498 - DNA, 483 bp, Homo sapiens; identical to SEQ ID NO: 104
  misc_feature 2, 44: n = A,T,C or G

SEQ ID NO: 6499 - DNA, 525 bp, Homo sapiens; identical to SEQ ID NO: 105
  misc_feature 154, 507, 512: n = A,T,C or G

SEQ ID NO: 6500 - DNA, 441 bp, Homo sapiens; identical to SEQ ID NO: 106

SEQ ID NO: 6501 - DNA, 478 bp, Homo sapiens; identical to SEQ ID NO: 107
  misc_feature 11, 45, 103, 140, 175, 406, 438, 451: n = A,T,C or G

SEQ ID NO: 6502 - DNA, 417 bp, Homo sapiens; identical to SEQ ID NO: 108
  misc_feature 387, 391: n = A,T,C or G

SEQ ID NO: 6503 - DNA, 307 bp, Homo sapiens; identical to SEQ ID NO: 109

SEQ ID NO: 6504 - DNA, 286 bp, Homo sapiens; identical to SEQ ID NO: 110
  misc_feature 25, 60, 77, 103, 148, 182, 191, 197: n = A,T,C or G

SEQ ID NO: 6505 - DNA, 346 bp, Homo sapiens; identical to SEQ ID NO: 111
  misc_feature 75: n = A,T,C or G

SEQ ID NO: 6506 - DNA, 343 bp, Homo sapiens; identical to SEQ ID NO: 112
  misc_feature 88, 108, 138: n = A,T,C or G

SEQ ID NO: 6507 - DNA, 437 bp, Homo sapiens; identical to SEQ ID NO: 113
  misc_feature 23, 58, 136, 208, 240, 264, 288, 296, 368: n = A,T,C or G

SEQ ID NO: 6508 - DNA, 457 bp, Homo sapiens; identical to SEQ ID NO: 114

SEQ ID NO: 6509 - DNA, 419 bp, Homo sapiens; identical to SEQ ID NO: 115
  misc_feature 50, 395: n = A,T,C or G

SEQ ID NO: 6510 - DNA, 444 bp, Homo sapiens; identical to SEQ ID NO: 116

SEQ ID NO: 6511 - DNA, 387 bp, Homo sapiens; identical to SEQ ID NO: 117
  misc_feature 27, 32: n = A,T,C or G

SEQ ID NO: 6512 - DNA, 466 bp, Homo sapiens; identical to SEQ ID NO: 118
  misc_feature 1, 293, 299, 308, 337, 364, 380, 448: n = A,T,C or G

SEQ ID NO: 6513 - DNA, 556 bp, Homo sapiens; identical to SEQ ID NO: 119
  misc_feature 390, 419, 430, 437, 446, 469, 497, 504, 540: n = A,T,C or G

SEQ ID NO: 6514 - DNA, 443 bp, Homo sapiens; identical to SEQ ID NO: 120
  misc_feature 1, 8, 388, 411, 416, 431: n = A,T,C or G

SEQ ID NO: 6515 - DNA, 537 bp, Homo sapiens; identical to SEQ ID NO: 121
  misc_feature 3, 369: n = A,T,C or G

SEQ ID NO: 6516 - DNA, 373 bp, Homo sapiens; identical to SEQ ID NO: 122

SEQ ID NO: 6517 - DNA, 388 bp, Homo sapiens; identical to SEQ ID NO: 123
  misc_feature 11, 155, 262, 288, 333, 359, 381: n = A,T,C or G

SEQ ID NO: 6518 - DNA, 471 bp, Homo sapiens; identical to SEQ ID NO: 124
  misc_feature 3, 147, 270, 309, 374, 454, 458: n = A,T,C or G

SEQ ID NO: 6519 - DNA, 484 bp, Homo sapiens; identical to SEQ ID NO: 125

SEQ ID NO: 6520 - DNA, 482 bp, Homo sapiens; identical to SEQ ID NO: 126
  misc_feature 2, 440: n = A,T,C or G

SEQ ID NO: 6521 - DNA, 447 bp, Homo sapiens; identical to SEQ ID NO: 128
  misc_feature 10: n = A,T,C or G

SEQ ID NO: 6522 - DNA, 337 bp, Homo sapiens; identical to SEQ ID NO: 129

SEQ ID NO: 6523 - DNA, 542 bp, Homo sapiens; identical to SEQ ID NO: 130
  misc_feature 338, 380, 464: n = A,T,C or G

SEQ ID NO: 6524 - DNA, 308 bp, Homo sapiens; identical to SEQ ID NO: 131

SEQ ID NO: 6525 - DNA, 538 bp, Homo sapiens; identical to SEQ ID NO: 132
  misc_feature 6, 381, 482, 508, 531: n = A,T,C or G

SEQ ID NO: 6526 - DNA, 532 bp, Homo sapiens; identical to SEQ ID NO: 133
  misc_feature 5: n = A,T,C or G

SEQ ID NO: 6527 - DNA, 422 bp, Homo sapiens; identical to SEQ ID NO: 134

SEQ ID NO: 6528 - DNA, 603 bp, Homo sapiens; identical to SEQ ID NO: 135
  misc_feature 570: n = A,T,C or G

SEQ ID NO: 6529 - DNA, 426 bp, Homo sapiens; identical to SEQ ID NO: 136

SEQ ID NO: 6530 - DNA, 413 bp, Homo sapiens; identical to SEQ ID NO: 137

SEQ ID NO: 6531 - DNA, 454 bp, Homo sapiens; identical to SEQ ID NO: 138
  misc_feature 6, 449: n = A,T,C or G

SEQ ID NO: 6532 - DNA, 153 bp, Homo sapiens; identical to SEQ ID NO: 139

SEQ ID NO: 6533 - DNA, 430 bp, Homo sapiens; identical to SEQ ID NO: 140

SEQ ID NO: 6534 - DNA, 562 bp, Homo sapiens; identical to SEQ ID NO: 141

SEQ ID NO: 6535 - DNA, 511 bp, Homo sapiens; identical to SEQ ID NO: 142

SEQ ID NO: 6536 - DNA, 489 bp, Homo sapiens; identical to SEQ ID NO: 143
  misc_feature 468: n = A,T,C or G

SEQ ID NO: 6537 - DNA, 492 bp, Homo sapiens; identical to SEQ ID NO: 144

SEQ ID NO: 6538 - DNA, 313 bp, Homo sapiens; identical to SEQ ID NO: 145
  misc_feature 8: n = A,T,C or G

SEQ ID NO: 6539 - DNA, 470 bp, Homo sapiens; identical to SEQ ID NO: 146

SEQ ID NO: 6540 - DNA, 229 bp, Homo sapiens; identical to SEQ ID NO: 147
  misc_feature 1, 16, 129, 132, 135, 144, 147, 148, 178, 195, 215: n = A,T,C or G

SEQ ID NO: 6541 - DNA, 550 bp, Homo sapiens; identical to SEQ ID NO: 148
  misc_feature 15, 17, 18, 19, 42, 72, 106, 140, 169, 188, 205, 232, 255,307, 315, 317, 333, 334, 335, 337, 359, 378, 379, 405, 410,419, 423, 434, 448, 473, 474, 486: n = A,T,C or G

SEQ ID NO: 6542 - DNA, 405 bp, Homo sapiens; identical to SEQ ID NO: 150
  misc_feature 21, 214: n = A,T,C or G

SEQ ID NO: 6543 - DNA, 473 bp, Homo sapiens; identical to SEQ ID NO: 152
  misc_feature 302, 444, 456, 460: n = A,T,C or G

SEQ ID NO: 6544 - DNA, 640 bp, Homo sapiens; identical to SEQ ID NO: 153
  misc_feature 36, 37, 38, 39, 52, 65, 73, 115, 130, 142, 143, 145, 220,274, 278, 332, 380, 388, 399, 467, 510, 545, 581, 632: n = A,T,C or G

SEQ ID NO: 6545 - DNA, 491 bp, Homo sapiens; identical to SEQ ID NO: 154
  misc_feature 1, 469, 479: n = A,T,C or G

SEQ ID NO: 6546 - DNA, 246 bp, Homo sapiens; identical to SEQ ID NO: 155
  misc_feature 3: n = A,T,C or G

SEQ ID NO: 6547 - DNA, 501 bp, Homo sapiens; identical to SEQ ID NO: 156

SEQ ID NO: 6548 - DNA, 439 bp, Homo sapiens; identical to SEQ ID NO: 157
  misc_feature 15, 409, 421: n = A,T,C or G

SEQ ID NO: 6549 - DNA, 489 bp, Homo sapiens; identical to SEQ ID NO: 158
  misc_feature 380: n = A,T,C or G

SEQ ID NO: 6550 - DNA, 522 bp, Homo sapiens; identical to SEQ ID NO: 159
  misc_feature 389, 407, 425, 502: n = A,T,C or G

SEQ ID NO: 6551 - DNA, 285 bp, Homo sapiens; identical to SEQ ID NO: 160
  misc_feature 244: n = A,T,C or G

SEQ ID NO: 6552 - DNA, 508 bp, Homo sapiens; identical to SEQ ID NO: 161
  misc_feature 432, 459, 472: n = A,T,C or G

SEQ ID NO: 6553 - DNA, 501 bp, Homo sapiens; identical to SEQ ID NO: 162

SEQ ID NO: 6554 - DNA, 431 bp, Homo sapiens; identical to SEQ ID NO: 163
  misc_feature 151, 409: n = A,T,C or G

SEQ ID NO: 6555 - DNA, 459 bp, Homo sapiens; identical to SEQ ID NO: 164
  misc_feature 420: n = A,T,C or G

SEQ ID NO: 6556 - DNA, 369 bp, Homo sapiens; identical to SEQ ID NO: 165

SEQ ID NO: 6557 - DNA, 355 bp, Homo sapiens; identical to SEQ ID NO: 166
  misc_feature 9: n = A,T,C or G

SEQ ID NO: 6558 - DNA, 484 bp, Homo sapiens; identical to SEQ ID NO: 167
  misc_feature 440, 463: n = A,T,C or G

SEQ ID NO: 6559 - DNA, 358 bp, Homo sapiens; identical to SEQ ID NO: 168
  misc_feature 8: n = A,T,C or G

SEQ ID NO: 6560 - DNA, 371 bp, Homo sapiens; identical to SEQ ID NO: 169
  misc_feature 244, 360, 367: n = A,T,C or G

SEQ ID NO: 6561 - DNA, 370 bp, Homo sapiens; identical to SEQ ID NO: 170
  misc_feature 8, 79: n = A,T,C or G

SEQ ID NO: 6562 - DNA, 375 bp, Homo sapiens; identical to SEQ ID NO: 171

SEQ ID NO: 6563 - DNA, 484 bp, Homo sapiens; identical to SEQ ID NO: 172
  misc_feature 174, 422: n = A,T,C or G

SEQ ID NO: 6564 - DNA, 171 bp, Homo sapiens; identical to SEQ ID NO: 173
  misc_feature 4, 77, 88, 96, 104, 105, 127, 170: n = A,T,C or G

SEQ ID NO: 6565 - DNA, 390 bp, Homo sapiens; identical to SEQ ID NO: 174
  misc_feature 36, 107, 119, 166, 295: n = A,T,C or G

SEQ ID NO: 6566 - DNA, 262 bp, Homo sapiens; identical to SEQ ID NO: 175
  misc_feature 55, 92, 105: n = A,T,C or G

SEQ ID NO: 6567 - DNA, 429 bp, Homo sapiens; identical to SEQ ID NO: 176
  misc_feature 54, 142, 192, 347, 362, 415: n = A,T,C or G

SEQ ID NO: 6568 - DNA, 411 bp, Homo sapiens; identical to SEQ ID NO: 177
  misc_feature 7: n = A,T,C or G

SEQ ID NO: 6569 - DNA, 722 bp, Homo sapiens; identical to SEQ ID NO: 178
  misc_feature 46, 225, 229, 245, 319, 356, 382, 514, 643, 664, 674, 718: n = A,T,C or G

SEQ ID NO: 6570 - DNA, 256 bp, Homo sapiens; identical to SEQ ID NO: 179
  misc_feature 237, 242, 245, 250: n = A,T,C or G

SEQ ID NO: 6571 - DNA, 471 bp, Homo sapiens; identical to SEQ ID NO: 180
  misc_feature 3, 77, 326, 431, 435, 440, 448: n = A,T,C or G

SEQ ID NO: 6572 - DNA, 558 bp, Homo sapiens; identical to SEQ ID NO: 181
  misc_feature 486: n = A,T,C or G

SEQ ID NO: 6573 - DNA, 404 bp, Homo sapiens; identical to SEQ ID NO: 182
  misc_feature 10, 397, 403: n = A,T,C or G

SEQ ID NO: 6574 - DNA, 838 bp, Homo sapiens; identical to SEQ ID NO: 183
  misc_feature 87, 134, 149, 156, 250, 252, 255, 298, 318, 367, 376, 397,405, 411, 417, 427, 437, 458, 478, 489, 499, 556, 591, 598,602, 613, 636, 645, 676, 681, 734, 753, 756, 761, 772, 784,812: n = A,T,C or G

SEQ ID NO: 6575 - DNA, 499 bp, Homo sapiens; identical to SEQ ID NO: 184
  misc_feature 82, 393: n = A,T,C or G

SEQ ID NO: 6576 - DNA, 520 bp, Homo sapiens; identical to SEQ ID NO: 185
  misc_feature 484, 486, 487, 489, 490: n = A,T,C or G

SEQ ID NO: 6577 - DNA, 486 bp, Homo sapiens; identical to SEQ ID NO: 186
  misc_feature 195: n = A,T,C or G

SEQ ID NO: 6578 - DNA, 577 bp, Homo sapiens; identical to SEQ ID NO: 187
  misc_feature 465, 468, 477, 504, 542, 565: n = A,T,C or G

SEQ ID NO: 6579 - DNA, 515 bp, Homo sapiens; identical to SEQ ID NO: 188
  misc_feature 7, 489, 490, 491, 492, 493, 495, 496, 498, 504, 505: n = A,T,C or G

SEQ ID NO: 6580 - DNA, 556 bp, Homo sapiens; identical to SEQ ID NO: 189
  misc_feature 168, 483, 505, 543, 549: n = A,T,C or G

SEQ ID NO: 6581 - DNA, 516 bp, Homo sapiens; identical to SEQ ID NO: 190
  misc_feature 2, 217, 231, 264: n = A,T,C or G

SEQ ID NO: 6582 - DNA, 413 bp, Homo sapiens; identical to SEQ ID NO: 192

SEQ ID NO: 6583 - DNA, 600 bp, Homo sapiens; identical to SEQ ID NO: 193

SEQ ID NO: 6584 - DNA, 363 bp, Homo sapiens; identical to SEQ ID NO: 194
  misc_feature 21, 347: n = A,T,C or G

SEQ ID NO: 6585 - DNA, 391 bp, Homo sapiens; identical to SEQ ID NO: 195
  misc_feature 27, 69: n = A,T,C or G

SEQ ID NO: 6586 - DNA, 357 bp, Homo sapiens; identical to SEQ ID NO: 196
  misc_feature 2: n = A,T,C or G

SEQ ID NO: 6587 - DNA, 533 bp, Homo sapiens; identical to SEQ ID NO: 197
  misc_feature 19, 25, 182, 184, 493, 510: n = A,T,C or G

SEQ ID NO: 6588 - DNA, 209 bp, Homo sapiens; identical to SEQ ID NO: 198
  misc_feature 184: n = A,T,C or G

SEQ ID NO: 6589 - DNA, 326 bp, Homo sapiens; identical to SEQ ID NO: 199
  misc_feature 56: n = A,T,C or G

SEQ ID NO: 6590 - DNA, 575 bp, Homo sapiens; identical to SEQ ID NO: 200
  misc_feature 20, 178, 194, 205, 367, 370, 371, 372, 375, 377, 439, 494: n = A,T,C or G

SEQ ID NO: 6591 - DNA, 333 bp, Homo sapiens; identical to SEQ ID NO: 201
  misc_feature 37, 298: n = A,T,C or G

SEQ ID NO: 6592 - DNA, 509 bp, Homo sapiens; identical to SEQ ID NO: 202
  misc_feature 473: n = A,T,C or G

SEQ ID NO: 6593 - DNA, 300 bp, Homo sapiens; identical to SEQ ID NO: 203

SEQ ID NO: 6594 - DNA, 276 bp, Homo sapiens; identical to SEQ ID NO: 204
  misc_feature 185: n = A,T,C or G

SEQ ID NO: 6595 - DNA, 506 bp, Homo sapiens; identical to SEQ ID NO: 205

SEQ ID NO: 6596 - DNA, 448 bp, Homo sapiens; identical to SEQ ID NO: 206
  misc_feature 3, 369: n = A,T,C or G

SEQ ID NO: 6597 - DNA, 203 bp, Homo sapiens; identical to SEQ ID NO: 207
  misc_feature 3: n = A,T,C or G

SEQ ID NO: 6598 - DNA, 351 bp, Homo sapiens; identical to SEQ ID NO: 208
  misc_feature 351: n = A,T,C or G

SEQ ID NO: 6599 - DNA, 570 bp, Homo sapiens; identical to SEQ ID NO: 209

SEQ ID NO: 6600 - DNA, 569 bp, Homo sapiens; identical to SEQ ID NO: 210
  misc_feature 5, 537: n = A,T,C or G

SEQ ID NO: 6601 - DNA, 512 bp, Homo sapiens; identical to SEQ ID NO: 211
  misc_feature 1, 15: n = A,T,C or G

SEQ ID NO: 6602 - DNA, 463 bp, Homo sapiens; identical to SEQ ID NO: 212
  misc_feature 53, 106, 112, 114, 189, 256, 319, 326, 356, 374, 398, 406,432, 436, 444: n = A,T,C or G

SEQ ID NO: 6603 - DNA, 392 bp, Homo sapiens; identical to SEQ ID NO: 213
  misc_feature 19: n = A,T,C or G

SEQ ID NO: 6604 - DNA, 270 bp, Homo sapiens; identical to SEQ ID NO: 214
  misc_feature 18, 243: n = A,T,C or G

SEQ ID NO: 6605 - DNA, 453 bp, Homo sapiens; identical to SEQ ID NO: 215

SEQ ID NO: 6606 - DNA, 510 bp, Homo sapiens; identical to SEQ ID NO: 216
  misc_feature 33, 49: n = A,T,C or G

SEQ ID NO: 6607 - DNA, 414 bp, Homo sapiens; identical to SEQ ID NO: 217
  misc_feature 20, 24: n = A,T,C or G

SEQ ID NO: 6608 - DNA, 492 bp, Homo sapiens; identical to SEQ ID NO: 218
  misc_feature 1: n = A,T,C or G

SEQ ID NO: 6609 - DNA, 490 bp, Homo sapiens; identical to SEQ ID NO: 219

SEQ ID NO: 6610 - DNA, 346 bp, Homo sapiens; identical to SEQ ID NO: 220
  misc_feature 25, 346: n = A,T,C or G

SEQ ID NO: 6611 - DNA, 417 bp, Homo sapiens; identical to SEQ ID NO: 221
  misc_feature 11, 397: n = A,T,C or G

SEQ ID NO: 6612 - DNA, 518 bp, Homo sapiens; identical to SEQ ID NO: 222
  misc_feature 2, 18, 491: n = A,T,C or G

SEQ ID NO: 6613 - DNA, 419 bp, Homo sapiens; identical to SEQ ID NO: 223
  misc_feature 4: n = A,T,C or G

SEQ ID NO: 6614 - DNA, 538 bp, Homo sapiens; identical to SEQ ID NO: 224
  misc_feature 3, 456, 471, 536: n = A,T,C or G

SEQ ID NO: 6615 - DNA, 385 bp, Homo sapiens; identical to SEQ ID NO: 225
  misc_feature 2, 40, 70, 111, 127, 142, 143, 149, 183, 196, 295, 373: n = A,T,C or G

SEQ ID NO: 6616 - DNA, 389 bp, Homo sapiens; identical to SEQ ID NO: 226
  misc_feature 174, 202, 223, 227: n = A,T,C or G

SEQ ID NO: 6617 - DNA, 438 bp, Homo sapiens; identical to SEQ ID NO: 227
  misc_feature 165, 412: n = A,T,C or G

SEQ ID NO: 6618 - DNA, 432 bp, Homo sapiens; identical to SEQ ID NO: 228
  misc_feature 3, 118: n = A,T,C or G

SEQ ID NO: 6619 - DNA, 399 bp, Homo sapiens; identical to SEQ ID NO: 229
  misc_feature 16, 72, 348: n = A,T,C or G

SEQ ID NO: 6620 - DNA, 413 bp, Homo sapiens; identical to SEQ ID NO: 230
  misc_feature 7, 231: n = A,T,C or G

SEQ ID NO: 6621 - DNA, 279 bp, Homo sapiens; identical to SEQ ID NO: 231
  misc_feature 1, 37, 41, 48, 80, 95, 107, 117, 153, 162, 190, 203, 205,211, 243, 244, 250, 251, 263, 266: n = A,T,C or G

SEQ ID NO: 6622 - DNA, 594 bp, Homo sapiens; identical to SEQ ID NO: 232
  misc_feature 431, 497, 569, 581: n = A,T,C or G

SEQ ID NO: 6623 - DNA, 499 bp, Homo sapiens; identical to SEQ ID NO: 233
  misc_feature 7, 22, 447, 452: n = A,T,C or G

SEQ ID NO: 6624 - DNA, 628 bp, Homo sapiens; identical to SEQ ID NO: 234
  misc_feature 416, 458, 505, 606: n = A,T,C or G

SEQ ID NO: 6625 - DNA, 429 bp, Homo sapiens; identical to SEQ ID NO: 235
  misc_feature 2, 30: n = A,T,C or G

SEQ ID NO: 6626 - DNA, 558 bp, Homo sapiens; identical to SEQ ID NO: 236
  misc_feature 108, 164, 175, 176, 545: n = A,T,C or G

SEQ ID NO: 6627 - DNA, 526 bp, Homo sapiens; identical to SEQ ID NO: 237
  misc_feature 5, 435, 517, 519: n = A,T,C or G

SEQ ID NO: 6628 - DNA, 771 bp, Homo sapiens; identical to SEQ ID NO: 238
  misc_feature 59, 141, 143, 149, 184, 290, 291, 355, 366, 392, 395, 408,415, 456, 460, 465, 471, 475, 478, 481, 487, 492, 499, 501,504, 507, 518, 526, 530, 538, 542, 552, 557, 582, 598, 607,609, 610, 614, 619, 626, 628, 633, 634, 650, 663, 673: n = A,T,C or G
  misc_feature 685, 691, 695, 704, 709, 723, 724, 725, 726, 738, 742, 744,747, 750, 753: n = A,T,C or G

SEQ ID NO: 6629 - DNA, 315 bp, Homo sapiens; identical to SEQ ID NO: 239
  misc_feature 89, 90: n = A,T,C or G

SEQ ID NO: 6630 - DNA, 612 bp, Homo sapiens; identical to SEQ ID NO: 240

SEQ ID NO: 6631 - DNA, 724 bp, Homo sapiens; identical to SEQ ID NO: 241
  misc_feature 558, 638, 648, 652, 654, 668, 673, 676, 680, 691, 709, 710,712, 714, 717: n = A,T,C or G

SEQ ID NO: 6632 - DNA, 710 bp, Homo sapiens; identical to SEQ ID NO: 242
  misc_feature 2, 134, 147, 151, 154, 175, 194, 208, 216, 225, 227, 240,243, 252, 268, 270, 275, 277, 281, 283, 284, 285, 297, 306,308, 315, 334, 335, 339, 340, 357, 363, 377, 384, 385, 387,388, 396, 399, 401, 410, 429, 448, 465, 471, 472, 480: n = A,T,C or G
  misc_feature 481, 482, 486, 491, 494, 498, 499, 500, 502, 505, 507, 508,510, 515, 519, 533, 540, 542, 546, 548, 550, 562, 563, 564,565, 568, 573, 588, 597, 602, 607, 618, 619, 622, 624, 632,641, 643, 645, 647, 658, 659, 661, 663, 667, 672, 673: n = A,T,C or G
  misc_feature 676, 685, 693, 694, 695: n = A,T,C or G

SEQ ID NO: 6633 - DNA, 699 bp, Homo sapiens; identical to SEQ ID NO: 243
  misc_feature 538, 673, 687, 688, 696: n = A,T,C or G

SEQ ID NO: 6634 - DNA, 682 bp, Homo sapiens; identical to SEQ ID NO: 244
  misc_feature 477, 509, 512, 578, 596, 632, 638, 655, 671: n = A,T,C or G

SEQ ID NO: 6635 - DNA, 499 bp, Homo sapiens; identical to SEQ ID NO: 245
  misc_feature 374: n = A,T,C or G

SEQ ID NO: 6636 - DNA, 671 bp, Homo sapiens; identical to SEQ ID NO: 246
  misc_feature 9, 21, 602, 639: n = A,T,C or G

SEQ ID NO: 6637 - DNA, 513 bp, Homo sapiens; identical to SEQ ID NO: 247
  misc_feature 17, 19, 31, 37, 41, 73, 104, 123, 137, 138, 168, 182, 306,351, 382, 419, 429, 430, 440, 462, 464, 468, 485, 494: n = A,T,C or G

SEQ ID NO: 6638 - DNA, 329 bp, Homo sapiens; identical to SEQ ID NO: 248
  misc_feature 300, 303, 304, 317, 320: n = A,T,C or G

SEQ ID NO: 6639 - DNA, 543 bp, Homo sapiens; identical to SEQ ID NO: 249
  misc_feature 17, 115, 116: n = A,T,C or G

SEQ ID NO: 6640 - DNA, 559 bp, Homo sapiens; identical to SEQ ID NO: 250
  misc_feature 334: n = A,T,C or G

SEQ ID NO: 6641 - DNA, 471 bp, Homo sapiens; identical to SEQ ID NO: 251

SEQ ID NO: 6642 - DNA, 433 bp, Homo sapiens; identical to SEQ ID NO: 252

SEQ ID NO: 6643 - DNA, 512 bp, Homo sapiens; identical to SEQ ID NO: 253
  misc_feature 68, 163, 228, 242, 243, 244, 260, 265, 266, 272, 281, 294,300, 303, 306, 309, 310, 311, 313, 314, 320, 324, 328, 329,330, 331, 332, 347, 349, 353, 356, 359, 363, 376, 381, 385,386, 387, 391, 435, 442, 462, 499: n = A,T,C or G

SEQ ID NO: 6644 - DNA, 608 bp, Homo sapiens; identical to SEQ ID NO: 254
  misc_feature 315, 462, 482: n = A,T,C or G

SEQ ID NO: 6645 - DNA, 364 bp, Homo sapiens; identical to SEQ ID NO: 255
  misc_feature 19, 96, 115, 147, 347, 354, 356: n = A,T,C or G

SEQ ID NO: 6646 - DNA, 520 bp, Homo sapiens; identical to SEQ ID NO: 256

SEQ ID NO: 6647 - DNA, 595 bp, Homo sapiens; identical to SEQ ID NO: 257

SEQ ID NO: 6648 - DNA, 261 bp, Homo sapiens; identical to SEQ ID NO: 258

SEQ ID NO: 6649 - DNA, 376 bp, Homo sapiens; identical to SEQ ID NO: 259
  misc_feature 257: n = A,T,C or G

SEQ ID NO: 6650 - DNA, 639 bp, Homo sapiens; identical to SEQ ID NO: 260
  misc_feature 103, 404, 494, 537, 540, 627, 629: n = A,T,C or G

SEQ ID NO: 6651 - DNA, 634 bp, Homo sapiens; identical to SEQ ID NO: 261

SEQ ID NO: 6652 - DNA, 355 bp, Homo sapiens; identical to SEQ ID NO: 262
  misc_feature 3, 110, 114: n = A,T,C or G

SEQ ID NO: 6653 - DNA, 543 bp, Homo sapiens; identical to SEQ ID NO: 263
  misc_feature 1, 115: n = A,T,C or G

SEQ ID NO: 6654 - DNA, 320 bp, Homo sapiens; identical to SEQ ID NO: 264
  misc_feature 2, 39, 112: n = A,T,C or G

SEQ ID NO: 6655 - DNA, 376 bp, Homo sapiens; identical to SEQ ID NO: 265
  misc_feature 13, 24, 106, 226: n = A,T,C or G

SEQ ID NO: 6656 - DNA, 557 bp, Homo sapiens; identical to SEQ ID NO: 267
  misc_feature 14: n = A,T,C or G

SEQ ID NO: 6657 - DNA, 532 bp, Homo sapiens; identical to SEQ ID NO: 268
  misc_feature 107: n = A,T,C or G

SEQ ID NO: 6658 - DNA, 222 bp, Homo sapiens; identical to SEQ ID NO: 269

SEQ ID NO: 6659 - DNA, 396 bp, Homo sapiens; identical to SEQ ID NO: 270
  misc_feature 10, 16, 18: n = A,T,C or G

SEQ ID NO: 6660 - DNA, 348 bp, Homo sapiens; identical to SEQ ID NO: 271
  misc_feature 8, 34, 55, 82, 83, 92, 158, 164, 284: n = A,T,C or G

SEQ ID NO: 6661 - DNA, 504 bp, Homo sapiens; identical to SEQ ID NO: 272
  misc_feature 94, 304, 334, 335, 449, 475: n = A,T,C or G

SEQ ID NO: 6662 - DNA, 553 bp, Homo sapiens; identical to SEQ ID NO: 273
  misc_feature 15, 49, 364, 459, 541: n = A,T,C or G

SEQ ID NO: 6663 - DNA, 513 bp, Homo sapiens; identical to SEQ ID NO: 274
  misc_feature 28, 151: n = A,T,C or G

SEQ ID NO: 6664 - DNA, 398 bp, Homo sapiens; identical to SEQ ID NO: 275
  misc_feature 27, 30, 36: n = A,T,C or G

SEQ ID NO: 6665 - DNA, 529 bp, Homo sapiens; identical to SEQ ID NO: 276
  misc_feature 13, 469, 498: n = A,T,C or G

SEQ ID NO: 6666 - DNA, 487 bp, Homo sapiens; identical to SEQ ID NO: 277
  misc_feature 28, 36, 163, 208, 216, 329, 334, 368, 459, 475: n = A,T,C or G

SEQ ID NO: 6667 - DNA, 280 bp, Homo sapiens; identical to SEQ ID NO: 278
  misc_feature 36, 37, 220, 249: n = A,T,C or G

SEQ ID NO: 6668 - DNA, 567 bp, Homo sapiens; identical to SEQ ID NO: 279
  misc_feature 18, 26, 27, 192, 212, 292, 477, 542: n = A,T,C or G

SEQ ID NO: 6669 - DNA, 384 bp, Homo sapiens; identical to SEQ ID NO: 280

SEQ ID NO: 6670 - DNA, 231 bp, Homo sapiens; identical to SEQ ID NO: 281
  misc_feature 1, 34, 79, 96, 125, 204: n = A,T,C or G

SEQ ID NO: 6671 - DNA, 272 bp, Homo sapiens; identical to SEQ ID NO: 282
  misc_feature 4, 10, 17, 22, 42, 47, 83, 84, 93, 96, 112, 119, 122, 123,132, 133, 150, 155, 158, 174, 184, 199, 208, 210, 227, 232,236, 245, 261: n = A,T,C or G

SEQ ID NO: 6672 - DNA, 776 bp, Homo sapiens; identical to SEQ ID NO: 283
  misc_feature 10, 18, 34, 35, 42, 49, 64, 78, 79, 97, 98, 104, 110, 111,134, 145, 161, 162, 163, 164, 165, 166, 167, 168, 169, 170,171, 172, 173, 174, 175, 176, 177, 178, 179, 180, 181, 182,183, 184, 185, 186, 187, 188, 189, 190, 191, 192, 193: n = A,T,C or G
  misc_feature 194, 195, 196, 197, 198, 199, 200, 201, 202, 203, 204, 205,206, 207, 208, 209, 210, 211, 212, 213, 214, 215, 216, 217,218, 219, 220, 221, 222, 223, 224, 225, 226, 227, 228, 229,230, 231, 232, 233, 234, 235, 236, 237, 238, 239, 240: n = A,T,C or G
  misc_feature 241, 242, 243, 244, 245, 246, 247, 248, 249, 250, 251, 252,253, 254, 255, 256, 257, 258, 261, 287, 288, 294, 305, 309,315, 317, 318, 319, 324, 337, 342, 345, 351, 357, 360, 361,370, 374, 376, 378, 394, 396, 397, 399, 410, 414, 418: n = A,T,C or G
  misc_feature 420, 421, 431, 447, 448, 456, 471, 475, 484, 491, 501, 506,514, 515, 517, 525, 530, 539, 543, 550, 566, 567, 580, 597,614, 618, 639, 653, 681, 684, 685, 697, 699, 700, 712, 713,714, 723, 732, 734, 741, 748, 750, 754, 755, 756, 757: n = A,T,C or G
  misc_feature 758, 760: n = A,T,C or G

SEQ ID NO: 6673 - DNA, 396 bp, Homo sapiens; identical to SEQ ID NO: 284
  misc_feature 42, 70, 89, 182, 226, 227, 228, 229, 230, 231, 232, 233,234, 235, 236, 237, 238, 239, 240, 241, 242, 243, 244, 245,246, 247, 248, 249, 250, 253, 282, 283, 284, 285, 286, 287,288, 289, 290, 291, 292, 293, 294, 295, 296, 297, 298: n = A,T,C or G
  misc_feature 299, 300, 301, 302, 303, 304, 305, 306, 307, 308, 309, 310,311, 312, 313, 314, 315, 316, 317, 318, 319, 320, 321: n = A,T,C or G

SEQ ID NO: 6674 - DNA, 393 bp, Homo sapiens; identical to SEQ ID NO: 285
  misc_feature 8, 17, 74, 84, 101, 102, 112, 122, 127, 166, 175, 217, 296,303, 348, 350, 353: n = A,T,C or G

SEQ ID NO: 6675 - DNA, 400 bp, Homo sapiens; identical to SEQ ID NO: 286
  misc_feature 51, 346: n = A,T,C or G

SEQ ID NO: 6676 - DNA, 498 bp, Homo sapiens; identical to SEQ ID NO: 287
  misc_feature 21, 27, 214, 477: n = A,T,C or G

SEQ ID NO: 6677 - DNA, 397 bp, Homo sapiens; identical to SEQ ID NO: 288
  misc_feature 2, 115, 336: n = A,T,C or G

SEQ ID NO: 6678 - DNA, 554 bp, Homo sapiens; identical to SEQ ID NO: 289
  misc_feature 1, 24, 40, 56, 63, 99, 101, 130, 143, 161, 181, 190, 193,223, 233, 236, 239, 254, 267, 271, 272, 279, 283, 288, 303,308, 333, 335, 357, 365, 391, 412, 413, 425, 429, 430, 469,509, 512, 514: n = A,T,C or G

SEQ ID NO: 6679 - DNA, 490 bp, Homo sapiens; identical to SEQ ID NO: 290

SEQ ID NO: 6680 - DNA, 291 bp, Homo sapiens; identical to SEQ ID NO: 291
  misc_feature 66, 190, 199, 264: n = A,T,C or G

SEQ ID NO: 6681 - DNA, 576 bp, Homo sapiens; identical to SEQ ID NO: 292
  misc_feature 1, 167, 435: n = A,T,C or G

SEQ ID NO: 6682 - DNA, 436 bp, Homo sapiens; identical to SEQ ID NO: 293
  misc_feature 113, 114, 142: n = A,T,C or G

SEQ ID NO: 6683 - DNA, 600 bp, Homo sapiens; identical to SEQ ID NO: 294
  misc_feature 282, 300, 303, 307, 315, 317, 322, 324, 326, 335, 336, 345,367, 368, 370, 399, 409, 410, 411, 420, 430, 433, 435, 436,444, 450, 474, 479, 484, 494, 502, 514, 515, 530, 531, 538,550, 564, 571, 572, 579, 583, 584, 596: n = A,T,C or G

SEQ ID NO: 6684 - DNA, 476 bp, Homo sapiens; identical to SEQ ID NO: 295
  misc_feature 29, 56, 69, 70, 75, 102, 104, 155, 178, 180, 224, 269, 319,327, 328, 331, 392, 415, 418, 421: n = A,T,C or G

SEQ ID NO: 6685 - DNA, 500 bp, Homo sapiens; identical to SEQ ID NO: 296
  misc_feature 91, 217, 272, 410, 470: n = A,T,C or G

SEQ ID NO: 6686 - DNA, 202 bp, Homo sapiens; identical to SEQ ID NO: 297
  misc_feature 83, 84, 186, 187, 195: n = A,T,C or G

SEQ ID NO: 6687 - DNA, 395 bp, Homo sapiens; identical to SEQ ID NO: 298
  misc_feature 40, 52, 212, 269, 315, 334: n = A,T,C or G

SEQ ID NO: 6688 - DNA, 186 bp, Homo sapiens; identical to SEQ ID NO: 299

SEQ ID NO: 6689 - DNA, 448 bp, Homo sapiens; identical to SEQ ID NO: 300

SEQ ID NO: 6690 - DNA, 563 bp, Homo sapiens; identical to SEQ ID NO: 301
  misc_feature 40, 42, 91, 138, 285, 299, 448, 460, 494, 498: n = A,T,C or G

SEQ ID NO: 6691 - DNA, 503 bp, Homo sapiens; identical to SEQ ID NO: 302
  misc_feature 17, 42, 44, 265, 277, 280, 292, 294, 303, 352, 357, 377,404, 441, 469: n = A,T,C or G

SEQ ID NO: 6692 - DNA, 558 bp, Homo sapiens; identical to SEQ ID NO: 303

SEQ ID NO: 6693 - DNA, 507 bp, Homo sapiens; identical to SEQ ID NO: 305
  misc_feature 3, 5, 76, 77, 158, 197, 441, 449, 489: n = A,T,C or G

SEQ ID NO: 6694 - DNA, 386 bp, Homo sapiens; identical to SEQ ID NO: 306
  misc_feature 117: n = A,T,C or G

SEQ ID NO: 6695 - DNA, 404 bp, Homo sapiens; identical to SEQ ID NO: 307
  misc_feature 6, 104: n = A,T,C or G

SEQ ID NO: 6696 - DNA, 405 bp, Homo sapiens; identical to SEQ ID NO: 308
  misc_feature 111, 366, 387: n = A,T,C or G

SEQ ID NO: 6697 - DNA, 437 bp, Homo sapiens; identical to SEQ ID NO: 309

SEQ ID NO: 6698 - DNA, 437 bp, Homo sapiens; identical to SEQ ID NO: 310
  misc_feature 114, 119, 120, 121, 420: n = A,T,C or G

SEQ ID NO: 6699 - DNA, 252 bp, Homo sapiens; identical to SEQ ID NO: 311
  misc_feature 41, 64, 129, 230: n = A,T,C or G

SEQ ID NO: 6700 - DNA, 372 bp, Homo sapiens; identical to SEQ ID NO: 312
  misc_feature 7, 11, 32, 171, 172: n = A,T,C or G

SEQ ID NO: 6701 - DNA, 341 bp, Homo sapiens; identical to SEQ ID NO: 313
  misc_feature 4, 11, 32, 79, 89, 142, 151, 202, 286, 331: n = A,T,C or G

SEQ ID NO: 6702 - DNA, 342 bp, Homo sapiens; identical to SEQ ID NO: 314
  misc_feature 1, 8, 11, 16, 17, 22, 163, 195, 231, 253, 278, 305, 308,311, 320: n = A,T,C or G

SEQ ID NO: 6703 - DNA, 352 bp, Homo sapiens; identical to SEQ ID NO: 315

SEQ ID NO: 6704 - DNA, 360 bp, Homo sapiens; identical to SEQ ID NO: 316

SEQ ID NO: 6705 - DNA, 338 bp, Homo sapiens; identical to SEQ ID NO: 317
  misc_feature 1, 10, 163, 164, 165: n = A,T,C or G

SEQ ID NO: 6706 - DNA, 307 bp, Homo sapiens; identical to SEQ ID NO: 318
  misc_feature 216, 257, 263: n = A,T,C or G

SEQ ID NO: 6707 - DNA, 452 bp, Homo sapiens; identical to SEQ ID NO: 320
  misc_feature 50, 60, 70, 82, 125, 135, 146, 173, 224, 289, 313, 340, 343,382, 389, 414, 422: n = A,T,C or G

SEQ ID NO: 6708 - DNA, 437 bp, Homo sapiens; identical to SEQ ID NO: 321

SEQ ID NO: 6709 - DNA, 405 bp, Homo sapiens; identical to SEQ ID NO: 322
  misc_feature 263: n = A,T,C or G

SEQ ID NO: 6710 - DNA, 194 bp, Homo sapiens; identical to SEQ ID NO: 323

SEQ ID NO: 6711 - DNA, 327 bp, Homo sapiens; identical to SEQ ID NO: 324
  misc_feature 1, 2, 163, 164, 244: n = A,T,C or G

SEQ ID NO: 6712 - DNA, 379 bp, Homo sapiens; identical to SEQ ID NO: 329

SEQ ID NO: 6713 - DNA, 445 bp, Homo sapiens; identical to SEQ ID NO: 330
  misc_feature 406, 429, 431: n = A,T,C or G

SEQ ID NO: 6714 - DNA, 282 bp, Homo sapiens; identical to SEQ ID NO: 331
  misc_feature 9, 33, 111, 275: n = A,T,C or G

SEQ ID NO: 6715 - DNA, 530 bp, Homo sapiens; identical to SEQ ID NO: 332
  misc_feature 269, 281, 291, 303, 319, 320, 336, 359, 368, 371, 374, 404,408, 429, 430, 435, 436, 438, 439, 443, 453, 459, 460, 466,469, 470, 472, 481, 482, 486, 491, 499, 500, 506, 511: n = A,T,C or G

SEQ ID NO: 6716 - DNA, 542 bp, Homo sapiens; identical to SEQ ID NO: 333
  misc_feature 380, 399, 403, 405, 406, 408, 411, 430, 431, 437, 438, 439,442, 450, 452, 474, 477, 481, 486, 496, 497, 499, 518, 520,523, 524, 530, 542: n = A,T,C or G

SEQ ID NO: 6717 - DNA, 442 bp, Homo sapiens; identical to SEQ ID NO: 334
  misc_feature 343: n = A,T,C or G

SEQ ID NO: 6718 - DNA, 377 bp, Homo sapiens; identical to SEQ ID NO: 335
  misc_feature 50, 51, 56, 57, 59, 62, 80, 143, 306: n = A,T,C or G

SEQ ID NO: 6719 - DNA, 472 bp, Homo sapiens; identical to SEQ ID NO: 336
  misc_feature 338, 343, 344, 358, 364, 369, 370, 373, 392, 398, 399, 416: n = A,T,C or G

SEQ ID NO: 6720 - DNA, 346 bp, Homo sapiens; identical to SEQ ID NO: 337

SEQ ID NO: 6721 - DNA, 167 bp, Homo sapiens; identical to SEQ ID NO: 338

SEQ ID NO: 6722 - DNA, 208 bp, Homo sapiens; identical to SEQ ID NO: 339

SEQ ID NO: 6723 - DNA, 347 bp, Homo sapiens; identical to SEQ ID NO: 340
  misc_feature 22, 48, 89, 90, 125, 303: n = A,T,C or G

SEQ ID NO: 6724 - DNA, 538 bp, Homo sapiens; identical to SEQ ID NO: 341
  misc_feature 496: n = A,T,C or G

SEQ ID NO: 6725 - DNA, 357 bp, Homo sapiens; identical to SEQ ID NO: 342

SEQ ID NO: 6726 - DNA, 293 bp, Homo sapiens; identical to SEQ ID NO: 343
  misc_feature 223, 240: n = A,T,C or G

SEQ ID NO: 6727 - DNA, 362 bp, Homo sapiens; identical to SEQ ID NO: 344
  misc_feature 260, 277, 307, 333, 355, 358: n = A,T,C or G

SEQ ID NO: 6728 - DNA, 432 bp, Homo sapiens; identical to SEQ ID NO: 345

SEQ ID NO: 6729 - DNA, 420 bp, Homo sapiens; identical to SEQ ID NO: 346
  misc_feature 14: n = A,T,C or G

SEQ ID NO: 6730 - DNA, 213 bp, Homo sapiens; identical to SEQ ID NO: 347

SEQ ID NO: 6731 - DNA, 480 bp, Homo sapiens; identical to SEQ ID NO: 348
  misc_feature 2: n = A,T,C or G

SEQ ID NO: 6732 - DNA, 486 bp, Homo sapiens; identical to SEQ ID NO: 349

SEQ ID NO: 6733 - DNA, 367 bp, Homo sapiens; identical to SEQ ID NO: 350

SEQ ID NO: 6734 - DNA, 438 bp, Homo sapiens; identical to SEQ ID NO: 351
  misc_feature 3, 395, 415: n = A,T,C or G

SEQ ID NO: 6735 - DNA, 362 bp, Homo sapiens; identical to SEQ ID NO: 352
  misc_feature 334: n = A,T,C or G

SEQ ID NO: 6736 - DNA, 458 bp, Homo sapiens; identical to SEQ ID NO: 353

SEQ ID NO: 6737 - DNA, 338 bp, Homo sapiens; identical to SEQ ID NO: 354

SEQ ID NO: 6738 - DNA, 513 bp, Homo sapiens; identical to SEQ ID NO: 355
  misc_feature 1, 2: n = A,T,C or G

SEQ ID NO: 6739 - DNA, 583 bp, Homo sapiens; identical to SEQ ID NO: 356

SEQ ID NO: 6740 - DNA, 215 bp, Homo sapiens; identical to SEQ ID NO: 357

SEQ ID NO: 6741 - DNA, 539 bp, Homo sapiens; identical to SEQ ID NO: 358
  misc_feature 8, 217, 252, 269, 297, 299, 304, 332, 350, 413, 430, 444,463, 495: n = A,T,C or G

SEQ ID NO: 6742 - DNA, 401 bp, Homo sapiens; identical to SEQ ID NO: 359
  misc_feature 14, 55: n = A,T,C or G

SEQ ID NO: 6743 - DNA, 283 bp, Homo sapiens; identical to SEQ ID NO: 360

SEQ ID NO: 6744 - DNA, 463 bp, Homo sapiens; identical to SEQ ID NO: 361
  misc_feature 2, 414, 434: n = A,T,C or G

SEQ ID NO: 6745 - DNA, 222 bp, Homo sapiens; identical to SEQ ID NO: 362

SEQ ID NO: 6746 - DNA, 462 bp, Homo sapiens; identical to SEQ ID NO: 363
  misc_feature 14, 16, 27, 355, 427: n = A,T,C or G

SEQ ID NO: 6747 - DNA, 534 bp, Homo sapiens; identical to SEQ ID NO: 364
  misc_feature 495: n = A,T,C or G

SEQ ID NO: 6748 - DNA, 639 bp, Homo sapiens; identical to SEQ ID NO: 365
  misc_feature 368, 421, 503, 520, 541, 564, 588, 613, 615, 617, 621: n = A,T,C or G

SEQ ID NO: 6749 - DNA, 286 bp, Homo sapiens; identical to SEQ ID NO: 366

SEQ ID NO: 6750 - DNA, 204 bp, Homo sapiens; identical to SEQ ID NO: 367

SEQ ID NO: 6751 - DNA, 200 bp, Homo sapiens; identical to SEQ ID NO: 368
  misc_feature 117, 133, 169, 192: n = A,T,C or G

SEQ ID NO: 6752 - DNA, 603 bp, Homo sapiens; identical to SEQ ID NO: 369
  misc_feature 12, 22, 29, 36, 40, 42, 44, 49, 51, 138, 139, 142, 143, 144,159, 160, 252, 270, 280, 289, 295, 303, 319, 326, 343, 346,374, 398, 420, 453, 466, 481, 492, 494, 518, 536, 541, 546,552, 587: n = A,T,C or G

SEQ ID NO: 6753 - DNA, 337 bp, Homo sapiens; identical to SEQ ID NO: 370
  misc_feature 11, 41, 194, 195, 203, 232, 325: n = A,T,C or G

SEQ ID NO: 6754 - DNA, 238 bp, Homo sapiens; identical to SEQ ID NO: 371

SEQ ID NO: 6755 - DNA, 358 bp, Homo sapiens; identical to SEQ ID NO: 372

SEQ ID NO: 6756 - DNA, 377 bp, Homo sapiens; identical to SEQ ID NO: 373

SEQ ID NO: 6757 - DNA, 225 bp, Homo sapiens; identical to SEQ ID NO: 374
  misc_feature 57: n = A,T,C or G

SEQ ID NO: 6758 - DNA, 356 bp, Homo sapiens; identical to SEQ ID NO: 375
  misc_feature 1, 5, 21, 29, 36, 51, 59, 61, 73, 80, 83, 88, 89, 93, 108,126, 164, 234, 244, 270, 272, 283, 294, 295, 298, 299, 304,314, 315, 316, 323, 324, 332, 334, 335, 340, 342: n = A,T,C or G

SEQ ID NO: 6759 - DNA, 848 bp, Homo sapiens; identical to SEQ ID NO: 376
  misc_feature 50, 351, 352, 353, 354, 355, 356, 357, 358, 359, 360, 361,362, 363, 364, 365, 366, 367, 368, 369, 370, 371, 372, 373,374, 375, 376, 377, 378, 379, 380, 381, 382, 383, 384, 385,386, 387, 388, 389, 390, 391, 392, 393, 394, 395, 396: n = A,T,C or G
  misc_feature 397, 398, 399, 400, 401, 402, 403, 404, 405, 406, 407, 408,409, 410, 411, 412, 413, 414, 415, 416, 417, 418, 419, 420,421, 422, 423, 424, 425, 426, 427, 428, 429, 430, 431, 432,433, 434, 435, 436, 437, 438, 439, 440, 441, 442, 443: n = A,T,C or G
  misc_feature 444, 445, 446, 447, 448, 449, 450, 451, 452, 453, 454, 455,456, 457, 458, 459, 460, 461, 462, 463, 464, 465, 466, 467,468, 474, 477, 479, 487, 493, 494, 504, 514, 533, 542, 563,566, 567, 569, 570, 571, 575, 588, 595, 596, 598, 615: n = A,T,C or G
  misc_feature 616, 623, 624, 629, 631, 637, 641, 644, 649, 664, 666, 667,668, 680, 681, 682, 683, 686, 687, 700, 707, 711, 715, 719,722, 732, 744, 745, 754, 759, 765, 767, 782, 790, 791, 798,801, 807, 812, 814, 815, 819, 821, 824, 836, 838: n = A,T,C or G

SEQ ID NO: 6760 - DNA, 401 bp, Homo sapiens; identical to SEQ ID NO: 377
  misc_feature 373, 382, 389, 393: n = A,T,C or G

SEQ ID NO: 6761 - DNA, 495 bp, Homo sapiens; identical to SEQ ID NO: 378
  misc_feature 72, 73, 74, 75, 76, 77, 78, 79, 80, 81, 82, 83, 84, 85, 86,87, 88, 89, 90, 91, 92, 93, 94, 95, 96, 97, 98, 99, 100,101, 102, 103, 104, 105, 106, 107, 108, 109, 110, 111, 112,113, 114, 115, 116, 117, 118, 119, 120, 121, 122, 123: n = A,T,C or G
  misc_feature 124, 125, 126, 127, 128, 129, 130, 131, 132, 133, 134, 135,136, 137, 138, 139, 140, 141, 142, 143, 144, 145, 146, 147,148, 149, 150, 151, 152, 153, 154, 215, 252, 254, 315, 317,336, 338, 340, 362, 365, 393, 459: n = A,T,C or G

SEQ ID NO: 6762 - DNA, 544 bp, Homo sapiens; identical to SEQ ID NO: 379
  misc_feature 7, 28, 29, 34, 399, 403, 414, 424, 434, 452, 454, 495, 525,526, 527, 534: n = A,T,C or G

SEQ ID NO: 6763 - DNA, 273 bp, Homo sapiens; identical to SEQ ID NO: 380

SEQ ID NO: 6764 - DNA, 571 bp, Homo sapiens; identical to SEQ ID NO: 381
  misc_feature 561: n = A,T,C or G

SEQ ID NO: 6765 - DNA, 277 bp, Homo sapiens; identical to SEQ ID NO: 382
  misc_feature 122: n = A,T,C or G

SEQ ID NO: 6766 - DNA, 501 bp, Homo sapiens; identical to SEQ ID NO: 383
  misc_feature 378, 379, 390, 397, 404, 423, 446, 450, 455, 461, 464, 467,480, 481, 485: n = A,T,C or G

SEQ ID NO: 6767 - DNA, 276 bp, Homo sapiens; identical to SEQ ID NO: 384

SEQ ID NO: 6768 - DNA, 470 bp, Homo sapiens; identical to SEQ ID NO: 385
  misc_feature 378: n = A,T,C or G

SEQ ID NO: 6769 - DNA, 348 bp, Homo sapiens; identical to SEQ ID NO: 386

SEQ ID NO: 6770 - DNA, 267 bp, Homo sapiens; identical to SEQ ID NO: 387

SEQ ID NO: 6771 - DNA, 403 bp, Homo sapiens; identical to SEQ ID NO: 388

SEQ ID NO: 6772 - DNA, 480 bp, Homo sapiens; identical to SEQ ID NO: 389
  misc_feature 114, 258, 329, 376, 379, 402, 456, 457, 460: n = A,T,C or G

SEQ ID NO: 6773 - DNA, 257 bp, Homo sapiens; identical to SEQ ID NO: 390
  misc_feature 7, 76, 124, 125, 172: n = A,T,C or G

SEQ ID NO: 6774 - DNA, 300 bp, Homo sapiens; identical to SEQ ID NO: 391
  misc_feature 17, 18, 42, 252: n = A,T,C or G

SEQ ID NO: 6775 - DNA, 290 bp, Homo sapiens; identical to SEQ ID NO: 392

SEQ ID NO: 6776 - DNA, 253 bp, Homo sapiens; identical to SEQ ID NO: 393

SEQ ID NO: 6777 - DNA, 474 bp, Homo sapiens; identical to SEQ ID NO: 394
  misc_feature 17: n = A,T,C or G

SEQ ID NO: 6778 - DNA, 279 bp, Homo sapiens; identical to SEQ ID NO: 395

SEQ ID NO: 6779 - DNA, 166 bp, Homo sapiens; identical to SEQ ID NO: 396
  misc_feature 121, 124, 148: n = A,T,C or G

SEQ ID NO: 6780 - DNA, 490 bp, Homo sapiens; identical to SEQ ID NO: 397

SEQ ID NO: 6781 - DNA, 384 bp, Homo sapiens; identical to SEQ ID NO: 398

SEQ ID NO: 6782 - DNA, 453 bp, Homo sapiens; identical to SEQ ID NO: 399

SEQ ID NO: 6783 - DNA, 480 bp, Homo sapiens; identical to SEQ ID NO: 400
  misc_feature 405, 457: n = A,T,C or G

SEQ ID NO: 6784 - DNA, 533 bp, Homo sapiens; identical to SEQ ID NO: 401
  misc_feature 90, 91, 157, 398: n = A,T,C or G

SEQ ID NO: 6785 - DNA, 352 bp, Homo sapiens; identical to SEQ ID NO: 402

SEQ ID NO: 6786 - DNA, 364 bp, Homo sapiens; identical to SEQ ID NO: 403
  misc_feature 16, 18, 23, 37: n = A,T,C or G

SEQ ID NO: 6787 - DNA, 416 bp, Homo sapiens; identical to SEQ ID NO: 404
  misc_feature 93: n = A,T,C or G

SEQ ID NO: 6788 - DNA, 203 bp, Homo sapiens; identical to SEQ ID NO: 405
  misc_feature 112: n = A,T,C or G

SEQ ID NO: 6789 - DNA, 312 bp, Homo sapiens; identical to SEQ ID NO: 406
  misc_feature 2: n = A,T,C or G

SEQ ID NO: 6790 - DNA, 432 bp, Homo sapiens; identical to SEQ ID NO: 407

SEQ ID NO: 6791 - DNA, 253 bp, Homo sapiens; identical to SEQ ID NO: 408

SEQ ID NO: 6792 - DNA, 275 bp, Homo sapiens; identical to SEQ ID NO: 410

SEQ ID NO: 6793 - DNA, 291 bp, Homo sapiens; identical to SEQ ID NO: 411
  misc_feature 112, 113, 114: n = A,T,C or G

SEQ ID NO: 6794 - DNA, 109 bp, Homo sapiens; identical to SEQ ID NO: 412

SEQ ID NO: 6795 - DNA, 177 bp, Homo sapiens; identical to SEQ ID NO: 413
  misc_feature 113, 177: n = A,T,C or G

SEQ ID NO: 6796 - DNA, 306 bp, Homo sapiens; identical to SEQ ID NO: 414

SEQ ID NO: 6797 - DNA, 306 bp, Homo sapiens; identical to SEQ ID NO: 415
  misc_feature 253, 286: n = A,T,C or G

SEQ ID NO: 6798 - DNA, 145 bp, Homo sapiens; identical to SEQ ID NO: 416
  misc_feature 33, 40, 116: n = A,T,C or G

SEQ ID NO: 6799 - DNA, 299 bp, Homo sapiens; identical to SEQ ID NO: 417

SEQ ID NO: 6800 - DNA, 390 bp, Homo sapiens; identical to SEQ ID NO: 418
  misc_feature 94, 113, 116, 118, 119, 170, 191, 196, 255, 390: n = A,T,C or G

SEQ ID NO: 6801 - DNA, 108 bp, Homo sapiens; identical to SEQ ID NO: 419

SEQ ID NO: 6802 - DNA, 195 bp, Homo sapiens; identical to SEQ ID NO: 420

SEQ ID NO: 6803 - DNA, 385 bp, Homo sapiens; identical to SEQ ID NO: 421
  misc_feature 319: n = A,T,C or G

SEQ ID NO: 6804 - DNA, 168 bp, Homo sapiens; identical to SEQ ID NO: 422

SEQ ID NO: 6805 - DNA, 412 bp, Homo sapiens; identical to SEQ ID NO: 423
  misc_feature 2: n = A,T,C or G

SEQ ID NO: 6806 - DNA, 454 bp, Homo sapiens; identical to SEQ ID NO: 424
  misc_feature 257, 379, 381, 384, 400, 402, 412, 413, 423: n = A,T,C or G

SEQ ID NO: 6807 - DNA, 401 bp, Homo sapiens; identical to SEQ ID NO: 425

SEQ ID NO: 6808 - DNA, 244 bp, Homo sapiens; identical to SEQ ID NO: 426
  misc_feature 88: n = A,T,C or G

SEQ ID NO: 6809 - DNA, 190 bp, Homo sapiens; identical to SEQ ID NO: 427
  misc_feature 115: n = A,T,C or G

SEQ ID NO: 6810 - DNA, 364 bp, Homo sapiens; identical to SEQ ID NO: 428
  misc_feature 3, 314, 345, 353, 362: n = A,T,C or G

SEQ ID NO: 6811 - DNA, 228 bp, Homo sapiens; identical to SEQ ID NO: 429
  misc_feature 74: n = A,T,C or G

SEQ ID NO: 6812 - DNA, 381 bp, Homo sapiens; identical to SEQ ID NO: 430
  misc_feature 74: n = A,T,C or G

SEQ ID NO: 6813 - DNA, 224 bp, Homo sapiens; identical to SEQ ID NO: 431
  misc_feature 108, 203: n = A,T,C or G

SEQ ID NO: 6814 - DNA, 345 bp, Homo sapiens; identical to SEQ ID NO: 432

SEQ ID NO: 6815 - DNA, 356 bp, Homo sapiens; identical to SEQ ID NO: 433
  misc_feature 82: n = A,T,C or G

SEQ ID NO: 6816 - DNA, 408 bp, Homo sapiens; identical to SEQ ID NO: 434
  misc_feature 116, 117: n = A,T,C or G

SEQ ID NO: 6817 - DNA, 348 bp, Homo sapiens; identical to SEQ ID NO: 435
  misc_feature 63, 73, 96, 150, 162: n = A,T,C or G

SEQ ID NO: 6818 - DNA, 360 bp, Homo sapiens; identical to SEQ ID NO: 436

SEQ ID NO: 6819 - DNA, 523 bp, Homo sapiens; identical to SEQ ID NO: 437
  misc_feature 478: n = A,T,C or G

SEQ ID NO: 6820 - DNA, 373 bp, Homo sapiens; identical to SEQ ID NO: 438

SEQ ID NO: 6821 - DNA, 329 bp, Homo sapiens; identical to SEQ ID NO: 439
  misc_feature 41, 66, 73, 161, 255, 296: n = A,T,C or G

SEQ ID NO: 6822 - DNA, 300 bp, Homo sapiens; identical to SEQ ID NO: 440

SEQ ID NO: 6823 - DNA, 150 bp, Homo sapiens; identical to SEQ ID NO: 441
  misc_feature 3, 111: n = A,T,C or G

SEQ ID NO: 6824 - DNA, 270 bp, Homo sapiens; identical to SEQ ID NO: 442

SEQ ID NO: 6825 - DNA, 321 bp, Homo sapiens; identical to SEQ ID NO: 443
  misc_feature 211, 264: n = A,T,C or G

SEQ ID NO: 6826 - DNA, 179 bp, Homo sapiens; identical to SEQ ID NO: 444
  misc_feature 3, 5, 54, 124, 132, 133, 142, 150, 157, 158, 159, 160: n = A,T,C or G

SEQ ID NO: 6827 - DNA, 320 bp, Homo sapiens; identical to SEQ ID NO: 445
  misc_feature 167, 286, 292: n = A,T,C or G

SEQ ID NO: 6828 - DNA, 145 bp, Homo sapiens; identical to SEQ ID NO: 446

SEQ ID NO: 6829 - DNA, 859 bp, Homo sapiens; identical to SEQ ID NO: 447
  misc_feature 257, 258, 259, 260, 261, 262, 263, 264, 265, 266, 267, 268,269, 270, 271, 272, 273, 274, 275, 276, 277, 278, 279, 280,281, 282, 283, 284, 285, 286, 287, 288, 289, 290, 291, 292,293, 294, 295, 296, 297, 298, 299, 300, 301, 302, 303: n = A,T,C or G
  misc_feature 304, 305, 306, 307, 308, 309, 310, 311, 312, 313, 314, 315,316, 317, 318, 319, 320, 321, 322, 323, 324, 325, 326, 327,328, 329, 330, 331, 332, 333, 334, 335, 336, 337, 338, 339,340, 341, 342, 343, 344, 345, 346, 347, 348, 349, 350: n = A,T,C or G
  misc_feature 351, 352, 353, 354, 355, 356, 357, 358, 359, 360, 361, 362,363, 364, 365, 366, 367, 368, 369, 370, 371, 372, 373, 374,375, 376, 377, 378, 379, 380, 381, 382, 383, 384, 385, 386,387, 388, 389, 390, 391, 392, 393, 394, 395, 402, 412: n = A,T,C or G
  misc_feature 415, 422, 428, 430, 433, 438, 442, 455, 458, 461, 462, 470,475, 483, 485, 486, 489, 495, 498, 506, 508, 509, 512, 516,521, 524, 526, 531, 536, 538, 542, 543, 544, 545, 546, 553,554, 556, 557, 563, 568, 570, 571, 572, 575, 576, 579: n = A,T,C or G
  misc_feature 580, 583, 586, 592, 594, 595, 599, 600, 603, 604, 606, 615,616, 617, 618, 622, 623, 624, 625, 626, 627, 629, 630, 631,633, 634, 636, 637, 638, 640, 641, 642, 643, 645, 646, 647,648, 649, 650, 651, 654, 655, 656, 657, 658, 659, 660: n = A,T,C or G
  misc_feature 663, 667, 668, 669, 670, 674, 676, 677, 678, 679, 680, 682,683, 685, 686, 687, 688, 689, 690, 693, 694, 695, 696, 698,702, 703, 704, 705, 708, 709, 710, 711, 712, 713, 714, 715,716, 717, 720, 721, 722, 723, 724, 725, 726, 727, 728: n = A,T,C or G
  misc_feature 729, 730, 731, 732, 733, 735, 736, 738, 739, 744, 745, 746,747, 750, 751, 752, 753, 756, 757, 758, 759, 761, 762, 763,764, 765, 768, 769, 771, 773, 774, 775, 776, 779, 781, 784,788, 790, 792, 793, 794, 795, 796, 797, 798, 800, 801,: n = A,T,C or G
  misc_feature 802, 804, 806, 809, 810, 811, 812, 813, 814, 815, 816, 817,818, 819, 820, 822, 824, 825, 826, 827, 831, 832, 836, 837,838, 839, 841, 843, 844, 845, 848, 850: n = A,T,C or G

SEQ ID NO: 6830 - DNA, 243 bp, Homo sapiens; identical to SEQ ID NO: 448

SEQ ID NO: 6831 - DNA, 257 bp, Homo sapiens; identical to SEQ ID NO: 449

SEQ ID NO: 6832 - DNA, 484 bp, Homo sapiens; identical to SEQ ID NO: 450

SEQ ID NO: 6833 - DNA, 479 bp, Homo sapiens; identical to SEQ ID NO: 451

SEQ ID NO: 6834 - DNA, 197 bp, Homo sapiens; identical to SEQ ID NO: 452

SEQ ID NO: 6835 - DNA, 565 bp, Homo sapiens; identical to SEQ ID NO: 453

SEQ ID NO: 6836 - DNA, 289 bp, Homo sapiens; identical to SEQ ID NO: 454

SEQ ID NO: 6837 - DNA, 492 bp, Homo sapiens; identical to SEQ ID NO: 455

SEQ ID NO: 6838 - DNA, 346 bp, Homo sapiens; identical to SEQ ID NO: 456

SEQ ID NO: 6839 - DNA, 514 bp, Homo sapiens; identical to SEQ ID NO: 457
  misc_feature 473: n = A,T,C or G

SEQ ID NO: 6840 - DNA, 588 bp, Homo sapiens; identical to SEQ ID NO: 458
  misc_feature 525, 539, 588: n = A,T,C or G

SEQ ID NO: 6841 - DNA, 343 bp, Homo sapiens; identical to SEQ ID NO: 459

SEQ ID NO: 6842 - DNA, 324 bp, Homo sapiens; identical to SEQ ID NO: 460

SEQ ID NO: 6843 - DNA, 211 bp, Homo sapiens; identical to SEQ ID NO: 461

SEQ ID NO: 6844 - DNA, 370 bp, Homo sapiens; identical to SEQ ID NO: 462
  misc_feature 71, 145, 209, 274, 316: n = A,T,C or G

SEQ ID NO: 6845 - DNA, 325 bp, Homo sapiens; identical to SEQ ID NO: 463

SEQ ID NO: 6846 - DNA, 180 bp, Homo sapiens; identical to SEQ ID NO: 464
  misc_feature 6: n = A,T,C or G

SEQ ID NO: 6847 - DNA, 372 bp, Homo sapiens; identical to SEQ ID NO: 465

SEQ ID NO: 6848 - DNA, 184 bp, Homo sapiens; identical to SEQ ID NO: 466
  misc_feature 21: n = A,T,C or G

SEQ ID NO: 6849 - DNA, 343 bp, Homo sapiens; identical to SEQ ID NO: 467

SEQ ID NO: 6850 - DNA, 331 bp, Homo sapiens; identical to SEQ ID NO: 468

SEQ ID NO: 6851 - DNA, 224 bp, Homo sapiens; identical to SEQ ID NO: 469

SEQ ID NO: 6852 - DNA, 190 bp, Homo sapiens; identical to SEQ ID NO: 470
  misc_feature 29: n = A,T,C or G

SEQ ID NO: 6853 - DNA, 299 bp, Homo sapiens; identical to SEQ ID NO: 471
  misc_feature 215, 227: n = A,T,C or G

SEQ ID NO: 6854 - DNA, 237 bp, Homo sapiens; identical to SEQ ID NO: 472
  misc_feature 93, 128, 138, 139, 171, 176, 219, 235: n = A,T,C or G

SEQ ID NO: 6855 - DNA, 379 bp, Homo sapiens; identical to SEQ ID NO: 473
  misc_feature 24: n = A,T,C or G

SEQ ID NO: 6856 - DNA, 399 bp, Homo sapiens; identical to SEQ ID NO: 474

SEQ ID NO: 6857 - DNA, 277 bp, Homo sapiens; identical to SEQ ID NO: 475
  misc_feature 3, 43: n = A,T,C or G

SEQ ID NO: 6858 - DNA, 180 bp, Homo sapiens; identical to SEQ ID NO: 476
  misc_feature 113, 178: n = A,T,C or G

SEQ ID NO: 6859 - DNA, 328 bp, Homo sapiens; identical to SEQ ID NO: 477

SEQ ID NO: 6860 - DNA, 305 bp, Homo sapiens; identical to SEQ ID NO: 478
  misc_feature 305: n = A,T,C or G

SEQ ID NO: 6861 - DNA, 289 bp, Homo sapiens; identical to SEQ ID NO: 479

SEQ ID NO: 6862 - DNA, 289 bp, Homo sapiens; identical to SEQ ID NO: 480

SEQ ID NO: 6863 - DNA, 279 bp, Homo sapiens; identical to SEQ ID NO: 482
  misc_feature 4: n = A,T,C or G

SEQ ID NO: 6864 - DNA, 394 bp, Homo sapiens; identical to SEQ ID NO: 483
  misc_feature 252, 347, 366, 373, 381: n = A,T,C or G

SEQ ID NO: 6865 - DNA, 280 bp, Homo sapiens; identical to SEQ ID NO: 484

SEQ ID NO: 6866 - DNA, 331 bp, Homo sapiens; identical to SEQ ID NO: 486
  misc_feature 23: n = A,T,C or G

SEQ ID NO: 6867 - DNA, 282 bp, Homo sapiens; identical to SEQ ID NO: 487
  misc_feature 5, 15, 18, 75: n = A,T,C or G

SEQ ID NO: 6868 - DNA, 183 bp, Homo sapiens; identical to SEQ ID NO: 488
  misc_feature 183: n = A,T,C or G

SEQ ID NO: 6869 - DNA, 383 bp, Homo sapiens; identical to SEQ ID NO: 489
  misc_feature 296, 307, 309, 327, 364: n = A,T,C or G

SEQ ID NO: 6870 - DNA, 378 bp, Homo sapiens; identical to SEQ ID NO: 490
  misc_feature 218: n = A,T,C or G

SEQ ID NO: 6871 - DNA, 372 bp, Homo sapiens; identical to SEQ ID NO: 491
  misc_feature 349: n = A,T,C or G

SEQ ID NO: 6872 - DNA, 253 bp, Homo sapiens; identical to SEQ ID NO: 492
  misc_feature 38, 121, 130, 212: n = A,T,C or G

SEQ ID NO: 6873 - DNA, 210 bp, Homo sapiens; identical to SEQ ID NO: 493

SEQ ID NO: 6874 - DNA, 185 bp, Homo sapiens; identical to SEQ ID NO: 494

SEQ ID NO: 6875 - DNA, 428 bp, Homo sapiens; identical to SEQ ID NO: 495
  misc_feature 3, 234: n = A,T,C or G

SEQ ID NO: 6876 - DNA, 430 bp, Homo sapiens; identical to SEQ ID NO: 496
  misc_feature 6, 406: n = A,T,C or G

SEQ ID NO: 6877 - DNA, 302 bp, Homo sapiens; identical to SEQ ID NO: 497
  misc_feature 233, 302: n = A,T,C or G

SEQ ID NO: 6878 - DNA, 236 bp, Homo sapiens; identical to SEQ ID NO: 498

SEQ ID NO: 6879 - DNA, 275 bp, Homo sapiens; identical to SEQ ID NO: 499

SEQ ID NO: 6880 - DNA, 371 bp, Homo sapiens; identical to SEQ ID NO: 501
  misc_feature 313: n = A,T,C or G

SEQ ID NO: 6881 - DNA, 395 bp, Homo sapiens; identical to SEQ ID NO: 502
  misc_feature 5, 257, 266: n = A,T,C or G

SEQ ID NO: 6882 - DNA, 379 bp, Homo sapiens; identical to SEQ ID NO: 503
  misc_feature 24: n = A,T,C or G

SEQ ID NO: 6883 - DNA, 494 bp, Homo sapiens; identical to SEQ ID NO: 504
  misc_feature 322, 368, 385, 400, 409, 427, 455, 460, 485: n = A,T,C or G

SEQ ID NO: 6884 - DNA, 312 bp, Homo sapiens; identical to SEQ ID NO: 506
  misc_feature 28, 32, 48, 50, 77, 79, 91, 108, 119, 142, 179, 182: n = A,T,C or G

SEQ ID NO: 6885 - DNA, 288 bp, Homo sapiens; identical to SEQ ID NO: 507
  misc_feature 9, 34, 47, 52, 83, 96, 116, 121, 122, 123, 124, 133, 152,231, 252: n = A,T,C or G

SEQ ID NO: 6886 - DNA, 284 bp, Homo sapiens; identical to SEQ ID NO: 508

SEQ ID NO: 6887 - DNA, 271 bp, Homo sapiens; identical to SEQ ID NO: 509

SEQ ID NO: 6888 - DNA, 290 bp, Homo sapiens; identical to SEQ ID NO: 510
  misc_feature 26, 27: n = A,T,C or G

SEQ ID NO: 6889 - DNA, 348 bp, Homo sapiens; identical to SEQ ID NO: 511
  misc_feature 201, 274, 290, 327, 334: n = A,T,C or G

SEQ ID NO: 6890 - DNA, 280 bp, Homo sapiens; identical to SEQ ID NO: 512
  misc_feature 280: n = A,T,C or G

SEQ ID NO: 6891 - DNA, 211 bp, Homo sapiens; identical to SEQ ID NO: 513

SEQ ID NO: 6892 - DNA, 292 bp, Homo sapiens; identical to SEQ ID NO: 514
  misc_feature 234: n = A,T,C or G

SEQ ID NO: 6893 - DNA, 393 bp, Homo sapiens; identical to SEQ ID NO: 515

SEQ ID NO: 6894 - DNA, 431 bp, Homo sapiens; identical to SEQ ID NO: 516
  misc_feature 192, 249, 280: n = A,T,C or G

SEQ ID NO: 6895 - DNA, 416 bp, Homo sapiens; identical to SEQ ID NO: 517
  misc_feature 130, 134, 142, 152, 212, 221, 223, 234, 247, 253, 267, 291,302, 306, 312, 327, 330, 336, 337, 362, 369, 375, 393, 402,403, 405, 406: n = A,T,C or G

SEQ ID NO: 6896 - DNA, 254 bp, Homo sapiens; identical to SEQ ID NO: 518

SEQ ID NO: 6897 - DNA, 403 bp, Homo sapiens; identical to SEQ ID NO: 519
  misc_feature 212, 253: n = A,T,C or G

SEQ ID NO: 6898 - DNA, 311 bp, Homo sapiens; identical to SEQ ID NO: 520

SEQ ID NO: 6899 - DNA, 285 bp, Homo sapiens; identical to SEQ ID NO: 521

SEQ ID NO: 6900 - DNA, 419 bp, Homo sapiens; identical to SEQ ID NO: 522
  misc_feature 378: n = A,T,C or G

SEQ ID NO: 6901 - DNA, 333 bp, Homo sapiens; identical to SEQ ID NO: 523
  misc_feature 3, 121, 141, 208, 251, 303: n = A,T,C or G

SEQ ID NO: 6902 - DNA, 305 bp, Homo sapiens; identical to SEQ ID NO: 524

SEQ ID NO: 6903 - DNA, 426 bp, Homo sapiens; identical to SEQ ID NO: 525

SEQ ID NO: 6904 - DNA, 324 bp, Homo sapiens; identical to SEQ ID NO: 526

SEQ ID NO: 6905 - DNA, 420 bp, Homo sapiens; identical to SEQ ID NO: 527
  misc_feature 372: n = A,T,C or G

SEQ ID NO: 6906 - DNA, 407 bp, Homo sapiens; identical to SEQ ID NO: 528

SEQ ID NO: 6907 - DNA, 446 bp, Homo sapiens; identical to SEQ ID NO: 529

SEQ ID NO: 6908 - DNA, 453 bp, Homo sapiens; identical to SEQ ID NO: 530

SEQ ID NO: 6909 - DNA, 310 bp, Homo sapiens; identical to SEQ ID NO: 531

SEQ ID NO: 6910 - DNA, 322 bp, Homo sapiens; identical to SEQ ID NO: 532

SEQ ID NO: 6911 - DNA, 342 bp, Homo sapiens; identical to SEQ ID NO: 533

SEQ ID NO: 6912 - DNA, 408 bp, Homo sapiens; identical to SEQ ID NO: 534
  misc_feature 25: n = A,T,C or G

SEQ ID NO: 6913 - DNA, 140 bp, Homo sapiens; identical to SEQ ID NO: 535

SEQ ID NO: 6914 - DNA, 453 bp, Homo sapiens; identical to SEQ ID NO: 536
  misc_feature 4, 208, 223, 236, 239, 242, 247, 253, 258, 271, 285, 289,290, 292, 293, 318, 322, 325, 330, 335, 336, 341, 343, 358,361, 367, 387, 392, 393, 394, 401, 408, 416, 419, 426, 429,431, 433, 435: n = A,T,C or G

SEQ ID NO: 6915 - DNA, 282 bp, Homo sapiens; identical to SEQ ID NO: 537
  misc_feature 22: n = A,T,C or G

SEQ ID NO: 6916 - DNA, 249 bp, Homo sapiens; identical to SEQ ID NO: 538
  misc_feature 222: n = A,T,C or G

SEQ ID NO: 6917 - DNA, 196 bp, Homo sapiens; identical to SEQ ID NO: 539

SEQ ID NO: 6918 - DNA, 322 bp, Homo sapiens; identical to SEQ ID NO: 540

SEQ ID NO: 6919 - DNA, 336 bp, Homo sapiens; identical to SEQ ID NO: 541
  misc_feature 4: n = A,T,C or G

SEQ ID NO: 6920 - DNA, 237 bp, Homo sapiens; identical to SEQ ID NO: 542
  misc_feature 235: n = A,T,C or G

SEQ ID NO: 6921 - DNA, 189 bp, Homo sapiens; identical to SEQ ID NO: 543
  misc_feature 20, 113: n = A,T,C or G

SEQ ID NO: 6922 - DNA, 296 bp, Homo sapiens; identical to SEQ ID NO: 544
  misc_feature 3, 16, 79, 94, 135, 136, 145, 151, 166: n = A,T,C or G

SEQ ID NO: 6923 - DNA, 442 bp, Homo sapiens; identical to SEQ ID NO: 545

SEQ ID NO: 6924 - DNA, 207 bp, Homo sapiens; identical to SEQ ID NO: 546
  misc_feature 17, 19, 20, 23, 30, 164, 202: n = A,T,C or G

SEQ ID NO: 6925 - DNA, 381 bp, Homo sapiens; identical to SEQ ID NO: 547
  misc_feature 12, 116: n = A,T,C or G

SEQ ID NO: 6926 - DNA, 111 bp, Homo sapiens; identical to SEQ ID NO: 548
  misc_feature 42, 63, 65: n = A,T,C or G

SEQ ID NO: 6927 - DNA, 366 bp, Homo sapiens; identical to SEQ ID NO: 549

SEQ ID NO: 6928 - DNA, 233 bp, Homo sapiens; identical to SEQ ID NO: 550
  misc_feature 197: n = A,T,C or G

SEQ ID NO: 6929 - DNA, 473 bp, Homo sapiens; identical to SEQ ID NO: 551
  misc_feature 14, 46, 68, 81, 149, 170, 332, 344, 456: n = A,T,C or G

SEQ ID NO: 6930 - DNA, 353 bp, Homo sapiens; identical to SEQ ID NO: 552
  misc_feature 31, 115, 121, 124, 128, 137, 193, 194, 202, 210, 283, 288,342: n = A,T,C or G

SEQ ID NO: 6931 - DNA, 350 bp, Homo sapiens; identical to SEQ ID NO: 553
  misc_feature 229, 302, 329: n = A,T,C or G

SEQ ID NO: 6932 - DNA, 179 bp, Homo sapiens; identical to SEQ ID NO: 554
  misc_feature 106, 163: n = A,T,C or G

SEQ ID NO: 6933 - DNA, 210 bp, Homo sapiens; identical to SEQ ID NO: 555
  misc_feature 18, 20, 161: n = A,T,C or G

SEQ ID NO: 6934 - DNA, 258 bp, Homo sapiens; identical to SEQ ID NO: 556
  misc_feature 134, 258: n = A,T,C or G

SEQ ID NO: 6935 - DNA, 329 bp, Homo sapiens; identical to SEQ ID NO: 557
  misc_feature 262: n = A,T,C or G

SEQ ID NO: 6936 - DNA, 304 bp, Homo sapiens; identical to SEQ ID NO: 558
  misc_feature 265: n = A,T,C or G

SEQ ID NO: 6937 - DNA, 366 bp, Homo sapiens; identical to SEQ ID NO: 559
  misc_feature 300: n = A,T,C or G

SEQ ID NO: 6938 - DNA, 207 bp, Homo sapiens; identical to SEQ ID NO: 560

SEQ ID NO: 6939 - DNA, 428 bp, Homo sapiens; identical to SEQ ID NO: 561
  misc_feature 193, 214, 308, 399: n = A,T,C or G

SEQ ID NO: 6940 - DNA, 383 bp, Homo sapiens; identical to SEQ ID NO: 562
  misc_feature 89, 128: n = A,T,C or G

SEQ ID NO: 6941 - DNA, 190 bp, Homo sapiens; identical to SEQ ID NO: 563
  misc_feature 17, 131: n = A,T,C or G

SEQ ID NO: 6942 - DNA, 464 bp, Homo sapiens; identical to SEQ ID NO: 564
  misc_feature 160, 192, 194, 290, 299, 302, 308, 322, 324, 343, 354, 357,380, 382, 397, 417, 420, 425, 426, 436: n = A,T,C or G

SEQ ID NO: 6943 - DNA, 415 bp, Homo sapiens; identical to SEQ ID NO: 565

SEQ ID NO: 6944 - DNA, 189 bp, Homo sapiens; identical to SEQ ID NO: 566

SEQ ID NO: 6945 - DNA, 315 bp, Homo sapiens; identical to SEQ ID NO: 567
  misc_feature 277: n = A,T,C or G

SEQ ID NO: 6946 - DNA, 401 bp, Homo sapiens; identical to SEQ ID NO: 568
  misc_feature 367, 368: n = A,T,C or G

SEQ ID NO: 6947 - DNA, 430 bp, Homo sapiens; identical to SEQ ID NO: 569
  misc_feature 59, 90, 109, 226, 256: n = A,T,C or G

SEQ ID NO: 6948 - DNA, 350 bp, Homo sapiens; identical to SEQ ID NO: 570
  misc_feature 175, 239: n = A,T,C or G

SEQ ID NO: 6949 - DNA, 254 bp, Homo sapiens; identical to SEQ ID NO: 571
  misc_feature 95, 109, 134, 181: n = A,T,C or G

SEQ ID NO: 6950 - DNA, 204 bp, Homo sapiens; identical to SEQ ID NO: 572
  misc_feature 8: n = A,T,C or G

SEQ ID NO: 6951 - DNA, 233 bp, Homo sapiens; identical to SEQ ID NO: 573

SEQ ID NO: 6952 - DNA, 242 bp, Homo sapiens; identical to SEQ ID NO: 574
  misc_feature 17, 55, 57, 94, 96, 121, 134, 147, 152, 153, 155, 164, 197,205, 220: n = A,T,C or G

SEQ ID NO: 6953 - DNA, 278 bp, Homo sapiens; identical to SEQ ID NO: 575
  misc_feature 252: n = A,T,C or G

SEQ ID NO: 6954 - DNA, 378 bp, Homo sapiens; identical to SEQ ID NO: 576
  misc_feature 7, 34, 74, 229: n = A,T,C or G

SEQ ID NO: 6955 - DNA, 177 bp, Homo sapiens; identical to SEQ ID NO: 577
  misc_feature 5: n = A,T,C or G

SEQ ID NO: 6956 - DNA, 141 bp, Homo sapiens; identical to SEQ ID NO: 578

SEQ ID NO: 6957 - DNA, 238 bp, Homo sapiens; identical to SEQ ID NO: 579

SEQ ID NO: 6958 - DNA, 352 bp, Homo sapiens; identical to SEQ ID NO: 580

SEQ ID NO: 6959 - DNA, 358 bp, Homo sapiens; identical to SEQ ID NO: 581

SEQ ID NO: 6960 - DNA, 267 bp, Homo sapiens; identical to SEQ ID NO: 582

SEQ ID NO: 6961 - DNA, 306 bp, Homo sapiens; identical to SEQ ID NO: 583

SEQ ID NO: 6962 - DNA, 279 bp, Homo sapiens; identical to SEQ ID NO: 584

SEQ ID NO: 6963 - DNA, 340 bp, Homo sapiens; identical to SEQ ID NO: 585

SEQ ID NO: 6964 - DNA, 307 bp, Homo sapiens; identical to SEQ ID NO: 586

SEQ ID NO: 6965 - DNA, 350 bp, Homo sapiens; identical to SEQ ID NO: 587

SEQ ID NO: 6966 - DNA, 338 bp, Homo sapiens; identical to SEQ ID NO: 588

SEQ ID NO: 6967 - DNA, 353 bp, Homo sapiens; identical to SEQ ID NO: 589

SEQ ID NO: 6968 - DNA, 354 bp, Homo sapiens; identical to SEQ ID NO: 590
  misc_feature 134: n = A,T,C or G

SEQ ID NO: 6969 - DNA, 314 bp, Homo sapiens; identical to SEQ ID NO: 591

SEQ ID NO: 6970 - DNA, 236 bp, Homo sapiens; identical to SEQ ID NO: 592

SEQ ID NO: 6971 - DNA, 360 bp, Homo sapiens; identical to SEQ ID NO: 593
  misc_feature 198, 335: n = A,T,C or G

SEQ ID NO: 6972 - DNA, 378 bp, Homo sapiens; identical to SEQ ID NO: 594

SEQ ID NO: 6973 - DNA, 359 bp, Homo sapiens; identical to SEQ ID NO: 595
  misc_feature 211, 325, 335: n = A,T,C or G

SEQ ID NO: 6974 - DNA, 144 bp, Homo sapiens; identical to SEQ ID NO: 596

SEQ ID NO: 6975 - DNA, 339 bp, Homo sapiens; identical to SEQ ID NO: 597

SEQ ID NO: 6976 - DNA, 319 bp, Homo sapiens; identical to SEQ ID NO: 598
  misc_feature 15, 195, 236, 250, 253, 266, 278, 279, 291, 304, 305: n = A,T,C or G

SEQ ID NO: 6977 - DNA, 147 bp, Homo sapiens; identical to SEQ ID NO: 599

SEQ ID NO: 6978 - DNA, 323 bp, Homo sapiens; identical to SEQ ID NO: 600
  misc_feature 188, 229, 264, 280, 282, 294, 295, 298, 304: n = A,T,C or G

SEQ ID NO: 6979 - DNA, 328 bp, Homo sapiens; identical to SEQ ID NO: 601
  misc_feature 200, 212, 237, 248, 256, 279, 292, 327: n = A,T,C or G

SEQ ID NO: 6980 - DNA, 380 bp, Homo sapiens; identical to SEQ ID NO: 603
  misc_feature 324, 343, 367: n = A,T,C or G

SEQ ID NO: 6981 - DNA, 279 bp, Homo sapiens; identical to SEQ ID NO: 604
  misc_feature 71, 200: n = A,T,C or G

SEQ ID NO: 6982 - DNA, 203 bp, Homo sapiens; identical to SEQ ID NO: 605
  misc_feature 14, 15, 203: n = A,T,C or G

SEQ ID NO: 6983 - DNA, 184 bp, Homo sapiens; identical to SEQ ID NO: 606

SEQ ID NO: 6984 - DNA, 336 bp, Homo sapiens; identical to SEQ ID NO: 607

SEQ ID NO: 6985 - DNA, 343 bp, Homo sapiens; identical to SEQ ID NO: 608

SEQ ID NO: 6986 - DNA, 314 bp, Homo sapiens; identical to SEQ ID NO: 609

SEQ ID NO: 6987 - DNA, 317 bp, Homo sapiens; identical to SEQ ID NO: 610

SEQ ID NO: 6988 - DNA, 343 bp, Homo sapiens; identical to SEQ ID NO: 611

SEQ ID NO: 6989 - DNA, 426 bp, Homo sapiens; identical to SEQ ID NO: 612
  misc_feature 291, 406, 407, 408, 413: n = A,T,C or G

SEQ ID NO: 6990 - DNA, 538 bp, Homo sapiens; identical to SEQ ID NO: 613
  misc_feature 172, 411, 458, 487, 489, 490, 519, 520: n = A,T,C or G

SEQ ID NO: 6991 - DNA, 468 bp, Homo sapiens; identical to SEQ ID NO: 614

SEQ ID NO: 6992 - DNA, 377 bp, Homo sapiens; identical to SEQ ID NO: 615
  misc_feature 344: n = A,T,C or G

SEQ ID NO: 6993 - DNA, 342 bp, Homo sapiens; identical to SEQ ID NO: 616
  misc_feature 219, 236, 280, 297: n = A,T,C or G

SEQ ID NO: 6994 - DNA, 470 bp, Homo sapiens; identical to SEQ ID NO: 617
  misc_feature 19, 347: n = A,T,C or G

SEQ ID NO: 6995 - DNA, 287 bp, Homo sapiens; identical to SEQ ID NO: 618
  misc_feature 24, 51, 65, 67, 75, 90, 245, 247: n = A,T,C or G

SEQ ID NO: 6996 - DNA, 180 bp, Homo sapiens; identical to SEQ ID NO: 619

SEQ ID NO: 6997 - DNA, 219 bp, Homo sapiens; identical to SEQ ID NO: 620

SEQ ID NO: 6998 - DNA, 394 bp, Homo sapiens; identical to SEQ ID NO: 621
  misc_feature 177, 266: n = A,T,C or G

SEQ ID NO: 6999 - DNA, 323 bp, Homo sapiens; identical to SEQ ID NO: 622
  misc_feature 1, 85, 194, 248: n = A,T,C or G

SEQ ID NO: 7000 - DNA, 322 bp, Homo sapiens; identical to SEQ ID NO: 623

SEQ ID NO: 7001 - DNA, 334 bp, Homo sapiens; identical to SEQ ID NO: 624
  misc_feature 70, 292, 313: n = A,T,C or G

SEQ ID NO: 7002 - DNA, 505 bp, Homo sapiens; identical to SEQ ID NO: 625

SEQ ID NO: 7003 - DNA, 493 bp, Homo sapiens; identical to SEQ ID NO: 626
  misc_feature 477: n = A,T,C or G

SEQ ID NO: 7004 - DNA, 483 bp, Homo sapiens; identical to SEQ ID NO: 627

SEQ ID NO: 7005 - DNA, 379 bp, Homo sapiens; identical to SEQ ID NO: 628
  misc_feature 192, 224, 284: n = A,T,C or G

SEQ ID NO: 7006 - DNA, 520 bp, Homo sapiens; identical to SEQ ID NO: 629
  misc_feature 3, 509: n = A,T,C or G

SEQ ID NO: 7007 - DNA, 419 bp, Homo sapiens; identical to SEQ ID NO: 630
  misc_feature 80, 85, 184, 238: n = A,T,C or G

SEQ ID NO: 7008 - DNA, 566 bp, Homo sapiens; identical to SEQ ID NO: 631
  misc_feature 57, 224, 329, 374, 391, 488, 491, 496, 527: n = A,T,C or G

SEQ ID NO: 7009 - DNA, 524 bp, Homo sapiens; identical to SEQ ID NO: 632

SEQ ID NO: 7010 - DNA, 433 bp, Homo sapiens; identical to SEQ ID NO: 633
  misc_feature 52, 61, 65: n = A,T,C or G

SEQ ID NO: 7011 - DNA, 537 bp, Homo sapiens; identical to SEQ ID NO: 634

SEQ ID NO: 7012 - DNA, 527 bp, Homo sapiens; identical to SEQ ID NO: 635
  misc_feature 486: n = A,T,C or G

SEQ ID NO: 7013 - DNA, 347 bp, Homo sapiens; identical to SEQ ID NO: 636

SEQ ID NO: 7014 - DNA, 376 bp, Homo sapiens; identical to SEQ ID NO: 637
  misc_feature 31, 338: n = A,T,C or G

SEQ ID NO: 7015 - DNA, 395 bp, Homo sapiens; identical to SEQ ID NO: 638

SEQ ID NO: 7016 - DNA, 386 bp, Homo sapiens; identical to SEQ ID NO: 639
  misc_feature 32, 35, 149: n = A,T,C or G

SEQ ID NO: 7017 - DNA, 394 bp, Homo sapiens; identical to SEQ ID NO: 640

SEQ ID NO: 7018 - DNA, 397 bp, Homo sapiens; identical to SEQ ID NO: 641
  misc_feature 35: n = A,T,C or G

SEQ ID NO: 7019 - DNA, 108 bp, Homo sapiens; identical to SEQ ID NO: 642
  misc_feature 25, 30, 33, 39: n = A,T,C or G

SEQ ID NO: 7020 - DNA, 260 bp, Homo sapiens; identical to SEQ ID NO: 643

SEQ ID NO: 7021 - DNA, 366 bp, Homo sapiens; identical to SEQ ID NO: 644

SEQ ID NO: 7022 - DNA, 331 bp, Homo sapiens; identical to SEQ ID NO: 645
  misc_feature 3: n = A,T,C or G

SEQ ID NO: 7023 - DNA, 356 bp, Homo sapiens; identical to SEQ ID NO: 646

SEQ ID NO: 7024 - DNA, 368 bp, Homo sapiens; identical to SEQ ID NO: 647
  misc_feature 7, 28, 29, 33, 34, 72, 179, 187, 190, 193, 200, 303, 315: n = A,T,C or G

SEQ ID NO: 7025 - DNA, 363 bp, Homo sapiens; identical to SEQ ID NO: 648

SEQ ID NO: 7026 - DNA, 353 bp, Homo sapiens; identical to SEQ ID NO: 649
  misc_feature 50, 93, 101, 172, 179, 224, 227, 228, 232, 234, 235, 249,254, 255, 261, 262, 273, 294, 298, 302, 305, 318, 319, 325,332: n = A,T,C or G

SEQ ID NO: 7027 - DNA, 392 bp, Homo sapiens; identical to SEQ ID NO: 650
  misc_feature 195, 220, 243, 246, 250, 254, 268, 270, 280, 291, 304, 327,337: n = A,T,C or G

SEQ ID NO: 7028 - DNA, 836 bp, Homo sapiens; identical to SEQ ID NO: 651
  misc_feature 163, 203, 217, 245, 261, 302, 356, 405, 437, 450, 487, 508,511, 516, 522, 545, 569, 572, 605, 606, 611, 622, 624, 627,646, 647, 653, 655, 667, 668, 681, 709, 727, 740, 746, 749,750, 754, 756, 763, 767, 768, 779, 781, 782, 783, 790: n = A,T,C or G
  misc_feature 805, 808, 815, 822, 835: n = A,T,C or G

SEQ ID NO: 7029 - DNA, 753 bp, Homo sapiens; identical to SEQ ID NO: 652
  misc_feature 210, 233, 238, 247, 253, 259, 266, 274, 315, 327, 335, 337,362, 366, 375, 424, 504, 509, 601, 620, 639, 665, 675, 683,687, 692, 694, 700, 728, 729, 731, 741: n = A,T,C or G

SEQ ID NO: 7030 - DNA, 567 bp, Homo sapiens; identical to SEQ ID NO: 653
  misc_feature 120, 121, 255, 264, 267, 272, 276, 280, 306, 307, 315, 325,370, 376, 540: n = A,T,C or G

SEQ ID NO: 7031 - DNA, 486 bp, Homo sapiens; identical to SEQ ID NO: 654
  misc_feature 2, 33, 123, 124, 129, 130, 131, 253, 255, 284, 295, 319,338, 352, 455, 469: n = A,T,C or G

SEQ ID NO: 7032 - DNA, 700 bp, Homo sapiens; identical to SEQ ID NO: 655
  misc_feature 120, 121, 252, 269, 292, 307, 309, 318, 345, 393, 440, 459,553, 660: n = A,T,C or G

SEQ ID NO: 7033 - DNA, 538 bp, Homo sapiens; identical to SEQ ID NO: 656
  misc_feature 258, 265, 304, 436, 452: n = A,T,C or G

SEQ ID NO: 7034 - DNA, 706 bp, Homo sapiens; identical to SEQ ID NO: 658
  misc_feature 30, 255, 262, 273, 279, 309, 313, 324, 513, 542, 567, 586,643, 672, 683: n = A,T,C or G

SEQ ID NO: 7035 - DNA, 463 bp, Homo sapiens; identical to SEQ ID NO: 659
  misc_feature 318, 328, 337, 352, 359, 372, 378, 386, 396, 401, 402, 403,407, 410, 411, 412, 418, 428, 430, 436, 438: n = A,T,C or G

SEQ ID NO: 7036 - DNA, 179 bp, Homo sapiens; identical to SEQ ID NO: 660
  misc_feature 84: n = A,T,C or G

SEQ ID NO: 7037 - DNA, 199 bp, Homo sapiens; identical to SEQ ID NO: 661
  misc_feature 22, 46: n = A,T,C or G

SEQ ID NO: 7038 - DNA, 411 bp, Homo sapiens; identical to SEQ ID NO: 662

SEQ ID NO: 7039 - DNA, 615 bp, Homo sapiens; identical to SEQ ID NO: 663
  misc_feature 62, 118, 234, 362, 383, 406, 417, 418, 447, 449, 460, 462,466, 475, 485, 519, 522, 523, 526, 539, 540, 543, 545, 559,563, 572, 574, 590, 591, 594, 595, 603: n = A,T,C or G

SEQ ID NO: 7040 - DNA, 326 bp, Homo sapiens; identical to SEQ ID NO: 664

SEQ ID NO: 7041 - DNA, 405 bp, Homo sapiens; identical to SEQ ID NO: 665

SEQ ID NO: 7042 - DNA, 613 bp, Homo sapiens; identical to SEQ ID NO: 666
  misc_feature 493, 528, 564, 594: n = A,T,C or G

SEQ ID NO: 7043 - DNA, 351 bp, Homo sapiens; identical to SEQ ID NO: 667

SEQ ID NO: 7044 - DNA, 399 bp, Homo sapiens; identical to SEQ ID NO: 668

SEQ ID NO: 7045 - DNA, 570 bp, Homo sapiens; identical to SEQ ID NO: 669

SEQ ID NO: 7046 - DNA, 357 bp, Homo sapiens; identical to SEQ ID NO: 670

SEQ ID NO: 7047 - DNA, 457 bp, Homo sapiens; identical to SEQ ID NO: 671

SEQ ID NO: 7048 - DNA, 302 bp, Homo sapiens; identical to SEQ ID NO: 672
  misc_feature 296: n = A,T,C or G

SEQ ID NO: 7049 - DNA, 297 bp, Homo sapiens; identical to SEQ ID NO: 673

SEQ ID NO: 7050 - DNA, 334 bp, Homo sapiens; identical to SEQ ID NO: 674

SEQ ID NO: 7051 - DNA, 240 bp, Homo sapiens; identical to SEQ ID NO: 675
  misc_feature 4, 205: n = A,T,C or G

SEQ ID NO: 7052 - DNA, 200 bp, Homo sapiens; identical to SEQ ID NO: 676
  misc_feature 38, 188: n = A,T,C or G

SEQ ID NO: 7053 - DNA, 410 bp, Homo sapiens; identical to SEQ ID NO: 677
  misc_feature 24, 48: n = A,T,C or G

SEQ ID NO: 7054 - DNA, 511 bp, Homo sapiens; identical to SEQ ID NO: 678
  misc_feature 348, 359, 467, 482, 496: n = A,T,C or G

SEQ ID NO: 7055 - DNA, 482 bp, Homo sapiens; identical to SEQ ID NO: 679
  misc_feature 421, 430, 435: n = A,T,C or G

SEQ ID NO: 7056 - DNA, 324 bp, Homo sapiens; identical to SEQ ID NO: 680

SEQ ID NO: 7057 - DNA, 310 bp, Homo sapiens; identical to SEQ ID NO: 681

SEQ ID NO: 7058 - DNA, 364 bp, Homo sapiens; identical to SEQ ID NO: 682
  misc_feature 231, 302, 307, 309, 315, 326, 339, 351: n = A,T,C or G

SEQ ID NO: 7059 - DNA, 516 bp, Homo sapiens; identical to SEQ ID NO: 683

SEQ ID NO: 7060 - DNA, 419 bp, Homo sapiens; identical to SEQ ID NO: 684
  misc_feature 143, 145, 170, 193, 195, 197, 204, 205, 211, 212, 228, 243,246, 268, 289, 302, 304, 308, 310, 312, 320, 323, 330, 333,338, 344, 347, 349, 350, 366, 372, 381, 383, 384, 385, 391,402: n = A,T,C or G

SEQ ID NO: 7061 - DNA, 304 bp, Homo sapiens; identical to SEQ ID NO: 685

SEQ ID NO: 7062 - DNA, 323 bp, Homo sapiens; identical to SEQ ID NO: 686
  misc_feature 86: n = A,T,C or G

SEQ ID NO: 7063 - DNA, 482 bp, Homo sapiens; identical to SEQ ID NO: 687
  misc_feature 79, 208, 297, 361, 370, 452: n = A,T,C or G

SEQ ID NO: 7064 - DNA, 283 bp, Homo sapiens; identical to SEQ ID NO: 688
  misc_feature 1, 80: n = A,T,C or G

SEQ ID NO: 7065 - DNA, 177 bp, Homo sapiens; identical to SEQ ID NO: 689

SEQ ID NO: 7066 - DNA, 413 bp, Homo sapiens; identical to SEQ ID NO: 690

SEQ ID NO: 7067 - DNA, 462 bp, Homo sapiens; identical to SEQ ID NO: 691
  misc_feature 1: n = A,T,C or G

SEQ ID NO: 7068 - DNA, 579 bp, Homo sapiens; identical to SEQ ID NO: 692
  misc_feature 68, 74, 116, 154, 181, 295, 463, 495, 498, 501, 503, 518,536: n = A,T,C or G

SEQ ID NO: 7069 - DNA, 387 bp, Homo sapiens; identical to SEQ ID NO: 693
  misc_feature 3, 38, 50, 205: n = A,T,C or G

SEQ ID NO: 7070 - DNA, 331 bp, Homo sapiens; identical to SEQ ID NO: 694
  misc_feature 128, 246: n = A,T,C or G

SEQ ID NO: 7071 - DNA, 428 bp, Homo sapiens; identical to SEQ ID NO: 695
  misc_feature 59: n = A,T,C or G

SEQ ID NO: 7072 - DNA, 365 bp, Homo sapiens; identical to SEQ ID NO: 696
  misc_feature 120, 158: n = A,T,C or G

SEQ ID NO: 7073 - DNA, 501 bp, Homo sapiens; identical to SEQ ID NO: 697
  misc_feature 198, 444, 446: n = A,T,C or G

SEQ ID NO: 7074 - DNA, 544 bp, Homo sapiens; identical to SEQ ID NO: 698
  misc_feature 55, 59, 64, 67, 80, 82, 93, 95, 111, 113, 120, 128, 131,137, 138, 150, 158, 159, 219, 233, 235, 236, 244, 247, 256,267, 269, 275, 298, 318, 324, 383, 386, 412, 414, 422, 430,457, 460, 462, 472, 485, 518, 519, 526: n = A,T,C or G

SEQ ID NO: 7075 - DNA, 444 bp, Homo sapiens; identical to SEQ ID NO: 699

SEQ ID NO: 7076 - DNA, 500 bp, Homo sapiens; identical to SEQ ID NO: 700

SEQ ID NO: 7077 - DNA, 580 bp, Homo sapiens; identical to SEQ ID NO: 701
  misc_feature 298, 331: n = A,T,C or G

SEQ ID NO: 7078 - DNA, 728 bp, Homo sapiens; identical to SEQ ID NO: 702
  misc_feature 18, 32, 78, 107, 158, 171, 185, 197, 208, 209, 240, 244,341, 382, 402, 403, 487, 488, 499, 507, 510, 514, 530, 541,580, 585, 615, 618, 647, 648, 651, 663, 664, 667, 668, 669,673, 678, 691, 715, 720: n = A,T,C or G

SEQ ID NO: 7079 - DNA, 409 bp, Homo sapiens; identical to SEQ ID NO: 703
  misc_feature 32, 233, 338, 384: n = A,T,C or G

SEQ ID NO: 7080 - DNA, 412 bp, Homo sapiens; identical to SEQ ID NO: 704

SEQ ID NO: 7081 - DNA, 355 bp, Homo sapiens; identical to SEQ ID NO: 705
  misc_feature 249: n = A,T,C or G

SEQ ID NO: 7082 - DNA, 258 bp, Homo sapiens; identical to SEQ ID NO: 706
  misc_feature 1, 8, 16, 36, 57, 93, 123, 134, 202, 239, 246: n = A,T,C or G

SEQ ID NO: 7083 - DNA, 394 bp, Homo sapiens; identical to SEQ ID NO: 707

SEQ ID NO: 7084 - DNA, 472 bp, Homo sapiens; identical to SEQ ID NO: 708
  misc_feature 108: n = A,T,C or G

SEQ ID NO: 7085 - DNA, 544 bp, Homo sapiens; identical to SEQ ID NO: 709
  misc_feature 437: n = A,T,C or G

SEQ ID NO: 7086 - DNA, 463 bp, Homo sapiens; identical to SEQ ID NO: 710

SEQ ID NO: 7087 - DNA, 359 bp, Homo sapiens; identical to SEQ ID NO: 711
  misc_feature 171: n = A,T,C or G

SEQ ID NO: 7088 - DNA, 329 bp, Homo sapiens; identical to SEQ ID NO: 712
  misc_feature 1, 7: n = A,T,C or G

SEQ ID NO: 7089 - DNA, 354 bp, Homo sapiens; identical to SEQ ID NO: 713

SEQ ID NO: 7090 - DNA, 526 bp, Homo sapiens; identical to SEQ ID NO: 714
  misc_feature 103, 105, 106, 109, 110, 140, 180, 190, 212, 216, 227, 241,243, 304, 310, 343, 368, 400, 406, 408, 421, 427, 431, 432,462, 478, 503, 504, 510: n = A,T,C or G

SEQ ID NO: 7091 - DNA, 400 bp, Homo sapiens; identical to SEQ ID NO: 715
  misc_feature 126, 165, 186, 211, 215, 232, 243, 316, 345, 353, 386: n = A,T,C or G

SEQ ID NO: 7092 - DNA, 553 bp, Homo sapiens; identical to SEQ ID NO: 716
  misc_feature 111, 115, 117, 126, 127, 175, 179, 211, 212, 224, 242, 250,270, 282, 290, 332, 345, 378, 403, 408, 415, 433, 450, 451,461, 493, 510, 520, 527: n = A,T,C or G

SEQ ID NO: 7093 - DNA, 385 bp, Homo sapiens; identical to SEQ ID NO: 717
  misc_feature 122, 132, 208, 255, 317, 336, 343, 357, 371, 373, 384: n = A,T,C or G

SEQ ID NO: 7094 - DNA, 443 bp, Homo sapiens; identical to SEQ ID NO: 718
  misc_feature 411: n = A,T,C or G

SEQ ID NO: 7095 - DNA, 420 bp, Homo sapiens; identical to SEQ ID NO: 719
  misc_feature 113, 130, 198, 213, 229, 263, 265, 320, 385, 396: n = A,T,C or G

SEQ ID NO: 7096 - DNA, 328 bp, Homo sapiens; identical to SEQ ID NO: 720

SEQ ID NO: 7097 - DNA, 496 bp, Homo sapiens; identical to SEQ ID NO: 721
  misc_feature 62, 68, 432, 470: n = A,T,C or G

SEQ ID NO: 7098 - DNA, 306 bp, Homo sapiens; identical to SEQ ID NO: 722
  misc_feature 262, 295: n = A,T,C or G

SEQ ID NO: 7099 - DNA, 414 bp, Homo sapiens; identical to SEQ ID NO: 723

SEQ ID NO: 7100 - DNA, 316 bp, Homo sapiens; identical to SEQ ID NO: 724
  misc_feature 169, 233, 242, 261, 275, 288, 297, 305: n = A,T,C or G

SEQ ID NO: 7101 - DNA, 367 bp, Homo sapiens; identical to SEQ ID NO: 725
  misc_feature 6: n = A,T,C or G

SEQ ID NO: 7102 - DNA, 375 bp, Homo sapiens; identical to SEQ ID NO: 726
  misc_feature 37: n = A,T,C or G

SEQ ID NO: 7103 - DNA, 544 bp, Homo sapiens; identical to SEQ ID NO: 728
  misc_feature 210, 330, 375, 445, 457, 464, 472, 479, 484, 500, 509, 518,520, 533: n = A,T,C or G

SEQ ID NO: 7104 - DNA, 491 bp, Homo sapiens; identical to SEQ ID NO: 729
  misc_feature 329, 407: n = A,T,C or G

SEQ ID NO: 7105 - DNA, 351 bp, Homo sapiens; identical to SEQ ID NO: 730

SEQ ID NO: 7106 - DNA, 451 bp, Homo sapiens; identical to SEQ ID NO: 731
  misc_feature 76, 121, 173, 209, 276, 310, 369, 376, 383, 384: n = A,T,C or G

SEQ ID NO: 7107 - DNA, 536 bp, Homo sapiens; identical to SEQ ID NO: 732
  misc_feature 482, 513: n = A,T,C or G

SEQ ID NO: 7108 - DNA, 233 bp, Homo sapiens; identical to SEQ ID NO: 733
  misc_feature 20, 133, 155, 170: n = A,T,C or G

SEQ ID NO: 7109 - DNA, 390 bp, Homo sapiens; identical to SEQ ID NO: 734
  misc_feature 108, 233, 349: n = A,T,C or G

SEQ ID NO: 7110 - DNA, 219 bp, Homo sapiens; identical to SEQ ID NO: 735
  misc_feature 107, 111, 156: n = A,T,C or G

SEQ ID NO: 7111 - DNA, 490 bp, Homo sapiens; identical to SEQ ID NO: 736
  misc_feature 100, 109, 424: n = A,T,C or G

SEQ ID NO: 7112 - DNA, 443 bp, Homo sapiens; identical to SEQ ID NO: 737
  misc_feature 2, 101: n = A,T,C or G

SEQ ID NO: 7113 - DNA, 353 bp, Homo sapiens; identical to SEQ ID NO: 738
  misc_feature 49, 88, 93, 183, 274, 336, 338, 341: n = A,T,C or G

SEQ ID NO: 7114 - DNA, 292 bp, Homo sapiens; identical to SEQ ID NO: 739
  misc_feature 288: n = A,T,C or G

SEQ ID NO: 7115 - DNA, 501 bp, Homo sapiens; identical to SEQ ID NO: 740
  misc_feature 80: n = A,T,C or G

SEQ ID NO: 7116 - DNA, 284 bp, Homo sapiens; identical to SEQ ID NO: 742
  misc_feature 105: n = A,T,C or G

SEQ ID NO: 7117 - DNA, 464 bp, Homo sapiens; identical to SEQ ID NO: 743

SEQ ID NO: 7118 - DNA, 244 bp, Homo sapiens; identical to SEQ ID NO: 744
  misc_feature 147: n = A,T,C or G

SEQ ID NO: 7119 - DNA, 374 bp, Homo sapiens; identical to SEQ ID NO: 745
  misc_feature 63, 272, 364, 367: n = A,T,C or G

SEQ ID NO: 7120 - DNA, 340 bp, Homo sapiens; identical to SEQ ID NO: 746
  misc_feature 11, 47, 61, 120, 123, 130, 166, 196, 212, 228, 271, 272, 291: n = A,T,C or G

SEQ ID NO: 7121 - DNA, 443 bp, Homo sapiens; identical to SEQ ID NO: 747
  misc_feature 7, 78, 402, 414, 416: n = A,T,C or G

SEQ ID NO: 7122 - DNA, 470 bp, Homo sapiens; identical to SEQ ID NO: 748
  misc_feature 325, 331, 338, 339, 342, 357, 358, 359, 361, 362, 363, 364,385, 399, 422, 424, 436, 451, 453, 458, 460: n = A,T,C or G

SEQ ID NO: 7123 - DNA, 346 bp, Homo sapiens; identical to SEQ ID NO: 749
  misc_feature 30, 38, 39, 40, 96, 109, 141, 159, 162, 163, 187, 293, 295: n = A,T,C or G

SEQ ID NO: 7124 - DNA, 374 bp, Homo sapiens; identical to SEQ ID NO: 750

SEQ ID NO: 7125 - DNA, 377 bp, Homo sapiens; identical to SEQ ID NO: 752

SEQ ID NO: 7126 - DNA, 338 bp, Homo sapiens; identical to SEQ ID NO: 753

SEQ ID NO: 7127 - DNA, 376 bp, Homo sapiens; identical to SEQ ID NO: 754

SEQ ID NO: 7128 - DNA, 323 bp, Homo sapiens; identical to SEQ ID NO: 755
  misc_feature 12, 23, 28, 37, 40, 41, 57, 192: n = A,T,C or G

SEQ ID NO: 7129 - DNA, 358 bp, Homo sapiens; identical to SEQ ID NO: 756
  misc_feature 27, 29: n = A,T,C or G

SEQ ID NO: 7130 - DNA, 365 bp, Homo sapiens; identical to SEQ ID NO: 757
  misc_feature 29: n = A,T,C or G

SEQ ID NO: 7131 - DNA, 420 bp, Homo sapiens; identical to SEQ ID NO: 758
  misc_feature 175, 190, 199, 201, 212, 214, 220, 221, 233, 238, 244, 247,256, 305, 306, 308, 309, 318, 329, 331, 340, 343, 346, 348,350, 356, 359, 363, 366, 371, 373, 375, 377, 378, 384, 387,391, 393, 396, 410: n = A,T,C or G

SEQ ID NO: 7132 - DNA, 259 bp, Homo sapiens; identical to SEQ ID NO: 759
  misc_feature 58, 62, 64, 78, 81, 224, 246, 247: n = A,T,C or G

SEQ ID NO: 7133 - DNA, 478 bp, Homo sapiens; identical to SEQ ID NO: 760
  misc_feature 403, 408, 410, 416, 430, 448, 453, 462, 467: n = A,T,C or G

SEQ ID NO: 7134 - DNA, 498 bp, Homo sapiens; identical to SEQ ID NO: 761
  misc_feature 100: n = A,T,C or G

SEQ ID NO: 7135 - DNA, 457 bp, Homo sapiens; identical to SEQ ID NO: 762
  misc_feature 98, 104, 107, 122, 128, 149, 163, 171, 218, 223, 242, 246,249, 288, 289, 295, 297, 306, 314, 321, 322, 325, 335, 348,391, 402, 405, 408, 413, 423, 425, 429, 430, 433: n = A,T,C or G

SEQ ID NO: 7136 - DNA, 424 bp, Homo sapiens; identical to SEQ ID NO: 763
  misc_feature 13, 66, 82: n = A,T,C or G

SEQ ID NO: 7137 - DNA, 208 bp, Homo sapiens; identical to SEQ ID NO: 764
  misc_feature 58: n = A,T,C or G

SEQ ID NO: 7138 - DNA, 467 bp, Homo sapiens; identical to SEQ ID NO: 765

SEQ ID NO: 7139 - DNA, 313 bp, Homo sapiens; identical to SEQ ID NO: 766
  misc_feature 4: n = A,T,C or G

SEQ ID NO: 7140 - DNA, 289 bp, Homo sapiens; identical to SEQ ID NO: 767
  misc_feature 230, 244, 248, 260, 262, 271: n = A,T,C or G

SEQ ID NO: 7141 - DNA, 337 bp, Homo sapiens; identical to SEQ ID NO: 768
  misc_feature 333: n = A,T,C or G

SEQ ID NO: 7142 - DNA, 293 bp, Homo sapiens; identical to SEQ ID NO: 769
  misc_feature 5, 261, 265, 276, 288, 289, 291, 293: n = A,T,C or G

SEQ ID NO: 7143 - DNA, 507 bp, Homo sapiens; identical to SEQ ID NO: 770
  misc_feature 77, 289, 402, 489: n = A,T,C or G

SEQ ID NO: 7144 - DNA, 444 bp, Homo sapiens; identical to SEQ ID NO: 771
  misc_feature 22, 294, 408: n = A,T,C or G

SEQ ID NO: 7145 - DNA, 381 bp, Homo sapiens; identical to SEQ ID NO: 772
  misc_feature 1: n = A,T,C or G

SEQ ID NO: 7146 - DNA, 325 bp, Homo sapiens; identical to SEQ ID NO: 773

SEQ ID NO: 7147 - DNA, 355 bp, Homo sapiens; identical to SEQ ID NO: 774
  misc_feature 256, 270: n = A,T,C or G

SEQ ID NO: 7148 - DNA, 462 bp, Homo sapiens; identical to SEQ ID NO: 775

SEQ ID NO: 7149 - DNA, 214 bp, Homo sapiens; identical to SEQ ID NO: 776

SEQ ID NO: 7150 - DNA, 408 bp, Homo sapiens; identical to SEQ ID NO: 777
  misc_feature 13, 330, 401: n = A,T,C or G

SEQ ID NO: 7151 - DNA, 275 bp, Homo sapiens; identical to SEQ ID NO: 778
  misc_feature 217, 227, 234, 243, 254: n = A,T,C or G

SEQ ID NO: 7152 - DNA, 304 bp, Homo sapiens; identical to SEQ ID NO: 779

SEQ ID NO: 7153 - DNA, 287 bp, Homo sapiens; identical to SEQ ID NO: 780
  misc_feature 2: n = A,T,C or G

SEQ ID NO: 7154 - DNA, 449 bp, Homo sapiens; identical to SEQ ID NO: 781
  misc_feature 91, 292, 304, 309, 310, 311, 318, 321, 327, 328, 329, 333,335, 336, 337, 343, 347, 358, 359, 360, 363, 364, 365, 374,375, 376, 395, 417: n = A,T,C or G

SEQ ID NO: 7155 - DNA, 283 bp, Homo sapiens; identical to SEQ ID NO: 782
  misc_feature 1: n = A,T,C or G

SEQ ID NO: 7156 - DNA, 246 bp, Homo sapiens; identical to SEQ ID NO: 783
  misc_feature 2, 31, 79: n = A,T,C or G

SEQ ID NO: 7157 - DNA, 510 bp, Homo sapiens; identical to SEQ ID NO: 784
  misc_feature 490: n = A,T,C or G

SEQ ID NO: 7158 - DNA, 285 bp, Homo sapiens; identical to SEQ ID NO: 785
  misc_feature 74, 90, 91, 147, 175: n = A,T,C or G

SEQ ID NO: 7159 - DNA, 276 bp, Homo sapiens; identical to SEQ ID NO: 786
  misc_feature 39, 44, 69, 95, 166, 210, 217, 237, 251, 252, 260, 264: n = A,T,C or G

SEQ ID NO: 7160 - DNA, 302 bp, Homo sapiens; identical to SEQ ID NO: 787
  misc_feature 41, 47, 279: n = A,T,C or G

SEQ ID NO: 7161 - DNA, 423 bp, Homo sapiens; identical to SEQ ID NO: 788
  misc_feature 3, 31, 33, 40, 201, 233, 318, 412, 414, 419: n = A,T,C or G

SEQ ID NO: 7162 - DNA, 350 bp, Homo sapiens; identical to SEQ ID NO: 789
  misc_feature 238, 290: n = A,T,C or G

SEQ ID NO: 7163 - DNA, 263 bp, Homo sapiens; identical to SEQ ID NO: 790

SEQ ID NO: 7164 - DNA, 463 bp, Homo sapiens; identical to SEQ ID NO: 791
  misc_feature 15, 17, 20, 59, 424: n = A,T,C or G

SEQ ID NO: 7165 - DNA, 395 bp, Homo sapiens; identical to SEQ ID NO: 793
  misc_feature 338, 344, 345, 346: n = A,T,C or G

SEQ ID NO: 7166 - DNA, 666 bp, Homo sapiens; identical to SEQ ID NO: 794
  misc_feature 3, 20, 21, 64, 65, 69, 75, 77, 86, 87, 91, 92, 97, 98, 112,115, 124, 130, 132, 136, 143, 152, 162, 163, 164, 186, 191,193, 195, 197, 198, 200, 204, 207, 208, 219, 226, 241, 242,247, 251, 252, 253, 259, 260, 264, 269, 270, 274, 277: n = A,T,C or G
  misc_feature 284, 285, 291, 292, 297, 303, 309, 310, 312, 318, 319, 323,324, 326, 330, 331, 332, 354, 361, 376, 389, 400, 405, 411,412, 413, 416, 418, 431, 432, 434, 435, 446, 462, 473, 478,479, 485, 489, 492, 496, 498, 499, 504, 508, 512, 514: n = A,T,C or G
  misc_feature 518, 520, 525, 526, 533, 538, 539, 540, 549, 551, 563, 580,585, 590, 594, 597, 606, 613, 617, 619, 624, 630, 642, 649,650, 652, 664: n = A,T,C or G

SEQ ID NO: 7167 - DNA, 362 bp, Homo sapiens; identical to SEQ ID NO: 795
  misc_feature 264, 292, 316, 322, 323, 324, 325, 326, 338: n = A,T,C or G

SEQ ID NO: 7168 - DNA, 536 bp, Homo sapiens; identical to SEQ ID NO: 796
  misc_feature 25, 37, 41, 43, 46, 51, 58, 62, 67, 71, 75, 77, 79, 98, 108,117, 120, 126, 133, 134, 135, 137, 138, 141, 142, 149, 151,162, 163, 165, 214, 263, 273, 276, 278, 332, 335, 357, 360,364, 367, 377, 383, 385, 416, 430, 442, 451, 452: n = A,T,C or G
  misc_feature 455, 464, 465, 475, 481: n = A,T,C or G

SEQ ID NO: 7169 - DNA, 310 bp, Homo sapiens; identical to SEQ ID NO: 797

SEQ ID NO: 7170 - DNA, 529 bp, Homo sapiens; identical to SEQ ID NO: 798
  misc_feature 26, 27, 54, 55, 137, 139, 324, 331, 332, 333, 353, 369, 376,378, 382, 398, 399, 403, 412, 414, 421, 422, 423, 435, 437,444, 448, 465, 466, 467, 472, 478, 481, 486, 491, 499, 505,506, 514, 516: n = A,T,C or G

SEQ ID NO: 7171 - DNA, 224 bp, Homo sapiens; identical to SEQ ID NO: 799
  misc_feature 197, 208: n = A,T,C or G

SEQ ID NO: 7172 - DNA, 228 bp, Homo sapiens; identical to SEQ ID NO: 800
  misc_feature 6, 20, 52, 66: n = A,T,C or G

SEQ ID NO: 7173 - DNA, 378 bp, Homo sapiens; identical to SEQ ID NO: 801
  misc_feature 210, 301, 322, 340, 350, 369: n = A,T,C or G

SEQ ID NO: 7174 - DNA, 474 bp, Homo sapiens; identical to SEQ ID NO: 802

SEQ ID NO: 7175 - DNA, 299 bp, Homo sapiens; identical to SEQ ID NO: 803
  misc_feature 252, 292: n = A,T,C or G

SEQ ID NO: 7176 - DNA, 488 bp, Homo sapiens; identical to SEQ ID NO: 804
  misc_feature 20, 463: n = A,T,C or G

SEQ ID NO: 7177 - DNA, 458 bp, Homo sapiens; identical to SEQ ID NO: 805
  misc_feature 340, 402, 456: n = A,T,C or G

SEQ ID NO: 7178 - DNA, 298 bp, Homo sapiens; identical to SEQ ID NO: 806
  misc_feature 2, 30, 64: n = A,T,C or G

SEQ ID NO: 7179 - DNA, 321 bp, Homo sapiens; identical to SEQ ID NO: 807
  misc_feature 4, 24, 50, 51, 309: n = A,T,C or G

SEQ ID NO: 7180 - DNA, 362 bp, Homo sapiens; identical to SEQ ID NO: 808

SEQ ID NO: 7181 - DNA, 144 bp, Homo sapiens; identical to SEQ ID NO: 809
  misc_feature 17, 40, 41, 43, 61, 62, 71, 73, 77, 80, 102, 109, 110, 113: n = A,T,C or G

SEQ ID NO: 7182 - DNA, 264 bp, Homo sapiens; identical to SEQ ID NO: 810
  misc_feature 21, 127, 200, 243, 246: n = A,T,C or G

SEQ ID NO: 7183 - DNA, 243 bp, Homo sapiens; identical to SEQ ID NO: 811
  misc_feature 204, 206: n = A,T,C or G

SEQ ID NO: 7184 - DNA, 415 bp, Homo sapiens; identical to SEQ ID NO: 812
  misc_feature 3, 16: n = A,T,C or G

SEQ ID NO: 7185 - DNA, 393 bp, Homo sapiens; identical to SEQ ID NO: 813

SEQ ID NO: 7186 - DNA, 445 bp, Homo sapiens; identical to SEQ ID NO: 814

SEQ ID NO: 7187 - DNA, 437 bp, Homo sapiens; identical to SEQ ID NO: 815

SEQ ID NO: 7188 - DNA, 336 bp, Homo sapiens; identical to SEQ ID NO: 816

SEQ ID NO: 7189 - DNA, 403 bp, Homo sapiens; identical to SEQ ID NO: 817
  misc_feature 27, 72, 77, 103: n = A,T,C or G

SEQ ID NO: 7190 - DNA, 118 bp, Homo sapiens; identical to SEQ ID NO: 818
  misc_feature 26, 79, 92, 96, 104: n = A,T,C or G

SEQ ID NO: 7191 - DNA, 401 bp, Homo sapiens; identical to SEQ ID NO: 819
  misc_feature 50, 52, 293, 294, 295, 314, 345, 364, 367, 377, 381, 382,386, 390: n = A,T,C or G

SEQ ID NO: 7192 - DNA, 355 bp, Homo sapiens; identical to SEQ ID NO: 820
  misc_feature 8, 66: n = A,T,C or G

SEQ ID NO: 7193 - DNA, 381 bp, Homo sapiens; identical to SEQ ID NO: 821
  misc_feature 227, 241, 258, 260, 261, 262, 273, 288, 289, 300, 302, 304,317, 319, 321, 322, 323, 325, 326, 328, 331, 332, 345, 350,351, 362, 364: n = A,T,C or G

SEQ ID NO: 7194 - DNA, 422 bp, Homo sapiens; identical to SEQ ID NO: 822
  misc_feature 273, 286, 298, 387: n = A,T,C or G

SEQ ID NO: 7195 - DNA, 417 bp, Homo sapiens; identical to SEQ ID NO: 823

SEQ ID NO: 7196 - DNA, 526 bp, Homo sapiens; identical to SEQ ID NO: 824
  misc_feature 508: n = A,T,C or G

SEQ ID NO: 7197 - DNA, 316 bp, Homo sapiens; identical to SEQ ID NO: 825
  misc_feature 304: n = A,T,C or G

SEQ ID NO: 7198 - DNA, 261 bp, Homo sapiens; identical to SEQ ID NO: 826
  misc_feature 4, 5, 67, 68: n = A,T,C or G

SEQ ID NO: 7199 - DNA, 437 bp, Homo sapiens; identical to SEQ ID NO: 827
  misc_feature 2: n = A,T,C or G

SEQ ID NO: 7200 - DNA, 411 bp, Homo sapiens; identical to SEQ ID NO: 828
  misc_feature 209, 217, 223, 238, 347: n = A,T,C or G

SEQ ID NO: 7201 - DNA, 348 bp, Homo sapiens; identical to SEQ ID NO: 829
  misc_feature 21, 194, 234, 284, 287, 292, 303: n = A,T,C or G

SEQ ID NO: 7202 - DNA, 441 bp, Homo sapiens; identical to SEQ ID NO: 830

SEQ ID NO: 7203 - DNA, 192 bp, Homo sapiens; identical to SEQ ID NO: 831

SEQ ID NO: 7204 - DNA, 469 bp, Homo sapiens; identical to SEQ ID NO: 832
  misc_feature 10, 298, 308, 343, 348, 373, 384, 394, 396, 399, 406, 424,437, 457, 463: n = A,T,C or G

SEQ ID NO: 7205 - DNA, 302 bp, Homo sapiens; identical to SEQ ID NO: 833
  misc_feature 6, 52, 53: n = A,T,C or G

SEQ ID NO: 7206 - DNA, 363 bp, Homo sapiens; identical to SEQ ID NO: 834

SEQ ID NO: 7207 - DNA, 503 bp, Homo sapiens; identical to SEQ ID NO: 835

SEQ ID NO: 7208 - DNA, 492 bp, Homo sapiens; identical to SEQ ID NO: 836
  misc_feature 2, 5, 27, 453: n = A,T,C or G

SEQ ID NO: 7209 - DNA, 164 bp, Homo sapiens; identical to SEQ ID NO: 837
  misc_feature 1, 14, 19, 33, 37, 77: n = A,T,C or G

SEQ ID NO: 7210 - DNA, 188 bp, Homo sapiens; identical to SEQ ID NO: 838
  misc_feature 51, 55: n = A,T,C or G

SEQ ID NO: 7211 - DNA, 645 bp, Homo sapiens; identical to SEQ ID NO: 839
  misc_feature 18, 565, 579: n = A,T,C or G

SEQ ID NO: 7212 - DNA, 497 bp, Homo sapiens; identical to SEQ ID NO: 840
  misc_feature 18, 22, 38, 39, 53, 57, 63, 68, 82, 83, 108, 116, 119, 126,127, 135, 137, 140, 141, 142, 146, 148, 151, 152, 153, 155,167, 170, 171, 190, 193, 195, 196, 218, 230, 242, 243, 253,257, 268, 275, 276, 277, 280, 281, 293, 296, 304, 309: n = A,T,C or G
  misc_feature 312, 313, 315, 316, 317, 324, 328, 329, 330, 334, 336, 338,339, 343, 346, 347, 348, 358, 359, 360, 363, 370, 371, 378,382, 383, 388, 389, 391, 392, 410, 412, 416, 420, 426, 429,431, 432, 433, 443, 447, 458, 459, 460, 463, 467, 470: n = A,T,C or G
  misc_feature 473, 475, 476, 477, 480, 481, 482, 483, 484, 496: n = A,T,C or G

SEQ ID NO: 7213 - DNA, 345 bp, Homo sapiens; identical to SEQ ID NO: 841

SEQ ID NO: 7214 - DNA, 485 bp, Homo sapiens; identical to SEQ ID NO: 842
  misc_feature 15, 60, 100, 103, 109, 113, 135, 139, 148, 157, 199, 208,230, 236, 245, 247: n = A,T,C or G

SEQ ID NO: 7215 - DNA, 442 bp, Homo sapiens; identical to SEQ ID NO: 843
  misc_feature 396: n = A,T,C or G

SEQ ID NO: 7216 - DNA, 329 bp, Homo sapiens; identical to SEQ ID NO: 844
  misc_feature 104, 181, 289: n = A,T,C or G

SEQ ID NO: 7217 - DNA, 339 bp, Homo sapiens; identical to SEQ ID NO: 845

SEQ ID NO: 7218 - DNA, 337 bp, Homo sapiens; identical to SEQ ID NO: 846
  misc_feature 251: n = A,T,C or G

SEQ ID NO: 7219 - DNA, 210 bp, Homo sapiens; identical to SEQ ID NO: 847
  misc_feature 9, 25, 55, 193, 194: n = A,T,C or G

SEQ ID NO: 7220 - DNA, 262 bp, Homo sapiens; identical to SEQ ID NO: 848

SEQ ID NO: 7221 - DNA, 491 bp, Homo sapiens; identical to SEQ ID NO: 849
  misc_feature 457, 491: n = A,T,C or G

SEQ ID NO: 7222 - DNA, 363 bp, Homo sapiens; identical to SEQ ID NO: 850

SEQ ID NO: 7223 - DNA, 362 bp, Homo sapiens; identical to SEQ ID NO: 851

SEQ ID NO: 7224 - DNA, 264 bp, Homo sapiens; identical to SEQ ID NO: 852
  misc_feature 2, 4, 31, 41, 43, 49, 52, 56, 61, 94, 99, 105, 116, 121,128, 130, 131, 132, 134, 143, 150, 151, 154, 155, 162, 163,168, 171, 174, 177, 180, 184, 185, 187, 188, 189, 192, 194,196, 201, 202, 204, 206, 211, 220, 227, 231, 253, 264: n = A,T,C or G

SEQ ID NO: 7225 - DNA, 353 bp, Homo sapiens; identical to SEQ ID NO: 853

SEQ ID NO: 7226 - DNA, 345 bp, Homo sapiens; identical to SEQ ID NO: 854
  misc_feature 2, 15, 30, 32, 33, 48, 65, 87, 89, 90, 98, 100, 106, 108,124, 128, 130, 131, 132, 133, 134, 135, 136, 137, 138, 139,140, 141, 142, 143, 144, 145, 146, 147, 148, 149, 150, 151,152, 153, 154, 155, 156, 157, 158, 159, 160, 161, 162: n = A,T,C or G
  misc_feature 163, 164, 165, 166, 167, 168, 169, 170, 171, 172, 173, 174,175, 176, 177, 178, 179, 180, 181, 182, 183, 184, 185, 186,187, 188, 189, 190, 191, 192, 193, 194, 195, 196, 197, 198,199, 200, 201, 202, 203, 204, 205, 206, 207, 208, 209: n = A,T,C or G
  misc_feature 226, 229, 238, 242, 253, 258, 265, 275, 279, 284, 290, 294,301, 302, 303, 311, 313, 343: n = A,T,C or G

SEQ ID NO: 7227 - DNA, 300 bp, Homo sapiens; identical to SEQ ID NO: 855

SEQ ID NO: 7228 - DNA, 299 bp, Homo sapiens; identical to SEQ ID NO: 856
  misc_feature 21, 254: n = A,T,C or G

SEQ ID NO: 7229 - DNA, 360 bp, Homo sapiens; identical to SEQ ID NO: 857

SEQ ID NO: 7230 - DNA, 261 bp, Homo sapiens; identical to SEQ ID NO: 858
  misc_feature 23, 34, 52, 53, 54, 55, 56, 57, 58, 59, 60, 61, 62, 63, 64,65, 66, 67, 68, 69, 70, 71, 72, 73, 74, 75, 76, 77, 78,79, 80, 81, 82, 83, 84, 85, 86, 87, 88, 92, 98, 106, 127,132, 144, 150, 168, 188, 191, 192, 201, 204, 206, 228, 233: n = A,T,C or G

SEQ ID NO: 7231 - DNA, 357 bp, Homo sapiens; identical to SEQ ID NO: 859

SEQ ID NO: 7232 - DNA, 248 bp, Homo sapiens; identical to SEQ ID NO: 860

SEQ ID NO: 7233 - DNA, 380 bp, Homo sapiens; identical to SEQ ID NO: 861
  misc_feature 2, 16, 21, 22, 24, 27, 42, 55, 63, 66, 70, 74, 78, 79, 82,84, 87, 91, 110, 122, 123, 128, 131, 132, 135, 137, 143,145, 149, 150, 151, 152, 161, 162, 165, 173, 177, 178, 179,182, 185, 191, 192, 193, 195, 208, 215, 218, 227, 230: n = A,T,C or G
  misc_feature 237, 243, 247, 250, 255, 259, 260, 261, 269, 270, 273, 279,282, 287, 291, 297, 298, 305, 307, 313, 316, 320, 330, 338,339, 343, 345, 351, 354, 358, 363, 369, 370: n = A,T,C or G

SEQ ID NO: 7234 - DNA, 379 bp, Homo sapiens; identical to SEQ ID NO: 862
  misc_feature 32: n = A,T,C or G

SEQ ID NO: 7235 - DNA, 418 bp, Homo sapiens; identical to SEQ ID NO: 863
  misc_feature 1, 11, 17, 104, 109, 120, 122, 190, 195, 395: n = A,T,C or G

SEQ ID NO: 7236 - DNA, 293 bp, Homo sapiens; identical to SEQ ID NO: 864

SEQ ID NO: 7237 - DNA, 306 bp, Homo sapiens; identical to SEQ ID NO: 865

SEQ ID NO: 7238 - DNA, 464 bp, Homo sapiens; identical to SEQ ID NO: 866
  misc_feature 10: n = A,T,C or G

SEQ ID NO: 7239 - DNA, 383 bp, Homo sapiens; identical to SEQ ID NO: 867

SEQ ID NO: 7240 - DNA, 297 bp, Homo sapiens; identical to SEQ ID NO: 868
  misc_feature 22, 129, 145, 242: n = A,T,C or G

SEQ ID NO: 7241 - DNA, 376 bp, Homo sapiens; identical to SEQ ID NO: 869
  misc_feature 177, 195, 216, 246, 248: n = A,T,C or G

SEQ ID NO: 7242 - DNA, 235 bp, Homo sapiens; identical to SEQ ID NO: 870
  misc_feature 159, 175, 188, 215: n = A,T,C or G

SEQ ID NO: 7243 - DNA, 377 bp, Homo sapiens; identical to SEQ ID NO: 872
  misc_feature 151, 259: n = A,T,C or G

SEQ ID NO: 7244 - DNA, 457 bp, Homo sapiens; identical to SEQ ID NO: 873
  misc_feature 25, 392: n = A,T,C or G

SEQ ID NO: 7245 - DNA, 469 bp, Homo sapiens; identical to SEQ ID NO: 874
  misc_feature 180, 184, 249, 250, 268, 316, 340, 365, 431: n = A,T,C or G

SEQ ID NO: 7246 - DNA, 444 bp, Homo sapiens; identical to SEQ ID NO: 875
  misc_feature 4: n = A,T,C or G

SEQ ID NO: 7247 - DNA, 315 bp, Homo sapiens; identical to SEQ ID NO: 876

SEQ ID NO: 7248 - DNA, 491 bp, Homo sapiens; identical to SEQ ID NO: 877

SEQ ID NO: 7249 - DNA, 385 bp, Homo sapiens; identical to SEQ ID NO: 878
  misc_feature 25: n = A,T,C or G

SEQ ID NO: 7250 - DNA, 440 bp, Homo sapiens; identical to SEQ ID NO: 879
  misc_feature 3, 360, 408, 428: n = A,T,C or G

SEQ ID NO: 7251 - DNA, 432 bp, Homo sapiens; identical to SEQ ID NO: 880
  misc_feature 2: n = A,T,C or G

SEQ ID NO: 7252 - DNA, 426 bp, Homo sapiens; identical to SEQ ID NO: 881

SEQ ID NO: 7253 - DNA, 464 bp, Homo sapiens; identical to SEQ ID NO: 882

SEQ ID NO: 7254 - DNA, 394 bp, Homo sapiens; identical to SEQ ID NO: 883

SEQ ID NO: 7255 - DNA, 483 bp, Homo sapiens; identical to SEQ ID NO: 884
  misc_feature 476: n = A,T,C or G

SEQ ID NO: 7256 - DNA, 483 bp, Homo sapiens; identical to SEQ ID NO: 885

SEQ ID NO: 7257 - DNA, 399 bp, Homo sapiens; identical to SEQ ID NO: 886
  misc_feature 253, 287, 347: n = A,T,C or G

SEQ ID NO: 7258 - DNA, 415 bp, Homo sapiens; identical to SEQ ID NO: 887
  misc_feature 2, 195, 290, 403: n = A,T,C or G

SEQ ID NO: 7259 - DNA, 370 bp, Homo sapiens; identical to SEQ ID NO: 888
  misc_feature 279, 286, 345, 356: n = A,T,C or G

SEQ ID NO: 7260 - DNA, 445 bp, Homo sapiens; identical to SEQ ID NO: 889
  misc_feature 368, 407: n = A,T,C or G

SEQ ID NO: 7261 - DNA, 360 bp, Homo sapiens; identical to SEQ ID NO: 890

SEQ ID NO: 7262 - DNA, 388 bp, Homo sapiens; identical to SEQ ID NO: 891

SEQ ID NO: 7263 - DNA, 422 bp, Homo sapiens; identical to SEQ ID NO: 892
  misc_feature 44, 307, 391: n = A,T,C or G

SEQ ID NO: 7264 - DNA, 331 bp, Homo sapiens; identical to SEQ ID NO: 893

SEQ ID NO: 7265 - DNA, 462 bp, Homo sapiens; identical to SEQ ID NO: 894
  misc_feature 347, 460: n = A,T,C or G

SEQ ID NO: 7266 - DNA, 512 bp, Homo sapiens; identical to SEQ ID NO: 895
  misc_feature 432, 436: n = A,T,C or G

SEQ ID NO: 7267 - DNA, 457 bp, Homo sapiens; identical to SEQ ID NO: 896
  misc_feature 452: n = A,T,C or G

SEQ ID NO: 7268 - DNA, 341 bp, Homo sapiens; identical to SEQ ID NO: 897
  misc_feature 148, 152, 175, 216, 218, 220, 266, 282, 314, 323: n = A,T,C or G

SEQ ID NO: 7269 - DNA, 274 bp, Homo sapiens; identical to SEQ ID NO: 898
  misc_feature 7, 15, 131, 217, 229, 260: n = A,T,C or G

SEQ ID NO: 7270 - DNA, 269 bp, Homo sapiens; identical to SEQ ID NO: 899
  misc_feature 34: n = A,T,C or G

SEQ ID NO: 7271 - DNA, 201 bp, Homo sapiens; identical to SEQ ID NO: 900
  misc_feature 4, 142: n = A,T,C or G

SEQ ID NO: 7272 - DNA, 402 bp, Homo sapiens; identical to SEQ ID NO: 901
  misc_feature 8: n = A,T,C or G

SEQ ID NO: 7273 - DNA, 275 bp, Homo sapiens; identical to SEQ ID NO: 902
  misc_feature 238: n = A,T,C or G

SEQ ID NO: 7274 - DNA, 356 bp, Homo sapiens; identical to SEQ ID NO: 903

SEQ ID NO: 7275 - DNA, 332 bp, Homo sapiens; identical to SEQ ID NO: 904

SEQ ID NO: 7276 - DNA, 313 bp, Homo sapiens; identical to SEQ ID NO: 905
  misc_feature 36, 261, 267, 268: n = A,T,C or G

SEQ ID NO: 7277 - DNA, 363 bp, Homo sapiens; identical to SEQ ID NO: 906

SEQ ID NO: 7278 - DNA, 319 bp, Homo sapiens; identical to SEQ ID NO: 907
  misc_feature 249: n = A,T,C or G

SEQ ID NO: 7279 - DNA, 359 bp, Homo sapiens; identical to SEQ ID NO: 908

SEQ ID NO: 7280 - DNA, 369 bp, Homo sapiens; identical to SEQ ID NO: 909

SEQ ID NO: 7281 - DNA, 339 bp, Homo sapiens; identical to SEQ ID NO: 910

SEQ ID NO: 7282 - DNA, 351 bp, Homo sapiens; identical to SEQ ID NO: 911
  misc_feature 111, 126: n = A,T,C or G

SEQ ID NO: 7283 - DNA, 253 bp, Homo sapiens; identical to SEQ ID NO: 912

SEQ ID NO: 7284 - DNA, 315 bp, Homo sapiens; identical to SEQ ID NO: 913
  misc_feature 8, 15, 66, 73, 85, 90, 92, 94, 110, 115, 119, 135, 137, 139,160, 167, 176, 181, 209, 217, 222, 231, 259: n = A,T,C or G

SEQ ID NO: 7285 - DNA, 293 bp, Homo sapiens; identical to SEQ ID NO: 914

SEQ ID NO: 7286 - DNA, 162 bp, Homo sapiens; identical to SEQ ID NO: 915

SEQ ID NO: 7287 - DNA, 508 bp, Homo sapiens; identical to SEQ ID NO: 916

SEQ ID NO: 7288 - DNA, 476 bp, Homo sapiens; identical to SEQ ID NO: 917
  misc_feature 283, 357, 363, 432, 435, 450, 460: n = A,T,C or G

SEQ ID NO: 7289 - DNA, 428 bp, Homo sapiens; identical to SEQ ID NO: 918
  misc_feature 5: n = A,T,C or G

SEQ ID NO: 7290 - DNA, 429 bp, Homo sapiens; identical to SEQ ID NO: 919
  misc_feature 390: n = A,T,C or G

SEQ ID NO: 7291 - DNA, 339 bp, Homo sapiens; identical to SEQ ID NO: 920
  misc_feature 167, 198, 284: n = A,T,C or G

SEQ ID NO: 7292 - DNA, 563 bp, Homo sapiens; identical to SEQ ID NO: 921
  misc_feature 518, 538, 551: n = A,T,C or G

SEQ ID NO: 7293 - DNA, 568 bp, Homo sapiens; identical to SEQ ID NO: 922
  misc_feature 439, 483, 530, 540, 555: n = A,T,C or G

SEQ ID NO: 7294 - DNA, 432 bp, Homo sapiens; identical to SEQ ID NO: 923
  misc_feature 2, 71, 154, 157, 167, 171, 180: n = A,T,C or G

SEQ ID NO: 7295 - DNA, 472 bp, Homo sapiens; identical to SEQ ID NO: 924

SEQ ID NO: 7296 - DNA, 486 bp, Homo sapiens; identical to SEQ ID NO: 925
  misc_feature 419: n = A,T,C or G

SEQ ID NO: 7297 - DNA, 510 bp, Homo sapiens; identical to SEQ ID NO: 926
  misc_feature 435, 437: n = A,T,C or G

SEQ ID NO: 7298 - DNA, 532 bp, Homo sapiens; identical to SEQ ID NO: 927
  misc_feature 328, 426, 516: n = A,T,C or G

SEQ ID NO: 7299 - DNA, 428 bp, Homo sapiens; identical to SEQ ID NO: 928
  misc_feature 361: n = A,T,C or G

SEQ ID NO: 7300 - DNA, 463 bp, Homo sapiens; identical to SEQ ID NO: 929
  misc_feature 10, 437: n = A,T,C or G

SEQ ID NO: 7301 - DNA, 503 bp, Homo sapiens; identical to SEQ ID NO: 930
  misc_feature 11, 47, 476: n = A,T,C or G

SEQ ID NO: 7302 - DNA, 317 bp, Homo sapiens; identical to SEQ ID NO: 931

SEQ ID NO: 7303 - DNA, 476 bp, Homo sapiens; identical to SEQ ID NO: 932
  misc_feature 438, 450: n = A,T,C or G

SEQ ID NO: 7304 - DNA, 411 bp, Homo sapiens; identical to SEQ ID NO: 933
  misc_feature 2: n = A,T,C or G

SEQ ID NO: 7305 - DNA, 478 bp, Homo sapiens; identical to SEQ ID NO: 934

SEQ ID NO: 7306 - DNA, 506 bp, Homo sapiens; identical to SEQ ID NO: 935
  misc_feature 398, 462, 474, 482, 495: n = A,T,C or G

SEQ ID NO: 7307 - DNA, 443 bp, Homo sapiens; identical to SEQ ID NO: 936
  misc_feature 349, 421: n = A,T,C or G

SEQ ID NO: 7308 - DNA, 372 bp, Homo sapiens; identical to SEQ ID NO: 937
  misc_feature 346: n = A,T,C or G

SEQ ID NO: 7309 - DNA, 510 bp, Homo sapiens; identical to SEQ ID NO: 938
  misc_feature 493: n = A,T,C or G

SEQ ID NO: 7310 - DNA, 483 bp, Homo sapiens; identical to SEQ ID NO: 939

SEQ ID NO: 7311 - DNA, 478 bp, Homo sapiens; identical to SEQ ID NO: 940
  misc_feature 9, 22: n = A,T,C or G

SEQ ID NO: 7312 - DNA, 407 bp, Homo sapiens; identical to SEQ ID NO: 942
  misc_feature 76, 78, 79, 88, 99, 137, 142, 193, 251, 263, 268, 276, 278,279, 322, 329, 362, 368, 394: n = A,T,C or G

SEQ ID NO: 7313 - DNA, 501 bp, Homo sapiens; identical to SEQ ID NO: 943

SEQ ID NO: 7314 - DNA, 492 bp, Homo sapiens; identical to SEQ ID NO: 944
  misc_feature 154, 297: n = A,T,C or G

SEQ ID NO: 7315 - DNA, 474 bp, Homo sapiens; identical to SEQ ID NO: 945
  misc_feature 32: n = A,T,C or G

SEQ ID NO: 7316 - DNA, 363 bp, Homo sapiens; identical to SEQ ID NO: 946
  misc_feature 7: n = A,T,C or G

SEQ ID NO: 7317 - DNA, 484 bp, Homo sapiens; identical to SEQ ID NO: 947

SEQ ID NO: 7318 - DNA, 592 bp, Homo sapiens; identical to SEQ ID NO: 949
  misc_feature 9, 145, 341, 379, 487, 503, 508, 531, 539, 544, 566, 575: n = A,T,C or G

SEQ ID NO: 7319 - DNA, 436 bp, Homo sapiens; identical to SEQ ID NO: 950
  misc_feature 3: n = A,T,C or G

SEQ ID NO: 7320 - DNA, 511 bp, Homo sapiens; identical to SEQ ID NO: 951
  misc_feature 1, 2, 16: n = A,T,C or G

SEQ ID NO: 7321 - DNA, 467 bp, Homo sapiens; identical to SEQ ID NO: 952
  misc_feature 3: n = A,T,C or G

SEQ ID NO: 7322 - DNA, 490 bp, Homo sapiens; identical to SEQ ID NO: 953

SEQ ID NO: 7323 - DNA, 489 bp, Homo sapiens; identical to SEQ ID NO: 954

SEQ ID NO: 7324 - DNA, 444 bp, Homo sapiens; identical to SEQ ID NO: 955
  misc_feature 10, 199, 315: n = A,T,C or G

SEQ ID NO: 7325 - DNA, 497 bp, Homo sapiens; identical to SEQ ID NO: 956
  misc_feature 448: n = A,T,C or G

SEQ ID NO: 7326 - DNA, 474 bp, Homo sapiens; identical to SEQ ID NO: 957
  misc_feature 470: n = A,T,C or G

SEQ ID NO: 7327 - DNA, 431 bp, Homo sapiens; identical to SEQ ID NO: 958

SEQ ID NO: 7328 - DNA, 410 bp, Homo sapiens; identical to SEQ ID NO: 959

SEQ ID NO: 7329 - DNA, 449 bp, Homo sapiens; identical to SEQ ID NO: 960
  misc_feature 61, 276, 284, 361, 391, 416, 432, 433: n = A,T,C or G

SEQ ID NO: 7330 - DNA, 462 bp, Homo sapiens; identical to SEQ ID NO: 961
  misc_feature 1: n = A,T,C or G

SEQ ID NO: 7331 - DNA, 528 bp, Homo sapiens; identical to SEQ ID NO: 962
  misc_feature 421, 505, 511: n = A,T,C or G

SEQ ID NO: 7332 - DNA, 493 bp, Homo sapiens; identical to SEQ ID NO: 963
  misc_feature 444, 484: n = A,T,C or G

SEQ ID NO: 7333 - DNA, 496 bp, Homo sapiens; identical to SEQ ID NO: 964
  misc_feature 80: n = A,T,C or G

SEQ ID NO: 7334 - DNA, 397 bp, Homo sapiens; identical to SEQ ID NO: 965
  misc_feature 196, 223: n = A,T,C or G

SEQ ID NO: 7335 - DNA, 248 bp, Homo sapiens; identical to SEQ ID NO: 966
  misc_feature 9, 39, 44, 47, 51, 60, 64, 65, 77, 82, 83, 84, 97, 101, 104,105, 130, 131, 132, 133, 135, 136, 140, 152, 155, 161, 170,180, 181, 185, 203, 209, 214, 225, 226, 227, 228, 232: n = A,T,C or G

SEQ ID NO: 7336 - DNA, 479 bp, Homo sapiens; identical to SEQ ID NO: 967

SEQ ID NO: 7337 - DNA, 531 bp, Homo sapiens; identical to SEQ ID NO: 968

SEQ ID NO: 7338 - DNA, 498 bp, Homo sapiens; identical to SEQ ID NO: 969

SEQ ID NO: 7339 - DNA, 569 bp, Homo sapiens; identical to SEQ ID NO: 970
  misc_feature 60, 507, 530, 542: n = A,T,C or G

SEQ ID NO: 7340 - DNA, 205 bp, Homo sapiens; identical to SEQ ID NO: 971
  misc_feature 58, 116: n = A,T,C or G

SEQ ID NO: 7341 - DNA, 342 bp, Homo sapiens; identical to SEQ ID NO: 972
  misc_feature 57: n = A,T,C or G

SEQ ID NO: 7342 - DNA, 431 bp, Homo sapiens; identical to SEQ ID NO: 973
  misc_feature 159, 192, 335, 358: n = A,T,C or G

SEQ ID NO: 7343 - DNA, 465 bp, Homo sapiens; identical to SEQ ID NO: 974
  misc_feature 105, 374, 452: n = A,T,C or G

SEQ ID NO: 7344 - DNA, 369 bp, Homo sapiens; identical to SEQ ID NO: 975

SEQ ID NO: 7345 - DNA, 567 bp, Homo sapiens; identical to SEQ ID NO: 976

SEQ ID NO: 7346 - DNA, 537 bp, Homo sapiens; identical to SEQ ID NO: 977
  misc_feature 1, 89, 98: n = A,T,C or G

SEQ ID NO: 7347 - DNA, 444 bp, Homo sapiens; identical to SEQ ID NO: 978
  misc_feature 244, 248, 330, 425: n = A,T,C or G

SEQ ID NO: 7348 - DNA, 417 bp, Homo sapiens; identical to SEQ ID NO: 979
  misc_feature 7, 68, 99, 113, 118, 128, 140, 298, 353, 365, 414: n = A,T,C or G

SEQ ID NO: 7349 - DNA, 516 bp, Homo sapiens; identical to SEQ ID NO: 980
  misc_feature 29: n = A,T,C or G

SEQ ID NO: 7350 - DNA, 529 bp, Homo sapiens; identical to SEQ ID NO: 981
  misc_feature 466: n = A,T,C or G

SEQ ID NO: 7351 - DNA, 440 bp, Homo sapiens; identical to SEQ ID NO: 982
  misc_feature 2: n = A,T,C or G

SEQ ID NO: 7352 - DNA, 442 bp, Homo sapiens; identical to SEQ ID NO: 983
  misc_feature 110: n = A,T,C or G

SEQ ID NO: 7353 - DNA, 500 bp, Homo sapiens; identical to SEQ ID NO: 984
  misc_feature 172, 435, 470, 472, 473: n = A,T,C or G

SEQ ID NO: 7354 - DNA, 492 bp, Homo sapiens; identical to SEQ ID NO: 985

SEQ ID NO: 7355 - DNA, 380 bp, Homo sapiens; identical to SEQ ID NO: 986

SEQ ID NO: 7356 - DNA, 468 bp, Homo sapiens; identical to SEQ ID NO: 987

SEQ ID NO: 7357 - DNA, 496 bp, Homo sapiens; identical to SEQ ID NO: 988
  misc_feature 1: n = A,T,C or G

SEQ ID NO: 7358 - DNA, 474 bp, Homo sapiens; identical to SEQ ID NO: 989
  misc_feature 399: n = A,T,C or G

SEQ ID NO: 7359 - DNA, 369 bp, Homo sapiens; identical to SEQ ID NO: 990
  misc_feature 95: n = A,T,C or G

SEQ ID NO: 7360 - DNA, 504 bp, Homo sapiens; identical to SEQ ID NO: 991
  misc_feature 1, 501: n = A,T,C or G

SEQ ID NO: 7361 - DNA, 377 bp, Homo sapiens; identical to SEQ ID NO: 992

SEQ ID NO: 7362 - DNA, 479 bp, Homo sapiens; identical to SEQ ID NO: 993
  misc_feature 101: n = A,T,C or G

SEQ ID NO: 7363 - DNA, 441 bp, Homo sapiens; identical to SEQ ID NO: 994

SEQ ID NO: 7364 - DNA, 319 bp, Homo sapiens; identical to SEQ ID NO: 995
  misc_feature 29, 151, 165, 166: n = A,T,C or G

SEQ ID NO: 7365 - DNA, 506 bp, Homo sapiens; identical to SEQ ID NO: 996

SEQ ID NO: 7366 - DNA, 436 bp, Homo sapiens; identical to SEQ ID NO: 997
  misc_feature 37, 337, 364, 370, 379, 380, 409, 411, 413, 425, 428: n = A,T,C or G

SEQ ID NO: 7367 - DNA, 500 bp, Homo sapiens; identical to SEQ ID NO: 998
  misc_feature 457, 479: n = A,T,C or G

SEQ ID NO: 7368 - DNA, 503 bp, Homo sapiens; identical to SEQ ID NO: 999
  misc_feature 18: n = A,T,C or G

SEQ ID NO: 7369 - DNA, 465 bp, Homo sapiens; identical to SEQ ID NO: 1000

SEQ ID NO: 7370 - DNA, 435 bp, Homo sapiens; identical to SEQ ID NO: 1001

SEQ ID NO: 7371 - DNA, 405 bp, Homo sapiens; identical to SEQ ID NO: 1002

SEQ ID NO: 7372 - DNA, 214 bp, Homo sapiens; identical to SEQ ID NO: 1003
  misc_feature 13, 94: n = A,T,C or G

SEQ ID NO: 7373 - DNA, 411 bp, Homo sapiens; identical to SEQ ID NO: 1004

SEQ ID NO: 7374 - DNA, 429 bp, Homo sapiens; identical to SEQ ID NO: 1005
  misc_feature 1, 293, 362, 382, 385: n = A,T,C or G

SEQ ID NO: 7375 - DNA, 498 bp, Homo sapiens; identical to SEQ ID NO: 1006
  misc_feature 256, 300, 458: n = A,T,C or G

SEQ ID NO: 7376 - DNA, 417 bp, Homo sapiens; identical to SEQ ID NO: 1007

SEQ ID NO: 7377 - DNA, 364 bp, Homo sapiens; identical to SEQ ID NO: 1008
  misc_feature 11, 289: n = A,T,C or G

SEQ ID NO: 7378 - DNA, 473 bp, Homo sapiens; identical to SEQ ID NO: 1009
  misc_feature 3, 393, 457: n = A,T,C or G

SEQ ID NO: 7379 - DNA, 407 bp, Homo sapiens; identical to SEQ ID NO: 1010
  misc_feature 5: n = A,T,C or G

SEQ ID NO: 7380 - DNA, 459 bp, Homo sapiens; identical to SEQ ID NO: 1011
  misc_feature 337, 386, 408: n = A,T,C or G

SEQ ID NO: 7381 - DNA, 483 bp, Homo sapiens; identical to SEQ ID NO: 1012
  misc_feature 7: n = A,T,C or G

SEQ ID NO: 7382 - DNA, 607 bp, Homo sapiens; identical to SEQ ID NO: 1013
  misc_feature 155, 162, 200, 204, 257, 269, 294, 298, 315, 329, 350, 406,441, 464, 465, 499, 511, 523, 538, 545, 567, 591, 597: n = A,T,C or G

SEQ ID NO: 7383 - DNA, 223 bp, Homo sapiens; identical to SEQ ID NO: 1014
  misc_feature 19, 33, 81, 90, 132, 147, 165: n = A,T,C or G

SEQ ID NO: 7384 - DNA, 474 bp, Homo sapiens; identical to SEQ ID NO: 1015

SEQ ID NO: 7385 - DNA, 480 bp, Homo sapiens; identical to SEQ ID NO: 1016
  misc_feature 38, 93, 98, 146, 155, 159, 165, 166, 173, 198, 201, 204,213, 217, 223, 235, 243, 249, 255, 284, 325, 343, 366, 373,400, 406, 439, 440, 454, 463: n = A,T,C or G

SEQ ID NO: 7386 - DNA, 435 bp, Homo sapiens; identical to SEQ ID NO: 1017
  misc_feature 5, 362: n = A,T,C or G

SEQ ID NO: 7387 - DNA, 298 bp, Homo sapiens; identical to SEQ ID NO: 1018
  misc_feature 30: n = A,T,C or G

SEQ ID NO: 7388 - DNA, 467 bp, Homo sapiens; identical to SEQ ID NO: 1019

SEQ ID NO: 7389 - DNA, 562 bp, Homo sapiens; identical to SEQ ID NO: 1020
  misc_feature 8, 260, 276, 285, 299, 301, 313, 317, 318, 340, 352, 375,464, 490, 493, 515, 525, 552: n = A,T,C or G

SEQ ID NO: 7390 - DNA, 435 bp, Homo sapiens; identical to SEQ ID NO: 1021

SEQ ID NO: 7391 - DNA, 469 bp, Homo sapiens; identical to SEQ ID NO: 1022
  misc_feature 2, 271: n = A,T,C or G

SEQ ID NO: 7392 - DNA, 449 bp, Homo sapiens; identical to SEQ ID NO: 1023
  misc_feature 2: n = A,T,C or G

SEQ ID NO: 7393 - DNA, 517 bp, Homo sapiens; identical to SEQ ID NO: 1024

SEQ ID NO: 7394 - DNA, 535 bp, Homo sapiens; identical to SEQ ID NO: 1025
  misc_feature 148, 226, 241, 256, 274, 281, 286, 311, 326, 334, 360, 386,406, 447, 450, 484, 501, 508: n = A,T,C or G

SEQ ID NO: 7395 - DNA, 571 bp, Homo sapiens; identical to SEQ ID NO: 1026
  misc_feature 109, 230, 243, 271, 283, 293, 296, 305, 346, 386, 513, 525,545: n = A,T,C or G

SEQ ID NO: 7396 - DNA, 326 bp, Homo sapiens; identical to SEQ ID NO: 1027
  misc_feature 231: n = A,T,C or G

SEQ ID NO: 7397 - DNA, 482 bp, Homo sapiens; identical to SEQ ID NO: 1028

SEQ ID NO: 7398 - DNA, 461 bp, Homo sapiens; identical to SEQ ID NO: 1029

SEQ ID NO: 7399 - DNA, 641 bp, Homo sapiens; identical to SEQ ID NO: 1030
  misc_feature 16, 17, 19, 20, 22, 32, 55, 72, 73, 75, 78, 84, 100, 109,544: n = A,T,C or G

SEQ ID NO: 7400 - DNA, 542 bp, Homo sapiens; identical to SEQ ID NO: 1031
  misc_feature 499: n = A,T,C or G

SEQ ID NO: 7401 - DNA, 509 bp, Homo sapiens; identical to SEQ ID NO: 1032

SEQ ID NO: 7402 - DNA, 494 bp, Homo sapiens; identical to SEQ ID NO: 1034
  misc_feature 7, 8, 23: n = A,T,C or G

SEQ ID NO: 7403 - DNA, 354 bp, Homo sapiens; identical to SEQ ID NO: 1035

SEQ ID NO: 7404 - DNA, 623 bp, Homo sapiens; identical to SEQ ID NO: 1036
  misc_feature 108, 118, 119, 176, 297, 308, 335, 404, 433, 473, 475, 491,584, 586, 593, 607, 613, 619: n = A,T,C or G

SEQ ID NO: 7405 - DNA, 586 bp, Homo sapiens; identical to SEQ ID NO: 1037
  misc_feature 425, 464, 524, 533, 538, 540, 567, 571: n = A,T,C or G

SEQ ID NO: 7406 - DNA, 525 bp, Homo sapiens; identical to SEQ ID NO: 1038
  misc_feature 5, 30, 31, 510: n = A,T,C or G

SEQ ID NO: 7407 - DNA, 517 bp, Homo sapiens; identical to SEQ ID NO: 1039
  misc_feature 4: n = A,T,C or G

SEQ ID NO: 7408 - DNA, 573 bp, Homo sapiens; identical to SEQ ID NO: 1040

SEQ ID NO: 7409 - DNA, 534 bp, Homo sapiens; identical to SEQ ID NO: 1041

SEQ ID NO: 7410 - DNA, 487 bp, Homo sapiens; identical to SEQ ID NO: 1042
  misc_feature 391, 427, 446, 454, 463, 468, 476, 486: n = A,T,C or G

SEQ ID NO: 7411 - DNA, 543 bp, Homo sapiens; identical to SEQ ID NO: 1043

SEQ ID NO: 7412 - DNA, 364 bp, Homo sapiens; identical to SEQ ID NO: 1044
  misc_feature 336, 351: n = A,T,C or G

SEQ ID NO: 7413 - DNA, 752 bp, Homo sapiens; identical to SEQ ID NO: 1046
  misc_feature 563, 579, 627, 683, 687, 702, 723, 726: n = A,T,C or G

SEQ ID NO: 7414 - DNA, 553 bp, Homo sapiens; identical to SEQ ID NO: 1047

SEQ ID NO: 7415 - DNA, 343 bp, Homo sapiens; identical to SEQ ID NO: 1048
  misc_feature 23, 193, 205, 213, 233, 315: n = A,T,C or G

SEQ ID NO: 7416 - DNA, 394 bp, Homo sapiens; identical to SEQ ID NO: 1049
  misc_feature 1: n = A,T,C or G

SEQ ID NO: 7417 - DNA, 542 bp, Homo sapiens; identical to SEQ ID NO: 1050
  misc_feature 406, 409, 469, 488: n = A,T,C or G

SEQ ID NO: 7418 - DNA, 533 bp, Homo sapiens; identical to SEQ ID NO: 1051
  misc_feature 527, 530: n = A,T,C or G

SEQ ID NO: 7419 - DNA, 584 bp, Homo sapiens; identical to SEQ ID NO: 1052

SEQ ID NO: 7420 - DNA, 517 bp, Homo sapiens; identical to SEQ ID NO: 1053
  misc_feature 498: n = A,T,C or G

SEQ ID NO: 7421 - DNA, 606 bp, Homo sapiens; identical to SEQ ID NO: 1054
  misc_feature 114, 361, 382, 388, 389, 390, 392, 398, 399, 402, 406, 411,412, 418, 423, 424, 425, 426, 427, 428, 429, 430, 431, 432,433, 434, 435, 436, 437, 438, 439, 440, 441, 442, 443, 444,445, 446, 447, 448, 449, 450, 451, 452, 453, 454, 455: n = A,T,C or G
  misc_feature 456, 457, 458, 459, 460, 461, 462, 463, 464, 465, 466, 467,468, 469, 470, 471, 472, 473, 474, 475, 476, 477, 478, 479,480, 481, 482, 483, 484, 485, 486, 487, 488, 489, 490, 491,492, 493, 494, 495, 496, 497, 498, 499, 500, 501, 502: n = A,T,C or G
  misc_feature 503, 504, 505, 506, 507, 508, 509, 510, 511, 512, 513, 514,515, 516, 517, 518, 519, 520, 521, 522, 523, 524, 525, 526,527, 528, 529, 530, 531, 535, 552, 587: n = A,T,C or G

SEQ ID NO: 7422 - DNA, 377 bp, Homo sapiens; identical to SEQ ID NO: 1055

SEQ ID NO: 7423 - DNA, 564 bp, Homo sapiens; identical to SEQ ID NO: 1056
  misc_feature 6, 313, 518, 519: n = A,T,C or G

SEQ ID NO: 7424 - DNA, 419 bp, Homo sapiens; identical to SEQ ID NO: 1057
  misc_feature 3, 14, 289, 303, 330, 357, 360, 369, 371, 386, 393: n = A,T,C or G

SEQ ID NO: 7425 - DNA, 219 bp, Homo sapiens; identical to SEQ ID NO: 1058
  misc_feature 198, 205, 212: n = A,T,C or G

SEQ ID NO: 7426 - DNA, 459 bp, Homo sapiens; identical to SEQ ID NO: 1059
  misc_feature 36, 93, 107, 148, 158, 193, 260, 267: n = A,T,C or G

SEQ ID NO: 7427 - DNA, 499 bp, Homo sapiens; identical to SEQ ID NO: 1060
  misc_feature 445, 468: n = A,T,C or G

SEQ ID NO: 7428 - DNA, 498 bp, Homo sapiens; identical to SEQ ID NO: 1061

SEQ ID NO: 7429 - DNA, 487 bp, Homo sapiens; identical to SEQ ID NO: 1062
  misc_feature 3, 20, 448, 472, 485: n = A,T,C or G

SEQ ID NO: 7430 - DNA, 373 bp, Homo sapiens; identical to SEQ ID NO: 1063
  misc_feature 18, 241, 333, 341: n = A,T,C or G

SEQ ID NO: 7431 - DNA, 492 bp, Homo sapiens; identical to SEQ ID NO: 1064
  misc_feature 366: n = A,T,C or G

SEQ ID NO: 7432 - DNA, 517 bp, Homo sapiens; identical to SEQ ID NO: 1065
  misc_feature 365, 481, 495, 517: n = A,T,C or G

SEQ ID NO: 7433 - DNA, 478 bp, Homo sapiens; identical to SEQ ID NO: 1066

SEQ ID NO: 7434 - DNA, 388 bp, Homo sapiens; identical to SEQ ID NO: 1068
  misc_feature 139, 365: n = A,T,C or G

SEQ ID NO: 7435 - DNA, 524 bp, Homo sapiens; identical to SEQ ID NO: 1069

SEQ ID NO: 7436 - DNA, 325 bp, Homo sapiens; identical to SEQ ID NO: 1070
  misc_feature 316: n = A,T,C or G

SEQ ID NO: 7437 - DNA, 463 bp, Homo sapiens; identical to SEQ ID NO: 1071
  misc_feature 22: n = A,T,C or G

SEQ ID NO: 7438 - DNA, 491 bp, Homo sapiens; identical to SEQ ID NO: 1072

SEQ ID NO: 7439 - DNA, 403 bp, Homo sapiens; identical to SEQ ID NO: 1073
  misc_feature 17: n = A,T,C or G

SEQ ID NO: 7440 - DNA, 652 bp, Homo sapiens; identical to SEQ ID NO: 1074
  misc_feature 169, 265, 268, 278, 281, 286, 287, 288, 289, 310, 312, 324,336, 346, 349, 350, 355, 357, 358, 384, 392, 398, 399, 405,413, 414, 415, 420, 425, 429, 437, 440, 458, 465, 470, 484,486, 490, 499, 503, 524, 534, 547, 556, 565, 569, 626: n = A,T,C or G

SEQ ID NO: 7441 - DNA, 362 bp, Homo sapiens; identical to SEQ ID NO: 1075
  misc_feature 7, 19, 23: n = A,T,C or G

SEQ ID NO: 7442 - DNA, 419 bp, Homo sapiens; identical to SEQ ID NO: 1076
  misc_feature 409: n = A,T,C or G

SEQ ID NO: 7443 - DNA, 440 bp, Homo sapiens; identical to SEQ ID NO: 1077
  misc_feature 97, 106, 107, 274, 365, 375: n = A,T,C or G

SEQ ID NO: 7444 - DNA, 419 bp, Homo sapiens; identical to SEQ ID NO: 1078
  misc_feature 2, 70, 95, 145, 197, 208, 210, 229, 402: n = A,T,C or G

SEQ ID NO: 7445 - DNA, 573 bp, Homo sapiens; identical to SEQ ID NO: 1079
  misc_feature 563: n = A,T,C or G

SEQ ID NO: 7446 - DNA, 534 bp, Homo sapiens; identical to SEQ ID NO: 1080

SEQ ID NO: 7447 - DNA, 248 bp, Homo sapiens; identical to SEQ ID NO: 1081
  misc_feature 189, 201, 244: n = A,T,C or G

SEQ ID NO: 7448 - DNA, 644 bp, Homo sapiens; identical to SEQ ID NO: 1082
  misc_feature 91, 133, 169, 182, 221, 232, 233, 235, 236, 238, 239, 240,241, 242, 244, 322, 340, 385, 413, 481, 482, 487, 509, 518,534, 619, 621: n = A,T,C or G

SEQ ID NO: 7449 - DNA, 507 bp, Homo sapiens; identical to SEQ ID NO: 1083
  misc_feature 7: n = A,T,C or G

SEQ ID NO: 7450 - DNA, 495 bp, Homo sapiens; identical to SEQ ID NO: 1084
  misc_feature 126: n = A,T,C or G

SEQ ID NO: 7451 - DNA, 383 bp, Homo sapiens; identical to SEQ ID NO: 1085
  misc_feature 372, 375, 381: n = A,T,C or G

SEQ ID NO: 7452 - DNA, 548 bp, Homo sapiens; identical to SEQ ID NO: 1086
  misc_feature 548: n = A,T,C or G

SEQ ID NO: 7453 - DNA, 519 bp, Homo sapiens; identical to SEQ ID NO: 1087
  misc_feature 3, 11, 398: n = A,T,C or G

SEQ ID NO: 7454 - DNA, 386 bp, Homo sapiens; identical to SEQ ID NO: 1088

SEQ ID NO: 7455 - DNA, 131 bp, Homo sapiens; identical to SEQ ID NO: 1089
  misc_feature 3: n = A,T,C or G

SEQ ID NO: 7456 - DNA, 387 bp, Homo sapiens; identical to SEQ ID NO: 1090

SEQ ID NO: 7457 - DNA, 628 bp, Homo sapiens; identical to SEQ ID NO: 1091
  misc_feature 476, 512, 554, 565, 586, 611: n = A,T,C or G

SEQ ID NO: 7458 - DNA, 521 bp, Homo sapiens; identical to SEQ ID NO: 1092
  misc_feature 456, 496: n = A,T,C or G

SEQ ID NO: 7459 - DNA, 523 bp, Homo sapiens; identical to SEQ ID NO: 1093
  misc_feature 45: n = A,T,C or G

SEQ ID NO: 7460 - DNA, 560 bp, Homo sapiens; identical to SEQ ID NO: 1094
  misc_feature 529: n = A,T,C or G

SEQ ID NO: 7461 - DNA, 488 bp, Homo sapiens; identical to SEQ ID NO: 1095

SEQ ID NO: 7462 - DNA, 466 bp, Homo sapiens; identical to SEQ ID NO: 1096
  misc_feature 3, 19, 32, 401, 404, 412, 418, 427, 432, 433, 436, 440: n = A,T,C or G

SEQ ID NO: 7463 - DNA, 494 bp, Homo sapiens; identical to SEQ ID NO: 1097
  misc_feature 5, 16, 455, 457: n = A,T,C or G

SEQ ID NO: 7464 - DNA, 562 bp, Homo sapiens; identical to SEQ ID NO: 1098

SEQ ID NO: 7465 - DNA, 416 bp, Homo sapiens; identical to SEQ ID NO: 1099

SEQ ID NO: 7466 - DNA, 483 bp, Homo sapiens; identical to SEQ ID NO: 1100

SEQ ID NO: 7467 - DNA, 493 bp, Homo sapiens; identical to SEQ ID NO: 1101
  misc_feature 28, 475: n = A,T,C or G

SEQ ID NO: 7468 - DNA, 398 bp, Homo sapiens; identical to SEQ ID NO: 1102

SEQ ID NO: 7469 - DNA, 398 bp, Homo sapiens; identical to SEQ ID NO: 1103
  misc_feature 2, 19, 26, 160, 161, 176, 188, 198, 206, 208, 229, 232, 240,333, 346, 357, 366, 378: n = A,T,C or G

SEQ ID NO: 7470 - DNA, 552 bp, Homo sapiens; identical to SEQ ID NO: 1104
  misc_feature 5, 535, 536, 541: n = A,T,C or G

SEQ ID NO: 7471 - DNA, 515 bp, Homo sapiens; identical to SEQ ID NO: 1105
  misc_feature 101, 435, 460, 469, 479: n = A,T,C or G

SEQ ID NO: 7472 - DNA, 444 bp, Homo sapiens; identical to SEQ ID NO: 1106
  misc_feature 7, 16, 144: n = A,T,C or G

SEQ ID NO: 7473 - DNA, 451 bp, Homo sapiens; identical to SEQ ID NO: 1107
  misc_feature 146, 377, 435, 440: n = A,T,C or G

SEQ ID NO: 7474 - DNA, 469 bp, Homo sapiens; identical to SEQ ID NO: 1108
  misc_feature 17, 35, 457, 458, 463: n = A,T,C or G

SEQ ID NO: 7475 - DNA, 600 bp, Homo sapiens; identical to SEQ ID NO: 1109
  misc_feature 558, 574: n = A,T,C or G

SEQ ID NO: 7476 - DNA, 276 bp, Homo sapiens; identical to SEQ ID NO: 1110
  misc_feature 5, 32: n = A,T,C or G

SEQ ID NO: 7477 - DNA, 580 bp, Homo sapiens; identical to SEQ ID NO: 1111

SEQ ID NO: 7478 - DNA, 712 bp, Homo sapiens; identical to SEQ ID NO: 1112
  misc_feature 646, 647, 648, 650, 657, 660, 667, 668, 672, 674, 687, 690,691, 698, 699: n = A,T,C or G

SEQ ID NO: 7479 - DNA, 565 bp, Homo sapiens; identical to SEQ ID NO: 1113
  misc_feature 238, 294, 491: n = A,T,C or G

SEQ ID NO: 7480 - DNA, 534 bp, Homo sapiens; identical to SEQ ID NO: 1114
  misc_feature 527: n = A,T,C or G

SEQ ID NO: 7481 - DNA, 630 bp, Homo sapiens; identical to SEQ ID NO: 1115
  misc_feature 33, 590: n = A,T,C or G

SEQ ID NO: 7482 - DNA, 695 bp, Homo sapiens; identical to SEQ ID NO: 1116
  misc_feature 2, 21, 582: n = A,T,C or G

SEQ ID NO: 7483 - DNA, 439 bp, Homo sapiens; identical to SEQ ID NO: 1117
  misc_feature 104, 105, 108, 110: n = A,T,C or G

SEQ ID NO: 7484 - DNA, 495 bp, Homo sapiens; identical to SEQ ID NO: 1118

SEQ ID NO: 7485 - DNA, 526 bp, Homo sapiens; identical to SEQ ID NO: 1119
  misc_feature 1, 23, 111: n = A,T,C or G

SEQ ID NO: 7486 - DNA, 515 bp, Homo sapiens; identical to SEQ ID NO: 1120
  misc_feature 106: n = A,T,C or G

SEQ ID NO: 7487 - DNA, 438 bp, Homo sapiens; identical to SEQ ID NO: 1121
  misc_feature 63, 81: n = A,T,C or G

SEQ ID NO: 7488 - DNA, 445 bp, Homo sapiens; identical to SEQ ID NO: 1122
  misc_feature 16, 18, 26: n = A,T,C or G

SEQ ID NO: 7489 - DNA, 504 bp, Homo sapiens; identical to SEQ ID NO: 1123
  misc_feature 18: n = A,T,C or G

SEQ ID NO: 7490 - DNA, 401 bp, Homo sapiens; identical to SEQ ID NO: 1124
  misc_feature 11, 15, 18, 138, 259, 269, 301, 325: n = A,T,C or G

SEQ ID NO: 7491 - DNA, 455 bp, Homo sapiens; identical to SEQ ID NO: 1125
  misc_feature 7, 12, 15, 62, 87, 322: n = A,T,C or G

SEQ ID NO: 7492 - DNA, 604 bp, Homo sapiens; identical to SEQ ID NO: 1126
  misc_feature 42, 50, 51, 142, 247, 289, 337, 501, 534: n = A,T,C or G

SEQ ID NO: 7493 - DNA, 394 bp, Homo sapiens; identical to SEQ ID NO: 1127

SEQ ID NO: 7494 - DNA, 728 bp, Homo sapiens; identical to SEQ ID NO: 1128
  misc_feature 34, 44, 517, 693, 699, 726: n = A,T,C or G

SEQ ID NO: 7495 - DNA, 622 bp, Homo sapiens; identical to SEQ ID NO: 1129
  misc_feature 571, 582: n = A,T,C or G

SEQ ID NO: 7496 - DNA, 594 bp, Homo sapiens; identical to SEQ ID NO: 1130
  misc_feature 191, 208, 223, 238, 284, 285, 303, 308, 336, 373, 386, 392,421, 427, 432, 436, 445, 453, 457, 471, 489, 501, 510, 513,521, 533, 534, 544, 545, 570, 576, 586: n = A,T,C or G

SEQ ID NO: 7497 - DNA, 465 bp, Homo sapiens; identical to SEQ ID NO: 1131
  misc_feature 4, 46, 48, 322, 378, 379, 380, 381, 382, 383, 384, 385, 386,387, 388, 389, 390, 391, 392, 393, 394, 395, 396, 397, 398,399, 400, 401, 402, 403, 404, 405, 406, 407, 408, 409, 410,411, 412, 413, 414, 415, 416, 428, 434: n = A,T,C or G

SEQ ID NO: 7498 - DNA, 220 bp, Homo sapiens; identical to SEQ ID NO: 1132
  misc_feature 129: n = A,T,C or G

SEQ ID NO: 7499 - DNA, 124 bp, Homo sapiens; identical to SEQ ID NO: 1133
  misc_feature 16, 24, 41, 46, 47, 52, 57, 75, 78, 82, 95, 98, 100, 114,115, 116, 119: n = A,T,C or G

SEQ ID NO: 7500 - DNA, 517 bp, Homo sapiens; identical to SEQ ID NO: 1134
  misc_feature 8, 14, 21, 23, 27, 36, 37, 39, 63, 68, 70, 83, 89, 106, 113,118, 119, 128, 132, 138, 142, 158, 160, 175, 184, 202, 210,218, 228, 229, 230, 231, 232, 233, 234, 235, 236, 237, 238,239, 240, 241, 242, 243, 244, 245, 246, 247, 248: n = A,T,C or G
  misc_feature 249, 250, 251, 252, 253, 254, 255, 256, 257, 258, 259, 260,261, 262, 263, 264, 265, 266, 267, 268, 269, 270, 271, 272,273, 274, 275, 276, 277, 278, 279, 280, 281, 282, 283, 284,285, 286, 287, 288, 289, 290, 291, 292, 293, 294, 295: n = A,T,C or G
  misc_feature 296, 297, 298, 299, 300, 301, 302, 303, 304, 305, 306, 307,308, 309, 310, 311, 312, 313, 314, 315, 316, 317, 318, 319,320, 321, 322, 323, 324, 325, 326, 327, 328, 329, 330, 333,345, 351, 357, 370, 380, 389, 390, 392, 394, 395, 400: n = A,T,C or G
  misc_feature 408, 416, 429, 458, 471, 472, 474, 479, 495, 499, 501, 505: n = A,T,C or G

SEQ ID NO: 7501 - DNA, 695 bp, Homo sapiens; identical to SEQ ID NO: 1135
  misc_feature 7, 8, 29, 32, 59, 60, 62, 71, 107, 119, 128, 129, 143, 145,153, 162, 165, 172, 173, 179, 187, 192, 204, 226, 233, 245,254, 262, 270, 283, 288, 297, 304, 325, 333, 336, 358, 365,366, 370, 373, 381, 382, 397, 400, 412, 434, 440, 447: n = A,T,C or G
  misc_feature 452, 455, 480, 488, 551, 556, 561, 586, 590, 597, 598, 610,612, 618, 619, 622, 634, 655, 666, 668, 669, 680: n = A,T,C or G

SEQ ID NO: 7502 - DNA, 255 bp, Homo sapiens; identical to SEQ ID NO: 1136
  misc_feature 1, 26, 34, 39, 64, 70, 79, 82, 85, 92, 99, 109, 111, 120,143, 152, 158, 163, 173, 176, 180, 196, 209, 225, 234: n = A,T,C or G

SEQ ID NO: 7503 - DNA, 696 bp, Homo sapiens; identical to SEQ ID NO: 1137
  misc_feature 7, 11, 22, 25, 29, 40, 50, 51, 62, 65, 66, 68, 70, 73, 76,78, 83, 86, 89, 104, 107, 112, 113, 119, 137, 141, 142,155, 166, 173, 184, 191, 197, 204, 205, 206, 207, 208, 209,210, 211, 212, 213, 214, 215, 216, 217, 218, 219, 220, 221: n = A,T,C or G
  misc_feature 222, 223, 224, 225, 226, 227, 228, 229, 230, 231, 232, 233,234, 235, 236, 237, 238, 239, 240, 241, 242, 243, 244, 245,246, 247, 248, 249, 250, 251, 252, 253, 254, 255, 256, 257,258, 259, 260, 261, 262, 263, 264, 265, 266, 267, 268: n = A,T,C or G
  misc_feature 269, 270, 271, 275, 276, 293, 295, 304, 309, 310, 318, 319,322, 328, 343, 352, 357, 389, 413, 421, 448, 473, 476, 481,482, 492, 498, 500, 512, 515, 529, 536, 538, 543, 544, 547,549, 564, 572, 574, 587, 588, 603, 608, 609, 616, 624: n = A,T,C or G
  misc_feature 626, 633, 634, 654, 672, 680, 682: n = A,T,C or G

SEQ ID NO: 7504 - DNA, 475 bp, Homo sapiens; identical to SEQ ID NO: 1138
  misc_feature 113, 462: n = A,T,C or G

SEQ ID NO: 7505 - DNA, 542 bp, Homo sapiens; identical to SEQ ID NO: 1139
  misc_feature 398: n = A,T,C or G

SEQ ID NO: 7506 - DNA, 525 bp, Homo sapiens; identical to SEQ ID NO: 1140

SEQ ID NO: 7507 - DNA, 406 bp, Homo sapiens; identical to SEQ ID NO: 1141

SEQ ID NO: 7508 - DNA, 409 bp, Homo sapiens; identical to SEQ ID NO: 1142

SEQ ID NO: 7509 - DNA, 575 bp, Homo sapiens; identical to SEQ ID NO: 1143
  misc_feature 214, 540, 560: n = A,T,C or G

SEQ ID NO: 7510 - DNA, 683 bp, Homo sapiens; identical to SEQ ID NO: 1144
  misc_feature 2, 225, 419, 429, 432, 434, 446, 466, 481, 521, 561, 563,584, 628, 659, 660, 663, 664: n = A,T,C or G

SEQ ID NO: 7511 - DNA, 355 bp, Homo sapiens; identical to SEQ ID NO: 1145
  misc_feature 2, 212: n = A,T,C or G

SEQ ID NO: 7512 - DNA, 336 bp, Homo sapiens; identical to SEQ ID NO: 1146
  misc_feature 20: n = A,T,C or G

SEQ ID NO: 7513 - DNA, 513 bp, Homo sapiens; identical to SEQ ID NO: 1147
  misc_feature 366: n = A,T,C or G

SEQ ID NO: 7514 - DNA, 484 bp, Homo sapiens; identical to SEQ ID NO: 1148
  misc_feature 20: n = A,T,C or G

SEQ ID NO: 7515 - DNA, 524 bp, Homo sapiens; identical to SEQ ID NO: 1149

SEQ ID NO: 7516 - DNA, 237 bp, Homo sapiens; identical to SEQ ID NO: 1150
  misc_feature 121, 136, 165: n = A,T,C or G

SEQ ID NO: 7517 - DNA, 420 bp, Homo sapiens; identical to SEQ ID NO: 1151

SEQ ID NO: 7518 - DNA, 393 bp, Homo sapiens; identical to SEQ ID NO: 1152

SEQ ID NO: 7519 - DNA, 456 bp, Homo sapiens; identical to SEQ ID NO: 1153
  misc_feature 3: n = A,T,C or G

SEQ ID NO: 7520 - DNA, 507 bp, Homo sapiens; identical to SEQ ID NO: 1154

SEQ ID NO: 7521 - DNA, 464 bp, Homo sapiens; identical to SEQ ID NO: 1155
  misc_feature 224, 231: n = A,T,C or G

SEQ ID NO: 7522 - DNA, 492 bp, Homo sapiens; identical to SEQ ID NO: 1156

SEQ ID NO: 7523 - DNA, 531 bp, Homo sapiens; identical to SEQ ID NO: 1157
  misc_feature 482, 529: n = A,T,C or G

SEQ ID NO: 7524 - DNA, 389 bp, Homo sapiens; identical to SEQ ID NO: 1158

SEQ ID NO: 7525 - DNA, 454 bp, Homo sapiens; identical to SEQ ID NO: 1159

SEQ ID NO: 7526 - DNA, 312 bp, Homo sapiens; identical to SEQ ID NO: 1160
  misc_feature 157, 266, 300: n = A,T,C or G

SEQ ID NO: 7527 - DNA, 329 bp, Homo sapiens; identical to SEQ ID NO: 1161
  misc_feature 22: n = A,T,C or G

SEQ ID NO: 7528 - DNA, 427 bp, Homo sapiens; identical to SEQ ID NO: 1162
  misc_feature 36, 72, 259: n = A,T,C or G

SEQ ID NO: 7529 - DNA, 463 bp, Homo sapiens; identical to SEQ ID NO: 1163

SEQ ID NO: 7530 - DNA, 387 bp, Homo sapiens; identical to SEQ ID NO: 1164
  misc_feature 41, 50, 79, 307: n = A,T,C or G

SEQ ID NO: 7531 - DNA, 245 bp, Homo sapiens; identical to SEQ ID NO: 1165
  misc_feature 54, 92, 110, 129, 135, 155, 156, 171, 175, 186, 201: n = A,T,C or G

SEQ ID NO: 7532 - DNA, 200 bp, Homo sapiens; identical to SEQ ID NO: 1166

SEQ ID NO: 7533 - DNA, 577 bp, Homo sapiens; identical to SEQ ID NO: 1167
  misc_feature 115, 466, 516: n = A,T,C or G

SEQ ID NO: 7534 - DNA, 651 bp, Homo sapiens; identical to SEQ ID NO: 1168
  misc_feature 214, 224, 228, 240, 241, 246, 248, 266, 283, 298, 319, 323,327, 329, 331, 342, 343, 344, 345, 346, 351, 352, 379, 380,416, 418, 420, 423, 427, 428, 429, 433, 445, 456, 467, 470,471, 476, 480, 496, 501, 502, 503, 504, 505, 506, 526: n = A,T,C or G
  misc_feature 544, 553, 554, 557, 561, 568, 578, 581, 593, 595, 603, 614,615, 617, 623, 625, 626, 627, 628, 641: n = A,T,C or G

SEQ ID NO: 7535 - DNA, 290 bp, Homo sapiens; identical to SEQ ID NO: 1169
  misc_feature 269: n = A,T,C or G

SEQ ID NO: 7536 - DNA, 250 bp, Homo sapiens; identical to SEQ ID NO: 1170
  misc_feature 227: n = A,T,C or G

SEQ ID NO: 7537 - DNA, 211 bp, Homo sapiens; identical to SEQ ID NO: 1171
  misc_feature 2: n = A,T,C or G

SEQ ID NO: 7538 - DNA, 579 bp, Homo sapiens; identical to SEQ ID NO: 1172

SEQ ID NO: 7539 - DNA, 487 bp, Homo sapiens; identical to SEQ ID NO: 1173

SEQ ID NO: 7540 - DNA, 488 bp, Homo sapiens; identical to SEQ ID NO: 1174
  misc_feature 43, 456: n = A,T,C or G

SEQ ID NO: 7541 - DNA, 487 bp, Homo sapiens; identical to SEQ ID NO: 1175
  misc_feature 42, 43, 455: n = A,T,C or G

SEQ ID NO: 7542 - DNA, 639 bp, Homo sapiens; identical to SEQ ID NO: 1176
  misc_feature 39, 455: n = A,T,C or G

SEQ ID NO: 7543 - DNA, 543 bp, Homo sapiens; identical to SEQ ID NO: 1177
  misc_feature 88, 107, 118, 160, 166, 169, 192, 195, 205, 216, 256, 295,320, 323, 344, 351, 364, 367, 389, 397, 410, 414, 430, 468,493, 504, 511, 513, 516, 517, 524: n = A,T,C or G

SEQ ID NO: 7544 - DNA, 465 bp, Homo sapiens; identical to SEQ ID NO: 1178

SEQ ID NO: 7545 - DNA, 433 bp, Homo sapiens; identical to SEQ ID NO: 1179
  misc_feature 150: n = A,T,C or G

SEQ ID NO: 7546 - DNA, 407 bp, Homo sapiens; identical to SEQ ID NO: 1180
  misc_feature 93, 94: n = A,T,C or G

SEQ ID NO: 7547 - DNA, 521 bp, Homo sapiens; identical to SEQ ID NO: 1181

SEQ ID NO: 7548 - DNA, 469 bp, Homo sapiens; identical to SEQ ID NO: 1182
  misc_feature 323: n = A,T,C or G

SEQ ID NO: 7549 - DNA, 607 bp, Homo sapiens; identical to SEQ ID NO: 1183
  misc_feature 582: n = A,T,C or G

SEQ ID NO: 7550 - DNA, 491 bp, Homo sapiens; identical to SEQ ID NO: 1184
  misc_feature 109, 129, 180, 301, 354, 387, 429, 430: n = A,T,C or G

SEQ ID NO: 7551 - DNA, 403 bp, Homo sapiens; identical to SEQ ID NO: 1185
  misc_feature 9, 282, 312: n = A,T,C or G

SEQ ID NO: 7552 - DNA, 519 bp, Homo sapiens; identical to SEQ ID NO: 1186

SEQ ID NO: 7553 - DNA, 504 bp, Homo sapiens; identical to SEQ ID NO: 1187

SEQ ID NO: 7554 - DNA, 386 bp, Homo sapiens; identical to SEQ ID NO: 1188
  misc_feature 28, 164, 334: n = A,T,C or G

SEQ ID NO: 7555 - DNA, 458 bp, Homo sapiens; identical to SEQ ID NO: 1189

SEQ ID NO: 7556 - DNA, 348 bp, Homo sapiens; identical to SEQ ID NO: 1190

SEQ ID NO: 7557 - DNA, 471 bp, Homo sapiens; identical to SEQ ID NO: 1191
  misc_feature 40: n = A,T,C or G

SEQ ID NO: 7558 - DNA, 322 bp, Homo sapiens; identical to SEQ ID NO: 1192
  misc_feature 67, 89, 107, 178: n = A,T,C or G

SEQ ID NO: 7559 - DNA, 443 bp, Homo sapiens; identical to SEQ ID NO: 1193

SEQ ID NO: 7560 - DNA, 433 bp, Homo sapiens; identical to SEQ ID NO: 1194
  misc_feature 1, 109, 162, 190, 208, 213, 262, 315, 371, 373: n = A,T,C or G

SEQ ID NO: 7561 - DNA, 306 bp, Homo sapiens; identical to SEQ ID NO: 1195
  misc_feature 111, 114: n = A,T,C or G

SEQ ID NO: 7562 - DNA, 367 bp, Homo sapiens; identical to SEQ ID NO: 1196

SEQ ID NO: 7563 - DNA, 356 bp, Homo sapiens; identical to SEQ ID NO: 1197

SEQ ID NO: 7564 - DNA, 451 bp, Homo sapiens; identical to SEQ ID NO: 1198

SEQ ID NO: 7565 - DNA, 299 bp, Homo sapiens; identical to SEQ ID NO: 1199
  misc_feature 150, 263, 265, 276: n = A,T,C or G

SEQ ID NO: 7566 - DNA, 386 bp, Homo sapiens; identical to SEQ ID NO: 1200
  misc_feature 43, 114, 155, 178, 234, 281, 336, 338, 353, 373: n = A,T,C or G

SEQ ID NO: 7567 - DNA, 280 bp, Homo sapiens; identical to SEQ ID NO: 1201

SEQ ID NO: 7568 - DNA, 413 bp, Homo sapiens; identical to SEQ ID NO: 1202
  misc_feature 106, 107, 178, 241: n = A,T,C or G

SEQ ID NO: 7569 - DNA, 513 bp, Homo sapiens; identical to SEQ ID NO: 1203
  misc_feature 344, 404: n = A,T,C or G

SEQ ID NO: 7570 - DNA, 358 bp, Homo sapiens; identical to SEQ ID NO: 1204
  misc_feature 155: n = A,T,C or G

SEQ ID NO: 7571 - DNA, 352 bp, Homo sapiens; identical to SEQ ID NO: 1205
  misc_feature 1, 2, 4: n = A,T,C or G

SEQ ID NO: 7572 - DNA, 347 bp, Homo sapiens; identical to SEQ ID NO: 1206
  misc_feature 158: n = A,T,C or G

SEQ ID NO: 7573 - DNA, 506 bp, Homo sapiens; identical to SEQ ID NO: 1207

SEQ ID NO: 7574 - DNA, 405 bp, Homo sapiens; identical to SEQ ID NO: 1208
  misc_feature 92, 166, 229: n = A,T,C or G

SEQ ID NO: 7575 - DNA, 406 bp, Homo sapiens; identical to SEQ ID NO: 1209
  misc_feature 113, 128, 215, 251, 274, 327, 361, 374: n = A,T,C or G

SEQ ID NO: 7576 - DNA, 317 bp, Homo sapiens; identical to SEQ ID NO: 1210
  misc_feature 220, 308: n = A,T,C or G

SEQ ID NO: 7577 - DNA, 286 bp, Homo sapiens; identical to SEQ ID NO: 1211
  misc_feature 7, 23, 46, 82, 95, 111, 123, 129, 135, 172, 188, 191, 203,204, 208, 209, 210, 218, 219, 261, 267: n = A,T,C or G

SEQ ID NO: 7578 - DNA, 533 bp, Homo sapiens; identical to SEQ ID NO: 1212
  misc_feature 5: n = A,T,C or G

SEQ ID NO: 7579 - DNA, 475 bp, Homo sapiens; identical to SEQ ID NO: 1214

SEQ ID NO: 7580 - DNA, 410 bp, Homo sapiens; identical to SEQ ID NO: 1215

SEQ ID NO: 7581 - DNA, 524 bp, Homo sapiens; identical to SEQ ID NO: 1216
  misc_feature 449, 493: n = A,T,C or G

SEQ ID NO: 7582 - DNA, 433 bp, Homo sapiens; identical to SEQ ID NO: 1217

SEQ ID NO: 7583 - DNA, 400 bp, Homo sapiens; identical to SEQ ID NO: 1218
  misc_feature 171, 186, 334: n = A,T,C or G

SEQ ID NO: 7584 - DNA, 535 bp, Homo sapiens; identical to SEQ ID NO: 1219
  misc_feature 129, 213, 228, 246, 255, 258, 267, 276, 277, 280, 284, 293,297, 300, 302, 312, 315, 316, 317, 334, 336, 338, 356, 359,363, 376, 381, 388, 390, 400, 404, 409, 410, 421, 422, 423,426, 451, 455, 503, 512, 518, 521: n = A,T,C or G

SEQ ID NO: 7585 - DNA, 422 bp, Homo sapiens; identical to SEQ ID NO: 1220

SEQ ID NO: 7586 - DNA, 437 bp, Homo sapiens; identical to SEQ ID NO: 1221
  misc_feature 8: n = A,T,C or G

SEQ ID NO: 7587 - DNA, 416 bp, Homo sapiens; identical to SEQ ID NO: 1222
  misc_feature 305: n = A,T,C or G

SEQ ID NO: 7588 - DNA, 324 bp, Homo sapiens; identical to SEQ ID NO: 1223
  misc_feature 65, 219: n = A,T,C or G

SEQ ID NO: 7589 - DNA, 505 bp, Homo sapiens; identical to SEQ ID NO: 1224
  misc_feature 475: n = A,T,C or G

SEQ ID NO: 7590 - DNA, 507 bp, Homo sapiens; identical to SEQ ID NO: 1225
  misc_feature 451, 476, 483: n = A,T,C or G

SEQ ID NO: 7591 - DNA, 437 bp, Homo sapiens; identical to SEQ ID NO: 1226

SEQ ID NO: 7592 - DNA, 367 bp, Homo sapiens; identical to SEQ ID NO: 1227

SEQ ID NO: 7593 - DNA, 524 bp, Homo sapiens; identical to SEQ ID NO: 1228
  misc_feature 448: n = A,T,C or G

SEQ ID NO: 7594 - DNA, 425 bp, Homo sapiens; identical to SEQ ID NO: 1229
  misc_feature 101, 118: n = A,T,C or G

SEQ ID NO: 7595 - DNA, 521 bp, Homo sapiens; identical to SEQ ID NO: 1230
  misc_feature 197, 215, 218, 224, 231, 238, 240, 245, 246, 249, 252, 253,259, 261, 263, 274, 276, 279, 285, 286, 287, 288, 289, 290,292, 313, 324, 330, 332, 333, 334, 335, 340, 351, 352, 354,356, 357, 359, 360, 363, 366, 370, 371, 374, 382, 394: n = A,T,C or G
  misc_feature 412, 413, 429, 434, 435, 456, 457, 469, 476, 480, 482, 495,498, 502, 503, 506: n = A,T,C or G

SEQ ID NO: 7596 - DNA, 376 bp, Homo sapiens; identical to SEQ ID NO: 1231

SEQ ID NO: 7597 - DNA, 255 bp, Homo sapiens; identical to SEQ ID NO: 1232

SEQ ID NO: 7598 - DNA, 407 bp, Homo sapiens; identical to SEQ ID NO: 1233
  misc_feature 3, 40, 81, 273, 358, 368, 395: n = A,T,C or G

SEQ ID NO: 7599 - DNA, 538 bp, Homo sapiens; identical to SEQ ID NO: 1234
  misc_feature 3, 368, 377, 455, 522: n = A,T,C or G

SEQ ID NO: 7600 - DNA, 344 bp, Homo sapiens; identical to SEQ ID NO: 1235

SEQ ID NO: 7601 - DNA, 483 bp, Homo sapiens; identical to SEQ ID NO: 1236
  misc_feature 28, 75, 95, 115, 150, 160, 163, 195, 206, 235, 256, 264,269, 292, 293, 294, 297, 305, 306, 315, 326, 327, 335, 345,346, 350, 351, 375, 391, 393, 404, 409, 411, 436, 442, 458,459, 462, 481: n = A,T,C or G

SEQ ID NO: 7602 - DNA, 435 bp, Homo sapiens; identical to SEQ ID NO: 1237
  misc_feature 4: n = A,T,C or G

SEQ ID NO: 7603 - DNA, 520 bp, Homo sapiens; identical to SEQ ID NO: 1239
  misc_feature 156, 191, 256, 274, 292, 302, 311, 314, 321, 326, 341, 348,350, 359, 364, 366, 370, 371, 372, 380, 395, 398, 415, 416,429, 431, 446, 458, 461, 487, 488, 496, 505, 515: n = A,T,C or G

SEQ ID NO: 7604 - DNA, 231 bp, Homo sapiens; identical to SEQ ID NO: 1240

SEQ ID NO: 7605 - DNA, 368 bp, Homo sapiens; identical to SEQ ID NO: 1241
  misc_feature 29: n = A,T,C or G

SEQ ID NO: 7606 - DNA, 244 bp, Homo sapiens; identical to SEQ ID NO: 1242

SEQ ID NO: 7607 - DNA, 360 bp, Homo sapiens; identical to SEQ ID NO: 1243
  misc_feature 345: n = A,T,C or G

SEQ ID NO: 7608 - DNA, 390 bp, Homo sapiens; identical to SEQ ID NO: 1244

SEQ ID NO: 7609 - DNA, 375 bp, Homo sapiens; identical to SEQ ID NO: 1245
  misc_feature 198, 346: n = A,T,C or G

SEQ ID NO: 7610 - DNA, 209 bp, Homo sapiens; identical to SEQ ID NO: 1246

SEQ ID NO: 7611 - DNA, 483 bp, Homo sapiens; identical to SEQ ID NO: 1247
  misc_feature 6, 324: n = A,T,C or G

SEQ ID NO: 7612 - DNA, 395 bp, Homo sapiens; identical to SEQ ID NO: 1248
  misc_feature 23, 94, 222, 241, 276, 338, 362: n = A,T,C or G

SEQ ID NO: 7613 - DNA, 452 bp, Homo sapiens; identical to SEQ ID NO: 1249
  misc_feature 415: n = A,T,C or G

SEQ ID NO: 7614 - DNA, 407 bp, Homo sapiens; identical to SEQ ID NO: 1250
  misc_feature 4, 384: n = A,T,C or G

SEQ ID NO: 7615 - DNA, 394 bp, Homo sapiens; identical to SEQ ID NO: 1251
  misc_feature 3, 330: n = A,T,C or G

SEQ ID NO: 7616 - DNA, 432 bp, Homo sapiens; identical to SEQ ID NO: 1252
  misc_feature 403: n = A,T,C or G

SEQ ID NO: 7617 - DNA, 420 bp, Homo sapiens; identical to SEQ ID NO: 1253
  misc_feature 4, 265, 319, 322: n = A,T,C or G

SEQ ID NO: 7618 - DNA, 391 bp, Homo sapiens; identical to SEQ ID NO: 1254
  misc_feature 16: n = A,T,C or G

SEQ ID NO: 7619 - DNA, 374 bp, Homo sapiens; identical to SEQ ID NO: 1255
  misc_feature 216, 335, 339, 354: n = A,T,C or G

SEQ ID NO: 7620 - DNA, 347 bp, Homo sapiens; identical to SEQ ID NO: 1256
  misc_feature 51: n = A,T,C or G

SEQ ID NO: 7621 - DNA, 363 bp, Homo sapiens; identical to SEQ ID NO: 1257

SEQ ID NO: 7622 - DNA, 441 bp, Homo sapiens; identical to SEQ ID NO: 1258

SEQ ID NO: 7623 - DNA, 386 bp, Homo sapiens; identical to SEQ ID NO: 1259
  misc_feature 356: n = A,T,C or G

SEQ ID NO: 7624 - DNA, 383 bp, Homo sapiens; identical to SEQ ID NO: 1260
  misc_feature 7: n = A,T,C or G

SEQ ID NO: 7625 - DNA, 430 bp, Homo sapiens; identical to SEQ ID NO: 1261
  misc_feature 2: n = A,T,C or G

SEQ ID NO: 7626 - DNA, 395 bp, Homo sapiens; identical to SEQ ID NO: 1262
  misc_feature 25, 108, 348: n = A,T,C or G

SEQ ID NO: 7627 - DNA, 753 bp, Homo sapiens; identical to SEQ ID NO: 1263
  misc_feature 557, 663, 667, 691, 711, 721, 737: n = A,T,C or G

SEQ ID NO: 7628 - DNA, 513 bp, Homo sapiens; identical to SEQ ID NO: 1264
  misc_feature 157, 289, 334, 352, 366, 370, 382, 383, 384, 401, 412, 417,423, 427, 433, 443, 448, 454, 469, 477, 482, 486, 491: n = A,T,C or G

SEQ ID NO: 7629 - DNA, 570 bp, Homo sapiens; identical to SEQ ID NO: 1265

SEQ ID NO: 7630 - DNA, 479 bp, Homo sapiens; identical to SEQ ID NO: 1266
  misc_feature 311, 336, 357, 372, 384, 387, 403, 411, 430, 450, 458, 468: n = A,T,C or G

SEQ ID NO: 7631 - DNA, 454 bp, Homo sapiens; identical to SEQ ID NO: 1267

SEQ ID NO: 7632 - DNA, 430 bp, Homo sapiens; identical to SEQ ID NO: 1268

SEQ ID NO: 7633 - DNA, 403 bp, Homo sapiens; identical to SEQ ID NO: 1269

SEQ ID NO: 7634 - DNA, 378 bp, Homo sapiens; identical to SEQ ID NO: 1270

SEQ ID NO: 7635 - DNA, 315 bp, Homo sapiens; identical to SEQ ID NO: 1271

SEQ ID NO: 7636 - DNA, 416 bp, Homo sapiens; identical to SEQ ID NO: 1272
  misc_feature 56: n = A,T,C or G

SEQ ID NO: 7637 - DNA, 451 bp, Homo sapiens; identical to SEQ ID NO: 1273

SEQ ID NO: 7638 - DNA, 454 bp, Homo sapiens; identical to SEQ ID NO: 1274
  misc_feature 11, 15, 16, 17, 18: n = A,T,C or G

SEQ ID NO: 7639 - DNA, 404 bp, Homo sapiens; identical to SEQ ID NO: 1275
  misc_feature 142, 359: n = A,T,C or G

SEQ ID NO: 7640 - DNA, 643 bp, Homo sapiens; identical to SEQ ID NO: 1276
  misc_feature 139, 147, 152, 156, 160, 165, 174, 178, 187, 240, 247, 265,300, 308, 309, 314, 324, 329, 344, 358, 362, 363, 387, 395,399, 402, 407, 411, 417, 418, 419, 450, 474, 488, 491, 542,546, 580, 582, 583, 628, 636: n = A,T,C or G

SEQ ID NO: 7641 - DNA, 622 bp, Homo sapiens; identical to SEQ ID NO: 1277
  misc_feature 112, 157, 169, 178, 184, 193, 273, 279, 282, 285, 287, 298,300, 304, 321, 393, 395, 414, 426, 432, 433, 488, 491, 497,504, 510, 514, 516, 520, 533, 539, 559, 566, 589, 595, 609,613: n = A,T,C or G

SEQ ID NO: 7642 - DNA, 441 bp, Homo sapiens; identical to SEQ ID NO: 1278
  misc_feature 269, 296, 323, 329, 414, 427, 436: n = A,T,C or G

SEQ ID NO: 7643 - DNA, 418 bp, Homo sapiens; identical to SEQ ID NO: 1279
  misc_feature 1: n = A,T,C or G

SEQ ID NO: 7644 - DNA, 197 bp, Homo sapiens; identical to SEQ ID NO: 1280
  misc_feature 20, 48, 51: n = A,T,C or G

SEQ ID NO: 7645 - DNA, 358 bp, Homo sapiens; identical to SEQ ID NO: 1281
  misc_feature 121: n = A,T,C or G

SEQ ID NO: 7646 - DNA, 385 bp, Homo sapiens; identical to SEQ ID NO: 1282

SEQ ID NO: 7647 - DNA, 497 bp, Homo sapiens; identical to SEQ ID NO: 1283
  misc_feature 15, 42, 106, 216, 268, 275, 371, 427, 467, 481, 485: n = A,T,C or G

SEQ ID NO: 7648 - DNA, 537 bp, Homo sapiens; identical to SEQ ID NO: 1284

SEQ ID NO: 7649 - DNA, 418 bp, Homo sapiens; identical to SEQ ID NO: 1285
  misc_feature 34, 145: n = A,T,C or G

SEQ ID NO: 7650 - DNA, 548 bp, Homo sapiens; identical to SEQ ID NO: 1286

SEQ ID NO: 7651 - DNA, 510 bp, Homo sapiens; identical to SEQ ID NO: 1287
  misc_feature 159: n = A,T,C or G

SEQ ID NO: 7652 - DNA, 569 bp, Homo sapiens; identical to SEQ ID NO: 1288
  misc_feature 459: n = A,T,C or G

SEQ ID NO: 7653 - DNA, 595 bp, Homo sapiens; identical to SEQ ID NO: 1289
  misc_feature 474, 485, 503, 511, 517, 591: n = A,T,C or G

SEQ ID NO: 7654 - DNA, 478 bp, Homo sapiens; identical to SEQ ID NO: 1290

SEQ ID NO: 7655 - DNA, 490 bp, Homo sapiens; identical to SEQ ID NO: 1291
  misc_feature 141, 434, 472: n = A,T,C or G

SEQ ID NO: 7656 - DNA, 597 bp, Homo sapiens; identical to SEQ ID NO: 1292
  misc_feature 238, 468: n = A,T,C or G

SEQ ID NO: 7657 - DNA, 491 bp, Homo sapiens; identical to SEQ ID NO: 1293

SEQ ID NO: 7658 - DNA, 385 bp, Homo sapiens; identical to SEQ ID NO: 1294

SEQ ID NO: 7659 - DNA, 494 bp, Homo sapiens; identical to SEQ ID NO: 1295

SEQ ID NO: 7660 - DNA, 311 bp, Homo sapiens; identical to SEQ ID NO: 1296

SEQ ID NO: 7661 - DNA, 409 bp, Homo sapiens; identical to SEQ ID NO: 1297
  misc_feature 147: n = A,T,C or G

SEQ ID NO: 7662 - DNA, 502 bp, Homo sapiens; identical to SEQ ID NO: 1298

SEQ ID NO: 7663 - DNA, 387 bp, Homo sapiens; identical to SEQ ID NO: 1299

SEQ ID NO: 7664 - DNA, 350 bp, Homo sapiens; identical to SEQ ID NO: 1300
  misc_feature 3, 212, 290, 299: n = A,T,C or G

SEQ ID NO: 7665 - DNA, 437 bp, Homo sapiens; identical to SEQ ID NO: 1301
  misc_feature 2, 21, 202: n = A,T,C or G

SEQ ID NO: 7666 - DNA, 369 bp, Homo sapiens; identical to SEQ ID NO: 1302

SEQ ID NO: 7667 - DNA, 367 bp, Homo sapiens; identical to SEQ ID NO: 1303

SEQ ID NO: 7668 - DNA, 370 bp, Homo sapiens; identical to SEQ ID NO: 1304

SEQ ID NO: 7669 - DNA, 591 bp, Homo sapiens; identical to SEQ ID NO: 1305
  misc_feature 105, 106, 107, 108, 109, 110, 111, 112, 113, 114, 115, 116,117, 118, 119, 120, 121, 122, 123, 124, 125, 126, 127, 128,129, 130, 131, 132, 133, 134, 135, 136, 137, 138, 139, 140,141, 142, 143, 144, 145, 146, 147, 148, 149, 150, 151: n = A,T,C or G
  misc_feature 152, 153, 154, 155, 156, 157, 158, 159, 160, 161, 162, 163,164, 165, 166, 167, 168, 169, 170, 171, 172, 173, 174, 175,176, 177, 178, 179, 180, 181, 182, 183, 184, 185, 186, 187,188, 189, 190, 191, 192, 193, 194, 195, 196, 197, 198: n = A,T,C or G
  misc_feature 199, 201, 202, 203, 204, 205, 206, 207, 208, 209, 210, 211,212, 213, 214, 215, 216, 217, 218, 219, 220, 221, 222, 223,224, 225, 226, 227, 228, 229, 230, 231, 232, 233, 234, 235,236, 237, 238, 239, 240, 241, 242, 243, 244, 245, 246: n = A,T,C or G
  misc_feature 247, 248, 249, 250, 251, 252, 253, 254, 255, 267, 274, 284,285, 286, 287, 288, 289, 290, 291, 292, 293, 294, 295, 296,297, 298, 299, 300, 301, 302, 303, 304, 305, 306, 307, 308,309, 310, 322, 393, 394, 395, 396, 397, 398, 399, 400: n = A,T,C or G
  misc_feature 401, 402, 403, 404, 405, 406, 407, 408, 409, 410, 411, 412,413, 414, 415, 416, 417, 418, 419, 420, 421, 422, 423, 496,538, 549, 555: n = A,T,C or G

SEQ ID NO: 7670 - DNA, 566 bp, Homo sapiens; identical to SEQ ID NO: 1306
  misc_feature 540: n = A,T,C or G

SEQ ID NO: 7671 - DNA, 188 bp, Homo sapiens; identical to SEQ ID NO: 1307

SEQ ID NO: 7672 - DNA, 585 bp, Homo sapiens; identical to SEQ ID NO: 1308
  misc_feature 114, 124, 158, 188, 260, 270, 275, 288, 315, 371, 480, 489,507, 508, 540, 569: n = A,T,C or G

SEQ ID NO: 7673 - DNA, 621 bp, Homo sapiens; identical to SEQ ID NO: 1309
  misc_feature 201, 209, 221, 250, 277, 308, 317, 337, 342, 343, 354, 355,356, 367, 384, 396, 406, 414, 418, 419, 425, 427, 432, 455,458, 465, 471, 474, 494, 500, 504, 507, 511, 513, 514, 516,521, 522, 523, 536, 549, 556, 557, 558, 559, 563, 564: n = A,T,C or G
  misc_feature 569, 574, 578, 582, 587, 589, 597, 608: n = A,T,C or G

SEQ ID NO: 7674 - DNA, 294 bp, Homo sapiens; identical to SEQ ID NO: 1310

SEQ ID NO: 7675 - DNA, 311 bp, Homo sapiens; identical to SEQ ID NO: 1311

SEQ ID NO: 7676 - DNA, 383 bp, Homo sapiens; identical to SEQ ID NO: 1312
  misc_feature 23, 383: n = A,T,C or G

SEQ ID NO: 7677 - DNA, 502 bp, Homo sapiens; identical to SEQ ID NO: 1313

SEQ ID NO: 7678 - DNA, 512 bp, Homo sapiens; identical to SEQ ID NO: 1314

SEQ ID NO: 7679 - DNA, 498 bp, Homo sapiens; identical to SEQ ID NO: 1315

SEQ ID NO: 7680 - DNA, 306 bp, Homo sapiens; identical to SEQ ID NO: 1316

SEQ ID NO: 7681 - DNA, 466 bp, Homo sapiens; identical to SEQ ID NO: 1317

SEQ ID NO: 7682 - DNA, 274 bp, Homo sapiens; identical to SEQ ID NO: 1318

SEQ ID NO: 7683 - DNA, 461 bp, Homo sapiens; identical to SEQ ID NO: 1319

SEQ ID NO: 7684 - DNA, 230 bp, Homo sapiens; identical to SEQ ID NO: 1320
  misc_feature 210, 222: n = A,T,C or G

SEQ ID NO: 7685 - DNA, 472 bp, Homo sapiens; identical to SEQ ID NO: 1321
  misc_feature 24, 115, 336: n = A,T,C or G

SEQ ID NO: 7686 - DNA, 435 bp, Homo sapiens; identical to SEQ ID NO: 1322

SEQ ID NO: 7687 - DNA, 561 bp, Homo sapiens; identical to SEQ ID NO: 1323
  misc_feature 113, 114: n = A,T,C or G

SEQ ID NO: 7688 - DNA, 479 bp, Homo sapiens; identical to SEQ ID NO: 1324
  misc_feature 409, 457: n = A,T,C or G

SEQ ID NO: 7689 - DNA, 384 bp, Homo sapiens; identical to SEQ ID NO: 1325
  misc_feature 377: n = A,T,C or G

SEQ ID NO: 7690 - DNA, 280 bp, Homo sapiens; identical to SEQ ID NO: 1326
  misc_feature 15, 28, 61, 130: n = A,T,C or G

SEQ ID NO: 7691 - DNA, 463 bp, Homo sapiens; identical to SEQ ID NO: 1327

SEQ ID NO: 7692 - DNA, 396 bp, Homo sapiens; identical to SEQ ID NO: 1328
  misc_feature 18, 380: n = A,T,C or G

SEQ ID NO: 7693 - DNA, 463 bp, Homo sapiens; identical to SEQ ID NO: 1329

SEQ ID NO: 7694 - DNA, 417 bp, Homo sapiens; identical to SEQ ID NO: 1330

SEQ ID NO: 7695 - DNA, 460 bp, Homo sapiens; identical to SEQ ID NO: 1331
  misc_feature 10, 338: n = A,T,C or G

SEQ ID NO: 7696 - DNA, 310 bp, Homo sapiens; identical to SEQ ID NO: 1332

SEQ ID NO: 7697 - DNA, 483 bp, Homo sapiens; identical to SEQ ID NO: 1333
  misc_feature 89, 92: n = A,T,C or G

SEQ ID NO: 7698 - DNA, 567 bp, Homo sapiens; identical to SEQ ID NO: 1334
  misc_feature 29, 114, 115, 198, 485: n = A,T,C or G

SEQ ID NO: 7699 - DNA, 567 bp, Homo sapiens; identical to SEQ ID NO: 1335
  misc_feature 551: n = A,T,C or G

SEQ ID NO: 7700 - DNA, 442 bp, Homo sapiens; identical to SEQ ID NO: 1336
  misc_feature 152: n = A,T,C or G

SEQ ID NO: 7701 - DNA, 400 bp, Homo sapiens; identical to SEQ ID NO: 1337
  misc_feature 91, 92, 286: n = A,T,C or G

SEQ ID NO: 7702 - DNA, 475 bp, Homo sapiens; identical to SEQ ID NO: 1338

SEQ ID NO: 7703 - DNA, 307 bp, Homo sapiens; identical to SEQ ID NO: 1339
  misc_feature 116: n = A,T,C or G

SEQ ID NO: 7704 - DNA, 384 bp, Homo sapiens; identical to SEQ ID NO: 1340
  misc_feature 109, 116: n = A,T,C or G

SEQ ID NO: 7705 - DNA, 510 bp, Homo sapiens; identical to SEQ ID NO: 1341
  misc_feature 81, 90: n = A,T,C or G

SEQ ID NO: 7706 - DNA, 465 bp, Homo sapiens; identical to SEQ ID NO: 1342
  misc_feature 418, 434, 447: n = A,T,C or G

SEQ ID NO: 7707 - DNA, 555 bp, Homo sapiens; identical to SEQ ID NO: 1343
  misc_feature 112, 485, 532: n = A,T,C or G

SEQ ID NO: 7708 - DNA, 408 bp, Homo sapiens; identical to SEQ ID NO: 1344
  misc_feature 225, 256, 397: n = A,T,C or G

SEQ ID NO: 7709 - DNA, 434 bp, Homo sapiens; identical to SEQ ID NO: 1345

SEQ ID NO: 7710 - DNA, 292 bp, Homo sapiens; identical to SEQ ID NO: 1346
  misc_feature 221: n = A,T,C or G

SEQ ID NO: 7711 - DNA, 327 bp, Homo sapiens; identical to SEQ ID NO: 1347
  misc_feature 25, 30, 68, 91, 96, 97: n = A,T,C or G

SEQ ID NO: 7712 - DNA, 190 bp, Homo sapiens; identical to SEQ ID NO: 1348

SEQ ID NO: 7713 - DNA, 518 bp, Homo sapiens; identical to SEQ ID NO: 1349
  misc_feature 498: n = A,T,C or G

SEQ ID NO: 7714 - DNA, 240 bp, Homo sapiens; identical to SEQ ID NO: 1350
  misc_feature 155: n = A,T,C or G

SEQ ID NO: 7715 - DNA, 851 bp, Homo sapiens; identical to SEQ ID NO: 1351
  misc_feature 495, 499, 510, 551, 556, 562, 586, 595, 622, 628, 632, 635,645, 659, 663, 669, 670, 705, 723, 730, 735, 747, 751, 762,773, 786, 789, 795, 815, 817, 819, 822, 828, 832, 833, 834: n = A,T,C or G

SEQ ID NO: 7716 - DNA, 807 bp, Homo sapiens; identical to SEQ ID NO: 1352
  misc_feature 150, 366, 435, 460, 468, 490, 525, 536, 546, 549, 559, 572,573, 577, 612, 617, 627, 636, 661, 682, 687, 689, 699, 702,708, 712, 716, 719, 734, 735, 742, 747, 751, 752, 755, 758,769, 772, 774, 775, 776, 781, 793, 803, 806: n = A,T,C or G

SEQ ID NO: 7717 - DNA, 537 bp, Homo sapiens; identical to SEQ ID NO: 1353

SEQ ID NO: 7718 - DNA, 305 bp, Homo sapiens; identical to SEQ ID NO: 1354

SEQ ID NO: 7719 - DNA, 508 bp, Homo sapiens; identical to SEQ ID NO: 1355

SEQ ID NO: 7720 - DNA, 226 bp, Homo sapiens; identical to SEQ ID NO: 1356
  misc_feature 141: n = A,T,C or G

SEQ ID NO: 7721 - DNA, 490 bp, Homo sapiens; identical to SEQ ID NO: 1357

SEQ ID NO: 7722 - DNA, 286 bp, Homo sapiens; identical to SEQ ID NO: 1358

SEQ ID NO: 7723 - DNA, 294 bp, Homo sapiens; identical to SEQ ID NO: 1359
  misc_feature 233, 246, 249, 256: n = A,T,C or G

SEQ ID NO: 7724 - DNA, 384 bp, Homo sapiens; identical to SEQ ID NO: 1360
  misc_feature 4, 61, 64, 118, 120, 165, 168, 187, 189, 195, 232, 376: n = A,T,C or G

SEQ ID NO: 7725 - DNA, 353 bp, Homo sapiens; identical to SEQ ID NO: 1361

SEQ ID NO: 7726 - DNA, 362 bp, Homo sapiens; identical to SEQ ID NO: 1362
  misc_feature 292, 329: n = A,T,C or G

SEQ ID NO: 7727 - DNA, 281 bp, Homo sapiens; identical to SEQ ID NO: 1363
  misc_feature 207, 262: n = A,T,C or G

SEQ ID NO: 7728 - DNA, 422 bp, Homo sapiens; identical to SEQ ID NO: 1364

SEQ ID NO: 7729 - DNA, 533 bp, Homo sapiens; identical to SEQ ID NO: 1365
  misc_feature 13, 188, 353, 364, 365, 367, 369, 370, 377, 395, 397, 408,411, 423, 428, 435, 441, 447, 454, 504, 510, 512: n = A,T,C or G

SEQ ID NO: 7730 - DNA, 299 bp, Homo sapiens; identical to SEQ ID NO: 1366
  misc_feature 3: n = A,T,C or G

SEQ ID NO: 7731 - DNA, 313 bp, Homo sapiens; identical to SEQ ID NO: 1367
  misc_feature 5: n = A,T,C or G

SEQ ID NO: 7732 - DNA, 462 bp, Homo sapiens; identical to SEQ ID NO: 1368
  misc_feature 399, 457: n = A,T,C or G

SEQ ID NO: 7733 - DNA, 294 bp, Homo sapiens; identical to SEQ ID NO: 1369
  misc_feature 294: n = A,T,C or G

SEQ ID NO: 7734 - DNA, 161 bp, Homo sapiens; identical to SEQ ID NO: 1370

SEQ ID NO: 7735 - DNA, 395 bp, Homo sapiens; identical to SEQ ID NO: 1371
  misc_feature 228, 229, 230, 231, 232, 233, 234, 235, 236, 237, 238, 239,240, 241, 242, 243, 244, 245, 246, 247, 248, 249, 250, 251,280, 335, 357: n = A,T,C or G

SEQ ID NO: 7736 - DNA, 408 bp, Homo sapiens; identical to SEQ ID NO: 1373

SEQ ID NO: 7737 - DNA, 556 bp, Homo sapiens; identical to SEQ ID NO: 1374
  misc_feature 258, 276, 283, 294, 305, 308, 342, 345, 373, 378, 382, 391,394, 396, 401, 402, 421, 422, 423, 426, 434, 436, 443, 444,446, 447, 459, 476, 499, 500, 512, 514, 529, 534, 535, 543,544, 545: n = A,T,C or G

SEQ ID NO: 7738 - DNA, 409 bp, Homo sapiens; identical to SEQ ID NO: 1375
  misc_feature 269, 270, 285, 316, 346, 347, 353, 354, 368, 370, 372, 373,378, 385, 387, 391, 396: n = A,T,C or G

SEQ ID NO: 7739 - DNA, 347 bp, Homo sapiens; identical to SEQ ID NO: 1376
  misc_feature 8: n = A,T,C or G

SEQ ID NO: 7740 - DNA, 426 bp, Homo sapiens; identical to SEQ ID NO: 1377

SEQ ID NO: 7741 - DNA, 287 bp, Homo sapiens; identical to SEQ ID NO: 1378
  misc_feature 110, 196: n = A,T,C or G

SEQ ID NO: 7742 - DNA, 402 bp, Homo sapiens; identical to SEQ ID NO: 1379
  misc_feature 352: n = A,T,C or G

SEQ ID NO: 7743 - DNA, 319 bp, Homo sapiens; identical to SEQ ID NO: 1380
  misc_feature 194, 219, 239, 274: n = A,T,C or G

SEQ ID NO: 7744 - DNA, 397 bp, Homo sapiens; identical to SEQ ID NO: 1381
  misc_feature 6: n = A,T,C or G

SEQ ID NO: 7745 - DNA, 458 bp, Homo sapiens; identical to SEQ ID NO: 1382

SEQ ID NO: 7746 - DNA, 141 bp, Homo sapiens; identical to SEQ ID NO: 1383

SEQ ID NO: 7747 - DNA, 249 bp, Homo sapiens; identical to SEQ ID NO: 1384
  misc_feature 194: n = A,T,C or G

SEQ ID NO: 7748 - DNA, 249 bp, Homo sapiens; identical to SEQ ID NO: 1385
  misc_feature 123: n = A,T,C or G

SEQ ID NO: 7749 - DNA, 199 bp, Homo sapiens; identical to SEQ ID NO: 1386

SEQ ID NO: 7750 - DNA, 200 bp, Homo sapiens; identical to SEQ ID NO: 1387
  misc_feature 151, 181: n = A,T,C or G

SEQ ID NO: 7751 - DNA, 471 bp, Homo sapiens; identical to SEQ ID NO: 1388
  misc_feature 381, 382: n = A,T,C or G

SEQ ID NO: 7752 - DNA, 476 bp, Homo sapiens; identical to SEQ ID NO: 1389
  misc_feature 190, 192, 244, 270, 402: n = A,T,C or G

SEQ ID NO: 7753 - DNA, 390 bp, Homo sapiens; identical to SEQ ID NO: 1390

SEQ ID NO: 7754 - DNA, 154 bp, Homo sapiens; identical to SEQ ID NO: 1391

SEQ ID NO: 7755 - DNA, 226 bp, Homo sapiens; identical to SEQ ID NO: 1392
  misc_feature 167: n = A,T,C or G

SEQ ID NO: 7756 - DNA, 344 bp, Homo sapiens; identical to SEQ ID NO: 1393
  misc_feature 266, 268, 272: n = A,T,C or G

SEQ ID NO: 7757 - DNA, 357 bp, Homo sapiens; identical to SEQ ID NO: 1395

SEQ ID NO: 7758 - DNA, 352 bp, Homo sapiens; identical to SEQ ID NO: 1396

SEQ ID NO: 7759 - DNA, 271 bp, Homo sapiens; identical to SEQ ID NO: 1397

SEQ ID NO: 7760 - DNA, 347 bp, Homo sapiens; identical to SEQ ID NO: 1398

SEQ ID NO: 7761 - DNA, 330 bp, Homo sapiens; identical to SEQ ID NO: 1399
  misc_feature 196, 231, 234, 241, 254, 264, 267, 278, 311: n = A,T,C or G

SEQ ID NO: 7762 - DNA, 286 bp, Homo sapiens; identical to SEQ ID NO: 1400
  misc_feature 254: n = A,T,C or G

SEQ ID NO: 7763 - DNA, 332 bp, Homo sapiens; identical to SEQ ID NO: 1401
  misc_feature 62, 208, 312: n = A,T,C or G

SEQ ID NO: 7764 - DNA, 332 bp, Homo sapiens; identical to SEQ ID NO: 1402
  misc_feature 297: n = A,T,C or G

SEQ ID NO: 7765 - DNA, 331 bp, Homo sapiens; identical to SEQ ID NO: 1403
  misc_feature 235: n = A,T,C or G

SEQ ID NO: 7766 - DNA, 281 bp, Homo sapiens; identical to SEQ ID NO: 1404

SEQ ID NO: 7767 - DNA, 330 bp, Homo sapiens; identical to SEQ ID NO: 1405

SEQ ID NO: 7768 - DNA, 359 bp, Homo sapiens; identical to SEQ ID NO: 1406

SEQ ID NO: 7769 - DNA, 352 bp, Homo sapiens; identical to SEQ ID NO: 1407

SEQ ID NO: 7770 - DNA, 346 bp, Homo sapiens; identical to SEQ ID NO: 1408
  misc_feature 296, 305, 325: n = A,T,C or G

SEQ ID NO: 7771 - DNA, 346 bp, Homo sapiens; identical to SEQ ID NO: 1409

SEQ ID NO: 7772 - DNA, 356 bp, Homo sapiens; identical to SEQ ID NO: 1410
  misc_feature 241, 250, 290: n = A,T,C or G

SEQ ID NO: 7773 - DNA, 298 bp, Homo sapiens; identical to SEQ ID NO: 1411

SEQ ID NO: 7774 - DNA, 346 bp, Homo sapiens; identical to SEQ ID NO: 1412

SEQ ID NO: 7775 - DNA, 233 bp, Homo sapiens; identical to SEQ ID NO: 1413
  misc_feature 14, 114, 150, 158, 177, 178, 179, 180, 186, 190, 201, 221,223: n = A,T,C or G

SEQ ID NO: 7776 - DNA, 249 bp, Homo sapiens; identical to SEQ ID NO: 1414
  misc_feature 1, 3, 5, 55, 64, 137, 169, 177, 193, 194, 211, 212, 220,228, 230: n = A,T,C or G

SEQ ID NO: 7777 - DNA, 347 bp, Homo sapiens; identical to SEQ ID NO: 1415

SEQ ID NO: 7778 - DNA, 328 bp, Homo sapiens; identical to SEQ ID NO: 1416
  misc_feature 127: n = A,T,C or G

SEQ ID NO: 7779 - DNA, 534 bp, Homo sapiens; identical to SEQ ID NO: 1417

SEQ ID NO: 7780 - DNA, 582 bp, Homo sapiens; identical to SEQ ID NO: 1418
  misc_feature 34, 41, 42, 561: n = A,T,C or G

SEQ ID NO: 7781 - DNA, 467 bp, Homo sapiens; identical to SEQ ID NO: 1419

SEQ ID NO: 7782 - DNA, 456 bp, Homo sapiens; identical to SEQ ID NO: 1420

SEQ ID NO: 7783 - DNA, 491 bp, Homo sapiens; identical to SEQ ID NO: 1421
  misc_feature 62, 80, 83, 92, 100, 157, 486: n = A,T,C or G

SEQ ID NO: 7784 - DNA, 274 bp, Homo sapiens; identical to SEQ ID NO: 1422

SEQ ID NO: 7785 - DNA, 383 bp, Homo sapiens; identical to SEQ ID NO: 1423

SEQ ID NO: 7786 - DNA, 259 bp, Homo sapiens; identical to SEQ ID NO: 1424
  misc_feature 1, 2: n = A,T,C or G

SEQ ID NO: 7787 - DNA, 456 bp, Homo sapiens; identical to SEQ ID NO: 1425

SEQ ID NO: 7788 - DNA, 394 bp, Homo sapiens; identical to SEQ ID NO: 1426

SEQ ID NO: 7789 - DNA, 523 bp, Homo sapiens; identical to SEQ ID NO: 1427
  misc_feature 12: n = A,T,C or G

SEQ ID NO: 7790 - DNA, 389 bp, Homo sapiens; identical to SEQ ID NO: 1428

SEQ ID NO: 7791 - DNA, 399 bp, Homo sapiens; identical to SEQ ID NO: 1429
  misc_feature 1, 3, 5, 16, 17, 18, 19, 23, 26, 32, 33, 37, 39, 116, 179: n = A,T,C or G

SEQ ID NO: 7792 - DNA, 214 bp, Homo sapiens; identical to SEQ ID NO: 1430
  misc_feature 32, 35, 197: n = A,T,C or G

SEQ ID NO: 7793 - DNA, 469 bp, Homo sapiens; identical to SEQ ID NO: 1431
  misc_feature 274, 446: n = A,T,C or G

SEQ ID NO: 7794 - DNA, 416 bp, Homo sapiens; identical to SEQ ID NO: 1432
  misc_feature 5, 297, 307: n = A,T,C or G

SEQ ID NO: 7795 - DNA, 318 bp, Homo sapiens; identical to SEQ ID NO: 1433
  misc_feature 115, 116, 122, 242, 252, 256, 257, 289, 299: n = A,T,C or G

SEQ ID NO: 7796 - DNA, 580 bp, Homo sapiens; identical to SEQ ID NO: 1434
  misc_feature 38, 452, 550, 554, 564: n = A,T,C or G

SEQ ID NO: 7797 - DNA, 414 bp, Homo sapiens; identical to SEQ ID NO: 1435
  misc_feature 55: n = A,T,C or G

SEQ ID NO: 7798 - DNA, 604 bp, Homo sapiens; identical to SEQ ID NO: 1436

SEQ ID NO: 7799 - DNA, 353 bp, Homo sapiens; identical to SEQ ID NO: 1437
  misc_feature 329, 335, 337: n = A,T,C or G

SEQ ID NO: 7800 - DNA, 619 bp, Homo sapiens; identical to SEQ ID NO: 1438

SEQ ID NO: 7801 - DNA, 422 bp, Homo sapiens; identical to SEQ ID NO: 1439

SEQ ID NO: 7802 - DNA, 484 bp, Homo sapiens; identical to SEQ ID NO: 1440
  misc_feature 46: n = A,T,C or G

SEQ ID NO: 7803 - DNA, 282 bp, Homo sapiens; identical to SEQ ID NO: 1442

SEQ ID NO: 7804 - DNA, 418 bp, Homo sapiens; identical to SEQ ID NO: 1443
  misc_feature 403, 404, 408, 409, 410: n = A,T,C or G

SEQ ID NO: 7805 - DNA, 463 bp, Homo sapiens; identical to SEQ ID NO: 1444
  misc_feature 155, 175, 199, 210, 241, 426, 452: n = A,T,C or G

SEQ ID NO: 7806 - DNA, 467 bp, Homo sapiens; identical to SEQ ID NO: 1445
  misc_feature 415: n = A,T,C or G

SEQ ID NO: 7807 - DNA, 461 bp, Homo sapiens; identical to SEQ ID NO: 1446
  misc_feature 334, 423: n = A,T,C or G

SEQ ID NO: 7808 - DNA, 488 bp, Homo sapiens; identical to SEQ ID NO: 1447

SEQ ID NO: 7809 - DNA, 613 bp, Homo sapiens; identical to SEQ ID NO: 1448
  misc_feature 545: n = A,T,C or G

SEQ ID NO: 7810 - DNA, 466 bp, Homo sapiens; identical to SEQ ID NO: 1449

SEQ ID NO: 7811 - DNA, 571 bp, Homo sapiens; identical to SEQ ID NO: 1450
  misc_feature 28, 88, 91, 92, 525, 558: n = A,T,C or G

SEQ ID NO: 7812 - DNA, 454 bp, Homo sapiens; identical to SEQ ID NO: 1451
  misc_feature 18, 21, 33, 35, 36, 60, 80, 90, 97, 137, 186, 232, 233, 243,247, 254, 300, 308, 317, 332, 395: n = A,T,C or G

SEQ ID NO: 7813 - DNA, 444 bp, Homo sapiens; identical to SEQ ID NO: 1452
  misc_feature 90, 94, 98, 101, 196, 332: n = A,T,C or G

SEQ ID NO: 7814 - DNA, 766 bp, Homo sapiens; identical to SEQ ID NO: 1453
  misc_feature 4, 13, 20, 22, 23, 33, 45, 48, 67, 69, 72, 81, 82, 84, 93,94, 101, 104, 138, 141, 171, 187, 191, 213, 240, 245, 305,368, 373, 391, 395, 398, 404, 406, 416, 417, 422, 424, 433,462, 474, 483, 488, 506, 511, 517, 532, 533, 536, 546: n = A,T,C or G
  misc_feature 548, 556, 557, 560, 561, 586, 587, 589, 603, 607, 620, 634,637, 645, 646, 653, 654, 655, 672, 688, 692, 693, 695, 696,701, 730, 739, 742, 746: n = A,T,C or G

SEQ ID NO: 7815 - DNA, 376 bp, Homo sapiens; identical to SEQ ID NO: 1454
  misc_feature 52, 107, 215, 234, 304: n = A,T,C or G

SEQ ID NO: 7816 - DNA, 526 bp, Homo sapiens; identical to SEQ ID NO: 1455
  misc_feature 18, 32, 38, 74, 79, 80, 81, 92, 226, 288, 301, 319, 427,435, 456, 465, 468: n = A,T,C or G

SEQ ID NO: 7817 - DNA, 497 bp, Homo sapiens; identical to SEQ ID NO: 1456
  misc_feature 497: n = A,T,C or G

SEQ ID NO: 7818 - DNA, 362 bp, Homo sapiens; identical to SEQ ID NO: 1457
  misc_feature 105: n = A,T,C or G

SEQ ID NO: 7819 - DNA, 617 bp, Homo sapiens; identical to SEQ ID NO: 1459
  misc_feature 1, 220, 277, 306, 356, 407, 445, 564, 610: n = A,T,C or G

SEQ ID NO: 7820 - DNA, 528 bp, Homo sapiens; identical to SEQ ID NO: 1460

SEQ ID NO: 7821 - DNA, 553 bp, Homo sapiens; identical to SEQ ID NO: 1461
  misc_feature 106, 129, 147, 166, 176, 192, 210, 215, 226, 232, 246, 252,270, 323, 333, 353, 384, 409, 432, 456, 497, 498, 499, 508,523, 525, 537, 539, 541, 550: n = A,T,C or G

SEQ ID NO: 7822 - DNA, 573 bp, Homo sapiens; identical to SEQ ID NO: 1462
  misc_feature 90, 94, 102, 103, 105, 113, 118, 136, 150, 157, 183, 237,239, 259, 265, 274, 279, 302, 326, 331, 352, 382, 401, 433,435, 440, 442, 444, 445, 454, 457, 478, 487, 490, 498, 526,527, 530, 541, 557, 559: n = A,T,C or G

SEQ ID NO: 7823 - DNA, 551 bp, Homo sapiens; identical to SEQ ID NO: 1463
  misc_feature 100, 106, 111, 113, 157, 171, 175, 186, 193, 205, 218, 219,236, 303, 304, 323, 326, 350, 352, 362, 371, 382, 387, 388,391, 402, 403, 409, 413, 417, 421, 429, 435, 436, 437, 439,441, 457, 462, 464, 470, 501, 503, 518, 522, 523, 537: n = A,T,C or G
  misc_feature 540, 548: n = A,T,C or G

SEQ ID NO: 7824 - DNA, 635 bp, Homo sapiens; identical to SEQ ID NO: 1464
  misc_feature 104, 105, 111, 127, 172, 186, 236, 241, 245, 249, 250, 255,277, 283, 303, 306, 313, 314, 315, 326, 340, 341, 344, 359,360, 362, 373, 410, 440, 459, 486, 525, 554, 576, 592, 606,607, 616: n = A,T,C or G

SEQ ID NO: 7825 - DNA, 546 bp, Homo sapiens; identical to SEQ ID NO: 1465
  misc_feature 97, 113, 118, 130, 136, 141, 170, 184, 187, 195, 201, 225,233, 236, 245, 248, 254, 258, 260, 274, 279, 286, 297, 299,304, 306, 309, 317, 319, 320, 325, 326, 332, 334, 338, 340,341, 344, 345, 350, 351, 353, 357, 361, 365, 367, 368: n = A,T,C or G
  misc_feature 381, 383, 391, 392, 395, 400, 405, 415, 418, 420, 425, 431,433, 437, 438, 452, 457, 460, 465, 477, 478, 479, 480, 482,484, 487, 493, 497, 500, 503, 513: n = A,T,C or G

SEQ ID NO: 7826 - DNA, 517 bp, Homo sapiens; identical to SEQ ID NO: 1466
  misc_feature 101, 102, 105, 109, 110, 126, 129, 132, 148, 158, 160, 168,175, 199, 210, 225, 230, 263, 275, 304, 307, 318, 350, 354,359, 383, 409, 416, 427, 434, 449, 460, 464, 471, 475, 488,496, 510: n = A,T,C or G

SEQ ID NO: 7827 - DNA, 652 bp, Homo sapiens; identical to SEQ ID NO: 1467
  misc_feature 103, 106, 107, 111, 117, 123, 145, 152, 171, 179, 188, 202,203, 212, 213, 226, 233, 234, 235, 239, 250, 252, 265, 266,278, 279, 280, 286, 289, 290, 291, 301, 305, 310, 312, 316,349, 380, 386, 391, 399, 400, 434, 443, 447, 454, 471: n = A,T,C or G
  misc_feature 479, 485, 486, 487, 529, 543, 551, 584, 589, 592, 600, 637: n = A,T,C or G

SEQ ID NO: 7828 - DNA, 522 bp, Homo sapiens; identical to SEQ ID NO: 1468
  misc_feature 105, 106, 158, 160, 163, 170, 173, 196, 211, 225, 232, 250,259, 266, 280, 308, 342, 359, 374, 391, 458, 492: n = A,T,C or G

SEQ ID NO: 7829 - DNA, 582 bp, Homo sapiens; identical to SEQ ID NO: 1469
  misc_feature 91, 108, 110, 111, 112, 119, 153, 173, 183, 194, 202, 204,208, 210, 216, 220, 225, 234, 236, 237, 245, 248, 250, 253,289, 293, 304, 314, 320, 335, 353, 354, 362, 377, 393, 443,450, 468, 492, 507, 535, 546, 553, 558: n = A,T,C or G

SEQ ID NO: 7830 - DNA, 549 bp, Homo sapiens; identical to SEQ ID NO: 1470
  misc_feature 93, 105, 108, 111, 113, 131, 140, 160, 164, 166, 177, 181,192, 205, 218, 250, 256, 292, 303, 318, 326, 328, 330, 339,435, 453, 504, 525, 533: n = A,T,C or G

SEQ ID NO: 7831 - DNA, 649 bp, Homo sapiens; identical to SEQ ID NO: 1471
  misc_feature 106, 123, 129, 145, 207, 213, 215, 250, 255, 269, 299, 312,322, 343, 346, 350, 362, 374, 431, 471, 475, 477, 483, 493,494, 496, 499, 501, 502, 503, 504, 505, 507, 508, 510, 544,562, 586, 591: n = A,T,C or G

SEQ ID NO: 7832 - DNA, 502 bp, Homo sapiens; identical to SEQ ID NO: 1472
  misc_feature 103, 110, 118, 120, 123, 126, 152, 160, 165, 181, 182, 188,196, 204, 210, 218, 224, 226, 238, 252, 261, 265, 267, 281,286, 297, 299, 305, 325, 337, 340, 343, 364, 436, 438, 456,466, 474, 480: n = A,T,C or G

SEQ ID NO: 7833 - DNA, 592 bp, Homo sapiens; identical to SEQ ID NO: 1473
  misc_feature 119, 122, 141, 146, 166, 182, 196, 211, 215, 226, 228, 232,237, 239, 241, 243, 245, 283, 307, 313, 337, 345, 371, 410,421, 513, 517, 552, 558, 559, 561, 563, 573, 587: n = A,T,C or G

SEQ ID NO: 7834 - DNA, 560 bp, Homo sapiens; identical to SEQ ID NO: 1474
  misc_feature 50, 80, 132, 141, 150, 156, 186, 198, 199, 216, 233, 244,250, 255, 258, 271, 272, 277, 286, 287, 307, 310, 343, 373,376, 383, 385, 388, 398, 444, 448, 449, 470, 505, 549: n = A,T,C or G

SEQ ID NO: 7835 - DNA, 556 bp, Homo sapiens; identical to SEQ ID NO: 1475
  misc_feature 109, 117, 134, 137, 157, 175, 186, 199, 201, 217, 249, 269,301, 334, 340, 342, 448, 483: n = A,T,C or G

SEQ ID NO: 7836 - DNA, 456 bp, Homo sapiens; identical to SEQ ID NO: 1476
  misc_feature 61, 63, 112, 118, 135, 143, 154, 165, 170, 175, 181, 183,185, 191, 196, 225, 241, 248, 259, 262, 263, 273, 281, 284,301, 307, 316, 320, 325, 335, 338, 344, 354, 355, 358, 371,391, 397, 399, 404, 407, 409, 410, 414, 424, 430: n = A,T,C or G

SEQ ID NO: 7837 - DNA, 187 bp, Homo sapiens; identical to SEQ ID NO: 1477
  misc_feature 119, 120, 144, 150, 151, 161, 179: n = A,T,C or G

SEQ ID NO: 7838 - DNA, 430 bp, Homo sapiens; identical to SEQ ID NO: 1478

SEQ ID NO: 7839 - DNA, 465 bp, Homo sapiens; identical to SEQ ID NO: 1479
  misc_feature 448, 451: n = A,T,C or G

SEQ ID NO: 7840 - DNA, 402 bp, Homo sapiens; identical to SEQ ID NO: 1480

SEQ ID NO: 7841 - DNA, 509 bp, Homo sapiens; identical to SEQ ID NO: 1481

SEQ ID NO: 7842 - DNA, 466 bp, Homo sapiens; identical to SEQ ID NO: 1482
  misc_feature 78, 233, 250, 283, 307, 343, 364, 378, 390, 392, 413, 415,416, 421, 429, 433, 439, 448: n = A,T,C or G

SEQ ID NO: 7843 - DNA, 216 bp, Homo sapiens; identical to SEQ ID NO: 1483

SEQ ID NO: 7844 - DNA, 436 bp, Homo sapiens; identical to SEQ ID NO: 1484

SEQ ID NO: 7845 - DNA, 437 bp, Homo sapiens; identical to SEQ ID NO: 1485

SEQ ID NO: 7846 - DNA, 362 bp, Homo sapiens; identical to SEQ ID NO: 1486
  misc_feature 308: n = A,T,C or G

SEQ ID NO: 7847 - DNA, 504 bp, Homo sapiens; identical to SEQ ID NO: 1487
  misc_feature 426: n = A,T,C or G

SEQ ID NO: 7848 - DNA, 424 bp, Homo sapiens; identical to SEQ ID NO: 1488
  misc_feature 272: n = A,T,C or G

SEQ ID NO: 7849 - DNA, 440 bp, Homo sapiens; identical to SEQ ID NO: 1490
  misc_feature 4, 15, 20, 21, 23, 24, 27, 28, 30, 31, 37, 38, 41, 42, 43,45, 57, 58, 61, 62, 75, 79, 107, 110, 142, 143, 148, 149,287, 310, 318, 334, 335, 344, 367, 373, 375, 377, 381, 394,396, 402, 416, 417, 433, 437: n = A,T,C or G

SEQ ID NO: 7850 - DNA, 345 bp, Homo sapiens; identical to SEQ ID NO: 1491
  misc_feature 104: n = A,T,C or G

SEQ ID NO: 7851 - DNA, 495 bp, Homo sapiens; identical to SEQ ID NO: 1492

SEQ ID NO: 7852 - DNA, 310 bp, Homo sapiens; identical to SEQ ID NO: 1493
  misc_feature 22, 46, 137, 139, 261, 293: n = A,T,C or G

SEQ ID NO: 7853 - DNA, 426 bp, Homo sapiens; identical to SEQ ID NO: 1494

SEQ ID NO: 7854 - DNA, 664 bp, Homo sapiens; identical to SEQ ID NO: 1495
  misc_feature 87, 315, 327, 358, 364, 367, 377, 378, 393, 397, 401, 402,404, 434, 451, 456, 461, 463, 475, 480, 502, 504, 529, 534,549, 557, 560, 562, 585, 591, 634, 636, 642, 646: n = A,T,C or G

SEQ ID NO: 7855 - DNA, 289 bp, Homo sapiens; identical to SEQ ID NO: 1496
  misc_feature 27, 32, 33, 34, 44, 48, 185, 186, 188, 189: n = A,T,C or G

SEQ ID NO: 7856 - DNA, 347 bp, Homo sapiens; identical to SEQ ID NO: 1497
  misc_feature 11, 28, 35, 36, 44, 55, 90, 97, 116, 119, 159, 187, 189, 243: n = A,T,C or G

SEQ ID NO: 7857 - DNA, 578 bp, Homo sapiens; identical to SEQ ID NO: 1498
  misc_feature 6, 81, 209, 230, 232, 235, 241, 252, 255, 259, 262, 283,285, 290, 307, 310, 312, 314, 320, 323, 325, 326, 328, 332,333, 348, 349, 354, 356, 357, 365, 366, 372, 378, 381, 385,392, 394, 399, 411, 413, 415, 420, 421, 422, 423, 429: n = A,T,C or G
  misc_feature 437, 443, 445, 453, 455, 456, 471, 474, 475, 477, 486, 493,504, 510, 524, 560: n = A,T,C or G

SEQ ID NO: 7858 - DNA, 426 bp, Homo sapiens; identical to SEQ ID NO: 1499
  misc_feature 4, 300, 373: n = A,T,C or G

SEQ ID NO: 7859 - DNA, 521 bp, Homo sapiens; identical to SEQ ID NO: 1500
  misc_feature 286, 318, 323, 350, 363, 380, 385, 391, 415, 416, 427, 444,463, 465, 469, 475, 479, 483, 504, 505, 510: n = A,T,C or G

SEQ ID NO: 7860 - DNA, 597 bp, Homo sapiens; identical to SEQ ID NO: 1501
  misc_feature 27, 196, 198, 204, 227, 245, 260, 265, 275, 280, 281, 282,283, 304, 307, 308, 316, 320, 322, 323, 327, 335, 336, 345,346, 353, 355, 357, 358, 359, 379, 384, 387, 389, 394, 401,402, 403, 406, 407, 409, 419, 422, 423, 429, 432, 434: n = A,T,C or G
  misc_feature 435, 436, 444, 447, 452, 459, 460, 464, 466, 474, 483, 489,495, 499, 501, 504, 505, 519, 536, 541, 557, 564, 565, 567,571, 573, 580, 590: n = A,T,C or G

SEQ ID NO: 7861 - DNA, 624 bp, Homo sapiens; identical to SEQ ID NO: 1502
  misc_feature 159, 184, 214, 225, 226, 232, 246, 248, 249, 250, 252, 253,256, 282, 283, 284, 296, 297, 298, 299, 311, 314, 315, 329,330, 360, 362, 363, 365, 367, 375, 376, 378, 403, 406, 416,421, 425, 427, 428, 432, 433, 434, 438, 444, 446, 453: n = A,T,C or G
  misc_feature 454, 455, 456, 459, 460, 461, 462, 465, 468, 469, 470, 473,474, 481, 482, 483, 484, 489, 490, 491, 498, 523, 529, 530,534, 535, 537, 543, 546, 547, 553, 557, 558, 559, 561, 563,564, 565, 568, 570, 572, 573, 574, 575, 577, 580, 582: n = A,T,C or G
  misc_feature 585, 586, 588, 590, 592, 594, 596, 598, 600, 602, 607, 617: n = A,T,C or G

SEQ ID NO: 7862 - DNA, 446 bp, Homo sapiens; identical to SEQ ID NO: 1503

SEQ ID NO: 7863 - DNA, 528 bp, Homo sapiens; identical to SEQ ID NO: 1504
  misc_feature 229, 239, 240, 256, 263, 276, 277, 278, 283, 292, 293, 311,312, 321, 322, 331, 332, 337, 349, 360, 380, 381, 394, 395,414, 417, 439, 448, 449, 458, 462, 464, 466, 469, 489, 508,510, 511: n = A,T,C or G

SEQ ID NO: 7864 - DNA, 412 bp, Homo sapiens; identical to SEQ ID NO: 1505
  misc_feature 327, 341, 389: n = A,T,C or G

SEQ ID NO: 7865 - DNA, 471 bp, Homo sapiens; identical to SEQ ID NO: 1506

SEQ ID NO: 7866 - DNA, 305 bp, Homo sapiens; identical to SEQ ID NO: 1507
  misc_feature 270: n = A,T,C or G

SEQ ID NO: 7867 - DNA, 259 bp, Homo sapiens; identical to SEQ ID NO: 1508

SEQ ID NO: 7868 - DNA, 279 bp, Homo sapiens; identical to SEQ ID NO: 1509

SEQ ID NO: 7869 - DNA, 416 bp, Homo sapiens; identical to SEQ ID NO: 1510
  misc_feature 25, 153, 207, 228, 291, 303, 368: n = A,T,C or G

SEQ ID NO: 7870 - DNA, 411 bp, Homo sapiens; identical to SEQ ID NO: 1511
  misc_feature 16, 183, 187, 197, 204, 206, 209, 215, 264, 266, 271, 283,284, 297, 323, 355, 389, 394: n = A,T,C or G

SEQ ID NO: 7871 - DNA, 498 bp, Homo sapiens; identical to SEQ ID NO: 1512
  misc_feature 395, 421, 438: n = A,T,C or G

SEQ ID NO: 7872 - DNA, 589 bp, Homo sapiens; identical to SEQ ID NO: 1513
  misc_feature 1, 25, 34, 46, 52, 53, 56, 57, 58, 63, 70, 72, 82, 86, 89,111, 149, 153, 160, 168, 174, 178, 196, 209, 214, 228, 231,234, 240, 267, 285, 294, 313, 317, 336, 344, 345, 352, 361,362, 387, 389, 413, 414, 416, 425, 428, 429, 446, 451: n = A,T,C or G
  misc_feature 460, 461, 462, 467, 468, 477, 482, 490, 498, 508, 518, 524,525, 526, 534, 536, 539, 558, 560, 569, 571, 576: n = A,T,C or G

SEQ ID NO: 7873 - DNA, 337 bp, Homo sapiens; identical to SEQ ID NO: 1514
  misc_feature 3, 44, 324: n = A,T,C or G

SEQ ID NO: 7874 - DNA, 460 bp, Homo sapiens; identical to SEQ ID NO: 1515

SEQ ID NO: 7875 - DNA, 426 bp, Homo sapiens; identical to SEQ ID NO: 1516
  misc_feature 378, 413: n = A,T,C or G

SEQ ID NO: 7876 - DNA, 329 bp, Homo sapiens; identical to SEQ ID NO: 1517
  misc_feature 103, 136, 200, 320: n = A,T,C or G

SEQ ID NO: 7877 - DNA, 519 bp, Homo sapiens; identical to SEQ ID NO: 1518
  misc_feature 110, 111, 117, 119, 121, 125, 131, 168, 175, 178, 182, 183,184, 204, 214, 224, 235, 242, 249, 257, 260, 263, 266, 269,280, 296, 297, 298, 299, 300, 301, 310, 344, 358, 362, 364,365, 370, 374, 385, 386, 390, 405, 416, 428, 429, 430: n = A,T,C or G
  misc_feature 448, 462, 470, 475, 486, 488, 497, 500, 501, 502, 504, 505,506, 507, 508, 509, 510, 511, 512: n = A,T,C or G

SEQ ID NO: 7878 - DNA, 334 bp, Homo sapiens; identical to SEQ ID NO: 1519
  misc_feature 7, 34, 214, 251, 286, 334: n = A,T,C or G

SEQ ID NO: 7879 - DNA, 444 bp, Homo sapiens; identical to SEQ ID NO: 1520

SEQ ID NO: 7880 - DNA, 463 bp, Homo sapiens; identical to SEQ ID NO: 1521

SEQ ID NO: 7881 - DNA, 441 bp, Homo sapiens; identical to SEQ ID NO: 1522
  misc_feature 20, 129, 149, 173, 231: n = A,T,C or G

SEQ ID NO: 7882 - DNA, 440 bp, Homo sapiens; identical to SEQ ID NO: 1523
  misc_feature 6, 400: n = A,T,C or G

SEQ ID NO: 7883 - DNA, 460 bp, Homo sapiens; identical to SEQ ID NO: 1524
  misc_feature 308: n = A,T,C or G

SEQ ID NO: 7884 - DNA, 209 bp, Homo sapiens; identical to SEQ ID NO: 1525

SEQ ID NO: 7885 - DNA, 345 bp, Homo sapiens; identical to SEQ ID NO: 1526
  misc_feature 5, 23, 51, 103, 212, 306, 309: n = A,T,C or G

SEQ ID NO: 7886 - DNA, 266 bp, Homo sapiens; identical to SEQ ID NO: 1527
  misc_feature 263: n = A,T,C or G

SEQ ID NO: 7887 - DNA, 274 bp, Homo sapiens; identical to SEQ ID NO: 1528
  misc_feature 22, 160, 179, 270: n = A,T,C or G

SEQ ID NO: 7888 - DNA, 434 bp, Homo sapiens; identical to SEQ ID NO: 1529
  misc_feature 198, 403, 412, 416: n = A,T,C or G

SEQ ID NO: 7889 - DNA, 532 bp, Homo sapiens; identical to SEQ ID NO: 1530
  misc_feature 89, 151, 153, 156, 171, 180, 183, 184, 193, 195, 198, 210,216, 219, 223, 230, 231, 239, 243, 248, 249, 250, 253, 256,257, 259, 268, 270, 273, 275, 282, 286, 291, 293, 329, 333,342, 343, 349, 353, 362, 365, 368, 369, 377, 388, 407: n = A,T,C or G
  misc_feature 420, 422, 423, 424, 425, 430, 433, 434, 435, 439, 452, 470,471, 472, 473, 481, 482, 490, 495, 505, 506: n = A,T,C or G

SEQ ID NO: 7890 - DNA, 488 bp, Homo sapiens; identical to SEQ ID NO: 1531
  misc_feature 27: n = A,T,C or G

SEQ ID NO: 7891 - DNA, 230 bp, Homo sapiens; identical to SEQ ID NO: 1532

SEQ ID NO: 7892 - DNA, 283 bp, Homo sapiens; identical to SEQ ID NO: 1533
  misc_feature 273: n = A,T,C or G

SEQ ID NO: 7893 - DNA, 342 bp, Homo sapiens; identical to SEQ ID NO: 1534
  misc_feature 1, 7, 79, 82, 83, 155, 257, 314, 332: n = A,T,C or G

SEQ ID NO: 7894 - DNA, 471 bp, Homo sapiens; identical to SEQ ID NO: 1535

SEQ ID NO: 7895 - DNA, 563 bp, Homo sapiens; identical to SEQ ID NO: 1536
  misc_feature 304, 320, 321, 326, 474, 488, 509, 535, 554: n = A,T,C or G

SEQ ID NO: 7896 - DNA, 448 bp, Homo sapiens; identical to SEQ ID NO: 1537
  misc_feature 1: n = A,T,C or G

SEQ ID NO: 7897 - DNA, 497 bp, Homo sapiens; identical to SEQ ID NO: 1538
  misc_feature 276, 318, 412, 418, 427, 429, 435, 453, 485: n = A,T,C or G

SEQ ID NO: 7898 - DNA, 247 bp, Homo sapiens; identical to SEQ ID NO: 1539

SEQ ID NO: 7899 - DNA, 527 bp, Homo sapiens; identical to SEQ ID NO: 1540
  misc_feature 430, 487, 501, 505: n = A,T,C or G

SEQ ID NO: 7900 - DNA, 217 bp, Homo sapiens; identical to SEQ ID NO: 1541
  misc_feature 16, 85, 189: n = A,T,C or G

SEQ ID NO: 7901 - DNA, 537 bp, Homo sapiens; identical to SEQ ID NO: 1542
  misc_feature 353, 373, 380, 422, 431, 433, 458, 480, 488, 491, 495, 499,506, 511, 520, 525: n = A,T,C or G

SEQ ID NO: 7902 - DNA, 398 bp, Homo sapiens; identical to SEQ ID NO: 1543

SEQ ID NO: 7903 - DNA, 470 bp, Homo sapiens; identical to SEQ ID NO: 1544

SEQ ID NO: 7904 - DNA, 411 bp, Homo sapiens; identical to SEQ ID NO: 1545
  misc_feature 59, 102, 110, 127, 129, 204, 214, 226, 234, 289, 298, 316,326: n = A,T,C or G

SEQ ID NO: 7905 - DNA, 762 bp, Homo sapiens; identical to SEQ ID NO: 1546
  misc_feature 15, 21, 23, 25, 26, 31, 41, 51, 60, 61, 69, 90, 94, 96, 109,111, 120, 134, 141, 142, 145, 154, 157, 158, 161, 163, 167,173, 175, 181, 184, 192, 195, 206, 224, 238, 256, 257, 268,277, 280, 288, 292, 294, 303, 310, 311, 315, 321: n = A,T,C or G
  misc_feature 324, 327, 328, 329, 337, 340, 347, 349, 350, 351, 360, 365,374, 377, 378, 397, 398, 404, 416, 430, 449, 460, 462, 467,468, 485, 499, 501, 505, 522, 523, 525, 533, 550, 558, 559,566, 577, 580, 586, 595, 607, 610, 616, 617, 618, 619: n = A,T,C or G
  misc_feature 620, 621, 622, 625, 626, 630, 631, 632, 643, 647, 651, 656,659, 662, 679, 682, 683, 684, 687, 697, 698, 701, 703, 704,707, 709, 711, 712, 716, 717, 721, 722, 723, 731, 734, 750,753, 754: n = A,T,C or G

SEQ ID NO: 7906 - DNA, 296 bp, Homo sapiens; identical to SEQ ID NO: 1547
  misc_feature 14, 23, 33, 39, 40, 43, 49, 63, 70, 80, 91, 98, 115, 122,144, 146, 155, 161, 165, 172, 173, 174, 193, 199, 200, 201,209, 210, 215, 239, 283, 296: n = A,T,C or G

SEQ ID NO: 7907 - DNA, 651 bp, Homo sapiens; identical to SEQ ID NO: 1548
  misc_feature 17, 20, 619, 625, 639: n = A,T,C or G

SEQ ID NO: 7908 - DNA, 321 bp, Homo sapiens; identical to SEQ ID NO: 1549
  misc_feature 134: n = A,T,C or G

SEQ ID NO: 7909 - DNA, 365 bp, Homo sapiens; identical to SEQ ID NO: 1550

SEQ ID NO: 7910 - DNA, 227 bp, Homo sapiens; identical to SEQ ID NO: 1551
  misc_feature 21, 25, 28, 59, 63, 68, 74, 83, 84, 90, 99, 100, 101, 108,119, 120, 123, 124, 131, 132, 137, 140, 143, 146, 149, 153,155, 156, 157, 160, 162, 164, 169, 170, 172, 173, 175, 180,184, 189, 190, 194, 195, 197, 209, 213, 224, 226: n = A,T,C or G

SEQ ID NO: 7911 - DNA, 370 bp, Homo sapiens; identical to SEQ ID NO: 1552

SEQ ID NO: 7912 - DNA, 438 bp, Homo sapiens; identical to SEQ ID NO: 1553
  misc_feature 12: n = A,T,C or G

SEQ ID NO: 7913 - DNA, 416 bp, Homo sapiens; identical to SEQ ID NO: 1554
  misc_feature 8, 30: n = A,T,C or G

SEQ ID NO: 7914 - DNA, 432 bp, Homo sapiens; identical to SEQ ID NO: 1555

SEQ ID NO: 7915 - DNA, 427 bp, Homo sapiens; identical to SEQ ID NO: 1556
  misc_feature 20, 405: n = A,T,C or G

SEQ ID NO: 7916 - DNA, 314 bp, Homo sapiens; identical to SEQ ID NO: 1557
  misc_feature 24: n = A,T,C or G

SEQ ID NO: 7917 - DNA, 452 bp, Homo sapiens; identical to SEQ ID NO: 1558

SEQ ID NO: 7918 - DNA, 471 bp, Homo sapiens; identical to SEQ ID NO: 1559
  misc_feature 426, 431: n = A,T,C or G

SEQ ID NO: 7919 - DNA, 455 bp, Homo sapiens; identical to SEQ ID NO: 1560
  misc_feature 209, 390, 415, 419: n = A,T,C or G

SEQ ID NO: 7920 - DNA, 374 bp, Homo sapiens; identical to SEQ ID NO: 1561

SEQ ID NO: 7921 - DNA, 370 bp, Homo sapiens; identical to SEQ ID NO: 1562
  misc_feature 6: n = A,T,C or G

SEQ ID NO: 7922 - DNA, 480 bp, Homo sapiens; identical to SEQ ID NO: 1563

SEQ ID NO: 7923 - DNA, 626 bp, Homo sapiens; identical to SEQ ID NO: 1564
  misc_feature 590, 623: n = A,T,C or G

SEQ ID NO: 7924 - DNA, 496 bp, Homo sapiens; identical to SEQ ID NO: 1566
  misc_feature 433: n = A,T,C or G

SEQ ID NO: 7925 - DNA, 482 bp, Homo sapiens; identical to SEQ ID NO: 1567
  misc_feature 6: n = A,T,C or G

SEQ ID NO: 7926 - DNA, 252 bp, Homo sapiens; identical to SEQ ID NO: 1568
  misc_feature 42, 65, 139, 159: n = A,T,C or G

SEQ ID NO: 7927 - DNA, 466 bp, Homo sapiens; identical to SEQ ID NO: 1569

SEQ ID NO: 7928 - DNA, 288 bp, Homo sapiens; identical to SEQ ID NO: 1570

SEQ ID NO: 7929 - DNA, 369 bp, Homo sapiens; identical to SEQ ID NO: 1571

SEQ ID NO: 7930 - DNA, 265 bp, Homo sapiens; identical to SEQ ID NO: 1572
  misc_feature 9, 86, 149, 182, 240: n = A,T,C or G

SEQ ID NO: 7931 - DNA, 354 bp, Homo sapiens; identical to SEQ ID NO: 1573
  misc_feature 8, 11: n = A,T,C or G

SEQ ID NO: 7932 - DNA, 359 bp, Homo sapiens; identical to SEQ ID NO: 1574
  misc_feature 9, 67, 68, 69, 229: n = A,T,C or G

SEQ ID NO: 7933 - DNA, 433 bp, Homo sapiens; identical to SEQ ID NO: 1575

SEQ ID NO: 7934 - DNA, 349 bp, Homo sapiens; identical to SEQ ID NO: 1576

SEQ ID NO: 7935 - DNA, 590 bp, Homo sapiens; identical to SEQ ID NO: 1577
  misc_feature 430, 569: n = A,T,C or G

SEQ ID NO: 7936 - DNA, 214 bp, Homo sapiens; identical to SEQ ID NO: 1578
  misc_feature 52, 53, 54, 56, 63: n = A,T,C or G

SEQ ID NO: 7937 - DNA, 225 bp, Homo sapiens; identical to SEQ ID NO: 1579
  misc_feature 57, 65: n = A,T,C or G

SEQ ID NO: 7938 - DNA, 223 bp, Homo sapiens; identical to SEQ ID NO: 1580
  misc_feature 66, 69: n = A,T,C or G

SEQ ID NO: 7939 - DNA, 230 bp, Homo sapiens; identical to SEQ ID NO: 1581
  misc_feature 66, 73, 74: n = A,T,C or G

SEQ ID NO: 7940 - DNA, 205 bp, Homo sapiens; identical to SEQ ID NO: 1582
  misc_feature 41, 48: n = A,T,C or G

SEQ ID NO: 7941 - DNA, 219 bp, Homo sapiens; identical to SEQ ID NO: 1583
  misc_feature 57: n = A,T,C or G

SEQ ID NO: 7942 - DNA, 127 bp, Homo sapiens; identical to SEQ ID NO: 1584
  misc_feature 8, 13, 89, 101: n = A,T,C or G

SEQ ID NO: 7943 - DNA, 205 bp, Homo sapiens; identical to SEQ ID NO: 1585
  misc_feature 38: n = A,T,C or G

SEQ ID NO: 7944 - DNA, 663 bp, Homo sapiens; identical to SEQ ID NO: 1586
  misc_feature 205, 206, 207, 208, 209, 210, 211, 212, 213, 214, 215, 216,217, 218, 219, 220, 221, 222, 223, 224, 225, 226, 227, 228,229, 230, 231, 232, 233, 234, 235, 236, 237, 238, 239, 240,241, 242, 243, 244, 245, 246, 247, 248, 249, 250, 251: n = A,T,C or G
  misc_feature 252, 253, 254, 255, 256, 257, 258, 259, 260, 261, 262, 263,264, 265, 266, 267, 268, 269, 270, 271, 272, 273, 274, 275,276, 277, 278, 279, 280, 281, 282, 283, 284, 285, 286, 287,288, 289, 290, 291, 292, 293, 294, 295, 296, 297, 298: n = A,T,C or G
  misc_feature 299, 300, 301, 302, 303, 304, 305, 306, 307, 308, 309, 310,311, 312, 313, 314, 315, 316, 317, 318, 319, 320, 321, 322,323, 324, 325, 326, 327, 328, 329, 330, 331, 332, 333, 334,335, 336, 337, 338, 339, 340, 341, 342, 343, 344, 349: n = A,T,C or G
  misc_feature 350, 351, 352, 353, 354, 355, 356, 357, 358, 359, 360, 361,362, 363, 364, 365, 366, 367, 368, 369, 370, 371, 372, 373,374, 375, 376, 377, 378, 379, 380, 381, 382, 383, 384, 385,386, 387, 388, 389, 390, 391, 392, 393, 394, 395, 396: n = A,T,C or G
  misc_feature 397, 398, 399, 400, 401, 402, 403, 404, 405, 406, 407, 408,409, 410, 411, 412, 413, 414, 415, 416, 417, 418, 419, 420,421, 422, 423, 424, 425, 426, 427, 428, 429, 430, 431, 432,433, 434, 435, 436, 437, 438, 439, 440, 441, 442, 443: n = A,T,C or G
  misc_feature 444, 445, 446, 447, 448, 449, 450, 451, 452, 453, 454, 455,456, 457, 458, 459, 460, 461, 462, 463, 464, 465, 466, 467,468, 469, 470, 510, 562, 563, 589, 618, 639, 641, 644, 651: n = A,T,C or G

SEQ ID NO: 7945 - DNA, 205 bp, Homo sapiens; identical to SEQ ID NO: 1587

SEQ ID NO: 7946 - DNA, 204 bp, Homo sapiens; identical to SEQ ID NO: 1588

SEQ ID NO: 7947 - DNA, 562 bp, Homo sapiens; identical to SEQ ID NO: 1589
  misc_feature 5: n = A,T,C or G

SEQ ID NO: 7948 - DNA, 323 bp, Homo sapiens; identical to SEQ ID NO: 1590

SEQ ID NO: 7949 - DNA, 499 bp, Homo sapiens; identical to SEQ ID NO: 1591
  misc_feature 441: n = A,T,C or G

SEQ ID NO: 7950 - DNA, 346 bp, Homo sapiens; identical to SEQ ID NO: 1592

SEQ ID NO: 7951 - DNA, 185 bp, Homo sapiens; identical to SEQ ID NO: 1593

SEQ ID NO: 7952 - DNA, 223 bp, Homo sapiens; identical to SEQ ID NO: 1594
  misc_feature 190: n = A,T,C or G

SEQ ID NO: 7953 - DNA, 415 bp, Homo sapiens; identical to SEQ ID NO: 1595
  misc_feature 388: n = A,T,C or G

SEQ ID NO: 7954 - DNA, 128 bp, Homo sapiens; identical to SEQ ID NO: 1596
  misc_feature 5, 6, 8, 68, 85: n = A,T,C or G

SEQ ID NO: 7955 - DNA, 367 bp, Homo sapiens; identical to SEQ ID NO: 1597
  misc_feature 33: n = A,T,C or G

SEQ ID NO: 7956 - DNA, 385 bp, Homo sapiens; identical to SEQ ID NO: 1598

SEQ ID NO: 7957 - DNA, 437 bp, Homo sapiens; identical to SEQ ID NO: 1599

SEQ ID NO: 7958 - DNA, 555 bp, Homo sapiens; identical to SEQ ID NO: 1600
  misc_feature 3, 52, 155, 202, 272, 294, 321, 360, 503, 514, 534: n = A,T,C or G

SEQ ID NO: 7959 - DNA, 260 bp, Homo sapiens; identical to SEQ ID NO: 1601

SEQ ID NO: 7960 - DNA, 350 bp, Homo sapiens; identical to SEQ ID NO: 1603

SEQ ID NO: 7961 - DNA, 534 bp, Homo sapiens; identical to SEQ ID NO: 1604
  misc_feature 18, 463, 474, 518: n = A,T,C or G

SEQ ID NO: 7962 - DNA, 404 bp, Homo sapiens; identical to SEQ ID NO: 1605
  misc_feature 16: n = A,T,C or G

SEQ ID NO: 7963 - DNA, 333 bp, Homo sapiens; identical to SEQ ID NO: 1606
  misc_feature 20, 21, 22, 23, 45, 56, 60, 64, 81, 100, 110, 124, 134, 136,143, 144, 149, 156, 182, 194, 201, 203, 205, 210, 214, 215,217, 223, 229, 232, 235, 255, 258, 264, 269, 279, 280, 283,285, 293, 301, 302, 304, 310, 320, 324, 328: n = A,T,C or G

SEQ ID NO: 7964 - DNA, 305 bp, Homo sapiens; identical to SEQ ID NO: 1607
  misc_feature 112, 124, 182, 235, 254, 271, 286, 291: n = A,T,C or G

SEQ ID NO: 7965 - DNA, 356 bp, Homo sapiens; identical to SEQ ID NO: 1608
  misc_feature 57, 174, 176, 240, 306, 326: n = A,T,C or G

SEQ ID NO: 7966 - DNA, 504 bp, Homo sapiens; identical to SEQ ID NO: 1609
  misc_feature 389, 447: n = A,T,C or G

SEQ ID NO: 7967 - DNA, 354 bp, Homo sapiens; identical to SEQ ID NO: 1610
  misc_feature 150, 162, 188, 308: n = A,T,C or G

SEQ ID NO: 7968 - DNA, 223 bp, Homo sapiens; identical to SEQ ID NO: 1611
  misc_feature 26, 120, 167, 181, 204, 210: n = A,T,C or G

SEQ ID NO: 7969 - DNA, 423 bp, Homo sapiens; identical to SEQ ID NO: 1612
  misc_feature 145, 382, 392, 393: n = A,T,C or G

SEQ ID NO: 7970 - DNA, 329 bp, Homo sapiens; identical to SEQ ID NO: 1613
  misc_feature 4, 8: n = A,T,C or G

SEQ ID NO: 7971 - DNA, 496 bp, Homo sapiens; identical to SEQ ID NO: 1614
  misc_feature 364, 410, 420, 441, 460, 468: n = A,T,C or G

SEQ ID NO: 7972 - DNA, 491 bp, Homo sapiens; identical to SEQ ID NO: 1615
  misc_feature 6: n = A,T,C or G

SEQ ID NO: 7973 - DNA, 161 bp, Homo sapiens; identical to SEQ ID NO: 1616
  misc_feature 3, 54, 56, 57, 68, 75, 89, 113, 134, 150: n = A,T,C or G

SEQ ID NO: 7974 - DNA, 353 bp, Homo sapiens; identical to SEQ ID NO: 1617
  misc_feature 17: n = A,T,C or G

SEQ ID NO: 7975 - DNA, 191 bp, Homo sapiens; identical to SEQ ID NO: 1618
  misc_feature 42, 79, 87, 109, 110, 111, 118, 139, 154, 155, 161, 169, 178: n = A,T,C or G

SEQ ID NO: 7976 - DNA, 409 bp, Homo sapiens; identical to SEQ ID NO: 1619
  misc_feature 35: n = A,T,C or G

SEQ ID NO: 7977 - DNA, 398 bp, Homo sapiens; identical to SEQ ID NO: 1620
  misc_feature 11, 387: n = A,T,C or G

SEQ ID NO: 7978 - DNA, 494 bp, Homo sapiens; identical to SEQ ID NO: 1621
  misc_feature 378, 381, 396, 479: n = A,T,C or G

SEQ ID NO: 7979 - DNA, 496 bp, Homo sapiens; identical to SEQ ID NO: 1622
  misc_feature 475, 478, 486: n = A,T,C or G

SEQ ID NO: 7980 - DNA, 324 bp, Homo sapiens; identical to SEQ ID NO: 1623
  misc_feature 11: n = A,T,C or G

SEQ ID NO: 7981 - DNA, 480 bp, Homo sapiens; identical to SEQ ID NO: 1624

SEQ ID NO: 7982 - DNA, 403 bp, Homo sapiens; identical to SEQ ID NO: 1625

SEQ ID NO: 7983 - DNA, 413 bp, Homo sapiens; identical to SEQ ID NO: 1626

SEQ ID NO: 7984 - DNA, 480 bp, Homo sapiens; identical to SEQ ID NO: 1627
  misc_feature 352, 406, 412: n = A,T,C or G

SEQ ID NO: 7985 - DNA, 416 bp, Homo sapiens; identical to SEQ ID NO: 1628
  misc_feature 360, 400: n = A,T,C or G

SEQ ID NO: 7986 - DNA, 454 bp, Homo sapiens; identical to SEQ ID NO: 1629

SEQ ID NO: 7987 - DNA, 485 bp, Homo sapiens; identical to SEQ ID NO: 1630
  misc_feature 2: n = A,T,C or G

SEQ ID NO: 7988 - DNA, 442 bp, Homo sapiens; identical to SEQ ID NO: 1631

SEQ ID NO: 7989 - DNA, 470 bp, Homo sapiens; identical to SEQ ID NO: 1632

SEQ ID NO: 7990 - DNA, 337 bp, Homo sapiens; identical to SEQ ID NO: 1633

SEQ ID NO: 7991 - DNA, 281 bp, Homo sapiens; identical to SEQ ID NO: 1634
  misc_feature 174: n = A,T,C or G

SEQ ID NO: 7992 - DNA, 520 bp, Homo sapiens; identical to SEQ ID NO: 1636
  misc_feature 3, 415: n = A,T,C or G

SEQ ID NO: 7993 - DNA, 408 bp, Homo sapiens; identical to SEQ ID NO: 1637
  misc_feature 6: n = A,T,C or G

SEQ ID NO: 7994 - DNA, 411 bp, Homo sapiens; identical to SEQ ID NO: 1638

SEQ ID NO: 7995 - DNA, 124 bp, Homo sapiens; identical to SEQ ID NO: 1639
  misc_feature 32, 43, 100: n = A,T,C or G

SEQ ID NO: 7996 - DNA, 129 bp, Homo sapiens; identical to SEQ ID NO: 1640
  misc_feature 71, 83, 105: n = A,T,C or G

SEQ ID NO: 7997 - DNA, 455 bp, Homo sapiens; identical to SEQ ID NO: 1641
  misc_feature 430: n = A,T,C or G

SEQ ID NO: 7998 - DNA, 531 bp, Homo sapiens; identical to SEQ ID NO: 1642
  misc_feature 416, 498, 520: n = A,T,C or G

SEQ ID NO: 7999 - DNA, 400 bp, Homo sapiens; identical to SEQ ID NO: 1643
  misc_feature 385: n = A,T,C or G

SEQ ID NO: 8000 - DNA, 485 bp, Homo sapiens; identical to SEQ ID NO: 1644

SEQ ID NO: 8001 - DNA, 496 bp, Homo sapiens; identical to SEQ ID NO: 1645
  misc_feature 26: n = A,T,C or G

SEQ ID NO: 8002 - DNA, 553 bp, Homo sapiens; identical to SEQ ID NO: 1646
  misc_feature 496: n = A,T,C or G

SEQ ID NO: 8003 - DNA, 536 bp, Homo sapiens; identical to SEQ ID NO: 1647
  misc_feature 50, 100, 509, 515: n = A,T,C or G

SEQ ID NO: 8004 - DNA, 500 bp, Homo sapiens; identical to SEQ ID NO: 1648

SEQ ID NO: 8005 - DNA, 555 bp, Homo sapiens; identical to SEQ ID NO: 1649
  misc_feature 2, 551: n = A,T,C or G

SEQ ID NO: 8006 - DNA, 509 bp, Homo sapiens; identical to SEQ ID NO: 1650
  misc_feature 363, 449, 450, 459: n = A,T,C or G

SEQ ID NO: 8007 - DNA, 403 bp, Homo sapiens; identical to SEQ ID NO: 1651
  misc_feature 284: n = A,T,C or G

SEQ ID NO: 8008 - DNA, 506 bp, Homo sapiens; identical to SEQ ID NO: 1652
  misc_feature 7, 492: n = A,T,C or G

SEQ ID NO: 8009 - DNA, 483 bp, Homo sapiens; identical to SEQ ID NO: 1653
  misc_feature 456: n = A,T,C or G

SEQ ID NO: 8010 - DNA, 527 bp, Homo sapiens; identical to SEQ ID NO: 1654
  misc_feature 29: n = A,T,C or G

SEQ ID NO: 8011 - DNA, 495 bp, Homo sapiens; identical to SEQ ID NO: 1655
  misc_feature 478: n = A,T,C or G

SEQ ID NO: 8012 - DNA, 455 bp, Homo sapiens; identical to SEQ ID NO: 1656
  misc_feature 2: n = A,T,C or G

SEQ ID NO: 8013 - DNA, 545 bp, Homo sapiens; identical to SEQ ID NO: 1657
  misc_feature 440: n = A,T,C or G

SEQ ID NO: 8014 - DNA, 445 bp, Homo sapiens; identical to SEQ ID NO: 1658

SEQ ID NO: 8015 - DNA, 509 bp, Homo sapiens; identical to SEQ ID NO: 1659
  misc_feature 6, 19, 40, 437, 481: n = A,T,C or G

SEQ ID NO: 8016 - DNA, 439 bp, Homo sapiens; identical to SEQ ID NO: 1660
  misc_feature 7, 431: n = A,T,C or G

SEQ ID NO: 8017 - DNA, 463 bp, Homo sapiens; identical to SEQ ID NO: 1661
  misc_feature 11, 413, 414: n = A,T,C or G

SEQ ID NO: 8018 - DNA, 298 bp, Homo sapiens; identical to SEQ ID NO: 1662
  misc_feature 236, 275: n = A,T,C or G

SEQ ID NO: 8019 - DNA, 477 bp, Homo sapiens; identical to SEQ ID NO: 1663

SEQ ID NO: 8020 - DNA, 468 bp, Homo sapiens; identical to SEQ ID NO: 1664
  misc_feature 425: n = A,T,C or G

SEQ ID NO: 8021 - DNA, 469 bp, Homo sapiens; identical to SEQ ID NO: 1665
  misc_feature 5: n = A,T,C or G

SEQ ID NO: 8022 - DNA, 437 bp, Homo sapiens; identical to SEQ ID NO: 1666
  misc_feature 6, 65: n = A,T,C or G

SEQ ID NO: 8023 - DNA, 537 bp, Homo sapiens; identical to SEQ ID NO: 1667
  misc_feature 1, 472, 475, 490, 503, 509, 535: n = A,T,C or G

SEQ ID NO: 8024 - DNA, 475 bp, Homo sapiens; identical to SEQ ID NO: 1668
  misc_feature 3: n = A,T,C or G

SEQ ID NO: 8025 - DNA, 520 bp, Homo sapiens; identical to SEQ ID NO: 1670
  misc_feature 6, 404, 476: n = A,T,C or G

SEQ ID NO: 8026 - DNA, 506 bp, Homo sapiens; identical to SEQ ID NO: 1671
  misc_feature 10: n = A,T,C or G

SEQ ID NO: 8027 - DNA, 504 bp, Homo sapiens; identical to SEQ ID NO: 1672
  misc_feature 17, 26, 411, 414: n = A,T,C or G

SEQ ID NO: 8028 - DNA, 453 bp, Homo sapiens; identical to SEQ ID NO: 1673

SEQ ID NO: 8029 - DNA, 457 bp, Homo sapiens; identical to SEQ ID NO: 1674
  misc_feature 42, 46, 212, 245, 256, 262, 266, 312, 362, 365, 367, 380,393, 399, 449: n = A,T,C or G

SEQ ID NO: 8030 - DNA, 460 bp, Homo sapiens; identical to SEQ ID NO: 1675

SEQ ID NO: 8031 - DNA, 477 bp, Homo sapiens; identical to SEQ ID NO: 1676

SEQ ID NO: 8032 - DNA, 448 bp, Homo sapiens; identical to SEQ ID NO: 1677
  misc_feature 14, 31, 42, 75, 93, 94, 103, 108, 124, 132, 135, 138, 189,326, 336, 350, 351, 358, 377, 442: n = A,T,C or G

SEQ ID NO: 8033 - DNA, 504 bp, Homo sapiens; identical to SEQ ID NO: 1678
  misc_feature 4, 7, 307: n = A,T,C or G

SEQ ID NO: 8034 - DNA, 497 bp, Homo sapiens; identical to SEQ ID NO: 1679

SEQ ID NO: 8035 - DNA, 424 bp, Homo sapiens; identical to SEQ ID NO: 1680

SEQ ID NO: 8036 - DNA, 475 bp, Homo sapiens; identical to SEQ ID NO: 1681

SEQ ID NO: 8037 - DNA, 475 bp, Homo sapiens; identical to SEQ ID NO: 1682
  misc_feature 6, 44, 322: n = A,T,C or G

SEQ ID NO: 8038 - DNA, 522 bp, Homo sapiens; identical to SEQ ID NO: 1683
  misc_feature 414, 450, 455, 461, 498: n = A,T,C or G

SEQ ID NO: 8039 - DNA, 497 bp, Homo sapiens; identical to SEQ ID NO: 1685

SEQ ID NO: 8040 - DNA, 412 bp, Homo sapiens; identical to SEQ ID NO: 1686

SEQ ID NO: 8041 - DNA, 534 bp, Homo sapiens; identical to SEQ ID NO: 1687
  misc_feature 458, 512: n = A,T,C or G

SEQ ID NO: 8042 - DNA, 258 bp, Homo sapiens; identical to SEQ ID NO: 1688
  misc_feature 7, 20, 21, 67, 70, 97, 103, 104, 127, 133, 143, 154, 180,189: n = A,T,C or G

SEQ ID NO: 8043 - DNA, 434 bp, Homo sapiens; identical to SEQ ID NO: 1689
  misc_feature 238, 243, 412: n = A,T,C or G

SEQ ID NO: 8044 - DNA, 512 bp, Homo sapiens; identical to SEQ ID NO: 1690
  misc_feature 2: n = A,T,C or G

SEQ ID NO: 8045 - DNA, 499 bp, Homo sapiens; identical to SEQ ID NO: 1692
  misc_feature 31, 41, 229, 318, 470: n = A,T,C or G

SEQ ID NO: 8046 - DNA, 486 bp, Homo sapiens; identical to SEQ ID NO: 1693
  misc_feature 59, 111, 134, 144, 260, 337, 342, 383, 384, 398, 410, 421,422, 423, 434, 446, 450, 459, 475: n = A,T,C or G

SEQ ID NO: 8047 - DNA, 442 bp, Homo sapiens; identical to SEQ ID NO: 1694
  misc_feature 154, 162: n = A,T,C or G

SEQ ID NO: 8048 - DNA, 514 bp, Homo sapiens; identical to SEQ ID NO: 1695
  misc_feature 16: n = A,T,C or G

SEQ ID NO: 8049 - DNA, 494 bp, Homo sapiens; identical to SEQ ID NO: 1696

SEQ ID NO: 8050 - DNA, 484 bp, Homo sapiens; identical to SEQ ID NO: 1697

SEQ ID NO: 8051 - DNA, 480 bp, Homo sapiens; identical to SEQ ID NO: 1698

SEQ ID NO: 8052 - DNA, 477 bp, Homo sapiens; identical to SEQ ID NO: 1699

SEQ ID NO: 8053 - DNA, 501 bp, Homo sapiens; identical to SEQ ID NO: 1700
  misc_feature 488: n = A,T,C or G

SEQ ID NO: 8054 - DNA, 352 bp, Homo sapiens; identical to SEQ ID NO: 1701
  misc_feature 124, 133, 140, 142, 150, 151, 154, 175, 179, 241, 256, 276,283, 294, 298, 306, 320: n = A,T,C or G

SEQ ID NO: 8055 - DNA, 516 bp, Homo sapiens; identical to SEQ ID NO: 1702

SEQ ID NO: 8056 - DNA, 542 bp, Homo sapiens; identical to SEQ ID NO: 1703
  misc_feature 56, 158, 213, 286, 299, 309, 311, 344, 352, 369, 403, 426,432, 484, 530: n = A,T,C or G

SEQ ID NO: 8057 - DNA, 449 bp, Homo sapiens; identical to SEQ ID NO: 1704
  misc_feature 192, 232, 366: n = A,T,C or G

SEQ ID NO: 8058 - DNA, 489 bp, Homo sapiens; identical to SEQ ID NO: 1705

SEQ ID NO: 8059 - DNA, 485 bp, Homo sapiens; identical to SEQ ID NO: 1706
  misc_feature 6: n = A,T,C or G

SEQ ID NO: 8060 - DNA, 498 bp, Homo sapiens; identical to SEQ ID NO: 1707

SEQ ID NO: 8061 - DNA, 476 bp, Homo sapiens; identical to SEQ ID NO: 1708

SEQ ID NO: 8062 - DNA, 430 bp, Homo sapiens; identical to SEQ ID NO: 1709

SEQ ID NO: 8063 - DNA, 529 bp, Homo sapiens; identical to SEQ ID NO: 1710

SEQ ID NO: 8064 - DNA, 495 bp, Homo sapiens; identical to SEQ ID NO: 1711
  misc_feature 2: n = A,T,C or G

SEQ ID NO: 8065 - DNA, 477 bp, Homo sapiens; identical to SEQ ID NO: 1712

SEQ ID NO: 8066 - DNA, 480 bp, Homo sapiens; identical to SEQ ID NO: 1713
  misc_feature 402: n = A,T,C or G

SEQ ID NO: 8067 - DNA, 451 bp, Homo sapiens; identical to SEQ ID NO: 1714

SEQ ID NO: 8068 - DNA, 504 bp, Homo sapiens; identical to SEQ ID NO: 1715
  misc_feature 19, 32: n = A,T,C or G

SEQ ID NO: 8069 - DNA, 474 bp, Homo sapiens; identical to SEQ ID NO: 1716
  misc_feature 1: n = A,T,C or G

SEQ ID NO: 8070 - DNA, 460 bp, Homo sapiens; identical to SEQ ID NO: 1717
  misc_feature 8, 19, 413: n = A,T,C or G

SEQ ID NO: 8071 - DNA, 471 bp, Homo sapiens; identical to SEQ ID NO: 1718
  misc_feature 148, 159, 183, 199, 235, 236, 242, 252, 357, 363, 369, 382,392, 417: n = A,T,C or G

SEQ ID NO: 8072 - DNA, 617 bp, Homo sapiens; identical to SEQ ID NO: 1719
  misc_feature 68, 79, 94, 97, 128, 149, 151, 165, 168, 181, 186, 189, 193,197, 199, 207, 257, 261, 270, 272, 286, 287, 296, 298, 302,313, 318, 320, 350, 355, 356, 379, 382, 386, 390, 396, 402,407, 408, 410, 415, 420, 427, 434, 435, 443, 463: n = A,T,C or G
  misc_feature 471, 475, 482, 490, 493, 500, 501, 516, 524, 537, 547, 563,586, 591, 599, 610: n = A,T,C or G

SEQ ID NO: 8073 - DNA, 335 bp, Homo sapiens; identical to SEQ ID NO: 1720
  misc_feature 5, 44, 144, 150, 239, 292: n = A,T,C or G

SEQ ID NO: 8074 - DNA, 513 bp, Homo sapiens; identical to SEQ ID NO: 1721
  misc_feature 419, 427, 458, 461, 470, 488: n = A,T,C or G

SEQ ID NO: 8075 - DNA, 284 bp, Homo sapiens; identical to SEQ ID NO: 1722

SEQ ID NO: 8076 - DNA, 315 bp, Homo sapiens; identical to SEQ ID NO: 1723
  misc_feature 15: n = A,T,C or G

SEQ ID NO: 8077 - DNA, 446 bp, Homo sapiens; identical to SEQ ID NO: 1724
  misc_feature 7: n = A,T,C or G

SEQ ID NO: 8078 - DNA, 430 bp, Homo sapiens; identical to SEQ ID NO: 1725
  misc_feature 4: n = A,T,C or G

SEQ ID NO: 8079 - DNA, 477 bp, Homo sapiens; identical to SEQ ID NO: 1726
  misc_feature 3: n = A,T,C or G

SEQ ID NO: 8080 - DNA, 429 bp, Homo sapiens; identical to SEQ ID NO: 1727
  misc_feature 2, 14: n = A,T,C or G

SEQ ID NO: 8081 - DNA, 402 bp, Homo sapiens; identical to SEQ ID NO: 1728

SEQ ID NO: 8082 - DNA, 435 bp, Homo sapiens; identical to SEQ ID NO: 1730
  misc_feature 4: n = A,T,C or G

SEQ ID NO: 8083 - DNA, 465 bp, Homo sapiens; identical to SEQ ID NO: 1731

SEQ ID NO: 8084 - DNA, 462 bp, Homo sapiens; identical to SEQ ID NO: 1732
  misc_feature 243, 258, 305, 322, 339, 355, 357, 360, 369, 382, 387, 395,427, 430: n = A,T,C or G

SEQ ID NO: 8085 - DNA, 597 bp, Homo sapiens; identical to SEQ ID NO: 1733
  misc_feature 263, 270, 272, 276, 278, 280, 281, 282, 299, 301, 311, 313,314, 319, 320, 329, 330, 336, 337, 344, 348, 350, 351, 365,372, 378, 393, 398, 399, 403, 406, 407, 409, 411, 417, 419,422, 431, 442, 443, 444, 445, 455, 457, 459, 464, 485: n = A,T,C or G
  misc_feature 488, 490, 495, 496, 518, 520, 521, 526, 530, 531, 533, 540,547, 549, 553, 563, 564, 566, 567, 569, 570, 571, 572, 576,577, 578, 579, 583, 584, 585: n = A,T,C or G

SEQ ID NO: 8086 - DNA, 234 bp, Homo sapiens; identical to SEQ ID NO: 1735

SEQ ID NO: 8087 - DNA, 189 bp, Homo sapiens; identical to SEQ ID NO: 1736
  misc_feature 121, 138, 143: n = A,T,C or G

SEQ ID NO: 8088 - DNA, 266 bp, Homo sapiens; identical to SEQ ID NO: 1737
  misc_feature 61, 67, 85, 94, 123, 124, 135, 138, 142, 143, 151, 181, 208,230, 232, 238, 243, 258: n = A,T,C or G

SEQ ID NO: 8089 - DNA, 242 bp, Homo sapiens; identical to SEQ ID NO: 1738

SEQ ID NO: 8090 - DNA, 346 bp, Homo sapiens; identical to SEQ ID NO: 1739
  misc_feature 6, 135, 138, 144, 147, 153, 156, 160, 163, 176, 187, 238,263, 273, 289, 309, 320, 328, 329: n = A,T,C or G

SEQ ID NO: 8091 - DNA, 426 bp, Homo sapiens; identical to SEQ ID NO: 1740

SEQ ID NO: 8092 - DNA, 377 bp, Homo sapiens; identical to SEQ ID NO: 1741
  misc_feature 3, 16, 26, 41, 50, 57, 64, 117, 141, 145, 148, 149, 155,164, 165, 192, 218, 233, 281, 283, 288, 290, 309: n = A,T,C or G

SEQ ID NO: 8093 - DNA, 521 bp, Homo sapiens; identical to SEQ ID NO: 1742
  misc_feature 17, 102: n = A,T,C or G

SEQ ID NO: 8094 - DNA, 240 bp, Homo sapiens; identical to SEQ ID NO: 1743
  misc_feature 18: n = A,T,C or G

SEQ ID NO: 8095 - DNA, 453 bp, Homo sapiens; identical to SEQ ID NO: 1744
  misc_feature 63, 67, 154, 321, 381, 394, 416, 437, 441, 443: n = A,T,C or G

SEQ ID NO: 8096 - DNA, 533 bp, Homo sapiens; identical to SEQ ID NO: 1745

SEQ ID NO: 8097 - DNA, 536 bp, Homo sapiens; identical to SEQ ID NO: 1746
  misc_feature 10: n = A,T,C or G

SEQ ID NO: 8098 - DNA, 478 bp, Homo sapiens; identical to SEQ ID NO: 1747
  misc_feature 2, 469: n = A,T,C or G

SEQ ID NO: 8099 - DNA, 515 bp, Homo sapiens; identical to SEQ ID NO: 1748

SEQ ID NO: 8100 - DNA, 493 bp, Homo sapiens; identical to SEQ ID NO: 1749
  misc_feature 5: n = A,T,C or G

SEQ ID NO: 8101 - DNA, 452 bp, Homo sapiens; identical to SEQ ID NO: 1750
  misc_feature 212: n = A,T,C or G

SEQ ID NO: 8102 - DNA, 478 bp, Homo sapiens; identical to SEQ ID NO: 1752

SEQ ID NO: 8103 - DNA, 464 bp, Homo sapiens; identical to SEQ ID NO: 1753

SEQ ID NO: 8104 - DNA, 516 bp, Homo sapiens; identical to SEQ ID NO: 1754
  misc_feature 322, 324, 337, 381, 385, 412, 427, 432, 437, 447, 448, 451,470, 481: n = A,T,C or G

SEQ ID NO: 8105 - DNA, 460 bp, Homo sapiens; identical to SEQ ID NO: 1755
  misc_feature 56, 83, 102, 111, 115, 144, 147, 152, 202, 222, 225, 232,256, 258, 376, 378, 386, 393, 397, 407: n = A,T,C or G

SEQ ID NO: 8106 - DNA, 476 bp, Homo sapiens; identical to SEQ ID NO: 1756
  misc_feature 4, 5, 43, 49, 60, 179, 306, 347, 385, 395, 455: n = A,T,C or G

SEQ ID NO: 8107 - DNA, 468 bp, Homo sapiens; identical to SEQ ID NO: 1757
  misc_feature 11, 18, 74, 75, 93, 136, 145, 235, 293, 321, 334, 339, 386,408, 413, 436, 453, 455, 463: n = A,T,C or G

SEQ ID NO: 8108 - DNA, 425 bp, Homo sapiens; identical to SEQ ID NO: 1758
  misc_feature 201, 322: n = A,T,C or G

SEQ ID NO: 8109 - DNA, 490 bp, Homo sapiens; identical to SEQ ID NO: 1759

SEQ ID NO: 8110 - DNA, 511 bp, Homo sapiens; identical to SEQ ID NO: 1760
  misc_feature 426, 438: n = A,T,C or G

SEQ ID NO: 8111 - DNA, 403 bp, Homo sapiens; identical to SEQ ID NO: 1761
  misc_feature 35, 48, 93, 128, 205, 244, 326, 338, 346, 353, 391: n = A,T,C or G

SEQ ID NO: 8112 - DNA, 364 bp, Homo sapiens; identical to SEQ ID NO: 1762
  misc_feature 151: n = A,T,C or G

SEQ ID NO: 8113 - DNA, 502 bp, Homo sapiens; identical to SEQ ID NO: 1763
  misc_feature 445, 484: n = A,T,C or G

SEQ ID NO: 8114 - DNA, 513 bp, Homo sapiens; identical to SEQ ID NO: 1764

SEQ ID NO: 8115 - DNA, 449 bp, Homo sapiens; identical to SEQ ID NO: 1766

SEQ ID NO: 8116 - DNA, 562 bp, Homo sapiens; identical to SEQ ID NO: 1768
  misc_feature 101, 220, 276, 290, 295, 296, 320, 324, 334, 339, 341, 344,353, 358, 372, 384, 442, 461, 503, 529: n = A,T,C or G

SEQ ID NO: 8117 - DNA, 130 bp, Homo sapiens; identical to SEQ ID NO: 1769

SEQ ID NO: 8118 - DNA, 460 bp, Homo sapiens; identical to SEQ ID NO: 1770

SEQ ID NO: 8119 - DNA, 474 bp, Homo sapiens; identical to SEQ ID NO: 1771
  misc_feature 232, 332: n = A,T,C or G

SEQ ID NO: 8120 - DNA, 505 bp, Homo sapiens; identical to SEQ ID NO: 1772
  misc_feature 2, 22, 49, 57, 107, 115, 153, 165, 168, 170, 172, 234, 245,255, 268, 288, 296, 315, 358, 364, 365, 378, 380, 426, 435,459, 472, 477, 496: n = A,T,C or G

SEQ ID NO: 8121 - DNA, 450 bp, Homo sapiens; identical to SEQ ID NO: 1773

SEQ ID NO: 8122 - DNA, 299 bp, Homo sapiens; identical to SEQ ID NO: 1774

SEQ ID NO: 8123 - DNA, 618 bp, Homo sapiens; identical to SEQ ID NO: 1775
  misc_feature 574: n = A,T,C or G

SEQ ID NO: 8124 - DNA, 513 bp, Homo sapiens; identical to SEQ ID NO: 1776
  misc_feature 33, 77, 103: n = A,T,C or G

SEQ ID NO: 8125 - DNA, 433 bp, Homo sapiens; identical to SEQ ID NO: 1777

SEQ ID NO: 8126 - DNA, 405 bp, Homo sapiens; identical to SEQ ID NO: 1778

SEQ ID NO: 8127 - DNA, 509 bp, Homo sapiens; identical to SEQ ID NO: 1779
  misc_feature 1: n = A,T,C or G

SEQ ID NO: 8128 - DNA, 348 bp, Homo sapiens; identical to SEQ ID NO: 1780
  misc_feature 61, 102, 144, 157, 180, 183, 201, 209, 225, 292, 328: n = A,T,C or G

SEQ ID NO: 8129 - DNA, 167 bp, Homo sapiens; identical to SEQ ID NO: 1781
  misc_feature 91, 104, 105, 146, 149: n = A,T,C or G

SEQ ID NO: 8130 - DNA, 210 bp, Homo sapiens; identical to SEQ ID NO: 1782
  misc_feature 7, 24, 90, 93, 102, 117, 138, 149, 157, 168, 184: n = A,T,C or G

SEQ ID NO: 8131 - DNA, 410 bp, Homo sapiens; identical to SEQ ID NO: 1783
  misc_feature 32, 177, 180: n = A,T,C or G

SEQ ID NO: 8132 - DNA, 486 bp, Homo sapiens; identical to SEQ ID NO: 1784
  misc_feature 225, 226, 227, 228, 229, 230, 231, 232, 233, 234, 235, 236,237, 238, 239, 240, 241, 242, 243, 244, 245, 246, 247, 248,249, 250, 251, 252, 253, 254, 255, 256, 257, 258, 259, 260,261, 262, 263, 264, 265, 266, 267, 268, 269, 270, 271: n = A,T,C or G
  misc_feature 272, 273, 274, 275, 276, 277, 278, 279, 280, 281, 282, 283,284, 285, 286, 287, 288, 289, 290, 291, 292, 293, 294, 295,296, 297, 298, 299, 300, 301, 302, 303, 304, 305, 306, 307,308, 309, 310, 311, 312, 313, 314, 315, 316, 317, 318: n = A,T,C or G
  misc_feature 319, 320, 321, 322, 323, 324, 325, 326, 327, 328, 329, 330,331, 332, 333, 334, 335, 336, 337, 338, 339, 340, 341, 342,343, 344, 345, 346, 347, 348, 349, 350, 351, 352, 353, 354,355, 356, 357, 358, 359, 360, 361, 362, 363, 364, 379: n = A,T,C or G
  misc_feature 380, 381, 382, 383, 384, 385, 386, 387, 388, 389, 390, 391,392, 393, 394, 395, 396, 397, 398, 399, 400, 401, 402, 403,442, 462: n = A,T,C or G

SEQ ID NO: 8133 - DNA, 529 bp, Homo sapiens; identical to SEQ ID NO: 1785
  misc_feature 350: n = A,T,C or G

SEQ ID NO: 8134 - DNA, 560 bp, Homo sapiens; identical to SEQ ID NO: 1786
  misc_feature 37: n = A,T,C or G

SEQ ID NO: 8135 - DNA, 565 bp, Homo sapiens; identical to SEQ ID NO: 1787
  misc_feature 95, 97, 122, 142, 157, 169, 201, 220, 306, 329, 330, 331,348, 358, 362, 370, 373, 378, 396, 416, 439, 450, 497, 506,523, 528, 531, 545, 554: n = A,T,C or G

SEQ ID NO: 8136 - DNA, 508 bp, Homo sapiens; identical to SEQ ID NO: 1788

SEQ ID NO: 8137 - DNA, 475 bp, Homo sapiens; identical to SEQ ID NO: 1789
  misc_feature 111: n = A,T,C or G

SEQ ID NO: 8138 - DNA, 308 bp, Homo sapiens; identical to SEQ ID NO: 1790
  misc_feature 126, 136, 182, 189, 217, 226, 249, 276, 295: n = A,T,C or G

SEQ ID NO: 8139 - DNA, 378 bp, Homo sapiens; identical to SEQ ID NO: 1791
  misc_feature 79, 158, 289, 320, 322, 327: n = A,T,C or G

SEQ ID NO: 8140 - DNA, 474 bp, Homo sapiens; identical to SEQ ID NO: 1792
  misc_feature 11, 68, 74, 90, 91, 92, 102, 122, 139, 141, 166, 171, 172,189, 190, 194, 266, 269, 287, 291, 295, 305, 318, 332, 354,358, 366, 368, 373, 390, 399, 405, 420, 429, 432, 436, 447,449, 454, 460, 470: n = A,T,C or G

SEQ ID NO: 8141 - DNA, 485 bp, Homo sapiens; identical to SEQ ID NO: 1793

SEQ ID NO: 8142 - DNA, 500 bp, Homo sapiens; identical to SEQ ID NO: 1794
  misc_feature 2, 378, 392, 431, 477: n = A,T,C or G

SEQ ID NO: 8143 - DNA, 401 bp, Homo sapiens; identical to SEQ ID NO: 1795
  misc_feature 28: n = A,T,C or G

SEQ ID NO: 8144 - DNA, 416 bp, Homo sapiens; identical to SEQ ID NO: 1796
  misc_feature 6: n = A,T,C or G

SEQ ID NO: 8145 - DNA, 493 bp, Homo sapiens; identical to SEQ ID NO: 1797
  misc_feature 8, 9, 13, 448: n = A,T,C or G

SEQ ID NO: 8146 - DNA, 484 bp, Homo sapiens; identical to SEQ ID NO: 1798
  misc_feature 97, 351, 416, 425, 457: n = A,T,C or G

SEQ ID NO: 8147 - DNA, 113 bp, Homo sapiens; identical to SEQ ID NO: 1799
  misc_feature 5, 12, 21: n = A,T,C or G

SEQ ID NO: 8148 - DNA, 247 bp, Homo sapiens; identical to SEQ ID NO: 1800
  misc_feature 127, 142, 181, 187, 193, 204, 208, 211: n = A,T,C or G

SEQ ID NO: 8149 - DNA, 518 bp, Homo sapiens; identical to SEQ ID NO: 1801
  misc_feature 461, 462: n = A,T,C or G

SEQ ID NO: 8150 - DNA, 494 bp, Homo sapiens; identical to SEQ ID NO: 1802
  misc_feature 1: n = A,T,C or G

SEQ ID NO: 8151 - DNA, 507 bp, Homo sapiens; identical to SEQ ID NO: 1803

SEQ ID NO: 8152 - DNA, 447 bp, Homo sapiens; identical to SEQ ID NO: 1804
  misc_feature 408: n = A,T,C or G

SEQ ID NO: 8153 - DNA, 356 bp, Homo sapiens; identical to SEQ ID NO: 1805

SEQ ID NO: 8154 - DNA, 505 bp, Homo sapiens; identical to SEQ ID NO: 1806

SEQ ID NO: 8155 - DNA, 413 bp, Homo sapiens; identical to SEQ ID NO: 1807

SEQ ID NO: 8156 - DNA, 496 bp, Homo sapiens; identical to SEQ ID NO: 1808

SEQ ID NO: 8157 - DNA, 486 bp, Homo sapiens; identical to SEQ ID NO: 1809
  misc_feature 31: n = A,T,C or G

SEQ ID NO: 8158 - DNA, 284 bp, Homo sapiens; identical to SEQ ID NO: 1810
  misc_feature 36: n = A,T,C or G

SEQ ID NO: 8159 - DNA, 468 bp, Homo sapiens; identical to SEQ ID NO: 1811

SEQ ID NO: 8160 - DNA, 516 bp, Homo sapiens; identical to SEQ ID NO: 1812
  misc_feature 18: n = A,T,C or G

SEQ ID NO: 8161 - DNA, 449 bp, Homo sapiens; identical to SEQ ID NO: 1813

SEQ ID NO: 8162 - DNA, 405 bp, Homo sapiens; identical to SEQ ID NO: 1815
  misc_feature 105, 178, 182, 184, 190, 195, 196, 214, 228, 234, 237, 248,252, 267, 269, 275, 281, 295, 322, 324, 325, 332, 362, 400: n = A,T,C or G

SEQ ID NO: 8163 - DNA, 129 bp, Homo sapiens; identical to SEQ ID NO: 1816
  misc_feature 33, 37, 103, 110: n = A,T,C or G

SEQ ID NO: 8164 - DNA, 458 bp, Homo sapiens; identical to SEQ ID NO: 1817

SEQ ID NO: 8165 - DNA, 600 bp, Homo sapiens; identical to SEQ ID NO: 1818
  misc_feature 104, 144, 160, 170, 184, 226, 238, 243, 255, 264, 270, 305,306, 315, 320, 336, 353, 354, 355, 360, 368, 369, 371, 376,390, 393, 411, 423, 428, 443, 456, 467, 472, 475, 480, 485,499, 536, 540, 548, 565: n = A,T,C or G

SEQ ID NO: 8166 - DNA, 546 bp, Homo sapiens; identical to SEQ ID NO: 1819
  misc_feature 29, 261, 424: n = A,T,C or G

SEQ ID NO: 8167 - DNA, 550 bp, Homo sapiens; identical to SEQ ID NO: 1820
  misc_feature 26, 56, 97, 172, 218, 285, 296, 303, 327, 401, 434, 444,465, 477, 505, 534: n = A,T,C or G

SEQ ID NO: 8168 - DNA, 528 bp, Homo sapiens; identical to SEQ ID NO: 1821
  misc_feature 36: n = A,T,C or G

SEQ ID NO: 8169 - DNA, 508 bp, Homo sapiens; identical to SEQ ID NO: 1822
  misc_feature 383, 427: n = A,T,C or G

SEQ ID NO: 8170 - DNA, 349 bp, Homo sapiens; identical to SEQ ID NO: 1823
  misc_feature 30, 49, 68, 69, 71, 83, 91, 109, 124, 137, 148, 171, 189,205, 225, 253, 268: n = A,T,C or G

SEQ ID NO: 8171 - DNA, 366 bp, Homo sapiens; identical to SEQ ID NO: 1824
  misc_feature 108, 154, 164, 174, 175, 190, 194, 253, 258, 268, 270, 282,289, 291, 294, 297, 298, 312, 316, 327, 337, 364: n = A,T,C or G

SEQ ID NO: 8172 - DNA, 438 bp, Homo sapiens; identical to SEQ ID NO: 1825
  misc_feature 27, 30, 50, 98, 383, 413: n = A,T,C or G

SEQ ID NO: 8173 - DNA, 484 bp, Homo sapiens; identical to SEQ ID NO: 1826

SEQ ID NO: 8174 - DNA, 350 bp, Homo sapiens; identical to SEQ ID NO: 1827
  misc_feature 6, 325: n = A,T,C or G

SEQ ID NO: 8175 - DNA, 400 bp, Homo sapiens; identical to SEQ ID NO: 1828
  misc_feature 2, 336, 386: n = A,T,C or G

SEQ ID NO: 8176 - DNA, 524 bp, Homo sapiens; identical to SEQ ID NO: 1829

SEQ ID NO: 8177 - DNA, 552 bp, Homo sapiens; identical to SEQ ID NO: 1830
  misc_feature 32, 191, 241, 337, 357, 383, 423, 487, 497, 504, 505: n = A,T,C or G

SEQ ID NO: 8178 - DNA, 426 bp, Homo sapiens; identical to SEQ ID NO: 1831
  misc_feature 422: n = A,T,C or G

SEQ ID NO: 8179 - DNA, 382 bp, Homo sapiens; identical to SEQ ID NO: 1832
  misc_feature 2, 10: n = A,T,C or G

SEQ ID NO: 8180 - DNA, 471 bp, Homo sapiens; identical to SEQ ID NO: 1833
  misc_feature 4: n = A,T,C or G

SEQ ID NO: 8181 - DNA, 476 bp, Homo sapiens; identical to SEQ ID NO: 1834
  misc_feature 3: n = A,T,C or G

SEQ ID NO: 8182 - DNA, 161 bp, Homo sapiens; identical to SEQ ID NO: 1835
  misc_feature 15, 27, 67, 75, 76, 83, 88, 137, 147: n = A,T,C or G

SEQ ID NO: 8183 - DNA, 510 bp, Homo sapiens; identical to SEQ ID NO: 1836
  misc_feature 476: n = A,T,C or G

SEQ ID NO: 8184 - DNA, 261 bp, Homo sapiens; identical to SEQ ID NO: 1837
  misc_feature 110, 162, 206: n = A,T,C or G

SEQ ID NO: 8185 - DNA, 269 bp, Homo sapiens; identical to SEQ ID NO: 1838
  misc_feature 24, 42, 45, 56, 99, 100, 109, 144, 201, 251: n = A,T,C or G

SEQ ID NO: 8186 - DNA, 538 bp, Homo sapiens; identical to SEQ ID NO: 1839
  misc_feature 517: n = A,T,C or G

SEQ ID NO: 8187 - DNA, 363 bp, Homo sapiens; identical to SEQ ID NO: 1840
  misc_feature 88, 202, 205, 281, 308, 309, 322: n = A,T,C or G

SEQ ID NO: 8188 - DNA, 544 bp, Homo sapiens; identical to SEQ ID NO: 1841
  misc_feature 11, 94, 139, 207, 352, 375, 383, 385, 409, 429, 434, 447,452, 464, 480, 491, 492, 498, 501, 527: n = A,T,C or G

SEQ ID NO: 8189 - DNA, 501 bp, Homo sapiens; identical to SEQ ID NO: 1842
  misc_feature 249, 429, 452, 486: n = A,T,C or G

SEQ ID NO: 8190 - DNA, 438 bp, Homo sapiens; identical to SEQ ID NO: 1843
  misc_feature 6: n = A,T,C or G

SEQ ID NO: 8191 - DNA, 219 bp, Homo sapiens; identical to SEQ ID NO: 1844
  misc_feature 40, 41, 68, 95: n = A,T,C or G

SEQ ID NO: 8192 - DNA, 516 bp, Homo sapiens; identical to SEQ ID NO: 1845
  misc_feature 4, 14, 103, 159, 219, 251, 260, 266, 316, 327, 333, 344,368, 384, 458, 494, 498: n = A,T,C or G

SEQ ID NO: 8193 - DNA, 491 bp, Homo sapiens; identical to SEQ ID NO: 1846

SEQ ID NO: 8194 - DNA, 442 bp, Homo sapiens; identical to SEQ ID NO: 1847
  misc_feature 419: n = A,T,C or G

SEQ ID NO: 8195 - DNA, 358 bp, Homo sapiens; identical to SEQ ID NO: 1848

SEQ ID NO: 8196 - DNA, 435 bp, Homo sapiens; identical to SEQ ID NO: 1849
  misc_feature 358: n = A,T,C or G

SEQ ID NO: 8197 - DNA, 214 bp, Homo sapiens; identical to SEQ ID NO: 1850
  misc_feature 7, 28, 37, 40, 41, 55, 91, 153, 164, 165, 179, 187, 190,193, 196, 200, 203: n = A,T,C or G

SEQ ID NO: 8198 - DNA, 464 bp, Homo sapiens; identical to SEQ ID NO: 1851
  misc_feature 349, 363, 427: n = A,T,C or G

SEQ ID NO: 8199 - DNA, 434 bp, Homo sapiens; identical to SEQ ID NO: 1852

SEQ ID NO: 8200 - DNA, 490 bp, Homo sapiens; identical to SEQ ID NO: 1853

SEQ ID NO: 8201 - DNA, 444 bp, Homo sapiens; identical to SEQ ID NO: 1854
  misc_feature 126, 224, 362, 364: n = A,T,C or G

SEQ ID NO: 8202 - DNA, 460 bp, Homo sapiens; identical to SEQ ID NO: 1855
  misc_feature 105, 110, 132, 133, 139, 151, 162, 186, 209, 234, 239, 243,249, 258, 266, 276, 284, 286, 292, 309, 326, 353, 354, 373,378, 382, 383, 385, 393, 406, 408, 411, 412, 414, 421, 441,445: n = A,T,C or G

SEQ ID NO: 8203 - DNA, 467 bp, Homo sapiens; identical to SEQ ID NO: 1856
  misc_feature 10, 250, 304, 367, 401, 410: n = A,T,C or G

SEQ ID NO: 8204 - DNA, 528 bp, Homo sapiens; identical to SEQ ID NO: 1857
  misc_feature 247, 298, 304, 335, 343, 359, 382, 408, 427, 429, 500, 512: n = A,T,C or G

SEQ ID NO: 8205 - DNA, 441 bp, Homo sapiens; identical to SEQ ID NO: 1858
  misc_feature 2: n = A,T,C or G

SEQ ID NO: 8206 - DNA, 326 bp, Homo sapiens; identical to SEQ ID NO: 1859
  misc_feature 181, 287, 305: n = A,T,C or G

SEQ ID NO: 8207 - DNA, 319 bp, Homo sapiens; identical to SEQ ID NO: 1860
  misc_feature 132, 139, 198, 244, 267, 276: n = A,T,C or G

SEQ ID NO: 8208 - DNA, 530 bp, Homo sapiens; identical to SEQ ID NO: 1861
  misc_feature 67, 68, 142, 174, 187, 218, 241, 267, 290, 318, 383, 386,393, 425, 429, 499: n = A,T,C or G

SEQ ID NO: 8209 - DNA, 313 bp, Homo sapiens; identical to SEQ ID NO: 1862
  misc_feature 5, 19, 26, 47, 68, 89, 112, 185, 218, 237, 247, 262, 267,268, 273, 292, 306: n = A,T,C or G

SEQ ID NO: 8210 - DNA, 528 bp, Homo sapiens; identical to SEQ ID NO: 1863
  misc_feature 1, 212, 234, 265, 329, 374, 414, 425, 435, 436, 462, 509,513: n = A,T,C or G

SEQ ID NO: 8211 - DNA, 473 bp, Homo sapiens; identical to SEQ ID NO: 1864
  misc_feature 16, 138, 283, 324, 396, 430: n = A,T,C or G

SEQ ID NO: 8212 - DNA, 419 bp, Homo sapiens; identical to SEQ ID NO: 1865
  misc_feature 24, 56, 135, 195, 279, 294, 298, 306, 308, 356, 363: n = A,T,C or G

SEQ ID NO: 8213 - DNA, 788 bp, Homo sapiens; identical to SEQ ID NO: 1866
  misc_feature 60, 507, 551, 622, 634, 644, 663, 665, 688, 712, 726, 733: n = A,T,C or G

SEQ ID NO: 8214 - DNA, 538 bp, Homo sapiens; identical to SEQ ID NO: 1867
  misc_feature 488: n = A,T,C or G

SEQ ID NO: 8215 - DNA, 700 bp, Homo sapiens; identical to SEQ ID NO: 1868
  misc_feature 4: n = A,T,C or G

SEQ ID NO: 8216 - DNA, 700 bp, Homo sapiens; identical to SEQ ID NO: 1869
  misc_feature 407, 412, 475, 479, 580, 611, 623, 673, 674, 685, 687: n = A,T,C or G

SEQ ID NO: 8217 - DNA, 544 bp, Homo sapiens; identical to SEQ ID NO: 1870
  misc_feature 72: n = A,T,C or G

SEQ ID NO: 8218 - DNA, 684 bp, Homo sapiens; identical to SEQ ID NO: 1871
  misc_feature 106, 622, 643: n = A,T,C or G

SEQ ID NO: 8219 - DNA, 615 bp, Homo sapiens; identical to SEQ ID NO: 1872

SEQ ID NO: 8220 - DNA, 487 bp, Homo sapiens; identical to SEQ ID NO: 1873
  misc_feature 3: n = A,T,C or G

SEQ ID NO: 8221 - DNA, 466 bp, Homo sapiens; identical to SEQ ID NO: 1874

SEQ ID NO: 8222 - DNA, 487 bp, Homo sapiens; identical to SEQ ID NO: 1875

SEQ ID NO: 8223 - DNA, 468 bp, Homo sapiens; identical to SEQ ID NO: 1876
  misc_feature 7, 107: n = A,T,C or G

SEQ ID NO: 8224 - DNA, 534 bp, Homo sapiens; identical to SEQ ID NO: 1877
  misc_feature 455: n = A,T,C or G

SEQ ID NO: 8225 - DNA, 475 bp, Homo sapiens; identical to SEQ ID NO: 1878

SEQ ID NO: 8226 - DNA, 458 bp, Homo sapiens; identical to SEQ ID NO: 1879

SEQ ID NO: 8227 - DNA, 472 bp, Homo sapiens; identical to SEQ ID NO: 1880
  misc_feature 42, 113, 114, 146, 230, 236, 340, 369, 382, 383, 394, 431,432, 450: n = A,T,C or G

SEQ ID NO: 8228 - DNA, 508 bp, Homo sapiens; identical to SEQ ID NO: 1881

SEQ ID NO: 8229 - DNA, 512 bp, Homo sapiens; identical to SEQ ID NO: 1882

SEQ ID NO: 8230 - DNA, 259 bp, Homo sapiens; identical to SEQ ID NO: 1883
  misc_feature 46, 52, 53, 81, 102, 108, 124, 168, 176, 201, 203, 212, 223,241: n = A,T,C or G

SEQ ID NO: 8231 - DNA, 336 bp, Homo sapiens; identical to SEQ ID NO: 1884

SEQ ID NO: 8232 - DNA, 587 bp, Homo sapiens; identical to SEQ ID NO: 1885
  misc_feature 520, 528, 551, 555: n = A,T,C or G

SEQ ID NO: 8233 - DNA, 419 bp, Homo sapiens; identical to SEQ ID NO: 1886

SEQ ID NO: 8234 - DNA, 489 bp, Homo sapiens; identical to SEQ ID NO: 1887

SEQ ID NO: 8235 - DNA, 505 bp, Homo sapiens; identical to SEQ ID NO: 1888

SEQ ID NO: 8236 - DNA, 520 bp, Homo sapiens; identical to SEQ ID NO: 1889

SEQ ID NO: 8237 - DNA, 458 bp, Homo sapiens; identical to SEQ ID NO: 1890

SEQ ID NO: 8238 - DNA, 617 bp, Homo sapiens; identical to SEQ ID NO: 1891
  misc_feature 443, 460, 482, 483, 519, 564, 601, 602: n = A,T,C or G

SEQ ID NO: 8239 - DNA, 300 bp, Homo sapiens; identical to SEQ ID NO: 1892
  misc_feature 209: n = A,T,C or G

SEQ ID NO: 8240 - DNA, 552 bp, Homo sapiens; identical to SEQ ID NO: 1893
  misc_feature 24, 491: n = A,T,C or G

SEQ ID NO: 8241 - DNA, 338 bp, Homo sapiens; identical to SEQ ID NO: 1894

SEQ ID NO: 8242 - DNA, 388 bp, Homo sapiens; identical to SEQ ID NO: 1895
  misc_feature 1: n = A,T,C or G

SEQ ID NO: 8243 - DNA, 405 bp, Homo sapiens; identical to SEQ ID NO: 1896
  misc_feature 19, 70: n = A,T,C or G

SEQ ID NO: 8244 - DNA, 549 bp, Homo sapiens; identical to SEQ ID NO: 1897
  misc_feature 510, 513, 532, 535: n = A,T,C or G

SEQ ID NO: 8245 - DNA, 479 bp, Homo sapiens; identical to SEQ ID NO: 1898
  misc_feature 382, 424, 436, 458, 465: n = A,T,C or G

SEQ ID NO: 8246 - DNA, 354 bp, Homo sapiens; identical to SEQ ID NO: 1899
  misc_feature 195, 273: n = A,T,C or G

SEQ ID NO: 8247 - DNA, 330 bp, Homo sapiens; identical to SEQ ID NO: 1900
  misc_feature 1: n = A,T,C or G

SEQ ID NO: 8248 - DNA, 268 bp, Homo sapiens; identical to SEQ ID NO: 1901

SEQ ID NO: 8249 - DNA, 546 bp, Homo sapiens; identical to SEQ ID NO: 1902
  misc_feature 70, 485, 518, 537: n = A,T,C or G

SEQ ID NO: 8250 - DNA, 465 bp, Homo sapiens; identical to SEQ ID NO: 1903

SEQ ID NO: 8251 - DNA, 358 bp, Homo sapiens; identical to SEQ ID NO: 1904
  misc_feature 79, 138, 144, 151, 173, 229, 278, 337: n = A,T,C or G

SEQ ID NO: 8252 - DNA, 560 bp, Homo sapiens; identical to SEQ ID NO: 1905
  misc_feature 2: n = A,T,C or G

SEQ ID NO: 8253 - DNA, 482 bp, Homo sapiens; identical to SEQ ID NO: 1906
  misc_feature 3: n = A,T,C or G

SEQ ID NO: 8254 - DNA, 539 bp, Homo sapiens; identical to SEQ ID NO: 1907
  misc_feature 8, 391, 431, 512: n = A,T,C or G

SEQ ID NO: 8255 - DNA, 371 bp, Homo sapiens; identical to SEQ ID NO: 1908
  misc_feature 161, 285, 319, 360: n = A,T,C or G

SEQ ID NO: 8256 - DNA, 553 bp, Homo sapiens; identical to SEQ ID NO: 1909
  misc_feature 512: n = A,T,C or G

SEQ ID NO: 8257 - DNA, 441 bp, Homo sapiens; identical to SEQ ID NO: 1910
  misc_feature 422: n = A,T,C or G

SEQ ID NO: 8258 - DNA, 516 bp, Homo sapiens; identical to SEQ ID NO: 1911

SEQ ID NO: 8259 - DNA, 524 bp, Homo sapiens; identical to SEQ ID NO: 1912
  misc_feature 25, 435: n = A,T,C or G

SEQ ID NO: 8260 - DNA, 489 bp, Homo sapiens; identical to SEQ ID NO: 1913

SEQ ID NO: 8261 - DNA, 539 bp, Homo sapiens; identical to SEQ ID NO: 1914

SEQ ID NO: 8262 - DNA, 338 bp, Homo sapiens; identical to SEQ ID NO: 1915
  misc_feature 15: n = A,T,C or G

SEQ ID NO: 8263 - DNA, 561 bp, Homo sapiens; identical to SEQ ID NO: 1916
  misc_feature 3, 403, 447, 520: n = A,T,C or G

SEQ ID NO: 8264 - DNA, 428 bp, Homo sapiens; identical to SEQ ID NO: 1917

SEQ ID NO: 8265 - DNA, 348 bp, Homo sapiens; identical to SEQ ID NO: 1918

SEQ ID NO: 8266 - DNA, 274 bp, Homo sapiens; identical to SEQ ID NO: 1919
  misc_feature 1, 6, 27, 74: n = A,T,C or G

SEQ ID NO: 8267 - DNA, 411 bp, Homo sapiens; identical to SEQ ID NO: 1920

SEQ ID NO: 8268 - DNA, 519 bp, Homo sapiens; identical to SEQ ID NO: 1921

SEQ ID NO: 8269 - DNA, 488 bp, Homo sapiens; identical to SEQ ID NO: 1922
  misc_feature 477: n = A,T,C or G

SEQ ID NO: 8270 - DNA, 524 bp, Homo sapiens; identical to SEQ ID NO: 1923
  misc_feature 2, 118, 505, 510: n = A,T,C or G

SEQ ID NO: 8271 - DNA, 437 bp, Homo sapiens; identical to SEQ ID NO: 1924
  misc_feature 3, 396, 415: n = A,T,C or G

SEQ ID NO: 8272 - DNA, 469 bp, Homo sapiens; identical to SEQ ID NO: 1925
  misc_feature 226, 419, 456: n = A,T,C or G

SEQ ID NO: 8273 - DNA, 386 bp, Homo sapiens; identical to SEQ ID NO: 1926
  misc_feature 386: n = A,T,C or G

SEQ ID NO: 8274 - DNA, 528 bp, Homo sapiens; identical to SEQ ID NO: 1927
  misc_feature 99, 125, 137, 176, 210, 214, 230, 291, 376, 382, 418, 428,437, 452, 466, 469, 485: n = A,T,C or G

SEQ ID NO: 8275 - DNA, 627 bp, Homo sapiens; identical to SEQ ID NO: 1928
  misc_feature 392, 541, 560, 568, 576, 588, 600, 611: n = A,T,C or G

SEQ ID NO: 8276 - DNA, 518 bp, Homo sapiens; identical to SEQ ID NO: 1929
  misc_feature 104, 140, 242, 359, 426, 437, 461, 506: n = A,T,C or G

SEQ ID NO: 8277 - DNA, 462 bp, Homo sapiens; identical to SEQ ID NO: 1930
  misc_feature 79, 115, 143, 150, 184, 226, 228, 238, 322, 324, 328, 351,354, 368, 396, 418, 422, 430, 438, 446, 450: n = A,T,C or G

SEQ ID NO: 8278 - DNA, 376 bp, Homo sapiens; identical to SEQ ID NO: 1931
  misc_feature 124, 232: n = A,T,C or G

SEQ ID NO: 8279 - DNA, 503 bp, Homo sapiens; identical to SEQ ID NO: 1932
  misc_feature 115: n = A,T,C or G

SEQ ID NO: 8280 - DNA, 308 bp, Homo sapiens; identical to SEQ ID NO: 1933
  misc_feature 78, 207, 227, 242, 243: n = A,T,C or G

SEQ ID NO: 8281 - DNA, 411 bp, Homo sapiens; identical to SEQ ID NO: 1934

SEQ ID NO: 8282 - DNA, 513 bp, Homo sapiens; identical to SEQ ID NO: 1935
  misc_feature 2, 22, 393, 412, 422, 469, 481, 493, 499, 509: n = A,T,C or G

SEQ ID NO: 8283 - DNA, 440 bp, Homo sapiens; identical to SEQ ID NO: 1936
  misc_feature 3, 22, 197: n = A,T,C or G

SEQ ID NO: 8284 - DNA, 532 bp, Homo sapiens; identical to SEQ ID NO: 1937
  misc_feature 19: n = A,T,C or G

SEQ ID NO: 8285 - DNA, 149 bp, Homo sapiens; identical to SEQ ID NO: 1938
  misc_feature 112: n = A,T,C or G

SEQ ID NO: 8286 - DNA, 505 bp, Homo sapiens; identical to SEQ ID NO: 1939

SEQ ID NO: 8287 - DNA, 469 bp, Homo sapiens; identical to SEQ ID NO: 1940
  misc_feature 165, 177, 328, 395, 414, 423: n = A,T,C or G

SEQ ID NO: 8288 - DNA, 431 bp, Homo sapiens; identical to SEQ ID NO: 1941
  misc_feature 170: n = A,T,C or G

SEQ ID NO: 8289 - DNA, 517 bp, Homo sapiens; identical to SEQ ID NO: 1942
  misc_feature 167, 170, 171, 188, 196, 199, 219, 371, 419, 434, 441, 451,454, 458, 459, 460, 461, 464, 473, 476, 480, 484, 485, 498,502, 506, 509, 510: n = A,T,C or G

SEQ ID NO: 8290 - DNA, 321 bp, Homo sapiens; identical to SEQ ID NO: 1943
  misc_feature 23, 27: n = A,T,C or G

SEQ ID NO: 8291 - DNA, 440 bp, Homo sapiens; identical to SEQ ID NO: 1944

SEQ ID NO: 8292 - DNA, 426 bp, Homo sapiens; identical to SEQ ID NO: 1945
  misc_feature 159, 179, 183, 185, 211, 234, 236, 241, 243, 244, 247, 257,265, 267, 268, 275, 284, 286, 411, 420: n = A,T,C or G

SEQ ID NO: 8293 - DNA, 396 bp, Homo sapiens; identical to SEQ ID NO: 1946
  misc_feature 238, 244, 246, 255, 257, 262, 264, 270, 271, 272, 274, 279,282, 283, 288, 291, 292, 297, 298, 299, 304, 305, 381, 387: n = A,T,C or G

SEQ ID NO: 8294 - DNA, 411 bp, Homo sapiens; identical to SEQ ID NO: 1947
  misc_feature 1: n = A,T,C or G

SEQ ID NO: 8295 - DNA, 402 bp, Homo sapiens; identical to SEQ ID NO: 1948
  misc_feature 143, 144, 148, 149, 153, 154, 157, 158, 160, 162, 164, 165,174, 183, 190, 194, 201, 206, 214, 219, 221, 223, 224, 226,228, 233, 239, 241, 242, 244, 246, 251: n = A,T,C or G

SEQ ID NO: 8296 - DNA, 514 bp, Homo sapiens; identical to SEQ ID NO: 1949
  misc_feature 445, 472, 482: n = A,T,C or G

SEQ ID NO: 8297 - DNA, 475 bp, Homo sapiens; identical to SEQ ID NO: 1950
  misc_feature 1, 56, 104, 168, 169, 171, 184, 230, 244, 273, 308, 340,341, 364, 384, 415, 464: n = A,T,C or G

SEQ ID NO: 8298 - DNA, 446 bp, Homo sapiens; identical to SEQ ID NO: 1951
  misc_feature 5, 422: n = A,T,C or G

SEQ ID NO: 8299 - DNA, 418 bp, Homo sapiens; identical to SEQ ID NO: 1952
  misc_feature 256, 325, 348, 354, 360, 363, 366, 374, 408: n = A,T,C or G

SEQ ID NO: 8300 - DNA, 493 bp, Homo sapiens; identical to SEQ ID NO: 1953
  misc_feature 23: n = A,T,C or G

SEQ ID NO: 8301 - DNA, 500 bp, Homo sapiens; identical to SEQ ID NO: 1954

SEQ ID NO: 8302 - DNA, 293 bp, Homo sapiens; identical to SEQ ID NO: 1955
  misc_feature 3: n = A,T,C or G

SEQ ID NO: 8303 - DNA, 360 bp, Homo sapiens; identical to SEQ ID NO: 1956
  misc_feature 309: n = A,T,C or G

SEQ ID NO: 8304 - DNA, 523 bp, Homo sapiens; identical to SEQ ID NO: 1957
  misc_feature 462, 502: n = A,T,C or G

SEQ ID NO: 8305 - DNA, 493 bp, Homo sapiens; identical to SEQ ID NO: 1958

SEQ ID NO: 8306 - DNA, 295 bp, Homo sapiens; identical to SEQ ID NO: 1959

SEQ ID NO: 8307 - DNA, 355 bp, Homo sapiens; identical to SEQ ID NO: 1960
  misc_feature 64, 83, 90, 100, 101, 102, 109, 139, 147, 149, 155, 157,221, 276: n = A,T,C or G

SEQ ID NO: 8308 - DNA, 346 bp, Homo sapiens; identical to SEQ ID NO: 1961
  misc_feature 1, 3, 82, 150: n = A,T,C or G

SEQ ID NO: 8309 - DNA, 351 bp, Homo sapiens; identical to SEQ ID NO: 1963
  misc_feature 9, 63, 225: n = A,T,C or G

SEQ ID NO: 8310 - DNA, 380 bp, Homo sapiens; identical to SEQ ID NO: 1964
  misc_feature 3, 11: n = A,T,C or G

SEQ ID NO: 8311 - DNA, 339 bp, Homo sapiens; identical to SEQ ID NO: 1965
  misc_feature 74, 79, 80, 82, 90, 137, 138, 140, 142, 143, 144, 145, 146,147, 148, 152, 153, 158: n = A,T,C or G

SEQ ID NO: 8312 - DNA, 355 bp, Homo sapiens; identical to SEQ ID NO: 1966
  misc_feature 95, 156, 157, 158, 159: n = A,T,C or G

SEQ ID NO: 8313 - DNA, 363 bp, Homo sapiens; identical to SEQ ID NO: 1967
  misc_feature 3, 84, 157, 158, 159, 160, 163, 164, 165, 166, 167, 169,170, 171, 177, 178, 180: n = A,T,C or G

SEQ ID NO: 8314 - DNA, 540 bp, Homo sapiens; identical to SEQ ID NO: 1968
  misc_feature 406, 417, 420, 426, 427, 453, 454, 455, 456, 473, 480, 483,485, 490, 500, 512, 514, 520, 521, 530: n = A,T,C or G

SEQ ID NO: 8315 - DNA, 217 bp, Homo sapiens; identical to SEQ ID NO: 1969
  misc_feature 127, 129, 155, 167, 168, 176, 196, 199, 202: n = A,T,C or G

SEQ ID NO: 8316 - DNA, 328 bp, Homo sapiens; identical to SEQ ID NO: 1970
  misc_feature 168, 169, 196, 213, 247, 283, 287: n = A,T,C or G

SEQ ID NO: 8317 - DNA, 519 bp, Homo sapiens; identical to SEQ ID NO: 1971
  misc_feature 479: n = A,T,C or G

SEQ ID NO: 8318 - DNA, 235 bp, Homo sapiens; identical to SEQ ID NO: 1972
  misc_feature 172, 179: n = A,T,C or G

SEQ ID NO: 8319 - DNA, 374 bp, Homo sapiens; identical to SEQ ID NO: 1973
  misc_feature 75, 77, 238: n = A,T,C or G

SEQ ID NO: 8320 - DNA, 320 bp, Homo sapiens; identical to SEQ ID NO: 1974

SEQ ID NO: 8321 - DNA, 496 bp, Homo sapiens; identical to SEQ ID NO: 1975
  misc_feature 13, 16, 17, 31, 32, 44, 53, 58, 65, 72, 73, 83, 84, 120,143, 232, 240, 241, 294, 320, 348, 371, 396, 414, 418, 436,451, 456, 458, 475, 477, 482, 485: n = A,T,C or G

SEQ ID NO: 8322 - DNA, 523 bp, Homo sapiens; identical to SEQ ID NO: 1976
  misc_feature 274, 279, 281, 284, 288, 289, 290, 292, 293, 296, 312, 313,314, 317, 325, 331, 334, 335, 342, 343, 345, 346, 349, 351,362, 366, 367, 370, 374, 382, 388, 398, 400, 404, 407, 411,413, 418, 419, 420, 427, 428, 441, 442, 443, 446, 447: n = A,T,C or G
  misc_feature 451, 458, 459, 466, 472, 484, 494, 502, 511: n = A,T,C or G

SEQ ID NO: 8323 - DNA, 351 bp, Homo sapiens; identical to SEQ ID NO: 1977
  misc_feature 5: n = A,T,C or G

SEQ ID NO: 8324 - DNA, 495 bp, Homo sapiens; identical to SEQ ID NO: 1978
  misc_feature 237, 334, 359: n = A,T,C or G

SEQ ID NO: 8325 - DNA, 297 bp, Homo sapiens; identical to SEQ ID NO: 1979
  misc_feature 150, 186: n = A,T,C or G

SEQ ID NO: 8326 - DNA, 538 bp, Homo sapiens; identical to SEQ ID NO: 1980
  misc_feature 407, 512: n = A,T,C or G

SEQ ID NO: 8327 - DNA, 484 bp, Homo sapiens; identical to SEQ ID NO: 1981
  misc_feature 2, 317, 480, 481: n = A,T,C or G

SEQ ID NO: 8328 - DNA, 280 bp, Homo sapiens; identical to SEQ ID NO: 1982
  misc_feature 126, 251, 273, 274, 276, 279: n = A,T,C or G

SEQ ID NO: 8329 - DNA, 615 bp, Homo sapiens; identical to SEQ ID NO: 1983
  misc_feature 112, 128, 356, 365, 368, 372, 373, 485, 599: n = A,T,C or G

SEQ ID NO: 8330 - DNA, 381 bp, Homo sapiens; identical to SEQ ID NO: 1984
  misc_feature 338, 339, 340, 341, 344, 351: n = A,T,C or G

SEQ ID NO: 8331 - DNA, 592 bp, Homo sapiens; identical to SEQ ID NO: 1985
  misc_feature 185, 231, 361, 530: n = A,T,C or G

SEQ ID NO: 8332 - DNA, 417 bp, Homo sapiens; identical to SEQ ID NO: 1986
  misc_feature 2, 388, 402, 414, 417: n = A,T,C or G

SEQ ID NO: 8333 - DNA, 534 bp, Homo sapiens; identical to SEQ ID NO: 1987
  misc_feature 375, 465, 520: n = A,T,C or G

SEQ ID NO: 8334 - DNA, 502 bp, Homo sapiens; identical to SEQ ID NO: 1988
  misc_feature 11, 488: n = A,T,C or G

SEQ ID NO: 8335 - DNA, 555 bp, Homo sapiens; identical to SEQ ID NO: 1989
  misc_feature 21: n = A,T,C or G

SEQ ID NO: 8336 - DNA, 550 bp, Homo sapiens; identical to SEQ ID NO: 1990
  misc_feature 1, 34: n = A,T,C or G

SEQ ID NO: 8337 - DNA, 371 bp, Homo sapiens; identical to SEQ ID NO: 1991

SEQ ID NO: 8338 - DNA, 518 bp, Homo sapiens; identical to SEQ ID NO: 1992
  misc_feature 29, 79, 137, 141, 149, 157, 166, 230, 256, 288, 291, 293,296, 299, 300, 302, 304, 307, 308, 317, 319, 324, 325, 327,330, 331, 345, 346, 347, 351, 352, 359, 363, 366, 439, 447,481, 493, 497: n = A,T,C or G

SEQ ID NO: 8339 - DNA, 571 bp, Homo sapiens; identical to SEQ ID NO: 1993
  misc_feature 3, 6: n = A,T,C or G

SEQ ID NO: 8340 - DNA, 368 bp, Homo sapiens; identical to SEQ ID NO: 1994
  misc_feature 23, 34, 40: n = A,T,C or G

SEQ ID NO: 8341 - DNA, 579 bp, Homo sapiens; identical to SEQ ID NO: 1995
  misc_feature 7: n = A,T,C or G

SEQ ID NO: 8342 - DNA, 495 bp, Homo sapiens; identical to SEQ ID NO: 1996

SEQ ID NO: 8343 - DNA, 463 bp, Homo sapiens; identical to SEQ ID NO: 1997
  misc_feature 5, 463: n = A,T,C or G

SEQ ID NO: 8344 - DNA, 477 bp, Homo sapiens; identical to SEQ ID NO: 1998

SEQ ID NO: 8345 - DNA, 275 bp, Homo sapiens; identical to SEQ ID NO: 1999
  misc_feature 1, 2, 173: n = A,T,C or G

SEQ ID NO: 8346 - DNA, 403 bp, Homo sapiens; identical to SEQ ID NO: 2000

SEQ ID NO: 8347 - DNA, 564 bp, Homo sapiens; identical to SEQ ID NO: 2001
  misc_feature 435, 535: n = A,T,C or G

SEQ ID NO: 8348 - DNA, 684 bp, Homo sapiens; identical to SEQ ID NO: 2002
  misc_feature 110, 339, 406, 408, 432, 444, 448, 457, 489, 491, 494, 516,518, 533, 539, 543, 564, 565, 569, 575, 587, 588, 597, 611,621, 633, 644, 659: n = A,T,C or G

SEQ ID NO: 8349 - DNA, 381 bp, Homo sapiens; identical to SEQ ID NO: 2003
  misc_feature 3: n = A,T,C or G

SEQ ID NO: 8350 - DNA, 394 bp, Homo sapiens; identical to SEQ ID NO: 2004
  misc_feature 2: n = A,T,C or G

SEQ ID NO: 8351 - DNA, 464 bp, Homo sapiens; identical to SEQ ID NO: 2005
  misc_feature 12: n = A,T,C or G

SEQ ID NO: 8352 - DNA, 359 bp, Homo sapiens; identical to SEQ ID NO: 2006
  misc_feature 1, 87, 175, 176, 330: n = A,T,C or G

SEQ ID NO: 8353 - DNA, 538 bp, Homo sapiens; identical to SEQ ID NO: 2007
  misc_feature 494, 509, 524: n = A,T,C or G

SEQ ID NO: 8354 - DNA, 342 bp, Homo sapiens; identical to SEQ ID NO: 2008
  misc_feature 1: n = A,T,C or G

SEQ ID NO: 8355 - DNA, 462 bp, Homo sapiens; identical to SEQ ID NO: 2009
  misc_feature 8: n = A,T,C or G

SEQ ID NO: 8356 - DNA, 593 bp, Homo sapiens; identical to SEQ ID NO: 2010

SEQ ID NO: 8357 - DNA, 475 bp, Homo sapiens; identical to SEQ ID NO: 2011
  misc_feature 36: n = A,T,C or G

SEQ ID NO: 8358 - DNA, 507 bp, Homo sapiens; identical to SEQ ID NO: 2012
  misc_feature 1, 383, 506: n = A,T,C or G

SEQ ID NO: 8359 - DNA, 437 bp, Homo sapiens; identical to SEQ ID NO: 2013
  misc_feature 405, 419, 422, 423, 436: n = A,T,C or G

SEQ ID NO: 8360 - DNA, 694 bp, Homo sapiens; identical to SEQ ID NO: 2014
  misc_feature 352, 354, 355, 359, 364, 372, 373, 374, 375, 376, 377, 378,379, 380, 381, 382, 383, 384, 385, 386, 387, 388, 389, 390,391, 392, 393, 394, 395, 396, 397, 398, 399, 400, 401, 402,403, 404, 405, 406, 407, 408, 409, 410, 411, 412, 413: n = A,T,C or G
  misc_feature 414, 415, 416, 417, 418, 419, 420, 421, 422, 423, 424, 425,426, 427, 428, 429, 430, 431, 432, 433, 434, 435, 436, 437,438, 439, 440, 441, 442, 443, 444, 445, 446, 447, 448, 449,450, 451, 452, 453, 454, 455, 456, 457, 458, 459, 460: n = A,T,C or G
  misc_feature 461, 462, 463, 464, 465, 466, 467, 468, 469, 470, 471, 472,473, 474, 475, 476, 477, 478, 479, 480, 481, 482, 483, 484,485, 486, 487, 488, 489, 490, 491, 492, 493, 494, 495, 496,497, 498, 499, 500, 501, 502, 503, 504, 505, 506, 507: n = A,T,C or G
  misc_feature 508, 509, 510, 511, 512, 513, 514, 515, 516, 517, 518, 519,531, 538, 557, 571, 572, 573, 577, 598, 607, 625, 653, 663,666, 671: n = A,T,C or G

SEQ ID NO: 8361 - DNA, 538 bp, Homo sapiens; identical to SEQ ID NO: 2015
  misc_feature 107, 468: n = A,T,C or G

SEQ ID NO: 8362 - DNA, 500 bp, Homo sapiens; identical to SEQ ID NO: 2016

SEQ ID NO: 8363 - DNA, 699 bp, Homo sapiens; identical to SEQ ID NO: 2017
  misc_feature 472, 489, 491, 495, 518, 522, 569, 584, 630, 633, 645, 649,669, 678, 685: n = A,T,C or G

SEQ ID NO: 8364 - DNA, 703 bp, Homo sapiens; identical to SEQ ID NO: 2018
  misc_feature 86, 258, 332, 395, 461, 483, 539, 548, 553, 554, 555, 570,580, 590, 592, 604, 606, 608, 631, 634, 654, 656, 660, 664,682, 683, 688, 695: n = A,T,C or G

SEQ ID NO: 8365 - DNA, 702 bp, Homo sapiens; identical to SEQ ID NO: 2019
  misc_feature 591, 651, 686, 694: n = A,T,C or G

SEQ ID NO: 8366 - DNA, 525 bp, Homo sapiens; identical to SEQ ID NO: 2020
  misc_feature 8, 104, 109: n = A,T,C or G

SEQ ID NO: 8367 - DNA, 733 bp, Homo sapiens; identical to SEQ ID NO: 2021
  misc_feature 296, 338, 348, 380, 390, 418, 424, 463, 464, 474, 493, 496,498, 499, 500, 501, 502, 503, 504, 505, 510, 511, 513, 514,515, 516, 517, 518, 519, 521, 530, 534, 537, 552, 554, 567,609, 614, 624, 641, 650, 660, 663, 666, 673, 699, 710: n = A,T,C or G

SEQ ID NO: 8368 - DNA, 506 bp, Homo sapiens; identical to SEQ ID NO: 2022
  misc_feature 114: n = A,T,C or G

SEQ ID NO: 8369 - DNA, 380 bp, Homo sapiens; identical to SEQ ID NO: 2023

SEQ ID NO: 8370 - DNA, 465 bp, Homo sapiens; identical to SEQ ID NO: 2024
  misc_feature 100: n = A,T,C or G

SEQ ID NO: 8371 - DNA, 463 bp, Homo sapiens; identical to SEQ ID NO: 2025
  misc_feature 93, 228, 267, 409, 411, 430: n = A,T,C or G

SEQ ID NO: 8372 - DNA, 540 bp, Homo sapiens; identical to SEQ ID NO: 2026
  misc_feature 4: n = A,T,C or G

SEQ ID NO: 8373 - DNA, 328 bp, Homo sapiens; identical to SEQ ID NO: 2027

SEQ ID NO: 8374 - DNA, 382 bp, Homo sapiens; identical to SEQ ID NO: 2028
  misc_feature 75, 250: n = A,T,C or G

SEQ ID NO: 8375 - DNA, 395 bp, Homo sapiens; identical to SEQ ID NO: 2029
  misc_feature 114, 115: n = A,T,C or G

SEQ ID NO: 8376 - DNA, 329 bp, Homo sapiens; identical to SEQ ID NO: 2030
  misc_feature 112, 117: n = A,T,C or G

SEQ ID NO: 8377 - DNA, 513 bp, Homo sapiens; identical to SEQ ID NO: 2031
  misc_feature 1, 110: n = A,T,C or G

SEQ ID NO: 8378 - DNA, 546 bp, Homo sapiens; identical to SEQ ID NO: 2032
  misc_feature 6, 64, 303, 540: n = A,T,C or G

SEQ ID NO: 8379 - DNA, 322 bp, Homo sapiens; identical to SEQ ID NO: 2033
  misc_feature 26, 102, 156, 223, 259, 262, 287: n = A,T,C or G

SEQ ID NO: 8380 - DNA, 753 bp, Homo sapiens; identical to SEQ ID NO: 2034
  misc_feature 13, 15, 25, 28, 36, 40, 49, 54, 56, 64, 65, 67, 73, 74, 75,76, 81, 84, 85, 86, 89, 92, 111, 112, 113, 115, 117, 119,124, 126, 127, 129, 136, 142, 152, 153, 154, 157, 166, 167,176, 191, 202, 207, 208, 209, 217, 227, 228, 236, 237: n = A,T,C or G
  misc_feature 243, 244, 259, 261, 263, 265, 268, 283, 284, 285, 292, 293,297, 302, 304, 307, 308, 311, 313, 315, 317, 319, 326, 345,351, 352, 359, 360, 361, 381, 385, 389, 392, 396, 402, 404,409, 415, 418, 425, 426, 427, 428, 429, 432, 435, 437: n = A,T,C or G
  misc_feature 445, 449, 454, 458, 459, 460, 461, 479, 482, 494, 495, 496,497, 510, 511, 512, 515, 516, 518, 519, 520, 522, 523, 548,549, 550, 551, 564, 567, 571, 573, 580, 588, 592, 595, 606,608, 609, 625, 626, 627, 631, 637, 639, 641, 643, 644: n = A,T,C or G
  misc_feature 646, 649, 651, 652, 653, 655, 660, 676, 680, 684, 685, 687,692, 695, 696, 699, 701, 702, 705, 707, 709, 711, 716, 717,723, 728, 732, 733, 739, 740, 742, 745: n = A,T,C or G

SEQ ID NO: 8381 - DNA, 708 bp, Homo sapiens; identical to SEQ ID NO: 2035
  misc_feature 627, 642: n = A,T,C or G

SEQ ID NO: 8382 - DNA, 765 bp, Homo sapiens; identical to SEQ ID NO: 2036
  misc_feature 623, 691, 697, 702, 711, 719, 742: n = A,T,C or G

SEQ ID NO: 8383 - DNA, 526 bp, Homo sapiens; identical to SEQ ID NO: 2037

SEQ ID NO: 8384 - DNA, 812 bp, Homo sapiens; identical to SEQ ID NO: 2038
  misc_feature 616, 689, 692, 731, 739, 757, 760, 779: n = A,T,C or G

SEQ ID NO: 8385 - DNA, 500 bp, Homo sapiens; identical to SEQ ID NO: 2039
  misc_feature 8, 481, 484, 489, 492, 493, 494, 495, 496, 497, 498, 499,500: n = A,T,C or G

SEQ ID NO: 8386 - DNA, 614 bp, Homo sapiens; identical to SEQ ID NO: 2040
  misc_feature 114: n = A,T,C or G

SEQ ID NO: 8387 - DNA, 733 bp, Homo sapiens; identical to SEQ ID NO: 2041
  misc_feature 7, 32, 49, 63, 64, 74, 82, 86, 107, 141, 185, 186, 293, 341,355, 365, 370, 448, 450, 453, 456, 471, 476, 490, 512, 515,520, 525, 531, 574, 579, 612, 613, 616, 622, 625, 627, 631,632, 658, 665, 679, 703, 706, 717: n = A,T,C or G

SEQ ID NO: 8388 - DNA, 374 bp, Homo sapiens; identical to SEQ ID NO: 2042
  misc_feature 1: n = A,T,C or G

SEQ ID NO: 8389 - DNA, 473 bp, Homo sapiens; identical to SEQ ID NO: 2043

SEQ ID NO: 8390 - DNA, 511 bp, Homo sapiens; identical to SEQ ID NO: 2044

SEQ ID NO: 8391 - DNA, 552 bp, Homo sapiens; identical to SEQ ID NO: 2045
  misc_feature 4, 408, 463, 475, 487, 539: n = A,T,C or G

SEQ ID NO: 8392 - DNA, 554 bp, Homo sapiens; identical to SEQ ID NO: 2046
  misc_feature 345, 450, 497, 516: n = A,T,C or G

SEQ ID NO: 8393 - DNA, 377 bp, Homo sapiens; identical to SEQ ID NO: 2047

SEQ ID NO: 8394 - DNA, 588 bp, Homo sapiens; identical to SEQ ID NO: 2048
  misc_feature 10, 42, 62, 69, 72, 74, 93, 103, 104, 107, 109, 110, 112,114, 115, 117, 121, 123, 125, 135, 141, 143, 171, 178, 181,189, 196, 198, 201, 222, 223, 224, 226, 230, 237, 248, 252,257, 321, 337, 361, 362, 424, 435, 440, 455, 456, 484: n = A,T,C or G
  misc_feature 490, 494, 507, 517, 528, 547, 558, 570, 574: n = A,T,C or G

SEQ ID NO: 8395 - DNA, 224 bp, Homo sapiens; identical to SEQ ID NO: 2049
  misc_feature 2: n = A,T,C or G

SEQ ID NO: 8396 - DNA, 447 bp, Homo sapiens; identical to SEQ ID NO: 2050
  misc_feature 4, 342, 395, 408, 415, 417, 446: n = A,T,C or G

SEQ ID NO: 8397 - DNA, 580 bp, Homo sapiens; identical to SEQ ID NO: 2051
  misc_feature 103, 326, 364, 421, 424, 429, 432, 437, 440, 461, 507, 544: n = A,T,C or G

SEQ ID NO: 8398 - DNA, 445 bp, Homo sapiens; identical to SEQ ID NO: 2052
  misc_feature 16: n = A,T,C or G

SEQ ID NO: 8399 - DNA, 543 bp, Homo sapiens; identical to SEQ ID NO: 2053
  misc_feature 1, 5, 174, 494: n = A,T,C or G

SEQ ID NO: 8400 - DNA, 416 bp, Homo sapiens; identical to SEQ ID NO: 2054

SEQ ID NO: 8401 - DNA, 203 bp, Homo sapiens; identical to SEQ ID NO: 2055
  misc_feature 191, 192, 198, 199, 203: n = A,T,C or G

SEQ ID NO: 8402 - DNA, 477 bp, Homo sapiens; identical to SEQ ID NO: 2056
  misc_feature 46, 83, 85, 211, 288, 333, 341, 343, 358, 368, 369, 375,398, 419, 423, 433, 448: n = A,T,C or G

SEQ ID NO: 8403 - DNA, 509 bp, Homo sapiens; identical to SEQ ID NO: 2057
  misc_feature 4, 181, 486, 491: n = A,T,C or G

SEQ ID NO: 8404 - DNA, 280 bp, Homo sapiens; identical to SEQ ID NO: 2058

SEQ ID NO: 8405 - DNA, 204 bp, Homo sapiens; identical to SEQ ID NO: 2059
  misc_feature 126, 178, 195: n = A,T,C or G

SEQ ID NO: 8406 - DNA, 382 bp, Homo sapiens; identical to SEQ ID NO: 2060
  misc_feature 54, 85, 185, 344: n = A,T,C or G

SEQ ID NO: 8407 - DNA, 513 bp, Homo sapiens; identical to SEQ ID NO: 2061
  misc_feature 155: n = A,T,C or G

SEQ ID NO: 8408 - DNA, 531 bp, Homo sapiens; identical to SEQ ID NO: 2062
  misc_feature 13, 27, 135, 136, 141, 142, 143, 145, 146, 147, 148, 155,160, 163, 164, 167, 170, 171, 172, 175, 177, 178, 179, 183,187, 191, 194, 195, 197, 198, 205, 206, 207, 209, 210, 211,215, 219, 220, 223, 225, 226, 227, 237, 246, 251, 253: n = A,T,C or G
  misc_feature 257, 259, 270, 271, 279, 281, 288, 289, 291, 292, 294, 295,302, 303, 307, 308, 310, 313, 314, 315, 316, 323, 324, 325,326, 327, 333, 346, 350, 354, 359, 364, 374, 382, 386, 405,420, 427, 441, 442, 445, 447, 448, 451, 463, 469, 470: n = A,T,C or G
  misc_feature 477, 484, 488, 489, 513, 514: n = A,T,C or G

SEQ ID NO: 8409 - DNA, 440 bp, Homo sapiens; identical to SEQ ID NO: 2063
  misc_feature 19, 61, 68, 69, 70, 72, 85, 101, 127, 179, 298, 313, 322,328, 338, 381, 384, 402: n = A,T,C or G

SEQ ID NO: 8410 - DNA, 555 bp, Homo sapiens; identical to SEQ ID NO: 2064
  misc_feature 13, 14, 20, 21, 22: n = A,T,C or G

SEQ ID NO: 8411 - DNA, 114 bp, Homo sapiens; identical to SEQ ID NO: 2066
  misc_feature 16, 17, 19, 21, 32, 34, 45, 61, 81: n = A,T,C or G

SEQ ID NO: 8412 - DNA, 463 bp, Homo sapiens; identical to SEQ ID NO: 2067
  misc_feature 10, 93, 216, 242, 332, 380, 408, 413, 427, 454: n = A,T,C or G

SEQ ID NO: 8413 - DNA, 520 bp, Homo sapiens; identical to SEQ ID NO: 2068
  misc_feature 30, 147, 156, 180, 233, 245, 400, 412, 427, 429, 444, 445,453, 502: n = A,T,C or G

SEQ ID NO: 8414 - DNA, 639 bp, Homo sapiens; identical to SEQ ID NO: 2069
  misc_feature 36, 37, 177, 211, 531, 550, 576, 620, 622: n = A,T,C or G

SEQ ID NO: 8415 - DNA, 310 bp, Homo sapiens; identical to SEQ ID NO: 2070
  misc_feature 54, 61, 63, 64, 71, 73, 84, 90, 91, 93, 99, 108, 110, 112,118, 124, 135, 139, 144, 148, 153, 161, 163, 168, 176, 178,183, 190, 195, 200, 201, 210, 213, 219, 230, 232, 235, 237,251, 269, 273, 278, 280, 281, 283, 285, 289, 295, 302: n = A,T,C or G

SEQ ID NO: 8416 - DNA, 176 bp, Homo sapiens; identical to SEQ ID NO: 2071
  misc_feature 28, 30, 36: n = A,T,C or G

SEQ ID NO: 8417 - DNA, 540 bp, Homo sapiens; identical to SEQ ID NO: 2072
  misc_feature 28, 31, 43, 47, 50, 63, 73, 82, 122, 123, 125, 128, 139,159, 238, 323, 399, 411, 416, 422, 432, 454, 537: n = A,T,C or G

SEQ ID NO: 8418 - DNA, 400 bp, Homo sapiens; identical to SEQ ID NO: 2073
  misc_feature 15, 377: n = A,T,C or G

SEQ ID NO: 8419 - DNA, 517 bp, Homo sapiens; identical to SEQ ID NO: 2074
  misc_feature 14, 415, 460: n = A,T,C or G

SEQ ID NO: 8420 - DNA, 445 bp, Homo sapiens; identical to SEQ ID NO: 2075

SEQ ID NO: 8421 - DNA, 580 bp, Homo sapiens; identical to SEQ ID NO: 2076

SEQ ID NO: 8422 - DNA, 119 bp, Homo sapiens; identical to SEQ ID NO: 2078
  misc_feature 7, 34: n = A,T,C or G

SEQ ID NO: 8423 - DNA, 283 bp, Homo sapiens; identical to SEQ ID NO: 2079
  misc_feature 28: n = A,T,C or G

SEQ ID NO: 8424 - DNA, 431 bp, Homo sapiens; identical to SEQ ID NO: 2080
  misc_feature 4, 54, 68, 88, 101, 117, 144, 234, 387: n = A,T,C or G

SEQ ID NO: 8425 - DNA, 414 bp, Homo sapiens; identical to SEQ ID NO: 2081
  misc_feature 36, 80, 92, 95, 116, 130, 215, 217, 223, 230, 237, 238, 247,268, 289, 291, 306, 309, 312, 324, 330, 331, 332, 333, 338,339, 343, 365, 372, 374, 375: n = A,T,C or G

SEQ ID NO: 8426 - DNA, 485 bp, Homo sapiens; identical to SEQ ID NO: 2082
  misc_feature 36: n = A,T,C or G

SEQ ID NO: 8427 - DNA, 289 bp, Homo sapiens; identical to SEQ ID NO: 2084
  misc_feature 24, 94, 108, 142, 146, 150, 164, 176, 186, 198, 213, 239: n = A,T,C or G

SEQ ID NO: 8428 - DNA, 153 bp, Homo sapiens; identical to SEQ ID NO: 2085
  misc_feature 1, 3, 6, 8, 14, 33, 41, 43, 47, 56, 61, 62, 71, 116, 125,134, 145, 151: n = A,T,C or G

SEQ ID NO: 8429 - DNA, 258 bp, Homo sapiens; identical to SEQ ID NO: 2086
  misc_feature 4, 5, 12, 17, 29, 51, 62, 105, 157, 158, 190, 215: n = A,T,C or G

SEQ ID NO: 8430 - DNA, 166 bp, Homo sapiens; identical to SEQ ID NO: 2087
  misc_feature 5, 32: n = A,T,C or G

SEQ ID NO: 8431 - DNA, 375 bp, Homo sapiens; identical to SEQ ID NO: 2088
  misc_feature 2, 28, 31, 56, 63, 65, 66, 67, 68, 69, 70, 71, 72, 73, 74,75, 76, 77, 78, 79, 80, 81, 82, 83, 84, 85, 86, 87, 88,89, 90, 91, 92, 93, 94, 95, 96, 97, 98, 99, 100, 101, 102,103, 104, 105, 106, 107, 108, 109, 110, 111, 112, 113, 114: n = A,T,C or G
  misc_feature 115, 116, 117, 118, 119, 120, 121, 122, 123, 124, 125, 126,127, 128, 129, 130, 131, 132, 133, 134, 135, 136, 137, 138,139, 140, 141, 142, 143, 144, 145, 146, 147, 148, 149, 150,151, 152, 153, 154, 155, 157, 158, 159, 160, 161, 162: n = A,T,C or G
  misc_feature 163, 164, 165, 166, 167, 168, 169, 170, 171, 172, 173, 174,175, 176, 177, 178, 179, 180, 181, 182, 183, 184, 185, 186,187, 188, 189, 190, 191, 192, 193, 194, 195, 196, 197, 198,199, 200, 201, 202, 203, 204, 205, 206, 207, 208, 209: n = A,T,C or G
  misc_feature 210, 211, 212, 213, 214, 215, 216, 217, 218, 219, 220, 221,222, 223, 224, 225, 226, 227, 228, 229, 230, 231, 232, 233,234, 235, 236, 237, 238, 239, 240, 241, 242, 243, 244, 245,246, 247, 248, 250, 251, 252, 253, 254, 255, 256, 257: n = A,T,C or G
  misc_feature 258, 259, 260, 261, 262, 263, 264, 265, 266, 267, 268, 269,270, 271, 272, 273, 274, 275, 276, 277, 278, 279, 280, 281,282, 283, 284, 285, 286, 287, 288, 289, 290, 291, 292, 293,294, 295, 296, 297, 298, 299, 300, 301, 302, 303, 304: n = A,T,C or G
  misc_feature 305, 306, 307, 308, 309, 310, 311, 312, 313, 314, 315, 316,317, 318, 332, 344, 348, 366: n = A,T,C or G

SEQ ID NO: 8432 - DNA, 685 bp, Homo sapiens; identical to SEQ ID NO: 2089
  misc_feature 4, 15, 17, 19, 20, 23, 41, 59, 64, 73, 74, 97, 98, 99, 109,124, 130, 142, 147, 158, 163, 164, 181, 231, 254, 256, 276,277, 278, 279, 280, 281, 282, 283, 284, 285, 286, 287, 288,289, 290, 291, 292, 293, 294, 295, 296, 297, 298, 299: n = A,T,C or G
  misc_feature 300, 301, 302, 303, 304, 305, 306, 307, 308, 309, 310, 311,312, 313, 314, 315, 316, 317, 318, 319, 320, 321, 322, 323,324, 325, 326, 327, 337, 342, 347, 349, 358, 359, 362, 365,384, 391, 397, 413, 431, 433, 440, 441, 442, 449, 454: n = A,T,C or G
  misc_feature 470, 471, 477, 492, 502, 511, 521, 527, 533, 534, 543, 545,553, 563, 570, 582, 597, 623, 633, 634, 635, 638, 639, 645,657, 659, 673: n = A,T,C or G

SEQ ID NO: 8433 - DNA, 254 bp, Homo sapiens; identical to SEQ ID NO: 2090
  misc_feature 1, 10, 24, 29, 30, 63, 64, 109, 112, 128, 212, 217, 234: n = A,T,C or G

SEQ ID NO: 8434 - DNA, 515 bp, Homo sapiens; identical to SEQ ID NO: 2091
  misc_feature 7, 11, 13, 15, 18, 19, 23, 25, 45, 416, 442, 498, 499: n = A,T,C or G

SEQ ID NO: 8435 - DNA, 715 bp, Homo sapiens; identical to SEQ ID NO: 2092
  misc_feature 61, 71, 289, 362, 363, 364, 365, 366, 367, 368, 369, 370,371, 372, 373, 374, 375, 376, 377, 378, 379, 380, 381, 382,383, 384, 385, 386, 387, 388, 389, 390, 391, 392, 393, 394,395, 396, 397, 398, 399, 400, 401, 402, 403, 404, 405: n = A,T,C or G
  misc_feature 406, 407, 408, 409, 410, 411, 412, 413, 414, 415, 416, 417,418, 419, 420, 421, 422, 423, 424, 425, 426, 427, 428, 429,430, 431, 432, 433, 434, 435, 436, 437, 438, 439, 440, 441,442, 443, 444, 445, 446, 447, 448, 449, 450, 451, 452: n = A,T,C or G
  misc_feature 453, 454, 455, 456, 457, 458, 459, 460, 461, 462, 463, 464,465, 466, 467, 468, 469, 470, 471, 472, 473, 474, 475, 476,477, 478, 479, 663, 670, 686, 697: n = A,T,C or G

SEQ ID NO: 8436 - DNA, 340 bp, Homo sapiens; identical to SEQ ID NO: 2093
  misc_feature 17, 57, 62, 108, 142, 168, 181, 198, 256: n = A,T,C or G

SEQ ID NO: 8437 - DNA, 527 bp, Homo sapiens; identical to SEQ ID NO: 2094
  misc_feature 23, 37, 46, 95, 112, 158, 188, 200, 219, 238, 244, 256, 262,278, 288, 292, 300, 306, 307, 308, 314, 316, 342, 388, 397,400, 413, 416, 463, 492, 507, 509: n = A,T,C or G

SEQ ID NO: 8438 - DNA, 142 bp, Homo sapiens; identical to SEQ ID NO: 2095
  misc_feature 14, 17, 25, 40, 77, 85, 138: n = A,T,C or G

SEQ ID NO: 8439 - DNA, 145 bp, Homo sapiens; identical to SEQ ID NO: 2096
  misc_feature 28, 39, 51, 81, 85, 95, 113, 128, 130, 137: n = A,T,C or G

SEQ ID NO: 8440 - DNA, 326 bp, Homo sapiens; identical to SEQ ID NO: 2097
  misc_feature 4, 5, 44, 56, 59, 61, 68, 87, 93, 95, 119, 124, 135, 137,143, 151, 161, 165, 174, 205, 218, 226, 227, 229, 233, 250,254, 261, 265, 274, 285, 286, 309, 311, 312: n = A,T,C or G

SEQ ID NO: 8441 - DNA, 355 bp, Homo sapiens; identical to SEQ ID NO: 2098
  misc_feature 163: n = A,T,C or G

SEQ ID NO: 8442 - DNA, 350 bp, Homo sapiens; identical to SEQ ID NO: 2099
  misc_feature 1, 3, 8: n = A,T,C or G

SEQ ID NO: 8443 - DNA, 320 bp, Homo sapiens; identical to SEQ ID NO: 2100
  misc_feature 1: n = A,T,C or G

SEQ ID NO: 8444 - DNA, 378 bp, Homo sapiens; identical to SEQ ID NO: 2101
  misc_feature 1, 20, 37, 53, 55, 65, 97, 123, 124, 127, 130, 131, 142,150, 192, 197, 207, 208, 215, 219, 220, 221, 222, 223, 224,225, 226, 227, 228, 229, 230, 231, 232, 233, 234, 235, 236,237, 238, 239, 240, 241, 242, 243, 245, 261, 264, 267: n = A,T,C or G
  misc_feature 279, 287, 291, 292, 293, 295, 297, 302, 313, 321, 322, 323,324, 325, 326, 327, 328, 339, 340, 341, 342, 343, 344, 345,346, 347, 360, 369: n = A,T,C or G

SEQ ID NO: 8445 - DNA, 312 bp, Homo sapiens; identical to SEQ ID NO: 2102
  misc_feature 125, 126, 128, 131, 142, 148, 151, 154, 156, 160, 162, 163,169, 176, 179, 180, 189, 190, 191, 193, 194, 200, 204, 207,211, 212, 216, 217, 218, 219, 220, 223, 224, 226, 230, 232,237, 243, 245, 246, 248, 256, 259, 269, 270, 274, 275: n = A,T,C or G
  misc_feature 281, 287, 288, 291: n = A,T,C or G

SEQ ID NO: 8446 - DNA, 268 bp, Homo sapiens; identical to SEQ ID NO: 2103
  misc_feature 216, 241: n = A,T,C or G

SEQ ID NO: 8447 - DNA, 362 bp, Homo sapiens; identical to SEQ ID NO: 2104
  misc_feature 133, 135: n = A,T,C or G

SEQ ID NO: 8448 - DNA, 303 bp, Homo sapiens; identical to SEQ ID NO: 2105
  misc_feature 13, 51, 79, 86, 89, 91, 93, 98, 108, 125, 148, 160, 222,234, 237, 253, 255, 258, 263, 265, 279, 282, 289: n = A,T,C or G

SEQ ID NO: 8449 - DNA, 190 bp, Homo sapiens; identical to SEQ ID NO: 2106
  misc_feature 31, 120, 127, 144, 166: n = A,T,C or G

SEQ ID NO: 8450 - DNA, 713 bp, Homo sapiens; identical to SEQ ID NO: 2107
  misc_feature 52, 56, 109, 151, 195, 231, 285, 309, 315, 324, 332, 335,341, 353, 360, 361, 362, 366, 371, 372, 388, 397, 399, 403,405, 414, 430, 432, 441, 444, 473, 475, 478, 488, 491, 496,525, 528, 530, 536, 541, 560, 564, 567, 577, 588, 595: n = A,T,C or G
  misc_feature 603, 616, 625, 630, 635, 639, 646, 652, 692: n = A,T,C or G

SEQ ID NO: 8451 - DNA, 470 bp, Homo sapiens; identical to SEQ ID NO: 2108

SEQ ID NO: 8452 - DNA, 632 bp, Homo sapiens; identical to SEQ ID NO: 2109
  misc_feature 1, 225, 260, 266, 284, 293, 310, 317, 339, 364, 370, 378,384, 389, 404, 415, 439, 445, 446, 468, 469, 481, 498, 506,528, 534, 539, 554, 568, 579, 590: n = A,T,C or G

SEQ ID NO: 8453 - DNA, 572 bp, Homo sapiens; identical to SEQ ID NO: 2110
  misc_feature 24, 140, 234, 236, 263, 303, 316, 319, 395, 397, 474, 490,513: n = A,T,C or G

SEQ ID NO: 8454 - DNA, 273 bp, Homo sapiens; identical to SEQ ID NO: 2111
  misc_feature 123, 187, 191, 201, 221, 227, 250, 255, 257, 272: n = A,T,C or G

SEQ ID NO: 8455 - DNA, 648 bp, Homo sapiens; identical to SEQ ID NO: 2112
  misc_feature 65, 151, 236, 252, 266, 279, 296, 297, 308, 325, 327, 370,375, 387, 402, 405, 409, 416, 429, 443, 451, 464, 468, 491,517, 540, 561, 570, 608, 613, 628, 635: n = A,T,C or G

SEQ ID NO: 8456 - DNA, 378 bp, Homo sapiens; identical to SEQ ID NO: 2113
  misc_feature 78, 86, 107, 112, 178, 200, 228, 324, 325: n = A,T,C or G

SEQ ID NO: 8457 - DNA, 312 bp, Homo sapiens; identical to SEQ ID NO: 2114
  misc_feature 17, 20, 32, 39, 44, 45, 46, 48, 49, 50, 55, 56, 57, 59, 60,62, 63, 64, 67, 79, 82, 83, 109, 115, 117, 135, 144, 156,160, 201, 209, 210, 214, 220, 239, 248, 251, 268, 271, 282,291, 292, 295, 300: n = A,T,C or G

SEQ ID NO: 8458 - DNA, 169 bp, Homo sapiens; identical to SEQ ID NO: 2115
  misc_feature 74, 75, 95, 105, 107, 108, 132, 135, 136, 142, 143, 147,148, 154, 160, 167, 168, 169: n = A,T,C or G

SEQ ID NO: 8459 - DNA, 319 bp, Homo sapiens; identical to SEQ ID NO: 2116
  misc_feature 19, 57, 91, 105, 106, 118, 154, 180, 206, 234, 272, 277,279, 303: n = A,T,C or G

SEQ ID NO: 8460 - DNA, 293 bp, Homo sapiens; identical to SEQ ID NO: 2117
  misc_feature 41, 50, 75, 92, 121, 122, 123, 124, 125, 126, 127, 128, 129,130, 131, 132, 133, 134, 135, 136, 137, 138, 139, 140, 141,142, 143, 144, 145, 146, 147, 148, 149, 191, 202, 245, 257,258, 280: n = A,T,C or G

SEQ ID NO: 8461 - DNA, 228 bp, Homo sapiens; identical to SEQ ID NO: 2119

SEQ ID NO: 8462 - DNA, 492 bp, Homo sapiens; identical to SEQ ID NO: 2120
  misc_feature 106, 140, 144, 305, 315, 327, 366, 400, 403, 428, 455: n = A,T,C or G

SEQ ID NO: 8463 - DNA, 344 bp, Homo sapiens; identical to SEQ ID NO: 2121
  misc_feature 54, 273, 325: n = A,T,C or G

SEQ ID NO: 8464 - DNA, 161 bp, Homo sapiens; identical to SEQ ID NO: 2122
  misc_feature 4, 34, 76, 77, 116, 121, 153: n = A,T,C or G

SEQ ID NO: 8465 - DNA, 557 bp, Homo sapiens; identical to SEQ ID NO: 2123
  misc_feature 24, 231, 313, 314, 315, 316, 317, 318, 319, 320, 321, 322,323, 324, 325, 326, 327, 328, 329, 330, 331, 332, 333, 334,335, 336, 337, 338, 339, 340, 341, 342, 346, 377, 378, 393,397, 398, 399, 400, 401, 402, 403, 404, 405, 406, 407: n = A,T,C or G
  misc_feature 408, 409, 410, 411, 412, 413, 414, 415, 416, 417, 418, 419,420, 421, 422, 423, 424, 425, 426, 427, 428, 429, 430, 431,432, 433, 434, 435, 436, 437, 438, 439, 440, 441, 442, 443,444, 445, 446, 447, 453, 460, 465, 475, 481, 493, 495: n = A,T,C or G
  misc_feature 517, 530, 539: n = A,T,C or G

SEQ ID NO: 8466 - DNA, 462 bp, Homo sapiens; identical to SEQ ID NO: 2124
  misc_feature 15: n = A,T,C or G

SEQ ID NO: 8467 - DNA, 256 bp, Homo sapiens; identical to SEQ ID NO: 2125

SEQ ID NO: 8468 - DNA, 180 bp, Homo sapiens; identical to SEQ ID NO: 2126
  misc_feature 70, 72, 86, 90, 103, 110, 127, 134, 148, 150, 153: n = A,T,C or G

SEQ ID NO: 8469 - DNA, 450 bp, Homo sapiens; identical to SEQ ID NO: 2127
  misc_feature 40, 104, 126, 134, 145, 149, 161, 202, 239, 242, 269, 276,286, 292, 301, 302, 308, 309, 319, 356, 359, 363, 387, 395,401, 402, 404, 408, 410, 416, 429: n = A,T,C or G

SEQ ID NO: 8470 - DNA, 538 bp, Homo sapiens; identical to SEQ ID NO: 2128
  misc_feature 447: n = A,T,C or G

SEQ ID NO: 8471 - DNA, 291 bp, Homo sapiens; identical to SEQ ID NO: 2129
  misc_feature 42, 48, 56, 68, 156: n = A,T,C or G

SEQ ID NO: 8472 - DNA, 349 bp, Homo sapiens; identical to SEQ ID NO: 2130
  misc_feature 134: n = A,T,C or G

SEQ ID NO: 8473 - DNA, 698 bp, Homo sapiens; identical to SEQ ID NO: 2131
  misc_feature 321, 330, 332, 366, 371, 375, 393, 404, 405, 409, 412, 413,415, 416, 421, 426, 428, 432, 437, 439, 440, 444, 461, 463,471, 481, 482, 489, 492, 497, 506, 527, 540, 547, 549, 558,559, 582, 584, 603, 604, 605, 617, 618, 622, 623, 624: n = A,T,C or G
  misc_feature 625, 632, 634, 639, 643, 651, 652, 654, 657, 659, 666, 671,674, 675, 677, 681, 691: n = A,T,C or G

SEQ ID NO: 8474 - DNA, 255 bp, Homo sapiens; identical to SEQ ID NO: 2132
  misc_feature 46, 69, 208: n = A,T,C or G

SEQ ID NO: 8475 - DNA, 623 bp, Homo sapiens; identical to SEQ ID NO: 2133
  misc_feature 299, 337, 356, 375, 388, 393, 394, 400, 410, 411, 412, 413,414, 422, 430, 444, 446, 467, 468, 480, 484, 495, 496, 526,529, 532, 534, 535, 536, 549, 550, 554, 556, 557, 566, 579,582, 585, 588, 595, 596, 604, 605, 606, 611: n = A,T,C or G

SEQ ID NO: 8476 - DNA, 464 bp, Homo sapiens; identical to SEQ ID NO: 2134
  misc_feature 161, 208, 223, 364, 409, 425, 445, 447, 463: n = A,T,C or G

SEQ ID NO: 8477 - DNA, 409 bp, Homo sapiens; identical to SEQ ID NO: 2135

SEQ ID NO: 8478 - DNA, 330 bp, Homo sapiens; identical to SEQ ID NO: 2136
  misc_feature 2, 182, 230, 236, 246, 247, 311: n = A,T,C or G

SEQ ID NO: 8479 - DNA, 195 bp, Homo sapiens; identical to SEQ ID NO: 2137
  misc_feature 16, 17, 20, 22, 26, 30, 56, 79, 89, 96, 119, 126, 172: n = A,T,C or G

SEQ ID NO: 8480 - DNA, 130 bp, Homo sapiens; identical to SEQ ID NO: 2138
  misc_feature 37, 39, 52, 58, 59, 61, 62, 76, 78, 94, 97, 101, 109, 112,116, 129: n = A,T,C or G

SEQ ID NO: 8481 - DNA, 547 bp, Homo sapiens; identical to SEQ ID NO: 2139
  misc_feature 39, 73, 77, 143, 214, 266, 272, 275, 320, 330, 344, 366,374, 382, 384, 399, 408, 411, 417, 430, 436, 440, 462, 497,500: n = A,T,C or G

SEQ ID NO: 8482 - DNA, 398 bp, Homo sapiens; identical to SEQ ID NO: 2140
  misc_feature 110: n = A,T,C or G

SEQ ID NO: 8483 - DNA, 146 bp, Homo sapiens; identical to SEQ ID NO: 2141
  misc_feature 61, 63: n = A,T,C or G

SEQ ID NO: 8484 - DNA, 529 bp, Homo sapiens; identical to SEQ ID NO: 2142

SEQ ID NO: 8485 - DNA, 157 bp, Homo sapiens; identical to SEQ ID NO: 2143
  misc_feature 33, 36, 39, 40, 41, 60, 63, 103, 111, 116: n = A,T,C or G

SEQ ID NO: 8486 - DNA, 528 bp, Homo sapiens; identical to SEQ ID NO: 2144
  misc_feature 4, 32, 35, 40, 106, 112, 113, 116, 149, 182, 195, 199, 237,292, 330, 332, 339, 372, 374, 396, 440, 443, 444, 445, 466,478, 489, 493, 499, 504, 507, 509, 513, 515, 521: n = A,T,C or G

SEQ ID NO: 8487 - DNA, 438 bp, Homo sapiens; identical to SEQ ID NO: 2145
  misc_feature 7, 11, 14, 18, 39, 43, 44, 77, 89, 99, 175, 179, 207, 210,212, 222, 239, 262, 291, 359, 377, 419, 424: n = A,T,C or G

SEQ ID NO: 8488 - DNA, 660 bp, Homo sapiens; identical to SEQ ID NO: 2146
  misc_feature 422, 435, 444, 445, 449, 516, 576, 584, 589, 613, 620, 635,636: n = A,T,C or G

SEQ ID NO: 8489 - DNA, 286 bp, Homo sapiens; identical to SEQ ID NO: 2147
  misc_feature 26, 33, 36, 40, 77, 113, 156, 164, 175, 179, 191, 204, 212,215, 216, 235, 239, 242, 261, 263, 274: n = A,T,C or G

SEQ ID NO: 8490 - DNA, 416 bp, Homo sapiens; identical to SEQ ID NO: 2148
  misc_feature 225: n = A,T,C or G

SEQ ID NO: 8491 - DNA, 451 bp, Homo sapiens; identical to SEQ ID NO: 2149
  misc_feature 322, 352, 408, 430, 439: n = A,T,C or G

SEQ ID NO: 8492 - DNA, 568 bp, Homo sapiens; identical to SEQ ID NO: 2150
  misc_feature 41: n = A,T,C or G

SEQ ID NO: 8493 - DNA, 273 bp, Homo sapiens; identical to SEQ ID NO: 2151
  misc_feature 19, 21, 25, 27, 29, 32, 37, 39, 40, 42, 45, 50, 73, 74, 95,104, 126, 139, 196, 205, 213, 232, 235: n = A,T,C or G

SEQ ID NO: 8494 - DNA, 204 bp, Homo sapiens; identical to SEQ ID NO: 2152
  misc_feature 41, 42: n = A,T,C or G

SEQ ID NO: 8495 - DNA, 619 bp, Homo sapiens; identical to SEQ ID NO: 2153
  misc_feature 43: n = A,T,C or G

SEQ ID NO: 8496 - DNA, 138 bp, Homo sapiens; identical to SEQ ID NO: 2154
  misc_feature 2, 54, 60, 77, 78, 80, 82, 90, 101, 103, 115: n = A,T,C or G

SEQ ID NO: 8497 - DNA, 226 bp, Homo sapiens; identical to SEQ ID NO: 2155
  misc_feature 38, 175, 176, 177, 203, 206: n = A,T,C or G

SEQ ID NO: 8498 - DNA, 496 bp, Homo sapiens; identical to SEQ ID NO: 2156
  misc_feature 15, 304, 365, 370, 409, 411, 416, 423, 442, 447, 453, 469,472, 478, 483: n = A,T,C or G

SEQ ID NO: 8499 - DNA, 268 bp, Homo sapiens; identical to SEQ ID NO: 2157

SEQ ID NO: 8500 - DNA, 531 bp, Homo sapiens; identical to SEQ ID NO: 2158
  misc_feature 127, 216, 267, 286, 296, 321, 325, 338, 369, 379, 380, 386,389, 409, 455, 458, 463, 465, 484, 500, 506: n = A,T,C or G

SEQ ID NO: 8501 - DNA, 374 bp, Homo sapiens; identical to SEQ ID NO: 2159

SEQ ID NO: 8502 - DNA, 294 bp, Homo sapiens; identical to SEQ ID NO: 2160
  misc_feature 272: n = A,T,C or G

SEQ ID NO: 8503 - DNA, 189 bp, Homo sapiens; identical to SEQ ID NO: 2161
  misc_feature 152, 156, 159, 163, 166, 168, 171, 180, 182, 184, 185, 189: n = A,T,C or G

SEQ ID NO: 8504 - DNA, 332 bp, Homo sapiens; identical to SEQ ID NO: 2162
  misc_feature 1, 6, 31, 74, 107, 109, 119, 125, 138, 147, 173, 176, 186,193, 199, 217, 237, 240, 241, 247, 250, 261, 265, 269, 270,275, 281, 289, 314, 320, 321, 323, 325: n = A,T,C or G

SEQ ID NO: 8505 - DNA, 520 bp, Homo sapiens; identical to SEQ ID NO: 2163
  misc_feature 455, 473, 488, 495, 510: n = A,T,C or G

SEQ ID NO: 8506 - DNA, 500 bp, Homo sapiens; identical to SEQ ID NO: 2164
  misc_feature 23, 76, 103, 105, 167, 195, 287, 310, 314, 326, 346, 385,411, 419, 426, 432, 436, 449, 450, 463, 479, 480, 485, 486,488, 489: n = A,T,C or G

SEQ ID NO: 8507 - DNA, 499 bp, Homo sapiens; identical to SEQ ID NO: 2165
  misc_feature 96, 107, 114, 179, 219, 221, 256, 260, 266, 271, 285, 298,325, 327, 348, 360, 364, 420, 422, 435, 494, 495: n = A,T,C or G

SEQ ID NO: 8508 - DNA, 132 bp, Homo sapiens; identical to SEQ ID NO: 2166
  misc_feature 17, 67, 98, 112: n = A,T,C or G

SEQ ID NO: 8509 - DNA, 408 bp, Homo sapiens; identical to SEQ ID NO: 2167
  misc_feature 31, 130, 141, 148, 149, 169, 172, 178, 181, 195, 229, 249,273, 274, 286, 297, 304, 314, 340, 362, 395: n = A,T,C or G

SEQ ID NO: 8510 - DNA, 483 bp, Homo sapiens; identical to SEQ ID NO: 2168
  misc_feature 226, 231, 236, 240, 254, 284, 288, 298, 341, 387, 459, 481: n = A,T,C or G

SEQ ID NO: 8511 - DNA, 266 bp, Homo sapiens; identical to SEQ ID NO: 2170
  misc_feature 71, 95, 103, 114, 123, 148, 175, 185, 193, 228, 237, 239: n = A,T,C or G

SEQ ID NO: 8512 - DNA, 645 bp, Homo sapiens; identical to SEQ ID NO: 2171
  misc_feature 174, 213, 336, 414, 419, 424, 489, 496, 509, 511, 512, 519,524, 547, 548, 556, 563, 566, 580, 589, 592, 623, 626, 628: n = A,T,C or G

SEQ ID NO: 8513 - DNA, 452 bp, Homo sapiens; identical to SEQ ID NO: 2172
  misc_feature 51, 63, 72, 78, 81, 142, 184, 185, 196, 197, 201, 219, 221,222, 225, 234, 259, 271, 288, 307, 344, 375, 383, 401, 409,416, 426, 427, 438, 443: n = A,T,C or G

SEQ ID NO: 8514 - DNA, 420 bp, Homo sapiens; identical to SEQ ID NO: 2173

SEQ ID NO: 8515 - DNA, 463 bp, Homo sapiens; identical to SEQ ID NO: 2174

SEQ ID NO: 8516 - DNA, 295 bp, Homo sapiens; identical to SEQ ID NO: 2175
  misc_feature 81: n = A,T,C or G

SEQ ID NO: 8517 - DNA, 297 bp, Homo sapiens; identical to SEQ ID NO: 2176

SEQ ID NO: 8518 - DNA, 499 bp, Homo sapiens; identical to SEQ ID NO: 2177
  misc_feature 171, 172, 175, 179, 182, 186, 192, 194, 197, 202, 205, 207,213, 222, 225, 231, 232, 233, 240, 242, 243, 247, 253, 254,270, 274, 289, 310, 323, 337, 354, 358, 375, 378, 379, 383,386, 394, 395, 400, 401, 408, 413, 419, 420, 432, 438: n = A,T,C or G
  misc_feature 440, 443, 448, 452, 459, 469, 470, 474, 480, 482, 488: n = A,T,C or G

SEQ ID NO: 8519 - DNA, 359 bp, Homo sapiens; identical to SEQ ID NO: 2178
  misc_feature 135, 222, 244, 265, 276, 290, 292, 299, 300: n = A,T,C or G

SEQ ID NO: 8520 - DNA, 370 bp, Homo sapiens; identical to SEQ ID NO: 2179
  misc_feature 83, 170, 192, 199, 214, 232, 297, 314, 319, 344, 352: n = A,T,C or G

SEQ ID NO: 8521 - DNA, 422 bp, Homo sapiens; identical to SEQ ID NO: 2180

SEQ ID NO: 8522 - DNA, 230 bp, Homo sapiens; identical to SEQ ID NO: 2181
  misc_feature 15, 122, 142: n = A,T,C or G

SEQ ID NO: 8523 - DNA, 142 bp, Homo sapiens; identical to SEQ ID NO: 2182
  misc_feature 67: n = A,T,C or G

SEQ ID NO: 8524 - DNA, 188 bp, Homo sapiens; identical to SEQ ID NO: 2183
  misc_feature 90, 154: n = A,T,C or G

SEQ ID NO: 8525 - DNA, 496 bp, Homo sapiens; identical to SEQ ID NO: 2184

SEQ ID NO: 8526 - DNA, 303 bp, Homo sapiens; identical to SEQ ID NO: 2185
  misc_feature 7, 57, 60, 263: n = A,T,C or G

SEQ ID NO: 8527 - DNA, 340 bp, Homo sapiens; identical to SEQ ID NO: 2186
  misc_feature 55, 59, 101, 129, 239, 242, 251, 263, 269, 304: n = A,T,C or G

SEQ ID NO: 8528 - DNA, 428 bp, Homo sapiens; identical to SEQ ID NO: 2187

SEQ ID NO: 8529 - DNA, 555 bp, Homo sapiens; identical to SEQ ID NO: 2188

SEQ ID NO: 8530 - DNA, 497 bp, Homo sapiens; identical to SEQ ID NO: 2189

SEQ ID NO: 8531 - DNA, 311 bp, Homo sapiens; identical to SEQ ID NO: 2190
  misc_feature 19, 64, 66, 71, 107, 127, 154, 185, 189, 190, 193, 194, 198,205, 233, 239, 247, 266, 271, 275, 276, 283, 284, 286, 294,299: n = A,T,C or G

SEQ ID NO: 8532 - DNA, 521 bp, Homo sapiens; identical to SEQ ID NO: 2191
  misc_feature 203, 207, 212, 214, 227, 228, 230, 231, 239, 250, 258, 262,264, 266, 283, 285, 303, 322, 328, 337, 338, 346, 349, 350,352, 353, 355, 371, 375, 389, 394, 395, 396, 397, 399, 400,410, 429, 432, 434, 449, 450, 451, 452, 461, 467, 468: n = A,T,C or G
  misc_feature 474, 475, 476, 483, 498, 521: n = A,T,C or G

SEQ ID NO: 8533 - DNA, 498 bp, Homo sapiens; identical to SEQ ID NO: 2192

SEQ ID NO: 8534 - DNA, 482 bp, Homo sapiens; identical to SEQ ID NO: 2193

SEQ ID NO: 8535 - DNA, 778 bp, Homo sapiens; identical to SEQ ID NO: 2194
  misc_feature 43, 49, 83, 118, 130, 134, 178, 227, 234, 307, 312, 323,325, 327, 342, 346, 350, 351, 359, 389, 391, 427, 435, 460,463, 471, 496, 515, 523, 525, 549, 560, 565, 573, 604, 647,650, 661, 664, 670, 701, 730, 732, 741, 744, 745, 753: n = A,T,C or G

SEQ ID NO: 8536 - DNA, 639 bp, Homo sapiens; identical to SEQ ID NO: 2195
  misc_feature 139, 582, 616: n = A,T,C or G

SEQ ID NO: 8537 - DNA, 689 bp, Homo sapiens; identical to SEQ ID NO: 2196
  misc_feature 462, 488, 533, 580, 582, 626, 645, 653, 670, 675, 679: n = A,T,C or G

SEQ ID NO: 8538 - DNA, 604 bp, Homo sapiens; identical to SEQ ID NO: 2198
  misc_feature 499, 507, 510, 513, 519, 520, 526, 533, 556, 558, 562, 587,603: n = A,T,C or G

SEQ ID NO: 8539 - DNA, 270 bp, Homo sapiens; identical to SEQ ID NO: 2199
  misc_feature 28, 30, 60, 73, 87, 143, 163, 167, 170, 173, 193, 196, 205,207, 210, 211, 213, 217, 220, 231, 241, 242, 243: n = A,T,C or G

SEQ ID NO: 8540 - DNA, 382 bp, Homo sapiens; identical to SEQ ID NO: 2200

SEQ ID NO: 8541 - DNA, 515 bp, Homo sapiens; identical to SEQ ID NO: 2201
  misc_feature 17, 18, 109, 110, 115, 117: n = A,T,C or G

SEQ ID NO: 8542 - DNA, 374 bp, Homo sapiens; identical to SEQ ID NO: 2202

SEQ ID NO: 8543 - DNA, 522 bp, Homo sapiens; identical to SEQ ID NO: 2203
  misc_feature 522: n = A,T,C or G

SEQ ID NO: 8544 - DNA, 109 bp, Homo sapiens; identical to SEQ ID NO: 2204
  misc_feature 50, 77, 79, 84: n = A,T,C or G

SEQ ID NO: 8545 - DNA, 645 bp, Homo sapiens; identical to SEQ ID NO: 2205
  misc_feature 350, 375, 386, 461, 474, 475, 481, 503, 511, 517, 530, 555,561, 566, 573, 589, 593, 621: n = A,T,C or G

SEQ ID NO: 8546 - DNA, 521 bp, Homo sapiens; identical to SEQ ID NO: 2206
  misc_feature 31, 44, 56, 271, 514: n = A,T,C or G

SEQ ID NO: 8547 - DNA, 468 bp, Homo sapiens; identical to SEQ ID NO: 2207
  misc_feature 81, 84, 93, 117, 125, 134, 138, 139, 140, 141, 142, 143,144, 145, 146, 147, 148, 149, 150, 151, 152, 153, 154, 155,156, 157, 158, 159, 160, 161, 162, 163, 164, 165, 166, 167,168, 169, 170, 171, 172, 173, 174, 175, 176, 177, 178: n = A,T,C or G
  misc_feature 179, 180, 181, 182, 183, 184, 185, 186, 187, 188, 189, 190,191, 192, 193, 194, 195, 196, 197, 198, 199, 200, 201, 202,203, 204, 205, 206, 207, 208, 209, 210, 211, 212, 213, 214,215, 216, 217, 218, 219, 220, 221, 222, 223, 224, 225: n = A,T,C or G
  misc_feature 226, 227, 228, 229, 230, 231, 232, 233, 234, 235, 236, 237,238, 239, 240, 241, 242, 243, 244, 245, 246, 247, 248, 249,250, 251, 252, 253, 254, 255, 256, 257, 258, 259, 260, 261,262, 263, 264, 265, 266, 267, 270, 284, 294, 297, 298: n = A,T,C or G
  misc_feature 313, 317, 324, 325, 326, 334, 339, 369, 416, 424, 433, 441,449, 463: n = A,T,C or G

SEQ ID NO: 8548 - DNA, 307 bp, Homo sapiens; identical to SEQ ID NO: 2208
  misc_feature 10, 11, 16: n = A,T,C or G

SEQ ID NO: 8549 - DNA, 703 bp, Homo sapiens; identical to SEQ ID NO: 2209
  misc_feature 18, 34, 36, 38, 42, 46, 51, 52, 62, 63, 64, 65, 66, 67, 68,69, 70, 71, 72, 73, 74, 75, 76, 77, 78, 79, 80, 81, 82,83, 84, 85, 86, 87, 88, 89, 90, 91, 92, 93, 94, 95, 96,97, 98, 99, 100, 101, 102, 103, 104, 105, 106, 107, 108,109: n = A,T,C or G
  misc_feature 110, 111, 112, 113, 114, 115, 116, 117, 118, 119, 120, 121,122, 123, 124, 125, 126, 127, 128, 129, 130, 131, 132, 133,134, 135, 136, 137, 138, 139, 140, 141, 142, 143, 144, 145,146, 147, 148, 149, 150, 151, 152, 153, 158, 167, 168: n = A,T,C or G
  misc_feature 171, 175, 181, 199, 250, 255, 260, 263, 273, 278, 280, 283,289, 290, 302, 305, 313, 328, 339, 340, 343, 358, 363, 376,392, 393, 394, 395, 413, 418, 419, 420, 421, 428, 429, 431,440, 450, 454, 455, 456, 457, 458, 459, 478, 479, 480: n = A,T,C or G
  misc_feature 481, 483, 484, 485, 496, 497, 506, 507, 508, 511, 513, 514,515, 519, 522, 527, 550, 551, 552, 555, 566, 568, 589, 622,626, 642, 655, 656, 657, 658, 659, 660, 670, 671, 672, 673,684, 686, 687: n = A,T,C or G

SEQ ID NO: 8550 - DNA, 393 bp, Homo sapiens; identical to SEQ ID NO: 2210
  misc_feature 3, 9, 21, 24, 25, 36, 37, 38, 47, 48, 52, 81, 86, 91, 92,98, 101, 125, 127, 136, 153, 186, 194, 217, 218, 228, 236,246, 251, 252, 280, 288, 296, 299, 307, 319, 322, 331, 332,337, 343, 347, 361, 366, 368, 369, 370, 392: n = A,T,C or G

SEQ ID NO: 8551 - DNA, 424 bp, Homo sapiens; identical to SEQ ID NO: 2211
  misc_feature 24, 31, 51, 75, 155, 163, 175, 176, 180, 181, 182, 186, 187,189, 191, 192, 195, 200, 203, 204, 205, 206, 207, 209, 210,225, 233, 235, 236, 240, 242, 250, 252, 259, 266, 269, 270,271, 279, 280, 285, 288, 295, 301, 306, 310, 311: n = A,T,C or G
  misc_feature 312, 314, 315, 317, 319, 320, 321, 327, 342, 343, 348, 349,350, 351, 352, 353, 354, 363, 370, 371, 377, 381, 382, 385,391, 395, 405, 408, 409, 410: n = A,T,C or G

SEQ ID NO: 8552 - DNA, 422 bp, Homo sapiens; identical to SEQ ID NO: 2212
  misc_feature 224, 236, 240, 253, 270, 291, 302, 324, 342, 352, 370, 395,401: n = A,T,C or G

SEQ ID NO: 8553 - DNA, 413 bp, Homo sapiens; identical to SEQ ID NO: 2213
  misc_feature 52, 100, 146, 177, 295, 312: n = A,T,C or G

SEQ ID NO: 8554 - DNA, 273 bp, Homo sapiens; identical to SEQ ID NO: 2214
  misc_feature 79, 110, 140, 150, 160, 219, 221, 239, 256, 261: n = A,T,C or G

SEQ ID NO: 8555 - DNA, 493 bp, Homo sapiens; identical to SEQ ID NO: 2215
  misc_feature 42, 101, 112, 113, 145, 162, 218, 231, 234, 256, 268, 271,287, 297, 336, 340, 351, 361, 375, 381, 419, 422, 426, 431,435, 450, 455, 470: n = A,T,C or G

SEQ ID NO: 8556 - DNA, 439 bp, Homo sapiens; identical to SEQ ID NO: 2216
  misc_feature 148, 149, 153, 212, 222, 251, 265, 268, 309, 314, 330, 363,392, 394, 399, 410: n = A,T,C or G

SEQ ID NO: 8557 - DNA, 479 bp, Homo sapiens; identical to SEQ ID NO: 2217
  misc_feature 450: n = A,T,C or G

SEQ ID NO: 8558 - DNA, 436 bp, Homo sapiens; identical to SEQ ID NO: 2218
  misc_feature 268, 276, 296, 310, 322, 341, 345, 357, 361, 364, 365, 386,388, 393, 394, 400, 411, 412, 424, 426, 427: n = A,T,C or G

SEQ ID NO: 8559 - DNA, 191 bp, Homo sapiens; identical to SEQ ID NO: 2219
  misc_feature 180: n = A,T,C or G

SEQ ID NO: 8560 - DNA, 582 bp, Homo sapiens; identical to SEQ ID NO: 2220
  misc_feature 6, 63, 65, 66, 70, 73, 103, 107, 109, 122, 141, 144, 174,180, 208, 261, 266, 273, 291, 296, 301, 308, 315, 317, 324,331, 348, 353, 356, 359, 364, 369, 383, 396, 397, 398, 400,411, 412, 414, 434, 440, 447, 452, 454, 458, 460, 466: n = A,T,C or G
  misc_feature 468, 469, 471, 472, 473, 480, 481, 482, 483, 484, 485, 486,488, 500, 528, 529, 530, 534, 536, 537, 538, 544, 545, 546,547, 548, 550, 556, 557, 560, 561, 562, 563, 564: n = A,T,C or G

SEQ ID NO: 8561 - DNA, 381 bp, Homo sapiens; identical to SEQ ID NO: 2221
  misc_feature 307: n = A,T,C or G

SEQ ID NO: 8562 - DNA, 321 bp, Homo sapiens; identical to SEQ ID NO: 2222

SEQ ID NO: 8563 - DNA, 585 bp, Homo sapiens; identical to SEQ ID NO: 2223

SEQ ID NO: 8564 - DNA, 410 bp, Homo sapiens; identical to SEQ ID NO: 2224
  misc_feature 6, 29, 52, 58, 76, 190, 236, 243, 272: n = A,T,C or G

SEQ ID NO: 8565 - DNA, 586 bp, Homo sapiens; identical to SEQ ID NO: 2225
  misc_feature 413, 474, 484, 541, 572: n = A,T,C or G

SEQ ID NO: 8566 - DNA, 411 bp, Homo sapiens; identical to SEQ ID NO: 2226
  misc_feature 9, 261, 281, 290, 318, 348, 361: n = A,T,C or G

SEQ ID NO: 8567 - DNA, 417 bp, Homo sapiens; identical to SEQ ID NO: 2227

SEQ ID NO: 8568 - DNA, 381 bp, Homo sapiens; identical to SEQ ID NO: 2228

SEQ ID NO: 8569 - DNA, 139 bp, Homo sapiens; identical to SEQ ID NO: 2229
  misc_feature 52, 91, 113, 123: n = A,T,C or G

SEQ ID NO: 8570 - DNA, 195 bp, Homo sapiens; identical to SEQ ID NO: 2230
  misc_feature 1, 20, 36, 48, 49, 52, 53, 69, 77, 89, 135, 136, 168: n = A,T,C or G

SEQ ID NO: 8571 - DNA, 503 bp, Homo sapiens; identical to SEQ ID NO: 2231
  misc_feature 321, 340, 349, 360, 379, 383, 399, 482: n = A,T,C or G

SEQ ID NO: 8572 - DNA, 447 bp, Homo sapiens; identical to SEQ ID NO: 2232

SEQ ID NO: 8573 - DNA, 243 bp, Homo sapiens; identical to SEQ ID NO: 2233
  misc_feature 15, 44, 133, 157, 167: n = A,T,C or G

SEQ ID NO: 8574 - DNA, 265 bp, Homo sapiens; identical to SEQ ID NO: 2234
  misc_feature 8: n = A,T,C or G

SEQ ID NO: 8575 - DNA, 196 bp, Homo sapiens; identical to SEQ ID NO: 2235

SEQ ID NO: 8576 - DNA, 281 bp, Homo sapiens; identical to SEQ ID NO: 2236
  misc_feature 249, 258: n = A,T,C or G

SEQ ID NO: 8577 - DNA, 295 bp, Homo sapiens; identical to SEQ ID NO: 2237
  misc_feature 4, 45, 47, 84, 91, 123, 126, 135, 149, 154, 164, 173, 181,203, 217, 223, 227, 233, 237, 253, 277: n = A,T,C or G

SEQ ID NO: 8578 - DNA, 222 bp, Homo sapiens; identical to SEQ ID NO: 2238
  misc_feature 207: n = A,T,C or G

SEQ ID NO: 8579 - DNA, 453 bp, Homo sapiens; identical to SEQ ID NO: 2239
  misc_feature 320, 323, 332, 333, 334, 335, 363, 373, 393, 405, 428: n = A,T,C or G

SEQ ID NO: 8580 - DNA, 431 bp, Homo sapiens; identical to SEQ ID NO: 2240
  misc_feature 26, 39, 40, 291, 353, 420: n = A,T,C or G

SEQ ID NO: 8581 - DNA, 431 bp, Homo sapiens; identical to SEQ ID NO: 2241

SEQ ID NO: 8582 - DNA, 357 bp, Homo sapiens; identical to SEQ ID NO: 2242
  misc_feature 7: n = A,T,C or G

SEQ ID NO: 8583 - DNA, 238 bp, Homo sapiens; identical to SEQ ID NO: 2243
  misc_feature 44, 201, 238: n = A,T,C or G

SEQ ID NO: 8584 - DNA, 304 bp, Homo sapiens; identical to SEQ ID NO: 2244
  misc_feature 37, 38, 43, 45, 65, 131, 170, 237: n = A,T,C or G

SEQ ID NO: 8585 - DNA, 258 bp, Homo sapiens; identical to SEQ ID NO: 2245

SEQ ID NO: 8586 - DNA, 340 bp, Homo sapiens; identical to SEQ ID NO: 2246

SEQ ID NO: 8587 - DNA, 490 bp, Homo sapiens; identical to SEQ ID NO: 2247
  misc_feature 16, 42, 73, 232, 237, 266, 272, 301, 304, 326, 329, 332,345, 365, 369, 375, 376, 379, 385, 397, 406, 408, 426, 433,439, 441, 459, 460, 474, 476: n = A,T,C or G

SEQ ID NO: 8588 - DNA, 123 bp, Homo sapiens; identical to SEQ ID NO: 2248
  misc_feature 60: n = A,T,C or G

SEQ ID NO: 8589 - DNA, 433 bp, Homo sapiens; identical to SEQ ID NO: 2249

SEQ ID NO: 8590 - DNA, 130 bp, Homo sapiens; identical to SEQ ID NO: 2250

SEQ ID NO: 8591 - DNA, 487 bp, Homo sapiens; identical to SEQ ID NO: 2251
  misc_feature 35, 56, 95, 122, 145, 171, 188, 219, 364, 414, 426, 469, 470: n = A,T,C or G

SEQ ID NO: 8592 - DNA, 239 bp, Homo sapiens; identical to SEQ ID NO: 2252
  misc_feature 59, 104, 109, 150, 163, 181: n = A,T,C or G

SEQ ID NO: 8593 - DNA, 640 bp, Homo sapiens; identical to SEQ ID NO: 2253
  misc_feature 100, 359, 373, 402, 403, 404, 405, 406, 407, 408, 409, 410,411, 412, 413, 414, 415, 416, 417, 418, 419, 420, 421, 422,423, 424, 425, 426, 427, 428, 429, 430, 431, 432, 433, 434,435, 436, 437, 438, 439, 444, 445, 446, 447, 448, 449: n = A,T,C or G
  misc_feature 450, 451, 452, 453, 454, 455, 456, 457, 458, 459, 460, 461,462, 463, 464, 465, 466, 467, 468, 469, 470, 471, 472, 473,474, 475, 476, 477, 478, 479, 480, 481, 482, 483, 484, 485,486, 487, 488, 489, 490, 491, 492, 493, 494, 495, 496: n = A,T,C or G
  misc_feature 497, 498, 499, 500, 501, 502, 503, 504, 505, 506, 507, 508,509, 510, 511, 512, 513, 514, 515, 516, 517, 518, 519, 520,521, 522, 523, 558, 559, 560, 561, 562, 563, 564, 565, 566,567, 568, 569, 570, 571, 572, 573, 574, 575, 576, 577: n = A,T,C or G
  misc_feature 578, 579, 580, 581, 598, 601: n = A,T,C or G

SEQ ID NO: 8594 - DNA, 590 bp, Homo sapiens; identical to SEQ ID NO: 2254
  misc_feature 15, 16, 32, 39, 41, 42, 43, 44, 68, 211, 213, 214, 218, 221,244, 255, 256, 262, 439, 455, 457, 463, 485, 505, 512, 513,518, 520, 521, 529, 530, 536, 540, 541, 542, 546, 556, 574,575, 576, 588: n = A,T,C or G

SEQ ID NO: 8595 - DNA, 252 bp, Homo sapiens; identical to SEQ ID NO: 2255

SEQ ID NO: 8596 - DNA, 647 bp, Homo sapiens; identical to SEQ ID NO: 2256
  misc_feature 321, 327, 343, 346, 360, 365, 388, 395, 403, 478, 502, 520,526, 567, 571, 581, 605, 607, 608, 611, 630: n = A,T,C or G

SEQ ID NO: 8597 - DNA, 399 bp, Homo sapiens; identical to SEQ ID NO: 2257
  misc_feature 219, 260, 269, 270, 276, 281, 287, 291, 293, 294, 312, 313,316, 341, 342, 343, 352, 353, 358, 371, 379, 380, 391: n = A,T,C or G

SEQ ID NO: 8598 - DNA, 250 bp, Homo sapiens; identical to SEQ ID NO: 2258
  misc_feature 16, 213: n = A,T,C or G

SEQ ID NO: 8599 - DNA, 161 bp, Homo sapiens; identical to SEQ ID NO: 2259
  misc_feature 14, 86: n = A,T,C or G

SEQ ID NO: 8600 - DNA, 349 bp, Homo sapiens; identical to SEQ ID NO: 2260

SEQ ID NO: 8601 - DNA, 372 bp, Homo sapiens; identical to SEQ ID NO: 2261
  misc_feature 31, 33, 37, 40, 42, 219, 257, 270, 352, 362: n = A,T,C or G

SEQ ID NO: 8602 - DNA, 198 bp, Homo sapiens; identical to SEQ ID NO: 2262
  misc_feature 79, 101, 111, 136, 162, 164, 167, 168, 175, 180, 184, 186,188: n = A,T,C or G

SEQ ID NO: 8603 - DNA, 246 bp, Homo sapiens; identical to SEQ ID NO: 2263
  misc_feature 204: n = A,T,C or G

SEQ ID NO: 8604 - DNA, 232 bp, Homo sapiens; identical to SEQ ID NO: 2264
  misc_feature 206: n = A,T,C or G

SEQ ID NO: 8605 - DNA, 309 bp, Homo sapiens; identical to SEQ ID NO: 2265
  misc_feature 56, 69, 97, 104, 105, 122, 148, 163, 177, 196, 210, 277,279, 290: n = A,T,C or G

SEQ ID NO: 8606 - DNA, 129 bp, Homo sapiens; identical to SEQ ID NO: 2266
  misc_feature 69, 70, 77, 99, 109, 119: n = A,T,C or G

SEQ ID NO: 8607 - DNA, 324 bp, Homo sapiens; identical to SEQ ID NO: 2267
  misc_feature 180, 221, 234, 242, 245, 258, 263, 283, 287, 302: n = A,T,C or G

SEQ ID NO: 8608 - DNA, 116 bp, Homo sapiens; identical to SEQ ID NO: 2268
  misc_feature 95: n = A,T,C or G

SEQ ID NO: 8609 - DNA, 406 bp, Homo sapiens; identical to SEQ ID NO: 2269
  misc_feature 75, 76, 77, 78, 79, 80, 81, 82, 83, 84, 85, 86, 87, 88, 89,90, 91, 92, 93, 94, 95, 96, 97, 98, 188, 210, 212, 277,291, 358, 374, 385: n = A,T,C or G

SEQ ID NO: 8610 - DNA, 274 bp, Homo sapiens; identical to SEQ ID NO: 2270
  misc_feature 25, 103, 171, 271, 274: n = A,T,C or G

SEQ ID NO: 8611 - DNA, 530 bp, Homo sapiens; identical to SEQ ID NO: 2271
  misc_feature 2: n = A,T,C or G

SEQ ID NO: 8612 - DNA, 606 bp, Homo sapiens; identical to SEQ ID NO: 2272
  misc_feature 71, 76, 77, 93, 103, 146, 213, 264, 297, 303, 311, 331, 333,355, 358, 388, 421, 424, 564, 599: n = A,T,C or G

SEQ ID NO: 8613 - DNA, 210 bp, Homo sapiens; identical to SEQ ID NO: 2273
  misc_feature 144, 168, 172, 174, 176, 184, 188, 207: n = A,T,C or G

SEQ ID NO: 8614 - DNA, 394 bp, Homo sapiens; identical to SEQ ID NO: 2274

SEQ ID NO: 8615 - DNA, 219 bp, Homo sapiens; identical to SEQ ID NO: 2275

SEQ ID NO: 8616 - DNA, 400 bp, Homo sapiens; identical to SEQ ID NO: 2276

SEQ ID NO: 8617 - DNA, 141 bp, Homo sapiens; identical to SEQ ID NO: 2277
  misc_feature 139: n = A,T,C or G

SEQ ID NO: 8618 - DNA, 562 bp, Homo sapiens; identical to SEQ ID NO: 2278
  misc_feature 2, 24, 36, 82, 96, 168, 216, 237, 240, 269, 304, 331, 334,455, 467, 468, 516, 550: n = A,T,C or G

SEQ ID NO: 8619 - DNA, 425 bp, Homo sapiens; identical to SEQ ID NO: 2279
  misc_feature 1, 4, 298: n = A,T,C or G

SEQ ID NO: 8620 - DNA, 503 bp, Homo sapiens; identical to SEQ ID NO: 2280

SEQ ID NO: 8621 - DNA, 375 bp, Homo sapiens; identical to SEQ ID NO: 2281

SEQ ID NO: 8622 - DNA, 359 bp, Homo sapiens; identical to SEQ ID NO: 2282
  misc_feature 15, 108, 186, 192, 198, 199, 245, 263, 272, 276, 296, 321,329, 337, 338, 339: n = A,T,C or G

SEQ ID NO: 8623 - DNA, 402 bp, Homo sapiens; identical to SEQ ID NO: 2283

SEQ ID NO: 8624 - DNA, 259 bp, Homo sapiens; identical to SEQ ID NO: 2284
  misc_feature 250: n = A,T,C or G

SEQ ID NO: 8625 - DNA, 188 bp, Homo sapiens; identical to SEQ ID NO: 2285
  misc_feature 129: n = A,T,C or G

SEQ ID NO: 8626 - DNA, 200 bp, Homo sapiens; identical to SEQ ID NO: 2286
  misc_feature 19, 71: n = A,T,C or G

SEQ ID NO: 8627 - DNA, 200 bp, Homo sapiens; identical to SEQ ID NO: 2287

SEQ ID NO: 8628 - DNA, 191 bp, Homo sapiens; identical to SEQ ID NO: 2288
  misc_feature 40, 54, 60, 63, 74, 80, 92, 125, 128, 177: n = A,T,C or G

SEQ ID NO: 8629 - DNA, 314 bp, Homo sapiens; identical to SEQ ID NO: 2289
  misc_feature 89, 163, 224: n = A,T,C or G

SEQ ID NO: 8630 - DNA, 337 bp, Homo sapiens; identical to SEQ ID NO: 2290

SEQ ID NO: 8631 - DNA, 122 bp, Homo sapiens; identical to SEQ ID NO: 2291

SEQ ID NO: 8632 - DNA, 151 bp, Homo sapiens; identical to SEQ ID NO: 2292

SEQ ID NO: 8633 - DNA, 544 bp, Homo sapiens; identical to SEQ ID NO: 2293

SEQ ID NO: 8634 - DNA, 450 bp, Homo sapiens; identical to SEQ ID NO: 2294

SEQ ID NO: 8635 - DNA, 542 bp, Homo sapiens; identical to SEQ ID NO: 2295

SEQ ID NO: 8636 - DNA, 472 bp, Homo sapiens; identical to SEQ ID NO: 2296

SEQ ID NO: 8637 - DNA, 384 bp, Homo sapiens; identical to SEQ ID NO: 2297

SEQ ID NO: 8638 - DNA, 472 bp, Homo sapiens; identical to SEQ ID NO: 2298
  misc_feature 379, 450, 456, 461, 462: n = A,T,C or G

SEQ ID NO: 8639 - DNA, 130 bp, Homo sapiens; identical to SEQ ID NO: 2299

SEQ ID NO: 8640 - DNA, 452 bp, Homo sapiens; identical to SEQ ID NO: 2300
  misc_feature 242, 426: n = A,T,C or G

SEQ ID NO: 8641 - DNA, 324 bp, Homo sapiens; identical to SEQ ID NO: 2301
  misc_feature 165, 192, 193: n = A,T,C or G

SEQ ID NO: 8642 - DNA, 408 bp, Homo sapiens; identical to SEQ ID NO: 2302
  misc_feature 87, 92, 100, 105, 112, 131, 160, 184, 193, 203, 218, 224,253, 258, 288, 297, 300, 306, 328, 337, 343, 345, 356, 362,363, 367, 396, 404: n = A,T,C or G

SEQ ID NO: 8643 - DNA, 190 bp, Homo sapiens; identical to SEQ ID NO: 2303
  misc_feature 37, 38, 40, 42, 52, 55, 61, 64, 70, 104, 111, 112, 117, 123,128, 132, 141, 152, 156, 159, 170, 172, 179, 182: n = A,T,C or G

SEQ ID NO: 8644 - DNA, 222 bp, Homo sapiens; identical to SEQ ID NO: 2304

SEQ ID NO: 8645 - DNA, 250 bp, Homo sapiens; identical to SEQ ID NO: 2305
  misc_feature 83: n = A,T,C or G

SEQ ID NO: 8646 - DNA, 262 bp, Homo sapiens; identical to SEQ ID NO: 2306

SEQ ID NO: 8647 - DNA, 159 bp, Homo sapiens; identical to SEQ ID NO: 2308

SEQ ID NO: 8648 - DNA, 208 bp, Homo sapiens; identical to SEQ ID NO: 2309
  misc_feature 3: n = A,T,C or G

SEQ ID NO: 8649 - DNA, 511 bp, Homo sapiens; identical to SEQ ID NO: 2310
  misc_feature 327, 328, 330, 331, 332, 333, 334, 335, 336, 344, 346, 348,355, 364, 377, 391, 400, 401, 418, 425, 434, 450, 460, 471,474, 485, 495, 499: n = A,T,C or G

SEQ ID NO: 8650 - DNA, 191 bp, Homo sapiens; identical to SEQ ID NO: 2311
  misc_feature 56, 93, 139: n = A,T,C or G

SEQ ID NO: 8651 - DNA, 404 bp, Homo sapiens; identical to SEQ ID NO: 2312

SEQ ID NO: 8652 - DNA, 502 bp, Homo sapiens; identical to SEQ ID NO: 2313

SEQ ID NO: 8653 - DNA, 310 bp, Homo sapiens; identical to SEQ ID NO: 2314
  misc_feature 46, 174, 233, 258, 260, 262, 289: n = A,T,C or G

SEQ ID NO: 8654 - DNA, 149 bp, Homo sapiens; identical to SEQ ID NO: 2315

SEQ ID NO: 8655 - DNA, 149 bp, Homo sapiens; identical to SEQ ID NO: 2316
  misc_feature 109, 110: n = A,T,C or G

SEQ ID NO: 8656 - DNA, 141 bp, Homo sapiens; identical to SEQ ID NO: 2317
  misc_feature 32, 45, 108, 111, 129: n = A,T,C or G

SEQ ID NO: 8657 - DNA, 190 bp, Homo sapiens; identical to SEQ ID NO: 2318
  misc_feature 45, 46, 75, 97, 106, 137, 144: n = A,T,C or G

SEQ ID NO: 8658 - DNA, 375 bp, Homo sapiens; identical to SEQ ID NO: 2319
  misc_feature 168, 343: n = A,T,C or G

SEQ ID NO: 8659 - DNA, 208 bp, Homo sapiens; identical to SEQ ID NO: 2320
  misc_feature 115, 117, 163: n = A,T,C or G

SEQ ID NO: 8660 - DNA, 264 bp, Homo sapiens; identical to SEQ ID NO: 2321
  misc_feature 43, 81, 116, 117, 118, 229: n = A,T,C or G

SEQ ID NO: 8661 - DNA, 495 bp, Homo sapiens; identical to SEQ ID NO: 2322
  misc_feature 404, 429, 430, 431, 432, 433, 434, 435, 436, 437, 438, 439,440, 441, 442, 443, 444, 445, 446, 447, 448, 449, 450, 451,452, 453, 454: n = A,T,C or G

SEQ ID NO: 8662 - DNA, 264 bp, Homo sapiens; identical to SEQ ID NO: 2323
  misc_feature 111: n = A,T,C or G

SEQ ID NO: 8663 - DNA, 227 bp, Homo sapiens; identical to SEQ ID NO: 2324

SEQ ID NO: 8664 - DNA, 210 bp, Homo sapiens; identical to SEQ ID NO: 2325
  misc_feature 45: n = A,T,C or G

SEQ ID NO: 8665 - DNA, 373 bp, Homo sapiens; identical to SEQ ID NO: 2326
  misc_feature 107: n = A,T,C or G

SEQ ID NO: 8666 - DNA, 174 bp, Homo sapiens; identical to SEQ ID NO: 2327

SEQ ID NO: 8667 - DNA, 691 bp, Homo sapiens; identical to SEQ ID NO: 2328
  misc_feature 84, 98, 108, 113, 114, 224, 285, 299, 308, 313, 317, 328,329, 347, 363, 383, 388, 393, 401, 405, 421, 442, 448, 455,465, 469, 470, 475, 477, 482, 484, 487, 489, 499, 502, 503,504, 514, 524, 528, 531, 532, 536, 573, 582, 593, 594: n = A,T,C or G
  misc_feature 606, 607, 608, 611, 612, 613, 619, 620, 625, 626, 628, 631,639, 642, 651, 652, 668, 669, 679: n = A,T,C or G

SEQ ID NO: 8668 - DNA, 209 bp, Homo sapiens; identical to SEQ ID NO: 2329

SEQ ID NO: 8669 - DNA, 514 bp, Homo sapiens; identical to SEQ ID NO: 2330
  misc_feature 478: n = A,T,C or G

SEQ ID NO: 8670 - DNA, 138 bp, Homo sapiens; identical to SEQ ID NO: 2331

SEQ ID NO: 8671 - DNA, 267 bp, Homo sapiens; identical to SEQ ID NO: 2332

SEQ ID NO: 8672 - DNA, 107 bp, Homo sapiens; identical to SEQ ID NO: 2333

SEQ ID NO: 8673 - DNA, 457 bp, Homo sapiens; identical to SEQ ID NO: 2334
  misc_feature 113, 429, 434: n = A,T,C or G

SEQ ID NO: 8674 - DNA, 173 bp, Homo sapiens; identical to SEQ ID NO: 2335
  misc_feature 37, 38, 39, 46, 70, 101, 107, 114, 127, 153: n = A,T,C or G

SEQ ID NO: 8675 - DNA, 411 bp, Homo sapiens; identical to SEQ ID NO: 2336
  misc_feature 2, 5, 6, 47: n = A,T,C or G

SEQ ID NO: 8676 - DNA, 291 bp, Homo sapiens; identical to SEQ ID NO: 2337
  misc_feature 112, 119, 120: n = A,T,C or G

SEQ ID NO: 8677 - DNA, 239 bp, Homo sapiens; identical to SEQ ID NO: 2338
  misc_feature 100, 124, 129, 163: n = A,T,C or G

SEQ ID NO: 8678 - DNA, 369 bp, Homo sapiens; identical to SEQ ID NO: 2339
  misc_feature 265, 270, 295, 303, 324, 341: n = A,T,C or G

SEQ ID NO: 8679 - DNA, 410 bp, Homo sapiens; identical to SEQ ID NO: 2340

SEQ ID NO: 8680 - DNA, 455 bp, Homo sapiens; identical to SEQ ID NO: 2341
  misc_feature 350: n = A,T,C or G

SEQ ID NO: 8681 - DNA, 135 bp, Homo sapiens; identical to SEQ ID NO: 2342

SEQ ID NO: 8682 - DNA, 404 bp, Homo sapiens; identical to SEQ ID NO: 2343
  misc_feature 299: n = A,T,C or G

SEQ ID NO: 8683 - DNA, 276 bp, Homo sapiens; identical to SEQ ID NO: 2344
  misc_feature 18, 19, 67, 69, 70, 71, 88, 90, 92, 101, 102, 105, 107, 109,110, 127, 128, 130, 133, 140, 149, 150, 155, 173, 175, 186,201, 207, 227, 231, 249, 252, 265, 276: n = A,T,C or G

SEQ ID NO: 8684 - DNA, 284 bp, Homo sapiens; identical to SEQ ID NO: 2345

SEQ ID NO: 8685 - DNA, 280 bp, Homo sapiens; identical to SEQ ID NO: 2346

SEQ ID NO: 8686 - DNA, 461 bp, Homo sapiens; identical to SEQ ID NO: 2347
  misc_feature 30, 177, 225, 288, 360, 428: n = A,T,C or G

SEQ ID NO: 8687 - DNA, 516 bp, Homo sapiens; identical to SEQ ID NO: 2348
  misc_feature 264, 364, 401: n = A,T,C or G

SEQ ID NO: 8688 - DNA, 272 bp, Homo sapiens; identical to SEQ ID NO: 2349
  misc_feature 63, 101, 128: n = A,T,C or G

SEQ ID NO: 8689 - DNA, 350 bp, Homo sapiens; identical to SEQ ID NO: 2350

SEQ ID NO: 8690 - DNA, 233 bp, Homo sapiens; identical to SEQ ID NO: 2351
  misc_feature 166, 233: n = A,T,C or G

SEQ ID NO: 8691 - DNA, 485 bp, Homo sapiens; identical to SEQ ID NO: 2353
  misc_feature 4, 59, 411: n = A,T,C or G

SEQ ID NO: 8692 - DNA, 531 bp, Homo sapiens; identical to SEQ ID NO: 2354
  misc_feature 33, 269, 274, 312, 315, 378, 381, 406, 432, 459, 464, 471,490, 491, 492, 493, 495, 501: n = A,T,C or G

SEQ ID NO: 8693 - DNA, 199 bp, Homo sapiens; identical to SEQ ID NO: 2355

SEQ ID NO: 8694 - DNA, 469 bp, Homo sapiens; identical to SEQ ID NO: 2356
  misc_feature 393, 452: n = A,T,C or G

SEQ ID NO: 8695 - DNA, 282 bp, Homo sapiens; identical to SEQ ID NO: 2357

SEQ ID NO: 8696 - DNA, 491 bp, Homo sapiens; identical to SEQ ID NO: 2358
  misc_feature 390: n = A,T,C or G

SEQ ID NO: 8697 - DNA, 453 bp, Homo sapiens; identical to SEQ ID NO: 2359
  misc_feature 438: n = A,T,C or G

SEQ ID NO: 8698 - DNA, 360 bp, Homo sapiens; identical to SEQ ID NO: 2360
  misc_feature 161, 223: n = A,T,C or G

SEQ ID NO: 8699 - DNA, 720 bp, Homo sapiens; identical to SEQ ID NO: 2361
  misc_feature 529, 535, 563, 573, 584, 585, 586, 589, 590, 596, 597, 614,633, 638, 646, 647, 649, 654, 657, 662, 663, 668, 672, 676,699, 705: n = A,T,C or G

SEQ ID NO: 8700 - DNA, 636 bp, Homo sapiens; identical to SEQ ID NO: 2362
  misc_feature 505, 545, 552, 558, 563, 585, 604, 608, 620, 628: n = A,T,C or G

SEQ ID NO: 8701 - DNA, 805 bp, Homo sapiens; identical to SEQ ID NO: 2363
  misc_feature 42, 158, 159, 168, 172, 175, 188, 189, 193, 199, 202, 203,208, 209, 213, 216, 229, 234, 235, 236, 237, 239, 240, 250,251, 254, 269, 270, 273, 274, 276, 277, 284, 288, 290, 314,324, 325, 326, 333, 334, 335, 336, 337, 340, 342, 343: n = A,T,C or G
  misc_feature 354, 355, 356, 357, 361, 376, 377, 403, 404, 434, 435, 438,439, 445, 455, 461, 468, 484, 487, 491, 503, 504, 505, 506,507, 523, 524, 525, 527, 534, 536, 537, 543, 574, 586, 630,632, 633, 634, 635, 663, 665, 675, 677, 680, 682, 696: n = A,T,C or G
  misc_feature 707, 722, 723, 734, 737, 745, 748, 759, 765, 776, 782, 794,797: n = A,T,C or G

SEQ ID NO: 8702 - DNA, 331 bp, Homo sapiens; identical to SEQ ID NO: 2364

SEQ ID NO: 8703 - DNA, 128 bp, Homo sapiens; identical to SEQ ID NO: 2365
  misc_feature 106, 112, 113, 119, 122, 127: n = A,T,C or G

SEQ ID NO: 8704 - DNA, 627 bp, Homo sapiens; identical to SEQ ID NO: 2366
  misc_feature 607: n = A,T,C or G

SEQ ID NO: 8705 - DNA, 212 bp, Homo sapiens; identical to SEQ ID NO: 2367
  misc_feature 188: n = A,T,C or G

SEQ ID NO: 8706 - DNA, 109 bp, Homo sapiens; identical to SEQ ID NO: 2368

SEQ ID NO: 8707 - DNA, 191 bp, Homo sapiens; identical to SEQ ID NO: 2369

SEQ ID NO: 8708 - DNA, 150 bp, Homo sapiens; identical to SEQ ID NO: 2370

SEQ ID NO: 8709 - DNA, 109 bp, Homo sapiens; identical to SEQ ID NO: 2371
  misc_feature 46, 54, 67, 81: n = A,T,C or G

SEQ ID NO: 8710 - DNA, 547 bp, Homo sapiens; identical to SEQ ID NO: 2372

SEQ ID NO: 8711 - DNA, 304 bp, Homo sapiens; identical to SEQ ID NO: 2373

SEQ ID NO: 8712 - DNA, 752 bp, Homo sapiens; identical to SEQ ID NO: 2374
  misc_feature 88, 97, 99, 151, 165, 215, 221, 272, 279, 280, 283, 286,380, 421, 430, 466, 467, 474, 486, 489, 518, 527, 548, 552,556, 563, 570, 581, 637, 672, 673, 674, 704, 710, 716, 731,737, 738, 740: n = A,T,C or G

SEQ ID NO: 8713 - DNA, 714 bp, Homo sapiens; identical to SEQ ID NO: 2375
  misc_feature 581, 651, 699: n = A,T,C or G

SEQ ID NO: 8714 - DNA, 532 bp, Homo sapiens; identical to SEQ ID NO: 2376
  misc_feature 259, 260, 295, 307, 311, 324, 330, 331, 335, 341, 347, 352,358, 366, 368, 374, 401, 424, 438, 458, 459, 467, 468, 475,476, 478, 490, 492, 494, 502, 510, 511, 514, 521, 532: n = A,T,C or G

SEQ ID NO: 8715 - DNA, 233 bp, Homo sapiens; identical to SEQ ID NO: 2377
  misc_feature 15, 205, 210: n = A,T,C or G

SEQ ID NO: 8716 - DNA, 523 bp, Homo sapiens; identical to SEQ ID NO: 2378
  misc_feature 77, 86, 167, 201, 208, 219, 230, 247, 333, 364, 374, 378,386, 389, 393, 424, 433, 445, 451: n = A,T,C or G

SEQ ID NO: 8717 - DNA, 321 bp, Homo sapiens; identical to SEQ ID NO: 2379

SEQ ID NO: 8718 - DNA, 135 bp, Homo sapiens; identical to SEQ ID NO: 2380
  misc_feature 68, 98, 100, 114, 117: n = A,T,C or G

SEQ ID NO: 8719 - DNA, 315 bp, Homo sapiens; identical to SEQ ID NO: 2381
  misc_feature 24, 34, 39, 46, 47, 48, 49, 53, 57, 64, 65, 72, 73, 74, 75,76, 93, 94, 95, 96, 97, 98, 102, 103, 112, 157, 214, 287: n = A,T,C or G

SEQ ID NO: 8720 - DNA, 355 bp, Homo sapiens; identical to SEQ ID NO: 2383

SEQ ID NO: 8721 - DNA, 356 bp, Homo sapiens; identical to SEQ ID NO: 2384

SEQ ID NO: 8722 - DNA, 216 bp, Homo sapiens; identical to SEQ ID NO: 2385

SEQ ID NO: 8723 - DNA, 278 bp, Homo sapiens; identical to SEQ ID NO: 2386
  misc_feature 228: n = A,T,C or G

SEQ ID NO: 8724 - DNA, 196 bp, Homo sapiens; identical to SEQ ID NO: 2387

SEQ ID NO: 8725 - DNA, 250 bp, Homo sapiens; identical to SEQ ID NO: 2388

SEQ ID NO: 8726 - DNA, 380 bp, Homo sapiens; identical to SEQ ID NO: 2389

SEQ ID NO: 8727 - DNA, 323 bp, Homo sapiens; identical to SEQ ID NO: 2390
  misc_feature 219, 271: n = A,T,C or G

SEQ ID NO: 8728 - DNA, 351 bp, Homo sapiens; identical to SEQ ID NO: 2391
  misc_feature 107, 149, 226, 301: n = A,T,C or G

SEQ ID NO: 8729 - DNA, 115 bp, Homo sapiens; identical to SEQ ID NO: 2392
  misc_feature 75, 81, 100: n = A,T,C or G

SEQ ID NO: 8730 - DNA, 163 bp, Homo sapiens; identical to SEQ ID NO: 2393
  misc_feature 14, 22, 70, 71, 74, 141, 145, 150, 151: n = A,T,C or G

SEQ ID NO: 8731 - DNA, 149 bp, Homo sapiens; identical to SEQ ID NO: 2394

SEQ ID NO: 8732 - DNA, 343 bp, Homo sapiens; identical to SEQ ID NO: 2395

SEQ ID NO: 8733 - DNA, 150 bp, Homo sapiens; identical to SEQ ID NO: 2396
  misc_feature 140, 148: n = A,T,C or G

SEQ ID NO: 8734 - DNA, 259 bp, Homo sapiens; identical to SEQ ID NO: 2397
  misc_feature 24, 32, 74, 85, 128, 176, 182, 186, 193, 210, 221, 225, 232,240: n = A,T,C or G

SEQ ID NO: 8735 - DNA, 160 bp, Homo sapiens; identical to SEQ ID NO: 2398
  misc_feature 42, 88, 135, 136, 142, 148: n = A,T,C or G

SEQ ID NO: 8736 - DNA, 259 bp, Homo sapiens; identical to SEQ ID NO: 2399

SEQ ID NO: 8737 - DNA, 167 bp, Homo sapiens; identical to SEQ ID NO: 2400

SEQ ID NO: 8738 - DNA, 127 bp, Homo sapiens; identical to SEQ ID NO: 2401
  misc_feature 42, 103: n = A,T,C or G

SEQ ID NO: 8739 - DNA, 153 bp, Homo sapiens; identical to SEQ ID NO: 2402
  misc_feature 30, 31, 32, 34, 72, 127, 137: n = A,T,C or G

SEQ ID NO: 8740 - DNA, 319 bp, Homo sapiens; identical to SEQ ID NO: 2403
  misc_feature 128, 147, 159, 172, 217, 231, 276, 293, 303: n = A,T,C or G

SEQ ID NO: 8741 - DNA, 218 bp, Homo sapiens; identical to SEQ ID NO: 2404
  misc_feature 1, 25, 26, 33, 37, 39, 42, 45, 47, 50, 56, 62, 66, 67, 68,69, 81, 96, 97, 98, 100, 102, 106, 111, 113, 115, 116, 117,128, 130, 132, 134, 138, 139, 140, 141, 146, 160, 169, 170,171, 172, 198, 206, 207: n = A,T,C or G

SEQ ID NO: 8742 - DNA, 379 bp, Homo sapiens; identical to SEQ ID NO: 2405
  misc_feature 3, 221, 222, 223, 252, 305, 309, 359, 366: n = A,T,C or G

SEQ ID NO: 8743 - DNA, 126 bp, Homo sapiens; identical to SEQ ID NO: 2406
  misc_feature 95, 97, 99: n = A,T,C or G

SEQ ID NO: 8744 - DNA, 265 bp, Homo sapiens; identical to SEQ ID NO: 2407
  misc_feature 37, 48, 69, 94, 99, 106, 113, 119, 128, 143, 168, 176, 187,188, 189, 190, 191, 192, 193, 194, 195, 196, 197, 198, 199,200, 201, 202, 203, 204, 205, 206, 207, 208, 209, 210, 213,244: n = A,T,C or G

SEQ ID NO: 8745 - DNA, 316 bp, Homo sapiens; identical to SEQ ID NO: 2408
  misc_feature 230, 247, 271: n = A,T,C or G

SEQ ID NO: 8746 - DNA, 325 bp, Homo sapiens; identical to SEQ ID NO: 2409

SEQ ID NO: 8747 - DNA, 234 bp, Homo sapiens; identical to SEQ ID NO: 2410
  misc_feature 33, 36, 67, 74, 122, 144, 191, 200: n = A,T,C or G

SEQ ID NO: 8748 - DNA, 328 bp, Homo sapiens; identical to SEQ ID NO: 2411
  misc_feature 205, 228, 230, 309, 314: n = A,T,C or G

SEQ ID NO: 8749 - DNA, 178 bp, Homo sapiens; identical to SEQ ID NO: 2412
  misc_feature 109, 146, 172: n = A,T,C or G

SEQ ID NO: 8750 - DNA, 369 bp, Homo sapiens; identical to SEQ ID NO: 2413
  misc_feature 1, 163, 172, 312: n = A,T,C or G

SEQ ID NO: 8751 - DNA, 189 bp, Homo sapiens; identical to SEQ ID NO: 2414
  misc_feature 175: n = A,T,C or G

SEQ ID NO: 8752 - DNA, 122 bp, Homo sapiens; identical to SEQ ID NO: 2415
  misc_feature 102, 107: n = A,T,C or G

SEQ ID NO: 8753 - DNA, 286 bp, Homo sapiens; identical to SEQ ID NO: 2416
  misc_feature 2, 22, 57, 68, 110: n = A,T,C or G

SEQ ID NO: 8754 - DNA, 341 bp, Homo sapiens; identical to SEQ ID NO: 2417
  misc_feature 223, 339: n = A,T,C or G

SEQ ID NO: 8755 - DNA, 330 bp, Homo sapiens; identical to SEQ ID NO: 2418
  misc_feature 62, 123, 197, 266, 279, 314: n = A,T,C or G

SEQ ID NO: 8756 - DNA, 315 bp, Homo sapiens; identical to SEQ ID NO: 2419
  misc_feature 132, 144, 170, 174, 242: n = A,T,C or G

SEQ ID NO: 8757 - DNA, 321 bp, Homo sapiens; identical to SEQ ID NO: 2420
  misc_feature 63, 72, 173, 240: n = A,T,C or G

SEQ ID NO: 8758 - DNA, 223 bp, Homo sapiens; identical to SEQ ID NO: 2421
  misc_feature 72, 80, 90, 150, 194: n = A,T,C or G

SEQ ID NO: 8759 - DNA, 281 bp, Homo sapiens; identical to SEQ ID NO: 2422
  misc_feature 14, 87, 238: n = A,T,C or G

SEQ ID NO: 8760 - DNA, 267 bp, Homo sapiens; identical to SEQ ID NO: 2423

SEQ ID NO: 8761 - DNA, 344 bp, Homo sapiens; identical to SEQ ID NO: 2424

SEQ ID NO: 8762 - DNA, 309 bp, Homo sapiens; identical to SEQ ID NO: 2425

SEQ ID NO: 8763 - DNA, 338 bp, Homo sapiens; identical to SEQ ID NO: 2426
  misc_feature 258: n = A,T,C or G

SEQ ID NO: 8764 - DNA, 126 bp, Homo sapiens; identical to SEQ ID NO: 2427

SEQ ID NO: 8765 - DNA, 137 bp, Homo sapiens; identical to SEQ ID NO: 2428

SEQ ID NO: 8766 - DNA, 277 bp, Homo sapiens; identical to SEQ ID NO: 2429

SEQ ID NO: 8767 - DNA, 168 bp, Homo sapiens; identical to SEQ ID NO: 2430
  misc_feature 131: n = A,T,C or G

SEQ ID NO: 8768 - DNA, 240 bp, Homo sapiens; identical to SEQ ID NO: 2431

SEQ ID NO: 8769 - DNA, 415 bp, Homo sapiens; identical to SEQ ID NO: 2432
  misc_feature 3, 347, 363, 374, 396, 408: n = A,T,C or G

SEQ ID NO: 8770 - DNA, 163 bp, Homo sapiens; identical to SEQ ID NO: 2433
  misc_feature 119, 121, 124, 129, 143, 144: n = A,T,C or G

SEQ ID NO: 8771 - DNA, 472 bp, Homo sapiens; identical to SEQ ID NO: 2434

SEQ ID NO: 8772 - DNA, 607 bp, Homo sapiens; identical to SEQ ID NO: 2435
  misc_feature 200, 216, 224, 247, 256, 268, 293, 294, 296, 301, 304, 310,330, 332, 333, 335, 349, 350, 351, 354, 357, 358, 360, 364,366, 371, 373, 379, 381, 383, 384, 390, 404, 408, 414, 417,419, 420, 422, 459, 461, 463, 464, 501, 502, 504, 509: n = A,T,C or G
  misc_feature 510, 516, 520, 528, 529, 531, 533, 541, 542, 549, 560, 563,564, 576, 578, 579, 588, 590: n = A,T,C or G

SEQ ID NO: 8773 - DNA, 136 bp, Homo sapiens; identical to SEQ ID NO: 2436
  misc_feature 3: n = A,T,C or G

SEQ ID NO: 8774 - DNA, 419 bp, Homo sapiens; identical to SEQ ID NO: 2437
  misc_feature 2: n = A,T,C or G

SEQ ID NO: 8775 - DNA, 320 bp, Homo sapiens; identical to SEQ ID NO: 2438
  misc_feature 12, 226, 302, 313: n = A,T,C or G

SEQ ID NO: 8776 - DNA, 193 bp, Homo sapiens; identical to SEQ ID NO: 2439

SEQ ID NO: 8777 - DNA, 177 bp, Homo sapiens; identical to SEQ ID NO: 2440
  misc_feature 2: n = A,T,C or G

SEQ ID NO: 8778 - DNA, 161 bp, Homo sapiens; identical to SEQ ID NO: 2441
  misc_feature 11: n = A,T,C or G

SEQ ID NO: 8779 - DNA, 354 bp, Homo sapiens; identical to SEQ ID NO: 2442
  misc_feature 352: n = A,T,C or G

SEQ ID NO: 8780 - DNA, 425 bp, Homo sapiens; identical to SEQ ID NO: 2443
  misc_feature 3, 245, 246, 247, 294, 306, 314, 316, 323, 327, 328, 329,350, 360, 372, 389, 391, 400, 402, 417: n = A,T,C or G

SEQ ID NO: 8781 - DNA, 479 bp, Homo sapiens; identical to SEQ ID NO: 2444
  misc_feature 245, 263, 265, 272, 283, 288, 323, 337, 344, 356, 357, 358,363, 373, 383, 395, 398, 400, 401, 423, 426, 436, 445, 453,454, 455, 456, 468: n = A,T,C or G

SEQ ID NO: 8782 - DNA, 556 bp, Homo sapiens; identical to SEQ ID NO: 2445
  misc_feature 197, 198, 215, 218, 223, 229, 230, 235, 240, 249, 250, 251,273, 274, 279, 280, 282, 288, 293, 294, 295, 300, 302, 309,310, 311, 318, 319, 321, 337, 339, 340, 342, 355, 362, 364,365, 366, 367, 369, 374, 380, 389, 395, 399, 415, 425: n = A,T,C or G
  misc_feature 426, 427, 434, 435, 436, 443, 445, 446, 447, 449, 455, 465,472, 475, 488, 489, 490, 492, 493, 495, 500, 501, 502, 508,509, 510, 522, 525, 531, 534, 535, 537: n = A,T,C or G

SEQ ID NO: 8783 - DNA, 456 bp, Homo sapiens; identical to SEQ ID NO: 2446

SEQ ID NO: 8784 - DNA, 470 bp, Homo sapiens; identical to SEQ ID NO: 2447
  misc_feature 1, 15, 281, 329, 367, 400, 405, 406, 412, 413, 417, 419,421, 422, 430, 435, 443, 445, 447, 448, 449, 455, 459, 469: n = A,T,C or G

SEQ ID NO: 8785 - DNA, 364 bp, Homo sapiens; identical to SEQ ID NO: 2448
  misc_feature 106, 338: n = A,T,C or G

SEQ ID NO: 8786 - DNA, 197 bp, Homo sapiens; identical to SEQ ID NO: 2449

SEQ ID NO: 8787 - DNA, 340 bp, Homo sapiens; identical to SEQ ID NO: 2450
  misc_feature 32, 103, 111, 112, 123, 128, 153, 183, 194, 208, 215, 219,226, 230, 233, 243, 256, 272, 300, 315, 325, 330, 337: n = A,T,C or G

SEQ ID NO: 8788 - DNA, 206 bp, Homo sapiens; identical to SEQ ID NO: 2451

SEQ ID NO: 8789 - DNA, 406 bp, Homo sapiens; identical to SEQ ID NO: 2452

SEQ ID NO: 8790 - DNA, 571 bp, Homo sapiens; identical to SEQ ID NO: 2453
  misc_feature 249, 262, 287, 312, 317, 325, 326, 340, 347, 353, 368, 371,383, 384, 388, 389, 392, 393, 398, 405, 410, 418, 419, 422,440, 445, 447, 458, 463, 467, 476, 477, 482, 495, 508, 509,511, 514, 518, 520, 522, 524, 527, 528, 544, 559, 571: n = A,T,C or G

SEQ ID NO: 8791 - DNA, 307 bp, Homo sapiens; identical to SEQ ID NO: 2454

SEQ ID NO: 8792 - DNA, 428 bp, Homo sapiens; identical to SEQ ID NO: 2455

SEQ ID NO: 8793 - DNA, 442 bp, Homo sapiens; identical to SEQ ID NO: 2456
  misc_feature 325, 331, 345, 353, 364, 378, 393, 394, 403, 412: n = A,T,C or G

SEQ ID NO: 8794 - DNA, 218 bp, Homo sapiens; identical to SEQ ID NO: 2457

SEQ ID NO: 8795 - DNA, 445 bp, Homo sapiens; identical to SEQ ID NO: 2458
  misc_feature 4: n = A,T,C or G

SEQ ID NO: 8796 - DNA, 186 bp, Homo sapiens; identical to SEQ ID NO: 2459

SEQ ID NO: 8797 - DNA, 412 bp, Homo sapiens; identical to SEQ ID NO: 2460
  misc_feature 26, 400: n = A,T,C or G

SEQ ID NO: 8798 - DNA, 167 bp, Homo sapiens; identical to SEQ ID NO: 2461
  misc_feature 84, 91, 141, 145, 158: n = A,T,C or G

SEQ ID NO: 8799 - DNA, 137 bp, Homo sapiens; identical to SEQ ID NO: 2462
  misc_feature 7, 115: n = A,T,C or G

SEQ ID NO: 8800 - DNA, 126 bp, Homo sapiens; identical to SEQ ID NO: 2463
  misc_feature 7: n = A,T,C or G

SEQ ID NO: 8801 - DNA, 376 bp, Homo sapiens; identical to SEQ ID NO: 2464
  misc_feature 31, 334, 353: n = A,T,C or G

SEQ ID NO: 8802 - DNA, 146 bp, Homo sapiens; identical to SEQ ID NO: 2465
  misc_feature 42, 55, 78, 81, 86, 93, 145, 146: n = A,T,C or G

SEQ ID NO: 8803 - DNA, 120 bp, Homo sapiens; identical to SEQ ID NO: 2466

SEQ ID NO: 8804 - DNA, 180 bp, Homo sapiens; identical to SEQ ID NO: 2467
  misc_feature 103, 149, 162: n = A,T,C or G

SEQ ID NO: 8805 - DNA, 193 bp, Homo sapiens; identical to SEQ ID NO: 2468
  misc_feature 153: n = A,T,C or G

SEQ ID NO: 8806 - DNA, 221 bp, Homo sapiens; identical to SEQ ID NO: 2469
  misc_feature 18, 19, 24, 26, 28, 134, 145: n = A,T,C or G

SEQ ID NO: 8807 - DNA, 522 bp, Homo sapiens; identical to SEQ ID NO: 2470
  misc_feature 30, 57, 58, 59, 60, 61, 62, 63, 64, 65, 66, 67, 68, 69, 70,71, 72, 73, 74, 75, 76, 77, 78, 79, 80, 81, 82, 83, 84,85, 86, 87, 88, 89, 90, 91, 92, 93, 94, 95, 96, 97, 98,99, 100, 101, 102, 103, 104, 105, 106, 107, 108, 109, 110: n = A,T,C or G
  misc_feature 111, 112, 113, 114, 115, 116, 117, 118, 119, 120, 121, 122,123, 124, 125, 126, 127, 128, 129, 130, 131, 132, 133, 134,135, 136, 137, 138, 139, 140, 141, 142, 143, 144, 145, 146,147, 148, 149, 150, 151, 152, 153, 154, 155, 156, 157: n = A,T,C or G
  misc_feature 158, 159, 160, 161, 162, 163, 164, 165, 166, 167, 168, 169,170, 171, 172, 173, 174, 175, 176, 177, 178, 179, 180, 181,182, 183, 184, 185, 186, 187, 188, 189, 190, 191, 192, 193,194, 195, 196, 197, 198, 199, 200, 201, 202, 203, 204: n = A,T,C or G
  misc_feature 209, 218, 240, 253, 254, 263, 264, 274, 277, 285, 287, 292,307, 315, 318, 321, 323, 324, 326, 330, 331, 340, 341, 343,344, 345, 347, 350, 353, 355, 356, 358, 378, 389, 390, 397,400, 403, 405, 411, 412, 414, 420, 426, 447, 456, 463: n = A,T,C or G
  misc_feature 464, 476, 477, 478, 485, 490, 498, 501, 505, 506, 508, 519: n = A,T,C or G

SEQ ID NO: 8808 - DNA, 374 bp, Homo sapiens; identical to SEQ ID NO: 2471
  misc_feature 24, 60, 189, 303, 305, 313, 318, 319, 321, 358, 360: n = A,T,C or G

SEQ ID NO: 8809 - DNA, 331 bp, Homo sapiens; identical to SEQ ID NO: 2472
  misc_feature 20, 24, 27, 45, 54, 56, 57, 60, 65, 70, 73, 75, 80, 81, 86,95, 105, 114, 116, 119, 120, 122, 123: n = A,T,C or G

SEQ ID NO: 8810 - DNA, 150 bp, Homo sapiens; identical to SEQ ID NO: 2473
  misc_feature 66, 73, 128: n = A,T,C or G

SEQ ID NO: 8811 - DNA, 384 bp, Homo sapiens; identical to SEQ ID NO: 2474
  misc_feature 355: n = A,T,C or G

SEQ ID NO: 8812 - DNA, 286 bp, Homo sapiens; identical to SEQ ID NO: 2475
  misc_feature 51, 52, 60, 63, 65, 171: n = A,T,C or G

SEQ ID NO: 8813 - DNA, 345 bp, Homo sapiens; identical to SEQ ID NO: 2476
  misc_feature 70, 260, 271: n = A,T,C or G

SEQ ID NO: 8814 - DNA, 292 bp, Homo sapiens; identical to SEQ ID NO: 2477
  misc_feature 16, 21, 25, 32, 35, 44, 47, 71, 80, 157, 251, 255: n = A,T,C or G

SEQ ID NO: 8815 - DNA, 303 bp, Homo sapiens; identical to SEQ ID NO: 2478
  misc_feature 62, 66, 67, 98, 114, 125, 154, 164, 173, 212, 244, 286, 289: n = A,T,C or G

SEQ ID NO: 8816 - DNA, 174 bp, Homo sapiens; identical to SEQ ID NO: 2479
  misc_feature 15, 148, 150: n = A,T,C or G

SEQ ID NO: 8817 - DNA, 148 bp, Homo sapiens; identical to SEQ ID NO: 2480
  misc_feature 25: n = A,T,C or G

SEQ ID NO: 8818 - DNA, 197 bp, Homo sapiens; identical to SEQ ID NO: 2481
  misc_feature 135, 149, 167: n = A,T,C or G

SEQ ID NO: 8819 - DNA, 200 bp, Homo sapiens; identical to SEQ ID NO: 2482
  misc_feature 4, 9, 12, 23, 24, 36, 38, 53, 66, 68, 92, 102, 104, 138,145, 159, 165, 166, 167, 181, 185, 197: n = A,T,C or G

SEQ ID NO: 8820 - DNA, 327 bp, Homo sapiens; identical to SEQ ID NO: 2483

SEQ ID NO: 8821 - DNA, 346 bp, Homo sapiens; identical to SEQ ID NO: 2484

SEQ ID NO: 8822 - DNA, 220 bp, Homo sapiens; identical to SEQ ID NO: 2485
  misc_feature 73, 75, 76, 77, 78, 79, 80, 82, 84, 89, 102, 131, 136, 139,143, 145, 179, 182, 183, 189: n = A,T,C or G

SEQ ID NO: 8823 - DNA, 160 bp, Homo sapiens; identical to SEQ ID NO: 2486
  misc_feature 25, 50, 57, 92, 99: n = A,T,C or G

SEQ ID NO: 8824 - DNA, 228 bp, Homo sapiens; identical to SEQ ID NO: 2487

SEQ ID NO: 8825 - DNA, 290 bp, Homo sapiens; identical to SEQ ID NO: 2488
  misc_feature 233: n = A,T,C or G

SEQ ID NO: 8826 - DNA, 468 bp, Homo sapiens; identical to SEQ ID NO: 2489
  misc_feature 45, 51, 85, 106, 110, 120, 127, 131, 153, 168, 197, 201,211, 219, 261, 288, 292, 293, 295, 299, 310, 313, 334, 383,402, 407, 408, 413, 429, 432, 453: n = A,T,C or G

SEQ ID NO: 8827 - DNA, 136 bp, Homo sapiens; identical to SEQ ID NO: 2490
  misc_feature 2, 80, 134: n = A,T,C or G

SEQ ID NO: 8828 - DNA, 358 bp, Homo sapiens; identical to SEQ ID NO: 2491
  misc_feature 10, 41, 96, 133, 152, 155, 169, 174, 176, 230, 278, 283,295, 309, 310, 339, 343, 352: n = A,T,C or G

SEQ ID NO: 8829 - DNA, 394 bp, Homo sapiens; identical to SEQ ID NO: 2492

SEQ ID NO: 8830 - DNA, 393 bp, Homo sapiens; identical to SEQ ID NO: 2493

SEQ ID NO: 8831 - DNA, 388 bp, Homo sapiens; identical to SEQ ID NO: 2494
  misc_feature 61: n = A,T,C or G

SEQ ID NO: 8832 - DNA, 240 bp, Homo sapiens; identical to SEQ ID NO: 2495
  misc_feature 1, 2, 24, 28, 29, 30, 41, 52, 55, 66, 83, 84, 85, 101, 107,120, 154, 155, 156, 172, 174, 178, 183, 184, 194, 195, 196,197, 198, 199, 200, 201, 202, 203, 204, 205, 206, 207, 208,210, 213, 215, 221, 222, 223, 224, 225, 228: n = A,T,C or G

SEQ ID NO: 8833 - DNA, 103 bp, Homo sapiens; identical to SEQ ID NO: 2496
  misc_feature 18, 57: n = A,T,C or G

SEQ ID NO: 8834 - DNA, 354 bp, Homo sapiens; identical to SEQ ID NO: 2497
  misc_feature 17, 55, 340, 342: n = A,T,C or G

SEQ ID NO: 8835 - DNA, 341 bp, Homo sapiens; identical to SEQ ID NO: 2498
  misc_feature 6, 22, 27, 32, 37, 44, 47, 60, 65, 85, 87, 96, 101, 135,148, 156, 159, 174, 186, 196, 217, 219, 229, 246, 250, 256,259, 293, 307, 313, 316, 327: n = A,T,C or G

SEQ ID NO: 8836 - DNA, 267 bp, Homo sapiens; identical to SEQ ID NO: 2499
  misc_feature 50, 109, 116, 175, 182, 194, 214, 257: n = A,T,C or G

SEQ ID NO: 8837 - DNA, 524 bp, Homo sapiens; identical to SEQ ID NO: 2500
  misc_feature 9, 505: n = A,T,C or G

SEQ ID NO: 8838 - DNA, 118 bp, Homo sapiens; identical to SEQ ID NO: 2501
  misc_feature 1, 19, 50, 69, 91: n = A,T,C or G

SEQ ID NO: 8839 - DNA, 145 bp, Homo sapiens; identical to SEQ ID NO: 2502
  misc_feature 66, 83, 110, 125: n = A,T,C or G

SEQ ID NO: 8840 - DNA, 387 bp, Homo sapiens; identical to SEQ ID NO: 2503

SEQ ID NO: 8841 - DNA, 464 bp, Homo sapiens; identical to SEQ ID NO: 2504

SEQ ID NO: 8842 - DNA, 557 bp, Homo sapiens; identical to SEQ ID NO: 2505
  misc_feature 555: n = A,T,C or G

SEQ ID NO: 8843 - DNA, 257 bp, Homo sapiens; identical to SEQ ID NO: 2506
  misc_feature 26, 42, 44, 57, 81, 90, 102, 127, 128, 136, 143, 148, 162,171, 174, 206, 235, 238: n = A,T,C or G

SEQ ID NO: 8844 - DNA, 532 bp, Homo sapiens; identical to SEQ ID NO: 2507
  misc_feature 75, 181, 220, 388, 456, 480, 504, 511, 525: n = A,T,C or G

SEQ ID NO: 8845 - DNA, 454 bp, Homo sapiens; identical to SEQ ID NO: 2508
  misc_feature 79, 266, 296, 363, 373, 382: n = A,T,C or G

SEQ ID NO: 8846 - DNA, 374 bp, Homo sapiens; identical to SEQ ID NO: 2509
  misc_feature 17, 33, 34, 36, 39, 41, 42, 193: n = A,T,C or G

SEQ ID NO: 8847 - DNA, 356 bp, Homo sapiens; identical to SEQ ID NO: 2510
  misc_feature 18, 30, 54, 88, 232, 285, 292, 328: n = A,T,C or G

SEQ ID NO: 8848 - DNA, 321 bp, Homo sapiens; identical to SEQ ID NO: 2511
  misc_feature 9, 11, 13, 14, 32, 35, 44, 45, 103, 122, 125, 135, 153, 155,156, 191, 195, 214, 228, 233, 238, 244, 248, 253, 261, 263,274, 276, 297, 299: n = A,T,C or G

SEQ ID NO: 8849 - DNA, 322 bp, Homo sapiens; identical to SEQ ID NO: 2512
  misc_feature 28: n = A,T,C or G

SEQ ID NO: 8850 - DNA, 463 bp, Homo sapiens; identical to SEQ ID NO: 2513
  misc_feature 24, 57, 129, 193, 200, 280, 291, 367: n = A,T,C or G

SEQ ID NO: 8851 - DNA, 442 bp, Homo sapiens; identical to SEQ ID NO: 2514
  misc_feature 323, 341: n = A,T,C or G

SEQ ID NO: 8852 - DNA, 443 bp, Homo sapiens; identical to SEQ ID NO: 2515
  misc_feature 396, 405, 406, 409, 420, 422, 424, 430, 431: n = A,T,C or G

SEQ ID NO: 8853 - DNA, 506 bp, Homo sapiens; identical to SEQ ID NO: 2516
  misc_feature 224, 265, 276, 295, 350, 498: n = A,T,C or G

SEQ ID NO: 8854 - DNA, 327 bp, Homo sapiens; identical to SEQ ID NO: 2517

SEQ ID NO: 8855 - DNA, 445 bp, Homo sapiens; identical to SEQ ID NO: 2518
  misc_feature 93, 150, 194, 227, 246: n = A,T,C or G

SEQ ID NO: 8856 - DNA, 585 bp, Homo sapiens; identical to SEQ ID NO: 2519
  misc_feature 64, 583: n = A,T,C or G

SEQ ID NO: 8857 - DNA, 489 bp, Homo sapiens; identical to SEQ ID NO: 2520
  misc_feature 174, 246, 253, 262, 264, 281, 317, 349, 472: n = A,T,C or G

SEQ ID NO: 8858 - DNA, 580 bp, Homo sapiens; identical to SEQ ID NO: 2521
  misc_feature 407, 564: n = A,T,C or G

SEQ ID NO: 8859 - DNA, 566 bp, Homo sapiens; identical to SEQ ID NO: 2522
  misc_feature 64, 74, 110, 133, 145, 174, 176, 212, 226, 260, 267, 275,287, 290, 325, 346, 386, 396, 422, 457, 522, 531: n = A,T,C or G

SEQ ID NO: 8860 - DNA, 443 bp, Homo sapiens; identical to SEQ ID NO: 2523
  misc_feature 22: n = A,T,C or G

SEQ ID NO: 8861 - DNA, 617 bp, Homo sapiens; identical to SEQ ID NO: 2524
  misc_feature 35, 53, 198, 268, 440, 581, 588: n = A,T,C or G

SEQ ID NO: 8862 - DNA, 510 bp, Homo sapiens; identical to SEQ ID NO: 2525
  misc_feature 80, 206, 212, 229, 250, 264, 287, 329, 338, 347, 357, 359,366, 368, 372, 375, 376, 378, 380, 384, 385, 399, 403, 405,407, 409, 413, 415, 422, 424, 434, 437, 439, 441, 442, 450,456, 460, 461, 465, 466, 469, 470, 471, 475, 483, 492: n = A,T,C or G

SEQ ID NO: 8863 - DNA, 410 bp, Homo sapiens; identical to SEQ ID NO: 2526

SEQ ID NO: 8864 - DNA, 252 bp, Homo sapiens; identical to SEQ ID NO: 2527

SEQ ID NO: 8865 - DNA, 517 bp, Homo sapiens; identical to SEQ ID NO: 2529
  misc_feature 177, 228, 238, 271, 281, 284, 304, 312, 327, 336, 338, 339,355, 367, 368, 381, 382, 398, 403, 409, 413, 414, 430, 432,435, 437, 453, 462, 466: n = A,T,C or G

SEQ ID NO: 8866 - DNA, 209 bp, Homo sapiens; identical to SEQ ID NO: 2530

SEQ ID NO: 8867 - DNA, 335 bp, Homo sapiens; identical to SEQ ID NO: 2531

SEQ ID NO: 8868 - DNA, 294 bp, Homo sapiens; identical to SEQ ID NO: 2532
  misc_feature 8, 24, 38, 52, 95, 112, 127, 154, 156, 160, 195, 206, 228,231, 245, 270, 275, 281: n = A,T,C or G

SEQ ID NO: 8869 - DNA, 277 bp, Homo sapiens; identical to SEQ ID NO: 2533

SEQ ID NO: 8870 - DNA, 384 bp, Homo sapiens; identical to SEQ ID NO: 2534
  misc_feature 158, 170, 174, 176, 179, 180, 184, 208, 216, 218, 223, 244,246, 247, 249, 250, 261, 262, 265, 266, 273, 275, 279, 281,284, 286, 290, 297, 300, 301, 302, 304, 308, 309, 310, 313,316, 326, 327, 329, 330, 332, 333, 334, 346, 347, 351: n = A,T,C or G
  misc_feature 353, 355, 365, 368, 373, 377: n = A,T,C or G

SEQ ID NO: 8871 - DNA, 473 bp, Homo sapiens; identical to SEQ ID NO: 2535
  misc_feature 298, 304, 329, 336, 339, 343, 358, 369, 387, 389, 390, 392,397, 401, 404, 405, 416, 420, 423, 426, 430, 454: n = A,T,C or G

SEQ ID NO: 8872 - DNA, 399 bp, Homo sapiens; identical to SEQ ID NO: 2536

SEQ ID NO: 8873 - DNA, 514 bp, Homo sapiens; identical to SEQ ID NO: 2537
  misc_feature 226, 235, 238, 241, 242, 243, 244, 250, 251, 252, 257, 265,268, 297, 302, 315, 326, 332, 333, 342, 349, 360, 370, 378,380, 412, 427, 433, 438, 443, 445, 461, 471, 478, 495, 498,501, 506, 511, 512: n = A,T,C or G

SEQ ID NO: 8874 - DNA, 526 bp, Homo sapiens; identical to SEQ ID NO: 2538
  misc_feature 232, 243, 273, 295, 317, 320, 330, 334, 338, 340, 342, 348,355, 357, 364, 375, 377, 380, 389, 399, 400, 410, 414, 418,430, 461, 467, 468, 483, 484, 485, 486, 489, 494, 501, 502,503, 505, 506, 507, 508, 517: n = A,T,C or G

SEQ ID NO: 8875 - DNA, 343 bp, Homo sapiens; identical to SEQ ID NO: 2539
  misc_feature 272: n = A,T,C or G

SEQ ID NO: 8876 - DNA, 459 bp, Homo sapiens; identical to SEQ ID NO: 2540

SEQ ID NO: 8877 - DNA, 695 bp, Homo sapiens; identical to SEQ ID NO: 2541
  misc_feature 7, 53, 54, 87, 88, 90, 118, 127, 132, 141, 166, 169, 171,180, 185, 192, 193, 198, 217, 231, 236, 242, 244, 245, 247,254, 278, 279, 283, 286, 288, 289, 291, 294, 295, 296, 297,303, 304, 306, 322, 324, 326, 329, 331, 332, 338, 341: n = A,T,C or G
  misc_feature 348, 354, 357, 359, 372, 373, 375, 377, 378, 380, 382, 387,390, 395, 403, 404, 412, 413, 417, 420, 424, 430, 431, 432,433, 436, 440, 448, 449, 450, 451, 452, 455, 465, 466, 475,476, 479, 483, 485, 497, 498, 500, 512, 522, 529, 530: n = A,T,C or G
  misc_feature 531, 534, 541, 544, 545, 552, 558, 559, 569, 580, 581, 582,583, 586, 590, 591, 594, 600, 604, 606, 611, 612, 615, 619,622, 628, 632, 634, 635, 638, 642, 647, 649, 652, 655, 656,658, 661, 662, 663, 664, 665, 667, 673, 674, 676, 688: n = A,T,C or G

SEQ ID NO: 8878 - DNA, 534 bp, Homo sapiens; identical to SEQ ID NO: 2542
  misc_feature 9, 16, 77, 219, 385, 406, 436, 478, 483, 506: n = A,T,C or G

SEQ ID NO: 8879 - DNA, 642 bp, Homo sapiens; identical to SEQ ID NO: 2543
  misc_feature 17, 18, 523, 524, 556, 559, 592, 595, 600, 607, 624, 629: n = A,T,C or G

SEQ ID NO: 8880 - DNA, 475 bp, Homo sapiens; identical to SEQ ID NO: 2544
  misc_feature 290, 297, 300, 302, 309, 311, 325, 327, 364, 381, 385, 386,391, 392, 395, 404, 412, 417, 420, 466: n = A,T,C or G

SEQ ID NO: 8881 - DNA, 550 bp, Homo sapiens; identical to SEQ ID NO: 2545
  misc_feature 134, 200, 220, 252, 264, 266, 293, 308, 335, 337, 362, 374,385, 386, 387, 398, 414, 417, 427, 434, 436, 442, 444, 447,453, 455, 457, 473, 488, 493, 506, 516, 517, 518, 521, 528,532, 546: n = A,T,C or G

SEQ ID NO: 8882 - DNA, 451 bp, Homo sapiens; identical to SEQ ID NO: 2546
  misc_feature 355, 399, 401, 412, 421, 440: n = A,T,C or G

SEQ ID NO: 8883 - DNA, 464 bp, Homo sapiens; identical to SEQ ID NO: 2547
  misc_feature 251, 253, 310, 430: n = A,T,C or G

SEQ ID NO: 8884 - DNA, 486 bp, Homo sapiens; identical to SEQ ID NO: 2548
  misc_feature 265, 291, 310, 326, 390, 416, 473: n = A,T,C or G

SEQ ID NO: 8885 - DNA, 546 bp, Homo sapiens; identical to SEQ ID NO: 2549
  misc_feature 182, 184, 186, 189, 199, 203, 204, 205, 206, 210, 211, 214,217, 219, 227, 230, 236, 241, 246, 248, 253, 254, 257, 260,269, 273, 291, 300, 314, 315, 318, 334, 341, 345, 355, 356,358, 372, 373, 387, 389, 393, 397, 405, 406, 413, 418: n = A,T,C or G
  misc_feature 423, 426, 428, 429, 432, 435, 443, 452, 453, 456, 457, 460,461, 466, 482, 488, 495, 510, 511, 512, 513, 523, 525, 537,538: n = A,T,C or G

SEQ ID NO: 8886 - DNA, 571 bp, Homo sapiens; identical to SEQ ID NO: 2550
  misc_feature 175, 197, 202, 207, 208, 215, 216, 219, 221, 226, 231, 233,238, 243, 256, 262, 273, 280, 283, 289, 295, 298, 304, 308,316, 320, 326, 329, 330, 333, 349, 351, 357, 365, 374, 375,389, 391, 394, 403, 412, 413, 418, 420, 421, 422, 423: n = A,T,C or G
  misc_feature 424, 426, 428, 429, 430, 431, 432, 433, 438, 456, 461, 463,478, 479, 480, 482, 492, 494, 505, 514, 516, 519, 527, 538,552, 556, 557, 558, 560: n = A,T,C or G

SEQ ID NO: 8887 - DNA, 363 bp, Homo sapiens; identical to SEQ ID NO: 2551
  misc_feature 215, 231, 240, 250, 265, 286, 294, 295, 298, 302, 305, 317,323, 325, 327, 328, 329, 330, 333, 334, 346, 358: n = A,T,C or G

SEQ ID NO: 8888 - DNA, 532 bp, Homo sapiens; identical to SEQ ID NO: 2552
  misc_feature 60, 210, 219, 231, 234, 241, 242, 252, 266, 267, 274, 276,277, 278, 282, 288, 304, 312, 313, 317, 328, 330, 346, 349,356, 357, 358, 359, 360, 376, 380, 381, 382, 397, 405, 406,408, 410, 412, 419, 420, 424, 425, 426, 431, 439, 440: n = A,T,C or G
  misc_feature 445, 446, 447, 448, 449, 457, 468, 469, 488, 490, 502, 503,506, 509, 514: n = A,T,C or G

SEQ ID NO: 8889 - DNA, 445 bp, Homo sapiens; identical to SEQ ID NO: 2553
  misc_feature 294, 387: n = A,T,C or G

SEQ ID NO: 8890 - DNA, 394 bp, Homo sapiens; identical to SEQ ID NO: 2555
  misc_feature 236, 237, 240, 273, 281, 325, 326, 333, 344, 350, 357, 372: n = A,T,C or G

SEQ ID NO: 8891 - DNA, 559 bp, Homo sapiens; identical to SEQ ID NO: 2556
  misc_feature 81, 97, 247, 283, 299, 330, 340, 341, 342, 366, 373, 375,383, 388, 392, 398, 402, 407, 442, 444, 449, 456, 459, 460,461, 462, 497, 525, 526, 536: n = A,T,C or G

SEQ ID NO: 8892 - DNA, 203 bp, Homo sapiens; identical to SEQ ID NO: 2557
  misc_feature 4, 26: n = A,T,C or G

SEQ ID NO: 8893 - DNA, 161 bp, Homo sapiens; identical to SEQ ID NO: 2558
  misc_feature 21, 57, 69, 78, 90, 100, 105, 110, 137: n = A,T,C or G

SEQ ID NO: 8894 - DNA, 503 bp, Homo sapiens; identical to SEQ ID NO: 2559
  misc_feature 65, 189, 208, 244, 265, 318, 425, 450, 471, 491, 494: n = A,T,C or G

SEQ ID NO: 8895 - DNA, 429 bp, Homo sapiens; identical to SEQ ID NO: 2560
  misc_feature 143, 161, 165, 172, 176, 177, 182, 183, 189, 192, 197, 200,215, 223, 227, 237, 239, 250, 265, 268, 272, 278, 296, 298,301, 337, 340, 341, 350, 358, 359, 360, 369, 377, 379, 380,381, 382, 383, 386, 397, 409, 411, 426: n = A,T,C or G

SEQ ID NO: 8896 - DNA, 545 bp, Homo sapiens; identical to SEQ ID NO: 2561
  misc_feature 1, 186, 199, 207, 211, 215, 216, 217, 218, 219, 220, 221,225, 236, 237, 240, 248, 256, 261, 263, 264, 277, 281, 288,292, 310, 318, 325, 328, 329, 334, 336, 354, 357, 361, 364,366, 371, 384, 389, 391, 398, 402, 405, 411, 415, 416: n = A,T,C or G
  misc_feature 423, 455, 463, 465, 470, 480, 484, 492, 493, 504, 506, 507,527, 530, 531: n = A,T,C or G

SEQ ID NO: 8897 - DNA, 538 bp, Homo sapiens; identical to SEQ ID NO: 2562
  misc_feature 183, 198, 201, 208, 209, 210, 213, 220, 235, 241, 242, 249,252, 253, 259, 261, 272, 273, 274, 276, 277, 282, 287, 294,302, 311, 333, 349, 380, 382, 385, 387, 390, 398, 412, 413,421, 429, 433, 434, 437, 440, 453, 454, 456, 487, 504: n = A,T,C or G
  misc_feature 506, 517, 529, 530: n = A,T,C or G

SEQ ID NO: 8898 - DNA, 526 bp, Homo sapiens; identical to SEQ ID NO: 2563
  misc_feature 193, 208, 217, 219, 221, 226, 230, 233, 235, 238, 242, 244,288, 342: n = A,T,C or G

SEQ ID NO: 8899 - DNA, 536 bp, Homo sapiens; identical to SEQ ID NO: 2564
  misc_feature 240, 260, 283, 289, 291, 292, 294, 300, 308, 320, 321, 322,327, 329, 330, 331, 337, 342, 356, 357, 358, 361, 366, 367,370, 371, 380, 385, 388, 389, 393, 405, 407, 409, 410, 412,413, 442, 443, 449, 460, 464, 465, 477, 478, 480, 490: n = A,T,C or G
  misc_feature 491, 492, 496, 501, 502, 508, 519: n = A,T,C or G

SEQ ID NO: 8900 - DNA, 448 bp, Homo sapiens; identical to SEQ ID NO: 2565
  misc_feature 7, 144, 159, 179, 188, 195, 200, 212, 220, 221, 222, 238,239, 255, 256, 260, 266, 269, 281, 287, 302, 308, 318, 322,323, 326, 334, 338, 345, 349, 357, 359, 360, 369, 370, 379,387, 388, 389, 400, 401, 402, 404, 405, 406, 407, 410: n = A,T,C or G
  misc_feature 412, 413, 414, 419, 425, 426, 427, 430, 435: n = A,T,C or G

SEQ ID NO: 8901 - DNA, 561 bp, Homo sapiens; identical to SEQ ID NO: 2566
  misc_feature 1, 208, 346, 353, 357, 367, 379, 405, 407, 408, 409, 412,417, 422, 429, 431, 449, 463, 472, 484, 505, 506, 519, 522,523, 527, 528, 529, 531, 533, 535, 537, 538, 540, 545, 546,550: n = A,T,C or G

SEQ ID NO: 8902 - DNA, 372 bp, Homo sapiens; identical to SEQ ID NO: 2567
  misc_feature 52, 66, 68, 70, 99, 135, 165, 175, 178, 187, 189, 190, 194,205, 207, 220, 242, 259, 263, 273, 278, 288, 297, 300, 302,303, 307, 316, 322, 327, 330, 338, 342, 346, 360, 364: n = A,T,C or G

SEQ ID NO: 8903 - DNA, 343 bp, Homo sapiens; identical to SEQ ID NO: 2568
  misc_feature 65, 118, 147, 158, 187, 204, 210, 251, 265, 274, 284, 295,324: n = A,T,C or G

SEQ ID NO: 8904 - DNA, 343 bp, Homo sapiens; identical to SEQ ID NO: 2569

SEQ ID NO: 8905 - DNA, 377 bp, Homo sapiens; identical to SEQ ID NO: 2570
  misc_feature 185, 339: n = A,T,C or G

SEQ ID NO: 8906 - DNA, 416 bp, Homo sapiens; identical to SEQ ID NO: 2571
  misc_feature 39, 56, 61, 62, 64, 68, 70, 72, 86, 87, 94, 100, 107, 109,122, 127, 131, 137, 145, 149, 164, 167, 174, 191, 196, 206,210, 213, 216, 226, 232, 236, 237, 254, 256, 257, 259, 261,272, 277, 285, 295, 301, 302, 309, 310, 321, 324, 354: n = A,T,C or G
  misc_feature 371, 373, 376: n = A,T,C or G

SEQ ID NO: 8907 - DNA, 317 bp, Homo sapiens; identical to SEQ ID NO: 2572
  misc_feature 36, 37, 39, 55, 59, 60, 62, 66, 69, 72, 75, 76, 78, 84, 119,127, 140, 142, 198, 206, 230, 261, 291, 304, 305: n = A,T,C or G

SEQ ID NO: 8908 - DNA, 398 bp, Homo sapiens; identical to SEQ ID NO: 2573

SEQ ID NO: 8909 - DNA, 397 bp, Homo sapiens; identical to SEQ ID NO: 2574
  misc_feature 37, 49, 55, 56, 81, 89, 110, 122, 179, 211, 220, 246, 247,269, 285, 287, 290, 341, 347, 365, 368, 377, 378: n = A,T,C or G

SEQ ID NO: 8910 - DNA, 432 bp, Homo sapiens; identical to SEQ ID NO: 2575
  misc_feature 19, 69, 70, 73, 74, 75: n = A,T,C or G

SEQ ID NO: 8911 - DNA, 419 bp, Homo sapiens; identical to SEQ ID NO: 2576

SEQ ID NO: 8912 - DNA, 349 bp, Homo sapiens; identical to SEQ ID NO: 2578
  misc_feature 334: n = A,T,C or G

SEQ ID NO: 8913 - DNA, 347 bp, Homo sapiens; identical to SEQ ID NO: 2579
  misc_feature 113, 135, 149, 239, 284: n = A,T,C or G

SEQ ID NO: 8914 - DNA, 446 bp, Homo sapiens; identical to SEQ ID NO: 2580
  misc_feature 409: n = A,T,C or G

SEQ ID NO: 8915 - DNA, 443 bp, Homo sapiens; identical to SEQ ID NO: 2581
  misc_feature 73, 74, 119, 350, 391, 408, 412: n = A,T,C or G

SEQ ID NO: 8916 - DNA, 570 bp, Homo sapiens; identical to SEQ ID NO: 2582
  misc_feature 103, 450, 468, 516, 542, 544, 548, 557, 559: n = A,T,C or G

SEQ ID NO: 8917 - DNA, 345 bp, Homo sapiens; identical to SEQ ID NO: 2583
  misc_feature 83, 102, 125, 136, 137, 148, 171, 174, 182, 183, 190, 191,203, 210, 212, 228, 240, 258, 261, 270, 287, 306, 314, 318,325: n = A,T,C or G

SEQ ID NO: 8918 - DNA, 160 bp, Homo sapiens; identical to SEQ ID NO: 2584
  misc_feature 112: n = A,T,C or G

SEQ ID NO: 8919 - DNA, 189 bp, Homo sapiens; identical to SEQ ID NO: 2585
  misc_feature 27, 104, 137, 181, 184: n = A,T,C or G

SEQ ID NO: 8920 - DNA, 287 bp, Homo sapiens; identical to SEQ ID NO: 2586

SEQ ID NO: 8921 - DNA, 432 bp, Homo sapiens; identical to SEQ ID NO: 2587
  misc_feature 67, 305: n = A,T,C or G

SEQ ID NO: 8922 - DNA, 354 bp, Homo sapiens; identical to SEQ ID NO: 2588
  misc_feature 26, 32, 35, 36, 38, 42, 48, 67, 116, 125, 186, 264, 302,308, 310, 317, 327: n = A,T,C or G

SEQ ID NO: 8923 - DNA, 542 bp, Homo sapiens; identical to SEQ ID NO: 2589
  misc_feature 504, 510: n = A,T,C or G

SEQ ID NO: 8924 - DNA, 516 bp, Homo sapiens; identical to SEQ ID NO: 2590
  misc_feature 112, 114: n = A,T,C or G

SEQ ID NO: 8925 - DNA, 493 bp, Homo sapiens; identical to SEQ ID NO: 2591
  misc_feature 112: n = A,T,C or G

SEQ ID NO: 8926 - DNA, 417 bp, Homo sapiens; identical to SEQ ID NO: 2592
  misc_feature 115, 286, 288: n = A,T,C or G

SEQ ID NO: 8927 - DNA, 266 bp, Homo sapiens; identical to SEQ ID NO: 2593
  misc_feature 8, 266: n = A,T,C or G

SEQ ID NO: 8928 - DNA, 457 bp, Homo sapiens; identical to SEQ ID NO: 2594

SEQ ID NO: 8929 - DNA, 498 bp, Homo sapiens; identical to SEQ ID NO: 2595
  misc_feature 97, 222, 301, 472: n = A,T,C or G

SEQ ID NO: 8930 - DNA, 553 bp, Homo sapiens; identical to SEQ ID NO: 2596
  misc_feature 10, 32, 34, 35, 49, 54, 62, 261, 311, 393, 402, 422, 461,463, 471, 506, 537: n = A,T,C or G

SEQ ID NO: 8931 - DNA, 518 bp, Homo sapiens; identical to SEQ ID NO: 2597
  misc_feature 71, 103, 224, 312, 456, 502: n = A,T,C or G

SEQ ID NO: 8932 - DNA, 419 bp, Homo sapiens; identical to SEQ ID NO: 2598
  misc_feature 41, 48, 77, 82, 109, 205, 253, 295, 309, 347, 362, 371, 372,376, 403, 411: n = A,T,C or G

SEQ ID NO: 8933 - DNA, 561 bp, Homo sapiens; identical to SEQ ID NO: 2599
  misc_feature 239, 371, 444, 462, 486, 536, 558: n = A,T,C or G

SEQ ID NO: 8934 - DNA, 420 bp, Homo sapiens; identical to SEQ ID NO: 2600
  misc_feature 48, 49, 83, 114, 120, 145, 397: n = A,T,C or G

SEQ ID NO: 8935 - DNA, 495 bp, Homo sapiens; identical to SEQ ID NO: 2601
  misc_feature 32, 35, 311, 313, 314, 315, 316, 317, 318, 319, 320, 321,322, 323, 324, 325, 326, 327, 328, 329, 330, 331, 332, 333,334, 335, 336, 337, 338, 339, 340, 341, 342, 343, 344, 345,346, 347, 348, 349, 350, 360, 394, 458: n = A,T,C or G

SEQ ID NO: 8936 - DNA, 444 bp, Homo sapiens; identical to SEQ ID NO: 2602
  misc_feature 14, 17, 29, 95, 269, 297: n = A,T,C or G

SEQ ID NO: 8937 - DNA, 616 bp, Homo sapiens; identical to SEQ ID NO: 2603
  misc_feature 254, 338, 343, 418, 428, 433, 445, 464, 473, 510, 538, 577,596, 609: n = A,T,C or G

SEQ ID NO: 8938 - DNA, 466 bp, Homo sapiens; identical to SEQ ID NO: 2604

SEQ ID NO: 8939 - DNA, 560 bp, Homo sapiens; identical to SEQ ID NO: 2605
  misc_feature 322, 446: n = A,T,C or G

SEQ ID NO: 8940 - DNA, 440 bp, Homo sapiens; identical to SEQ ID NO: 2606
  misc_feature 243, 248, 255, 259, 372, 395, 406: n = A,T,C or G

SEQ ID NO: 8941 - DNA, 674 bp, Homo sapiens; identical to SEQ ID NO: 2607
  misc_feature 166, 320, 419, 516, 520, 540, 581, 655: n = A,T,C or G

SEQ ID NO: 8942 - DNA, 586 bp, Homo sapiens; identical to SEQ ID NO: 2608
  misc_feature 244, 272, 291, 308, 512, 538, 554, 565: n = A,T,C or G

SEQ ID NO: 8943 - DNA, 782 bp, Homo sapiens; identical to SEQ ID NO: 2609
  misc_feature 237, 250, 264, 301, 323, 412, 413, 414, 415, 416, 417, 418,419, 420, 421, 422, 423, 424, 425, 426, 427, 428, 429, 430,431, 432, 433, 434, 435, 436, 437, 438, 439, 440, 441, 442,443, 444, 445, 446, 447, 448, 449, 450, 451, 452, 453: n = A,T,C or G
  misc_feature 454, 455, 456, 457, 458, 459, 460, 461, 462, 463, 464, 465,466, 467, 468, 469, 470, 471, 472, 473, 474, 475, 476, 477,478, 479, 480, 481, 482, 483, 484, 485, 486, 487, 488, 489,490, 491, 492, 493, 494, 495, 496, 497, 498, 499, 500: n = A,T,C or G
  misc_feature 501, 502, 503, 504, 505, 506, 507, 508, 509, 510, 511, 512,513, 514, 515, 516, 517, 518, 519, 520, 521, 522, 536, 538,564, 572, 589, 592, 596, 601, 613, 619, 628, 638, 662, 678,679, 696, 699, 707, 708, 711, 719, 760, 767, 769, 770: n = A,T,C or G
  misc_feature 772, 781: n = A,T,C or G

SEQ ID NO: 8944 - DNA, 433 bp, Homo sapiens; identical to SEQ ID NO: 2610
  misc_feature 56, 94, 175, 185, 188, 197, 227, 230, 249, 253, 263, 264,266, 311, 343, 380, 388, 390, 391, 397, 408: n = A,T,C or G

SEQ ID NO: 8945 - DNA, 320 bp, Homo sapiens; identical to SEQ ID NO: 2611
  misc_feature 115, 116, 117, 124, 248, 253, 266, 320: n = A,T,C or G

SEQ ID NO: 8946 - DNA, 272 bp, Homo sapiens; identical to SEQ ID NO: 2612
  misc_feature 32: n = A,T,C or G

SEQ ID NO: 8947 - DNA, 126 bp, Homo sapiens; identical to SEQ ID NO: 2613
  misc_feature 28: n = A,T,C or G

SEQ ID NO: 8948 - DNA, 393 bp, Homo sapiens; identical to SEQ ID NO: 2614
  misc_feature 118, 250, 252, 385: n = A,T,C or G

SEQ ID NO: 8949 - DNA, 658 bp, Homo sapiens; identical to SEQ ID NO: 2615
  misc_feature 173, 175, 179, 195, 197, 240, 243, 251, 266, 274, 284, 293,294, 299, 301, 307, 314, 326, 329, 337, 339, 354, 359, 363,369, 385, 386, 392, 395, 397, 412, 415, 424, 444, 469, 477,494, 504, 511, 522, 530, 531, 532, 538, 543, 546, 564: n = A,T,C or G
  misc_feature 580, 583, 590, 592, 602, 612, 635: n = A,T,C or G

SEQ ID NO: 8950 - DNA, 460 bp, Homo sapiens; identical to SEQ ID NO: 2616
  misc_feature 80, 116, 242, 306, 342, 355, 368: n = A,T,C or G

SEQ ID NO: 8951 - DNA, 559 bp, Homo sapiens; identical to SEQ ID NO: 2617
  misc_feature 5, 54, 55, 210, 211, 212, 213, 214, 215, 216, 217, 218, 219,220, 221, 222, 223, 224, 225, 226, 227, 228, 229, 230, 231,232, 233, 234, 235, 236, 237, 238, 239, 240, 241, 242, 243,244, 245, 246, 247, 248, 249, 250, 251, 252, 253: n = A,T,C or G
  misc_feature 254, 255, 256, 257, 258, 259, 260, 261, 262, 263, 264, 265,266, 267, 268, 269, 270, 271, 272, 273, 274, 275, 276, 277,284, 285, 286, 287, 288, 289, 290, 291, 292, 293, 294, 295,296, 297, 298, 299, 300, 301, 302, 303, 304, 305, 306: n = A,T,C or G
  misc_feature 307, 308, 309, 310, 311, 312, 313, 314, 315, 316, 317, 318,319, 320, 321, 322, 323, 324, 325, 326, 351, 354, 355, 356,357, 358, 359, 360, 361, 362, 363, 364, 365, 366, 367, 368,369, 370, 371, 372, 373, 374, 375, 376, 377, 378, 379: n = A,T,C or G
  misc_feature 380, 381, 382, 383, 384, 385, 390, 399, 412, 413, 457, 459,460, 461, 462, 463, 464, 465, 466, 467, 468, 469, 470, 471,472, 473, 474, 475, 476, 477, 478, 479, 480, 481, 482, 483,484, 485, 486, 487, 488, 489, 490, 491, 492, 493, 494: n = A,T,C or G
  misc_feature 495, 496, 497, 498, 499, 500, 501, 502, 503, 504, 505, 506,507, 508, 509, 521: n = A,T,C or G

SEQ ID NO: 8952 - DNA, 525 bp, Homo sapiens; identical to SEQ ID NO: 2618
  misc_feature 121, 173, 220, 250, 257, 266, 277, 300, 302, 307, 323, 325,351, 361, 363, 387, 461, 503: n = A,T,C or G

SEQ ID NO: 8953 - DNA, 476 bp, Homo sapiens; identical to SEQ ID NO: 2619
  misc_feature 243, 251, 252, 260, 277, 315, 345, 346, 350, 358: n = A,T,C or G

SEQ ID NO: 8954 - DNA, 476 bp, Homo sapiens; identical to SEQ ID NO: 2620
  misc_feature 26, 40, 96, 118, 119, 127, 163, 243, 249, 256, 260, 262,267, 279, 325, 341, 347, 348, 358, 361, 394, 404: n = A,T,C or G

SEQ ID NO: 8955 - DNA, 591 bp, Homo sapiens; identical to SEQ ID NO: 2621
  misc_feature 1, 23, 237, 276, 353, 365, 378, 419, 515, 522, 537, 538,541, 568, 571: n = A,T,C or G

SEQ ID NO: 8956 - DNA, 444 bp, Homo sapiens; identical to SEQ ID NO: 2622
  misc_feature 5, 43, 389: n = A,T,C or G

SEQ ID NO: 8957 - DNA, 636 bp, Homo sapiens; identical to SEQ ID NO: 2623
  misc_feature 9, 34, 113, 117, 119, 140, 152, 256, 262, 267, 281, 305,309, 323, 324, 331, 341, 343, 349, 358, 362, 364, 372, 374,378, 382, 389, 397, 400, 401, 406, 408, 411, 413, 417, 426,427, 433, 436, 437, 439, 441, 443, 445, 456, 457, 458: n = A,T,C or G
  misc_feature 465, 466, 472, 475, 477, 489, 497, 499, 502, 505, 507, 514,515, 519, 522, 523, 524, 527, 545, 549, 550, 551, 556, 569,570, 575, 579, 585, 588, 591, 596, 600, 603, 605, 609, 611,613, 631: n = A,T,C or G

SEQ ID NO: 8958 - DNA, 447 bp, Homo sapiens; identical to SEQ ID NO: 2624
  misc_feature 77, 113, 143, 148, 155, 163, 192, 205, 229, 239, 240, 244,245, 251, 254, 255, 259, 270, 297, 309, 311, 314, 315, 324,388: n = A,T,C or G

SEQ ID NO: 8959 - DNA, 534 bp, Homo sapiens; identical to SEQ ID NO: 2625
  misc_feature 111, 112, 134, 193, 205, 242, 297, 301, 326, 460, 465, 516,533: n = A,T,C or G

SEQ ID NO: 8960 - DNA, 482 bp, Homo sapiens; identical to SEQ ID NO: 2626
  misc_feature 200, 263, 270, 308, 334, 338, 368, 392, 412, 429, 431, 438: n = A,T,C or G

SEQ ID NO: 8961 - DNA, 228 bp, Homo sapiens; identical to SEQ ID NO: 2627
  misc_feature 21, 67, 184, 199, 216: n = A,T,C or G

SEQ ID NO: 8962 - DNA, 412 bp, Homo sapiens; identical to SEQ ID NO: 2628
  misc_feature 93, 399: n = A,T,C or G

SEQ ID NO: 8963 - DNA, 507 bp, Homo sapiens; identical to SEQ ID NO: 2629
  misc_feature 77, 198, 273: n = A,T,C or G

SEQ ID NO: 8964 - DNA, 398 bp, Homo sapiens; identical to SEQ ID NO: 2630
  misc_feature 149, 189, 220, 239, 240, 242, 254, 256, 273, 284, 296, 387: n = A,T,C or G

SEQ ID NO: 8965 - DNA, 102 bp, Homo sapiens; identical to SEQ ID NO: 2631
  misc_feature 90: n = A,T,C or G

SEQ ID NO: 8966 - DNA, 356 bp, Homo sapiens; identical to SEQ ID NO: 2632
  misc_feature 115: n = A,T,C or G

SEQ ID NO: 8967 - DNA, 437 bp, Homo sapiens; identical to SEQ ID NO: 2633
  misc_feature 92, 110, 111, 115, 116, 149, 220, 229, 266, 267, 276, 315,353, 379: n = A,T,C or G

SEQ ID NO: 8968 - DNA, 372 bp, Homo sapiens; identical to SEQ ID NO: 2634
  misc_feature 9: n = A,T,C or G

SEQ ID NO: 8969 - DNA, 367 bp, Homo sapiens; identical to SEQ ID NO: 2635
  misc_feature 80, 102, 112, 113, 123, 124, 132, 136, 198, 211, 241, 242,252, 253, 260, 263, 289, 305, 316, 326: n = A,T,C or G

SEQ ID NO: 8970 - DNA, 487 bp, Homo sapiens; identical to SEQ ID NO: 2636
  misc_feature 126, 183, 220, 227, 232, 248, 291, 363, 374, 401, 405, 407,413, 417, 419, 427, 431, 451, 458, 467, 479: n = A,T,C or G

SEQ ID NO: 8971 - DNA, 353 bp, Homo sapiens; identical to SEQ ID NO: 2637
  misc_feature 87, 112, 216, 222, 230, 245, 276, 309, 353: n = A,T,C or G

SEQ ID NO: 8972 - DNA, 364 bp, Homo sapiens; identical to SEQ ID NO: 2638

SEQ ID NO: 8973 - DNA, 465 bp, Homo sapiens; identical to SEQ ID NO: 2639
  misc_feature 5, 425: n = A,T,C or G

SEQ ID NO: 8974 - DNA, 520 bp, Homo sapiens; identical to SEQ ID NO: 2640
  misc_feature 241, 250, 292, 294, 376, 404, 482: n = A,T,C or G

SEQ ID NO: 8975 - DNA, 461 bp, Homo sapiens; identical to SEQ ID NO: 2641
  misc_feature 19, 57, 58, 64, 84, 109, 112, 113, 144, 149, 170, 172, 195,226, 247, 252, 256, 264, 266, 344, 371, 373, 380, 403, 407,409, 419, 429, 459: n = A,T,C or G

SEQ ID NO: 8976 - DNA, 337 bp, Homo sapiens; identical to SEQ ID NO: 2643
  misc_feature 187, 201, 258: n = A,T,C or G

SEQ ID NO: 8977 - DNA, 514 bp, Homo sapiens; identical to SEQ ID NO: 2644
  misc_feature 368, 430, 431, 465, 471, 480, 484, 488, 495, 500: n = A,T,C or G

SEQ ID NO: 8978 - DNA, 486 bp, Homo sapiens; identical to SEQ ID NO: 2645
  misc_feature 24, 124, 127, 131, 145, 151, 184, 186, 188, 191, 201, 221,222, 235, 241, 242, 246, 270, 279, 280, 306, 318, 337, 347,388, 391, 394, 395, 436, 484: n = A,T,C or G

SEQ ID NO: 8979 - DNA, 670 bp, Homo sapiens; identical to SEQ ID NO: 2646
  misc_feature 233, 264, 297, 304, 333, 345, 407, 409, 490, 523, 526, 539,546, 557, 563, 590, 592, 596, 607, 614, 615, 621, 624, 639,650, 657, 662: n = A,T,C or G

SEQ ID NO: 8980 - DNA, 207 bp, Homo sapiens; identical to SEQ ID NO: 2647
  misc_feature 78, 99, 103, 115, 119, 132, 141, 167, 185: n = A,T,C or G

SEQ ID NO: 8981 - DNA, 319 bp, Homo sapiens; identical to SEQ ID NO: 2648
  misc_feature 62, 69, 71, 76, 78, 94, 95, 100, 103, 105, 120, 125, 132,135, 144, 155, 158, 180, 187, 189, 191, 201, 205, 220, 223,231, 235, 245, 250, 267, 275, 285, 291, 306, 318: n = A,T,C or G

SEQ ID NO: 8982 - DNA, 364 bp, Homo sapiens; identical to SEQ ID NO: 2649

SEQ ID NO: 8983 - DNA, 206 bp, Homo sapiens; identical to SEQ ID NO: 2650

SEQ ID NO: 8984 - DNA, 570 bp, Homo sapiens; identical to SEQ ID NO: 2651

SEQ ID NO: 8985 - DNA, 553 bp, Homo sapiens; identical to SEQ ID NO: 2652
  misc_feature 408, 477, 541: n = A,T,C or G

SEQ ID NO: 8986 - DNA, 458 bp, Homo sapiens; identical to SEQ ID NO: 2653
  misc_feature 5: n = A,T,C or G

SEQ ID NO: 8987 - DNA, 505 bp, Homo sapiens; identical to SEQ ID NO: 2654
  misc_feature 105, 468: n = A,T,C or G

SEQ ID NO: 8988 - DNA, 239 bp, Homo sapiens; identical to SEQ ID NO: 2655

SEQ ID NO: 8989 - DNA, 462 bp, Homo sapiens; identical to SEQ ID NO: 2656
  misc_feature 438: n = A,T,C or G

SEQ ID NO: 8990 - DNA, 602 bp, Homo sapiens; identical to SEQ ID NO: 2657
  misc_feature 14, 232, 344, 356, 375, 399, 424, 434, 446, 455, 457, 492,497, 505, 547, 549, 580, 591: n = A,T,C or G

SEQ ID NO: 8991 - DNA, 379 bp, Homo sapiens; identical to SEQ ID NO: 2658
  misc_feature 42, 72, 98, 204, 221, 227, 250, 305, 331, 336, 341: n = A,T,C or G

SEQ ID NO: 8992 - DNA, 574 bp, Homo sapiens; identical to SEQ ID NO: 2659
  misc_feature 53, 141, 160, 171, 174, 177, 184, 187, 188, 189, 195, 199,210, 211, 212, 213, 216, 228, 233, 234, 235, 244, 245, 248,249, 253, 255, 257, 261, 269, 270, 271, 272, 273, 274, 275,284, 292, 293, 296, 308, 329, 332, 336, 338, 349, 351: n = A,T,C or G
  misc_feature 352, 355, 364, 372, 376, 381, 384, 385, 393, 396, 399, 400,401, 402, 407, 409, 410, 413, 415, 422, 424, 428, 429, 430,435, 443, 446, 455, 460, 464, 466, 467, 469, 478, 480, 486,503, 513, 518, 569: n = A,T,C or G

SEQ ID NO: 8993 - DNA, 557 bp, Homo sapiens; identical to SEQ ID NO: 2660
  misc_feature 520: n = A,T,C or G

SEQ ID NO: 8994 - DNA, 369 bp, Homo sapiens; identical to SEQ ID NO: 2661
  misc_feature 10, 339: n = A,T,C or G

SEQ ID NO: 8995 - DNA, 356 bp, Homo sapiens; identical to SEQ ID NO: 2662

SEQ ID NO: 8996 - DNA, 117 bp, Homo sapiens; identical to SEQ ID NO: 2663
  misc_feature 46, 74: n = A,T,C or G

SEQ ID NO: 8997 - DNA, 339 bp, Homo sapiens; identical to SEQ ID NO: 2664
  misc_feature 142, 203, 214, 244, 260, 278, 327, 337: n = A,T,C or G

SEQ ID NO: 8998 - DNA, 342 bp, Homo sapiens; identical to SEQ ID NO: 2665
  misc_feature 308: n = A,T,C or G

SEQ ID NO: 8999 - DNA, 490 bp, Homo sapiens; identical to SEQ ID NO: 2666
  misc_feature 413: n = A,T,C or G

SEQ ID NO: 9000 - DNA, 491 bp, Homo sapiens; identical to SEQ ID NO: 2667
  misc_feature 1, 2, 31, 40, 61, 147, 265, 294, 300, 303, 315, 334, 338,345, 352, 424, 445, 463, 482: n = A,T,C or G

SEQ ID NO: 9001 - DNA, 346 bp, Homo sapiens; identical to SEQ ID NO: 2668

SEQ ID NO: 9002 - DNA, 566 bp, Homo sapiens; identical to SEQ ID NO: 2669
  misc_feature 321, 422, 463, 501, 515, 523, 556: n = A,T,C or G

SEQ ID NO: 9003 - DNA, 538 bp, Homo sapiens; identical to SEQ ID NO: 2670
  misc_feature 369, 496, 536: n = A,T,C or G

SEQ ID NO: 9004 - DNA, 162 bp, Homo sapiens; identical to SEQ ID NO: 2671
  misc_feature 42, 43, 103, 136: n = A,T,C or G

SEQ ID NO: 9005 - DNA, 190 bp, Homo sapiens; identical to SEQ ID NO: 2672
  misc_feature 47, 83, 99, 125, 151, 152, 171: n = A,T,C or G

SEQ ID NO: 9006 - DNA, 423 bp, Homo sapiens; identical to SEQ ID NO: 2673

SEQ ID NO: 9007 - DNA, 179 bp, Homo sapiens; identical to SEQ ID NO: 2674
  misc_feature 19, 23, 27, 41, 57, 62, 87, 89, 99, 139, 179: n = A,T,C or G

SEQ ID NO: 9008 - DNA, 456 bp, Homo sapiens; identical to SEQ ID NO: 2675
  misc_feature 108, 419, 442, 443: n = A,T,C or G

SEQ ID NO: 9009 - DNA, 517 bp, Homo sapiens; identical to SEQ ID NO: 2676
  misc_feature 164, 235, 248, 273, 275, 417, 458, 460, 467, 485, 487: n = A,T,C or G

SEQ ID NO: 9010 - DNA, 472 bp, Homo sapiens; identical to SEQ ID NO: 2677
  misc_feature 402, 448: n = A,T,C or G

SEQ ID NO: 9011 - DNA, 319 bp, Homo sapiens; identical to SEQ ID NO: 2678
  misc_feature 1, 12, 74, 80, 87, 97, 124, 133, 150, 185, 220, 222, 223,224, 225, 226, 227, 228, 229, 230, 231, 232, 233, 234, 235,236, 237, 238, 239, 240, 241, 242, 243, 244, 245, 246, 247,248, 249, 250, 251, 252, 253, 274, 290, 305: n = A,T,C or G

SEQ ID NO: 9012 - DNA, 325 bp, Homo sapiens; identical to SEQ ID NO: 2679
  misc_feature 19, 46, 282: n = A,T,C or G

SEQ ID NO: 9013 - DNA, 366 bp, Homo sapiens; identical to SEQ ID NO: 2680
  misc_feature 74, 194, 313: n = A,T,C or G

SEQ ID NO: 9014 - DNA, 427 bp, Homo sapiens; identical to SEQ ID NO: 2681

SEQ ID NO: 9015 - DNA, 167 bp, Homo sapiens; identical to SEQ ID NO: 2682

SEQ ID NO: 9016 - DNA, 512 bp, Homo sapiens; identical to SEQ ID NO: 2683
  misc_feature 395, 504: n = A,T,C or G

SEQ ID NO: 9017 - DNA, 518 bp, Homo sapiens; identical to SEQ ID NO: 2684
  misc_feature 27, 298, 334, 376, 397, 400, 411, 435, 467, 474, 507: n = A,T,C or G

SEQ ID NO: 9018 - DNA, 528 bp, Homo sapiens; identical to SEQ ID NO: 2685
  misc_feature 146, 149, 164, 185, 193, 200, 206, 212, 220, 222, 227, 228,230, 237, 238, 257, 258, 294, 296, 320, 328, 343, 350, 360,389, 390, 411, 416, 419, 433, 448, 450, 467, 472, 480, 481,501, 516: n = A,T,C or G

SEQ ID NO: 9019 - DNA, 234 bp, Homo sapiens; identical to SEQ ID NO: 2686
  misc_feature 193: n = A,T,C or G

SEQ ID NO: 9020 - DNA, 462 bp, Homo sapiens; identical to SEQ ID NO: 2687
  misc_feature 143, 158, 159, 164, 178, 180, 183, 186, 188, 217, 226, 234,246, 249, 253, 263, 271, 317, 322, 329, 349, 368, 371, 377,390, 391, 392, 393, 394, 395, 396, 397, 398, 399, 400, 401,402, 403, 404, 405, 406, 407, 408, 409, 410, 411, 412: n = A,T,C or G
  misc_feature 434, 435, 444, 445, 448, 454: n = A,T,C or G

SEQ ID NO: 9021 - DNA, 165 bp, Homo sapiens; identical to SEQ ID NO: 2688
  misc_feature 28: n = A,T,C or G

SEQ ID NO: 9022 - DNA, 386 bp, Homo sapiens; identical to SEQ ID NO: 2689
  misc_feature 152, 179, 228, 231, 239, 343, 351, 361, 363: n = A,T,C or G

SEQ ID NO: 9023 - DNA, 425 bp, Homo sapiens; identical to SEQ ID NO: 2690
  misc_feature 32, 188, 237, 297, 320, 322, 324, 325, 333, 338, 381, 383,392, 409, 413: n = A,T,C or G

SEQ ID NO: 9024 - DNA, 265 bp, Homo sapiens; identical to SEQ ID NO: 2691
  misc_feature 220, 225: n = A,T,C or G

SEQ ID NO: 9025 - DNA, 526 bp, Homo sapiens; identical to SEQ ID NO: 2692
  misc_feature 224, 255, 283, 287, 292, 295, 300, 307, 316, 323, 337, 344,350, 372, 384, 387, 392, 398, 416, 422, 426, 428, 436, 442,443, 457, 460, 466, 474, 478, 496, 524: n = A,T,C or G

SEQ ID NO: 9026 - DNA, 330 bp, Homo sapiens; identical to SEQ ID NO: 2693
  misc_feature 74: n = A,T,C or G

SEQ ID NO: 9027 - DNA, 158 bp, Homo sapiens; identical to SEQ ID NO: 2694

SEQ ID NO: 9028 - DNA, 281 bp, Homo sapiens; identical to SEQ ID NO: 2695

SEQ ID NO: 9029 - DNA, 515 bp, Homo sapiens; identical to SEQ ID NO: 2696
  misc_feature 420, 423, 438, 442, 444, 457, 458, 460, 468, 484, 489, 490,491: n = A,T,C or G

SEQ ID NO: 9030 - DNA, 364 bp, Homo sapiens; identical to SEQ ID NO: 2697
  misc_feature 81, 137, 188, 227, 277, 300, 312, 331: n = A,T,C or G

SEQ ID NO: 9031 - DNA, 527 bp, Homo sapiens; identical to SEQ ID NO: 2698
  misc_feature 25, 242, 261, 271, 272, 273, 278, 293, 324, 330, 343, 357,387, 404, 406, 415, 431, 459, 460, 461, 462, 479, 480, 481,483, 484, 489, 495, 506, 508, 515, 516, 519: n = A,T,C or G

SEQ ID NO: 9032 - DNA, 365 bp, Homo sapiens; identical to SEQ ID NO: 2699
  misc_feature 25, 118, 135, 206, 211, 225, 237, 249, 265, 298: n = A,T,C or G

SEQ ID NO: 9033 - DNA, 490 bp, Homo sapiens; identical to SEQ ID NO: 2700
  misc_feature 145, 431: n = A,T,C or G

SEQ ID NO: 9034 - DNA, 428 bp, Homo sapiens; identical to SEQ ID NO: 2701

SEQ ID NO: 9035 - DNA, 415 bp, Homo sapiens; identical to SEQ ID NO: 2702

SEQ ID NO: 9036 - DNA, 337 bp, Homo sapiens; identical to SEQ ID NO: 2703
  misc_feature 106, 110, 123, 125, 128, 154: n = A,T,C or G

SEQ ID NO: 9037 - DNA, 225 bp, Homo sapiens; identical to SEQ ID NO: 2704
  misc_feature 2, 107, 135, 167, 171, 180, 197, 200, 205, 214, 216: n = A,T,C or G

SEQ ID NO: 9038 - DNA, 329 bp, Homo sapiens; identical to SEQ ID NO: 2705
  misc_feature 81, 87, 125, 127, 139, 148, 154, 157, 223, 275, 291, 309,321: n = A,T,C or G

SEQ ID NO: 9039 - DNA, 295 bp, Homo sapiens; identical to SEQ ID NO: 2706
  misc_feature 14, 53, 75, 83, 91, 94, 111, 157, 160, 161, 172, 183, 196,215, 256, 269, 278, 284: n = A,T,C or G

SEQ ID NO: 9040 - DNA, 367 bp, Homo sapiens; identical to SEQ ID NO: 2707
  misc_feature 1: n = A,T,C or G

SEQ ID NO: 9041 - DNA, 339 bp, Homo sapiens; identical to SEQ ID NO: 2708
  misc_feature 35, 40, 45, 51, 52, 53, 54, 73, 129, 155, 172, 189, 193,218, 220, 255, 259, 268, 269, 300, 331: n = A,T,C or G

SEQ ID NO: 9042 - DNA, 433 bp, Homo sapiens; identical to SEQ ID NO: 2709
  misc_feature 87, 218, 219, 220, 221, 222, 223, 224, 225, 226, 227, 228,229, 230, 231, 232, 233, 234, 235, 236, 237, 238, 239, 240,241, 242, 243, 244, 245, 261, 262, 263, 264, 265, 266, 267,268, 269, 270, 271, 272, 273, 274, 275, 276, 277, 278: n = A,T,C or G
  misc_feature 279, 280, 281, 282, 283, 284, 285, 286, 287, 288, 289, 290,291, 292, 293, 294: n = A,T,C or G

SEQ ID NO: 9043 - DNA, 499 bp, Homo sapiens; identical to SEQ ID NO: 2710
  misc_feature 29, 83, 95, 284, 296, 300, 315, 327, 347, 352, 353, 359,372, 374, 380, 386, 396, 400, 411, 424, 434, 435, 436, 437,439, 447, 454, 455, 459, 460, 462, 471, 482: n = A,T,C or G

SEQ ID NO: 9044 - DNA, 416 bp, Homo sapiens; identical to SEQ ID NO: 2711
  misc_feature 51, 97, 111, 124, 127, 132, 143, 336, 381: n = A,T,C or G

SEQ ID NO: 9045 - DNA, 119 bp, Homo sapiens; identical to SEQ ID NO: 2712

SEQ ID NO: 9046 - DNA, 555 bp, Homo sapiens; identical to SEQ ID NO: 2713
  misc_feature 35, 43, 62, 226, 227, 231, 232, 235, 237, 245, 259, 297,303, 333, 334, 335, 340, 344, 383, 386, 398, 399, 407, 414,420, 430, 437, 438, 439, 440, 441, 442, 443, 444, 445, 446,447, 459, 483, 484, 491, 492, 494, 495, 496, 497, 498: n = A,T,C or G
  misc_feature 505, 508, 509, 510, 512, 513, 514, 528, 540, 541, 542, 555: n = A,T,C or G

SEQ ID NO: 9047 - DNA, 519 bp, Homo sapiens; identical to SEQ ID NO: 2714
  misc_feature 3, 13, 109, 116, 133, 164, 174, 181, 186, 221, 225, 226,227, 231, 234, 278, 291, 292, 300, 322, 323, 325, 334, 355,387, 388, 393, 396, 397, 418, 420, 422, 423, 457, 472, 473,484, 485, 494, 508, 510, 517: n = A,T,C or G

SEQ ID NO: 9048 - DNA, 610 bp, Homo sapiens; identical to SEQ ID NO: 2715
  misc_feature 116, 161, 177, 189, 206, 208, 212, 241, 245, 288, 303, 314,361, 419, 429, 433, 476, 478, 521, 540, 541, 564, 567, 595: n = A,T,C or G

SEQ ID NO: 9049 - DNA, 616 bp, Homo sapiens; identical to SEQ ID NO: 2716
  misc_feature 109, 112, 165, 172, 182, 204, 210, 220, 226, 228, 246, 359,388, 421, 436, 447, 461, 496, 502, 503, 533, 541, 549, 564,572: n = A,T,C or G

SEQ ID NO: 9050 - DNA, 499 bp, Homo sapiens; identical to SEQ ID NO: 2717
  misc_feature 58, 120, 131, 132, 139, 143, 151, 154, 156, 157, 159, 165,177, 178, 185, 188, 219, 221, 270, 279, 291, 302, 319, 322,323, 327, 329, 374, 377, 380, 393, 395, 398, 399, 407, 413,419, 426, 440, 449, 477, 485: n = A,T,C or G

SEQ ID NO: 9051 - DNA, 642 bp, Homo sapiens; identical to SEQ ID NO: 2718
  misc_feature 23, 97, 99, 133, 137, 141, 142, 145, 148, 154, 165, 171,189, 192, 194, 201, 208, 241, 246, 248, 252, 258, 283, 286,311, 344, 350, 352, 356, 363, 366, 370, 373, 377, 392, 393,398, 412, 413, 417, 430, 433, 444, 458, 466, 471, 495: n = A,T,C or G
  misc_feature 499, 502, 503, 525, 527, 530, 550, 554, 575, 582, 587, 608,611: n = A,T,C or G

SEQ ID NO: 9052 - DNA, 376 bp, Homo sapiens; identical to SEQ ID NO: 2719

SEQ ID NO: 9053 - DNA, 373 bp, Homo sapiens; identical to SEQ ID NO: 2720
  misc_feature 77, 84, 115, 117, 190, 208, 283, 317: n = A,T,C or G

SEQ ID NO: 9054 - DNA, 377 bp, Homo sapiens; identical to SEQ ID NO: 2721
  misc_feature 29, 188, 189, 190: n = A,T,C or G

SEQ ID NO: 9055 - DNA, 327 bp, Homo sapiens; identical to SEQ ID NO: 2722
  misc_feature 100, 104, 124, 131, 132, 137, 138, 139, 142, 144, 145, 146,149, 156, 157, 167, 168, 169, 170, 176, 177, 179, 181, 187,188, 196, 198, 199, 208, 209, 212, 213, 214, 221, 222, 224,235, 236, 243, 249, 257, 259, 267, 268, 272, 274, 279: n = A,T,C or G
  misc_feature 280, 281, 282, 283, 284, 286, 288, 289, 295, 298, 300, 305: n = A,T,C or G

SEQ ID NO: 9056 - DNA, 315 bp, Homo sapiens; identical to SEQ ID NO: 2723
  misc_feature 6: n = A,T,C or G

SEQ ID NO: 9057 - DNA, 507 bp, Homo sapiens; identical to SEQ ID NO: 2724

SEQ ID NO: 9058 - DNA, 477 bp, Homo sapiens; identical to SEQ ID NO: 2725
  misc_feature 390, 392, 412, 420, 421, 426, 436, 440, 443, 444, 445: n = A,T,C or G

SEQ ID NO: 9059 - DNA, 474 bp, Homo sapiens; identical to SEQ ID NO: 2726
  misc_feature 100, 352, 472: n = A,T,C or G

SEQ ID NO: 9060 - DNA, 353 bp, Homo sapiens; identical to SEQ ID NO: 2727
  misc_feature 137, 223, 258, 280, 294, 310, 324: n = A,T,C or G

SEQ ID NO: 9061 - DNA, 351 bp, Homo sapiens; identical to SEQ ID NO: 2728
  misc_feature 80, 323: n = A,T,C or G

SEQ ID NO: 9062 - DNA, 491 bp, Homo sapiens; identical to SEQ ID NO: 2729
  misc_feature 381, 457, 468: n = A,T,C or G

SEQ ID NO: 9063 - DNA, 590 bp, Homo sapiens; identical to SEQ ID NO: 2730
  misc_feature 26, 59, 130, 133, 146, 147, 155, 170, 175, 189, 194, 197,202, 240, 254, 259, 273, 282, 285, 290, 293, 302, 311, 312,315, 327, 329, 341, 342, 345, 355, 363, 374, 383, 386, 391,394, 402, 405, 414, 418, 427, 429, 435, 440, 442, 448: n = A,T,C or G
  misc_feature 449, 453, 459, 461, 468, 469, 472, 474, 476, 482, 491, 493,495, 502, 503, 504, 509, 510, 516, 517, 521, 532, 543, 545,548, 549, 552, 554, 555, 556, 573, 575, 577, 578: n = A,T,C or G

SEQ ID NO: 9064 - DNA, 249 bp, Homo sapiens; identical to SEQ ID NO: 2731
  misc_feature 8, 94, 99, 105, 160, 179, 188, 223, 246: n = A,T,C or G

SEQ ID NO: 9065 - DNA, 194 bp, Homo sapiens; identical to SEQ ID NO: 2732
  misc_feature 11, 16, 40, 43, 49, 96: n = A,T,C or G

SEQ ID NO: 9066 - DNA, 614 bp, Homo sapiens; identical to SEQ ID NO: 2733
  misc_feature 12, 16, 18, 20, 23, 43, 45, 64, 65, 66, 75, 110, 188, 203,291, 323, 328, 331, 336, 372, 373, 374, 375, 377, 379, 391,392, 397, 404, 409, 412, 426, 430, 431, 440, 442, 448, 459,460, 461, 467, 488, 494, 495, 498, 499, 500, 526, 529: n = A,T,C or G
  misc_feature 538, 548, 551, 555, 560, 564, 566, 567, 568, 572, 575, 576,577, 578, 580, 581, 582, 585, 600: n = A,T,C or G

SEQ ID NO: 9067 - DNA, 451 bp, Homo sapiens; identical to SEQ ID NO: 2734
  misc_feature 80, 268: n = A,T,C or G

SEQ ID NO: 9068 - DNA, 400 bp, Homo sapiens; identical to SEQ ID NO: 2735
  misc_feature 99: n = A,T,C or G

SEQ ID NO: 9069 - DNA, 159 bp, Homo sapiens; identical to SEQ ID NO: 2736
  misc_feature 137: n = A,T,C or G

SEQ ID NO: 9070 - DNA, 520 bp, Homo sapiens; identical to SEQ ID NO: 2737
  misc_feature 492, 511: n = A,T,C or G

SEQ ID NO: 9071 - DNA, 554 bp, Homo sapiens; identical to SEQ ID NO: 2738
  misc_feature 77, 102, 110, 247, 315, 342, 352, 363, 376, 391, 421, 435,450, 484, 496, 501, 509, 512, 515, 517, 519, 526, 535: n = A,T,C or G

SEQ ID NO: 9072 - DNA, 474 bp, Homo sapiens; identical to SEQ ID NO: 2739
  misc_feature 2, 101, 270, 326, 366: n = A,T,C or G

SEQ ID NO: 9073 - DNA, 279 bp, Homo sapiens; identical to SEQ ID NO: 2740
  misc_feature 2, 204, 206, 218, 223: n = A,T,C or G

SEQ ID NO: 9074 - DNA, 345 bp, Homo sapiens; identical to SEQ ID NO: 2741
  misc_feature 6: n = A,T,C or G

SEQ ID NO: 9075 - DNA, 467 bp, Homo sapiens; identical to SEQ ID NO: 2742
  misc_feature 283, 310, 323, 341, 371, 374, 380, 394, 410, 416, 419, 433,436, 444, 445, 452, 453, 456, 457: n = A,T,C or G

SEQ ID NO: 9076 - DNA, 445 bp, Homo sapiens; identical to SEQ ID NO: 2743
  misc_feature 131, 134, 135, 136, 137, 149, 150, 152, 153, 154, 168, 170,179, 181, 182, 185, 188, 189, 191, 192, 193, 196, 199, 201,204, 205, 213, 214, 217, 218, 219, 224, 225, 243, 244, 245,246, 247, 248, 250, 251, 252, 260, 262, 264, 267, 268: n = A,T,C or G
  misc_feature 269, 285, 287, 288, 290, 294, 295, 296, 297, 309, 313, 314,317, 318, 330, 331, 334, 335, 339, 343, 346, 349, 351, 353,360, 363, 365, 366, 372, 375, 378, 380, 381, 389, 393, 400,408, 410, 415, 416, 428: n = A,T,C or G

SEQ ID NO: 9077 - DNA, 455 bp, Homo sapiens; identical to SEQ ID NO: 2744
  misc_feature 218, 271, 417: n = A,T,C or G

SEQ ID NO: 9078 - DNA, 264 bp, Homo sapiens; identical to SEQ ID NO: 2745
  misc_feature 211, 249: n = A,T,C or G

SEQ ID NO: 9079 - DNA, 357 bp, Homo sapiens; identical to SEQ ID NO: 2746
  misc_feature 135: n = A,T,C or G

SEQ ID NO: 9080 - DNA, 483 bp, Homo sapiens; identical to SEQ ID NO: 2747
  misc_feature 17, 24, 181, 234, 270, 274, 283, 285, 286, 292, 296, 308,314, 327, 329, 348, 352, 359, 361, 365, 383, 387, 393, 397,408, 414, 420, 422, 424, 426, 427, 428, 431, 432, 434, 445,446, 451, 458, 476: n = A,T,C or G

SEQ ID NO: 9081 - DNA, 327 bp, Homo sapiens; identical to SEQ ID NO: 2748
  misc_feature 256, 267, 272, 280, 284, 288, 300, 306, 314, 316: n = A,T,C or G

SEQ ID NO: 9082 - DNA, 394 bp, Homo sapiens; identical to SEQ ID NO: 2749
  misc_feature 245, 252, 267, 273, 281, 283, 291, 294, 315, 335, 347, 361,365, 371: n = A,T,C or G

SEQ ID NO: 9083 - DNA, 273 bp, Homo sapiens; identical to SEQ ID NO: 2750

SEQ ID NO: 9084 - DNA, 159 bp, Homo sapiens; identical to SEQ ID NO: 2751
  misc_feature 24, 32, 91: n = A,T,C or G

SEQ ID NO: 9085 - DNA, 396 bp, Homo sapiens; identical to SEQ ID NO: 2752
  misc_feature 98, 305, 328, 390: n = A,T,C or G

SEQ ID NO: 9086 - DNA, 453 bp, Homo sapiens; identical to SEQ ID NO: 2753
  misc_feature 439: n = A,T,C or G

SEQ ID NO: 9087 - DNA, 544 bp, Homo sapiens; identical to SEQ ID NO: 2754
  misc_feature 72, 77, 84, 87, 104, 105, 107, 110, 115, 121, 138, 140, 148,168, 174, 205, 208, 210, 226, 252, 255, 260, 263, 268, 270,271, 277, 285, 300, 307, 311, 312, 313, 315, 317, 320, 324,330, 332, 347, 350, 375, 381, 383, 385, 387, 395: n = A,T,C or G
  misc_feature 401, 412, 418, 434, 444, 445, 451, 452, 453, 463, 465, 470,471, 473, 474, 480, 490, 493, 502, 505, 507, 509, 510, 511,513, 517, 529, 541: n = A,T,C or G

SEQ ID NO: 9088 - DNA, 304 bp, Homo sapiens; identical to SEQ ID NO: 2755
  misc_feature 19, 22, 25, 30, 33, 39, 135: n = A,T,C or G

SEQ ID NO: 9089 - DNA, 162 bp, Homo sapiens; identical to SEQ ID NO: 2756
  misc_feature 83, 129, 138: n = A,T,C or G

SEQ ID NO: 9090 - DNA, 433 bp, Homo sapiens; identical to SEQ ID NO: 2757
  misc_feature 417: n = A,T,C or G

SEQ ID NO: 9091 - DNA, 460 bp, Homo sapiens; identical to SEQ ID NO: 2758
  misc_feature 457: n = A,T,C or G

SEQ ID NO: 9092 - DNA, 417 bp, Homo sapiens; identical to SEQ ID NO: 2759

SEQ ID NO: 9093 - DNA, 210 bp, Homo sapiens; identical to SEQ ID NO: 2760
  misc_feature 56, 116, 118, 124, 126, 164, 182, 199: n = A,T,C or G

SEQ ID NO: 9094 - DNA, 363 bp, Homo sapiens; identical to SEQ ID NO: 2762
  misc_feature 2, 3, 46, 48, 339: n = A,T,C or G

SEQ ID NO: 9095 - DNA, 210 bp, Homo sapiens; identical to SEQ ID NO: 2763

SEQ ID NO: 9096 - DNA, 203 bp, Homo sapiens; identical to SEQ ID NO: 2764
  misc_feature 5, 11, 16, 18, 32, 39, 53, 65, 67, 73, 74, 75, 88, 95, 96,97, 103, 120, 124, 125, 130, 131, 132, 134, 137, 138, 143,146, 147, 148, 149, 164, 168, 178, 179, 183, 203: n = A,T,C or G

SEQ ID NO: 9097 - DNA, 185 bp, Homo sapiens; identical to SEQ ID NO: 2765
  misc_feature 18, 182: n = A,T,C or G

SEQ ID NO: 9098 - DNA, 392 bp, Homo sapiens; identical to SEQ ID NO: 2766
  misc_feature 8, 341, 350, 377, 392: n = A,T,C or G

SEQ ID NO: 9099 - DNA, 221 bp, Homo sapiens; identical to SEQ ID NO: 2767
  misc_feature 161, 175: n = A,T,C or G

SEQ ID NO: 9100 - DNA, 183 bp, Homo sapiens; identical to SEQ ID NO: 2768
  misc_feature 131, 146: n = A,T,C or G

SEQ ID NO: 9101 - DNA, 347 bp, Homo sapiens; identical to SEQ ID NO: 2769

SEQ ID NO: 9102 - DNA, 119 bp, Homo sapiens; identical to SEQ ID NO: 2770
  misc_feature 87, 108: n = A,T,C or G

SEQ ID NO: 9103 - DNA, 365 bp, Homo sapiens; identical to SEQ ID NO: 2771

SEQ ID NO: 9104 - DNA, 309 bp, Homo sapiens; identical to SEQ ID NO: 2772
  misc_feature 300: n = A,T,C or G

SEQ ID NO: 9105 - DNA, 388 bp, Homo sapiens; identical to SEQ ID NO: 2773
  misc_feature 106, 126, 286, 290, 292, 343, 373: n = A,T,C or G

SEQ ID NO: 9106 - DNA, 112 bp, Homo sapiens; identical to SEQ ID NO: 2775
  misc_feature 17, 69, 70, 90, 96, 97: n = A,T,C or G

SEQ ID NO: 9107 - DNA, 429 bp, Homo sapiens; identical to SEQ ID NO: 2776
  misc_feature 45, 64, 86, 88, 95, 96, 105, 107, 108, 109, 116, 131, 134,140, 161, 183, 186, 189, 200, 201, 203, 206, 207, 208, 216,221, 222, 234, 239, 252, 254, 255, 261, 266, 276, 285, 299,324, 332, 343, 344, 345, 347, 349, 396, 397, 404, 405: n = A,T,C or G
  misc_feature 410, 425: n = A,T,C or G

SEQ ID NO: 9108 - DNA, 254 bp, Homo sapiens; identical to SEQ ID NO: 2777
  misc_feature 28, 30, 45, 46, 60, 63, 64, 72, 73, 74, 75, 76, 77, 78, 79,80, 81, 82, 83, 84, 85, 86, 87, 88, 89, 90, 91, 92, 93,94, 95, 96, 97, 98, 99, 100, 101, 102, 103, 104, 105, 106,107, 108, 109, 110, 111, 112, 113, 114, 115, 116, 117, 122: n = A,T,C or G
  misc_feature 125, 134, 162, 168, 178, 196, 198: n = A,T,C or G

SEQ ID NO: 9109 - DNA, 259 bp, Homo sapiens; identical to SEQ ID NO: 2778
  misc_feature 73, 77, 95, 97, 110, 156, 158, 175, 216, 224, 232, 238: n = A,T,C or G

SEQ ID NO: 9110 - DNA, 330 bp, Homo sapiens; identical to SEQ ID NO: 2779
  misc_feature 5, 61, 139, 172, 175, 208, 214, 240, 305, 308, 315: n = A,T,C or G

SEQ ID NO: 9111 - DNA, 171 bp, Homo sapiens; identical to SEQ ID NO: 2780
  misc_feature 73, 75, 92, 112, 156, 160: n = A,T,C or G

SEQ ID NO: 9112 - DNA, 819 bp, Homo sapiens; identical to SEQ ID NO: 2781
  misc_feature 9, 40, 54, 55, 57, 62, 63, 65, 80, 83, 87, 88, 90, 100, 111,114, 121, 126, 128, 136, 137, 147, 154, 156, 160, 162, 163,167, 170, 180, 184, 185, 191, 197, 198, 207, 210, 212, 218,224, 228, 232, 240, 242, 244, 248, 250, 254, 257: n = A,T,C or G
  misc_feature 258, 301, 303, 319, 331, 337, 340, 342, 344, 346, 352, 355,356, 357, 358, 363, 367, 370, 373, 387, 401, 422, 423, 436,437, 440, 441, 443, 448, 449, 454, 467, 479, 480, 483, 491,494, 501, 517, 518, 519, 520, 529, 534, 536, 542, 552: n = A,T,C or G
  misc_feature 560, 567, 568, 580, 582, 583, 594, 603, 605, 606, 609, 618,627, 633, 644, 645, 647, 655, 662, 664, 670, 682, 685, 688,705, 711, 736, 738, 739, 746, 747, 748, 749, 753, 754, 755,756, 757, 758, 759, 760, 761, 762, 770, 771, 772, 774: n = A,T,C or G
  misc_feature 794, 800, 801, 813: n = A,T,C or G

SEQ ID NO: 9113 - DNA, 452 bp, Homo sapiens; identical to SEQ ID NO: 2782
  misc_feature 53: n = A,T,C or G

SEQ ID NO: 9114 - DNA, 479 bp, Homo sapiens; identical to SEQ ID NO: 2783

SEQ ID NO: 9115 - DNA, 298 bp, Homo sapiens; identical to SEQ ID NO: 2784
  misc_feature 284: n = A,T,C or G

SEQ ID NO: 9116 - DNA, 516 bp, Homo sapiens; identical to SEQ ID NO: 2785
  misc_feature 473: n = A,T,C or G

SEQ ID NO: 9117 - DNA, 320 bp, Homo sapiens; identical to SEQ ID NO: 2786

SEQ ID NO: 9118 - DNA, 464 bp, Homo sapiens; identical to SEQ ID NO: 2787

SEQ ID NO: 9119 - DNA, 440 bp, Homo sapiens; identical to SEQ ID NO: 2788
  misc_feature 51, 104, 134, 169, 181, 194, 196, 211, 212, 218, 226, 235,240, 241, 242, 245, 251, 256, 259, 263, 270, 286, 293, 299,302, 310, 319, 333, 334, 335, 343, 348, 360, 366, 374, 379,387, 409, 415, 417, 419, 420, 421, 436, 440: n = A,T,C or G

SEQ ID NO: 9120 - DNA, 417 bp, Homo sapiens; identical to SEQ ID NO: 2789
  misc_feature 61, 65, 98, 114, 141, 213, 245, 256, 259, 267, 277, 285,301, 303, 313, 317, 318, 322, 323, 324, 332, 339, 345, 350,352, 353, 360, 365, 366, 368, 369, 370, 380, 382, 383, 385,406, 407: n = A,T,C or G

SEQ ID NO: 9121 - DNA, 496 bp, Homo sapiens; identical to SEQ ID NO: 2790
  misc_feature 24, 162, 272, 308, 326, 332, 336, 343, 357, 375, 376, 384,390, 391, 396, 397, 398, 402, 403, 404, 411, 421, 422, 423,424, 438, 445, 446, 448, 449, 455, 457, 472, 479, 481, 482,484, 485, 489: n = A,T,C or G

SEQ ID NO: 9122 - DNA, 383 bp, Homo sapiens; identical to SEQ ID NO: 2791

SEQ ID NO: 9123 - DNA, 468 bp, Homo sapiens; identical to SEQ ID NO: 2792
  misc_feature 161, 170, 253, 267, 289, 290, 304, 310, 323, 332, 339, 349,416, 429, 432, 438: n = A,T,C or G

SEQ ID NO: 9124 - DNA, 147 bp, Homo sapiens; identical to SEQ ID NO: 2793
  misc_feature 14, 25, 56, 67, 71, 81, 111, 117, 142: n = A,T,C or G

SEQ ID NO: 9125 - DNA, 228 bp, Homo sapiens; identical to SEQ ID NO: 2794
  misc_feature 44, 79, 105, 112, 115, 120, 134, 139, 197, 212, 218: n = A,T,C or G

SEQ ID NO: 9126 - DNA, 440 bp, Homo sapiens; identical to SEQ ID NO: 2795

SEQ ID NO: 9127 - DNA, 217 bp, Homo sapiens; identical to SEQ ID NO: 2796
  misc_feature 35, 61, 68, 75, 78, 81, 87, 93, 118, 132, 142, 161, 170,179, 184, 209: n = A,T,C or G

SEQ ID NO: 9128 - DNA, 366 bp, Homo sapiens; identical to SEQ ID NO: 2797
  misc_feature 4, 355: n = A,T,C or G

SEQ ID NO: 9129 - DNA, 489 bp, Homo sapiens; identical to SEQ ID NO: 2798
  misc_feature 427, 469: n = A,T,C or G

SEQ ID NO: 9130 - DNA, 332 bp, Homo sapiens; identical to SEQ ID NO: 2799

SEQ ID NO: 9131 - DNA, 426 bp, Homo sapiens; identical to SEQ ID NO: 2800
  misc_feature 383: n = A,T,C or G

SEQ ID NO: 9132 - DNA, 488 bp, Homo sapiens; identical to SEQ ID NO: 2801
  misc_feature 12, 420, 422, 423, 436, 472: n = A,T,C or G

SEQ ID NO: 9133 - DNA, 353 bp, Homo sapiens; identical to SEQ ID NO: 2802
  misc_feature 1, 2, 4, 6, 10, 11, 12, 15, 26, 39, 42, 55, 57, 58, 59, 75,77, 78, 82, 88, 100, 115, 120, 129, 138, 141, 166, 176,180, 187, 189, 216, 221, 230, 231, 232, 233, 234, 235, 236,237, 238, 239, 240, 241, 242, 243, 244, 245, 246, 247: n = A,T,C or G
  misc_feature 248, 249, 250, 251, 252, 253, 255, 256, 257, 271, 273, 274,280, 292, 299, 301, 304, 308, 312, 316, 317, 319, 322, 332,336, 342: n = A,T,C or G

SEQ ID NO: 9134 - DNA, 280 bp, Homo sapiens; identical to SEQ ID NO: 2803
  misc_feature 1, 21: n = A,T,C or G

SEQ ID NO: 9135 - DNA, 508 bp, Homo sapiens; identical to SEQ ID NO: 2804
  misc_feature 336, 349, 392, 395, 407, 408, 439, 447, 455, 461, 476, 495: n = A,T,C or G

SEQ ID NO: 9136 - DNA, 380 bp, Homo sapiens; identical to SEQ ID NO: 2805
  misc_feature 18, 178, 203, 244, 362: n = A,T,C or G

SEQ ID NO: 9137 - DNA, 367 bp, Homo sapiens; identical to SEQ ID NO: 2806

SEQ ID NO: 9138 - DNA, 412 bp, Homo sapiens; identical to SEQ ID NO: 2807
  misc_feature 199, 227, 234, 274, 311, 338, 349, 354, 367: n = A,T,C or G

SEQ ID NO: 9139 - DNA, 446 bp, Homo sapiens; identical to SEQ ID NO: 2808

SEQ ID NO: 9140 - DNA, 366 bp, Homo sapiens; identical to SEQ ID NO: 2810

SEQ ID NO: 9141 - DNA, 376 bp, Homo sapiens; identical to SEQ ID NO: 2811
  misc_feature 104, 188: n = A,T,C or G

SEQ ID NO: 9142 - DNA, 349 bp, Homo sapiens; identical to SEQ ID NO: 2812
  misc_feature 1, 2, 18, 26, 31, 32, 41, 48, 55, 61, 72, 86, 104, 128, 129,146, 148, 156, 160, 163, 166, 171, 173, 194, 197, 207, 226,232, 237, 239, 256, 257, 272, 281, 287, 290, 292, 319, 323,331, 333, 339, 346: n = A,T,C or G

SEQ ID NO: 9143 - DNA, 144 bp, Homo sapiens; identical to SEQ ID NO: 2813
  misc_feature 35, 37, 43, 46, 49, 95, 128, 138: n = A,T,C or G

SEQ ID NO: 9144 - DNA, 185 bp, Homo sapiens; identical to SEQ ID NO: 2814
  misc_feature 21, 34, 55, 92, 118, 134, 147, 159, 163, 166: n = A,T,C or G

SEQ ID NO: 9145 - DNA, 157 bp, Homo sapiens; identical to SEQ ID NO: 2815
  misc_feature 31, 46, 60, 62, 73, 84, 89, 98, 100, 149, 150: n = A,T,C or G

SEQ ID NO: 9146 - DNA, 257 bp, Homo sapiens; identical to SEQ ID NO: 2816
  misc_feature 14, 20, 23, 25, 55, 60, 61, 62, 63, 64, 66, 74, 87, 103,105, 108, 113, 118, 124, 125, 126, 128, 138, 145, 156, 158,161, 169, 177, 191, 194, 202, 203, 229, 244, 249: n = A,T,C or G

SEQ ID NO: 9147 - DNA, 367 bp, Homo sapiens; identical to SEQ ID NO: 2817
  misc_feature 150, 201, 228, 241, 254, 262, 266, 269, 278, 301, 310, 325,334: n = A,T,C or G

SEQ ID NO: 9148 - DNA, 171 bp, Homo sapiens; identical to SEQ ID NO: 2818

SEQ ID NO: 9149 - DNA, 347 bp, Homo sapiens; identical to SEQ ID NO: 2819

SEQ ID NO: 9150 - DNA, 205 bp, Homo sapiens; identical to SEQ ID NO: 2820
  misc_feature 65, 68, 72, 95, 98, 102, 106, 109, 120, 122, 131, 134, 147,152, 156, 166, 168, 169, 176, 185, 187, 196, 200: n = A,T,C or G

SEQ ID NO: 9151 - DNA, 230 bp, Homo sapiens; identical to SEQ ID NO: 2821
  misc_feature 171, 192, 197, 206, 210, 217: n = A,T,C or G

SEQ ID NO: 9152 - DNA, 489 bp, Homo sapiens; identical to SEQ ID NO: 2822
  misc_feature 430: n = A,T,C or G

SEQ ID NO: 9153 - DNA, 490 bp, Homo sapiens; identical to SEQ ID NO: 2823
  misc_feature 23, 24, 399, 449, 470: n = A,T,C or G

SEQ ID NO: 9154 - DNA, 333 bp, Homo sapiens; identical to SEQ ID NO: 2824
  misc_feature 33, 287, 305: n = A,T,C or G

SEQ ID NO: 9155 - DNA, 431 bp, Homo sapiens; identical to SEQ ID NO: 2825
  misc_feature 38, 50, 51, 52, 60, 65, 66, 76, 82, 100, 105, 107, 180, 187,210, 256, 261, 273, 287, 288, 291, 299, 300, 302, 324, 370,371, 379, 390, 400: n = A,T,C or G

SEQ ID NO: 9156 - DNA, 313 bp, Homo sapiens; identical to SEQ ID NO: 2826
  misc_feature 14, 20, 24, 50, 51, 53, 58, 61, 73, 95, 117, 134, 202, 222,265, 267, 270, 272, 287, 292, 301, 308: n = A,T,C or G

SEQ ID NO: 9157 - DNA, 429 bp, Homo sapiens; identical to SEQ ID NO: 2827

SEQ ID NO: 9158 - DNA, 376 bp, Homo sapiens; identical to SEQ ID NO: 2828
  misc_feature 340: n = A,T,C or G

SEQ ID NO: 9159 - DNA, 392 bp, Homo sapiens; identical to SEQ ID NO: 2829
  misc_feature 27, 142, 146, 147, 149, 150, 151, 153, 154, 155, 158, 168,171, 182, 183, 190, 193, 194, 195, 196, 197, 199, 200, 201,206, 207, 209, 210, 211, 213, 214, 215, 216, 221, 222, 225,231, 232, 235, 236, 237, 238, 239, 243, 246, 251, 252: n = A,T,C or G
  misc_feature 253, 254, 255, 258, 259, 260, 261, 262, 263, 264, 269, 270,272, 275, 276, 277, 278, 279, 283, 286, 288, 292, 295, 302,322, 327, 328, 336, 337, 338, 340, 341, 342, 349, 351, 353,354, 362, 363, 365, 369, 372, 377, 379: n = A,T,C or G

SEQ ID NO: 9160 - DNA, 460 bp, Homo sapiens; identical to SEQ ID NO: 2830
  misc_feature 264, 266, 268, 288, 299, 302, 303, 305, 311, 316, 318, 320,321, 324, 330, 333, 346, 360, 382, 383, 387, 389, 390, 393,400, 423, 445: n = A,T,C or G

SEQ ID NO: 9161 - DNA, 453 bp, Homo sapiens; identical to SEQ ID NO: 2831
  misc_feature 95, 104, 108, 113, 118, 121, 129, 136, 137, 151, 155, 173,176, 192, 208, 222, 223, 229, 240, 242, 243, 245, 252, 253,257, 259, 267, 268, 269, 270, 277, 278, 282, 284, 285, 287,289, 306, 307, 308, 318, 322, 323, 326, 330, 332, 336: n = A,T,C or G
  misc_feature 343, 346, 358, 359, 368, 370, 377, 387, 389, 392, 411, 412,421, 422, 436, 440, 444: n = A,T,C or G

SEQ ID NO: 9162 - DNA, 523 bp, Homo sapiens; identical to SEQ ID NO: 2832
  misc_feature 75, 77, 246, 273, 275, 282, 304, 321, 322, 325, 327, 331,336, 341, 356, 361, 384, 401, 410, 425, 449, 452, 458, 460,471, 472, 474, 476, 477, 478, 506, 509, 511, 512, 514: n = A,T,C or G

SEQ ID NO: 9163 - DNA, 567 bp, Homo sapiens; identical to SEQ ID NO: 2833
  misc_feature 249, 264, 283, 287, 301, 306, 317, 319, 322, 326, 328, 329,337, 338, 341, 343, 351, 352, 353, 355, 356, 358, 369, 378,380, 395, 401, 402, 412, 421, 422, 428, 430, 440, 444, 456,462, 463, 468, 469, 470, 474, 482, 484, 503, 525, 540: n = A,T,C or G
  misc_feature 544, 548, 550, 551, 552, 556, 563: n = A,T,C or G

SEQ ID NO: 9164 - DNA, 139 bp, Homo sapiens; identical to SEQ ID NO: 2834
  misc_feature 5, 15, 38, 44, 55, 59, 64, 67, 78, 85, 87, 103, 105, 110,128, 130: n = A,T,C or G

SEQ ID NO: 9165 - DNA, 294 bp, Homo sapiens; identical to SEQ ID NO: 2835
  misc_feature 212: n = A,T,C or G

SEQ ID NO: 9166 - DNA, 525 bp, Homo sapiens; identical to SEQ ID NO: 2836
  misc_feature 173, 194, 222, 266, 294, 321, 342, 352, 355, 369, 372, 381,382, 396, 397, 409, 417, 423, 429, 432, 443, 446, 453, 454,462, 463, 466, 479, 481, 482, 499, 505, 509, 519: n = A,T,C or G

SEQ ID NO: 9167 - DNA, 457 bp, Homo sapiens; identical to SEQ ID NO: 2837
  misc_feature 266, 442: n = A,T,C or G

SEQ ID NO: 9168 - DNA, 404 bp, Homo sapiens; identical to SEQ ID NO: 2838

SEQ ID NO: 9169 - DNA, 466 bp, Homo sapiens; identical to SEQ ID NO: 2839
  misc_feature 376: n = A,T,C or G

SEQ ID NO: 9170 - DNA, 527 bp, Homo sapiens; identical to SEQ ID NO: 2840
  misc_feature 274, 303, 446, 459, 476, 479, 512: n = A,T,C or G

SEQ ID NO: 9171 - DNA, 422 bp, Homo sapiens; identical to SEQ ID NO: 2841

SEQ ID NO: 9172 - DNA, 419 bp, Homo sapiens; identical to SEQ ID NO: 2842
  misc_feature 2, 268, 273, 291, 293, 296, 302, 318, 319, 322, 334, 336,340, 341, 352, 354, 364, 366, 368, 372, 373, 377, 381, 385,391, 392, 393, 395, 403, 405, 406, 407, 415: n = A,T,C or G

SEQ ID NO: 9173 - DNA, 496 bp, Homo sapiens; identical to SEQ ID NO: 2843
  misc_feature 229, 276, 396, 403, 416, 421, 423, 426, 434, 458, 469, 477,482: n = A,T,C or G

SEQ ID NO: 9174 - DNA, 467 bp, Homo sapiens; identical to SEQ ID NO: 2844
  misc_feature 30, 33, 56, 68, 70, 79, 97, 129, 132, 168, 192, 194, 195,228, 317, 319, 349, 353, 362, 369, 375, 385, 420, 428, 438,447, 460: n = A,T,C or G

SEQ ID NO: 9175 - DNA, 381 bp, Homo sapiens; identical to SEQ ID NO: 2845
  misc_feature 60, 62, 95, 97, 99, 127, 158, 163, 196, 215, 250, 318, 336,360, 366: n = A,T,C or G

SEQ ID NO: 9176 - DNA, 354 bp, Homo sapiens; identical to SEQ ID NO: 2846

SEQ ID NO: 9177 - DNA, 283 bp, Homo sapiens; identical to SEQ ID NO: 2847
  misc_feature 3, 23, 25, 56, 80, 81, 91, 101, 117, 133, 253, 257, 259, 265: n = A,T,C or G

SEQ ID NO: 9178 - DNA, 569 bp, Homo sapiens; identical to SEQ ID NO: 2848
  misc_feature 8, 11, 14, 15, 18, 19, 28, 29, 45, 47, 52, 59, 66, 68, 76,77, 78, 89, 91, 92, 97, 106, 113, 114, 116, 118, 126, 131,133, 134, 136, 144, 166, 170, 171, 174, 175, 177, 178, 179,186, 197, 198, 199, 206, 209, 210, 216, 235, 241, 260: n = A,T,C or G
  misc_feature 264, 266, 272, 273, 275, 278, 281, 312, 313, 325, 328, 333,348, 349, 351, 355, 361, 371, 374, 384, 388, 406, 407, 419,425, 432, 442, 443, 444, 459, 465, 468, 474, 475, 490, 496,497, 502, 510, 512, 513, 517, 519, 521, 522, 523, 524: n = A,T,C or G
  misc_feature 533, 538, 544, 551, 552, 553, 555, 565: n = A,T,C or G

SEQ ID NO: 9179 - DNA, 157 bp, Homo sapiens; identical to SEQ ID NO: 2849
  misc_feature 16, 25, 35, 40, 41, 42, 44, 45, 48, 50, 55: n = A,T,C or G

SEQ ID NO: 9180 - DNA, 490 bp, Homo sapiens; identical to SEQ ID NO: 2850
  misc_feature 11, 18, 19, 29, 31, 36, 39, 76, 89, 124, 182, 210, 220, 260,262, 267, 270, 279, 304, 332, 341, 342, 343, 345, 348, 349,362, 378, 384, 402, 412, 419, 423, 425, 457, 465, 473, 474: n = A,T,C or G

SEQ ID NO: 9181 - DNA, 320 bp, Homo sapiens; identical to SEQ ID NO: 2851
  misc_feature 2, 4, 18, 31, 45, 48, 51, 62, 78, 79, 117, 124, 125, 134,136, 137, 154, 157, 182, 189, 190, 191, 216, 224, 248, 275,281, 282, 298, 309: n = A,T,C or G

SEQ ID NO: 9182 - DNA, 320 bp, Homo sapiens; identical to SEQ ID NO: 2852

SEQ ID NO: 9183 - DNA, 377 bp, Homo sapiens; identical to SEQ ID NO: 2853
  misc_feature 4, 19, 48, 197, 206, 207, 218, 278, 282, 301, 302: n = A,T,C or G

SEQ ID NO: 9184 - DNA, 419 bp, Homo sapiens; identical to SEQ ID NO: 2854
  misc_feature 140, 195, 216, 239, 257, 262, 305, 326, 333, 341, 350, 358,375, 378, 389, 391, 392, 393, 396, 403: n = A,T,C or G

SEQ ID NO: 9185 - DNA, 351 bp, Homo sapiens; identical to SEQ ID NO: 2855
  misc_feature 185, 246, 280: n = A,T,C or G

SEQ ID NO: 9186 - DNA, 444 bp, Homo sapiens; identical to SEQ ID NO: 2856
  misc_feature 38, 51, 53, 59, 64, 68, 72, 79, 80, 85, 86, 87, 92, 95, 116,124, 129, 133, 154, 269, 275, 277, 318, 326, 386, 392, 419,433: n = A,T,C or G

SEQ ID NO: 9187 - DNA, 167 bp, Homo sapiens; identical to SEQ ID NO: 2857
  misc_feature 56, 79, 86, 100, 103, 117, 142, 149: n = A,T,C or G

SEQ ID NO: 9188 - DNA, 474 bp, Homo sapiens; identical to SEQ ID NO: 2858
  misc_feature 73, 385, 445: n = A,T,C or G

SEQ ID NO: 9189 - DNA, 307 bp, Homo sapiens; identical to SEQ ID NO: 2859
  misc_feature 38, 39, 68, 115: n = A,T,C or G

SEQ ID NO: 9190 - DNA, 232 bp, Homo sapiens; identical to SEQ ID NO: 2860
  misc_feature 10, 43, 89, 125, 171, 181, 216: n = A,T,C or G

SEQ ID NO: 9191 - DNA, 412 bp, Homo sapiens; identical to SEQ ID NO: 2861
  misc_feature 21, 60, 68, 72, 76, 132: n = A,T,C or G

SEQ ID NO: 9192 - DNA, 462 bp, Homo sapiens; identical to SEQ ID NO: 2862
  misc_feature 382, 462: n = A,T,C or G

SEQ ID NO: 9193 - DNA, 405 bp, Homo sapiens; identical to SEQ ID NO: 2863

SEQ ID NO: 9194 - DNA, 450 bp, Homo sapiens; identical to SEQ ID NO: 2864
  misc_feature 132, 299, 425, 436, 438: n = A,T,C or G

SEQ ID NO: 9195 - DNA, 159 bp, Homo sapiens; identical to SEQ ID NO: 2865
  misc_feature 21, 29: n = A,T,C or G

SEQ ID NO: 9196 - DNA, 298 bp, Homo sapiens; identical to SEQ ID NO: 2866

SEQ ID NO: 9197 - DNA, 553 bp, Homo sapiens; identical to SEQ ID NO: 2867
  misc_feature 14, 266, 329, 330, 331, 332, 333, 334, 335, 336, 337, 338,339, 340, 341, 342, 343, 344, 345, 346, 347, 348, 349, 350,351, 352, 353, 354, 355, 356, 357, 358, 359, 360, 361, 362,363, 364, 365, 366, 367, 368, 369, 370, 371, 372, 373: n = A,T,C or G
  misc_feature 374, 375, 376, 377, 378, 379, 380, 381, 382, 383, 384, 385,386, 387, 388, 389, 390, 391, 392, 393, 394, 395, 396, 397,398, 399, 400, 401, 402, 403, 404, 405, 406, 407, 408, 409,410, 411, 434, 435, 436, 437, 438, 439, 440, 441, 442: n = A,T,C or G
  misc_feature 443, 444, 445, 446, 447, 448, 449, 450, 451, 452, 453, 454,455, 456, 457, 458, 459, 460, 461, 462, 463: n = A,T,C or G

SEQ ID NO: 9198 - DNA, 611 bp, Homo sapiens; identical to SEQ ID NO: 2868

SEQ ID NO: 9199 - DNA, 524 bp, Homo sapiens; identical to SEQ ID NO: 2869
  misc_feature 9: n = A,T,C or G

SEQ ID NO: 9200 - DNA, 396 bp, Homo sapiens; identical to SEQ ID NO: 2871

SEQ ID NO: 9201 - DNA, 236 bp, Homo sapiens; identical to SEQ ID NO: 2872
  misc_feature 23, 64: n = A,T,C or G

SEQ ID NO: 9202 - DNA, 419 bp, Homo sapiens; identical to SEQ ID NO: 2873
  misc_feature 324, 384, 411: n = A,T,C or G

SEQ ID NO: 9203 - DNA, 324 bp, Homo sapiens; identical to SEQ ID NO: 2874

SEQ ID NO: 9204 - DNA, 385 bp, Homo sapiens; identical to SEQ ID NO: 2875
  misc_feature 83, 86, 88, 288: n = A,T,C or G

SEQ ID NO: 9205 - DNA, 625 bp, Homo sapiens; identical to SEQ ID NO: 2876
  misc_feature 463, 610: n = A,T,C or G

SEQ ID NO: 9206 - DNA, 357 bp, Homo sapiens; identical to SEQ ID NO: 2877
  misc_feature 349: n = A,T,C or G

SEQ ID NO: 9207 - DNA, 308 bp, Homo sapiens; identical to SEQ ID NO: 2878

SEQ ID NO: 9208 - DNA, 528 bp, Homo sapiens; identical to SEQ ID NO: 2879

SEQ ID NO: 9209 - DNA, 328 bp, Homo sapiens; identical to SEQ ID NO: 2880

SEQ ID NO: 9210 - DNA, 567 bp, Homo sapiens; identical to SEQ ID NO: 2881

SEQ ID NO: 9211 - DNA, 462 bp, Homo sapiens; identical to SEQ ID NO: 2882
  misc_feature 200: n = A,T,C or G

SEQ ID NO: 9212 - DNA, 526 bp, Homo sapiens; identical to SEQ ID NO: 2883
  misc_feature 63, 73, 74, 75, 77, 121, 168, 173, 190, 200, 229, 235, 243,249, 280, 326, 333, 351, 354, 356, 358, 379, 411, 414, 426,432, 434, 440, 461, 490, 495, 500, 501: n = A,T,C or G

SEQ ID NO: 9213 - DNA, 378 bp, Homo sapiens; identical to SEQ ID NO: 2884

SEQ ID NO: 9214 - DNA, 456 bp, Homo sapiens; identical to SEQ ID NO: 2885
  misc_feature 33: n = A,T,C or G

SEQ ID NO: 9215 - DNA, 324 bp, Homo sapiens; identical to SEQ ID NO: 2886

SEQ ID NO: 9216 - DNA, 488 bp, Homo sapiens; identical to SEQ ID NO: 2887
  misc_feature 118, 348, 382, 398, 415, 431, 449, 453, 466: n = A,T,C or G

SEQ ID NO: 9217 - DNA, 379 bp, Homo sapiens; identical to SEQ ID NO: 2888
  misc_feature 126, 218, 244: n = A,T,C or G

SEQ ID NO: 9218 - DNA, 321 bp, Homo sapiens; identical to SEQ ID NO: 2889

SEQ ID NO: 9219 - DNA, 425 bp, Homo sapiens; identical to SEQ ID NO: 2890
  misc_feature 15: n = A,T,C or G

SEQ ID NO: 9220 - DNA, 524 bp, Homo sapiens; identical to SEQ ID NO: 2891

SEQ ID NO: 9221 - DNA, 571 bp, Homo sapiens; identical to SEQ ID NO: 2892
  misc_feature 261, 376: n = A,T,C or G

SEQ ID NO: 9222 - DNA, 417 bp, Homo sapiens; identical to SEQ ID NO: 2893

SEQ ID NO: 9223 - DNA, 235 bp, Homo sapiens; identical to SEQ ID NO: 2894
  misc_feature 79: n = A,T,C or G

SEQ ID NO: 9224 - DNA, 558 bp, Homo sapiens; identical to SEQ ID NO: 2895
  misc_feature 471: n = A,T,C or G

SEQ ID NO: 9225 - DNA, 455 bp, Homo sapiens; identical to SEQ ID NO: 2896
  misc_feature 69, 71, 143, 157, 159, 163, 168, 262, 281, 299, 315, 316,351, 354, 367, 397, 404, 425, 427, 440: n = A,T,C or G

SEQ ID NO: 9226 - DNA, 345 bp, Homo sapiens; identical to SEQ ID NO: 2897

SEQ ID NO: 9227 - DNA, 700 bp, Homo sapiens; identical to SEQ ID NO: 2898
  misc_feature 553, 578, 623, 625, 626, 630, 637, 649, 653, 666, 670, 671,678, 689: n = A,T,C or G

SEQ ID NO: 9228 - DNA, 498 bp, Homo sapiens; identical to SEQ ID NO: 2899
  misc_feature 57, 341, 416, 424, 432, 461, 468, 477: n = A,T,C or G

SEQ ID NO: 9229 - DNA, 365 bp, Homo sapiens; identical to SEQ ID NO: 2900
  misc_feature 158, 188, 191, 213: n = A,T,C or G

SEQ ID NO: 9230 - DNA, 375 bp, Homo sapiens; identical to SEQ ID NO: 2901
  misc_feature 80: n = A,T,C or G

SEQ ID NO: 9231 - DNA, 391 bp, Homo sapiens; identical to SEQ ID NO: 2902

SEQ ID NO: 9232 - DNA, 320 bp, Homo sapiens; identical to SEQ ID NO: 2903

SEQ ID NO: 9233 - DNA, 552 bp, Homo sapiens; identical to SEQ ID NO: 2904
  misc_feature 536, 545: n = A,T,C or G

SEQ ID NO: 9234 - DNA, 355 bp, Homo sapiens; identical to SEQ ID NO: 2905

SEQ ID NO: 9235 - DNA, 410 bp, Homo sapiens; identical to SEQ ID NO: 2906
  misc_feature 229, 262, 274, 322, 326, 356, 363, 386, 397: n = A,T,C or G

SEQ ID NO: 9236 - DNA, 415 bp, Homo sapiens; identical to SEQ ID NO: 2907

SEQ ID NO: 9237 - DNA, 339 bp, Homo sapiens; identical to SEQ ID NO: 2908

SEQ ID NO: 9238 - DNA, 476 bp, Homo sapiens; identical to SEQ ID NO: 2909

SEQ ID NO: 9239 - DNA, 537 bp, Homo sapiens; identical to SEQ ID NO: 2910
  misc_feature 476, 501, 507, 527: n = A,T,C or G

SEQ ID NO: 9240 - DNA, 199 bp, Homo sapiens; identical to SEQ ID NO: 2911
  misc_feature 5, 8, 18, 47, 50, 53, 122, 144, 146: n = A,T,C or G

SEQ ID NO: 9241 - DNA, 534 bp, Homo sapiens; identical to SEQ ID NO: 2912

SEQ ID NO: 9242 - DNA, 313 bp, Homo sapiens; identical to SEQ ID NO: 2913

SEQ ID NO: 9243 - DNA, 305 bp, Homo sapiens; identical to SEQ ID NO: 2914
  misc_feature 206, 259: n = A,T,C or G

SEQ ID NO: 9244 - DNA, 317 bp, Homo sapiens; identical to SEQ ID NO: 2915

SEQ ID NO: 9245 - DNA, 565 bp, Homo sapiens; identical to SEQ ID NO: 2916
  misc_feature 356, 435, 522, 528: n = A,T,C or G

SEQ ID NO: 9246 - DNA, 442 bp, Homo sapiens; identical to SEQ ID NO: 2917
  misc_feature 401: n = A,T,C or G

SEQ ID NO: 9247 - DNA, 606 bp, Homo sapiens; identical to SEQ ID NO: 2918
  misc_feature 474, 554, 582: n = A,T,C or G

SEQ ID NO: 9248 - DNA, 340 bp, Homo sapiens; identical to SEQ ID NO: 2919
  misc_feature 189, 303, 310: n = A,T,C or G

SEQ ID NO: 9249 - DNA, 406 bp, Homo sapiens; identical to SEQ ID NO: 2920
  misc_feature 358: n = A,T,C or G

SEQ ID NO: 9250 - DNA, 388 bp, Homo sapiens; identical to SEQ ID NO: 2921
  misc_feature 324, 339: n = A,T,C or G

SEQ ID NO: 9251 - DNA, 646 bp, Homo sapiens; identical to SEQ ID NO: 2922
  misc_feature 626: n = A,T,C or G

SEQ ID NO: 9252 - DNA, 407 bp, Homo sapiens; identical to SEQ ID NO: 2923
  misc_feature 143, 176, 226, 362, 363, 364, 365, 366, 370, 372, 381, 382,386, 388: n = A,T,C or G

SEQ ID NO: 9253 - DNA, 318 bp, Homo sapiens; identical to SEQ ID NO: 2924

SEQ ID NO: 9254 - DNA, 276 bp, Homo sapiens; identical to SEQ ID NO: 2925

SEQ ID NO: 9255 - DNA, 235 bp, Homo sapiens; identical to SEQ ID NO: 2926
  misc_feature 6, 59: n = A,T,C or G

SEQ ID NO: 9256 - DNA, 218 bp, Homo sapiens; identical to SEQ ID NO: 2927

SEQ ID NO: 9257 - DNA, 377 bp, Homo sapiens; identical to SEQ ID NO: 2928
  misc_feature 28, 264, 307, 314, 322, 329, 353: n = A,T,C or G

SEQ ID NO: 9258 - DNA, 423 bp, Homo sapiens; identical to SEQ ID NO: 2929

SEQ ID NO: 9259 - DNA, 530 bp, Homo sapiens; identical to SEQ ID NO: 2930
  misc_feature 155, 235, 254, 330, 366, 409, 424, 435, 439, 513, 518, 527: n = A,T,C or G

SEQ ID NO: 9260 - DNA, 427 bp, Homo sapiens; identical to SEQ ID NO: 2931
  misc_feature 143: n = A,T,C or G

SEQ ID NO: 9261 - DNA, 251 bp, Homo sapiens; identical to SEQ ID NO: 2932
  misc_feature 196, 215, 239: n = A,T,C or G

SEQ ID NO: 9262 - DNA, 327 bp, Homo sapiens; identical to SEQ ID NO: 2933

SEQ ID NO: 9263 - DNA, 659 bp, Homo sapiens; identical to SEQ ID NO: 2934
  misc_feature 460, 488, 519, 525, 529, 538, 542, 546, 557, 561, 627, 632,640, 644, 646: n = A,T,C or G

SEQ ID NO: 9264 - DNA, 351 bp, Homo sapiens; identical to SEQ ID NO: 2935

SEQ ID NO: 9265 - DNA, 344 bp, Homo sapiens; identical to SEQ ID NO: 2936
  misc_feature 206, 223, 333: n = A,T,C or G

SEQ ID NO: 9266 - DNA, 247 bp, Homo sapiens; identical to SEQ ID NO: 2937
  misc_feature 17, 32, 53, 61, 73, 78, 80, 88, 128, 130, 182, 185, 198: n = A,T,C or G

SEQ ID NO: 9267 - DNA, 529 bp, Homo sapiens; identical to SEQ ID NO: 2938
  misc_feature 460: n = A,T,C or G

SEQ ID NO: 9268 - DNA, 328 bp, Homo sapiens; identical to SEQ ID NO: 2939

SEQ ID NO: 9269 - DNA, 356 bp, Homo sapiens; identical to SEQ ID NO: 2940
  misc_feature 277: n = A,T,C or G

SEQ ID NO: 9270 - DNA, 358 bp, Homo sapiens; identical to SEQ ID NO: 2941
  misc_feature 55, 57, 62, 63, 64, 65, 68, 70, 71, 77, 79, 81: n = A,T,C or G

SEQ ID NO: 9271 - DNA, 602 bp, Homo sapiens; identical to SEQ ID NO: 2942
  misc_feature 70, 466, 470, 514, 574: n = A,T,C or G

SEQ ID NO: 9272 - DNA, 324 bp, Homo sapiens; identical to SEQ ID NO: 2943

SEQ ID NO: 9273 - DNA, 300 bp, Homo sapiens; identical to SEQ ID NO: 2944

SEQ ID NO: 9274 - DNA, 573 bp, Homo sapiens; identical to SEQ ID NO: 2945
  misc_feature 6, 134, 162, 169, 190, 199, 217, 218, 240, 243, 247, 257,267, 288, 299, 301, 316, 331, 351, 378, 384, 392, 394, 402,404, 410, 416, 417, 421, 427, 429, 435, 445, 448, 450, 488,489, 513, 518, 533, 548, 561: n = A,T,C or G

SEQ ID NO: 9275 - DNA, 366 bp, Homo sapiens; identical to SEQ ID NO: 2946

SEQ ID NO: 9276 - DNA, 595 bp, Homo sapiens; identical to SEQ ID NO: 2947
  misc_feature 486, 498, 529, 562: n = A,T,C or G

SEQ ID NO: 9277 - DNA, 382 bp, Homo sapiens; identical to SEQ ID NO: 2948

SEQ ID NO: 9278 - DNA, 386 bp, Homo sapiens; identical to SEQ ID NO: 2949
  misc_feature 305, 310, 364: n = A,T,C or G

SEQ ID NO: 9279 - DNA, 630 bp, Homo sapiens; identical to SEQ ID NO: 2950
  misc_feature 23, 29, 415: n = A,T,C or G

SEQ ID NO: 9280 - DNA, 418 bp, Homo sapiens; identical to SEQ ID NO: 2951
  misc_feature 26, 398: n = A,T,C or G

SEQ ID NO: 9281 - DNA, 316 bp, Homo sapiens; identical to SEQ ID NO: 2952
  misc_feature 80, 87: n = A,T,C or G

SEQ ID NO: 9282 - DNA, 398 bp, Homo sapiens; identical to SEQ ID NO: 2953

SEQ ID NO: 9283 - DNA, 240 bp, Homo sapiens; identical to SEQ ID NO: 2954
  misc_feature 137, 178: n = A,T,C or G

SEQ ID NO: 9284 - DNA, 664 bp, Homo sapiens; identical to SEQ ID NO: 2955
  misc_feature 487, 498, 555, 569, 584, 607, 651: n = A,T,C or G

SEQ ID NO: 9285 - DNA, 449 bp, Homo sapiens; identical to SEQ ID NO: 2956

SEQ ID NO: 9286 - DNA, 323 bp, Homo sapiens; identical to SEQ ID NO: 2957

SEQ ID NO: 9287 - DNA, 536 bp, Homo sapiens; identical to SEQ ID NO: 2958
  misc_feature 325, 445, 473, 474, 496, 500, 533: n = A,T,C or G

SEQ ID NO: 9288 - DNA, 318 bp, Homo sapiens; identical to SEQ ID NO: 2959

SEQ ID NO: 9289 - DNA, 277 bp, Homo sapiens; identical to SEQ ID NO: 2960
  misc_feature 57, 116, 127, 192: n = A,T,C or G

SEQ ID NO: 9290 - DNA, 405 bp, Homo sapiens; identical to SEQ ID NO: 2961

SEQ ID NO: 9291 - DNA, 457 bp, Homo sapiens; identical to SEQ ID NO: 2962
  misc_feature 182, 229, 244, 256, 307: n = A,T,C or G

SEQ ID NO: 9292 - DNA, 616 bp, Homo sapiens; identical to SEQ ID NO: 2963
  misc_feature 265, 395, 443, 446, 448, 453, 474, 493, 496, 503, 513, 541,544, 549, 552, 555, 561, 566, 567, 569, 582: n = A,T,C or G

SEQ ID NO: 9293 - DNA, 290 bp, Homo sapiens; identical to SEQ ID NO: 2964
  misc_feature 278: n = A,T,C or G

SEQ ID NO: 9294 - DNA, 324 bp, Homo sapiens; identical to SEQ ID NO: 2965

SEQ ID NO: 9295 - DNA, 313 bp, Homo sapiens; identical to SEQ ID NO: 2966

SEQ ID NO: 9296 - DNA, 274 bp, Homo sapiens; identical to SEQ ID NO: 2967
  misc_feature 3, 32, 70, 135, 154, 192, 243: n = A,T,C or G

SEQ ID NO: 9297 - DNA, 581 bp, Homo sapiens; identical to SEQ ID NO: 2968

SEQ ID NO: 9298 - DNA, 425 bp, Homo sapiens; identical to SEQ ID NO: 2969

SEQ ID NO: 9299 - DNA, 644 bp, Homo sapiens; identical to SEQ ID NO: 2970
  misc_feature 539, 576, 621, 637: n = A,T,C or G

SEQ ID NO: 9300 - DNA, 397 bp, Homo sapiens; identical to SEQ ID NO: 2971

SEQ ID NO: 9301 - DNA, 738 bp, Homo sapiens; identical to SEQ ID NO: 2972
  misc_feature 577, 629, 683, 705, 712, 738: n = A,T,C or G

SEQ ID NO: 9302 - DNA, 393 bp, Homo sapiens; identical to SEQ ID NO: 2973
  misc_feature 62, 67: n = A,T,C or G

SEQ ID NO: 9303 - DNA, 315 bp, Homo sapiens; identical to SEQ ID NO: 2974

SEQ ID NO: 9304 - DNA, 392 bp, Homo sapiens; identical to SEQ ID NO: 2975

SEQ ID NO: 9305 - DNA, 319 bp, Homo sapiens; identical to SEQ ID NO: 2976
  misc_feature 181, 183, 191, 314: n = A,T,C or G

SEQ ID NO: 9306 - DNA, 472 bp, Homo sapiens; identical to SEQ ID NO: 2977
  misc_feature 455: n = A,T,C or G

SEQ ID NO: 9307 - DNA, 578 bp, Homo sapiens; identical to SEQ ID NO: 2978
  misc_feature 441, 444, 473, 544, 559, 565, 568: n = A,T,C or G

SEQ ID NO: 9308 - DNA, 331 bp, Homo sapiens; identical to SEQ ID NO: 2979

SEQ ID NO: 9309 - DNA, 839 bp, Homo sapiens; identical to SEQ ID NO: 2980
  misc_feature 482, 510, 594, 601, 634, 657, 728, 735, 758, 764, 783, 790,804, 805, 807, 809, 810, 811, 819: n = A,T,C or G

SEQ ID NO: 9310 - DNA, 403 bp, Homo sapiens; identical to SEQ ID NO: 2981

SEQ ID NO: 9311 - DNA, 417 bp, Homo sapiens; identical to SEQ ID NO: 2982
  misc_feature 31, 215, 294, 296, 364: n = A,T,C or G

SEQ ID NO: 9312 - DNA, 322 bp, Homo sapiens; identical to SEQ ID NO: 2983

SEQ ID NO: 9313 - DNA, 515 bp, Homo sapiens; identical to SEQ ID NO: 2984
  misc_feature 452: n = A,T,C or G

SEQ ID NO: 9314 - DNA, 527 bp, Homo sapiens; identical to SEQ ID NO: 2985
  misc_feature 200, 249, 263, 399, 510: n = A,T,C or G

SEQ ID NO: 9315 - DNA, 432 bp, Homo sapiens; identical to SEQ ID NO: 2986
  misc_feature 51, 66, 71, 82, 88, 149, 194, 310, 312: n = A,T,C or G

SEQ ID NO: 9316 - DNA, 496 bp, Homo sapiens; identical to SEQ ID NO: 2987
  misc_feature 440, 455: n = A,T,C or G

SEQ ID NO: 9317 - DNA, 512 bp, Homo sapiens; identical to SEQ ID NO: 2988
  misc_feature 188, 212, 219, 360, 379, 380, 383, 424, 426, 463: n = A,T,C or G

SEQ ID NO: 9318 - DNA, 477 bp, Homo sapiens; identical to SEQ ID NO: 2989
  misc_feature 430: n = A,T,C or G

SEQ ID NO: 9319 - DNA, 508 bp, Homo sapiens; identical to SEQ ID NO: 2990

SEQ ID NO: 9320 - DNA, 353 bp, Homo sapiens; identical to SEQ ID NO: 2991
  misc_feature 267: n = A,T,C or G

SEQ ID NO: 9321 - DNA, 316 bp, Homo sapiens; identical to SEQ ID NO: 2992

SEQ ID NO: 9322 - DNA, 485 bp, Homo sapiens; identical to SEQ ID NO: 2993

SEQ ID NO: 9323 - DNA, 594 bp, Homo sapiens; identical to SEQ ID NO: 2994
  misc_feature 174, 358, 474, 531, 571, 575: n = A,T,C or G

SEQ ID NO: 9324 - DNA, 320 bp, Homo sapiens; identical to SEQ ID NO: 2995

SEQ ID NO: 9325 - DNA, 682 bp, Homo sapiens; identical to SEQ ID NO: 2996
  misc_feature 128, 588, 590, 613, 623, 640, 650, 652, 660, 676: n = A,T,C or G

SEQ ID NO: 9326 - DNA, 443 bp, Homo sapiens; identical to SEQ ID NO: 2997

SEQ ID NO: 9327 - DNA, 324 bp, Homo sapiens; identical to SEQ ID NO: 2998

SEQ ID NO: 9328 - DNA, 485 bp, Homo sapiens; identical to SEQ ID NO: 2999
  misc_feature 423, 455, 470: n = A,T,C or G

SEQ ID NO: 9329 - DNA, 384 bp, Homo sapiens; identical to SEQ ID NO: 3000
  misc_feature 333: n = A,T,C or G

SEQ ID NO: 9330 - DNA, 322 bp, Homo sapiens; identical to SEQ ID NO: 3002

SEQ ID NO: 9331 - DNA, 319 bp, Homo sapiens; identical to SEQ ID NO: 3003

SEQ ID NO: 9332 - DNA, 546 bp, Homo sapiens; identical to SEQ ID NO: 3004
  misc_feature 399, 523: n = A,T,C or G

SEQ ID NO: 9333 - DNA, 318 bp, Homo sapiens; identical to SEQ ID NO: 3005

SEQ ID NO: 9334 - DNA, 688 bp, Homo sapiens; identical to SEQ ID NO: 3006
  misc_feature 355, 468, 483, 491, 497, 501, 513, 543, 556, 570, 581, 615,620, 640, 651, 652, 681: n = A,T,C or G

SEQ ID NO: 9335 - DNA, 320 bp, Homo sapiens; identical to SEQ ID NO: 3007

SEQ ID NO: 9336 - DNA, 315 bp, Homo sapiens; identical to SEQ ID NO: 3008

SEQ ID NO: 9337 - DNA, 362 bp, Homo sapiens; identical to SEQ ID NO: 3009

SEQ ID NO: 9338 - DNA, 322 bp, Homo sapiens; identical to SEQ ID NO: 3010

SEQ ID NO: 9339 - DNA, 349 bp, Homo sapiens; identical to SEQ ID NO: 3011
  misc_feature 332, 347: n = A,T,C or G

SEQ ID NO: 9340 - DNA, 497 bp, Homo sapiens; identical to SEQ ID NO: 3012
  misc_feature 440, 449: n = A,T,C or G

SEQ ID NO: 9341 - DNA, 314 bp, Homo sapiens; identical to SEQ ID NO: 3013

SEQ ID NO: 9342 - DNA, 316 bp, Homo sapiens; identical to SEQ ID NO: 3014

SEQ ID NO: 9343 - DNA, 320 bp, Homo sapiens; identical to SEQ ID NO: 3015

SEQ ID NO: 9344 - DNA, 512 bp, Homo sapiens; identical to SEQ ID NO: 3016

SEQ ID NO: 9345 - DNA, 298 bp, Homo sapiens; identical to SEQ ID NO: 3017

SEQ ID NO: 9346 - DNA, 336 bp, Homo sapiens; identical to SEQ ID NO: 3018
  misc_feature 304: n = A,T,C or G

SEQ ID NO: 9347 - DNA, 451 bp, Homo sapiens; identical to SEQ ID NO: 3019

SEQ ID NO: 9348 - DNA, 376 bp, Homo sapiens; identical to SEQ ID NO: 3020
  misc_feature 320, 326, 328, 354, 355, 358, 363, 374: n = A,T,C or G

SEQ ID NO: 9349 - DNA, 468 bp, Homo sapiens; identical to SEQ ID NO: 3021

SEQ ID NO: 9350 - DNA, 230 bp, Homo sapiens; identical to SEQ ID NO: 3022
  misc_feature 8: n = A,T,C or G

SEQ ID NO: 9351 - DNA, 442 bp, Homo sapiens; identical to SEQ ID NO: 3023
  misc_feature 180, 181, 341: n = A,T,C or G

SEQ ID NO: 9352 - DNA, 303 bp, Homo sapiens; identical to SEQ ID NO: 3024

SEQ ID NO: 9353 - DNA, 184 bp, Homo sapiens; identical to SEQ ID NO: 3025

SEQ ID NO: 9354 - DNA, 522 bp, Homo sapiens; identical to SEQ ID NO: 3026

SEQ ID NO: 9355 - DNA, 267 bp, Homo sapiens; identical to SEQ ID NO: 3027

SEQ ID NO: 9356 - DNA, 635 bp, Homo sapiens; identical to SEQ ID NO: 3028
  misc_feature 9, 617: n = A,T,C or G

SEQ ID NO: 9357 - DNA, 520 bp, Homo sapiens; identical to SEQ ID NO: 3029
  misc_feature 458, 471: n = A,T,C or G

SEQ ID NO: 9358 - DNA, 281 bp, Homo sapiens; identical to SEQ ID NO: 3030

SEQ ID NO: 9359 - DNA, 385 bp, Homo sapiens; identical to SEQ ID NO: 3031

SEQ ID NO: 9360 - DNA, 468 bp, Homo sapiens; identical to SEQ ID NO: 3032
  misc_feature 391, 430, 432, 454, 455: n = A,T,C or G

SEQ ID NO: 9361 - DNA, 323 bp, Homo sapiens; identical to SEQ ID NO: 3033

SEQ ID NO: 9362 - DNA, 325 bp, Homo sapiens; identical to SEQ ID NO: 3034

SEQ ID NO: 9363 - DNA, 359 bp, Homo sapiens; identical to SEQ ID NO: 3035

SEQ ID NO: 9364 - DNA, 400 bp, Homo sapiens; identical to SEQ ID NO: 3036

SEQ ID NO: 9365 - DNA, 316 bp, Homo sapiens; identical to SEQ ID NO: 3037

SEQ ID NO: 9366 - DNA, 319 bp, Homo sapiens; identical to SEQ ID NO: 3038

SEQ ID NO: 9367 - DNA, 555 bp, Homo sapiens; identical to SEQ ID NO: 3039

SEQ ID NO: 9368 - DNA, 400 bp, Homo sapiens; identical to SEQ ID NO: 3040

SEQ ID NO: 9369 - DNA, 397 bp, Homo sapiens; identical to SEQ ID NO: 3041

SEQ ID NO: 9370 - DNA, 472 bp, Homo sapiens; identical to SEQ ID NO: 3042

SEQ ID NO: 9371 - DNA, 369 bp, Homo sapiens; identical to SEQ ID NO: 3043
  misc_feature 155, 156, 221: n = A,T,C or G

SEQ ID NO: 9372 - DNA, 323 bp, Homo sapiens; identical to SEQ ID NO: 3044

SEQ ID NO: 9373 - DNA, 317 bp, Homo sapiens; identical to SEQ ID NO: 3045

SEQ ID NO: 9374 - DNA, 483 bp, Homo sapiens; identical to SEQ ID NO: 3046

SEQ ID NO: 9375 - DNA, 312 bp, Homo sapiens; identical to SEQ ID NO: 3047

SEQ ID NO: 9376 - DNA, 324 bp, Homo sapiens; identical to SEQ ID NO: 3048
  misc_feature 261: n = A,T,C or G

SEQ ID NO: 9377 - DNA, 321 bp, Homo sapiens; identical to SEQ ID NO: 3049

SEQ ID NO: 9378 - DNA, 502 bp, Homo sapiens; identical to SEQ ID NO: 3050
  misc_feature 177, 178: n = A,T,C or G

SEQ ID NO: 9379 - DNA, 462 bp, Homo sapiens; identical to SEQ ID NO: 3051
  misc_feature 7, 329: n = A,T,C or G

SEQ ID NO: 9380 - DNA, 320 bp, Homo sapiens; identical to SEQ ID NO: 3052

SEQ ID NO: 9381 - DNA, 422 bp, Homo sapiens; identical to SEQ ID NO: 3053
  misc_feature 390: n = A,T,C or G

SEQ ID NO: 9382 - DNA, 466 bp, Homo sapiens; identical to SEQ ID NO: 3054
  misc_feature 177, 178: n = A,T,C or G

SEQ ID NO: 9383 - DNA, 296 bp, Homo sapiens; identical to SEQ ID NO: 3055
  misc_feature 2: n = A,T,C or G

SEQ ID NO: 9384 - DNA, 118 bp, Homo sapiens; identical to SEQ ID NO: 3056
  misc_feature 75, 83: n = A,T,C or G

SEQ ID NO: 9385 - DNA, 334 bp, Homo sapiens; identical to SEQ ID NO: 3057

SEQ ID NO: 9386 - DNA, 466 bp, Homo sapiens; identical to SEQ ID NO: 3058
  misc_feature 401, 430, 454, 455: n = A,T,C or G

SEQ ID NO: 9387 - DNA, 349 bp, Homo sapiens; identical to SEQ ID NO: 3059
  misc_feature 334: n = A,T,C or G

SEQ ID NO: 9388 - DNA, 317 bp, Homo sapiens; identical to SEQ ID NO: 3060
  misc_feature 136: n = A,T,C or G

SEQ ID NO: 9389 - DNA, 420 bp, Homo sapiens; identical to SEQ ID NO: 3061

SEQ ID NO: 9390 - DNA, 419 bp, Homo sapiens; identical to SEQ ID NO: 3062

SEQ ID NO: 9391 - DNA, 312 bp, Homo sapiens; identical to SEQ ID NO: 3063

SEQ ID NO: 9392 - DNA, 415 bp, Homo sapiens; identical to SEQ ID NO: 3064
  misc_feature 399, 401: n = A,T,C or G

SEQ ID NO: 9393 - DNA, 560 bp, Homo sapiens; identical to SEQ ID NO: 3065
  misc_feature 505, 519, 530, 535, 551: n = A,T,C or G

SEQ ID NO: 9394 - DNA, 418 bp, Homo sapiens; identical to SEQ ID NO: 3066

SEQ ID NO: 9395 - DNA, 391 bp, Homo sapiens; identical to SEQ ID NO: 3067
  misc_feature 152, 155, 159, 164, 167, 169, 172, 173, 180, 187, 191, 197,202, 207, 209, 219, 238, 241, 246, 259, 263, 277, 283, 285,294, 304, 308, 310, 315, 316, 318, 322, 326, 332, 338, 343,347, 350, 359, 366, 373: n = A,T,C or G

SEQ ID NO: 9396 - DNA, 293 bp, Homo sapiens; identical to SEQ ID NO: 3068

SEQ ID NO: 9397 - DNA, 312 bp, Homo sapiens; identical to SEQ ID NO: 3069
  misc_feature 96, 105, 111, 155, 161, 173, 187, 208, 224, 234, 254, 258,296: n = A,T,C or G

SEQ ID NO: 9398 - DNA, 686 bp, Homo sapiens; identical to SEQ ID NO: 3070
  misc_feature 493, 507, 525, 533, 535, 551, 559, 577, 578, 597, 599, 630,634, 637, 644, 657, 675, 676: n = A,T,C or G

SEQ ID NO: 9399 - DNA, 363 bp, Homo sapiens; identical to SEQ ID NO: 3071
  misc_feature 13, 15, 23, 26, 54, 72, 74, 79, 166, 177, 189, 231, 234: n = A,T,C or G

SEQ ID NO: 9400 - DNA, 466 bp, Homo sapiens; identical to SEQ ID NO: 3073
  misc_feature 236, 412, 449: n = A,T,C or G

SEQ ID NO: 9401 - DNA, 314 bp, Homo sapiens; identical to SEQ ID NO: 3074

SEQ ID NO: 9402 - DNA, 374 bp, Homo sapiens; identical to SEQ ID NO: 3075

SEQ ID NO: 9403 - DNA, 314 bp, Homo sapiens; identical to SEQ ID NO: 3076
  misc_feature 284: n = A,T,C or G

SEQ ID NO: 9404 - DNA, 467 bp, Homo sapiens; identical to SEQ ID NO: 3077
  misc_feature 438, 442, 449: n = A,T,C or G

SEQ ID NO: 9405 - DNA, 488 bp, Homo sapiens; identical to SEQ ID NO: 3079
  misc_feature 471: n = A,T,C or G

SEQ ID NO: 9406 - DNA, 441 bp, Homo sapiens; identical to SEQ ID NO: 3080
  misc_feature 419: n = A,T,C or G

SEQ ID NO: 9407 - DNA, 367 bp, Homo sapiens; identical to SEQ ID NO: 3081
  misc_feature 310: n = A,T,C or G

SEQ ID NO: 9408 - DNA, 324 bp, Homo sapiens; identical to SEQ ID NO: 3082

SEQ ID NO: 9409 - DNA, 500 bp, Homo sapiens; identical to SEQ ID NO: 3083

SEQ ID NO: 9410 - DNA, 474 bp, Homo sapiens; identical to SEQ ID NO: 3084

SEQ ID NO: 9411 - DNA, 405 bp, Homo sapiens; identical to SEQ ID NO: 3085

SEQ ID NO: 9412 - DNA, 482 bp, Homo sapiens; identical to SEQ ID NO: 3086
  misc_feature 377, 386, 447, 468, 474: n = A,T,C or G

SEQ ID NO: 9413 - DNA, 324 bp, Homo sapiens; identical to SEQ ID NO: 3087

SEQ ID NO: 9414 - DNA, 546 bp, Homo sapiens; identical to SEQ ID NO: 3088

SEQ ID NO: 9415 - DNA, 313 bp, Homo sapiens; identical to SEQ ID NO: 3089

SEQ ID NO: 9416 - DNA, 318 bp, Homo sapiens; identical to SEQ ID NO: 3090

SEQ ID NO: 9417 - DNA, 487 bp, Homo sapiens; identical to SEQ ID NO: 3091

SEQ ID NO: 9418 - DNA, 704 bp, Homo sapiens; identical to SEQ ID NO: 3092
  misc_feature 328, 338, 401, 421, 424, 436, 473, 483, 518, 524, 543, 556,579, 591, 598, 615, 627, 628, 672, 681, 683: n = A,T,C or G

SEQ ID NO: 9419 - DNA, 297 bp, Homo sapiens; identical to SEQ ID NO: 3093

SEQ ID NO: 9420 - DNA, 473 bp, Homo sapiens; identical to SEQ ID NO: 3094
  misc_feature 199: n = A,T,C or G

SEQ ID NO: 9421 - DNA, 320 bp, Homo sapiens; identical to SEQ ID NO: 3095

SEQ ID NO: 9422 - DNA, 466 bp, Homo sapiens; identical to SEQ ID NO: 3096
  misc_feature 454: n = A,T,C or G

SEQ ID NO: 9423 - DNA, 348 bp, Homo sapiens; identical to SEQ ID NO: 3097

SEQ ID NO: 9424 - DNA, 365 bp, Homo sapiens; identical to SEQ ID NO: 3098
  misc_feature 259, 323: n = A,T,C or G

SEQ ID NO: 9425 - DNA, 485 bp, Homo sapiens; identical to SEQ ID NO: 3099
  misc_feature 202, 289, 314, 317, 320, 324, 342, 362, 416, 429, 433, 455: n = A,T,C or G

SEQ ID NO: 9426 - DNA, 437 bp, Homo sapiens; identical to SEQ ID NO: 3100
  misc_feature 182, 223, 225, 281, 285, 392: n = A,T,C or G

SEQ ID NO: 9427 - DNA, 334 bp, Homo sapiens; identical to SEQ ID NO: 3101
  misc_feature 145: n = A,T,C or G

SEQ ID NO: 9428 - DNA, 472 bp, Homo sapiens; identical to SEQ ID NO: 3102
  misc_feature 403, 440: n = A,T,C or G

SEQ ID NO: 9429 - DNA, 533 bp, Homo sapiens; identical to SEQ ID NO: 3103
  misc_feature 469, 478, 484: n = A,T,C or G

SEQ ID NO: 9430 - DNA, 310 bp, Homo sapiens; identical to SEQ ID NO: 3104

SEQ ID NO: 9431 - DNA, 201 bp, Homo sapiens; identical to SEQ ID NO: 3105
  misc_feature 109, 152, 159, 170, 189: n = A,T,C or G

SEQ ID NO: 9432 - DNA, 386 bp, Homo sapiens; identical to SEQ ID NO: 3106

SEQ ID NO: 9433 - DNA, 520 bp, Homo sapiens; identical to SEQ ID NO: 3107
  misc_feature 441, 450: n = A,T,C or G

SEQ ID NO: 9434 - DNA, 323 bp, Homo sapiens; identical to SEQ ID NO: 3108

SEQ ID NO: 9435 - DNA, 400 bp, Homo sapiens; identical to SEQ ID NO: 3109
  misc_feature 222, 357: n = A,T,C or G

SEQ ID NO: 9436 - DNA, 434 bp, Homo sapiens; identical to SEQ ID NO: 3110
  misc_feature 125, 357, 398, 409, 417: n = A,T,C or G

SEQ ID NO: 9437 - DNA, 486 bp, Homo sapiens; identical to SEQ ID NO: 3111

SEQ ID NO: 9438 - DNA, 374 bp, Homo sapiens; identical to SEQ ID NO: 3112
  misc_feature 156, 320, 353: n = A,T,C or G

SEQ ID NO: 9439 - DNA, 474 bp, Homo sapiens; identical to SEQ ID NO: 3113

SEQ ID NO: 9440 - DNA, 618 bp, Homo sapiens; identical to SEQ ID NO: 3114
  misc_feature 520: n = A,T,C or G

SEQ ID NO: 9441 - DNA, 221 bp, Homo sapiens; identical to SEQ ID NO: 3115
  misc_feature 208: n = A,T,C or G

SEQ ID NO: 9442 - DNA, 447 bp, Homo sapiens; identical to SEQ ID NO: 3116
  misc_feature 351, 378, 387, 396, 405, 409, 414, 415, 425, 432, 433: n = A,T,C or G

SEQ ID NO: 9443 - DNA, 512 bp, Homo sapiens; identical to SEQ ID NO: 3117
  misc_feature 448: n = A,T,C or G

SEQ ID NO: 9444 - DNA, 437 bp, Homo sapiens; identical to SEQ ID NO: 3118

SEQ ID NO: 9445 - DNA, 317 bp, Homo sapiens; identical to SEQ ID NO: 3119

SEQ ID NO: 9446 - DNA, 515 bp, Homo sapiens; identical to SEQ ID NO: 3121
  misc_feature 448: n = A,T,C or G

SEQ ID NO: 9447 - DNA, 319 bp, Homo sapiens; identical to SEQ ID NO: 3122

SEQ ID NO: 9448 - DNA, 390 bp, Homo sapiens; identical to SEQ ID NO: 3123

SEQ ID NO: 9449 - DNA, 406 bp, Homo sapiens; identical to SEQ ID NO: 3124

SEQ ID NO: 9450 - DNA, 323 bp, Homo sapiens; identical to SEQ ID NO: 3125

SEQ ID NO: 9451 - DNA, 218 bp, Homo sapiens; identical to SEQ ID NO: 3126

SEQ ID NO: 9452 - DNA, 447 bp, Homo sapiens; identical to SEQ ID NO: 3127
  misc_feature 344, 395, 417: n = A,T,C or G

SEQ ID NO: 9453 - DNA, 315 bp, Homo sapiens; identical to SEQ ID NO: 3128

SEQ ID NO: 9454 - DNA, 351 bp, Homo sapiens; identical to SEQ ID NO: 3129

SEQ ID NO: 9455 - DNA, 574 bp, Homo sapiens; identical to SEQ ID NO: 3130
  misc_feature 561, 562, 563, 564: n = A,T,C or G

SEQ ID NO: 9456 - DNA, 402 bp, Homo sapiens; identical to SEQ ID NO: 3131
  misc_feature 9: n = A,T,C or G

SEQ ID NO: 9457 - DNA, 123 bp, Homo sapiens; identical to SEQ ID NO: 3132

SEQ ID NO: 9458 - DNA, 315 bp, Homo sapiens; identical to SEQ ID NO: 3133

SEQ ID NO: 9459 - DNA, 501 bp, Homo sapiens; identical to SEQ ID NO: 3134

SEQ ID NO: 9460 - DNA, 413 bp, Homo sapiens; identical to SEQ ID NO: 3135

SEQ ID NO: 9461 - DNA, 425 bp, Homo sapiens; identical to SEQ ID NO: 3136
  misc_feature 45, 332, 378, 411: n = A,T,C or G

SEQ ID NO: 9462 - DNA, 433 bp, Homo sapiens; identical to SEQ ID NO: 3137
  misc_feature 262, 263, 264, 265, 266, 267, 268, 269, 270, 271, 272, 273,274, 275, 276, 277, 278, 279, 280, 281, 282, 283, 284, 285,286, 287, 288, 289, 290, 291, 292, 293, 294, 295, 296, 297,298, 299, 300, 301, 302, 303, 304, 305, 306, 307, 308: n = A,T,C or G
  misc_feature 309, 310, 311, 312, 313, 314, 315, 316, 317, 318, 319, 320,321, 322, 323, 324, 325, 326, 327, 328, 329, 330, 331, 332,333, 334, 335, 336, 337, 338, 339, 340, 341, 342, 343, 344,345, 346, 347, 348, 349, 350, 351, 352, 353, 354, 355: n = A,T,C or G
  misc_feature 356, 357, 358, 359, 360, 361, 362, 363, 364, 380, 383, 384,390, 395, 397, 398, 405, 412, 413, 431: n = A,T,C or G

SEQ ID NO: 9463 - DNA, 402 bp, Homo sapiens; identical to SEQ ID NO: 3138
  misc_feature 382: n = A,T,C or G

SEQ ID NO: 9464 - DNA, 442 bp, Homo sapiens; identical to SEQ ID NO: 3139
  misc_feature 266, 357, 374, 405, 406, 426, 434: n = A,T,C or G

SEQ ID NO: 9465 - DNA, 320 bp, Homo sapiens; identical to SEQ ID NO: 3140

SEQ ID NO: 9466 - DNA, 687 bp, Homo sapiens; identical to SEQ ID NO: 3141
  misc_feature 387, 388, 389, 390, 391, 392, 393, 394, 395, 396, 397, 398,399, 400, 401, 402, 403, 404, 405, 406, 407, 408, 409, 410,411, 412, 413, 414, 415, 416, 417, 418, 419, 420, 421, 422,423, 424, 425, 426, 427, 428, 429, 430, 431, 432, 433: n = A,T,C or G
  misc_feature 434, 435, 436, 437, 438, 439, 440, 441, 442, 443, 444, 445,446, 447, 448, 449, 450, 451, 452, 453, 454, 455, 456, 457,458, 459, 460, 461, 462, 463, 464, 465, 466, 467, 468, 469,470, 471, 472, 473, 474, 475, 476, 477, 478, 479, 480: n = A,T,C or G
  misc_feature 481, 482, 483, 484, 485, 486, 487, 488, 489, 490, 496, 497,498, 499, 500, 501, 502, 503, 504, 505, 510, 515, 525, 532,544, 556, 564, 565, 566, 573, 578, 581, 585, 586, 592, 599,610, 613, 623, 627, 629, 649, 651, 664, 671, 675: n = A,T,C or G

SEQ ID NO: 9467 - DNA, 369 bp, Homo sapiens; identical to SEQ ID NO: 3142

SEQ ID NO: 9468 - DNA, 346 bp, Homo sapiens; identical to SEQ ID NO: 3143

SEQ ID NO: 9469 - DNA, 403 bp, Homo sapiens; identical to SEQ ID NO: 3144
  misc_feature 104, 293: n = A,T,C or G

SEQ ID NO: 9470 - DNA, 446 bp, Homo sapiens; identical to SEQ ID NO: 3145
  misc_feature 14, 130, 132, 204, 241, 387, 419: n = A,T,C or G

SEQ ID NO: 9471 - DNA, 443 bp, Homo sapiens; identical to SEQ ID NO: 3146
  misc_feature 414: n = A,T,C or G

SEQ ID NO: 9472 - DNA, 457 bp, Homo sapiens; identical to SEQ ID NO: 3147
  misc_feature 8, 25, 28, 38, 115, 117, 138, 144, 145, 155, 269, 270, 273,324, 431: n = A,T,C or G

SEQ ID NO: 9473 - DNA, 345 bp, Homo sapiens; identical to SEQ ID NO: 3148
  misc_feature 300: n = A,T,C or G

SEQ ID NO: 9474 - DNA, 368 bp, Homo sapiens; identical to SEQ ID NO: 3149

SEQ ID NO: 9475 - DNA, 321 bp, Homo sapiens; identical to SEQ ID NO: 3150

SEQ ID NO: 9476 - DNA, 552 bp, Homo sapiens; identical to SEQ ID NO: 3151
  misc_feature 383, 419, 516, 519, 523, 532, 534, 535: n = A,T,C or G

SEQ ID NO: 9477 - DNA, 309 bp, Homo sapiens; identical to SEQ ID NO: 3152

SEQ ID NO: 9478 - DNA, 211 bp, Homo sapiens; identical to SEQ ID NO: 3153

SEQ ID NO: 9479 - DNA, 321 bp, Homo sapiens; identical to SEQ ID NO: 3154

SEQ ID NO: 9480 - DNA, 391 bp, Homo sapiens; identical to SEQ ID NO: 3155
  misc_feature 28, 32, 38, 39, 42, 44, 46, 59, 60, 103, 146, 299, 377: n = A,T,C or G

SEQ ID NO: 9481 - DNA, 324 bp, Homo sapiens; identical to SEQ ID NO: 3156

SEQ ID NO: 9482 - DNA, 416 bp, Homo sapiens; identical to SEQ ID NO: 3157
  misc_feature 372: n = A,T,C or G

SEQ ID NO: 9483 - DNA, 279 bp, Homo sapiens; identical to SEQ ID NO: 3158
  misc_feature 5, 32, 68, 70, 72, 73, 77, 264, 266, 267, 269, 270, 276, 277: n = A,T,C or G

SEQ ID NO: 9484 - DNA, 401 bp, Homo sapiens; identical to SEQ ID NO: 3159
  misc_feature 66, 392: n = A,T,C or G

SEQ ID NO: 9485 - DNA, 614 bp, Homo sapiens; identical to SEQ ID NO: 3160
  misc_feature 530, 543, 580, 591, 592: n = A,T,C or G

SEQ ID NO: 9486 - DNA, 339 bp, Homo sapiens; identical to SEQ ID NO: 3161
  misc_feature 327, 331, 332: n = A,T,C or G

SEQ ID NO: 9487 - DNA, 473 bp, Homo sapiens; identical to SEQ ID NO: 3162

SEQ ID NO: 9488 - DNA, 170 bp, Homo sapiens; identical to SEQ ID NO: 3163
  misc_feature 16, 144, 145: n = A,T,C or G

SEQ ID NO: 9489 - DNA, 521 bp, Homo sapiens; identical to SEQ ID NO: 3164
  misc_feature 438: n = A,T,C or G

SEQ ID NO: 9490 - DNA, 312 bp, Homo sapiens; identical to SEQ ID NO: 3165
  misc_feature 1: n = A,T,C or G

SEQ ID NO: 9491 - DNA, 323 bp, Homo sapiens; identical to SEQ ID NO: 3166

SEQ ID NO: 9492 - DNA, 330 bp, Homo sapiens; identical to SEQ ID NO: 3167

SEQ ID NO: 9493 - DNA, 317 bp, Homo sapiens; identical to SEQ ID NO: 3168

SEQ ID NO: 9494 - DNA, 348 bp, Homo sapiens; identical to SEQ ID NO: 3169
  misc_feature 54, 261, 263, 264, 288, 297, 301: n = A,T,C or G

SEQ ID NO: 9495 - DNA, 502 bp, Homo sapiens; identical to SEQ ID NO: 3170
  misc_feature 433: n = A,T,C or G

SEQ ID NO: 9496 - DNA, 297 bp, Homo sapiens; identical to SEQ ID NO: 3171

SEQ ID NO: 9497 - DNA, 353 bp, Homo sapiens; identical to SEQ ID NO: 3172

SEQ ID NO: 9498 - DNA, 323 bp, Homo sapiens; identical to SEQ ID NO: 3173

SEQ ID NO: 9499 - DNA, 562 bp, Homo sapiens; identical to SEQ ID NO: 3174
  misc_feature 537, 546: n = A,T,C or G

SEQ ID NO: 9500 - DNA, 315 bp, Homo sapiens; identical to SEQ ID NO: 3175

SEQ ID NO: 9501 - DNA, 444 bp, Homo sapiens; identical to SEQ ID NO: 3176
  misc_feature 97: n = A,T,C or G

SEQ ID NO: 9502 - DNA, 396 bp, Homo sapiens; identical to SEQ ID NO: 3177

SEQ ID NO: 9503 - DNA, 336 bp, Homo sapiens; identical to SEQ ID NO: 3178
  misc_feature 1, 70, 161, 180, 264: n = A,T,C or G

SEQ ID NO: 9504 - DNA, 552 bp, Homo sapiens; identical to SEQ ID NO: 3179

SEQ ID NO: 9505 - DNA, 502 bp, Homo sapiens; identical to SEQ ID NO: 3180
  misc_feature 490: n = A,T,C or G

SEQ ID NO: 9506 - DNA, 317 bp, Homo sapiens; identical to SEQ ID NO: 3181

SEQ ID NO: 9507 - DNA, 347 bp, Homo sapiens; identical to SEQ ID NO: 3182
  misc_feature 323, 347: n = A,T,C or G

SEQ ID NO: 9508 - DNA, 306 bp, Homo sapiens; identical to SEQ ID NO: 3183

SEQ ID NO: 9509 - DNA, 343 bp, Homo sapiens; identical to SEQ ID NO: 3184
  misc_feature 7: n = A,T,C or G

SEQ ID NO: 9510 - DNA, 173 bp, Homo sapiens; identical to SEQ ID NO: 3185

SEQ ID NO: 9511 - DNA, 315 bp, Homo sapiens; identical to SEQ ID NO: 3186

SEQ ID NO: 9512 - DNA, 345 bp, Homo sapiens; identical to SEQ ID NO: 3187

SEQ ID NO: 9513 - DNA, 460 bp, Homo sapiens; identical to SEQ ID NO: 3188

SEQ ID NO: 9514 - DNA, 431 bp, Homo sapiens; identical to SEQ ID NO: 3189

SEQ ID NO: 9515 - DNA, 321 bp, Homo sapiens; identical to SEQ ID NO: 3190

SEQ ID NO: 9516 - DNA, 543 bp, Homo sapiens; identical to SEQ ID NO: 3191
  misc_feature 251, 254, 265, 275, 313, 330, 363, 374, 398, 405, 424, 427,466, 514: n = A,T,C or G

SEQ ID NO: 9517 - DNA, 453 bp, Homo sapiens; identical to SEQ ID NO: 3192
  misc_feature 358: n = A,T,C or G

SEQ ID NO: 9518 - DNA, 514 bp, Homo sapiens; identical to SEQ ID NO: 3193

SEQ ID NO: 9519 - DNA, 590 bp, Homo sapiens; identical to SEQ ID NO: 3194
  misc_feature 16, 229, 387, 458, 520, 551: n = A,T,C or G

SEQ ID NO: 9520 - DNA, 313 bp, Homo sapiens; identical to SEQ ID NO: 3195

SEQ ID NO: 9521 - DNA, 478 bp, Homo sapiens; identical to SEQ ID NO: 3196
  misc_feature 451: n = A,T,C or G

SEQ ID NO: 9522 - DNA, 268 bp, Homo sapiens; identical to SEQ ID NO: 3197
  misc_feature 243: n = A,T,C or G

SEQ ID NO: 9523 - DNA, 492 bp, Homo sapiens; identical to SEQ ID NO: 3198
  misc_feature 398: n = A,T,C or G

SEQ ID NO: 9524 - DNA, 547 bp, Homo sapiens; identical to SEQ ID NO: 3199
  misc_feature 6: n = A,T,C or G

SEQ ID NO: 9525 - DNA, 491 bp, Homo sapiens; identical to SEQ ID NO: 3200
  misc_feature 480: n = A,T,C or G

SEQ ID NO: 9526 - DNA, 560 bp, Homo sapiens; identical to SEQ ID NO: 3201
  misc_feature 453, 508, 532, 543: n = A,T,C or G

SEQ ID NO: 9527 - DNA, 512 bp, Homo sapiens; identical to SEQ ID NO: 3202
  misc_feature 417, 426, 469, 473, 484, 505: n = A,T,C or G

SEQ ID NO: 9528 - DNA, 502 bp, Homo sapiens; identical to SEQ ID NO: 3203

SEQ ID NO: 9529 - DNA, 437 bp, Homo sapiens; identical to SEQ ID NO: 3204

SEQ ID NO: 9530 - DNA, 566 bp, Homo sapiens; identical to SEQ ID NO: 3205
  misc_feature 487, 508, 549, 556: n = A,T,C or G

SEQ ID NO: 9531 - DNA, 515 bp, Homo sapiens; identical to SEQ ID NO: 3206
  misc_feature 483: n = A,T,C or G

SEQ ID NO: 9532 - DNA, 324 bp, Homo sapiens; identical to SEQ ID NO: 3207

SEQ ID NO: 9533 - DNA, 617 bp, Homo sapiens; identical to SEQ ID NO: 3208
  misc_feature 531, 566: n = A,T,C or G

SEQ ID NO: 9534 - DNA, 318 bp, Homo sapiens; identical to SEQ ID NO: 3209

SEQ ID NO: 9535 - DNA, 571 bp, Homo sapiens; identical to SEQ ID NO: 3210
  misc_feature 137, 138, 431, 453: n = A,T,C or G

SEQ ID NO: 9536 - DNA, 500 bp, Homo sapiens; identical to SEQ ID NO: 3211
  misc_feature 440: n = A,T,C or G

SEQ ID NO: 9537 - DNA, 553 bp, Homo sapiens; identical to SEQ ID NO: 3212
  misc_feature 436: n = A,T,C or G

SEQ ID NO: 9538 - DNA, 436 bp, Homo sapiens; identical to SEQ ID NO: 3213
  misc_feature 13, 15, 33, 40, 42, 52, 69, 147, 220, 255, 289, 292, 401: n = A,T,C or G

SEQ ID NO: 9539 - DNA, 299 bp, Homo sapiens; identical to SEQ ID NO: 3214
  misc_feature 10, 19, 22, 24, 27, 28, 89, 95, 98, 104, 105, 117, 121, 124,133, 166, 169, 172, 184, 186, 279, 282, 285: n = A,T,C or G

SEQ ID NO: 9540 - DNA, 468 bp, Homo sapiens; identical to SEQ ID NO: 3215
  misc_feature 403: n = A,T,C or G

SEQ ID NO: 9541 - DNA, 311 bp, Homo sapiens; identical to SEQ ID NO: 3216

SEQ ID NO: 9542 - DNA, 234 bp, Homo sapiens; identical to SEQ ID NO: 3217
  misc_feature 218, 227: n = A,T,C or G

SEQ ID NO: 9543 - DNA, 602 bp, Homo sapiens; identical to SEQ ID NO: 3218
  misc_feature 561, 590: n = A,T,C or G

SEQ ID NO: 9544 - DNA, 389 bp, Homo sapiens; identical to SEQ ID NO: 3219

SEQ ID NO: 9545 - DNA, 583 bp, Homo sapiens; identical to SEQ ID NO: 3220
  misc_feature 433, 516, 543: n = A,T,C or G

SEQ ID NO: 9546 - DNA, 387 bp, Homo sapiens; identical to SEQ ID NO: 3221
  misc_feature 193, 325, 358: n = A,T,C or G

SEQ ID NO: 9547 - DNA, 506 bp, Homo sapiens; identical to SEQ ID NO: 3222
  misc_feature 37, 93, 106, 111, 113, 119, 125, 140, 146, 156, 168, 249,268, 277, 280, 281, 284, 286, 293, 303, 308, 316, 321, 334,344, 352, 399, 408, 441, 444, 460: n = A,T,C or G

SEQ ID NO: 9548 - DNA, 404 bp, Homo sapiens; identical to SEQ ID NO: 3223
  misc_feature 33, 356, 380: n = A,T,C or G

SEQ ID NO: 9549 - DNA, 660 bp, Homo sapiens; identical to SEQ ID NO: 3224
  misc_feature 584, 637: n = A,T,C or G

SEQ ID NO: 9550 - DNA, 298 bp, Homo sapiens; identical to SEQ ID NO: 3225

SEQ ID NO: 9551 - DNA, 199 bp, Homo sapiens; identical to SEQ ID NO: 3226

SEQ ID NO: 9552 - DNA, 440 bp, Homo sapiens; identical to SEQ ID NO: 3227
  misc_feature 240, 243, 246, 249, 250, 252, 254, 258, 263, 264, 268, 280,283, 299, 303, 326, 331, 335, 337, 338, 345, 348, 350, 353,356, 367, 381, 390, 393, 396, 400, 401, 404, 405, 406, 407,415, 417, 422, 425, 427, 428: n = A,T,C or G

SEQ ID NO: 9553 - DNA, 697 bp, Homo sapiens; identical to SEQ ID NO: 3228
  misc_feature 567, 650: n = A,T,C or G

SEQ ID NO: 9554 - DNA, 337 bp, Homo sapiens; identical to SEQ ID NO: 3229
  misc_feature 57, 171, 222, 262, 312, 319: n = A,T,C or G

SEQ ID NO: 9555 - DNA, 201 bp, Homo sapiens; identical to SEQ ID NO: 3230
  misc_feature 53, 80, 82, 83, 97: n = A,T,C or G

SEQ ID NO: 9556 - DNA, 509 bp, Homo sapiens; identical to SEQ ID NO: 3231
  misc_feature 442, 451: n = A,T,C or G

SEQ ID NO: 9557 - DNA, 498 bp, Homo sapiens; identical to SEQ ID NO: 3232
  misc_feature 457: n = A,T,C or G

SEQ ID NO: 9558 - DNA, 392 bp, Homo sapiens; identical to SEQ ID NO: 3233

SEQ ID NO: 9559 - DNA, 549 bp, Homo sapiens; identical to SEQ ID NO: 3234

SEQ ID NO: 9560 - DNA, 463 bp, Homo sapiens; identical to SEQ ID NO: 3235

SEQ ID NO: 9561 - DNA, 443 bp, Homo sapiens; identical to SEQ ID NO: 3236
  misc_feature 27, 170, 366, 403, 418: n = A,T,C or G

SEQ ID NO: 9562 - DNA, 546 bp, Homo sapiens; identical to SEQ ID NO: 3237
  misc_feature 484, 546: n = A,T,C or G

SEQ ID NO: 9563 - DNA, 416 bp, Homo sapiens; identical to SEQ ID NO: 3238

SEQ ID NO: 9564 - DNA, 418 bp, Homo sapiens; identical to SEQ ID NO: 3239
  misc_feature 214: n = A,T,C or G

SEQ ID NO: 9565 - DNA, 474 bp, Homo sapiens; identical to SEQ ID NO: 3240
  misc_feature 383, 462: n = A,T,C or G

SEQ ID NO: 9566 - DNA, 321 bp, Homo sapiens; identical to SEQ ID NO: 3241

SEQ ID NO: 9567 - DNA, 476 bp, Homo sapiens; identical to SEQ ID NO: 3242
  misc_feature 294, 347, 357, 457: n = A,T,C or G

SEQ ID NO: 9568 - DNA, 240 bp, Homo sapiens; identical to SEQ ID NO: 3243
  misc_feature 15, 52, 131, 148, 150, 177, 178: n = A,T,C or G

SEQ ID NO: 9569 - DNA, 328 bp, Homo sapiens; identical to SEQ ID NO: 3244

SEQ ID NO: 9570 - DNA, 235 bp, Homo sapiens; identical to SEQ ID NO: 3245

SEQ ID NO: 9571 - DNA, 366 bp, Homo sapiens; identical to SEQ ID NO: 3246
  misc_feature 21, 151, 331: n = A,T,C or G

SEQ ID NO: 9572 - DNA, 329 bp, Homo sapiens; identical to SEQ ID NO: 3247
  misc_feature 136, 141, 213, 238, 256, 304: n = A,T,C or G

SEQ ID NO: 9573 - DNA, 510 bp, Homo sapiens; identical to SEQ ID NO: 3248
  misc_feature 494: n = A,T,C or G

SEQ ID NO: 9574 - DNA, 470 bp, Homo sapiens; identical to SEQ ID NO: 3249

SEQ ID NO: 9575 - DNA, 604 bp, Homo sapiens; identical to SEQ ID NO: 3250
  misc_feature 580: n = A,T,C or G

SEQ ID NO: 9576 - DNA, 464 bp, Homo sapiens; identical to SEQ ID NO: 3251
  misc_feature 186, 262: n = A,T,C or G

SEQ ID NO: 9577 - DNA, 683 bp, Homo sapiens; identical to SEQ ID NO: 3252
  misc_feature 299, 305, 307, 308, 309, 310, 311, 312, 313, 321, 325, 328,330, 331, 344, 347, 357, 358, 366, 373, 382, 384, 391, 393,397, 398, 399, 400, 410, 411, 416, 417, 418, 420, 421, 425,430, 434, 435, 436, 437, 438, 439, 440, 441, 442, 443: n = A,T,C or G
  misc_feature 444, 445, 446, 447, 448, 449, 450, 451, 452, 453, 454, 455,456, 457, 458, 459, 460, 461, 462, 463, 464, 465, 466, 467,468, 469, 470, 471, 472, 473, 481, 484, 488, 491, 498, 499,500, 501, 509, 513, 516, 521, 522, 526, 528, 529, 530: n = A,T,C or G
  misc_feature 531, 539, 540, 541, 542, 544, 546, 547, 548, 550, 551, 552,554, 555, 556, 561, 562, 568, 571, 578, 579, 580, 581, 585,586, 587, 588, 589, 590, 594, 595, 596, 597, 598, 599, 600,602, 603, 604, 606, 607, 608, 610, 611, 612, 614, 616: n = A,T,C or G
  misc_feature 618, 619, 620, 621, 623, 624, 625, 626, 627, 628, 629, 630,633, 634, 635, 641, 642, 648, 655, 662, 668, 680: n = A,T,C or G

SEQ ID NO: 9578 - DNA, 561 bp, Homo sapiens; identical to SEQ ID NO: 3253
  misc_feature 528, 560: n = A,T,C or G

SEQ ID NO: 9579 - DNA, 344 bp, Homo sapiens; identical to SEQ ID NO: 3254
  misc_feature 62, 98, 134, 234, 334: n = A,T,C or G

SEQ ID NO: 9580 - DNA, 327 bp, Homo sapiens; identical to SEQ ID NO: 3255
  misc_feature 276: n = A,T,C or G

SEQ ID NO: 9581 - DNA, 414 bp, Homo sapiens; identical to SEQ ID NO: 3256
  misc_feature 369: n = A,T,C or G

SEQ ID NO: 9582 - DNA, 528 bp, Homo sapiens; identical to SEQ ID NO: 3257
  misc_feature 191, 238, 324: n = A,T,C or G

SEQ ID NO: 9583 - DNA, 410 bp, Homo sapiens; identical to SEQ ID NO: 3258

SEQ ID NO: 9584 - DNA, 306 bp, Homo sapiens; identical to SEQ ID NO: 3259
  misc_feature 8, 9: n = A,T,C or G

SEQ ID NO: 9585 - DNA, 559 bp, Homo sapiens; identical to SEQ ID NO: 3260
  misc_feature 459, 557: n = A,T,C or G

SEQ ID NO: 9586 - DNA, 311 bp, Homo sapiens; identical to SEQ ID NO: 3261
  misc_feature 21: n = A,T,C or G

SEQ ID NO: 9587 - DNA, 327 bp, Homo sapiens; identical to SEQ ID NO: 3262
  misc_feature 10, 203: n = A,T,C or G

SEQ ID NO: 9588 - DNA, 477 bp, Homo sapiens; identical to SEQ ID NO: 3263
  misc_feature 17, 212, 318, 475: n = A,T,C or G

SEQ ID NO: 9589 - DNA, 308 bp, Homo sapiens; identical to SEQ ID NO: 3264

SEQ ID NO: 9590 - DNA, 384 bp, Homo sapiens; identical to SEQ ID NO: 3265
  misc_feature 377: n = A,T,C or G

SEQ ID NO: 9591 - DNA, 364 bp, Homo sapiens; identical to SEQ ID NO: 3266
  misc_feature 24, 26, 44, 131, 202, 230, 232, 248, 256, 263, 290: n = A,T,C or G

SEQ ID NO: 9592 - DNA, 392 bp, Homo sapiens; identical to SEQ ID NO: 3267
  misc_feature 327, 378, 384: n = A,T,C or G

SEQ ID NO: 9593 - DNA, 243 bp, Homo sapiens; identical to SEQ ID NO: 3268
  misc_feature 128, 199, 232, 234: n = A,T,C or G

SEQ ID NO: 9594 - DNA, 630 bp, Homo sapiens; identical to SEQ ID NO: 3269
  misc_feature 122, 273, 355, 365, 367, 382, 386, 398, 407, 411, 432, 479,507, 534, 540, 571, 606: n = A,T,C or G

SEQ ID NO: 9595 - DNA, 411 bp, Homo sapiens; identical to SEQ ID NO: 3270
  misc_feature 378: n = A,T,C or G

SEQ ID NO: 9596 - DNA, 388 bp, Homo sapiens; identical to SEQ ID NO: 3271

SEQ ID NO: 9597 - DNA, 522 bp, Homo sapiens; identical to SEQ ID NO: 3272
  misc_feature 1, 11, 19, 24, 52, 68, 79, 82, 90, 95, 108, 221, 233, 280,319, 341, 350, 422, 426, 431, 432, 436, 443, 448, 466, 476,479, 504, 509: n = A,T,C or G

SEQ ID NO: 9598 - DNA, 398 bp, Homo sapiens; identical to SEQ ID NO: 3273

SEQ ID NO: 9599 - DNA, 331 bp, Homo sapiens; identical to SEQ ID NO: 3275
  misc_feature 239, 257, 258: n = A,T,C or G

SEQ ID NO: 9600 - DNA, 316 bp, Homo sapiens; identical to SEQ ID NO: 3276

SEQ ID NO: 9601 - DNA, 322 bp, Homo sapiens; identical to SEQ ID NO: 3277

SEQ ID NO: 9602 - DNA, 923 bp, Homo sapiens; identical to SEQ ID NO: 3278
  misc_feature 20, 24, 38, 52, 63, 76, 94, 179, 180, 190, 213, 220, 308,327, 339, 349, 428, 463, 464, 496, 548, 551, 567, 576, 577,581, 593, 596, 617, 645, 651, 675, 683, 684, 685, 689, 692,693, 695, 696, 697, 698, 699, 701, 707, 709, 714, 736: n = A,T,C or G
  misc_feature 742, 760, 761, 776, 786, 788, 790, 795, 800, 827, 839, 840,842, 844, 849, 850, 851, 862, 864, 865, 866, 873, 874, 877,879, 883, 888, 889, 903: n = A,T,C or G

SEQ ID NO: 9603 - DNA, 234 bp, Homo sapiens; identical to SEQ ID NO: 3279

SEQ ID NO: 9604 - DNA, 337 bp, Homo sapiens; identical to SEQ ID NO: 3280
  misc_feature 95, 192, 194, 202, 205, 213, 216: n = A,T,C or G

SEQ ID NO: 9605 - DNA, 459 bp, Homo sapiens; identical to SEQ ID NO: 3281
  misc_feature 253: n = A,T,C or G

SEQ ID NO: 9606 - DNA, 313 bp, Homo sapiens; identical to SEQ ID NO: 3282

SEQ ID NO: 9607 - DNA, 320 bp, Homo sapiens; identical to SEQ ID NO: 3283

SEQ ID NO: 9608 - DNA, 357 bp, Homo sapiens; identical to SEQ ID NO: 3284
  misc_feature 1, 33, 99, 104, 108, 198, 245, 266, 308: n = A,T,C or G

SEQ ID NO: 9609 - DNA, 386 bp, Homo sapiens; identical to SEQ ID NO: 3285
  misc_feature 17, 18, 19, 199: n = A,T,C or G

SEQ ID NO: 9610 - DNA, 362 bp, Homo sapiens; identical to SEQ ID NO: 3286
  misc_feature 13, 83: n = A,T,C or G

SEQ ID NO: 9611 - DNA, 312 bp, Homo sapiens; identical to SEQ ID NO: 3287

SEQ ID NO: 9612 - DNA, 319 bp, Homo sapiens; identical to SEQ ID NO: 3288

SEQ ID NO: 9613 - DNA, 657 bp, Homo sapiens; identical to SEQ ID NO: 3289
  misc_feature 129, 222, 268, 308, 414, 469, 470, 520, 531, 532, 579, 593,604, 613: n = A,T,C or G

SEQ ID NO: 9614 - DNA, 232 bp, Homo sapiens; identical to SEQ ID NO: 3291
  misc_feature 125: n = A,T,C or G

SEQ ID NO: 9615 - DNA, 321 bp, Homo sapiens; identical to SEQ ID NO: 3292

SEQ ID NO: 9616 - DNA, 322 bp, Homo sapiens; identical to SEQ ID NO: 3293

SEQ ID NO: 9617 - DNA, 523 bp, Homo sapiens; identical to SEQ ID NO: 3295
  misc_feature 454, 523: n = A,T,C or G

SEQ ID NO: 9618 - DNA, 378 bp, Homo sapiens; identical to SEQ ID NO: 3296
  misc_feature 153, 167: n = A,T,C or G

SEQ ID NO: 9619 - DNA, 556 bp, Homo sapiens; identical to SEQ ID NO: 3297
  misc_feature 134, 249, 284, 442, 464, 499, 503, 514: n = A,T,C or G

SEQ ID NO: 9620 - DNA, 536 bp, Homo sapiens; identical to SEQ ID NO: 3298

SEQ ID NO: 9621 - DNA, 522 bp, Homo sapiens; identical to SEQ ID NO: 3299
  misc_feature 476: n = A,T,C or G

SEQ ID NO: 9622 - DNA, 299 bp, Homo sapiens; identical to SEQ ID NO: 3301

SEQ ID NO: 9623 - DNA, 344 bp, Homo sapiens; identical to SEQ ID NO: 3302
  misc_feature 243, 304: n = A,T,C or G

SEQ ID NO: 9624 - DNA, 436 bp, Homo sapiens; identical to SEQ ID NO: 3303

SEQ ID NO: 9625 - DNA, 326 bp, Homo sapiens; identical to SEQ ID NO: 3304

SEQ ID NO: 9626 - DNA, 431 bp, Homo sapiens; identical to SEQ ID NO: 3305

SEQ ID NO: 9627 - DNA, 320 bp, Homo sapiens; identical to SEQ ID NO: 3306

SEQ ID NO: 9628 - DNA, 471 bp, Homo sapiens; identical to SEQ ID NO: 3307
  misc_feature 315, 347, 404, 429, 441: n = A,T,C or G

SEQ ID NO: 9629 - DNA, 461 bp, Homo sapiens; identical to SEQ ID NO: 3308
  misc_feature 432, 435: n = A,T,C or G

SEQ ID NO: 9630 - DNA, 256 bp, Homo sapiens; identical to SEQ ID NO: 3309
  misc_feature 189: n = A,T,C or G

SEQ ID NO: 9631 - DNA, 455 bp, Homo sapiens; identical to SEQ ID NO: 3310
  misc_feature 344, 362, 365: n = A,T,C or G

SEQ ID NO: 9632 - DNA, 319 bp, Homo sapiens; identical to SEQ ID NO: 3311

SEQ ID NO: 9633 - DNA, 429 bp, Homo sapiens; identical to SEQ ID NO: 3312
  misc_feature 343: n = A,T,C or G

SEQ ID NO: 9634 - DNA, 670 bp, Homo sapiens; identical to SEQ ID NO: 3313
  misc_feature 330, 344, 378, 380, 404, 414, 421, 426, 442, 446, 451, 454,458, 461, 467, 468, 469, 470, 478, 479, 483, 486, 487, 490,495, 498, 500, 501, 503, 504, 505, 506, 507, 511, 512, 513,514, 516, 519, 520, 524, 525, 528, 529, 530, 531, 541: n = A,T,C or G
  misc_feature 549, 553, 554, 555, 556, 560, 561, 563, 564, 565, 566, 567,568, 569, 574, 575, 576, 581, 582, 584, 585, 586, 587, 588,589, 590, 591, 592, 593, 594, 595, 609, 618, 625, 628, 646,654, 655, 656, 657, 662, 663: n = A,T,C or G

SEQ ID NO: 9635 - DNA, 297 bp, Homo sapiens; identical to SEQ ID NO: 3314

SEQ ID NO: 9636 - DNA, 470 bp, Homo sapiens; identical to SEQ ID NO: 3315
  misc_feature 404, 450, 456: n = A,T,C or G

SEQ ID NO: 9637 - DNA, 323 bp, Homo sapiens; identical to SEQ ID NO: 3316

SEQ ID NO: 9638 - DNA, 386 bp, Homo sapiens; identical to SEQ ID NO: 3317

SEQ ID NO: 9639 - DNA, 316 bp, Homo sapiens; identical to SEQ ID NO: 3318

SEQ ID NO: 9640 - DNA, 469 bp, Homo sapiens; identical to SEQ ID NO: 3319
  misc_feature 230: n = A,T,C or G

SEQ ID NO: 9641 - DNA, 315 bp, Homo sapiens; identical to SEQ ID NO: 3320

SEQ ID NO: 9642 - DNA, 588 bp, Homo sapiens; identical to SEQ ID NO: 3321
  misc_feature 537, 565: n = A,T,C or G

SEQ ID NO: 9643 - DNA, 414 bp, Homo sapiens; identical to SEQ ID NO: 3322

SEQ ID NO: 9644 - DNA, 555 bp, Homo sapiens; identical to SEQ ID NO: 3323
  misc_feature 487: n = A,T,C or G

SEQ ID NO: 9645 - DNA, 488 bp, Homo sapiens; identical to SEQ ID NO: 3324

SEQ ID NO: 9646 - DNA, 286 bp, Homo sapiens; identical to SEQ ID NO: 3325
  misc_feature 76, 105, 168, 171, 183: n = A,T,C or G

SEQ ID NO: 9647 - DNA, 479 bp, Homo sapiens; identical to SEQ ID NO: 3326

SEQ ID NO: 9648 - DNA, 318 bp, Homo sapiens; identical to SEQ ID NO: 3327

SEQ ID NO: 9649 - DNA, 733 bp, Homo sapiens; identical to SEQ ID NO: 3328
  misc_feature 543, 545, 554, 596, 624, 660, 670, 703: n = A,T,C or G

SEQ ID NO: 9650 - DNA, 410 bp, Homo sapiens; identical to SEQ ID NO: 3329

SEQ ID NO: 9651 - DNA, 399 bp, Homo sapiens; identical to SEQ ID NO: 3330

SEQ ID NO: 9652 - DNA, 250 bp, Homo sapiens; identical to SEQ ID NO: 3331
  misc_feature 100, 102, 103, 104, 105, 106, 107, 108, 109, 113, 115, 118,119, 120, 123, 124, 126, 127, 128, 129, 130, 131, 132, 133,134, 135, 138, 139, 141, 142, 143, 150, 152, 153, 154, 157,159, 160, 162, 166, 168, 173, 189, 194, 198, 210, 215: n = A,T,C or G
  misc_feature 217, 222, 223: n = A,T,C or G

SEQ ID NO: 9653 - DNA, 446 bp, Homo sapiens; identical to SEQ ID NO: 3332
  misc_feature 1, 26, 28, 46, 55, 220, 383: n = A,T,C or G

SEQ ID NO: 9654 - DNA, 316 bp, Homo sapiens; identical to SEQ ID NO: 3333
  misc_feature 158: n = A,T,C or G

SEQ ID NO: 9655 - DNA, 320 bp, Homo sapiens; identical to SEQ ID NO: 3334

SEQ ID NO: 9656 - DNA, 480 bp, Homo sapiens; identical to SEQ ID NO: 3335

SEQ ID NO: 9657 - DNA, 271 bp, Homo sapiens; identical to SEQ ID NO: 3336
  misc_feature 6, 20, 24, 28, 227: n = A,T,C or G

SEQ ID NO: 9658 - DNA, 440 bp, Homo sapiens; identical to SEQ ID NO: 3337
  misc_feature 300, 347, 354, 390, 395, 416, 419, 430, 433: n = A,T,C or G

SEQ ID NO: 9659 - DNA, 401 bp, Homo sapiens; identical to SEQ ID NO: 3338
  misc_feature 181, 282, 287, 293, 296, 309, 314: n = A,T,C or G

SEQ ID NO: 9660 - DNA, 207 bp, Homo sapiens; identical to SEQ ID NO: 3339

SEQ ID NO: 9661 - DNA, 552 bp, Homo sapiens; identical to SEQ ID NO: 3340

SEQ ID NO: 9662 - DNA, 297 bp, Homo sapiens; identical to SEQ ID NO: 3341

SEQ ID NO: 9663 - DNA, 369 bp, Homo sapiens; identical to SEQ ID NO: 3342

SEQ ID NO: 9664 - DNA, 529 bp, Homo sapiens; identical to SEQ ID NO: 3343
  misc_feature 175, 183, 226, 314, 393, 405, 517: n = A,T,C or G

SEQ ID NO: 9665 - DNA, 464 bp, Homo sapiens; identical to SEQ ID NO: 3344
  misc_feature 99, 279, 300, 303, 315, 331, 344, 352, 356, 371, 377, 380,383, 393, 403, 417, 422, 428, 431: n = A,T,C or G

SEQ ID NO: 9666 - DNA, 464 bp, Homo sapiens; identical to SEQ ID NO: 3345
  misc_feature 282, 319, 327, 333, 348, 360, 362, 411, 419, 423, 437, 444,447: n = A,T,C or G

SEQ ID NO: 9667 - DNA, 465 bp, Homo sapiens; identical to SEQ ID NO: 3346

SEQ ID NO: 9668 - DNA, 447 bp, Homo sapiens; identical to SEQ ID NO: 3347
  misc_feature 287, 296: n = A,T,C or G

SEQ ID NO: 9669 - DNA, 499 bp, Homo sapiens; identical to SEQ ID NO: 3348
  misc_feature 397, 420, 427, 449: n = A,T,C or G

SEQ ID NO: 9670 - DNA, 506 bp, Homo sapiens; identical to SEQ ID NO: 3349
  misc_feature 450: n = A,T,C or G

SEQ ID NO: 9671 - DNA, 124 bp, Homo sapiens; identical to SEQ ID NO: 3350

SEQ ID NO: 9672 - DNA, 469 bp, Homo sapiens; identical to SEQ ID NO: 3351

SEQ ID NO: 9673 - DNA, 667 bp, Homo sapiens; identical to SEQ ID NO: 3352
  misc_feature 386, 397, 413, 421, 425, 429, 434, 437, 443, 459, 488, 489,502, 526, 527, 528, 538, 541, 542, 546, 562, 566, 576, 581,582, 583, 587, 591, 601, 608, 618, 621, 633, 637, 642, 646,647, 657, 658: n = A,T,C or G

SEQ ID NO: 9674 - DNA, 510 bp, Homo sapiens; identical to SEQ ID NO: 3353
  misc_feature 463: n = A,T,C or G

SEQ ID NO: 9675 - DNA, 386 bp, Homo sapiens; identical to SEQ ID NO: 3354

SEQ ID NO: 9676 - DNA, 318 bp, Homo sapiens; identical to SEQ ID NO: 3355

SEQ ID NO: 9677 - DNA, 321 bp, Homo sapiens; identical to SEQ ID NO: 3356

SEQ ID NO: 9678 - DNA, 475 bp, Homo sapiens; identical to SEQ ID NO: 3357
  misc_feature 234, 440, 449, 455: n = A,T,C or G

SEQ ID NO: 9679 - DNA, 516 bp, Homo sapiens; identical to SEQ ID NO: 3358

SEQ ID NO: 9680 - DNA, 309 bp, Homo sapiens; identical to SEQ ID NO: 3359

SEQ ID NO: 9681 - DNA, 415 bp, Homo sapiens; identical to SEQ ID NO: 3360
  misc_feature 335, 370: n = A,T,C or G

SEQ ID NO: 9682 - DNA, 310 bp, Homo sapiens; identical to SEQ ID NO: 3361

SEQ ID NO: 9683 - DNA, 324 bp, Homo sapiens; identical to SEQ ID NO: 3362

SEQ ID NO: 9684 - DNA, 286 bp, Homo sapiens; identical to SEQ ID NO: 3363
  misc_feature 258: n = A,T,C or G

SEQ ID NO: 9685 - DNA, 296 bp, Homo sapiens; identical to SEQ ID NO: 3364

SEQ ID NO: 9686 - DNA, 450 bp, Homo sapiens; identical to SEQ ID NO: 3365
  misc_feature 10, 13, 29, 181, 193, 201, 222, 246, 248, 279, 303, 304,317, 324, 352, 367, 393, 401, 411: n = A,T,C or G

SEQ ID NO: 9687 - DNA, 310 bp, Homo sapiens; identical to SEQ ID NO: 3366

SEQ ID NO: 9688 - DNA, 474 bp, Homo sapiens; identical to SEQ ID NO: 3367

SEQ ID NO: 9689 - DNA, 331 bp, Homo sapiens; identical to SEQ ID NO: 3368

SEQ ID NO: 9690 - DNA, 656 bp, Homo sapiens; identical to SEQ ID NO: 3370
  misc_feature 514, 590, 609: n = A,T,C or G

SEQ ID NO: 9691 - DNA, 431 bp, Homo sapiens; identical to SEQ ID NO: 3371
  misc_feature 392: n = A,T,C or G

SEQ ID NO: 9692 - DNA, 513 bp, Homo sapiens; identical to SEQ ID NO: 3372

SEQ ID NO: 9693 - DNA, 422 bp, Homo sapiens; identical to SEQ ID NO: 3373
  misc_feature 383: n = A,T,C or G

SEQ ID NO: 9694 - DNA, 246 bp, Homo sapiens; identical to SEQ ID NO: 3374

SEQ ID NO: 9695 - DNA, 567 bp, Homo sapiens; identical to SEQ ID NO: 3375
  misc_feature 4, 13, 14, 17, 21, 29, 35, 40, 50, 58, 174, 185, 223, 274,304, 537, 552: n = A,T,C or G

SEQ ID NO: 9696 - DNA, 503 bp, Homo sapiens; identical to SEQ ID NO: 3377
  misc_feature 206, 441: n = A,T,C or G

SEQ ID NO: 9697 - DNA, 625 bp, Homo sapiens; identical to SEQ ID NO: 3378
  misc_feature 321, 328, 356, 357, 507, 525, 538, 590, 602: n = A,T,C or G

SEQ ID NO: 9698 - DNA, 495 bp, Homo sapiens; identical to SEQ ID NO: 3379
  misc_feature 368, 444: n = A,T,C or G

SEQ ID NO: 9699 - DNA, 413 bp, Homo sapiens; identical to SEQ ID NO: 3380
  misc_feature 316, 351, 370: n = A,T,C or G

SEQ ID NO: 9700 - DNA, 399 bp, Homo sapiens; identical to SEQ ID NO: 3381

SEQ ID NO: 9701 - DNA, 319 bp, Homo sapiens; identical to SEQ ID NO: 3383

SEQ ID NO: 9702 - DNA, 564 bp, Homo sapiens; identical to SEQ ID NO: 3384

SEQ ID NO: 9703 - DNA, 599 bp, Homo sapiens; identical to SEQ ID NO: 3385
  misc_feature 549: n = A,T,C or G

SEQ ID NO: 9704 - DNA, 488 bp, Homo sapiens; identical to SEQ ID NO: 3386
  misc_feature 433, 441: n = A,T,C or G

SEQ ID NO: 9705 - DNA, 314 bp, Homo sapiens; identical to SEQ ID NO: 3387

SEQ ID NO: 9706 - DNA, 402 bp, Homo sapiens; identical to SEQ ID NO: 3388

SEQ ID NO: 9707 - DNA, 629 bp, Homo sapiens; identical to SEQ ID NO: 3389
  misc_feature 342, 408, 481, 488, 519, 578, 593: n = A,T,C or G

SEQ ID NO: 9708 - DNA, 401 bp, Homo sapiens; identical to SEQ ID NO: 3390
  misc_feature 142, 284, 368, 369, 390: n = A,T,C or G

SEQ ID NO: 9709 - DNA, 316 bp, Homo sapiens; identical to SEQ ID NO: 3391

SEQ ID NO: 9710 - DNA, 322 bp, Homo sapiens; identical to SEQ ID NO: 3392

SEQ ID NO: 9711 - DNA, 397 bp, Homo sapiens; identical to SEQ ID NO: 3393
  misc_feature 193: n = A,T,C or G

SEQ ID NO: 9712 - DNA, 332 bp, Homo sapiens; identical to SEQ ID NO: 3394

SEQ ID NO: 9713 - DNA, 278 bp, Homo sapiens; identical to SEQ ID NO: 3395

SEQ ID NO: 9714 - DNA, 371 bp, Homo sapiens; identical to SEQ ID NO: 3396

SEQ ID NO: 9715 - DNA, 531 bp, Homo sapiens; identical to SEQ ID NO: 3397
  misc_feature 355, 362, 385, 421, 431, 457, 465, 477, 497, 503, 507: n = A,T,C or G

SEQ ID NO: 9716 - DNA, 438 bp, Homo sapiens; identical to SEQ ID NO: 3398
  misc_feature 132, 144: n = A,T,C or G

SEQ ID NO: 9717 - DNA, 646 bp, Homo sapiens; identical to SEQ ID NO: 3399
  misc_feature 473, 537, 548, 614: n = A,T,C or G

SEQ ID NO: 9718 - DNA, 631 bp, Homo sapiens; identical to SEQ ID NO: 3400
  misc_feature 335, 413, 488, 539, 545, 565, 566, 587, 590, 605: n = A,T,C or G

SEQ ID NO: 9719 - DNA, 525 bp, Homo sapiens; identical to SEQ ID NO: 3401
  misc_feature 366, 478, 490: n = A,T,C or G

SEQ ID NO: 9720 - DNA, 316 bp, Homo sapiens; identical to SEQ ID NO: 3402
  misc_feature 145: n = A,T,C or G

SEQ ID NO: 9721 - DNA, 569 bp, Homo sapiens; identical to SEQ ID NO: 3403

SEQ ID NO: 9722 - DNA, 539 bp, Homo sapiens; identical to SEQ ID NO: 3404

SEQ ID NO: 9723 - DNA, 364 bp, Homo sapiens; identical to SEQ ID NO: 3405
  misc_feature 284, 332, 347: n = A,T,C or G

SEQ ID NO: 9724 - DNA, 410 bp, Homo sapiens; identical to SEQ ID NO: 3406
  misc_feature 379: n = A,T,C or G

SEQ ID NO: 9725 - DNA, 312 bp, Homo sapiens; identical to SEQ ID NO: 3407

SEQ ID NO: 9726 - DNA, 295 bp, Homo sapiens; identical to SEQ ID NO: 3408

SEQ ID NO: 9727 - DNA, 390 bp, Homo sapiens; identical to SEQ ID NO: 3409
  misc_feature 215, 327: n = A,T,C or G

SEQ ID NO: 9728 - DNA, 516 bp, Homo sapiens; identical to SEQ ID NO: 3410
  misc_feature 408, 468: n = A,T,C or G

SEQ ID NO: 9729 - DNA, 416 bp, Homo sapiens; identical to SEQ ID NO: 3411
  misc_feature 256, 410: n = A,T,C or G

SEQ ID NO: 9730 - DNA, 556 bp, Homo sapiens; identical to SEQ ID NO: 3412
  misc_feature 493: n = A,T,C or G

SEQ ID NO: 9731 - DNA, 409 bp, Homo sapiens; identical to SEQ ID NO: 3413

SEQ ID NO: 9732 - DNA, 460 bp, Homo sapiens; identical to SEQ ID NO: 3414
  misc_feature 76: n = A,T,C or G

SEQ ID NO: 9733 - DNA, 400 bp, Homo sapiens; identical to SEQ ID NO: 3415

SEQ ID NO: 9734 - DNA, 403 bp, Homo sapiens; identical to SEQ ID NO: 3416
  misc_feature 200, 284, 331, 337, 351: n = A,T,C or G

SEQ ID NO: 9735 - DNA, 370 bp, Homo sapiens; identical to SEQ ID NO: 3417
  misc_feature 344, 357: n = A,T,C or G

SEQ ID NO: 9736 - DNA, 354 bp, Homo sapiens; identical to SEQ ID NO: 3418
  misc_feature 80, 199, 349: n = A,T,C or G

SEQ ID NO: 9737 - DNA, 304 bp, Homo sapiens; identical to SEQ ID NO: 3419
  misc_feature 217, 221, 223, 228, 230, 234, 257, 266, 271, 277, 281, 283,288, 293: n = A,T,C or G

SEQ ID NO: 9738 - DNA, 325 bp, Homo sapiens; identical to SEQ ID NO: 3420

SEQ ID NO: 9739 - DNA, 706 bp, Homo sapiens; identical to SEQ ID NO: 3421
  misc_feature 301, 434, 482, 508, 523, 526, 541, 543, 562, 596, 602, 620,631, 639, 662, 663, 691: n = A,T,C or G

SEQ ID NO: 9740 - DNA, 564 bp, Homo sapiens; identical to SEQ ID NO: 3422
  misc_feature 60, 152, 159, 217, 246, 247, 264, 315, 317, 331, 340, 372,374, 385, 391, 427, 470, 519, 520, 534, 546: n = A,T,C or G

SEQ ID NO: 9741 - DNA, 191 bp, Homo sapiens; identical to SEQ ID NO: 3423
  misc_feature 130: n = A,T,C or G

SEQ ID NO: 9742 - DNA, 420 bp, Homo sapiens; identical to SEQ ID NO: 3424
  misc_feature 391, 420: n = A,T,C or G

SEQ ID NO: 9743 - DNA, 286 bp, Homo sapiens; identical to SEQ ID NO: 3425
  misc_feature 93, 100, 101, 104, 174, 205, 240, 254, 279: n = A,T,C or G

SEQ ID NO: 9744 - DNA, 166 bp, Homo sapiens; identical to SEQ ID NO: 3426

SEQ ID NO: 9745 - DNA, 558 bp, Homo sapiens; identical to SEQ ID NO: 3427
  misc_feature 111, 134, 166, 190, 206, 208, 214, 223, 229, 231, 238, 240,242, 247, 270, 285, 294, 303, 305, 316, 328, 341, 354, 381,383, 387, 415, 439, 457, 458, 468, 475, 478, 490, 492, 496,498, 508, 509, 558: n = A,T,C or G

SEQ ID NO: 9746 - DNA, 403 bp, Homo sapiens; identical to SEQ ID NO: 3428

SEQ ID NO: 9747 - DNA, 310 bp, Homo sapiens; identical to SEQ ID NO: 3429

SEQ ID NO: 9748 - DNA, 281 bp, Homo sapiens; identical to SEQ ID NO: 3430

SEQ ID NO: 9749 - DNA, 397 bp, Homo sapiens; identical to SEQ ID NO: 3431
  misc_feature 63, 139, 158, 192, 245, 297, 329, 336, 340, 371, 372, 385: n = A,T,C or G

SEQ ID NO: 9750 - DNA, 313 bp, Homo sapiens; identical to SEQ ID NO: 3432
  misc_feature 281, 297: n = A,T,C or G

SEQ ID NO: 9751 - DNA, 314 bp, Homo sapiens; identical to SEQ ID NO: 3433

SEQ ID NO: 9752 - DNA, 490 bp, Homo sapiens; identical to SEQ ID NO: 3434
  misc_feature 7, 251, 365, 429, 452, 464: n = A,T,C or G

SEQ ID NO: 9753 - DNA, 309 bp, Homo sapiens; identical to SEQ ID NO: 3435

SEQ ID NO: 9754 - DNA, 384 bp, Homo sapiens; identical to SEQ ID NO: 3436
  misc_feature 341: n = A,T,C or G

SEQ ID NO: 9755 - DNA, 434 bp, Homo sapiens; identical to SEQ ID NO: 3437

SEQ ID NO: 9756 - DNA, 319 bp, Homo sapiens; identical to SEQ ID NO: 3438
  misc_feature 233, 239, 259, 261, 263, 265, 268, 274: n = A,T,C or G

SEQ ID NO: 9757 - DNA, 514 bp, Homo sapiens; identical to SEQ ID NO: 3439
  misc_feature 381, 398, 407, 416, 420, 462, 465, 479, 503: n = A,T,C or G

SEQ ID NO: 9758 - DNA, 296 bp, Homo sapiens; identical to SEQ ID NO: 3440

SEQ ID NO: 9759 - DNA, 801 bp, Homo sapiens; identical to SEQ ID NO: 3442
  misc_feature 192, 207, 216, 224, 227, 409, 467, 587, 588, 592, 606, 665,684, 694, 753: n = A,T,C or G

SEQ ID NO: 9760 - DNA, 479 bp, Homo sapiens; identical to SEQ ID NO: 3443

SEQ ID NO: 9761 - DNA, 104 bp, Homo sapiens; identical to SEQ ID NO: 3444
  misc_feature 47, 54, 82: n = A,T,C or G

SEQ ID NO: 9762 - DNA, 478 bp, Homo sapiens; identical to SEQ ID NO: 3445
  misc_feature 436: n = A,T,C or G

SEQ ID NO: 9763 - DNA, 257 bp, Homo sapiens; identical to SEQ ID NO: 3446

SEQ ID NO: 9764 - DNA, 337 bp, Homo sapiens; identical to SEQ ID NO: 3447
  misc_feature 117, 122, 133, 287: n = A,T,C or G

SEQ ID NO: 9765 - DNA, 427 bp, Homo sapiens; identical to SEQ ID NO: 3448
  misc_feature 142, 212: n = A,T,C or G

SEQ ID NO: 9766 - DNA, 484 bp, Homo sapiens; identical to SEQ ID NO: 3449
  misc_feature 235, 461, 463: n = A,T,C or G

SEQ ID NO: 9767 - DNA, 465 bp, Homo sapiens; identical to SEQ ID NO: 3450

SEQ ID NO: 9768 - DNA, 398 bp, Homo sapiens; identical to SEQ ID NO: 3451

SEQ ID NO: 9769 - DNA, 323 bp, Homo sapiens; identical to SEQ ID NO: 3452
  misc_feature 15, 237: n = A,T,C or G

SEQ ID NO: 9770 - DNA, 418 bp, Homo sapiens; identical to SEQ ID NO: 3453
  misc_feature 395: n = A,T,C or G

SEQ ID NO: 9771 - DNA, 434 bp, Homo sapiens; identical to SEQ ID NO: 3455

SEQ ID NO: 9772 - DNA, 271 bp, Homo sapiens; identical to SEQ ID NO: 3456
  misc_feature 2, 22, 122, 140, 256: n = A,T,C or G

SEQ ID NO: 9773 - DNA, 326 bp, Homo sapiens; identical to SEQ ID NO: 3457
  misc_feature 19, 77, 78, 122, 137, 138, 177, 185, 190, 201, 215, 216,248, 250, 302, 314: n = A,T,C or G

SEQ ID NO: 9774 - DNA, 471 bp, Homo sapiens; identical to SEQ ID NO: 3458
  misc_feature 262, 435: n = A,T,C or G

SEQ ID NO: 9775 - DNA, 389 bp, Homo sapiens; identical to SEQ ID NO: 3459
  misc_feature 323: n = A,T,C or G

SEQ ID NO: 9776 - DNA, 327 bp, Homo sapiens; identical to SEQ ID NO: 3460

SEQ ID NO: 9777 - DNA, 254 bp, Homo sapiens; identical to SEQ ID NO: 3461
  misc_feature 22, 67, 70, 85, 90, 94, 103, 108, 117, 124, 139, 158, 172,173, 214, 224, 246, 252: n = A,T,C or G

SEQ ID NO: 9778 - DNA, 322 bp, Homo sapiens; identical to SEQ ID NO: 3462
  misc_feature 103: n = A,T,C or G

SEQ ID NO: 9779 - DNA, 735 bp, Homo sapiens; identical to SEQ ID NO: 3463
  misc_feature 137, 149, 153, 159, 188, 192, 198, 201, 227, 231, 238, 266,270, 278, 279, 290, 291, 293, 294, 295, 303, 316, 368, 490,508, 517, 530, 539, 545, 603, 605, 608, 610, 620, 638, 647,657, 673, 674, 682, 689, 698, 703: n = A,T,C or G

SEQ ID NO: 9780 - DNA, 401 bp, Homo sapiens; identical to SEQ ID NO: 3464

SEQ ID NO: 9781 - DNA, 458 bp, Homo sapiens; identical to SEQ ID NO: 3465
  misc_feature 171, 190, 344, 385, 402, 434: n = A,T,C or G

SEQ ID NO: 9782 - DNA, 338 bp, Homo sapiens; identical to SEQ ID NO: 3466

SEQ ID NO: 9783 - DNA, 290 bp, Homo sapiens; identical to SEQ ID NO: 3467

SEQ ID NO: 9784 - DNA, 519 bp, Homo sapiens; identical to SEQ ID NO: 3468

SEQ ID NO: 9785 - DNA, 503 bp, Homo sapiens; identical to SEQ ID NO: 3469
  misc_feature 252, 356, 373, 471, 484: n = A,T,C or G

SEQ ID NO: 9786 - DNA, 389 bp, Homo sapiens; identical to SEQ ID NO: 3470
  misc_feature 284: n = A,T,C or G

SEQ ID NO: 9787 - DNA, 303 bp, Homo sapiens; identical to SEQ ID NO: 3471

SEQ ID NO: 9788 - DNA, 407 bp, Homo sapiens; identical to SEQ ID NO: 3472

SEQ ID NO: 9789 - DNA, 447 bp, Homo sapiens; identical to SEQ ID NO: 3473
  misc_feature 180, 299, 312, 360, 410, 415, 419, 420, 422: n = A,T,C or G

SEQ ID NO: 9790 - DNA, 427 bp, Homo sapiens; identical to SEQ ID NO: 3474

SEQ ID NO: 9791 - DNA, 406 bp, Homo sapiens; identical to SEQ ID NO: 3475
  misc_feature 307: n = A,T,C or G

SEQ ID NO: 9792 - DNA, 329 bp, Homo sapiens; identical to SEQ ID NO: 3476

SEQ ID NO: 9793 - DNA, 310 bp, Homo sapiens; identical to SEQ ID NO: 3477
  misc_feature 172: n = A,T,C or G

SEQ ID NO: 9794 - DNA, 533 bp, Homo sapiens; identical to SEQ ID NO: 3478
  misc_feature 329, 402, 425, 426, 445, 451, 454, 458, 483, 501, 502, 505,507, 509, 512, 514, 519, 522: n = A,T,C or G

SEQ ID NO: 9795 - DNA, 444 bp, Homo sapiens; identical to SEQ ID NO: 3479
  misc_feature 319: n = A,T,C or G

SEQ ID NO: 9796 - DNA, 395 bp, Homo sapiens; identical to SEQ ID NO: 3480
  misc_feature 367: n = A,T,C or G

SEQ ID NO: 9797 - DNA, 200 bp, Homo sapiens; identical to SEQ ID NO: 3481

SEQ ID NO: 9798 - DNA, 244 bp, Homo sapiens; identical to SEQ ID NO: 3482
  misc_feature 164, 197: n = A,T,C or G

SEQ ID NO: 9799 - DNA, 206 bp, Homo sapiens; identical to SEQ ID NO: 3483

SEQ ID NO: 9800 - DNA, 432 bp, Homo sapiens; identical to SEQ ID NO: 3484

SEQ ID NO: 9801 - DNA, 360 bp, Homo sapiens; identical to SEQ ID NO: 3485
  misc_feature 121: n = A,T,C or G

SEQ ID NO: 9802 - DNA, 322 bp, Homo sapiens; identical to SEQ ID NO: 3486

SEQ ID NO: 9803 - DNA, 322 bp, Homo sapiens; identical to SEQ ID NO: 3487

SEQ ID NO: 9804 - DNA, 245 bp, Homo sapiens; identical to SEQ ID NO: 3488
  misc_feature 132, 155, 157, 182, 212: n = A,T,C or G

SEQ ID NO: 9805 - DNA, 331 bp, Homo sapiens; identical to SEQ ID NO: 3489

SEQ ID NO: 9806 - DNA, 382 bp, Homo sapiens; identical to SEQ ID NO: 3490
  misc_feature 3, 5, 8, 11, 34, 40, 41, 101, 294, 302, 321: n = A,T,C or G

SEQ ID NO: 9807 - DNA, 446 bp, Homo sapiens; identical to SEQ ID NO: 3491

SEQ ID NO: 9808 - DNA, 324 bp, Homo sapiens; identical to SEQ ID NO: 3493

SEQ ID NO: 9809 - DNA, 534 bp, Homo sapiens; identical to SEQ ID NO: 3494
  misc_feature 376, 436, 441, 454, 456, 505, 506: n = A,T,C or G

SEQ ID NO: 9810 - DNA, 534 bp, Homo sapiens; identical to SEQ ID NO: 3495
  misc_feature 191, 318, 353, 355, 375, 429, 473, 484, 496, 503, 514, 529: n = A,T,C or G

SEQ ID NO: 9811 - DNA, 327 bp, Homo sapiens; identical to SEQ ID NO: 3496

SEQ ID NO: 9812 - DNA, 505 bp, Homo sapiens; identical to SEQ ID NO: 3497
  misc_feature 445, 455: n = A,T,C or G

SEQ ID NO: 9813 - DNA, 318 bp, Homo sapiens; identical to SEQ ID NO: 3498
  misc_feature 251, 306: n = A,T,C or G

SEQ ID NO: 9814 - DNA, 442 bp, Homo sapiens; identical to SEQ ID NO: 3499

SEQ ID NO: 9815 - DNA, 325 bp, Homo sapiens; identical to SEQ ID NO: 3500

SEQ ID NO: 9816 - DNA, 342 bp, Homo sapiens; identical to SEQ ID NO: 3501

SEQ ID NO: 9817 - DNA, 328 bp, Homo sapiens; identical to SEQ ID NO: 3502

SEQ ID NO: 9818 - DNA, 552 bp, Homo sapiens; identical to SEQ ID NO: 3503
  misc_feature 499: n = A,T,C or G

SEQ ID NO: 9819 - DNA, 359 bp, Homo sapiens; identical to SEQ ID NO: 3504
  misc_feature 189, 205, 229, 323: n = A,T,C or G

SEQ ID NO: 9820 - DNA, 411 bp, Homo sapiens; identical to SEQ ID NO: 3505
  misc_feature 163, 185, 258, 265, 275: n = A,T,C or G

SEQ ID NO: 9821 - DNA, 439 bp, Homo sapiens; identical to SEQ ID NO: 3506
  misc_feature 344, 347, 392: n = A,T,C or G

SEQ ID NO: 9822 - DNA, 370 bp, Homo sapiens; identical to SEQ ID NO: 3507
  misc_feature 126, 130, 133: n = A,T,C or G

SEQ ID NO: 9823 - DNA, 412 bp, Homo sapiens; identical to SEQ ID NO: 3508
  misc_feature 242, 357: n = A,T,C or G

SEQ ID NO: 9824 - DNA, 444 bp, Homo sapiens; identical to SEQ ID NO: 3509

SEQ ID NO: 9825 - DNA, 366 bp, Homo sapiens; identical to SEQ ID NO: 3510
  misc_feature 127, 129, 135, 161: n = A,T,C or G

SEQ ID NO: 9826 - DNA, 171 bp, Homo sapiens; identical to SEQ ID NO: 3511
  misc_feature 8, 27: n = A,T,C or G

SEQ ID NO: 9827 - DNA, 260 bp, Homo sapiens; identical to SEQ ID NO: 3512

SEQ ID NO: 9828 - DNA, 755 bp, Homo sapiens; identical to SEQ ID NO: 3513
  misc_feature 536, 582, 664, 673, 684, 685, 744: n = A,T,C or G

SEQ ID NO: 9829 - DNA, 461 bp, Homo sapiens; identical to SEQ ID NO: 3514
  misc_feature 337: n = A,T,C or G

SEQ ID NO: 9830 - DNA, 434 bp, Homo sapiens; identical to SEQ ID NO: 3515

SEQ ID NO: 9831 - DNA, 286 bp, Homo sapiens; identical to SEQ ID NO: 3516

SEQ ID NO: 9832 - DNA, 402 bp, Homo sapiens; identical to SEQ ID NO: 3517

SEQ ID NO: 9833 - DNA, 675 bp, Homo sapiens; identical to SEQ ID NO: 3518
  misc_feature 621, 649, 653, 660: n = A,T,C or G

SEQ ID NO: 9834 - DNA, 344 bp, Homo sapiens; identical to SEQ ID NO: 3519
  misc_feature 296, 332: n = A,T,C or G

SEQ ID NO: 9835 - DNA, 522 bp, Homo sapiens; identical to SEQ ID NO: 3520
  misc_feature 244, 335: n = A,T,C or G

SEQ ID NO: 9836 - DNA, 327 bp, Homo sapiens; identical to SEQ ID NO: 3521

SEQ ID NO: 9837 - DNA, 330 bp, Homo sapiens; identical to SEQ ID NO: 3522

SEQ ID NO: 9838 - DNA, 331 bp, Homo sapiens; identical to SEQ ID NO: 3523

SEQ ID NO: 9839 - DNA, 622 bp, Homo sapiens; identical to SEQ ID NO: 3524
  misc_feature 407, 484, 545, 562, 577, 602: n = A,T,C or G

SEQ ID NO: 9840 - DNA, 569 bp, Homo sapiens; identical to SEQ ID NO: 3525
  misc_feature 403, 526, 527, 529, 563: n = A,T,C or G

SEQ ID NO: 9841 - DNA, 196 bp, Homo sapiens; identical to SEQ ID NO: 3526

SEQ ID NO: 9842 - DNA, 536 bp, Homo sapiens; identical to SEQ ID NO: 3527
  misc_feature 524: n = A,T,C or G

SEQ ID NO: 9843 - DNA, 356 bp, Homo sapiens; identical to SEQ ID NO: 3528
  misc_feature 343: n = A,T,C or G

SEQ ID NO: 9844 - DNA, 381 bp, Homo sapiens; identical to SEQ ID NO: 3529
  misc_feature 91, 103, 108, 135, 158, 232, 255, 274, 293, 312, 324, 328,336, 342, 344, 345: n = A,T,C or G

SEQ ID NO: 9845 - DNA, 365 bp, Homo sapiens; identical to SEQ ID NO: 3530
  misc_feature 135: n = A,T,C or G

SEQ ID NO: 9846 - DNA, 516 bp, Homo sapiens; identical to SEQ ID NO: 3531
  misc_feature 483, 509: n = A,T,C or G

SEQ ID NO: 9847 - DNA, 316 bp, Homo sapiens; identical to SEQ ID NO: 3532
  misc_feature 302: n = A,T,C or G

SEQ ID NO: 9848 - DNA, 362 bp, Homo sapiens; identical to SEQ ID NO: 3533
  misc_feature 127, 128: n = A,T,C or G

SEQ ID NO: 9849 - DNA, 456 bp, Homo sapiens; identical to SEQ ID NO: 3534
  misc_feature 363, 390: n = A,T,C or G

SEQ ID NO: 9850 - DNA, 679 bp, Homo sapiens; identical to SEQ ID NO: 3535
  misc_feature 457, 498, 509, 512, 515, 521, 552, 570, 576, 579, 605, 618,670: n = A,T,C or G

SEQ ID NO: 9851 - DNA, 338 bp, Homo sapiens; identical to SEQ ID NO: 3536

SEQ ID NO: 9852 - DNA, 373 bp, Homo sapiens; identical to SEQ ID NO: 3538

SEQ ID NO: 9853 - DNA, 402 bp, Homo sapiens; identical to SEQ ID NO: 3539
  misc_feature 140, 355, 393: n = A,T,C or G

SEQ ID NO: 9854 - DNA, 346 bp, Homo sapiens; identical to SEQ ID NO: 3540

SEQ ID NO: 9855 - DNA, 330 bp, Homo sapiens; identical to SEQ ID NO: 3541

SEQ ID NO: 9856 - DNA, 741 bp, Homo sapiens; identical to SEQ ID NO: 3542
  misc_feature 83, 90, 367, 368, 369, 370, 371, 373, 374, 375, 376, 377,379, 380, 381, 382, 383, 384, 385, 386, 387, 438, 465, 491,538, 541, 549, 555, 558, 571, 579, 586, 602, 615, 634, 641,648, 660, 669, 670, 671, 672, 673, 674, 675, 676, 677: n = A,T,C or G
  misc_feature 678, 679, 680, 681, 682, 683, 684, 685, 686, 687, 688, 689,690, 691, 692, 693, 694, 695, 696, 697, 700, 703, 704, 709,715, 718, 721, 727, 729, 737, 741: n = A,T,C or G

SEQ ID NO: 9857 - DNA, 486 bp, Homo sapiens; identical to SEQ ID NO: 3543

SEQ ID NO: 9858 - DNA, 334 bp, Homo sapiens; identical to SEQ ID NO: 3544

SEQ ID NO: 9859 - DNA, 327 bp, Homo sapiens; identical to SEQ ID NO: 3545

SEQ ID NO: 9860 - DNA, 592 bp, Homo sapiens; identical to SEQ ID NO: 3546
  misc_feature 55, 57, 539, 582: n = A,T,C or G

SEQ ID NO: 9861 - DNA, 398 bp, Homo sapiens; identical to SEQ ID NO: 3547
  misc_feature 325: n = A,T,C or G

SEQ ID NO: 9862 - DNA, 426 bp, Homo sapiens; identical to SEQ ID NO: 3548
  misc_feature 332, 338, 365, 402, 406, 412: n = A,T,C or G

SEQ ID NO: 9863 - DNA, 502 bp, Homo sapiens; identical to SEQ ID NO: 3549

SEQ ID NO: 9864 - DNA, 398 bp, Homo sapiens; identical to SEQ ID NO: 3550
  misc_feature 314, 319, 324, 325, 377: n = A,T,C or G

SEQ ID NO: 9865 - DNA, 365 bp, Homo sapiens; identical to SEQ ID NO: 3551
  misc_feature 134: n = A,T,C or G

SEQ ID NO: 9866 - DNA, 576 bp, Homo sapiens; identical to SEQ ID NO: 3552
  misc_feature 371, 442, 458, 478, 502, 519, 528, 553, 569: n = A,T,C or G

SEQ ID NO: 9867 - DNA, 530 bp, Homo sapiens; identical to SEQ ID NO: 3553
  misc_feature 208, 213, 231, 301, 330, 334, 344, 353, 376, 407, 415, 429,449, 466, 480: n = A,T,C or G

SEQ ID NO: 9868 - DNA, 580 bp, Homo sapiens; identical to SEQ ID NO: 3554
  misc_feature 67, 73, 121, 126, 159, 188, 192, 207, 208, 221, 236, 237,241, 249, 262, 264, 269, 291, 301, 304, 320, 367, 370, 372,386, 399, 418, 421, 423, 435, 437, 457, 458, 460, 467, 475,486, 496, 502, 516, 525, 526, 527, 529, 530, 535, 538: n = A,T,C or G
  misc_feature 544, 550, 552, 553, 558, 559, 561, 562, 570: n = A,T,C or G

SEQ ID NO: 9869 - DNA, 331 bp, Homo sapiens; identical to SEQ ID NO: 3555
  misc_feature 264: n = A,T,C or G

SEQ ID NO: 9870 - DNA, 685 bp, Homo sapiens; identical to SEQ ID NO: 3556
  misc_feature 345, 348, 365, 442, 448, 479, 489, 497, 513, 523, 526, 530,531, 532, 533, 547, 556, 557, 560, 564, 565, 573, 574, 580,582, 590, 596, 597, 598, 599, 604, 631, 638, 640, 641, 651,667, 669, 683: n = A,T,C or G

SEQ ID NO: 9871 - DNA, 561 bp, Homo sapiens; identical to SEQ ID NO: 3557
  misc_feature 552, 556, 558: n = A,T,C or G

SEQ ID NO: 9872 - DNA, 672 bp, Homo sapiens; identical to SEQ ID NO: 3558
  misc_feature 473, 475, 502, 548, 555, 562, 571, 574, 582, 598, 620, 633,639, 645, 647, 657: n = A,T,C or G

SEQ ID NO: 9873 - DNA, 387 bp, Homo sapiens; identical to SEQ ID NO: 3559
  misc_feature 294: n = A,T,C or G

SEQ ID NO: 9874 - DNA, 310 bp, Homo sapiens; identical to SEQ ID NO: 3560

SEQ ID NO: 9875 - DNA, 502 bp, Homo sapiens; identical to SEQ ID NO: 3561
  misc_feature 88, 126, 217, 403, 426, 439, 445, 481: n = A,T,C or G

SEQ ID NO: 9876 - DNA, 316 bp, Homo sapiens; identical to SEQ ID NO: 3562

SEQ ID NO: 9877 - DNA, 504 bp, Homo sapiens; identical to SEQ ID NO: 3563
  misc_feature 499: n = A,T,C or G

SEQ ID NO: 9878 - DNA, 716 bp, Homo sapiens; identical to SEQ ID NO: 3564
  misc_feature 488, 502, 591, 599, 607, 609, 611, 632, 641, 650, 653, 665,679, 681, 682, 684: n = A,T,C or G

SEQ ID NO: 9879 - DNA, 422 bp, Homo sapiens; identical to SEQ ID NO: 3565
  misc_feature 65, 72, 114, 120, 131, 135, 144, 193, 269, 341, 358, 373,408, 409: n = A,T,C or G

SEQ ID NO: 9880 - DNA, 441 bp, Homo sapiens; identical to SEQ ID NO: 3566
  misc_feature 428: n = A,T,C or G

SEQ ID NO: 9881 - DNA, 338 bp, Homo sapiens; identical to SEQ ID NO: 3567
  misc_feature 271, 286, 290, 292, 298, 299, 300, 301, 302, 304, 307, 309,319, 320, 321, 324, 326, 332, 335: n = A,T,C or G

SEQ ID NO: 9882 - DNA, 543 bp, Homo sapiens; identical to SEQ ID NO: 3568

SEQ ID NO: 9883 - DNA, 582 bp, Homo sapiens; identical to SEQ ID NO: 3569
  misc_feature 447, 563: n = A,T,C or G

SEQ ID NO: 9884 - DNA, 319 bp, Homo sapiens; identical to SEQ ID NO: 3570

SEQ ID NO: 9885 - DNA, 717 bp, Homo sapiens; identical to SEQ ID NO: 3571
  misc_feature 530, 577, 586, 631, 694, 701: n = A,T,C or G

SEQ ID NO: 9886 - DNA, 325 bp, Homo sapiens; identical to SEQ ID NO: 3572

SEQ ID NO: 9887 - DNA, 335 bp, Homo sapiens; identical to SEQ ID NO: 3573

SEQ ID NO: 9888 - DNA, 347 bp, Homo sapiens; identical to SEQ ID NO: 3574
  misc_feature 288: n = A,T,C or G

SEQ ID NO: 9889 - DNA, 615 bp, Homo sapiens; identical to SEQ ID NO: 3575
  misc_feature 375, 496, 497, 525, 550: n = A,T,C or G

SEQ ID NO: 9890 - DNA, 409 bp, Homo sapiens; identical to SEQ ID NO: 3576
  misc_feature 230: n = A,T,C or G

SEQ ID NO: 9891 - DNA, 384 bp, Homo sapiens; identical to SEQ ID NO: 3577
  misc_feature 370: n = A,T,C or G

SEQ ID NO: 9892 - DNA, 384 bp, Homo sapiens; identical to SEQ ID NO: 3578
  misc_feature 28, 62: n = A,T,C or G

SEQ ID NO: 9893 - DNA, 585 bp, Homo sapiens; identical to SEQ ID NO: 3579
  misc_feature 574: n = A,T,C or G

SEQ ID NO: 9894 - DNA, 266 bp, Homo sapiens; identical to SEQ ID NO: 3580
  misc_feature 194, 206, 234, 235, 236, 245, 251, 252, 254, 255, 257, 264: n = A,T,C or G

SEQ ID NO: 9895 - DNA, 402 bp, Homo sapiens; identical to SEQ ID NO: 3581
  misc_feature 342: n = A,T,C or G

SEQ ID NO: 9896 - DNA, 509 bp, Homo sapiens; identical to SEQ ID NO: 3582
  misc_feature 108: n = A,T,C or G

SEQ ID NO: 9897 - DNA, 234 bp, Homo sapiens; identical to SEQ ID NO: 3583
  misc_feature 54, 128, 202: n = A,T,C or G

SEQ ID NO: 9898 - DNA, 464 bp, Homo sapiens; identical to SEQ ID NO: 3584
  misc_feature 191, 297, 376, 424: n = A,T,C or G

SEQ ID NO: 9899 - DNA, 551 bp, Homo sapiens; identical to SEQ ID NO: 3585
  misc_feature 390: n = A,T,C or G

SEQ ID NO: 9900 - DNA, 322 bp, Homo sapiens; identical to SEQ ID NO: 3586

SEQ ID NO: 9901 - DNA, 511 bp, Homo sapiens; identical to SEQ ID NO: 3587
  misc_feature 127: n = A,T,C or G

SEQ ID NO: 9902 - DNA, 545 bp, Homo sapiens; identical to SEQ ID NO: 3588
  misc_feature 23, 531: n = A,T,C or G

SEQ ID NO: 9903 - DNA, 412 bp, Homo sapiens; identical to SEQ ID NO: 3589
  misc_feature 58, 338, 397, 399: n = A,T,C or G

SEQ ID NO: 9904 - DNA, 265 bp, Homo sapiens; identical to SEQ ID NO: 3590

SEQ ID NO: 9905 - DNA, 539 bp, Homo sapiens; identical to SEQ ID NO: 3591
  misc_feature 443, 535: n = A,T,C or G

SEQ ID NO: 9906 - DNA, 733 bp, Homo sapiens; identical to SEQ ID NO: 3592
  misc_feature 450, 709: n = A,T,C or G

SEQ ID NO: 9907 - DNA, 605 bp, Homo sapiens; identical to SEQ ID NO: 3593
  misc_feature 285, 298, 323, 326, 352, 353, 354, 355, 356, 357, 358, 359,360, 361, 362, 363, 364, 365, 366, 367, 368, 369, 370, 371,372, 373, 374, 375, 376, 377, 378, 379, 380, 381, 382, 383,384, 385, 386, 387, 388, 389, 390, 391, 392, 393, 394: n = A,T,C or G
  misc_feature 395, 396, 397, 398, 399, 400, 401, 402, 403, 404, 405, 406,407, 408, 409, 410, 411, 412, 413, 414, 415, 416, 417, 418,419, 420, 421, 422, 423, 424, 425, 426, 427, 428, 429, 430,431, 432, 433, 434, 456, 462, 467, 468, 469, 470, 471: n = A,T,C or G
  misc_feature 472, 473, 474, 475, 476, 477, 478, 479, 480, 481, 482, 483,484, 485, 486, 487, 488, 489, 490, 491, 492, 493, 494, 495,496, 497, 498, 499, 500, 501, 502, 503, 504, 505, 506, 507,508, 509, 510, 511, 512, 513, 514, 515, 516, 517, 518: n = A,T,C or G
  misc_feature 519, 520, 528, 539, 553, 560, 563: n = A,T,C or G

SEQ ID NO: 9908 - DNA, 340 bp, Homo sapiens; identical to SEQ ID NO: 3594
  misc_feature 336: n = A,T,C or G

SEQ ID NO: 9909 - DNA, 614 bp, Homo sapiens; identical to SEQ ID NO: 3595
  misc_feature 335, 419, 422, 450, 516, 535, 539, 550, 552, 553, 563, 569,600: n = A,T,C or G

SEQ ID NO: 9910 - DNA, 501 bp, Homo sapiens; identical to SEQ ID NO: 3596

SEQ ID NO: 9911 - DNA, 305 bp, Homo sapiens; identical to SEQ ID NO: 3597
  misc_feature 113, 137, 184, 186, 198, 201, 206, 250, 253, 258, 260, 266,281, 282, 284, 295, 298: n = A,T,C or G

SEQ ID NO: 9912 - DNA, 262 bp, Homo sapiens; identical to SEQ ID NO: 3598
  misc_feature 32, 55, 142: n = A,T,C or G

SEQ ID NO: 9913 - DNA, 727 bp, Homo sapiens; identical to SEQ ID NO: 3599
  misc_feature 625, 635, 649: n = A,T,C or G

SEQ ID NO: 9914 - DNA, 224 bp, Homo sapiens; identical to SEQ ID NO: 3600
  misc_feature 88: n = A,T,C or G

SEQ ID NO: 9915 - DNA, 332 bp, Homo sapiens; identical to SEQ ID NO: 3601
  misc_feature 88, 96, 101, 124, 187, 197, 214, 219, 228, 240, 285, 290: n = A,T,C or G

SEQ ID NO: 9916 - DNA, 596 bp, Homo sapiens; identical to SEQ ID NO: 3602
  misc_feature 588: n = A,T,C or G

SEQ ID NO: 9917 - DNA, 521 bp, Homo sapiens; identical to SEQ ID NO: 3603
  misc_feature 474: n = A,T,C or G

SEQ ID NO: 9918 - DNA, 429 bp, Homo sapiens; identical to SEQ ID NO: 3604

SEQ ID NO: 9919 - DNA, 209 bp, Homo sapiens; identical to SEQ ID NO: 3605
  misc_feature 131, 167: n = A,T,C or G

SEQ ID NO: 9920 - DNA, 654 bp, Homo sapiens; identical to SEQ ID NO: 3606
  misc_feature 578, 583, 636: n = A,T,C or G

SEQ ID NO: 9921 - DNA, 242 bp, Homo sapiens; identical to SEQ ID NO: 3607
  misc_feature 145: n = A,T,C or G

SEQ ID NO: 9922 - DNA, 294 bp, Homo sapiens; identical to SEQ ID NO: 3608
  misc_feature 284: n = A,T,C or G

SEQ ID NO: 9923 - DNA, 441 bp, Homo sapiens; identical to SEQ ID NO: 3609
  misc_feature 410: n = A,T,C or G

SEQ ID NO: 9924 - DNA, 302 bp, Homo sapiens; identical to SEQ ID NO: 3610

SEQ ID NO: 9925 - DNA, 581 bp, Homo sapiens; identical to SEQ ID NO: 3611
  misc_feature 300, 340, 368, 472, 549, 554, 562: n = A,T,C or G

SEQ ID NO: 9926 - DNA, 509 bp, Homo sapiens; identical to SEQ ID NO: 3612
  misc_feature 124, 131, 142, 146, 147, 149, 155, 167, 176, 182, 212, 214,218, 237, 299, 314, 350, 363, 372, 373, 379, 415, 421, 431,435, 436, 448, 470, 479, 489, 493, 499: n = A,T,C or G

SEQ ID NO: 9927 - DNA, 299 bp, Homo sapiens; identical to SEQ ID NO: 3613

SEQ ID NO: 9928 - DNA, 587 bp, Homo sapiens; identical to SEQ ID NO: 3614
  misc_feature 530: n = A,T,C or G

SEQ ID NO: 9929 - DNA, 697 bp, Homo sapiens; identical to SEQ ID NO: 3615
  misc_feature 394, 546, 662, 676, 685, 690: n = A,T,C or G

SEQ ID NO: 9930 - DNA, 657 bp, Homo sapiens; identical to SEQ ID NO: 3616
  misc_feature 13, 400, 420, 422, 479, 485, 560, 625, 640: n = A,T,C or G

SEQ ID NO: 9931 - DNA, 675 bp, Homo sapiens; identical to SEQ ID NO: 3617
  misc_feature 348, 418, 439, 452, 508, 537, 553, 571, 575, 600, 601, 620,629, 638, 656, 658, 673: n = A,T,C or G

SEQ ID NO: 9932 - DNA, 560 bp, Homo sapiens; identical to SEQ ID NO: 3618
  misc_feature 387, 409, 435, 476, 493, 552: n = A,T,C or G

SEQ ID NO: 9933 - DNA, 348 bp, Homo sapiens; identical to SEQ ID NO: 3619
  misc_feature 129: n = A,T,C or G

SEQ ID NO: 9934 - DNA, 391 bp, Homo sapiens; identical to SEQ ID NO: 3620

SEQ ID NO: 9935 - DNA, 527 bp, Homo sapiens; identical to SEQ ID NO: 3621
  misc_feature 512, 519: n = A,T,C or G

SEQ ID NO: 9936 - DNA, 190 bp, Homo sapiens; identical to SEQ ID NO: 3622

SEQ ID NO: 9937 - DNA, 662 bp, Homo sapiens; identical to SEQ ID NO: 3623
  misc_feature 273, 344, 346, 438, 445, 467, 537, 589, 601, 603, 640, 643,652: n = A,T,C or G

SEQ ID NO: 9938 - DNA, 746 bp, Homo sapiens; identical to SEQ ID NO: 3624
  misc_feature 478, 611, 619, 632, 641, 653, 664, 669, 698, 718, 733: n = A,T,C or G

SEQ ID NO: 9939 - DNA, 307 bp, Homo sapiens; identical to SEQ ID NO: 3625

SEQ ID NO: 9940 - DNA, 675 bp, Homo sapiens; identical to SEQ ID NO: 3626
  misc_feature 467, 529, 543, 553, 580, 595, 625, 659, 662, 669: n = A,T,C or G

SEQ ID NO: 9941 - DNA, 350 bp, Homo sapiens; identical to SEQ ID NO: 3627
  misc_feature 71, 118, 129, 131, 132, 155, 163, 173, 175, 176, 177, 178,187, 203, 207, 211, 231, 232, 262, 302, 329: n = A,T,C or G

SEQ ID NO: 9942 - DNA, 410 bp, Homo sapiens; identical to SEQ ID NO: 3628
  misc_feature 375, 379: n = A,T,C or G

SEQ ID NO: 9943 - DNA, 464 bp, Homo sapiens; identical to SEQ ID NO: 3629
  misc_feature 85, 276, 374, 438: n = A,T,C or G

SEQ ID NO: 9944 - DNA, 448 bp, Homo sapiens; identical to SEQ ID NO: 3630

SEQ ID NO: 9945 - DNA, 790 bp, Homo sapiens; identical to SEQ ID NO: 3631
  misc_feature 287, 504, 506, 518, 520, 521, 529, 530, 532, 537, 567, 571,574, 583, 591, 599, 603, 606, 619, 635, 645, 646, 647, 672,680, 687, 693, 696, 697, 701, 723, 725, 730, 735, 742, 748,750, 758, 759, 765, 776, 777, 778, 782: n = A,T,C or G

SEQ ID NO: 9946 - DNA, 519 bp, Homo sapiens; identical to SEQ ID NO: 3632
  misc_feature 373: n = A,T,C or G

SEQ ID NO: 9947 - DNA, 319 bp, Homo sapiens; identical to SEQ ID NO: 3633
  misc_feature 281, 303: n = A,T,C or G

SEQ ID NO: 9948 - DNA, 510 bp, Homo sapiens; identical to SEQ ID NO: 3634
  misc_feature 115: n = A,T,C or G

SEQ ID NO: 9949 - DNA, 592 bp, Homo sapiens; identical to SEQ ID NO: 3635
  misc_feature 517, 521, 528, 535, 537, 546: n = A,T,C or G

SEQ ID NO: 9950 - DNA, 451 bp, Homo sapiens; identical to SEQ ID NO: 3636
  misc_feature 95, 119, 281, 315, 320, 349, 373, 394, 423, 441: n = A,T,C or G

SEQ ID NO: 9951 - DNA, 434 bp, Homo sapiens; identical to SEQ ID NO: 3637
  misc_feature 54, 55, 352: n = A,T,C or G

SEQ ID NO: 9952 - DNA, 480 bp, Homo sapiens; identical to SEQ ID NO: 3638

SEQ ID NO: 9953 - DNA, 510 bp, Homo sapiens; identical to SEQ ID NO: 3639

SEQ ID NO: 9954 - DNA, 272 bp, Homo sapiens; identical to SEQ ID NO: 3640

SEQ ID NO: 9955 - DNA, 326 bp, Homo sapiens; identical to SEQ ID NO: 3641
  misc_feature 273: n = A,T,C or G

SEQ ID NO: 9956 - DNA, 386 bp, Homo sapiens; identical to SEQ ID NO: 3642
  misc_feature 361, 366, 377: n = A,T,C or G

SEQ ID NO: 9957 - DNA, 677 bp, Homo sapiens; identical to SEQ ID NO: 3643
  misc_feature 433, 459, 472, 577, 649, 650: n = A,T,C or G

SEQ ID NO: 9958 - DNA, 432 bp, Homo sapiens; identical to SEQ ID NO: 3644

SEQ ID NO: 9959 - DNA, 344 bp, Homo sapiens; identical to SEQ ID NO: 3645

SEQ ID NO: 9960 - DNA, 350 bp, Homo sapiens; identical to SEQ ID NO: 3646
  misc_feature 228, 300: n = A,T,C or G

SEQ ID NO: 9961 - DNA, 674 bp, Homo sapiens; identical to SEQ ID NO: 3647
  misc_feature 87, 89, 90, 93, 95, 117, 124, 127, 135, 138, 149, 163, 167,174, 181, 183, 196, 202, 205, 221, 229, 247, 254, 261, 262,271, 277, 279, 291, 302, 303, 312, 342, 348, 358, 374, 386,390, 398, 406, 421, 427, 444, 447, 448, 450, 455, 475: n = A,T,C or G
  misc_feature 476, 481, 487, 494, 497, 511, 518, 524, 526, 528, 535, 539,541, 542, 545, 564, 567, 570, 572, 576, 577, 578, 580, 584,595, 603, 611, 613, 616, 617, 628, 632, 633, 634, 636, 640,643, 647, 648, 650, 663, 670: n = A,T,C or G

SEQ ID NO: 9962 - DNA, 461 bp, Homo sapiens; identical to SEQ ID NO: 3648
  misc_feature 99, 347, 408: n = A,T,C or G

SEQ ID NO: 9963 - DNA, 322 bp, Homo sapiens; identical to SEQ ID NO: 3649

SEQ ID NO: 9964 - DNA, 427 bp, Homo sapiens; identical to SEQ ID NO: 3651
  misc_feature 25, 27, 37, 47, 295, 297, 298, 299, 300, 304, 387, 389, 410,423: n = A,T,C or G

SEQ ID NO: 9965 - DNA, 379 bp, Homo sapiens; identical to SEQ ID NO: 3652
  misc_feature 131, 137, 142, 143, 152, 158, 163, 194: n = A,T,C or G

SEQ ID NO: 9966 - DNA, 484 bp, Homo sapiens; identical to SEQ ID NO: 3653

SEQ ID NO: 9967 - DNA, 594 bp, Homo sapiens; identical to SEQ ID NO: 3654

SEQ ID NO: 9968 - DNA, 447 bp, Homo sapiens; identical to SEQ ID NO: 3655
  misc_feature 405, 425: n = A,T,C or G

SEQ ID NO: 9969 - DNA, 567 bp, Homo sapiens; identical to SEQ ID NO: 3656

SEQ ID NO: 9970 - DNA, 525 bp, Homo sapiens; identical to SEQ ID NO: 3657
  misc_feature 184, 494: n = A,T,C or G

SEQ ID NO: 9971 - DNA, 488 bp, Homo sapiens; identical to SEQ ID NO: 3658
  misc_feature 70: n = A,T,C or G

SEQ ID NO: 9972 - DNA, 304 bp, Homo sapiens; identical to SEQ ID NO: 3659

SEQ ID NO: 9973 - DNA, 526 bp, Homo sapiens; identical to SEQ ID NO: 3660

SEQ ID NO: 9974 - DNA, 204 bp, Homo sapiens; identical to SEQ ID NO: 3661
  misc_feature 204: n = A,T,C or G

SEQ ID NO: 9975 - DNA, 526 bp, Homo sapiens; identical to SEQ ID NO: 3662

SEQ ID NO: 9976 - DNA, 373 bp, Homo sapiens; identical to SEQ ID NO: 3663
  misc_feature 142, 186, 199, 221, 261, 321: n = A,T,C or G

SEQ ID NO: 9977 - DNA, 494 bp, Homo sapiens; identical to SEQ ID NO: 3664
  misc_feature 333: n = A,T,C or G

SEQ ID NO: 9978 - DNA, 512 bp, Homo sapiens; identical to SEQ ID NO: 3665

SEQ ID NO: 9979 - DNA, 231 bp, Homo sapiens; identical to SEQ ID NO: 3666
  misc_feature 178: n = A,T,C or G

SEQ ID NO: 9980 - DNA, 394 bp, Homo sapiens; identical to SEQ ID NO: 3667
  misc_feature 382: n = A,T,C or G

SEQ ID NO: 9981 - DNA, 431 bp, Homo sapiens; identical to SEQ ID NO: 3668
  misc_feature 48, 63, 346, 350: n = A,T,C or G

SEQ ID NO: 9982 - DNA, 617 bp, Homo sapiens; identical to SEQ ID NO: 3669
  misc_feature 35, 101, 140, 147, 187, 189, 205, 211, 217, 243, 268, 288,325, 329, 357, 388, 400, 419, 421, 447, 448, 460, 470, 482,489, 492, 498, 503, 521, 527, 530, 534, 547, 550, 558, 595,606: n = A,T,C or G

SEQ ID NO: 9983 - DNA, 462 bp, Homo sapiens; identical to SEQ ID NO: 3670
  misc_feature 402: n = A,T,C or G

SEQ ID NO: 9984 - DNA, 326 bp, Homo sapiens; identical to SEQ ID NO: 3671

SEQ ID NO: 9985 - DNA, 377 bp, Homo sapiens; identical to SEQ ID NO: 3672
  misc_feature 368: n = A,T,C or G

SEQ ID NO: 9986 - DNA, 189 bp, Homo sapiens; identical to SEQ ID NO: 3673

SEQ ID NO: 9987 - DNA, 322 bp, Homo sapiens; identical to SEQ ID NO: 3674

SEQ ID NO: 9988 - DNA, 700 bp, Homo sapiens; identical to SEQ ID NO: 3675
  misc_feature 487, 496, 532, 565, 624, 643, 673, 690: n = A,T,C or G

SEQ ID NO: 9989 - DNA, 439 bp, Homo sapiens; identical to SEQ ID NO: 3676
  misc_feature 179, 253, 298, 318, 335, 384, 392, 421, 428: n = A,T,C or G

SEQ ID NO: 9990 - DNA, 435 bp, Homo sapiens; identical to SEQ ID NO: 3677

SEQ ID NO: 9991 - DNA, 310 bp, Homo sapiens; identical to SEQ ID NO: 3678

SEQ ID NO: 9992 - DNA, 483 bp, Homo sapiens; identical to SEQ ID NO: 3679
  misc_feature 62, 286, 379: n = A,T,C or G

SEQ ID NO: 9993 - DNA, 408 bp, Homo sapiens; identical to SEQ ID NO: 3680

SEQ ID NO: 9994 - DNA, 732 bp, Homo sapiens; identical to SEQ ID NO: 3681
  misc_feature 188, 308, 377, 453, 467, 490, 571, 596, 628, 631, 639, 649,652, 665, 669, 679, 715: n = A,T,C or G

SEQ ID NO: 9995 - DNA, 618 bp, Homo sapiens; identical to SEQ ID NO: 3682
  misc_feature 495, 498, 547, 583, 591: n = A,T,C or G

SEQ ID NO: 9996 - DNA, 507 bp, Homo sapiens; identical to SEQ ID NO: 3683
  misc_feature 45, 47, 49, 61, 62, 65, 76, 84, 100: n = A,T,C or G

SEQ ID NO: 9997 - DNA, 471 bp, Homo sapiens; identical to SEQ ID NO: 3684
  misc_feature 40, 73, 78, 86, 112, 137, 146, 171, 175, 228, 243, 263, 310,333, 338, 360, 374, 417, 441, 444, 452, 455, 456, 462: n = A,T,C or G

SEQ ID NO: 9998 - DNA, 394 bp, Homo sapiens; identical to SEQ ID NO: 3685

SEQ ID NO: 9999 - DNA, 407 bp, Homo sapiens; identical to SEQ ID NO: 3686
  misc_feature 198: n = A,T,C or G

SEQ ID NO: 10000 - DNA, 326 bp, Homo sapiens; identical to SEQ ID NO: 3687
  misc_feature 283: n = A,T,C or G

SEQ ID NO: 10001 - DNA, 377 bp, Homo sapiens; identical to SEQ ID NO: 3688
  misc_feature 12, 325: n = A,T,C or G

SEQ ID NO: 10002 - DNA, 325 bp, Homo sapiens; identical to SEQ ID NO: 3689

SEQ ID NO: 10003 - DNA, 382 bp, Homo sapiens; identical to SEQ ID NO: 3690

SEQ ID NO: 10004 - DNA, 313 bp, Homo sapiens; identical to SEQ ID NO: 3691
  misc_feature 130, 142, 165, 272, 281: n = A,T,C or G

SEQ ID NO: 10005 - DNA, 330 bp, Homo sapiens; identical to SEQ ID NO: 3693

SEQ ID NO: 10006 - DNA, 544 bp, Homo sapiens; identical to SEQ ID NO: 3694
  misc_feature 456: n = A,T,C or G

SEQ ID NO: 10007 - DNA, 467 bp, Homo sapiens; identical to SEQ ID NO: 3695

SEQ ID NO: 10008 - DNA, 341 bp, Homo sapiens; identical to SEQ ID NO: 3696
  misc_feature 292, 321: n = A,T,C or G

SEQ ID NO: 10009 - DNA, 643 bp, Homo sapiens; identical to SEQ ID NO: 3697
  misc_feature 505, 642: n = A,T,C or G

SEQ ID NO: 10010 - DNA, 302 bp, Homo sapiens; identical to SEQ ID NO: 3698

SEQ ID NO: 10011 - DNA, 739 bp, Homo sapiens; identical to SEQ ID NO: 3699
  misc_feature 272, 296, 325, 349, 420, 447, 452, 469, 490, 502, 510, 511,520, 526, 532, 548, 559, 565, 582, 599, 601, 623, 624, 630,661, 662, 664, 676, 682, 683, 686, 688, 697, 718, 725: n = A,T,C or G

SEQ ID NO: 10012 - DNA, 545 bp, Homo sapiens; identical to SEQ ID NO: 3700

SEQ ID NO: 10013 - DNA, 410 bp, Homo sapiens; identical to SEQ ID NO: 3701

SEQ ID NO: 10014 - DNA, 576 bp, Homo sapiens; identical to SEQ ID NO: 3703
  misc_feature 511, 518: n = A,T,C or G

SEQ ID NO: 10015 - DNA, 458 bp, Homo sapiens; identical to SEQ ID NO: 3704

SEQ ID NO: 10016 - DNA, 590 bp, Homo sapiens; identical to SEQ ID NO: 3705
  misc_feature 53, 97, 407, 527: n = A,T,C or G

SEQ ID NO: 10017 - DNA, 336 bp, Homo sapiens; identical to SEQ ID NO: 3706

SEQ ID NO: 10018 - DNA, 287 bp, Homo sapiens; identical to SEQ ID NO: 3707

SEQ ID NO: 10019 - DNA, 479 bp, Homo sapiens; identical to SEQ ID NO: 3708
  misc_feature 99, 123, 127, 133, 135, 138, 149, 156, 167, 175, 176, 179,190, 201, 202, 208, 214, 220, 230, 243, 250, 261, 263, 271,287, 289, 297, 321, 336, 341, 344, 365, 385, 390, 392, 393,404, 414, 416, 418, 419, 437, 472, 479: n = A,T,C or G

SEQ ID NO: 10020 - DNA, 366 bp, Homo sapiens; identical to SEQ ID NO: 3709

SEQ ID NO: 10021 - DNA, 319 bp, Homo sapiens; identical to SEQ ID NO: 3710

SEQ ID NO: 10022 - DNA, 351 bp, Homo sapiens; identical to SEQ ID NO: 3711

SEQ ID NO: 10023 - DNA, 139 bp, Homo sapiens; identical to SEQ ID NO: 3712
  misc_feature 44: n = A,T,C or G

SEQ ID NO: 10024 - DNA, 348 bp, Homo sapiens; identical to SEQ ID NO: 3713

SEQ ID NO: 10025 - DNA, 366 bp, Homo sapiens; identical to SEQ ID NO: 3714
  misc_feature 134: n = A,T,C or G

SEQ ID NO: 10026 - DNA, 347 bp, Homo sapiens; identical to SEQ ID NO: 3715
  misc_feature 134, 137, 138, 161, 186, 254: n = A,T,C or G

SEQ ID NO: 10027 - DNA, 518 bp, Homo sapiens; identical to SEQ ID NO: 3716
  misc_feature 447, 486, 487: n = A,T,C or G

SEQ ID NO: 10028 - DNA, 593 bp, Homo sapiens; identical to SEQ ID NO: 3717
  misc_feature 567, 581, 584: n = A,T,C or G

SEQ ID NO: 10029 - DNA, 314 bp, Homo sapiens; identical to SEQ ID NO: 3718

SEQ ID NO: 10030 - DNA, 295 bp, Homo sapiens; identical to SEQ ID NO: 3719

SEQ ID NO: 10031 - DNA, 332 bp, Homo sapiens; identical to SEQ ID NO: 3720

SEQ ID NO: 10032 - DNA, 626 bp, Homo sapiens; identical to SEQ ID NO: 3721
  misc_feature 381, 478: n = A,T,C or G

SEQ ID NO: 10033 - DNA, 368 bp, Homo sapiens; identical to SEQ ID NO: 3722

SEQ ID NO: 10034 - DNA, 551 bp, Homo sapiens; identical to SEQ ID NO: 3723
  misc_feature 31, 33, 34, 35, 42, 43, 46, 47, 48, 49, 54, 55, 56, 58, 59,63, 68, 71, 76, 78, 79, 90, 91, 92, 125, 144, 172, 187,218, 236, 243, 254, 287, 300, 305, 314, 363, 371, 392, 469,505: n = A,T,C or G

SEQ ID NO: 10035 - DNA, 418 bp, Homo sapiens; identical to SEQ ID NO: 3724
  misc_feature 235, 251: n = A,T,C or G

SEQ ID NO: 10036 - DNA, 253 bp, Homo sapiens; identical to SEQ ID NO: 3725
  misc_feature 132, 242: n = A,T,C or G

SEQ ID NO: 10037 - DNA, 546 bp, Homo sapiens; identical to SEQ ID NO: 3726
  misc_feature 49, 239, 360: n = A,T,C or G

SEQ ID NO: 10038 - DNA, 537 bp, Homo sapiens; identical to SEQ ID NO: 3727

SEQ ID NO: 10039 - DNA, 353 bp, Homo sapiens; identical to SEQ ID NO: 3728

SEQ ID NO: 10040 - DNA, 296 bp, Homo sapiens; identical to SEQ ID NO: 3729

SEQ ID NO: 10041 - DNA, 330 bp, Homo sapiens; identical to SEQ ID NO: 3730

SEQ ID NO: 10042 - DNA, 326 bp, Homo sapiens; identical to SEQ ID NO: 3731

SEQ ID NO: 10043 - DNA, 366 bp, Homo sapiens; identical to SEQ ID NO: 3732
  misc_feature 127, 225, 326, 330: n = A,T,C or G

SEQ ID NO: 10044 - DNA, 308 bp, Homo sapiens; identical to SEQ ID NO: 3733
  misc_feature 230: n = A,T,C or G

SEQ ID NO: 10045 - DNA, 451 bp, Homo sapiens; identical to SEQ ID NO: 3734
  misc_feature 24, 378: n = A,T,C or G

SEQ ID NO: 10046 - DNA, 446 bp, Homo sapiens; identical to SEQ ID NO: 3735

SEQ ID NO: 10047 - DNA, 586 bp, Homo sapiens; identical to SEQ ID NO: 3736
  misc_feature 134, 145, 160, 165, 192, 206, 259, 261, 264, 275, 282, 306,312, 328, 353, 371, 411, 415, 420, 429, 433, 447, 484, 508,519, 530, 531, 547, 551, 554, 561, 569, 585: n = A,T,C or G

SEQ ID NO: 10048 - DNA, 354 bp, Homo sapiens; identical to SEQ ID NO: 3737
  misc_feature 177, 296, 309, 340: n = A,T,C or G

SEQ ID NO: 10049 - DNA, 450 bp, Homo sapiens; identical to SEQ ID NO: 3738

SEQ ID NO: 10050 - DNA, 700 bp, Homo sapiens; identical to SEQ ID NO: 3739
  misc_feature 77, 184, 407, 448, 498, 519, 560, 597, 601, 611, 644, 651,673, 685: n = A,T,C or G

SEQ ID NO: 10051 - DNA, 326 bp, Homo sapiens; identical to SEQ ID NO: 3740
  misc_feature 292: n = A,T,C or G

SEQ ID NO: 10052 - DNA, 555 bp, Homo sapiens; identical to SEQ ID NO: 3741
  misc_feature 528: n = A,T,C or G

SEQ ID NO: 10053 - DNA, 500 bp, Homo sapiens; identical to SEQ ID NO: 3742
  misc_feature 89, 109, 110, 111, 116, 120, 123, 125, 126, 133, 138, 140,142, 143, 150, 156, 159, 162, 163, 167, 168, 173, 184, 188,191, 192, 195, 197, 200, 202, 203, 205, 215, 219, 222, 225,227, 228, 229, 235, 238, 240, 245, 246, 247, 252, 258: n = A,T,C or G
  misc_feature 260, 262, 263, 264, 269, 270, 274, 275, 281, 282, 283, 290,291, 293, 294, 296, 299, 300, 301, 307, 311, 313, 315, 318,320, 323, 324, 327, 328, 345, 350, 357, 358, 360, 361, 367,368, 380, 385, 387, 388, 400, 404, 407, 415, 417, 418: n = A,T,C or G
  misc_feature 421, 426, 430, 432, 434, 439, 440, 447, 450, 465, 470, 472,473, 485: n = A,T,C or G

SEQ ID NO: 10054 - DNA, 329 bp, Homo sapiens; identical to SEQ ID NO: 3743
  misc_feature 2, 17, 18, 24, 25, 40, 91, 118, 125, 129, 139, 152, 156,168, 170, 181, 184, 189, 196, 201, 202, 208, 209, 217, 219,222, 225, 226, 227, 229, 232, 240, 242, 245, 248, 250, 251,253, 254, 264, 271, 292, 297, 302, 321: n = A,T,C or G

SEQ ID NO: 10055 - DNA, 360 bp, Homo sapiens; identical to SEQ ID NO: 3744
  misc_feature 153: n = A,T,C or G

SEQ ID NO: 10056 - DNA, 395 bp, Homo sapiens; identical to SEQ ID NO: 3745
  misc_feature 71, 190, 260, 285: n = A,T,C or G

SEQ ID NO: 10057 - DNA, 625 bp, Homo sapiens; identical to SEQ ID NO: 3746
  misc_feature 569: n = A,T,C or G

SEQ ID NO: 10058 - DNA, 179 bp, Homo sapiens; identical to SEQ ID NO: 3747
  misc_feature 8, 23, 32, 36, 111, 151: n = A,T,C or G

SEQ ID NO: 10059 - DNA, 348 bp, Homo sapiens; identical to SEQ ID NO: 3748

SEQ ID NO: 10060 - DNA, 271 bp, Homo sapiens; identical to SEQ ID NO: 3749
  misc_feature 15, 52, 58, 193, 263: n = A,T,C or G

SEQ ID NO: 10061 - DNA, 403 bp, Homo sapiens; identical to SEQ ID NO: 3750

SEQ ID NO: 10062 - DNA, 310 bp, Homo sapiens; identical to SEQ ID NO: 3751
  misc_feature 56: n = A,T,C or G

SEQ ID NO: 10063 - DNA, 281 bp, Homo sapiens; identical to SEQ ID NO: 3752
  misc_feature 257: n = A,T,C or G

SEQ ID NO: 10064 - DNA, 393 bp, Homo sapiens; identical to SEQ ID NO: 3753

SEQ ID NO: 10065 - DNA, 528 bp, Homo sapiens; identical to SEQ ID NO: 3754
  misc_feature 72, 334, 452, 461, 485, 498, 507, 509, 521: n = A,T,C or G

SEQ ID NO: 10066 - DNA, 388 bp, Homo sapiens; identical to SEQ ID NO: 3755
  misc_feature 4, 43: n = A,T,C or G

SEQ ID NO: 10067 - DNA, 324 bp, Homo sapiens; identical to SEQ ID NO: 3756
  misc_feature 200: n = A,T,C or G

SEQ ID NO: 10068 - DNA, 298 bp, Homo sapiens; identical to SEQ ID NO: 3757

SEQ ID NO: 10069 - DNA, 119 bp, Homo sapiens; identical to SEQ ID NO: 3758
  misc_feature 12, 26, 40, 71, 82, 103, 119: n = A,T,C or G

SEQ ID NO: 10070 - DNA, 472 bp, Homo sapiens; identical to SEQ ID NO: 3759
  misc_feature 14, 27, 29, 35, 39, 42, 44, 48, 301, 361, 373, 382, 417,440, 442: n = A,T,C or G

SEQ ID NO: 10071 - DNA, 434 bp, Homo sapiens; identical to SEQ ID NO: 3760
  misc_feature 140, 143, 193, 243, 273, 292, 320, 337, 346, 365, 377, 391,412: n = A,T,C or G

SEQ ID NO: 10072 - DNA, 752 bp, Homo sapiens; identical to SEQ ID NO: 3761
  misc_feature 393, 483, 484, 485, 486, 487, 488, 489, 490, 491, 492, 493,494, 495, 496, 497, 498, 499, 500, 501, 502, 503, 504, 505,506, 507, 508, 509, 510, 511, 512, 513, 514, 515, 516, 517,518, 519, 520, 521, 522, 523, 524, 525, 526, 527, 528: n = A,T,C or G
  misc_feature 529, 530, 531, 532, 533, 534, 535, 536, 537, 538, 539, 540,541, 542, 543, 544, 554, 555, 557, 560, 572, 575, 577, 585,594, 613, 618, 619, 643, 644, 662, 666, 669, 677, 678, 691,694, 705, 711, 715, 717, 723, 724, 725, 732, 733, 736: n = A,T,C or G
  misc_feature 737: n = A,T,C or G

SEQ ID NO: 10073 - DNA, 209 bp, Homo sapiens; identical to SEQ ID NO: 3762
  misc_feature 13, 44, 53, 168, 171, 178, 195, 198: n = A,T,C or G

SEQ ID NO: 10074 - DNA, 419 bp, Homo sapiens; identical to SEQ ID NO: 3763
  misc_feature 129, 340, 375, 386, 402: n = A,T,C or G

SEQ ID NO: 10075 - DNA, 398 bp, Homo sapiens; identical to SEQ ID NO: 3764
  misc_feature 318, 383: n = A,T,C or G

SEQ ID NO: 10076 - DNA, 315 bp, Homo sapiens; identical to SEQ ID NO: 3765

SEQ ID NO: 10077 - DNA, 469 bp, Homo sapiens; identical to SEQ ID NO: 3766
  misc_feature 48, 357, 437, 464: n = A,T,C or G

SEQ ID NO: 10078 - DNA, 330 bp, Homo sapiens; identical to SEQ ID NO: 3767

SEQ ID NO: 10079 - DNA, 483 bp, Homo sapiens; identical to SEQ ID NO: 3768

SEQ ID NO: 10080 - DNA, 342 bp, Homo sapiens; identical to SEQ ID NO: 3769

SEQ ID NO: 10081 - DNA, 290 bp, Homo sapiens; identical to SEQ ID NO: 3770

SEQ ID NO: 10082 - DNA, 332 bp, Homo sapiens; identical to SEQ ID NO: 3771

SEQ ID NO: 10083 - DNA, 357 bp, Homo sapiens; identical to SEQ ID NO: 3772
  misc_feature 153, 216, 249, 279, 302, 335, 344: n = A,T,C or G

SEQ ID NO: 10084 - DNA, 270 bp, Homo sapiens; identical to SEQ ID NO: 3773
  misc_feature 1, 3, 4, 210, 242: n = A,T,C or G

SEQ ID NO: 10085 - DNA, 348 bp, Homo sapiens; identical to SEQ ID NO: 3774
  misc_feature 6, 17, 18, 20, 22, 27, 28, 49, 341: n = A,T,C or G

SEQ ID NO: 10086 - DNA, 220 bp, Homo sapiens; identical to SEQ ID NO: 3775
  misc_feature 186: n = A,T,C or G

SEQ ID NO: 10087 - DNA, 283 bp, Homo sapiens; identical to SEQ ID NO: 3776
  misc_feature 39, 46, 58, 101, 107, 221, 222, 224, 233: n = A,T,C or G

SEQ ID NO: 10088 - DNA, 463 bp, Homo sapiens; identical to SEQ ID NO: 3778
  misc_feature 73, 108, 118, 132, 142, 147, 152, 173, 177, 180, 196, 205,212, 215, 216, 218, 229, 236, 255, 277, 286, 291, 297, 310,321, 337, 342, 343, 352, 359, 362, 370, 379, 403, 421, 422,424, 427, 440, 441, 444, 456, 460: n = A,T,C or G

SEQ ID NO: 10089 - DNA, 388 bp, Homo sapiens; identical to SEQ ID NO: 3779
  misc_feature 311, 326, 361: n = A,T,C or G

SEQ ID NO: 10090 - DNA, 326 bp, Homo sapiens; identical to SEQ ID NO: 3780
  misc_feature 41, 319: n = A,T,C or G

SEQ ID NO: 10091 - DNA, 351 bp, Homo sapiens; identical to SEQ ID NO: 3781
  misc_feature 136, 215, 220, 228, 287, 309, 312, 313, 337, 339: n = A,T,C or G

SEQ ID NO: 10092 - DNA, 294 bp, Homo sapiens; identical to SEQ ID NO: 3782
  misc_feature 7, 79, 99, 121, 128, 178, 180, 181, 190: n = A,T,C or G

SEQ ID NO: 10093 - DNA, 194 bp, Homo sapiens; identical to SEQ ID NO: 3783
  misc_feature 7, 9, 11, 18, 20, 22, 33, 51, 52, 54, 57, 70, 82, 149, 151: n = A,T,C or G

SEQ ID NO: 10094 - DNA, 502 bp, Homo sapiens; identical to SEQ ID NO: 3784
  misc_feature 39, 170, 336, 489: n = A,T,C or G

SEQ ID NO: 10095 - DNA, 584 bp, Homo sapiens; identical to SEQ ID NO: 3786
  misc_feature 564: n = A,T,C or G

SEQ ID NO: 10096 - DNA, 420 bp, Homo sapiens; identical to SEQ ID NO: 3787

SEQ ID NO: 10097 - DNA, 415 bp, Homo sapiens; identical to SEQ ID NO: 3788
  misc_feature 218, 234, 334, 338, 366, 381: n = A,T,C or G

SEQ ID NO: 10098 - DNA, 315 bp, Homo sapiens; identical to SEQ ID NO: 3789

SEQ ID NO: 10099 - DNA, 365 bp, Homo sapiens; identical to SEQ ID NO: 3790
  misc_feature 323: n = A,T,C or G

SEQ ID NO: 10100 - DNA, 582 bp, Homo sapiens; identical to SEQ ID NO: 3791
  misc_feature 8, 153, 279, 298, 310, 322, 323, 327, 329, 332, 348, 357,364, 365, 370, 386, 388, 409, 416, 422, 430, 442, 462, 465,480, 484, 485, 488, 501, 514, 517, 542, 551, 555, 561: n = A,T,C or G

SEQ ID NO: 10101 - DNA, 524 bp, Homo sapiens; identical to SEQ ID NO: 3792
  misc_feature 415, 437, 480, 486: n = A,T,C or G

SEQ ID NO: 10102 - DNA, 355 bp, Homo sapiens; identical to SEQ ID NO: 3793
  misc_feature 185, 243, 245, 256, 257, 285, 288, 289, 307, 321, 330, 334: n = A,T,C or G

SEQ ID NO: 10103 - DNA, 326 bp, Homo sapiens; identical to SEQ ID NO: 3794
  misc_feature 1, 102, 107, 122, 132: n = A,T,C or G

SEQ ID NO: 10104 - DNA, 296 bp, Homo sapiens; identical to SEQ ID NO: 3795

SEQ ID NO: 10105 - DNA, 441 bp, Homo sapiens; identical to SEQ ID NO: 3796
  misc_feature 408: n = A,T,C or G

SEQ ID NO: 10106 - DNA, 342 bp, Homo sapiens; identical to SEQ ID NO: 3797
  misc_feature 8, 101, 190, 314, 327: n = A,T,C or G

SEQ ID NO: 10107 - DNA, 378 bp, Homo sapiens; identical to SEQ ID NO: 3798
  misc_feature 23, 68, 75, 76, 77, 78: n = A,T,C or G

SEQ ID NO: 10108 - DNA, 770 bp, Homo sapiens; identical to SEQ ID NO: 3799
  misc_feature 442, 538, 549, 553, 566, 573, 576, 581, 584, 606, 612, 638,643, 663, 669, 680, 681, 682, 683, 686, 702, 711, 733, 736,750: n = A,T,C or G

SEQ ID NO: 10109 - DNA, 442 bp, Homo sapiens; identical to SEQ ID NO: 3800
  misc_feature 336, 405: n = A,T,C or G

SEQ ID NO: 10110 - DNA, 340 bp, Homo sapiens; identical to SEQ ID NO: 3801
  misc_feature 331: n = A,T,C or G

SEQ ID NO: 10111 - DNA, 360 bp, Homo sapiens; identical to SEQ ID NO: 3802
  misc_feature 142, 328: n = A,T,C or G

SEQ ID NO: 10112 - DNA, 384 bp, Homo sapiens; identical to SEQ ID NO: 3803
  misc_feature 351: n = A,T,C or G

SEQ ID NO: 10113 - DNA, 468 bp, Homo sapiens; identical to SEQ ID NO: 3804
  misc_feature 307, 402, 451: n = A,T,C or G

SEQ ID NO: 10114 - DNA, 359 bp, Homo sapiens; identical to SEQ ID NO: 3805
  misc_feature 62, 128, 131, 160, 203, 208, 216, 237, 283, 292, 309: n = A,T,C or G

SEQ ID NO: 10115 - DNA, 266 bp, Homo sapiens; identical to SEQ ID NO: 3806

SEQ ID NO: 10116 - DNA, 291 bp, Homo sapiens; identical to SEQ ID NO: 3807

SEQ ID NO: 10117 - DNA, 365 bp, Homo sapiens; identical to SEQ ID NO: 3808
  misc_feature 352: n = A,T,C or G

SEQ ID NO: 10118 - DNA, 392 bp, Homo sapiens; identical to SEQ ID NO: 3809

SEQ ID NO: 10119 - DNA, 461 bp, Homo sapiens; identical to SEQ ID NO: 3810
  misc_feature 445: n = A,T,C or G

SEQ ID NO: 10120 - DNA, 444 bp, Homo sapiens; identical to SEQ ID NO: 3811

SEQ ID NO: 10121 - DNA, 275 bp, Homo sapiens; identical to SEQ ID NO: 3812

SEQ ID NO: 10122 - DNA, 625 bp, Homo sapiens; identical to SEQ ID NO: 3813
  misc_feature 500: n = A,T,C or G

SEQ ID NO: 10123 - DNA, 182 bp, Homo sapiens; identical to SEQ ID NO: 3814

SEQ ID NO: 10124 - DNA, 320 bp, Homo sapiens; identical to SEQ ID NO: 3815

SEQ ID NO: 10125 - DNA, 268 bp, Homo sapiens; identical to SEQ ID NO: 3816
  misc_feature 68, 74, 85, 86, 132, 144, 244, 257: n = A,T,C or G

SEQ ID NO: 10126 - DNA, 389 bp, Homo sapiens; identical to SEQ ID NO: 3817
  misc_feature 272, 288: n = A,T,C or G

SEQ ID NO: 10127 - DNA, 311 bp, Homo sapiens; identical to SEQ ID NO: 3818

SEQ ID NO: 10128 - DNA, 326 bp, Homo sapiens; identical to SEQ ID NO: 3819

SEQ ID NO: 10129 - DNA, 378 bp, Homo sapiens; identical to SEQ ID NO: 3820

SEQ ID NO: 10130 - DNA, 266 bp, Homo sapiens; identical to SEQ ID NO: 3821

SEQ ID NO: 10131 - DNA, 533 bp, Homo sapiens; identical to SEQ ID NO: 3822
  misc_feature 140, 170, 196, 208, 224, 225, 255, 302, 305, 347, 351, 382,431, 443, 445, 450, 460, 473, 479, 515, 520: n = A,T,C or G

SEQ ID NO: 10132 - DNA, 255 bp, Homo sapiens; identical to SEQ ID NO: 3823
  misc_feature 30, 43, 51, 56, 60, 63, 66, 79, 86, 177, 218, 221: n = A,T,C or G

SEQ ID NO: 10133 - DNA, 308 bp, Homo sapiens; identical to SEQ ID NO: 3824

SEQ ID NO: 10134 - DNA, 836 bp, Homo sapiens; identical to SEQ ID NO: 3825
  misc_feature 496, 528, 621, 647, 673, 691, 700, 729, 731, 733, 735, 741,742, 746, 755, 788, 795, 805, 813, 819: n = A,T,C or G

SEQ ID NO: 10135 - DNA, 389 bp, Homo sapiens; identical to SEQ ID NO: 3826
  misc_feature 88, 201, 225, 239, 308, 379: n = A,T,C or G

SEQ ID NO: 10136 - DNA, 614 bp, Homo sapiens; identical to SEQ ID NO: 3827
  misc_feature 428: n = A,T,C or G

SEQ ID NO: 10137 - DNA, 325 bp, Homo sapiens; identical to SEQ ID NO: 3828
  misc_feature 57, 58, 63, 76, 79, 80, 81, 307: n = A,T,C or G

SEQ ID NO: 10138 - DNA, 518 bp, Homo sapiens; identical to SEQ ID NO: 3829
  misc_feature 364, 367, 384, 387, 388, 389, 391, 400, 410, 417, 419, 446: n = A,T,C or G

SEQ ID NO: 10139 - DNA, 476 bp, Homo sapiens; identical to SEQ ID NO: 3830

SEQ ID NO: 10140 - DNA, 328 bp, Homo sapiens; identical to SEQ ID NO: 3831

SEQ ID NO: 10141 - DNA, 405 bp, Homo sapiens; identical to SEQ ID NO: 3832
  misc_feature 290, 348: n = A,T,C or G

SEQ ID NO: 10142 - DNA, 438 bp, Homo sapiens; identical to SEQ ID NO: 3833
  misc_feature 170, 175, 176, 179, 222, 262, 331, 378, 387, 401, 412, 427: n = A,T,C or G

SEQ ID NO: 10143 - DNA, 420 bp, Homo sapiens; identical to SEQ ID NO: 3834
  misc_feature 404: n = A,T,C or G

SEQ ID NO: 10144 - DNA, 375 bp, Homo sapiens; identical to SEQ ID NO: 3835

SEQ ID NO: 10145 - DNA, 657 bp, Homo sapiens; identical to SEQ ID NO: 3836
  misc_feature 575, 613: n = A,T,C or G

SEQ ID NO: 10146 - DNA, 675 bp, Homo sapiens; identical to SEQ ID NO: 3837
  misc_feature 88, 89, 93, 668, 669: n = A,T,C or G

SEQ ID NO: 10147 - DNA, 614 bp, Homo sapiens; identical to SEQ ID NO: 3838
  misc_feature 521, 559: n = A,T,C or G

SEQ ID NO: 10148 - DNA, 320 bp, Homo sapiens; identical to SEQ ID NO: 3839
  misc_feature 68, 140, 154: n = A,T,C or G

SEQ ID NO: 10149 - DNA, 321 bp, Homo sapiens; identical to SEQ ID NO: 3840

SEQ ID NO: 10150 - DNA, 261 bp, Homo sapiens; identical to SEQ ID NO: 3841
  misc_feature 165: n = A,T,C or G

SEQ ID NO: 10151 - DNA, 713 bp, Homo sapiens; identical to SEQ ID NO: 3842
  misc_feature 375, 401, 505, 552, 600, 636, 639, 652, 655, 681, 688, 694: n = A,T,C or G

SEQ ID NO: 10152 - DNA, 400 bp, Homo sapiens; identical to SEQ ID NO: 3843

SEQ ID NO: 10153 - DNA, 376 bp, Homo sapiens; identical to SEQ ID NO: 3844

SEQ ID NO: 10154 - DNA, 406 bp, Homo sapiens; identical to SEQ ID NO: 3845
  misc_feature 16: n = A,T,C or G

SEQ ID NO: 10155 - DNA, 508 bp, Homo sapiens; identical to SEQ ID NO: 3846
  misc_feature 350, 399, 406, 449, 450: n = A,T,C or G

SEQ ID NO: 10156 - DNA, 483 bp, Homo sapiens; identical to SEQ ID NO: 3847
  misc_feature 178, 193, 232, 242, 243, 300, 318, 327, 333, 372, 387, 398,421, 435, 436, 441, 455, 463, 473: n = A,T,C or G

SEQ ID NO: 10157 - DNA, 316 bp, Homo sapiens; identical to SEQ ID NO: 3848

SEQ ID NO: 10158 - DNA, 459 bp, Homo sapiens; identical to SEQ ID NO: 3849
  misc_feature 122, 141, 147, 184, 187, 193, 198, 213, 215, 234, 243, 257,263, 274, 279, 293, 304, 312, 335, 337, 358, 365, 387, 389,390, 398, 406, 426, 431, 438, 448, 450: n = A,T,C or G

SEQ ID NO: 10159 - DNA, 566 bp, Homo sapiens; identical to SEQ ID NO: 3850
  misc_feature 467, 492, 533, 537: n = A,T,C or G

SEQ ID NO: 10160 - DNA, 405 bp, Homo sapiens; identical to SEQ ID NO: 3851
  misc_feature 318: n = A,T,C or G

SEQ ID NO: 10161 - DNA, 641 bp, Homo sapiens; identical to SEQ ID NO: 3852
  misc_feature 366, 421, 442, 462, 469, 478, 482, 501, 536, 551, 575, 579,587, 590, 593, 596, 610, 612: n = A,T,C or G

SEQ ID NO: 10162 - DNA, 447 bp, Homo sapiens; identical to SEQ ID NO: 3853
  misc_feature 389: n = A,T,C or G

SEQ ID NO: 10163 - DNA, 360 bp, Homo sapiens; identical to SEQ ID NO: 3854
  misc_feature 59, 60: n = A,T,C or G

SEQ ID NO: 10164 - DNA, 487 bp, Homo sapiens; identical to SEQ ID NO: 3855
  misc_feature 241, 245, 308, 354, 367, 472, 475: n = A,T,C or G

SEQ ID NO: 10165 - DNA, 429 bp, Homo sapiens; identical to SEQ ID NO: 3856
  misc_feature 48, 265, 287, 321, 349, 355, 381: n = A,T,C or G

SEQ ID NO: 10166 - DNA, 479 bp, Homo sapiens; identical to SEQ ID NO: 3857
  misc_feature 72, 159, 160, 341, 362, 366, 405, 416, 431, 453, 464: n = A,T,C or G

SEQ ID NO: 10167 - DNA, 327 bp, Homo sapiens; identical to SEQ ID NO: 3858

SEQ ID NO: 10168 - DNA, 685 bp, Homo sapiens; identical to SEQ ID NO: 3859
  misc_feature 568, 608, 611, 624, 629, 647, 665, 667, 678, 680: n = A,T,C or G

SEQ ID NO: 10169 - DNA, 512 bp, Homo sapiens; identical to SEQ ID NO: 3860
  misc_feature 168: n = A,T,C or G

SEQ ID NO: 10170 - DNA, 447 bp, Homo sapiens; identical to SEQ ID NO: 3861

SEQ ID NO: 10171 - DNA, 483 bp, Homo sapiens; identical to SEQ ID NO: 3862
  misc_feature 68, 477: n = A,T,C or G

SEQ ID NO: 10172 - DNA, 321 bp, Homo sapiens; identical to SEQ ID NO: 3863

SEQ ID NO: 10173 - DNA, 384 bp, Homo sapiens; identical to SEQ ID NO: 3864
  misc_feature 334, 339, 340, 341, 342, 344, 345, 346, 355, 356, 357: n = A,T,C or G

SEQ ID NO: 10174 - DNA, 286 bp, Homo sapiens; identical to SEQ ID NO: 3865

SEQ ID NO: 10175 - DNA, 327 bp, Homo sapiens; identical to SEQ ID NO: 3866

SEQ ID NO: 10176 - DNA, 548 bp, Homo sapiens; identical to SEQ ID NO: 3867
  misc_feature 424, 461, 485, 516, 548: n = A,T,C or G

SEQ ID NO: 10177 - DNA, 308 bp, Homo sapiens; identical to SEQ ID NO: 3868

SEQ ID NO: 10178 - DNA, 496 bp, Homo sapiens; identical to SEQ ID NO: 3869

SEQ ID NO: 10179 - DNA, 391 bp, Homo sapiens; identical to SEQ ID NO: 3870
  misc_feature 43, 58, 88, 89, 92, 97, 105, 129, 136, 164, 200, 222: n = A,T,C or G

SEQ ID NO: 10180 - DNA, 310 bp, Homo sapiens; identical to SEQ ID NO: 3871

SEQ ID NO: 10181 - DNA, 388 bp, Homo sapiens; identical to SEQ ID NO: 3872

SEQ ID NO: 10182 - DNA, 563 bp, Homo sapiens; identical to SEQ ID NO: 3874
  misc_feature 426, 508, 556: n = A,T,C or G

SEQ ID NO: 10183 - DNA, 558 bp, Homo sapiens; identical to SEQ ID NO: 3875
  misc_feature 408, 492, 535: n = A,T,C or G

SEQ ID NO: 10184 - DNA, 545 bp, Homo sapiens; identical to SEQ ID NO: 3876
  misc_feature 75, 122, 125, 158, 178, 230, 237, 247, 261, 264, 265, 280,346, 356, 373, 381, 387, 393, 407, 417, 421, 434, 473, 489: n = A,T,C or G

SEQ ID NO: 10185 - DNA, 316 bp, Homo sapiens; identical to SEQ ID NO: 3877
  misc_feature 11, 33, 39, 56, 78, 97, 173, 176, 203, 251: n = A,T,C or G

SEQ ID NO: 10186 - DNA, 552 bp, Homo sapiens; identical to SEQ ID NO: 3878
  misc_feature 414, 426, 444, 521, 545: n = A,T,C or G

SEQ ID NO: 10187 - DNA, 323 bp, Homo sapiens; identical to SEQ ID NO: 3879

SEQ ID NO: 10188 - DNA, 423 bp, Homo sapiens; identical to SEQ ID NO: 3880

SEQ ID NO: 10189 - DNA, 431 bp, Homo sapiens; identical to SEQ ID NO: 3881
  misc_feature 394: n = A,T,C or G

SEQ ID NO: 10190 - DNA, 264 bp, Homo sapiens; identical to SEQ ID NO: 3882
  misc_feature 76, 143: n = A,T,C or G

SEQ ID NO: 10191 - DNA, 322 bp, Homo sapiens; identical to SEQ ID NO: 3883
  misc_feature 33, 57: n = A,T,C or G

SEQ ID NO: 10192 - DNA, 362 bp, Homo sapiens; identical to SEQ ID NO: 3884
  misc_feature 1, 4, 9, 17, 46, 64, 87, 88, 89, 124, 136, 148, 149, 156,176, 183, 222, 225, 266, 284, 288, 309, 320, 325, 335: n = A,T,C or G

SEQ ID NO: 10193 - DNA, 321 bp, Homo sapiens; identical to SEQ ID NO: 3885
  misc_feature 252, 255, 263: n = A,T,C or G

SEQ ID NO: 10194 - DNA, 619 bp, Homo sapiens; identical to SEQ ID NO: 3886
  misc_feature 530, 535, 540: n = A,T,C or G

SEQ ID NO: 10195 - DNA, 329 bp, Homo sapiens; identical to SEQ ID NO: 3887

SEQ ID NO: 10196 - DNA, 355 bp, Homo sapiens; identical to SEQ ID NO: 3888
  misc_feature 31, 33, 101, 113, 118, 123, 127, 167, 242, 262, 314: n = A,T,C or G

SEQ ID NO: 10197 - DNA, 323 bp, Homo sapiens; identical to SEQ ID NO: 3889

SEQ ID NO: 10198 - DNA, 466 bp, Homo sapiens; identical to SEQ ID NO: 3890

SEQ ID NO: 10199 - DNA, 330 bp, Homo sapiens; identical to SEQ ID NO: 3891

SEQ ID NO: 10200 - DNA, 371 bp, Homo sapiens; identical to SEQ ID NO: 3892
  misc_feature 28, 32, 36, 41, 42, 43, 45, 46, 166, 216, 259, 266, 292,316, 337: n = A,T,C or G

SEQ ID NO: 10201 - DNA, 318 bp, Homo sapiens; identical to SEQ ID NO: 3893
  misc_feature 178, 311: n = A,T,C or G

SEQ ID NO: 10202 - DNA, 576 bp, Homo sapiens; identical to SEQ ID NO: 3894
  misc_feature 515, 557: n = A,T,C or G

SEQ ID NO: 10203 - DNA, 349 bp, Homo sapiens; identical to SEQ ID NO: 3895

SEQ ID NO: 10204 - DNA, 351 bp, Homo sapiens; identical to SEQ ID NO: 3896
  misc_feature 15, 26, 29, 76, 79, 84, 101, 126, 133, 159, 167, 231, 290: n = A,T,C or G

SEQ ID NO: 10205 - DNA, 404 bp, Homo sapiens; identical to SEQ ID NO: 3897

SEQ ID NO: 10206 - DNA, 449 bp, Homo sapiens; identical to SEQ ID NO: 3898
  misc_feature 368, 416: n = A,T,C or G

SEQ ID NO: 10207 - DNA, 469 bp, Homo sapiens; identical to SEQ ID NO: 3899
  misc_feature 63, 64, 65, 66, 75, 79, 84, 85, 86, 87, 88, 89, 90, 92, 97,98, 99, 101, 103, 107, 113, 114, 120, 121, 126, 134, 141,143, 148, 150, 157, 160, 164, 166, 168, 176, 177, 180, 182,183, 193, 205, 206, 210, 215, 225, 228, 230, 231, 236: n = A,T,C or G
  misc_feature 237, 247, 248, 260, 262, 265, 356, 372, 431: n = A,T,C or G

SEQ ID NO: 10208 - DNA, 726 bp, Homo sapiens; identical to SEQ ID NO: 3900
  misc_feature 458, 531, 551, 558, 589, 612, 623, 649, 669, 681, 704, 713,717: n = A,T,C or G

SEQ ID NO: 10209 - DNA, 438 bp, Homo sapiens; identical to SEQ ID NO: 3901
  misc_feature 332: n = A,T,C or G

SEQ ID NO: 10210 - DNA, 413 bp, Homo sapiens; identical to SEQ ID NO: 3902
  misc_feature 35, 36, 37, 38, 39, 44, 58, 63, 76, 267, 328, 404: n = A,T,C or G

SEQ ID NO: 10211 - DNA, 382 bp, Homo sapiens; identical to SEQ ID NO: 3903

SEQ ID NO: 10212 - DNA, 305 bp, Homo sapiens; identical to SEQ ID NO: 3904
  misc_feature 280, 300: n = A,T,C or G

SEQ ID NO: 10213 - DNA, 344 bp, Homo sapiens; identical to SEQ ID NO: 3905
  misc_feature 84, 106, 135, 146, 156, 219, 226, 239, 260, 283, 326: n = A,T,C or G

SEQ ID NO: 10214 - DNA, 449 bp, Homo sapiens; identical to SEQ ID NO: 3906
  misc_feature 357, 422, 428, 429, 436, 438, 439: n = A,T,C or G

SEQ ID NO: 10215 - DNA, 521 bp, Homo sapiens; identical to SEQ ID NO: 3907

SEQ ID NO: 10216 - DNA, 512 bp, Homo sapiens; identical to SEQ ID NO: 3908
  misc_feature 425, 449, 455: n = A,T,C or G

SEQ ID NO: 10217 - DNA, 418 bp, Homo sapiens; identical to SEQ ID NO: 3909
  misc_feature 226: n = A,T,C or G

SEQ ID NO: 10218 - DNA, 524 bp, Homo sapiens; identical to SEQ ID NO: 3910

SEQ ID NO: 10219 - DNA, 319 bp, Homo sapiens; identical to SEQ ID NO: 3911

SEQ ID NO: 10220 - DNA, 299 bp, Homo sapiens; identical to SEQ ID NO: 3912

SEQ ID NO: 10221 - DNA, 299 bp, Homo sapiens; identical to SEQ ID NO: 3913
  misc_feature 50, 52, 114, 129, 132, 134, 135, 141, 142, 144, 145, 146,147, 150, 151, 159, 160, 161, 162, 171, 175, 184, 189, 190,191, 193, 196, 200, 201, 202, 205, 206, 213, 217, 219, 220,226, 235, 246, 256, 257, 265, 266, 267, 268, 273, 274: n = A,T,C or G
  misc_feature 275, 276, 277, 278: n = A,T,C or G

SEQ ID NO: 10222 - DNA, 458 bp, Homo sapiens; identical to SEQ ID NO: 3914
  misc_feature 154, 371, 402: n = A,T,C or G

SEQ ID NO: 10223 - DNA, 491 bp, Homo sapiens; identical to SEQ ID NO: 3915

SEQ ID NO: 10224 - DNA, 588 bp, Homo sapiens; identical to SEQ ID NO: 3916
  misc_feature 378, 423, 439, 507, 532, 565, 566: n = A,T,C or G

SEQ ID NO: 10225 - DNA, 342 bp, Homo sapiens; identical to SEQ ID NO: 3917

SEQ ID NO: 10226 - DNA, 545 bp, Homo sapiens; identical to SEQ ID NO: 3918
  misc_feature 441, 499: n = A,T,C or G

SEQ ID NO: 10227 - DNA, 423 bp, Homo sapiens; identical to SEQ ID NO: 3919

SEQ ID NO: 10228 - DNA, 456 bp, Homo sapiens; identical to SEQ ID NO: 3920

SEQ ID NO: 10229 - DNA, 413 bp, Homo sapiens; identical to SEQ ID NO: 3921

SEQ ID NO: 10230 - DNA, 716 bp, Homo sapiens; identical to SEQ ID NO: 3922
  misc_feature 397, 550, 559, 574, 610, 634, 641, 673, 675, 709: n = A,T,C or G

SEQ ID NO: 10231 - DNA, 637 bp, Homo sapiens; identical to SEQ ID NO: 3923
  misc_feature 236, 295, 397, 498, 522, 544, 554, 597, 604, 610: n = A,T,C or G

SEQ ID NO: 10232 - DNA, 296 bp, Homo sapiens; identical to SEQ ID NO: 3924
  misc_feature 275, 284, 291: n = A,T,C or G

SEQ ID NO: 10233 - DNA, 636 bp, Homo sapiens; identical to SEQ ID NO: 3925
  misc_feature 64, 79, 298, 334, 403, 415, 517, 583, 602, 635: n = A,T,C or G

SEQ ID NO: 10234 - DNA, 439 bp, Homo sapiens; identical to SEQ ID NO: 3926

SEQ ID NO: 10235 - DNA, 351 bp, Homo sapiens; identical to SEQ ID NO: 3927
  misc_feature 72, 109: n = A,T,C or G

SEQ ID NO: 10236 - DNA, 265 bp, Homo sapiens; identical to SEQ ID NO: 3928

SEQ ID NO: 10237 - DNA, 323 bp, Homo sapiens; identical to SEQ ID NO: 3929

SEQ ID NO: 10238 - DNA, 352 bp, Homo sapiens; identical to SEQ ID NO: 3930
  misc_feature 29, 31, 33, 35, 36, 38, 39, 42, 43, 44, 48, 50, 51, 52, 55,59, 62, 63, 65, 66, 68, 70, 75, 84, 85, 95, 101, 138, 147,207, 208, 275, 308: n = A,T,C or G

SEQ ID NO: 10239 - DNA, 447 bp, Homo sapiens; identical to SEQ ID NO: 3931
  misc_feature 436: n = A,T,C or G

SEQ ID NO: 10240 - DNA, 414 bp, Homo sapiens; identical to SEQ ID NO: 3932
  misc_feature 141: n = A,T,C or G

SEQ ID NO: 10241 - DNA, 550 bp, Homo sapiens; identical to SEQ ID NO: 3933
  misc_feature 497, 514: n = A,T,C or G

SEQ ID NO: 10242 - DNA, 472 bp, Homo sapiens; identical to SEQ ID NO: 3934

SEQ ID NO: 10243 - DNA, 378 bp, Homo sapiens; identical to SEQ ID NO: 3935
  misc_feature 7, 10, 30, 41, 42, 89, 135, 139, 140: n = A,T,C or G

SEQ ID NO: 10244 - DNA, 449 bp, Homo sapiens; identical to SEQ ID NO: 3936

SEQ ID NO: 10245 - DNA, 437 bp, Homo sapiens; identical to SEQ ID NO: 3937
  misc_feature 113, 138, 180, 202, 204: n = A,T,C or G

SEQ ID NO: 10246 - DNA, 266 bp, Homo sapiens; identical to SEQ ID NO: 3938

SEQ ID NO: 10247 - DNA, 362 bp, Homo sapiens; identical to SEQ ID NO: 3939
  misc_feature 125, 153, 260: n = A,T,C or G

SEQ ID NO: 10248 - DNA, 311 bp, Homo sapiens; identical to SEQ ID NO: 3940

SEQ ID NO: 10249 - DNA, 231 bp, Homo sapiens; identical to SEQ ID NO: 3941

SEQ ID NO: 10250 - DNA, 319 bp, Homo sapiens; identical to SEQ ID NO: 3942
  misc_feature 110, 118, 133, 191, 252, 277, 281, 285, 298, 299, 300, 307,309, 314: n = A,T,C or G

SEQ ID NO: 10251 - DNA, 632 bp, Homo sapiens; identical to SEQ ID NO: 3943
  misc_feature 452, 457, 498, 526, 543, 569, 594, 601, 617, 632: n = A,T,C or G

SEQ ID NO: 10252 - DNA, 646 bp, Homo sapiens; identical to SEQ ID NO: 3944
  misc_feature 400, 403, 493, 510, 528, 531, 585, 591, 592, 600, 620, 625: n = A,T,C or G

SEQ ID NO: 10253 - DNA, 312 bp, Homo sapiens; identical to SEQ ID NO: 3945

SEQ ID NO: 10254 - DNA, 382 bp, Homo sapiens; identical to SEQ ID NO: 3946

SEQ ID NO: 10255 - DNA, 380 bp, Homo sapiens; identical to SEQ ID NO: 3947
  misc_feature 352: n = A,T,C or G

SEQ ID NO: 10256 - DNA, 627 bp, Homo sapiens; identical to SEQ ID NO: 3948
  misc_feature 52, 82, 88, 564, 566, 567: n = A,T,C or G

SEQ ID NO: 10257 - DNA, 711 bp, Homo sapiens; identical to SEQ ID NO: 3949
  misc_feature 190, 192, 193, 195, 199, 201, 202, 205, 221, 234, 237, 239,244, 247, 249, 251, 255, 268, 269, 273, 274, 278, 282, 284,287, 292, 296, 303, 307, 310, 312, 323, 326, 328, 329, 332,336, 350, 364, 378, 392, 399, 403, 404, 406, 410, 414: n = A,T,C or G
  misc_feature 426, 430, 436, 443, 448, 452, 462, 477, 480, 485, 488, 498,504, 509, 510, 511, 519, 520, 522, 527, 529, 532, 537, 556,565, 568, 581, 596, 599, 611, 616, 624, 626, 630, 640, 641,651, 654, 657, 685, 686, 688, 690, 692, 701: n = A,T,C or G

SEQ ID NO: 10258 - DNA, 266 bp, Homo sapiens; identical to SEQ ID NO: 3950

SEQ ID NO: 10259 - DNA, 373 bp, Homo sapiens; identical to SEQ ID NO: 3951

SEQ ID NO: 10260 - DNA, 435 bp, Homo sapiens; identical to SEQ ID NO: 3952

SEQ ID NO: 10261 - DNA, 640 bp, Homo sapiens; identical to SEQ ID NO: 3953
  misc_feature 456, 521, 594: n = A,T,C or G

SEQ ID NO: 10262 - DNA, 383 bp, Homo sapiens; identical to SEQ ID NO: 3954
  misc_feature 61: n = A,T,C or G

SEQ ID NO: 10263 - DNA, 332 bp, Homo sapiens; identical to SEQ ID NO: 3955

SEQ ID NO: 10264 - DNA, 232 bp, Homo sapiens; identical to SEQ ID NO: 3956

SEQ ID NO: 10265 - DNA, 327 bp, Homo sapiens; identical to SEQ ID NO: 3957
  misc_feature 296: n = A,T,C or G

SEQ ID NO: 10266 - DNA, 327 bp, Homo sapiens; identical to SEQ ID NO: 3958

SEQ ID NO: 10267 - DNA, 252 bp, Homo sapiens; identical to SEQ ID NO: 3959

SEQ ID NO: 10268 - DNA, 599 bp, Homo sapiens; identical to SEQ ID NO: 3960
  misc_feature 476, 490, 498, 502, 507, 509, 537, 546, 566, 577: n = A,T,C or G

SEQ ID NO: 10269 - DNA, 334 bp, Homo sapiens; identical to SEQ ID NO: 3961

SEQ ID NO: 10270 - DNA, 499 bp, Homo sapiens; identical to SEQ ID NO: 3962
  misc_feature 349, 375, 382, 405, 426, 430, 475, 478: n = A,T,C or G

SEQ ID NO: 10271 - DNA, 363 bp, Homo sapiens; identical to SEQ ID NO: 3963
  misc_feature 26, 71, 73, 82, 83, 84, 89, 90, 91, 94, 96, 97, 105, 107,108, 109, 117, 118, 119, 120, 127, 137, 140, 141, 142, 144,145, 146, 147, 148, 149, 152, 156, 157, 160, 161, 162, 164,166, 177, 179, 180, 181, 182, 183, 184, 189, 190, 194: n = A,T,C or G
  misc_feature 203, 206, 207, 208, 211, 218, 219, 220, 221, 222, 224, 226,227, 229, 234, 235, 246, 254, 256, 278, 280, 284, 285, 289,294, 297, 301, 306, 311, 312, 321, 322, 323, 326, 327, 328: n = A,T,C or G

SEQ ID NO: 10272 - DNA, 415 bp, Homo sapiens; identical to SEQ ID NO: 3964
  misc_feature 8, 22, 32, 185, 233: n = A,T,C or G

SEQ ID NO: 10273 - DNA, 757 bp, Homo sapiens; identical to SEQ ID NO: 3965
  misc_feature 100, 185, 211, 213, 297, 307, 316, 323, 350, 351, 382, 393,406, 414, 498, 516, 531, 565, 635, 650, 651, 653, 658, 661,677, 688, 703, 723, 729, 738, 741, 743: n = A,T,C or G

SEQ ID NO: 10274 - DNA, 343 bp, Homo sapiens; identical to SEQ ID NO: 3966
  misc_feature 29, 30, 36, 46, 59, 71, 84, 161, 239, 242, 246, 250, 256,266, 276, 278, 280, 303, 306, 309, 314, 319: n = A,T,C or G

SEQ ID NO: 10275 - DNA, 357 bp, Homo sapiens; identical to SEQ ID NO: 3967

SEQ ID NO: 10276 - DNA, 605 bp, Homo sapiens; identical to SEQ ID NO: 3968
  misc_feature 409, 410, 411, 412, 413, 414, 416, 417, 418, 419, 420, 421,422, 423, 426, 427, 428, 429, 430, 432, 439, 465, 480, 507,519, 537, 558, 570, 571, 573, 588, 590, 601: n = A,T,C or G

SEQ ID NO: 10277 - DNA, 382 bp, Homo sapiens; identical to SEQ ID NO: 3969

SEQ ID NO: 10278 - DNA, 339 bp, Homo sapiens; identical to SEQ ID NO: 3970
  misc_feature 50, 57, 107, 281: n = A,T,C or G

SEQ ID NO: 10279 - DNA, 323 bp, Homo sapiens; identical to SEQ ID NO: 3971

SEQ ID NO: 10280 - DNA, 413 bp, Homo sapiens; identical to SEQ ID NO: 3972

SEQ ID NO: 10281 - DNA, 608 bp, Homo sapiens; identical to SEQ ID NO: 3973
  misc_feature 405, 503, 538, 576, 586, 591: n = A,T,C or G

SEQ ID NO: 10282 - DNA, 291 bp, Homo sapiens; identical to SEQ ID NO: 3974
  misc_feature 25, 41, 44, 46, 47, 55, 57, 66, 76, 80, 89, 96, 97, 106,108, 110, 113, 117, 120, 126, 136, 143, 174, 198, 213, 219,244: n = A,T,C or G

SEQ ID NO: 10283 - DNA, 674 bp, Homo sapiens; identical to SEQ ID NO: 3975
  misc_feature 298, 526, 550, 561, 570, 596, 615, 617, 630, 636, 639: n = A,T,C or G

SEQ ID NO: 10284 - DNA, 419 bp, Homo sapiens; identical to SEQ ID NO: 3976

SEQ ID NO: 10285 - DNA, 396 bp, Homo sapiens; identical to SEQ ID NO: 3977
  misc_feature 247: n = A,T,C or G

SEQ ID NO: 10286 - DNA, 431 bp, Homo sapiens; identical to SEQ ID NO: 3978
  misc_feature 223, 232, 262, 307, 358: n = A,T,C or G

SEQ ID NO: 10287 - DNA, 401 bp, Homo sapiens; identical to SEQ ID NO: 3979

SEQ ID NO: 10288 - DNA, 533 bp, Homo sapiens; identical to SEQ ID NO: 3980

SEQ ID NO: 10289 - DNA, 311 bp, Homo sapiens; identical to SEQ ID NO: 3981

SEQ ID NO: 10290 - DNA, 519 bp, Homo sapiens; identical to SEQ ID NO: 3982

SEQ ID NO: 10291 - DNA, 618 bp, Homo sapiens; identical to SEQ ID NO: 3983

SEQ ID NO: 10292 - DNA, 311 bp, Homo sapiens; identical to SEQ ID NO: 3984
  misc_feature 246, 272: n = A,T,C or G

SEQ ID NO: 10293 - DNA, 356 bp, Homo sapiens; identical to SEQ ID NO: 3985
  misc_feature 3, 34, 39, 66, 75, 121, 126, 130, 155, 156, 157, 222, 245,258, 263, 292, 320, 331: n = A,T,C or G

SEQ ID NO: 10294 - DNA, 323 bp, Homo sapiens; identical to SEQ ID NO: 3986
  misc_feature 250, 257: n = A,T,C or G

SEQ ID NO: 10295 - DNA, 632 bp, Homo sapiens; identical to SEQ ID NO: 3987
  misc_feature 555: n = A,T,C or G

SEQ ID NO: 10296 - DNA, 326 bp, Homo sapiens; identical to SEQ ID NO: 3988
  misc_feature 23, 175, 231: n = A,T,C or G

SEQ ID NO: 10297 - DNA, 322 bp, Homo sapiens; identical to SEQ ID NO: 3989

SEQ ID NO: 10298 - DNA, 486 bp, Homo sapiens; identical to SEQ ID NO: 3990

SEQ ID NO: 10299 - DNA, 462 bp, Homo sapiens; identical to SEQ ID NO: 3991
  misc_feature 402: n = A,T,C or G

SEQ ID NO: 10300 - DNA, 670 bp, Homo sapiens; identical to SEQ ID NO: 3992
  misc_feature 160, 468, 490, 586, 599, 605: n = A,T,C or G

SEQ ID NO: 10301 - DNA, 767 bp, Homo sapiens; identical to SEQ ID NO: 3993
  misc_feature 100, 125, 127, 141, 142, 148, 149, 152, 156, 160, 162, 164,167, 173, 180, 183, 185, 188, 197, 201, 217, 226, 227, 229,233, 237, 243, 244, 249, 266, 270, 272, 279, 283, 293, 297,300, 308, 315, 316, 323, 335, 336, 338, 342, 344, 346: n = A,T,C or G
  misc_feature 367, 371, 374, 381, 386, 387, 390, 414, 424, 433, 434, 440,444, 451, 473, 476, 488, 493, 499, 503, 506, 507, 524, 531,546, 550, 554, 560, 563, 572, 575, 579, 584, 608, 611, 612,623, 635, 639, 640, 655, 656, 659, 660, 673, 682, 689: n = A,T,C or G
  misc_feature 690, 708, 717, 718, 721, 730, 731, 733, 735, 736, 737, 743,752, 755: n = A,T,C or G

SEQ ID NO: 10302 - DNA, 295 bp, Homo sapiens; identical to SEQ ID NO: 3994

SEQ ID NO: 10303 - DNA, 508 bp, Homo sapiens; identical to SEQ ID NO: 3995
  misc_feature 423, 479: n = A,T,C or G

SEQ ID NO: 10304 - DNA, 382 bp, Homo sapiens; identical to SEQ ID NO: 3996
  misc_feature 189: n = A,T,C or G

SEQ ID NO: 10305 - DNA, 596 bp, Homo sapiens; identical to SEQ ID NO: 3997
  misc_feature 536, 560: n = A,T,C or G

SEQ ID NO: 10306 - DNA, 324 bp, Homo sapiens; identical to SEQ ID NO: 3998

SEQ ID NO: 10307 - DNA, 273 bp, Homo sapiens; identical to SEQ ID NO: 3999
  misc_feature 54, 55, 56, 57, 58, 64: n = A,T,C or G

SEQ ID NO: 10308 - DNA, 571 bp, Homo sapiens; identical to SEQ ID NO: 4000
  misc_feature 103: n = A,T,C or G

SEQ ID NO: 10309 - DNA, 404 bp, Homo sapiens; identical to SEQ ID NO: 4001

SEQ ID NO: 10310 - DNA, 531 bp, Homo sapiens; identical to SEQ ID NO: 4002
  misc_feature 8: n = A,T,C or G

SEQ ID NO: 10311 - DNA, 365 bp, Homo sapiens; identical to SEQ ID NO: 4003
  misc_feature 57: n = A,T,C or G

SEQ ID NO: 10312 - DNA, 317 bp, Homo sapiens; identical to SEQ ID NO: 4004

SEQ ID NO: 10313 - DNA, 309 bp, Homo sapiens; identical to SEQ ID NO: 4005
  misc_feature 203, 285: n = A,T,C or G

SEQ ID NO: 10314 - DNA, 333 bp, Homo sapiens; identical to SEQ ID NO: 4006
  misc_feature 328: n = A,T,C or G

SEQ ID NO: 10315 - DNA, 404 bp, Homo sapiens; identical to SEQ ID NO: 4007
  misc_feature 260: n = A,T,C or G

SEQ ID NO: 10316 - DNA, 409 bp, Homo sapiens; identical to SEQ ID NO: 4008
  misc_feature 10, 19, 22, 50, 66, 91, 105, 113, 194, 200, 253, 254, 273,320, 332, 340, 376, 391: n = A,T,C or G

SEQ ID NO: 10317 - DNA, 491 bp, Homo sapiens; identical to SEQ ID NO: 4009
  misc_feature 446: n = A,T,C or G

SEQ ID NO: 10318 - DNA, 696 bp, Homo sapiens; identical to SEQ ID NO: 4010
  misc_feature 182, 183, 456, 462, 464, 473, 476, 477, 487, 488, 501, 509,510, 511, 515, 516, 520, 525, 530, 559, 562, 575, 599, 611,615, 616, 617, 625, 638, 639, 652, 658, 661, 663, 676, 683: n = A,T,C or G

SEQ ID NO: 10319 - DNA, 323 bp, Homo sapiens; identical to SEQ ID NO: 4011

SEQ ID NO: 10320 - DNA, 565 bp, Homo sapiens; identical to SEQ ID NO: 4012
  misc_feature 494, 525, 531, 552: n = A,T,C or G

SEQ ID NO: 10321 - DNA, 326 bp, Homo sapiens; identical to SEQ ID NO: 4013

SEQ ID NO: 10322 - DNA, 424 bp, Homo sapiens; identical to SEQ ID NO: 4014
  misc_feature 408: n = A,T,C or G

SEQ ID NO: 10323 - DNA, 537 bp, Homo sapiens; identical to SEQ ID NO: 4015

SEQ ID NO: 10324 - DNA, 227 bp, Homo sapiens; identical to SEQ ID NO: 4016

SEQ ID NO: 10325 - DNA, 431 bp, Homo sapiens; identical to SEQ ID NO: 4017
  misc_feature 85, 102, 106, 109, 110, 111, 112, 118, 120, 123, 124, 131,137, 139, 140, 142, 143, 146, 159, 161, 168, 169, 170, 176,177, 178, 180, 200, 207, 210, 211, 214, 218, 231, 233, 236,248, 249, 253, 259, 277, 278, 280, 282, 294, 296, 301: n = A,T,C or G
  misc_feature 302, 307, 309, 314, 315, 316, 317, 321, 324, 329, 330, 339,353, 372, 373, 381, 390, 391, 392, 397, 399, 400, 401, 406,407, 411, 412, 414, 415, 416: n = A,T,C or G

SEQ ID NO: 10326 - DNA, 615 bp, Homo sapiens; identical to SEQ ID NO: 4018

SEQ ID NO: 10327 - DNA, 334 bp, Homo sapiens; identical to SEQ ID NO: 4019
  misc_feature 325: n = A,T,C or G

SEQ ID NO: 10328 - DNA, 505 bp, Homo sapiens; identical to SEQ ID NO: 4020
  misc_feature 24, 47, 121, 132, 134, 142, 153, 169, 267, 303, 304, 314,320, 335: n = A,T,C or G

SEQ ID NO: 10329 - DNA, 318 bp, Homo sapiens; identical to SEQ ID NO: 4021

SEQ ID NO: 10330 - DNA, 561 bp, Homo sapiens; identical to SEQ ID NO: 4022
  misc_feature 400, 401, 448, 460, 471, 487, 488, 489, 495, 500, 501, 527,538, 542, 544, 549: n = A,T,C or G

SEQ ID NO: 10331 - DNA, 523 bp, Homo sapiens; identical to SEQ ID NO: 4023
  misc_feature 514: n = A,T,C or G

SEQ ID NO: 10332 - DNA, 413 bp, Homo sapiens; identical to SEQ ID NO: 4024
  misc_feature 99: n = A,T,C or G

SEQ ID NO: 10333 - DNA, 478 bp, Homo sapiens; identical to SEQ ID NO: 4025
  misc_feature 9, 10: n = A,T,C or G

SEQ ID NO: 10334 - DNA, 625 bp, Homo sapiens; identical to SEQ ID NO: 4026
  misc_feature 183, 184, 185, 585: n = A,T,C or G

SEQ ID NO: 10335 - DNA, 402 bp, Homo sapiens; identical to SEQ ID NO: 4027
  misc_feature 383: n = A,T,C or G

SEQ ID NO: 10336 - DNA, 318 bp, Homo sapiens; identical to SEQ ID NO: 4028

SEQ ID NO: 10337 - DNA, 775 bp, Homo sapiens; identical to SEQ ID NO: 4029
  misc_feature 6, 22, 31, 119, 148, 156, 195, 199, 200, 211, 228, 245, 259,262, 273, 274, 287, 326, 327, 332, 334, 335, 336, 343, 345,349, 434, 451, 454, 455, 458, 463, 471, 472, 479, 492, 500,516, 531, 534, 537, 540, 555, 556, 559, 565, 580: n = A,T,C or G
  misc_feature 582, 583, 598, 609, 613, 616, 623, 631, 635, 653, 674, 681,684, 691, 693, 711, 721, 722, 723, 724, 729, 744, 753, 764: n = A,T,C or G

SEQ ID NO: 10338 - DNA, 639 bp, Homo sapiens; identical to SEQ ID NO: 4030
  misc_feature 245, 266, 267, 268, 269, 282, 287, 294, 295, 305, 308, 312,316, 318, 327, 330, 332, 345, 359, 363, 364, 366, 368, 371,377, 378, 379, 380, 382, 383, 384, 385, 386, 388, 389, 394,399, 400, 430, 431, 442, 448, 449, 460, 468, 472, 473: n = A,T,C or G
  misc_feature 477, 478, 479, 480, 484, 489, 492, 495, 496, 504, 511, 522,527, 528, 529, 531, 533, 537, 547, 569, 579, 581, 584, 595,599, 607, 611, 619, 623, 625, 629, 630: n = A,T,C or G

SEQ ID NO: 10339 - DNA, 254 bp, Homo sapiens; identical to SEQ ID NO: 4031
  misc_feature 216: n = A,T,C or G

SEQ ID NO: 10340 - DNA, 496 bp, Homo sapiens; identical to SEQ ID NO: 4032
  misc_feature 483: n = A,T,C or G

SEQ ID NO: 10341 - DNA, 437 bp, Homo sapiens; identical to SEQ ID NO: 4033
  misc_feature 156, 160, 338: n = A,T,C or G

SEQ ID NO: 10342 - DNA, 381 bp, Homo sapiens; identical to SEQ ID NO: 4034

SEQ ID NO: 10343 - DNA, 765 bp, Homo sapiens; identical to SEQ ID NO: 4035
  misc_feature 416, 569, 575, 614, 617, 626, 627, 628, 687, 711, 721, 738,739, 749, 754: n = A,T,C or G

SEQ ID NO: 10344 - DNA, 516 bp, Homo sapiens; identical to SEQ ID NO: 4036

SEQ ID NO: 10345 - DNA, 312 bp, Homo sapiens; identical to SEQ ID NO: 4037
  misc_feature 219, 222: n = A,T,C or G

SEQ ID NO: 10346 - DNA, 482 bp, Homo sapiens; identical to SEQ ID NO: 4038
  misc_feature 464: n = A,T,C or G

SEQ ID NO: 10347 - DNA, 670 bp, Homo sapiens; identical to SEQ ID NO: 4039
  misc_feature 524, 594, 654: n = A,T,C or G

SEQ ID NO: 10348 - DNA, 610 bp, Homo sapiens; identical to SEQ ID NO: 4040
  misc_feature 15, 23, 28, 107, 145, 209, 225, 269, 273, 274, 283, 286,432, 503, 553, 554, 572, 574, 587, 596, 598: n = A,T,C or G

SEQ ID NO: 10349 - DNA, 449 bp, Homo sapiens; identical to SEQ ID NO: 4041

SEQ ID NO: 10350 - DNA, 558 bp, Homo sapiens; identical to SEQ ID NO: 4042
  misc_feature 250, 263, 343, 403, 477, 488, 499, 501, 525: n = A,T,C or G

SEQ ID NO: 10351 - DNA, 304 bp, Homo sapiens; identical to SEQ ID NO: 4043

SEQ ID NO: 10352 - DNA, 567 bp, Homo sapiens; identical to SEQ ID NO: 4044
  misc_feature 517, 544: n = A,T,C or G

SEQ ID NO: 10353 - DNA, 582 bp, Homo sapiens; identical to SEQ ID NO: 4045

SEQ ID NO: 10354 - DNA, 464 bp, Homo sapiens; identical to SEQ ID NO: 4046
  misc_feature 20, 24, 68, 70, 83, 91, 96, 104, 121, 129, 130, 133, 149,152, 198, 200, 214, 222, 304: n = A,T,C or G

SEQ ID NO: 10355 - DNA, 459 bp, Homo sapiens; identical to SEQ ID NO: 4047

SEQ ID NO: 10356 - DNA, 344 bp, Homo sapiens; identical to SEQ ID NO: 4048
  misc_feature 25, 64, 115, 176, 239: n = A,T,C or G

SEQ ID NO: 10357 - DNA, 484 bp, Homo sapiens; identical to SEQ ID NO: 4049
  misc_feature 475: n = A,T,C or G

SEQ ID NO: 10358 - DNA, 918 bp, Homo sapiens; identical to SEQ ID NO: 4050
  misc_feature 18, 29, 61, 83, 117, 127, 164, 171, 184, 206, 208, 210, 212,216, 223, 227, 229, 246, 254, 258, 262, 266, 268, 271, 277,282, 284, 288, 317, 319, 321, 345, 353, 360, 376, 382, 396,397, 404, 430, 435, 469, 470, 530, 538, 540, 543: n = A,T,C or G
  misc_feature 573, 600, 643, 712, 723, 725, 761, 766, 773, 788, 829, 831,852, 866, 886, 891: n = A,T,C or G

SEQ ID NO: 10359 - DNA, 466 bp, Homo sapiens; identical to SEQ ID NO: 4051
  misc_feature 445: n = A,T,C or G

SEQ ID NO: 10360 - DNA, 521 bp, Homo sapiens; identical to SEQ ID NO: 4052
  misc_feature 9, 363, 395, 434, 443, 484, 489, 492, 507: n = A,T,C or G

SEQ ID NO: 10361 - DNA, 401 bp, Homo sapiens; identical to SEQ ID NO: 4053

SEQ ID NO: 10362 - DNA, 303 bp, Homo sapiens; identical to SEQ ID NO: 4054

SEQ ID NO: 10363 - DNA, 502 bp, Homo sapiens; identical to SEQ ID NO: 4055

SEQ ID NO: 10364 - DNA, 548 bp, Homo sapiens; identical to SEQ ID NO: 4056

SEQ ID NO: 10365 - DNA, 752 bp, Homo sapiens; identical to SEQ ID NO: 4057
  misc_feature 277, 316, 317, 318, 319, 320, 337, 346, 347, 353, 355, 357,358, 364, 365, 368, 369, 376, 377, 378, 379, 380, 385, 388,390, 392, 395, 396, 398, 399, 402, 406, 407, 410, 417, 419,420, 434, 437, 438, 444, 445, 447, 448, 449, 459, 460: n = A,T,C or G
  misc_feature 463, 481, 482, 488, 491, 492, 494, 496, 501, 503, 504, 507,509, 510, 512, 545, 547, 548, 550, 561, 563, 585, 587, 592,596, 599, 601, 603, 608, 615, 619, 621, 622, 623, 624, 627,632, 633, 640, 641, 642, 644, 646, 648, 649, 651, 661: n = A,T,C or G
  misc_feature 664, 670, 686, 696, 698, 699, 705, 715, 720, 724, 727, 732,735, 737, 738, 739: n = A,T,C or G

SEQ ID NO: 10366 - DNA, 648 bp, Homo sapiens; identical to SEQ ID NO: 4058
  misc_feature 1, 177, 192, 211, 216, 285, 350, 354, 377, 399, 418, 427,435, 449, 461, 477, 478, 491, 507, 511, 518, 520, 530, 538,545, 555, 559, 568, 576, 577, 578, 612, 615, 626, 637: n = A,T,C or G

SEQ ID NO: 10367 - DNA, 465 bp, Homo sapiens; identical to SEQ ID NO: 4059

SEQ ID NO: 10368 - DNA, 597 bp, Homo sapiens; identical to SEQ ID NO: 4060

SEQ ID NO: 10369 - DNA, 648 bp, Homo sapiens; identical to SEQ ID NO: 4061
  misc_feature 525: n = A,T,C or G

SEQ ID NO: 10370 - DNA, 521 bp, Homo sapiens; identical to SEQ ID NO: 4063
  misc_feature 372, 388, 446, 488, 504: n = A,T,C or G

SEQ ID NO: 10371 - DNA, 472 bp, Homo sapiens; identical to SEQ ID NO: 4064
  misc_feature 217, 239, 263, 269, 290, 291, 304, 306, 320, 327, 328, 329,330, 332, 337, 339, 344, 345, 347, 348, 352, 358, 376, 379,382, 384, 385, 387, 388, 393, 394, 399, 400, 402, 404, 406,407, 408, 409, 412, 415, 416, 424, 425, 431, 432, 433: n = A,T,C or G
  misc_feature 434, 435, 436, 443, 444, 450, 454, 460, 463, 469: n = A,T,C or G

SEQ ID NO: 10372 - DNA, 566 bp, Homo sapiens; identical to SEQ ID NO: 4065

SEQ ID NO: 10373 - DNA, 467 bp, Homo sapiens; identical to SEQ ID NO: 4066

SEQ ID NO: 10374 - DNA, 537 bp, Homo sapiens; identical to SEQ ID NO: 4067
  misc_feature 8, 20, 24, 27, 28, 32, 39, 41, 44, 46, 82, 86, 93, 108, 128,154, 262, 270, 283, 291, 292, 293, 294, 295, 296, 297, 298,299, 300, 301, 302, 303, 304, 305, 306, 307, 308, 309, 310,311, 312, 313, 314, 315, 316, 317, 318, 319, 320: n = A,T,C or G
  misc_feature 321, 322, 323, 324, 325, 326, 327, 328, 329, 330, 331, 332,333, 334, 339, 342, 345, 352, 355, 361, 366, 372, 374, 468,507, 508, 520, 526, 536: n = A,T,C or G

SEQ ID NO: 10375 - DNA, 482 bp, Homo sapiens; identical to SEQ ID NO: 4068
  misc_feature 301, 318, 371: n = A,T,C or G

SEQ ID NO: 10376 - DNA, 549 bp, Homo sapiens; identical to SEQ ID NO: 4069
  misc_feature 272, 384, 444, 445, 459, 543: n = A,T,C or G

SEQ ID NO: 10377 - DNA, 439 bp, Homo sapiens; identical to SEQ ID NO: 4070
  misc_feature 420: n = A,T,C or G

SEQ ID NO: 10378 - DNA, 317 bp, Homo sapiens; identical to SEQ ID NO: 4071

SEQ ID NO: 10379 - DNA, 513 bp, Homo sapiens; identical to SEQ ID NO: 4072
  misc_feature 27, 69, 105, 149, 174, 187, 353, 417, 457: n = A,T,C or G

SEQ ID NO: 10380 - DNA, 722 bp, Homo sapiens; identical to SEQ ID NO: 4073
  misc_feature 181, 295, 303, 375, 408, 438, 456, 468, 479, 539, 551, 586,602, 620, 621, 626, 683, 690: n = A,T,C or G

SEQ ID NO: 10381 - DNA, 312 bp, Homo sapiens; identical to SEQ ID NO: 4074

SEQ ID NO: 10382 - DNA, 207 bp, Homo sapiens; identical to SEQ ID NO: 4075
  misc_feature 26, 39: n = A,T,C or G

SEQ ID NO: 10383 - DNA, 605 bp, Homo sapiens; identical to SEQ ID NO: 4076
  misc_feature 47, 70, 82, 105, 120, 180, 189, 205, 239, 304, 310, 311,312, 335, 338, 347, 364, 372, 388, 389, 473, 498, 509, 518,520, 538, 560, 575, 581, 585: n = A,T,C or G

SEQ ID NO: 10384 - DNA, 554 bp, Homo sapiens; identical to SEQ ID NO: 4077
  misc_feature 373, 412, 418, 433, 466, 470, 488: n = A,T,C or G

SEQ ID NO: 10385 - DNA, 492 bp, Homo sapiens; identical to SEQ ID NO: 4079
  misc_feature 420, 465, 487: n = A,T,C or G

SEQ ID NO: 10386 - DNA, 310 bp, Homo sapiens; identical to SEQ ID NO: 4080

SEQ ID NO: 10387 - DNA, 384 bp, Homo sapiens; identical to SEQ ID NO: 4081
  misc_feature 380: n = A,T,C or G

SEQ ID NO: 10388 - DNA, 281 bp, Homo sapiens; identical to SEQ ID NO: 4082
  misc_feature 135, 212: n = A,T,C or G

SEQ ID NO: 10389 - DNA, 378 bp, Homo sapiens; identical to SEQ ID NO: 4083

SEQ ID NO: 10390 - DNA, 221 bp, Homo sapiens; identical to SEQ ID NO: 4084
  misc_feature 45, 87, 99, 112, 116, 125, 133, 134, 140, 156, 161, 163,167, 179, 181, 183, 184, 185, 189: n = A,T,C or G

SEQ ID NO: 10391 - DNA, 308 bp, Homo sapiens; identical to SEQ ID NO: 4085

SEQ ID NO: 10392 - DNA, 433 bp, Homo sapiens; identical to SEQ ID NO: 4086
  misc_feature 48, 83, 189, 205, 213, 226, 257, 274, 275, 291, 294, 307,309, 334, 338, 342, 345, 364, 366, 373, 384, 393, 399, 404: n = A,T,C or G

SEQ ID NO: 10393 - DNA, 511 bp, Homo sapiens; identical to SEQ ID NO: 4087
  misc_feature 510: n = A,T,C or G

SEQ ID NO: 10394 - DNA, 267 bp, Homo sapiens; identical to SEQ ID NO: 4088
  misc_feature 194: n = A,T,C or G

SEQ ID NO: 10395 - DNA, 324 bp, Homo sapiens; identical to SEQ ID NO: 4089
  misc_feature 203: n = A,T,C or G

SEQ ID NO: 10396 - DNA, 633 bp, Homo sapiens; identical to SEQ ID NO: 4090
  misc_feature 550, 574, 602, 612: n = A,T,C or G

SEQ ID NO: 10397 - DNA, 311 bp, Homo sapiens; identical to SEQ ID NO: 4091
  misc_feature 30, 294: n = A,T,C or G

SEQ ID NO: 10398 - DNA, 300 bp, Homo sapiens; identical to SEQ ID NO: 4092

SEQ ID NO: 10399 - DNA, 676 bp, Homo sapiens; identical to SEQ ID NO: 4093
  misc_feature 140, 149, 219, 267, 272, 276, 277, 283, 286, 332, 390, 400,418, 427, 430, 443, 480, 487, 494, 501, 511, 525, 547, 551,564, 587, 612, 616, 629, 635, 658: n = A,T,C or G

SEQ ID NO: 10400 - DNA, 388 bp, Homo sapiens; identical to SEQ ID NO: 4094

SEQ ID NO: 10401 - DNA, 308 bp, Homo sapiens; identical to SEQ ID NO: 4095

SEQ ID NO: 10402 - DNA, 712 bp, Homo sapiens; identical to SEQ ID NO: 4096
  misc_feature 382, 421, 429, 536, 596, 638, 659, 660, 662, 677, 688, 702: n = A,T,C or G

SEQ ID NO: 10403 - DNA, 364 bp, Homo sapiens; identical to SEQ ID NO: 4097
  misc_feature 56, 122, 129, 137, 143, 169, 185, 229, 311: n = A,T,C or G

SEQ ID NO: 10404 - DNA, 212 bp, Homo sapiens; identical to SEQ ID NO: 4098

SEQ ID NO: 10405 - DNA, 282 bp, Homo sapiens; identical to SEQ ID NO: 4099
  misc_feature 275: n = A,T,C or G

SEQ ID NO: 10406 - DNA, 519 bp, Homo sapiens; identical to SEQ ID NO: 4100
  misc_feature 433, 495: n = A,T,C or G

SEQ ID NO: 10407 - DNA, 366 bp, Homo sapiens; identical to SEQ ID NO: 4101
  misc_feature 277, 283: n = A,T,C or G

SEQ ID NO: 10408 - DNA, 415 bp, Homo sapiens; identical to SEQ ID NO: 4102
  misc_feature 355: n = A,T,C or G

SEQ ID NO: 10409 - DNA, 372 bp, Homo sapiens; identical to SEQ ID NO: 4103
  misc_feature 83, 92, 137, 166, 305, 349, 363: n = A,T,C or G

SEQ ID NO: 10410 - DNA, 519 bp, Homo sapiens; identical to SEQ ID NO: 4104

SEQ ID NO: 10411 - DNA, 302 bp, Homo sapiens; identical to SEQ ID NO: 4105

SEQ ID NO: 10412 - DNA, 510 bp, Homo sapiens; identical to SEQ ID NO: 4106
  misc_feature 32: n = A,T,C or G

SEQ ID NO: 10413 - DNA, 294 bp, Homo sapiens; identical to SEQ ID NO: 4107

SEQ ID NO: 10414 - DNA, 540 bp, Homo sapiens; identical to SEQ ID NO: 4108
  misc_feature 139, 221, 241, 244, 255, 277, 304, 311, 321, 350, 385, 387,392, 400, 402, 411, 413, 415, 417, 450, 453, 459, 460, 466,478, 510, 518, 523, 530: n = A,T,C or G

SEQ ID NO: 10415 - DNA, 444 bp, Homo sapiens; identical to SEQ ID NO: 4109

SEQ ID NO: 10416 - DNA, 462 bp, Homo sapiens; identical to SEQ ID NO: 4110
  misc_feature 407: n = A,T,C or G

SEQ ID NO: 10417 - DNA, 321 bp, Homo sapiens; identical to SEQ ID NO: 4111

SEQ ID NO: 10418 - DNA, 523 bp, Homo sapiens; identical to SEQ ID NO: 4112
  misc_feature 504: n = A,T,C or G

SEQ ID NO: 10419 - DNA, 328 bp, Homo sapiens; identical to SEQ ID NO: 4113

SEQ ID NO: 10420 - DNA, 366 bp, Homo sapiens; identical to SEQ ID NO: 4114
  misc_feature 52, 307: n = A,T,C or G

SEQ ID NO: 10421 - DNA, 422 bp, Homo sapiens; identical to SEQ ID NO: 4115
  misc_feature 287: n = A,T,C or G

SEQ ID NO: 10422 - DNA, 212 bp, Homo sapiens; identical to SEQ ID NO: 4116

SEQ ID NO: 10423 - DNA, 389 bp, Homo sapiens; identical to SEQ ID NO: 4117
  misc_feature 354: n = A,T,C or G

SEQ ID NO: 10424 - DNA, 304 bp, Homo sapiens; identical to SEQ ID NO: 4118

SEQ ID NO: 10425 - DNA, 311 bp, Homo sapiens; identical to SEQ ID NO: 4119
  misc_feature 244: n = A,T,C or G

SEQ ID NO: 10426 - DNA, 414 bp, Homo sapiens; identical to SEQ ID NO: 4120

SEQ ID NO: 10427 - DNA, 425 bp, Homo sapiens; identical to SEQ ID NO: 4121
  misc_feature 229, 284: n = A,T,C or G

SEQ ID NO: 10428 - DNA, 359 bp, Homo sapiens; identical to SEQ ID NO: 4122
  misc_feature 17, 24, 28, 60, 61: n = A,T,C or G

SEQ ID NO: 10429 - DNA, 298 bp, Homo sapiens; identical to SEQ ID NO: 4123

SEQ ID NO: 10430 - DNA, 331 bp, Homo sapiens; identical to SEQ ID NO: 4124

SEQ ID NO: 10431 - DNA, 382 bp, Homo sapiens; identical to SEQ ID NO: 4125

SEQ ID NO: 10432 - DNA, 389 bp, Homo sapiens; identical to SEQ ID NO: 4126

SEQ ID NO: 10433 - DNA, 736 bp, Homo sapiens; identical to SEQ ID NO: 4127
  misc_feature 600, 656, 676, 684, 699, 705, 735: n = A,T,C or G

SEQ ID NO: 10434 - DNA, 375 bp, Homo sapiens; identical to SEQ ID NO: 4128

SEQ ID NO: 10435 - DNA, 458 bp, Homo sapiens; identical to SEQ ID NO: 4129
  misc_feature 58, 74, 80, 396, 409, 413, 421, 436, 438, 455: n = A,T,C or G

SEQ ID NO: 10436 - DNA, 433 bp, Homo sapiens; identical to SEQ ID NO: 4130
  misc_feature 1, 2, 5, 13, 17, 22, 23, 26, 65, 67, 68, 76, 89, 93, 99,103, 105, 146, 210, 211, 273, 279, 313: n = A,T,C or G

SEQ ID NO: 10437 - DNA, 663 bp, Homo sapiens; identical to SEQ ID NO: 4131
  misc_feature 372, 390, 400, 547, 550, 556, 569, 574: n = A,T,C or G

SEQ ID NO: 10438 - DNA, 316 bp, Homo sapiens; identical to SEQ ID NO: 4132

SEQ ID NO: 10439 - DNA, 351 bp, Homo sapiens; identical to SEQ ID NO: 4133
  misc_feature 89, 189, 232: n = A,T,C or G

SEQ ID NO: 10440 - DNA, 156 bp, Homo sapiens; identical to SEQ ID NO: 4134
  misc_feature 106, 145: n = A,T,C or G

SEQ ID NO: 10441 - DNA, 428 bp, Homo sapiens; identical to SEQ ID NO: 4135
  misc_feature 54, 76, 77, 118, 170, 175, 185, 213, 226, 241, 242, 245,248, 261, 265, 274, 276, 282, 304, 316, 338, 347, 355, 364,366, 371, 372, 380, 397: n = A,T,C or G

SEQ ID NO: 10442 - DNA, 515 bp, Homo sapiens; identical to SEQ ID NO: 4136
  misc_feature 366, 371, 477: n = A,T,C or G

SEQ ID NO: 10443 - DNA, 423 bp, Homo sapiens; identical to SEQ ID NO: 4137
  misc_feature 1, 4, 7, 178, 215, 221, 231: n = A,T,C or G

SEQ ID NO: 10444 - DNA, 185 bp, Homo sapiens; identical to SEQ ID NO: 4138
  misc_feature 102, 110, 137, 161, 168, 176: n = A,T,C or G

SEQ ID NO: 10445 - DNA, 426 bp, Homo sapiens; identical to SEQ ID NO: 4139
  misc_feature 297: n = A,T,C or G

SEQ ID NO: 10446 - DNA, 529 bp, Homo sapiens; identical to SEQ ID NO: 4140
  misc_feature 78, 299, 467, 495: n = A,T,C or G

SEQ ID NO: 10447 - DNA, 246 bp, Homo sapiens; identical to SEQ ID NO: 4141

SEQ ID NO: 10448 - DNA, 439 bp, Homo sapiens; identical to SEQ ID NO: 4142

SEQ ID NO: 10449 - DNA, 270 bp, Homo sapiens; identical to SEQ ID NO: 4143

SEQ ID NO: 10450 - DNA, 330 bp, Homo sapiens; identical to SEQ ID NO: 4144
  misc_feature 160, 161, 162, 163, 164, 165, 166, 167, 168, 169, 170, 171,172, 173, 174, 175, 176, 177, 178, 179, 180, 181, 182, 183,184, 185, 186, 187, 188, 189, 190, 191, 192, 193, 202, 232,244, 256, 268, 300: n = A,T,C or G

SEQ ID NO: 10451 - DNA, 390 bp, Homo sapiens; identical to SEQ ID NO: 4145
  misc_feature 86, 190: n = A,T,C or G

SEQ ID NO: 10452 - DNA, 496 bp, Homo sapiens; identical to SEQ ID NO: 4146
  misc_feature 286, 337, 395, 423, 434, 437, 438, 467: n = A,T,C or G

SEQ ID NO: 10453 - DNA, 590 bp, Homo sapiens; identical to SEQ ID NO: 4147
  misc_feature 202, 213, 229, 256, 259, 278, 280, 286, 297, 335, 338, 344,348, 357, 361, 366, 388, 414, 415, 428, 464, 467, 477, 490,506, 517, 527, 540, 548, 550, 552, 571, 577, 588: n = A,T,C or G

SEQ ID NO: 10454 - DNA, 650 bp, Homo sapiens; identical to SEQ ID NO: 4148
  misc_feature 444, 450, 498, 503, 506, 536, 569, 601: n = A,T,C or G

SEQ ID NO: 10455 - DNA, 203 bp, Homo sapiens; identical to SEQ ID NO: 4149

SEQ ID NO: 10456 - DNA, 338 bp, Homo sapiens; identical to SEQ ID NO: 4150
  misc_feature 150: n = A,T,C or G

SEQ ID NO: 10457 - DNA, 332 bp, Homo sapiens; identical to SEQ ID NO: 4151
  misc_feature 147, 159, 306: n = A,T,C or G

SEQ ID NO: 10458 - DNA, 266 bp, Homo sapiens; identical to SEQ ID NO: 4152
  misc_feature 186, 212: n = A,T,C or G

SEQ ID NO: 10459 - DNA, 456 bp, Homo sapiens; identical to SEQ ID NO: 4153
  misc_feature 143, 225, 262, 293, 298, 396, 406, 420, 421, 456: n = A,T,C or G

SEQ ID NO: 10460 - DNA, 480 bp, Homo sapiens; identical to SEQ ID NO: 4154
  misc_feature 70, 90, 97, 116, 117, 121, 213, 227, 241, 250, 255, 348,383, 392, 410, 429, 463: n = A,T,C or G

SEQ ID NO: 10461 - DNA, 557 bp, Homo sapiens; identical to SEQ ID NO: 4155
  misc_feature 142, 160, 161, 167, 180, 196, 199, 214, 217, 227, 241, 251,252, 255, 257, 286, 293, 315, 317, 324, 328, 349, 350, 378,392, 397, 406, 408, 412, 415, 417, 421, 422, 423, 445, 457,469, 471, 475, 495, 497, 498, 502, 535: n = A,T,C or G

SEQ ID NO: 10462 - DNA, 343 bp, Homo sapiens; identical to SEQ ID NO: 4156

SEQ ID NO: 10463 - DNA, 390 bp, Homo sapiens; identical to SEQ ID NO: 4157
  misc_feature 332: n = A,T,C or G

SEQ ID NO: 10464 - DNA, 578 bp, Homo sapiens; identical to SEQ ID NO: 4158
  misc_feature 350, 560: n = A,T,C or G

SEQ ID NO: 10465 - DNA, 364 bp, Homo sapiens; identical to SEQ ID NO: 4159
  misc_feature 79, 196, 244, 277, 286, 288, 298, 316: n = A,T,C or G

SEQ ID NO: 10466 - DNA, 544 bp, Homo sapiens; identical to SEQ ID NO: 4160
  misc_feature 125, 139, 203, 208, 215, 224, 289, 299, 320, 351, 362, 364,383, 413, 486, 501, 504, 508, 513, 524, 531, 540: n = A,T,C or G

SEQ ID NO: 10467 - DNA, 398 bp, Homo sapiens; identical to SEQ ID NO: 4161
  misc_feature 85: n = A,T,C or G

SEQ ID NO: 10468 - DNA, 325 bp, Homo sapiens; identical to SEQ ID NO: 4162

SEQ ID NO: 10469 - DNA, 327 bp, Homo sapiens; identical to SEQ ID NO: 4163
  misc_feature 65, 257, 279: n = A,T,C or G

SEQ ID NO: 10470 - DNA, 376 bp, Homo sapiens; identical to SEQ ID NO: 4164

SEQ ID NO: 10471 - DNA, 483 bp, Homo sapiens; identical to SEQ ID NO: 4165

SEQ ID NO: 10472 - DNA, 468 bp, Homo sapiens; identical to SEQ ID NO: 4166
  misc_feature 427: n = A,T,C or G

SEQ ID NO: 10473 - DNA, 299 bp, Homo sapiens; identical to SEQ ID NO: 4167

SEQ ID NO: 10474 - DNA, 330 bp, Homo sapiens; identical to SEQ ID NO: 4168
  misc_feature 95: n = A,T,C or G

SEQ ID NO: 10475 - DNA, 345 bp, Homo sapiens; identical to SEQ ID NO: 4169
  misc_feature 138, 152, 293: n = A,T,C or G

SEQ ID NO: 10476 - DNA, 420 bp, Homo sapiens; identical to SEQ ID NO: 4170
  misc_feature 346: n = A,T,C or G

SEQ ID NO: 10477 - DNA, 652 bp, Homo sapiens; identical to SEQ ID NO: 4171
  misc_feature 501, 512, 628: n = A,T,C or G

SEQ ID NO: 10478 - DNA, 870 bp, Homo sapiens; identical to SEQ ID NO: 4172
  misc_feature 5, 407, 552, 568, 622, 637, 648, 679, 701, 716, 736, 751,796, 799, 801, 809, 810, 813, 835, 836, 839, 842, 851, 855,857, 869: n = A,T,C or G

SEQ ID NO: 10479 - DNA, 384 bp, Homo sapiens; identical to SEQ ID NO: 4173

SEQ ID NO: 10480 - DNA, 365 bp, Homo sapiens; identical to SEQ ID NO: 4174
  misc_feature 340: n = A,T,C or G

SEQ ID NO: 10481 - DNA, 388 bp, Homo sapiens; identical to SEQ ID NO: 4175
  misc_feature 170, 185, 200, 222, 229, 231, 244, 253, 311: n = A,T,C or G

SEQ ID NO: 10482 - DNA, 364 bp, Homo sapiens; identical to SEQ ID NO: 4176
  misc_feature 32: n = A,T,C or G

SEQ ID NO: 10483 - DNA, 322 bp, Homo sapiens; identical to SEQ ID NO: 4177

SEQ ID NO: 10484 - DNA, 621 bp, Homo sapiens; identical to SEQ ID NO: 4178
  misc_feature 482, 618: n = A,T,C or G

SEQ ID NO: 10485 - DNA, 322 bp, Homo sapiens; identical to SEQ ID NO: 4179

SEQ ID NO: 10486 - DNA, 622 bp, Homo sapiens; identical to SEQ ID NO: 4180
  misc_feature 572, 587, 589: n = A,T,C or G

SEQ ID NO: 10487 - DNA, 289 bp, Homo sapiens; identical to SEQ ID NO: 4181
  misc_feature 48, 51, 52, 135, 250, 259: n = A,T,C or G

SEQ ID NO: 10488 - DNA, 435 bp, Homo sapiens; identical to SEQ ID NO: 4182

SEQ ID NO: 10489 - DNA, 570 bp, Homo sapiens; identical to SEQ ID NO: 4183
  misc_feature 288, 390, 431, 443, 515, 548: n = A,T,C or G

SEQ ID NO: 10490 - DNA, 326 bp, Homo sapiens; identical to SEQ ID NO: 4184

SEQ ID NO: 10491 - DNA, 318 bp, Homo sapiens; identical to SEQ ID NO: 4185

SEQ ID NO: 10492 - DNA, 640 bp, Homo sapiens; identical to SEQ ID NO: 4186
  misc_feature 14, 28, 55, 60, 61, 72, 89, 109, 116, 124, 131, 151, 155,190, 192, 200, 205, 245, 247, 248, 264, 317, 352, 358, 368,389, 412, 413, 416, 423, 430, 436, 439, 446, 480, 491, 508,515, 516, 531, 534, 535, 540, 558, 565, 587, 596, 605: n = A,T,C or G

SEQ ID NO: 10493 - DNA, 438 bp, Homo sapiens; identical to SEQ ID NO: 4187
  misc_feature 420: n = A,T,C or G

SEQ ID NO: 10494 - DNA, 537 bp, Homo sapiens; identical to SEQ ID NO: 4188
  misc_feature 459, 505: n = A,T,C or G

SEQ ID NO: 10495 - DNA, 531 bp, Homo sapiens; identical to SEQ ID NO: 4189
  misc_feature 512: n = A,T,C or G

SEQ ID NO: 10496 - DNA, 225 bp, Homo sapiens; identical to SEQ ID NO: 4190

SEQ ID NO: 10497 - DNA, 512 bp, Homo sapiens; identical to SEQ ID NO: 4191
  misc_feature 43, 131, 207, 210, 224, 243, 246, 255, 268, 280, 283, 298,309, 324, 331, 339, 342, 357, 359, 375, 383, 387, 388, 393,401, 404, 405, 427, 466, 486, 500: n = A,T,C or G

SEQ ID NO: 10498 - DNA, 500 bp, Homo sapiens; identical to SEQ ID NO: 4192
  misc_feature 494: n = A,T,C or G

SEQ ID NO: 10499 - DNA, 579 bp, Homo sapiens; identical to SEQ ID NO: 4193
  misc_feature 515: n = A,T,C or G

SEQ ID NO: 10500 - DNA, 316 bp, Homo sapiens; identical to SEQ ID NO: 4194

SEQ ID NO: 10501 - DNA, 276 bp, Homo sapiens; identical to SEQ ID NO: 4195

SEQ ID NO: 10502 - DNA, 516 bp, Homo sapiens; identical to SEQ ID NO: 4196
  misc_feature 23, 291, 356, 368, 388, 445, 453, 460, 469, 473: n = A,T,C or G

SEQ ID NO: 10503 - DNA, 330 bp, Homo sapiens; identical to SEQ ID NO: 4197

SEQ ID NO: 10504 - DNA, 379 bp, Homo sapiens; identical to SEQ ID NO: 4198

SEQ ID NO: 10505 - DNA, 303 bp, Homo sapiens; identical to SEQ ID NO: 4199
  misc_feature 291: n = A,T,C or G

SEQ ID NO: 10506 - DNA, 485 bp, Homo sapiens; identical to SEQ ID NO: 4200

SEQ ID NO: 10507 - DNA, 272 bp, Homo sapiens; identical to SEQ ID NO: 4201
  misc_feature 40, 73, 94, 103, 104, 106, 170, 173, 231, 247, 264: n = A,T,C or G

SEQ ID NO: 10508 - DNA, 522 bp, Homo sapiens; identical to SEQ ID NO: 4202
  misc_feature 120, 132, 432: n = A,T,C or G

SEQ ID NO: 10509 - DNA, 525 bp, Homo sapiens; identical to SEQ ID NO: 4203
  misc_feature 240, 283, 460, 475: n = A,T,C or G

SEQ ID NO: 10510 - DNA, 312 bp, Homo sapiens; identical to SEQ ID NO: 4204

SEQ ID NO: 10511 - DNA, 325 bp, Homo sapiens; identical to SEQ ID NO: 4205

SEQ ID NO: 10512 - DNA, 747 bp, Homo sapiens; identical to SEQ ID NO: 4206
  misc_feature 357, 374, 477, 544, 545, 549, 563, 572, 643, 657, 658, 667,673, 681, 687, 726, 736: n = A,T,C or G

SEQ ID NO: 10513 - DNA, 527 bp, Homo sapiens; identical to SEQ ID NO: 4207
  misc_feature 26, 38, 441, 501, 510: n = A,T,C or G

SEQ ID NO: 10514 - DNA, 435 bp, Homo sapiens; identical to SEQ ID NO: 4208
  misc_feature 294, 295, 298, 309, 312, 417: n = A,T,C or G

SEQ ID NO: 10515 - DNA, 537 bp, Homo sapiens; identical to SEQ ID NO: 4209

SEQ ID NO: 10516 - DNA, 566 bp, Homo sapiens; identical to SEQ ID NO: 4210
  misc_feature 33, 142, 161, 163, 234, 332, 355, 381, 423, 451, 468, 476,483, 488, 520, 524, 540, 549: n = A,T,C or G

SEQ ID NO: 10517 - DNA, 325 bp, Homo sapiens; identical to SEQ ID NO: 4211

SEQ ID NO: 10518 - DNA, 676 bp, Homo sapiens; identical to SEQ ID NO: 4212
  misc_feature 556, 561, 639, 645, 655, 660, 665: n = A,T,C or G

SEQ ID NO: 10519 - DNA, 327 bp, Homo sapiens; identical to SEQ ID NO: 4213

SEQ ID NO: 10520 - DNA, 328 bp, Homo sapiens; identical to SEQ ID NO: 4214
  misc_feature 315: n = A,T,C or G

SEQ ID NO: 10521 - DNA, 565 bp, Homo sapiens; identical to SEQ ID NO: 4215
  misc_feature 543: n = A,T,C or G

SEQ ID NO: 10522 - DNA, 555 bp, Homo sapiens; identical to SEQ ID NO: 4216
  misc_feature 21, 241, 252, 391, 396, 482, 495, 496, 520, 528, 532: n = A,T,C or G

SEQ ID NO: 10523 - DNA, 560 bp, Homo sapiens; identical to SEQ ID NO: 4217

SEQ ID NO: 10524 - DNA, 395 bp, Homo sapiens; identical to SEQ ID NO: 4218
  misc_feature 379: n = A,T,C or G

SEQ ID NO: 10525 - DNA, 514 bp, Homo sapiens; identical to SEQ ID NO: 4219
  misc_feature 282, 374, 456, 459, 465, 474, 502: n = A,T,C or G

SEQ ID NO: 10526 - DNA, 533 bp, Homo sapiens; identical to SEQ ID NO: 4220
  misc_feature 262, 337, 338, 441, 462, 507, 526: n = A,T,C or G

SEQ ID NO: 10527 - DNA, 563 bp, Homo sapiens; identical to SEQ ID NO: 4221
  misc_feature 381, 465, 498, 504: n = A,T,C or G

SEQ ID NO: 10528 - DNA, 312 bp, Homo sapiens; identical to SEQ ID NO: 4222

SEQ ID NO: 10529 - DNA, 410 bp, Homo sapiens; identical to SEQ ID NO: 4223

SEQ ID NO: 10530 - DNA, 359 bp, Homo sapiens; identical to SEQ ID NO: 4224

SEQ ID NO: 10531 - DNA, 550 bp, Homo sapiens; identical to SEQ ID NO: 4225
  misc_feature 538: n = A,T,C or G

SEQ ID NO: 10532 - DNA, 323 bp, Homo sapiens; identical to SEQ ID NO: 4226
  misc_feature 260: n = A,T,C or G

SEQ ID NO: 10533 - DNA, 538 bp, Homo sapiens; identical to SEQ ID NO: 4227
  misc_feature 126, 140, 144, 157, 189, 203, 218, 238, 240, 242, 258, 260,265, 270, 286, 306, 310, 317, 324, 333, 340, 345, 352, 355,369, 371, 408, 410, 415, 416, 430, 433, 441, 444, 450, 461,468, 475, 477, 484, 489, 494, 503, 513, 515: n = A,T,C or G

SEQ ID NO: 10534 - DNA, 517 bp, Homo sapiens; identical to SEQ ID NO: 4228
  misc_feature 98, 123, 165, 266, 282, 293, 305, 342, 351, 359, 395, 408,411, 416, 436, 450, 463, 468, 473, 500, 503: n = A,T,C or G

SEQ ID NO: 10535 - DNA, 394 bp, Homo sapiens; identical to SEQ ID NO: 4229
  misc_feature 218, 260, 281, 287, 301, 306, 311, 322, 380: n = A,T,C or G

SEQ ID NO: 10536 - DNA, 318 bp, Homo sapiens; identical to SEQ ID NO: 4230
  misc_feature 284: n = A,T,C or G

SEQ ID NO: 10537 - DNA, 378 bp, Homo sapiens; identical to SEQ ID NO: 4231
  misc_feature 1, 15, 43, 70, 73, 79, 130, 140: n = A,T,C or G

SEQ ID NO: 10538 - DNA, 478 bp, Homo sapiens; identical to SEQ ID NO: 4232

SEQ ID NO: 10539 - DNA, 460 bp, Homo sapiens; identical to SEQ ID NO: 4233
  misc_feature 3: n = A,T,C or G

SEQ ID NO: 10540 - DNA, 796 bp, Homo sapiens; identical to SEQ ID NO: 4234
  misc_feature 448, 466, 489, 637, 673, 684, 735, 738, 744, 762, 785: n = A,T,C or G

SEQ ID NO: 10541 - DNA, 544 bp, Homo sapiens; identical to SEQ ID NO: 4235
  misc_feature 416, 519: n = A,T,C or G

SEQ ID NO: 10542 - DNA, 559 bp, Homo sapiens; identical to SEQ ID NO: 4236
  misc_feature 358, 463, 544: n = A,T,C or G

SEQ ID NO: 10543 - DNA, 739 bp, Homo sapiens; identical to SEQ ID NO: 4237
  misc_feature 473, 477, 503, 513, 535, 559, 567, 593, 595, 608, 612, 626,630, 632, 638, 648, 651, 682, 684, 686, 697, 698, 702, 709,710, 712, 713: n = A,T,C or G

SEQ ID NO: 10544 - DNA, 311 bp, Homo sapiens; identical to SEQ ID NO: 4238

SEQ ID NO: 10545 - DNA, 650 bp, Homo sapiens; identical to SEQ ID NO: 4239
  misc_feature 499, 598, 603, 607, 609, 614, 633: n = A,T,C or G

SEQ ID NO: 10546 - DNA, 572 bp, Homo sapiens; identical to SEQ ID NO: 4240
  misc_feature 531: n = A,T,C or G

SEQ ID NO: 10547 - DNA, 564 bp, Homo sapiens; identical to SEQ ID NO: 4242
  misc_feature 186: n = A,T,C or G

SEQ ID NO: 10548 - DNA, 320 bp, Homo sapiens; identical to SEQ ID NO: 4243

SEQ ID NO: 10549 - DNA, 285 bp, Homo sapiens; identical to SEQ ID NO: 4244

SEQ ID NO: 10550 - DNA, 589 bp, Homo sapiens; identical to SEQ ID NO: 4245
  misc_feature 540: n = A,T,C or G

SEQ ID NO: 10551 - DNA, 535 bp, Homo sapiens; identical to SEQ ID NO: 4246
  misc_feature 527: n = A,T,C or G

SEQ ID NO: 10552 - DNA, 663 bp, Homo sapiens; identical to SEQ ID NO: 4247
  misc_feature 462, 515, 531, 586, 600, 602, 605, 607, 631, 635, 637, 639,643: n = A,T,C or G

SEQ ID NO: 10553 - DNA, 619 bp, Homo sapiens; identical to SEQ ID NO: 4248
  misc_feature 513, 523, 536, 564, 566, 568, 577, 586, 598, 604: n = A,T,C or G

SEQ ID NO: 10554 - DNA, 490 bp, Homo sapiens; identical to SEQ ID NO: 4250
  misc_feature 448: n = A,T,C or G

SEQ ID NO: 10555 - DNA, 516 bp, Homo sapiens; identical to SEQ ID NO: 4251
  misc_feature 493: n = A,T,C or G

SEQ ID NO: 10556 - DNA, 305 bp, Homo sapiens; identical to SEQ ID NO: 4252

SEQ ID NO: 10557 - DNA, 475 bp, Homo sapiens; identical to SEQ ID NO: 4253

SEQ ID NO: 10558 - DNA, 566 bp, Homo sapiens; identical to SEQ ID NO: 4254
  misc_feature 487: n = A,T,C or G

SEQ ID NO: 10559 - DNA, 503 bp, Homo sapiens; identical to SEQ ID NO: 4255

SEQ ID NO: 10560 - DNA, 168 bp, Homo sapiens; identical to SEQ ID NO: 4256

SEQ ID NO: 10561 - DNA, 572 bp, Homo sapiens; identical to SEQ ID NO: 4257
  misc_feature 64, 131, 136, 141, 146, 150, 177, 187, 214, 245, 272, 273,282, 320, 354, 358, 376, 402, 417, 420, 430, 498, 504, 522,541, 567: n = A,T,C or G

SEQ ID NO: 10562 - DNA, 296 bp, Homo sapiens; identical to SEQ ID NO: 4258
  misc_feature 133, 141, 146, 155, 204, 214, 219, 222, 234, 282: n = A,T,C or G

SEQ ID NO: 10563 - DNA, 723 bp, Homo sapiens; identical to SEQ ID NO: 4259
  misc_feature 70, 447, 511, 540, 568, 601, 651, 660, 675, 688, 690, 699,711, 720: n = A,T,C or G

SEQ ID NO: 10564 - DNA, 614 bp, Homo sapiens; identical to SEQ ID NO: 4260
  misc_feature 566: n = A,T,C or G

SEQ ID NO: 10565 - DNA, 547 bp, Homo sapiens; identical to SEQ ID NO: 4261
  misc_feature 504, 526: n = A,T,C or G

SEQ ID NO: 10566 - DNA, 505 bp, Homo sapiens; identical to SEQ ID NO: 4262
  misc_feature 470: n = A,T,C or G

SEQ ID NO: 10567 - DNA, 575 bp, Homo sapiens; identical to SEQ ID NO: 4263
  misc_feature 469, 477, 541, 548: n = A,T,C or G

SEQ ID NO: 10568 - DNA, 425 bp, Homo sapiens; identical to SEQ ID NO: 4264
  misc_feature 424: n = A,T,C or G

SEQ ID NO: 10569 - DNA, 486 bp, Homo sapiens; identical to SEQ ID NO: 4265
  misc_feature 477: n = A,T,C or G

SEQ ID NO: 10570 - DNA, 674 bp, Homo sapiens; identical to SEQ ID NO: 4266
  misc_feature 640, 648: n = A,T,C or G

SEQ ID NO: 10571 - DNA, 737 bp, Homo sapiens; identical to SEQ ID NO: 4267
  misc_feature 575, 648, 652, 653, 666, 673, 687, 704, 707, 710, 715: n = A,T,C or G

SEQ ID NO: 10572 - DNA, 535 bp, Homo sapiens; identical to SEQ ID NO: 4268

SEQ ID NO: 10573 - DNA, 748 bp, Homo sapiens; identical to SEQ ID NO: 4269
  misc_feature 566, 630, 646, 659, 686, 687, 730, 745: n = A,T,C or G

SEQ ID NO: 10574 - DNA, 303 bp, Homo sapiens; identical to SEQ ID NO: 4270
  misc_feature 65, 134, 145, 147, 159, 205, 219, 239, 240, 279, 287: n = A,T,C or G

SEQ ID NO: 10575 - DNA, 405 bp, Homo sapiens; identical to SEQ ID NO: 4271
  misc_feature 268: n = A,T,C or G

SEQ ID NO: 10576 - DNA, 457 bp, Homo sapiens; identical to SEQ ID NO: 4272
  misc_feature 336, 366: n = A,T,C or G

SEQ ID NO: 10577 - DNA, 337 bp, Homo sapiens; identical to SEQ ID NO: 4273
  misc_feature 305: n = A,T,C or G

SEQ ID NO: 10578 - DNA, 570 bp, Homo sapiens; identical to SEQ ID NO: 4274
  misc_feature 562: n = A,T,C or G

SEQ ID NO: 10579 - DNA, 227 bp, Homo sapiens; identical to SEQ ID NO: 4275
  misc_feature 122, 123, 133, 138, 147, 156, 162, 170, 178: n = A,T,C or G

SEQ ID NO: 10580 - DNA, 759 bp, Homo sapiens; identical to SEQ ID NO: 4276
  misc_feature 514, 620, 642, 698, 702: n = A,T,C or G

SEQ ID NO: 10581 - DNA, 611 bp, Homo sapiens; identical to SEQ ID NO: 4277
  misc_feature 537: n = A,T,C or G

SEQ ID NO: 10582 - DNA, 642 bp, Homo sapiens; identical to SEQ ID NO: 4278
  misc_feature 485, 523, 571, 580, 618: n = A,T,C or G

SEQ ID NO: 10583 - DNA, 623 bp, Homo sapiens; identical to SEQ ID NO: 4279
  misc_feature 81, 83, 89: n = A,T,C or G

SEQ ID NO: 10584 - DNA, 555 bp, Homo sapiens; identical to SEQ ID NO: 4280
  misc_feature 294, 465, 490, 497, 525: n = A,T,C or G

SEQ ID NO: 10585 - DNA, 387 bp, Homo sapiens; identical to SEQ ID NO: 4281

SEQ ID NO: 10586 - DNA, 535 bp, Homo sapiens; identical to SEQ ID NO: 4282

SEQ ID NO: 10587 - DNA, 296 bp, Homo sapiens; identical to SEQ ID NO: 4283

SEQ ID NO: 10588 - DNA, 614 bp, Homo sapiens; identical to SEQ ID NO: 4284
  misc_feature 518, 520, 544, 566: n = A,T,C or G

SEQ ID NO: 10589 - DNA, 457 bp, Homo sapiens; identical to SEQ ID NO: 4285
  misc_feature 26, 27, 28, 30, 35, 43, 50, 51, 54, 59, 60, 66, 76, 84, 85,94, 101, 126, 130, 132, 155, 156, 158, 171, 184, 185, 208,211, 212, 216, 218, 219, 223, 231, 232, 235, 395: n = A,T,C or G

SEQ ID NO: 10590 - DNA, 750 bp, Homo sapiens; identical to SEQ ID NO: 4286
  misc_feature 606, 650, 653, 685, 699: n = A,T,C or G

SEQ ID NO: 10591 - DNA, 552 bp, Homo sapiens; identical to SEQ ID NO: 4287
  misc_feature 487: n = A,T,C or G

SEQ ID NO: 10592 - DNA, 460 bp, Homo sapiens; identical to SEQ ID NO: 4288
  misc_feature 309, 344, 379: n = A,T,C or G

SEQ ID NO: 10593 - DNA, 643 bp, Homo sapiens; identical to SEQ ID NO: 4289
  misc_feature 93, 400, 450, 465, 476, 496, 514, 535, 539, 542, 552, 576,609, 633: n = A,T,C or G

SEQ ID NO: 10594 - DNA, 586 bp, Homo sapiens; identical to SEQ ID NO: 4290
  misc_feature 186, 338, 385, 434, 515, 549, 553: n = A,T,C or G

SEQ ID NO: 10595 - DNA, 434 bp, Homo sapiens; identical to SEQ ID NO: 4291
  misc_feature 78, 115, 147, 299, 353, 362: n = A,T,C or G

SEQ ID NO: 10596 - DNA, 367 bp, Homo sapiens; identical to SEQ ID NO: 4292
  misc_feature 230, 294: n = A,T,C or G

SEQ ID NO: 10597 - DNA, 764 bp, Homo sapiens; identical to SEQ ID NO: 4293
  misc_feature 38, 115, 375, 422, 433, 453, 478, 480, 488, 497, 501, 507,533, 543, 548, 560, 621, 624, 640, 641, 656, 667, 668, 676,682, 688, 694, 706, 707, 709, 719, 737, 744, 747, 753: n = A,T,C or G

SEQ ID NO: 10598 - DNA, 378 bp, Homo sapiens; identical to SEQ ID NO: 4294
  misc_feature 150, 155: n = A,T,C or G

SEQ ID NO: 10599 - DNA, 521 bp, Homo sapiens; identical to SEQ ID NO: 4295
  misc_feature 36, 421, 456, 460, 471, 498, 513: n = A,T,C or G

SEQ ID NO: 10600 - DNA, 487 bp, Homo sapiens; identical to SEQ ID NO: 4296
  misc_feature 297, 322, 410: n = A,T,C or G

SEQ ID NO: 10601 - DNA, 543 bp, Homo sapiens; identical to SEQ ID NO: 4297
  misc_feature 479: n = A,T,C or G

SEQ ID NO: 10602 - DNA, 455 bp, Homo sapiens; identical to SEQ ID NO: 4298

SEQ ID NO: 10603 - DNA, 706 bp, Homo sapiens; identical to SEQ ID NO: 4299
  misc_feature 319, 339, 381, 389, 393, 394, 439, 454, 460, 470, 477, 483,492, 496, 524, 538, 549, 551, 557, 559, 562, 564, 566, 567,568, 570, 585, 590, 594, 596, 602, 607, 611, 619, 621, 625,634, 644, 657, 667, 688: n = A,T,C or G

SEQ ID NO: 10604 - DNA, 214 bp, Homo sapiens; identical to SEQ ID NO: 4300
  misc_feature 37, 69, 198: n = A,T,C or G

SEQ ID NO: 10605 - DNA, 675 bp, Homo sapiens; identical to SEQ ID NO: 4301
  misc_feature 211, 275, 284, 297, 350, 352, 375, 390, 429, 450, 451, 479,481, 509, 515, 528, 564, 580, 583, 622, 627, 630, 642, 653,661: n = A,T,C or G

SEQ ID NO: 10606 - DNA, 368 bp, Homo sapiens; identical to SEQ ID NO: 4302
  misc_feature 158, 186, 207, 358: n = A,T,C or G

SEQ ID NO: 10607 - DNA, 504 bp, Homo sapiens; identical to SEQ ID NO: 4303
  misc_feature 420, 459, 463, 480, 486, 495: n = A,T,C or G

SEQ ID NO: 10608 - DNA, 309 bp, Homo sapiens; identical to SEQ ID NO: 4304
  misc_feature 276, 290: n = A,T,C or G

SEQ ID NO: 10609 - DNA, 537 bp, Homo sapiens; identical to SEQ ID NO: 4305

SEQ ID NO: 10610 - DNA, 446 bp, Homo sapiens; identical to SEQ ID NO: 4306
  misc_feature 324: n = A,T,C or G

SEQ ID NO: 10611 - DNA, 321 bp, Homo sapiens; identical to SEQ ID NO: 4307

SEQ ID NO: 10612 - DNA, 539 bp, Homo sapiens; identical to SEQ ID NO: 4308
  misc_feature 477: n = A,T,C or G

SEQ ID NO: 10613 - DNA, 575 bp, Homo sapiens; identical to SEQ ID NO: 4309

SEQ ID NO: 10614 - DNA, 273 bp, Homo sapiens; identical to SEQ ID NO: 4310
  misc_feature 125, 160, 170: n = A,T,C or G

SEQ ID NO: 10615 - DNA, 690 bp, Homo sapiens; identical to SEQ ID NO: 4311
  misc_feature 363, 504, 534, 550, 584, 585, 620, 653, 654, 660, 668, 677: n = A,T,C or G

SEQ ID NO: 10616 - DNA, 516 bp, Homo sapiens; identical to SEQ ID NO: 4312
  misc_feature 437: n = A,T,C or G

SEQ ID NO: 10617 - DNA, 646 bp, Homo sapiens; identical to SEQ ID NO: 4313
  misc_feature 42, 43, 80, 98, 99, 510, 515, 599, 624: n = A,T,C or G

SEQ ID NO: 10618 - DNA, 463 bp, Homo sapiens; identical to SEQ ID NO: 4314
  misc_feature 44, 60, 63, 64, 67, 80, 94, 115, 144, 150, 161, 171, 175,183, 245, 271, 301, 309, 314, 369, 407, 437: n = A,T,C or G

SEQ ID NO: 10619 - DNA, 463 bp, Homo sapiens; identical to SEQ ID NO: 4315

SEQ ID NO: 10620 - DNA, 639 bp, Homo sapiens; identical to SEQ ID NO: 4316
  misc_feature 523: n = A,T,C or G

SEQ ID NO: 10621 - DNA, 295 bp, Homo sapiens; identical to SEQ ID NO: 4317

SEQ ID NO: 10622 - DNA, 395 bp, Homo sapiens; identical to SEQ ID NO: 4318
  misc_feature 53, 123, 175, 183, 194, 239, 290: n = A,T,C or G

SEQ ID NO: 10623 - DNA, 505 bp, Homo sapiens; identical to SEQ ID NO: 4319
  misc_feature 7, 17, 18, 28, 33, 38, 52, 84, 92, 98, 123, 131, 134, 142,149, 161, 173, 186, 192, 199, 207, 219, 232, 244, 259, 314,341, 370, 373, 379, 399, 493, 505: n = A,T,C or G

SEQ ID NO: 10624 - DNA, 298 bp, Homo sapiens; identical to SEQ ID NO: 4320

SEQ ID NO: 10625 - DNA, 606 bp, Homo sapiens; identical to SEQ ID NO: 4321

SEQ ID NO: 10626 - DNA, 396 bp, Homo sapiens; identical to SEQ ID NO: 4322
  misc_feature 55, 134, 137, 195, 275, 300, 339, 359: n = A,T,C or G

SEQ ID NO: 10627 - DNA, 511 bp, Homo sapiens; identical to SEQ ID NO: 4323
  misc_feature 471, 477, 491: n = A,T,C or G

SEQ ID NO: 10628 - DNA, 569 bp, Homo sapiens; identical to SEQ ID NO: 4324
  misc_feature 474, 531, 550, 552, 556, 559: n = A,T,C or G

SEQ ID NO: 10629 - DNA, 482 bp, Homo sapiens; identical to SEQ ID NO: 4325
  misc_feature 115, 123, 130, 132, 139, 142, 145, 150, 151, 152, 158, 162,169, 173, 179, 188, 198, 201, 208, 212, 217, 238, 248, 254,265, 273, 276, 283, 284, 285, 286, 288, 290, 309, 311, 319,322, 327, 331, 343, 370, 379, 385, 387, 395, 405, 408: n = A,T,C or G
  misc_feature 436, 456, 460, 465: n = A,T,C or G

SEQ ID NO: 10630 - DNA, 323 bp, Homo sapiens; identical to SEQ ID NO: 4326
  misc_feature 128, 129, 132, 137, 141, 143, 145, 174, 187, 191, 219, 253,291: n = A,T,C or G

SEQ ID NO: 10631 - DNA, 331 bp, Homo sapiens; identical to SEQ ID NO: 4327
  misc_feature 52, 61, 64, 101, 108, 143, 203, 236, 242, 266, 306, 313,318, 323: n = A,T,C or G

SEQ ID NO: 10632 - DNA, 415 bp, Homo sapiens; identical to SEQ ID NO: 4328
  misc_feature 69, 77, 78: n = A,T,C or G

SEQ ID NO: 10633 - DNA, 576 bp, Homo sapiens; identical to SEQ ID NO: 4329
  misc_feature 369, 390: n = A,T,C or G

SEQ ID NO: 10634 - DNA, 493 bp, Homo sapiens; identical to SEQ ID NO: 4330
  misc_feature 389, 427, 481: n = A,T,C or G

SEQ ID NO: 10635 - DNA, 353 bp, Homo sapiens; identical to SEQ ID NO: 4331
  misc_feature 345: n = A,T,C or G

SEQ ID NO: 10636 - DNA, 658 bp, Homo sapiens; identical to SEQ ID NO: 4332
  misc_feature 476, 537, 549, 599, 632, 647: n = A,T,C or G

SEQ ID NO: 10637 - DNA, 591 bp, Homo sapiens; identical to SEQ ID NO: 4333
  misc_feature 130, 135, 158, 257, 272, 282, 286, 301, 331, 337, 347, 389,396, 401, 419, 422, 426, 447, 449, 458, 461, 463, 473, 498,516, 520, 541, 585: n = A,T,C or G

SEQ ID NO: 10638 - DNA, 744 bp, Homo sapiens; identical to SEQ ID NO: 4334
  misc_feature 294, 413, 425, 489, 517, 519, 529, 594, 613, 621, 622, 637,638, 662, 663, 675, 677, 680, 689, 714: n = A,T,C or G

SEQ ID NO: 10639 - DNA, 312 bp, Homo sapiens; identical to SEQ ID NO: 4335

SEQ ID NO: 10640 - DNA, 537 bp, Homo sapiens; identical to SEQ ID NO: 4336

SEQ ID NO: 10641 - DNA, 305 bp, Homo sapiens; identical to SEQ ID NO: 4337
  misc_feature 33, 47, 52, 165, 224, 240, 272, 278: n = A,T,C or G

SEQ ID NO: 10642 - DNA, 734 bp, Homo sapiens; identical to SEQ ID NO: 4338
  misc_feature 545, 588, 599, 629, 650, 653, 662, 679, 683, 692, 702, 707,714, 720, 724, 730: n = A,T,C or G

SEQ ID NO: 10643 - DNA, 609 bp, Homo sapiens; identical to SEQ ID NO: 4339
  misc_feature 428, 430, 460, 472, 484, 510, 551, 559, 569, 573, 588: n = A,T,C or G

SEQ ID NO: 10644 - DNA, 738 bp, Homo sapiens; identical to SEQ ID NO: 4340
  misc_feature 133, 647, 698, 721: n = A,T,C or G

SEQ ID NO: 10645 - DNA, 329 bp, Homo sapiens; identical to SEQ ID NO: 4341

SEQ ID NO: 10646 - DNA, 816 bp, Homo sapiens; identical to SEQ ID NO: 4342
  misc_feature 305, 419, 445, 463, 542, 544, 587, 597, 654, 676, 682, 706,717, 747, 749, 751, 757, 763, 787, 797: n = A,T,C or G

SEQ ID NO: 10647 - DNA, 491 bp, Homo sapiens; identical to SEQ ID NO: 4343
  misc_feature 405: n = A,T,C or G

SEQ ID NO: 10648 - DNA, 446 bp, Homo sapiens; identical to SEQ ID NO: 4344
  misc_feature 439: n = A,T,C or G

SEQ ID NO: 10649 - DNA, 519 bp, Homo sapiens; identical to SEQ ID NO: 4345

SEQ ID NO: 10650 - DNA, 464 bp, Homo sapiens; identical to SEQ ID NO: 4346
  misc_feature 414: n = A,T,C or G

SEQ ID NO: 10651 - DNA, 392 bp, Homo sapiens; identical to SEQ ID NO: 4347
  misc_feature 130, 146, 161, 168, 169, 176, 189, 207, 223, 363: n = A,T,C or G

SEQ ID NO: 10652 - DNA, 596 bp, Homo sapiens; identical to SEQ ID NO: 4348
  misc_feature 502, 589: n = A,T,C or G

SEQ ID NO: 10653 - DNA, 535 bp, Homo sapiens; identical to SEQ ID NO: 4349
  misc_feature 56, 57, 80, 102, 103, 104, 343, 436, 443, 453, 454, 509,515, 520, 523, 532: n = A,T,C or G

SEQ ID NO: 10654 - DNA, 324 bp, Homo sapiens; identical to SEQ ID NO: 4350
  misc_feature 235: n = A,T,C or G

SEQ ID NO: 10655 - DNA, 550 bp, Homo sapiens; identical to SEQ ID NO: 4351
  misc_feature 423, 519: n = A,T,C or G

SEQ ID NO: 10656 - DNA, 535 bp, Homo sapiens; identical to SEQ ID NO: 4352
  misc_feature 126, 136, 138, 139, 144, 155, 157, 186, 191, 200, 206, 218,224, 233, 243, 245, 269, 273, 277, 284, 291, 293, 294, 296,304, 305, 307, 309, 314, 316, 324, 325, 331, 333, 357, 367,413, 429, 432, 442, 445, 453, 456, 471, 481, 483, 488: n = A,T,C or G
  misc_feature 493, 498, 505, 507, 509, 511, 518, 523, 526, 528, 535: n = A,T,C or G

SEQ ID NO: 10657 - DNA, 477 bp, Homo sapiens; identical to SEQ ID NO: 4353
  misc_feature 364: n = A,T,C or G

SEQ ID NO: 10658 - DNA, 501 bp, Homo sapiens; identical to SEQ ID NO: 4354

SEQ ID NO: 10659 - DNA, 629 bp, Homo sapiens; identical to SEQ ID NO: 4355
  misc_feature 9, 17, 48, 49, 56, 60, 305, 452, 487, 495, 536, 555, 578,625: n = A,T,C or G

SEQ ID NO: 10660 - DNA, 773 bp, Homo sapiens; identical to SEQ ID NO: 4356
  misc_feature 396, 440, 456, 518, 584, 607, 620, 633, 635, 642, 644, 647,666, 676, 701, 737, 746, 754, 762, 763, 769: n = A,T,C or G

SEQ ID NO: 10661 - DNA, 479 bp, Homo sapiens; identical to SEQ ID NO: 4357

SEQ ID NO: 10662 - DNA, 331 bp, Homo sapiens; identical to SEQ ID NO: 4358

SEQ ID NO: 10663 - DNA, 310 bp, Homo sapiens; identical to SEQ ID NO: 4359
  misc_feature 54, 70, 190, 207: n = A,T,C or G

SEQ ID NO: 10664 - DNA, 680 bp, Homo sapiens; identical to SEQ ID NO: 4360
  misc_feature 484, 499, 524, 630, 636, 658, 670, 680: n = A,T,C or G

SEQ ID NO: 10665 - DNA, 385 bp, Homo sapiens; identical to SEQ ID NO: 4361
  misc_feature 285: n = A,T,C or G

SEQ ID NO: 10666 - DNA, 598 bp, Homo sapiens; identical to SEQ ID NO: 4362
  misc_feature 539, 545: n = A,T,C or G

SEQ ID NO: 10667 - DNA, 734 bp, Homo sapiens; identical to SEQ ID NO: 4363
  misc_feature 331, 473, 567, 593, 616, 645, 652, 653, 660, 665, 693, 696,707: n = A,T,C or G

SEQ ID NO: 10668 - DNA, 452 bp, Homo sapiens; identical to SEQ ID NO: 4364

SEQ ID NO: 10669 - DNA, 330 bp, Homo sapiens; identical to SEQ ID NO: 4365
  misc_feature 270: n = A,T,C or G

SEQ ID NO: 10670 - DNA, 339 bp, Homo sapiens; identical to SEQ ID NO: 4366
  misc_feature 80, 223, 319, 337: n = A,T,C or G

SEQ ID NO: 10671 - DNA, 328 bp, Homo sapiens; identical to SEQ ID NO: 4367

SEQ ID NO: 10672 - DNA, 704 bp, Homo sapiens; identical to SEQ ID NO: 4368
  misc_feature 531, 552, 628, 637, 644, 654, 683: n = A,T,C or G

SEQ ID NO: 10673 - DNA, 564 bp, Homo sapiens; identical to SEQ ID NO: 4369
  misc_feature 140, 180, 210, 213, 218, 223, 228, 232, 250, 255, 265, 274,278, 284, 313, 341, 389, 407, 431, 444, 448, 462, 474, 479,537: n = A,T,C or G

SEQ ID NO: 10674 - DNA, 546 bp, Homo sapiens; identical to SEQ ID NO: 4370
  misc_feature 78, 292, 501: n = A,T,C or G

SEQ ID NO: 10675 - DNA, 323 bp, Homo sapiens; identical to SEQ ID NO: 4371
  misc_feature 310, 321, 322: n = A,T,C or G

SEQ ID NO: 10676 - DNA, 367 bp, Homo sapiens; identical to SEQ ID NO: 4372
  misc_feature 57, 248, 305, 345: n = A,T,C or G

SEQ ID NO: 10677 - DNA, 497 bp, Homo sapiens; identical to SEQ ID NO: 4373
  misc_feature 461, 482: n = A,T,C or G

SEQ ID NO: 10678 - DNA, 466 bp, Homo sapiens; identical to SEQ ID NO: 4374

SEQ ID NO: 10679 - DNA, 165 bp, Homo sapiens; identical to SEQ ID NO: 4375

SEQ ID NO: 10680 - DNA, 466 bp, Homo sapiens; identical to SEQ ID NO: 4376

SEQ ID NO: 10681 - DNA, 390 bp, Homo sapiens; identical to SEQ ID NO: 4377
  misc_feature 135, 136, 137, 138, 139, 140, 142, 144, 145, 146: n = A,T,C or G

SEQ ID NO: 10682 - DNA, 638 bp, Homo sapiens; identical to SEQ ID NO: 4378
  misc_feature 57, 65, 72, 81, 95, 112, 116, 168, 173, 176, 182, 228, 233,235, 244, 259, 270, 275, 277, 284, 295, 303, 304, 305, 314,317, 334, 337, 338, 342, 358, 389, 393, 397, 405, 407, 412,414, 431, 479, 494, 498, 504, 514, 523, 531, 537, 542: n = A,T,C or G
  misc_feature 552, 565, 575, 585, 590, 609, 610: n = A,T,C or G

SEQ ID NO: 10683 - DNA, 372 bp, Homo sapiens; identical to SEQ ID NO: 4379

SEQ ID NO: 10684 - DNA, 325 bp, Homo sapiens; identical to SEQ ID NO: 4380
  misc_feature 135, 138, 219, 246, 248: n = A,T,C or G

SEQ ID NO: 10685 - DNA, 649 bp, Homo sapiens; identical to SEQ ID NO: 4381
  misc_feature 333, 340, 359, 375, 416, 422, 457, 495, 497, 506, 509, 522,523, 537, 542, 543, 557, 575, 577, 584, 585, 595, 605, 607,612, 615: n = A,T,C or G

SEQ ID NO: 10686 - DNA, 458 bp, Homo sapiens; identical to SEQ ID NO: 4382

SEQ ID NO: 10687 - DNA, 498 bp, Homo sapiens; identical to SEQ ID NO: 4383
  misc_feature 394, 395, 397, 405, 407, 408, 409, 410, 411, 412, 413, 414,415: n = A,T,C or G

SEQ ID NO: 10688 - DNA, 424 bp, Homo sapiens; identical to SEQ ID NO: 4384
  misc_feature 119, 202, 326, 330: n = A,T,C or G

SEQ ID NO: 10689 - DNA, 256 bp, Homo sapiens; identical to SEQ ID NO: 4385

SEQ ID NO: 10690 - DNA, 342 bp, Homo sapiens; identical to SEQ ID NO: 4386

SEQ ID NO: 10691 - DNA, 416 bp, Homo sapiens; identical to SEQ ID NO: 4387
  misc_feature 1, 28, 128, 130, 139, 140, 145, 150, 161, 165, 174, 184,203, 235, 239, 244, 250, 254, 273, 291, 319, 361, 368, 381,397, 398, 401, 404, 406, 408, 413: n = A,T,C or G

SEQ ID NO: 10692 - DNA, 524 bp, Homo sapiens; identical to SEQ ID NO: 4388
  misc_feature 189, 335, 402, 425, 426, 449, 457, 467, 480, 486, 511: n = A,T,C or G

SEQ ID NO: 10693 - DNA, 535 bp, Homo sapiens; identical to SEQ ID NO: 4389
  misc_feature 435, 442, 455, 497, 500, 510, 511: n = A,T,C or G

SEQ ID NO: 10694 - DNA, 504 bp, Homo sapiens; identical to SEQ ID NO: 4390
  misc_feature 499: n = A,T,C or G

SEQ ID NO: 10695 - DNA, 443 bp, Homo sapiens; identical to SEQ ID NO: 4391

SEQ ID NO: 10696 - DNA, 332 bp, Homo sapiens; identical to SEQ ID NO: 4392
  misc_feature 250: n = A,T,C or G

SEQ ID NO: 10697 - DNA, 498 bp, Homo sapiens; identical to SEQ ID NO: 4393

SEQ ID NO: 10698 - DNA, 476 bp, Homo sapiens; identical to SEQ ID NO: 4394
  misc_feature 58, 421, 454, 461: n = A,T,C or G

SEQ ID NO: 10699 - DNA, 487 bp, Homo sapiens; identical to SEQ ID NO: 4395

SEQ ID NO: 10700 - DNA, 681 bp, Homo sapiens; identical to SEQ ID NO: 4396
  misc_feature 590, 616: n = A,T,C or G

SEQ ID NO: 10701 - DNA, 341 bp, Homo sapiens; identical to SEQ ID NO: 4397
  misc_feature 195, 198, 199, 201, 204, 218, 221, 251, 324: n = A,T,C or G

SEQ ID NO: 10702 - DNA, 442 bp, Homo sapiens; identical to SEQ ID NO: 4398

SEQ ID NO: 10703 - DNA, 303 bp, Homo sapiens; identical to SEQ ID NO: 4399

SEQ ID NO: 10704 - DNA, 491 bp, Homo sapiens; identical to SEQ ID NO: 4400
  misc_feature 413: n = A,T,C or G

SEQ ID NO: 10705 - DNA, 448 bp, Homo sapiens; identical to SEQ ID NO: 4401
  misc_feature 358, 390: n = A,T,C or G

SEQ ID NO: 10706 - DNA, 491 bp, Homo sapiens; identical to SEQ ID NO: 4402
  misc_feature 53, 250, 346, 388, 399, 433, 472: n = A,T,C or G

SEQ ID NO: 10707 - DNA, 316 bp, Homo sapiens; identical to SEQ ID NO: 4403

SEQ ID NO: 10708 - DNA, 393 bp, Homo sapiens; identical to SEQ ID NO: 4404
  misc_feature 385: n = A,T,C or G

SEQ ID NO: 10709 - DNA, 328 bp, Homo sapiens; identical to SEQ ID NO: 4405
  misc_feature 77, 78, 83, 91, 101, 103, 110, 112, 201, 235, 253: n = A,T,C or G

SEQ ID NO: 10710 - DNA, 444 bp, Homo sapiens; identical to SEQ ID NO: 4406
  misc_feature 380, 381, 388, 391, 392, 393, 394, 395, 396, 397, 398, 399,400, 401, 402, 403, 404, 405, 406, 416, 432: n = A,T,C or G

SEQ ID NO: 10711 - DNA, 772 bp, Homo sapiens; identical to SEQ ID NO: 4407
  misc_feature 306, 307, 308, 309, 310, 311, 312, 313, 314, 315, 316, 317,318, 319, 320, 321, 322, 323, 324, 325, 326, 327, 328, 329,330, 331, 332, 333, 334, 335, 336, 337, 338, 339, 340, 341,342, 343, 344, 345, 346, 347, 348, 349, 350, 351, 352: n = A,T,C or G
  misc_feature 353, 354, 355, 356, 357, 358, 359, 360, 361, 362, 363, 364,365, 366, 367, 368, 369, 370, 371, 372, 373, 374, 375, 376,377, 378, 379, 380, 381, 382, 383, 384, 385, 386, 387, 388,389, 390, 391, 392, 393, 394, 395, 396, 397, 398, 399: n = A,T,C or G
  misc_feature 400, 401, 402, 403, 404, 405, 406, 407, 408, 409, 410, 411,412, 413, 414, 415, 416, 417, 418, 419, 420, 421, 422, 423,424, 425, 426, 427, 428, 429, 430, 431, 432, 433, 434, 451,452, 453, 454, 455, 456, 457, 458, 459, 460, 461, 462: n = A,T,C or G
  misc_feature 463, 464, 465, 466, 467, 468, 469, 470, 471, 472, 473, 474,475, 476, 477, 478, 481, 482, 483, 484, 485, 486, 487, 488,489, 490, 491, 492, 493, 494, 495, 496, 497, 498, 499, 500,501, 502, 503, 540, 544, 574, 601, 606, 607, 612, 622: n = A,T,C or G
  misc_feature 623, 624, 632, 635, 636, 638, 648, 650, 651, 653, 656, 658,659, 663, 664, 670, 673, 674, 676, 681, 686, 711, 732, 745,751, 755, 759, 760, 761: n = A,T,C or G

SEQ ID NO: 10712 - DNA, 309 bp, Homo sapiens; identical to SEQ ID NO: 4408

SEQ ID NO: 10713 - DNA, 448 bp, Homo sapiens; identical to SEQ ID NO: 4409
  misc_feature 282, 400, 417, 432: n = A,T,C or G

SEQ ID NO: 10714 - DNA, 436 bp, Homo sapiens; identical to SEQ ID NO: 4411

SEQ ID NO: 10715 - DNA, 542 bp, Homo sapiens; identical to SEQ ID NO: 4412
  misc_feature 524: n = A,T,C or G

SEQ ID NO: 10716 - DNA, 488 bp, Homo sapiens; identical to SEQ ID NO: 4413
  misc_feature 6, 8, 279, 317, 332, 428, 437, 480: n = A,T,C or G

SEQ ID NO: 10717 - DNA, 280 bp, Homo sapiens; identical to SEQ ID NO: 4414
  misc_feature 266, 267: n = A,T,C or G

SEQ ID NO: 10718 - DNA, 502 bp, Homo sapiens; identical to SEQ ID NO: 4415
  misc_feature 304: n = A,T,C or G

SEQ ID NO: 10719 - DNA, 295 bp, Homo sapiens; identical to SEQ ID NO: 4416
  misc_feature 244, 247, 255, 258, 271: n = A,T,C or G

SEQ ID NO: 10720 - DNA, 315 bp, Homo sapiens; identical to SEQ ID NO: 4417
  misc_feature 171: n = A,T,C or G

SEQ ID NO: 10721 - DNA, 493 bp, Homo sapiens; identical to SEQ ID NO: 4418
  misc_feature 39: n = A,T,C or G

SEQ ID NO: 10722 - DNA, 798 bp, Homo sapiens; identical to SEQ ID NO: 4419
  misc_feature 36, 44, 56, 57, 60, 71, 73, 77, 78, 81, 87, 90, 91, 97, 115,121, 122, 124, 125, 127, 131, 140, 146, 150, 154, 158, 159,162, 165, 167, 170, 175, 176, 179, 190, 196, 197, 199, 209,210, 211, 214, 217, 233, 237, 242, 245, 246, 248: n = A,T,C or G
  misc_feature 249, 253, 272, 275, 283, 285, 294, 298, 300, 303, 312, 313,314, 326, 332, 333, 338, 342, 343, 350, 354, 361, 362, 363,380, 382, 384, 387, 391, 397, 401, 407, 409, 413, 421, 432,435, 438, 439, 443, 445, 448, 449, 452, 457, 458, 459: n = A,T,C or G
  misc_feature 474, 478, 480, 485, 493, 496, 499, 500, 506, 508, 510, 521,525, 526, 527, 531, 541, 542, 548, 554, 559, 564, 575, 579,583, 586, 588, 590, 595, 597, 604, 617, 619, 621, 622, 626,627, 641, 642, 657, 661, 666, 686, 692, 697, 732, 753: n = A,T,C or G
  misc_feature 769, 778: n = A,T,C or G

SEQ ID NO: 10723 - DNA, 472 bp, Homo sapiens; identical to SEQ ID NO: 4420
  misc_feature 44, 135, 213, 262, 272, 287, 348, 358, 377, 411, 456, 460,464: n = A,T,C or G

SEQ ID NO: 10724 - DNA, 433 bp, Homo sapiens; identical to SEQ ID NO: 4421

SEQ ID NO: 10725 - DNA, 315 bp, Homo sapiens; identical to SEQ ID NO: 4422

SEQ ID NO: 10726 - DNA, 433 bp, Homo sapiens; identical to SEQ ID NO: 4423
  misc_feature 372: n = A,T,C or G

SEQ ID NO: 10727 - DNA, 303 bp, Homo sapiens; identical to SEQ ID NO: 4424
  misc_feature 278: n = A,T,C or G

SEQ ID NO: 10728 - DNA, 206 bp, Homo sapiens; identical to SEQ ID NO: 4425
  misc_feature 63, 79, 99, 114, 155, 172, 203: n = A,T,C or G

SEQ ID NO: 10729 - DNA, 316 bp, Homo sapiens; identical to SEQ ID NO: 4426

SEQ ID NO: 10730 - DNA, 465 bp, Homo sapiens; identical to SEQ ID NO: 4427

SEQ ID NO: 10731 - DNA, 499 bp, Homo sapiens; identical to SEQ ID NO: 4428
  misc_feature 6, 11, 12, 13, 20, 22, 23, 25, 27, 36, 39, 40, 44, 61, 63,64, 66, 67, 77, 80, 81, 85, 93, 94, 96, 103, 106, 112, 114,117, 119, 120, 124, 131, 134, 137, 139, 145, 157, 160, 165,168, 169, 181, 185, 187, 191, 192, 199, 202, 205, 213: n = A,T,C or G
  misc_feature 214, 223, 230, 235, 238, 239, 243, 249, 251, 255, 259, 268,271, 274, 281, 285, 288, 289, 290, 292, 293, 295, 297, 298,299, 302, 303, 305, 307, 310, 315, 321, 330, 333, 334, 336,350, 369, 440, 449, 470: n = A,T,C or G

SEQ ID NO: 10732 - DNA, 320 bp, Homo sapiens; identical to SEQ ID NO: 4429

SEQ ID NO: 10733 - DNA, 651 bp, Homo sapiens; identical to SEQ ID NO: 4430
  misc_feature 363, 446, 447, 450, 458, 459, 500, 507, 514, 526, 527, 570,592, 599, 607, 608, 610, 618: n = A,T,C or G

SEQ ID NO: 10734 - DNA, 607 bp, Homo sapiens; identical to SEQ ID NO: 4431
  misc_feature 7, 11, 14, 41, 90, 112, 129, 185, 239, 251, 299, 375, 390,401, 416, 442, 484, 492, 544, 596: n = A,T,C or G

SEQ ID NO: 10735 - DNA, 256 bp, Homo sapiens; identical to SEQ ID NO: 4432
  misc_feature 35, 44, 93, 159, 228, 236, 246: n = A,T,C or G

SEQ ID NO: 10736 - DNA, 354 bp, Homo sapiens; identical to SEQ ID NO: 4433

SEQ ID NO: 10737 - DNA, 350 bp, Homo sapiens; identical to SEQ ID NO: 4434
  misc_feature 342, 344: n = A,T,C or G

SEQ ID NO: 10738 - DNA, 400 bp, Homo sapiens; identical to SEQ ID NO: 4435

SEQ ID NO: 10739 - DNA, 319 bp, Homo sapiens; identical to SEQ ID NO: 4436

SEQ ID NO: 10740 - DNA, 453 bp, Homo sapiens; identical to SEQ ID NO: 4437
  misc_feature 383: n = A,T,C or G

SEQ ID NO: 10741 - DNA, 213 bp, Homo sapiens; identical to SEQ ID NO: 4438
  misc_feature 12, 41, 65, 72, 104, 111, 123, 125, 162, 183, 188: n = A,T,C or G

SEQ ID NO: 10742 - DNA, 652 bp, Homo sapiens; identical to SEQ ID NO: 4439
  misc_feature 521, 617: n = A,T,C or G

SEQ ID NO: 10743 - DNA, 582 bp, Homo sapiens; identical to SEQ ID NO: 4440
  misc_feature 274, 344, 487, 521, 538, 553, 567, 569: n = A,T,C or G

SEQ ID NO: 10744 - DNA, 354 bp, Homo sapiens; identical to SEQ ID NO: 4441
  misc_feature 31: n = A,T,C or G

SEQ ID NO: 10745 - DNA, 490 bp, Homo sapiens; identical to SEQ ID NO: 4442

SEQ ID NO: 10746 - DNA, 356 bp, Homo sapiens; identical to SEQ ID NO: 4443
  misc_feature 333: n = A,T,C or G

SEQ ID NO: 10747 - DNA, 432 bp, Homo sapiens; identical to SEQ ID NO: 4444

SEQ ID NO: 10748 - DNA, 695 bp, Homo sapiens; identical to SEQ ID NO: 4445
  misc_feature 432, 518, 624, 653, 658: n = A,T,C or G

SEQ ID NO: 10749 - DNA, 249 bp, Homo sapiens; identical to SEQ ID NO: 4446
  misc_feature 236: n = A,T,C or G

SEQ ID NO: 10750 - DNA, 220 bp, Homo sapiens; identical to SEQ ID NO: 4447

SEQ ID NO: 10751 - DNA, 641 bp, Homo sapiens; identical to SEQ ID NO: 4448
  misc_feature 15, 20, 28, 35, 36: n = A,T,C or G

SEQ ID NO: 10752 - DNA, 431 bp, Homo sapiens; identical to SEQ ID NO: 4449

SEQ ID NO: 10753 - DNA, 309 bp, Homo sapiens; identical to SEQ ID NO: 4450

SEQ ID NO: 10754 - DNA, 415 bp, Homo sapiens; identical to SEQ ID NO: 4451

SEQ ID NO: 10755 - DNA, 517 bp, Homo sapiens; identical to SEQ ID NO: 4452
  misc_feature 104, 108, 130, 149, 185, 199, 204, 220, 230, 232, 267, 269,275, 278, 282, 284, 304, 330, 343, 373, 401, 466, 472: n = A,T,C or G

SEQ ID NO: 10756 - DNA, 302 bp, Homo sapiens; identical to SEQ ID NO: 4453

SEQ ID NO: 10757 - DNA, 293 bp, Homo sapiens; identical to SEQ ID NO: 4454
  misc_feature 106, 108, 128, 135, 140, 142, 150, 151, 156, 164, 173, 176,181, 184, 190, 191, 218, 223, 249, 266, 270, 276, 280: n = A,T,C or G

SEQ ID NO: 10758 - DNA, 274 bp, Homo sapiens; identical to SEQ ID NO: 4455
  misc_feature 265, 266: n = A,T,C or G

SEQ ID NO: 10759 - DNA, 573 bp, Homo sapiens; identical to SEQ ID NO: 4456
  misc_feature 396: n = A,T,C or G

SEQ ID NO: 10760 - DNA, 453 bp, Homo sapiens; identical to SEQ ID NO: 4457
  misc_feature 410: n = A,T,C or G

SEQ ID NO: 10761 - DNA, 360 bp, Homo sapiens; identical to SEQ ID NO: 4458

SEQ ID NO: 10762 - DNA, 693 bp, Homo sapiens; identical to SEQ ID NO: 4459
  misc_feature 51, 78, 97, 103, 115, 120, 127, 135, 146, 168, 169, 179,207, 218, 224, 250, 285, 312, 319, 325, 348, 404, 405, 428,467, 478, 499, 520, 521, 528, 542, 550, 563, 570, 583, 588,607, 610, 611, 613, 614, 618, 632, 637, 647, 651, 653: n = A,T,C or G
  misc_feature 665, 668, 673, 681: n = A,T,C or G

SEQ ID NO: 10763 - DNA, 387 bp, Homo sapiens; identical to SEQ ID NO: 4460
  misc_feature 319: n = A,T,C or G

SEQ ID NO: 10764 - DNA, 334 bp, Homo sapiens; identical to SEQ ID NO: 4461
  misc_feature 306: n = A,T,C or G

SEQ ID NO: 10765 - DNA, 640 bp, Homo sapiens; identical to SEQ ID NO: 4462
  misc_feature 539, 555, 582, 609, 623, 628: n = A,T,C or G

SEQ ID NO: 10766 - DNA, 288 bp, Homo sapiens; identical to SEQ ID NO: 4463
  misc_feature 141: n = A,T,C or G

SEQ ID NO: 10767 - DNA, 805 bp, Homo sapiens; identical to SEQ ID NO: 4464
  misc_feature 355, 492, 584, 622, 626, 642, 644, 711, 728, 734, 743, 754,767, 774, 780, 788: n = A,T,C or G

SEQ ID NO: 10768 - DNA, 704 bp, Homo sapiens; identical to SEQ ID NO: 4465
  misc_feature 44, 45, 46, 49, 66, 70, 72, 75, 79, 80, 81, 468, 508, 532,584, 599, 609, 618, 633, 664, 683, 690, 697: n = A,T,C or G

SEQ ID NO: 10769 - DNA, 336 bp, Homo sapiens; identical to SEQ ID NO: 4466
  misc_feature 97: n = A,T,C or G

SEQ ID NO: 10770 - DNA, 427 bp, Homo sapiens; identical to SEQ ID NO: 4467
  misc_feature 333: n = A,T,C or G

SEQ ID NO: 10771 - DNA, 323 bp, Homo sapiens; identical to SEQ ID NO: 4468
  misc_feature 11, 12, 260: n = A,T,C or G

SEQ ID NO: 10772 - DNA, 303 bp, Homo sapiens; identical to SEQ ID NO: 4469

SEQ ID NO: 10773 - DNA, 177 bp, Homo sapiens; identical to SEQ ID NO: 4470
  misc_feature 142, 147, 156: n = A,T,C or G

SEQ ID NO: 10774 - DNA, 382 bp, Homo sapiens; identical to SEQ ID NO: 4471
  misc_feature 370: n = A,T,C or G

SEQ ID NO: 10775 - DNA, 486 bp, Homo sapiens; identical to SEQ ID NO: 4472
  misc_feature 31, 98, 159, 166, 289, 348, 361, 364, 385, 393, 398, 400,403, 410, 414, 419, 432, 457, 467: n = A,T,C or G

SEQ ID NO: 10776 - DNA, 410 bp, Homo sapiens; identical to SEQ ID NO: 4473

SEQ ID NO: 10777 - DNA, 372 bp, Homo sapiens; identical to SEQ ID NO: 4474

SEQ ID NO: 10778 - DNA, 296 bp, Homo sapiens; identical to SEQ ID NO: 4475
  misc_feature 122, 191, 198, 205, 234, 284: n = A,T,C or G

SEQ ID NO: 10779 - DNA, 219 bp, Homo sapiens; identical to SEQ ID NO: 4476
  misc_feature 160, 171, 205: n = A,T,C or G

SEQ ID NO: 10780 - DNA, 147 bp, Homo sapiens; identical to SEQ ID NO: 4477
  misc_feature 83, 94, 135, 136: n = A,T,C or G

SEQ ID NO: 10781 - DNA, 499 bp, Homo sapiens; identical to SEQ ID NO: 4478

SEQ ID NO: 10782 - DNA, 725 bp, Homo sapiens; identical to SEQ ID NO: 4479
  misc_feature 398, 497, 512, 547, 554, 556, 566, 589, 617, 660, 661, 677,684, 691, 698, 701, 713, 721: n = A,T,C or G

SEQ ID NO: 10783 - DNA, 499 bp, Homo sapiens; identical to SEQ ID NO: 4480

SEQ ID NO: 10784 - DNA, 709 bp, Homo sapiens; identical to SEQ ID NO: 4481
  misc_feature 465, 483, 512, 556, 569, 601, 646, 651, 653, 658, 674, 678,685: n = A,T,C or G

SEQ ID NO: 10785 - DNA, 377 bp, Homo sapiens; identical to SEQ ID NO: 4482

SEQ ID NO: 10786 - DNA, 382 bp, Homo sapiens; identical to SEQ ID NO: 4483
  misc_feature 44, 173, 224, 230, 271, 275, 285, 292, 301, 302, 307, 319,348: n = A,T,C or G

SEQ ID NO: 10787 - DNA, 368 bp, Homo sapiens; identical to SEQ ID NO: 4484
  misc_feature 54, 126, 153, 252, 280, 307, 345, 346, 358: n = A,T,C or G

SEQ ID NO: 10788 - DNA, 336 bp, Homo sapiens; identical to SEQ ID NO: 4485
  misc_feature 193, 231, 283, 295, 315: n = A,T,C or G

SEQ ID NO: 10789 - DNA, 779 bp, Homo sapiens; identical to SEQ ID NO: 4486
  misc_feature 13, 15, 39, 75, 86, 92, 116, 124, 140, 201, 217, 253, 339,393, 443, 490, 492, 493, 512, 549, 562, 566, 597, 602, 642,654, 656, 658, 666, 670, 693, 701, 703, 715, 723, 727, 728,733, 739, 753, 760, 764, 766, 770: n = A,T,C or G

SEQ ID NO: 10790 - DNA, 537 bp, Homo sapiens; identical to SEQ ID NO: 4487
  misc_feature 66, 67, 92, 149, 248, 257, 258, 298, 303, 370, 378, 391,410, 435, 447, 451, 465, 477, 490, 501, 528: n = A,T,C or G

SEQ ID NO: 10791 - DNA, 307 bp, Homo sapiens; identical to SEQ ID NO: 4488

SEQ ID NO: 10792 - DNA, 130 bp, Homo sapiens; identical to SEQ ID NO: 4490
  misc_feature 81: n = A,T,C or G

SEQ ID NO: 10793 - DNA, 446 bp, Homo sapiens; identical to SEQ ID NO: 4491

SEQ ID NO: 10794 - DNA, 314 bp, Homo sapiens; identical to SEQ ID NO: 4492
  misc_feature 258, 266, 275, 277, 281: n = A,T,C or G

SEQ ID NO: 10795 - DNA, 390 bp, Homo sapiens; identical to SEQ ID NO: 4493
  misc_feature 337, 338, 341, 343: n = A,T,C or G

SEQ ID NO: 10796 - DNA, 419 bp, Homo sapiens; identical to SEQ ID NO: 4494
  misc_feature 397: n = A,T,C or G

SEQ ID NO: 10797 - DNA, 391 bp, Homo sapiens; identical to SEQ ID NO: 4495
  misc_feature 281: n = A,T,C or G

SEQ ID NO: 10798 - DNA, 270 bp, Homo sapiens; identical to SEQ ID NO: 4496
  misc_feature 23, 34, 52, 125, 198, 200, 232: n = A,T,C or G

SEQ ID NO: 10799 - DNA, 356 bp, Homo sapiens; identical to SEQ ID NO: 4497

SEQ ID NO: 10800 - DNA, 269 bp, Homo sapiens; identical to SEQ ID NO: 4498
  misc_feature 57, 255: n = A,T,C or G

SEQ ID NO: 10801 - DNA, 400 bp, Homo sapiens; identical to SEQ ID NO: 4499

SEQ ID NO: 10802 - DNA, 582 bp, Homo sapiens; identical to SEQ ID NO: 4500
  misc_feature 533, 559: n = A,T,C or G

SEQ ID NO: 10803 - DNA, 228 bp, Homo sapiens; identical to SEQ ID NO: 4501
  misc_feature 7, 8, 17, 30, 48, 72, 86, 95, 125, 150, 153, 163, 170: n = A,T,C or G

SEQ ID NO: 10804 - DNA, 660 bp, Homo sapiens; identical to SEQ ID NO: 4502
  misc_feature 547, 621, 626, 650: n = A,T,C or G

SEQ ID NO: 10805 - DNA, 521 bp, Homo sapiens; identical to SEQ ID NO: 4503

SEQ ID NO: 10806 - DNA, 272 bp, Homo sapiens; identical to SEQ ID NO: 4504
  misc_feature 9, 35, 114, 119, 123, 129, 272: n = A,T,C or G

SEQ ID NO: 10807 - DNA, 274 bp, Homo sapiens; identical to SEQ ID NO: 4505
  misc_feature 103, 107, 111, 114, 128, 129, 136, 147, 154, 156, 160, 165,168, 169, 170, 180, 181, 183, 185, 187, 193, 208, 209, 214,218, 220, 223, 224, 239, 245, 250, 251, 253, 256, 257, 259: n = A,T,C or G

SEQ ID NO: 10808 - DNA, 438 bp, Homo sapiens; identical to SEQ ID NO: 4506

SEQ ID NO: 10809 - DNA, 406 bp, Homo sapiens; identical to SEQ ID NO: 4507
  misc_feature 216, 308, 309, 360: n = A,T,C or G

SEQ ID NO: 10810 - DNA, 329 bp, Homo sapiens; identical to SEQ ID NO: 4508
  misc_feature 277, 280, 288: n = A,T,C or G

SEQ ID NO: 10811 - DNA, 533 bp, Homo sapiens; identical to SEQ ID NO: 4509
  misc_feature 447, 485, 522: n = A,T,C or G

SEQ ID NO: 10812 - DNA, 478 bp, Homo sapiens; identical to SEQ ID NO: 4510
  misc_feature 15: n = A,T,C or G

SEQ ID NO: 10813 - DNA, 328 bp, Homo sapiens; identical to SEQ ID NO: 4512
  misc_feature 32, 39, 43, 47, 60, 80, 104, 106, 108, 140, 141, 142, 146,147, 151, 158, 161, 166, 168, 175, 176, 178, 193, 211, 237,253, 255, 267, 273, 277, 285, 288, 290, 291, 294, 295, 300,301, 311, 315, 320: n = A,T,C or G

SEQ ID NO: 10814 - DNA, 322 bp, Homo sapiens; identical to SEQ ID NO: 4513

SEQ ID NO: 10815 - DNA, 565 bp, Homo sapiens; identical to SEQ ID NO: 4514
  misc_feature 444, 491, 500, 501, 503, 518, 526, 544: n = A,T,C or G

SEQ ID NO: 10816 - DNA, 475 bp, Homo sapiens; identical to SEQ ID NO: 4515

SEQ ID NO: 10817 - DNA, 789 bp, Homo sapiens; identical to SEQ ID NO: 4516
  misc_feature 308, 377, 402, 414, 432, 451, 463, 466, 477, 500, 503, 517,522, 535, 557, 558, 568, 571, 595, 599, 607, 610, 620, 635,636, 647, 668, 677, 695, 702, 708, 709, 710, 721, 728, 735,739, 744, 758, 762, 771, 774: n = A,T,C or G

SEQ ID NO: 10818 - DNA, 331 bp, Homo sapiens; identical to SEQ ID NO: 4517
  misc_feature 49, 76, 118, 120, 134, 197, 223: n = A,T,C or G

SEQ ID NO: 10819 - DNA, 289 bp, Homo sapiens; identical to SEQ ID NO: 4518

SEQ ID NO: 10820 - DNA, 372 bp, Homo sapiens; identical to SEQ ID NO: 4519

SEQ ID NO: 10821 - DNA, 433 bp, Homo sapiens; identical to SEQ ID NO: 4520
  misc_feature 391: n = A,T,C or G

SEQ ID NO: 10822 - DNA, 472 bp, Homo sapiens; identical to SEQ ID NO: 4521

SEQ ID NO: 10823 - DNA, 470 bp, Homo sapiens; identical to SEQ ID NO: 4522
  misc_feature 420, 423, 430, 438: n = A,T,C or G

SEQ ID NO: 10824 - DNA, 545 bp, Homo sapiens; identical to SEQ ID NO: 4523
  misc_feature 518, 535: n = A,T,C or G

SEQ ID NO: 10825 - DNA, 523 bp, Homo sapiens; identical to SEQ ID NO: 4524
  misc_feature 468: n = A,T,C or G

SEQ ID NO: 10826 - DNA, 227 bp, Homo sapiens; identical to SEQ ID NO: 4525
  misc_feature 1, 2, 4, 5, 11, 12, 18, 22, 26, 35, 43, 51, 55, 57, 71, 72,124: n = A,T,C or G

SEQ ID NO: 10827 - DNA, 555 bp, Homo sapiens; identical to SEQ ID NO: 4526

SEQ ID NO: 10828 - DNA, 192 bp, Homo sapiens; identical to SEQ ID NO: 4527
  misc_feature 129: n = A,T,C or G

SEQ ID NO: 10829 - DNA, 318 bp, Homo sapiens; identical to SEQ ID NO: 4528
  misc_feature 199: n = A,T,C or G

SEQ ID NO: 10830 - DNA, 401 bp, Homo sapiens; identical to SEQ ID NO: 4529
  misc_feature 56, 150, 323, 329, 361: n = A,T,C or G

SEQ ID NO: 10831 - DNA, 227 bp, Homo sapiens; identical to SEQ ID NO: 4530
  misc_feature 200: n = A,T,C or G

SEQ ID NO: 10832 - DNA, 315 bp, Homo sapiens; identical to SEQ ID NO: 4531
  misc_feature 31, 252, 275: n = A,T,C or G

SEQ ID NO: 10833 - DNA, 577 bp, Homo sapiens; identical to SEQ ID NO: 4532
  misc_feature 510, 524, 563, 571: n = A,T,C or G

SEQ ID NO: 10834 - DNA, 263 bp, Homo sapiens; identical to SEQ ID NO: 4533
  misc_feature 27, 198: n = A,T,C or G

SEQ ID NO: 10835 - DNA, 318 bp, Homo sapiens; identical to SEQ ID NO: 4534
  misc_feature 195: n = A,T,C or G

SEQ ID NO: 10836 - DNA, 387 bp, Homo sapiens; identical to SEQ ID NO: 4535

SEQ ID NO: 10837 - DNA, 445 bp, Homo sapiens; identical to SEQ ID NO: 4536

SEQ ID NO: 10838 - DNA, 465 bp, Homo sapiens; identical to SEQ ID NO: 4537
  misc_feature 21, 32, 38, 39, 63, 66, 69, 99, 119, 125, 195, 218, 222,231, 236, 239, 244, 255, 261, 271, 276, 282, 287, 291, 305,309, 318, 323, 325, 342, 346, 369, 371, 386, 393, 404, 413,417, 421, 423, 427, 442, 447, 457: n = A,T,C or G

SEQ ID NO: 10839 - DNA, 414 bp, Homo sapiens; identical to SEQ ID NO: 4538

SEQ ID NO: 10840 - DNA, 477 bp, Homo sapiens; identical to SEQ ID NO: 4539

SEQ ID NO: 10841 - DNA, 495 bp, Homo sapiens; identical to SEQ ID NO: 4540
  misc_feature 31, 164, 166, 265, 363: n = A,T,C or G

SEQ ID NO: 10842 - DNA, 396 bp, Homo sapiens; identical to SEQ ID NO: 4541
  misc_feature 271: n = A,T,C or G

SEQ ID NO: 10843 - DNA, 468 bp, Homo sapiens; identical to SEQ ID NO: 4542

SEQ ID NO: 10844 - DNA, 217 bp, Homo sapiens; identical to SEQ ID NO: 4543
  misc_feature 26, 29, 36, 38, 41, 45, 50, 62, 68, 99, 103, 115, 130, 135,142, 146, 154, 156, 164, 171, 185, 208: n = A,T,C or G

SEQ ID NO: 10845 - DNA, 318 bp, Homo sapiens; identical to SEQ ID NO: 4544
  misc_feature 50, 75, 149, 159, 166, 169, 171, 173, 212, 219, 222, 226,231, 243, 272, 283, 288, 294, 303, 308: n = A,T,C or G

SEQ ID NO: 10846 - DNA, 641 bp, Homo sapiens; identical to SEQ ID NO: 4545
  misc_feature 572, 634: n = A,T,C or G

SEQ ID NO: 10847 - DNA, 405 bp, Homo sapiens; identical to SEQ ID NO: 4546
  misc_feature 114: n = A,T,C or G

SEQ ID NO: 10848 - DNA, 565 bp, Homo sapiens; identical to SEQ ID NO: 4547
  misc_feature 55, 102, 106, 114, 117, 118, 119, 120, 122, 132, 143, 144,147, 156, 158, 165, 167, 168, 171, 174, 180, 185, 188, 189,199, 201, 203, 212, 216, 221, 222, 228, 232, 234, 235, 237,239, 240, 249, 252, 253, 266, 279, 281, 293, 296, 299: n = A,T,C or G
  misc_feature 300, 305, 308, 310, 311, 323, 324, 326, 327, 347, 351, 368,369, 376, 377, 383, 385, 386, 387, 405, 416, 439, 440, 441,447, 457, 461, 470, 488, 495, 518, 523, 527, 533, 540, 541,547, 552, 563, 564: n = A,T,C or G

SEQ ID NO: 10849 - DNA, 494 bp, Homo sapiens; identical to SEQ ID NO: 4548

SEQ ID NO: 10850 - DNA, 532 bp, Homo sapiens; identical to SEQ ID NO: 4549
  misc_feature 150, 176, 202, 210, 211, 224, 227, 250, 257, 264, 273, 290,295, 298, 321, 325, 328, 344, 346, 348, 356, 363, 376, 388,396, 410, 418, 419, 424, 428, 435, 449, 463, 468, 472, 474,477, 482, 484, 498, 504, 507, 512, 521: n = A,T,C or G

SEQ ID NO: 10851 - DNA, 756 bp, Homo sapiens; identical to SEQ ID NO: 4550
  misc_feature 659, 664, 704, 734: n = A,T,C or G

SEQ ID NO: 10852 - DNA, 387 bp, Homo sapiens; identical to SEQ ID NO: 4551
  misc_feature 58, 59, 60, 84, 86, 87: n = A,T,C or G

SEQ ID NO: 10853 - DNA, 490 bp, Homo sapiens; identical to SEQ ID NO: 4552
  misc_feature 139, 167, 170, 174, 175, 178, 200, 210, 215, 217, 218, 224,228, 231, 232, 235, 236, 246, 247, 250, 252, 257, 258, 260,265, 270, 274, 277, 279, 289, 294, 295, 296, 297, 302, 307,309, 310, 313, 319, 322, 337, 339, 346, 354, 358, 359: n = A,T,C or G
  misc_feature 362, 363, 364, 374, 379, 383, 385, 391, 400, 409, 411, 420,421, 422, 428, 435, 439, 454, 461, 477, 490: n = A,T,C or G

SEQ ID NO: 10854 - DNA, 323 bp, Homo sapiens; identical to SEQ ID NO: 4553
  misc_feature 85, 313: n = A,T,C or G

SEQ ID NO: 10855 - DNA, 650 bp, Homo sapiens; identical to SEQ ID NO: 4554
  misc_feature 443, 621: n = A,T,C or G

SEQ ID NO: 10856 - DNA, 194 bp, Homo sapiens; identical to SEQ ID NO: 4555
  misc_feature 34, 40, 42, 47, 58, 65, 78, 79, 82, 86, 89, 90, 100, 111,115, 116, 147: n = A,T,C or G

SEQ ID NO: 10857 - DNA, 275 bp, Homo sapiens; identical to SEQ ID NO: 4556
  misc_feature 98, 237: n = A,T,C or G

SEQ ID NO: 10858 - DNA, 342 bp, Homo sapiens; identical to SEQ ID NO: 4557

SEQ ID NO: 10859 - DNA, 337 bp, Homo sapiens; identical to SEQ ID NO: 4558

SEQ ID NO: 10860 - DNA, 274 bp, Homo sapiens; identical to SEQ ID NO: 4559

SEQ ID NO: 10861 - DNA, 527 bp, Homo sapiens; identical to SEQ ID NO: 4560
  misc_feature 335: n = A,T,C or G

SEQ ID NO: 10862 - DNA, 438 bp, Homo sapiens; identical to SEQ ID NO: 4561
  misc_feature 214, 282, 284, 319, 379: n = A,T,C or G

SEQ ID NO: 10863 - DNA, 427 bp, Homo sapiens; identical to SEQ ID NO: 4562
  misc_feature 199, 276, 324, 350, 371, 390, 422: n = A,T,C or G

SEQ ID NO: 10864 - DNA, 624 bp, Homo sapiens; identical to SEQ ID NO: 4563
  misc_feature 106, 107, 575, 588, 612: n = A,T,C or G

SEQ ID NO: 10865 - DNA, 578 bp, Homo sapiens; identical to SEQ ID NO: 4564
  misc_feature 71, 146, 164, 174, 178, 179, 242, 246, 249, 255, 261, 264,278, 281, 282, 288, 290, 293, 295, 319, 334, 338, 344, 345,347, 356, 357, 358, 360, 365, 368, 370, 376, 379, 381, 392,398, 402, 406, 436, 439, 450, 464, 465, 466, 467, 478: n = A,T,C or G
  misc_feature 486, 487, 495, 498, 502, 510, 511, 516, 526, 528, 553, 555,570: n = A,T,C or G

SEQ ID NO: 10866 - DNA, 636 bp, Homo sapiens; identical to SEQ ID NO: 4565
  misc_feature 33, 81, 258, 362, 374, 455, 460, 493, 503, 519, 531, 545,628, 636: n = A,T,C or G

SEQ ID NO: 10867 - DNA, 670 bp, Homo sapiens; identical to SEQ ID NO: 4566
  misc_feature 76, 505, 519, 558, 570, 572, 575, 596, 639, 643: n = A,T,C or G

SEQ ID NO: 10868 - DNA, 223 bp, Homo sapiens; identical to SEQ ID NO: 4567
  misc_feature 32, 34, 43, 47, 74, 89, 105, 107, 109, 112, 118, 125, 134,135, 141, 142, 143, 147, 155, 157, 159, 167, 174, 176, 177,179, 190, 196: n = A,T,C or G

SEQ ID NO: 10869 - DNA, 388 bp, Homo sapiens; identical to SEQ ID NO: 4568
  misc_feature 55, 57, 58, 65, 75, 79, 144, 226, 243, 276, 299, 355, 371,382: n = A,T,C or G

SEQ ID NO: 10870 - DNA, 499 bp, Homo sapiens; identical to SEQ ID NO: 4569

SEQ ID NO: 10871 - DNA, 177 bp, Homo sapiens; identical to SEQ ID NO: 4570
  misc_feature 65, 67, 68, 69, 75, 78, 79, 80, 81, 83, 85, 90, 128: n = A,T,C or G

SEQ ID NO: 10872 - DNA, 528 bp, Homo sapiens; identical to SEQ ID NO: 4571
  misc_feature 352, 377, 385, 444, 491: n = A,T,C or G

SEQ ID NO: 10873 - DNA, 723 bp, Homo sapiens; identical to SEQ ID NO: 4572
  misc_feature 549, 564, 597, 608, 647, 685, 688, 692, 708, 719: n = A,T,C or G

SEQ ID NO: 10874 - DNA, 222 bp, Homo sapiens; identical to SEQ ID NO: 4573
  misc_feature 6, 104, 132, 139, 158, 175, 180, 211: n = A,T,C or G

SEQ ID NO: 10875 - DNA, 449 bp, Homo sapiens; identical to SEQ ID NO: 4575

SEQ ID NO: 10876 - DNA, 411 bp, Homo sapiens; identical to SEQ ID NO: 4576
  misc_feature 190, 204, 343, 359, 385, 410: n = A,T,C or G

SEQ ID NO: 10877 - DNA, 347 bp, Homo sapiens; identical to SEQ ID NO: 4577
  misc_feature 59, 239: n = A,T,C or G

SEQ ID NO: 10878 - DNA, 390 bp, Homo sapiens; identical to SEQ ID NO: 4578
  misc_feature 302, 303, 304, 305, 306, 307, 308, 309, 310, 311, 312, 313,314, 315, 316, 317, 318, 319, 320, 321, 322, 323, 324, 325,326, 327, 333: n = A,T,C or G

SEQ ID NO: 10879 - DNA, 447 bp, Homo sapiens; identical to SEQ ID NO: 4579
  misc_feature 14, 123, 274, 338, 366: n = A,T,C or G

SEQ ID NO: 10880 - DNA, 162 bp, Homo sapiens; identical to SEQ ID NO: 4580
  misc_feature 5, 10, 44, 52, 65, 83: n = A,T,C or G

SEQ ID NO: 10881 - DNA, 444 bp, Homo sapiens; identical to SEQ ID NO: 4582

SEQ ID NO: 10882 - DNA, 418 bp, Homo sapiens; identical to SEQ ID NO: 4583
  misc_feature 170, 297, 389, 394, 408: n = A,T,C or G

SEQ ID NO: 10883 - DNA, 385 bp, Homo sapiens; identical to SEQ ID NO: 4584

SEQ ID NO: 10884 - DNA, 426 bp, Homo sapiens; identical to SEQ ID NO: 4585

SEQ ID NO: 10885 - DNA, 325 bp, Homo sapiens; identical to SEQ ID NO: 4586

SEQ ID NO: 10886 - DNA, 604 bp, Homo sapiens; identical to SEQ ID NO: 4587
  misc_feature 490, 505, 518, 547: n = A,T,C or G

SEQ ID NO: 10887 - DNA, 684 bp, Homo sapiens; identical to SEQ ID NO: 4588
  misc_feature 56, 104, 106, 110, 117, 120, 178, 196, 234, 244, 305, 331,352, 359, 361, 362, 366, 375, 391, 397, 399, 401, 405, 410,414, 417, 423, 429, 435, 438, 450, 469, 476, 479, 490, 491,495, 496, 497, 498, 515, 516, 518, 522, 527, 528, 531: n = A,T,C or G
  misc_feature 532, 536, 546, 550, 551, 578, 579, 584, 591, 612, 620, 621,632, 635, 639, 641, 645, 647, 651, 659, 660, 661, 662, 666,674: n = A,T,C or G

SEQ ID NO: 10888 - DNA, 363 bp, Homo sapiens; identical to SEQ ID NO: 4589
  misc_feature 104, 120, 125, 152, 153, 158, 171, 172, 183, 184, 186, 187,188, 189, 190, 200, 204, 209, 218, 221, 222, 224, 233, 236,239, 248, 250, 258, 259, 264, 271, 272, 274, 280, 293, 294,295, 296, 297, 309, 324, 328, 330, 331, 333, 334, 335: n = A,T,C or G
  misc_feature 336, 337, 338, 339, 345, 347, 352: n = A,T,C or G

SEQ ID NO: 10889 - DNA, 153 bp, Homo sapiens; identical to SEQ ID NO: 4590
  misc_feature 103, 118, 123, 125: n = A,T,C or G

SEQ ID NO: 10890 - DNA, 316 bp, Homo sapiens; identical to SEQ ID NO: 4591
  misc_feature 272: n = A,T,C or G

SEQ ID NO: 10891 - DNA, 319 bp, Homo sapiens; identical to SEQ ID NO: 4592

SEQ ID NO: 10892 - DNA, 451 bp, Homo sapiens; identical to SEQ ID NO: 4593
  misc_feature 344: n = A,T,C or G

SEQ ID NO: 10893 - DNA, 324 bp, Homo sapiens; identical to SEQ ID NO: 4594
  misc_feature 24, 68, 148, 161, 162, 163, 164, 165, 166, 167, 168, 169,170, 171, 172, 173, 174, 175, 176, 177, 178, 179, 180, 181,182, 183, 184, 185, 186, 187, 188, 189, 190, 191, 192, 193,194, 195, 196, 197, 198, 199, 200, 201, 202, 203, 204: n = A,T,C or G
  misc_feature 205, 206, 207, 208, 209, 210, 211, 212, 213, 214, 215, 216,217, 218, 219, 220, 221, 222, 223, 224, 225, 226, 227, 228,229, 230, 231, 232, 233, 234, 235, 236, 237, 238, 239, 240,241, 242, 248, 249, 251, 259, 262, 265, 284, 292, 315: n = A,T,C or G

SEQ ID NO: 10894 - DNA, 555 bp, Homo sapiens; identical to SEQ ID NO: 4595
  misc_feature 12, 36, 41, 43, 50, 51, 63, 116, 191, 203, 217, 228, 232,261, 344, 346, 354, 374, 380, 444, 459, 496, 541, 543: n = A,T,C or G

SEQ ID NO: 10895 - DNA, 620 bp, Homo sapiens; identical to SEQ ID NO: 4596
  misc_feature 331, 471, 474, 497, 514, 520, 536, 604: n = A,T,C or G

SEQ ID NO: 10896 - DNA, 558 bp, Homo sapiens; identical to SEQ ID NO: 4597
  misc_feature 55, 57, 114, 266, 306, 375, 379, 401, 404, 413, 428, 435,465, 468, 497, 504, 530, 542, 544: n = A,T,C or G

SEQ ID NO: 10897 - DNA, 183 bp, Homo sapiens; identical to SEQ ID NO: 4598
  misc_feature 30, 31, 34, 42, 49, 50, 77, 86, 87, 91, 94, 95, 96, 97, 98,103, 106, 119, 129, 132, 145, 146, 155, 167, 168: n = A,T,C or G

SEQ ID NO: 10898 - DNA, 420 bp, Homo sapiens; identical to SEQ ID NO: 4599

SEQ ID NO: 10899 - DNA, 387 bp, Homo sapiens; identical to SEQ ID NO: 4600
  misc_feature 189, 297, 308: n = A,T,C or G

SEQ ID NO: 10900 - DNA, 207 bp, Homo sapiens; identical to SEQ ID NO: 4601
  misc_feature 17, 99, 130, 144, 176, 177, 181, 195, 197: n = A,T,C or G

SEQ ID NO: 10901 - DNA, 385 bp, Homo sapiens; identical to SEQ ID NO: 4602
  misc_feature 54: n = A,T,C or G

SEQ ID NO: 10902 - DNA, 238 bp, Homo sapiens; identical to SEQ ID NO: 4603
  misc_feature 31, 36, 37, 42, 45, 52, 61, 67, 71, 72, 78, 79, 81, 87, 88,91, 93, 99, 101, 104, 106, 116, 123, 126, 130, 139, 140,142, 145, 150, 153, 154, 164, 171, 172, 175, 177, 181, 186,187, 191, 192, 193, 194, 195, 198, 199, 200, 207, 218: n = A,T,C or G
  misc_feature 221, 225, 227, 228: n = A,T,C or G

SEQ ID NO: 10903 - DNA, 674 bp, Homo sapiens; identical to SEQ ID NO: 4604
  misc_feature 172, 247, 249, 339, 350, 441, 493, 523, 536, 552, 612, 613,636: n = A,T,C or G

SEQ ID NO: 10904 - DNA, 386 bp, Homo sapiens; identical to SEQ ID NO: 4605
  misc_feature 213, 226, 227, 315, 355: n = A,T,C or G

SEQ ID NO: 10905 - DNA, 512 bp, Homo sapiens; identical to SEQ ID NO: 4606
  misc_feature 63, 64: n = A,T,C or G

SEQ ID NO: 10906 - DNA, 430 bp, Homo sapiens; identical to SEQ ID NO: 4607
  misc_feature 324: n = A,T,C or G

SEQ ID NO: 10907 - DNA, 330 bp, Homo sapiens; identical to SEQ ID NO: 4608

SEQ ID NO: 10908 - DNA, 373 bp, Homo sapiens; identical to SEQ ID NO: 4609

SEQ ID NO: 10909 - DNA, 724 bp, Homo sapiens; identical to SEQ ID NO: 4610
  misc_feature 544, 657, 671, 678: n = A,T,C or G

SEQ ID NO: 10910 - DNA, 484 bp, Homo sapiens; identical to SEQ ID NO: 4611

SEQ ID NO: 10911 - DNA, 470 bp, Homo sapiens; identical to SEQ ID NO: 4612
  misc_feature 431: n = A,T,C or G

SEQ ID NO: 10912 - DNA, 678 bp, Homo sapiens; identical to SEQ ID NO: 4613
  misc_feature 237, 375, 378, 382, 430, 445, 446, 462, 490, 492, 497, 525,532, 534, 561, 585, 590, 594, 596, 600, 612, 618, 621, 631,639, 640, 643, 653, 656, 657, 662, 664, 667, 675: n = A,T,C or G

SEQ ID NO: 10913 - DNA, 426 bp, Homo sapiens; identical to SEQ ID NO: 4614

SEQ ID NO: 10914 - DNA, 506 bp, Homo sapiens; identical to SEQ ID NO: 4615
  misc_feature 467, 487, 489: n = A,T,C or G

SEQ ID NO: 10915 - DNA, 199 bp, Homo sapiens; identical to SEQ ID NO: 4616

SEQ ID NO: 10916 - DNA, 510 bp, Homo sapiens; identical to SEQ ID NO: 4617
  misc_feature 63, 82, 410, 424, 437, 446, 452, 458, 461, 472, 501: n = A,T,C or G

SEQ ID NO: 10917 - DNA, 310 bp, Homo sapiens; identical to SEQ ID NO: 4618
  misc_feature 106, 109, 116, 147, 152, 165, 168, 170, 171, 173, 175, 176,177, 181, 191, 192, 194, 195, 201, 205, 210, 215, 217, 218,223, 232, 235, 239, 241, 248, 251, 252, 253, 254, 259, 266,272, 285, 290, 291, 293, 294, 295, 299: n = A,T,C or G

SEQ ID NO: 10918 - DNA, 399 bp, Homo sapiens; identical to SEQ ID NO: 4619
  misc_feature 226, 252, 266, 312, 313, 334, 346, 358, 380, 383: n = A,T,C or G

SEQ ID NO: 10919 - DNA, 330 bp, Homo sapiens; identical to SEQ ID NO: 4620
  misc_feature 57, 103, 115, 160, 246, 291: n = A,T,C or G

SEQ ID NO: 10920 - DNA, 628 bp, Homo sapiens; identical to SEQ ID NO: 4621
  misc_feature 589: n = A,T,C or G

SEQ ID NO: 10921 - DNA, 650 bp, Homo sapiens; identical to SEQ ID NO: 4622
  misc_feature 392, 393, 394, 395, 396, 397, 398, 399, 400, 401, 402, 403,404, 405, 406, 407, 408, 409, 410, 411, 412, 413, 414, 415,416, 417, 418, 419, 420, 421, 422, 423, 424, 425, 426, 427,428, 429, 430, 431, 432, 433, 434, 435, 436, 437, 438: n = A,T,C or G
  misc_feature 439, 440, 441, 442, 443, 444, 445, 446, 447, 448, 449, 450,451, 452, 453, 454, 455, 456, 457, 458, 459, 460, 461, 462,463, 464, 465, 466, 467, 468, 469, 470, 471, 472, 473, 474,475, 476, 477, 478, 479, 480, 481, 482, 483, 484, 485: n = A,T,C or G
  misc_feature 486, 487, 488, 489, 490, 526, 527, 528, 529, 530, 531, 532,533, 534, 535, 536, 537, 538, 539, 540, 541, 542, 543, 544,545, 546, 547, 548, 549, 550, 551, 552, 553, 554, 555, 556,557, 558, 559, 560, 561, 562, 563, 564, 565, 566, 567: n = A,T,C or G
  misc_feature 568, 569, 570, 571, 572, 573, 574, 575, 576, 577, 578, 585,638: n = A,T,C or G

SEQ ID NO: 10922 - DNA, 416 bp, Homo sapiens; identical to SEQ ID NO: 4623
  misc_feature 34, 36, 41, 43, 46, 47, 48, 49, 55, 59, 71, 93, 98, 99, 100,103, 122, 128, 134, 137, 143, 150, 151, 161, 165, 169, 173,178, 205, 211, 213, 223, 233, 238, 242, 255, 288, 294, 306,309, 322, 334, 368, 374, 382, 386, 396, 409: n = A,T,C or G

SEQ ID NO: 10923 - DNA, 184 bp, Homo sapiens; identical to SEQ ID NO: 4624
  misc_feature 145, 146: n = A,T,C or G

SEQ ID NO: 10924 - DNA, 432 bp, Homo sapiens; identical to SEQ ID NO: 4625
  misc_feature 372, 375, 383, 392, 410, 413, 428: n = A,T,C or G

SEQ ID NO: 10925 - DNA, 330 bp, Homo sapiens; identical to SEQ ID NO: 4626

SEQ ID NO: 10926 - DNA, 309 bp, Homo sapiens; identical to SEQ ID NO: 4627

SEQ ID NO: 10927 - DNA, 554 bp, Homo sapiens; identical to SEQ ID NO: 4628
  misc_feature 260, 401, 420, 445, 453, 461, 526: n = A,T,C or G

SEQ ID NO: 10928 - DNA, 362 bp, Homo sapiens; identical to SEQ ID NO: 4629
  misc_feature 78, 218, 233, 241, 267, 274: n = A,T,C or G

SEQ ID NO: 10929 - DNA, 543 bp, Homo sapiens; identical to SEQ ID NO: 4630
  misc_feature 287, 316, 361, 405, 459, 480, 490, 512, 519: n = A,T,C or G

SEQ ID NO: 10930 - DNA, 152 bp, Homo sapiens; identical to SEQ ID NO: 4631
  misc_feature 17, 102, 112: n = A,T,C or G

SEQ ID NO: 10931 - DNA, 525 bp, Homo sapiens; identical to SEQ ID NO: 4632
  misc_feature 354, 522: n = A,T,C or G

SEQ ID NO: 10932 - DNA, 385 bp, Homo sapiens; identical to SEQ ID NO: 4633
  misc_feature 322: n = A,T,C or G

SEQ ID NO: 10933 - DNA, 631 bp, Homo sapiens; identical to SEQ ID NO: 4634
  misc_feature 52, 54, 150, 151, 157, 158, 159, 160, 162, 163, 164, 165,172, 175, 181, 184, 186, 187, 188, 189, 191, 193, 198, 203,204, 209, 210, 211, 213, 214, 215, 217, 218, 219, 220, 221,222, 223, 224, 225, 226, 236, 240, 241, 242, 243, 244: n = A,T,C or G
  misc_feature 249, 259, 271, 273, 274, 282, 289, 358, 362, 364, 370, 372,379, 381, 391, 394, 395, 400, 408, 409, 411, 416, 434, 442,453, 455, 456, 457, 458, 461, 479, 490, 491, 495, 500, 516,528, 532, 534, 544, 551, 557, 561, 563, 568, 569, 573: n = A,T,C or G
  misc_feature 574, 575, 576, 580, 581, 582, 589, 606, 607, 608, 609, 615,616, 617, 618, 619: n = A,T,C or G

SEQ ID NO: 10934 - DNA, 492 bp, Homo sapiens; identical to SEQ ID NO: 4635
  misc_feature 55, 146, 160, 170, 318, 336, 337, 346, 350, 353, 366, 393,397, 399, 401, 407, 413, 428, 439, 462, 472, 476: n = A,T,C or G

SEQ ID NO: 10935 - DNA, 263 bp, Homo sapiens; identical to SEQ ID NO: 4636
  misc_feature 67, 70, 104, 112, 126, 134, 153, 194, 199, 209, 212, 219,222, 234, 240: n = A,T,C or G

SEQ ID NO: 10936 - DNA, 347 bp, Homo sapiens; identical to SEQ ID NO: 4637

SEQ ID NO: 10937 - DNA, 322 bp, Homo sapiens; identical to SEQ ID NO: 4638
  misc_feature 52: n = A,T,C or G

SEQ ID NO: 10938 - DNA, 324 bp, Homo sapiens; identical to SEQ ID NO: 4639

SEQ ID NO: 10939 - DNA, 318 bp, Homo sapiens; identical to SEQ ID NO: 4640
  misc_feature 157, 158, 159, 160, 161, 162, 163, 164, 165, 166, 167, 168,169, 170, 171, 172, 173, 174, 175, 176, 177, 178, 179, 180,181, 182, 183, 184, 185, 186, 187, 188, 189, 190, 191, 192,193, 194, 195, 196, 197, 198, 199, 200, 201, 202, 203: n = A,T,C or G
  misc_feature 204, 205, 206, 207, 208, 209, 210, 211, 212, 213, 214, 215,216, 217, 218, 219, 220, 221, 222, 223, 224, 225, 226, 227,228, 229, 230, 231, 232, 233, 234, 235, 236, 237, 238, 239,240, 241, 242, 243, 244, 245, 246, 247, 248, 249, 250: n = A,T,C or G
  misc_feature 251, 252, 253, 254, 255, 256, 257, 258, 259, 260, 261, 262,263, 264, 265, 266, 267, 268, 269, 270, 271, 272, 273, 274,275, 276, 277, 288: n = A,T,C or G

SEQ ID NO: 10940 - DNA, 231 bp, Homo sapiens; identical to SEQ ID NO: 4641
  misc_feature 165, 214, 216: n = A,T,C or G

SEQ ID NO: 10941 - DNA, 641 bp, Homo sapiens; identical to SEQ ID NO: 4642
  misc_feature 48, 50, 53, 64, 76, 80, 83, 88, 117, 236, 238, 264, 346,367, 374, 400, 455, 498, 508, 534, 587, 588, 589, 598, 615,619, 630: n = A,T,C or G

SEQ ID NO: 10942 - DNA, 636 bp, Homo sapiens; identical to SEQ ID NO: 4643
  misc_feature 4, 91, 116, 173, 186, 365, 460, 462, 465, 503, 519, 593,594, 596, 607: n = A,T,C or G

SEQ ID NO: 10943 - DNA, 284 bp, Homo sapiens; identical to SEQ ID NO: 4644
  misc_feature 47, 164, 185, 228, 248: n = A,T,C or G

SEQ ID NO: 10944 - DNA, 400 bp, Homo sapiens; identical to SEQ ID NO: 4645
  misc_feature 67, 154, 181, 283, 302, 315, 317, 319, 364, 365, 372, 379: n = A,T,C or G

SEQ ID NO: 10945 - DNA, 434 bp, Homo sapiens; identical to SEQ ID NO: 4646

SEQ ID NO: 10946 - DNA, 388 bp, Homo sapiens; identical to SEQ ID NO: 4647
  misc_feature 54, 83, 338, 343, 359, 370: n = A,T,C or G

SEQ ID NO: 10947 - DNA, 302 bp, Homo sapiens; identical to SEQ ID NO: 4648
  misc_feature 70, 236, 254, 297: n = A,T,C or G

SEQ ID NO: 10948 - DNA, 446 bp, Homo sapiens; identical to SEQ ID NO: 4649

SEQ ID NO: 10949 - DNA, 476 bp, Homo sapiens; identical to SEQ ID NO: 4650

SEQ ID NO: 10950 - DNA, 417 bp, Homo sapiens; identical to SEQ ID NO: 4651
  misc_feature 144, 175, 409: n = A,T,C or G

SEQ ID NO: 10951 - DNA, 423 bp, Homo sapiens; identical to SEQ ID NO: 4652
  misc_feature 409: n = A,T,C or G

SEQ ID NO: 10952 - DNA, 314 bp, Homo sapiens; identical to SEQ ID NO: 4653

SEQ ID NO: 10953 - DNA, 378 bp, Homo sapiens; identical to SEQ ID NO: 4654
  misc_feature 124, 125, 217: n = A,T,C or G

SEQ ID NO: 10954 - DNA, 310 bp, Homo sapiens; identical to SEQ ID NO: 4655

SEQ ID NO: 10955 - DNA, 392 bp, Homo sapiens; identical to SEQ ID NO: 4656
  misc_feature 168, 225, 288, 311, 339: n = A,T,C or G

SEQ ID NO: 10956 - DNA, 485 bp, Homo sapiens; identical to SEQ ID NO: 4657

SEQ ID NO: 10957 - DNA, 614 bp, Homo sapiens; identical to SEQ ID NO: 4658
  misc_feature 432, 457, 487, 524, 526, 565: n = A,T,C or G

SEQ ID NO: 10958 - DNA, 316 bp, Homo sapiens; identical to SEQ ID NO: 4659

SEQ ID NO: 10959 - DNA, 397 bp, Homo sapiens; identical to SEQ ID NO: 4660
  misc_feature 150, 185, 216, 226, 260, 278, 314, 320, 346, 347, 360, 369,379, 381, 396: n = A,T,C or G

SEQ ID NO: 10960 - DNA, 390 bp, Homo sapiens; identical to SEQ ID NO: 4661

SEQ ID NO: 10961 - DNA, 324 bp, Homo sapiens; identical to SEQ ID NO: 4662

SEQ ID NO: 10962 - DNA, 630 bp, Homo sapiens; identical to SEQ ID NO: 4663
  misc_feature 520, 541: n = A,T,C or G

SEQ ID NO: 10963 - DNA, 297 bp, Homo sapiens; identical to SEQ ID NO: 4664

SEQ ID NO: 10964 - DNA, 426 bp, Homo sapiens; identical to SEQ ID NO: 4665

SEQ ID NO: 10965 - DNA, 360 bp, Homo sapiens; identical to SEQ ID NO: 4666
  misc_feature 131, 132, 133, 136, 140, 141, 143, 144, 146, 227, 307, 339: n = A,T,C or G

SEQ ID NO: 10966 - DNA, 166 bp, Homo sapiens; identical to SEQ ID NO: 4667
  misc_feature 28, 31, 33, 40, 41, 42, 44, 46, 56, 81, 124, 129, 136: n = A,T,C or G

SEQ ID NO: 10967 - DNA, 341 bp, Homo sapiens; identical to SEQ ID NO: 4668
  misc_feature 151, 188, 189, 231, 243, 248, 279, 314: n = A,T,C or G

SEQ ID NO: 10968 - DNA, 142 bp, Homo sapiens; identical to SEQ ID NO: 4669

SEQ ID NO: 10969 - DNA, 618 bp, Homo sapiens; identical to SEQ ID NO: 4670
  misc_feature 371, 395, 434, 441, 444, 463, 464, 498, 532, 558, 600: n = A,T,C or G

SEQ ID NO: 10970 - DNA, 350 bp, Homo sapiens; identical to SEQ ID NO: 4671

SEQ ID NO: 10971 - DNA, 317 bp, Homo sapiens; identical to SEQ ID NO: 4672

SEQ ID NO: 10972 - DNA, 526 bp, Homo sapiens; identical to SEQ ID NO: 4673

SEQ ID NO: 10973 - DNA, 492 bp, Homo sapiens; identical to SEQ ID NO: 4674
  misc_feature 33, 40, 42, 51, 52, 94, 107, 115, 134, 146, 170, 179, 188,206, 217, 219, 245, 247, 249, 269, 292, 306, 309, 330, 333,343, 353, 361, 364, 375, 385, 399, 477, 492: n = A,T,C or G

SEQ ID NO: 10974 - DNA, 577 bp, Homo sapiens; identical to SEQ ID NO: 4675
  misc_feature 397, 445, 496, 497, 555: n = A,T,C or G

SEQ ID NO: 10975 - DNA, 556 bp, Homo sapiens; identical to SEQ ID NO: 4676
  misc_feature 115, 116, 117, 138, 140, 141, 154, 155, 156, 158, 159, 164,167, 170, 171, 187, 192, 204, 207, 213, 222, 227, 229, 243,245, 247, 256, 260, 263, 265, 269, 280, 285, 288, 290, 291,295, 304, 309, 311, 314, 341, 342, 344, 347, 353, 355: n = A,T,C or G
  misc_feature 356, 358, 384, 385, 387, 388, 389, 390, 391, 392, 393, 396,397, 398, 401, 403, 405, 408, 410, 411, 414, 415, 420, 422,429, 453, 454, 455, 459, 460, 461, 463, 464, 466, 470, 471,472, 473, 474, 475, 476, 477, 478, 479, 480, 481, 482: n = A,T,C or G
  misc_feature 483, 484, 488, 489, 490, 492, 493, 494, 495, 496, 497, 498,499, 500, 501, 503, 505, 506, 507, 508, 509, 510, 511, 525,526, 527, 528, 529, 531, 532, 541, 543: n = A,T,C or G

SEQ ID NO: 10976 - DNA, 216 bp, Homo sapiens; identical to SEQ ID NO: 4677
  misc_feature 59, 65, 80, 102, 104, 111, 119, 130, 134, 143, 148, 149,160, 163, 167, 173, 186, 192, 203, 204, 207, 211, 212: n = A,T,C or G

SEQ ID NO: 10977 - DNA, 410 bp, Homo sapiens; identical to SEQ ID NO: 4678
  misc_feature 52, 144, 145, 157, 160, 163, 185, 186, 187, 188, 189, 191,196, 199, 209, 212, 213, 214, 215, 231, 246, 250, 251, 252,254, 279, 283, 284, 285, 288, 294, 295, 296, 298, 300, 301,303, 304, 305, 308, 312, 315, 316, 318, 323, 342, 348: n = A,T,C or G
  misc_feature 349, 351, 353, 358, 376, 385, 386, 396, 399, 402: n = A,T,C or G

SEQ ID NO: 10978 - DNA, 782 bp, Homo sapiens; identical to SEQ ID NO: 4679
  misc_feature 461, 465, 480, 532, 552, 601, 605, 609, 617, 629, 646, 651,653, 660, 662, 684, 704, 705, 711, 731, 753, 760, 768: n = A,T,C or G

SEQ ID NO: 10979 - DNA, 377 bp, Homo sapiens; identical to SEQ ID NO: 4680
  misc_feature 24, 30, 57, 182, 183, 184, 198, 199, 200, 201, 208, 209,210, 211, 212, 213, 214, 215, 216, 217, 218, 221, 223, 232,233, 234, 244, 262, 264, 286, 287, 301, 302, 318, 319, 329,339, 358, 360, 361, 368: n = A,T,C or G

SEQ ID NO: 10980 - DNA, 596 bp, Homo sapiens; identical to SEQ ID NO: 4681

SEQ ID NO: 10981 - DNA, 342 bp, Homo sapiens; identical to SEQ ID NO: 4682
  misc_feature 89, 181, 203, 204, 225, 232, 257, 287, 315, 319, 322, 335: n = A,T,C or G

SEQ ID NO: 10982 - DNA, 303 bp, Homo sapiens; identical to SEQ ID NO: 4683

SEQ ID NO: 10983 - DNA, 714 bp, Homo sapiens; identical to SEQ ID NO: 4684
  misc_feature 55, 105, 115, 116, 133, 162, 172, 173, 174, 175, 192, 201,207, 215, 216, 221, 224, 226, 231, 232, 250, 261, 265, 268,270, 271, 276, 297, 304, 305, 319, 325, 326, 337, 342, 343,348, 355, 365, 374, 377, 383, 392, 399, 400, 412, 415: n = A,T,C or G
  misc_feature 423, 425, 427, 428, 429, 431, 433, 434, 436, 440, 442, 454,458, 466, 467, 479, 481, 485, 499, 529, 530, 533, 535, 544,545, 556, 560, 563, 565, 575, 581, 583, 586, 588, 592, 596,600, 602, 606, 611, 620, 633, 635, 637, 640, 642, 649: n = A,T,C or G
  misc_feature 651, 655, 675, 676, 685, 687, 690, 691, 702: n = A,T,C or G

SEQ ID NO: 10984 - DNA, 526 bp, Homo sapiens; identical to SEQ ID NO: 4685

SEQ ID NO: 10985 - DNA, 155 bp, Homo sapiens; identical to SEQ ID NO: 4686

SEQ ID NO: 10986 - DNA, 468 bp, Homo sapiens; identical to SEQ ID NO: 4687

SEQ ID NO: 10987 - DNA, 345 bp, Homo sapiens; identical to SEQ ID NO: 4688
  misc_feature 97, 103, 104, 105, 106, 116, 117, 118, 119, 122, 123, 136,137, 138, 139, 144, 146, 148, 149, 150, 152, 153, 157, 168,178, 180, 182, 186, 197, 200, 225, 232, 259, 275, 283: n = A,T,C or G

SEQ ID NO: 10988 - DNA, 542 bp, Homo sapiens; identical to SEQ ID NO: 4689
  misc_feature 303, 309, 316, 325, 333, 355, 364, 366, 372, 386, 393, 396,397, 403, 404, 412, 423, 428, 429, 438, 442, 445, 456, 463,483, 514, 520: n = A,T,C or G

SEQ ID NO: 10989 - DNA, 610 bp, Homo sapiens; identical to SEQ ID NO: 4690
  misc_feature 158, 581, 584: n = A,T,C or G

SEQ ID NO: 10990 - DNA, 334 bp, Homo sapiens; identical to SEQ ID NO: 4691

SEQ ID NO: 10991 - DNA, 498 bp, Homo sapiens; identical to SEQ ID NO: 4692

SEQ ID NO: 10992 - DNA, 589 bp, Homo sapiens; identical to SEQ ID NO: 4693
  misc_feature 235, 423, 446, 457, 482, 500, 524, 525, 539, 551, 565, 584: n = A,T,C or G

SEQ ID NO: 10993 - DNA, 426 bp, Homo sapiens; identical to SEQ ID NO: 4694
  misc_feature 54, 89, 98, 105, 106, 114, 124, 128, 129, 135, 140, 144,147, 152, 153, 155, 156, 163, 167, 168, 169, 179, 180, 181,182, 188, 193, 194, 200, 203, 204, 205, 206, 207, 212, 213,214, 220, 221, 222, 223, 232, 234, 246, 251, 253, 254: n = A,T,C or G
  misc_feature 255, 262, 267, 270, 271, 272, 276, 279, 280, 281, 282, 287,290, 291, 297, 306, 308, 309, 310, 322, 324, 325, 328, 333,337, 338, 345, 346, 347, 348, 351, 352, 353, 358, 359, 360,361, 362, 368, 369, 385, 387, 390, 391, 392, 393, 402: n = A,T,C or G
  misc_feature 411, 417, 424: n = A,T,C or G

SEQ ID NO: 10994 - DNA, 594 bp, Homo sapiens; identical to SEQ ID NO: 4695
  misc_feature 59, 69, 73, 74, 75, 77, 80, 84, 87, 95, 96, 98, 104, 108,116, 119, 121, 122, 125, 126, 127, 130, 131, 132, 134, 140,143, 148, 149, 160, 167, 172, 173, 174, 178, 179, 183, 184,188, 191, 192, 195, 196, 199, 202, 208, 210, 216, 217: n = A,T,C or G
  misc_feature 218, 219, 225, 231, 237, 238, 241, 249, 250, 257, 264, 267,269, 281, 285, 288, 289, 295, 296, 299, 300, 301, 302, 303,305, 315, 316, 322, 323, 324, 327, 328, 329, 332, 337, 345,357, 366, 367, 368, 369, 370, 372, 374, 378, 379, 394: n = A,T,C or G
  misc_feature 398, 405, 407, 417, 418, 432, 434, 435, 452, 453, 455, 460,477, 478, 479, 487, 488, 491, 493, 500, 501, 508, 527, 559,564: n = A,T,C or G

SEQ ID NO: 10995 - DNA, 281 bp, Homo sapiens; identical to SEQ ID NO: 4696
  misc_feature 85, 168, 250, 253: n = A,T,C or G

SEQ ID NO: 10996 - DNA, 449 bp, Homo sapiens; identical to SEQ ID NO: 4697

SEQ ID NO: 10997 - DNA, 333 bp, Homo sapiens; identical to SEQ ID NO: 4698
  misc_feature 50, 51, 111, 120, 127, 130, 131, 132, 138, 140, 141, 142,143, 149, 157, 160, 162, 171, 172, 173, 182, 185, 186, 188,190, 192, 202, 206, 208, 209, 210, 212, 214, 219, 220, 227,228, 229, 230, 240, 242, 259, 261, 262, 264, 270, 274: n = A,T,C or G
  misc_feature 275, 278, 279, 282, 283, 284, 285, 289, 292, 293, 302, 303,304, 306, 308, 312, 321: n = A,T,C or G

SEQ ID NO: 10998 - DNA, 645 bp, Homo sapiens; identical to SEQ ID NO: 4699
  misc_feature 52, 102, 104, 105, 106, 116, 117, 118, 119, 126, 127, 134,150, 156, 159, 178, 189, 191, 192, 198, 199, 200, 201, 207,214, 217, 232, 233, 235, 243, 244, 253, 254, 255, 258, 264,265, 266, 273, 286, 294, 297, 303, 309, 310, 311, 312: n = A,T,C or G
  misc_feature 315, 316, 317, 322, 325, 332, 346, 347, 350, 351, 353, 354,355, 360, 362, 363, 365, 367, 372, 381, 382, 383, 399, 400,405, 415, 416, 420, 435, 441, 453, 462, 463, 464, 467, 481,497, 516, 518, 531, 537, 539, 565, 596, 599, 607, 609: n = A,T,C or G
  misc_feature 642: n = A,T,C or G

SEQ ID NO: 10999 - DNA, 476 bp, Homo sapiens; identical to SEQ ID NO: 4700
  misc_feature 133, 137, 138, 141, 145, 157, 160, 161, 167, 170, 175, 177,178, 196, 197, 198, 204, 206, 207, 220, 226, 227, 228, 231,232, 233, 236, 237, 260, 263, 276, 280, 283, 284, 291, 310,313, 315, 318, 320, 321, 322, 324, 327, 328, 343, 344: n = A,T,C or G
  misc_feature 345, 346, 348, 357, 360, 365, 366, 367, 368, 370, 371, 372,376, 378, 382, 387, 388, 390, 391, 392, 394, 395, 396, 397,398, 401, 413, 414, 424, 425, 427, 428, 432, 433, 436, 437,438, 443, 450, 452, 454, 455, 456, 457, 458, 459, 461: n = A,T,C or G
  misc_feature 469: n = A,T,C or G

SEQ ID NO: 11000 - DNA, 702 bp, Homo sapiens; identical to SEQ ID NO: 4701
  misc_feature 557, 602, 615, 645, 662, 672, 676, 679: n = A,T,C or G

SEQ ID NO: 11001 - DNA, 417 bp, Homo sapiens; identical to SEQ ID NO: 4702

SEQ ID NO: 11002 - DNA, 218 bp, Homo sapiens; identical to SEQ ID NO: 4703
  misc_feature 17, 27, 109, 112, 142, 147, 155, 156, 157, 172, 173, 174,182, 183, 186, 187, 198, 200, 201: n = A,T,C or G

SEQ ID NO: 11003 - DNA, 296 bp, Homo sapiens; identical to SEQ ID NO: 4704
  misc_feature 1, 27, 69, 96, 169, 197, 209, 220, 224, 226, 231: n = A,T,C or G

SEQ ID NO: 11004 - DNA, 464 bp, Homo sapiens; identical to SEQ ID NO: 4705
  misc_feature 420, 450: n = A,T,C or G

SEQ ID NO: 11005 - DNA, 429 bp, Homo sapiens; identical to SEQ ID NO: 4706

SEQ ID NO: 11006 - DNA, 525 bp, Homo sapiens; identical to SEQ ID NO: 4707
  misc_feature 61, 146, 156, 312, 328, 329, 352, 358, 370, 420, 489, 498,517: n = A,T,C or G

SEQ ID NO: 11007 - DNA, 311 bp, Homo sapiens; identical to SEQ ID NO: 4708
  misc_feature 70, 77, 131, 144, 155, 189, 197, 209, 229: n = A,T,C or G

SEQ ID NO: 11008 - DNA, 465 bp, Homo sapiens; identical to SEQ ID NO: 4709
  misc_feature 399: n = A,T,C or G

SEQ ID NO: 11009 - DNA, 380 bp, Homo sapiens; identical to SEQ ID NO: 4710
  misc_feature 112, 133: n = A,T,C or G

SEQ ID NO: 11010 - DNA, 368 bp, Homo sapiens; identical to SEQ ID NO: 4711
  misc_feature 204: n = A,T,C or G

SEQ ID NO: 11011 - DNA, 236 bp, Homo sapiens; identical to SEQ ID NO: 4713
  misc_feature 204, 210, 234: n = A,T,C or G

SEQ ID NO: 11012 - DNA, 282 bp, Homo sapiens; identical to SEQ ID NO: 4714
  misc_feature 96, 130, 154, 261: n = A,T,C or G

SEQ ID NO: 11013 - DNA, 543 bp, Homo sapiens; identical to SEQ ID NO: 4715
  misc_feature 507, 524, 525, 529, 543: n = A,T,C or G

SEQ ID NO: 11014 - DNA, 333 bp, Homo sapiens; identical to SEQ ID NO: 4716
  misc_feature 312: n = A,T,C or G

SEQ ID NO: 11015 - DNA, 258 bp, Homo sapiens; identical to SEQ ID NO: 4717
  misc_feature 31, 56, 58, 105, 106, 108, 109, 112, 113, 114, 116, 117,119, 125, 132, 143, 149, 150, 153, 154, 155, 156, 157, 158,160, 166, 170, 182, 194, 196, 206, 223, 227, 228, 229, 232,233, 235, 236, 238, 239, 244: n = A,T,C or G

SEQ ID NO: 11016 - DNA, 362 bp, Homo sapiens; identical to SEQ ID NO: 4718
  misc_feature 142, 182, 222, 227, 250, 260, 261, 262, 273, 299, 328, 336,360: n = A,T,C or G

SEQ ID NO: 11017 - DNA, 403 bp, Homo sapiens; identical to SEQ ID NO: 4719
  misc_feature 28, 31: n = A,T,C or G

SEQ ID NO: 11018 - DNA, 315 bp, Homo sapiens; identical to SEQ ID NO: 4720
  misc_feature 293: n = A,T,C or G

SEQ ID NO: 11019 - DNA, 567 bp, Homo sapiens; identical to SEQ ID NO: 4721
  misc_feature 446, 452, 469, 481, 483, 512, 518, 525, 547, 554: n = A,T,C or G

SEQ ID NO: 11020 - DNA, 439 bp, Homo sapiens; identical to SEQ ID NO: 4722
  misc_feature 24, 286, 341, 366, 373, 391, 393, 394, 437: n = A,T,C or G

SEQ ID NO: 11021 - DNA, 500 bp, Homo sapiens; identical to SEQ ID NO: 4723
  misc_feature 337, 360, 376, 418, 426, 459, 472, 483: n = A,T,C or G

SEQ ID NO: 11022 - DNA, 511 bp, Homo sapiens; identical to SEQ ID NO: 4724
  misc_feature 32, 33, 38, 82, 86, 96, 102, 112, 113, 115, 127, 139, 143,152, 156, 164, 291, 307, 315, 324, 342, 343, 347, 348, 352,357, 375, 377, 391, 394, 407, 410, 414, 415, 417, 419, 469: n = A,T,C or G

SEQ ID NO: 11023 - DNA, 415 bp, Homo sapiens; identical to SEQ ID NO: 4725
  misc_feature 5, 101: n = A,T,C or G

SEQ ID NO: 11024 - DNA, 723 bp, Homo sapiens; identical to SEQ ID NO: 4726
  misc_feature 56, 57, 59, 137, 147, 148, 156, 162, 167, 169, 173, 189,200, 202, 214, 223, 225, 227, 231, 239, 240, 248, 257, 259,260, 266, 270, 273, 274, 275, 277, 278, 280, 283, 287, 295,306, 311, 313, 317, 340, 344, 351, 353, 361, 367, 370: n = A,T,C or G
  misc_feature 371, 378, 379, 381, 400, 403, 406, 407, 416, 421, 428, 431,434, 475, 476, 479, 480, 482, 483, 491, 515, 518, 520, 522,528, 529, 533, 535, 536, 558, 561, 578, 581, 586, 588, 589,593, 597, 603, 615, 618, 627, 639, 643, 645, 653, 658: n = A,T,C or G
  misc_feature 686, 688, 689, 690, 692, 694, 695, 696, 697, 698, 699, 700,701, 703, 704, 706, 711, 713, 714: n = A,T,C or G

SEQ ID NO: 11025 - DNA, 447 bp, Homo sapiens; identical to SEQ ID NO: 4727
  misc_feature 47, 53, 57, 58, 67, 74, 82, 84, 85, 87, 111, 114, 136, 137,139, 145, 155, 157, 160, 172, 179, 224, 229, 236, 242, 245,247, 248, 250, 253, 255, 257, 259, 281, 302, 303, 384, 399,418, 420, 421, 423, 433, 435, 441: n = A,T,C or G

SEQ ID NO: 11026 - DNA, 344 bp, Homo sapiens; identical to SEQ ID NO: 4729
  misc_feature 5, 10, 23, 33, 47, 87, 96, 203, 225, 247, 248, 256, 257,262, 268, 290, 292, 301, 302, 320, 332, 334: n = A,T,C or G

SEQ ID NO: 11027 - DNA, 369 bp, Homo sapiens; identical to SEQ ID NO: 4730
  misc_feature 29, 30, 32, 34, 35, 36, 50, 51, 57, 58, 60, 61, 62, 65, 69,70, 75, 76, 82, 86, 89, 90, 94, 96, 98, 99, 100, 101, 104,107, 108, 112, 116, 117, 121, 122, 123, 126, 129, 131, 134,142, 145, 147, 153, 155, 157, 162, 172, 199, 201, 205: n = A,T,C or G
  misc_feature 213, 220, 234, 238, 248, 256, 258, 260, 265, 341: n = A,T,C or G

SEQ ID NO: 11028 - DNA, 422 bp, Homo sapiens; identical to SEQ ID NO: 4731

SEQ ID NO: 11029 - DNA, 658 bp, Homo sapiens; identical to SEQ ID NO: 4732
  misc_feature 6, 86, 137, 146, 167, 173, 174, 178, 184, 190, 191, 193,197, 212, 220, 224, 226, 231, 238, 239, 240, 244, 245, 247,248, 250, 252, 255, 259, 263, 268, 272, 273, 279, 280, 283,285, 290, 291, 293, 296, 304, 305, 307, 308, 311, 312: n = A,T,C or G
  misc_feature 319, 321, 322, 326, 327, 330, 332, 337, 341, 347, 349, 353,358, 360, 365, 368, 369, 385, 387, 392, 396, 493, 495, 551,556, 563, 645, 655: n = A,T,C or G

SEQ ID NO: 11030 - DNA, 358 bp, Homo sapiens; identical to SEQ ID NO: 4733
  misc_feature 78, 85, 103, 119, 146, 150, 151, 153, 155, 160, 162, 164,166, 171, 175, 177, 179, 181, 183, 188, 201, 219, 225, 230,244, 246, 255, 256, 264, 272, 277, 279, 284, 289, 291, 303,311, 326, 347: n = A,T,C or G

SEQ ID NO: 11031 - DNA, 634 bp, Homo sapiens; identical to SEQ ID NO: 4734
  misc_feature 15, 16, 17, 21, 532, 535, 539, 549, 550, 551, 552, 553, 554,555, 556, 557, 558, 559, 560, 561, 562, 563, 564, 565, 566,567, 568, 569, 570, 571, 572, 573, 574, 575, 576, 577, 578,579, 580, 581: n = A,T,C or G

SEQ ID NO: 11032 - DNA, 324 bp, Homo sapiens; identical to SEQ ID NO: 4735

SEQ ID NO: 11033 - DNA, 490 bp, Homo sapiens; identical to SEQ ID NO: 4736
  misc_feature 23, 29, 33, 83, 117, 127, 132, 136, 158, 163, 172, 192, 220,221, 268, 272, 283, 288, 290, 299, 303, 312, 343, 344, 354,414, 417, 418: n = A,T,C or G

SEQ ID NO: 11034 - DNA, 390 bp, Homo sapiens; identical to SEQ ID NO: 4737

SEQ ID NO: 11035 - DNA, 644 bp, Homo sapiens; identical to SEQ ID NO: 4738
  misc_feature 14, 65, 66, 118, 119, 121, 123, 158, 219, 227, 232, 311,325, 328, 339, 343, 358, 371, 390, 393, 423, 433, 448, 452,456, 476, 483, 515, 521, 535, 552, 558, 559, 578, 580, 584,585, 587, 595, 597, 602, 614, 619, 620, 622: n = A,T,C or G

SEQ ID NO: 11036 - DNA, 664 bp, Homo sapiens; identical to SEQ ID NO: 4739
  misc_feature 53, 54, 159, 161, 174, 177, 178, 180, 182, 185, 212, 215,216, 219, 220, 226, 237, 247, 248, 265, 269, 278, 281, 283,289, 294, 298, 299, 300, 301, 302, 304, 305, 307, 308, 316,327, 333, 334, 335, 336, 339, 343, 344, 345, 348, 368: n = A,T,C or G
  misc_feature 377, 383, 386, 388, 390, 409, 429, 431, 433, 439, 447, 450,452, 460, 462, 473, 474, 475, 477, 484, 486, 508, 509, 510,511, 513, 514, 515, 518, 519, 520, 522, 525, 528, 530, 532,533, 541, 542, 543, 544, 547, 550, 552, 561, 564, 570: n = A,T,C or G
  misc_feature 573, 575, 578, 584, 600, 601, 603, 606, 607, 616, 623, 625,626, 642: n = A,T,C or G

SEQ ID NO: 11037 - DNA, 466 bp, Homo sapiens; identical to SEQ ID NO: 4740
  misc_feature 15, 128, 233, 241, 302, 308, 318, 331, 336, 340, 341, 343,349, 354, 357, 358, 361, 395, 402, 408, 417, 421, 423, 429,441, 444, 450: n = A,T,C or G

SEQ ID NO: 11038 - DNA, 549 bp, Homo sapiens; identical to SEQ ID NO: 4741
  misc_feature 527, 529: n = A,T,C or G

SEQ ID NO: 11039 - DNA, 336 bp, Homo sapiens; identical to SEQ ID NO: 4742
  misc_feature 25, 117, 118, 119, 134, 151, 154, 155, 156, 157, 158, 159,160, 171, 174, 190, 204, 209, 211, 215, 220, 253, 254, 267,268, 269, 280, 281, 282, 291, 293, 294, 295, 296, 298, 299,310, 311, 315, 317, 326, 327, 328, 329: n = A,T,C or G

SEQ ID NO: 11040 - DNA, 370 bp, Homo sapiens; identical to SEQ ID NO: 4743
  misc_feature 139, 141, 167, 168, 182, 183, 188, 190, 191, 197, 198, 199,200, 201, 204, 205, 213, 222, 227, 228, 232, 238, 240, 241,242, 243, 244, 248, 249, 255, 256, 258, 272, 273, 275, 276,277, 278, 279, 291, 301, 302, 306, 307, 321, 324, 325: n = A,T,C or G
  misc_feature 326, 330, 331, 344, 347, 351: n = A,T,C or G

SEQ ID NO: 11041 - DNA, 252 bp, Homo sapiens; identical to SEQ ID NO: 4744
  misc_feature 252: n = A,T,C or G

SEQ ID NO: 11042 - DNA, 686 bp, Homo sapiens; identical to SEQ ID NO: 4745
  misc_feature 7, 51, 52, 59, 60, 61, 62, 64, 65, 95, 97, 100, 112, 113,121, 127, 128, 131, 132, 133, 139, 143, 148, 152, 160, 161,162, 165, 171, 173, 185, 189, 192, 194, 195, 198, 204, 215,219, 230, 231, 234, 235, 239, 241, 253, 257, 261, 262: n = A,T,C or G
  misc_feature 263, 264, 280, 283, 295, 296, 300, 305, 313, 316, 325, 344,350, 352, 353, 356, 365, 377, 385, 402, 422, 423, 430, 431,439, 449, 462, 465, 482, 485, 496, 500, 507, 512, 514, 519,521, 523, 524, 534, 535, 559, 569, 570, 577, 583, 585: n = A,T,C or G
  misc_feature 586, 592, 599, 621, 626, 627, 628, 633, 635, 641, 665, 672,674, 677: n = A,T,C or G

SEQ ID NO: 11043 - DNA, 266 bp, Homo sapiens; identical to SEQ ID NO: 4746
  misc_feature 76, 83, 84, 85, 86, 87, 88, 89, 90, 92, 107, 112, 114, 120,121, 124, 131, 145, 150, 155, 156, 164, 165, 172, 180, 183,188, 214, 217, 220, 221, 222, 226, 227, 232, 235, 242, 248,254, 255: n = A,T,C or G

SEQ ID NO: 11044 - DNA, 625 bp, Homo sapiens; identical to SEQ ID NO: 4747
  misc_feature 294, 536, 538, 616: n = A,T,C or G

SEQ ID NO: 11045 - DNA, 282 bp, Homo sapiens; identical to SEQ ID NO: 4748

SEQ ID NO: 11046 - DNA, 450 bp, Homo sapiens; identical to SEQ ID NO: 4749
  misc_feature 165, 369, 430: n = A,T,C or G

SEQ ID NO: 11047 - DNA, 272 bp, Homo sapiens; identical to SEQ ID NO: 4750
  misc_feature 109, 112, 113, 114, 127, 128, 130, 148, 149, 151, 153, 155,160, 172, 180, 181, 186, 187, 188, 194, 198, 229, 234, 243,250, 251, 263: n = A,T,C or G

SEQ ID NO: 11048 - DNA, 771 bp, Homo sapiens; identical to SEQ ID NO: 4751
  misc_feature 581, 664, 669, 689, 707, 724, 739, 746, 759: n = A,T,C or G

SEQ ID NO: 11049 - DNA, 325 bp, Homo sapiens; identical to SEQ ID NO: 4752
  misc_feature 132: n = A,T,C or G

SEQ ID NO: 11050 - DNA, 253 bp, Homo sapiens; identical to SEQ ID NO: 4753
  misc_feature 179, 183, 192, 199, 235, 236: n = A,T,C or G

SEQ ID NO: 11051 - DNA, 434 bp, Homo sapiens; identical to SEQ ID NO: 4754
  misc_feature 38, 46, 100, 115, 119, 125, 128, 137, 147, 148, 151, 159,173, 179, 181, 183, 198, 206, 219, 226, 235, 240, 246, 256,260, 263, 279, 288, 293, 297, 303, 318, 322, 324, 328, 344,348, 354, 361, 368, 384, 387, 389, 390, 395, 396, 401: n = A,T,C or G
  misc_feature 402, 408, 416, 420, 421: n = A,T,C or G

SEQ ID NO: 11052 - DNA, 574 bp, Homo sapiens; identical to SEQ ID NO: 4755
  misc_feature 33, 57, 91, 97, 108, 113, 118, 123, 128, 129, 132, 135, 139,140, 149, 150, 161, 162, 169, 182, 191, 203, 205, 224, 243,246, 249, 256, 260, 269, 306, 325, 329, 339, 340, 344, 358,366, 387, 404, 409, 412, 421, 433, 436, 443, 457: n = A,T,C or G
  misc_feature 473, 476, 480, 482, 485, 505, 506, 510, 519, 521, 524, 531,534, 537, 538, 553, 555, 559, 562: n = A,T,C or G

SEQ ID NO: 11053 - DNA, 732 bp, Homo sapiens; identical to SEQ ID NO: 4756
  misc_feature 463, 473, 498, 549, 557, 599, 629, 631, 655, 675, 681, 717: n = A,T,C or G

SEQ ID NO: 11054 - DNA, 410 bp, Homo sapiens; identical to SEQ ID NO: 4757

SEQ ID NO: 11055 - DNA, 701 bp, Homo sapiens; identical to SEQ ID NO: 4758
  misc_feature 487, 515, 607, 621, 623, 633, 643, 660, 675, 681, 685, 689,690: n = A,T,C or G

SEQ ID NO: 11056 - DNA, 294 bp, Homo sapiens; identical to SEQ ID NO: 4759
  misc_feature 276: n = A,T,C or G

SEQ ID NO: 11057 - DNA, 573 bp, Homo sapiens; identical to SEQ ID NO: 4760
  misc_feature 535, 559: n = A,T,C or G

SEQ ID NO: 11058 - DNA, 300 bp, Homo sapiens; identical to SEQ ID NO: 4761

SEQ ID NO: 11059 - DNA, 469 bp, Homo sapiens; identical to SEQ ID NO: 4762
  misc_feature 26, 34, 116, 164, 183, 215, 233, 238, 242, 246, 276, 280,284, 295, 319, 320, 325, 327, 328, 350, 356, 363, 369, 382,383, 386, 395, 408, 411, 412, 425, 429, 439, 445, 448, 451: n = A,T,C or G

SEQ ID NO: 11060 - DNA, 584 bp, Homo sapiens; identical to SEQ ID NO: 4763
  misc_feature 545, 551, 552: n = A,T,C or G

SEQ ID NO: 11061 - DNA, 235 bp, Homo sapiens; identical to SEQ ID NO: 4764

SEQ ID NO: 11062 - DNA, 179 bp, Homo sapiens; identical to SEQ ID NO: 4765
  misc_feature 76: n = A,T,C or G

SEQ ID NO: 11063 - DNA, 547 bp, Homo sapiens; identical to SEQ ID NO: 4766
  misc_feature 104, 169, 170, 172, 174, 175, 182, 183, 185, 186, 209, 210,211, 213, 214, 216, 217, 219, 229, 234, 235, 236, 240, 252,260, 262, 267, 274, 279, 283, 287, 288, 291, 294, 296, 316,320, 322, 323, 325, 326, 330, 335, 337, 342, 344, 345: n = A,T,C or G
  misc_feature 349, 352, 353, 354, 366, 372, 382, 385, 397, 407, 412, 414,422, 424, 426, 436, 437, 442, 455, 456, 457, 458, 461, 477,478, 479, 483, 485, 491, 504, 514, 531: n = A,T,C or G

SEQ ID NO: 11064 - DNA, 434 bp, Homo sapiens; identical to SEQ ID NO: 4767
  misc_feature 36, 137, 402: n = A,T,C or G

SEQ ID NO: 11065 - DNA, 259 bp, Homo sapiens; identical to SEQ ID NO: 4768
  misc_feature 59, 200, 219: n = A,T,C or G

SEQ ID NO: 11066 - DNA, 553 bp, Homo sapiens; identical to SEQ ID NO: 4769
  misc_feature 419, 467, 470, 487, 490, 495, 497, 498, 530, 531, 534: n = A,T,C or G

SEQ ID NO: 11067 - DNA, 237 bp, Homo sapiens; identical to SEQ ID NO: 4770
  misc_feature 228: n = A,T,C or G

SEQ ID NO: 11068 - DNA, 521 bp, Homo sapiens; identical to SEQ ID NO: 4771
  misc_feature 87, 97, 103, 104, 105, 111, 118, 119, 121, 122, 123, 130,134, 135, 139, 140, 141, 142, 147, 148, 149, 151, 152, 161,163, 167, 180, 181, 183, 184, 189, 190, 192, 194, 197, 202,203, 205, 206, 207, 226, 230, 232, 240, 241, 243, 246: n = A,T,C or G
  misc_feature 247, 250, 252, 262, 267, 268, 273, 274, 276, 279, 281, 282,284, 285, 290, 291, 292, 298, 306, 312, 313, 316, 324, 334,336, 359, 367, 375, 384, 389, 396, 406, 409, 411, 415, 416,417, 418, 419, 420, 446, 447, 448, 451, 452, 457, 468: n = A,T,C or G
  misc_feature 479, 480, 493, 496, 500, 501, 508: n = A,T,C or G

SEQ ID NO: 11069 - DNA, 326 bp, Homo sapiens; identical to SEQ ID NO: 4772

SEQ ID NO: 11070 - DNA, 566 bp, Homo sapiens; identical to SEQ ID NO: 4773
  misc_feature 140, 406, 408, 472, 505, 509, 514, 552, 557: n = A,T,C or G

SEQ ID NO: 11071 - DNA, 319 bp, Homo sapiens; identical to SEQ ID NO: 4774

SEQ ID NO: 11072 - DNA, 444 bp, Homo sapiens; identical to SEQ ID NO: 4775

SEQ ID NO: 11073 - DNA, 668 bp, Homo sapiens; identical to SEQ ID NO: 4776
  misc_feature 60, 61, 62, 63, 145, 162, 163, 168, 170, 171, 173, 174, 176,177, 178, 179, 182, 183, 184, 187, 188, 189, 196, 205, 209,213, 214, 215, 216, 219, 232, 234, 235, 237, 238, 245, 247,248, 249, 252, 253, 257, 258, 262, 265, 279, 298: n = A,T,C or G
  misc_feature 300, 311, 312, 320, 323, 325, 329, 331, 344, 345, 346, 349,351, 352, 355, 357, 358, 365, 366, 374, 387, 389, 390, 391,394, 416, 419, 425, 434, 437, 442, 443, 447, 449, 451, 453,457, 463, 467, 473, 478, 479, 484, 485, 486, 489, 490: n = A,T,C or G
  misc_feature 491, 494, 495, 496, 497, 498, 499, 500, 501, 503, 504, 505,506, 512, 515, 526, 528, 529, 533, 535, 539, 543, 546, 548,549, 554, 562, 567, 568, 577, 582, 589, 591, 598, 602, 604,614, 623, 624, 625, 633, 642, 643, 652, 654, 655, 657: n = A,T,C or G

SEQ ID NO: 11074 - DNA, 113 bp, Homo sapiens; identical to SEQ ID NO: 4777
  misc_feature 1, 22, 25, 26, 32, 34, 39, 45, 53, 90, 92: n = A,T,C or G

SEQ ID NO: 11075 - DNA, 148 bp, Homo sapiens; identical to SEQ ID NO: 4778
  misc_feature 31, 83, 87, 124: n = A,T,C or G

SEQ ID NO: 11076 - DNA, 591 bp, Homo sapiens; identical to SEQ ID NO: 4779
  misc_feature 523, 554, 569: n = A,T,C or G

SEQ ID NO: 11077 - DNA, 299 bp, Homo sapiens; identical to SEQ ID NO: 4780
  misc_feature 28, 30, 40, 44, 49, 62, 63, 64, 65, 66, 74, 79, 80, 84, 86,90, 96, 100, 101, 110, 116, 123, 126, 129, 133, 135, 139,146, 147, 149, 156, 164, 166, 169, 175, 176, 184, 186, 187,190, 192, 204, 205, 218, 224, 226, 227, 236, 244, 250: n = A,T,C or G
  misc_feature 254, 256, 257, 267, 268, 279, 281, 289: n = A,T,C or G

SEQ ID NO: 11078 - DNA, 423 bp, Homo sapiens; identical to SEQ ID NO: 4781
  misc_feature 401: n = A,T,C or G

SEQ ID NO: 11079 - DNA, 128 bp, Homo sapiens; identical to SEQ ID NO: 4782
  misc_feature 88, 108, 110, 111, 119: n = A,T,C or G

SEQ ID NO: 11080 - DNA, 494 bp, Homo sapiens; identical to SEQ ID NO: 4783
  misc_feature 100, 101, 113, 114, 115, 116, 118, 119, 120, 122, 123, 125,126, 127, 132, 145, 148, 154, 157, 158, 167, 168, 172, 186,187, 190, 192, 197, 215, 220, 243, 245, 273, 287, 292, 293,309, 315, 324, 349, 353, 358, 363, 370, 373, 374, 375: n = A,T,C or G
  misc_feature 376, 377, 378, 379, 393, 397, 401, 403, 413, 420, 421, 426,427, 428, 439, 446, 448, 456, 457, 458, 460, 463, 467, 468,472, 473, 474, 477, 482, 483, 488: n = A,T,C or G

SEQ ID NO: 11081 - DNA, 168 bp, Homo sapiens; identical to SEQ ID NO: 4784

SEQ ID NO: 11082 - DNA, 400 bp, Homo sapiens; identical to SEQ ID NO: 4785
  misc_feature 374: n = A,T,C or G

SEQ ID NO: 11083 - DNA, 417 bp, Homo sapiens; identical to SEQ ID NO: 4786

SEQ ID NO: 11084 - DNA, 293 bp, Homo sapiens; identical to SEQ ID NO: 4787

SEQ ID NO: 11085 - DNA, 535 bp, Homo sapiens; identical to SEQ ID NO: 4788
  misc_feature 494, 506: n = A,T,C or G

SEQ ID NO: 11086 - DNA, 562 bp, Homo sapiens; identical to SEQ ID NO: 4789
  misc_feature 38, 95, 162, 175, 177, 199, 210, 298, 309, 323, 331, 336,341, 344, 407, 431, 441, 468, 483, 489, 492, 495, 540: n = A,T,C or G

SEQ ID NO: 11087 - DNA, 343 bp, Homo sapiens; identical to SEQ ID NO: 4790

SEQ ID NO: 11088 - DNA, 845 bp, Homo sapiens; identical to SEQ ID NO: 4791
  misc_feature 140, 368, 416, 485, 504, 511, 514, 521, 528, 537, 570, 571,591, 610, 611, 612, 613, 614, 615, 616, 617, 619, 620, 621,622, 623, 627, 632, 638, 640, 644, 652, 658, 661, 677, 678,679, 681, 683, 685, 686, 687, 690, 693, 699, 701, 704: n = A,T,C or G
  misc_feature 705, 708, 715, 718, 719, 720, 721, 723, 724, 729, 735, 742,745, 752, 753, 755, 756, 758, 759, 760, 761, 762, 763, 764,765, 766, 767, 768, 769, 770, 771, 772, 773, 774, 779, 786,788, 789, 790, 793, 795, 797, 812, 821, 830, 836: n = A,T,C or G

SEQ ID NO: 11089 - DNA, 346 bp, Homo sapiens; identical to SEQ ID NO: 4792

SEQ ID NO: 11090 - DNA, 324 bp, Homo sapiens; identical to SEQ ID NO: 4793

SEQ ID NO: 11091 - DNA, 377 bp, Homo sapiens; identical to SEQ ID NO: 4794

SEQ ID NO: 11092 - DNA, 258 bp, Homo sapiens; identical to SEQ ID NO: 4795

SEQ ID NO: 11093 - DNA, 576 bp, Homo sapiens; identical to SEQ ID NO: 4796

SEQ ID NO: 11094 - DNA, 489 bp, Homo sapiens; identical to SEQ ID NO: 4797

SEQ ID NO: 11095 - DNA, 433 bp, Homo sapiens; identical to SEQ ID NO: 4798
  misc_feature 1, 54, 140, 143, 144, 145, 148, 149, 150, 151, 152, 158,161, 163, 164, 165, 167, 173, 181, 183, 184, 186, 187, 190,206, 209, 214, 223, 225, 261, 286, 287, 289, 295, 299, 308,309, 310, 311, 312, 314, 317, 318, 320, 325, 330, 331: n = A,T,C or G
  misc_feature 333, 337, 344, 349, 358, 366, 369, 376, 377, 379, 385, 398,416, 419, 432: n = A,T,C or G

SEQ ID NO: 11096 - DNA, 335 bp, Homo sapiens; identical to SEQ ID NO: 4799

SEQ ID NO: 11097 - DNA, 417 bp, Homo sapiens; identical to SEQ ID NO: 4800
  misc_feature 107, 117, 123, 132, 134, 136, 138, 139, 141, 144, 145, 146,147, 148, 159, 160, 162, 163, 164, 168, 174, 184, 230, 272,287, 315, 332, 374, 386, 399: n = A,T,C or G

SEQ ID NO: 11098 - DNA, 627 bp, Homo sapiens; identical to SEQ ID NO: 4801
  misc_feature 95, 96, 97, 98, 112, 116, 117, 118, 119, 124, 130, 145, 146,148, 149, 150, 151, 152, 161, 162, 163, 173, 180, 185, 188,189, 190, 195, 196, 197, 211, 213, 215, 235, 241, 242, 244,245, 246, 247, 258, 259, 268, 272, 275, 281, 283: n = A,T,C or G
  misc_feature 286, 300, 302, 303, 306, 307, 326, 334, 335, 336, 348, 350,354, 355, 357, 373, 374, 376, 377, 378, 402, 404, 406, 408,409, 412, 413, 414, 415, 417, 418, 419, 420, 421, 436, 437,439, 442, 445, 450, 453, 455, 457, 462, 466, 469, 476: n = A,T,C or G
  misc_feature 480, 491, 503, 504, 517, 519, 552, 556, 558, 559, 560, 561,570, 571, 573, 574, 575, 576, 577, 594, 597, 599, 600, 601,610, 612, 619, 620: n = A,T,C or G

SEQ ID NO: 11099 - DNA, 198 bp, Homo sapiens; identical to SEQ ID NO: 4802

SEQ ID NO: 11100 - DNA, 328 bp, Homo sapiens; identical to SEQ ID NO: 4803

SEQ ID NO: 11101 - DNA, 381 bp, Homo sapiens; identical to SEQ ID NO: 4804

SEQ ID NO: 11102 - DNA, 658 bp, Homo sapiens; identical to SEQ ID NO: 4805
  misc_feature 151, 162, 199, 215, 271, 293, 301, 406, 421, 434, 436, 439,446, 466, 479, 483, 531, 573, 583, 608, 614, 627: n = A,T,C or G

SEQ ID NO: 11103 - DNA, 666 bp, Homo sapiens; identical to SEQ ID NO: 4806
  misc_feature 116, 117, 118, 132, 140, 144, 146, 147, 148, 157, 158, 159,161, 166, 172, 174, 175, 179, 182, 192, 195, 196, 212, 214,234, 261, 262, 264, 267, 271, 279, 280, 284, 291, 293, 299,300, 302, 303, 304, 305, 308, 309, 320, 334, 346, 348: n = A,T,C or G
  misc_feature 350, 355, 356, 360, 363, 364, 372, 374, 375, 391, 408, 410,412, 413, 420, 422, 432, 435, 436, 437, 438, 451, 452, 456,466, 467, 475, 476, 480, 481, 484, 486, 491, 492, 497, 499,508, 509, 511, 516, 531, 535, 538, 540, 541, 552, 555: n = A,T,C or G
  misc_feature 556, 565, 567, 570, 592, 598, 601, 603, 605, 608, 609, 618,621, 624, 635, 648, 660, 661: n = A,T,C or G

SEQ ID NO: 11104 - DNA, 240 bp, Homo sapiens; identical to SEQ ID NO: 4807
  misc_feature 23, 92, 114, 135, 173, 203, 224: n = A,T,C or G

SEQ ID NO: 11105 - DNA, 577 bp, Homo sapiens; identical to SEQ ID NO: 4808
  misc_feature 495, 499, 518, 532, 536, 543, 547, 551, 554, 556, 558, 569,577: n = A,T,C or G

SEQ ID NO: 11106 - DNA, 453 bp, Homo sapiens; identical to SEQ ID NO: 4809
  misc_feature 58, 59, 116, 117, 118, 120, 122, 133, 135, 141, 142, 143,152, 153, 154, 155, 157, 161, 164, 166, 169, 170, 171, 172,173, 184, 192, 194, 195, 196, 207, 208, 210, 211, 214, 219,221, 222, 224, 241, 244, 245, 250, 251, 253, 255, 256: n = A,T,C or G
  misc_feature 257, 258, 259, 267, 268, 285, 286, 288, 289, 290, 292, 293,296, 297, 298, 301, 304, 317, 323, 324, 339, 342, 343, 347,348, 349, 365, 367, 368, 369, 373, 378, 384, 407, 408, 409,410, 413, 416, 418, 420, 435, 439, 440: n = A,T,C or G

SEQ ID NO: 11107 - DNA, 234 bp, Homo sapiens; identical to SEQ ID NO: 4810
  misc_feature 6, 87, 180, 203, 204, 207, 208, 209, 212, 213, 219, 225: n = A,T,C or G

SEQ ID NO: 11108 - DNA, 225 bp, Homo sapiens; identical to SEQ ID NO: 4811

SEQ ID NO: 11109 - DNA, 335 bp, Homo sapiens; identical to SEQ ID NO: 4812
  misc_feature 17, 20, 30, 329: n = A,T,C or G

SEQ ID NO: 11110 - DNA, 752 bp, Homo sapiens; identical to SEQ ID NO: 4813
  misc_feature 526, 591, 599, 604, 606, 611, 619, 626, 658, 684, 707, 719,730, 731, 733, 734, 741, 743, 744: n = A,T,C or G

SEQ ID NO: 11111 - DNA, 453 bp, Homo sapiens; identical to SEQ ID NO: 4814
  misc_feature 117, 139, 201, 252, 354, 368: n = A,T,C or G

SEQ ID NO: 11112 - DNA, 395 bp, Homo sapiens; identical to SEQ ID NO: 4815
  misc_feature 332, 351: n = A,T,C or G

SEQ ID NO: 11113 - DNA, 319 bp, Homo sapiens; identical to SEQ ID NO: 4816

SEQ ID NO: 11114 - DNA, 137 bp, Homo sapiens; identical to SEQ ID NO: 4817
  misc_feature 3, 39, 47, 72, 96, 137: n = A,T,C or G

SEQ ID NO: 11115 - DNA, 523 bp, Homo sapiens; identical to SEQ ID NO: 4818
  misc_feature 489, 506, 521: n = A,T,C or G

SEQ ID NO: 11116 - DNA, 247 bp, Homo sapiens; identical to SEQ ID NO: 4819
  misc_feature 26, 60, 61, 62, 74, 80, 83, 85, 86, 90, 93, 94, 104, 114,128, 129, 133, 137, 145, 146, 147, 149, 150, 151, 153, 154,176, 179, 186, 187, 190, 206, 207, 209, 212, 218, 219, 224,228, 229, 231: n = A,T,C or G

SEQ ID NO: 11117 - DNA, 377 bp, Homo sapiens; identical to SEQ ID NO: 4820
  misc_feature 33, 34, 85, 86, 97, 154, 157, 177, 201, 249, 306, 316, 376: n = A,T,C or G

SEQ ID NO: 11118 - DNA, 175 bp, Homo sapiens; identical to SEQ ID NO: 4821
  misc_feature 10, 13, 14, 15, 29, 31, 39, 40, 41, 81, 114, 137: n = A,T,C or G

SEQ ID NO: 11119 - DNA, 450 bp, Homo sapiens; identical to SEQ ID NO: 4822
  misc_feature 187, 247, 297, 308, 311, 341, 361, 363, 395, 405: n = A,T,C or G

SEQ ID NO: 11120 - DNA, 236 bp, Homo sapiens; identical to SEQ ID NO: 4823
  misc_feature 96, 114, 155, 194, 209: n = A,T,C or G

SEQ ID NO: 11121 - DNA, 683 bp, Homo sapiens; identical to SEQ ID NO: 4824
  misc_feature 64, 110, 148, 176, 189, 208, 227, 272, 295, 316, 319, 328,356, 357, 434, 461, 473, 499, 515, 541, 546, 578, 579, 581,596, 600, 603, 612, 621, 636, 638, 648, 653, 672: n = A,T,C or G

SEQ ID NO: 11122 - DNA, 221 bp, Homo sapiens; identical to SEQ ID NO: 4825

SEQ ID NO: 11123 - DNA, 435 bp, Homo sapiens; identical to SEQ ID NO: 4826

SEQ ID NO: 11124 - DNA, 206 bp, Homo sapiens; identical to SEQ ID NO: 4827
  misc_feature 205: n = A,T,C or G

SEQ ID NO: 11125 - DNA, 436 bp, Homo sapiens; identical to SEQ ID NO: 4828
  misc_feature 91, 142, 218, 250, 269, 311, 323, 347, 384: n = A,T,C or G

SEQ ID NO: 11126 - DNA, 491 bp, Homo sapiens; identical to SEQ ID NO: 4829
  misc_feature 113, 119, 128, 135, 136, 163, 165, 167, 183, 184, 185, 186,188, 189, 191, 192, 193, 194, 195, 196, 197, 198, 199, 200,201, 202, 203, 204, 205, 215, 216, 217, 223, 238, 247, 248,249, 250, 251, 258, 264, 265, 274, 285, 286, 288, 289: n = A,T,C or G
  misc_feature 290, 291, 292, 326, 327, 367, 374, 376, 377, 387, 392, 398,414, 415, 416, 421, 442, 443, 445, 446, 448, 449, 452, 453,454, 455, 461, 462, 463, 465, 468, 469, 487: n = A,T,C or G

SEQ ID NO: 11127 - DNA, 430 bp, Homo sapiens; identical to SEQ ID NO: 4830
  misc_feature 416: n = A,T,C or G

SEQ ID NO: 11128 - DNA, 324 bp, Homo sapiens; identical to SEQ ID NO: 4831

SEQ ID NO: 11129 - DNA, 321 bp, Homo sapiens; identical to SEQ ID NO: 4832

SEQ ID NO: 11130 - DNA, 777 bp, Homo sapiens; identical to SEQ ID NO: 4833
  misc_feature 54, 89, 104, 105, 106, 112, 115, 117, 121, 122, 123, 140,141, 142, 143, 147, 150, 153, 154, 155, 163, 166, 167, 168,169, 172, 175, 179, 180, 181, 182, 184, 190, 213, 216, 217,219, 230, 233, 240, 242, 247, 248, 250, 252, 253, 267: n = A,T,C or G
  misc_feature 274, 277, 284, 287, 301, 305, 306, 311, 313, 319, 328, 342,351, 353, 358, 367, 378, 381, 386, 387, 391, 404, 409, 413,414, 418, 424, 431, 432, 444, 453, 454, 458, 461, 462, 464,466, 467, 468, 469, 470, 472, 492, 495, 501, 507, 512: n = A,T,C or G
  misc_feature 519, 520, 522, 527, 529, 533, 534, 536, 537, 538, 544, 545,547, 548, 551, 557, 558, 560, 561, 562, 564, 565, 569, 575,585, 586, 588, 589, 599, 602, 603, 604, 605, 608, 609, 610,612, 615, 619, 620, 621, 628, 629, 630, 641, 650, 651: n = A,T,C or G
  misc_feature 652, 653, 656, 658, 661, 665, 666, 668, 669, 670, 671, 672,673, 674, 675, 676, 677, 678, 679, 681, 682, 683, 689, 692,694, 695, 698, 699, 704, 705, 706, 707, 708, 709, 710, 711,712, 713, 714, 715, 716, 718, 721, 726, 727, 729, 730: n = A,T,C or G
  misc_feature 731, 732, 733, 734, 735, 736, 737, 738, 739, 740, 741, 742,743, 744, 745, 746, 747, 748, 756, 758, 759, 760, 761, 763,764, 765: n = A,T,C or G

SEQ ID NO: 11131 - DNA, 259 bp, Homo sapiens; identical to SEQ ID NO: 4834

SEQ ID NO: 11132 - DNA, 843 bp, Homo sapiens; identical to SEQ ID NO: 4835
  misc_feature 283, 346, 352, 370, 389, 396, 460, 471, 484, 494, 523, 526,541, 578, 583, 598, 627, 635, 669, 682, 693, 714, 725, 735,737, 738, 751, 758, 761, 766, 768, 772, 803, 814, 835: n = A,T,C or G

SEQ ID NO: 11133 - DNA, 316 bp, Homo sapiens; identical to SEQ ID NO: 4836

SEQ ID NO: 11134 - DNA, 268 bp, Homo sapiens; identical to SEQ ID NO: 4837
  misc_feature 28, 30, 51, 66, 74, 79, 81, 82, 83, 88, 89, 91, 93, 94, 101,102, 103, 123, 127, 135, 136, 137, 138, 141, 142, 143, 144,148, 150, 155, 162, 163, 169, 171, 173, 176, 177, 178, 179,180, 181, 182, 183, 191, 192, 198, 199, 202, 203: n = A,T,C or G
  misc_feature 205, 209, 218, 219, 223, 224, 232, 233, 234, 236, 238, 239,243, 250, 263: n = A,T,C or G

SEQ ID NO: 11135 - DNA, 553 bp, Homo sapiens; identical to SEQ ID NO: 4838
  misc_feature 385, 513, 532: n = A,T,C or G

SEQ ID NO: 11136 - DNA, 727 bp, Homo sapiens; identical to SEQ ID NO: 4839
  misc_feature 95, 431, 648, 677, 681, 682, 683, 684, 685, 686, 687, 688,689, 690, 691, 692, 693, 694, 695, 696, 697, 698, 699, 700: n = A,T,C or G

SEQ ID NO: 11137 - DNA, 811 bp, Homo sapiens; identical to SEQ ID NO: 4840
  misc_feature 19, 29, 33, 35, 40, 42, 52, 61, 76, 79, 81, 92, 97, 111,113, 136, 148, 154, 160, 161, 162, 171, 231, 252, 272, 276,285, 288, 306, 308, 309, 311, 318, 322, 325, 330, 352, 354,358, 359, 400, 446, 475, 477, 481, 490, 498, 507, 512: n = A,T,C or G
  misc_feature 519, 529, 538, 543, 545, 549, 563, 571, 581, 590, 592, 597,598, 629, 630, 642, 650, 652, 670, 671, 674, 679, 684, 695,696, 703, 704, 705, 706, 712, 714, 715, 732, 734, 735, 742,743, 750, 752, 753, 754, 759, 772, 784: n = A,T,C or G

SEQ ID NO: 11138 - DNA, 642 bp, Homo sapiens; identical to SEQ ID NO: 4841
  misc_feature 502: n = A,T,C or G

SEQ ID NO: 11139 - DNA, 804 bp, Homo sapiens; identical to SEQ ID NO: 4842
  misc_feature 7, 33, 35, 277, 293, 301, 303, 305, 315, 320, 328, 333, 335,345, 347, 355, 371, 375, 378, 385, 411, 414, 419, 442, 451,455, 460, 467, 480, 501, 532, 568, 591, 594, 611, 623, 624,627, 642, 654, 664, 684, 685, 692, 694, 696, 710: n = A,T,C or G
  misc_feature 713, 717, 728, 736, 737, 741, 742, 755, 758, 761, 770, 775,776, 784, 788, 789, 790, 792, 795: n = A,T,C or G

SEQ ID NO: 11140 - DNA, 514 bp, Homo sapiens; identical to SEQ ID NO: 4843
  misc_feature 383, 486, 503: n = A,T,C or G

SEQ ID NO: 11141 - DNA, 299 bp, Homo sapiens; identical to SEQ ID NO: 4844
  misc_feature 146, 163, 175, 190, 191, 192, 195, 198, 199, 201, 202, 203,206, 213, 214, 217, 222, 224, 225, 226, 229, 232, 233, 239,246, 247, 249, 254, 255, 256, 264, 268, 274, 284, 286: n = A,T,C or G

SEQ ID NO: 11142 - DNA, 412 bp, Homo sapiens; identical to SEQ ID NO: 4845
  misc_feature 136, 222, 238, 310, 313, 347: n = A,T,C or G

SEQ ID NO: 11143 - DNA, 404 bp, Homo sapiens; identical to SEQ ID NO: 4846
  misc_feature 47, 48, 112, 114, 116, 117, 118, 121, 122, 123, 124, 126,127, 128, 129, 130, 138, 139, 140, 141, 142, 143, 144, 145,146, 147, 148, 151, 152, 155, 156, 159, 165, 171, 172, 177,178, 187, 189, 191, 229, 238, 256, 272, 280, 283, 293: n = A,T,C or G
  misc_feature 295, 297, 298, 304, 306, 307, 308, 309, 311, 312, 314, 318,319, 320, 325, 329, 330, 335, 337, 342, 343, 344, 345, 346,347, 351, 354, 356, 370, 377, 384, 386, 393, 395: n = A,T,C or G

SEQ ID NO: 11144 - DNA, 244 bp, Homo sapiens; identical to SEQ ID NO: 4847
  misc_feature 95, 96, 97, 99, 100, 101, 102, 107, 120, 122, 123, 134, 135,136, 137, 138, 139, 140, 141, 143, 144, 149, 154, 155, 165,166, 169, 170, 171, 172, 173, 174, 175, 182, 193, 197, 200,202, 204, 206, 207, 211, 216, 223, 231: n = A,T,C or G

SEQ ID NO: 11145 - DNA, 467 bp, Homo sapiens; identical to SEQ ID NO: 4848
  misc_feature 134, 135, 136, 138, 141, 143, 144, 150, 151, 152, 157, 172,174, 185, 198, 214, 217, 222, 225, 226, 229, 230, 231, 246,263, 266, 281, 284, 285, 287, 288, 309, 311, 313, 315, 316,317, 322, 324, 327, 328, 338, 339, 340, 345, 346, 354: n = A,T,C or G
  misc_feature 355, 356, 358, 359, 360, 361, 362, 363, 364, 365, 366, 367,368, 369, 370, 371, 372, 373, 379, 387, 390, 391, 392, 393,394, 395, 396, 397, 398, 399, 400, 401, 402, 403, 404, 405,406, 408, 416, 426, 435, 448, 449: n = A,T,C or G

SEQ ID NO: 11146 - DNA, 463 bp, Homo sapiens; identical to SEQ ID NO: 4849
  misc_feature 57, 58, 59, 60, 100, 102, 128, 129, 130, 131, 132, 133, 137,138, 140, 141, 142, 143, 150, 174, 176, 177, 184, 185, 190,198, 199, 208, 209, 210, 211, 212, 213, 219, 222, 232, 234,249, 252, 253, 254, 263, 264, 265, 268, 269, 276: n = A,T,C or G
  misc_feature 284, 286, 294, 295, 296, 297, 298, 299, 300, 301, 302, 311,313, 314, 325, 326, 335, 340, 344, 345, 346, 349, 350, 351,359, 367, 379, 382, 386, 387, 389, 394, 395, 403, 406, 408,409, 413, 414, 424, 426, 428, 429, 432, 433, 437, 438: n = A,T,C or G
  misc_feature 439, 440, 441, 442, 444, 447, 451: n = A,T,C or G

SEQ ID NO: 11147 - DNA, 347 bp, Homo sapiens; identical to SEQ ID NO: 4850

SEQ ID NO: 11148 - DNA, 374 bp, Homo sapiens; identical to SEQ ID NO: 4851

SEQ ID NO: 11149 - DNA, 619 bp, Homo sapiens; identical to SEQ ID NO: 4852
  misc_feature 49, 51, 72, 73, 88, 91, 101, 102, 103, 104, 105, 118, 123,124, 127, 128, 133, 137, 138, 139, 144, 145, 149, 150, 158,160, 161, 179, 182, 183, 184, 192, 200, 204, 208, 209, 212,213, 214, 228, 230, 235, 240, 242, 243, 244, 245, 249: n = A,T,C or G
  misc_feature 254, 257, 264, 270, 274, 278, 287, 293, 295, 299, 307, 318,321, 323, 330, 331, 332, 334, 342, 343, 344, 354, 355, 356,358, 367, 371, 372, 374, 379, 401, 402, 403, 418, 431, 432,440, 441, 442, 455, 459, 462, 469, 475, 482, 483, 489: n = A,T,C or G
  misc_feature 493, 495, 500, 501, 502, 505, 512, 516, 532, 535, 546, 550,551, 566, 574, 600, 605: n = A,T,C or G

SEQ ID NO: 11150 - DNA, 281 bp, Homo sapiens; identical to SEQ ID NO: 4853
  misc_feature 6, 26, 132, 133, 134, 135, 139, 145, 146, 148, 151, 158,160, 173, 178, 184, 187, 189, 201, 213, 221, 223, 226, 234,240, 246, 248, 249, 255, 261, 264, 273: n = A,T,C or G

SEQ ID NO: 11151 - DNA, 390 bp, Homo sapiens; identical to SEQ ID NO: 4854
  misc_feature 333, 351, 376: n = A,T,C or G

SEQ ID NO: 11152 - DNA, 594 bp, Homo sapiens; identical to SEQ ID NO: 4855
  misc_feature 410, 575: n = A,T,C or G

SEQ ID NO: 11153 - DNA, 318 bp, Homo sapiens; identical to SEQ ID NO: 4856
  misc_feature 1, 14, 28, 45, 271: n = A,T,C or G

SEQ ID NO: 11154 - DNA, 229 bp, Homo sapiens; identical to SEQ ID NO: 4857
  misc_feature 184: n = A,T,C or G

SEQ ID NO: 11155 - DNA, 275 bp, Homo sapiens; identical to SEQ ID NO: 4858
  misc_feature 51, 54, 87, 88, 94, 100, 103, 112, 114, 116, 117, 118, 119,120, 124, 125, 126, 127, 128, 132, 133, 142, 143, 144, 145,146, 147, 148, 149, 157, 158, 159, 163, 164, 167, 168, 169,177, 185, 195, 196, 199, 200, 201, 202, 203, 204, 205: n = A,T,C or G
  misc_feature 213, 219, 226, 234, 240, 243, 248, 253, 259, 261, 262, 271: n = A,T,C or G

SEQ ID NO: 11156 - DNA, 505 bp, Homo sapiens; identical to SEQ ID NO: 4859

SEQ ID NO: 11157 - DNA, 410 bp, Homo sapiens; identical to SEQ ID NO: 4860

SEQ ID NO: 11158 - DNA, 330 bp, Homo sapiens; identical to SEQ ID NO: 4861
  misc_feature 65, 92, 117, 121, 135, 169, 192, 271, 303: n = A,T,C or G

SEQ ID NO: 11159 - DNA, 496 bp, Homo sapiens; identical to SEQ ID NO: 4862
  misc_feature 156, 157, 160, 161, 162, 163, 164, 165, 167, 168, 169, 170,171, 172, 173, 174, 175, 196, 197, 198, 200, 203, 205, 206,219, 220, 228, 232, 240, 241, 244, 245, 246, 247, 249, 250,252, 253, 256, 258, 260, 263, 264, 265, 267, 268, 269: n = A,T,C or G
  misc_feature 270, 271, 274, 275, 280, 287, 288, 289, 290, 303, 306, 317,318, 322, 331, 347, 348, 355, 361, 362, 364, 367, 368, 369,381, 383, 388, 393, 398, 404, 408, 409, 410, 411, 412, 413,414, 415, 416, 417, 418, 419, 420, 421, 423, 424, 435: n = A,T,C or G
  misc_feature 436, 438, 441, 450, 451, 452, 453, 454, 455, 456, 457, 458,470, 471, 472, 475, 477, 478, 481, 482, 484: n = A,T,C or G

SEQ ID NO: 11160 - DNA, 497 bp, Homo sapiens; identical to SEQ ID NO: 4863

SEQ ID NO: 11161 - DNA, 476 bp, Homo sapiens; identical to SEQ ID NO: 4864
  misc_feature 450, 466: n = A,T,C or G

SEQ ID NO: 11162 - DNA, 317 bp, Homo sapiens; identical to SEQ ID NO: 4865

SEQ ID NO: 11163 - DNA, 460 bp, Homo sapiens; identical to SEQ ID NO: 4866
  misc_feature 20, 68, 205, 208, 215, 222, 345, 365, 420, 432: n = A,T,C or G

SEQ ID NO: 11164 - DNA, 578 bp, Homo sapiens; identical to SEQ ID NO: 4867
  misc_feature 50, 51, 115, 116, 117, 118, 119, 129, 130, 139, 140, 141,144, 146, 152, 153, 156, 157, 160, 162, 163, 175, 177, 178,179, 180, 181, 183, 189, 190, 203, 204, 205, 209, 210, 221,235, 242, 246, 247, 250, 251, 252, 257, 258, 259, 260: n = A,T,C or G
  misc_feature 262, 263, 264, 267, 270, 272, 275, 277, 285, 288, 289, 291,292, 293, 295, 297, 302, 305, 318, 344, 348, 352, 357, 358,361, 364, 365, 366, 368, 375, 381, 382, 398, 399, 412, 424,425, 430, 431, 433, 461, 466, 467, 472, 473, 485, 490: n = A,T,C or G
  misc_feature 493, 494, 495, 497, 498, 504, 516, 532, 533, 534, 535, 537,539, 540, 541, 547, 555, 559, 566, 569: n = A,T,C or G

SEQ ID NO: 11165 - DNA, 280 bp, Homo sapiens; identical to SEQ ID NO: 4868

SEQ ID NO: 11166 - DNA, 582 bp, Homo sapiens; identical to SEQ ID NO: 4869
  misc_feature 340, 346, 347, 349, 352, 359, 365, 366, 372, 374, 375, 376,377, 383, 384, 385, 389, 392, 399, 403, 404, 410, 412, 422,423, 424, 426, 429, 430, 431, 435, 437, 443, 445, 448, 449,457, 458, 459, 463, 467, 468, 470, 476, 480, 483, 486: n = A,T,C or G
  misc_feature 492, 496, 502, 510, 523, 528, 532, 537, 541, 548, 556: n = A,T,C or G

SEQ ID NO: 11167 - DNA, 327 bp, Homo sapiens; identical to SEQ ID NO: 4870

SEQ ID NO: 11168 - DNA, 603 bp, Homo sapiens; identical to SEQ ID NO: 4871

SEQ ID NO: 11169 - DNA, 597 bp, Homo sapiens; identical to SEQ ID NO: 4872
  misc_feature 1, 98, 119, 145, 154, 170, 172, 193, 207, 212, 213, 214,216, 219, 225, 236, 241, 242, 244, 258, 267, 275, 278, 293,298, 307, 310, 311, 312, 313, 316, 323, 340, 343, 350, 351,369, 384, 385, 386, 396, 404, 405, 409, 417, 419, 420: n = A,T,C or G
  misc_feature 421, 423, 440, 445, 446, 449, 453, 458, 459, 461, 477, 480,482, 508, 512, 516, 521, 571, 572, 573, 574, 575, 576, 577,578, 579, 580, 588, 589: n = A,T,C or G

SEQ ID NO: 11170 - DNA, 439 bp, Homo sapiens; identical to SEQ ID NO: 4874
  misc_feature 266: n = A,T,C or G

SEQ ID NO: 11171 - DNA, 388 bp, Homo sapiens; identical to SEQ ID NO: 4875
  misc_feature 39: n = A,T,C or G

SEQ ID NO: 11172 - DNA, 322 bp, Homo sapiens; identical to SEQ ID NO: 4876

SEQ ID NO: 11173 - DNA, 409 bp, Homo sapiens; identical to SEQ ID NO: 4877
  misc_feature 132, 353: n = A,T,C or G

SEQ ID NO: 11174 - DNA, 767 bp, Homo sapiens; identical to SEQ ID NO: 4878
  misc_feature 20, 21, 501, 502, 503, 505, 525, 527, 530, 533, 538, 573,574, 581, 588, 595, 599, 602, 608, 616, 620, 621, 623, 633,645, 648, 650, 654, 662, 679, 697, 708, 720, 727, 729, 731,736: n = A,T,C or G

SEQ ID NO: 11175 - DNA, 343 bp, Homo sapiens; identical to SEQ ID NO: 4879

SEQ ID NO: 11176 - DNA, 540 bp, Homo sapiens; identical to SEQ ID NO: 4880
  misc_feature 65, 69, 134, 219, 221, 226, 239, 264, 333, 352, 363, 369,370, 388, 397, 420, 447, 464, 483, 508, 513, 516, 521, 531: n = A,T,C or G

SEQ ID NO: 11177 - DNA, 335 bp, Homo sapiens; identical to SEQ ID NO: 4881
  misc_feature 90, 92, 95, 99, 106, 133, 137, 142, 147, 162, 167, 168, 170,173, 186, 193, 199, 207, 215, 216, 219, 220, 256, 302, 304,308, 318, 321, 332: n = A,T,C or G

SEQ ID NO: 11178 - DNA, 310 bp, Homo sapiens; identical to SEQ ID NO: 4882
  misc_feature 111, 113, 114, 115, 116, 117, 118, 127, 131, 132, 133, 134,135, 136, 137, 138, 139, 140, 141, 143, 146, 149, 152, 161,162, 163, 164, 166, 167, 168, 169, 170, 171, 178, 182, 183,186, 187, 188, 189, 190, 191, 192, 194, 195, 197, 198: n = A,T,C or G
  misc_feature 202, 214, 218, 220, 221, 222, 223, 224, 234, 242, 243, 246,247, 249, 251, 253, 255, 264, 267, 269, 270, 271, 272, 274,297, 298: n = A,T,C or G

SEQ ID NO: 11179 - DNA, 327 bp, Homo sapiens; identical to SEQ ID NO: 4883

SEQ ID NO: 11180 - DNA, 710 bp, Homo sapiens; identical to SEQ ID NO: 4884
  misc_feature 98, 100, 101, 103, 104, 105, 106, 107, 108, 109, 110, 111,112, 114, 124, 126, 127, 128, 129, 131, 134, 141, 142, 143,144, 145, 157, 159, 164, 165, 166, 167, 170, 171, 173, 174,176, 177, 178, 179, 180, 192, 203, 204, 209, 210, 212: n = A,T,C or G
  misc_feature 214, 222, 223, 224, 227, 231, 236, 246, 248, 249, 254, 255,257, 261, 265, 269, 270, 279, 284, 285, 287, 288, 289, 291,292, 293, 295, 302, 305, 315, 320, 330, 337, 338, 344, 366,369, 373, 397, 401, 402, 403, 404, 408, 410, 417, 431: n = A,T,C or G
  misc_feature 432, 433, 434, 435, 438, 443, 448, 449, 454, 456, 464, 465,466, 469, 472, 473, 481, 491, 492, 497, 502, 503, 504, 507,508, 510, 532, 533, 538, 542, 543, 544, 545, 546, 548, 549,550, 551, 561, 562, 564, 578, 579, 581, 582, 597, 599: n = A,T,C or G
  misc_feature 600, 602, 606, 622, 625, 627, 628, 630, 633, 636, 637, 639,640, 641, 647, 657, 662, 663, 664, 666, 685, 697, 698, 699,700, 710: n = A,T,C or G

SEQ ID NO: 11181 - DNA, 253 bp, Homo sapiens; identical to SEQ ID NO: 4885
  misc_feature 73, 90, 92, 94, 96, 106, 109, 113, 116, 137, 138, 140, 141,142, 143, 146, 147, 148, 151, 152, 153, 155, 159, 160, 161,172, 173, 174, 176, 178, 183, 184, 187, 199, 201, 205, 208,210, 211, 213, 214, 229, 230, 233, 234, 235, 239, 243: n = A,T,C or G

SEQ ID NO: 11182 - DNA, 259 bp, Homo sapiens; identical to SEQ ID NO: 4886
  misc_feature 3, 53, 87, 89, 120, 133, 135, 137, 156, 171, 223, 228: n = A,T,C or G

SEQ ID NO: 11183 - DNA, 220 bp, Homo sapiens; identical to SEQ ID NO: 4887

SEQ ID NO: 11184 - DNA, 480 bp, Homo sapiens; identical to SEQ ID NO: 4888

SEQ ID NO: 11185 - DNA, 235 bp, Homo sapiens; identical to SEQ ID NO: 4889
  misc_feature 29, 37, 51, 61, 65, 67, 71, 91, 106, 128, 162, 211, 221: n = A,T,C or G

SEQ ID NO: 11186 - DNA, 390 bp, Homo sapiens; identical to SEQ ID NO: 4890
  misc_feature 30, 44, 138, 244, 326, 334, 367: n = A,T,C or G

SEQ ID NO: 11187 - DNA, 518 bp, Homo sapiens; identical to SEQ ID NO: 4891

SEQ ID NO: 11188 - DNA, 378 bp, Homo sapiens; identical to SEQ ID NO: 4892

SEQ ID NO: 11189 - DNA, 501 bp, Homo sapiens; identical to SEQ ID NO: 4893
  misc_feature 7, 10, 13, 15, 26, 29, 43, 307, 369, 371, 389, 401, 442,448, 467, 490: n = A,T,C or G

SEQ ID NO: 11190 - DNA, 326 bp, Homo sapiens; identical to SEQ ID NO: 4895
  misc_feature 48, 50, 98, 99, 100, 103, 107, 108, 111, 113, 114, 128, 129,130, 131, 132, 133, 149, 158, 159, 160, 165, 167, 178, 179,180, 181, 182, 183, 184, 185, 192, 193, 194, 195, 197, 198,199, 201, 202, 208, 215, 233, 234, 235, 236, 237: n = A,T,C or G
  misc_feature 254, 255, 256, 257, 259, 261, 269, 271, 273, 278, 287, 293,305, 306, 307, 308, 309, 310, 311, 312, 323: n = A,T,C or G

SEQ ID NO: 11191 - DNA, 799 bp, Homo sapiens; identical to SEQ ID NO: 4896
  misc_feature 214, 342, 368, 400, 412, 470, 491, 495, 506, 530, 546, 571,577, 580, 605, 624, 638, 640, 652, 653, 662, 663, 684, 710,716, 721, 754, 757, 758, 763, 767, 773, 787: n = A,T,C or G

SEQ ID NO: 11192 - DNA, 626 bp, Homo sapiens; identical to SEQ ID NO: 4897
  misc_feature 23, 25, 420, 455, 456, 485, 486, 497, 505, 506, 512, 514,534, 536, 543, 545, 548, 553, 558, 565, 568, 582, 589, 600,603, 604, 605, 606, 607, 609, 610, 614, 615, 616: n = A,T,C or G

SEQ ID NO: 11193 - DNA, 145 bp, Homo sapiens; identical to SEQ ID NO: 4898
  misc_feature 7, 11, 13, 15, 28, 30, 84, 85, 87, 89, 91, 96, 100, 130: n = A,T,C or G

SEQ ID NO: 11194 - DNA, 351 bp, Homo sapiens; identical to SEQ ID NO: 4899
  misc_feature 65, 141, 142, 143, 145, 146, 147, 158, 177, 178, 181, 182,184, 185, 213, 215, 216, 217, 218, 221, 222, 233, 234, 235,237, 239, 250, 251, 252, 257, 258, 259, 273, 274, 282, 283,284, 290, 291, 292, 297, 298, 299, 300, 304, 305, 306: n = A,T,C or G
  misc_feature 307, 318, 319, 320, 321, 326, 332, 333, 334, 335, 336, 338: n = A,T,C or G

SEQ ID NO: 11195 - DNA, 406 bp, Homo sapiens; identical to SEQ ID NO: 4900
  misc_feature 183, 185, 190, 191, 194, 196, 217, 224, 226, 227, 228, 233,234, 235, 240, 242, 243, 254, 256, 258, 266, 268, 269, 279,284, 289, 293, 294, 295, 296, 297, 299, 301, 304, 305, 311,317, 324, 325, 327, 328, 339, 343, 344, 358, 361, 362: n = A,T,C or G
  misc_feature 363, 364, 366, 369, 377, 379, 380, 381, 382, 383, 384, 386,387, 388, 389, 390, 391, 392, 394, 395, 396, 397: n = A,T,C or G

SEQ ID NO: 11196 - DNA, 183 bp, Homo sapiens; identical to SEQ ID NO: 4901
  misc_feature 4: n = A,T,C or G

SEQ ID NO: 11197 - DNA, 484 bp, Homo sapiens; identical to SEQ ID NO: 4902
  misc_feature 204, 247, 326, 355, 360, 417, 462, 472: n = A,T,C or G

SEQ ID NO: 11198 - DNA, 401 bp, Homo sapiens; identical to SEQ ID NO: 4903

SEQ ID NO: 11199 - DNA, 349 bp, Homo sapiens; identical to SEQ ID NO: 4904
  misc_feature 101, 103, 112, 115, 134, 142, 153, 156, 170, 174, 182, 186,197, 203, 206, 207, 208, 211, 213, 215, 218, 227, 233, 249,250, 253, 256, 257, 266, 275, 293, 300, 311, 318, 322, 323,332, 333, 337, 341: n = A,T,C or G

SEQ ID NO: 11200 - DNA, 375 bp, Homo sapiens; identical to SEQ ID NO: 4905

SEQ ID NO: 11201 - DNA, 163 bp, Homo sapiens; identical to SEQ ID NO: 4906

SEQ ID NO: 11202 - DNA, 611 bp, Homo sapiens; identical to SEQ ID NO: 4907

SEQ ID NO: 11203 - DNA, 471 bp, Homo sapiens; identical to SEQ ID NO: 4908

SEQ ID NO: 11204 - DNA, 316 bp, Homo sapiens; identical to SEQ ID NO: 4909
  misc_feature 120, 126, 130, 132, 133, 134, 135, 137, 145, 147, 148, 149,150, 151, 152, 154, 155, 156, 163, 166, 168, 180, 184, 190,193, 201, 211, 212, 214, 217, 218, 223, 228, 230, 235, 237,239, 246, 247, 268, 283, 300: n = A,T,C or G

SEQ ID NO: 11205 - DNA, 296 bp, Homo sapiens; identical to SEQ ID NO: 4910

SEQ ID NO: 11206 - DNA, 275 bp, Homo sapiens; identical to SEQ ID NO: 4911
  misc_feature 199: n = A,T,C or G

SEQ ID NO: 11207 - DNA, 532 bp, Homo sapiens; identical to SEQ ID NO: 4913
  misc_feature 363, 448, 466, 480, 502, 508, 514: n = A,T,C or G

SEQ ID NO: 11208 - DNA, 536 bp, Homo sapiens; identical to SEQ ID NO: 4914
  misc_feature 111, 158, 264, 321, 351, 363, 383, 386, 400, 459, 462, 467,472, 475, 483, 492, 511, 525: n = A,T,C or G

SEQ ID NO: 11209 - DNA, 296 bp, Homo sapiens; identical to SEQ ID NO: 4915
  misc_feature 287: n = A,T,C or G

SEQ ID NO: 11210 - DNA, 153 bp, Homo sapiens; identical to SEQ ID NO: 4916
  misc_feature 26, 41, 63, 116, 130: n = A,T,C or G

SEQ ID NO: 11211 - DNA, 491 bp, Homo sapiens; identical to SEQ ID NO: 4917
  misc_feature 33, 65, 154, 297, 350, 357, 380, 386, 428, 436, 445, 459,468, 472, 478: n = A,T,C or G

SEQ ID NO: 11212 - DNA, 304 bp, Homo sapiens; identical to SEQ ID NO: 4918
  misc_feature 119, 192: n = A,T,C or G

SEQ ID NO: 11213 - DNA, 579 bp, Homo sapiens; identical to SEQ ID NO: 4919
  misc_feature 3: n = A,T,C or G

SEQ ID NO: 11214 - DNA, 285 bp, Homo sapiens; identical to SEQ ID NO: 4920
  misc_feature 179, 205: n = A,T,C or G

SEQ ID NO: 11215 - DNA, 600 bp, Homo sapiens; identical to SEQ ID NO: 4921

SEQ ID NO: 11216 - DNA, 305 bp, Homo sapiens; identical to SEQ ID NO: 4922
  misc_feature 8, 43, 121, 133, 134, 135, 141, 147, 148, 159, 167, 169,187, 188, 195, 196, 197, 198, 199, 200, 203, 204, 209, 216,219, 227, 232, 247, 248, 249, 251, 253, 257, 258, 263, 264,277, 282, 284, 285, 293, 304: n = A,T,C or G

SEQ ID NO: 11217 - DNA, 125 bp, Homo sapiens; identical to SEQ ID NO: 4923
  misc_feature 103, 125: n = A,T,C or G

SEQ ID NO: 11218 - DNA, 401 bp, Homo sapiens; identical to SEQ ID NO: 4924

SEQ ID NO: 11219 - DNA, 764 bp, Homo sapiens; identical to SEQ ID NO: 4925
  misc_feature 96, 98, 101, 118, 124, 129, 130, 137, 138, 146, 151, 152,154, 169, 172, 173, 177, 181, 182, 184, 191, 193, 198, 199,201, 209, 215, 219, 229, 231, 243, 254, 256, 258, 261, 264,267, 269, 272, 273, 277, 288, 295, 306, 312, 322, 323: n = A,T,C or G
  misc_feature 325, 326, 328, 354, 356, 357, 359, 366, 369, 379, 402, 403,427, 428, 432, 435, 441, 443, 452, 453, 455, 456, 460, 465,466, 467, 472, 474, 486, 487, 488, 495, 496, 500, 501, 503,506, 512, 513, 521, 524, 536, 550, 559, 560, 561, 565: n = A,T,C or G
  misc_feature 566, 568, 595, 596, 598, 599, 602, 603, 604, 606, 621, 627,631, 634, 635, 638, 641, 642, 643, 647, 648, 662, 665, 667,668, 684, 688, 691, 694, 695, 700, 702, 716, 717, 718, 734,735, 736, 746: n = A,T,C or G

SEQ ID NO: 11220 - DNA, 209 bp, Homo sapiens; identical to SEQ ID NO: 4926
  misc_feature 8, 101, 117, 119, 140, 145, 166, 188, 197, 200: n = A,T,C or G

SEQ ID NO: 11221 - DNA, 411 bp, Homo sapiens; identical to SEQ ID NO: 4927

SEQ ID NO: 11222 - DNA, 348 bp, Homo sapiens; identical to SEQ ID NO: 4928
  misc_feature 92, 93, 100, 101, 106, 112, 113, 114, 115, 123, 124, 125,126, 127, 128, 129, 132, 140, 146, 147, 151, 152, 169, 176,177, 178, 186, 187, 190, 195, 203, 204, 205, 206, 209, 210,211, 212, 215, 216, 217, 220, 221, 222, 223, 225, 228: n = A,T,C or G
  misc_feature 231, 246, 248, 249, 261, 262, 269, 287, 289, 291, 300, 301,309, 310, 311, 312, 313, 314, 316, 317, 318, 325, 331, 332,333, 335: n = A,T,C or G

SEQ ID NO: 11223 - DNA, 463 bp, Homo sapiens; identical to SEQ ID NO: 4929
  misc_feature 238, 305, 362: n = A,T,C or G

SEQ ID NO: 11224 - DNA, 484 bp, Homo sapiens; identical to SEQ ID NO: 4930
  misc_feature 380, 414: n = A,T,C or G

SEQ ID NO: 11225 - DNA, 289 bp, Homo sapiens; identical to SEQ ID NO: 4931
  misc_feature 241, 243, 245, 247, 248, 252, 254, 255, 257, 259, 260, 261,265, 275: n = A,T,C or G

SEQ ID NO: 11226 - DNA, 135 bp, Homo sapiens; identical to SEQ ID NO: 4932

SEQ ID NO: 11227 - DNA, 507 bp, Homo sapiens; identical to SEQ ID NO: 4933
  misc_feature 223, 404, 460: n = A,T,C or G

SEQ ID NO: 11228 - DNA, 496 bp, Homo sapiens; identical to SEQ ID NO: 4934
  misc_feature 31, 83, 392, 450, 464, 467: n = A,T,C or G

SEQ ID NO: 11229 - DNA, 550 bp, Homo sapiens; identical to SEQ ID NO: 4935
  misc_feature 52, 60, 84, 127, 171, 173, 175, 179, 229, 268, 307, 315,319, 333, 353, 365, 389, 408, 416, 421, 423, 426, 432, 436,456, 487, 489, 516, 525: n = A,T,C or G

SEQ ID NO: 11230 - DNA, 216 bp, Homo sapiens; identical to SEQ ID NO: 4936

SEQ ID NO: 11231 - DNA, 512 bp, Homo sapiens; identical to SEQ ID NO: 4937
  misc_feature 185, 187, 189, 191, 194, 205, 206, 212, 217, 219, 221, 227,230, 232, 234, 238, 240, 243, 246, 248, 251, 260, 264, 265,267, 274, 276, 280, 286, 289, 292, 295, 297, 298, 320, 322,323, 347, 348, 351, 358, 360, 362, 363, 372, 381, 383: n = A,T,C or G
  misc_feature 388, 397, 403, 405, 410, 411, 413, 416, 422, 430, 435, 460,464, 490, 497, 498, 509: n = A,T,C or G

SEQ ID NO: 11232 - DNA, 461 bp, Homo sapiens; identical to SEQ ID NO: 4938

SEQ ID NO: 11233 - DNA, 673 bp, Homo sapiens; identical to SEQ ID NO: 4939
  misc_feature 51, 87, 88, 99, 100, 101, 102, 105, 113, 114, 115, 116, 117,118, 119, 120, 121, 125, 127, 128, 135, 136, 137, 152, 157,158, 159, 162, 163, 165, 166, 177, 184, 185, 205, 219, 221,222, 223, 228, 251, 252, 254, 265, 266, 280, 282: n = A,T,C or G
  misc_feature 283, 292, 294, 295, 297, 306, 307, 339, 340, 341, 344, 358,359, 361, 368, 369, 380, 388, 394, 400, 407, 408, 415, 416,417, 418, 419, 431, 439, 440, 450, 451, 452, 459, 460, 467,478, 480, 481, 498, 500, 501, 531, 532, 537, 543, 544: n = A,T,C or G
  misc_feature 547, 548, 552, 556, 558, 560, 573, 589, 604, 605, 606, 614,615, 616, 626, 628, 634, 641, 643, 645, 652, 653, 654, 659,661: n = A,T,C or G

SEQ ID NO: 11234 - DNA, 496 bp, Homo sapiens; identical to SEQ ID NO: 4940

SEQ ID NO: 11235 - DNA, 385 bp, Homo sapiens; identical to SEQ ID NO: 4941

SEQ ID NO: 11236 - DNA, 497 bp, Homo sapiens; identical to SEQ ID NO: 4942

SEQ ID NO: 11237 - DNA, 409 bp, Homo sapiens; identical to SEQ ID NO: 4943
  misc_feature 62, 79, 80, 81, 90, 95, 136, 146, 334, 367: n = A,T,C or G

SEQ ID NO: 11238 - DNA, 315 bp, Homo sapiens; identical to SEQ ID NO: 4945

SEQ ID NO: 11239 - DNA, 543 bp, Homo sapiens; identical to SEQ ID NO: 4946
  misc_feature 245, 296, 306, 330, 337, 376, 382, 447, 519, 523: n = A,T,C or G

SEQ ID NO: 11240 - DNA, 382 bp, Homo sapiens; identical to SEQ ID NO: 4947
  misc_feature 222: n = A,T,C or G

SEQ ID NO: 11241 - DNA, 331 bp, Homo sapiens; identical to SEQ ID NO: 4948

SEQ ID NO: 11242 - DNA, 452 bp, Homo sapiens; identical to SEQ ID NO: 4949
  misc_feature 28, 238, 312: n = A,T,C or G

SEQ ID NO: 11243 - DNA, 344 bp, Homo sapiens; identical to SEQ ID NO: 4950

SEQ ID NO: 11244 - DNA, 534 bp, Homo sapiens; identical to SEQ ID NO: 4951

SEQ ID NO: 11245 - DNA, 422 bp, Homo sapiens; identical to SEQ ID NO: 4952
  misc_feature 413: n = A,T,C or G

SEQ ID NO: 11246 - DNA, 570 bp, Homo sapiens; identical to SEQ ID NO: 4953
  misc_feature 362, 383, 403, 406, 422, 450, 451, 459, 469, 471, 495, 503,515, 523, 524, 525, 532, 540, 551: n = A,T,C or G

SEQ ID NO: 11247 - DNA, 271 bp, Homo sapiens; identical to SEQ ID NO: 4954
  misc_feature 178, 196, 211, 214, 216, 248, 261: n = A,T,C or G

SEQ ID NO: 11248 - DNA, 317 bp, Homo sapiens; identical to SEQ ID NO: 4955

SEQ ID NO: 11249 - DNA, 355 bp, Homo sapiens; identical to SEQ ID NO: 4956
  misc_feature 245, 253, 268, 273, 278, 300, 322: n = A,T,C or G

SEQ ID NO: 11250 - DNA, 583 bp, Homo sapiens; identical to SEQ ID NO: 4957
  misc_feature 170, 216, 217, 218, 219, 220, 221, 222, 223, 224, 225, 226,227, 228, 229, 230, 231, 232, 233, 234, 235, 236, 237, 238,239, 240, 241, 242, 243, 244, 245, 246, 247, 248, 249, 250,251, 252, 253, 254, 255, 256, 257, 258, 259, 260, 261: n = A,T,C or G
  misc_feature 262, 263, 264, 265, 266, 267, 268, 269, 270, 271, 272, 273,274, 275, 276, 277, 278, 279, 280, 281, 282, 283, 284, 285,286, 287, 288, 289, 290, 291, 292, 293, 294, 295, 296, 297,298, 299, 300, 302, 317, 334, 344, 353, 356, 386, 391: n = A,T,C or G
  misc_feature 394, 406, 407, 408, 409, 410, 411, 413, 415, 416, 417, 418,419, 424, 425, 433, 435, 436, 439, 442, 443, 445, 448, 453,455, 457, 466, 468, 472, 475, 478, 479, 480, 485, 490, 494,496, 498, 499, 500, 503, 509, 511, 514, 517, 518, 524: n = A,T,C or G
  misc_feature 530, 533, 543, 544, 546, 550, 551, 571, 577: n = A,T,C or G

SEQ ID NO: 11251 - DNA, 669 bp, Homo sapiens; identical to SEQ ID NO: 4958
  misc_feature 6, 8, 20, 24, 27, 88, 323, 539, 590, 592, 599, 608: n = A,T,C or G

SEQ ID NO: 11252 - DNA, 320 bp, Homo sapiens; identical to SEQ ID NO: 4959

SEQ ID NO: 11253 - DNA, 411 bp, Homo sapiens; identical to SEQ ID NO: 4960

SEQ ID NO: 11254 - DNA, 507 bp, Homo sapiens; identical to SEQ ID NO: 4961
  misc_feature 59, 116, 118, 119, 120, 123, 133, 138, 152, 153, 154, 155,156, 159, 160, 161, 163, 165, 176, 177, 178, 179, 180, 187,200, 201, 202, 203, 204, 206, 207, 208, 209, 211, 212, 213,214, 218, 232, 235, 237, 255, 257, 258, 259, 260, 269: n = A,T,C or G
  misc_feature 283, 284, 287, 290, 292, 300, 301, 306, 318, 331, 333, 342,343, 346, 347, 349, 350, 353, 358, 359, 361, 362, 365, 366,369, 370, 373, 375, 376, 378, 379, 380, 388, 389, 391, 393,395, 411, 413, 414, 423, 438, 443, 444, 447, 452, 465: n = A,T,C or G
  misc_feature 475, 484, 488, 490, 491, 495: n = A,T,C or G

SEQ ID NO: 11255 - DNA, 339 bp, Homo sapiens; identical to SEQ ID NO: 4962

SEQ ID NO: 11256 - DNA, 293 bp, Homo sapiens; identical to SEQ ID NO: 4963
  misc_feature 75, 113, 118, 122, 126, 152, 159, 164, 171, 182, 189, 192,198, 205, 222, 230, 238, 245, 256, 265, 270, 281: n = A,T,C or G

SEQ ID NO: 11257 - DNA, 397 bp, Homo sapiens; identical to SEQ ID NO: 4964
  misc_feature 359: n = A,T,C or G

SEQ ID NO: 11258 - DNA, 472 bp, Homo sapiens; identical to SEQ ID NO: 4965

SEQ ID NO: 11259 - DNA, 509 bp, Homo sapiens; identical to SEQ ID NO: 4966

SEQ ID NO: 11260 - DNA, 718 bp, Homo sapiens; identical to SEQ ID NO: 4967
  misc_feature 62, 78, 85, 96, 99, 100, 107, 111, 113, 114, 117, 118, 119,121, 122, 124, 130, 131, 132, 133, 135, 136, 137, 138, 149,150, 156, 157, 160, 161, 162, 163, 164, 166, 171, 172, 176,184, 185, 186, 196, 197, 204, 205, 206, 215, 216, 220: n = A,T,C or G
  misc_feature 223, 236, 249, 250, 256, 271, 272, 275, 279, 293, 294, 295,296, 298, 299, 301, 302, 311, 314, 316, 326, 330, 336, 343,344, 345, 348, 355, 363, 365, 389, 393, 394, 395, 404, 405,422, 423, 425, 426, 427, 434, 442, 444, 455, 456, 458: n = A,T,C or G
  misc_feature 459, 463, 469, 479, 487, 502, 510, 511, 517, 523, 527, 534,539, 540, 551, 563, 578, 579, 580, 581, 582, 583, 584, 585,587, 588, 589, 601, 602, 603, 604, 610, 612, 623, 654, 660,676, 677, 681, 682, 691, 697, 700: n = A,T,C or G

SEQ ID NO: 11261 - DNA, 310 bp, Homo sapiens; identical to SEQ ID NO: 4968
  misc_feature 256: n = A,T,C or G

SEQ ID NO: 11262 - DNA, 647 bp, Homo sapiens; identical to SEQ ID NO: 4969
  misc_feature 119, 120, 122, 125, 128, 129, 131, 132, 133, 134, 144, 145,147, 148, 150, 173, 174, 175, 176, 177, 178, 179, 180, 181,183, 184, 186, 187, 192, 194, 196, 197, 198, 199, 200, 201,202, 212, 213, 214, 215, 216, 217, 219, 220, 221, 223: n = A,T,C or G
  misc_feature 224, 230, 248, 250, 252, 260, 261, 263, 264, 274, 278, 280,282, 285, 287, 297, 306, 308, 316, 321, 329, 331, 333, 339,342, 344, 350, 354, 359, 361, 362, 367, 368, 375, 401, 402,403, 404, 405, 410, 413, 414, 416, 421, 422, 428, 429: n = A,T,C or G
  misc_feature 430, 432, 433, 436, 438, 439, 442, 443, 444, 457, 458, 460,462, 469, 476, 479, 481, 483, 486, 488, 492, 499, 501, 503,505, 507, 513, 515, 521, 523, 524, 525, 528, 531, 533, 534,536, 537, 538, 539, 542, 544, 555, 559, 568, 569, 570: n = A,T,C or G
  misc_feature 571, 572, 575, 587, 590, 594, 595, 596, 601, 614, 618, 623,624: n = A,T,C or G

SEQ ID NO: 11263 - DNA, 434 bp, Homo sapiens; identical to SEQ ID NO: 4970

SEQ ID NO: 11264 - DNA, 797 bp, Homo sapiens; identical to SEQ ID NO: 4971
  misc_feature 128, 131, 139, 140, 141, 142, 153, 155, 159, 160, 161, 162,165, 173, 174, 175, 176, 177, 178, 180, 183, 186, 187, 188,191, 192, 193, 194, 196, 209, 210, 211, 214, 216, 217, 218,220, 221, 222, 223, 226, 227, 229, 230, 234, 236, 238: n = A,T,C or G
  misc_feature 239, 241, 242, 243, 244, 250, 253, 262, 263, 270, 273, 274,277, 281, 295, 305, 307, 311, 321, 323, 332, 334, 341, 350,351, 355, 357, 358, 380, 389, 399, 413, 415, 418, 422, 424,427, 429, 431, 434, 435, 439, 442, 443, 444, 453, 458: n = A,T,C or G
  misc_feature 462, 480, 481, 509, 510, 511, 512, 514, 519, 520, 535, 541,567, 575, 578, 586, 587, 592, 597, 601, 609, 614, 618, 624,626, 640, 642, 647, 657, 658, 659, 673, 674, 685, 688, 694,696, 703, 709, 712, 715, 726, 729, 730, 733, 741, 744: n = A,T,C or G
  misc_feature 753, 755, 756, 769, 780: n = A,T,C or G

SEQ ID NO: 11265 - DNA, 347 bp, Homo sapiens; identical to SEQ ID NO: 4972

SEQ ID NO: 11266 - DNA, 493 bp, Homo sapiens; identical to SEQ ID NO: 4973

SEQ ID NO: 11267 - DNA, 354 bp, Homo sapiens; identical to SEQ ID NO: 4974
  misc_feature 299: n = A,T,C or G

SEQ ID NO: 11268 - DNA, 404 bp, Homo sapiens; identical to SEQ ID NO: 4975
  misc_feature 356, 388: n = A,T,C or G

SEQ ID NO: 11269 - DNA, 457 bp, Homo sapiens; identical to SEQ ID NO: 4976
  misc_feature 206, 299, 300, 301, 302, 303, 304, 305, 306, 307, 308, 309,310, 311, 312, 313, 314, 315, 316, 317, 318, 319, 320, 321,322, 323, 324, 325, 326, 327, 328, 329, 330, 331, 332, 333,334, 335, 336, 337, 338, 339, 340, 341, 342, 343, 344: n = A,T,C or G
  misc_feature 345, 346, 347, 348, 349, 350, 351, 352, 353, 354, 355, 356,357, 358, 359, 360, 361, 362, 363, 364, 365, 366, 367, 368,369, 370, 371, 372, 373, 374, 375, 376, 377, 378, 379, 380,381, 382, 383, 384, 385, 386, 387, 388, 389, 390, 391: n = A,T,C or G
  misc_feature 392, 398, 412, 446: n = A,T,C or G

SEQ ID NO: 11270 - DNA, 399 bp, Homo sapiens; identical to SEQ ID NO: 4977
  misc_feature 25, 399: n = A,T,C or G

SEQ ID NO: 11271 - DNA, 430 bp, Homo sapiens; identical to SEQ ID NO: 4978

SEQ ID NO: 11272 - DNA, 505 bp, Homo sapiens; identical to SEQ ID NO: 4979

SEQ ID NO: 11273 - DNA, 264 bp, Homo sapiens; identical to SEQ ID NO: 4980
  misc_feature 1, 3, 27, 51, 99, 202: n = A,T,C or G

SEQ ID NO: 11274 - DNA, 354 bp, Homo sapiens; identical to SEQ ID NO: 4981
  misc_feature 20, 109, 111, 353, 354: n = A,T,C or G

SEQ ID NO: 11275 - DNA, 558 bp, Homo sapiens; identical to SEQ ID NO: 4982
  misc_feature 7, 13, 25, 35, 40, 49, 50, 51, 54, 58, 75, 77, 79, 85, 88,90, 97, 108, 123, 128, 129, 133, 135, 136, 138, 141, 144,152, 163, 165, 167, 172, 177, 180, 236, 260, 264, 269, 270,271, 361, 371, 387, 401, 441, 447, 453, 456, 470, 478: n = A,T,C or G
  misc_feature 496, 502, 508, 530: n = A,T,C or G

SEQ ID NO: 11276 - DNA, 313 bp, Homo sapiens; identical to SEQ ID NO: 4983
  misc_feature 47, 56, 91, 92, 93, 94, 95, 97, 106, 107, 114, 115, 126,127, 128, 139, 140, 141, 142, 143, 144, 145, 149, 150, 151,170, 178, 179, 189, 191, 192, 196, 212, 213, 216, 218, 220,226, 229, 236, 241, 246, 249, 251, 252, 253, 261, 263: n = A,T,C or G
  misc_feature 272, 273, 286, 287, 299: n = A,T,C or G

SEQ ID NO: 11277 - DNA, 266 bp, Homo sapiens; identical to SEQ ID NO: 4984

SEQ ID NO: 11278 - DNA, 286 bp, Homo sapiens; identical to SEQ ID NO: 4985
  misc_feature 46, 121, 123, 217: n = A,T,C or G

SEQ ID NO: 11279 - DNA, 414 bp, Homo sapiens; identical to SEQ ID NO: 4986
  misc_feature 54, 112, 121, 153, 154, 155, 156, 161, 163, 173, 174, 178,180, 183, 185, 186, 188, 189, 191, 193, 204, 206, 207, 219,221, 222, 229, 230, 232, 235, 239, 248, 251, 253, 259, 264,267, 269, 275, 276, 290, 294, 296, 298, 318, 319, 322: n = A,T,C or G
  misc_feature 341, 346, 351, 363, 391, 400, 401: n = A,T,C or G

SEQ ID NO: 11280 - DNA, 463 bp, Homo sapiens; identical to SEQ ID NO: 4987

SEQ ID NO: 11281 - DNA, 486 bp, Homo sapiens; identical to SEQ ID NO: 4988
  misc_feature 80, 256, 274, 386, 389, 405, 451, 459: n = A,T,C or G

SEQ ID NO: 11282 - DNA, 599 bp, Homo sapiens; identical to SEQ ID NO: 4989
  misc_feature 11, 13, 26, 28, 31, 39, 40, 41, 42, 44, 46, 49, 50, 51, 54,57, 71, 81, 104, 106, 112, 113, 115, 119, 120, 121, 130,131, 137, 138, 140, 149, 161, 163, 178, 182, 183, 184, 185,186, 259, 262, 305, 308, 309, 337, 340, 354, 355, 364: n = A,T,C or G
  misc_feature 365, 366, 367, 368, 370, 373, 375, 377, 378, 382, 437, 440,489, 565, 571, 574, 584: n = A,T,C or G

SEQ ID NO: 11283 - DNA, 430 bp, Homo sapiens; identical to SEQ ID NO: 4990

SEQ ID NO: 11284 - DNA, 434 bp, Homo sapiens; identical to SEQ ID NO: 4991
  misc_feature 97, 102, 103, 105, 106, 109, 121, 123, 130, 133, 136, 137,138, 143, 144, 147, 150, 151, 153, 157, 162, 168, 170, 183,185, 191, 193, 200, 204, 214, 215, 218, 220, 226, 228, 230,231, 232, 233, 234, 235, 239, 240, 244, 256, 257, 259: n = A,T,C or G
  misc_feature 261, 264, 282, 286, 289, 290, 295, 297, 302, 305, 311, 313,317, 318, 324, 331, 336, 341, 343, 346, 347, 370, 376, 387,404, 405, 414: n = A,T,C or G

SEQ ID NO: 11285 - DNA, 466 bp, Homo sapiens; identical to SEQ ID NO: 4992
  misc_feature 1, 69, 91, 96, 116, 294, 399, 430, 442: n = A,T,C or G

SEQ ID NO: 11286 - DNA, 521 bp, Homo sapiens; identical to SEQ ID NO: 4993
  misc_feature 443, 491: n = A,T,C or G

SEQ ID NO: 11287 - DNA, 576 bp, Homo sapiens; identical to SEQ ID NO: 4994
  misc_feature 4, 7, 12, 25, 28, 29, 31, 32, 34, 191, 297, 350, 468, 475,559: n = A,T,C or G

SEQ ID NO: 11288 - DNA, 797 bp, Homo sapiens; identical to SEQ ID NO: 4996
  misc_feature 582, 584, 640, 656, 677, 737, 756, 765, 767, 768, 779, 790: n = A,T,C or G

SEQ ID NO: 11289 - DNA, 328 bp, Homo sapiens; identical to SEQ ID NO: 4997

SEQ ID NO: 11290 - DNA, 128 bp, Homo sapiens; identical to SEQ ID NO: 4998
  misc_feature 7, 14, 58: n = A,T,C or G

SEQ ID NO: 11291 - DNA, 656 bp, Homo sapiens; identical to SEQ ID NO: 4999
  misc_feature 220, 222, 241, 265, 292, 311, 321, 348, 355, 368, 382, 401,407, 409, 432, 433, 446, 449, 451, 474, 482, 494, 500, 518,522, 523, 525, 526, 531, 532, 538, 553, 554, 555, 556, 559,573, 590, 592, 599, 604, 614, 615, 638, 639: n = A,T,C or G

SEQ ID NO: 11292 - DNA, 216 bp, Homo sapiens; identical to SEQ ID NO: 5000
  misc_feature 106, 110, 112, 122, 128, 130, 132, 137, 154, 155, 158, 159,163, 168, 170, 177, 178, 189, 191, 192, 193, 195, 197: n = A,T,C or G

SEQ ID NO: 11293 - DNA, 197 bp, Homo sapiens; identical to SEQ ID NO: 5001

SEQ ID NO: 11294 - DNA, 469 bp, Homo sapiens; identical to SEQ ID NO: 5002
  misc_feature 254, 264, 308, 325, 342, 402: n = A,T,C or G

SEQ ID NO: 11295 - DNA, 508 bp, Homo sapiens; identical to SEQ ID NO: 5003
  misc_feature 155, 177, 199, 214, 291, 377, 416, 428, 430, 438, 451, 458,466, 485, 486, 489, 491, 494, 495: n = A,T,C or G

SEQ ID NO: 11296 - DNA, 312 bp, Homo sapiens; identical to SEQ ID NO: 5004
  misc_feature 184, 208, 227, 250, 262, 283, 284, 297, 298: n = A,T,C or G

SEQ ID NO: 11297 - DNA, 376 bp, Homo sapiens; identical to SEQ ID NO: 5005

SEQ ID NO: 11298 - DNA, 757 bp, Homo sapiens; identical to SEQ ID NO: 5006
  misc_feature 546, 583, 597, 609, 612, 616, 630, 644, 661, 664, 705, 707,712, 722, 735: n = A,T,C or G

SEQ ID NO: 11299 - DNA, 138 bp, Homo sapiens; identical to SEQ ID NO: 5007
  misc_feature 5, 12, 18, 39, 40, 111, 125: n = A,T,C or G

SEQ ID NO: 11300 - DNA, 460 bp, Homo sapiens; identical to SEQ ID NO: 5008

SEQ ID NO: 11301 - DNA, 526 bp, Homo sapiens; identical to SEQ ID NO: 5009
  misc_feature 508, 509, 511, 515, 516, 517, 518, 519, 520, 521, 522, 523,524, 525: n = A,T,C or G

SEQ ID NO: 11302 - DNA, 771 bp, Homo sapiens; identical to SEQ ID NO: 5010
  misc_feature 32, 33, 64, 74, 101, 242, 299, 313, 403, 430, 490, 498, 503,506, 515, 516, 530, 535, 553, 569, 571, 578, 581, 584, 627,634, 640, 661, 671, 683, 690, 694, 697, 707, 712, 718, 732,740, 751, 754, 755: n = A,T,C or G

SEQ ID NO: 11303 - DNA, 275 bp, Homo sapiens; identical to SEQ ID NO: 5011
  misc_feature 265: n = A,T,C or G

SEQ ID NO: 11304 - DNA, 252 bp, Homo sapiens; identical to SEQ ID NO: 5012
  misc_feature 96, 104, 105, 106, 108, 115, 119, 120, 122, 125, 128, 129,147, 157, 159, 168, 169, 171, 172, 173, 184, 190, 192, 196,200, 202, 213, 215, 216, 218, 221, 230, 232, 233, 235, 237: n = A,T,C or G

SEQ ID NO: 11305 - DNA, 394 bp, Homo sapiens; identical to SEQ ID NO: 5013
  misc_feature 19, 81, 120, 132, 133, 135, 137, 138, 150, 151, 153, 154,156, 157, 163, 165, 172, 173, 174, 175, 177, 178, 182, 183,193, 194, 195, 196, 199, 202, 203, 205, 206, 207, 208, 210,213, 215, 218, 231, 236, 238, 239, 240, 242, 246, 247: n = A,T,C or G
  misc_feature 257, 260, 261, 262, 263, 273, 276, 277, 278, 281, 282, 284,285, 287, 290, 291, 292, 293, 295, 298, 300, 302, 307, 308,318, 319, 329, 333, 348, 349, 353, 354, 357, 358, 359, 363,373, 381: n = A,T,C or G

SEQ ID NO: 11306 - DNA, 452 bp, Homo sapiens; identical to SEQ ID NO: 5014

SEQ ID NO: 11307 - DNA, 156 bp, Homo sapiens; identical to SEQ ID NO: 5015

SEQ ID NO: 11308 - DNA, 548 bp, Homo sapiens; identical to SEQ ID NO: 5016
  misc_feature 475, 535: n = A,T,C or G

SEQ ID NO: 11309 - DNA, 513 bp, Homo sapiens; identical to SEQ ID NO: 5017

SEQ ID NO: 11310 - DNA, 474 bp, Homo sapiens; identical to SEQ ID NO: 5018
  misc_feature 154, 204, 212, 254, 278, 302, 313, 318, 346, 381, 384, 441: n = A,T,C or G

SEQ ID NO: 11311 - DNA, 406 bp, Homo sapiens; identical to SEQ ID NO: 5019

SEQ ID NO: 11312 - DNA, 414 bp, Homo sapiens; identical to SEQ ID NO: 5020

SEQ ID NO: 11313 - DNA, 442 bp, Homo sapiens; identical to SEQ ID NO: 5021
  misc_feature 77, 90, 169, 185, 239, 255, 256, 260, 263, 268, 269, 270,271, 272, 285, 298, 300, 303, 304, 306, 314, 315, 353, 364,374, 379: n = A,T,C or G

SEQ ID NO: 11314 - DNA, 705 bp, Homo sapiens; identical to SEQ ID NO: 5022
  misc_feature 50, 52, 122, 123, 124, 125, 126, 139, 140, 141, 150, 152,154, 155, 156, 158, 160, 161, 168, 169, 182, 183, 189, 194,195, 196, 197, 198, 202, 206, 210, 223, 242, 243, 245, 246,247, 248, 249, 255, 256, 261, 264, 265, 287, 291, 293: n = A,T,C or G
  misc_feature 294, 296, 298, 301, 318, 320, 321, 333, 334, 337, 348, 351,355, 356, 368, 373, 374, 376, 380, 381, 388, 407, 408, 423,424, 432, 437, 446, 448, 470, 474, 475, 479, 481, 482, 484,503, 504, 505, 506, 508, 531, 532, 542, 552, 556, 558: n = A,T,C or G
  misc_feature 559, 575, 578, 594, 595, 604, 608, 610, 611, 622, 631, 637,641, 648, 651, 664, 681, 682, 686, 687, 689, 690, 692, 695: n = A,T,C or G

SEQ ID NO: 11315 - DNA, 459 bp, Homo sapiens; identical to SEQ ID NO: 5023
  misc_feature 440, 443: n = A,T,C or G

SEQ ID NO: 11316 - DNA, 321 bp, Homo sapiens; identical to SEQ ID NO: 5024

SEQ ID NO: 11317 - DNA, 508 bp, Homo sapiens; identical to SEQ ID NO: 5025
  misc_feature 97, 101, 103, 111, 133, 136, 142, 157, 161, 162, 164, 165,167, 168, 169, 170, 171, 177, 178, 180, 191, 201, 203, 206,212, 224, 234, 235, 237, 238, 241, 244, 253, 256, 258, 260,262, 308, 309, 310, 328, 332, 334, 336, 340, 358, 361: n = A,T,C or G
  misc_feature 375, 379, 380, 381, 382, 385, 390, 391, 392, 396, 402, 403,404, 406, 407, 413, 414, 416, 418, 419, 420, 425, 426, 431,435, 438, 448, 450, 459, 460, 466, 467, 470, 476, 477, 478,485, 489, 493: n = A,T,C or G

SEQ ID NO: 11318 - DNA, 288 bp, Homo sapiens; identical to SEQ ID NO: 5026
  misc_feature 1, 2, 13: n = A,T,C or G

SEQ ID NO: 11319 - DNA, 449 bp, Homo sapiens; identical to SEQ ID NO: 5027

SEQ ID NO: 11320 - DNA, 699 bp, Homo sapiens; identical to SEQ ID NO: 5028
  misc_feature 184, 185, 576, 612, 635: n = A,T,C or G

SEQ ID NO: 11321 - DNA, 188 bp, Homo sapiens; identical to SEQ ID NO: 5029

SEQ ID NO: 11322 - DNA, 444 bp, Homo sapiens; identical to SEQ ID NO: 5030
  misc_feature 118, 157, 167, 169, 173, 226, 276, 281, 305, 327, 333, 346,349: n = A,T,C or G

SEQ ID NO: 11323 - DNA, 367 bp, Homo sapiens; identical to SEQ ID NO: 5031
  misc_feature 27, 64, 78, 82, 142, 148, 187, 189, 191, 195, 209, 218, 226,245, 255, 279, 280, 291, 301, 323, 343: n = A,T,C or G

SEQ ID NO: 11324 - DNA, 295 bp, Homo sapiens; identical to SEQ ID NO: 5032
  misc_feature 44, 45, 138, 170, 171, 176, 178, 204, 208, 211, 236, 237,253, 255, 257, 258, 284, 286: n = A,T,C or G

SEQ ID NO: 11325 - DNA, 513 bp, Homo sapiens; identical to SEQ ID NO: 5033
  misc_feature 308: n = A,T,C or G

SEQ ID NO: 11326 - DNA, 175 bp, Homo sapiens; identical to SEQ ID NO: 5034
  misc_feature 147, 166: n = A,T,C or G

SEQ ID NO: 11327 - DNA, 469 bp, Homo sapiens; identical to SEQ ID NO: 5035
  misc_feature 51, 79, 103, 104, 118, 120, 121, 124, 125, 126, 127, 139,162, 166, 168, 169, 172, 173, 181, 184, 185, 188, 193, 194,202, 203, 204, 205, 207, 208, 209, 212, 214, 217, 218, 220,222, 223, 224, 233, 238, 239, 249, 256, 258, 263, 264: n = A,T,C or G
  misc_feature 284, 297, 298, 299, 307, 322, 323, 324, 333, 334, 350, 357,366, 378, 383, 392, 405, 408, 409, 411, 413, 414, 418, 420,424, 425, 428, 436, 439, 445, 447, 450, 454, 455, 456, 458,466: n = A,T,C or G

SEQ ID NO: 11328 - DNA, 516 bp, Homo sapiens; identical to SEQ ID NO: 5036
  misc_feature 444, 463, 486: n = A,T,C or G

SEQ ID NO: 11329 - DNA, 350 bp, Homo sapiens; identical to SEQ ID NO: 5037

SEQ ID NO: 11330 - DNA, 512 bp, Homo sapiens; identical to SEQ ID NO: 5038
  misc_feature 459: n = A,T,C or G

SEQ ID NO: 11331 - DNA, 775 bp, Homo sapiens; identical to SEQ ID NO: 5039
  misc_feature 34, 39, 40, 47, 49, 68, 69, 81, 166, 246, 272, 353, 368,412, 442, 444, 452, 467, 489, 573, 589, 603, 618, 639, 663,664, 666, 667, 679, 704, 706, 727, 737, 750: n = A,T,C or G

SEQ ID NO: 11332 - DNA, 702 bp, Homo sapiens; identical to SEQ ID NO: 5040
  misc_feature 504: n = A,T,C or G

SEQ ID NO: 11333 - DNA, 612 bp, Homo sapiens; identical to SEQ ID NO: 5041
  misc_feature 547, 586, 593, 612: n = A,T,C or G

SEQ ID NO: 11334 - DNA, 439 bp, Homo sapiens; identical to SEQ ID NO: 5042

SEQ ID NO: 11335 - DNA, 491 bp, Homo sapiens; identical to SEQ ID NO: 5043

SEQ ID NO: 11336 - DNA, 672 bp, Homo sapiens; identical to SEQ ID NO: 5044
  misc_feature 3, 87, 96, 366, 411, 420, 422, 437, 438, 443, 449, 450, 458,467, 468, 469, 470, 483, 485, 489, 490, 492, 495, 497, 505,514, 519, 520, 521, 522, 524, 525, 527, 528, 535, 536, 537,538, 539, 543, 546, 547, 548, 555, 557, 559, 579: n = A,T,C or G
  misc_feature 580, 583, 596, 598, 602, 603, 607, 608, 614, 615, 616, 617,619, 626, 627, 636, 639, 641, 643, 646, 647, 648, 649, 654,656, 657, 658, 660, 665: n = A,T,C or G

SEQ ID NO: 11337 - DNA, 412 bp, Homo sapiens; identical to SEQ ID NO: 5045
  misc_feature 82, 89, 90, 91, 92, 94, 96, 97, 99, 100, 103, 106, 110, 113,117, 120, 121, 122, 125, 131, 132, 145, 149, 153, 162, 165,168, 178, 179, 182, 183, 187, 287, 323, 332, 335, 395, 399: n = A,T,C or G

SEQ ID NO: 11338 - DNA, 416 bp, Homo sapiens; identical to SEQ ID NO: 5046
  misc_feature 393: n = A,T,C or G

SEQ ID NO: 11339 - DNA, 380 bp, Homo sapiens; identical to SEQ ID NO: 5047
  misc_feature 83, 240: n = A,T,C or G

SEQ ID NO: 11340 - DNA, 436 bp, Homo sapiens; identical to SEQ ID NO: 5048
  misc_feature 3, 175, 176, 177, 178, 179, 180, 181, 182, 185, 187, 191,208, 209, 221, 222, 223, 224, 225, 226, 227, 228, 229, 230,238, 239, 240, 242, 244, 246, 253, 254, 255, 256, 257, 258,260, 268, 270, 271, 272, 275, 276, 277, 278, 279, 283: n = A,T,C or G
  misc_feature 289, 290, 291, 297, 298, 299, 300, 301, 310, 311, 312, 313,314, 315, 316, 317, 318, 324, 337, 339, 340, 341, 342, 343,344, 345, 346, 348, 350, 352, 353, 354, 355, 356, 357, 358,359, 360, 361, 362, 363, 364, 365, 366, 367, 368, 369: n = A,T,C or G
  misc_feature 370, 371, 372, 373, 374, 375, 376, 377, 378, 379, 380, 381,382, 383, 384, 385, 386, 387, 403, 404, 405, 406, 412, 413,414, 415, 416, 422, 423, 424, 425, 429: n = A,T,C or G

SEQ ID NO: 11341 - DNA, 484 bp, Homo sapiens; identical to SEQ ID NO: 5049

SEQ ID NO: 11342 - DNA, 362 bp, Homo sapiens; identical to SEQ ID NO: 5050
  misc_feature 74, 77, 121, 203, 216, 230, 236, 292, 329, 336: n = A,T,C or G

SEQ ID NO: 11343 - DNA, 359 bp, Homo sapiens; identical to SEQ ID NO: 5051

SEQ ID NO: 11344 - DNA, 128 bp, Homo sapiens; identical to SEQ ID NO: 5052
  misc_feature 121: n = A,T,C or G

SEQ ID NO: 11345 - DNA, 506 bp, Homo sapiens; identical to SEQ ID NO: 5053

SEQ ID NO: 11346 - DNA, 423 bp, Homo sapiens; identical to SEQ ID NO: 5054

SEQ ID NO: 11347 - DNA, 634 bp, Homo sapiens; identical to SEQ ID NO: 5055
  misc_feature 560, 561, 562, 563, 564, 565, 566, 567, 568, 569, 570, 571,572, 573, 574, 575, 576, 577, 578, 579, 580, 581, 582: n = A,T,C or G

SEQ ID NO: 11348 - DNA, 800 bp, Homo sapiens; identical to SEQ ID NO: 5056
  misc_feature 294, 404, 442, 443, 485, 491, 496, 498, 506, 507, 511, 513,527, 544, 549, 559, 563, 568, 570, 571, 589, 596, 602, 610,611, 624, 630, 644, 645, 648, 649, 650, 651, 652, 653, 654,655, 656, 657, 658, 659, 660, 661, 662, 663, 664, 665: n = A,T,C or G
  misc_feature 666, 667, 668, 669, 670, 671, 672, 673, 674, 675, 676, 677,678, 679, 680, 681, 682, 683, 684, 685, 687, 688, 696, 697,704, 706, 707, 710, 715, 716, 718, 720, 727, 731, 732, 736,743, 746, 748, 749, 751, 775, 783: n = A,T,C or G

SEQ ID NO: 11349 - DNA, 131 bp, Homo sapiens; identical to SEQ ID NO: 5057
  misc_feature 37: n = A,T,C or G

SEQ ID NO: 11350 - DNA, 248 bp, Homo sapiens; identical to SEQ ID NO: 5058
  misc_feature 67, 95, 102, 127, 160, 192: n = A,T,C or G

SEQ ID NO: 11351 - DNA, 337 bp, Homo sapiens; identical to SEQ ID NO: 5059
  misc_feature 240, 260, 319: n = A,T,C or G

SEQ ID NO: 11352 - DNA, 392 bp, Homo sapiens; identical to SEQ ID NO: 5060

SEQ ID NO: 11353 - DNA, 424 bp, Homo sapiens; identical to SEQ ID NO: 5061

SEQ ID NO: 11354 - DNA, 496 bp, Homo sapiens; identical to SEQ ID NO: 5062
  misc_feature 1: n = A,T,C or G

SEQ ID NO: 11355 - DNA, 223 bp, Homo sapiens; identical to SEQ ID NO: 5063
  misc_feature 37, 100, 133, 162, 193: n = A,T,C or G

SEQ ID NO: 11356 - DNA, 553 bp, Homo sapiens; identical to SEQ ID NO: 5064
  misc_feature 538: n = A,T,C or G

SEQ ID NO: 11357 - DNA, 491 bp, Homo sapiens; identical to SEQ ID NO: 5065
  misc_feature 261, 331, 333, 351, 366, 369, 382, 387, 400, 409, 436, 439,453, 455, 456, 468, 471, 472, 490: n = A,T,C or G

SEQ ID NO: 11358 - DNA, 260 bp, Homo sapiens; identical to SEQ ID NO: 5066
  misc_feature 108, 114, 165, 167, 171, 204, 226, 242, 246: n = A,T,C or G

SEQ ID NO: 11359 - DNA, 317 bp, Homo sapiens; identical to SEQ ID NO: 5067
  misc_feature 207: n = A,T,C or G

SEQ ID NO: 11360 - DNA, 447 bp, Homo sapiens; identical to SEQ ID NO: 5068
  misc_feature 76, 82, 88, 91, 92, 94, 96, 97, 99, 107, 118, 123, 125, 126,128, 131, 133, 136, 138, 140, 143, 144, 146, 152, 157, 158,162, 163, 168, 171, 178, 187, 198, 200, 205, 207, 209, 212,217, 219, 224, 235, 240, 247, 249, 255, 256, 263: n = A,T,C or G
  misc_feature 274, 294, 295, 296, 304, 311, 318, 319, 323, 327, 330, 331,332, 349, 360, 361, 382, 385, 386, 392, 397, 400, 414, 427,432: n = A,T,C or G

SEQ ID NO: 11361 - DNA, 570 bp, Homo sapiens; identical to SEQ ID NO: 5069

SEQ ID NO: 11362 - DNA, 468 bp, Homo sapiens; identical to SEQ ID NO: 5070
  misc_feature 5, 43, 136, 256, 290, 428, 437, 444: n = A,T,C or G

SEQ ID NO: 11363 - DNA, 270 bp, Homo sapiens; identical to SEQ ID NO: 5071
  misc_feature 205: n = A,T,C or G

SEQ ID NO: 11364 - DNA, 512 bp, Homo sapiens; identical to SEQ ID NO: 5072
  misc_feature 1, 39, 41, 77, 78, 79, 101, 102, 112, 113, 114, 115, 118,122, 165, 166, 167, 171, 172, 174, 175, 176, 177, 191, 192,193, 203, 208, 212, 223, 234, 235, 241, 247, 252, 260, 261,262, 263, 283, 284, 286, 287, 288, 289, 304, 305, 308: n = A,T,C or G
  misc_feature 316, 317, 318, 323, 324, 325, 326, 327, 328, 329, 330, 331,336, 337, 342, 343, 344, 345, 347, 349, 355, 356, 377, 381,382, 383, 384, 390, 396, 397, 398, 399, 400, 401, 402, 403,404, 405, 406, 407, 408, 409, 410, 411, 416, 417, 418: n = A,T,C or G
  misc_feature 419, 420, 421, 422, 423, 424, 425, 426, 427, 428, 429, 430,431, 432, 433, 434, 435, 436, 437, 438, 439, 440, 441, 442,443, 447, 448, 449, 450, 451, 452, 453, 454, 455, 456, 457,458, 459, 460, 468, 469, 470, 471, 475, 476, 477, 478: n = A,T,C or G
  misc_feature 479, 480, 481, 482, 483, 484, 485, 486, 487, 488, 489, 490,491, 492, 493, 494, 495, 496: n = A,T,C or G

SEQ ID NO: 11365 - DNA, 280 bp, Homo sapiens; identical to SEQ ID NO: 5073
  misc_feature 4, 117, 123, 124, 132, 141, 153, 154, 155, 158, 160, 161,167, 168, 169, 195, 197, 198, 199, 201, 206, 207, 208, 209,210, 211, 218, 220, 224, 229, 230, 243, 249, 252, 256, 268: n = A,T,C or G

SEQ ID NO: 11366 - DNA, 334 bp, Homo sapiens; identical to SEQ ID NO: 5074
  misc_feature 33, 59, 61, 64, 65, 66, 69, 73, 167, 185, 243: n = A,T,C or G

SEQ ID NO: 11367 - DNA, 414 bp, Homo sapiens; identical to SEQ ID NO: 5075
  misc_feature 307: n = A,T,C or G

SEQ ID NO: 11368 - DNA, 525 bp, Homo sapiens; identical to SEQ ID NO: 5076

SEQ ID NO: 11369 - DNA, 480 bp, Homo sapiens; identical to SEQ ID NO: 5077

SEQ ID NO: 11370 - DNA, 632 bp, Homo sapiens; identical to SEQ ID NO: 5078
  misc_feature 42, 44, 104, 105, 119, 120, 129, 130, 135, 136, 137, 138,140, 141, 143, 145, 147, 152, 153, 155, 156, 159, 160, 162,167, 184, 196, 199, 200, 204, 215, 218, 222, 239, 245, 248,249, 252, 253, 273, 277, 283, 289, 300, 302, 311, 313: n = A,T,C or G
  misc_feature 315, 316, 321, 333, 338, 339, 340, 342, 344, 345, 346, 352,354, 356, 361, 370, 380, 386, 387, 403, 405, 409, 410, 412,413, 415, 419, 426, 428, 431, 449, 450, 452, 457, 458, 466,475, 478, 484, 495, 499, 502, 503, 504, 507, 509, 523: n = A,T,C or G
  misc_feature 524, 526, 548, 560, 567, 570, 573, 581, 583, 584, 586, 588,597, 603, 608, 609, 611, 612, 613: n = A,T,C or G

SEQ ID NO: 11371 - DNA, 332 bp, Homo sapiens; identical to SEQ ID NO: 5079
  misc_feature 305: n = A,T,C or G

SEQ ID NO: 11372 - DNA, 618 bp, Homo sapiens; identical to SEQ ID NO: 5080
  misc_feature 450, 511, 567, 576, 584, 591, 593: n = A,T,C or G

SEQ ID NO: 11373 - DNA, 506 bp, Homo sapiens; identical to SEQ ID NO: 5081
  misc_feature 400: n = A,T,C or G

SEQ ID NO: 11374 - DNA, 272 bp, Homo sapiens; identical to SEQ ID NO: 5082
  misc_feature 24, 32, 36, 51, 78, 111, 130, 132, 148, 180, 183, 195, 207,233, 246, 261: n = A,T,C or G

SEQ ID NO: 11375 - DNA, 353 bp, Homo sapiens; identical to SEQ ID NO: 5083
  misc_feature 182, 210, 214, 222, 227, 236, 242, 245, 285, 310, 323: n = A,T,C or G

SEQ ID NO: 11376 - DNA, 364 bp, Homo sapiens; identical to SEQ ID NO: 5084
  misc_feature 329, 346, 348, 353: n = A,T,C or G

SEQ ID NO: 11377 - DNA, 597 bp, Homo sapiens; identical to SEQ ID NO: 5085
  misc_feature 442, 487, 495: n = A,T,C or G

SEQ ID NO: 11378 - DNA, 264 bp, Homo sapiens; identical to SEQ ID NO: 5086

SEQ ID NO: 11379 - DNA, 427 bp, Homo sapiens; identical to SEQ ID NO: 5087

SEQ ID NO: 11380 - DNA, 389 bp, Homo sapiens; identical to SEQ ID NO: 5088
  misc_feature 54, 55, 105, 109, 110, 122, 123, 136, 137, 140, 150, 151,152, 153, 154, 157, 158, 160, 171, 172, 173, 182, 192, 207,212, 214, 216, 218, 219, 220, 224, 225, 232, 236, 240, 247,248, 257, 258, 260, 270, 272, 274, 279, 286, 289, 290: n = A,T,C or G
  misc_feature 291, 296, 299, 310, 312, 315, 320, 321, 326, 327, 328, 329,332, 333, 336, 337, 338, 339, 340, 341, 348, 349, 350, 354,355, 357, 358: n = A,T,C or G

SEQ ID NO: 11381 - DNA, 467 bp, Homo sapiens; identical to SEQ ID NO: 5089

SEQ ID NO: 11382 - DNA, 538 bp, Homo sapiens; identical to SEQ ID NO: 5090
  misc_feature 2, 82, 85, 184, 193, 197, 199, 204, 206, 208, 212, 218, 224,232, 238, 239, 243, 244, 247, 248, 252, 253, 255, 268, 271,272, 273, 274, 276, 277, 279, 280, 307, 311, 320, 324, 326,327, 330, 332, 333, 334, 335, 336, 337, 342, 343: n = A,T,C or G
  misc_feature 347, 354, 356, 359, 362, 363, 383, 384, 393, 397, 411, 427,433, 434, 435, 439, 440, 444, 446, 451, 452, 453, 454, 458,473, 474, 477, 478, 480, 481, 482, 483, 484, 485, 492, 496,503, 509, 511, 512, 513, 519, 527: n = A,T,C or G

SEQ ID NO: 11383 - DNA, 214 bp, Homo sapiens; identical to SEQ ID NO: 5091
  misc_feature 176, 177: n = A,T,C or G

SEQ ID NO: 11384 - DNA, 147 bp, Homo sapiens; identical to SEQ ID NO: 5092

SEQ ID NO: 11385 - DNA, 310 bp, Homo sapiens; identical to SEQ ID NO: 5093
  misc_feature 1, 156: n = A,T,C or G

SEQ ID NO: 11386 - DNA, 358 bp, Homo sapiens; identical to SEQ ID NO: 5094
  misc_feature 7, 57, 128, 280: n = A,T,C or G

SEQ ID NO: 11387 - DNA, 310 bp, Homo sapiens; identical to SEQ ID NO: 5095

SEQ ID NO: 11388 - DNA, 339 bp, Homo sapiens; identical to SEQ ID NO: 5096

SEQ ID NO: 11389 - DNA, 354 bp, Homo sapiens; identical to SEQ ID NO: 5097
  misc_feature 53, 55, 56, 65, 74, 75, 77, 80, 83, 86, 88, 99, 108, 111,112, 120, 124, 126, 137, 138, 140, 146, 168, 169, 170, 172,174, 177, 178, 181, 182, 183, 195, 196, 197, 198, 201, 212,214, 215, 216, 231, 240, 271, 274, 279, 287, 289, 292: n = A,T,C or G

SEQ ID NO: 11390 - DNA, 550 bp, Homo sapiens; identical to SEQ ID NO: 5098
  misc_feature 49, 51, 125, 126, 134, 139, 140, 141, 142, 157, 158, 159,160, 168, 174, 175, 185, 186, 187, 196, 204, 212, 218, 220,221, 222, 240, 241, 255, 257, 262, 264, 265, 266, 274, 277,291, 297, 298, 309, 310, 315, 334, 343, 346, 347, 348: n = A,T,C or G
  misc_feature 352, 355, 356, 358, 365, 373, 383, 391, 393, 394, 402, 403,407, 408, 418, 421, 427, 434, 435, 450, 460, 461, 462, 463,464, 467, 478, 490, 495, 496, 498, 499, 501, 502, 516, 521,523, 525, 529, 531, 537, 538: n = A,T,C or G

SEQ ID NO: 11391 - DNA, 419 bp, Homo sapiens; identical to SEQ ID NO: 5099
  misc_feature 99, 100, 101, 104, 114, 124, 127, 128, 130, 131, 132, 133,134, 135, 136, 137, 138, 139, 141, 144, 155, 159, 160, 161,162, 163, 164, 165, 166, 167, 175, 177, 178, 180, 182, 196,199, 200, 201, 202, 206, 207, 226, 227, 232, 233, 235: n = A,T,C or G
  misc_feature 237, 239, 245, 254, 256, 257, 258, 261, 270, 272, 290, 291,292, 309, 312, 314, 324, 326, 327, 328, 342, 355, 356, 360,367, 385, 386, 387, 391, 393, 394: n = A,T,C or G

SEQ ID NO: 11392 - DNA, 525 bp, Homo sapiens; identical to SEQ ID NO: 5100
  misc_feature 270, 271, 272, 273, 274, 275, 276, 277, 278, 279, 280, 281,282, 283, 284, 285, 286, 287, 288, 289, 290, 291, 292, 293,294, 295, 296, 297, 298, 299, 300, 301, 302, 303, 304, 305,306, 307, 308, 309, 310, 311, 312, 313, 314, 315, 316: n = A,T,C or G
  misc_feature 317, 318, 319, 320, 321, 322, 323, 324, 325, 326, 327, 328,329, 330, 331, 332, 333, 334, 335, 336, 337, 338, 339, 340,341, 342, 343, 344, 345, 346, 347, 348, 349, 350, 351, 352,353, 354, 355, 356, 357, 358, 359, 360, 361, 362, 363: n = A,T,C or G
  misc_feature 364, 365, 366, 367, 368, 369, 370, 371, 372, 373, 374, 375,376, 377, 378, 379, 380, 381, 382, 383, 384, 385, 386, 387,388, 389, 390, 391, 392, 393, 394, 395, 396, 397, 398, 399,400, 401, 402, 403, 404, 405, 406, 407, 408, 409, 410: n = A,T,C or G
  misc_feature 411, 412, 413, 414, 415, 416, 417, 418, 419, 420, 421, 422,423, 424, 425, 426, 427, 428, 429, 430, 431, 432, 433, 434,435, 436, 445: n = A,T,C or G

SEQ ID NO: 11393 - DNA, 539 bp, Homo sapiens; identical to SEQ ID NO: 5101
  misc_feature 92: n = A,T,C or G

SEQ ID NO: 11394 - DNA, 610 bp, Homo sapiens; identical to SEQ ID NO: 5102
  misc_feature 49, 123, 125, 127, 132, 133, 134, 135, 136, 137, 140, 141,143, 144, 145, 146, 160, 161, 168, 171, 172, 173, 174, 175,176, 179, 184, 185, 186, 206, 210, 211, 212, 213, 214, 215,217, 218, 221, 222, 223, 224, 235, 247, 257, 262, 264: n = A,T,C or G
  misc_feature 265, 274, 276, 277, 282, 283, 284, 285, 289, 291, 292, 313,315, 317, 318, 321, 329, 335, 336, 339, 340, 348, 349, 353,357, 358, 360, 372, 375, 376, 384, 387, 390, 398, 405, 409,414, 419, 421, 422, 436, 438, 450, 452, 453, 454, 455: n = A,T,C or G
  misc_feature 456, 459, 462, 463, 464, 474, 475, 476, 489, 491, 492, 499,504, 512, 514, 515, 517, 523, 525, 533, 535, 536, 537, 540,541, 542, 548, 550, 553, 554, 556, 557, 572, 573, 577, 578,579, 584, 586, 588, 589, 590, 591, 592, 594, 598, 610: n = A,T,C or G

SEQ ID NO: 11395 - DNA, 435 bp, Homo sapiens; identical to SEQ ID NO: 5103
  misc_feature 55, 153, 157, 170, 174, 177, 179, 187, 189, 190, 191, 192,193, 194, 197, 202, 204, 206, 215, 230, 231, 236, 241, 258,259, 262, 263, 265, 266, 267, 268, 269, 271, 272, 273, 287,288, 289, 291, 292, 293, 295, 299, 301, 302, 303, 322: n = A,T,C or G
  misc_feature 324, 340, 343, 347, 372, 373, 374, 375, 376, 384, 385, 397,406, 407, 410, 412, 413, 414, 418, 422, 424: n = A,T,C or G

SEQ ID NO: 11396 - DNA, 138 bp, Homo sapiens; identical to SEQ ID NO: 5104
  misc_feature 54: n = A,T,C or G

SEQ ID NO: 11397 - DNA, 550 bp, Homo sapiens; identical to SEQ ID NO: 5105
  misc_feature 50, 458, 467, 508, 537: n = A,T,C or G

SEQ ID NO: 11398 - DNA, 294 bp, Homo sapiens; identical to SEQ ID NO: 5106
  misc_feature 126, 127, 128, 142, 143, 144, 145, 146, 147, 148, 149, 162,174, 176, 177, 178, 181, 199, 206, 213, 223, 227, 228, 232,235, 255: n = A,T,C or G

SEQ ID NO: 11399 - DNA, 184 bp, Homo sapiens; identical to SEQ ID NO: 5107
  misc_feature 111, 115: n = A,T,C or G

SEQ ID NO: 11400 - DNA, 264 bp, Homo sapiens; identical to SEQ ID NO: 5108
  misc_feature 54, 55, 56, 116, 120, 122, 123, 125, 129, 133, 134, 135,136, 137, 138, 139, 140, 142, 144, 145, 147, 158, 165, 168,169, 170, 171, 172, 173, 175, 177, 178, 179, 180, 181, 184,185, 209, 211, 212, 214, 226, 227, 235, 238, 241, 245: n = A,T,C or G
  misc_feature 247, 248, 249, 251, 252, 260, 261: n = A,T,C or G

SEQ ID NO: 11401 - DNA, 612 bp, Homo sapiens; identical to SEQ ID NO: 5109
  misc_feature 601: n = A,T,C or G

SEQ ID NO: 11402 - DNA, 533 bp, Homo sapiens; identical to SEQ ID NO: 5110
  misc_feature 486, 518, 521: n = A,T,C or G

SEQ ID NO: 11403 - DNA, 504 bp, Homo sapiens; identical to SEQ ID NO: 5111
  misc_feature 20, 44, 75, 85, 141, 328, 333, 356, 403, 454, 466, 468, 477,480, 486: n = A,T,C or G

SEQ ID NO: 11404 - DNA, 637 bp, Homo sapiens; identical to SEQ ID NO: 5112
  misc_feature 333, 343, 352, 360, 363, 367, 372, 378, 398, 399, 414, 423,428, 436, 439, 448, 456, 457, 480, 494, 513, 525, 546, 565,568, 581, 586, 589, 600, 611, 613, 614, 615, 621, 635: n = A,T,C or G

SEQ ID NO: 11405 - DNA, 253 bp, Homo sapiens; identical to SEQ ID NO: 5113

SEQ ID NO: 11406 - DNA, 254 bp, Homo sapiens; identical to SEQ ID NO: 5114
  misc_feature 45, 244: n = A,T,C or G

SEQ ID NO: 11407 - DNA, 526 bp, Homo sapiens; identical to SEQ ID NO: 5115
  misc_feature 458: n = A,T,C or G

SEQ ID NO: 11408 - DNA, 440 bp, Homo sapiens; identical to SEQ ID NO: 5116

SEQ ID NO: 11409 - DNA, 614 bp, Homo sapiens; identical to SEQ ID NO: 5117
  misc_feature 64, 70, 81, 91, 92, 102, 124, 131, 135, 145, 147, 150, 168,182, 187, 194, 203, 224, 228, 230, 248, 255, 257, 267, 268,274, 276, 281, 298, 306, 311, 325, 326, 345, 358, 360, 363,368, 396, 440, 441, 442, 448, 455, 463, 477, 491, 495: n = A,T,C or G
  misc_feature 515, 526, 535, 546, 552, 564, 566, 568, 574, 580, 584, 595,596, 604: n = A,T,C or G

SEQ ID NO: 11410 - DNA, 545 bp, Homo sapiens; identical to SEQ ID NO: 5118
  misc_feature 277, 356, 518, 534: n = A,T,C or G

SEQ ID NO: 11411 - DNA, 283 bp, Homo sapiens; identical to SEQ ID NO: 5119

SEQ ID NO: 11412 - DNA, 629 bp, Homo sapiens; identical to SEQ ID NO: 5120
  misc_feature 55, 56, 57, 111, 112, 118, 120, 128, 129, 130, 131, 132,135, 137, 138, 140, 155, 156, 158, 160, 161, 162, 163, 179,185, 187, 198, 199, 201, 202, 208, 209, 210, 212, 213, 237,238, 242, 243, 244, 245, 246, 249, 259, 260, 268, 270: n = A,T,C or G
  misc_feature 271, 275, 278, 290, 295, 296, 298, 299, 300, 302, 303, 307,311, 318, 326, 328, 335, 336, 347, 349, 359, 362, 364, 368,375, 388, 393, 401, 412, 414, 420, 429, 430, 434, 435, 440,441, 443, 446, 447, 449, 453, 454, 458, 460, 461, 462: n = A,T,C or G
  misc_feature 463, 464, 483, 484, 488, 497, 503, 509, 517, 518, 520, 530,538, 540, 547, 550, 561, 573, 579, 581, 587, 593, 598, 607,608, 609, 613, 615, 622: n = A,T,C or G

SEQ ID NO: 11413 - DNA, 353 bp, Homo sapiens; identical to SEQ ID NO: 5121
  misc_feature 1, 9, 23, 73, 82, 85, 108, 126, 134, 145, 178, 216, 219,223, 225, 228, 230, 312, 337, 350: n = A,T,C or G

SEQ ID NO: 11414 - DNA, 494 bp, Homo sapiens; identical to SEQ ID NO: 5122
  misc_feature 438: n = A,T,C or G

SEQ ID NO: 11415 - DNA, 624 bp, Homo sapiens; identical to SEQ ID NO: 5123
  misc_feature 114, 115, 131, 134, 135, 136, 145, 146, 148, 150, 151, 152,153, 164, 167, 169, 175, 176, 177, 185, 186, 187, 188, 191,192, 193, 194, 203, 204, 206, 207, 208, 209, 210, 220, 221,222, 230, 235, 250, 251, 252, 269, 277, 287, 296, 297: n = A,T,C or G
  misc_feature 309, 311, 312, 315, 316, 340, 341, 347, 354, 360, 363, 366,368, 370, 374, 375, 376, 377, 382, 383, 393, 408, 411, 412,413, 414, 419, 422, 424, 435, 436, 453, 456, 464, 466, 472,473, 475, 483, 487, 493, 494, 499, 500, 514, 516, 518: n = A,T,C or G
  misc_feature 521, 522, 523, 524, 525, 526, 527, 528, 532, 538, 544, 546,548, 549, 551, 552, 557, 566, 586, 587, 588, 593, 602, 604,607, 612: n = A,T,C or G

SEQ ID NO: 11416 - DNA, 519 bp, Homo sapiens; identical to SEQ ID NO: 5124
  misc_feature 119: n = A,T,C or G

SEQ ID NO: 11417 - DNA, 435 bp, Homo sapiens; identical to SEQ ID NO: 5125
  misc_feature 1, 16, 130, 131, 143, 145, 146, 148, 149, 160, 165, 166,167, 179, 180, 192, 193, 197, 198, 200, 201, 202, 203, 204,205, 219, 225, 245, 246, 270, 271, 277, 279, 280, 281, 290,292, 299, 300, 301, 302, 303, 304, 305, 333, 352, 353: n = A,T,C or G
  misc_feature 365, 366, 367, 373, 375, 376, 381, 382, 383, 394, 395, 396,397, 398, 399, 402, 411, 412, 413, 414, 415, 416: n = A,T,C or G

SEQ ID NO: 11418 - DNA, 634 bp, Homo sapiens; identical to SEQ ID NO: 5127
  misc_feature 8, 52, 54, 57, 109, 112, 115, 117, 118, 123, 126, 130, 140,141, 142, 143, 147, 151, 153, 155, 156, 157, 159, 160, 164,170, 171, 172, 173, 184, 186, 187, 189, 193, 194, 197, 198,204, 206, 208, 211, 212, 215, 224, 227, 228, 229, 231: n = A,T,C or G
  misc_feature 233, 247, 248, 251, 256, 259, 261, 271, 278, 288, 289, 295,300, 306, 311, 315, 316, 317, 322, 323, 326, 327, 328, 330,357, 380, 387, 390, 398, 399, 417, 419, 429, 430, 434, 436,438, 439, 454, 468, 471, 475, 476, 491, 492, 493, 501: n = A,T,C or G
  misc_feature 503, 509, 516, 520, 522, 526, 534, 550, 582, 583, 586, 599,601, 602, 605, 607, 616, 620: n = A,T,C or G

SEQ ID NO: 11419 - DNA, 272 bp, Homo sapiens; identical to SEQ ID NO: 5128
  misc_feature 8, 52, 109, 163, 200, 250, 257: n = A,T,C or G

SEQ ID NO: 11420 - DNA, 679 bp, Homo sapiens; identical to SEQ ID NO: 5129
  misc_feature 60, 62, 108, 109, 121, 126, 142, 150, 151, 152, 165, 176,177, 184, 186, 192, 202, 205, 206, 207, 211, 223, 224, 227,237, 241, 249, 251, 252, 254, 261, 263, 267, 268, 269, 284,294, 300, 312, 315, 317, 318, 322, 331, 339, 356, 357: n = A,T,C or G
  misc_feature 362, 368, 369, 395, 403, 409, 418, 435, 444, 447, 451, 453,454, 457, 459, 461, 462, 470, 474, 475, 477, 488, 504, 513,514, 515, 516, 517, 520, 527, 545, 584, 585, 605, 607, 614,616, 639, 642, 657, 658, 661, 663: n = A,T,C or G

SEQ ID NO: 11421 - DNA, 566 bp, Homo sapiens; identical to SEQ ID NO: 5130
  misc_feature 246, 247, 249, 252, 253, 254, 256, 257, 258, 259, 260, 261,262, 264, 267, 268, 269, 273, 305, 376, 381, 399, 410, 412,422, 460, 481, 486, 527, 553: n = A,T,C or G

SEQ ID NO: 11422 - DNA, 390 bp, Homo sapiens; identical to SEQ ID NO: 5131
  misc_feature 151, 314, 321, 324, 356: n = A,T,C or G

SEQ ID NO: 11423 - DNA, 310 bp, Homo sapiens; identical to SEQ ID NO: 5132
  misc_feature 154, 277, 298, 306: n = A,T,C or G

SEQ ID NO: 11424 - DNA, 291 bp, Homo sapiens; identical to SEQ ID NO: 5133
  misc_feature 134, 135, 138, 139, 150, 152, 153, 162, 170, 172, 173, 174,176, 179, 180, 186, 187, 188, 204, 205, 212, 221, 223, 226,227, 228, 230, 238, 243, 244, 251, 253, 254, 256, 260, 265,266, 268, 269, 280: n = A,T,C or G

SEQ ID NO: 11425 - DNA, 656 bp, Homo sapiens; identical to SEQ ID NO: 5134
  misc_feature 6, 18, 20, 22, 24, 27, 32, 33, 34, 36, 37, 39, 46, 47, 48,49, 50, 63, 70, 124, 229, 339, 361, 376, 378, 383, 384,386, 387, 388, 396, 417, 423, 429, 433, 436, 441, 451, 452,453, 458, 462, 463, 468, 491, 492, 493, 495, 514, 515, 520: n = A,T,C or G
  misc_feature 526, 527, 528, 534, 543, 544, 546, 555, 556, 558, 575, 576,585, 591, 592, 593, 605, 610, 612, 614, 618, 619, 621, 629,633, 634, 635, 638, 641, 656: n = A,T,C or G

SEQ ID NO: 11426 - DNA, 553 bp, Homo sapiens; identical to SEQ ID NO: 5135
  misc_feature 63, 80, 91, 94, 95, 96, 112, 113, 125, 136, 140, 141, 142,143, 147, 148, 149, 150, 164, 175, 180, 181, 183, 188, 189,190, 199, 212, 218, 235, 236, 237, 250, 259, 260, 261, 262,282, 285, 286, 289, 300, 304, 331, 339, 340, 351, 362: n = A,T,C or G
  misc_feature 365, 367, 376, 383, 384, 388, 389, 390, 391, 395, 398, 399,400, 402, 403, 404, 407, 416, 419, 431, 438, 440, 454, 463,464, 466, 467, 468, 469, 481, 484, 485, 487, 488, 493, 502,504, 505, 506, 507, 508, 509, 510, 511, 512, 513, 514: n = A,T,C or G
  misc_feature 515, 516, 517, 518, 519, 520, 521, 522, 523, 524, 525, 526,527, 528, 529, 532, 533, 534, 535, 536, 547: n = A,T,C or G

SEQ ID NO: 11427 - DNA, 535 bp, Homo sapiens; identical to SEQ ID NO: 5136
  misc_feature 459, 499: n = A,T,C or G

SEQ ID NO: 11428 - DNA, 249 bp, Homo sapiens; identical to SEQ ID NO: 5137
  misc_feature 182, 183, 184: n = A,T,C or G

SEQ ID NO: 11429 - DNA, 475 bp, Homo sapiens; identical to SEQ ID NO: 5138
  misc_feature 109, 114, 142, 145, 157, 160, 167, 177, 185, 195, 203, 206,209, 220, 231, 244, 250, 264, 284, 286, 291, 296, 297, 316,326, 333, 342, 367, 385, 391, 397, 414, 419, 428, 432, 443,451, 465: n = A,T,C or G

SEQ ID NO: 11430 - DNA, 403 bp, Homo sapiens; identical to SEQ ID NO: 5139

SEQ ID NO: 11431 - DNA, 362 bp, Homo sapiens; identical to SEQ ID NO: 5140
  misc_feature 30, 36, 265, 306, 327: n = A,T,C or G

SEQ ID NO: 11432 - DNA, 346 bp, Homo sapiens; identical to SEQ ID NO: 5141
  misc_feature 140, 141, 147, 148, 149, 150, 152, 156, 158, 162, 164, 172,174, 176, 184, 189, 200, 204, 207, 208, 211, 215, 217, 218,221, 230, 232, 233, 234, 235, 239, 242, 246, 249, 257, 258,262, 268, 269, 276, 277, 299, 303, 307, 310, 311, 312: n = A,T,C or G
  misc_feature 316, 319, 320, 322, 330: n = A,T,C or G

SEQ ID NO: 11433 - DNA, 526 bp, Homo sapiens; identical to SEQ ID NO: 5142
  misc_feature 429, 498: n = A,T,C or G

SEQ ID NO: 11434 - DNA, 354 bp, Homo sapiens; identical to SEQ ID NO: 5143
  misc_feature 58, 128, 129, 132, 133, 143, 144, 145, 146, 149, 150, 151,166, 168, 169, 173, 177, 178, 180, 181, 187, 194, 197, 198,201, 202, 205, 217, 218, 220, 221, 222, 239, 242, 244, 248,254, 255, 274, 281, 305, 311, 314, 315, 318, 322, 326: n = A,T,C or G
  misc_feature 328, 332, 335, 336, 351: n = A,T,C or G

SEQ ID NO: 11435 - DNA, 356 bp, Homo sapiens; identical to SEQ ID NO: 5144
  misc_feature 133, 135, 136, 137, 138, 153, 154, 155, 164, 166, 167, 168,172, 173, 176, 193, 196, 197, 198, 199, 200, 204, 206, 207,211, 212, 213, 215, 218, 219, 224, 234, 235, 239, 240, 244,263, 266, 267, 269, 270, 271, 273, 282, 283, 290, 291: n = A,T,C or G
  misc_feature 294, 295, 307, 308, 313, 315, 325, 339, 340, 341, 344, 349: n = A,T,C or G

SEQ ID NO: 11436 - DNA, 335 bp, Homo sapiens; identical to SEQ ID NO: 5145

SEQ ID NO: 11437 - DNA, 284 bp, Homo sapiens; identical to SEQ ID NO: 5146
  misc_feature 1, 9, 47, 71, 92, 104, 146, 164, 172, 190, 192, 206, 210,219, 231, 238, 239, 242, 256, 260, 273: n = A,T,C or G

SEQ ID NO: 11438 - DNA, 310 bp, Homo sapiens; identical to SEQ ID NO: 5147

SEQ ID NO: 11439 - DNA, 396 bp, Homo sapiens; identical to SEQ ID NO: 5148
  misc_feature 29, 104, 196, 207, 221, 229, 243, 256, 271, 272, 285, 287,288, 291, 315, 327, 329, 351, 364, 369, 378, 382: n = A,T,C or G

SEQ ID NO: 11440 - DNA, 310 bp, Homo sapiens; identical to SEQ ID NO: 5149
  misc_feature 289: n = A,T,C or G

SEQ ID NO: 11441 - DNA, 449 bp, Homo sapiens; identical to SEQ ID NO: 5150
  misc_feature 63, 68, 71, 76, 77, 79, 80, 84, 91, 92, 99, 100, 104, 105,110, 111, 112, 114, 115, 117, 118, 120, 121, 123, 124, 125,126, 132, 133, 134, 146, 152, 155, 156, 160, 169, 174, 176,180, 181, 184, 190, 200, 220, 221, 228, 234, 246, 255: n = A,T,C or G
  misc_feature 263, 264, 275, 279, 292, 294, 301, 307, 308, 316, 329, 330,336, 337, 338, 339, 349, 350, 356, 357, 363, 369, 370, 376,378, 380, 386, 392, 393, 395, 396, 397, 401, 404, 405, 407,414, 421, 423, 424, 426, 428, 429, 437, 438: n = A,T,C or G

SEQ ID NO: 11442 - DNA, 417 bp, Homo sapiens; identical to SEQ ID NO: 5151

SEQ ID NO: 11443 - DNA, 252 bp, Homo sapiens; identical to SEQ ID NO: 5152

SEQ ID NO: 11444 - DNA, 272 bp, Homo sapiens; identical to SEQ ID NO: 5153
  misc_feature 51, 52, 53, 94, 95, 97, 98, 100, 125, 126, 129, 138, 139,159, 161, 162, 164, 165, 166, 168, 178, 180, 186, 187, 196,198, 211, 217, 221, 222, 223, 226, 227, 231, 235, 243, 244,247, 248, 249, 251, 254, 256, 258, 259, 260, 261, 265: n = A,T,C or G
  misc_feature 267: n = A,T,C or G

SEQ ID NO: 11445 - DNA, 411 bp, Homo sapiens; identical to SEQ ID NO: 5154

SEQ ID NO: 11446 - DNA, 462 bp, Homo sapiens; identical to SEQ ID NO: 5155

SEQ ID NO: 11447 - DNA, 528 bp, Homo sapiens; identical to SEQ ID NO: 5156
  misc_feature 207, 308, 333, 359, 421, 432, 462, 467, 486: n = A,T,C or G

SEQ ID NO: 11448 - DNA, 346 bp, Homo sapiens; identical to SEQ ID NO: 5157

SEQ ID NO: 11449 - DNA, 436 bp, Homo sapiens; identical to SEQ ID NO: 5158
  misc_feature 37, 67, 68, 178, 189, 297, 356, 364, 384, 386, 392, 394,395, 398, 402, 405, 422: n = A,T,C or G

SEQ ID NO: 11450 - DNA, 411 bp, Homo sapiens; identical to SEQ ID NO: 5159

SEQ ID NO: 11451 - DNA, 635 bp, Homo sapiens; identical to SEQ ID NO: 5160
  misc_feature 398, 423, 446, 492, 493, 495, 501, 511, 514, 520, 533, 585,609, 615, 621, 624, 633: n = A,T,C or G

SEQ ID NO: 11452 - DNA, 518 bp, Homo sapiens; identical to SEQ ID NO: 5162
  misc_feature 206, 234, 325, 339, 361, 385, 398, 418, 428, 430, 433, 446,455, 458, 461, 464, 466, 484, 492, 493: n = A,T,C or G

SEQ ID NO: 11453 - DNA, 556 bp, Homo sapiens; identical to SEQ ID NO: 5163
  misc_feature 396: n = A,T,C or G

SEQ ID NO: 11454 - DNA, 653 bp, Homo sapiens; identical to SEQ ID NO: 5164
  misc_feature 319, 407, 423, 460, 467, 470, 471, 497, 501, 549, 555, 585,609, 613, 625, 630, 637, 649: n = A,T,C or G

SEQ ID NO: 11455 - DNA, 491 bp, Homo sapiens; identical to SEQ ID NO: 5165
  misc_feature 467: n = A,T,C or G

SEQ ID NO: 11456 - DNA, 401 bp, Homo sapiens; identical to SEQ ID NO: 5166

SEQ ID NO: 11457 - DNA, 372 bp, Homo sapiens; identical to SEQ ID NO: 5167
  misc_feature 32, 58, 81, 91, 124, 163, 165, 167, 171, 179, 193, 198, 209,211, 214, 217, 221, 223, 224, 225, 238, 245, 246, 258, 273,274, 287, 289, 295, 300, 310, 318, 330, 333, 334, 338, 339,351, 353, 355, 356, 358: n = A,T,C or G

SEQ ID NO: 11458 - DNA, 519 bp, Homo sapiens; identical to SEQ ID NO: 5168
  misc_feature 32, 40, 46, 55, 58, 61, 64, 66, 67, 68, 72, 73, 83, 84, 85,86, 87, 92, 94, 95, 105, 110, 112, 114, 115, 117, 119, 123,124, 138, 145, 147, 149, 152, 159, 161, 165, 170, 172, 174,177, 195, 197, 199, 203, 205, 207, 208, 214, 218, 221: n = A,T,C or G
  misc_feature 230, 232, 239, 241, 248, 493: n = A,T,C or G

SEQ ID NO: 11459 - DNA, 500 bp, Homo sapiens; identical to SEQ ID NO: 5170

SEQ ID NO: 11460 - DNA, 490 bp, Homo sapiens; identical to SEQ ID NO: 5171
  misc_feature 200, 206, 208, 212, 213, 214, 215, 216, 217, 222, 223, 225,226, 229, 237, 240, 241, 243, 246, 256, 257, 258, 259, 260,262, 263, 268, 283, 286, 287, 290, 292, 293, 295, 298, 313,315, 316, 320, 321, 322, 323, 327, 337, 340, 350, 353: n = A,T,C or G
  misc_feature 355, 362, 363, 364, 365, 373, 374, 376, 379, 380, 382, 383,385, 390, 399, 402, 406, 410, 413, 415, 418, 419, 422, 423,424, 426, 435, 442, 445, 446, 452, 457, 466, 472, 473: n = A,T,C or G

SEQ ID NO: 11461 - DNA, 470 bp, Homo sapiens; identical to SEQ ID NO: 5172
  misc_feature 4, 31, 32, 41, 42, 54, 57, 62, 69, 96, 99, 106, 110, 111,112, 121, 123, 129, 142, 146, 147, 148, 149, 158, 159, 162,171, 175, 180, 193, 199, 204, 207, 217, 218, 222, 247, 251,267, 268, 269, 274, 275, 276, 277, 299, 301, 314, 326: n = A,T,C or G
  misc_feature 330, 355, 358, 367, 372, 394, 419: n = A,T,C or G

SEQ ID NO: 11462 - DNA, 448 bp, Homo sapiens; identical to SEQ ID NO: 5173
  misc_feature 121: n = A,T,C or G

SEQ ID NO: 11463 - DNA, 407 bp, Homo sapiens; identical to SEQ ID NO: 5174
  misc_feature 393, 405: n = A,T,C or G

SEQ ID NO: 11464 - DNA, 517 bp, Homo sapiens; identical to SEQ ID NO: 5175
  misc_feature 60, 64, 65, 66, 67, 68, 71, 72, 73, 74, 76, 78, 79, 80, 81,83, 84, 91, 93, 101, 103, 104, 114, 117, 118, 119, 120,124, 125, 126, 127, 128, 129, 132, 133, 137, 138, 147, 148,149, 150, 152, 153, 154, 157, 158, 166, 172, 175, 178: n = A,T,C or G
  misc_feature 180, 181, 182, 185, 186, 187, 188, 189, 192, 197, 205, 206,207, 221, 228, 229, 236, 237, 238, 240, 242, 243, 248, 253,258, 259, 260, 266, 267, 283, 284, 293, 294, 309, 312, 322,323, 325, 326, 329, 330, 336, 337, 338, 339, 340, 341: n = A,T,C or G
  misc_feature 343, 349, 372, 394, 396, 409, 417, 418, 431, 435, 436, 443,444, 445, 446, 460, 480, 481, 484, 505, 506, 507: n = A,T,C or G

SEQ ID NO: 11465 - DNA, 605 bp, Homo sapiens; identical to SEQ ID NO: 5176
  misc_feature 530, 543: n = A,T,C or G

SEQ ID NO: 11466 - DNA, 363 bp, Homo sapiens; identical to SEQ ID NO: 5177
  misc_feature 290, 298: n = A,T,C or G

SEQ ID NO: 11467 - DNA, 343 bp, Homo sapiens; identical to SEQ ID NO: 5178
  misc_feature 29, 77, 142, 145, 146, 147, 148, 149, 150, 151, 152, 159,160, 162, 164, 166, 173, 174, 182, 183, 185, 186, 187, 192,197, 198, 205, 208, 209, 210, 215, 216, 220, 224, 225, 231,232, 242, 243, 250, 251, 254, 263, 265, 266, 267, 272: n = A,T,C or G
  misc_feature 287, 299, 301, 302, 318, 321, 330: n = A,T,C or G

SEQ ID NO: 11468 - DNA, 825 bp, Homo sapiens; identical to SEQ ID NO: 5179
  misc_feature 19, 35, 525, 565, 572, 609, 619, 627, 639, 660, 675, 683,692, 720, 726, 738, 745, 746, 770, 773, 784, 810: n = A,T,C or G

SEQ ID NO: 11469 - DNA, 482 bp, Homo sapiens; identical to SEQ ID NO: 5180

SEQ ID NO: 11470 - DNA, 614 bp, Homo sapiens; identical to SEQ ID NO: 5181
  misc_feature 30, 31, 158, 351, 369, 413, 421, 461, 472, 473, 475, 484,490, 521, 566, 568, 595, 597, 610: n = A,T,C or G

SEQ ID NO: 11471 - DNA, 522 bp, Homo sapiens; identical to SEQ ID NO: 5182
  misc_feature 382, 383, 384, 385, 386, 387, 388, 389, 390, 391, 392, 393,394, 395, 396, 397, 398, 399, 400, 401, 402, 403, 404, 405,406, 407, 408, 409, 410, 411, 412, 413, 414, 415, 416, 417,418, 419, 420, 421, 422, 423, 424, 425, 426, 427, 428: n = A,T,C or G
  misc_feature 429, 430, 431, 432, 433, 434, 435, 436, 437, 438, 439, 440,441, 442, 443, 444, 445, 446, 447, 448, 449, 450, 451, 452,453, 454, 455, 456, 457, 458, 459, 460, 461, 462, 463, 464,465, 466, 467, 468, 469, 470, 471, 472, 473, 474, 475: n = A,T,C or G
  misc_feature 476, 477, 504: n = A,T,C or G

SEQ ID NO: 11472 - DNA, 384 bp, Homo sapiens; identical to SEQ ID NO: 5183
  misc_feature 211, 327: n = A,T,C or G

SEQ ID NO: 11473 - DNA, 431 bp, Homo sapiens; identical to SEQ ID NO: 5184

SEQ ID NO: 11474 - DNA, 476 bp, Homo sapiens; identical to SEQ ID NO: 5185
  misc_feature 13: n = A,T,C or G

SEQ ID NO: 11475 - DNA, 684 bp, Homo sapiens; identical to SEQ ID NO: 5186
  misc_feature 430, 486, 583, 586, 593, 651: n = A,T,C or G

SEQ ID NO: 11476 - DNA, 551 bp, Homo sapiens; identical to SEQ ID NO: 5187
  misc_feature 54, 60, 67, 73, 129, 165, 222, 231, 232, 235, 242, 269, 277,341, 349, 357, 399, 403, 449, 452, 463, 467, 474, 482, 495,506, 514, 515, 517, 518, 519, 530: n = A,T,C or G

SEQ ID NO: 11477 - DNA, 486 bp, Homo sapiens; identical to SEQ ID NO: 5189

SEQ ID NO: 11478 - DNA, 608 bp, Homo sapiens; identical to SEQ ID NO: 5190
  misc_feature 157, 161, 162, 163, 164, 165, 166, 167, 182, 204, 220, 221,222, 223, 227, 228, 236, 238, 244, 245, 246, 248, 249, 252,259, 270, 271, 272, 274, 275, 281, 282, 283, 285, 288, 292,293, 294, 295, 308, 309, 321, 322, 329, 330, 331, 337: n = A,T,C or G
  misc_feature 342, 343, 345, 353, 356, 357, 362, 363, 364, 365, 366, 371,384, 387, 388, 392, 393, 394, 399, 416, 418, 421, 432, 438,459, 460, 463, 470, 474, 476, 479, 486, 487, 488, 492, 502,510, 520, 521, 522, 523, 525, 526, 527, 530, 531, 536: n = A,T,C or G
  misc_feature 537, 538, 539, 540, 541, 544, 545, 546, 547, 550, 551, 552,553, 557, 558, 560, 577, 580, 582, 583, 586, 588, 589, 590,591, 592, 593, 594: n = A,T,C or G

SEQ ID NO: 11479 - DNA, 391 bp, Homo sapiens; identical to SEQ ID NO: 5191
  misc_feature 327: n = A,T,C or G

SEQ ID NO: 11480 - DNA, 238 bp, Homo sapiens; identical to SEQ ID NO: 5192
  misc_feature 12, 217: n = A,T,C or G

SEQ ID NO: 11481 - DNA, 425 bp, Homo sapiens; identical to SEQ ID NO: 5193
  misc_feature 30, 33, 57, 58, 147, 182, 203, 213, 224, 281, 332: n = A,T,C or G

SEQ ID NO: 11482 - DNA, 597 bp, Homo sapiens; identical to SEQ ID NO: 5194
  misc_feature 103, 105, 114, 241, 247, 248, 255, 275, 469, 543, 582, 593: n = A,T,C or G

SEQ ID NO: 11483 - DNA, 478 bp, Homo sapiens; identical to SEQ ID NO: 5195
  misc_feature 51, 54, 57, 60, 63, 64, 65, 68, 72, 87, 88, 89, 90, 94, 102,108, 113, 121, 124, 128, 133, 134, 135, 145, 146, 147, 149,150, 152, 153, 161, 162, 163, 164, 165, 166, 174, 175, 176,177, 187, 188, 195, 235, 236, 237, 238, 246, 251: n = A,T,C or G
  misc_feature 252, 253, 257, 258, 259, 260, 261, 262, 264, 265, 266, 274,275, 278, 290, 300, 308, 318, 319, 321, 322, 328, 329, 330,331, 332, 336, 348, 350, 351, 355, 363, 368, 370, 374, 375,388, 389, 390, 404, 410, 412, 426, 428, 438, 440, 441: n = A,T,C or G
  misc_feature 446, 461, 473: n = A,T,C or G

SEQ ID NO: 11484 - DNA, 417 bp, Homo sapiens; identical to SEQ ID NO: 5196
  misc_feature 43, 57, 70, 163, 184, 186, 264, 275, 281, 285, 291, 297,314, 320, 322, 332, 336, 339, 358, 360, 368, 370, 377, 380,392, 393, 397, 406, 407, 413: n = A,T,C or G

SEQ ID NO: 11485 - DNA, 250 bp, Homo sapiens; identical to SEQ ID NO: 5197
  misc_feature 71, 76, 143, 147, 181, 220, 227: n = A,T,C or G

SEQ ID NO: 11486 - DNA, 331 bp, Homo sapiens; identical to SEQ ID NO: 5198

SEQ ID NO: 11487 - DNA, 429 bp, Homo sapiens; identical to SEQ ID NO: 5199
  misc_feature 311: n = A,T,C or G

SEQ ID NO: 11488 - DNA, 371 bp, Homo sapiens; identical to SEQ ID NO: 5200
  misc_feature 48, 123, 125, 127, 133, 134, 137, 138, 159, 164, 172, 173,174, 175, 182, 183, 188, 203, 205, 210, 229, 243, 250, 251,252, 253, 255, 257, 258, 260, 264, 268, 284, 285, 286, 287,288, 289, 297, 298, 299, 300, 301, 302, 308, 309, 310: n = A,T,C or G
  misc_feature 318, 319, 320, 321, 322, 323, 326, 327, 345, 347, 351, 352,354, 355: n = A,T,C or G

SEQ ID NO: 11489 - DNA, 494 bp, Homo sapiens; identical to SEQ ID NO: 5201
  misc_feature 7, 182, 183, 184, 225, 286, 288, 289, 295, 300, 302, 304,307, 317, 348, 349, 350, 352, 359, 360, 368, 369, 372, 374,375, 380, 381, 384, 385, 386, 387, 391, 392, 393, 398, 404,406, 413, 415, 416, 417, 426, 434, 436, 442, 448, 454: n = A,T,C or G
  misc_feature 459, 460, 461, 464, 465, 467, 470, 473, 474, 475, 476, 480,482, 483, 492: n = A,T,C or G

SEQ ID NO: 11490 - DNA, 531 bp, Homo sapiens; identical to SEQ ID NO: 5203
  misc_feature 418: n = A,T,C or G

SEQ ID NO: 11491 - DNA, 484 bp, Homo sapiens; identical to SEQ ID NO: 5204
  misc_feature 171, 264, 285, 416, 420, 475: n = A,T,C or G

SEQ ID NO: 11492 - DNA, 330 bp, Homo sapiens; identical to SEQ ID NO: 5205
  misc_feature 95, 96, 111, 114, 118, 119, 120, 123, 131, 132, 135, 138,141, 143, 144, 146, 147, 150, 151, 152, 155, 156, 157, 158,159, 160, 182, 186, 198, 203, 218, 235, 239, 241, 242, 243,244, 245, 252, 253, 256, 265, 266, 267, 269, 272, 274: n = A,T,C or G
  misc_feature 280, 282, 283, 284, 285, 287, 288, 289, 290, 296, 297, 298,304, 305, 306, 310, 311, 316, 317, 318, 319, 320, 321: n = A,T,C or G

SEQ ID NO: 11493 - DNA, 486 bp, Homo sapiens; identical to SEQ ID NO: 5206
  misc_feature 52, 53, 54, 55, 56, 57, 58, 59, 60, 61, 62, 63, 64, 65, 66,67, 68, 69, 70, 71, 72, 73, 74, 75, 76, 77, 78, 79, 80,81, 82, 83, 84, 85, 86, 87, 88, 89, 90, 91, 92, 93, 94,95, 96, 97, 98, 99, 100, 101, 102, 103, 104, 105, 106, 107: n = A,T,C or G
  misc_feature 108, 109, 110, 111, 112, 113, 114, 115, 116, 117, 118, 119,120, 121, 122, 123, 124, 125, 126, 128, 129, 130, 131, 132,133, 134, 135, 136, 137, 138, 139, 140, 141, 142, 143, 144,145, 146, 147, 148, 149, 150, 151, 152, 153, 154, 155: n = A,T,C or G
  misc_feature 156, 157, 158, 159, 160, 161, 162, 163, 164, 165, 166, 167,168, 169, 170, 171, 172, 173, 174, 175, 176, 177, 178, 179,180, 190, 204, 233, 251, 279, 281, 298, 305, 306, 307, 364,367, 399, 405, 409, 418, 435, 438, 440, 452, 463, 470: n = A,T,C or G
  misc_feature 475: n = A,T,C or G

SEQ ID NO: 11494 - DNA, 566 bp, Homo sapiens; identical to SEQ ID NO: 5207
  misc_feature 533, 550: n = A,T,C or G

SEQ ID NO: 11495 - DNA, 576 bp, Homo sapiens; identical to SEQ ID NO: 5208
  misc_feature 8, 60, 61, 66, 153, 154, 155, 156, 172, 173, 174, 181, 188,190, 191, 193, 195, 196, 197, 200, 204, 205, 209, 214, 218,235, 246, 250, 252, 255, 272, 278, 279, 288, 295, 296, 297,298, 299, 300, 301, 306, 309, 311, 315, 316, 322, 329: n = A,T,C or G
  misc_feature 331, 332, 334, 335, 339, 340, 343, 350, 352, 353, 355, 364,365, 366, 367, 369, 370, 376, 378, 379, 383, 389, 390, 393,395, 399, 400, 401, 403, 404, 405, 406, 416, 428, 429, 430,437, 439, 443, 452, 457, 459, 465, 468, 476, 477, 478: n = A,T,C or G
  misc_feature 479, 480, 481, 483, 498, 500, 501, 502, 511, 522, 523, 524,530, 532, 536, 537, 543, 550, 552, 553, 571: n = A,T,C or G

SEQ ID NO: 11496 - DNA, 798 bp, Homo sapiens; identical to SEQ ID NO: 5209
  misc_feature 359, 453, 463, 467, 473, 484, 490, 498, 520, 525, 534, 537,546, 551, 570, 573, 575, 581, 585, 590, 596, 623, 631, 633,636, 651, 652, 659, 683, 692, 707, 718, 719, 756, 761, 763,769, 772, 773, 778: n = A,T,C or G

SEQ ID NO: 11497 - DNA, 511 bp, Homo sapiens; identical to SEQ ID NO: 5210
  misc_feature 490: n = A,T,C or G

SEQ ID NO: 11498 - DNA, 472 bp, Homo sapiens; identical to SEQ ID NO: 5211
  misc_feature 20: n = A,T,C or G

SEQ ID NO: 11499 - DNA, 495 bp, Homo sapiens; identical to SEQ ID NO: 5212
  misc_feature 4, 175, 184, 197, 198, 207, 208, 215, 217, 219, 220, 221,223, 224, 225, 233, 234, 239, 245, 246, 247, 248, 249, 250,251, 269, 270, 271, 286, 287, 289, 296, 297, 298, 299, 300,303, 304, 305, 306, 311, 312, 313, 314, 315, 316, 317: n = A,T,C or G
  misc_feature 318, 319, 320, 321, 323, 324, 362, 363, 365, 366, 370, 371,380, 381, 386, 387, 388, 396, 397, 403, 404, 409, 410, 411,412, 413, 414, 415, 416, 417, 418, 419, 420, 421, 422, 423,424, 425, 426, 427, 428, 429, 430, 431, 432, 433, 434: n = A,T,C or G
  misc_feature 435, 436, 437, 438, 439, 442, 455, 456, 457, 458, 459, 460,461, 462, 463, 464, 465, 466, 472, 473, 474, 475, 476, 477,478, 479, 480, 481, 482, 492: n = A,T,C or G

SEQ ID NO: 11500 - DNA, 688 bp, Homo sapiens; identical to SEQ ID NO: 5213
  misc_feature 602, 610, 615, 643, 644, 667, 684: n = A,T,C or G

SEQ ID NO: 11501 - DNA, 428 bp, Homo sapiens; identical to SEQ ID NO: 5214

SEQ ID NO: 11502 - DNA, 619 bp, Homo sapiens; identical to SEQ ID NO: 5215
  misc_feature 594, 602: n = A,T,C or G

SEQ ID NO: 11503 - DNA, 419 bp, Homo sapiens; identical to SEQ ID NO: 5216
  misc_feature 164, 224, 236, 282, 297, 338, 345, 350, 354, 373: n = A,T,C or G

SEQ ID NO: 11504 - DNA, 371 bp, Homo sapiens; identical to SEQ ID NO: 5217
  misc_feature 8: n = A,T,C or G

SEQ ID NO: 11505 - DNA, 463 bp, Homo sapiens; identical to SEQ ID NO: 5218
  misc_feature 55, 76, 81, 93, 108, 119, 121, 124, 126, 133, 142, 146, 151,185, 189, 218, 224, 230, 264, 274, 290, 294, 301, 306, 309,311, 312, 318, 320, 326, 347, 349, 367, 378, 380, 395, 403,421, 427, 433, 441, 443, 447: n = A,T,C or G

SEQ ID NO: 11506 - DNA, 367 bp, Homo sapiens; identical to SEQ ID NO: 5219
  misc_feature 53, 55, 90, 98, 103, 104, 110, 112, 119, 121, 127, 128, 129,130, 138, 139, 140, 141, 147, 152, 153, 163, 164, 170, 171,181, 182, 189, 190, 191, 201, 216, 224, 225, 227, 228, 235,238, 239, 240, 242, 243, 245, 257, 261, 262, 264: n = A,T,C or G
  misc_feature 266, 278, 279, 280, 281, 289, 298, 299, 300, 303, 304, 305,308, 309, 321, 326, 329, 336, 345, 347, 362: n = A,T,C or G

SEQ ID NO: 11507 - DNA, 495 bp, Homo sapiens; identical to SEQ ID NO: 5220
  misc_feature 53, 142, 151, 160, 251, 278, 310, 311, 312, 322, 326, 334,374, 394, 410, 412, 442, 453, 468: n = A,T,C or G

SEQ ID NO: 11508 - DNA, 416 bp, Homo sapiens; identical to SEQ ID NO: 5221
  misc_feature 271: n = A,T,C or G

SEQ ID NO: 11509 - DNA, 652 bp, Homo sapiens; identical to SEQ ID NO: 5222
  misc_feature 572, 595, 599, 600, 601, 602, 603, 604, 605, 606, 607, 608,611, 612, 613, 614, 615: n = A,T,C or G

SEQ ID NO: 11510 - DNA, 505 bp, Homo sapiens; identical to SEQ ID NO: 5223
  misc_feature 459: n = A,T,C or G

SEQ ID NO: 11511 - DNA, 261 bp, Homo sapiens; identical to SEQ ID NO: 5224

SEQ ID NO: 11512 - DNA, 503 bp, Homo sapiens; identical to SEQ ID NO: 5225
  misc_feature 39, 56, 87, 88, 91, 92, 93, 102, 111, 112, 113, 116, 123,132, 135, 139, 140, 153, 156, 157, 160, 161, 171, 178, 182,188, 194, 205, 208, 210, 211, 216, 221, 242, 247, 250, 258,259, 261, 263, 268, 282, 285, 286, 292, 293, 294, 295: n = A,T,C or G
  misc_feature 296, 298, 301, 303, 311, 312, 313, 316, 319, 333, 340, 350,352, 371, 375, 378, 484, 496: n = A,T,C or G

SEQ ID NO: 11513 - DNA, 342 bp, Homo sapiens; identical to SEQ ID NO: 5226

SEQ ID NO: 11514 - DNA, 563 bp, Homo sapiens; identical to SEQ ID NO: 5227
  misc_feature 440, 540: n = A,T,C or G

SEQ ID NO: 11515 - DNA, 416 bp, Homo sapiens; identical to SEQ ID NO: 5228
  misc_feature 1, 2, 4, 16, 25, 39, 44, 45, 46, 47, 51, 62, 70, 77, 84,92, 95, 98, 123, 143, 144, 192, 230, 237, 246, 269, 288,291, 305, 307, 315, 330, 342, 345, 366, 372, 373, 384, 385: n = A,T,C or G

SEQ ID NO: 11516 - DNA, 527 bp, Homo sapiens; identical to SEQ ID NO: 5229
  misc_feature 28, 218, 285, 309, 328, 362, 383, 421, 430, 438, 452, 454,467, 473, 509, 511, 516, 518: n = A,T,C or G

SEQ ID NO: 11517 - DNA, 174 bp, Homo sapiens; identical to SEQ ID NO: 5230
  misc_feature 100: n = A,T,C or G

SEQ ID NO: 11518 - DNA, 418 bp, Homo sapiens; identical to SEQ ID NO: 5231

SEQ ID NO: 11519 - DNA, 273 bp, Homo sapiens; identical to SEQ ID NO: 5232

SEQ ID NO: 11520 - DNA, 364 bp, Homo sapiens; identical to SEQ ID NO: 5233
  misc_feature 99, 102, 118, 163, 210, 235, 241, 248, 263, 266, 273, 276,277, 285, 286, 288, 296, 308, 315, 316, 318, 343, 353, 362: n = A,T,C or G

SEQ ID NO: 11521 - DNA, 439 bp, Homo sapiens; identical to SEQ ID NO: 5234
  misc_feature 315, 327, 414, 425: n = A,T,C or G

SEQ ID NO: 11522 - DNA, 452 bp, Homo sapiens; identical to SEQ ID NO: 5235

SEQ ID NO: 11523 - DNA, 465 bp, Homo sapiens; identical to SEQ ID NO: 5236

SEQ ID NO: 11524 - DNA, 793 bp, Homo sapiens; identical to SEQ ID NO: 5237
  misc_feature 57, 61, 105, 106, 110, 121, 141, 142, 144, 145, 146, 147,149, 152, 153, 157, 163, 164, 165, 166, 167, 168, 171, 172,176, 180, 181, 182, 187, 194, 195, 196, 197, 198, 199, 200,201, 219, 223, 224, 225, 230, 231, 232, 236, 242, 244: n = A,T,C or G
  misc_feature 246, 260, 262, 266, 267, 268, 272, 273, 275, 276, 278, 287,292, 299, 310, 317, 320, 322, 325, 326, 327, 328, 329, 330,331, 332, 333, 334, 336, 340, 346, 347, 348, 352, 356, 357,358, 359, 360, 361, 363, 365, 366, 367, 368, 369, 370: n = A,T,C or G
  misc_feature 371, 372, 373, 374, 375, 379, 380, 381, 382, 383, 386, 387,388, 389, 390, 393, 394, 397, 401, 409, 416, 419, 421, 425,433, 436, 439, 440, 441, 442, 443, 444, 445, 446, 447, 448,449, 450, 451, 452, 453, 454, 455, 456, 457, 461, 462: n = A,T,C or G
  misc_feature 463, 464, 465, 466, 467, 469, 470, 471, 473, 474, 475, 476,477, 478, 479, 481, 483, 486, 487, 488, 490, 491, 492, 494,497, 498, 499, 500, 501, 502, 505, 510, 513, 514, 516, 518,519, 520, 521, 522, 523, 524, 525, 527, 528, 529, 530: n = A,T,C or G
  misc_feature 532, 533, 535, 537, 539, 540, 541, 542, 543, 544, 548, 549,550, 551, 552, 553, 554, 556, 557, 558, 559, 560, 562, 563,564, 566, 567, 569, 570, 571, 572, 575, 577, 578, 579, 581,583, 586, 589, 594, 595, 596, 598, 601, 602, 610, 611: n = A,T,C or G
  misc_feature 612, 613, 614, 616, 617, 618, 619, 620, 621, 622, 623, 624,625, 626, 627, 628, 629, 630, 631, 632, 634, 635, 636, 637,640, 641, 642, 643, 645, 647, 648, 649, 653, 655, 656, 659,664, 666, 667, 669, 670, 671, 676, 677, 679, 681, 682: n = A,T,C or G
  misc_feature 683, 684, 685, 686, 688, 689, 691, 692, 693, 694, 695, 696,697, 699, 700, 701, 702, 703, 704, 706, 709, 710, 714, 715,716, 721, 723, 724, 725, 726, 727, 728, 729, 731, 733, 735,737, 739, 740, 741, 742, 743, 744, 745, 746, 747, 748,: n = A,T,C or G
  misc_feature 749, 750, 751, 752, 753, 754, 755, 756, 757, 758, 759, 761,762, 763, 764, 765, 766, 769, 771, 772, 777: n = A,T,C or G

SEQ ID NO: 11525 - DNA, 407 bp, Homo sapiens; identical to SEQ ID NO: 5238
  misc_feature 70, 75, 90, 99, 106, 164, 195, 203, 225, 232, 276, 292, 312,315, 324, 342, 343, 394, 406: n = A,T,C or G

SEQ ID NO: 11526 - DNA, 306 bp, Homo sapiens; identical to SEQ ID NO: 5239
  misc_feature 127, 167, 198, 211, 224, 245, 284: n = A,T,C or G

SEQ ID NO: 11527 - DNA, 486 bp, Homo sapiens; identical to SEQ ID NO: 5240

SEQ ID NO: 11528 - DNA, 262 bp, Homo sapiens; identical to SEQ ID NO: 5241
  misc_feature 76, 152, 162, 166, 233, 251: n = A,T,C or G

SEQ ID NO: 11529 - DNA, 490 bp, Homo sapiens; identical to SEQ ID NO: 5242

SEQ ID NO: 11530 - DNA, 326 bp, Homo sapiens; identical to SEQ ID NO: 5243
  misc_feature 7, 21, 64, 78, 109, 150, 160, 163, 181, 185, 194, 200, 220,237, 260, 265, 277, 281, 283, 285, 288, 293, 310, 321: n = A,T,C or G

SEQ ID NO: 11531 - DNA, 375 bp, Homo sapiens; identical to SEQ ID NO: 5244
  misc_feature 52, 116, 119, 120, 121, 122, 123, 124, 126, 127, 152, 155,164, 165, 166, 167, 169, 176, 177, 189, 190, 194, 195, 196,198, 200, 204, 206, 208, 222, 224, 225, 229, 230, 232, 233,234, 235, 244, 249, 252, 253, 255, 266, 273, 278, 280: n = A,T,C or G
  misc_feature 282, 296, 297, 299, 300, 302, 303, 306, 316, 338, 341, 350,361, 364: n = A,T,C or G

SEQ ID NO: 11532 - DNA, 492 bp, Homo sapiens; identical to SEQ ID NO: 5245

SEQ ID NO: 11533 - DNA, 263 bp, Homo sapiens; identical to SEQ ID NO: 5246
  misc_feature 172, 222, 239, 249, 260: n = A,T,C or G

SEQ ID NO: 11534 - DNA, 420 bp, Homo sapiens; identical to SEQ ID NO: 5247

SEQ ID NO: 11535 - DNA, 161 bp, Homo sapiens; identical to SEQ ID NO: 5248

SEQ ID NO: 11536 - DNA, 390 bp, Homo sapiens; identical to SEQ ID NO: 5249

SEQ ID NO: 11537 - DNA, 389 bp, Homo sapiens; identical to SEQ ID NO: 5250
  misc_feature 334, 361: n = A,T,C or G

SEQ ID NO: 11538 - DNA, 307 bp, Homo sapiens; identical to SEQ ID NO: 5251
  misc_feature 236, 283: n = A,T,C or G

SEQ ID NO: 11539 - DNA, 273 bp, Homo sapiens; identical to SEQ ID NO: 5252

SEQ ID NO: 11540 - DNA, 588 bp, Homo sapiens; identical to SEQ ID NO: 5253
  misc_feature 55, 110, 117, 134, 136, 138, 141, 144, 145, 146, 147, 148,149, 150, 151, 152, 153, 154, 162, 165, 166, 167, 172, 190,191, 194, 195, 196, 198, 204, 206, 213, 215, 226, 227, 228,229, 231, 232, 235, 245, 246, 251, 267, 268, 281, 282: n = A,T,C or G
  misc_feature 283, 284, 297, 299, 300, 303, 306, 311, 312, 313, 316, 317,320, 322, 329, 331, 333, 341, 350, 352, 353, 368, 369, 375,379, 389, 390, 393, 394, 398, 399, 430, 431, 433, 437, 438,440, 441, 446, 448, 452, 454, 456, 459, 460, 462, 464: n = A,T,C or G
  misc_feature 466, 470, 485, 489, 494, 498, 512, 515, 525, 527, 529, 538,541, 572: n = A,T,C or G

SEQ ID NO: 11541 - DNA, 728 bp, Homo sapiens; identical to SEQ ID NO: 5254
  misc_feature 39, 42, 45, 46, 74, 177, 180, 246, 258, 310, 317, 343, 407,443, 462, 467, 498, 499, 527, 533, 537, 548, 574, 601, 606,632, 660, 668, 680, 687, 709, 724: n = A,T,C or G

SEQ ID NO: 11542 - DNA, 518 bp, Homo sapiens; identical to SEQ ID NO: 5255
  misc_feature 344, 443, 456, 461, 463, 466, 479, 482: n = A,T,C or G

SEQ ID NO: 11543 - DNA, 518 bp, Homo sapiens; identical to SEQ ID NO: 5256
  misc_feature 147, 425: n = A,T,C or G

SEQ ID NO: 11544 - DNA, 419 bp, Homo sapiens; identical to SEQ ID NO: 5257
  misc_feature 8, 33, 63, 90, 92, 108, 149, 171, 184, 209, 411: n = A,T,C or G

SEQ ID NO: 11545 - DNA, 303 bp, Homo sapiens; identical to SEQ ID NO: 5258
  misc_feature 149, 150, 151, 152, 153, 154, 155, 156, 157, 158, 159, 160,161, 162, 163, 164, 165, 166, 167, 168, 169, 170, 171, 172,173, 174, 175, 176, 177, 178, 179, 180, 181, 182, 183, 184,185, 186, 187, 188, 189, 190, 191, 192, 193, 194, 195: n = A,T,C or G
  misc_feature 196, 197, 198, 199, 200, 201, 202, 203, 204, 205, 206, 207,208, 209, 210, 211, 212, 213, 214, 215, 216, 217, 218, 219,220, 221, 222, 223, 224, 225, 226, 227, 228, 229, 230, 231,232, 233, 234, 235, 236, 237, 238, 239, 240, 241, 242: n = A,T,C or G
  misc_feature 243, 244, 245, 246, 247, 248, 260, 271, 282: n = A,T,C or G

SEQ ID NO: 11546 - DNA, 310 bp, Homo sapiens; identical to SEQ ID NO: 5259

SEQ ID NO: 11547 - DNA, 258 bp, Homo sapiens; identical to SEQ ID NO: 5260
  misc_feature 45, 66, 106, 126, 130, 137, 215, 216, 218, 233, 235, 243,246: n = A,T,C or G

SEQ ID NO: 11548 - DNA, 429 bp, Homo sapiens; identical to SEQ ID NO: 5261
  misc_feature 113, 138, 177, 197, 327, 340, 351, 352, 392: n = A,T,C or G

SEQ ID NO: 11549 - DNA, 475 bp, Homo sapiens; identical to SEQ ID NO: 5262

SEQ ID NO: 11550 - DNA, 341 bp, Homo sapiens; identical to SEQ ID NO: 5263

SEQ ID NO: 11551 - DNA, 403 bp, Homo sapiens; identical to SEQ ID NO: 5264

SEQ ID NO: 11552 - DNA, 532 bp, Homo sapiens; identical to SEQ ID NO: 5265
  misc_feature 31, 67, 75, 97, 102, 107, 229, 261, 274, 363, 365, 416, 453,479, 513: n = A,T,C or G

SEQ ID NO: 11553 - DNA, 302 bp, Homo sapiens; identical to SEQ ID NO: 5266

SEQ ID NO: 11554 - DNA, 497 bp, Homo sapiens; identical to SEQ ID NO: 5267
  misc_feature 33, 53, 58, 103, 104, 105, 106, 107, 122, 156, 158, 159,160, 167, 170, 176, 177, 178, 187, 188, 190, 191, 192, 196,198, 199, 200, 201, 202, 203, 204, 217, 226, 227, 237, 239,240, 241, 242, 243, 244, 248, 251, 257, 259, 263, 264: n = A,T,C or G
  misc_feature 265, 266, 275, 282, 284, 302, 309, 317, 318, 319, 320, 344,345, 348, 365, 366, 368, 372, 378, 397, 405, 408, 409, 415,417, 418, 422, 426, 430, 435, 436, 440, 441, 442, 444, 445,447, 452, 456, 462, 463, 464, 465, 470, 473: n = A,T,C or G

SEQ ID NO: 11555 - DNA, 482 bp, Homo sapiens; identical to SEQ ID NO: 5268
  misc_feature 107, 112, 125, 127, 129, 130, 133, 136, 139, 140, 141, 145,152, 153, 159, 160, 161, 177, 183, 186, 187, 188, 190, 197,200, 202, 203, 206, 208, 210, 211, 212, 213, 214, 215, 220,227, 228, 230, 238, 244, 245, 248, 251, 256, 262, 263: n = A,T,C or G
  misc_feature 268, 286, 301, 309, 321, 326, 327, 337, 361, 373, 374, 376,385, 386, 387, 389, 390, 392, 402, 403, 404, 406, 407, 408,410, 422, 452, 453, 462, 468, 470: n = A,T,C or G

SEQ ID NO: 11556 - DNA, 387 bp, Homo sapiens; identical to SEQ ID NO: 5269

SEQ ID NO: 11557 - DNA, 253 bp, Homo sapiens; identical to SEQ ID NO: 5270
  misc_feature 109, 110, 111, 132, 139, 146, 147, 152, 157, 172, 182, 185,186, 187, 190, 196, 204, 205, 206, 209, 213, 214, 215, 219,223, 224, 226, 228, 231, 236, 238, 239, 244, 245: n = A,T,C or G

SEQ ID NO: 11558 - DNA, 283 bp, Homo sapiens; identical to SEQ ID NO: 5271

SEQ ID NO: 11559 - DNA, 433 bp, Homo sapiens; identical to SEQ ID NO: 5272
  misc_feature 142: n = A,T,C or G

SEQ ID NO: 11560 - DNA, 329 bp, Homo sapiens; identical to SEQ ID NO: 5273

SEQ ID NO: 11561 - DNA, 419 bp, Homo sapiens; identical to SEQ ID NO: 5274
  misc_feature 33, 60, 106, 107, 111, 116, 117, 120, 126, 131, 132, 138,139, 141, 143, 145, 151, 152, 153, 155, 156, 157, 162, 165,166, 173, 174, 175, 176, 182, 184, 185, 186, 205, 213, 216,222, 224, 230, 235, 250, 253, 255, 261, 262, 267, 279: n = A,T,C or G
  misc_feature 281, 283, 284, 286, 287, 288, 290, 293, 294, 304, 305, 312,313, 320, 332, 333, 334, 343, 346, 351, 357, 372, 374, 375,376, 379, 384, 385, 386, 404, 405, 407, 412: n = A,T,C or G

SEQ ID NO: 11562 - DNA, 321 bp, Homo sapiens; identical to SEQ ID NO: 5275

SEQ ID NO: 11563 - DNA, 533 bp, Homo sapiens; identical to SEQ ID NO: 5276
  misc_feature 74, 80, 84, 85, 86, 88, 90, 95, 107, 115, 119, 121, 127,139, 147, 152, 158, 160, 162, 171, 178, 183, 195, 197, 198,200, 203, 220, 237, 240, 242, 251, 252, 262, 266, 267, 270,271, 278, 302, 306, 310, 312, 319, 335, 338, 347, 366: n = A,T,C or G
  misc_feature 368, 375, 393, 394, 405, 440, 464, 476, 477, 487, 506, 517: n = A,T,C or G

SEQ ID NO: 11564 - DNA, 318 bp, Homo sapiens; identical to SEQ ID NO: 5277

SEQ ID NO: 11565 - DNA, 299 bp, Homo sapiens; identical to SEQ ID NO: 5278
  misc_feature 118, 121, 123, 133, 148, 149, 150, 156, 165, 174, 178, 179,181, 198, 199, 202, 209, 213, 215, 217, 221, 225, 231, 234,235, 251, 253, 265, 271, 272, 279, 287, 288, 289: n = A,T,C or G

SEQ ID NO: 11566 - DNA, 509 bp, Homo sapiens; identical to SEQ ID NO: 5279
  misc_feature 205, 206, 441, 479: n = A,T,C or G

SEQ ID NO: 11567 - DNA, 561 bp, Homo sapiens; identical to SEQ ID NO: 5280
  misc_feature 150, 262, 333, 336, 353, 356, 357, 359, 371, 378, 382, 388,395, 396, 397, 410, 413, 432, 433, 435, 438, 452, 458, 478,484, 496, 503, 507, 513, 522, 531, 534, 542, 543: n = A,T,C or G

SEQ ID NO: 11568 - DNA, 503 bp, Homo sapiens; identical to SEQ ID NO: 5281
  misc_feature 119, 129, 130, 131, 132, 134, 135, 136, 149, 150, 151, 152,153, 159, 161, 162, 163, 170, 171, 181, 185, 186, 193, 194,195, 196, 203, 204, 205, 215, 216, 217, 218, 221, 222, 223,235, 238, 247, 249, 251, 252, 253, 264, 266, 267, 269: n = A,T,C or G
  misc_feature 270, 271, 272, 273, 288, 298, 300, 310, 311, 312, 316, 326,327, 332, 345, 346, 347, 348, 349, 350, 351, 356, 359, 360,367, 368, 369, 370, 371, 372, 373, 374, 375, 378, 379, 380,381, 382, 399, 408, 411, 420, 428, 433, 434, 444, 445: n = A,T,C or G
  misc_feature 446, 448, 461, 464, 465, 466, 469, 470, 471, 473, 474, 475,476, 478, 479, 484, 486, 487: n = A,T,C or G

SEQ ID NO: 11569 - DNA, 393 bp, Homo sapiens; identical to SEQ ID NO: 5282
  misc_feature 53, 55, 57, 98, 102, 103, 113, 117, 123, 124, 127, 128, 136,139, 140, 143, 144, 151, 154, 160, 161, 162, 164, 167, 170,171, 174, 178, 180, 187, 189, 190, 198, 203, 204, 208, 216,218, 228, 231, 232, 239, 246, 247, 249, 250, 258: n = A,T,C or G
  misc_feature 264, 268, 276, 278, 296, 304, 306, 307, 308, 310, 313, 315,318, 320, 327, 329, 335, 337, 348, 350, 363, 381: n = A,T,C or G

SEQ ID NO: 11570 - DNA, 342 bp, Homo sapiens; identical to SEQ ID NO: 5283
  misc_feature 148, 151, 152, 180, 216, 295, 301, 340: n = A,T,C or G

SEQ ID NO: 11571 - DNA, 309 bp, Homo sapiens; identical to SEQ ID NO: 5284
  misc_feature 117, 119, 122, 123, 124, 130, 134, 135, 136, 138, 140, 143,145, 147, 148, 149, 150, 151, 158, 159, 160, 163, 165, 169,171, 172, 177, 180, 185, 186, 187, 192, 194, 197, 202, 206,207, 210, 213, 229, 231, 236, 240, 242, 247, 249, 259: n = A,T,C or G
  misc_feature 263, 268, 279, 280, 281, 282, 294, 295, 296, 308, 309: n = A,T,C or G

SEQ ID NO: 11572 - DNA, 367 bp, Homo sapiens; identical to SEQ ID NO: 5285

SEQ ID NO: 11573 - DNA, 619 bp, Homo sapiens; identical to SEQ ID NO: 5286
  misc_feature 428, 556, 592: n = A,T,C or G

SEQ ID NO: 11574 - DNA, 476 bp, Homo sapiens; identical to SEQ ID NO: 5287
  misc_feature 460: n = A,T,C or G

SEQ ID NO: 11575 - DNA, 496 bp, Homo sapiens; identical to SEQ ID NO: 5288

SEQ ID NO: 11576 - DNA, 665 bp, Homo sapiens; identical to SEQ ID NO: 5289

SEQ ID NO: 11577 - DNA, 471 bp, Homo sapiens; identical to SEQ ID NO: 5290
  misc_feature 53, 55, 92, 102, 103, 105, 118, 125, 127, 128, 133, 134,145, 153, 154, 164, 169, 170, 173, 175, 176, 181, 186, 190,199, 200, 201, 202, 204, 208, 214, 225, 228, 229, 230, 231,232, 233, 234, 235, 236, 238, 243, 251, 252, 253, 254: n = A,T,C or G
  misc_feature 256, 257, 258, 260, 270, 271, 272, 273, 280, 281, 282, 284,285, 293, 299, 304, 305, 314, 338, 340, 346, 347, 349, 350,374, 376, 377, 378, 379, 382, 393, 399, 407, 408, 410, 414,421, 455: n = A,T,C or G

SEQ ID NO: 11578 - DNA, 167 bp, Homo sapiens; identical to SEQ ID NO: 5291
  misc_feature 67, 123, 135, 167: n = A,T,C or G

SEQ ID NO: 11579 - DNA, 452 bp, Homo sapiens; identical to SEQ ID NO: 5292
  misc_feature 325, 331, 334, 341, 362, 366, 370, 409: n = A,T,C or G

SEQ ID NO: 11580 - DNA, 455 bp, Homo sapiens; identical to SEQ ID NO: 5293
  misc_feature 283, 284, 285, 286, 287, 288, 289, 290, 291, 292, 293, 294,295, 296, 297, 298, 299, 300, 301, 302, 303, 304, 305, 322,323, 324, 325, 326, 327, 328, 329, 330, 331, 332, 333, 334,335, 336, 337, 338, 339, 340, 341, 342, 343, 344, 345: n = A,T,C or G
  misc_feature 357, 376, 442: n = A,T,C or G

SEQ ID NO: 11581 - DNA, 530 bp, Homo sapiens; identical to SEQ ID NO: 5294
  misc_feature 74, 95, 141, 142, 144, 146, 152, 154, 155, 171, 172, 173,176, 184, 197, 199, 204, 212, 214, 217, 223, 234, 241, 243,244, 245, 252, 258, 259, 268, 272, 273, 274, 275, 279, 280,281, 282, 283, 285, 288, 301, 302, 304, 311, 315, 319: n = A,T,C or G
  misc_feature 322, 323, 324, 325, 326, 327, 328, 329, 333, 335, 340, 350,351, 352, 357, 358, 359, 362, 365, 366, 367, 368, 372, 373,374, 376, 379, 386, 389, 390, 391, 393, 394, 395, 396, 397,413, 415, 416, 417, 418, 420, 421, 422, 426, 441, 442: n = A,T,C or G
  misc_feature 443, 444, 445, 446, 447, 448, 449, 450, 452, 453, 454, 455,465, 475, 484, 490, 498, 499, 502, 503, 504, 509, 514, 515,518: n = A,T,C or G

SEQ ID NO: 11582 - DNA, 827 bp, Homo sapiens; identical to SEQ ID NO: 5295
  misc_feature 410, 447, 463, 499, 502, 504, 505, 510, 524, 539, 546, 551,557, 564, 611, 618, 633, 682, 704, 706, 711, 717, 722, 729,734, 749, 761, 763, 769, 781: n = A,T,C or G

SEQ ID NO: 11583 - DNA, 459 bp, Homo sapiens; identical to SEQ ID NO: 5296
  misc_feature 66, 67, 82, 221, 356, 373, 375: n = A,T,C or G

SEQ ID NO: 11584 - DNA, 407 bp, Homo sapiens; identical to SEQ ID NO: 5297
  misc_feature 160: n = A,T,C or G

SEQ ID NO: 11585 - DNA, 417 bp, Homo sapiens; identical to SEQ ID NO: 5298

SEQ ID NO: 11586 - DNA, 434 bp, Homo sapiens; identical to SEQ ID NO: 5299

SEQ ID NO: 11587 - DNA, 267 bp, Homo sapiens; identical to SEQ ID NO: 5300
  misc_feature 70, 154, 215, 223, 225, 226, 252: n = A,T,C or G

SEQ ID NO: 11588 - DNA, 423 bp, Homo sapiens; identical to SEQ ID NO: 5301
  misc_feature 390: n = A,T,C or G

SEQ ID NO: 11589 - DNA, 309 bp, Homo sapiens; identical to SEQ ID NO: 5302
  misc_feature 285: n = A,T,C or G

SEQ ID NO: 11590 - DNA, 405 bp, Homo sapiens; identical to SEQ ID NO: 5303
  misc_feature 70, 98, 108, 111, 113, 115, 121, 127, 128, 130, 145, 146,149, 163, 165, 166, 168, 170, 173, 178, 186, 191, 195, 197,198, 201, 208, 211, 231, 249, 259, 263, 265, 266, 273, 285,299, 312, 325, 326, 338, 345, 350, 356, 384, 393, 400: n = A,T,C or G
  misc_feature 403: n = A,T,C or G

SEQ ID NO: 11591 - DNA, 513 bp, Homo sapiens; identical to SEQ ID NO: 5304
  misc_feature 5, 18, 41, 51, 62, 66, 73, 74, 107, 161, 205, 218, 225, 230,244, 245, 252, 273, 293, 294, 295, 309, 314, 316, 323, 324,358, 360, 370, 383, 384, 402, 407, 412, 418, 423, 443, 444,452, 472, 487, 494, 501: n = A,T,C or G

SEQ ID NO: 11592 - DNA, 313 bp, Homo sapiens; identical to SEQ ID NO: 5305

SEQ ID NO: 11593 - DNA, 310 bp, Homo sapiens; identical to SEQ ID NO: 5306

SEQ ID NO: 11594 - DNA, 680 bp, Homo sapiens; identical to SEQ ID NO: 5307
  misc_feature 100, 144, 179, 183, 217, 224, 225, 268, 283, 357, 362, 385,414, 433, 441, 448, 461, 469, 535, 552, 559, 560, 561, 574,589, 598, 600, 613, 621, 627, 628, 630, 632, 654, 660, 664,666, 668: n = A,T,C or G

SEQ ID NO: 11595 - DNA, 214 bp, Homo sapiens; identical to SEQ ID NO: 5308
  misc_feature 15, 40, 43, 44, 59, 63, 67, 68, 71, 79, 83, 88, 93, 101,107, 112, 116, 133, 135, 158, 161, 162, 164, 167, 171, 188: n = A,T,C or G

SEQ ID NO: 11596 - DNA, 495 bp, Homo sapiens; identical to SEQ ID NO: 5309
  misc_feature 471: n = A,T,C or G

SEQ ID NO: 11597 - DNA, 407 bp, Homo sapiens; identical to SEQ ID NO: 5310
  misc_feature 211, 387: n = A,T,C or G

SEQ ID NO: 11598 - DNA, 328 bp, Homo sapiens; identical to SEQ ID NO: 5311

SEQ ID NO: 11599 - DNA, 548 bp, Homo sapiens; identical to SEQ ID NO: 5312
  misc_feature 336, 466, 506: n = A,T,C or G

SEQ ID NO: 11600 - DNA, 317 bp, Homo sapiens; identical to SEQ ID NO: 5313

SEQ ID NO: 11601 - DNA, 768 bp, Homo sapiens; identical to SEQ ID NO: 5314
  misc_feature 226, 254, 281, 321, 328, 338, 376, 381, 397, 399, 422, 426,433, 444, 448, 449, 451, 453, 456, 467, 488, 489, 498, 503,504, 505, 506, 509, 519, 520, 521, 523, 529, 530, 533, 535,536, 545, 546, 552, 564, 570, 571, 572, 578, 581, 582: n = A,T,C or G
  misc_feature 585, 588, 596, 599, 600, 602, 605, 606, 610, 616, 617, 621,625, 626, 628, 630, 631, 632, 635, 636, 639, 646, 654, 655,656, 657, 658, 666, 668, 670, 671, 672, 673, 674, 681, 682,686, 689, 690, 697, 698, 703, 704, 706, 716, 719, 724: n = A,T,C or G
  misc_feature 728, 730, 731, 733, 734, 736, 750, 751, 752, 756: n = A,T,C or G

SEQ ID NO: 11602 - DNA, 312 bp, Homo sapiens; identical to SEQ ID NO: 5315

SEQ ID NO: 11603 - DNA, 281 bp, Homo sapiens; identical to SEQ ID NO: 5316

SEQ ID NO: 11604 - DNA, 331 bp, Homo sapiens; identical to SEQ ID NO: 5317
  misc_feature 128, 136, 138, 148, 149, 155, 163, 164, 169, 171, 175, 249,272, 313, 321: n = A,T,C or G

SEQ ID NO: 11605 - DNA, 511 bp, Homo sapiens; identical to SEQ ID NO: 5318
  misc_feature 494, 502: n = A,T,C or G

SEQ ID NO: 11606 - DNA, 391 bp, Homo sapiens; identical to SEQ ID NO: 5319
  misc_feature 353: n = A,T,C or G

SEQ ID NO: 11607 - DNA, 495 bp, Homo sapiens; identical to SEQ ID NO: 5320
  misc_feature 30, 86, 87, 90, 91, 97, 98, 104, 105, 106, 107, 108, 110,111, 120, 121, 122, 123, 138, 142, 145, 158, 159, 160, 161,166, 167, 168, 179, 192, 193, 194, 195, 196, 197, 206, 207,217, 228, 244, 245, 246, 249, 250, 253, 274, 276, 278: n = A,T,C or G
  misc_feature 279, 280, 281, 282, 283, 284, 285, 286, 287, 288, 289, 292,299, 300, 302, 307, 333, 346, 352, 355, 356, 357, 358, 359,365, 375, 381, 414, 424, 425, 426, 429, 444, 447, 449, 458,461, 462, 465, 469, 478, 479, 482: n = A,T,C or G

SEQ ID NO: 11608 - DNA, 267 bp, Homo sapiens; identical to SEQ ID NO: 5321
  misc_feature 194, 198, 208, 214, 215, 222, 233, 235, 239, 242, 256, 258: n = A,T,C or G

SEQ ID NO: 11609 - DNA, 392 bp, Homo sapiens; identical to SEQ ID NO: 5322
  misc_feature 204, 205, 206, 207, 208, 209, 210, 211, 212, 213, 214, 215,216, 217, 218, 219, 220, 221, 222, 223, 224, 225, 226, 227,228, 229, 230, 231, 232, 233, 234, 235, 236, 237, 238, 239,240, 241, 242, 243, 244, 245, 246, 247, 248, 249, 250: n = A,T,C or G
  misc_feature 251, 252, 253, 254, 255, 256, 257, 258, 259, 260, 261, 262,263, 264, 265, 266, 267, 268, 269, 270, 271, 272, 273, 274,275, 276, 277, 278, 279, 280, 281, 282, 283, 284, 285, 286,287, 288, 289, 290, 291, 292, 294, 295, 296, 298, 305: n = A,T,C or G
  misc_feature 308, 317, 375: n = A,T,C or G

SEQ ID NO: 11610 - DNA, 228 bp, Homo sapiens; identical to SEQ ID NO: 5323
  misc_feature 46, 48, 60, 79, 84, 96, 101, 107, 112, 116, 121, 124, 125,126, 128, 136, 153, 154, 156, 160, 169, 171, 184, 186, 188,189, 190, 191, 193, 199, 200, 201, 202, 207, 209, 214, 215: n = A,T,C or G

SEQ ID NO: 11611 - DNA, 609 bp, Homo sapiens; identical to SEQ ID NO: 5324
  misc_feature 6, 9, 19, 20, 21, 25, 28, 30, 32, 34, 35, 36, 39, 41, 49,50, 51, 58, 72, 75, 76, 95, 106, 111, 112, 120, 121, 124,127, 128, 140, 151, 152, 156, 157, 160, 163, 164, 170, 173,174, 181, 182, 184, 186, 193, 194, 195, 202, 203, 205: n = A,T,C or G
  misc_feature 207, 209, 216, 218, 220, 221, 222, 226, 229, 230, 238, 239,241, 243, 245, 246, 247, 248, 249, 250, 251, 252, 253, 256,257, 260, 279, 280, 324, 332, 345, 352, 378, 405, 423, 424,428, 440, 454, 475, 476, 488, 489, 490, 493, 506, 516: n = A,T,C or G
  misc_feature 557: n = A,T,C or G

SEQ ID NO: 11612 - DNA, 495 bp, Homo sapiens; identical to SEQ ID NO: 5325

SEQ ID NO: 11613 - DNA, 422 bp, Homo sapiens; identical to SEQ ID NO: 5326

SEQ ID NO: 11614 - DNA, 572 bp, Homo sapiens; identical to SEQ ID NO: 5327
  misc_feature 80, 108, 115, 124, 125, 131, 154, 156, 159, 160, 161, 162,166, 167, 168, 169, 171, 176, 181, 189, 200, 204, 205, 209,221, 223, 224, 230, 233, 239, 240, 241, 247, 248, 249, 256,257, 258, 276, 277, 280, 285, 288, 289, 290, 292, 294: n = A,T,C or G
  misc_feature 299, 300, 309, 312, 318, 319, 323, 339, 348, 349, 355, 361,366, 374, 390, 395, 398, 404, 405, 419, 422, 426, 427, 429,431, 439, 440, 443, 444, 447, 449, 457, 466, 469, 470, 471,473, 474, 475, 476, 477, 478, 481, 482, 501, 504, 514: n = A,T,C or G
  misc_feature 522, 532, 539, 542, 545, 550, 552, 558, 562, 563: n = A,T,C or G

SEQ ID NO: 11615 - DNA, 451 bp, Homo sapiens; identical to SEQ ID NO: 5328
  misc_feature 59, 70, 82, 85, 86, 152, 310, 343: n = A,T,C or G

SEQ ID NO: 11616 - DNA, 307 bp, Homo sapiens; identical to SEQ ID NO: 5329
  misc_feature 128, 135, 146, 154, 160, 197, 236, 274: n = A,T,C or G

SEQ ID NO: 11617 - DNA, 652 bp, Homo sapiens; identical to SEQ ID NO: 5330
  misc_feature 583: n = A,T,C or G

SEQ ID NO: 11618 - DNA, 470 bp, Homo sapiens; identical to SEQ ID NO: 5331
  misc_feature 289, 324, 360: n = A,T,C or G

SEQ ID NO: 11619 - DNA, 231 bp, Homo sapiens; identical to SEQ ID NO: 5332
  misc_feature 171: n = A,T,C or G

SEQ ID NO: 11620 - DNA, 602 bp, Homo sapiens; identical to SEQ ID NO: 5333
  misc_feature 207, 224, 240, 242, 258, 264, 329, 330, 336, 349, 351, 364,386, 411, 420, 456, 472, 480, 506, 547, 568, 569, 580, 582: n = A,T,C or G

SEQ ID NO: 11621 - DNA, 470 bp, Homo sapiens; identical to SEQ ID NO: 5334
  misc_feature 24, 176, 225, 331, 414, 447, 469: n = A,T,C or G

SEQ ID NO: 11622 - DNA, 302 bp, Homo sapiens; identical to SEQ ID NO: 5335
  misc_feature 51, 52, 54, 107, 116, 117, 124, 125, 141, 142, 143, 145,148, 149, 150, 151, 152, 156, 157, 159, 160, 161, 187, 199,217, 226, 234, 235, 236, 237, 239, 240, 241, 259, 260, 263,270, 274, 288, 291: n = A,T,C or G

SEQ ID NO: 11623 - DNA, 536 bp, Homo sapiens; identical to SEQ ID NO: 5336
  misc_feature 265, 271, 386, 501, 509, 511: n = A,T,C or G

SEQ ID NO: 11624 - DNA, 226 bp, Homo sapiens; identical to SEQ ID NO: 5337
  misc_feature 68, 111, 120, 140, 219: n = A,T,C or G

SEQ ID NO: 11625 - DNA, 646 bp, Homo sapiens; identical to SEQ ID NO: 5338
  misc_feature 55, 95, 96, 129, 134, 138, 147, 149, 156, 157, 158, 172,177, 178, 192, 202, 206, 208, 209, 210, 211, 215, 221, 224,229, 230, 233, 234, 237, 238, 239, 241, 245, 247, 251, 255,258, 259, 274, 284, 285, 289, 290, 297, 303, 323, 324: n = A,T,C or G
  misc_feature 330, 336, 338, 344, 349, 361, 362, 367, 391, 394, 395, 402,417, 419, 420, 430, 431, 432, 434, 435, 436, 437, 438, 440,442, 448, 449, 451, 452, 456, 463, 465, 466, 471, 482, 484,491, 493, 496, 501, 506, 521, 534, 541, 553, 559, 560: n = A,T,C or G
  misc_feature 564, 565, 569, 570, 584, 585, 586, 587, 594, 601, 610, 619,626, 631, 634: n = A,T,C or G

SEQ ID NO: 11626 - DNA, 508 bp, Homo sapiens; identical to SEQ ID NO: 5339
  misc_feature 468, 475: n = A,T,C or G

SEQ ID NO: 11627 - DNA, 550 bp, Homo sapiens; identical to SEQ ID NO: 5340
  misc_feature 195, 241, 281, 335, 461, 463, 510, 537: n = A,T,C or G

SEQ ID NO: 11628 - DNA, 654 bp, Homo sapiens; identical to SEQ ID NO: 5341
  misc_feature 141, 466, 533, 547, 629: n = A,T,C or G

SEQ ID NO: 11629 - DNA, 330 bp, Homo sapiens; identical to SEQ ID NO: 5342
  misc_feature 28, 90, 98, 103, 109, 114, 124, 133, 142, 161, 221, 223,272, 282, 321: n = A,T,C or G

SEQ ID NO: 11630 - DNA, 228 bp, Homo sapiens; identical to SEQ ID NO: 5343
  misc_feature 24, 29, 45, 129, 193, 196, 202, 206: n = A,T,C or G

SEQ ID NO: 11631 - DNA, 183 bp, Homo sapiens; identical to SEQ ID NO: 5344
  misc_feature 49, 57, 68, 93, 108, 116, 125, 136, 145, 150, 157, 168, 174: n = A,T,C or G

SEQ ID NO: 11632 - DNA, 274 bp, Homo sapiens; identical to SEQ ID NO: 5345

SEQ ID NO: 11633 - DNA, 801 bp, Homo sapiens; identical to SEQ ID NO: 5346
  misc_feature 432, 500, 562, 624, 657, 668, 682, 709, 715, 718, 728, 729,731, 747, 750, 751, 753, 789: n = A,T,C or G

SEQ ID NO: 11634 - DNA, 339 bp, Homo sapiens; identical to SEQ ID NO: 5347
  misc_feature 7, 9, 10, 16, 18, 20, 22, 65, 167, 178, 218, 232, 244, 253,268, 291, 303, 321: n = A,T,C or G

SEQ ID NO: 11635 - DNA, 258 bp, Homo sapiens; identical to SEQ ID NO: 5348
  misc_feature 125, 155, 236: n = A,T,C or G

SEQ ID NO: 11636 - DNA, 637 bp, Homo sapiens; identical to SEQ ID NO: 5349
  misc_feature 357, 369, 372, 389, 392, 418, 433, 435, 438, 442, 445, 511,546, 591, 606, 613, 616, 619: n = A,T,C or G

SEQ ID NO: 11637 - DNA, 371 bp, Homo sapiens; identical to SEQ ID NO: 5350
  misc_feature 64: n = A,T,C or G

SEQ ID NO: 11638 - DNA, 403 bp, Homo sapiens; identical to SEQ ID NO: 5351
  misc_feature 84, 208, 239, 331, 334, 348, 370, 378, 380, 385, 392: n = A,T,C or G

SEQ ID NO: 11639 - DNA, 486 bp, Homo sapiens; identical to SEQ ID NO: 5352

SEQ ID NO: 11640 - DNA, 494 bp, Homo sapiens; identical to SEQ ID NO: 5353
  misc_feature 81, 176, 194, 208, 273, 292, 306, 324, 333, 346, 370, 375,387, 393, 412, 414, 415, 419, 445, 474, 477: n = A,T,C or G

SEQ ID NO: 11641 - DNA, 501 bp, Homo sapiens; identical to SEQ ID NO: 5354

SEQ ID NO: 11642 - DNA, 355 bp, Homo sapiens; identical to SEQ ID NO: 5355
  misc_feature 96, 117, 118, 130, 150, 166, 208, 210, 234, 279, 280, 325,345: n = A,T,C or G

SEQ ID NO: 11643 - DNA, 292 bp, Homo sapiens; identical to SEQ ID NO: 5356

SEQ ID NO: 11644 - DNA, 167 bp, Homo sapiens; identical to SEQ ID NO: 5357

SEQ ID NO: 11645 - DNA, 265 bp, Homo sapiens; identical to SEQ ID NO: 5358
  misc_feature 114, 244: n = A,T,C or G

SEQ ID NO: 11646 - DNA, 330 bp, Homo sapiens; identical to SEQ ID NO: 5359
  misc_feature 50, 51, 68, 69, 74, 84, 85, 94, 95, 97, 101, 104, 105, 120,133, 136, 139, 149, 161, 167, 173, 188, 198, 216, 220, 223,256, 257, 267, 290, 295, 328: n = A,T,C or G

SEQ ID NO: 11647 - DNA, 383 bp, Homo sapiens; identical to SEQ ID NO: 5360
  misc_feature 155, 157, 158, 163, 178, 306: n = A,T,C or G

SEQ ID NO: 11648 - DNA, 496 bp, Homo sapiens; identical to SEQ ID NO: 5361

SEQ ID NO: 11649 - DNA, 292 bp, Homo sapiens; identical to SEQ ID NO: 5362

SEQ ID NO: 11650 - DNA, 314 bp, Homo sapiens; identical to SEQ ID NO: 5363
  misc_feature 172, 295: n = A,T,C or G

SEQ ID NO: 11651 - DNA, 589 bp, Homo sapiens; identical to SEQ ID NO: 5364
  misc_feature 8, 72, 81, 126, 164, 242, 248, 270, 325, 345, 352, 407, 427,435, 446, 527, 540, 541, 543, 550, 563, 587: n = A,T,C or G

SEQ ID NO: 11652 - DNA, 507 bp, Homo sapiens; identical to SEQ ID NO: 5365
  misc_feature 8, 28, 326, 391, 418, 482: n = A,T,C or G

SEQ ID NO: 11653 - DNA, 442 bp, Homo sapiens; identical to SEQ ID NO: 5366
  misc_feature 114, 236, 351, 409: n = A,T,C or G

SEQ ID NO: 11654 - DNA, 292 bp, Homo sapiens; identical to SEQ ID NO: 5367
  misc_feature 77, 95, 115, 148, 163, 170, 190, 193, 200, 219, 223, 248,252, 255, 266, 290: n = A,T,C or G

SEQ ID NO: 11655 - DNA, 385 bp, Homo sapiens; identical to SEQ ID NO: 5368
  misc_feature 148, 149, 160, 161, 162, 163, 173, 174, 175, 176, 177, 178,179, 181, 192, 193, 210, 213, 214, 215, 216, 218, 219, 234,238, 239, 240, 241, 242, 245, 247, 254, 256, 261, 262, 264,265, 267, 268, 272, 273, 274, 275, 276, 277, 278, 279: n = A,T,C or G
  misc_feature 280, 281, 282, 283, 284, 285, 288, 289, 301, 303, 304, 305,306, 307, 309, 310, 311, 312, 313, 314, 315, 316, 317, 318,319, 320, 321, 322, 326, 328, 329, 341, 354, 357, 358, 361,362, 363, 367, 369, 371, 372, 373, 374, 375, 377, 382: n = A,T,C or G
  misc_feature 384: n = A,T,C or G

SEQ ID NO: 11656 - DNA, 234 bp, Homo sapiens; identical to SEQ ID NO: 5369

SEQ ID NO: 11657 - DNA, 726 bp, Homo sapiens; identical to SEQ ID NO: 5370
  misc_feature 258, 266, 292, 296, 303, 331, 332, 403, 404, 418, 421, 422,433, 437, 470, 473, 495, 496, 503, 512, 532, 534, 535, 557,596, 605, 610, 630, 631, 641, 642, 645, 682, 693, 699, 709: n = A,T,C or G

SEQ ID NO: 11658 - DNA, 244 bp, Homo sapiens; identical to SEQ ID NO: 5371

SEQ ID NO: 11659 - DNA, 382 bp, Homo sapiens; identical to SEQ ID NO: 5372
  misc_feature 71: n = A,T,C or G

SEQ ID NO: 11660 - DNA, 394 bp, Homo sapiens; identical to SEQ ID NO: 5373
  misc_feature 394: n = A,T,C or G

SEQ ID NO: 11661 - DNA, 477 bp, Homo sapiens; identical to SEQ ID NO: 5374
  misc_feature 150, 169, 180, 199, 200, 296, 312, 316, 318, 384, 386, 399,418, 419, 453, 467: n = A,T,C or G

SEQ ID NO: 11662 - DNA, 544 bp, Homo sapiens; identical to SEQ ID NO: 5375

SEQ ID NO: 11663 - DNA, 263 bp, Homo sapiens; identical to SEQ ID NO: 5376
  misc_feature 27, 49, 84, 86, 95, 99, 120, 125, 129, 165, 188, 191, 196,208, 214, 244, 250, 253: n = A,T,C or G

SEQ ID NO: 11664 - DNA, 272 bp, Homo sapiens; identical to SEQ ID NO: 5377
  misc_feature 51, 104, 121, 122, 133, 137, 138, 139, 140, 144, 147, 148,151, 171, 172, 174, 175, 176, 177, 179, 181, 184, 189, 190,191, 200, 210, 214, 220, 222, 223, 225, 226, 229, 230, 235,245, 253, 259, 261: n = A,T,C or G

SEQ ID NO: 11665 - DNA, 558 bp, Homo sapiens; identical to SEQ ID NO: 5378

SEQ ID NO: 11666 - DNA, 752 bp, Homo sapiens; identical to SEQ ID NO: 5379
  misc_feature 138, 223, 233, 388, 405, 418, 452, 454, 456, 458, 470, 479,503, 513, 516, 535, 547, 562, 563, 565, 572, 587, 593, 603,616, 617, 632, 648, 651, 680, 687, 692, 694, 696, 699, 730,733, 736, 739: n = A,T,C or G

SEQ ID NO: 11667 - DNA, 610 bp, Homo sapiens; identical to SEQ ID NO: 5380
  misc_feature 50, 99, 103, 104, 105, 106, 107, 108, 112, 114, 120, 121,122, 127, 128, 131, 132, 133, 134, 150, 151, 152, 153, 154,155, 156, 157, 158, 159, 160, 161, 162, 163, 183, 184, 186,188, 189, 190, 192, 193, 195, 196, 197, 209, 221, 223: n = A,T,C or G
  misc_feature 224, 225, 238, 245, 248, 255, 257, 258, 260, 261, 269, 276,277, 278, 279, 280, 289, 292, 293, 302, 308, 322, 330, 335,343, 346, 348, 349, 350, 353, 365, 366, 367, 371, 377, 384,385, 398, 408, 422, 423, 440, 452, 453, 454, 455, 456: n = A,T,C or G
  misc_feature 457, 458, 459, 461, 473, 474, 475, 476, 478, 480, 487, 494,497, 512, 521, 527, 540, 543, 544, 547, 549, 550, 554, 568,569, 584, 586, 587, 589, 591, 595, 609: n = A,T,C or G

SEQ ID NO: 11668 - DNA, 102 bp, Homo sapiens; identical to SEQ ID NO: 5381
  misc_feature 23: n = A,T,C or G

SEQ ID NO: 11669 - DNA, 658 bp, Homo sapiens; identical to SEQ ID NO: 5382
  misc_feature 182, 209, 250, 314, 338, 464, 485, 523, 572, 582, 593, 633,640, 650: n = A,T,C or G

SEQ ID NO: 11670 - DNA, 485 bp, Homo sapiens; identical to SEQ ID NO: 5383
  misc_feature 433: n = A,T,C or G

SEQ ID NO: 11671 - DNA, 586 bp, Homo sapiens; identical to SEQ ID NO: 5384

SEQ ID NO: 11672 - DNA, 280 bp, Homo sapiens; identical to SEQ ID NO: 5385
  misc_feature 159, 241: n = A,T,C or G

SEQ ID NO: 11673 - DNA, 587 bp, Homo sapiens; identical to SEQ ID NO: 5386
  misc_feature 38, 68, 93, 104, 106, 132, 157, 205, 238, 240, 257, 286,288, 293, 300, 312, 315, 316, 341, 390, 407, 423, 455, 460,463, 484, 492, 495, 496, 507, 517, 522, 525, 550, 562, 571: n = A,T,C or G

SEQ ID NO: 11674 - DNA, 410 bp, Homo sapiens; identical to SEQ ID NO: 5387
  misc_feature 243, 308, 316, 336, 366: n = A,T,C or G

SEQ ID NO: 11675 - DNA, 604 bp, Homo sapiens; identical to SEQ ID NO: 5388

SEQ ID NO: 11676 - DNA, 690 bp, Homo sapiens; identical to SEQ ID NO: 5389
  misc_feature 47, 111, 113, 168, 199, 231, 247, 257, 295, 355, 369, 371,378, 397, 399, 414, 416, 449, 476, 481, 498, 500, 503, 504,544, 586, 596, 618, 624, 631, 638, 659, 672, 673, 679, 690: n = A,T,C or G

SEQ ID NO: 11677 - DNA, 428 bp, Homo sapiens; identical to SEQ ID NO: 5390

SEQ ID NO: 11678 - DNA, 292 bp, Homo sapiens; identical to SEQ ID NO: 5391
  misc_feature 194, 283: n = A,T,C or G

SEQ ID NO: 11679 - DNA, 608 bp, Homo sapiens; identical to SEQ ID NO: 5392
  misc_feature 568, 570: n = A,T,C or G

SEQ ID NO: 11680 - DNA, 133 bp, Homo sapiens; identical to SEQ ID NO: 5393
  misc_feature 84, 94: n = A,T,C or G

SEQ ID NO: 11681 - DNA, 588 bp, Homo sapiens; identical to SEQ ID NO: 5394
  misc_feature 330, 359, 407, 426, 473, 478, 480, 505, 511, 538, 556, 569: n = A,T,C or G

SEQ ID NO: 11682 - DNA, 370 bp, Homo sapiens; identical to SEQ ID NO: 5395

SEQ ID NO: 11683 - DNA, 466 bp, Homo sapiens; identical to SEQ ID NO: 5396
  misc_feature 404, 432: n = A,T,C or G

SEQ ID NO: 11684 - DNA, 375 bp, Homo sapiens; identical to SEQ ID NO: 5397
  misc_feature 96, 124, 166, 197, 199, 224, 248, 256, 276, 281, 283, 292,293, 301, 306, 311, 335, 354, 355, 362: n = A,T,C or G

SEQ ID NO: 11685 - DNA, 235 bp, Homo sapiens; identical to SEQ ID NO: 5398
  misc_feature 36, 40, 44, 46, 57, 62, 69, 75, 77, 79, 85, 101, 105, 110,111, 113, 115, 117, 119, 122, 124, 125, 152, 155, 162, 176,197, 213, 233: n = A,T,C or G

SEQ ID NO: 11686 - DNA, 185 bp, Homo sapiens; identical to SEQ ID NO: 5399
  misc_feature 17, 31, 34, 45, 53, 67, 68, 72, 133, 157, 165, 175: n = A,T,C or G

SEQ ID NO: 11687 - DNA, 444 bp, Homo sapiens; identical to SEQ ID NO: 5400

SEQ ID NO: 11688 - DNA, 391 bp, Homo sapiens; identical to SEQ ID NO: 5401
  misc_feature 379: n = A,T,C or G

SEQ ID NO: 11689 - DNA, 761 bp, Homo sapiens; identical to SEQ ID NO: 5402
  misc_feature 127, 135, 148, 167, 174, 283, 285, 302, 313, 319, 332, 343,358, 363, 365, 371, 386, 392, 407, 410, 414, 420, 421, 427,428, 432, 437, 440, 454, 456, 457, 459, 461, 465, 469, 470,473, 474, 475, 477, 478, 480, 482, 484, 485, 486, 487: n = A,T,C or G
  misc_feature 488, 489, 491, 492, 493, 497, 498, 499, 500, 501, 502, 505,506, 509, 513, 515, 516, 517, 518, 519, 520, 522, 525, 527,528, 529, 532, 533, 536, 544, 546, 548, 549, 550, 557, 559,561, 562, 564, 566, 568, 569, 570, 572, 573, 574, 577: n = A,T,C or G
  misc_feature 580, 581, 582, 583, 584, 586, 594, 595, 599, 601, 602, 603,604, 605, 606, 607, 608, 609, 610, 614, 615, 616, 619, 620,621, 622, 623, 624, 625, 627, 629, 631, 632, 633, 634, 636,637, 638, 639, 640, 642, 645, 647, 648, 649, 650, 651: n = A,T,C or G
  misc_feature 652, 653, 659, 661, 663, 665, 666, 667, 668, 669, 670, 671,674, 675, 680, 681, 682, 684, 686, 687, 689, 690, 691, 692,693, 698, 700, 702, 705, 711, 713, 714, 717, 719, 727, 728,729, 736, 737, 739, 742, 743, 744, 746, 748, 749, 754: n = A,T,C or G

SEQ ID NO: 11690 - DNA, 300 bp, Homo sapiens; identical to SEQ ID NO: 5403
  misc_feature 111, 113, 135, 136, 138, 139, 140, 142, 147, 149, 150, 151,155, 156, 182, 190, 192, 194, 199, 200, 201, 202, 206, 211,213, 214, 216, 217, 225, 236, 238, 246, 248, 255, 256, 258,266, 287, 293: n = A,T,C or G

SEQ ID NO: 11691 - DNA, 384 bp, Homo sapiens; identical to SEQ ID NO: 5404
  misc_feature 377: n = A,T,C or G

SEQ ID NO: 11692 - DNA, 415 bp, Homo sapiens; identical to SEQ ID NO: 5405
  misc_feature 260: n = A,T,C or G

SEQ ID NO: 11693 - DNA, 398 bp, Homo sapiens; identical to SEQ ID NO: 5406

SEQ ID NO: 11694 - DNA, 732 bp, Homo sapiens; identical to SEQ ID NO: 5407
  misc_feature 9, 20, 27, 34, 35, 44, 45, 46, 50, 60, 61, 63, 70, 74, 83,92, 96, 97, 102, 109, 111, 114, 116, 117, 119, 142, 153,155, 176, 183, 241, 242, 270, 276, 284, 285, 286, 288, 290,291, 295, 335, 397, 416, 442, 447, 473, 474, 498, 502: n = A,T,C or G
  misc_feature 506, 508, 510, 511, 525, 528, 530, 534, 545, 552, 561, 580,593, 597, 601, 623, 649, 659, 666, 668, 669, 678, 721, 722: n = A,T,C or G

SEQ ID NO: 11695 - DNA, 455 bp, Homo sapiens; identical to SEQ ID NO: 5408
  misc_feature 23, 138, 296, 397, 416: n = A,T,C or G

SEQ ID NO: 11696 - DNA, 392 bp, Homo sapiens; identical to SEQ ID NO: 5409

SEQ ID NO: 11697 - DNA, 831 bp, Homo sapiens; identical to SEQ ID NO: 5410
  misc_feature 470, 475, 519, 548, 607, 615, 630, 634, 655, 667, 674, 684,692, 697, 711, 715, 720, 724, 726, 732, 736, 748, 753, 756,759, 765, 768, 776, 777, 781, 783, 785, 789, 791, 797, 812: n = A,T,C or G

SEQ ID NO: 11698 - DNA, 520 bp, Homo sapiens; identical to SEQ ID NO: 5411

SEQ ID NO: 11699 - DNA, 434 bp, Homo sapiens; identical to SEQ ID NO: 5412

SEQ ID NO: 11700 - DNA, 244 bp, Homo sapiens; identical to SEQ ID NO: 5413

SEQ ID NO: 11701 - DNA, 502 bp, Homo sapiens; identical to SEQ ID NO: 5414
  misc_feature 7, 144, 153, 166, 174, 190, 195, 236, 279, 281, 352, 354,357, 393, 421, 433, 435, 479, 481: n = A,T,C or G

SEQ ID NO: 11702 - DNA, 578 bp, Homo sapiens; identical to SEQ ID NO: 5415
  misc_feature 143, 204, 221, 224, 237, 250, 255, 276, 291, 300, 307, 332,337, 347, 360, 371, 380, 384, 410, 414, 426, 427, 458, 479,492, 505, 512, 537, 547, 565, 567: n = A,T,C or G

SEQ ID NO: 11703 - DNA, 714 bp, Homo sapiens; identical to SEQ ID NO: 5416
  misc_feature 34, 40, 94, 153, 178, 226, 253, 280, 284, 325, 339, 355,372, 377, 380, 405, 428, 461, 464, 465, 482, 496, 510, 511,547, 565, 566, 573, 575, 612, 623, 630, 638, 660, 686, 687,700, 706: n = A,T,C or G

SEQ ID NO: 11704 - DNA, 373 bp, Homo sapiens; identical to SEQ ID NO: 5417
  misc_feature 58, 227, 353, 356, 360, 367: n = A,T,C or G

SEQ ID NO: 11705 - DNA, 305 bp, Homo sapiens; identical to SEQ ID NO: 5418

SEQ ID NO: 11706 - DNA, 335 bp, Homo sapiens; identical to SEQ ID NO: 5419
  misc_feature 54, 88, 136, 147, 166, 180, 188, 205, 220, 245, 246, 252,265, 266, 270, 286, 292, 293, 304, 308, 309, 318, 324: n = A,T,C or G

SEQ ID NO: 11707 - DNA, 263 bp, Homo sapiens; identical to SEQ ID NO: 5420
  misc_feature 196: n = A,T,C or G

SEQ ID NO: 11708 - DNA, 733 bp, Homo sapiens; identical to SEQ ID NO: 5421
  misc_feature 27, 29, 30, 33, 37, 38, 53, 56, 58, 59, 63, 65, 71, 90, 91,96, 100, 101, 108, 109, 111, 113, 125, 134, 135, 137, 139,140, 146, 148, 161, 166, 178, 182, 184, 186, 187, 189, 194,197, 198, 204, 206, 217, 218, 221, 222, 237, 244, 247: n = A,T,C or G
  misc_feature 248, 261, 265, 271, 273, 277, 286, 302, 303, 304, 305, 306,307, 309, 312, 321, 324, 327, 328, 333, 351, 357, 367, 372,374, 383, 387, 389, 391, 399, 417, 419, 420, 422, 424, 442,443, 448, 449, 450, 458, 462, 476, 492, 505, 507, 509: n = A,T,C or G
  misc_feature 524, 531, 541, 543, 557, 558, 561, 569, 570, 573, 576, 590,591, 617, 618, 623, 633, 642, 650, 652, 664, 666, 674, 683,688, 692, 695, 696, 697, 712, 714, 717, 720, 722, 723: n = A,T,C or G

SEQ ID NO: 11709 - DNA, 380 bp, Homo sapiens; identical to SEQ ID NO: 5422

SEQ ID NO: 11710 - DNA, 246 bp, Homo sapiens; identical to SEQ ID NO: 5423
  misc_feature 129, 135, 136, 142, 147, 152, 155, 157, 165, 166, 172, 174,177, 193, 194, 195, 199, 225, 226, 228: n = A,T,C or G

SEQ ID NO: 11711 - DNA, 334 bp, Homo sapiens; identical to SEQ ID NO: 5424
  misc_feature 28, 53, 66, 106, 116, 135, 138, 161, 182, 197, 223, 248,252, 268: n = A,T,C or G

SEQ ID NO: 11712 - DNA, 322 bp, Homo sapiens; identical to SEQ ID NO: 5425

SEQ ID NO: 11713 - DNA, 185 bp, Homo sapiens; identical to SEQ ID NO: 5426
  misc_feature 120, 140, 163: n = A,T,C or G

SEQ ID NO: 11714 - DNA, 389 bp, Homo sapiens; identical to SEQ ID NO: 5427

SEQ ID NO: 11715 - DNA, 459 bp, Homo sapiens; identical to SEQ ID NO: 5428
  misc_feature 152, 157, 160, 166, 176, 194, 196, 254, 440, 445: n = A,T,C or G

SEQ ID NO: 11716 - DNA, 413 bp, Homo sapiens; identical to SEQ ID NO: 5429
  misc_feature 137, 203, 225, 228, 252, 253, 266, 277, 281, 311, 330, 336,343, 350, 355, 359, 369, 373, 382, 401, 406: n = A,T,C or G

SEQ ID NO: 11717 - DNA, 571 bp, Homo sapiens; identical to SEQ ID NO: 5430
  misc_feature 46, 89, 102, 131, 133, 141, 144, 153, 154, 158, 166, 173,174, 208, 213, 222, 224, 237, 245, 246, 251, 253, 264, 290,297, 298, 300, 302, 308, 309, 312, 313, 317, 330, 332, 334,337, 341, 357, 358, 361, 364, 366, 369, 374, 395, 399: n = A,T,C or G
  misc_feature 405, 414, 417, 421, 423, 431, 444, 446, 454, 474, 477, 484,489, 492, 505, 508, 514, 545, 547, 563, 565: n = A,T,C or G

SEQ ID NO: 11718 - DNA, 488 bp, Homo sapiens; identical to SEQ ID NO: 5431
  misc_feature 107, 141, 157, 174, 217, 230, 233, 236, 258, 268, 284, 300,304, 308, 324, 333, 350, 376, 424, 430, 451, 465, 467, 469,475, 477: n = A,T,C or G

SEQ ID NO: 11719 - DNA, 685 bp, Homo sapiens; identical to SEQ ID NO: 5432
  misc_feature 16, 26, 36, 59, 68, 93, 113, 145, 147, 160, 169, 194, 222,236, 259, 263, 265, 348, 396, 424, 426, 459, 488, 506, 510,516, 599, 603, 612, 629, 661: n = A,T,C or G

SEQ ID NO: 11720 - DNA, 320 bp, Homo sapiens; identical to SEQ ID NO: 5433
  misc_feature 249: n = A,T,C or G

SEQ ID NO: 11721 - DNA, 409 bp, Homo sapiens; identical to SEQ ID NO: 5434

SEQ ID NO: 11722 - DNA, 184 bp, Homo sapiens; identical to SEQ ID NO: 5435
  misc_feature 28, 48, 72, 83, 117, 166: n = A,T,C or G

SEQ ID NO: 11723 - DNA, 235 bp, Homo sapiens; identical to SEQ ID NO: 5436
  misc_feature 99, 108, 109, 115, 120, 138, 142, 145, 162, 167, 173, 194,205, 215, 226, 229: n = A,T,C or G

SEQ ID NO: 11724 - DNA, 401 bp, Homo sapiens; identical to SEQ ID NO: 5437

SEQ ID NO: 11725 - DNA, 471 bp, Homo sapiens; identical to SEQ ID NO: 5438

SEQ ID NO: 11726 - DNA, 486 bp, Homo sapiens; identical to SEQ ID NO: 5439
  misc_feature 385: n = A,T,C or G

SEQ ID NO: 11727 - DNA, 357 bp, Homo sapiens; identical to SEQ ID NO: 5440
  misc_feature 17, 18, 20, 22, 27, 30, 32, 35, 37, 41, 49, 63, 74, 75, 77,80, 81, 86, 87, 89, 93, 100, 106, 118, 125, 129, 136, 139,140, 144, 185, 220, 224, 233, 237, 245, 253, 266, 283, 301,325: n = A,T,C or G

SEQ ID NO: 11728 - DNA, 304 bp, Homo sapiens; identical to SEQ ID NO: 5441
  misc_feature 93, 96, 97, 98, 110, 117, 118, 119, 126, 127, 128, 133, 134,135, 142, 144, 154, 155, 156, 158, 159, 160, 182, 183, 188,190, 195, 196, 197, 204, 208, 209, 210, 211, 216, 218, 226,239, 244, 245, 246, 247, 248, 249, 258, 265, 269: n = A,T,C or G
  misc_feature 271, 275, 281, 288: n = A,T,C or G

SEQ ID NO: 11729 - DNA, 434 bp, Homo sapiens; identical to SEQ ID NO: 5442
  misc_feature 113, 286, 305, 352, 377, 381, 382, 412, 413: n = A,T,C or G

SEQ ID NO: 11730 - DNA, 314 bp, Homo sapiens; identical to SEQ ID NO: 5443
  misc_feature 310: n = A,T,C or G

SEQ ID NO: 11731 - DNA, 225 bp, Homo sapiens; identical to SEQ ID NO: 5444
  misc_feature 25, 55, 66, 103, 105, 148, 150, 202: n = A,T,C or G

SEQ ID NO: 11732 - DNA, 405 bp, Homo sapiens; identical to SEQ ID NO: 5445
  misc_feature 350, 362, 363, 367, 369, 390: n = A,T,C or G

SEQ ID NO: 11733 - DNA, 549 bp, Homo sapiens; identical to SEQ ID NO: 5446
  misc_feature 134, 331, 448, 466, 548: n = A,T,C or G

SEQ ID NO: 11734 - DNA, 296 bp, Homo sapiens; identical to SEQ ID NO: 5447

SEQ ID NO: 11735 - DNA, 293 bp, Homo sapiens; identical to SEQ ID NO: 5448

SEQ ID NO: 11736 - DNA, 447 bp, Homo sapiens; identical to SEQ ID NO: 5449

SEQ ID NO: 11737 - DNA, 484 bp, Homo sapiens; identical to SEQ ID NO: 5450
  misc_feature 131, 173, 294, 306, 344, 367, 393, 410, 422, 451, 480: n = A,T,C or G

SEQ ID NO: 11738 - DNA, 514 bp, Homo sapiens; identical to SEQ ID NO: 5451
  misc_feature 336, 471: n = A,T,C or G

SEQ ID NO: 11739 - DNA, 279 bp, Homo sapiens; identical to SEQ ID NO: 5452

SEQ ID NO: 11740 - DNA, 490 bp, Homo sapiens; identical to SEQ ID NO: 5453
  misc_feature 197, 464: n = A,T,C or G

SEQ ID NO: 11741 - DNA, 682 bp, Homo sapiens; identical to SEQ ID NO: 5454
  misc_feature 421, 474, 583, 626, 646, 649, 665, 668, 671, 672: n = A,T,C or G

SEQ ID NO: 11742 - DNA, 425 bp, Homo sapiens; identical to SEQ ID NO: 5455
  misc_feature 3, 6, 17, 18, 19, 20, 21, 22, 25, 26, 27, 28, 29, 30, 31,32, 34, 35, 43, 44, 63, 83, 84, 85, 86, 87, 88, 89, 90,91, 92, 93, 94, 95, 96, 97, 98, 99, 100, 101, 102, 103,104, 105, 106, 150: n = A,T,C or G

SEQ ID NO: 11743 - DNA, 299 bp, Homo sapiens; identical to SEQ ID NO: 5456

SEQ ID NO: 11744 - DNA, 615 bp, Homo sapiens; identical to SEQ ID NO: 5457
  misc_feature 554: n = A,T,C or G

SEQ ID NO: 11745 - DNA, 407 bp, Homo sapiens; identical to SEQ ID NO: 5458

SEQ ID NO: 11746 - DNA, 681 bp, Homo sapiens; identical to SEQ ID NO: 5459
  misc_feature 348, 351, 426, 477, 479, 539, 564, 594, 601, 617, 624, 631,643, 660, 664: n = A,T,C or G

SEQ ID NO: 11747 - DNA, 384 bp, Homo sapiens; identical to SEQ ID NO: 5460
  misc_feature 188, 189, 190, 191, 194, 197, 202, 203, 204, 206, 208, 209,212, 216, 219, 221, 224, 229, 230, 238, 240, 242, 246, 251,253, 261, 263, 278, 301, 305, 317, 384: n = A,T,C or G

SEQ ID NO: 11748 - DNA, 614 bp, Homo sapiens; identical to SEQ ID NO: 5461
  misc_feature 19, 31, 32, 35, 37, 38, 286, 314, 315, 316, 318, 322, 326,331, 333, 334, 335, 336, 337, 338, 347, 348, 361, 368, 373,381, 382, 388, 389, 405, 410, 422, 423, 426, 431, 439, 441,449, 455, 459, 460, 465, 468, 494, 498, 505, 508, 513: n = A,T,C or G
  misc_feature 514, 522, 529, 533, 535, 536, 540, 542, 565, 566, 573, 574,576, 578, 590, 598, 599, 601: n = A,T,C or G

SEQ ID NO: 11749 - DNA, 657 bp, Homo sapiens; identical to SEQ ID NO: 5462
  misc_feature 14, 16, 19, 24, 28, 30, 33, 35, 40, 43, 44, 70, 89, 111,127, 131, 144, 153, 161, 162, 172, 198, 199, 202, 204, 205,211, 225, 229, 232, 236, 240, 242, 249, 252, 259, 268, 271,279, 285, 290, 292, 306, 313, 325, 327, 337, 340, 344: n = A,T,C or G
  misc_feature 350, 365, 370, 371, 373, 376, 377, 378, 382, 397, 412, 416,430, 434, 450, 471, 480, 486, 492, 504, 509, 540, 541, 546,547, 550, 557, 558, 585, 594, 595, 598, 599, 600, 611, 613,628, 639, 642, 648: n = A,T,C or G

SEQ ID NO: 11750 - DNA, 305 bp, Homo sapiens; identical to SEQ ID NO: 5463
  misc_feature 8, 10, 14, 32, 37, 40, 41, 73, 75, 95, 115, 160, 202, 203,210, 213, 224, 227, 229, 230, 242, 247, 252, 267, 270, 271,287: n = A,T,C or G

SEQ ID NO: 11751 - DNA, 300 bp, Homo sapiens; identical to SEQ ID NO: 5464

SEQ ID NO: 11752 - DNA, 411 bp, Homo sapiens; identical to SEQ ID NO: 5465
  misc_feature 334: n = A,T,C or G

SEQ ID NO: 11753 - DNA, 345 bp, Homo sapiens; identical to SEQ ID NO: 5466
  misc_feature 115, 144, 153, 155, 156, 157, 161, 163, 164, 167, 168, 170,171, 172, 173, 179, 186, 187, 189, 190, 192, 194, 195, 196,197, 200, 201, 202, 206, 207, 209, 211, 221, 256, 257, 265,272, 273, 274, 276, 283, 287, 288, 290, 291, 293, 295: n = A,T,C or G
  misc_feature 309, 314, 315, 327, 331, 332, 333: n = A,T,C or G

SEQ ID NO: 11754 - DNA, 310 bp, Homo sapiens; identical to SEQ ID NO: 5467

SEQ ID NO: 11755 - DNA, 475 bp, Homo sapiens; identical to SEQ ID NO: 5468
  misc_feature 1, 16, 64, 109, 115, 133, 139, 166, 180, 186, 187, 207, 209,214, 219, 227, 230, 233, 256, 274, 275, 283, 286, 291, 294,298, 300, 331, 344, 349, 354, 374, 378, 385, 388, 409, 416,421, 422, 429, 430, 433, 436, 437, 439, 446, 447: n = A,T,C or G
  misc_feature 449, 453, 456, 458, 462, 464: n = A,T,C or G

SEQ ID NO: 11756 - DNA, 293 bp, Homo sapiens; identical to SEQ ID NO: 5469
  misc_feature 30, 39, 45, 107, 114, 170, 202: n = A,T,C or G

SEQ ID NO: 11757 - DNA, 389 bp, Homo sapiens; identical to SEQ ID NO: 5470
  misc_feature 140, 173, 179, 234, 239, 301, 303, 365: n = A,T,C or G

SEQ ID NO: 11758 - DNA, 324 bp, Homo sapiens; identical to SEQ ID NO: 5471
  misc_feature 25, 96, 120, 266, 269, 302: n = A,T,C or G

SEQ ID NO: 11759 - DNA, 187 bp, Homo sapiens; identical to SEQ ID NO: 5472

SEQ ID NO: 11760 - DNA, 784 bp, Homo sapiens; identical to SEQ ID NO: 5473
  misc_feature 387, 461, 552, 558, 623, 634, 639, 641, 686, 690, 700, 726,727, 745, 746, 769: n = A,T,C or G

SEQ ID NO: 11761 - DNA, 369 bp, Homo sapiens; identical to SEQ ID NO: 5474
  misc_feature 14, 118, 167, 175, 181, 191, 249, 319: n = A,T,C or G

SEQ ID NO: 11762 - DNA, 332 bp, Homo sapiens; identical to SEQ ID NO: 5475
  misc_feature 150, 170, 192, 214, 229, 236, 248, 274, 276, 320: n = A,T,C or G

SEQ ID NO: 11763 - DNA, 307 bp, Homo sapiens; identical to SEQ ID NO: 5476
  misc_feature 120, 126, 127, 133, 139, 144, 164, 171, 179, 187, 190, 192,199, 201, 214, 225, 227, 229, 232, 236, 240, 249, 258, 262,275, 280, 286, 291, 293, 306: n = A,T,C or G

SEQ ID NO: 11764 - DNA, 400 bp, Homo sapiens; identical to SEQ ID NO: 5477

SEQ ID NO: 11765 - DNA, 675 bp, Homo sapiens; identical to SEQ ID NO: 5478
  misc_feature 493, 513, 552, 572, 604, 622, 662: n = A,T,C or G

SEQ ID NO: 11766 - DNA, 319 bp, Homo sapiens; identical to SEQ ID NO: 5479

SEQ ID NO: 11767 - DNA, 645 bp, Homo sapiens; identical to SEQ ID NO: 5480
  misc_feature 451, 556, 580, 584, 585, 587, 593, 597, 605, 614, 619, 620,621, 631: n = A,T,C or G

SEQ ID NO: 11768 - DNA, 346 bp, Homo sapiens; identical to SEQ ID NO: 5481
  misc_feature 74, 136, 157, 167, 170, 182, 183, 192, 205, 232, 245, 253,272, 276, 283, 302, 321, 336: n = A,T,C or G

SEQ ID NO: 11769 - DNA, 330 bp, Homo sapiens; identical to SEQ ID NO: 5482

SEQ ID NO: 11770 - DNA, 329 bp, Homo sapiens; identical to SEQ ID NO: 5483

SEQ ID NO: 11771 - DNA, 345 bp, Homo sapiens; identical to SEQ ID NO: 5484
  misc_feature 117, 122: n = A,T,C or G

SEQ ID NO: 11772 - DNA, 298 bp, Homo sapiens; identical to SEQ ID NO: 5485
  misc_feature 62, 103: n = A,T,C or G

SEQ ID NO: 11773 - DNA, 407 bp, Homo sapiens; identical to SEQ ID NO: 5486
  misc_feature 67, 169, 275: n = A,T,C or G

SEQ ID NO: 11774 - DNA, 280 bp, Homo sapiens; identical to SEQ ID NO: 5487
  misc_feature 129, 131, 162, 164, 167, 171, 185, 187, 190, 191, 202, 204,210, 217, 224, 226, 228, 230, 232, 237, 240, 263: n = A,T,C or G

SEQ ID NO: 11775 - DNA, 309 bp, Homo sapiens; identical to SEQ ID NO: 5488

SEQ ID NO: 11776 - DNA, 329 bp, Homo sapiens; identical to SEQ ID NO: 5489

SEQ ID NO: 11777 - DNA, 329 bp, Homo sapiens; identical to SEQ ID NO: 5490

SEQ ID NO: 11778 - DNA, 414 bp, Homo sapiens; identical to SEQ ID NO: 5491
  misc_feature 68, 127, 260, 269, 277, 278, 279, 280, 292, 298, 301, 304,311, 315, 336, 341, 349, 352, 353, 359, 360, 361, 366, 371,372, 375, 377, 380, 383, 391, 392, 393, 394, 399, 400, 403,406, 410: n = A,T,C or G

SEQ ID NO: 11779 - DNA, 305 bp, Homo sapiens; identical to SEQ ID NO: 5492

SEQ ID NO: 11780 - DNA, 223 bp, Homo sapiens; identical to SEQ ID NO: 5493

SEQ ID NO: 11781 - DNA, 299 bp, Homo sapiens; identical to SEQ ID NO: 5494

SEQ ID NO: 11782 - DNA, 539 bp, Homo sapiens; identical to SEQ ID NO: 5495
  misc_feature 125, 129, 130, 133, 134, 135, 136, 142, 145, 147, 148, 149,163, 164, 165, 166, 167, 169, 170, 171, 174, 175, 178, 183,184, 189, 190, 201, 216, 222, 227, 228, 230, 231, 232, 233,234, 241, 248, 249, 251, 253, 258, 259, 264, 265, 268: n = A,T,C or G
  misc_feature 271, 273, 276, 289, 296, 304, 306, 308, 316, 321, 324, 325,326, 336, 345, 351, 352, 356, 357, 358, 377, 379, 397, 406,408, 410, 422, 425, 430, 439, 440, 441, 448, 450, 451, 452,456, 458, 461, 462, 469, 478, 479, 483, 490, 491, 503: n = A,T,C or G
  misc_feature 509, 510, 513, 521, 529: n = A,T,C or G

SEQ ID NO: 11783 - DNA, 339 bp, Homo sapiens; identical to SEQ ID NO: 5496
  misc_feature 199, 207, 219, 234, 252, 279: n = A,T,C or G

SEQ ID NO: 11784 - DNA, 436 bp, Homo sapiens; identical to SEQ ID NO: 5497
  misc_feature 27, 162, 177, 189, 206, 239, 264, 285, 311, 340, 350, 362,363, 373, 380, 396, 413, 414, 415, 424, 426: n = A,T,C or G

SEQ ID NO: 11785 - DNA, 425 bp, Homo sapiens; identical to SEQ ID NO: 5498
  misc_feature 55, 56, 60, 116, 117, 118, 129, 134, 135, 136, 138, 151,153, 156, 157, 158, 160, 161, 162, 164, 167, 170, 171, 172,175, 176, 179, 197, 198, 199, 200, 201, 204, 207, 208, 209,212, 215, 217, 225, 231, 233, 235, 238, 240, 249, 250: n = A,T,C or G
  misc_feature 254, 257, 259, 260, 273, 278, 282, 287, 289, 291, 300, 304,313, 316, 322, 323, 326, 330, 333, 336, 340, 346, 350, 354,359, 373, 382, 385, 389, 390, 391, 392, 393, 414, 418: n = A,T,C or G

SEQ ID NO: 11786 - DNA, 257 bp, Homo sapiens; identical to SEQ ID NO: 5499
  misc_feature 26, 27, 45, 54, 60, 72, 74, 75, 85, 86, 92, 96, 101, 110,114, 127, 128, 134, 135, 139, 143, 152, 158, 161, 162, 167,168, 173, 174, 179, 184, 185, 191, 192, 195, 196, 197, 205,211, 219, 222, 230, 233, 234, 235, 241: n = A,T,C or G

SEQ ID NO: 11787 - DNA, 568 bp, Homo sapiens; identical to SEQ ID NO: 5500
  misc_feature 322, 363, 374, 376, 405, 407, 422, 429, 451, 459, 466, 484,493, 498, 519, 521, 536, 539, 540, 542, 549: n = A,T,C or G

SEQ ID NO: 11788 - DNA, 812 bp, Homo sapiens; identical to SEQ ID NO: 5501
  misc_feature 23, 58, 122, 128, 133, 141, 143, 149, 154, 155, 163, 167,170, 174, 178, 181, 182, 199, 210, 212, 215, 219, 221, 222,223, 226, 227, 228, 232, 233, 235, 236, 238, 243, 245, 248,252, 262, 265, 279, 280, 281, 293, 297, 298, 305, 309: n = A,T,C or G
  misc_feature 311, 312, 319, 321, 324, 325, 327, 335, 353, 360, 363, 372,374, 382, 385, 387, 388, 390, 392, 398, 436, 437, 438, 442,449, 458, 459, 462, 464, 465, 474, 475, 476, 480, 482, 490,502, 503, 510, 511, 520, 521, 528, 535, 537, 541, 544: n = A,T,C or G
  misc_feature 547, 557, 593, 596, 601, 607, 609, 614, 617, 630, 632, 648,652, 653, 655, 664, 666, 679, 685, 701, 704, 706, 708, 709,711, 717, 719, 720, 726, 730, 732, 734, 740, 762, 765, 776,784, 794, 795, 796: n = A,T,C or G

SEQ ID NO: 11789 - DNA, 670 bp, Homo sapiens; identical to SEQ ID NO: 5502
  misc_feature 15, 19, 24, 42, 43, 50, 51, 54, 82, 201, 213, 244, 251, 255,289, 301, 313, 315, 316, 325, 337, 375, 383, 396, 398, 419,423, 463, 472, 479, 495, 497, 513, 529, 531, 532, 539, 548,550, 557, 562, 564, 571, 573, 576, 583, 587, 591: n = A,T,C or G
  misc_feature 594, 595, 597, 600, 612, 621, 622, 633, 650, 653: n = A,T,C or G

SEQ ID NO: 11790 - DNA, 754 bp, Homo sapiens; identical to SEQ ID NO: 5503
  misc_feature 155, 180, 193, 357, 417, 454, 473, 482, 536, 550, 552, 560,566, 567, 568, 571, 574, 576, 594, 609, 610, 626, 633, 638,648, 651, 654, 659, 668, 674, 675, 680, 692, 701, 708, 713,732, 735: n = A,T,C or G

SEQ ID NO: 11791 - DNA, 312 bp, Homo sapiens; identical to SEQ ID NO: 5504

SEQ ID NO: 11792 - DNA, 318 bp, Homo sapiens; identical to SEQ ID NO: 5505
  misc_feature 26: n = A,T,C or G

SEQ ID NO: 11793 - DNA, 631 bp, Homo sapiens; identical to SEQ ID NO: 5506
  misc_feature 375, 376, 377, 378, 379, 380, 381, 382, 383, 384, 385, 386,387, 388, 389, 390, 391, 392, 393, 394, 395, 396, 397, 398,399, 400, 401, 402, 403, 404, 405, 406, 407, 408, 409, 410,411, 412, 413, 414, 415, 416, 417, 418, 419, 420, 421: n = A,T,C or G
  misc_feature 422, 423, 424, 425, 426, 427, 428, 429, 430, 431, 432, 433,434, 435, 436, 437, 438, 439, 440, 441, 442, 443, 444, 445,446, 447, 448, 449, 450, 451, 452, 453, 454, 455, 456, 457,458, 459, 460, 461, 462, 463, 464, 465, 466, 467, 468: n = A,T,C or G
  misc_feature 469, 470, 471, 472, 473, 474, 475, 476, 477, 478, 479, 480,481, 482, 483, 484, 485, 486, 487, 488, 489, 490, 491, 492,493, 494, 495, 496, 497, 498, 499, 500, 501, 516, 517, 518,519, 520, 521, 522, 523, 524, 525, 526, 527, 528, 529: n = A,T,C or G
  misc_feature 530, 531, 532, 533, 534, 535, 536, 537, 538, 539, 540, 541,542, 577, 584, 587, 602, 624: n = A,T,C or G

SEQ ID NO: 11794 - DNA, 331 bp, Homo sapiens; identical to SEQ ID NO: 5507

SEQ ID NO: 11795 - DNA, 668 bp, Homo sapiens; identical to SEQ ID NO: 5508
  misc_feature 49, 69, 76, 77, 78, 117, 138, 144, 151, 159, 167, 177, 183,193, 202, 208, 217, 223, 226, 228, 234, 263, 267, 294, 317,338, 348, 350, 351, 360, 368, 375, 399, 405, 411, 439, 445,448, 473, 479, 493, 512, 520, 540, 541, 546, 552, 570: n = A,T,C or G
  misc_feature 579, 629, 644, 649: n = A,T,C or G

SEQ ID NO: 11796 - DNA, 469 bp, Homo sapiens; identical to SEQ ID NO: 5509

SEQ ID NO: 11797 - DNA, 539 bp, Homo sapiens; identical to SEQ ID NO: 5510
  misc_feature 134, 151, 157, 390, 447, 493: n = A,T,C or G

SEQ ID NO: 11798 - DNA, 627 bp, Homo sapiens; identical to SEQ ID NO: 5511
  misc_feature 19, 26, 36, 42, 61, 66, 77, 78, 80, 83, 181, 218, 227, 237,244, 308, 316, 404, 435, 441, 463, 482, 491, 509, 521, 538,544, 545, 553, 556, 557, 559, 566, 591: n = A,T,C or G

SEQ ID NO: 11799 - DNA, 850 bp, Homo sapiens; identical to SEQ ID NO: 5512
  misc_feature 422, 424, 444, 469, 471, 500, 509, 521, 564, 590, 598, 601,625, 640, 647, 649, 662, 667, 679, 680, 714, 718, 724, 727,728, 743, 744, 764, 784, 803, 815, 816, 817, 819, 826, 833: n = A,T,C or G

SEQ ID NO: 11800 - DNA, 350 bp, Homo sapiens; identical to SEQ ID NO: 5513
  misc_feature 119: n = A,T,C or G

SEQ ID NO: 11801 - DNA, 291 bp, Homo sapiens; identical to SEQ ID NO: 5514

SEQ ID NO: 11802 - DNA, 302 bp, Homo sapiens; identical to SEQ ID NO: 5515
  misc_feature 91, 105, 115, 178, 238, 251, 266, 271: n = A,T,C or G

SEQ ID NO: 11803 - DNA, 554 bp, Homo sapiens; identical to SEQ ID NO: 5516
  misc_feature 508, 515, 516, 517, 518, 519, 520, 521, 522, 523, 524, 525,526, 527, 528, 529, 530, 531, 532: n = A,T,C or G

SEQ ID NO: 11804 - DNA, 625 bp, Homo sapiens; identical to SEQ ID NO: 5517
  misc_feature 565, 604, 612: n = A,T,C or G

SEQ ID NO: 11805 - DNA, 499 bp, Homo sapiens; identical to SEQ ID NO: 5518
  misc_feature 444: n = A,T,C or G

SEQ ID NO: 11806 - DNA, 362 bp, Homo sapiens; identical to SEQ ID NO: 5519
  misc_feature 113, 116, 121, 124, 351: n = A,T,C or G

SEQ ID NO: 11807 - DNA, 667 bp, Homo sapiens; identical to SEQ ID NO: 5520
  misc_feature 374, 379, 401, 415, 423, 436, 496, 506, 510, 514, 515, 519,550, 551, 565, 572, 574, 582, 586, 589, 600, 605, 610, 613,619, 626, 629, 630, 631, 645: n = A,T,C or G

SEQ ID NO: 11808 - DNA, 319 bp, Homo sapiens; identical to SEQ ID NO: 5521

SEQ ID NO: 11809 - DNA, 319 bp, Homo sapiens; identical to SEQ ID NO: 5522
  misc_feature 266, 298, 306: n = A,T,C or G

SEQ ID NO: 11810 - DNA, 342 bp, Homo sapiens; identical to SEQ ID NO: 5523
  misc_feature 109, 115, 130, 139, 160, 199, 200, 207, 250, 326, 327: n = A,T,C or G

SEQ ID NO: 11811 - DNA, 654 bp, Homo sapiens; identical to SEQ ID NO: 5524
  misc_feature 83, 126, 148, 177, 210, 219, 270, 292, 305, 322, 329, 335,475, 490, 491, 506, 520, 531, 532, 561, 571, 578, 606, 608,618, 621, 635: n = A,T,C or G

SEQ ID NO: 11812 - DNA, 324 bp, Homo sapiens; identical to SEQ ID NO: 5525
  misc_feature 164, 231, 302: n = A,T,C or G

SEQ ID NO: 11813 - DNA, 326 bp, Homo sapiens; identical to SEQ ID NO: 5526

SEQ ID NO: 11814 - DNA, 310 bp, Homo sapiens; identical to SEQ ID NO: 5527
  misc_feature 12, 173, 187, 192, 279, 281, 309: n = A,T,C or G

SEQ ID NO: 11815 - DNA, 156 bp, Homo sapiens; identical to SEQ ID NO: 5528
  misc_feature 106, 118, 125, 129: n = A,T,C or G

SEQ ID NO: 11816 - DNA, 149 bp, Homo sapiens; identical to SEQ ID NO: 5529
  misc_feature 57, 103, 109, 112: n = A,T,C or G

SEQ ID NO: 11817 - DNA, 226 bp, Homo sapiens; identical to SEQ ID NO: 5530
  misc_feature 117, 119, 128, 148, 155, 156, 161, 194, 197, 206, 212, 222: n = A,T,C or G

SEQ ID NO: 11818 - DNA, 646 bp, Homo sapiens; identical to SEQ ID NO: 5531
  misc_feature 145, 153, 223, 285, 296, 330, 388, 392, 400, 445, 521, 524,555, 558, 561, 576, 596, 616, 630, 634: n = A,T,C or G

SEQ ID NO: 11819 - DNA, 203 bp, Homo sapiens; identical to SEQ ID NO: 5532
  misc_feature 171: n = A,T,C or G

SEQ ID NO: 11820 - DNA, 638 bp, Homo sapiens; identical to SEQ ID NO: 5533
  misc_feature 93, 101, 102, 104, 109, 110, 111, 113, 115, 117, 119, 120,124, 125, 128, 132, 133, 134, 142, 143, 155, 159, 160, 161,162, 163, 165, 167, 177, 178, 179, 187, 189, 193, 195, 196,199, 201, 205, 207, 216, 220, 223, 224, 227, 229, 234: n = A,T,C or G
  misc_feature 239, 240, 241, 248, 250, 251, 253, 255, 273, 275, 276, 280,290, 294, 301, 308, 310, 315, 316, 318, 325, 326, 328, 331,333, 342, 350, 351, 352, 355, 356, 357, 358, 359, 374, 377,380, 391, 392, 395, 398, 403, 404, 407, 410, 418, 419: n = A,T,C or G
  misc_feature 420, 428, 430, 432, 433, 435, 436, 438, 442, 443, 446, 449,454, 456, 457, 462, 475, 478, 480, 492, 493, 495, 506, 510,519, 524, 537, 538, 545, 551, 553, 554, 555, 560, 561, 562,569, 582, 583, 584, 589, 590, 592, 593, 601, 609, 612: n = A,T,C or G
  misc_feature 613, 615, 618, 620: n = A,T,C or G

SEQ ID NO: 11821 - DNA, 208 bp, Homo sapiens; identical to SEQ ID NO: 5534
  misc_feature 21, 30, 38, 43, 56, 82, 91, 115, 134, 167, 208: n = A,T,C or G

SEQ ID NO: 11822 - DNA, 369 bp, Homo sapiens; identical to SEQ ID NO: 5535
  misc_feature 349: n = A,T,C or G

SEQ ID NO: 11823 - DNA, 771 bp, Homo sapiens; identical to SEQ ID NO: 5536
  misc_feature 179, 198, 203, 219, 242, 264, 282, 292, 306, 310, 311, 331,358, 359, 370, 377, 393, 401, 403, 444, 453, 464, 468, 540,556, 584, 628, 629, 666, 679, 686, 695, 705, 706, 728, 730,731, 746, 747, 761: n = A,T,C or G

SEQ ID NO: 11824 - DNA, 423 bp, Homo sapiens; identical to SEQ ID NO: 5537
  misc_feature 10, 11, 12, 19, 21, 35, 130, 142, 145, 146, 155, 172, 224,251, 271, 272, 292, 345: n = A,T,C or G

SEQ ID NO: 11825 - DNA, 422 bp, Homo sapiens; identical to SEQ ID NO: 5538
  misc_feature 55, 75, 89, 260, 306, 359: n = A,T,C or G

SEQ ID NO: 11826 - DNA, 389 bp, Homo sapiens; identical to SEQ ID NO: 5539
  misc_feature 125, 211, 222, 223, 224, 225, 226, 227, 228, 229, 230, 231,232, 233, 234, 235, 236, 237, 238, 239, 240, 241, 242, 243,244, 245, 246, 247, 248, 249, 250, 251, 252, 253, 254, 255,256, 257, 258, 259, 260, 261, 262, 263, 264, 265, 266: n = A,T,C or G
  misc_feature 267, 268, 269, 270, 271, 272, 273, 274, 275, 276, 277, 278,279, 280, 281, 282, 283, 284, 285, 286, 287, 288, 289, 290,291, 292, 293, 294, 295, 296, 297, 298, 302, 303, 304, 305,306, 307, 308, 309, 310, 311, 312, 313, 314, 315, 316: n = A,T,C or G
  misc_feature 317, 318, 319, 320, 321, 322, 323, 324, 325, 326, 327, 328,329, 330, 331, 332, 333, 334, 335, 336, 350, 357: n = A,T,C or G

SEQ ID NO: 11827 - DNA, 426 bp, Homo sapiens; identical to SEQ ID NO: 5540
  misc_feature 137, 139, 142, 144, 147, 152, 155, 158, 168, 170, 171, 179,183, 229, 319, 356, 362, 382, 385: n = A,T,C or G

SEQ ID NO: 11828 - DNA, 465 bp, Homo sapiens; identical to SEQ ID NO: 5541

SEQ ID NO: 11829 - DNA, 447 bp, Homo sapiens; identical to SEQ ID NO: 5542

SEQ ID NO: 11830 - DNA, 418 bp, Homo sapiens; identical to SEQ ID NO: 5543
  misc_feature 55, 59, 68, 71, 74, 75, 188, 261, 300, 328, 383, 413: n = A,T,C or G

SEQ ID NO: 11831 - DNA, 349 bp, Homo sapiens; identical to SEQ ID NO: 5544
  misc_feature 326: n = A,T,C or G

SEQ ID NO: 11832 - DNA, 185 bp, Homo sapiens; identical to SEQ ID NO: 5545
  misc_feature 40: n = A,T,C or G

SEQ ID NO: 11833 - DNA, 570 bp, Homo sapiens; identical to SEQ ID NO: 5546
  misc_feature 355, 446, 470, 559: n = A,T,C or G

SEQ ID NO: 11834 - DNA, 430 bp, Homo sapiens; identical to SEQ ID NO: 5547
  misc_feature 196, 397: n = A,T,C or G

SEQ ID NO: 11835 - DNA, 295 bp, Homo sapiens; identical to SEQ ID NO: 5548
  misc_feature 250: n = A,T,C or G

SEQ ID NO: 11836 - DNA, 262 bp, Homo sapiens; identical to SEQ ID NO: 5549
  misc_feature 118: n = A,T,C or G

SEQ ID NO: 11837 - DNA, 239 bp, Homo sapiens; identical to SEQ ID NO: 5550
  misc_feature 214: n = A,T,C or G

SEQ ID NO: 11838 - DNA, 633 bp, Homo sapiens; identical to SEQ ID NO: 5551
  misc_feature 331, 497, 498, 541, 553, 581, 586, 604, 611: n = A,T,C or G

SEQ ID NO: 11839 - DNA, 498 bp, Homo sapiens; identical to SEQ ID NO: 5552
  misc_feature 42, 72, 80, 102, 103, 166, 183, 234, 237, 251, 266, 283,293, 352, 370, 384, 388, 403, 439, 453, 460, 476, 491: n = A,T,C or G

SEQ ID NO: 11840 - DNA, 474 bp, Homo sapiens; identical to SEQ ID NO: 5553
  misc_feature 312, 328, 332, 346, 347, 348, 349, 350, 351, 352, 353, 354,355, 356, 357, 358, 359, 360, 361, 362, 363, 364, 365, 366,367, 368, 369, 370, 371, 372, 373, 374, 375, 376, 377, 378,379, 380, 381, 382, 383, 384, 385, 425, 466: n = A,T,C or G

SEQ ID NO: 11841 - DNA, 587 bp, Homo sapiens; identical to SEQ ID NO: 5554
  misc_feature 67, 74, 99, 101, 114, 116, 117, 126, 134, 136, 142, 144,157, 165, 171, 195, 211, 218, 230, 235, 240, 251, 254, 265,267, 273, 286, 312, 317, 320, 321, 343, 348, 349, 357, 360,364, 366, 367, 377, 394, 404, 412, 421, 426, 429, 433: n = A,T,C or G
  misc_feature 435, 438, 466, 468, 471, 472, 502, 504, 505, 507, 518, 527,533, 537, 541, 555, 557, 568, 573, 580, 587: n = A,T,C or G

SEQ ID NO: 11842 - DNA, 304 bp, Homo sapiens; identical to SEQ ID NO: 5555

SEQ ID NO: 11843 - DNA, 651 bp, Homo sapiens; identical to SEQ ID NO: 5556
  misc_feature 34, 35, 36, 37, 38, 39, 40, 46, 63, 153, 168, 184, 198, 200,213, 233, 245, 259, 261, 275, 283, 299, 313, 325, 343, 375,379, 387, 390, 397, 419, 429, 445, 450, 451, 466, 471, 489,503, 506, 507, 520, 523, 538, 568, 571, 574, 579: n = A,T,C or G
  misc_feature 586, 607, 610, 611, 625, 627: n = A,T,C or G

SEQ ID NO: 11844 - DNA, 363 bp, Homo sapiens; identical to SEQ ID NO: 5557
  misc_feature 68, 108, 178, 246, 260, 292, 313, 314, 340: n = A,T,C or G

SEQ ID NO: 11845 - DNA, 391 bp, Homo sapiens; identical to SEQ ID NO: 5558

SEQ ID NO: 11846 - DNA, 649 bp, Homo sapiens; identical to SEQ ID NO: 5559
  misc_feature 31, 33, 36, 39, 46, 48, 53, 57, 72, 81, 87, 92, 94, 119,124, 132, 137, 146, 148, 149, 165, 168, 170, 171, 173, 179,180, 181, 182, 188, 196, 201, 204, 208, 213, 215, 220, 223,226, 227, 238, 280, 321, 344, 388, 396, 405, 410, 426: n = A,T,C or G
  misc_feature 435, 456, 458, 480, 487, 494, 499, 530, 552, 563, 569, 575,577, 590, 591, 592, 593, 594, 598, 599, 602, 619: n = A,T,C or G

SEQ ID NO: 11847 - DNA, 411 bp, Homo sapiens; identical to SEQ ID NO: 5560
  misc_feature 357, 366, 406: n = A,T,C or G

SEQ ID NO: 11848 - DNA, 410 bp, Homo sapiens; identical to SEQ ID NO: 5561
  misc_feature 46, 81, 112, 144, 166, 177, 192, 193, 201, 209, 241, 254,292, 328, 330, 336, 349, 351, 367, 369, 376, 383, 387, 389,394: n = A,T,C or G

SEQ ID NO: 11849 - DNA, 328 bp, Homo sapiens; identical to SEQ ID NO: 5562

SEQ ID NO: 11850 - DNA, 570 bp, Homo sapiens; identical to SEQ ID NO: 5563
  misc_feature 25, 45, 90, 112, 135, 162, 200, 202, 267, 388, 438, 472,486, 503, 544, 549, 559: n = A,T,C or G

SEQ ID NO: 11851 - DNA, 260 bp, Homo sapiens; identical to SEQ ID NO: 5564
  misc_feature 51, 57, 68, 86, 119, 124, 133, 138, 142, 154, 160, 211, 213,220: n = A,T,C or G

SEQ ID NO: 11852 - DNA, 512 bp, Homo sapiens; identical to SEQ ID NO: 5565
  misc_feature 357, 390, 419, 463, 493: n = A,T,C or G

SEQ ID NO: 11853 - DNA, 419 bp, Homo sapiens; identical to SEQ ID NO: 5566
  misc_feature 181: n = A,T,C or G

SEQ ID NO: 11854 - DNA, 397 bp, Homo sapiens; identical to SEQ ID NO: 5567
  misc_feature 33, 57, 94, 104, 107, 131, 136, 138, 139, 142, 143, 151,160, 161, 168, 176, 177, 178, 180, 185, 186, 204, 205, 208,214, 215, 217, 220, 230, 231, 235, 244, 247, 248, 250, 251,254, 264, 265, 267, 269, 276, 281, 283, 284, 288, 289: n = A,T,C or G
  misc_feature 290, 293, 299, 300, 301, 302, 307, 308, 324, 325, 326, 335,338, 344, 346, 349, 353, 357, 358, 359, 363, 367, 375: n = A,T,C or G

SEQ ID NO: 11855 - DNA, 376 bp, Homo sapiens; identical to SEQ ID NO: 5568
  misc_feature 188, 275, 376: n = A,T,C or G

SEQ ID NO: 11856 - DNA, 579 bp, Homo sapiens; identical to SEQ ID NO: 5569
  misc_feature 60, 61, 62, 121, 136, 139, 140, 143, 144, 145, 146, 147,148, 159, 161, 162, 164, 165, 166, 167, 168, 185, 188, 189,190, 193, 194, 195, 196, 197, 199, 200, 202, 204, 207, 210,226, 227, 229, 232, 234, 251, 254, 256, 258, 260, 263: n = A,T,C or G
  misc_feature 266, 268, 269, 271, 285, 286, 288, 289, 291, 292, 296, 299,300, 303, 304, 305, 311, 312, 317, 336, 337, 339, 341, 343,349, 352, 353, 355, 356, 362, 363, 366, 369, 379, 380, 381,382, 383, 385, 396, 404, 405, 407, 408, 415, 419, 420: n = A,T,C or G
  misc_feature 421, 423, 425, 429, 434, 435, 437, 438, 440, 441, 442, 443,444, 445, 448, 449, 450, 458, 459, 460, 461, 462, 469, 475,489, 490, 491, 493, 494, 495, 496, 497, 499, 504, 507, 508,509, 511, 512, 513, 517, 525, 527, 533, 534, 544, 545: n = A,T,C or G
  misc_feature 550, 552, 556, 558, 563, 564, 571: n = A,T,C or G

SEQ ID NO: 11857 - DNA, 298 bp, Homo sapiens; identical to SEQ ID NO: 5570
  misc_feature 52, 111, 113, 114, 115, 116, 124, 133, 134, 139, 143, 144,148, 154, 156, 157, 165, 166, 174, 192, 195, 203, 204, 215,216, 217, 218, 222, 229, 230, 231, 232, 233, 234, 236, 238,240, 242, 256, 257, 266, 268: n = A,T,C or G

SEQ ID NO: 11858 - DNA, 580 bp, Homo sapiens; identical to SEQ ID NO: 5571

SEQ ID NO: 11859 - DNA, 304 bp, Homo sapiens; identical to SEQ ID NO: 5572

SEQ ID NO: 11860 - DNA, 326 bp, Homo sapiens; identical to SEQ ID NO: 5573

SEQ ID NO: 11861 - DNA, 344 bp, Homo sapiens; identical to SEQ ID NO: 5574

SEQ ID NO: 11862 - DNA, 415 bp, Homo sapiens; identical to SEQ ID NO: 5575

SEQ ID NO: 11863 - DNA, 378 bp, Homo sapiens; identical to SEQ ID NO: 5576

SEQ ID NO: 11864 - DNA, 103 bp, Homo sapiens; identical to SEQ ID NO: 5577
  misc_feature 75: n = A,T,C or G

SEQ ID NO: 11865 - DNA, 606 bp, Homo sapiens; identical to SEQ ID NO: 5578
  misc_feature 44, 53, 56, 71, 73, 82, 89, 103, 105, 110, 129, 165, 168,169, 183, 184, 185, 233, 249, 261, 267, 269, 274, 280, 288,294, 333, 339, 345, 377, 394, 395, 397, 414, 419, 421, 428,440, 453, 464, 467, 470, 476, 492, 508, 537, 552, 563: n = A,T,C or G
  misc_feature 574, 603: n = A,T,C or G

SEQ ID NO: 11866 - DNA, 206 bp, Homo sapiens; identical to SEQ ID NO: 5579
  misc_feature 84, 113, 128, 180, 189: n = A,T,C or G

SEQ ID NO: 11867 - DNA, 420 bp, Homo sapiens; identical to SEQ ID NO: 5580
  misc_feature 7, 10, 11, 13, 15, 26, 33, 38, 41, 48, 52, 55, 56, 57, 61,62, 66, 72, 82, 83, 88, 89, 94, 95, 98, 101, 110, 115, 120,121, 127, 132, 148, 159, 161, 180, 186, 189, 191, 193, 194,208, 211, 223, 224, 229, 243, 396: n = A,T,C or G

SEQ ID NO: 11868 - DNA, 387 bp, Homo sapiens; identical to SEQ ID NO: 5581
  misc_feature 364: n = A,T,C or G

SEQ ID NO: 11869 - DNA, 384 bp, Homo sapiens; identical to SEQ ID NO: 5582
  misc_feature 90, 102, 169, 204, 227, 237, 283, 346, 352, 384: n = A,T,C or G

SEQ ID NO: 11870 - DNA, 310 bp, Homo sapiens; identical to SEQ ID NO: 5583

SEQ ID NO: 11871 - DNA, 483 bp, Homo sapiens; identical to SEQ ID NO: 5584
  misc_feature 134, 181, 183, 433: n = A,T,C or G

SEQ ID NO: 11872 - DNA, 168 bp, Homo sapiens; identical to SEQ ID NO: 5585

SEQ ID NO: 11873 - DNA, 592 bp, Homo sapiens; identical to SEQ ID NO: 5586
  misc_feature 38, 530, 536, 577, 583: n = A,T,C or G

SEQ ID NO: 11874 - DNA, 317 bp, Homo sapiens; identical to SEQ ID NO: 5587
  misc_feature 114, 115, 116, 118, 119, 121, 124, 126, 129, 130, 131, 136,137, 149, 162, 163, 165, 167, 169, 170, 171, 174, 175, 182,188, 192, 198, 206, 211, 214, 216, 218, 219, 229, 231, 234,235, 249, 255, 258, 272, 274, 275, 276, 280, 281, 286: n = A,T,C or G
  misc_feature 288, 293, 297, 298, 303, 309: n = A,T,C or G

SEQ ID NO: 11875 - DNA, 348 bp, Homo sapiens; identical to SEQ ID NO: 5588
  misc_feature 95, 117, 123, 125, 128, 157, 196, 205, 253, 258, 282: n = A,T,C or G

SEQ ID NO: 11876 - DNA, 399 bp, Homo sapiens; identical to SEQ ID NO: 5589
  misc_feature 210, 278: n = A,T,C or G

SEQ ID NO: 11877 - DNA, 413 bp, Homo sapiens; identical to SEQ ID NO: 5590

SEQ ID NO: 11878 - DNA, 484 bp, Homo sapiens; identical to SEQ ID NO: 5591
  misc_feature 22, 24, 311, 328, 334, 343, 469, 472, 476: n = A,T,C or G

SEQ ID NO: 11879 - DNA, 562 bp, Homo sapiens; identical to SEQ ID NO: 5592
  misc_feature 17, 71, 76, 156, 172, 195, 222, 227, 231, 243, 252, 256,278, 280, 287, 289, 300, 304, 317, 319, 325, 339, 361, 377,381, 396, 402, 415, 431, 441, 462, 475, 483, 484, 487, 488,490, 496, 504, 508, 510, 515, 520, 526, 531, 556: n = A,T,C or G

SEQ ID NO: 11880 - DNA, 521 bp, Homo sapiens; identical to SEQ ID NO: 5593

SEQ ID NO: 11881 - DNA, 332 bp, Homo sapiens; identical to SEQ ID NO: 5594
  misc_feature 57, 145, 153, 163, 178, 179, 189, 199, 208, 215, 219, 220,221, 234, 236, 239, 250, 251, 252, 253, 263, 272, 288, 289,290, 291, 296, 297, 298, 307, 322: n = A,T,C or G

SEQ ID NO: 11882 - DNA, 299 bp, Homo sapiens; identical to SEQ ID NO: 5595

SEQ ID NO: 11883 - DNA, 434 bp, Homo sapiens; identical to SEQ ID NO: 5596

SEQ ID NO: 11884 - DNA, 675 bp, Homo sapiens; identical to SEQ ID NO: 5597
  misc_feature 26, 37, 41, 47, 51, 52, 54, 55, 57, 61, 62, 69, 70, 73, 74,75, 80, 83, 89, 94, 97, 107, 112, 113, 115, 118, 121, 124,133, 136, 165, 180, 187, 434, 447, 465, 478, 480, 502, 529,538, 577, 602, 630, 639, 643, 655, 663: n = A,T,C or G

SEQ ID NO: 11885 - DNA, 287 bp, Homo sapiens; identical to SEQ ID NO: 5598
  misc_feature 58, 61, 80, 81, 102, 103, 107, 110, 111, 113, 116, 117, 118,119, 120, 123, 145, 146, 147, 152, 170, 171, 172, 174, 175,176, 177, 178, 179, 188, 189, 190, 194, 196, 197, 198, 206,207, 208, 209, 210, 213, 214, 218, 219, 221, 222: n = A,T,C or G
  misc_feature 223, 224, 225, 226, 227, 232, 233, 235, 236, 237, 238, 243,244, 245, 248, 249, 250, 255, 257, 258, 261, 264, 265, 266,273, 274, 278, 283: n = A,T,C or G

SEQ ID NO: 11886 - DNA, 586 bp, Homo sapiens; identical to SEQ ID NO: 5599
  misc_feature 257, 288, 419, 485, 494, 516, 533: n = A,T,C or G

SEQ ID NO: 11887 - DNA, 561 bp, Homo sapiens; identical to SEQ ID NO: 5600
  misc_feature 460: n = A,T,C or G

SEQ ID NO: 11888 - DNA, 309 bp, Homo sapiens; identical to SEQ ID NO: 5601

SEQ ID NO: 11889 - DNA, 130 bp, Homo sapiens; identical to SEQ ID NO: 5602
  misc_feature 84, 89, 130: n = A,T,C or G

SEQ ID NO: 11890 - DNA, 420 bp, Homo sapiens; identical to SEQ ID NO: 5603

SEQ ID NO: 11891 - DNA, 366 bp, Homo sapiens; identical to SEQ ID NO: 5604

SEQ ID NO: 11892 - DNA, 250 bp, Homo sapiens; identical to SEQ ID NO: 5605

SEQ ID NO: 11893 - DNA, 281 bp, Homo sapiens; identical to SEQ ID NO: 5606

SEQ ID NO: 11894 - DNA, 149 bp, Homo sapiens; identical to SEQ ID NO: 5607
  misc_feature 32, 40, 42, 43, 46, 47, 48, 49, 50, 51, 52, 53, 54, 78, 111,113, 114, 117, 119, 125: n = A,T,C or G

SEQ ID NO: 11895 - DNA, 780 bp, Homo sapiens; identical to SEQ ID NO: 5608
  misc_feature 652, 695, 720, 723, 732, 768, 772, 779: n = A,T,C or G

SEQ ID NO: 11896 - DNA, 324 bp, Homo sapiens; identical to SEQ ID NO: 5609

SEQ ID NO: 11897 - DNA, 206 bp, Homo sapiens; identical to SEQ ID NO: 5610
  misc_feature 40, 56, 72, 82, 83, 124, 127, 152, 155, 158, 175, 177, 189: n = A,T,C or G

SEQ ID NO: 11898 - DNA, 607 bp, Homo sapiens; identical to SEQ ID NO: 5611
  misc_feature 33, 49, 77, 81, 87, 90, 101, 107, 118, 139, 142, 154, 159,161, 166, 176, 184, 190, 191, 194, 196, 199, 203, 204, 221,225, 234, 235, 237, 252, 256, 268, 273, 275, 287, 288, 292,296, 297, 307, 308, 311, 314, 319, 335, 336, 352, 355: n = A,T,C or G
  misc_feature 356, 357, 358, 363, 364, 373, 377, 379, 380, 383, 384, 388,394, 399, 401, 406, 410, 415, 416, 418, 419, 420, 426, 435,436, 437, 443, 448, 454, 456, 457, 458, 462, 464, 465, 466,469, 482, 483, 484, 493, 495, 506, 508, 516, 518, 533: n = A,T,C or G
  misc_feature 537, 539, 540, 544, 549, 557, 564, 569, 570, 571, 572, 575,582, 591, 592, 603: n = A,T,C or G

SEQ ID NO: 11899 - DNA, 348 bp, Homo sapiens; identical to SEQ ID NO: 5612
  misc_feature 137, 152, 162, 166, 167, 195, 197, 198, 201, 211, 212, 219,221, 223, 228, 229, 231, 232, 233, 234, 236, 239, 240, 241,246, 247, 249, 253, 256, 258, 259, 260, 263, 264, 269, 271,273, 278, 279, 280, 281, 282, 285, 287, 293, 294, 298: n = A,T,C or G
  misc_feature 300, 305, 306, 309, 310, 311, 312, 313, 317, 321, 324, 325,328, 329, 330, 331, 332, 335, 336: n = A,T,C or G

SEQ ID NO: 11900 - DNA, 436 bp, Homo sapiens; identical to SEQ ID NO: 5613

SEQ ID NO: 11901 - DNA, 307 bp, Homo sapiens; identical to SEQ ID NO: 5614

SEQ ID NO: 11902 - DNA, 214 bp, Homo sapiens; identical to SEQ ID NO: 5615
  misc_feature 198, 205: n = A,T,C or G

SEQ ID NO: 11903 - DNA, 354 bp, Homo sapiens; identical to SEQ ID NO: 5616
  misc_feature 127, 220, 266, 301, 316, 319, 322, 323, 324, 341: n = A,T,C or G

SEQ ID NO: 11904 - DNA, 291 bp, Homo sapiens; identical to SEQ ID NO: 5617
  misc_feature 209, 245, 259, 269, 278, 280, 284: n = A,T,C or G

SEQ ID NO: 11905 - DNA, 330 bp, Homo sapiens; identical to SEQ ID NO: 5618

SEQ ID NO: 11906 - DNA, 669 bp, Homo sapiens; identical to SEQ ID NO: 5619
  misc_feature 116, 167, 168, 288, 393, 411, 413, 512, 605, 640: n = A,T,C or G

SEQ ID NO: 11907 - DNA, 411 bp, Homo sapiens; identical to SEQ ID NO: 5620

SEQ ID NO: 11908 - DNA, 503 bp, Homo sapiens; identical to SEQ ID NO: 5621

SEQ ID NO: 11909 - DNA, 390 bp, Homo sapiens; identical to SEQ ID NO: 5622

SEQ ID NO: 11910 - DNA, 387 bp, Homo sapiens; identical to SEQ ID NO: 5623
  misc_feature 144: n = A,T,C or G

SEQ ID NO: 11911 - DNA, 426 bp, Homo sapiens; identical to SEQ ID NO: 5624
  misc_feature 16, 19, 22, 33, 323, 372, 382, 401: n = A,T,C or G

SEQ ID NO: 11912 - DNA, 422 bp, Homo sapiens; identical to SEQ ID NO: 5625

SEQ ID NO: 11913 - DNA, 188 bp, Homo sapiens; identical to SEQ ID NO: 5626
  misc_feature 30, 128: n = A,T,C or G

SEQ ID NO: 11914 - DNA, 549 bp, Homo sapiens; identical to SEQ ID NO: 5627
  misc_feature 278, 330, 338, 497, 500: n = A,T,C or G

SEQ ID NO: 11915 - DNA, 302 bp, Homo sapiens; identical to SEQ ID NO: 5628
  misc_feature 144: n = A,T,C or G

SEQ ID NO: 11916 - DNA, 566 bp, Homo sapiens; identical to SEQ ID NO: 5629
  misc_feature 502, 509, 510, 513, 514, 525, 528, 535, 538, 539, 543, 548,557: n = A,T,C or G

SEQ ID NO: 11917 - DNA, 489 bp, Homo sapiens; identical to SEQ ID NO: 5630
  misc_feature 479: n = A,T,C or G

SEQ ID NO: 11918 - DNA, 761 bp, Homo sapiens; identical to SEQ ID NO: 5631
  misc_feature 325, 374, 464, 518, 546, 580, 598, 610, 631, 636, 645, 653,662, 667, 689, 692, 736, 761: n = A,T,C or G

SEQ ID NO: 11919 - DNA, 430 bp, Homo sapiens; identical to SEQ ID NO: 5632

SEQ ID NO: 11920 - DNA, 214 bp, Homo sapiens; identical to SEQ ID NO: 5633
  misc_feature 1, 14, 205: n = A,T,C or G

SEQ ID NO: 11921 - DNA, 270 bp, Homo sapiens; identical to SEQ ID NO: 5634
  misc_feature 105, 106, 121, 122, 129, 130, 133, 141, 153, 155, 162, 164,169, 182, 185, 195, 196, 201, 202, 211, 229, 232, 233, 236,251, 254: n = A,T,C or G

SEQ ID NO: 11922 - DNA, 433 bp, Homo sapiens; identical to SEQ ID NO: 5635
  misc_feature 274, 296: n = A,T,C or G

SEQ ID NO: 11923 - DNA, 467 bp, Homo sapiens; identical to SEQ ID NO: 5636
  misc_feature 126, 283, 328, 350, 360, 362, 375, 385, 386, 424, 429, 443: n = A,T,C or G

SEQ ID NO: 11924 - DNA, 459 bp, Homo sapiens; identical to SEQ ID NO: 5638

SEQ ID NO: 11925 - DNA, 329 bp, Homo sapiens; identical to SEQ ID NO: 5639

SEQ ID NO: 11926 - DNA, 528 bp, Homo sapiens; identical to SEQ ID NO: 5640
  misc_feature 122, 137, 157, 228, 356, 398, 435: n = A,T,C or G

SEQ ID NO: 11927 - DNA, 240 bp, Homo sapiens; identical to SEQ ID NO: 5641
  misc_feature 192, 220, 222: n = A,T,C or G

SEQ ID NO: 11928 - DNA, 401 bp, Homo sapiens; identical to SEQ ID NO: 5642
  misc_feature 140, 141, 253, 279, 303, 306, 365, 384: n = A,T,C or G

SEQ ID NO: 11929 - DNA, 479 bp, Homo sapiens; identical to SEQ ID NO: 5643

SEQ ID NO: 11930 - DNA, 520 bp, Homo sapiens; identical to SEQ ID NO: 5644
  misc_feature 401, 500, 519: n = A,T,C or G

SEQ ID NO: 11931 - DNA, 283 bp, Homo sapiens; identical to SEQ ID NO: 5645
  misc_feature 246, 268: n = A,T,C or G

SEQ ID NO: 11932 - DNA, 393 bp, Homo sapiens; identical to SEQ ID NO: 5646

SEQ ID NO: 11933 - DNA, 549 bp, Homo sapiens; identical to SEQ ID NO: 5647
  misc_feature 185, 371, 495, 500, 508: n = A,T,C or G

SEQ ID NO: 11934 - DNA, 246 bp, Homo sapiens; identical to SEQ ID NO: 5648
  misc_feature 89, 116, 144, 145, 146, 152, 160, 161, 166, 168, 169, 179,180, 184, 190, 194, 198, 199, 200, 203, 205, 214, 219, 220,221, 230, 232, 233, 234, 242: n = A,T,C or G

SEQ ID NO: 11935 - DNA, 342 bp, Homo sapiens; identical to SEQ ID NO: 5649
  misc_feature 274: n = A,T,C or G

SEQ ID NO: 11936 - DNA, 657 bp, Homo sapiens; identical to SEQ ID NO: 5650
  misc_feature 427, 467, 508, 518, 519, 528, 542, 556, 562, 585, 592, 615,624, 632: n = A,T,C or G

SEQ ID NO: 11937 - DNA, 677 bp, Homo sapiens; identical to SEQ ID NO: 5651
  misc_feature 480, 493: n = A,T,C or G

SEQ ID NO: 11938 - DNA, 300 bp, Homo sapiens; identical to SEQ ID NO: 5652
  misc_feature 173: n = A,T,C or G

SEQ ID NO: 11939 - DNA, 640 bp, Homo sapiens; identical to SEQ ID NO: 5653
  misc_feature 267, 289, 326, 412, 461, 488, 490, 494, 511, 531, 546, 548,576, 600, 602, 615, 617, 621, 623, 629: n = A,T,C or G

SEQ ID NO: 11940 - DNA, 415 bp, Homo sapiens; identical to SEQ ID NO: 5654

SEQ ID NO: 11941 - DNA, 261 bp, Homo sapiens; identical to SEQ ID NO: 5655
  misc_feature 64, 66, 141, 149, 151, 178, 184, 206, 212, 222, 237, 238,240: n = A,T,C or G

SEQ ID NO: 11942 - DNA, 118 bp, Homo sapiens; identical to SEQ ID NO: 5656

SEQ ID NO: 11943 - DNA, 398 bp, Homo sapiens; identical to SEQ ID NO: 5657

SEQ ID NO: 11944 - DNA, 215 bp, Homo sapiens; identical to SEQ ID NO: 5658
  misc_feature 19, 30, 55, 82, 83, 84, 86, 87, 124, 174: n = A,T,C or G

SEQ ID NO: 11945 - DNA, 352 bp, Homo sapiens; identical to SEQ ID NO: 5659
  misc_feature 249, 250, 277, 282, 300, 315, 326: n = A,T,C or G

SEQ ID NO: 11946 - DNA, 659 bp, Homo sapiens; identical to SEQ ID NO: 5660

SEQ ID NO: 11947 - DNA, 326 bp, Homo sapiens; identical to SEQ ID NO: 5661

SEQ ID NO: 11948 - DNA, 497 bp, Homo sapiens; identical to SEQ ID NO: 5663
  misc_feature 405, 411, 412, 414, 415, 417, 418, 419, 423, 427, 428, 429,450, 474: n = A,T,C or G

SEQ ID NO: 11949 - DNA, 848 bp, Homo sapiens; identical to SEQ ID NO: 5664
  misc_feature 284, 376, 418, 545, 551, 557, 591, 606, 620, 633, 641, 645,657, 658, 668, 677, 684, 696, 697, 710, 713, 716, 727, 731,732, 738, 739, 740, 744, 749, 763, 765, 785, 787, 792, 803,804, 808, 821, 822, 830, 832: n = A,T,C or G

SEQ ID NO: 11950 - DNA, 718 bp, Homo sapiens; identical to SEQ ID NO: 5665

SEQ ID NO: 11951 - DNA, 465 bp, Homo sapiens; identical to SEQ ID NO: 5666
  misc_feature 250, 270, 399, 410, 438: n = A,T,C or G

SEQ ID NO: 11952 - DNA, 404 bp, Homo sapiens; identical to SEQ ID NO: 5667
  misc_feature 175, 200, 290: n = A,T,C or G

SEQ ID NO: 11953 - DNA, 313 bp, Homo sapiens; identical to SEQ ID NO: 5668

SEQ ID NO: 11954 - DNA, 295 bp, Homo sapiens; identical to SEQ ID NO: 5669
  misc_feature 52, 73, 136, 159, 170, 261: n = A,T,C or G

SEQ ID NO: 11955 - DNA, 486 bp, Homo sapiens; identical to SEQ ID NO: 5670

SEQ ID NO: 11956 - DNA, 548 bp, Homo sapiens; identical to SEQ ID NO: 5671
  misc_feature 43, 44, 45, 46, 91, 136, 166, 301, 325, 331, 380, 403, 411,415, 431, 441, 446, 450, 485, 505, 512, 527: n = A,T,C or G

SEQ ID NO: 11957 - DNA, 269 bp, Homo sapiens; identical to SEQ ID NO: 5672
  misc_feature 98, 100, 101, 102, 105, 131, 132, 145, 146, 149, 160, 171,172, 173, 174, 175, 176, 178, 181, 186, 190, 191, 192, 203,207, 212, 213, 214, 222, 225, 226, 236, 239, 246, 247, 249,255: n = A,T,C or G

SEQ ID NO: 11958 - DNA, 616 bp, Homo sapiens; identical to SEQ ID NO: 5673
  misc_feature 542: n = A,T,C or G

SEQ ID NO: 11959 - DNA, 628 bp, Homo sapiens; identical to SEQ ID NO: 5674
  misc_feature 66, 267, 332, 336, 345, 373, 380, 411, 425, 447, 500, 524,559, 560, 589: n = A,T,C or G

SEQ ID NO: 11960 - DNA, 643 bp, Homo sapiens; identical to SEQ ID NO: 5676
  misc_feature 111, 216, 265, 314, 405, 420, 477, 482, 496, 547, 563, 589,600: n = A,T,C or G

SEQ ID NO: 11961 - DNA, 298 bp, Homo sapiens; identical to SEQ ID NO: 5677

SEQ ID NO: 11962 - DNA, 339 bp, Homo sapiens; identical to SEQ ID NO: 5678
  misc_feature 76, 135, 136, 137, 138, 141, 142, 160, 218, 219, 220, 221,222, 223, 224, 225, 226, 227, 228, 229, 230, 231, 232, 233,234, 235, 236, 237, 238, 239, 240, 241, 242, 243, 244, 245,246, 247, 248, 249, 267, 286, 300, 309, 317: n = A,T,C or G

SEQ ID NO: 11963 - DNA, 283 bp, Homo sapiens; identical to SEQ ID NO: 5679

SEQ ID NO: 11964 - DNA, 390 bp, Homo sapiens; identical to SEQ ID NO: 5680

SEQ ID NO: 11965 - DNA, 488 bp, Homo sapiens; identical to SEQ ID NO: 5681
  misc_feature 293, 432, 448: n = A,T,C or G

SEQ ID NO: 11966 - DNA, 487 bp, Homo sapiens; identical to SEQ ID NO: 5682
  misc_feature 83, 111, 122, 128, 137, 145, 146, 147, 155, 163, 165, 171,173, 176, 177, 178, 179, 180, 182, 187, 189, 193, 194, 195,219, 221, 223, 234, 240, 241, 242, 245, 258, 259, 266, 268,269, 279, 289, 290, 294, 298, 304, 306, 308, 317, 319: n = A,T,C or G
  misc_feature 320, 322, 326, 328, 332, 333, 335, 339, 347, 357, 364, 375,377, 378, 379, 381, 385, 388, 398, 415, 416, 421, 425, 427,429, 434, 435, 436, 444, 454, 455, 467, 469, 476: n = A,T,C or G

SEQ ID NO: 11967 - DNA, 549 bp, Homo sapiens; identical to SEQ ID NO: 5683

SEQ ID NO: 11968 - DNA, 317 bp, Homo sapiens; identical to SEQ ID NO: 5684
  misc_feature 79, 243: n = A,T,C or G

SEQ ID NO: 11969 - DNA, 346 bp, Homo sapiens; identical to SEQ ID NO: 5685
  misc_feature 276, 312, 325: n = A,T,C or G

SEQ ID NO: 11970 - DNA, 624 bp, Homo sapiens; identical to SEQ ID NO: 5686
  misc_feature 57, 84, 119, 136, 179, 181, 193, 251, 253, 255, 311, 318,334, 462, 464, 477, 488, 500, 523, 524, 528, 529, 585, 590,591, 597, 607: n = A,T,C or G

SEQ ID NO: 11971 - DNA, 424 bp, Homo sapiens; identical to SEQ ID NO: 5687
  misc_feature 31, 32, 43, 50, 66, 103: n = A,T,C or G

SEQ ID NO: 11972 - DNA, 537 bp, Homo sapiens; identical to SEQ ID NO: 5688
  misc_feature 484: n = A,T,C or G

SEQ ID NO: 11973 - DNA, 552 bp, Homo sapiens; identical to SEQ ID NO: 5689
  misc_feature 14, 15, 42, 109, 372, 384, 447, 495, 520: n = A,T,C or G

SEQ ID NO: 11974 - DNA, 548 bp, Homo sapiens; identical to SEQ ID NO: 5690
  misc_feature 327, 388, 513: n = A,T,C or G

SEQ ID NO: 11975 - DNA, 252 bp, Homo sapiens; identical to SEQ ID NO: 5691
  misc_feature 25, 76, 139, 146, 178, 202, 205, 218, 227, 234, 239, 242: n = A,T,C or G

SEQ ID NO: 11976 - DNA, 488 bp, Homo sapiens; identical to SEQ ID NO: 5692

SEQ ID NO: 11977 - DNA, 333 bp, Homo sapiens; identical to SEQ ID NO: 5693
  misc_feature 187, 225, 240: n = A,T,C or G

SEQ ID NO: 11978 - DNA, 551 bp, Homo sapiens; identical to SEQ ID NO: 5694
  misc_feature 53, 118, 120, 122, 123, 124, 128, 131, 134, 138, 140, 141,150, 151, 158, 159, 161, 162, 163, 166, 169, 178, 184, 193,199, 206, 207, 208, 213, 218, 219, 222, 227, 230, 249, 254,256, 262, 266, 267, 268, 274, 279, 284, 285, 289, 290: n = A,T,C or G
  misc_feature 295, 303, 309, 315, 324, 339, 341, 342, 344, 345, 346, 352,353, 355, 377, 380, 381, 394, 405, 408, 425, 426, 436, 441,443, 447, 449, 455, 456, 461, 474, 475, 476, 477, 478, 480,489, 490, 492, 493, 495, 496, 500, 511, 512, 513, 524: n = A,T,C or G
  misc_feature 525, 536, 551: n = A,T,C or G

SEQ ID NO: 11979 - DNA, 731 bp, Homo sapiens; identical to SEQ ID NO: 5695
  misc_feature 105, 272, 340, 350, 458, 468, 483, 487, 514, 519, 534, 552,587, 601, 608, 609, 614, 622, 642, 664, 677, 678, 689, 698,711: n = A,T,C or G

SEQ ID NO: 11980 - DNA, 522 bp, Homo sapiens; identical to SEQ ID NO: 5696
  misc_feature 33, 34, 35, 40, 42, 48, 49, 50, 52, 54, 56, 72, 73, 126,168, 195, 223, 349, 366, 504: n = A,T,C or G

SEQ ID NO: 11981 - DNA, 389 bp, Homo sapiens; identical to SEQ ID NO: 5697
  misc_feature 268: n = A,T,C or G

SEQ ID NO: 11982 - DNA, 155 bp, Homo sapiens; identical to SEQ ID NO: 5698
  misc_feature 32, 92, 100, 103, 136: n = A,T,C or G

SEQ ID NO: 11983 - DNA, 767 bp, Homo sapiens; identical to SEQ ID NO: 5699
  misc_feature 7, 18, 20, 22, 24, 25, 31, 35, 36, 39, 41, 50, 51, 52, 53,54, 56, 58, 67, 69, 72, 73, 74, 76, 78, 80, 85, 86, 87,91, 111, 120, 133, 134, 138, 164, 165, 166, 167, 168, 172,185, 199, 201, 206, 208, 486, 503, 553, 589, 612, 615, 623: n = A,T,C or G
  misc_feature 627, 633, 642, 644, 657, 658, 688, 713, 717, 729, 735: n = A,T,C or G

SEQ ID NO: 11984 - DNA, 503 bp, Homo sapiens; identical to SEQ ID NO: 5700
  misc_feature 414, 444, 449, 453, 478: n = A,T,C or G

SEQ ID NO: 11985 - DNA, 192 bp, Homo sapiens; identical to SEQ ID NO: 5701
  misc_feature 32, 131, 136: n = A,T,C or G

SEQ ID NO: 11986 - DNA, 515 bp, Homo sapiens; identical to SEQ ID NO: 5702
  misc_feature 80, 314: n = A,T,C or G

SEQ ID NO: 11987 - DNA, 599 bp, Homo sapiens; identical to SEQ ID NO: 5703

SEQ ID NO: 11988 - DNA, 447 bp, Homo sapiens; identical to SEQ ID NO: 5704
  misc_feature 386: n = A,T,C or G

SEQ ID NO: 11989 - DNA, 334 bp, Homo sapiens; identical to SEQ ID NO: 5705
  misc_feature 11, 63, 101, 125, 131, 132, 166: n = A,T,C or G

SEQ ID NO: 11990 - DNA, 381 bp, Homo sapiens; identical to SEQ ID NO: 5706
  misc_feature 36, 317, 332: n = A,T,C or G

SEQ ID NO: 11991 - DNA, 368 bp, Homo sapiens; identical to SEQ ID NO: 5707
  misc_feature 135, 181, 287, 300, 301, 336, 357: n = A,T,C or G

SEQ ID NO: 11992 - DNA, 265 bp, Homo sapiens; identical to SEQ ID NO: 5708

SEQ ID NO: 11993 - DNA, 392 bp, Homo sapiens; identical to SEQ ID NO: 5709

SEQ ID NO: 11994 - DNA, 460 bp, Homo sapiens; identical to SEQ ID NO: 5710
  misc_feature 27, 37, 42, 45, 46, 48, 49, 50, 54, 55, 56, 65, 67, 68, 69,75, 85, 93, 148, 159, 185, 190, 198, 201, 227, 260, 290,310, 311, 333, 356, 385, 390, 437, 449, 458: n = A,T,C or G

SEQ ID NO: 11995 - DNA, 282 bp, Homo sapiens; identical to SEQ ID NO: 5711
  misc_feature 96, 119, 135, 142, 145, 160, 164, 173, 193, 211, 259: n = A,T,C or G

SEQ ID NO: 11996 - DNA, 540 bp, Homo sapiens; identical to SEQ ID NO: 5712
  misc_feature 420, 422, 426, 437, 443, 465, 467, 476: n = A,T,C or G

SEQ ID NO: 11997 - DNA, 436 bp, Homo sapiens; identical to SEQ ID NO: 5713

SEQ ID NO: 11998 - DNA, 443 bp, Homo sapiens; identical to SEQ ID NO: 5714
  misc_feature 424: n = A,T,C or G

SEQ ID NO: 11999 - DNA, 636 bp, Homo sapiens; identical to SEQ ID NO: 5715
  misc_feature 270, 433, 451, 514, 560, 623: n = A,T,C or G

SEQ ID NO: 12000 - DNA, 556 bp, Homo sapiens; identical to SEQ ID NO: 5716
  misc_feature 224, 225, 334, 401, 481, 482, 494, 515, 541, 545, 555: n = A,T,C or G

SEQ ID NO: 12001 - DNA, 336 bp, Homo sapiens; identical to SEQ ID NO: 5717

SEQ ID NO: 12002 - DNA, 382 bp, Homo sapiens; identical to SEQ ID NO: 5718

SEQ ID NO: 12003 - DNA, 570 bp, Homo sapiens; identical to SEQ ID NO: 5719
  misc_feature 127, 152, 154, 157, 158, 160, 161, 173, 174, 175, 180, 182,186, 195, 200, 201, 203, 207, 208, 211, 214, 218, 241, 243,245, 247, 252, 253, 269, 277, 291, 293, 294, 298, 317, 318,332, 345, 352, 392, 396, 399, 408, 411, 414, 430, 437: n = A,T,C or G
  misc_feature 441, 443, 451, 467, 481, 492, 493, 494, 498, 508, 509, 533,534, 535, 536, 542, 558: n = A,T,C or G

SEQ ID NO: 12004 - DNA, 535 bp, Homo sapiens; identical to SEQ ID NO: 5720
  misc_feature 362, 398: n = A,T,C or G

SEQ ID NO: 12005 - DNA, 299 bp, Homo sapiens; identical to SEQ ID NO: 5721
  misc_feature 136, 137, 147, 149, 158, 159, 172, 182, 185, 187, 210, 215,229, 231, 254, 257, 272, 273, 285: n = A,T,C or G

SEQ ID NO: 12006 - DNA, 685 bp, Homo sapiens; identical to SEQ ID NO: 5722
  misc_feature 221, 287, 359, 389, 501, 510, 517, 525, 527, 534, 562, 564,570, 585, 608, 610, 649, 655, 669, 672: n = A,T,C or G

SEQ ID NO: 12007 - DNA, 261 bp, Homo sapiens; identical to SEQ ID NO: 5723
  misc_feature 40, 44, 64, 68, 91, 102, 122, 123, 129, 143, 144, 145, 147,149, 150, 161, 165, 176, 194, 199, 201, 204, 212, 218, 219,225, 230, 239, 245, 249: n = A,T,C or G

SEQ ID NO: 12008 - DNA, 263 bp, Homo sapiens; identical to SEQ ID NO: 5724

SEQ ID NO: 12009 - DNA, 516 bp, Homo sapiens; identical to SEQ ID NO: 5725

SEQ ID NO: 12010 - DNA, 666 bp, Homo sapiens; identical to SEQ ID NO: 5726
  misc_feature 32, 51, 52, 442, 488, 490, 501, 512, 530, 549, 612: n = A,T,C or G

SEQ ID NO: 12011 - DNA, 277 bp, Homo sapiens; identical to SEQ ID NO: 5727
  misc_feature 39, 45, 47, 55, 62, 76, 87, 90, 92, 93, 95, 113, 161: n = A,T,C or G

SEQ ID NO: 12012 - DNA, 677 bp, Homo sapiens; identical to SEQ ID NO: 5728
  misc_feature 55, 111, 128, 129, 132, 136, 143, 152, 153, 157, 158, 159,160, 162, 163, 169, 170, 171, 176, 177, 178, 179, 181, 182,187, 192, 193, 199, 200, 202, 203, 208, 209, 210, 215, 216,218, 228, 230, 232, 233, 235, 243, 244, 245, 246, 249: n = A,T,C or G
  misc_feature 250, 254, 255, 264, 267, 268, 280, 281, 282, 283, 290, 293,297, 301, 305, 317, 318, 320, 321, 325, 329, 332, 335, 336,348, 354, 357, 367, 372, 376, 383, 393, 396, 416, 420, 436,446, 449, 459, 484, 486, 489, 494, 504, 507, 512, 521: n = A,T,C or G
  misc_feature 525, 530, 531, 532, 533, 536, 537, 557, 566, 580, 583, 592,597, 617, 638, 641, 644, 645, 659, 676: n = A,T,C or G

SEQ ID NO: 12013 - DNA, 729 bp, Homo sapiens; identical to SEQ ID NO: 5729
  misc_feature 458, 470, 480, 497, 529, 540, 564, 598, 624, 630, 645, 652,692: n = A,T,C or G

SEQ ID NO: 12014 - DNA, 373 bp, Homo sapiens; identical to SEQ ID NO: 5730
  misc_feature 125, 133, 135, 137, 138, 149, 213, 218, 220, 244, 284, 327,352, 363: n = A,T,C or G

SEQ ID NO: 12015 - DNA, 521 bp, Homo sapiens; identical to SEQ ID NO: 5732

SEQ ID NO: 12016 - DNA, 803 bp, Homo sapiens; identical to SEQ ID NO: 5733
  misc_feature 470, 569, 621, 649, 663, 665, 680, 699, 706, 723, 726, 733,749, 770, 781: n = A,T,C or G

SEQ ID NO: 12017 - DNA, 140 bp, Homo sapiens; identical to SEQ ID NO: 5734
  misc_feature 17, 109: n = A,T,C or G

SEQ ID NO: 12018 - DNA, 499 bp, Homo sapiens; identical to SEQ ID NO: 5735
  misc_feature 182, 252, 254, 285, 344, 354, 407, 421, 446: n = A,T,C or G

SEQ ID NO: 12019 - DNA, 606 bp, Homo sapiens; identical to SEQ ID NO: 5736
  misc_feature 533, 572, 575: n = A,T,C or G

SEQ ID NO: 12020 - DNA, 461 bp, Homo sapiens; identical to SEQ ID NO: 5737
  misc_feature 90, 138, 152, 154, 166, 167, 186, 193, 208, 212, 214, 226,243, 246, 266, 272, 285, 299, 306, 312, 315, 319, 327, 345,351, 353, 355, 367, 369, 371, 393, 401, 416, 417, 422, 423,434, 446, 452: n = A,T,C or G

SEQ ID NO: 12021 - DNA, 471 bp, Homo sapiens; identical to SEQ ID NO: 5738
  misc_feature 72, 75, 101, 127, 129, 134, 144, 169, 170, 171, 204, 205,207, 209, 213, 258, 262, 275, 290, 292, 298, 306, 312, 327,354, 361, 374, 378, 389, 396, 400, 409, 414, 417, 423, 437,438, 445, 447, 452, 456, 464, 466, 468: n = A,T,C or G

SEQ ID NO: 12022 - DNA, 803 bp, Homo sapiens; identical to SEQ ID NO: 5739
  misc_feature 191, 387, 410, 412, 420, 431, 448, 457, 460, 461, 479, 500,532, 547, 549, 561, 599, 600, 602, 612, 650, 681, 688, 693,694, 712, 715, 722, 724, 750, 757, 758, 767, 768, 770, 784,795: n = A,T,C or G

SEQ ID NO: 12023 - DNA, 782 bp, Homo sapiens; identical to SEQ ID NO: 5740
  misc_feature 452, 488, 495, 515, 520, 524, 532, 547, 557, 558, 559, 560,565, 569, 570, 574, 598, 621, 624, 628, 631, 634, 639, 655,656, 658, 672, 705, 717, 728, 733, 735, 737, 742, 745, 749,750, 754, 755, 757, 760, 765, 767, 768, 771, 779: n = A,T,C or G

SEQ ID NO: 12024 - DNA, 408 bp, Homo sapiens; identical to SEQ ID NO: 5741
  misc_feature 123, 127, 129, 131, 132, 135, 143, 152, 155, 303, 361, 369,376, 377: n = A,T,C or G

SEQ ID NO: 12025 - DNA, 560 bp, Homo sapiens; identical to SEQ ID NO: 5742
  misc_feature 184, 419, 543: n = A,T,C or G

SEQ ID NO: 12026 - DNA, 617 bp, Homo sapiens; identical to SEQ ID NO: 5743
  misc_feature 246, 457, 460, 476, 559: n = A,T,C or G

SEQ ID NO: 12027 - DNA, 326 bp, Homo sapiens; identical to SEQ ID NO: 5744
  misc_feature 88, 258, 263, 280, 297, 301, 318, 320: n = A,T,C or G

SEQ ID NO: 12028 - DNA, 420 bp, Homo sapiens; identical to SEQ ID NO: 5745
  misc_feature 329: n = A,T,C or G

SEQ ID NO: 12029 - DNA, 441 bp, Homo sapiens; identical to SEQ ID NO: 5746
  misc_feature 54: n = A,T,C or G

SEQ ID NO: 12030 - DNA, 624 bp, Homo sapiens; identical to SEQ ID NO: 5747
  misc_feature 115, 141, 146, 226, 317, 405, 411, 509, 552, 576, 581, 587,591, 601, 604, 609, 610: n = A,T,C or G

SEQ ID NO: 12031 - DNA, 450 bp, Homo sapiens; identical to SEQ ID NO: 5748
  misc_feature 292: n = A,T,C or G

SEQ ID NO: 12032 - DNA, 318 bp, Homo sapiens; identical to SEQ ID NO: 5749
  misc_feature 147, 297, 314: n = A,T,C or G

SEQ ID NO: 12033 - DNA, 786 bp, Homo sapiens; identical to SEQ ID NO: 5750
  misc_feature 23, 71, 229, 273, 314, 324, 420, 432, 451, 475, 489, 502,506, 529, 533, 536, 539, 542, 544, 548, 556, 559, 562, 563,567, 568, 579, 582, 591, 593, 599, 601, 604, 607, 614, 623,624, 629, 633, 646, 653, 661, 666, 668, 672, 673, 678: n = A,T,C or G
  misc_feature 681, 688, 693, 702, 709, 712, 723, 730, 733, 734, 735, 736,737, 742, 744, 745, 746, 747, 751, 752, 754, 758, 762, 765,766, 768, 776, 785: n = A,T,C or G

SEQ ID NO: 12034 - DNA, 752 bp, Homo sapiens; identical to SEQ ID NO: 5751
  misc_feature 301, 368, 371, 400, 594, 601, 614, 630, 633, 678, 700, 709,726, 737: n = A,T,C or G

SEQ ID NO: 12035 - DNA, 519 bp, Homo sapiens; identical to SEQ ID NO: 5752

SEQ ID NO: 12036 - DNA, 350 bp, Homo sapiens; identical to SEQ ID NO: 5753
  misc_feature 137, 145, 146, 148, 152, 156, 157, 158, 159, 166, 172, 178,180, 182, 189, 190, 194, 202, 203, 204, 206, 209, 211, 216,220, 221, 224, 226, 240, 252, 256, 265, 269, 271, 280, 281,285, 286, 287, 288, 299, 300, 303, 319, 321, 327, 329: n = A,T,C or G
  misc_feature 331, 332, 333, 334: n = A,T,C or G

SEQ ID NO: 12037 - DNA, 324 bp, Homo sapiens; identical to SEQ ID NO: 5754
  misc_feature 97, 238, 292, 320: n = A,T,C or G

SEQ ID NO: 12038 - DNA, 211 bp, Homo sapiens; identical to SEQ ID NO: 5755
  misc_feature 23, 54, 66, 82, 90, 103, 107, 129, 143, 147, 149, 150, 157,159, 166, 167: n = A,T,C or G

SEQ ID NO: 12039 - DNA, 803 bp, Homo sapiens; identical to SEQ ID NO: 5756
  misc_feature 25, 134, 232, 388, 462, 506, 538, 542, 577, 637, 640, 647,653, 697, 706, 710, 712, 724, 753, 783: n = A,T,C or G

SEQ ID NO: 12040 - DNA, 462 bp, Homo sapiens; identical to SEQ ID NO: 5757
  misc_feature 127, 152, 197, 237, 238, 330, 357, 365, 367, 424: n = A,T,C or G

SEQ ID NO: 12041 - DNA, 671 bp, Homo sapiens; identical to SEQ ID NO: 5758
  misc_feature 269, 272, 290, 339, 399, 411, 431, 505, 510, 601, 629, 633,636, 645, 650, 651: n = A,T,C or G

SEQ ID NO: 12042 - DNA, 808 bp, Homo sapiens; identical to SEQ ID NO: 5759
  misc_feature 330, 361, 362, 404, 412, 454, 483, 486, 493, 508, 519, 550,553, 583, 584, 587, 606, 608, 612, 622, 626, 630, 631, 648,661, 670, 673, 684, 700, 706, 709, 712, 718, 786: n = A,T,C or G

SEQ ID NO: 12043 - DNA, 570 bp, Homo sapiens; identical to SEQ ID NO: 5760
  misc_feature 53, 55, 285, 352, 403, 466, 480, 512, 516, 521, 533, 549,552, 566: n = A,T,C or G

SEQ ID NO: 12044 - DNA, 482 bp, Homo sapiens; identical to SEQ ID NO: 5761
  misc_feature 408, 425, 449, 460, 468: n = A,T,C or G

SEQ ID NO: 12045 - DNA, 598 bp, Homo sapiens; identical to SEQ ID NO: 5762
  misc_feature 135, 136, 147, 153, 193, 204, 206, 221, 259, 261, 282, 299,303, 312, 326, 342, 351, 352, 360, 377, 379, 381, 386, 391,397, 411, 413, 447, 449, 454, 458, 464, 474, 494, 496, 511,532, 560, 595: n = A,T,C or G

SEQ ID NO: 12046 - DNA, 231 bp, Homo sapiens; identical to SEQ ID NO: 5763
  misc_feature 86, 90, 91, 169, 176, 184: n = A,T,C or G

SEQ ID NO: 12047 - DNA, 719 bp, Homo sapiens; identical to SEQ ID NO: 5764
  misc_feature 23, 157, 206, 293, 471, 474, 500, 511, 538, 579, 610, 611,613, 624, 628, 657, 663, 692, 696, 703, 705, 708, 713: n = A,T,C or G

SEQ ID NO: 12048 - DNA, 478 bp, Homo sapiens; identical to SEQ ID NO: 5765
  misc_feature 321, 376, 396, 469: n = A,T,C or G

SEQ ID NO: 12049 - DNA, 337 bp, Homo sapiens; identical to SEQ ID NO: 5766

SEQ ID NO: 12050 - DNA, 417 bp, Homo sapiens; identical to SEQ ID NO: 5767
  misc_feature 299, 311, 374, 386, 397: n = A,T,C or G

SEQ ID NO: 12051 - DNA, 329 bp, Homo sapiens; identical to SEQ ID NO: 5768
  misc_feature 28, 140, 171, 187, 218, 237, 250, 271, 275, 277, 296, 305,309: n = A,T,C or G

SEQ ID NO: 12052 - DNA, 559 bp, Homo sapiens; identical to SEQ ID NO: 5769
  misc_feature 514: n = A,T,C or G

SEQ ID NO: 12053 - DNA, 208 bp, Homo sapiens; identical to SEQ ID NO: 5770
  misc_feature 46, 110, 135, 138, 142, 148, 176, 189, 190, 192, 194: n = A,T,C or G

SEQ ID NO: 12054 - DNA, 327 bp, Homo sapiens; identical to SEQ ID NO: 5771

SEQ ID NO: 12055 - DNA, 246 bp, Homo sapiens; identical to SEQ ID NO: 5772
  misc_feature 51, 61, 112, 124, 144, 147, 185, 222: n = A,T,C or G

SEQ ID NO: 12056 - DNA, 333 bp, Homo sapiens; identical to SEQ ID NO: 5773

SEQ ID NO: 12057 - DNA, 568 bp, Homo sapiens; identical to SEQ ID NO: 5774
  misc_feature 227, 274, 350, 387, 448, 449, 454, 461, 472, 486, 499, 525,529, 533, 535, 545: n = A,T,C or G

SEQ ID NO: 12058 - DNA, 326 bp, Homo sapiens; identical to SEQ ID NO: 5775

SEQ ID NO: 12059 - DNA, 406 bp, Homo sapiens; identical to SEQ ID NO: 5776
  misc_feature 108, 126, 138, 145, 192, 203, 210, 231, 232, 234, 235, 242,261, 269, 276, 372: n = A,T,C or G

SEQ ID NO: 12060 - DNA, 381 bp, Homo sapiens; identical to SEQ ID NO: 5777

SEQ ID NO: 12061 - DNA, 545 bp, Homo sapiens; identical to SEQ ID NO: 5778
  misc_feature 469, 495, 505, 520: n = A,T,C or G

SEQ ID NO: 12062 - DNA, 678 bp, Homo sapiens; identical to SEQ ID NO: 5779
  misc_feature 317, 321, 323, 432, 453, 511, 562, 579, 582, 605, 643, 664: n = A,T,C or G

SEQ ID NO: 12063 - DNA, 468 bp, Homo sapiens; identical to SEQ ID NO: 5780
  misc_feature 221, 285, 316, 323, 400, 411: n = A,T,C or G

SEQ ID NO: 12064 - DNA, 145 bp, Homo sapiens; identical to SEQ ID NO: 5781
  misc_feature 108: n = A,T,C or G

SEQ ID NO: 12065 - DNA, 613 bp, Homo sapiens; identical to SEQ ID NO: 5782
  misc_feature 377, 497, 514, 521, 550, 557, 562, 575, 587, 594, 601, 613: n = A,T,C or G

SEQ ID NO: 12066 - DNA, 333 bp, Homo sapiens; identical to SEQ ID NO: 5783
  misc_feature 29, 31, 62, 211, 218, 231: n = A,T,C or G

SEQ ID NO: 12067 - DNA, 490 bp, Homo sapiens; identical to SEQ ID NO: 5784
  misc_feature 461, 470: n = A,T,C or G

SEQ ID NO: 12068 - DNA, 514 bp, Homo sapiens; identical to SEQ ID NO: 5785
  misc_feature 502: n = A,T,C or G

SEQ ID NO: 12069 - DNA, 618 bp, Homo sapiens; identical to SEQ ID NO: 5786
  misc_feature 294, 352, 374, 395, 420, 471, 490, 555, 557, 565, 566, 601: n = A,T,C or G

SEQ ID NO: 12070 - DNA, 300 bp, Homo sapiens; identical to SEQ ID NO: 5787

SEQ ID NO: 12071 - DNA, 622 bp, Homo sapiens; identical to SEQ ID NO: 5788
  misc_feature 489, 552, 560, 562, 586, 589, 599, 620: n = A,T,C or G

SEQ ID NO: 12072 - DNA, 506 bp, Homo sapiens; identical to SEQ ID NO: 5789
  misc_feature 425: n = A,T,C or G

SEQ ID NO: 12073 - DNA, 378 bp, Homo sapiens; identical to SEQ ID NO: 5790
  misc_feature 33, 57, 101, 102, 105, 106, 107, 108, 109, 110, 134, 135,136, 142, 143, 145, 157, 169, 170, 171, 178, 180, 181, 185,186, 191, 193, 197, 205, 210, 212, 215, 218, 226, 227, 228,229, 237, 241, 246, 252, 255, 257, 267, 275, 279, 281: n = A,T,C or G
  misc_feature 283, 300, 302, 306, 309, 310, 311, 312, 313, 318, 321, 345,347, 359, 360, 362, 364, 371, 372: n = A,T,C or G

SEQ ID NO: 12074 - DNA, 501 bp, Homo sapiens; identical to SEQ ID NO: 5791
  misc_feature 426: n = A,T,C or G

SEQ ID NO: 12075 - DNA, 406 bp, Homo sapiens; identical to SEQ ID NO: 5792
  misc_feature 349, 369, 392, 398: n = A,T,C or G

SEQ ID NO: 12076 - DNA, 594 bp, Homo sapiens; identical to SEQ ID NO: 5793
  misc_feature 380, 384, 503, 511, 521, 552, 571: n = A,T,C or G

SEQ ID NO: 12077 - DNA, 231 bp, Homo sapiens; identical to SEQ ID NO: 5794
  misc_feature 24, 34, 37, 51, 54, 62, 63, 64, 72, 81, 82, 85, 88, 92, 121: n = A,T,C or G

SEQ ID NO: 12078 - DNA, 740 bp, Homo sapiens; identical to SEQ ID NO: 5795
  misc_feature 484, 488, 499, 502, 534, 549, 551, 561, 574, 594, 600, 605,618, 626, 639, 641, 647, 654, 657, 658, 664, 665, 666, 675,680, 682, 688, 689, 693, 696, 697, 705, 707: n = A,T,C or G

SEQ ID NO: 12079 - DNA, 551 bp, Homo sapiens; identical to SEQ ID NO: 5796
  misc_feature 522: n = A,T,C or G

SEQ ID NO: 12080 - DNA, 453 bp, Homo sapiens; identical to SEQ ID NO: 5797
  misc_feature 121, 122, 131, 143, 146, 147, 149, 152, 156, 157, 161, 164,165, 169, 170, 178, 195, 202, 205, 206, 209, 211, 212, 215,230, 233, 236, 239, 244, 248, 249, 252, 253, 256, 257, 258,265, 273, 275, 280, 290, 292, 294, 295, 309, 311, 325: n = A,T,C or G
  misc_feature 330, 332, 333, 334, 335, 336, 337, 343, 348, 350, 351, 352,357, 359, 360, 361, 377, 381, 392, 397, 401, 406, 408, 409,412, 417, 418, 422, 423, 426, 429, 430: n = A,T,C or G

SEQ ID NO: 12081 - DNA, 228 bp, Homo sapiens; identical to SEQ ID NO: 5798
  misc_feature 9, 119, 154, 162, 170, 172, 174, 175, 179, 197, 200, 216: n = A,T,C or G

SEQ ID NO: 12082 - DNA, 325 bp, Homo sapiens; identical to SEQ ID NO: 5799
  misc_feature 79, 129, 140, 144, 148, 161, 170, 199, 254, 282: n = A,T,C or G

SEQ ID NO: 12083 - DNA, 103 bp, Homo sapiens; identical to SEQ ID NO: 5800
  misc_feature 30, 32, 36: n = A,T,C or G

SEQ ID NO: 12084 - DNA, 569 bp, Homo sapiens; identical to SEQ ID NO: 5801
  misc_feature 474, 501, 558: n = A,T,C or G

SEQ ID NO: 12085 - DNA, 128 bp, Homo sapiens; identical to SEQ ID NO: 5802

SEQ ID NO: 12086 - DNA, 397 bp, Homo sapiens; identical to SEQ ID NO: 5803

SEQ ID NO: 12087 - DNA, 362 bp, Homo sapiens; identical to SEQ ID NO: 5804
  misc_feature 275, 300, 325: n = A,T,C or G

SEQ ID NO: 12088 - DNA, 195 bp, Homo sapiens; identical to SEQ ID NO: 5805
  misc_feature 30, 34, 36, 39, 41, 44, 45, 47, 48, 49, 51, 59, 73, 78, 80,84, 88, 91, 120, 146, 167, 168, 172, 173, 176: n = A,T,C or G

SEQ ID NO: 12089 - DNA, 495 bp, Homo sapiens; identical to SEQ ID NO: 5806
  misc_feature 27, 39, 300, 303, 306, 315, 334, 393, 397, 416, 433: n = A,T,C or G

SEQ ID NO: 12090 - DNA, 570 bp, Homo sapiens; identical to SEQ ID NO: 5807
  misc_feature 112, 122, 126, 128, 136, 144, 148, 152, 161, 163, 165, 169,173, 179, 211, 225, 253, 258, 263, 265, 267, 279, 280, 288,290, 299, 301, 303, 317, 321, 325, 336, 342, 348, 349, 356,361, 364, 365, 374, 389, 391, 397, 412, 417, 423, 424: n = A,T,C or G
  misc_feature 427, 443, 455, 483, 489, 493, 504, 514, 530, 537, 548, 552,553, 555, 557, 561: n = A,T,C or G

SEQ ID NO: 12091 - DNA, 289 bp, Homo sapiens; identical to SEQ ID NO: 5808

SEQ ID NO: 12092 - DNA, 724 bp, Homo sapiens; identical to SEQ ID NO: 5809
  misc_feature 611, 627, 629, 649, 663, 691: n = A,T,C or G

SEQ ID NO: 12093 - DNA, 636 bp, Homo sapiens; identical to SEQ ID NO: 5810
  misc_feature 359, 542, 573, 601, 602, 617, 625, 626: n = A,T,C or G

SEQ ID NO: 12094 - DNA, 595 bp, Homo sapiens; identical to SEQ ID NO: 5811
  misc_feature 319, 323, 368, 379, 380, 388, 413, 432, 442, 453, 455, 458,463, 470, 477, 512, 523, 528, 530, 537, 544, 550, 551, 564,571, 572, 573, 575, 582, 583: n = A,T,C or G

SEQ ID NO: 12095 - DNA, 537 bp, Homo sapiens; identical to SEQ ID NO: 5812
  misc_feature 255, 257, 261, 262, 263, 264, 265, 266, 267, 268, 269, 270,271, 272, 276, 278, 280, 281, 282, 283, 284, 285, 287, 288,289, 290, 291, 294, 295, 301, 337, 357, 403, 404, 451, 457,460, 462, 476, 477, 494, 495, 506, 517: n = A,T,C or G

SEQ ID NO: 12096 - DNA, 665 bp, Homo sapiens; identical to SEQ ID NO: 5814
  misc_feature 10, 39, 86, 99, 105, 123, 127, 170, 231, 296, 363, 388, 394,401, 403, 443, 455, 462, 511, 520, 525, 552, 574, 589, 590,598, 602, 604, 606, 617, 623, 630, 632, 634, 639, 648, 649,653, 655, 656: n = A,T,C or G

SEQ ID NO: 12097 - DNA, 249 bp, Homo sapiens; identical to SEQ ID NO: 5815
  misc_feature 102, 105, 113, 116, 121, 122, 134, 136, 145, 152, 153, 174,175, 177, 178, 180, 182, 186, 192, 199, 205, 207, 212, 219,227, 235, 237, 242: n = A,T,C or G

SEQ ID NO: 12098 - DNA, 390 bp, Homo sapiens; identical to SEQ ID NO: 5816
  misc_feature 160, 193, 246, 267, 319, 361: n = A,T,C or G

SEQ ID NO: 12099 - DNA, 251 bp, Homo sapiens; identical to SEQ ID NO: 5817

SEQ ID NO: 12100 - DNA, 305 bp, Homo sapiens; identical to SEQ ID NO: 5818
  misc_feature 60, 107, 109, 121, 136, 141, 143, 144, 145, 160, 170, 178,181, 182, 185, 201, 204, 207, 211, 212, 213, 218, 219, 227,228, 232, 242, 244, 248, 254, 256, 261, 268, 276, 288, 290,294, 302: n = A,T,C or G

SEQ ID NO: 12101 - DNA, 447 bp, Homo sapiens; identical to SEQ ID NO: 5819
  misc_feature 239, 428: n = A,T,C or G

SEQ ID NO: 12102 - DNA, 311 bp, Homo sapiens; identical to SEQ ID NO: 5820

SEQ ID NO: 12103 - DNA, 523 bp, Homo sapiens; identical to SEQ ID NO: 5821
  misc_feature 451, 501: n = A,T,C or G

SEQ ID NO: 12104 - DNA, 184 bp, Homo sapiens; identical to SEQ ID NO: 5822
  misc_feature 13, 47, 48, 49, 63, 74, 134, 157, 173: n = A,T,C or G

SEQ ID NO: 12105 - DNA, 534 bp, Homo sapiens; identical to SEQ ID NO: 5823
  misc_feature 435: n = A,T,C or G

SEQ ID NO: 12106 - DNA, 663 bp, Homo sapiens; identical to SEQ ID NO: 5824
  misc_feature 71, 73, 76, 79, 82, 394, 455, 477, 484, 502, 521, 539, 550,600, 608: n = A,T,C or G

SEQ ID NO: 12107 - DNA, 319 bp, Homo sapiens; identical to SEQ ID NO: 5825

SEQ ID NO: 12108 - DNA, 264 bp, Homo sapiens; identical to SEQ ID NO: 5826
  misc_feature 111, 114, 123, 133, 136, 137, 141, 143, 145, 147, 156, 159,160, 161, 164, 165, 168, 173, 174, 179, 180, 185, 186, 187,189, 191, 193, 194, 195, 197, 207, 209, 212, 216, 220, 227,239, 245: n = A,T,C or G

SEQ ID NO: 12109 - DNA, 106 bp, Homo sapiens; identical to SEQ ID NO: 5828
  misc_feature 39, 87: n = A,T,C or G

SEQ ID NO: 12110 - DNA, 570 bp, Homo sapiens; identical to SEQ ID NO: 5829

SEQ ID NO: 12111 - DNA, 231 bp, Homo sapiens; identical to SEQ ID NO: 5830
  misc_feature 124, 137, 219: n = A,T,C or G

SEQ ID NO: 12112 - DNA, 500 bp, Homo sapiens; identical to SEQ ID NO: 5831
  misc_feature 55, 60, 122, 129, 135, 147, 149, 154, 161, 167, 181, 182,184, 193, 194, 198, 200, 208, 209, 217, 218, 230, 239, 248,257, 258, 260, 261, 262, 263, 275, 293, 298, 305, 307, 313,314, 329, 330, 333, 334, 348, 351, 352, 356, 360, 371: n = A,T,C or G
  misc_feature 372, 377, 378, 382, 384, 388, 400, 408, 415, 417, 418, 425,432, 433, 435, 436, 439, 466, 473, 483, 486, 487, 488, 494: n = A,T,C or G

SEQ ID NO: 12113 - DNA, 336 bp, Homo sapiens; identical to SEQ ID NO: 5832
  misc_feature 19, 90, 97, 99, 116, 134: n = A,T,C or G

SEQ ID NO: 12114 - DNA, 438 bp, Homo sapiens; identical to SEQ ID NO: 5833
  misc_feature 24, 28, 63, 73, 83, 93, 99, 103, 104, 106, 107, 110, 113,344, 346: n = A,T,C or G

SEQ ID NO: 12115 - DNA, 460 bp, Homo sapiens; identical to SEQ ID NO: 5834
  misc_feature 246, 453, 459: n = A,T,C or G

SEQ ID NO: 12116 - DNA, 603 bp, Homo sapiens; identical to SEQ ID NO: 5835
  misc_feature 59, 69, 139, 204, 209, 290, 341, 413, 424, 448, 467, 522,580: n = A,T,C or G

SEQ ID NO: 12117 - DNA, 118 bp, Homo sapiens; identical to SEQ ID NO: 5836

SEQ ID NO: 12118 - DNA, 493 bp, Homo sapiens; identical to SEQ ID NO: 5837
  misc_feature 445, 446, 447, 449, 450, 451, 452, 453, 454, 455, 456, 459: n = A,T,C or G

SEQ ID NO: 12119 - DNA, 132 bp, Homo sapiens; identical to SEQ ID NO: 5838

SEQ ID NO: 12120 - DNA, 327 bp, Homo sapiens; identical to SEQ ID NO: 5839

SEQ ID NO: 12121 - DNA, 175 bp, Homo sapiens; identical to SEQ ID NO: 5840

SEQ ID NO: 12122 - DNA, 436 bp, Homo sapiens; identical to SEQ ID NO: 5841
  misc_feature 417: n = A,T,C or G

SEQ ID NO: 12123 - DNA, 356 bp, Homo sapiens; identical to SEQ ID NO: 5842
  misc_feature 102, 116, 120, 123, 140, 142, 148, 150, 169, 171, 186, 193,217, 221, 223, 231, 233, 237, 241, 252, 260, 282, 285, 299,328, 333: n = A,T,C or G

SEQ ID NO: 12124 - DNA, 155 bp, Homo sapiens; identical to SEQ ID NO: 5843
  misc_feature 82, 106, 130: n = A,T,C or G

SEQ ID NO: 12125 - DNA, 475 bp, Homo sapiens; identical to SEQ ID NO: 5844
  misc_feature 78, 138, 196, 198, 203, 264, 301, 302, 315, 336, 432, 466: n = A,T,C or G

SEQ ID NO: 12126 - DNA, 377 bp, Homo sapiens; identical to SEQ ID NO: 5845
  misc_feature 35, 63, 161, 169, 183, 194, 198, 222, 232, 234, 254, 255,261, 262, 263, 266, 269, 270, 271, 282, 288, 294, 299, 300,303, 306, 308, 309, 315, 318, 336, 349, 358, 359, 367: n = A,T,C or G

SEQ ID NO: 12127 - DNA, 810 bp, Homo sapiens; identical to SEQ ID NO: 5846
  misc_feature 163, 165, 172, 174, 185, 186, 189, 192, 199, 200, 211, 212,216, 222, 224, 229, 230, 231, 232, 233, 240, 241, 243, 266,268, 287, 291, 292, 294, 296, 299, 301, 317, 326, 330, 333,338, 339, 341, 345, 346, 354, 357, 375, 378, 388, 389: n = A,T,C or G
  misc_feature 403, 412, 430, 431, 433, 445, 447, 461, 468, 469, 470, 476,485, 497, 500, 501, 502, 507, 521, 523, 534, 535, 536, 538,544, 554, 555, 560, 569, 582, 584, 585, 600, 603, 614, 621,624, 628, 629, 634, 635, 636, 637, 641, 645, 647, 648: n = A,T,C or G
  misc_feature 649, 659, 663, 664, 689, 690, 691, 692, 696, 697, 698, 704,710, 721, 727, 728, 732, 733, 734, 736, 737, 738, 739, 746,752, 754, 767, 768, 777, 783, 784, 785, 796, 798, 800, 805: n = A,T,C or G

SEQ ID NO: 12128 - DNA, 569 bp, Homo sapiens; identical to SEQ ID NO: 5847
  misc_feature 479: n = A,T,C or G

SEQ ID NO: 12129 - DNA, 470 bp, Homo sapiens; identical to SEQ ID NO: 5848
  misc_feature 409: n = A,T,C or G

SEQ ID NO: 12130 - DNA, 678 bp, Homo sapiens; identical to SEQ ID NO: 5849
  misc_feature 23, 587, 597, 650: n = A,T,C or G

SEQ ID NO: 12131 - DNA, 643 bp, Homo sapiens; identical to SEQ ID NO: 5850
  misc_feature 619, 622, 630: n = A,T,C or G

SEQ ID NO: 12132 - DNA, 574 bp, Homo sapiens; identical to SEQ ID NO: 5851
  misc_feature 484: n = A,T,C or G

SEQ ID NO: 12133 - DNA, 539 bp, Homo sapiens; identical to SEQ ID NO: 5852
  misc_feature 74, 82, 152, 171, 177, 190, 195, 198, 207, 210, 215, 216,222, 223, 224, 228, 230, 232, 241, 242, 245, 253, 254, 273,293, 294, 296, 300, 302, 310, 312, 317, 319, 321, 325, 331,333, 335, 336, 346, 348, 352, 369, 373, 375, 383, 388: n = A,T,C or G
  misc_feature 393, 394, 403, 404, 409, 423, 425, 428, 443, 446, 447, 449,451, 455, 465, 468, 469, 472, 474, 475, 478, 481, 488, 490,491, 495, 496, 504, 513, 515, 518, 525, 526: n = A,T,C or G

SEQ ID NO: 12134 - DNA, 711 bp, Homo sapiens; identical to SEQ ID NO: 5853
  misc_feature 84, 424, 545, 574, 644, 669: n = A,T,C or G

SEQ ID NO: 12135 - DNA, 533 bp, Homo sapiens; identical to SEQ ID NO: 5854
  misc_feature 461, 502: n = A,T,C or G

SEQ ID NO: 12136 - DNA, 472 bp, Homo sapiens; identical to SEQ ID NO: 5855
  misc_feature 90, 91, 114, 116, 129, 132, 134, 136, 137, 142, 145, 146,147, 156, 179, 186, 187, 203, 214, 215, 220, 223, 225, 228,230, 231, 233, 237, 247, 249, 250, 255, 257, 258, 260, 262,271, 272, 273, 274, 279, 280, 283, 285, 302, 307, 311: n = A,T,C or G
  misc_feature 312, 315, 316, 319, 320, 322, 323, 324, 335, 347, 349, 352,362, 363, 365, 377, 378, 380, 382, 393, 394, 397, 399, 402,403, 405, 406, 407, 421, 423, 425, 427, 428, 429, 437, 438,442, 443, 448, 450, 469, 471: n = A,T,C or G

SEQ ID NO: 12137 - DNA, 462 bp, Homo sapiens; identical to SEQ ID NO: 5856

SEQ ID NO: 12138 - DNA, 364 bp, Homo sapiens; identical to SEQ ID NO: 5857
  misc_feature 127, 133, 135, 328: n = A,T,C or G

SEQ ID NO: 12139 - DNA, 618 bp, Homo sapiens; identical to SEQ ID NO: 5858
  misc_feature 553: n = A,T,C or G

SEQ ID NO: 12140 - DNA, 320 bp, Homo sapiens; identical to SEQ ID NO: 5859
  misc_feature 45: n = A,T,C or G

SEQ ID NO: 12141 - DNA, 339 bp, Homo sapiens; identical to SEQ ID NO: 5860
  misc_feature 97, 101, 104, 115, 130, 140, 175, 242, 266, 268, 276, 283,289, 295, 311, 322: n = A,T,C or G

SEQ ID NO: 12142 - DNA, 739 bp, Homo sapiens; identical to SEQ ID NO: 5861
  misc_feature 229, 535, 542, 560, 597, 650, 659, 688, 723: n = A,T,C or G

SEQ ID NO: 12143 - DNA, 576 bp, Homo sapiens; identical to SEQ ID NO: 5862
  misc_feature 426, 427, 428, 429, 430, 431, 432, 433, 434, 435, 436, 437,438, 439, 440, 441, 442, 443, 444, 445, 446, 447, 448, 449,450, 451, 452, 453, 454, 455, 456, 457, 458, 459, 460, 461,462, 463, 464, 465, 466, 467, 468, 469, 470, 471, 472: n = A,T,C or G
  misc_feature 473, 474, 475, 476, 477, 478, 479, 480, 481, 482, 483, 484,485, 486, 487, 488, 489, 490, 491, 492, 493, 494, 495, 496,497, 498, 499, 517, 520, 541, 552, 555: n = A,T,C or G

SEQ ID NO: 12144 - DNA, 744 bp, Homo sapiens; identical to SEQ ID NO: 5863
  misc_feature 579, 585, 591, 595, 597, 637, 649, 658, 715, 722: n = A,T,C or G

SEQ ID NO: 12145 - DNA, 388 bp, Homo sapiens; identical to SEQ ID NO: 5864

SEQ ID NO: 12146 - DNA, 473 bp, Homo sapiens; identical to SEQ ID NO: 5865
  misc_feature 77, 91, 299, 416: n = A,T,C or G

SEQ ID NO: 12147 - DNA, 573 bp, Homo sapiens; identical to SEQ ID NO: 5866
  misc_feature 410, 512, 520, 542, 559: n = A,T,C or G

SEQ ID NO: 12148 - DNA, 612 bp, Homo sapiens; identical to SEQ ID NO: 5867
  misc_feature 362, 411, 415, 484, 486, 554, 571: n = A,T,C or G

SEQ ID NO: 12149 - DNA, 270 bp, Homo sapiens; identical to SEQ ID NO: 5868

SEQ ID NO: 12150 - DNA, 328 bp, Homo sapiens; identical to SEQ ID NO: 5869

SEQ ID NO: 12151 - DNA, 674 bp, Homo sapiens; identical to SEQ ID NO: 5870
  misc_feature 504, 532, 558, 581, 621, 635: n = A,T,C or G

SEQ ID NO: 12152 - DNA, 272 bp, Homo sapiens; identical to SEQ ID NO: 5871
  misc_feature 117, 134, 144, 191, 272: n = A,T,C or G

SEQ ID NO: 12153 - DNA, 512 bp, Homo sapiens; identical to SEQ ID NO: 5872
  misc_feature 51, 239, 377, 456: n = A,T,C or G

SEQ ID NO: 12154 - DNA, 545 bp, Homo sapiens; identical to SEQ ID NO: 5873

SEQ ID NO: 12155 - DNA, 629 bp, Homo sapiens; identical to SEQ ID NO: 5874
  misc_feature 26, 467, 508, 574, 590, 592: n = A,T,C or G

SEQ ID NO: 12156 - DNA, 549 bp, Homo sapiens; identical to SEQ ID NO: 5875
  misc_feature 405: n = A,T,C or G

SEQ ID NO: 12157 - DNA, 345 bp, Homo sapiens; identical to SEQ ID NO: 5876
  misc_feature 129, 132, 135: n = A,T,C or G

SEQ ID NO: 12158 - DNA, 425 bp, Homo sapiens; identical to SEQ ID NO: 5877
  misc_feature 3: n = A,T,C or G

SEQ ID NO: 12159 - DNA, 607 bp, Homo sapiens; identical to SEQ ID NO: 5878
  misc_feature 469, 571, 588, 591: n = A,T,C or G

SEQ ID NO: 12160 - DNA, 303 bp, Homo sapiens; identical to SEQ ID NO: 5879

SEQ ID NO: 12161 - DNA, 354 bp, Homo sapiens; identical to SEQ ID NO: 5880
  misc_feature 282: n = A,T,C or G

SEQ ID NO: 12162 - DNA, 650 bp, Homo sapiens; identical to SEQ ID NO: 5881
  misc_feature 114, 224, 291, 300, 316, 317, 348, 353, 359, 361, 367, 372,390, 398, 416, 429, 436, 437, 446, 458, 473, 477, 480, 481,485, 488, 498, 521, 527, 549, 558, 571, 578, 591, 593, 602,603, 616, 618, 627, 643, 646: n = A,T,C or G

SEQ ID NO: 12163 - DNA, 468 bp, Homo sapiens; identical to SEQ ID NO: 5882
  misc_feature 242, 328, 402, 444, 447: n = A,T,C or G

SEQ ID NO: 12164 - DNA, 559 bp, Homo sapiens; identical to SEQ ID NO: 5883

SEQ ID NO: 12165 - DNA, 444 bp, Homo sapiens; identical to SEQ ID NO: 5884

SEQ ID NO: 12166 - DNA, 235 bp, Homo sapiens; identical to SEQ ID NO: 5885
  misc_feature 101, 109, 120, 121, 122, 124, 137, 138, 140, 141, 143, 148,155, 166, 170, 174, 181, 182, 185, 186, 201, 205, 206, 217,221, 223, 226: n = A,T,C or G

SEQ ID NO: 12167 - DNA, 173 bp, Homo sapiens; identical to SEQ ID NO: 5886
  misc_feature 162, 168: n = A,T,C or G

SEQ ID NO: 12168 - DNA, 761 bp, Homo sapiens; identical to SEQ ID NO: 5887
  misc_feature 50, 51, 296, 370, 386, 447, 491, 497, 522, 558, 563, 579,623, 631, 649, 664, 666, 674, 690, 699, 713, 714: n = A,T,C or G

SEQ ID NO: 12169 - DNA, 315 bp, Homo sapiens; identical to SEQ ID NO: 5888
  misc_feature 46, 50, 52, 53, 54, 55, 56, 57, 62, 203: n = A,T,C or G

SEQ ID NO: 12170 - DNA, 548 bp, Homo sapiens; identical to SEQ ID NO: 5889

SEQ ID NO: 12171 - DNA, 498 bp, Homo sapiens; identical to SEQ ID NO: 5890

SEQ ID NO: 12172 - DNA, 348 bp, Homo sapiens; identical to SEQ ID NO: 5891
  misc_feature 31, 33, 45, 54, 67, 70, 98, 105, 113, 128, 138, 140, 141,143, 149, 170, 175, 176, 177, 180, 181, 205, 221, 236, 242,246, 249, 261, 275, 282, 283, 291, 300, 305, 322, 348: n = A,T,C or G

SEQ ID NO: 12173 - DNA, 615 bp, Homo sapiens; identical to SEQ ID NO: 5892
  misc_feature 178, 208, 215, 219, 317, 338, 380, 429, 441, 445, 452, 469,471, 485, 499, 502, 510, 514, 526, 528, 575, 578, 596, 602: n = A,T,C or G

SEQ ID NO: 12174 - DNA, 540 bp, Homo sapiens; identical to SEQ ID NO: 5893
  misc_feature 53, 76, 77, 105, 117, 165, 215, 217, 218, 221, 230, 244,246, 339, 411, 413, 442, 465, 480, 486, 488, 514: n = A,T,C or G

SEQ ID NO: 12175 - DNA, 746 bp, Homo sapiens; identical to SEQ ID NO: 5894
  misc_feature 138, 141, 149, 161, 162, 163, 164, 165, 167, 181, 188, 189,197, 198, 199, 203, 210, 213, 214, 215, 216, 217, 221, 222,227, 230, 235, 239, 242, 243, 244, 248, 249, 250, 252, 255,256, 263, 268, 269, 271, 272, 273, 282, 283, 289, 291: n = A,T,C or G
  misc_feature 292, 295, 296, 301, 303, 304, 307, 308, 318, 334, 336, 343,345, 353, 362, 370, 389, 394, 399, 400, 409, 410, 419, 421,423, 432, 433, 437, 439, 443, 451, 454, 457, 458, 483, 490,493, 494, 495, 503, 506, 507, 509, 513, 527, 530, 533: n = A,T,C or G
  misc_feature 543, 545, 553, 555, 569, 571, 572, 573, 577, 583, 584, 585,589, 591, 592, 596, 597, 598, 599, 602, 606, 607, 613, 616,631, 637, 681, 692, 695, 702, 709, 718, 719, 727, 733: n = A,T,C or G

SEQ ID NO: 12176 - DNA, 556 bp, Homo sapiens; identical to SEQ ID NO: 5895
  misc_feature 530: n = A,T,C or G

SEQ ID NO: 12177 - DNA, 825 bp, Homo sapiens; identical to SEQ ID NO: 5896
  misc_feature 7, 9, 10, 19, 20, 21, 23, 33, 58, 64, 80, 95, 117, 124, 218,222, 250, 511, 518, 580, 585, 597, 615, 623, 625, 649, 673,696, 707, 728, 729, 738, 752, 764, 767, 770, 771, 774, 780,791, 803, 807: n = A,T,C or G

SEQ ID NO: 12178 - DNA, 313 bp, Homo sapiens; identical to SEQ ID NO: 5897
  misc_feature 19, 205: n = A,T,C or G

SEQ ID NO: 12179 - DNA, 544 bp, Homo sapiens; identical to SEQ ID NO: 5898
  misc_feature 493: n = A,T,C or G

SEQ ID NO: 12180 - DNA, 342 bp, Homo sapiens; identical to SEQ ID NO: 5899
  misc_feature 122, 123, 133, 134, 136, 289, 300: n = A,T,C or G

SEQ ID NO: 12181 - DNA, 560 bp, Homo sapiens; identical to SEQ ID NO: 5900
  misc_feature 125, 139, 199, 226, 260, 262, 263, 287, 291, 316, 319, 320,350, 352, 359, 367, 370, 372, 392, 396, 400, 408, 416, 418,447, 460, 470, 473, 475, 485, 498, 516, 529, 531, 552: n = A,T,C or G

SEQ ID NO: 12182 - DNA, 633 bp, Homo sapiens; identical to SEQ ID NO: 5901
  misc_feature 567: n = A,T,C or G

SEQ ID NO: 12183 - DNA, 318 bp, Homo sapiens; identical to SEQ ID NO: 5902
  misc_feature 99, 102, 103, 126, 130, 131, 132, 133, 134, 135, 136, 139,140, 142, 144, 152, 155, 156, 157, 159, 160, 161, 162, 164,168, 171, 179, 182, 184, 188, 189, 195, 198, 200, 201, 204,205, 208, 209, 223, 257, 259, 262, 267, 277, 294, 297: n = A,T,C or G
  misc_feature 300, 306: n = A,T,C or G

SEQ ID NO: 12184 - DNA, 688 bp, Homo sapiens; identical to SEQ ID NO: 5903
  misc_feature 260, 280, 343, 352, 356, 417, 481, 495, 542, 565, 570, 571,584, 589, 592, 596, 607, 624, 626, 630, 651, 660, 662, 667: n = A,T,C or G

SEQ ID NO: 12185 - DNA, 600 bp, Homo sapiens; identical to SEQ ID NO: 5904
  misc_feature 368, 394, 412, 458, 494, 523, 529, 540, 549, 555, 593, 600: n = A,T,C or G

SEQ ID NO: 12186 - DNA, 410 bp, Homo sapiens; identical to SEQ ID NO: 5905
  misc_feature 71, 75, 96, 148, 154, 176, 225, 235, 286, 292, 300, 394,398, 405: n = A,T,C or G

SEQ ID NO: 12187 - DNA, 778 bp, Homo sapiens; identical to SEQ ID NO: 5906
  misc_feature 588, 642, 654, 687, 694, 715, 716: n = A,T,C or G

SEQ ID NO: 12188 - DNA, 287 bp, Homo sapiens; identical to SEQ ID NO: 5907
  misc_feature 68, 183, 196: n = A,T,C or G

SEQ ID NO: 12189 - DNA, 466 bp, Homo sapiens; identical to SEQ ID NO: 5908
  misc_feature 114, 126, 140, 161, 173, 181, 200, 208, 245, 249, 262, 273,290, 307, 311, 316, 317, 338, 351, 361, 377, 382, 385, 393,397, 410, 415, 419, 421, 435: n = A,T,C or G

SEQ ID NO: 12190 - DNA, 332 bp, Homo sapiens; identical to SEQ ID NO: 5909
  misc_feature 263, 321, 328: n = A,T,C or G

SEQ ID NO: 12191 - DNA, 651 bp, Homo sapiens; identical to SEQ ID NO: 5910
  misc_feature 62, 528, 566, 584, 616, 641: n = A,T,C or G

SEQ ID NO: 12192 - DNA, 489 bp, Homo sapiens; identical to SEQ ID NO: 5911

SEQ ID NO: 12193 - DNA, 622 bp, Homo sapiens; identical to SEQ ID NO: 5912
  misc_feature 466, 477, 491, 495, 502, 537, 561, 564, 594, 611, 622: n = A,T,C or G

SEQ ID NO: 12194 - DNA, 633 bp, Homo sapiens; identical to SEQ ID NO: 5913
  misc_feature 248, 369, 543, 550, 575: n = A,T,C or G

SEQ ID NO: 12195 - DNA, 279 bp, Homo sapiens; identical to SEQ ID NO: 5914
  misc_feature 122, 124, 134, 136, 138, 140, 144, 145, 147, 150, 154, 156,158, 167, 176, 182, 188, 191, 202, 205, 206, 207, 229, 230,231, 235, 243, 244, 245, 248, 249, 251, 256, 260, 263, 265,267: n = A,T,C or G

SEQ ID NO: 12196 - DNA, 477 bp, Homo sapiens; identical to SEQ ID NO: 5915
  misc_feature 133, 194, 232, 252, 290, 311, 340, 354, 386, 388, 394, 421,443, 465, 471: n = A,T,C or G

SEQ ID NO: 12197 - DNA, 675 bp, Homo sapiens; identical to SEQ ID NO: 5916
  misc_feature 303, 310, 413, 497, 571, 610, 620, 638, 640, 651: n = A,T,C or G

SEQ ID NO: 12198 - DNA, 327 bp, Homo sapiens; identical to SEQ ID NO: 5917
  misc_feature 153, 249, 269, 276, 300, 320: n = A,T,C or G

SEQ ID NO: 12199 - DNA, 408 bp, Homo sapiens; identical to SEQ ID NO: 5918
  misc_feature 344, 375: n = A,T,C or G

SEQ ID NO: 12200 - DNA, 549 bp, Homo sapiens; identical to SEQ ID NO: 5919

SEQ ID NO: 12201 - DNA, 268 bp, Homo sapiens; identical to SEQ ID NO: 5920
  misc_feature 81, 127, 130, 136, 149, 207: n = A,T,C or G

SEQ ID NO: 12202 - DNA, 412 bp, Homo sapiens; identical to SEQ ID NO: 5921
  misc_feature 54, 83, 90, 324, 410: n = A,T,C or G

SEQ ID NO: 12203 - DNA, 574 bp, Homo sapiens; identical to SEQ ID NO: 5922
  misc_feature 80, 133, 136, 162, 167, 177, 186, 187, 194, 195, 208, 210,211, 213, 224, 230, 232, 238, 239, 248, 250, 252, 269, 274,283, 285, 286, 293, 295, 296, 309, 310, 312, 313, 319, 326,327, 331, 334, 339, 340, 342, 343, 356, 363, 364, 365: n = A,T,C or G
  misc_feature 367, 369, 372, 403, 404, 405, 406, 407, 408, 413, 414, 418,428, 451, 452, 456, 459, 463, 468, 471, 472, 473, 480, 481,489, 494, 495, 497, 502, 527, 543, 547, 549, 551, 556, 559,560, 566, 570: n = A,T,C or G

SEQ ID NO: 12204 - DNA, 168 bp, Homo sapiens; identical to SEQ ID NO: 5923
  misc_feature 47, 155: n = A,T,C or G

SEQ ID NO: 12205 - DNA, 499 bp, Homo sapiens; identical to SEQ ID NO: 5924
  misc_feature 115, 148, 324, 333, 339, 345, 357, 416, 454, 475, 483, 486: n = A,T,C or G

SEQ ID NO: 12206 - DNA, 482 bp, Homo sapiens; identical to SEQ ID NO: 5925

SEQ ID NO: 12207 - DNA, 580 bp, Homo sapiens; identical to SEQ ID NO: 5926

SEQ ID NO: 12208 - DNA, 647 bp, Homo sapiens; identical to SEQ ID NO: 5927
  misc_feature 418, 511, 531, 551, 562, 570, 633, 645: n = A,T,C or G

SEQ ID NO: 12209 - DNA, 537 bp, Homo sapiens; identical to SEQ ID NO: 5928

SEQ ID NO: 12210 - DNA, 467 bp, Homo sapiens; identical to SEQ ID NO: 5930
  misc_feature 303: n = A,T,C or G

SEQ ID NO: 12211 - DNA, 382 bp, Homo sapiens; identical to SEQ ID NO: 5931
  misc_feature 135, 142, 274, 299, 326, 380: n = A,T,C or G

SEQ ID NO: 12212 - DNA, 534 bp, Homo sapiens; identical to SEQ ID NO: 5932
  misc_feature 128, 181, 182, 184, 186, 195, 198, 201, 203, 210, 212, 216,221, 229, 230, 245, 246, 248, 251, 252, 257, 262, 272, 274,275, 281, 282, 283, 287, 294, 296, 297, 306, 314, 325, 329,339, 342, 343, 347, 353, 363, 364, 374, 380, 384, 385: n = A,T,C or G
  misc_feature 400, 419, 424, 427, 432, 444, 449, 454, 467, 475, 480, 481,490, 507, 514, 516, 517, 525: n = A,T,C or G

SEQ ID NO: 12213 - DNA, 450 bp, Homo sapiens; identical to SEQ ID NO: 5933
  misc_feature 328, 329, 330, 331, 332, 333, 334, 335, 336, 337, 338, 339,340, 341, 342, 343, 344, 345, 346, 347, 348, 349, 350, 351,352, 353, 354, 355, 356, 357, 358, 359, 360, 361, 362, 363,364, 365, 366, 367, 368, 369, 370, 371, 372, 373, 374: n = A,T,C or G
  misc_feature 375, 376, 377, 378, 379, 380, 381, 382, 383, 384, 385, 386,387, 388, 389, 390, 391, 392, 393, 394, 402, 447: n = A,T,C or G

SEQ ID NO: 12214 - DNA, 759 bp, Homo sapiens; identical to SEQ ID NO: 5934
  misc_feature 33, 191, 264, 289, 391, 431, 454, 462, 467, 469, 479, 497,514, 520, 522, 525, 529, 538, 542, 544, 558, 563, 571, 574,583, 585, 586, 587, 589, 596, 598, 599, 600, 601, 604, 605,608, 609, 624, 632, 633, 634, 636, 643, 657, 663, 665: n = A,T,C or G
  misc_feature 667, 673, 676, 677, 678, 679, 681, 698, 700, 702, 704, 712,714, 726, 737, 738, 739, 740, 742, 743, 745, 746: n = A,T,C or G

SEQ ID NO: 12215 - DNA, 408 bp, Homo sapiens; identical to SEQ ID NO: 5935

SEQ ID NO: 12216 - DNA, 600 bp, Homo sapiens; identical to SEQ ID NO: 5936
  misc_feature 32, 41, 44, 46, 53, 76, 452, 454, 483, 502, 524, 535, 537,568, 573, 585: n = A,T,C or G

SEQ ID NO: 12217 - DNA, 550 bp, Homo sapiens; identical to SEQ ID NO: 5937
  misc_feature 1, 392, 393, 394, 396, 398, 399, 401, 402, 403, 404, 405,406, 407, 408, 409, 410, 411, 412, 413, 414, 416, 497, 521,531, 534: n = A,T,C or G

SEQ ID NO: 12218 - DNA, 444 bp, Homo sapiens; identical to SEQ ID NO: 5938
  misc_feature 55, 88, 89, 90, 91, 92, 93, 94, 95, 96, 97, 98, 106, 107,113, 117, 125, 129, 134, 135, 146, 153, 154, 156, 164, 165,169, 171, 176, 177, 179, 182, 188, 190, 191, 199, 200, 209,210, 216, 217, 219, 230, 234, 240, 242, 252, 260, 273: n = A,T,C or G
  misc_feature 283, 293, 296, 297, 298, 299, 305, 306, 312, 325, 326, 327,344, 350, 359, 367, 376, 380, 383, 394, 401, 404, 407, 409,412, 413, 417, 421, 423, 433, 436: n = A,T,C or G

SEQ ID NO: 12219 - DNA, 435 bp, Homo sapiens; identical to SEQ ID NO: 5939
  misc_feature 53, 127, 138, 162, 165, 180, 221, 223, 255, 328, 421: n = A,T,C or G

SEQ ID NO: 12220 - DNA, 296 bp, Homo sapiens; identical to SEQ ID NO: 5940
  misc_feature 147, 157, 158, 159, 168, 171, 172, 180, 182, 183, 187, 188,189, 193, 195, 196, 207, 210, 212, 218, 221, 222, 224, 227,236, 240, 241, 242, 243, 244, 254, 257, 262, 269, 278, 279,280, 281, 282, 283, 285: n = A,T,C or G

SEQ ID NO: 12221 - DNA, 792 bp, Homo sapiens; identical to SEQ ID NO: 5941
  misc_feature 376, 512, 577, 578, 580, 623, 683, 692, 744, 769, 781: n = A,T,C or G

SEQ ID NO: 12222 - DNA, 611 bp, Homo sapiens; identical to SEQ ID NO: 5942
  misc_feature 571, 596: n = A,T,C or G

SEQ ID NO: 12223 - DNA, 413 bp, Homo sapiens; identical to SEQ ID NO: 5943
  misc_feature 114, 124, 128, 129, 154, 155, 159, 161, 163, 164, 169, 170,179, 190, 191, 196, 202, 210, 214, 226, 227, 236, 250, 258,266, 277, 283, 286, 289, 291, 293, 294, 305, 309, 310, 318,335, 348, 350, 352, 353, 362, 370, 393, 395: n = A,T,C or G

SEQ ID NO: 12224 - DNA, 588 bp, Homo sapiens; identical to SEQ ID NO: 5944
  misc_feature 33, 34, 35, 44, 45, 46, 52, 53, 171, 220, 222, 292, 313,341, 465, 471, 496, 504, 553, 579, 585: n = A,T,C or G

SEQ ID NO: 12225 - DNA, 491 bp, Homo sapiens; identical to SEQ ID NO: 5945
  misc_feature 327, 421: n = A,T,C or G

SEQ ID NO: 12226 - DNA, 505 bp, Homo sapiens; identical to SEQ ID NO: 5946
  misc_feature 57, 67, 70, 73, 75, 77, 79, 122, 123: n = A,T,C or G

SEQ ID NO: 12227 - DNA, 263 bp, Homo sapiens; identical to SEQ ID NO: 5947
  misc_feature 227, 236: n = A,T,C or G

SEQ ID NO: 12228 - DNA, 467 bp, Homo sapiens; identical to SEQ ID NO: 5948
  misc_feature 454: n = A,T,C or G

SEQ ID NO: 12229 - DNA, 608 bp, Homo sapiens; identical to SEQ ID NO: 5949
  misc_feature 501, 547, 594: n = A,T,C or G

SEQ ID NO: 12230 - DNA, 178 bp, Homo sapiens; identical to SEQ ID NO: 5950
  misc_feature 47, 63, 111, 114, 118, 119, 126, 149, 174: n = A,T,C or G

SEQ ID NO: 12231 - DNA, 437 bp, Homo sapiens; identical to SEQ ID NO: 5951
  misc_feature 262, 364: n = A,T,C or G

SEQ ID NO: 12232 - DNA, 610 bp, Homo sapiens; identical to SEQ ID NO: 5952
  misc_feature 377, 576, 594, 610: n = A,T,C or G

SEQ ID NO: 12233 - DNA, 311 bp, Homo sapiens; identical to SEQ ID NO: 5953

SEQ ID NO: 12234 - DNA, 591 bp, Homo sapiens; identical to SEQ ID NO: 5954
  misc_feature 21, 23, 24, 33, 38, 40, 47, 157, 170, 217, 222, 265, 284,308, 330, 332, 340, 343, 357, 368, 378, 389, 390, 394, 414,423, 432, 438, 451, 455, 460, 468, 469, 480, 492, 497, 498,509, 510, 526, 529, 544, 567, 572, 579: n = A,T,C or G

SEQ ID NO: 12235 - DNA, 285 bp, Homo sapiens; identical to SEQ ID NO: 5955
  misc_feature 56, 111: n = A,T,C or G

SEQ ID NO: 12236 - DNA, 640 bp, Homo sapiens; identical to SEQ ID NO: 5956
  misc_feature 75, 106, 109, 120, 129, 133, 135, 142, 146, 153, 160, 167,172, 176, 178, 183, 193, 202, 216, 218, 220, 228, 242, 250,260, 261, 264, 269, 286, 296, 298, 310, 318, 323, 327, 329,336, 340, 341, 354, 362, 369, 370, 377, 379, 380, 387: n = A,T,C or G
  misc_feature 392, 393, 396, 399, 407, 415, 418, 420, 426, 427, 428, 435,437, 442, 443, 457, 462, 463, 469, 471, 484, 488, 496, 500,501, 509, 519, 525, 527, 530, 551, 558, 569, 570, 577, 592,607, 616, 619, 626, 627: n = A,T,C or G

SEQ ID NO: 12237 - DNA, 133 bp, Homo sapiens; identical to SEQ ID NO: 5957
  misc_feature 90, 94, 107: n = A,T,C or G

SEQ ID NO: 12238 - DNA, 370 bp, Homo sapiens; identical to SEQ ID NO: 5958
  misc_feature 236, 252, 254, 313, 322, 329: n = A,T,C or G

SEQ ID NO: 12239 - DNA, 790 bp, Homo sapiens; identical to SEQ ID NO: 5959
  misc_feature 565, 594, 622, 664, 691, 697, 701, 749, 754, 755, 760, 769,770, 772, 786: n = A,T,C or G

SEQ ID NO: 12240 - DNA, 471 bp, Homo sapiens; identical to SEQ ID NO: 5960
  misc_feature 223, 289, 303, 345, 370, 407, 433: n = A,T,C or G

SEQ ID NO: 12241 - DNA, 186 bp, Homo sapiens; identical to SEQ ID NO: 5961
  misc_feature 54, 102, 116, 122, 123, 138, 139, 141, 147, 148, 156, 164,171, 172, 175: n = A,T,C or G

SEQ ID NO: 12242 - DNA, 422 bp, Homo sapiens; identical to SEQ ID NO: 5962

SEQ ID NO: 12243 - DNA, 786 bp, Homo sapiens; identical to SEQ ID NO: 5963
  misc_feature 33, 45, 46, 56, 65, 74, 79, 81, 87, 99, 110, 158, 159, 179,200, 208, 209, 210, 212, 222, 226, 228, 229, 230, 232, 233,237, 242, 243, 251, 254, 255, 259, 260, 261, 264, 274, 279,283, 299, 329, 342, 345, 362, 387, 391, 394, 405, 410: n = A,T,C or G
  misc_feature 420, 442, 449, 453, 465, 468, 470, 471, 476, 491, 499, 512,533, 538, 545, 556, 558, 559, 564, 574, 586, 617, 627, 628,629, 630, 633, 652, 658, 682, 685, 692, 695, 699, 700, 732,759, 771, 775: n = A,T,C or G

SEQ ID NO: 12244 - DNA, 297 bp, Homo sapiens; identical to SEQ ID NO: 5964
  misc_feature 95, 100, 204, 263, 267: n = A,T,C or G

SEQ ID NO: 12245 - DNA, 160 bp, Homo sapiens; identical to SEQ ID NO: 5965
  misc_feature 104, 114, 127: n = A,T,C or G

SEQ ID NO: 12246 - DNA, 316 bp, Homo sapiens; identical to SEQ ID NO: 5966

SEQ ID NO: 12247 - DNA, 306 bp, Homo sapiens; identical to SEQ ID NO: 5967

SEQ ID NO: 12248 - DNA, 418 bp, Homo sapiens; identical to SEQ ID NO: 5968
  misc_feature 100, 106, 112, 123, 124, 140, 141, 165, 181, 182, 183, 189,206, 217, 218, 226, 232, 236, 239, 263, 273, 274, 281, 284,286, 290, 298, 301, 307, 316, 317, 331, 337, 339, 340, 342,350, 363, 382, 396, 416: n = A,T,C or G

SEQ ID NO: 12249 - DNA, 326 bp, Homo sapiens; identical to SEQ ID NO: 5969

SEQ ID NO: 12250 - DNA, 406 bp, Homo sapiens; identical to SEQ ID NO: 5970
  misc_feature 126, 131, 174, 378, 381, 389, 395: n = A,T,C or G

SEQ ID NO: 12251 - DNA, 765 bp, Homo sapiens; identical to SEQ ID NO: 5971
  misc_feature 279, 300, 329, 336, 372, 374, 382, 383, 393, 403, 408, 421,422, 424, 464, 510, 538, 554, 596, 607, 636, 699, 754: n = A,T,C or G

SEQ ID NO: 12252 - DNA, 254 bp, Homo sapiens; identical to SEQ ID NO: 5972
  misc_feature 33, 45, 51, 53, 54, 55, 96, 197: n = A,T,C or G

SEQ ID NO: 12253 - DNA, 127 bp, Homo sapiens; identical to SEQ ID NO: 5973
  misc_feature 53, 97, 119: n = A,T,C or G

SEQ ID NO: 12254 - DNA, 599 bp, Homo sapiens; identical to SEQ ID NO: 5974
  misc_feature 452, 461: n = A,T,C or G

SEQ ID NO: 12255 - DNA, 176 bp, Homo sapiens; identical to SEQ ID NO: 5975
  misc_feature 87, 93, 113, 115, 117, 118, 120, 126, 128, 137, 140, 153: n = A,T,C or G

SEQ ID NO: 12256 - DNA, 458 bp, Homo sapiens; identical to SEQ ID NO: 5976
  misc_feature 221, 223, 242, 243, 244, 245, 246, 247, 248, 249, 250, 251,252, 253, 254, 255, 256, 257, 258, 259, 260, 261, 262, 263,264, 265, 266, 267, 268, 269, 270, 271, 272, 273, 274, 275,276, 277, 278, 279, 280, 281, 282, 283, 284, 285, 286: n = A,T,C or G
  misc_feature 287, 288, 289, 290, 291, 292, 293, 294, 295, 296, 297, 298,299, 300, 301, 302, 303, 304, 305, 306, 307, 308, 309, 310,311, 312, 313, 314, 315, 316, 317, 318, 319, 320, 321, 322,323, 324, 325, 326, 327, 328, 329, 330, 331, 332, 333: n = A,T,C or G
  misc_feature 334, 335, 336, 337, 338, 339, 340, 341, 342, 343, 344, 345,346, 347, 348, 349, 350, 351, 352, 353, 354, 355, 356, 357,358, 359, 360, 361, 362, 363, 366, 370, 371, 376, 392, 395,397, 429, 446: n = A,T,C or G

SEQ ID NO: 12257 - DNA, 303 bp, Homo sapiens; identical to SEQ ID NO: 5977

SEQ ID NO: 12258 - DNA, 430 bp, Homo sapiens; identical to SEQ ID NO: 5978
  misc_feature 390: n = A,T,C or G

SEQ ID NO: 12259 - DNA, 308 bp, Homo sapiens; identical to SEQ ID NO: 5979

SEQ ID NO: 12260 - DNA, 567 bp, Homo sapiens; identical to SEQ ID NO: 5980
  misc_feature 429, 533: n = A,T,C or G

SEQ ID NO: 12261 - DNA, 664 bp, Homo sapiens; identical to SEQ ID NO: 5981
  misc_feature 378, 443, 476, 530, 580, 642: n = A,T,C or G

SEQ ID NO: 12262 - DNA, 414 bp, Homo sapiens; identical to SEQ ID NO: 5982
  misc_feature 137, 167, 266, 267, 268, 269, 270, 271, 272, 273, 274, 275,276, 277, 278, 279, 280, 281, 282, 283, 284, 285, 286, 287,288, 289, 290, 291, 292, 293, 294, 295, 296, 297, 298, 299,300, 301, 302, 303, 304, 305, 306, 307, 308, 309, 310: n = A,T,C or G
  misc_feature 311, 312, 313, 314, 315, 316, 317, 318, 319, 320, 321, 322,323, 324, 360, 370, 372, 400, 403: n = A,T,C or G

SEQ ID NO: 12263 - DNA, 767 bp, Homo sapiens; identical to SEQ ID NO: 5983
  misc_feature 330, 394, 400, 433, 453, 503, 516, 549, 561, 654, 660, 675,680, 728, 738: n = A,T,C or G

SEQ ID NO: 12264 - DNA, 525 bp, Homo sapiens; identical to SEQ ID NO: 5985

SEQ ID NO: 12265 - DNA, 653 bp, Homo sapiens; identical to SEQ ID NO: 5986
  misc_feature 46, 47, 51, 94, 115, 116, 122, 127, 135, 151, 160, 177, 227,247, 248, 287, 296, 297, 304, 305, 309, 316, 324, 327, 328,336, 337, 355, 367, 369, 373, 395, 406, 412, 414, 417, 425,427, 447, 466, 468, 469, 470, 474, 480, 496, 501: n = A,T,C or G
  misc_feature 516, 520, 523, 531, 537, 540, 542, 543, 548, 552, 567, 569,574, 590, 610, 617, 630, 641, 642, 648: n = A,T,C or G

SEQ ID NO: 12266 - DNA, 614 bp, Homo sapiens; identical to SEQ ID NO: 5987
  misc_feature 159, 211, 226, 243, 256, 313, 338, 416, 447, 451, 468, 548,553, 565, 570, 577, 578, 581, 589: n = A,T,C or G

SEQ ID NO: 12267 - DNA, 288 bp, Homo sapiens; identical to SEQ ID NO: 5988
  misc_feature 31: n = A,T,C or G

SEQ ID NO: 12268 - DNA, 711 bp, Homo sapiens; identical to SEQ ID NO: 5989
  misc_feature 108, 312, 432, 533, 537, 540, 544, 623, 638: n = A,T,C or G

SEQ ID NO: 12269 - DNA, 631 bp, Homo sapiens; identical to SEQ ID NO: 5990
  misc_feature 600: n = A,T,C or G

SEQ ID NO: 12270 - DNA, 470 bp, Homo sapiens; identical to SEQ ID NO: 5991

SEQ ID NO: 12271 - DNA, 310 bp, Homo sapiens; identical to SEQ ID NO: 5992
  misc_feature 71, 139, 292: n = A,T,C or G

SEQ ID NO: 12272 - DNA, 631 bp, Homo sapiens; identical to SEQ ID NO: 5993
  misc_feature 33, 138, 157, 163, 164, 165, 166, 167, 168, 179, 180, 183,184, 192, 193, 198, 199, 200, 202, 214, 220, 248, 252, 259,268, 273, 306, 318, 327, 328, 331, 360, 381, 391, 395, 397,402, 406, 408, 425, 426, 442, 443, 444, 455, 461, 463: n = A,T,C or G
  misc_feature 465, 474, 490, 493, 502, 505, 529, 530, 532, 533, 543, 548,555, 566, 568, 572, 576, 578, 614, 615, 617, 621: n = A,T,C or G

SEQ ID NO: 12273 - DNA, 264 bp, Homo sapiens; identical to SEQ ID NO: 5994

SEQ ID NO: 12274 - DNA, 648 bp, Homo sapiens; identical to SEQ ID NO: 5995
  misc_feature 143, 270, 384, 437, 515, 561, 595: n = A,T,C or G

SEQ ID NO: 12275 - DNA, 347 bp, Homo sapiens; identical to SEQ ID NO: 5996
  misc_feature 63, 74, 343: n = A,T,C or G

SEQ ID NO: 12276 - DNA, 366 bp, Homo sapiens; identical to SEQ ID NO: 5997

SEQ ID NO: 12277 - DNA, 692 bp, Homo sapiens; identical to SEQ ID NO: 5998
  misc_feature 556, 572, 590, 668, 672: n = A,T,C or G

SEQ ID NO: 12278 - DNA, 375 bp, Homo sapiens; identical to SEQ ID NO: 5999
  misc_feature 156: n = A,T,C or G

SEQ ID NO: 12279 - DNA, 397 bp, Homo sapiens; identical to SEQ ID NO: 6000
  misc_feature 196, 232, 282, 365: n = A,T,C or G

SEQ ID NO: 12280 - DNA, 485 bp, Homo sapiens; identical to SEQ ID NO: 6001
  misc_feature 55, 64: n = A,T,C or G

SEQ ID NO: 12281 - DNA, 695 bp, Homo sapiens; identical to SEQ ID NO: 6002
  misc_feature 27, 33, 57, 64, 92, 95, 96, 97, 98, 99, 100, 106, 127, 131,136, 144, 147, 150, 152, 163, 169, 171, 181, 195, 198, 200,202, 216, 222, 225, 226, 229, 230, 233, 243, 245, 250, 259,262, 266, 268, 272, 274, 276, 287, 291, 292, 295, 307: n = A,T,C or G
  misc_feature 317, 326, 333, 336, 343, 357, 365, 367, 385, 389, 392, 396,407, 430, 438, 452, 458, 480, 481, 486, 493, 498, 502, 510,512, 517, 521, 526, 528, 531, 532, 535, 541, 550, 552, 578,590, 601, 623, 627, 631, 639, 642, 654, 662, 668, 674: n = A,T,C or G
  misc_feature 675, 687, 690: n = A,T,C or G

SEQ ID NO: 12282 - DNA, 328 bp, Homo sapiens; identical to SEQ ID NO: 6003

SEQ ID NO: 12283 - DNA, 380 bp, Homo sapiens; identical to SEQ ID NO: 6004

SEQ ID NO: 12284 - DNA, 372 bp, Homo sapiens; identical to SEQ ID NO: 6005
  misc_feature 150, 186: n = A,T,C or G

SEQ ID NO: 12285 - DNA, 553 bp, Homo sapiens; identical to SEQ ID NO: 6006
  misc_feature 293, 296: n = A,T,C or G

SEQ ID NO: 12286 - DNA, 119 bp, Homo sapiens; identical to SEQ ID NO: 6007

SEQ ID NO: 12287 - DNA, 851 bp, Homo sapiens; identical to SEQ ID NO: 6008
  misc_feature 34, 422, 516, 518, 541, 577, 592, 596, 599, 604, 649, 652,661, 668, 674, 682, 690, 697, 704, 712, 729, 730, 734, 741,757, 765, 766, 772, 773, 775, 776, 777, 780, 781, 783, 789,791, 794, 798, 799, 804, 805, 806, 807, 818, 819, 820: n = A,T,C or G
  misc_feature 824, 828, 835, 836, 837: n = A,T,C or G

SEQ ID NO: 12288 - DNA, 485 bp, Homo sapiens; identical to SEQ ID NO: 6009

SEQ ID NO: 12289 - DNA, 735 bp, Homo sapiens; identical to SEQ ID NO: 6010
  misc_feature 610, 623, 636, 654, 665, 679, 682, 697, 698, 702, 715, 733: n = A,T,C or G

SEQ ID NO: 12290 - DNA, 516 bp, Homo sapiens; identical to SEQ ID NO: 6011

SEQ ID NO: 12291 - DNA, 439 bp, Homo sapiens; identical to SEQ ID NO: 6012
  misc_feature 14, 327: n = A,T,C or G

SEQ ID NO: 12292 - DNA, 456 bp, Homo sapiens; identical to SEQ ID NO: 6013
  misc_feature 63, 130, 131, 133, 136, 141, 142, 146, 179, 225, 251, 256,320, 322, 341, 342, 349, 351, 357, 362, 364, 365, 366, 368,382, 389, 399, 401, 406: n = A,T,C or G

SEQ ID NO: 12293 - DNA, 307 bp, Homo sapiens; identical to SEQ ID NO: 6014

SEQ ID NO: 12294 - DNA, 676 bp, Homo sapiens; identical to SEQ ID NO: 6015
  misc_feature 430, 486, 545, 572, 602: n = A,T,C or G

SEQ ID NO: 12295 - DNA, 479 bp, Homo sapiens; identical to SEQ ID NO: 6016

SEQ ID NO: 12296 - DNA, 142 bp, Homo sapiens; identical to SEQ ID NO: 6017
  misc_feature 69, 70, 82, 87, 89, 95, 102, 108, 115, 116, 122, 129, 132,133: n = A,T,C or G

SEQ ID NO: 12297 - DNA, 478 bp, Homo sapiens; identical to SEQ ID NO: 6018
  misc_feature 59, 85, 140, 190, 250, 272, 276, 314, 322, 338, 339, 340,341, 342, 343, 344, 345, 346, 347, 348, 349, 350, 351, 352,353, 354, 355, 356, 357, 358, 359, 360, 361, 362, 363, 364,365, 366, 367, 368, 369, 370, 371, 372, 373, 374, 375: n = A,T,C or G
  misc_feature 376, 377, 378, 379, 380, 381, 382, 383, 384, 385, 386, 387,388, 399, 412, 428, 453: n = A,T,C or G

SEQ ID NO: 12298 - DNA, 335 bp, Homo sapiens; identical to SEQ ID NO: 6019
  misc_feature 265, 267: n = A,T,C or G

SEQ ID NO: 12299 - DNA, 380 bp, Homo sapiens; identical to SEQ ID NO: 6020
  misc_feature 125, 178, 264, 269, 318, 330, 331: n = A,T,C or G

SEQ ID NO: 12300 - DNA, 528 bp, Homo sapiens; identical to SEQ ID NO: 6021

SEQ ID NO: 12301 - DNA, 475 bp, Homo sapiens; identical to SEQ ID NO: 6022
  misc_feature 436, 461, 469: n = A,T,C or G

SEQ ID NO: 12302 - DNA, 594 bp, Homo sapiens; identical to SEQ ID NO: 6023
  misc_feature 50, 51, 65, 69, 120, 132, 135, 160, 173, 264, 355: n = A,T,C or G

SEQ ID NO: 12303 - DNA, 330 bp, Homo sapiens; identical to SEQ ID NO: 6024
  misc_feature 274: n = A,T,C or G

SEQ ID NO: 12304 - DNA, 328 bp, Homo sapiens; identical to SEQ ID NO: 6025
  misc_feature 44, 143: n = A,T,C or G

SEQ ID NO: 12305 - DNA, 444 bp, Homo sapiens; identical to SEQ ID NO: 6026
  misc_feature 324, 362, 428, 432: n = A,T,C or G

SEQ ID NO: 12306 - DNA, 513 bp, Homo sapiens; identical to SEQ ID NO: 6027
  misc_feature 38, 52, 73, 82, 94, 95, 100, 249, 445, 455, 490, 501: n = A,T,C or G

SEQ ID NO: 12307 - DNA, 654 bp, Homo sapiens; identical to SEQ ID NO: 6028
  misc_feature 342, 521, 533, 535, 541, 595, 626, 641: n = A,T,C or G

SEQ ID NO: 12308 - DNA, 413 bp, Homo sapiens; identical to SEQ ID NO: 6029

SEQ ID NO: 12309 - DNA, 673 bp, Homo sapiens; identical to SEQ ID NO: 6030
  misc_feature 473, 554, 555, 556, 557, 558, 560, 561, 562, 563, 564, 565,566, 567, 568, 569, 570, 571, 572, 578, 582, 586, 617, 621,625: n = A,T,C or G

SEQ ID NO: 12310 - DNA, 268 bp, Homo sapiens; identical to SEQ ID NO: 6031
  misc_feature 42, 45, 46, 49, 52, 53, 58, 66, 71, 72, 74, 75, 79, 80: n = A,T,C or G

SEQ ID NO: 12311 - DNA, 414 bp, Homo sapiens; identical to SEQ ID NO: 6032
  misc_feature 32, 33, 44, 45, 46, 47, 48, 50, 51, 52: n = A,T,C or G

SEQ ID NO: 12312 - DNA, 544 bp, Homo sapiens; identical to SEQ ID NO: 6033
  misc_feature 59, 62, 64, 112, 115, 119, 125, 145, 149, 152, 153, 156,157, 160, 162, 169, 170, 177, 186, 189, 196, 203, 204, 212,228, 246, 247, 252, 259, 263, 272, 275, 284, 287, 291, 296,298, 303, 311, 315, 319, 328, 341, 353, 354, 356, 370: n = A,T,C or G
  misc_feature 373, 386, 392, 393, 398, 410, 422, 423, 437, 449, 451, 471,484, 491, 497, 501, 504, 511, 515: n = A,T,C or G

SEQ ID NO: 12313 - DNA, 535 bp, Homo sapiens; identical to SEQ ID NO: 6034
  misc_feature 512: n = A,T,C or G

SEQ ID NO: 12314 - DNA, 418 bp, Homo sapiens; identical to SEQ ID NO: 6035
  misc_feature 69, 103, 124, 129, 152, 187, 204, 217, 276, 296, 298, 354,367, 376, 418: n = A,T,C or G

SEQ ID NO: 12315 - DNA, 302 bp, Homo sapiens; identical to SEQ ID NO: 6036
  misc_feature 120, 123, 126, 149, 157, 165, 167, 170, 186, 197, 201, 207,240, 249, 257, 259, 262, 284, 297: n = A,T,C or G

SEQ ID NO: 12316 - DNA, 151 bp, Homo sapiens; identical to SEQ ID NO: 6037
  misc_feature 50, 68, 75, 81, 91, 94, 95, 97, 131: n = A,T,C or G

SEQ ID NO: 12317 - DNA, 311 bp, Homo sapiens; identical to SEQ ID NO: 6038
  misc_feature 108, 167, 175, 215, 241, 265, 299: n = A,T,C or G

SEQ ID NO: 12318 - DNA, 300 bp, Homo sapiens; identical to SEQ ID NO: 6039
  misc_feature 269: n = A,T,C or G

SEQ ID NO: 12319 - DNA, 449 bp, Homo sapiens; identical to SEQ ID NO: 6040
  misc_feature 272, 385, 435: n = A,T,C or G

SEQ ID NO: 12320 - DNA, 227 bp, Homo sapiens; identical to SEQ ID NO: 6041
  misc_feature 48, 200, 219: n = A,T,C or G

SEQ ID NO: 12321 - DNA, 548 bp, Homo sapiens; identical to SEQ ID NO: 6042
  misc_feature 388, 442, 468, 478, 503, 540: n = A,T,C or G

SEQ ID NO: 12322 - DNA, 608 bp, Homo sapiens; identical to SEQ ID NO: 6043
  misc_feature 568, 577, 580, 589: n = A,T,C or G

SEQ ID NO: 12323 - DNA, 384 bp, Homo sapiens; identical to SEQ ID NO: 6044
  misc_feature 138, 145, 153, 154, 164: n = A,T,C or G

SEQ ID NO: 12324 - DNA, 339 bp, Homo sapiens; identical to SEQ ID NO: 6045

SEQ ID NO: 12325 - DNA, 190 bp, Homo sapiens; identical to SEQ ID NO: 6046
  misc_feature 27, 67, 68, 82, 84, 86, 90, 91, 92, 94, 97, 99, 100, 101,102, 104, 106, 107, 108, 109, 110, 111, 112, 113, 114, 115,116, 117, 118, 119, 131, 144, 153, 155, 157, 159, 160, 162,175: n = A,T,C or G

SEQ ID NO: 12326 - DNA, 324 bp, Homo sapiens; identical to SEQ ID NO: 6047
  misc_feature 63, 72, 77, 165, 179, 245, 264, 267, 289, 323: n = A,T,C or G

SEQ ID NO: 12327 - DNA, 604 bp, Homo sapiens; identical to SEQ ID NO: 6048
  misc_feature 425, 467, 514, 536, 568, 579: n = A,T,C or G

SEQ ID NO: 12328 - DNA, 321 bp, Homo sapiens; identical to SEQ ID NO: 6049
  misc_feature 28, 49, 58, 70, 73, 114, 121, 128, 131, 135, 136, 145, 148,150, 162, 163, 165, 166, 171, 175, 177, 192, 195, 196, 201,202, 203, 205, 208, 211, 215, 217, 219, 221, 222, 223, 226,234, 239, 243, 252, 258, 259, 263, 265, 269, 279, 293: n = A,T,C or G

SEQ ID NO: 12329 - DNA, 314 bp, Homo sapiens; identical to SEQ ID NO: 6050
  misc_feature 301, 312: n = A,T,C or G

SEQ ID NO: 12330 - DNA, 230 bp, Homo sapiens; identical to SEQ ID NO: 6051
  misc_feature 51, 52, 55, 67, 73, 83, 84, 89, 104, 106, 111: n = A,T,C or G

SEQ ID NO: 12331 - DNA, 695 bp, Homo sapiens; identical to SEQ ID NO: 6052
  misc_feature 51, 129, 165, 195, 213, 225, 242, 247, 255, 269, 293, 295,329, 359, 385, 438, 487, 490, 509, 510, 511, 512, 524, 532,539, 617, 619, 649, 662, 664, 684: n = A,T,C or G

SEQ ID NO: 12332 - DNA, 518 bp, Homo sapiens; identical to SEQ ID NO: 6053
  misc_feature 460, 484: n = A,T,C or G

SEQ ID NO: 12333 - DNA, 491 bp, Homo sapiens; identical to SEQ ID NO: 6054

SEQ ID NO: 12334 - DNA, 395 bp, Homo sapiens; identical to SEQ ID NO: 6055
  misc_feature 140, 143, 144: n = A,T,C or G

SEQ ID NO: 12335 - DNA, 835 bp, Homo sapiens; identical to SEQ ID NO: 6056
  misc_feature 32, 81, 220, 327, 336, 471, 493, 505, 515, 535, 545, 610,617, 619, 621, 655, 661, 662, 714, 721, 731, 732, 771, 806: n = A,T,C or G

SEQ ID NO: 12336 - DNA, 670 bp, Homo sapiens; identical to SEQ ID NO: 6057
  misc_feature 45, 180, 196, 294, 457, 463, 478, 484, 516, 519, 532, 556,557, 570, 572, 573, 584, 615, 632, 652: n = A,T,C or G

SEQ ID NO: 12337 - DNA, 356 bp, Homo sapiens; identical to SEQ ID NO: 6058

SEQ ID NO: 12338 - DNA, 351 bp, Homo sapiens; identical to SEQ ID NO: 6059
  misc_feature 55, 80, 85, 112, 114, 119, 150, 189, 230, 255, 275, 320: n = A,T,C or G

SEQ ID NO: 12339 - DNA, 128 bp, Homo sapiens; identical to SEQ ID NO: 6060
  misc_feature 19, 23, 24, 26, 29, 30, 63, 98: n = A,T,C or G

SEQ ID NO: 12340 - DNA, 458 bp, Homo sapiens; identical to SEQ ID NO: 6061
  misc_feature 444, 451: n = A,T,C or G

SEQ ID NO: 12341 - DNA, 468 bp, Homo sapiens; identical to SEQ ID NO: 6062
  misc_feature 458: n = A,T,C or G

SEQ ID NO: 12342 - DNA, 251 bp, Homo sapiens; identical to SEQ ID NO: 6063
  misc_feature 53, 87, 194, 227: n = A,T,C or G

SEQ ID NO: 12343 - DNA, 127 bp, Homo sapiens; identical to SEQ ID NO: 6064

SEQ ID NO: 12344 - DNA, 159 bp, Homo sapiens; identical to SEQ ID NO: 6065
  misc_feature 64, 73, 87, 91, 94, 95, 100, 147: n = A,T,C or G

SEQ ID NO: 12345 - DNA, 348 bp, Homo sapiens; identical to SEQ ID NO: 6066

SEQ ID NO: 12346 - DNA, 350 bp, Homo sapiens; identical to SEQ ID NO: 6067
  misc_feature 64, 128, 233, 343: n = A,T,C or G

SEQ ID NO: 12347 - DNA, 308 bp, Homo sapiens; identical to SEQ ID NO: 6068

SEQ ID NO: 12348 - DNA, 550 bp, Homo sapiens; identical to SEQ ID NO: 6069

SEQ ID NO: 12349 - DNA, 307 bp, Homo sapiens; identical to SEQ ID NO: 6070
  misc_feature 229: n = A,T,C or G

SEQ ID NO: 12350 - DNA, 313 bp, Homo sapiens; identical to SEQ ID NO: 6071
  misc_feature 116, 125, 129, 136, 147, 156, 165, 175, 185, 189, 193, 197,213, 230, 237, 246, 262, 278, 292: n = A,T,C or G

SEQ ID NO: 12351 - DNA, 309 bp, Homo sapiens; identical to SEQ ID NO: 6072

SEQ ID NO: 12352 - DNA, 723 bp, Homo sapiens; identical to SEQ ID NO: 6073
  misc_feature 49, 96, 135, 137, 138, 139, 140, 145, 149, 157, 158, 159,162, 165, 167, 172, 173, 186, 198, 210, 214, 233, 234, 236,242, 248, 250, 256, 258, 259, 260, 262, 263, 271, 272, 273,279, 282, 283, 293, 297, 298, 302, 303, 316, 320, 324: n = A,T,C or G
  misc_feature 349, 358, 372, 378, 385, 386, 397, 404, 405, 406, 409, 415,418, 419, 424, 425, 429, 430, 433, 438, 441, 444, 451, 457,460, 497, 498, 506, 512, 514, 515, 532, 533, 537, 546, 563,571, 574, 575, 576, 585, 591, 594, 596, 611, 613, 616: n = A,T,C or G
  misc_feature 629, 634, 635, 636, 637, 645, 658, 666, 688, 691, 692, 708,713, 714: n = A,T,C or G

SEQ ID NO: 12353 - DNA, 387 bp, Homo sapiens; identical to SEQ ID NO: 6074
  misc_feature 146: n = A,T,C or G

SEQ ID NO: 12354 - DNA, 575 bp, Homo sapiens; identical to SEQ ID NO: 6075
  misc_feature 480, 488, 494, 497, 523, 533, 547, 562, 563: n = A,T,C or G

SEQ ID NO: 12355 - DNA, 355 bp, Homo sapiens; identical to SEQ ID NO: 6076
  misc_feature 97, 115, 130, 133, 136, 142, 143, 152, 159, 163, 170, 179,209, 213, 240, 248, 277, 297, 309, 323, 328, 335, 348: n = A,T,C or G

SEQ ID NO: 12356 - DNA, 641 bp, Homo sapiens; identical to SEQ ID NO: 6077
  misc_feature 17, 23, 125, 149, 224, 400, 402, 420, 451, 486, 506, 514,535, 554, 574, 585, 589, 590, 624, 631: n = A,T,C or G

SEQ ID NO: 12357 - DNA, 512 bp, Homo sapiens; identical to SEQ ID NO: 6078
  misc_feature 487: n = A,T,C or G

SEQ ID NO: 12358 - DNA, 303 bp, Homo sapiens; identical to SEQ ID NO: 6079
  misc_feature 57, 98, 99, 100, 101, 109, 111, 113, 117, 126, 139, 158,172, 174, 178, 190, 191, 195, 197, 198, 201, 202, 204, 205,208, 212, 213, 214, 218, 221, 224, 228, 244, 249, 254, 255,257, 262, 275, 276, 288: n = A,T,C or G

SEQ ID NO: 12359 - DNA, 345 bp, Homo sapiens; identical to SEQ ID NO: 6080
  misc_feature 205, 209, 229, 234, 266, 300, 313: n = A,T,C or G

SEQ ID NO: 12360 - DNA, 468 bp, Homo sapiens; identical to SEQ ID NO: 6081

SEQ ID NO: 12361 - DNA, 303 bp, Homo sapiens; identical to SEQ ID NO: 6082
  misc_feature 110, 294: n = A,T,C or G

SEQ ID NO: 12362 - DNA, 417 bp, Homo sapiens; identical to SEQ ID NO: 6083
  misc_feature 367, 369, 398: n = A,T,C or G

SEQ ID NO: 12363 - DNA, 445 bp, Homo sapiens; identical to SEQ ID NO: 6084
  misc_feature 72, 111, 120, 233, 246, 300, 311, 317, 332, 336, 346, 357,368, 387, 428: n = A,T,C or G

SEQ ID NO: 12364 - DNA, 464 bp, Homo sapiens; identical to SEQ ID NO: 6085

SEQ ID NO: 12365 - DNA, 205 bp, Homo sapiens; identical to SEQ ID NO: 6086
  misc_feature 31, 32, 82, 93, 96, 97, 98, 102, 104, 106, 107, 109, 113,117, 121, 127, 129, 130, 137, 138, 146, 149, 159, 161, 166,170, 171, 174: n = A,T,C or G

SEQ ID NO: 12366 - DNA, 246 bp, Homo sapiens; identical to SEQ ID NO: 6087
  misc_feature 7, 15, 25, 31, 43, 45, 49, 79, 81, 110, 117: n = A,T,C or G

SEQ ID NO: 12367 - DNA, 396 bp, Homo sapiens; identical to SEQ ID NO: 6088

SEQ ID NO: 12368 - DNA, 352 bp, Homo sapiens; identical to SEQ ID NO: 6089
  misc_feature 337: n = A,T,C or G

SEQ ID NO: 12369 - DNA, 291 bp, Homo sapiens; identical to SEQ ID NO: 6090
  misc_feature 117, 121, 128, 135, 148, 149, 150, 152, 160, 177, 178, 180,181, 191, 200, 203, 211, 222, 224, 226, 229, 231, 232, 243,244, 245, 266, 268, 270, 271, 282: n = A,T,C or G

SEQ ID NO: 12370 - DNA, 795 bp, Homo sapiens; identical to SEQ ID NO: 6091
  misc_feature 31, 37, 43, 44, 45, 46, 48, 49, 50, 52, 54, 85, 245, 270,301, 309, 352, 358, 363, 366, 369, 390, 402, 410, 412, 424,428, 456, 470, 473, 480, 482, 487, 511, 526, 531, 540, 544,550, 554, 600, 601, 614, 618, 633, 638, 645, 661, 662: n = A,T,C or G
  misc_feature 666, 667, 669, 672, 690, 697, 703, 705, 708, 710, 714, 717,720, 721, 722, 739, 771, 773, 777, 779, 782, 791, 792: n = A,T,C or G

SEQ ID NO: 12371 - DNA, 567 bp, Homo sapiens; identical to SEQ ID NO: 6092

SEQ ID NO: 12372 - DNA, 609 bp, Homo sapiens; identical to SEQ ID NO: 6093
  misc_feature 425, 484, 555, 556, 559: n = A,T,C or G

SEQ ID NO: 12373 - DNA, 370 bp, Homo sapiens; identical to SEQ ID NO: 6094

SEQ ID NO: 12374 - DNA, 599 bp, Homo sapiens; identical to SEQ ID NO: 6095
  misc_feature 56, 122, 128, 129, 136, 139, 140, 148, 149, 150, 151, 152,154, 155, 160, 162, 163, 166, 179, 180, 182, 183, 184, 185,187, 189, 197, 200, 209, 210, 214, 224, 231, 238, 239, 243,245, 247, 251, 253, 254, 255, 256, 259, 263, 267, 270: n = A,T,C or G
  misc_feature 288, 294, 295, 298, 299, 305, 306, 307, 314, 315, 323, 324,329, 336, 340, 347, 348, 352, 353, 360, 370, 371, 379, 382,383, 392, 394, 409, 424, 425, 427, 432, 433, 434, 435, 439,444, 445, 453, 454, 458, 469, 471, 474, 475, 486, 487: n = A,T,C or G
  misc_feature 493, 499, 502, 504, 505, 515, 518, 519, 529, 530, 532, 549,561, 563, 567, 569, 571, 580, 586, 589: n = A,T,C or G

SEQ ID NO: 12375 - DNA, 392 bp, Homo sapiens; identical to SEQ ID NO: 6096
  misc_feature 292, 306, 325, 353, 389: n = A,T,C or G

SEQ ID NO: 12376 - DNA, 501 bp, Homo sapiens; identical to SEQ ID NO: 6097
  misc_feature 330, 335, 372, 373, 378, 391, 396, 407, 412, 413, 423, 424,445, 448, 453, 454, 456, 460, 461, 471, 476, 482: n = A,T,C or G

SEQ ID NO: 12377 - DNA, 486 bp, Homo sapiens; identical to SEQ ID NO: 6098
  misc_feature 190, 273, 292, 379, 403, 440: n = A,T,C or G

SEQ ID NO: 12378 - DNA, 139 bp, Homo sapiens; identical to SEQ ID NO: 6099
  misc_feature 8, 27, 35, 47, 53, 89, 107: n = A,T,C or G

SEQ ID NO: 12379 - DNA, 758 bp, Homo sapiens; identical to SEQ ID NO: 6100
  misc_feature 558, 652, 680, 689, 694, 702, 730: n = A,T,C or G

SEQ ID NO: 12380 - DNA, 226 bp, Homo sapiens; identical to SEQ ID NO: 6101

SEQ ID NO: 12381 - DNA, 167 bp, Homo sapiens; identical to SEQ ID NO: 6102
  misc_feature 49, 128, 133, 135, 140, 157: n = A,T,C or G

SEQ ID NO: 12382 - DNA, 313 bp, Homo sapiens; identical to SEQ ID NO: 6103
  misc_feature 75, 111, 273: n = A,T,C or G

SEQ ID NO: 12383 - DNA, 264 bp, Homo sapiens; identical to SEQ ID NO: 6104
  misc_feature 59, 118, 152, 170, 246: n = A,T,C or G

SEQ ID NO: 12384 - DNA, 772 bp, Homo sapiens; identical to SEQ ID NO: 6105
  misc_feature 31, 32, 34, 49, 50, 51, 52, 58, 59, 62, 63, 70, 72, 74, 76,78, 81, 82, 84, 87, 88, 89, 90, 101, 109, 110, 117, 119,120, 121, 137, 139, 140, 141, 142, 143, 145, 175, 188, 190,194, 197, 199, 202, 205, 209, 218, 243, 249, 250, 263: n = A,T,C or G
  misc_feature 267, 269, 275, 276, 280, 281, 282, 284, 287, 290, 291, 293,294, 296, 319, 320, 355, 360, 365, 373, 378, 379, 380, 406,415, 425, 432, 433, 434, 442, 451, 452, 457, 467, 477, 479,481, 486, 495, 496, 502, 509, 528, 532, 549, 552, 559: n = A,T,C or G
  misc_feature 571, 580, 583, 591, 592, 596, 597, 612, 629, 633, 634, 638,655, 658, 659, 660, 663, 669, 679, 680, 681, 698, 700, 705,720, 721, 722, 723, 726, 728, 729, 733, 734, 737, 739, 747,751, 758, 759, 769: n = A,T,C or G

SEQ ID NO: 12385 - DNA, 410 bp, Homo sapiens; identical to SEQ ID NO: 6106
  misc_feature 24, 350, 401, 403: n = A,T,C or G

SEQ ID NO: 12386 - DNA, 302 bp, Homo sapiens; identical to SEQ ID NO: 6107
  misc_feature 16, 17, 18, 20, 21, 23, 26, 49, 51, 54, 57, 60, 200, 203,208, 214, 224, 229, 231, 233, 239, 260: n = A,T,C or G

SEQ ID NO: 12387 - DNA, 668 bp, Homo sapiens; identical to SEQ ID NO: 6108
  misc_feature 85, 88, 89, 97, 98, 99, 100, 101, 105, 117, 118, 121, 125,132, 136, 137, 148, 149, 152, 160, 179, 182, 186, 200, 204,211, 218, 227, 240, 242, 248, 255, 259, 265, 268, 276, 280,283, 286, 290, 291, 300, 301, 302, 306, 310, 314, 315: n = A,T,C or G
  misc_feature 321, 324, 338, 339, 347, 348, 353, 356, 365, 380, 383, 398,414, 421, 432, 438, 444, 446, 448, 457, 460, 463, 471, 478,496, 505, 512, 520, 521, 533, 574, 584, 591, 594, 600, 602,605, 618, 627, 632, 661: n = A,T,C or G

SEQ ID NO: 12388 - DNA, 346 bp, Homo sapiens; identical to SEQ ID NO: 6109
  misc_feature 121, 126, 132, 144: n = A,T,C or G

SEQ ID NO: 12389 - DNA, 587 bp, Homo sapiens; identical to SEQ ID NO: 6110
  misc_feature 512: n = A,T,C or G

SEQ ID NO: 12390 - DNA, 439 bp, Homo sapiens; identical to SEQ ID NO: 6111
  misc_feature 55, 121, 142, 163, 277, 284, 285, 377, 417, 422: n = A,T,C or G

SEQ ID NO: 12391 - DNA, 658 bp, Homo sapiens; identical to SEQ ID NO: 6112
  misc_feature 602, 640: n = A,T,C or G

SEQ ID NO: 12392 - DNA, 642 bp, Homo sapiens; identical to SEQ ID NO: 6113
  misc_feature 18, 44, 107, 131, 364, 365, 382, 392, 416, 473, 496, 513,514, 557, 559, 560, 564: n = A,T,C or G

SEQ ID NO: 12393 - DNA, 427 bp, Homo sapiens; identical to SEQ ID NO: 6114

SEQ ID NO: 12394 - DNA, 319 bp, Homo sapiens; identical to SEQ ID NO: 6115
  misc_feature 33, 50, 53, 115, 157, 159, 163, 165, 167, 170, 179, 181,183, 184, 189, 191, 192, 194, 196, 202, 203, 212, 222, 229,240, 241, 248, 249, 257, 259, 260, 261, 273, 275, 277, 281,296, 304, 306, 307, 308, 310, 312: n = A,T,C or G

SEQ ID NO: 12395 - DNA, 518 bp, Homo sapiens; identical to SEQ ID NO: 6116
  misc_feature 402, 487, 494, 503: n = A,T,C or G

SEQ ID NO: 12396 - DNA, 288 bp, Homo sapiens; identical to SEQ ID NO: 6117
  misc_feature 31, 32, 51, 240: n = A,T,C or G

SEQ ID NO: 12397 - DNA, 609 bp, Homo sapiens; identical to SEQ ID NO: 6118
  misc_feature 409, 419, 449, 542, 559, 588, 595: n = A,T,C or G

SEQ ID NO: 12398 - DNA, 422 bp, Homo sapiens; identical to SEQ ID NO: 6119
  misc_feature 153, 319, 324, 326, 333, 335, 336, 346, 347, 348, 353, 354,356, 357, 358, 373, 381: n = A,T,C or G

SEQ ID NO: 12399 - DNA, 511 bp, Homo sapiens; identical to SEQ ID NO: 6120
  misc_feature 442, 472, 492: n = A,T,C or G

SEQ ID NO: 12400 - DNA, 593 bp, Homo sapiens; identical to SEQ ID NO: 6121
  misc_feature 585: n = A,T,C or G

SEQ ID NO: 12401 - DNA, 475 bp, Homo sapiens; identical to SEQ ID NO: 6122
  misc_feature 383: n = A,T,C or G

SEQ ID NO: 12402 - DNA, 447 bp, Homo sapiens; identical to SEQ ID NO: 6123
  misc_feature 28, 98, 205, 297, 298, 360, 409: n = A,T,C or G

SEQ ID NO: 12403 - DNA, 521 bp, Homo sapiens; identical to SEQ ID NO: 6124
  misc_feature 503: n = A,T,C or G

SEQ ID NO: 12404 - DNA, 526 bp, Homo sapiens; identical to SEQ ID NO: 6125
  misc_feature 479, 480, 488, 490, 494, 495, 496, 497, 498, 499, 500, 502,503: n = A,T,C or G

SEQ ID NO: 12405 - DNA, 614 bp, Homo sapiens; identical to SEQ ID NO: 6126
  misc_feature 220, 275, 306, 327, 356, 436, 580, 604: n = A,T,C or G

SEQ ID NO: 12406 - DNA, 728 bp, Homo sapiens; identical to SEQ ID NO: 6127
  misc_feature 65, 254, 378, 408, 413, 419, 449, 453, 455, 512, 517, 526,536, 548, 556, 564, 568, 576, 585, 597, 599, 603, 619, 642,645, 651, 652, 662, 663, 669, 673, 679, 704, 707, 709, 720: n = A,T,C or G

SEQ ID NO: 12407 - DNA, 186 bp, Homo sapiens; identical to SEQ ID NO: 6128
  misc_feature 58, 63, 75, 167: n = A,T,C or G

SEQ ID NO: 12408 - DNA, 409 bp, Homo sapiens; identical to SEQ ID NO: 6129

SEQ ID NO: 12409 - DNA, 253 bp, Homo sapiens; identical to SEQ ID NO: 6130
  misc_feature 228: n = A,T,C or G

SEQ ID NO: 12410 - DNA, 239 bp, Homo sapiens; identical to SEQ ID NO: 6131
  misc_feature 91, 130, 148, 154, 158, 173, 175, 193, 203, 225, 226: n = A,T,C or G

SEQ ID NO: 12411 - DNA, 398 bp, Homo sapiens; identical to SEQ ID NO: 6132
  misc_feature 230, 241, 258, 355: n = A,T,C or G

SEQ ID NO: 12412 - DNA, 546 bp, Homo sapiens; identical to SEQ ID NO: 6133
  misc_feature 396, 426, 437, 439, 440, 453, 467, 485, 489, 495, 498, 502,512, 517, 521, 526, 528, 530, 532, 535: n = A,T,C or G

SEQ ID NO: 12413 - DNA, 314 bp, Homo sapiens; identical to SEQ ID NO: 6134

SEQ ID NO: 12414 - DNA, 664 bp, Homo sapiens; identical to SEQ ID NO: 6135
  misc_feature 444, 531, 560, 567, 605, 625, 646: n = A,T,C or G

SEQ ID NO: 12415 - DNA, 239 bp, Homo sapiens; identical to SEQ ID NO: 6136
  misc_feature 7, 9, 13, 15, 25, 42, 43, 45, 48, 50, 51, 55, 57, 59, 61,65, 68, 72, 73, 74, 75, 80, 81, 82, 85, 102, 110, 114, 115,120, 128, 130, 135, 138, 139, 143, 155, 160, 174, 178, 180,223, 225: n = A,T,C or G

SEQ ID NO: 12416 - DNA, 365 bp, Homo sapiens; identical to SEQ ID NO: 6137
  misc_feature 351: n = A,T,C or G

SEQ ID NO: 12417 - DNA, 578 bp, Homo sapiens; identical to SEQ ID NO: 6138
  misc_feature 329, 518: n = A,T,C or G

SEQ ID NO: 12418 - DNA, 462 bp, Homo sapiens; identical to SEQ ID NO: 6139
  misc_feature 295: n = A,T,C or G

SEQ ID NO: 12419 - DNA, 521 bp, Homo sapiens; identical to SEQ ID NO: 6140

SEQ ID NO: 12420 - DNA, 250 bp, Homo sapiens; identical to SEQ ID NO: 6141
  misc_feature 33: n = A,T,C or G

SEQ ID NO: 12421 - DNA, 515 bp, Homo sapiens; identical to SEQ ID NO: 6142
  misc_feature 138, 139, 140, 153, 154, 160, 165, 167, 170, 172, 186, 190,191, 195, 196, 214, 216, 229, 243, 257, 259, 262, 265, 269,271, 280, 283, 288, 289, 312, 313, 314, 323, 331, 332, 347,356, 362, 363, 367, 368, 369, 379, 389, 393, 394, 395: n = A,T,C or G
  misc_feature 423, 426, 441, 445, 446, 450, 467, 468, 478, 484, 493, 495,497, 500, 501, 503, 504, 505, 511: n = A,T,C or G

SEQ ID NO: 12422 - DNA, 327 bp, Homo sapiens; identical to SEQ ID NO: 6143
  misc_feature 76, 99, 122, 140, 154, 166, 206, 210, 237, 241, 267, 285,311: n = A,T,C or G

SEQ ID NO: 12423 - DNA, 284 bp, Homo sapiens; identical to SEQ ID NO: 6144
  misc_feature 87, 95, 104, 114, 129, 142, 153, 159, 175, 205, 206, 208,211, 229, 238: n = A,T,C or G

SEQ ID NO: 12424 - DNA, 329 bp, Homo sapiens; identical to SEQ ID NO: 6145
  misc_feature 27, 30, 52, 58, 59, 76, 90, 100, 104, 105, 111, 113, 114,115, 117, 126, 148, 157, 159, 166, 172, 175, 176, 180, 186,201, 205, 216, 224, 235, 244, 247, 254, 255, 261, 269, 277,279, 285, 307, 309: n = A,T,C or G

SEQ ID NO: 12425 - DNA, 590 bp, Homo sapiens; identical to SEQ ID NO: 6146
  misc_feature 339, 349, 355, 451, 477, 479, 548, 554, 559: n = A,T,C or G

SEQ ID NO: 12426 - DNA, 330 bp, Homo sapiens; identical to SEQ ID NO: 6148

SEQ ID NO: 12427 - DNA, 519 bp, Homo sapiens; identical to SEQ ID NO: 6149
  misc_feature 442, 507: n = A,T,C or G

SEQ ID NO: 12428 - DNA, 243 bp, Homo sapiens; identical to SEQ ID NO: 6150
  misc_feature 57, 111, 165, 174, 189: n = A,T,C or G

SEQ ID NO: 12429 - DNA, 556 bp, Homo sapiens; identical to SEQ ID NO: 6151
  misc_feature 460: n = A,T,C or G

SEQ ID NO: 12430 - DNA, 551 bp, Homo sapiens; identical to SEQ ID NO: 6152
  misc_feature 426, 452: n = A,T,C or G

SEQ ID NO: 12431 - DNA, 328 bp, Homo sapiens; identical to SEQ ID NO: 6153
  misc_feature 145: n = A,T,C or G

SEQ ID NO: 12432 - DNA, 402 bp, Homo sapiens; identical to SEQ ID NO: 6154
  misc_feature 75: n = A,T,C or G

SEQ ID NO: 12433 - DNA, 768 bp, Homo sapiens; identical to SEQ ID NO: 6155
  misc_feature 170, 314, 327, 331, 340, 381, 419, 430, 456, 467, 497, 505,512, 592, 597, 599, 601, 606, 614, 664, 668, 676, 684, 685,689, 706, 708, 710, 712, 714, 721, 723, 724, 727, 733, 735,741, 742: n = A,T,C or G

SEQ ID NO: 12434 - DNA, 723 bp, Homo sapiens; identical to SEQ ID NO: 6156
  misc_feature 470, 485, 529, 543, 548, 556, 571, 602, 616, 632, 649, 674,688, 691, 709: n = A,T,C or G

SEQ ID NO: 12435 - DNA, 376 bp, Homo sapiens; identical to SEQ ID NO: 6157

SEQ ID NO: 12436 - DNA, 349 bp, Homo sapiens; identical to SEQ ID NO: 6158
  misc_feature 188, 216, 220, 224, 289, 321: n = A,T,C or G

SEQ ID NO: 12437 - DNA, 409 bp, Homo sapiens; identical to SEQ ID NO: 6159
  misc_feature 169, 170, 172, 225, 231, 281, 315, 323, 339, 344, 345, 392: n = A,T,C or G

SEQ ID NO: 12438 - DNA, 439 bp, Homo sapiens; identical to SEQ ID NO: 6160

SEQ ID NO: 12439 - DNA, 216 bp, Homo sapiens; identical to SEQ ID NO: 6161

SEQ ID NO: 12440 - DNA, 702 bp, Homo sapiens; identical to SEQ ID NO: 6162
  misc_feature 112, 236, 256, 288, 297, 305, 313, 342, 360, 418, 425, 435,439, 448, 454, 463, 464, 467, 470, 473, 475, 486, 490, 527,544, 548, 549, 550, 551, 552, 553, 554, 555, 557, 558, 559,560, 561, 562, 563, 564, 565, 566, 567, 568, 569, 571: n = A,T,C or G
  misc_feature 572, 573, 574, 575, 576, 577, 607, 612, 627, 628, 655, 658,668, 669, 682, 695: n = A,T,C or G

SEQ ID NO: 12441 - DNA, 606 bp, Homo sapiens; identical to SEQ ID NO: 6163
  misc_feature 477, 491, 504, 541, 556: n = A,T,C or G

SEQ ID NO: 12442 - DNA, 370 bp, Homo sapiens; identical to SEQ ID NO: 6164
  misc_feature 202, 309, 337, 338, 355: n = A,T,C or G

SEQ ID NO: 12443 - DNA, 429 bp, Homo sapiens; identical to SEQ ID NO: 6165
  misc_feature 130, 131, 135, 136, 150, 153, 154, 180, 192, 201, 204, 205,208, 211, 234, 245, 251, 301, 311, 332, 341, 346, 353, 354,365, 384, 386, 387, 388, 406, 413, 414, 422: n = A,T,C or G

SEQ ID NO: 12444 - DNA, 694 bp, Homo sapiens; identical to SEQ ID NO: 6166
  misc_feature 512, 542, 578, 642, 654, 665: n = A,T,C or G

SEQ ID NO: 12445 - DNA, 499 bp, Homo sapiens; identical to SEQ ID NO: 6167

SEQ ID NO: 12446 - DNA, 303 bp, Homo sapiens; identical to SEQ ID NO: 6168

SEQ ID NO: 12447 - DNA, 682 bp, Homo sapiens; identical to SEQ ID NO: 6169
  misc_feature 23, 31, 44, 47, 56, 65, 66, 75, 85, 99, 102, 104, 121, 144,167, 237, 299, 302, 313, 326, 340, 415, 476, 493, 510, 524,529, 536, 558, 564, 572, 590, 597, 622, 660, 663: n = A,T,C or G

SEQ ID NO: 12448 - DNA, 330 bp, Homo sapiens; identical to SEQ ID NO: 6170

SEQ ID NO: 12449 - DNA, 639 bp, Homo sapiens; identical to SEQ ID NO: 6171
  misc_feature 37, 127, 128, 129, 130, 159, 172, 181, 182, 187, 188, 190,217, 218, 219, 228, 229, 230, 232, 233, 234, 239, 240, 253,272, 276, 299, 300, 307, 314, 323, 324, 325, 328, 330, 359,363, 364, 368, 383, 388, 423, 424, 428, 429, 430, 439: n = A,T,C or G
  misc_feature 444, 447, 452, 458, 463, 464, 470, 472, 474, 481, 482, 484,485, 494, 508, 512, 516, 530, 533, 535, 536, 544, 545, 548,553, 559, 564, 565, 567, 570, 571, 583, 587, 590, 597, 599,608, 610, 613, 614, 619, 623, 624, 634: n = A,T,C or G

SEQ ID NO: 12450 - DNA, 130 bp, Homo sapiens; identical to SEQ ID NO: 6172
  misc_feature 49, 52, 55, 58, 69, 71, 86, 121: n = A,T,C or G

SEQ ID NO: 12451 - DNA, 603 bp, Homo sapiens; identical to SEQ ID NO: 6173
  misc_feature 412, 423, 436, 474, 499, 507, 516, 518, 521, 523, 525, 531,534, 542, 544, 554, 555, 557, 560, 563, 565, 571, 574, 576,581, 584, 585, 586, 593: n = A,T,C or G

SEQ ID NO: 12452 - DNA, 277 bp, Homo sapiens; identical to SEQ ID NO: 6174
  misc_feature 97, 119, 120, 161, 179, 190, 193, 228, 268: n = A,T,C or G

SEQ ID NO: 12453 - DNA, 507 bp, Homo sapiens; identical to SEQ ID NO: 6175
  misc_feature 76, 429: n = A,T,C or G

SEQ ID NO: 12454 - DNA, 617 bp, Homo sapiens; identical to SEQ ID NO: 6176
  misc_feature 537, 592, 612: n = A,T,C or G

SEQ ID NO: 12455 - DNA, 316 bp, Homo sapiens; identical to SEQ ID NO: 6177

SEQ ID NO: 12456 - DNA, 209 bp, Homo sapiens; identical to SEQ ID NO: 6178

SEQ ID NO: 12457 - DNA, 209 bp, Homo sapiens; identical to SEQ ID NO: 6179
  misc_feature 42, 46, 59, 61: n = A,T,C or G

SEQ ID NO: 12458 - DNA, 469 bp, Homo sapiens; identical to SEQ ID NO: 6180
  misc_feature 46, 63, 84, 391, 439: n = A,T,C or G

SEQ ID NO: 12459 - DNA, 491 bp, Homo sapiens; identical to SEQ ID NO: 6181
  misc_feature 102, 130, 134, 137, 141, 162, 163, 167, 172, 173, 181, 184,191, 195, 201, 221, 225, 248, 290, 301, 306, 325, 330, 347,364, 379, 381, 394, 402, 411, 423, 429, 444, 446, 448, 452,457, 471: n = A,T,C or G

SEQ ID NO: 12460 - DNA, 802 bp, Homo sapiens; identical to SEQ ID NO: 6182
  misc_feature 211, 358, 567, 568, 616, 634, 637, 639, 644, 648, 651, 655,660, 666, 669, 672, 673, 683, 689, 696, 705, 712, 729, 732,742, 751, 758, 766, 770, 772, 777, 778, 780, 783: n = A,T,C or G

SEQ ID NO: 12461 - DNA, 761 bp, Homo sapiens; identical to SEQ ID NO: 6183
  misc_feature 441, 460, 488, 544, 550, 618, 633, 671, 717, 724, 732, 736,743, 744, 745, 751, 761: n = A,T,C or G

SEQ ID NO: 12462 - DNA, 184 bp, Homo sapiens; identical to SEQ ID NO: 6184
  misc_feature 81, 152, 154: n = A,T,C or G

SEQ ID NO: 12463 - DNA, 544 bp, Homo sapiens; identical to SEQ ID NO: 6185
  misc_feature 65, 69, 77, 80, 96, 97, 100, 103, 105, 117, 118, 138, 143,150, 155, 160, 161, 162, 170, 171, 172, 173, 178, 181, 185,214, 223, 225, 230, 232, 234, 237, 241, 245, 249, 252, 255,257, 258, 264, 267, 268, 269, 270, 271, 274, 276, 277: n = A,T,C or G
  misc_feature 279, 282, 291, 302, 313, 315, 323, 326, 327, 340, 345, 355,362, 363, 370, 383, 385, 387, 392, 400, 403, 412, 414, 416,424, 426, 431, 440, 442, 449, 478, 479, 494, 501, 505, 520: n = A,T,C or G

SEQ ID NO: 12464 - DNA, 575 bp, Homo sapiens; identical to SEQ ID NO: 6186
  misc_feature 473, 497, 547, 573: n = A,T,C or G

SEQ ID NO: 12465 - DNA, 575 bp, Homo sapiens; identical to SEQ ID NO: 6187
  misc_feature 221, 553: n = A,T,C or G

SEQ ID NO: 12466 - DNA, 666 bp, Homo sapiens; identical to SEQ ID NO: 6188
  misc_feature 369, 385, 410, 428, 431, 436, 441, 450, 459, 515, 583, 605,617, 648, 658: n = A,T,C or G

SEQ ID NO: 12467 - DNA, 387 bp, Homo sapiens; identical to SEQ ID NO: 6189

SEQ ID NO: 12468 - DNA, 304 bp, Homo sapiens; identical to SEQ ID NO: 6190
  misc_feature 44, 94: n = A,T,C or G

SEQ ID NO: 12469 - DNA, 216 bp, Homo sapiens; identical to SEQ ID NO: 6191
  misc_feature 27, 130, 164, 187, 196: n = A,T,C or G

SEQ ID NO: 12470 - DNA, 102 bp, Homo sapiens; identical to SEQ ID NO: 6192
  misc_feature 28: n = A,T,C or G

SEQ ID NO: 12471 - DNA, 632 bp, Homo sapiens; identical to SEQ ID NO: 6193
  misc_feature 36, 190, 262, 270, 317, 371, 427, 504, 525, 561, 571, 594,597, 598, 603, 615: n = A,T,C or G

SEQ ID NO: 12472 - DNA, 268 bp, Homo sapiens; identical to SEQ ID NO: 6194

SEQ ID NO: 12473 - DNA, 274 bp, Homo sapiens; identical to SEQ ID NO: 6195
  misc_feature 25, 31, 51, 195, 233: n = A,T,C or G

SEQ ID NO: 12474 - DNA, 704 bp, Homo sapiens; identical to SEQ ID NO: 6196
  misc_feature 667, 694: n = A,T,C or G

SEQ ID NO: 12475 - DNA, 472 bp, Homo sapiens; identical to SEQ ID NO: 6197

SEQ ID NO: 12476 - DNA, 314 bp, Homo sapiens; identical to SEQ ID NO: 6198
  misc_feature 44, 81, 82, 98, 104, 106, 109, 112, 127, 130, 131, 133, 136,141, 147, 153, 159, 182, 183, 192, 193, 203, 211, 212, 213,214, 215, 216, 220, 221, 222, 228, 230, 231, 232, 233, 234,235, 236, 237, 238, 240, 241, 242, 243, 244, 245: n = A,T,C or G
  misc_feature 278, 287, 291, 292, 295, 297: n = A,T,C or G

SEQ ID NO: 12477 - DNA, 215 bp, Homo sapiens; identical to SEQ ID NO: 6199
  misc_feature 1, 26, 35, 37, 38, 98, 119, 130, 141, 155, 159, 180, 187: n = A,T,C or G

SEQ ID NO: 12478 - DNA, 179 bp, Homo sapiens; identical to SEQ ID NO: 6200
  misc_feature 33, 93, 94, 116, 121, 141, 154, 170: n = A,T,C or G

SEQ ID NO: 12479 - DNA, 254 bp, Homo sapiens; identical to SEQ ID NO: 6201

SEQ ID NO: 12480 - DNA, 149 bp, Homo sapiens; identical to SEQ ID NO: 6202
  misc_feature 45, 98, 128: n = A,T,C or G

SEQ ID NO: 12481 - DNA, 589 bp, Homo sapiens; identical to SEQ ID NO: 6203
  misc_feature 101, 118, 128, 130, 138, 164, 168, 202, 220, 224, 228, 235,243, 249, 255, 256, 260, 265, 267, 269, 285, 291, 298, 305,307, 317, 326, 341, 352, 353, 358, 377, 379, 383, 399, 411,416, 426, 428, 446, 450, 452, 453, 489, 518, 520, 526: n = A,T,C or G
  misc_feature 537, 547, 552, 556, 561, 562, 566, 572: n = A,T,C or G

SEQ ID NO: 12482 - DNA, 714 bp, Homo sapiens; identical to SEQ ID NO: 6204
  misc_feature 253, 322, 392, 402, 421, 422, 424, 426, 431, 432, 440, 441,453, 455, 470, 476, 478, 482, 497, 532, 546, 547, 552, 561,576, 582, 587, 594, 597, 599, 602, 610, 611, 616, 619, 633,634, 640, 642, 644, 652, 662, 676, 678, 681, 694, 695: n = A,T,C or G
  misc_feature 705: n = A,T,C or G

SEQ ID NO: 12483 - DNA, 158 bp, Homo sapiens; identical to SEQ ID NO: 6205
  misc_feature 35, 38, 51, 57, 59, 76, 87, 89, 91, 93, 101, 102, 104, 126,136: n = A,T,C or G

SEQ ID NO: 12484 - DNA, 356 bp, Homo sapiens; identical to SEQ ID NO: 6206
  misc_feature 170, 196, 219, 252, 254, 259, 264, 269, 275, 283, 285, 286,293, 296, 301, 309, 317, 343: n = A,T,C or G

SEQ ID NO: 12485 - DNA, 648 bp, Homo sapiens; identical to SEQ ID NO: 6207
  misc_feature 199, 243, 256, 408, 428, 471, 482, 491, 506, 518, 533, 557,573, 584, 592, 595, 598, 610, 618, 620, 627, 629: n = A,T,C or G

SEQ ID NO: 12486 - DNA, 500 bp, Homo sapiens; identical to SEQ ID NO: 6208
  misc_feature 260, 327: n = A,T,C or G

SEQ ID NO: 12487 - DNA, 275 bp, Homo sapiens; identical to SEQ ID NO: 6209

SEQ ID NO: 12488 - DNA, 349 bp, Homo sapiens; identical to SEQ ID NO: 6210

SEQ ID NO: 12489 - DNA, 621 bp, Homo sapiens; identical to SEQ ID NO: 6211
  misc_feature 482, 516, 543, 550, 589, 592, 595, 607: n = A,T,C or G

SEQ ID NO: 12490 - DNA, 188 bp, Homo sapiens; identical to SEQ ID NO: 6212
  misc_feature 15, 23, 69, 71, 75, 91, 103, 119, 122, 127, 156, 158, 162,179: n = A,T,C or G

SEQ ID NO: 12491 - DNA, 396 bp, Homo sapiens; identical to SEQ ID NO: 6213
  misc_feature 53, 60, 125, 126, 140, 144, 156, 158, 180, 183, 190, 250,318, 326, 336, 339, 363, 377: n = A,T,C or G

SEQ ID NO: 12492 - DNA, 614 bp, Homo sapiens; identical to SEQ ID NO: 6214
  misc_feature 571, 590, 597, 606, 609: n = A,T,C or G

SEQ ID NO: 12493 - DNA, 153 bp, Homo sapiens; identical to SEQ ID NO: 6215
  misc_feature 70, 71, 72, 74, 75, 90: n = A,T,C or G

SEQ ID NO: 12494 - DNA, 473 bp, Homo sapiens; identical to SEQ ID NO: 6216

SEQ ID NO: 12495 - DNA, 404 bp, Homo sapiens; identical to SEQ ID NO: 6217
  misc_feature 335: n = A,T,C or G

SEQ ID NO: 12496 - DNA, 289 bp, Homo sapiens; identical to SEQ ID NO: 6218
  misc_feature 1, 45, 79, 115, 146, 190, 196, 217, 228, 235, 245, 246, 256,289: n = A,T,C or G

SEQ ID NO: 12497 - DNA, 747 bp, Homo sapiens; identical to SEQ ID NO: 6219
  misc_feature 52, 201, 211, 215, 272, 283, 330, 335, 340, 351, 367, 371,372, 390, 394, 405, 412, 422, 430, 440, 448, 450, 453, 455,459, 460, 466, 470, 478, 481, 489, 522, 523, 524, 530, 531,537, 554, 567, 569, 579, 582, 586, 600, 612, 616, 631: n = A,T,C or G
  misc_feature 633, 650, 664, 669, 683, 685, 690, 692, 697, 701, 705, 713,717, 718, 737: n = A,T,C or G

SEQ ID NO: 12498 - DNA, 430 bp, Homo sapiens; identical to SEQ ID NO: 6220
  misc_feature 1, 32, 86, 131, 132, 160, 161, 165, 172, 180, 198, 222, 240,307, 310, 327, 329, 331, 332, 335, 349, 383, 385: n = A,T,C or G

SEQ ID NO: 12499 - DNA, 334 bp, Homo sapiens; identical to SEQ ID NO: 6221
  misc_feature 219, 249, 255: n = A,T,C or G

SEQ ID NO: 12500 - DNA, 314 bp, Homo sapiens; identical to SEQ ID NO: 6222
  misc_feature 50, 51, 75, 136, 164, 182, 197, 217, 257: n = A,T,C or G

SEQ ID NO: 12501 - DNA, 172 bp, Homo sapiens; identical to SEQ ID NO: 6223
  misc_feature 53, 94, 99, 102, 123, 128, 147, 160: n = A,T,C or G

SEQ ID NO: 12502 - DNA, 353 bp, Homo sapiens; identical to SEQ ID NO: 6224

SEQ ID NO: 12503 - DNA, 188 bp, Homo sapiens; identical to SEQ ID NO: 6225
  misc_feature 99, 101, 105, 111, 118, 135, 164: n = A,T,C or G

SEQ ID NO: 12504 - DNA, 756 bp, Homo sapiens; identical to SEQ ID NO: 6226
  misc_feature 148, 150, 151, 157, 160, 174, 191, 199, 203, 205, 207, 215,216, 221, 222, 223, 224, 225, 227, 236, 242, 252, 255, 257,261, 262, 265, 272, 273, 275, 278, 298, 306, 314, 321, 331,334, 338, 340, 341, 342, 349, 364, 376, 380, 398, 407: n = A,T,C or G
  misc_feature 432, 436, 437, 441, 454, 472, 481, 483, 484, 491, 492, 493,494, 504, 509, 516, 517, 527, 536, 544, 545, 548, 549, 550,551, 561, 570, 571, 572, 573, 579, 593, 605, 609, 610, 611,612, 619, 620, 621, 631, 634, 643, 644, 647, 669, 670: n = A,T,C or G
  misc_feature 671, 675, 676, 684, 686, 689, 690, 709, 715, 716, 729, 733,740, 741, 742, 744: n = A,T,C or G

SEQ ID NO: 12505 - DNA, 348 bp, Homo sapiens; identical to SEQ ID NO: 6227

SEQ ID NO: 12506 - DNA, 197 bp, Homo sapiens; identical to SEQ ID NO: 6228

SEQ ID NO: 12507 - DNA, 328 bp, Homo sapiens; identical to SEQ ID NO: 6229

SEQ ID NO: 12508 - DNA, 359 bp, Homo sapiens; identical to SEQ ID NO: 6230
  misc_feature 97, 98, 99, 100, 119, 120, 126, 127, 128, 129, 136, 146,157, 158, 162, 163, 171, 172, 173, 174, 178, 183, 184, 189,193, 196, 199, 200, 208, 213, 214, 215, 217, 218, 222, 223,230, 231, 232, 246, 249, 254, 257, 262, 263, 266, 271: n = A,T,C or G
  misc_feature 281, 282, 285, 286, 287, 288, 294, 295, 296, 307, 308, 315,324, 325, 326, 327, 328, 329, 332, 335, 347: n = A,T,C or G

SEQ ID NO: 12509 - DNA, 235 bp, Homo sapiens; identical to SEQ ID NO: 6231

SEQ ID NO: 12510 - DNA, 746 bp, Homo sapiens; identical to SEQ ID NO: 6232
  misc_feature 19, 22, 38, 104, 113, 124, 128, 165, 177, 268, 318, 325,335, 337, 339, 343, 344, 347, 354, 361, 369, 371, 379, 380,386, 399, 415, 424, 425, 426, 434, 440, 441, 454, 458, 462,473, 479, 483, 492, 500, 501, 511, 512, 514, 517, 530: n = A,T,C or G
  misc_feature 541, 543, 545, 546, 553, 563, 577, 578, 585, 595, 639, 645,646, 652, 660, 663, 668, 700, 727, 735, 737: n = A,T,C or G

SEQ ID NO: 12511 - DNA, 392 bp, Homo sapiens; identical to SEQ ID NO: 6233
  misc_feature 298, 353, 359: n = A,T,C or G

SEQ ID NO: 12512 - DNA, 423 bp, Homo sapiens; identical to SEQ ID NO: 6234

SEQ ID NO: 12513 - DNA, 715 bp, Homo sapiens; identical to SEQ ID NO: 6235
  misc_feature 271, 282, 295, 296, 298, 448, 494, 570, 588, 591, 602, 609,666, 669, 691, 701: n = A,T,C or G

SEQ ID NO: 12514 - DNA, 365 bp, Homo sapiens; identical to SEQ ID NO: 6236
  misc_feature 3, 35, 61, 83, 114, 164, 165, 175, 179, 182, 193, 201, 218,278, 280, 304, 316: n = A,T,C or G

SEQ ID NO: 12515 - DNA, 321 bp, Homo sapiens; identical to SEQ ID NO: 6237

SEQ ID NO: 12516 - DNA, 398 bp, Homo sapiens; identical to SEQ ID NO: 6238
  misc_feature 25, 47, 117, 136, 366: n = A,T,C or G

SEQ ID NO: 12517 - DNA, 394 bp, Homo sapiens; identical to SEQ ID NO: 6239
  misc_feature 1, 6, 20, 29: n = A,T,C or G

SEQ ID NO: 12518 - DNA, 349 bp, Homo sapiens; identical to SEQ ID NO: 6240
  misc_feature 120, 280, 299: n = A,T,C or G

SEQ ID NO: 12519 - DNA, 378 bp, Homo sapiens; identical to SEQ ID NO: 6241
  misc_feature 31, 121, 153, 154: n = A,T,C or G

SEQ ID NO: 12520 - DNA, 386 bp, Homo sapiens; identical to SEQ ID NO: 6242
  misc_feature 247, 274, 350, 359: n = A,T,C or G

SEQ ID NO: 12521 - DNA, 171 bp, Homo sapiens; identical to SEQ ID NO: 6243

SEQ ID NO: 12522 - DNA, 355 bp, Homo sapiens; identical to SEQ ID NO: 6244

SEQ ID NO: 12523 - DNA, 510 bp, Homo sapiens; identical to SEQ ID NO: 6245
  misc_feature 136, 137, 150, 163, 164, 167, 171, 176, 177, 186, 194, 199,200, 201, 203, 204, 205, 216, 220, 237, 241, 244, 251, 254,260, 261, 262, 265, 266, 279, 291, 295, 297, 308, 315, 316,318, 319, 320, 324, 325, 326, 328, 331, 334, 335, 338: n = A,T,C or G
  misc_feature 339, 349, 355, 357, 358, 359, 362, 365, 367, 377, 386, 399,400, 401, 403, 416, 417, 436, 443, 449, 452, 455, 457, 458,487, 488, 489, 490, 491, 496, 499, 502: n = A,T,C or G

SEQ ID NO: 12524 - DNA, 151 bp, Homo sapiens; identical to SEQ ID NO: 6246
  misc_feature 104, 123: n = A,T,C or G

SEQ ID NO: 12525 - DNA, 295 bp, Homo sapiens; identical to SEQ ID NO: 6247
  misc_feature 15, 16, 48, 99, 151, 163, 167, 208, 225, 255, 256, 271, 277,287, 291: n = A,T,C or G

SEQ ID NO: 12526 - DNA, 410 bp, Homo sapiens; identical to SEQ ID NO: 6248
  misc_feature 25, 28, 31, 39, 41: n = A,T,C or G

SEQ ID NO: 12527 - DNA, 391 bp, Homo sapiens; identical to SEQ ID NO: 6249
  misc_feature 361, 380, 382: n = A,T,C or G

SEQ ID NO: 12528 - DNA, 446 bp, Homo sapiens; identical to SEQ ID NO: 6250
  misc_feature 305, 376, 406: n = A,T,C or G

SEQ ID NO: 12529 - DNA, 222 bp, Homo sapiens; identical to SEQ ID NO: 6251
  misc_feature 72, 79, 95, 121, 128, 143, 158, 187, 199, 211, 222: n = A,T,C or G

SEQ ID NO: 12530 - DNA, 160 bp, Homo sapiens; identical to SEQ ID NO: 6252
  misc_feature 29, 31, 87, 145, 146: n = A,T,C or G

SEQ ID NO: 12531 - DNA, 271 bp, Homo sapiens; identical to SEQ ID NO: 6253
  misc_feature 43, 46, 48, 77, 94, 98, 119, 160, 178, 207: n = A,T,C or G

SEQ ID NO: 12532 - DNA, 466 bp, Homo sapiens; identical to SEQ ID NO: 6254
  misc_feature 14, 35, 38, 41, 53, 55, 146, 173, 189, 212, 249, 256, 258,266, 279, 282, 289, 292, 298, 301, 311, 320, 321, 327, 332,334, 335, 339, 345, 351, 353, 377, 386, 402, 407, 415, 418,422: n = A,T,C or G

SEQ ID NO: 12533 - DNA, 562 bp, Homo sapiens; identical to SEQ ID NO: 6255
  misc_feature 125, 126, 127, 128, 129, 134, 135, 136, 150, 157, 163, 167,170, 171, 176, 177, 179, 183, 184, 187, 188, 189, 193, 196,199, 200, 205, 206, 207, 212, 213, 214, 215, 216, 217, 218,221, 223, 224, 229, 246, 249, 254, 257, 262, 263, 265: n = A,T,C or G
  misc_feature 279, 281, 283, 284, 289, 290, 293, 294, 295, 305, 306, 309,315, 316, 323, 325, 326, 327, 328, 330, 332, 335, 347, 351,369, 372, 378, 387, 395, 400, 401, 402, 404, 406, 407, 408,410, 412, 414, 420, 421, 422, 423, 425, 426, 429, 432: n = A,T,C or G
  misc_feature 434, 435, 441, 444, 450, 466, 467, 468, 471, 477, 478, 480,484, 487, 488, 501, 504, 505, 506, 508, 514, 515, 517, 533: n = A,T,C or G

SEQ ID NO: 12534 - DNA, 360 bp, Homo sapiens; identical to SEQ ID NO: 6256
  misc_feature 303: n = A,T,C or G

SEQ ID NO: 12535 - DNA, 398 bp, Homo sapiens; identical to SEQ ID NO: 6257

SEQ ID NO: 12536 - DNA, 600 bp, Homo sapiens; identical to SEQ ID NO: 6258
  misc_feature 32, 113, 150, 182, 216, 231, 241, 265, 386, 428, 454, 498: n = A,T,C or G

SEQ ID NO: 12537 - DNA, 150 bp, Homo sapiens; identical to SEQ ID NO: 6259
  misc_feature 122, 150: n = A,T,C or G

SEQ ID NO: 12538 - DNA, 214 bp, Homo sapiens; identical to SEQ ID NO: 6260

SEQ ID NO: 12539 - DNA, 303 bp, Homo sapiens; identical to SEQ ID NO: 6261
  misc_feature 250: n = A,T,C or G

SEQ ID NO: 12540 - DNA, 374 bp, Homo sapiens; identical to SEQ ID NO: 6262
  misc_feature 257, 258, 259, 260, 261, 262, 263, 264, 265, 266, 267, 268,269, 270, 271, 272, 273, 274, 275, 276, 277, 278, 279, 280,281, 282, 283, 284, 285, 286, 287, 288, 289, 290, 291, 292,293, 294, 295, 296, 297, 298, 299, 300, 301, 302, 303: n = A,T,C or G
  misc_feature 304, 305, 306, 307, 308, 309, 310, 311, 312, 313, 314, 315,316, 317, 318, 319, 320, 321, 322, 323, 343, 347, 351: n = A,T,C or G

SEQ ID NO: 12541 - DNA, 191 bp, Homo sapiens; identical to SEQ ID NO: 6263
  misc_feature 75, 104, 111, 171, 177, 178: n = A,T,C or G

SEQ ID NO: 12542 - DNA, 504 bp, Homo sapiens; identical to SEQ ID NO: 6264
  misc_feature 20, 32, 54, 109, 114, 117, 122, 124, 126, 132, 136, 139,140, 141, 145, 146, 147, 148, 156, 159, 168, 189, 198, 199,206, 212, 213, 214, 215, 216, 220, 222, 225, 229, 230, 236,237, 238, 240, 254, 261, 262, 273, 276, 279, 281, 284: n = A,T,C or G
  misc_feature 306, 320, 321, 324, 342, 345, 346, 348, 357, 358, 361, 362,366, 368, 381, 385, 400, 402, 405, 408, 425, 427, 429, 430,434, 435, 436, 440, 444, 448, 455, 458, 459, 460, 472, 482,484, 492: n = A,T,C or G

SEQ ID NO: 12543 - DNA, 200 bp, Homo sapiens; identical to SEQ ID NO: 6265
  misc_feature 63, 72, 130, 167: n = A,T,C or G

SEQ ID NO: 12544 - DNA, 272 bp, Homo sapiens; identical to SEQ ID NO: 6266

SEQ ID NO: 12545 - DNA, 347 bp, Homo sapiens; identical to SEQ ID NO: 6267
  misc_feature 86, 172, 213, 225, 243, 255, 257, 319, 323: n = A,T,C or G

SEQ ID NO: 12546 - DNA, 591 bp, Homo sapiens; identical to SEQ ID NO: 6268
  misc_feature 191, 290, 447, 490, 515, 560, 575: n = A,T,C or G

SEQ ID NO: 12547 - DNA, 338 bp, Homo sapiens; identical to SEQ ID NO: 6269

SEQ ID NO: 12548 - DNA, 254 bp, Homo sapiens; identical to SEQ ID NO: 6270
  misc_feature 224: n = A,T,C or G

SEQ ID NO: 12549 - DNA, 209 bp, Homo sapiens; identical to SEQ ID NO: 6271
  misc_feature 89, 105, 108, 168, 181: n = A,T,C or G

SEQ ID NO: 12550 - DNA, 165 bp, Homo sapiens; identical to SEQ ID NO: 6272
  misc_feature 84, 138: n = A,T,C or G

SEQ ID NO: 12551 - DNA, 337 bp, Homo sapiens; identical to SEQ ID NO: 6273
  misc_feature 17, 18, 19, 31, 35, 77, 304: n = A,T,C or G

SEQ ID NO: 12552 - DNA, 119 bp, Homo sapiens; identical to SEQ ID NO: 6274
  misc_feature 8, 74, 75, 81, 84, 89, 90, 111: n = A,T,C or G

SEQ ID NO: 12553 - DNA, 572 bp, Homo sapiens; identical to SEQ ID NO: 6275

SEQ ID NO: 12554 - DNA, 409 bp, Homo sapiens; identical to SEQ ID NO: 6276

SEQ ID NO: 12555 - DNA, 386 bp, Homo sapiens; identical to SEQ ID NO: 6277
  misc_feature 255, 330, 341: n = A,T,C or G

SEQ ID NO: 12556 - DNA, 392 bp, Homo sapiens; identical to SEQ ID NO: 6278
  misc_feature 13, 17, 22, 24, 26: n = A,T,C or G

SEQ ID NO: 12557 - DNA, 641 bp, Homo sapiens; identical to SEQ ID NO: 6279
  misc_feature 419, 467: n = A,T,C or G

SEQ ID NO: 12558 - DNA, 125 bp, Homo sapiens; identical to SEQ ID NO: 6280
  misc_feature 8, 24, 103, 104, 108, 109: n = A,T,C or G

SEQ ID NO: 12559 - DNA, 314 bp, Homo sapiens; identical to SEQ ID NO: 6281
  misc_feature 42, 273: n = A,T,C or G

SEQ ID NO: 12560 - DNA, 311 bp, Homo sapiens; identical to SEQ ID NO: 6282

SEQ ID NO: 12561 - DNA, 244 bp, Homo sapiens; identical to SEQ ID NO: 6283
  misc_feature 6, 26, 43, 57, 90, 115, 125, 126, 176, 182, 188, 192, 213,224, 232, 233: n = A,T,C or G

SEQ ID NO: 12562 - DNA, 410 bp, Homo sapiens; identical to SEQ ID NO: 6284
  misc_feature 122, 242, 248, 343, 372: n = A,T,C or G

SEQ ID NO: 12563 - DNA, 289 bp, Homo sapiens; identical to SEQ ID NO: 6285
  misc_feature 144, 148, 181, 193, 206, 219, 222, 230, 235, 236, 246, 268,272, 274: n = A,T,C or G

SEQ ID NO: 12564 - DNA, 520 bp, Homo sapiens; identical to SEQ ID NO: 6286
  misc_feature 410, 452, 495, 501: n = A,T,C or G

SEQ ID NO: 12565 - DNA, 244 bp, Homo sapiens; identical to SEQ ID NO: 6287
  misc_feature 17, 77, 78, 106, 124, 128, 223, 231: n = A,T,C or G

SEQ ID NO: 12566 - DNA, 290 bp, Homo sapiens; identical to SEQ ID NO: 6288
  misc_feature 60, 135: n = A,T,C or G

SEQ ID NO: 12567 - DNA, 338 bp, Homo sapiens; identical to SEQ ID NO: 6289
  misc_feature 331: n = A,T,C or G

SEQ ID NO: 12568 - DNA, 123 bp, Homo sapiens; identical to SEQ ID NO: 6290
  misc_feature 40, 51, 58, 61, 69, 94: n = A,T,C or G

SEQ ID NO: 12569 - DNA, 383 bp, Homo sapiens; identical to SEQ ID NO: 6291

SEQ ID NO: 12570 - DNA, 590 bp, Homo sapiens; identical to SEQ ID NO: 6292
  misc_feature 31, 61, 83, 136, 160, 170, 186, 190, 195, 211, 244, 275,284, 290, 323, 332, 347, 355, 363, 422, 425, 438, 497, 510,535, 546, 566, 579: n = A,T,C or G

SEQ ID NO: 12571 - DNA, 186 bp, Homo sapiens; identical to SEQ ID NO: 6293
  misc_feature 118, 119, 120, 121, 122, 123, 129, 130, 131, 135, 170: n = A,T,C or G

SEQ ID NO: 12572 - DNA, 266 bp, Homo sapiens; identical to SEQ ID NO: 6294
  misc_feature 212: n = A,T,C or G

SEQ ID NO: 12573 - DNA, 388 bp, Homo sapiens; identical to SEQ ID NO: 6295
  misc_feature 286, 310, 311, 312: n = A,T,C or G

SEQ ID NO: 12574 - DNA, 616 bp, Homo sapiens; identical to SEQ ID NO: 6296
  misc_feature 47, 251, 272, 304, 335, 385, 406, 423, 453, 484, 497, 523,540, 554, 578, 581, 582, 590, 594, 598, 604, 608: n = A,T,C or G

SEQ ID NO: 12575 - DNA, 798 bp, Homo sapiens; identical to SEQ ID NO: 6297
  misc_feature 235, 357, 377, 480, 486, 490, 496, 501, 506, 507, 511, 524,530, 545, 555, 570, 572, 573, 576, 588, 589, 598, 599, 603,605, 621, 637, 639, 651, 652, 654, 655, 662, 664, 667, 668,671, 673, 678, 680, 683, 686, 688, 690, 694, 695, 697: n = A,T,C or G
  misc_feature 698, 700, 702, 707, 711, 712, 715, 718, 722, 724, 725, 728,731, 732, 734, 741, 744, 745, 747, 748, 749, 752, 753, 754,755, 768, 769, 771, 773, 774, 783, 786, 789, 791: n = A,T,C or G

SEQ ID NO: 12576 - DNA, 463 bp, Homo sapiens; identical to SEQ ID NO: 6298
  misc_feature 36, 37: n = A,T,C or G

SEQ ID NO: 12577 - DNA, 353 bp, Homo sapiens; identical to SEQ ID NO: 6299
  misc_feature 88, 91, 95, 96, 262, 281, 332, 337: n = A,T,C or G

SEQ ID NO: 12578 - DNA, 191 bp, Homo sapiens; identical to SEQ ID NO: 6300
  misc_feature 158: n = A,T,C or G

SEQ ID NO: 12579 - DNA, 320 bp, Homo sapiens; identical to SEQ ID NO: 6301

SEQ ID NO: 12580 - DNA, 358 bp, Homo sapiens; identical to SEQ ID NO: 6302
  misc_feature 114, 115, 119, 146, 155, 158, 160, 162, 163, 167, 172, 173,175, 183, 184, 188, 189, 200, 202, 204, 208, 214, 222, 230,236, 242, 244, 245, 248, 250, 253, 254, 257, 261, 262, 264,267, 276, 277, 280, 284, 289, 293, 294, 304, 305, 313: n = A,T,C or G
  misc_feature 314, 316, 317, 318, 331, 332, 333, 337, 338, 341, 345: n = A,T,C or G

SEQ ID NO: 12581 - DNA, 343 bp, Homo sapiens; identical to SEQ ID NO: 6303
  misc_feature 14, 17, 73, 79, 80, 81, 84, 90, 114, 123, 191, 206, 244,245, 256, 258, 276, 280, 285, 286, 287, 288, 289, 290, 291,292, 293, 294, 295, 296, 298, 299, 300, 302, 303, 304, 305,306, 307, 308, 309, 310, 312, 315, 316, 317, 318, 319: n = A,T,C or G
  misc_feature 320, 321, 322, 323, 324, 325, 326, 327, 328, 330: n = A,T,C or G

SEQ ID NO: 12582 - DNA, 292 bp, Homo sapiens; identical to SEQ ID NO: 6304
  misc_feature 47, 68, 69, 70, 92, 93, 99, 100, 101, 103, 110, 111, 113,118, 119, 120, 121, 123, 124, 125, 126, 127, 129, 130, 131,132, 133, 134, 142, 144, 166, 167, 178, 188, 199, 200, 203,209, 210, 216, 218, 219, 234, 254, 261, 272, 273, 276: n = A,T,C or G
  misc_feature 277, 278: n = A,T,C or G

SEQ ID NO: 12583 - DNA, 426 bp, Homo sapiens; identical to SEQ ID NO: 6305
  misc_feature 406, 418: n = A,T,C or G

SEQ ID NO: 12584 - DNA, 279 bp, Homo sapiens; identical to SEQ ID NO: 6306
  misc_feature 131, 132, 147, 152, 155, 158, 164, 177, 181, 182, 183, 186,192, 193, 203, 206, 209, 211, 219, 220, 221, 224, 230, 231,237, 238, 239, 241, 250, 254, 256, 258, 267, 268, 276: n = A,T,C or G

SEQ ID NO: 12585 - DNA, 467 bp, Homo sapiens; identical to SEQ ID NO: 6307
  misc_feature 34, 109, 122, 146, 190, 195, 238, 253, 296, 317, 333, 343,375, 387, 393, 404: n = A,T,C or G

SEQ ID NO: 12586 - DNA, 290 bp, Homo sapiens; identical to SEQ ID NO: 6308

SEQ ID NO: 12587 - DNA, 299 bp, Homo sapiens; identical to SEQ ID NO: 6309
  misc_feature 24, 49: n = A,T,C or G

SEQ ID NO: 12588 - DNA, 287 bp, Homo sapiens; identical to SEQ ID NO: 6310
  misc_feature 246: n = A,T,C or G

SEQ ID NO: 12589 - DNA, 388 bp, Homo sapiens; identical to SEQ ID NO: 6311

SEQ ID NO: 12590 - DNA, 447 bp, Homo sapiens; identical to SEQ ID NO: 6312
  misc_feature 164, 174: n = A,T,C or G

SEQ ID NO: 12591 - DNA, 273 bp, Homo sapiens; identical to SEQ ID NO: 6313
  misc_feature 69, 71, 121, 122, 123, 125, 126, 131, 132, 136, 138, 142,151, 154, 155, 156, 157, 163, 165, 169, 170, 171, 175, 178,179, 180, 185, 189, 191, 194, 196, 198, 199, 200, 206, 217,220, 223, 224, 229, 230, 237, 244, 248, 249, 252, 255: n = A,T,C or G
  misc_feature 262: n = A,T,C or G

SEQ ID NO: 12592 - DNA, 159 bp, Homo sapiens; identical to SEQ ID NO: 6314
  misc_feature 32, 43, 55, 56, 61, 86, 107, 111, 115, 122, 143: n = A,T,C or G

SEQ ID NO: 12593 - DNA, 320 bp, Homo sapiens; identical to SEQ ID NO: 6315
  misc_feature 320: n = A,T,C or G

SEQ ID NO: 12594 - DNA, 352 bp, Homo sapiens; identical to SEQ ID NO: 6316
  misc_feature 105, 107, 109, 111, 112, 137, 141, 146, 148, 150, 152, 163,164, 165, 169, 172, 175, 181, 184, 186, 194, 196, 200, 209,220, 236, 241, 245, 246, 256, 258, 259, 264, 266, 274, 275,278, 281, 294, 295, 305, 306, 307, 310, 318, 320, 329: n = A,T,C or G
  misc_feature 342: n = A,T,C or G

SEQ ID NO: 12595 - DNA, 278 bp, Homo sapiens; identical to SEQ ID NO: 6317
  misc_feature 216, 237, 239, 242, 260, 262: n = A,T,C or G

SEQ ID NO: 12596 - DNA, 473 bp, Homo sapiens; identical to SEQ ID NO: 6318
  misc_feature 127, 134, 136, 138, 139, 145, 152, 155, 157, 159, 165, 166,167, 168, 169, 175, 177, 182, 187, 188, 192, 194, 197, 198,201, 204, 205, 209, 210, 212, 215, 229, 230, 233, 234, 235,243, 249, 251, 256, 257, 261, 266, 271, 275, 277, 278: n = A,T,C or G
  misc_feature 282, 284, 287, 288, 295, 298, 299, 301, 302, 306, 310, 326,333, 335, 336, 337, 353, 354, 359, 361, 362, 369, 371, 381,386, 399, 406, 426, 427, 428, 429, 430, 431, 442, 445, 446,450, 457, 460: n = A,T,C or G

SEQ ID NO: 12597 - DNA, 352 bp, Homo sapiens; identical to SEQ ID NO: 6319

SEQ ID NO: 12598 - DNA, 535 bp, Homo sapiens; identical to SEQ ID NO: 6320

SEQ ID NO: 12599 - DNA, 342 bp, Homo sapiens; identical to SEQ ID NO: 6321
  misc_feature 8, 9, 21, 23, 339: n = A,T,C or G

SEQ ID NO: 12600 - DNA, 364 bp, Homo sapiens; identical to SEQ ID NO: 6322
  misc_feature 94, 140, 141, 143, 145, 146, 147, 160, 162, 165, 166, 168,169, 201, 202, 205, 209, 217, 231, 236, 237, 238, 241, 242,243, 244, 251, 255, 256, 258, 267, 268, 269, 270, 271, 275,277, 281, 289, 298, 303, 322, 325, 326, 327, 334, 335: n = A,T,C or G
  misc_feature 359: n = A,T,C or G

SEQ ID NO: 12601 - DNA, 329 bp, Homo sapiens; identical to SEQ ID NO: 6323
  misc_feature 7, 14, 23, 36, 73, 108, 144, 154, 189, 207, 213, 215, 223,246, 260, 277, 278, 280, 282, 290, 294, 296, 305, 307: n = A,T,C or G

SEQ ID NO: 12602 - DNA, 426 bp, Homo sapiens; identical to SEQ ID NO: 6324

SEQ ID NO: 12603 - DNA, 399 bp, Homo sapiens; identical to SEQ ID NO: 6325
  misc_feature 54, 346, 389: n = A,T,C or G

SEQ ID NO: 12604 - DNA, 655 bp, Homo sapiens; identical to SEQ ID NO: 6326
  misc_feature 151, 240, 264, 279, 304, 366, 435, 443, 450, 510, 635: n = A,T,C or G

SEQ ID NO: 12605 - DNA, 295 bp, Homo sapiens; identical to SEQ ID NO: 6327
  misc_feature 151: n = A,T,C or G

SEQ ID NO: 12606 - DNA, 540 bp, Homo sapiens; identical to SEQ ID NO: 6328
  misc_feature 321, 480, 521: n = A,T,C or G

SEQ ID NO: 12607 - DNA, 110 bp, Homo sapiens; identical to SEQ ID NO: 6329
  misc_feature 7, 48: n = A,T,C or G

SEQ ID NO: 12608 - DNA, 407 bp, Homo sapiens; identical to SEQ ID NO: 6330
  misc_feature 9, 11, 13, 16, 18, 25, 26, 29, 35, 38, 39, 107, 363: n = A,T,C or G

SEQ ID NO: 12609 - DNA, 187 bp, Homo sapiens; identical to SEQ ID NO: 6331
  misc_feature 94, 148: n = A,T,C or G

SEQ ID NO: 12610 - DNA, 289 bp, Homo sapiens; identical to SEQ ID NO: 6332
  misc_feature 30, 33, 48, 53, 69, 81, 89, 97, 98, 105, 108, 117, 167, 171,177, 184, 185, 205, 215, 216, 245: n = A,T,C or G

SEQ ID NO: 12611 - DNA, 326 bp, Homo sapiens; identical to SEQ ID NO: 6333
  misc_feature 172, 207, 256, 308, 309: n = A,T,C or G

SEQ ID NO: 12612 - DNA, 426 bp, Homo sapiens; identical to SEQ ID NO: 6334

SEQ ID NO: 12613 - DNA, 631 bp, Homo sapiens; identical to SEQ ID NO: 6335
  misc_feature 32, 52, 57, 66, 68, 73, 74, 75, 76, 85, 89, 95, 101, 102,103, 109, 131, 132, 135, 138, 142, 147, 160, 179, 209, 220,226, 244, 290, 301, 310, 330, 333, 393, 434, 445, 465, 472,479, 487, 491, 502, 520, 528, 529, 537, 553, 568, 592: n = A,T,C or G
  misc_feature 593, 600, 602, 631: n = A,T,C or G

SEQ ID NO: 12614 - DNA, 375 bp, Homo sapiens; identical to SEQ ID NO: 6336
  misc_feature 13, 16, 18, 21, 25, 89, 92, 106, 117, 154, 187, 192, 242,244, 259, 270, 283, 285, 297, 298, 301, 311, 315, 318, 342,358: n = A,T,C or G

SEQ ID NO: 12615 - DNA, 169 bp, Homo sapiens; identical to SEQ ID NO: 6337
  misc_feature 56, 69, 97, 98, 123, 128, 131, 132, 142, 160: n = A,T,C or G

SEQ ID NO: 12616 - DNA, 599 bp, Homo sapiens; identical to SEQ ID NO: 6338
  misc_feature 502: n = A,T,C or G

SEQ ID NO: 12617 - DNA, 230 bp, Homo sapiens; identical to SEQ ID NO: 6339
  misc_feature 1, 16, 89, 98, 101, 129, 140, 147, 167, 185, 190, 195, 212: n = A,T,C or G

SEQ ID NO: 12618 - DNA, 178 bp, Homo sapiens; identical to SEQ ID NO: 6340
  misc_feature 107, 145: n = A,T,C or G

SEQ ID NO: 12619 - DNA, 282 bp, Homo sapiens; identical to SEQ ID NO: 6341

SEQ ID NO: 12620 - DNA, 487 bp, Homo sapiens; identical to SEQ ID NO: 6342
  misc_feature 186, 202, 203, 247, 249: n = A,T,C or G

SEQ ID NO: 12621 - DNA, 317 bp, Homo sapiens; identical to SEQ ID NO: 6343

SEQ ID NO: 12622 - DNA, 456 bp, Homo sapiens; identical to SEQ ID NO: 6344
  misc_feature 223, 410: n = A,T,C or G

SEQ ID NO: 12623 - DNA, 258 bp, Homo sapiens; identical to SEQ ID NO: 6345
  misc_feature 29, 31, 62, 63, 66, 71, 79, 85, 104, 108, 117, 134, 143,204, 224: n = A,T,C or G

SEQ ID NO: 12624 - DNA, 743 bp, Homo sapiens; identical to SEQ ID NO: 6346
  misc_feature 112, 115, 125, 126, 128, 140, 145, 146, 152, 153, 162, 168,170, 172, 174, 175, 180, 181, 183, 184, 185, 186, 188, 191,192, 195, 196, 197, 202, 208, 211, 216, 217, 220, 221, 222,230, 233, 236, 237, 238, 243, 244, 246, 249, 250, 261: n = A,T,C or G
  misc_feature 265, 268, 274, 278, 279, 284, 286, 289, 293, 294, 301, 302,303, 304, 312, 314, 324, 325, 326, 327, 328, 329, 336, 338,347, 349, 358, 364, 370, 374, 375, 382, 386, 389, 390, 392,402, 403, 405, 409, 421, 422, 426, 431, 433, 436, 437: n = A,T,C or G
  misc_feature 474, 475, 478, 497, 501, 503, 510, 519, 521, 524, 526, 530,535, 536, 539, 560, 564, 580, 589, 590, 591, 598, 600, 601,602, 607, 611, 612, 629, 640, 642, 648, 661, 662, 663, 671,685, 687, 690, 692, 694, 700, 705, 720, 721, 722, 731: n = A,T,C or G

SEQ ID NO: 12625 - DNA, 253 bp, Homo sapiens; identical to SEQ ID NO: 6347
  misc_feature 83, 232: n = A,T,C or G

SEQ ID NO: 12626 - DNA, 480 bp, Homo sapiens; identical to SEQ ID NO: 6348
  misc_feature 68, 82, 94, 100, 122, 128, 130, 132, 133, 134, 146, 151,158, 179, 188, 195, 205, 216, 221, 239, 248, 249, 257, 275,278, 285, 309, 313, 342, 343, 344, 346, 347, 350, 354, 355,356, 357, 370, 378, 382, 388, 392, 393, 394, 399, 402: n = A,T,C or G
  misc_feature 406, 408, 409, 411, 412, 413, 415, 416, 418, 440, 452, 453,457, 460, 464, 467, 468, 469: n = A,T,C or G

SEQ ID NO: 12627 - DNA, 533 bp, Homo sapiens; identical to SEQ ID NO: 6349
  misc_feature 9, 121, 128, 144, 148, 150, 151, 153, 154, 177, 190, 193,201, 218, 229, 233, 235, 237, 254, 255, 260, 266, 269, 270,273, 280, 281, 290, 299, 305, 313, 339, 341, 351, 417, 423,427, 428, 431, 433, 437, 454, 457, 467, 474, 476, 477: n = A,T,C or G
  misc_feature 490, 491, 494, 530: n = A,T,C or G

SEQ ID NO: 12628 - DNA, 355 bp, Homo sapiens; identical to SEQ ID NO: 6350
  misc_feature 329, 349: n = A,T,C or G

SEQ ID NO: 12629 - DNA, 335 bp, Homo sapiens; identical to SEQ ID NO: 6351

SEQ ID NO: 12630 - DNA, 221 bp, Homo sapiens; identical to SEQ ID NO: 6352
  misc_feature 26, 60, 164, 219: n = A,T,C or G

SEQ ID NO: 12631 - DNA, 232 bp, Homo sapiens; identical to SEQ ID NO: 6353
  misc_feature 5, 13, 42, 85, 105, 109, 146, 177, 184, 187, 223, 225, 232: n = A,T,C or G

SEQ ID NO: 12632 - DNA, 303 bp, Homo sapiens; identical to SEQ ID NO: 6354

SEQ ID NO: 12633 - DNA, 423 bp, Homo sapiens; identical to SEQ ID NO: 6355
  misc_feature 403: n = A,T,C or G

SEQ ID NO: 12634 - DNA, 691 bp, Homo sapiens; identical to SEQ ID NO: 6356
  misc_feature 25, 35, 37, 40, 42, 43, 249, 266, 399, 407, 414, 416, 417,424, 428, 459, 462, 475, 478, 490, 491, 503, 513, 514, 526,532, 534, 535, 542, 550, 557, 583, 584, 607, 612, 613, 619,628, 641, 645, 652, 653, 660, 673, 674, 676, 680, 681: n = A,T,C or G

SEQ ID NO: 12635 - DNA, 325 bp, Homo sapiens; identical to SEQ ID NO: 6357
  misc_feature 307: n = A,T,C or G

SEQ ID NO: 12636 - DNA, 497 bp, Homo sapiens; identical to SEQ ID NO: 6358
  misc_feature 434, 475, 493: n = A,T,C or G

SEQ ID NO: 12637 - DNA, 578 bp, Homo sapiens; identical to SEQ ID NO: 6359

SEQ ID NO: 12638 - DNA, 311 bp, Homo sapiens; identical to SEQ ID NO: 6360

SEQ ID NO: 12639 - DNA, 130 bp, Homo sapiens; identical to SEQ ID NO: 6361
  misc_feature 99: n = A,T,C or G

SEQ ID NO: 12640 - DNA, 419 bp, Homo sapiens; identical to SEQ ID NO: 6362
  misc_feature 317: n = A,T,C or G

SEQ ID NO: 12641 - DNA, 614 bp, Homo sapiens; identical to SEQ ID NO: 6363
  misc_feature 523, 555, 563, 565, 566, 570, 571, 572, 573, 574, 575, 576,577, 578, 579, 580, 581, 582, 583, 584, 585, 586, 587: n = A,T,C or G

SEQ ID NO: 12642 - DNA, 318 bp, Homo sapiens; identical to SEQ ID NO: 6364
  misc_feature 17, 137, 141, 236, 240, 274, 293, 304: n = A,T,C or G

SEQ ID NO: 12643 - DNA, 286 bp, Homo sapiens; identical to SEQ ID NO: 6365
  misc_feature 16, 26, 46, 49, 65, 78, 79, 80, 81, 82, 83, 84, 85, 86, 87,88, 89, 90, 91, 92, 93, 94, 95, 96, 97, 98, 99, 100, 101,102, 103, 104, 105, 106, 107, 108, 109, 110, 111, 112, 113,114, 115, 116, 117, 118, 119, 120, 121, 122, 123, 124: n = A,T,C or G
  misc_feature 203, 209, 241, 247: n = A,T,C or G

SEQ ID NO: 12644 - DNA, 303 bp, Homo sapiens; identical to SEQ ID NO: 6366
  misc_feature 297: n = A,T,C or G

SEQ ID NO: 12645 - DNA, 245 bp, Homo sapiens; identical to SEQ ID NO: 6367
  misc_feature 144, 172, 182: n = A,T,C or G

SEQ ID NO: 12646 - DNA, 360 bp, Homo sapiens; identical to SEQ ID NO: 6368
  misc_feature 310, 332, 350: n = A,T,C or G

SEQ ID NO: 12647 - DNA, 479 bp, Homo sapiens; identical to SEQ ID NO: 6369
  misc_feature 1, 285, 287, 288, 290, 291, 292, 293, 294, 296, 297, 301,309, 315, 348, 353, 412, 466: n = A,T,C or G

SEQ ID NO: 12648 - DNA, 116 bp, Homo sapiens; identical to SEQ ID NO: 6370
  misc_feature 25, 27, 29, 106: n = A,T,C or G

SEQ ID NO: 12649 - DNA, 197 bp, Homo sapiens; identical to SEQ ID NO: 6371

SEQ ID NO: 12650 - DNA, 543 bp, Homo sapiens; identical to SEQ ID NO: 6372
  misc_feature 452, 530, 534: n = A,T,C or G

SEQ ID NO: 12651 - DNA, 149 bp, Homo sapiens; identical to SEQ ID NO: 6373
  misc_feature 92: n = A,T,C or G

SEQ ID NO: 12652 - DNA, 312 bp, Homo sapiens; identical to SEQ ID NO: 6374
  misc_feature 27, 45, 273, 296, 297, 312: n = A,T,C or G

SEQ ID NO: 12653 - DNA, 316 bp, Homo sapiens; identical to SEQ ID NO: 6375
  misc_feature 8, 235, 238, 288: n = A,T,C or G

SEQ ID NO: 12654 - DNA, 549 bp, Homo sapiens; identical to SEQ ID NO: 6377
  misc_feature 529, 531: n = A,T,C or G

SEQ ID NO: 12655 - DNA, 657 bp, Homo sapiens; identical to SEQ ID NO: 6378
  misc_feature 537, 547, 575, 577, 607, 621: n = A,T,C or G

SEQ ID NO: 12656 - DNA, 175 bp, Homo sapiens; identical to SEQ ID NO: 6379

SEQ ID NO: 12657 - DNA, 482 bp, Homo sapiens; identical to SEQ ID NO: 6380

SEQ ID NO: 12658 - DNA, 265 bp, Homo sapiens; identical to SEQ ID NO: 6381
  misc_feature 15, 19, 21, 22, 24, 31, 37, 38, 54, 56, 79, 80, 81, 82, 83,84, 85, 86, 87, 88, 89, 90, 91, 92, 93, 94, 95, 96, 97,98, 99, 100, 101, 102, 103, 104, 105, 106, 107, 108, 109,110, 111, 112, 113, 114, 115, 116, 117, 118, 119, 120, 121: n = A,T,C or G
  misc_feature 122, 123, 124, 125, 204: n = A,T,C or G

SEQ ID NO: 12659 - DNA, 437 bp, Homo sapiens; identical to SEQ ID NO: 6382
  misc_feature 164, 185, 186, 187, 188, 189, 190, 191, 192, 193, 194, 195,196, 197, 198, 199, 200, 201, 202, 203, 204, 205, 206, 207,208, 209, 210, 211, 212, 213, 214, 215, 216, 257, 262, 292,404, 437: n = A,T,C or G

SEQ ID NO: 12660 - DNA, 228 bp, Homo sapiens; identical to SEQ ID NO: 6383
  misc_feature 2, 5, 23, 24, 33, 47, 48, 49, 70, 79, 80, 115, 127, 129,133, 152, 162, 170, 175, 179, 184, 198, 201, 214, 220: n = A,T,C or G

SEQ ID NO: 12661 - DNA, 664 bp, Homo sapiens; identical to SEQ ID NO: 6384
  misc_feature 58, 59, 60, 61, 90, 91, 92, 93, 94, 96, 101, 103, 109, 110,114, 125, 126, 128, 129, 133, 135, 137, 138, 139, 140, 141,142, 146, 147, 148, 149, 154, 155, 164, 169, 188, 196, 204,211, 215, 216, 217, 222, 233, 235, 236, 251, 252, 253: n = A,T,C or G
  misc_feature 255, 269, 282, 289, 296, 317, 321, 324, 328, 329, 330, 331,356, 363, 365, 370, 377, 389, 408, 419, 445, 451, 452, 453,455, 459, 463, 468, 484, 492, 493, 501, 503, 513, 514, 515,526, 538, 552, 568, 578, 589, 599, 605, 607, 609, 616: n = A,T,C or G
  misc_feature 617, 618, 619, 623, 626, 634, 644: n = A,T,C or G

SEQ ID NO: 12662 - DNA, 537 bp, Homo sapiens; identical to SEQ ID NO: 6385
  misc_feature 477, 501: n = A,T,C or G

SEQ ID NO: 12663 - DNA, 263 bp, Homo sapiens; identical to SEQ ID NO: 6386
  misc_feature 59: n = A,T,C or G

SEQ ID NO: 12664 - DNA, 182 bp, Homo sapiens; identical to SEQ ID NO: 6387

SEQ ID NO: 12665 - DNA, 348 bp, Homo sapiens; identical to SEQ ID NO: 6388
  misc_feature 57, 108, 115, 117, 122, 163, 169, 182, 229, 274, 285, 301: n = A,T,C or G

SEQ ID NO: 12666 - DNA, 318 bp, Homo sapiens; identical to SEQ ID NO: 6389
  misc_feature 121, 123, 124, 125, 126, 129, 134, 157, 158, 159, 160, 161,172, 179, 180, 183, 194, 205, 210, 211, 213, 216, 219, 220,225, 226, 227, 235, 241, 243, 248, 250, 267, 268, 272, 277,282, 287, 293, 302: n = A,T,C or G

SEQ ID NO: 12667 - DNA, 504 bp, Homo sapiens; identical to SEQ ID NO: 6390
  misc_feature 21, 375, 437: n = A,T,C or G

SEQ ID NO: 12668 - DNA, 558 bp, Homo sapiens; identical to SEQ ID NO: 6391
  misc_feature 370, 513: n = A,T,C or G

SEQ ID NO: 12669 - DNA, 219 bp, Homo sapiens; identical to SEQ ID NO: 6392

SEQ ID NO: 12670 - DNA, 205 bp, Homo sapiens; identical to SEQ ID NO: 6393
  misc_feature 1, 39, 50, 58, 66, 67, 71, 73, 83, 128, 150, 152, 185: n = A,T,C or G

SEQ ID NO: 12671 - DNA, 413 bp, Homo sapiens; identical to SEQ ID NO: 6394

SEQ ID NO: 12672 - DNA, 394 bp, Homo sapiens; identical to SEQ ID NO: 6395

SEQ ID NO: 12673 - DNA, 424 bp, Homo sapiens; identical to SEQ ID NO: 6396

SEQ ID NO: 12674 - DNA, 271 bp, Homo sapiens; identical to SEQ ID NO: 6397
  misc_feature 117, 236, 239, 253: n = A,T,C or G

SEQ ID NO: 12675 - DNA, 253 bp, Homo sapiens; identical to SEQ ID NO: 6398
  misc_feature 115, 136, 187: n = A,T,C or G

SEQ ID NO: 12676 - DNA, 480 bp, Homo sapiens
  misc_feature 15, 469: n = A,T,C or G
acgcgtccgcagaangctctcagatgggacagtcttttactttcattctcacctctgtaaatagcaggacaggttggggtgggcctgacttctattctgctttcagggggtacttactggaaaatcaacttaggaagtgaatttgagggttggtgtaattttaagcccagcctctgatccttggttgcacaaagcctaatttccaaatatttctaacagattcaagactgtattggcaaagaggtagagagctatgataatgacataaattacataaaaatccagttgaatgaataagaaggaatttgggcgtataacccatggaacaccaatggtgctaagaatttgccaaaccctcagcttcgtataagtcccaaagaactcaggcttatagcactaagcaaattaccagtgggaggaggaggacctgccacggagctggataattacatttaaatatttttgccantctgttggaga

SEQ ID NO: 12677 - DNA, 480 bp, Homo sapiens
  misc_feature 8, 407, 415, 422: n = A,T,C or G
agtcgccncgcgtccgtgtgtttctcctcggtccccaactctaccttccccaaccacagttcctgtccccagatgtcctgatgcccaccatggcaggggagcccaatagactcccaggaacttcaaggagtgtccagcagtttctggctatgtgtgacaggggtgaaacttcccaaggggccaagtacacaggaaggactttgaactaccagagcctcccccatcgctccagaacagacaactcctgggcaccctggtcagagaccaaccagcatattgggaccagattcctgactactccagggtgcaatcctcaactaacctacactgccacactaccagaaagaagcaagggccttcaggttcctcacactcagtcctggagtggatctttttcattcaccctnccaccctnccattgntcatcctgtgtacccaccatctaagcagtcttcatgtacccctgaggtcaagcttgga

SEQ ID NO: 12678 - DNA, 540 bp, Homo sapiens
  misc_feature 29: n = A,T,C or G
cacgcgtccgcaaaatagccccacatccnggcaaaaggggcctttcccttggcccagaagaaaaaggaacaagtggagtgcagaagaaaatctgtactgagagacttgggcctagcttgtcttccagtgagccaaccaaggctggtgctgtcccatccagtccctcgacgccagcaccacccagcgccaaacttgccgaggactcagctctgcagggtgtgccctctctggtggcaggtggaagtccacagactcttcagccggtatccagcagtcacgtggctaaagctcccagtctgaccttcgcttcccccgccagtcctgtctgcgcatcagacagcactctccatgggttagagagcaactctcccctttcaccactgtccgctaattatagctcacctttatgggctgcagagcacctctgccgcagcccagatatcttttcagagcagcggcagagcaaacataggcgctttcagaataccctagtagtcctacataaaatctgggttgctggagatcacttttgaaaaccaa

SEQ ID NO: 12679 - DNA, 480 bp, Homo sapiens
  misc_feature 462, 466: n = A,T,C or G
ccacgcgtccggtccggggtggaatcacgtcgctgcggctgccgacgacccacacccggccggccgcctccgcagacccaccttggccgcgcggcagggggcgcgcagagccccgagggagcgagtccccgcgcgtggcagctcggcggcttctcccttcgggaggtccggctcccggctctccggacccgcctggcgtcctcgcctgcggcggggcggacgacagcggcgcccaggaatggcttcggcgggcagcggcatggaggaggtgcgcgtgtcggtgctgacccccttgaagctggtcgggctggtgtgcatcttcctggcgctgtgtctggacctgggggcggtgctgagcccggcctgggtcacagctgaccaccagtactaccttgtcgttgtggggagtcctgccggaaacccgccagcttggacatctggcactgtcgagtccacgctcancaancgattggcagattg

SEQ ID NO: 12680 - DNA, 360 bp, Homo sapiens
  misc_feature 2, 31, 94, 95, 100, 102, 117, 236, 337: n = A,T,C or G
cncgcgtccgcggtcgcgtgggcggacgcgngggttcgtcctggacaagtctgggagtgtggcaaataactggattgaaatttataatttcggnnagcancngggcggagagattcngtgagccctgaaatgagattatctttcattgtgttttcttctcaagcaactattattttgccattaactggagacagaggcaaaatcagtcaaggcttggaggatttaaaacgtgttantccagtaggagagacatatatccatgaaggactaaagctagcgaatgaacaaattcagaaagcaggaggcttgaaaacctccagtatcataattgctctgncagattggcaagtttggacggtc

SEQ ID NO: 12681 - DNA, 300 bp, Homo sapiens
  misc_feature 287: n = A,T,C or G
ggccgaaaggggggcaggtggtcgggccgcgcaagcggagatggaatggggcccgggctcagactggtcacggggggaggctgccggcgtggaccgcgggaaggcggggctggggctcggcgggaggccacccccacagccgccccgggaggagcgcgcccagcagctgctggacgcggtggagcagcggcagcggcagctcctggacaccatcgcagcctgcgaggagatgttacggcagctgggccgccggcgcccggagccggctggtggcgggaacgtctcanccaaacctggagc

SEQ ID NO: 12682 - DNA, 420 bp, Homo sapiens
tttttccttagaatcttcgagaaaaagatgaaggtattattctcagtttcgagatcaggactcctcaccaccaggcgggggctttaaggtagacactacagggaatctgatctcagggtgatcctctcccttccacttgcaaaaagagaggagcaggtgggccactgctctctgagatgttaacacccctcacactccacgggcatgctttgtcattctgcacaccggtgtagctgcagctctgtgtgaattcagatctcaagagaaatgtaaatcaaaagtatgagtttctttctttcttgggtgccacagtaggaatgaaatgatggggacttttggaagcccctggacttgtggcccctgtagaagagcagcttgggcagggtgtgatggccatctctgtctctaggggccctgtgg

SEQ ID NO: 12683 - DNA, 420 bp, Homo sapiens
  misc_feature 210, 337, 359, 389, 400: n = A,T,C or G
tctcccccttcaccctccttttttttttttttttgttttttcttaaaagcatttagctgggtgcagtgacacatgcttgtaatcccagctattgaggaggctgaggtaggaggattgcttgagtccaggaatttgaggccagcctggggaacatagcaagagcctatcttaaaaaaaaaaaaaaaagcatttcaattattttaaattttntaattacaaaacaattctttcctgtcttagtttagtttactttttactcacaaagttcctggaaagtagttattactcaataattgaatgcatgagtgtcaactgcaaaatctatgcattatgtagngatttgaatcaattagtctttnttgatactccaaaattaccctttttcgagngtctttatcanaaatttgataaatcggaact

SEQ ID NO: 12684 - DNA, 240 bp, Homo sapiens
  misc_feature 27, 112: n = A,T,C or G
cccgcgtccgcctgaatttcagagtcngttgagaaggtagggagcagggatctctcagacaccaacatgttcagctttattatagataaggctgaattgatttcctggaatngaccttacttccccacctccaaactgcaggccttccccttgcaggttcagaacatgttaaggtaagttcactgcagagataaacagggtgaggacaggccagtcctaaaaaaaaaaaaagaaaaaaaa

SEQ ID NO: 12685 - DNA, 240 bp, Homo sapiens
  misc_feature 23, 38, 98, 99, 148, 154, 159, 170, 189, 219: n = A,T,C or G
gcggtggcggccgaggtaccttntccgaatgcaccttnaaagcgggtattagcctatacaggctgttttagtcgaatgcagaccatcaaggaaattcnngaatatctatctcaaagactgcgcattaaagaggaagatatgcgcctgnggctantccanaagtggagaantaccttactctttctgggntgatgaggaatcataaatctggaatatttngaaaatccaggatgaacaaca

SEQ ID NO: 12686 - DNA, 480 bp, Homo sapiens
  misc_feature 405: n = A,T,C or G
cccttagcgtggtcgcggccgaggtacgcggggcaatacgtagagataataacagttttttaaaaaacttaatatttgttattgaatgtatatttttgagtattgcatcttttctatactaataaggaggtgtaatttgaacgcttttagaaagaaaaaagaagaattagtgcaagaaattaaagatttgattaattcttcttcttcattagttatagctgaatatcgtggattaacagttgctgaaattgaaactcttagaaatgaagcttaaagaagcaggtgtttttgtaaaagtttataaaaatagactatttaaaatagcatctaaagaagcaggtttcggagatttagaacaatcactagttggtccaaatttttttgcttttggttctacagatgcantagctccagctaaaattatttcaaaattcgctaaaaacaaatccagtaagttgtattaaaaggcggtattttttg

SEQ ID NO: 12687 - DNA, 300 bp, Homo sapiens
ccgcggtggcggccgcccgggcaggtactactgatacaaatagcatggatgaaactcaaaatcattattctaagagccagatactatagcctgtattttatgattcactttcaatgaaattctacaatagacagaactatctatcaacagaaagcagatcagtggttttctgcagccagaggtatgaaaggtttgaaacatgtggcaccagtaggacatatggaaacttttttggtgtgatggaagtatttttttatcttgattgtgtggtgtttgttatacagtggtatacatttgacc

SEQ ID NO: 12688 - DNA, 360 bp, Homo sapiens
ccgcggtggcggccgaggtcttcgacccacgcgtccgcatttattaaggcttgtatatgttcaagatccagtgaagactgtcttgggcgtgtataattgatcttaaccacaaggctgagaagttatgtgcagggcttatgatgctacttccaaagtattaaatcctccagagaagcctgtagtgtgggatgcaaactattttaagtgtgaccatgaggtgtttttttgtggaccattttaaagccaatgataggttctaaagcaatctcaacctgagttaggtagaatgggttggttatctgcactctagcggcccttcatagctattgtattctggatttcaattcggcactttatgta

SEQ ID NO: 12689 - DNA, 540 bp, Homo sapiens
  misc_feature 258, 266, 267, 304: n = A,T,C or G
gaattggagctccccgcggtggcggccgggcgcggtggctcatgcctgtggtcccagaactttgggaagccgaggcgggcggatcacgaggtcaggagatcaggaccatcctggctaacacggtgaagccccgtctctactgaaaatggaaaaaattggccggaccgtggtggcgggcgcctgtggtcccaggtggctggatacacgggtgtgcaccaccatactggctgattcttgtatttttggtagagatggggntttggccnngttggtccagctgatcttgaactcctgcacctgcctnggccttccaaagtgttgggattaccggtgtgagacactggcccctggctatattttactatttggaaatcacaatgcatcttaaaattgatggcttcttgcaaccactttcaaccaggtgcctgtcatgatttaagtgctagcatcaaggcaggttagttatgaagaaatagagtgtgtgtttatatactcacacagttagaaatcgacccttttaaaaattatttctttttgaaa

SEQ ID NO: 12690 - DNA, 480 bp, Homo sapiens
ctacttagggcgaattggagctccccgcggtggcggccgcccgggcaggtacgcgggctattctcttacagctaggacccagcgttctgggcagaatagcaggcagcgcagtagctactgagattataagtggtaggtttatggagctgtgaccacaactctccacaagccagtgctgtctcatgcaagcactctcagtgtccaagtgctgagtgtgtgagtggtctgggctttgcagggtcggccaagctcttggaagagcaggctttgttagctggggagtcatcgctccatgcaggccctgagaatggagcatcctgagtggactggtagagatggggcatgggtcactctgagggtttgagctacttctgctatttttgaaattctggtttgaactgcaggatcgtgctgagtttggcacagactaatttctctgttggcagcacatgatgtatcaactcatgtgtcagttggttt

SEQ ID NO: 12691 - DNA, 420 bp, Homo sapiens
  misc_feature 270, 284, 304, 305, 336, 394: n = A,T,C or G
tatagggcgaattggagctccccgcggtggcggccgaggtactacagtataaatcatgctcctgctgtctagagcttaccacccaacgagggcttcagataagatcagcaactgccctagagtgtggaactcctatgacaaggtgagcctggggtgtgatggaaacacggcgtgcatggttaccaagccacgcttccagggaaaggggtccgtgcgggaaaaacttcagagaggaaatgacatgtcagtcaataacctgaaagaactggntgagagttaagcancagggaacaagggcacagtnntccacacagctttttggaaagatcatgttgnttatagtgcaaaaaaatactgaatatgggaaacaatttgttattattttttaggagtnttgctttgtcccccaggctggagtgc

SEQ ID NO: 12692 - DNA, 360 bp, Homo sapiens
  misc_feature 25, 26, 104, 179, 180, 338: n = A,T,C or G
gtgtccggaatcctacccggtgtgnngacagtgcctgatagtttcttctgcctttctatcccaaaacgattggtcagtttacccaagtttgcaatgcagtttanaatctcccaggaacatctcttctagtagttgccttagccatcttgtagttgatttgactttttttttttttgctnncagaaagctctatgcttcatatggacttgcataccaattttttgttcatctgttggtcatgatggttagcagagcctgacctcctgttacaatagaatgatcggttcctgggctacagacttgagtctgttttttttgttttttaaaccttcccatgnggcaatttgccatatgcaaaac

SEQ ID NO: 12693 - DNA, 300 bp, Homo sapiens
  misc_feature 1, 16: n = A,T,C or G
nggcgaattggagctncccgcggtggcggccgcccgggcaggtacgcgggcaaaatgtaagttggtaaaagacattggactccagctatgttctttagaaagaaggtattggactctggccatgttcttcagaaagaacatgcctggctttttcacgatttgatcagtcttcttagaccctgaaccccaccatgaaatggcttccccagacacaacccgagagagttatgctttgtttctcagctaaaatattttgcagatcttaatttcctgggtcattgcatcatttttttttttttt

SEQ ID NO: 12694 - DNA, 300 bp, Homo sapiens
  misc_feature 171, 248, 261, 270, 272, 277, 289, 292: n = A,T,C or G
ccgggcacggtacagagcccaagacaaaagataggcctgtgaggataacatctggtatatctgacccttcccagcatggccaggaggcacagccaggccagggagggcatactgggtttggctttgccctgcagctgttggcctaggtgctgcggtcatacatatgccctnaggcctttccatggctacctacctagaacccagattctttttttttttttgagacggagtctcgctctgtcccccangctggagtgcagnggcgccatntnagctnacttgcaagctncgncttccggg

SEQ ID NO: 12695 - DNA, 360 bp, Homo sapiens
  misc_feature 48, 147, 262: n = A,T,C or G
cccggtcgtgcgggtcgggcgcgggcgggcgcggcggcagtggcgctntcaggtgattgactggccagctgcctgaaggagcgccaggtcctccttgctggcaggtggcgaagcccattggggcggcggtgcagacccgcggcggcngctgcggcggtctggctcgggaggcgttcctggggccaaggccatggccccgcggctgcagctggagaaggcggcctggcgctgggcggagacggtgcggcccgaggaggtgtcncaggagcacatcgagaccgcttaccgcatctggctggagccctgcattcgcggcgttgtgcagacgaaactgcaaaggaaatccgaattgcttggttg

SEQ ID NO: 12696 - DNA, 420 bp, Homo sapiens
  misc_feature 14, 362: n = A,T,C or G
taaaagccatggtnatttgtgcactgtgcagtttcttattagcaaaggtgccaatgttaacagggctacagccaataatgatcatacagtagtgtcgctggcatgtgcaggaggccacctggcagttgttgagcttctcttggctcatggggctgaccctactcatcgactcaaggatggttcaacaatgctcattgaagctgcaaagggtggccatactaatgtagtttcttatctgttggattatccaaataatgttctgtcagttcccaccacagatgtgtctcagctccctccaccttctcaagatcagtctcaggtgccacgtgtgccaacgcatacacttgccatggttgtacctncccaggaacctgacagaacttcacaggagaactctcctgcccttttaggagtgcaaaa

SEQ ID NO: 12697 - DNA, 540 bp, Homo sapiens
  misc_feature 1, 479: n = A,T,C or G
ncgcgtccggccttttgttcagcttgccgggcaaccggcccctgctggggactacaagtcccgtaagcctccgcggcggcacgtcctaccctacactgtccagccggctccctttttccccctccccgggggccaagggctccggctgctgcctggcggccaacgggccaggtaggatttccgggagaggctgctgtggaggctgaggaggcggcggcggagatctggaatgaattttctatctgtgaaattgtgaagacgaaaaaagaaaattgtgctagttttgctgttgtactccacattgcagaagttacaatcacagtgcacaaaacagtatctcacctccctaaactggttaatagtggcatggaagatccatttgaggaagcagaccagcccactacagagccaggcatggtcctggacagtgtggaagcaggagacacaacaccttctaccaaaaggaagagcaagttctnaggctttggcaagatctttaagccctggaaatggaggaaaaaaaaaagtagtgataaattt

SEQ ID NO: 12698 - DNA, 360 bp, Homo sapiens
  misc_feature 16, 214, 328, 356: n = A,T,C or G
gtccgcagaattgacnaattcaggaggtgtaaaaataaacagtgttctcttctctaccccaaagccactactgaccaaggtctcttcagtgcactcgctccctctctggctaaggcatgcattagccactacacaagtcattagtgaaagtggtcttttatgcctcccagcagacagacatcaaggatgagttaaccaggagactactcctgtnactgtggagctctggaaggcttggtgggagtgaatttgcccacaccttacaattgtggcaggatccagaagagcctgtctttttatatccattccttgatgtcattggcctttnccaccgatttcattacggtgccacgcantcat

SEQ ID NO: 12699 - DNA, 420 bp, Homo sapiens
  misc_feature 320, 336, 347, 349, 350: n = A,T,C or G
gcgtccggttcttagggaggcaggtgctggcctggcctggatcttccaccatgttcctgttgctgccttttgatagcctgattgtcaaccttctgggcatctccctgactgtcctcttcaccctccttctcgttttcatcatagtgccagccatttttggagtctcctttggtatccgcaaactctacatgaaaagtctgttaaaaatctttgcgtgggctaccttgagaatggagcgaggagccaaggagaagaaccaccagctttacaagccctacaccaacggaatcattgcaaaggatcccacttcactagaagangagatcaaagagattngtcgaaggggncnnagtaaggctctggacaacactccagagttcgagctctctgacattttctacttttgccggaaaggaatgg

SEQ ID NO: 12700 - DNA, 420 bp, Homo sapiens
ccgcggtggcggccgaggtaccaaatgaagtgtgaagacaaggccatccaccactttatagagggtgtaaaaataaaccagaaatcaagggagaaagaaaagatgaaagacaaactgcaaaaaattgccaaaatgcgactttctaaaaatggagcagattctgaggctttgcatgtcttggcattccttcaggagctgaatgaaaaaatgcaacaagcagatgaagactctgagaggggtttggagtctggaagcctcatcccttcagcatcaagctggaatggggaatgaagaatagagatgtggtgcccactaggctactgctgaaagggagctgaaattcctccaccaagttggtattcaaaatatgtaatgactggtatggcaaaagattggactaagacactggccataccactg

SEQ ID NO: 12701 - DNA, 420 bp, Homo sapiens
  misc_feature 6, 65, 66: n = A,T,C or G
agggcnaattggagctccccgcggtggcggccgcccgggcaggtaccaaatgaagtgtgaagacnntggccatccaccactttatagagggtgtaaaaataaaccagaaatcaagggagaaagaaaagatgaaagacaaactgcaaaaaattgccaaaatgcgactttctaaaaatggagcagattctgaggctttgcatgtcttggcattccttcaggagctgaatgaaaaaatgcaacaagcagatgaagactctgagaggggtttggagtctggaagcctcatcccttcagcatcaagctggaatggggaatgaagaatagagatgtggtgcccactaggctactgctgaaagggagctgaaattcctccaccaagttgggtattcaaaatatgtaatgactggtatggcaaaagat

SEQ ID NO: 12702 - DNA, 600 bp, Homo sapiens
  misc_feature 20, 154, 164, 165, 167, 171, 178, 182, 183, 184, 185, 186,187, 188, 189, 190, 191, 192, 193, 194, 195, 196, 197, 198,199, 200, 201, 202, 203, 204, 205, 206, 207, 208, 209, 210,211, 212, 213, 214, 215, 216, 217, 218, 219, 220, 221: n = A,T,C or G
  misc_feature 222, 223, 224, 226, 228, 240, 253, 260, 273, 276, 281, 288,294, 300, 316, 322, 323, 324, 326, 331, 332, 341, 345, 364,366, 370, 374, 383, 385, 386, 394, 396, 398, 403, 404, 415,420, 421, 424, 427, 433, 434, 435, 436, 437, 444, 452: n = A,T,C or G
  misc_feature 453, 454, 455, 457, 464, 467, 471, 472, 480, 483, 484, 485,487, 488, 489, 490, 497, 498, 499, 500, 501, 502, 509, 510,513, 515, 516, 518, 521, 539, 540, 548, 550, 552, 562, 570,575, 579, 590, 591: n = A,T,C or G
ttagggcgaattggagctcnccgcggtggcggccgaggtacatagcacattacatgtcaaatcccttctcgcccccatggatgacccccctcagataggggtcccttgaccaccatcctccgtgaaatcaatatcccgcacaagagtgctaaanaaaaaaaagnnanaggnctgcctntgtnnnnnnnnnnnnnnnnnnnnnnnnnnnnnnnnnnnnnnnnnnntngntatcaagcttantcgatacccgttnaccttgnggggggggcccgntancccanttttttntttccnttttanggggggggtaaatttngccccnnntnggggnnaaaaaaaangggnaaaaaaattttttttcctngngggnaaanttttttatntnntttttaanananttttnnccaaaaaaatntaaannggnccngggggnnnnntaaaagntaaaaaannnntnggggggnccntttnngggggggnccnnnannnnccaattnnnnnnggggggnncgncnntnttncccttttttttaaaaaannaaaaaaancncngccccccccntatttttnaattnaaanctccccccccnnggggggggg

SEQ ID NO: 12703 - DNA, 420 bp, Homo sapiens
  misc_feature 28, 37, 199, 230, 242, 279, 367: n = A,T,C or G
acttagggcgattggagctccccgcggnggcggccgnggtacaaataagcccaccccactaggaactatgttaaaaaaaaattcaagaaagaatttaagggagattacagtgttactgtgacaccaggaaaacttagaactttgtgtgaaatagactggccagcattagaggtgggttggccatcagaaggaagcctgnacaggtcccttgtttcaaaggtatgacacanggtaacccgtangccaaggcacccagaccagtttccatacatagaaagntacagctgcttttatacccccttgccccgccaacgtagttaagagaacagcagcataagcggctggcagaggcaaggaaagaccagtngagagaaaaaaaaaggccatctataccaattctaagttaatttagactaaaca

SEQ ID NO: 12704 - DNA, 360 bp, Homo sapiens
acttagggcgaattggagctccccgcggtggcggatattgtcaatgcgcaacatggagagactttaaaacaaatgctagggattagagtatagatcagatagctggcaaatctataggaagggaaaagtaattttaaacacacagcatttgtttcctgctgctctatcacaatagctaggtttttaaataagtaggctttataccaagccataaaaatgaattgctggggctctttgggactagggaaggcgggaaattttagatattgctgttggcttagtgaaaatgcatgcttacccggtcacctgtggctccagcaggaccaggggcacctacagcaccaggagcaccctagtacc

SEQ ID NO: 12705 - DNA, 480 bp, Homo sapiens
  misc_feature 75, 454: n = A,T,C or G
agggcgaattggagctccccgcggtggcggcccgcccggcaggtactggaacagggataagttcttggataaggngccaacatacctataaaagctgatttttgagtaaattattgattctaacatatgtaatggatttggtgtgataattttctgatctttaactataagtgactttttattctccaccagaaaagataaatgactgagaatgtaagtctgcgctctgattaacacaatggagaaacggaaaaactatctctgttaaaaactgattcctgtcattcttctgatatcaaataagaggaaggaaaataaactttttgtgtgtagatagaaaaacatacctgaggccaggtgcagtggatcacgcctgtaatcccagcactttgggaggccaaggcgggcagatcagctgaggtcaggagttcgagaccagcctggccaacatggngaaatcacgtctctactaaaaataca

SEQ ID NO: 12706 - DNA, 300 bp, Homo sapiens
  misc_feature 21, 86, 90: n = A,T,C or G
gggcgaattggagctccccgnggtggcggccgggcaggtacccagagttgcgaggagttttttaactgatttagccaggtggcaancatnagtgaatggatgaagaaaggccccttagaatggcaagattacatttacaaagaggtccgagtgacagccagtgagaagaatgagtataaaggatgggttttaactacagacccagtctctgccaatattgtccttgtgaacttccttgaagatggcagcatgtctgtgaccggaattatgggacatgctgtgcagactgttgaaactatg

SEQ ID NO: 12707 - DNA, 720 bp, Homo sapiens; identical to SEQ ID NO: 1565
  misc_feature 516, 556, 645, 656, 693, 694: n = A,T,C or G

SEQ ID NO: 12708 - DNA, 360 bp, Homo sapiens
  misc_feature 29, 30, 35, 191, 352: n = A,T,C or G
aggtaccagtggggacttctgaaagaacnntactngtgtcagtggaaaagctggcattttgggaaatgctggtctctctcagtccaggagtcaaggaatatgttgactctctcttaatttttgtagtctcagaggaaacagacattgatgtggaaacagttgtatgccccatggtggaggtggtatccatnggagctgtggccttggttttttctgagtcagctaggacagaggattgtgacccatgtccagaactggtggtttccacattagtcgctgctgtgcttgtggaaggatgcatggcttctatagctgtggtgtcttcatctgttgtcagtatctcatgtgaggnacctgccc

SEQ ID NO: 12709 - DNA, 480 bp, Homo sapiens
  misc_feature 468, 470, 474: n = A,T,C or G
ccacgcgtccgggcggggccatccaagcaacgctgaaggccttttccagcagctgggagctcccggattgcgtggcacagctgaggggcctctgtgatggctgagctctcttatgtcctatactcacatcagacatgtgatcatagtcccagagacagagttgaggtctcgaagaaaagatccatgatcggctttctcctggggcccctccaattgtttactgttagaaagtgggaatggggtccctagcagacttgcctggaaggagcctattatagaggggttggtttatgttggggagaattgggcctgaatttctccacagaaataagttgccatcctcaggttggccctttcccaagcactgtaagtgagtggggtcaggcaaagccccaaatgaggggttggtttagattctgacagtttgccagccaggccccacctcagcgtctgtcgaacaaacaaagntngggngggttt

SEQ ID NO: 12710 - DNA, 480 bp, Homo sapiens
  misc_feature 8: n = A,T,C or G
gtcgaccncgcgtccgcccgcccatcactgctgttcctccagggccagcactcgggcgaggcaggggagctgccttcggtacataatttgaaggggcactccctcttgggcacatgccggccctgagtgcctcccttgcctcactctgatcctggccccataatgtcctcagtggaaggtgatgggggccggtgctgtggggagagtagaaagaggggttggcatgactaaaaataccagtatgtgtattaagtattttgagaatgaaatgccaaggagtgcctactatatgccagctctaggaatggagtagacagtggacacaagaaggacttacgccctgagcacaggtgccaatggtgacaagactggcaagacgtgagggcatgaatggttcattcaggcagctgctgcagatgtggtcacctggtgccatctgctgctcccttttccacttttctatgtcctccttccacccca

SEQ ID NO: 12711 - DNA, 480 bp, Homo sapiens
  misc_feature 1: n = A,T,C or G
ncccatactgggggcccccttcctgcaggccccatcaggtgcagagctgtgggtctggttccaagacactgtcactgatgtggataaatcttggaaggagctcagtaatgtcctctcagggatcttctgcgcctctctcaacttcatcgactccaccaacacagtcactcccactgcctccttcaaacccctgggtctggccaatgacactgaccactactttctgcgctatgctgtgctgccgcgggaggtggtctgcaccgaaaacctcaccccctggaagaagctcttgccctgtagttccaaggcaggcctctctgtgctgctgaaggcagatcgcttgttccacaccagctaccactcccaggcagtgcatatccgccctgtttgcagaaatgcaccgctgtactagcatctcctgggagctgaggcagacctggcaagttgtatttgatgccttcatcacggggcagggaaaga

SEQ ID NO: 12712 - DNA, 480 bp, Homo sapiens
gaccacgcgtccgcccgtccaggagccctaggagtgctacggggggccggagccttgcccgggccgctgccccgtccctggattcggggctggacgcagcaagcggggcgctgtgtccccaagctccccgtcctcggccaggcgggcaccacggcaggggctgagctaccctcatggaagggagaggaccgtaccggatctacgaccctgggggcagcgtgccctcaggagaggcatccgcagcttttgagcgcctagtgaaggagaattcccggctgaaggaaaaaatgcaagggataaagatgttaggggagcttttggaagagtcccagatggaagcgaccaggctccggcagaaggcagaggagctagtgaaggacaacgagctgctcccaccaccttctccctccttgggctccttcgaccccctggctgagctcacaggaaaggactcaaatgtcacagcatcttccacagccc

SEQ ID NO: 12713 - DNA, 480 bp, Homo sapiens
tccgaaacacctgtcattttacacaaatgcgttttgaatgtctgaaagacagctcctgcccttaatttagatgtaaaccatttagtttcaaactaaccacctgataaaatctatcaacattttatcatgaactagagcagatgtctgttatttgatgtctatgttatttgagtttactgtttaataagtgaattcatatcaattaatcctgctaacaaatttgacacttaaggtgattctgaaaatcctttaaacttaaagtagatggaatcttaagtatggggccttttagtgtccgtaaagaaaaactgcatgcaacaaaatatagcaggtcctcacttgttgagattcatggaaattgtgactttaaatgaaatgacatggctgggcatggtggctcacacctgtaatcagcactttgggaggccacggcgggtggatcacgaggtcaggagttcaagaccagcctggccaacatgg

SEQ ID NO: 12714 - DNA, 540 bp, Homo sapiens
  misc_feature 318, 321, 336, 339, 366, 371, 378, 379, 380, 382, 384, 389,390, 391, 396, 428, 433, 434, 446, 447, 449, 455, 472, 481,482, 486, 487, 492, 493, 494, 500, 518: n = A,T,C or G
ccacgcgtccgctcccgccaggcgctttctcggacgccttgcccagcgggccgcccgaccccctgcaccatggaccccgctcgccccctggggctgtcgattctgctgcttttcctgacggaggctgcactgggcgatgctgctcaggagccaacaggaaataacgcggagatctgtctcctgcccctagactacggaccctgccgggccctacttctccgttactactacgacaggtacacgcagagctgccgccagttcctgtacgggggctgcgagggcaacgccaacaatttttacaccttgggaaggtttgcnacnattctttgtttggangantaaaaaaaggttcccaaaattttcccnctttnaaaagannntngngaccnnncactngggggggggccccaaaaaaaaatttttttttnttaanncccccccggggnngnaaaaanttttttttggggggggnccccccccnngggnnaaaannnttttanaaaaaatttttttttttntttttccccaaaaaaaaatttt

SEQ ID NO: 12715 - DNA, 480 bp, Homo sapiens
gggcatgctcataggcacagctgttggtcagtatgccaataacatcacactttggatctttgcagtcactgcaggcatgttcctctatgtagccttggtggatatgcttccagaaatgttgcatggtgatggtgacaatgaagaacatggcttttgtcctgtggggcaattcatccttcagaatttaggattgctctttggatttgccattatgctggtgattgccctctatgaagataaaattgtgtttgacatccagttttgacctttcccagtaatcactgttgattacgagaatgttaccatgcagctttgcatctgttccttgtactgtatgcacattgctcaaaggaaagtcagtggcttgcactacttacaagtttcatagatttgagcctaaccacaagaggctggtgcttagtactgttttccctgcacgtaggggtcttttaaaaatataaagcttgtgataaagagagg

SEQ ID NO: 12716 - DNA, 360 bp, Homo sapiens
tcaccccgcgtccgacttgaatcccgtcagcttaaaacttgtgtaagggaatcctgacttttaaaatgtgagggtatttggatctgtgttgaaagtcgtatatttttatctgtgcggtgctgagtgcaggccaccagctcctaaatagaggttccctatatgcgcgtatgacatggtgaataaacacaactctctccactcaggacatccggagcgttatggaccgtggtaggtggtcgttctgtgtgcttgtgaaagtgtccaggcgtgtgcacagccagtgcgcccacttccgggctccttgctccctgctgtactgaagttttggattttgcatccaatcctgtgtgcctgcccttc

SEQ ID NO: 12717 - DNA, 480 bp, Homo sapiens
  misc_feature 102: n = A,T,C or G
ccggaagagtgctttattgtgaaattatttaaaactgtcctttaaaagaaaaagaggaaacgatgaacaaaaactaatctaattgccaagttagaattcatnatttaatttacctcctatgcaatgattaatgctgcaaaatgtatggttatgttaccgtatattcacaaaagaaatattattacaaggtttcagaggtagccaattgcattcttttggaaatttactgtactgtttcaatgtgttaagtgccttgttgtaaagtaaaattttaagtctagattcattattttcctgacatatatttttcattatgatatctactgtatgctattgtgatagttttatgaaatgcttacattttaatcaaatatgtaaatttcagaagctcttttttcctacccaccagtaccttaatcatttggtttatcacattggattcaaattcaggttccttttttgataaagaggaaatttgtt

SEQ ID NO: 12718 - DNA, 480 bp, Homo sapiens
cgcgtccgttgaagaataatattgtatgtgcattttatccattaatgtttcatactttctgagagtataatacccttttaaaagatatttggtataccaatacttttcctggattgaaaactttttttaaactttttaaaatttgggccactctgtatgcatatgtttggtcttgttaaagaggaagaaaggatgtgtgttatactgtacctgtgaatgttgatacagttacaatttatttgacaaggttgtaattctagaatatgcttaataaaatgaaaactggccatgactacagccagaactgttatgagattaacatttctattgagaagcttttgagtaaagtactgtatttgttcatgaagatgactgagatggtaacactttcgtgtagcttaaggaaatggggcagaatttcgtaaatgcctgttgtgcagatgtgttttccctgaatgctttcgtattagtggcgaccag

SEQ ID NO: 12719 - DNA, 360 bp, Homo sapiens
  misc_feature 14, 15: n = A,T,C or G
cgcccacgcgtccnncccgcgtccgggagaagatggaagcagtgcccgacgtagagcgcaaggaggacaagcccgaggggcagtcacctgtgaaggctgagtggcccagcgaaaccccggtgctgtgccagcagtgtggcggcaagcctggcgtcaccttcaccagtgccaagggcgaggtcttctccgtactggagtttgcaccctcaaatcattcttttaagaaaattgagttccagcctccagaagccaagaagttcttcagcacagtgcggaaggagatggcgctgctggctacctcactgcctgagggcatcatggtcaagacttttgaagatagaatggacctcttctcagctc

SEQ ID NO: 12720 - DNA, 600 bp, Homo sapiens
  misc_feature 28, 32, 90, 385, 422, 425, 429, 432, 481, 557, 588: n = A,T,C or G
cccttagcgtggtcgcggccgaggtacncggngtccaagatggcggatgaagccacgcgacgtgttgtgtctgagatcccggtgctgaanactaacgccggaccccgagatcgtgagttgtgggtgcagcgactgaaggaggaatatcagtcccttatccggtatgtggagaacaacaagaatgctgacaacgattggttccgactggagtccaacaaggaaggaactcggtggtttggaaaataacatctgggcctgctggagaaaaagaaagattacaaacttcgttgcatatgactaccgtaaaaaacaagaatacctcaaagctcttcggaagaaggctcttgaaaaaaatccagatgaattctactacaaaatgactcgngttaaactccaggatggagtactttaatttttttttnttnatanttnccaggaacattttctaattatgttatataaatgggtatgtgatatgtgngctatttgtgtgctaatgtcctaagtgaagttctgcagaccatctgggtcaaagtgcatttcgcatgatccaaaanatgaagaaccacttgtttgtcacgggagacnagggaaaaaaaa

SEQ ID NO: 12721 - DNA, 360 bp, Homo sapiens
  misc_feature 31, 36, 45, 50, 55, 56, 57, 212, 268, 270, 282, 285, 321,336, 340: n = A,T,C or G
ccctttcgagcggccgcccgggcaggtttangtcanagtcttctnttctnttctnnntgagatggagtcttgctctgttgccagactggagtgcagtggtgcgatctgggctcactgcaatctccacctcccgggttcaagcgattctcctgcctcagcctcccgagtaactgggactacagggtgcgcgccaccaagcccagctcattttngtatttatagtagagatggggtttcacgatgttggctagggatgggtctcgatctntnggtcagagtctnttnctgtaaaatatccttgggtaaaagaagcaattttanactgtaaactgatgncaanatgctttaagggaagaaggc

SEQ ID NO: 12722 - DNA, 120 bp, Homo sapiens
  misc_feature 21, 24, 80, 96, 98, 102: n = A,T,C or G
cgggcaggtaccaaagccttntgnccccattttccatcatacgaatagtattccctgttgctaagccgatgatacattanccttttcccaataggngngagnggatggactgaatggaga

SEQ ID NO: 12723 - DNA, 420 bp, Homo sapiens
  misc_feature 63, 121, 137: n = A,T,C or G
ccgcggtggcggccgccacgctggttttgcatcttcaggagacgctcgtagccctcgcgcttntcctcggccagttcgcggaagaagtggctcacgccttccagagccacatcatcgcggncgaaatagaagcccanagagaggtaggtgtaggaggcctgcaggtacaacttgttggcctacataaaacacctagatggtaacaacgaggcagccctggaatgcttacggcaagctgaagagttaatccagcaagaacatgctgaccaagcagaaatcagaagtctagtcacttggggaaactacgcctgggtctactatcacttgggcagactctcagatgctcagatttatgtagataaggtgaaacaaacctgcaagaaattttcaaatccatacagtattgagtattctgaactt

SEQ ID NO: 12724 - DNA, 540 bp, Homo sapiens
  misc_feature 14, 36, 37, 50, 60, 91, 108, 138, 150, 161, 177, 181, 187,192, 216, 235, 244, 252, 258, 263, 268, 274, 276, 280, 289,297, 299, 305, 317, 326, 329, 347, 354, 368, 371, 375, 387,391, 392, 406, 407, 412, 422, 429, 430, 437, 445, 452: n = A,T,C or G
  misc_feature 453, 455, 457, 461, 462, 474, 475, 480, 489, 490, 507, 513,514, 532: n = A,T,C or G
cgaggtacattttnaaagagttgttttttggccggnnttcagtggctcangcctgaaatnccagcactttgggaggccgaggtgggcggancacgagggctggagatngagaccatcctggctaacaaaagaagaaancccgtctctacnaaaaatacaanaaaattagccaggcgngggnggctgngcacnctagtaggccccaggcctactttnggcaggcctgagtgcaggnagtaatggnccgcgcanccctgncaagngaaantaaggntntgcnggtcggagncccaaagnantgcggnccccttgccacncccaaggcnctngggccaaaccagaaggcnaaagganctccctattcctcnaanaacncaagatataccncaanngcgagggaggtttnnggttncttacctcanttgggcnncaaattnataagggntcaatannancnaggnntaaccaataaannacccncacaggggnntcctttaaccaaacccntaaaanncacctggggtcaagtccnaaataaaa

SEQ ID NO: 12725 - DNA, 360 bp, Homo sapiens
cgcccggcaggtacgcgggggtggagagaggcctctagacttcagtttcagtttcctggctctgggcagcagcaagaattcctctgccccccatcctaccattcactgtcttgccggcagccagctgagagcaatgggaaatgggagtcccagctgtcctcggtgcctgctcagaagctgggttggtttatccaggaatacctgaagccctacgaagaatgtcagacactgatcgacgagatggtgaacaccatctgtgacgtcctgcaggaacccgaacagttccccctggtgcagggagtggccataggtggctcctatggacggaaaacagtcttaagaggcaactccgatggtacc

SEQ ID NO: 12726 - DNA, 240 bp, Homo sapiens
  misc_feature 121, 187, 209, 211, 213, 225: n = A,T,C or G
tacttagggcgaattggagctccccgcggtggcggccgcccgggcaggtaccattaaatattctgagaggtgaatgtaaaatataaaaggtataggttttttttttttaaagaaaacaatnaactttcaaagagaaaaccaaaaaaaaaaaaaaaaaaaaaaaaaaaagtgcggccggccgcacttntttttttttttttttttaaaanananatgaggttttgntatgttgcccaggct

SEQ ID NO: 12727 - DNA, 120 bp, Homo sapiens
  misc_feature 7, 10, 59, 80, 94: n = A,T,C or G
gggccgnggncacaacattcccccttccccaaacagtaatatggacactgatttaacangacttataaaaaaataaggcncatttattttgatntggtaattttaaaatagaaacccctt

SEQ ID NO: 12728 - DNA, 300 bp, Homo sapiens
  misc_feature 23, 26, 73, 256, 279: n = A,T,C or G
aaactttttattaaaatgcttanganacagattgactttctttcgcaaatgactgttttacttttcctgaagnaggacatatatgcactctgataaaactgcattacagcctgcaggacaccttgggccagcttggttttactctagatttcactggcgtcccaccccacttcttccaccccactttttccttcaccaacatgcaagttctttccttccctgccagccagatagatagacacggacgcgtgggtcnaagcttgtacctgcccgggcggncgctctagaactagaggatcc

SEQ ID NO: 12729 - DNA, 600 bp, Homo sapiens
  misc_feature 74, 79, 114, 215, 293, 320, 421, 519, 522, 532, 547, 581,582, 589, 597: n = A,T,C or G
acactacttagggcgaattggagctccccgcggtggcggccgaggtactttttttttttttttttttttttttnggaanggagtctcgctctgtcacccaggctggagtccagnggcacgatctcgactcactgcaacctccacctcccgggttcaagctattctcctgcctcagcctcccgagtagctgggactacaagggatctgccaccacncccggctaatttttgtaattttagtagagacggactttcaccatattggccaggctggtcttgaactcctgaccttgngatccacccaccttggcctcccaaagngttgggattacaggcgtgagccaccgcgcccggcttactacaagtcataagtttcttaaaggcaatgtaaactccgaaaacttaatgcactcttatattgntaatacattaaaatccactggcctggcttacacttttgaatcaatctttgagccatgcatgattttgtaacattcacgtacctgccccggcgggccgnttntaaaactagnggatcccccggctgnaggaattcgaatttaaagctttatcgatcccgcnncctcgangggggggnccc

SEQ ID NO: 12730 - DNA, 540 bp, Homo sapiens
  misc_feature 374, 451, 477, 478, 513: n = A,T,C or G
cactacttagggcgaattggagctccccgcggtggcggccgcccgggcaggtactttttttttttttttttgagacggagtttcactcttgtcacccaggctggagtgcaatggcgcaattagggttcactgcaacctctgcctcccgggttcaagcagttctcctgcctcagcctcctgagtagctgggattacaggcatccaccaccgtgcccagctaatttttgtatttttagtagagacggggttttgccatgttggacaggttgatctcaaactcctgacctcaggtgatctaccctcctcggcctcccagagtgttgggattacaggcatgagccaccatgccaggctgctaattctcctttttaggngagttaggggaactgagcctcaaaaaacttaaacgatttctcaaaaaacacctcaagtgataaagtggccacattgnaaagggagtttttatctttttattgnnggcccaggggtcattggacaaaatcatgctacctnttggattttaaaatattcaattggcaa

SEQ ID NO: 12731 - DNA, 420 bp, Homo sapiens
aggtacagagtcttttgcttcctcccacccctagggggaaaaactgctttgtgctttgggaagttgtctctgaaacccggggacagaggacgcaggacagactaggagggagccgggagctgcccggcgggtcatgggaataacgccgccgcatcgcccggtcggcatcgtttatggtcggaactacgacggtatctgatcgtcttcgaacctccgactttcgttcttgattaatgaaaacattcttggcaaatgctttcgctctggtcccgtcttgccgccggtccaaggaatttcaccttctagcgggcgcaatacgaaatgccccccggccgctctagaaactagtgggatcccccggggcctgcagggaaatttcggatattcaaagccttattcgaatacccgtcgacctcgagg

SEQ ID NO: 12732 - DNA, 540 bp, Homo sapiens
  misc_feature 108, 129, 138, 157, 180, 197, 208, 239, 240, 247, 252, 266,267, 269, 271, 273, 332, 351, 361, 367, 368, 377, 381, 410,413, 427, 463, 479, 494, 496, 539: n = A,T,C or G
ggactccaccgcggtggcggcgaggtacgcgggtatctgtcataagctcaacatctgtagatcagagggctaccagaggaaccagttttagaagatgaacaacacctnttagaaaagaaattgcctgtnacgttttgnaagataaagaagcgggganaacttcgaacgttgcaaacctgnaaactgggagaaacganggcaagctctnttggaacaagcaagctgcaagggagcaaggnncgcctgncccancatggagccggccnngncnanggaaaaggaaggagcgtgagcgccaggagcaagaagcgcaacaagacaacttggaactnggggaagcaactgggaaangcatgctgtnagctannaacctgcantatnagagggaggagagggaggaaaagaaattnganaggcgaagaggctngcaaaactgggaaacttgaaaggcaacgacaacttngagtgggaaccggaantcgaaggcaagaacntncctaaatcaaagaaacataggaacaaggagggacatagtttgna

SEQ ID NO: 12733 - DNA, 360 bp, Homo sapiens
aattggagctccccgcggtggcggccgaggtacttgtagatgttctttggtatctgggcattgaagaattaggtatttattataatcttcacagtctgagcttgttcgtagtggtccttcttggaaaggctttctagatattcagaaggaccgtaggtgttgtgatctaagctgtatctgctttagagggcacccgaagccccgtaatgctctggttcttgcagacttctggagatactgccttgatggtcttggataagatttggaagaatcctctggattatcaggcagagactcttattctctttcctcactttttcccagagtctttctatgctgagctctctggagctgggggag

SEQ ID NO: 12734 - DNA, 360 bp, Homo sapiens
ccgggcaggtactttttttttttttttttttttttagaataaaagaccatttttattctaattttaactcagaaattattatgcttattcaatttaacactttcgctgaaaggttaaagagataagaaggacagattataattgcttaatattgctatggtaacttccattcaaatacctgtgagtcaccagaagtcaaaaaggtagccagcattgcaacacaggatggatcatgcaacagaaactagcaccaggttaccttatcttataatattatttgctgttaaaatgaaattttaaaacagcaccaaaagttaagttggggctaaaactgttgtgcaggaaagatttcatatagca

SEQ ID NO: 12735 - DNA, 360 bp, Homo sapiens
aggtactgtaaatattaccattatttaaaatgttgacatttctgcattaagtagaaactttctaaatgcctaaataccactcaaacatgacttaaaagaaattgaatgactcaccactatgaccttcaagagtctgattcatagaaaggttactgggggctgcaaggcccctcaattttgcatcatctgtctgcgtctctaatttcaaaactttcagtaatccatcttcaccaccgcatgctatgaacccttgttccttgttccaggatacacactgcagcttcacgttattgggaatggaaattttcttgctcaggtagaagaacatcgtgggatccccgagagggtcacggcggccgc

SEQ ID NO: 12736 - DNA, 480 bp, Homo sapiens
  misc_feature 444, 457: n = A,T,C or G
atagggcgaattggactccccgcggtggcggccgagtcctaccctttactttttccccaagaccatctcagggtggagcattctgtctaagagaagaaagataaggaggctcccacccacctctcccaagagcagacattaaacatctttgtgctttgaagagagtgaatttggatagtcttgtgattctcaagactaacttccagaattatactttaaccccttccagatatggtccgcctttggcattgtgtgtacctgtgatggggcgtgtggtttccggttgtctcacctttaattgtcaacctccagtgtatgactctagaaatatgaggaaaagcttttcagtttttaaaattgccatttaaatttagtctattaaaaacaaacctagaggtcttgggttgcagttgatttcagagtatattaatttagtgggtcccnaaagtattacatntatttatattctggaatgaaaag

SEQ ID NO: 12737 - DNA, 300 bp, Homo sapiens
cccttagcgtggtcgcggccgaggtacagatggggtttcactgtgttagccaggatggtcttgatctcctgacctcgtgatctgcccgcctcggtctcccaaagtgctgcgattacaggcgtgagccactgtgcccaggcctattgggggttatgcaggttcctttgcttggccatggtagatggctaagtctttgcttccaagttcttttgaccatgagacatgtagagccagggaggaaagagaaaacccaaaccaggtcactgttacctgtgaataacatcttgatcgagttctgag

SEQ ID NO: 12738 - DNA, 240 bp, Homo sapiens
  misc_feature 137: n = A,T,C or G
cgggcaggtgctagcttgagtcgacccacgcgtccgctctgattttattctgcctctaagaggatattcagcacccagagcaccctattccactctgttttacttttccatgaagaagagagggagggtcataaaangataactaaaagtagacagtaaatgaaaatgttgaggggcattcttgtgtgtctacatcccatgggtcctagctctactgtctacaaaggacagcaaacgaag

SEQ ID NO: 12739 - DNA, 540 bp, Homo sapiens
  misc_feature 521, 527: n = A,T,C or G
ccctttcgagcggccgcccgggcaggtacatttaaaaggtgatgctaatactttaaaatgtttaagatatagatttaaaaagcattgtaaattgtatactgcagtgtcgtctacatggcattggacaggacataatgtaaaacataaaagtgcaattgttacacttacatatgatagtgaatggcaacgtgaccaatttttgtctcaagttaaaataccaaaaactattacagtgtctactggatttatgtctatatgacaaatcttgatactgcatccacaacattactggcgtgctttttgctttgcttttgtgtgcttttgtgtgtctgcctattaatacgtccgctgcttttgtctgtgtctacatacacatcattaatactattggtattactattgtggataacagcagcctctgcgtttaggtgttttattggatatattggatttggttatataccattatttttaatacatacacatgcacgctttttaattacataatgtatatgtacctnggccgngaccacgctaagg

SEQ ID NO: 12740 - DNA, 360 bp, Homo sapiens
  misc_feature 65: n = A,T,C or G
cccttagcgtggtcgcggccgaggtacctattctatgccattacacttctaggtgtatacttaanagaaatgagatatatatcctcaaaaggtcctatataataatgacccaggcagctttatcaataataaacaaaaactggaaacaatcaatcaacaataaaatgacgtggttacttgttcataaagatgactgcccaacaaaccacgccttctgttatccctgtccttatgtgttccccttccttgaatttgtgctggtcttgcgatttgattttgactgatataatacaccaattgtgaagctttatgatttctaatctgaattcaaaagaatccttgcagctttctttttggtcc

SEQ ID NO: 12741 - DNA, 300 bp, Homo sapiens
  misc_feature 280, 284: n = A,T,C or G
cccttagcgtggtcgcggccgaggtacattctactcccaaaaaccttgaaatccaaacaactaacaaagtgaaacatgtttgtcctctctctccccctctatctctcgctttccctccctctctctttctcttcctgtagaactgcccatcacattccaaatccccacttaaatgcttggattagtgcatgccaacccaaactcctatatttactacttctaaaaaagcacaaactaaggattaatgttcataatcatgacttgataataagttgaagantggnaattttttgtttggtt

SEQ ID NO: 12742 - DNA, 360 bp, Homo sapiens
  misc_feature 352: n = A,T,C or G
cccttagcgtggtcgcggccgaggtactttccttcccatcaaccagtaatgagcctcctgctgcccccaccacatccccacttgtgatgtcagcggggatcttggacttgtggcctaattgacaataatgcacctctcccttgccctgctggcatgatgtcagaggagatctagtggacttttaccgtttcccagaagtattgaggccatcttaccacagtgtcagtggataccacatggaggatctacaactctcactttcactcagaatgtatgaggagaccctgcccctccttgagtgtcaatggaacctggacttgtacctgcccgggcggcccgctccgaaagggcnaattccaa

SEQ ID NO: 12743 - DNA, 600 bp, Homo sapiens
  misc_feature 3, 6, 34, 515, 546, 554, 560, 568, 577, 598: n = A,T,C or G
ttnatncgcccttagcgtggtcgcgggcgaggancaagagcaagtctagtgtgagaagcacttttcaggcatcatgtttgctgaccaccctttggcccaaacactcacctcactaagcctagactcaaaatatgagggcactgcaaagattcacagcaaagattcatggcacagggcctagacacagggaggagtctctgtatttgttttttctttgtatttgttttatcaagtgaaaaacaaataaggatctctgcttccatcaacattattcatctttgtttcaggggtccctgtgattttaagttggccaagatgtaactggcataatgaatacaaccaaatgagaaatattacctttttttgttgatgatgtgattgtatacctgtaagagtggaagggactccagtaaaaaactggagtgcaacaatcagtaagaatatttgacaaggctgttggactaaaaaaataaatgttagaaaaaatcagtaagttcttcttttattagccattngttcaaacaaatattttatttaaaacacctnacttgggnttaatnaagcattnaatctgggncccctaagtaccctggccccngg

SEQ ID NO: 12744 - DNA, 300 bp, Homo sapiens
  misc_feature 231, 269: n = A,T,C or G
cccttagcgtggtcgcggccgaggtactgggttttgcccttgtgtgctcaaacatttctaaggtgtcccaagccctggaaatagggaagggaagggtggaggcttggatctgaggtcttgctgtccactccctgcctgcctgcccgcatctcaggcatggccaacagcagcccgttgaggggggcttgtctggacagttgcgtgtgatggtgttgagccatcacagggcanaggtcacttgtgtcacccccatagtcattgggttgcangccatggaggagggacctccactccatgggg

SEQ ID NO: 12745 - DNA, 300 bp, Homo sapiens
cccttagcgtggtcgcggccgaggtacaacgtgggcaagcatctgtgcatatgaaatgctgtttttctaaaagatttctcacattggcaaactgagagattttcttctggaacacaggaaagattatattaatgcttatagccataccatgtctgaatatgggaggatgacagacacagaacgagaccagatagaccaggatgcccagatattcatgaggacctgttcagaagcaattcagcaactacgaacagaagctcacaaggagatacattcccagcaagtgaaggagcacaggac

SEQ ID NO: 12746 - DNA, 300 bp, Homo sapiens
cccttagcgtggtcgcggccgaggtacttgggagactgaggcaggagaatggcgtgaacccaggaggcggagcttgcagtgagccaagatcgcgccactgcactcccgcctgggtgacagagcaagactctgtcttaaaaaaagaaaaaaaataaagtgaatatcagtattgctgaaaattcctagaatattggataaaactttaaatgaaaacatgaataactgactttgggaactgtaattgtagaaattttgtttttccaaaaacaagaaagtaaccttggttcccaatacaaccag

SEQ ID NO: 12747 - DNA, 360 bp, Homo sapiens
  misc_feature 253, 298: n = A,T,C or G
cccttagcgtggtcgcggctcgaggtacatagaactcagtctacttatttttgttctatttaagtgttctaacctgtcatcactattaaatagtggaatttgaattttttttgttttttaaacaaatttgtaggggggcagatctctttcttgggtttttctttcaacttagtaaggcctggcataatgaatcgcacattatagatgtaaaaattacttaactatgaaagcatgcagtggggtcaaagttctncagccatagcggactttggaaatttaagccaaaaagacagttttnggtaatttggctctccagttacatgttttaactccttgagggtgtatgggttatttcacatt

SEQ ID NO: 12748 - DNA, 360 bp, Homo sapiens
  misc_feature 231, 345: n = A,T,C or G
cccttagcgtggtcgcggccgaggtaccaagcaccattcaattaaacaacttcagctttctccaagacttctggaagtgacaaacacaatcagggttgaaaacctgccgcccggtgctgatgactacagtttaaaacttttctttgaaaatccctataatggagggggaagagttgccaatgttgaatattttcctgaagagagttcagctctgattgaattttttgacanaaaagtgttagacaccatcatggccacaaaactcgacttcaataaaatgccactttctgtgttcccatactatgcctcattgggcacaagccttgtatggaaaggagaagcctntgatcaagcttccag

SEQ ID NO: 12749 - DNA, 600 bp, Homo sapiens
  misc_feature 372, 384, 385, 413, 470, 505, 544, 570, 590: n = A,T,C or G
cccttagcgtggtcgcggccgaggtacagcttggagagaaattatgtgaaactctggcctcttccacaccagtctggttggagaaagatttcaggaaaggattagggagctggaatcatgacatagtatagcaaaggtgcataacgtctgctaatgttacagcacattaaatgaagttgtaaaatagtagcttaaagttaggcaggccaaacataacacaagaagtatgaaaagcaaggtgccatttttccaacaaataagttcattatatgaagacccagctttggttgatttagcatcttggtatccaatgcagctgctgtgactttcttttctttctttctttttgttttttttgtgttttgtttttgnttttgtttttgnnttttggtaagccatcttttaaagacctnacaccagtaagtatgcattccagtttaattaatcatacctattttcttactggaatncctttttattatgcccagggcaatcccacaaatantgaatttctttaatcctggccactagttctaccaagggngggaaccttgcttcatttttaccgangaaaggaaacctaaccattnccaagggggg

SEQ ID NO: 12750 - DNA, 600 bp, Homo sapiens
  misc_feature 443, 552: n = A,T,C or G
ccctttcgagcggccgcccgggcaggtactaaatgttttaggaaacaagctactccaaacttcagtttcttaggggttatctgttacacagttcaattagttagtttcccaatccatctagacttcaacattgaatttgattttacaatctcagggacttgaaaagcttccacttctgcaaatgctatttcccagctctagtctgtctaccacttactcacaattagctgctttacactctcaccacacccttcagcctctctgagagccaggcagtaatggccatttctggggctacatctaagtagttcacaagctgtatcctaaactctcagcatagggtctggttcagagtaacaacttaatacgtatttattaagtgaacaaacaaatgtctgaaatcctctgtcttggatcagcaattatcggttatcttttctganaagcttggagagaaggtgcgcagctatttatttaacaagagtgttaatttttatttcctcccctttttatctgattactagatgggcagacaggagaaaatggtattangcaaagtctatatgactaagtctcttcaagatgtccacgtggggaaat

SEQ ID NO: 12751 - DNA, 360 bp, Homo sapiens
ccctttcgagcggccgcccgggcaggtactttctttctagaccacacctactactacaaccatttctaatttatattgacttttggcaggggaggcaagggtaggaaggaaagttttataggaggacaagtctttttagtaagtgatcaagcaggctgggcttggtggctcctgcctgtaatcccagcactttgggaggccgaggcgggtggataatgaggtcaagtgttcgagaccagcttcgccaacatggtgaaacctcgtctctactaaagataagaaaattagctgggcatgttggcgggtgcctgcagtcccagctactcgaaaagctgaggcaggagaattgcttgaacccgg

SEQ ID NO: 12752 - DNA, 360 bp, Homo sapiens
  misc_feature 303: n = A,T,C or G
ccctttcgagcggccgcccgggcaggtaccacattttgtttattcgttcattagttgatggacatgcaacttgtttccacattttgactattatgagtattgctgctgtgaatatttttgtataacttttaaaatacagttttagcagaaacataccatacacgtattttcataatccacttttttcatttacataccttcaactttaaaaactaaattcggattattttgtttttcatgaggacatagtaatttttgtgcatatgtaaaattttcttcataaccaatccttgttgttattgnttagatatttaagggtagttttccagtgttttcccttattataggttattaatatct

SEQ ID NO: 12753 - DNA, 480 bp, Homo sapiens
cccttagcgtggtcgcggcccgaggtacatgtttgtttaatgaggggatacatgaatacagaagcagaactaataactgtaatagatttagaggactatctatggactttattttcacaaaattgcacagtcctttgaaaaggaagttgggataatgagaataccttatttcccctcaatgtggagctgggattaaatgtcagcattgctgggattatgcaatacatactaaaaaaaattacccttttgcccctgatctgatattcttgaaatatctggacagaaacaacattttgtataataaaaaaagttttgtctggaaactgcaggttccataccagtagtcactatgtagctaataagatttggaaattggattcttattaatacagttatgctccacataatgacatttcaagtcaacaatagaccacatatctgttggtgggtcctacagattataatggagcttgaaaaatt

SEQ ID NO: 12754 - DNA, 300 bp, Homo sapiens
  misc_feature 151, 173, 189, 258, 280: n = A,T,C or G
ccctttcgagcggccgcccgggcaggtacttttttttttttttttttttttttgctttttttttaatttaactcttctttgctctgacttctttatgtctgtgccctatctacaccctttataacttaggaaaaacctgtatataaacatngggaacattctgtattttctgngtataacaagttctanataagtcaaaggtatgataacaagtagaaacaaaactaatttattgctaaggaccttttggggaaatcnaatcatttaccaaatcagtatntttctttctttctttctttt

SEQ ID NO: 12755 - DNA, 360 bp, Homo sapiens
  misc_feature 307: n = A,T,C or G
cccttagcgtggtcgcggccgaggtacgcgggtcagctgggatgcctactgggaccgcaacgacccgctccgggatgtcgatgaggcagccgtgcctgtgctgtgtatctgcagtgctgacgaccccgtgtgtggacccccagaccacactctgacaactgaactcttccacagcaacccctacttcttcctcctgctcagtcgccacggaggccactgtggcttcctgcgccaggagcccttgccagcctggagccatgaggtcatcttggagtccttccgggccttgactgagttcttccgaacngaggagaggattaaagggcttgagcaggcacagaacttctttcttggggggcc

SEQ ID NO: 12756 - DNA, 600 bp, Homo sapiens
  misc_feature 418, 499, 501, 539, 570, 571, 573, 577, 587, 600: n = A,T,C or G
ccctttcgagcggccgcccgggcaggtacagaactggggcataaaaatggcctatatctgaaaataactccaaaaatttattattaaaattaatttcatttgcttctttttaaatttttttcatgtggctactagaaaaattaaaatgacagatgtggctcacattatatggctactggacagcactgatataaattatgcttttcatggttttatcataaaggggaccagaagatgggatggtagctggtggtgaagtggggtaaagagaaacttttttcccctgaaatgggagaattgcagcatgtttgtatgtgggaataatatagtcaaaagtagaagttggtgatgcagcagaagagacaggggacaaatgatgtcctggagtaggtgagtgcatttgggttccagcgcatangtggaggggtggccgaagggttatggactgttcatacagagtgacaggagaggaagccgaatgtgagggttgcaaacaaangngagtatttatggacatgggagtgccttggaagtccctnttttggaatcttaagggcctaagggagccanntnttanctgaaaaaanaaggatggggggn

SEQ ID NO: 12757 - DNA, 540 bp, Homo sapiens
  misc_feature 443, 520: n = A,T,C or G
ccctttcgagcggccgcccgggcaggtacatgtccactgaattggccagcctttataaatgattgtgaatcatctcaaggttcaacaggtgggaatggttaagaatagtatagatgcaagaaatgaacaattcagtaaacacaatccttatgataaaatttatttaataaaatgaaaaatgcttacaaaaaataaaagtaacatgctcagcatgctacctagaatttagtaagcattcagtaattattaacttacaaaatagaaatgtaaagtagataaaattctgtttggggtaatcagcacctaatcaaatgaaaatttcattaaagcagtaacaaggactgttttgttcataactgtatgttcaatacctagcccagtgcttgacggcaagtaggcatatattaaatattgttggaggaaggcaggcaggtaagaagaangaatgcaggaagaaagggaaagaagggagaaagggaatttctaacaaacagaaagtgaattgtcttgaagaaatatnctctttcataccaaggagaa

SEQ ID NO: 12758 - DNA, 360 bp, Homo sapiens
  misc_feature 335: n = A,T,C or G
cccttagcgtggtcgcggccgaggtacagctggcaagaatccagggcaacgtggttccctcgctcacggtcccggaaatgtccagggaagcaggtctgagcctgctgctgttagtgcattcagtcgcctgcctcagtctctctgtagagcctgcccgcgtacagactatttagttgtttgagaaaacaggggcgtttcctaatttggtctttatcctgcgacaacactttcagcagactagcctctccttatctcacagatcacaagcacccctagatagtgtgattctgtcagatagcatttatgcaaaaatctatgaagttaaaagatcgtangaagccaaatgaaatgttacctgcc

SEQ ID NO: 12759 - DNA, 120 bp, Homo sapiens
cccttagcgtggtcgcggccgaggtaccatttaactggtatataaccatcgggggcattccactggtaaaagaaagaatgcctcaaatgagcatgcatacaactccagtaaacacactgc

SEQ ID NO: 12760 - DNA, 540 bp, Homo sapiens
  misc_feature 503: n = A,T,C or G
ccctttcgagcggccgcccgggcaggtacttttttttttttttttttttgagatagagtcttgctctgtcgcccagcctggaatgcagaggcgtgatctcagctcactgcgacctccgcctcctgggttcaagtgattctcatgcttcagcctctcaggcagctgggattacaggcacccgccaccacacctggctagtttttgtatttttagtagagatgaggtttcaccatgttggccaggctggtcttgaactcctgacctcaagtgatcctcccgacttggcctcccagagtgctaggatttacaggcatgagccaccacacctggtccaaagcagaattcttaacacttccattttatagatgaggaagtagaggctactacagagcctcctacataatggggactcaacaaatgtgtttattgagtttgaatctttcccttacttatactttcattacatttataatctcttgccctatgtttaacttttctctaanaatattgaatgtgtcaattttatcttcaaattacttt

SEQ ID NO: 12761 - DNA, 180 bp, Homo sapiens
cccttagcgtggtcgcggccgaggtacgcgggacttgaaattataatatagcctgtccgtttgctgtttccaggctgtgatatattttcctagtggtttgattttaaaaataaataaggtttaattttctccccaaaaaaaaaaaaaaaaaagtacctgcccgggcggccgctcgaaagg

SEQ ID NO: 12762 - DNA, 660 bp, Homo sapiens
  misc_feature 490, 584, 596, 615, 628, 639: n = A,T,C or G
ccctttcgagcggccgcccgggcaggtacagattactatgtgaacccatgttttcatttctctaaaatatataaacccaggagtgtgaatgctgcgtcatgtagcatgctcaactttataagaaactgccaagctgttttcccaagttaattttaggaagtcaaatcaattgattttttcacgaagatgaagaaagttttatgcaactttcttcattattttgctgtcatataaaagttaataaatattcacttttattttcttctacttttagggaataaaaaacatttaattttaacacatctagaacttattttggtgtatgatgtaaagcaaaaatgtaaggtgaattttttttttctcaacagccaagcaatggtcttaatcccttttgttgaataaatccttcccatactaattaatttgtaatagcttctttttaatacaatttaattcttaaatgaaaacctgagttattctattcctctgngctgaggagtcaaaagttccacaggtcagatttaacattccaagccaaagggaccacctataatcccagcactttgggaggctgaggtgggcanaatgcttggggntagggagtcaagaaccagnctggccaacccgnggaaaaccccncctttcttaaaaataaaaaaa

SEQ ID NO: 12763 - DNA, 300 bp, Homo sapiens
cccttagcgtggtcgcggccgaggtacaggtatgggcacagatagctaaagtaaacatttcacagaacaagtgatacctgcccttctcagtgtgatggagtgtgatgtatttattgagtagcagcatagggtagtggctaagaacctaaactctaaatttagatgtcctgagttcaaatcccagctgtatgctcaccagccttgtatgtggggccagttaattaacctctttgtgttttacttttttcagttgtgaagtgtggataataatggtacctgcccgggcggccgctcgaaagg

SEQ ID NO: 12764 - DNA, 360 bp, Homo sapiens
  misc_feature 32, 33, 36, 41, 68, 75, 76, 78, 79, 82, 84, 85, 86, 88, 89,93, 96, 97, 99, 101, 102, 147, 211, 247, 264: n = A,T,C or G
ccctttcgagcggccgcccgggcaggtacttnnttnttttnttttttttttttttatttttttttttnttttttnntnnttntnnntnntacnttnnantnnttttgctaattttttaacttacaaccaacaaaagtgaatcaatangtttacaaatggtccatggcactacaattaaaataaaaaatatcaaaaggtcacaggatcttangtaaagtttactgacaatttcataaatattcaaaanaaaatttcaaaatttgnaaacttaaatttgcctcattttaacatttttgaaaaattttttaaaaatttacaatggttaatttttctcccctcttgggtatagtaaaccaatat

SEQ ID NO: 12765 - DNA, 420 bp, Homo sapiens
  misc_feature 344, 371, 392, 415: n = A,T,C or G
cccttagcgtggtcgcggccgaggtacttttttttttttttttttttttgggacggagcctcgctctgtcacccaggctggagtgcagtggtgtgatctcggctcactgcaacctctgcctcccgggttcaagctattctcctgcctcagcctcttgagtagctgggattacaggcgtgtcccacccggctaatttttgtattttttgtagagacggggtttcaccatgttggctaggctggtctcgaactcctgacctcgtgaccgccttggcctctcaaagtctgggattacaggcgtgagccaccgagcccagcccctccttaaaacaagtttctaattanaacccttattttacccaaatggggttnagggaacaaaaaccaaccctnatcaccctatttggggaaaaatnaattt

SEQ ID NO: 12766 - DNA, 540 bp, Homo sapiens
  misc_feature 29, 31, 491, 496, 509, 524, 530: n = A,T,C or G
cccttagcgtggtcgcggccgaggtacantngtctttattatcatatatggtatgtatgtatgatttctttccattcctcatatttagactgtatatttatgtaggtgtgagtgattgcctggtgcttgcttgtgccaaggtgctaggcaccctccaaccctgccaacttttgtggcctcccaaagcattcctgttaccaaagaggcttcaaacctgaccctcacttctcagtggacccgagtttcccttccatgccattattttcagtggggaagttttagaggtgagctgttggccacaatatcaattttaagtgttcatagcagctatgtctcctgcattcttggctcctggatttaccaccaagagtccccaaaatattaatgctcttccctttttctaccctcaaacttatagttgtatcttattttttaaaatgaattttcatggccgggcacgggggctacccgcctgtagttctcagcctccnaaganctgggacttacangcgccggccaccacncccggntaattttttt

SEQ ID NO: 12767 - DNA, 900 bp, Homo sapiens
  misc_feature 584, 630, 633, 734, 740, 758, 762, 795, 816, 822, 825, 832,839, 849, 853, 855, 858, 860, 871, 881, 899: n = A,T,C or G
ggagtcgaccccgcgtccggcggctgagcagggatttaacccgccaccatgtcgagcaaaagagcgaagaccaagaccaccaagaagcgccctcagcgcgcaacgtccaacgtgttcgccatgtttgaccagtcccagatccaggagttcaaagaggccttcaacatgatcgaccagaaccgggacggcttcatcgacaaggaggacctgcacgatatgctggcttcaatgggaaaaaatccaactgatgaatacctggacgccatgatgaatgaggccccgggccccatcaatttcaccatgttcctcaccatgtttggagaaaagctgaacggcaccgaccctgaggacgtcatcagaaatgccttcgcttgcttcgatgaggaagcaatcggcaccatccaggaggattacctgagggagctgctcaccaccatgggtgaccgcttcacagatgaggaagtggatgagctgtacagggaggcccccattcgacaaaaaggggaatttcaacttacatcgagtttcacgcgcatccttaagcacggggcgaaagacaaagatgactgaagagctgtggcttncaagccaaatgtccctgttgccattggggtattttctgagattttnctnctggagccggtcgcattgcccttgctttttctggcttttgctttccttggtttggatttattctcaagcccccttttggggccccgttgtacctttttatnattcanacttgggaaacggggacntttnttgttcatttggttcgatgagaacgttaagggnaattttactttacagacaggntttgtnccnttgtaanaacctgnagcccccagnagtnanttntnttttttttagnaaaaaagttntccccttcaatttttttnt

SEQ ID NO: 12768 - DNA, 480 bp, Homo sapiens
ccctttcgagcggccgcccgggcaggtaccattccgggtcatccgcagaaattcctcatagatggcaactctgtctactctccgagccagtggcgagaagttacacagggagtccaccccggtgtggtgcctgttggggacagacctgaatgttgaaacttgacagtcagaaaaataactcttgatgctgctgtttcggaagagttggttgagcgcatcctcaatattccttttgttcctctggtaattggtggtgcctggctgggctttgtcctgggaatatggtaggttggtgatggtgaaattcaggtagaagtgctgggtgctggagctgcttgttggttgataaactgatgactccatttctgtcacatggatgtccaccaactggtaggtggagcccaaccaatggaatgaggcattcagggtcttatctagaaagacttgctccaccaggctggggtccaaattggaggaaaa

SEQ ID NO: 12769 - DNA, 540 bp, Homo sapiens
  misc_feature 22, 26, 30, 74, 204, 258, 266, 275, 401, 431, 439, 444, 465,487, 499, 500, 503, 507, 509, 511, 517, 520, 524, 526: n = A,T,C or G
cccttagcgtggtcgcggccgnggtncagngtctctagtcttttgtaatctgatagaatagtcttccttatctncttttccccccctttaaatgacattacctttttgaagagaccatgccagttgttttatagactatcacacattctttatttgtctcatttgtttccttatgttatttaactcattccactaatccttgtntttctggtaagaggaagttaggtgtaaaggttgatgagactcgtttttggtaancagacctnacagtgatncacagcgttgtatttcatattgcatcatcaggaggctcacaatatcaggttgctgctcttgtggtgctgagttggattgcgtaaaggtggggaccttcagatcttccacgggaaaggtcctgcccnggcggccgctccaaagggcgaattccaacncactggcngcggntaaaaggtggattcaacctcnggaccaacttggcataatcatnggcataggctgnnccngggnananaaccanaanaccntnttaaaaaaaaaaaa

SEQ ID NO: 12770 - DNA, 360 bp, Homo sapiens
cccttagcgtggtcgcggccgaggtacaggtctctgtaaaaagtccttgctgtctcagcagccaatcaacttatagtttatttttttctgggtttttgttttgttttgttttctttctaatcgaggtgtgaaaaagttctaggttcagttgaagttctgatgaagaaacacaattgagattttttcagtgataaaatctgcatatttgtatttcaacaatgtagctaaaacttgatgtaaattcctcctttttttccttttttggcttaatgaatatcatttattcaagtatgaaatctttatactatatgttccacgtgttaagaataaatgtacctgcccgggcggcccgctcgaagg

SEQ ID NO: 12771 - DNA, 420 bp, Homo sapiens
cccttagcgtggtcgcggccgaggtaccaaaaccagacaaagacgcaacaaaaaaagaaaactacaggccagtatctttgaacagagatgcaaaatccttaaaccaaattcaactacatatttaaaagatcattcattgtaatcaagtgggattcatcccagggatgcaaggatggttcaacatactctgatatggtttgtgtttgtgtccctgcccaaatcttacatttaattgtaatccccagtgttggaggaggggcctggtggaacgtgattggatcataggagtggagttctcatgaatggtttagccccatctccccttgctactatatagttagtgagttctcatgagatctgattgtttaaacctccctgctctctgtctctctcctactctggccatgtgtgttcccctgt

SEQ ID NO: 12772 - DNA, 420 bp, Homo sapiens
  misc_feature 100, 101, 129, 130, 138, 139, 140, 147, 149, 150, 151, 158,162, 179, 180, 202, 217, 219, 231, 232, 235, 242, 246, 247,260, 266, 275, 276, 283, 285, 292, 293, 296, 297, 298, 299,303, 304, 313, 315, 326, 335, 340, 342, 362, 375, 376: n = A,T,C or G
  misc_feature 377, 385, 386, 389, 396, 397, 412: n = A,T,C or G
ccctttcgagcggccgcccgggcaggtacttttttttttttttttttttttttttttttttctttttttttttttttttttttttttttttttttatttnnattttttttttttttttttttttttttnnaaaaaaannngtttttnannnaaaaaangggnaaaaaaaaaaaaaaaannttttttttttttttaaaaaaanttaaaaaaaaaaatncnaaaatttttttnnccntttttangggnnggtttttaaaaantttttngaaaaaaannttttttncnaaaaaannaannnnaaanntttttaaanantttttaaaaanttaaaaaantttcngnttttaaaaaaaaattaaaantttcccaaaaatnnnaaaaaaannggnatttttnncaaaggggttccccnaaaaaaaa

SEQ ID NO: 12773 - DNA, 540 bp, Homo sapiens
  misc_feature 5, 18, 19, 28, 46, 462, 474, 483, 521: n = A,T,C or G
gcganttgggccctctanngctgctcgncggccgccatgtgatggntatctgcagattcgccctttcgacggccgcccgggcaggtacgaggaaatgagcttgacaaagtggtcactgagggcaatggcagccccagcatcgaaagtggaagagtgagtgtcactgttaaagtcagaggaaacaacctggtgttcagtgtagcccaagatgcccttgaggggccctctgacgcctgcttcaccacctttttgatgtcatcatatttggcaggtttctccagatggcaggtcaggtccacaaccaacacgtttgcagaaggacacggaaggccatgctagtgagcttcctgttcagctcggggatggccttgcccacagccttggcaacaccagtagatgcagggatgatgttctggagagccccacagacatatgccacagtttcccacagaggccatcgantcttctgggcangagtggcancatggattggggtcacaagtccttccacaatgcccaanttgtcatggatgggcttgg

SEQ ID NO: 12774 - DNA, 540 bp, Homo sapiens
  misc_feature 213, 315, 374, 389, 408, 432, 434, 463, 473, 474, 489, 494,523: n = A,T,C or G
cccttgagcggccgcccgggcaggtaccagttttaaggttttaattcatttgaatcacttatgaattgatgatatacagcaattacttttcaaaattaattttttattaattcatgatgataaatacatagtattcctcagtatctattccaagatactgaggtcataatcagaagctaagctgggtgcagtggctcatgccagttatcccancactttgggaggccgaggtgggcaaatcatgaggtcaggagattgagaccttcctggctaacatggtgaaaccccatctctactaaaaatataaaaaattanccaggtgtggtggcacgcatctatcagagtcccagctactcaagaggctgaggcagganaatcgcttgaacctnggaggtggaggttgcactnaactgagattgtgccactgccttncncctggggtgacagaatgagactcctcttnaaaataattnnttaatcataataatnaagtnaaaaaattaaaataaaaaaagttaatcanaagcttaaagtaaaagt

SEQ ID NO: 12775 - DNA, 300 bp, Homo sapiens
cccttagcgtggtcgcggccgaggtacgcggggggggagccgcccgttcgcgctgccagcagcttccgcctgctacggtcctggcaagcacctcgggatcccattccttcacagggaccctagccagttaaagctgatacattcctgtgggtcaactatgcaactaactcagattttgaggagtctctgcattagttggacagctcttctggaattatcttctaagccaactgtgggttgggtaggtggctctgctgatttttcgctggacttccacatttgggaccagttggctgtcat

SEQ ID NO: 12776 - DNA, 600 bp, Homo sapiens
  misc_feature 448, 539: n = A,T,C or G
ccctttcgagcggccgcccgggcaggtactttagtggtaacaattatttgctaataatccagaacctacaaataacagaaggaaacagcacactcttaaataaataatgggacaaggaagaaactacaaagtcaattagaaaatactttaagattatgtagaatgagggcccaacacacgaaaatgtattgaatgcagtgaaatggtgcataaagggaaatttattatttaaatgtttgtatctaaaaagaagtaagggctcatataaataaacccaatcttccacatacaattctggaaaaagaagagcaactaaacctaaagtgagcagaaggaaagaactaataaaatgttaagtgaaaaataaaggagagaatacaaaaacaataggtagaataaacaaatctaaaagttggtacatgttccaaggcaggtgactgtgaacttnctctgagtgaaggcatcccctccacacctttcagcctgctagttaggacgacccggccgccaccctccaggacctccagcccttgcactgnctttccttttttttaaataattcttcattgagttctaatatgtaaaaaaaaaaaaaaggaa

SEQ ID NO: 12777 - DNA, 660 bp, Homo sapiens
  misc_feature 585, 616: n = A,T,C or G
cccttagcgtggtcgcggccgaggtactgtagaactggaaaataaagctaaatacccccctccccccatgcaactatttagactttcagatgtgtttctaagagaatgaacctaactttaaaaaatctgttactcaccacagcaaagacaaagtctagatacttaatggtgctgctattgagtctaagtagagcagtgtgagaacggcagctgcctgtggagtgagttgtattggggttgatgttaataactgaagcaaccttatcctgagtgatgttcagctgcagccccatggtagccagcagacaagtatcattgccattattaactgaataggttccagcttctggtttttcctttggagtaggtgttgtagtaggagatggcacagtggtgtgtatggtgggtgccactgttgaagttttgtctttatcacacaggaactcatttgtgctcactgtgccattttggacaaaagcttgtactcttcaatcaacaagacctgatgcaaaaaaaacagaaaaggggaagatgtgagggatcagtcagagtggtgggctcaagagtggacttaatgagggctgnctcaaggttctgtaataaataaacagagtangcagcaaaaaaaaaaaaaaaaaaaaagtacctgcccggccggcc

SEQ ID NO: 12778 - DNA, 120 bp, Homo sapiens
  misc_feature 76, 80: n = A,T,C or G
agatggatatctgcagaattcgcccttagcgtggtcgcggccgaggtacctatatgttggagttaatgtgccatcncttntacacacacacacacacacacacacacccttacctattta

SEQ ID NO: 12779 - DNA, 420 bp, Homo sapiens
ccctttcgagcggcccgcccgggcaggtactaactctgttgcattaatgcttcaaaaaatcatcaaatgattcatgggggcctgatttgtatttgaaaaatgtttgaaattaagagtctcatttgtttcaggaatgcagctacctgagttttttgtcttggcaaagtcacaaagcccatatactcacattgtgtgtctatatttgccaattaattctaaacttctaggaaatatgccctctcttaaaggagaattttttttaaatctctgagaaatgagattctgagtttatttcaactaaaaggttgcaattcttctgaagatatctcaaatataaggttgaaagttaagtgttaataatttttgtgaatttatacacacctaaaccgttaagtacctcggccgcgaccacgctaaggg

SEQ ID NO: 12780 - DNA, 240 bp, Homo sapiens
  misc_feature 92, 95, 100, 117, 123, 131, 141, 142, 153, 156, 157, 162,170, 174, 175, 177, 182, 188, 192, 203, 214, 221, 229, 240: n = A,T,C or G
cccttagcgtggtcgcggccgaggtacctttttttttttttttttttttttttttttttttttttttttttttttttttttttaaaaaaaanaanatttnttttttcccaaaaaaanaaaatnaaaattgntaaaaaaaanntggctcatttnaannaattnaattactnaaanncnttcanattttnattnaaaaaaaaaanaaacactcttnctttttnaattttanttcctttcccn

SEQ ID NO: 12781 - DNA, 360 bp, Homo sapiens
  misc_feature 10, 108, 123, 129, 222, 283, 339, 351: n = A,T,C or G
cccttagcgnggtcgcggccgaggtacatggttggacaagctttcttgtccttgctggaaagaaaatgactacttactaatatattttgggaaaaatatttgtaagantattaataagcttgntttccnggacctatttaagaaaaataccacgttttaatgcagattctggctattccatccattctgattcagaaagtcaggtaagattgaatagatacnatacacactattttaattagttttcaaatagtagctaaaaagtaggaataaaatgcaaagnattaattgctctaaggaagtatgaagtctgttgctttaaaacatcttttctccaantaatagtttgtnaataaacaa

SEQ ID NO: 12782 - DNA, 360 bp, Homo sapiens
  misc_feature 133, 155, 197, 227: n = A,T,C or G
cccttagcgtggtcgcggccgaggtacccttacgaatgccacgattgtgggagaaccttcaggaggaggtcgaatctgacacagcgcataagaactcatactggagaaaaaccctacacatgtaatgaggtgngggggaaaatccttaaccaatnagctttttcttcttacaattcacagggagaaatacataatgngagaagaaatcctatgagtgcagtggattngtgggaaaatcctttaatgttctctcgtccgttaagaaacacatgagaacttcacacctggaaaaaaaaccctatgaattgtaatttatttgccggggaaaaatccttcacaaggtaactcctaccttttctg

SEQ ID NO: 12783 - DNA, 360 bp, Homo sapiens
  misc_feature 310: n = A,T,C or G
cccttcgagcggccgcccgggcaggtacttgaatgttgatatctttctctagacttgggaaatcctctgatattacacctttgactagactttctacctccatctctttctctacctcttctttaaggccaatagctcttagattcacccctttaaggctagtttttagatcctgtaggcatgctttattatttttatttttattggctcctctaactgacctggcttcaagctcactaaattctttcttctgcttggacaattctgctatttgagagactttggatactttctttcagcatgtcagtancagttttcaactcttagaaatttctcttggatcttattccaatcttttgg

SEQ ID NO: 12784 - DNA, 1225 bp, Homo sapiens
  misc_feature 393, 394, 395, 396, 397, 398, 399, 400, 401, 402, 403, 404,405, 406, 407, 408, 409, 410, 411, 412, 413, 414, 415, 416,417, 418, 419, 420, 421, 422, 423, 424, 425, 426, 427, 428,429, 430, 431, 432, 433, 434, 435, 436, 437, 438, 439: n = A,T,C or G
  misc_feature 440, 441, 442, 443, 444, 445, 446, 447, 448, 449, 450, 451,452, 453, 454, 455, 456, 457, 458, 459, 460, 461, 462, 463,464, 465, 466, 467, 468, 469, 470, 483, 501, 509, 510, 551,565, 584, 592: n = A,T,C or G
cccttagcgtggtcgcggccgaggtaccttcatatacccagaaatgcactggaaatcgggacattttgtttcttcgtctttaataagttgtgtttgaagtcctacattgagccaaaattcatacctggaaactgaattctagaaagattattttggaaagcctgtagttacgtgtattaccactagatgaccttccctcattattgtctctaaagtggagctgctagttatatggactttccagaggactgtaggaaatttatgaataatccctctaaagcaacaacgacaacaacaacaaaaaagtctactttatatggtgttgagtgtacctgcccgggcggccgctaagggcgaattccagcacactggccggccgttactagtggatcnnnnnnnnnnnnnnnnnnnnnnnnnnnnnnnnnnnnnnnnnnnnnnnnnnnnnnnnnnnnnnnnnnnnnnnnnnnnnnccaacaaccatancgaagcccggaaagccantaaaagtnntaaagccctggggggggcctaatgaggtgaacctaactcancatttaatttgcgnttggggcctttattgggtngggttttnagggggggacgcgtccgggagacacaaagcaggaagcctccgggagaccagagctgggtgcagacatacacacacacatacacacagacacacagagtcacacacactcacacacactctctctctctctccctctgtctttctctctctctctctctctctgtcctttcctcctggacagatccacagttatacacagaaacaaacacacacgcacgtagagaagtgattcacaaacacttaaagacataaatcacaggtgcaaagccatacctgggctcaaaaacctccaagagaacgcagcctcagacccacccaggggccaggggccaggctgtttgcgagaccagcccaggcgggacccaggcttgcacgggcaggtacacgacattcttgggcatacgcagcccgcctggccggagctgtgggagtcctcagccccaagacccagcaggcgtctgaggcctgcccactaaggaggaggagtcattgctgccatcattatcatcccctccccagccacagtctgaggagcccctgtccacccttccccagggcctacccagcctccctctccaacttcctgccccccggagatacctccaaagccgtacgcctgttcccagagttcga

SEQ ID NO: 12785 - DNA, 493 bp, Homo sapiens
ccggaaagctggtgggaatgctaagttccgagagttcctggagtctcaggaggattacgatccttgctggtccttgcaggagaagtacaacagcagagccgcggccctctttagggataaggtggtcgctctggccgaaggcagagagtggtctttggagtcatcacctgcccagaactggaccctaccttagcccaggacgctgccgtccatggtgcaccgagtctctggccagccgcagagtgtgaccgcctcctcggacaaggcttttgaagactggctgaatgatgacctcggctcctatcaaggggcccaggggaatcgctacgtggggtttgggaacacgccaccgcctcagaagaaagaagatgactttctcaacaacgccatgtccttcctgtactcgggctggagcagcttcaccactggagccagccggtttgcctcgggagccaaggagggcgctacaaagtttggatcccaagcgagtcag

SEQ ID NO: 12786 - DNA, 443 bp, Homo sapiens
  misc_feature 303, 304, 318: n = A,T,C or G
acgcgtccgggacgcgggcgccaggtgcacagccccagtccgctgcgggcgggcgtcgacatctgccgcgtgagcgcgagctggagctacaccgctttcgtgacccgtggaggccgcttggagctgtcgggctcagccagcggcgcggcgggccgctgcaaggacgcgtgggcctcggaggggctcctcgcggtgctgcgcgccgggccggggccggaggcgttactgcaggtctgggcggccgaatcggcgctgcgtggggagccattgtgggcccagaatgtggtgcccgaggccgaaggnnggaagacgatccgnccggtgaggcccaggctgggaggctacccctgctggcctgcggcccgggcctacgtgagcccgcgggcgcccttctaccggcctctggctccgggagctgcgggcacgccagctggagctgggcg

SEQ ID NO: 12787 - DNA, 373 bp, Homo sapiens
  misc_feature 337: n = A,T,C or G
cgcgtccgggaattgcagccgcggggcgggcggcggcggcggcggcggcggccgggacccagcgggccaggtggggacggcgcggagcgggtgcgggagatgccgtgcgggactggggccacctgagccgcccgcctcgtccccgccttctgtgggaaggatgtgcgcgcggatggccggtcgcacaacagcggcccctcgggggccctacggcccctggctctgcctactggtggccctcgccctggacgtcgtgagagtggactgtggccaggctcccctggaccctgtctacctgccggcagccctggagctcctagacgcccctgaacacttncgtgtgcagcaggtgggccactacccacctgccaac

SEQ ID NO: 12788 - DNA, 474 bp, Homo sapiens
tcggagtcgcccacgcgtccgactgtatgtattctggatacagggatactgggctcgctatgtgtgtggagccatcccttccttgccccagccccacctccctctcaaaccctctctggctctttctgagcttcctttcctgctccccagcttgcccagtgctcagtgccccacttggctcttttgctacttcgggtcaggtggagcctcttgggaatgtgaagtgccttacagaaagattgcacttcaagaggagaggctgcagggagccatcctaaacccagaggcctggagcttaccgtgtcactttacttttgtacaccaggggtctccttagtgccctcgagaagggattcttggccctgagcttctactcctgaggccacctctgtgcagccccagctccctcaacttaggctgtagtctcagtgggaaagcctggttgggggtctctaggaatgtccacctgaggca

SEQ ID NO: 12789 - DNA, 446 bp, Homo sapiens
  misc_feature 378: n = A,T,C or G
gtccgcgtcctcgctgcggaaagttggggcaacctgttgctagtctggtcgttggtgacagcgaggcttccgcgctcgctgctggtgagcagccccggcgtgccccgcgggctggaagaggcggcggcgtgatgcggcccgtggacgcgccccgcgccggccgcgagaacctggcctccctggagcgcgagcgcgcccgggcgcactggcgggcccgcaggaagctgctggagatccagagcctgctcgacgccatcaagagtgaggtggaggcagaggagcggggcgcccgggccccagcaccccgcccgcgtgcggaggctgaggagcgggtggctcggctgtgcgccgaagcagagaggaaggctgcggaggcgncgcggatgggcaggcggatcgtggagctgcacaccggatcgccggtggcgagtgctgctgagccggcg

SEQ ID NO: 12790 - DNA, 420 bp, Homo sapiens
  misc_feature 400: n = A,T,C or G
ggagtcgacccacgcgtccgcgcgctggaggagtggagcagcacccggccggccctgggggctgacagtcggcaaagtttggcccgaagaggaagtggtctcaaaccccggcaggtggcgaccaggccagaccaggggcgctcgctgcctgcgggcgggctgtaggcgagggcgcgccccagtgccgagacccggggcttcaggagccggccccgggagagaagagtgcggcggcggacggagaaaacaactccaaagttggcgaaaggcaccgcccctactcccgggctgccgccgcctccccgcccccagccctggcatccagagtacgggtcgagcccgggccatggagccccctggggagggcggcaccagggagcctgggcgcccggggcttcgncgcgaccccatcgggtagac

SEQ ID NO: 12791 - DNA, 471 bp, Homo sapiens
  misc_feature 443: n = A,T,C or G
gggagtcacccacgcgtccggagcacgcaaagggaataaattgtaattaggtggtgggtggctaaaaatgacaatgcaaaggtgttggattaaaaaaaaaatctggtagtagagggaaattatggaggatttttaaaaaggttaatgataatatccatctacttatgtaactttttttggagatacctgataatagtgtagagtgcattggagaggaaaagtaggagttgtaaagaccattttggataaactttgaagcaagggataatggcctcaaccaaggtagtggtgctgaagattgtttacataaataagcagatacaaatagaaggatttttcaagtggcattgtaactgcacttttcaaagttatttgccaaaaatcaaataacggtatcttcaaaaatcatgtttgatgatgtatcatcaagggtctttcttaanattttgttgaaagcaaaggaataagagc

SEQ ID NO: 12792 - DNA, 522 bp, Homo sapiens
  misc_feature 138: n = A,T,C or G
tgacgatttcggagtgacacgctccggagttgaggccggaggagcccgcgcctcgggccgggcgcttggaggcaacgcacccaagtttcccgcgagagaatccatgacctggaccgggcccccggagccggggcttgncttctcggggtgtcctgggtccggggggagcccaatgctccaagcccggcggcgggccgaaggctgcagtttccttgcgtgagagaaagcgaggacggaaccgcggggggctcgcgcggcgcctgcggggggaaggcaatttccggccgggccgcgccttaacagggcgggcggctcccagcgcagtctcagggccccgggtggcggcggcgactggagaaatcaagttgtgcggtcggtgatgcccgaatgagcggggggcctgggcctcttgccttaagaggcaactcccacgcaagccggaaaggggctcttgcggccgaaggctttctttcgggttcgcggcggggcggcctttttggttaaggggacccgggacacctg

SEQ ID NO: 12793 - DNA, 471 bp, Homo sapiens
ccacgcgtccgccgacattgtggccaagtgccatgaggagcagctggatcattctgtccagtcatatattaagttcgtgttcaagaccagggcatgcaaggagaggactgtacatgaggaactggctaaaaatgtgactggtcttttgaaatcaaatgactcaacaacagtaaagcatgtcctaaagcattcctggttcttctttgcaattatcctaaaatcgatggcacagcacttgattgacacaaataaaatccagcttccccggcctcagagatttcctgaatcttaccaaaatgaattggacaatcttgacatggtcctatccgaccatgtgatttggaaatacaaggatgcacttgaagaaacaagaagggcaaaccacagcgatgccagatttctcaagcgctgctttacatttatggaccgagggtatgtgtttaagatggtcaacaattacatcaggcatgt

SEQ ID NO: 12794 - DNA, 341 bp, Homo sapiens
gcgtccggcttcctagaagagcacagtcccttaaagcaccctctattgctacaattaaaagtctagcagattgtaactttagttacacaagttctagagatgcttttggctatgctacactgaaaagactacagcaacaaagaatgcatccatccttatctcactctgaagctttggcatctccagcaaaagatgtgctatttactgataccatcaccatgaaggccaacagttttgagtccagattaacaccaagcaggttcatgaaagccttaagttatgcatcattagataaagaagatttattgagtcctattaatcaaaataccctgcaacgatct

SEQ ID NO: 12795 - DNA, 431 bp, Homo sapiens
gggagtcgacccacgcgtccgccaagtcctgcgatgatggactcaacaccttccgcgacgagggccgggttctgcggcgcctgccaaaccgcatacccagcctgcggatgctccggagcttcttcaccgacgggtccttggatagctggggcacctctgaagatgctgacgctccttctaagcgacactcaacctctgacctctcagatgcgaccttcagcgatatcaggagagaaggctggttgtattataagcagattctcaccaagaaggggaaggctgaggaccgggatgacatgctgggctggatcagagcgatccgggagaacagcagggccgagggcgaggaccccggctgtgccaaccaagctctgatcagcaagaagcttaatgattatcgcaaagtgagccatagctctgggcccaaagct

SEQ ID NO: 12796 - DNA, 544 bp, Homo sapiens
gaactagacttatggggagtgagtattaatgttctcaggcatgaagcagaattttacgggatcactccattagtaagaaggcttctcttatgtgaagaattggagcgttcctcttgtggcagtgtcctttttcatggttacttgcccccaccaggtattcctagtcgtaaaataaacaacacagtcagatctgctgattctaggaatggtctaaattctacagaaggtgaagcccggggaaatggtacacagcctgttctctctggaacgggagaagaaactgttaggctaggatttcctgtggatccacgaaaggtgctaatagtagctggccatcacaactggattgtagctgcatatgcccattttgctgtgtgttacagaatcaaagaatcttcaggatggcagcaagtgattacgagcccatatttggattggactatcgaacgagtagctttaaatgcaaaggtggatggagggccacatggagaccaagacaaaaatggttgctgttgccttagagagtagcatcatcttgtggagt

SEQ ID NO: 12797 - DNA, 542 bp, Homo sapiens
cgacccacgcgtccgaaaaaattaagagaaggcctggcggccggtctgaagtcatctataattatgtacaacgccccttcatccagatgtcatgggaaaaggaagaagggaagagtcgccatgtggatttctagtgtgttcgaagcaaatccctcacgaatctggtagctgctggagatgatgtcttggaggaccaggagatattaatgcatcacccaccccaagtggatgaacttgaccggctaaatgccccactttctcagatggcttctaacgactttcaggattagggccagctgtgggtctactccttgttggagcccatctcacctgggatgcctgcagccagccctccctcgtgatttgtctcaccttgagtaggagacatgcttctcccctaaccttttcctttctgccataattaacatatgtccttttcagtaagtccatgcctctggcaggggatgaagaagtactcactggtaattagctaccatctttgcagcagccctggtaacttgaaaaatttgggtctggtgctg

SEQ ID NO: 12798 - DNA, 500 bp, Homo sapiens
ggagtcgacccacgcgtccgccgagcggggcggcgcggctggcggggccggcggcggctgaagcgagagcgcgacgcgacgcgaccgcggcttcccgagctgcgcctggccgcccagcgccgcggcccgcccgaggcctggaggggtccgggccgccgtccatggtcgcggcgtcctgaggcgggggacgcgcccggcgcccccggccctcctccgcctcctcccgcggggcgggcggcctcctccggcgcctccccgcgcccgcccgccgatcgccgccgcctccctccctccttccctgcggctcccccggctttcggagcccgggggcggcctgtggcgcgcggagcccgcgccggactgcgcctctttggaccttgaggggaaacatgcgtttgccttggatcgtttgaaattctgagtttgggatccccggccgcccgcctgcctttttcgcccgcgggttttttccttttttccttttgttttttttccttctc

SEQ ID NO: 12799 - DNA, 523 bp, Homo sapiens
gcgtccgttaattttttgtgagcctgcagagtaagtttttaaaaatatacgttcatagcattttaattaactttgaaagttcatatgcatcagaaaatttatgaaaatttgaatgaaaaaaatttcatctatttatttttctaattttaatggcaaatttacactattatggctgataattctgtgaacttaccttcttgttgactgattctttttcccttaatcccagctttaaggagataggtgaagttattgtacaaagttaagtgataccataaagtatatattataaagtcatacatggcttttggacagtattatatttcagttgcagtgctgcattccattaaatttcataaaatgctagggaaaatgtgtttgataaaattttctgcagtgagaaatgacagactgagtgcctgacaatttaagccacatatgaagtatgcaagtaaagattcagtccttaatgtcatctatatcatggtataaaagctcaacaagtatcttataatttggagtt

SEQ ID NO: 12800 - DNA, 447 bp, Homo sapiens
gacccacgcgtccggacgagacgagcccactagtgtcccccgagcgggcccaacccccggactacaccttcccgtcgggctcgggcgctcactttccgcaggtgcccgggggcgcggtccgagtggcggcggcggccggctcgggcccctctccgccgggctcgccgggccacgaccgcgagcggcagccactgttggatcgggcccggggcgcggcggcccagggccagacccaaaccgtggcggcgcaggcccaggctctggccgctcaggccgcggcggcagtccacgccgatcaggcccaccgcgagcggaacgagttcccggcaggatcctgagttcgaggcggtggtgcggcaggccgagctggccatcgagcgctgcatcttttccgagcgcatctaccagggctccagcggaagctacgttgtcaaggaccctcaggga

SEQ ID NO: 12801 - DNA, 505 bp, Homo sapiens
cgggagtcgacccacgcgtccgggcggtgggtgtccgcttctctctgctcttcgactgcaccgcactcgcgcgtgaccctgactccccctagtcagctcagcggtgctgccatggcgtggcggcggcgcgaagccggcgtcggggctcgcggcgtgttggctctggcgttgctcgccctggccctgtgcgtgcccggggcccggggccgggctctcgagtggttctcggccgtggtaaacatcgagtacgtggacccgcagaccaacctgacggtgtggagcgtctcggagagtggccgcttcggcgacagctcgcccaaggagggcgcgcatggcctgggtgggcgtcccgtgggcgcccggcggagacctcgagggctgcgcgcccgacacgcgcttcttcgtgcccgagcccggcggccgaggggccgcgccctgggtcgccctggtggctcgtgggggctgcaccttcaggacaaggtgctggtggcggcgcggaggaacg

SEQ ID NO: 12802 - DNA, 468 bp, Homo sapiens
gtctggatccccgggtaccgagctcgaattaattcctcttccgcttcctcgctcactgactcgctgcgctcggtcgttcggctgcggcgagcggtatcagctcactcaaaggcggtaatacggttatccacagaatcaggggataacgcacgaaagaacctttgagcaaaaagccctcataaggccaggaaccgtaaaaaggccgcgttgctggcgtttttccataggctccgcccccctgacgagcatcacaaaaatcgacgctcaagtcagaggtggcgaaacccgacaggactataaagataccaggcgtttccccctggaagctccctcgtgcgctctcctgttccgaccctgccgcttaccggatacctgtccgcctttctcccttcgggaagcgtggcgctttctcatagctcacgctgtaagtatctcagttcggtgtaggtccgtcgctccaagctgggc

SEQ ID NO: 12803 - DNA, 509 bp, Homo sapiens
gagtcgacccacgcgtccgcctggagccgccagagtttccgcacccgggagggagatgcggccggggctcaggctccttgcagttgtaatttagattcgagaagtggtttatcctttgactggaaaagaaaagtagctgcagtattcccccagcacttgctgagagcatgccgtatgccaggctgtgaggctcgagagacaagcagtggaagagttgcggcctgtttcatctctggattgtaaatctgagcctccttctggcccctggaaggggacagcatcacgatggaatgattcctaaccagcataatgctggagccgggagccaccaacctgcagttttcagaatggccgtgttggacactgatttggatcacattcttccatcttctgttcttcctccattctgggctaagttagtagtgggatcggttgccattgtgtgttttgcacgcagctatgatggagactttgtctttgatgactcagaagctattgttaacaataag

SEQ ID NO: 12804 - DNA, 507 bp, Homo sapiens
ggagtcgacccacgcgtccggcagccgcggggcgggcggcggcggcggcggcggcggccgggacccagcgggccaggtggggacggcgcggagcgggtgcgggagatgccgtgcgggactggggccacctgagccgcccgcctcgtccccgccttctgtgggaaggatgtgcgcgcggatggccggtcgcacaacagcggcccctcgggggccctacggcccctggctctgcctcctggtggccctcgccctggacgtcgtgagagtggactgtggccaggctcccctggaccctgtctacctgccggcagccctggagctcctagacgcccctgaacacttccgtgtgcagcaggtgggccactacccacctgccaactcctctctgagctcccgatctgagacctttctgctcctacagccctggcccagggcccagccacttctccgggccttctacccaccttttgccactcagcaggtggtcccccctcgagtcactgagcc

SEQ ID NO: 12805 - DNA, 500 bp, Homo sapiens
gcgtccgcccggtgcctccgccatggaacgcgcggagtggcgccgccgcggctacgcgccgctgctctatctgcagtcacactgcgacgtgccagcggaccgggaccgctacgtgcgcgagctcatgcgccacatcccggtagactcctacgggaaatgcctgcagaatcgggagctgcctaccgcgcggctacaggacacagccacggccaccaccgaggatccagagctcttggctttcttgtcccgctataagttccacttggccctggaaaatgccatctgtaacgactacatgacagaaaaactgtggcgtcccatgcacctgggcgctgtgcccgtgtaccgcggttctccctctgtgagggactggatgccgaacaatcactccgtcatcctgattgatgattttgagtctcctcagaagctggcagagtttattgactttctggacaagaatgatgaggagtatatgaaatacctggcatacaagcaacctg

SEQ ID NO: 12806 - DNA, 497 bp, Homo sapiens
gcgtccggctgggcgaatcagggattccggttcacaatggatgctgataaagagaaagatttgcagaaatttcttaaaaatgtggatgaaatctccaatttaattcaggagatgaattctgatgacccagttgtgcaacagaaagctgtcctggagacagaaaagagactactgcttatggaggaagaccaggaggaggatgaatgcaggaccaccttgaacaagactatgatcagtcctccacaaactgctctgaagagtgcagaagaaataaactcagaggccttcttggcatctgtggagaaggatgcaaaggaacgagccaagagaagaagggaaaacaaagtcttggcggatgccctaaaagaaaaagggaatgaagcatttgctgaaggcaattatgaaacagctatcctgcgctacagtgagggtttggagaagctgaaggacatgaaagtgctgtacaccaaccgagcccaggcttatatgaaacttga

SEQ ID NO: 12807 - DNA, 500 bp, Homo sapiens
ggagtcgacccacgcgtccgctccctctgagttgcgctgggcttggctgctgcaccatgaccctggaggcgatccgctactcgcggggctccctgcagatcctagaccagctgctgctgcccaagcagagccgctacgaggcggtgggctcggtgcaccaggcctgggaggccatccgcgccatgaaggtgcggggcgccccggccatagccctggtgggctgtctcagcctcgccgtggagctgcaggcgggcgccgggggaccgggactcgccgcgctcgtggccttcgtgcgcgacaagctgagcttcctcgtcaccgcccggcccaccgctgtcaacatggcccgcgccgcccgcgacctggctgatgttgcagcccgggaggccgaacgggagggcgctacggaagaggcggtccggagagagtgatctgctgcaccgaggacatgctggagaaagacctcagagacaaccgaagcattggggacctaggagccc

SEQ ID NO: 12808 - DNA, 476 bp, Homo sapiens
ggagtcgacccacgcgtccggataacgaagctgctaccatgatgatggctgatctcatgttcagaaaacaagactatgaacaagcagtgtttcatttacagcagcttttagaacgtaagccagactcctcgagttcagggatcacaccatattcccaatatcagacaaaatgccacacacatggatgtggcaacatagatgtttattggttgaatggatcagtgaatgactgtaaaacaccaagtcaattaaaaacacagcaggagaatcgcttgaacctgggaggtggaggttgccgtgagccaagatcacaccactgcactccagcctcggtgacagagtgagacttggtctcaaaaacaaccacaaaattttaaataattatatgacattatctcgtttgattgatctcctaagaagatgtggaaaactcgaggatgtcccaagatttttctcaatggctgagaaacgtaact

SEQ ID NO: 12809 - DNA, 407 bp, Homo sapiens
gcgtccggggccatccaggagagcctcctcaccagcacagaaggcctgtgccccagcgccctgagcgagacaagccgttttgataatgacttgcagctagccatggagctctctgccaaagagctggaggaatgggagctccggctccaggaggaagaggctgagctccagcaagtcttacagctgtcactcactgacaaatagacctttcagcctgtgagcctctgcacaaagcagaggctgtgggctgtcacagatgctgtgtcaaccagggccctagggctaagggcctgcaccttgcgtgcatgcagcaggcaacaactgccccttctttatgcagaggtgcagaaccagggactcctgggcccatccaggctgctccctggggtggagaagggaccagggat

SEQ ID NO: 12810 - DNA, 323 bp, Homo sapiens
cacgcgtccggccggcgatgccgcgcccccgggccgggctgtagcggggccgcggctggagtgtgcgccgggcaggcgggacatggaggtggtggacgagacggaggcgctgcagcgcttcttcgaaggccacgacatcaacggtgccctggagccctccaacatagacaccagcatcctggaggagtacatcagcaaggaggatgcctccgacctcacactgccggactctcccccagactcgggctccgaggcctactccccccagcaggtgaatgagccccacctcctgcgcacgataacccctgagacactgtgccacg

SEQ ID NO: 12811 - DNA, 311 bp, Homo sapiens
cgaccacgcgtccgccgggagggccgagcgaggcgcaggcaaccgggcagcaggcatgatgccctcgcctagtgactccagccgctcgctgaccagccggcccagcaccaggggccttacccacctccgccttcaccgaccctggctgcaggccctgcttacgctggggctggtccaagtgctcctgggcatcctggtggtcaccttcagcatggtggcctcttccgtcaccaccaccgagagcatcaagaggtcctgcccgtcttgagctgggttctcgaacctgctcttcagcgtctgtgggctcacca

SEQ ID NO: 12812 - DNA, 396 bp, Homo sapiens
cgcgtccgatttaagtagcagggagtccatgtgttcaactccagcatttcctgtgtctccagagacaccgtatgtgaaaacagcgctgcgccatcctccgttcagcccacctgagcccccgctgagcagcccagccagtcagcacaaaggaggacgtgaaccacgaagctgccctgagacgctcactcacgctgtggggatgtcagagagccccatcggacccaaatccacgatgctccgggctgatgcgtcctcgacgccctcctttcagcaggcttttgcttcttcctgcaccatttccagcaacggccctgggcagaggagagagagctcctcttctgcagaacgccagtgggtggagagcagccccagcccatggtttccctgctggggagc

SEQ ID NO: 12813 - DNA, 500 bp, Homo sapiens
gtccggtttacttgtcagttcattgatttaaaatagaatatcaattgaatttagaaaattctcaaaagccagtttaatgctgttcatcttttaaggccaaaaaaagtttaatccagaggcagtctttcattctgcactaatttataatttagatcaaagaactaattatatatctcaaatttaataataaaaaggtatagtaatgagaattaaatttatggtaaattatataactcagaatgttaaagtaacttggaaattcttaatctaagttaagtatctttttatttcttacttgtcctgtttgatttattaagggaaaagaaaattttaaggagttgccagtatttctttgtctattgaaagtggaatgtttattcacccttatttatatacttaaaagacattgtattggcctggtctcgaactcctgacctcaagtgatccacccacctcggcttcccaaagtgctgggatagaaggcgtgagccaccacgcct

SEQ ID NO: 12814 - DNA, 493 bp, Homo sapiens
gcgtccggtgattttgaacaattctgaaatatttcaggtaagattaataacatccaattacaaatatatgtttcaatattttatacgtatgtctactttgaaagttaaaccaatagtatagaaagcctaagaatgaacactgattggacatactcacagaaattaagggaaaaacacatattgtaaaattcctgtcaatgtttgagtagaatacagaagtacatagcagtcttcaatttttaaacacaattatgggcttataactggacgtgacatgcatcatttattagaacaatattatttatttatactaagtaaggatataagatcacagaagcttagtgttataacggagacttcacagacattcataactaatgttttctaaggcaaataagggcataaaccagaactcatggtcagtgcagagtaagtataaaaagttatgtatgaaagacatttatttatagagatttctgaggattctatgcct

SEQ ID NO: 12815 - DNA, 478 bp, Homo sapiens
gtccgggaaactggttccgatggtgtctgcccaggagcgcctgacacgcaccttcacacgcagcagccacacctacacccgcacggagcgcacggagatcagcaagacgcggggcggggagacaaagcgcgaggtgcgggtggaggagtccacccaggtcggcggggaccccttccctgctgtgtttggggacttcctgggccgggagcgcctgggatccttcggcagcatcacccggcagcaggagggtgaggccagctctcaggacatgactgcacaggtgaccagcccatcgggcaaggtggaagccgcagagatcgtcgagggcgaggacagcgcctacagcgtgcgctttgtgccccaggaaatggggccccatacggtcgctgtcaagtaccgtggccggcacgtgcccggcagccccttttagttcactgtggggccgctgggtgaaagtggtgcccacaaggtgcgggcc

SEQ ID NO: 12816 - DNA, 511 bp, Homo sapiens
  misc_feature 439: n = A,T,C or G
gcgtccgaggaaattgttaaaaataatttgggggtgtttattggggaaggaaacagggccttgacagtggaggacttggaagacatgtaatttaagatatagagtatgattgttggaaaataagcatggagatccagaaggaatcttaagagtttttctatgcaagtgaagatggaagaaaatatgtattttacaaaagataaattacaagtaccttatttgctttgcaaaataacttatcatgttcttccactatttttattatattttaattttaatgaaacttatataacatttacactaaattttaaatacatggctcaagacaaaaaaatggggaaaatattttttaaaaaatcaccccaaatcctggtactcagacataaccactattacaaacttggcagagtaatatttttcctgtctgatgtgtgccacnatgtgtgcatgcatacacaagtagatgttttactatactcctggtttattatctgcttttttcccttaatag

SEQ ID NO: 12817 - DNA, 495 bp, Homo sapiens
cgacccacgcgtccgggacaagagaaacataagcaggaaaaaaggaggaggaataaacacacgcctgtccataataaaactcgctcttgaagactcagcggcagccctgcaccggagactgacgacttgcgcggctgtgacctccgccctgcagcggaccctcgactgccctgcactgcggctctggaggccccgactcagtgcatgggaaagaaatcctcactatcagaaaacagaggggcaatctgctgctctccctttccggccaaacacgtcacccatcaaccggatacctaccaagaggctttcagaggaggcgcccaaggtctcccaggcccgcccctccccaatcacgctccgctcagccccctcaacttttggcctccgggaagttcgcagcgttctcacgcttggcaggaagttcccgccaaggctttcggaaaatcctttaaaaagcaacgcttgcgctgggcggggcttggtgcgctctcaccc

SEQ ID NO: 12818 - DNA, 506 bp, Homo sapiens
cgcgtccggtagattgcttgtggctggcagtgaagatggtggagttcaactttttgatataagtgggagggctcccctcaggcagtttgaaggccatacaaagtaagagacagttggtttctgtgtgttctggttttattttgttgtaagctctttttttctctggactttggttaaaaagatagagatcagttttatggagattatttgcctataggtactatatttcctgattgttctaagagtgcttaacttgggttccgtggtccagtttcatggggcttatgaattccctagaattgtatgtgatattttaggaaatacacgtttatctagggagctactctgtagcttttggttaactttagtggggtctgtggcccagctgagattatgaattactgacctgaagacaaccttacagctggtaatgacagctctataggcctgtactgtcttagaggctcttatgttgaagtcaagtatgaaggtggattttcttcttg

SEQ ID NO: 12819 - DNA, 504 bp, Homo sapiens
ccacgcgtccgcggacgcgtgggggcgagggccgctggggccgcgaagtggggcggccgggtgggctacgagccgggtctgggctgaggggcgcggcttcgcggtggaccccagcccggcaacgggaaggcgagctctcctccaccgtccaaagtaaactttgccgctccttccgcggcgctcccgagtcctcgccgccgccgggccgccgcagtccgcgaagagccgtcctgcgtcagggcctccttccctgccccggcgcggggccactgcgccatggacgccacagcactggagcgggacgctgtgcagttcgcccgtctggcggttcagcgcgaccacgaaggccgctactccgaggcggtgttttattacaaggaagctgcacaagccttaatttatgctgagatggcaggatcaagcctagaaaatattcaagaaaaaataactgagtatctggaaagagttcaagctctacattcagcagttcagtcaaagagtgct

SEQ ID NO: 12820 - DNA, 158 bp, Homo sapiens
ccacgcgtcctcggacgcgtgggccgccgccgccgccgccgccgcgatgtgaccttcagggccgccaggactggatgaccggagcctccgccccgcggcgcccgcggctcgcctcggactcccgggcgctctgaccgcgcgttcccggcccgccatgg

SEQ ID NO: 12821 - DNA, 492 bp, Homo sapiens
cgacccacgcgtcctgcgggtcccgccggcgggtacctgggcactgcgccccatctggactgaaatggggacaccccttcgggggtcccaggctcctggccgtattgttctccttctcctcgtgataactccgcagtggaggtggattccgtccaagacgcccaacgtggctccgcgtagcaatcagcgctgcaatcctggcggttacctcagcggcggcgtctctctctgcgcctcacactcgcagcccgcggccctccccaacttagggcgtttacaaaagaaactactccagacgcgctgcaaagggaggcgcatgtgcccgaaagctggcgatcagacgggggggggcattctgcatgtgtgatgtttctgggggcggtggggagtgtgtgtcggggtcggggggcgggggggagtcaggcagaaagacagggacaacctccgctatgaaagatccgcgagtcctcaaatgtaagctccgtgtgacta

SEQ ID NO: 12822 - DNA, 542 bp, Homo sapiens
cccacgcgtccttggtctttcttcctaagaaggagatggagccaatttctcacagctcgtgcctcagtactgagggtatggaggaaaaggcagtcagtcagtgtctaaaaatgacgcacgcaagagacgctcggggaagatgtagctggacctctgagatttacttttctcaaggtggacaagctgtagccatcgggcaatttaaagatcgaattacagggtccaacgatccaggtaatgcatctatcactatctcgcatatgcagccagcagacagtggaatttacatctgcgatgttaacaaccccccagactttctcggccaaaaccaaggcatcctcaacgtcagtgtgttagtgaaaccttctaagcccctttgtagcgttcaaggaagaccagaaactggccacactatttccctttcctgtctctctgcgcttggaacaccttcccctgtgtactactggcataaacttgagggaagagacatcgtgccagtgaaagaaaacttcaacccaaccaccgggattttggtcattgga

SEQ ID NO: 12823 - DNA, 465 bp, Homo sapiens
cgggcaccgggcgcgctccttctgccgccagggcgaggctggcacccggccagcgcgggcagggccacgggtgcccggctgtttcccgggtgtggaaggcgctcaaggtgcgcggcccggggcgcgctactgggggcgccctccgcggtgggcagcgcgccagggatcggcctgggcagccgcggggcgcgcgaaggctgcgctttccctacgccccccctcgcttcctccggcacggcggcaacggagatttcctctcggggaaactacgcggatccttttcggggatcctcgccccgccccagttctccgccccctcccctttgctggggcgcctgggctggcccgcgcaggggaggaggctctggcagcctgagcagggaggcggcggggggccgcggagccgctggccatcgattctccccgccatgtgacgccgtacttagccctgcgacccccaggcgc

SEQ ID NO: 12824 - DNA, 416 bp, Homo sapiens
gtccggttcctaacacagacgaactcagcttcctttgccatgcctctgactcgagccagcctttctttttatcctccgtttttctcagattccctccacacagtcttttcccaggtctagatcgcttccctcgccccaatctttccttgaaccccttttccagtgtcccaaagctgtccactcttacgcctcttccagaaacacaggctacctccccccaattccccagtgccactctggattgtaatatcccactcaggagcttctttcttgtaatttccctccccccaccccccaccctccccgggtcgtctgttttacttctatgaagcaaatattactcatcaaatataggaacaaaggcctaagtcctttctgtgcttatttcttgggtgactgatcttagatcctatcat

SEQ ID NO: 12825 - DNA, 518 bp, Homo sapiens
ggtgtcgacccacgcgtccgcgcttctccacctcggcccgtggagccggggcgtccgggcgtagccctcgctcgcctgggtcagggggtgcgcgtcgggggaggcagaagccatggatcccgggcagcagccgccgcctcaaccggccccccagggccaagggcagccgccttcgcagcccccgcaggggcagggcccgccgtccggacccgggcaaccggcacccgcggcgacccaggcggcgccgcaggcaccccccgccgggcatcagatcgtgcacgtccgcggggactcggagaccgacctggaggcgctcttcaacgccgtcatgaaccccaagacggccaacgtgccccagaccgtgcccatgaggctccggaagctgcccgactccttcttcaagccgccggagcccaaatcccactcccgacaggccagtactgatgcaggcactgcaggagccctgactccacggcatgttcgagctcattcctctccagctttctgcagttgggagc

SEQ ID NO: 12826 - DNA, 485 bp, Homo sapiens
ggtgtcgacccacgcgtccgggagctagcggcgccctcccttatcgccttggcaacgacccagccgcgccgcgaggagaaccgggaatggaggtcgtggcgtgaggggcgccgagcgaggggaggcgcgggccacgggagttccgggagttccggcgttgcccggcagtccgcagtcctcggcgggaaggctgtcccggcgcctcaggcagctctgcgtgggccggggtgacttcctcgcgatcccctgcgcgaggtgaagggcagggacctttgccgcgccttccacgcgccgtgccccaccggcgagtggctccatcttccttagacttgtcgctcgcggacaggcgccgtgggtctccggggcctccggaccggtcctcttcccagcggctcccggaagcgggttcctgtctttcgacgcatttcacccgcgcggggagagcttcccgggaaggttccacggcggccgagggttttcgcgcc

SEQ ID NO: 12827 - DNA, 501 bp, Homo sapiens
ccacgcgtccgcgagactcccgcgccccaccacccccggcggagctgctgctgagccactcaatctgagccctggctactaataaagttcgtttaaaaatcataatcattcttaagagagcgaaagagggtgcgaactagccgctcggccccgcatggagagctggcgcgtctggaggagacagcggcggcagcggttgcgccgcgaccaggaggagccggtggcgccgggcggcgggtccgcggccggtgggggagtgtgagtagcggctcgcgctgcggtgcagcggcgctgcactcactcgccctctccaggggctgggggttcgtccggctccactggggaagactcagcttctccccggggtcccgggttgtgccttactctccggagtgggcaggggtatcgagggcaggggcctcccggcccggctcccccatcccccggttcggaccgccgagcgccggctctcccctccctgagcaccgatcccaagttcca

SEQ ID NO: 12828 - DNA, 496 bp, Homo sapiens
tcgacccacgcgtccgggcgtccgggtacccgagggctctcccgcgttgctggcaccgctggcgccgcggtctcgtagcgcatgggcctcctccgaggcgggctcccatgcgctcgggccatggcgcgcctgggcgctgtgcgctcccactactgcgccctgctgctggccgcggcgctggccgtctgcgccttctactacctcggctcaggccgggagaccttctccagcgccaccaagaggctgaaggaggcccgcgccggggctcccgccgcgccctcgccgcccgcgctggagctagcgcggggctccgtggcgccagcccccggcgcgaaggccaagagcttggagggcggcggtgccgggccggtggactaccacctgctgatgatgttcaccaaggcggagcacaatgccgcgctgcaggccaaggcccgcgtcgcgctgcgctcactgctgcgcctcgccaagttcgaggcgcacgaggtgcttaacc

SEQ ID NO: 12829 - DNA, 494 bp, Homo sapiens
cgcgtccgctgtcgggccggcgctcccttctctgccaggtggcgagtacacctgctcacgtaggcgtcatgaggtctccggttcgagacctggcccggaacgatggcgaggagagcacggaccgcacgcctcttctaccgggcgccccacgggccgaagccgctccagtgtgctgctctgctcgttacaacttagcaattttggccttttttggtttcttcattgtgtatgcattacgtgtgaatctgagtgttgcgttagtggatatggtagattcaaatacaactttagaagataatagaacttccaaggcgtgtccagagcattctgctcccataaaagttcatcataatcaaacgggtaagaagtaccaatgggatgcagaaactcaaggatggattctcggttcctttttttatggctacatcatcacacagattcctggaggatatgttgccagcaaaataggggggaaaatgctgctaggatttggg

SEQ ID NO: 12830 - DNA, 470 bp, Homo sapiens
gacccacgcgtccgcggacgcgtgggcggggccgcggagccgggccggggcagcgccgtctccgcctcggggccgccgggggcgccctgctgagcgctacccacgtgcgtccgcgccacctcgcgggcgaccccgcggccaaggcccccggcggagcggctcccgggcgccccgaactagcccccaactttgggcgaagtttgcctgcgcctctccccgcccccacgcggcgcgccggggccgcggacggcagcggcccccggggatgcgccttcccggggtacccctggcgcgccctgcgctgctgctgctgctgccgctgctcgcgccgctgctgggaacgggtgcgccggccgagctgcgggtccgcgtgcggctgccggacggccaggtgaccgaggagagcctgcaggcggacagcgacgcggacagcatcagcctcgagctgcgcaagcccgacggcaccctcg

SEQ ID NO: 12831 - DNA, 480 bp, Homo sapiens
cgcgtccgctgcattgcgccccaccgactccactatgttgaagaaattcgacaagaaggatgaggagtcaggtggaggctccaacccattccagcaccttgagaagagtgcggtactccaggaggcccgtgtatttaatgaaactcccatcaaccctcggaaatgtgcccacatcctcaccaagattctttatctcataaaccagggggagcacctggggaccacggaagcgaccgaggccttctttgccatgaccaagctctttcagtccaatgatcccacactccgtcggatgtgctacttgaccatcaaggagatgtcttgcattgcagaggatgtcatcattgtcaccagcagcctaacaaaagacatgactgggaaagaagacaactaccggggcccggccgtgcgagccctctgccagatcactgatagcaccatgctgcaggctattgagcgctacatgaaacaagccattgt

SEQ ID NO: 12832 - DNA, 510 bp, Homo sapiens
  misc_feature 415: n = A,T,C or G
gcgtccggcaggcgggtcgtagagagcgttcagccgtctgtatatctccccagatacctgaaactgaccacctgagtacgttttcccattgctgagctgtttccctgatatctggccatgcaacggagatcaagagggataaatactggacttattctactcctttctcaaatcttccatgttgggatcaacaatattccacctgtcaccctagcaactttggccctcaacatctggttcttcttgaaccctcagaagccactgtatagctcctgccttagtgtggagaagtgttaccagcaaaaagactggcagcgtttactgctctctccccttcaccatgctgatgattggcatttgtatttcaatatggcatccatgctctggaaaggaataaatctagaaagaagactgngaagtagatggtttgcctatgttatcaccgcattttctgtacttactggagtggtatacctgctcttgcaatttgctgttgccgaatttatggat

SEQ ID NO: 12833 - DNA, 262 bp, Homo sapiens
acgcgtccggaaggtccttgagccatctggatggcgggcagtctggcacactaatgtgttcaaggtgctggttgagatcacagatgtggactttgcagccttgaaggcagtggtgaggcttgctgaaccatacctctgtgactctcaagtgagcacttttaccatggagtgcatgaaggagctccttgatctgaaggagcatcggttgcccctgcaggagctgtgggtggtgtttgatgattcaggagtgtttgaccagaca

SEQ ID NO: 12834 - DNA, 506 bp, Homo sapiens
gagtcgacccacgcgtccggaaaaaaaaaatgacccagagatattaacaacttgacctggttatacagttagatatttgcacagtctggactcaaactggaggcttctgactcctcatctaggctcctctcactctgccattgcatgggttttctcatataccttctctcataaggttttcacaaatttgtcacgtcaaataattatcaaaattattcacactattatagatgaaaataatgtgcttataaagattaagtaactttcctgagggcgcaggtatctggttcacataacaactagcctggcttagaataaacacatatttcctggttctgaagttggtgtccttcctaccactttctgctgtctcctaaagataaagaatgttattggctcactgaattaatccattctgttcctggctgaaataaaaattggtatattccttacgtgaagtgtcaacaggaaggggcttttacaacttccttttgtttcaggcgtta

SEQ ID NO: 12835 - DNA, 520 bp, Homo sapiens
cgcgtccgcgcgctggaggagtggagcagcacccggccggccctgggggctgacagtcggcaaagtttggcccgaagaggaagtggtctcaaaccccggcaggtggcgaccaggccagaccaggggcgctcgctgcctgcgggcgggctgtaggcgagggcgcgccccagtgccgagacccggggcttcaggagccggccccgggagagaagagtgcggcggcggacggagaaaacaactccaaagttggcgaaaggcaccgcccctactcccgggctgccgccgcctccccgcccccagccctggcatccagagtacgggtcgagcccgggccatggagcccccctggggaggcggcaccagggagcctgggcgcccggggctccgccgcgaccccatcgggtagaccacagaagctccgggacccttccggcacctctggacagcccaggatgctgttggccaccctcctcctccttcttcttggaggcgctctggcccatccagaccggattatttt

SEQ ID NO: 12836 - DNA, 527 bp, Homo sapiens
gtccggaaatcaccatagatagctgctgtgctttacaacttctttctctgtaaattcctcgcttggctctgagaaggaaaaaagatgttcgtaaagggctcagcgaggaatttacagagaaagaagttgtgaaaccaccatagttagttgctgtgctttgaatttcttttgctcaaatggcctcagcgaaatcttatttgcctatagcatatctacaaaaaattttcctagaccgtcttttctacaactggatggtaaagttgattgaagtgtgcctcatgtagctttatgtttggggcatttgaagggctatggctggaccagagtgtaatataaatgcttaatagagaggggaaaagaagagtgtaagaaccattatagggctgggctcacgcctgtaatcccagcattttgggaggctgaggcaggcggatcacgaggtcaggagttcgagaccagcctgaccaacatggtgaaaccccatctttactaaaaatacaaaaattagccagtcgcggtggcacgtg

SEQ ID NO: 12837 - DNA, 528 bp, Homo sapiens
gagtcgacccacgcgtccgcagccttcggctgcggagggggctcggcggcggccggcggagaaagttgctccgagaagaggctgggtcgagctgggccgagccgggcgcgcagggcgggcgtcgcgggcgtcccgggcggacgcggcgcggagactgccggcgcgtcccgggggttccgatttgaagaccttgcttctcatcacccactggattatgccccaggctttcctacccaatgatcctcttgcaacacgccgtgcttcctccacctaagcagccctcaccctcgcctcctatgtcagtggccaccaggtctacaggaaccttgcagcttccaccacagaagccttttgggcaggaggcttccttgcctcttgcaggggaagaagagttatcgaagggaggggagcaagactgtgccctggaggagctatgtaagcccctgtactgcaaactctgcaatgtcaccttgaactctgcacagcaagcccaggctcattatcagggtaaaaatcatggtaagaaac

SEQ ID NO: 12838 - DNA, 451 bp, Homo sapiens
cgacccacgcgtccggaccagttggcgacatggtggcacccgtgctggagacttctcacgtgttttgctgcccaaaccgggtgcggggagtcctgaactggagctctgggcccagaggacttctggcctttggcacgtcctgctccgtggtgctctatgaccccctgaaaagggttgttgttaccaacttgaatggtcacaccgcccgagtcaattgcatacagtggatttgtaaacaggatggctccccttctactgaattagtttctggaggatctgataatcaagtgattcactgggaaatagaggataatcagcttttaaaagcagtgcatcttcaaggccatgaaggacctgtttatgcggtgcatgctgtttaccagaggaggacatcagatcctgcattatgtacacttgatcgtttctgcagctgcagattctgctgttcgac

SEQ ID NO: 12839 - DNA, 533 bp, Homo sapiens
tcgacccacgcgtccgtctcatttgtgaagaggtctgtcttcctgaggaagcaggggaccctcacctgtgaaccaagtgtgccatgggagctgctccatgtccaggtccaggtctcctggtctgcagggaacggcacaagagggctggcctaggccaggaggatgtgatctgtcctagaagggggctgacctgcttgctgaccccgcttgctgctgcctggctgacctgactcagccacggctgttccgagggcccttctgagtacgaacttccagttggaggatctgggtgaagacccagctgcttgagatagcagcctctggctaggcccttggcgtggccaagccaatcaggcaggtttagagcctggtgcccctagacaggtcctgcaaccaagaacaggggtagccttcaaaggccagccctgccttccaaccaccgctccacagcgagggaaaccaaggctcttagggcaggaggcttgtccgagattagcacctgcgtgctccaggctctgagtttctgtcccctc

SEQ ID NO: 12840 - DNA, 544 bp, Homo sapiens
cgacccacgcgtccggggagcagggatcaaggtggtccccgtaaacctgacagtaaacctgacagaggctgcaggagtgcatttccacccagggtgcactcagcgagtggaactccacacccgtttctttggagtcaaggcgcgacctctcagggaggagactgctcctggttgcccactgccgggtcatcccagcttgcagtggaaccctccgcagcctggcctcttccagggtagcccctcactcccctctctcttgtcctaggataaggccgaggaaggctgacgagttccagctctggggatgccctatcagctgtgtcaccttgaacaaatcatttctcctcttgggtctctgtttcctccagtgtgaaacgtggtgaaggcatgaggggctatgggagccccaaggcctttttcagagatctcctctgggtcccatgtgaccccgtggctatccccaaaggcaagagggttcccagccctgcagccaaggccctgggacaccctttctaaacagtgcagggttttgacgggctgagct

SEQ ID NO: 12841 - DNA, 458 bp, Homo sapiens
ccacgcgtccgaggaaaggagttggttcgcgcaggtgcggcgcctgggtccccatggcgctgtggcgcggctccgcgtacgcgggcttcctggcgctggccgtgggctgcgtcttcctgctggagccagagctgccaggctcggcgctgcgctctctctggagctcgctgtgtctggggcccgcgcctgcgcccccgggacccgtctcccccgagggccggttggcggcagcctgggacgcgcttatcgtgcggccagtccggcgctggcgccgcgtggcagtggggtgagtgccaacggggcctgggtctctgagcctccgaggtcggccttggaggtcgggcggagccgcgcagaaacagggcttctcagaggtccccgggaggcgctgctgtccgcgctggccccttggcgagaagtgtcggacgtctgaatggaacccgggtcgtcaccgctgc

SEQ ID NO: 12842 - DNA, 548 bp, Homo sapiens
ccacgcgtccggtgggaagccagaagataaaaccaaatggctgggcagtctttaggttattcctagctaagagttaagagttgtaagctctctcattctttgttcttcagccttaaactatctttccttctattaactttatttgtctcagttacaatgatagaggtaacttcacatactaaaagaaattaggttaccatgtgaaacattcttcttggcttgtgctaatgttatcagatccaaacagcatctgaaagaaaattttccaagtagatgttgttctcttgttttctgaaatacatatcatatgttaaagtgagagtttttatacatgttgaaagaagttgaatgacataacaaatagttactgaggcctccattttcttacttcacagttaaaattcctgtttctctttgggtataggaggtagaaagaagtgggagagtaatagcattttaaaacacagaatcaaaaatacatattaaaagtagaacttaggcccaggcacagtgactcacgcctgtagtcccagcaccatgggaggctg

SEQ ID NO: 12843 - DNA, 526 bp, Homo sapiens
cgcgtccggagcattcgcgcactgcggccgggtcaccgacgtgggcatccgctacgtggccaagtactgcagcaagctgcgctacctcaacgcgaggggctgcgagggcatcacggaccacggtgtggagtacctcgccaagaactgcaccaaactcaaatccctggatatcggcaaatgccctttggtatccgacacgggcctggagtgcctggccctgaactgcttcaacctcaagcggctcagcctcaagtcctgcgagagcatcaccggccagggcttgcagatcgtggccgccaactgctttgacctccagacgctgaatgtccaggactgcgaggtctccgtggaggccctgcgctttgtcaaacgccactgcaagcgctgcgtcatcgagcacaccaacccggctttcttctgaagggacagagttcatccggcgttgtattcacacaaacctgaacaaagcaaatttttttaaaagcagcgtatgtaagcaccgacacccactcaaaacagctctttc

SEQ ID NO: 12844 - DNA, 461 bp, Homo sapiens
gcgtccgccaggtctgtgaaggatccacagactggcatatgcaggaggaaatggggcgggcgaggagtaaggaccccaaaaagcaggggtagggaagggccctcccagcgccccactgtaataggggcctcatcaatgccccatgctcactgaataaagcactgccagcgaaaggtgaaaagaggaacaaagaacattctcctggacgccacccacagaaagccacgtgcaggcttggccctcaccttggggaccttggacacggagctggttatgtcacatctggctctcagagctggggcagcgtctaggaggcctgatgtagaaagcactcagctaagccctagttaccggcacacgggcaccagcgccccctctcagcaaactccacgtcttatgaaattagcactggatttccacttcaattggaaaatatggccaagctcggaagatgtcggtga

SEQ ID NO: 12845 - DNA, 480 bp, Homo sapiens
actggtgtatgcaggacgaaatggcgcgggcgacgagtaacgttcccaaaaagcaggggtatggaagggccgggccagcgccccactgtaataggggcctcatcaatgccccatgctcactgaataaagcactgccagcgaaaggtgaaaagaggaacaaagaacattctcctggacgccacccacagaaagccacgtgcaggcttggccctcaccttggggaccttggacacggagctggttatgtcacatctggctctcagagctggggcagcgtctaggaggcctgatgtagaaagcactcagctaagccctagttaccggcacacgggcaccagcgccccctctcagcaaactccacgtcttatgaaattagcactggatttccacttcaattggaaaatattgccaagctcggcaagatgtccgtgaaggagggcgcacagcgcaagtgggcaacgcttgaagagaagctggggc

SEQ ID NO: 12846 - DNA, 553 bp, Homo sapiens
  misc_feature 442: n = A,T,C or G
gcgtccgcttcatcttaggataaagtctaaatctttgttttttgctattgtactaaactcataaatcctaggttataaagataaagccttaaactttatctcatcatccagcccaatttccagccacaatgaagtacttaaaactctgtgtctttgtacttgctgttctcttggcctccaattccttttcatcttttccattcggtaaagtttgtttatcccacaggccctatcttggaagcctccagcaacttctccagacagaggtgttagcagtgtaggatcagatttctcaaccacgtcactcccatgtctgggtagatatctctgcccaagtgttctcatagcacttgagcagtactctctaagcgcccaggatctaccatgttgcttttttaaaatttgattaatttatttttttatactgctccttgtggagcangagtgttcccagagtagcccaccatgttatattgaatggatctgtgtgcataatgcagctgtccatctacatcgtatatttttgtctcctcaagggtagggaccacatgag

SEQ ID NO: 12847 - DNA, 531 bp, Homo sapiens
actgtttgttttctggatacagggatactgggctcgctatgtgtgtggagccatcccttccttgccccagccccacctccctctcaaaccctctctggctctttctgagcttcctttcctgctccccagcttgcccagtgctcagtgccccacttggctcttttgctacttcgggtcaggtggagcctcttgggaatgtgaagtgccttacagaaagattgcacttcaagaggagaggctgcagggagccatcctaaacccagaggcctggagcttaccgtgtcactttacttttgtacacaggggtctccttagtgccctcgagaaggattcttggccctgagcttctactcctgaggccacctctgtgcagccccagctccctcaactctaggctgtagtctcagtgggaaagcctggcttgggggtctcctaggaatgtccacctgaaggcacacttgataggggcttgcacaacttatgtctgccaaggccacctgaggaactccctggtgcctataagttccacct

SEQ ID NO: 12848 - DNA, 583 bp, Homo sapiens
gttcggcagcagcagctggcggccaaccggcacagcctggtggagaagctgggggagctggtggcgggtgcccacgcactgggtgagggccagttccccttccccactgctctgtcggccacccccacggaggagacgcccaccccacccccagccgccaccagcgaccccccggccgaagacatgctggtggccatccggcgtggggtccggctccgcaggaccgtcaccaacgacaggtcggcgccccgcatcttatgatggcgccaccctccccatcctctcaggccccagtgcgagcaggtggcctggtctgtgagccgcaggcactcagagcaaaggcccagccaggagagaggacagagccagggcagaggccatgccactttatggaaagacacctcacttggattccagcatttaaacaggaagtgacttcttagcaagcctggccaggacggagcctgcaggcctgggcctggttcggggtctgttttatgctcttcggtccctcctcttcctcctctggggccctgcctcttccctacccataagcaccagagccagggccgctgcccatgac

SEQ ID NO: 12849 - DNA, 527 bp, Homo sapiens
tgccacgcgtccggcaacctaaaaataggatgcaccaatagcatgtggttccaagtaagttgtgatttttattttgagacagtgttccactggaagggagggaagggcttacattcacagacagtaaagcagggctgtgtaaggagctacatttacttaacagtctcctttccagctaggtttgttttatttatttgcaagtcagctaagaattaaccttttaaaccatctaaaacaggcaagcaatataaagatttctactagtgcaaggtaagtggtttgaatatacaagtgccctttcctgccacccagtctcactaccgttttagtcctgcagctgggtaaagccactattgtgtggaaactctcccatgtgccctgtctctacctctggacacaccagctccttcttccacctattctattcctcagttaagccaagtgatcagaagtagtattaaatgggtagataattttaacaggatgcctaatgtgaaataaggagttatttttactcttctactata

SEQ ID NO: 12850 - DNA, 471 bp, Homo sapiens
gcgtccggcgccgggtgcgccaactacgcaaagaccaagcgggctccgcgcggaccggccgcggggctagggacccggctttggccttcaggctccctagcagcggggaaaaggaattgctgcccggagtttctgcggaggtggagggagatcaggaaacggcttcttcctcacttcgccgcctggtgagtgtcggggagattggcaaacgcctaggaaaggactggggaaaatagccctgggaaagtggagaaggtgatcaggaggccggtccactacggcagtttatctgtctgatcagagccagacgcgacgcgtccacttcgcagttctttccaggtgtggggaccgcaggacagacggccgatcccgccgccctccgtaccagcactcccaggagagtcagcctcgctccccaacgtcgagggcgctctggccacgaaaagttcctgtccactgtgattctcaatt

SEQ ID NO: 12851 - DNA, 495 bp, Homo sapiens
cgacccacgcattgcctcaagaggcgagattccagattagtacccagacctgggaggaattaatggaatgcttgtccctgggcagccttagaaacagaccccagcttatctaaggctgctccgaggcagtgacccaactagggcttatgaagtcagaagatagaccagctaatagtgatcacctcttgacctttgtgtcacgtcttttgctttttaaaacccttttgtgaacgttatggcctttgatctgacggcatcctagttgtgaagggaacagggcaggtataatgttcgtttaccaatacagaaatcgtgacccagagatcacaaattctggagaggctttgggctctccagagtcactcagctggaactgacagggctggaattagatccctggccaggccaagggtgcattcctctgagtttttttagatctgctaggaagtgtacagaccgattcacccttctatttttgttagctgtggtctacac

SEQ ID NO: 12852 - DNA, 504 bp, Homo sapiens
cgcgtccggcacattaaaaaaaaatacttattttttattatggaaaggtcttggaacattctgatagtgagcttccggcattcatttgctgtatctggcttaggagatgctagggtggcaagaagaggcacaggcttagatgcgctgggtggagagttggctttagtaatgatggttgactctaacgacttgattatcagctgtgccttttttcttcctgccttctgaggtgtgttgcctgcatcctaattcacgtactgagtagcaagctaagcaggttgtagctggagattgtaagaaatcctgaatggaaaccaaagaaagactgtcacatcacatgatgtgcccttttcaatcccatgtctcttcccagtggcatcccagtgctgtctctgccccctgctgcttctgtaaagattttctgacacagtaactgcctcatagaccttcctttttatgaaatcctgagtttggtttggttacgtcctttttagatgaataaat

SEQ ID NO: 12853 - DNA, 317 bp, Homo sapiens
cccacgcgtccgcgcggctgtcgcgagggcgggggtcggggctgcaggcggggcagggctgggtgggggcgcgcgacgcacctgcctgcttcctgcacgggtggtccccaagcactgcggggccccagcccaaagcggaccttgactaccgcccagccccgcgctcccaggaccgcccgcccgcggagcccactcggattgctctccgcccgggtcggcggaggccccgtctgctgtacccggcgctgggactgctccgcaccgcgcggctccctttcagcagctgcgggagcatgcggaggaggccctgccggccc

SEQ ID NO: 12854 - DNA, 468 bp, Homo sapiens
cgacccacgcgtccgggcggctggtgggcgaccgggcgcatcctcattgcagtgcggcggccctacctcggccctggcctgaccccggcggccctgcccgcccctccctccagcatcatggccagcccaagaaccaggaaggttcttaaagaagtcagggtgcaggatgagaacaacgtttgttttgagtgtggcgcgttcaatcctcagtgggtcagtgtgacctacggcatctggatctgcctggagtgctcggggagacaccgcgggcttggggttcacctcagctttgtgcgctctgttactatggacaagtggaaggacattgagcttgagaagatgaaagctggtgggaatgctaagttccgagagttcctggagtctcaggaggattacgatccttgctggtccttgcaggagaagtacaacagcagagccgcggccctctttaggataaggtggtcgctc

SEQ ID NO: 12855 - DNA, 469 bp, Homo sapiens
cgacccacgcgtccggaaatgtcagatttttttttaatttaatgaaattgttaatgaggaaaaatttttaatatagtcttatctaccacacatccccatagatttaaggattttaatagaaagtcatgatgtatgtatttaagccacgttaaaagaaaaaatataactatggaccggtattcagtgaatacagtttcatggtttttaattctttcaaagcacattaaaaatggtgtgctgataaaccccaagtaaattaaccctttttccgtataaatccattttttgttttgaagaggggaaattatatttattgttgtttactgaatcctggtgtgaaagcatatcagatatgtatgaactgctactgctgtacttccgatttacggacatcattttattgctatttgtagacgtgataacatgaacatgagtacctatttatgtgggccttcagtggatgggcagt

SEQ ID NO: 12856 - DNA, 486 bp, Homo sapiens
gcgtccgggctggcatggctctatataagattgttgcataaaatccctactacttttggtctgtgatgagcttaattatgcaatctatatgggcacaggatgaaaacctctcaaaaacaatgtttctgccccttgctgagagaatggtcgaaaaaatggtgaaagaggacaagatagaagctgaggctgaagttgaactttattatatgatcctggaacgtttgggaaagtaccaggaggccttggatgtcatcagagggaaattaggagagaagttgacaagtgagattcacagtcgggaaaataaatgcatggctatgtacaagaagctgagcaggtggccagagtgcaatgcccttttccggcgcctcttactaaaaaactcagatgactggcagttctatctgacttatttcgattctgtctttcgactgattgaagaggcctggagtcctcctgctgaaggtgaacactctttagaaggag

SEQ ID NO: 12857 - DNA, 529 bp, Homo sapiens
gtcctgtgcttgacatggagaacggatggagggagctttgctactctgctcttggcatgactccaggatttttttctggaatccaacctctgtcctcttaggagaaggaacctgtccttggttcagatggctgggcatgaggaggaaaatttccattagtgtagaaaagtgctggacagaatccggtttggaaaattacaaatccagttggtcaaaataggccatttcctatgtgtgacctattcgtggtatgccaactggactgcttcctaaacaggacgaggaaagtgaggaatatttttatatgaaagccttagcctgtctggcacccatgaaaaaaactatttatgcactcctactttcaccgtctttttgcattctctatttgtagcacaacagagttgaatgccacaaaacaccccgtttatagtgagctgttttcagtgaccaatatcagaaggaggcttgcttctggactagcctcactaattgccagcagccaccatttttcatggaatggccttgggac

SEQ ID NO: 12858 - DNA, 535 bp, Homo sapiens
  misc_feature 501: n = A,T,C or G
cgcgtccgtgagagtgccttgccggaccctcaggacggagctgctgggctgctacagtgaccaggactttctggccaagctgcactgtgtgcggcaggccttcgaggggcttctggaagacaagagtaaccagcttttcttcgggaaagtgggccgacagatggtgacaggcctgatgaccaaggctgagaagagccccaaaggcttcctggagagctacgaggagatgctgagctatgccctgcggcccgagacctgggccacaacacggctggagctggagggccgaggggtggtatgcatgagcttcttcgacatcgtgctggacttcatcctcatggacgccttcgaggacctggagaaccctccggcctcggtgctcgccgtcctgcggaaccgctggctgtcagacagcttcaaggagacggccttggccactgcttgctggtcggtcctgaaagccaagaggaggctgctgatggtgcctgatggcttcatctnccatttctactccgtatcggagcatgtgagccct

SEQ ID NO: 12859 - DNA, 434 bp, Homo sapiens
acccacgcgtccggagaacgtgatttctcagccgaatgagtttgaacataccccacaggaagatgacttggggttcaaggaagaagatttggctccagatcatgaagtaggaaatgcctctctcaaacctgaaggcatccagaactgggatgacttatgggtccagagagagggtctaggaaagcctcagcctcgggacagaggcccccggctcctgggtgaaccacgctggggccaggctagtagtgatcgggccgctgtgtgtggtgagtgtggcaaaagcttcaggcagatgtcagatctggtgaaacaccagcggacccacacaggggagaaaccctacaagtgtggggtctgtggcaagggctttggggatagctctgcccggatcaaacaccagcggactcatagtgggggagaagccctatagagcc

SEQ ID NO: 12860 - DNA, 555 bp, Homo sapiens
gcgtcgaagaagatacccaaactcttttctcagagagtttgtagcctagtttgggatagataagatccacatatttagtcatataagactacaggagagtagaatagatgcaccagatggtgtcgaatgaaagtggtactttgtagactataagtgctgtaaattctaaaggacaggttacttttgcctggagtggtcaagaaagattttatttaaaataaggatttgacgggcagacttagcagtcaaaagggagaaagcgggtaaaacaaatgtaagccatcataagagtgcatgtggtttggaagcatcagggaaaagactagccaacctgaagtaaaaggttcgtgcaaattgggcaatcaatagcattaagttggaaacagcttggggacagacacataagagggccagagtgtgaataatttcatctaatactttatagcacttggacatttacagagcacttttctcaattcctaaaataccttggtaaatcaaaagcattctccattttaaaaatgagaatactcttgcctatggagatggcaacat

SEQ ID NO: 12861 - DNA, 440 bp, Homo sapiens
ctactcttgcaccccccattcgtcctcttgattctctgcttctctagctcagccgctgaccttcgtgcctagccgccactagtccttgaccagcgttctggcaactcttgcctccaagttcttccagctccaggctgagcgatggtgattcagttttctgacatcacagctcagttcttgatttctgcagcaaaaccttcaaggcttccatcacctcggctctagagtccatcatgctcctctcctatgacctgctagggctgatcaaacgttctgtctcctgccgtgccctgccctgccctgccctgagcttcgcttagcctgttgcaggctttgtgttttccttcttgtgctgttgaccacgcagctccttctacccataaaacccccttctctaggtcggtggaaatcttgttcatccttccgtgtctagttaaact

SEQ ID NO: 12862 - DNA, 494 bp, Homo sapiens
cgcgtccgccacccctgtgtccaatgacatgtgcacccaggtcgccaagcggcctgtggacacccaggcctgtaaccagcagctgtgtgtggagtgggccttctccagctggggccagtgcaatgggccttgcatcgggcctcacctagctgtgcaacacagacaagtcttctgccagacacgggatggcatcaccttaccatcagagcagtgcagtgctcttccgaggcctgtgagcacccagaactgctggtcagaggcctgcagtgtacactggagagtcagcctgtggaccctgtgcacagctacctgtggcaactacggcttccagtcccggcgtgtggagtgtgtgcatgcccgcaccaacaaggcagtgcctgagcacctgtgctcctgggggccccggcctgccaactggcagcgctgcaacatcaccccatgtgaaaacatggagtgcagagacaccaccaggtactgcgagaaggtgaaacagc

SEQ ID NO: 12863 - DNA, 511 bp, Homo sapiens
gacccacgcgtccgctcttacgcattactctatgtctactgttatgggtgtgtaattttataccatagatgtttactctttaaacagacacttctagtctgttttatttcatgtgtctgggagcggataaagtgtgaggttcagggagaaagagaggtctgtctcaatgccttggcacggcatgaagacaatctcccctccttgtcccctttccctgctagctcctgatgactgacagattcacagcagaacagaaaggactgggaagggatggaggtgggacatctggcactgaccttcaggggctgaccctgtgggggaacatctgccctgaagagttggagccttcatgtgatgacacagagctgaagtgtgatattcgggaggggatagagagtgcttggaggttttctgattttgaagaatcccagtcagtcaggttctggcgtaaagtgactgctggggaggtgtggactgaatgaatgaagaataaatgaaccaggaaagtgga

SEQ ID NO: 12864 - DNA, 564 bp, Homo sapiens
  misc_feature 524: n = A,T,C or G
gcgtccggccgcttccggtctccctcccgggccggcgctggcctgactgcggccccggtccgtagcactccgccctccgcttctcccgccctgtagccgcgaagactgcttcagcctttccctgtgctgcccctgccgcgcgatggagacgagctcgagctgcgagagtcttggctcccagccggcggcggctcggccgcccagcgtggactccttgtccagttaatgtgttaagagccattgacatttgaagatcatcagaagtgaagataaaacatctcaaaaattataattgcctccacttctcattcagagaattcagtgcatacaaaatcagcttctgttgtatcatcagattccatttcaacttctgccgacaacttttctcctgatttgaggcccatgcagtccagttcgggagctaagtcacttaaacactgtgtgatagttcctacacatctcattatagtttgtcctgagggagtctaacaagttagcagaaatggaaggaccacccttgcttncaggagaaaatattaaagacatgggccaagatgtaactta

SEQ ID NO: 12865 - DNA, 287 bp, Homo sapiens
gcgtccgcgtgaggtgtgggtgttcgtttctcaggtaaaacatggctaaaagcttacggagtaagtggaaaagaaagatgcgtgctgaaaagagaaaaaagaatgccccaaaggaggccagcaggcttaaaagtattctcaaactagacggtgatgttttaatgaaagatgttcaagagatagcaactgtggtggtacccaaacccaaacattgccaagagaaaatgcaatgtgaggtaaaagatgaaaaagatgacatgaaaatggagactgatattaagagaaac

SEQ ID NO: 12866 - DNA, 226 bp, Homo sapiens
cccacgcgtccgagaggatcaccagcgtggccatgaagtcggggggcacgcagctgaagctcatcatgaccttccagaattacgggcaagcgctgttcaaacccatgaaacaaacgagggagcaggagacaccccttgactttttttatttctctgactacgagaggcacaatgcggagattgctgccttccacctggacaggatcctggactttcgccgggtccc

SEQ ID NO: 12867 - DNA, 198 bp, Homo sapiens
gggtccctccctgcggagccgctggtccggctggcggagatgtgaccgcgggcccggccggcctgcctcaggcgtcgcgtcagctcccgtgtccgtgcccttaacccacaccgatggcgggatccggctgcgcctggggcgcggagccgccgcgttttctggaggccttcgggcggctgtggcaggtacagagccgtc

SEQ ID NO: 12868 - DNA, 487 bp, Homo sapiens
cctagattgtctgggcaacggcagaacggagtgccactgtggagcagataactgcagtggttttctaggagtgcggccaaagtcggcatgtgcgtcaacaaatgaagagaaggcaaaaaatgctaagttaaaacagaagagacgaaagatcaaaacagaaccaaagcagatgcatgaagattactgttttcaatgtggagatggtggagagctggtcatgtgtgacaaaaaagactgtcccaaagcataccacctcctatgccttaacctgactcagccaccatatggaaagtgggagtgtccgtggcatcagtgcgatgagtgcagcagtgcagctgtttccttctgtgaattctgtccacattcattttgtaaagatcatgaaaagggggccctggttccctctgcactggaaggccgcctctgctgctcggaacatgaccccatggctcctgtgtcaccagaatactggagcaagataaaatgt

SEQ ID NO: 12869 - DNA, 507 bp, Homo sapiens
cgaccacgcgtccgtaaaatgttaagtcccctaaaagtgaataaattttaaatacctacttttaaaaatactgtcttctaaattgacataattgcttttcttaccaaaagaaggagaggttcccctaattccttttgggccatagatccgcttttaggatctgattaaagatgtggactttcaccgcaggaagatacccatgggcacaccattcaaaatgtatcagatttcaacggttttacaaactcccccgggattaagtcaaatgggtggatattacagctgttttcatcagatatggttatttgttgacaaccatcaggacaacaatgtttatagatggaaggataacttcctggtttttttccacattgaatgtggctagttacatatctcaatttaaaataaattgtggaaagccaaaaaagtatggtcaagctaacctggggtggcttttacctgatgcctacaagcacagaaaaatagtttttaattaaatatccacag

SEQ ID NO: 12870 - DNA, 541 bp, Homo sapiens
gacccacgcgtccgattatgccaagagaaggtattactttaagatgtgaaaaatgtaaaatggaaaattacattactaagaaaaacaaaaaaacacaaactgaaaaattagaaatgaaaaaacattgccacaaatgcaacgcacatacaagtcataaagaaaaaaaataatttaaaatgaatagaaaatatttagacttaagctttgaagaacacaatttagatgcaataatttcattttctcaacaaacaagattatgagtttctaatcttcaaacaagtgatggaatagtgtttcttgaaaaagaagaaatccatttatttgttgattcaagatatatagaagctgctcaaaaagatgcaaaaaatgtacaagttcatttattgacagcagctaatttaaaagattttgtaagtagtaaaaattacttaaaaattggtgttgaaaaagaatacttaactttagctgattttaaaaaacttcaagcttgatttccaagtgcagaatttgtacaaatcaatgcgcaaaaattaagacttat

SEQ ID NO: 12871 - DNA, 451 bp, Homo sapiens
gcgtccgtttgtccatatatcttgttccagcagccatatatcttgtggtctacagcctaaagcatgatttcccttgaagtcttggggttgtttaaaggagagtcccttcaatataaaacctctgaaatattagtgagaatggctcactaatgtgaacaatgtttaaattatttatttatatatagaattactgaatattagtactgggaaaatttatagaaatcatctagtcttacccttcatcttacatataagaaaaatggtcttttcttctaatcacatttacaaaatatgatataaaccttgaccatgaatgtatgagcctaattagagaaacagaaaatcagcatgtcagttttccttcattcaaaataacatagtctttctaagcagtcattctggagttaacatgcctagttcagagccgctgtggatgctcaaatcatttctg

SEQ ID NO: 12872 - DNA, 518 bp, Homo sapiens
tcgacccacgcgtccgccgaggcccgccccttcacgtactcggagctcggatcccagtgtggacctggactcgaatcccgttgccgactcgcgctctcggcttctgctccggggcttcttccctgcccgcccggggccctgaccgtggcttcttccccggcctgatctgcgcagcccggcgggcgcccagaaggagcaggcggcgcgggggcgcgctgggcgggggaggcgtggccggagctgcggcggcaagcgggctgggactgctcggccgcctcctgcccggcgagcagctcagaccatgtcgcctgaagaatggacgtatctagtggttcttcttatctccatccccatcggcttcctctttaagaaagccggtcctgggctgaagagatggggagcagccgctgtgggcctggggctcaccctgttcacctgtggcccccacactttgcattctctggtcaccatcctcgggacctgggccctcattcaggcccagccctgctggtgagcct

SEQ ID NO: 12873 - DNA, 457 bp, Homo sapiens
gcgtccgccaagatggcgtccatcatggatgggccgctgagcaaatggactaacgtgatgaagggctggcagtaccgttggttcgtgctggactacaatgcaggactgctctcctactacacgtccaaggacaaaatgatgagaggctctcgcagaggatgtgttagactcagaggagctgtgattggtatagacgatgaggacgacagcaccttcacaataactgttgatcagaaaaccttccatttccaggcccgtgatgctgatgagcgagagaagtggatccatgccttaaaagaaacaatctttcgacatactctccagcttcaaggtttggattcaggatttggtcctagtgtccaagattttgataagaaacttacagaagctgatgcttacctacaaatcttgattgaacaattaaagctttttgatgacaagcttcaaaactgcaaag

SEQ ID NO: 12874 - DNA, 448 bp, Homo sapiens
ccacgcgtccgcggacgcgtgggtgcgggccggccagccctggacgaaagaagagggcccctccaggccagtctgggcaccctgggatagcggctgcagccaggcatggccgactctgcacaggcccagaagctggtgtacctggtcacagggggctgtggcttcctgggagagcacgtggtgcgaatgctgctgcagcgggagccccggctcggggagctgcgggtctttgaccaacacctgggtccctggctggaggagctgaagacagggcctgtgagggtgactgccatccagggggacgtgacccaggcccatgaggtggcagcagctgtggccggagcccatgtggtcatccacacggctgggctggtagacgtgtttggcagggccagtcccaagaccatccatgaggtcaacgtgcagggtacccggaaccgtgatcgag

SEQ ID NO: 12875 - DNA, 562 bp, Homo sapiens
cgacccacgcgtccgaggtgacctccttggcccagatcatcttagagccaagaagcaggaccattcgtggttttgaggccctgattgaaagagagtggctgcaggctggtcacccattccagcagcgctgtgcacagtcagcctactgtaacaccaagcagaagtgggaggctcctgtatttcttctcttcttggactgcgtgtggcagatccttcgtcagtttccctgttcttttgagtttaatgagaatttcctcatcatgctctttgagcatgcttatgcctcacagtttggaacatttctgggcaacaatgaaagtgaaagatgtaagttgaagctacagcagaagacgatgtctttgtggtcctgggttaatcagcccagtgagctgagtaaattcaccaatcccctctttgaagccaacaaccttgtcatctggccttcagttgctccgcagagtcttccactgtgggaaggtattttcctacgttggaatagatcctctaagtatttggatgaagcatatgaagaaatggttaacatcattgaatataataaaga

SEQ ID NO: 12876 - DNA, 553 bp, Homo sapiens
gcgtccggtttcaccatgttggttaggctggtcttgaactcctgacctcacgatctacccaccttggcctcccaaagtgctgggattacaggcctgagccactgcaccaggcccaccctgtctctattttctaaaataataaatctgattttaatgtggctggatataaatcatatcacagttggatttggaagtttgggttttattcctaactttgatgggaagccattttaagcagaaagatgattttaaaagaccactatattttctgtgtgaagaatgaactgggagatttcatagtattattaacaaaaatagaatagttggggatctggtttggcttgggaaatggaggaagttcaactttgggcatgctccatttgcattgccaagacattgcagcaattggaagtgcagtcagagagcttaggagaaacacttggcagatggacatagagaagtagtactcaaagctgtggacattgattaaataatcatacaggagtatgggctgacaaaagattccaaagagaaaacctcaaaagctcaaaga

SEQ ID NO: 12877 - DNA, 493 bp, Homo sapiens
ccacgcgtccgggactactcggccctggagaaggaggtggactttgactccgaccccatggaggagtgcctgcggatcttcaacgagtccaccagcgtcaagacggaggacagaggccggctggcccggcagccccccaaggaaaagagtgaggagaaggggctttcgggtctgaccactctgttccccgggcagaagaggaggatctcccacctttccaagcaaggccaggaggtggagcccccgaggaggggtcccgcggtgcccccggcccggcccccgacggcgcaggaggtgtgctacctgcgggcccagcaggcgcagagggcatcggcgagcttgctgcaggcccccgccaggctggcagagaagtcgccctccgtccacatttccgcccctggcgagaagaggaaggatcgcccacatccccaacccccgcctggctgcagcccccacaggtgccaagaggacccttgcggccagcggcagccag

SEQ ID NO: 12878 - DNA, 524 bp, Homo sapiens
ggagtcgaccacgcgtccggcaaagcaaaagggaaattatttggtggatggtagctcaaaattggaactcttgttctaattcagttacattggctttaccctccttagatttttcatcaaagggctgtcccattgcaatcttactaaaacattttgttaaaataaactcttttcctttttatattaataattaggcttttaaataaagatgttattcctttaaaatggtgggcttaccatcattgaagatgtcactcaggtggccttgcttgatcaaaacgccttttttaaaaaccaagctttaaaaacatgtttataatttcatgaagtacatatatattgttcccatagtcttcagctttaaaactataaatatgcccaaattttgttatttgccctactttaagtaggtttattggtgtttgttttttcagtacttgtttttctctgataagactcaagaattctgaaatgtgaaattgtctcaattctttctcttgtagcatgaatcaaatgtatttatt

SEQ ID NO: 12879 - DNA, 284 bp, Homo sapiens
caccccgcgtccgaaatgttgtaccaagtattcaaaccactttgagtttacatactagttaccttaaaaattattccctgacctctgactttgtgtaagcccttgtctcgtctttctaatgtactctcatgggtttttttcgatgattcgaatatgaatgtgcctaaagaatttttgctctcttaatctatgtatacatacttgaacaaatcattcttgcttaactgctgatcttttgtaaaactattgctagtcataatggatttctataacctgaaagttga

SEQ ID NO: 12880 - DNA, 523 bp, Homo sapiens
tcgacccacgcgtccggctggaagcaacagtttggcagcctggggtacactcaggttattcgttacaactattattatttgatgtctttttttaaactcaggtcatccacttttgactgtcatccatggaagagctcttattaaaagcctcagactttcgggacctatgattctttggcacaaccttttggaaaattcttaagcagggatgaagcaaacttgattggagttggggaaaaagaagacagattagtatttttcatgctgacaaaaaatagctgctatgacttttcccgcaacgtggacaggggccaagtgaagctgaactggtcatggtctgtcgcccagtgttcccttgtcgtcggcgattttgcccccgacccttcttggtgggcttagtggtggcaatctgtctcttctaccagactctgaccctccgagggtcgaggaagctcacagccgctgcccctggggctgtcccacacacatccactgaaacccaggcaagcagatgcaagaaagg

SEQ ID NO: 12881 - DNA, 476 bp, Homo sapiens
ccacgcgtccgggcgtctcggctcttctgtatctccctggcctggtcgctctcggcttctgggcctcgcccttcctgtctgtgaaatggactctgggtgaatgcaaatgggatcgtctcgggctacgtcctgtccctccgggactacaagtcccaaggtgctcgaggcgaccttggctccccctccccaccgggacccgcctccctccagcccaagtcacgtcgtctaacctgttcccagctcctgccccgccccgttctccgctccccaagccggagcccgagctggaggaagcccccaggtgccaggatctgcccggatccgcgcccgctccggccggcaccatggacagcgaggcattccagagcgcgcgggactttctggacatgaactttcagtcgctggccatgaaacacctggatctgaagcagatggagctggacacggcggcggccaagggggatgaactgaccaag

SEQ ID NO: 12882 - DNA, 491 bp, Homo sapiens
cgcgtccgagaaattgcaattttttaatttttaattttaagaggaattagtgccagagagaactattaagaaaggggtatatccagtctaaggattattaggctcaagtccatgaataggctctgggaagtttgtaaacacttggaaattatttgcaaaatgtgtgtgtgaatgtgctttaccttacagagttcatgaatttcattagattgttgaaagagttttagtattaacaaaggaaaaacaaaccaccaccatcacataacaaaaccacaacagtgatttaatcttttcacctaacaataagtaaattgaggctctgatggctaaattaatagcctgaggctacacagtcagtggcagagcccagggtaaagagagaaccagcacagccattgtgggagccgagggtaaagagagagctaggtgttgtacttagcaaataaatcagaaattcctaactcttaggctggagttctttctgttatgtg

SEQ ID NO: 12883 - DNA, 499 bp, Homo sapiens
gtcgacccacgcgtccggaaggtggagaccgcttcaccctgatcagggagtatcggctgcgggtgcgcaaggcgtccaggagtgacctggggctgtggagagcgacccgtggccttgtgtttcagagtttaccacctaggatgacttcagtgactagatcagagatcatagatgaaaaaggaccagtgatgtctaagactcatgatcatcaattggaatcaagtctcagtcctgtggaagtgtttgctaaaacatctgcctccctggagatgaatcaaggcgtttcagaggaaagaattcaccttggctctagccctaaaaaagggggaaattgtgatctcagccaccaggaaagacttcagtcgaagtcccttcatttgtctcctcaagaacaatctgccagttatcaagacaggaggcaatcctggcggcgagcaagtatgaaagaaacgaaccggcggaagtcgctgcatcccattcaccagggcatcacagagct

SEQ ID NO: 12884 - DNA, 500 bp, Homo sapiens
gcgtccgcgcagcgcttgaatacccgtggcctaaccgtccactcggaagaccggtcccgctcgggaggctctgcagtcgcgcctggggtcagggccgggggcgaatgtggctcgcgttctaggcctccctgggttggaaaaagactatgttagcaagtgtcacgccatgcttttgccaactttccaattaaaggttgacattcctgcataagcatttctctgtgaaaatgtccttgcctcttacagaggagcagaggaaaaagattgaagagaatcgacaaaaggctctggcccgcagagctgagaagttattggcagaacagcatcagaggactagctcgggcacctccattgctggcaacccattccaggccaagcaaggcccatcccaaaatttcccagggagtcttgtaagccagtgaccatggtgtcattttcaagcaacagaatctcagtagctcatctaatgctgaccaaagacctcatgattcccacagttt

SEQ ID NO: 12885 - DNA, 509 bp, Homo sapiens
tcgacccacgcgtccggcccatatccctatattgtttgcttgtttgggataacctaaaattttttatccagtttactactaatttgttttacctgatgtatcttctctttcaataattttatgttaccttctgtttagaataatatttgccacagatatttaggtttaattctgtgtttgaatgattccaatgcctttctctacccactttgaacacttcatcctggaatggttggctgatgtatgtctctaaacaattttttttttaggagaaggtatgtgggtaatgtaattcctaaacctttgcttttctgaaaaatctttcatttgcctttatacatgaccagatttactgggtatatagatttgttgatgaaaaaaggtaaaaagagcaacttttgacatccagaggttgtctggcactcacagctagcccgtgttattctccctattagacataatattacagaataccaactttagacaaggctacttgagaccataataaa

SEQ ID NO: 12886 - DNA, 514 bp, Homo sapiens
gcgtccgtctaaccctaagctaaaagtcattgtgaaccttttggtctgatgctaaagaagggaaaacaggtacaggaaatcccatgtggatgcttgcttgcaggatttcctgccatgattccagaatcccacagctccaacatgattgcaaaagactccctgctcatttttcctcagcatgcacagcgctgtcctgtctcagttgcaactcgacagagccgcatttactccagaacccaatccacacacctgctcatcctgccccgagaggagtgcctgaagccaatagcagggaactagagcagacttgggtggatcttcattggatattaggtatcttgccctagataggcagcagtggccttacagatgctgacagatgatctgattagatgcacagttgctgggtggcgtctggggccagtctattggcagttctgggagtgggaactatttgggctctgcaaagatggtttcacctttaagaaggccggatggggaggtgaagatgggg

SEQ ID NO: 12887 - DNA, 469 bp, Homo sapiens
tcgacccacgcgtccgctccctggccctgctccgggagctgtcgttgtctccgccagcagccctgtggctgcaggagcgccaggcccagcttcgccactcgctgcccctgcagagcttcctgctgaaacctgtccagcgcattctcaagtaccatctgctgctgcaggaactagggaagcactgggcggagggcccaggcactgggggtcgcgagatggtggaggaagctattgtgtccatgacagcggttgcctggtacatcaacgacatgaagcgcaagcaggagcatgcagcgcgcctccaggaagtgcagcggcggctgggtggctggaccggaccagagctcagtgcttttggggaactggtgttggaggggcgcgttccgaggaggcgaaggtggggtggcccccggctacagggggggggagcgggctgctctttactgttctcttcggatgctgcttggtg

SEQ ID NO: 12888 - DNA, 362 bp, Homo sapiens
agacagaattgtgtatgccttgcctatcacggtacagcacgaagccaggctcctttctccaccaaagaagatggaaccagactggaattctgtctccagagagaaacccagctgtttgggtcaaagacagatgcttcagacttgggtgggaaggtgaaagatggctatttagaaagctggtggcacgttttacataagggaatgtcagatgggagatgctagttgccattttaacaaagcaggtaaatcggtaaattttaaactctgtccatgttctgttagaactcagggacaagggatccatgaaaaagacctgtgatgtttctctggcgctttactggcctgggcacacctaccaatct

SEQ ID NO: 12889 - DNA, 498 bp, Homo sapiens
ccacgcgtccgcacggagagaactgggcctggagcgggggcgcggggaggggggcgtcgtcctgggtacaattgcgcaggggcaaaggtcgagaggtcgcgctggcgccgttttatttgaagacatcgtccagttctgaccatggactcgcagccatcgggccttagtttccattccctctagcgggccttcgggggctctactgacgtccctccttcccttggtaccgggccggggaagtgttctcgggcgcgggaggttccgcatgcccaggcctggccaggggagatgaccgatccgtcgctggggctgacagtccgcatggcgccgtctttggtcccgctcgctccccgggacccaaactgggcagggatccgagtggagaaagcccggtgccgtgagcttcgacgacgtggacgtgtacctatcccgggaggagtggggctgcctgcagcccgcgcagagggccctgtccggggacatgatgctggagaccta

SEQ ID NO: 12890 - DNA, 410 bp, Homo sapiens
tactccagtgaccgtgggcccttagtccaagccttgatcggcgactaagtgacggcagtgactgccgccatgccgagctggacggaagtcacttctgagaagggcggaagtgtctcgggctccttagagggaggacaccatattagtgccagtggggaagtcaccgggtggaattacttctttgtggagtttgtgctgtagcgacaatgaaaaacgaagagtcaacttttataaaacaaaataaaaattaagtcaaatcatgccaacctttattagatcgctagcagggttaaacttaattcaaagcccctgatgaatcgggccttcattgcacccccaaaggctccgccaccctgattgctttctttccagcctccaggtttgctcatagtctgatttcggaataattt

SEQ ID NO: 12891 - DNA, 431 bp, Homo sapiens
  misc_feature 384: n = A,T,C or G
cgtccggcgccggacgcctggtccccgcgtggagtcttactaaaacagctcccgcctcaggccgagatgaggagcccttcacaatagctgctgtctctgggaggacccgggcgtccttggcagcccagctgctctggacaaagccctgccagtcaggcctccgctggcaggaaccatggcagaggctggggatgctgcgctatcggtggccgagtggctgcgggcattgcacctggagcagtacacggggctctttgagcagcatggcctggtgtgggccactgagtgccaaggcctcagcgacacccgcctgatggacatgggcatgctactccctggtcaccgccgccgcatcctggctggcctgctccgtgcccatacctnaccggcccctgcaccccggcccacctgacggtctgtgcccatgaagc

SEQ ID NO: 12892 - DNA, 433 bp, Homo sapiens
cccacgcgtccgcgggatgttcatggaaagcaggacagacagaattgtgtatgccttgcctatcacggtacagcacgaagccaggctcctttctccaccaaagaagatggaaccagactggaattctgtctccagagagaaacccagctgtttgggtcaaagacagatgcttcagacttgggtgggaaggtgaaagatggctatttagaaagctggtggcacgttttacataagggaatgtcagatgggagatgctagttgccattttaacaaagcaggtaaatcggtcaattttaaactctgtccatgttctgttagaacttaaggacaaggatccatgaaaaagacctgtgatgtttgtttggcgctttactggcctgggcacacctaccaaacttttaggatttgactggttccattacatttccttttg

SEQ ID NO: 12893 - DNA, 512 bp, Homo sapiens
tcgacccacgcgtccgtatcactgtaatttaaggaaagaaaacttcagttctgcctctggataccaagatgcccattgctcagttcagacaactgatattaaaataaagctatgctccttacttacttcttttattataaacaaattcctttgctttggctgatactagctgagtcattgatcatcattggtaccatgatattgtaatctatgctgctatttggcacaagactgaagttcacactacagtagagaatactataagataatttgcaataaatactgataataataataccagatattttaactaactttttctacctttattaatagcaatcagcacacttgaatgtgtaaatttcacagtaactttaggcagaacttaagctccaggccacatttgtataagaacaccaagtattcaaggcataaagtctgttgtaagccaaaaaaaagtcttttcatcactgtagaagcttaaggagtacatcagtggtaaatacgatctt

SEQ ID NO: 12894 - DNA, 439 bp, Homo sapiens
tctgcagcagtccctgcacccacttcccagttgctttcatctctggaaaaagatgagccccgtaaaagtttgggcatcaaggtccagaatcttccagtacgctctacagatacaagccttaaagatggccttttccatgaatttaagaaatttggaaaagtaacttcagtgcagatacatggaacttcagaagagaggtatggtctggtattctttcggcagcaagaggaccaagaaaaagccttgactgcatcaaaaggaaaacttttctttggcatgcagattgaagtaacagcatggataggtccagaaacagaaagtgaaaatgaatttcgccccttggatgaaaggatagatgaatttcaccccaaagcaacaagaactctctttattggcaaccttgaaaaaaccactacttaccatgaccttcgcaacatct

SEQ ID NO: 12895 - DNA, 445 bp, Homo sapiens
acgcgtccgcaccaggcccgagtcttcccttacatggagggtgacgtgagcagcaaggataagatgggcaaaggagtggatgggacatataaaaaagctcttcaggaagctgcagcaaggtttgaggaattaaaggcccaaaaagagctaagacagctgcaggaagaccgaaagaatgacaagaagccaccaccttataaacatataaagggtctccctctgtgacccaggctagagtgcattgctgcaattttggctcactgcaacctccgcttcgtgggcgcaagtgattctcctgcctcctgcctcagtctcctaagtagctgggattacagacatgagccaccaacgcctggctaattttgtgattggcaaaaaagagattttgtgacacataaagatgatatgaaattcaactttcaatcagtatccagaaaattttatt

SEQ ID NO: 12896 - DNA, 415 bp, Homo sapiens
tgcgcccacgcgtccggcccttgcccctgtcccacagaatggacccacggccccacccagcgccgtcagcgcccggcactgccacccgggtccgggccgctgcctgcacgtgggatccgtcgggcagccggggacagaagagaccccgccgttgggacgcagggcagagccggccacctagtcccttccagccagcagaggcgagggaaggcgtcactgccccggcggggagacgggcaggacgccctgccccgcaccagcagcctccgccggggcgccctcagctccctgcttggctctgtctctccacacccggcagggccgcgggctgccccagcctggggggtcgtgggcagctgctactcagtgccaaccccgtggggcacagagccatatacttgctgtccgggcccca

SEQ ID NO: 12897 - DNA, 468 bp, Homo sapiens
gagtcgacccacgcgtccggtgcggagcaagcatcacaccatggcgtatgagtgttcctctgtgtagactcaacctgcgcctcgccgtcccccattcgcacacccgatgcccgggggtcgctacggacttaaaatctccgcaccgcaccctccacctcagaaacgttcctggatccgaacactgccccctgacgacctagagagatcccggctcccagcccactgagtggcttcagcctcgctggtaggtctctcctccaaagctctggaaacagactcctgggagtgagagggaggggagcgcaggcaccgccccctttccccaagtcccccgcccacttcatccctcaggcacctcccaactcctggcctctctgcacgaggcgcctgccccgggccccgcctaccaggggacccagctctttcttgcagccactggaagctgatcacctggagtgaagacctcac

SEQ ID NO: 12898 - DNA, 336 bp, Homo sapiens
cgcgtccggttttactgctctttgcatgtggtaaaaagaggctgagacatatttaagaattccaagaggatattatgtgtcagaatttcagacactgatgagaagtttttaattgttcttttttatttgattttggaattcaggtgcactctattcaagtgcaaggatatcagaagtttttttttatttaaaaaatttttttttcgagatggagtttcactctgttgcccaggctggagtgcaatggcagcttactgcaacctccacctcctggttcaagcgattctcctgcctcagcctcccaagtagctgggattacaggcacgcgccaccaca

SEQ ID NO: 12899 - DNA, 356 bp, Homo sapiens
cgacccacgcgtccgggaacctaccggtaccggccgcgcgctggtagtcgccggtgtggctgcacctcaccaatcccgtgcgccgcggctgggccgtcggagagtgcgtgtgcttctctcctgcacgcggtgcttgggctcggccaggcggggtccgccgccagggtttgaggatgggggagtagctacaggaagcgaccccgcgatggcaaggtatatttttgtggaatgaaaaggaagtattagaaatgagctgaagaccattcacagattaatatttttggggacagatttgtgatgcttgattcacccttgaagtaatgtagacagaagttctcaaatttgcatattacatc

SEQ ID NO: 12900 - DNA, 560 bp, Homo sapiens
acccacgcgtccgatcaattcctggaatttatggttataacttcgaaacagaagatggactaattttatttttatctaattttattgttggaaatttaggaatttacggaaatactaatttaaattatttaaaaagatcattagaatcaagtaaaccaattttgatggctatgattgactcaacaagagctaattatccaggtaaaacaatagataaaatttttgctaaaaagtttttagaaaaaacatttttaacaacaaaatccacttcaagaataattgtcggagcatacgatgaagagatgctttcaattcaagaaatccttgatttagcttacaaatacaaacgtaaaagtgctgtatatggtagaaattatgacaatcttttagaaatgaatcaacgattagcacaaaaacaaaatcttgaaatacattatccagaattttttgatttcaggcaagctaataaaatcgataattttgtaatcttaattacatcaacacctgagcgaatttaccaaagattttttagaattttagaaaaagatgatgtctttttt

SEQ ID NO: 12901 - DNA, 423 bp, Homo sapiens
cgcgtccgcgaaactgagaaccagttctcccgaagccgcgggtctccggccggcggcggcggcggcggcgcaggtgagcagggcagggggcagccgagggagcgcggggagcgggggccggggggccacgtacgaggggctgcaggcccagccggggcgggactcgccaatcctgcgtccccagctcaggacgcggacgctgatccgaagcccctggccccggctgggtcagcactgggagagcaggcccaggtccgcagcccgggtgtggggccctccccaaatccagggaaagggatcgtggagcggggtggggactgaaagccatttccttcccgtgaagaatttttatcagtgcaagtaacaaatatttcccaggcagcaattgtggggcggggtctagtggaagacgaataggcctag

SEQ ID NO: 12902 - DNA, 446 bp, Homo sapiens
gcgtccgctaaaaaaaataataccaaaaaaagtttttgtaaagacaagctctcgctgtgttgccccgccactgtggcctccttagcttcttccctggggcctgctggacctttccatactccagaaactaaagggggtccaggaccctgcttcaaccctaggatcccgcatctttttttttttttttttggacgcagggtcttgctgtgtccctcaggctggagtgcagtgattcactgcagcctcaaactcgtgggcttaagtgattctctagcctcagccttttaagtagctgggactacagtcatacaccaacatgcccagctaattttcctttttttaattcttgtagagatgtttgagacggcttgggctttgttgcccaggctgttctcaaactcctgagctcaagcgatccctccttcttagcctcctaagtgctggga

SEQ ID NO: 12903 - DNA, 436 bp, Homo sapiens
gcgtccgtgctgaaaaactcctttgacctgacgattgctctaagtcctaattgccatatttatattcccatagtaagagtgtttggagatagtgtttgagcttttttgctggtgttaaaaatgcataatgaaagatggcagagagaggcatattatatccaattcatgagttgtttgtgttaacagaaagcttattttaatcacttaacattgttgatttgtctaatcacagtagcgctattgattaggagcctgacctttagatggttgacttgtgagtgtattcaatatggtgaaataaggtgttgatatatggctgcagattttagaggtgtcattagcaaaggtataggaataaaataggggttatagtattccttactcaaattctgtatgtgctagagctggctggagtctgtggcatgctcattggtgt

SEQ ID NO: 12904 - DNA, 481 bp, Homo sapiens
ccacgcgtccgacactttgtattgataacttaaaatggcatcagtttatcttagacatcagcttgctttttatctccttttttagtgagtgaaatagagcaactagcatgcctgtgttcccagctacttgggaggctaaggtgggaagatcaattgaacctaggaggttgaggctatagtgagctgtgattgcacgactgcactccagcctgggcaatggagtgagactcctgtctctaaaacagcaacaacaaaaataaagcaaccatagtgcataagggaaattaaatgttccctatagaaatatgtgtatgtctgtgatagtggtatgcaaatgctaattattttataaaataaaagttcagaactattcttatcattgccacttgaacaattaaagggtttgctttatttcattaatgtttaataggaaccctttgcttcaaacagctttgttgaattcatgtaaaaatttgttaat

SEQ ID NO: 12905 - DNA, 481 bp, Homo sapiens
ccacgcgtccggcggcccagccgccgcctcccgttctcccctccgcagcggcggcggtggcggagaaggaactcgacacgcaccgaccgccctcccgccccagccgaagcggaagctgtagcccgctctgggccggggccatgggcgccccgcgccgcccgggtcatgaggacggaggcggaggcagcggggccgccgctcgagcccggggactttgtgcaactgcctgtgcccgtcatccagcagctctaccactgggactgtggcctggcctgctccaggatggtgctgcggtacctgggccagctggacgacagtgagtttgagagagccctgcagaagctgcagctgaccaggagcatctggaccatcgacctggcctacctgatgcaccactttggcgtgaggcaccgcttctgtacccagaccctgggtgtcgacaagggctacaagaaccagtccttctacaggaagcactttg

SEQ ID NO: 12906 - DNA, 488 bp, Homo sapiens
ggagtcgacccacgcgtccgcccacgcgtccgcccacgcgtccggttaatcttaggcctgaggtttggggccgggtgacaaggaagttaaactcgtcctccctgccagattctaccccctttcggagctgagctccagccaaacctgtggagttttctttgaccattttaggacatgttactgcttctgagttggctgccccagctgctcaaacaagacctttctcctgggttcctagtagtgaaaaggagcagcagagcaactgaggaggagggcgggtgggaggcatgggactggggcttggggaggtcaggcgagaccggggtgagagctcagagaagctcctgtgacttccatgctaagatcttgccagagaactctggtcagtcctcgggtgtctggatgaagtaaaggagttaggcatttcttcctttgattctctggcttacctaatagagagagtcagatgtggtctgctggggatggac

SEQ ID NO: 12907 - DNA, 459 bp, Homo sapiens
ccacgcgtccggcccgctccgggcgtgggcgtgttctcggcgggcgtgcctggaggaggagctgggtccttgtgcggctgcagagtcagatggggcggggatttcggggcaccgggtcctcaccttcacgagaaaggccccacagcacgtccccactacccgacgactcactcttcgtggcttctctctcctccccaagagcaggggtgggcctgtctcgcgttcccctgcgggagtcaggaagcgtccttcctacctaccagtcctcccctctggtgtctggggacacttcctgggggcctttcaggtggttggcgccggtgcagggcctgagagcctgggggcgcggcctcagggtccccacatgccgcagaggccaccgccagtacctgcgcagcggccctgactacgacttcgcgcgctaccggagcacagggcacggggtgacccaggccttcg

SEQ ID NO: 12908 - DNA, 491 bp, Homo sapiens
gcgtccggtggcatcatgacttctggggcagtagactgagcagcaacaccagccacaagtcctaccggcctctcaccgtcctgactttcaggattaactactacctctcgggaggcttccaccccgtgggctttcacgtggtcaacatcctcctgcacagtggcatctctgtcctcatggtggacgtcttctcggttctgtttggcggcctgcagtacaccagtaaaggccggaggctgcacctcgcccccagggcgtccctgctggccgcgctgctgtttgctgtccatcctgtgcacaccgagtgtgttgctggtgttgtcggccgtgcagacctcctgtgtgccctgttcttcttgttatctttccttggctactgtaaagcatttagagaaagtaacaaggagggagcgcattcttccaccttctgggtgctgctgagtatctttttgggagcagtggccatgctgtgcaaagagcaagggatcact

SEQ ID NO: 12909 - DNA, 412 bp, Homo sapiens
  misc_feature 313: n = A,T,C or G
acgcgtccgctgggggccctggggctctctgcgtcgagagcgctcgaagacccgggattcctggcccgatcgcgggcggggggagaccccagctccaccccagctcccgccggctcggggaaggggcggcccctttaagagcgcgcggccccgcccgccccctccgggcaggatccgaattccagggaggcggggcggagacggcggcgaggaggaggccgcggcgcgggacgcatagagctgcggctcgggcggcgcctccctgcggcggcccggcccggctccggcccccgctggggcaatgctccccggngccgcgggatgagccagcgatcctgaactgtgttcctgcccacagtgactcggccggtccgggcatggcagacccagtggcgggcatcgcgggctcggc

SEQ ID NO: 12910 - DNA, 470 bp, Homo sapiens
  misc_feature 384: n = A,T,C or G
agtcgacccacgcgtccgggcacacacatgccaggctattttaagaactactacaactatgataaagctgtgaatatgtagccatgaaccaaaacaaagtctctgtccttgtggaacatttgttctgtcagagaagacagtgtgttggctcacattgtggtcagtgctgttgagcaaaataggtcagagtaagggggatggagactggtgggaggaatgctgctttatccaggatgggcagggaggactcgatggtgtcagcactgaaggatgtaagatctgctgctctggggagaggagcagcatggaaggagtagagtgcagaggccatgaggaaggatcaggcttgactcctttgagcaagggggatgggagagtgacggnagaaagaggacaggccacatggcctggtggcctgtgctgaggccttgggcttttactcagtgagatgagatgccattggccagttg

SEQ ID NO: 12911 - DNA, 532 bp, Homo sapiens
agtcgacccacgcgtccgaacaggccgggcaccaaggcgcaggatttctataattggcctgatgaatcctttgatgaaatggacagtacactagctgttcaacagtatattcaacagaacataagagcagattgctccaatattgacaaaattcttgaaccacctgaaggccaagatgaaggtgtgtggaagtatgaacatttaaggcagttctgccttgagctaaatggacttgctgtcaaacttcagagtgaatgccatccagatacttgcactcaaatgacagcaactgaacaatggatttttctttgtgcagctcataaaactccaaaagagtgtcctgctatagactatactagacacacacttgatggtgctgcatgtcttctgaatagcaataaatattttcccagcagggttagcataaaggaatcatctgtagcgaactaggaatcagtatgccgtaggatttacagaatattttcacatgcttattttcatcatcggcagatatttgatgaatatgaaaatg

SEQ ID NO: 12912 - DNA, 447 bp, Homo sapiens
gtccgcgaaagctgggaagccaggtctacctgccccagacgaattggtgtaccaggtgccacagagcacacaagaagtatcaggagcaggaagggatggggaatgtgatgtttttaaagaaatcctttgaagatgatgctgctttttacaaagcatcgttttaaagcacatggcctttttttttttaattattagtggtagtaatatatagaatgtattacataactgtcactgaagtggttggggaaaatgtggtgactgaggtacaggaaactactaatcttgccatcttgctttaaggtgttatggtggcacagttactgctcgcctgttaaatttcaaatgtcctgtttgatactactgtagaacactatttttaatacagaaaaagctccctataatgcacttcagagaaattaaaaatcacagagtatttattaccaatgc

SEQ ID NO: 12913 - DNA, 563 bp, Homo sapiens
  misc_feature 515: n = A,T,C or G
tcgacccacgcgtccgggagtcccccctgccccccatcaaatgcttcctgcaatactttgcacaccagagactgggcctccccagatccagggggacaggggtccctgggggagtccccagggccagcccctccaggccagctgcacacacttgacactgatttgcacagtcttgcacaaatagggggtaagagcccagtggctggggtgggcaatgggggtagcctctggcctagggagtcccctggcactgccaatgggcacagtcccgagcacacaccccctggccctggacccccaggcccctgccccaccaagcgaaggctgcttcctgctggagaagccccagatgtcagctctgaggaagaggggccagcccctcggaggcgccggggatccctgggccaccctactgctgccaacagttctgatgccaaagccacacccttctggagccacctgctgcctgggcccaaagagcctgttttggacccaacagactgcggtcccatggngcggaggctgaaaggagcccgtcgcctgaagctgagcccccttcgaag

SEQ ID NO: 12914 - DNA, 557 bp, Homo sapiens
tcgacccacgcgtccgtgagaattcagctttggagtcccgggtgaggggttttagataaacccatcaatatcacccacattctgtgactctttgcatcactcgtgttatttatttatttatttatattctgccttgttccagaaaagtgtttaaggcaacaacgcttgttttttggtgttttcttttgacatttgaaaatttagtacattgttaaaatgtacttgttaaacaggtaattttaaagagaaggaacaattgtttttagtaagttttctttttcctttttcaatgaattgattcttcaaattaaaagttcttgagagaaggagaggaagatacagcagacataggactgagccaaggaagagtctgcctgagagagacgcttggcctgtgctttgctgccatccgtgcggccttggccacatccctattaacagaggcagctccacttcagacagggacaaggcttcctgctgtgcctttctggcagggttttgtggggtcacatgggaagcaatgtgttacgcaagcagtctccatgtgtgtgtaaact

SEQ ID NO: 12915 - DNA, 469 bp, Homo sapiens
  misc_feature 10: n = A,T,C or G
cgtccgattnttaatctattggccgtgttgtcctacctgaagttcttcaactgccaaaagcacagccctttttctctgagctggtggttctggctaacactgacaggggtcgcttgttcctgtgcagtgggcatcaagtacatgggtgtgttcacgtacgtgctcgtgctgggtgttgcagctgtccatgcctggcacctgcttggagaccagactttgtccaatgtaggtgctgatgtccagtgctgcatgaggccggcctgtatggggcagatgcggatgtcacagggggtctgtgtgttctgtcacttgctcgcccgagcagtggctttgctggtcatcccggtcgtcctgtacttactgttcttctacgtccacttgattctagtcttccgctctgggccccacgaccaaatcatgtccagtgccttccaggccagcttagaaggaggactagctcggatcaccc

SEQ ID NO: 12916 - DNA, 494 bp, Homo sapiens
gagtcgacccacgcgtccggaaggaccctctgagctattttgcggcatacgggagcagcagctcaggctcctcggacgaggaggataacatcgagccggaggagacgagtcgcagaaccccggatccggcgaagtcggcgggcggctgtaggaacaaggcggagaagcggctcccgggacctgacgagctgtttaggagcgtgactcgcccggcctttctctacaatccgctcaacaaacagatagactgggagaggcacgtcgtcaaggcgcctgaggagcctccaaaggaattcaaaatatggaagtcaaattatgtaccacctcctgagacctacaccactgagaagaagcctccgcctccagagcttgacatggcaataaaatggtctaacatatatgaggacaatggtgatgatgctccacagaatgctaagaaagcttggcttctaccagaaggggaggaggacgtttggattaagatgatgaaaaag

SEQ ID NO: 12917 - DNA, 361 bp, Homo sapiens
agtcacccacgcgtccgggctggcgagcccggctgaggagcctcttgggtcgcacttaccgccgcgtccgctcccggtccctggcccctcagcggcatggcgtgcggggcgacgctgaagcggcccatggagttcgaggcggcgctgctgagccccggctccccgaagcggcggcgctgcgcccctctgcccggccccactccgggcctcaggcccccggacgccgagccgccgccgccgtttcagacgcagaccccaccgcagagtctgcagcagcccgccccgcccggcagcgagcggcgccttccaactccggagcaaatttttcagaacataaaacaagaatatagtcgttatcaga

SEQ ID NO: 12918 - DNA, 549 bp, Homo sapiens
gtgtccggtgaatgggagcggaactcacaggacacagtgagccgggtcactgatggccttgctttctaagaatctcacagtgagccctagaactctctacgtggtaacactgtgtgcctttttcagagaagagcctatcttagatcttagcctaacgttgggtctattgtgttgctggagagaccagcactgacattcatctcaaagcacatggtatgtttgactcctatgttgactcaactacccatcttgtactgggacactcgctttttttttttttttttgagacggagtcttgctctgtcaccgggctggagtgcagtggcacgatctcggctcgcggcagcctccgcctcccgggttcaagtgattcttctgcctcagcctcctgagcatgtggagctacaggctgaaggtgatgtggccgccctcaaccgacgcatccagctcgttgaggaggagttggacagggctcaggaacgactggccacggccctgcaaaagctggaggaggcaaaaaaagctgcatatgagagtgagagaggaatg

SEQ ID NO: 12919 - DNA, 579 bp, Homo sapiens
gcgtccgattgattcttctatgatgcgtgttcattatacaatacacattctcggaaaggcagaattatttgcttttatgattgttttttgtgacctaagaaacggttcttcccccattttcctatcccaggccaaaaaatattctctcacgtttttctgtaagagctttataagttcagcttttatattgaggtctgtgattcatcttggattattatgtgtaggttgtaaaataggaatctaggtccagtttttccatgtggatattcagttattgtggggccaattgttgaaaagtctccccaaagaactgctttcttatcagaaagataagatatattaaaagtgtatatctaagtctgggttctcttttctgttctaatggttgatatttttatccttatgccagaaccacactgtcatgattgctgtagctttataatagtcttgaatcaagttgcttttcagttttgtatttttcaaaattgctttcggtattctaagtcctttgcatttctgcataaaatttagaagcagcatgtctaccaaaaggaaaaaaaaagcctgggtgggattatt

SEQ ID NO: 12920 - DNA, 567 bp, Homo sapiens
  misc_feature 460: n = A,T,C or G
gcgtccggcggaagaaggtgcgtccgcggctgatcgcggagctggcccgccgcgtgcgcgccctgcgggagcaactgaacaggccgcgcgactcccagctctacgcggtggactacgagaccttgacgcggccgttctctggacgccggctgccggtccgggcctgggccgacgtgcgccgcgagagccgcctcttgcagctgctcggccgcctcccgctcttcggcctgggccgcctggtcacgcgcaagtcctggctgtggcagcacgacgagccgtgctactggcgcctcacgcgggtgcggcccgactacacggcgcaggtgcgtgcaccccgtccgcaccccgcccctgcagccgcctggtctccccgcctcccctcctccctgcaggtttgcgtggctgaggctcccacctcctgacctcgggggccgagagctttgcgagctgaccccgcttncttctggctttgcagaacttggaccacgggaaggcctggggcatcctgaccttcaaagggaagactgaaagcgaggcgcgggagatcgaacacgtcatgtaccatga

SEQ ID NO: 12921 - DNA, 585 bp, Homo sapiens
tcacccacgcgtccgagatcactgtaggtgaagttctcctgtgctccacagccacccagaggaattccaaaaccagcagtggaggacttggggaggacaggagggaaaacatggcgagttcatcagctctgtttcctttattaaaatatttctgtaattggtggtgggaaattgaagaaatcaagtgattgcatcagcgctggaaaaagctgccagcacttggcagtggaagagaatatatgctttatactggactttttgaaaaagaggctgagtttggccagattgccgaccagcaatggaaaaactaattaggtgccttgcctgtgagccagacgcccagcagggctgtggcgcatggctcccgccgcctctgaagaggacactttctagtgaattcagttcgtgctacccttgagcagcctgtgctacagcaggcacatttgtgaatctcccagcctgtgcctggcgtcagaactgtagcttcccaaagacttacctgccctgggagatggcgggcagctgctggccacagccctgggcctgcacctttatctgcaaactgggagagcggggatgggagtc

SEQ ID NO: 12922 - DNA, 573 bp, Homo sapiens
gcgtccgagtaaatctgttctgcactaaattatatcaaaataaatataaataattatttcgtataccattcgttatatacatttcagtgtttttaataatgtcaatttcttatattttaaggagaactctagttatttttataaatctaattgacttaattttgtgggaatataaaagaagtgattaaaaacctttggtttaaagtagttaatcctgaaatcaagctctgtaaatattgtgtagggatatggagaaatcctcaaaaagaaagagctaaagaaaatggcagggatggcatcttgggagtataactgaaagtaggaagatgtggatagaagagtcttatttttaatcacagggcatatgtgctatttgaattattttgacaaaagtataaaaatatggaattatgcattgtgtgtgtgtgtggtttcatctgtttaagaaatatgtgatggagactgtcctatcatcaggaaattattccagttcacagatcagaaatgactgaggaattgagagtacagctaattactaaggttgcttcttttgaccaaataggccagagcttg

SEQ ID NO: 12923 - DNA, 417 bp, Homo sapiens
tcggagtcgacccacgcgtccgcggagacaccgaccgcggcggcagcagcagcagcagcagcgagaggcagaggcggcggcggcggggaggacagcacggccgaggctgcccagaggcgcctcctccacaccccccgccgcagcagcaccggcgacagattttttaaaaaatggatttggccaaccatggacttattctactgcaacagttaaacgctcagcgagagtttggtttcctgtgtgactgcacggttgcaatcggcgatgtatacttcaaggcacacaaatcagttcttgcttcattctccaattactttaagatgttgtttgtccatcagaccagtgagtggtgttcgcttgaaaccaactgacatacaggccgacatctttagctatctcttacacttgatgtacact

SEQ ID NO: 12924 - DNA, 578 bp, Homo sapiens
agtcgacccacgcgtccgatcctcccaaggcagaggtgtgcgtgcggaaccatgtccagccctacatcccatccatcctggaggccctgatggtccccaccagccagggcttcactgaggtgcgagatgtcttcttcaaggaggtcacggacatgaacctgaacgtcatcaacgagggcggcattgacaagctgggcgagtacatggagaagctgtcccggctggcgtaccaccccctgaagatgcagagctgctatgagaagatggagtcgctgcgactggacgggctgcagcagcgatttgatgtgtccagcacgtccgtgttcaagcagcgagcccagatccacatgcgggagcaaatggacaatgccgtgtatacgttcgagaccctcctgcaccaggagctggggaaggggcccaccaaggaggagctgtgcaagtccatccagcgggtcctggagcgggtgctgaagaaatacgactacgacagcagctctgtgcggaagaggttcttccgggaggcgctgctgcagatcagcatcccgttcctgctcaagaagctggcccctacctgcaag

SEQ ID NO: 12925 - DNA, 446 bp, Homo sapiens
ccacgcgtccgccacgcgtccgcttgcacccggtgaagagcgtgcgtgtgctgaggccggagccgcagacggctgtggggccctcgcaccccgcctgggtgcccgcgcctgccccggcccccgcccccgtccccgcccccgacccggctgcggagggcttggacgccaaggaggagcatgccctggcgctgggcggcgcaggcgccttcccgctggacgtggagtacggaggcccagaccggaggtgcccgcctgcgccctacccgaagcacctgctgctgcgcagcaagtccgagcagtacgacctggacagcctgtgcgcaggcatggagcagagcctccgtgcgggccccaacgagcccgagggcggcgacaagagccgcaaaagcgccaagggggacaaaggcggaaaggataaaaagcagattcagacctcttccgttccc

SEQ ID NO: 12926 - DNA, 287 bp, Homo sapiens
cccggaacctacgcatcccaagagctgcagaaacagccgcgacagcaagaacggcagagccggcgaccgcggcggcggcggcggcggaggcaggagcagcctgggcgggacgcagggacaccgcgggcgcaggaaggcgagcagagatatccactgagagccaagcaaagaacattaaggaaggaaggaggaatgaggctggatacggagcagtgaaaaaggcacttccaagagtggggcactcactacgcaccagactcgacggtgccatcaggatgagaacttac

SEQ ID NO: 12927 - DNA, 509 bp, Homo sapiens
gcgtccggcctgctgttaacctgcgggaccccaggaacctggacttgtttctcaaagtggttcatggagatgtcaccccctacgacctggtgcggatgagctcgatgcagctggccccccaggagctggcccgctggcgggaccaggaggagaaaaggggcctgaatatcattgagcagcaacagaaggagccgtgcagacttccagcctccaaaatgacccacaagggcgaagtggagattcagcgggacatggaccagacactgaccctggaggatctggtgggaccgcagatgttcatggactgcagcccacaggccctgcccatcgcatcagaggacaccacggggcagcatgaccaccacttcttagaccccaactgccacatctgcaaggactgggagccctcgaatgagctgctaggctccttcgaagccgccaagagctgcggggacaatatcttccagaaagccctaagccaaactcctatgcctgctccagagatgccc

SEQ ID NO: 12928 - DNA, 462 bp, Homo sapiens
aaagccgtccacagacgagcagacctcctcagctgaggaagatgttcccacctgcggctatctgaacgtgctctccaacagccgctggcgagagcgctggtgccgagtgaaagataacaagctcattttccacaaggacaggaccgacctgaagacccatattgtgtctattccgctccgtggctgcgaggtgatcccgggtttggattgtaaacatcctctgacgttccggctgctgcgcaacggccaggaggttgcagtattggaggcatcttcttctgaagacatgggcaggtggattgggattttactcgcagagacgggatcgtccacagacccggaggctctgcactatgactacattgatgtggagatgtctgcaagtgtcattcagacagccaaacagaccttttgttttcatgaacaggcgtgttatatttgctaacccatatttagggggca

SEQ ID NO: 12929 - DNA, 583 bp, Homo sapiens
ggacgagttgtatcggagtcgaccacgcgtccgcggacgcgtgggggcgacatacatgggacacggtgccaaaatgcccatccgagctaactgatcaatggaacctgatcggcccactggggctgtttatcatgctgctttttctgccagatgatgtacttggctatattgatttatgagccaacaggaaataactccgatatctgaatactgcccatagactactgaccttgccgggccctacttctgcaactctactactacagtggcacaacacagagttgccttctaactactgtacggctggctgtcaaaggacaacgcacaacaaccttctaccacctgtggaggccttgatgacttgtgtcatgactgcgaggattggaaaaaaggttaaccaagagggttgtacagttgttaggttggagtagaggtacgagccattttgtgtagggagttacagcacataaaagcatgaccttcaaattttaaagcttccattgactatagttaaaacaggattttttgcgcggatggggggattaagctggagacctggaatgcagaaaccaggttaaacagg

SEQ ID NO: 12930 - DNA, 396 bp, Homo sapiens
agtcgacccacgcgtccgatagtctaccagccttacctggttgattacacttgtaaaagaaagattaaaagcaggccagtgactctggtctgcttgaacatgtgaatgtagtggtttgagcaatctggagtttgccctagtgtcaaattccagactgtccatagtgtccaaaacctgaggcagacactaatgttaacccccagcaccccgtgattggaaacaaacctaaatacgtattgggaacttaatagcaattttaagcattctgatagattttttgtagggatggggtcatgccatgtggcccaggctggtctgaaaactctggcctcaagtgatctcaagctttggccttctaaagtgttgggattacaggtgtgaggcattgcacctggc

SEQ ID NO: 12931 - DNA, 233 bp, Homo sapiens
cgcgtccgtccatcacagcctccgaaggtgctgggattacaggcataagccactgtgcccagcctgtttttaataatgatattaagtgggtttggttcatgtgttattaatcagtgttaataatcgtactttttttttttttttaaaagaaaccatggtattctaaaatcaggagtccaaataaaagaaagttctcggctgtgcgtggtggctaacacctgtagtcccggcac

SEQ ID NO: 12932 - DNA, 552 bp, Homo sapiens
ccacgcgtccgaaaggagtcgcgccgccgccgccgccccctccctccggtgggcccgggaggtagagaaagtcagtgccacagcccgaccgcgctgctctgagccctgggcacgcggaacgggagggagtctgagggttggggacgtctgtgagggaggggaacagccgctcgagcctggggcgggcggaccggactggggccggggtaggctctggaaagggcccgggagagaggtggcgttggtcagaacctgagaaacagccgagaggttttccaccgaggcccgcgcttgagggatctgaagaggttcctagaagagggtgttccctctttcgggggtcctcaccagaagaggttcttgggggtcgcccttctgaggaggctgcggctaacagggcccaaaactgccattggatgtccagaatcccctgtagttgataatgttgggaataagctctgcaactttctttggcattcagttgttaaaaacaaataggatgcaaattcctcaactccaggttatgaaaacagtacttggaaaactgaaaac

SEQ ID NO: 12933 - DNA, 457 bp, Homo sapiens
gcgtccgggtgtccaggccatggggcagccctgggcggctgggagcacggacggggcgcccgcgcagctgcctctcgtgctcaccgcgctgtgggccgcggccgtgggcctggagctggcttacgtgctggtgctcggtcccgggccgccgccgctgggacccctggcccgggccttgcagctggcgctggccgccttccagctgctcaacctgctgggcaacgtggggctcttcctgcgctcggatcccagcatccgtggcgtgatgctggccggccgcggtctgggccagggctgggcttactgctaccaatgccaaagccaggtgccgccacgcagcggacactgctctgcctgccgcgtctgcatcctgcgtcgggaccaccactgccgcctgctgggccgctgcgtgggcttcggcaactaccggcccttcctgtgcctgctgcttcatgcc

SEQ ID NO: 12934 - DNA, 507 bp, Homo sapiens
gtcacccacgcgtccggggactacaggcatgcaccaccacgcccagctaatttttgtatttttagtagagacagggtttctccatgttggccaggctggtctcgaactcctgacattcggtgatccacccgcctcggccttccaaagtgctgggattacaggtgtgagccactgtgcccagccccttcctgttgagtaaaaggaagaacttcagggtaagacactgtacagtgcccagcatctggagagccgccagcattacccctgccttaggaggtagtcgtctcctcatcactacaaggtattgaagcctgagggcccctgggcaggacgatagagtgagattgccctggggactcaggaaaggaaacatgccgtatttctagggaaggagctgctgctgcctctcagtgactctggttccaggaggaagagccgagagctagggttccctttatagggagaaacccaacagggtttggggtgttctgggaagccaggccagct

SEQ ID NO: 12935 - DNA, 298 bp, Homo sapiens
gcgtccgaaggagtcgcgccgccgccgccgccccctccctccggtgggcccgggaggtagagaaagtcagtgccacagcccgaccgcgctgctctgagccctgggcacgcggaacgggagggagtctgagggttggggacgtctgtgagggaggggaacagccgctcgagcctggggcgggcggaccggactggggccggggtaggctctggaaagggcccgggagagaggtggcgttggtcagaacctgagaaacagccgagaggttttccaccgaggcccgcgcttgagggatctg

SEQ ID NO: 12936 - DNA, 329 bp, Homo sapiens
gtccgctcccctgttttcttcctttttctttttgcttgtatgcacaaggtaggacttacttcgtaagaaacaaaatgccagtattttcttaagccatgatgtgaaaccaatgaccctgtgaccacatggcacagaacactaaattttggtcccatggctgaaacttgagggtgactaaaagtaatgcctgtgaaacatgatatctatctgggatggccatttgatctctaaaaggaattttgtacactccacagaactcctatctatagtaaaattgattttcagttttaaatgtgggcaaaaaggcattttcttcaagattttaaaaa

SEQ ID NO: 12937 - DNA, 505 bp, Homo sapiens
ccggaaaaattataaacaactcattttaagattcaaattaactaattcctgcatatatgacattccttacataagcgaacactaaacaaaaatggctagaaatgtctttttctttcttttctctctttgttgtttaaggtattaagcacgaattattacatgagactggcagatagctattaatcctcttacagatttgagaaagttgattctcaaatatttatgcaccttctccttcattgttttctttaaatctgtcctcttaaaaagcttcttaagagctcagttaatgcttttgacttaactaggagaaaaaggcatgataatacaggcaagatggcattgttagcaattctgtaggtggttttgggaatgaatcctaagaggcagggatcttaaggacaaggaagagaagagagagggggggggaccttttgatctctttctctgggaatcttaatgcataattttactaaaacatgttctcaattcattcatattatta

SEQ ID NO: 12938 - DNA, 496 bp, Homo sapiens
cgcgtccggataatgagtgtatgcctagctactttctccagtttacttttagaccatattgttgtttgttttgaatatcattccttaggctatgttgagagtagagtggcttcccattaggagaactaatttagggcatgtcttttgctgaatcccgtcagcatatttaacaaattcccaattctagataatttccttttatttctctagtaccctttgccaggggctctacacatcaaaggtgttcatgaagtatttgtcaaaggaaagaacagtaatgacacctaacacataatgagtgattagtatgttccaggcattgcgtgagctatttactgtgagtgatttaatgttatcttcccagcagacctctgaggtaggtactagtatgatccccatttcgtacatgaggaaactgacactaagggacataaaataagttttttgaagtcacaaagtgaataaaaggaagaccagggtttaattgaagcccata

SEQ ID NO: 12939 - DNA, 444 bp, Homo sapiens
ggataatagacttttgcgtgttaaacacagcttccttaactcttagaactggaagttgtagagctctccttttggtgcctttccagcctttatacacactattgtagctttcttaggtttgataggtagcgtttcaagtagtttagctgagacagtgaatgtattaggttcaacatgaccttgtgttttatttgtgtttgccaacaggatgccttatttgtttgagaaaaagatgtactagtgtcattctaaactatctccttttttaggattctaaagaagttaatcatcatccttttgtttattttaccaccatttagtgccttaaatcctatcaagaaagcagtgttactgctcaatgcccaaataagacacgcggatattgctattgtcttgcttttgagttaacaggccaactttttatacttaaaacctcagtaaact

SEQ ID NO: 12940 - DNA, 457 bp, Homo sapiens
cgccccgaagtccccactgtccctgccgaggcgccggcgccgtcccctgtgcccttgaccacgccagcctccgccgaggaggcgatacccctccccgcgtcctccgacagcgagcggtcggcgtccagcgtggaggggcccggaggggctctgtacgcgcgcgtggcccgacgcgaggcccggccggcccgggcccggggcgagattgggggcctgtcgctgtcgccatcgcccgagcgcaggaaaccgccgccacctgaccccgccaccaagcctaaggtgtcctggatccacggcaagcacagcgccgctgcagctggccgtgcgccctcaccaccgccgccaggctccgaggccgcgcccagccccagcaagaggaaacggacgcccagcgacaaatcggcgcatacggtcgaacacggcagcccccggacccgcgacccaacgccggggcccc

SEQ ID NO: 12941 - DNA, 368 bp, Homo sapiens
gggagtcgcccacgcgtcctgtgagtttagcgctgctgtccggatgggttggtagcagacagggtggagtagggttaagcacactggtcaccttaggattggtttcctggtgctggagaatggttaggacacaggccttggaaggttttttgagtgtgaaatattactcagcgttttctgcagacctcgcgggcaatgccgcttctaattttatccaggccttcttctgtagggagggcctgttaagagttgagcagcccgatttctgaacccctctaaaaagctgtggctgattggtggcttttttttttcttggagagggggtgtcaaagatttctttaaaatcgttagtgatgtggtctcgcttt

SEQ ID NO: 12942 - DNA, 354 bp, Homo sapiens
acgcgtcctaaatgtgtggtacatggaatattttttattatgcttatttcgtattgccaggtagatggccagcctgacattcaaaattattttatcagcccctaaatgttaatatttcccaaactatttaaatcagtagaagacatttttactattaagaataaaaagttataatataaaatggattaaatgccagattatatgctaaacaagtcctttaaatttttaacttaatatttttaacagattttttttttgagatgcagttttactcttgttgcccaggctggagtgcaatggcacaatcttggctcactgcaaccaccacctcccgggttcatgcgattctcctgc

SEQ ID NO: 12943 - DNA, 480 bp, Homo sapiens
tccgcgaggttaggagatcgagaccatcctggctaacacggtgaaaccccatctctactaaaaatacaaaaaaaattagccagacatggtggcagcctcctgtagtcccagctactcgggaggctgaggcaggagaagggcatgaacctggcaggcggagcttgcagtgagccaagatggcgtcactgcactccagcctgagggacagagcaagactctgtctcaaaaaaaaaagaaaaaaaagtggcacagatcaattataaatcactgcttcaaggccagtgctctcactttgtacattaataatctcaggcccaaataagataagtgatatgtcaacgtatgttcactttggtctttacatggcagctatagtatacggaatattataagctcagaatcgtcatagctacataactcctttagttggaagacaacgcgtaaatgcccatcaagagctagcagttctgcatttgactc

SEQ ID NO: 12944 - DNA, 358 bp, Homo sapiens
gcgtcctggtaacttgaataaggattatgtgccccacccttactctcattcctgcttcctcttggactcaaacagggtatgagtatgaagattttgcctttagttcctgaactgaacctgcttgctatccctttcctccccaccactaccttattccttctctgcctccaaattgccactttgttttgaggcttccttccctaccttattattctgaaggaagtagagatcttgcttctgaaacccctcctaagaaactgcccagggacaagataaattacaaacaattcatgggagtttactacctaagttgcttctagggcatatgtataccatactagtagtctagatttctgga

SEQ ID NO: 12945 - DNA, 371 bp, Homo sapiens
  misc_feature 22: n = A,T,C or G
agggagacgaccacgcgtccgngacaggatctatggatggaagaagatgaaaacaaacacacagccataaaggtaattgtttctggccaacatctttctactgatgctttgttttgattgtatgttgctgtttatattttctcaaacttgaggctctattttatgaaatgttgaatataaatacattgtatttaacttgaaaaattcctggaaatatacctgataattaccacctgaggaatcgttttattttatgaaagtaacagcgtgatgaatactgtaattacaaaagaaaattagtactcactgacttatacccttgttttttttttttttttgttttgtttttttttggttttgttttaggtgac

SEQ ID NO: 12946 - DNA, 370 bp, Homo sapiens
agggagccgaccacgcgtccggctggccagcagaccctgcagcagtcattggtggttctgtctttccctaacccttatgtgctggaggacagaggagccacctcttctcactggttgatactctgttcctaagacctcaggttacccagtgtagcctgctgtgacccttctgcttcattttctgccaagtgatacagaaccttcgttctgctgctttggggacaggtgatcctagccccagcttagggccagtgctctgtgccactctggagaaatagggaaaagataggggtggctcagtacagcagccctgtgaaagtcaaggccagagcttttcttttttaatttttttattattattattattatt

SEQ ID NO: 12947 - DNA, 371 bp, Homo sapiens
agggagccgacccacgcgtccgcttggcaaacctccggggactgtcagaggaggagaggagcgagaaggctatgcttcgcgcccgcattgaagagcagtcccagctcatctgcatcctgaagcggaggtcagatgaggccctggagcgctgccagatcctagagctgctcaatgcagagctggaggagaagatgatgcaggaggctgagaagctcaaggcccagggtgagtacagtcggaaactagaggaacgctttatgaccctagcagccaaccacgagttgatgctccgcttcaaggatgaatacaagagtgagaacatcaagctgagggaggagaatgagaagctgaggctggagaatagcagcctc

SEQ ID NO: 12948 - DNA, 397 bp, Homo sapiens
tcgacccacgcgtccgcttagccgctgccagagttccatatgttctggaacccttgactcctagagttcagaacccagccaacttgcagttttcagaatgttcaagaaacttctgacactcagagttgcagaacctcctggtccctgcagattcctggaaatcagaatatggtgggtgaaagaatcttgtggctgggcgtggtggctcacgcctgtaatcccagcactctgggaggccgaggcgggcagatcgcctgaggtcaggagtttgagaccagcctggccaacatggcgaaatcccgtctctactgaagataacaaaaattagccggtcatggtggcgcccgtgcctgtaatcccagctcggcaggccgaggcaggagaatcgcttgaaccc

SEQ ID NO: 12949 - DNA, 320 bp, Homo sapiens
cccagcgttcggtgaatattcagtaagctaattaaaatttgtaagtaagatttccttattaaaaaaactattaaaataagaggaagcccgtttaaataataattagaggaggaaaaaagaagatgactatcaaatcacagtactttttttcagctatacataaaggccttttcagttgctttggcaatagacagaaggcataagtagattactactgcaagcatgtcagtttggaaaaccaagaaacaagtctgaaggaaaaggcatctttttttgttaaaacggtttctttcactatgtatttaaaagaagtactacag

SEQ ID NO: 12950 - DNA, 496 bp, Homo sapiens
gcgtccggtgacccattaagtatatttcgtgacccaaagtttgaaagagattataggtgtagctttgctagtttgtcattgatatagaacagtgactatcagggaagttgaagaacggcgaattgaatgtaaatcatgtctggatggtgaagattctaagaatgcaactagggaaagggctgcaaaaagaatgtggcagactaatgtagaatggtgcaaccagatgaagacatgggtggctctaggaattccaaagtggccgtgaaggccaggcacggtggcccacgcctgtaattctagcactttgggaggccaaggtgggtggattgctgagctcgggagttcgagaccagcctgaccaaccaggtgaaacaccatgcctacaaaacatacaaaaattagccaggtatggtggggcacacttgtagttccagctatttggggggctgatggcagagaattgcttgagctcaggaggtcaaggctgcagtgagct

SEQ ID NO: 12951 - DNA, 371 bp, Homo sapiens
gcgggcggcggcggcggcggcggcggccgggacccagcgggccaggtggggacggcgcgtatgcgggtgcgggagatgccgtgcgggactggggccacttgagccgcccgcctcgtccccgccttctgtgggaaggatgtgcgcgcggatggccggtcgcacaacagcggcccctcgggggccctacggcccctggctctgcctcctggtggccctcgccctggacgtcgtgagagtggactgtggccaggctcccctggaccctgtctacctgccggcagccctggagctcctagacgcccctgaacacttccgtgtgcagcaggtgggccactacccacctgccaactcctttctgagctcccgatctg

SEQ ID NO: 12952 - DNA, 597 bp, Homo sapiens
ggagctggctggtgtttgagctgtggcagaagcacctggggctccagggagcaggctgggaactgcaggaccttgctcagtcaggagcacttccccctccttggggcaggaatactgaggtgcctccccacagatggagaaggtggagaggaggatgggcctcaggagcatctcaagccccagtagcaggagaaagaaagaaagagatgcctggttttcacagactggttcctgtggctgggatgactgcatccttttttttttttttttgagacggagtttttgcctttgtcgcccagactggagtgcaatggcgtgatctcggatcaccgcaaccttcgcctcccggattcaagcaattctcccgcctcagcctcccgagtagctgggattacaggcacgcaccttcacgttcggctaattttgtatttttagtggagacggggtttctccatgtcggtcaggctggtctcgaactcccgacctcaggtgatctgcccaccttggcctcccaaagtgctgggattacaggcatgagccaccgcgcttggccagactgcgtcctttttaagcgaacattttaaggcctgggagttt

SEQ ID NO: 12953 - DNA, 436 bp, Homo sapiens
accttgtgaggggacacaaagaaaaattgaataaactgtatgatttaaaagattatcgggagagttacctcccgatataaaaggaaggatttacagaatgtgagctaaggtctggcgtaaatgtgcaccggaaccgagaaggcccggattgtcatggacgatgagatacaccggaatatcatggacatattctttaaagcgccctttatcttcaaatgcggcacggaaaccggaggctttgaagaactcaaggaagcgcggcacgataccgcccgcaataaacacgccgccaaatgtcccgagattgagcgccagattgccgccaaaacggcccataatgacgcaaaacagcgacaatgcgcggcggcaatcggtgcagctgtcaaccagcgcgcgttcggtaatatcttttggcttgagattttctggcaggcgg

SEQ ID NO: 12954 - DNA, 440 bp, Homo sapiens
  misc_feature 334, 355: n = A,T,C or G
ccacgcgtccgaccggaaatgctgacctgacctttgaccagacggcgtggggggacagtggtgtgtattactgctccgtggtctcagcccaggacctccaggggaacaatgaggcctacgcagagctcatcgtccttgactggctcttcgtggttgtggtatgcctggctgccttcctcatcttcctcctcctgggcatctgctggtgccagtgctgcccgcacacttgctgctgctacgtcaggtgcccctgctgcccagacaagtgctgctgccccgaggccctgtatgccgccggcaaagcagccacctcaagtgttcccagcattttatngcccccagcacctatgcccancctgtctcccgccaaagaccccacccccaccagctatgattcccatgggccctgcctacaacgggtaccctgggaaggataccct

SEQ ID NO: 12955 - DNA, 545 bp, Homo sapiens
ccggaaaactgttcatctactcactgtagtgccctccttgaaatgtgtgtttgttcattcaactaacaatatttggtgatccctgtagtaaacactgtatgaattttacacagtctggccatcaagaaagatcacggagtatattctagatggggaggctactaagtgaataggaatcaccacgctgggctgtttattaggtacagtaataaacataagtactggttgcaaaaaaaaacaataaactaaaaaagtgcggccgctagactagtctagagaaaaaacctcccacacctccccctgaacctgaaacataaaatgaatgcaattgttgttgttaacttgtttattgcagcttataatggttacaaataaagcaatagcatcacaaatttcacaaataaagcatttttttcactgcattctagttgtggtttgtccaaactcatcaatgtatcttatcatgtctggatccccgggtaccgagctcgaattaattcctttttcgcttcctcgctcactgactcgctgcgctcggtcgttcg

SEQ ID NO: 12956 - DNA, 533 bp, Homo sapiens
tcgacccacgcgtccgaaaagacaagacagcatactgtatttttcctcttaaaattcaatgttacaattaaatgattgttatctgagaataagttagcttcagctttctaatcgatgtgttcccacatctacaaattgatatgaaaaattattttgaaatgcacactgcaaaatggtgagaatatgaaagttacctgggaattaaatcagaactgtctccatatgactatttccaagtcacaatcataactttcttaatagcaatggttatatatgtggccagatagtattcagtttcacagtaatgtctcggtcacataaagatagcaaagcatagacatagtacaacaatttattatttctgctgattgccaaatgtgcataaaactataaagatatattttccagcccaggtgacagagaccctgtctccaatttaaaaccttcatgttaaaggtgcggccgctagactagtctagagaaaaaacctcccacacctgcccctgaacctgaaacataaaatgaatgcaatt

SEQ ID NO: 12957 - DNA, 451 bp, Homo sapiens
actttaaaaataatgttttacggccgggcgcggtggctcacgcctgtaatcccagcactttgggaggccgaggcgggcggatcacgaggtcaggagatcgagaccatcctggctaacacggtgaaaccccgtctctactaaaaatacaaaaaattagccgggcgtggtggcgggcgcctgtagtcccagctactcgggaggctgattttttattttttgaacttttttacagagaagggggtctccctatgttgcccaggttggtctcaaacgtttgggctcaagtgatccttctcacagagtgctgggattataggcatgagctgctgtgaccggcccaaaatcaaatttcaaaactaaaaaaattctcagataattaatgaacctacgtgaattaatctacaaattccagtttgaaaaacactaaagataaacaactgccaatgtggaa

SEQ ID NO: 12958 - DNA, 538 bp, Homo sapiens
  misc_feature 444: n = A,T,C or G
tcttccctatcttaggtactggtgggccaaattcctgggaccaggtcaaggtgggctgcctcagtaagaaggaaggactggagagtgcccatttcagaggagcaggctggtgggggccagccagaaagtagttccctttggggggaagatgttggacctttattatttgtggtaaccagccgaggctggttgtcaggacagcaggtgagccactttagggaagaaagtgcaggggtgggtggatgcccagattaccaaggccagccaccctgatggggtagggtctggttatctgtgttcaagaagcaaatcccaccccagccccagcactagctctctatgtatgtattttccctgtacaatgttttataaaagagatcattaatttaaaaaaaaaaaaaaaaaaaaggtgcggccgctagactagtctagagaaaaaacctnccacacctccccctgaacctgaaacataaaatgaatgcaattgttgttgttaacttgtttattgcagcttataatggttacaaataaagcaata

SEQ ID NO: 12959 - DNA, 309 bp, Homo sapiens
acagagattagctctggaaaggaaatagactagaaggataaagggaaggaatatagctatgaaggtttactctgcatcagaccgctttctagttctatgacttaacgtcctataggctgtaaggttctctgcgtgaacacttctttcctggcctcctttctgcccccatttcctcttaaacctcagttgcctgagttttattatcccctggtgcatccctgggccatgtttcatttcacatatggaaacaatcaggaagaaccttgctatttcttatcttctgattttgatgggaaaatataaatcttt

SEQ ID NO: 12960 - DNA, 532 bp, Homo sapiens
tccggttgtagtttcccttcccattctcttggtggccctggaagcttctaggcacagtgtgccaccctgattattcccaccactccatccaacttttctctctctgtggtgtctgcaccacaagctgcctaccctccaggtgcctcaatggtccggccaccagttgtgcctcggcgccccccggcccacatcagcagtgtcaggcaggcctccacccaggtgccacgcacggtgcctcatacccagagagtagccaacattggtactcagaccacaggacccagtggggtaggatgctgtacaccaggccggccgctcctgccgtgcaaatgttcctcagcagcacatagcacctatcgggtccaggagccggctgtgcacatcccaggacaggagcccctgaccgcgtccatgctggctgcggcgcccctgcatgagcaaaagcagatgattggggagcgtctctacccccttatccatgatgtccacacccagctggctggcaagatcacgggcatgctgctggagattg

SEQ ID NO: 12961 - DNA, 464 bp, Homo sapiens
cgaccacgcgtccgggcatttgattttaacaattgttctcaaatttagaaaagagacatcgcaagatggtgaaataggaagccctgggccctccttccctccacaaacacactgatttgacaacagttcatggacagattccctttataagaaaccaagaaactgttaagaggctcttataccccaggtgagtgcaaaatcatccacatcaaagatagctgggaagttcaagacaccttctttccgtaatttctaaactggcacagtactatatgattgagatgaatctccccacatccaagcttcctgctggggaggagggggaggtataccatatgtccaatgttccaactcctctaggagctacccaggtaggagttgggtccagctctgtccagggctgtcttaagagcactgatgagggtctggtattctctagtggcccaggaccataagagcagtga

SEQ ID NO: 12962 - DNA, 529 bp, Homo sapiens
tccgaagcagtgaaaatagtgtttgactccattgacaacctagaggcggctcctcatgatatcggctacgtcaaacaggccatgttccactatttccaggtgccagatcggctagggatactcactcacctgtatagggactttgataaatgcaggtttgctgggttttgccggaaaattgcagaaggtgctcagcagggagaccccctttcccgctatatcttcaggaaggctggggagatgctgggcagacacatcgtagcagtgttgcccgagattgacccggtcttgttccagggcaagattggactccccatcctgtgcgtgggctctgtgtggaagagctgggagctgctgaaggaagggttttcttctggcgctgacccagggcagagagatccaggctcagaacttcttctgcagcttcaccctgatgaagctgaggcactcctccggtctgggtggggccagcctaggggccaggcacatcgggcaccttctccccatggactatagcgccaatgccatt

SEQ ID NO: 12963 - DNA, 518 bp, Homo sapiens
  misc_feature 229, 342: n = A,T,C or G
tccgcgtcgctcccctgctcggggtcagctagtgtccgctctgctcggccgcgggctcccggaggactgcaggcaggatgacgcaaaacacggtgattgggaatggagttgctatggcctctaggccatcccagcccacccacgtcaacgtccacatccaccaggagtcagctttgacacaactgctgaaagctggaggttctctgaagaagtttctttttcaccctgnggacactgtgccttccacagccaggattggttatgagcagctggctctaggggtgactcagatattgctgggggttgtgagttgtgttcttggaggtgtgttctcagcttggnggccctggactgtgctttgagtgcctcaaggctgtgccttctgggcggggtctgtgggtgaatcgcagcaaggagctgggggccattgttccatgaagaaggcacccgggcaaaacttgctggcttatatatccagccctgcttcaccctggcaggcttttgctacagctatggct

SEQ ID NO: 12964 - DNA, 482 bp, Homo sapiens
cgacccacgcgtccggcttcgacgccttccctaacatcgagaaggtgtccaagatcacgtctcccgtgctcatcatccacggcacggaggacgaggtgatcgacttctcgcacgggctggcgctctacgagcgctgccccaaggcggtggagccgctgtgggtggagggcgccgggcacaacgacatcgagctctacagccagtacctggagcgcctgcgtcgcttcatctcccaggagctgcccagccagcgcgcctagcggcggccccaaccggccggacctcagcaataaggcggcccccggacctcaccccgcgccggcccccacccaggggctgcatgtggaccccccgggcggcccaggggaccccgccccgacccaggggctgtggacgatgtacaggcaacagagctacgcactcctttccttttggaagcaagaagaaaatacgtgaaaacggaaattaaagatttaaaattt

SEQ ID NO: 12965 - DNA, 520 bp, Homo sapiens
  misc_feature 345, 430: n = A,T,C or G
ccacgcgtccgaagccttttgtctcagagaatttattgtcctgacagcagaggccgatggtgggatcgactggcccttaatttacaccagcacttgaagcgcctggaaccgactatcaagtgcatcacagaggggctggcggatccggaagtcagaacgggacaccgcctttcactgtatcagcgagccgtgcgcctgcgagagtctccgagctgtaaaaagttcaagcacctcttccagcagctcccagaaatggctgtgcaagatgtgaaacacgtgaccatcacaggcaggctgtgcccacagcgtgggatgtgcaagtctgtgtttgtgatggaggccggngaggccgctgaccccaccacggtcctgtgctctgtggaggagctggcactggcccattacagacgcaagcggttttgaccagggngattcatggcgaaagggtccaccttcagcaccctgtatggcctcttcctgtgggacatcatcttcatggatgggattccggatgtcttca

SEQ ID NO: 12966 - DNA, 535 bp, Homo sapiens
cacatgcgggaatcataggcctgcaaagctcctgctattcactataactctgccatgccttaggcacttcctaacctagaattctgagtgaaggacaacaataactaatacttttgattcaggtattacaaagaagttaagagttcataaggcacctaagtaaagtcacattggttaagagtacatgtctccagatactcttacatttgcaaagtaattgcatttctgtatctatggtctgtaaataaaattgaagagttgtgagaataaaagcatgttgtctttgataaattgtttttacaaaacaggcacaagagaggcttgaagggtccttgctatcttttaacctattttataatctttgctgcataagaaacaaatatgcttatttacattctatacttaaacatattatcaaacttttattctgaagataatacacatgaaggctttaaactttaatcttcaatatattttttaatcttcctgatgaattagggaaataaatattggggaaacaatgcagttttattta

SEQ ID NO: 12967 - DNA, 417 bp, Homo sapiens
cgcgtccgcccacgtgaggggcagctgtggtgtggtgtgatgatgctgggataggcactcagatggttgagtctgagtttggctctgatattatatcaactgcatgggcagctgtggtgtggtgtgatgatgctgggataggcactcagatggttgagtctgagtttggctctgatattatatcaactgcatgggcagctgtggtgtggtgtgatgatgctgggataggcactcagatggttgagtctgagtttggctctgatattatatcaactgcatgggcagctgtggtgtggtgtgatgatgctgggataggcactcagatggttgagtctgagtttggctctgatattatatcaaccgcatcattttggggaagacacaatttctcagaattttatttaggtgtaaaataaa

SEQ ID NO: 12968 - DNA, 535 bp, Homo sapiens
ggaccgggctgggcctggccatcgtcaagcatgtactgctgcgccaccgcgcgcgcttggaaatcagcagtgtgctgggccatggcagtacgttcacctgccattttccgccagctcaggtgacgcgcacacggctggtcgggaatgatgaataacctgaagtgacgacgacccaatgtgggagctgctgatactttgctgtctccgcccagcagtgggcactaggcaagcgccccatcagccgctacattggccgacttgcgcctgcctttcaggccctctcgtcaccccttattgaacacacggaacctgcaaaaccccatcatggacccttcccctggtattaccctcgctacactcttcgccgatttcggcatgattctttttgcactgatcctggtactgctcaacggtttcttcgttgcggcggaatttgccatggtcaaactgcgctccacccgggtcgaggccattgcccacaccaacggctggcgcgggcagatcctgcgcaccgtacacagccagctcgacgcct

SEQ ID NO: 12969 - DNA, 390 bp, Homo sapiens
ttgaatctcctaatacactgcgtttttattgttatgtattctatgttttaaagctcctcaaggtattgttattcttttgtataatcagtgtttgtttggagctgtctgtaaattttcctcttttttgctctttattttttctttcaactcagaccttccaaaatgggattatttttcttttttctttagagacatttgcttgataacagaattttaatttggcggctatttatttttttcagcacactgcaggtattaaactacttggcttcattgttggttttgaaaaatcagctgttctaatgttgctctttgaatataatctgcctttttctgtacttgcttgtctttagttttttgtttttgtttgagacaaggtcttgctgtttt

SEQ ID NO: 12970 - DNA, 502 bp, Homo sapiens
ctccactggtttcttgtctcatgacgaagaaaaaatcctaactgttcttgatgatctttaaggctcacaatgatctggacagaggtatttaccttgaagctcataaagcataggcctttctcacttgcagagtatctttctgaagctggactaaattggttaaggccactgtacttttccactttgtcttctttcctgtcacacaccctatcctttcaggctgtgttgggatggacaaaagcagttctggagtcctaaggagaagatgagtgggatatgtttctgtgacctgcagtcattttaaagtttagctgttgctagctgactccatgtaagaataccttccaggaatttgatggctgtgcactctggcagtgcagctggcatggttatagggtgcttggccgaaggtttgcatagcaatatgaacgcatcctacgacacatttagccaacactggaagactgtgggtaatggacgagaaaccaagattgactttttg

SEQ ID NO: 12971 - DNA, 442 bp, Homo sapiens
agttgacccacgcgtccggccctgattgatgaagcacagtcagtaaatcatctcttcattccccagttcttaagccaacatcagcaacactgagagaacattagattaaaggcaggtatagaagagagacttagggtaacaagttagtgggtgcctgaaggcatgtgggaagagatgtggtaaaggtgtgcacactattccttacgtgacttaaaatgtcaaggggcttggtgtggtggctcatgactgtaaaactagagcactttggaaggccaaagctggaggatagcttgaggtcagaagttcaaggccaacttgggcaatatggcaagactgtgtctctaccaaaaaaaaaaaaaaaaaaagtgcggccgctagactagtctagagaaaaaaccttccacacctccccctgaacctgaaacataaaatgaatgcaatt

SEQ ID NO: 12972 - DNA, 532 bp, Homo sapiens
gcgtccggagaggctgttcattgatagatactccagaatagacacgggcccttgaaaagcttgtacctttggggaaaagtagaccaggaaaatctcaagccagagaaggactatgaagcttctttttccagttacacatggaaataagaggtcttgcatgagaaacctaaatcaacccctatgtcttaagcaggttttgagtctaaatttatactaattgcattgtggagcaggtctagccaagaaattaacatgacaatcagtctctaatctgtctgtctatctacttacttacctaccagtcaggccaaagagattcccacaagtaggttaaaaaaagtaaagtctgataacaaataattagtaagaatgaatgaataaataaatagcacaaaggaacactctaccacaaggaggagtactcatcacatcaaatgagagaataccctaagaaagtgagataatgcagcaatctgaaagatattttaccctaacgtgtttaaaatgattagttattaaaaaaaaaaaaaaa

SEQ ID NO: 12973 - DNA, 236 bp, Homo sapiens
cactaagctgtattttccctaaaaatgcttcccttgcatttatacttattaagaatagataatagctaacatctatccactgcctttgattcatgaggccctcacgaattgcctcattaggtctccgacagtatggtacaactactctttatattttacagatgaagaactgggctgactgttctttctgcttacacatcctaatgaaaccttcctactggggtgatctcttttgg

SEQ ID NO: 12974 - DNA, 336 bp, Homo sapiens
cgggaacagacataaaacctgttttgttagatgtgaatctaggaaatacaatatatttttaagtaaaagtactcttgctttacttgtaaactgattttcgtttttttcccctcaggccatcaagccctgtcgtcctatgaccaacaatgctggcagacttttccactaccggatcacagtctccccgcctacgaactttttaactgacaggccaactgttatagaatacgatgatcacgagtatatctttgaaggattttctatgtttgcacatgcccccctgaccaatattccactgtgtaaagtaattagattcaacatagactacacgattca

SEQ ID NO: 12975 - DNA, 590 bp, Homo sapiens
gaatgcaagaacatctggatcaaatggctttctagatgagaatggttgcattttttaatggctattctggtagaaaggacaacatgtgatattcatcgaccctctttctcagaccctctttataacagctagtatggaaaaatctgtctttcctataaatattttccctggggaatggtttcccattaatgtgttggatgctttgttgtttctctcttgcacagcgtgtatgttgtcatctgcacttaagagtggaatggaattgggaatcctggtttcttgctctggctggaggtcccaagtccgcattgtgattttgggcaagtcacgttgttcttctagatctaatttaactcatctgtaaaaaaaagggtgaattcgacaatttcatgggtttcattagatgccaatattttatgactcatgatcccagcaagactacacctatttataaggctgttttgcttgtttttactaagagcaacaataactacatattttcagtttactcaatcatcaaaaaaattataaaatccataaacactgtggatttgaaacattgcaactttgataaaaaatgtatccatgta

SEQ ID NO: 12976 - DNA, 288 bp, Homo sapiens
gcgtccaaaagcagtctttcttgctcaaagtattaaggtgaacaattgaatagagtactgtggtcgggagactgatttgagactgcagagctgatgctgggtagagggtctggacttgtattcatgttctgtctcagggcagcccctggagcaggagatggcagaggcatttacagctgcagaaaacagggaggaatggaatctgaggtagccctggcctcaaaattcaggcctggctgtatcatttacagagatttttctggagggaaaagtctcatttctgaggaa

SEQ ID NO: 12977 - DNA, 518 bp, Homo sapiens
gcgtccggttgaagagggcagggaataggggtgggtgagcgtgaacagagtcaggctgattgctgcagggtcccttgcattagttcaggtgagaagagacccgagtaggccagtgagcctggaggagaggctctctgtgtgtttaattggtttccagctttttttctctattcatgtaggttatacacgtttcttctgtgaatttttatttaaatgattttttgttgttactggatctacaaacagcccaactccaaggaatctggcatctctcagtggagcatacaggtgacttcataatctaaccgcattagtaactgccaaaatcggaagtaatttctctctgtttaaaaggcagtgaaacaaattttcagagcaggtttcttcaactgaacaaaatattttggaccttaaaggtggtatggctctcctgatcagggagggacagtgaaaggtttgagctctgacactgcccagctctctggatacaaccaagtgactttttttgagtggggaga

SEQ ID NO: 12978 - DNA, 523 bp, Homo sapiens
gcgtccgagtatatagaaaaaccattaatttagactctgtgagattaggttgcatgaagaaggttttctgaatatttgaagagtggataaataaatgtcccccaaagcaataaaatcataatcctttaaaatataggaaaaataactaatgggaactaggcttaatactcgggatgaaataatctgtacaacaaactcccatgacacatgtttacctatgtagcaaacctgcacatgtacccctgaacttaaaataaaatttaaagtaataataataaaaaaaaaaaaaaaaaaaaaaagtgcggccgctagactagtctagagaaaaaacctcccacacctccccctgaacctgaaacataaaatgaatgcaattgttgttgttaacttgtttattgcagcttataatggttacaaataaagcaatagcatcacaaatttcacaaataaagcatttttttcactgcattctaagtggggtttgtccaaactcatcaatggatcttatcatgtctgggatccc

SEQ ID NO: 12979 - DNA, 376 bp, Homo sapiens
agtcgacccacgcgtccgctgggaggctgtggggtctgccacccagcagatctgtgtcacgggagtggcgctgtcactcgttgaggtggtggcctggttcctttggccttagggaaggacaaacttcaactctgagccttgattgagtgaccttggccaagttacctagcttttctgagcctcacttttttggcaattagatgaaccagaggtttatttcactcagaatcctgttcacgatgctggtatttggaccagcctgcgggtttatcctgggctctttctgtaccaaaatctacttggatttcggttcattgacacaagtaacctggacaatactccggacgacccccgttggatcggaccctggtggggt

SEQ ID NO: 12980 - DNA, 511 bp, Homo sapiens
gcgtccgaaaaaggatgagaagagaggtgcattccagaagacaaaaggtgtgtagtatcaggataaggggctttaaatatcagatccagagaacactgcacatgtagaaatgggcttggcctgggtcagggcattgagattggttacataatcttttcaaggattggtgaatgagttggagtatgtgtagaaacctacaaagatgacagtttaatctcatgtcataatttttagacaaataatgtattttaaaactgggtgcagttcctaaagctgttctaaaagtcaatgcaactgaatttggaatgtaagcataggacaacagatgggaaataagtacatgacctctgtgggataaagtgagagttatcaaagaatgtcagtgtttataacaaggaacaagcttgttttggagaattactagatattatggaaaatttttttcttttctacatttggttaactatagctgaactatagcagatcatatgacttggcaaaaatagaaaac

SEQ ID NO: 12981 - DNA, 426 bp, Homo sapiens
  misc_feature 349: n = A,T,C or G
gcgtccggttatgtacttttggagacttccattagaaatattggcaagtccctgcttcgtggccatagatttaaaaggcctatcaattttaaatgtttcggtcattgagagctaaaacatgtaacatatcacagtgttattcaccagaaataaaaaatcaagagtctgctcagagtaggttaatatgagttcctttcttcagtccagctgatggtttttagtaagatgaactgccaaggagacaatgagcactgacttctcgatgcatgacttcatcttgttagaaggtgggttgccgggcgcggtggctcacgcccgtaatcccagcactttgggaggccgaggcggncggatcacgaggtagggggatcgagaccattctggctacacggtgacaccccgtctctactaaatatacaaaaaatt

SEQ ID NO: 12982 - DNA, 399 bp, Homo sapiens
agtcgacccacgcgtccgaatgaatagttaagcccaatgataaaggaataaaaggatgaagaatatttgaagagaaataaatcttcctcactcctcaggttcccttccatgtgcaggagcctcaacctacaactagcaaccttatctcctgactcattcctctctagaggaggagtaaattagtcaactgatatgctctggaagaaaaacccagcttagcacagcccaaccttatgccattgggtgcaattatacatttggccctgcatcttaaagaagcaaaccacatgtcctgtcccacaaggggagaaaaactggggcccactgctatctgggtctggggaatattactttttggtactgatatgggttttggggaatattactttttggtactga

SEQ ID NO: 12983 - DNA, 530 bp, Homo sapiens
gcgtccggtcatttcctccccctaaataatgcattacaaagtggaaatgcaaatttcctgtgcaagctctaagtagcaggtggtatttccttaatatattgtttttgacctttggggaaattggtattacgagctgactttggaaaattaaaatagcatcaaggtcctacattttaaataaaacaatcgatatcttaatttttaaaatcagactagattacgataccaggaaaagacatacatattttgcttttatgtgttaaagttttgtaattcagggaggacaagaaaagggatatggtgcagctgaactttctaattcactaagacaggaaaaaaaaaaaaaaaaaaaggtgcggccgctagactagtctagagaaaaaacctcccacaccttcccctgaacctgaaacataaaatgaatgcaattgttgttgttaacttgtttattgcagcttataatggttacaaataaagcaatagcatcacaaatttcacaaataaagcatttttttcactgcatttctatt

SEQ ID NO: 12984 - DNA, 575 bp, Homo sapiens
gcgtccgggaaaaacaagggtttccgccacaggctgagagcaaaggaggacgcaggaaaactattttaaaaattgacccaagagttcaaaaggcatatggaagcatttaatgggggtgggaggtatccttgtaataagaataccatgcatgtattcccacactgctcttggtggtctgcaaagtgatttcatatgtattttatgtcaacaccagcacaatgaggtaagtaggactgtatacctcagaggcatttggtgatttgtcagagtggagtgtagtgtgttggtgcccagatttgaataggatcatttgagtctgatatcatcatgttgcccaccgcctactcagcctctacacccgatgaggccaatctgcagctcactacagtcaatagagaacaggcaattaacccttaagttatattttagaaagatttctgtctaaaatagataaacttgaaagtatagctcttcaaaataacgtattcctgtgttggcaaatattttccaaactcacaatcaacacataggtgtatttcttagactactagaagtggggacttaccccaaggaac

SEQ ID NO: 12985 - DNA, 573 bp, Homo sapiens
gcgtccgggaaaaacaagggtttccgccacaggctgagagcaaaggaggacgcaggaaaactattttaaaaattgacccaagagttcaaaaggcatatggaagcatttaatgggggtgggaggtatccttgtaataagaataccatgcatgtattcccacactgctcttggtggtctgcaaagtgatttcatatgtattttatgtcaacaccagcacaatgaggtaagtaggactgtatacctcagaggcatttggtgatttgtcagagtggagtgtagtgtgttggtgcccagatttgaataggatcatttgagtctgatatcatcatgttgcccaccgcctactcagcctctacacccgatgaggccaatctgcagctcactacagtcaatagagaacaggcaattaacccttaagttatattttagaaagatttctgtctaaaatagataaacttgaaagtatagctcttcaaaataacgtattcctgtgttggcaaatattttccaaactcacaatcaacacataggtgtatttcttagactactagaagtggggacttaccccaagga

SEQ ID NO: 12986 - DNA, 507 bp, Homo sapiens
acccacgcgtccggtttccattgggatagattttacctatgaattcctccttagaattctgaaattgctcagatttacccaaatgacagccagtttctcatttcacatttgggggctgtagaatcttccaacattgagaacctgttttaatcaaaggatgctttgtggaatcctgaatgaggaacagcatgttgcaggaagaagagaaggatcctgatgccctaatgggactgatttccttttggggggcaggaagatatatattcgttgggtgcttataaaaggttaattccaaagattgtgtatggttaaaggactgaaagtcacacttagcctcatacttcacttagatgaaaaacaaaagccttcctctccattaccttgtaagatctattccttgtgtcttgtgctgagtggacctggaataatggatagccctcactgagtacctagaagggactagggtggtgataagggggttcacaccgaagatctaagtgctagctg

SEQ ID NO: 12987 - DNA, 417 bp, Homo sapiens
cgtggcctttcttgagatccatataatgcagtcatgctgtttctttctccatagtatgtggggcatgaggaggagacagggagagggtggcttcattgagcaaggaggaatggctgtgctttggggccaaggagatgctgtcctgctgtagctgctctgtgaaaggtcaggcctgcccctctgaggctccctttatcctcctaaattctggggcatctacatgacgctttctagtccacctttgcctccgcagatcatggctactaacctgacctttgtctgtacttgagcacccttcgcgatttaactttcatgtagcgtccgacttctaatatggatttgaatttcttgactgttactgctcataacaatcaccctttttgagcaggagctggaggttatgccgacaatgacatt

SEQ ID NO: 12988 - DNA, 458 bp, Homo sapiens
actcgatcattttattagagtcatgtatttaagaactgataaatcatgggcttacctacacaagtctagacacatgagcaatgaacaaatagcaaggtctgtgatatctcatatggcaatactaggactgagattatttttgttacaattaaataattgtcagtaaaaatccacagagatcatttagaatgggaaaaaagtctgatatattttgtttcagattataatcattaatagggtacctgacagttttcaaagttgtttaatgttttttaggtctttaaccttcctaatcctacaaggtggttacaatcccacatattatccttgtgtcaggggtctccagcacctgccttagggtcagtgatttgctagaagtacttacagaactcagaaaagccattctgctcagttacagttcattacagagaaagggtttagattaaagccaggaaagg

SEQ ID NO: 12989 - DNA, 355 bp, Homo sapiens
catctgacagcctggaacagcacccacacccccaggtgagaatctgatgttctggagcatcacacacaaccacaggtgagcatcggagagtctggagcagcacccacaacccaaggtgagcatctgacaacctggagcagcacccacaccccgaggtgagcatctgacctcccggagcaggacccatacctccaggcgagcatctgaacccatggagcagcacccacgcccccaggcgagcatctgaccgaacagagcagcaccccctctaccccctctagagcccaaaaaaaaaaaaaaacactaacaagccctcttaaatgaaaaaaaaaacagctagacagataaaaaaaaa

SEQ ID NO: 12990 - DNA, 531 bp, Homo sapiens
gtccgggaaagactctgagaaaggactcctgacctggctcttccagaatgaggatggattttccatatgaaggagccgggggcaggaccttctgggtagagcgtgaaaagaacacagtatgtgtggagagcgggaaattgtgttgaactgtctagaaaacagagccacaggaatgcgtgttgagggcttgggctgtacagtggagagtgccctccctggccagggagttggacattcatcccaccacaagaccccatgaagagttcctcaacagctctgtgtcctcatcaaacctgtgtttgcagaacagtggaggaagagagctgaaggaggggagaggccctgcacctgccaggccctggcctagactacaagggtgagcactgagccatgctctcggggaaccttcactggagttgagggcagtgagaatgtttaaaaaaaaaaaaaaaaagtgcggccgctagactagtctagagaaaaaacctgccacacctgcccctgaacctgaaacataaaatgaatgcaatt

SEQ ID NO: 12991 - DNA, 555 bp, Homo sapiens
gcgtccgcatgcacacttgtctttaccaagggtggggcgtgggaggaggtttagtttggatagccacgtaaacgcctttccctgtggcctgcgatgttccacaccgtttatgtgtgaactggctgcacccgcgcctcccggacggggctgccagggaggagggcccgggagaccccatccagaccccggcccgcacgctgcagaggtctgctctcagacatgtggtgggctccgtgtcacgggtaaggggtcggggtctagacggcaacagagtgtctctctcttcccgctccctggtgtgcccacctccctgtacagtgtttctgttcaagctgctgcaggggacggggcatttttcctccagactctattttcctgcaaggaagagctgctgtcctttttcttactgaagcccctgattctgtgtctgatgttgctgacgccgtgcttgctttcttgcccgtgtgcaacttcccaatcccagcacacgtgctcacttcccaagggtgaggcgggcaccgtgcctgcgggcggcccaccctcacggaaaggggc

SEQ ID NO: 12992 - DNA, 574 bp, Homo sapiens
gtccggggaatggctgtcagtcaagttagaggtaaaaaaatttcatgttaagattttggaactggattttatttaaaataatgatgcgaagccattgaaaggtttttggtgtgacaggataaatttaaaatatgaacacaccaacgcatacttcttttaagaaagaacctgattaaatttgggaattttaaaataaaaacaggaagcatatcgtactctaatataataattcaagggtttttattttcctagaagatcaaggtcatgttaataaagggaatatagttttcttatctgtgttaagacactgatgacttgcaaagaaaagtaacacttttgtgatatccttaggtaattcaagaggaaacgcttgagcaattactgatgttgtaaactgggatcagaagacatacatggtatcgtatcccaagcaaggcacagtggctcacacctgtaatcctaacactttgggaggctgaagaaagcagatcacttgaggtcaagagttcgagaccagcctggcttacatggtgaaacccatctctactgaacatacaaaaattagctggacatg

SEQ ID NO: 12993 - DNA, 601 bp, Homo sapiens
tcacccacgcgtccgcccgttgcaaggagatgttgtaggatgttaggtctcagcacaaggaacccaaaccttcaggggctctcctctacattatgctcccatttttctcccaaaatatcgatctccacccaccctagacatagaactggagaataagttccagtttcatccctttgcagatcttagggggacccatcaaattcccagccactgggtgaaaatcagcagcttctttataggacctgagttgccttcctagaggatcctagaggaaaaaaaaaaatcttatccttcaaatactgctgtcttccaaaatacgtaaggacgccacggtgaatcatagtggacaccctgcattggttgggttattatttatcctagaagcttgggttcttggagccctagcttatttaagcaacaaagtccctcacagcccacaggtgaggaagtgagtgtaacaaagagatcattggacctaaaatcaaaacacctgtcaaatcccggttctgccacttactagttatgatcttgagccagagacttaatttctttgagcctcagattcctttctgtaaataaacagttgtgtgacttaccttac

SEQ ID NO: 12994 - DNA, 520 bp, Homo sapiens
aaaggaggtttgtggaacttggagagatccaggaggtaacaccaaaaagctgcatttagcaatgcctgcctagccctcctgtacagctcatgttattttgttgccttaggccatcttacaccaaaccattcctatctccatgcttttgtttatgctgttgcctccttttagaagggccacgctccaccgctctgctgtgttgatactaccgacccttcctttagttcctgttcaattcccaagccttctgccaagccttcttggacattcccatcccatgctgactattccttaagctaaaaacccttagagttaatatgatacacttggctacctcattgtttcatatcagtcattcctgtctctagctataatcggctcagccaaggaagatatatttatatggacaatgtctttgtgccttggctgtaaacagtgttgaataattaatctcacttgatgaggtcttacttaatgatagcctccaattattcaccaagacgaggggcaacgatgcttg

SEQ ID NO: 12995 - DNA, 383 bp, Homo sapiens
ccgggctggtatccgtctgcgaccactgcaagggcaagatgcagctggtggctgacctgctgctgctgtcgagcgaggcgcggcccgtgctcttcgagggccccgcctcctctggtgccggcgccgagtccttcgagcagtgccgggacaccatcatcgcgcgcaccaagggggctctccatccttacccacgacgtgcagagccagctcaacatgggccgcttcggggaggcgggggacagcctggtggagctgggcgacctggtggtgtcgctgaccgagtgctcggcccacgcggcctatctggccgctgtggccacgccgggcgcccagcccgcgcagacgggcctggtggaccgctaccgcgtgacgcgatgccgcca

SEQ ID NO: 12996 - DNA, 514 bp, Homo sapiens
tactgcacctccgcctaggggttaagcaattctcctgcctcagcctccagattgggattacaggcatgtgccaccgtgtctggctaattttcttgtaattttagtacaaaaggggtttcaccacatgggccagactggtctcaaactcctggcctaaagcgatccacctgcctcgacctcacaaggtgctgcgattacagggattacaggctgggattacaggcataagtcaccacacccagcctaaaaattaaaagtttatactgtattgttcacattgtgatgcaactttccatatgtatttccagaatcaactatgtatcaaggaatattgaaagcataaaatgagatcatggtgaattctctcccattgtcattcttggggtaagggaatgaatggtggggaggagaagctaagaggagaatttgctctgtctcagtgctggattggcttctgaaacagaatatcaagtttttttatctacatgtgaaaaggctttcaatacttataaat

SEQ ID NO: 12997 - DNA, 502 bp, Homo sapiens
gcgtccggtttattaatataaagaacatttttctgttttagagagaacccatttatttgtgaaagaaacagagttttgttcttatccctataaacactgcatttgctgtttcttctctagctgatgtgacatattagggaagcagcacccgactgggactcaaaagacctgggtttgaaacttttgattactagcttagctgtgtgaaatcaggcagatggtataacttctctcattgatgatgtcaatctttttaaaaattttctagcagtgaaattttaaaaaatgaaatgttaggtgaaacctcaaacttacaacagtggtaaaattggaagggttctggatggagtgagggcagggaggggtaactgggctgaggggcccctcttcagcctcttcctccccttcaacgaagtctgaaaatctctggctaatatgggtgatccctaagatttctttgtactttaacatacgaaagttattctaagaatttggatgtttt

SEQ ID NO: 12998 - DNA, 469 bp, Homo sapiens
cccacgcctccgccgagcgcagcagtctccccctaacctaaaagcctcctcagaagtaacctggtatcagtgggctgtgcagattcttatagtcttctttgcctttatatatgaaaataactttgttttatgtttgttttcacataggtggaattatactgactcttactctgtgacttgcttttcttcacatgacagtaactcctggactgtttctgtagcagccacacaagtctcctttatattgccaatatctatctttatcccaaagacaagatgaatgttcaaaaacggtaatccaaactcacttctaaaaatgggtgtgtgtttaaagaagagctgctcagctgaggcagttttgctgccgaggggatttgagcaatgtctggggacgtgtggttgtcacaacttgtgagggggctcctggcattgaggaggtagaaggcgggaatgcacaggtcaagcccct

SEQ ID NO: 12999 - DNA, 529 bp, Homo sapiens
acccacgcgtccgataaatttgcatcagttgcctaaagaatggggtagttataggaagctcacagagaggaaaaaaactcttcatgtctacattgcttcttgaactgattttatttataaaagaagaattgttgagctagtgatagaagtttcatgaattccctggtactaattatcagttaatgacctttctgaagtctctggagagcgttctgtgtcactaatattggtgaaaatttgaaacaaaaatgctctcccattgtccacatattgcttctttgaatttggtttttcgagccaagaacttagggtgtgagaatatgtttgtggggaaacccacacaaattttatgttagtctctgtacatttaaatttttaccttcctgattacttacgtaagactaaacaatttaagtttctaaaatgccatcactttgcaaataaagtactttattaagggataaataacaataatggccatcagctccacctataattatatccttgccttgcacccctggaaggactt

SEQ ID NO: 13000 - DNA, 423 bp, Homo sapiens
acccacgcctccgcaattactaccttaggctagattcccatgaatagaattgctgagtcaaaaggttgacacattttttaaaggttagatacatattagtcaaagtttttaagcaatatgctttctaagcctctttgatctttataattcattgctcctttctaaaaatatataactgtcttctgcgtccaaggataattctttttattaatatggccgcttcttgttctacttcctcccctttcgttatttcttcaaaatgtttaacaaactaatacatttccagaacacattatgcttcatcttgtcactatttccagtaccttgtatctcctggactttatgcaatgcgtgtgtgtgcacagatggaatatgttccaccatttggcttaatgacaatttttcacaccactaatattcttt

SEQ ID NO: 13001 - DNA, 395 bp, Homo sapiens
gcagtgccggcggcgcagttgggaatgggagtgcgcttgcacacgcgccgacgagcgatagcgacgctatgccctctcttgcccaggcgccgggtggcgcggatcaacctgctctcgcagcagcccctgtggtggccgccggtgatgatgcaggaatcgtattcgacggttgccaggttcgcttcgatcaacatcttcgccgaagttccgcgtgaaccgttcggcatcgacatcgtggcgctggcatctgccgctataccaatcatcgaaaccgcgctggaaggtcgggtccagcgccctgcagaagagacgcctccagcaggacaaggtggcctgctcgacgagcaggctacccgagtgtcgttgaaccagatcgccttgggtcttggggcgcc

SEQ ID NO: 13002 - DNA, 458 bp, Homo sapiens
ccacgcgtgcgattactgacaccacagtattgccaacctaaggactaggaagaaagggcttacatgtttcttgctttaataatatgtgaattagaaaaggtattcaagaagatacagggttagaatgtgcatctttcttttatgtactgaaatgtttcaactcatatgcagcaatgtggtaacttgaaagatgattccagagatttcatgcttctggcagtttcaggtcacattggggtgaaatttgacatactgtagtcatccccaaggtaataatgttgatgaaatggtataaaccctgatacattcttaagcaaaatgaatctaaaagtttgtttcaaaatttttaacgttttatgttgctctgactttccatatactgatttttacattacttagtggaaaaaaaaaattacctttaaccttttggccacaaaaacattttggctattttttta

SEQ ID NO: 13003 - DNA, 529 bp, Homo sapiens
agtcgaccacgcgtccgcaagacaggagatttcttaaggtcatatagcagatttgcttaaagtcatatagcataactggaagaatatagaatctacccaaagcctatgctctttctactgtattatttgcttataatagagaatgctaatcagaatcacctgaatagtcttgtagagggtcagtacacaagcctaggtcctatccttcagagaggtgaaatggaggcaaatatattctgaaagagtttcccagttgattctgatgagcactcacaattaagaagtgctgcattaagagctgtacatggtggcttatgcctgtaatcccagctattcctgaggctgaggctggaagatcacttgagcctggaagatcacttgagcctgggagttggagaccagcctcggcaacgtagtgagaccatgtctctttttaaaaaaaaaaaacagacgataaattagtgcggccgctagactagtctaaagaaaaaaccctccacaccttcccctgaacctgaaacataaaatg

SEQ ID NO: 13004 - DNA, 510 bp, Homo sapiens
tgggagatatggcaaggtgagaatgtttgggaaaggaagtagagacagacattggatttttgtcagtcaagtttcttttgattttaaattatttattcattacattgtctacatggcagttaatattctaaaactataaacaaaatttaatatagaaaaaatattatgcttttcttttttgcctttgcatgctcttatttcaaaatagatttaaaattcatggcatattatactagaaaacaggtctgtcaatgatctaagcttctatctttagatactaggaaaaaagagaaaaacccaaagcaagcagaagcaaggaaataagaacagaaataaatggaattgacaagaacacttcagaaaatcagtcaaactgaagctgatttttataaagattaatatgtttgataaagataaccatctaactagactgaccaagaaaaacaagggagagagagaacacagattcaagaatcaaagaggctacatcattacaaaatactacagaca

SEQ ID NO: 13005 - DNA, 473 bp, Homo sapiens
cgcctccgaggaaactggcagggaaacaaagtatccctggaaggaatttcttaaagaggaagaggcagatccctacaagtttaaaatcaaagaatttgaagatgttgatcccaaagtgaaattgaaagatggacttgtgaggaaggagaaagagaagcataaagataagaagaaagatagagagaaaggcaagaaagataaagataagagagagaaagaaaaagtgaaagataaaggcagagaagataagatgaaagccccagcacccccactggtgttgcccccaaaagagttggccctgcccttgttcagccctgccacagcctccagggtcccagccatgctgccatctttgttgccagtgcttacggaaaaactgtttgaggagaaagagaagccgaaggagaaagaaaagaaaaaggacaaaaaaaaaaaaaaaaaaagtgcggccgctagactagtctagagaaaaa

SEQ ID NO: 13006 - DNA, 368 bp, Homo sapiens
ttgggatctgctctgccattggacacagctatattcaattgccccgggggttgtgtatgtttccaaaaacgttgaaagggaggttcagaagtattcagttatttgtattattagtcgctttgaaactgagtagaaagactcattcaggaaagttccatatgccttcttgtctgtctatggctgggttgctcacgagaaaagtccacatttatacaattgtactcagagatcatgttatttgtatatatacctgcctcatcggagaggttgtgaatcgtcccatagacaagataatctttttgtttgcattcacctgtgctattttggaggctaggttgtcatcttcctgctggagtaattttatccat

SEQ ID NO: 13007 - DNA, 502 bp, Homo sapiens
ttttcctttttttgggggcggggtcgcgctctgtcgcccaggctggggtgcaggtggcgcgatcatggctcattgcatcctcaaatgcctgggctcaagcaaacatcagttttcttatctgtgaaatgaggataaaaatgtctccacttaagggttgttgcaaggaaggtgttgccttagtcataaaagctagggaaggtgttcctaacgaaaaacaattcgtcagagacatgaaggtagaggaagaattcacacatgaagggggctggggaaaatgatttaagaaaagaaacaggcctggcgcagttgctcaggcttgtgatcccagcactttgggaggctgaggagggttggatcacctgaggtcgggagttctagaccagcctggccaacgtggtgaaaccttgtctctactaaaaatacaaaagattggccgggtgtggtggcaggtgcctgtattcccagctacttgggaggctgggacgggataattgcttgagcc

SEQ ID NO: 13008 - DNA, 450 bp, Homo sapiens
gagttgaccacgcgtccggtcataaatccacctcaagtatattcaaaatttgaccacttctcaccagcaccactgtcattatcctgattcaagcctccatcatctctcatcgttactgtgacctcctgatcattctccttgcttcagccctggcccctgcaggcagcattcagtattagcagtagagttgtttctataaaaatgtagtcagctgggtgtggtgtctcacgctgtaatcccagcactttgggaggccaaggtgggaggatcacttgagctcagtttgaagaccagcctggtcaacatggtgaaaccctgtctctactaaaaatacaaaaattaactgggcatggtggcgggcacctgtaatcccagttactggggaggctgaggcaggagaatcgcttgaacccaggaggcagaagctgcagtgaacccaaatcacactac

SEQ ID NO: 13009 - DNA, 466 bp, Homo sapiens
atcgtcgaggtcaaggacggttatggccgtaactacctgctgccgcagaattacgccatcaagtggacgcgcggtgctgaggcccagatcaaggacatcactcgcgcccgtaaggctaaggagatcaagtccaaggaggaggctgagcagatccgctcgcagctggagcacctggtcgtccaggtgactgtccaggtcggcgagaacggtcgtctgttcggggccgtgactcctggcgatattgcgctggcagtcaggaaggccggtggccccgccctcgagaagcggtccatcgagatcaccaagccgatcaagaccatcggcaagcacactgtcggcgtcaagctgcatgacgctattaagggtcacgtcacggtcgagactgttcccgccgcgtgatctgacgtacacgcagactaagggaggggcatccaactgggtgccctccctttgctccgtcaccacc

SEQ ID NO: 13010 - DNA, 447 bp, Homo sapiens
gcttggtatgtacggcacttccagaatagggtgcaggagaaacgtctcagtgtctccccttccgaatcttggcttctggagggagagatgctggggtgggagtgctccttggtggagtactcaggagcttagtaaaagcagagggggctggagaggcaggcctggcctgcagagccagcatggagaagcctggtgtagggctctccagcctgccaatttacagttaagaagaaaggagatatgtatatatatatatacacacacatacatacatacatacacacacacatatatacacacatatatatacacacatgtatacatatatatacacacacatacacatatacacacacatgtacacatatacacacatatatacgtgtgtgtgtatatgtatatatgtgtatacgtatatatatatgtgtggtgtgtatatatatatat

SEQ ID NO: 13011 - DNA, 496 bp, Homo sapiens
ctgtcttaatctcttgacctcgtgatccacctgcctcggcctcccaaagtgctgggattgcaggcatgagccactgtgcccagccatacttttttttttttttctggtgcatttctgaagttaaatatgttgagttctctgcccatttgttcaaattctattgtattatttctgtggattgacaaatgttatgaacaatttggtttcaaaatagatttttctatttagcaactttctattcctctaggacctagtattaaggtcattaagatggcttaatgagtcattaagccattaatgagtcattaagatggctgaccaatctgtgccatcttttttagtgacattttgtttatcagtgtctcttttgtgtatttctttgatttatatcttgacagtattacataagcaggaataaaagagacattgagtggaatgtctcgctcaaatataaataaccttataaatacaatctttacttctcagagtcctaaaa

SEQ ID NO: 13012 - DNA, 483 bp, Homo sapiens
cctttgggattacacaatacttgacaatcacagctctgccatgggggacatcattacacaaagcactcctcaccagtagtcagatggcacttgatagctacaggcatgtgaatattcttttactgtcaacttttgttgtgatttcacctaaaatatgataagctccttgaggataaaggctaagtcttacttcttcgtatttctggtaaccgcttgtaccaaacacctgccaagcattgttgattgcacctatgaggaggtgagaaagtgccaggccgtcatgcccctctatacaaacatgtaacagtagactctggttcatcaggagtaaatgacatgatatgtgatagaccacatacattcgtggctatagataggtgagtaactgtaaccatatccaattgtgagcaaaagtgttttaattggtggttttaaactaatataaaattggctaaatcatcattttttaactctcgaatcatc

SEQ ID NO: 13013 - DNA, 394 bp, Homo sapiens
cgacccacgcgtgccgttgcagtgagctgagatcacgccactgcactccatccttggtgacagagcatgactccatctcaaaaaaaaaaagaaattgggttgtctaggcacagtggctcgtgcctgtaatcccagcattttgggaggctgacgtagaagaatcacttgagcccaggagtttgagaccagcctggacaacatagtgagaccccatctgtaccaaaaaaaaaaacaccagacctggtggcacatgtttgtagtcccagctactcaggggctgaggtgggaggatcacttgagcccaagaagtcaaggcttcagtgagccatgatggtgccacttgactacaagactgggcaccagaacaggaccttggcttaaaaaaaaaaaaaaa

SEQ ID NO: 13014 - DNA, 559 bp, Homo sapiens
taacagagcgagacttcatctcaaaaaaaaactcacaacatattttatgtacacctagtatcagtgagattttttaataattagatttattatcttccatattgcctacaaaactttcttcaacttcataaaagtcagtacatactgtacttacttctctcacctcattttaaaatagtggataaattgtcagacacagtgactctgcacctgtaatcctagctacttgggaggctaaggtgggaggattgcatgaggccaagagttcaagaccagcctgagcaacacatagagaccctatctctttaaaaaaaaaaaaaaaaaaaaagtgcggccgctagactagtctagagaaaaaacctcccacacctccccctgaacctgaaacataaaatgaatgcaattgttgttgttaacttgtttattgcagcttataatggttacaaataaagcaatagcatcacaaatttcacaaataaagcatttttttcactgcattctagttgtggtttggccaaactcatcaaagtatcttatcatgtctggatccccgggtacc

SEQ ID NO: 13015 - DNA, 660 bp, Homo sapiens
cgacccacgcgtccgcgctcctgtcatctcccttgggtcttcatttaaatgccacaccagagaggccctccctggccaccctaatgaaaacttcaacatcctcaaccctaacatttcctgtcccctgggttattcctccccttggtatttatcaccatttaatgtactatctggccgggcatggtggctcgtgcctgtaatcccagcactttgggaggcccaggcgggcggatcacctgaggttaggagtttgagaccagcctggccaacatggtgaaaccccatctctactaaaaatacaaaaattagccaggcatagaggcatgcgcctgtaatcccagctacttgggaggctgaggcaggagaatctcttgaaaccgggaggcagaggttgcagtgagccaagatcaagccactgcactccagcctgggtgacagagcaagactctgtctcaaaaaacaaaaacaaacaaacaaacaaacaaacaaacaaaaaaacccaacaaacccaccaaacataccatatttggtttctgtaaaaaaataaaaaagagagagagaatttttaaaaaacaaaaaccatactatctaatttacatttttaatctttttatctgtctcctgggattacagcagctttgtcaaatagcaatataatac

SEQ ID NO: 13016 - DNA, 522 bp, Homo sapiens
tcgacccacgcgtccgctaaggcatgtgagcgccttgtagggcacgttctgtcttctgactacataagcaacacttttgcgaccctaagtcacagcacccacagcttttggcaggatactttaaaacagaaaaaacacatcattgatcctggcaggattttttaagggattgtgcttaagaatgtttaactttggtaatcagagaccaccactggtgtttttctccaaaatcacatctttaagttaattaatacttgaagttaataaataatactgctcagtgtattagtaatgatgccataataccatgtgaatttatgctgattcaaatgttgtttttttcgtttgatactcatatggccttctgtttgaggacttcagattatctagcaactgatttaatctggtcagaaataaactgtgctacagctggaaagcgtgaggcttgagaaagcaagttttggacagggacgtatgaagctcatgttgaaacttaagtgttttaggctgtatgggagcttg

SEQ ID NO: 13017 - DNA, 261 bp, Homo sapiens
cgggcacggcgggcaacctggttcccctgggcggtagtccggcagctgtgcttcccccttcactgcagtgcgtgttcagttggaaacacggagatttcacctttactccctggctatagggggatggtgagaagggggctgctgtgaggggatcttcaaggcagaatcttaggctgtcttttaagaattgtgtgccgggacgtggttggaggctgggtgcagaaaggaagaggcgatctgctggaggaggcaaggacaggt

SEQ ID NO: 13018 - DNA, 633 bp, Homo sapiens
acgactctttaataattaataagcctcctgggtgatttggctgcaggtggtcctgagaccacactttaagaaacactaatcaagaatcaaggccttatgactcttagtcctgtttcttcccaaaggactatgttgcctccctacattcgaaaacattccaaacaatacataagagtctttgtaattcacattagtgctcgtatttactgactcaacaattaattcctgattgagtcattcattgagtaattttcttttactcactcagcctctgtggtttgccaggagctacaaataaaagattaaaacacagtcacacctccaaggaactcatataatagtaacagaagtaactaccatttcttgagcactttatttatacatacgtcatacagtttatctcattcacctatctcattccctgcctttcagtaagcctgtatactattataaccgcatagtttgggaatatttcatatatatatatatatatatatatatatatatatatatatatatgtataatcacatatattctcttcaacttgttctttacatttaatatgtcttaaaagtatttctttgtcagttcttgctttatatatgtctagtatttctttataagggctacag

SEQ ID NO: 13019 - DNA, 497 bp, Homo sapiens
cgacccacgcgtctcgggaaggctaaggcgcgaggatcccttgagcccaggagttctaggctgcagtgagctatgatcacgccactgcacaccagtatgggcaacagagcgagatcccatctctaaacaaatttaaaacaaacgaacaaatgaaaaatattgctgtcttaaggttgggaaggggcagagacccctttgcttgctcatcaccaagacacttctgtgaggccccagggctctttggagaacgttttgaaaatcacggttctaagtaattatagttactgtgactgaactaatttagccctaagcttcctacaatcaagatagagatacactatggactgcatttctccgcttcagattaaaaaaaaaaagtttagtcagaatgtagttatattttcaggtaaaatgctcaatacattttcagatgaagctgctcaaaattaaagcagtgagtccaagtggtaatctgaaaaaaaaagtacaatttacta

SEQ ID NO: 13020 - DNA, 583 bp, Homo sapiens
  misc_feature 547: n = A,T,C or G
cgactcagctattccgacctagaattgaccctttcatacagcaccacttggatatgtagaaagagtttgttgtgagatcagatgtaaaacaaataaaagttattcgtgaaatgatatggaagactgggattagaaactgtggcattcaagaagccagttaagctgattctcagaattgacagagattctagagatggtgtagtgcagatggtgtagtgcagggattctcagcctcactgcacatggtaatctcataggaaaattttaacaaggacagatgcagaaattcttattaaactgtcaggactgaagtccagaggtcactatattttaaaaaggtctgcaagtgattgtaacatgcatctatggaggaaaacatcagcgtaggagaaaaagggaaagaaaccaactggagtaaaggctctgtcttgagcactgtgctggctcctgtacattctccatctctttttatcttcatagtaagtgagatggtttgacaaatagggagaccgaagctctgccttcatgtgggacactcaactgcctncttccctgcttgtggcagtgcttggatgaatatgca

SEQ ID NO: 13021 - DNA, 574 bp, Homo sapiens
cacgcgtccgggtaacttgaaccaaaagtattctccttcttctgtatatttgttctcaacccccaattcctcataactttctaagtaagtagggtgaaaagaaagtcagggctgcctagggaagctacatttgcttctcaaggcttgcacctgcatatttatgcccgacatgttgctgaacacagccgagtaaagtgccagaataaaatcagctctgtccacgtggtaccaggaatgctgctgaaatgaaggtaagtataggattccacaggatctaagacagtccagggaactgggaccaattgtgggaaacctcaaagctgagcatatttgaagaaaatgcagagtaaaatggctatgggctgccgggaggcctggatttgagataccaagcaccactgatataaacactgatgctcagaaaaagaaatgatgagtgtgtatttgtgtcccttgagacctaatttaatttataattattcaccagagataagaggcaaggtgtgtctacttgctggatatctgaatttacacagttctctagtcattagtattttttacaaatataccactc

SEQ ID NO: 13022 - DNA, 536 bp, Homo sapiens
cgacccacgcgtccttagtatttataaatataatgctgctagataaataagtgattcatattttgtcaaaactattttaaaatttcaatatttaaagtatttgtgaatcactgggtgtcgctaagtggcatcatccatgagatttgattccatgtaccatataatattagattgttcctctctcaccccttttaaactccttcaagcattgctattactggggttgcctttgggaaaacttacttctagatactaccatatatctgaaatagtagaggtggatgttaataaaattcataaaatgatcatgtattactttatttgatttaccactggaaggaaatacagtcatgtgcaatataatgacgttttggtcatcgagacccacatgtgtgacagtggtcccataaggatgctgctgaagaactcctgtcgctgcctagtgacactgtagccattgtaacgccatagcacgacacgttactcacctgttcatggtgatgctggtgtaaacaaacctgtgctgccagtcatac

SEQ ID NO: 13023 - DNA, 603 bp, Homo sapiens
  misc_feature 15, 300: n = A,T,C or G
ccacgcgtccgattntgaatgtattgagactaaagttcctttgaaacattaaagaagatccatcaaactggcaactgtatataaggtctgatatcttctggcactcagagggagagtttctggtggaggtggaagtgacttaggagtcatccatgaacataaatgagatcactcgtgtagggaagagttaatgagattagagagccttggacagagccttgcagcccaaacccatgaaagagcagtaatagtgagtgaattaccttctgaggcagtgcaaagtagataagaaaacaaaanattaaaaaaaaaaaaaaaaaaaaaaaaaagtgcggccgctagactagtctagagaaaaaacctcccacacctccccctgaacctgaaacataaaatgaatgcaattgttgttgttaacttgtttattgcagcttataatggttacaaataaagcaatagcatcacaaatttcacaaataaagcatttttttcactgcattctagttgtggtttgtccaaactcatcaatgtatcttatcatgtctggatccccgggtaccgagctcgaattaattcctcttccgcttcctcgctcactgactc

SEQ ID NO: 13024 - DNA, 572 bp, Homo sapiens
  misc_feature 561: n = A,T,C or G
cacgcgtccgcagtggtgtgatctcgtctcactgcaacctctgcctcccaggttcaagcaattctcctgcctcagcctcccaagtagctgggattacagattatgtcttggattactgaaatcattcaatttttcaccagagaataaggaaaagcaaattagactgtgaataaaatctccatgtacccactaggatgactacaattcaaaaggctgacctatccaggtgaagatgagagtgtgcagcattggaaattcttacacattgctggagatttagaagctaaagaaagaggacaaatgatttggaagcaaagataagaaggaagaaggagatggggtcttgccatgtttcccaggctggtctcaaactcctagattcaagtgatccacctgcgttggcctcccaaagtgctggcattataggcatgaggcaccatgccaggcctgttttgaaatttcatacatatttataaaacatattttcaggatgagagaatatacgaagaagttacatagcattgtgtatctgtatagaataaaaatgatctaaatcaaacnaaaaaaaaaaa

SEQ ID NO: 13025 - DNA, 548 bp, Homo sapiens
  misc_feature 352: n = A,T,C or G
cgacccacgcgtccgggtgaacgtggtcaccaaggccatgggtaccctgggggtgagcttatcctcctgcagcgtccctggttccaaacccaccttcgagctctcagccgacgaggtggagctgggcctggggatccacggggaagctggtgtgcgccggataaagatggcaaccgccgatgagattgtgaaactcatgctcgaccacatgacaaacaccaccaacgcgtcccatgtgcctgtgcagcccggctcctcagttgtgatgatggtcaacaacctgggtggcctgtcattcctggaactgggcatcatagccgacgctaccgtccgctccctggagggccgcggngtgaagattgcccgtgccctggtgggcaccttcatgtcagcactggagatgcctggcatttctctcaccctcctgctggtggatgagcctctcctgaaactgatagatgctgaaaccactgcagcagcctggcctaacgtggctgcagtctccattactgggcggaagcggagccgggtagcccctgccgagcccc

SEQ ID NO: 13026 - DNA, 500 bp, Homo sapiens
cgacccacgcgtccgcaagatatgatgttagtaaagatactttaattgcggggagttctctgttggctggtgaataaggacgttctctttgagttccacctttctttgagaaatggtcatgtttcctgtacttttcctctattatatcatggaaacttactaaatcagcctgtgcattccgcccacatattccctcatggtgccttccggtcctagcagctgagccagggccatcaataaatcttcttcttttcccccaagatattcctagttgcttctttactattcattcttgtaattccattcatctgtgtgtatcatttaggatgctgggcagttgcatcgcatttcacctaaggtcacatcctgatgggatttggtgggatcctagagctggctaggaccacttgtgagagctgattgttaaattctccgaaatgacgtgactcagttgttagactgcttaaaggtaaaaatcagtggtgtacttaggtttgttt

SEQ ID NO: 13027 - DNA, 617 bp, Homo sapiens
tgaaacctggagctgaagtgaattctcttagagtatattttgaaactgtactaggactttaaacacttttggaatttaaaacagccataaaaattcttgttatactgaaggagttcctgaggcagtgtgcctctcattttaccacctaaagtgcccatagaggtccaaggagacactgctgatagcagaaagtcttccagaaagaaattaggcgacccacaccaagcatgtatggctttgagtcttacagatggctttttaatagtttagtctcttaacctaaggaagtttctgaagttccggtcagagagtctaaaaattcacattttacctaataaatgataatgaggctatttatcttgtctgtctggattttttcacttgacatttaatgaaatatcccatattacctataatttttatttgaaggtgaaaatagactacagaagaatgtgtaaaatttgtatcaatcagcagagcacaaatcaagtttctaccagtattgcttataaatatttcgatcttatttaagcatggttaagctgtttttgatggttgaacttgaaagtttgttgagaaatacattttttggcttaatttttctatttttaagtgtc

SEQ ID NO: 13028 - DNA, 522 bp, Homo sapiens
cgcgtccgagataatgctgtttgcttccggccgctgtaaatcataggtgaaaaccagtagcaagtgctcactcagtgcctcccagaagcggtctgcgggtctcagctgggctgggggcagttttcattgggcaaggcttgggcttagcttcgaagcaggggctgggagaggatggatgggggtgtgagagcagaagaaagacctggctttgcagtgaggcagaccaacgttcaaatatgagctgaccactgacctgtcgtgtgacggtcgccaggtgttaggagactggaactgattatgcgtgaggcgtcaggacgtacataggcgctgctcagcatacagagactgttgctgatcctaatcctcatactcatgcctgcatactgtacaccgttctacgaaacaatgaaagtagaaaagatgttcaatgtgaccaggaagagtgaagacacagacatcttgggaacgatgatgagctaaagaatcactatttgctaaaaatcagaactgctaccgtgcggt

SEQ ID NO: 13029 - DNA, 579 bp, Homo sapiens
  misc_feature 550: n = A,T,C or G
ccacgcgtccgccttcgcccgctgcctcctcttggctgcggctggtcatcttcccacctccacagtgggccgagctgccaaacaaggggtacacatgtgccccctgacataggccaggtggtctctgccctctgtagctcccatgagagagggctcctcggaccgaaacaggaggccactgcccttgcgcacacaccgtggccgggtcctcctgggcggagcgctttccgtgtgtgggaaagtcaagggcagccccgagcctcgaagcccaggctcccagccccgcgccatgttgcattcccgcctctactccttggtaggctggctgctttgagtggttctttttaattctttctgttggtttctcctttacctttgcctgggttttgctttaacctctctgttgcagagatgcagagcactcagagagcctatttctatcatcgctttcctattctccacctagaaccaggtgactggccgcccgagtggtgtctcttgtgtgtgtggagcgtccaaagctgtgcaagaaatgcttctgcctaagttntctcgcgccccccccttgccttggctttt

SEQ ID NO: 13030 - DNA, 644 bp, Homo sapiens
cgacccacgcgtccgcaagagagctcctcagatttgtcatagactatatttaaagaaaggccacatttttcttatttaaaatgcattaaacaatgcaaccaattaaaagaactgagatggatttgtacaacaagcgagggactaaggtcgtgatttgttcactgctatattcccaatgcctagaaccatgtctggcaaacatactggcatgggaagaacatttccataacccctgaatgttctgtgcccctttccaattaatccctaccctcagaagcaaccactattctcatgcttattacattagttttgcctcttcttgactttcatataaatgaaatcatacatctaacaaaaaaaataaaaaaaagtgcggccgctagactagtctagagaaaaaaccttccacacctccccctgaacctgaaacataaaatgaatgcacttgttggtgttaacttgtttattgcagcttataatggctacaaataaagcaatagcatcacaaatttcacaaataaagcatttttttcactgcattctagttgtggttagtccaaactcatcaatgtatcttatcatgtctggatccccgggtaccgagctcgaattaattcctcttacggttcctcgctcactgactc

SEQ ID NO: 13031 - DNA, 580 bp, Homo sapiens
  misc_feature 514: n = A,T,C or G
tcgacccacgcgtccgatttgatataaatagttatgttactcatatagaaatctcttccccattacacacatacaaacatttatctatgagtggcttataattgcaaataagatgtaaatcatgctcatgatcattgtcaaaattgtgaaagatttttttctatacctcttttaggtttgttttgtttttgtttttgatttccaggtggcattaaagacaagagggaataatattcattcttacttctactcccaagtcactagtttgctgaatttaattgagttaaagaattgtatcagtcttcttggaagtctaatacaaaaccagttcaacactagttattcattctttgctaattcaccagaattgaaggatggataaaatgagaaagagaagtagttcttcatattattaaaataaagagttaaattagacactttgttggactctttggtcttaataattcctactctttttgaggtccaaaagttttgtctttgataaatataattntaatggtatctctagtgagaaactatgtaacttcttcatgtatcaaactgtgaatagtgataggtc

SEQ ID NO: 13032 - DNA, 643 bp, Homo sapiens
cgttcggaagttgggaaaataattcatgtgaactagacaagtgtgttaagagtgataagtaaaatgcacgtggagacaagtgcatccccagatctcagggacctccccctgcctgtcacctggggagtgagaggacaggatagtgcatgttctttgtctctaatttttagttatatgtgctgtaatgttgctctgaggaagcccctggaaagtctatcccaacatatccacatcttatattccacaaattaagctgtagtatgtaccctaagacgctgctaattgactgccacttcgcaactcaggggcggctgcattttagtaatgggtcaaatgattcactttttatgatgcttccaaaggtgccttggcttctcttcccaactgacaaatgccaaagttgagaaaaatgatcataattttagcataaacagagcagtcggcgacaccgattttataaataaactgagcaccttctttttaaacaaacaaatgcgggtttatttctcagatgatgttcatccgtgaatggtccagggaaggacctttcaccttgactatatggcattatgtcatcacaagctctgaggcttctcctttccatcctgcgtggacagctaagacctcagttttcaatagcatc

SEQ ID NO: 13033 - DNA, 583 bp, Homo sapiens
tcgacccacgcgtccgctcatggaggaagcatagattagaatcatgatttttatctattttaagagaatagaagaacagaaggggttacaatcttgcaatattatgcaactcttctgctctaatatatcaaaaacttgatgatccaagatcatgcagaacagctgagaagaaatcaaagtaaacagtgtaccttgcagccaacagatcctgccaatatgagattagaactctccatcctagcaaaaaaaaaaaaaaaaaagtgcggccgctagactagtctagagaaaaaacctcccacacctccccctgaacctgaaacataaaatgaatgcaattgttgttgttaacttgtttattgcagcttataatggttacaaataaagcaatagcatcacaaatttcacaaataaagcatttttttcactgcattctagttgtggtttgtccaaactcatcaatgtatcttatcatgtctggatccccgggtaccgagctcgaattaattcctcttccgcttcctcgctcactgactcgctgcgctcggtcgttcggctgcggcgagcggtatcagctcactcaaag

SEQ ID NO: 13034 - DNA, 475 bp, Homo sapiens
gtaagacccagtacgttagtgattctccctctagtggatgaagtgatgcaatgcgagatatgagccctattgcctggacctgcgagtcgctgcagcagctgtggcaattgtcaccttcatccaggcccatcccgctttgagggcctagagagagtgggccagaggttaacccccgattcatctgcctccccacgctgggcatctgggtgtgccagggcattcccccgctggtcagacaggtttttgggccagggcggggctgaccagggttaattagagggaactggctaggaggagctggggagggggctgggcagagtccaggcctccagagcccctgggacacagcaggtgtgtgctgccatgggccggggcttgaactctgccagactcaggcgccaaaaacggcgcttgcgacctcaggtccagaagccccggcagcagctggagcggctccagcaggagaaccatgagc

SEQ ID NO: 13035 - DNA, 647 bp, Homo sapiens
cgacccacgcgtccgaaactactgtctagtctaaactattattctatacttctcatctctatatgttaaggattgatctccaagataaattgttttttgtttggtttttagggacaggatcatgctctgttgcccaggctagagtgtagtggaacaatcataactcactgcagcctcgaactcctgggcttaggtgatccacctgccttggcctcctgagtagctggaattccagatgcaaggcaccatgcctggctaactttttaaaatttttcatagagatggggtcttaccatcctgcccaggctggcctcgagctcttcacctcaagcagtcctcctgcctcagcctcccaaggcactggtattgcaggagtgagccaccacgcccagcccaaaataatttttttttaaagcaagatgtagaaaagtgattataatatgtttccatttaggcaagaaaaaaaatggagaggactatacctgtactctctgtacataggatccacagaaaacttctaatgatggttatccctgtggtgggaaactggcggacagggaatgatgaagcaggaaaatttttactgtataaactttagttctggtggctctttttcttctatcatgtgtatggtaactttttaaaaa

SEQ ID NO: 13036 - DNA, 673 bp, Homo sapiens
  misc_feature 626: n = A,T,C or G
gtccgaaagccttaaaaagagtagaatttcacttttcaccttttgtagatgtgcacgtgtagctgtagagctcatacttacgtttcacatggcatagttgatggatatgtaggtgtaaagtttatggtagtggacaggctgagaatggtgtatctgatgacaaaaaatctgatggaagtgatatatttgatatgaaagtgaacattttcttagttgggtgtttataacttttttttggtaaattgtttttagtttttatccttattttacttatgcttggcaatagatggtcttttttccccaaatcttcttctgaattccaaggaaacactgttttagcatttatttgattactttggttcattcttttctccactcccatttatttgttttccattttgtaacttctataaagcagataaaaatctggaacttctagatctgaccttcatgccttgtcttttctatggtacttattctttctgtctccttctcattttggattgggcttatgagagaaatcttggggttgatcttccagctcactaatttgatattcatttgtgtctcttcagttacttagcttgcctgaaaactttttttttcaacaattgtgtacttaattntcataaactttctctttccttgcaacatttttatcagtagaggtaat

SEQ ID NO: 13037 - DNA, 424 bp, Homo sapiens
gtcacccacgcgtccgtgccctggggcccccctgggcgagcataccctaggcgtcaggcctggaggtctcctcggtgcctcccagctcttctgtgctcctcacactctgctctgtgcacattggctgtatttgtaggttactgccttttatttctcacatttctttttggtgagagtatatcaatcaatcaatcatcctcagacctctatgataacactgtgccccacacacaagaagctactcaattaatgtttgtttgttgaaatgagagaaaatatttgtccttagtacagaaagaagatgaagccaacctctgatagaagcccacccatagactagggtgttgagctgccttccaactaaatgtggaagttaaatcctgaaatgagaggcccagttgaagatagataggcatgggatctt

SEQ ID NO: 13038 - DNA, 589 bp, Homo sapiens
ccacgcgtccggtagttgcagaagcatgttcttgaacttatcagtcctgacctcagatttcatcttcttctggtagatgtagcatacatctctgagtgttattagagggccagactagagcctcatcgtactccttcagttacttcataatcatccagctctttatattaaatgtttttctgtttaaaatggcagcaatgttttttattttttgaaatggtccctgacagcaacagatcttctcgtgtttaattattgagtctgtgctgattacacagaattaaggatatagtttctaaagtacttccatttttatatattttagcattattctgaaaggcctggaaaaaaactattttttattcgatttgaaagtgaagtgacataggtgggtcgctatagcaagaaattaccctgtatttttccatctctatcatcacaggcatctcacagaattagaagtcggacattattgatggatatattagtcatgaataattaaaatacattaaatataaaatggtcagatacgggcagattttacataactgtcttcaatgttctaaatgtgaataatattgaatgaatg

SEQ ID NO: 13039 - DNA, 563 bp, Homo sapiens
gcgtccgggagaaaagagttttatacctaattacttgtgcgggtgattacatatttttatacccaggatgttcagcaagatgaactttattttttagatgtatctatgggtttggcacccattttattaatttttagaaatataaaagtgcctttaaaatttagctgggttaagatagtaagttttaggctgaggcaggagaattgcttgaacccaggaggcggaggttgcagtgagcctagatcgtgccattgtactccagcctgggcaacaagagcgaaactcagtttcaaaaaaaaaaaaaaaaaaaaaaaaaaagtgcggccgctagactagtctagagaaaaaacctcccacacctccccctgaacctgaaacataaaatgaatgcaattgttgttgttaacttgtttattgcagcttataatggttacaaataaagcaatagcatcacaaatttcacaaataaagcatttttttcactgcattctagttgtgggttgtccaaactcatcaatgtatcttatcatgtctggatccccgggtaccgagctcgaattaat

SEQ ID NO: 13040 - DNA, 547 bp, Homo sapiens
gcgtccgcatccatctaagtcacccaatgatcagagaagaaatatgaaagggaattttaaaatattttgaactgaatgaagatgaaaatgccacagataaaactttgcgtgggggagctacattagttagcttagagggaaatttatatttttaaattcttatattaggaaataagtcttacataaataatctcagcttccacctaagaagttcaaaataaacccacagtaagcagaagaaaggaaataataaagctgagaaaaaatcaataaagtttaaaagagaaaattaatagatatcaatggaacaaaagttgcctttttaaaaatatcaacaaaattgatagacctttagccagaatgatcaaaaaaaaaaaaaaaaaaagtgcggccgctagactagtctagagaaaaaaccctcccacacctccccctgaacctgaaacataaaatgaatgcaattgttgttgttaacttgtttattgcagcttataatggttacaaataaagcaatagcatcacaaatttcacaaataaagcatttttt

SEQ ID NO: 13041 - DNA, 531 bp, Homo sapiens
tactttttccaaaactaaagaatgcataggacataagttaaaagttcatacataacctggcttcaaatccagttctaccactacctgaaaacatcagtttatttctcatcaatgggttgttataaagtacctagcatagggtattgcttaaatgttaatactcccaatcctgacactaatgtttcagggaagagtgaaagaaatcacattaactccacattattgaacatcttctgtgtcaggctgaatacatctttgtatccattgtcttctggttgtttaaagactagtgtagaagcctgacatgtaaatcggtgattatataagatagtactgtcttgtaatgtgttgtgctagagaggttaagtattaattattatgggagctcaggagaggcacccactggctgctgggagaagagcaaaaacctatatataaagcaatttttaagattttggttctataaggagtagtgtcgtatccgttagtgtattccaaagtcctatacacatgcaagatcggaaagctcac

SEQ ID NO: 13042 - DNA, 529 bp, Homo sapiens
gcgtccggccaccatgcccagccaagttatgttggttggtcaattttagataattaaaaaaaaaaatcctatgtagtaacatcctactaggaaagaagataaactcaagtatccactgagtggtgacctgaaaccaaagagacatggaggggcagccagtcaaaagccactgcactccagcctgggcaacagagcaggactgtgtctggaaaaaaaaaaaatctagaaacatactcaaatgtaaacataagaacttagcatatggtaaagttgtgactgtgagtcagtgcagaaaagaatgaatcaatcagtaaatggtcctgggaaaaccggctatttattttaaaataataacaaaatatgctgtatatcatcaatggattaaagatttatataccttcagcatatgtccttaaatgttctagaataaaatatatatgaatatcaatgtaatattgatgtgaggaaggccttttagacatgacacaaatgtcaaaaagcataaaaggaaagattttgaataaataat

SEQ ID NO: 13043 - DNA, 545 bp, Homo sapiens
ccacgcgtccgtacagatacaccatcattatcagtggccaaatcattcaaatcgctgtttgcttcttctcgggctcttattcaagctcacgatgctattctcatagtgattgcgaatctcactgcataaaggtgattttgaaaacatcacttttcctccacactaatgtgtgagcttagccagagtaggagatatatcttacttaaaaaaaaaaaaaaaaaaaaaaagtgcggccgctagactagtctagagaaaaaacctcccacacctccccctgaacctgaaacataaaatgaatgcaattgttgttgttaacttgtttattgcagcttataatggttacaaataaagcaatagcatcacaaatttcacaaataaagcatttttttcactgcattctagttgtggtttgtccaaactcatcaatgtatcttatcatgtctggatccccgggtaccgagctcgaattaattcctcttccgcttcctcgctcactgactcgctggctcggtcgttcggctgcggcgagcggtatcagctcactc

SEQ ID NO: 13044 - DNA, 459 bp, Homo sapiens
ggccctctagatgcatgctcgagcggccgccagtgtgatggatatctgcagaattcgccctttctatcggccttccgggcaggtacgcggggaggtcatgcccgtgtgagccaggaaagggctgtgtttatgggaagccagtaacactgtggcctactatctcttccgtggtgccatctacatttttgggactcgggaattatgaggtagaggtggaggcggagccggatgtcagaggtcctgaaatagtcaccatgggggaaaatgatccgcctgctgttgaagcccccttctcattccgatcgctttttggccttgatgatttgaaaataagtcctgttgcaccagatgcagatgctgttgctgcacagatcctgtcactgctgccattgaagttttttccaatcatcggcattgggatcattgcattgatattagcactggccattggtctgggca

SEQ ID NO: 13045 - DNA, 451 bp, Homo sapiens
gctccaccgcggcggcttcatgcaagctgtgggcatggtcaacgatcacgaaaatcatttttcctttaaataaaatacaatcctatgcagaaggagtacttccatgagcaacaatcaaatacgtgcttatgctgcgatgcaagcaggtgaacaactggttccttatcaatttgacgcaggcgatttacaagcccatcaagtcgaagtcaaagttgaatattgtggtttatgtcattcagatatttcagtgattaataatgattggcgatcatctacttatcctgtaggcgcaggtcatgaaatcattggaaccatcactgctcttggttctgaagcgaaaggactcaaagtaggtcaacgtgtaggtatcggatggacagcagaaagttgccaagcttgtgatccctgcatcggaggtaatcaagtgttaagtaccggcggcagtgttgca

SEQ ID NO: 13046 - DNA, 642 bp, Homo sapiens
tgagccctctagatgcatgctcgagcggccgccagtgtgatggatatctgcagaattcgcccttagcgtggtcgcggccgaggtacaccaagaccaattgctaaaatcttggattatggaaaatttaagtatgaaagaaagaaaaaacaaaaagttgaaaaagaaaaacaatctttcacaaacaatagagaaattcgtttatcttttggaatcaatttaaatgatataaaaatcaaagcaaaaaaagccaaagaatttttattagataacgacagagtaaaagtggctcttcgtcttagagggcgtgaaaatacaagacctgaacaaggtaaattaattttaaattctttttttgatgaagtaaaatcgattgcaaaattaagtaaagaaatgcaatcagttggtaattttttaactcttcatattgaacgtgataagaaaaaattacccaaatttactttttcaaaacaaataaaggaattaattgattttgaaaaaactataaaggaagaagaaactaatgcctaaagcaaaaacaaaatcagcactttaaaaaaagaattaaagtaactgctttctggaaaaatcaaacacaaacatgcctatcggtctcatttagcaccaaataaatctacaaagcaa

SEQ ID NO: 13047 - DNA, 616 bp, Homo sapiens
ccctctagatgcatgctcgagcggccgccagtgtgatggatatctgcagaattcgcccttagcgtggtctcggcctttgtacgaaattatgactgttttagctccaggaacagatttaaaagtaattgaagacgttttaaaatctgtttttgatgctaagaacatcgaaaaaattgaaaaacttgaaagaacagagttagcatacgaaattaaaaaacacaaacaaggaatttttgttttagctaacttaaaatctgaggaaagtttaatcgaagaatttgtcagaagagtaaatattctcaaaaaacaagttttaagatttttagttattaatctagattctgaaagaggaatgcacaaaactttcagacctagaaaaaatgataaacacaaatttttctcttctaaaaaaccaacaacttcaacagaagaaggtaaaagttttcaaaaaccatttgtcaaaaaaccttttgttaaaaaatcagaagaaacagattcttcaaaacaaaatgaacaagacaaagtgctaagaaaaccaaaaactgtaaaaccagcaaaagatcctaaagtagctcacacagcaaaaaaaaaaataaaatagtacctgcccgggcgg

SEQ ID NO: 13048 - DNA, 571 bp, Homo sapiens
accgagctcggatccactagtaacggccgccagtgtgctggaattcgcccttagcgtggtcgcggccgaggtactaaattatgactgttttagctccaggaacagatttaaaagtaattgaagacgttttaaaatctgtttttgatgctaagaacatcgaaaaaattgaaaaacttgaaagaacagagttagcatacgaaattaaaaaacacaaacaaggaatttttgttttagctaacttaaaatctgaggaaagtttaatcgaagaatttgtcagaagagtaaatattctcaaaaaacaagttttaagatttttagttattaatctagattctgaaagaggaatgcacaaaactttcagacctagaaaaaatgataaacacaaatttttctcttctaaaaaaccaacaacttcaacagaagaaggtaaaagttttcaaaaaccatttgtcaaaaaaccttttgttaaaaaatcagaagaaacagattcttcaaaacaaaatgaacaagacaaagtgctaagaaaaccaaaaactgtaaaaccagcaaaagattctaaagtagctcacac

SEQ ID NO: 13049 - DNA, 470 bp, Homo sapiens
ccgagctcggatccactagtaacggccgccagtgtgctggaattcgcccttagcgtggtcgcggccgaggtacttccctgatcagtcgaagtggatgcccagaccaatggccagtgctaatatcaatgcaatgatcccaatgacgatgattggaaaaaacttcaatggcagcagtgacaggatctgtgcagcaacagcatctgcatctggtgcaacaggacttattttcaaatcatcaaggccaaaaagcgatcggaatgagaagggggcttcaacagcaggcggatcattttcccccatggtgactatttcaggacctctgacatccggctccgcctccacctctacctcataattcccgagtcccaaaaatgtagatggcaccacggaagagatagtaggccacagtgttactggcttcccataaacacagccctttcctggctcacacgggcatgaacctcccgcgt

SEQ ID NO: 13050 - DNA, 626 bp, Homo sapiens
ctatacggcgaattgggccctctagatgcatgctcgagcggccgccagtgtgatggatatctgcagaattcgccctttcgagcggtcgcccgggcaggtacgcggggaaatgcaaaaaaatcaaatcaatttaatagaatacatcagagatgttaaagatttcccaattgaagggattgtatttaaagatatttcaccacttttagcaaatggagaagtgctaaattacacaattaatcaaatggctgagttagctaaagatgcagatgttattataggtccagacgcaagaggtttcttgtttgggacacctactgcagcttttttaaaaaaaccttttattatggtaagaaaacctaaaaaattaccaggagacgttattagttttgagtatgatttagaatatggtaaatcaactctagaaatccaaactaatatgttgaaaaaaggccaaaaagtagcaattattgatgatgttttagctactggcggaacaatgaaagcgattattaacttaatcgaatctcaaggtgcttgtgttcataaagtaatctttttacttgaattaggatttttaaacggaattgaaaaacttaaaaaatatgacgttagctcattaattaaag

SEQ ID NO: 13051 - DNA, 487 bp, Homo sapiens
taccgagctcggatccactagtaacggccgccagtgtgctggaattcgccctttcgagcggccgcccgggcaggtacttctaatgttaaatcctgaggtaagtcaaccaaaacaggatgtgaatatcctaataataattctaaagtcttatcttttaatgttgctctgtaaccaacacctttgatttctaattctttagaaaatcctttagaaactccggttaacataccttgtaatgatgaatttgtagttccgtgtaattgtttaatatttttttcttctgatgttcttttagtaagtagagtgttttcaactttttcaattgaaataaatgatgaaaattctcttgataatgtacctaatttaccttttatagctactaaagaattgttaatgtttacttcaacaccttctggtatttgtaaaacacgatttccgacacgagacatattaattatcaaatgtaagcaatgatttcaccacctac

SEQ ID NO: 13052 - DNA, 511 bp, Homo sapiens
ctcggatccactagtaacggccgccagtgtgctggaattcgcccttagcgtggtcgcggccgaggtacaagatagttatctcagtaaaaggtctattatctaacttgccaaacttgtttactgagagccctaaggaactaaaactgccataatgccgtgcacagcttgaaaagcaattagagtaagcaagattagtttttcctcccttccagttcctcagcaggcctggctgaaggcccaggagggaaggaaatataagaaccaacaataaaaatagcaatagcaataagaagaatgccatcccatggagcacaccataattctggaaccacctctcccggatcaggcttacattgctcacgatgctcacgctgggcagccgcaactctactttgcagaacctcaccaacttgcccaggtattctccccggtcttgaagaaatggctctccacctgaaaagttgatcttttccataccagctttcttaagcaaaagcaatcctctctttgc

SEQ ID NO: 13053 - DNA, 531 bp, Homo sapiens
cggccgaggtactaaactttatttaatgagctaacgtcatattttttaagtttttcaattccgtttaaaaatcctaattcaagtaaaaagattactttatgaacaacagcaccttgagattcgattaagttaataatcgctttcattgttccgccagtagctaaaacatcatcaataattgctactttttggccgtttttcaacatattagtttggatttctagagttgatttaccatattctaaatcatactcaaaactaataacgtctcctggtaattttttaggttttcttaccataataaaaggtttttttaaaaaagctgcagtaggtgtcccaaacaagaaacctcttgcgtctggacctataataacatctgcatctttagctaactcagccatttgattaattgtgtaatttagcacttctccatttgctaaaagtggtgaaatatctttaaatacaatcccttcaattgggaaatctttaacatctctgatgtattctattaaaattgatttgattttttgc

SEQ ID NO: 13054 - DNA, 527 bp, Homo sapiens
ctcactaaagggaacaaaagctgggtaccgggccccccctcgaggtcgacggtatcgataagcttgatatcgaattctctgcagtccgggggatccactagttctagagcggtatttggtgaagatcagcgttatcagcattttctacgattaaacgctggccatgctttgactgatgaaatccgccaagctattcagcagttggcggattgggtcagagaaagtctcaagtcgaaattgagttagtcgaagtctgctttcaatacgatgcgataacgtgcttgacctgaatgaagtcgctcaatggcatcgttgagctgtgacataggatagagttcaatttgcggggcgatatttttacgtgctgcaaattgaagaagttgacgaagtgctaaaggagaacccgtcggtgaacctgttactgatttggcaccatcaatcaaagcaccgactgaaactggaataggttctaaagtcagacctagaaaatgcaatgagccattcggtgctaaagtgctgagaaaggc

SEQ ID NO: 13055 - DNA, 496 bp, Homo sapiens
  misc_feature 27: n = A,T,C or G
tccaccgcgggggcggccgaggtaaancctctcggcccggctaaacatcatcgtcttggtatttcattaccttaccaactaactaatgttccgcacccccatttttaagtgaagctgtgaagctcctttctattactcatcatgcgataaataactatatccggtattagctattgtttccaatagttatcccagtcttaaaggtaggttaggtacctgcccgggcggccgctctagaactagtggatcccccgggctgcaggaattcgatatcaagcttatcgataccgtcgacctcgagggggggcccggtacccagcttttgttccctttagtgagggttaattgcgcgcttggcgtaatcatggccatagctgtttcctgtgtgaaattgttatccgctcacaattccacacaacatacgagccgggagcataaagtgtaaagcctggggtgcctaatgagtgagctaactcacattaattgcgttgcgctc

SEQ ID NO: 13056 - DNA, 825 bp, Homo sapiens
  misc_feature 11, 12, 13, 36, 69, 173, 210, 568, 757, 824: n = A,T,C or G
tctcttttacnnnccgtggaaattaacaaagcgccnaccgggcccaccctcgaggtcgacggcaacganaagcaggatttttaatattcgcagcccgggggaaccaggagggggagagcccaccgcgggggagcgccacaacgcccgaaaagaggcgcaaacgcgcgcacacngaccgaacgaaaacaacgcagagacggggaaaacccnggcggcacccaacaaaaacgcccggcagcacagaccccaaccgccagcaggcggaaaagcgaacaggcccgcaccgagcgcccaacccaacaggagcacaaccagaaaggcgaaagggacgcgcccaggagcaggacaaaaagcgcggacggagaggaagaaacgcgcaacgagaccgccacacgggccagcgcccgaacgccgcacaccaacgcgagacaaccaggcaagagcagcaggaacaccggcacaccccggcaagcaccaaaaacgggggcacaccgaagggggccggaacgagggcaaaacggcacacaaaccccaaaacacaggaaaaggggcaaagagcccacgcagngaggccagcgaccaggaaaaacgggccagacgacccagggaccagggagaaccaacagcacaaaaaacagggacccgggggaccaaacagggaaacacacagcaacccgaaacgagggacaaacggagagaaacaaaaagggaaacgcgcacaaagacagcccaacgcgggaaagaagaggacccgagncacaccaaacagagagacgcgaaaggccaaccagaaaagagacacccccacaacagaaggggggcanc

SEQ ID NO: 13057 - DNA, 170 bp, Homo sapiens
  misc_feature 120, 122: n = A,T,C or G
cccaacggaagcgcgcgggcaccacaacccccgacgccagcaggcgaaaaagcgaagaggcccgcaccgaacgcccaacccaacagaggcgcagccggaaaggcgaacgggacgcgcccngnagcggcgcaaaaagcgcggcgggagaggaggaaacgcgcagcgagacc

SEQ ID NO: 13058 - DNA, 500 bp, Homo sapiens
  misc_feature 31: n = A,T,C or G
cggccccccctcagtcgacggttcgaaagcnggtattttttttttgagcccgggagatccatgtagttttagagcggccgcccgggcaggtacctaacctacctttaagactgggataactattggaaacaatagctaataccggatatagttatttatcgcatgatgagtaatagaaaggagcttcacagcttcacttaaaaatgggggtgcggaacattagttagttggtagggtaatggcctaccaagacgatgatgtttagccgggccgagaggctgtacctcggccgccaccgcggtggagctccaattcgccctatagtgagtcgtattacgcgcgctcactggccgtcgtttacaacgtcgagactgagaaaaccctggcgttacccaaactaatcgccttgcagcacatcccccttttcccagctggcgtaatagcgaagaggcccgcaccgatcgcccttcccaacagttgcgcagcctgaatggcgaatg

SEQ ID NO: 13059 - DNA, 465 bp, Homo sapiens
agtcacccacgcgtccgttccaggcctgtacttaggctgggtttagaaaccagcccattcagaaagactgaatcagaacatggataaagtgaactcattctaagatgactcgtctatccatgtagattaatctcctgggtcataataggcctattccctttgattgaagggtcacgtctaagtatagaaaacataaaactgtaaggtagaggaagcgaaggatagctacgtattaatgttgcgttaaagcttcagagacaagaacaagaacactcctcccacgtgacagcatttgaataggaggcggggggtgcggcagcctgggcagcttcagtcccgatttacaataaagtaccttgtgtgtcattagttcttaaatgtctatttagaaatggcattgatgctatttatttgcaaataaatggtttattgaagaattgtgaccatcactaatctagaaaaatc

SEQ ID NO: 13060 - DNA, 447 bp, Homo sapiens
tcgaccacgcgtccggtcaaccgcactgaacttcgggaccaaaagcttcctgccgcggcccccagacaaaggcagcttcccgctggaccacttcggtgaatgtaaaagctttaaagaaaaattcatgaggtgtctccgtgacaagaactatgaaaatgctttgtgcagaaatgaatctaaagagtatttaatgtgcaggatgcaaaggcagctgatggcaccggagccgctagagaagctcggctttagagacctaatggaagggaagccagaggcaaaggatgaatgttgagaagggagccacaggaccttgtccccagcctggagcagagctgagcccttctgcccacagtgcagggggacctgacactcagcccgtgctgccccgtgcaggggctctccctggggactttagaacatggctcacccctgcagcacacaccgaaa

SEQ ID NO: 13061 - DNA, 537 bp, Homo sapiens
agtcgacccacgcgtccggtgcactgcaacttctatatgtaaccctaaactccaataaaacaaattccagggaaaaccaagggtgtaatgggatgtgcgtgtttatcaggagtgtgctctcacgtggatgctgaatgatggaggacagcggactgcataagccagaaacctgtacgggtgctggctgtggaagacgtgtctgtctctatctatgtacaatagtttattctgtcaggctgaaaaagtatggtctttaggaccttgcccctctaactatagaaacttaaacagtgtactgctattagatatatctgatattaatagaacatgccaagtgcaggtcccaaatgcgtatttgtgaagcacacatctgagtaaatggcttagatggaaagcaagtcatcatgagtaaaaattagcctcaaacctgccggtgctcctcacctctttgtcaccaagtaaaggtcacactgggtgttgcttttgttgtcttctctcctaacctaggaaaaaataaatagtggtttaatttgctac

SEQ ID NO: 13062 - DNA, 501 bp, Homo sapiens
tacccacgcgtccggggcttgttactatggccgatgatctggagcagcagcctcaaggctggctgagtagctggctgcccacgtggcgccccacttccatgtctcagctgaagaatgtggaagctaggatcctccagtgtctccagaataagttcctggccagatatgtgtccctcccaaaccagaataagatctggacggtgactgtgagccccgagcaaaaggaccgcacccccctggtgatggtgcacggttttgggggcggcgtgggcctctggatcctcaacatggactcactgagtgcccgccgcacactgcacaccttcgatctgcttggctttgggcgaagctcaaggccagcattcccgagggacccggagggggctgaggatgagtttgtgacatcgatagagacgtggcgggagaccatggggatccccagcatgatcctcctggggcacagtttgggaggattcctggccacttcttactcaatcaagt

SEQ ID NO: 13063 - DNA, 473 bp, Homo sapiens
cgcgtaagacgtgttttgcgacccggcaccaccgtagtttttacgcccggtgagcgctccacccgcacctacaagcgcgtgtatgatgaggtgtacggcgacgaggacctgcttgagcaggccaacgagcgcctcggggagtttgcctacggaaagcggcataaggacatgttggcgttgccgctggacgagggcaacccaacacctagcctaaagcccgtgacactgcagcaggtgctgcccacgcttgcaccgtccgaagaaaagcgcggcctaaagcgcgagtctggtgacttggcacccaccgtgcagctgatggtacccaagcgccagcgactggaagatgttttggaaaaaatgaaccgtggagcctgggctggagcccgaggtccgcgtgcggccaatcaagcaggtggcaccgggactgggcgtgcagaccgtggacgttcagatacccaccaccagtagcacta

SEQ ID NO: 13064 - DNA, 499 bp, Homo sapiens
gcgctcagatgactctttagtcccagttttcatgggtagtctctaaattctttacctttatgtgattgtgagttgggaggtggtgggcatcatcttagtccatttacctttttcagttttgtaattatcgtcttcatctactacctttatataatataaagggaaggggtcttcctttacaaatagttttatcatccttctctttttgatgtctatatcttctattttttgaggagaatatatgttgtatagacctacacgtgggtggaagaagagtcatgtatgtgtgattgtgtgagatccagaatgttggaacttttaatttcttattttgtacttataattacctgctggaatacctggttgcattctgtatattgtaccctcatttaaaagttcatggaggcaaaataactctgttgcacataaggccggggcttatgcatgtcctatcggatgtgggctcagatcacggaagaccgaagtccctcatttctgc

SEQ ID NO: 13065 - DNA, 430 bp, Homo sapiens
ctcgatcttgcgactcaagctccgcgcgcagccgctcctggtgcgggcccacagcagcctgggccccggccggccccggagccccctggcctgcgacgactgttcccttcgatcggccaaatcctccttcagcctcctggcgcccatccgcagcaaggacgtccgcagcaggagttacctggagggcagcctcctggccagcggggccctgctgggggcagacgagctggcccgctacttcccagaccggtacgtggcgctcttcgtggccacctggaacatgcagggccagaaggagctcccgcccagcctggacgagatcctgctcccagccgaggccgactatgcccaggacctgtacgttatcggcgtccaggagggctgctctgacaggcgggagtgggagacgcctctgcaggagacgctgggc

SEQ ID NO: 13066 - DNA, 573 bp, Homo sapiens
cgaattggagctccaccgcggtggcggccgcccgggcaggtactaaactttaattaatgagctaacgtcatattttttaagtttttcaattccgtttaaaaatcctaattcaagtaaaaagattactttatgaacaacagcaccttgagattcgattaagttaataatcgctttcattgttccgccagtagctaaaacatcatcaataattgctactttttggccttttttcaacatattagtttggatttctagagttgatttaccatattctaaatcatactcaaaactaataacgtctcctggtaattttttaggttttcttaccataataaaaggtttttttaaaaaagctgcagtaggtgtcccaaacaagaaacctcttgcgtctggacctataataacatctgcatcttttagctaactcagccatttgattaattgtgtaatttagcacttctccatttgctaaaagtggtgaaatatctttaaatacaatcccttcaattgggaaatctttaacatccccgcgtacctcggccgctttagaactagtggatcccccgggctgca

SEQ ID NO: 13067 - DNA, 446 bp, Homo sapiens
gctccaccgcggtggcggccgcccgggcaggtacgcggggaaatgcaaaaaatcaaatcaatttaatagaatacatcagagatgttaaagatttcccaattgaagggattgtatttaaagatatttcaccacttttagcaaatggagaagtgctaaattacacaattaatcaagtggctgagttagctaaagatgcagatgttattataggtccagacgcaagaggtttcttgtttgggacacctactgcagcttttttaaaaaaaccttttattatggtaagaaaacctaaaaaattaccaggagacgttattagttttgagtatgatttagaatatggtaaatcaactctagaaatccaaactaatatgttgaaaaaaggccaaaaagtagcaattattgatgatgttttagctactggcggaacaatgaaagcgattattaac

SEQ ID NO: 13068 - DNA, 251 bp, Homo sapiens
ggcgaattggagctccaccgcggtggcggccgcccgggcaggtacaatttctaattgatcctgttcacattcagtgaaatggcattgcatatttatatgttgcttacagcttattgatttaggtaactattgtgtcttccttcactatctgacctgaaaagcactctcttctctatgcactcttatattctgcctttctgcctggagtttgaaatacatgtctctttagtttcttttgcacatgctacatt

SEQ ID NO: 13069 - DNA, 187 bp, Homo sapiens
gaatggtgaatgaagaatagagatgtggtgcccactaggctactgctgaaagggagctgaaattcctccaccaagttggtattcaaaatatgtaatgacttgtatggcaaaagattggactaagacactggccataccactggacagggttatgttaacacctgaattgctgggtcttgagagagcc

SEQ ID NO: 13070 - DNA, 59 bp, Homo sapiens
gcgaattggagctccaccgcggtggcggccgaggtaaagtggtccttttagagttggac

SEQ ID NO: 13071 - DNA, 491 bp, Homo sapiens
ctatagcgcgaattggagctccaccgcggtggcggccgcccgggcaggtacggccacactgggactgagatacggcccagactcctacgggaggcagcagtaaggaattttccacgagtgagcgaaagcttgatggagcgacacagcgtgcaggatgaagttcttcggaatgtaaactgctgttataagggaaaaaaaaaaaaaaataactacaaaaaaggtacctcggccgctctagaactagtggatcccccgggctgcaggaattcgatatcaagcttatcgataccgtcgacctcgagggggggcccggtacccagcttttgttccctttagtgagggttaattgcgcgcttggcgtaatcatggtcatagctgtttcctgtgtgaaattgttatccgctcacaattccacacaacatacgagccgggagcataaagtgtaaagcctggggtgcctaatgagtgagctaactcacattaattgcgtt

SEQ ID NO: 13072 - DNA, 432 bp, Homo sapiens
agggcgaattggagctccaccgcggtggcggccgcccggccaggtacgcggggaaatgcaaaaaaatcaaatcaatttaatagaatacatcagagatgttaaagatttcccaattgaagggattgtatttaaagatatttcaccacttttagcaaatggagaagtgctaaattacacaattaatcaaatggctgagttagctaaagatgcagatgttattataggtccagacgcaagaggtttcttgtttgggacacctactgcagctgttttaaaaaaaccttttattatggtaagaaaacctaaaaaattaccaggagacgttattagtttcgagtatgatttagaatatggtaaatcaactctagaaatccaaactaatatgttgaaaaaaggccaaaaagtagcaattattgatgatgttttagctac

SEQ ID NO: 13073 - DNA, 482 bp, Homo sapiens
ctatagggcgaattggagctccaccgcggtggcgggcgcccgggcaggtacggccacactgggactgagatacggcccagactcctacgggaggcagcagtaaggaattttccacgaatgagcgaaagcttgatggagcgacacagcgtgcaggatgaagttcttcggaatgtaaactgctgttataagggaaaaaaaaaaaaaaaaaaaaaaaaaaaaagtacctcggccgctctagaactagtggatcccccgggctgcaggaattcgatatcaagcttatcgataccgtcgacctcgagggggggcccggtacccagcttttgttccctttagtgagggttaattgcgcgcttggcgtaatcatggtcatagctgtttcctgtgtgaaattgttatccgctcacaattccacacaacatacgagccgggagcataaagtgtaaagcctggggtgcctaatgagtgagctaactcacatt

SEQ ID NO: 13074 - DNA, 548 bp, Homo sapiens
ctatagggcgaattggagctccaccgcggtggcggccgaggtacttttctaggacaatcaggaagtaatcttaaaaaaataattgaagatgttaaaaaatacgttaaaaataaaaaacttgttttaaacatagatgcagtagaaattgaaaaaccagatttagatgcaaaattattagctgaatcaattgcaattaaattagaaaaccgtggatcataccgtatggcacaaaaatttgcaattcgtttagcacaaaaagccggagctaaaggtattaaaactaaagttagtggtcgtttaaatggtgttgatatggctagatcagaaggatattctgaaggtgaaatgaaattacacacacttagacaagatgttagttatgcaacagcaacagcaagaacaacttatggagcacttggagttaaagtttgagtttcattaggcgaagtatttgcaaagcaaaatcaagcatataatgaagaagaaccaacacacaaaaaaggtccaaaaagagcagcaagagttaaaaaagaaagtacctgcccggg

SEQ ID NO: 13075 - DNA, 620 bp, Homo sapiens
cgtaatacgactcactatagggcgaattggagctccaccgcggtggcggccgcccggccaggtacgcggggaaatgcaaaaaaatcaaatcgaggtaatacaatacatcagagatgttaaagatttcccaattgaagggattggatttaaagatatctcaccacttttagcaaatggagaagtgctaaatcacacaattaatcaaatggctgagttagctaaagatgcagatgttattataggtccagacgcaagaggtttcttgtttgggacacctactgcagcttttttaaaaaaaccttttattatggtaagaaaacctaaaaaattaccaggagacgttattagtttcgagtatgatttacaatatggtaaatcaactgtagaaatccaaactaatatgttgaaaaaaggccaaaaggtagcaattattgatgatgttttagctactggcggaacaatgaaagcgattattaacttaatcgaatctcaaggtgctggtgctcataaaggaatctttttacttgaattaggatttttaaacggaattgaaaaacttaaaaaatatgacgttagctcattaattaaaatttagtacctcggccgctctagaactagtg

SEQ ID NO: 13076 - DNA, 656 bp, Homo sapiens
aatacgactcactatagggcgaattggagctccaccgcggtggcggccgaggtactttgatatctccgccctctcgtgtgttccttgtggagctaaccagaggcaagatgcccgaggaacttcatgtgtatgtctaccaggatttcagatgatctctaataatggaggacctgctattatttgtaaaaagtgcccagaaaacatgaaaggtgttacagaagatggctggaactgcatttcttgccctagtgacttaactgccgaaggaaaatgtcactgtcccattggccatattttagtggaaagagacattaatggaacattgttgtctcaagcaacttgtgagctctgcgatggaaatgaaaactcttttatggtagtaaatgctttaggagacaggcgcgtccgatgtgagccaacatttgctaataccagcaggtcctgtgcatgttccgaacctaacattttaacagggggattatgtttcagcagcacagggaatttttcctgtacgtaaaatttcacctgcacgttatggagaagttggcatgtctttaacttcagaatggtatgcaaagtatttgcaatcatcagcagctgcatgttgggtatatgccaatctaacatcttgtcaagctcttggaaatatgtgtgtg

SEQ ID NO: 13077 - DNA, 684 bp, Homo sapiens
cgtaatacgactcactatagggcgaattggagctccaccgcggtggcggccgcccgggcaggtacgcggggaaatgcaaaaaaatcaaatcaatttaatagaatacatcagagatgttaaagatttcccaattgaagggattgtatttaaagatatttcaccacttttagcaaatggagaagtgctaaattacacaattaatcaaatggctgagttagctaaagatgcagatgttattataggtccagacgcaagaggtttcttgtttgggacacctactgcagcttttttaaaaaaaccttttattatggtaagaaaacctaaaaaattaccaggagacgttattagttttgagtatgatttagaatatggtaaatcaactctagaaatccaaactaatatgttgaaaaaaggccaaaaagtagcaattattgatgatgttttagctactggcggaacaatgaaagcgattattaacttaatcgaatctcaaggtgctgttgttcataaagtaatctttttacttgaattaggatttttaaacggaattgaaaaacttaaaaaatatgacgttagctcattaattaaagtttagtacctcggccgctctagaactagtggatcccccgggctgcaggaattcgatatcaagcttatcgataccgtcgacctcgagggggggcc

SEQ ID NO: 13078 - DNA, 491 bp, Homo sapiens
gtggcggccgaggtacgcggggaaatgcaaaaaaatcaaatcaatttaatagaatacatcagagatgttaaagatttcccaattgaagggattgtatttaaagatatttcaccacttttagcaaatggagaagtgctaaattacacaattaatcaaatggctgagttagctaaagatgcagatgttattataggtccagacgcaagaggtttcttgtttgggacacctactgcagcttttttaaaaaaaccttttattatggtaagaaaacctaaaaaattaccaggagacgttattagttttgagtatgatttagaatatggtaaatcaactctagaaatccaaactaatatgttgaaaaaaggccaaaaagtagcaattattgatgatgttttagctactggcggaacaatgaaagcgattattaacttaatcgaatctcaaggtgctgttgttcataaagtaatctttttacttgaattaggattttt

SEQ ID NO: 13079 - DNA, 396 bp, Homo sapiens
tatagggcgaattggagctccaccgcggtggcggccgcccgggcaggtacgcggggcaattagaaattattgcagaaagaagattcactctcacctgatgaataagtgttcataggtgaaggctacaaaatactaatttgttattatttttaataataatttttgttttgctgagaaagtggatttaccacttttttattttttaatccaaggaggaaaaattatttccaaaccaaatcctaaaaatttttcacgttctaaaccagttcaagaacattgagtaaacagaaatattccatttgtcaaagtttttcttatcggctcagataatgaaaaaattgggataattgaaacaagagaagctattgaaatggcaaaagaacaaaaactcgatgt

SEQ ID NO: 13080 - DNA, 503 bp, Homo sapiens
ggcgaattggagctccaccgcggtggcggccgaggtacgcgggggcagcagcggacgtgagcgataatggcggatatggaggatctcttcgggagcgacgccgacagcgaagctgagcgtaaagattctgattctggatctgactcagattctgatcaagagaatgctgcctctggcagtaatgcctctggaagtgaaagtgatcaggatgaaagaggtgattcaggacaaccaagtaataaggaactgtttggagatgacagtgaggacgagggagcttcacatcatagtggtagtgataatcactctgaaagatcagacaatagatcagaagcttctgagcgttctgaccatgaggacaatgacccctcagatgtagatcagcacagtggatcagaagcccctaatgatgatgaagacgaaggtcatagatcggatggagggagccatcattcagaagcagaaggttctgaaaaagcacattcagatgatgaaaaatgggg

SEQ ID NO: 13081 - DNA, 462 bp, Homo sapiens
ttggagctccaccgcggtggcggccgaggtactaatgttattaatgtgactgacaagtaattagaaaactggaaattaaattttacaaacatttttaaaatcgctacaattaaaaaaattcaagatggttacattatgaatatgaatgaaatgtcattagcgacttcgttaaatgtatatgtaattctatattttccccaaaacccacattttatgaagaatatttatttatttatttatttttgttttttgagatggagtctcgctctgttgccagactggagtgcaatggtgcgatctccgctcactgcaacctccacctcctgggttcaaacgattctcctgcctcagcctcccgagtagctgggactacaggcaccgccaccacgcccggctaatttttgtatttttagtagagacagggtttcaccatgttagccaggatggtctccgtctcttgac

SEQ ID NO: 13082 - DNA, 466 bp, Homo sapiens
tacgactcactatagggcgaattggagctccaccgcggtggcggccgcccgggcaggtactgaccctccttgatggtttactttgcaagctatggtgacctccgcaagttgtgtctgggcccatccagggctctgactaattgtattcaaatcaaggcaggagcgggccagctggcgttgacttaaccaagccattttataagcctcccgatcatttttaagccactctaagtcgtgtagtaggatctggtcagagttatgtatactctgatgggcatgtgctgtgtcgtctaaaatgtccagaagttctgaaacacttttagatcttccagaatttcttgaggaagtctgcctaagtaactgatgcacatcaagttcatcaccggaggaatcaaaagaatttccattttctatttctctacagaaaagaaaaggatcttcctttaagatggaaatattatttctc

SEQ ID NO: 13083 - DNA, 469 bp, Homo sapiens
actactatagggcgaattggagctccaccgcggtggcggccgaggtaccacttgaattatctattgaaagaactactacatcgagtttttgttcttttgccatttcaatagcttctgttggttcaattatcccaattttttcattatctgagccgataagaaaaactttgacaaatggaatatttctgtttactcaatgttcttgaactggtttagaacgtgaaaaatttttaggatttggtttggaaataatttttcctccttggattaaaaaataaaaaagtggtaaatccactttctcagcaaaacaaaaattattattaaaaataataacaaattagtattttgtagcctttacctatgaacacttattcatcaggtgagagtgaatcttctttctgcaataatttctaattgccccgcgtacctgcccgggcggccgctctagaactagtggatcccccgggct

SEQ ID NO: 13084 - DNA, 343 bp, Homo sapiens
ctacttagggcgaattggagctccaccgcggtggcggccgcccgggcaggtacctgactgtggctcagatctgcgtcgcagcagcgagagaagaaatcactccatatccgatgagaggaagggtggcacagagatggtgtctacaattagagacatttctgactccaccttagcctaagcaaactttatatactgagtaacatttgaaggttgtcttttaatggtggggggtgttttttcctttttaaactacagtgcttggacaagagagggagggactcagaaaagggtagggcaggtgagggagacagcagatggcctgtgatgactagagtccatcata

SEQ ID NO: 13085 - DNA, 434 bp, Homo sapiens
  misc_feature 87, 93: n = A,T,C or G
ctatagggcgaattgggccctctagatgcatgctcgagcggccgccagtgtgatggatatcttcaaattgcccctgaggcgtgtaancggccnaggtaccaaattatgactgttttagctccaggaacagatttaaaagtaattgaagacgttttaaaatctgtttttgatgctaagaacatcgaaaaaaattgaaaaacttgaaagaacagagttagcatacgaaattaaggagcacaaacaaggaatttttgttttagctaacttaaaatctgaggaaagtttaatcgaagaatttgtcagaagagtaaatattctcaaaaaacaagttttaagatttttagttattaatctagattctgaaagaggaatgcacaaaactttcagacctagaaaaaatgataaacacaaatttttctcttctaaaaaaccaa

SEQ ID NO: 13086 - DNA, 372 bp, Homo sapiens
atactaacgacacctatagggattggcccttaatcatctcacggcgcattatgatttcaatgggtaggggcacacagtcaatttactgttactcagacaattaaagtatgaactttaatctgtttatgctaacatgaaaattgaaacttgaagacagattagcatacgaattaaaggcacaaacaggaatttttgttttacctaacttaaaaatctgaggaaagtttaatcgaagattttgtcagaagagtaaatattctcaaaaaacaagttttaagatttttagttattaatctagattctgaaagaggaatgcacaaaactttcagacctagaaaaaatgtaaacacaaattttttttttttaaaaaac

SEQ ID NO: 13087 - DNA, 417 bp, Homo sapiens
  misc_feature 74: n = A,T,C or G
acgactcactatagggcgaattgggccctctagatgcatgctcgagcgggcgccagtgtgatggatatctgcanaatgggccggggcgtggaaacaaactaggtacttttaccaaagaatctactagaactctctgctattcaaaacaaagagctcatacttggtggagtagggaaaaaattagaaatttgaccaaaagatagattcaatcaactacaaagtcaattccaagatgctggtaacatcgaaactcttgaaaaagaactattagaatctggagttgaactttaatggatcatatacctggtttgcgttgatcaagcgattgatcagcttaatattaaagaagatgggatctatttagatcttactttaggacgggggggtcattcgagtcaaattttaaaaaaacttact

SEQ ID NO: 13088 - DNA, 429 bp, Homo sapiens
cgactccctatagggcgaattgggccctctagatgcatgctcgagcggccgccagtgtgatggatatctgcagaattcgccctttcgagcggccgcccgggcaggtacttgtccataatttgtgaatatattaactaatttttcttttgagtattcatttactaactcataagctgaaaagctttgagcttgattcattctcatatccaaacgagcttgtttgttgtatgaaaatcctctattggcttgatctaactgaggtgaagatactcctaaatcaagtaatacaccatctactttgttgatttgaagtttttttagttcttgatcaaaatctttaaaatcagatcaaataaattcaatatttgaagaaatttttaagagtttttcttttgtttgttcaattgcttgtttgtctttatcaaagac

SEQ ID NO: 13089 - DNA, 428 bp, Homo sapiens
atagggcgaattgggccctctagcagcatgctcgagcggccgccagtgtgatggatatctgcagaattcgcccttagcgtggtcgcggccgaggtacaggaactgccaaaggcaacagaaattctttctccctatgtcccagcctacccccactttaccgaggccaacagccgcctcagaaaccagattcaggagctaacatgccccaggtctcacgaggatcagagactccagaggccagggaaggagatcaaggtagtcaagcgggggtcgtctcagatctggttgtgctcgagctatgcaaatgcctctcatggagatgtgaggacctatctattatgatgaccagggccacatccggagggggcaacagactttcatctatcagcccttttcaaccactgatctactaaactggaaacactctg

SEQ ID NO: 13090 - DNA, 424 bp, Homo sapiens
ctatagggcgaattgggccctctagatgcatgctcgagcggccgccagtgtgatggatatctgcagaatgcgcgctgggcgagcggacgcccaggcaggtacgcgggggtttaaaaaaatatttaaaaaaatggaggaattatgaacttaaaaagcaaattaagaagctttttaggtgctactgcacttgtgttgccagtagcattttttgcttcttgccaaacaagatttggtcaagtaaatgaccataaattagtgattgctcacacttttaatagtagagaaggaaggtttttagcattagatcaaattgttaagctttgaaatgaaagtgaaaaagttaaaaacaaagaagaaggattttatccaataacactaaatcgacaatttgcgcaaacttatgcagaacaaggtaatgctttag

SEQ ID NO: 13091 - DNA, 417 bp, Homo sapiens
  misc_feature 92: n = A,T,C or G
tatagggcgaattgggccctctagatgcatgctcgagcgggcgccagtgtgatggatatctgcagaatgcgcgctggggagcggacgcccangcaggtaccttagctccaaaatcagtttgatgagatacagttgcccctatatgagaatgcacaggattcctcattggtgagttcaaccatacattttgggtaactcctgaagacatctgcaaattgtgagttagttgggggggtccattaacatttgcatatgttattctttctactgaagtgtgtgaggccacaactggcccattatgcatatcagaaacagaaatttggtgaggataattttggatattcagcagtggctgtgaaactggatttgaattaccgggatacatgcatgcttcttggttacttccaggatagctga

SEQ ID NO: 13092 - DNA, 547 bp, Homo sapiens
attgggccctctagatgcatgctcgagcggccgccagtgtgatggatatctgcagaattcgcccttagcgtggtcgcggccgaggtaccacggaattttaaaaatagactgtaaaaaaccgtcaattgcagaactaattttgcttgatttacttcaaattgaaggaactcttttaggttttgttgcaatagtaaacgaaattcgatcagtaattcaatcaaagaataatgaattgacaaattctgacataaaaacagccaaagaatatcatttagaacaactaagagcgcttaaaaaaacttcaaattaacaaatataatttataatttatggcactatgaaaaaaaagagactttatttaatatcaactttagcattttcaacaattttattagctatttctcgtggtaaaaatcaaactactcctgtaggcacacaaccaatagataataccaagcctgagattcatcagcgaatagagttctgatttaaataatagaaaaaaagatgaatcacaagaacaaggaaacactatggctggaaatac

SEQ ID NO: 13093 - DNA, 570 bp, Homo sapiens
ctactatagggcgaattgggccctctagatgcatgctcgagcggccgccagtgtgatggatatctgcagaattcgcccttagcgtggtcgcggccgaggtacaatttctaattgatcctgttcacattcagtgaaatggcattgcatatttatatgttgcttacagcttattgatttaggtaactattgtgtcttccttcactatctgacctgaaaagcactctcttctctatgcactcttatattctgcctttctgcctggagtttgaaatacatgtctctttagtttcttttgcacatgctacattgtgctttagaccggagataatacagtgactttacctcacaaatcatattctgtcaacacaaatctatgaatttagtttatttaaaatcagaacaatttcctacaaaatttttctggaaaatagactcctaacagacctaccagaatcatgcttaaagtgctcccttgacacttattctatactgaaggataaattttaaaaaatctttataggctactgtcagaagtatcctatccttgtttacgatgtataaaaagatgtg

SEQ ID NO: 13094 - DNA, 515 bp, Homo sapiens
tatagggcgaattgggccctctagatgcatgctcgagcggccgccagtgtgatggatatctgcagaattcgccctttcgagcggccgcccgggcaggtactttttttttttttttttttttttttagttaaatataaatttatttattaactttttcaataccttttgaaggtcaaagtttgtaagatgaattaggttcttttgaaagtaaattcccacaactgaaagtgcagctagaataataaatactgcatatgcagcttctgttgatgctgatttaattcctgcaactagaacagttgctatagaataaaatgcataacctaatcctcagataagtccaaattgatatccaacttttttaggatttgatcctttgtattcgggaggaagatttaagataacaccttgaattcctcaaagcattactcccattaaaaatcctaaaatatagaataatcaagttccattacctaaaccattaattgctaagtctgtttttgaagaatttaaat

SEQ ID NO: 13095 - DNA, 529 bp, Homo sapiens
cggtggcggccgcccgggcaggtacaggtaaagcaagagctggctctctacgttcaccaatttttgtaggtggtggtcgtgcatttgggcctacaaataataaaaattacaaaattaaattaaacaaaaaagttcgcaaattagcttttgcctcaactttaagtcaacttgctcaaaataatcaagtacctcggccgctctagaactagtggatcccccgggctgcaggaattcgatatcaagcttatcgataccgtcgacctcgagggggggcccggtacccagcttttgttccctttagtgagggttaattgcgcgcttggcgtaatcatggtcatagctgtttcctgtgtgaaattgttatccgctcacaattccacacaacatacgagccgggagcataaagtgtaaaggcctgggggcctaatgagtgagctaactcacattaattgcgttgcgctcactgcccgcttttcagtcgggaaacctgtcgtgccagctgcattaatgaattcggccaacgcgcggg

SEQ ID NO: 13096 - DNA, 412 bp, Homo sapiens
acgactcctatagggcgaattgggccctctagatgcatgctcgagcgggcgccagtgtgatggatatctgcagaattcgcccttagcgtggtcgcggccgaggtacgcggggaaatgcaaaaaaatcaaatcaatttaatagaatacatcagagatgttaaagatttcccaattgaagggattgtatttaaagatatttcaccacttttagcaaatggagaagtgctaaattacacaattggtcaaatggctgagttagctaaagatgcagatgttattataggtccagacgcaagaggtttcttgtttgggacacctactgcagcttttttaaaaaaaccttttattatggtaagaaaacctaaaaaattaccaggagacgttattagttttgagtatgatttagaatatg

SEQ ID NO: 13097 - DNA, 460 bp, Homo sapiens
  misc_feature 335: n = A,T,C or G
atagggcgaattggagctccaccgcggtggcggccgaggtactaaactttaattaatgagctaacgtcatattttttaagtttttcaattccgtttaaaaatcctaattcaagtaaaaagattactttatgaacaacagcaccttgagattcgattaagttaataatcgctttcattgttccgccagtagctaaaacatcatcaataattgctactttttggccttttttcaacatattagtttggatttctagagttgatttaccatattctaaatcatactcaaaactaataacgtctcctggtaattttgtaaggttttcttaccataatanaagggtttttttaaaaaagctgcaataaaggtgtcccaaacaagaaacctttttgcgtctggacctaatataacatctgcatctttagctaactcaaccatttgataaattggggaatttaacac

SEQ ID NO: 13098 - DNA, 477 bp, Homo sapiens
ctatagggcgaattggagctccaccgcggtggcggccgcccgggcaggtacacctctgattctcactagttgaatgcaagaacttgaaaggttcaggtaagtgttttgaaaaattttgactttccaaacttttgccacttgctatctgaaactcaggaatcaaaaaataccgacaggcactgttactttcaaaattctttctataagttgagaatgggacagatttgcagagcaagggaaacttgaacagttacttctagtggtaggaaatgaggtggctaggatattacccagctggtgggtgacttgggcagtgtgttcctgctttcagtggttagcctttagcaaatctgctttagagtgagagtagagggcaggctgttgtattacagtgctcttgtttttgtaaaatttaattcactctactgttattttgtctccttgggtaaagtggtatttaatttttcttcatttttt

SEQ ID NO: 13099 - DNA, 312 bp, Homo sapiens
gcggtggcggccgcccgggcaggtacgcggggcaattgaaattattgcggaaagaagattcactctcacctgatgaataagtgttcataggtaaaggctacaaaatactaatttgttattatttttaataataatttttgttttgctgagaaagtggatttaccacttttttattttttaatccaaggaggaaaaattatttccaaccaaatcctaaaaatttttcacgttctaaaccagttcaagaacattgagtaaacagaaatattccatttgtcaaagtttttcttatcggctcagataaatgaaaaa

SEQ ID NO: 13100 - DNA, 269 bp, Homo sapiens
atagggcgaattggagctccaccgcggtggcggccgcccggccaggtacgcgggggcagaagaggaagatttctgaagagtgcagctgcctgaaccgagccctgccgaacagctgagaattgcactgcaaccatgaggtaaatattttcccttcgtattcggtagtgctgttgagtcatcttgtccaatgcaaatcctgagaagctatgttcccaaagagggccagctccatttagtgtttgtttatagccttactatgcctctacctc

SEQ ID NO: 13101 - DNA, 353 bp, Homo sapiens
gcgaattggagctccaccgcggtggcggccgcccgggcaggtacaacgttgaccttccttgcccaagaatgaatgattaaaaagttgaaaagctgtgtttgtagatcgttcaggccttcgtctgcaactatcaggaaatatgggtaactctcttccaagaaacttccccactcttttgataagcatctcgaaaatgttgttcgaacatcaatggtggtattttctgaagatgaagaattaaagcagttctcaaagaaagaagttcagggaagttgaaatacgcatactcggcatccttgaagaaaactatggtgaattgtcctcctttgctaataagatccacaagatagcgt

SEQ ID NO: 13102 - DNA, 511 bp, Homo sapiens
ctatagggcgaattggagctccaccgcggtggcggccgcccgggcaggtactaggagatattgattctagtcaattaggcattgtagactgtcatgaccacttaataaaaaattatggacctgaagctcacgagcatccagattttattatgatgtcaaaagatgctgcaattaaagaaatgaatgaatatgtagcaaaaggaggaaaaactgttgttacaatggaccctcctaacgttgggcgtgatgtttatcaaatgttagatattgcaaagaaattagaaggaaaagctaacattattatggcaactggttttcataaagctgcattttatgacaaaggtgcttcttgacttgctttggctccaacagataaaattgtaaaaatggttgtagctgaaatcgaagaaggaatggatgaatataactacagcggaccagttgtaaaaagatctaaatccaaagccggaattattaaagccggaacaggatacgctgctattgatcgttt

SEQ ID NO: 13103 - DNA, 407 bp, Homo sapiens
gctccaccgcggtggcggccgaggtacgcggggaaatgcaaaaaaatcaaatcagttcaatagaatacatcacagatgtgaaagatttcccaattgaagggattgtatttaaagatatttcaccacttttagcaaaatggagaagtgctaaattacacaattaatcaaatggctgagttagctaaagatgcagatgttattataggtccagacgcaagaggtttcttgtttgggacacctactgcagcttttttaaaaaaaccttttattatggtaagaaaacctaaaaaattaccaggagacgttattagttttgagtatgatttagaatatggtaaatcaactctagaaatccaaactaatatgttgaaaaaaggccaaaaagtagcaattattgatgatgtttt

SEQ ID NO: 13104 - DNA, 328 bp, Homo sapiens
tacgactcactatagggcgaattggagctccaccgcggtggcggccgaggtacgcggggaaatgcaaaaaaatcaaatcaatttaatagaatacatcagagatgttaaagatttcccaattgaagggattgtatttaaagatatttcaccacttttagcaaatggagaagtgctaaattacacaattaatcaaatggctgagttagctaaagatgcagatgttattataggtccagacgcaagaggtttcttgtttgggacacctactgcagcttttttaaaaaaaccttttattatggtaagaaaacctaaaaaattaccaggagac

SEQ ID NO: 13105 - DNA, 517 bp, Homo sapiens
actactatagggcgaattggagctccaccgcggtggcggccgaggtaccaataatagcaaccctgtgatttgtccaagtgcgcgggagtggaggccatcctgacaacagctctatgattttctatgccaatgacacaggagcccaacagtttgaaaagtggtgggataagtccaggacagtccccttttatcttgtagggctcctcctcccactgctcaatttcaagtctccttcatttttttcaaaatttaatatcctaggcacagtgtctgtcctttatttgattttccttgtcacctttaaggctgttcgcttgggatttcatttggaatttcattggtttataccaacagaattttttgtacctgcccgggcggccgctctagaactagtggatcccccgggctgcaggaattcgatatcaagcttatcgataccgtcgacctcgagggggggcccggtacccagcttttgttccctttagtgagggttaattgcgcgcttggcgtaatcatg

SEQ ID NO: 13106 - DNA, 480 bp, Homo sapiens
ctatagggcgaattggagctccaccgcggtggcggccgcccgggcaggtacctggaagacttctccacctcgggggcctggctgcctcacaggtatgaagacaaccaccataactgctactcttacgcactcacgttcattaactgcgttctgatggcagaaggtagacagcaactggacaagggtgaatttacggagaagtacctcggccgctctagaactagtggatcccccgggctgcaggaattcgatatcaagcttatcgataccgtcgacctcgagggggggcccggtacccagcttttgttccctttagtgagggttaattgcgcgcttggcgtaatcatggtcatagctgtttcctgtgtgaaattgttatccgctcacaattccacacaacatacgagccgggagcataaagtgtaaagcctggggtgcctaatgagtgagctaactcacattaattgcgttgcgctcact

SEQ ID NO: 13107 - DNA, 527 bp, Homo sapiens
  misc_feature 80: n = A,T,C or G
actactatagggcgaattggagctccaccgcggtggcggccgataaactgcgggatctcaatggcttctatgatcgtatntgaggcagtagttcccacactctgcccggtgccagcatgaaagagaacagggagagtcagcctttcacagtccttgtcaaatcccaattactctggttgcagatcacttgaagcctgccttgtttctctcacaaagctctgcccgagagtccagccccgcgtacctgcccgggcggccgctctagaactagtggatcccccgggctgcaggaattcgatatcaagcttatcgataccgtcgacctcgagggggggcccggtacccagcttttgttccctttagtgagggttaattgcgcgcttggcgtaatcatggtcatagctgtttcctgtgtgaaattgttatccgctcacaattccacacaacatacgagccgggagcataaagtgtaaagcctggggtgcctaatgagtgagctaactcacattaattgcgttgcgctcact

SEQ ID NO: 13108 - DNA, 465 bp, Homo sapiens
ctatagggcgaattggagctccaccgcggtggcggccgaggtacaagatagtcatctcagtaaaaggtctattatctaacttgccaaacttgtttacggagagccctaaggaactaaaactgccataatgccgtgcacagcttgaaaagcaattagagtaagcaagattagtttttcctcccttccagttcctcagcaggcctggctgaaggcccaggagggaaggaaatataagaaccaacaataaaaatagcaatagcaataagaagaatgccatcccatggagcacaccataattctggaaccacctctcccggatcaggctttcattgctcacgatgctcacgctgggcagccgcaactctactttgcagaacctcaccaacttgcccaggtattctccccggtcttgaagaaatggctctccacctgaaaagttgatcttctccataccagctttcttaa

SEQ ID NO: 13109 - DNA, 538 bp, Homo sapiens
agggcgaattggagctccaccgcggtggcggccgcccgggcaggtacttttctaggacaatcaggaagtaatcttaaaaaaataattgaagatgttaaaaaatacgttaaaaataaaaaacttgttttaaacatagatgcagtagaaattgaaaaaccagatttagatgcaaaattattagctgaatcaattgcaattaaattagaaaaccgtggatcataccgtatggcacaaaaatttgcaattcgtttagcacaaaaagccggagctaaaggtattaaaactaaagttagcggtcgtttaaatggtgttgatatggctagatcagaaggatattctgaaggtgaaatgaaattacacacacttagacaagatgttagttatgcaacagcaacagcaagaacaacttatggagcacttggagttaaagtttgagtttcattaggcgaagtatttgcaaagcaaaatcaagcatataatgaagaagaaccaacacacaaaaaaggtccaaaaagagcagcaagagttaaaaaagaaa

SEQ ID NO: 13110 - DNA, 468 bp, Homo sapiens
tagggcgaattggagctccaccgcggtggcggccgcccgggcaggtaccgctgtgtccgggtgggtggtcagaatgccgtgctccaggtgttcacagctgcttcgtggaagaccatgtgctccgatgactggaagggtcactacgcaaatgttgcctgtgcccaactgggtttcccaagctatgtgagttcagataacctcagagtgagctcgctggaggggcagttccgggaggagtttgtgtccatcgatcacctcttgccagatgacaaggtgactgcattacaccactcagtatatgtgagggagggatgtgcctctggccacgtggttaccttgcagtgcacagcctgtggtcatagaaggggctacagctcacgcatcgtgggtggaaacatgtccttgctctcgcagtggccctggcaggccagcctttagttccagggctaccacctgtgcgggggctct

SEQ ID NO: 13111 - DNA, 414 bp, Homo sapiens
actatagggcgaattggatctccaccgcggtggcggccgcccgggcaggtaccgctgtgtccgggtgggtggtcagaatgccgtgctccaggtgttcacagctgcttcgtggaagaccatgtgctccgatgactggaagggtcactacgcaaatgttgcctgtgcccaactgggtttcccaagctatgtgagttcagataacctcagagtgagctcgctggaggggcagttccgggaggagtttgtgtccatcgatcacctcttgccagatgacaaggtgactgcattacaccactcagtatatgtgagggagggatgtgcctctggccacgtggttaccttgcagtgcacagcctgtggtcatagaaggggctacagctcacgcatcgtgggtggaaacatgttcttgctctc

SEQ ID NO: 13112 - DNA, 324 bp, Homo sapiens
actactatagggcgaattggagctccaccgcggtggcggccgaggtactaaactttaattaatgagctaacgtcatattttttaagtttttcaattccgtttaaaaatcctaattcaagtaaaaagattactttatgaacaacagcaccttgagattcgattaagttaataatcgctttcattgttccgccagtagctaaaacatcatcaataattgctactttttggccttttttcaacatattagtttggatttctagagttgatttaccatatttctaaaatcattactcaaactaataacgtctcctgggaaatttttta

SEQ ID NO: 13113 - DNA, 488 bp, Homo sapiens
actatagggcgaattggagctccaccgcggtggcggccgcccgggcaggtaccacttgaattatctattgaaagaactactacatcgagtttttgttcttttgccatttcaatagcttctcttgtttcaattatcccaattttttcattatctgagccgataagaaaaactttgacaaatggaatatttctgtttactcaatgttcttgaactggtttagaacgtgaaaaatttttaggatttggtttggaaataatttttcctccttggattaaaaaataaaaaagtggtaaatccactttctcagcaaaacaaaaattattattaaaaataataacaaattagtattttgtagcctttacctatgaacacttattcatcaggtgagagtgaatcttctttctgcaataatttctaattgccccgcgtaccttggccgctctagactagtggatcccccgggctgcaggaattcgatatcaagctta

SEQ ID NO: 13114 - DNA, 435 bp, Homo sapiens
ctactatagggcgaattggagctccaccgcggtggcggccgcccgggcaggtactaggagatattgatcctagtcaattaggcattgtagactgtcatgaccacttaataaaaaattatggacctgaagctcacgagcatccagattttattatgatgtcaaaagatgctgcaattaaagaaatgaatgaatatgtagcaaaaggaggaaaaactgttgttacaatggaccctcctaacgttgggcgtgatgtttatcaaatgttagatattgcaaagaaattagaaggaaaagctaacattattatggcaactggttttcataaagctgcattttatgacaaaggtgcttcttgacttgctttggctccaacagataaaattgtaaaaatggttgtagctgaaatcgaagaaggaatggatgaatataactaca

SEQ ID NO: 13115 - DNA, 264 bp, Homo sapiens
atagggcgaattggagctccaccgcggtggcggccgcccgggcaggtaccgtagaagaagaaggaatacctaaagaaacagacatagaaatcatcccagaaatcccggaaactctagagccactgtcccttccagatgtgctgaggatctcggcagttctggaggacaccacaggccagctctctattctgaactacatcatgcccgttcagtacctcggccgctctagaactagtggatcccccgggctgcaggaattcgata

SEQ ID NO: 13116 - DNA, 480 bp, Homo sapiens
actatagggcgaattggagctccaccgcggtggcggccgaggtactaaactttaattaatgagctaacgtcatattttttaagtttttcaattccgtttaaaaatcctaattcaagtaaaaagattactttatgaacaacagcaccttgagattcgattaagttaataatcgctttcattgttccgccagtagctaaaacatcatcaataattgctactttttggccttttttcaacatattagtttggatttctagagttgatttaccatattctaaatcatactcaaaactaataacgtctcctggtaattttttaggttttcttaccataataaaaggtttttttaaaaaagctgcagtaggtgtcccaaacaagaaacctcttgcgtctggacctataataacatctgcatctttagctaactcagccatttgattaattgtgtaatttagcacttctccatttgctaaaagtggt

SEQ ID NO: 13117 - DNA, 481 bp, Homo sapiens
agggcgaattggagctccaccgcggtggcggccgcccgggcaggtactaaaacaggtgctcctgttaaaatagaagatcttgcagctacttctagagatttaaattctaaacgatcaatagcagcgtatcctgttccggctttaataattccggctttggatttagatctttttacaactggtccgctgtagttatattcatccattccttcttcgatttcagctacaaccatttttacaattttatctgttggagccaaagcaagtcaagaagcacctttgtcataaaatgcagctttatgaaaaccagttgccataataatgttagcttttccttctaatttctttgcaatatctaacatttgataaacatcacgcccaacgttaggagggtccattgtaacaacagtttttcctccttttgctacatattcattcatttctttaattgcagcatcttttgacatcataataaaatctg

SEQ ID NO: 13118 - DNA, 385 bp, Homo sapiens
ctactatagggcgaattggagctccaccgcggtggcggccgcccgggcaggtacattcttcactatcactgtcctgtaaatttagtagccttggctggaaacactgtagtcgacatgatctgatattgcttaatatttcagaaagagacagtctattttcacaatgtttactggaagcattggtccgagagaaattagaagaaaagtctatagtttgggaagagcttgaaaaactattcagcatttcagggtctatctgtttcaggactgggtcatgttctgtggatattcggtccattatgacccttccacctctgccaattcgcctccttgcaaatcctatacatcttcttgggactgtaagtgttgtaaggcaatgcctata

SEQ ID NO: 13119 - DNA, 431 bp, Homo sapiens
ctactatagggcgaattggagctccaccgcggtggcggccgaggtacagcttggtgactgtaattaacaacaatgtattttgaaagtcactgagtaaattttaagtggtttttccaaaaaagcacataaggtaatgcacgttaattagctatattgagccattccacaatgtatagatatttcaaaacatgttacacatgataaatccagtttttctacgtcattttttaaaattatatttaatttttttattttgaaagttttttcacagatcttttttttagtattattaccttctgatatatgtgtcattattgaagaaccataccttttaaagttattattttgtaattaagtatgtcaacagtaaaaaataaccagtggccaggcctggtggctcatgcctgtaatcccagcactttttcggaggc

SEQ ID NO: 13120 - DNA, 473 bp, Homo sapiens
ctactatagggcgaattggagctccaccgcggtggcggccgaggtacctgtgaagacagctacacctggtttcctccctcatgccttgatccccagaactgctaccttcacacggctggagcactcccaagctgtgaatgtcatctcaacaacctcagccagagtgtcaatttctgtgagagaacaaagatttggggcactttcaaaattaatgaaaggtttacaaatgaccttttgaattcatcttctgctatatactccaaatatgcaaatggaattgaaattcaacttaaaaaagcatatgaaagaattcaaggttttgaggtcggttcaggtcacccaatttcgaaatggaagcatcgttgctggtatgaaggttgttggctccagcagtgcatctgaactgctgtcagccattgaacatgttgccgagaaggcttagacagcccttcacaagctgtttccattagaag

SEQ ID NO: 13121 - DNA, 485 bp, Homo sapiens
ctatagggcgaattggagctccaccgcggtggcggccgaggtactttttgttttatattcttcaaatcctattgatgaaaaacttaaagatgaattagaaaaatcttatgtaattagacaaaaaccaaaaaaacaaaaacttattttagaaagacttggataatgattgattataaaaaaatgattgaccatactttattaaaaccagaagctacatctaaagatattttaaaacttatttcacaagctaaagaacatggatttagaggagtttgcattaactcttcttgagttaaattagcaaaagaaaaacttgcaaatacagatttagatatcgtttcagtagttggctttccattaggtgcatcaaacacacaaaccaaggtttttgaagcaaaattagcagttgaacatggagctactgaaatagatatggttataaatgtgggtaaattcaaagaaaaagtttatgactacatcttaaa

SEQ ID NO: 13122 - DNA, 344 bp, Homo sapiens
ggcgaattggagctccaccgcggtggcggccgaggtactgtgcatgaaaccacacatacgggcaaaagcaggaagagactttgcagacataaaaaccaggtaagttttgagagtcaggtgattgcaagatttttttttctttcattgacacttagctaattttgagccatatttttaaatgtgtgtcttttcagttacttgaaacctcttctcccacctcccatcctttccaaacctcctccaagccaattttccagttggtttaaaagaaatcattagggtgacccccactcccactttctggaacctcaggcagagctcctggtggttcctccctagcacca

SEQ ID NO: 13123 - DNA, 674 bp, Homo sapiens
  misc_feature 52, 53, 54: n = A,T,C or G
acgactactatagggcgaattggagctccaccgcggtggcggccgaggactnnntttttttttttttttttttttgcgtggaatccttcacctcttgctaaaggaacagtaatgtcatatcctgttaatcttgcaggaggcgctaataagaattcaaatgctttctcatttactcttgaataattcactgaactgaaaatgatttaacagcttcgtgaacaactaaaagtcttccagtttttttaacagagttaataattgtatctgtatctaaaggagaaattgttcttaaatcaattaattctacagagtattctccatttaattgttttaaagcagctagtgcttcgtgaacttgtgctccatatgttactaatgttaaatcagaaccttctactaatacatttgctttaccaatttcaacttcataaattcctgctggagcttcttgtttgaatgaacgataaattttcttaggttctaagaaaataactggatctgggtcgttaatagctgcgattaataatccttttgtatcataaggagttgaaggcataacaacttttaatcctggaatgtgtgcatataaagcttcaattgcttctgagtggtgttctagagctctaactccacctgccattggcattctaacaaccataggtacctgcccgggc

SEQ ID NO: 13124 - DNA, 698 bp, Homo sapiens
cgactactatagggcgaattggagctccaccgcggtggcggccgaggtactaaactttaattaatgagctaacgtcatattttttaagtttttcaattccgtttaaaaatcctaattcaagtaaaaagattactttatgaacaacagcaccttgagattcgattaagttaataatcgctttcattgtccgcagagctaaaacatcatcaataattgctactttttggccttttttcaacatattagtttggatttctagagttgatttaccatattctaaatcatactcaaaactaataacgtctcctggtaattttttaggttttcttaccataataaaaggtttttttaaaaaagctgcagtaggtgtcccaaacaagaaacctcttgcgtctggacctataataacatctgcatctttagctaactcagccatttgattaattgtgtaatttagcacttctccatttgctaaaagtggtgaaatatctttaaatacaatcccttcaattgggaaatctttaacatctctgatgtattctattaaattgatttgatttttttgcatttccccgcgtacctgcccgggcggccgctctagaactagtggatcccccgggctgcaggaattcgatatcaagcttatcgataccgtcgacctcgagggggggcccggtacccagcttttgttcccttta

SEQ ID NO: 13125 - DNA, 243 bp, Homo sapiens
tacactactatatgggcgaatgggagctccaccgcggtggcggccgaggtacaagatagtcatctcagtaaaaggtctattatctaacttgccaaacttgtttactgagagccctaaggaactaaaactgccataatgccgtgcacagcttgaaaagcaattagagtaagcaagattagtttttcctcccttccagttcctcagcaggcctggctgaaggcccaggagggaaggaaatataag

SEQ ID NO: 13126 - DNA, 487 bp, Homo sapiens
cgactcactatagggcgaattggagctccaccgcggtggcggccgaggtacaagatagtcatctcagtaaaaggtctattatctaacttgccaaacttgtttactgagagccctaaggaactaaaactgccataatgccgtgcacagcttgaaaagcaattagagtaagcaagattagtttttcctcccttccagttcctcagcaggcctggctgaaggcccaggagggaaggaaatataagaaccaacaataaaaatagcaatagcaataagaagaatgccatcccatggagcacaccataattctggaaccacctctcccggatcaggcttccattgctcacgatgctcacgctgggcagccgcaactctactttgcagaacctcaccaacttgcccaggtattctccccggtcttgaagaaatggctttccacctgaaaaggtgatcttttccataccagcttccttaagcaaaagcaatcctc

SEQ ID NO: 13127 - DNA, 484 bp, Homo sapiens
tagggcgaattggagctccaccgcggtggcggccgcccgggcaggtacaatttctaattgatcctgttcacattcagtgaaatggcattgcatatttatatgttgcttacagcttattgatttaggtaactattgtgtcttccttcactatctgacctgaaaagcactctcttctctatgcactcttatattctgcctttctgcctggagtttgaaatacatgtctctttagtttcttttgcacatgctacattgggctttagaccggagataatacagtgactttacctcacaaatcatattctgtcaacacaaatctatgaatttagtttatttaaaatcagaacaatttcctacaaaatttttctggaaaatagactcctaacagacctaccagaatcatgcttaaagtgctcccttgacacttattctatactgaaggataaattttaaaaaatctttataggctactgtcaaaagtatc

SEQ ID NO: 13128 - DNA, 331 bp, Homo sapiens
tacgactcactatagggcgaattggagctccaccgcggtggcggccgaggtacaagatagtcatctcagtaaaaggtctattatctaacttgccaaacttgtttactgagagccctaaggaactaaaactgccataatgtcgtgcacagcttgaaaagcaattagagtaagcaagattagtttttcctcccttccagttcctcagcaggcctggctgaaggcccaggagggaaggaaatataagaaccaacaataaaaatagcaatagcaataagaagaatgccatcccatggagcacaccataattctggaaccacctctcccggatcag

SEQ ID NO: 13129 - DNA, 431 bp, Homo sapiens
tactatagggcgaattggagctccaccgcggtggcggccgaggtactttttgttttatattcttcaaatcctattgatgaaaaacttaaagatgaattagaaaaatcttatgtaattagacaaaaaccaaaaaaacaaaaacttattttagaaagacttggataatgattgattataaaaaaatgattgaccatactttattaaaaccagaagctacatctaaagatattttaaaacttatttcacaagctaaagaacatggatttagaggagtttgcattaactcttcttgagttaaattagcaaaagaaaaacttgcaaatacagatttagatatcgtttcagtagttggctttccattaggtgcatcaaacacacaaaccaaggtttttgaagcaaaattagcagttgaacatggagctactgaaata

SEQ ID NO: 13130 - DNA, 466 bp, Homo sapiens
gactactatagggcgaattggagctccaccgcggtggcggccgcccgggcaggtacagcctctcggcccggctaaacatcatcgtcttggtaggccattaccataccaactaactaatgttccgcacccccatttttaagtgaagctgtgaagctcctttctattactcatcatgcgataaataactatatccggtattagctattgtttccaatagttatcccagtcttaaaggtaggttaggtacctcggccgctctagaactagtggatcccccgggctgcaggaattcgatatcaagcttatcgataccgtcgacctcgagggggggcccggtacccagcttttgttccctttagtgagggttaattgcgcgcttggcgtaatcatggtcatagctgtttcctgtgtgaaattgttatccgctcacaattccacacaacatacgagccgggagcataaagtg

SEQ ID NO: 13131 - DNA, 426 bp, Homo sapiens
ctcactatagggctaattggagctccaccgcggtggcggccgtgctgttgcttggccgcgcgccaggctggccagaggtgctgttccactggggcgtggccgtgatggtgtgcgccgatcgacgttctgttttaatgaaaggatggacatgcaactgacactcgcacaactcttggcaatcatgcccaatgcccgctccaaagcgggtatttttttgcctgcgctaaacgtggccatggcggaattcggtatcaacacgtcggcgcgccaggccgcgtggctggccaccatcggtgtcgagtccggtagcctgcagcgggtagaggaaaacttgaactaccgcgcggatcgcctgctcgttattttcggaaaatacttcacgcccggcgttggccgcagcttatgccggcaagccggaaatgatcg

SEQ ID NO: 13132 - DNA, 561 bp, Homo sapiens
agggcgaattggagctccaccgcggtggcggccgaggtactaaactttaattaatgagctaacgtcatattttttaagtttttcaattccgtttaaaaatcctaattcaagtaaaaagattactttatgaacaacagcaccttgagattcgattaagttaataatcgttcattgttccgccagtagctaaaacatcatcaataattgctactttttggccttttttcaacatattagtttggatttctagagttgatttaccatattctaaatcatactcaaaactaataacgtctcctggtaattttttaggttttcttaccataataaaaggtttttttaaaaaagctgcagtaggtgtcccaaacaagaaacctcttgcgtctggacctataataacatctgcatctttagctaactcagccatttgattaattgtgtaatttagcacttttccatttgctaaaagtggtgaaatatctttaaatacaatccctttaattgtgaaatctttaaacatctctgatgtattctattaaattgatttgaatttttttgcat

SEQ ID NO: 13133 - DNA, 507 bp, Homo sapiens
tacgactcactatagggcgaattggagctccaccgcggtggcggccgaggtaccaaaataaagggtatttgctacctttaatacttgccagttcaggttggaggcacaggcagcagcaagaatggaaagaaatgttcttacaacattttcacaggaaatgtcccagttaattttgaatgaaatgcaaaagctgaatattccagtttattcaatgattttgttgaatctgaattttttttgattgatggggattcattacttatcacatgtatctgtgagatatcatttaagcctgggcagaacctccatttcttctatctggttgaacgctatcttgtggatcttattagcaaaggaggacaattcaccatagttttcttcaaggatgccgagtatgcgtatttcaacttccctgaacttctttctttgagaactgctttaattcttcatcttcagaaagaataccaccattgatgttcgaacaacattttcgagatgcttataaaa

SEQ ID NO: 13134 - DNA, 430 bp, Homo sapiens
  misc_feature 67: n = A,T,C or G
taatacgactcactatagggcgaattggagctccaccgcggtggcggccgcccggcaggtacgcggngaaatgcaaaaaaatcaaatcaatttaatagaatacatcagagatgttaaagatttcccaattgaagggattgtatttaaagatatttcaccacttttagcaaatggagaagtgctaaattacacaataatcaaatggctgagttagctaaagatgcagatgttattataggtccagacgcaagaggtttcttgtttgggacacctactgcagcttttttaaaaaaaccttttattatggtaagaaaacctaaaaaattaccaagaagacgttattagttttgagtatgatttaaaatatggtaaatcaactttagaaatccaaactaatatgttgaaaaaaggccaaaaagtagcaattatt

SEQ ID NO: 13135 - DNA, 391 bp, Homo sapiens
cactactatagggcgaattggagctccaccgcggtggcggccgaggtacagcctctcggcccggctaaacatcatcgtcttggtaggccattaccctaccaactaactaatgttccgcacccccatttttaagtgaagctgtgaagctcctttctattactcatcatgcgataaataactatatccggtattagctattgtttccaatagttatcccagtcttaaaggtaggttaggtacctgcccgggcggccgctctagaactagtggatcccccgggctgcaggaattcgatatcaagcttatcgataccgtcgacctcgagggggggcccggtacccagcttttgttccctttagtgagggttaattgcgcgcttggcgtaatcatg

SEQ ID NO: 13136 - DNA, 363 bp, Homo sapiens
actactatagggcgaattggagctccaccgcggtggcggccgaggtacggccacactgggactgagatacggcccagactcctacgggaggcagcagtaaggaattttccacaatgagcgaaagcttgatggagcgacacagcgtgcaggatgaagttcttcggaatgtaaactgctgttataagggaaaaaaaaaaaaaaaaaaaaaaaaaaaggtacctgcccgggcggccgttctagaactagtggatcccccgggctgcaggaattcgatatcaagcttatcgataccgtcgacctcgagggggggcccggtacccagcttttgttccctttagtgagggttaattgcgcgcttggcgt

SEQ ID NO: 13137 - DNA, 242 bp, Homo sapiens
  misc_feature 8, 10, 11, 12: n = A,T,C or G
ccaaactngnnnactgagagccctattgaactaaaactgccatattgccgtgcacagcttgaaaagcaattagagtaagcaagattagtttttcctcccttccagttcctcagcaggcctggctgaaggcccaggagggaaggaaatataagaaccaacaataaaaatagcaatagcaataagaagaatgccatcccatggagcacaccataattctggaaccaccttttccggatcaggct

SEQ ID NO: 13138 - DNA, 373 bp, Homo sapiens
ctccaccgcggtggcggccgcccgggcaggtacaggaactgccaaaggcaacagaaattctttctccctatgtcccagcctacccccactttaccgaggccaacagccgcctcagaaaccagattcaggagctaacatgccccaggtctcacgaggatcagagactccagaggccagggaaggagatcaaggtagacaagcgggggtggtctcagatctggttgagctcgagctatgcaaatgcctctcatggagatgcgaggacctatctattatgatgaccagggccacatccggagggggcaacagactttcatctatcagcccttttcaaccactgatctactaaactggagacactctgaaccctgcc

SEQ ID NO: 13139 - DNA, 585 bp, Homo sapiens
  misc_feature 6: n = A,T,C or G
aatacnactcactatagggcgaattggagctccaccgcggtggcggccgaggtactattgactaaagtcagttgggggagagagaggcggaagtataggacttttatgcttggttatactagagaacaaatagaaactgactaaagaaacattagatcagtggttctcagagtattgatatctgggagtcccagcaacagtctgaggaggttcatgagttcagaatattttgataataacactaagatggtatttactcttctaactgggtagatatttgcactggtcggccgctctagaactagtggatcccccgggctgcaggaattcgatatcaagcttatcgataccgtcgacctcgagggggggcccggtacccagcttttgttccctttagtgagggttaattgcgcgcttggcgtaatcatggtcatagctgtttcctgtgtgaaattgttatccgctcacaattccacacaacatacgagccgggagcataaagtgtaaagcctggggtgcctaatgagtgaactaactcacattaattgcgttgcgctcactgcccgctttccagtcgggaaacct

SEQ ID NO: 13140 - DNA, 564 bp, Homo sapiens
gcgtaatacgactcactatagggcgaattggagctccaccgcggtggcggccgcccgggcaggtaccgggtctagggaagatgcagaacacttcagcctggcagaaggctctaaagatcgtcaacctttcctctgttcattttgaaatttttaaaaatatgctaacttagctgaaaatctcatggaaaccaggctcctcatcagacttgaaagtcaaaccggtttctcaacaacttctctttatggttctgtatggctccacagaaaaccagaaaaacatttggggcaagaagctatgactctgtgaggccacatgggagcaggcagtcaattattacactaaggaacacccagttagcatgaagtatcccatcacctcggtattaagccctgcatgcattagctattacctcggccgctctagaactagtggatcccccgggctgcaggaattcgatatcaagcttatcgataccgtcgacctcgagggggggcccggtacccagcttttgttccctttagtgagggttaattgcgcgcttggcgtaatcatggtcatagctg

SEQ ID NO: 13141 - DNA, 623 bp, Homo sapiens
atacgactcactatagggcgaattggagctccaccgcggtggcggccgcactttttttttttttttgctcaatagaagtatggaataattccaggtaatttaaagcatatttttcaattggtgtaagctgctccatgaagtcagctagctcctctaattgggatggttcttcatcacacggcatgttctcagagtctgatgacagagcatcagtgtgtggtcccagcaccccctcctgtgcggacttctgggcatcctcctccagatactcaatactcttgagggcctgaggaaagtctctatgaaaggtcttgcaattttgggtgcaatggtttccgtgacagaaggttcctgagaaagcaccacaaactcctcagctttgaccgggaagccagcatcacggacgcgtgggtcgaagcttgacctcggccgctctagaactagtggatcccccgggctgcaggaattcgatatcaagcttatcgataccgtcgacctcgagggggggcccggtacccagcttttgttccctttagtgagggttaattgcgcgcttggcgtaatcatggtcatagctgtttcctgtgtgaaattgttatccgctcacaattccacacaacata

SEQ ID NO: 13142 - DNA, 586 bp, Homo sapiens
atacggcgaataggagctccaccgcggtggcggccgcccgggcaggtaccgctactgaaattattaaacatacactacagatcaattatataaggatgttaatatctttagaaatcaagagttgcagcataagagaaagggatacaaaaacaaaacaagcaaagaagttacataaaaacgtaacgttgtattggaaaaaccagtatgaacttatgatttagttttctttctaaaaacggacgcgtgggtcgaagcttgacctcggccgctctagaactagtggatcccccgggctgcaggaattcgatatcaagcttatcgataccgtcgacctcgagggggggcccggtacccagcttttgttccctttagtgagggttaattgcgcgcttggcgtaatcatggtcatagctgtttcctgtgtgaaattgttatcccgtcacaattccacacaacatacgagccgggagcataaagtgtaaagcctggggtgcctaatgagtgagctaactcacatttaattgcgttgcgctcactgcccgctttccagtcgggaaacctgtcgtgccagctgcattaatgaatc

SEQ ID NO: 13143 - DNA, 481 bp, Homo sapiens
cactatacggcgaattggagctccaccgcggtggcggccgctctagaactagtggatcccccgggctgcaggaattcgatatcaagcttatcgataccgtcgacctcgagggggggcccggtacccagcttttgttccctttagtgagggttaattgcgcgcttggcgtaatcatggtcatagctgtttcctgtgtgaaattgttatccgctcacaattccacacaacatacgagccgggagcataaagtgtaaagcctggggtgcctaatgagtgagctaactcacattaattgcgttgcgctcactgcccgctttccagtcgggaaacctgtcgtgccagctgccttaatgaatcggcccacgcgcggggagaggcggtttgcgtattgggcgctcttccgctttctcgctcactgactcgctgcgctcggtcgttcggctgcggcgagcggtatcagcctactcaaagggcggtaata

SEQ ID NO: 13144 - DNA, 503 bp, Homo sapiens
actcactatagggcgaattggagctccaccgcggtggcggccgcccgggcaggtacactccagctcctctatcctttgttccaggtgagccttctcattaaatgctgtctcttgagcaatctttagcctctcccttagactatctcgttctgtggtcattcttcgtaaatcagtaaaggctacatctctttcagtctccactcgccggagaatagcatgtgccgttgttgatttaggactcttacagcttttcatcatttctcgtcgaagtcgggtaatttcttcctgtgcctgttcataaagaaggaagatcttgtctctctcagatttaagaaccttgacattaccctgaatttctgccaaatcggacgcgtgggtcgaagcttgtacacctcggccgctctagaactagtggatcccccgggctgcaggaattcgatatcaagcttatcgataccgtcgacctcgagggggggcccggcccccagcttttgttcccttta

SEQ ID NO: 13145 - DNA, 381 bp, Homo sapiens
gcgaattggagctccaccgcggtggcggccgaggtcaagcttcgacccacgcgtccgtgatgctggcttcccggtcaaagctgaggagtttgtggtgctttctcaggaaccttctgtcacggaaaccattgcacccaaaattgcaagacctttcatagagactttcctcaggccctcaagagtattgagtatctggaggaggatgcccagaagtccgcacaggagggggtgctgggaccacacactgatgctctgtcatcagactctgagaacatgccgtgtgatgaagaaccatcccaattagaggagctagctgacttcatggagcagcttacaccaattgaaaaatatgctttaaattacctggaattattccatact

SEQ ID NO: 13146 - DNA, 470 bp, Homo sapiens
gcgaattggagctccaccgcggtggcggccgaggactccagcctgggcaacagagcaagactccatctcaaaaaaaaaaaaaaaaaaaaaagtgcggccgctctagaactagtggatcccccgggctgcaggaattcgatatcaagcttatcgataccgtcgacctcgagggggggcccggaacccagcttttgttccctttagtgagggttaattgcgcgcttggcgtaatcatggtcatagctgtttcctgtgtgaaattgttatccgctcacaattccacacaacatacgagccgggagcataaagtgtaaagcctggggtgcctaatgagtgagctaactcacattaattgcgttgcgctcactgcccgctttccagtcgggaaacctgtcgggccagctgcattaatgaatcggccaacgcgcggggagaggccggttgcgtaatgggcgctcttccgcttcctg

SEQ ID NO: 13147 - DNA, 397 bp, Homo sapiens
ggcgaattggagctccaccgcggtggcggtcgtccggtcaggtggaaaggtgggtggggagagggaggcttatttgttgctgcagtgtaactaagtgaaacctaattcatatgactcaaactaaggtatatttggttagatctaggtgagttctactttagaggaaatcctggtaactgttgtttgtttgtaagttatagctgtaattaattttccctgtattcaaagcccccaaaccctgcattcagatactatgcatttagacttccttaggcaaagtcaaggcaacaagctgatgattctaagctattattcaaggagtatctaccatcataaaggtggtttagtcatatagataatatcaatcaataatacaggagaaggccaaaattttttg

SEQ ID NO: 13148 - DNA, 546 bp, Homo sapiens
agggcgaattggagctccaccgcggtggcggccgcccgggcaggttacaagtcgacccacgcgtccgcttcagaatatccaattcatgtgaactacaggaaattatagtttagatatttttaaatgatttgcctgtcaccgtataacacaagggtgtcatgaccaagctagatctctttaccatatcattaataaaagtcaaattttaaatttgtgcccaatttggctgggtgtggtggctcattcctgtgattccagcactttgggagacctcggccgctctagaactagtggatcccccgggctgcaggaattcgatatcaagcttatcgataccgtcgacctcgagggggggcccggtacccagcttttgttccctttagtgagggttaattgcgcgcttggcgtaatcatggtcatagctgtttcctgtgtgaaattgttatccgctcacaattccacacaacatacgagccgggagcttaagtgtaaagcctggggtgcctaatgagtgagctaactcacattaattgcgttgcgctcact

SEQ ID NO: 13149 - DNA, 576 bp, Homo sapiens
  misc_feature 560: n = A,T,C or G
gggcgaattggagctccaccgcggtggcggccgaggtcttcgacccacgcgtccgcatttattaaggcttgtatatgttcaagatccagtgaagactgtcttgggcgtgtataattgatcttaaccacaaggctgagaagttatgtgcagggcttatgatgctacttccaaagtattaaatcctccagagaagcctgtagtgtgggatgcaaactattttaagtgtgaccatgaggtgtttttttgtggaccattttaaagccaatgataggttctaaagcaatctcaacctgagttaggtagaatgggttggttatctgcactctagcggcccttcatagctattgtattctggatttcaattcggcactttatgtattagctaaaaatttcatgaccagatcttttgaagtatacaaagtaaatcttcaaggtgatagtttatccaagtgtaaatgtgttgcactaggtcagcttggaattttgagatgacttttggcatcattgcatacatctggtttgtgtacctgcccgggcggccgctctaaactagtggatcncccgggctgcaagaat

SEQ ID NO: 13150 - DNA, 529 bp, Homo sapiens
agggcgaattggagctccaccgcggtggcggccgaggtactattgactaaagtcagttgggggagagagaggcggaagtatattacttttatgcttggttatactagagaacaaatagaaactgactaaagaaacattagatcagtggttctcagagtattgatatctgggagtcccagcaacagtctgaggaggttcatgagttcagaatattttgataataacactaagatggtatttactcttctaactgggtagatatttgcactggtcggccgctctagaactagtggatcccccgggctgcaggaattcgatatcaagcttatcgataccgtcgacctcgagggggggcccggtacccagcttttgttccctttagtgagggttaattgcgcgcttggcgtaatcatggtcatagctgtttcctgtgtgaaattgttatccgctcacaattccacacaacatacgagccgggagcataaagtgtaaagcgtggggtgcctaatgagtgagctaactcacatta

SEQ ID NO: 13151 - DNA, 517 bp, Homo sapiens
  misc_feature 389: n = A,T,C or G
agggcgaattggagctccaccgcggtggcggccgaggtacatatctgcatatacaccattaattttacatcgttgaggtagccaaaactgctcgtaagtgggcttttattaaataatataatgttcttaatagaggaaaaaggaattgaatacatttttaaaaacaaaataacaaaaccaatccattgtcccacaaaagaaaatcagtggagacaaaagcagtttaatttgctggattcttttgtggcttattttttgagtattatttacaaaatgttagactaatttttaagcaatattaataataagcaacatacaactccaagaataatataataaataataaactgcggacgcgtggttcgaagcttgctgcgaaggggcccggncgctcgaggccgcccgggcaggtacccagtaatcacataaattctgcaatcatctggttatttagcttaactgttttttttatttgctgaatttgttgttgtaatttcagtctttttttattgggttg

SEQ ID NO: 13152 - DNA, 545 bp, Homo sapiens
ggcgaattggagctccaccgcggtggcggccgcccgggctggttacaagtcgacccacgcgtccgcttcagaatatccaattcatgtgaactacaggaaattatagtttagatatttttaaatgatttgcctgtcaccgtataacacaagggtgtcatgaccaagctagatctctttaccatatcattaataaaagtcaaattttaaatttgtgcccaatttggctgggtgtggtggctcattcctgtgattccagcactttgggagacctcggccgctctagaactagtggatcccccgggctgcaggaattcgatatcaagcttatcgataccgtcgacctcgagggggggcccggtacccagcttttgttccctttagtgagggttaattgcgcgcttggcgtaatcatggtcatagctgtttcctgtgtgaaattgttatccgctcacaattccacacaacatacgagccgggagcattaagtgtaaaggctggggtgccttatgagtgagctaactcacattatttgcgttgcgctcact

SEQ ID NO: 13153 - DNA, 570 bp, Homo sapiens
ggcgaattggagctccaccgcggtggcggccgcacttttttttttttttttttttaagaaatagggtctcactctgtcccccaggctggagccattatagctcactacagcttctgactcctaggctcaagggatcctgccacctcagcctccctggtagctgggactataggcaggagatcgcttgaaccgggaggcggaggttgctgtaagctgagatcgcgccattgctttccagcctgggtgccagagcaaaactctgtctcaaaaaaaaaaaaaataataataataaataaataaaaaggcaaggaatatagggaaaagtcaaaagagatggactgtgagaagactgggaaagccagaagaatggtggaaaatgtagcatggagtaagacaataaaaatataagaggactcatttcggacgcgtgggtcgactcacctcggccgctctagaactagtggatcccccgggctgcaggaattcgatatcaagcttatcgataccgtcgacctcgagggggggcccggtacccagcttttgttccctttagtgagggttaattgcgcg

SEQ ID NO: 13154 - DNA, 565 bp, Homo sapiens
agggcgaattggagctccaccgcggtggcggccgcccgggcaggttacaagcttcgacccacgcgtccgggaaattttaattaaaaataggtgaacattttaaatgacctaatacatatttagtccacattgaaactttggcattttgtcattgccattaaaattttgatggcattaaaatttgatgccattaaaattttgatcagtaggtagcatttttttcttagctacaattgttttttttaattataagtattaaaaattcatgaagatgattctttttgtaaaacagttttgcataaaaagtaagtctcattttaaagcaactaccaacttactggccacctcggccgctctagaactagtggatcccccgggctgcaggaattcgatatcaagcttatcgataccgtcgacctcgagggggggcccggtacccagcttttgttccctttagtgagggttaattgcgcgcttggcgtaatcatggtcatagctgtttcctgtgtgaaattgttatccgctcacaattccacacaacatacgagccgggagcattaagtgt

SEQ ID NO: 13155 - DNA, 563 bp, Homo sapiens
tatagggcgaattggagctccaccgcggtggcggccgaggtcttcgacccacgcgtccgatggtttttgcaaaaattgaaaatgcatcgatattacagttaattttttcagtgtgtatgtggtattaggcttagaactataacacaggaagtttttagagtatgtccactctggtttactcctttgtaagtattaatacctgataatttacatcctacagccctgcctttttttttttttttcaagtttgtcccagcaagtcttggccctttgcattttcttaatacattttagtacctgcccgggcggccgctctagaactagtggatcccccgggctgcaggaattcgatatcaagcttatcgataccgtcgacctcgagggggggcccggtacccagcttttgttccctttagtgagggttaattgcgcgcttggcgtaatcatggtcatagctgtttcctgtgtgaaattgttatccgctcacaattccacacaacatacgagccgggagcataaagtgtaaagcctggggtgcctaatgagtgagctaactcacatta

SEQ ID NO: 13156 - DNA, 573 bp, Homo sapiens
ctactatagggcgaattggagctccaccgcggtggcggccgaggtacaaagaacaaagggaagctaaggaagaaaagatagtcaataaaagatgtctcatctgggcttagtggctcatgcctgtaatcccaacactttgggaggctgaggctcgaggactgcttgagtccaggaatttgggcaagtaggaaattactgaacagctgctatcacagacaaatgcctaacattgtgaagtgctacacaggggaaggagacccacgctaagaggagagcatgcacccagacacagaactcagaggacacagttcaaaacacacatacaagaggcttaggcacctgtgggcgtgtgtgtgctcacagccagcaaaatgaaaaaaaatcccagctctgaaggagaggcaagtgcatggcttccgtacctgcccgggcggccgctctagaactagtggatcccccgggctgcaggaattcgatatcaagcttatcgataccgtcgacctcgagggggggcccggtacccagcttttgttccctttagtgagggttaattgcgcgcttggcgtaatcatg

SEQ ID NO: 13157 - DNA, 532 bp, Homo sapiens
tcactacttagggcgaattggagctccaccgcggtggcggccgaggtcttcgacccacgcgtccgatggtttttgcaaaaattgaaaatgcatcgatattacagttaattttttcagtgtgtatgtggtattaggcttagaactataacacaggaagtttttagagtatgtccactctggtttactcctttgtaagtattaatacctgataatttacatcctacagccctgccttttttttttttttcaagtttgtcccagcaagtcttggccctttgcattttcttaatacattttagtacctgcccgggcggccggccgcccgggcaggtacgactacctctttaaagttgtccttattggagattctggtgttggaaagagtaatctcctgtctcgatttactcgaaatgagtttaatctggaaagcaagagcaccattggagtagagtttgcaacaagaagcatccaggttgatggaaaaacaataaaggcacagatatgggacacagcagggcaagagcgatatcga

SEQ ID NO: 13158 - DNA, 353 bp, Homo sapiens
accgcggtggcggccgaggtactattgactaaagtcagttgggggagagagaggcggaagtatattacttttatgcttggttatactagagaacaaatagaaactgactaaagaaacattttatcagtggttctcagagtattgatatctgggagtcccagcaacagtctgaggaggttcatgagttcagaatattttgataataacactaagatggtatttactcttctaactgggtagatatttgcactggtcggccgctctagaactagtggatcccccgggctgcaggaattcgatatcaagcttatcgataccgtcgacctcgagggggggcccggtacccagctttt

SEQ ID NO: 13159 - DNA, 386 bp, Homo sapiens
agggcgaattggagctacaccgcggtggcggccgaggtcttccacccacgcgtccgatggtttttgcaaaaattgaaaatgcatcgatattacagttaattttttcagtgtgtatgtggtattaggcttagaactataacacaggaagtttttagagtatgtccactctggtttactcctttgtaagtattaatacctgataatttacatcctacagccctgcctttttttttttttttcaagtttgtcccagcaagtcttggccctttgcattttcttaatacattttagtacctgcccgggcggccgctctagaactagtggatcccccgggctgcaggaattcgatatcaagcttatcgataccgtcgacctcgagggggggc

SEQ ID NO: 13160 - DNA, 418 bp, Homo sapiens
acgactcactatagggcgaattggagctccaccgcggtggcggccgcacttttttttttttttttttacctgaaaatgcttattctagcttcacatttgattgtttggctaagaagaaaattatttattagacttaattttcctcacgagtttaaagattgcttcagatcttaaacttctaatgaggaaagctgagaagtccaatgccattctgattcttgcaacttacaagtagtctttttttgtctagacgctttcaggaccttcttttttcctcagtcagtgtatccaaaccttcacagtgatatcttttgggtacctcggccgctctagaactagtggatcccccgggctgcaggaattcgatatcaagcttatcgataccgtcgacctcgagggggggcccggtacccagctt

SEQ ID NO: 13161 - DNA, 547 bp, Homo sapiens
ctacttagggcgaattggagctccaccgcggtggcggccgaggtcttcgacccacgcgtccgcatttattaaggcttgtatatgttcaagatccagtgaagactgtcttgggcgtgtataattgatcttaaccacaaggctgagaagttatgtgcagggcttatgatgctacttccaaagtattaaatcctccagagaagcctgtagtgtgggatgcaaactattttaagtgtgaccatgaggtgtttttttgtggaccattttaaagccaatgataggctctagaactagtggatcccccgggctgcaggaattcgatatcaagcttatcgataccgtcgacctcgagggggggcccggtacccagcttttgttccctttagtgagggttaattgcgcgcttggcgtaatcatggtcatagctgtttcctgtgtgaaattgttatccgctcacaattccacacaacatacgagccgggagcataaagtgtaaagcctggggtgcctaatgagtgagctaactcacattaattgcgttgcgctcact

SEQ ID NO: 13162 - DNA, 565 bp, Homo sapiens
agggcgaattggagctccaccgcggtggcggccgcccgggcaggtcttctacccacgcgtccgcacattttgatggtcagtcaataacttaagcagttaccaaaatactaggtatccaaggagcgagaggtgggcgagcataagaaacacatttctcatggcacagctctgccaaagccctgcagaatcatttacacataggtctttggttagtagcccctggcacagaattctgatcttaaacaaatattgtctataatcaagtagagcaatgcaattaaaaaaaaaaagcacaggttttggggccatgctgaaatcccagccttgctatttgctggctgtgtgaccgtggttccttggtctcattatgctttggttcccgtatctataaaacggacgtaataatgtctccctctcattattgtgaagtcgaaatgatgtctgtaaagtgcccaacacagtactaaagggctatttttttcttccctatgaagatgagacctcggccgctctagaactagtggatcccccgggctgcaggaattcgatatcaagcttatcgata

SEQ ID NO: 13163 - DNA, 510 bp, Homo sapiens
tatagggcgaattggagctccaccgcggtggcggccgcccgggcaggtcaagcttcgacccacgcgtccgtttaagtaacattcagatttgtgtgtgtggagaggttgtagggaacagaattgtaggaaggtgctcacacctgtttttgtttgtttgttttatgtatatatggtgggtagaaaataaggattaatgaatgcagtaaggtatttgagcactcttgtttatcttgtgtaggtgccaaccaaatatttttatagagatgtggttaagcctcttggcatgttcaactgtgtacctcggccgctctagaactagtggatcccccgggctgcaggaattcgatatcaagcttatcgataccgtcgaccttgagggggggcccggtacccagcttttgttccctttagtgagggttaattgcgcgcttggcgtaatcatggtcatagctgttttctgtgtgaaattgttatccgctcacaatttcacacaacatacgagccgggagc

SEQ ID NO: 13164 - DNA, 504 bp, Homo sapiens
ctatagggcgaattggagctccaccgcggtggcggccgcccgggcaggtctcttgtctagtatactcaaggcagcctagtaaattattatttatctatacaatactggaaaaacttgtagacaaaaacatgacttgaattgctaaaaaaaaaaaaaaaatgagggagaatgaaaacttccggacgcgtgggtcgaagcttgacctcggccgctctagaactagtggatcccccgggctgcaggaattcgatatcaagcttatcgataccgtcgacctcgagggggggcccggtacccagcttttgttccctttagtgagggttaattgcgcgcttggcgtaatcatggtcatagctgtttcctgtgtgaaattgttatccgctcacaatttcacacaacatacgagccgggagcataaagtgtaaagcctggggtgcctaatgagtgagctaactcacattaattgcgttgcgctcactgcccgctttccagtcgggaaacctg

SEQ ID NO: 13165 - DNA, 559 bp, Homo sapiens
gaattggagctccaccgcggtggcggccgaggtcttcgacccgcgcgtccgcatttattaaggcttgtatatgttcaagatccagtgaagactgtcttgggcgtgtataattgatcttaaccacaaggctgagaagttatgtgcagggcttatgatgctacttccaaagtattaaatcctccagagaagcctgtagtgtgggatgcaaactattttaagtgtgaccatgaggtgtttttttgtggaccattttaaagccaatgataggttctaaagcaatctcaacctgagttaggtagaatgggttggttatctgcactctagcggcccttcatagctattgtattctggatttcaattcggcactttatgtattagctaaaaatttcatgaccagatcttttgaagtatacaaagtaaatcttcaaggtgatagtttatccaagtgtaaatgtgttgcactaggtcagcttggaattttgagatgacttttggcatcattgcatacatctggtttgtgtacctgcccgggcggccgctctagaactagtggatcccc

SEQ ID NO: 13166 - DNA, 524 bp, Homo sapiens
ggcgaattggagctccaccgcggtggcggccgaggtcgccatgttggctgggctggtctcgaactcctgacctcaagtgatctgtcctggcctcccaaagtgttgggattacaggctactaaagctttttatttatttctgtggatttgagttattgtgtagtgtcatttatttttcatatgaaggattccttttggtattttttgaagaacttctttatcagaattaattatctcacttttgaaaatttttaacaatctagaaacgtcttttttgttttttgaagaatagttttctggatgtaaaatttttggttaattttgtttttctttgaacactgaatatttaatcttatgccttctggctttcagtacctgcccgggcggccgctctagaactagtggatcccccgggctgcaggaattcgatatcaagcttatcgataccgtcgacctcgagggggggcccggtacccagcttttgttccctttagtgaggggtaattgcgcgcttggcgtaatcat

SEQ ID NO: 13167 - DNA, 543 bp, Homo sapiens
cgactactatagggcgaattggagctccaccgcggtggcggccgaggtagcttgagtcgacccacgcgtccgttcagatccgtttcagaaacgtgagtctctagctcaggagatttccacaactgtccttagtaacctgatcttattctcatgtttaaccttggcagtgggaagttcttcctggtatcctgcctaatttactggagttggcattaatgccatttccccctaaggcgtggctcttggaccagtatcacctgagaatttgatagacatagacccagagttactgaggcaggtgctctgttttggggaccagcaatcggtgctttagcaagttctttgggtgatagggtttggaaactactgctctaaagcatcatctgttttgactttgccatgcacaatctgaactcactcccgtgaggccctgctcctgatactttaaatcgtcctgtctctttttctgcctctctgtggaggctctagaactagtggatcccccgggctgcaggaattcgatatcaagcttatcgataccgt

SEQ ID NO: 13168 - DNA, 446 bp, Homo sapiens
actactatagggcgaattggagctccaccgcggtggcggccgcccgggcaggtacaggcacctatagaatttaaaggggagatttctttattttgtattcaatgtattaataagatttttaaaacatattttggagaaattgctaattagtgtataatcctgatgccaattctaaaaaaccttttttttttttgtagagacagggtcttattctgtcacccgggctggagtgctctggtatgatcctagttcactgcaacctcaaatacctggtctcaagcaatcctcccacctcagcctccccagtagctgtctctataagcatgcaccaccacacctggctaaccttcttattatttttggtagagacagtctcactatgttgcccaggctggtcttgaactcctaacctcaagcaaacatccctcctcgtgctcccaaaatgc

SEQ ID NO: 13169 - DNA, 535 bp, Homo sapiens
ctcactatagggcgaattggagctccaccgcggtggcggccgcccgggcaggtggaaaggtgggtggggagagggaggcttatttgttgctgcagtgtaactaagtgaaacctaattgatatgactcaaactaaggtatatttggttagatctaggtgagttctactttagaggaaatcctggcaactgttgtttgtttgtaagttatagctgtaattaattttccctgtattcaaagcccccaaaccctgcattcagatactatgcatttagacttccttaggcaaagtcaaggcaacaagctgatgattctaagctattattcaaggagtatctaccatcataaaggtggtttagtcatatagataatatcaatcaataatacaggagatggcaaaaattttttgtgaagagccagatagtagctgagtatgatgacccctaatctcagcactttgggaggctgatgggagagggtcatttaagaccaggagttcaagaccagcctgggcaacattaaaaaactccatttcta

SEQ ID NO: 13170 - DNA, 459 bp, Homo sapiens
ggtggcggccgaggtcaagcttcgacccacgcgtccggggaggacctaggcaacggcctgagactccgagactctatgttgaagatgcctggactaacctactgaagatacgtggttttaccaacagccagcaccaataggaagatatgaatgaagccatctgagaccagccatctggcagccaaactgccaactgactgcaaatgcatgaatgatcccactgacaccacgtagagcacaaatgagttgcctccactgagcccagcccaaattgttatcctataaaatcataaaaacataaacagttgttttaagtcaaaaaaaaaaaaaaaaaaagtgcgacctgcccgggcggccgctctagaactagtggatcccccgggctgcaggaattcgatatcaagcttatcgataccgtcgacctcgagggggggcccggtacccagcttttgttccctt

SEQ ID NO: 13171 - DNA, 519 bp, Homo sapiens
gactactatagggcgaatcgcagctccaccgcggtggcggccgaggtattcaacaagggccctgagagagggacaggcagcccctgtgaatcttgctgttcagcagagacaggagtcagcacgtgtgagggcagcagggaagtcttcctggaggagtgagacctggcgatgaggaggcacggcagggaggtggaacaggcaggagagactcttcaggaattgaggagatagaatagaggacactaaagccttagagaggccaggggtggtggcttggcaggatcatcgcttgaggctaggagtttaaaagcagcctgggcaacatagcgagaccccatctctaaacacaaaaaataaaaacctgcccgggcggccgctctagaactagtggatcccccgggctgcaggaattcgatatcaagcttatcgataccgtcgacctcgagggggggcccggtacccagcttttgttccctttagtgagggttaattgcgcgcttggcgtaatcatggtcatag

SEQ ID NO: 13172 - DNA, 501 bp, Homo sapiens
actatagggcgaattggagctccaccgcggtggcggccgaggtcaagcttcgacccacgcgtccgtgatgctggcttcccggtcaaagctgaggagtttgtggtgctttctcaggaaccttctgtcacggaaaccattgcacccaaaattgcaagacctttcatagagactttcctcaggccctcaagagtattgagtatctggaggaggatgcccagaagtccgcacaggagggggtgctgggaccacacactgatgctctgtcatcagactctgagaacatgccgtgtgatgaagaaccatcccaattagaggagctagctgacttcatggagcagcttacaccaattgaaaaatatgctttaaattacctggaattattccatacttctattgagcaaaaaaaaaaaaaaaaagtgcggccgctctagaactagtggatcccccgggctgcaggaattcgatatcaagcttatcgataccgtcgacctcgaggggggg

SEQ ID NO: 13173 - DNA, 526 bp, Homo sapiens
agggcgaattggagctccaccgcggtggcggccgaggtcaagcttcgacccacgcgtccggaagttttcattctccctcttttttttttttttttttttagcaattcaagtcatgtttttgtctacaagtttttccagtattgtatagataaataataatttactaggctgccttgagtatactagacaagagacctgcccgggcggccgctctagaactagtggatcccccgggctgcaggaattcgatatcaagcttatcgataccgtcgacctcgagggggggcccggtacccagcttttgttccctttagtgagggttaattgcgcgcttggcgtaatcatggtcatagctgtttcctgtgtgaaattgttatccgctcacaattccacacaacatacgagccgggagcataaagtgtaaagcctggggtgcctaatgagtgagctaactcacattaattgcgttgcgctcactgcccgctttccagtcgggaaacctgtcgtgccagctgcattaatgaat

SEQ ID NO: 13174 - DNA, 526 bp, Homo sapiens
ctactatagggcgaattggagctccaccgcggtggcggccgcacttttttttttttttttacctgaaaatgcttattctagcttcacatttgattgtttggctaagaagaaaattatttattagacttaattttcctcacgagtttaaagattgcttcagatcttaaacttctaatgaggaaagctgagaagtccaatgccattctgattcttgcaacttacaagtagtctttttttgtctagacgctttcaggaccttcttttttcctcagtcagtgtatccaaaccttcacagtgatatcttttgggtacctcggccgctctagaactagtggatcccccgggctgcaggaattcgatatcaagcttatcgataccgtcgacctcgagggggggcccggtacccagcttttgttccctttagtgagggttaattgcgcgcttggcgtaatcatggtcatagctgtttcctgtgtgaaattgttatccgctcacaattccacacaacatacgagccgggagcata

SEQ ID NO: 13175 - DNA, 528 bp, Homo sapiens
tacgactactatagggcgaattggagctccaccgcggtggcggccgcactttttttttttttttttttctcttatattgaagtaaaatttaaaatttaatactttttattttttaaaagcatgtatggcatcatttcagtcttattaaattctctctgcatccattcacccatccttctttttgtgtgtgtgtgtagtggtctctgtgagagggttcattaatgtcaatcctgatcatttcttcctcaagagatgtcagtagatttgttttttttgctttggacttttatgaattgattgaatttttatgccaattatttttaaagtattacatagaagaacaaatggacagaaaaatttaaatgcaatcaaatcttgttgattttgaagtataggaaataatcttttttttattatactttaagttttagggtacctgcccgggcggccgctctagaactagtggatcccccgggctgcaggaattcgatatcaagcttatcgataccgtcgacctcgagggggggc

SEQ ID NO: 13176 - DNA, 511 bp, Homo sapiens
acgactactatagggcgaattggagctccaccgcggtggcggccgaggtactattgactaaagtcagttgggggagagagaggcggaagtatattacttttatgcttggttatactagagaacaaatagaaactgactaaagaaacattagatcagtggttctcagagtattgatatctgggagtcccagcaacagtctgaggaggttcatgagttcagaatattttgataataacactaagatggtatttactcttctaactgggtagatatttgcactggtcggccgctctagaactagtggatcccccgggctgcaggaattcgatatcaagcttatcgataccgtcgacctcgagggggggcccggtacccagcttttgttccctttagtgagggttaattgcgcgcttggcgtaatcatggtcatagctgtttcctgtgtgaaattgttatccgctcacaattccacacaacatacgagccgggagcataaagtgtaaagcctggg

SEQ ID NO: 13177 - DNA, 556 bp, Homo sapiens
cgactactatagggcgaattggagctccaccgcggtggcggccgaccagtgcaaatatctacccagttagaagagtaaataccatcttagtgttattatcaaaatattctgaactcatgaacctcctcagactgttgctgggactcccagatatcaatactctgagaaccactgatctaatgtttctttagtcagtttctatttgttctctagtataaccaagcataaaagtaatatacttccgcctctctctcccccaactgactttagtcaatagtacctcggccgctctagaactagtggatcccccgggctgcaggaattcgatatcaagcttatcgataccgtcgacctcgagggggggcccggtacccagcttttgttccctttagtgagggttaattgcgcgcttggcgtaatcatggtcatagctgtttcctgtgtgaaattgttatccgctcacaattccacacaacatacgagccgggagcataaagtgtaaagcctggggtgcctaatgagtgagctaactcacattatttgcgttgcgctcact

SEQ ID NO: 13178 - DNA, 513 bp, Homo sapiens
tactatagggcgaattggagctccaccgcggtggcggccgaggtcaagcttcgacgcgtccgatcacttttttcattgataccttattagataaaacattagccccctagagtgttttgtgaaggaaatatgcctaataagagatgatagttttagcaataaatgagcattagaactattatttattaatgaaatgaactggtggtctgaaagtgatgataaacagacaactgtggaaaatgaattattaaaattccatggaattccttttgaagtttatgaagtacctgcccgggcggccgctctagaactagtggatcccccgggctgcaggaattcgatatcaagcttatcgataccgtcgacctcgagggggggcccggtacccagcttttgttccctttagtgagggttaattgcgcgcttggcgtaatcatggtcatagctgtttcctgtgtgaaattgttatccgctcacaattccacacaacatacgagccgggagctaaagtgt

SEQ ID NO: 13179 - DNA, 501 bp, Homo sapiens
tatagggcgaattggagctccaccgcggtggcggccgaggtcttcgacccacgcgtccgcatttattaaggcttgtatatgttcaagatccagtgaagactgtcttggggctctagaactagtggatcccccgggctgcaggaattcgatatcaagcttatcgataccgtcgacctcgagggggggcccggtacccagcttttgttccctttagtgagggttaattgcgcgcttggcgtaatcatggtcatagctgtttcctgtgtgaaattgttatccgctcacaattccacacaacatacgagccgggagcataaagtgtaaagcctggggtgcctaatgagtgagctaactcacattaattgcgttgcgctcactgcccgctttccagtcgggaaacctgtcgtgccagctgcattaatgaatcggccaacgcgcggggagaggcggtttgcgtattgggcgctcttccgcttcctcgctcactgactcgctgcgctc

SEQ ID NO: 13180 - DNA, 535 bp, Homo sapiens
agggcgaattggagctccaccgcggtggcggccgcccgggcaggtacaacttgtgatgcttttggcaggaattacagaacaaccaatgccattcaagttgtggagattatactggcaggtgaactcgtaaagagaagattctggaatgcctatatctgaaagcttgagtcgacacctcggccgctctagaactagtggatcccccgggctgcaggaattcgatatcaagcttatcgataccgtcgacctcgagggggggcccggtacccagcttttgttccctttagtgagggttaattgcgcgcttggcgtaatcatggtcatagctgtttcctgtgtgaaattgttatccgctcacaattccacacaacatacgagccgggagcataaagtgtaaagcctggggtgcctaatgagtgagctaactcacattaattgcgttgcgctcactgcccgctttccagtcgggaaacctgtcgtgccagctgcattaatgaatccgccaacgcgcggggagaggcggcttgcgtattgg

SEQ ID NO: 13181 - DNA, 431 bp, Homo sapiens
actatagggcgaattggagctccaccgcggtggcggccgaggtcttcgacccacgcgtccggaatgagtgagtgcagaactggcaaccagaagacaggaacaaggcctgggaatggagcggaaaggtagctgctatatatagttccttcagccagtaacgattagagccaatagccatctggatgatgaatggctcctaattgccttaaattacggcagttagctaagggtttctgttgctacatgggttaccgtaggccgctgcaccctgcataactgtcctcaggcctgcgtcccctgagtctcagcacttgggcctccacctgcccgggcggccgctctagaactagtggatcccccgggctgcaggaattcgatatcaagcttatcgataccgtcgacctcgagggggggcccggtacccaactttt

SEQ ID NO: 13182 - DNA, 355 bp, Homo sapiens
gggcgaattggagctccaccgcggtggcggccgaggtctcccaaagtgctggaatcacaggaatgagccaccacacccagccaaattgggcacaaatttaaaatttgactgttattaatgatatggtaaagagatctagcttggtcatgacacccttgtgttatacggtgacaggcaaatcatttaaaaatatctaaactataatttcctgtagttcacatgaattggatattctgaagcgggacgcgtgggtcgactttgtaacctgcccgggcggccgctctagaactagtggatcccccgggctgcaggaattcgatatcaagcttatcgataccgtcgacctggagggggg

SEQ ID NO: 13183 - DNA, 467 bp, Homo sapiens
tggcgaattggagctccaccgcggtggcgggcgaggtcgagcttcgacccacgcgtccgattattctctccatttaggctataaatctttcagtgtagggtgtttctaatggcgtattcttccaaaaaaaaaaaaaaaaaagtgcggccgctctagaactagtggatcccccgggctgcaggaattcgatatcaagcttatcgataccgtcgacctcgagggggggcccggtacccagcttttgttccctttagtgagggttaattgcgcgcttggcgtaatcatggtcatagctgtttcctgtgtgaaattgttatccgctcacaattccacacaacatacgagccgggagcataaagtgtaaagcctggggtgcctaatgagtgagctaactcacattaattgcgttgcgctcactgcccgctttccagtcgggaaacctgtcgtgccagctgcattaatgaatc

SEQ ID NO: 13184 - DNA, 519 bp, Homo sapiens
tatagggcgaattggagctccaccgcggtggcggccgaggtactcttgatgtcataagattagaaaatgtggttaattgtcatcaacccattaagttcttaaatgtcattgaatggagtccttgtcatgttacagaggagcgtaaaattgtggttaaacatttttttaaagattacatggtagagccacagtttgttatgcagaaggaaaatttagcaaatattattttgcttaatagcctttaaaaaatcgtataaatttgatttgtagttttatccccagagtcattagatttttccaaaaaaaaaaaaaaaaaaaggtgcggccgctctagaactagtggatcccccgggctgcaggaattcgatatcaagcttatcgataccgtcgacctcgagggggggcccggtacccagcttttgttccctttagtgagggttaattgcgcgcttggcgtaatcatggtcatagcttgttcctgtgtgaaattgttatccgctcacaattccacacaacata

SEQ ID NO: 13185 - DNA, 505 bp, Homo sapiens
gggcgaattggagctccaccgcggtggcggccgcccgggcaggtgccaaagccttaacttagattgttacttatgtttctaaatctgtggaagcacatttccttttgttgttgttttcttttactgttaatatccttattctctattttaccagtggagaatgtttagtattaatttccatttagctcacgattcaagaaatgcaaagtgctatttttatcaaatttctgaaagcctactgtcttctgctttggaagtcccacaacagctctttaatttccttaagccccactttcctcatcagcaagttggtgtggcaatggatcataataggttgctgggaggatgaagtgagcggacgcgtgggtcgaagcttgtacctcggccgctctagaactagtggatcccccgggctgcaggaattctatatcaagcttatcgataccgtcgacctcgagggggggcccggtacccagcttttgttccatttagtgagggctaattg

SEQ ID NO: 13186 - DNA, 428 bp, Homo sapiens
cactactatagggcgaattggagctccaccgcggtggcggccgcactttttttgtattacttcaacttttaaaaattctaaagaaaaccatcatctcagaccagcatttccggacgcgtgggtcgaagcttgacctcggccgctctagaactagtggatcccccgggctgcaggaattcgatatcaagcttatcgataccgtcgacctcgagggggggcccggtacccagcttttgttccctttagtgagggttaattgcgcgcttggcgtaatcatggtcatagctgtttcctgtgtgaaattgttatccgctcacaattccacacaacatacgagccgggagcataaagtgtaaagcctggggtgcctaatgagtgagctaactcacattaattgcgttgcgctcactgcccgctttccagtcggg

SEQ ID NO: 13187 - DNA, 465 bp, Homo sapiens
agggcgaattggagctccaccgcggtggcggccgcccgggcaggtgtcaaacatctccctcgtccggatccttctaacgcaggagtctcagacgcaaatgccggcaagggccaggcaggtgatgtaagatgcgtggagcagatgccaagccacagggagtggtggagactggggtgaactggaaagcacctcggccgctctagaactagtggatcccccgggctgcaggaattcgatatcaagcttatcgataccgtcgacctcgagggggggcccggtacccagcttttgttccctttagtgagggttaattgcgcgcttggcgtaatcatggtcatagctgtttcctgtgtgaaattgttatccgctcacaattccacacaacatacgagccgggagcataaagtgtaaagcctggggtgcctaatgagtgagctaactcacattaattgcgttgcgctcact

SEQ ID NO: 13188 - DNA, 430 bp, Homo sapiens
actactatagggcgaattggagctccaccgcggtggcggccgcccgggcaggtacacaaaccagatgtatgcaatgatgccaaaagtcatctcaaaattccaagctgacctagtgcaacacatttacacttggataaactatcaccttgaagatttactttgtatacttcaaaagatctggtcatgaaatttttagctaatacataaagtgccgaattgaaatccagaatacaatagctatgaagggccgctagagtgcagataaccaacccattctacctaactcaggttgagattgctttagaacctatcattggctttaaaatggtccacaaaaaaacacctcatggtcacacttaaaatagtttgcatcccacactacaggcttctctggaggatttaatactttggaagtagcatcataagccct

SEQ ID NO: 13189 - DNA, 453 bp, Homo sapiens
gagctccaccgcggtggcggccgcccgggcaggtgtaaacatctccctcgtccggatccttctaacgcaggagtctcagacgcaaatgccggcaagggccaggcaggtgatgtaagatgcgtggagcagatgccaagccacagggagtggtggagactggggtgaactggaaagcacctcggccgctctagaactagtggatcccccgggctgcaggaattcgatatcaagcttatcgataccgtcgacctcgagggggggcccggtacccagcttttgttccctttagtgagggttaattgcgcgcttggcgtaatcatggtcatagctgtttcctgtgtgaaattgttatccgctcacaattccacacaacatacgagccgggagcataaagtgtaaagcctggggtgcctaatgagtgagctaactcacattaattgcgttgcgctcact

SEQ ID NO: 13190 - DNA, 500 bp, Homo sapiens
agggcgaattggagctccaccgcggtggcggccgcccgggcaggtacataatatacagaggtataatctgtaacatcaataatgtaaagtggggaagggcaaggtggaaaaggagtagaatgcttgtatgtgactaaaattatgttggtatcagtttaaaatatattattataactttagaatgctatacccattcccacagtaattcccatagtaaccaaaaagaaaatatctgtaggatacacacaaaagaaaatcagaagtagatgcaaacttgtcactacaggaaaaaaaaagctatcaaaatagaaaacaataatggagaaaataagacaccaaaagctataagactcacagaaaataaataataaaatggcaaaaagaagcggacgcgtgggtcgaagacctcggccgctctagaactagtggatcccccgggctgcaggaattcgatatcaagcttatcgataccgtcgacctcgagggggggcccggtaccc

SEQ ID NO: 13191 - DNA, 457 bp, Homo sapiens
gggcgaattggagctccaccgcggtggcggccgaggtgtacaagcttcgacccacgcgtccgatttggcagaaattcagggtaatgtcaaggttcttaaatctgagagagacaagatcttccttctttatgaacaggcacaggaagaaattacccgacttcgacgagaaatgatgaaaagctgtaagagtcctaaatcaacaacggcacatgctattctccggcgagtggagactgaaagagatgtagcctttactgatttacgaagaatgaccacagaacgagatagtctaagggagaggctaaagattgctcaagagacagcatttaatgagaaggctcacctggaacaaaggatagaggagctggagggcctgcccgggtggccggttcgggccgccccgggcaggtcagatgattgcagaatttatgtgattactgggtactctaatggtaag

SEQ ID NO: 13192 - DNA, 450 bp, Homo sapiens
  misc_feature 383: n = A,T,C or G
gggcgaattggagctccaccgcggtggcggccgcccgggcaggtacttactgagccacttacaattatttctgaaaaatctcagagaactgaggatagatcagaaaatttaaagaaagcaaataccaaattttcaaaccaggataggaagtgaataccttgtaaatacactttgttaagtgatgataattctgagtaaaaatttagaagattttgagaaaagcatttgaacttctaggggccaataaaataccatgcagaagaatgtttaaaaagtcatgccaaatttgaatccatttgatcctcaacctcatcagatgttatatgccaaactacttattttggcttagataataatcatatagaatgaaactttccacaaantagactgtgtcagtggctggctacttctaacaaggtgcccggacgcgtgggtccgactcaagacctc

SEQ ID NO: 13193 - DNA, 540 bp, Homo sapiens
ctactatagggcgaattggagctccaccgcggtggcggccgcccgggcaggtcaagcttcgacccaccgtccggcaatgatgagcaaaaacaagtttggtccccctgttatagagcctggtaaaggtttttgttgttgttttgcaggggtgggggaaccaggaaatcagatcatcacaacaatatatacttatctgtaactatggtaactgctacagcaaaggggcgtatcatactattagcatactaagtttcacttaaagaggtcggagcggccgctctagaactagtggatcccccgggctgcaggaattcgatatcaagcttatcgataccgtcgacctcgagggggggcccggtacccagcttttgttccctttagtgagggttaattgcgcgcttggcgtaatcatggtcatagctgtttcctgtgtgaaattgttatccgctcacaattccacacaacatacgagccgggagcataaagtgtaaagcctggggtgcctaatgagtgagctaactcacattaattgcgttgcgc

SEQ ID NO: 13194 - DNA, 496 bp, Homo sapiens
cgaattggagctccaccgcggtggcggccgcccgggcaggtgtcaaacatctccctcgtccggatccttctaacgcaggagtctcagacgcaaatgccggcaagggccagggaggtgatgtaagatgcgtggagcagatgccaagccacagggagtggtggagactggggtgaactggaaagcacctcggccgctctagaactagtggatcccccgggctgcaggaattcgatatcaagcttatcgataccgtcgacctcgagggggggcccggtacccagcttttgttccctttagtgagggttaattgcgcgcttggcgtaatcatggtcatagctgtttcctgtgtgaaattgttatccgctcacaattccacacaacatacgagccgggagcataaagtgtaaagcctggggtgcctaatgagtgagctaactcacattaattgcgttgcgctcactgcccgctttccagtcgggaaacctgtcgtgccagc

SEQ ID NO: 13195 - DNA, 422 bp, Homo sapiens
gcgaattggagctccaccgcggtggcggccgcccgggcaggtcaagcttcgacccacgcgtccgtgataacttctcctaagtgccaggcattgtattacatgttgggagcacgaagatgaataataacaataggttcacagaaaagatgaattgattgagagaaaaagaaccctccaggagccctcagcgtagtagggggttggtgttggagggtggaggaatggaaaaggccctgaaatgcaggcagagaaatgatgaaacaattcaggggctgtggtgaggttaaatgaatatctttacagcagcctcgaagactgatcaggttactataccctctcttctgtccacgtgcatttcaaaaacctcggccgctctagaactagtggatcccccgggctgcaggaattcgatatcaagctta

SEQ ID NO: 13196 - DNA, 419 bp, Homo sapiens
actatagggcgaattggagctccaccgcggtggcggccgcccgggcaggtcaagcttcgacccaccgtccggcaatgatgagcaaaaacaagtttggtccccctgttatagaggctggtaaaggtttttgttgttgttttgcaggggtgggggaaccaggaaatcagatcatcacaacaatatatacttatctgtaactatggtaactgctacagcaaaggggcgtatcatactattagcatactaagtttcacttaaagaggtcggagcggccgctctagaactagtggatcccccgggctgcaggaattcgatatcaagcttatcgataccgtcgacctcgagggggggcccggtacccagcttttgttccctttagtgagggttaattgcgcgcttggcgtaatcatggtcatagc

SEQ ID NO: 13197 - DNA, 416 bp, Homo sapiens
tatagggcgaattggagctccaccgcggtggcggccgcccgggcaggtacactccagctcctctatcccttgttccaggtgagccttctcattaaatgctgtgtcttgagggagtctttagcctctcccttagactatctcgttctgtggtcattcttcgtaaatcagtaaaggctacatctctttcagtctccactcgccggagaatagcatgtgccgttgttgatttaggactcttacagcttttcatcatttctcgtcgaagtcgggtaatttcttcctgtgcctgttcataaagaaggaagatcttgtctctctcagatttaagaaccttgacattaccctgaatttctgccaaatcggacgcgtaggtcgaagcttgtacacctcggccgctctagaactagtggatcccc

SEQ ID NO: 13198 - DNA, 329 bp, Homo sapiens
gcgaattggagctccaccgcggtggcggccgcccgggcaggtacgatttaaaatctcctcctcctacagcggtcgagtattgaagcaggtctttgaggatgggcgggaattagagtcaccaaaggaggaataccctcacagttttctgcaagagtctcttgaaacaatggatggtgtttatgggtctggggaagaccccacgccccagatgtgctcccctaagctgactgctcataggatcagtgtgtttagagagggtaatgcctacacctcggccgttctagaactagtggatcccccgggctgcatgaattcgatatcaagcttat

SEQ ID NO: 13199 - DNA, 598 bp, Homo sapiens
agggcgaattggagctccaccgcggtggcggccgaggtacacacaaacacacacacaaagtttaatatactttttaaaaaattttattgtattgttttcttgaaatagggtcttgctatgttgcctaggctggtcttgaactcctgggattaagcaatcctcccaactaagccttccaaaatgctggcattacaggtgtgagctaccacaatcagtctcttagattttgttttttaagaacaattcgaagtttactgcaaaattgtgaagaacgaacagactgttcccacatatccctttttctttacacaccggacgcgtgggtcgaagcttgacctgcccgggcggccgctctagaactagtggatcccccgggctgcaggaattcgatatcaagcttatcgataccgtcgacctcgagggggggcccggtacccagcttttgttccctttagtgagggttaattgcgcgcttggcgtaatcatggtcatagctgtttcctgtgtgaaattgttatccgctcacaattccacacaacatacgagccgggagcataaagtgtaaagcctggggtgcctaatgagtgagctaactcac

SEQ ID NO: 13200 - DNA, 509 bp, Homo sapiens
ctatacggcgaattggagctccaccgcggtggcggccgcccgggcaggtcaagcttcgacccacgcgtccggcttgaggtgggtttaggaaacatttggtatgggtggcagggacagatgttgacctggccggtcggcagcttttacaaacctaaggacttcagggtccggttgcgcatgaggaccggggaggacagagctgtttgcaataggtgtgggcttttatagcattgtgagcatttcacgttagcgtaagtgttgctgctgtgcaggtggtctctggggcttacaatcttccccaatgttcttccccacccctcccaccattctggtgaacaagcctcttgggattctttgaaaaaaaaaaaaaaaaaaacctcggccgctctagaactagtggatcccccgggctgcaggaattcgatatcaagcttatcgataccggcgacctcgagggggggcccggtacccagcttttgttccctttagtgagggttaattgcgcgctt

SEQ ID NO: 13201 - DNA, 486 bp, Homo sapiens
cgaattggagctccaccgcggtggcggccgcccgggcaggtacataatatacagaggtataatctgtaacatcaataatgtaaagtggggaagggcaaggtggaaaaggagtggaatgcttgtatgtgactaaaattatgttggtatcagtttaaaatatattattataactttagaatgctatacccattcccacagtaattcccatagtaaccaaaaagaaaatatctgtaggatacacacaaaagaaaatcagaagtagatgcaaacttgtcactacaggaaaaaaaaagctatcaaaatagaaaacaataatggagaaaataagacaccaaaagctataagactcacagaaaataaataataaaatggcaaaaagaagcggacgcgtgggtcgaagacctcggccgctctagaactagtggatcccccgggctgcaggaattcgatatcaagcttatcgataccgtcgacctcgaggggggg

SEQ ID NO: 13202 - DNA, 376 bp, Homo sapiens
ggtggcggccgcccggccaggtacaggcacctatagaatttaaaggggagatttctttattttgtattcaatgtattaataagattgtgaaaacatattttggagaaattgctaattagtgtataatcctgatgccaattctaaaaaaccttttttttttttgtagagacagggtcttattctgtcacccgggctggagtgctctggtatgatcctagttcactgcaacctcaaatacctggtctcaagcaatcctcccacctcagcctccccagtagctgtctctataagcatgcaccaccacacctggctaaccttcttattatttttggtagagacagtctcactatgttgcccaggctggtcttgaacttct

SEQ ID NO: 13203 - DNA, 503 bp, Homo sapiens
agggcgaattggagctccaccgcggtggcggccgaggtattcaacaagggccctgagagagggacaggcagcccctgtgaatcttgctgttcagcagagacaggagtcagcacgtgtgagggcagcagggaagtcttcctggaggagtgagacctggcgatgaggaggcacggcagggaggtggaacaggcaggagagactcttcaggaattgaggagatagaatagaggacactaaagccttagagaggccaggggtggtggcttggcaggatcatcgcttgaggctaggagtttaaaagcagcctgggcaacatagcgagaccccatctctaaacacaaaaaataaaaacctgcccgggcggccgctctagaactagtggatcccccgggctgcaggaattcgatatcaagcttatcgataccgtcgacctcgagggggggcccggtacccagcttttgttccctttagtgagggttaattgcgcgcttggcgtaatcatg

SEQ ID NO: 13204 - DNA, 540 bp, Homo sapiens
agggcgaattggagctccaccgcggtggcggccgcccgggcaggtaccagtagcaacatatgagtatttctctagataactttttttttgacaaggtctcactctgttgcccaggctggagtgcaatggtgcaatcttggctcactgcagccttgaccttccctagctcagctgaacctcccatctcaggacaccattgcctccactgcccatcctgcatctgcctgcctaccccaaaagtgttgagaatacaagcatgagccagagccacggaacctggcctctagagagactttctattttagttttttcttctcttatttgtgaagccttgaaaaaactactgtggtttatttagattctggtttgtgacttttttaaataaactttttattttggaataaatttatgtttagagaatagttgcaaacataataaagtgagttttcataaacgccttaccagtttcccctgttgttaacattttacatcaccatgcttgtgcattggtcaaaactaagaaactaacatggctggatg

SEQ ID NO: 13205 - DNA, 475 bp, Homo sapiens
ctactatagggcgaattggagctccaccgcggtggcggccgaggtcttcgacccacgcgtccgcatttattaaggcttgtatatgttcaagatccagtgaagactgtcttgggcgtgtataattgatcttaaccacaaggctgagaagttatgtgcagggcttatgatgctacttccaaagtattaaatcctccagagaagcctgtagtgtgggatgcaaactattttaagtgtgaccatgaggtgtttttttgtggaccattttaaagccaatgataggttctaaagcaatctcaacctgagttaggtagaatgggttggttatctgcactctagcggcccttcatagctattgtattctggatttcaattcggcactttatgtattagctaaaaatttcatgaccagatcttttgaagtatacaaagtaaatcttcaaggtgatagtttatccaagtgtaaatgtgttgcact

SEQ ID NO: 13206 - DNA, 365 bp, Homo sapiens
ggcggcggccgctcgaggccgcccgggcaggtacacaaaccagatgtatgcaatgatgccaaaagtcatctcaaaattgcaagctgacctagtgcaacacatttacacttggataaactatcaccttgaagatttactttgtatacttcaaaagatctggtcatgaaattttgagctaatacataaagtgccgaattgaaatccagaatacaatagctatgaagggccgctagagtgcagataaccaacccattctacctaactcacgttgagattgctttagaacctatcattggctttaaaatgggccacaaaaaaacaccttatggtcacacttaaaatagtttgcatcccacactacaggc

SEQ ID NO: 13207 - DNA, 568 bp, Homo sapiens
ctcactacttagggcgaattggagctccaccgcggtggcggccgaggtaccctaaaacttaaagtataatagtaataataaaaaaagaggtgcttttctcctaagtcaacattttagaggaaaagagtcaattcaagcaattatcacatatgtgtaactgaagcacatatgtgtaacttttcaagagtgattagatggtctgttgtctttgaagtgatagtcaaatatcaggtgtgttctagggaggttgtgtaagacttttgcttgtattctcccggacgcgtgagtcgactcaagacctgcccgggcggccgctctagaactagtggatcccccgggctgcaggaattcgatatcaagcttatcgataccgtcgacctcgagggggggcccggtacccagcttttgttccctttagtgagggttaattgcgcgcttggcgtaatcatggtcatagctgtttcctgtgtgaaattgttatccgctcacaattccacacaacatacgagccgggagcataaagtgtaaagcctggggtgcctaatgagtgagctaactcacattaatt

SEQ ID NO: 13208 - DNA, 476 bp, Homo sapiens
ctactatagggcgaattggagctccaccgcggtggcggccgaggtcaagcttcgacccacgcgtccgattattctctccatttaggctataaatctttcagtgtagggtgtgtctaatgtcatattcttccaaaaaaaaaaaaaaaaaagtgcggccgctctagaactagtggatcccccgggctgcaggaattcgatatcaagcttatcgataccgtcgacctcgagggggggcccggtacccagcttttgttccctttagtgagggttaattgcgcgcttggcgtaatcatggtcatagctgtttcctgtgtgaaattgttatccgctcacaattccacacaacatacgagccgggagcataaagtgtaaagcctggggtgcctaatgagtgagctaactcacattaattgcgttgcgctcactgcccgctttccagtcgggaaacctgtcgtgccagctgcattaatgaatcg

SEQ ID NO: 13209 - DNA, 533 bp, Homo sapiens
tcactatagggcgaattggagctccaccgcggtggcggccgcccggcaggttacaagtcgacccacgcgtccgcttcagaatatccaattcatgtgaactacaggaaattatagtttagatatttttaaatgatttgcctgtcaccgtataacacagagggtgtcatgaccaagctagatctctttacatatcattaataaaagtcaaattttaaatttgtgcccaatttggctgggtgtggtggctcattcctgtgattccagcactttgggagacctcggccgctctagaactagtggatcccccgggctgcaggaattcgatatcaagcttatcgataccgtcgacctcgagggggggcccggtacccagcttttgttccctttagtgagggttaattgcgcgcttggcgtaatcatggtcatagctgttccctgtgtgaaattgttatccgctcacaatttcacacaacatacgagccgggagcataaagtgtaaagcctggggtgcctaatgagtgagctaactcaca

SEQ ID NO: 13210 - DNA, 518 bp, Homo sapiens
gcgtaatacgactcactatagggcgaattggagctccaccgcggtggcggccgcccgggcaggtacacaaaccagatgtatgcaatgatgccaaaagtcatctcaaaattccaagctgacctagtgcaacacatttacacttggataaactatcaccttgaagatttactttgtatacttcaaaagatctggtcatgaaatttttagctaatacataaagtgccgaattgaaatccagaatacaatagctatgaagggccgttagagtgcatataaccaacccattctacctaactcaggttgagattgctttagaacctatcattggctttaaaatggtccacaaaaaaacacctcatggtcacacttaaaatagtttgcatcccacactacaggcttctctggaggatttaatactttggaagtagcatcataagccctgcacataacttctcagtcttggggttaagatcaattatacacgcccaagacagtcttcactggatcttgaacatata

SEQ ID NO: 13211 - DNA, 445 bp, Homo sapiens
gactactatagggcgaattggagctccaccgcggtggcggccgaccgccaggtaccaagattaaggacagagttccctccattggtcattgatttggaaaccaaaatgtatctgtgacaggtattaatccggacgcgtggtcgaagacgaaaggacacgagaaatagggacctagtcccgtctagaactaggaatccccagggctgcaggaattcgatatcaagcttatcgataccgtcgacctcgagggggggcccggaacccagcttttgttccctttagtgagggttaattgcgcgcttgacgtaatcatggtcatagctggttcctgtgtgaaattgttatccgctcacaattccacacaacatacgagccgggagcataaagtgtaaatcctgcggtgcctaatgagtgagctaactcacattaattgcgttgcgctcac

SEQ ID NO: 13212 - DNA, 389 bp, Homo sapiens
gcgtaatacgactcactatagggcgaattggagctccaccgcggtggcggccgcccgggcaggtgccaaagccttaacttagattgttacttatgtttctaaatctgtggaagcacatttccttttcttcttcttttcttttactgttaatatccttattctctattttaccagtggagaatgtttagtataatttccatttagctcaagattcaagaaatgcaaagtgctatttttatcaaatttctgaaagcctactgtcttctgctttggaagtcccacaacagctctttaattttcttaagccccactttcctcatcagcaagttggtgtggcaatggatcataataggttgctgagaggatgaagtgagcggacgcgtgggtcg

SEQ ID NO: 13213 - DNA, 514 bp, Homo sapiens
gactcactatagggcgaattggagctccaccgcggtggcggccgcccggcaggtacccttattttccctgatacagcacaactctgcctattctaatcatgacctagacacattcaatgaactacaagttctcctttacacggacgcgtgggtcgactccggacgcgtgggtcgaagacctcggccgtctgaactagtggatcccccgggctgcaggaattcgatatcaagcttatcgataccgtcgacctcgagggggggcccggtacccagcttttgttccctttagtgagggttaattgcgcgcttggcgtaatcatggtcatagctgtttcctgtgtgaaattgttatccgctcacaattccacacaacatacgagccgggagcataaagtgtaaagcctggggtgcctaatgagtgagctaactcacattaattgcgttgcgctcactgcccgctttccagtcgggaaacctgtcgtgccagctgcattaatgaatcggccaacgcgcg

SEQ ID NO: 13214 - DNA, 394 bp, Homo sapiens
cgcgcgtaatacgactcactatagggcgaatggagctcaccgcgtggcggccgaggtcttcgacccacgcgtccgctttcttttgttgttaaggacccatgacctgcagtttccctaacattcatttttatacagggcagaggtatgtgtgcgagctcagataccttaaattcatatgcctttaatacaatcaggcagatttctaaatgagggatgcttccccacaaatggagagtgaaagtgggccagcctaaaaggacctccatagcactgtgcatggccagctgtttgtggctgtacctgcccgggcggccgctctagaactagtggatcccccgggctgcaggaattcgatatcaagcttatcgataccgtcgacctcgagggggggccc

SEQ ID NO: 13215 - DNA, 498 bp, Homo sapiens
  misc_feature 141, 142, 161: n = A,T,C or G
gactactatagggcgaattggagctccaccgcggtggcggccgcccgggcaggttacaagtcgacccacgcgtccgcttcagaatatccaattcatgtgaactacaggaaattatagtttagatatttttaaatgatttgnncctgtcaccgtataacacnaagggtgtcatgaccaagctagatctctttaccatatcattaataaaagtcaaattttaaatttgtgcccaatttggctgggtgtggtggctcattcctgtgattccagcactttgggagacctcggccgctctagaactagtggatcccccgggctgcaggaattcgatatcaagcttatcgataccgtcgacctcgagggggggcccggtacccagcttttgttccctttagtgagggttaattgcgcgcttggcgtaatcatggtcatagctgtttcctgtgtgaaattgttatccgctcacaattccacacaacatacgagccgggagcataa

SEQ ID NO: 13216 - DNA, 538 bp, Homo sapiens
acgactactatagggcgaattggagctccaccgcggtggcggccgaccagtgcaaatatctacccagttagaagagtaaataccatcttagtgttattatcaaaatattctgaactcatgaacctcctcagactgttgctgggactcccagatatcaatactctgagaaccactgatctaatgttctttagtcagtttctatttgttctctagtataaccaagcataaaagtaatatacttccgcctctctctcccccaactgactttagtcaatagtacctcggccgctctagaactagtggatcccccgggctgcaggaattcgatatcaagcttatcgataccgtcgacctcgagggggggcccggtacccagcttttgttccctttagtgagggttaattgcgcgcttggcgtaatcatggtcatagctgtttcctgtgtgaaattgttatccgctcacaattccacacaacatacgagccgggagcataaagtgtaaagcctggggtgcctaatgagtgagctaactcacatt

SEQ ID NO: 13217 - DNA, 541 bp, Homo sapiens
actatagggcgaattggagctccaccgcggtggcggccgagtgtaagcttcgacccacgcgtccgaaagagacccctgggctagggagccatttgcaagtccctcagatggcctcaggtgtgggtcatgctccactgcagccatggttactgggaagccaagtggactccatggggctccaagcaggggagggagctcctgggagacacagtgtggcccagatgccctggtcatggggacatccaagcacaggtgagaaacttgggcagggagggtgcagaggaaatttggaaatggctgagaggctggactcaaggtctcttgggcttgaactgagctcaagcagtccacccacttcagcttcccagggtgctgggattacagtcgtgagccatggcatccggctggactcaaggtctcttgttccctgatcctgggcttggcatggagaagggaggaagctgaagggggcaggtaaaaagatgcctacctgggcactgtagactaaatgaaccctcagactgtgaaagtctcagaaatc

SEQ ID NO: 13218 - DNA, 493 bp, Homo sapiens
  misc_feature 183, 356: n = A,T,C or G
actcactatagggcgaattggagctccaccgcggtggcggccgaggtacaagcttcgacccacgcgtccgattataccctaaaaaagtagaaagatggaataattaggagtaaaattagtgaaatggaaagatatgttatagaaaggaccaagaaacgcaaaagttggttatttgaaaagacntgaaaaaattcaatgaacctgtgaaaacagtggtcaagaagaaaagagaggcatattttgatctctgttttacatgttactcaatgttcattgctgcctcccttgtccataaagtgcctttagtgtgtatgttactttagattatcttggtgtcatcaagctttactcagcanagaaccactttgttgtctactttaaaacatagttatctttaaaagaatgggtatctttatagttccatattaatggcgagaaactgcaggtaacagtgccttaccagctggttttgctaacttttctctattttgta

SEQ ID NO: 13219 - DNA, 524 bp, Homo sapiens
  misc_feature 201, 202, 238, 255, 295, 329: n = A,T,C or G
gcgcgcgtatacgactcactatagggcgaattggagctccaccgcggtggcggccgcccgggcaggttttatatttttttcctctttaaaaaataatttggttttgaatattaaatttacatatttctaagttaaatcaacattcgtagaggaattatcaaaaaaaactagtaagtctgaaaaaaaaaccatattttatannttctgaggtcccggacgccgtgggtcgaagcttgancctcggcccgctctagnaaactagtggatcccccgggctggcaggaattcgatatcnaagcttatcgatacccgtcgaccctcgagggggnggcccggtaccccagcttttgttccctttagtgagggttaattgcgcgcttggcgtaatcatggtcatagctgtttcctgtgtgaaattgttatccgctcacaattccacacaacatacgagccgggagcataaagtgtaaagcctggggtgcctaatgagtgagctaactcacattaattgcgttgcgctcact

SEQ ID NO: 13220 - DNA, 614 bp, Homo sapiens
actatagggcgaattggagctccaccgcggtggcggccgcccggcaggtacccaacacaaactattcaataaagtaatctgctttaaaaataaaacacactgaaaggccgaggcaggtggatcacctgacatcattagttcaagaccagtgtggccaaactggtgaaaattagtctcgactaaaaatacaacattagctgggcgtggtggcaggcgcctctaattccagctactcaggaggatgaggcaggagaatcacttgaagcaaggaggtggaagttgcagtgagctgagatcgtgccattgcactgcagcctgggcaacagagtgagactccgtctcaaaaacaccaccaccaacaaaataaacacaacagaattattctgcaaatacagatattggagtagctgagttccatctcaaatttgactatgcaggttgacaggtgatcttggcaaactacttatcctttctgaagttcaactttttcaccaaatggtattgggatacaacacttgctcttgcctatctcacatgaattatccattttggacaacttggtaaactataacccaccaaacgaatacacagagtaaaatcggacgcgtgggtcg

SEQ ID NO: 13221 - DNA, 533 bp, Homo sapiens
gactactatagggcgaattggagctccaccgcgtgtggcggccgaggtacccaaaagatatcactgtgaaggtttggatacactgactgaggaaaaaagaaggtcctgaaagcgtctagacaaaaaaaggactacttgtaatgttgcaaggaaatcagaatgggcattggacttctcagctttcctcattagaagttagatctgaagcaatctttaaactcgtgaggaaaattaagtctaataaataattttcttcttagccaaacaatcaaatgtgaagctagaataagcattttcaggtaaaaaaaaaaaaaaaaaaagtgcggccgctctagaactagtggatcccccgggctgcaggaattcgatatcaagcttatcgataccgtcgacctcgagggggggcccggtacccagcttttgttccctttagtgagggttaattgcgcgcttggcgtaatcatggtcatagctgtttcctgtgtgaaattgttatccgctcacaattccacacaacatacgagccgggagca

SEQ ID NO: 13222 - DNA, 532 bp, Homo sapiens
  misc_feature 379: n = A,T,C or G
ctcactatagggcgaattggagctccaccgcggtggcggccgaggtactctacagcatcctgataacagcctctgccctgggaaacagactgtgaccatgcatttctagtccagcatatcctatcagaagaccaaatggcttcatcaaaaacagagtgacaacctcttctctttgcctcttctgctgacttgttaacaggcagcattggggcaggagagcctgcaggcctttcacggctgcttgagttctcacctgtttgtctgagctctgattcctctgccctgtaagcgtaaaggagatgtgctgagtggaaagacctctaaacaggcagccaggaagccagatttcaggtccatctctgcctctaactggcagctntgccttgggtaaatcatcagtgggcaatagtttctctcctgtaaaaggaaaagattgggtttagattgtttctgaagttctctctagatttaacctggaaggagttgaaattgctaaccttactcttaactgcaccattgcccagtccccagc

SEQ ID NO: 13223 - DNA, 614 bp, Homo sapiens
actatagggcgaattggagctccaccgcggtggcggccgcccgggcaggtacaacattttacatttccagggactgcaaaaatgttagttccttcccccatcatttagtttgaaaattcttagataattctttgctggtaaattccaacagaatagttagcacacaggttccacacacacaagttctagataggaatctgaagcaccacaatgaaaagaacatttaacatcttttaaaaatgtttaatgttatcagaaagatgtttggtatatgtgttccatgcatgctcctgctggttctatttgaaaaagaagtttttacagttatctgttgtcaccatattgtaaacggacgcgtgggtcgaagacctcggccgctctagaactagtggatcccccgggctgcaggaattcgatatcaagcttatcgataccgtcgacctcgagggggggcccggtacccagcttttgttccctttagtgagggttaattgcgcgcttggcgtaatcatggtcatagctgtttcctgtgtgaaattgttatccgctcacaattccacacaacatacgagccgggagcataaagggtaaagcctggggtgcctaatgagtga

SEQ ID NO: 13224 - DNA, 552 bp, Homo sapiens
  misc_feature 524: n = A,T,C or G
ctactatagggcgaattggagctccaccgcggtggcggccgcccggcaggtacaataaatagcattcccacggtgaccacaagtcttggaatcagttccaggtgtcgtcgtggccgttgacaccgctgccttctgacggtaaatgtattgtagaattcatgttgttatcaggcttcagtttcctcatctctaaaatgagaggattggataagttagtagtttctaatttttacttttaatcagtggcatctcccatttatttttcatttgaaataaaacttttgaattttatcttctacctaaataacatattttgttttatgtttcaagatgaagctcacactgagttggaaaaaaggaaaaagcaaaggatcaaagctgggggaaaatactggaccatgtgcttcacctcatggtgccaaataaagagaaaatggggagaagatagggacagataaagatctatttgctcggattgtgctctcatccttggcaacatgttgacaatgccctggaaataactngtttttcttgcaacatttctccagtctg

SEQ ID NO: 13225 - DNA, 635 bp, Homo sapiens
cgcgcgtaatacgactcactatagggcgaattggagctccaccgcggtggcggccgagagctccaggacgaaggtataaacacagcagagggcagagcctgatttcaatcaggggctactctaagaaaggcaggaaactagataaatacatttaaaagaaattcctcagtggcagggacagtagagcagcagggggtagatcccagcacggacaggtaacagtgtgatgtggcagaaaggctttggttgcaagtggagaacagatgtctctggctgcctctggcagctgcctccttctgggccttgacttttcaaagccaggccaggcctcccccaccctggaccacctgtagctggttcagaaggccccaggctgggcttcatagatgaagacacagctgactcagtctctggctctgtcggctcttggccaccttgccgctcccataacggtgtttctcaggtcaacccctcttctccattcctacttcaatgacctcaggtcaggcccttgccacttctctcctggacaaagatgacagcccttcactggtatcctcgtctccaacctaatttatccttcacagtgctgtcagagtgacatctctaaaacacacaacgaccccaatttaata

SEQ ID NO: 13226 - DNA, 451 bp, Homo sapiens
gactactatagggcgaattggagctccaccgcggtggcggccgaggtccgcacttttttttttttttttttatttttactccagaattttcctttaatatttaggactccaatctttacttacaaaatagcttttatttacgtgcacatgatcgtggtttcaaaattttctaagcactatgctaaattgatcatcaaaacataacagattcccatcttacaaacatagttgctagttgaatgagtaaaagagatttcaaatttcaattcaaggaggcatgtctaaaagaccagaccattcatttgatgaaattgtaaatgccgatcatccaacttaacaggaactgcacatttgttcctttctagttagaaaaaaataaaatgttgccagttaatagagcagatctctctgtggaaatatgtagccgaggttcgagttgtttgcaaataaa

SEQ ID NO: 13227 - DNA, 469 bp, Homo sapiens
cgcgtaatacgactactatagggcgaattggagctccaccgcggtggcggccgcccgggcaggtcttcgacccacgcgtccgtgattgcctattgtttgttgattgactgatttatgcctctaagaggaactatcttttgataatattaaataagatgtcctaatacaaaactgatagagttcagaaataataagaatctcctggccaggcgtggtggctcacgcctttaatcccagcactttggaaggctgaggtgggcggatcacgagatcaggagattgagaccatcctggctagcatggtgaaaccctgtctctactaaaaatacaaaaaaaattagccgggtgtgatggcgacctcggccgctctagaactagtggatcccccgggctgcaggaattcgatatcaagcttatcgataccgtcgacctcgagggggggcccggtacccagcttttgttcccttta

SEQ ID NO: 13228 - DNA, 361 bp, Homo sapiens
actatagggcgagcgcgtaatacgactactatagggcgaattggagctccaccgcggtggcggccgcccgggcaggtacagaaaggacaaatacatcagtagaaaagaagacaatataagggcagattgaaatatatacgtgaacgtcacaaagaccaattactgccatttcaattcaatgaggaaataatgatgtatttaataaatagtgctagaatgctgcattatctgtctaggatgaaaaaaaaaaaaaaaaaaaagtgcggccgctctagaactagtggatcccccgggctgcaggaattcgatatcaagcttatcgataccgtcgacctcgagggggggcccggtacccaacttt

SEQ ID NO: 13229 - DNA, 429 bp, Homo sapiens
ctactatagggcgcgcgcgtaatacgactcactatagggcgaattggagctccaccgcggtggcggccgaggtggaatgtctgttttcacaaaattttgtattttctcctaatagtatgaggtagaagaaatctacatcttctcaagtgagcttatgattaactcgatgagttttcttgctattctcaaatcggaatctccagacctggctagaaactaaagtctaagcccattcattaaagtcttgaatttatttacttttgccaagaacagctatataaaattagattcctcctggtataaaattgggtgttttcttagatatttgctatcaaaagtcatttttcttggaaatcggacgcgtgggtcgaagcttgtacacctgcccgggcggccggccgcacttttttttttttttttttttttttt

SEQ ID NO: 13230 - DNA, 452 bp, Homo sapiens
gactcactatagggcgaattggagctccaccgcggtggcggccgcccgggcaggtactgaaagcatacaactgagggttcacggatttctaagaaatgcatttcccttgtctatgttcatcagcctttaatactttggctacaaggcatatcagagaaagggaggttaaattgggtaatgacaaaagaacatatgtaactctggaaataggaaaaatgttccagaaatgggatcaatgtgccagcaataagcatagttcatttcatttgaaaattcagttaaagagcccaataaacagttccaaaccggacgcgtgggtcgaagacctcggccgctctagaactagtggatcccccgggctgcaggaattcgatatcaagcttatcgataccgtcgacctcgagggggggcccggtacccagcttttgttccctttagtgagggttaattgc

SEQ ID NO: 13231 - DNA, 499 bp, Homo sapiens
ctatcactactatagggcgaattggagctccaccgcggtggcggccgaggtgtcgactcaagctttcagatataggcattccagaatcttctctttacgagttcacctgctagtataatctccacaacttgaatggcattggttgttctgtaattcctgccaaaagcatcacaagttgtacctgcccgggcggccgctctagaactagtggatcccccgggctgcaggaattcgatatcaagcttatcgataccgtcgacctcgagggggggcccggtacccagcttttgttccctttagtgagggttaattgcgcgcttggcgtaatcatggtcatagctgtttcctgtgtgaaattgttatccgctcacaattccacacaacatacgagccgggagcataaagtgtaaagcctggggtgcctaatgagtgagctaactcacattaattgcgttgcgctcactgcccgctttccagtcgggaaacctgtcgtgccagc

SEQ ID NO: 13232 - DNA, 513 bp, Homo sapiens
  misc_feature 491: n = A,T,C or G
gactcactatagggcgaattggagctccaccgcggtggcggccgaggtaatagctaatgcatgcagggcttaataccgaggtgatgggatacttcatgctaactgggtgttccttagtgtaataattgactgcctgctcccatgtggcctcacagagtcatagcttcttgccccaaatgtttttctggttttctgtggagccatacagaaccataaagagaagttgttgagaaaccggtttgactttcaagtctgatgaggagcctggtttccatgagattttcagctaagttagcatatttttaaaaatttcaaaatgaacagaggaaaggttgacgatctttagagccttctgccaggctgaagtgttctgcatcttccctagacccggtacctgcccgggcggccgctctagaactagtggatcccccgggctgcaggaattcgatatcaagcttatcgataccgtcgacctcgagggggggcccggnacccagcttttgttccctttag

SEQ ID NO: 13233 - DNA, 335 bp, Homo sapiens
tacgactcactatagggcgaattggagctccaccgcggtggcggccgcccgggcaggttacaagcttcgacccacgcgtccgggaaattttaattaaaaataggtgaacattttaaatgacctaatacatatttagtccacattgaaactttggcattttgtcattgccattaaaattttgatggcattaaaatttgatgccattaaaattttgatcgctctagaactagtggatcccccgggctgcaggaattcgatatcaagcttatcgataccgtcgacctcgagggggggcccggtacccagcttttgttccctttagtgagggttaattg

SEQ ID NO: 13234 - DNA, 461 bp, Homo sapiens
gactcactatagggcgaattggagctccaccgcggtggcggccgcccgggcaggtcaagcttcgacccacgcgtccgtgataacttctcctaagtgccaggcattgtattacatgctgggagcacaaagatgaataataacaataggttcacagaaaagatgaattgattgagagaaaaagaaccctccaggagccctcagcgtagtagggggttggtgttggagggtggaggaatggaaaaggccctgaaatgcaggcagagaaatgatgaaacaattcaggggctgtggtgaggttaaatgaatatctttacagcagcctcgaagactgatcaggttactataccctctcttctgtccacgtgcatttcaaaaacctcggccgctctagaactagtggatcccccgggctgcaggaattcgatatcaagcttatcgataccgtcgacctcgaggggggg

SEQ ID NO: 13235 - DNA, 463 bp, Homo sapiens
tacactactatagggcgaattggagctccaccgcggtggcggccgaggtcacaacattcccccttccccaaacagtaatatggacactgatttaacaagacttataaaaaaataaggcacatttattttgatatggtaattttaaaatagaaaccccttctcagaacacctgtattcaaatgagctgtgtaaaaagacaccttgtggtacctaaaataggtttatggtacctatggaattgcttctattttagtgaagatggaataaattgcacccatcccacattgtcaagtaatgaaaatatgcggacgcgtgggtcgaagcttgacctgcccgggcggccgctctagaactagtggatcccccgggctgcaggaattcgatatcaagcttatcgataccgtcgacctcgagggggggcccggtacccagcttttgttccctttagtgagggttaattgcg

SEQ ID NO: 13236 - DNA, 489 bp, Homo sapiens
ctactatagggcgaattggagctccaccgcggtggcggccgctctgacctctttaagtgaaacttagtatgctaatagtatgatacgcccttttgctgtagcagttaccatagttacagataagtatatattgttgtgatgatctgatttcctggttcccccacccctgcaaaacaacaacaaaaacctttaccaggctctataacagggggaccaaacttgtttttgctcatcattgccggacggtgggtcgaagcttgacctgcccgggcggccgctctagaactagtggatcccccgggctgcaggaattcgatatcaagcttatcgataccgtcgacctcgagggggggcccggtacccagcttttgttccctttagtgagggttaattgcgcgcttggcgtaatcatggtcatagctgtttcctgtgggaaattggtatccgctcacaattccacacaacatacgagccgggagcataaagtgt

SEQ ID NO: 13237 - DNA, 344 bp, Homo sapiens
ctccaccgcggtggcggccgcccgggcaggttacaagcttcgacccacgcgtccgggaaattttaattaaaaataggtgaacattttaaatgacctaatacatatttagtccacattgaaactttggcattttgtcattgccattaaaattttgatggcattaaaatttgatgccattaaaattttgatcgctctagaactagtggatcccccgggctgcaggaattcgatatcaagcttatcgataccgtcgacctcgagggggggcccggtacccagcttttgttccctttagtgagggttaattgcgcgcttggcgtaatcatggtcataagctgtttcct

SEQ ID NO: 13238 - DNA, 333 bp, Homo sapiens
gaattggagctccaccgcggtggcggccgcccgggctggtcaagcttcgacccacgcgtccgtgataacttctcctaagtgccaggcattgtattacatgctgggagcacaaagatgaataataacaataggttcacagaaaagatgaattgattgagagaaaaagaaccctccaggagccctcagcgtagtagggggttggtgttggagggtggaggaatggaaaaggccctgaaatgcaggcagagaaatgatgaaacaattcaggggctgtggtgaggttaaatgaatatctttacagcagcctcgaagactgatcaggttactataccc

SEQ ID NO: 13239 - DNA, 312 bp, Homo sapiens
attggagctccaccgcggtggcggccgcccgggcaggtacaagcttcgacccacgcgtccggagcgttgcttggatttctaattacttctaagtgtagttttatttaatttcagtcctttagaaaaaaaaaaataaaattaaatgtgcggccggccgcccgggcaggttccacgcgttcgaaaaaagaaagaaaaaaaaaaactttctctttgccatttcttcttcttcttttttaactgaaaagctgaatcctttcatttattctgcacatctacttgtttaaattgtgggcaaaagataaaaagaaggtt

SEQ ID NO: 13240 - DNA, 392 bp, Homo sapiens
agggcgaattggagctccaccgcggtggcggccgcactttttttttttttttttttccttttgagacacagtctcactcttgcccaggttggtctaaaactcctgggctcaagcaatcctcccgctttcagcctcccaaagtgctggggttacagccgtgtgccactgtgtctggcccttttctttttcataggagaagggttgttgactcccaggaaacgtcacctggaaccaagaatgtgaactcaaggacccccgcctgttggcagctgcatttacttgactcctgttcactgtttcttagccttgtcctttctctcctgccagttctaggggacactgcttctcctggttgacctcatcaatgcccaaccagtggttctcaaggtgtg

SEQ ID NO: 13241 - DNA, 507 bp, Homo sapiens
actactatagggcgaattggagctccaccgcggtggcggccgcccgggcaggtacacaaaccagatgtatgcaatgatgccaaaagtcatctcaaaattccaagctgacctagtgcaacacatttacacttggataaactatcaccttgaagatttactttgtatacttcaaaagatctggtcatgaaatttttagctaatacataaagtgccgaattgaaatccagaatacaatagctatgaagggccgctagagtgcagataaccaacccattctacctaactcaggttgagattgctttagaacctatcattggctttaaaatggtccacaaaaaaacacctcatggtcacacttaaaatagtttgcatcccacactacaggcttctctggaggatttaatactttggaagtagcatcataagccctgcacataacttctcagccttgtggttaagatcaattatacacgcccaagacagtctttactggatcttgaacatata

SEQ ID NO: 13242 - DNA, 512 bp, Homo sapiens
tacactactatagggcgaattggagctccaccgcggtggcggccgaccagtgcaaatatctacccagttagaagagtaaataccatcttagtgttattatcaaaatattctgaactcatgaacctcctcagactgttgctgggactcccagatatcaatactctgagaaccactgatctaatgtttctttagtcagtttctatttgttctctagtataaccaagcataaaagtaatatacttccgcctctctctcccccaactgactttagtcaatagtacctcggccgctctagaactagtggatcccccgggctgcaggaattcgatatcaagcttatcgataccgtcgacctcgagggggggcccggtacccagcttttgttccctttagtgagggttaattgcgcgcttggcgtaatcatggtcatagctgtttcctgtgtgaaattgttatccgctcacaattccacacaacatacgagccgggagcataaagtgtaaagcctgggg

SEQ ID NO: 13243 - DNA, 215 bp, Homo sapiens
gactactatagggcgaattggagctccaccgcggtggcggccgaggtcaagcttcgacccacgcgtccggtttgggtggaattataatattttagataagatttaagaggattgctagataggaatgcgaatgatgataaggcttttagagttagataagagagagggcgctctagaactagtggatcccccgggctgcaggaattcgatatcaa

SEQ ID NO: 13244 - DNA, 491 bp, Homo sapiens
tacgactcactatagggcgaattggagctccaccgcggtggcggccgaggtcacaacattcccccttccccaaacagtaatatggacactgatttaacaagacttataaaaaaataaggcacatttattttgatatggtaattttaaaatagaaaccccttctcagaacacctgtattcaaatgagctgtgtaaaaagacaccttgtggtacctaaaataggtttatggtacctatggaattgcttctattttagtgaagatggaataaattgcacccatcccacattgtcaagtaatgaaaatatgcggacgcgtgggtcgaagcttgacctgcccgggcggccgctctagaactagtggatcccccgggctgcaggaattcgatatcaagcttatcgataccgtcgacctcgagggggggcccggtacccagcttttgttccctttagtgagggttaattgcgcgcttggcgtaatcatggtcatagct

SEQ ID NO: 13245 - DNA, 349 bp, Homo sapiens
tacactactatagggcgaattggagctccaccgcggtggcggccgcccgggcaggtacttatactagaagatgctccaaggtttcagaaaggaattaattactttcaatttgcacaatttagaacaaatatctggcttttccctaagcttaatgattttccatttcacacaactaaaatataatagcattattttataatcaagtttaactgatggtctatgatagtagagcgatttagtattttgacaaaaatcttatgagacatgaagtcattcaatttgccggacgcgtgggtcgactcaagctagacctcggccgctctagaactagtggatcccccgggctgca

SEQ ID NO: 13246 - DNA, 543 bp, Homo sapiens
gactactatagggcgaattggagctccaccgcggtggcggccgaggtcttcgacccacgcgtccgctttcttttgttgttaagggcccatgacctgcagtttccctaacattcatttttatacagggcagaggtatgtgtgcgagctcagataccttaaattcatatgcctttaatacaatccaggcagatttctaaatgagggatgcttccccacaaatggagagtgaaagtgggccagcctaaaaggacctccatagcactgtgcatggccagctgtttgtggctgtacctgcccgggcggccgctctagaactagtggatcccccgggctgcaggaattcgatatcaagcttatcgataccgtcgacctcgagggggggcccggtacccagcttttgttccctttagtgagggttaattgcgcgcttggcgtaatcatggtcatagctgtttcctgtgtgaaattgttatccgctcacaattccacacaacatacgagccgggagcataaagtgtaaagcctggggtgcctaatgagtga

SEQ ID NO: 13247 - DNA, 296 bp, Homo sapiens
gactcactatagggcgaattggagctccaccgcggtggcggccgaggtcttcgacccacgcgtccgctttcttttgttgttaagggcccatgacctgcagtttccctaacattcatttttatacagggcagaggtatgtgtgcgagctcagataccttaaattcatatgcctttaatacaatccaggcagatttctaaatgagggatgcttccccacaaatggagagtgaaagtgggccagcctaaaaggacctccatagcactgtgcatggccagctgtttgtggctgtacctgc

SEQ ID NO: 13248 - DNA, 494 bp, Homo sapiens
tacactactatagggcgaattggagctccaccgcggtggcggccgaggtactattgactaaagtcagttgggggagagagaggcggaagtatattacttttatgcttggttatactagagaacaaatagaaactgactaaagaaacattagatcagtggttctcagagtattgatatctgggagtcccagcaacagtctgaggaggttcatgagttcagaatattttgataataacactaagatggtatttactcttctaactgggtagatatttgcactggtcggccgctctagaactagtggatcccccgggctgcaggaattcgatatcaagcttatcgataccgtcgacctcgagggggggcccggtacccagcttttgttccctttagtgagggttaattgcgcgcttggcgtaatcatggtcatagcttgttcctgtgtgaaattgttatccgctcacaattccacacaacatacgagccgggagcat

SEQ ID NO: 13249 - DNA, 497 bp, Homo sapiens
atacgactactatagggcgaattggagctccaccgcggtggcggccgcccgggcaggtcaagcttcgacccacgcgtccgtgataacttctcctaagtgccaggcattgtattacatgctgggagcacaaagatgaataataacaataggttcacagaaaagatgaattgattgagagaaaaagaaccctccaggagccctcagcgtagtagggggttggtgttggagggtggaggaatggaaaaggccctgaaatgcaggcagagaaatgatgaaacaattcaggggctgtggtgaggttaaatgaatatctttacagcagcctcgaagactgatcaggttactataccctctcttctgtccacgtgcatttcaaaaacctcggccggtctagaactagtggatcccccgggctgtaggaattcgatatcaagcttattgataccgtcgaccttgagggggggcccggtacccagcttttgttccctttagtgagg

SEQ ID NO: 13250 - DNA, 482 bp, Homo sapiens
actactatagggcgaattggagctccaccgcggtggcggccgaggtcttcgacccacgcgtccgatggtttttgcaaaaattgaaaatgcatcgatattacagttaattttttcagtgtgtatgtggtattaggcttagaactataacacaggaagtttttagagtatgtccactctggtttactcctttgtaagtattaatacctgataatttacatcctacagccctgcctttttttttttttcaagtttgtcccagcaagtcttggccctttgcattttcttaatacattttagtacctgcccgggcggccgctctagaactagtggatcccccgggctgcaggaattcgatatcaagcttatcgataccgtcgacctcgagggggggcccggtacccagcttttgttccctttagtgagggttaattgcgcgcttggcgtaatcatggtcatagctgtttcctgtgtgaaaatgttat

SEQ ID NO: 13251 - DNA, 384 bp, Homo sapiens
tactatagggcgaattggagctccaccgcggtggcggccgcccgggcaggtggaggcccaagtgctgagactcaggggacgcaggcctgaggacagttatgcagggtgcagcggcctacggtaacccatgtagcaacagaaacccttagctaactgccgtaatttaaggcaattaggagccattcatcatccagatggctattggctctaatcgttactggctgaaggaactatatatagcagctacctttccgctccattcccaggccttgttcctgtcttctggttgccagttctgcactcactcattccggacgcgtgggtcgaagacctcggccgctctagaactagtggatcccccgggctgcaggaattcgatatcaa

SEQ ID NO: 13252 - DNA, 284 bp, Homo sapiens
ctatcgggcgaattgtagctccaccgcggtggcggccgaggtcaagcttcgacgcgtccgatcacttttttcatttataccttattagataaaacattagccccctagagtgttttgtgaaggaaatatgcctaataagagatgatagttttagcaataaatgagcattagaactattatttattaatgaaatgaactggtggtctgaaagtgatgataaacagacaactgtggaaaatgaattattaaaattccatggaattccttttgaagtttatgaagta

SEQ ID NO: 13253 - DNA, 358 bp, Homo sapiens
atacgactcactatagggcgaattggagctccaccgcggtggcggccgcccgggcaggtacaaatcaagtcattaacattttcaatgtcaaaaatacagcacgctgttaagagttctgtcagtgctcattatcccactagatcccacaaagggcaaactcaaagatgaaacaaaggcaacgccatcaataaccaccatattccacaggctttctcccctaggacgtacctcggccgctctagaactagtggatcccccgggctgcaggaattcgatatcaagcttatcgataccgtcgacctcgagggggggcccggtacccagcttttgttccctttagtgagggttaattgcgcgc

SEQ ID NO: 13254 - DNA, 310 bp, Homo sapiens
actactatagggcgaattggagctccaccgcggtggcggccgcccgggcaggtggaaaggtgggtggggagagggaggcttatttgttgctgcagtgtaactaagtgaaacctaattcatatgactcaaactaaggtatatttggttagatctaggtgagttctactttagaggaaatcctggtaactgttgtttgtttgtaagttatagctgtaattaattttccctgtattcaaagcccccaaaccctgcattcagatactatgcatttagacttccttaggcaaagtcaaggcaacaagctgatgat

SEQ ID NO: 13255 - DNA, 448 bp, Homo sapiens
tacgactcactatagggcgaattggagctccaccgcggtggcggccgaggtgtaatttggagaatatttaaagcaaaagagcaaacaacaaaaactaagttaacacttacccagtgcagtaagggaattgtaagatacagcctgcttaaggaggtctgcagacagatgcacctaagatttcagctgttttaggtcacttttctcaaaatatttattatctggcaatggggatgggagtggggaacacctctctgtgaggcaaatggtatctcaacaaataccgacttttcaaggaagaaagctctccacttctctcataaacttatatactaccttaaacagtatgcagtattcgcggacgcgtgggtcgaagcttgacctgcccgggcggccgctctagaactagtgggatcccccgggctgcaggaattcgatatcaagcttatcg

SEQ ID NO: 13256 - DNA, 425 bp, Homo sapiens
cgactcactatagggcgaattggagctccaccgcggtggcggccgcccgggcaggtacagcctcacatacacagatgcaggtgaagtcaccaaagctgatctctcattcgttctggggacagttagcagcgtagtggtcccactgcagcaaaagtttgaaattcattttcttcaggaaaatacccagccagtccctctcagtggaaaccctggttatgtcgtggggctcccattagctgctggattccagcctcataagggtggagctctcccgtgtcagctcgtagcacagaaggtgaagagcctgctgtggggccagtgcttcccagattacgtggccccttttggaaattcccaggcccaggacatgctggactgggtgcccatccacttcatcacccagtcattcaacaggaaggattcct

SEQ ID NO: 13257 - DNA, 410 bp, Homo sapiens
cgactactatagggcgaattggagctccaccgcggtggcggccgaggtactattgactaaagtcagttgggggagagagaggcggaagtatattacttttatgcttggttatactagagaacaaatagaaactgactaaagaaacattagatcagtggttctcagagtattgatatctgggagtcccagcaacagtctgaggaggttcatgagttcagaatattttgataataacactaagatggtatttactcttctaactgggtagatatttgcactggtcggccgctctagaactagtggatcccccgggctgcaggaattcgatatcaagcttatcgataccgtcgacctcgagggggggcccggcacccagcttttgttccctttagtgagggtaaatagcgcgc

SEQ ID NO: 13258 - DNA, 470 bp, Homo sapiens
cactactatagggcgaattggagctccaccgcggtggcggccgttaaaggaataatctgcagaacatcttgatttacaagggacaaaatgatgcaaattatatgctgtccaacctactggtgaactggatcagaatggtccaaggactgttaaacagaggaagtatttacattttgaaaacttgcggacgcgtgggtcgaagcttgtacacctcggccgctctagaactagtggatcccccgggctgcaggaattcgatatcaagcttatcgataccgtcgacctcgagggggggcccggtacccagcttttgttccctttagtgagggttaattgcgcgcttggcgtaatcatggtcatagctgtttcctgtgtgaaaattgttatccgctcacaattccacacaacatacgagccgggagcataaagtgtaaagcctggggtgcctaatgagtgagctaactcacatt

SEQ ID NO: 13259 - DNA, 428 bp, Homo sapiens
tacgactcactatagggcgaattggagctccaccgcggtggcggccgttaaaggaataatctgcagaacatcttgatttacaagggacaaaatgatgcaaattatatgctgtccaacctactggtgaactggatcagaatggtccaaggactgttaaacagaggaagtatttacattttgaaaacttgcggacgcgtgggtcgaagcttgtacacctcggccgctctagaactagtggatcccccgggctgcaggaattcgatatcaagcttatcgataccgtcgacctcgagggggggcccggtacccagcttttgttccctttagtgagggttaattgcgcgcttggcgtaatcatggtcataagctgtttcctgtgtgaaattgttatccgctcacaattccacacaacatacgagccggagcat

SEQ ID NO: 13260 - DNA, 509 bp, Homo sapiens
ctactatagggcgaattggagctccaccgcggtggcggccgcccgggcaggtaccctaaaacttaaagtataataaaaaaaagattatttcctatacttcaaaatcaacaagatttgattgcatttaaatttttctgtccatttgttcttctatgtaatactttaaaaataattggcataaaaattcaatcaattcataaaagtccaaagcaaaaaaaacaaatctactgacatctcttgaggaagaaatgatcaggattgacattaatgaaccctctcacagagaccactacacacacacacaaaaagaaggatgggtgaatggatgcagagagaatttaataagactgaaatgatgccatacatgctttttaaaaaataaaaagtattaaattttaaattttacttcaatataagagaaaaaaaaaaaaaaaaaaagtgcggccgctctaaactagtggatcccccgggctgcaggaattcgatatcaagcttatcgataccgtcga

SEQ ID NO: 13261 - DNA, 500 bp, Homo sapiens
gactactatagggcgaattggagctccaccgcggtggcggccgcccgggcaggtcttcgacccacgcgtccgtagtaataggaattaactgaccccttttggatgggggagagcatcaggctggggtcaggtaagtgtaaatggccttctgagcatgctcttctaggctgactcccagccctgacttgaaaccattagcgctaacttgctctgttttgagaaaaactttccaaacttttgcatgagaaactagaaaaaggaatgtatgccacgtaactggattacagaaatgagttaattgtctctgtgataaaaaaaaaatgaaatattttcttattgaattaatatttttgtcttgaagcattttctagtgatagaatgtatttgtcttttttcctggtggtacctcggccgctctagaactagtggatcccccgggctgcaggaattcgatatcaagcttatcgataccgtcgacctcgagggggggcccggtaccc

SEQ ID NO: 13262 - DNA, 323 bp, Homo sapiens
tacgactactatagggcgaattggagctccaccgcggtggcggccgcccgggcaggtacccccaggtcagcactttgaacacttgaacatctatgaaatcacatagtaaagtgataggagatggggctaagcttttaatggcctttagacatagcattagacataacctaagctgaaaggctttgggaagttgttgtgttaaatccccaacacactctcgtgttttcttaggacttgcctcttatttaaaaaaaaaaaaaaaaagtgcggccgctctagaactagtggatcccccgggctgcaggaattcgatatcaagctta

SEQ ID NO: 13263 - DNA, 513 bp, Homo sapiens
tacgactcactatagggcgaattggagctccaccgcggtggcggccgaggtacccttttataagggtgtatccccttttggtaacttactgtttgttaatttgtagtgttccctgccagtaagcttgtaacactctagtgactcaccttcgggtgggagggtaggaaagggagaggcctgcctcctaaacctgggaagatggggagagagtggtaaacctgagagcccaaaaaacaaaccaaaacaaaaaaaaaaaaaaaaaaaaagtgcggccgctctagaactagtggatcccccgggctgcaggaattcgatatcaagcttatcgataccgtcgacctcgagggggggcccggtacccagcttttgttccctttagtgagggttaattgcgcgcttggcgtaatcatggtcatagctgtttcctgtgtgaaattgttatccgctcacaattccacacaacatacgagccgggagcataaagtgtaaagcctggggtgcctaatgagtgag

SEQ ID NO: 13264 - DNA, 489 bp, Homo sapiens
tacgactcactatagggcgaattggagctccaccgcggtggcggccgaggtacccaaaagatatcactgtgaaggtttggatacactgactgaggaaaaaagaaggtcctgaaagcgtctagacaaaaaaagactacttgtaagttgcaagaatcagaatggcattggacttctcagctttcctcattagaagtttaagatctgaagcaatctttaaactcgtgaggaaaattaagtctaataaataattttcttcttagccaaacaatcaaatgtgaagctagaataagcattttcaggtaaaaaaaaaaaaaaaaaaagtgcggccgctctagaactagtggatcccccgggctgcaggaattcgatatcaagcttatcgataccgtcgacctcgagggggggcccggtacccagcttttgttccctttagtgagggttaattgcgcgcttggcgtaatcatggtcatagctgtttcctgtgtgaaa

SEQ ID NO: 13265 - DNA, 413 bp, Homo sapiens
tacgactcactatagggcgaattggagctccaccgcggtggcggccgcccgggcaggtcaggagtgtcccaaagatttcccaagtccagcccagagaagctgaaagcctttcccccaggtgtggggctgagttagatgtgggtcataaaggatgtggcctcgaggctgggaggcagctgggcaaagtgggaagcctccctactcctgagacagtgatggctcaaatccaggccaacctggaacatgatcctcaacttctctaagttcacctttcccaggtgtgaaatgggttgttctgggaattgagtgagctaatgatacactccctggcacacagcgagcctcaaaacgcttgtgtcccctccctacctcacagcccattttagaagtttgctgtcacttactttggagtc

SEQ ID NO: 13266 - DNA, 389 bp, Homo sapiens
cgactactatagggcgaattggagctccaccgcggtggcggccgcccgggcaggttttcttatgagtgggaggtgactgatcgtggaggtggatttcttatgagtgggaggtgactgatcgtggaggtggatttcttatgagtgggaggtgactgatcgtggaggtggatttcttatgattggcttatcaccatccctccttggtgctgtttttgcaacagtgagtgatttcttgtgagatccggttgtttaaatccagaggcaccttcccctaccctctagctcccattcctgccatgtaagacacctgctccccctttttcttaccccatgattggaagctttctgaggcctccccagaagctgatgccagccctatgcttactgca

SEQ ID NO: 13267 - DNA, 405 bp, Homo sapiens
actactatagggcgaattggagctccaccgcggtggcggccgaggtttttgaaatgcacgtggacagaagagagggtatagtaacctgatcagtcttcgaggctgctgtaaagatattcatttaacctcaccacagcccctgaattgtttcatcatttctctgcctgcatttcagggccttttccattcctccaccctccaacaccaaccccctactacgctgagggctcctggagggttctttttctctcaatcaattcatcttttctgtgaacctattgttattattcatctttgtgctcccagcatgtaatacaatgcctggcacttaggagaagttatcacggacgcgtgggtcgaagcttgacctgcccgggcggtcgttctagaactagtggatccccc

SEQ ID NO: 13268 - DNA, 335 bp, Homo sapiens
ctactatagggcgaattggagctccaccgcggtggcggccgaggtacaagcttcgacccacgcgtccgaaattcttggttaaggattattataaaatagaatggtatttcagtaaatccctgaggcttaggagtccaggtacaatgttggttctcaattaaaatataaatcatgtctagggacacttaggaacacagaacatatatttagagctagaaaatatacagcttcagaccaggcaaagtgctgggattacaggcgtgagccaccacgctcgtcctcacatggggtttttattattaggatggtaagagtattataaggattggtacaag

SEQ ID NO: 13269 - DNA, 452 bp, Homo sapiens
gcggccgcccgtcttggacacgtgtctcccaaccaattttatatgtatatatatattctacttccaacttcctttttcatcctggttcaatcaatgcctggttttggccaacaataaactcgtcaggagatcgaaggttgtagatgtctgcacgtggcttccttggaggtccagtggtgactccctcttccaaaatccattctgtacccgctggctgctctaacgggcaggacaacagcgtatgaagcctgactgcaactaggagaagtaccacactcccggacgcgtgggtcgaagcttgtacacctcggccgttctagaactagtggatcccccgggctgcaggaattcgatatcaagcttatcgataccgtcgaccttgagggggggcccggtacccagcttttgttccctttagtgagggttaattgcgcgcttggcgtaattattgg

SEQ ID NO: 13270 - DNA, 323 bp, Homo sapiens
  misc_feature 39, 41, 53: n = A,T,C or G
gcggccgaggcaagcatagacccacgcgtttgaagccancngtttgggacccngaaagggggcaggaaagggtggggttccagtccaccctaatggtatctgagtgtcctagggcctcagttttcccacctgtccaatgggaccctttctgtcctcaccctacaaggggcacaaagggatgacaccaaacctggcaggaacttttcacgcaatcaagggaaggaaaggcattcctggcagagggaacagcatgccaagcgtgagaaggctcaaagtaaggagggtaagagcccaagtattggagcctacaggtttgccccttt

SEQ ID NO: 13271 - DNA, 471 bp, Homo sapiens
actactatagggcgaattggagctccaccgcggtggcggccgaggtcaagcttcgacccacgcgtccgcttttcaattttattgtatagtttttgataatgttaatgtctgagatctttatgggtgagtctgctgtcatttctgctatttctcgtagtgatttgcttgtatggtttatgattttttaaaaactgaatgtgtattagaattgtgtctggtaattctttagggacccattgtagatgtatttcttcaaagagcatttgtggttattatatttgggtgcttggggcactgccagtacctgcccgggcggccgctctagaactagtggatcccccgggctgcaggaattcgatatcaagcttatcgataccgtcgacctcgagggggggcccggtacccagcttttgttccctttagtgagggttaattgcgcgcttggcgtaatcatggtcatagctgtttcct

SEQ ID NO: 13272 - DNA, 478 bp, Homo sapiens
tacgactactatagggcgaattggagctccaccgcggtggcggccgaggtattgaaccaggtcaaaacattgttgaatatcaaacccaatctatttaatctgtaagaaacaaggaccctgagaaagattctgaccaagggtatgtgatcggaaacttgacagataaatgtagtatacttgtaaagccatactgtgaaaaacttggggattatttgaacacaaattatcacctggaaaaagacagaaaacaaggcagaagactgtgcaaagaggttggaatattcaaaacttcagattagaaggctctagaactagtggatcccccgggctgcaggaattcgatatcaagcttatcgataccgtcgacctcgagggggggcccggtacccagcttttgttccctttagtgagggttaattgcgcgcttggcgtaatcatggtcatagctgtttcctgtgtgaaattgttatccgctcac

SEQ ID NO: 13273 - DNA, 392 bp, Homo sapiens
ggcgaattgtttctccaccgctgtggcggccgaggtacccaattgatatcactgtgaaggtttggatacactgactgaggaaaaaagaaggtcctgaaagcgtctagacaaaaaaagactacttgtaagttgcaagaatcagaatggcattggacttctcagctttcctcattagaagtttaagatctgaagcaatctttaaactcgtgaggaaaattaagtctaataaataattttcttcttagccaaacaatcaaatgtgaagctagaataagcattttcaggtaaaaaaaaaaaaaaaaaaagtgcggccgctctagaactagtggatcccccgggctgcaggaattcgatatcaagcttatcgataccgtcgacctcgagggggggcc

SEQ ID NO: 13274 - DNA, 414 bp, Homo sapiens
tacgactcactatagggcgaattggagctccaccgcggtggcggccgcgaccacgcttggccgcccgggcaggtcaagcttcgacccacgcgtccgaaattaatgaaatgttttacattcttttaaaaacctttgaaatatggtgtgtattttatgctttagcaaatctcagtttggaccatttcaggtggtcagcaattacacatggctagaactaagagcaatcagttttcttccacagtttttctaaaattttcttgtcaaaaatcttgatggtatgaattactcttttaaaaagtgcacttcaccagcaacagaaaagaaccctggaggggtatgggttttaaagctggtacctcggccgctctagaactagtggatcccccgggctgcaggaattcgatttcaagctta

SEQ ID NO: 13275 - DNA, 485 bp, Homo sapiens
actactatagggcgaattggagctccaccgcggtggcggccgaggtctccaaagtgctggaatcacaggaatgagccaccacacccagccaaattgggcacaaatttaaaatttgacttttattaatgatatggtaaagagatctagcttggtcatgacacccttgtgttatacggtgacaggcaaatcatttaaaaatatctaaactataatttcctgtagttcacatgaattggatattctgaagcggacgcgtgggtcgacttgtaacctgcccgggcggccgctctagaactagtggatcccccgggctgcaggaattcgatatcaagcttatcgataccgtcgacctcgagggggggcccggtacccagcttttgttccctttagtgagggttaattgcgcgcttggcgtaatcatggtcatagctgtttcctgtgtgaaattgttatccgctcacaatttcacacaacatacgagccgg

SEQ ID NO: 13276 - DNA, 467 bp, Homo sapiens
tacgactcactatagggcgaattggagctccaccgcggtggcggccgcccgggcaggtacagaaaggacaaatacatcagtagaaaagaagacaatataagggcagattgaaatatatacgtgaacgtcacaaagaccaattactgccatttcaattcaatgaggaaataatgatgtatttaataaatagtgctagaatgctgcattatctgtctaggatgaaaaaaaaaaaaaaaaaaaagtgcggccgctctagaactagtggatcccccgggctgcaggaattcgatatcaagcttatcgataccgtcgacctcgagggggggcccggtacccagcttttgttccctttagtgagggttaattgcgcgcttggcgtaatcatggtcatagctgtttcctgtgtgaaattgttatccgctcacaattccacacaacatacgagccgggagcataaagtgtaaagc

SEQ ID NO: 13277 - DNA, 461 bp, Homo sapiens
ctactatagggcgaattggagctccaccgcggtggcggccgaggtctcactatagggatctagatcacgagcggccggccgcactttttttttttttttttttatttctgccacctctttcacttgggaatctattttcactgctctccaaagttttgagaaggcaatagtcctggaaaatgggtcctgagctcctctcagcagtcctgctttctttccacctgcactgtaaggtgaccctaactgggtctaagacaaaaagtcggacgcgtgggtcgaagcttgtacacctcggccgctctagaactagtggatcccccgggctgcaggaattcgatatcaagcttatcgataccgtcgacctcgagggggggcccggtacccagcttttgttccctttagggagggttaattgcgcgcttggcgtaatcatggtcatagctgtttcctgtgtgaaattg

SEQ ID NO: 13278 - DNA, 456 bp, Homo sapiens
ctactatagggcgaattggagctccaccgcggtggcggccgaggtgttagttaccacttcattactggagggcactgtcacaaacttctgactatccagacttgaagctggaagcaaatacaagtctgaggggctctaagctgggaggttctggcctctccctagctctctatggctctacctctctgcttgaagctccctgcactgcactcccattactctgactggggataggaccactgctgacagggccccacctcaacttctttcattgccctcttccaggaaatcccaccctgggatacttcaaagacctcatatgctacaaagatcaaggccacctaatgagtgctctagagatcagcaccaaagatgcttgccagagtcttctctatatgtcctccctcctgtatcaaataagtcaccaagtatagctgactatctccataacatctc

SEQ ID NO: 13279 - DNA, 447 bp, Homo sapiens
cactactatagggcgaattggagctccaccgcggtggcggccgaggtcaagcttcgacccacgcgtccggggaacccttgttcaggttctttttaggcaacccaagccaagacaacaaagtaagatagagccccaaatgtggtcgtataaggtttttcaaagaaagtaacacttgagttaggtcttaaagtttcacctaagaaactgcccaggtggacaagaagaaagggtgttccaagtagaaataatatcatggacaaaggcaatgtagcaggaaaagtcttcgtaaattcagggaatttcaagtgtttcacgatggaaggagcaatagagtcatttacttgcggtggcaggggatgttggaaatgtaaacaagagtgagatacagaagattttatgtggcatgccaactgggacttctttttgtaaacaacaaggaaacaatta

SEQ ID NO: 13280 - DNA, 410 bp, Homo sapiens
tcactatagggcgaattggagctccaccgcggtggcggccgaggtcaagcttcgacccacgcgtccggagaaataccatttgcacagtcaatcacttctgaccaagttatcagaaaaaggagaaaagaatgtctccccactaaatgttctagggtggcgagaaatctagggtggttatctaaatcaacaatatttagatattccaatatctaaatattgttggaaatactctcctgaagtgttcattgaactctaagagagacagcttgtgtattagaggcagggtttaaggttcattttttattcccatattaatcctttaatatttagacaaatttccttctgagtttaaggataaaatgggaagggtttttgcctgggcctggccctcatggggacatcaaagggca

SEQ ID NO: 13281 - DNA, 483 bp, Homo sapiens
ctactatagggcgaattggagctccaccgcggtggcggccgaggtacatggtagagaaagattcaaaatgctgctgttctacctgagatgggaaaaatgaaagcaaaataacatcaacaaaaacaaacaaacagccttgtagttccatgtcactagccagggatttaagaccagcctagagaacatggtgagaccccttctctacaaaaataaaaataaaaatacaaaataagctggacatggtggtgtgtacctgcccgggcggccgctctagaactagtggatcccccgggctgcaggaattcgatatcaagcttatcgataccgtcgacctcgagggggggcccggtacccagcttttgttccctttagtgagggttaattgcgcgcttggcgtaatcatggtcatagctgtttcctgtgtgaaaattgtatccgctcacaattccacacaacatacgaaccgggagcataaagtgtaaa

SEQ ID NO: 13282 - DNA, 459 bp, Homo sapiens
gcgaattggagctccaccgcggtggcggccgaggtacaagcttcgacccacgcgtccgctcacttcatcctcccagcaacctattatgatccattgccacaccaacttgctgatgaggaaagtggggcttaaggaaattaaagagctgttgtgggacttccaaagcagaagacagtaggctttcagaaatttgataaaaatagcactttgcatttcttgaatcttgagctaaatggaaattaatactaaacattctccactggtaaaatagagaataaggatattaacagtaaaagaaaagaagaagaaaaggaaatgtgcttccacagatttagaaacataagtaacaatctaagttaaggctttggcacctgcccgggcggccgctctagaactagtggatcccccgggctgcaggaattcgatatcaagcttatcgataccgtcgacctcgagggg

SEQ ID NO: 13283 - DNA, 434 bp, Homo sapiens
cactactatagggcgaattggagctccaccgcggtggcggccgcccgggcaggtcttcgacccacgcgtccgagctatggacctaaggcagcgagtggattcattagtcctctttcagctgaatgcatgctacagtataagaaaaaagctgctgcctatatgaagtctttgagaaaggtttgttagctgctgttaatatttaaatcagaggaaacatcaggagtcattctagagaatggcaagagtttttctgcagtttatattgttgactttttatacgatattggggtacctcggccgctctagaactagtggatcccccgggctgcaggaattcgatatcaagcttatcgataccgtcgacctcgagggggggcccggtacccagcttttgttccctttagtgagggttaattgcgcgcttggcgtaatca

SEQ ID NO: 13284 - DNA, 484 bp, Homo sapiens
tactatagggcgaattggagctccaccgcggtggcggccgaggttcgacccacgcgtccgctaggaactatgttaaaaaaaattcaagaaagaatttaagggagattacagtgttactgtgacaccaggaaaacttagaactttgtgtgaaatagactggccagcattagaggtgggttggccatcagaaggaagcctggacaggtcccttgtttcaaaggtatgacacaaggtaacccgtaagccaaggcacccagaccagtttccatacatagaacctgcccgggcggccgctctagaactagtggatcccccgggctgcaggaattcgatatcaagcttatcgataccgtcgacctcgagggggggcccggtacccagcttttgttccctttagtgagggttaattgcgcgcttggcgtaatcatggtcatagcttgttcctgtgtgaaattggtatccgctcacaattccacacaacata

SEQ ID NO: 13285 - DNA, 478 bp, Homo sapiens
gactcactatagggcgaattggagctccaccgcggtggcggccgcactttttttttttttttttttaagtaaagaaggttttataatatagtgaaaacaatacggagatgaaaaccaggagacctgggtcccgcctttgttacaaatgcctttcctaaaagctccagaatggtgcgaggtcaaaacagatgggcagaaaggaagtggtcatcagagcaagagaaagagcaggtgccaggcactcacgtgtgcggtcatatcaggtagagatgatgagtagagatctgccctagaagacactgaattctgagattcaaaggggaaaagttgattttatagccagtgattttatagcccactttcctgccccacccctactctaagaattgcggacgcgtgggtcgaagcttgtacctgcccgggcggccgctctaaactagtggatcccccgggctgcaggaattcgatatcaagctta

SEQ ID NO: 13286 - DNA, 432 bp, Homo sapiens
ctactatagggcgaattggagctccaccgcggtggcggccgcccgggccggtcccagaataactaaataaataaaaggctaaagaaaactggaacagtactgcgtctccatctgagacgcaatcttctacttccagcatcgcagagaagggctaggacaattttttttcaaaagatttatatacaggcttgaatccagaaattaaggttaaaagcataaatattgataatttcaactaaattcagaatggtttcagaaagatatgatacaacaatttagaataaaacaaagcagaagagcatcatattttgcggacgcgtgggtcgaagacctcggccgctctagaactagtggatcccccgggctgcaggaattcgatatcaagcttatcgataccgtcgaccttgagggggggcccggtacccagctttt

SEQ ID NO: 13287 - DNA, 480 bp, Homo sapiens
cactactatagggcgaattggagctccaccgcggtggcggccgaggtgtacaagcttcgacccacgcgtccgcttaaaagattttttttttatgtaaactgttgaatatttgaaatagtccacttcaccttaatgggtcttgtctatcttcattagtcttcaaagaaaaaccatttgctaccaaagtaaatcagtattttgaatgtgcttctcttgttttttgtttattagctagttcctgtaagcatttccaccagaacttgaggcaaatcgtaaggaagctgtttcttttaaaacacaaaccaccaccaaaaatttaaatgtacctgcccgggcggccgctctagaactagtggatcccccgggctgcaggaattcgatatcaagcttatcgataccgtcgacctcgagggggggcccggtacccagcttttgttcccttagtgagggttaattgcgcgcttggcgtaatcatggtca

SEQ ID NO: 13288 - DNA, 435 bp, Homo sapiens
ctactatagggcgaattggagctccaccgcggtggcggccgaggtttcaagaccagcctggccaacatggtgaaaccccatctctactaaaaatataaaaatcagccgggcatggtggcatgtgcctgtaatcccagctactcaggagtctgaggaggagaatcacttgaacctggaggcagaggttgcagtgagtcgaggttgcgctactgcactccagcctggacaacagagggagactctgtctcaaaaaaaaaaacctacagctgttcaaggaccagctgacaggtcaagtgtggccttttctggtctttgaacacatcatagaaagtgacaaatgctgcaaagccatgaagaacatgaactataaacgggtagactaactgcccagcttagacacttatctatgccacaaaacagctgaatttgtcacat

SEQ ID NO: 13289 - DNA, 505 bp, Homo sapiens
cgactactatagggcgaattggagctccaccgcggtggcggccgaggtaccaaaaccaggcttttttcgaaatacctgcaaaaaaaagtggatgattccaaatccaactgaagtgtctgctctctctccaattcagaacaaccagaagggcctgtctgaattagtaatgcattaaagaaaagtaggattattatattccaattctttccatcagatgtaaaacattattggtagatcacatctgttttaataaatctgtaagaaagacgtgtaattataattatgttaccattgtatgtaaatggcattttaacaagacatattaatacatttttatagagtacctgcccgggcggccgctctagaactagtggatcccccgggctgcaggaattcgatatcaagcttatcgataccgtcgacctcgagggggggcccggtacccagctttttgttccctttagtgagggttaaatgcgcgcttggcgtaatcatggtcatagct

SEQ ID NO: 13290 - DNA, 423 bp, Homo sapiens
tactatagggcgaattggagctccaccgcggtggcggccgaggtcttcgacccacgcgtccggttaatttgggagaaggaagagagagtgacatatttggctaccttcagggaacaaaatctaacagcacagatggtagtagaggagataccaattacatattaaggagctagagttgatgatggtatgactcagccctctgagattaaattctacttactagggctatgaatggagataagtaggtatcccaccttttattagaaggttccttaaaataaatatgggactctggtcagagagtagggccattaatttgctcctggtttttacctggcatccacccaccagtacctgccccggggcggccgggccgcccgggcaggtccgcactttttttttttttttttccttttatttttt

SEQ ID NO: 13291 - DNA, 437 bp, Homo sapiens
tacgactcactatagggcgaattggagctccaccgcggtggcggccgcccgggcaggtattgccctttgatgtccccatgagggccaggcccaggcagaacccatcccattttatccttaaactcagaaggaaatttgtctaaatattaaaggattaatatgggaataaaaaatgaaccttaaaccctgccactgatacacaagctgtctctcttagagttcaatgaacacttcaggagagtatttccaacaatatttagatattggaatatctaaatattgttgatttagataaccaccctagatttctcaccaccctagaacatttagtggggagacattcttttctcctttttctgataacttggtcagaagtgattgactgtgcaaatggtatttctcagctaaaatctcccttatgaacccttcctcgaaat

SEQ ID NO: 13292 - DNA, 479 bp, Homo sapiens
cgactactatagggcgaattggagctccaccgcggtggcggccgaggtactcccatttccctgaaacaagcagccagcaactatctcagaaatgtgtcatttttactggttataattcttaaaaagcttgttttcctaagatatgaaatgcctgccagtatacaaactgttgtaactacttccctttttgcttttagcggggaaaaaatagcttaatgacagcatagaatcatgtagtaaatataattcattttttgaaaggttcagctatatcctcttccatttgtttattttaaatgatctaattgcaaacatgtcatcactcccttgatgtttacctccttgttatgcatttttagcaggctttattgtcacctgagattttttttttctttgacaggccggagtctagatgaaggaaaatgtgttagaagcaccttatccacagatggggacacttggtcattcagcacatgttg

SEQ ID NO: 13293 - DNA, 478 bp, Homo sapiens
cgactcactatagggcgaattggagctccaccgcggtggcggccgaggtacgtagcagagcagctccctcgctgcgatctattgaaaagcttgagtcgacccacgcgtccgctgcataaaagttatgcaaaaagcattttatgatataccagcaaaaaacatggaaaatgaaattttgaaaagcaatgccacttcaaagatccctcaagtgcctagagggagaaaatgagttaatatgctttgaagaactgtatccagaaaataaaattacaaaggaggagagggataggattccaggacaatctcaaaactattgctttttcctaaattcattgcaaccttaaaatcctagcaagttctttaatgtaaattaacaagctaattctagaattcatatgcatattcaaaagtcgaataattgtcaaggctatcctgtagaatggacagagaggattgaaatttctaaatatcaagacct

SEQ ID NO: 13294 - DNA, 411 bp, Homo sapiens
ctactatagggcgaattggagctccaccgcggtggcggccgaggtactttaatcccgtcttacagaagagaaaactgagatttagcaacataaaagtatttcccgtaagtaaacagtagagccaagatcttgacctacgccatctgatacctgagcccatgctataaaagaggagcattagaaatatttgaaagatagaaatgagaactagtcaatatttattttgcttagcactgtattcagtattatggcatcttaaagtagttaagactcaatatttcatcaaaaaagtttaaaatctaatcagagaatcggccgctctagaactagtggatcccccgggctgcaggaattcgatatcaagcttatcgataccgtcgacctcgagggggggcccggtacccagctttt

SEQ ID NO: 13295 - DNA, 353 bp, Homo sapiens
tacgactcactatagggcgaattggagctccaccgcggtggcggccgaggtacaaataagcccaccccactaggaactatgttaaaaaaaaattcaagaaagaatttaagggagattacagtgttactgtgacaccaggaaaacttagaactttgtgtgaaatagactggccagcattagaggtgggttggccatcagaaggaagcctggacaggtcccttgtttcaaaggtatgacacaaggtaacccgtaagccaaggcacccagaccagtttccatacatagaaagttacagctgcttttatacccccttgccccgccaacgtagttaagagaacagcagcataagcggc

SEQ ID NO: 13296 - DNA, 376 bp, Homo sapiens
ctactatagggcgaattggagctccaccgcggtggcggccgcccgggcaggtcgcacttttttttttttttgtagagacaggatctccttatgttgcccaggctagacttgaactcctgggctcaagggatcctcctgccttggcctccaaaaagtgctgggattataggtgtaaaccagtgtgcctagcctacagttttttaattttataaaatgttatttctaatttttctccaaaagtaaaagtggcattccaatggcaatattaattcaggtatccagaactcttaacctaaatttgggtgagatgaggaaaagtgtattgttaattttatgtgtcaacttggaaggtgtttttggatgggaataacattga

SEQ ID NO: 13297 - DNA, 472 bp, Homo sapiens
ctactatagggcgaattggagctccaccgcggtggcggccgcccgggcaggtcttcgacccacgcgtccgtagtaataggaattaactgaccccttttggatgggggagagcatcaggctggggtcaggtaagtgtaaatggccttctgagcatgctcttctaggctgactcccagccctgacttgaaaccattagcgctaacttgctctgttttgagaaaaactttccaaacttttgcatgagaaactagaaaaaggaatgtatgccacgtaactggattacagaaatgagttaattgtctctgtgataaaaaaaaaaaaatgaaatattttcttattgaattaatatttttgtcttgaagcattttctagtgatagaatgtatttgtcttttttcctggtggtacctcggccgctctagaactagtggatcccccgggctgcaggaattcgatatcaagcttatcgatac

SEQ ID NO: 13298 - DNA, 254 bp, Homo sapiens
atacgactactatagggcgaattggagctccaccgcggtggcggccgcccgggcaggtgtccccatgagggccaggcccaggcagaacccatcccattttatccttaaactcagaaggaaatttgtctaaatattaaaggattaatatgggaataaaaaatgaaccttaaaccctgccactgatacacaagctgtctctcttagagttcaatgaacacttcaggagaggatttccaaccatatttagatattgg

SEQ ID NO: 13299 - DNA, 209 bp, Homo sapiens
cactactatagggcgaattggagctccaccgcggtggcggccgaggtacagtagatttggagagtaatacaaatcctttctttctggttagaacacactgccaaaagccacctctttcatctaaggaaaagattaaaaatgcatgttgatatctcctaactatcacacaactttcactattacaatgaaaaatctgttcccctttcatt

SEQ ID NO: 13300 - DNA, 469 bp, Homo sapiens
ctactatagggcgaattggagctccaccgcggtggcggccgaggttcgacccacgcgtccgctaggaactatgttaaaaaaaattcaagaaagaatttaagggagattacagtgttactgtgacaccaggaaaacttagaactttgtgtgaaatagactggccagcattagaggtgggttggccatcagaaggaagcctggacaggtcccttgtttcaaaggtatgacacaaggtaacccgtaagccaaggcacccagaccagtttccatacatagaacctgcccgggcggccgctctagaactagtggatcccccgggctgcaggaattcgatatcaagcttatcgataccgtcgacctcgagggggggcccggtacccagcttttgttccctttagtgagggttaattgcgcgcttggcgtaatcatggtcatagctgtttcctgtgtgaaaatgttatccgctcac

SEQ ID NO: 13301 - DNA, 260 bp, Homo sapiens
gactactatagggcgaattggagctccaccgcggtggcggccgcccgggcaggtcaagcttcgacccacgcgtccgtgataacttctcctaagtgccaggcattgtattacatgctgggagcacaaagatgaataataacaataggttcacagaaaagatgaattgattgagagaaaaagaaccctccaggagccctcagcgtagtagggggttggtgttggagggtgtgaggaatgtgaaaaggcccttgaaattgcag

SEQ ID NO: 13302 - DNA, 458 bp, Homo sapiens
ttggagctccaccgcggtggcggccgaggtgtacaagcttcgacccacgcgtccgcaagttttcaaaatgtaaatacttcctctgtttaacagtccttggaccattctgatccagttcaccagtaggttggacagcatataatttgcatcattttgtcccttgtaaatcaagatgttctgcagattattcctttaacggccgctctagaactagtggatcccccgggctgcaggaattcgatatcaagcttatcgataccgtcgacctcgagggggggcccggtacccagcttttgttccctttagtgagggttaattgcgcgcttggcgtaatcatggtcatagctgtttcctgtgtgaaattgttatccgctcacaattccacacaacatacgagccgggagcataaagtgtaaagcctggggtgcctaatgagtgagctaacttacattaattgc

SEQ ID NO: 13303 - DNA, 389 bp, Homo sapiens
cactactatagggcgaattggagctccaccgcggtggcggccgaggtactcccatttccctgaaacaagcagccagcaactatctcagaaatgtgtcatttttactggttataattcttaaaaagcttgttttcctaagatatgaaatgcctgccagtatacaaactgttgtaactacttccctttttgcttttagcggggaaaaaatagcttaatgacagcatagaatcatgtagtaaatataattcattttttgaaaggttcagctatatcctcttccatttgtttattttaaatgatctaattgcaaacatgtcatcactcccttgatgtttacctccttgttatgcatttttagcaggctttatggtcacctgagattttttttt

SEQ ID NO: 13304 - DNA, 364 bp, Homo sapiens
tacgactactatagggcgaattggagctccaccgcggtggcggccgcccgggcaggtacattggattgttaaaagaggagtctagaaaaattaatcctgaaccctaaagaataaatcttaagtggtggatacatgggttgaatagtgtgctccaaaattcacatccacttgaaacttcagagagtggccatatttgtaaataaggtatttgcgggtgtaatcagttaaggatctcaagataaattcatcctgaattataagttgtccttaaatccaattactggtatctcttacaagaaggtgagaggagacagaatagagccatctgaaaagggtcagaaattggagtgatgctgccacaaac

SEQ ID NO: 13305 - DNA, 480 bp, Homo sapiens
ctactatagggcgaattggagctccaccgcggtggcggccgaggtcaagcttcgacccacgcgtccgcaaaaatcaatcaagggttcctactcaagtaaaaagcaacttgtaggaaaataataggggatatattttgctcattaaggatctttttatagtggctcttggtgcactgcctgtgagttagcccttatcctcaaggagcagcttaaaaaaaaaaaaaaaaaaaggtgcggccgctctagaactagtggatcccccgggctgcaggaattcgatatcaagcttatcgataccgtcgacctcgagggggggcccggtacccagcttttgttccctttagtgagggttaattgcgcgcttggcgtaatcatggtcatagttgtttctggggggaaattgttatccgctcacaattccacacaacatacgagccgggagcataaagtgtaaagcctggggtgcctaatgagtgagct

SEQ ID NO: 13306 - DNA, 367 bp, Homo sapiens
ctatagggcgaattggaatctccaccgcggtggcggccgaggtacttcctggaaatcaattaactgagtcttttgaaacccctagagaagataggagaaaattggttcagaacgagcatttaaattaagtcagcaaagtcagaatttaaaattgggcaattccttgtctacattttctttacactcaaattgaccctggacaacagtagtctagtctcctggaagacatggtgcaaacagaaaatgcatggggtggtatactcataggcaaaatgggtgcacaagtgatggtccaactttgtggaacggtaaggatttttagggtttgtttggccagaacaagagaaataactgcagaaaacacata

SEQ ID NO: 13307 - DNA, 450 bp, Homo sapiens
ctatagggcgattggagctccaccgcggtggcggccgcccgggcaggtgccaaagccttaacttagattgttacttatgtttctaaatctgtggaagcacatttccttttcttcttcttttcttttactgctaatatccttattctctattttaccagtggagaatgtttagtattaatttccatttagctcaagattcaagaaatgcaaagtgctatttttatcaaatttctgaaagcctactgtcttctgctttggaagtcccacaacagctctttaatttccttaagccccactttgctcatcagcaagttggtgtggcaatggatcataatacgttgctgggaggatgaattgagcggacacgtgggtcgaagcttgtaccttggccgctctaaaactagtggatccccctggctgcaggaattctatatcaagcttatcgatacc

SEQ ID NO: 13308 - DNA, 452 bp, Homo sapiens
  misc_feature 377: n = A,T,C or G
ctactatagggcgaattggagctccaccgcggtggcggccgaggtaccatcacacagaaggaggagggagctaatccagtaacaaacattcaaagattaaattgtagatatgcacctctgtatttggcactgttgattaatattataacaccttcctctcaaagacaggcattcttaagcgttagtcacaatataccagaatttgctattcatattaaaaccaccttttaaactttataacagtaaccaattattatagttttaagaaacaaaacgcaatgagaactgggaatggaattcaaatcctccaaattcttgctatgctccaagctgccatccataaaacaggtttaatttggtaatttttccattgtggngaagtgtcaacaagaaacaatttaaagacaatattttccaatacaaataaagacatacactttttgtttaaaatg

SEQ ID NO: 13309 - DNA, 350 bp, Homo sapiens
tactatagggcgaattgggagctccaccgcggtggcggccgcccgggcaggtacaagcttcgacccacgcgtccgaaataataaagctagaagtaatatttttccttttgtctattttccaaattgactcgatattgatggctacttttgtaagtttttatttaagtttaaagggaatatttattgatcacctctatgtgctcagtacctcggccgctctagaactagtggatcccccgggctgcaggaattcgatatcaagcttatcgataccgtcgacctcgagggggggcccggtacccagcttttgttccctttagtgaggggcaattgcgcgcttggcgtaatca

SEQ ID NO: 13310 - DNA, 439 bp, Homo sapiens
tactatagggcgaattggagctccaccgcggtggcggccgcactttttttttttttttttttttccagtgctaaaacatcagataagagcctacctgacattttggagaatttgctgtgctgggattgatattccgcattgcctaagagtaaaaaataagacggacgcgtgggtcgaagcttgacctgcccgggcggccggccgcccgggcaggtaccacaggaggcagaaggaaatcctcaaccttccgaagaaggcgtaagccaggaagcagaaggaaaccccagaggagggccgaatcagcctggccagggatttaaagaggacacacccgttaggcatttggaccctgaagaaatgataagaggagtagatgagcttgaaaggcttagggaagagataagaagagttagaaacaagtttgtgatgatgcattgga

SEQ ID NO: 13311 - DNA, 438 bp, Homo sapiens
actactatagggcgaattggagctccaccgcggtggcggccgcccgggcaggtcgcgtgggtcgactcaggctagagaattgtaatacgactactatagggatctagatcacgagcggccgctctagaactagtggatcccccgggctgcaggaattcgatatcaagcttatcgataccgtcgacctcgagggggggcccggtacccagcttttgttccctttagtgagggttaattgcgcgcttggcgtaatcatggtcatagctgtttcctgagtgaaattgttatccgctcacaattccacacaacatacgagccgggagcataaagtgtaaagcctggggtgcctaatgagtgagctaactcacattaattgcgttgcgctcactgcccgcttttcagacgggaaacctgtcctgccagctgcattaatgaatc

SEQ ID NO: 13312 - DNA, 412 bp, Homo sapiens
ctactatagggcgaattggagctccaccgcggtggcggccgaggtttttttttttttttttttaccagaacatcacataagtttatttcagatgtaacagcaatgttaaaattgacaagtttaattcttaactgcaccaagtaaacttagccatttaagtatttttttaagttattccctccaaaaaactgagggagcttttcttttccaccaccacaccatggtttcccaatagttctctttttggaggacttttcaattgatgagtaaactgctttagatatttcacaacttcattccccaaatgaaagctaatctggacaaactatatattgcatagatttctctacagattctttgctttaaaacctaaatgcaactaacatagtgtaattttaacctatttgcccca

SEQ ID NO: 13313 - DNA, 368 bp, Homo sapiens
gactcactatagggcgaattggagctccaccgcggtggcggccgaggtacggatgaggcggggaggtgggacccccaaacatatatcagcccaacagccctaagtctccttctttattattaggaaaacaacaacaacaacaaacaaaaaaatggcgtcatgaatatgaacagcattgtcagatgaattagttgaagtggtttttttttgttttttttttttttttgaacctgcccgggcggccgctctagaactagtggatcccccgggctgcaggaattcgatatcaagcttatcgataccgtcgacctcgagggggggcccggtacccagcttttgttccctttagtgagggttaattgcgcgct

SEQ ID NO: 13314 - DNA, 491 bp, Homo sapiens
ctactatagggcgaattggagctccaccgcggtggcggccgcccgggcaggtgcttcgacccacgcgtccgaaataattggaaatggcctatagattaaaaagctgagaaagtatatggtagggagcacactccccacaagtatgaactctggattagacatctcagaatacatgagcactcatgttggcttgctttggagctatgaacttaccctgtattattgaaacgtcagcataatgactggaaggagaaattggtccattttagagcattactattatgctatctgtccatttaaattaataattgcattaaattcattttagaaggggctattacattagtagtgagaaagtaaatccatatataaatatttgattatcagatggtttacttacagatacttattttcctgtaaaataggagagtttacctgaagaaaaataaaacttttaacttttctgggaaaaaaaaaaaaaaaaaaagtgc

SEQ ID NO: 13315 - DNA, 437 bp, Homo sapiens
cactactatagggcgaattggagctccaccgcggtggcggccgcccgggcaggtaccaagtgaatttaaataattggtgtggattggccagtagctaagaagtgggcttttaaagagtattgaagattgaaagggtttttctttcttttttaaaaaagaaaaacaaactattgattgtctataatgaaaagctagggcttgccctcttcatgtctactctccttccaaatagttatatccaaaactgtttttccctctcccctaccttgtcccccctattaaaataaaaacagggattgattaatgtcccgctcctgaatacatgtaaaatttgtacctcggccgctctaaaactagtggatcccccgtgctgcaggaattcgatatcaagcttatcgataccgtcgacctcaagggggggcccggtacccagcttt

SEQ ID NO: 13316 - DNA, 378 bp, Homo sapiens
ctcactatagggcgaattggagctccaccgcggtggcggccgaggtcaagcttcgacccacgcgtccgcttgtcaataaaaaacaaacaattgctaaataaaacaacctgagaaaatctccagagaactatactgagtgaaggaagaaaaatccccaaagattacacactgtatgtcatttatataacattcttgaaatgacacaatcacagaaatagagaatactggtcactatgcattaaggaaggtgtggaaggatgtagtgatgggaggaaatgtgtatggctgtaacagggcaacagaggcatcattgtgatgatggaagcgatctgtatcttgcgtttttgaatgtcattatcctggttgtgatattgactg

SEQ ID NO: 13317 - DNA, 434 bp, Homo sapiens
tactatagggcgaattggagctccaccgcggtggcggccgttaaaggaataatctgcagaacatcttgatttacaagggacaaaatgatgcaaattatatgctgtccaacctactggtgaactggatcagaatggtccaaggactgttaaacagaggaagtgtttacattttgaaaacttgcggacgcgtgggtcgaagcttgtacacctaggccgctctagaactagtggatcccccgtgctgcaggaattccatatcaagcttatcgataccgtcgacctcgagggggggcccggtacccaacttttgttatctttactgagggtcaattgcgcgcttggcgtaatcatggtcatagctgtttactgtgggaaaatggcatgcgctcacaattccacacaacatacgatccgtgagcataaagtgtaaagcc

SEQ ID NO: 13318 - DNA, 454 bp, Homo sapiens
tactatagggcgaattggagctccaccgcgggggcggccgttaaaggaataatctgcagaacatcttgatttacaagggacaaaatgatgcaaattatatgctgtccaacctactggtgaactggatcagaatggtccaaggactgttaaacagaggaagtgtttacattttgaaaacttgcggacgcgtgggtcgaagcttgacaccttggtcgctctagaactagtggatcccccgggctgcaggaattcgatatcaatcttatcgataccgtccacctcgagggggggcccggtacccaacttttgttccctttagtgagggttaattgcgcgcttggcctaatcatggtcatagctgtttactgtgtgaaattggtatgcgctcacaattgcacacaacatacgatccgggagcataaagtgtaaagcctgtggtgcctaatgagtgagc

SEQ ID NO: 13319 - DNA, 475 bp, Homo sapiens
actactatagggcgaattggagctccaccgcggtggcggccgcacttttttttttttttttttgttttggtttgttttttgggctctcaggtttaccactctctccccatcttcccaggtttaggaggcaggcctctccctttcctaccctcccacccgaaggtgagtcactagagtgttacaagcttactggcagggaacactacaaattaacaaacagtaagttaccaaaaggggatacacccttataaaagggtacctcggccgctctagaactagtggatcccccgggctgcaggaattcgatatcaagcttatcgataccgtcgacctcgagggggggcccggtacccagcttttgttccctttagtgagggttaattgcgcgcttggcgtaatcatgggcatagctgtttcctgtgtgaaattgttatccgctcacaattccacacaacatacgagccgggagcataaa

SEQ ID NO: 13320 - DNA, 462 bp, Homo sapiens
actactatagggcgaattggagctccaccgcggtggcggccgaggtcaagcttcgaccacgcgtccgctttcaatagatcgcagcgagggagctgctctgctacgtcacaatctttcaaaaaaatgaacatgtaagaaaaagcagttttcattgtgctaattattgcaggccttcatgcacgtaaacctcaacaaaatgtgtgccaacaatatacaaatttccatataaacaaagtcattgatcactaacaaaatataaacatggtttcttttatattagattttttttaaaaaaaagctatttaccagcaagaaaaaacaagtacctgcccgggcggccgctctagaactagtggatcccccgggctgcaggaattcgatatcaagcttatcgataccgtcgacctcgagggggggcccggtacccagcttttgttccctttagtgagggttaattgcgcg

SEQ ID NO: 13321 - DNA, 413 bp, Homo sapiens
ctactatagggcgaattggagctccaccgcggtggcggccgaggtcttcgacccacgcgtccgcatttattaaggcttgtatatgttcaagatccagtgaagactgtcttgggcgtgtataattgatcttaaccacaaggctgagaagttatgtgcagggcttatgatgctacttccaaagtattaaatcctccagagaagcctgtagtgtgggatgcaaactattttaagtgtgaccatgaggtgtttttttgtggaccattttaaagccaatgataggttctaaagcaatctcaacctgagttaggtagaatgggttcggtcatctgcactctagcgggccttcatagctattgtattctggatatcaattcggcactttatgtattagctaaaaatttcatgaccagatc

SEQ ID NO: 13322 - DNA, 497 bp, Homo sapiens
actactatagggcgaattggagctccaccgcggtggcggccgaggtcaagcttcgacccacgcgtccgctccaggagacttctgcttacctctcagtgatcaaaaaccgtttcaccacagttacttaccacgtcctaccgatccgcattctcgcaagtgtccttcactccatttactctactgcatttttcactgtatttctcatgccaaaacttgggcttctccaccagtctgcacacgttcatgctctcaattctcacagccatctatttcattctccactaaactgttagagggatttctgtagaaattaaagaaattcctatcactcctaaaaaaaaaaaaaaaaagtgcggccgctctagaactagtggatcccccgggctgcaggaattcgatatcaagcttatcgataccgtcgacctcgagggggggcccggtacccagcttttgttccctttagtgagggttaattgcgcgcttggcgtaatcatggt

SEQ ID NO: 13323 - DNA, 463 bp, Homo sapiens
ctatagggcgaattggagctccaccgcggtggcggccgaggtgtacaagcttcgacccacgcgtccgcaagttttcaaaatgtaaatacttcctctgtttaacagtccttggaccattctgatccagttcaccagtaggttggacagcatataatttgcatcattttgtcccttgtaaatcaagatgttctgcagattattcctttaacggccgctctagaactagtggatcccccgggctgcaggaattcgatatcaagcttatcgataccgccgacctcgagggggggcccggtacccagcttttgttccctttagtgagggttaattgcgcgcttggcgtaatcatggtcatagctgtttcctgtgtgaaattgttatccgctcacaattccacacaacatacgagccgggagcataaagggtaaagcctggggtgcctaatgagtgagctaactcacat

SEQ ID NO: 13324 - DNA, 441 bp, Homo sapiens
gactcactatagggcgaattggagctccaccgcggtggcggccgaggtacagctttatttatttcttttaggaattgcaggttcctaacaaagtaggggtgaggggggtgttacaaaccagtcactaggcaggaacattagactccaaaagcagagaaatgcttaatttttcttctacctgtttcaccacattcatgtagaactgtagtaaaaaagatggtgaatcaggctgaatcaatctaaataacaacttaaggctcccaaatcacatgaacctaggaccactaaatccaatgtcagacgtgtttaaatggtgcactgctctacatttttctattatgcaaagagctagaaaataatggtagtgtcattatgacattccatgaaaatgaagaaaatctttcaggaaaaattaagaaaataaaaatgtttactaaagaa

SEQ ID NO: 13325 - DNA, 486 bp, Homo sapiens
actactatagggcgaattggagctccaccgcggtggcggccgcccgggcaggtgccaaagccttaacttagattgttacttatgtttctaaatctgtggaagcacatttccttttcttcttcttttcttttactgttaatatccttattctctattttaccagtggagaatgtttagtattaatttccatttagctcaagattcaagaaatgcaaagtgctatttttatcaaatttctgaaagcctactgtcttctgctttggaagtcccacaacagctctttaatttccttaagccccactttcctcatcagcaagttggtgtggcaatggatcataataggttgctgggaggatgaagtgagcggacgcgtgggtcgaagcttgtacctcggccgctctagaactagtggatcccccgggctgcaggaattcgatatcaagcttatcgataccgtcgacctcgagggggggcccggtacccagc

SEQ ID NO: 13326 - DNA, 344 bp, Homo sapiens
actactatagggcgaattggagctccaccgcggtggcggccgaggtacccagtaatcacataaattctgcaatcatctgtttatttagcttaactgtttttttttttatttgttgaagttgttgttgttatttcagtctttttcttattgggttgaccagacttggtaaaatctgtaagaaagttccataattatggggaagatttcctctgaattggctaaattcctgtagctgcaaaaaacaaaaaaatgaaaagtgcggccgctctaaaactagtggatcctcccgtctgcaggaattcgctaacaagcttatcgataccgccgaccactatggggggccc

SEQ ID NO: 13327 - DNA, 290 bp, Homo sapiens
ctactatagggcgaattggagctccaccgcggtggcggccgaggtgttcttcagattcaaatgccaacactaatttgaacttctttgggtctatgacagtttgcaagccatacaaacccaaagagctaatctgtgatttcttaacttgagaaaataataataataaccaccactggaacctacataggtttgttgattatttaacatgacttaaccttttgtttgtatttttttgaaaaaaaaaaaaaaaaagtgacctgcccggggcggccggacggccgggcaggtcg

SEQ ID NO: 13328 - DNA, 443 bp, Homo sapiens
ctactatagggcgaattggagctccaccgcggtggcggccgaggtcaagcttcgacccacgcgtccgtgcaaatttgactttgtaaatggcccttgggctctgggaggaaagcaactgttgggccatgtggttgtatctttagttttgtaaagaattgccaaactgttttataatgtgggtatatctttccacacttccagcacaatgtatgagtgatccagtttcttagcaccatagtcagaatttactgttgctactattttttagctatcctgatagatgtgtagtgatattttattctggttttgaagcagtgtcattgtctggggtaaatccttgaggtttgttgtctcatgtcaagggtaatcaaggacatggacacacaagtagtgaatttaagagtggaagtttaataggtgaaagaaagagaacagagaatagc

SEQ ID NO: 13329 - DNA, 468 bp, Homo sapiens
actactatagggcgaattggagctccaccgcggtggcggccgcccgggcaggtcaagcttcgacccacgcgtccgtcttattttttactcttaggcaatgcggaatatcaatcccagcacagcaaattctccaaaatgtcaggtaggctcttatctgatgttttagcactggaaaaaaaaaaaaaaaaaaagtgcggccgctctagaactagtggatcccccgggctgcaggaattcgatatcaagcttatcgataccgtcgacctcgagggggggcccggtacccagcttttgttccctttagtgagggttaattgcgcgcttggcgtaatcatggtcatagctgtttcctgtgtgaaattgttatccgctcacaattccacacaacatacgagccgggagcataaagtgtaaagcctgggggtgcctaatgagtgagctaactcacattaattgcgttgcgctcac

SEQ ID NO: 13330 - DNA, 421 bp, Homo sapiens
tactatagggcgaattggagctccaccgcggtggcggccgcccggggcaggtcaagcttcgacccacgcgtccgcatattttcattacttgacaatgtgggatgggtgcaatttattccatcttcactaaaatagaagcaattccataggtaccataaacctattttaggtaccacaaggtgtctttttacacagctcatttgaatacaggtgttctgagaaggggtttctattttaaaattaccatatcaaaataaatgtgccttatttttttataagtcttgttaaatcagtgtccatattactgtttggggaagggtgaaatgttagtgacctttgccgctctagaactaggtggatcccccggcctgcaagaattcgatatcaagcttatcgataccgtttacctcgagggggggcc

SEQ ID NO: 13331 - DNA, 438 bp, Homo sapiens
tactatagggcgaattggagctccaccgcggtggcggcaggtacaaataagcccaccccactaggaactatgttaaaaaaaaattcaagaaagaatttaagggagattacagtgttactgtgacaccaggaaaacttagaactttgtgtgaaatagactggccagcattagaggtgggttggccatcagaaggaagcctggacaggtcccttgtttcaaaggtatgacacaaggtaacccgtaagccaaggcacccagaccagtttccatacatagaaagttacagctgcttttatacccccttgccccgccaacgtagttaagagaacagcagcataagcggctggcagaggcaaggaaagaccagtagagagaaaaaaaggccatctataccaattctaagttaatttagactaaacaagggtcttaatagcaaag

SEQ ID NO: 13332 - DNA, 457 bp, Homo sapiens
tatagggcgaattggagctccatccgcggtggcggccgcccgggcaggtacgagcggccgcccgggcaggtacacaaaccagatgtatgcaatgatgccaaaagtcatctcaaaattccaagctgacctagtgcaacacatttacacttggataaactatcaccttgaagatttactttgtatacttcaaaagatctggtcatgaaatttttagctaatacataaagggccgaattgaaatccagaatacaatagctatgaagggccgctagagtgcagataaccaacccattctacctaactcaggttgagattgctttagaacctatcattggctttaaaatggtccacaaaaaaacacctcatgggcacacttaaaatagtttgcatcccacactacaggcttctctggaggatttaatactttggaaggagcatcataagccctgcacataac

SEQ ID NO: 13333 - DNA, 366 bp, Homo sapiens
ctactatagggcgaattggagctccaccgcggtggcggccgaggttattttccctcagtaacatgtaattgctacattttttataagaaggtatggttagaaaaaaatgtgaaagatcacttaaaccaaagccagttacaaggagtaatctctcctgttggtttaccttcacctcagaactacaagaatattacaatacatagtgaatagttgtctgtaacatttctaccagttgtttcagtagcatattggtcttggcatttcttggcactgtggttctgctgtattatttgtgatgtcttattgtttgtgagcttttgtttttttttaaagaaaaaacaaaaactaagtgggactatgtatgta

SEQ ID NO: 13334 - DNA, 394 bp, Homo sapiens
actactatagggcgaattggagctcctccgcggtggcggccgcccgggcaggtacccagtaatcacataaattctgcaatcatctgtttatttagcttaactgtttttttttatttgttgaagttgttgttgttatttcagactttttcttattgggttgaccagacttggtaaaatctgtaagaaagctccataattatggggaagatttcctctgaattggctaaattcctgtagctgaaaaaaaaaaaaaaaaaaaagtgcggccgctctagaactagtggatcccccgggctgcaggaattcgatatcaagcttatcgataccgtcgacctcgagggggggcccggcacccagcttttgttccctttagtgaggggtaattgcgcgcttg

SEQ ID NO: 13335 - DNA, 319 bp, Homo sapiens
ctactatagggcgaattggagctccaccgcggtggcggccgaggtgtacaagcttcgacccacgcgtccgcaagttttcaaaatgtaaatacttcctctgtttaacagtccttggaccattctgatccagttcaccagtaggttggacagcatataatttgcatcattttgtcccttgtaaatcaagatgttctgcagattattcctttaacggccgctctagaactagtggatcccccgggctgcaggaattcgatatcaagcttatcgataccgtcgacctcgagggggggcccggtacccagcttttgttcccttt

SEQ ID NO: 13336 - DNA, 387 bp, Homo sapiens
cactactatagggcgaattggagctccaccgcggtggcggccgcccgggcaggtacttttacggcttctgacagcctcagaagaacattccctaccccaaaattataaaaataatcttgtatatattcttctcaaaactttatactttttttaaggcttggatttttaatctatctggaatgtatttttaaatactgagtgagtcacttttctcccggacgcgtgggtcgaagacctcggccgctctagaactagtggatcccccgggctgcaggaattcgatatcaagcttatcgataccgtcgacctcgagggggggcccggtacccagcttttgttccctttagtgagggttaattgcgcgcttggcgtaatcatggtcatagc

SEQ ID NO: 13337 - DNA, 431 bp, Homo sapiens
attggagctccaccgggtggcggccgctcgaggccgctctgacctctttaagtgaaacttattatgctaatagtatgatgcgcccttttgctgtagcagttaccatagttacagataagtatatattgttgtgatgatctgatttcctggttaccccacccatgcaaaacaacaacaaaaacctttaccaggctctataacagggggaccaaacttgtttttgctcatcattgccggacggtgggtctaagcttgacctgcccgggcggccgctctagaactagtggatcccccgggctgcaggaattcgatatcaagcttatcgataccgacgacctcgagggggggcccggtacccaacttttgttccctttagtgagggttcattgcgcgcttggcgtaatcatggtcatagctgtttcctgtgtgaa

SEQ ID NO: 13338 - DNA, 267 bp, Homo sapiens
cactactatagggcgaattggaagctccaccgcggtggcggccgaggtacttaccccagacaacgacgccgcttcaccatgatgatggacaacaggcaactttttttttggagtttcagcttgcttccaacagggacggtgagtgtgaggtttattcccatttctaagacgatagaagttttcagcctaagccgtattcctaggtaagcagctggattgcagttttgtctttgaaattctccttaatgactaaaagttaagattaac

SEQ ID NO: 13339 - DNA, 448 bp, Homo sapiens
agggcgaattggagctccaccgcggtggcggccgaggtctagagacagggtctcactacattgcctagattggtctcaaactcctgggctcaagcaatcttcctctcttggcctaccaaagtgttgggattgcaggtgtgcgccactaggcccagcttgaaaaatttttaatgcatgtggtaatccacaggagatcacatttagtatatgaccaagttaattaagaagtcaaaaaacacgttaaatttaagcagaataaggctgggttcggtggctcatgttagtttttatccttaaaattgtctgagttcttagaacacagaaaaaacaaatttgaatgcatttctaacagcttaataatttatatgtcccattatgattttagcggaatgttttaaagcaaagcataattcactgcaaagataaacctgaaaaagcaaacaaactt

SEQ ID NO: 13340 - DNA, 398 bp, Homo sapiens
gggtggcggccgcccgggcaggtcaagcttcgacccacgcgtccgatttcaggttgacttttctcacctttaacctctttatatagcacagtgcaatctggccctactgccacttcatctgggttatctgtagcttgagttgtaaaaaaaaaaaaaaaaaaagtgcggccgacctcggccgctctagaactagtggatcccccgggctgcaggaattcgatatcaagcttatcgataccgtcgacctcgagggggggcccggtacccagcttttgttccctttagtgagggttaattgcgcgcttggcgtaatcatggtcataaactgtttcctgtgtgaaattgttatccgctcacaattccacacaacatacgagccgggagcataaagtgtaaag

SEQ ID NO: 13341 - DNA, 403 bp, Homo sapiens
tacgactcactatagggcgaattggagctccaccgcggtggcggccgaggtgtcgactcaagctttcagatataggcattccagaatcttctctttacgagttcacctgctagtataatctccacaacttgaatggcattggttgttctgtaattcctgccaaaagcatcacaagttgtacctgcccgggcggccgctctagaactagtggatcccccgggctgcaggaattcgatatcaagcttatcgataccgtcgacctcgagggggggcccggtacccagcttttgttccctttagtgagggttaattgcgcgcttggcgtaatcatggtcatagctgtttcctgtgtgaaattgttatccgctcacaattccacacaacatacgagccgggagcataa

SEQ ID NO: 13342 - DNA, 389 bp, Homo sapiens
tacgactcactatagggcgaattggagctccaccgcggtggcggccgcccgggcaggttacaagtcgacccacgcgtccgcttcagaatatccaattcatgtgaactacaggaaattatagtttagatatttttaaatgatttgcctgtcaccgtataacacaagggtgtcatgaccaagctagatctctttaccatatcattaataaaagtcaaattttaaatttgtgcccaatttggctgggtgtggtggctcattcctgtgattccagcactttgggagacctcggccgctctagaactagtggatcccccgggctgcaggaattcgatatcaagcttatcgataccgtcgacctcgagggggggcccggtacccagcttttgttc

SEQ ID NO: 13343 - DNA, 403 bp, Homo sapiens
tacgactcactatagggcgaattggagctccaccgcggtggcggccgctcgtgaacctgcccgggcggccggccgcacttttttttttttttttttttccttttgagacacagtctcactcttgcccaggttggtctaaaactcctgggctcaagcaatcctcccgctttcagcctcccaaagtgctggggttacagccgtgtgccactgtgtctggcccttttctttttcataggagaagggttgttgactcccaggaaacgtcacctggaaccaagaatgtgaactcaaggacccccgcctgttggcagctgcatttacttgactcctgttcactgtttcttagccttgtcctttctctcctgccagttctaggggacactgcttctcctggttgacctca

SEQ ID NO: 13344 - DNA, 406 bp, Homo sapiens
tacgactcactatagggcgaattggagctccaccgcggtggcggccgcccgggcaggtaccctaaaacttaaagtataataaaaaaaagattatttcctatacttcaaaatcaacaagatttgattgcatttaaatttttctgtccatttgttcttctatgtaatactttaaaaataattggcataaaaattcaatcaattcataaaagtccaaagcaaaaaaaacaaatctactgacatctcttgaggaagaaatgatcaggattgacattaatgaaccctctcacagagaccactacacacacacacacaaaaagaaggatgggtgaatggatgcagagagaatttaataagactgaaatgatgccatacatgcttttaaaaaataaaaagtattaaattttaa

SEQ ID NO: 13345 - DNA, 403 bp, Homo sapiens
acgactactatagggcgaattggagctccaccgcggtggcggccgcccgggcaggtacttatactagaagatgctccaaggtttcagaaaggaattaattactttcaatttgcacaatttagaacaaatatctggcttttccctaagcttaatgattttccatttcacacaactaaaatataatagcattattttataatcaagtttaactgatggtctatgatagtagagcgatttagtattttgacaaaaatcttatgagacatgaagtcattcaatttgccggacgcgtgggtcgactcaagctagacctcggccgctctagaactagtggatcccccgggctgcaggaattcgatatcaagcttatcgataccgtcgacctcgagggggggcccggtac

SEQ ID NO: 13346 - DNA, 406 bp, Homo sapiens
tacgactcactatagggcgaattggagctccaccgcggtggcggccgaggtcgccatcacacccggctaattttttttgtatttttagtagagacagggtttcaccatgctagccaggatggtctcaatctcctgatctcgtgatccgcccacctcagccttccaaagtgctgggattaaaggcgtgagccaccacgcctggccaggagattcttaattatttctgaactctatcagttttgtattaggacatcttatttaatattatcaaaagatagttcctcttagaggcataaatcagtcaatcaacaaacaataggcaatcacggacgcgtgggtcgaagacctgcccgggcggccgctctagaactagtggatcccccgggctgcaggaattcgatatcaa

SEQ ID NO: 13347 - DNA, 407 bp, Homo sapiens
tacgactcactatagggcgaattggagctccaccgcggtggcggccgaggtgtacaagcttcgacccacgcgtccgcatttttctggtgttccctcttacgtgcacaccccttgctcccctttgggttgacttataatctgacttttgtgacagatgttaggaggtggagcaaaggaatttcagaccaatcagttaagagactgctgtggggtaagaaaaaaaattagcctcttaaaattactcttatcaaaggaaaaaaagttggaagcacatgatagtataaccagaaacatgacacagaagaattaagggaagaacctgcccgggcggccgctctagaactagtggatcccccgggctgcaggaattcgatatcaagcttatcgataccgtcgacctcgagggg

SEQ ID NO: 13348 - DNA, 390 bp, Homo sapiens
gtaatacgactactatagggcgaattggagctccaccgcggtggcggccgcccgggcaggtggaaaggtgggtggggagagggaggcttatttgttgctgcagtgtaactaagtgaaacctaattcatatgactcaaactaaggtatatttggttagatctaggtgagttctactttagaggaaatcctggtaactgttgtttgtttgtaagttatagctgtaattaattttccctgtattcaaagcccccaaaccctgcattcagatactatgcatttagacttccttaggcaaagtcaaggcaacaagctgatgattctaagctattattcaaggagtatctaccatcataaaggtggtttagtcatatagataatatcaatcaataa

SEQ ID NO: 13349 - DNA, 399 bp, Homo sapiens
tacgactcactatagggcgaattggagctccaccgcggtggcggccgcccgggcaggtcttcgacccacgcgtccgtgattgcctattgtttgttgattgactgatttatgcctctaagaggaactatcttttgataatattaaataagatgtcctaatacaaaactgatagagttcagaaataattaagaatctcctggccaggcgtggtggctcacgcctttaatcccagcactttggaaggctgaggtgggcggatcacgagatcaggagattgagaccatcctggctagcatggtgaaaccctgtctctactaaaaatacaaaaaaaattagccgggtgtgatggcgacctcggccgctctagaactagtggatcccccgggctgcaggaattcg

SEQ ID NO: 13350 - DNA, 396 bp, Homo sapiens
tacgactcactatagggcgaattggagctccaccgcggtggcggccgaggtacattgttagacaagtgtttatcactaatctggaatacatcatcttcaataaggctcttgttttcctccaagctgcactgctcacactgctcagttttctgttaagcaacctgctcattatagtagagcaccaaggtgatctgttcttctgttcttcagaagttcactatttcttgttgcaacagggctacatgattttaagattcctcaaagtcaatacgaattaacattattttccatttccattctgtatatcttcacattccataaatataatactcatgtatacgttaaatttccttataagttcaacacattgaaagctaaaataaagacttcctacta

SEQ ID NO: 13351 - DNA, 401 bp, Homo sapiens
tacgactcactatagggcgaattggagctccaccgcggtggcggccgcccgggcaggtacacaaaccagatgtatgcaatgatgccaaaagtcatctcaaaattccaagctgacctagtgcaacacatttacacttggataaactatcaccttgaagatttactttgtatacttcaaaagatctggtcatgaaatttttagctaatacataaagtgccgaattgaaatccagaatacaatagctatgaagggccgctagagtgcagataaccaacccattctacctaactcaggttgagattgctttagaacctatcattggctttaaaatggtccacaaaaaaacacctcatggtcacacttaaaatagtttgcatcccacactacaggcttctctggag

SEQ ID NO: 13352 - DNA, 401 bp, Homo sapiens
tacgactactatagggcgaattggagctccaccgcggtggcggccgcccgggcaggtgacttggctgtgaaaagtgctaaaacagataaaagactatactgacaggcaaatggagcctgttatgacactgacattgaaggtgaaaggagaatccagttcacattagccagggtctcagggaccaggttttgaggcagtatttctgcctcttgaggacagggcagagcaggtgggtaaaaagcaaagagaccagggaagggggactaaaagtaagggaaacagcatctgaggaaaggctcctctgactggattttcacaaacattatttattaacctcactaaacaaggataatgggacaaaacaggggcaagctggaaaaccagcaggggtatttggcagc

SEQ ID NO: 13353 - DNA, 404 bp, Homo sapiens
gtaatacgactactatagggcgaattggagctccaccgcggtggcggccgcccgggcaggtacatcaccctgctgagggacatccaggacaaggtcaccacactctacaaaggcagtcaactacatgacacattccgcttctgcctggtcaccaacttgacgatggactccgtgttggtcactgacaaggcattgttctcctccaatttggaccccagcctgttggagcaagtctttctagataagaccctgaatgcctcattccattggctgggctccacctaccagttggtggacatccatgtgacagaaatggagtcatcagtttatcaaccaacaagcagctccagcacccagcacttctacctgaatttcaccatcaccaacctaccatattcccagga

SEQ ID NO: 13354 - DNA, 374 bp, Homo sapiens
gtaatacgactcactatagggcgaattggagctccaccgcggtggcggccgcccgggcaggtggaaaggtgggtggggagagggaggcttatttgttgctgcagtgtaactaagtgaaacctaattcatatgactcaaactaaggtatatttggttagatctaggtgagttctactttagaggaaatcctggtaactgttgtttgtttgtaagttatagctgtaattaattttccctgtattcaaagcccccaaaccctgcattcagatactatgcatttagacttccttaggcaaagtcaaggcaacaagctgatgattctaagctattattcaaggagtatctaccatcataaaggtggtttagtcatatag

SEQ ID NO: 13355 - DNA, 370 bp, Homo sapiens
gactcactatagggcgaattggagctccaccgcggtggcggccgaggtcaagcttcgacccacgcgtccgcagcctgggtgatagtgagatcctgtcttaaaatgaagaaagaaagaaaaaaagaatgagaaggaaggatattaattgaagtaagagcacatttgattacaaaatagaagaggagtaagtgagaactaaacggggaatacagatagcagagattaaataggctataagaaaaaaaagggatgataataagaccatggtagtacctgcccgggcggccgctctagaactagtggatcccccgggctgcaggaattcgatatcaagcttatcgataccgtcgacctcgagggggggcccggt

SEQ ID NO: 13356 - DNA, 359 bp, Homo sapiens
agggcgaattggagctccacgcggtggcggccgaggtcttcgacccacgcgtccgtttacaatatggtgacaacagataactgtaaaaacttctttttcaaatagaaccagcaggagcatgcatggaacacatataccaaacatctttctgataacattaaacatttttaaaagatgttaaatgttcttttcattgtggtgcttcagattcctgattctagaacttgtgtgtgtggaacctgtgtgctaactattctgttggaatttaccagcaaagaattatctaagaattttcaaactaaatgatgggggaaggaactaacatttttgcagtccctggaaatgtaaaatgttgtacc

SEQ ID NO: 13357 - DNA, 376 bp, Homo sapiens
agggcgaattggagctccaccgcggtggcggccgcccgggcaggtacaataaatagcattcccacggtgaccacaagtcttggaatcagttccaggtgtcgtcgtggccgttgacaccgctgccttctgacggtaaatgtattgtagaattcatgttgttatcaggcttcagtttcctcatctctaaaatgagaggattggataagttagtagtttctaatttttacttttaatcagtggcatctcccatttatttttcatttgaaataaaacttttgaattttatcttctacctaaataacatattttgttttatgtttcaagatgaagctcacactgagttggaaaaaaggaaaaagcaaaggatcaaagctgg

SEQ ID NO: 13358 - DNA, 360 bp, Homo sapiens
agggcgaattggagctccaccgcggtggcggccgcccgggcaggtgccaaagccttaacttagattgttacttatgtttctaaatctgtggaagcacatttccttttcttcttcttttcttttactgttaatatccttattctctattttaccagtggagaatgtttagtattaatttccatttagctcaagattcaagaaatgcaaagtgctatttttatcaaatttctgaaagcctactgtcttctgctttggaagtcccacaacagctctttaatttccttaagccccactttcctcatcagcaagttggtgtggcaatggatcataataggttgctgggaggatgaagtgagcgga

SEQ ID NO: 13359 - DNA, 375 bp, Homo sapiens
tatattggcgaattggagctccaccgcggtggcggccgaggtcaagcttcgacccacgcgtccgattattctctccatttaggctataaatctttcagtgtagggtgtttctaatgtcatattcttccaaaaaaaaaaaaaaaaaaagtgcggccgctctagaactagtggatcccccgggctgcaggaattcgatatcaagcttatcgataccgtcgacctcgagggggggcccggtacccagcttttgttccctttagtgagggttaattgcgcgcttggcgtaatcatggtcatagctgtttcctgtgtgaaattgttatccgatcacaattccacacaacatacgagccgggagcataaagtgtaaagcct

SEQ ID NO: 13360 - DNA, 388 bp, Homo sapiens
atacgactcactatagggcgaattggagctccaccgcggtggcggccgcccgggcaggtcttcgacccacgcgtccggctctccagtttatacatgaagaaactttccgaaagtcttgcagcttgtggagagcagagctggagagcaggctagtctgattttagaagggagttaaccattacataacctgcaggtggcttctccccatacctgccgtgggataatatggctcactttttacttcatttacaatatttaataagtgcgattttagacttgagaagagaatattttctgctaaaattatccccactagagataatcaccagtgaattaatacactgcagcaacggaaccagtcagcttttttggtaatcattcccttcct

SEQ ID NO: 13361 - DNA, 361 bp, Homo sapiens
aattggagctccaccgcggtggcggccgcccgggcaggtcttcgacccacgcgtccggctctccagtttatacatgaagaaactttccgaaagtcttgcagcttgtggagagcagagctggagagcaggctagtctgattttagaagggagttaaccattacataacctgcaggtggcttctccccatacctgccgtgggataatatggctcactttttacttcatttacaatatttaataagtgcgattctagacttgagaagagaatattttctgctaaaatttatccccactagagataatcaccagtgaattaatacactgcagcaccggaaccagtcagcttttttggtaatcatt

SEQ ID NO: 13362 - DNA, 207 bp, Homo sapiens
gtatacgactcactatagggcgaattggagctccccgcggtggcggccgaggtgcttcgacccacgcgtccggtatttctcttaaagttaattttgatagatatttatctagatgctttcttttttcccttgccataatagcctggcttgtagagagagttatgtttgaaaaggcttgccttttttccgtcgctctgagcagacctg

SEQ ID NO: 13363 - DNA, 279 bp, Homo sapiens
ggcgaattggagctccaccgcggtggcggccgaggtcaagcttcgacccacgcgtccgtgatgctggcttcccggtcaaagctgaggagtttgtggtgctttctcaggaaccttctgtcacggaaaccattgcacccaaaattgcaagacctttcatagagactttcctcaggccctcaagagtattgagtatctggaggaggatgcccagaagtccgcacaggagggggtgcttgggaccacacactgaggctctgtcatcagactctgagaacatgc

SEQ ID NO: 13364 - DNA, 387 bp, Homo sapiens
gcgtaatacgactcactatagggcgaattggagctccaccgcggtggcggccgcccgggcaggtcaagcttcgacccacgcgtccgtgataacttctcctaagtgccaggcattgtattacatgctgggagcacaaagatgaataataacaataggttcacagaaaagatgaattgattgagagaaaaagaaccctccaggagccctcagcgtagtagggggttggtgttggagggtggaggaatggaaaaggccctgaaatgcaagcagagaaatgatgaatcaattcaggggctgcggtgaggttatatgaatatctttacagcagcctcgaagactgatcaggttactataccctctcttctgtccacgtgcatttaaaaaacc

SEQ ID NO: 13365 - DNA, 366 bp, Homo sapiens
ttggagctccccgcggtggcggccgaggtagcttgagtcgacccacgcgtccgttcagatccgtttcagaaacgtgagtctctagctcaggagatttccacaactgtccttagtaacctgatcttattctcatgtttaaccttggcagtgggaagttcttcctggtatcctgcctaatttactggagttggcattaatgccatttccccctaaggcgtggctcttggaccagtatcacctgagaatttgatagacatagacccagagttactgaggcaggtgctctgttttggggaccagcaatcggtgctttagcaagttctttgggtgatagggtttggaaactactgctctaaagcatcatct

SEQ ID NO: 13366 - DNA, 395 bp, Homo sapiens
tacgactcactatagggcgaattggagctccaccgcggtggcggccgaggtacccaaaagatatcactgtgaaggtttggatacactgactgaggaaaaaagaaggtcctgaaagcgtctagacaaaaaaagactacttgtaagttgcaagaatcagaatggcattggacttctcagctttcctcattagaagtttaagatctgaagcaatctttaaactcgtgaggaaaattaagtctaataaataattttcttcttagccaaacaatcaaatgtgaagctagaataagcattttcaggtaaaaaaaaaaaaaaaaaagtgcggccgctctagaactagtggatcccccgggctgcaggaattcgatatcaagcttatcgataccgtcgacctc

SEQ ID NO: 13367 - DNA, 395 bp, Homo sapiens
tacgactcactatagttgcgaattggagctccaccgcggtggcggccgcccgggcaggtacatcttgtgatgattttggcagcaattacagaacaaccaaggccattcaagttgtggagattatactagcaggtgaactcgtaaagagaagattctggaatgcctatatctgaaatcagaatcctagtagtttgtagtttgcctcttcctagaagttcaagagactcaagtcataggctacagatgtacctcggccgctctagaactagtggatcccccgggctgcaggaattcgatatcaagcttatcgataccgtcgacctcgagggggggcccggtacccagcttttgttccctttagtgagggttaattgcgcgcttggcgtaatcatggt

SEQ ID NO: 13368 - DNA, 394 bp, Homo sapiens
gcgtaatacgactcactatagggcgaattggagctccaccgcggtggcggccgaggtcttcgacccacgcgtccgcaactgttgatctaacttttccacttgaatgtctaattggcaaatcaaacctaacatgttccaaacgagttctgaagcaccccctctgccaaatctacgtctcccacagccttccctatttctctacctggtacctgcccgggcggccgctcgacctgcccgggcggccgctctagaactagtggatcccccgggctgcaggaattcgatatcaagcttatcgataccgtcgacctcgagggggggcccggtacccagcttttgttccctttagtgagggttaattgcgcgcttggcgtaatcatggtcatagctgttt

SEQ ID NO: 13369 - DNA, 395 bp, Homo sapiens
cgtatacgactcactatagggcgaattggagctccaccgcggtggcggccgaggtcttgagtcgacccacgcgtccggagatgtatacgccactataggaactataagaaaaagtcaaatggaaatcttataaataaaaaccacagtcactataatgaggaaatactttgataaggtgtcagtgaactcaaaaatcaatcaatagaaactactcaaactaaaactcaaagagaaaaaaaaagatgggagataattattttttaagaattggtcatcaaaatgtagcaacaagtttgccttatcctatatcatttgaattttcaaaaaataagctcattatacaatctttaaaatattttgaatagaactgtttcatgtgttatttgtgaaaatta

SEQ ID NO: 13370 - DNA, 396 bp, Homo sapiens
gcgtaatacgactcactatagggcgaattggagctccaccgcggtggcggccgaggtcaagcttcgacccacgcgtccggggaacccttgttcaggttctttttaggcaacccaagccaagacaacaaagtaagatagagccccaaatgtggtcgtataaggtttttcaaagaaagtaacacttgagttaggtcttaaagtttcacctaagaaactgcccaggtggacaagaagaaagggtgttccaagtagaaataatagcatggacaaaggcaatgtagcaggaaaagtcttcgtaaattcagggaatttcaagtgtttcacgatggaaggagcaatagagtcatttacttgcggtggcaggggatgttggaaatgtaaacaagagtgagatac

SEQ ID NO: 13371 - DNA, 369 bp, Homo sapiens
agcgcgcgtaatacgactcactatagggcgaattggagctccacgcggtggcggccgaggtcaagcttcgacccacgcgtccgtgatgctggcttcccggtcaaagctgaggagtttgtggtactttctcaggaaccttctgtcacggaaaccattgcacccaaaattgcaagacctttcatagagactttcctcaggccctcaagagtattgagtatctggaggaggatgcccagaagtccgcacaggagggggtgctgggaccacacactgatgctctgtcatcagactctgagaacatgccgtgtgatgaagaaccatcccaattagaggagctagctgacttcatggagcagcttacaccaattg

SEQ ID NO: 13372 - DNA, 377 bp, Homo sapiens
agcgcgcgtaatacgactcactatagggcgaattggagctccaccgcggtggcggccgcactttttttttttttttagcttgagtcgacccacgcgtccggggatctagatcacgagcggccggccgcccgggcaggtacggaagccatgcacttgcctctccttcagagctgggattttttttcattttgctggctgtgagcacacacacgcccacaggtgcctaagcctcttgtatgtgtgttttgaactgtgtcctctgagttctgtgtctgggtgcatgctctcctcttagcgtgggtctccttcccctgtgtagcacttcacaatgttaggcatttgtctgtgatagcagctgttcagtaatttcctacttg

SEQ ID NO: 13373 - DNA, 396 bp, Homo sapiens
gcgtaatacgactactttagggcgaattggagctccaccgcggtggcggccgaggtttcgtcccacgcgtccggaatttatctggccaggcattggtagtttacagaagtctaccagatgattctaatgtgtggtcaagactgagaactatgtgtttaattgggttcatttcaagaatactgtaaaaattttatctaaatactaaatatccataaaagaaacctcggtaatcaggccaggtttttgagtttttccagattagcccaactacaggggaaagagactttcgcactatatcccagagtctctgctcctgcttccagcctcaatgcactgggcctttctgctgccttggagcacttagagggattacaggaggagtgatctgtggagttt

SEQ ID NO: 13374 - DNA, 522 bp, Homo sapiens
  misc_feature 411: n = A,T,C or G
ctatagggcgaattggagctccaccgcggtggcagcgcccgggcaggtacatacagcctgaagttaacctttctatgttaaatgaaaaaactttgtcattcatcaggtcacagaaaccaaaaactaaacaatgcaaaaaaaaaaaaatctaaaaataaaagaattttatatttgaagttattctggatattcgcaccattttagcttctgaaaaaaatgcaactatgaaatgaagacctcatatattttcatttatcaatataatgttaaaagtttcattccaccgggtgtggtggctcacacttgtaatcccagcactttgggaggccgaggcgggcggatcatgaggtcaggagatcgagagtatcctggctaacatggtgaaaccccgtctctactaaaaaaattccnaaaataaaaaaaaaaggaaaagttcctcggccgctctagaactagtggatcccccgggctgcaggaattcgatatcaagcttatcgataccgtcgacctcgagggggggcc

SEQ ID NO: 13375 - DNA, 475 bp, Homo sapiens
tatagggcgaattggagctccaccgcggtggcggccgaggtacattgtagttttcttagccatttttcaatagtctacacagtgtttatgtttccttttatttgtgtatagtggagtagaggggaggtttttttattcaaatagaagaagctaaaactcaaatgcaatgtcagatctcacaataaactgacccaatttctgaaacccaataaacacatttcatttgtaatattctttattatatagctctatgaaaagtaatttgtgactttcgatcttaaaagagagttttaaaaatacacagtaaattgaaagaaaaactactacatttaaaacagtattttcctgaaaacatagaatgaaaatgcaagtattttgtgcatggcagctgtttttaaggaaccaatgttatatatggtgaattttgtggaagactatggctcttaaaatatttcttataaataacatggctttt

SEQ ID NO: 13376 - DNA, 544 bp, Homo sapiens
tggagctccaccgcggtggcggccgaggtacatgcctgtaatcccagctgttggggaagctgagatgggaggattgcttgagcctgggatactgatattgaggctgcagcgggccgagaataccactgcactccagcctggatgacagagtgagacactggctcaaaaaaaaaaagaaaaaggaagaaaaaagtttaaatcaatgaatgttctcatttctaatgaaataatgaaacattattgggagagttatagtcataatcatcttactgcactatcaattaaaaaatacatcattttttagagcacaatatataccataaagaattattcaaatagtctaaatattacgatcaaatttttaatagactttgttacttaaactaaaactgtattagtctgtattagtcagctcagttgggattcacacctgtaatcccaacacctaggggggctaaggcaggtggctcacttgaggccaggagtttgagaccagcctagccaatataacgaaaccccatttctactaaaaatacaaacaaat

SEQ ID NO: 13377 - DNA, 415 bp, Homo sapiens
tatagggcgaattggagctccaccgcggtggcggccgaggtacactgtgtaagtggtcaaagatagacatggttttatttacaaggaaatttgctgaagtgtaaattataacacgaagagatgggagggaggggtaaacacctaaatgtctaacaacagagaatggttctctgttgatacaaaattatgatacatcaaaaaagaacaacaatcaaattctctgagaattcccattacagttaaaaggagctcccagccaggtgcggtggctcacgcctgtaatcacagcactttgggaggccgagtcgggtggatcacgaagtcaagagattgagactaccctggccaacactgtaaaaccccgtctctactaaaatacaaaaattagctgggcgtggtggcttgcacctgtagt

SEQ ID NO: 13378 - DNA, 454 bp, Homo sapiens
agggcgaattggagctccaccgcggtggcggccgaggtactgaataactgccaatgccatctgcctgtggccttctcaagtttgtctgcacctgtggttatcctgacttcaaacccggggagacagaggctagaagaggcagacagctcttgtgtattctcctgtccagtgcaaagaacatctggaactctgagccctaaccttaaatgcaagacctcatctgcaggtgttcctcatccttttagcccctcagtgatgtaagcaacaaacgtcacccagctcctggggcacacttcactcccagatgagcttgtcctggatttgcagggagcctggctccctagaccttttggccagatccccacaggggaattgtgcaggtgcgccctccccagatccccaattggtattgggatcacaccaactgtcacacatggggagggcagctgcaccc

SEQ ID NO: 13379 - DNA, 549 bp, Homo sapiens
cactacttagggcgaattggagctccaccgcggtggcggccgccggggcaggtacatcaccctgctgagggacatccaggacaaggtcaccacactctacaaaggcagtcaactacatgacacattccgcttctgcctggtcaccaacttgacgatggactccgtgttggtcactgtcaaggcattgttctcctccaatttggaccccagcctggtggagcaagtctttctagataagaccctgaatgcctcattccattggctgggctccacctaccagttggtggacatccatgtgacagaaatggagtcatcagtttatcaaccaacaagcagctccagcacccagcacttctacctgaatttcaccatcaccaacctaccatattcccaggacaaagcccagccaggcaccaccaattaccagaggaacaaaaggaatattgaggatgcgctcaaccaactcttccgaaacagcagcataagagttatttttctgactgtcaagtttcaacattcaggtctgtccccaacaggcaccacaccggg

SEQ ID NO: 13380 - DNA, 322 bp, Homo sapiens
taccccccctcgaggtcgacggtatcgataagcttgatatcgaattcctgcagcccgggggatccactagttctagagcgggcgggcgggcaggtacagatggggtttcaccgtgttatccaggatggtctcgatttcctgacctcatgatccatccaactcggcctcccaaggtgctggaattacagggcgtgagccaccgcactttggccagaacttacatatttcttaaacatcaattaaatatatattgtatttttacctttttttgaataggggtctttgctatgtttgcccaggcttggtttttgaacttcctggc

SEQ ID NO: 13381 - DNA, 289 bp, Homo sapiens
ccctactaaagggaacaaaagctgggtaccgggccccccctcgaggtcgacggtatcgataagcttgatatcgaattcctgcagcccgggggatccactagttctagagcggccgaggtaccccattttatgccataagtcaggtttctccctcaatagccctttggaactctcaaggtccagagtggcatcaaaccaactgacacatgagttgatacatcatgtgctgccaacagagaaattagtctgtgccaaactcagcacaatcctgcagttcaaaccagaattt

SEQ ID NO: 13382 - DNA, 328 bp, Homo sapiens
ccctactaaagggaacaaaagctgggtaccgggccccccctcgaggtcgacggtatcgataagcttgatatcgaattcctgcagcccgggggatccactagttctagagcgaccaagatttgaatcatgctttcaaaagctaatgtgaagttagacatatttggtttcataatcacagaattttaaaaacaccaggtctgcaatattcagaaatcaccattaacgctctcttgacacatacaatcaatttcactttagatcgctgatttttttaacaactgatttagttatttctgaatactgctagaaaatttcaaaatctacaatt

SEQ ID NO: 13383 - DNA, 535 bp, Homo sapiens
aagctgggtaccgggccccccctcgaggtcgacggtatcgataagcttgatatcgaattcctgcagcccgggggatccactagttctagagcggccgaggtacatcaccctgctgagggacatccaggacaaggtcaccacactctacaaaggcagtcaactacatgacacattccgcttctgcctggtcaccaacttgacgatggactccgtgttggtcactgtcaaggcattgttctcctccaatttggaccccagcctggtggagcaagtctttctagataagaccctgaatgcctcattccattggctgggctccacctaccagttggtggacatccatgtgacagaaatggagtcatcagtttatcaaccaacaagcagctccagcacccagcacttctacctgaatttcaccatcaccaacctaccatattcccaggacaaaacccagccaggcaccaccaattaccagaggaacaaaaggaatattgaggatgcgctcaaccaactttttcgaaacagcagcatcaag

SEQ ID NO: 13384 - DNA, 461 bp, Homo sapiens
actaaagggaacaaaagctgggttccgggccctccctcgaggtcgacggtatcgataagcttgatatcgaattcctgcagcccgggggatccactagttctagagcgggcggccgggcaggtactggatgacagcaagtgcacacatcaagagaaagttaccattcagaggtgcagtgagttcccttgtccacagtggaaatctggagactggtcagaggtaagatgggagggctgttatttcccctaggtcatctcttacattctagttctggtgctctctatctgtttaagacaaacccttgtgcacctttctcccacccctccctttctcccttgtctcccttgagaaaacaactacagttctctgcctgcaccatgactgtcgtacgcgggggcagtttggcggtcccgcgggtctgtctcttgcttcaacagtgtttggacggaacagatccgggg

SEQ ID NO: 13385 - DNA, 568 bp, Homo sapiens
ccctactaaagggaacaaaagctgggtaccgggccccccctcgaggtcgacggtatcgataagcttgatatcgaattcctgcagcccgggggatccactagttctagagcggccgaggtacaagctgtgcactgcaaggtaaccacgtggccagaggcacatccctccctcacatatactgagtggtgtaatgcagtcaccttgtcatctggcaagaggtgatcgatggacacaaactcctcccggaactgcccctccagcgagctcactctgaggttatctgaactcacatagcttgggaaacccagctgggcacgggcaacatttgcgtagtgacccttccagtcatcggagcacatggtcttccacgaagcagctgtgaacacctggagcacggcattctgaccactcacccggacacagcggtacctgcccgggcggccgccaccgcggtggagctccaattcgccctatagtgagtcgtattacgcgcgctcactggccgtcgtttacaacgtcgtgactgggaaaaccctggcgttacccaacttaatcgccttgcagcaca

SEQ ID NO: 13386 - DNA, 521 bp, Homo sapiens
gcgcaattaaccctcactaaagggaacaaaagctgggtaccgggccccccctcgaggtcgacggtatcgataagcttgatatcgaattcctgcagcccgggggatccactagttctagagcggccgcccgggcaggtactttgcaagacacgcctggctacgaacaacatgggacaatgggcagcctcgctgcactgcacagaggaaaggaaagaggccttgcagccactgcctgggaaggagcagcacattctgcattaaccaggcatgcctcactcactgcaatccccaaacaagcccaactctccgtgttgattattcttaccatactccaccagaaagcagcatgattttctgtcctcaaatacttcagattccaagagaactgcaccttctagagtctctactgataacctcagccacttacccacttgaagcatcagcacacacttaaaaaggaaacccgctaagcactcctgactcagtctttccaagcctgcgggtgaaggagctgattcccc

SEQ ID NO: 13387 - DNA, 525 bp, Homo sapiens
cgcggtggcggccgaggtacatattcttccaacctttcttctgtgcataatcatctaggtgtggtgcttacattttcttttggcagtgttatcttagtatcttccagcatggttttctcacctgatactgtaaccatacttccatatcctcaaatgtgttgttttctaaaataactttttttttctttttttagagacggagtctcacttggccaggtgcggtggttcacgcctgtaatcccagcactttgggaggccgaggcgggtggatcacgaggtcaggagttcgatgaaaccccgtctctactaaaaatacaaaaattagccaggtgtggtggcgcacgcctgtgatcccagctactcgggaggctgacgcaggagaatctcttgaacttgggaggtggaggtcgcagtgagccgtgatcgcgccgctgcactgcagcctgggtgacagagtgagactctgtctcaaaaaaaaaaaaaaagatagggtctcactctgttgccaaggctggagtgtggtgg

SEQ ID NO: 13388 - DNA, 531 bp, Homo sapiens
acactactatagggcgaattggagctccaccgcggtggcggccgaggtacgcgggacatactccctaggtgtctgtgaggatggtggaggggattttctccatgccgggaggcttcctggagcaggtgctgcctctcgtgactcttgaaagatgcttgtgaataaagcatactgggagctgagctgctgtttagtaattaaaaatcctttccattgtttagagctcagcacctttgtgcattcatattacgcattcattttcgtatcattgttgaatttctcacttctgctactgcaatgtatgtctacagctgacaagtcttccttgggagccctacgtagctcttttttttcttttctttctttttttttttgagacggaatcttgctctgtcacccaggctggagtgcagtggcgcaatctcggctcactgtaagctccacctcccgggttcacgccattctcctgcctcagccttttgagtagctgggactacaggtgcccaccaccacgcctggctactttttttt

SEQ ID NO: 13389 - DNA, 553 bp, Homo sapiens
actactatagggcgaattggagctccaccgcggtggcggccgaggtacactctgccatgaaggttctggggtggagagggaagcaatgtatatcctacccatggtgattggtccgatggaagtcacatcctgatgggaaaaaaggactgagccagagtggactgtctaaaccaaaatgggataaacaagcatggcatggagccaaaacaaatggctaagtcagaggtcctaatgcagaaggctggacaactaggatggtggggaaagacatgagcttgaaggacttcccaagataaagcagaactaaccagaagagcctgttatagattcatattgggggagttggggtggtttgtgcagggtgcatcaaaaagcactcgcatggaataaacatatcttgcacaggaacatatgacaggtaattgaatagtttgatttgaactatgtaaagacatgatcctgatggtagaaggatggtacctgcccgggcggccgctctagaactagtggatcccccgggctgcaggaattcgatatcaagcttatcgatacc

SEQ ID NO: 13390 - DNA, 528 bp, Homo sapiens
ggcgaattggagctccaccgcggtggcggccgaggtactttttttttttttttttttttgggaccgagtctcactctgtcgccaggctagagtgccatggcgcaatcttggttcactgcaacctccacctgctgggttcaagcgattctcctgcctcagcctcctgagtagctgggattacaggccctcaccaccacgcccagctaatttttgtatttagtaaagatggggtttcactgtgttggccaggctggtctcgatcttttgaccttgaaactttcacataaactttcacatttccatgacaaagttttagcagtaacttccaaattggtcttattcaactccaacattaaactttgtatgtacctgcccgggcggccgctctagaactagtggatcccccgggctgcaggaattcgatatcaagcttatcgataccggcgacctcaagggggggcccggtacccagcttttgttccctttagtgagggttaattgcgcgcttggcgtaatcatggtcatagc

SEQ ID NO: 13391 - DNA, 558 bp, Homo sapiens
acactactatagggcgaattggagctccaccgcggtggcggccgcccgggcaggtacatgatccaggatgtgatgggatcttagggcttggctggaaggtttctccagtcagccatctagcagagctgcagatctgggctgggctgttggctaaagtgctcttcacagacacctcattcggctcttccttcagcttcttcacttatttcttactcagtcactactcagctccttgtccatgtgtccttgaagccatcctaggtcttattctgattctgaattcttcagtcacccataagcttctccttaccccgggagtcagtgggtgtgtgttcccaggtggacttaaccattcttctcctttatgatcctttcccttgggtggacaagtgtgatttggttgtaaggccatttttcaagttgcctatacattgataaaagaaatcccactaacggaagtagactgcatgccagatttcagtgtctttctccaggggccaaggttggacccaaaagtgcatggggtgcttggtgtcgttcagtgatgtagtaaggata

SEQ ID NO: 13392 - DNA, 454 bp, Homo sapiens
agagctgaccatgagtaattggccacataaatatgaaatgaaaaccggccatcatctgcatcttatgagtgcacgtcatcagagatgtccactccagttacaagaaagtcctgagggctttcttggagcctgaggggcgctggaggtgagacctggaggtgagcaggagttaactaggatgagggacgggcgcagcatacaggaaaagctgcctgggggagaaaggaccaacagcaaagactgagaaaaaaatgctgttgtgaccagggttcagagcgggcatggaggactgagggttcagagcgggcatggaggactgagggttcagagcgggcatggaggactgagggttcagagcgggcatggaggactgagggttcagagcgggcatggaggactgagggttcagagcgggcatggaggactgaggggttcagaacgggcatggaggact

SEQ ID NO: 13393 - DNA, 577 bp, Homo sapiens
cgcggtggcggccgcccgggcaggtactaaggacaaaaagacatttattctctttgacccttgctggccagacacagaaagatgaccttcacccaaggacacagcacttgcgggtggccttctccacctccagctattgcttggtttcaggtgaccactccctttctcttctcaggcctatgggtggtaacagctcccatccactgctagtcttagacatctttactttccttgattgattcccttgactctgcccacatcttttaaaatatcccatattaaactttttacacccctttgaatgtgtcctgcttcctgctgggaccatgactagtctcttctagttggaatccatatcaccttctgtgatgtagtctccaagtcaggcagtctcatttcaactacagtctttctttatgcttctctttttcctttctggactcttacctttcttttatttcttactcagcaacagtgtctgcccattaaaatgcacctttgcggtggtggtttggttatctttatctctcttatttcttcccttcctgttgcattttcactggcattgcatgggatt

SEQ ID NO: 13394 - DNA, 590 bp, Homo sapiens
  misc_feature 90: n = A,T,C or G
actactatagggcgaattggagctccaccgcggtggcggccgaggtacgcgggacatactccctaggtgtctgtgaggatggtggagggngatatttctccatgtccgggaggcttcctggagcaggtgctgcctctcgtgactcttgaaagatgcttgtgaataaagcatactgggagctgagctgctgtttagtaattaaaaatcctttccattgtttagagctcagcacctttgtgcattcatattacgcattcattttcgtatcattgttgaatttctcacttctgctactgcaatgtatgtctacagctgacaagtcttccttgggagccctacgtagctcttttttttcttttctttctttttttttttgagacggaatcttgctctgtcacccaggctggagtgcagtggcgcaatctcggctcactgtaagctccacctcccgggttcacgccattctcctgcctcagcctcttgagtagctgggactacaggtgcccaccaccacgcctggctacttttttttgtatttttattagagacggggtttcactgtgttagccaggatagtcttgatctcctga

SEQ ID NO: 13395 - DNA, 523 bp, Homo sapiens
cgggggcggccgggacttcctggcagcgagtgatgccagacaatggccagtgctaatatcaatgcaatgatcccaatgacgatgattggaaaaaacttcaatggcagcagtgacaggatctgtgcagcaacagcatctgcatctggtgcaacaggacttattttcaaatcatcaaggccaaaaagcgatcggaatgagaagggggcttcaacagcaggcggatcattttcccccatggtgactatttcaggacctctgacatccggctccgcctccacctctacctcataattcccgagtcccaaaaatgtagatggcaccacggaagagatagtaggccacagtgttactggcttcccataaacacagccctttcctggctcacacgggcatgacctaattaagaacccccgcgtacctgcccgggcggccgctctagaactagtggatcccccgggctgcaggaattcgatatcaagcttatcgataccgtcgacctcgagggggggcccggtacccagct

SEQ ID NO: 13396 - DNA, 553 bp, Homo sapiens
ccactactatagggcgaattggagctccaccgcggtggcggccgcccgggcaggtacaaaagtgaaatccctaagtcaaactgtggcttataagcagaaatcctggttagtatttcaaagttctcttagcgttttctcctgcgacttaaaagacttaaaaacgtgaaaagacatggacgtaagactccaaacaaaaatacatttctttgaaactaaatagctcttaagtaagaaaaatttctatagatcttcaaatcatcccctaagcaaaatattctctaattaagtatttctgtatttccatctatgttcttcccaggcttggggctgttgatcagacctatttttaggggtaagtttctaggggtcatagaagatacagattttgacctgcttaatgtcaagaggttgcacggttgatttgtccagttgtgaattctatgaatgaagctttttgcttaaataaaacgatattcccctctggctgctgtgagcaccgggagacttgtttcggcagtgcctgtgtgctggggcagggcccgtggccctggat

SEQ ID NO: 13397 - DNA, 585 bp, Homo sapiens
gcgaattggagctccaccgcggtggcggccgaggtacgggagtaaaataaaagggtcggattttgtaggattctaaggaagaggcagtgtgctctgtccacaggctgcaaggtgagaacctaaaagaatgagatatattcccattttggaatggcaatcaaaaagaggatctctctgtcaagtctttacattaatgctgagtaacaatctcaaaagcctgcccattcccctttagacacatgtggcaaaagcagaactgaaggaatggccaaggggcttgaacaagtagagagaccgacagtctttcaaatttcagggaaccccagatacattttgggggagccactgttttcccattttcctgaaaagttcttgcaggtataagaaataggaatagaaattgaataggttctggagccagggctacaaaggccccagctctgatctgtatagactgaaaaccacacatcagatgaaattatatacacaaaaagagagtccttaaaaacagccatttcggtccctctcaaaaccaagagaccaaaatggtcagagggaccaaacagtattgtaggtcatgatggc

SEQ ID NO: 13398 - DNA, 430 bp, Homo sapiens
tcactatagggcgaattggagctccaccgcggtggcggccgaggtacttttttctttttcttttttttttttggaaacacgcaagagcacgtatagcatgggggaaagaacctaaatgtctctctgtcctgtgagctggtgaaaaacccagcatgagaacgcagtgtcaggtgtgggactccttctgcccctgcagtgggtgttacgggcggtgtgccctggcgagcaagctttgattcttggttctttgagctcgtttcagaggctgagtccccacatcagctttagttcttggacttccctgtattaagcaagaattaggagaatggctgtccctgcaggcgcctcccgtaaatcctgagctctctggcgcaatctgaaacttctcttctgttttctttggctgtatcagccgaaccaggagaggcct

SEQ ID NO: 13399 - DNA, 427 bp, Homo sapiens
tatacgactcactatagggcgaattggagctccaccgcggtggcggccgcccgggcaggtaccaggagagatctgagacagggtatgaagtaaaagatttaagattggaagtggagagtgtcatgggccagtgcctttcggatgggtgacttctggaattcttgttaggcacagcgaggttggtcctgtgggaaaggaagaatatttccggggtgaggagacttcggggtgtgggccgggtgcctttttaaatttggaatggtgtatacaatagggaaaggatgttaactttgcagcagcggggatggtgaatataacctgatagggacccttccattttgttggaaaggggaggaaggggtgtgctacccagacccagtctcctggctgtaagggtaagaaagtgaattgggaagaatcctcaggt

SEQ ID NO: 13400 - DNA, 443 bp, Homo sapiens
aatacgactcactatagggcgaattggagctccaccgcggtggcggccgcccgggcaggtacctggactcctaagcctcagggatttactgaaacaccattctattttataataatccttaaccaagaattttaaggatcttaaatttttctgtggttctattgttatctgatatatagatgatctgctgccatatcctaaagagcagatgaggccgggtgtagtggctcacgcctgtaatcccagcactttgggaggcagacgaaggtggatcacctaaggtcaggagtttgagaccagcctggccaacatggtgaaaccccatctctactaaaaatacaaaaattagctgggtgtggtggtgggcacctgtaatcccagctactaggaaggatgaggcaggagaatcacttgaacccaggaggcggaggttgcagtgagct

SEQ ID NO: 13401 - DNA, 422 bp, Homo sapiens
ctatagggcgtattggagctccaccgcggtggcggccgaggtaccacttaacaagggttctcagctgtggggtcactggaccactgggatatgctgagctattgcttaaacactgacttaaataaaacaaatattttaaataagagaatgctactgtaattagaaggcaatcatttcaaagtctagatggaggccaggggcggtggctcatgcctgtaatcccagcactttgggaggccgaggtgggtggatcacatgaggtcaggagtttgagaccagcctggccagtatggtgaaactccatctctactaaaaatacaaaaattagccaggcgtggtggtgtgcacctgtaatccactgaggcaggagaatcacttgaacccgggaagtggaggttacagtgagctgagatagcaccact

SEQ ID NO: 13402 - DNA, 441 bp, Homo sapiens
aatacgactcactatagggcgaattggagctccaccgcggtggcggccgaggtacaaaggttcagtggtgagaagagggagcgaggcctttggaataatgaactccagttgttcctcataggtgcagcagaaatagcgagaggtcaggattatggagattggtaaggcgagatcatccaagggccttttgcttggtaagccattttactttaatcttgagtgccatagggattcattgacggattgatacagggaaatgaaatgattttttttttttttggttgggggagacaagagtcttgctctgttgcccaggctggagtgcagtggcacaacgtcggttcactgcagtgtctgcctcccaggttcaagcaattctcatgcctcagcctaccttgtagctgggattacaggtgcacaccaccacacccagctattttt

SEQ ID NO: 13403 - DNA, 442 bp, Homo sapiens
tacgactcactataggcgaattggagctccaccgcggtggcggccgaggtacaaaggttcagtggtgagaagagggagcagggcctttggaataatgaactccagttgttcctcataggtgcagcagaaatagcgagaggtcaggattatggagattggtaaggcgagatcatccaagggccttttgcttggtaagccattttactttaatcttgagtgccatagggattcattgacggattgatacagggaaatgaaatgattttttttttttttggttgggggagacaagagtcttgctctgttgcccaggctggagtgcagtggcacaacgtcggttcactgcagtgtctgcctcccaggttcaagcaattctcatgcctcagcctaccttgtagctgggattacaggtgcacaccaccacacccagctattttttata

SEQ ID NO: 13404 - DNA, 441 bp, Homo sapiens
atacgactactatagggcgaattggagctccaccgcggtggcggccgaggtacctcgtttctgaggatcaagacctcggggaccgtgtgtgtgtgtgtgtatttgtgtgtgtgtgagtcctatttgggccccgcctttcagccctgtcttgcagcccgctctagaactagtggatcccccgggctgcaggaattcgatatcaagcttatcgataccgtcgacctcgagggggggcccggtacccagcttttgttccctttagtgagggttaattgcgcgcttggcgtaatcatggtcatagctgtttcctgtgtgaaattgttatccgctcacaattccacacaacatacgagccgggagcataaagtgtaaagcctggggtgcctaatgagtgagctaactcacattaattgcgttgcgctcactggccgctttccagtc

SEQ ID NO: 13405 - DNA, 414 bp, Homo sapiens
tacgactactatagggcgaattggagctccaccgcggtggcggccgaggtactttcaatttctgtgggataaactccagctccagtttcagaacccactctaattggtttaagccaggaaagggagagggacatgttgctgggaggcccccatctggggcctgagcttggaatcaaatcagaggaaggcaacacatgtaaagtgctgagagtggaaggatgaagagagctagggctttgtgccatcactcgtgctctggacataagtggagctgggattcagcattacctgcccctgtacctgcccggcggccgctctagaactagtggatcccccgggctgcaggaattcgatatcaagcttatcgataccgtcgacctcgagggggggcccggtacccagcttttgttccct

SEQ ID NO: 13406 - DNA, 417 bp, Homo sapiens
taataccactactatagggcgaattggagctccaccgcggtggcggccgccgggcaggtactagtccaggtgtgagatgaagggggcctggatgaagcagagggtgagagacaaggaagattctgaggaccttgtggctagatgtgggggttaagtcaggttcaactcctaggctggatgaattggcagatggcacatgaactacaagagaatggaaggcagaacctattttgtgggcaaaaaataaattacattttgcaatactgaattgaggggcttcttggaagtccaggtgtagatgtcttacaaaaatagaatattctgggctgggtgcagtggctcacccctgtaatcccagcactttgggaggccaaggtagggggatcacctgaggtcaggagttcgagaccagcctgg

SEQ ID NO: 13407 - DNA, 414 bp, Homo sapiens
taataccactcactatagggcgaattggagctccaccgcggtggcggccgaggtacatcaccctgctgagggacatccaggacaaggtcaccacactctacaaaggcagtcaactacatgacacattccgcttctgcctggtcaccaacttgacgatggactccgtgttggtcactgtcaaggcattgttctcctccaatttggaccccagcctggtggagcaagtctttctagataagaccctgaatgcctcattccattggctgggctccacctaccagttggtggacatccatgtgacagaaatggagtcatcagtttatcaaccaacaagcagctccagcacccagcacttctacctgaatttcaccatcaccaacctaccatattcccaggacaaagcccagccaggca

SEQ ID NO: 13408 - DNA, 407 bp, Homo sapiens
taataccactactatagggcgaattggagctccaccgcggtggcggccgcccgggcaggtacaggggcttgggggcttggccaggctcttctccatccatgccacggggctgacagccacagatctggaagctcaggcctaggagtgcaggctccgttaagccctgtgtccaacatcctgactcctaggggtgcccaagatttgagtggccactttcacctctggaggaagtaatacctaaggcgctgatagaaatagaacttccgctgccaggcaaggtggctcacacctgtaatcctagcactttgggcagcctcaacgcaggtggatcacttgaggtcaggagttcgagactagcctggcccaacatggtgaaaccctgtctctactaaaaatacaaaaattag

SEQ ID NO: 13409 - DNA, 404 bp, Homo sapiens
tatagggcgaattggagctccaccgcggtggcggccgaggtacgtgtttcagtcattgggctgacgtggggcgacagcacaaccttcatagccactgtatgaagaagtagaagacccagactcttgctttatgttggtatcaaaagtcatttcagagtcaggctgatcactcccaagtaacccactgacttctttactccagctctctgtctgctgttgactcagaaggtgacacttaattttctccattgctgatataatcatatctgcaacataaaagtgggcattttccttttctacatcaacaggcagcacaaatacctctggtgagaaggaattcgaagaaatggttcttctactgacttgaacagcaccttcatcagcagcagatgtcagatgggaag

SEQ ID NO: 13410 - DNA, 416 bp, Homo sapiens
taatacacactcactatagggcgaattggagctccaccgcggtggcggccgcccgggcaggtaccactagattgcctccctgtgcctgggcaatttcagaaaatggtggttttcctttcgtttccatcttttttaagacttaaaaagtatctgctctcattttctcctagcggcctccatgccttgactcaaaaaatgctgtcttagttgacagccttgaaatgagtatgaccctagctctagttgggtggaaatcacctcgcatagaaatagacctggagggccgggcacggtggctcactcctataatcccagcactttgggaggcccaggtgggtggatcccgaggtcaggagttcaagaccagcctggccaacatggtgaaaccccgtctctactaaaaaaaaaaaaaaaaa

SEQ ID NO: 13411 - DNA, 379 bp, Homo sapiens
ggcgaattggagctccaccgcggtggcggccgaggtactagtatgaaggaaataatatccacacactgatactggtccagcagaaaccaagaccgctcctggtgcattaacttttaacagagcaaggactcagttctctgaaaatagtgccattaaacatgtgctcccagaagaataaatatttggcttgctagaatttctgctgcttttctgtaaagttgattattcggttcaaagaggagtaacaaaatgtgtgaatgcaacaaactggaaacagtagggacctggcttatctcatcatattaatgctgcacacttcagtcattcttttcccatctttttccttctctggatttacaccctccccctctttaaaaaa

SEQ ID NO: 13412 - DNA, 468 bp, Homo sapiens
agctccaccgcggtggcggccgaggtacttaccacagagaaaagccaataatcacaatatatgttgtcttactgacccataacccattttctgagggtggcaggcattgtgcccccactgtgaggtgggactatatacatatacaaaggaggtgtttaactgggtggcatgtcttagggagatgtaagacttacctgcatatcctggcagtttttgaaatgatagtgactgttcttaggcctccgctgatggcatagtcaaacaccaaattttcttggagatgattcggaaatgctacatatagaaatggatggtgagctcttactgtgactgtgcccataagtaagtcatcctggaccctctgaatcttatcccacccaatttcatgtgtgaacagtggcatctattcattaatatgatgaatttgctttagagggcactgtcatttacatctttggtctctttttt

SEQ ID NO: 13413 - DNA, 426 bp, Homo sapiens
  misc_feature 43: n = A,T,C or G
gggcgaattggagctccaccgcggtggcggccgagggactttntttttttttttttttttttttttttatgatattcatctatgaaccaatttaattttaatttaaaaatgacttctgatctggcagatgatttgggttctagaaagaaattgtgccaggcatgggggctcatgcctgtaatcccagcactttgggaggctgaggtgggagaaacctgtgagctcaggaattggagaccaaccctggccaacgtaacaagacttcatttttacaatattaataataaaaaaaggccaggtgcggtggttcacacctgtaatcccagcactttgggaggccacgagacaggtggatcatgaggtcaggagttcgagaccagcctggccaacgtggtgaaaccctgcctctactaaaaacacaaaaat

SEQ ID NO: 13414 - DNA, 242 bp, Homo sapiens
gctccaccgcggtggcggccgcccgggcaggtacaggtaaggcagaaggaaggaagggcaaagaaacaattccagggccctggtttctgggatgacaggcttcccaacactcatgccaggactattttccacctcggttcactatgggttttttttctttttttttaatataatgaatttttaaaatgtgtgtttgttgcccagattattccagaaagagttgaagggaggaaaggtgtgct

SEQ ID NO: 13415 - DNA, 530 bp, Homo sapiens
gctccaccgcggtggcggccgaggtacgcggaggcccttctatctcaggatgtttgcacttgctatttccttttcttaaaggctcatccctagatatttgcatgactggcttcctaatttggtgtaagcttttgctgagaagttactttaccaactgtcattgaggttttccctgaacatcttaggtaagataacaagctcccctccttttctttcctcacttcttggtattccttatctcgtaactttttttttggggggatggaaacttgcggtcttggttttgttgccaggctgggaatgcaatggttgcaatttgggttaactgaaacctccaccttccgggttcaagcgattttcctgcctcatccttccgagtagctgggactacgggcaagtgccaccacacccagctaattttttgtatttttagtagaggtggggtttcactgtgttaggatgggctctatctcctgaccttttggtccacccacctcggccttccaaagtgctgggattataggtgtgag

SEQ ID NO: 13416 - DNA, 242 bp, Homo sapiens
gctccaccgcggtggcggtcagttagtcttagagatacccatgaggtcacctactcaaaatggggctcagagtagccttgtcccattcttgtccagtgggcgcagctacagtcttcctggcggggagtgactggaggctgtccccacgtcccacttcagtgaggcattcatgtgcacccagcacactttctagctttatttgcctggaggggaagattctccagaaccttgttaagatgcac

SEQ ID NO: 13417 - DNA, 566 bp, Homo sapiens
  misc_feature 464, 542: n = A,T,C or G
tggcggccgcccgggcaggtacgcgggatatgaagtgaggttaagtcagatggaatggcagtggactactgtttttggttaataaatcgagatacccttaagagttgtgtgctgaacatactgtctttctttccccagttccatgtcacagcacctgcctaataataggtgctcgaaaaacatctgttgaatgaaatgaattcttttgtttgcagtagggcaaagaagggtagagaggagccacttgcacaagccgatatgtaaatgttgcaaaaggttttaggccaagaaaatttcaaaaacccatttgagaggcaattcatgttagggggactatgagatgtttcacacccttggaaatatttaaaagtaactttctactgttttacttatttcccactcctggctgcccctcttgggtggactgcctactgttggagggaatactgtgtgagacacatctntagtaaaacagaaatgtgaaaccaacttgcagaaatcacaagcacactgttaccaaatagtcttgactggctcccttnctgggggacaaatgttttgataat

SEQ ID NO: 13418 - DNA, 623 bp, Homo sapiens
  misc_feature 442: n = A,T,C or G
gagctccaccgcggtggcggccgaggtacaggatgttttcctaaattttaagtcaaattcttccttgacacatacctatttttattttgttttggttctcatctctgtgaacagagcaaagcatgcaaccattgtaacactttcatttgtttttataaactcaagttctagagttggatttcatgatttgcataactcggcatagtgtaagtgcttgtagttttaaacagaaaaagagggaagaaatgaccattccaaaaaaaagatcaaatcttatgactgtaatttattaaggtatccaatggaattctttccttttttctttcttttttttttttttaaaaggacagtctcaagttacataaagctgggaatgcaagtatcattgatcaatagttcacaggcagcccttcaactccctgggtttcaagtgaatcctagnaaacttgtggcctcaagcagttcctcctgccttcagcctgccaaagttgctgggattacaagcatgagccactgctcctaattcttaagagatatttttaaacctcatagtgtatactcttcagaattactttttgaaccataagtttaaatggcaaacactttctaaatgtattttactg

SEQ ID NO: 13419 - DNA, 236 bp, Homo sapiens
cgcggtggcggccgcccgggcaggtacgcgggatatgaagtgaggttaagtcagatggaatggcagtggactactgtttttggttaataaatcgagatacccttaagagttgtgttctgaacatactgtctttctttccccagttccatgtcacagcacctgcctaataataggtgctcgaaaaacatctgttgaatgaaatgaattcttttgtttgcagtagggcaaagaagggt

SEQ ID NO: 13420 - DNA, 307 bp, Homo sapiens
acgactactatagggcgaattggagctccaccgcggtggcggccgaggtactggtaaagggatagtcacatagatcaatgaaaaagaacagagaatctgtgaacagaccatgcaaatatgcctgcctggtttttcacaacagtgcaaaagcaactcagccaacaaaagacagcttttggccaggcgcagtggctcactcctgtaatcccagcactttgggaggccgaggcgggtggatcaacgaggtcaggagatcaagaccatcctggctaatatgataaaaccccgtctctactaaaaaaacaca

SEQ ID NO: 13421 - DNA, 327 bp, Homo sapiens
ggcgaattggagctccaccgcggtggcggccgaggtacctttgaaggtgagctttgaagatgcaacagaatttgacagtagagatgtagggaggaaggaaggcaggacaggtcagacagaagtgcaggaacagcccaggcctttgcagccttcccacaccccctacagacctgccggcggccgctctagaactagtggatcccccgggctgcaggaattcgatatcaagcttatcgataccggcgacctcgagggggggcccggtacccagcttttgttccctttagtgagggttaattgcgcgcttggcgtaatcatggtcatagc

SEQ ID NO: 13422 - DNA, 462 bp, Homo sapiens
cactacttagggcgaattggagctccaccgcggtggcggccgcccgggcaggtacgcggggacttgacttaaactctggggcccgggaggccgccggttttctccccgcttgccggggtggtcctcttccctttgtcggaccaaagaagtaaacactgtgtggagagggactgacgtgtttggagggaaatgggaatgtacctcggccgctctagaactagtggatcccccgggctgcaggaattcgatatcaagcttatcgataccgtcgacctcgagggggggcccggtacccagcttttgttccctttagtgagggttaattgcgcgcttggcgtaatcatggtcatagctgtttcctgtgtgaaattgttatccgctcacaattccacacaacatacgagccgggagcataaagtgtaaagcctgggtgcctaatgagtgagctaactcacattaatt

SEQ ID NO: 13423 - DNA, 535 bp, Homo sapiens
cgtctacgactactatagggcgaattggagctccaccgcggtggcggccgaggtactccaagctctgagaccacctcttctgcaaagccttcctgattctgcaaagaacaggtaggcatttcatccttgggacctcacagcaattcaggacacatttgtgtcccagccctgcttggcttggctgtctccatgaatatacactgtgtaacttctgcaccaggcatcataccaagcacacagtaggcactcctgtgttttttgaataagtgactatatcatcaccacatttcaaatgcggaatatatgagctactagaaaagacataagggtagattttacatctttattgtatcctagatatacaagtctattactgccttttcccatgttctgtcaacatagcataaagaatgtggatttacctgttagaaattgaataagcggccgctctagaactagtggatcccccgggctgcaggaattcgatatcaagcttatcgataccgtcgacctcgagggggggcccggtacccag

SEQ ID NO: 13424 - DNA, 369 bp, Homo sapiens
agggcgaattggagctccaccgcggtggcggccgaggtacaagttacaggcaattttcttaataactccctttactatgtcagacaagctatgtcaagcgtcttctgtatcctctacggggaaaaaaaaaaagttaaccagagccaaatgcttgctttcaaagataacttgccatcctgaaaatataatttttacaattcaataacacctttttgaaaaataaaataatctggcaaaaatgcccatgcattaacaaaccattttttcagtttaatctctttatatgttcaactttgatgtattttaaataaacaaagcaaaattcaactaaaaatacaatctggatttcatagccaagggttttattta

SEQ ID NO: 13425 - DNA, 367 bp, Homo sapiens
agggcgaattggagctccaccgcggtggcggccgggcaggtactgctggttttctggtgttcctacaagctgcctaggtctcttttgttctcagcagttcccaggcatgcaaaagttgccagttctgtcagcattccaagtcaggtaagacagaaagccatctcttaggcagtccccagaaaagctgaaaggttggatatactttctactcttctcttttcttcatgagagaaaggccatgtgggcattttctcccaataacactgagttctgttgtcttctgtcggctgtgctgcaggttctcaggtgctgcagttagctgctgaactctccgctgttctcagtggaccccaagcatccaaagtat

SEQ ID NO: 13426 - DNA, 490 bp, Homo sapiens
agggcgaattggagctccaccgcggtggcggtaagatttcctgaagggatccatagccaaaacatgtttgaaggccactgggctcgctaacttctaaaagcaccccagttctagcagacatcctaaggaacattcccaggaaaattccagcctagaacctcctggggtctgacaaccttagagaacagtgctggctttgaatgggcttgggggcagcctcgaaaccctctttccagtctccatgcaggcaggggagctccttaagcaacacataggacatttctgggagaaatgggatccccaacacaatgaacactatagattttaatggtctatatggttaaatacacaaggcccctcatttccaaccccgcctgttcatctgattcatctgtacctcggccgctctagaactagtggatcccccgggctgcaggaattcgatatcaagcttatcgataccgtcgacctcgagggggggcccggtacc

SEQ ID NO: 13427 - DNA, 503 bp, Homo sapiens
gcgaattggagctccaccgcggtggcggccgaggtacttcagacattcccccagtggctgaagtggcatatgaattatgaagttggatcatttggaatgaatgtaagagaattgccaagggctcctcctactccagagaggaaacctcatccagggccatgaagccacttcctcaccatctgtgtgctgcttaagctaatgctgcgggaaccatggttccttgggaggaatcaagctgactcttggcatgagattcctgccttcctagggttgagagcggcactgccatggcttctctggacgacccaggggaagtgagggagggcttcctctgccctctgtgcctgaaggatctgcagtctttctatcagcttcactcacattacgaggaagaacactcaggggaagaccgtgatgtcaaagggcaaattaaaaagtagaggcgaggaccttgcctaccccctgctgtcgttgagagctttaactcacgggatagttctcat

SEQ ID NO: 13428 - DNA, 495 bp, Homo sapiens
agggcgaattggagctccaccgcggtggcggccgcccgggcaggtacgcgggggaagagaaagcgtgagggctgggcctgcggcgggctttagggagtggtccctggctgtggatagatctgctgatgagtccaggccccggtccattctcctcgcgctgcaaggatgctcctgggatttcggagaggccgcaggagtcatttcaaacacatcatccatggccttttacctgcagccagcgttgctccgaaggcagctgtgccacgcacacctcctccccgcagccccaacccatctccagagagaccaagatctgctctggcagcagccattctggcgacaacattgactgggcggacggttgctattcctcagcctcgccagaggtcccggtctgagagtgatgtgagcaagtgttgaacaggacagcttcatcgagccctatgccaccacctcacagctgaggcctcgaccaaattggcagaatgagatggg

SEQ ID NO: 13429 - DNA, 522 bp, Homo sapiens
gcgaattggagctccaccgcggtggcggccgaggtactggataggagagggaggagggctggcagctgagtagccagaatcaggcagacggtggtagcagaagtcagaggccgagggaatcagggaaaggagttcaaccatggaggaccttgctggccaggttagagactgtggacttttgtctgggtgagacaggaagtcactggagggctgtgacagagctctgaggctgtgaggcactgctctgtcagtgccatgagtggggaaaacaggagcttgctgcactggtagagaccacagataatgatgacttggacagagcagctgggagagaactagttcaataaccctaacacgcctctccattctgcattttccctaaaaatgtacctgcccgggcggccgctctagaactagtggatcccccgggctgcaggaattcgatatcaagcttatcgataccgtcgacctcgagggggggcccggtacccagcttttgttccctttagtgagggttaattg

SEQ ID NO: 13430 - DNA, 592 bp, Homo sapiens
tatagggcgaattggagctccaccgcggtggcggccgaggtacctgccctatcttgctgaatgttttataatctaataaaactcagataaagacccagatgtcacacctgaacaggaaaagctgaaaggaaaagataattaaaatataaatcaacagaatcaagattttgaaaagacctagaaaacttgaaggattactgaagccaagcaagaggaaatgataggattaaaagtaaaatcttgtgtttagattttttttttttttttcagacggagtctcgctctgtcaccaggctggagtgcaatggcgcaatcttggctcactgcaatctccatctccgggctcaagcaatcctcccacctcagcctccctagtagctgggaccacaggcatgcgccacacgcctggataatttaaaatatatacatatttttgtagagacagggtgctgctttattgcccaggctagtctcaaactcctggcttcaaggcatcctcctgccccagctttccaaagtgctgggattactggtgtgagccacagtgccgggacataaatagttatgctgtattgtttaaggaataatgaca

SEQ ID NO: 13431 - DNA, 425 bp, Homo sapiens
actatagggcgaattggagctccaccgcggtggcggccgcccgggcaggtacgcggggaggtcatgcccgtgtgagccaggaaagggctgtgtttatgggaagccagtaacactgtggcctactatctcttccgtggtgccatctacatttttgggactcgggaattatgaggtagaggtggaggcggagccggatgtcagaggtcctgaaatagtcaccatgggggaaaatgatccgcctgctgttgaagcccccttctcattccgatcgctttttggccttgatgatttgaaaataagtcctgttgcaccagatgcagatgctgttgctgcacagatcctgtcactgctgccattgaagttttttccaatcatcgtcattgggatcattgcattgatattagcactggccattggtctgggca

SEQ ID NO: 13432 - DNA, 538 bp, Homo sapiens
ctactatagggcgaattggagctccaccgcggtggcggccgaggtacaaggaaggccttaaagactgccccactctccttgtttcccatcccctgtcccttctacttctcacattcaccactatgtgccctaggacaaaatcaaatgtggaaacatttggtcatgtctactttgtccaagggtgggagttcttgaggaattcaagtgggaactagaacaactttctaccctttccttcccttccttcctccccacctctacctagaagcccatcaatcactttgaacttcttggagaaaaaaggaaacaaaagaaaaagaaaaggagaggctgggtgcggtggctcatgcctataatcccagcacattgggaggccaaggtgggtggatcacttgaggtcaggagtcgagaccagcctggccaaaatggtgaaaacatgtctctactaaaaatacaaaaattcgctgggtgtggtggtgggtgcccataatcccagctacttaggaggctgaagcaggagagttgcttgaacctggga

SEQ ID NO: 13433 - DNA, 324 bp, Homo sapiens
ctactatagggcgaattggagctccaccgcggtggcggccgaggtacgcgggacactggtgggggagagtccgacgcgcctggctaggagcgccgaccgcagggcctctacggaccttactagaaaaatgaaacctgatgaaactcctatgtttgacccaagtctactcaaagaagtggactggagtcagaatacagctacattttctccagccatttccccaacacatcctggagaaggcttggttttgaggcttcatgcgagaaaggggaatggggaatggctgcttaacggcatgtcttttttttttttgagaccgagtct

SEQ ID NO: 13434 - DNA, 576 bp, Homo sapiens
actatagggcgaattggagctccaccgcggtggcggccggccgggcaggtacacgatgaaacgggggtaaggaaggagaagaaaaacattgaaaggcatttgacagggtaaggttgtattccccagacaaccctgtcaagcagctctgaagggatgatgagcctggactctctggactcctagattatgaactcctgcagtggaccatgtcctattttttggaggcgttggggggaattgtcttacgcagcacccaagcacactgctatgcaatggaccacagataggaagcaagcactgcatttggctcccccgcgtacctcggccgctctagaactagtggatcccccgggctgcaggaattcgatatcaagcttatcgataccgtcgacctcgagggggggcccggtacccagcttttgttccctttagtgagggttaattgcgcgcttggcgtaatcatggtcatagctgtttcctgtgtgaaattgttatccgctcacaattccacacaacatacgagccgggagcataaagtgtaaagcctggggtgcctaatgagtgagctaactcaca

SEQ ID NO: 13435 - DNA, 370 bp, Homo sapiens
tatacggcgaattggagctccaccgcggtggcggccgaggtactaaatcattaattcatcctgagctagtggctttattaatgagtatctcacaaataccacaaaaattcaacctggccatgtggagcaatataaaattatggcatttcttggtatgtttttctctttggcgaggagacaacttgatcttgtgtttccagaagcatgttaattgccctgcttgcagaatctctctggcttgaaaggagattatattcatggcaggctgtgaattttcattttatttcatttatttatttgagacagagtctcactccagcctgtgtgacagagcaagactccgtctcaaataaaaattaaaaaaaaaaaa

SEQ ID NO: 13436 - DNA, 334 bp, Homo sapiens
ctatacggcgaattggagctccaccgcggtggcggccgcgcggggaggtaccatgaggggagaaccggcaaggggtgccattctagcatctgggtgggagagaggaggctgaatgccaggggaaacttcttggaaaaagtgatgctgagttaggacaatttagtcaatgagaagggatctggctgttcctggcagtggagacaacatatttaaaggcatgggagaatatctaagatttacccttccaggacacaacaacacaacaatttcaacaacaaaaacaacaaaacaaaaaattgaaaacatattaaaggacagtttttaagacactggt

SEQ ID NO: 13437 - DNA, 507 bp, Homo sapiens
gtacagataataacatctgatatccacatggggtctggaggtgcaagccaccttcctttcatcccacggtctcacagcagccctggaaagaggctgctctctgttggaggctaagggccagtgttggaaggagctcgggtggaaagtgtggtctgcatgaggggctcccgtgaatagaggagaggggtggcaggtacctgcccgggcggccgctctagaactagtggatcccccgggctgcaggaattcgatatcaagcttatcgataccgtcgacctcgagggggggcccggtacccagcttttgttccctttagtgagggttaattgcgcgcttggcgtaatcatggtcatagctgtttcctgtgtgaaattgttatccgctcacaatttcacacaacatacgagccgggagcataaagtgtaaagcctggggtgcctaatgagtgagctaactcacattaattgcgttgcgctcactgcccgctttacagtcgggaaacctgtc

SEQ ID NO: 13438 - DNA, 615 bp, Homo sapiens
ctactatagggcgaattggagctccaccgcggtggcggccgcccgggcaggtacctgcctctgccagatacccctgagggaagaggatgttctataaccaggccgacaggttagcatttgtgaacacagttctgacgttgttgggagggtttgtttgccagaaacatccccatgcgctactctttcaaccagaggtcaagaagtcctttacttttgtgtcttttttgtttgtttgtttgagacggagtttcactcttgttgcccaggctggagtgcaatggcgcaatctcggcttaccacaacctctgcctcccaggttcaagcaattctcctgcctcagcctcccgagtagctgggatcacaggtgcccaccaccacgcctgctaattttcatacccgcgtacctcggccctctagaactagtggatcccccgggctgcaggaattcgatatcaagcttatcgataccgtcgacctcgagggggggcccggtacccagcttttgttccctttagtgagggttaattgcgcgcttggcgtaatcatggtcatagctgtttcctgtgtgaaattgttatccgctcacaattccacacaacatacgagccgggagca

SEQ ID NO: 13439 - DNA, 519 bp, Homo sapiens
ctatagggcgaattggagctccaccgcggtggcggccgcccgggcaggtactctgtggtatttcacataatattaaccagctgttagcaatgactgatatatacttcccattgaaaatgatgtaaggtctgaaaggattcattttgacaattttatatcacatatttatatttaccttaggtggttctttttaatgttttaatttgggaccacactaatttctaacttggtaactcatctcttaccaaaattaataccaagccaagaaaaatggtttcatgaatagaatctactagtcttttatatcttataatggtagatcactgatgaggtagaactccataagagcttcgctctcacagtaaaaggttttggttgtgcatggattacacctggtgaaagttggttagtattgtctaagtggcttaagacaaatttattttgatttgtattgtgatgactttgcgaagcaccagaatttttcccgcttcgtgtgtgtgtgtgtgtgtgttttgagtc

SEQ ID NO: 13440 - DNA, 461 bp, Homo sapiens
ggcgaattggagctccaccgcggtggcggccgcccggcaggtacccacataatagctcagtgcatgcaatttacaaagtaataagtgaaatgctccccatagttgactataacatttcctcatttttctctgaatttgctttttaaaaaactcttccccttgccattcccttccccattccagattgtaactgcttctttccagctgcatcagaagaaggggactttccatgtaggtgttattctcagaaaaggccagaaaagaccaggtcatggtggggatgatttgctccaagcataaaagagaattgtgatggttcaggaagactggaaaataacgagactggaaagaaatgagaagggcttcagaggaatggcacattgaaataaaaggaagtggtaagaacaggaacacaggggaatgaaaggagcacacagtgggcagggatgattggatagact

SEQ ID NO: 13441 - DNA, 446 bp, Homo sapiens
actatagggcgaattggagctccaccgcggtggcggccgaggtacaaactggcttcttctctttgtcaccagcacctgcttcatagtctctctggagtgccaggaacgggtcatttagattaaatctcccataccgttcctggataaatacctccttcctgcgagcccgcagggcctcgatgacaaggtctctggcctccagctccccttccatcacgctgaggagcatccgcagctcggatttactgagagtatccacatcaaactcttttttcagttttacaagtggaaattagcagtcctcctccccgtttctccttccattgccaggctcagctcctctcaccccaagtacctgcccgggcggccgctctagaactagtggatcccccgggctgcaggaattcgatatcaagcttatcgataccgtcgacctcgaggggggg

SEQ ID NO: 13442 - DNA, 380 bp, Homo sapiens
gcgaattggagctccaccgcggtggcggccgaggtacaggtggaaagtgaggtggttttatttctagttcaccattgtccttaggctgtatagacctctggaatcccagcttatgtggagaaggtatcctgttagacttccctcctttggtcagcactgggccttaacttctggcccctcaaagctgctaaaactgaaggccaggcttgcctggcttggcaaaggacgtcgggcagaagcagcttctcctctcctcttgtttctctgtttcccctcaccataggctttggcctgggagttttctacaattttgtcagcctatttgacactgttaaggagacatttagaatatttaaaattagagctttggtcgttttcat

SEQ ID NO: 13443 - DNA, 316 bp, Homo sapiens
tatagggcgaattggagctccaccgcggtggcccgcccgggcaggtaccttcttggttgctgtgactgtctgctagcactaagactgtcttaagcagatagagggcaatggctttgaaggcaaatgacaaagcgcggccctgagctccctgactgagttcatttggactctcaaggatgccctggagctagactcgatctgagtggttggactaactcctctttgtttttgtatgagagccagcttaccccgccattctaaacctcaggccaggaaaaccaaaaaacaaaaaaaccaaccaaacaaaaaacaaacc

SEQ ID NO: 13444 - DNA, 457 bp, Homo sapiens
ctactatagggcgaattggagctccaccgcggtggcggccgaggtactataaaatactatcctaactttttatgtgtttttttaacttgttttttagaagttttgtagcggtttttaaaaatgatgtatttataactggttaggatgctaatatctgtatcttttactctataacctattttttacatttttcagaaaaaaattttttacaacaatgtaaaaaatacatggccgggtgcggtggctcacgcctgtaatcccagcactttgggaggccgaggcgggtggatcacctgaggtaaggagttagagaccagcctggccaacatggtgaaaccccgtctctactaaaagtataaaaattagctgggcatggtggcaggcgcctgtaatcccagctacttgggaggctgaggcaggagaatcgcttgaacccaggaggcagaggttgcagtga

SEQ ID NO: 13445 - DNA, 425 bp, Homo sapiens
cgaattggagctccaccgcggtggcggccgaggtacacactctggccctggctttatttttagattttcctttcccggttgatatcggaaggcacagaggcaggaggtggggtggatagtaatgtgtgcccccttgggggtcatagtgaggtggagggggatgtttatcaccatgagaggcagagggtcagcccaatttccagtgcttcgggctccctttaaatgagggaaaacacgtgcatgtcttaggagacaaaggaagggaagtgactgtttcctggcctggtgtgtgggcccgtagactgttacgttcagtgtctccgtgcattttgactttacacctaagcaggcaggcataggtttgcggttctgaaagactgatctctttccacattatctactgctctagggactgacttttgctt

SEQ ID NO: 13446 - DNA, 387 bp, Homo sapiens
  misc_feature 321: n = A,T,C or G
gggcgaattggagctccaccgcggtggcggccgcccgggcaggtactttagtagaactctaggaactgaccaaacccttttaacaaccaggggagtgcttgatgaaggaagaggctaccgatctttcataagtatgaataagcagcatgcataaaccaattaccttcccctattcctcacaaccaccaccaccacacccaccacctcttgtggcagtggggatagcagcccatgttcctggagttgctaaccggtgccaggagggacagtagggatcatgtccttcaaaatttagggttgtacctcggccgctctagaacntagtggatcccccgggctgcaggaattcgatatcaagcttatcgataccgtcgacctcgagggggg

SEQ ID NO: 13447 - DNA, 401 bp, Homo sapiens
actatagggcgaattggagctccaccgcggtggcatgcatcaaggtgacaggtgacggcatggttatggattaactcaccaaggaaatgagtgtggaaagaagaatgcagaaatctgaggactagagcctggagatggggagcttcgagctcagaggaagaagaggatcttcatcacggggagacatcagccttctgagtatctgggactgcaggttatgtgccaccacactcggctaattaaaaaaaattttcttagagacagggtctctctacgttgcccaggctggtctcaaactcctgggctcaagtgatcctcctgcctcagccttccaatgccttgggcttacaggcatgagccaccatgtgcaagaaagatagcattttgacatctgccaaaca

SEQ ID NO: 13448 - DNA, 401 bp, Homo sapiens
ctatacggcgaattggagctccaccgcggtggcatgcatcaaggtgacaggtgacggcatggttatggattaactcaccaaggaaatgagtgtggaaagaagaatgcataaatctgaggactagagcctggagatggggagcttcgagctcagaggaagaagaggatcttcatcacggggagacatcagccttctgagtatctgggactgcaggttatgtgccaccacactcggctaattaaaaaaaattttcttagagacagggtctctctacgttgcccaggctggtctcaaactcctgggctcaagtgatcctcctgcctcagccttccaatgccctgggcttacaggcatgagccaccatgtgcaaaaaagatagcattttgacatctgccaaacaa

SEQ ID NO: 13449 - DNA, 330 bp, Homo sapiens
gcgaattggagctccaccgcggtggcggccgggggccattgagactgccatggaagacttgaaaggtcacgtagctgatacttctggagagaccattcaaggcttctggctcttgacaaagatagaccactggaacaatgagaaggagagaattctactggtcacagacaagactctcttgatctgcaaatacgacttcatcatgctgagttgtgtgcagctgcagcggattcctctgagcgctgtctatcgcatctgcctgggcaagttcaccttccctgggatgtccctggacaagagacaaggagaaggccttaagatctactgggg

SEQ ID NO: 13450 - DNA, 396 bp, Homo sapiens
actatagggcgaattggagctccaccgcggtggcggccgcccgggcaggtacgcggggggatactcattagagttgctcggtggagatggaatgatggtggggtgcagttaaacatggctgagtgctttctgcttaaggacctgatgtattaatgctctccaggtcattcatatttgggggaaggaacaaagagggtacctcggccgctctagaactagtggatcccccgggctgcaggaattcgatatcaagcttatcgataccgtcgacctcgagggggggcccggtacccagcttttgttccctttagtgagggttaattgcgcgcttggcgtaatcatggtcatagctgtttcctgtgtgaaattgttatccgctcacaattccacacaaca

SEQ ID NO: 13451 - DNA, 573 bp, Homo sapiens
ctactatagggcgaattggagctccaccgcggtggcggccgaggtactgctatgaatctcacagatgtaataatgagttaaagaagctaggcacaaaagaatattactgtatgattgcaatcatataaagttcaaaccagatcaaactaatcaatgaacgaggagtcaggattctggttatattcagggatagtgatggaagagggctataaggagggtgtctgggtgcaggtcatgttctagatcttgatctgagtgggggttacataggtgtattcacttcatgagaattcagagggctgcacactaatgatctgtataatgctcctctatagtatgtcacacttcaaaaaagtttacagaaacagttccttcctaattttcacagggcctaagagctaaaaacgcagccccagcctgatgtttctctctgctcaaggtttctcgtgctgtgcctgggatagctcttggtgtccatggaaaccagacagaaacagcgtggtggggaaacaagccagagggaaactgtagccaagaagctttgcacatgcgacagaggaacagacccccctt

SEQ ID NO: 13452 - DNA, 483 bp, Homo sapiens
gactcactatagggcgaattggagctccaccgcggtggcggccgggggccattgagactgccatggaagacttgaaaggtcgcgtagctgagacttcaggagagaccattcaaggcttctggctcttgacaaagatagaccactggaacaatgagaaggagagaattctactggtcacagacaagactctcttgatctgcaaatacgacttcatcatgctgagttgtgtgcagctgcagcggattcctctgagcgctgtctatcgcatctgcctgggcaagttcaccttccctgggatgtccctggacaagagacaaggagaaggccttaggatctactgggggagtccggaggagcagtctcttctgtcccgctggaacccatggtccactgaagttccttatgctactttcactgagcatcctatgaaatacaccagtgagaaattccttgaaatttgcaagttgtctgggttcatgtcta

SEQ ID NO: 13453 - DNA, 459 bp, Homo sapiens
agggcgaattggagctccaccgcggtggcggccgggccaggactttttttttttttttttttttttttttccatagagatggggctttgccatgttgcccaggctggtctcaaacttctgagctcgagcaatctgcccacctcggcctcccaaggtgctgggattacaagcatgacctgccgtgctggctaaagtttcttatttatacttactcattcctctaatatctggatttccttagtcatctgtcacttctccctgcatatttcctgtgatgtctttaggtccctcccactattgtagtagcactccctggggaccaatttcgaaggatgctgagtcatatggtttttggttttgagagggttgaaaatggagactcaactcaatttaggagctatcccatcataactagtagcaaaacacgtcactacttgagtctcaacaaaagacagaaaa

SEQ ID NO: 13454 - DNA, 492 bp, Homo sapiens
ggagctccaccgcggtggccgcccgggcacggacctgctttccagaagtgttatcatgattaaatgacagaccagtggcagtagcatctcctgagggagggttagaaatgcatattctcaggcaccactgcagtcttgctgaatctgaagctttggggatgggacccggtagtctttttggataactctgccaagtggttccaatgtgctcaagtttgagagttgctgaattaaagcgctgggtcttgccaggcatacctgtaattccagctctttgggaggctgaggtggaaggattgcttgagcccaggagttcgagaccagcctgggtaacatagcaagatcctatctctaccaaaaaaaaaaaaaaaagtacctcggccgctctagaactagtggatcccccgggctgcaggaattcgatatcaagcttatcgataccgtcgaccttgagggggggcccggtacccagcttttgttccctttagtgag

SEQ ID NO: 13455 - DNA, 587 bp, Homo sapiens
  misc_feature 377: n = A,T,C or G
cgcggtggcggccgcccgggcaggtactggtctctgtctttacagctgaagcatcagaggatggagtgaccaggctggttccaatgacagttatacggccatggggagtagacatggagtctaattcagtgcttgaggctaagaatgaagttgtatgcattgtggaaattgttccaggagatcttgcaactttcaagtttgaagtcatgtctgtgacagtccaggaatctgatgcagctgtggaagaccaggtggaagggtgttctgtagaagttgtgcgcctctctgtggccggggtgctgtccatggtacctcggccgctctagaactagtggatcccccgggctgcaggaattcgatatcaagcttatcgatanccgcgacctcgagggggggcccggtacccagcttttgttccctttagagagggttaattgcgcgcttggcgtaatcatggtcatagctgtttcctgtgtgaaattgttatccgctcacaattccacacaacatacgaaccgggagcataaagtgtaaaagctggggtgcctaatgagtgagctaactcacataattgcgttgcgctcact

SEQ ID NO: 13456 - DNA, 517 bp, Homo sapiens
ctatagggcgaattggagctccaccgcggtggcggccgcccgggcaggtacacatgtatcaggaaaagaaaacgttatttgtcccacagatgctgctaggagcagctaccccaagacaggccttgcaccttgggtcatgacaatgcgtggctactgagagctgttgacagagtggacagggcccagaccaggacagtctctctagaggtcttcacctcctcaaccgtaacttaatcagccccatgccgggctagccccatgccacaaaggctcagaaatgccctgcaacatgtgggacacctggtagtatctacataggggccagcatccatcccagctgctgggggtggctcaagagctgtgagggacaccctttcctgcctgataccgtggaccagtttgcaaagagctgactgtcctgctaggcccatgatatgtgcatctcttgggtaccttggccgctctagaactagtggatcccccgggctgcaagaattcgatatcaagcttatcgata

SEQ ID NO: 13457 - DNA, 515 bp, Homo sapiens
ggcgaattggagctccaccgcggtggcggccgccgggcaggtactttttttttttttttttttgtatatttagtagagatggggttttaccatgttggtcagtctggtctcgaacggctgacctcaagtgatccgcccaccttggcctcccaaagtgctaggattacaggcatcagccactgtgcccagccagccctatgcttttaagagttcgatggttgaaagagactgagcggcgaaggtagagcggggcaggggagggactacttggagtcaagtcaaagttttagggaaagacctgaatctgaaaaagattatttaacctttatgtgtctgaaatactatattgtgcgaattgtacctcggccgctctagaactagtggatcccccgggctgcaggaattcgatatcaagcttatcgataccgtcgacctcgagggggggcccggtacccagcttttgttccctttagtgagggttaattgcgcgcttggcgtaatcatggtcatagctg

SEQ ID NO: 13458 - DNA, 568 bp, Homo sapiens
tactatacggcgaattggagctccaccgcggtggcggccgcccgggcaggtacacaaacacgacagaagcccacggagcaagccctgtgctggccccttcacatgactttaggccctctagcaaggtgatgtttatttacagggttgcataaacaaggcctcaccattcaaaaaaccttgtattctattacatgtttcacattaacaaagactggaaattctctaggaaagggatcttttttatctacatgaaaagcacaggctagtaaagacttgttgaaaaagttgaaagaacataaatgtatatggtatatgccacatagcataatggaggaagatagcaaataggaaacatattggtgaggaagactggagtttgatgatctagtcaggaaaacatcaagttaaatccttactttacacctaaacataaactggtgaataaaacaagtatgtgaaagcacaagaagagagaggacaggccgggcgcagtggctcacgcctgtaatcctagcactttgggaggccgagacgggcagatcacttgaggtcaagagatcgagaccag

SEQ ID NO: 13459 - DNA, 337 bp, Homo sapiens
ctatacggcgaattggagctccaccgcggtggcggccgaggtaccactcctatgcagtcatcctgtcaggacccattccattcttctatccctggctcgctgggtcaatactgtgaagcgatttactgccggtgctctcatttttccctcagagatacctcgtgattactttgattctctccatctctacaggctaataactctaatatttaaaaactctggatagggatgcagggaagctgtggggagagcccttgggcttttctcctgggtgaagagcacattcctgaaaattgtgggccttggcttacagctgtactagggccggccactcagc

SEQ ID NO: 13460 - DNA, 512 bp, Homo sapiens
gcgaattggagctccaccgcggtggcggccgaggtacccagcccgccacccggcttgtgtgtcatcctgggcccaggcaggtgatgatgccaaacacaaggcccagctatgtaaccaagtaaaaactttcatcagaatgcccatctttgtgacccacagcccattgtcaagagccttccctgtgccaggagttcagcaggttcacctccgcctccactagtcactaagacacggatattttaagaattaaaagcctccacaagccaggcacaatggcttacacctataatcccacaactttgggaggccaaggtgggaggatcacttgagccaacgagttcgagaccagcctgggcaacatagcgagaccttgtctctacaaaaaaatttaaaagttagccaagcatggtggggcatgtctatagtcctaactacttgggaggctgaggcagaaggaccatttgagcccaagagttcaaggctgcggtgagccgtgatgatgccactgcact

SEQ ID NO: 13461 - DNA, 556 bp, Homo sapiens
ggagctccaccgcggtggcggccgaggtactttcagtagaggccaggtttcaccacgctggccaggctggtcctgatcccccggccccaggtgatccgtccacctcagcctcccaaagtgctgggattacaggcgtgagccaccgcacccggctctttttttttttttttaaaatcatgattttaacagaagcctccattcaaggcgagacatgccttttatttctctaattgcgagacacttttctgaatcctcttgtcagttgcaccttttaatacaattgaggtgacactgttcttcatggtgacactggtctttcccaagaggtttcagctaattcagtctatcagattttacatcagattttaaaatttgcttcaaacttgggtgcttgtattcaaattcatgcttcatagaaaaatgcatatcagttcaacagttgactaactgcagccacgttcacagtacctgcccggcggccgctctagaactagtggatcccccgggctgcaggaattcgatatcaagcttatcgataccgtcgacctcgaggggg

SEQ ID NO: 13462 - DNA, 570 bp, Homo sapiens
tatagggcgaattggagctccaccgcggtggcggccgaggtacagaaaaggctgatacacactgacagattttgtaacaagggacatttaaaactgagctggtaatagacttgatttctggtgttgccactcaataggcatgactaaatagtgtacctcactgttctactttttataattaaaattttagaggaagctgagttcttgtatttaactacaagttagagactcagcccacaagctttttttttttttttttaatatggtttctttttttttttttgagacggagccttgctctgtcacccaggctggagtgtagtggcgcgtctctgctcactgcaatctctgccttcccggtccaagtgattctcctgcctcagcctcctgagtagctgggattaccggcgtgcaccaccacgcccaactaattttagtatttttagtagagacggggtttccccatgttggtcaggctggtcttgaactcctgacctcgtgaactgcccaccttggcctcccaaaaacgctggggttacaggcgtgagcaaccatgcccagccttttttt

SEQ ID NO: 13463 - DNA, 445 bp, Homo sapiens
aattggagctccaccgcggtggcggccgaggtacgcgggatatatctaaatttagaaatcatccccgttaatatggctcttcataattctaagactaaggctgtgtagaaacctaaccacctaccttacagtgagggctatacatggtagccagttgaatttatggaatctaccaactgtttagggccctgatttgctgggcagtttttctgtattttataagtatcttcatgtatccctgttactgatagggatacatgctcttagaaaattcactattggctgggagtggtggctcatgcctgtaatcccagcacttggagaggctgaagttgcgccactacactccagcctgggtgacagagtgagactctgcctcaaagaaaaaaaataaaagaaaattcactatctaacaaacctagactatttaaaatacaaagattgc

SEQ ID NO: 13464 - DNA, 547 bp, Homo sapiens
agggcgaattggagctccaccgcggtggcggccggggcaggtactactgacttacctgccatgggctttctcaagacaagtcctgcaggagaggcacactcacttctagcgtcaactattgaaccagccactgccttcactcctcatctctcagcagcagtggtcactggatccagtgctacatcagaagccagtcttctcactacgagtgaaagcaaagccattcattcttcaccacagaccccaactacacccacctctggagcaaactgggaaacttcagctactcctgagagccttttggtagtcactgagacttcagacacaacacttacctcaaagattttggtcacagataccatcttgttttcaactgtgtccacgccaccttctaaatttccaagtacctcggccgctctagaactagtggatcccccgggctgcaggaattcgatatcaagcttatcgataccgtcgacctcgagggggggcccggtacccagcttttgttccctttagtgagggttaattgcgcgcttggcgtaat

SEQ ID NO: 13465 - DNA, 533 bp, Homo sapiens
tatagggcgaattggagctccaccgcggtggcggccgaggtactgtgaaagaactagcactttgagcagagaacaaatgccttacttgagtttcccctggactctatccctattcaaagatgcttggttatacctcaagagggaagcaatccagaccaactcctatgacatgacaggcactcaagcctgatgaggcagaaacctggcagctgtagatgttggaaaggataatttatgtgttcaagtgactaggattctaagggctagatgctagcttcaagcacggctggatctaggaagcccttttgctctcccttttccttggtctacttttctctgtaggcaagttcattcattcttaggcaagttctctgcatgtggcagcaatgatggacactggaatctctgggtattcagagttctttcagtagcagtcctacaagagaagatggtccatttctctcagtccacttctctcgccccacagtggactctgattggcccacttctggggcctgtcactgtagactact

SEQ ID NO: 13466 - DNA, 480 bp, Homo sapiens
ctatagggcgaattggagctccaccgcggtggcggccgccgggcgggtaccttaccaccccatccccagagcattgcatggggtgtttggcacacagtaggtgctcaatgtaaacgtgtgcactgtggcatgttagagccagacaggatctcatccagcccgttctctgcacccctccctcccctctccaagtagccctgctgtgggttcaagtaaagaggggctggggcgctggtctgattgtgtgggtgatttggggagatctcttcctcttccggaaccccaaaaggttgggacaaacacagcaacaagcccagctccctgaatttcagtgattcatttgtgggataaaggagtgaatgataaagtgaaggacgactgtccccgcgtaccttggccgctctagaactagtggatcccccgggctgcaggaattcgatatcaagcttatcgataccgtcgacctcgagggggggcccg

SEQ ID NO: 13467 - DNA, 393 bp, Homo sapiens
cgaattgggtaccgggccccccctcgagggcggcggtgtcgataagcttgatatcgaattcctgcagcccgggggatccactagttctagagcggccgccaccggcgtggagctccagcttttgttccctttagtgagggttaattgcgcgcttggcgtaatcatggtcatagctgtttcctgtgtgaaattgttatccgctcacaattccacacaacatacgaaccggaagcataaagtgtaaagcctggggtgcctaatgagtgagctaactcacattaattgcgttgcgctcactgcccgctttccagtcgggaaacctgtcgtgccagctgcattaatgaatcggccaacacgcggggagaggcggtttgcgtattgggcgctcttacg

SEQ ID NO: 13468 - DNA, 453 bp, Homo sapiens
gcgaattggagctccaccgcggtggcggccgaggtactgaacatccatggcagacgctattctttccctcttagagatgcagacactgaggctcagagaagttgtcccgcacccagtatgtgatggagaggtagagggtaaaaacatcaactgaaggatttagcatttggggaagaaggaagaagcccaaaatggagtagatcaaaggctcccccgtgaacaaatttaaaattaaggagaaagaagcagaattcagtcttctccacacccataaccaaacagctcctatgaaggcaccaagcctgacgctcatcccaataaaaaggaacgatctggagagaggggcagccgctggtgacaagagaaccccccaggcagcctcgtcatctggccaggagtccctggctccctcctacagctctccagacagcctttcccacttgctgaacctgc

SEQ ID NO: 13469 - DNA, 544 bp, Homo sapiens
ggcgaattggagctccaccgcggtggcggccgaggtacttttgggggacagatatcatataggggattcatgtcagtgaccaaacgaagtgaccattacagcccttttgaaacctgaggtgtaatttttaaaaatgaactcatgactttaatagtcatagactcaaacctgagttgattattatgaattagtttatgggagtctcaatatgtgaatatgatggagacaagttttggaatacagataaatcaagtcactgtattcactctctctctctctctttgaatagccttatctttgcctatacacacaaacagtgcagccatcaaaattttcaatttacaaaatgttcacagtcatgcttcttccttgactaaacactggggttgctgccagtggtaattggcttgaaaccagctaatttttatatatctatttagtctggatattctagatgagtggcactatagttgcggtgctctagtcactgtgccagagcaccagggaggagggtgcttgctaccactgacagctgtgtgtcatt

SEQ ID NO: 13470 - DNA, 489 bp, Homo sapiens
ttggagctccaccgcggtggcggccgccgggcaggtacccacgttttgctccacactccttgaccgcaggggctcggacacaaacccctgtcaccaggagagtcagtcagcactacttgggagggctaaagggaaatttggaaataaaattccaaagtttggagtaaaaaaattcaagtgttgattttatattctttccctttctgacacagcctaaagcgtagggggaacatgtgtttatctgtgggagataaacaagatggagtcccaaagactttaacaaaatatttttttaaaaatccactagaatagaaaatacattatttagatatactttatgctgagagtgagtatatatgcttgtcctatttaaacttgtgagaaaaagtggtatcccttgatacatttagaaatatgggggctatcttgtttcattgtgggggtggggccagaggaaaataaatgcaagatgaccctgttgaaggaatc

SEQ ID NO: 13471 - DNA, 505 bp, Homo sapiens
agggcgaattggagctccaccgcggtggcggccgccgggcaggtacccacgttttgctccacactccttgaccgcaggggctcggacacaaacccctgtcaccaggagagtcagtcagcactacttgggagggctaaagggaaatttggaaataaaattccaaagtttggagtaaaaaaattcaagtgttgattttatattctttccctttctgacacagcctaaagcgtagggggaacatgtgtttatctgtgggagataaacaagatggagtcccaaagactttaacaaaatatttttttaaaaatccactagaatagaaaatacattatttagatatactttatgctgagagtgagtatatatgcttgtcctatttaaacttgtgagaaaaagtggtatcccttgatacatttagaaatatgggggctatcttgtttcattgtgggggtggggcagaaggagaataaatgcaagatgaccctgttgaaggaatcttagcatg

SEQ ID NO: 13472 - DNA, 449 bp, Homo sapiens
agggcgaattggagctccaccgcggtggcggccgaggtacgcgggacggtgagccggaggagtcagtcagaggggcgagcaggagcgattccgtcgccaaacaggttatgagtgccagtgagccgccttagatagaagcatcgtcagcactttattaatgatggatagtgagaataaacccgaaaatgacgaggatgaaaagataaacaaagaagcacaagacttgacaaagctttcatcccataatgaagacggtgggcctgtatctgatgtgatagcaagtttccctgagaattctatgggcaaaagaggtttttcagaatcatcgaactctgatagtgttgttataggagaagacagaaataaacatgcttccaaacgcaggaaattagatgaggcagagccccttaaatctggaaagcaaggtatttgtagattagatacttttg

SEQ ID NO: 13473 - DNA, 498 bp, Homo sapiens
tatagggcgaatgggagcttcaccgctgtggcggccgaggtactcttatgagaggaacattaaaatttgcaattataatgcaaagaaacaggagacgatcgtgagaataagcaatgtcacacacatttctctccaaactatatgtatcttgtcctttaaattctttgacgtgtgtgtggggcctgggtggggggtgtgggtgtgtggtgttctaagggccttttctactaattccaataactgggttatctgtgaggctgcttattctcactgtattttactgcttctttgcctttcttgtttttttttttaaccatactcaggtatggttaaaatgtaaatgaaagaacagtgggagcgaagtataatattgagttgttctgtttcttttatggaggatacaaactctttccactgtctgatggttagggtgaggcaaattaacaagagaaaatgttcctgcccgggcggccggtctagaactagtggatcccccgg

SEQ ID NO: 13474 - DNA, 403 bp, Homo sapiens
actatagggcgaattggagctccaccgcggtggcggccgcccgagcaggtactggggctgcacaggctgtggcaacactggctagtcaaagcctggaaagacctgtgagcttgaactcttctgggttgccattgttctgttggtttcagcagtgagactgagagagcctgttctgtttagaaaagccacagtggttttctaggtaaagtctgcaggagatgtcacttggtgccttttcaatacgagttttccacctgcatttttggaaccattatgggccttttaaaaatttattaataagtctcttaaatattttataatctagcttctgagacaagatgattttaaaacagttatatgctctaaattaaaaatttagagggtgagtgcagtggctcgcccc

SEQ ID NO: 13475 - DNA, 277 bp, Homo sapiens
gtgagactttattgacagtgtgctgcaaaacgccctatatgtgctgatgttgaattctcctatgcagagttttgtctccagttaaaaatgtaaatactgttgtttcttgttggagctcagaggaaaaaaagataactactctaggatatgtatcaatttgatgctactttattttatttattgaagacagggttcttggctctgttgcccaggctggagtgcagcagtgcaatcacagctcactgcagccttaaccttctgtgcccaatcgatgctc

SEQ ID NO: 13476 - DNA, 149 bp, Homo sapiens
  misc_feature 139, 140: n = A,T,C or G
actactatagggcgaattggagctccaccgcggtggcggccgaggtacgttttatgatgataacataactttaatgctccaacctgagaaagataaaatagactaagatgaccattgaatgcaaacagaaagtttctannaatgaacaa

SEQ ID NO: 13477 - DNA, 122 bp, Homo sapiens
actactatagggcgaattggagctccaccgcggtggcggccgaggtacagattatttcaccatccaggtattaagcctagcacccaagagttttttttttgctgctctccttcctccctcca

SEQ ID NO: 13478 - DNA, 163 bp, Homo sapiens
gactcactatagggcgaattggagctccaccgcggtggcggccgaggtactacaataaggacaaatattcaaaacattctgttaagtaaaataagacagtcaaaaaggaaagctgtataattacactcatgtaaaatatttagtcaacactcacacagaaacc

SEQ ID NO: 13479 - DNA, 509 bp, Homo sapiens
tactatagggcgaattggagctccaccgcggtggcggccgaggtactgactgtctcaaattcttggatagctgtccctcatgtcacctagctgctgagagctttgtgatcctaacaggtgatgactcagaccgacactgcattggtaggaattccacaaataggtgcctcaatgtgcctagattgaaatatcagcctttcccagactgacctgatgggttgacttcaggtgtggtgtaaacacctacattttaatgtaaacatttcagtgtaatcaatgagaactatcattctgctttaatcaccatgagttctgaaataacaaaggatttgtctgacattcattctaagaaattcattcttacctgactaagaaacttttttaacccggcacaataataagaaatgacctgtaagtacctgcccgggcggccgctctagaactagtggatcccccgggctgcaggaattcgatatcaagcttatcgataccgtcgacctcgagggggg

SEQ ID NO: 13480 - DNA, 477 bp, Homo sapiens
tactatagggcgaattggagctccaccgcggtggcggccgaggtactgactgtctcaaattcttggatagctgtccctcatgtcacctagctgctgagagctttgtgatcctaacaggtgatgactcagaccgacactgcattggtaggaattccacaaataggtgcctcaatgtgcctagattgaaatatcagcctttcccagactgacctgatgggttgacttcaggtgtggtgtaaacacctacattttaatgtaaacatttcagtgtaatcaatgagaactatcattctgctttaatcaccatgagttctgaaataacaaaggatttgtctgacattcattctaagaaattcattcttacctgactaagaaacttttttaacccggcacaataataagaaatgacctgtaagtacctgcccgggcggccgctctagaactaggggatccccccggctgcaagaattcgatatc

SEQ ID NO: 13481 - DNA, 484 bp, Homo sapiens
cgactactatagggcgaattggagctccaccgcggtggcggccgcccgggcaggtaccgctgtgtccgggtgggtggtcagaatgctgtgctccaggtgttcacagctgcttcgtggaagaccatgtgctccgatgactggaagggtcactgcgcaaatgttgcctgtgcccaactgggtttcccaagctatgtgagttcagataacctcagagtgagctcgctggaggggcagttccgggaggagtttgtgtccatcgatcacctcttgccagatgacaaggtgactgcattacaccactcagtatatgtgagggagggatgtgcctctggccacgtggttaccttgcagtgcacagcctgtggtcatagaaggggctacagctcacgcatcgtgggtggaaacatgtccttgctctcgcagtggccctggcaggccagccttcagttccagggctaccacctgtgcgggggctctgtcatca

SEQ ID NO: 13482 - DNA, 433 bp, Homo sapiens
tacgactcactatagggcgaattggagctccaccgcggtggcggccgcccgggcaggtaccgctgtgtccgggtgggtggtcagaatgctgtgctccaggtgttcacagctgcttcgtggaagaccatgtgctccgatgactggaagggtcactgcgcaaatgttgcctgtgcccaactgggtttcccaagctatgtgagttcagataacctcagagtgagctcgctggaggggcagttccgggaggagtttgtgtccatcgatcacctcttgccagatgacaaggtgactgcattacaccactcagtatatgtgagggagggatgtgcctctggccacgtggttaccttgcagtgcacagcctgtggtcatagaaggggctacagctcacgcatcgtgggtggaaacatgtccttgctctcgcagtggccct

SEQ ID NO: 13483 - DNA, 488 bp, Homo sapiens
gagctccaccgcggtggcggccgaggtactgaatatgggtttaaccaaatatgtcacaaaactatttcaggagagtagaggagtgggtcaggagaggaaatgtgtaggggtgagggatgatacaagaaagccaaatcctcatcttctatagtagagagtcagcggataaaacctaaaaacaatacatcaagaaatacttacacttatggaaggaaataccagaagttaaaaggggttacttctgggacatcagacaccagactgcagggaagggctgcctcttgtattaacaagcttccagtataatttgctttttaaaaataggtccatgcattattttaataaaaattatgctgggcgtggtggctcaggcctgtaatcccagcactttgggaggctgaggcggtgtggatcacttgaggtcaggagttcgagaccagcctggcctacatggtgaaacgccgtctctactgaaaaatacaaaaatt

SEQ ID NO: 13484 - DNA, 463 bp, Homo sapiens
attggagctccaccgcggtggcggccgcccgggcaggtacttagcagctgtgtgacctagagcacagtgctttgagtttttgagtcttagcttctgtgtctataaaatggggttcacacaactcaccttacagggctgtaagattagattacacagaaaatatattttttggctgtgggggctggaagtgttgctgattagcatttgaaatcccatcctgtgggtgagaaaaccccaccttatgacttggtgggaaacaaagccaacctcccactgatgaagctgaaagtagcagaaccttgcttctactgcctcccttgcagctagaggcaggcacaggactagcctgtcaattggatgcaaatgctccaggccttgaatcacaacctggtgacttgcacccaagtctattactattgtctcttgaattgaaacaggccactctttctctccttcattctac

SEQ ID NO: 13485 - DNA, 350 bp, Homo sapiens
tatagggcgaattggagctccacctcggtggcggccgggggccattgagactgccatggaagacttgaaaggtcacgtagctgagacttctggagagaccattcaaggcttctggctcttgacaaagatagaccactggaacaatgagaaggagagaattctactggtcacagacaagactctcttgatctgcaaatacgacttcatcatgctgagttgtgtgcagctgcagcggattcctctgagcgctgtctatcgcatctgcctgggcaagttcaccttccctgggatgtccctggacaagagacaaggagaaggccttaagatctactgggggagtccggaggagc

SEQ ID NO: 13486 - DNA, 478 bp, Homo sapiens
ctagggcgaattggagctccaccgcggtggcggcgcccgggccggtacccataaaaattaaaaactattttaaaaaataaattccatttgagccactccgtcaaaccacccagagtgggtagacgtctttcgtgcctctaagaagccccatctctattctgcgtctcaccttgcagggctgctcatctgaatcctgaagatggtggacacccatctgctaggactgaaatgaataggacagagggaggtgcagagtgaatggaccatactacctgtcatcttggcaacgtgtgattgaataaaacaacttctttagaagtttgatagagtgatttgataatgtaatttacaagtgatcatttctttttagtttcattttcagttgttttttatagacaaagtctcgctctactggctaccggctaggctggagtgcagtgccacactcgtagctcactgcggcctcaagttcctgggc

SEQ ID NO: 13487 - DNA, 518 bp, Homo sapiens
gctccaccgcggtggctttttgagtctggacaggcctctgtttttgctttaaagttaagagagctaaataaatgatggtaaaaagataataaaatagaacatgaagggctgtcagtcagtgtaggtatttccatcccctcacttttcaagtgaggtcacggaggctcagagcgataaggagacttgtccaaggccacacaccggctggtgctcaagccgggacttgaacccacgcagtctgactctagagcccaagctcctaactatgacatcctatttgatacactgttttactggagaaacagatcatttgacagacattctttctgttagcaatttgacaactctttccccagttgtctgtacctgcccgggcggccgctctagaactagtggatcccccgggctgcaggaattcgatatcaagcttatcgataccgtcgacctcgagggggggcccggtacccagcttttgttccctttagtgagggttaattgcgcgcttggcgtaatcatgg

SEQ ID NO: 13488 - DNA, 376 bp, Homo sapiens
agggcgaattggagctccaccgcggtggcggccgcccgggcaggtactaccttctctgctacaagtcgagcgaggagccccgcatgagccctgacacctgtgccaccattttggaaaaagctggtctcgataactgggctcttggaaaaacaaaagtgttccttaagtattatcacgtggagcagttaaatctaatgcgaaaggaagctattgacaagcttattttgattcaagcttgtgtcaaagcattcttgtgttcaagaagataccaaaaaatacaggagaaaaggaaagaaagcgctataataatacaggcagctgcaagaggacaccttgtcaggaaacaaagaaaagaaattgttggcatgaaaaacac

SEQ ID NO: 13489 - DNA, 529 bp, Homo sapiens
acgactcactatagggcgaattggagctccaccgcggtggcccgcccgggcaggtactttcttttttttttttttttttttttacggagtcttgctctgtcacccaggctggagtggaatggtgtgatctcggctcactgtaaccttcgcctcccaggttcacgtgattctcctgcctcagcctccggagtagctgggattacaggtgcacaccaccatgcctggctaattttttgtatttttagtagagacggggtttcaccatgttggccaggctggtcttgaactcctgacctcaagtgatctacccaccttggcctcccaaagtgctgggattataggcatgagccaccacgccaggcccactctctaaattttgaccaccctgccttgagtggtcttctagcaccctaacctctgtctaacctcgagagctttgcactagcgattcctggggaccagctatggttggtatcttctcaactttctaatttttttaaaattattattattattattattattttaa

SEQ ID NO: 13490 - DNA, 365 bp, Homo sapiens
actatagggcgaattggagctccaccgcggtggcggccggcccgggcaggtacctgtgtggaaaagaatgcttgcaaagcttgtcaccctcacgagaattcctgtgacagacatttgcctttgacagtgaaaacagatattaaagtgaaaggagaagaaaccgaagagcatcagaggggacgactgggttacttaactgttggggagcaatctgaggagttggttaccagagaaactggcgatggcgatcccgtgagcaacatctctcagacccattttaaatgccgggggatacttaatcatgctgaaaaacagcagagccctgaggttttggactaacatgttgcagaaagaagagaaatata

SEQ ID NO: 13491 - DNA, 451 bp, Homo sapiens
  misc_feature 382: n = A,T,C or G
tactatagggcgaattggagctccaccgcggtggcggccgaggtacactacacctgggacaaatacttttttgtgaagtcagtaaagcctttgcgtgcaatatagcatctctatgcaatgcagcaactcctcgtctatcgctacagtaagaaaacagccacgggtcaggtgttgtggctcacacctgtaatcccagcactttgggaggtccaggtgggtggatcacttgaggctaggattttgagaccagcctgaccaacatggagaaaccccatctctactgaaaatacaaaattacccgggtgtggtggcgcatgcctgtaatctcagctactcgggaggctgaggcaaaagaattgcttgaatctgggaggcggacgtngtggtgagccaagatcgtgccattgcactccagcctgggcaacatgagcgaaacttcgtttcaaaaaaa

SEQ ID NO: 13492 - DNA, 534 bp, Homo sapiens
ctactatagggcgaattggagctccaccgcggtggcggccgcccgggcaggtactagttattttaaattccactcataacttatcggccaaaagtagtcacatggctccacctaatcacaagtggagcgggaagtgcaatcctaccttgcctggggaaggtatagagatagaccagcactaatgactaccacacttcgctaaggtcacataataaataagcatcagacatcaggtgtggtggctcatgtctataatcccagcactttgggaggctgaggcgggcagatcacttgactacaggagttggagatcagcccggacaacatagtgaaacacgtctctactaaaaacacacgcaaaaaaatacgaggcatggtggtgcatgcctgtaatcccagttacctgagaggctgaggcacgagaatcacccttgaacccaggaggcagaggttgcagtgaccgatatcatgtcactgcagtccagcctgggtgacagagcgagaccttgtctaaaaaaaaaaaaaaagaaaaaa

SEQ ID NO: 13493 - DNA, 278 bp, Homo sapiens
actatagggcgaatcggagctccaccgcggtggcggccgcccgggcaggtactgctggttcaagccattaaattacatcacaaaggtttggtttctcgcgtatatatttctctggggcacttttgctatgttggctctatcctgaggcagtctctctcctcgtggtaaccaggtggctctagcagcctcagctttatatctctcaagagtaagtccaccgtcacagagctggcctctgtctcagaagttctgggcaatatctcatgatatcaaattgg

SEQ ID NO: 13494 - DNA, 395 bp, Homo sapiens
agggcgaattggagctccaccgcggtggcggccgcccgggcaggtacacaccaccacacctggctaattaatttaaaaaaaattttttttagagatgggatatctgtatgttgcccagactggtctcaaactcctggcctccagcaatcctcccacctcacctcccaaagccctgggactgcaagcatgagccaccatgcccagctatattttctgtaaattgctaatgacaatgaaacatgtatgctgtggacagaagccttgttggacctagagcccatgctgcgtcctttgccttaataaaacataactctggcattacatatataattaacagcctcaaagaacatgtttctttattaaactctgactgtttcagcattatttttagtacc

SEQ ID NO: 13495 - DNA, 225 bp, Homo sapiens
ttggagctccaccgcgggggcggccgcccgggcaggtactactgtgtcctttagatcactctgccttgatcactctgtcccgtcactctgctatttcacctgtcagtgaaatacctggtatcgtcctgccaacgtgaagcattgaatgctttatacgtctccatcctgattgtttaggctttgaatgctgagaagtatctgcactttgttggtcaattgtagatg

SEQ ID NO: 13496 - DNA, 477 bp, Homo sapiens
ggcgaattggagctccaccgcggtggcggccgaagtacccttaagccactgctcctttgtaaagtctttttggattgtcatcatcaagagtcagttgatctccaccttctcagaactcacagggcactctgtctaggcattgctgaccgtctgcagtgtcagatggtgacttctgtatgtgttgtgtttcccgttagactctaaggtttttaaaggcgagactcactcctgcagaagcacataacacaatgccaaactcttatttacggaggtcctggcgcattgtcagcttttggtaaatgcttttcttttgttgaatacttatcttctgtgtgccaagatttgtgttaagtgctagaaaaatgtgggaggtcaccgcagaccctgttctcatggaactgatggtgtgtaatgggtgagattaacataaataaatgatgcgcaaatgaacacaaaattcaaattgatgaatgtgta

SEQ ID NO: 13497 - DNA, 524 bp, Homo sapiens
tatagggcgaattggagctccaccgcggtggcggccgaggtacttccctgagcagtcgaagtggatgcccagaccaatggccagtgctaatatcaatgcaatgatcccagtgacgatgattggaaaaaacttcaatggcagcagtgacaggatctgtgcagcaacagcatctgcatctggtgcaacaggacttattttcaaatcatcaaggccaaaaagcgatcggaatgagaagggggcttcaacagcaggcggatcattttcccccatggtgactatttcaggacctctgacatccggctccgcctccacctctacctcataattcccgagtcccaaaaatgtagatggcaccacggaagagatagtaggccacagtgttactggcttcccataaacacagccctttcctggctcacacgggcatgacctcccgcgtacctcggccgctctagaactagtggatcccccgggctgcaggaattcgatatcaagcttatcgataccgtcgacctcgagggggg

SEQ ID NO: 13498 - DNA, 358 bp, Homo sapiens
aggcgaattggagctccaccgcggtggcggccgaggtacagtagttggatgtcgaggttagattagattctggggttggattgcttgttttggtggatggtttttgagtcgactttacagagggttgtttatccaccagaaggcacatgtgcttgcctgtgtcttttttgttattgttttgaggcagagcctcgctctgtcttccaggctggaatgtagtggcacaatcttggctcactgcaacctccacctcccaggttcaagtgattctcctgcctcagcctcccaagtagctgggattacaggtgtgtgccaccatgcccagctaatttttgtattttcagtagagatggggttt

SEQ ID NO: 13499 - DNA, 306 bp, Homo sapiens
tactatagggcgaattggagctccaccgcggtggcggccgcgcgggcaggtacacttccacgagaagaattaatattgtagtgttaggaaaactagcaatttagctaaacagcatcaagttacaaaccaggaaagtgatttaaaactaaatgctggcttatctttctgaaacaaagcatctaaatttgacagtccaaaatggcacttattgagtgtccgtgacaatacatgctgacaagcagcacacctcttttttgtttttttaagacggcatcttgtgctgtcacccaggctggagtgcagtat

SEQ ID NO: 13500 - DNA, 523 bp, Homo sapiens
tactatagggcgaattggagctccaccgcggtggcggccgcccgggcaggtacctatataaaaattgatttagcttctacactcaagtaattataaacaggtttttcttttgggacatttgacagttatgtgaaaggtgagtcttcgttgtgtagtattgtctgttacactgcaggtgtctagaattgctgatagtgttctccctctaaagtaatgtcacccaaccacttgtaaattgacgataataagacaggaaatcaagaaccaatataaataagcaaacatttgaaaataagagctaaaaatcaaaaataatctctctttttgctgataatactttatacctaaataacctaagatttttttttttttttttgagacagagtcttggctctgtcacccaggctggagtgcagtggtgcaatcccggctcactggaacctccgcctcctgggttcaagcgattctcctgcctcagcctcctgagaagctgggattacaggcatgcgccaccgtgcctggc

SEQ ID NO: 13501 - DNA, 265 bp, Homo sapiens
gactcactattgggcgaattggagctccaccgcggtggcggccgaggtactttggggggaaaaagagttacaatttgcccataaagaatggagagaacagaaatgtagcttttatgctgaaaaacaaaatgcaagggcaatccagtttctaattcctgtgccaaagctgctgttcttgatgacctcggtcaaatcatttaaattctctcaatttgttcatataaaagtgctattaacctgcagttcctcaaatactatccaatca

SEQ ID NO: 13502 - DNA, 499 bp, Homo sapiens
tactatagggcgaattggagctccaccgcggtggcggccgaggtattcacaggtatgcataaaccaaatatacaagaatttaatgacagcattatttgcaaacagtgaaagattctgagcaatcaaaaggttcattactacaggcataggtctataaattactactgtatggaatactatgcagccattaaaataatgaggaagagggagagtgccctgtatgcactgacatggaaaggtttcagtatatggtaaaaagcagctcatcttagaacagattttatagtatgaccccacttgtgtggaaatattttgtgatgtgccactcagtgtatacgtattcatgagtgcatatacaagtgtgtgagaagcaatgtaagtaactgttcacaaggaccccccctttaagaaggcagagggatcgggggatatagagtgaaggatgattttagctttttcctctatatatataccattctctggattaggtatgatcatt

SEQ ID NO: 13503 - DNA, 405 bp, Homo sapiens
actactatagggcgaattggagctccaccgcggtggcggccgaggtacgcgggaggaaagggctgtgtttatgggaagccagtaacactgtggcctactatctcgtccgtggtgccatctacatttttgggactcgggaattatgaggtagaggtggaggcggagccggatgtcagaggtcctgaaatagtcaccatgggggaaaatgatccgcctgctgttgaagcccccttctcattccgatcgctttttggccttgatgatttgaaaataagtcctgttgcaccagatgcagatgctggtgctgcacagatcctgtcactgctgccattgaaggtttttccaatcatcggcattgggatcattgcattgatattagcactggccattggtctgggcattcac

SEQ ID NO: 13504 - DNA, 382 bp, Homo sapiens
agggcgaattggagctccaccgcggtggcggccgcccgggcaggtacacagtaagtgaagggccaagactgacggctgataggacaggggtgaccagtggtggggagggtagtgggagcagtccatcctggaatctggcattcaaggggcgcattgtctgtggaggatttaaaaataataaaaccaactaaaggcagtctgctttttatggtcaccaggcgccagcaattctaaatttcagtgataaaatattcctcctcactggacacgagaagctggcttctcctattccccagtacctcggccgctctagaactagtggatcccccgggctgcaggaattcgatatcaagcttatcgataccgtcgaccttgagggggg

SEQ ID NO: 13505 - DNA, 535 bp, Homo sapiens
actatagggcgaattggagctccaccgcggtggctgagtgagctaactcacattaattgcgttgcgctcactgcccgctttccagtcgggaaacctgtcgtgccagctgcattaatgaatcggccaacgcgcggtgagaggcggtttgcgtattgggcgctcttccgcttcctcgctcactgactcgctgcgctcggtcgttcggctgcggcgagcggtatcagctcactcaaaggcggtaatacggttatccacagaatcaggggataacgcaggaaagaacatgtgagcaaaaggccagcaaaaggccaggaaccgtaaaaaggccgcgttgctggcgtttttccataggctccgcccccctgacgagcatcacaaaaatcgacgctcaagtcagaggtggcgaaacccgacaggactataaagataccaggcgtttccccctggaagctccctcgtgcgctctcctgttccgaccctgccgcttaccggatacctgtccggctttctcccttcgggaagcgtggcgctttct

SEQ ID NO: 13506 - DNA, 535 bp, Homo sapiens
ctactatagggcgaattggagctccaccgcggtggcggccgaggtacatctttggtgacttttcattcacatttcatggataatttggggaggtggcctgccatccctgaagccctacatccccatacacactctgtgcacatccagtgccctgctccaccatggcagtgcccgcaagggggtcccagatgagaagaagctggctaaagggcccttgtcccctctcagactccttcagcgggctggagtcctccctcgctcgatttcgcccgagagcgttaggggtttctaaatgcaggcgcctttgtgttgtaacgaaacttttagtttaagggaaaatctcttttaagccactgattgttctgacttgctgagtttactcagcagccttatgctggctctgccactgcacaataaaaccaaagcaggacagttgcaggtcaagcaagggggaacatgttttgcatttagggagtttgaccactgaaatcaaggagaggagcttgctctgaaattgtacacacattaagaaact

SEQ ID NO: 13507 - DNA, 357 bp, Homo sapiens
tactatagggcgaattggagctccaccgcggtggcggccggcccgggcaggtacctgtgtggaaaagaatgcttgcaaagcttgtcaccctcacgagaattcctgtgacagacatttgcctttgacagtgaaaacagatattaaagtgaaaggagaagaaaccgaagagcatcagaggggacgactgggttacttaactgttggggagcaatctgaggagttggttaccagagaaactggcgatggcgatcccgtgagcaacatctctcagacccattttaaatgccgggggatacttaatcatgctgaaaaacagcagagcccttgggttttggactacatgttgcagaaagaaga

SEQ ID NO: 13508 - DNA, 435 bp, Homo sapiens
ctcactatagggctgattggagctccaccgcggtggcggccgaggtactttttttttttttttttttttgggctaagtgggtggagtatttcttttacccaagataagtaaaagctacaactcttagtataaatatgtgtccaagtgcctcataactgctaaccacagggatcctgagctctcatagcttaaacacacagtgtctattttactggtctacttctcctggagacctaaaagggcctatagcctcagtagttgacaaaacaacatattaaaattcctcactgatcactaacataacctaaaatccctgcttttgacattagcatggcagacatccttagcaggcctaaatagaatggccttataagtggatccaaagggcttctgaatcatgagttagccagatggtcagcatctccagtcctttat

SEQ ID NO: 13509 - DNA, 416 bp, Homo sapiens
tcactatagggctgattggagctccaccgcggtggcggccgaggtacatcaccctgctgagggacatccaggacaaggtcaccacactctacaaaggcagtcaactacatgacacattccgcttctgcctggtcaccaacttgacgatggactccgtgttggtcactgtcaaggcattgttctcctccaatttggaccccagcctggtggagcaagtctttctagataagaccctgaatgcctcattccattggctgggctccacctaccagttggtggacatccatgtgacagaaatggagtcatcagtttatcaaccaacaagcagctccagcacccagcacttctacctgaatttcaccatcaccaacctaccatattcccaggacaaagcccagccaggcaccaccaattac

SEQ ID NO: 13510 - DNA, 420 bp, Homo sapiens
tcactatagggctgattggagctccaccgcggtggcggccgcccgggcaggtacgcgggtgaaaatggagtagttttctaattacagaaagaaaagaagttgaagtgggtttcgccatgttgagcaggctggtctcgaactcctgacctcaggtgatcagctcgcctcagcctcccaaagtgctgggattacaggcatgagccaccacgcctggccaaaaatcttataaataatccccttctaatttcggccagcttaatcacacaccaaattcctttcatgagattaatcttccacaacttctacacttccttaaatctttgattttgtcctatacttctttttttatattagcaatctactttaggacagaaatttactttcctttcctcttgattttgaccaaagtcctctcttatg

SEQ ID NO: 13511 - DNA, 408 bp, Homo sapiens
tcactatagggctgattggagctccaccgcggtggcggccgcccgggcaggtacgcgggtgaaaatggagtagttttctaattacagaaagaaaagaagttgaagtgggtttcgccatgttgagcaggctggtctcgaactcctgacctcaggtgatcagctcgcctcagcctcccaaagtgctgggattacaggcatgagccaccacgcctggccaaaaatcttataaataatccccttctaatttcggccagcttaatcacacaccaaattcctttcatgagattaatcttccacaacttctacacttccttaaatctttgattttgtcctatacttctttttttatattagcaatctactttaggacagaaatttactttcctttcctcttgattttgaccaaag

SEQ ID NO: 13512 - DNA, 402 bp, Homo sapiens
tggagctccaccgcggtggcggccgcccgggcaggtacctatatgatgttggccatgctcactcactcctccaaccctcagtttacacatctgcaaaatgagatacttcttttccagtgttgctgtggacattagcaggcacacacatttggtgcttgcacaaatgaggtcctaagaggtgggtccctctcatcttacgtgaggaaactgaagcagattagaaatgacccaaggaaaccactccgagttcagtctggagcccactcccctaggttttaatcatcccccaactcagtccctatctgctgaggttcctggatccagacggttcttaccaaggaactgtctgtcctcaccacatggatggttttcctggcagaggtgtgccctgtgagggggtca

SEQ ID NO: 13513 - DNA, 368 bp, Homo sapiens
  misc_feature 67, 93, 96: n = A,T,C or G
actcactatagggtgaattggagctccaccgcggtggcggccgaggtacagacaagggggcgactgncatggggggggggtctggtcttgtantcngtttggaattttctaagtcagggtggggtggggggactgtgcacgggtcatgtgcagactggaacccatctccccctcggtctgcaagttaaaacaattgggttggccttctcagcatctgccaatgtctcttagtgaatcttggatcaaaagggcgttggaggaggaggctgggagggaaatccagacagttctccggctctgacatcaggtccagctgttagcatcgtgctgtgggtccctgaacaagaagcaaagtcaggactggtttg

SEQ ID NO: 13514 - DNA, 407 bp, Homo sapiens
cactatagggtgaattggagctccaccgcggtggcggccgaggtaccgctgtgtccgggtgggtggggggaatgccgtgctccaggtgttcacagctgcttcgtggaagaccatgtgctccgatgactggaagggtcactacgcaaatgttgcctgtgcccaactgggtttcccaagctatgtaagttcagataacctcagagtgagctcgctggaggggcagttccgggaggagtttgtgtccatcgatcacctcttgccagatgacaaggtgactgcattacaccactcagtatatgtgagggagggatgtgcctctggccacgtggttaccttgcagtgcacagcctgtggtcatagaaggggctacagctcacgcatcgtgggtggaaacatgtccttgctct

SEQ ID NO: 13515 - DNA, 403 bp, Homo sapiens
tatagggtgaattggagctccaccgcggtggcggccgaggtacctctggatatgttacactgagagagatacttcatcacttacatgatattgctcccccacaaatttcataacctgaatctagttataaggaaatactatgcaacccaaattgagggacattctgcaaaacaactacctgtaatctttttttttttttttttgagacggagtctcactctgtcgtcaggctggagtgcagtggcgcgatctcagctcactgcaacttctgcccccggggtgcgagcgattcttctgcctcagcctcctgagtagctgggactacaggcacacgccaccacgcccagctaatttttgttggggtttcaccatgttggccaggatggtctccatctcttgacct

SEQ ID NO: 13516 - DNA, 200 bp, Homo sapiens
agggcgaattggagctccaccgcggtggcggccgcccgggcaggtactaggtccccggcaacctccccttcctcctgggaatgctcaaatgggaaggcagcatgaaacggtgaacaggcaatcactggacaaagtcacaagaactgggctttagaaatggttttaccattagcagttgtgacacctcagaagtggcaact

SEQ ID NO: 13517 - DNA, 306 bp, Homo sapiens
ttggagctccaccgcggaggcggccgaggtacaaagaaaggacttgatagctattaccttgctgctatgtttgtttcttgggctcaccaatcattcttctgtatacctagcactgcaccaggcgctgaggttagagaaataactaaaactgcgcccttcacccctgatggcaggataggcaaggttggcaccatcgtcacagcggaccctcatcgatgccttggtgtgtgcctggcatggcgttgcagcagtttatcacattcaatccttacagcgaccctattaggataggttgtcggggttttt

SEQ ID NO: 13518 - DNA, 519 bp, Homo sapiens
ctactatagggcgaattggagctccaccgcggtggcggccgaggtactcaggccttactgggatttcctttaagacctctgggaggaagtgtcagtagctgggcaggccttcttggcaagcattcctccctgggttgtggcgggggctcccggcctgctgtgtggcagctgcaggctcctggggacctgaaggaaaagcttaaccgttctcccttcccttgcttggcacttagagcactagttccattccagacataccgattatcttgcctacgtggcatagaggcctaggagcctccctgggaggaagaggcaggccaaggtcttgcctggctgcttttagggggaaagatgtagggaggaagctgccttatgcttggatctgcagcctttgcctggacctgtggagcctatttggccagggtgagggagacaaaaattaaaacccatcgtattcagctaatccttttcttgcctttgaacattgccggggagtctggaaaaaaaaaaaaaaaaaaa

SEQ ID NO: 13519 - DNA, 496 bp, Homo sapiens
gggcgaattggagctccaccgcggtggcggccgcccgggcaggtacgcgggtgaaaatggaatagttttctaattacagaaagaaaagaagttggagtgggtttcgccatgttgagcaggctggtctcgaactcctgacctcaggtgatcagctcgcctcagcctcccaaagtgctgggattacaggcatgagccaccacgcctggccaaaaatcttataaataatccccttctaatttcggccagcttaatcacacaccaaattcctttcatgagattaatcttccacaacttctacacttccttaaatctttgattttgtcctatacttctttttttatattagcaatctactttaggacagaaatttactttcctttcctcttgattttgaccaaagtcctctcttatgcaaaatgaaaaattactcttttttcaactttctttaccaaaaatacatcctcataactttttttcacatctctcctacttactg

SEQ ID NO: 13520 - DNA, 471 bp, Homo sapiens
ggcgaattggagctccaccgcggtggcggccgcccgggcaggtactcgggtgaaaacggaatagttttctaattacagaaagaaaagaggggggggtgggattcgccatgttgagcaggctggtctcgaactcctgacctcacgcgatcagctcgcctcagcctcccaaagtgctgggattacaggcatgagccaccacgcctggccaaaaatcttattaataatccccttctaattacggccagcttaatcacacaccaaattcctttcatgagattaatcttccacaactgctacacttccttaaatctttgattatgccctatacttctttttttatattagcaatctactttaggacagagatttactttcctttcctcttgattttgaccaaagtactctcttatgcaaaatgaagaatcactcttttttcaactttctttaccaaaaatacatcctgctaacttt

SEQ ID NO: 13521 - DNA, 492 bp, Homo sapiens
ctatagggcgaattgtagctccaccgcggtggcggccgaggtacatgtaatgctcctgaactgtatgcttgacacggctgtctagataggttttgttctgtgtattttatgactatttttttaaaaagtaaacaaaaaagaattagctggaaataccagcacaggcaaacccctggagacagaaagcaggtgagtggttgctggggcttgagcaggaggaagggcgagggactgcagaatggccatgggctttgccttctagcatgatgagaatgttctggaattagacagtggtaacgcttgttcaacactgccagtgtagttaatgtcactgaattatacactttaaatggctaacatgaccaattttatgttatatatattttactaccacaaaaaaactagctggcacctaaaaacattccattgaacaggccccttcagatctgtgtcttttcctgcatgcaaattacaccacagagcagcacctat

SEQ ID NO: 13522 - DNA, 276 bp, Homo sapiens
ctcactatagggcgaattggagctccaccgcggtggcggccgaggtacttggatgggttttgtgtgtatgtttgtgtgtgcactggcgtccaccctgttgggcttagtgaactttttgattcagtgatttaaagtttctcatcagatttggaaaattctcaattacttttttctttaaatatttctcttgcccttcccctctctcttcttccaggattccaatttcatcgatgttggaacttttgtctgtgtctcacataactcccatgctctttt

SEQ ID NO: 13523 - DNA, 485 bp, Homo sapiens
cactactatagggcgaattggagctccaccgcggtggcggccgaggtacgcggggggttcaagcgattctcatgcctcagcctcccaagtagctgggactaaaggtatccaccaccacgcctggctaatttttgtatttttagtagagatggggtttcaccatgttgatcaggctggtctcgaactccggcctcaagtgatctgctcgccttggcctcccaaaagtgctgggattacaggcatgagcagctgtgcccagctggataattatttaataaattggggagcataggaagcatagtatttgtgaagtgggtaggcaggtgtgatgggggtattgatgttacatttggggcattttgaagttggtggttcttctgagttgagcagtcagtcactcttcatttgctgcacctttatctcattttagccaacagacattgaatacctaccaagtcttaggtatttgcaatgtaaagacaaat

SEQ ID NO: 13524 - DNA, 325 bp, Homo sapiens
actactatagggcgaattggagctccaccgcggtggcggccgcccgggcaggtacaagaaagaaaacaaataccaagtatttacagatccagagaaagttcacaagaatgggaggatgccagttccaatgctttgtaaagtcaaaaatagccacattgcaaaacaaacaaaaaaaaacgagaacgttcccgagtgtgcctccaaaacataaaggagaaaatcatacagaaaaacctcatgtaagggttggaacttgagcaaccagctatccaaatacagaggggaatcctcgcttagctagggcatggcctgagagaagcccctt

SEQ ID NO: 13525 - DNA, 414 bp, Homo sapiens
gactcactatagggcgaattggagctccaccgcggtggcggccgaggtacacacagtgatttggggtcctttttcctaaaacagcttctttatcaggactttggaattctgggtgagatagaaacactgaaaacagggcggaagttttttcttctggcttcttagtccatggagggctcagcgtggagaggatatgccgtggcattctccctgggagaccacacatgttcccgacagctcagaccccagaccgcacatgctcctgaccagtcaaaccccagaccgcaggtgctcccgacagctcaaaccccagaccccgcgtacctgcccgggcggccgctctagaactagtggatcccccgggctgcaggaattcgatatcaagcttatcgataccgtcgacctcgagggggg

SEQ ID NO: 13526 - DNA, 326 bp, Homo sapiens
ctactatagggcgaattggagctccaccgcggtggcggccgaggtacttaataattcataatttagccatgatagtatctaagctcactttcagaattattgcatacatgccttagggaagaacctatccactaatgcttttaataacttacatagattgtgttgcggcaagtcaagttttaatatagaggaaagggtttatcttatcatagtaaaatagtagtgatgtgttcataatttactatttgcatggtatattatcaaggctgtaaaagcttgaatttgccttttccacatcttcatttcaaattaatttttgtgaggac

SEQ ID NO: 13527 - DNA, 458 bp, Homo sapiens
gactcactatagggcgaattggagctccaccgcggtggcggccgggcaggtacaaattcaggggaggatggagcagctgcaagcctggctggcatcccatgccaacaaggtgacccagtagataagtgacaaggtgactgagctgcctggtgctcttgcatagaattttcaagtgttagaaaaatgtctccatgccttgcaatttgtctcttgtggccaagcctaactcagatggaaatgcagaaatcacccgtcttctgcgtcgctcacgctgggagctgtagaccggagcttgttctaattcggcaatttgggttcttcccccccgggtacctgggccgttctagaactagtggatcccccgggctgcaggaattcgatatcaagcttatcgataccgtcgacctcgagggggggcccggtacccagcttttgttccctttagtgagggttaattg

SEQ ID NO: 13528 - DNA, 419 bp, Homo sapiens
actactatagggcgaattggagctccaccgcggtggcggccgcccgggcaggtactttttttttttttttttttttgaggtggagtctcactctgttgaccaggctggagtgcagtggcacaatcttggctcactgcaacctctgcctcccgggttcaaacgggtctcctgcctcagcctcccaagtagctgggactacaggcgcatggtgccactcccggctagtattttgtattttagtagagacgggggttttactgtgttgtccaggctggactcgaactcctgagctcaggcaatccaccagcctcagcctcccaaagtgctggcattacaggcatgagccaccgtgcctggcctctttcatattttttttacacttttcatttcttcttattttagggtgctggataggggct

SEQ ID NO: 13529 - DNA, 480 bp, Homo sapiens
actactatagggcgaattggagctccaccgcggtggcggccgcccgggcaggtacttttttttttttttttttttggagagagggggtttcactatgttgcctaggctggtcttgaactcctggcctcaagagatcctcttgcctcatccttccaaagtgctgggattacaagcgggagccactgtgcctggcctagaagatctgttttcttttctctgaataattcttgtgacactgtctctccctccatctctttctgtttctttgtcatttttcccagctatccttttttccttgtcttgtcctcttctcccctccatcctaaaacctttgatcacaagctagtttcctttccacatcatctgctcccctctactaaacgctatttcgcccccacctgctttcagctgtgcttgcctctgagcccctctttcaccacggcccaagtggggtggcacgtgccagcttccctgtcagca

SEQ ID NO: 13530 - DNA, 509 bp, Homo sapiens
gactcactatagggcgaattggagctccaccgcggtggcggccgaggtacctcatgctagacaaccttatgacttgaaaacaaaataatatttgaaatggaaatggcctcagttccacccctggtgcccacatagcatagtgaacctgcccctgcagcattgcccatgagtgctaagatcctgtgcccatttgcatgtcttccttaaacaaaagaccgccttagtaagaaattagtaaaccagggagataatcaacttatcccccaaaagatttaagcctctcattttgtttaaccttcattggggattttaaatagaaaactagggcccggcagggtggcacatgcctgtaattccagtacctgcccggccgctctagaactagtggatcccccgggctgcaggaattcgatatcaagcttatcgataccgtcgacctcgagggggggcccggtacccagcttttgttccctttagtgagggttaattgcgcgcttggcgtaatcatg

SEQ ID NO: 13531 - DNA, 435 bp, Homo sapiens
ctactatagggcgaattggagctccaccgcggtggcggccgaggtacatcaccctgctgagggacatccaggacaaggtcaccacactctacaaaggcagtcaactacatgacacattccgcttctgcctggtcaccaacttgacgatggactccgtgttggtcactgtcaaggcattgttctcctccaatttggaccccagcctggtggagcaagtctttctagataagaccctgaatgcctcattccattggctgggctccacctaccagttggtggacatccatgtgacagaaatggagtcatcagtttatcaaccaacaagcagctccagcacccagcacttctacctgaatttcaccatcaccaacctaccatattcccaggacaaagcccagccaggcaccaccaattaccagaggaacaaaaggaata

SEQ ID NO: 13532 - DNA, 459 bp, Homo sapiens
actactatagggcgaattggagctccaccgcggtggcggccgaggtacgcggggagtgaacgctctcggagaaccctttcccacgaacgtccacttcaaaagaacgcgacggagcattaactctgccactgacccctggcctgccttcgcctcctcctcttcctcctctacctcctcccaggcgcattaccgcctctctgccttcggccagcagtttctatttaatctcaccgccaatgccggatttatcgctccactgttcactgtcaccctcctcgggacgcccggggtgaatcaaaccaagttttattccgaagaggaagcggaactcaagcactgtttctacaaaggctatgtcaataccaactccgagcacacggccgctctagaactagtggatcccccgggctgcaggaattcgatatcaagcttatcgataccgtcgacctcgaggggggg

SEQ ID NO: 13533 - DNA, 504 bp, Homo sapiens
cgactcactatagggcgaattggagctccaccgcggtggcggccgcccgggcaggtacactactggcataagagtaaattggtgagaactttctggaggggtagtttggcaatgtgtttccaaaaaatctaaaaattatatttgcctctaatccagcaattatacctctagaaattaatactaaggaaaatcttaagaatatacgtaaaactttagttgtaagaaatttttttgtggccaggcatggtggctcacacctgtaatcccagactttgggagaccaaggtgggcggatctcctgacctcatgatccacccgcctcgacctcccaaagtgctgggattacaggcgtgagcaaattttaaataagaagaaacagtcaacagcatcagacatagtaggtatgtccaacaccataatggctgaaaagtgcccacctagtctggcaattagtaggtcattggtttattaataaccggcatgttaaagttgggtcaggatgag

SEQ ID NO: 13534 - DNA, 253 bp, Homo sapiens
actactatagggcgaattggagctccaccgcggtggcggccggcaggtacaaatcatacctcccaaggtattgctccattgtgtttttgtgcatttggtttggatttttatggggaattgaagacaagtggatcataaagtgcaaaataaaatgctctagaaatgacagatggggcacaatttccaagaaaattcatctagacagtggcaacactgagaaaaaaaagaaacattcaagaagggagttacagtt

SEQ ID NO: 13535 - DNA, 475 bp, Homo sapiens
attggagctccaccgcggtggcggccgcccgggcaggtacttttttttttttttttttttgctagagatggggttcaccatgttggccaggctggtctcgaactcctggccacaagtgatccacctgtctcagcccccccaaagtgctgggattacaggtgtgagccaccactcctggcccatgtttaggatttataccaatattattaacttagaaataagtttctaataaattattccacccgaacttagggtaactgaattttaatgctgatgtattaagcaggttcttcctggggtcttttgattctcaagggatccttcactgagggtggacttcaaattaataggaagcaggaaggagccacctgcactgttttcttgactggggatgacacctaaacctttctgattgcattacttgccctatttatgactggtcttccttattgaaaaataaagattttggatcaca

SEQ ID NO: 13536 - DNA, 325 bp, Homo sapiens
ctcactatagggcgaattggagctccaccgcggtggcggccgaggtactatgagaatttcaaacaaagaatgaagccataaaacaaaaagactgaatatttggctctgcctggctcccaggctttctactattcttgtgacttggcctcaacaaaatctaaagtgacttgttatttgtgggtcagctttgtcccatccttaccagtcatggctttagacaaaagactcagcaccactcaccctctgggacagtctgactgtggtctgaggcccctgcttagatattaggcttcagctcagttcccaagtctcgcttcatgacttt

SEQ ID NO: 13537 - DNA, 342 bp, Homo sapiens
gactcactatagggcgaattggagctccaccgcggtggcggccgaggtactatgagaatttcaaacaaagaatgaagccataaaacaaaaagactgaatatttggctctgcctggctcccaggctttctactattcttgtgacttggcctcaacaaaatctaaagtgacttgttatttgtgggtcagctttgtcccatccttaccagtcatggctttagacaaaagactcagcaccactcaccctctgggacagtctgactgtggtctgaggcccctgcttagatattaggcttcagctcagttcccaagtctcgcttcatgactttctgtgtacctgcccg

SEQ ID NO: 13538 - DNA, 285 bp, Homo sapiens
  misc_feature 271: n = A,T,C or G
ctatagggcgaattggagctccaccgcggtggcggccgcccgggcaggtacacacagtcagcatgcgctgtagcaatgtgctttgcagctggaactcctatcaagcatcctaggcaaggcatgcaccccagcgccagagagaatcaggaaggggaaggtgccctgaacctcagacaagaaccccttccagaaaccaccaccaaagccatcactgtgtttccaccctcagacctgtgtctctttagcttcttggtagaggaagaagaggagnctggtgggcagggc

SEQ ID NO: 13539 - DNA, 300 bp, Homo sapiens
tatagggcgaattggagctccaccgcggtggcggccgcccgggcaggtaccatggacagcaccccggccacagagaggcgcacaacttctacagaacacccttccacctggtcttccacagctgcatcagattcctggactgtcacagacatgacttcaaacttgaaagttgcaagatctcctggaacaatttccacaatgcatacaacttcattcttagcctcaagcactgaattagactccatgtctactccccatggccgtataactgtcattggaaccagcctggacactccatcc

SEQ ID NO: 13540 - DNA, 323 bp, Homo sapiens
tggagctccaccgcggtggcggccgcccggcaggtacttccctgagcagtcgaagtggatgcccagaccaatggccagtgctaatatcaatgcaatgatcccaatgacgatgattggaaaaaacttcaatggcagcagtgacaggatctgtgcagcaacagcatctgcatctggtgcaacaggacttattttcaaatcatcaaggccaaaaagcgatcggaatgagaagggggcttcaacagcaggcggatcattttcccccatggtgactatttcaggacctgtgacatccggctccgcctccacctgtacctaataattcc

SEQ ID NO: 13541 - DNA, 463 bp, Homo sapiens
gctccaccgcggtggcggccgaggtactgatgtcctacagtcctctacctgatctacgttcactggaaagtgtgagtctcagcaggaagcaccttgctctcgtgtccggctaattcgagtgctttacgtagtagaggaattgctgacttttgggacatttctggtcttgccaaagttcaccttgtagtaaagcccccaaagatacttcccaaatagatgctctcttgaaaataactcaggctctagaactagtggatcccccgggctgcaggaattcgatatcaagcttatcgatagccgtcgacctcgagggggggcccggtacccagcttttgttccctttagtgacgggttaattgcgcgcttggcgtaatcatggtcatagctgtttcctgtgtgaaattgttatctcgcttcacaatttcccacacaacatacgagccgggagcatataagtgtaaag

SEQ ID NO: 13542 - DNA, 503 bp, Homo sapiens
tatagggcgaattggagctccaccgcggtggcggccgaggtacatgtcggcctattttatattctgtttagtgctttcaaccccgaaatccaccttctaacattaatattgatatccatcctctctctcctccaacctctctctctcttgcatttacttttagattttcattactttctttttattctgattcttgtaaatagtataaactagattcttttatttttatttactttttaaatttatgattgacacataataattgtatatatttatggggcacaacgtgatgtttcggtgcatgtatacatagtataatgatcaaattagggtagttaccatatccattactttaaacatttatcatttctttgtggtaacaacattaaaatctcatctagaatggcgtgaaccctggaggcagagcttgcagtgagacgagatggcgccactgcactccagactgggcgacagagcgagacctccttctcaaaaaaaaaaaa

SEQ ID NO: 13543 - DNA, 456 bp, Homo sapiens
ctccaccgcggtggcggccggcaggtacaaatgagagaaatggtttagtaaagtataagacatcaacatagtaaagtattctataggtttatgtgttggaattacaaagatgaagaaaagatacaggcaagtatttgatatagtaaattaaaaatagcaagatgtagagtaggcatgtatacagtgatagcaagaacatggatccttaaggacaaaactgaaacataatgcaaaaaaagaaaaatatgcaaattatttttcgtatgatgtaagttgtaaatatttaaatggttatcaattaagagtcttggtgtggcagatgaacatttgctatcactattaccattatagtagttttgagctttaattataaaccacctttttgtttgtattatcttaatcagaatcttgttagtgcaaagacagtggctatgaacatttgttttatgttgtgtc

SEQ ID NO: 13544 - DNA, 282 bp, Homo sapiens
ctatagggcgaattggagctccaccgcggtggcggccgaggtacgcgggctttttctgaataactcagggcttaaaattatatcccaaagtagggtatcacagggtttcctgatgaggataaatgggcctgaagtgcttatgggcacccactatgtatcatgggaaaacttgcacgtgtgtgtgtgtgtgagagagagagaaaaaaaaatagataaagttggtgagaaaaggggaggctgtttttgggccgagggttgtctggttggctttttcatttattt

SEQ ID NO: 13545 - DNA, 419 bp, Homo sapiens
ctatagggcgaattggagctccgccgcggtggcggccgaggtacacagtaagtgaagggccaagactgacggctgataggacaggggtgaccagtggtggggagggtagtgggagcagtccatcctggaatctggcattcaaggggcgcattgtctgtggaggatttaaaaataataaaaccaactaaaggcagtctgctttttatggtcaccaggcgccagcaattctaaatttcagtgataaaatattcctcctcactggacacgagaagctggcttctcctattccccagtacctgcccgggcgggcgctctagaactagtggatcccccgggctgcaggaattcgatattaagcttatcgataccgttaacctcgagggggggcccggtacccaacttttgttccctttagtgag

SEQ ID NO: 13546 - DNA, 438 bp, Homo sapiens
  misc_feature 403, 422, 426: n = A,T,C or G
ccggtggcggccgcccggttgtgacgcgggtgtttgcactgacgtagttagcggagcagaggaaacattcataaggaaatattcgagtagagctcaggagaaaagcaggactagaggcccaagaatcacaggccagaagaagaagctgtagcctcgggaatggaagagctctctgaaggggaaaggggagaacaggaatgtcccaggagccaaggctcatctataagggacttgcacatttaggatgtagaagaaggaagcagaagcaggggatgaccagaaatggccccagagatgagatgaaagttaggagagcggggagcaagcctttaggtttcacaagggaaggagggaaagtaggtgttaggtgctgccaagatcagggaaaataagcagaagtaanccaggccatttcaattgcngtgngccaagatcacg

SEQ ID NO: 13547 - DNA, 454 bp, Homo sapiens
tcactatagggcgaattggagctccaccgcggtggcggccgaggtaccacaatcaactcaatcacaacatattacaacaaaacccttcatctttttccttaacccactgtaacacaaagcagagaatacagattagcttttttatttgtctgtttgacttcatctcttacatacctctatttcagtatctatgatattttcctcttcttatctgttcaatgacagtcttcccttttaatattctaaacttgtcaagcacagcagttaaaaaattattctcatgtatatattttatctttagagcatcgcataaagcctgatacataggaagttttagatgcatatttacattgggtagatgaatccaggggaaaagatgaaaccaggtgatgtgttgtagcgaaggtaaaggtgtggcattgtgctctgggaagatatactaccctaaaaagag

SEQ ID NO: 13548 - DNA, 418 bp, Homo sapiens
  misc_feature 357: n = A,T,C or G
gactcactatagggcgaattggagctccaccgcggtggcggccgcccgggcaggtactgcccaagagagacgtctcttactgcctcattaagcatttggagctgttaaacacaaatcaaggcaaccagaaagggcatcttggcttcaggctgggcataaccatcccatttgccacataaaagtctagtggctactctgcaccctttctgggtagaagcagagttagtttggtcatgggggcccctgtgggacagtgttgcccagacaggtacctcggccgctctagaactagtggatcccccgggctgcaggaattcgatatcaagcttatcgataccgtcgacctcgagggggggncccggtacccagcttttgttccctttagtgagggttaattgcgcgcttggcgtaatcatgg

SEQ ID NO: 13549 - DNA, 398 bp, Homo sapiens
ttggagctccaccgcggtggcggccgcccttgcaggtactgtctgtctcaaattttaggatagctgtccctcatgtcacctagctgctgagagctttgtgatcctaacaggtgatgactcagaccgacactgcattggtaggaattccacaaataggtgcctcaatgtgcctagattgaaatatcagcctttcccagactgacctgatgggttgacttcaggtgtggtgtaaacacctacattttaatgtaaacatttcagtgtaatcaatgagaactatcattctgctttaatcaccatgagttctgaaataacaaaggatttgtctgacattcattctaagaaattcattcttacctgactaagaaactttttaacctggcacaataataagaaat

SEQ ID NO: 13550 - DNA, 460 bp, Homo sapiens
  misc_feature 347, 348, 349: n = A,T,C or G
tagggcgaattggagctccaccgcggtggcggccgcccgggcaggtaccaagtataccttttcatttaaatcattgaacagttcacaatggctgttgtaaagtttttgccttgttactgaaaccatcatctcttggtctatttctatggagttattttttcctagttattggcagtttgcttatcttttatgtgtctaataacttttaattgaatgtagaacattatggatcttatatttttgagaatctgaatgtttaaaattcctttgaagagtttgtgttttcttctggaggcagtttacttactggctgtgagctcagtcctgttgaggctgttttaacgacnnnctgtggctttgtcagggtgggtgtggatcagacatctggtcatcaaccctgcatattccagccttttttacaggctcactcgctgatttctgtttctcccacattaaggcc

SEQ ID NO: 13551 - DNA, 659 bp, Homo sapiens
  misc_feature 21, 23, 24, 37, 41, 43, 95, 98, 410: n = A,T,C or G
gtatctaataccacatttggngnnagttcgcggcggnaggncngggatagtcccccccagttccacaacccccttttaaaacaccggccaaaagnagncacagggcgccttttttttgcaagtgttttcggtttaatgcaaaccctaccttgagccgggggagggtataagatgatgggacccaccactaaatgacctaccacaactttcgctaaggtgcacataataacataagccattcagtacatcaggctgtgggagagctcaagatctaataaatccccagacacttttgtggagggcttgaggggggcgcaatatacaactttgacttaccagggaagttgggagattcaagccccggtaccaacaataagggaaaaacaacggcctttttcagaaggaaacanatccgccaaaattaaaaattacccaaggccaatgggtgggtggcaatgctccttgttaattccccagagcacccttgcagaagggcttgaggggcaccgaagaaatcaaccccctttaaacccaaggaaaggcaacagaggttgcccgtggaccccaattttacaatgtttaacttggaaagccaaacccttgggttgacaaaaaacgggggaacctttggtcttctcaaaaaagaaaacatatggcgc

SEQ ID NO: 13552 - DNA, 340 bp, Homo sapiens
ctactatagggcgaattggagctccaccgcggtggcggccgaggtactatctcttaggagaaggctgacttgaaggctgtgaaaaactaagaaaacaccaaccattcaacagtatactagaattcctttcaatgcataatagaaacaagaagggattagaaaagcatgtcataatttccagatagcataattatttacattaaagatccaagagactcagacctagtaaaagattttggccacattgtgacatttgagatcacattaaaaaaaaaaaggaaaaatcaagtgatactaacatcaccaattaacatcatcaattagaaaatttatccatcag

SEQ ID NO: 13553 - DNA, 651 bp, Homo sapiens
  misc_feature 54, 60, 160: n = A,T,C or G
cgacgagatgaacccatttgaaggtcgaaccggaaattcagcgcaaagccccgncgaggnacacccccattacacccaggtaacaaaccccccggtatagccccaggagaggccgcggaacaccgcgctggccaggaccgccccccctcaaatagaagcnaaggagaactgaccccaactcccgcccccccaaaggagccgggaaacacacggccgggagcacacccgagccacggccgcgactagaaacgaagaggactccccccgggactgccaggaaaaccgacaaacaagctgaaaacgcaaacacgaccacccaccaaaggcggggcgccccgcggaccccagcctgttggggccccctcaaaacgcaggcgcaaaaattgccgacgcaaaggccacaaatcaaagggcccaaaggcacgttcaccccggaggggaaaaaatgacaacacccgccgccaccaaaataccacaacaaaccataaccgaaacacgcggagccaaaaaaaggggggaaaaaagccccagggcgtgcccccaaaagaagtggaggcccaaccacaacaagtaaattggccggggggggccacaaaaggacccgactctccccagacccgggaaaaacccggcccggcccaaaaaacaaaa

SEQ ID NO: 13554 - DNA, 408 bp, Homo sapiens
actactatagggcgaattggagctccaccgcggtggcggccgaggtactatctcttaggagaaggctgacttgaaggctgtgaaaaactaagaaaacaccaaccattcaacagtatactagaattcctttcaatgcataatagaaacaagaagggattagaaaagcatgtcataatttccagatagcataattatttacattaaagatccaagagactcagacctagtaaaagattttggccacattgtgacatttgagatcacattaaaaaaaaaaaggaaaaatcaagtgatactaacatcaccaattaacatcatcaattagaaaatttatccatcagccgggtgtgggggctcatgcctgtaatgccagcatttcgggaggccgaggtgggtggatcatctgag

SEQ ID NO: 13555 - DNA, 361 bp, Homo sapiens
  misc_feature 340: n = A,T,C or G
gagctcatttttggtggcggccgggtcaattaacaatttttggtccaggatcagaatgggcctttgatagttctgtgtgtgcttaaacacatttttttgtggggtgctgtggatgtgtggatgtagccaaaaaaaaccctatgtgggtggtcctggggcagaaagtctggtgccagagagtggggttctgggggtctgtcttcatagtttggggtagcactaaaatcctgtgagcctttctgggccttggtaacctcccctgtaagttagctgttagataattcagctgggtagcattttatacctggatgatgttctaaagtccagccacacaaggccnaagtctggcagagtgagaatt

SEQ ID NO: 13556 - DNA, 223 bp, Homo sapiens
gcgaattggagctccaccgcggtggcggccgcccgggctggtaccctctgtcacggcttccctttgctggaaaagggaatttcccaaccccgggtgaggcaatgccccgccctgctccgtgggctgcacctgctgtctgtcaagccccaatgagatgaaccctgtacgcgggggcctgggatctcaaaatggcggccccgtgcggaaacagcgtttgggagca

SEQ ID NO: 13557 - DNA, 266 bp, Homo sapiens
agggcgaatttggagctacaccccggtggcggccgggcaggtactatctggaacatgtagcttcctttatcactgcagcatgggaagccagagttgatgattcatacaccagcatttacatttttcagcatgaaagtggtatgttcttcaactcacaacccattggccagaaccagtaacatgacttcacctaactgcaaactagctggagaattgtgggagagctcatggatattcagtgataaatgtctttgatataaaagggt

SEQ ID NO: 13558 - DNA, 485 bp, Homo sapiens
actactatagggcgaattggagctccaccgcggtggcggccgaggtaccatttagcacacaatttccatgtcccaaaagcaacccccataaacagtgactattttttatgctgtttttctttgccccaacacttttatcatttgatatgttatatcttgctttttttttttcttttttaatggagtctcactctgtcacccaggctgcagtgcagtggcgcgatcttggctcactgcaacctctgcctcctgggttcaagcaattctcctgggggtgggaggttgcagtgatccaagattgcggctcttcactccagactgggtgaaagaacgaaactccatctcaaaaaaaaaaaaaaaagaatgtacctgcccgggcggccgctctagaactagtggatcccccggactgcaggaattcgatatcaagcttatcgataccgtcgacctcgagggggggcccggaacccagcttttgtttcctt

SEQ ID NO: 13559 - DNA, 505 bp, Homo sapiens
tacgactcactatagggcgaattggagctccaccgcggtggcggccgcccgggcaggacgcgggatggtgtcaacttatgtcaggacccatgggccctccccatgcacacagcactcttggaatctcatccttttccatggctctggctcacacttccacagcatttactcctaaatatgccccctgggttcaagggtgattctcgtgcctcagcctctcaggtaactgggattacaggcatgcaccaccatgcctcgtattttttttgtgtgtgtgtttagtagagacgtgtttcactatgttgtccgggctgatctccaactcctgtagtcaagtgatctgcccgcctcagcctcccaaagtgctgggattatagacatgagccaccacacctgatgtctgatgcttatttattatgtgaccttagcgaagtgtggtagtcattagtgctggtctatctctataccttccccaggcaaggtaggattgcacttcccgctccac

SEQ ID NO: 13560 - DNA, 423 bp, Homo sapiens
gactcactatagggcgaattggagctccaccgcggtggcgaacgaccgcccgggcaggtactaagccaggacctcagttagcactaagcactcttactattgcccccacctggcacaaagcatactgagatcttagttgggcccatcatgtgtcatctgattgtcttagaagttctttttttctaagacagagttttgctcttttggctcaggctggagtccaatggcacaatctcggcttactgcaacctccgcctcccaggttcaaggcgatcctcccgcctcagcccttcgagtagccgggaccacaggcacccgccaccacgcccggataacctttttgtattcttagtagagacgggttgtggtggcacatgcctgtaatcccagctactcaagaggctgatgcaggagaatcgcttg

SEQ ID NO: 13561 - DNA, 482 bp, Homo sapiens
cactatagggcgaattggatctccaccgcggtggcggccgcccgggcaggtactctctatgactatcaagctcaggcctctccctttttttaaaccaaagtctggcaaccaagagcagcagctccatggcctccttgccccagatcagcctgggtcaggggacatagtgtcattgtttggaaactgcagaccacaaggtgcgggtctatcccacttcctagtgctccccacattccccatcagggcttcctcacgtggacaggtgtgctagtccaggcagttcacttgcagtttccttgtcctcatgcttcggggatgggagccacgcctgaactagagttcaggctggatacatgtgctcacctgctgctcttgtcttcctaagagacagagagtggggcagatggaggagaagaaagtgaggaatgagtagcatagcattctgccaaaagggccccagattcttaatttagcaaactaag

SEQ ID NO: 13562 - DNA, 496 bp, Homo sapiens
acgactcactatagggcgaattggagctccaccgcggtggcggccgcccgggcaggtacaaggactttgacagttcttcccaaacagatcctaattttaaacattaggtttgctttgattcttttccttggggctaagagctcacaaagacttaggttctggtcatggctccagaggccacacattccaggacaaagtctctctacagtcaacgccttagtcccacatctgtaaaatcggaataatcatccctgatccagctatcacattgcagtagagtgagactcaaatgagataatggaagacagtgggaatgatcatttccaacttggcctggctgacccattccttgttctaaagtcagctcaggtttcacctcttccaggaagttgacctggcacttcttttaggatggctactgctcctctgggtgccccggggctcagtgtctccccatcaccgcccatggcacactggagtgactggtcctttactt

SEQ ID NO: 13563 - DNA, 463 bp, Homo sapiens
tggagctccaccgcggtggcggccgttcgggcaggtacttggccccaaagattaggaattccttgtagaggagcttgtagatgctttccctccagcggagaagcaggccagagaaacctccgaagcgggcctccgccactttgagagtgtatgaaaccgtcatggtgctgggagcctggggcaggaggtcacaagagttgcccccagggctgtcgtttagttctccagacaacctcccttccactctggtctcacacaccccagccttcaccctgcgtcagtggacaagggggtaggagcctgcagagcagaaaagtacctcggccgctctagaactagtggatcccccgggctgcaggaattcgatatcaagcttatcgataccgtcgacctcgagggggggcccggtacccagcttttgttccctttagtgagggttaattgcgcgcttggcgtaatcatg

SEQ ID NO: 13564 - DNA, 490 bp, Homo sapiens
ctatagttcgaattggagctccaccgcggtggcggccgatgtacgcgggatagtagaacttcacttgtttgaagttggctgattaaatatactaagtattactgaatcactgccctgccttttctgctttctttacagacctgtttagtatacactgtatgtattttttttttttttttgagactccgtctcaaaaaagagaaaattatgggccgggcacagtggttcatgcctgtaattccagcattttgggaggccgaggcaggtggatcacctgaggttgggagttcgagactagcttggccaacatgacgaaaccctgtctgtacctgcccgggcggccgctctagaactagtggatcccccgggctgcaggaattcgatatcaagcttatcgataccgtcgacctcgagggggggcccggtacccagcttttgttccctttagtgagggttaattgcgcgcttggcgtaatcatggtcatagctg

SEQ ID NO: 13565 - DNA, 452 bp, Homo sapiens
ctactatagggcgaattggagctccaccgcggtggcggccgaggtacgagacttgtcaccatgtgacatggcagcttcagaaacttagccactgccaaaaaaagagcaggcagggataatgttgtcccattgtccagtcagagagacctgttgagtctctagtttgccagtccccaagagacctttggagttttgctggagccagacatcctgcttagagatgaggaagatcctgctgttccgtggggagctcttgagacacccgtgccaccacccaccttctcctgattgccacttgctgcccttttcccattaccctctcctgactccataaacatctttagtcttcccttctccacccccaaaatgccacctggaaggggtgatgggaggttctctggatgaaaggtgtggcagcaatggacattttaatgagaatgcccgtgtgcctt

SEQ ID NO: 13566 - DNA, 285 bp, Homo sapiens
tacgactcactatggggcgaattggagctccaccgcggtggcggccgctctagaactagtggatcccccgggctgcaggaattcgatatcaagcttatcgataccgtcgacctcgagggggggcccggtacccagcttttgttccctttagtgagggttaattgcgcgcttggcgtaatcatggtcatagctgtttcctgtgtgaaattgttatccgctcacaattccacacaacatacgagccgggagcataaagtgtaaagcctgcggtgcctaatgagtgag

SEQ ID NO: 13567 - DNA, 342 bp, Homo sapiens
acgactcactatagggcgaattggagctccaccgcggtggcggccgcccgggcaggtacgcggggatgtcttctgagagagtcagggcagctgaagactgggtgagggtgagggaagccgctggtgtcctcctcagtcacccgtgagaggactcctctgtggagctaatcaactgcaaggaagattgttcccagtgtccagacctgaaggagtctggacccatagtgcagtgagatttggggaaggaaggattccggataggggtgagctttctgatgataagcaaatgtgaacacgtgagcagcatcctactttaaagcccctccacatgctctgaaatac

SEQ ID NO: 13568 - DNA, 344 bp, Homo sapiens
gactcactatagggcgaattggagctccaccgcggtggcggccgcccgggcaggtacgcgggggtgtttatgggaagccagtaacactgtggcctactatctcttccgtggtgccatctacatttttgggactcgggaattatgaggtagaggtggaggcggagccggatgtcagaggtcctgaaatagtcaccatgggggaaaatgatccgcctgctgttgaagcccccttctcattccgatcgctttttggccttgatgatttgaaaataagttctgttgcaccagatgcagatgctgttgctgcacacatcctgtcactgttgccattgaagttttttcca

SEQ ID NO: 13569 - DNA, 461 bp, Homo sapiens
tatagggcgatttggagcatccaccgcggtggcggccgcccgttcaggtaccagatcttagcagggaatttggacaacaaaagctctaaatcctcttgcatcgacacgttcaatttgcactgaccaatctgttggcacagtaactgtttataagctaaatttctacattttggctacaagtatcccaaatccaccttttaaaaaatcctaggtagatgccatctggtgttaatgatttgcacaccccttaaattgaaaatattttaaataaatctcacggttttatatagtatcattaatgtgtctattttaaaaagacaatctgagaataacacttcccctaattgttgtcttaataatgaccaagagctgaggaaaaatgattcacactgttagttgttttgttgttttgctcacgggggaagggggtgaagtaactggctgtgcctgggttttgaagc

SEQ ID NO: 13570 - DNA, 504 bp, Homo sapiens
cactactatagggcgaattggagctccaccgcggtggcggccgcccgggcaggtacatcaccctgctgagggacatccaggacaaggtcaccacactctacaaaggcagtcaactacatgacacattccgcttctgcctggtcaccaacttgacgatggactccgtgtcggtcactgtcaaggcattgttctcctccaatttggaccccagcctggtggagcaagtctttctagataagaccctgaatgcctcattccattggctgggctccacctaccagttggtggacatccatgtggcagaaatggagtcatcagtttatcaaccaacaagcagctccagcacccagcacttctacctgaatttcaccatcaccaacctaccatattcccaggacaaagcccagccaggcaccaccaattaccagaggaacaaaaggaatattgaggatgcgctcaaccaactcttccgaaacagcagcatcaagagttatttttctgact

SEQ ID NO: 13571 - DNA, 479 bp, Homo sapiens
agggcgaattggagctccaccgcggtggcggccgaggtacattattcatatccagcactccctgcggctgctgctggaggagcagttatccaacaaggactgtttcaacctcatcgcgtttggaagcacaattgaaagctggaggcctgagatggttcccgtgagtcacaacaatttacaaagtgcctggcggtaggttatgggcagagacttcgtggggctgtgtctgagggaaggtttgcaggcattgttttctctgtccccctctccaccaagaagtagctctctagagtccctgaccccaaacagccatgggcagaaatcagaaaacagcttccttctgtctgctgctctccccacctggccatcttcactttatgagagtaatgacatcgactccatcacgtttgagatggaaaagggctttagctacttccaaaaggtatgccctgggcatgggccaatgaccctcagcatgg

SEQ ID NO: 13572 - DNA, 482 bp, Homo sapiens
actactatagggcgaattggagctccaccgcggtggcggccgaggtactcttttttttttttttttttttgagacagggtttctgttgcccaggctggagtgcagtggcacaatctcagcccactgcagcctccgcctccccagttccaataattctcatgcctcagcctcccaaagtggtgggattacaggcgtgagccactgcgcccggccacctttctatttttctggttaactttctaaatgtttgaaatggcttccagtgaatttcattttattattgggggaaacttccatacttattttctttcttcccaaatctccacaagtatactctcctcccaaaatttagatagttgtatttttctgattattccaaataagagtgctgagaggctaatcacaaagagcaacagccagagattacaaagtgttctcttactattgaacattttcacttattctttttgataggacacaca

SEQ ID NO: 13573 - DNA, 340 bp, Homo sapiens
agggcgaattggagctccaccgcggtggcggccgaggtaccctgcccaggtaagatcactcgtgggtaagaacatgaggttctcacccgtaaggcaggatttttatagaaggaaggtaggtctttcaacctatgtcctccttctgttccacaaagtggaaagccacaagccctacaaaagccttgcaagtcccagaggctgcagccgtatttattcttcaggccaagactctcaggacagagagcacccatgcaccccgcaggctgcaggccatctccctgcatttgggactgtcctgaggatggcggcttcatttttgtccctcctacctctgagtact

SEQ ID NO: 13574 - DNA, 468 bp, Homo sapiens
agggcgaatttgagctacaccccggtggcggccgaggtacttttggcaaaccgtgaaggctttcattagcaggttggacttcccccccctagttggcaggattttttttaggggaccacctgagaaaggtctgttacgtgcataaacctcctttaacaccttttaaaaactcttctgggggccggactcagtggctcatgcctgtaatcccaccactttgggaggctgaggcagatggatcacctgaagtcaggagttcaagaccagcctggccaacatggtgaaaccccgtctctactaaaaatagaaaaattagccaggagtggtggcaggtccctgtaatcccaactacttgggaggctgaggcaggagaattgcttgaacccaggaggcagaggttgccgtcagccgagattgccccactgcactccaggctgggcaacaagagcaaaaaccttgtctaaaaaa

SEQ ID NO: 13575 - DNA, 501 bp, Homo sapiens
ctatagggcgaattggagctccaccgcggtggctgcccgctttccagtcgggaaacctgtcgtgccagctgcattaatgaatcggccaacgcgcggggagaggcggtttgcgtattgggcgctcttccgcttcctcgctcactgactcgctgcgctcggccgttcggctgcggcgagcggtatcagctcactcaaaggcggtaatacggttatccacagaatcaggggataacgcaggaaagaacatgtgagcaaaaggccagcaaaaggccaggaaccgtaaaaaggccccgttgctggcgttttttcaataggctccgcccccttgacgaggcattcaccaaaaattcgacgcctcaagtcagaggtggcgaaacccgacaggactataaagataccaggcgtttccccctggaagctccctcgtgcgctctcctgttccgaccctgccgcttaccggatacctgcccgcctttcttcctttgggaagcgtggcgcttt

SEQ ID NO: 13576 - DNA, 278 bp, Homo sapiens
gggcgaattgtagctccaccgcggtggcggccgcccgggctggtactgggaaatgaggcaaaagtttttctcttcactgctagctccttggggaccagcaagcggctctcaagttgcgtggtggcccaactggaaaaaaggcagttcggtgcatcctgggaatatccaggtgaaagtgtgagatttacctagaatagcttctgggcctctggggttttcacgctgtctctggtgaaggtgtccattttagaactgaagcaaaaaggtttcaatccgtt

SEQ ID NO: 13577 - DNA, 366 bp, Homo sapiens
actactatagggcgttttggagctccaccgcggtggcggccgaggtacatcaccctgctgagggacatccagtttcatggtcaccacactctacaaaggcagtcaactacatgacgcattccgcttctgtctggtcaccaacttgacgatggactccgtgttggtcactgtcaaggcattgttctcctccaatttggaccccagcctggtggagcaagtctttctagataagaccctgaatgcctcattccattggctgggctccacctaccagttggtggacatccatgtgacagaaatggagtcatcagtttatcaaccaacaagcagttccagcacccagcacttttacctgaattttaccat

SEQ ID NO: 13578 - DNA, 225 bp, Homo sapiens
ctactatagggcgaattggagctccaccgcggtggcggccgcccgggcaggtacgcgggcatgcaaaactccagattcctatcttctttgggggaaaagcaaattggaagctctgacaatgctgggctttactttcccacatagcaaccatcagttggagctgagacacctctgctctctttagaaagaattattaatgcttcagtctccattattgcttcccta

SEQ ID NO: 13579 - DNA, 488 bp, Homo sapiens
cactactatagggcgaattggagctccaccgcggtggcggccgcccggcaggtacgcggggaggtcatgcccgtgtgagccaggaaagggctgtgtttatgggaagccagtaacactgtggcctactatctcttccgtggtgccatctacatttttgggactcgggaattatgaggtagaggtggaggcggagccggatgtcagaggtcctgaaatagtcaccatgggggaaaatgatccgcctgctgttgaagcccccttctcattccgatcgctttttggccttgatgatttgaaaataagtcctgttgcaccagatgcagatgctgttgctgcacagatcctgtcactgctgccattgaagttttttccaatcatcgtcattgggatcattgcattgatattagcactggccattggtctgggcatccacttcgactgctcagggaagtacctcggccgttctagaactagtggatcccccgggc

SEQ ID NO: 13580 - DNA, 504 bp, Homo sapiens
tacgactcactatagggcgaattggagctccaccgcggtggcggccgcccgggcaggtacgtgttagctattatcatcaccctccttgctaggcagagcaggacagtggggaattgatgtttcctcccctccatctcacaggtggggcaggggtgtgctgagaagagaacttgggactcttggcccctgttcaattctctgcttaacctgctaggcaatttgggcctctgaaaattcagtaatcctcatagcaacttagacgtcacctgggcctgtggtccccttcctagcctaggagtcagagcatgaagctccatctgtcacattggtttgttcagagaactacacatgcgttttattttagcagcatacaggttcccacttaggcattgagaggacataggaagctgtttaacttcctagtctttaaggtgtggacgctgaagagcttagctagtaatgacagtatcctgtagcaaaagctatggcatcacatactgattt

SEQ ID NO: 13581 - DNA, 532 bp, Homo sapiens
tacgactcactatagggcgaattggagctccaccgcggtggcggccgaggtactagttattttaaattccactcataacttatcggccaaaagtagtcacatggctccacctaatcacaagtggagcgggaagtgcaatcctaccttgcctggggaaggtatagagatagaccagcactaatgactaccacacttcgctaaggtcacataataaataagcatcagacatcaggtgtggtggctcatgtctataatcccagcactttgggaggctgaggcgggcagatcacttgactacaggagttggagatcagcccggacaacatagtgaaacacgtctctactaaaaacacacgcaaaaaaatacgaggcatggtggtgcatgcctgtaatcccagttacctgagaggctgaggcacgagaatcacccttgaacccaggaggcagaggttgcagtgaccgatatcatgtcactgcagtccagcctgggtgacagagcgagaccttgtctcaaaaaaaaaaaaaagaaaag

SEQ ID NO: 13582 - DNA, 351 bp, Homo sapiens
tatagggcgaattggagctccaccgcggtggcggccgaggtacagatgtaggatctcatagcattgaggggtctttcagattatgttttcaaacccctcactttctcttttcagataagaccacagcgacctgggaaagtgcaacgtcttagccaaagacacagaactatttagcgacactgtctagactctagtttccatgtctcctgacttcagtctagtgttccacccctgccgcccacccctgccccatcctcattcctcctgtaggagaggccagacctttgcctgctgcagcttgtggctcttctcctgccttcagttcttccattgcctgcagcatttgaaaga

SEQ ID NO: 13583 - DNA, 368 bp, Homo sapiens
attggagctccaccgcggtggcggccgcccggcaggtacctgtctgggcaacactgttccgttggggcccccatgaccaaactaactctgcttctacccagaaagggtgcagagtggccactagacttttatgtggcaaatgggatggttatgcccagcctgaagccaagatgccctttctggttgccttgatttgtgtttaacagctccaaatgcttaatgaggcagtaagagacgtctctcttgggcagtacctcggccgctctagaactagtggatcccccgggctgcaggaattcgatatcaagcttatcgataccgtcgacctcgagggggggcccggtacccagcttttgttccctttagtg

SEQ ID NO: 13584 - DNA, 464 bp, Homo sapiens
attggagctccaccgcggtggcggccgaggtactggtggtgtggctactaccgttacaactgcctgtgcttggacatggaccctctgcaatatgcggcagtttcattcattgccccctacattctacaccaagtagaaatggaaggcaattggatacttcacagacaagatctaagtggagaaggaatgcgtcctgtggctgcagagatccttggagcttggaggggagagcttgagccccactgatgatgacctcccacagctcgccaactcagccctccctaagtccccatcgggggccaattctcactctggggttggggggactccaccatagctcatccatcatagggatgttggtatctactgtgggttgggtagggccgatgtgctgaggatggctcccccacaagcaagagatgtggatttggggagcttcccattttgtgttgaaggaacataac

SEQ ID NO: 13585 - DNA, 368 bp, Homo sapiens
tcactatagggcgaattggagctccaccgcggtggcggccgaggtacatcaccctgctgagggacatccaggacaaggtcaccacactctacaaaggcagtcaactacatgacacattccgcttctgcctggtcaccaacttgacgatggactccgtgttggtcactgtcaaggcattgttctcctccaatttggaccccagcctggtggagcaagtctttctagataagaccctgaatgcctcattccattggctgggctccacctaccagttggtggacatccatgtgacagaaatggagtcatcagtttatcaaccaacaagcagctccagcacccagcacttctacctgaattttaccatcacc

SEQ ID NO: 13586 - DNA, 407 bp, Homo sapiens
gaattggagctccaccgcggtggcggccgaggtacctcatctactcctctctacaacaaccttgtgggtgacgttattatctccatttcacaaatgaggccacagaggttctaaagggtaaatgacgatgatgatgagaggtaagtgataaaacaatgtctcctgaccacaaatcctggaatttaaacataagtgtagtaaacatgaactctaggaagcctcctggggcttctccctgtgtctggagcccctgcacatgcccaatggaagtccttttggttctccgctcagtagagaaagggagcatttcactaaaagggaggtggggaaacaagactggtggtaggggaggccgggctcagtggctcacgcctgttatcccagcactttgggaggctgaggcaggc

SEQ ID NO: 13587 - DNA, 477 bp, Homo sapiens
ctactatagggcgaattggagctccaccgcggtggcggccgaggtacattattcatatccagcactccctgcggctgctgctggaggagcagttatccaacaaggactgtttcaacctcatcgcgtttggaagcacaattgaaagctggaggcctgagatggttcccgtgagtcacaacaatttacaaagtgcctggcggtaggttatgggcagagacttcgtggggctgtgtctgagggaaggtttgcaggcattgttttctctgtccccctctccaccaagaagtagctctctagagtccctgaccccaaacagccatgggcagaaatcagaaaacagcttccttctgtctgctgctctccccacctggccatcttcactttatgagagtaatgacatcgactccatcacgtctgagatggaaaaggctctcagctactcccaaaaggtatgccctgggcatgggccaatgaccc

SEQ ID NO: 13588 - DNA, 480 bp, Homo sapiens
acgactcactatagggcgaattggagctccaccgcggtggcggccgaggtacgcgggtaacaggagtctttgctgagtgatcatctgtttattcttttactccacaaatatcgaatgtttacagcgtgcctggcactgagcagggctggggtttcctgaccatatggaccttcctgggtatatctgtggggcttgaatggtgtgtgaccttgtgtcctgcccgggcggccgctctagaactagtggatcccccgggctgcaggaattcgatatcaagcttatcgataccgtcgacctcgagggggggcccggtacccagcttttgttccctttagtgagggttaattgcgcgcttggcgtaatcatggtcatagctgtttcctgtgtgaaattgttatccgctcacaattccacacaacatacgagccgggagcattaaagtgtaaagcctggggtgcctaatgagtgagctaacttaca

SEQ ID NO: 13589 - DNA, 325 bp, Homo sapiens
tacactactatagggcgaatagtatctccaacgcggaggtggacgcccgggcaggtacgcgggggtgtttatgggaagccagtaacactgtggcctactatctcttccgtggtgccatctacatttttgggactcgggaattatgaggtagaggtggaggcggagccggatgtcagaggtcctgaaatagtcaccatgggggaaaatgatccgcctgctgttgaagcccccttctcattccgatcgctttttggccttgatgatttgaaaataagtcctgttgcaccagatgcagatgctgttgctgcacagatcctgtcactgc

SEQ ID NO: 13590 - DNA, 313 bp, Homo sapiens
ctccaccgccgtggcggccgcccgggcaggtacatcaccctgctgagggactttctggacaaggtcaccacactctacaaaggcagtcaactacatgacacattccgcttctgcctggtcaccaacttgacgatggactccgtgttggtcactgtcaaggcattgttctcctccaatctgaaccccagcctggtggagcaagtctttctagataagaccctgaatgcctcattccattggctgggctccacctaccagttggtggacatccatgtgacagaaatggagtcatcagtttatcaaccaacaagca

SEQ ID NO: 13591 - DNA, 364 bp, Homo sapiens
actcactatagggcgaattggagctccaccgcggtggcggccgcgcgggcaggtaccttaccaccccatccccagagcattgcatggggtgtttggcacacagtaggtgctcaatgtaaacgtgtgcactgtggcatgttagagccagacaggatctcatccagcccgttctctgcacccctccctcccctctccaagtagccctgctgtgggttcaagtaaagaggggctggggcgctggtctgattgtgtgggtgatttggggagatctcttcctcttccggaaccccaaaaggttgggacaaacacagcaacaagcccagctccctgaattttagtgattcatttgtgggataaaggagtg

SEQ ID NO: 13592 - DNA, 536 bp, Homo sapiens
ctcactatagggcgaattggagctccaccgcggtggcggccgcccgggcaggtactagttattttaaattccactcataacttatcggccaaaagtagtcacatggctccacctaatcacaagtggagcgggaagtgcaatcctaccttgcctggggaaggtatagagatagaccagcactaatgactaccacacttcgctaaggtcacataataaataagcatcagacatcaggtgtggtggctcatgtctataatcccagcactttgggaggctgaggcgggcagatcacttgactacaggagttggagatcagcccggacaacatagtgaaacacgtctctactaaaaacacacgcaaaaaaatacgaggcatggtggtgcatgcctgtaatcccagttacctgagaggctgaggcacgagaatcacccttgaacccaggaggcagaggttgcagtgaccgatatcatgtcactgcagtccagcctgggtgacagagcgagaccttgtctcataaaaaaaaagaagaaaagaa

SEQ ID NO: 13593 - DNA, 482 bp, Homo sapiens
ccaccgcggtggcggccgaggtactttaacagccatactccagtcccaacaatgttaaatgccaaagcagtgttggtaaaagcctcaaatggtgaaaaggacagaaactcaaacccgcccttgtgccagtaagtaactgttacttatctcacaaagcgcttggctctggaaacaatctaactctgagctgcacgtggagtctacatgggaatgtgcaaagcatgtatttccttttaggtgcagcagaggtaacgaaattcagataagagaaaaaaaatccagatttcaatgcaagaggtggaagatccacgaagatactcgttactatttggtttctaggagcaggattgccactagatatgatggagaacaaaaatgaagaggtgttgtgtaacaaaacaaaacaaaacaaaacaaaaaagtagaaagaagagcaacaggccgggcgcagtagctcatgcctgtaatcccagcactttggg

SEQ ID NO: 13594 - DNA, 422 bp, Homo sapiens
accgcggtggcggccgctctagaactagtggatcctccgggctgcaggaattcgatatcaagcttatcgataccgtcgacctcgagggggggcccggtacccagcttttgttccctttagtgagggttaattgcgcgcttggcgtaatcatggtcatagctgtttcctgtgtgaaattgttatccgctcacaattccacacaacatacgagccgggagcataaagtgtaaagcctggggtgcctaatgagtgagctaactcacattaattgcgttgcgctcactgcccgctttccagtcgggaaacctgtcgtgccagctgcattaatgaatcggccaacgcgcggggagaggcggtttgcgtattgggcgctctttcgctttctcgctcactgactcgctgcgctcggtcgttcggctgcg

SEQ ID NO: 13595 - DNA, 215 bp, Homo sapiens
ccaccgcggtggcggccgaggtactaggcactgaagatacaataagcaatccagtaattcctctttgaagaatttattctgatgaaatagagacaagcctattaaagtattcaaggcaacattacttaaatattttattttattttatttatttttagatggagtctcgctgttgttgaccaggctgaagtgcagtggcacaatcacggctcact

SEQ ID NO: 13596 - DNA, 683 bp, Homo sapiens
acgactcactatagggtgaattggagctccaccgcggtggcggccgaggtacctgtagtcccatttactttggaggctaaggtgggaggatggcttgtgcccaggaggcggaggtcacagtgagccgagatcacaccactgcactccagcctgggcaatagagccaggccttgtctcataaatgaaatataaaatataaaataaaataaaataaaacgttgttggcaaagatgtattcaaaatagtatgtagaacttacctggaaggtaattttgcaatatttaccaaaatatactttttcatctagtaaggtctccttctcagaatcagtcttaaagccattcaaatacagatttatgattaaagatttaagtccaaaaatgctcattatagcaatatttataataggaaaaattggggaaaaacaattatacatccaacagtagtaagagtgtgactacattatagtattagtatgtaatggattgtcacagagcaacacacatgtttttgaagaatatttaaggcgtgataaatattaaatgtaaatgtaaattgaaaaaatgatatctgtagattttcattatgcatttctttatgaaatttttgtatatacacaaaagaaaatagtcatgcattgcttcatgacggggacatattctgagaaatgtgctgttagtcgg

SEQ ID NO: 13597 - DNA, 821 bp, Homo sapiens
  misc_feature 13, 14, 19, 23, 25, 26, 33, 35, 37, 51, 69, 73, 75, 83, 86,88, 96, 97, 102, 107, 113, 118, 130, 164, 167, 174, 175,185, 188, 189, 190, 194, 196, 199, 200, 201, 203, 215, 218,219, 229, 241, 253, 270, 301, 319, 320, 321, 325, 340: n = A,T,C or G
  misc_feature 353, 356, 360, 368, 373, 390, 391, 405, 406, 548, 561: n = A,T,C or G
gagcgtgcgagannacacncacnannaggttanangnttcatcaccgcgcnggcggccgccgggcaggnacancngctgagcngcngntttaggcnnccacncccancaaaanagcancaaaggaagaangtcgaagggcaggggggggaagcccccaacaccnganggcaaannccagagcggnggnnnagcncnagnnncngggaagagcaancannaccctttttngattttttttgngcaggagggagnaacccaccgacaaaaancccagaagccccccaccaaacagggaagaanaagaggaagggaaaggannnaacnaagagccacagcccnggaaacaggaaancangagngcagacanccccncgaaaagggcgccaacnnaaaaaagagggagnngggcgccagccgggagaaagcgggaagaggaaaaaaaaaagggaaaagggaagaaggaggacaaaaagggggggaggcaaagggccggggcacaagccaaaaaacccaagaacaggggggaggccgaggaaggaagaacacnagagggcagggangggggaacaggccggcgcaaagggggaaaccccaacgggaacagaaaaaacaagaagaagcgggggggggggggagcaagagccaaggaaggccaggaccgcgagagggggagcgaggagaagggggcaacccccgaaggggagggagaagggaaccgaaacgggcgacgggagcggaggcgggggaagggggagaagaggggaaaaaaaagaaccggggagcggaagagaaaggggggccgggggggggagagggggaa

SEQ ID NO: 13598 - DNA, 391 bp, Homo sapiens
gtaatacgactactatagggcgaattggagctccaccgcggtggcggccgaggtaccttaccaccccatccccagagcattgcatggggtgtttggcacacagtaggtgctcaatgtaaacgtgtgcactgtggcatgttagagccagacaggatctcatccagcccgttctctgcacccctccctcccctctccaagtagccctgctgtgggttcaagtaaagaggggctggggcgctggtctgattgtgtgggtgatttggggagatctcttcctcttccggaaccccaaaaggttgggacaaacacagcaacaagcccagctccctgaatttcagtgattcatttgtgggataaaggagtgaatgataaagtgaaggacgactgtccc

SEQ ID NO: 13599 - DNA, 522 bp, Homo sapiens
tacactactatagggcgaattggatctccaccgcggtggcggccgaggtactcccaaaaggctatgaaattggggaaaaccccaggtgattcatgcctgcttagctgcagtatgtcagtcgcagtaggtggaaccccaaacccagtgcatagggccagtgtctgctttggtgagatatgagtgtcagagtctcgaaccaagcaacctatcgaaagcctgtgacactcctggccacaggcggttggtagaggcatagtagactattgcccaggtgacgtgacttcacagatgctgggaagcctgctgccccatccaatacaatactgcccactgtgcatagaaaccagattccaaagttagagcttcgttttggccatgagtgcaatttcactgcaatgttttatcttactcaactgccagggtcaatttaggtggtagggctaaatctccttctttatattgttccaaatgatttttcctgatgctgcattcccggaaggagggaagatgagagtagacagc

SEQ ID NO: 13600 - DNA, 511 bp, Homo sapiens
gtaatacgactcactatagggcgaattggagctccaccgcggtggcggccgcccgggcaggtactgtgcttagaccaggaacacagggaggtagagggcagcagagcagggactggcttcagagccagacaggtggctatgtgacttaatgtgtctgaaccctggtatcctagtctattaaatggtataacagcagcttctagtatgtaagttccttgtcgggagaaaaactgttttgctcatggctggagccttagcatgttgcatcatattgaacatgtaatagatgctcaataaatatatttttaagaataaataaatgtaaatgaaaattacttcacagtgtttctgtagagattttataagatatggtatacacaatgcataacatagaactgacgctcaaaaatgccagttacttccatcattgtgtcataggcttttatgttcattatcctgctgcatcatcccaagaattccatgaaatacgtattgctttgctcatttttct

SEQ ID NO: 13601 - DNA, 458 bp, Homo sapiens
ctactatagggcgaattggagctccaccgcggtggcggccgaggtacgcggggaggtcatgcccgtgtgagccaggaaagggctgtgtttatgggaagccagtaacactgtggcctactatctcttccgtggtgccatctacatttttgggactcgggaattatgaggtagaggtggaggcggagccggatgtcagaggtcctgaaatagtcaccatgggggaaaatgatccgcctgctgttgaagcccccttctcattccgatcgctttttggccttgatgatttgaaaataagtcctgttgcaccagatgcagatgctgttgctgcacagatcctgtcactgctgccattgaagttttttccaatcatcgtcattgggatcattgcattgatattagcactggccattggtctgggcatccacttcgactgctcaaggaagtacccgcccgggcgg

SEQ ID NO: 13602 - DNA, 403 bp, Homo sapiens
tacgactcactatagggcgaattggagctccaccgcggtggcggccgcccgggcaggtacttctaaccctaagggattcctacagcttttctgcatgttaaatagtctgttttagcttattctcttattacttgtcttggtttttactttgaaagtttgcttaataatcatgggaatattttagattttaaaatacaaaatatacaagctaaacttgagagcagtttttagttgtagaaactgtttcttgaagtaattgacttagcgtttgctctgcctctttcttttcttacctaggtaggtagtggggactccttcaattatctgagcaattcaaatctcagaatgtagtgttgggtaaattgagggttctaaaagaatgccagatggtttgaaaggaact

SEQ ID NO: 13603 - DNA, 405 bp, Homo sapiens
tacgactcactatagggcgaattggagctccaccgcggtggcggccgaggtacatcaccctgctgagggacatccaggacaaggtcaccacactctacaaaggcagtcaactacatgacacattccgcttctgcctggtcaccaacttgacgatggactccgtgttggtcactgtcaaggcattgttctcctccaatttggaccccagcctggtggagcaagtctttctagataagaccctgaatgcctcattccattggctgggctccacctaccagttggtggacatccatgtgacagaaatggagtcatcagtttatcaaccaacaagcagctccagcacccagcacttctacctgaatttcaccatcaccaacctaccatattcccaggacaaagcccagc

SEQ ID NO: 13604 - DNA, 397 bp, Homo sapiens
tacactactatagggtgaattggagctccaccgcggtggcggccgaggtactccaagcagtcccaaagtgggagtccttaaaacaccatgggcaggtgaatggctgaccaggtggaggtgcacagtgcaccatgacagagcagtggaaatgggtgaatctgagatgcctggaggcgagggggaaagagcacatcacagaggacaacgtccagtgggacacccttttataaaactcacactgctccttctgacacccagtcgcagttgtgggtggccctctgggaccttagtgcctggggaagtggtcatatgctgggccagggctgttgagggtgctcaccggtgaatgagacatcgttcagtctctcaaggggctcacggcctgctggggacactg

SEQ ID NO: 13605 - DNA, 315 bp, Homo sapiens
agggcgaattggagctccaccgcggtggcggctgtggactgaagggtgactggttccactgtggtctccatgggaacagttgtttctggagtcttccaaggagaatttctcacagtggacctgatctctgggctgatgctgggttccttggagctcatgattttgagagtggtagacatttctgggcttcctggggatgtgcctgctggactgctccccgtctcctctgctggggcaggccacgtggaatttccttgtgctgcctggcttgacatctttatggtggtcactagcgttccatcagttgtttcaacc

SEQ ID NO: 13606 - DNA, 478 bp, Homo sapiens
ctcactatagggcgaattggagctccaccgcggtggcggccgaggtacctgaagaatctctcttcagctctcttctcctggaaacttgagtggggcaggaggaaaagcggagctaggtgtcattttaatgaggaacatacttgtctcctccatttatctggccctccctgatggcactccagaattccaatcccacacgattaacaacatagtttcccttttctgcttgaaggtccattctcctctcaatttcaaatcacctgagatacaaagctgcatttccccacaagaaccagttccctctcctttccttcagtgctactgtccttctctcagaccaccaagcttaaaaactccagaggctcaaacagcaaagatggcagcccgctcctccctctgggagttctggcccagggagttttcaaatttctgtaggcggaagaatactagcgggagtggctggagaccccagttggta

SEQ ID NO: 13607 - DNA, 411 bp, Homo sapiens
tacgactcactatagggcgaattggagctccaccgcggtggcggccgcccgggcaggtacatgaaagtaagatcacaaccacaggaaccacacaaaattcaaggcaccagaggagcccagacttggctggcaatgcctgttttggagctattccacatttctggaagtcaatgggaatacggaatatgaaaacactatgaggccgggcacagtggctcacgcctgtaatcccagcactttgggaggccgaggcgggcggatcatgaggtcaggagttcgagactagcctggccaacatagtgaaaccccatctttaataaaaatacaaaaaattagccgggcgtggtggggggtgcctgtaatcccagctactccggcggctgaggcaggagaattgcttgtacctcggcc

SEQ ID NO: 13608 - DNA, 415 bp, Homo sapiens
cgtatacgactcactatagggcgaattggagctccaccgcggtggcggccgcccgggcaggtacttttttcttttttcttttttttttttgagtgggggcggggtttcgccatgttggccaggctggtcttgaatctcgggtgatctgcccgcctcggcctcccagggtgctgggattgcaggcgtgagccaccacgcccggcctcgatatattcttacagtggaatactgctcagaaatactgatgaatcttaaaaaacatgatgtttagcaaaagaaccttggtataaggttcttggtataagggatacatactctatgattccattatatgaaattctagaacaggaaaaactatagtgaaaaacaatcagattagtggtatctggggtagaaagtaggaggagattgattg

SEQ ID NO: 13609 - DNA, 183 bp, Homo sapiens
  misc_feature 57, 97, 104: n = A,T,C or G
ttttttttttttttttgccgggagcataaagcctaaagaatattttttcttatgagngagctaactcacattaattgttttgcgctcactgcccgcnttccagncgggaaacctgtcgtgccagctgcattaatgaatcggccaacgcgcggggagaggcggtttgcgtattgggcgctcttc

SEQ ID NO: 13610 - DNA, 402 bp, Homo sapiens
  misc_feature 70: n = A,T,C or G
taataccactcactatagggcgtattggagctccaccgcggtggcggccgaggtacccacagccctttcngttggaattccctagaaggggtctgtgccacatacaggaagtagggagggtgtctttgcagcatatttcttctcttggagttaactgcgaacgttgcacggcgacctcttgatccattctgtgaaagccccaagcctgtcatgcaataaagacgtccagtttcaccgcagcagggaggccgcatgaaatattccacttgaacaaaaccacttagcagtttacatcaatgcttaccctgtcgcattgaaagtgatgtgaacccacacccaagagcccccaaaccagcacgttgataccaagtttccccagctgcatccaaatcaattccttct

SEQ ID NO: 13611 - DNA, 198 bp, Homo sapiens
  misc_feature 26, 46, 49, 91: n = A,T,C or G
ccggcgaccccgagggggggcccggnactttttttttttttttttnagngaggggtaactgcccgcaaaaattttttttggccatagcggntgcctgtgtgaaattgttatccgcgcacaactccacacaacatacgagccgggagcataaaagagaaagcctggggggcctaatgagggagctaactcacattaatt

SEQ ID NO: 13612 - DNA, 417 bp, Homo sapiens
taataccactcactatagggcgtattggagctccaccgcggtggcggccgcccgggcaggtacgcgggctacacacacagttcggatgccaagggtgacaccccattcccttcacaagaggcggttctgtcacaaatcagcactccacccccaccacacctctcagtgaatgaagtgctggtggtctcactcccctggtgacccttagccgtgggatggggtggttacactaaggcttcaagctgagaatggccatcatggcgggaggctgtttgcaaaggcaccttctgtcatcctggggttggctaagtcaactccaccccttcccaaaaaaaaaaaaaaaaagtacctcggccgctctagaactagtggatcccccgggctgcaggaattcgatatcaagcttatcgataccga

SEQ ID NO: 13613 - DNA, 358 bp, Homo sapiens
  misc_feature 17: n = A,T,C or G
ctcactatagggcgtantggagctacccgcggtggcggccggccaggattcaaaccagggagttagctccagcactccggctcttaacctcaaccgtctgcctctccacaaacaccaggatcaaccaccaagaccaaaaaaacagtctcacaaaccatcaaacattgcacttggtggctcaggaccttagcttcgtcttaaaggtccctgttatgctttttctttttgccccagtgtggagtggtcttcgtgtttgtgagtgcaggggtcaggggttgtgtcttttcttcttgtccccttccaagaggtgacatgtatccttgatactggaagggcccttaaggtctagcactggctt

SEQ ID NO: 13614 - DNA, 407 bp, Homo sapiens
ataccactcactatagggcgtattggagctccaccgcggtggcggccgaggtacgcgggcactccagcctaggcaacagagccagattctttttttttttttttaaaaagtcttttaaaaaattcttttattgtgctgattttattgtgtcatgaagtgtaatatgcatgtaggtatgtgtcaagtatacagagtgtcaggcatacggtgttcagtcataagcagttctggcctttggccctgcactgtttgttggctttttaggtaggaaccttcttagagtaagactgtcatgctaaaattgtagcaatcaaatgtgccccccatacaactcatttgaggttgagattatgttgctagagtggaggagattggagtgttctaaatgctaacagtttgtcttgcct

SEQ ID NO: 13615 - DNA, 412 bp, Homo sapiens
  misc_feature 11, 15, 28, 29, 106, 256, 304, 305, 345, 393, 394, 398: n = A,T,C or G
gacctcgtgtnatcncctctagggttanngagctacgcgccccggcggccgccctagaacgaggggagccctcgggcggggggaaaacccgagcaagcccaacganaccgacgaccgcgagggttttccgcggacccagcgagagccccctaaagcgaggggcaagggcgcgcagggcggaaacagggccacagccggggccggagcgaaacaggcacccgcccacttttttttttaacatacgagccgggagcanaacgcgcaaagccaggggcgccaaaggagggagcgaacccacagcaanngcagagcgcgcacagcccgcgggccagacgagaaacccgncgagccagccgacacaaagaaccggccaacgcgcggcgagaggcagcnngcgnaccgggcgctccgc

SEQ ID NO: 13616 - DNA, 411 bp, Homo sapiens
tacgactactatagggcgtattggagctccaccgcggtggcggccgggcaggtacaacctccatcccctgggctcaagcgatcctcccatttcagctccccctgtagctgggactacagacacacaccaccgtggctggctaatttttgtattttttgtagaggcagggttttgccatgttgcccaggctggtcttgaactcctgagctcaagtgatctgcctgcctcggcctcccaaagtgctggcattacaggcatgagccaccatgcctggctgggacattattcaaattgaagtgaggacatgatgttaaaaagttctgggcaagtattttacaagttaaaatacagatgtaagacttgacttgatcaaatgcccagctctgtaatttcacctaaattgtgtctttt

SEQ ID NO: 13617 - DNA, 434 bp, Homo sapiens
tacgactcactatagggcgaattggagctccaccgcggtggcggccgaggtacaacattgtgaaaattttcctatcatttcctctaaaactctgcaggcatggaggctgtctgctgagatatagcagggaacaatttaaccctttgttttgcacccacaagatgagcattaccaaattcccaacagagacatgctggggctgtgctgtgcctccaccctgccccctccacagccagctccgcgtgtctcagtctgtaactgatagcattccacttcctgcctgtacctccccggccggccgctctagaactagtggatcccccgggctgcaggaattcgatatcaagcttatcgataccgtcgacctcgagggggggcccggtacccagcttttgttccctttagtgagggttaattgcgcgcttggcgtaatc

SEQ ID NO: 13618 - DNA, 437 bp, Homo sapiens
  misc_feature 12, 13, 14, 24, 34, 37, 44, 66, 67, 71, 87, 90, 95, 102,108, 112, 116, 117, 120, 128, 140, 144, 155, 159, 160, 165,168, 169, 174, 180, 182, 186, 187, 188, 189, 198, 199, 202,210, 215, 216, 219, 222, 275, 281, 297, 298, 299, 307: n = A,T,C or G
  misc_feature 308, 311, 320, 325, 329, 331, 335, 343, 345, 354, 358, 376,377, 381, 383, 396, 401, 407, 423, 433: n = A,T,C or G
gagcctttgagnnnatcccaccanagggcctganagnagcttcncgccgcggcggccgaggacacnnaaanaaccttaaaagagganganccaancccccgnccaccncagngacnngangattttcnggaaacagggcncagnccgaggaaagncagnngaagnccnnacggngcaagncnaaannnnaaggaaaannagncccgcgangaggnnccncangttttttttttttgggggaccaggcaggggccgcccccgacaaaagcagggcncgccgncgggggcagaggcacnnngcaggggnnggngaagccgcncccanccangnaccncggccgcncnagaacgagnggancccccgggccgcaggaanncganancaagcggaacganaccgncgaccncgagggggggcccggnacccagacanggaa

SEQ ID NO: 13619 - DNA, 431 bp, Homo sapiens
gcgtatacgactcactatagggcgaattggagctccaccgcggtggcggccgaggtactttttttttttttttttttttttggtagagatggggctttaccatgttggccaggctgatctccagctcctgacctcaagtgatccactcgccttggcctcccaaattgctgggattacaggcgtgagccaccgcacccggcccagtcttcatatttataaataaagtcttgtgggaacacagtcacatttattcatttacattttgtaaatagctgccttcaagaggtagagttgaaagtctttaagacaaagatcaggtggcttgcaaaacctaaaacgtctggtcttttacctaaaaagtttgccaaccccaaaacaagaatatattcgattgtaatctttacaaaggtgttggctatatttcagtgtgt

SEQ ID NO: 13620 - DNA, 500 bp, Homo sapiens
gggcgaattggagctccaccgcggtggcggccgaggacaaattcagtcccaatactcaatacgtattatagatgactatgagtgcaaaccttaggatgtgattttctgaataattgttctttgtaggatttggttacattatttaaaatgaaaaagatctagttttagtgtgagctcagtaatgttaattggttaagttcattgcgaatcttgagttttagataagtagttatttttttcaatatcacttctgtttttagtgatattatatcaagaaacaacgtattcaagaaccatggctgacagtgccagatatacttagggataaacatcaaaatgcaattatagttgctataacgttagatactcggaatcaaaatttatttgcaagctgacttgataaactaaatgaaccaataaaatttgtagaaatgctatcctgaaataattatatacatgaagacaatgttgactaatgaattaagatacattatatacta

SEQ ID NO: 13621 - DNA, 495 bp, Homo sapiens
ctcacttagggcgaattggagctccaccgcggtggcggccgcccgggcaggtacaagagtcagcagaaatgtgtgctttaagcagagtcacaggggcctggggctgaactgagtcatttctcaaagatatccctgcctgggatgatgatggctctaattgaagctctggcatcatctggggctttatgagccaagggagataagaagagccacagcaaaacccttgggtctacagtgcaggctgcaaccaaggcagcatttgctagaatatttgtgattatgtgttcaacctacaacctcggccgctctagaactagtggatcccccgggctgcaggaattcgatatcaagcttatcgataccgtcgacctcgagggggggcccggtacccagcttttgttccctttagtgagggttaattgcgcgcttggcgtaatcatggtcatagctgtttcctgtgtgaaattgttatccgctcacaattccacacaacat

SEQ ID NO: 13622 - DNA, 459 bp, Homo sapiens
actcactatagggcgaattggagctccaccgcggtggcggccgcccgggcaggtaccatattatacctttttattgttgttataattattatgggtatttctaattaatatgatgttgaaacctgtttggcaccttctggaagctaccaaaaaaatgacactccattgaagtgcttaaaagctgttctcataagaattctactggcctattgtaaaaaaagaaaaaaaaaaaagaaaaagaagaaagacacaaagaaaataatctaaacaccaaaaactaaacacaattccaatcctttttctgtacctcggccgctctagaactagtggatcccccgggctgcaggaattcgatatcaagcttatcgataccgtcgacctcgagggggggcccggtacccagcttttgttccctttagtgagggttaattgcgcgcttggcgtaatcatggtcatagc

SEQ ID NO: 13623 - DNA, 487 bp, Homo sapiens
cactactatagggcgaattggagctccaccgcggtggcggccgaggtacacggaaatctggacagtgctgcacagattgatacattagcctttgctttttctctttccggataaccttgtaacatattgaaaccttttaaggatgccaagaatgcattattccacaaaaaaacagcagaccaacatatagagtgtttaaaatagcatttctgggcaaattcaaactcttgtggttctaggactcacatctgtttcagtttttcctcagttgtatattgaccagtgttctttattgcaaaaacatatacccgatttagcagtgtcagcgtattttttcttctcatcctggagcgtattcaagatcttcccaatacaagaaaattaataaaaaatttatatataggcagcagcaaaagagccatgttcaaaatagtcattatgggctcaaatagaaagaagacttttaagttttaatccagtttatctg

SEQ ID NO: 13624 - DNA, 484 bp, Homo sapiens
ctactatagggcgaattgtgagctccaccgcggtggcggccgaggtacataacatgatatcaagaaatgcttgaaacaaactttcacaataaagtcagaaaaaaactgtaaaaattgtctgcaatccaagaaaaagcacgtgccctgtgtgtagggggaaagagggaaagcacttgcagtgtgactttatgtggtctttccccaagtattgctacgttttgacctttggcccaactgaacaggtgaaatgcccttcacataagtttcaatccccaagaaactagctggaatgcaggggactgtagacacactcctggaccaaatggcatcgactctcagaatccaaaatggtccctgccctcattctgagcttacggccccaagcatattctaaacaaagcttttttaaatgaatcgcccattctcattaaaacataaaatgccacatcattttacaattagttaaaattacaggaggaaaaat

SEQ ID NO: 13625 - DNA, 441 bp, Homo sapiens
ctactatagggcgaattggagctccaccgcggtggcggccgcccgggcaggtacaggatatcacctgaattattaatgaatgcccaggaagtaattttcttctcattcttctaaaactactgcctttcaaagtgcacacacacgcgtgcacatacactgcattcgttgctccagtataaattacatgcatgagcacctttctggcttttaagccaatataatgggctgcaaaatgaagacaccagagtgtatgcatacaaatctcactgtattaaagatgcaggttttctaattgtacctcggccgctctagaactagtggatcccccgggctgcaggaattcgatatcaagcttatcgataccgtcgacctcgagggggggcccggtacccagcttttgttccctttagtgagggttaattgcgcgcttggcgtaatcat

SEQ ID NO: 13626 - DNA, 480 bp, Homo sapiens
atagggcgaatgggagctccaccgcggtggcggccgcccgggcaggtggcgcgcgcgggacaaagggaagcgaagccggagctgcgggcgctttttctgcccgcggtgtctcagattcattcttaaggaactgagaacttaatcttccaaaatgtcaaaaagaccatcttatgccccacctgccaccccagctcctgcaacacaaatgcccagcacaccagggtttgtgggatacaatccatacagtcatctcgcctacaacaactacaggctgggagggaacccgggcaccaacagccgggtcacggcatcctctggtatcacgattccaaaacccccaaagccaccagataagccgctgatgccctacatgaggtacctcggccgctctagaactagtggatcccccgggctgcaggaattcgatatcaagcttatcgataccgtcgacctcgagggggggcccggtacccagctttt

SEQ ID NO: 13627 - DNA, 307 bp, Homo sapiens
ctactatagggcgaattggagctccaccgcggtggcggccgccgggcaggtacgcgggggacccggaagtttaaattccgctccctccacgaaagagttgtagtgagtgaaaataaatattaaaacacacggaaatgtattttcctggctgcagcacctgccatcttgcctcggtaggactcattttcaaaaacagcagcttcttgaagccccagaacgcattcctgtgctacggaagacggaagagtagctctcggggtcagaaggcgaaggtcagaaggccgaattggcgggagaataggtttgg

SEQ ID NO: 13628 - DNA, 441 bp, Homo sapiens
actatagggcgaattggagctccaccgcggtggcggccgaggtaccattccgggtcatccgcagaaattcctcatagatggtaactctgtctactctccgagccagtggcgagaagttacacagggagtccaccccggtgtggtgcctgctggggacagacctgaatgttgaaacttgacagtcagaaaaataactcttgatgctgctgtttcggaagagttggttgagcgcatcctcaatattccttttgttcctctggtaattggtggtgcctggctgggctttgtcctgggaatatggtaggttggtgatggtgaaattcaggtagaagtgctgggtgctggagctgcttgttggttgatgaactgatgactccatttctgtcacatggatgtccaccaactggtaggtggagcccagccaatggaatgaggcattca

SEQ ID NO: 13629 - DNA, 463 bp, Homo sapiens
agggcgaattggagctccaccgcggtggccgcccgggcaggtacaatgctcactgggaaccaaagtcaggcatggggctgggctttaaggagcacaaacaaaaaggagggactagaaaacttcagaaaggtattggtgggggatgttgcggggggacaggggacagcgaggatgtgggatcccgagatcgtccaaatccctatgtgtagacatatgtgtataaaggcctttaagagactcaggctgatggggtatctgtaataaatcaaacataatataacagcacgtcaagtgataaggggactctggaaaaacaagcagcaaaaggagcagtatcaaactccacagaaattcacaaacatcaagacaccaagaaagctgcattcatttaaatcaaggtgacaggctgggctctgtagctccagcctgtaatcctagcactttgggaggccaaggtgggcag

SEQ ID NO: 13630 - DNA, 506 bp, Homo sapiens
actactatagggcgaattggagctccaccgcggtggcggccgcccgggcaggtactttttttttttttttttttttttttttgggatggagtctcgctctgtcacccaggctggagtgcaatggcacaatcttggctcactgtaacctacacctcccgggttaaagagattctcctgcctcaacctccttgaaagctgggactacagggatccgccaccccaacccggttggtttttgtattttttagtagagacagggttcgccatattggccaggctagtctcgaactcctgaccttgtgatctgcccaccttggcctcccaaaatgctgggattataggggtgagccactgtgcccggccaacaataaattttttttaaggctagtcaaacctaacaacaaaatttaaaagtcaatcagtagttctaacttttttttttttttttgagacagagtcttgccctgttgcccaggctagaatgcaaatggcacaaatcgtggctc

SEQ ID NO: 13631 - DNA, 487 bp, Homo sapiens
actactatagggcgaattggagctccaccgcggtggcggccgaggtacaaagactttgtaaatgtgattcagggcccccagcacccctgtgtctgcagagtgccttcaaaactcagctgttccggccggtgccaacctgtgaacttcccaccatatcccagaatctgctattccccaaaccacttcccagtttcctttcagtaatctttctgaaggagccaggacaatagggcctgttgtttagtgaatttctttattattttcagcctttaaaatgtaatttccatctcttgcaatgaatttgtttcccttttttttgcttcattttgtttaaattttcaggtatttagctcccctttcatattatttttaaattttttaattacctgttgtagggtgttcctccagaagcaaagagcaaaattttactgttgtgatgtacctcggccgctctagaactagtggatcccccgggctgcaggaattc

SEQ ID NO: 13632 - DNA, 417 bp, Homo sapiens
agggcgaattggagctccaccgcggtggcggccgcccgggcaggacgcgggattgatcaaaagctttgtaaccacaggaaaaaataaactcttccatcccttaaagaatagaatagtttgtccctctcatgggaattgggctgtatgtatattgttcttcctccttagaatttagagatacaagagttctacttagaacttttcatggacacaatttccacaacctttcagatgctgatgtagagctattgggaaagaacttccaaactcaggaagtttgcagagagcagacagctagagataactcgggacccagagttggtcgacagatgttagatgtatcctagcttttagctataaaccactcaaagattcagcccccagatcccacagtcagaactgaatctgcgttgttgg

SEQ ID NO: 13633 - DNA, 493 bp, Homo sapiens
  misc_feature 431: n = A,T,C or G
tacactactatagggcgaattggagctccaccgcggtggcggccgcccgggcaggtacaagtcttaaactgctctgctctttaaaccaaatacatacacacatacacagatatagttagatacagatgtgtgtgcatataaaaatatgacactccttagtaaaatattcctctagacctggggttcacacatccctcctcctgatccgtgctggtgcctactcaggcactactttgcagatttctcttctatgagctaaggtttttctgagctaaggtcaagcggtgacttagcaagttgaacgtgtaatgaaccaaacctgtttttccatggaaccaataataattaatctagagtgagccatttggcctccagaaacaaagagatttccatcacagagtgttggtgaggggtcatgagtaaggcggggnggcagtgagagcagctgttttattgtgagagtagcaggcaggctgaatgagaaggggttagc

SEQ ID NO: 13634 - DNA, 469 bp, Homo sapiens
  misc_feature 355, 380: n = A,T,C or G
ctactatagggcgaattggagctccaccgcggtggcggccgcccgggcaggtaccattccgggtcatccgcagaaattcctcatagatggcaactctgtctactctccgagccagtggcgagaagttacacagggagtccaccccggtgtggtgcctgttggggacagacctgaatgttgaaacttgacagtcagaaaaataactcttgatgctgctgtttcggaagagttggttgagcgcatcctcaatattccttttgttcctctggtaattggtggtgcctggctgggctttgtcctgggaatatggtaggttggtggatggtgaaattcaggtaagaagtggctgggtgcnccgcgtaccttcggctcgctctagnaactagtggatcccccgggctgcaggaattcgatatcaagcttatcgataccgtcgacctcgagggggggcccggtacccagcttttgt

SEQ ID NO: 13635 - DNA, 436 bp, Homo sapiens
cgactactatagggcgaattggagctccaccgcggtggcggccgaggtacttttttttttttttttttttggggaaataacaggggagagcaaatttctaaaaacttggggttttatagtaatttctgattttcatgtttagaaaaagaaatcacattaaaaatatgcttttttaaaattttgagataggatacactataatattattgtagtccagaaaatctgtatactataattcctagggaaaaagagaaaattattagtgtcaaaatacctataattcccacagttacgatatacatttttaaaaattgtttaaatacacaaacaatgatgatgctgtcctactagaaatgacagagccgagcttttactttttttaaaatgcattaacactttcataatcccagttaaaataatattctttttttttttt

SEQ ID NO: 13636 - DNA, 476 bp, Homo sapiens
ctactatagggcgaattggagctccaccgcggtggcggccgaggtacaatggcgcaatctcagctcactgcaacctccacctcctgggttcaagcaattctcctgcctcagcctcctgagtagctgggattgcaggcatgtgccaccatgctcggctaattttttgtatttttagtagaaacggggtttcgccatgttggccagctggtctccaactcctaacctcaggtgatccacccgcctcggcctcccaaaatgcatctctggtctttaaatgccctttgctgtatattctataacatcaagtctcagatctggtttgacctcagttggcctcttaatagttttcccctatgaacattctggtctcccagtaagcctgtaagcagctgagactgggaaaccatctcttatatcccacatcgtcccatggtgcacagcgttggacacatgatgcgtgagtacctgcccgggcg

SEQ ID NO: 13637 - DNA, 475 bp, Homo sapiens
  misc_feature 345, 428: n = A,T,C or G
agggcgaattggagctccaccgcggtggcggcacactggtaaagagtggcaaggtagcctttgtaaccagatatatctgatctcaaaatcaattttcttaatttaacccacgtcagtcagtcaaatgctaaggctcttcagctacacttggttcctccaccctctaaaaggtgagaactcaagagagctgggttctttgggaccttatcatatttttcccctccctaggccttgatttcccatttggaaaataaatcagtgagggctttctagttaaaaatgccagttgaagccaggcttggtggcatatacatgtagttccagttactcaggaggctgaagtgnggaggatcgcttgagcccaggagtccagtccaggcaacattgcaagatctcatctctaaaaactaaaaaatggaccaggcgcnggtggctcacgcctgtaatcccagcacttcgggaggccgaggcaggc

SEQ ID NO: 13638 - DNA, 455 bp, Homo sapiens
gactactatagggcgaattggagctccaccgcggtggcggccgcccgggcaggtactaatgaattgacaaatggaagaaaatttaaggagagtagcctagagaactcattctagaaactaaataacttaagtcaaaaattatttcctatattgcctcaagccctgcagatagctttgctatgtttgtgtatttgcacattgcactccagcctgggcgacagagactctgtctcaaaaaaataaatggaacaatcacaacagaaacattcccttattcactgaacatttcaaaccctgaaaatgtgtaatgagaaatgacaaatttttaaaagtttaattactaagaagacaaaaaatgtctattatgaatagaccaattctcaattggtagagaactttgaactggaaagaaccctaaagaaatctcctgtctacccctgttattacagattaga

SEQ ID NO: 13639 - DNA, 446 bp, Homo sapiens
tactatagggcgaattggagctccaccgcggtggcggccgcccgggcaggtactataattataagatttcagatagaacatgcaattagccttttgaaatccaacttctgtgcaaaattttagtatcagaaaatacgagatttgcagggggaaacatcagtaaactaccattaatgtcaatgcccagttttgacttttgttagcctgacactcccaaacagttgtagaatccgatagatgactgatggcaaaagattgtgaacatgtggaagaaaatcagtgggattcggtgctgatgaataggttgccttcagagtattattgacagacagcttgtggaactaattctttatttttgatgttgtgggaattaacacatcaatggtggttatgggaactaccaatgggttcctacaatttttatcagtagtatgtggcatatacac

SEQ ID NO: 13640 - DNA, 483 bp, Homo sapiens
gactactatagggcgaattggagctccaccgcggtggcggccgaggtactttaattctaaattataagaaaatatacatttgcacttattaatatagaaattcattttgtgtatatttaacatagcttttaaactattttacattagctacttcattatggtttcttgaacttctgaaaaaaattagaaatgtattaaacttatcagtaacataaaaacttattttgtttcacctaacgaatactgcgtttgtaaaaataaatttaatatagaatatatttttaaattaaatatttgaatataaaatagctctaagaaagaagcaaattatcactgaacatatttcttattatttctggctttgaattatacgtaacttaaattgtcttaaatgatacagaatattggagaatatgatactttcacataatatactatgaacctgttcatataactctgattgactactaactttctgtttat

SEQ ID NO: 13641 - DNA, 488 bp, Homo sapiens
  misc_feature 428: n = A,T,C or G
ctactatagggcgaattggagctccaccgcggtggcggccgaggtactaagtcacacccagccagtcaataactgagaaatcaaaataaaataataatttcaaagaattacataaatacagggccttttgagatttttggcaattgtaaacaaaaacgaatggtttttacaattcagtgtaattctacgaatatttatttggcacccatgttaggcactgaggctacacagcagtgaaataggcctagttgttctcaactagagaacatagttggttaatgtagctgcactgaattgtagctgtttagaagataatataccctgaggctttttaaagtatactattactataagaagtaaaattattttatacttataaattttgttttggattattcaactgaatttggagtgttcagaattttatnggcggttgggaaaggaagaggtatatgctattttttttccttttcttttttttgagacgg

SEQ ID NO: 13642 - DNA, 449 bp, Homo sapiens
tacgactcactatagggcgaattggagctccaccgcggtggcggccgcccgggcaggtacttttttttttttttttttttttaaatttccaccggtgccgaggcctcagtggagcctggctggcggcttgttagagcctgcagcctacctgtcctgcataggaatgaagccgggaggagttacatgatatgccctcgttgcaggccggggacacagctaccgcattcagagaccaggaaacagagcaaaagctgttctcagagtgcggctgagcgaggagctacaggggaatggagggggccaagctgcatggaagattgtcccattaacctggctttttaccagggtggtcctctccctaacccctaagaatcacaccctgcatccaaacggcagcaaccccagaaaacgggctaagaactcccccgaacagagctagatctagaaag

SEQ ID NO: 13643 - DNA, 491 bp, Homo sapiens
actactatagggcgaattggagctccaccgcggtggcggcccgaggacttttttttttttttttttttttttaaagctgggatatcttacagaggaaggaaaaattaaccttttttactttctttctcactttttaaatcagccaaagtcaagccccgtttgccaacctgcatgtccatgcctgtaagcccttctcttggccaaggaagaaaggaagaaagaaaaaagaaacccaggggcctgtatcccctgattaaacacagcacagcactccaggcagacatgcccgggggcggctcctttgcaccattgacctcaggccagacacctcagcgccaacaatgggacctcggccttccggctaggtttgccccaggctgggcaggaaaccagctcggccgctctagaactaggtggatcccccgggctgcaggaattcgatatcaagcttatcgataccgtcgacctcgagggggggcccggtacccagc

SEQ ID NO: 13644 - DNA, 263 bp, Homo sapiens
cactactatagggcgaattggagctccaccgcggtggcggccgcccgggcaggtacgcggggagagacattgtggctagccaaccacatggtcagcctcaaagttgagaggctcagtaaccctcctatccctagagaattccaaagtgtggatgtaatttaaactagaaagccattggtgactatctgtgatcctctggaggtatgctatgttgtgtatatcttgcatccaaagccagagggaaccacaatgactagtaaaac

SEQ ID NO: 13645 - DNA, 448 bp, Homo sapiens
ctatagggcgaattggagctccaccgcggtggcggccgaggtacctggatctatgctgctatgggtggagaatcgacatcctttgaaactggccacaggcagagctaagaggatgactaaaaggtcccttgggtgggtgctaatgagcagggcccaggaaaacctctgtcttcccggagagccctcttgcatgagtttcggctttgccaagattccagggacttgaggacagctattgagttatggttacgtgactgccacattggggcttggaggcatctggcagatggttgggaatgggctggcaccacactaattaggccacgatgatccagtttgactcagggaaacccagaagtcatagtgctctttgcagaatgacacaagatgtcaacatgcttttgttgtgtaccttggccgctctagaactagttggatcccccgggct

SEQ ID NO: 13646 - DNA, 457 bp, Homo sapiens
tacgactcactatagggcgaattggagctccaccgcggtggcggccgaggtgcatatatatatatacacacacatatatatatttatgtatcttttaaacatataattactctctttaattcatttggacttttcatctaaacttgctctgtttgcacagttctgttaggtaagatatgttcctaccttgagaaatgttgtgaatatctagcgaaacaccaaacatcctcagctgactaatgtggtatcagactttctggttgcaaggtaggggtgaataaggcaggatggggtgcgggggtggtgctggaagaagacatggcatcaggttgggttttgcaggatactgaaattgtctaggggccttggctgtgcaaagagcctttccgtcaaaaccctctgcatgagccacagtcagcacgtagtttgcacatgcccaccttcaaggtggcacaca

SEQ ID NO: 13647 - DNA, 408 bp, Homo sapiens
actactatagggcgaattggagctccaccgcggtggcggccgcgcgggcaggtacgcgggatttctcagatagttatgcgcagctccaggcaccagattctgtgctgggtgcaggcaggacctggagggcgtcctcaagtgttgatctgcaggactgtcttgatctttccagcagtgtcattgtgggcacgtgacctgagctttctgagcctatttccgcatctgtaaagtgctatccacttccacctcctgggctgtcgtgcagatgtaggaaggaattgcactcacacactcagcatgagacaggcgctcagtaaaagcccgtccaggggatatgagatcagtgagggataggaaagcaaggtgggtagaaacagcaaaacccttcccattgatgatggcagtttg

SEQ ID NO: 13648 - DNA, 499 bp, Homo sapiens
cactactatagggcgaattggagctccaccgcggtggcggccgcccgggcaggtaccaagcattggacacacaaaaatacaggcagcttcttccctcaaggaggtcacaggtgggtgtgtccatagcaaagctgggaggaagttgtatgaggagcctgaagacaatggggagctaggggaaagttctgagtagaaaggaacatgtggacaaaggtttgaaatgatgaagactgattaggaagttcatattatgaagcataattcaagctttctctacgatgttcaaatcccatctctcctacttactagataggtgacattgggcaagttacttatctcctctgctcctgtttatttgtttcaaaaacagggacctctctcacagtgtgattatgaagactggacaagaaaatggagttttggttttgaatgcgttaggggtctttgccttaggcgtgtagtggagacatggtttacacaatttgctgcaccttctgga

SEQ ID NO: 13649 - DNA, 399 bp, Homo sapiens
acactactatagggcgaattggagctccaccgcggtggcggccgaggtacacagtttggaagtttaggcaaaagtcatttcttccctatattttgtcatgcttatctcctgtctctttctgttttacagattagcaataaactccttaaaacccaaaaggttttgggcttctgttcctttcacttgcagtcagacatggagttagtggtagaagaaacagaaggggtaacctgcatggtgacagctactgaggggatggataggaaagcaggctgagtccctggggccagtggttaccaaagccaaggagagggcaaggggagcccagtgggcctggccatggactgctctggaattccgagtgtgaactttcagccagaaggtagtgtgaaaatatta

SEQ ID NO: 13650 - DNA, 486 bp, Homo sapiens
agggcgaattggagctccaccgcggtggcggccgccgggcaggtacatcaccctgctgagggacatccaggacaaggtcaccacactctacaaaggcagtcaactacacgacacattccgcttctgcctggtcaccaacttgacgatggactccgtgttggtcactgtcaaggcattgttctcctccaatttggaccccagcctggtggagcaagtctttctagataagaccctgaatgcctcattccattggctgggctccacctaccagttggtggacatccatgtgacagaaatggagtcatcagtttatcaaccaacaagcagctccagcacccagcacttctacctgaatttcaccatcaccaacctaccatattcccaggacaaagcccagccaggcaccaccaattaccagaggaacaaaaggaatattgaggatgcgctcaaccaactcttccgaaacagcagcataagagttatttt

SEQ ID NO: 13651 - DNA, 340 bp, Homo sapiens
  misc_feature 148: n = A,T,C or G
actactatagggcgaattggagctccaccgcggtggcggccgaggtacaaggagtagtctaaaacaagtgactttactacttattcttctgcatgtccttaccagcttcttaccttcttcaggttgagcatgagatcagcttcacagnggatgggtccttaagggtttttttccatactagtttcagccttaacaatgagttttcaacccttaaacatgaaaaataaatagtgcgaaagaggggaggatggtagaaatgctttaaaattaccttttgtaaattttactttgtttatgttttaattgtgccttgcttatcaggaagtcctacaacaagatc

SEQ ID NO: 13652 - DNA, 494 bp, Homo sapiens
actatagggcgaattggagctccaccgcggtggcggccgaggtacagttcatatcccagttctagaatcagttcattttctaaggagtcctggttccttttattggaaaccaaaatctgggcaccaggtgtgctcccattctagtcgttttctgaccacataactgctaacaaagatgcttcactctggctacactgatgtgaactttgaactttagcagaagagctcagctctagagaacaatgagctcctacattaccttttttcctcaaagaataagtaagtctaagcagaaaaaaaatatgcaaagaattttcagtatgaatgaaataagacaaaccatcaggcttgctgtattgtaaaccaacacaatatagttataacagatctgtagaagggatccttagaataagagagtcatttgtcgggggtcatcagggagaatactgatagtatcttcggctttgccgcataacagacacagcatggtatac

SEQ ID NO: 13653 - DNA, 391 bp, Homo sapiens
  misc_feature 333: n = A,T,C or G
cactactatagggcgaattggagctccaccgcggtggcggccgaggtactttttttttttttttttttttttttttcttcatggctacatctgaacagctactgagggatatatatgccaactttgggagttgcacagcttttttgaggccatttcttagatgactagggactgtaatttctcttaatttggaatagccacaagttgttgtagccaaggtttgtgtgtgtttttaatacaattcttaaaattttagtaggcttctcatctgtagatagatttgaaggggtggggttgcccctccacacctgttgggtgtttctcgtaaggtgnggacgagagacttaggaaagaaaaagacacagagacaaagaaataaggggacccgggg

SEQ ID NO: 13654 - DNA, 322 bp, Homo sapiens
tccaccgcggtgcgcggtcgaggtacaccaaatggattacaagcagcatccagcagaagacagaccccccaaccctgcccaccagggctcacactctacaaaaccctgagggcctagaaatctgtaaatgcatcgccaagcactggggctgatttgcagtaattctctaagcaaggcaaacatgatctagctttgaaggcagcatgaaggcagcgggttggtgagaacaatctctccttaagagaagaagaaacctggggcggaaggagttttccccggaagtggcttgccagctcaccctctctgaaccacagccatggct

SEQ ID NO: 13655 - DNA, 345 bp, Homo sapiens
gctccaccgcggtggcggccgaggtacatgttaggtcttgagttaattgctctgtggctgtggatttttatttgatgttctgatctcttccttccagtttgataaattagtgtagaaagtggaagaaaaacatgccggcgcagcctgtgcgctttgtcaggttaacagaatggagtcctgctctggcatcagtcagtgctgttgtccgaaccctctgtggctccttcctccctccctggggcccagagctgcagacgctagaggggtatcggcctgggagagaggttcccgcttcagtttggagaacccaacaaatcctggagttaggtttttgacgctccccat

SEQ ID NO: 13656 - DNA, 317 bp, Homo sapiens
ttggagctacaccgcggtggcggccgcccgggcaggtaccctaaatgttaaactgagggatgagtgaaacaatatcaggattaataaataaacacattcttgaattccatcacttaatagaagtggccatttgaatgctggcaggtaggaagaaaagaggaggacaaagaaccccaaaagttggcatcataactactgccacaagaaaggagaatcaagcagattggttaggtaaagaccagggaaacacaggtcactgcaggactgaagaatcttccaagcttgccagtaatgtaagtttctcattttccaataaa

SEQ ID NO: 13657 - DNA, 408 bp, Homo sapiens
tcactatagggctaattggagctccccgcggtggcggccgaggtacttttttttttttttttttttgtatttttagtagagatggggtttcaccgtgttagccaggatggtctcgatctcctgaccttgtgatctgcctgcctcggcctcccaaagtgctgggattacaggcgtgagccaccgcgcctggcctttccagggtattcttttaacgtggtcttatttgcctttttgaatttaagaaaatctatcagcatcatataccaccactggaatataaatttgaaagagagtcctgcagattatatacatgaatctacttaggcctaataaccaagcagtcctcagtggcagatcaatgaaaagtgaaactaaaggcaagtgaagggtaggagagattggccagtg

SEQ ID NO: 13658 - DNA, 410 bp, Homo sapiens
ctactatagggcgaattggagctccacgcggtggcggccgggcaggtacccacctcctcggtcacccacagagccaccaaagattccatgtcccagagcttcccatagcagacctgaaaagtccatgacctgagctttggccatggtagtggagtggaacaggaaatagtccagcagaggagtgtgggggaagggggcaggagaggcacaagaataagggagacctggactctgcctttttgggaaaaggaaccaagctcatagcaatttggctgataacacaatcagatttttccaggttaagcttcctttctgttatactttcatcattgtgatgctgtggtagaaagttaataacagtagtggctcagtcattgaatcttttccctgtataatacaactgacttgaa

SEQ ID NO: 13659 - DNA, 371 bp, Homo sapiens
gggcgaattggagctccccgcggtggcggccgaggtaccatctactgaatgcccagttttgatctatttctaaatggagcaaaccaattccatctcctagagctggagactgtatccaggcagtgtgtggacagaacggacaatcttttctgccaagggcctatttgagtggagcacccccacacgggttagacgggtcggcacggggctggtgggtgaggaactcaggggtcagtgcaagctgcagaccctcatttggggaacgctctcagcacaatgctcttacaactacagggtgcactccaaaatggagttcaaggaaaaaaggctaatgagaaataaaatctgaaaaaataacttaaaaagtttgc

SEQ ID NO: 13660 - DNA, 367 bp, Homo sapiens
agctcaccgcggtggcggccgcccgggcaggtacgcgggggccctttggatacctgcactccccatcaccgcactccccatcgtggcacttcccttgttgcagttttatggagtgtgcgtctggctccccaactagacttgaaccgcttgggtgcataactcgggacttgaccatttgcgtctccctacggccagctcagcctccgcacacagggacctgcagagagtggatgtagccactgccccagcgtccctgggctctgaagagaagccattgcccttcaagagccaccctcatttcctgggcactggttggaaaaaacgaagaaaaagagacacccagctcacctccaagtttgcctgcagg

SEQ ID NO: 13661 - DNA, 361 bp, Homo sapiens
cactataggaggagtggagctccaccgcggtggcggccgcccgggcaggtacgcgggcaactcattcatgatattgggagaaaagcaaagcaaaaactgcaacaaaatctcaaaccctttctgcagcagcagatggcaaacagtgatcagaggagaaggacccttccagcattagaagatttccaaaggctgttccagtaggggctgtgggcttctgggagcccagatgccccctgatggtatatttgagttgtgaggtggaggccaggtggcaagagactgcaggccaatgtcaatgaaaagcctgggaggaaaaagagatttctgggagagggagacatcttagtgtgagcaaatgacc

SEQ ID NO: 13662 - DNA, 413 bp, Homo sapiens
atacagactcactatagggcgaattggagctccaccgcggtggcggccgaggtactttgctaaccagcattttggctgtgttattggcagttttcaaatttgaattctcttgccatctttttgagagtgcatagacatttaattttaagaaatttatagaattggacttttttgtctctatacatttgtaggtcagatgcacatttgtttcctgtttcatctttctttaagagcaaaaatgtaaagttttgtatgtagaggataattgtatgatgatgataaactaattaggtattacagttttctaacgacagaaatttgtaataattaggtaacttggttcatattaaaatatttgatacataggccgggcatggtgactcatgcctgtaatcccagcactttgagaggct

SEQ ID NO: 13663 - DNA, 394 bp, Homo sapiens
gcgtaatacgactcctatagggcgaattggagctccaccgcggtggcggccgggcaggtaccacacccatcttaccctcttccctctaggttctgacattcagctatcttggtgggaggctggggagcactattggggatgagggtaaggtggagttttataaagctctccaggtgactcagagaccaccctcattccacctggtcacaaatccctgaatgggaaacaggtactttttttttttttttttttttttgcaaagaattgtaaaatttattgtataagtattgcagcttttcagaatgtcatcattgccactaatgattactgatacacaacaagcagtttcttcaggcctgtggattggcatccaaatacagagtcttacgcagcg

SEQ ID NO: 13664 - DNA, 402 bp, Homo sapiens
tacgactcactatagggcgaatgggagctccacgcggtggcggccgaggtacttccctgagcagtcgaagtggatgcccagaccaatggccagtgctaatatcaatgcaatgatcccaatgacgatgattggaaaaaacttcaatggcagcagtgacaggatctgtgcagcaacagcatctgcatctggtgcaacaggacttattttcaaatcatcaaggccaaaaagcgatcggaatgagaagggggcttcaacagcaggcggatcattttcccccatggtgactatttcaggacctctgacatccggctccgcctccacctctacctcataattcccgagtcccaaaaatgtagatggcaccacggaagagatagtaggccacagtgttactggcttccc

SEQ ID NO: 13665 - DNA, 415 bp, Homo sapiens
tacgactcactatagggcgaattggagctccaccgcggtggcggccgaggtacagcaaattaaacccaataacaggaggaggaaaacactaattaatataaaaatttcaaggatatgttaaacaaacaaacaattacaagaaactcctgtcaagttaaacagagagagagagagacagggagaaccactaacaggaaagagaaaaagatatacaagctatcccgcagaaattaaaaagagactaagaatattacaaacaactttatttcatttagatgaaatggacaaatttattttaaaacacaattcgccaaaattgacagaagtggaagtagaaaatctatttctgtatttattaaagatactgaatctataattaaaaatatcttcacacagaaaattacagtttcaaatg

SEQ ID NO: 13666 - DNA, 388 bp, Homo sapiens
tacgactcactatagggcgagattggagctccaccgcggtggcggccgaggtacgatctgaagaaatgaaaggcattgaactttggtgggtaaattgggtcttttccagcaaaggtataaatccttaaaagccaagatcatattgtttgatttctctgggctctctgctggatacagtgccaagtccataactgtataccccatggacactctatgttaaatggagattaatgtgtaagaggtgtttttttttttgttttgttttgttttttaatttggaaaagaagcttaaagaccacaatgggtgtggcattggctcgacccacagatctgcttagtctcagacaggcactttgaaccagtcttttaaaattgcgtcacaacaact

SEQ ID NO: 13667 - DNA, 414 bp, Homo sapiens
ctagtatagggcgaattggtgctccaccgcggtggcggccgaggtacagatcactatggcttgtctttctcctaactaatgtaaaattcccaataatttcattaacttggtattgaaggccaaccagttggtgtgattctaccctggtccttctgattatttttaattttttaatttttttttttttggggacagagtcgtgctgttatcgcccgggctggagtgcagtggcatgatctcggctcactgcaacctccacctcccaggttccagcaactctcctgcctcagcttcccgagtagctggaattactggtgcccactaccacacccggctaattttttgtatttttagtagagatggggtttcaccatgttggccaggctggtcttggactcctaacctcaggtgatc

SEQ ID NO: 13668 - DNA, 519 bp, Homo sapiens
  misc_feature 200, 255, 256: n = A,T,C or G
ctatagggcgaatgggagctccaccgcggtggcggccgaggtacaaattgtcgtttttattcctcttattgggatatcattttaaaaactttattgggtttttattgttgttgtttgatccctaaccctacaaagagccttcctattcccctcgctgttggagcaaaccattatactcttacttccagcaagcaaagtgnctttgacttttcttgcttcaagtcatttcagccagcaagaggtgaaccaaaactnngttcttttgcatttttgtccgctgagaaatatggcacttgcacttgcttatatcgccaatgctaatattatagcatcgatatatcctcaacatatatgcataggtgctattcaacactcacaaggagctctcaaagtataactctttctatagccaactgctaatgcaaattaaaacatatttcattttaacatgatttcaaaatcagacttttatactacccttagctggaagaaactaaaaatatatcaaatgcagaacca

SEQ ID NO: 13669 - DNA, 55 bp, Homo sapiens
cagacacacacacacaaacacacacacacacacacacacacacacacacacacac

SEQ ID NO: 13670 - DNA, 353 bp, Homo sapiens
gcgtaatacgactcactatagggcgaattggagctccaccgcggtggcggccgaggtacgcgggacactggtgggggagagtccgacgcgcctggctaggagcgccgaccgcagggcctctacggaccttactagaaaaatgaaacctgatgaaactcctatgtttgacccaagtctactcaaagaagtggactggagtcagaatacagctacattttctccagccatttccccaacacatcctggagaaggcttggttttgaggcttcatgcgagaaaggggaatggggaatggctgcttaacggcatgtcttttttttttttgagacggagtcttgctctgtggcccaggc

SEQ ID NO: 13671 - DNA, 529 bp, Homo sapiens
actactcactatagggcgaattggagctccaccgcggtggcggccgcccgggcaggtacgcggggacttgacttaaactctggggcccgggaggccgccggttttctccccgcttgccggggtggtcctcttccctttgtcggaccaaagaagtaaacactgtgtggagagggactgacgtgtttggagggaaatgggaatgtacctcggccgctctagaactagtggatcccccgggctgcaggaattcgatatcaagcttatcgataccgtcgacctcgagggggggcccggtacccagcttttgttccctttagtgagggttaattgcgcgcttggcgtaatcatggtcatagctgtttcctgtgtgaaattgttatccgctcacaattccacacaacatacgagccgggagcataaagtgtaaagcctggggtgcctaatgagtgagctaactcacattaattgcgttgcgctcactgcccgctttccagtcgggaaacctgtcgtgccagctgcattaatgaat

SEQ ID NO: 13672 - DNA, 592 bp, Homo sapiens
acccacgcgtccgctctctgtcggggtcccctccatctcgctgctgctgaaggccgcgagggcggcggcgatggcggaggcggcgctgttgctgctgcctgaggcggcggcggagcgggacgctagggaaaagctggctctctgggatcggagaccggacacgacggcgccgctgaccgacaggcagacggactcggtattggagctgaaggcggcggcagagaacttgccggtgccagctgagcttccaattgaagacttgtgcagtttaacatcccagtcactgcccattgaactgacttcagtagtgcctgaatctacagaagacattctcttgaagggcttcacttccttaggaatggaagaagaaagaattgaaaccgcacagcagtttttctcatggtttgcaaagctgcaaactcagatggatcaagatgaaggaactaaatataggagcagtgtgatgctatattgaatgatgtaaacagtgctcttcagcatctggagtctttgcagaaacagtatctttttgtgtccaataagacaggaaccctacatgaagcctgtgaacagctcctaaaagaacagtcgg

SEQ ID NO: 13673 - DNA, 448 bp, Homo sapiens
  misc_feature 317: n = A,T,C or G
cacgcgtccgggatggggggtttgacatagtgtgaaggctgtggccaagaaacgcagggaccgctctctcccccgggctttcgaaatcttcacagacaataaaacctatgtctttaaggccaaggatgagaagaatgcagaagaatggctccagtgcatcaacgtggcagttgcccaagccaaagaaagggaaagtagagaagtaaccacatatctgtagggaatttataagtcagccatgacaattatacaccacaggcattgtattatcattgccaatgtcaagaaaaagagctaaatttaccaagccatgttgntttttactaaataccaagggattggttgtcctttaagaagaagggcctaaaaggcaggattcttagtaaatgtcatactctacagtttagtattgacttcagaatatatctgatgcccacaaaaataaaat

SEQ ID NO: 13674 - DNA, 491 bp, Homo sapiens
ttcggagtcacccacgcgtccgcggacgcgtgggcgagtgcccagtgaccctttcacgggggtagcttttactccgcactctcagcccctgcctcacccctccctcaaggcccggattgaccatttcctgctccagcactccatccctggctgccacctgcttgggagagcacagacggcattggcagtgatcccttcttccattgttctgccctctcagaaaaggaagatagagcaggctgaacatgtcccagacagtaactttggtgtaaatgcttcctgtttttctgccacaagccctttggtcttacccactacctcagagcacactgctaagaaaatgaaagccaccaatgagcccagcctgacacatatggactgctcgacaggtccactgtcccacgagcagaagctgtcacaaagcttggaaattgccttggcatccacccttggctctatgccctccttcacggcacggctgaccaggggac

SEQ ID NO: 13675 - DNA, 435 bp, Homo sapiens
gagtcgacccacgcgtccgcggacgcgtgggcgagtgcccagtgaccctttcacgggggtagcttttactccgcactctcagcccctgcctcacccctccctcaaggcccggattgaccatttcctgctccagcactccatccctggctgccacctgcttgggagagcacagacggcattggcagtgatcccttcttccattgttctgccctctcagaaaaggaagatagagcaggctgaacatgtcccagacagtaactttggtgtaaatgcttcctgtttttctgccacaagccctttggtcttacccactacctcagagcacactgctaagaaaatgaaagccaccaatgagcccagcctgacacatatggactgctcgacaggtccactgtcccacgagcagaagctgtcacaaagcttggaaattgcctt

SEQ ID NO: 13676 - DNA, 456 bp, Homo sapiens
cgacccacgcgtccgcggacgcgtgggcggacgcgtgggcggacgcgtgggcggacgcgtgggggatggatgacagtccaccagaaaaaagttagtggagcggggacaagcagggttgcagagtggaagaaaaatgttcctgtgagaagaaactgtccaaagagtctgaagagaaaagggaacagggtgaatttgaggccctacaagaaaaacaggagaccattcaacaggagacgcccagggagcaggtggctttgtgggcctgatgtccaagaaagaagtagtggtggtaaacagagactggtgattgcaagctactgttgtctttctattgaaaaaatagctgagcaccacactagggaggccttgcaaggacagcccagagaatttgaacttgattctacgggcagtgattttgaacaagatgttttgaagagaacgtgacacacgtcaagc

SEQ ID NO: 13677 - DNA, 446 bp, Homo sapiens
gcgtccggccaggcgtgcctggaaatccgctttcgcagcgccccctcgtagccgcctccgcccgcagaaggcgttccctggacagagaagcgggcgcgcgggggcgggcgcgtggggccttgccggagaacctgactctccgcagcagcagtggaagccagagtgacgcgttgtgttgaacaccagttttctggagcgctgtgtgttctcaacagctgagcagtctgtttctccaatcaggtttcaaagccacttcaactgcactggcccctgtgggtcactgctgcaccgccctggcccatgtgggtccctgaggagcgacctgccggggccacctggctggacgaaaaagacacactttggacttaagccgtgagaaaaaaacttcatcagtaagaaacaagtcaatagacaagtaaaagactaggagaaaatatgcataaaac

SEQ ID NO: 13678 - DNA, 420 bp, Homo sapiens
gcgtccgaggctgggggatccaaagggtgcgctccagcccccaacccaggcactgggactctggtggcaccctgggtggcaggcaagccttgaaatcaagtgcacgagccttggaaaggaggaccgggagagttatggcatttatgaatgaagaagagaaagagaatcactcggatgggaaaagttaactggattgttcccacctgcatggatcaccgggtaactgcagtgggaccgagggggcgaggctgcgggctggggatgtgcgggtttccttgtgttgccacgaacccagagagggagaggaagaagatggaaagaaaaaggaaaaagggaaagaaagtaagagggggagaggggaaaactgaggatgaagagagacaagagaagaaagacctgagagagggagagaaagaaaga

SEQ ID NO: 13679 - DNA, 432 bp, Homo sapiens
gcgtccggctgtgatgaatgaggtctaggaaataatttgcatgtgtcttgggggacacaacagtaacgagaggaaatacattattacagcaacttgcgacgtactaatacctgtcagtgttggcccccgtaaggtatgtaaggcacctgtgagtgcccagtgagtgctggtgaaaggccaacatgtactagttatgtaagtattggtgtctgctttaaaaaaggagacccagacttcacctgtcctctttaaacatttgagaacagtgttactctgagcagttgggccaccttcaccttatccgacagctgactgttggatgtgtccattgtcgccagtttggctgttgcccggacaggacaggacctccattgggcgcagcaacaggtggcaggggtgtggcttgaggtgggtggcagcgtctggtcctcc

SEQ ID NO: 13680 - DNA, 475 bp, Homo sapiens
gcgtccgcacagatccttgagctcacgctgcaggatagtacagttttaccgcagagggaatctggaacagtggaatcatgtgtctgccctgtgtattgcagtttgtattgccacaagctatatttataccagtgtcacccttttcttgtagaatatactaataatctgtgccaactctaccttctcacttttacctctgacgtcattctttttttctgaaagaggtaataattctagttttgatagactctgaggattatgtgaacaggacatttttcatttgtgaatttaatgctatactgtcaaggtacttgcttgtgtctgaactctagtgcacttatgattttgtagaccatgtgaaatttaataagatacgttttttttcctttctttgtgtgtagtgcagcaacagtttggtctgcatttgttagaagtttaactcctaacaacccaaagacctatttaacaattggtg

SEQ ID NO: 13681 - DNA, 500 bp, Homo sapiens
ccacgcgtccgaccccaaagggagggacccacattgcacacactgtaagaaatgcactttccgaggaaggggatgggggagcccggacacccagagctccccgagttgggggtgcccgtctggagcgcccccgtcagcccctggcggtgggaggtgagagcgagtggtttaagtgcctgattaccaccacccgcccccccctttgtccagctgggacacggaatggccgcgggcctcctccccctcccctccagcctctccaccagcccctccagtcaaccctcatcgccgtgcccccccagagctagagagatggggcccctgcgtggcccgaggggcagagctgggcgtcacttcgcaagcgtcctgccctgccggggcgcgggggtgggctctggggaagccggtgcgccccccacgccttcgctgccagtgccttacattctggagcgacccccctccctggtgcctcccagcgaagggggaccgccgtttgcact

SEQ ID NO: 13682 - DNA, 475 bp, Homo sapiens
cagctcaagccttgccacttcgggcttctcactgcagctgggcttggacttcggagttttgccattgccagtgggacgtctgagactttctccttcaagtacttggcagatcactctcttagcaggtaggggccgcagaccctgcgggttaagaggtggggtggggggcagtgcttgccaaggccctaaactgggagcgctgggtgaggggaacaacccactttggagggttctctgagagatagatacaccccatatcctgggcccagctcgtgcacacagctggaggtccagagacccagtcccctctgctccgtcagccaagttccaagaagttgagcagagaccctttgggagcctggcggggtgcagcggcctcccctgcggggcctgtcacccggccggcgcgtgcaaacgcctctggcgcctctctgcgcggagggagataagcgtctgagccagggaaagcgcgggc

SEQ ID NO: 13683 - DNA, 472 bp, Homo sapiens
cgtccggtctatacaatgtcattgtttgggacccgtttctaatacatctgctgcctacattcctgctcacacatacgcttgcagctttgaggcaggagagggtagttgtgcttccctaggaagagtgtcttccaaagtgttcttcactctttttgccctgcttggtttcttcatttgtttctttggacacagattctggaaaacagaattattcttcataggctttatcatcatgggattcttcttttatatactgattacaagactgacacctatcaagtatgatgtgaatctgattctgacagctgtcactggaagcgtcggtggaatgttcttggtagctgtgtggtggcgatttggaatcctctcgatctgcatgctctgtgttggactagtgctggggtttcttatctcgtcagtgactttctttactccactgggaaacctaaagatttttcatgatgatggtgta

SEQ ID NO: 13684 - DNA, 501 bp, Homo sapiens
cgcgtccggacgctgcgtggagcggcggagccggagggaagcaaaggaccgtctgcgctgctgtccccgccccgcgcgctctgcgcccctcgtccctggcggtcgctccgaagctcagccctcttgcctgccccggagctgtcccgggctagccgagaagagagcggccggcaagtttgggcgcgcgcaggcggcgggccgcgggcactgggcgcctcgctggggcggggggaggtggctaccgctcccggcttggcgtcccgcgcgcacttcggcgatggcttttccgccgcggcgacggctgcgcctcggtccccgcggcctcccgcttcttctcttgggactcctgctacctctgtgccgcgccttcaacctagacgtggacagtcctgccgagtactctggccccgagggaaggtacttcggcttcgccgtggatttctttgtgcccagcgcgtcttccggatggttctttttcggggagctccccaagcaaacacc

SEQ ID NO: 13685 - DNA, 472 bp, Homo sapiens
ggcgcctccgagttccccgccaggactcggagggccaggagggcgcgacctgggtggatatttttgttggacggcgcaactcttggggtggcccgggagcggcggaaaccgagcgagagaaccaggaggcgctgcgcagaaggaggcccgggggctccgaggcgttgaggggctcgatctgcgttctggggttggcagccgagaggccgcggtccctgagtgccagaggtggtggtgttgcttatcttctggaaccccatgcagccagatcccaggcctagcggggctggggcctgctgccgattcctgcccctgcagtcacagtgccctgagggggcaggggacgcggtgatgtacgcctccactgagtgcaaggcggaggtgacgccctcccagcatggcaaccgcaccttcagctacaccctggaggatcataccaagcaggcctttggcatcatgaacgagctgcggc

SEQ ID NO: 13686 - DNA, 477 bp, Homo sapiens
cggaagacattaaaagccagtttacgtacagaagcatggttttagattaactgcctgttggtacagctagaaacattgcagccctatcgcttatttatcttgcatgttgctctgctttgctatgaaaaatatcgttttatgataaaacttgttgaattttgatatgtattcggttatactcttagggaaaataatagaaattagagtgagagaaagtgctatgtatattaggctttcagattttatagatataggcttaagggagggtggaggttctttttttaagttgaatgactacttaaatttgttgatgtgaatttaagttttaaagattattattaattaactcttctctttgtctttgcatttaccttcccagatgttccagcctatcattttacttattctcattcttgtattattttcatcactttcttacacaacaatatttaaacttgtctttcttttaacactgtt

SEQ ID NO: 13687 - DNA, 350 bp, Homo sapiens
  misc_feature 325: n = A,T,C or G
gcgtccgtggagtatgtgcatctgccaagtggaggtggtggaggagcgccaggccatccctctagacgagaacgagggcatctatgtgcaggatgtcaagaccggaaaggtgcgcgctgtgattggaagcacctacatgctgacccaggacgaagtcctgtgggagaaagagctgcctcccggggtggaggagctgctgaacaaggggcaggaccctctggcagacaggggtgagaaggacacagctaagagcctccagcccttggcgccccggaacaagacccgtgtggtcagctaccgcgtgccccacaacgctgcggtgcangtgtacgactaccgagagaagcgag

SEQ ID NO: 13688 - DNA, 515 bp, Homo sapiens
cgacccacgcgtccgccctgctaccctgggagaagcctcagctttctgggcagagtttgtctccctgtcatttatactctcaggctttatacatttacacagtaagttctccctcctggagggttaaaaggaataatttcaacagggtgaaggcctggcacggtggctcacaactgtaatccaaggactttgggaggctgaggtgggtggatcacctgaggtcaggaatttgagaccagcctggccaacttggtgaaaccctgtctctactaaaaacaaaaattagccaggtgaggtggcacacacctatagccccagctactgggggaggctgaggcaggagaattgcttgaacctgggaggcagaggttacagtgagctgagatggcaccactgcactccagcctaggtgacaaagcagcaagacgcagtctcaaaacaaaacaacaacaacaacaaaaaacgggaaaacaggtacagacaatagctgcctggagttgtacagaaacttgatt

SEQ ID NO: 13689 - DNA, 480 bp, Homo sapiens
cgcgtccggtcccactgtcatctcctgggttttctctgctcttttatttggtgatcctggttctttcggccgttcacgtcattgtgtgcacctcagctgaaagttcgtgctacttctgtggcctctcgtggctggcggcaggtggggtgatggtgctggcctcggcgctgctgtgtgtgattgtgtctgttctgaccaacgtgctcgtgggtggaaacaccccaaggaagaaccccatgcatcccagctcaaggtggtcagagctagaccttcttattctgttggggacggcgggccacgtcttgagcctgggcgccagcagcttcgtggaggaggagcaccagacctggtacttccttgtgaacaccctgtgtctagctctgagccaagaaacctacagaaactactttctgggagatgacggtgagcctccgtgtggcctctgtgtggaacaagggcatgacggggccacagcatcgt

SEQ ID NO: 13690 - DNA, 530 bp, Homo sapiens
ggagtcgacccacgcgtccggttaattttacccagaagcaggatagagaaaatattacagagaaaatcacatatcacatgggctcgaaagatgtagaggtttttgacaaatgaagaacaaccataacaggtagagggaacaccatgaaccagggcatgaaactgaaagtgcataacatattctagagagagaagggtgtgggcatgagttagggctggaaaaacaggttggaaacagataagtaagggtctcaaatgcaatgtcaaagagcttgcagtttattttccaggcaatgagtaggcagccaaaaaaaaaaagtaaggatgttttttttttttttcccatggcatcatatttaagaggatggatttaaattgtgtgagaccaaagcatagagactagataagaggcgatcattatttcaaaaagaaataatgaagatccaatgaaggaagtggaaattaaaatagggaagagagtagatggattagagagacatttaagagatggaatcaatagatcctgttact

SEQ ID NO: 13691 - DNA, 427 bp, Homo sapiens
gtccggtttttgtctagagctcttcaggctgtactggaaatgtggtgccggcatctgcttctgacggagtctcactctgtcgctcaggctggagtgcagtggcatgatctcggctcactgcaacgtccgcctcctgggttcaagccattcttctgcctcagcctcccgagtaggtgggactacagtggccatgtgtctgagatctaaccaagggaacatgggtggaactgatgtaagccactttgacaccacaaaacctcccatgggttctctctcttcttctctggtgtacttgttggatggagaagatgctgagaaatagtgggaagtcctaggggatggaagaacccaggattctgaatactccattggaccttacgttttggaatcaggatgatgctggcctcataaaatgagttatggagaa

SEQ ID NO: 13692 - DNA, 475 bp, Homo sapiens
gtccggtgagcgccccgcccgctcagccgccagatcaaccttagcgctggggcgcgggctggggtcgccaggcggtgcgttctgcccgcgcggggctgagagttaggggccggggccggatccggggccgggggtcgcgccgctagccgccagcagcgcagtccgggccgccaccctgcaccctccgccctgtttctgcacccgtctgggttcttgtgccgccgcccgcaagccttcccgagctcagggtggtgagctgcggagacccgtgataattcgttaactaattcaacaaacgggacccttctgtgtgccagaaaccgcaagcagttgctaacccagtgggacaggcggattggaagagcgggaaggtcctggcccagagcagtgtgacacttccctctgtgaccatgaaactctgggtgtctgcattgctgatggcctggtttggtgtcctgagctgtgtgcaggccga

SEQ ID NO: 13693 - DNA, 466 bp, Homo sapiens
cgacccacgcgtccgccggcatgtgctgtccatgaaggatgtgctgcttcagttctacaccagcgctgcggaggagagtgagcccgagtccgtttgctcaaccccgttgaagaggaatgagtcgtcctcctcagtccagaattactttcatttggattctcttcaaaagaagctgaaagaccttgaagaggagaatgttgtacttcgatccgaggccagccagctgaagacagagaccatcacctatgaggagaaggagcagcagctggtcaatgactgcgtgaaggagctgagggatgccaatgtccagattgctagtatctcagaggaactggccaagaagactgaagatgctgcccgccagcaagaggagatcacacacctgctattcgaaatagttgatttgcagaaaaaggcaaaagcttgcgcagaggaaaatgaagaacttgtccagcatctgggggct

SEQ ID NO: 13694 - DNA, 502 bp, Homo sapiens
cgcgtccggaattccagttgtggatgaaggaaatggtgttatgactgcctcaaggttttgtagcaagtcatagggaaccaaaagaggaatcttgttttcctcagaggtcatgccaactccaactcccgttccctaaactgtctctgagccatagactagtaatggactcttcaagctctaccattaggtatcttttaaagaaagctggttattactatttattcatttttttctcttctgtgcagtgcaaaagatatgaaacatcggctaggtttcctgctgcaaaaatctgattcctgtgaacacaattcttcccacaacaagaaggacaaagtggttatttgccagagagtgagccaagaggaagtcaagaaatgggctgaatcactggaaaacctgattagtcatgaatgtgggctggcagctttcaaagctttcttgaagtctgaatatagtgaggagaatattgacttctggatcagctgtgaagagtacaagaaaa

SEQ ID NO: 13695 - DNA, 491 bp, Homo sapiens
gacccacgcgtcctgccggcgacggcggcagtggcggcccggcctgcaggagcccgacggggtctctgccatgggggagtgacgcgcctgcacccgctgttccgcggcagcggcgagacatgaggagaccccgcgacaggggcagcggcggcggctcgtgagccccgggatggaggagaaatacggcggggacgtgctggccggccccggcggcggcggcggccttgggccggtggacgtacccagcgctcgattaacaaaatatattgtgttactatgtttcactaaatttttgaaggctgtgggacttttcgaatcatatgatctcctaaaagctgttcacattgttcagttcatttttatattaaaacttgggactgcattttttatggttttgtttcaaaagccattttcttctgggaaaactattaccaaacaccagataattggatcactaaaaattcctggtagaaaagaatttaaagacaaaa

SEQ ID NO: 13696 - DNA, 503 bp, Homo sapiens
cgtccgaaagagtactgccatgaccgagataggagacacataagaggacagcagaagccctggccctggggaggcttctcggaaggcctggcttcacaggcaggccacagaaggatatcgcgggcacgtgcacccaaagcaagatagtggcttcccttttatatccaatctaatcctgattggatgtccctgaggcccctgctggaaacagccataggagagggcccatggcagtaggggaaagaaggaagaaattccctgcaacaaaacttcagctaaactttgatttgtgtattgtttacataataattttaaagggtacataatgtgtaaagagtttggatagaacctctcttcatactatggttttcgtaaaggatctgttgttgttacggattcattttttccctctatttttataagagcagcagagttgtcttctcaaaacggctgccaagctctgctttttgggaagatggatgcagtcatgtaagcctgagctg

SEQ ID NO: 13697 - DNA, 471 bp, Homo sapiens
cgacccacgcgtccgttcgtgaacgccagcccctgtcctctgttacatagggcgcacccaccccagatgccgcctggcaccaagcgcagccgccgctgccgcactttccacttgtattgatcacctatcaggcccgcgcagacggctcgcccgagcggaccgcgggcagcgcgccagcccttggcaggcccggagcagacgggctccgggaggaaactccttgggagcgccctgtccggagtgccctctgcgctctgcagtgtatctctttctgcctgggaggaggaggaggaggaggaagaggaggacgaggcagatcggaagactgcccttccagaggttggtgagggagatcgcgcaggatttcaaaaccgacctgaggtttcagagcgcagccatcggtgcgctgcaagaggctagcgaagcgtacctggtggggctgttcgaagataccaacctgtgtgccatcca

SEQ ID NO: 13698 - DNA, 499 bp, Homo sapiens
gcgtccggttttaaacagaaatgtaggcattagacttcctgggcggcagacaaaccaaagagcggaaattcatgcagcctgcaaagccattgaacaagcaaagactcaaaacatcaataaactggttctgtatacagacagtatgtttacgataaatggtaagctttcacatttgatttcttctgtttttccagtaactgtgaagggaaattggtaggaggtgttgtaacagggcaggacccaaatgggaacggggggatgacattggtttgtcaggtaccgagcaaagagtgaggattttggagtctcccttctgctgctctgatgttttccacatgcttatttctttgccaggcactggagatgcagtcagaagtggaagtggctcttacttctagtctgtgtgtgtataagtcacttaagatggcgtgttgactgcttctttgggaaatgccctgaataggagcatgtaggggatgcttacgaggctggggaaggc

SEQ ID NO: 13699 - DNA, 487 bp, Homo sapiens
gcgtccgcggacgcgtgggcggacgcgtgggcggacgcgtgggcgggcccgaccccgagcccgaccccgagcccaagcccgagccggagcccgagcgagaccccgagcccgagcccgagcgcgacccccggtgcggcgcggctaccccggcggaggcggcgggcgcggggcgcgctctgaggcccgggggatgcgccgccgcctcgaccatgggcgccgccgcctccaggaggagggcgctgaggagcgaggccatgtcctcggtggcggccaaagtgcgagcagcccgagcgtttggagagtacctgtcccagagtcaccctgagaaccgcaacggcgcagatcacctgctggctgatgcctactctggccacgacgggtcccccgagatgcagccggccccccagaacaagcgccgcctgtccctcgtctccaacggctgctacgagggcagcctctcagaggagcccagcattaggaagcccgc

SEQ ID NO: 13700 - DNA, 497 bp, Homo sapiens
acccacgcgtccggcacgggggagtctgtggtggccagtttacctgggcatctggctgagaggaagaaaggccaacctgatcctgaggggacccagacatatcctttgcactgtccctagaggggcgatgagctttgcagcattaaaaaatggtgaaggggggaaatattttgaaccaaagaccaaatgttaggccgccgttatatttgcagaagctttgagaaccatgcgtatagcctcctgcattctcccctctcctaggagctcttttgtctctgtccttacgaggcgtcatacagaggcagtggggtgggcacagatgagcagagtggatggttcggtgggtccccacgaggcgagtggtggtcatatgtgatggcacgtgttcacacaccctcctgtgtacccccccagggtcaccgaagtccccacacgctggctctccacacccctcctgttccagaaagcatgtccgaaagcagtccaggagattatta

SEQ ID NO: 13701 - DNA, 411 bp, Homo sapiens
agtcgacccacgcgtccggcactccctctggccggcccagggcgccttcagcccaacctccccagccccacgggcgccacggaacccgctcgatctcgccgccaactggtagacatggagacccctgcctggccccgggtcccgcgccccgagaccgccgtcgctcggacgctcctgctcggctgggtcttcgcccaggtggccggcgcttcaggcactacaaatactgtggcagcatataatttaacttggaaatcaactaatttcaagacaattttggagtgggaacccaaacccgtcaatcaagtctacactgttcaaataagcactaagtcaggagattggaaaagcaaatgcttttacacaacagaccaggagtgtgacctcaccgacgagattgtgagggatgtg

SEQ ID NO: 13702 - DNA, 545 bp, Homo sapiens
  misc_feature 401, 420: n = A,T,C or G
tcggagtcgacccacgcgtccgcttttgcatctggatcatttttctcttgccaccaccatgtaagaagtgcctttcacctcccaccatgaacctgaggcctcccgagtcatgtggaaatcgcccccagccaccccaccccagagggctacgtcctggcagagctgggtttggttagttctgagggctgagctggcccagcagctccagacctccagaccttgcactcacctgtgaacttgactctgcaaactcctccaagatgcgcccaccacactcccagtgaacaacacctacaggagcttggagttctattctcagatacatcagcttccacattcctgtgtgtcccagctggagaagcagaagtcccagaccatgtgctaagcacacgtatggggtngggatgaaatccaattgtngtgtgtgaatccatgctggattcatgaagctgaggcccagaggaggaagctttcttaatcaacttctcaacatgggcaaattgtggaactgagttttctgacttcaattctgttttcctgaattc

SEQ ID NO: 13703 - DNA, 470 bp, Homo sapiens
cgaccacgcgttcggtcggtctgtgcggcgctgcggcggagcgggccatggcagtggggagggggcgagtgtagtgctgcgcggggcaggcgggaggtgatcgagagaggcagggatgggggcgccggagtggagcggttgcggcggcctgggctgctgactgcgcacttggaatagtagcaggcggcggcggcggaacgccaggcagtgtatgttttaactggaaaaagtcttccatgaaaacgtcacttttaaaaaataagtaatgccatctgttttcctaaaagactgaaatgggggcgaccattcttagggccccgtggttatgaatgtgcttcagtttcataatgcctcctgctatggcagacatccttgacatctgggcgggggattcacagatagcatttgatggctccatacctgtggaattccttttgcccactgggatttatattcagttggaggtacct

SEQ ID NO: 13704 - DNA, 530 bp, Homo sapiens
ggagtcgccacgcgtccggccggcgacggcggcagtggcggcccggcctgcaggagcccgacggggtctctgccatgggggagtgacgcgcctgcacccgctgttccgcggcagcggcgagacatgaggagaccccgcgacaggggcagcggcggcggctcgtgagccccgggatggaggagaaatacggcggggacgtgctggccggccccggcggcggcggcggccttgggccggtggacgtacccagcgctcgattaacaaaatatattgtgttactatgtttcactaaatttttgaaggctgtgggacttttcgaatcatatgatctcctaaaagctgttcacattgttcagttcatttttatattaaaacttgggactgcattttttatggttttgtttcaaaagccattttcttctgggaaaactattaccaaacaccagtggatcaaaatatttaaacatgcagttgctgggtgtattatttcactcttgtggttttttggcctcactctttgtggaccacta

SEQ ID NO: 13705 - DNA, 531 bp, Homo sapiens
  misc_feature 452: n = A,T,C or G
ggagtcgacccacgcgtccgcggctgctgcctgctctggaggcaggctgggcggtggcggccgagactggcgggggtggacgcccgggccgggctgcgcccgcttcttgcagctgtgaattcctttggacaattgatgatatttatcattgtgcccagtttctacaaataaaagatgggtggattattttctcgatggaggacaaaaccttcaactgtagaagttctagaaagtatagataaggaaattcaagcattggaagaatttagggaaaaaaatcagagattacaaaaattatgggttggaagattaattctgtattcctcagttctctatctgtttacatgcttaattgtatatttgtggtatcttcctgatgaatttacagcaagacttgccatgacactcccattttttgcttttccattgatcatctggagcataagaacagnaattattttcttcttttccaagagaacagaaagaaataatgaagcattggatgatttaaaatcccagaggaaaaaaata

SEQ ID NO: 13706 - DNA, 502 bp, Homo sapiens
gagtcgacccacgcgtccggttttgatacagaatgaaagtgcgtagtattttcattttgtttatttttgccttatacatatagcaagccctcaataaataaatattgaatgaatgaatgagtgagtgaagaatttgtttataacagtctgtcatcttgataacactggaatgtctttggttcttccacttcatcctttatgttttaaacttacacacaccattcttacacgtcactaaaggaaaataccagtatatattggctaaaattttttttttgttgttcaaaactgaaactcaaatgcctaattgggctaggggtcctcttaaaggaggttgatgtttgtcaaatgggttattttttaaaagcagtagataattgcttatttcaaggcaagtaaatgaatttagactagctgttcataggattcatcattttttcccctctcccaaagtaatttgtaagcgtaaaccagtttgtaggtgtaacaaaaccatagttgc

SEQ ID NO: 13707 - DNA, 510 bp, Homo sapiens
gagtcgacccacgcgtccgatgatttctcagtgttctccttagataccaaatacaaaggacgagggatcaagctcagcgaaagtatcaggcatttaaggtatcaggcagcaatgcggggaaaggtgaattttcttcaatcagcataggatggttagggaagagcatttatcactttggttcttatccttcaagccaggggaaaagcaacagtgaggacatcagagacaaaagcatttatagaactaacaaacacaaacgtttgacaagtgagaaagctttattaaagcacacatacatgtcaggggggtgggaaacaaaagagcaagttacagcccgggatcccaagttatgccttccattacaattgcaatccacaccaaatcaatctttgaaaacattcctccattcggttcatacatacagtagaaaccactgtggctgcccttaatccagtgtgcttataggaaatcagttagcagctgactctgttgaaagggatttcctctctg

SEQ ID NO: 13708 - DNA, 488 bp, Homo sapiens
cgaccctattaagaatatcccaggaagatggtgatgaacagcctcagtttacttttccaccagatgaattcactagcaaaaaaattacaacaaaaatattacagcagattgaggaaccattggcactggtgtgaacaattaaccagcaaatgtccttttctaataccatttgaaactagacagctttatttcacatgtacagcatttggcgcctcaagagcaatagtatggttacagaaccgacgtgaagccactgtggagcgaacgagaaccacaagcagtgttaggcgagatgaccctggagagtttcgagttggtcgtctcaagcatgaaagagtaaaagttccacgtggcgagtcactgatggaatgggctgagaatgtcatgcaaatacatgcagatcggaaatcagttcttgaggttgaatttttaggagaagaaggaactggcttgggacccacattagagttttatgctctggtggcagc

SEQ ID NO: 13709 - DNA, 489 bp, Homo sapiens
gggcagaaatacggcggcatgttctgcaacgtggagggcgccttcgagagcaagacgctggatttcgatgccctcagcgtggggcagcggggcgcgaagactcctcggagcggccagggcagcgaccgaggatcggggagtcggcccgggatcgagggggacaccccgcgcaggggccaaggccgggaagagagcagggagcccgcgcccgcctcccccgcccccgccggggtagagatccggagcgccaccggcaaagaggtgttgcagaacctcggccccaaggacaagagtgaccgtctccttatcaagggaggcagaatcgtcaatgatgatcagtccttttatgctgatatttacatggaagatggcttaataaaacaaattggagacaatctgattgttcctggaggagtgaagaccattgaagccaatgggaagatggtgatccctggaggcatcgatgtccatactcactttcagatgcca

SEQ ID NO: 13710 - DNA, 514 bp, Homo sapiens
cgacccacgcgtccgctactgtactttgcagtttgatgtttattaacattctttgggcacctagctacaatataactcaattttctgtgaaaaactattaatcatcctattttttccttgtctttaatatgagataaattttataccactgtttctcaaaccatctgttgtgagggacagttttgctttttaatttccaattgtcagagaccaatacttttgtaaaatataattaaaaacaaacataaaaataaacttattagaaaaatgaaataaaagagaaatgaaataagaataattttattattagatttaacagatcaaatattatttcaatactcagatcaaatgtgcaataagacagggttgcaaaaaatgcacactttttttattaaaatcatttatataagtaatttatataaaaataatattacagttgcaactttctgttgtttctcaactatgaccaaacagaggttacaagtaaagtagcaatcccaatactaaactgcta

SEQ ID NO: 13711 - DNA, 510 bp, Homo sapiens
cgacccacgcgtccgcagcaaaagtgcctggctgaaggacactgttgacccaaaactggtgaccctcaaccaccgcattgctgccctcacaggccttgatgtccggcctccctatgcagagtatctgcaggtggtgaactatggcatcggaggacactatgagcctcactttgaccatgctacgtcaccaagcagccccctctacagaatgaagtcaggaaaccgagttgcaacatttatgatctatctgagctcggtggaagctggaggagccacagccttcatctatgccaacctcagcgtgcctgtggttaggaatgcagcactgttttggtggaacctgcacaggagtggtgaaggggacagtgacacacttcatgctggctgtcctgtcctggtgggagataagtgggtggccaacaagtggatacatgagtatggacaggaattccgcagaccctgcagctccagccctgaagactgaactgttggcagagagaagctggtgga

SEQ ID NO: 13712 - DNA, 499 bp, Homo sapiens
cgacccacgcgtccgcgccaactccggaggcgcggtgctcggcccgggagcgcgagcgggaggagcagagacccgcagccgggagcccgagcgcgggcgatgcaggctccgcgagcggcacctgcggctcctctaagctacgaccgtcgtctccgcggcagcagcgcgggccccagcagcctcggcagccacagccgctgcagccggggcagcctccgctgctgtcgcctcctctgatgcgcttgccctctcccggccccgggactccgggagaatgtgggtcctaggcatcgcggcaactttttgcggattgttcttgcttccaggctttgcgctgcaaatccagtgctaccagtgtgaagaattccagctgaacaacgactgctcctcccccgagttcattgtgaattgcacggtgaacgttcaagacatgtgtcagaaagaagtgatggagcaaagtgccgggatcatgtaccgcaagtcctgtgcatcatcagcg

SEQ ID NO: 13713 - DNA, 483 bp, Homo sapiens
gagtcgacccacgcgtccgagggtggggaaaggaggagaggaagagcactcccttccctggcccctcatccagcctccggtgctgtaaaacgcaggcgctgggccgcgggcggagctgaggacaggccttggctggtcccaggatgagcgacgagtttggttttagctggggattgtgctggcatcctgcgaagctcctcccagccggtctctctgtgctcggttgtcttggggtggggcccatccgccgaggtggggaccgataggagaagccggtgggttgtacccttacacttgtggagtctcctcttgcctctacctactccgcctttgtccttaaggtttttgcaggccagtgccaaacacacactaactgtcctggcctctccgtgacacaagtctcttcccagccttcctcacaggcttctgccgcccccctcatctccaccctcccccatatctgtttgcattaggagttccacg

SEQ ID NO: 13714 - DNA, 459 bp, Homo sapiens
ggagtcgacccacgcgtccgcggacgcgtggggccgggacaactggtcttatcacggaggctggggccaggcagcccttcggttcgggtgggcccatggaccccagtccaacgccgagggaataggaccatccaaaagcggaaccttcgcctcagaaaaagggtgcgggacccctcctcaccgtgcggtcacgcgtggaccctgccagcagccaggccatggagctctctgatgtcaccctcattgagggtgtgggtaatgaggtgatggtggtggcaggtggggtaggtgctgattctagccttggtcctagcttggctctctacctacgtagcagacagcggtagcaaccagctcctgggcgctattgtgtcaagaggcgacacatccgtccttcacctggggcatgtggaccacctgggggcaggccaaggctaccccgagccaactgaactcccc

SEQ ID NO: 13715 - DNA, 500 bp, Homo sapiens
tcgacccacgcgtccgggaggctccatgttgtcccctcagcgagtggcagcagctgcctcaagaggagcagatgatgccatggagagcagcaagcctggtccagtgcaggttgttttggttcagaaagatcaacattcctttgagctagatgagaaagccttggccagcatcctcttgcaggaccacatccgagatcttgatgtggtggtggtttcagtggctggtgccttccgaaagggcaagtccttcattctggattttatgctacgatacttatattctcagaaggaaagtggccattcaaattggttgggtgacccagaagaaccgttaacaggattttcctggagagggggatctgatccagaaaccactgggattcaaatctggagtgaagttttcactgtggagaagccaggtgggaagaaggttgcaggtgttctgatggatacccaaggggcatttgacagccagtcaactgtgaaagactgtgctacca

SEQ ID NO: 13716 - DNA, 536 bp, Homo sapiens
ccacgcgtccgcttctccgaatatagcaacgtccagcagtgtccacactgtgggaacctggactaccacttcgtgaagccattttcctccttcaaagttctcgaagcttattgatgaaagctttgctttagtaatagctattttattgatattattactttattacatatcttttatagggaaacattctgtgacattaatttcctttctaatttaaaggagagttactttgttgtatgtgtgccactaaaataggggctgcccttgccctgtcttgattcccgagtgttaatctgtggttttgaccagagcccagatgggtaatcctgtgcatttggttggggttcactcttaccaagaatctttgatgcagctttaagatggtggggagatggggttgaatttaggaaaggaattttgtgggttataaactaagagcttgataggagttggaaggaaactcttactaaaatgttaactttctaaaaaccttcttttagatcttccttgggcctttggaaaaatatgtgacaagt

SEQ ID NO: 13717 - DNA, 532 bp, Homo sapiens
  misc_feature 513: n = A,T,C or G
cgcgtccgatagtatctcgtgttttggggatgcctttccttaccagattcttctaaagcccagctgcacccacccttaagtgggagataaggcttctgcccgcgggctctgcgttcgtccacccggccccacgtttgctgtggactaaacaggagccactggactagagtacacttgactctcggctctgcggaccaaaaattccaggactaaggaatagcaaggttaggctgaaacagtccacacagggcttgcggtaaacgtcttttcaggagccactcgcccagtgcagtaagtcgtgtacttagttgactcgagcgctccagggagacgcccgaccctactctgcgccgccccggggcaccagctctgcttcctccaggtccactgaggcaggcacgcccagctctgggacagtcagtaaacaagccacgaaccgcgccagggatcagagaacccagagtccccgcccagctgccggcacagccaatcgcagcgcagccaggcggcggngcggtgccggccgaaccca

SEQ ID NO: 13718 - DNA, 538 bp, Homo sapiens
  misc_feature 509: n = A,T,C or G
cgcgtccgtgacttgggtctcaagggatccaaggtcctgtgtctcagggacctctgatgggattgaatccaagaggaatgcaggggcctccaggcccgcgggagaaccagggtcctgctccccaagggatgattatgggccacccgcctcaagagatgagaggacctcaccctccaggtggactactgggacacggccctcaggaaatgagaggtcctcaggagatccgaggcatgcaggggcctccaccccaaggatcaatgctgggacctccccaggaattgcgagggcctccaggctcacaaagtcagcaggggccgccccagggctctttaggacctccaccccagggtggcatgcaaggaccccccggacctcagggacagcagaacccagcaagagggccacatccatctcaagggccaataccattccagcaacagaaaacgcctctgctaggtgatgggccccgggcccccttcaaccaggaaggacagagcacaggcccnccacccctgataccaggcctagggcagca

SEQ ID NO: 13719 - DNA, 410 bp, Homo sapiens
  misc_feature 191, 221: n = A,T,C or G
cgcatgcgcggagcgcggcgcgcgcggcggttgggccgttggctgttcggccctgggatccgccgccactccgcgatcagaccgctctgtgccgcgagccgccgtgagcactcggattcaagccggcgccaacgagtccgggggcatcgcccgcagcggccaagctcatggccggctgagcgggacgccgnctccgcctcagccaccgccgccgccgccgncttcttctcctcagccggcggcggcccgggcccagcaaccatggctgaagactactgggacgggcgcctgcggcgaacaggaggaaaggaggtcgcgcggcctcatcccgggccgccgccccaggcgccgccgcgccggccccgcggctctgaggttgctcgcgcgcccccgccgtcactattccaggt

SEQ ID NO: 13720 - DNA, 290 bp, Homo sapiens
gacccacgctttgcgacccggcaccaccgtagtttttacgcccggtgagcgctccacccgcacctacaagcgcgtgtatgatgaggtgtacggcgacgaggacctgcttgagcaggccaacgagcgcctcggggagtttgcctacggaaagcggcataaggacatgttggcgttgccgctggacgagggcaacccaacacctagcctaaagcccgtgacactgcagcaggtgctgcccacgcttgcaccgtccgaagaaaagcgcggcctaaagcgcgagtctggtgact

SEQ ID NO: 13721 - DNA, 540 bp, Homo sapiens
  misc_feature 463: n = A,T,C or G
gcgtcgcgggctccgaccagccgcgcttctgtccgcctgcagggcattccagaaagatgaggatatttgctgtctttatattcatgacctactggcatttgctgaacgcatttactgtcacggttcccaaggacctatatgtggtagagtatggtagcaatatgacaattgaatgcaaattcccagtagaaaaacaattagacctggctgcactaattgtctattgggaaatggaggataagaacattattcaatttgtgcatggagaggaagacctgaaggttcagcatagtagctacagacagagggcccggctgttgaaggaccagctctccctgggaaatgctgcacttcagatcacagatgtgaaattgcaggatgcaggggtgtaccgctgcatgatcagctatggtggtgccgactacaagcgaattactgtgaaagtcaatgccccatacaacanaatcaaccaaagaattttggttgtggatccagtcacctctgaacatgaactgacatgtcaggctgagggctacccca

SEQ ID NO: 13722 - DNA, 510 bp, Homo sapiens
cgtccgggaactcagcaacggtttcttcatccaggaccagattgctctggtggagagggggggctgctccttcctctccaagactcgggtggtccaggagcacggcgggcgggcggtgatcatctctgacaacgcagttgacaatgacagcttctacgtggagatgatccaggacagtacccagcgcacagctgacatccccgccctcttcctgctcggccgagacggctacatgatccgccgctctctggaacagcatgggctgccatgggccatcatttccatcccagtcaatgtcaccagcatccccacctttgagctgctgcaaccgccctggaccttctggtagaagagtttgtcccacattccagccataagtgactctgagctgggaaggggaaacccaggaattttgctacttggaatttggagatagcatctggggacaagtggagccaggtagaggaaaagggtttgggcgttgctaggctgaaagggaagccacaccac

SEQ ID NO: 13723 - DNA, 510 bp, Homo sapiens
tggaggagtcccatcccctcttcagccgcagcacccctccctcccatcctctagctcttcccgcggtggtcgcctccctccgaccctgctctcccctcctgggccccgcgcaaagccccctctgttccagctcccgggcctcggctgcctccccgccctcccatcccttcctcttcccagggcctggagcgctcccttacattcctgagatgcccttcctcggggctgtccccctttgcctccccagcatcccatttctaggcctttttcaagacccttccagagcggcccctttccagctccctttctcgtttccatttccaactttgcctcttttgcctctttgttcactttgcttccaagctcccctccctctttcccttcgtcttaccctgctttgatctacgcagccccaaactcaagctccccgctttcaggtggtgcgaggggttgttgggggtccggaagggcctgccagtccatttttcgaggggggcccattgctctgca

SEQ ID NO: 13724 - DNA, 558 bp, Homo sapiens
cgtccgagatcgcgagccgccgccctttttttttttttttataagattattagtataaaaggggagagaggttagggccctgggaaaggtgggagatcagccagagacaggtttcccagaacagaatgtctggcctttgtggtgaggagggactgtggtatgagccgcagaagcgggccaggggtaaaccctcctgtgcgtccttccttcagcctggtcctgagggtgaccctttgatcctgggttctccaggtagggctgtgagctgtgagttggatccttttggtgaaatggtctctctcatctggcctgtcactcaatgtggaatagagtgagtgagttctatgggttctaagtcctgctctggaaccataagtaagttatcctctctgggcttcagtttttcatggaaagttgcgttaagaatctagtttaaggccaggcatggtggctcacgcctgtaatcccagcactttgggaggccaaggaaggtggatcatgaggtcaggagatcgagaccatcctggctaacatgatgaaaccgtgtctttactaaaa

SEQ ID NO: 13725 - DNA, 262 bp, Homo sapiens
tccggccttcgttctcaccaagtcctccctgccagtggtgagcaccttcggcctccaggtgcctttcttcttcttcgcggccatctgcttggtgagcctggtgttcacaggctgctgtgtgccccagaccaaggggacggtcccttggagcaaatcgagtcctttttccgcacggggagaaggtccttcttgcgctaggtcaaggtccccgcctggagggggccaaacccccagtggctgggcctctgtgttggttacaaac

SEQ ID NO: 13726 - DNA, 416 bp, Homo sapiens
cgcgtccgcggacgcgtgggcggacgcgtgggtcagcctccacctggaagagagctagggccgggcaggccgggcagctgccaccccgcccggcccgacgccccgcatgccccgaagtccctggcgcccacccggccgcggccctgcgtgtgacccgcgggtcgatacctggcagccccagtgctggggcgccgcggccctgctcgcccaggaggagagcgagggccccacactgagtctcttgaagcctcacgtttccctgggggggtgctgcatcgtcgggtgtccctcaccccacctggggaacctctgtcttcaggtcaccccttttcaggggcctgggttgctcatgtcacaagccacttttaaggcccgagtcacctgtgtccctgtgtcctcagggcctgtgttacttt

SEQ ID NO: 13727 - DNA, 472 bp, Homo sapiens
cgacccacgcgtccgggaccctgctcatggagaacatcagcagctggcgctccttcgctgacgccctgggctacgtgaacctgccgctcacctttttctgccgggcagagctggatagtgagcccgagcgggtggcgtccgtcctggaaaagctgaaggaggactgtaacaacactgagaacaaagaacggaagtccttccagaaggagcttgtgatggccctactgaagatggactgccagggcctggtggtcagactcatccaggactttgtgctcctgaccacggctgtagaggtggcccaacgctggcgggagctggctgagaagctggccaaggtctgcaagcagcagatggacgcctacgagtctccacaccgggacaggaacggggtttgtggacagcgaggccatgtggaagcctgcgtatgacttcttactcacctggagccatcagatcggtgacagctacc

SEQ ID NO: 13728 - DNA, 491 bp, Homo sapiens
tcgacccacgcgtccgcgaagcgtgcaccgctgcgcccccgccggtgagcgcggggagcgccgcaagcccaacgccgggggcagccccgctccggtgcgccgccgggcggaggcctcgccggtgcagaaaaaggagaagaaggacaaggagcgggaaaacgagaaggagaagagtgccctagcccgggagcgcagcctcaagaagcgccagtcgctgcccgcctccccacgtgcccgcctctctgccagcaccgcctctgagctcagccccaaatccaaggccaggccatcctctccctccacatcctggcacaggcctgcctccccctgccccagcccagggccaggccacactctgcctccaaagccaccgtccccccgaggcaccactgcatcccccaaggggcgggttcggaggaaggaggaggcaaaggagagccccagcgccgcaaggcccgaggacaagagccagagcaagcgcagggccagta

SEQ ID NO: 13729 - DNA, 425 bp, Homo sapiens
  misc_feature 369: n = A,T,C or G
gaaacggactttctcatcatgctttcctatggtgggtatgtggggccagctgataccaaccaactggcctgtatctatctatctggatttgacttgaatttttaaaatgtgtatcgtttaaaaaaaaaaatgtttgcaaattttgcacataggatcttgcactgttcattttcagtggggtgagtcttcacactaaaaacacaagcagagctcctgggaaaagagactggaagtggttcaggataaagagatccatggtgggcagggctcttaggtcacagagctctagaagcagctggacttgaacccacaatggcttgtgtaaattcgtaaatttcatggtttctaggaaaagctgcattggggtgngggagacccaagtttgcctcataggcagaggattctccaggaagcatggaaaatgg

SEQ ID NO: 13730 - DNA, 568 bp, Homo sapiens
gcgtccggaagaactgtggaactgcggttggcagacaattttgttacaaatattaaaaggaaagattttgccaatatgaccagcttggtggacctgactctatccaggaatacaataagttttattacacctcatgctttcgctgacctacgaaatttgagggctttgcatttgaatagcaacagattgactaaaattacaaatgatatgttcagtggtctttccaatcttcatcatttgatactgaacaacaatcagctgactttaatttcctctacagcgtttgatgatgtctttgcccttgaggagctggatctgtcctataataatctagaaaccattccttgggatgctgttgagaagatggttagcttgcatacccttagtttggatcacaatatgattgataacattcctaaggggaccttctcccatttgcacaagatgactcggttagatgtgacatcaaataaattgcagaagctaccacctgaccctctctttcagcgagctcaggtactagcaacctcaggaatcataagcccatctacttttgcattaagttttg

SEQ ID NO: 13731 - DNA, 515 bp, Homo sapiens
cttccttttactctgtctcacctcctttaggtgagtacttccttaaataagtgctaaacatacatatgcggaactggaaagctttggttagccttgccttaggtaatcagcctagtttacactgtttccagggagtagttgaattactataaaccattagccacttgtctctgcaccatttatcacaccaggacagggtctctcaacctgggcgctactgtcatttggggccaggtgattcttccttgcaggggctgtcctgtaccttgtaggacagcagccctgtcctagaaggtatgtttagcagcattcctggcctctagctacccgatgccagagcatgctccccccgcagtcatgacaatcaaaaaatgtctccagacattgtcaaatgcctcctggggggcagtatttctcaagcacttttaagcaaaggtaagtattcatacaagaaatttagggggaaaaaacattgtttaaataaaagctatgtgttcctattaacaatatttttg

SEQ ID NO: 13732 - DNA, 527 bp, Homo sapiens
cgacccacgcgtccgggtccccgcgactcccggactggagaaaacggctcttgcgatggggcgaagtccgagctgcggcgggcgttggtccgtgcagggaagtgggaatcgttaggttcgttctggacccgccgccccatggcccaggcgtctcgctcaggtagcctgcctccactcgttatcgtgcccccgctgagggcgcaacccgggggcactggggaggagcagtgggagagaagtcgaacgggcggtcttcgctgggcagagctcagcagtacttggcagcatgggacccagcttccttcctgctcctgatccaaaaggacttacctcctctgttgcatgaggcagaagctttgtatagcctggcctcagaggaaagcttagctctggaagtggagcagcagctgggcctggagatccagaagctgactgcacagatccagctcctgcctgaagagtcactaagtgtcttttctcaagaatgtcataaacaagccatgcaaggtttcaagctctacatgcca

SEQ ID NO: 13733 - DNA, 509 bp, Homo sapiens
tcgaccccgcgtccgcacgtgcctggcgcgcggcggccgtggctaaggctgctacgaagcgagcttgggaggagcagcggcctgcggggcagaggagcatcccggctaccacgtcccaagcggcgtggcccgcgggtcatggccaaaggagaaggcgccgagagcggctccgcggcggggctgctacccaccagcatcctccaaagcactgaacgcccggcccaggtgaagaaagaaccgaaaaagaagaaacaacagttgtctgtttgcaacaagctttgctatgcacttgggggagccccctaccaggtgacgggctgcgccctgggtttcttccttcagatctacctattggatgtggctcacgtgggccctctctctgccttcatcatcctgtttgtgggccgagcctgggatgccatcacagaccccctgctgggcctctgcatcagcaaatccccctggacctgcctgggtcgccttatgccctggatcatgttcttcacgcc

SEQ ID NO: 13734 - DNA, 512 bp, Homo sapiens
cgacccacgcgtccggaaaagaagagtggccagttccaggggtagctccaaaagagactgcagagctgtccgagaccctgacaagggaggcccaaggcaacagttccgcaggagtggaggcagcagagcagaggcctgtggaagatggcgagaggggcatgaagccaacagaagggtggaaatggaccctgaactccgggaaggctcgagaatggacacccagggacatagaggctcaaactcagaaaccagaacctccagagtcagcagagaagcttctggaatctcccggtgtggaggctggagaaggggaggctgagaaggaggaggcgggggctcagggcaggcctctgagagccctgcagaactgctgctctgtgccctcccccctcccaccagaggacgctgggactggaggcctgagacagcaggaagaggaagcagtggagctttcagcccccaccaccagcccctctgtctcccccacccccagccccaactgccccccaacc

SEQ ID NO: 13735 - DNA, 553 bp, Homo sapiens
cgacccacgcgtccgaaaagaatgggtgaaccaatcggcctttgtgaatttattcagtgccttctctgtaccaagcactgggtaaggcacttttgtggagcattagacagtaaccctcaaggagctagagaaccggatgggagacatgagcggtaattaactcacttgttccccagagtttctatttgttttgattttctttttctgtgacttattttcctattttctttcctccatgtaattttcactatggcccaactaatataaacacctggaaattacaaggaaaaaaaattcttcctctaataactttccaaatttgtggaatatttatttgtaatagcagttatcagttatgcttatatagcattaaaaattctcctcctttgactacacacacaaccacagtgtggttctaatcatggagatatcagtaatttttagtaactgaattttgaggacatttctctgtttagcatgtatgcaaactgatatgtaatctgaggttccaaagtcaatttttttcttttttttttgagatggagtcttactc

SEQ ID NO: 13736 - DNA, 536 bp, Homo sapiens
ggagtcgacccacgcgtccggtttttgtgaggcagtgagacctaaggtaacctttatcaaaaggatggagttgggaaaaggaaaactactcaggactggactgaatgcgttgcatcaagcagtgcatccgatccatggccttgcctggaccgatgggaatcaagttgtcctaactgatttgcggcttcacagtggagaggtcaagtttggggactccaaagtcattggacagtttgaatgtgtctgtgggttgtcctgggccccacctgttgcagatgatacacctgttctactcgctgtccagcatgagaagcatgtcactgtgtggcagctgtgtcccagccctatggagtcaagcaaatggctgacgtctcagacttgtgagattagaggatcactacctatccttccccagggctgtgtgtggcacccaaaatgtgctattctgactgtgttgactgctcaagatgtctccattttccctaatgttcactctgatgaatcccaagtaaaggcagacatcaacacccagggcc

SEQ ID NO: 13737 - DNA, 474 bp, Homo sapiens
tcgacccacgcgtccgcgccctgcctgcagttgagattcagatgccttctgacagagttcagcctcttggagagtcttggggattgttggcacctaaacagaatcagtgacccgggtgctttgtggccagcagcacagaatcaaacccgcatcccagcattgggccacccatctgagggaggccaaaatcatcacagatgctgctgtgctgcagacagatacatgctagtccagagagccgcccctgagatggctgtgagaaccatgtgtctaaggcgtaagataaggatggaaggctgtccaagttatttggaaggcctcggcagcttgggattagcttgggagcgcagcgctgcaaagtggaaaatatgaaaagaccacacaggcccagcagtccagaaactgggcaaaaatattctgcagtggggatttatttttccaagcaggtaacagaggctagtgagaaagaaaagc

SEQ ID NO: 13738 - DNA, 511 bp, Homo sapiens
ccacgcgtccggagttacggagttgttcctttactggctgaaagatatattcgaattgtaaagatgctttttctcatgcattgaaattatacattatttgtagggaattgcatgcttttttttttttttctcccgagacagggtcttgctctggcgcccaggctggagtacagcggcatgatcttggctcacttcagccttgacttgggctcaagtgatcctcctacctgagccttctgagtaactgggactacaggtgtgcactcctcgcctggctaattttttattttttgtacaggcaggatcttgccaccttgcccaggctggtcttgaactcctgagctcatgccatctgcctgccttagtctcccaaaatgctgggattacaggagtgagccaccatgcccggctggcagttgcatggaagagaacacctgtttatggcttaccctctagaatttctaatttatgtggcctgttgaaatttttgtttttttacctttattgaaac

SEQ ID NO: 13739 - DNA, 508 bp, Homo sapiens
ggagtcgacccacgcgtccgctcggcttcctgctgatggtcagggttttggcaactccccggtgtgagaggggtagggagtgctcccggcggcgacggggccgagttcaccagccgccggggcagtagtcgaaggcccggcgcggcatgtcctgggtgccgcggtgcgggcagtgaacgcgcgccgggcgggatgggccggcgccgggcgccagagctgtaccgggctccgttcccgttgtacgcgcttcaggtcgaccccagcactgggctgctcatcgctgcgggcggaggaggcgccgccaagacaggcataaagaatggcgtgcactttctgcagctagagctgattaatgggcgcttgagtgcctccttgctgcactcccatgacacagagacacgggccaccatgaacttggcactggctggtgacatccttgctgcagggcaggatgcccactgtcagcttctgcgctttcaggcacatcaacagcagggcaacaaggcag

SEQ ID NO: 13740 - DNA, 496 bp, Homo sapiens
ggagtcgacccacgcgtccgcgtacgcgtgggcgcgaccgagcgtgcggactggcctcccaagcgtggggcgacaagctgccggagctgcaatgggccgcggctggggattcttgtttggcctcctgggcgccgtgtggctgctcagctcgggccacggagaggagcagcccccggagacagcggcacagaggtgcttctgccaggttagtggttacttggatgattgtacctgtgatgttgaaaccattgatagatttaataactacaggcttttcccaagactacaaaaacttcttgaaagtgactactttaggtattacaaggtaaacctgaagaggccgtgtcctttctggaatgacatcagccagtgtggaagaagggactgtgctgtcaaaccatgtcaatctgatgaaggtcctgacggaattaaatctgcgagctacaagtattctgaagaagccaataatctcattgaagaatgtgaacaagctgaa

SEQ ID NO: 13741 - DNA, 482 bp, Homo sapiens
agtcgacccacgcgtccgtagcagttacatctagaggctattatggattggaggatgagaagggaactgcatgtacctcaacaaggcgtcggtcaacaccgcgaagtttggcaggcttgacaagtggagtttttgaatctataatggttcaagttttgagacaggaagaacagctgagagcaaaagaagaaaaaaggcttcgggagcaggaaagaaaagaagcagaagaagctagtcaaaaggaaatagaagaatgggaaagaaaacttctagctcaagcagctccaacttgtatggagaccatgtgggaaattccagctattgggcatttcctttgtttagctcagcaaattctaaatttgccagaaatagtcttttacgaactggaacgttgtcttctgatgcctcagtgtaatgcttttctatcgaaaataatgacttcttaattaagtcctccccatcgcagacctaccttacttcga

SEQ ID NO: 13742 - DNA, 518 bp, Homo sapiens
ccacgcgtccgagtcccctgtctgtggcatcctgacactcccgactgtgcgctgactctccccgcccagccagcagccttttccagagaggctgtggtccatagcctctgttcgttttcactgcaggaccaggcacgaaagttaaaacaaaatgaagattttttctgaatctcataaaacagtgtttgttgtggatcactgcccttatatggcagaatcttgcaggcagcatgtcgagtttgatatgctggtgaagaatagaacccaaggaatcattcctttggcccccatatctaaatcattgtggacttgctcagtagaatcttccatggaatattgtagaataatgtatgatatatttcctttcaaaaagctggtgaattttattgtgagtgactctggagcacatgttttaaattcttggactcaagaagaccaaaatttacaggagctaatggcagcattagccgctgttgggcctcctaatcctcgggcagatccagagtgctgcagtattc

SEQ ID NO: 13743 - DNA, 522 bp, Homo sapiens
tcgacccacgcgtccgattcgttgtctgatggacctgcttgcaaaaggccagctctgttgcattcccaatttttgacaccacctcaaacaccaacgcccggggagagcatggaagatgttcatctcaatgaacccaaacaggagagcagtgctgatctgcttcagaacattatcaacattaagaatgaatgcagccccgtttccctgaacacagttcaagttagctggctgaaccccgtggtggtccctcagagctcccccgcagagcagtgtcaggacttccatggagggcaggtcttttctccacctcagaaatgccaaccattccaagtcaggggctcccaacaaatgatagaccaggcttccctgtaccagtattctccacagaaccagcatgtagagcagcagccacactacacccacaaaccaactctggaatacagtccttttcccatacctccccagtcccccgcttatgaaccaaacctctttgatggtccagaatcacagttttgcccaaac

SEQ ID NO: 13744 - DNA, 495 bp, Homo sapiens
cgcgtccggctgggacctcctcctgttggggtcccatgaacccttcccagttcaacctttcaggacggaacccccagaaacaggcccggacctcctcctctaccacccccaatcgaaagacaatgcctgtggaagacaagtcagaccccccagaggggtctgaggaagccgcagagccccggatggacacaccagaagaccaagatttaccgccctgcccagaggacatcgccaaggaaaaacgcactccagcacctgagcctgagccttgtgaggcgtccgagctgccagcaaagagattgaggagctcagaagagcccacagagaaggaacctccagggcagttacaggtgaaggcccagccgcaggcccggatgacagtaccgaaacagacacagacaccagacctgctgcctgaggccctggaagcccaagtgctgccacgattccagccacgggtcctggcaggtccaggcccaggtggcagtcacagac

SEQ ID NO: 13745 - DNA, 507 bp, Homo sapiens
  misc_feature 360: n = A,T,C or G
ccacgcgtccgcttaaatgactcgttatcattttgcaatgaatggaaaatcattctcagtgatactggagcattttcaagaccttgttcctaagttgatgttgcatggcaccgtgtttgcccgtatggcacctgatcagaagacacagttgatagaagcattgcaaaatgttgattattttgttgggatgtgtggtgatggcgcaaatgattgtggtgctttgaagagggcacacggaggcatttccttatcggagctcgaagcttcagtggcatctccctttacctctaagactcctagtatttcctgtgtgccaaaccttatcagggaaggccgtgctgctttaataacttccttctngtgtgtttaaattcatggcattgtacagcattatccagtacttcagtgttactctgctgtattctatcttaagtaacctaggagatttccagtttctcttaattgatctggcaatattttggtagtggtatttacaatgagtttaaa

SEQ ID NO: 13746 - DNA, 497 bp, Homo sapiens
gtggcaccagacactcccgactgtgcgctgactctccccgcccagccagcagccttttccagagaggctgtggtccatagcggctgttcgttttcactgcaggaccaggcacgaaagttaaaacaaaatgaagaattttttctgaatctcataaaacagtgtttgttgtggatcactgcccttatatggcagaatcttgcaggcagcatgtcgagtttgatatgctggtgaagaatagaacccaaggaatcattcctttggcccccatatctaaatcattgtggacttgctcagtagaatcttccatggaatattgtagaataatgtatgatatatttcctttcaaaaagctggtgaattttattgtgagtgactctggagcacatgttttaaattcttggactcaagaagaccaaaatttacaggagctaatggcagcattagccgctgttgggcctcctaatcctcgggcagatccagagtgctgcagtattctg

SEQ ID NO: 13747 - DNA, 500 bp, Homo sapiens
cgcgtccgggcaaggagcaccaactcaaggagctacaccccttgcatcggcttgaccgccttacctcaggggtgcttatgtttgccaagacagctgcagtctgtgagagaattcacgagcaggttcgggaccggcagctggagaaggagtacgtgtgccgggtggaaggggagttccccactgaggaagtgacctgtaaagaacccatcttagtggtgtcttacaaagtaggggtgtgccgtgtagatccccggggcaagccctgtgagacagtgttccagaggctaagctacaatggccagtccagtgtggtacggtgccggccactcacaggccgcacacaccagattcgagtccaccttcagttcttgggccatcccattctcaacgaccccatctacaactcagttgcctggggtccttctcgaggccggggcggctacattcccaagacaaacgaggagttgctacgggacctggtagcagagcaccaggccaaa

SEQ ID NO: 13748 - DNA, 497 bp, Homo sapiens
tcgacccacgcgtccgcgaccgctgggcagcgggtgttggcgcggtatccccgccctgcccagcatctgccccacgtttcttcaggctaaactaccgggatcccgggcttcttcctaaagtaaaactcgctccggaaaggccaacagtccagcggccagacgggcacctgggaacgcgggcctaacgcgtactggagacggagtggcgcccggcactgcgcgcctcctccccgccgggagactgcgtgctaagctcagcaaagccccgctgtggagacggagccatgtcgcccattacctaatgaaactgagaagggagactcagtctctcttctagccccgagcgcaagctctgctggacttggcatcgtccgccctccacgatcccacactccgggttttccccattcccagctcggctgcaaccgagagacagacggaagaaactgccaatggaaggacgcaaagcgtaacttttgtgttcgcccgccactctc

SEQ ID NO: 13749 - DNA, 462 bp, Homo sapiens
gcgtccggcggtcctcctggccctgtaatgtcggggccaggccgggggaggatggcgccctagaacccggccttgctggggtaggggcgggaggggacggggtggggaccggccatgtcggaggtgacccggagtctgctgcagcgctggggcgccagttctaggagaggcgccgacttcgactcttggggccagctggtggaggcgatagacgagtatcagatattagcaagacatctacaaaaggaggcccaagctcaacacaataattctgaattcacagaagaacaaaagaaaaccataggcaaaattgcaacatgcttggaattgcgaagtgcagctttacagtccacacaggctcaagaagaatttaaactggaggacctgaagaagctagaaccaatcctaaagaatattcttacatataataaagaaatcccatttggtgttcagcctggccca

SEQ ID NO: 13750 - DNA, 529 bp, Homo sapiens
gcgtccggcctgagccggcgggtcccctgtgtccgccgcggctgtcgtcccccgctcccgccacttccggggtcgcagtcccgggcatggagccgcgaccgtgaggcgccgctggacccgggacgacctgcccagtccggccgccgccccacgtcccggtctgtgtcccacgcctgcagctggaatggaggctctctggaccctttagaaggcacccctgccctcctgaggtcagctgagcggttaatgcggaaggttaagaaactgcgcctggacaaggagaacaccggaagttggagaagcttctcgctgaattccgagggggctgagaggatggccaccaccgggaccccaacggccgaccgaggcgacgcagccgccacagatgacccggccgcccgcttccaggtgcagaagcactcgtgggacgggctccggagcatcatccacggcagccgcaagtactcgggcctcattgtcaacaaggcgccccacgacttcaagttgtgcagaagacgatgagtctggg

SEQ ID NO: 13751 - DNA, 472 bp, Homo sapiens
  misc_feature 326: n = A,T,C or G
cgcgtccggccaggagccaggccgagcgggagctgaccaggcttgactcgggtacagaacgaggcaccagtccccttgcgaaccgaagggcctcgcagtggatggaggaggcccagccctgaggtcaacgccaaccaggctagcctggcacggtgcctacagggtgggtaggcgggcgtgccgcagccgtccagggccttccctcaggtcccgggcgaggggcctacgctgcggcccggcaacaaggcccgactcggcccctcgggaccagagccccacccgatcggaagcggatcctttaccagggccataggccagtgactagngcggccccttgggcctcccatcggggccggactaggacgaggcccgggggaggcccctggcctaccagacccttttctcaggccgacagccgtcaggaaagatgcaacgtgctctgccaggcgcccgccagcatttggggccattc

SEQ ID NO: 13752 - DNA, 471 bp, Homo sapiens
gtcgacccacgcgtccggccaagagcccgcagcacgccgccgccgcagcctaggtcacctccagcatctagcacaacgtctgcaatggaacaggcgagctgtgaatatttgtggaatgcatgggtggactaaagacctatcacctcactctagaatgcccagcatgttggagcatgaggaccaagaaccatggtgttcctccactcatcagagccgtatcattttgatgcatgcgccaagaaagaaaattcaatcatcagactgaagcaatcaaactccaaatggtgctgtaaactgaaccacacatagacatgccattcttctaaggacccttagatccaccccaggaggagcgctagctgctgttccccattcgatgccccttttcggccggaagtagccggaaagattcgccgcccaaaatcccctaacagcagttagtgtggcatctccacagcagggagccgttgt

SEQ ID NO: 13753 - DNA, 496 bp, Homo sapiens
  misc_feature 329: n = A,T,C or G
ccacgcgtccggcagtttccaatggtgtgtactaatttgagaaaatgaatgtgtatacatacaagagtaagtcagattgttagactcatccctcagtattccatatgttttgtgactgattttacagttctctctacctttctcatttacaaaaaaaaaaaagaaaagaaaatttgattcagcaattcctaaaagtattgtattcagtgacatctttggaaacaccagtttctgttatcaacttcaaataatagtcaagttttatgtatgatctaaagggaaaacaagtttgtttttcaatcctgtgataatttttcttttagaatganggtgttgcaagaaatggaaaattaaaaaaaccactctgtaacaattttgctgtgcttctttgatttttctctgtttttgtttaatgggtaccttatatttgtacctttacatattgaattcatgaggagagttatgcacagcctaattatttgacattcaagggttt

SEQ ID NO: 13754 - DNA, 491 bp, Homo sapiens
ccacgcgtccggcggtggcggtggtggcggtggcggcggtggcggcggcggcgaagggggcggagaggaaggagcgcggcgggaccgggccgggacagcgcgtactttgggctccgggagtcgctccgcgcccgcggttgtagcagctgccgctgcagccatagcagcaggtcagtcattggcaccatgaactggaataaaggtggtcctggcactaagcgaggatttggctttggaggttttgccatcagtgctgggaaaaaggaggaacccaaactcccacagcagtcccacagtgcctttggggcaaccagctcttcttctggatttggaaagtcagctccaccacagcttccttctttctacaaaattggatctaagcgggccaactttgatgaagaaaatgcctattttgaagatgaggaagaagattctagcaacgttgatttaccttacattcctgctgaaaacttaccaacttgccagcaatt

SEQ ID NO: 13755 - DNA, 413 bp, Homo sapiens
ccggccgccgccgccgccaccgccgccaccgcctgggggttggttgaggcggacggcggggtccgggccggagtacgtcgttcccgctgcgctaggggaagcgggcagtcagaaaaatgggtaagaagagtcgagtaaaaactcagaaatctggcactggtgctacagcaactgtgtcaccaaaggaaatcttgaacctgaccagtgagctgctgcagaaatgcagcagtccggcgcctggccaggaagagtgggaagagtatgtgcagatccggactctggttgagaaaatacgaaaaagcaaaaaggtctgtccgttacttttgatggaaaaagagaagattactttcctgatctaatgaaatgggcctctgaaaatggggcttctgtcgaggggtttgaaatggttaact

SEQ ID NO: 13756 - DNA, 457 bp, Homo sapiens
cgacccacgcgtccgcacgcaccaaagggcaaatactcggtagcgactcagagggaaagtggggtctctcctgggagagcaggaggctgccagaaaagaactcaggtcaggggtgcataggcggctgaggagtgcgggacgggctgagagttggggtgcctccccgcccgcaggtgggtccgcagatcccgcgggccgcattggcccggctgctgcgggatgccgaggggctgcaggagctggcactggcgccgtgtcacgaatggctgtcagacgaggacctggtgccggtgctggcgcggaatccgcagctgcggagtgtggcgttgggcggctgcgggcaactgagtcgccgggcgcttggggctttggccgagggctgcccacgcctgcagcgcctgtcgctcgcgcactgtgactgggtggacgggctggcgctgcgcggcctcgctgatcg

SEQ ID NO: 13757 - DNA, 420 bp, Homo sapiens
gcgtccgctttcaccttcttggttccacctcaaacatcccttccgaagtgaggctttccctgactggggagcataaagtagcatctctcacatgccatacacccctacaacgaatctatgcaatggccctgctctgccatcgccacctgaaaccatctcaataaacacattttggataaaaaaaaaaaaaaaaaaaaaaaaaaaaaaaaaaagggcggccgctagactagtctagagaaaaaacctccacactccccctgaacctgaaacataaaatgaatgcaattgttgttggtaacttgtttattgcagcttataatggttacaaataaagcaatagcatcacaaatttcacaaataaagcatttttttcactgcattctagttgtggtttgtccaaactcatcaatgtatcttatc

SEQ ID NO: 13758 - DNA, 411 bp, Homo sapiens
ccacgcgtccgcttggctgcgaggagcgccacgaaaggtcagaggaaggagctgtgggaagctcgcagcaggtatcggagcttaagccagtggatttgggggccctgggcgtccctagccggctgcggtgtgagaatggagtgggcaggaaagcagcgggactttcagggctctgggtttgcagagagccgaaatgaccatgactgccaacaagaattccagcatcacccacggagctggtggcactaaagcccctcgggggactctgagcaggtctcagtcagtctctccacctccagttctctccccaccaaggagtcccatctacccgctcagtgatagtgaaacctcagcctgcaggtaccccagccactccagctcccgggtgctcctcaaggaccggcacccccc

SEQ ID NO: 13759 - DNA, 427 bp, Homo sapiens
cacgcgtccggcagcgctgcgacgggaccgcgcgattcctctcccacgcatctggcccgcgttcctgggcctcggcaccggatcccggcgggggtgtggacccagggcccactctccccggcgcggccagggccccccagcgtgcgagcgcctaggggatgccgagctgctcaagatgaggaggtgcgcggggccggggcggagcagtcgcgttccccgcgtgtgagcccccacccatccctggcgccagcgctttcccgaccactcgggttcggctatgcgggagccgcgaggaggaggcttgcagtcgtggacctgagacctcgggaggtcatgctgtcttgcttttaagtggcttggggaaagtgaagaaaccccaaaattggaggactttgctaccaggacctacggcaccagtggcctggac

SEQ ID NO: 13760 - DNA, 488 bp, Homo sapiens
  misc_feature 376: n = A,T,C or G
cgacccacgcgtccgggaaaagccaggaagtgccagggacttcctgtctaaggaagagcctcgtgaagctcctccactggggagtcagtggccttcgttgtatctgccccgcttgtccacctcctagagtgaatccccgcctggaggctgggacactaaccaagaagtggcacatggcatatcacgggagcaatgttgccgctgtacggagagtgctggaccgaggggagctgggagcaggtactgcctccatctgaggccgtcctttgaagggagaacctggggtagggttcgaggagccctgcgagaactgtgcacctcctcgggaggagcagccccctcctgtgctgctttccccctcccttcaatatgctgnggcggagaccctggcctccaaagtgcaattccgggaccccaaatcccagcggacgcaccaggctcagtgggcgtccaggtgttgtgtgcgccctggctcctacaccccggga

SEQ ID NO: 13761 - DNA, 463 bp, Homo sapiens
acgcgtccggaaaaatttatgcctttttattcataacccagctgtggaccactgcctgaaaggtttgtacagatgcatgccacagtagatgtccacataataaaattgatagttaccaatgcagttttgatatatcattggattctgtctttgagttgtaggttatttcttagctgcatgttttaaactgaatttgcatagagttgtatgttaatgtttcagttaagagaaaaacttaagatacatgagtcattacataatgggtatgaaatctttataatcacccttccaccctctatggtgtcagtacacatcacgtgtcatagatacttaaaatgtaaatgttaacacttttccttcctgctgagatgtttagagcctagtgccagacccattcatttccttttgattatttttgagactcagtactgcatggacctcagaagcttttcaggtgcaaact

SEQ ID NO: 13762 - DNA, 393 bp, Homo sapiens
  misc_feature 306, 333: n = A,T,C or G
gcgtccgggcggcggagttttgtcctaacgtgggcaaccgcgcagctggaggatggcctcactcgggcctgccgcagctggggagcaggcgtcgggggctgaggcggagccgggccccgcggggccgccgccgccgccctcaccgtcctctctggggcccctgctccccctgcagcgggaacctctctacaactggcaggcgaccaaggcgtcgctgaaggagcgcttcgccttcctcttcaactcggactgctgcgatgtgcgcttcgtactgggcaaggtcggcgggcgccgccgccgctgggnggcccgcagcgcatccccgcccaccgnttcgtgctggcggccggcaccgccgtctttgacgccatgttcaacggcggcatggccacc

SEQ ID NO: 13763 - DNA, 506 bp, Homo sapiens
ccacgcgtccgattagagctcaaggaagttattaggtgcagcctctggagccatactcacgctgcagtgcataatgggaaaattaggagcattaataagaaatttcagtagtgtttgtaaggaaaataagctacttactgagatctgtttcttctattgcatgtttgcttttgagggacagcttctgtcaaaagtgaaatcatcaccagaactgggcctgttaggaagaatagggttttatttactttttatgtcaattaacttcaacaaaaaggccacgctggctgctgtcatgccatctgggtatgcattaaacattaatgatgatcagcactgaggttctatttatcttgatttggctttataaagtttgtcaaatggtgctggaggacaagaagtgctaaggagaaagaagctatgggccaagttaaagaatttgaatgcaaaggccaggtcatgggagttttcataaactacataattacccagggtttatctcatcttct

SEQ ID NO: 13764 - DNA, 468 bp, Homo sapiens
  misc_feature 318, 350, 360: n = A,T,C or G
cgcgtccggtgagccccagcaaggagatcaagatcgtgtctgcctgaggaagcagagccatgacaatcggaaatctaccagctcaatgtcctgcatgtagactaccggaccgtgagcaatctgattctgacgggcccacggacgattgtcatggaagtcatggaggagttagagtgctgagctcctgggcctcccagccctccagtggcctgtgggtgagggaagccagaatgacacaaagcaatgcaaagacaagattgccatgcaaatggatggttttggacatacgagtcttctccgcacatacatgtctaaagnttgagttttatacactggaatgttggaagaanccgggtatcnatatcttttttaaaaaatggtcagtgtagaaaacatttgggaaaccattttcctacatgatagaactgccttactagatttctatttgtagctctcatcattggtttt

SEQ ID NO: 13765 - DNA, 487 bp, Homo sapiens
agtcgacccacgcgtccggtaatttttctaaacatgggtttgaagcttataaccagttttataaaccccttgaacactgcagtgagttatcaaagccactgcctgcaaagtggatgatttaagattttacacgcatgaaaatgagtgtgccatctcctgaccagtgccttttgacttaggtacccagatgccacttgtcagcagcaggatactttttacaacacgaaagcataattattttagaagaagagagtagaagggcagaatagaattcaacttacagaagcacggagtagtgtgtggttggctgttatctgtccccctgggaggaggactgttttgctcccttgttttgatgttaaacagtagcttaaaggctttcccctccataccaacttacagtcaaatgacaaagaaccgtggggtttcaacagattctacaaacatgcatttttcctttccactaatgggcactgcagggaaagcc

SEQ ID NO: 13766 - DNA, 465 bp, Homo sapiens
gagtcgacccacgcgtccgctcgtcctccgtgggcactgatgtcaccgagggccctgctcacccagccccccacactaggctgttccatgcaaatgaggaggaggagccagagaagaaggaggtatcggagctgcgctctgagctatgggagaaggaaatgaagcttacagacatccgcttggaggccctcaactctgcccaccaactggatcagcttcgggagaccatgcacaacatgcagttggaggtggacctgctgaaagcagagaatgaccgactgaaggtagccccaggcccctcatcaggctccactccagggcaggtccctggatcatctgcattatcttccccacgccgctccctaggcctggcactcacccattccttcggccccagtcttgcagacacagacctgtcacccatggatggcatcagtactttgtggtccaaagagggaagtgacc

SEQ ID NO: 13767 - DNA, 421 bp, Homo sapiens
ccacgcgtccgaagaaaatgggatccatgaagaacaagaccaagagccacaggatctctttgcaggggatggtatgaatgcatatgtagcctacaaagttacaacacagacaagcttaccattgttcagaagcaaacagtttgcagtaaaaagaagatttagtgactttctgggtctttatgagaagctttccgagaagcactctcagaatggcttcattgtccctccgcccccggagaagagcctcatagggatgacaaaagtgaaagttgggaaggaagattcttcttctgcagaatttcttgaaaaacggagggccgctttagaaaggtaccttcagaggattgtaaatcattctaccatgttacaggaccctgacgtcagagagttcttggaaaaagaagaactgccacgtgccgtg

SEQ ID NO: 13768 - DNA, 462 bp, Homo sapiens
agtcgacccacgcgtccgcggacgcgtggggtgctagtcaccagactgcacccttgccagcgcttcgcagctctcgaagtaaattatcgcacgatggcgggcctcacctaggagaaccaggaaggcaggcaccgctagaacgacgggattgaattttactattgccaaaacaatcacattcaaattcattccacttaaaacctgaaaacattggaccacacaaagtcttactgatttcaggtaaaaacaataattgaagatgtccagcaaaacatcaagcaccaacaatatagcccaggcaaggagaactgtgcagcagataagatgagaagccgccattgaaagaataaaggtttcgaaggcatcagcggacctcatgtactactgtgaggaacatgccaggagtgaccctttgctgattggaataccaacttcagaaaaccctttcaaggattaaaaaac

SEQ ID NO: 13769 - DNA, 484 bp, Homo sapiens
gagtcgacccacgcgtccgggcggagggagcgtgactgcgctgcgcagggcgctaggaggcattgtcgccgctcaggcccttttgtgagaagcagaccagcctgggggctggcggcaggacacctgtgtctgcatgctgaagaagatgggtgaggccgtggccagagtagcaaggaaggtcaacgagacggtggagagcggctctgacactctggacctggccgagtgcaagctggtctcctttcccattggcatctacaaggtcctgcggaatgtctctggccagatccacctcatcaccctggctaacaacgagcttaagtccctcaccagcaagttcatgaccacattcagtcagctccgagagctccacctggaggggaacttcctacaccgcctccccagcgaggtcagtgccctgcagcacctcaaggccattgacctgtcccggaaccagttccaggacttccctgagcagcttacc

SEQ ID NO: 13770 - DNA, 443 bp, Homo sapiens
tccacgcgtccgctttcagtgaagaaaagggaattacacattgaatcgacacatcagtaatacgatacagtgaaatgggcctctaataagaatttcagcgagttttctgatgtgccatttttttgtctttttaaaaatatacatattataaatggtaatagttttgacacattaatgaccctaagacctgcgtatgtgaagcagctatgagtgctgtgatttgtttttaaaaatttttacacttcttgttgaaatatatatgcatataaatatatctatatctatatctatatctaaaacactcctggaccattaacgtaaattaaatgtcttaagagatatggagcccttttaaacttgtcatctttatgcaaggggacatttataaatattccttcgagctttgttttcataaaatgtaaactatgtaacattatttatag

SEQ ID NO: 13771 - DNA, 510 bp, Homo sapiens
gcgtccgctgcgcccgtgggaccggtgaagttctggcgacccggtacagaggggccaggtgtaagcatctctgaagagagacaaagtctggctgaaaactctgggacaacggttgtttacaacccttatgctgccctttccatagagcagcagaggcagaagctgccggtattcaagcttaggaatcatattttatacttgatagaaaattatcagacagtggtgattgttggtgaaacaggatgtgggaagagcacacagattcctcagtaccttgcagaagccggctggacagctgaaggaagagtggtaggagtgacccagcctcgaagagtggctgctgttacacatgatctttcttcccaaaggttgcagggagagtagctgaagaaaggggtgcagtgctgggccacgaggtgggctactgcatccgctttgatgactgcaccgaccagctggccacgagaattaagtttcttactgatggaatgctggtcagggaaatgatgg

SEQ ID NO: 13772 - DNA, 316 bp, Homo sapiens
tcgacccacgcgtccggtgggaatctttccaacttcttgatccatctgggagagaagacgtaccattatgtgcccgaattccgaaaagtgtccatagcagctaccatcatctatgcctatgcctggctggttcctcttgcactctggggtttcctcatgtggagaaacagcaaagttatgaacatcgtctcctattcatttctggagattgtgtgtgtctatggatattccctcttcatttatatccccaccgcaatactgtggattatcccccagaaagctgttcgttggattctagtcatgattgccctgggca

SEQ ID NO: 13773 - DNA, 506 bp, Homo sapiens
tcgacccacgcgtccggtggcacgatcttggcccactgcaagctccgcctcccaggttcacgctattctcccgcctcgggagctgggacaacaggtgcccgccaccacgctcggctaattttttgtatttttagtacagacggagtttcaccgtgttggccaggatggtctcgatctcctgacctcgtgatgcacctgccttgacctcccaaagtgctgggattacaggcgtgagccactgcgcccggccaataatttttttagtttaagttcatttttgtccccgctgatgaaagttacagcagctgcccagtgcctctgtccacacccacctccctggtgtacttgccccctacagcagcagcccagatcctcccctggattaaaattgcaactggtgccctaacccaaaacttgagaaaaaattctctatcacatccactcttctggcatttgtagaatctctggccctgggtgggtcttttcctgtagctgttacagatttc

SEQ ID NO: 13774 - DNA, 499 bp, Homo sapiens
cgtccggtagatatatatatttacctccttagtaatgcaagaagtgtttgtgggaagcagagaagcaagcaactgtatttcttgttctcacctaagcattactggaggataagccacatcagtctacaaagaggttttcatacaaacataataagatgtaaatggaccaaaagtgaagcacattcttgcagtaagcactgttactctccaagcaaccatggtttacatattgggattttgaaacttagcacttctgctcccaagggacttacaaaagtgaacatttgtatgtcccgtattaaaagtactttgaactctgtttcaaaggctgtttttggcaatcaaaatgaaatgatttcacgtttagctcaatttaagccaagttcccaaattttaagaaaagtatcggatagtggctggttaaaacagaaaaacatcaaacaagccattaaatctttgaaaaaatatagtgccaaatcagcagaaaagagtccttttc

SEQ ID NO: 13775 - DNA, 497 bp, Homo sapiens
gtcgacccacgcgtccgagcatcttggggaatttatattcctttgtgagaaatgttttgatcataagcctagaatgataagtaaaagaaataaagataattctactgcttgttctcacccggttacaaagcatgagtttgaagacaataagtgccttgtccacattttgcgagagacaacagtaaaatactccaaaatacgttcttttcatggtcagtgtcagcttgatttatgtcgacatgaagttcggtatggctgtttaagggaagatgagtgcttttatgcccatagtcttgtggaactgaaagtctggataatgcaaaatgaaacaggtatctcacatgatgctattgctcaagagtctaaacgatattggcagaatttggaagcaaatgtacctggagcgcaggtacttggtaatcaaataatgcctggatttcttaatatgaagataaagtttgtgtgcgcccagtgtctgagaaacggtcaagtcattg

SEQ ID NO: 13776 - DNA, 472 bp, Homo sapiens
gcgtccgaaagcaaacgacagctcagggggctccaaagacctcattcatagcagcaaaaggaactcaggtagtcaaaatatcagtacacatgggacgtgtcagtttaaaacaggagccccggaagagtcatagtcccagcagtgacacatcaaaactagcagctgaaagggacttgaatgtgaccatcagtcttagtactgatagaccaaagcagcgatcacaggcagtagcaaacgagagggcacaccctgccagcacagcagtgccgaagtctggggaagccatggccttaaacaaaactaagactcagagcaaagaagtcaatgcaaataaacacaaagccaatacgagtcttccttttcctaagttcactgtcaattcaaatcgcttaaggaagcaatctattaatgagacacctttggggaagtttgtcaaaggatgatggagctagaggggctcatgggaagaaac

SEQ ID NO: 13777 - DNA, 521 bp, Homo sapiens
cacccacgcgtccggccaaccgccgaggagcagtgccactattcagcacagtgcgccagggccactggcagattgttgatcttttactcacccatggagctgatgtcaacatggcagacaagcagggccgcactcccctgatgatggctgcttccgaaggccatctaggaaccgtggactttctgcttgcacaaggtgcctccattgctcttatggacaaagaaggattgacagccctcagctgggcttgtttgaagggccatctctcagtagtacgttctctggtggataacggagctgccacagaccatgctgacaagaatggccgtaccccactggatctggcagctttctatggcgatgctgaggtggtccagttcctggtagatcatggggccatgatcgagcacgttgactacagtggaatgcgccctttggatgggcagtggggtgccggaacactttgttgttgtcactcttctgaagaaaggagccaagataggtccagccacatgggcgat

SEQ ID NO: 13778 - DNA, 517 bp, Homo sapiens
gagtcgacccacgcgtccgagaagtcaagggagtggaggttctataaggaattaacagctgaggacggaagggtttgtttcccgtttgaacctaaacgcaagtggaaaagaatactcagaatgtatttttctactttacatctgctggggaaggaaatgtgtcaggaagccgctgcatctggtcatttcatcgcatcagaatcacagcagacgtggaagattccatgtggtggggaataaagaaataactttatgctctcctgaaaaacagcgggagcctatgtgtgtgtgcgacactgtaatctcaaggagattcactcagagctgtctcagtccaactcctgcatgaccagatcttcccttagcatcttttctgtgatgaaatattatcttgtgttagagttaggaataggaactaacctgtaggagcatgtccccaaatggacatttgaatggactaacaaaaacaactggaaagactgaatttccgacacaaaggaatgatgggatcaaaaag

SEQ ID NO: 13779 - DNA, 463 bp, Homo sapiens
gtcgacccacgcgtccggtcgacagcctccgccacatcctccacctctcttggtccagcgagcgttgccgggccagggtcaagcggagggctccgacggcgcggacggagcgaagcgccgagccatggcgcaccaaacgggcatccacgccacggaagagctgaaggaattctttgccaaggcacgggctggctctgtgcggctcatcaaggttgtgattgaggacgagcagctcgtgctgggtgcctcgcaggagccagtaggccgctgggatcaggactatgacagggccgtgctgccactgctggacgcccagcagccctgctacctgctctaccgcctcgactcacagaatgctcagggcttcgaatggctcttcctcgcctggtcgcctgataactcccccgtgcggctgaagatgctgtacgcggccacgcgggccacagtgaaaaggagtttggag

SEQ ID NO: 13780 - DNA, 476 bp, Homo sapiens
gtcgacccacgcgtccgctcccgccaggcgctttctcggacgccttgcccagcgggccgcccgaccccctgcaccatggaccccgctcgccccctggggctggcgattctgctgcttttcctgacggaggctgcactgggcgatgctgctcaggagccaacaggaaataacgcggagatctgtctcctgcccctagactacggaccctgccgggccctacttctccgttactactacgacaggtacacgcagagctgccgccagttcctgtacgggggctgcgagggcaacgccaacaatttctacacctgggaggcttgcgacgatgcttgctggaggatagaaaaagttcccaaagtttgccggctgcaagtgagtgtggacgaccagtgtgaggggtccacagaaaagtatttctttaatctaagttccatgacatgtgaaaaattctttccggtgggtggcaccggaaccgg

SEQ ID NO: 13781 - DNA, 425 bp, Homo sapiens
cacgcgtccgatagtctctctacgtggccaggaaaaaaaaaagaaagaaggttggggccagtcacccccacatccctttatggaggcttccagatcatggatcctgtcacgcgcatcccggtgaagagagtccaccaacaggctttgtatggggtctcgctctgttgcccaggctggagtgcagtggttcgatatggctcactgcagcctcagcctccctgggatcaagtgatcctctcacctcagcctcccaagtggcagggaccgcaggaaggcctggacgacggcccggacttcctctcagaagaggaccgcggacttaaagcaataaatgtagatcttcaaagtgatgctgctctgcaggtggacatttctgatgctcttagtgagcgggataaagtaaaattcactgttcacacaaagag

SEQ ID NO: 13782 - DNA, 478 bp, Homo sapiens
gtccgaaccccttcctcagcctgtcgggagcagagggcagtggcggtggccccaaaggagggaccgctgacaaaggagcctcagccaaccaggaaaaaggctaaatccacccttacccctcctgacccccccaagtggagggaacagatcctggcctgaggggtcctagcctggagcaggcgcctgcgcccagaccctggagagccttgacccagagcctgtgctgaggtccagggagtgtggagagctcctggtgtcgaggactgagactgacaggggagccccctccatctggcccccttccctttccgcactgtccgctttgtgaggctcagaggaaggacagtctgcaagcccgcctaggaggtccatccccagcaaatgttttggaggtccccccagagagcaaagtgggccatggcagaagtagggggttggttggacctgtcacatgaaatggatcagcacttgaatgggg

SEQ ID NO: 13783 - DNA, 525 bp, Homo sapiens
gtccggagaagatgggcctcccgggctcagactcacagaaagagctggcctgaccaccaggcacctcactggcactgctgacccatcccagaaacacaatctcagggacccgagcagctccaaggacgagaggatacagcagacacaacctaatagagagggcgcctgcagccttaacctccacggccttcgatacttatgcaagcctggtgttgctcctgtcctcagagtcatcctgcgctcatgccttttcccgaatgggttcacctctggcagttgccgcttcagtcttggccttagcctcatcttgaagtgggtagctggcgggagagggtggctgcgccccctgctggccctgaggctgcagagttgggagcaggacacctcacctgagtttcattttttttcatgtccaaaccatgcacatactatagtccagaatcaaagcacttttgaaaagtggctgcatggccatcctccagggcccaggaagttgcattccagggcctgtttacatggcagcag

SEQ ID NO: 13784 - DNA, 615 bp, Homo sapiens
  misc_feature 487: n = A,T,C or G
ccgggctgcacagggtgtagcccaccctccaggtccacggagtggtgtggacctcccacctcacagctgcctctggcagccaagcctcttttcgcccggccccagcccctctggttgataaacgggtgggcctcctcagcagcgtggctgcctttcaccttgatttccccagggctctcggcaacatcgataaaccagcctcgcccaccagctgggccctcccccacccagtctgccaggctgggagctggagcttgctgagtcttgaatgcccttctagatggcttctctagaggctctcctggcaagagagggtcccaaggggagccctgcaaagcaaaggctccttgtctggggcgggatagagaatctcgcctctgtctggtgtgttacctactgggggcacaggaacaatttcctcaaggagacagtggcatggagctttgaaagacgagtaggtgttagcaaggaaataaggaggaacggnggttacgggcagaggagaaagcacatgccaagtcagcaaagaaaagtagaattcgaaaactttttaaaaatattactaaggattttcacaatgctgcactgggctagaaactgaagctaaaacagata

SEQ ID NO: 13785 - DNA, 503 bp, Homo sapiens
ggcggcggccagagctactacgccggccgatggcgaggagcccgccccggaggctgaggctctggccgcagcccgggagcggagcagccgcttcttgagcggcctggagctggtgaagcagggtgccgaggcgcgcgtgttccgtggccgcttccagggccgcgcggcggtgatcaagcaccgcttccccaagggctaccggcacccggcgctggaggcgcggcttggcagacggcggacggtgcaggaggcccgggcgctcctccgctgtcgccgcgctggaatatctgccccagttgtcttttttgtggactatgcttccaactgcttatatatggaagaaattgaaggctcagtgactgttcgagattatattcagtccactatggagactgaaaaaactccccagggtctctccaacttagccaagacaattgggcaggttttggctcgaatgcacgatgaagacctcattcatggtgatctcaccacctccaacatgc

SEQ ID NO: 13786 - DNA, 573 bp, Homo sapiens
cgacccacgcgtccgcaatttcttttgaatttcgatcacttctacattcccagcttgccacactcttttttgatgaagttgtgaagcagatggtagctgcctttgaaagaagagcatgtaagctgtatggtccagaaacaaatatacctcgggagttaatgcttcatgaagtccatcacacataaaggcaaaaaagaactggtgccacctgcttctgactttagtttgttcacttttaggaagtattttcatgacatgttttcagaagccagaaagcatttgttaaacgcagctttggttataaacctgcaccattgaaaatttgcacatagaatatagactcacttgtacatagaattatttcttcaagtataattcaaaataatatggacattatcatgttctgcattacaataatgggatgtcatcaccattgctagaatactggcatgattcttctgagcagaagttgaaactgtaaatttaaaccttttaattatcaccttacctgaaagaggttagttaagatattcacacagtatgtattatattaaccatatcacacttaagtta

SEQ ID NO: 13787 - DNA, 580 bp, Homo sapiens
gtccgttttatttcttcccttgcatgaatattttctactgaaaagaaatgaaatctcagttccactatgataaaagaaacgaatcaccagtgtctgtcagtgcccccactgctcctcctcataccagcattgacactggtagctgaggaaggggactgctcaatttctaatgtgatctattcaagaagccacatataaaaaggcattgagggctcactgtccagagaattgcttttgtaaatgctccacaacgtatgggcaaaagtttaaggactactgcctgatgtaccaggaatcctgagttctgtgaaaatctgttcattccaaatctgttaagcatttccaaacatccagagaatggtttcactgttgagggtgcatgtggcagaatctgtctctctctgcacctgtcttctgttaccatccctggacagtgacagattttaagccagccaccagaattcttttcgagttaaccatctcttagtttctgtaaattcatgacttgtcttactgaactacagcctggtttgtagacttccaacatctacactgctgctcttcaccattggaattcact

SEQ ID NO: 13788 - DNA, 368 bp, Homo sapiens
agtcgacccacgcgtccgctctgaccgccgccggctttccacccacctgcccggctcatcacctctgactcctgcgggccttccagccggcgctatctcgcagcccccgaccagctcggcctgctgtcgggcatctctgctgtcctccggctgtagggctacctgcctccctcccggggggtgcactgcgagtccgactctagtgggggcagcgcctagcggactcccaaacccgctcaggtcctgccggcctcaccggcaccgcccaccctccagccggccgcggctctgcgcttgcgcgccggcagcacacagtgttaggggcgcgccctctgctctggacatgcgcgccgtcgcgagcgtctctg

SEQ ID NO: 13789 - DNA, 465 bp, Homo sapiens
ccacgcgtccgggaaaatgccgcagtttgttgccttgaaacctaagagcaatccttggttttgttgctacattatttttccagaccaacacatctaccaagtgaattttattgactttaatttcataataaagttagtagagtcactcaacttacaactttatttatgtggcttggcaaaaatcactataaggcagctctaaatttgccttgataagctaaataaattacttttataacttactaaagcagaacaaacagtgaaactttctaaaatattctatctggaatagggacaggggatcttttatttataatctcatcagatgagtgagttgttcacagatattttatgtttttttaattttctccaagaatatttatagaattccaaagaatcagaatagtttcaaaataatttttagtgataaaagagtgttgtaattaatcatattacacttaaatt

SEQ ID NO: 13790 - DNA, 464 bp, Homo sapiens
gaaaatatttaggtaatgtcataaaatttattttacctttctcattttctgagaaaataaatgaaaaaaaccctagatattgctttattaccaacagtgtgtaggtttttgtacatatggaaatttgacacaaaaaaatagggaatttgtatagagaagtttccctcttataaaaggactcccatttgattgttcgaaactataaaatgcacttttactttaccaatatctgaaatgacaaaatatcgccctttggaaaacctgactctttgcacgtgtaattcccagagtctacctcagttaaccaggcttagttttaggcaggaatgaattgaattaaattcagttcatcatctatgcagatttgtttcttttaagcacatccttccctcctgctgttgcccttcttccattaacttttctttttaatcttgaaattgtttaaaatattccatctttctttt

SEQ ID NO: 13791 - DNA, 522 bp, Homo sapiens
agtcgacccacgcgtccgcaagactttgaaaaatcagatcatggttcttctcaaaataccagcatgtctagcatctatcagaattgtgcaatggaggttttgatgtccagttgttcacagtgtagagcttgtggagctttagtttatgatgaagaaattatggctggatggacagcagatgactcaaatttgaatacagcttgtccattctgtaaaagcaacttcttgcctcttctcaatatagaattcaaagatttgagaggttctgcaagctttttcctgaaaccaagtacctctggtgacagtttacaaagtggaagcattccattggcaaatgaatccttggagcacaaacctgtatccagtttagcagaacctgacttgatcaactttatggacttcccaaaacataaccagatcataactgaagaaacaggctctgcagttgaaccaagtgatgaaataaagagagccagtggagatgtccaaactatgaaaatttcatctgtgcttaatagttta

SEQ ID NO: 13792 - DNA, 538 bp, Homo sapiens
acgcgtccgttcaagttgagattagcatcacttcgtctactaagaatcttaatagatgtaaaaatatcttttaaaacatatggtaggatgggtaaaatttggcaatactatccaggaagtcactaagtacagatgaactgatttagtcctaattccaagaagtgtgattccacctacttgactagaaatttatacctggtaataactccttgtccttgaagattttcaactaaggaaaactgtttttcagcaggacctgattatgcactgctatctaggtagggtcacttatggttttataatatatttaattggattataatattccttttttcttgtctcttggacaaaatcctagctttactgtaatttaaaaagatgagtttaaaatttcaggctttaaaaacataccaaacattgataaaaatgaaatactagataaaagtattttatcaatgttcagttgcctggattcaataactgtattatggttatgtaagataatatacttaggaaatacacattatggtattaaagg

SEQ ID NO: 13793 - DNA, 586 bp, Homo sapiens
tcgacccacgcgtccggtagcttagttgagtagataatcttttgttgtttcctccttgtaatatacaagccttggcttctgtgacatcatactctcctagatttccccctgtcactgtggcttcttctcagtctctgtccatccctggtgctcctgaaggttctgtctcagccttacacacattacctgggtgatctcattctctgccatgacttcacttgccatatatgtgctgattttccccaaattcctatttctcccgacctttacatctattttatttgcaggtcatatatctaataaggaattgatatccagtgtacatgtagaactcctgtaattcaatacagaaaccaaacagtccaattaataaatggagaagagatttgaatgaacatttttctaaagaacatctcaagctcaagatttcccagataacttttctttcttcaaaatctgcttctgtgtttcctcatctgtaggtggcacagcatacatctgatttcccaagccagaaacctcatagttattcttgactccaggaagaaatattattgagtttttaaaaactcagcttattgactca

SEQ ID NO: 13794 - DNA, 588 bp, Homo sapiens
tcgacccacgcgtccgtgctgaactgagctcaggtgtgtttttcttccaagctttctagcaaggtttctacttaaaatcacctgtgtgcaagcccaaaggacatttcatctattctaagcagaaaggctgttttgttcattacagtgagtgctgttcatctcatggagtgggaggagcactaaaccaggagacagaggacatggatttggtttccagcttaaccagttaggactctgtcctctgcattctggaaccatgatgcctgcctgcctgcctcacagggctgttgtgaggaccagatgagatgatgtatgttcatacttttggaatctctaatttaaagtcttaatattttgtcttctgagtgtgaggggataaacctggatgtagactattaagcagcataggagaaaagaacaatagaatctaatggactgggtttgcaatctctctctaaatgcactgcttcagacaaagtgaaatccaaaggtgtgaaaaagtatagctgcaaattggaaaaatgtgtttcaagagtcgtctttttggccaggcatggtggctcacacctgtaatcccagcactttggg

SEQ ID NO: 13795 - DNA, 510 bp, Homo sapiens
  misc_feature 373, 383: n = A,T,C or G
cgcgtccgctctgaccgccgccggctttccacccacctgcccggctcatcacctctgactcctgcgggccttccagccggcgctatctcgcagcccccgaccagctcggcctgctgtcgggcatctctgctgtcctccggctgtagggctacctgcctccctccggggggtgcactgcgagtccgactctagtgggggcagcgcctagcggactcccaaacccgctcaggtcctgccggcctcaccggcaccgcccaccctccagccggccgcggctctgcgcttgcgcgccggcagcacacagtgttaggggcgcgccctctgctctggacatgcgcgccgtcgcgagcgtctctgggaccggaagtgcggncgagcgcggntccccgggtctgacaggagcagcctgtgggcaccgcggcggtagttggaggcgggagagggtccgtagccgggccgccctgccccggcatgggcctcctgtcggacccggttcgccggcgcgcgctc

SEQ ID NO: 13796 - DNA, 575 bp, Homo sapiens
tcgaccacgcgtccgaggggcgtgttggccccgcacagattgagccgagttgtcgccccgctgggagaagtgaccctcctgcgcctgaaaagaaatttcatttcaatataggtgactatgcagcctgcaattcaagtatggtttggagaagatctgcctctaagtcctcggagtcctctgactcccagacacggaccaggattggctaatgtttgtcagtacgatgagtggatagctgtgaggcatgaagccactttgttgcccatgcaagaagatctgtcaatctggttatctggtttattaggtattaaagttaaggcagaaaaattattggaagaacttgataatggagtactattatgtcaactgattgatgttcttcaaaacatggtgaaaacatgcaactctgaagaatcagggaattttccaatgagaaaagtgccctgtaagaaagatgctgcatcaggttcattctttgctcgggacaataccgcaaacttccttcactggtgtagggacattggggttgatgaaacttacctctttgaatctgaagtttagttttgcacaaagat

SEQ ID NO: 13797 - DNA, 446 bp, Homo sapiens
  misc_feature 84, 352: n = A,T,C or G
gacccacgcgtccgcccacgcgtccggagtcctcctccccgggtgcctgcccgcagcccgctcggcccagagggtgggcgcggngctgcctctaccggctggcggctgtaactcagcgaccttggcccgaaggctctagcaaggacccaccgaccccagccgcggcgggcggactttgcccggtgtgtggggcggagcggactgcgtgtccgcggacgggcagcgaagatgttagccttcgctgccaggaccgtggtgaagcctctgggcttcctgaagcccttctccttgatgaaggcttccagccgcttcaaggcacaccaggatgcactgccacggcttgccgtgcccnctctccagcagtccctggaccactacctgaaggcgctgcagcccatcgtgagtgaggaggagtgggcccacaccaagcagctggtggatgagtt

SEQ ID NO: 13798 - DNA, 551 bp, Homo sapiens
  misc_feature 34: n = A,T,C or G
tcgacccacgcgtccgcccacgcgtccgggcggnggcatggactcactgacccatgcggggcagcgtccctgtgacctggccgatgaggaagtactgagcctgttggaggaactggcccggaaacaggaggaccttcggaaccaaaaagaagcttcccagagccggggccagagccccaagcgccctctagcagcaaacacagaaggagctctgtgtgtcgtctgagcagtcgcgagaagatttccctccaggacttgtccaaggagcgccggcctggtggggctggggggccccccatccaggacgaggatgagggggaagaaggtcccaccgaaccaccccctgcagaacccagaaccctcaatggcgtctcctccccgccgcaccccagccctaagagtcccgtgcagcttgaagaggcccccttctccaggcgctttggcctcctgaagacagggagttctggtgccctgggtccccctgaaaggcggacagcggagggagcccctggggctgggctgcagcgctcggcttcctcctcctggctgga

SEQ ID NO: 13799 - DNA, 595 bp, Homo sapiens
  misc_feature 551: n = A,T,C or G
tcgacccacgcgtccgctccccgccgaggcctcctgcaccacctagagccccacccccgaccccaccccgggagggcagagccagaagaaggctcattagacctgggggacccaaagggtctggcctctttgggcagccccagagatgaggggtcagcagaggagagctctggggttggggatgggttagggacgcaagcttgagttctagcccttgctctcattcagctgttgtgtgaccctgggtaagacccttccttgtttgaccctcagctttcccatctgtttaatggtggctttggccaaggcaatccacaaacgtcaaaattccccttcccatcagtacacacaccgatgcacacacactctctctttctctctctctctctctctctcacacacacacacacacacacacacacacacacacactagttagtgccttggatgaggcggggcagtgtgtatatggacccctggacttgctaccttcagggttccatactcgtccctcccctcctggctctgctgtctggagtctggcaagcggngtgtgttcagaaggtcctaggcctgtgtcgcatgtccaggcact

SEQ ID NO: 13800 - DNA, 542 bp, Homo sapiens
  misc_feature 22: n = A,T,C or G
cccacgcgtccgcccacgcgtncgccgcccgccgcctgcctgggccgggccgaggatgcggcgcagcgcctcggcggccaggcttgctcccctccggcacgcctgctaacttcccccggtacgtccccgttcgcccgccgggccgccccgtctccccgcgccctacggtcgggtcctccaggagcgccaggcgctgccgccgtgtgccctccgccgatcgcccgcgcgcccgcgctccccgcctgcgcccagcgccccgcgcccgcgcccagtcctcgggcggtcatgctgcccctctgcctcgtggccgacctgctgctggccgccgggcccgggccgagcctgggcgacgaagccatccactgcccgccctgctccgaggagaagctggcgcgctgccggccccccgtgggctgcgaggagctggtgcgagagccgggctgcggctgttgcgccacttgcgccctgggcttggggatgccctgcggggtgtacaccctccgttgcggctcgggcctgcgctggtaccccgcccgaggggt

SEQ ID NO: 13801 - DNA, 412 bp, Homo sapiens
agtcaccacgcgtccgcaaggcgctacgtttattgcctcgtcttattcactgacctttgtaatgatacacagtgaattctttttgacaaagagaaatgcagtgtagtatgcagagctgctgttttaatgcctatgcatttactctttcctgatttaggcagaggtggcattttctttattgcatttctctatttttttaatgtaccctaccttcagtattctctttgtaagttggtgacttgcatctgtggccttgaatattttattatcacatgtggcataacagtatccacactttttagttctttatttttttttttttattttgagcaattctcctgcctcagcctcccaaatagctgggattacagggtgcatgccaccacacccagctaatttttgtatttttagt

SEQ ID NO: 13802 - DNA, 399 bp, Homo sapiens
cggagtcgacccacgcgtccgggatggaccaagacaaatctcttgtaaaaaaaattacaagtaatttttatagaagctctgccctgagggagggggagcgtgacttctcactccttcagtgtgggctgcacaagtgacttccttccatatgggatcgttataacaaaagactgtaacaagggctatgggagttataagacaggaattgtggacaaaaaccagtgtatatcataacatcacaccttgtaatgttggcagtacagtcactgacctttgataaatgttgatgacatgttgagtaaaggaatgagagaaagaggattgtttatctctgtttttatccttctcagagaaacttagagtaacaagtgtgttatcagccatgctgatgcctttggt

SEQ ID NO: 13803 - DNA, 557 bp, Homo sapiens
ggagtcgacccacgcgtccggggctcctgggtgtgcccgcggcctctggcgcgcagcgactcagagaacgtctacgaggtcatccaggacttgcacgtcccgccgcgggaggagagcgcagagcaggtggacgacccaccggagcccgtgtacgcgaacatagagaggcagccccgggccacttcaccgggcgccgctgcagccccccttcccagcccggtgtgggagacgcacacggacgcgggcaccgggcgcccctactactacaacccagacacgggagttaccacctgggagtcgccctttgaggctgccgagggtgccgccagcccagccacctcccctgcctcggtggacagccacgtgagccttgagaccgagtggggccagtactgggatgaggagagccgcagggtgttcttctacaacccgctgacgggcgagacggcctgggaggacgaggccgagaacgagcccgaggaggagttggagatgcaaccgggcctgagccctggcagcccaggggacccgcggccccccactcccgagacggacta

SEQ ID NO: 13804 - DNA, 587 bp, Homo sapiens
  misc_feature 5: n = A,T,C or G
gcgtncggctttgccagcaacatgctcaattcccgatcatcgctcaaagtgctaaattttcaggagtgaaaagaaaaagaggaaggaagaaacccctctcaggcaatcatgtacagccacccgaaacaatgaaatgtaatacattcataagacaagtgaaagaagagcatggcagacacacagatgcaactgtgaaagttccttttcttaagaaatgcaaggaagcaggacttcttaattacttacttgaagaaatattagacaaagttcattcaattccagaaaaactcatggatgagactacttcagaatcagactatgaagaaatcgggagtgcactttttgactgtagattgttcgaagacacatttgtaaattttcaagcagcaatagagaaaaaaattcatgcatctcaacaaaggtggcagcagttgaaggaagagattgagctacttcaggacttaaaacaaaccttgtgctcttttcaagaaaatagagatcttatgtcaagttctacatcaatatcatccctgtcttattagggattaccgtttcctaagccaagagtcatgtcaaattgcaatcag

SEQ ID NO: 13805 - DNA, 572 bp, Homo sapiens
agtcgacccacgcgtccgggaggttgaagttcaggctaagaccgttactgaattggttactaagaagaagccaaaggctgaaggctatgctgagggtgacctcactctctatcaccgtacctcagtcactgacttcctccgagctgccaaccctgttgacttcctctccaaggccagcgaaatcatggtagatgatgaagagttggcacagcatccagctaccactgaggacatacgggtgtgctgtcaggacatcagagtgttggggcgcaaggagctcaggtcgctactaaactggagaacaaaacttcggcgatatgtggccaagaagctgaaagaacaagcaaaggcactggacatcagcctcagctctggagaggaagatgaaggtgatgaggaggactcaacagctggaaccacaaagcagccctctaaggaggaggaggaagaggaggaggaggaacaactgaaccagaccttggcagaaatgaaggcccaggaggtggcggaattgaagaggaagaaaaagaaactgttgcgtgagcagagaaagcagcgggagcgtgtggagc

SEQ ID NO: 13806 - DNA, 486 bp, Homo sapiens
  misc_feature 362, 363, 365: n = A,T,C or G
agtcgacccacgcgtccgcaaggaccatgttgtaccacagcctctgctgagctgagggacacatgtccttggtgaagacctgcacccctggaacctcccaccatcatcacaactgtgggctcatttgcagtggagaaaagaacccgacgtcccacagccagatatacacccagctccatgccagcccttcatgtttaccttttgctttgttaattacatgtcagactcctagagggcctccagactaataggaagcatttctgtaaccaacctgccacccactgattcagaaatggaaatcacattccacaatctatggcttccaccagctagcccaggaaatacttgaaatcagcattccnnanaaaaaaaaaaaaaaaaaaaaaaaaaaaaaaaaaaaaaaaaaaaaaaaaaaaaaaaggggcggccgctagactagtctagagaaaaaacctcccacacctccccctgaacctgaaacataaa

SEQ ID NO: 13807 - DNA, 403 bp, Homo sapiens
gcgtccgctgttcccgacagcatggattagcttccgtgttctgaagttgttcttttcatggtgtctgacaccgagggcgttgttcgtccatcaggcgggattggatggagtcttggtgttttgccttctcagggaccaaaaatgtatcattgactccttaacagtgaccttcctcccaaggacatatccgtgttcatttttcataggttttactcatattcataggtagattctgttaatgtgagttggaaagaaaagaccaatttgtacaccagtcacaccacaagacagtttatcatataaaatacctcaattttttgtattcctcatttccacctcacaattgtactggtgatgaattttaagggtctgtcctttagcttataggtgatgtttcacatct

SEQ ID NO: 13808 - DNA, 532 bp, Homo sapiens
gagtcgacccacgcgtccgggcaaggaaggctctgttaatttatagctgtttagaggggaaagcagtgcagaccacttattaagcccgctgaggactagctttctgtctttcatacatttgggaaagataggaatgactgtttcaaagaagagaggtgcacataatttatgcaggcaagtatgatacttatttcattggttttgtgagtcatatatatacatatatatatatacacatatatatatgacttgaaaattaagatttaatactttaatgttttaagtgtggggggtttgggaaggaaggaatgtaatattatggatttagccttaggctttaagttttaggctggcaaaagaaatgttattcagtgggtttgaggtttggactactttcttcaaacttagagaattataacaggatggtgtttactttgttcacctggatgtccccaagactctagcttcttctatcagtggttggtctgatagaagaggtaaaaattgctcttgaaaatggtctacaattatg

SEQ ID NO: 13809 - DNA, 533 bp, Homo sapiens
gagtcgacccacgcgtccgcccacgcgtccgcccaggcctgggccgggccgtgacggcggcgctaggacccggcgggccgcgggtgcggcgaggcctgggcggcctgaggagcgcggaccccggcgctcggctcccggcgccatgtgagggggctcgggggccgcggggggccgggcgctccccgccggaggtgtgaacccacatccctgcccccagggccacctgcaggacgccgacacctacccctcagcagacgccggagagaaatgagtagcaacaaagagcagcggtcagcagtgttcgtgatcctctttgccctcatcaccatcctcatcctctacagctccaacagtgccaatgaggtcttccattacggctccctgcggggccgtagccgccgacctgtcaacctcaagaagtggagcatgactgacggctatgtccccattctcggcaacaagacactgccctttcggtgccaccagtgtgtgattgtcagcagcttcagccacctgctgggcaccaagctggg

SEQ ID NO: 13810 - DNA, 341 bp, Homo sapiens
tggggccgggaggaagtctaacctttgggagactccaagacagcagctccgaggtcggcgggggtctgggtggccatggaggagccccctgtgcgagaagaggaagaggaggagggagaggaggactaggagagggacgaggttgggcccgagggggcgctgggcaagagccccttccagctgaccgccgaggacgtgtatgacatcttctacctgttgggccgcgagcttatggccctgggcagcgacccccgggtgacgcagctgcagttcaaagtcgtaccggttctgtagatgctggaggcgcttgtgaatgagggcagcctggcgctggaggagct

SEQ ID NO: 13811 - DNA, 470 bp, Homo sapiens
gaggtggcgatcgctgagaggcaggagggccgaggcggtcctgggaggcggaccggaggtggggcgccgctggggccggcccgcacgggcttcatctgagggcgcacggcccgcgaccgagcgtgcggactggcctcccaagcgtggggcgacaagctgccggagctgcaatgggccgcggctggggattcttgtttggcctcctgggcgccgtgtggctgctcagctcgggccacggagaggagcagcccccggagacagcggcacagaggtgcttctgccaggttagtggttacttggatgattgtacctgtgatgttgaaaccattgatagatttaataactacaggcttttcccaagactacaaaaacttcttgaaagtgactactttaggtattacaaggtaaacctgaagaggccgtgtcctttttggaatgacatcagccagtgtggaagaagggactgtgct

SEQ ID NO: 13812 - DNA, 496 bp, Homo sapiens
cgacccacgcgtccggggtgttggtgcggcgctgttggggtcctccgctggctcatggcgccaggcgtgggaggccgagtccccagtggcgagcactggcccgactcggctgggaggactgccgggactccagagtccgcgaggcgctgcgggcgctgcacgccgccagggaaaacaaagaagaagagttaatcgacaaactggaggtggtcacaatgccttccccatcaccaaaaggactgccagtgaagcaatatgctgtgcagtctcagcttcccgtatatgagtggccggatgtgggatctggagaatatgatgttggagtagtggcttcgtttggccgacttttgaatgaggctcttattcttaaatttccctatggcatattgaatgttcatcccagttgcctcccgagatggcgtggcccagcccctgtaatccatacagggcttcacggagacacagttactggagtaacaattatgcaaattagacc

SEQ ID NO: 13813 - DNA, 557 bp, Homo sapiens
tccggttcttagggaggcaggtgctggcctggcctggatcttccaccatgttcctgttgctgccttttgatagcctgattgtcaaccttctgggcatctccctgactgtcctcttcaccctccttctcgttttcatcatagtgccagccatttttggagtctcctttggtatccgcaaactctacatgaaaagtctgttaaaaatctttgcgtgggctaccttgagaatggagcgaggagccaaggagaagaaccaccagctttacaagccctacaccaacggaatcattgcaaaggatcccacttcactagaagaagagatcaaagagattcgtcgaagtggtagtagtaaggctctggacaacactccagagttcgagctctctgacattttctacttttgccggaaaggaatggagaccattatggatgatgaggtgacaaagagattctcagcagaagaactggagtcctggaacctgctgagcagaaccaattataacttccagtacatcagccttcggctcacggtcctgtgggggttaggagtgctgatt

SEQ ID NO: 13814 - DNA, 496 bp, Homo sapiens
cccacgcgtccgctttgaattacttatctttgatttaatttacagccagcattttgccacgttctaaataatatttagctcaactgattcatacgtattaatgaccattctagcaaaggcctacaagtggtgtgggaatcagggaaaggctgcctctttggtatctcaactggtattgattattgctatcaactatttggggagaaaaaatcaaaatgaagccctgtcaaattttagaagtactatctttggtccttcaaacactttgtgatgacaccttaagaaaaataaagttgaagttcaggtcttgccattgccattacagacaaattaggagacttggtttacctgggaacaaatttacttgaatattcagtacctgaaactatgccaaaccaaagagcagctgcagtacattcgttattttaaatgaacaagtttacaaagtttattttcatctatacgtaaggatgatttttttaaaactttttacata

SEQ ID NO: 13815 - DNA, 312 bp, Homo sapiens
cgacccacgcgtccgcccacgcgtccggcgtgcaggaggaacgctgggcagggccggcgcgggtcggggggcgcccgaggggcccgggccgagcggcggcgcgcagggcggcagcatccactcgggccgcatcgccgcggtgcacaacgtgccgctgagcgtgctcatccggccgctgccgtccgtgttggaccccgccaaggtgcagagcctcgtggacacgatccgggaggacccagacagcgtgccccccatcgatgtcctctggatcaaaggggcccagggaggtgactacttctactcctttggggg

SEQ ID NO: 13816 - DNA, 577 bp, Homo sapiens
cccacgcgtccgccacgcgtccgcctgcccctcgccgcccgccgcctgcctgggccgggccgaggatgcggcgcagcgcctcggcggccaggcttgctcccctccggcacgcctgctaacttcccccgctacgtccccgttcgcccgccgggccgccccgtctccccgcgccctccgggtcgggtcctccaggagcgccaggcgctgccgccgtgtgccctccgccgctcgcccgcgcgcccgcgctccccgcctgcgcccagcgccccgcgcccgcgcccagtcctcgggcggtcatgctgcccctctgcctcgtggccgccctgctgctggccgccgggcccgggccgagcctgggcgacgaagccatccactgcccgccctgctccgaggagaagctggcgcgctgccgcccccccgtgggctgcgaggagctggtgcgagagccgggctgcggctgttgcgccacttgcgccctgggcttggggatgccctgcggggtgtacaccccccgttgcggctcgggcctgcgctgctacccgcccgaggggtgggagagcccctgcacacactgatg

SEQ ID NO: 13817 - DNA, 463 bp, Homo sapiens
cgcgtccgcaacggcatcatcacgcccgccaccatccccagcctgggcccctggggagtcctgcactcaaaccctatggactacgcctggggggccaacggcctggatgccatcatcacacagctcctcaatcagtttgaaaacacaggccccccaccggcagataaagagaaaatccaggccctccccaccgtccccgtcactgaggagcacgtaggctccgggctcgagtgccctgtgtgcaaggacgactacgcgctgggtgagcgtgtgcggcagctgccctgcaaccacctgttccacgacggctgcatcgtgccctggctggagcagcacgacagctgccccgtctgccgaaaaagccttacgggacagaacacggccacgaacccccctggcctcactggggtgagcttctcctcctcgtcgtcatcgtcctccttcagctcgcccagcaacgaga

SEQ ID NO: 13818 - DNA, 433 bp, Homo sapiens
cgtccggcctcaagcacatcctgcctgcagagggtctggctagctgccttttcagctctcgagggatagagattctacaacctccctctgtcatcagttccagagccactcccctttgcactagaagttcttgctttcaaagaatgagggtgtgagggagggaggggtcaagaaacagagtgacaggggaaacaggcagaacaagtcagggcaaaggaccccagcatgaatagttgtggaggtggaggtggggaagcagcctcacatctcacacttccttccttctcttaaatgtgagcagctgactccaagccttgtggaaactctagaaggtagaaccagccatctggggaagctggccttacagatgccccgtctggcatagtggaggttcctgtgctctgagaacgcagtgtgaatctagacatccact

SEQ ID NO: 13819 - DNA, 448 bp, Homo sapiens
agtcgacccacgcgtccggctggttttccgtctggtgaggggttacttccgggtcggacggcgctagctgcagcatcggagtgtggcagtgctgggctggccggcgggctgggctgcggcccgcgcgcggccggcgatgcaggggggcaactccggggtccgcaagcgcgaagaggagggcgacggggctggggctgtggctgcgccgccggccatcgactttcccgccgagggcccggaccccgaatatgacgaatctgatgttccagcagaaatccaggtgttaaaagaacccctacaacaaccaacctttccttttgcaagtgcaaaccaactcttgctggtttctttgctggagcacttgagccacgtgcatgaaccaaacccactttgttcaagacaggtgtttaagctactttgccagacgtttattaaaaaggggctggtg

SEQ ID NO: 13820 - DNA, 479 bp, Homo sapiens
cgtccgggaggttgaagttcaggctaagaccgttactgaattggttactaagaagaagccaaaggctgaaggctatgctgagggtgacctcactctctatcaccgtacctcagtcactgacttcctccgagctgccaaccctgttgacttcctctccaaggccagcgaaatcatggtagatgatgaagagttggcacagcatccagctaccactgaggacatacgggtgtgctgtcaggacatcagagtgttggggcgcaaggagctcaggtcgctactaaactggagaacaaaacttcggcgatatgtggccaagaagctgaaagaacaagcaaaggcactggacatcagcctcagctctggagaggaagatgaaggtgatgaggaggactcaacagctggaaccacaaagcagccctctaaggaggaggaggaagaagaggaaggaggaacaactgaaccagaccttggcagaaatg

SEQ ID NO: 13821 - DNA, 364 bp, Homo sapiens
cgcgtccggtgctggaggaaaatgtttctggggaagatgactcagtcattttgtggcgagacaccctttggtaactcccactgaccagtcttgggagccttcctggaatgatcgtgggctgagcggagatgttttttgcaaaatgaaactgaagctgaaagaaaggagaattcgagtgaaccaagagaaatccaaagacctggggaaggaggacttaagatgaaagtgaagcaagagagggaaggggaaatgaagtgaaaatggcgtgagggtgtgagagaggtttgggttaggaaacatgtttttagtgctatttgcaaccaggggtcgcaaactcagcagcctgtagaaacaggggtgggag

SEQ ID NO: 13822 - DNA, 561 bp, Homo sapiens
tccgggactgatctccaggaccagcactcttctcccagcccttagggtcctgctcggccaaggccttccctgccatgcgacctgtcagtgtctggcagtggagcccctgggggctgctgctgtgcctgctgtgcagttcgtgcttggggtctccgtccccttccacgggccctgagaagaaggccgggagccaggggcttcggttccggctggctggcttccccaggaagccctacgagggccgcgtggagatacagcgagctggtgaatggggcaccatctgcgatgatgacttcacgctgcaggctgcccacatcctctgccgggagctgggcttcacagaggccacaggctggacccacagtgccaaatatggccctggaacaggccgcatctggctggacaacttgagctgcagtgggaccgagcagagtgtgactgaatgtgcctcccggggctgggggaacagtgactgtacgcacgatgaggatgctggggtcatctgcaaagaccagcgcctccctggcttctcggactccaatgtcattgaggtagagcatc

SEQ ID NO: 13823 - DNA, 481 bp, Homo sapiens
gcgtccgcgcgacggccgcggcgcgggaccttaggacccgcgggctccagggctactgtccgtccgccactgcgcgccagcaggtcctggtctccgctctccaacagctgaaaggccggcgcagtgaacacagaaacgaaaaccaagaaatgccttattccacaaacaaagagttgatacttggcatcatggtgggcactgctggaatcagcttgctgctcttgtggtaccacaaggtccgtaaaccagggatagcaatgaagttacctgaatttctttctctgggtaatacatttaattcaataactttgcaagatgaaatacatgatgaccaaggaacaacagtaatctttcaagaaaggcaacttcagatactggagaagttaaacgaattactgacaaatatggaagaactcaaagaggaaatcagatttcttaaagaagctattccaaagctggaggaatatatacaagatgaact

SEQ ID NO: 13824 - DNA, 524 bp, Homo sapiens
gcgtccgctgagttccaggatggttttttcttgggaccagacatgaacaaaagttgacctcatgagcacttcaacctctccagctgccatgctcctccggaggctgcggcgactctcctggggcagcactgctgtccagctcttcatcctaacagtggtgacgtttggcctgctggcccccctggcctgtcaccgacttctacactcttacttctatctgcgccattggcatctgaaccaaatgagccaagagttcctgcagcaaagcttgaaagagggtgaggctgccctccactattttgaggagcttccctctgccaatggctcagtgcccattgtctggcaggccaccccccggccctggctggtgatcaccatcatcactgtggacaggcagcctggcttccactacgtcctgcaggttgtgtcccagttccaccggcttctttagcaatgtggcccccagtgcgaggggcaccaactctttctgtgcaacgtggagcgtagtgtgagccattttgatg

SEQ ID NO: 13825 - DNA, 278 bp, Homo sapiens
gcgtccgtgaaaataccaaaagatgtatcatttttatttgaatccatcatgcagtgtacatttcagataatttccttcagtctccagataggagtgtatccaaacatctaattttatgtgcactgtgtatcttatatgaatgttttattttatataccacatgcaaaaatgtccatatgcactatttaaatgttttaaataatatattccttctttataatgctaaatctatatgagtaccatatttttataagtcagtggtctgactggtttcattt

SEQ ID NO: 13826 - DNA, 350 bp, Homo sapiens
acgcgtcctcggacgcgtgggctaccttggaagcagtcatctctcagtcttacatttggagaatgtggatggcatgacatcagaattcctttatataatttaacttcagaatagtctgagatcatcgaagcacgatggtcaagggaattccgtttttgttttagagcaaatatgtttgctgtttgtctttcatcacaaacatcagtggagtttcagcaccttacagagctcagtgaaccccctggtcaccatcaaagttagcacacaacaaagccaaccacgtgtccccctcacagatgacaatggctgaactctgagtgaaaccacctgtatggccgggcacagtggct

SEQ ID NO: 13827 - DNA, 447 bp, Homo sapiens
gacccacgcgtccgctttttgagaatctctgctctgttcctaggttcagtgctgggtcctgggaatacagcaggacagacctcagcttatctcttcatagaaattatacaaagagaattggggagacagctaagaagaaaacaaagaaataaagcagttacaaattgtgataagtgcttttgaaggaaagaaggggtctgagacaacaacagggaaggggcctctcttgaaacagtagttgggaaggaggcagacatgcaccagtgatgtggtgacaggtgctctgaaggaggtcaccaggacctgacctctttgaaggatcagaaaatactttcctgaaggactgacatttgagcctagacctgaagggtgagccatcaagctaagacaattggggaagagcattccaaggagagggaggaagttgtgcaaaggccctggggcttc

SEQ ID NO: 13828 - DNA, 495 bp, Homo sapiens
cccacgcgtccgatctttgtctgctttcctataactcagtactgtaactcagtactctgaaatagtttcctttgttaatagagtcacttttatagtactgtgcttgaggtcatatacagagtattgtgtccaaatttatcattgcacaaagtgtttttggaaattcttggttactccttagtaaattacctgtaattgggttaaatgctggtagggtttaaaatctgattgctaagtgaattctctataaagtgagttttgatacatagaaacttttcatataattctttaaactcatgtgtcatgtattttcatttatagttttcatattcattaacaatatgttgttccttaccatttacagctcagaattctgcatatgcagattttgcaaactttgatgccattggacagtctagtggttcgagtaattttggaggttttcccacagcaagtcactttccttttcagccccaaactacaggtggaagtgct

SEQ ID NO: 13829 - DNA, 437 bp, Homo sapiens
acccacgcgttcgggcggctgcggcgggcgggcaggcgggcaggccggcaggcgggtgcgcggagggctggtacccctcagcaggtgggcggggtgcggttggcggcggcggctgggccgggggctgccggctgcgctcgggccgtgcgcggcggccgtgcgggcacgccatggacttcaacatgaagaagctggcgtcggacgcgggcatcttatttacccgggcggtgcagtacacggaggagaaatttggccaggctgagaagactgagcttgatgcccactttgaaaaccttctggcccgggcagacagcaccaagaactggacagagaagatcttgaggcagacagaggtgctgctgcagcccaaccccagtgcccgagtggaggagtacctgtatgaaaagctggacaggaaggtcccctcaagggtcacc

SEQ ID NO: 13830 - DNA, 603 bp, Homo sapiens
  misc_feature 505: n = A,T,C or G
cgcgtccgtgctgagcggtcccgaggggaggggcctgaggccgagttccagtcgctgacccctagccagatcaagtccatggagaagggggaaaaggtcttgcctccctgctaccggcaggaacctgccccgaaggacagggaggccaaggtggaaaggcccagcaccctccgtcaggagcagcgtcctcttcccaacgtgagcaccgaacgtgagagaccccagcctgtccaggccttcagcagtgcactgcacgaggctgccccctcccagctcgaggggaagctgccatctcctgatgtcaggcaggacgatggggaagacaccctgttctcggaacccaagtttgcacaggtcagctcaagtaatgtcgtcttgaagacgggatttgattttctggacaattggtaaaatgtattagaaaaatacaatgaagaaccctaaaatgttttccaaagtggtgtggtggaggaagataaaaagggccaccttttcctatgtattntactggtttcttgacactcttttcttaatcatttggaaactgggcaatactgccagatttttttcttttttggtagaaccagatatatatgctatttt

SEQ ID NO: 13831 - DNA, 533 bp, Homo sapiens
gtgctcccccttcacttcctgtgtgcggagcacgctcgccctgggagtttcactagaaagaaggttgccatgggccagtgggacagcttggatctcaagtgcacgcggatgccccagaatcccaggatctcagctgagctgtttgtggattattagatctgacttaaaagaatattatccagcaatgcaaatgaacaaactataactacacacagctgcatggataaatgtcagaaacatgacgttgagtgtgagaagccagatgcaaacgaggactcactgtgcaattctgtgcatgtacagtggccaggagaagggagcactggctttgctttcatcaggccaaagatgcctttctttgggaatacgttcagtccgaagaagacacctcctcggaagtcggcatctttctccaacctgcattctttggatcgatcaacccgggaggtggagctgggcttggaatacggatccccgactatgaacctggcagggcaaagcctgaagtttgaaaatggccagtggatagcaga

SEQ ID NO: 13832 - DNA, 385 bp, Homo sapiens
cgatctgattcctctctcacctgttagctgtgtagcattgggcaggttacttaacctgtctgtgcttcatctgtgaaacaggaataacagcattattaaggattgttttaggattggatgggttaatagatgtaaagtcttagaactatattgagcatcccatcaaggcattgtattatattgaaacaatggggtttttttctctttattcttttttaaactatataatgaacacttttgatcttaagtatttctaagcacatatgtctcttcattccaagttcccaatttgcaaaggcaggtgtagcatggcacctatctatttatttggacagtcacaacaataaaatacagagccatatatacctactcatatattaagcac

SEQ ID NO: 13833 - DNA, 232 bp, Homo sapiens
  misc_feature 211: n = A,T,C or G
cgtccggtgaatgttagtattgggtgtgggatgcatcagggacacaggtttgtaaaccatgacaattcaatttgtaaactaaagccaagtgcacctggagtcccagctgcttgggaggatcacttgggcctaaggaggggaaaatggcagggactgatattgtgccattgcattcaaactgggtggcataagggggaacctgtctctacanaaaaaaaaaaaaaaaaaaaaa

SEQ ID NO: 13834 - DNA, 537 bp, Homo sapiens
tcgacccacgcgtccgtggagggccacatctgccagagcctggagtctgcgaaggccgggacccggttccccggcccacagtgggggtgtgcaaacccgagagaactgggaagtgccgtcagaagcgataactgacgacgtctaatgtctatctgaccgcagtcgctgaaacctctacaacttagttgaccgtaactgccagagccctgccctgaattcctgtccttactccctctttaagattgcgtacccactgcagagtgctgaagacggggtagccacgaggttgcaaattcgtgaagaatcagcatcatgtttggcagctgagtattggagccaggagcctgccatgaggttttgagaacagagtgctgttttagagctggcagcagcatctcagcccaagagaaggttatattcccagagggatgtcagtcccaaggaccagtagctgccatcagtttggattctgaaaactaactggcatcaacactgggtgtagaaacatgcttgccttatgtatcagaagacatgctc

SEQ ID NO: 13835 - DNA, 535 bp, Homo sapiens
cgtccggactgtcgctctaaaagaatgaaggaaataataaagtgatagacagggaaggatagaaaagacttaacaatatacatatgttccgtctttgctgttttggagaatgatggataagtagtgtttcctgattctgaagcatagctgaacaatttaattgtggtttaccatctttttggttccctcttcagtaattaacctatcgaaaatctgtcctaaatgtttggactggggcacagttccctccatcgctttgggagaaaatcattaatatggcatactgcagattggagggcaggaccactgagggtgtcatagacattagctctatggaattctgctagcaatttccaagtgacagtgaggaattatggatatatgttgaggtcattcagcttcctgagtaccacattccccagctacttagacacgggttaaaatattaagatgtcctagttcaacagcttgaattccattgattgatactgatagtgcctgtccaagacaccagctgaaagacttgttttgtgta

SEQ ID NO: 13836 - DNA, 462 bp, Homo sapiens
cgacccacgcgtccggcttcctgggttcgaaagaacccagttcaggagtttctgttttagtttgagatcttataggcctgtctcatcaggttggtgtcagcccagctaggattaggcagaattgggtgggggctgtagtgcatctttggcacagcatgtacctgtctgactaattctctgtcttttctttcctgttgcaattcatgggtcttagcatcttctgaatggtgtttagtaggtcatcctgttgatttcctgctagggagtagcatactctggctctgtaccattggccaagggacttaaggataggtgaagggctgcagttttgttaaatggaacaatatgaagagatggcattgtaagaaaaaaatatacaacaaagtgcggccgctagactagtctagagaaaaaaccttccacacctacccctgaacctgaaacataaaatgaatgcaattg

SEQ ID NO: 13837 - DNA, 534 bp, Homo sapiens
cgacccacgcgtccgatcaaatcttgatgaaggattgtagatttttgctttttctttttgtttttaaaacttattccaattgctaaattggtagtttttcagtctttataaatacaggattaaaaatatatatacagttatatgaaatgtttattttctatgtgtgtgcatatagttcaatattatgcaataaatttggtgttttaacttaaaactatttcttattgtacttgcagaatggatagcttgcttttagtagaagcattaggtcgtatactcagataatctaatagaaggtcagatttgattcctgcataagaaagtagagccaagtgctgcagaaatggagaagaaagcaggggcaaggagcagatggcattaaggaagaatgaagtttttgaaggttgggatggacgaaaagggtgtttctcatggagagggatgctttagcaaaggctcaaacattggggcatatttaggcaagagccaagaacagtttgaaggggacatcagaggaaataggcaaataatagt

SEQ ID NO: 13838 - DNA, 507 bp, Homo sapiens
  misc_feature 494, 496: n = A,T,C or G
cgacccacgcgtccggaaatactcaaataatgcaacattacttcccagaaatgaaaatacattgcatctcttattgaaagagccaacagaggcaatgaaaaataaatgtacacatatgtgcacccttaattctttataatgaaccttgagaaatcaaggctttagaaaaatgctgagagacaagaagcttctgagcagcaacactggatgcaggaaaaaaaatggagtaataagtgtaaagttctgaggggaaaaaaaatatcagaacctagaattctaaatttaaccaaactgtcattaaagtaaatgagaaaagtaaattcttttgagaaacgcagagcctagaaagattactaatcgtagatcatcttttttgtttgtttgtttggtttgtgacagactctcactctgtcacccaggcctaggtttgcagtgagccgaggattgtgccactgccctccagcttggggtgacagagcaagactccatctcananaaaaaaaaaaa

SEQ ID NO: 13839 - DNA, 448 bp, Homo sapiens
ccgagcactacttccaccactgccacccccaagctgagggaataaactctgcctgtcgggtgccccaccaagggaaataaacatggcctagctgccaagtcatgcctgtagggtgctctctactggcagtttctgggtggtgcatacatctagtctccctagaagagcacagtccagaattgaggaggtacagcagaaacagactgcaggcagagagaggtctcatagagcttggacagggctaggcacagaaagaacaggcagcgtatccagaagggggcagggaatgggtgaagaggttgtgctctagggcagagctgagctctgatctagaaaggacagcaaagatacctggaaggcctcccgattcttgcgttgttggcgtcgctcccgaagccgggcccgctcccgttcctcctcctcttccctctccaaagctcggatgtgc

SEQ ID NO: 13840 - DNA, 520 bp, Homo sapiens
ccttgggaaaagcgtcccagagacgggaagaaatatggtataagcgagaaggcctcataaatctgggctgttaaaaatctaagttaaaaatatgttttaagtcagaaaaaaaaaaaaaaaaaaaaagtgcggccgctagactagtctagagaaaaaacctcccacacctccccctgaacctgaaacataaaatgaatgcaattgttgttgttaacttgtttattgcagcttataatggttacaaataaagcaatagcatcacaaatttcacaaataaagcatttttttcactgcattctagttgtggtttgtccaaactcatcaatgtatcttatcatgtctggatccccgggtaccgagctcgaattaattcctcttccgcttcctcgctcactgactcgctgcgctcggtcgttcggctgcggcgagcggtatcagctcactcaaggcggtaatacggttatccacagaatcaggggataacgcaggaaagaacatgtgagcaaaaggccagcaaaag

SEQ ID NO: 13841 - DNA, 438 bp, Homo sapiens
gcctggtaaaattatatagcttaaaaaaacaaaaacaaaaacacttgctttgaaaagagtctctcagcagcaattttgtccttgcccctacttccacagttccttttcttaccatttcacatctggattactacattggcctctttgcttagactcccaatattcatttgctttccttcaccccattttatggaggactgtcagatcaatcttttaaagataaattttataatgttactactgttgcctattggattagagccctaggggtgctttttgtagtctcactgacagctgacattagtgatttttcaccctcttcttattgctaccctgtgttgatggccagtttccaggtgggcacctgctccacttgctttcatttctgcctaccttggttcattgtagaaggtcctttgcactgtctcactcactcta

SEQ ID NO: 13842 - DNA, 504 bp, Homo sapiens
cggtggggtatgtgtggttcttcaggaaagtgctgaaaatatcacccaggcctctgcgccacgccctgggagagtacactcctgggctcacgcctctgcattccaaggctgacagctagaaatatactttgtaaaataccaacaacttattcacaaatattccaactatctaccagctccaatgagcttgctgaggatgggtatgaccccagtctaaggggaaagaatctaaaacacaagtaaacctgtttaaaggccagatctccagatggagatccaagcagatggcgcctaaggtttgcccttgaaaactaccaaggaagccacagagagggatctttggaccttctggaaaatggtaaggccccaggtagattatggctcctctgccctggaggctgagccgcccctctggttacctcacatcttctggtttcttctgagtgggacttgatctcatttctgcattcacagcaaggtggaactgtctggcaagagcttaaa

SEQ ID NO: 13843 - DNA, 535 bp, Homo sapiens
gcgtccggttctttggttgagcttctttgtatcagtaacaaaaggaagcatcattcagtctttctttgtaacttaatgtaagtctcttttgtacatcctattacttcaaatcattgaagtgaactccattttcacatctgttgggaacaatcatctagcttcttaaatgactcatcttaaaatatgaattttagactgcctaaacattctgagggagtacagtgtgatatagcagaaacaaccggggcttaagaaggatcaaaatgaaaggttttgtgaaggatgtgccagagactgctctctgttcaccaaaaccacattcttctcttcttcctggcatagagccagactagatttccaagctttccttgcaattgagctctcagagttctcgtcattagaatgtgaatgataggccgggcgcagtggctcatgcctgagatcccaacactttgagaggccaaggtgggtggatcacttgaggtccagagttcgagaccagtctggccaacgtggtgaaaccttcatctctact

SEQ ID NO: 13844 - DNA, 567 bp, Homo sapiens
ccacgcgtccgataaaactggatttgatttctttttatgaaagtttcatatgaatgtaacttgattttttactattataatctagataatatgatataagagggctaagaatttttaaattgaatcatatatatgatataatttgatccttcttgtatcttgaagttttgtacttgggatttctggactgataaatgaatcatcacattcttctggtaaatattttcttggagctctgtgtcaactttgatcctttgtctcccaggaaggtgtgacctctcctttgcctgcatacctcaaggccaggggaatatgcctcagtgatgcatttatctttgtatatcaggccgcatgattcccaactttctgccacacttaaattacgttcctccatttcagttttgtcttttctgtctaaagttcagtcaaagagtatcaaaaaattatgtttcagctagactggtgtaatgtataagtttttgtatcttgtattagaggatttcgtagcttttattagaggctcatttccacctcaacatacaagatcgttagtcttttggcatgtgt

SEQ ID NO: 13845 - DNA, 559 bp, Homo sapiens
agtcgaccacgcgtccgatccctagatgacataacagccttacaaaaggacagggaggagtgtctgttcctactctcacatagcggaggaaagttagagcctctcagtctctgtttatgaggactcattaatctcaaataattgatgcatttttcatacattagggtctctgtccatgtgtcttcctgatattgttatagaaatggcttcaggctgctggtaacagatgctgcggaaaaagaatgccttaaacaaagccaggcgcggtgactcacgcctgtgatcccagcactttgggaggctggggtgggaggatcacttgagcctaggagttagacacctacccagcctgggcaacacggtgagacctcgtctctacaagaaacaaataattggctagatgtcgtggcgcacagctgtggtctcggctacttagggggctgaggcgggaggattatttgagcctgggaggtcaaaactgcggtgggctgggattgcgctactgcactccgggctgggagacggagtaggaccctgccttaaaaaaaaaaaaaaaaaa

SEQ ID NO: 13846 - DNA, 532 bp, Homo sapiens
agtcgaccacgcgtccgctaatacccagtgaatcttaacagaatctcttaaagatctccaggaagtataagctctcattaatgtttgagttagaagaacttattctgggcctttaatttgttgcatgtgctgtacttaaagcatcccagataattttagcttatattttcatagtgtttatacagagcttgaattggaatggtcctttccttccttgcctcagtacttccttccataatctttcctgccataaccatttattttgccaccatttcttaaacacttatgtggcaggcattatgctagactgtaatatgttttttttaatcccagttgaagtggatgtgggaaggtattagaaagtagaagaaagtatagtctaaaatagagaggaaagaaaggaagagaaaagtgggatatttcaaaaccatttgcgcagaggtagaatgaaattcgtccagaatggaatctccgtatttctttacaataagtggtaacagttattatatagtcactaaattatctttagatc

SEQ ID NO: 13847 - DNA, 373 bp, Homo sapiens
acccacgcgtccgagtaacagtggtagtcaaattcagggttggtaagtttttccatagaaggccagatggtaaatattgtaggcttgcagaccatgtgggctccacgactcaactctgccacagtagtttgaaagcagccacaaacagccttggtgtgactttgttccagtaaactttctttatagaatgggagaaaatatttgcaaacaatgcattcaacaatggcctgatgtccagaattcatgaggaacttaaaaaactcaacaacaaaaatcaccaaataacatttaaaagtgggcaaaagatatgaatagtcatttttcaaaagaagacatacgaatggccaacaagcatatgaaaaaatactcaaca

SEQ ID NO: 13848 - DNA, 507 bp, Homo sapiens
gagtccccacgcgtccgttaaagtgtgctttggaaaagggaaaaagtcctaagtagatataaaaccctaactaaggaagaaagcaggtagcagtggtggtccaagagaccgtgtagtggatgcaaggaccgctcgtattttacacgctatatttcagcaaagggtggcccatctggcaggaagatggggacatatgtcacatatagagcagttaaggaactagggaaagtggaagactcagaagacctgtctttgacctggtatgttctatctctacagaacctaatatggcttatacatactgccacagaaaggactgaggtagacagtggcaaagacttcctaggagttgaacccctgaaattacataaggagtaggaccccaccagaattctgtctttgtaggctgctgactgcagaagaaacggtgtagcggaggcagggggaagaggagtacagagagtacactgggaaggaagaaacggtttcttttctcttcatgctctt

SEQ ID NO: 13849 - DNA, 583 bp, Homo sapiens
gagtcacccactgggccctcctaaccaaaccaggggaggggagaaggacccaattcttttcctttggtgcacgtagcctggacccgttatggacagaggccaaaggaagataacagtgtggtgtccagagatgaaaccaagtggttgatgggcagttctttgagcaaccttgtttatgagcctattgatatgcagatatagaggcatccaatactattgactaatttaaaatcttattcagtgagtcaacactctaaataagcaatggagatggttccattcatttttttgcaagtatcatttttataaacataaatttcctgagatttttgttttcatcttagcctctgtggagctgcttcgtggttatgataagtgctgtgtgatgctcaccttgggaggtctgcgacatatattgaagtcatctctaacctgaagtactgacagactttctggaagaaaaggcttgtaggaggaaacttcagaattctattaaatggtgtaaatgatgaaattatagttgatatatgctagagcatcagtgctgggtattttagaagggatggagtcatcattggctaat

SEQ ID NO: 13850 - DNA, 486 bp, Homo sapiens
tccgggccatgttcctagagcctcattggagacattgacaatgccatgaggaccttcctcaactactacactgtatggaagcagtttggggggctcccggaattctacaacattcctcagggatacacagtggagaagcgagagggctacccacttcggccagaacttattgaaagcgcaatgtacctctaccgtgccacgggggatcccaccctcctagaactcggaagagatgctgtggaatccattgaaaaaatcagcaaggtggagtgcggatttgcaacaaaagatcgctttggctgctttgtgaagaatagattgaaagggtcaaaggtgagagccatctcacatccatgcaggaaccaagcaggcaagatataaatatgaaagtagaagaaaatagtctggaagaaaatcccctgaaaagcctacagtgttgggatcaaagatctgcgagaccacaagctggacaaccgcatggagtcg

SEQ ID NO: 13851 - DNA, 565 bp, Homo sapiens
ccacgcgtccgggagtgcacccacaagatctaacagctgtttcagagctgctcattttagagtgattggtagggagttggtggctcagaggtcctaatcagaatgtgtcctgggttctgaatgactagcagactatcattaaccaaataaattatgggattttgtcttaattatatacatatacatatacacacacatacacatacacatacatgtgtatatattccctaaaacttaataaagctcaaataataaaatcagatttcttaagtattccaattccctttaaaatgtaaatcagattttataattcttttgttcaaaactgtccattggctcccatttcacttaaatcaaaagctagtttttacaataagctaagatagcaaacattattatctatttacttatgagttacttatgtaactcagcatccaataacactgtaggtgctcaataaaatagttgctgaatggataactttcactatttggatgagatccaacagaaaaggtcgacccacgtcaacgtgcacatgcaccaggagtcagctttgacacaactg

SEQ ID NO: 13852 - DNA, 540 bp, Homo sapiens
gttttagacagagcttagtgcagccagttcttgatggctgtgcaatgctttccttttaagagtggagttagcctcgtcataaagcgtgtttttgagtctgttcgaacgggtcaacaacgaagggaagtttcaggcagatcttgtatgcctggccctggtggctgctttcatttccttccagtatcagtgctaaacaggaatgaacatgttcaagccccgtctcacccacctctggcatcttcgccctaactctgccctagaagacctttccttccgtatcgtcaagaaaactgaagttgctgtttcactccttctcccacccagaaacttcgctgcatcttcctggatccctagctccttgcacccatgatcctgtctccttcctcagcccggcttctggctgagcagcctgcacttgctgtcttcactcctacacgctgcccccactcctacacgctgcccctgcgtgcttctcacttctctacccttccagccctgcactctggggacctgtgcgtatgtttgtgtgattatcaatct

SEQ ID NO: 13853 - DNA, 452 bp, Homo sapiens
acccacgcgtccgtatcctatcttcaaattttttaaatatgttcaaaatatctggagggtgagaagttaccaagtttgtatgttttgtttgactcaccatctttattttctgtatatgtagtagctggcaattgcatatattttcttgattaacatattagagactgcttccatcatcttatgtaaacctggaaacagctgaaactagtcttttctgaagaaccgtgtatcagtgttagatgtgcatcccgttttgtcattccctcagactttgaatacagtcattactctctggaagagaaatgtaagtatattttttgttatctgcagtatggtttaacatgtattaataatacacatatgcagactcactaaagtatccccagtaattagtaaattccaaatttaagtcagtacagttctgtatttgtaaattctgtctttcaaaagtt

SEQ ID NO: 13854 - DNA, 425 bp, Homo sapiens
gcgcgcggcggggcagctgctcgtccccccgcgcccccggcccggacacttggcgggtgccacgaggacccgcagcagcacgtgcggtcccccggcgttcctgggcgtgttcggccgccgagcgcggacctcggcgggagttggggcgtagggggcggcggcggtggggcggacagccaggatgcgcacttgggcccccctggccatggcggcaaaggtggacctgagcacctccaccgactggaaggaggcgaaatcctttctgaagggcctgagtgacaagcagcgggaggaacattacttctgcaaggactttgtcaggctgaagaagatcccgacatggaaggagatggcgaaagggggggctgtgaaggtggaggagcccaggtataaaaaggacaagcagcttaatgagaaaatctccc

SEQ ID NO: 13855 - DNA, 510 bp, Homo sapiens
gcgtccgagcatctaggtaacaatttgagcataactttaaccataacttatgatagcataataacattcattagtaattcagtagccgtatgtgccaggctgtgttaggtgctttatatattgtttaatttttaaaaacttgtggagtgtacagattggtaaggtgacattgtatcacacagctagtctttgagtccaaagttttgtggttttatgttatgatatacttttatcatggaattgtcttattaaatgttttgccagtggttcttaaagtgtgtttctgacaccagtagcattgacttcacttagaaacctgttagaaatacaaattatttggccccacccaacacttgagtcacaaactttgcagatggggctcaatctgttttaacaagcgcttcatgtaattttgatgcaggcctaagtttttgagccactgcagtatgcatttctatttttaagcaaagatcttggtctttctttttggacattgtagaaaataacatg

SEQ ID NO: 13856 - DNA, 427 bp, Homo sapiens
cgcgtccgctctggtaagcaggcggtacttctccttggatgtctcagccacagtgcctatcagggtactgagggagagcacacatggcccgaggccctcggagccctcggaggctgagtcaaaagagtctccctcgaattggtgggcctttagaagacttggcttcttcactggagagctataaagtaaacaccacactgagggccctcgtcccaggaaggccttcagagcattttcatttctgaacacgtcccctcatctttcaagattttctggtcctctaaagctgagaaactacaagcactgaaatgagatgagttttgataaggatggtcatgagcacaaaagcgttattcacattactcactgactctaatataattttgaaatatttcatactttggaaaaacaaaatagcctgggcgac

SEQ ID NO: 13857 - DNA, 588 bp, Homo sapiens
atcttgacccaaagaaatggagccaaagggcatgtcaagcaattgaagttaagctcatgtttttaaagatcgtttattgagatgattttgaaatgctcctttaccattcataatttaaaaataaagtttaacaatggtttaaattcagaatggattaaaatggagttgggggtggaaagtagagccattcttagtaaatataaataactgaaaagttcttctgaggagactatgtacgaagttatcattgcatctttcagtataggcagatctctccctcatataacggatgtttcttggcgcttggaatatcagataaaggtaaagtttaagaaacttctctagcgggggatttagggaacttcttaaaacctagagttaaaagctgttgcgtgtttgttgtgttattttagaccaatcaacttcataggctagactagtctagagaaaaaacctcccacacctgcccctgaacctgaaacataaaatgaatgcaattgttgttgttaacttgtttattgcagcttataatggttacaaataaagcaatagcatcacaaatttcacaaataaagcatttttttcact

SEQ ID NO: 13858 - DNA, 530 bp, Homo sapiens
cgacccacgcgtccgaaaattcacagggtgtgttggcacacgcctgtaatgccagctactcaggtggctgaggcataagaattgcttgagcctgggaggcagagattgcactgagccgagatcgcgccactatactccagcctgggcaacagacatcctgtctcaaataaattaaattacattaaatgtttaagaagaagtctaaataagtttcatatgctgccctccctcagataatgagggaacctggggtacttctgggctactctgggggacaaagtataactattcaaatggcaagttgaattagtacagtctaggagccttggagatggcttcttgaaagaggtagaacctgaaattctccttccttgagggacggccaggatttggccagatggaaaggcaagtggaaggctttgcagggacaagcaatgtaagcagaacctaaaaatgggaaggaacaaaactgaaagggaatgattgtgggtcaggggccaatggcgatgtgacattcatcctatagaacc

SEQ ID NO: 13859 - DNA, 533 bp, Homo sapiens
  misc_feature 439: n = A,T,C or G
cgcgtccgggtaattctaggggaaattatatttctgaacaacaatgttggtttgtgcaggaaaatcaccaaagaacatgactagaaagtgtatagctacagtttccctcttttaaatgggaatagcaaaacatataaagaatattgataggccgggtgcggggctcacgcctgtaatcccagcactttgggaggccgaggcgggcagatcaagaggtcaggagatcgagaccatcatggctaacacggtgaaaccccgtctctactaaaaaatacaaaaaattagccgggcgtggtggtgggcgcctgtagtcccagctactcgggaggctgaggcaggagaatggcgtgaatccgggaggtggagcttgcagtgagccgagatcgcgccactgcactccagcctgggtgacagagcgagagactctgcctcaaacaanaaaaaaagacaaaacataaaagtgcggccgctagactagtctagagaaaaaacctcccacacctccccctgaacctgaaacataaaatgaatgc

SEQ ID NO: 13860 - DNA, 542 bp, Homo sapiens
cgacccactctctggcttggccaggtttaaattaataaaaatgaagatgaaaataagttgtcagatttaggatgtattttagaaacccaactgataatttgccaactaattggatgcagagagtaagagggagactcaagaacacctctaagatttttaccctgatcaatgggataggtgaaagtacattaatggagattgagaatcctggtggaggtacaagtttaggggtactgaagagtgcttttggacatgtgaattcttagaagcctactagattctccaaatggagacataaaacataattgaatacaaaagtcaggagttcaggagagggctgagctaaagatacaaatttgatagacatgagcatttaaaaaaaactgcatgaaaatactaaagataggctgtcctgcctatggaatagccattctttgatccctttactttcttaataaacttggtttcaccttactctatggacttcccccaaattctttcttgtgtgaggtccaaaaactctctgttggggtctagatcag

SEQ ID NO: 13861 - DNA, 663 bp, Homo sapiens
  misc_feature 644: n = A,T,C or G
gtccggcaatttgcttattctaattgagacacactggtggggagtgggggtcggggactacacaggtgcattttctgaacatttataaaatgaaaaagatggaggcttggctagaatggttaatccccttttcattcctctaattctatgacaatttttcttaaaaaaccaaacacaaccaaaataagagtggacagttgagaattacctttaggttcccatgaccctgaagactgtatttggccttggatccattaaaaaaaaaaaaaaaaaaaaaaaaggtgcggccgctagactagtctagagaaaaaacctcccacacctccccctgaacctgaaacataaaatgaatgcaattgttgttgttaacttgtttattgcagcttataatggttacaaataaagcaatagcatcacaaatttcacaaataaagcatttttttcactgcattctagttgtggtttgtccaaactcatcaatgtatcttatcatgtctggatccccgggtaccgagctcgaattaattcctcttccgcttcctcgctcactgactcgctgcgctcggtcgttcggctgcggcgagcggtatcagctcactcaaaggcggtaatacggttatccacagaatcaggggataacgcangaaaagacatgtgagcaaa

SEQ ID NO: 13862 - DNA, 541 bp, Homo sapiens
cgcgtccgcggccatttctgtatccccctgcctgggtttgctgccctttatgctcctacctcaccaggtacaaggaacatgaagatggctatatgcggctgcagctggttcgctacgagagtgtagagctgacacagcaactgctgcggcaaccacaagagggatcgggcctgggaacgtcgctgaacgagagcagcctgcagggcattattctagaaacagtgccaggggagccaggacgtaaggaagaggaagaggagggcaagggtagcgaagggacagccctctcagcctctcaggacaaccccagttctgtcatccacgtggtgaatcagaccaatgcccaaggccagcaagagattgtctactatgtgctgtctgaagccccaggggagcctcccccagcccctgagccaccttcagggggcatcatggaaaagcttcaaggaatagctgaggagccagagatccagatggtttgaaggccgcagagccagaccatttcttccccaggtcctgaagtttgagccaggcaagtggc

SEQ ID NO: 13863 - DNA, 625 bp, Homo sapiens
  misc_feature 537: n = A,T,C or G
gcgtccgtaatttaaagaaccttgttattagaaaatctcagcctaatacaatctgaagttaagagttttagcagcattgtttttctaagtagatttagctatagattttcttctggccaaacaaggaagagtatatgcccttgtaaatgagtcttgtttgtttatttaaatagtcagtcaaaacgtagaaatcagtatacgtaaaataaaatgcatgagactattaaatcttttcatatactctacaaataaaatgaaatctgtgtgtggtcctggttgactgggcatctaaagggaatcagaaaagagattgtgaaaagttatatatatatcctcttccttattttagttttgctttttcctattttccataattaagtgccgtttacaaagtggcatcaaaaaattgaagcaggccaggcatggtggctcatgcctgtggtcccagcagtttgggaggctgagggcaggtggatcacttgagatcgggggttcgtgaccagcctggccaacatggtgaaagcccatctctactgngaatataaaaattagcccggcgtggtggcatgtgcctgtggtcgcagctacttgggaggctaagacaggagaattgcttgggcctggg

SEQ ID NO: 13864 - DNA, 568 bp, Homo sapiens
cgacccacgcgtccggttttttgtccacagcagtggcatttaaattactgtactttaagacatggaattgctggaggcttggaaacttgagtgcaatttccctagtacgacctgcaaggagaatagagcaaaacagtggtaggaaaaactctcaaaattttacccaattgtatgttttctacattgtcagtatctagttttatatagttaatatgtacttctaaaatttctgacagtgattggtgtataaaacagaccaagctcaagatgtaaagaagattgagaaattccacactcaactaatgcgacttatggtagccaaggaagcccgcaatgttaccatggaaactgagtgaatggtttgaaatgaagactttgtcgtgtacttaggaagtaaatatcttttgaattatagaaagtgttgggacagaaagtactttatgtaactaagtgggctgttcagaagcttagaggtcattttttgtaattttctttttaattactttagaaagctagggatgcaaatgttttcaagttgaaagcctttatttacttctggaaattgaac

SEQ ID NO: 13865 - DNA, 562 bp, Homo sapiens
  misc_feature 514: n = A,T,C or G
cgacccacgcgtccgattccttcttcatatattatgtcagaagagtttgagaagaaatggtattaattcttctttaaatgttaggttgactcaccagttaatgcagctatttggtcataaatgtttctttgttaatcactttcgattactaattcaatctgctaggttataggtctattcagattttctctttcttcttgagccactttggtagtttgtgtctttctagtgattcgtccatttcatccaggacagctaatttgttgttagacagttgttcacagtatactcctgtaatccttttgtatttctgtaaagttggtagtaatggctctgctttcatttattattttaataattagtcttccatcttttgctcagtcaatatagtgaaaggcttgatctttcaaataatctatgtttattcattctactgctctccaaacttctattttattgatttatgctctaattatgctctctattatttctttcatactgctaagcttggatntagtcttattttgtcttcttccactgcctttaggtatagagtggagat

SEQ ID NO: 13866 - DNA, 661 bp, Homo sapiens
  misc_feature 609: n = A,T,C or G
gagtcgacccacgcgtccgggatgactaatgaaagcaattagcttgaacatttagaaaaaattcatatatgatctaaatttttatattatcatttctgtgccttctaattcctgcatcctgttcaaaacatctttccagacattaacttacacattgtataaaaccgaccaaaatgatttcctaaagttcatgcaaaaaaaaaaaaaaacaacctaattttctgttaatataaaagaaacttcagtttactgaccgtgaaacagactatgtactgacatccagggtaaagtaaaagacttttaaatattggtcattaaaggacaggagctaagctagcaaagcaaaacatctttagcactttgcagatctcaagcagttaaccaggctctgattcccttccactgttttatgaattaattccagttcttttcatgtatctttgaacctaagattatgaagtaatttccctattagggactagaatgacttcagttttttcatttgataaaaatcagaactgctacctttcccttttttaatgatgcaaaatgtagatgagtgcattaaggtttgtaagatctttatcattttatgtcattcattgaaanatgaaatgttcattctttttaatgttttcctatttccttttgcctagcattt

SEQ ID NO: 13867 - DNA, 605 bp, Homo sapiens
ctttcgtctcttcctttaaagttgtataccacttctttttcttgtcattttgcattgcctgggacctccagaataatgtttcatgaagtagcatgtatccatatctggttcttgactttttcatcattataattgttttctatgggttacttatcagttaagaatgcttaattcctagatgaactaagagtgtttattacatgttgagatttatggtatgctttttcttcctcaagataatgcattttttgtattatctgttaatgtgataggttatccatttgtgtattttcaatcattgaacaacccttgatttttttggataaactctatttggtcattatgcatcattctataaaccctgctgaatttttcatttgccaacatcttatttcagattcttttaatctgtgtccaacaatgagatttgttttcttttgcaatttgttttgaatttttggtatcagagctatactaaccttataatggaaaatacatatttctcaaacttttacactgatatattcatagtatttttttataatttgaaaaatcttgtcagtatctgtattaaggcctccatttcagttctgctatttcatatt

SEQ ID NO: 13868 - DNA, 441 bp, Homo sapiens
tggtgatggaatatgtctcaggaggagagctatttgattatatctgtaagaatggaagggtaagctgttctgctttaattctgtatgtattttgtagctcgcctttatcctttactagcatcaaaatgtcagcaaccaattttaagaggtctatttaataaccagttcccttagtcatatatttgtttagaatcataaactatgtagaactagaaaggatcttaaagattatctccttagcctgtttatacagatgtggatactgagcctcgcggcttatatgattgctcacagtaacgtgatttattaatgacggaattggcttgagcccccagaactcataatcctcagacttatgcttccagggtatacaaatactttgaatatgtatcttaatgtaattaattcgttacaaaatatattattattacttaaagatct

SEQ ID NO: 13869 - DNA, 501 bp, Homo sapiens
gtccgattgtcatctattttacttttacatatgtgataaacctaacactacatggtcatttttgtttaaacagtcaattaccttttaaagggatttgaataataagtacaaaatctaatacattaactgtgtagttagcatttctggtgctcttctttcttttctgtagatccatacttccatctggcattattttcctactgccagaaggacttcctttaacatttcttgtagtgtagatctgctggtgatgaattctttcagcttttgtaattcttttgtctttgaaaggtattttccctgagtataggttaatagctttttcctttcagtactctaaagatgttgctccaggccaggcgcggtggctcactcctgtaatcccagcactttgggagtctgaggtgggcagaacacttgaggtcaggagtttgagaccagcctggccaacatggtgaaaccccgttgctactaaacatattaaagaaaaaaaagattagc

SEQ ID NO: 13870 - DNA, 528 bp, Homo sapiens
gtgacatgctggctgctagtcagctcccaccatgattgtcagcttccgagccctcactagaagcagataccaccccaccaccatgtttcctttaaagcctgcagaactgtgaaccaattaaaactcttttctttataaattatccagcctcaagtatttatagcaacacaataatggcctaacacaacctacaactctctatatgtatttgtgtgtatttaaaacatgcaggaaataacacagaatccaaggcacccaaaactcattaaaaaatggaatcaagaattcatatgccattatgaaattagccagtcctaaaatctgacctctctgcattttcacattattctcctctctctatccctgccttcctccctcccttcctccaactgtcagaattgtcctgtaatcaaacatgttcacatcacagcttttcattttctatttccaatcaattgaccagtctagaccaagtagcatcctggatccgtattacatattcctagacagtaagccagattttttttt

SEQ ID NO: 13871 - DNA, 556 bp, Homo sapiens
gctctttagcaggagacaattcttaaacttaaattaaactgaaaaagccacagaaaaaagggtttgacaccctaaagccagtgtccaaatgaacgctacggttgagctgataggtgtgttatgaatgtttaccctgacctcctagaagaaaaggaaaaagaaaggaaagagagagggagaaggtgagggaaggggggaagaaaagaaaggagagaaaagaagacagagaaaaaacagggagggaggaagctggggaaggaaaaagaccatttgctgactccgttgttttatttcccagaatgattcaatacctcaagaagatttcactccagaagtgtacagagttttcctcaacaacctttgccctcgacctgaaattgataacatcttttcagaattgtaagagtacacattttaagccatatctttttcagcttgcattgattctcaggtggctagagcaggacttggagtggtaattggagatggaagaacatcatacactgtgtctaaaagcaatattcctgtgtgatgttttggtaggatcacacaatct

SEQ ID NO: 13872 - DNA, 547 bp, Homo sapiens
tggcggccgaggtactataatggtccccatcttaatttgaaagcgtttgagaatcttttaggacaagcactgacgaaggcactcgaagactccagcttcctgaaaagaagggcgggacagtggctacgggacatctggtgtcctgaacgtggagaatttcttgctcctccaaggcaccataagagagaagattcctttgaaagcttggactctttgggctcgaggtcattgacaagctgctcctctgatatcacgttgagaggggggcgtgaaggttttgaaagtgacacagattcggaatttacattcaagatgcaggattataataaagatgatatgtcgtatcgaaggatttcggctgttgagccaaagactgcgttacccttcaatcgttttttacccaacaaaagtagacagccatcctatgtacctgcccgggcggccgctctagaactagtggatcccccgggctgcaggaattcgatatcaagcttatcgataccgtcgacctcgagggggggcccggtacccagcttttgttcccttt

SEQ ID NO: 13873 - DNA, 623 bp, Homo sapiens
ccctctagatgcatgctcgagcggccgccagtgtgatggatatctgcagaattcgccctttcgagcggccgttcgggcttgtacgcgggggcagcgggaagctcgcagcagctggggaggagccaaagcctcggcgctcacctaagccgcagggagatacacccaactgggagatgaggaaacagcaacccagagaggagaactaacccacacaggatcatttcgcgaaggagcaaggctgaagaaccagacctggactttcttaggacaaacttactgcagcttgaaggagccaaccatggatttgaggcgtgtgaaggaatatttctcctggctctactatcaataccaaatcattagctgctgtgctgttttagagccctgggagcgatctatgtttaacaccatcttactaaccattattgctatggtggtatacactgcctatgtctttattccaatccacattcgcctggcttgggaatttttctcaaaaatatgtggatatcacagtacctcggccgcgaccacgctaagggcgaattccagcacactggcggccgttactagtggatccgagctcggtaccaagcttggcgtaatcatggtcatagctgtttcct

SEQ ID NO: 13874 - DNA, 566 bp, Homo sapiens
ccctctagatgcatgctcgagcggccgccagtgtgatggatatctgcagaattcgccctttcgagcggccgttcgggcaggtaccaaatgaagtgtgaagacaaggccatccaccactttatagagggtgtaaaaataaaccagaaatcaagggagaaagaaaagatgaaagacaactgcaaaaaattgccaaaatgcgactttctaaaaatggagcagattctgaggctttgcatgtcttggcattccttcaggagctgaatgaaaaaatgcaacaagcagatgaagactctgagaggggtttggagtctggaagcctcatcccttcagcatcaagctggaatggggaatgaagaatagagatgtggtgcccactaggctactgctgaaagggagctgaaattcctccaccaagttggtattcaaaatatgtaatgactggtatggcaaaagattggactaagacactggccataccactggacagggttatgttaacacctgaattgctgggtcttgagagagcccaaggagttctgggagagggaccagattggggggtaggt

SEQ ID NO: 13875 - DNA, 476 bp, Homo sapiens
ccctctagatgcatgctcgagcggccgccagtgtgatggatatctgcagaattcgcccttagtttgtgcctttgtaccaaatgaagtgtgaagacaaggccatccaccactttatagagggtgtaaaaataaaccagaaatcaagggagaaagaaaagatgaaagacaaactgcaaaaaattgccaaaatgcgactttctaaaaatggagcagattctgaggctttgcatgtcttggcattccttcaggagctgaatgaaaaaatgcaacaagcagatgaagactctgagaggggtttggagtctggaagcctcatcccttcaacatcaagctggaatggggaatgaagaatggagatgtggtgcccactaggctactgctgaaagggagctgaaattcctccaccaagttggtattcaaaatatgtaatgactggtatggcaaaagattggactaagacactggccataccactg

SEQ ID NO: 13876 - DNA, 527 bp, Homo sapiens
  misc_feature 386: n = A,T,C or G
cgaattgggccctctagatgcatgctcgagcggccgccagtgtgatggatatctgcagaattcgcccttagcgtggtttcggccgaggtaccaaatgaagtgtgaagacaaggccatccaccactctatagagggtgtgaaaataaaccacaaatcaagggagaaagaaaagatgaaagacaaactgcaaaaaattgccaaaatgcgactttctaaaaatggagcagattctgaggctttgcatgtcttggcattccttcaggagctgaatgaaaaaatgcaacaagcagatgaagactctgagaggggtttggagtctggaagcctcatcccttcagcgtcaagctggaatggggaatgaagaatagagatgtggtgcccactangctactgctgaaagggagctgaaattcctccaccaagttggtattcaaaatatgtaatgactggtatggcaaaagattggactaagacactggccataccactggacagggttatgttaacacctgaattgctgggtcttg

SEQ ID NO: 13877 - DNA, 648 bp, Homo sapiens
gctcggatccctagtaacggccgccagtgtgctggaattcgccctttcgagcggccgcccgggcaggtacttttttttttttttttttttcaggacttgtgacagttccaccttttactctcattggtaaaatctccttttaattattaaaaatattgataaatttattaaattaagtctttcattcttttgtaatcagaagaggacattaatgttgcgtgtcttgactgtcttttttgctttgtagatttattttgtgctaaatgagaacgatatgcatgtttgtgtttgatttttccagaagcagttactttaattctttttttaagtgctgattttgtttttgctttaggcattagttacttcttcctttatagttttttcaaaatcaattaattcctttatttgttttgaagaagtaaatttgggtaattttttcttatcacgttcaatatgaagagttaaaaaattaccaactgattgcatttctttacttaattttgcaatcgattttacttcatcaaaaaaagaatttaaaattaatttaccttgttcaggtcttgaattttcacgccctctaagacgaagagccacttttactctgtcgttatctaataaaaattctatggctttttttgctttgatttt

SEQ ID NO: 13878 - DNA, 536 bp, Homo sapiens
catgctcgagcggccgccagtgtgatggatatctgcagaattcgcccttagcgtggtcgcggccgaggtaccaaatgaagtgtgaagacaaggccatccaccactttatagagggtgtaaaaataaaccagaaatcaagggagaaagaaaagatgaaagacaaactgcaaaaaattgccaaaatgcgactttctaaaaatggagcagattctgaggctttgcatgtcttggcattccttcaggagctgaatgaaaaaatgcaacaagcagatgaagactctgagaggggtttggagtctggaagcctcatcccttcagcatcaagctggaatggggaatgaagaatagagatgtggtgcccactaagctactgctgaaagggagctgaaattcctccaccaagttggtattcaaaatatgtaatgactggtatggcaaaagattggactaagacactggccataccactggacagggttatgttaacacctgaattgctgggtcttgagagaagcccaagagttctgggagaggga

SEQ ID NO: 13879 - DNA, 678 bp, Homo sapiens
  misc_feature 515: n = A,T,C or G
tagtaacggccgccagtgtgctggaattcgcccttagcgtggtcgcggccgaggtacatgctacaaaacattatcacagatacgacagagtgtggtttttttttagaaatgggtaatttctctctccagtatcctttcacttgtatgagatatttctcctctcctgttttcacaaaccaagaaatccccaggtaggccaatcccagaggtgccatttagcagtatgcagcagcccagtttcagcataacaaaacatgccttggtagtggctctctcatgcaaataaaagaaagcttaagaaattcttgttgtaggtggattaggcaaggctgccattcagctggtataagctaaaagtaaaaaatcaaaacgctcaagaaaacggacacaattttggaatgattaaagatgtctatataaagcttttttcaagacttcattctaaatacacagaataaaaaatggtgtcagctcacttgtaagacaccaaccagattctccttatactgtctcanaatttaaagatcaatttccacagagggtgtgcaatgcatcataaaatggcccttttttgaggatgggagaggaagggttgggcaggatggaatattaaattgtaacatgataaacatgcaagacttgtatcccatctagataatttatatacattttgatgac

SEQ ID NO: 13880 - DNA, 609 bp, Homo sapiens
catgctcgagcggccgccagtgtgatggatatctgcagaattcgccctttcgagcgttcgccctttcaggtaccaaatgaagtgtgaagacaaggccatccaccactttatagagggtgtaaaaataaaccagaaatcaagggagaaagaaaagatgaaagacaaactgcaaaaaattgccaaaatgcgactttctaaaaatggagcagattctgaggctttgcatgtcttggcattccttcaggagctgaatgaaaaaatgcaacaagcagatgaagactctgagaggggtttggagtctggaagcctcatcccttcagcatcaagctggaatggggaatgaagaatagagatgtggtgcccactaggctactgctgaaagggagctgaaattcctccaccaagttggtattcaaaatatgtaatgactggtatggcaaaagattggactaagacactggccataccactggacagggttatgttaacacctgaattgctgggtcttgaaagagcccaaggagttctgggagagggaccagattggggggtaggtccacgggcttggtgatagaattatttctcgattgacttcttgagtgcaatttg

SEQ ID NO: 13881 - DNA, 266 bp, Homo sapiens
gggaacaaaagctgggtaccgggccccccctcgaggtcgacggtatcgataagcttgatatcgaatttctgcagtttttgggatccactagttctagagcggccgcccgggcaggtacagcctctcggcccggctaaacatcatcgtcttggtaggccattaccctaccaactaactaatgttccgcacccccatttttaagtgaagctgtgaagctcctttctattactcatcatgcgataaataactatatccggtattagcta

SEQ ID NO: 13882 - DNA, 486 bp, Homo sapiens
gcgaattggagctccaccgcggtggcggccgaggtacgcggtgctttccaaacagcataagaagtgattgagcctttagtatactgaaggaagggctccctcgagttctggtgtgaagagataaatcaccagaaaaatgatggcatcaaaacaaaaaaagaactcattgtgaataagaaaaaacatctaggcccagtcgaagaatatcagctgctgcttcaggtgacctatagagattccaaggagaaaagagatttgagaaattttctgaagctcttgaagcctccattattatggtcacatgggctaattagaattatcagagcaaaggccaccacagactgcaacagcctgaatggagtcctgcagtgtacctgcccgggcggccgctctagaactagtggatcccccgggctgcaggaattcgatatcaagcttatcgataccgtcgacctcgagggggggccccggtacccaacttttgtt

SEQ ID NO: 13883 - DNA, 383 bp, Homo sapiens
tcactgcccgctatccagtttggaaatttgtcgcgccagctgcatgaatgaatcggccaacgcgcggggagaggcggtttgcgtattgggcgctcttccgcttcctcgctcactgactcgctgcgctcggtcgttcggctgcggcgagcggtatcagctcactcaaaggcggtaatacggttatccacagaatcaggggataacgcaggaaagaacatgtgagcaaaaggccagcaaaaggccaggaaccgtaaaaaggccgcgttgctggcgtttttccataggctccgcccccctgacgagcatcacaaaaatcgacgctcaagtcagaggtggcgaaacccgacaggactataaagataccaggcgttcccccctggaag

SEQ ID NO: 13884 - DNA, 501 bp, Homo sapiens
  misc_feature 235: n = A,T,C or G
ccgatttagtgctgtacggcacctcgaccccaaaaaacttgattagggtgatggttcacgtagtgggccatcgccctgatagacggtttttcgccctttgacgttggagtccacgttctttaatagtggactcttgttccaaactggaacaacactcaaccctatctcggtctattcttttgatttataagggattttgccgatttcggcctattggttaaaaaatgagctgatntaacaaaatattaacgcgaattttaacaaaatattaacgcttacaatttaggtggcacttttcggggaaatgtgcgcggaacccctatttgtttatttttctaaatacattcaaaaatgtatccgctcaatgagacaataaccctgataaatgcttcaataatattgaaaaaggaagagtatgagtattcaacattttcgtgtcgcccttattcccttttttgcggcatttcgccttcctgtttttgctcacccagaaacgctggt

SEQ ID NO: 13885 - DNA, 268 bp, Homo sapiens
gcgcgctcactggccgtcgttatacaacgtagagactgggaaaaccctggcgttacccaacttaatcgccttgcagcacatccccctttcgccagctggcgtaataacgaagaggcccgcaccgatcgcccttaccaacagttgcgcagcctgaatggcgaatgggacgcgccctgtagcggcgcattaagcgcggcgggtgtggtggttacgcgcagcgtgaccgctacacttgccagcgccctagcgcccgctcctttcgctatct

SEQ ID NO: 13886 - DNA, 325 bp, Homo sapiens
gcggccgagggaccaaacgaaccgcgaagacaaggccatccaccactttatagagggtgtaaaaataaaccagaaatcaagggagaaagaaaagatgaaagacaaactgcaaaaaattgccaaaatgcgactttctaaaaatggagcagattctgaggctttgcatgtcttggcattccttcaggagctgaatgaaaaaatgcaacaagcagatgaagactctgagaggggtttggagtctggaaacctcatcccttcagcatcaagctggaatggggaatgaagaatagaaatgtggcgcccactaggctactgctgaaaggga

SEQ ID NO: 13887 - DNA, 889 bp, Homo sapiens
  misc_feature 12, 13, 14, 16, 20, 22, 54, 62, 89, 90, 158, 163, 185, 195,218, 307, 399, 612, 618, 643, 654, 675, 737, 794, 889: n = A,T,C or G
tttacttttacnnncncttngnaaggtgacaaaagcgccgaccgggcccccccncgagggcnacggaaacaaaaagcaggatttttaanntatagcagcccgggggaccctggtgttttggagcccaccgcgggggagccccaacccgcccaagaggncgcanacgcgcgcacacaggccgccgnacaacaacgncgagacggggaaaaccccggcgnaacccaacagaaacgccaggcagcacagacacacaacgccagcgggcggaagagcgaagaggcccgcaccgaacgcccaacccaacagnggcgcagccagaaaggcgaaagggaccgcgcaccagcaagcggcaacaacaaacgcgcgagcgggaagaaggaggagaacaccgcaagcagngaaaccggcaacacgaagccaaggcgccacgagacagcccgacaaccagaccgcacgacacacccaggcacagacccgaccacgaaacgcacgggcgagacccccgacaagccaccaaaaaccgagggacaacacacaagaggaacccgagacgagaagccaacaaggcacccaccgacacccaaaaaaacacgggaaaagaggcgagaggcnccacgnaaaagggggccacacgaccccgganagaacaggganacacagacccacagaacaganggaagacacacggccgccagaaaaaaggggcacccggggaacccaaacaggaaaccaacacncaaaccccaaaccggggagccaaacgaacggacacaaaaagggaagaaagccgaaanaccggcccagaggagaaaaaaaaggaccgaagcaaacaaaaaaggaacgcgaaagcaaacacaaaaaaaacgccacacaagcagaggggaccccn

SEQ ID NO: 13888 - DNA, 787 bp, Homo sapiens
  misc_feature 11, 13, 14, 15, 16, 18, 23, 27, 68, 72, 138, 140, 148, 155,161, 179, 183, 184, 185, 203, 209, 213, 214, 227, 238, 251,256, 265, 292, 298, 324, 348, 375, 393, 413, 429, 432, 459,469, 479, 502, 504, 561, 691, 707, 730, 755, 756, 771: n = A,T,C or G
ttgaggttttnannnncnggttncaanaagcgcgaccgggccccccccgagccgacggatcgaaagcngaancgaattttcagatgggggaccaccaaagggagcgggcgaagaaccacacgcacggccagcagcccngncaacaggncaagagngaaaancacagggacaccgagcancccnnncggcaaggacccacagcngcaggngganngccacaccgagangaaggaagacncagacagcgccanccaancccgagggnaccggcccgggcggccgccaccgcggnggagcnccaaaacgcccgaaagagaggcggangacgcgcgcacacgggccgacganaaacaacggcgagacagggaaaacccnggcgacacccaacaaaancgccgggcagcacaaccccncaacgccagcgggcgnaanaacgaagaggcccgcaccgagcgcccnacccaacagnggcgcagccngaaaggcgaaagggacgcgcccngnagcggcgcaaaaagcgcggcgggagggggggaaacgcgcaacgggaccgcaacacangccagcgccccaacgcccgcacccaacgccaccaacccagcccagcacgccacggacgccggcaacccccgacaaggcccaaaaacgggggccccccgaaaggggaccgaaaaagagcgaaacagcaccncgaccccaaaaaaccngaaaagggggacggaccacgaangggccaacgccccgaaaaaacgggnnaccgcccacgaccgnggagaccaagggccac

SEQ ID NO: 13889 - DNA, 539 bp, Homo sapiens
gcgtccggaaaggaggggaggggtggggcgggccggatctgctcgcaggccgcacccgcctccggctggatgctcagagtctcgccctgatggccagactggagtgcagtggcgtgatctcggctcactgcatcctccacctcctaggttcaagtgattcttccacctcagcctcccctcccaaggagctggcatcacaggacaggcacggagactcacgcctgaaatcctaatactttgggaggccgcggcaggaggatcacctgaacccaggagtttgagaccagcctgccaacatgatgttgttattcatgaggaccaatgggttggcgagacagtactacaatcaacatttagcagtcagttattaaatcttgggagttattcatctattcagcctgaagaatattccagtgtagttagtgatgttgtacttcaagacttactggcatatgtgtcctcaaaacattcctacctcagagatcttcctccgaggcagcctcagagggtgaatagtatagactttgtagaattggagc

SEQ ID NO: 13890 - DNA, 502 bp, Homo sapiens
gcgtccgggtaaacaaaacaaagatcgtttgttctggaaacaggtaaaatggtaatcaaatagattgtgttccaggagtgcaaaggtggcttaatattcacaaatcagttgctattgtacaccacctgtagaaaagtaatctggcatgcagaacattcttatggtaaagttaatgttcatttatgatcttagcaaatgatggattgaaagggacttccttaattgcataaacagacttcaacaaacagtatgatgaaatagtgaacatttctcctaagattataaaaataagacaaggatatctgctgtcaatgattttattcagcattgttcagaaggacctaaccagaaaactaatgcaagaaacagaaacaaaaggcataaagattagaaaagaagtaaaattttaaaaaagaaaaagaatataaatctctatttgcatatgccatgagtaaatttggtaagttccctgcataaaagttatgcaaaaagcattttatga

SEQ ID NO: 13891 - DNA, 589 bp, Homo sapiens
tatagggcgaattggagctccaccgcggtggcggccgcccgggcaggtaccaaatgaagtgtgaagacaaggccatccaccactttatagagggtgtaaaaataaaccagaaatcaagggagaaagaaaagatgaaagacaaactgcaaaaaattgccaaaatgcgactttctaaaaatggagcagattctgaggctttgcatgtcttggcattccttcaggagctgaatgaaaaaatgcaacaagcagatgaagactctgagaggggtttggagtctggaagcctcatcccttcagcatcaagctggaatggggaatgaagaatagagatgtggtgcccactaggctactgctgaaagggagctgaaattcctccaccaagttggtattcaaaatatgtaatgactggtatggcaaaagattggactaagacactggccataccactggacagggttatgttaacacctgaattgctgggtcttgagagagcccaaggagttctgggagagggaccagattgggggtaggtccacgggcttggtgatagaattatttctcgattgacttcttgagtgcaaattgaact

SEQ ID NO: 13892 - DNA, 483 bp, Homo sapiens
ttggagctccaccgcggtggcggccgcccgggcaggtaccaaatgaagtgtgaagacaaggccatccaccactttatagagggtgtaaaaataaaccagaaatcaagggagaaagaaaagatgaaagacaaactgcaaaaaattgccaaaatgcgactttctaaaaatggagcagattctgaggctttgcatgtcttggcattccttcaggagctgaatgaaaaaatgcaacaagcagatgaagactctgagaggggtttggagtctggaagcctcatcccttcagcatcaagctggaatggggaatgaagaatagagatgtggtgcccactaggctactgctgaaagggagctgaaattcctccaccaagttggtattcaaaatatgtaatgactggtatggcaaaagattggactaagacactggccataccactggacagggttatgttaacacctgaattgctgggtcttgagagagcc

SEQ ID NO: 13893 - DNA, 480 bp, Homo sapiens
tggagctccaccgcggtggcggccgcccgggcaggtaccaaatgaagtgtgaagacaaggccatccaccactttatagagggtgtaaaaataaaccagaaatcaagggagaaagaaaagatgaaagacaaactgcaaaaaattgccaaaatgcgactttctaaaaatggagcagattctgaggctttgcatgtcttggcattccttcaggagctgaatgaaaaaatgcaacaagcagatgaagactctgagaggggtttggagtctggaagcctcatcccttcagcatcaagctggaatggggaatgaagaatagagatgtggtgcccactaggctactgctgaaagggagctgaaattcctccaccaagttggtattcaaaatatgtaatgactggtatggcaaaagattggactaagacactggccataccactggacagggttatgttaacacctgaattgctgggtcttgagagag

SEQ ID NO: 13894 - DNA, 553 bp, Homo sapiens
ctatagggcgaattggagctccaccgcggtggcggccgaggtaccactctatccatcgtggatagagaaactgaagctctctaaagaccctgcagctgggaggtggcagagtcaatggcagccctcagccctatctgccctgacatggcattcctcccatttctcaccaccgaaccctctaaaataacaatgtgtggggtccttggctgagagacttcccttttgggaatcaatctgaatgtatgatgacaaagaaaacaacttttgctttatacaaccttctggttagattcaggcaccaagcaggacacttctttgtggcgctccaagaatctttcaaattcttcatcaccaataacaaatctttctgcttctcttagagcatcttctccacaattctcaccctcaattaagaggcactggaacactttccagcggacagggtttagtgctttgatctgttccgtcatgtcctcttccacgttgaaacgattaatgacagaatttatttggagcgactctataatccctacaccacctcctcagcttttga

SEQ ID NO: 13895 - DNA, 521 bp, Homo sapiens
ttggagctccaccgcggtggcggccgaggtacgccaccatgcctggctaatttttgtatttttagtggagacggggtttcaccatgttggccaggctgttctcgaactcctgacctcgtgatccacccacattgtcctcccaagtgctgggattacaggcgtgagccactgtgccatgaggattagtaaagtgcactcatggtaagtaaaaaatttgttttatgtttatgctgattatatgaaggtcatcatagcttagacacaatcaaaacccatggggaacatctttagaattcatttttctcttttcttacaaaaaaagtaaataggtaaaatggaaaatagaagacaacctatcctatcctggatgagacacacacatatttaaattgaattatagacttaaaatttaagtaggaatttttttttttggaaacaaagttcccaaaacccaaaactttcagaatcaccaagtcttggaaatagattatgaagcagactttttggatggtgcttaatga

SEQ ID NO: 13896 - DNA, 397 bp, Homo sapiens
ttggagctccaccgcggtggcggccgcccgggcaggtaccaaatgaagtgtgaagacaaggccatccaccactttatagagggtgtaaaaataaaccagaaatcaagggagaaagaaaagatgaaagacaaactgcaaaaaattgccaaaatgcgactttctaaaaatggagcagattctgaggctttgcatgtcttggcattccttcaggagctgaatgaaaaaatgcaacaagcagatgaagactctgagaggggtttggagtctggaagcctcatcccttcagcatcaagctggaatggggaatgaagaatagagatgtggtgcccactaggctactgctgaaagggagctgaaattcctccaccaagttggtattcaaaatatgtaatgactg

SEQ ID NO: 13897 - DNA, 606 bp, Homo sapiens
ggcgaattggagctccaccgcggtggcggccgcccgggcaggtactgtgtcaacatgcaaggccaggtggccgtgaggaatgtcccaatgacaggctctatcagtcatgtcctggtgcagctcccacatgtcttccagaggatggaagctgaaaacctagcttcagtgattgatgccaggtttaacttttttgtgaacaagattttgccacagtatcgtgatgcagtcatgtctcacacgctcatctatatcccctcctactttgacttcgtgcgtcttcgaaattacttcaagaaggaggaattgaattttacccacatctgcgagtacctcggccgctctagaactagtggatcccccgggctgcaggaattcgatatcaagcttatcgataccgtcgacctcgagggggggcccggtacccagcttttgttccctttagtgagggttaattgcgcgcttggcgtaatcatggtcatagctgtttcctgtgtgaaattgttatccgctcacaattccacacaacatacgagccgggagcataaagtgttaagcctggggtgcctaatgagtgagctaactcacatttattgcgttgcgctcact

SEQ ID NO: 13898 - DNA, 608 bp, Homo sapiens
actactatagggcgaattggagctccaccgcggtggcggccgcccgggcaggtaccaaatgaagtgtgaagacaaggccatccaccactttatagagggtgtaaaaataaaccagaaatcaagggagaaagaaaagatgaaagacaaactgcaaaaaattgccaaaatgcgactttctaaaaatggagcagattctgaggctttgcatgtcttggcattccttcaggagctgaatgaaaaaatgcaacaagcagatgaagactctgagaggggtttggagtctggaagcctcatcccttcagcatcaagctggaatggggaatgaagaatagagatgtggtgcccactaggctactgctgaaagggagctgaaattcctccaccaagttggtattcaaaatatgtaatgactggtatggcaaaagattggactaagacactggccataccactggacagggttatgttaacacctgaattgctgggtcttgagggagcccaaggagttctgggagagggaccagattggggggtaggtccacgggcttggtgatagaattatttctcgattgacttcttgagtgcaatttgaactgtaacatttgctt

SEQ ID NO: 13899 - DNA, 612 bp, Homo sapiens
ggcgaattggagctccaccgcggtggcggccgcccgggcaggtacgcggggagttctgcgcagcttcccgaggctccgcaccagccgcgcttctgtccgcctgcagggcattccagaaagatgaggatatttgctgtctttatattcatgacctactggcatttgctgaacgcatttactgtcacggttcccaaggacctatatgtggtagagtatggtagcaatatgacaattgaatgcaaattcccagtagaaaaacaattagacctggctgcactaattgtctattgggaaatggaggataagaacattattcaatttgtgcatggagaggaagacctgaaggttcagcatagtagctacagacagagggcccggctgttgaaggaccagctctccctgggaaatgctgcacttcagatcacagatgtgaaattgcaggatgcaggggtgtacctcggccgctctagaactagtggatcccccgggctgcaggaattcgatatcaagcttatcgataccgtcgacctcgagggggggcccggtacccagcttttgttccttttagtgagggttaattgcgcgcttggcgtaatcatggtcatagctgtt

SEQ ID NO: 13900 - DNA, 560 bp, Homo sapiens
attggagctccaccgcggtggcggccgcccgggcaggtaccaaatgaagtgtgaagacaaggccatccaccactttatagagggtgtaaaaataaaccagaaatcaagggagaaagaaaagatgaaagacaaactgcaaaaaattgccaaaatgcgactttctaaaaatggagcagattctgaggctttgcatgtcttggcattccttcaggagctgaatgaaaaaatgcaacaagcagatgaagactctgagaggggtttggagtctggaagcctcatcccttcagcatcaagctggaatggggaatgaagaatagagatgtggtgcccactaggctactgctgaaagggagctgaaattcctccaccaagttggtattcaaaatatgtaatgactggtatggcaaaagattggactaagacactggccataccactggacagggttatgttaacacctgaattgctgggtcttgagggagcccaaggagttctgggagagggaccagattgtggggtaggtccacgggcttggtgatagaattatttctcgattgact

SEQ ID NO: 13901 - DNA, 278 bp, Homo sapiens
ctatagggcgaattggagctccaccgcggtggcggccgcccgggcaggtaccaaatgaagtgtgaagacaaggccatccaccactttatagagggtgtaaaaataaaccagaaatcaagggagaaagaaaagatgaatgacaaactgcaaaaaattgccaaaatgcgactttctaaaaatggagcagattctgaggctttgcatgtcttggcattccttcaggagctgaatgaaaaaatgcaacaagcatatgaagactctgagaggggtttggagtt

SEQ ID NO: 13902 - DNA, 523 bp, Homo sapiens
agggcgaattggagctccaccgcggtggcggccgcccgggcaggtaccaaatgaagtgtgaggacaaggccatccaccactttatagagggtgtaaaaataaaccagaaatcaagggagaaagaaaagatgaaagacaaactgcaaaaaattgctaaaatgcgactttctaaaaatggagcagattctgaggctttgcatgtcttggcattccttcaggagctgaatgaaaaaatgcaacaagcagatgaagactctgagaggggtttggagtctggaagcctcatcccttcagcatcaagctggaatggggaacgaagaatagagatgtggtgcccactaggctactgctgaaagggagctgaaattcctccaccaagttggtattcaaaatatgtaatgactggtatggcaaaagattggactaagacactggccataccactggacagggttatgttaacacctgaattgctgggtcttgagagagcccaaggagttctgggagagggaccagattgggg

SEQ ID NO: 13903 - DNA, 541 bp, Homo sapiens
ctactatagggcgaattggagctccaccgcggtggcggccgcagttacctgacgtatgacaacccagatatcttgaagagggtgtcaggatcaagatcaaatgtgttcatgaggtttaaaacaactgccaaggatggccttttgctgtggaggggagacagccccatgagacccaacagcgacttcatttccttgggccttcgggatggagccctcgtgttcagctataacctgggcagtggtgtggcatccatcatggtgaatggctccttcaacgatggtcggtggcaccgagttaaggccgttagggatggccagtcaggaaagataaccgtggatgactacggagccagaacaggcaaatccccaggcatgatgcggcagcttaacatcaatggagctctgtatgtgggtggaatgaaggaaattgctctgcacactaacaggcaatatatgagagggctcgtgggctgtatctctcacttcaccctgtccaccgattaccacatttcccttgtggaagatgccgtggatgggaaaa

SEQ ID NO: 13904 - DNA, 530 bp, Homo sapiens
ggcgaattggagctccaccgcggtggcggccgaggtacagaactaaattttttaaactttatttgctgttaaattctgtgaagtttcagttatctaaaataaatatacacaaatatgaaatataatgtttcagattgcaaggtaatatgtaatagtagtgtttgtaagatactcttgtctaatattaactagtagtattttgatttgtacaatgtcaccctcccagcaacagaagaacaagctactgaatcagtgtccctttattactatggcatcaaagatttggctactgttttcttctacatgctagtggcgataattattcatgccgtaattcaagagtatatgttggataaaattaacaggcgaatgcacttctccaaaacaaaacacagcaagtttaatgaatctggtcagcttagtgcgttctacctttttgcctgtgtttggggcacattcattctcatctctgaaaactacatctcagacccaactatcttatggagggcttatccccataacctgatgac

SEQ ID NO: 13905 - DNA, 565 bp, Homo sapiens
gagctccaccgcggtggcggccgaggtaccaaatgaagtgtgaagacaaggccatccaccactttatagagggtgtaaaaataaaccagaaatcaagggagaaagaaaagatgaaagacaaactgcaaaaaattgccaaaatgcgactttctaaaaatggagcagattctgaggctttgcatgtcttggcattccttcaggagctgaatgaaaaaatgcaacaagcagatgaagactctgagaggggtttggagtctggaagcctcatcccttcagcatcaagctggaatggggaatgaagaatagagatgtggtgcccactaggctactgctgaaagggagctgaaattcctccaccaagttggtattcaaaatatgtaatgactggtatggcaaaagattggactaagacactggccataccactggacagggttatgttaacacctgaattgctgggtcttgagagagcccaaggagttctgggagagggaccagattggggggtaggtccacggccttggtgatagatttatttctcgattgacttcttgagtgcaatttg

SEQ ID NO: 13906 - DNA, 463 bp, Homo sapiens
gctccaccgcggtggcggccgaggtaccaaatgaagtgtgaagacaaggccatccaccactttatagagggtgtaaaaataaaccagaaatcaagggagaaagaaaagatgaaagacaaactgcaaaaaattgccaaaatgcgactttctaaaaatggagcagattctgaggctttgcatgtcttggcattccttcaggagctgaatgaaaaaatgcaacaagcagatgaagactctgagaggggtttggagtctggaagcctcatcccttcagcatcaagctggaatggggaatgaagaatagagatgtggtgcccactaggctactgctgaaagggagctgaaattcctccaccaagttggtattcaaaatatgtaatgactggtatggcaaaagattggactaagacactggccataccactggacagggttatgttaacacctgaattgctgggtcttg

SEQ ID NO: 13907 - DNA, 554 bp, Homo sapiens
actactatagggcgaattggagctccaccgcggtggcggccgcccgggcaggtacattggcacgtcacgatgtcttgagtttcattcactaggtggcagcctgcatcgttccactgcaaatgactgaaatcccaaaacacacaatgaggctggctcaggtttgactctatcttggaaaaaaataggaaaacttcatttatggaatagttttgaataaccgtggatatcacaggtccattgacctgagcatttccatttttggaaacgggtagaatgttccccagagtcaacgaggccatgctgataatagtttctggaagggatctctggaattggtctgacccaattaacacacggcctctgatgggaatagatgtattttggggacacattttaatctgatagctgtaaccccttttgagttggcttttgttcactggaatccctttccagtcaatgaatttccgagaaaaattcagaggaagagctgtcggaggcaccagagtgctgatgttttctaatgtctctagtaaccgtgagctggcatacttttc

SEQ ID NO: 13908 - DNA, 499 bp, Homo sapiens
tatagggcgaattggagctccaccgcggtggcggccgcccgggcaggtacgcggggcagtgggaagctcgcagcagctggggaggagccaaagcctcggcgctcacctaagccgcagggagatacacccaactgggagatgaggaaacagcaacccagagaggagaactaacccacacaggatcatttcgtgaaggagcaaggctgaagaaccagacctggactttcttaggacaaacttactgcagcttgaaggagccaaccatggatttgaggcgtgtgaaggaatatttctcctggctctactatcaataccaaatcattagctgctgtgctgttttagagccctgggagcgatctatgtttaacaccatcttactaaccattattgctatggtggtatacactgcctatgtctttattccaatccacattcgcctggcttgggaatttttttaaaaatatgtggatatcacagaacctcggccgctctagaacta

SEQ ID NO: 13909 - DNA, 396 bp, Homo sapiens
ttggagctccaccgcggtggcggccgcccgggcaggtacgcggggcagtgggaagctcgcagcagctggggaggagccaaagcctcggcgctcacctaagccgcagggagatacacccaactgggagatgaggaaacagcaacccagagaggagaactaacccacacaggatcatttcgtgaaggagcaaggctgaagaaccagacctggactttcttaggacaaacttactgcagcttgaaggagccaaccatggatttgaggcgtgtgaaggaatatttctcctggctctactatcaataccaaatcattagctgctgtgctgttttagagccctgggagcgatctatgtttaacaccatcttactaaccattattgctatgggggtatacact

SEQ ID NO: 13910 - DNA, 480 bp, Homo sapiens
ggcgaattggagctccaccgcggtggcggccgcccgggcaggtacgcggggcagtgggaagctcgcagcagctggggaggagccaaagcctcggcgctcacctaagccgcagggagatacacccaactgggagatgaggaaacagcaacccagagaggagaactaacccacacaggatcatttcgtgaaggagcaaggctgaagaaccagacctggactttcttaggacaaacttactgcagcttgaaggagccaaccatggatttgaggcgtgtgaaggaatatttctcctggctctactatcaataccaaatcattagctgctgtgctgttttagagccctgggagcgatctatgtttaacaccatcttactaaccattattgctatgggggtatacactgcctatgtctttattccaatccacattcgcctggcttgggaatttttctcaaaaatatgtggatatcacagtacctcg

SEQ ID NO: 13911 - DNA, 404 bp, Homo sapiens
tcactatagggcgaattggagctccaccgcggtggcggccgaggtaccaaatgaagtgtgaagacaaggccatccaccactttatagagggtgtaaaaataaaccacaaatcaagggagaaagaaaagatgaaagacaaactgcaaaaaattgccaaaatgcgactttctaaaaatggagcagattctgaggctttgcatgtcttggcattccttcaggagctgaatgaaaaaatgcaacaagcagatgaagactctgagaggggtttggagtctggaagcctcatcccttcagcatcaagctggaatggggaatgaagaatagagatgtggtgcccactaggctactgctgaaagggagctgaaattcctccaccaagttggtattcaaaatatgtaatgact

SEQ ID NO: 13912 - DNA, 607 bp, Homo sapiens
ctactatagggcgaattggagctccaccgcggtggcggccgccggaaggtgggtgacgtgcggatcttcttctttttgtggctgtggacacctttcaacactgccttcttggcctttaaagccttcgctttggcttcagctttaggaggggcaggagcccatcgcaaaaccacgctgcggagagaggggcgggtaatgtagcccggttgaacatgaaccagaaggaaaatggttaaagctgagggcactaattccttacaggcccggggacatggagctccaaccagtggatgcatgtagcttcccagaaccgaatgtctgccccgcgtacctcggccgctctagaactagtggatcccccgggctgcaggaattcgatatcaagcttatcgataccgtcgacctcgagggggggcccggtacccagcttttgttccctttagtgagggttaattgcgcgcttggcgtaatcatggtcatagctgtttcctgtgtgaaattgttatccgctcacaattccacacaacatacgagccgggagcataaagtgtaaagcctggggtgcctaatgagtgagctaactcacattaattgcgttgcgctcact

SEQ ID NO: 13913 - DNA, 557 bp, Homo sapiens
actatagggcgaattggagctccaccgcggtggcggccgaggtaccactctatccatcgcggatagagaaactgaagctctctaaagaccctgcagctgggaggtggcagagtcaatggcagccctcagccctatctgccctgacatggcattcctcccatttctcaccaccgaaccctctaaaataacaatgtgtggggtccttggctgagagacttcccttttgggaatcaatctgaatgtatgatgacaaagaaaacaacttttgctttatacaaccttctggttagattcaggcaccaagcaggacacttctttgtggcgctccaagaatctttcaaattcttcatcaccaataacaaatctttctgcttctcttagagcatcttctccacaattctcaccctcaattaagaggcactggaacactttccagcggacagggtttagtgctttgatctgttccgtcatgtcctcttccacgttgaaacgattaatgacagaatttatcttgaaagcgactctataatccctacaccacctcctcagcttttgaa

SEQ ID NO: 13914 - DNA, 593 bp, Homo sapiens
  misc_feature 524: n = A,T,C or G
acactactatagggcgaattggagctccaccgcggtggcggccgaggtaccaaatgaagtgtgaagacaaggccatccaccactttatagagggtgtaaaaataaaccagaaatcaagggagaaagaaaagatgaaagacaaactgcaaaaaattgccaaaatgcgactttctaaaaatggagcagattctgaggctttgcatgtcttggcattccttcaggagctgaatgaaaaaatgcaacaagcagatgaagactctgagaggggtttggagtctggaagcctcatcccttcagcatcaagctggaatggggaatgaagaatagagatgtggtgcccactaggctactgctgaaagggagctgaaattcctccaccaagttggtattcaaaatatgtaatgactggtatggcaaaagattggactaagacactggccataccactggacagggttatgttaacacctgaattgctgggtcttgagagagcccaaggagttctgggagagggaccagattgnggggtaggtccacgggcctggtgatagattatttctcgattgacttttgagtgcaattgaactgtaaca

SEQ ID NO: 13915 - DNA, 463 bp, Homo sapiens
actatagggcgaattggagctccaccgcggtggcggccgcccgggcaggtaccaaatgaagtgtgaagacaaggccatccaccactttatagagggtgtaaaaataaaccagagatcaagggagaaagaaaagatgaaagacaaactgcaaaaaattgccaaaatgcgactttctaaaaatggagcagattctgaggctttgcatgtcttggcattccttcaggagctgaatgaaaaaatgcaacaagcagatgaagactctgagaggggtttggagtctggaagcctcatcccttcagcatcaaactggaatggggaatgaagaatagagatgtggtgcccactaggctactgctgaaagggagctcaaattcctgcaccaagttggtattcaaaatatgtaatgactggtatggtaaaagattggactaagacactggccataccactggacagggttatg

SEQ ID NO: 13916 - DNA, 467 bp, Homo sapiens
ctactatagggcgaattggagctccaccgcggtggcggccgaggtacatcattttctttttcctgtccataaatcttcttccaccacgtggctgtgttcaagactctctgaacctactctggctcaggaggcttctagatttgtgaattgtctgctcagttcaactccattaaattcaatctggccaagaattttcttcttaacagtggtattgatgaccattaatccttcaacctaaacctgctcattaatgctgcctttaagtgggctgaacttttaggacacctggacattttgtaggcttagtgggagatgttttgtatggccttaaatattctgcaattatcattggtggtcagcttagactgtggctattttcagacccaagtattaagcctgtacgttccttttgagtgcctagctacttgctttaagatggagtcactctagccatcttttattaaacc

SEQ ID NO: 13917 - DNA, 199 bp, Homo sapiens
ctatagggcgaattggagctccaccgcggtggcggccgaggtaccaaatgaagtgtgaagacaaggccatccaccactttatagagggtgtaaaaataaaccagaaatcaagggagaaagaaaagatgaaagacaaactgcaaaaaattgccaaaatgcgactttctaaaaatggagcagattctgaggctttgcatgt

SEQ ID NO: 13918 - DNA, 584 bp, Homo sapiens
ctatagggcgaattggagctccaccgcggtggcggccgcccgggcaggtacaacaagcgtttgtaatgtttcccaaatattagctttgaaatccaaatgtcaagcaggttaaagtggaaaaaactataaatgtaattgttaataaaacaatggatgaaaaaagtcattgaaatttttttctacttggattaagaacataaattaaaagtgcaactgcaaaaataatattagtttgataagtaaaataaaacaaactagatatattttgaaaataaaaaacaaatgaaacaaaataaaatttaggtaaagaaaattcaacgtaatttgttgtagctatattttttgtaataattacaaaagtagaaataatagctcataaagcaaaaacaaaatttattctatgttctttttttcagtcaattcagaattttagcttcatatttgaagcatttttttctaattgtgtttgtgaatttgaatttgtttgcggattttgatttgccataaaaatattatattttatttaattatattaatcttcgtcagctttaattgctctttctttaacaattgatctgaaattt

SEQ ID NO: 13919 - DNA, 220 bp, Homo sapiens
tatagcgcgaattggagctccaccgcggtggcggccgaggtacccttgtcctcttcttcagtgacttaaaacaattccaggatcagaagagaagccaacgtgacatcctcgataaaactggggataagctgaagttctgtctgttcacgaagtggttgaaaaacaatttcgagatccagaagtcccttgatgggttcaccatccaggtgttcacaaaaaa

SEQ ID NO: 13920 - DNA, 278 bp, Homo sapiens
tatagggcgaattggagctccaccgcggtggcggccgcccgggcaggtaccaaatgaagtgtgaagacaaggccatccaccactttatagagggtgtaaaaataaaccagaaatgaagggagaaagaaaagatgaaagacaaactgcaaaaaattgccaaaatgcgactttctaaaaatggagcagattctgaggctttgcatgtcttggcattccttcaggagctgaatgaaaaaatgcaacaagcagatgaagactctgagaggggtttggagtct

SEQ ID NO: 13921 - DNA, 304 bp, Homo sapiens
acgactcactatagggcgaattggagctccaccgcggtggcggccgcccgggcaggtaccaaatgaagtgtgaagacaaggccatccaccactttatagagggtgtaaaaataaaccagaaatcaagggagaaagaaaagatgaaagacaaactgcaaaaaattgccaaaatgcgactttctaaaaatggagcagattctgaggctttgcatgtcttggcattccttcaggagctgaatgaaaaaatgcaacaagcagatgaagactctgagaggggtttggagtctggaagcctcatcccttc

SEQ ID NO: 13922 - DNA, 255 bp, Homo sapiens
gagctccaccgcggtggcggccgaggtaccaaatgaagtgtgaagacaaggccatccaccactttatagagggtgtaaaaataaaccagaaatcaagggagagagaaaagatgaaagacaaactgcaaaaaattgccaaaatgcgactttctaaaaatggagcagattctgaggctttgcatgtcttggcattccttcaggagctgaatgaaaaaatgcaacaagcagatgaagactctgagaggggtttggagt

SEQ ID NO: 13923 - DNA, 600 bp, Homo sapiens
gcgaattggagctccaccgcggtggcggccgcccgggcaggtaccatctaggtcagtttaagaagagtcagctcagagaaagcaagcataagggaaaatgtcacgtaaactagatcagggaacaaaatcctctccttgtggaaatatcccatgcagtttgttgatacaacttagtatcttattgcctaaaaaaaatttcttatcattgtttcaaaaaagcaaaatcatggaaaatttttgttgtccaggcaaataaaaggtcattttaatttagctgcaatttcagtgttcctcactaggtggcatttaaatgtcgcctgatgtcattaagcaccatccaaaaagtctgcttcataatctattttcaagacttggtgattctgaaagttttggtttttgtgactttgtttctcaggaaaaaaaatattcctacttaaattttaagtctataattcaatttaaatatgtgtgtgtctcatccaggataggataggttgtcttctattttccattttacctatttactttttttgtaagaaaagaagaaaatgatttctaaagatgttccccatgggtttgattgtgtctaagctatgatga

SEQ ID NO: 13924 - DNA, 673 bp, Homo sapiens
aatacgactcactatagggcgaattggagctccaccgcggtggcggccgaggtaccgctgtgtccgggtgggtggtcagaatgccgtgctccaggtgttcacagctgcttcgtggaagaccatgtgctccgatgactggaagggtcactacgcaaatgttgcctgtgcccaactgggtttcccaagctatgtgagttcagataacctcagagtgagctcgctggaggggcagttccgggaggagtttgtgtccatcgatcacctcttgccagatgacaaggtgactgcattacaccactcagtatatgtgagggagggatgtgcctctggccacgtggttaccttgcagtgcacagcctgtggtcatagaaggggctacagctcacgcatcgtgggtggaaacatgtccttgctctcgcagtggccctggcaggccagccttcagttccagggctaccacctgtgcgggggctctgtcatcacgcccctgtggatcgtcactgctgcacactgtgtttatgacttgtacctgcccgggcggccgctctagaactagtggatcccccgggctgcaggaattcgatatcaagcttatcgataccgtcgacctcgagggggggcccggtacccagcttttgttccctttagtgagggttaattgcgcgcttggcgt

SEQ ID NO: 13925 - DNA, 689 bp, Homo sapiens
aatacgactcactatagggcgaattggagctccaccgcggtggcggccgaggtaccgctgtgtccgggtgggtggtcagaatgccgtgctgcaggtgttcacagctgcttcgtggaagaccatgtgctccgatgactggaagggtcactacgcaaatgttgcctgtgcccaactgggtttcccaagctatgtgagttcagataacctcagagtgagctcgctggaggggcagttccgggaggagtttgtgtccatcgatcacctcttgccagatgacaaggtgactgcattacaccactcagtatatgtgagggagggatgtgcctctggccacgtggttaccttgcagtgcacagcctgtggtcatagaaggggctacagctcacgcatcgtgggtggaaacatgtccttgctctcgcagtggccctggcaggccagccttcagttccagggctaccacctgtgcgggggctctgtcatcacgcccctgtggatcgtcactgctgcacactgtgtttatgacttgtacctgcccgggcggccgctctagaactagtggatcccccgggctgcaggaattcgatatcaagcttatcgataccgtcgacctcgagggggggcccggtacccagcttttgttccctttagtgagggttaattgcgcgcttggcgtaatcatggtcatagct

SEQ ID NO: 13926 - DNA, 684 bp, Homo sapiens
gcgtaatacgactcactatagggcgaattggagctccaccgcggtggcggccgaggtaccgctgtgtccgggtgggtggtcagaatgccgtgctccaggtgttcacagctgcttcgtggaagaccatgtgctccgatgactggaagggtcactacgcaaatgttgcctgtgcccaactgggtttcccaagctatgtgagttcagataacctcagagtgagctcgctggaggggcagttccgggaggagtttgtgtccatcgatcacctcttgccagatgacaaggtgactgcattacaccactcagtatatgtgagggagggatgtgcctctggccacgtggttaccttgcagtgcacagcctgtggtcatagaaggggctacagctcacgcatcgtgggtggaaacatgtccttgctctcgcagtggccctggcaggccagccttcagttccagggctaccacctgtgcgggggctctgtcatcacgcccctgtggatcgtcactgctgcacactgtgtttatgacttgtacctgcccgggcggccgctctagaactagtggatcccccgggctgcaggaattcgatatcaagcttatcgataccgtcgacctcgagggggggcccggtacccagcttttgttccctttagtgagggttaattgcgcgcttggcgtaatcatg

SEQ ID NO: 13927 - DNA, 704 bp, Homo sapiens
gtaacacgactcactatagggcgaattggagctccaccgcggtggcggccgcccgggcaggtacaacaagcgtttgtaatgtttcccaaatattagctttgaaatccaaatgtcaagcaattaaagttcaaaaaactataaatgtaattgttaataaaacaatggatgaaaaaagtcattgaaatttttttctacttggattaagaacataaattaaaagtgcaactgcaaaaataatattagtttgataagtaaaataaaacaaactagatatattttgaaaataaaaaacaaatgaaacaaaataaaatttaggtaaagaaaattcaacgtaatttgttgtagctatattttttgtaataattacaaaagtagaaataatagctcataaagcaaaaacaaaatttattctatgttctttttttcagtcaattcagaattttagcttcatatttgaagcatttttttctaattttgtttgtgaatttgaatttgtttgcggattttgatttgccataaaaatattatattttatttaattatattaatcttcgtcagctttaattgctctttctttaacaatttgatctgaaatttgttttggtgttatttcatagtgatcaaattgcatttgataagttccacgacctgatgtcatagaccttaattgtgttgagtatccaaacatttcagctaaaggaaca

SEQ ID NO: 13928 - DNA, 444 bp, Homo sapiens
cgaattggagctccaccgcggtggcggccgcccgggcaggtacctacggaaatcctaactaccactggcaggaaactgcatatcttctggtttacatgaagatggagtgctaatggaaatgcccaaaaccttcagagattgacacgctgtcattttccatttccgttcctggatctacggagtcttctaagagattttgcaatgaggagaagcattgttttcaaactatataactgagccttatttataattagggatatttatcaaaatatgtaaccatgaggcccctcaggtcctgatcagtcagaatgaatgctttcaccagcagacccggccatgtggctgctcggtcctgggtgctcgctgctgtgcgagacaatagcccctttagttatgagcctgtgggaacttaaggggttcccagtggggagagcaatggcagtg

SEQ ID NO: 13929 - DNA, 490 bp, Homo sapiens
cgaattggagctccaccgcggtggcggccgaggtaccaaatgaagtgtgaagacaaggccatccaccactttatagagggtgtaaaaataaaccagaaatcaagggagaaagaaaagatgaaagacaaactgcaaaaaattgccaaaatgcgactttctaaaaatggagcagattctgaggctttgcatgtcttggcattccttcaggagctgaatgaaaaaatgcaacaagcagatgaagactctgagaggggtttggagtctggaagcctcatcccttcagcatcaagctggaatggggaatgaagaatagagatgtggtgcccactaggctactgctgaaagggagctgaaattcctccaccaagttggtattcaaaatatgtaatgactggtatggcaaaagattggactaagacactggccataccactggacagggttatgttaacacctgaattgctgggtcttgagagagcccaaggagttc

SEQ ID NO: 13930 - DNA, 517 bp, Homo sapiens
ctatacggcgaattggagctccaccgcggtggcggccgcccgggcaggtaccaaatgaagtgtgaagacaaggccatccaccactttatagagggtgtaaaaataaaccagaaatcaagggagaaagaaaagatgaaagacaaactgcaaaaaattgccaaaatgcgactttctaaaaatggagcagattctgaggctttgcatgtcttggcattccttcaggagctgaatgaaaaaatgcaacaagcagatgaagactctgagaggggtttggagtctggaagcctcatcccttcagcatcaagctggaatggggaatgaagaatagagatgtggtgcccactaggctactgctgaaagggagctgaaattcctccaccaagttggtattcaaaatatgtaatgactggtatggcaaaagattggactaagacactggccataccactggacagggttatgttaacacctgaattgctgggtcttgagagagcccaaggagttctgggagagggac

SEQ ID NO: 13931 - DNA, 494 bp, Homo sapiens
ctatagggcgaattggagctccaccgcggtggcggccgcccgggcaggtacctattgccaggaagataggcagctcatctgtgtcctgtgtccagtcattggggctcaccagggcgcgccaactctccaccctagacgaagcctttgaagaattaagaagcaaagactcaggtggactgaaggccgctatgatcgaattggtggaaaggttgaagttcaagagctcagaccctaaagtaactcgggaccaaatgaagatgtttatacagcaggaatttaagaaagttcagaaagtgattgctgatgaggagcagaaggcccttcatctagtggacatccaagaggcaatgaccacagctcatgtgactgagatactggcagacatccaatcccacatggataggttgatgactcagatggcccaagccaaggaacaacttgatacctttaatgaatcagctgagccaaaggcagaaggcgatgaggaaggaccc

SEQ ID NO: 13932 - DNA, 574 bp, Homo sapiens
ggcgaattggagctccaccgcggtggcggccgaggtaccaaatgaagtgtgaagacaaggccatccaccactttatagagggtgtaaaaataaaccagaaatcaagggagaaagaaaagatgaaagacaaactgcaaaaaattgccaaaatgcgactttctaaaaatggagcagattctgaggctttgcatgtcttggcattccttcaggagctgaatgaaaaaatgcaacaagcagatgaagactctgagaggggtttggagtctggaagcctcatcccttcagcatcaagctggaatggggaatgaagaatagagatgtggtgcccactaggctactgctgaaagggagctgaaattcctccaccaagttggtattcaaaatatgtaatgactggtatggcaaaagattggactaagacactggccataccactggacagggttatgttaacacctgaattgctgggtcttgagagagcccaaggagttctgggagagggaccagattggggggtaggtccacgggcttggtgatagaattatttctcgattgacttcttgagtgcaatttg

SEQ ID NO: 13933 - DNA, 506 bp, Homo sapiens
ggcgaattggagctccaccgcggtggcggccgcccgggcaggtaccaaatgaagtgtgaagacaaggccatccaccactttatagagggtgtaaaaataaaccagaaatcaagggagaaagaaaagatgaaagacaaactgcaaaaaattgccaaaatgcgactttctaaaaatggagcagattctgaggctttgcatgtcttggcattccttcaggagctgaatgaaaaaatgcaacaagcagatgaagactctgagaggggtttggagtctggaagcctcatcccttcagcatcaagctggaatggggaatgaagaatagagatgtggtgcccactaggctactgctgaaagggagctgaaattcctccaccaagttggtattcaaaatatgtaatgactggtatggcaaaagattggactaagacactggccataccactggacagggtttatgttaacacctgaattgctgggtcttgagagagccaaggagttctgggaga

SEQ ID NO: 13934 - DNA, 607 bp, Homo sapiens
ctatagggcgaattggagctccaccgcggtggcggccgaggtaccaaatgaagtgtgaagacaaggccatccaccactttatagagggtgtaaaaataaaccagaaatcaagggagaaagaaaagatgaaagacaaactgcaaaaaattgccaaaatgcgactttctaaaaatggagcagattctgaggctttgcatgtcttggcattccttcaggagctgaatgaaaaaatgcaacaagcagatgaagactctgagaggggtttggagtctggaagcctcatcccttcagcatcaagctggaatggggaatgaagaatagagatgtggtgcccactaggctactgctgaaagggagctgaaattcctccaccaagttggtattcaaaatatgtaatgactggtatggcaaaagattggactaagacactggccataccactggacagggttatgttaacacctgaattgctgggtcttgagagagcccaaggagttctgggagagggaccagattggggggtaggtccacgggcttggtgatagaattatttctcgattgactttttgagtgcaatttgaactgtaacatttgcttagtcaccttt

SEQ ID NO: 13935 - DNA, 492 bp, Homo sapiens
gagctccaccgcggtggcggccgaggtacaagatagtcatctcagtaaaaggtctattatctaacttgccaaacttgtttactgagagccctaaggaactaaaactgccataatgccgtgcacagtttgaaaagcaattagagtaagcaagattagtttttcctcccttccagtttctcagcaggcctggctgaaggcccaggagggaaggaaatataagaaccaacaataaaaatagcaatagcaataagaagaatgccatcccatggagcacaccataattctggaaccacctctcccggatcaggcttccattgctcacgatgctcacgctgggcagccgcaactctactttgcagaacctcaccaacttgcccaggtattctccccggtcttgaagaaatggctctccacctgaaaagttgatcttctccataccagctttcttaagcaaaagcaatcctctctttgcttccttaaggggcagcacaa

SEQ ID NO: 13936 - DNA, 487 bp, Homo sapiens
tatagggcgaattggagctccaccgcggtggcggccgaggtaccaaatgaagtgtgaagacaaggccatccaccactttatagagggtgtaaaaataaaccagaaatcaagggagaaagaaaagatgaaagacaaactgcaaaaaattgccaaaatgcgactttctaaaaatggagcagattctgaggctttgcatgtcttggcattccttcaggagctgaatgaaaaaatgcaacaagcagatgaagactctgagaggggtttggagtctggaagcctcatcccttcagcatcaagctggaatggggaatgaagaatagagatgtggtgcccactaggctactgctgaaagggagctgaaattcctccaccaagttggtattcaaaatatgtaatgactggtatggcaaaagattggactaagacactggccataccactggacagggttatgttaacacctgaattgctgggtcttgagagagcc

SEQ ID NO: 13937 - DNA, 550 bp, Homo sapiens
ggcgaattggagctccaccgcggtggcggccgaggtaccaaatgaagtgtgaagacaaggccatccaccactttatagagggtgtaaaaataaaccagaaatcaagggagaaagaaaagatgaaagacaaactgcaaaaaattgccaaaatgcgactttctaaaaatggagcagattctgaggctttgcatgtcttggcattccttcaggagctgaatgaaaaaatgcaacaagcagatgaagactctgagaggggtttggagtctggaagcctcatcccttcagcatcaagctggaatggggaatgaagaatagagatgtggtgcccactaggctactgctgaaagggagctgaaattcctccaccaagttggtattcaaaatatgtaatgactggtatggcaaaagattggactaagacactggccataccactggacagggttatgttaacacctgaattgctgggtcttgagagagcccaaggagttctgggagagggaccagattgtggggtaggtccacgggcttggtgatagaattatttctc

SEQ ID NO: 13938 - DNA, 609 bp, Homo sapiens
tactatagggcgaattggagctccaccgcggtggcggccgcccgggcaggtaccaaatgaagtgtgaagacaaggccatccaccactttatagagggtgtaaaaataaaccagaaatcaagggagaaagaaaagatgaaagacaaactgcaaaaaattgccaaaatgcgactttctaaaaatggagcagattctgaggctttgcatgtcttggcattccttcaggagctgaatgaaaaaatgcaacaagcagatgaagactctgagaggggtttggagtctggaagcctcatcccttcagcatcaagctggaatggggaatgaagaatagagatgtggtgcccactaggctactgctgaaagggagctgaaattcctccaccaagttggtattcaaaatatgtaatgactggtatggcaaaagattggactaagacactggccataccactggacagggttatgttaacacctgaattgctgggtcttgagagagcccaaggagttctgggagagggaccagattgggggtaggtccacgggcttggtgatagaattatttctcgattgacttcttgagtgcaatttgaactgtaacatttgcttagtc

SEQ ID NO: 13939 - DNA, 418 bp, Homo sapiens
tatagggcgaattggagctccaccgcggtggcggccgaggtacaagatagtcatctcagtaaaaggtctattatctaacttgccaaacttgtttactgagagccctaaggaactaaaactgccataatgccgtgcacagcttgaaaagcaattagagtaagcaagattagtttttcctcccttccagttcctcagcaggcctggctgaaggcccaggagggaaggaaatataagaaccaacaataaaaatagcaatagcaataagaagaatgccatcccatggagcacaccataattctggaaccacctctcccggatcaggcttacattgctcacgatgctcacgctgggcaggcgcaactttactttgcagaacctcaccaacttgcccaggtattctgcccggtcttgaagaaat

SEQ ID NO: 13940 - DNA, 508 bp, Homo sapiens
ggcgaattggagctccaccgcggtggcggccgcccgggcaggtaccaaatgaagtgtgaagacaaggccatccaccactttatagagggtgtaaaaataaaccagaaatcaagggaggaagaaaagatgaaagacaaactgcaaaaaattgccaaaatgcgactttctaaaaatggagcagattctgaggctttgcatgtcttggcattccttcaggagctgaatgaaaaaatgcaacaagcagatgaagactctgagaggggtttggagtctggaagcctcatcccttcagcatcaagctggaatggggaatgaagaatagagatgtggtgcccactaggctactgctgaaagggagctgaaattcctccaccaagttggtattcaaaatatgtaatgactggtatggcaaaagattggactaagacactggccataccactggacagggttatgttaacacctgaattgctgggtcttgagagagcccaaggagttctgggagagg

SEQ ID NO: 13941 - DNA, 347 bp, Homo sapiens
gcgaattggagctccaccgcggtggcggccgcccgggcaggtacatggcgaagctagagactgtaacctgaagattgggacaaattaaagaaaaaaatgtgatttaacacaattacaaaaactgttacgttagggtcaaacaagaaccattttatgaaactgaattacaacaaatgacattatatctaactcttccgggtctccacaacacttatacttacttaagcagcttaaacacttccgagtctccacagcactctgatacttacttaaacagctcttttaacctgccctagtattcttaagtgcagcatatctaattttttttttcctcagtagtttgaaca

SEQ ID NO: 13942 - DNA, 517 bp, Homo sapiens
tatacggcgaattggagctccaccgcggtggcggccgcccgggcaggtaccaaatgaagtgtgaagacaaggccatccaccactttatagagggtgtaaaaataaaccagaaatcaagggagaaagaaaagatgaaagacaaactgcaaaaaattgccaaaatgcgactttctaaaaatggagcagattctgaggctttgcatgtcttggcattccttcaggagctgaatgaaaaaatgcaacaagcagatgaagactctgagaggggtttggagtctggaagcctcatcccttcagcatcaagctggaatggggaatgaagaatagagatgtggtgcccactaggctactgctgaaagggagctgaaattcctccaccaagttggtattcaaaatatgtaatgactggtatggcaaaagattggactaagacactggccataccactggacagggttatgttaacacctgaattgctgggtcttgagagagcccaaggagttctgggagagggacc

SEQ ID NO: 13943 - DNA, 449 bp, Homo sapiens
attggagctccaccgcggtggcggccgcccgggcaggtaccaaatgaagtgtgaagacaaggccatccaccactttatagagggtgtaaaaataaaccagaaatcaagggagaaagaaaagatgaaagacaaactgcaaaaaattgccaaaatgcgactttctaaaaatggagcagattctgaggctttgcatgtcttggcattccttcaggagctgaatgaaaaaatgcaacaagcagatgaagactctgagaggggtttggagtctggaagcctcatcccttcagcatcaagctggaatggggaatgaagaatagagatgtggtgcccactaggctactgctgaaagggagctgaaattcctccaccaagttggtattcaaaatatgtaatgactggtatggcaaaagattggactaagacactggccataccactggacagggtta

SEQ ID NO: 13944 - DNA, 475 bp, Homo sapiens
attggagctccaccgcggtggcggccgaggtaccaaatgaagtgtgaagacaaggccatccaccactttatagagggtgtaaaaataaaccagaaatcaagggagaaagaaaagatgaaagacaaactgcaaaaaattgccaaaatgcgactttctaaaaatggagcagattctgaggctttgcatgtcttggcattccttcaggagctgaatggaaaaatgcaacaagcagatgaagactctgagaggggtttggagtctggaagcctcatcccttcagcatcaagctggaatggggaatgaagaatagagatgtggtgcccactaggctactgctgaaagggagctgaaattcctccaccaagttggtattcaaaatatgtaatgactggtatggcaaaagattggactaagacactggccataccactggacagggttatgttaacacctgaattgctgggtcttgagagag

SEQ ID NO: 13945 - DNA, 438 bp, Homo sapiens
tggagctccaccgcggtggcggccgaggtacacataaatcacctggaaccttgttaaaatgcagatcctgactcaggaggtctgagttagagcccaggatttcatatttctagccagctccatgatgagctgctggtccgcagatcatgcttgcaggttttgaccagagtcagtgttggttagagtaagaggatgaggcatacatctgggaaaagtccagctggggcaagcatttgaagtctgccttcctaccaggtcaaaatcaaggcaacgaccttccatagataactatcaaagcttgagggggtgccttgaacccaactcctaaatccctaagacctgcccacctcttgtgtctcctgtctgagcaaacattcccacactcttgcatattgttaaagtaacctctgcttaccaggcttttggtttaataaaaga

SEQ ID NO: 13946 - DNA, 413 bp, Homo sapiens
ttggagctccaccgcggtggcggccggcccggggggtgtccgaacaggcaggttggtgggttaaggtcttaatcttgactcgagatctctctccggagttcacagagtgggcgacgaagccgaagcagctggagcgcgacccggaggagtctgacttctcgttgtcttcataattttcattcgttgctttcttcgtggacttgcggctgggggaggatccccgctggtcgccgagcaggcgggcgggtaaaggtaggccgcgagagcgaggttaggagaggagaggaggccgcagtacctcggccgctctagaactagtggatcccccgggctgcaggaattcgatatcaagcttatcgataccgtcgacctcgagggggggcccggtacccagcttttgttccctttagtga

SEQ ID NO: 13947 - DNA, 424 bp, Homo sapiens
attggagctccaccgcggtggcggccgcccgggcaggtacgcggggaggaggcggaagcgcagcgggggcgggaaggttgtagtgccgcgagttgagctcctcttgcctaagtggtcgcgccccctttaagagcagcgattgtaaggagaggcggtcccggtgtcctcgggtcccaggtgattgtgaagtgctgaccaattgccactggacatacttgaaacaaaataggaaaatggcagcaaaccctgtctctaaatcaatcaatcaagcgagccagaatgcagtagtggcctgagagaggcatcctggaacgcagtgcggtctggctaggcttagaagtattcatgtgatttttacctgacaagggaaggaagagctgctccacgtgcagagcaaggtttcagaatgagaggagaagagcag

SEQ ID NO: 13948 - DNA, 448 bp, Homo sapiens
ggcgaattggagctccaccgcggtggcggccgcccgggcaggtaccaaatgaagtgtgaagacaaggccatccaccactttatagagggtgtaaaaataaaccagaaatcaagggagaaagaaaagatgaaagacaaactgcaaaaaattgccaaaatgcgactttctaaaaatggagcagattctgaggctttgcatgtcttggcattccttcaggagctgaatgaaaaaatgcaacaagcagatgaagactctgagaggggtttggagtctggaagcctcatcccttcagcatcaagctggaatggggaatgaagaatagagatgtggtgcccactaggctactgctgaaagggagctgaaattcctccaccaagttggtattcaaaatatgtaatgactggtatggcaaaagattggactaagacactggccataccactggaca

SEQ ID NO: 13949 - DNA, 499 bp, Homo sapiens
cactatagggcgaattggagctccaccgcggtggcggccgcccgggcaggtacgcggggagagcgagcttcggagaagcagtggtgggttccatgtggtggtggagtaggaggcaggtctccgcggtggtttccacaagaaaaatggcacaatgtttctcagaagacaattacataagaatcagcatactttagattcacagcaaataatcagacaattgatgaaaatacttacccaaacactaattgtagactgtgccttctgaatatgtttgtcataaacttggagtaaggaatcctcacaggcactggacaattcaaaaaacgtaaagttgtttgttagaatactggtgcttttggatagaaaccctcatccatatcctggtaaggcttgaagttgcacaggagttttcatttgtcaaaacccagaaaaccataagctttagatttgggaattttatattgcattatatgtgacctttctttttaaaaaatgagct

SEQ ID NO: 13950 - DNA, 362 bp, Homo sapiens
actcactatagggcgaattggagctccaccgcggtggcggccgcccgggcaggtaccaaatgaagtgtgaagacaaggccatccaccactttatagagggtgtaaaaataaaccagaaatcaagggagaaagaaaagatgaaagacaaactgcaaaaaattgccaaaatgcgactttctaaaaatggagcagattctgaggctttgcatgtcttggcattccttcaggagctgaatgaaaaaatgcaacaagcagatgaagactctgagaggggtttggagtctgaaaccctaatcctttcacattaaacttgaaatggggaatgaagaatagagatgtggtgcccactaggctactgttga

SEQ ID NO: 13951 - DNA, 461 bp, Homo sapiens
ggcgaattggagctccaccgcggtggcggccgaggtaccaaatgaagtgtgaagacaaggccatccaccactttatagagggtgtaaaaataaaccataaatcaagggagaaggaaaagatgaaagacaaactgcaaaaaattgccaaaatgcgactttctaaaaatggagcagagtctgaggctttgcatgtcttggcattccttcaggagcttgatgaaaaaatgcaacaagcagatgaagactctgagaggggtttggagtctggaagcctcatcccttcagcatcaagctggaatggggaatgaagaatagagatgtggtgcccactaggctactgctgaaagggagctgaaattcctccaccaagttggtattcaaaatatgtaatgactggtatggcaaaagattggactaagacactggccataccactggacagggttatgttaacacctgaa

SEQ ID NO: 13952 - DNA, 295 bp, Homo sapiens
agggcgaattggagctccaccgcggtggcggccgcccgggcaggtacgcgggggtaactgaaaatccacaagacagaatagccagatctcagaggagcctggctaagcaaaaccctgcagaacggctgcctaatttacagcaaccatgaggccacttaaggatgcagcaagaaggagccatctgcaatccaggaagaaattccttgccaggaaccaaattggttgtcaccttcatctaggacttctagcctcgagaacttacaaatggtgatgatcatcaggtcaaggatagtct

SEQ ID NO: 13953 - DNA, 421 bp, Homo sapiens
ctactatagggcgaattggagctccaccgcggtggcggccgaggtaccaaatgaagtgtgaagacaaggccatccaccactttatagagggtgtaaaaataaaccataaatcaagggagaaagaaaagatgaaagacaaactgcaaaaaattgccaaaatgcgactttctaaaaatggagcagattctgaggctttgcatgtcttggcattccttcaggagctgaatgaaaaaatgcaacaagcagatgaagactctgagaggggtttggagtctggaagcctcatcccttcagcatcaagctggaatggggaatgaagaatagagatgtggtgcccactaggctactgctgaaagggagctgaaattcctccaccaagttggtattcaaaatatgtaatgactggtatggcaaaagattg

SEQ ID NO: 13954 - DNA, 499 bp, Homo sapiens
tatagggcgaattggagctccaccgcggtggcggccgcccgggcaggtacaatataaaataatacatatgaagccacaatattcaattacagttcaaactagaaagtactaactacatgtagctgcttcatttttcgttttgcattttggcccctaattcatatttacaactgatacctgctgagaaaaagatccaaacttttaaactttgtatgttttgtggagggtgcacaatttcttctaatatatcttcaggtgttttaaaatttaatttgtttttaatcataagatatcatcatggccaagagactgggaaaataacaattttattctttctcctaagattgtgattttattattccaagatcttatgctttgaattacttagcaagaaggcatgattatgcagaagacagggaaatgaagagaaaagagcgggaatatacgaaaatgaagcttccttaacagagttcatggtggagatggtagacactggtgg

SEQ ID NO: 13955 - DNA, 437 bp, Homo sapiens
tcactatagggcgaattgggccctctagatgcatgctcgagcggccgccagtgtgatggatatctgcagaatgcgccctttcgagcggccgcccgggcaggtacactctaaagaaagccatgaggatgataatccactttgatacttccaatctgctggtcttgctgaactctttggatcatggatatcataagttcgacaaaatattttttttgtagaagcacaaatgtgaagtgtcactcgttctgagacttcctcctctgtgaaattccacaatctctttctatttatagacttttccacagcaaacattagtctacgcagagcattttgaaaatcatttgccagttctaaagtagtaataataaatactccaagaactaaaagtccccctggtagcattctggatacctggcaggcatgttctgtggcccatt

SEQ ID NO: 13956 - DNA, 428 bp, Homo sapiens
acgactcactatagggcgaattgggccctctagatgcatgctcgagcggccgccagtgtgatggatatctgcagaatggggccttgcgagcggacgcccgggcaggtaccaaatgaagtgtgaagacaaggccatccaccactttatagagggtgtaaaaataaaccagaaatcaagggagaaagaaaagatgaaagacaaactgtaaaaaattgccaaaatgcgactttctaaaaatggagcagattctgaggctttgcatgtcttggcattccttcaggagctgaatgaaaaaatgcaacaagcagatgaagactctgagaggggtttggagtctggaagcctcatcccttcagcatcaagctggaatggggaatgaagaatagagatgtggtgcccactaggctactgctgaaagggagctgaaa

SEQ ID NO: 13957 - DNA, 421 bp, Homo sapiens
tatagggcgaattgggccctctagatgcatgctcgagcggccgccagtgtgatggatatctgcagaattggcccttagcgtggtcgcggccgaggtacataaaacattattccttccttggcctaaaaactcatcgccacctacattaaagctaatatgcctgattactgtttttagagaacttattttattagggcagttccaagctcaaaaatacgctaactggcaccttggtagctacataaaaatgcaccctagacccgaaacttactagactcattataaaattttctttaaggtgtccacgcagtccctggtcacacttgaagcagtccggagaaatatcagccctaccccagtaatccccagaaggaacttacacttttttttaatcttttcctacaacttcatattttataaa

SEQ ID NO: 13958 - DNA, 593 bp, Homo sapiens
  misc_feature 501, 529: n = A,T,C or G
tagatgcatgctcgagcggccgccagtgtgatggatatctgcagaattcgcccttagcgtggtcgcggccgaggtaccatctaggtcagtttaagaagagtcagctcagagaaagcaagcataagggaaaatgtcacgtaaactagatcagggaacaaaatcctctccttgtggaaatatcccatgcagtttgttgatacaacttagtatcttattgcctaaaaaaaaaatttcttatcattgtttcaaaaaagcaaaatcatggaaaatttttgttgtccaggcaaataaaaggtcattttaatttagctgcaatttcagtgttcctcactaggtggcatttaaatgtcgcctgatgtcattaagcaccatccaaaaagtctgcttcataatctattttcaagacttggtgattctgaaagttttggtttttgtgactttgtttctcaggaaaaaaatattcctacttaaattttaagtctataattcaatttaaatatngtgtgtgtctcatccaggataggatagngttgtcttctattttccattttacctatttactttttttgtaagaaaagagaaaaatgaattct

SEQ ID NO: 13959 - DNA, 525 bp, Homo sapiens
agggcgaattgggccctctagatgcatgctcgagcggccgccagtgtgatggatatctgcagaattcgcccttacgagcggccgcccgggcaggtaccaaatgaagtgtgaagacaaggccatccaccactttatagagggtgtaaaaataaaccagaaatcaagggagaaagaaaagatgaaagacaaactgcaaaaaattgccaaaatgcgactttctaaaaatggagcagattctgaggctttgcatgtcttggcattccttcaggagctgaatgaaaaaatgcaacaagcagatgaagactctgagaggggtttggagtctggaagcctcatcccttcagcatcaagctggaatggggaatgaagaatagagatgtggtgcccactaggctactgctgaaagggagctgaaattcctccaccaagttggtattcaaaatatgtaatgactggtatggcaaaagattggactaagacactggccataccactggacagggttatgttaacacctgaattgct

SEQ ID NO: 13960 - DNA, 510 bp, Homo sapiens
cactatagggcgaattggagctccaccgcggtggcggccgaggtaccaaatgaagtgtgaagacaaggccatccaccactttatagagggtgtaaaaataaaccagaaatcaagggagaaagaaaagatgaaagacaaactgcaaaaaattgccaaaatgcgactttctaaaaatggagcagattctgaggctatgcatgtcttggcattccttcaggagctgaatgaaaaaatgcaacaagcagatgaagactctgagaggggtttggagtctggaagcctcatcccttcagcatcaagctggaatggggaatgaagaatagagatgtggtgcccactaggctactgctgaaagggagctgaaattcctccaccaagttggtattcaaaatatgtaatgactggaatggcaaaagattggactaagacactggccataccactggacagggttatgttaacacctgaattgctgggttttgagagagcctaaggagttttgggagaggg

SEQ ID NO: 13961 - DNA, 434 bp, Homo sapiens
cggtggcggccgaggtaccaaatgaagtgtgaagacacggccatccaccactttatagagggtgtaaaaataaaccacaaatcaagggagaaagaaaagatgaaagacaaactgcaaaaaattgccaaaatgcgactttctaaaaatggagcatattctgaggctttgcatgtcttggcattccttcaggagctgaatgaaaaaatgcaacaagcagatgaagactctgagaggggtttggagtctggaagcctcatcccttcagcatcaagctggaatggggaatgaagaatagagatgtggtgcccactaggctctagaactagtggatcccccgggctgcaggaattcgatatcaagcttatcgataccgtcgacctcgagggggggcccggtacccagctttttgtttcctttagtgaggggtaattgcg

SEQ ID NO: 13962 - DNA, 265 bp, Homo sapiens
  misc_feature 19, 20, 21, 22, 118, 223: n = A,T,C or G
tgacttgcttttcccgttnnnnggtagctacgactacttaggcgattgggcccttagtgctgctcgagcggccgccagtgtgatggatatctgcagaattcggggtttacgggggtcnccgccccaaggtaccttgggaaaggcagtttaacgaaaaccccgggccctggggaaaccctgggacccccgggggggaccccttttaagggaaaaacttttgggngggggggggacacccccccaaagggtttttttaggggggccc

SEQ ID NO: 13963 - DNA, 511 bp, Homo sapiens
atacgactcactatagggcgaattggagctccaccgcggtggcggccgaggtaccaaatgaagtgtgaagacaaggccatccaccactttatagagggtgtaaaaataaaccagaaatcaagggagaaagaaaagatgaaagacaaactgcaaaaaattgccaaaatgcgactttctaaaaatggagcagattctgaggctttgcatgtcttggcattccttcaggagctgaatgaaaaaatgcaacaagcagatgaagactctgagaggggtttggagtctggaagcctcatcccttcagcatcaagctggaatggggaatgaagaatagagatgtggtgcccactaggctactgctgaaagggagctgaaattcctccaccaagttggtattcaaaatatgtaatgactggtatggcaaaagattggactaagacactggccataccactgacagggtttatgttaacacctgaattgcttgggtcttgagagagcccaaggagttctg

SEQ ID NO: 13964 - DNA, 516 bp, Homo sapiens
actactatagggcgaattggagctccaccgcggtggcggccgcccgggcaggtaccaaatgaagtgtgaagacaaggccatccaccactttatagagggtgtaaaaataaaccagaaatcaagggagaaagaaaagatgaaagacaaactgcaaaaaattgtcaaaatgcgactttctaaaaatggagcagattctgaggctttgcatgtcttggcattccttcaggagctgaatgaaaaaatgcaacaagcagatgaagactctgagaggggtttggagtctggaagcctcatcccttcagcatcaagctggaatggggaatgaagaatagagatgtggtgcccactaggctactgctgaaagggagctgaaattcctccaccaagttggtattcaaaatatgtaatgactggtatggcaaaagattggactaagacactggccataccactggacagggttatgttaacacctgaattgctgggtcttgagagagcccaaggagttctgggaga

SEQ ID NO: 13965 - DNA, 479 bp, Homo sapiens
tactatagggcgaattggagctccaccgcggtggcggccgaggtaccaaatgaagtgtgaagacaaggccatccaccactttatagagggtgtaaaaataaaccagaaatcaagggagaaagaaaagatgaaagacaaactgcaaaaaattgccaaaatgcgactttctaaaaatggagcagattctgaggctttgcatgtcttggcattccttcaggagctgaatgaaaaaatgcaacaagcagatgaagactctgagaggggtttggagtctggaagcctcatcccttcagcatcaagctggaatggggaatgaagaatagagatgtggtgcccactaggctactgctgaaagggagctgaaattcctccaccaagttggtattcaaaatatgtaatgactggtatggcaaaagattggactaagacactggccataccactggacagggttatgttaacacctgaattgctgggtc

SEQ ID NO: 13966 - DNA, 504 bp, Homo sapiens
actactatagggcgaattggagctccaccgcggtggcggccgaggtaccaaatgaagtgtgaagacaaggccatccaccactttatagagggtgtaaaaataaaccagaaatcaagggagaaagaaaagatgaaagacaaactgcaaaaaattgccaaaatgcgaccttctaaaaatggagcagattctgaggctttgcatgtcttggcattccttcaggagctgaatgaaaaaatgcaacaagcagatgaagactctgagaggggtttggagtctggaagcctcatcccttcagcatcaagctggaatggggaatgaagaatagagatgtggtgcccactaggctactgctgaaagggagctgaaattcctccaccaagttggtattcaaaatatgtaatgactgggtatggcaaaagattggactaagacactggccataccactggacagggtttatgttaacacctgaattgctgggtcttgagagagccaaaggagttc

SEQ ID NO: 13967 - DNA, 490 bp, Homo sapiens
atacgactcactatagggcgaattggagctccaccgcggtggcggccgaggtaccaaatgaagtgtgaagacaaggccatccaccactttatagagggtgtaaaaataaaccagaaatcaagggagaaagaaaagatgaaagacaaactgcaaaaaattgccaaaatgcgactttctaaaaatggagcagattctgaggctttgcatgtcttggcattccttcaggagctgaatgaaaaaatgcaacaagcagatgaagactctgagaggggtttggagtctggaagcctcatcccttcagcatcaagctggaatggggaatgaagaatagagatgtggtgcccactaggctactgctgaaagggagctgaaattcctccaccaagttggtattcaaaatatgtaatgactggtatggcaaaagattggactaagacactggccataccactggacagggttatgttaacacctgaattgctgggtcttg

SEQ ID NO: 13968 - DNA, 431 bp, Homo sapiens
tcactatagggcgaattggagctccaccgcggtggcggccgaggtacttcttacagtcttcaggaaattcattaaatcagtgcctccagttcctttggcttccagttttgaagggtcttcagaggtcttattctcctttggctgctggcttgcaggaatcaggatgtactgttcctgttggccgagtggagactggtgttctcaaacccggtatggtggtcacctttgctccagtcaacgttacaacggaagtaaaatctgtcgaaatgcaccatgaagctttgagtgaagctcttcctggggacaatgtgggcttcaatgtcaagaatgtgtctgtcaaggatgttcgtcggggcaacgttgctggtgacagcaaaaatgacccaccaatggaagcagctggcttcactgctcaggtgattatcctgaac

SEQ ID NO: 13969 - DNA, 258 bp, Homo sapiens
actcactatagggcgaattggagctccaccgcggtggcggccgcccgggcaggtaccctgatgctacagacgaggacatcacctcacacatggaaagcgaggagttgaatggtgcatacaaggccatccccgttgcccaggacctgaacgcgccttctgattgggacagccgtgggaaggacagttatgaaacgagtcagctggatgaccagagtgctgaaacccacagccacagcagtccagattatataagcggaa

SEQ ID NO: 13970 - DNA, 543 bp, Homo sapiens
  misc_feature 491: n = A,T,C or G
tactatagggcgaattggagctccaccgcggtggcggccgaggtacattggcacgtcacgatgtcttgagtttcattcactaggtggcagcctgcatcgttccactgcaaatgactgaaatcccaaaacacacaatgaggctggctcaggtttgactctatcttggaaaaaaataggaaaacttcatttatggaatagttttgaataaccgtggatatcacaggtccattgacctgagcatttccatttttggaaacgggtagaatgttccccagagtcaacgaggccatgctgataatagtttctggaagggatctctggaattggtctgacccaattaacacacggcctctgatgggaatagatgtattttggggacacattttaatctgatagctgtaaccccttttgagttggcttttgttcactggaatccctttccagtcaatgaatttccgagaaaaattcagaggaagagctgtcggaggcancagatggctgatgttttctaatgtctctagtaaccgggagctggcatacttt

SEQ ID NO: 13971 - DNA, 472 bp, Homo sapiens
tatagggcgaattggagctccaccgcggtggcggccgaggtaccaaatgaagtgtgaagacaaggccatccaccactttatagagggtgtaaaaataaaccagaaatcaagggagaaagaaaagatgaaagacaaactgcaaaaaattgccaaaatgcgactttctaaaaatggagcagattctgaggctttgcatgtcttggcattccttcaggagctgaatgaaaaaatgcaacaagcagatgaagactctgagaggggtttggagtctggaagcctcatcccttcagcatcaagctggaatggggaatgaagaatagagatgtggtgcccactaggctactgctgaaagggagctgaaattcctccaccaagttggtattcaaaatatgtaatgactggtatggcaaaagattggactaagacactggccataccactggacaggggttatgttaacacctgaattgct

SEQ ID NO: 13972 - DNA, 502 bp, Homo sapiens
  misc_feature 336: n = A,T,C or G
tacgactactatagggcgaattggagctccaccgcggtggcggccgcccgggcaggtaccaaatgaagtgtgaagacaaggccatccaccactttatagagggtgtaaaaataaaccagaaatcaagggagaaagaaaagatgaaagacaaactgcaaaaaattgccaaaatgcgactttctaaaaatggagcagattctgaggctttgcatgtcttggcattccttcaggagctgaatgaaaaaatgcaacaggcagatgaagactctgagaggggtttggagtctggaagcctcatcccttcagcatcaagctggaatggggaatgaagaaagnagatgtggtgcccactaggctactgctgaaagggagctgaaattcctccaccaagttggtattcaaaatatgtaatgactggtatggcaaaagattggactaagacactggccataccacgtggacagggttatgttaacacctgaattgctgggtcttgagagag

SEQ ID NO: 13973 - DNA, 373 bp, Homo sapiens
actcactatagggcgaattggagctccaccgcggtggcggccgcccgggcaggtaccaaatgaagtgtgaagacaaggccatccaccactttatagagggtgtaaaaataaaccagaaatcaagggagaaagaaaagatgaaagacaaactgcaaaaaattgccaaaatgcgactttctaaaaatggagcagattctgaggctttgcatgtcttggcattccttcaggagctgaatgaaaaaatgcaacaagcagatgaagactctgagaggggtttggagtctggaagcctcatcccttcagcatcaagctggaatggggaatgaagaatagagatgtggtgcccactaggctactactgaaagggagctga

SEQ ID NO: 13974 - DNA, 521 bp, Homo sapiens
actcactatagggcgaattggagctccaccgcggtggcggccgcccgggcaggtaccaaatgaagtgtgaagacaaggccatccaccactttatagagggtgtaaaaataaaccagaaatcaagggagaaagaaaagatgaaagacaaactgcaaaaaattgccaaaatgcgactttctaaaaatggagcagattctgaggctttgcatgtcttggcattccttcaggagctgaatgaaaaaatgcaacaagcagatgaagactctgagaggggtttggagtctggaagcctcatcccttcagcatcaagctggaatggggaatgaagaatagagatgtggtgcccactaggctactgctgaaagggagctgaaattcctccaccaagttggtattcaatatgtaatgactggtatggcaaaagattggactaagacactggccataccactggacagggttatgttaacacctgaattgctgggtcttgagagagcccaaggagttctgggagagggacc

SEQ ID NO: 13975 - DNA, 486 bp, Homo sapiens
actactatagggcgaattggagctccaccgcggtggcggccgaggtaccaaatgaagtgtgaagacaaggccatccaccactttatagagggtgtaaaaataaaccagaaatcaagggagaaagaaaagatgaaagacaaactgcaaaaaattgccaaaatgcgactttctaaaaatggagcagattctgaggctttgcatgtcttggcattccttcaggagctgaatgaaaaaatgcaacaagcagatgaagactctgagaggggtttggagtctggaagcctcatcccttcagcatcaagctggaatggggaatgaagaacagagatgtggtgcccactaggctactgctgaaagggagctgaaattcctccccaagttggtattcaaaatatgtaatgactggtatggcaaaagattggactaagacactggccataccactggcagggtttatgttaacaccttgaattgctgggtcttgag

SEQ ID NO: 13976 - DNA, 509 bp, Homo sapiens
actactatagggcgaattggagctccaccgcggtggcggccgaggtaccaaatgaagtgtgaagacaaggccatccaccacttttatagagggtgtaaaaataaaccagaaatcaagggagaaagaaaagatgaaagacaaactgcaaaaaattgccaaaatgcgactttctaaaaatggagcagattctgaggctttgcatgtcttggcattccttcaggagctgaatgaaaaaatgcaacaagcagatgaagactctgagaggggtttggagtctggaagcctcatcccttcagcatcaagctggaatggggaatgaagaatagagatgtggtgcccactaggctactgctgaaagggagctgaaattcctccaccaagttggtattcaaaatatgtaatgactggtatggcaaaagattggactaagacactggccataccactggacagggttatgttaacacctgaattgctgggtcttgagagagcccaggagttctgggaga

SEQ ID NO: 13977 - DNA, 521 bp, Homo sapiens
agggcgaattggagctccaccgcggtggcggccgaggtacttccaggaagtgaagtaaaacctggtcttggttgataggccccaggttggcttggagccattccaggttgagaggcaggagccacagtataattagtaggctgagaagtttgggcagtgtaagtttgtgcaggataattgctcgcctggtactcttggaagtccacctcgttgtccctgttgctgtccaagttgctcatcagcttctggaaagcagcttcacctgtccttttccccaagaagctgggcagctcccgggtcagcagctcctttagttctgacttgttgagcttgaacttgtcaccctctttgcccgagtacctgcccgggcggccgctctagaactagtggatcccccgggctgcaggaattcgatatcaagcttatcgataccgtcgacctcgagggggggcccggtacccagcttttgttccctttagtgagggttaattgcgcgcttggcgtaatcatgggcatagctg

SEQ ID NO: 13978 - DNA, 509 bp, Homo sapiens
actactatagggcgaattggagctccaccgcggtggcggccgaggtaccaaatgaagtgtgaagacaaggccatccaccactttatagagggtgtaaaaataaaccagaaatcaagggagaaagaaaagatgaaagacaaactgcaaaaaattgccaaaatgcgactttctaaaaatggagcagattctgaggctttgcatgtcttggcattccttcaggagctgaatgaaaaaatgcaacaagcagatgaagactctgagaggggtttggagtctggaagcctcatcccttcagcatcaagctggaatggggaatgaagaatagagatgtggtgcccactaggctactgctgaaagggagctgaaattcctccaccaagttggtattcaaaatatgtaatgactggtatggcaaaagattggactaagacactggccataccactggacagggttatgttaacacctgaattgctgggtcttgagagagccaaggagttctgggagag

SEQ ID NO: 13979 - DNA, 513 bp, Homo sapiens
tagggcgaattggagctccaccgcggtggcggccgcccgggcaggtaccaaatgaagtgtgaagacaaggccatccaccactttatagagggtgtaaaaatggaccagaaatcaagggagaaagaaaagatgaaagacaaactgcaaaaaattgccaaaatgcgactttctaaaaatggagcagattctgaggctttgcatgtcttggcattccttcaggagctgaatgaaaaaatgcaacaagcagatgaagactctgagaggggtttggagtctggaagcctcatcccttcagcatcaagctggaatggggaatgaagaatagagatgtggtgcccactaggctactgctgaaagggagctgaaattcctccaccaagttggtattcaaaatatgtaatgactggtatggcaaaagattggactaagacactggccataccactggacagggttatgttaacacctgaattgctgggtcttgagagagcccaaagagttctgggagaggga

SEQ ID NO: 13980 - DNA, 220 bp, Homo sapiens
ctatagggcgaattggagctccaccgcggtggcggccgcccgggcaggtacgcggggggtcttctagtccggtaaacagagggcctgcccccgacagcttctgcttccgggtcacgccttgacagcggctttcaacccccacctcagcccagcaattcgtttggagcatgtgaacaccttgagccttgatgagttccagtatgtggtatattatgcagag

SEQ ID NO: 13981 - DNA, 539 bp, Homo sapiens
ctactatagggcgaattggagctccaccgcggtggcggccgaggtacgcggggcttttccgtgctacctgcagaggggtccatacggcgttgttctggattcccgtcgtaacttaaagggaaattttcacaatgtccggagcccttgatgtcctgcaaatgaaggaggaggatgtccttaagttccttgcagcaggaacccacttaggtggcaccaatcttgacttccagatggaacagtactcttggaagtccacctcgttgtccctgttgctgtccaagttgctcatcagcttctggaaagcagcttcatctgtccttttccccaagaagctgggcagctcccgggtcagcagctcctttagttctgacttgttgagcttgaacttgtcaccctctttgcccgagtacctgcccgggcggccgctctagaactagtggatcccccgggctgcaggaattcgatatcaagcttatcgataccgtcgacctcgagggggggcccggtacccagcttttgttccctttagtgagggttaa

SEQ ID NO: 13982 - DNA, 292 bp, Homo sapiens
tcactatagggcgaattggagctccaccgcggtggcggccgcccgggcaggtacgcggggaaacaaaaaggaaccagaggccacttgtatatataggtctcttcagcatttattggtggcagaagaggaagatttctgaagagtgcagctgcctgaaccgagccctgccgaacagctgagaattgcactgcaaccatgagtgagaacaataagaattccttggagagcagcctacggcaactaaaatgccatttcacctggaacttgatggagggagaaaactccttggatg

SEQ ID NO: 13983 - DNA, 427 bp, Homo sapiens
ttggagctccaccgcggtggcggccgaggtaccaaatgaagtgtgaagacaaggccatccaccactttatagagggtgtaaaaataaaccagaaatcaagggagaaagaaaagatgaaagacaaactgcaaaaaattgccaaaatgcgactttctaaaaatggagcagattctgaggctttgcatgtcttggcattccttcaggagctgaatgaaaaaatgcaacaagcagatgaagactctgagaggggtttggagtctggaagcctcatcccttcagcatcaagctggaatggggaatgaagaatagagatgtggtgcccactaggctactgctgaaagggagctgaaatttctccaccaaggtggtattcaaaatatgtaatgactggtatggcaaaagattgggactaagacactggccatac

SEQ ID NO: 13984 - DNA, 357 bp, Homo sapiens
ttgagctccaccgcggtggcggccgcccgggcaggtaccaaatgaagtgtgaagacaaggccatccaccactttatagagggtgtaaaaataaaccagaaatcaagggagaaagaaaagatgaaagacaaactgcaaaaaattgccaaaatgcgactttctaaaaatggagcagattctgaggctttgcatgtcttggcattccttcaggagctgaatgaaaaaatgcaacaagcagatgaagactctgagaggggtttggagtctggaagcctcatcccttcagcatcaagctggaatggggaatgaagaatagagatgtggtgcccactaggctactgctgaaagggagctgaaa

SEQ ID NO: 13985 - DNA, 427 bp, Homo sapiens
ttgagctccaccgcggtggcggccgaggtaccaaatgaagtgtgaagacaaggccatccaccactttatagagggtgtaaaaataaaccagaaatcaagggagaaagaaaagatgaaagacaaactgcaaaaaattgccaaaatgcgactttctaaaaatggagcagattctgaggctttgcatgtcttggcattccttcaggagctgaatgaaaaaatgcaacaagcagatgaagactctgagaggggtttggagtctggaagcctcatcccttcagcatcaagctggaatggggaatgaagaatagagatgtggtgcccactaggctactgctgaaagggagctgaaattcctcaccagttggtattcaaatatgtaatgactggtatggcaaaagattggactaagacactggccataccactg

SEQ ID NO: 13986 - DNA, 419 bp, Homo sapiens
cgaattggagctccaccgcggtggcggccgaggtacaatacactagaaaccaacataatgtattttttttaaaacctgtgtgaaaaaataaatgttccaccattagggataggggaaaagtaaccaaaagagagaaagagaaaggaatgctggtttatctatgtaggttgtaatcgaatggagaaatttgcagtattttagccactattaggaatttttttttttttgtaaaatgaagactgaactctgttcaaatgcttttatgaacctggtttgagacggtaggaaagcaacaaaacgtgggaacctggtgactaagggcctggtgcaaggacttgggaaatgtcattgataatagatggtggggatttcccccctttaaaaatgttggatattaagtgatataaacacttttttta

SEQ ID NO: 13987 - DNA, 512 bp, Homo sapiens
ggcgaattggagctccaccgcggtggcggccgcccgggcaggtactgtgatatccacatattttcgataaaaattccaaagccaggcgaatgtggattggaataaagacataggcagtgtataccaccatagcaataatggttagtaagatggtgttaaacatagatcgctcccagggctctaaaacagcacagcagctaatgatttggtattgatagtagagccaggagaaatattccttcacacgcctcaaatccatggttggctccttcaagctgcagtaagtttgtcctaagaaagtccaggtctggttcttcagccttgctccttcgcgaaatgatcctgtgtgggttagttctcctctctgggttgctgtttcctcatctcccagttgggtgtatctccctgcggcttaggtgagcgccgaggctttggctcctacccagctgctgcgagcttcccactgcccccgcgtaccttgggcgctctagaactagtggatcccccgggct

SEQ ID NO: 13988 - DNA, 402 bp, Homo sapiens
atagggctaattggagctccaccgcggtggcggccgaggtacgcggggggcagaagaggaagatttttgaagagtgcagctgcctgaaccgagccctgccgaacagctgagaattgcactgcaaccatgagtgagaacaataagaattccttggagagcagcctacgggaactaaaatgccatttcacctggaacttgatggagggagaaaactccttggatgattttgaagacaaagtattttaccggactgaagtttcagaatcgtgaattcaaagccacaatgtgcaacctactggcctatctaaagcacctcaaagggcaaaacgaggcagtcctggaatgcttacgtaaagctgaggagttaatccagcaagaacatgctgaccaggccgaaatcaa

SEQ ID NO: 13989 - DNA, 193 bp, Homo sapiens
agggcaattggagctccaccgcggtggcggccgaggtaccaaatgaagtgtgaagacaaggccatccaccactttatagagggtgtaaaaataaaccagaaatcaagggagaaagaaaagatgaaagacaaactgcaaaaaattgccaaaatgcgactttctaaaaatggagcagattctgaggctttgcatg

SEQ ID NO: 13990 - DNA, 425 bp, Homo sapiens
tgagctccaccgcggtggcggccgcccgggcaggtacgcgggggagacattcctcaattgcttagacatattctgagcctacagcagaggaacctccagtctcagcaccatgaatcaaactgccattctgatttgctgccttatctttctgactctaagtggcattcaaggagtacgggaaggcgaagaaaagaatagagaagatagggaaattagaagataaaaacatacttttagaagaaaaaagataaatttaaacctgaaaagtaggaagcagaagaaaaaagacaagctaggaaacaaaaagcctaagggcaaaatgtacctcggccgctctagaactagtggatcccccgggctgcaggaattcgatatcaagcttatcgataccggcgacctcgagggggggcccggtacccagcttt

SEQ ID NO: 13991 - DNA, 266 bp, Homo sapiens
actatagggcgaattggagctccaccgcggtggcggccgcccgggcaggtaccaaatgaagtgtgaagacatggccatccaccactttatagagggtgtaaaaataaaccagaaatcaagggagaaagaaaagatgaaagacaaactgcaaaaaattgccaaaatgcgactttctaaaaatggagcagattctgaggctttgcatgtcttggcattccttcaggagctgaatgaaaaaatgcaacaagcagatgaagactctgaga

SEQ ID NO: 13992 - DNA, 454 bp, Homo sapiens
cactactatagggcgaattggagctccaccgcggtggcggccgcccgggcaggtaccaaatgaagtgtgaagacaaggccatccaccactttatagagggtgtaaaaataaaccagaaatcaagggagaaagaaaagatgaaagacaaactgcaaaaaattgccaaaatgcgactttctaaaaatggagcagattctgaggctttgcatgtcttggcattccttcaggagctgaatgaaaaaatgcaacaagcagatgaagactctgagaggggtttggagtctggaagcctcatcccttcagcatcaagctggaatggggaatgaagaatagagatgtggtgcccactaagctactgctgaaagggagctgaaattcctccaccaagttgggattcaaaatatgtaatgactggtatggcaaaagattggactaagacactggccataccact

SEQ ID NO: 13993 - DNA, 458 bp, Homo sapiens
atacgactactatagggcgaattggagctccaccgcggtggcggccgaggtaccaaatgaagtgtgaagacaaggccatccaccactttatagagggtgtaaaaataaaccagaaatcaagggagaaagaaaagatgaaagacaaactgcaaaaaattgccaaaatgcgactttctaaaaatggagcagattctgaggctttgcatgtcctggcattccttcaggagctgaatgaaaaaatgcaacaagcagatgaagactctgagaggggtttggagtctggaagcctcatcccttcagcatcaagctggaatggggaatgaagaatagagatgtggtgcccactaggctactgctgaaagggagctgaaattcctccaccaagttggtattcaaaatatgtaatgactggtatggcaaaagattggactaagacactggccataccactggacagg

SEQ ID NO: 13994 - DNA, 400 bp, Homo sapiens
ggcgaattggagctccaccgcggtggcggccgaggtactgctaaagtcagacagcccaacaggtgatgttttactggatgaaactctgaaacacatcaaagcaactgaacccacagaaactgtccaaacatggatagagctactcactggtgagacctggaaccccttcaaattacagtactgttcctgttggccgagtggagactggtgttctcaaacccggtatggtggtcacctttgctccagtcaacgttacaacggaagtaaaatctgtcgaaatgcaccatgaagctttgagtgaagctcttcctggggacaatgtgggcttcaatgacaagaatgtgtctgtcaaggatgttcgtcgtggcaacgttgctggtgacagcaaaaatgacccacc

SEQ ID NO: 13995 - DNA, 253 bp, Homo sapiens
cactactatagggcgaattggagctccaccgcggtggcggccgcccgggcaggtaccaaatgaagtgtgaagacaaggccatccaccactttatagagggtgtaaaaataaaccagaaatcaagggagaaagaaaagatgaaagacaaactgcaaaaaattgccaaaatgcgactttctaaaaatggagcagattctgaggctttgcatgtcttggcattccttcaggagctgaatgaaaaaatgcaacaagc

SEQ ID NO: 13996 - DNA, 467 bp, Homo sapiens
ttggagctccaccgcggtggcggccgcccgggcaggtaccaaatgaagtgtgaagacaaggccatccaccactttatagagggtgtaaaaataaaccagaaatcaagggagaaagaaaagatgaaagacaaactgcaaaaaattgccaaaatgcgactttctaaaaatggagcagattctgaggctttgcatgtcttggcattccttcaggagctgaatgaaaaaatgcaacaagcagatgaagactctgagaggggtttggagtctggaagcctcatcccttcagcatcaagctggaatggggaatgaagaatagagatgtggtgcccactaggctactgctgaaagggagctgaaattcctccaccaagttggtattcaaaatatgtaatgactggtatggcaaaagattggactaagacactggccataccactgacagggtttatgttaacacctgaattgct

SEQ ID NO: 13997 - DNA, 411 bp, Homo sapiens
cgcggtggcggccgaggtacataaaacattattccttccttgggctaaaaactctatgccacctacattaaagctaatatgcctgattactgtttttagagaacttattttattagggcagttccaagctcaaaaatacgctaactggcaccttgttagctacataaaaatgcaccctagacccgaaacttactagactcattataaaattttctttaaggtgtccacgcagtccctggtcacacttgaagcagtccggagaaatattagccctaccccagtaatccccagaaggaacttacacttttttttaatcttttcctacaacttcatattttataaataaaaagacacaaatgtcaggcctgtgagctgaagcttagccattgaaacccctgtgacctgcacata

SEQ ID NO: 13998 - DNA, 476 bp, Homo sapiens
actactatagggcgaattggagctccaccgcggtggcggccgcccgggcaggtacgcggggagtgggaagctcgcagcagctggggaggagccaaagcctcggcgctcacctaagccgcagggagatacacccaactgggagatgaggaaacagcaacccagagaggagaactaacccacacaggatcatttcgtgaaggagcaaggctgaagaaccagacctggactttcttaggacaaacttactgcagcttgaaggagccaaccatggatttgaggcgtgtgaaggaatatttctcctggctctactatcaataccaaatcattagctgctgtgctgttttagagccctgggagcgatctatgtttaacgccatcttactaaccattattgctatggtggtatacactgcctatgtctttattccaatccacattcgcctggcttgggaatttttctcaaaaatatgtggata

SEQ ID NO: 13999 - DNA, 400 bp, Homo sapiens
attggagctccaccgcggtggcggccgaggtaccaaatgaagtgtgaagacaaggccatccaccactttatagagggtgtaaaaataaaccagaaatcaagggagaaagaaaagatgaaagacaaactgcaaaaaattgccaaaatgcgactttctaaaaatggagcagattctgaggctttgcatgtcttggcattccttcaggagctgaatgaaaaaatgcaacaagcagatgaagactctgagaggggtttggagtctggaagcctcatcccttcagcatcaagctggaatggggaatgaagaatagagatgtggtgcccactaggctactgctgaaagggagctgaaattcctccaccaagttggtattcaaaatatgtaatgactggtatggcaa

SEQ ID NO: 14000 - DNA, 427 bp, Homo sapiens
  misc_feature 325, 363: n = A,T,C or G
ctactatagggcgaattggagctccaccgcggtggcggccgaggtaccaaatgaagtgtgaagacaaggccatccaccactttatagagggtgtaaaaataaaccagaaatcaagggagaaagaaaagatgaaagacaaactgcaaaaaattgccaaaatgcgactttctaaaaatggagcagattctgaggctttgcatgtcttggcattccttcaggagctgaatgaaaaaatgcaacaagcagatgaagactctgagaggggttttggagtctggaagcctcatcccttcagcatcaagctggaatggggaatgaagaaagnagaatggtgggtgcccactagggctactgctgaaaggngagcttgaaattcctccaccaaggtttggtattcaaaaatatgtaatgactgggtatggcaaaa

SEQ ID NO: 14001 - DNA, 451 bp, Homo sapiens
  misc_feature 340, 359, 378: n = A,T,C or G
tatagggcgaattggagctccaccgcggtggcggccgaggtacaatcttgagaaggatttgaaggacaagtttgtggccctgaccatagatgatatctgcttctcgctcaacgacaactcaccaaacatcagatattctgagaacgccgtgaggattgagccaaactccgtgagtctggaagactggttggacttctccagcaccaatgtggagaaggctgacaagcagcggaacaactccctgatgctgaaagccctggtggatcgaatcctgtcccagacagccaattgatctgtgcaagcagtggtgattgttggtggacaccggcattcaagaatngggctgaaggatacaaagngatgccagggacaagctgnccttgatcatctggccaaggtcatggaaggagattgctttccagggagaaaaatattacaggctcttgaaaag

SEQ ID NO: 14002 - DNA, 447 bp, Homo sapiens
  misc_feature 325, 326: n = A,T,C or G
ctactatagggcgaattggagctccaccgcggtggcggccgaggtaccaaatgaagtgtgaagacaaggccatccaccactttatagagggtgtaaaaataaaccagaaatcaagggagaaagaaaagatgaaagacaaactgcaaaaaaattgccaaaatgcgactttctaaaaatggagcagattctgaggctttgcatgtcttggcattccttcaggagctgaatgaaaaaatgcaacaagcagatgaagactctgagaggggttttggagtctggaagcctcatcccttcagcatcaagctggaatggggaatgaagaaannagatggtggtgcccactaggctactgctgaaagggagctgaaattcctcaccaagttggtattcaaaatatgtaatgactgggtatggcaaaagattggactaagacactggccataccac

SEQ ID NO: 14003 - DNA, 480 bp, Homo sapiens
gcgaattggagctccaccgcggtggcggccgaggtacaagatagtcatctcagtaaaaggtctattatctaacttgccaaacttgtttactgagagccctaaggaactaaaactgccataatgccgtgcacagcttgaaaagcaattagagtaagcaagattagtttttcctcccttccagttcctcagcaggcctggctgaaggcccaggagggaaggaaatataagaaccaacaataaaaatagcaatagcaataagaagaatgccatcccatggagcacaccataattctggaaccacctctcccggatcaggcttccattgctcacgatgctcacgctgggcagccgcaactctactttgcagaacctcaccaacttgcccaggtattctccccggtcttgaagaaatggctctccacctgaaaagttgatcttctccataccagctttcttaagcaaaagcaatcctctctttgc

SEQ ID NO: 14004 - DNA, 487 bp, Homo sapiens
ctcactatagggcgaattggagctccaccgcggtggcggccgcccgggcaggtacgcgggggggtggagagaggcctctagacttcagtttcagtttcctggctctgggcagcagcaagaattcctctgcctcccatcctaccattcactgtcttgccggcagccagctgagagcaatgggaaatggggagtcccagctgtcctcggtgcctgctcagaagctgggttggtttatccaggaatacctgaagccctacgaagaatgtcagacactgatcgacgagatggtgaacaccatctgtgacgtcctgcaggaacccgaacagttccccctggggcagggagtggccataggtggctcctatggacggaaaacagccttaagaggcaactccgatggtacctcggccgctctagaactagtggatcccccgggctgcaggaattcgatatcaagcttatcgataccgtcgacctcgaggggggg

SEQ ID NO: 14005 - DNA, 353 bp, Homo sapiens
ttggagctccaccgcggtggcggccgaggtaccaaatgaagtgtgaagacaaggccatccaccactttatagagggtgtaaaaataaaccagaaatcaagggagaaagaaaagatgaaagacaaactgcaaaaaattgccaaaatgcgactttctaaaaatggagcagattctgaggctttgcatgtcttggcattccttcaggagctgaatgaaaaaatgcaacaagcagatgaagactctgagaggggtttggagtctggaagcctcatcccttcagcatcaagctggaatggggaatgaagaatagagatgtggtgcccactaagctactgctgaaagggagctgaaatt

SEQ ID NO: 14006 - DNA, 365 bp, Homo sapiens
agggcgaattggagctccaccgcggtggcggccgaggtaccaaatgaagtgtgaagacaaggccatccaccactttatagagggtgtaaaaataaaccagaaatcaagggagaaagaaaagatgaaagacaaactgcaaaaaattgccaaaatgcgactttctaaaaatggagcagattctgaggctttgcatgtcttggcattccttcaggagctgaatgaaaaaatgcaacaagcagatgaagactctgagaggggtttggagtctggaagcctcatcccttcagcatcaagctggaatggggaatgaagaatagagatgtggtgcccactaggctactgctgaaagggagctgaaattcctc

SEQ ID NO: 14007 - DNA, 454 bp, Homo sapiens
  misc_feature 334, 424: n = A,T,C or G
actactatagggcgaattggagctccaccgcggtggcggccgcccgggcaggtaccaaatgaagtgtgaagacaaggccatccaccactttatagagggtgtaaaaataaaccagaaatcaagggagaaagaaaagatgaaagacaaactgcaaaaaattgccaaaatgcgactttctaaaaatggagcagattctgaggctttgcatgtcttggcattccttcaggagctgaatgaaaaaatgcaacaagcagatgaagactctgagaggggttttggagtctggaagcctcatcccttcagcatcaagctggaatggggaatgaagaatagnagattgtggtgcccactaggctactgctgaaagggagctgaaattcctcaccaagtttggtattcaaaatatgtaatgacttggtatggncaaaagattggactaagacactggccatac

SEQ ID NO: 14008 - DNA, 399 bp, Homo sapiens
ggcgaattggagctccaccgcggtggcggccgcccgggcaggtactctttgttttggcacacttttcctgacaaacagccagtgttctcaatacataaatactagtccacgttaacaacaatagcatatgagaccgctctccgtaaagatgccagattggatgcaaatggactggaaataccttggagggtttcacaaaaataagacaaagggcaaaggaactttgccaaaggagatggagagcaattctttaaagatagtgggagggaggaagcaaagagctcataaatacaagcctcttaaaatgggacgcatttgcctcgcgcctactgggtgtctgcagctcagctttggtgccccacacgggacaccgactttaagtggctgcctttgcaaggc

SEQ ID NO: 14009 - DNA, 396 bp, Homo sapiens
ggcgaattggagctccaccgcggtggcggccgcccgggcaggtaccttcaatgtcattaaccataaatgagcatttacaatctggattaaatgtcacatggtattaagtctacacttagagtaatgcttttactgatttttaaaaatatatgcatatgtttagtgatcgagaaaagtgaaatactggagtactttttttttttttttttttttggcttgatgagtaggtgagtttattgggacttacacacaggtcaatcctgggcggcgacaagacagctctagagatctgagcttcctcccaatgctaaactgctttcatgctaattttctgactgtttacttaccgggtaagagcgatgggactgttttattggtttggttctcacatactct

SEQ ID NO: 14010 - DNA, 457 bp, Homo sapiens
ctactatagggcgaattggagctccaccgcggtggcggccgcccgggcaggtaccaaatgaagtgtgaagacaaggccatccaccactttatagagggtgtaaaaataaaccagaaatcaagggagaaagaaaagatgaaagacaaactgcaaaaaattgccaaaatgcgactttctaaaaatggagcagattctgaggctttgcatgtcttggcattccttcaggagctgaatgaaaaaatgcaacaagcagatgaagactctgagaggggtttggagtctggaagcctcatcccttcagcatcaagctggaatggggaatgaagaatagagatggtggtgcccactaggctactgctgaaagggagctgaaattcctccaccaagttggtattcaaaatatgtaatgactggtatggcaaaagattggactaagacactggccataccactggac

SEQ ID NO: 14011 - DNA, 456 bp, Homo sapiens
cggcaggtacgcggagcagaagaggaagatttctgaagagtgcagctgcctgaaccgagccctgccgaacagctgagaattgcactgcaaccatgagtgagaacaataagaattccttggagagcagctacggaactaaaatgcatttacctggaacttgatggagggagaaaactccttggatgattttgaagacaaagtattttaccggactgagtttcagaatcgtgaattcaaagccacaatgtgcaacctactggcctatctaaagcacctcaaagggcaaaacgaggcagcccttgaatgcttacgtaaagctgaagagttaatccagcaagagcatgctgaccaaggcagaaatcataagtctggtcacctggggaaactatgcctgggtttactatcacatgggccgactctcagacgttcagatttatgtagacaaggtgaaacatg

SEQ ID NO: 14012 - DNA, 657 bp, Homo sapiens
cgtatacgactcactatagggcgaattggagctccaccgcggtggcggccgaggtacccaggcctgcaaatctcctggcaggatggtcaggaactgctctagcaccagcagttccagaatctgttccttggtatggatctctggcttcagccactgacagcagagctcccggaggcggctcagtgcctcgcgaggtccaggagaatcctggtagcagaactgcctaaaaagctgcctgcagagctcctgcttaaggagttcacttctctgtaagcaagtgtcctgcccatggataaattcttcctcttctatcttcactatcagaagtccttcatcctctggagagttctgggctgcagctttctttggttctgtagccatctctcggacagggctgattccgatcggacacttccggtggaaggactgagcggcgctacacttcaagaattccgtccacagggacttgtgagtctgcgcagaaggcgggatgcctttggactacgattccaagaatccttcctgggtctcttcgggcgcagacttttcgccaaagtcctgaagatctcagggcttgaaggaaggggcatccttcttctccattgtagtagtgtgtcttgctaaataacagaagggactcctgaaaagaaaatgacg

SEQ ID NO: 14013 - DNA, 491 bp, Homo sapiens
tccaccgcggtggcggccgaggtacagagatttataatggctgctctaggtcctatcgggtaaagggatcagcagatgtgaagtcaagagtctcctgtaagatttgactttcttggaaacatattttaatcctgggcctcctatttcaaatcacctattttttagtttttgcagtgatactgtgtgttgcttctaacagaggttcagtttgacagcctttccctcaagtgtcttatcctaaaagtaaaacctagatgatctaaggtggtggttttcaacagggtgcaattttgcctcctatactcggaacacccatggacagttggctatgtctggagacatttttgggttgtcacaactggaagcagggtggggagtggcgctaatgacatcaagtgggcataagccaataatgctgttagaaatgctacaatgcacaggataggctcccacaaacaaagacttaaccaaccccaaatactaacaatgct

SEQ ID NO: 14014 - DNA, 652 bp, Homo sapiens
gcgcgtaatacgactcactatagggcgaattggagctccaccgcggtggcggccgaggtacaagatagtcatctcagtaaaaggtctattatctaacttgccaaacttgtttactgagagccctaaggaactaaaactgccataatgccgtgcacagcttgaaaagcaattagagtaagcaagattagtttttcctcttccagttcctcagcaggcctggctgaaggcccaggagggaaggaaatataagaaccaacaataaaaatagcaatagcaataagaagaatgccatcccatggagcacaccataattctggaaccacctctcccggatcaggcttccattgctcacgatgctcacgctgggcagccgcaactctactttgcagaacctcaccaacttgcccaggtattctccccggtcttgaagaaatggctctccacctgaaaagttgatcttctccataccagcttccttaagcaaaagcaatcctctctttgcttcctcaaggggcagcacaaaggatgttttggctgtgtggaaacagaagccgcatttgtagttgcactggcgagtgaagtgatagttgacgctggttggggtggtgggcaaaagagggtcctcttcctcctctttggtctcatctggccc

SEQ ID NO: 14015 - DNA, 332 bp, Homo sapiens
tacgactcactatagggcgaattggagctccaccgcggtggcggccgcccgggcaggtacttgctaactttgacgccagcatctctgaaagatccccatcgaaggccggtcattgcaaatacaggctgttccttttcacccttgatctgcaagacatcaagtggaactgtctctcctttcacaatggcaagtgtggcatcagtaatatgttggactttgtttccactttcggcaaagagggtatgactcaaactactggtctctcccagtgggataaatccaatgggaatcttactgaaggtagcctcatctgttcgtcgaagaacaccagt

SEQ ID NO: 14016 - DNA, 495 bp, Homo sapiens
tacgactcactatagggcgaattggagctccaccgcggtggcggccgaggtaccaaatgaagtgtgaagacaaggccatccaccactttatagagggtgtaaaaataaaccagaaatcaagggagaaagaaaagatgaaagacaaactgcaaaaaattgccaaaatgcgactttctaaaaatggagcagattctgaggctttgcatgtcttggcattccttcaggagctgaatgaaaaaatgcaacaagcagatgaagactctgagaggggtttggagtctggaagcctcatcccttcagcatcaagctggaatggggaatgaagaatagagatgtggtgcccactaggctactgctgaaagggagctgaaattcctccaccaagttggtattcaaaatatgtaatgactggtatggcaaaagattggactaagacactggccataccactggacagggttatgttaacacctgaattgctgggtcttgagagag

SEQ ID NO: 14017 - DNA, 493 bp, Homo sapiens
gactcactatagggcgaattggagctccaccgcggtggcggccgcccgggcaggtaccaaatgaagtgtgaagacaaggccatccaccactttatagagggtgtaaaaataaaccagaaatcaagggagaaagaaaagatgaaagacaaactgcaaaaaattgccaaaatgcgactttctaaaaatggagcagattctgaggctttgcatgtcttggcattccttcaggagctgaatgaaaaaatgcaacaagcagatgaagactctgagaggggtttggagtctggaagcctcatcccttcagcatcaagctggaatggggaatgaagaatagagatgtggtgcccactaggctactgctgaaagggagctgaaattcctccaccaagttggtattcaaaatatgtaatgactggtatggcaaaagattggactaagacactggccataccactggacagggttatgttaacacctgaattgctgggtcttg

SEQ ID NO: 14018 - DNA, 449 bp, Homo sapiens
tactatagggcgaattggagctccaccgcggtggcggccgcccgggcaggtacttctacagagatcctgaagagattgaaaaagaagagcaggctgctgctgagaaggcagtgaccaaggaggaatttcagggtgaatggactgctcccgctcctgagttcactgctactcagcctgaggttgcagactggtctgaaggtgtactcttggtttatcaatgggacgttccagcaatccacacaagagctctttatccccaacatcactgtgaataatagcggatcctatatgtgccaagcccataactcagccactggcctcaataggaccacagtcacgatgatcacagtctctggaagtgctcctgtcctctcagctgtggccaccgtcggcatcacgattggagtgctggccagggtggctctgatatagcagccctggtgtatttt

SEQ ID NO: 14019 - DNA, 492 bp, Homo sapiens
tacgactcactatagggcgaattggagctccaccgcggtggcggccgaggtaccaaatgaagtgtgaagacaaggccatccaccactttatagagggtgtaaaaataaaccagaaatcaagggagaaagaaaagatgaaagacaaactgcaaaaaattgccaaaatgcgactttctaaaaatggagcagattctgaggctttgcatgtcttggcattccttcaggagctgaatgaaaaaatgcaacaagcagatgaagactctgagaggggtttggagtctggaagcctcatcccttcagcatcaagctggaatggggaatgaagaatagagatgtggtgcccactaggctactgctgaaagggagctgaaattcctccaccaagttggtattcaaaatatgtaatgactggtatggcaaaagattggactaagacactggccataccactggacagggtttatgttaacacctgaattgctgggtcttgag

SEQ ID NO: 14020 - DNA, 348 bp, Homo sapiens
agggcgaattggagctccaccgcggtggcggccgcccgggcaggtacctcatttttattttgaaaaccattcagcacatttatcttatgtaacatgcagagcatatatctatctgtatttttaaaattttcctgttactcattgatacatagtacttccttgatgttgttggagtccgtgagaaacatggcgactcgatcaatgcccatgccccagccagctgtggggggcagcccatattccagggcagtactcaaaggtgatatttgcttttttcaatgcttcaggggaaaaatccttttctttacaaactttcatcagtttaggagtcagtctgtatgcatttta

SEQ ID NO: 14021 - DNA, 453 bp, Homo sapiens
cactactatagggcgaattggagctccaccgcggtggcggccgaggtaccaaatgaagtgtgaagacaaggccatccaccactttatagagggtgtaaaaataaaccagaaatcaagggagaaagaaaagatgaaagacaaactgcaaaaaattgccaaaatgcgactttctaaaaatggagcagattctgaggctttgcatgtcttggcattccttcaggagctgaatgaaaaaatgcaacaagcagatgaagactctgagaggggtttggagtctggaagcctcatcccttcagcatcaagctggaatggggaatgaagaatagagatgtggtgcccactaggctactgctgaaagggagctgaaattcctccaccaagttggtattcaaaatatgtaatgactggtatggcaaaagattggactaagacactggccataccactggacag

SEQ ID NO: 14022 - DNA, 500 bp, Homo sapiens
gctccaccgcggtggcggccgaggtaccgtggtgacgtggttcccaaagatgtcaatgctgccattgccaccatcaaaaccaagcgcagcatccagtttgtggattggtgccccactggcttcaaggttggcatcaactaccagcctcccactgtggtgcctggtggagacctggccaaggtaccaaatgaagtgtgaagacaaggccatccaccactttatagagggtgtaaaaataaaccagaaatcaagggagaaagaaaagatgaaagacaaactgcaaaaaattgccaaaatgcgactttctaaaaatggagcagattctgaggctttgcatgtcttggcattccttcaggagctgaatgaaaaaatgcaacaagcagatgaagactctgagaggggtttggagtctggaagcctcatcccttcagcatcaagctggaatggggaatgaagaatggagatggggtgcccactaggctactgctgaaagggagctg

SEQ ID NO: 14023 - DNA, 427 bp, Homo sapiens
gcccgtcaggtactctttgttttggcacacttttcctgacaaacagccagtgttctcaacacataaatactagtccacgttaacaacaatagcatatgagaccgctctccgtaaagatgccagattggatgcaaatggactggaaataccttggagggtttcacaaaaataagacaaagggcaaaggaactttgccaaaggagatggagagcaattctttaaagttagtgggagggaggaagcaaagagctcataaatacaagcctcttaaaatgggacgcatttgcctcgcgcctactgggtgtctgcagctcagcttggtgccccacacaggacaccgactttaagtggctgcctttgcaaggctgagaggccatgagggttgatgcctgaagtgtcagcgccttctagtggaaacatggggcat

SEQ ID NO: 14024 - DNA, 437 bp, Homo sapiens
gctccaccgcggtggcggccgcccgggcaggtaccaaatgaagtgtgaagacaaggccatccaccactttatagagggtgtaaaaataaaccagaaatcaagggagaaagaaaagatgaaagacaaactgcaaaaaattgccaaaatgcgactttctaaaaatggagcagattctgaggctttgcatgtcttggcattccttcaggagctgaatgaaaaaatgcaacaagcagatgaagactctgagaggggtttggagtctggaagcctcatcccttcagcatcaagctggaatggggaatgaagaatagagatgtggtgcccactaggctactgctgaaagggagctgaaattcctccaccaagttggtattcaaaatatgtaatgactggtatggcaaaagattggactaagacactggccataccactggaca

SEQ ID NO: 14025 - DNA, 451 bp, Homo sapiens
tatagggcgaattggagctccaccgcggtggcggccgaggtacaaaattatcatcatttagagttgatttttttcaccagccctgaattttcaaacttgtaatatgctgtttcacaatctttttattaaattacttaatgattccagtctgcaaaatgagcatagactttgctctgttgttatagatcattgaattgggggggaaacatagtaagctaaactatccgtcactgctcatgaaagacccacattgttgattatttttcccagcacagaagaaaagtgacaagtgattcatcctgcaatggcctctgccaatcttttcatatctatgtaaccttttgtagttactgtgtgatttagcgttgggctattgtaaattttggattaattaacaaaacaacaaaaatctatcacctggaatattgaaagaaatttagtaaaacaagat

SEQ ID NO: 14026 - DNA, 367 bp, Homo sapiens
ctatagggcgaattggagctccaccgcggtggcggccgaggtacaaaattatcatcatttagagttgatttttttcaccagccctgaattttcaaacttgtaatatgctgtttcacaatctttttattaaattacttaatgattccagtctgcaaatgagcatagactttgctctgttgttatagatcattgaattgggggggaaacatagtaagctaaactatccgtcactgctcatgaaagacccacattgttgattatttttcccagcacagaagaaaagtgacaagtgattcatcctgcaatggcctttgccaatcttttcatatctatgtaaccttttgtagttactgtgtgatttagcgtt

SEQ ID NO: 14027 - DNA, 397 bp, Homo sapiens
atagggcgaattggagctccaccgcggtggcggccgaggtacatttacacaatattaacactaaaaatctgtgtttttttaaaacaccatagaagtcaaaccacaaaaacccaggatcttgttttaaatgtgtttatgaagactgctgctgagctcaaagcatgcaggtaatcatgaccacctagatgaagctggatgttgaaactccttcatgtccaatgatgtaatttttcactcatcccaagtatctccatacttgtttactttgacttctttttttggcactctttcatgcataggcctgactgaggggtcaagtcttttgtgttaaagatacttcatatgactctctggtcttattccttaattccttatatgtaatattttttcttttagg

SEQ ID NO: 14028 - DNA, 446 bp, Homo sapiens
actactatagggcgaattggagctccaccgcggtggcggccgaggtaccaaatgaagtgtgaagacaaggccatccaccactttatagagggtgtaaaaataaaccagaaatcaagggagaaagaaaagatgaaagacaaactgcaaaaaattgccaaaatgcgactttctaaaaatggagcagattctgaggctttgcatgtcttggcattccttcaggagctgaatgaaaaaatgcaacaagcagatgaagactctgagaggggtttggagtctggaagcctcatcccttcagcatcaagctggaatggggaatgaagaatagagatgtggtgcccactaggctactgctgaaagggagctgaaattcctccaccaagttggtattcaaaatatgtaatgactggtatggcaaaagattggactaagacactggccataccact

SEQ ID NO: 14029 - DNA, 237 bp, Homo sapiens
ggcggccgaggtaccaattgaagtgtgaagacaaggccatccattactttatagagggtgtaaaaataaaccagaaatcaagggagaaagaaaagatgaaagacaaactgcaaaaaattgccaaaatgcgactttctaaaaatggagcagattctgaggctttgcatgtcttggcattccttcaggagctgaatgaaaatatgcaacatgcagatgaagactctgagaggggtttgg

SEQ ID NO: 14030 - DNA, 481 bp, Homo sapiens
gactcactatagggcgaattggagctccaccgcggtggcggccgctcgggcaggtaccattcctctacatccatttggtagcagaacctcaagtgtaagcagtcagtgtagcatgaatatgaactggctcagtttatcacttcctgtttgacctgaagcaccacccagctatgcagaagtggtaacagaggaacaaaggcggaacaatcttgcaccagtgagtgcttgtgatgactttgagagagcccttcaaggaccactgtttgcatatatccaggagtttcgattcttgcctccacctctttattcagagattgatccaaatcctgatcagtcagcagatgatagaccatcctgcccctctcgttgaaggaacacttggttgaatcaagttgatgtgggttccgaactgtatctcttccggctgaggacagagaagtatcttggagacacgtttcagaggaagtgggattacttttgc

SEQ ID NO: 14031 - DNA, 423 bp, Homo sapiens
gctccaccgcggtggcggccgcccgggcaggtacataaaacattattccttccttggcctaaaaactcatcgccacctacattaaagctaatatgcctgattactgtttttagagaacttattttattagggcagttccaagctcaaaaatacgctaactggcaccttgttagctacataaaaatgcaccctagacccgaaacttactagactcattataaaattttctttaaggtgtccacgcagtccctggtcacacttgaagcagtccggagaaatatcagccctaccccagtaatccccagaaggaacttacacttttttttaatcttttcctacaacttcatattttataaataaaaagacaaaaatgtcaggcctgtgagctgaagcttagccattgtaacccctgtgacctgcaca

SEQ ID NO: 14032 - DNA, 547 bp, Homo sapiens
tatacgactactatagggcgaattggagctccaccgcggtggcggccgaggtacatgaaagacacgtccacatcacagttgcccccaaactgcctgtgctcctcgatggtgtctctccctccagaaaacgcatgcttattgaccttggttttgatctgcttggccgtgtcggtgaggaagatggaggagtggtcgctggcactcattttggtctgggcgccctgcagggctgggaagaaggtggagtgcaacagggctggtttaggatagccgatcctgggggcgacgtcccttgtcattctaaagtaaggatcctggtcaatggcacatgggataaggcactggatatccgtcctgtctcggaagatctgtgggaatgagttgctgaaggagggagcagcctggatggcaggaaaactgatcttcccaatgcagtcgctgtcagtgaagccgaaaatgcctttcacttggttgaaggtaacatgcttttgaatcttcaccacatttttgtagaaacctgagctcatccccatgtagtccaggtcag

SEQ ID NO: 14033 - DNA, 339 bp, Homo sapiens
cgcgcgtaatacgactcactatagggcgaattggagctccaccgcggtggcggccgacgtacccggtgcgcagctagatgaggctgagcacagcatcgcaggaaccagactcgtttcaggccagttgcaggcttaccagcccaccgccgtccaaggaaagctcactaccatgagaattgcagtgacttgtttgcctgctaagcatcacctgagccataccagatgctcaggctgattctgtgagatctgcggaaaagcagctttacaacaaatacccaaatgctgtgaccacatggttaaaccctgacccacatcagaagcagagtctgctagccccac

SEQ ID NO: 14034 - DNA, 540 bp, Homo sapiens
atacgactcactatagggcgaattggagctccaccgcggtggcggccgaggacctgcaggcctcctacacctacctctctctgggcttctatttcgaccgcgatgatgtggctctggaaggcgtgagccacttcttccgcgaactggccgaggagaagcgcgagggctacgagcgtctcctgaagatgcaaccagcgtggcggccgctctagaactagtggatcccccgggctgcaggaattcgatatcaagcttatcgataccgtcgacctcgagggggggcccggtacccagcttttgttccctttagtgagggttaattgcgcgcttggcgtaatcatggtcatagctgtttcctgtgtgaaattgttatccgctcacaattccacacaacatacgagccgggagcataaagtgtaaagcctggggtgcctaatgagtgagctaactcacattaattgcgttgcgctcactgcccgctttccagtcgggaaacctgtcgtgccagctgcattaatgaatcggccaacgcgcggggag

SEQ ID NO: 14035 - DNA, 574 bp, Homo sapiens
gcgaattggagttccaccgcggtggcggccgcccggcaggtacaggtaagatatactggagtcacagagcaatatgcattaacaggatacaacagttcataaaaactgagtaactatgcacacaaatttcttaaacagccacctaaagagaaaatgcacagatgtatggtggaaaactgtatctaacactgaaactactacaggactccatcaatgagtccaacttttagtgataaaaaactactgtacactacatgaagaaccatatgtttataattatccaaataaaaatgaagttattaaacttcaagataatatggtaatttgcattgaaccgatgattttacaaaattctgcaaaggtcaaaattttaaaagatggctgaacagtaattgcagcatctaataaaaacgcagctcattacgagcaaacggttttaattaaaaattcaaaaggaataatcctgacaggagaaataaaaaaatagatgtcaaaagaagataaaattattttcaaaggagtagtaactcaagtttttaacacccaagaatacgaagtagagtttgaaaatgga

SEQ ID NO: 14036 - DNA, 605 bp, Homo sapiens
gcgtaatacgactcactatagggcgaattggagctccaccgcggtggcggccgcccgggcaggtaccaaatgaagtgtgaagacaaggccatccaccactttatagagggtgtaaaaataaaccagaaatcaagggagaaagaaaagatgaaagacaaactgcaaaaaattgccaaaatgcgactttctaaaaatggagcagattctgaggctttgcatgtcttggcattccttcaggagctgaatgaaaaaatgcaacaagcagatgaagactctgagaggggtttggagtctggaagcctcatcccttcagcatcaagctggaatggggaatgaagaatagagatgtggtgcccactaggctactgctgaaagggagctgaaattcctccaccaagttggtattcaaaatatgtaatgactggtatggcaaaagattggactaagacactggccataccactggacagggttatgttaacacctgaattgctgggtcttgagagagcccaaggagttctgggagagggaccagattggggggtaggtccacgggcttggtgatagaattatttctcgattgacttcttgagtgcaatttgaac

SEQ ID NO: 14037 - DNA, 590 bp, Homo sapiens
actcactatagggcgaattggagctccaccgcggtggcggccgcccgggcaggtacaagatagtcatctcagtaaaaggtctattatctaacttgccaaacttgttcactgagagccctaaggaactaaaactgccataatgccgtgcacagcttgaaaagcaattagagtaagcaagatagtttttcctcccttccagttcctcagcaggcctggctgaaggcccaggagggaaggaaatataagaaccaacaataaaaatagcaatagcaataagaagaatgccatcccatggagcacaccataattctggaaccacctctcccggatcaggcttccattgctcacgatgctcacgctgggcagccgcaactctactttgcagaacctcaccaacttgtccaggtattctccccggtcttgaagaaatggctctccacctgaaaagttgatcttctccataccagcttccttaagcaaaagcaatcctctctttgctttctcaaggggcagcacaaaggatgttttggctgtgtggaaacagaagccgcatttgtagttgcactggcgagtgaagtgatagttgacgc

SEQ ID NO: 14038 - DNA, 537 bp, Homo sapiens
ctatatggcgaattggagctccaccgcggtggcggccgcccgggcaggtaccaaaattgtaagaagaagcttgggaagctgccacctcagtatgccctggagctcctgacggtctatgcttgggagcgagggagcatgaaaacacatttcaacacagcccagggatttcggacggcttggaattagtcataaactaccagcaactctgcatctactggacaaagtattatgactttaaaaaccccattattgaaaagtacacaggaggcaaagtgtttcacatcatagacttcacttccaactccttggaatgttcatttctttggcttacaggagagactagacaggaaggccaggcaatgcttaggcaactaaaatgaggttgggggtaatgctaacgtcaccctcacagggatggccacggggactgttattcgcaagctggttttctaggcctgttagctggaagcatggtgagcaccatttctggacgctcaagccgtgtcgggctttagtcatctacaccacacaggtacc

SEQ ID NO: 14039 - DNA, 652 bp, Homo sapiens
gcgtaatacgactcactatagggcgaattggagctccaccgcggtggcggccgaggtaccaaatgaagtgtgaagacaaggccatccaccactttatagaggttgtaaaaataaaccagaaatcaagggagaaagaaaagatgaaagacaaactgcaaaaaattgccaaaatgcgactttctaaaaatggacagattctgaggctttgcatgtcttggcattccttcaggagctgaatgaaaaaatgcaacaagcagatgaagactctgagaggggtttggagtctggaagcctcatcccttcagcatcaagctggaatggggaatgaagaatagagatgtggtgcccactaggctactgctgaaagggagctgaaattcctccaccaagttggtattcaaaatatgtaatgactggtatggcaaaagattggactaagacactggccataccactggacagggttatgttaacacctgaattgctgggtcttgagagagcccaaggagttctgggagagggaccagattggggggtaggtccacgggcttggtgatagaattatttctcgattgacttcttgggtgcaatttgaactgtaacatttgcttaatcacctttagtggagtaatctactgggcttggttctata

SEQ ID NO: 14040 - DNA, 551 bp, Homo sapiens
tacgactcactatagggcgaattggagctccaccgcggtggcggccgaggtacataaaacattattccttccttggcctaaaaactcatcgccacctacattaaagctaatatgcctgattactgtttttagagaacttattttattagggcagttccaagctcaaaaatacgctaactgcaccttgtgtacataaaaatgcaccctagacccgaaacttactagactcattataaaattttctttaaggtgtccacgcagtccctggtcacacttgaagcagtccggagaaatatcagccctaccccagtaatccccagaaggaacttacacttttttttaatcttttcctacaacttcatattttataaataaaaagacaaaaatgtcgggcctgtgagctgaagcttagccattgtaacccctgtgacctgcacatatccgtccaggtggcctgcaggagccaagaagtctggagcagccgaaaaaccacaaagaagtgaaacagccagtttctgccttaactaattaacccaccttacgacatttca

SEQ ID NO: 14041 - DNA, 599 bp, Homo sapiens
ggcgaattggagctccaccgcggtggcggccgcccgggcaggtacataaaacattattccttccttggcctaaaaactcatcgccacctacattaaagctaatatgcctgattactgtttttagagaacttattttattagggcagttccaagctcaaaaatacgctaactggcaccttgttagctacataaaaatgcaccctagacccgaaacttactagactcattataaaattttctttaagctgtccacgcagtccctggtcacacttgaagcagtccggagaaatatcagccctaccccagtaatccccagaaggaacttacacttttttttaatcttttcctacaacttcatattttataaataaaaagacaaaaatgtcaggcctgtgagctgaagcttagccattgtaacccctgtgacctgcacatatccgtccaggtggcctgcaggagccaagaagtctggagcagccgaaaaaccacaaagaagtgaaacagccagtttctgccttaactaattaacccaccttacgacattccaccattatgactttgtccaccattatgacttgttcctgccctgccccaactga

SEQ ID NO: 14042 - DNA, 611 bp, Homo sapiens
tacgactcactatagggcgaattggagctccaccgcggtggcggccgcccgggcaggtaccaaatgaagtgtgaagacaaggccatccaccactttatagagggtgtaaaaataaaccagaaatcaagggagaaagaaaagatgaaagacaaactgcaaaaaattgccaaaatgcgactttctaaaaatgacagattctgaggctttgcatgtcttggcattccttcaggagctgaatgaaaaaatgcaacaagcagatgaagactctgagaggggtttggagtctggaagcctcatcccttcagcatcaagctggaatggggaatgaagaatagagatgtggtgcccactaggctactgctgaaagggagctgaaattcctccaccaagttggtattcaaaatatgtaatgactggtatggcaaaagattggactaagacactggccataccactggacagggttatgttaacacctgaattgctgggtcttgagagagcccaaggagttctgggagagggaccagattggggggtaggtccacgggcttggtgatagaattatttctcgattgacttcttgagtgcaatttgaactgtaacatttgctt

SEQ ID NO: 14043 - DNA, 528 bp, Homo sapiens
gcgcgtaatacgactcactatagggcgaattggagctccaccgcggtggcggccgaggtaccgctgtgtccgggtgggtggtcagaatgccgtgctccaggtgttcacagctgcttcgtggaagaccatgtgctccgatgactggaagggtcactacgcaaatgttgcctgtgcccaactgggtttcccaagctatgtggttcagataacctcagagtgagctcgctggaggggcagttccgggaggagtttgtgtccatcgatcacctcttgccagatgacaaggtgactgcattacaccactcagtatatgtgagggagggatgtgcctctggccacgtggttaccttgcagtgcacagcctgtggtcatagaaggggctacagctcacgcatcgtgggtggaaacatgtccttgctctcgcagtggccctggcaggccagccttcagttccagggctaccacctgtgcgggggctctgtcatcacgcccctgtggatcgtcactgctgcacactgtgtttatgac

SEQ ID NO: 14044 - DNA, 606 bp, Homo sapiens
gcgcgcgtaatacgcgtaatacgactcactatagggcgaattggagctccaccgcggtggcggccgaggtacctgtgaagacagctacacctggtttcctccctcatgccttgatccccagaactgctaccttcacacggctggagcactcccaagctgtgaatgtcatctcaacaacctcagccagagtgtcaatttctgtgagagaacaaagatttggggcactttcaaaattaatgaaaggtttacaaatgaccttttgaattcatcttctgctatatactccaaatatgcaaatggaattgaaattcaacttaaaaaagcatatgaaagaattcaaggttttgagtcggttcaggtcacccaatttcgaaatggaagcatcgttgctgggtatgaagttgttggctccagcagtgcatctgaactgctgtcagccattgaacatgttgccgagaaggctaagacagcccttcacaagctgtttccattagaagacggctctttcagagtgttcggaaaagcccagtgtaatgacattgtctttggatttgggtccaaggatgatgaatataccctgccctgcagcagtggctacaggggaaa

SEQ ID NO: 14045 - DNA, 426 bp, Homo sapiens
  misc_feature 253: n = A,T,C or G
gcgtaatacgactcactatagggcgaattggagctccaccgcggtggcggccgaggtacaggagcaaccttctttccaccattactgggaattccaccactatttgctcccccagcccagaatcatgattcttcttcattccattcaaggacttcgggaaaaagtaatcgaaatggtcccgaaaaagggtaaatgggtcaataaatggaagtaatacatcatctgtaattggtatcaacacatctgtactttntttttttttttttttttatctaaaagcaacataattatttttcttgcgattttttcaagaactctttttaattgtctaacacctgattctagtgtatagcttctgattataaattcaattgttttgttgttgattttaaaatgttttttatctaataggttttcagaaattac

SEQ ID NO: 14046 - DNA, 489 bp, Homo sapiens
gactactatagggcgaattggagctccaccgcggtggcggccgcccggcaggtaccaaatgaagtgtgaagacaaggccatccaccactttatagagggtgtaaaaataaaccagaaatcaagggagaaagaaaagatgaaagacaaactgcaaaaaattgccaaaatgcgactttctaaaaatgacagattctgaggctttgcatgtcttggcattccttcaggagctgaatgaaaaaatgcaacaagcagatgaagactctgagaggggtttggagtctggaagcctcatcccttcagcatcaagctggaatggggaatgaagaatagagatgtggtgcccactaggctactgctgaaagggagctgaaattcctccaccaagttggtattcaaaatatgtaatgactggtatggcaaaagattggactaagacactggccataccactggacagggttatgttaacacctgaattgctgggtcttg

SEQ ID NO: 14047 - DNA, 549 bp, Homo sapiens
  misc_feature 204, 211, 212, 225, 226, 245, 246, 322, 332: n = A,T,C or G
cgcgcgtaatacgactcactatagggcgaattggagctccaccgcggtggcggccgcccgggcaggtaccaaatgaagtgtgaagacaaggccatccaccactttatagagggtgtaaaaataaaccagaaatcaagggagaaagaaaagatgaaagacaaactgcaaaaaattgccaaaatgcgactttctaaaaatggagcnagattcnntgaggctttgcanntgtcttggcattccttcannggagctgaatgaaaaaatgcaacaaggcagatgaagaactctgagaaaggggtttggagggtctggaagcctcatncccttcagcnatcaagctggaatggggaatgaagaatagagatgtggtgcccactaggctactgctgaaagggagctgaaattcctccaccaagttggtattcaaaatatgtaatgactggtatggcaaaagattggactaagacactggccataccactggacagggttatgttaacacctgaattgctgggtcttgagagagcccaaggagttctgggagaggga

SEQ ID NO: 14048 - DNA, 552 bp, Homo sapiens
  misc_feature 201, 225, 230, 231, 261: n = A,T,C or G
gcgtaatacgactcactatagggcgaattggagctccaccgcggtggcggccgcccgggcaggtaccaaatgaagtgtgaagacaaggccatccaccactttatagagggtgtaaaaataaaccagaaatcaagggagaaagaaaagatgaaagacaaactgcaaaaaattgccaaaatgcgactttctaaaaatggagcnagattctgaggctttgcatgtctntggcnnattccttcaggagctgaatgaaaaaatgcnaacaagcagatgaagaactctgagaggggtttggagtctggaagcctcatcccttcagcatcaagctggaatggggaatgaagaatagagatgtggtgcccactaggctactgctgaaagggagctgaaattcctccaccaagttggtattcaaaatatgtaatgactggtatggcaaaagattggactaagacactggccataccactggacagggttatgttaacacctgaattgctgggtcttgagagagcccaaggagttctgggagagggaccagattggggggta

SEQ ID NO: 14049 - DNA, 513 bp, Homo sapiens
ctcactatagggcgaattggagctccaccgaggtggcggccgaccgccaggtaccaaatgaagtgtgaagacaaggccatccaccactttatagagggtgtaaaaataaaccagaaatcaagggagaaagaaaagatgaaagacaaactgcaaaaaattgccaaaatgcgactttctaaaaaggaagattctgaggctttgcatgtcttggcattccttcaggagctgaatgaaaaaatgcaacacgcagatgaagactctgagaggggtttggagtctggaagcctcatcccttcagcatcaagctggaatggggaatgaagaatagagatgtggtgcccactaggctactgctgaaagggagctgaaattcctccaccaagttggtattcaaaatatgttatgactggtatggcaaaagattggactaagacactggccataccactggacagggttatgttaacacctgaattgctgggtcttgagagagcccaaggagttctgggagag

SEQ ID NO: 14050 - DNA, 487 bp, Homo sapiens
ggcgaattggagctccaccgcggtggcggccgaggtacagtatggcttaaaaggctctgccttagattctagaatccagaacattttctccaaagacaatcagggtatgggggagaagttagttccagagaagagagcgagtccagggtagaagggattcttctctcctgagggtctatggtctcccattttttaaagcagcagtggtatctatcccactcatggcctagaggttgcacagagctgtctggcacccgcttctttggcttttctctcctgacacccagcaatgcttactcagagcgttgaaggcggccagcacctcgaaagagattctctgattttttgtgaacacctggatggtgaacccatcaagggacttctggatctcgaaattgtttttcaaccacttcgtgaacagacagaacttcagcttatccccagttttatcgaggatgtcacgttggcttctcttctgatcctggaa

SEQ ID NO: 14051 - DNA, 418 bp, Homo sapiens
tacgactcactatagggcgaattggagctccaccgcggtggcggccgcccgggcaggtaccaaatgaagtgtgaagacaaggccatccaccactttatagagggtgtaaaaataaaccagaaatcaagggagaaagaaaagatgaaagacaaactgcaaaaaattgccaaaatgcgactttctaaaaatggagcagattctgaggctttgcatgtcttggcattccttcaggagctgaatgaaaaaatgcaacaagcagatgaagactctgagaggggtttggagtctggaagcctcatcccttcagcatcaagctggaatggggaatgaagaatagagatgtggtgcccactaggctactgctgaaagggagctgaaattcctccaccaagttggtattcaaaatatgtaatgactg

SEQ ID NO: 14052 - DNA, 426 bp, Homo sapiens
agcgcgcgtaatacgactcactatagggcgaattggagctccaccgcggtggcggccgcccgggcaggtactaccatgccgggccaattttttttttgtttgtagaaatgaggtcttgctatgttgcccaggctggtctcaaactcctggtctcaagcgatccccccgcctcagcctcccgaagtgctgggataaaaggcgtgaaccaccatacccagccagtattatcttttcatttcattttccagttgagtatattattggctacatttgcataccgcacaattgttcattttttaaaaaccaatattttgttttgttctgttgtctacaataaggagaattcagatgataaacttacaaccaatcatggccaagtccacttgaggaattgtctctgtagatttatctgtagactccctaata

SEQ ID NO: 14053 - DNA, 423 bp, Homo sapiens
gcgtaatacgactcactatagggcgaattggagctccaccgcggtggcggccgaggtaccaaatgaagtgtgaagacaaggccatccaccactttatagagagtgtaaaaataaaccagaaatcaagggagaaagaaaagatgaaagacaaactgcaaaaaattgccaaaatgcgactttctaaaaatggagcagattctgaggctttgcatgtcttggcattccttcaggagctgaatgaaaaaatgcaacaagcagatgaagactctgagaggggtttggagtctggaagcctcatcccttcagcatcaagctggaatggggaatgaagaatagagatgtggtgcccactaggctactgctgaaagggagctgaaattcctccaccaagttggtattcaaaatatgtaatgactggtatgg

SEQ ID NO: 14054 - DNA, 566 bp, Homo sapiens
taatacgactcactatagggcgaattggagctccaccgcggtggcggccgaggtattcgacccacgcgcccgtagtttttatctttgaccaaccgaacatgaccaaaaaccaaaagtgcattcaaccttaccaaaaaaaaaaaaaaaaaaaagtgcggccgctctagaactagtggatcccccgggctgcaggaattcgatatcaagcttatcgataccgtcgacctcgagggggggcccggtacccagcttttgttccctttagtgagggttaattgcgcgcttggcgtaatcatggacatagctgtttcctgtgtgaaattgttatccgctcacaattccacacaacatacgagccgggagcataaagtgtaaagcctggggtgcctaatgagtgagctaactcacattaattgcgttgcgctcactgcccgctttccagtcgggaaacctgtcgtgccagctgcattaatgaatcggccaacgcgcggggagaggcggtttgcgtattgggcgctcttccgctttctcgctcactgactcgctgcgctcggtcgttcggctgc

SEQ ID NO: 14055 - DNA, 580 bp, Homo sapiens
  misc_feature 512: n = A,T,C or G
cgactcctatagggcgaattggagctccaccgcggtggcggccgaggtgttagttaccacttcattactggagggcactgtcacaaacttctgactatccagacttgaagctggaagcaaatacaagtctgaggggctctaagctgggaggttctggcctctccctagctctctatggctctacctctctgcttgaagctccctgcactgcactcccattactctgactggggataggaccactgctgacagggccccacctcaacttctttcattgccctcttccaggaaatcccaccctgggatacttcaaagacctcatatgctacaaagatcaaggccacctaatgagtgctctagagatcagcaccaaagatgcttgccagagtcttctctatatgtcctccctcctgtatcaaataagtcaccaagtatagctgactatctccataacatctctccagttgtggccttagttccagccttcatcactctgcattctgaggagctgntatctgtctcctgctgccagcccctcacccccagtcggtctccaacatacttttttttttttttttcg

SEQ ID NO: 14056 - DNA, 564 bp, Homo sapiens
gcgcgtaatacgactcactatagggcgaattggagctccaccgcggtggcggccgcacttttttttttttttttaagctgctccttgaggataagggctaactcacaggcagtgcaccaagagccactataaaaagatccttaatgagcaaaatatatcccctattattttcctacaagttgctttttacttgagtaggaacccttgattgatttttgcggacgcgtgggtcgaagcttgacctcggccgctctagaactagtggatcccccgggctgcaggaattcgatatcaagcttatcgataccgtcgacctcgagggggggcccggtacccagcttttgttccctttagtgagggttaattgcgcgcttggcgtaatcatggtcatagctgtttcctgtgtgaaattgttatccgctcacaattccacacaacatacgagccgggagcataaagtgtaaagcctggggtgcctaatgagtgagctaactcacattaattgcgttgcgctcactgcccgctttccagtcgggaaacctgtcgtgccagctgcattaatga

SEQ ID NO: 14057 - DNA, 524 bp, Homo sapiens
agggcgaattggagctccaccgcggtggcggccgaggtcggccgcacttttttttttttttttttttttttttgccttcaacaaaaaaggaatttattggctcacataagtgaaagctgagaaatagatctcaattcaggtccaatttgatccagaagttcccaagggctccaatagactccctctcaccctggtacctgcccgggcggccggccgcccgggcaggtgtcaagcttcgacccacgcgtccgtcttagcctacaagggggctcttatgtacatagttgttaatacatccaattaatgatgtctgacatgctatttttgtagggagaaaatatgtgctaatgatattttgagttaaaatatcttttggggaggatttgctgaaaagttgcacttttgttacaatgcttatgcttggtacaagcttatgctgtcttaaattattttaaaaaaataaatactgtctgtgagaaaccagttggtttagaaaagtttagtatgtgacgataaactagaaa

SEQ ID NO: 14058 - DNA, 307 bp, Homo sapiens
tatagggcgaattggagctccaccgcggtggcggccgaggtcaagcttcgacccacgcgtccgcaagacccaagagagctgatggtgcagttccagtctcacagaagtctgctggagaatttcctctggattggagaaggtggtcttttcattctactcaggtcttctattgattggataaagggcacatacatcatggagggcaatcttttttactcagaggacatcagtgccaatgttattcccattcagaaacaccttccaagttgacacattaaattaacaatacacttttccttatctcacc

SEQ ID NO: 14059 - DNA, 545 bp, Homo sapiens
ggcgaattggagctccaccgcggtggcggccgcccgggcaggtcgcacttttttttttttttttttttacctagcccatgttaccaatctaaatgaactgtctatgcatagaaaactgctttatgcctaagataattactgggatttaagaaagtgagaaaaaagaataggtgggattgagaaattaggtaaaaacagaagaggccaactaaacccaagtgctgcccttcaagggctctagtaaccggacgcgtgggtcgaagcttgacctcggccgctctagaactagtggatcccccgggctgcaggaattcgatatcaagcttatcgataccgtcgacctcgagggggggcccggtacccagcttttgttccctttagtgagggttaattgcgcgcttggcgtaatcatggtcatagctgtttcctgtgtgaaattgttatccgctcacaattccacacaacatacgagccgggagcataaagtgtaaagcctggggtgcctaatgagtgagctaactcacattaattgcgttgcgctcact

SEQ ID NO: 14060 - DNA, 514 bp, Homo sapiens
gggcgaattggagctccaccgcggtggcggccgaggtactttaatcccgtcttacagaagagaaaactgagatttagcaacataaaagtatttcccgtaagtaaacagtagagccaagatcttgacctacgccatctgatacctgagcccatgctataaaagaggagcattagaaatatttgaaagatagaaatgagaactagtcaatatttattttgcttagcactgtattcagtattatggcatcttaaagtagttaagactcaatatttcatcaaaaaagtttaaaatctaatcagagaatcggccgctctagaactagtggatcccccgggctgcaggaattcgatatcaagcttatcgataccgtcgacctcgagggggggcccggtacccagcttttgttccctttagtgagggttaattgcgcgcttggcgtaatcatggtcatagctgtttcctgtgtgaaattgttatccgctcacaattgcacacaacatacgagccgggagca

SEQ ID NO: 14061 - DNA, 487 bp, Homo sapiens
ggcgaattggagctccaccgcggtggcggccgaggtcaagcttcgacccacgcgtccggccacattttcaatttagccatttttctcttattcacctttttctgctaattactctgtaattccactaagaaaagtcaatagataattccaataatgacttcactcctgagaattttattagctgctaacgcttgtctcatcataagcactcatatgttcattgagtaaatatttattgagtatttgctatggtccaggcactgtgctaagtattgaggataaaatggtgattgaaacattttcccttcttgattttaacatctacaaaataaaaagtatgttaatatcaaaaaaaaaaaaaaaaaaaaaaaaaaggtgcggccgctctagaactagtggatcccccgggctgcaggaattcgatatcaagcttatcgataccgtcgacctcgagggggggcccggtacccagcttttgttcctttta

SEQ ID NO: 14062 - DNA, 532 bp, Homo sapiens
ctatagggcgaattggagctccaccgcggtggcggccgaggtaccaaaagcctcactcacaattatttttgagatagctcccaatgagtttaatcactgctatgccaggtgtgtgaggctgctgtgggacaacaatcttgattcctagaagagtcataaatttctagggactacaggctcctgccaccatgcctggctaatttttgtagagatggggtttcaccatgttgcccaagctggtcttgaacttctgagctcaagcgatccacctgcctcagcctcccaaagtgctgggattacaggtgtgggccatcacgcttgccctagagtaatattctctattatcaaggtagaaagttcaacatatattcattagatctactttatagatactgttactcagatcacttatatcgttatatgtattttttgtcttcttaacttcagtcttggatgagagagaggtgttttaaatttctctgttatttctaggtttctattcatttttccttgcataatttgttatgcaaat

SEQ ID NO: 14063 - DNA, 547 bp, Homo sapiens
gggcgaattggagctccaccgcggtggcggccgaggtacttagatgacaacatcaaaacatactctgatcaccccgagaaagtaaacaaagatgatgaggaattcatagaaagcaataaaatgcatgctattaatggaagaatgtttggaaacctacaaggcctcacaatgcacgtgggagatgaagtcaactggtatctgatgggaatgggcaatgaaatagacttacacactgtacctgcccgggcggccggccgcccgggcaggtccgggcaggtgctgtgagtgctctggcgaagtttggagcccagaatgaagagatgttacccagtatcttggtgttgctgaagaggtgtgtgatggatgatgacaatgaagtaagggaccgagccaccttctacctaaatgtcctggagcagaagcagaaggcccttaatgcaggctatatcctaaatggtctgactgtgtccatccctggtctggagagggctctgcagcaatacctcggccgctctaaactagtggatcccccgggctgcaggaattc

SEQ ID NO: 14064 - DNA, 509 bp, Homo sapiens
ctatagggcgaattggagctccaccgcggtggcggccgaggtcttcgacccacgcgtccgcagatcagacgtggcgacccgctgaatttaagcatattagtcagcggaggaaaagaaactctgaatccgaccagtgtaggtgattacattagcctttgaagtcaacacaaagtttaaaacacctgcccgggcggccggccgcccgggcaggtgtacaagcttcgacccacgcgtccggctgaagacatccctagggcaggtagcagaatacctaattcaacctagagaggcacaggctgcacgagagtctctcagataaagccccattgaaaataaatttacaatctaaaatttaaaaacccgttaaaaaagcagcacagcatgaggagtcagtagatacactgaaagcaagattagatcttcaagactttcaaactataaaatttagaaaattataataaattatgaaatagaggccctttcatgtcaaaaagtcatgaaagaaagaa

SEQ ID NO: 14065 - DNA, 588 bp, Homo sapiens
  misc_feature 511: n = A,T,C or G
agggcgaattggagctccaccgcggtggcggccgaggtcttcgacccacgcgtccgcgaaaagatgaggcaacaagtaagagaaaacagcattgagcttagagaattggagaagaaattaaaagcagcttacatgaataaagaaagggcagctcagattgctgaaaaggatgccattaaatatgaacaaatgaaacgtgatgctgaaatagccaaaaccatgatggaagaacacaagagaataataaaggaagagaatgctgcagaagacaaacgaaacaaagcgaaagcacagtacctgcccgggcggccgctctagaactagtggatcccccgggctgcaggaattcgatatcaagcttatcgataccgtcgacctcgagggggggcccggtacccagcttttgttccctttagtgagggttaattgcgcgcttggcgtaatcatggtcatagctgtttcctgtgtgaaattgttatccgctcacaattccacacaacatacgagccgngagcataaagtgtaaagcctggggtgcctaatgagtgagctaactcacattaattgcgttgcgctcactgcccgctt

SEQ ID NO: 14066 - DNA, 537 bp, Homo sapiens
actacttagggcgaattggagctccaccgcggtggcggccgcccgggcaggtacagcgtgcatagggactcttgccttaaggagtgtaaacttgatctgcatttgctgatttgtttttaaaaaaacaagaaatgcatgtttcaaataaaattctctattgtaaataaaattttttctttggatcttggcaaaaaaaaaaaaaaaaaaaagtgcggccggccgcccgggcaggtacacttgttgataagagttttctgaaaacagtctatcaaatataaagaatggtttctatccaagaatcagcagtgagggaagaaatactaaacacctgtcaagaaatcagttattcattttaaaaaataacagaaccagtgctgctctctgtcataaaaaagaacatgtaaaatttatttttataggctttggtaacattatattccccacagaggccttcaatcctacttaaagatattttacacacggtaaccatcaagtttactgagtaaaaatctcaggtattaaccatgcccctaaaat

SEQ ID NO: 14067 - DNA, 510 bp, Homo sapiens
actatagggcgaattggagctccaccgcggtggcggccgaggtcaagcttcgacccacgcgtccggttactagagcccttgaagggcagcacttgggtttagttggcctcttctgtttttacctaatttctcaatcccacctattcttttttctcactttcttaaatcccagtaattatcttaggcataaagcagttttctatgcatagacagttcatttagattggtaacatgggctaggtaaaaaaaaaaaaaaaaaaaaaagtgcgacctgcccgggcggccggccgctcgtgatctagatccccgacctcggccgctctagaactagtggatcccccgggctgcaggaattcgatatcaagcttatcgataccgtcgacctcgagggggggcccggtacccagcttttgttccctttagtgagggttaattgcgcgcttggcgtaatcatggtcatagctgtttcctgtgtgaaattgttatccgctcacaattccacacaacata

SEQ ID NO: 14068 - DNA, 500 bp, Homo sapiens
gctgaatcggagctccaccgcggtggcggccgaggtcaagcttcgacccacgcgtccggtttgggtggaattataatattttagataagatttaagaggattctaattctagctacttgataggaatgcgaatgatgataaggcttttagagttagataagagagagggctagcaccctgatattctgtaattgaaacagagtttcaagtcctttggtcaagtattacccttattccttcaggaatagtagatattttaagattacagataggttatcttatctaatttacctacctattgttgaaattatttaatttgcatttaactgtgttttcacacctgcccgggcggccctcttacctgcttctgaccttatgctcaagaactcccctaactctggccagagctcagctttggcaactctgaccgttgagcagctctcatcccgggtttcctttacgtctctttctgatgacaccagcacagcgggctccatgga

SEQ ID NO: 14069 - DNA, 523 bp, Homo sapiens
agggcgaattggagctccaccgcggtggcggccgcacttttttttttttttttttttaagctgctccttgaggataagggctaactcacaggcagtgcaccaagagccactataaaaagatccttaatgagcaaaatatatcccctattattttcctacaagttgctttttacttgagtaggaacccttgattgatttttgcggacgcgtgggtcgaagcttgacctcggccgctctagaactagtggatcccccgggctgcaggaattcgatatcaagcttatcgataccgtcgacctcgagggggggcccggtacccagcttttgttccctttagtgagggttaattgcgcgcttggcgtaatcatggtcatagctgtttcctgtgtgaaattgttatccgctcacaattccacacaacatacgagccgggagcataaagtgtaaagcctggggtgcctaatgagtgagctaactcacattaattgcgttgcgctcactgcccgctttccagtcgggaaac

SEQ ID NO: 14070 - DNA, 478 bp, Homo sapiens
agggcgaattggagctccaccgcggtggcggccgaggtcaagcttcgacccacgcgtccggtttgtttttttcttacggcaactcaaagcaaagagctggaggagccagccattatgattgcttactctcatcgcttagcgccccaggtgggatgtgtttccaaaacacatttttgtatttataaggaaatgtagttaggattaattttattgtcctaattagaactcacattttggttaaatcctcaatttcattaaaaaaaaaaaaaaaaaaagtgcggccggccgcccgggcaggtacaatttaatttttctgcttgcccaagaaacaaagcttctgtggaaccatggaagaagatgaaaatgagactggcaaagaacaaatgctgaatctgaagaagatttgggcaaataatctgcatacttttaattgggaataagatggaaaatatgaatgcttaatcaaattttttaaaaa

SEQ ID NO: 14071 - DNA, 509 bp, Homo sapiens
ctatagggcgaattggagctccaccgcggtggcggccgaggtacaagcttcgacccacgcgtccgctcacttcatcctcccagcaacctattatgatccattgccacaccaacttgctgatgaggaaagtggggcttaaggaaattaaagagctgttgtgggacttccaaagcagaagacagtaggctttcagaaatttgataaaaatagcactttgcatttcttgaatcttgagctaaatggaaattaatactaaacattctccactggtaaaatagagaataaggatattaacagtaaaagaaaagaagaagaaaaggaaatgtgcttccacagatttagaaacataagtaacaatctaagttaaggctttggcacctgcccgggcggccggccgcccgggcaggttcaaagactaccaaagtatgtatttgattttcacatgcaaacaacttaaaaccttataaatctcatgtcaactctgcatgatgccttgaaaggaatgacat

SEQ ID NO: 14072 - DNA, 584 bp, Homo sapiens
agggcgaattggagctccaccgcggtggcggccgaggtcaagcttcgacccacgcgtccgcagaaaccttgccatcattcttactgctggtttgcatctcatttatggtgtatctgggatttcttctcatgaacagaaagattcagtggctgttatatgccttgtcaatttaatgtattgccctatcctctttttgatcaaagatagagactaagactgggaattatgacagaaaaagtcatatttttctttaaatgattttgaaatgttaaaataggccaatatgagtcaaagtgcaaattttttggtgacctgcccgggcggccggccgcccgggcaggtactaagcatttcagttccaggagaataaaagaaattcctatttgaaatgaattcctcatttggaggaaaaaaagcatgcattctagcacaacaagatgaaattatggaataccaaagtggctccttcccatgtgcagtccctgtcccccgccgccagtcctccacacccaaactgtttctgattggcttttagctttttggtgttttttttttttttccttctaacacttgtatttggaggc

SEQ ID NO: 14073 - DNA, 477 bp, Homo sapiens
ctatagggcgaattggagctccaccgcggtggcggccgcccgggcaggtgcctaatatatttactctctggtcctttacaggaaaagtttgccaacctctggcttagatgatcacctgaggccaaggagcctcgcccttgagcacaagactatgtagtcagtaaagcacaaacaaaattggggctttccctagcaaggttggaaaggcggagaagaaatggatttggataggtagtcaacaatgtctgttttatgttaccacacattttctcgagaaatttcaatcagctctctgagaacagattcatctttaaatgaatgttcataggtaacagcaactcatgcatcaatgttgcaaagtgagctcattttcacattgcttcaggttaggcagaaggtttggtaaagggattaacgtaattgtttccttgttgtttacaaaaagaagtcccagttggcatgccacataaaatcttc

SEQ ID NO: 14074 - DNA, 504 bp, Homo sapiens
tatagggcgaattggagctccaccgcggtggcggccgaggtcacgcgtccgcagaggcccaggctcccaaaccgacaaagtgaaaagagaccagagaggccaagcatattgactggtgctgttcagggcctgctcttttccactcaccacttgttttgctgcttgtcacgaggagagttgttcctgtatgtggctgctctcagatctttccaagcaagccagtcatttgaagaggttttcttttcatgctggagggcaggctaagatcaatgagtggaagagagaaaggctgttttagctcaagttaaaggaacaccttctagccatcaaagccgcccaacagaggcaagggccaccacacatgagagagcgctctgtccttaaagggaattctctgttgagtgggaggtgaacaccctggttcttccaactcaagaattctcgtggctgggctgggtcagtgatggctttgtctctttatgtctaaagtgccctatggctgct

SEQ ID NO: 14075 - DNA, 478 bp, Homo sapiens
gcgaattggagctccaccgcggtggcggccgcccgggcaggtaccaaaataattaccaacactacattatgtacaccatttacaggagggtaacacaaaccttgacaggtagtaacttttcaccccacatcactgaacgcttaacactcctggctgttaattgtcagttcagtgttttaatctgacgcaggcttatgcggaggagaatgttttcatgttacttatactaacattagttcttctatagggtgatagcggacgcgtgggtcgaagcttgacctcggccgctctagaactagtggatcccccgggctgcaggaattcgatatcaagcttatcgataccgtcgacctcgagggggggcccggtacccagcttttgttccctttagtgagggttaattgcgcgcttggcgtaatcatggtcatagctgtttcctgtgtgaaattgttatccgctcacaattccacacaacata

SEQ ID NO: 14076 - DNA, 506 bp, Homo sapiens
agggcgaattggagctccaccgcggtggcggccgaggtacatctgtagcctatgacttgagtctcttgaacttctaggaagaggcaaactacaaactactaggattctgatttcagatataggcattccagaatcttctctttacgagttcacctgctagtataatctccacaacttgaatggccttggttgttctgtaattgctgccaaaatcatcacaagctgtacctgcccgggcggccggccgcccgggcaggtcaagcttcgacccacgcgtccggatgggaattcaggtatgaaagaaaacaggcaaggaggcactgagggagaaagacacagactttatcgctctgtggctcattgttactggaatattctaaaactcttgttcacatgctattatgacttataaagcagcaacagctgaggcgcaccaggacacagcttccatttctttaacgtctgttcccttaacatcgctgaaatgatttactgttgaagagatg

SEQ ID NO: 14077 - DNA, 497 bp, Homo sapiens
agggcgaattggagctccaccgcggtggcggccgaggtcaagcttcgacccacgcgtccgaaaaatgggagacaatttcacatggactttggaaaatatttttttcctttgcattcatctctcaaacttagtttttatctttgaccaaccgaacatgaccaaaaaccaaaagtgcattcaaccttaccaaaaaaaaaaaaaaaaaaagacctgcccgggcggccggccgcccgggcaggtacaagctcgacccacgcgtccgaaataataaagctagaagtaatatttttccttttgtctattttccaaattgactcgatattgatggctacttttgtaagtttttatttaagtttaaagggaatatttattgatcacctctatgtgctcagtacctcggccgctctagaactagtggatcccccgggctgcaggaattcgatatcaagcttatcgataccgtcgacctcgagggggggcccggtacccagcttttg

SEQ ID NO: 14078 - DNA, 506 bp, Homo sapiens
agggcgaattggagctccaccgcggtggcggccgaggtgcttcgacccacgcgtccgcttggggatttcgaggaagggttcataagggagattttagctgagaaataccatttgcacagtcaatcacttctgaccaagttatcagaaaaaggagaaaagaatgtctccccactaaatgttctagggtggtgagaaatctagggtggttatctaaatcaacaatatttagatattccaatatctaaatattgttggaaatactctcctgaagtgttcattgaactctaagagagacagcttgtgtatcagtggcagggtttaaggttcattttttattcccatattaatcctttaatatttagacaaatttccttctgagtttaaggataaaatgggatgggttctgcctgggcctggccctcatggggacatcaaagggcaatgttgcaaaaaaaaaaacctgcccgggcggccggccgcccgggcaggacaggctgctttggttt

SEQ ID NO: 14079 - DNA, 499 bp, Homo sapiens
ctatagggcgaattggagctccaccgcggtggcggccgaggtcaagcttcgacccacgcgtccgtgaacttttatcaaggcttttgctcttttagacttgagtttatctttataattaaggagaatggtttttaaaatttagttcctctgacaccccaaaattatcaaaataaattatgttgtagtgaatctgtgttttgaaagtcattgataggacttatatgagtcaaaattttatggattataaactaggctttatctggttggaaataattgcaatacaagaagcaactttattaaattagacctaaagtcacaatcttcttctttgctgctttttaaaaattacctattacctttaaaagatcccaaatttagaagaggaattaaaataaaagttaatgcaataaaacacttccacaatattctattacttcaacctctaatcaatgaaaacattaatggactactcttactacccctgtagggatgtgtttgg

SEQ ID NO: 14080 - DNA, 513 bp, Homo sapiens
gcgaattggagctccaccgcggtggcggccgaggtaccctaaaatttaaagtataataataataaatttttttttaaaaaaagagtgttgtctttgtcttgtattttctgcagtttgcatgtgatattcttaggtatagattttttttagtatttgtcctgtatattgttattcgagcttctgggatctgtgttttggtgtctatcattaactttggaatattctcagtcattactgcttcaaacattcattctgttgctttttctcttctggtattatcattacacatatatcacaccttttgtaattctcccacagttcatagatattctgttgtatttatttattttttctctttgccttttagttttagagatttctattgacatcacttaaagatgattgatgagttgatgagaattgagagaattgatgagaattgttgatgagaattattcatttgtgttagtgtttttcatttctgccattgtcttttgatttttagagcttcca

SEQ ID NO: 14081 - DNA, 561 bp, Homo sapiens
agggcgaattggagctccaccgcggtggcggccgcccgggcaggtttcctgcatttctaatgaagaaataggctggtcctcaattttgcagaagttgtatcatcataggtcatacctaacattcgtttgtcaagagcaaaaaaacccccttgggttctctggatctcacacagcccacaaaccttcagaatgtggttccttcccgcaggctttgtcacacttaagatccaagaacaaatcagcctggctttaacatggggtagatggcaagaaggataatgcggacgcgtgggtcgaaacttgacctcggccgctctagaactagtggatcccccgggctgcaggaattcgatatcaagcttatcgataccgtcgacctcgagggggggcccggtacccagcttttgttccctttagtgagggttaattgcgcgcttggcgtaatcatggtcatagctgtttcctgtgtgaaattgttatccgctcacaattccacacaacatacgagccgggagcataaagtgtaaagcctggggtgcctaatgagtgagctaactcaca

SEQ ID NO: 14082 - DNA, 521 bp, Homo sapiens
actatagggcgaattggagctccaccgcggtggcggccgaggtagcggtcgcactttttttttttttttttttttaaatagagatgaggttttgctatgttgcccaggctggtctcctggactcaagcaatctcccacttcaggctaccaaagtgctgggatttacaggcatgagccacctctcccagtctcagttattattttaataaatgagactgaacgtcctcttataaggctcactcccttgttcctactacatttgctctgtttaagtatctctttaaattcttcagttaagcggacgcgtgggtcgaagacctgcccgggcggccggccgcccgggcaggtattaacaggtgcttgcagtttgttgacttttttgaaaaaatcaagttgtaaacttttattacaaattaaaaatgaagttcttaaaaatctcaacttgaccagatatgaaacaatttaaaaacctttaaggcgtattgagaaaaaccaggcttttttaaaaaacacgtttgttc

SEQ ID NO: 14083 - DNA, 568 bp, Homo sapiens
agggcgaattggagctccaccgcggtggcggccgctcacctgcccgggcggacgctcgaggccgctcacctgcccgggcggccggccgcacttttttttttttttttttttgcgaaacaaaacatgcttagcatgcacacttttaccacttttttcgagtggaaagtttattggcaatattaaatttcaccctagataggatatgagaatgttttgataaatcacaatttatagtatattaatgccatgtgagaattttgtttcccaagtaagagctcacatggaacttggtcattaaaccttaaagaaacctttctcacatatctataggcctcaaattgaaataatctataaatgaatttgtagatttctttttagtttaattcctgagtatacagggcaaaagcttatatcctttatataaacttctgctttggtctaaaactgatatatcttcacgttgaggtttcatctgaaatgcaccacgtttgctgacttgcttcaatatgaatttgtatggctataaaattgacctcggccgctctagaactagtggatcccccgggct

SEQ ID NO: 14084 - DNA, 573 bp, Homo sapiens
agggcgaattggagctccaccgcggtggcggccgcccgggcggccgctcgaggccgcacttttttttttttttttttttggtaaacaggcggggtaagatttgccgagttccttttactttttttaacctttccttatgagcatgcctgtgttgggttgacagtgagggtaataatgacttgttggttgattgtagatattggcggacgcgtgggtcgaatcttgtacctgcccgggcggcccatagtttgtcaaccactggtgtaaaaccttagttatatatgatctgcattttcttgaactgatcattgaaaacttataaacctaacagaaaagccacataatatttagtgtcattatgcaataatcacattgcctttgtgttaatagtcaaatacttacctttggagaatacttacctttggaggaatgtataaaatttctcaggcagagtcctggatataggaaaaagtaatttatgaagtaaacttcagttgcttaatcaaactaatgatagtctaacaactgagcaagatcctcatctgagagtgcttaaatgggatccccagagac

SEQ ID NO: 14085 - DNA, 521 bp, Homo sapiens
tactatagggcgaattggagctccaccgcggtggcggccgaggtcaagcttcgacccacgcgtccggaagatcctgcggaaggaatatgtttttgctgactccaaagtaagtgacagcaaacttctaaaatgggctgtgaggtagggaggggacacaagcgttttgaggctcgctgtgtgccagggagtgtatcattagctcactcaattcccagaacaacccatttcacacctgggaaaggtgaacttagagaagttgaggatcatgttccaggttggcctggatttgagccatcactgtctcaggagtagggaggcttcccactttgcccagctgcctcccagcctcgaggccacatcctttatgacccacatctaactcagccccacacctgggggaaaggctttcagcttctctgggctggacttgggaaatctttgggacactcctgacctgcccgggcggccgctctagaactagtggatcccccgggctgcaggaattcgatatcaagcttatc

SEQ ID NO: 14086 - DNA, 485 bp, Homo sapiens
ctatagggcgaattggagctccaccgcggtggcggccgcccgggcaggtgtccccatgagggccaggcccaggcagaacccatcccattttatccttaaactcagaaggaaatgtgtctaaatattaaaggattaatatgggaataaaaaatgaaccttaaaccctgccactgatacacaagctgtctctcttagagttcaatgaacacttcaggagagtatttccaacaatatttagatattggaatatctaaatattgttgatttagataaccaccctagatttctcaccaccctagaacatttagtggggagacattcttttctcctttttctgataacttggtcagaagtgattgactgtgcaaatggtatttctcagctaaaatctcccttatgaacccttcctcgaaatccccaaggtctcctctctttcttaagtaggtaacagctaatttgaatattgattcatcagtatccctgtg

SEQ ID NO: 14087 - DNA, 558 bp, Homo sapiens
tatagggcgaattggagctccaccgcggtggcggccgaggtgcttcgacccacgcgtccgcttggggatttcgaggaagggttcataagggagattttagctgagaaataccatttgcacagtcaatcacttctgaccaagttatcagaaaaaggagaaaagaatgtctccccactaaatgttctagggtggtgagaaatctagggtggttatctaaatcaacaatatttagatattccaatatctaaatattgttggaaatactctcctgaagtgttcattgaactctaagagagacagcttgtgtatcagtggcagggtttaaggttcattttttattcccatattaatcctttaatatttagacaaatttccttctgagtttaaggataaaatgggatgggttctgcctgggcctggccctcatggggacatcaaagggcaatgttgcaaaaaaaaaaaaacctgcccgggcggccgctctaaactagtggatcccccgggctgcaggaattcgatatcaagcttatcgataccgtcgacctgagggggggcccg

SEQ ID NO: 14088 - DNA, 588 bp, Homo sapiens
cactactatagggcgaattggagctccaccgcggtggcggccgattctctgattagattttaaacttttttgatgaaatattgagtcttaactactttaagatgccataatactgaatacagtgctaagcaaaataaatattgactagttctcatttctatctttcaaatatttctaatgctcctcttttatagcatgggctcaggtatcagatggcgtaggtcaagatcttggctctactgtttacttacgggaaatacttttatgttgctaaatctcagttttctcttctgtaagacgggattaaagtacctcggccgctctagaactagtggatcccccgggctgcaggaattcgatatcaagcttatcgataccgtcgacctcgagggggggcccggtacccagcttttgttccctttagtgagggttaattgcgcgcttggcgtaatcatggtcatagctgtttcctgtgtgaaattgttatccgctcacaattccacacaacatacgagccgggagcataaagtgtaaagcctggggtgcctaatgagtgagctaactcacattatttgcgttgcgctcact

SEQ ID NO: 14089 - DNA, 372 bp, Homo sapiens
attggagctccaccgcggtggcggccgcccgggcaggtctactcaagtagtctttaccccctactcaagtagggggtaaagtgtagaacaaggagtttgaggtgtgttcgactgattgtgaaccatcaattgagataactcactaccttcaggccagccagttacatacttttgaaaagccaagagtgaagcagggttgtttttcatccaattcttggtctttttgttaaaggcagcaataagatagggtggtttcgggcaatcacttagctaattggctctctatagtcatacctggataatatttgtagtcatacctggataatatttaaaggaagaaactaaacatagtccttaagtaggaacaactac

SEQ ID NO: 14090 - DNA, 545 bp, Homo sapiens
ctatagggcgaattggagctccaccgcggtggcggccgaggtcctagcttgagtcgacccacgcgtccggccgctgttcgtatttcttattctacaacaagggggagcctgcaggcaaaacacatcccattgtcatttttttgtaaataaagttgtattggaacatggccactctcatttgttttctattatttatggctgctttcacttacaacctgagtggttgccacagaaactgtatggcctgcaaagtctaaaatatttactatgtagctttttcttttctttttggagacagtgtgccactctattgcccaggctggagtgcggtggtgtgatcatggctcattgcagcctcaaactcctgggctcaagcaatcctcccgcctcggtctcccaagtagttgggactacaggcatgagccaccatacccggctaatttttttaaagtttttggtagaaatggagttttttaatgttgcccaggctggtcttgaacttctggtcttaaatgaccctttcccatcagccttccaaagtgctg

SEQ ID NO: 14091 - DNA, 473 bp, Homo sapiens
ggcgaattggagctccaccgcggtggcggccgaggtcagttatttattgatttaatcattgtaatctccaatagagattacaatagagatctccaacatgatttcatgcatttagaggagaaatatttcctggttaagtggaaaattgtgcggatgtggcttctggaagaccttcattctaaagcagcggacgcgtgggtcgaaacctgcccgggcggccggccgcccgggcaggtctgcaatccagctaggcatgggagggaacaaggaaaacatggaacccaaagggaactgcagcgagagcacaaagattctaggatactgcgagcaaatggggtggaggggtgctctcctgagctacagaaggaatgatctggtggttaagataaaacacaagtcaaacttattcgagttgtccacagtcagcaatggtgatcttcttgctggtcttgccattcctggacccaaagcgc

SEQ ID NO: 14092 - DNA, 552 bp, Homo sapiens
ctactatagggcgaattggagctccaccgcggtggcggccgaggtaccagctttaaaacccatacccctccagggttcttttctgttgctggtgaagtgcactttttaaaagagtgattcataccatcaagatttttgacaagaaaattttagaaaaactgtggaagaaaactgattgctcttagttctagccatgtgtaattgctgaccacctgaaatggtccaaactgagatttgctaaagcataaaatacacaccatatttcaaaggtttttaaaagaatgtaaaacatttcattaatttcggacgcgtgggtcgaagcttgacctgcccgggcggccgaggtggatggacccatccattcaggcagggggtgtggggtgtcccctgtgcttagaaaccacctagcatcatagctgcaacagcactttattgggatctgagtctacagttcacatagggaggtgaagccgtgggagaagcaggggtaaaaaaaaaaaaaggggggggactttaccccctagggacagctgctttcaaacctaacaaaac

SEQ ID NO: 14093 - DNA, 455 bp, Homo sapiens
  misc_feature 135: n = A,T,C or G
ctatagggcgaattggagctccaccgcggtggcggccgaggtcaagcttcgacccacgcgtccggtaatttgttgcacactatgtaacaaaacaactgaagatatgtttaataaatattgtacttattggaagtnaaaaaaaaaaaaaaaaaaaaaaaaagtgcggccggccgcactttttttttttttttttgctggggtttttttcttttctttttttttcagctacaggaatttagccaattcagaggaaatcttccccataattatggaactttcttacagattttaccaagtctggtcaacccaataagaaaaagactgaaataacaataacaacttcaacaaataaaaaaacagttaagctaaataaacagatgattgcagaatttatgtgattactgggtacctcggccgctctagaactagtggatcccccgggctgcaggaattcg

SEQ ID NO: 14094 - DNA, 489 bp, Homo sapiens
acgactcactatagggcgaattggagctccaccgcggtggcggccgcccgggcaggtaccagtttgagttgaaacggtatgtgacttccccagctgcaccctgggcagtgactgcatgcatcactgagaggtcctgtctacagcagataaaactccacagatcactcctcctgtaatccctctaagtgctccaaggcagcagaaaggcccagtgcattgaggctggaagcaggagcagagactctgggatatagtgcgaaagtctctttcccctgtagttgggctaatctggaaaaactcaaaaacctggcctgattaccgaggtttcttttatggatatttagtatttagataaaatttttacagtattcttgaaatgaacccaattaaacacatagttctcagtcttgaccacacattagaatcatctggtagacttctgtaaactaccaatgcctggccagataaattccggacgcgtgggtcgaa

SEQ ID NO: 14095 - DNA, 459 bp, Homo sapiens
ctactatagggcgaattggagctccaccgcggtggcggccgcacttttttttttttttttttttacctgaaaatgcttattctagcttcacatttgattgtttggctaagaagaaaattatttattagacttaattttcctcacgagtttaaagattgcttcagatcttaaacttctaatgaggaaagctgagaagtccaatgccattctgattcttgcaacttacaagtagtctttttttgtctagacgctttcaggaccttcttttttcctcagtcagtgtatccaaaccttcacagtgatatcttttgggtacctcggccgctctagaactagtggatcccccgggctgcaggaattcgatatcaagcttatcgataccgtcgacctcgagggggggcccggtacccagcttttgttccctttagtgagggttaattgcgcgcttggcgtaatcat

SEQ ID NO: 14096 - DNA, 403 bp, Homo sapiens
tggcgaaccggacctccaccgcgggggcggccgcccggcaggccaagcttcgacccacgcgtccgctttaaagggaattctctgtagagtgggaggcgaacacgctgggtcttccaactcaggaattctcgtggctgggctgggtcagcgatggctttgtctctttatgtctaaagtgccctatggctgctgaaggttacctaaccattctttaaaaggagaatgaccctccatgggaatggccagcctgccaactgtgcaattgaagaagacccgatggatcaaccccatgtcttccttggggagaaagtgcataaaccaggggtctctcttttttttttcaacaaaccattgacctgttcttgcagttcatctctggagaggttatacattattagaagtt

SEQ ID NO: 14097 - DNA, 557 bp, Homo sapiens
  misc_feature 151, 160: n = A,T,C or G
gactcactatagggcgaattggagctccaccgcggtggcggccgagtaagcttcgacccacgcgtccgcaaaaatcaatcaagggttcctactcaagtaaaaagcaacttgtaggaaaataataggggatatattttgctcattaaggatnctttttatnagtggctcttggtgcactgcctgtgagtacccttatcctcaaggagcagcttaaaaaaaaaaaaaaaaaaagtgcggccgctctagaactagtggatcccccgggctgcaggaattcgatatcaagcttatcgataccgtcgacctcgagggggggcccggtacccagcttttgttccctttagtgagggttaattgcgcgcttggcgtaatcatggtcatagctgtttcctgtgtgaaattgttatccgttcacaattccacacaacatacgagccgggagcataaagtgtaaagcctggggtgcctaatgagtgagctaactcacattaattgcgttgcgctcactgcccgctttccagtcgggaaacctgtcgtgccagctgcattaatgaatc

SEQ ID NO: 14098 - DNA, 572 bp, Homo sapiens
cgcgcgtaatacgactcactatagggcgaattggagctccaccgcggtggcggccgaggtacaaactatgtatctgaaacacttctatttggcaattttataacaaatcaaattttaaaaagaacaaaagagattgcagattacttcgcagatacagaataaagcaattgatgaagtgcttaagcaaaagaaacaacaaaaaaagaaaacacactgcttttctttttaaaaataaaatcacattgctatagatcaaatggataatacccttattaaacaaccattccagaatgtcttatagtagcagtgcttttatttgcacttcacttaattttataagactcattttcatgtatatagctctttacccccattgttaacgaataaagtctctcataatttttacacttttaaattttttaaagcaaatgagaaatgatttatgtatcgtggaacctttcccattttggaaccaaaggttttaattctatatttttgtctaatatttctttaaaaaatttagtgtaaaaactgctggcggacgcgtgggtcgaagcttgacctgcccgggc

SEQ ID NO: 14099 - DNA, 431 bp, Homo sapiens
cgcgcgtaatacgactcactatagggcgaattggagctccaccgcggtggcggccgcccgggcaggtactatctataaaggaggtttgatgttttcattactgtttttgtaaatatttcagcattatctttaaaaagtaaggacattggccgggtgcggtggctcatacctgtaatcccagcgctttggaggccgggtgggtggatcacctgaggctagatagttttattcacttggctgtttcaccaaaaaaaaaaaaaaaaaaaaagtgcggccacctcggccgctctagaactagtggatcccccgggctgcaggaattcgatatcaagcttatcgataccgtcgacctcgagggggggcccggtacccagcttttgttccctttagtgagggttaattgcgcgcttggcgtaatcatggtcatagct

SEQ ID NO: 14100 - DNA, 488 bp, Homo sapiens
ctatagggcgaattggagctccaccgcggtggcggccgaggtactgagcaggattaccatggcaacaacacatcatcagtagggtaaaactaacctgtctcacgacggtctaaacccagtagaaacaaagtgcggccggccgcccgggcaggtgccgcacttttttttttttttttttttagaataggaattgaattttattaaaaacaaaaataaatctaaaaagcttccttcagttacaaatatgcacaagaatttctgcattacatcatttgacataaaatgttctgaatgacagaagtagaagtagaacttactaccatttgaagacaggagttgagcgctgaaaaccacacacatttatagaaagaaaccaaagtttcacagggaagacctgtgatctctggctacaggagctgaaattaggaacatgaaagaaacttgaagagagaagacattcaatactctaaaatacttcagcaaaaata

SEQ ID NO: 14101 - DNA, 534 bp, Homo sapiens
  misc_feature 131, 132, 145, 146, 156, 157, 297, 300, 302, 310: n = A,T,C or G
gactcactatagggcgaattggagctccaccgcggtggcggccgaggtcagcttcgacccacgcgtccggttactagagcccttgaagggcagcacttgggtttagttggcctcttctgtttttaccctannatttctcaatccnncacctattcnnttttttctcacttttcttaaatcccagtaattatcttaggcataaagcagttttctatgcatagacagttcatttagattggtaacatgggctaggtaaaaaaaaaaaaaaaaaaaaaaggtgcgacctgcccgggcggncgntngaggccgnccgggcaggtactatgtcgattcgacagaacattcagaagattctcggccttgccccttcacgagccgccaccaagcaggcaggtggatttcttggcccaccacctccttctgggaagttctcttgaactcaagaactctttattttctatcattctttctagacacacacacatcagactggctactgttttgtagcaagagccataggtagccttactactt

SEQ ID NO: 14102 - DNA, 541 bp, Homo sapiens
  misc_feature 470: n = A,T,C or G
actatagggcgaattggagctccaccgcggtggcggccgcccggcaggtcttcgacccacgcgtccggggtttcaaactgaataactcattgttgggtctggatctgtaaaaaggttttgtcactgatgggcaatatggagagaatgtaaaaatatctaacttcaaacagaaaaaagaaacaactgaatgaaagctataaacaatagttcagaagattggcgtagaggatttacctacagaacttcaggagattcctaagaaggccttcagtgatcttttcatcaatatcatcaggccttatcattgtttcacatttgcttctctttaccatagggaatataataattatttactggttaacttcctagggagattgcctgcggcttatttaagatccaaattttaaagtaataatttctgttgaagctgcttgtgaggtggttgggtgggcagatagagtgaagccagngacacacactaaatgagcccgggatgtaggcaggttttgatgttttgcttgcttttatccctaacatttta

SEQ ID NO: 14103 - DNA, 582 bp, Homo sapiens
ctatagggcgaattggagctccaccgcggtggcggccgattctctgattagattttaaacttttttgatgaaatattgagtcttaactactttaagatgccataatactgaatacagtgctaagcaaaataaatattgactagttctcatttctatctttcaaatatttctaatgctcctttttatagcatgggctcaggtatcagatggcgtaggtcaagatcttggctctactgtttacttacgggaaatacttttatgttgctaaatctcagttttctcttctgtaagacgggattaaagtacctcggccgctctagaactagtggatcccccgggctgcaggaattcgatatcaagcttatcgataccgtcgacctcgagggggggcccggtacccagcttttgttccctttagtgagggttaattgcgcgcttggcgtaatcatggtcatagctgtttcctgtgtgaaattgttatccgctcacaattccacacaacatacgagccgggagcataaagtgtaaagcctggggtgcctaatgagtgagctaactcacattaattgcgttgcgctcact

SEQ ID NO: 14104 - DNA, 557 bp, Homo sapiens
tcgtaatacgactcactatagggcgaattggagctccaccgcggtggcggccgcccgggcaggtcttcgacccacgcgtccggggtttcaaactgaataactcattgttgggtctggatctgtaaaaaggttttgtcactgatgggcaatatggagagaatgtaaaaatatctaacttcaaacagaaaaagaaacaactggaatgaaaagctataaacaatagttcagaagattggcgtagaggatttacctacagaacttcaggagattcctaagaaggccttcagtgatcttttcatcaatatcatcaggccttatcattgtttcacatttgcttctctttaccatagggaatataataattatttactggttaacttcctagggagattgcctgcggcttatttaagatccaaattttaaagtaataatttctgttgaagctgcttgtgaggtggttgggtgggcagatagagtgaagccagggacacacactaaatgagcccgggatgtaggcaggttttgatgttttgcttgcttttatccctaacatttta

SEQ ID NO: 14105 - DNA, 536 bp, Homo sapiens
cgcgcgtaatacgactcactatagggcgaattggagctccaccgcggtggcggccgcccgggcaggtactatctataaaggaggtttgatgttttcattactgtttttgtaaatatttcagcattatctttaaaaagtaaggacattggccgggtgcggtggctcatacctgtaatcccagcgctttgggaggccgggtgggtggatcacctgaggctagatagttttattcacttggctgtttcaccaaaaaaaaaaaaaaaaaaaaagtgcggccacctcggccgctctagaactagtggatcccccgggctgcaggaattcgatatcaagcttatcgataccgtcgacctcgagggggggcccggtacccagcttttgttccctttagtgagggttaattgcgcgcttggcgtaatcatggtcatagctgtttcctgtgtgaaattgttatccgctcacaattccacacaacatacgagccgggagcataaagtgtaaagcctggggtgcctaatgagtgagctaactcacat

SEQ ID NO: 14106 - DNA, 532 bp, Homo sapiens
actatagggcgaattggagctccaccgcggtggcggccgaggtcgcgtccgagtgtttccactctgtccataaaatgggagctaatattctccaacctgtgtgcctgacatgatggttaaagggattaaacaaaacaatagtttgtaatttattctgtcagagcaaactgtgtaaataaaagggactaagtgacgaaaaataaattttaaaaaacctaataaaacaagtttgtaatttataattgtatacaaataaaagatgttacaaaaaaaaaaaaaaaaaaaaaggacctgcccgggcggccggccgcccgggcaggttttatttaacattcaaacttcattaagacatgtgcaatatggcaattttactggggattaaaccctacctaggattgcttgctggggcttagcaacagggtccagttcacacttagcactaattaaatactttattgaataaatacaataccaaacaaaatgcattcaaatgccggacgcgtgggtcgactcaagctaggtcggacgcgta

SEQ ID NO: 14107 - DNA, 492 bp, Homo sapiens
ctactatagggcgaattggagctccaccgcggtggcggccgaggtcaagtttcgacccacgcgtccgcattatccttcttgccatctaccccatgttaaagccaggctgatttgttcttggatcttaagtgtgacaaagcctgcgggaaggaaccacattctgaaggtttgtgggctgtgtgagatccagagaacccaagggggtttttttgctcttgacaaacgaatgttaggtatgacctatgatgatacaacttctgcaaaattgaggaccagcctatttcttcattagaaatgcaggaaacctgcccgggcggccgctctagaactagtggatcccccgggctgcaggaattcgatatcaagcttatcgataccgtcgacctcgagggggggcccggtacccagcttttgttccctttagtgagggttaattgcgcgcttggcgtaatcatggtcatagctgtttcctgtgtgaaattgttatccgct

SEQ ID NO: 14108 - DNA, 398 bp, Homo sapiens
gactcactatagggcgaattggagctccaccgcggtggcggccgaggtcaagcttcgacccacgcgtccgggacctcagaatataaaaatatggtttttttttcagacttactagttttttttgataattcctctacgaatgttgatttaacttagaaatatgtaaatttaatattcaaaaccaaattattttttaaagaggaaaaaaatataaaacctgcccgggcggccggccgcactttatttttttttttttttttttaaactttaatagtgtaggaagctgaataatttatgaaggagaggggtcagggttgattcgggaggatcctattggtgcgggggctttgtatgattatgggcgttgattagtagtagttactggttgaacattgttt

SEQ ID NO: 14109 - DNA, 484 bp, Homo sapiens
tacactactatagggcgaattggagctccaccgcggtggcggccgaggtcttgagtcgacccacgcgtccggagatgtatacgccactataggaactataagaaaaagtcaaatggaaattttataaataaaaaccacagtcactataatgaggaaatactttgataaggtgtcagtgaactcaaaaatcaatcaatagaaactactcaaactaaaactcaaagagaaaaaaaaagatgggagataattattttttaagaattggtcatcaaaatgtagcaacaagatcgccttatcctatatcatttgaattttcaaaaaataagctcattatacaatctttaaaatattttgaatagaactgtttcatgtgttattcgtgaaaattagggaaaaagcagtaaagaaacattctgtgagaaaacctatctaataaactcagaattgaggttcttagaatatagaaaaagaaatgtggcaattt

SEQ ID NO: 14110 - DNA, 507 bp, Homo sapiens
ctactatagggcgaattggagctccaccgcggtggcggccgcccgggcaggtctactcaagtagtctttaccccctactcaagtagggggtaaagtgtagaacaaggagtttgatctgtgttcaactgattgtgaaccatcaattgagataactcactaccttcaggccagccagttacatacttttgaaaagccaagagtgaagcagggttgtttttcatccaattcttggtctttttgttaaaggcagcaataagatagggtggtttcgggcaatcacttagctaattggctctctatagtcatacctggataatatttgtagtcatacctggataatatttaaaggaagaaactaaacatagtccttaagtaggaacaactacaattttaacaactattataaaacagtgatggctatactcttgaaatgtagatacaagcctacatgtaagagttttataaaatcagttcagtgcataaattgataataaacttgaagaaaac

SEQ ID NO: 14111 - DNA, 445 bp, Homo sapiens
taatacgactcactatagggcgaattggagctccaccgcggtggcggccgcactgtttttttttatttgttgaagttgttgttgttatttcagtctttttcttattgggttgaccagacttggtaaaatctgtaagaaagttccataattatggggaagatttcctctgaattggctaaattcctgtagctgaaaaaaaaaaaaaaaacctgcccgggcggccggccgcccgggcaggttacaagcttcgacccacgcgtccgggaaattttaattaaaaataggtgaacattttaaatgacctaatacatatttagtccacattgaaactttggcattttgtcattgccattaaaattttgatggcattaaaatttgatgccattaaaatttttgattcagtaggtagcattttttttcttagctacaattgttttttttaatt

SEQ ID NO: 14112 - DNA, 531 bp, Homo sapiens
cactactatagggcgaattggagctccaccgcggtggcggccgaggtaccacggttgtcccctgaaaggtgttgtgtccctcaccagactgggagcacctcaagggcagaacccatgtcatgttcctttttgtatttccagacctgaaactgccagtaaataaaccctaaaagtagaaagaaaaaaaaaaaaaaaaaaagtgcggccgccgcactttttttttttttttttttttggaaaaccaaacatgctttatttcatttttttcacaatttatttaaacatctcacatatacaaaataggtacctcggccgctttagaactagtggatcccccgggctgcaggaattcgatatcaagcttatcgataccgtcgacctcgagggggggcccggtacccagcttttgttccctttagtgagggttaattgcgcgcttggcgtaatcatggtcatagctgtttcctgtgtgaaattgttatccgctcacaattccacacaacatacgagccgggagcataaaagtgtaaa

SEQ ID NO: 14113 - DNA, 531 bp, Homo sapiens
gactcactatagggcgaattggagctccaccgcggtggcggccgcccgggcaggtcaggagtgtcccaaagatttcccaagtccagcccagagaagctgaaagcctttcccccaggtgtggggctgagttagatgtgggtcataaaggatgtggcctcgaggctgggaggcagctgggcaaagtgggaagcctccctactcctgagacagtgatggctcaaatccaggccaacctggaacatgatcctcaacttctctaagttcacctttcccaggtgtgaaatgggttgttctgggaattgagtgagctaatgatacactccctggcacacagcgagcctcaaaacgcttgtgtcccctccctacctcacagcccattttagaagtttgctgtcacttactttggagtcagcaaaaacatattccttccgcaggatcttccggacgcgtgggtcgaagcttgacctcggccgctctagaactagtggatcccccgggctgcaggaattcgatatcaagcttatcgatacc

SEQ ID NO: 14114 - DNA, 391 bp, Homo sapiens
ctactatagggcgatattggagctccaccgcggtggcggccgaggtcttcgacccacgcgtccgattgattaatacctgtcacagatacattttggtttacaaatcaatgaacaatggagggaactctgtccttaatcttggtacgagacaatgaaccccaggtacttaccccagacaacgacgccgcttcaccatgatgatggacaacaggcaactttttttttggagtttcagcttgcttccaacagggacggtgagtgtgaggtttattcccatttctaagacgatagaagttttcagcctaagccgtattcctaggtaagcagctggattgcagttttgtcttggaaattttccttaatgactaacacgttaagattaacaactagc

SEQ ID NO: 14115 - DNA, 305 bp, Homo sapiens
actatagggcgaattggagctccaccgcggtggcggccgcccgggcaggtcttgagtcgacccacgcgtccggagctgctcaatagtgagaatcaggtgatataatgcatgtggaaaaagaatgtgaaaaatctaacactttagattgtatacagtgttttttaaaaagacacaaaaaaactgtcaacatgagaaacataagcaaagttttactcaagacaaacatccacgagtcacaacttcagttattcccagtcttcaaaataacagaagggcaaagcaaagtaaacatgcaaaagcaaact

SEQ ID NO: 14116 - DNA, 498 bp, Homo sapiens
ctcactatagggcgaattggagctccaccgcggtggcggccgattctctgattagattttaaacttttttgatgaaatattgagtcttaactactttaagatgccataatactgaatacagtgctaagcaaaataaatattgactagttctcatttctatctttcaaatatttctaatgctcctcttttatagcatgggctcaggcatcagatggcgtaggtcaagatcttggctctactgtttacttacgggaaatacttttatgttgctaaatctcagttttctcttctgtaagacgggattaaagtacctcggccgctctagaactagtggatcccccgggctgcaggaattcgatatcaagcttatcgataccgtcgacctcgagggggggcccggtacccagcttttgttccctttagtgagggttaattgcgcgcttggcgtaatcatggtcatagctgtttcctgtgtgaaaatgttatccgctcacaatt

SEQ ID NO: 14117 - DNA, 443 bp, Homo sapiens
tacgactcactatagggcgaattggagctccaccgcggtggcggccgttaaaggaataatctgcagaacatcttgatttacaagggacaaaatgatgcaaattatatgctgtccaacctactggtgaactggatcagaatggtccaaggactgttaaacagaggaagtatttacattctgaaaacttgcggacgcgtgggtcgaagcttgtacacctcggccgaggtaccttctgtcacaaagacccaagcttcctccagcttccaggatagcagtcagccagctggaaaagccgaagggatcagggagccaaaggtgactgggaagctaaagcaacaatcacctaaattacagtcctccaagaaagttgctttcctcaggcagaatgcccctcccaagggcacagacacacaaacaccggttgtgttatccccatccaagac

SEQ ID NO: 14118 - DNA, 495 bp, Homo sapiens
atacactactatagggcgaattggagctccaccgcggtggcggccgcccgggcaggtcgagcggccgcccgggcaggtttcctgcatttctaatgaagaaataggctggtcctcaattttgcagaagttgtatcatcataggtcatacctaacattcgtttgtcaagagcaaaaaaacccccttgggttctctggatctcacacagcccacaaaccttcagaatgtggttccttcccgcaggctttgtcacacttaagatccaagaacaaatcagcctggctttaacatggggtagatggcaagaaggataatgcggacgcgtgggtcgaaacttgacctcggccgctctagaactagtggatcccccgggctgcaggaattcgatatcaagcttatcgataccgtcgacctcgagggggggcccggtacccagcttttgttccctttagtgagggttaattgcgcgcttggcgtaatcatggtcatagctgttt

SEQ ID NO: 14119 - DNA, 214 bp, Homo sapiens
actactatagggcgaattggagctccaccgcggtggcggccgcccgggcaggtgtcgacccacgcgtccgacgactcactatagggatctagatcacgagcggccggccgcccgggcaggtacagagatttaaatgaaatcttcgaaagaataaatttgcttttcagtccactgtattttcaaaattgattatcaccaagcttggatgaaagct

SEQ ID NO: 14120 - DNA, 452 bp, Homo sapiens
  misc_feature 312: n = A,T,C or G
tacgactcactatagggcgaattggagctccaccgcggtggcggccgaggtacttcaaagttattgcacatacacttgtttactttgtatgttttgcaggattaaactttgtataatctttttacaaaatttttttttcagtatgcaagcttgcaagatgaaaataaaacctgtttgcctgataaaaaaaaaaaaaaaaaaaaaaagtgcggccggccgcccgggcaggtcttgagtcgacccacgcgtccgccggagagaattgtaatacgactcactatagtgatctagatcacgagcagccgcactttnttttttttttttttttttgacgaattcaggagtcctttattagccggcagccgagagacagctagcgctcaaaattctcttggccccgaagaaggagctagattttcttttatactttggtttagacaggggagaggggg

SEQ ID NO: 14121 - DNA, 506 bp, Homo sapiens
actactatagggcgaattggagctccaccgcggtggcggccgcccgggcaggttatagacaatatgctccttaaggtccctttcagtcccgttctatggatctgtgtagtttcgcttcttttttcaatatgctcagaattaggacaccaatgttaatggaagataaggaaactataccacctatcccttatagaagatttgtgcactaactaatatgagccctggaagatcaagccagtagaagatagaagatctatccctgctttatactttggatcatttatttgtgaagatcacaactttcaaagttttattatttcttaggtcttcatggaagttcggggaaattaactggatctacttctagtctaaataagctcagtgttcagagttcagggaatcgcagatctcagtcatcttccctgttggatatgggaaacatgtctgcctctgatctcgatgttgctgacaggaccaaatttgataaggtaaactaaaataacaag

SEQ ID NO: 14122 - DNA, 261 bp, Homo sapiens
actactatagggcgaattggagctccaccgcggtggcggccgaggtcaagcttcgacccacgcgtccgaagaagtgctatgtggcgagaaaaaaaagttttaatgtattggagaagttttaaaaaacccagaaaaatgcctttttttttttttttgaacataaactcaagattttattgtcttcataataaaagatgacacttagaactggatcacttggccctttctcttcttatctcctcccagttcaaaatgcttgca

SEQ ID NO: 14123 - DNA, 344 bp, Homo sapiens
tacactactatagggcgaattggagctccaccgcggtggcggccgaggtacttcaaagttattgcacatacacttgtttactttgtatgttttgcaggattaaactttgtataatctttttacaaaatttttttttcagtatgcaagcttgcaagatgaaaataaaacctgtttgcctgattaaaaaaaaaaaaaaaaaaaaaaaaaaaagtgcggccttgagcggccgcccgggcaggtactctataagaggtgtgggtgtctgtttggtcaggatgttagaaagtgctgataagtagcatgatcagtgtatgcgaaaaggtttttaggaagtattgcaaaaa

SEQ ID NO: 14124 - DNA, 362 bp, Homo sapiens
atacgactactatagggcgaattggagctccaccgcggtggcggccgaggtcaagcttcgacccacgcgtccggccacattttcaatttagccatttttctcttattcacctttttctgctaattactctgtaattccactaagaaaagtcaatagataattccaataatgacttcactcctgagaattttattagctgctaacgcttgtctcatcataagcactcatatgttcattgagtaaatatttattgagtatttgctatggtccaggcactgtgctaagtattgaggataaaatggtgattgaaacattttcccttcttgattttaacatctacaaaataaaaagtatgttaatat

SEQ ID NO: 14125 - DNA, 503 bp, Homo sapiens
  misc_feature 482: n = A,T,C or G
atacgactcactatagggcgaattggagctccaccgcggtggcggccgcccgggcaggtaatcacacaacactttcttttccaactgctgcaaagtgcatctacaatatgctattacagatccacttttaaaaggtttcctgtgacattacagcaagcctcttttttcaaacagaggaataatcccaaattcttcctcaaataaactccattccagtaaatggtaaatacataaaaaattacagtaagccagacacttaaaaggacagccaagaagtcttccaacagtttattagaaagaatgtagacatttaaaaaaatccccactgtcatgaacataaattgaggttttcagcccgggtataagctgaatcaaaaaaaggaaataaaaaatccaatagtgtattaaacatttttcactcatttgccatactgacagtgcaaatacaaatctggactaaatgtaccttcggccgctctagnaactagtggatcccccgggct

SEQ ID NO: 14126 - DNA, 464 bp, Homo sapiens
attggagctccaccgcggtggcggccgaggtacaattacccaccactggatttgactcagagaggacccccagagggtgtctccatcttccctatttattttcagcccttgagggcttcattgtagatcaaagccaaggcccccaggaaggtgacatactcctggaagttcacctcctggtccttgttccggtccaagtcttccatcagccttgcaatttcagcatcctgcagcttcgagccaatggtgagctccttctggatcagctccttcagctccttcttgctcagggtgtgcttgtcaccctccctgccggagtacctgcccgggcggccgctctagaactagtggatcccccgggctgcaggaattcgatatcaagcttatcgataccgtcgacctcgagggggggcccggtacccagcttttgttccctttagtgaggggtaaattgcgcgcttggc

SEQ ID NO: 14127 - DNA, 457 bp, Homo sapiens
tacactactatagggcgaattggagctccaccgcggtggcggccgaggtactccagggatgggaggcacaagttgtgattgggcaaagtttattttctatgtcagcctgtcagtccactgccccattttgcaagacttttttttagccttgacaaaatgtctcagttaagtataaaagtttttccactacttagtccaaaaaaaactattaaatcttaatgaaatagccactctcaaaaaaaaaaaaaaaaaaaaagtgcggccggccgcccgggcaggtcttcgacccacgcgtccgtctttttcttcccaaacatagacttgcaagacatggcctgtatgagaagaaaaagacctcaagaaagcaacgaaaggaacgcaagaacagaatgaagaaagtcagggggactgcaaaggccaatgttggtgctggcaaaaagtgagctggagattggat

SEQ ID NO: 14128 - DNA, 452 bp, Homo sapiens
cactactatagggcgaattggagctccaccgcggtggcggccgaggtacatagcacattacagtcaaatcccttctcgcccccatggatgacccccctcagataggggtcccttgaccaccatcctccgtgaaatcaatatcccgcacaagagtgcttataaaaaaaaaaaaaaaaaaaaaaaaaaaaaaaagtgcggcctcgagcggccgcccgggcaggtacatctattttggattgtatattgtgtttgtgtatttacgctttgattcatagtaacttcttatggaattgatttgcattgaacacaaactgtaaataaaaagaaatggctgaaagagctcaaaaaaaaaaaaaaaaaaaaaagtgcggccgctctagaactagtggatcccccgggctgcaggaattcgatatcaagcttatcgataccgccgacctcaagggggggcc

SEQ ID NO: 14129 - DNA, 449 bp, Homo sapiens
atacgactcactatagggcgaattggagctccaccgcggtggcggccgaggtactaatctgtcaaatatactatgaaatgcatagtctccacttaaaatgctgaatgacacacacgttttgcaagcattactgctttccacaaaaactgctgaataggagttccgtccctgccaagatcagtgtttaagagatactttatgatgctgataagtattattggtggtggtggtgttcagaaagtttgtcactcatgcagatgtctgaaatcttgttccgaatccatggaacatagggtggaggccagctccccctttttttagatgatcacatagttctgagcagagatgtggtcctcaccctgcagttcctgcaggagctgctgctgctgggatggctgctggacagaggcctccatggagcccgctgtgctggtgtcatcagaaagaga

SEQ ID NO: 14130 - DNA, 468 bp, Homo sapiens
cgactactatagggcgaattggagctccaccgcggtggcggccgaggtcaagcttcgacccacgcgtccgatttttttaaagtattttctagtcttttctctctctgtggaatggtgaaagagagatgccgtgttttgaaagtaagatgatgaaatgaatttttaattcaagaaacattcagaaacataggaattaaaacttagagaaatgatctaatttccctgttcacacaaactttacactttaatctgatgattggatattttattttagtgaaacatcatcttgttagctaactttaaaaaatggatgtagaatgattaaaggttggtatgatttttttttaatgtatcagtttgaacctagaatattgaattaaaatgctgtctcagtattttaaaagcaaaaaaggaatggaggaaaattgcatcttagaccatttttatatgcagtgtacctgcccgggc

SEQ ID NO: 14131 - DNA, 472 bp, Homo sapiens
tacgactcactatagggcgaattggagctccaccgcggtggcggccgcccgggcaggtaccagggtgagagggagtctattggagcccttgggaacttctggatcaaattggacctgaattgagatctatttctcagctttcacttatgtgagccaataaattccttttttgttgaaggcaaaaaaaaaaaaaaaaaaaaaaaaaagtgcggccgctctagaactagtggatcccccgggctgcaggaattcgatatcaagcttatcgataccgtcaacctcgagggggggcccggaacccagcttttgttccctttagtgagggttaattgcgcgcttggcgtaatcatggtcatagctgtttcctgcgtgaaattgttatccgctcacaattccacacaacatacgagccgggagcataaagtgtaaagcctggggtgcctaatgagtgagctaactcacattaattgcg

SEQ ID NO: 14132 - DNA, 480 bp, Homo sapiens
actactatagggcgaattggagctccaccgcggtggcggccgcacttttttttttttttttttttttttaacgttttaattaaatggatttatttaaaaagactataaaatctgacatcaagagagataaaaaaaaaagacccataagatttaaattgacaaatgtaaaatgattggctacaatgtaaaaatacatttcccagcccccaaacaaaacacaagtatagtaattataaaatttttggacctgcccgggcggccgctctagaactagtgggatcccccgggctgcagggaattcgatatcaagctttatcgataccgtcgacctcgagggggggcccggtacccagcttttgttccctttagtgagggttaattgcgcgcttggcgtaatcatggtcatagctgtttcctgtgtgaaattgttatccgctcacaattccacacaacatacgagccgggagcataaagtgtaaa

SEQ ID NO: 14133 - DNA, 387 bp, Homo sapiens
tacgactcactatagggcgaattggagctccaccgcggtggcggccgaggtcctagcttgagtcgacccacgcgtccggccgctgttcgtatttcttattctacaacaagggtcagcctacaggcaaaacacatcccattgtcatttttttgtaaataaaagttgtatttggaacatggccactctcatttgttttctattatttatggctgctttcacttacaacctgagtggttgccacagaaactgtatggcctgcaaagtctaaaatatttactatgtagctttttcttttctttttggagacagtgtgccactctattgcccaggctggagtgcggtggtgtgatcatggcttattgcagcctcaaactcctgggcttaagc

SEQ ID NO: 14134 - DNA, 221 bp, Homo sapiens
ggcgaattggagctccaccgcggtggcggccgaggtcaagcttcgacccacgcgtccgagaagagtttgcaaatgcaacaaaatatttaattaccggttgttaaaactggtttagcacaatttatattttccctctcttgcctttcttatttgcaataaaaggtattgagccattttttaaatgacatttttgataaattatgtttgtacctgcccgggcg

SEQ ID NO: 14135 - DNA, 444 bp, Homo sapiens
gactactatagggcgaattggagctccaccgcggtggcggccgcactttttttttttttttttttttttttttgccttcaacaaaaaaggaatttattggctcacataagtgaaagctgagaaatagatctcaattcaggtccaatttgatccagaagttcccaagggctccaatagactccctctcaccctggtacctgcccgggcggccgctctagaactagtggatcccccgggctgcaggaattcgatatcaagcttatcgataccgtcgacctcgagggggggcgccggtacccagcttttgttccctttagggagggttaattgcgcgcttggcgtaatcatggtcatagctgtttcctgtgtgaaattgttatccgttcacaattccacacaacatacgagccgggagcataaagtgtaaagcctggggtgcctaat

SEQ ID NO: 14136 - DNA, 480 bp, Homo sapiens
gactactatagggcgaattggagctccaccgcggtggcggccgaggtcaagcttcgacccacgcgtccggggaggacctaggcaacggcctgagactccgagactctatgttgaagatgcctggactaacctactgaagatacgtggttttaccaacagccagcaccaataggaagatatgaatgaagccatctgagaccagccatctggcagccaaactgccaactgactgcaaatgcatgaatgatcccactgacaccacgtagagcacaaatgagttgcctccactgagcccagcccaaattgttatcctataaaatcataaaaacataaacagttgttttaagtcaaaaaaaaaaaaaaaaaaaaaaaagtgcgacctgcccggggcggccggccgcccgggcaggtacccattaatttgctcagatatagcaggcttaatggttctatattttcaaaagtttttaagaatggttt

SEQ ID NO: 14137 - DNA, 480 bp, Homo sapiens
tatagggcgaattggagctccaccgcggtggcggccgcccgggcaggtacaaataagcccaccccactaggaactatgttaaaaaaaaattcaagaaagaatttaagggagattacagtgttactgtgacaccaggaaaacttagaactttgtgtgaaatagactggccagcattagaggtgggttggccatcagaaggaagcctggacaggttccttgtttcaaaggtatgacacaaggtaacccgtaagccaaggcacccagaccagtttttatacatagaaagttacagctgcttttatacccccttgccccgccaacgtagttaagagaacagcagcataagcggctggcagaggcaaggaaagaccagtagagagaaaaaaaggccatctataccaattctaagttaatttagactaaacaaggtcttaatagcaaaggataaatgaaatcccaaacttacaaggttttttaaca

SEQ ID NO: 14138 - DNA, 438 bp, Homo sapiens
gactactatagggcgaattggagctccaccgcggtggcggccgaggtcttcgacccacgcgtccgggtttcatgaatggaaacctaagtaaaactaagctcattagtgacagacttgttttcttcttgttattcctccagcaactccctcaccaccacgcctccctgcctaccatccccggaagggtgcttattctttaacaaagagaatctaaaaaaaaaaaaaagtgcggccggccgcccgggcaggtgagaaaacagaccatatttactcacataattcgccttctacctttcacctgcttatgtaataatttaacactgtagaggggacatggaggtgacggagtatttagtgggttccttgctcctggctgtgcagttcacaggccccacaggccttggccccagcatccccagcagggacagtggaagtgtc

SEQ ID NO: 14139 - DNA, 375 bp, Homo sapiens
actatagggcgaattggagctccaccgcggtggcggccgaggtactctgaggtcagtcaaactagctttagaaccttcatcttttgctttcttgggctttactttccaaaatggactacaggataatgaggcttttttaaaaaaaaaaaaaaaaaaaaaaaaaaaaaaaaaaaagtgcggccgctctaaaactagtggaacccccgggctgcaggaatacgatatcaagcttatcgataccgccaaccttgagggggggcccggtacccagatattgttccctttagagagggataattgcgcgcttgagcagcaatcatggtcatagctggttcctgtttgaaatagttattcgctcacaattccacacaacat

SEQ ID NO: 14140 - DNA, 414 bp, Homo sapiens
actactatagggcgaattggagctccaccgcggtggcggccgcacctgcccgggcggccgctcgaggccgcacttttttttttttttttttttttttttaaaaattcaaaaaattagtttattagcttaatataattaggtcaatggaatcctgttttgatctcaatacttcccatattgcaatatataaatgtgacaaattcagctgttttgtggcataaataagtgtctaagctgggcagttagtctacccgtttatagttcatgttcttcatggctttgcagcatttgtcactttctatgatgtgttcaaagaccataaacggccacacttgacctgtcagctggtccttgaacagctgtaggttttttttttgagacagagtctccctctgttgtccaggcttggagtgc

SEQ ID NO: 14141 - DNA, 489 bp, Homo sapiens
tactatagggcgaattggagctccaccgcggtggcggccgaggtctttttttttttttttttcttttgaaacaatttttctgaaatttatttctaaaagtcagagacaaaactttaggagtgacacatttatactaagcatacatgcgtgagcaaaaaaaaataagcacagaatacaaaaatgaaatagtaaaattttaatacagtattctgaatacaagtggaataccactagataagaattgtatttacctaagaaatctatgatagggtgggtggagataaaccagtttaggatagccacttgactattcacattttaatcagtgctgaccagaagctaaagcaattttttttaggctaagattggcaaaaaatcatagacccaattttccttgttatgaataaaatgaacatgttttaaggtgatttgccctcatttaacggtagctggagtaagtcaaaccacagagagcctttacaaagacta

SEQ ID NO: 14142 - DNA, 405 bp, Homo sapiens
acgactcactatagggcgaattggagctccaccgcggtggcggccgcccgggcaggtacaaaagggttcctctatatgccaactaattccaaatttttacttttactgcaaaaaaacctttttggcatcaaaactccattgtttctctgcactctgacaccatcatttcaaaggggctcacataaatgatcactactgctctctccctaatttttgaaaaaggagttttgagaataaaacagtgcttttattattagccaacacaaagtgtgagaaaatcattcctgagaattaacattttaagctaacagaaattcagtatacttaaaacataattatatttaatgagtcattatttggatctaaaacggacgcgtgggtcgaagacctcggccgctctagaac

SEQ ID NO: 14143 - DNA, 399 bp, Homo sapiens
tacgactcactatagggcgaattggagctccaccgcggtggcggccgcccgggcaggtaccagtttgagttgaaacggtatgtgacttccccagctgcgccctgggcagtgactgcatgcatcactgagaggtcctgtctacagcagataaaactccacagatcactcctcctgtaatccctctaagtgctccaaggcagcagaaaggcccagtgcattgaggctggaagcaggagcagagactctgggatatagtgcgaaagtctctttcccctgtagttgggctaatctggaaaaactcaaaaacctggcctgattaccgaggtttcttttatggatatttagtatttagataaaatttttacagtattcttgaaatgaacccaattaaacacatag

SEQ ID NO: 14144 - DNA, 402 bp, Homo sapiens
tacgactcactatagggcgaattggagctccacgcggtggcggccgaggtactttaatcccgtcttacagaagagaaaactgagatttagcaacataaaagtatttcccgtaagtaaacagtagagccaagatcttgacctacgccatctgatacctgagcccatgctataaaagaggagcattagaaatatttgaaagatagaaatgagaactagtcaatatttattttgcttagcactgtattcagtattatggcatcttaaagtagttaagactcaatatttcatcaaaaaagtttaaaatctaatcagagaatcggccgctctagaactagtggatcccccgggctgcaggaattcgatatcaagcttatcgataccgtcgacctcgagggggggccc

SEQ ID NO: 14145 - DNA, 403 bp, Homo sapiens
cgcgcgtatacgactcactatagggcgaattggagctccaccgcggtggcggccgaggtttgagtcgacccacgcgtccggattgatagctctttctcgattccgtgggtggtggtgcatggccgttcttagttggtggagcgatttgtctggttaattccgataacgaacgagactctggcatgctaactagttacgcggacctgcccgggcggccggccgcccgggcaggtgcaagattcctgatcggtatacagtgatgtatttactaaacagagacctgtgcagaaattacatactatccatctagataggttgttacacttttgcctattgatggaatagttccatttatcaagttttatacatcaaaaagcttttgaagttcaccagactgtccatt

SEQ ID NO: 14146 - DNA, 183 bp, Homo sapiens
agggcgaattggagctccacgcggtggcggccgcccgggcaggtactgtaaatctactgtaatcctgttttgcagaatactgcacgacggagattgagaagtgagagctcttatgacatagataacattgtgattcccatgtcattagtagccccagctaaattagagaaactccaatataag

SEQ ID NO: 14147 - DNA, 371 bp, Homo sapiens
ctcactatagggcgaattggagctccaccgcggtggcggccgattctctgattagattttaaacttttttgatgaaatattgagtcttaactactttaagatgccataatactgaatacagtgctaagcaaaataaatattgactagttctcatttctatctttcaaatatttctaatgctcctcttttatagcatgggctcaggtatcagatggcgtaggtcaagatcttggctctactgtttacttacgggaaatacttttatgttgctaaatctcagttttctcttctgtaagacgggattaaagtacctcggccgctctagaactagtggatcccccgggctgcaggaattcgatatcaagcttatc

SEQ ID NO: 14148 - DNA, 374 bp, Homo sapiens
cactactatagggcgaattggagctccaccgcggtggcggccgcccgggcaggtaccagtttgagttgaaacggtatgtgacttccccagctgcaccctgggcagagactgcatgcatcactgagaggtcctgtctacagcagataaaactccacagatcactcctcctgtaatccctctaagtgctccaaggcagcagaaaggcccagtgcattgaggctggaagcaggagcagagactctgggatatagcgcgaaagtctctttcccctgtagttgggctaatctggaaaaactcaaaaacctggcctgattaccgaggtttcttttatggatatttagtctttagataaaatttttacagtcttcttgaaa

SEQ ID NO: 14149 - DNA, 379 bp, Homo sapiens
tacgactcactatagggcgaattggagctccaccgcggtggcggccgaggtactcccatttccctgaaacaagcagccagcaactatctcagaaatgtgtcatttttactggttataattcttaaaaagcttgttttcctaagatatgaaatgcctgccagtatacaaactgttgtaactacttccctttttgcttttagcggggaaaaaatagcttaatgacagcatagaatcatgtagtaaatataattcattttttgaaaggttcagctatatcctcttccatttgtttattttaaatgatctaattgcaaacatgtcatcactcccttgatgtttacctccttgttatgcatttttagcaggctttattgtcacc

SEQ ID NO: 14150 - DNA, 400 bp, Homo sapiens
gcgtatacgactcactatagggcgaattggagctccaccgcggtggcggccgaggtcctagcttgagtcgacccacgcgtccgatttttgcctccagactacagatcagaaaactgagactcagaatgtttcaattccttgtttaagatcacaaaactagtttgaggtataatggaaactgaaaaaaaaaaaaaaaaagtgcggccggccgcacttttttttttttttttttcaatattatttatcaaaataaatttattaaaagtattcaaagaccacttcaaagtgtagctgccttcaagacagatttttggcactcataacggacactgcagttttcaacaccatagcactcattctatttcacacatcatttttaacaatgcaaacacggaccatt

SEQ ID NO: 14151 - DNA, 328 bp, Homo sapiens
ctcactatagggcgaattggagctccaccgcggtggcggccgaggtgttagttaccacttcattactggagggcactgtcacaaacttctgactatccagacttgaagctggaagcaaatacaagtctgaggggctctaagctgggaggttctggcctctccctagctctctatggctctacctctctgcttgaagctccctgcactgcactcccattactctgactggggataggaccactgctgacagggccccacctcaacttctttcattgccctcttccaggaaatcccaccctgggatacttaaaagacctcatatgctaca

SEQ ID NO: 14152 - DNA, 364 bp, Homo sapiens
agggcgaattggagctccaccgcggtggcggccgaggtgattcagcaggtctggggtgggactgagagcttgcatctctaacaagctcccagcgaggctgatcctgttgctccagggaccacaccttgagaaccactggttgggcattgatgaggtcaaccaggagaagcagtgtcccctagaactggcaggagagaaaggacaaggctaagaaacagtgaacaggagtcaagtaaatgcagctgccaacaggcgggggtccttgagttcacattcttggttccaggtgacgtttcctgggagtcaacaacccttctcctatgaaaaagaaaagggccagacacagtggcacacggctgtaacc

SEQ ID NO: 14153 - DNA, 392 bp, Homo sapiens
ctactatagggcgaattggagctccacgcggtggcggccgaggtacatgtccctaaatatttaactgttacttgtaaacttgtgtaatttattatttattttaatcaaaattctgaatatttcatttaaatgaaagttgcaaaaaaaaaaaaaaaaaaaagtgcggccggccgcccgggcaggtacatacctccttgcacaaatggaggggaattcattttcatcactgggagtgtccttagtgtataaaaaccatgctggtatatggcttcaagttgtaaaaatgaaagtgactttaaaagaaaataggggatggtccaggatctccactgataagactgtttttaagtaacttaaggacctttgggtctacaagtatatgtgaaaaaaat

SEQ ID NO: 14154 - DNA, 402 bp, Homo sapiens
atacgactcactatatgtgcgaattggagctccaccgcggtggcggccgaggtactcaatctaatccaaaattttctttcttagcaatctattttctgtatttagaaaaatgttttttatttcaaagagcctctcaaagagcatttcacgtatcttttactgtttttctctccacctccaaggggtctgtctagatcagtgcggacgcgtgggtcgaagacctgcccgggcggccggccgcccgggcaggtactgaggacaaatcagttctctgtgaccagacatgagaaggttgccaatgggctgttgggcgaccaaggccttcccggagtcttcgtcctctatgagctctcgcccatgatggtgaagctgacggagaagcacaggtccttcacccacttc

SEQ ID NO: 14155 - DNA, 391 bp, Homo sapiens
gactcactatagggcgaattggagctccaccgcggtggcggccgaggtacatatcacacatttccaaatttgagaccactaatgttttttaatttcaaatatgtatataaatatgtattcttatttccaattatttccttggcatgaattcctagaaattgatctatttagtataagtgcttttttagctatatgtccactagtatggtatgagaatgccctgtttatgccagtattatcatcattgaatatattactgctgatgttgtggtaatacatttaaaccaatgtgatgggcaaaaaaattatatttttacttacatctttaaaattactggtgatctctgttattgacaagctgggcataaaaaagtaaattaatagaattact

SEQ ID NO: 14156 - DNA, 395 bp, Homo sapiens
gtaatacgactcactatagggcgaattggagctccaccgcggtggcggccgcccgggcaggtcggacgcgtgggtcgaagcttgtacaaaaacccaagtatcacctgaattacaattattcttaaaatttgtccttaaatagcttactcttggaagatttgtttctatgtagacattatggtaaaagttactctgaaactcttttctttagttatctgtttattctgagctcaacaagattgaagtaagttttcgggagctacagaaattaaatcaagaaaagaataatagaggattatattcaattgaagtgctggagctcttctgatattatcaattctccttcatagacattttataaagctcttttatgtgaactcttgcttcatccaggc

SEQ ID NO: 14157 - DNA, 352 bp, Homo sapiens
ctcactatagggcgaattggagctccaccgcggtggcggccgaggtcttcgacccacgcgtccgttttagatccaaataatgactcattaaatataattatgttttaagtatactgaatttctgttagcttaaaatgttaattctcaggaatgattttctcacactttgtgttggctaataataaaagcactgttttattctcaaaactcctttttcaaaaattagggagagagcagtagtgatcatttatgtgagcccctttgaaatgatggtgtcagagtgcagagaaccaatggagttttgatgccaaaaaggtttttttgcagtaaaagtaaaaatttggaattagtt

SEQ ID NO: 14158 - DNA, 404 bp, Homo sapiens
cgtaatacgactcactatagggcgaattggagctccaccgcggtggcggccgaggtgattcagcaggtctggggtgggactgagagcttgcatctctaacaagctcccagcgaggctgatcctgttgctccagggaccacaccttgagaaccactggttgggcattgatgaggtcaaccaggagaagcagtgtcccctagaactggcaggagagaaaggacaaggctaagaaacagtgaacaggagtcaagtaaatgcagctgccaacaggcgggggtccttgagttcacattcttggttccaggtgacgtttcctgggagtcaacaccccttttcctatgaaaaagaaaagggccagacacagtggcacacggctgtaaccccagcactttggggaggctgaa

SEQ ID NO: 14159 - DNA, 393 bp, Homo sapiens
tacgactcactatagggcgaattggagctccaccgcggtggcggccgcccgggcaggtgcctaatatatttactctctggtcctttacaggaaaagtttgccaacctctggcttagatgatcacctgaggccaaggagcctcgcccttgagcacaagactatgtagtcagtaaagcacaaacaaaattggggctttccctagcaaggttggaaaggcggagaagaaatggatttggataggtagtcaacaatgtctgttttatgttaccacacattttctcgagaaatttcaatcagctctctgagaacagattcatctttaaatgaatgttcataggtaacagcaactcatgcatcaatgttgcaaagtgagctcattttcacattgcttca

SEQ ID NO: 14160 - DNA, 182 bp, Homo sapiens
  misc_feature 154, 155, 165, 172, 173: n = A,T,C or G
gcgtaatacgactcactatagtgcgaattggagctccaccgcggtggcggccgaggtcaagcttcgttccacgcgtccgggaaaaacggggttactagtagccgcccatagcctgcaacctttgcactccactgtgcaatgctggccctgcacnngctggggctngttgccnncctgccccc

SEQ ID NO: 14161 - DNA, 394 bp, Homo sapiens
cgcgcgtaatacgacctcactatagggcgaattggagctccaccgcggtggcggccgcccgcgcaggtctactcaagtagtctttaccccctactcaagtagggggtaaagggtagaacatggagtttgatctgtgttcaacatgattgcgaaccatcaattgagataactcactaccttcaggccagccagttacatacttttgaaaagccaagagtgaagcatggttgatttgcatccaattcttgaactttttgttaaaggcagcaataagatagggtggctccgggcaatcacttagctaattggctctctatagacatacctggataatatctgtagtcatacctggataatatttaagggtagaaactaaacatagtccttaagtagg

SEQ ID NO: 14162 - DNA, 398 bp, Homo sapiens
gtaatacgactactatagggcgaattggagctccaccgcggtggcggccgaggtcttcgacccacgcgtccgttttagatccaaataatgactcattaaatataattatgttttaagtatactgaatttctgttagcttaaaatgttaattctcaggaatgattttctcacactttgtgttggctaataataaaagcactgttttattctcaaaactcctttttcaaaaattagggagagagcagtagtgatcatttatgtgagcccctttgaaatgatggtgtcagagtgcagagaaacaatggagttttgatgccaaaaaggtttttttgcagtaaaagtaaaaatttggaattagttggcatatagaggaacccttttgtacctgcccgggcggc

SEQ ID NO: 14163 - DNA, 404 bp, Homo sapiens
gcgtaatacgactactatagggcgaattggagctccaccgcggtggcggccgaggtgtacaagcttcgacccacgcgtccgggatgagtttgtatgtgtaaagtgcttgaaacagtgcctgccacatactaagtgttggataagtgtttgttattaaaaaaaaaaaaaaaaaaagtgcggccggccgcccgggcaggtcagatgattgcagaatttatgtgattactgggtactctaatggtaaggagaaattaagaccagctagttgttaatcttaacttttagtcattaaggagaatttccaagacaaaactgcaatccagctgcttacctaggaatacggcttaggctgaaaacttctatcgtcttagaaatgggaataaacctcaggccgcccgggcagg

SEQ ID NO: 14164 - DNA, 559 bp, Homo sapiens
ggcgaattggagctccaccgcggtggcggccgaggtacagtaatcctgtgagaaagacaggacagaaaccactgtgcctattttacagatacgaaaactgaggcacaggtaaaggggcttgtctgtagtcccatagctagcagatggctggagccaagactgaggctcgttcttcaatgctgagccagggctccttccgctgcaccacaagaacgctagaccactcgccaccagccttctcattccctcttcctccattctaatcatttctagctggctggcctccacagagcataggaaaacagccagggccgggcacggtggctcatgcctgtaatctcaacactctgggaggccgagccgggtggatcacctgaggtcaggaattcgagaccagcctggccaacatgttaaaaccccatctctactaaaaatataaaaattagccaggcatggtggcgcacacctgtaatcccagctactcaagaggctgaggcaggagaattgcttaaatctgggaggcggaagttgcagtgagccaagatcgcgccactgaact

SEQ ID NO: 14165 - DNA, 572 bp, Homo sapiens
ggcgaattggagctccaccgcggtggccggccgggtccaaaagaaagacaaaagggttctcttggaaacaagaagagtgactccagatgtggcctgaataattgccatgttaagttaatgcaaaagatcagaacagggctacatttgcacaggcagtttctctccgggccgtagttttcactgatgatcacctttcacagcattttccccaaccagcatttcacttagtcttctctatacccagcacctcccccggcacccccggcaagcccactatcacttccgacttccaacgtggcatccgtgagatctgtccacattaggcgaagcaggagaacactgagagcagcaggatgggtttggaaagagcatgcctctggaaacacagcttcctgggaattcacatgaggccagtcctacagagagcaagatgcaccccaggatttcttcattttctaatagatgtgggagtgctccattttccccgacagcgaatttcccctgagaaacgatactagaccctgggtttgcccaccttgtaactcttccttatctcctccttttcatcccta

SEQ ID NO: 14166 - DNA, 583 bp, Homo sapiens
  misc_feature 549: n = A,T,C or G
ctactatagggcgaattggagctccaccgcggtggcggccgcccgggcaggtacatcaccctgctgagggacatccaggacaaggtcaccacactctacagaggcagtcaactacatgacacattccgcttctgcctggtcaccaacttgacgatggactccgtgttggtcactgtcaaggcattgttctcctccaatttggaccccagcctggtggagcaagtctttctagataagaccctgaatgcctcattccattggctgggctccacctaccagttggtggacatccatgtgacagaaatggagtcatcagtttatcaaccaacaagcagctccagcacccagcacttctacctgaatttcaccatcaccaacctaccatattcccaggacaaagcccagccaggcaccaccaattaccagaggaacaaaaggaatattgaggatgcgctcaaccaactcttccgaaacagcagcatcaagagttatttttctgactgtcaagtttcaacattcaggtctgtccccaacaggcaccacaccggngtggactccctgtgtaacttctcgccactggctc

SEQ ID NO: 14167 - DNA, 518 bp, Homo sapiens
ctatagggcgaattggagctccaccgcggtggcggccgaggtacactgtaaatagcctttaccaaacgtgtttgacaaggaccataattaacatcacttagtgaattgtgataaagaaaaaaaagccatgatttattcgatgtgattggcttgtttttatgtggcgccaagaacgaacctgtttagcagctgtaaccaatggtacgcgggggaggcgaacaatggcggagctgggcgaagccgatgaagcggagttgcagcgcctggtggccgccgagcagcagaaggcgcagtttactgcacaggtgcatcacttcatggagttatgttgggataaatgtgtggagaagccagggaatcgcctagactctcgcactgaaaattgtctctccagctgtgtagaccgcttcattgacaccactcttgccatcaccagtcggtttgcccagattgtacctgccccggccgctctagaactagtggatcccccgggctgcaggaattcgatatcaagctta

SEQ ID NO: 14168 - DNA, 584 bp, Homo sapiens
ggcgaattggagttccaccgcggtggcggccgaggtactttgggagaccacccccagctatggttccatacacttatactgcgcccagctacaggttgatacacttggggcaaactatctgataaaatagagaaaaaaatcttatttactatagcattacataataaatttctgagaaaaaaattaaccagggatgtaaaaaacctttacaataaaaaataaataaaaaaggaagatccaaataaattttaaaatattttatgtctttggattgaaagaataaatattaataaagtgccatattatccaaagtgatctatagattcaatacacttcctatcaaaattgcagtatttttttcacagtaatggaaattcaattctaaaatttacatgaaactaaaataaactttgaatagccaaaacagtcttgaggaaaaggaacaaggcagaagaatatcatacttacaatttcaatctatatttgaagactttatagaaataaaaacagaatggactgtgcagaaaaataaacaaaaaatgcaagataaactaatactctcacgcatttcagacctgatgcaa

SEQ ID NO: 14169 - DNA, 388 bp, Homo sapiens
ccctcactaaagggaacaaaagctgggtaccgggccccccctcgaggtcgacggtatcgataagcttgatatcgaattcctgcagcccgggggatccactagttctagagcgggcgcccgggcaggtacgatgggaggacagctttgtagaaaggacattatccagctaatagcaaactttgtggatcccaatccgagatttccctgctgaaagacaagaagtatctcatataaaagtgctgtagcagtatttgtatactccagaataagcttctgtaattcttagctgccaatgtgttcaggcgtgatgactcggtttctgtttctctgaacatcaatactagggtctgtataatttcaatgcatgccaccagctcatcaacccttt

SEQ ID NO: 14170 - DNA, 562 bp, Homo sapiens
attaaccctcactaaagggaacaaaagctgggtaccgggccccccctcgaggtcgacggtatcgataagcttgatatcgaattcctgcagcccgggggatccactagttctagagcggccgaggtacaatcagaatgctgcattctccagccataaagatcgctccctcttcttttcaaacatccctgtccctcaaggtctagctcaagacggtcaccttaagaaaagctccctttgtcgagcagtgactccataccaggccctgctttaaacgctttatctgcattatcttacttgattctcgcaatagccctgggtggtaggtgcaattattatctccagtttataaaagaagatactgagggtcagagaagttaagtgaccggctcaaggtgtcacattcagtaagcgttgaaggggcctgtgttggtctgtccttgaagatgccccctaccactacactttcaatgatttctgccttgaacctggccccatgactaaaaacctcacgtcaaactcaggcagcaataacgggaaggcttggtgccttccatcactggag

SEQ ID NO: 14171 - DNA, 443 bp, Homo sapiens
aaccctcactaaagggaacaaaagctgggtaccgggccccccctcgaggtcgacggtatcgataagcttgatatcgaattcctgcagcccgggggatccactagttctagagcgggtcaaacctcctatgctttccttggcatcggctacacatcatagtattcattgcctccttgaggtcatcttgcagcttggacagaaactcatttactgaccggctcagctcattctctgccattcgtttcatctcatactcctttcgcttttcagcattgctgacaatgtcccaagctgctcgcaaaaccttgaaggcctcctcagcccggggatgatgatttttgtcaggatgaaccatcactgccagctgtctataggccttcttcagttcaacaatctgatgctgtggccttaacccccagtaccttggccgccaccgcggtgga

SEQ ID NO: 14172 - DNA, 554 bp, Homo sapiens
  misc_feature 497: n = A,T,C or G
ggcgaattggagctccaccgcggtggcggccgaggtaccttgaactgatttccccaaatggctctttgtgcagccgcagcagctgttcagacttatgagcagacaggaactgccagagggcaatggtgtgttttaactggcatctgtttaaggcctttaacacgtgaatcgtctgatcacccatttgcaggatgtcttgagtatacacattcagctgcatgtttggatccccaccagctgtgctcagaaaccccagagtgacttctacgacagacagcacttcacaggcatcgctgtaggactgcagctgtccactgatggcactaatgaccgagctggggagggagtcctgggaaatgaaaagcaggagagggatgtctgtgggctgggtttctggcatctcaccacctggtaagagagccgagccccttcactgcccaagccacatgcggggggccaactctctaacagctgacacttgggcgcacggtgtgcangcagttcctggaggccatggagacacacaggtctacctatcagtacctgcccgggcg

SEQ ID NO: 14173 - DNA, 507 bp, Homo sapiens
ctatagggcgaattggagctccaccgcggtggcggccgaggtacttgggccagggctgcaatcagtgattcagccgactgctctttgagtccagatgttgatccagttcttgcttttcaacgagaaggatttggacgtcagagtatgtcagaaaaacgcacaaagcaattttcagatgccagtcaattggatttcgttaaaacacgaaaatcaaaaagcatggatttaggtatagctgacgagactaaactcaatacagtggatgaccagaaagcaggttctcccagcagagatgtgggtccttccctgggtctgaagaagtcaagctcgttggagagtctgcagaccgcagttgccgaggtgactttgaatggggatattcctttccatcgtccacggccgctctagaactagtggatcccccgggctgcaggaattcgatatcaagcttatcgataccgtcgacctcgagggggggcccggtacccagcttttgttccctttagt

SEQ ID NO: 14174 - DNA, 558 bp, Homo sapiens
ttgagctcaccgcggtggcggccgaggtacatcaccctgctgagggacatccaggacaaggtcaccacactctacaaaggcagtcaactacatgacacattccgcttctgcctggtcaccaacttgacgatggactccgtgttggtcactgtcaaggcattgttctcctccaatttggaccccagcctggtggagcaagtctttctagataagaccctgaatgcctcattccattggctgggctccacctaccagttggtggacatccatgtgacagaaatggagtcatcagtttatcaaccaacaagcagctccagcacccagcacttctacctgaatttcaccatcaccaacctaccatattcccaggacaaagcccagccaggcaccaccaattaccagaggaacaaaaggaatattgaggatgcgctcaaccaactcttccgaaacagcagcataagagttatttttctgactgtcaagtttcaacattcaggtctgtccccaacaggcaccacaccggggtggacttcctgtgtaacttctcgccactggctc

SEQ ID NO: 14175 - DNA, 438 bp, Homo sapiens
aatacgactcacttagggcgaattggagctccaccgcggtggcggccgaggtacaaatagataccttcaaggagaatgaaaacggggaatatactgagcacttacactcggccagctgccagatcaaagttttcaagcccaaaggtgcagacagaaagcaaaaaacggatagggaaaaaatggagaaacgaacacctcatgaaaaggagaaatatcagccttcctatgagacaaccatactcacagaggtaaaaagatttcttttggtgacaatttcagttcataatttttaatcttaaaaattcatcacttccaaactggtcagaatttacttctcctaagccttgagggacacagtatcacatggattctgtgtccagcggccttaacaggaagattgctttagaatttggcacgaaccatgccactgtctctgtg

SEQ ID NO: 14176 - DNA, 437 bp, Homo sapiens
ctatagggcgaattggagctccaccgcggtggcggccgacggggcaggtactcggggacactggaaactggtgaggggcccatcattgctggatttgtatttaacattatgtttcacccagacaacagctcagagaactgggcaatggctgctcatgtgttgagccggggcatacaggatgaagagggacaatgagagggaatgaattctattctagacaccctgagtctgaggagcctatggaaatgtccaggaggcaactaaatgaaacagcctgtggtagacagaataatggccccaaagatgtctacagcctaatcccaggagcctgtgaaaatgttcccttcgcatggtaaagggatgtggcagatatgattaagctaaggatcttgagatggagagtttatccaggattatccaggtgtgcccagtataat

SEQ ID NO: 14177 - DNA, 430 bp, Homo sapiens
tatagggcgaattggagctccaccgcggtggcggccgaggtacgcgggacacagggtcctgtgcaacagggaggactaacagtaacaccgccacgccggcagcaaagctcattttggtccccgccccgttcctctttctctttttaactccttccctctttgcggattctagaacggaacctttttttaattcttcccagtagaaacgtaggaacaatttcgtgaacgcaatgcggagtgcccaacatggcggcggccgctctagaactagtggatcccccgggctgcaggaattcgatatcaagcttatcgataccgtcgacctcgagggggggcccggtacccagcttttgttccctttagtgagggttaattgcgcgcttggcgtaatcatggtcatagctgtttcctgtgtgaaattgttatccgc

SEQ ID NO: 14178 - DNA, 528 bp, Homo sapiens
gcgaattggagctccaccgcggtggcggccgaggtacccctgtttaacaaggggtaggggccttctgagactgtttcctctacagagtaagggttcgttcagccttttccgtggcctgccaagaactcaactccatgttccctcacttcctgtaattgaccttgtccaggactttctgaccttggagaattcacctttgctctttctgctgcttcgtgcattcttccaccaaatgtctaactgactggctcctttccaaactcaaggctttgccaaatgccaccagctcagggaggcctttcctggccatgacacttgaagttgcaacactcccccgcagtctcccgtgccccagatgtaagttccatgagggcaagccctgtgcttttaccaccatatccccagcatcttgagctgtgcctggcccaagaaatatttgttgaatgaatgaatttaaaggggatattatgaaggcttacacattctcaatggtttacaggttataatgtgcttcgctacacatttttc

SEQ ID NO: 14179 - DNA, 525 bp, Homo sapiens
cgcggtggcggccgcccggcaggtacttttttttttctttttcttttttttttttttttaagtttttgggatcgtgtctcactcctgttgcgcatgcctgtagtcccagctactcaggaggctgaggcaggataattgcttgaacccgggaggtggaggttgcagtgagccgagatcatgccactgcactccagcctgggcaacagagtgagactttgtttcggaaaaaaaaaaaaaaaagatctggcggatgaaaataaccagaatgaaaatagctagaaaactcagcaagcaggaagctccccttctcacccttttgttcccttgccgatagaatcagtcactattagaaaaaatgaaagacgctctgtttaaaacaatgatgacagcagtacctcggccgctctagaactagtggatcccccgggctgcaggaattcgatatcaagcttatcgataccgtcgacctcgagggggggcccggtacccagcttttgttccctttagtgagggttaattgcgcgc

SEQ ID NO: 14180 - DNA, 527 bp, Homo sapiens
cgcggtggcggccgaggtacttccctttaagagatgagtcacgcaactgaaacttctctatttcttttcttttctgattgttctccagaattaggactagtaacagtcctgaagtgttgtgtgtccttatctagaaaactcagtatcttcccttccgtttgtcttaaaatattagtacacgctttctcaagcctagccgattagaaggggctgccgggcttccaccacacctcatcgagggaatggtttctgggtggagatgctcatggaaatcactgagcccatgccactcacgtggcaaggcccgcgtacctgcccggcgctctagaactagtggatcccccgggctgcaggaattcgatatcaagcttatcgataccgtcgacctcgagggggggcccggtacccagcttttgttccctttagtgagggttaattgcgcgcttggcgtaatcatggtcatagctgtttcctgtgtgaaattgttatccgctcacaattccacacaacatacgagccgggagcat

SEQ ID NO: 14181 - DNA, 544 bp, Homo sapiens
  misc_feature 450: n = A,T,C or G
agctccaccgcggtggcgtaacttatctcattttagataagtttgcaaagagagttggtggctaaggccatagcttatcctcctgacccctaccttcccacgttctttccaagagattctcctgaggaataacacttgcaagggagttcctgatgaagtggattcttgttattctaggaataggcctacatggtgcactggcaatgtgagattatacctcagcattttcaaagagcataaaaatctagagctgtggggtttaaaacatgacaaacctaattttagtaggcagacaaatattaaatttttcccctacccttgtttctacatcggtccattcagactctgcaccatctggttgggcaggtgctactgtggaagatcttcgttttcgactaccatttggtgattcttgctctaaagtctcaatatcagtaaactgaacagatngtccaccaccccttgttttataaatatcacccttaattagtttagtttcaatctccccatcggaggctagttcctggtgggtcagcatgtacct

SEQ ID NO: 14182 - DNA, 554 bp, Homo sapiens
  misc_feature 58: n = A,T,C or G
actacttagggcgaattggagctccaccgcggtggcggccgcccgggcaggtactttnttttttttttttttttttttttggagccaaaattgtgtgcattcctactgggaaacacagtggccaaatccttttgaattgtttccttctagagactttaactcttctgactgcaaatcttagtgtcctgtgagtattagttgattaattatacttgctgcttagtgaaatacagccagctataggtatcttctggagtagctcaacacaacttttctcttgctagagtgactcttgctaacagaacccaaagatgcgcacatatacccacaggagctggaggtccctcgcatgctcctctcgtgccagcctttgccttacccttcactctctccctccaggagccgtcggtacctcggcgctctagaactagtggatcccccgggctgcaggaattcgatatcaagcttatcgataccgtcgacctcgagggggggcccggtacccagcttttgttccctttagtgagggttaattgcgcgcttggcgtaatcat

SEQ ID NO: 14183 - DNA, 634 bp, Homo sapiens
  misc_feature 544, 606: n = A,T,C or G
cactacttagggcgaattggagctccaccgcggtggcggccgaggtacaagatttgtcttgctcacctcttaccaaatccaagaatggtttctatccagtgaatggcaaattcatctgataggtaagggaataatgggtcaaaatggtagcaaacacttctttcaaatttctactaaaagacttgctgttgtttttcttataaaggggcaatttcatcaacatacatcttttaaaggaatctctagaaatttgagtgactttttggccataatcctgtttgatatatttttggtcagctgctcaaaacaaacattctccttgtaaggttatctatctgaaagatactaattcatttaaagcagctgcaggtgaacaacctaaagatgacatgatttgggagaagaggaaggcagattactgaactgacaagtgacccaaagcataattaggtttgtgcacatggtagcatggaggttccacacctaccttctacagcgtattaaaataagaatattgtctttgaaacatcttctagcacctttntaataaaacaaaatttcccatcttcaattctatttttttcccaaatctacctttaaaaaatngtctttcaaaaatacaccatagacgagg

SEQ ID NO: 14184 - DNA, 523 bp, Homo sapiens
ctatagggcgaattggagctccaccgcggtggcggccgaggtacaataaacagggaatgagaactatttacatggaagtttctttctcatgatgcggtggagaagcctcggccacttggttctgccagatgttcctggggttactgtaaatgggaaggacaggcagagctaaacaaggtaggagaatcgccccccttttttgaatgtttaaagagtttgctgcagtatgctgcattccatgtgtgctgcttacgggagccagggaaactggattccactaattcaattgtaatacttgcgggggaccctggagttttacgtaacattttgatttgtgataaaaaaaaaaaaaaaaaaattgttcctgcccgggcggccgctctagaactagtggatcccccgggctgcaggaattcgatatcaagcttatcgataccgtcgacctcgagggggggcccggtacccagcttttgttccctttagtgagggttaattgcgcgcttggcgtaatcatggtcatagc

SEQ ID NO: 14185 - DNA, 624 bp, Homo sapiens
ctcacactacttagggcgaattggagctccaccgcggtggcggccgcccgggcaggtactgccaggcatgctcctgccttgggcagagtgtatatgtgtgagtgcacctgcccttcccacagcctagaacgttcctcctccagacagcacatatggcctgctctctcacttccttaaggtctttattcaaaagtgactttctcagtgaagccctgtctgctcaccctgcgtaaaatttcagctcttctttctatctctcttcccagattttttttctccttcatgttcgttggtgtctaaggtttatcatctatttcgctaatggtcagtagaatgtaacctccacgtaagcaaggagttttgtctgttttgttcatgtctatgtccttagtgcctggagcattccctagtatgcataggtgctcaataaatgtcagttggattaatggctgaaagaaaggtcaccgctataaggatggagtcagagaacaaacacagttaattcctggtccactgtttttgcttccactaaattgtatttggtctacggcttctccgcttgccctggaaccctgctcagaacactgctcccttctccttcttcttctccctccggataaattc

SEQ ID NO: 14186 - DNA, 564 bp, Homo sapiens
acgactactatagggcgaattggagctccaccgcggtggcggccgcccgggcaggtacgcggggggcgtggtcagagcgagcttcggagaagcagtggtgggttccatgtgatggtggagtaggaggcaggtctccgcggttcatctgtgttgctctaaatgacactgtttcattattttgatggctggagaatatttcctagtgtatgtatatgagagtttcttgatctctttatctgtggatgaacagctactttgaaacatatggtacctctgtggtcagaccatttgccaagcttgtgaggcctcctgttcaggtatacggtattgaaggtcgctatgccacagctctttattctgctgcatcaaaacagaataagctggagcaagtagaaaaggagttgttgagagtagcacaaatcctgaaggaacccaaagtggctgcttctgttttgaatccctatgtgaagcgttccattaaagtgaaaagcctaaatgacatcacagcaaaagagaggttctctcccctcactaccaatctgatcaatttgcttgctgaaaatg

SEQ ID NO: 14187 - DNA, 597 bp, Homo sapiens
actacttagggcgaattggagctccaccgcggtggcggccgcccgggcaggtacgcgggtgctttcatagccgcggacacaacttgggcccacagttaacgaggaggaaggcagagcgtgctgagcagagcaccaaggaagagagctcggctagccgggaaggtccgaatggatttatttggtgaggccaaggaacccactgcctccacggtgttcctccaggaggctcctcccttcactaaggcagcaaggagtgcactggtgaggggaagaattgttgtcatcctttctctacgactccaagagaaactttatactggaggaagaatattctaccactttgggatgcttccaaagaaatgggataccaaaggagtgaacttcaggtcattggaagtggccaagctggaggcgacctatggagacatgaccttcagttcttcctgagatcgataaagcaaaaaaaaaaaaaaaaaaaaagtacctcggccgctctagaactagtggatcccccgggctgcaggaattcgatatcaagcttatcgataccgtcgacctcgagggggggcccggtacccagcttttgttccctttagt

SEQ ID NO: 14188 - DNA, 290 bp, Homo sapiens
tactatagggcgaattggagctccaccgcggtggcggccgcccgggcaggtaccttattacatatgatttttattagtttctggaggcaaatttaatttttattttaaaatcaaaatctattttaaaagaaatagttctcaaaaagacaacgatgactgggtgtggtggtgtgtgcctgtagttcaggctgctcgggagacagaggcaggagaaccacttgaggccagttcagtctagcctgggtaacatagcaggaccctgtccctaaaataataaaaaatttaaaaac

SEQ ID NO: 14189 - DNA, 509 bp, Homo sapiens
  misc_feature 436: n = A,T,C or G
gactactatagggcgaattggagctccaccgcggtggcggccgcccgggcaggtactagggtgctcctggtgctgtaggtgcccctggtcctgctggagccacaggtgaccgggtaagcatgcattttcactaagccaacagcaatatctaaaatttcccgccttccctagtcccaaagagccccagcaattcatttttatggcttggtataaagcctacttatttaaaaacctagctattgtgatagagcagcaggaaacaaatgctgtgtgtttaaaattacttttcccttcctatagatttgccagctatctgatctatactctaatccctagcatttgttttaaagtctctccatgttgcgcattaacaatatcctaatgcactgaggcttctcaaagccttcaattattaccggaaaaaaaaaaaatattnaaggtacctcggccgctctagaactagtggatcccccgggctgcaggaattcgatatcaagcttatcgatacc

SEQ ID NO: 14190 - DNA, 533 bp, Homo sapiens
ctatagggcgaattggagctccaccgcggtggcggccgcccgggcaggtacaaagaccaattccttcctaacctggattccactgtccttggtgaaaactactttgatggaacctaccagatgctttatcttttggttaaaggaactatacctgttgaaattcacactgccacagtgatatttgtttctttccaattatctgttgcaacagaagatgacttttatacctctcacaatctggttaaaaatcttgccttgttcctaaagataccaagtgacaaaatccgtatcagcaaaataagagggaagagtctgaggaggaagagatccatgggattcataattgaaatagagattggagaccctcctattcagttcataagcaatggcaccacaggtcagatgcagttatctgaactccaggaaattgctggttctcttggacaagctgtaattttaggaaacatcagtagtatccttggatttaacatttcgtccatgtttattactaatgcccctccccagcccaagtg

SEQ ID NO: 14191 - DNA, 476 bp, Homo sapiens
ggcgaattggagctccaccgcggtggcggccgaggtacgcggggagagtcactcctgccttcaccatgaagtccagcggcctcttccccttcctggtgctgcttgccctgggaactctggcaccttgggctgtggaaggctctggaaagtgtaagttggagtcactctggtctaatctgggctgcagggtcagaggtggggtctccttgtggtgtgggtgtgtccccttctgtaggctctgatccctcagcttagtttcgggagacctccctgagggtggaatacatgtctggctgggctccaaggtttgtgtggcagtttgagcttctggaaatgcttcctctatgcagccatgctgtcagcccaggtcccactctctctctctctctctctctctctctctctctcatactctgccttcttcttcacctgtctgcgactcttaaaaaaaaaaaaaaaaaagtacctgcccgggc

SEQ ID NO: 14192 - DNA, 536 bp, Homo sapiens
cgaattggagctccaccgcggtggcggccgcccgggcaggtactcttaatccaagacaaaagaatagctcctttcagagttctcatcatttcttcaccccagccttaatgggtatattccttttccccaggtgtccagagttttccagaattgtcccaaggctcagtccacaccagttcttctccagtgtgctctcctgagaggccaggcacactcaacaattatctagatgagttcccacttctttccaagtgaaggttctgctatcctagcatagtcagaataagttaaattatgtctcttaagaggcactgttccactccttttcaaggtgtgtggcatatttgaaatatgtgacttaaaagtctacagtctcttaccaaaagccttgggccaaatacatgtcaaaattcagaattttccagattttagaaaagtgacccatataccattacattgcataaaaccctgagcaatgtatggggaagcacctgtgaccaaacattagatttttgcagtgaaacatatgaatattt

SEQ ID NO: 14193 - DNA, 573 bp, Homo sapiens
ctatagggcgaattggagctccaccgcggtggcggccgaggtacatcaccctgctgagggacatccaggacaaggtcaccacactctacaaaggcagtcaactacatgacacattccgcttctgcctggtcaccaacttgacgatggactccgtgttggtcactgtcaaggcattgttctcctccaatttggaccccagcctggtggagcaagtctttctagataagaccctgaatgcctcattccattggctgggctccacctaccagttggtggacatccatgtgacagaaatggagtcatcagtttatcaaccaacaagcagctccagcacccagcacttctacctgaatttcaccatcaccaacctaccatattcccaggacaaagcccagccaggcaccaccaattaccagaggaacaaaaggaatattgaggatgcgctcaaccaactcttccgaaacagcagcatcaagagttatttttctgactgtcaagtttcaacattcaggtctgtccccaacaggcaccacaccggggtggactccctgtgtaacttctcgccactggctc

SEQ ID NO: 14194 - DNA, 603 bp, Homo sapiens
ggagctccaccgcggtggcggccgaggtacaaattgtcgtttttattcctcttattgggatatcattttaaaaactttattgggtttttattgttgttgtttgatccctaaccctacaaagagccttcctattcccctcgctgttggagcaaaccattataccttacttccagcaagcaaagtgctttgacttcttgcttcagtcatcagccagcaagagggaacaaaactgttcttttgcattttgccgctgagatatggcattgcactgcttatatgccaagctaatttatagcaagatattgatcaaatatagaaagttgatattcaacctcacaagggctctcaaagtataatctttctatagccaactgctaatgcaaattaaaacatatttcattttaacatgatttcaaaatcagtttttcatactaccctttgctggaagaaactaaaaatatagcaaatgcagaaccacaaacaattcgaatggggtagaaacattgtaaatatttactctttgcaaaccctggtggtattttattttggcttcatttcaatcattgaagtatattcttattggaaatgtacctgcccgggcgg

SEQ ID NO: 14195 - DNA, 542 bp, Homo sapiens
tactatagggcgaattggagctccaccgcggtggcggccgccgggcaggtacatcaccctgctgagggacatccaggacaaggtcaccacactctacaaaggcagtcaactacatgacacattccgcttctgcctggtcaccaacttgacgatggactccgtgttggtcactgtcaaggcattgttctcctccaatttggaccccagcctggtggagcaagtctttctagataagaccctgaatgcctcattccattggctgggctccacctaccagttggtggacatccatgtgacagaaatggagtcatcagtttatcaaccaacaagcagctccagcacccagcacttctacctgaatttcaccatcaccaacctaccatattcccaggacaaagcccagccaggcaccaccaattaccagaggaacaaaaggaatattgaggatgcgctcaaccaactcttccgaaacagcagcatcaagagttatttttctgactgtcaagtttcaacattcaagtctgtccccaacaggcaccaca

SEQ ID NO: 14196 - DNA, 593 bp, Homo sapiens
ctatagggcgaattggagctccaccgcggtggcggccgaggtacaaattgtcgtttttattcctcttattgggatatcattttaaaaactttattgggtttttattgttgttgtttgatccctaaccctacaaagagccttcctattcccctcgctgttggagcaaaccattataccttacttccagcaagcaaagtgctttgacttcttgcttcagtcatcagccagcaagagggaacaaaactgttcttttgcattttgccgctgagatatggcattgcactgcttatatgccaagctaatttatagcaagatattgatcaaatatagaaagttgatattcaacctcacaagggctctcaaagtataatctttctatagccaactgctaatgcaaattaaaacatatttcattttaacatgatttcaaaatcagtttttcatactaccctttgctggaagaaactaaaaatatagcaaatgcagaaccacaaacaattcgaatggggtagaaacattgtaaatatttactctttgcaaaccctggtggtattttattttggcttcatttcaatcattgaagtatattctta

SEQ ID NO: 14197 - DNA, 519 bp, Homo sapiens
tccaccgcggtggcggccgaggtacaaattgtcgttgctattcctcttattgggatatcattttaaaaactttattgggttgttattgttgatgtggggtccctaaccctacaaagagccttcctattcccctcgctgatggagcaaaccattataccttacttccagcaagcaaagtgctcagactgcttgctatagtcatcagccagcaagagggaacaaaactggtctttagcattttgccgctgagatatggaattgcactgcttatatgccaagctaatttatagcaagatattgatcaaatatagaaagtggatattcaacctcacaagggctctcaaagtataatctttctatagccaactgctaatgcaaattaaaacatatttcattttaacatgatttcaaaatcagttgttcatactaccctttgctggaagaaactaaaaatatagcaaatgcagaaccacaaacaattcgaatggggtagaaacattgtaaatatttactctttgc

SEQ ID NO: 14198 - DNA, 484 bp, Homo sapiens
ctccaccgcggtggcggccgaggtacaaattgtcgtttttattcctcttattgggatatcattttaaaaactttattgggtttttattgttgttgtgggggccgtaaccctacaaagagccttcctattcccctcgctgttggagcaaaccattataccttacttccagcaagcaaagtgctttgacttcttgcttcagtcatcagccagcaagagggaacaaaactgttcttttgcattttgccgctgagatatggcattgcactgcttatatgccaagctaatttatagcaagatattgatcaaatatagaaagttgatattcaacctcacaagggctctcaaagtataatctttctatagccaactgctaatgcaaattaaaacatatttcattttaacatgatttcaaaatcagtttttcatactaccctttgctggaagaaactaaaaatatagcaaatgcagaaccacaaacaattcg

SEQ ID NO: 14199 - DNA, 260 bp, Homo sapiens
aatcggagctccaccgcggtggcggccgagggactatgattttttttgttttattttttttaaaaaacaggagactatttaatccatctaaaaatacaaatcaggaaatggggggaaccataggaaaatcctccacctctaacagagcgaagttactggctttctgcttgctccaagaatcccaaggcttgatgtttggaaggaattatctgttcttcaactactcccagatactcaagacataagttacacacatctgg

SEQ ID NO: 14200 - DNA, 446 bp, Homo sapiens
agggcgaattggagctccaccgcggtggcggccgggcaggtactttttttttttttttttttttttataccagattttaaggaaagactgcttgcttctgagaaagaattctcggagttgattctctgctccatttgctcctttctcaacctctttagtcctcgttctctgcagtaagaagctagtgacaactggaatttagctcccagtgggctttcttccgggtggtgcctggacaggctgctcctgctgctaaggcttctggagctgttattgaagatgtcagcttctgccactgtggtctgctttttggagtctgcattggttttgcctcgatctctatcattcttctcattattttcatgaatgaatagtgacttccttctctctggggatcgatgttttttctttagggacttcatctcctttggcaagtgatatgaaaa

SEQ ID NO: 14201 - DNA, 411 bp, Homo sapiens
ctgcaccggggtgggggccgaggtactgacctcgtctgtcccttccccttcaccgatccccacagctttgcacccctttcctccccatacagacacagaccattttattttttgggccattaccccataccccttattgctgccaaaaccacatgggctgggggccagggctggatggacagacacctccccctacccatatccctcccgtgtgtggttggaaaacttttgttttttggggtttttttttctgaataaaaaagattctactaaaaaaaaaaaaaaaaaggtacctgcccgggcggccgctctagaactagtggatcccccgggctgcaggaattcgatatcaagcttatcgataccgtcgacctcgagggggggcccggtacccagcttttgttcccttta

SEQ ID NO: 14202 - DNA, 503 bp, Homo sapiens
  misc_feature 400: n = A,T,C or G
agggcgaattggagctccaccgcggtggcggccgaggtacgcgggagataagaccctgaatgcctcattccattggctgggctccacctaccagttggtggacatccatgtgacagaaatggagtcatcagtttatcaaccaacaagcagctccagcacccagcacttctacctgaatttcaccatcaccaacctaccatattcccgggacaaagcccagccaggcaccaccaattaccagaggaacaaaaggaatattgaggatgcgctcaaccaactcttccgaaacagcagcatcaagagttatttttctgactgtcaagtttcaacattcaggtctgtccccaacaggcaccacaccggggtggactccctgtgtaacttctcgccactggctcgnagagtagacagagttgccatctatgaggaatttctgcggatgacccggaatggtacctgcccgggcggccgctcggctctagaactagtggatcccccgggct

SEQ ID NO: 14203 - DNA, 567 bp, Homo sapiens
  misc_feature 504: n = A,T,C or G
gagctccaccgcggtggcggccgcccgggcaggtacaagtccaaattttaaggaaaatgagtcccgcaatgagtttcctcatgcttcgcctgtgcgtggaccggtcagcttctgggtgtgactggagcagggcttgtctccttcttcagaatcactttgcaggggttggcaaagccgctcccatccacgtactctctggacacaataattttggcctattgccatcaaatgcccattttccactgctggaagcaatgtcaaaaaagggctggcccaaaaaaagacccagagctgtcaatacaacactggagacagatgcaactgaataaaccctgttttacccaattgcactatttggtcctcggccgctctagaactagtggatcccccgggctgcaggaattcgatatcaagcttatcgataccgtcgacctcgagggggggcccggtacccagcttttgttccctttagtgagggttaattgcgcgcttggcgtaatcatnggtcatagctgttcctgtgtgaaattgttatccgctcacaattccacacaacatacgagccgg

SEQ ID NO: 14204 - DNA, 544 bp, Homo sapiens
ctatagggcgaattggagctccaccgcggtggcggccgcccgggcaggtacgcgggggcactcagggagctcagattttgagacagtagctggccgatgctcccagctgaataaagcccttccttctacaaaaaaagaaaaagaaaaaagaaaacaggatatctgaaattaagactgcagatggagtagtttctgaaaatgacagggtccaaggtgtgaccacgggaccaagtggctgaactggaatgaagttaagaagcagtaagaaacatccgataatatggtgatcagttcaacagaatgacatattcaccatgtccccaaggaggagatgactgagatttcaaattctcaagcagcctcaatgcagccagagatttaagagggctatgtgtccagaaggagactctgggcaaacgcaaaatggattcagattacttaaattcctgtcagatttcttaacctggtgggctataccaaacccaaaaactttaagcagcctctacttttgcttattttctcctaagcccaaccttggcttttt

SEQ ID NO: 14205 - DNA, 532 bp, Homo sapiens
aattggagctccaccgcggtggcggccgccggggcaggtactcagaaatccttccccgaatttacagcacaggcaggatgacctaagaggcagtttacttccctgagacccacagttgggctgttctggaaacacatctgtgaatcatagccaattgccacagagaaaacagaaccaagcctccggtgaggccactccaccccagagaagtctgcagaattccaaggactcggattggatgttcagaattcagcaactggaaagtccttaaaaacaaacaggccaaaccaaatcaatattgctgtttctagatgtcccttctgtggttgagctagttttacagagataaatatattaagacaaggaggtgggggtgttattatgatcaatgatagccatttgaaagagagggaggagtactttttttttttttttttttttccaagcacgtgcactttattgaatgacactgtagacaggtgtgtgggtataaactgctgtatctaggggcaggaccaagggggcaggggca

SEQ ID NO: 14206 - DNA, 353 bp, Homo sapiens
  misc_feature 198, 199, 212, 240, 241, 303, 310: n = A,T,C or G
taatacgactcactatagggcgaattggagctccaccgcggtggcggccgaggtacgcggggctcaagaataagctgaaatatggccagactatcaggcccatttgtctcccctgcaccgagggaacaactcgagctttgaggcttcctccaactaccacttgccagcaacaaaaggaagagctgctccctgcacagnngattatcaaagcnttctgttttgttggtctggaggggaggnnagaaaaagcttgactcggaagggaggtctacatcaagaaatgggggataaagaaaaggcagnctgttgnaagaggagatgctcaatatgccccaggctatgacaaaagtcaa

SEQ ID NO: 14207 - DNA, 123 bp, Homo sapiens
ctatagggcgaattggagctccaccgcggtggcggccgcgcgggcaggtacatggatgggagcagcttcaccaacccctgcaaagtgactctgaagaagacgacaagcctctgctgccagtca

SEQ ID NO: 14208 - DNA, 131 bp, Homo sapiens
ctatagggcgaattggagctccaccgcggtggcggccgaggtacgcggggaggcattgaggcagccagcgcaggggcttctgctgagggggcaggcggagcttgaggaaaccgcagaaatatagttttttt

SEQ ID NO: 14209 - DNA, 140 bp, Homo sapiens
actcactatagggcgaattggagctccaccgcggtggcggccgtttgagaagccagcgctcacccacccggggtctctgtgcattgacctttgggtgctgacttggagaaaagcacaaacacgaccagttcccaatcctg

SEQ ID NO: 14210 - DNA, 121 bp, Homo sapiens
tactatagggcgaattggagctccaccgcggtggcggccgaggtactttatttttctttttttttttttttgtggatggggacttgtgaatttttctaaaggtgctatttaacatgggagg

SEQ ID NO: 14211 - DNA, 137 bp, Homo sapiens
ctatagggcgaattggagctccaccgcggtggcggccgaggtacactgaaacataaatccgcatgtcaccacacatacaacacccggcaggaaaaaacaaaaacagcaagtttacatgatccctgtaacagccatgg

SEQ ID NO: 14212 - DNA, 128 bp, Homo sapiens
acgactcactatagggcgaattggagctccaccgcggtggcggccgcccgggcaggtacttttttttttttttttttataactgaagctttatctggagtgggggaatgggggtgtggtcagattggg

SEQ ID NO: 14213 - DNA, 127 bp, Homo sapiens
  misc_feature 119: n = A,T,C or G
gactcactatagggcgaattggagctccaccgcggtggcggccgaggtacgcgggtggtgaaaaaagaagtagaaatcgtggcccacctccctcttggggtcgtcgccctcgagatganttatcgta

SEQ ID NO: 14214 - DNA, 114 bp, Homo sapiens
ctatagggcgaattggagctccaccgcggtggcggccgcccgggcaggtacttttttttttttttttttataactgaagctttatctggagtgggggaatgggggtgtggtcag

SEQ ID NO: 14215 - DNA, 140 bp, Homo sapiens
cactactatagggcgaattggagctccaccgcggtggcggccgaggtacaaacgagtcctggccttgtctgtggagacggattacaccttcccacttgctgaaaaggtcaaggccttcttggctgatccatactgccttt

SEQ ID NO: 14216 - DNA, 113 bp, Homo sapiens
actatagggcgaattggagctccaccgcggtggcggccgaggtacagagtcttttgcttcctcccacccctagggggaaaaactgctttgtgctttgggaagttgtctctgaa

SEQ ID NO: 14217 - DNA, 142 bp, Homo sapiens
cactactatagggcgaattggagctccaccgcggtggcggccgaggtactggtgtgtccggaatcctacccactgtgatgacagtgcctgatagtttcttctgcctttctatcccaaaacgtattggtacagtttaccccaa

SEQ ID NO: 14218 - DNA, 123 bp, Homo sapiens
ctactatagggcgaattggagctccaccgcggtggcggccgcccgggcaggtactttttctttttttttttttttgtggatggggacttgtgaatttttctaaaggtgctatttaacatggga

SEQ ID NO: 14219 - DNA, 163 bp, Homo sapiens
actactatagggcgaattggagctccaccgcggtggcggccgaggtacttcaatcctgaattaatctttaaacactttcaaatatggagattaatcaccaacttcttattttttgggccagttggattcaattttttatttaacatgattttttccttatatc

SEQ ID NO: 14220 - DNA, 133 bp, Homo sapiens
atagggcgaattggagctccaccgcggtggcggccgaggtacaaaattttattaaaggtctttagagagcaacatccagactccagaatacagttggggaggagaccctgttatgctgtggggactggctggg

SEQ ID NO: 14221 - DNA, 108 bp, Homo sapiens
ttggagctgcaccgcggtggcggccgcccgggcaggtactttttttttttttttttttttttgatgaaatgccagggtgaaagggatagccaaataggctaaagcaca

SEQ ID NO: 14222 - DNA, 476 bp, Homo sapiens
tacgactactatagggcgaattggagctccaccgcggtggcggccgaggtaccttaacttgagttacagggctggtccctctcttttcattttttatcccagtaggtgagaccgtccctgctgtgttcggtggctgtggagttgatggcatctttgctccaggtgacacctgcatgctggccagctgagcggcatagagctgctgcaaaacagggaagacaaacattgatctctttaaatgcagctgaaattgagtttcaaaagaaaaaacttaccatattgttagatttctcagacagccttgtaatttctttttcactatttttaaaaaagggagctaagagaaggcaaataataaaacagaaagaaaaaggacaggtatgggagccatagttctgtttctggtccttctagcaacaactttatgatcctggacaaaggatttgatctctttagaattcaagttttttttttta

SEQ ID NO: 14223 - DNA, 438 bp, Homo sapiens
tagggcgaattggagctccaccgcggtggcggccgaggtacaaacacctgctaaagacatagcttaataaatatttgttgaatgttgttgaatgaagagcattttcctgctcataaatttctcattacttaacgaatgtagaataaattccttactctggcagactggaatatgtagttacagtttattctagaatttttgcattccccttcttctggttcacttggagaagttcttttccatcctaagtgacccaggtgagtccagtgtcctgctgatttcactgcagggcaggcatgtgatccaggctggccacagtggtcagtgtggacaactgacccttgttcatctgtggagtctaacaaagtagtgcccccttatcctcggtggttatgttccaagatgcccagtggatgcctgaaaccgtggatagtacct

SEQ ID NO: 14224 - DNA, 421 bp, Homo sapiens
ctactatagggcgaattggagctccaccgcggtggcggccgaggtacttagcattgatcaaagaaatttcaaattacgatcaattgggtggggagaggaattttcattgtccaagcaccctcagggaacagaagtcaaagcaataacatattcagcaatgcaggtctataatgaagagaacccggaagtttttgtgatcattgacatttaagacaccaaaaaataaaagactcctacgaagaactgtttttgttttcctcttccttttgagaagacactatgaattaaattctacagcttttttttgatatatggaaatttgtagaacagaaatattttagttaaagtgtgactttcagaaagggaaaatcagggcacagccttggtctgtgttccccaaatattcacactttaaagaatt

SEQ ID NO: 14225 - DNA, 531 bp, Homo sapiens
gcgaattggagctccaccgcggtggcggccgaggtacatgattgtcctttatgcattaaattcatgcttttacatacttgtgtttccttttcatttcgtccttccaaatcattattttaggaatatagagaaaagggttggccaggtgcagtgactcacacctgcaatcccagcactttgggaggtcgaggtgggtggatcacttgaggctaggattttgagaccagcctgaccaacatggagaaaccccatctctactgaaaatacaaaattacccgggtgtggtggcgcatgcctgtaacctcagctactcgggaggctgaggcaaaagaattgcttgaatctgggaggcggaggttgtggtgagccaagatcgtgccattgcactccagcctgggcaacaagagcgaaactccgtctcaaaaaaattaaataaataaggcttatgtgcagttattctcaatgagctaaaaagcttcctgaggctagaaattcttgtcatttttggctgggagcagtggcttacacctg

SEQ ID NO: 14226 - DNA, 454 bp, Homo sapiens
gactcactatagggcgaattggagctccaccgcggtggcggccgccgggcaggtactatctatttggccttggaaagttactctctaagtcagggcttcttttcttcaactttggtgtgagactccgctggagagccggttagaaaaacacaagtctcgggccccaccccgcagagcccctcattctctagttctgggttggggcccaggagtctgcttttctagcaagcgcccagatgtcactgatgcttacagctctcagaccacagttggagcagtgatttttaaaagtcttttcatttgtaaagagttgttctccatgctccaaatgactgtgacgactgagaaaatgcatgtatgtaaagtctgcagctggtgacattgtacacactcagcagatggcctctggtgttactgttattttattgtgactaattatttctcacacctacaa

SEQ ID NO: 14227 - DNA, 358 bp, Homo sapiens
gcggtggcggccgaggtactcatcagatcacccacgtcatctaatgcactcccatcacattccagactcagtgctgccatcagctccctaggagctctccctccaggaagggaatgtgtccaccgtcagacactcagacccagcatgtggggacagaggctgatggcctgtctggccattcctctcagttcctctcctcactagcttgtgtccttgtgcaagtcacttaccctctctgaggttcagttccctcctctttgaagtgggtttaataatagtacctgccgggcggccgctctagaactagtggatcccccgggctgcaggaattcgatatcaagcttatcgataccgtcga

SEQ ID NO: 14228 - DNA, 520 bp, Homo sapiens
tactatagggcgaattggagctccaccgcggtggcggccgcccgggcaggtactgccctttcgttagaaggcagtgactcctttctgtgaagccgatttagtgaagtgtcctgtgcagaaaagagtccagggctgtcagttaatttcttccggccactggagttagggtttgaaactctgcagctgcctattgcacttgtgaaaaggtttgtatgttcatcactgctggctggctcagagttgggagtgaatcctccaagggataagcttggagaactttctgaacagtcaatctgtaaaggtgtctgcaatcccaaggccaatggactagattctgaaggctctcggtggacccactgttcctctctgtttattaagctttttgaaggagagagatgagggcaggacatgtgacaacggtgcttttccttatgcttatatcgctctccaacagcatcctttccaaatctatagcgcttcaaagattccaggacagatcgggaagagccagtgtccatag

SEQ ID NO: 14229 - DNA, 541 bp, Homo sapiens
actcactatagggcgaattggagctccaccgcggtggcggccgaggtacatgcaagttgcatgattataatgagtgatcctgggatttaagttgattatgacaggaacagaaggaacttggagattagggacaatgaaaaggtggtagtgaaaggagtgttggagttaagttactagatgtctggaagacagactgtggtggtcagataatgagatagattatggaggggttacagtttttggtaataacgagagagatctaaggtatgactgagagtgaatggatgagaatagcagagaacaaggtcagtggaaaactactcttcaaagaacctatagtcagggtgttgaaagattaaaaattgctaagaattaaatcaggagtagtgctgcgggaaatgaaatgagcagtgaactaaacttactgagaaatgagaggggatgacccaggggtttgtagattttgtagatgatagcaatgaagagaagagatattatttgatggtacggaactcaaagctgagagttttaagggaagata

SEQ ID NO: 14230 - DNA, 503 bp, Homo sapiens
gcgaattggagctccaccgcggtggcggccgaggtacatgacatccgacgaaatgagagccacctaattgatttccgggagtccgcaccaggggccctcagggaagagaccccgcaaagatcctgggagaccaaggtggggaccctggtgagaagagagagttcaggggagtctctcttcattgcccttctgctaacccaagcattaatttgctaagtatttaccaggggagtgggaaaaagagttgagcgggattctcttaggctatgagagagtcaggcagcccccaagataaaataatgaactagaaaatctggaaccttacttctctgggaatcttacctatctggcacgtgggaagaaagaaaaaaggctactgagtacctgcccgggcggccgctctagaactagtggatcccccgggctgcaggaattcgatatcaagcttatcgataccgtcgacctcgagggggggcccggtacccagcttttgttccctttag

SEQ ID NO: 14231 - DNA, 531 bp, Homo sapiens
ctccaccgcggcggcggccgaggtactgacctctgccagtcagctgcgtaactccaggccctagggtgccccgtctgtccagccagggattgcatggatatgctgtgatctcccttttggttctgattgagttggaccttgtgggaggagaaacatagatgttgatacatgaacacatatgttggagagagaaagttttatcttggcataggacttttaaaacacaaggtaatttttaatcagttttgggaccaaaaaacactcaatatgggaaaaatccaaattctgccaaaatgtctaaagaggtttattctgaaccagtataagtgactgtggtctaggttacacaatttcaagagatcctgataaagcgtgcatgagagagttgggctacagcttggttttacacatttcagggagacaggaattgtagggtaaaattatggcacaggacttttaaaatgaagctgtgaaagtttacagtccatagagaataaaaatctagaagtttaaaagaaatgattggtagtt

SEQ ID NO: 14232 - DNA, 487 bp, Homo sapiens
actactatagggcgaattggagctccaccgcggtggcggccgaggtacttgacagacatatggtaaatgaataagacaaaggctctgatggcttctcacagccctgtggatcaaactcagattcttttctagaaccccaaggccctgtcagtctcactagcctctctccagacacaccagcctttttctacctttccaacatcccaagttccttttctcttacaggactacatacactctctcttctgccagaaaccatgttctaccagctaatttccactcaacttttaagtctcagctgatatgttacttccaaagagaggcctccactgaaccccaagcctggggttcacagcacctgtctccataactacataataatctctctgatgtttaggctgggcatggtggctcacgcctgtaatgccagcactttgggaggccaaggcgggtggatcacttgaggtcaggagcttgagaccagtct

SEQ ID NO: 14233 - DNA, 355 bp, Homo sapiens
ctactatagggcgaattgggtaccgggccccccctcgaggtcgacggtatcgataagctcgatatcgaatagcttcaagcacggggatacactagcacaagagcggacgcctgcgcagagaagcttcaattctacacactgttaaatgagggaaaagcagcagcactcgatgtaactgaagaagacagtaggagctgcaaggaagtacaaccacgacctatgaggacaccatgccagagaggcctggaccccacgctaggctcagtgcctgttatactcttgggacccagcgctttccttctccatcacgtggcatacttggcattatttgatgcttaaaatattgcccttagtt

SEQ ID NO: 14234 - DNA, 356 bp, Homo sapiens
tactatagggcgaattggagctccaccgcggtggcggccgaggtacctggtgacccttgctggtgctttcatgttttgtgccgaggcaattagactttgtgctgaatttgtttgtgctgccacctcagggaaggggtggaatgtgcagcgtggtttccatttgacattgttttccctgagagatgggagggctgaacgttacctcttgacaagtcttagtggacagaggggcccggatacccaagcgccttagttcttagggctgggtattagttcattttcacactgctgataaagacatactcgatactgggaagaaaaagaggtttaattggactcccacatggctggggagg

SEQ ID NO: 14235 - DNA, 524 bp, Homo sapiens
gggcgaattggagctccaccgcggtggcggccgaggtacctaccctttactttttccccaagaccatctcagggtggagcattctgtctaagagaagaaagataaggaggctcccacccacctctcccaagagcagacattaaacatctttgtgctttgaagagagtgaattttggatagtcttgtgattctcagactaacttccagaattatactttaaccccttccagatatggtccgcctttggcattgtgtgtacctgtgatggggcgtgtggtttccggttgtctcacctttaattgtcaacctccagtgttgactctagaaatatgaggaaagcttttcagtttttaaaattgccatttaaatttagtctattaaaaacaaacctagaggtcttggtgcagttgatttcagagtttattaatttagtggtcccaaaagtattacatcttttatattctggaagaaaagaactgtgaacaaattagaaccccggaacactctgacgtccatggacgcat

SEQ ID NO: 14236 - DNA, 453 bp, Homo sapiens
ctactatagggcgaattggagctccaccgcggtggcggccgcccgggcaggtactgtggaggtcccaggagtgctggtgatgggcacaaagttccgatgggtgaaaccattgacatagagactgcctctgtccaggaggtaggggcccagctcgatgatgccatgggtcagtttgctcagctcccagtatagctgctctctgtccagtccagggtttagagggtcaaggcggtgagtgcagatggtgtccacgccggtggctgccccacgtttttcaggcctgagcaaggtcagtctgcagccagagtacctcggccgctctagaactagtggatcccccgggctgcaggaattcgatatcaagcttatcgataccgtcgacctcgagggggggcccggtacccagcttttgttccctttagtgagggttaattgcgcgcttggcgtaatcat

SEQ ID NO: 14237 - DNA, 429 bp, Homo sapiens
ggcgaattggagctccaccgcggtggcggccgaggtactaatttgaatttgtaatgagtctgatggtatatttcaattttttgctttgagggactggctgctacattgcagaatatcttatatccctgactgctttccactaaatgtcagtggtgaccccaatccaattattatgacaactgaacatgcttatgcatccctcatgcctttattttttattttgggaaatctttcagcttcagtttttgctgatatttatgtgattctttgttctgcaattcaaatttctgggagccaaacagtctccttggttcagattactgttttttgactagagcttctcgcttcagattctgtcataagattatggcttaacctatggttgtcctttgatttggtgccatatgaaataaaacattattttctatg

SEQ ID NO: 14238 - DNA, 252 bp, Homo sapiens
ttggagctccaccgcggtggcggccgcccgggcaggtacgcggggagtttcacgcgcgtatgctttgcccgccatggccgcagtcaaggagcctttggagttccatgccaagcggtcttggcgccccgaggaggcagtagaagatccggacgaggaggatgaggataatactagtgaagccgagaatgggttctccctggaggaagtgttacggctcggaggcaccaagcaagattaccttatgctggctac

SEQ ID NO: 14239 - DNA, 428 bp, Homo sapiens
ctcactatagggctgattggagctccccgcggtggcggccgccgggcaggaccatgggaaataagagcaggctgggggcattctgggtaaggagcctgagccaaactctaaagctgtctttataaagggaggtcatgtgatggccagaaattgcctttgcttcatggtgcacttggtggggagtcaggtgtggggtgctgggtttcacatcatcccattttctttgggtggttcagacctgcaatgcttcttttgcaacccgagaccgtctgcgctcccacctggcctgtcatgaagacaaggtgccctgccaggtgtgtgggaagtacctcggccgctctagaactagtggatcccccgggctgcaggaattcgatatcaagcttatcgataccgtcgacctcgagggggggcccggtacccagctt

SEQ ID NO: 14240 - DNA, 410 bp, Homo sapiens
gagcaccaccgcggtggcggccgaggtacttttcgaagtaactggacatgggggaggtgaggggaatggaagtattgctatggactgaactgtgcccccaaaattcatatgttgaagccctgagctctgacatgattgtatctgaagtcctaaagccaggaatgaggaaggctgtgaatgtgcattgttccatgcaagaatgactctgcggggggctatttagagatcatgagggatactgccccagtttccacaggccagatggtctccaacaaaagccacggtggagtcacccctgcctggcagatctatcgggtcatgaccaccgcccagggggtcctggagaggacagtatatgaccaaagaggattattcatgagcctaagatctcatgaaacgtgccttgctaa

SEQ ID NO: 14241 - DNA, 203 bp, Homo sapiens
gagctccaccgcggtggcgcccgaggtacttggccaagcgctcagatcggcaaggggcaccagtcttgatctgcccagtgcacaggcccacaaccaggtcagcgatgaaggtatcttcagtctcccccgaacgatgagacaccatgacgccccaaccattggcctgggccagcttgcacgcctgaagagactcggtcacggag

SEQ ID NO: 14242 - DNA, 507 bp, Homo sapiens
agggcgaattggagctccaccgcggtggcggccgcccgggcaggtacagttaatttgtgtcatcccatcagcaatgaaggtccctatccagggtcctgcttggagcagcatttcatgttcttttgctgttttgtgctttgccgattttggattttatttttcacaaaatttttatttaaaaaactcgtcaccttttggaaatgcccattgccgacttgaatttttttgtatgaagtccctcctgattttgtgtgtgtgtgtctgtgtttaagcaagcgttcggttggtatagcttttttttgtttttttaatttaaattgaaggtagctgcctcctgaaagccagcattaagccagaacacccaggttcaagcaaaagacccacctctctgcagaggcaaagtctactttctggtacctcggccgctctagaactagtggatcccccgggctgcaggaattcgatatcaagcttatcgataccgtcgacctcgagggggggcccggt

SEQ ID NO: 14243 - DNA, 281 bp, Homo sapiens
tacgactcactatagggcgaattggagctccaccgcggtggcggccgaggtacttttagtagagacggggtttcaccatgtttgccaggctggtctcgaacccctggcctcaagtgatccacccgccgcagactcccagagtgctgggatttcaggtgtgagccactatgcccggcctaatacgtggatttttaaagcttcaggttctggttcagaagtttcctgggtctcattaaaataatgaggcactcagaattggtctaataaaaataacgaccatt

SEQ ID NO: 14244 - DNA, 195 bp, Homo sapiens
tacgactcactatagggcgaattggagctccaccgcggtggccggccgcccgggcaggtacgcgggggccactgaccacagctctttcttcagggacagacatggctcagcggatgacaacacagctgctgctccttctagtgtgggtggctgtagtaggggaggctcagacaaggattgcatgggccaggactg

SEQ ID NO: 14245 - DNA, 204 bp, Homo sapiens
actactatagggcgaattggagctccaccgcggtggcggccgcccgggcaggtacattccagcgcagtctgggccccaaagcagtttcacccttacctaacttacctaactcttaatatagcctaaactcactgaaaaataagctaacttcatttcaccttttgtagcatacacgtagactcagagtatatactgaaatataat

SEQ ID NO: 14246 - DNA, 492 bp, Homo sapiens
agctccaccgcggtggcgggcgaggtgcatcaccctgctgagggacatccaggacaaggtcaccacactctacaaaggcagtcaactacatgacacattccgcttctgcctggtcaccaacttgacgatggactccgtgttggtcactgtcaaggcattgttctcctccaatttggaccccagcctggtggagcaagtctttctagataagaccctgaatgcctcattccattggctgggctccacctaccagttggtggacatccatgtgacagaaatggagtcatcagtttatcaaccaacaagcagctccagcacccagcacttctacctgaatttcaccatcaccaacctaccatattcccaggacaaagcccagccaggcaccaccaattaccagaggaacaaaaggaatattgaggatgcgctcaaccaactcttccgaaacagcagcataagagttatttttctgactgtcaagtttcaacattc

SEQ ID NO: 14247 - DNA, 244 bp, Homo sapiens
ctcactatagggcgaattggagctccaccgcggtggcggccgcccgggcaggtactcttgacaaagcctccccatacagaggtgaaatcactctccgctcaccactggtggcagaaatactctgggcctgtctgttctgaatggtcagtttcactgtaatcctcaggcccttccagtcacccgttgccttggcaatgtcatcaccaactttttttggagacagacccagggggccgatcttggg

SEQ ID NO: 14248 - DNA, 463 bp, Homo sapiens
actactatagggcgaattggagctccaccgcggtggcggccgcccgggcaggtacatggtggtaaatgcttaactccacctatataaaaatcaaaaacaggcaaaatgaatcatcagactacagcttacctttagggggtgtgagtagtgactaacaggggtcaagatgaaggtttaaggatgtcgccaggcgcagtggctcacgcctgtaatcccagcactttgggaggccgaggcaggcggatcacgaggtcaggagatcgagaccatcctggctaacacggtgaaaccctgtctctactaaaaatacaaaaaattagccgggcgtggtggtaggcgtctgtagtcccagctactcgggaggctgaggcaggagaatgacgtgaacccaggaggtggaacttgcagtgagccgagattgcgccactgcactccagcctgtgccacagagcaagactctgtc

SEQ ID NO: 14249 - DNA, 527 bp, Homo sapiens
atacgactcactatagggcgaattggagctccaccgcggtggcggccgcccgggcaggtaccatttctgcatttattttagcccatggaataactgtgctgagaaaccacagagtcaatcagattcaaaatgttaaaatccttcctgcttggagttttccgtcttcacatcaaagcatttcatgcccgtcagcaactttttaatgcatttgctcctcgtttgcacaatttccatttaaagactttccttggctgacttctctgatgaggtttcctgcttgccaggagagcacgctaatgcagaaattacaaagggggcttcacgtcccttttccggaggacctgatatttcagataatttccagcttcagttttggagaaacgactgttctttgcaccaggggaaaataaactgattttcagtgtaagcaacctttctgcaagtagaatggggactgttgggaatggagatgaagacttcacttcatgttattcatttccttaccaggaacagggttcacggcttat

SEQ ID NO: 14250 - DNA, 348 bp, Homo sapiens
tactatagggcgaattggagctccaccgcggtggcggccgaggtacttttttttttttttttttggttaggttaacagaaacaatggggttatttccggtagtggcaacagcacgaactagttttcttgtggactaatggcccgagagttcctgcgatttgtggattatttcccttagatgcaatcgaccatttcgttccaataagaattaatgctaccacggggcttacaaagaacccctcaagtcttccaaatctgcccatgacatcaacctctgctgcgtaatcggacctgcacccaacccaggtttttagtcactcaagcgcgctgtgctacagaaccagggaa

SEQ ID NO: 14251 - DNA, 326 bp, Homo sapiens
gactcactatagggcgaattggagctccaccgcggtggcggccgaggtacgcgggagaacagctcagaaggagacccacagtgagcagctcccctgtgtcggcgggcaggtcgtccctcaagtgttcagctctcagcagagaaaaggccctggagagggtgactcctctcagctctcagcagagaagcagccctggagaaggtagcttctgttcgcaggcagattgtccagaggtcctgctgctctcagacggggccctggagaggatagcttctatccataggcaggttgttctgccgctctagaactagtggatcccccgggct

SEQ ID NO: 14252 - DNA, 335 bp, Homo sapiens
cactactatagggcgaattggagctccaccgcggtggcggccgcccgggcaggtacatagcagtggaagctgcagagggccgaaacaaaaatgaagttttctaccaatgtccagaccaaatggctcgaaatccagctgctattgacatgtttattataggtgctacttttactgactggtttacctcttatgtcaaaaatgttgtatcaggtggcttccccatcatcagagaccaaattttcagatatgttcacgatccagaatgtgtagcaacaactggggatattactgtgtcagtttccacatcgtttctgccagaacttagctctgtacct

SEQ ID NO: 14253 - DNA, 474 bp, Homo sapiens
ggagctccaccgcggtggcggccgcccgggccaggactttttttttttttttttttttttttaaagatccagactaagacacatcaacaagaaatttccaaataccaggtcaagaatacttcacatgtttctggagggaaagaaaacagttcatatacagtgaatcaggaattacaattgcatcagacttatcaacagcatcgggaagataatgtgaaaataccttcaaaactctcgagggacacaagaagatgctgcctggccacaggagcgagactgctggcctccaatcagtcttctgggcaggcctctgatgcaattacagggctaaggaaccacggtaaccaatgtgccattggcgtgtgctaaaacccagtggccccaggaagaatcctgttgacactggcttggaacatgaggctctaagggttgaaagttgagcaggaccctgtggagaggctaaagcaactccat

SEQ ID NO: 14254 - DNA, 443 bp, Homo sapiens
gactcactatagggcgaattggagctccaccgcggtggcggccgcccgggcaggaacttattttttttttttttttttttttttggcatataatccagtttattaaatacagatgatgggccagacatggtgatagagaaatacagattaagaaaccagatcaaatcctttttaaggaattatctagtggaaaatatttcaacttttttttttacactactattcattatcttacacttcaaatcttcacctttccattttgacaggcgctcttttacttcagtctcctgaagacatttttccaacagaagttacataaaaatactaatcttcaaggggctttctaaaatattttaatcacgtcattaaaatcttctttcactaggcaagggttctgtctttatgggggctggcaggcagggcaaatgaattcctaccaataa

SEQ ID NO: 14255 - DNA, 477 bp, Homo sapiens
  misc_feature 287, 310, 352: n = A,T,C or G
gactcactatagggcgaattggagctccaccgcggtggcggccgcccgggcaggtacgcggggacagaaatggagtcatcagtttatcaaccaacaagcagctccagcacccagcacttctacctgaatttcaccatcaccaacctaccatattcccaggacaaagcccagccaggcaccaccaattaccagaggaacaaaaggaatattgaggatgcgctcaaccaactcttccgaaacagcagcatcaagagttatttttctgactgtcaagtttcaacattcanggtctgtcccaacaggcaccacnaccggggtggactccctgtgtaacttctcgccactggctcgnagagtagacagagttgccatctatgaggaatttctgcggatgaccggaatggtacctcggccgctctaaactggtgggatccccccggctgcaggaattcgatatcagcttatcgataccgtcga

SEQ ID NO: 14256 - DNA, 587 bp, Homo sapiens
  misc_feature 18, 93, 131, 352, 490, 542, 587: n = A,T,C or G
acaaagaccgaatacttncgcaaaggcaagaggggggagggagaattagaggagggggtgggcagcaggaggtcgaaacccaagcggagcganacccgacgacgcgcgagggtggggcaccgggacccagncgggaggaacccgaaagacgaggagggaaagggcggcgcccggcggcaaccagggggaacaagccggaacccagggaggaaacggaggagccgcggcacaaaggggcacacaacaagacggagccggggagacaaaaaagacgcaaagaccggggggggcccgaaaggaggggaggcaaacagaacaaacaaagcgcgggggcggcccaactggaccagcnaggccagggccgggaaaaccggcgcggggccaggcgggcaagaaaacgaaaagcgggcccaacgcggccggggaagaagggcggggcccgccgaaaaacggggcggccccgggccgcaggccccgggggcacgagacngcgggcggcggccccggggccggcccaccgggaaagcgggcgaggcggggangcaaggcgcaaggcaaaaagggccggaaaaaaacaggggggaaan

SEQ ID NO: 14257 - DNA, 418 bp, Homo sapiens
ctatagggttaattggagctccaccgcggtggcggccgagttactaagtcttttataatctggtgtgttttttacacttgcagcacatctcaaatgaaatagcaacatttcacatgcacaagactcacatatcttctgatggctatcttgtcgaatagcacaattctaggaagttcaaaagggggaacaattgcttctcaaattgatgaaggtagagaagaatggtatcagagaaactgattaagcagggacctgggaatctgagttgagttccggggcatgtttgttccctagcaccatgacctacatggcagtgtctcttctcatactattttaagagtccctggtaagtaggttctgtgttcatattcctaacagtgggccccctatgcccctgtccttgggcgttaaagaaatc

SEQ ID NO: 14258 - DNA, 493 bp, Homo sapiens
actactatagggcgaattggagctccaccgcggtggcggccgaggtacgcgggaggccaagctggactgcataaagattggtatggccttagctcttagccaaacaccttcctgacaccatgagggccagcagcttcttgatcgtggtggtgttcctcatcgctgggatgctggttctagaggcagctgtcacgggagttcctgttaaaggtcaagaccctgtcaaaggccgtgctccattcaatggacaagatcgagcggccgcgggcaggtacttcatgagacaaaatggaaaaaggagaattaaattaaaatgcacaactaatatttatctactacagacataatatttctcagttgtgaactaattactatgcttggaaaatgctagcatcctcataaatattttggttctattgggatacaaaatctgatttcgcaaactttgcaaaggcacattttggctgggcacagtggctcaggcctgtaatcc

SEQ ID NO: 14259 - DNA, 497 bp, Homo sapiens
tactatagggcgaattggagctccaccgcggtggcggccgcccgggcaggtacgcgggggcatttatcttcactctgatgagggctcagacttgataacgcccgtggtgccccatccctataggagctggtgagattgcagcctgctgcctcccctccatcagccacagctattggatttcccacccagaatctttaggtaaatgaggtaagtcctgatttttaaaacttcttttgaatctggaatccaaacacctgagtggaaagagaagcctgctttaaactggacagatgaaactagaacagactcttggagacggctggcaggaagtgaagctcaccttacctgggcttacctcactgggtcaaatcagaattttattttggagggcaggttggctactttggatattatctgtgaatttcctgcattgtctggacttctaatctctgtgaatttaaaagcccccctcgttccctatgcctgggtggcaaaac

SEQ ID NO: 14260 - DNA, 388 bp, Homo sapiens
actcactatagggcgaattggagctccaccgcggtggcggccgaggtaccttttagttattgacaagttaaaatagcactctcagtttttcagtattacagagagcaaatagtttcctctcctgctctgtgcagtagcttttccagaactatggatcaaatggatcagaagaagattgattatttcctcatctttttttcttttttttgagacagagtctctctctgtcccccaggctgaagtgcagcggcatgatctcagctcactgcaacctctgcctcccgggttcaagtgattctcctgcctcagccttctgagtagctgggattacaggcgcgtgccagcatgcccggccaatttttttgtgtatttttagtaaagacagggt

SEQ ID NO: 14261 - DNA, 230 bp, Homo sapiens
tatagggcgaattggagctccaccgcggtggcggcccgaggactttttttttttttttttttttctttctttcttttttttttttttttttttttttttttttttttttttttttttttttttttttggcaacaaaaagctttatttccatttggcccaaggcttgttaggatagttaaaaaagccccctattggctgggggggggggcttaggcaaaacccctattact

SEQ ID NO: 14262 - DNA, 464 bp, Homo sapiens
ggtggcggccgcccgggttggactttttttttttttttttttgtccttgcttttggttttttccttcgatatcttcaaaatctgtgtcagaagaaaaatgtgtttctgactcctgtagtagattaaaatcagttggtatttctggagctgctatcatttctttatcatcttctggaacacctcaatgtcagaaatatattcatatatttacgtgggtaaaatgggggcttgccttctttcttctaagacaattcctcacggtgggccaagcgccctccgggtgcccctccaaacttctagaagcttcgcctccgccattttataacttacctccccgcgtacctcggccgctctagaactagtggatcccccgggctgcaggaattcgatatcaagcttatcgataccgtcgacctcgagggggggcccggtacccagcttttgttccctttagtgagggttaa

SEQ ID NO: 14263 - DNA, 503 bp, Homo sapiens
tacgactcactatagggcgaattggagctccaccgcggtggcggccgaggtacatcaccctgctgagggacatccaggacaaggtcaccacactctacaaaggcagtcaactacatgacacattccgcttctgcctggtcaccaacttgacgatggactccgtgttggtcactgtcaaggcattgttctcctccaatttggaccccagcctggtggagcaagtctttctagataagaccctgaatgcctcattccattggctgggctccacctaccagttggtggacatccatgtgacagaaatggagtcatcagtttatcaaccaacaagcagctccagcacccagcacttctacctgaatttcaccatcaccaacctaccatattcccaggacaaagcccagccaggcaccaccaattaccagaggaacaaaaggaatattgaggatgcgctcaaccaactcttccgaaacagcagctcaagagttatttttctgactgtc

SEQ ID NO: 14264 - DNA, 503 bp, Homo sapiens
ctactatagggcgaattggagctccaccgcggtggcggccgcccgggcaggtacatcaccctgctgagggacatccaggacaaggtcaccacactctacaaaggcagtcaactacatgacacattccgcttctgcctggtcaccaacttgacgatggactccgtgtcggtcactgtcaaggcattgttctcctccaatttggaccccagcctggtggagcaagtctttctagataagaccctgaatgcctcattccattggctgggctccacctaccagttggtggacatccatgtggcagaaatggagtcatcagtttatcaaccaacaagcagctccagcacccagcacttctacctgaatttcaccatcaccaacctaccatattcccaggacaaagcccagccaggcaccaccaattaccagaggaacaaaaggaatattgaggatgcgctcaaccaactcttccgaaacagcagcatcaagagttatttttctgactg

SEQ ID NO: 14265 - DNA, 481 bp, Homo sapiens
ctactatagggcgaattggatctccaccgcggtggcggccgaggtactttttttttttttttttttggtggtaattgagctgggaaaaattcagaattgggtcataattaatggtaactaaacagatttgtgaatatgggacatctgtggtcttgaaaacatcagtatgatttgtccccatatttcttcagcctggacaatagaaacagacaggggaggggggtaaagtgcagtaaagtaggctgagtgatgtggtgctagcagctggagtccagagaagttctgacagtgcagggagcagcccctttgttctttggagcactggaagggctgagctgcatctgaggtgttcaagccaccaacaggacagggtggaggactaagtagcacatgtgctccagagcagcttcctgtctttgtgtgggcacatcacatcgggggaaatgggcatgtgtaagaaggggggagtgtgatgcttgta

SEQ ID NO: 14266 - DNA, 488 bp, Homo sapiens
tacgactcactatagggcgaattggagctccaccgcggtggcggccgaggtacttttttttttttttttttttttgcttctggtaaaaagaagcatgttacaattttcccccccaattcacataggactctaagaacatattttaaatcagtgcttccatacaggaacgaaatccactattttagaattctaaatcttgttgaaaagcaaccttatctgaagagtaaacaagaagattcaaagttaagtatcagtgcagtccagagcccctaaatgaataaaactgaatgtatcttaaaaataggatttgcacaccagtaagagacttgtttacgattctggggaggagggaagaaactgtaagagggagagaaaagggaagaaaaacaagaagaaaaataataggaaaaaaaaaaaagaaagaaagtttgtttagctcaaagtcaatgcaaacataatgcaactcgtaatcaagctgggttcatgct

SEQ ID NO: 14267 - DNA, 502 bp, Homo sapiens
actcactatagggcgaattggagctccaccgcggtggcggccgaggtactaattgagcttagtgatattaacttggtaaattaagccagtttgtctctttgctttatctgtcttgtggaatctgtatcagtggaaattaaatagtctttacatttgatgaaccctgtttaggtgttggaaatacccatctatttgttaaaaaggcaaggtcccatgatttagtgaatgggggatacagacagcctttattcaagtaactgaataaacaaaagaattagagagtgtgatgagtttgaataaaaaatatagttcataaaaaccagaaatgtgatagagcatagtggctggaagaaagttacccaagtggcttgggtagtcaatgaagttgactccaacatgcagtagtacgcgggtcctaagatagagattaagtcatggtttaaatgaggaacaatcagtaaatcagattctgtcctcttctctgcataccgcgaatttatag

SEQ ID NO: 14268 - DNA, 349 bp, Homo sapiens
actactatagggcgaattggagctccaccgcggtggcggccgcccgggcaggtacaccactgtgcctgctttgaatcctttacgaagagaaaaaaaaattaaagaaagcctttagatttatccaatgtttactactgggattgcttaaagtgaggcccctccaacaccagggggttaattcctgtgattgtgaaaggggctacttccaaggcatcttcatgcaggcagccctttgggagggcacctgaaagctggtagagtttgaaattagggatgtgagccttgtggttactgagtaaggtaaaattgcatccaccattgtttgtgataccttagggaattgtttgga

SEQ ID NO: 14269 - DNA, 391 bp, Homo sapiens
tcactatagttcgaattaggagccccaccgcggtggcggccgatgtacttttttttttttttttttgctttttaattggatgcctggagacaattccatttcaattaccttattggcatgacgagatatacaagggctgccaatgtcaatacattaagactgagcgtgctggagcagcagccagggttcagggcactgctgtgtcatctgcgccacggtgcacaaaggcagcttcaaaagcatttcagcatgatcgcttccctctctccgctcctggggagagaaggatcctgcacaccacaggcaaatcatgctgaaattgaggtggtgcctttgggactcccatcccatcacagtcttgggattctttagctgagatctactagagcct

SEQ ID NO: 14270 - DNA, 286 bp, Homo sapiens
tacgactcactatggggcgaattggagctccaccgcggtggcggccgaggtacctgtggatattggttgaacaaacaggtgggcaaagtgaggaagataagaagtccatccgttcagtttccccactgcggagggaataacactgtctttccacaggtcacagactgggatgagcaacgggctgaaggcacgtttcccgggaagatctgaactggctgcatctccctttcctctgtcctccatccttctcccaggatggtgaagggggacctggtcctgcccgggc

SEQ ID NO: 14271 - DNA, 327 bp, Homo sapiens
actactatagggcgaattggagctccaccgcggtggcggccgaggtacgcgggatggcacatagacatcagctaggcttttgggaatcgtttgtgttctttgtggaaatgtcctttagaagcacccatgaagtagtgtgttcagactgtgcacacagaaaacaggctctgccttcacatgtgagacggtggacttttcctctggacaaaatgacagcatcctggcgactccacagtggagctgagcgccactccctgtagccgatctgggactgaaacgcttacacctctgcctcagaaggagtcccccatgccctgcctgaaatga

SEQ ID NO: 14272 - DNA, 302 bp, Homo sapiens
atagggcgaattggagctccaccgcggtggcggccgcccgggcaggtacgcgggggaattagtccgagtggagagagcgagctgagtggttgtgtggtcgcgtctcggaaaccggtggcgcttgcagcatggctgaccaactgactgaagagcagattgcagaattcaaagaagctttttcactatttgacaaagatggtgatggaactattacaacaaaggaattggggaactgtaatgagaatctcttgggcagaatcccacagaagcagagttacaggacatgattaatgaagtagatg

SEQ ID NO: 14273 - DNA, 229 bp, Homo sapiens
tagggcgaattggagctccaccgcggtggcggccgaggtacgcgggtgttcctttttgttcaaagtctatttttattccttgatatttttcttttttttttttttttgtggatggggacttgtgaatttttctaaaggtgctatttaacatgggaggagagcgtgtgcggctccaacccaacccgctggttacttttcaccctcttttcacctgcctctgggtttttaa

SEQ ID NO: 14274 - DNA, 511 bp, Homo sapiens
tatagggcgaattggagctccaccgcggtggcggccgaggtaccattccgggtcatccgcagaaattcctcatagatggcaactctgtctactctccgagccagtggcgagaagttacacagggagtccaccccggtgtggtgcctgttggggacagacctgaatgttgaaacttgacagtcagaaaaataactcttgatgctgctgtttcggaagagttggttgagcgcatcctcaatattccttttgttcctctggtaattggtggtgcctggctgggctttgtcctgggaatatggtaggttggtgatggtgaaattcaggtagaagtgctgggtgctggagctgcttgttggttgataaactgatgactccatttctgtcacatggatgtccaccaactggtaggtggagcccagccaatggaatgaggcattcagggtcttatctagaaagacttgctccaccaggctggggtccaaattggaggagaacaatgccttgacagtga

SEQ ID NO: 14275 - DNA, 432 bp, Homo sapiens
agggcgaattggagctccaccgcggtggcggccgcagaaggtcccggcagcagcaggaagaagacggaccccgcgatgagggcggcggcaaggagcaccttcatgttgcgttcggagaggcgcagcatccacaggccccgcgtacagactggtttggtaaatgctaaacttttgtgtcttttgcctttttaaaggaattgttaacattggaattgagggtatgtacctcggccgctctagaactagtggatcccccgggctgcaggaattcgatatcaagcttatcgataccgtcgacctcgagggggggcccggtacccagcttttgttccctttagtgagggttaattgcgcgcttggcgtaatcatggtcatagctgtttcctgtgtgaaattgttatccgctcacaattccacacaacatacgagccg

SEQ ID NO: 14276 - DNA, 499 bp, Homo sapiens
agggcgatttggagctccaccgcggtggcggccgaggttttgggcgatcgttttcatcgaaatattagagatgctttagatgtgtgtgcatgtcagctgccacctgaaagaaaggcctcattaaagattttcactgattaactctttgattgttcttgggatctcagatgggaattcacgctgcttgctgcagagctcttgggctaagtgtattttcttaattactgagaaatgcgtgttatcagtaagcagtgaaaagtcttgaaaaaactaagtaattttaaaaaaaaaaaaaaaaaaaaaaaggtcctgcccgggcggccgctctagaactagtggatcccccgggctgcaggaattcgatatcaagcttatcgataccgtcgacctcgagggggggcccggtacccagcttttgttccctttagtgagggttaattgcgcgcttggcgtaatcatggtcatagctgtttcctgtgtgaaattgttatccgctcac

SEQ ID NO: 14277 - DNA, 402 bp, Homo sapiens
gactcactatagggcgaattggagctccaccgcggtggcggccgaggtacttttttttttttttttttttttttttgttgggtgttttcattttcttctggactggtaatttttacttctggccttggtggtctttgagggtctacatcagcctcatcttgtccactgccagctccttgagactttctttccttgtctaggaccagttgaagctcattattaacctgctgcagctcctcaccattctcctcatcggtgcctccatttacacgagcagggcgtgcctgctgctcactgtgatccagaatctcctcgacttgctcaggggcatctgtagcctccctacctccttcctcttcaaggtcaccattcattcctgaaaagtcttctttctgttctgca

SEQ ID NO: 14278 - DNA, 502 bp, Homo sapiens
agggcgaattggagctccaccgcggtggcggccgcccgggcaggtactttttggtgttttttggaaaagttacatttagatctattctgaagctgttcatttttaacaaataaaatgttacaggtttcacatgatttattcgcaaaaaaaaaaaaaaaaaaaagtactgtctgtgaacagcaaggaaaatatgattacacctaagagatgaaattggcataggcgagaagtcagaaaaataatctatacagcttgcatggttggggagttaggagaggccaaggccacgtgcacgtagagcaagaggtagaagaggcccgggggctagagcgcaccctggtggatagtgtgagaatttcacactggctcaagccttgaagaccaccccaggggtgcgccttagcaacgcacttatgcaagaccccaacaactggcccttgaaaggagcttttcactggtgggatgtggccctgcttgtattcagaaccatagttttaacaag

SEQ ID NO: 14279 - DNA, 443 bp, Homo sapiens
atagggcgaattggagctccaccgcggtggcggccgaggtactaatatcccttaatggcagaatgtgataatcatggaattaattattgctaaagtagttttcaaataaaaaaaagaaaaaagaaaacaaaacaaattaaacttgacacaatctgaccaaacacgtgtcaatttacaatttcaaggttattttacaaaatacctacatttacacaataggctcccggcagcatttccagacaaatgttcttttaatttatcctgacatgctataaatgaataaattacactatttaaaaattatcatcagtaagttttcctttctcatgggtcagagaaaaagaaatgagcgtgcaaagaagattgagaggaagcgcacgcacacagataacttaaagaagcaagaggggctggggagggtcaacaattactgaaccttacac

SEQ ID NO: 14280 - DNA, 509 bp, Homo sapiens
atagggcgaattggagctccaccgcggtggcggccgaggtactttcaaacacctcatgaggctggccagagatgacaccactgccccggatgcaagggggcagccttgctttggaccccgttctgaatctcaggcttcatctattaggcacactgagcagaaacactcctccctgccacttccgagttgcagcaaaaagggtctaactatgatttaaagcaaataattttaaacttcaaattttcattactgtcatacttatgaggaccaaataatgtaatgactaagacatcaaattacatgtaatatgaataaaaccagtaagaaaatgatagttacttataattggatcaacatacaaaaagaacgtcatttggccaaagtaaaacggttaaaaaaatagtgtctataaaatcaccatataaaatcttagtatgtacctgcccgggcggccgctctagaactagtggatcccccgggctgcaggaattcgatatcaagcttatcga

SEQ ID NO: 14281 - DNA, 432 bp, Homo sapiens
actactatagggcgaattggagctccaccgcggtggcggccgcccgggcaggtacaaaacaaattcaaagggttaagaatttcaagttggtagcttcagagcattaagccccaaatgtggggtcccttctgagcccaggattatgtgtgactgcactggtcacattgccatgaagccagccctggtggttggtagaggggtgggcactggacctaagcagggccaatcagagccattcctggaaatggatatataaatattaggaatgcaaagttatttattttgttagagtttgaacaacgtgatctgtagaaaaccagtcacatttccttaaggatgcatcaataaatatgagctaaatgtaataattagaactttggtttccaagcagattccatgctctaattccctgcatagtgaatataataagat

SEQ ID NO: 14282 - DNA, 304 bp, Homo sapiens
tacgactcactatagggcgaattggagctccaccgcggtggcggccgcccgggcaggtacaaaacaaattcaaagggttaagaatttcaagttggtagcttcagagcattaagccccaaatgtggggtcccttctgagcccaggattatgtgtgactgcactggtcacattgccatgaagccagccctggtggttggtagaggggtgggcactggacctaagcagggccaatcagagccattcctggaaatggatatataaatattaggaatgcaaagttatttattttgttagagtttgaaca

SEQ ID NO: 14283 - DNA, 418 bp, Homo sapiens
agggcgaattggagctccaccgcggtggcggccgaggtacccatggcccttcctttgaaatcattttttcttccaggcccttgcgctccgggcctgggagacagaatgagagacagccccaaggatctgtgatacactttcagggtcattttttccttgtccctgccagtccaggcacaccttttgtgttctctcctgaacatactttctcatttttcacaatatggaaaggctgataatttttcaaacctttaagttctctttccttttgattgaccattttgtctttaaatcatttttcttctcacattttattattataaacattcaagggaaaccaagccattattttgcttagaaatttattcagccagctgggccgtggtggctcacacctgtaatcccagcactttgggag

SEQ ID NO: 14284 - DNA, 462 bp, Homo sapiens
  misc_feature 26: n = A,T,C or G
gggcgaattggagctaacaccccggnggcggccgaggtacttaccctcaatttcaatgtcaacaaatcctttaaaaaggcaaaagacacaaaagtgtagcatttaccaaaccagtctgtacgcggggcctgtggatgctgcgcctctccgaacgcagcatgaaggtgctccttgccgccgccctcatcgcggggtccgtcttcttcctgctgctgccgggaccttctgcggccgctctagaactagtggatcccccgggctgcaggaattcgatatcaagcttatcgataccgtcgacctcgagggggggcccggtacccagcttttgttccctttagtgagggttaattgcgcgcttggcgtaatcatggtcatagctgtttcctgtgtgaaattgttatccgctcacaattccacacaacatacgagccgggagcataaagtgtaaagcctggggtgcct

SEQ ID NO: 14285 - DNA, 363 bp, Homo sapiens
actactatagggcgaattggagctccaccgcggtggcggccgaggtacacaaagagatgctacctaggagaagggtattcttttcactattctttcaaattttctgtatgttcgaacattttcatagtagaaagttggggggaaaatctgtttcataaacatttcctcagcagcagtccagtctattgcattttaattggttgtgatatcattgttttatgcaatacgttctcaacaagtatatcctccggcaaactgaacaaggaccaagtctgttctgcctacagctctgcttcctcatagctgctttccagaacgtgactcttgcaaattatcaagaaaggggaactaatctaaggggat

SEQ ID NO: 14286 - DNA, 480 bp, Homo sapiens
agggcgaattggagctccaccgcggtggcggccgaggtactccttcgtaaaccatggagagccagcccaatgcacagcagtggatatcatctttctcagagtccagtatcacagaatcacgactttgtccagctgcaggtgcctgcaggtcacactggctaactacttctgtgatgggctcttctttctgaggttctgccaacttgtctactacatagggttgatcatcctgttcaggaaatatttctttcatttgctctgagcttaatattgtaatttgtatttgatctgctgggtctttggagtcaggactggttttatcagcagtttgatcttctgaggtctggtatgtagtttgctggcccacagaaccttcacgtgtattcacagcctcaatgccataaggaaactctttaagaagttctgacagctggtcatgtaggtataagaacaggtgccttacactgtggatttcatttc

SEQ ID NO: 14287 - DNA, 494 bp, Homo sapiens
tacgactcactatagggcgaattggagctccaccgcggtggcggccgaggtactccttcgtaaaccatggagagccagcccaatgcacagcagtggatatcatctttctcagagtccagtatcacagaatcacgactttgtccagctgcaggtgcctgcaggtcacactggctaactacttctgtgatgggctcttctttctgaggttctgccaacttgtctactacatagggttgatcatcctgttcaggaaatatttctttcatttgctctgagcttaatattgtaatttgtatttgatctgctgggtctttggagtcaggactggttttatcagcagtttgatcttctgaggtctggtatgtagtttgctggcccacagaaccttcacgtgtattcacagcctcaatgccataaggaaactcttttagaagttctgacagctggtcatgtaggtataagacaggtgccttatcactgtggatttcatttct

SEQ ID NO: 14288 - DNA, 448 bp, Homo sapiens
cgactcactatagggcgaattggagctccaccgcggtggcggccgaggtactatttttttttttttttttttggggagtttgttgtttttaaccaaattataatagatggaagcattaggcagctgaatgttcatttgccttcatacatcatctcctatttcatttgctagtctgcataaaaagaatcatttatcagcaaaagcatcatttattgttaaatgacaaggtttagctagcagagagagtttgcatgcttttaaaaaaataacttgactttcttcaagacactacaaacatttgtcaaaaggctgccaagtcattaaagatattttcaaaatgtctatttctattttaaaacttgccttacaattttgtttgattccactgacttttttttaactgaaggcttaaaacatccaaacaataagtattaatgatcagataagg

SEQ ID NO: 14289 - DNA, 809 bp, Homo sapiens
  misc_feature 1, 11, 21, 29, 32, 45, 56, 60, 61, 62, 64, 65, 66, 67, 75,77, 78, 99, 100, 108, 111, 119, 129, 133, 135, 145, 157,171, 178, 179, 182, 193, 194, 198, 208, 210, 238, 294, 317,325, 327, 329, 340, 347, 348, 352, 358, 364, 365, 368: n = A,T,C or G
  misc_feature 374, 377, 384, 386, 387, 388, 396, 409, 410, 413, 414, 434,501, 535, 583, 638, 639, 657, 669, 720, 784, 790, 793: n = A,T,C or G
nggcttcgagnacaccaccanaggctaanagnagtacaccgccgnggcggccgagnacannnannnnggtggaangnngatctacgcaaacaccgcacnngggacggngcngacaagcnattttttaancccncnccggccaganccgagcaaaggngaggaagcaaaagnccacagnnacnggggcaggaanngganaaaggagggngnggggcttttttgcggttttttacagggngtgagcccaacactccgggaggccgaggcaggaggatcgcccgagcccaggagggngagaccagcctgggcaacaaggngaaacccngncnctacaaaaaanacaaaannagcngggcangggggnnggngccagngancccagcnannngggaggcngaggggggagaanngcnngagcccaggaggcagagggngcagcgaagccaagaaggcgccaccggaccccagccaaggcaacagaaggagaacccgccccacagnaaaaaaaaaggaaaagaaaaagaaaaaagacccnggccgggcggccggccaagaaccaggggaacccccgggcggcaggaanccgaaacaaagccaacggaaccggccaccgcgagggggggccggggacccacccnnggaccccggagggagggnaaacggcgcccnggcggaaccagggcaaaagcgggccgggaggaaaaggggacccgccacaancccaccaacaacgaacgggaagcaaaaagggaaaagccgggggggccaaaggagggagccaacncacaanaanggcggggcggccacgg

SEQ ID NO: 14290 - DNA, 381 bp, Homo sapiens
  misc_feature 70: n = A,T,C or G
ccctaggagaaggcaacgagctttcatacgagggggccccagcccccgagaaaatactggaacacgacgnctaaggcagagctcctgaagcacctgctctggtcagccgtggcaggctttcaaattttttggcccggcctcgcaaagcacaaaggtggacacagaacccactgccctcggcgcaggagaaaaaaaagcaacagcatatcatgaggggacatcaggcacactgaagagatggaggattcggtgtcttacattgcctggtccctccaaaatgtctaatatagacagacttgtgacaaagtctttgaaaaaaattataatgggccacacagcatgacttcttttttttctttgtatacatgatctcgaaaatag

SEQ ID NO: 14291 - DNA, 702 bp, Homo sapiens
taatacgactactatagggtgaattggagctccaccgcggtggcggccgcccgggcaggtacatcattctgctgagggacatccaggacaaggtcaccacactctacaaaggcagtcaactacatgacacattccgcttctgcctggtcaccaacttgacgatggactccgtgttggtcactgtcaaggcattgttctcctccaatttggaccccagcctggtggagcaagtctttctagataagaccctgaatgcctcattccattggctgggctccacctaccagttggtggacatccatgtgacagaaatggagtcatcagtttatcaaccaacaagcagctccagcacccagcacttctacctgaatttcaccatcaccaacctaccatattcccaggacaaagcccagccaggcaccaccaattaccagaggaacaaaaggaatattgaggatgcggtgagaagggggtgctcaaccaactcttccgaaacagcagcatcaagagttatttttctgactgtcaagtttcaacattcaggtctgtccccaacaggcaccacaccggggtggactccctgtgtaacttctcgccactggctcggagagtagacagagttgccatctatgaggaatttctgcggatgacccggaatggtacctcggccgctctagaactagtggatcccccgggctgcag

SEQ ID NO: 14292 - DNA, 480 bp, Homo sapiens
tacgactcactatagggcgaattggagctccaccgcggtggcggccgaggtacgcggggcttgcatctctggggccaaggagtggtgggtgagatcttccatggccctggcatgggtgatataagcgggaccggtaaggtggtggagctcttaccagaccctgcagaaccctctccgtggtgttgaacttcctggaaccagggtgttgcatgttttcctcataatgcaggttggtgatggtgaagttgagggtgaacggcaccaggagagggccagcagttgtggggctggggagggaggatggagtccctgacccaaggtccactgtggaggtcccaggagctgaaaaaagtcctcatcagtgaaagcagaaagcactctcatggcagaaacggcaagaagatagactattatgaggtctgctgcatgtgggcttgagctgggtctgtctttggagctggggcagaggggagcttgagt

SEQ ID NO: 14293 - DNA, 415 bp, Homo sapiens
cgtatacgactcactatagggcgaattggagctccaccgcggtggcggccgaggtactttacaaacaagtctgaaaaaggagggagtaaagtatggaagaatgatctctggatgttgctactggcctcaaaaaagcagtgctacagatttctgtgtgaagagaatacgctgttcacacattttcctatttccaggcatgaaaatattctattgggtagaagaaataggaaaatctcttatgacaaatgaaagacaggtgcaaacacaccaatccctgtctagcagtataaagcatattgggctcagaatttgtctgttgctagcacctggctttcatactatatccttatcaaataatcagattgaaagtccaaatcattcttaagcaagcaaaaatcctcagtggccatacctc

SEQ ID NO: 14294 - DNA, 420 bp, Homo sapiens
  misc_feature 23, 52, 57, 66, 110, 133, 134, 135, 145, 151, 154, 155, 162,163, 170, 173, 176, 183, 185, 186, 187, 190, 192, 194, 199,200, 202, 205, 210, 260, 264, 267, 271, 280, 286, 289, 290,294, 295, 300, 304, 311, 312, 313, 318, 328, 330: n = A,T,C or G
  misc_feature 333, 340, 344, 345, 348, 352, 377, 378, 379, 380, 385, 386,393, 395, 396, 401, 402, 405, 409, 417: n = A,T,C or G
gttcgacgagcaatgtggaaaancaccaaggaattggggacaaccgcccggnggcgncagaacagnggacctttgcggaggaagaaacccaagcccaccgaaccgcgccncgagggggtcccggacccagcgnnngccccaaagngagggnaanngcgcgcnnggcgaancanggncaaagcngnnnccngngngaaanngnganccgcncacttttcatttttcagacgagccgggagcaaaccccgaaaaaaaggggngccnaangagngagcgaacncacaanaanngcgnngcgcncacngcccgcnnnccagncgggaaaccngncgngccagcngcannaangaancggccaacgcgcggggagaggcggnnnngcganngggcgcncnnccgcnnccncgcncacggacncgc

SEQ ID NO: 14295 - DNA, 419 bp, Homo sapiens
atacgactcactatagggcgaattggagctccaccgcggtggcggccgcccgggcaggtacgcgggctgcctggggatggcagccgcgtgcgttccctgtgctgtcctgtagggttgtggtggctttctgatattcaggttggtcccttttccttctttttggatgggctttcgaggttgggagaggaagctcagggatggaactgactaaacatatgtgagatgtttccttgtttgctgctcatggaggtttcatttctgaagtcttttcttgggagggaaaaggatgtgtggatatatgaggtgactctagaaccctcattttatggatgaagaaactgtgattcacagagggagagtgatttgtccagtgtcacgtggggagctggccggggagccagacctcctgtacctcggcc

SEQ ID NO: 14296 - DNA, 479 bp, Homo sapiens
actactatagggcgaattggagctccaccgcggtggcggccgcccgggcaggtacatttccatgggccctgttcccattgatgtatactgcttccttactaacagtgagggatgactttcatcagtcttttatcacctgaacagtcttccggccataatgatagtaactataagctgatgcagctgtggtgaaagctgtaaaacaccttttatggaagaaaagaaataaaatgtagttgtcaagtctaaaaaatagtagcaacgggaatcataatgaatacatgcaatgaatttaaaatgtaaaaatgaatttaaaaagtaaaaagggctctgtggtgtaatttttcttaactacaagagtctaaatacactgcttttctttaagagttcattttaattagtaacgtcaaacaaaattattctagataatgagccctacaaattactactactagcaactgtcattttttactcgggca

SEQ ID NO: 14297 - DNA, 479 bp, Homo sapiens
tacgactcactatagggcgaattggagctccaccgcggtggcggccgcccgggcaggtacgcgggtggccagattaattttccagccaatagaggaaagtttttatatattttttgctaaggtgctggagaggggaaaggatgccacacttcagaagcaggaggacgttgctgtggctgctgcagtcttggagcccctgctcaagctggccctgctggccggcctgaccatcactgtttttggctttgcctattctcagctggctctggatatctacggagggaccatgcttagctcaggatccggtcctgttttgctgcgttcctactgtctctatgttctcctgcttgccatcaatggagtgacagagtgtttcacatttgctgccatgagcaaagaggaggtcgacaggtacctcggccgctctagaactagtggatcccccgggctgcaggaattcgatatcaagcttatcgata

SEQ ID NO: 14298 - DNA, 499 bp, Homo sapiens
actactatagggcgaattggagctccaccgcggtggcccgcccgggcaggtacagcaaaaaagaaactgagaagcccaaactgctttcttgttaacatccacttatccaaccaatgtggaaacttcttatacttggttccattatgaagttggacaattgctgctatcacacctggcaggtaaaccaatgccaagagagtgatggaaaccattggcaagactttgttgatgaccaggattggaattttataaaaatattgttgatgggaagttgctaaagggtgaattacttccctcagaagagtgtaaagaaaagtcagagatgctataatagcagctattttaattggcaagtgccactgtggaaagagttcctgtgtgtgctgaagttctgaaggacagtcaaattcatcagcatgggctgtttggtgcaaatgcaaaagcacaggtctttttagcatgctggtctctcccgtgtccttatgcaaataatcgtctt

SEQ ID NO: 14299 - DNA, 484 bp, Homo sapiens
actatagggcgaattggagctccaccgcggtggcggccgtccacatcccgaaggccatagcgtcgagcaaggtcacaggatggcagcaccttaccactcaggctcaggatattgggatctgttgccaaagccaccacacatttgccactcaattctgtggtttccgcagatgagaaggctgatttgaactgcttcaacacaggatcctgcaggacctcctcctttgccatatgctccttcagcagttctgtctgcacaatccccggccacagagacacacagctgaccccatggcgccgcagctcgtgggcacagtcagcagccagcttgtcacacgcagctttgcccacaccataggggacattgaacatatactgcaggcttcctggggaggagatgaccacgatgagcccctggccagctggtaccttggccgctctagaactagtggatcccccgggctgcaggaattcgatatcaagct

SEQ ID NO: 14300 - DNA, 349 bp, Homo sapiens
actactatagggcgaattggagctccaccgcggtggcggccgcccggcaggtacgcggggggtcctggtgctgcggccacaccaccctggggtgctcattgacagagctgccataatgaacttgaaaggacgggaatcacgagggaagctggggctcccctgcccacaggagaggatccccgttcttcaagcttctctgctcagtgtctactaacgaccgacatttgctaatgtaaataatagtaaattattgagaattctaattcttttacacagtctgtttttaatctattttaattaaataaaatctatgactctaaaaaaaaaaaaaaaaactcaaaaaaaaaaa

SEQ ID NO: 14301 - DNA, 494 bp, Homo sapiens
cactactatagggcgaattggagctccaccgcggtggcggccgggggccattgagactgccatggaagacttgaaaggtcacgtagctgagacttctggagagaccattcaaggcttctggctcttgacaaagatagaccactggaacaatgagaaggagagaattctactggtcacagacaagactctcttgatctgcaaatacgacttcatcatgctgagttgtgtgcagctgcagcggattcctctgagcgctgtctatcgcatctgcctgggcaagttcaccttccctgggatgtccctggacaagagacaaggagaaggccttaggatctactgggggagtccggaggagcagtcccttctgtcccgctggaacccatggtccactgaagttccttatgctactttcactgagcatcctatgaaatacaccagtgagaaattccttgaaatttgcaagttgtctgggttcatgtctaagcttgttccag

SEQ ID NO: 14302 - DNA, 475 bp, Homo sapiens
  misc_feature 366: n = A,T,C or G
actactatagggcgaattggagctccaccgcggtggcggccgaggtacctccaggcacagctaattttactttttattttcttgagacaggtctcactctgttgcccaggctggtcttgaactcttggcctcaagtgatcctccagccatgagccactgtaaatgtctgggaatgccaacttgaagcccagctggtcagaagttctagaggcccagacttgcaactggtgtctgaagggatggcagtcttggggactgagccctcaacctgagggatctgatgctatttccaggcagatagtgtcagaattaaattggaggatacgcagttagtgtctgctgcagaactgattgcttgcttgctgngtagggggaaatccccacatatctgggggtcatttgaagtcttttggtgttgactcttactgtgttttgttgttttcatgtgagagcagaggaaaagcaggaaatgttt

SEQ ID NO: 14303 - DNA, 410 bp, Homo sapiens
attggagctccaccgcggtggcggccgaggtactactgacccaacaactgtgactagctggccacgtcattcagggctggtgtggcatttatgtgtgtgtgtgtgtgtgtgtgtttttcctgtttgcccagcagtgcattgtgggttccaagagtgggtagtgtgtgtatgtgtgtgtgtcagagggagacctggcaggcacctctttgagagtagctgtggtcagagctgtttggtcagtgcattatgttgaatgaggtccaggaacccagagccacccagcagacaccactgtggcttgccagctgccaagatggagaagcatgtgcccctgtagagcgtctccccagaaccagaccccgagccactcgcttcctctgtgctgagacaacattggtgccaggggagat

SEQ ID NO: 14304 - DNA, 406 bp, Homo sapiens
ctcactatagggctaattggagctccaccgcggtggcggccggaagagcaaccgagatgaaggtgaagatgctgagccggaatccggacaattatgtccgcgaaaccaagttggacttacagagagttccaagaaactatgatcctgctttacatccttttgaggtcccacgagaatatgtaagagctttaaatgctaccaaactggaacgagtatttgcaaaaccattccttgcttcgctggatggtcaccgtgatggagtcaattgcttggcaaagcatccagagaagctggctactgtcctttctggggcgtgtgatggagaggttagaatttggaatctaactcagcggaattgtatccgtacctcggccgctctagaactagtggatcccccgggctgcag

SEQ ID NO: 14305 - DNA, 374 bp, Homo sapiens
ctatagggcgggttggagctccacgcggtggcggccgaggtactcttcctgccttcccccatatactgaagtttgagaggctgggaaggtgcggaatgggaaaaggagcagctgcttatgttcagtttaacattctctgggtttctccatctaggtcttgagttcattctcttcctgtccttttggcttccttgtttaacctggtccctgtttcaaggagagaagcctcatcagtgccaagtctgtgggaagaccttctctcagagtggaagcaggaatgtgcatttgagaaagcatcacctgcagctgggagcagctgggagtcaagagcaggagcaaactgctgagccactaatgggcagtagtttgcttga

SEQ ID NO: 14306 - DNA, 589 bp, Homo sapiens
cgcggtggcggccgaggtactccttcgtaaaccatggagagccagcccaatgcacagcagtggatatcatctttctcagagtccagtatcacagaatcacgactttgtccagctgcaggtgcctgcaggtcacactggctaactacttctggatgggctcttctttctgaggttctgccaacttgtctactacatagggttgatcatcctgttcaggaaatatttctttcatttgctctgagcttaatattgtaatttgtatttgatctgctgggtctttggagtcaggactggttttatcagcagtttgatcttctgaggtctggtatgtagtttgctggcccacagaaccttcacgtgtattcacagcctcaatgccataaggaaactcttttagaagttctgacagctggtcatgtaggtataagacaggtgccttatcactgtggatttcatttcttgcaggatcttggggagtatagttgctggatgcatctatttcctgagggtaaatatcctcctgaatagcagctgacgagcacgtatcgttagctgtgcttttttcagtggcatgctccaaactactttt

SEQ ID NO: 14307 - DNA, 630 bp, Homo sapiens
  misc_feature 176, 192, 200, 201, 258, 276, 293, 303, 313, 558: n = A,T,C or G
tacgactcactatagggcgaattggagctccaccgcggtggcggccgaggtacaaattgtcgtttttattcctcttattgggatatcattttaaaaactttattgggtttttattgttgttgtttgatccctaaccctacaaagagccttcctattcccctcgctgttggagcaanaccattataccttacnttccagcnnaagcaaagtgctttgaccttcttgcttcagtcatcaagccagcaacgagggaacaanaactgttcttttgcattntttgccgctgagatatnggcattgcanctgcttatantgccaagctaatttataagcaagatattgatcaaatatagaaagttgatattcaacctcacaagggctctcaaagtataatctttctatagccaactgctaatgcaaattaaaacatatttcattttaacatgatttcaaaatcagtttttcatactaccctttgctggaagaaactaaaaatatagcaaatgcagaaccacaaacaattcgaatggggtagaaacattgtaaatatttactctntgcaaaccctggtggtattttattttggcttcatttcaatcattgaagtatattcttattggaaatgtacct

SEQ ID NO: 14308 - DNA, 535 bp, Homo sapiens
gcgtccggatctccaacgtgactgacccgccgaccacgaccagcaaagtggtcccgacgacgctcaccaccaccaagccgccagaaacctgtgagagcttcaacagctgtgtttcctgtgtcaacgccaccttgactaataatattacctgcgtctggctagattgccatgaagcaaataagacctattgttcaagtgaattagtaagtaattgtacccagaagaccagtactgactcctgttctgtaatacctaccaccccagtgccaaccaattctacagctaagcctacaactcggccttcctctcctacacctactccctcagttgtcacatcagcaggtgcaacaaataccactgtgactccaacctcacagcctgagcggaagtccacctttgatgcagccagcttcattggaggaatcgttcttgtcttgggtgtgcaggctgtaattttctttctctataaattctgcaaatctaaagaacgaaaataccatactctgtaaacagacccattaaattaatgtggact

SEQ ID NO: 14309 - DNA, 497 bp, Homo sapiens
ggagtcgaccacgcgtccgggcaactgcagttggaaaaaaagattcaacttcaaagcagaggatttttgatgaagaaccagctaatggagtgaagatagaaaggtttacaagggatgatccttggttatcttcatgtgaagaagtggatgattgtaaagaccagttggagaagcaacaggaaaaacaagagatacttttgcaggaagtggcattcactcaaaggaaagcagttattcatgagagagtctgcaaaagtgatgaaactggggagaagagtggtctgaattccagtctattttcatccccagttatacccataagaaaccattttcataaacatgtatcacatgctaaaaaatggcatcttaatgctgctgtaaacagtcatcagaagattaatgagaatgagacactatatgaaaataatgaatgtggaaaaccccctcagagcattcaccttattcagtttacaagaactcaaacaaaagataaatgc

SEQ ID NO: 14310 - DNA, 357 bp, Homo sapiens
ccggggagcacttccgctacggagctccagcccttctctgagacggggaccaggggatggcagccatgcacctgacagcctggccccagaagtcggtgacctttgaggacgtggctgtgtacttcacccaggcggaatgggatggcctgtcccctgcacagaggaccctgtacagggatgtgatgctggagaattatgggaatgtggcctccctgggatttccacttctcaaacctgctgtgatctcacaactggagggaggaagtgagctggggggctcatctccactggctgcaggaacaggccttcagggcctccagactgatggagtctcgctctgtcgcccaaactggagtg

SEQ ID NO: 14311 - DNA, 513 bp, Homo sapiens
cgcgtccgttttctcctggcaccctgtattcatggccttggcgttctgcctctgcatggctgaagccatcctactcttctcacctgaacactccctgttcttcttctgctcccgaaaagcacggatccggctccactgggcagggcagaccctagccatcctctgtgcagctctgggcctgggcttcatcatctccagcaggacccgcagtgagctgcctcatctggtgtcctggcacagctgggtgggagccctgacactgctggccactgctgtccaggcactgtgtgggctctgcctcctttgtccccgggcagccagggtctcaagggtggctcgcctcaagctctaccatctgacatgtggactggtggtctacctgatggctacagtaacggtgcttctgggcatgtactcagtatggttccaggcccagatcaaaggtgcggcctggtacctgtgcctggcactgcccgtctatccagccctggtgatcatgcaccagatttccag

SEQ ID NO: 14312 - DNA, 358 bp, Homo sapiens
cgcgtccgtaagttccatattgaaaatctgtaaaagacctccagcgctgcacagtgtctcttgcacggtatcgagttgtagttaaagaagagatggatgcctccattaagaaaatgaaacaagcctttgctgaattggagagctgtttaatggatcgagaagtggcgttgcttgctgaaatggacaaagtgaaagctgaagcaatggaaattttgctcagccgacaaaagaaggctgaacttctaaagaagatgactcatgtggctgttcaaatgtcagagcagcaattggttgagctcagagctgatatcaagcactttgttagtgaacgtaaatatgatgaggatctgggacgagt

SEQ ID NO: 14313 - DNA, 456 bp, Homo sapiens
ggctgtccatggtgcagcaggtgcagccggccatgcaggccgtcatccgaactgacatggaccaaattatcacctccaaggagcaccttgccagcaagatccgagccttcatcctccccaaggcagaggtgtgcgtgcggaaccatgtccagccctacatcccatccatcctggaggccctgatggtccccaccagccagggcttcactgaggtgcgagatgtcttcttcaaggaggtcacggacatgaacctgaacgtcatcaacgagggcggcattgacaagctgggcgagtacatggagaagctgtcccggctggcgtaccaccccctgaagatgcagagctgctatgagaagatggagttcgctgcgactggacgggctgcagcagcgatttgatgtgtcagcacgttcgtgttcaagcagcgagcccagatccacatgcgggagcaaatgg

SEQ ID NO: 14314 - DNA, 277 bp, Homo sapiens
tggccaacccaggtttttaacccacgtctagtggtcatcctattctttccacaccaacatgccaaaagccttacctcgaaagaaaatataatttgcaagaagcatcacagtgccggggtctatattctcgatcaggttgttaattttcccatgggttttttgactgataaagtcattgatctgcttctgagccatttccaaattctgaaagttggtaaggatggtttcggcactgtaaaagttcttggcatcttccaaaaacttacgctgtggctgc

SEQ ID NO: 14315 - DNA, 358 bp, Homo sapiens
acgcgtccgtggacggagaaggacagtagggatactggatatgggaggagcctctctccaaattgcttatgaagttcctacctcaacctctgtccttcctgcaaagcaggaagaagctgccaagatcctgctggctgagttcaacctgggctgtgatgtgcaacacactgaacacgtgtacagggtttatgtcacaacttttctgggtttcggaggcaactttgcccggcagcgctacgaagaccttgttctgaatgaaactcttaacaaaaacagattgcttggtcagaagacaggtctgagtcccgacaatccatttctggatccctgcctgccagtgggactcacagatgtggtg

SEQ ID NO: 14316 - DNA, 358 bp, Homo sapiens
gcgtcctgtttacttggagtgtccaaaactgcaagcagtagagaaataagacaagctttcaagagagtggcattgaagttacatcctgataaaaacccgaataacccaaatgcacatggcgattttttaaaaataaatagagcatatgaagtactcaaagatgaagatctacggaaaaagtatgacaaatatggagaaaagggacttgaggataatcaaggtggccagtatgaaagctggaactattatcgttatgattttggtatttatgatgatgatcctgaaatcataacattggaaagaagagaatttgatgctgctgttaattctggagaactgtggtttgtaaatttttact

SEQ ID NO: 14317 - DNA, 515 bp, Homo sapiens
ccggcgaggcgctcaacctcaccgaggcgccccacaacctgtccggcctgctgggcttgtccctgcgctacaacagcctctcggagctgcgcgccggccagttcacggggttaatgcagctcacgtggctctatctggatcacaatcacatctgctccgtgcagggggacgcctttcagaaactgcgccgagttaaggaactcacgctgagttccaaccagatcacccaactgcccaacaccaccttccggcccatgcccaacctgcgcagcgtggacctctcgtacaacaagctgcaggcgctcgcgcccgacctcttccacgggctgcggaagctcaccacgctgcatatgcgggccaacgccatccagtttgtgcccgtgcgcatcttccaggactgccgcagcctcaagtttctcgacatcggatacaatcagctcaagagtctggcgcgcaactctttcgccggcttgtttaagctcaccgagctgcacctcgagcacaacgacttggtc

SEQ ID NO: 14318 - DNA, 351 bp, Homo sapiens
gacccacgcgtccgcgcaccgcttcattgaggctgcaagagcacagggcacccacgtgctggtccactgcaagatgggcgtcagccgctcagcggccacagtgctggcctatgccatgaagcagtacgaatgcagcctggagcaggccctgcgccacgtgcaggagctccggcccatcgcccgccccaaccctggcttcctgcgccagctgcagatctaccagggcatcctgacggccagccgccagagccatgtctgggagcagaaagtgggtggggtctccccagaggagcacccagcccctgaagtctctacaccattcccacctcttccgccagaacctgagggtgt

SEQ ID NO: 14319 - DNA, 557 bp, Homo sapiens
cactcaacttcaccatctccaatctccagtattcaccagatatgggcaagggctcagctacattcaactccaccgagggggtccttcagcacctgctcagacccttgttccagaagagcagcatgggccccttctacttgggttgccaactgatctccctcaggcctgagaaggatggggcagccactggtgtggacaccacctgcacctaccaccctgaccctgtgggccccgggctggacatacagcagctttactgggagctgagtcagctgacccatggtgtcacccaactgggcttctatgtcctggacagggatagcctcttcatcaatggctatgcaccccagaatttatcaatccggggcgagtaccagataaatttccacattgtcaactggaacctcagtaatccagaccccacatcctcagagtacatcaccctgctgagggacatccaggacaaggtcaccacactctacaaaggcagtcaactacatgacacattccgcttctgcctggtcaccaacttgacgatggactccgggttggtcact

SEQ ID NO: 14320 - DNA, 530 bp, Homo sapiens
ggcggccgcccgggcaggtacctaacctacctttaagactgggataactattggtattcaatagtttataccggatatagttatttatcgcatgatgagtaatagaaaggagcttcacagcttcacttaaaaatgggggtgcggaacattagttagttggtagggtaatggcctaccaagacgatgatgtttagccgggccgagaggctgtacctcggccgctctagaactagtggatcccccgggctgcaggaattcgatatcaagcttatcgataccgtcgacctcgagggggggcccggtacccagcttttgttccctttagtgagggttaattgcgcgcttggcgtaatcatggtcatagctgtttcctgtgtgaaattgttatccgctcacaattccacacaacatacgagccgggagcataaagtgtaaagcctggggtgcctaatgagtgagctaactcacattaattgcgttgcgctcactgcccgctttccagtccggaaacctgtcgtgccagctgcata

SEQ ID NO: 14321 - DNA, 513 bp, Homo sapiens
ggagctccaccgcggtggcggccgcccgggcaggtacctaacctacctttaagactgggatatctattgtttacaatagctaataccggatatagttatttatcgcatgatgagtaatagaaaggagcttcacagcttcacttaaaaatgggggtgcggaacattagttagttggtagggtaatggcctaccaagacgatgatgtttagccgggccgagaggctgtacctcggccgctctagaactagtggatcccccgggctgcaggaattcgatatcaagcttatcgataccgtcgacctcgagggggggcccggtacccagcttttgttccctttagtgagggttaattgcgcgcttggcgtaatcatggtcatagctgtttcctgtgtgaaattgttatccgctcacaattccacacaacatacgagccgggagcataaagtgtaaagcctgaggtgcctaatgagtgagctaactcacattaattgcgttgcgctcactgcccgcttt

SEQ ID NO: 14322 - DNA, 589 bp, Homo sapiens
gaatcggagctccaccgcggtggcggccgaggtacagcctctcggcccggctaaacatcatcgtcttggtaggccattaccctaccaactaactaatgttccgcacccccatttttaagtgaagctgtgaagctcctttctattactcatcatgcgataaataactatatccggtattagctattgtttccaatagttatcccagtcttaaaggtaggttaggtacctgcccgggcggccgctctagaactagtggatcccccgggctgcaggaattcgatatcaagcttatcgataccgtcgacctcgagggggggcccggtacccagcttttgttccctttagtgagggttaattgcgcgcttggcgtaatcatggtcatagctgtttcctgtgtgaaattgttatccgctcacaattccacacaacatacgagccgggagcataaagtgtaaagcctggggtgcctaatgagtgagctaactcacattaattgcgttgcgctcactgcccgctttccagtccggaaacctgtcgtgccagctgcattaatgaatcggccaacgcgcggtgagaggcggtttgcgta

SEQ ID NO: 14323 - DNA, 504 bp, Homo sapiens
ggagctccaccgcggtggcggccgaggtacctaacctacctttaagactgggataactattgttaacaatatctaataccggatatagttatttatcgcatgatgagtaatagaaaggagcttcacagcttcacttaaaaatgggggtgcggaacattagttagttggtagggtaatggcctaccaagacgatgatgtttagccgggccgagaggctgtacctgcccgggcggccgctctagaactagtggatcccccgggctgcaggaattcgatatcaagcttatcgataccgtcgacctcgagggggggcccggtacccagcttttgttccctttagtgagggttaattgcgcgcttggcgtaatcatggtcatagctgtttcctgtgtgaaattgttatccgctcacaatttcacacaacatacgagccgggagcataaagtgtaaagcctggggtgcctaatgagtgagctaacttacattaattgcggtgcgctcact

SEQ ID NO: 14324 - DNA, 489 bp, Homo sapiens
gagctccaccgcggtggcggccgaggtacagcctctcggcccggctaaacatcatcgtctttgtaggccattaccctaccaactaactaatgttccgcacccccatttttaagtgaagctgtgaagctcctttctattactcatcatgcgataaataactatatccggtattagctattgtttccaatagttatcccagtcttaaaggtaggttaggtacctgcccgggcggccgctctagaactagtggatcccccgggctgcaggaattcgatatcaagcttatcgataccgtcgacctcgagggggggcccggtacccagcttttgttccctttagtgagggttaattgcgcgcttggcgtaatcatggtcatagctgtttcctgtgtgaaattgttatccgctcacaattccacacaacatacgagccgggagcataaagtgtaaagcctggggtgcctaatgagtgagctaactcacattaatt

SEQ ID NO: 14325 - DNA, 504 bp, Homo sapiens
ggagctccaccgcggtggcggccgaggtacagcctctcggcccggctaaacatcatcgtctttttaggccattaccctaccaactaactaatgttccgcacccccatttttaagtgaagctgtgaagctcctttctattactcatcatgcgataaataactatatccggtattagctattgtttccaatagttatcccagtcttaaaggtaggttaggtacctgcccgggcggccgctctagaactagtggatcccccgggctgcaggaattcgatatcaagcttatcgataccgtcgacctcgagggggggcccggtacccagcttttgttccctttagtgagggttaattgcgcgcttggcgtaatcatggtcatagctgtttcctgtgtgaaattgttatccgctcacaattccacacaacatacgagccgggagcataaagtgtaaagcctggggtgcctaatgagtgagctaactcacattaattgcgttgcgctcact

SEQ ID NO: 14326 - DNA, 433 bp, Homo sapiens
cctcactaaagggaacaaaagctgggtaccgggccccccctcgaggtcgacggtatcgataagcttgatttttaatttctgcagcccgggggatccacgccaccgcggtggagctccaattcgccctatagtgagtcgtattacgcgcgctcactggccgtcgttttacaacgtcgtgactgggaaaaccctggcgttacccaacttaatcgccttgcagcacatccccctttcgccagctggcgtaatagcgaagaggcccgcaccgatcgcccttcccaacagttgcgcagcctgaatggcgaatgggacgcgccctgtagcggcgcattaagcgcggcgggtgtggtggatacgcgcagcgtgaccgctacacttgccagcgccctagcgcccgctcctttcgctttcttcccttcctttttcgccacgt

SEQ ID NO: 14327 - DNA, 607 bp, Homo sapiens
aagggaacaaaagctgggtaccgcgccccccctcgaggtcgacggatctataagcttgatatcaatttttgcattccggcggatccactagttctagagcggccgaggtacagcctctcggcccggctaaacatcatcgtcttggtaggccattaccctaccaactaactaatgttccgcacccccatttttaagtgaagctgtgaagctcctttctattactcatcatgcgataaataactatatccggtattagctattgtttccaatagttatcccagtcttaaaggtacgttaggtacctgcccgggcggccgccaccgcggtggagctccaattcgccctatagtgagtcgtattacgcgcgctcactggccgtcgttttacaacgtcgagactgggaaaaccctggcgttacccaacttaatcgccttgcagcacatccccctttcgccagctggcgtaatagcgaagaggcccgcaccgatcgcccttcccaacagttgcgcagcctgaatggcgaatgggacgcgccctgtaccggcacattaagcgcggccggtgtggtggttacgcgcagcgtgaccgctacacttgccagcgccct

SEQ ID NO: 14328 - DNA, 551 bp, Homo sapiens
agggaacaaaagctgggtaccgggccccccctcgaggtcgacggtatcgataagcttgatatcgaatttctgcagcccgggggatccactagttctagagcggccgcccgggcaggtacctaacctacctttaagactgggataactattggaaacaatagctaataccggatatagttatttatcgcatgatgagtaatagaaaggagcttcacagcttcacttaaaaatgggggtgcggaacattagttagttggtagggtaatggcctaccaagacgatgatgtttagccgggccgagaggctgtacctcggccgccaccgcggtggagctccaattcgccctatagtgagtcgtattacgcgcgctcactggccgtcgttttacaacgtcgtgactgggaaaaccctggcgttacccaacttaatcgccttgcagcacatccccctttcgccagctggcgtaatagcgaagaggcccgcaccgatcgcccttcccaacagttgcgcagcctgaatggcgaatgggacgcgccctgtagcggcgcatt

SEQ ID NO: 14329 - DNA, 606 bp, Homo sapiens
taaagggaacaaaagctgggtaccgggccccccctcgaggtcgacggtatcgataagcttgatatcgaattcctgcagcccgggggatccactagttctagagcggccgaggtacagcctctcggcccggctaaacatcatcgtcttggaggccattaccctaccaactaactaatgttccgcacccccatttttaagtgaagctgtgaagctcctttctattactcatcatgcgataaataactatatccggtattagctattgtttccaatagttatcccagtcttaaaggtaggttaggtacctgcccgggcggccgccaccgcggtggagctccaattcgccctatagtgagtcgtattacgcgcgctcactggccgtcgttttacaacgtcgtgactgggaaaaccctggcgttacccaacttaatcgccttgcagcacatccccctttcgccagctggcgtaatagcgaagaggcccgcaccgatcgcccttcccaacagttgcgcagcctgaatggcgaatgggacgcgccctgtagcggcgcattaagcgcggcgggtgtggtggttacgcgcaacgtgaccgctacacttgccagcg

SEQ ID NO: 14330 - DNA, 575 bp, Homo sapiens
gcactaaagggaacaaaagctgggtaccgggccccccctcgaggtcgacggtatcgataagcttgatatcgaatttctgcattctggggatccactagttctagagcggccgcccgggcaggtacctaacctacctttaagactgggataactattggaaacaatagctaataccggatatagttatttatcgcatgatgagtaatagaaaggagcttcacagcttcacttaaaaatgggggtgcggaacattagttagttggtagggtaatggcctaccaagacgatgatgtttagccgggccgagaggctgtacctcggccgccaccgcggtggagctccaattcgccctatagtgagtcgtattacgcgcgctcactggccgtcgttttacaacgtcgtgactgggaaaaccctggcgttacccaacttaatcgccttgcagcacatccccctttcgccagctggcgtaatagcgaagaggcccgcaccgatcgcccttcccaacagttgcgcaacctgaatggcgaatgggacgcgccctgtagcggcgcattaagcgcggcgggtgtggt

SEQ ID NO: 14331 - DNA, 564 bp, Homo sapiens
acccacgcgtccggggcccggatgctgggggccaccagggccaccggggatgtgctggtcttcatggatgcccactgcgagtgccacccaggttggctggagcccctcctcagcagaatagctggtgacaggagccgggtggtatctccggtgatagatgtgattgactggaagactttccggtattacccctcgaaggacctgcagcgtggggtgttggactggaagctggatttccattgggaacctttgccggagcatgtgaggaaggccctccagtccccaataagccccatcaggagccctgtggtgcccggagaggtggtggccatggacagacattacttccaaaacactggagcgtatgaccctcttatgtcgctgcggggtggtgaaaacctcgaactgtctttcaaggcctggctctgcggtggctccgttgaaatccttccctgctctcgggtagggcacatctaccgaaatcaggatgccccgtcccccgttgaccaggaggccaccttgaggaacaaggttcgcattgctgagacctggctggggtcattc

SEQ ID NO: 14332 - DNA, 474 bp, Homo sapiens
ttggagctccaccgcggtggcggccgaggtactgtgatatccacatatttttgagaaaaattcccaagccaggcgaatgtggattggaataaagacataggcagtgtataccaccatagcaataatggttagtaagatggtgttaaacatagatcgctcccagggctctaaaacagcacagcagctaatgatttggtattgatagtagagccaggagaaatattccttcacacgcctcaaatccatggttggctccttcaagctgcagtaagtttgtcctaagaaagtccaggtctggttcttcagccttgctccttcgcgaaatgatcctgtgtgggttagttctcctctctgggttgctgtttcctcatctcccagttgggtgtatctccctgcggcttaagtgagcgccgaggctttggctcctccccagctgctgcgagcttcccactggccccgcgtacctgcccgggc

SEQ ID NO: 14333 - DNA, 577 bp, Homo sapiens
ctactatagggcgaattgggccctctagatgcatgctcgagcggccgccagtgtgatggatatctgcagaattcgccctttcgagcggccgcccgggcaggtacattttgaatatcaatttctaaatatttacccaaaaatgtatatttaaagtttttaacaacttcttttcaatcttgaaaaagttccctcattttttcttttaaaatcccattaacaatcaatggttcttttaaaatagaataaatatttttttgtccatttaaagaagaatatggatcttggaaaatcatttgaatattttttcttaaaaatagattttgtttttttgttaatttgtttccagaaataacttcatctaataaagtaacttgaccaccgtaagattcatataatctaatcaaagatctaccaactgttgttttacctgatccagattcaccaattaaacctaaaatttttccttgttggatactaaaatttacgttatcaacagctttgacaacaccaaatttattggaaaaatatttttttaagcttgaactttaatggtggtttaacttgcattattttaata

SEQ ID NO: 14334 - DNA, 338 bp, Homo sapiens
ggcgaattggagctccaccgcggtggcggccgcccgggcaggtacgcgggggggtttccctgctatgttttgtcacacatcattgctgggagagttcagtgctatccaagtgactccccggggagaggacaactggaaatttatgcctggtgtcttcctggactccgacctatgcacctttttccttggatgattttaacctgtctccttttgctgcaatgaaccataaccatgagtatatcagcttttctaatttttgtgagtccctcaagtgaattatcaaacctaaggtagttttgggacccccatcacaaaaagtcaaacaggggcagggcaag

SEQ ID NO: 14335 - DNA, 495 bp, Homo sapiens
  misc_feature 198, 212, 266, 267, 294: n = A,T,C or G
gcgcgtaatacgactcactatagggcgaattggagctccaccgcggtggcggccgcccgggcaggtctcttgtctagtatactcaaggcagcctagtaaattattatttatctatacaatactggaaaaacttgtagacaaaaacatgacttgaattgctaaaaaaaaaaaaaaaaaaagagggagaatgaaaacttncggacgcgtgggtncgaagcttgggacctcggccgctctagaaacatagtggatcccccgggctgcannggaattcgatatcaagcttatcgatanccgtcgacctcgagggggggcccggtacccagcttttgttccctttagtgagggttaattgcgcgcttggcgtaatcatggtcatagctgtttcctgtgtgaaattgttatccgctcacaattccacacaacatacgagccgggagcataaagtgtaaagcctggggtgcctaatgagtgagctaactcacattaattgcg

SEQ ID NO: 14336 - DNA, 449 bp, Homo sapiens
actatagggcgaattggagctccaccgcggtggcggccgcccgggcaggtaggctgtctacactgacatcatccagggcaagctggaccagcgaaaccagctgctggaagtggatttctgcattggccgtgacatccgaaagaaggatatcaataatattgtcaagaccctgcatgaatggtgtgatggctgtgaagcagttctactgggcatcgagcagcaagttctgagagccaaccagtaccttggccgctctagaactagtggatcccccgggctgcaggaattcgatatcaagcttatcgataccggcgacctcgagggggggcccggtacccagcttttgttccctttagtgagggttaattgcgcgcttggcgtaatcatggtcatagctgcttcctgtgtgaaattgttatccgctcacaattccacacaacatacgagcc

SEQ ID NO: 14337 - DNA, 479 bp, Homo sapiens
ctactatagggcgaattggagctccaccgcggtggcggccgcccgggcaggttttttttttttttttctttctgttccttggactagataatctgaaatcaactgtcttcagttttgcagactcttgtgccagctaaaatgttctgttgagccccagaagctaattttcttttcagttattatgattttcagctttagaatttatttttttaatataatttctacctcttttttatattctccatttggtgagacattcacatactttcttccagttttttttagacgtagtttccttgagttctttgagcatatttaaaatagttgatttaaagtatttgtctagttactccaccatctgagtttcctcagggaaaatttctattgcctccttttttcctgtgtgtgggtcggtccatacggacgcgtgggtcgaagacctcggccgctctagaactagtggatcccccgggctgcag

SEQ ID NO: 14338 - DNA, 385 bp, Homo sapiens
actcactatagtgcgaattggagctccaccgcggtggcggccgcacttcttttttttttttgttttttttttaagcgcccggcattttctaaataaaatcattttatttggtaaaagggttttaacggtatacctttctagctaaaagaaaagaaatagcgggatgtacctcggccgctctagaactaggggatcccccgggctgcaggaattttttatcaagcttatcgataccgtcgacctcgagggggggcccggtacccagcttttgttccctttagtgagggttaattgcgcgcttggcgtaatcatgggcatagctgtttcctgtgtgaaattgttatccgctcacaattccacacaacatacgagccgggagcataaa

SEQ ID NO: 14339 - DNA, 406 bp, Homo sapiens
ctatagggcgaattggagctccaccgcggtggcggccgaggtacgaagagaaaggaatcaaagcctactgcgctcaaaaaattgtcaaattgcaaatgaggacatctagagaggaagaaaggaaaaaaggaactaaaaaacagaaacaattaacagtaagttcttaactatcaataattattttaaaagtaaatagattaaattatctaatcaaaagacattgaatggctgaatggattaaaaaacaagatcaactatacattgcccatcagagattcattttagctttaaggataaacactggttgaaagtgaaaaaagtcaaggctgggcatggtggctcatgtctataattccagcactttgggaggccaaggtgggcagataatctgaggtcaggagtttga

SEQ ID NO: 14340 - DNA, 424 bp, Homo sapiens
actatagggcgaattggagctccaccgcggtggcggccgcccgggcaggtaccacctgaagaccctcacactcaacttcaccatctccaatctccagtattcaccagatatgggcaagggctcagctacattcaactccaccgagggggtccttcagcacctgctcagacccttgttccagaagagcagcatgggccccttctacttgggttgccaactgatctccctcaggcctgagaaggatggggcagccactggtgtggacaccaccggcacctaccaccctgaccctgtgggccccgggctggacatacagcagctttactgggagctgagtcagctgacccatggtgtcacccaactgggcttctatgtcctggacagggatagcctcttcatcaatggctatgcaccccagaattta

SEQ ID NO: 14341 - DNA, 496 bp, Homo sapiens
agggcgaattggagctccaccgcggtggcggccgaggtacacaggaccaatgctgcccatccacatggaatttacaaacattctacagcgcaaaaggctccagactttgatgtcagtggatgattctgtggagaggctgtataacatgctcgtggagacgggggagctggagaatacttacatcatttacaccgccgaccatggttaccatattgggcagtttggactggtcaaggggaaatccatgccatatgactttgatattcgtgtgcctttttttattcgtggtccaagtgtagaaccaggatcaatagtcccacagatcgttctcaacattgacttggcccccacgatcctggatattgctgggctcgacacacctcctgatgtggacggcaagtctgtcctcaaacttctggacccagaaaagccaggtaacaggtttcgaacaaacaagaaggccaaaatttggcgtgatacattcctagtggaaaga

SEQ ID NO: 14342 - DNA, 490 bp, Homo sapiens
cgcggtggcggccgcccgggcaggtacgttcactgtctcatataatcccagcctcctgtgtgatagctggtgtcatctccacttacagatgaggaaactgaggataagcagggttgaataacttgctcgagatcacagagccacgggtggtgaaacaggatacaaacctggttctgtttgactctaagaccattcatctttcctctgaaactcagtattgcacagtgtagaaatgcagtttttaagacctcccaaagtgacgtgctgcgtcactgcccatcattagctagattgagtaaattgctgcttagccccagttgttttgacagaatcaatagcccttgctgaggggccagcagcctacggacacaggagcatgctcatgggcaagaccaccatgcacactcagaggggagccacaaggcaaccttcacgccactcagatatagagggctgtgaacacatacaccagatacagaccacctactta

SEQ ID NO: 14343 - DNA, 442 bp, Homo sapiens
actactatagggcgaattggagctccaccgcggtggcggccgggcaggtacaaggccccaaagaggaggaattccttgtagaggagcttgtagatgcttcccctccagcggagaagcaggccagagaaacctccgaagcgggcctccgccactttgagagtgtatgaaaccgtcatggtgctgggagcctggggcaggaggtcacaagagttgcccccagggctgtcgtttagttctccagacaacctcccttccactctggtctcacacaccccagccttcaccctgcgtcagtggacaagggggtaggagcctgcaaagcagaaaagtacctcggccgctctagaactagtggatcccccgggctgcaggaattcgatatcaagcttattgataccgtcgacctcgagggggggcccggtacccaacttttgttcccttt

SEQ ID NO: 14344 - DNA, 432 bp, Homo sapiens
ctactatagggcgaattggagctccaccgcggtggcggccgcccgggcaggtactgtgatatccacatatttttgagaaaaattcccaagccaggcgaatgtggattggaataaagacataggcagtgtataccaccatagcaataatggttagtaagatggtgttaaacatagatcgctcccagggctctaaaacagcacagcagctaatgatttggtattgatagtagagccaggagaaatattccttcacacgcctcaaatccatggttggctccttcaggctgcagtaagtttgtcttaagaaagtccaggtctggttcttcagccttgctccttcgcgaaatgatcctgtgtgggttagttctcctctctgggttgctgtttcctcatctcccagttgggtgtatctccctgcggcttaggtgagcg

SEQ ID NO: 14345 - DNA, 438 bp, Homo sapiens
ttggagctccaccgcggtggcggccgaggtaccacctgaaggccctcacactcaacttcaccatctccaatctccagtattcaccagatatgggcaagggctcagctacattcaactccaccgagggggtccttcagcacctgctcagacccttgttccagaagagcagcatgggccccttctacttgggttgccaactgatctccctcaggcctgagaaggatggggcagccactggtgtggacaccacctgcacctaccaccctgaccctgtgggccccgggctggacatacagcagctttactgggagctgagtcagctgacccatggtgtcacccaactgggcttctatgtcctggacagggatagcctcttcatcaatggctatgcaccccagaatttatcaatccggggcgagtacctgcccgggcggccgc

SEQ ID NO: 14346 - DNA, 654 bp, Homo sapiens
  misc_feature 636: n = A,T,C or G
atacgactcactataggttcgattggagctccaccgcggtggcggccgcccgggcaggtaccacctgaagaccctcacactcaacttcaccatctccaatctccagtattcaccagatatgggcaagggctcagctacattcaactccaccgagggggtccttcagcacctgctcagacccttgttccagaagagcagcatgggccccttctacttgggttgccaactgatctccctcaggcctgagaaggatggggcagccactggtgtggacaccacctgcacctaccaccctgaccctgtgggccccgggctggacatacaacagctttactgggagctgagtcagctgacccatggtgtcacccaactgggcttctatgtcctggacagggatagcctcttcatcaatggctatgcaccccagaatttatcaatccggggcgagtacctcggccgctctagaactagtggatcccccgggctgcaggaattcgatatcaagcttatcgataccgtcgacctcgagggggggcccggtacccagcttttgttccctttagtgagggttaattgcgcgcttggcgtaatcatggtcatagctgtttcctgtgtgaaattgttatccgctcacanattcacacaacatacgag

SEQ ID NO: 14347 - DNA, 273 bp, Homo sapiens
  misc_feature 58, 70, 77, 110, 132, 134, 135, 138, 164, 195, 211, 217,234, 260: n = A,T,C or G
gcccaggcgggagtgtaagggcaccaggggggcccaccacaaacaccgccgcccgggngaaagccacgcnccggccncagcccccggaggaacggggggaacaggggcangccatttttcttttttgggggngnnganggggaggacacccaggaaaaaaccangccggccaggcggggcgggaaccccagaccncaggaggcacccgccncggccncccaaaaggcggggacnagaggggcgagccaccgcgcccagcngacggagggaaaa

SEQ ID NO: 14348 - DNA, 465 bp, Homo sapiens
cgtccgcagtttaccataaggagagatcaccaccatcgagatccaccgcactaacccgtacatccagttaggaatcagcatcgttggcggcaatgagacgccactgatcaacatcgtcattcaggaagtctaccgggatggggccatcgccagagatggaaggctccttgccggagaccagattcttcaggtcaacaactgtgatatcagcaacgtgtcccataactacgcccgggctgtcctttcccagccctgcagcaccctgcacctgacagtgcttcgggagcggcgcttcggcagtcgtgcaaacaaccacgccgacggcagtgcgccacgggacgaggtcttccaagtgctgctccacaaacgtgactccgcagagcagctcggcattaaactggtccgacggacagatgagccgggcgttttcattcttgacctcctggaacgggggttggccgcaca

SEQ ID NO: 14349 - DNA, 501 bp, Homo sapiens
gagcctttaagatggcgtctcctcaggggggccagattgcgatcgcgatgaggcttcggaaccagctccagtcagtgtacaagatggacccgctacggaacgaggaggaggttcgagtgaagatcaaagacttgaatgaacacattgtttgctgcctatgcgccggctacttcgtggatgccaccaccatcacagagtgtcttcatactttctgcaagagttcgattgtgaagtaccttcaaactagcaagtactgccccatgtgcaacattaagatccacgagacacagccactgctcaacctcaaactggaccgggtcatgcaggacatcgtgtataagctggtgcctggcttgcaagacagtgaagagaaacggattctggaattctaccagtcccgaggtttggaccgggtcacccagcccactggggaagagccagcactgagcaacctcggtctcccctttagtagctttgaccactctaaagcccactactatc

SEQ ID NO: 14350 - DNA, 566 bp, Homo sapiens
accccgcgtccgacgtcccccaggagaatggtagacacagagaggaaatgtggagagggcacaaaccgcaaggtgaagaaaacgaacaaacaccgagttgatacggatagtccccgttcccctgagggccgaccccgtgactcccgatgagcgtccagttgcgccgggcatccctgggcctcccagcgtctttcccggaggttcatcgccgcacggcggaaagcgctctcggttccgctttccggccccagcctcccgggcgccctcgcgcggcggctaacgctggtcctcggccgggcgcgctgacgtcatcgtgcgtcagagtgagcccggatggggcggcgggcttcgggagcgcccgggctgatccgagccgagcgggccgtatcttcttgtcggcgccgctgattcccggctctgcggaggcctctaggcagccgcgcagcttccgtgtttgctgcgcccgcactgcgatttacaaccctgaagaatctccctatccctattttgtccccctgcagtaataaatcccattatggagatctcgaaacttataaagggatata

SEQ ID NO: 14351 - DNA, 424 bp, Homo sapiens
gtccggcggcggcggctgaggagggcccggcctgcgagagcctcagtgggagccggctcagccctcggccaccatgtcggcgccgtcggaggaggaggagtacgcgcggctggtgatggaggcgcagccggagtggctgcgcgccgaggtgaagcggctgtcccacgagctggccgagaccactcgtgagaagatccaggcggccgagtacgggctggcggtgctcgaggagaagcaccagctcaagctgcagttcgaggagctcgaggtggactatgaggctatccgcagcgagatggagcagctcaaggaggcctttggacaagcacacacaaaccacaagaaggtggctgctgacggagagagccgggaggagagcctgatccaggagtcggccttcaaggagcagtactacgtgcggaag

SEQ ID NO: 14352 - DNA, 344 bp, Homo sapiens
gcgttcgagtctggagacgacgttcagaaatggcacctcgcaaggggaaggaaaagaaggaagaacaggtcatcagccttggacctcaggtggctgaaggagagaatgtatttggtgtctgccacatctttgcattcttcaatgatacctttgtccatgttactgaactttatggcaagtgagtacttcagaaaggcataaaacaagcctcaaagggactgactgtcaagaaaggttattatagttgatggaattcgccctagagaattactgtctttgcttaatttgccatgaattataagaaaacacattgcgcttcttggagctgagggtaaacttgaact

SEQ ID NO: 14353 - DNA, 511 bp, Homo sapiens
cgacccacgcgtccgcccacgcgtccgggctcggctgcaccggggggatcgcgcctggcagaccccagaccgagcagaggcgacccagcgcgctcgggagaggctgcaccgtcgcgcccccgcctagcccttccggatcctgcgcgcagaaaagtttcatttgctgtatgccatcctcgagagctgtctaggttaacgttcgcactctgtgtatataacctcgacagtcttggcacctaacgtgctgtgcgtagctgctcctttggttgaatccccaggcccttgttggggcacaaggtggcaggatgtctcagtggtacgaacttcagcagcttgactcaaaattcctggagcaggttcaccagctttatgatgacagttttcccatggaaatcagacagtacctggcacagtggttagaaaagcaagactgggagcacgctgccaatgatgtttatttgccaccatccgttttcatgacctcctgtcacagctggatgatcaatatagt

SEQ ID NO: 14354 - DNA, 395 bp, Homo sapiens
cgttcatgttaagtagaagttctctaccattgaatcagtgaactagaaagatctgatttggcctgggaccagtgttcaagttggtttggtctttattaaaaatcacaatattccgaaaacaaaaaaacctaggagataaatgtagaggtattgacttttcgtatcttttatcttcacactgaaacaagagctatcctatttgattattaaagtgagctatgtgttaagtgccaggacatttctagcttttgtgagaatgtgtctacatatgagtataataaacccacatgtatacacaattgtctcttatgtactcctacctgacagtagtctttgtattctatagtatgttctgagatataatgttaacattggtcataacaaaaaatgctatc

SEQ ID NO: 14355 - DNA, 450 bp, Homo sapiens
gcgtccggtggtgcgatctcggctcactgcaacttcagcctcctggattcaggcaacactcctgcctcagcctcccacgtggctgggattacaggtgcctgcccccatggctaattttttgtattttttgtagagatggggtttcaccatgttggctgggctggtctcactctcctgacctcaagcaatctgcctgtctcagcctcccaaagtgctgggattacaggcgtgagccaccgcccccagcctgagcctttttttttttctaatgcatccaaggttaaggggaagacgcaaataacaggactattctaaaaggaaacctgtttgaactctgtgagatcagtcatcagtctcagtattccacaggcacaccttaatttcattgtaaaaagatatatatattttgtctatttttgggcttttgggggcctattttgtgctttttta

SEQ ID NO: 14356 - DNA, 514 bp, Homo sapiens
ggagtcgacccacgcgtccgatagaaactacacactagacacagcagtagtcatagtcttcacaggtttaggagctactggaccaacattcttgtttttgcttttgtttttttaaataattctagtctggagctaactgtggagcagccaaatagtagctggcatgttgattcaaaccatgggctgaatttgctcataggctgtgcatcagacaaaagcttgaatatttgtgttgtatgcttgttccaaccaccgcttgtgtgagcatttttgtggcttgtacagaaagtacacttttaaattgtctcttgcatcactaaaatttttttaaaatgagcataacaacgaaaggcatccagctgactttttgattccaagattattgattggattgacttttttgcattaaatttttcccagcaaaataaatcatatggcgagtcaaggaataaaaagtcaaaagaaacaaatagaagctttttttttttaaaaatgtattgcttttgaacttttt

SEQ ID NO: 14357 - DNA, 231 bp, Homo sapiens
ggccgagccggccgagcgcgccttgcgggggcggtatcccggcgccctaagaccccacgacctcgcgcaccggccgctgctgcgagaccccggcccgtgtcggtccgagtcgccccccggccccggcggagacgccgccctactggccaggctgttcgagcacccgctttaccgggtggcggggccgacgctcacggaggaggacggtctgttcaatgtgaacagctacac

SEQ ID NO: 14358 - DNA, 437 bp, Homo sapiens
acgcgtccgttcagatgcagaaatgaaaaaaaaacacctttgttttataaatatcaaagtacatgcttaaagccaagtttttatctagtttattctagtacttagcttgcctggaatagctaataaattattcatgtatgtgcttttgaaaatccagagccctatttttacacacttgtgtgaagttggcaaacattttgaaaaatggaaaaaagtttctaataattgggaacaattacattaattaatattttgtaaaatattgaagcttttagccctatgtcaatttgtagattaaaataaattaattataggaaaggaagataacagtgagaaaccaaacattacaaagggtggtttagctctccttgaaaaatatactaagttggtatactataacacttggctatatgtaggcaatggtactactgggcaaa

SEQ ID NO: 14359 - DNA, 52 bp, Homo sapiens
acgcgtccgcccacgcgtccggcgcggcgggagcgggcggctgcgagcggga

SEQ ID NO: 14360 - DNA, 400 bp, Homo sapiens
acctggatgtgagggtgaaggctgtgctgctgggagccacattcctcattgactacatgttctttgagaagcgaggaggcgctgggccctctgccatcaccagttagaggccaccatggtgtgaggagaccatcacctcgaccagaactccagatggtcacctgccctggcccctcctctgggcagcccctttcctccatgtacactgcaggggacagaaggggggccccatccctaccctactccctggccgcctgcccctgtggttcccaagggaggggtatagtatgagagagccgctctcctgcatacctcccacacactggtccaagcatgtccctcggcacacaggcatatcagctttcacactttccccatgcactactctcccacccccttc

SEQ ID NO: 14361 - DNA, 470 bp, Homo sapiens
gagtcgacccacgcgtccgggggcttgctgggatcatggcggagaatcactgcgagctcctgtcgccggcccggggcggcatcggggcggggctggggggcggcctgtgccgccgctgcagcgctgggctcggcgccctggcccagcgccctggcagcgtgtccaagtgggtccgactcaacgtcggcggcacctacttcctcaccactcggcagaccctgtgccgggacccgaaatccttcctgtaccgcttatgccaggccgatcccgacctggactcagacaaggatgaaacaggcgcctatttaatcgacagagaccccacctactttgggcctgtgctgaactacctgagacacggcaagctggtgattaacaaagacctcgcggaggagggagtgttggaggaagcaaaattttacaatatcacctcattaataaaacttgtaaaggacaaaattagagaacga

SEQ ID NO: 14362 - DNA, 498 bp, Homo sapiens
gagtcgacccacgcgtccggggcccgcgggcctcgcctccgccctccgccacctcgagctgcggtagcagcgactcatgagagcgcggccggaggacagatttgataatgggctgcattaaaagtaaagaaaacaaaagtccagccattaaatacagacctgaaaatactccagagcctgtcagtacaagtgtgagccattatggagcagaacccactacagtgtcaccatgtccgtcatcttcagcaaagggaacagcagttaatttcagcagtctttccatgacaccatttggaggatcctcaggggtaacgccttttggaggtgcatcttcctcattttcagtggtgccaagttcatatcctgctggtttaacaggtggtgttactatatttgtggccttatatgattatgaagctagaactacagaagacctttcatttaagaagggtgaaagatttcaaataattaacaatacggaaggagattggtgggaag

SEQ ID NO: 14363 - DNA, 408 bp, Homo sapiens
  misc_feature 355: n = A,T,C or G
gggagtcgacccacgcgtccgcttttagaaaaggccaatatacctatcacactttggaagtaaaaatacacactttcgtgtgtacctaaaaaaaaaatcgttgaaaatcaaggccaaaggtagtgcaattttttcattaagatttaaaaaaaagggaatgatagtctttgaaagaaaacagtaggcatccagcactggacaaaacatgggtatcaaagatgaataatctttggagattctggcagtgttttcccagaacaagtcaagtggaaagtggagaaattatctgtataattttggacacatacaatggcagtttatcaaaggtttttgttctgtggcctgaatttactgnggtcctacctacacattgaacatgttttgcctgtctttttttttttttttcaa

SEQ ID NO: 14364 - DNA, 390 bp, Homo sapiens
cgggagtcgacccacgcgtccgagccgggccggggcgatgtggagcgcgggccgcggcggggctgcctggccggtgctgttggggctgctgctggcgctgttagtgccgggcggtggtgccgccaagaccggtgcggagctcgtgacctgcgggtcggtgctgaagctgctcaatacgcaccaccgcgtgcggctgcactcgcacgacatcaaatacggatccggcagcggccagcaatcggtgaccggcgtagaggcgtcggacgacgccaatagctactggcggatccgcggcggctcggagggcgggtgcccgcgcgggtccccggtgcgctgcgggcaggcggtgaggctcacgcatgtgcttacgggcaagaacctgcacacgca

SEQ ID NO: 14365 - DNA, 470 bp, Homo sapiens
  misc_feature 365: n = A,T,C or G
cgtccggggcagccgcgcccgcggagttttccgcccggcgctgacggctgctgcgcccgcggctccccagtgccccgagtgccccgcgggccccgcgagcgggagtgggacccagcccctaggcagaacccaggcgccgcgcccgggacgcccgcggagagagccactcccgcccacgtcccatttcgcccctcgcgtccggagtccccgtggccagatctaaccatgagctaccctggctatcccccgcccccaggtggctacccaccagctgcaccaggtggtggtccctggggaggtgctgcctaccctcctccgcccagcatgccccccatcgggctggataacgtggccacctatgcggngcagttcaaccaggactatctctcgggaatggcggccaacatgtctgggacatttggaggagccaacatgcccaacctgtaccctggggcccctggggctggcta

SEQ ID NO: 14366 - DNA, 430 bp, Homo sapiens
ccacgcgtccggcgccgctcccgcatctgcacccgcagcccggcggcctcccggcgggagcgagcagatccagtccggcccgcagcgcaactcggtccagtcggggcggcggctgcgggcgcagagcggagatgcagcggcttggggccaccctgctgtgcctgctgctggcggcggcggtccccacggcccccgcgcccgctccgacggcgacctcggctccagtcaagcccggcccggctctcagctacccgcaggaggaggccaccctcaatgagatgttccgcgaggttgaggaactgatggaggacacgcagcacaaattgcgcagcgcggtggaagagatggaggcagaagaagctgctgctaaagcatcatcagaagtgaacctggcaaacttacctcccagctatcacaatgagaccaacac

SEQ ID NO: 14367 - DNA, 455 bp, Homo sapiens
  misc_feature 327, 328, 384: n = A,T,C or G
gtcgcccacgcgtccggccggggggtgcccccgggacgtagcgccgcggagaggaagcggcaaaggggaccatgcggcgcctgactcgtcggctggttctgccagtcttcggggtgctctggatcacggtgctgctgttcttctgggtaaccaagaggaagttggaggtgccgacgggacctgaagtgcagacccctaagccttcggacgctgactgggacgacctgtgggaccagtttgatgagcggcggtatctgaatgccaaaaagtggcgcgttggtgacgacccctataagctgtatgctttcaaccagcgggagagtgagnncggatctccagcaatcgggccatcccggacactcgccatctgagatgcacactgcntggtgtattgcacgggaccttccacccactagcatcatcatcaccttccacaacgaggcccgctccacgct

SEQ ID NO: 14368 - DNA, 400 bp, Homo sapiens
  misc_feature 351: n = A,T,C or G
gagtcgacccacgcgtccgccgcccgcttgcccgtcggtcgctagctcgctcggtgcgcgtcgtcccgctccatggcgctcttcgtgcggctgctggctctcgccctggctctggccctgggccccgccgcgaccctggcgggtcccgccaagtcgccctaccagctggtgctgcagcacagcaggctccggggccgccagcacggccccaacgtgtgtgctgtgcagaaggttattggcactaataggaagtacttcaccaactgcaagcagtggtaccaaaggaaaatctgtggcaaatcaacagtcatcagctacgagtgctgtcctggatatgaaaaggtccctggnaggaaggggctgtccagcagccctaccactctcaaacctttacgagacc

SEQ ID NO: 14369 - DNA, 445 bp, Homo sapiens
gggcggtcctggccagccgggctttgagggagagcaggggaccagaggtgcacagggttcagctggtcctgctggtcctccagggctgataggagaacaaggcatttctggacctcggggaagcggaggtgccgctggtgctcctggagaacgaggcagaaccggtccactgggaagaaagggtgagcccggagagccaggaccaaaaggaggaatcggcaaccggggccctcgtggggagacgggagatgacgggagagacggagttggcagtgaaggacgcagaggcaaaaaaggagaaagaggattccctggatacccaggaccaaagggtaacccaggtgaacctgggctaaatggaacaacaggacccaaaggcatcagaggccgaaggggaaattcgggacctcagggataggtggacagaagggagaccctggctacc

SEQ ID NO: 14370 - DNA, 469 bp, Homo sapiens
ccacgcgtccgctgtgcctgaaggagactggttttgtccagaatgtcgaccaaagcaacgttctagaagactctcctctagacagagaccatccttggaaagtgatgaagatgtggaagacagtatgggaggtgaggatgatgaagttgatggcgatgaagaagaaggtcaaagtgaggaggaagagtatgaggtagaacaagatgaagatgactctcaagaagaggaagaagtcagcctacccaaacgaggaagaccacaagttagattgccagttaaaacaagagggaaacttagctcttctttctcaagtcgtggccaacaacaagaacctggaagatacccttcaaggagtcagcagagcacacccaaaacaactgtttcttctaaaactggtagaagcctaagaaagataaactctgctcctcctacagaaacaaaatctttaagaattgccagtcgttctact

SEQ ID NO: 14371 - DNA, 487 bp, Homo sapiens
acgcgtacgggcctggtgagcaccgccgaggcgcgggccagctcttcgaggttgtgcgcgggagtggcacggcgggcgggcgagcgaggggctaacttcagcggtggcaccgggatcggttgccttgagcctgaaatcatgaccaccccaggaaaagagaactttcgcctgaaaagttacaagaacaaatctctgaatcccgatgagatgcgcaggaggagggaggaagaaggactgcagttacgaaagcagaaaagagaagagcagttattcaagcggagaaatgttgctacagcagaagaagaaacagaagaagaagttatgtcagatggaggctttcatgaggctcagattaataacatggaagatggcaccagggtggtgtcatcacttctgacatgattgaaatgatattttccaaaagcccagagcaacagctttcagcaacacagaaattcaggaagctgctttcaaaagaacctaaccc

SEQ ID NO: 14372 - DNA, 539 bp, Homo sapiens
  misc_feature 427, 520: n = A,T,C or G
gagtcgccacgcgtccggggctgccagggaggaggaagatggcggcgggggcgaggtgaggtgttggcagtggaaaggggttcgggctcggggggcggggggacgcggagcgatggcccgcgccggccgcaggggcggataaaaagccgtcgcgctgcgggagtgggcgggagggagagggggtgtccgagggccacaagagtatgacggggctgtacgagctggtgtggcgggtgctgcacgcgctgctctgtctgcaccgcacgctcacctcctggctccgcgttcggttcggcacctggaactggatctggcggcgctgctgccgcgccgcctctgccgcggtcctagcgccgctcggcttcacgctccgcaagcccccggcagtcggcaggaaccgccgtcaccaccggcacccgcgcggggngtcgtgcctggcagccgcacaccaccggatgcgctggcgcgcggacggtcgttccttggagaagctgcctgtgcatatggcctgggtgatacncgaggtggagcaggaaccc

SEQ ID NO: 14373 - DNA, 426 bp, Homo sapiens
  misc_feature 343: n = A,T,C or G
ttgtttaatattttttttctctcttgaacaaaactgagataatttagaaaacaggtgcttaattgcaataaaattactatgaagtatattaaaaatcacgacattgtaaaatctcactttagatcatcaaagaaaaccattgttactatctcctttgagcttaggaaaatgtacaagagaacaaattaaaattgaaaaattgatttcacttagaaaaacttctaggaacagggtgaaccactgattttaatttgcctaattatcttatgacaagtatcaaattaagatgacactttaaagatccttagcattaacttaatgatggagaaagagtgctcaatgnacagttcccagtaaggtaatgagatgccattttcagagacatttaagaagatattttgatttcataaaacattaaataaaaag

SEQ ID NO: 14374 - DNA, 494 bp, Homo sapiens
gggagtcgacccacgcgtccgccggcctggtgcagcggcgcaccgaggcctcccgcaacgccgccgacaaggagcgggcggcgggcggcggcgccggcagcagcgaggacgacgcgcagagccgccgcgacgagcaggacgacgacgacaagggcgactccaaggaaacgcggctgaccctgatggaggaagtgctcctgctgggcctcaaggaccgcgagggttacacatcattttggaatgactgtatatcatctggattacgtggctgtatgttaattgaattagcattgagaggaaggttacaactagaggcttgtggaatgagacgtaaaagtctattaacaagaaaggtaatctgtaagtcagatgctccaacagggaagatgttcttcttgatgaagctctgaagcatgttaaggaaactcatcctccagaaacggtccaaaactggattggattacttaggggcgagacatggaatccattaaaat

SEQ ID NO: 14375 - DNA, 280 bp, Homo sapiens
gagtcgacccacgcgtccggttggccgggcggaggtcttcgctgaggcccggggcggggtggcgccacccctgattgcggggccacggactgctcctgctgggcggagaggacagattttgcaaagcggaggctgcgacgggtcctgcagggggacagggaggaaagggccgcctcgtctccgctcctgggggaccgcagaaataagaatcaaactccacaatgacaacctatttggaattcattcaacaaaatgaagaacgagatggagtccgatttag

SEQ ID NO: 14376 - DNA, 515 bp, Homo sapiens
  misc_feature 410, 417, 501: n = A,T,C or G
gcgtccgcggacgcgtgggcggacgcgtgggcttctgcagcaagctcaggagagctgctgtcttccctcccgcccaccagcaacgcaccctctgaccctgccacaactactgcaaaggcagacgctgcctcctcactcactgtggatgtgacgccccccactgccaaggcccccaccaccgttgaggacagagtcggcgactccaccccagtcagcgagaagcctgtttctgcggctgtggatgccaatgcttctgagtcaccttaactttgaaccattctttggaattggcgtggtatatttaaccacgggagcgtgtctggaaacgcaaactatcattaatttcatactaggtttgtaccgtatctgtaggcatcctgtaaataattccaaggggaaaactaaacagngacgtgngttgtatcctgccaggttgagtggggctcacaccgtaggtgagatgtcagaagcgcttgtattttaaacaaccaaaagaattgnagggtggcttgctg

SEQ ID NO: 14377 - DNA, 402 bp, Homo sapiens
taggcttgcacacttttctactacatgtttaagtggcagagtccaggctgtcgagtcacggttgggtttgaatctgactccaccagtaactttggttggaaaaaatcacttatcctctttaagcttgattttatttattttattttatgtaagagtgagacagtagtagcttaatagggttgcttttaaattagagtgaacatgaggcatttattcggtgccagacagataactgcctataacaggatgtgatcagcacaagtaacagaaaattagcctgacggtggcttaagcaaggggaatgtttatctcacatagcaaaaagtctgtaaatggatggttctagagttgggtgggaagccaaaatgtcatcaggatttcctggaaccgtctgctttgcca

SEQ ID NO: 14378 - DNA, 514 bp, Homo sapiens
gcccacgcgtccggattatacaactacttaaaaaatatagtcaataggttactaagatattgcttagcgttaagtttttaacgtaattttaatagcttaagattttaagagaaaatatgaagacttagaagagtagcatgaggaaggggaagaaaagaaggggaagaagatcaaagaaggaaagaagaaggggaagaaaagaaggggaagaagatcaaaacccaccatgccccaggctcagcagggagctgctggatgagaaagggcctgaagtcttgcaggactcactggatagaagttattcaactccttcaggttgtcttgaactgactgactcatgccagccctacagaagtgccttttacgtattggagcaacagcgtgttggcttggctgttgacatggatgaaattgaaaagtaccaagaagtggaagaagaccaagacccatcatgccccaggctcaacaaggagctgctggatgagaaagagcctgaagtcttgcaggactcact

SEQ ID NO: 14379 - DNA, 383 bp, Homo sapiens
gagtcgacccacgcgtccggctccccgcacgccctcgcactcgctctggccggtccagggcgccttcagcccaacctgcccagccccacgggcgccacggaacccgctcgatctcgccggcaactggtagacatggagacccctgcctggccccgggtaccgcgccccgagaccgccgtagatcggacgctactgctcggctgggtcttagcccaggtggacggcgcttcaggcactacaaatactgtggcagcatataatttaacttggaaatcaactaatttcaagacaattttggagggggaacccaaacccgtcaatcaagtctacactgtgtcaataagcactaagtcaggaaactggaaaagcaaatgcttttacac

SEQ ID NO: 14380 - DNA, 331 bp, Homo sapiens
agtcgacccacgcgtccggcggccgggccggggcagccgggaagcgggtggggtggtgtgttacccagtagctcctgggacatcgctcgggtacgctccacgccgtcgcagccactgctgtggtcgccggtcggccgaggggccgtgatactggttgcccgccgtgtaagcagaattcgacgtgtatcgctgccgccaagatggaggggcctttgttcgagttcggtgaccgcagcactggggaaacgatccgctcccaaaacgttatggctgcagcttcgattgccaatattgtaaaaagctctcttggtccagttggcttggataaaat

SEQ ID NO: 14381 - DNA, 421 bp, Homo sapiens
acgcgtccgcctcctcccgcctgaggcgagtctgggctcagcctagagctctccggcggcggcgcagcttcagggcagcgcgggctgcagcggcggcggcggttagggctgtgtagggcgaggcctcccccttcctcctcgccatcctactcctccctcctcgtcatcctcccccttcgtcctcctcgccttcctcctcctcgtcaggctcgacccagctgtgagcggcaagatgagcggcgcccaggccgccgcctgccaggctgtcgggcgtcatggtgccggcgcccatccaagacctggaggccctgcgcgcgctcacggcgctcttcaaagagcagcggaaccgagaaacagcacccaggactatcttcaaagagttctggatatcctaaagaaatcttctcatgctgttgagctt

SEQ ID NO: 14382 - DNA, 549 bp, Homo sapiens
cgcgtacgaaccaactgacatttatcatggatgctgaccaggagaaagaaagaaagaaacgggaggagcgggagcgtaagcggcggaaggaggaggaggtgcaacagccaaagttggcagaggagagacggcggcagaatttacaggaggaaaaggaaaggaagttggaatgcctgccccctgaaccttcccctgatgaccctgaaagtgtcaagatcatcttcaaattacctaatgattctcgagtagagagacgattccacttttcacagtctctaacagtaatccacgacttcttattctccttgaaggaaagcccagaaaagtttcagattgaagccaattttcccaggcgagtgctgccctgcatccctttcagaggagtggcccaatccccctacgctacaggaggccggactcagccacacagaagttctttttgttcaggacctaactgacgaatgacatttttttcttcctgtcccctcctaccccagtccctaaagaaatggggaaaatagaaaacatcagcaagtcataaaaaaaaaa

SEQ ID NO: 14383 - DNA, 393 bp, Homo sapiens
ggtgtcgacccacgcgtccggaggggctaagaaggttgtccttgcctaatgctctgatctgtaagtgaatagggcagaacagttcagccttgaggttagaatttagcaggagctatcctgacttaatatccagttgtggggtttgcaaaacaaaacagctgtatgtaatcattgccactagttccatctagaactcctttctagtttgttatttttaaaatgtttatacataaaaccaccaaaatacatagcttcgacaagatggaagtttatttctctctcccataacagtgcagtgatagtcagctggtccaggccaggcaaggggctggtccatgatgtcatcaggcacccaggttcctactgtcttggcatgtggccacagttagcaac

SEQ ID NO: 14384 - DNA, 520 bp, Homo sapiens
ggtgtcgacccacgcgtccggtgatgcggaccccgggcgggcgcagggcgcgggctccggcgccgccgctgcgtcctccccggccgcgggcgagccgctgcagagggagcgtcgcgccggggcggagtgcgggcttgcgcggcaagtgcgcgccgaggtcacgaaatggattggagtgaaccggagaccccgaaaacggaagcgcagggagaaggaagaggtgtttgaaaagcttcttccagaccagctggtcttgcttctggagcatctcttggagcagaagactctgagcccccgaactctgcaaagcctccagaggacataccacctccaggatcaggatgcagaggttcgccatcggtggtgtgaactcattgttaagcacaagttcacgaaagcctacaaaagtgtggagaggttccttcagaggatcaggccaatgggtgtgtacctctacggggagctgatggtgagtgaggacgccagacagcagcagctcgcccgtaggtgctttgagcgg

SEQ ID NO: 14385 - DNA, 519 bp, Homo sapiens
ggtgtcgacccacgcgtccgggacatcgagtcacgggctggctacgaactcctcgggggcgaaggtggcggagagggatgggttccaggacgtcctggcgcccggggaaggctcggcgggacggatttgcggtgcgcagccagtgccgttcgtccctcaggtgcttggcgtgatgatcggggccggagtggcggtggtggtcacggccgtgctcatcctcctggtggtgcggaggctgcgagtgccaaaaaccccagccccggatggcccccggtatcggttccggaagagggacaaagtgctcttctatggccggaagattatgcggaaggtgtcacaatccacctcctccctcgtggatacctctgtctccgccacctcccggccacgcatgaggaagaaactgaagatgctcaacattgccaagaagatcctgcgcatccagaaagagacgcccacgctgcagcggaaggagcccccgctcgcagtgctagaagctgacctgaccgagggcgacct

SEQ ID NO: 14386 - DNA, 558 bp, Homo sapiens
ccacgcgtccgccaagtcctgcgatgatggactcaacaccttccgcgacgagggccgggttctgcggcgcctgccaaaccgcatacccagcctgcggatgctccggagcttcttcaccgacgggtccttggatagctggggcacctctgaagatgctgacgctccttctaagcgacactcaacctctgacctctcagatgcgaccttcagcgatatcaggagagaaggctggttgtattataagcagattctcaccaagaaggggaaggctgaggaccgggatgacatgctgggctggatcagagcgatccgggagaacagcagggccgagggcgaggaccccggctgtgccaaccaagctctgatcagcaagaagcttaatgattatcgcaaagtgagccatagctctgggcccaaagctgattcctcccccaaaggctctcgcggcctggggggcctcaagtctgagttcctcaagcagagtgcggcacgtggcctcaggactcatgacctgcccgcagggagcaaggatgacagtgctgcagcccccaaaacccc

SEQ ID NO: 14387 - DNA, 494 bp, Homo sapiens
  misc_feature 453: n = A,T,C or G
gtcgaccacgcgtccggtttcttcctaatttatatttcagatacatagtgtagaacaggaatttgcagaagccatttaagttatcttttgaggtaagctctgatttagcatttattctgataaaatctaatacatcatgggatatatataaagcaacttaattcttgtggtgtagtcttaatagttttgaatgttgactgaatgtctataaaattgtgagtttgtctttgttacattccagtgtttctgcctcttggcatgcttaaagcacggcttacttcatctgctccttacacactaaaatgctgttagtgtgctcaactacagaaatagccgctgctaagtgatgtagattttctacttgaatatttttatgttgtaggaacctaggaggtcagtgtttactgttttatatatgccttctttttcctgtttgagcttctctctttgaanggattctaacagaacaaaggctgctgatcaacctaagttgg

SEQ ID NO: 14388 - DNA, 527 bp, Homo sapiens
tgtcgaccacgcgtccgaaagtccagtgacatggttccccgtggtggcccgtggcagcccgtggcatggcgtggctcagctgtctgttgaagttgttgcaaggaaaagaggaaacatctcgggcctagttcaaacctttgcctcaaagccatcccccaccagactgcttagcgtctgagatccgcgtgaaaagtcctctgcccacgagagcagggagttggggccacgcagaaatggcctcaaggggactctgctccacgtggggccaggcgtgtgactgacgctgtccgacgaaggcggccacggacggacgccagcacacgaagtcacgtgcaagtgcctttgattcgttccttctttctaaagacgacagtctttgttgttagcactgaattattgaaaatgtcaaccagattctagaaactgcggtcatccagttcttcctgacaccggatgggtgcttgggaaccggttgagccttatagatcatttacattcaatttttttaactcagcaagtgagaactt

SEQ ID NO: 14389 - DNA, 530 bp, Homo sapiens
gcgtccggggatccctggggagagaacagggccccacatccctcctcctgggagacgctggtgcagggcctcagtggcttgactctcagcctaggcaccaaccagcccgggcctctgcctgaagcggcactccagccacaggagacagaggagaagcgccagcgagagaggcagcaggagagcaaaataatgtttcagaggctgctcaagcagtggttagaggaaaactgagacgtgcacccccatgggatggagacccgaagggactcagacggagccgccgtgttggcagcgcctgggtgtgggcccattttggggaccaaacagcaagctgtggtcggatgagtgccaggacctgtgtaccgggacacgtgggagtcctcccagcatgatgcttgactgacccgaggaaggtcctcatgtttcgtgcctgtcattctcggatggctgtgaggcattccttggcaagggatgctgcgtaccagcggtcctcaccgcatctcacatggctcctgtgatgcatgttgtcg

SEQ ID NO: 14390 - DNA, 489 bp, Homo sapiens
cgacccacgcgtccgcagctttgcagggaagaacagagtatgggtcatctcagcccctcatgcctcggaaggctactaccgcctcatgatgagcctgctgaaggacgatgtgtactgtgagctggcggagaggcacatccaacagattgtgctcttccaccaggcaggtgaggaaggaggcaaggtgagaaggatcaccagcgagggccagatcctggagcagcccctggaccctagcctcatccctaagctgatgagcttcctgaagctggagaagggcaagtttggcatggtgctgctgaagaagacgctgcaggtggaggagcgctatccatatcccgttaggctggaagccatgtacgaggtcatcgaccaaggccccatccgtaggatcgagaagatcaggcagaagggctttgtccagaaatgtaaggcctttggtgtagagggccaagtggtggcggaggggaatgaccgtggagggggagc

SEQ ID NO: 14391 - DNA, 503 bp, Homo sapiens
ggtcgaccacgcgtccgggatgccttgggtctgaaagtcgatgaaggacgcgattacctgcgataagcttcgtggagttggaaataaactatgatacggagatttccgaatggggtaacctaactgagcaaacctcagttgcattttgatgaatccatagtcaaattagcgagacacgttgcgaattgaaacatcttagtagcaacaggaaaagaaaataaataatgatttcgtcagtagtggcgagcgaaagcgaaagagcccaaacctgtaaaaaggggttgtaggacatcttacattgagttacaaaattttatgatagtagaagaagttggaaagcttcaacatagaaggtgatattcctgtatacgaaatcataaaatctcatagatgtatcctgagtagggcggggcacgtgaaaccctgtctgaatctgccgggaccacccggtaaggctaaatactaatcagacaccgatagtgaactagtaccgtgagggaaag

SEQ ID NO: 14392 - DNA, 483 bp, Homo sapiens
ggagtcgaccacgcgtccgaacattattgagattgtcgtgtatagtcatcgaatatcagccagttcctgtaattttgtgacacgctctctgccaagcccaccaagtatttcctttatagctaaaagttccatagtactaaggaaataaagcaataaagacagtctcagcagccaggattctggctgaaggaaatgatccgccaccctgagggtggtgatggtagtttctacccatacctcagcctcaggcgagtggcttatagcctccattcatggtgcactttatttatggtactaagataaagactgtcaatccattgatttatctcctcctgtcccccatctaaaatacccatgctgcttttctgagtgttgatggggggttaccagcttgatccactgttgctcttagaaggcccaaaaaggtctttggggcattgccaagaaatcccggattatgtggaaaaccctcattttctcttc

SEQ ID NO: 14393 - DNA, 500 bp, Homo sapiens
gtccgttttttttaacttacgtaaaatttttttttaaaagtgcttgtaaaaattaaagaggaataaaaggggggtgaacagccagtacgatagtgcatgcctgaaattccagtgctttgggaggccgaggcaggaggatcgtttgaggccagtagttggagagcagtgtgggcaacgtagcaagaccccatctctacaaaaaatttaaaagttagccgggcatggtgattcacacctggagttccagctgctgtggaggctgaggtgggaggatcgcttgagcccaggaatttgaggctgcagtgagccatgattgcaccaccgcacttcagcctaggtgacagagcaagggtctacctcagaaaaaaaaaaaaaggaggagcaagcacgtgttgatgggtggaaatccagccagaaatgctgaggctgaaaagattgtctccgagtttcctggtagccaggggaaaaggggaaattggtacgttggtacgttacagtgc

SEQ ID NO: 14394 - DNA, 552 bp, Homo sapiens
cgaccacgcgtccgctgacatttcctaggaagctaggaaaaggaaagtgaaggaatggtctaaagaaatgaccattcacactgattttgtctggacagtctggccgcaggttattcatagattattcagcctttgcaggacttggattcagggttttactcagtccctttaccttaggtggaatcttcttaaattgaaatttttggtaaggaattcatttcacaggtagtgtttcagactctgaaagccctgacttggttcttggcttctactgtactagttactagttactggtactgttgccaagcaatctgcttggaatttgtggatccctgctgttccctaatcccaccccctgccctgagacagtgaatgtagtccgtgaagggagtgcctctctgggaccccctgtgttgttacaggctgtgcagtgcaacaattccagcaaaaataccctatccccgcacttagtcattcgtggtaactaacaattttgaaatactcatataaaatgaacaggaaagtgttagtgattgggtgatttgagctaca

SEQ ID NO: 14395 - DNA, 542 bp, Homo sapiens
cgacccacgcgtccggacccagacccggctgacccacctacccgcgatcctgcccatggctgacgggctctttcggcgcagaccctggggtctcgagcagattcgcccggaccccgagtccgaaggcctgtttgacaagcctcccccggaagaccctcccgctgcccgcgggcccaggtcggcgtcggccgcgggcaagaaggctggtcggcgcgcgggcgggagggcgcaggggggccgcgccgggcagcccccgaaggccgcatcgcgccccccgcccaagaaggaggcgcctccactggacgagggctgctatctcgaccattttccgcacctctccatcttcatctacgcagccatcgccttctccatcacctcctgcatctttacctatatccatttacagcttgcctgagtggccagcgcgggacggggtgggcgcaggaccgagcggggagggaaagggaaaacggggctcggcattttgtgttttagaacagcgctgcacccccttcatgtagctttcgatgcttgtttctttc

SEQ ID NO: 14396 - DNA, 527 bp, Homo sapiens
gtcctttaaccccgaactcatagatcgtcttgcttgtttgtctgaagaagggaatgaaatagaaagtggaaaaataatattttcagagcatcttcccttaagtaagctacagcaaggcataaaatctggtacataccttcaaggaacatttagagctagcagggaaaattacttggaagctacagtatggattcatggcgacagtgaagaaaataaagagataatcttacagggacttaaacatttaaacagagctgttcacgaagatattgtggctgtggagcttctccccaagagtcagtgggtagcaccatcttctgtggttttacatgatgaaggtcaaaatgaagaagatgtggagaaagaagaagagacagaacgaatgcttaagactgctgtaagcgagaaaatgttgaagcctacaggtagagttgtaggaataataaaaaggaattggagaccatattgtggcatgcttttcaagtctgacataaggagtcaagaagacatctctttacacctgctga

SEQ ID NO: 14397 - DNA, 555 bp, Homo sapiens
cccacccgtccgcggacgcgtgggcggacgcgtgggctggctgtatctatactttccttgagaaaaatcccataaagtggatggacctgtgaagaaaatgtatgcttatggcctagccttcatgtctggctgatgtatcctataaggcagtaagccccttttctagtctctggtaagatgcaagagctcatatccccatcactgacattttagtttggaaataatattgagactgtgctatgaccaacccctgatgttgttttttcttttcaaacttttgcatatgagtagaggaaaagcctaaaagttaagtatttatgtctggggggataccttcaggtgtcttatctgttttatgcaagaatttatgtgttcatctttattcagtgcaaagatttttttttaaattttgtttataattgtaggtaacattaagacaactcttcctccacaagaaaacctcctaaaattaatattccttaagatttgtttttccttttgcacttataatattaccttttaattgcatgcaagattgtcatacttttcaaaagg

SEQ ID NO: 14398 - DNA, 526 bp, Homo sapiens
cgaccacgcgtccgatttgatataccactctgataactcatataaaaatatcatcataaaaagcttaatttcatcccttttatgttggttttaaaaggtaaatgcttaccatattttataattgagaactcttacatagtagaatccattctataatacatgtgttgacaaagctttagagaaagtttcctattctcttccatttcccctgcccaaagtgctgacataggcagtgatgaagaatctttaccaagattttcagggtgtacctatgaaattgctttaaatgcactgctggtgtaaataattagcaagcaaaagcgtttctgtgacttcaggtaccagcttaaagagcactagggatggggaacgaatgccaaatcagactccacctagagcaccaggaaacagcttgtaccctggtaggaaatggtgttgctgaaggggaggctgagccagtgcgagactgaacttgtgcagccttagccaagaaaagcagtgtttttcagcagacggctgatgggac

SEQ ID NO: 14399 - DNA, 455 bp, Homo sapiens
cgacccacgcgtccggctgttgaccccatgctgagtggccagtggggagcggcgcccggcaggctcttctggggtcgtctgtcctatccgtggattgtatatactcttctctgttaaggagtttttcccaagaagaaaagtatttaaaagaaataccagtgagtgccttaaagttggagaagtaactgcccatgcccagaaataaggatgccagtgcccagaagcagtgagattagtctgtgtccacaagcagaggccccctcgatgggagggagtggcaggcaggagaaggtggcgctgccaggtgcccgggtctattggaggcgccccatctcagacttcctaacacagcctgtgtggaaggcagaacaaagaatgcatgcccagtcagaaatctgttctattctgctccaggaaaatcggaaacctgtgagtcagagtcagagaaacttacc

SEQ ID NO: 14400 - DNA, 520 bp, Homo sapiens
  misc_feature 485: n = A,T,C or G
cgacccacgcgtccggtgggtccctgccggccggcggcgggcgcagacagcggcgggcgcaggacgtgcactatggctcggggctcgctgcgccggttgctgcggctcctcgtgctggggctctggctggcgttgctgcgctccgtggccggggagcaagcgccaggcaccgccccctgctcccgcggcagctcctggagcgcggacctggacaagtgcatggactgcgcgtcttgcagggcgcgaccgcacagcgacttctgcctgggctgcgctgcagcacctcctgcccccttccggctgctttggcccatccttgggggcgctctgagcctgaccttcgtgctggggctgctttctggctttttggactggagacgatgccgcaggagagagaagttcaccacccccatagaggagaccggcggagagggctgcccagctgtggcgctgatccagtgacaatgtgccccctgccagccggngctcgcccactcatcattcattcatccattctaga

SEQ ID NO: 14401 - DNA, 542 bp, Homo sapiens
cgacccacgcgtccggcgccccgctcgcattgttcgggcgactctcggagcgcgcacagtcggctcgcagcgcggcactacagcggccccggcccggcccccgcccggccccggcgcaggcagttcagattaaagaagctaattgatcaagaaatcaagtctcaggaggagaaggagcaagaaaaggagaaaagggtcaccaccctgaaagaggagctgaccaagctgaagtcttttgctttgatggtggtggatgaacagcaaaggctgacggcacagctcacccttcaaagacagaaaatccaagagctgaccacaaatgcaaaggaaacacataccaaactagcccttgctgaagccagagttcaggaggaagagcagaaggcaaccagactagagaaggaactgcaaacgcagaccacaaagtttcaccaagaccaagacacaattatggcgaagctcaccaatgaggacagtcaaaatcgccagcttcacaaaagctggcagcactcaaccggcagattgatgagttagaagagaca

SEQ ID NO: 14402 - DNA, 440 bp, Homo sapiens
cgcgtccggaaggaagggacgggctgagttccccgacgagagacacacccagattttcctgcagcttggggagaggtcctcccaggagccttggtccctcctggcctgccggagtccttagccaggatggaggctgttgtgaacttgtaccaagaggtgatgaagcacgcagatccccggatccagggctaccctctgatggggtcccccttgctaatgacctccattctgctgacctacgtgtacttcgttctctcacttgggcctcgcatcatggctaatcggaagcccttccagctccggggcttcatgattgtctacaacttctcactggtggcactctccctctacattgctgtctgccactccagagctgggggctaaaagggctgtacagttatttccccctccctgccttaaaacttgggagaggagcactc

SEQ ID NO: 14403 - DNA, 536 bp, Homo sapiens
tcgacccacgcgtccgggctcccatccgggctatcctgccgccttagcggctgcttctccccaggatgcgggcagggggcctctctcccactccccacacaccgatttctgagtagcgataggggctggaggcttattttatggggtagggggccgctggtaggcgaagattgtccgagggagagggggaggatgaagccagtgcgtggcggagacttgccagatgttgatgcctaagaagaaccggattgccatttatgaactcctttttaaggagggagtcatggtggccaagaaggatgtccacatgcctaagcacccggagctggcagacaagaatgtgcccaaccttcatgtcatgaaggccatgcagtctctcaagtcccgaggctacgtgaaggaacagtttgcctggagacatttctactggtaccttaccaatgagggtatccagtatctccgtgattaccttcatctgcccccggagattgtgcctgccaccctacgccgtagccgtccagagactggcaggcctc

SEQ ID NO: 14404 - DNA, 493 bp, Homo sapiens
gggggttggtacccgagcgccttcccctcacctcaaccagagaagagcatccggttgctttttaaagcttttagcctgccctagcaaggacaaagcatgttagattagagatgcttctgctgatcgcaggggttcttatttgaaaacatctatgatgggggtggggtgggaggagacaggttgtggttatgcaggaaaatcttgtcctaaaaatatatgagtttgggggtaaggggtgggatagccaagcaaaatcagtaattattttaaaatgaacatatgtatttttattaacttttagttaaatacagattttacaacgaggtcagcataagcctaaatctatatagagggctaactcaggcattgtcttgtttatttgtagactggattaaaaacaacctgtcctgttttgtcagttcccagcttctttgtttagaataaattagaccaaaagaagaaacgtgcttgtctctgtatacccgcagaatga

SEQ ID NO: 14405 - DNA, 475 bp, Homo sapiens
ccacgcgttcgcttcaatgtcaatgtggcctgggctggaggtctggacccccccatgggggatcctgagtacctggctgctttcaggatagtcgtgatgcccatcgcccgagagttctctccagacctagtcctggtgtctgctggatttgatgctgctgagggtcacccggccccactgggtggctaccatgtttctgccaaatgttttggatacatgacgcagcaactgatgaacctggcaggaggcgcagtggtgctggccttggagggtggccatgacctcacagccatctgtgacgcctctgaggcctgtgtggctgctcttctgggtaacagggtggatcccctttcagaagaaggctggaaacagaaacccaacctcaatgccatccgctctctggaggccgtgatccgggtgcacagtaagtgtggagatgggacactcgctgagctcagactgaaggatcttggtg

SEQ ID NO: 14406 - DNA, 531 bp, Homo sapiens
cgacccacgcgtccggtgtgatgatcgctactgctggagaccgcacagaggagttccacggccacgcagtgaacctcctggggaacttgcccctcaagtgtctggatgttctcctcaccctggagccacatggagactccacggagttcatgggagtgaatatggatgtgattcgtgccctcctcatcttcctagagaagcgtttgcacaagacacacaggctgaaggagagtgtagctcccgtgctgagcgtgctgactgaatgtgcccggatgcaccgcccagccaggaagttcctgaaggcccaggtgctgccccctctgcgggatgtgaggacacggcctgaggttggggaagatgctgcggaacaagcttgtccgcctcatgacacacctggacacagatgtgaagagggtggctgccgagttcttgtttgtcctgtgctctgagagtgtgccccgattcatcaagtacacaggctatgggaatgctgctggccttctggctgccaggggcctcatggcaggaggc

SEQ ID NO: 14407 - DNA, 464 bp, Homo sapiens
gtccgacactatttagagagctcccttcccacctctctgcccagccttgttacctcacttctgctctggccatggctgtgaagggcccagccagctccctgttttgatgttctgtgcaacagctccggggtcttgtgactggagatcctcaacaggccctggagccaggactggagtcttggcagctgatgagcagcaccttgccggccaggaggagctgatgctgacgatctccccaacatctgaaggcttaaagaacattgtcgttcttcagccctccttgcttctctcaatacaataagacattgcagaagcaaaagggtggcctctgctccaggcaaggcagctggctctgtctggggcgtcggcctggggcttgggtgccacgtgctgagattgcatagtcaaaacagccatttttgccaacaatagcttgtggctccccacatttttctaccctgcac

SEQ ID NO: 14408 - DNA, 470 bp, Homo sapiens
gaatactgaaaaatgaagcctaaaatgaagtattcaaccaacaaaatttccacagcaaagtggaagaacacagcaagcaaagccttgtgtttcaagctgggaaaatcccaacagaaggccaaagaagtttgccccatgtactttatgaagctccgctctggccttatgataaaaaaggaggcctgttactttaggagagaaaccaccaaaaggccttcactgaaaacaggtagaaagcacaaaagacatctggtactcgctgcctgtcaacagcagtctactgtggagtgctttgcctttggtatatcaggggtccagaaatatactagagcacttcatgattcaagtatcacaggaatttcacctattacagagtatcttgcttctctaagcacatacaatgatcaatccattacttttgctttggaggatgaaagttatgagatatatgttgaagacttgaaaaaaga

SEQ ID NO: 14409 - DNA, 528 bp, Homo sapiens
cgacccacgcgtccggtctgaagggtctggctggtgagccaggttttaaaggcagccgaggggaccctgggcccccaggaccacctcctgtcatcctgccaggaatgaaagacattaaaggagagaaaggagatgaagggcctatggggctgaaaggatacctgggcgcaaaaggtatccaaggaatgccaggcatcccagggctgtcaggaatccctgggctgcctgggaggcccggccacatcaaaggagtcaagggagacatcggagtccccggcatccccggtttgccaggattccctggggtggctggcccccctggaattacgggattcccaggattcataggaagccggggtgacaaaggtgccccagggagagcaggcctgtatggcgagattggcgcgactggtgatttcggtgacatcggggacactataaatttaccaggaagaccaggcctgaagggggagcggggcaccactggaataccaggtctgaagggattctttggagagaagggaacag

SEQ ID NO: 14410 - DNA, 522 bp, Homo sapiens
tcgaccacgcgtccgaactggtgtccagctcggtgcactccaagcgccgttcccgagcggacctcacggccgagatgatcagcgccccgctgggcgacttccgccacaccatgcacgttggccgggccggagacgcctttggggacacctccttcctcaatagcaaggctggcgagcccgacggcgagtccttggacgaacagccctcttcttcatcttccaaacgcagtctcctgtccaggaagttccggggcagcaagcggtcacagtcggtgaccaggggggagcgggagcagcgtgacatgctgggctccctgcgggactcggccctgtttgtcaagaatgccatgtccctgccccagctcaatgagaaggaggccgcggagaagggcaccagtaagctgcccaagagcctgtcatccagccccgtgaagaaggccaatgacggggagggcggcgatgaggaggcgggcacggaggaggcagtgccccgtcggaatggggccgcgggtccacattccc

SEQ ID NO: 14411 - DNA, 500 bp, Homo sapiens
gcgtccgctcgcggcagggcatcgagtacatcctcagcaaccagggctacgtgcgccagctctcccaggccctggacacatccaacgtgatggtgaagaagcaggtgtttgagctactggctgccctgtgcatctactctcccgagggccacgtgctgaccctggacgccctggaccactacaagacggtgtgcagccagcagtaccgcttcagcattgtcatgaacgagctctccggcagcgacaacgtgccctacgtggtcaccctgcttagcgtgatcaacgccgtcatcttgggccccgaggacctgcgcgcgcgcacccagctgcggaacgagtttatcgggctgcagctgctggacgtcctggctcgcctgcggtgagtccccactgtagcggtcctgccggctccccctcctgctcccaaggccaggcccacctgccctttggctcccagccacctcacctaagcagcacctccagatggcagggaggtggct

SEQ ID NO: 14412 - DNA, 527 bp, Homo sapiens
gagtcgacccacgcgtccggccagagctgagtggcagccgcctcccttatgcaggacatgtgctctcggcttcaccagggttctgaccgggtctgcttctgcattcacagcgcctcctggacctgaaggcatctgagtgtgagaccctgttctaactcttagaagtgacattgtaagaggtggtggggaccagctaattggtccaacccagcctgagtgcaccaccctttgaacaaatgtatcagtgatgaaaatttgcctttgccccggcttgcctgtaatcccagcactttgggaggccgaggtgggcggatcacttgaggtcgggagttcaggaccagcctggccagcgtggcgaaaccccgtctctactaaacataaaaaaattagtcaggtgtggcggtgcgtgcctgtggtcccagctattcaggaggctgaggcaccagaattgcttgaacccaggaagtggaggttgcagtgaactgagactgcgccacggcactccagcctgggcgacagagcaagac

SEQ ID NO: 14413 - DNA, 502 bp, Homo sapiens
cccacgcgtccgggcgaccgctgtggccgcggagagtgacggcggcccggccgacgggagccggggcggggcggcggcccagcgaaggagcgcgcgggcggtctggccccgccccctccccgcccgccttcccggtgaccttcaggggcccgggtggcgggcgcaggcccctgcggcggcggcgggatgttcgtgcaggaggagaagatcttcgcgggcaaggtgctgcggctgcacatctgcgcgtccgacggcgccgagtggctggaggaggccacccaggacacctcggtggagaagctcaaggagcgctgcctcaagcactgtgctcatgggagcttagaagatcccaaaagtataacccatcataaattaatccacgctgcctcagaaagggtgctgagtgatgccaggaccatcctggaagagaacatccaggaccaagatggcctattattgataaaaaaagcggctccataaccactttccaaggtggctgatg

SEQ ID NO: 14414 - DNA, 497 bp, Homo sapiens
cgacccacgcgtccgggatcccgtacccgggactgactcggcgccgctggctggcctggcctggtcgtcggcctctgcacccccgccgcgggggttcagcgcgatctcctgcaccgtcgagggggcacccgccagctttggcaagagcttcgcgcagaaatctggctacttcctgtgccttagttctctgggcagcctagagaacccgcaggagaacgtggtggccgatatccagatcgtggtggacaagagccccctgccgctgggcttctcccccgtctgcgaccccatggattccaaggcctctgtgtccaagaagaaacgcatgtgtgtgaagctgttgcccctgggagccacggacacggctgtgtttgatgtccggctgagtgggaagaccaagacagtgcctggataccttcgaataggggacatgggcggctttgccatctggtgcaagaaggccaaggccccgaggccagtgcccaagccccgaggtc

SEQ ID NO: 14415 - DNA, 495 bp, Homo sapiens
gcgtacggcagggcaggggtgttccctctgctgatgatggatgcccctaacacctgtgcctaacacccctactgaaccccacagctccagccttagtttttggagtcaagtgttaaaggtttctggccagaggaattggggtcttgccatccctgcaatagcccttttatgggctctgggagacagctttagggaataaatggggattttcccctttttctacccactcctttgcttcctccaagacttacccaactccttccccctcagagaaccaaatagcctgaggaagcaggagagttcctggttatggcagtttcttggtgatttggggcttcaagacagtaggtgagagatgctgtcaggacgtatcttcttcataccaaagtcactggtcctttctcagcctctctcgtgcttttctcctaatgaccatatttttgccaaaaattgggatatgttatctgacagaccagaatatttgaagtttgggct

SEQ ID NO: 14416 - DNA, 495 bp, Homo sapiens
gcgtccgcggatatcacggatcaaaccatatggtctcgatattgttagttattcagcataaacagaattatttcccaatacttgatctgaaatatttctaatggtcttacttgaaacttatattctttctgggagtgatgtttttatcatttttccatggagacaggttctaactctgttgcccaggctgcagtgcagtgatgtgatcatagctcactgcagcctgaaactcctgggttcaagtgatctctggcctcagcctcccaagtagttggaacttcagatacgtgccaccacatccagctaatttattttttagagatgaggtctcgctatgttgcccagtctggcctactagcctcaagtgatcttgccatctgagccttcagttggagatgtctgatttatgttaatataagaaagctgttgatcgtttatcataaaggcatttccttatattgctagtataatcctctgaatattagcggtaagatg

SEQ ID NO: 14417 - DNA, 501 bp, Homo sapiens
gtcgacccacgcgtccgctcctccgccggcagcaactcggcgcccgcggtccatggaccggaacctcgggccgacggacgggaacccgggccgcgatcgccgcctccccgcctcaggctcctcctcctcgctctccgccgcctccgccggactcccgcaggccctgcaccgccgccgccaggctagcggagctgccccgggaagctgggtgacgggttcgcggctgccgccggactgcggcctactccgccgcctctcagtgctattgtccctgggcctggccttgagcgggtccactggggaaggccgtgtgcgccggctccgcggaagatgccggaccaagccctacagcagatgctggacagaagttgctgggtttgttttgctactgatgaagatgatagaacagctgaatgggtgagaccatggcaggtgcagaggatctacaaaatgggttcaccaggcctgtctacaacgctgggtggatgaaaagcaaagagg

SEQ ID NO: 14418 - DNA, 495 bp, Homo sapiens
cgcgtccgggcccgcgaccgagcgtgcggactggcctcccaagcgtggggcgacaagctgccggagctgcaatgggccgcggctggggattcttgtttggcctcctgggcgccgtgtggctgctcagctcgggccacggagaggagcagcccccggagacagcggcacagaggtgcttctgccaggttagtggttacttggatgattgtacctgtgatgttgaaaccattgatagatttaataactacaggcttttcccaagactacaaaaacttcttgaaagtgactactttaggtattacaaggtaaacctgaagaggccgtgtcctttctggaatgacatcagccagtgtggaagaagggactgtgctgtcaaaccatgtcaatctgatgaagttcctgatggaattaaatctgcgagctacaagtattctgaagaagccaataatctcattgaagaatgtgaacaagctgaacgacttggagcagtggatg

SEQ ID NO: 14419 - DNA, 498 bp, Homo sapiens
gacccacgcgtccggcgtggggatgggtggggtgagggggcgaggccgcagctagggcggcgaaactctcctcccctcggccccaccgcgtgggacggcgtgaacgtggtgtcggagggatgtcagccttctctgaggcggcgctggagaagaagctgtcggagttgagcaactcgcagcagagcgtgcagaccttgtccctgtggctcattcaccaccgtaaacactcgcggcccatcgtcaccgtgtgggagcgggagctgcggaaagagtggaggtgcaacaaatgagaaattccaattggagattttgtcaaacaggaatttactccaaaccaaacaggaagcttacttttctctacctagccaatgatgtcatacagaacagcaagaggaaggggccagagtttacaaaagattttgcaccagttatagtggagggctttaagcatgtttcaagtgaaactgatgaaagttgtaagaagcaccttggaagagt

SEQ ID NO: 14420 - DNA, 492 bp, Homo sapiens
cgtccggcaaaagcagggactcctgatttatatgtccctcctcctggcaatcctctcaccccacctcccctgagaacctcagttcttcctaaattgctaaagctgaggggaaagggatgctttgcggcaaaggcgctgctgcctcaagcttgctttacatgcctctctagttcctctcgcactacagagtggtagcgaacaaaagcgttcgccctagaagcgacctgaatggaaaaatctgcacacgaactaatgggtttgtcacggaaagtagggaaccgggtctgcagcattccctggagacagactttctggttggttttcaagggtccaaggcagccatcagcccggctgtgccctcccaccctgcctcccacccagttgattctctctttgtgtaagtttagcccctctgaggtggtggagtgagagcatcccatcagatatatatacgattcatcagtcggcacttaaaaagatcgataacaggca

SEQ ID NO: 14421 - DNA, 505 bp, Homo sapiens
gagtcacccacgcgtccgaaaaacgcagatgatataccagcaacatcagtcatggctgcgccctgtgctcagaagcaaccgggtggaatattgctggtgcaacagtggcagggcacagtgccactcagtgcctgtcaaaagttgcagcgagccaaggtgtttcaacgggggcacctgccagcaggccctgtacttctcagatttcgtgtgccagtgccccgaaggatttgctgggaagtgctgtgaaatagataccagggccacgtgctacgaggaccagggcatcagctacaggggcacgtggagcacagcggagagtggcgccgagtgcaccaactggaacagcagcgcgttggcccagaagccctacagcgggcggaggccagacgccatcaggctgggcctggggaaccacaactactgcagaaacccagatcgagactcaaagccctggtgctacgtctttaaggcggggaagtacagctcagagttctgcagcacccct

SEQ ID NO: 14422 - DNA, 465 bp, Homo sapiens
gtccgctccttggcaagaacgaaaggtgtgatgaaacctccctgctcggaagggtctccgtggaggtgtcctcatttcacatgctgggttttgcaagcgaggaagccaggcagtggaggaactagagagaggcaggcgtgtgtgtggacaagcgctggagccgcagccctcagactggcacgggaacgccagcgttgggtgttcagattccacgcgtatgtctgggctcactcacagcatggccgagtgtctgcagtgctggtcctgacccttccagagcagcagtggacagatgagataagactgtttcagaaacaaagatggccacagccttcctaacaagcaggtcatctggccatgtctgtattgtaactggtaaaaggcttcaagtcagattgatgatcaagaaaagtcaaaaccccagcccaagattgggaaagcaggtggggggtccaagcttttaaa

SEQ ID NO: 14423 - DNA, 498 bp, Homo sapiens
  misc_feature 412: n = A,T,C or G
cgcgtccgactggtttattacaccaagctggatggtttccttttaggcaagaaggaggtcatcagcaggctcccaacaataatgccgaagttaacaatgatgggcaaaatgcaaacaacttggaacttgaagaaatggagcgtcttatggatgatgggcttgaagatgagagtggagaagatggaggtgaagatgccagtgcaattcaaaggcctggattaatggcttcagcttggtctttcatcaccaccttctttacttcactaataccagaggggcctccccaggttgccaattgacctgaaaaactgtgccagctacaaggagggtctgacttcaggaaagtggtttaaataacagtgcaatttcaaaaaaatttataactttcttttgatcatcatgtacagaggtngttttttttctttaggcttctcatgcatatgaatattttaagcacgaatggactactaaatatctgagtttttttttttttttttt

SEQ ID NO: 14424 - DNA, 449 bp, Homo sapiens
gcgtccggtttggctgcacctgcataagctgctacaaatagaataaagaatttcatagcctgtatctatcatttagatgcatggaaaaaaatgggctttgcacacaatgggtttggagctgactgggaacaatggaaaaaattacattagctgtggttgtaaagtttttttgtttttggttttgttttttttttcttttttcttttttttttttttaccatcttgtgaaaggtttctgaaactcgataataaaaagcggttggtgtaaattattcttttgtgtcacatttttagaaggaaaaacataaaagaatgtatccttagtactggttcttaaacagcccataaaaacccattggcctgaagcttatatctcaggcctatgcccatcttatagtcttggaagacaaaaggctggtagagacagtctttagtggcttcagtgatgc

SEQ ID NO: 14425 - DNA, 437 bp, Homo sapiens
cgcgtccgctgggtctcgccctcaacctgtgcatgtatatgtgtgtctttgtgtgtgtatgtgtgatctctgcctgcaggaccagcccggtggcaccctggatctgaccctgatccgtgcccgcctccaggagaagttgtcacctccctacagctccccacaggagtttgcccaggatgtgggccgcatgttcaagcaattcaacaagttaactgaggacaaggcagacgtgcagtccatcatcggcctgcagcgcttcttcgagacgcgcatgaacgaggccttcggtgacaccaagttctctgctgtgctggtggagcccccgccgatgagcctgcctggtgctggcctgagttcccaggagctgtctggtggccctggtgatggccccttgaggctggagcccccatggccagcccaccctggctctgttctct

SEQ ID NO: 14426 - DNA, 389 bp, Homo sapiens
tccgggaggaggttagaaggagttgttggaggaggaggaggaggcgagggcgagcgagcccagcggggtcctggtcgccccgcgggccaaagtcgagccctcccgcctttgggcgagcgcgccagccgtcctttttcagaacagccgtcgtcaaaaagaaagaacggggggtgccgaggtccccatgaccttctaaagtggtgcggtccctgttgagtgcgctgcccgggccgtgacccgcgcccctgtgcgtccccgcgcgcctccgagcgcccctgtgcgccccggcccgcgccccgccggcatggacgtccatacccgttggaaagcgcgcagtgcgctttgcccgggcgccccgctgctgcccccgttgttgctgctgctgttgt

SEQ ID NO: 14427 - DNA, 476 bp, Homo sapiens
gagtcgacccacgcgtccgcgccggccgccggtgtccggaccgctcgcccccgtttggacccgacttcggttcttctggggtgttgatgctcctaaagcccgagagcacgtgtccagaccctagcctgtacgacgctgactctgcccggtcccagaaccaaagccatgccggggtgtggcctctgaccccacgcggaggggacctcgccttgcgggaccccacctggaacccgacctgccagcctcgcagccggcctgagccgccatgcgcgggaagttgctgccgctggccggcctctacctggtgcagggcctgccctacgggctccagtccggcctcctgccagtgctgctgagtgccggcggcctctcgctgacgcgcgtggggctggccaaggttctgtacgctccggggctgctcaagctggcttgggccccgctggtggacgcgcaaggctcggcgagggcctgggtga

SEQ ID NO: 14428 - DNA, 505 bp, Homo sapiens
ccacgcgtccgcggacgcgtgggtgcttgctgctgaacctgagctgcaagttggaattgatataatgaagactagttttccaggtcgtggttcaattccagaattctttcatattatgaaaagaaagtttaccaacaaagaatgggaaacaatcagaagctttaaggatgagtggactcagctggatatgttttataggaattgggcacttaaggaaagcttcataaaagccattggtgttggactaggatttgaattgcagcggcttgaatttgatctatctccattaaacttggatataggccaagtttataaagaaacacgtttattcctggatggagaggaagaaaaagaatgggcatttgaggaaagcaaaatagatgagcaccattttgttgcagttgctcttaggaaacccgatggatctagacatcaggatgttccatctcaggatgattccaaaccaacccagaggcaatttactattctcaactttaatgattta

SEQ ID NO: 14429 - DNA, 506 bp, Homo sapiens
cgtccgcgaaaatgcattccgaatctgtgagggcccaatacagaatttatgggtgggtgaaagcacttgtgctttagctttttcatattaaatatatattatatttaaacattcatggcatagatgatgatttacagacaatttaaaagttcaagtctgtactgttacagtttgagaattgtagattacatcatacataagtcatttagtaacagcctttgtgaaatgaacttgtttactattggagataaccacacttaataaagaagagacagtgaaagtaccatcataattaacctaaatttttgttatagcagagtttcttgtttaaaaaaaaataaaatcatctgaaaagcatttgtacagtaaaatgtataatgaagctttgccaaccagactgtgctagcaacaaatttttttaaataagctttatgcagtggtaataaggtggcctcaaatatattgtgtcttgatggagagttatttgtgaaatgaatgtggtcttt

SEQ ID NO: 14430 - DNA, 394 bp, Homo sapiens
aatccggttaacatggccgtcaccgacagcctcagtcgggctgcgactgtcttggcaactgtgttgctcttgtccttcggcagcgtggccgctagtcatatcgaggatcaagcataacaattctttagaagtggccatacaaacaaactgggctgttcttggtgtgtacatcccgattctggtttaattatcgacatgttgcaaataccctttctgtttatagaagtgtcaagaggctaggtattcctgacagtcacattgccctaatgcttgcagatgatatggcctgtaatcctagaaatcccaaaccagctacagtgtttagtcacaagaatatggaactaaatgtgtatggagaatgatgtggaaggggattatagaagttattgaggta

SEQ ID NO: 14431 - DNA, 468 bp, Homo sapiens
gcgtccggcgaagatggacgcagctactctgacctacgacactctccggtttgctgagtttgaagattttcctgagacctcagagcccgtttggatactgggtagaaaatacagcattttcacagaaaaggacgagatcttgtctgatgtggcatctaaacttttggtttacatacaggaaaaactttccagccattggggggacaggccccacctcggacacaggctggggctgcatgctgcggtgtggacagatgatctttgcccaagccctggtgtgccggcacctaggccgagattggaggtggacacaaaggaagaggcagccagacagctacttcagcgtcctcaacgcattcatcgacaggaaggacagttactactccattcaccagatagcgcaaatgggagttggcgaaggcaagtccataggccagtggtacgggcccaacactgtcgcccaagtcc

SEQ ID NO: 14432 - DNA, 512 bp, Homo sapiens
ccacgcgtccgctcgaagctgtccgcggtctgtttggcccgaacggcggcggaggcgctgatcatggcgacattcatctcggtgcagctgaaaaagacctcagaggtggacctggccaagccgctggtgaagttcatccagcagacttacccaagcggcgggggaagagcaggcccagtactgccgcgcggcggaggagctcagcaagctgcgccgcgccgcagtcggtcgtccgctggacaagcacgagggcgcgctcgagacgctcctgagatattatgatcagatttgttctattgaacccaaattcccattttctgaaaatcagatctgcttgacatttacctggaaggatgctttcgataaaggttcactttttggaggctctgtaaaactggctcttgcaagcttaggatatgaaaagagctgtgtgttgttcaattgtgcagccttagctagccaaattgcagcagaacagaacctggataatgatgaaggattgaaaatcgctg

SEQ ID NO: 14433 - DNA, 492 bp, Homo sapiens
cgacccacgcgtccgggccagccggctcgcccgggggccatggcagcagcggctactgcagccgagggggtccccagtcgggggcctcccggggaagtcattcatctgaatgtgggaggcaagagattcagtacctctcgccagactctcacctggatcccagactccttcttctccagtcttctgagcggacgcatctcgacgctgaaagatgagaccggagcaatcttcatcgacagggaccctacagtcttcgcccccatcctcaacttcctgcgcaccaaagagttggatcccaggggtgtccacggttccagcctcctccatgaagcccagttctatgggctcactcctctggttcgtcgcctgcagcttcgagaggagttggatcgatcttcttgtggaaacgtcctcttcaatggttacctgccgccaccagtgttcccagtgaagcggcggaaccggcacagcctagtggggcctcagcagcta

SEQ ID NO: 14434 - DNA, 552 bp, Homo sapiens
cgcgtccgaaggaaggaagggacgggctgagttccccgacgagagacacacccagattttcctgcagcttggggagaggtcctcccaggagccttggtccctcctggcctgccggagtccttagccaggatggaggctgttgtgaacttgtaccaagaggtgatgaagcacgcagatccccggatccagggctaccctctgatggggtcccccttgctaatgacctccattctcctgacctacgtgtacttcgttctctcacttgggcctcgcatcatggctaatcggaagcccttccagctccgtggcttcatgattgtctacaacttctcactggtggcactctccctctacattgtctatgagttcctgatgtcgggctggctgagcacctatacctggcgctgtgaccctgtggactattccaacagccctgaggcacttaagatggttcgggtggcctggctcttcctcttcttcaagttcattgagctgatggacacagtgatctttattcttcgaaagaaagactggcaggtgacctttctacat

SEQ ID NO: 14435 - DNA, 497 bp, Homo sapiens
gcgtccggccgccgccccatggccacgccgctgcccggccgcgcgggcgggcccgccacgccgctgtcgcccacgcgcctgtcgcggctgcaggagaaggaggagctgcgcgagctcaacgaccgcctggcgcactacatcgaccgcgtccgcgcgctggagctggagaacgaccggctcctgctcaagatctcagagaaggaggaggtgaccacgcgcgaggtgagtggcatcaaggcgctgtacgagtcggagctggccgatgcccggagagtcctggatgagacggctcgagagcgtgcccggctgcagatagagattgggaagctgagggcagagttggacgaggtcaacaagagcgccaagaagagggagggcgagcttacggtggcccagggccgtgtgaaggacctggagtccctgttccaccggagcgaggtggagctggcagctgccctcagcgacaagcgcggcctggagagtgacgtggctgagct

SEQ ID NO: 14436 - DNA, 509 bp, Homo sapiens
ccacgcgtccggaagaatctacacttctttgcaccagagtatggagaagtcactaatgtgacaacagcagtggacatctactcctttggcatgtgtgcactggagatggcagtgctggagattcagggcaatggagagtcctcatatgtgccacaggaagccatcagcagtgccatccagcttctagaagacccattacagagggagttcattcaaaagtgcctgcagtctgagcctgctcgcagaccaacagccagagaacttctgttccacccagcattgtttgaagtgccctcgctcaaactccttgcggcccactgcattgtgggacaccaacacatgatcccagagaacgctctagaggagatcaccaaaaacatggatactagtgccgtactggctgaaatcccccaggccctgatctgcgctgtggctgtccctggacgtgctgcagccctcctgtcccttccccccagtcagtattaccctgtgacatcacttgtcgtgcc

SEQ ID NO: 14437 - DNA, 509 bp, Homo sapiens
ggagtcgacccacgcgtccggatttcagttggtggcgtcatagtctcattacagtgtctatcttggcatttaccaatttacttgtcatctttgtcccaactattagggatatctttggttttattggtgcatctgcagcttctatgttgatttttattcttccttctgccttctatatcaagttggtgaagaaagaacctatgaaatctgtacaaaagattggggctttgttcttcctgttaagtggtgtactggtgatgaccggaagcatggccttgattgttttggattgggtacacaatgcacctggaggtggccattaattggcaccactcaaactcaaactcagtccatctgatgccagtgttgagtaaactcaactactatgaaatttcacctaatgttttcagtttcacttccttttgaagtgcagattcctcgctggttcttctgagtgcagaataagtgaacttttttgttttgttttgtttttttaagaaacttatctg

SEQ ID NO: 14438 - DNA, 169 bp, Homo sapiens
acccacccgtccgcgcgcggcgcctcgcctcggccggcgcctagcagccgacttagaactggtgcggaccaggggaatccgactgataaattaaaacaaagcatcgcgaaggcccgcggcgggtgatgacgcgatgcagatttctgcccagagcttttgaatgtcaaag

SEQ ID NO: 14439 - DNA, 516 bp, Homo sapiens
cgacccacgcgtccggacagattgatagctctttctcgattccgtgggtggtggtgcatggccgttcttagttggtggagcgatttgtctggttaattccgataacgaacgagactctggcatgctaactagttacgcgaccccgaggtgcctgaccagttctaccgcctgtggctatccctcttcctgcacgccgggatcttgcactgcctggtgtccatctgcttccagatgactgtcctgcgggacctggagaagctggcaggctggcaccgcatagccatcatctacctgctgagtggtgtcaccggcaacctggccagtgccatcttcctgccataccgagcagaggtgggtcctgctggctcccagttcggcatcctggcctgcctcttcgtggagctcttccagagctggcagatcctggcgcggccctggcgtgccttcttcaagctgctggctgtggtgctcttcctcttcacctttgggctgctgccgtggattgacaactttgcc

SEQ ID NO: 14440 - DNA, 489 bp, Homo sapiens
cgtccgatcgacttcgcctgacggaatccaggggtcgtaatatatgtaaactcgcgtccgtgctgcgtgcccagagtagtggccgaataccttaacggggctgtgcgcgaggagagcatccactgcaagtcggtcgaggagatcttgacgctggtgcagaagctggccgaccagtcgggcttggacgtgatccgcattcgcaagcccttccacaccgacaaccctagcatccagggccagtggcaccccttcaccaacaagccgaccacgttccgcgggctacgcccccgagaggttcaggatcctgccccagcccagtgcctgcttctgggggcagtgaccttgtgaaccactcatttttatgcaagtggcatccctaaaacctgagatgaggaagacttcaagggttttacagggcccttgttttttaaatccaaattgataataatgatctcaaaacacagtgagaggtctgaaggctggcttctg

SEQ ID NO: 14441 - DNA, 487 bp, Homo sapiens
cgacccacgcgtccggccggagaaacttgagccggctgccccgcccacggtgcccgaagccccaaaggctggaattaggggctagaagtctggcacccaccgcctggccaggtgttcgggacgcgaccaggtgggcggtcgccccgccccgggagcgcggcttaatagctgagagcccgggggccaggccgcggctgcggcccaggcaacgccctgagggtggccacgctgccaggtgttccactcccccgggactatgggcaagggcccggggcggggagggcggcaggtgctgacactggagctgcgccggaggtcggggaactcggcctcctaagactgaggacactcgcctgctgggccggtcgagctgtgcggtgccctccgggacgcagggggcgctgcagccacgctgggtcaggctccgcagggccctcccaacccggggactaacggcgccggtgacgacttcgcggcgcgttggtca

SEQ ID NO: 14442 - DNA, 514 bp, Homo sapiens
cgacccacgcgtccggaaagatggaggtgtggggacaggagctgggtgtgctggggactggccgcggacccctaacctgtgtctccggtctccctccgggagcggctcaacccagcccatcgctctggccccgttctggccctgcagggtggtggttgggacgttgaaatgagcgcgcgagtggtacgtcctctctccgcgctcacgcccccctcctcaccgtgtttcccgccaggaccatcagcacgtgcccatcgacatccagaccagcaagctgctcgattggctggtggacagaaggcactgcagcctgaaatggcagagtctggtgctgacgatccgcgagaagatcaatgctgccatccaggacatgccagagagcgaagagatcgcccagctgctgtctgggtcctacattcactactttcactgcctaagaatcctggaccttctcaaaggcacagaggcctccacgaagaatatttttggccgatactcttcacagcggatgaag

SEQ ID NO: 14443 - DNA, 505 bp, Homo sapiens
cgaccacgcgtccgtgaagcagagaatcacttgaacccaggaggtggaggttgcgtgagctaagatcgcgccactgcactccagcctgggcgacaagagtgaaactccgtcttaaaaaagcccatggcaggctgggcgcggtggctcacgcctgtaatcccagcactttgggaggccaaggtgggcggatcacaaggtcaggagatcgagaccatcctggcgaacacggtgaaaccccgtctctactaaaaaaaatacaaaaaaattagccaggcgtggtcgtgggcacctgtagtcccagctactcagggggctgaggcaggagaatggcgtgaatccgggaggcggagcttgcagggagccgagatagtgtcactgcactccagcctgggtgacagagcgagactccgtctcaaaaaacaaaaagcccgtggcaattaatggtaaaggaaacccggcatttcagtgtaaagaggtaacataaacggatactgcctcattgcac

SEQ ID NO: 14444 - DNA, 487 bp, Homo sapiens
  misc_feature 393: n = A,T,C or G
cccacgcgtccggcctccagcaaagccacattcagtcagctctgcaggctcatcttacaagaataatccctttgccagctcaatctccaaacatggggtttcttctggcagctcttcctcgggaggaacaccagtccagagttctgtttctgggagcctggtccctggcatacagcctccctccgtgggacaggccaccagccgacccgtcccaagttcagcagggaaaaaaatgcctgtttcccagaagttgactctggtagcccctccaggcggtccaaacggagattccagtggtgggacccagggagtggcaaagttgctgacctcgccgtccctaaagccctctgcagttagtagtgtgacatcgtctacctccttgtcaaaaggagncgagtgggactgtgctgctggccggctcctctttgatggcttcaccctacaaatccagcagcccaaagctgtctggggccatgagctcgaactc

SEQ ID NO: 14445 - DNA, 501 bp, Homo sapiens
cgacccacgcgtccgggaagcggtgcgctccgtaccagggagtgcgggaatccgccgtttgcgctgaggcaatggcggcagctgcgccggtggccgcggacgacgatgagcggcggcggcggccgggggctgcactggaggactcccggtcccaggaaggggcaaatggtgaggccgagtcaggtgagctcagccggcttcgggctgagctggcaggcgccctggcagaaatggaaaccatgaaggctgtggcagaggtgagcgagagcacgaaggccgaggctgtggctgcggtgcagcggcagtgccaagaggaggtggcctcgctgcaggccatcctgaaagactccatcagcagctatgaagcccagatcaccgccctgaagcaggagcgacagcagcagcagcaggactgtgaggagaaggagcgggagctgggccgcctgaagcagctgctgtcccgggcctaccccctggacttcctggagaagcagatggaaa

SEQ ID NO: 14446 - DNA, 503 bp, Homo sapiens
cgacccacgcgtccgcggacgcgtgggtccgcggcggcgtccggggtctccagtagggctgacgctccggtgctcgcacaatcccccgcctcggctggcaacgggcgtccctccactccccgagtccccggcagccgccgccaccccagcgcgccccgatctggccccctgccccgcgaagatggctgccgtacgccgggcccgcagttattgccgctgcctggtgcgcttctccgaccgagaactctgctaagctccgctgcagagacaggcaggagtagacacccggacacccagcacccctcctccggggggcggtgcagagggggcacggagagcccctcgagcgcagcaggccgccccgccagcatggcagaagctgaggaagattgtcattctgatactgtcagagcagatgatgatgaagaaaatgaaagtcctgctgaaacagatctgcaggcacaactccagatgttccgagctcagtggatgtttgaacttgc

SEQ ID NO: 14447 - DNA, 540 bp, Homo sapiens
cgacccacgcgtccggcgagtggccttcccggttggcgcgcgcccggggcggcggcgctggaggagctcgagacggagcctagttatgtctgggaggcgaacgcggtccggaggagccgctcagcgctccgggccaagggccccatctcctactaagcctctgcggaggtcccagcggaaatcaggctctgaactcccgagcatcctccctgaaatctggccgaagacacccagtgcggctgcagtcagaaagcccatcgtcttaaagaggatcgtggcccatgctgtagaggtcccagctgtccaatcacctcgcaggagccctaggatttcctttttcttggagaaagaaaacgagccccctggcagggagcttactaaggaggaccttttcaagacacacagcgtccctgccacccccaccagcactcctgtgccgaaccctgaggccgagtccagctccaaggaaggagagctggacgccagagacttggaaatgtctaagaaagtcaggcgttcctacagccggctggagaccct

SEQ ID NO: 14448 - DNA, 490 bp, Homo sapiens
acgcgtccgaaggcacaggcgtcttgctctgttgaagcaagtcagtatccgagaaaactgctgttccctttgttgtgatgaggtagcagacacacaattgaagccatgtggacacagtgacctgtgcatggattgtgccttgcagctggagacctgcccattgtgtcgtaaagaaatagtatctagaatcagacagatttctcatatttcatgacacatgtgaagaggcatcgtggacttttttctactcaattccagccaatgttgaaaagaaaaagaaaaaaaaaactctaatcagttgtacacacattgaaacttatagccatggccagattttatgctaaaaatggtagtttgtcaaagacaaaattctcttagaatctaatccaacttgccagccctgagaaaatcccttttaaggccaaggaaagctgaatgctagcagccaggcctgtggtacttccatgagaaaccatagcagacaatgccc

SEQ ID NO: 14449 - DNA, 460 bp, Homo sapiens
gaggtgcgagaaggccgaggagaaggccaaggagattgcgaagatggcagagatgctggtggagctggtccggcggatagagaagagcgagtcgtcgtgagcgcggtcggcggtttccagccaatggattctggtcaactggtggagattggctgacaccctggagaagccgaaaccagagagccttttgttttctcttttttcctgtctatgctctgtctcacttaacactacgttttctgctatggtctgtggttgatgacctcaatatgagtttcgattgttaacgtgtttttgtttgggaagtaattttgtttgaaaatgctctcacatacaggaattagggcctagattgtaagctcttgcagcagtcacatttgttcccgggctttggtgggtatttctaaatttttgaggtgctttgctatttcttgtgtgacctgatagcttcctggaactt

SEQ ID NO: 14450 - DNA, 493 bp, Homo sapiens
gtccgagcctctgggggtggatcctgaaaggtggtccagccgcctggccctgcgtgggaccctccacctggcagcagggtctcgctctgtcacacaggctggagtgcagtggtgtgatcttggctcatcgtaacctccacctcccgggttcaagtgattctcatgcctcagcctcccgagtagctgggattacaggtggtgacttccaagagtgactccgtcggaggaaaatgactccccagtcgctgctgcagacgacactgttcctgctgagtctgctcttcctggtccaaggtgcccacggcaggggccacagggaagactttcgcttctgcagccagcggaaccagacacacaggagcagcctccactacaaacccacaccagacctgcgcatctccatcgagaactccgaagaggccctcacagtccatgcccctttccctgcagcccaccctgctttccgatccttccctgaccccaggggcctcta

SEQ ID NO: 14451 - DNA, 494 bp, Homo sapiens
gagtcgacccacgcgtccgagaagattgcaaatctgagggccgcttccatgtccagaaccttagccaggtggagcaggatgggcggacggggcatggactccgcagatcttccaagttctgcttgaaggagcacaaagccctcaagacgttaggcatcatcatgggcactttcaccctctgctggctgcccttcttcatcgttaacattgtgcatgtgatccaggataacctcatccgtaaggaagtttacatcctcctaaattggataggctatgtcaattctggtttcaatccccttatctactgccggagcccagatttcaggattgccttccaggagcttctgtgcctgcgcaggtcttctttgaaggcctatggcaatggctactccagcaacggcaacacaggggagcagagtggatatcacgtggaacaggagaaagaaaataaactgctgtgtgaagacctcccaggcacggaagactttgtgggc

SEQ ID NO: 14452 - DNA, 480 bp, Homo sapiens
gtccgttatgttaatctaaaggcttcagtccacatttttttatacgttgtattttaaaaacgtttgaaaggagtcttacacctgtatcatgaaaactgaatccttttgaaataccactatatgaagagagagatgaaatttagtgaacagaattgaaaaggtgctcataatttcactatgcaaacttaccccagtctctaaaaaagtaatttagatttaaagttctttgatgtatttgattttctaaatctttatggttatgatttggaataaaatgtgcctaatcctgtgttacattctgttcttaaatctgaatgccttctcatttaattctgaggaaatatcacacaagtgtcttcattgaccttgaagaaatgtatatacagttgccttataaaacaacataaatttagaccataacttttatagagaaagggttttgtcaaatgttttctgaaaatctgagtaattcaaagcatg

SEQ ID NO: 14453 - DNA, 483 bp, Homo sapiens
tcgacccacgcgtccggcgctctcggccgccgccgcctctgcgtgggccggccgggagggcctcgggggactgactgacagagtttcactcctgttacccaggctggaggacaatgatgtgatctcgggtcaccacaacctccgcctcccggattcaagcgattctcatgcctcagcctcccgagtagctcagattacaggcatgtgccaccacgcccggctaattttgtattttcagtcgagacggggtttccccatgttggtcaggctagtcttgaattcccgacctcaggtgatctgttcgcctcggcctcccaaagtgctgggattacaggcgtgaaccactgcacccggcgaggcattttttactgtctacagaaacttattgtaattcatttttcctcactccagtagtaagaattataccaaattgaaaagatatgaatgagtatcctaaaaaaagaaaaaggaagactctacacc

SEQ ID NO: 14454 - DNA, 482 bp, Homo sapiens
gtccgcaggcactgataagccagtggtaagggaaacacagctctaacctcacctcattctccaggttacaaaggccatgtgcccctttgaatctggcagagaaagtttcctcgttgtaagtatttgcatctacttcaagccagattcttctgcctctttctcctttccagacccctactctgtgcagtgctgaccacagctagagccaccgccccattgctcaaccagtatttatttccctaaacgacccttcctcatattcccttccctccacctctccttaccaagcacccaaaagaggatttagaactagcagggtggacatcatctggttgtttctacttttctctgcctagcacaaaattgggagaaaactggagcctccatccgcagtcacacgtgtacagatctggggatttggatgtaggctttttctaacttctctttcagaagcttttacagaaaccctttcatctgtagcc

SEQ ID NO: 14455 - DNA, 397 bp, Homo sapiens
tccacgcgtccgcggacgcatgggtgccgccgccgccgtcgctgtcgtagtcgccgccgccgctgccggagaaagagcacgagcggggaagccccagagtgaaatctagcatcctgccggctggtctgcccgcccctccttccttttccccccggcccccgtcccctccccccgcaggtgccatccgccgccatccgccctctctacccccccatccccaggtgaggggggtgagttcaggaagcggagaccccgaggaacccagcagggtcaccatttgcagcgcaacatggcaggagctggaggagggaatgatattcagcggcgtttttctcaagtgaaaggagcagtagatgatgatgtagcagaagcagatataatttctacagtagaattt

SEQ ID NO: 14456 - DNA, 450 bp, Homo sapiens
cccacccgtccggccggccagcgtcatcaccatcgtcaagtccaccccgggctcggggtctggccccgcccacggtccggaccccgcccacggcccggcctgctgctcctagtgcccgcccccgccatgcctcagccacgcccctccggcctcagctccctccccaaagtgcccgagcgccgcctctgggcccaggtcccatttctctgcagcaactggccttccgaaactaaaagagtgggtgggaagactagtgaaacccaggtcacggatggggaaacaggcctgaggacacatttcacttagtggttgagttgggaccaaaacctgggcgtcctcactgctgccctgagtccagccatggttttcagggggacagcggacagggactcaaaaaagcggcgggagggccaccctggctagggagaccggtctctgcaagggaggggg

SEQ ID NO: 14457 - DNA, 419 bp, Homo sapiens
cggctgaagctcgttttcgtgaaattaagcttcagagggaagcccgagaaacacaggagagcgagcgcaagcccccaccatacaagcacatcaaggtgaataagccttacgggaaagtccagatctacacagcggatatttcagaaatccctaagtgcaactgcaagcccacagatgagaatccttgtggctttgattcggagtgtctgaacaggatgctgatgtttgagtgccacccgcaggtgtgtcccgcgggcgagttctgccagaaccagtgctttaccaagcgccagttcccagagaccaagatcatcaagacagatggcaaagggtggggcctggtcgccaagagggacatcagaaagggagaatttgttaacgagtacgttggggagctgatcgacgaggaggagtgcatg

SEQ ID NO: 14458 - DNA, 475 bp, Homo sapiens
agtcgcatggcttctgcgagaaaagtgatttaggcagacggaggttttttctcaatcagaggctttcagtaactctgctgatgcacagagaagagacttcctcagcctgcaggctacaagagccaactgttagtgcaaaaaaggactttaatacaaatttcttattccagaaattttgttccaggtctggacaagctgagaaatttatcattgtttttcgagtttttaagatacccactttttctgagaggtatgggtgttgtgtgcaaggcacacacatacagtctttctgtacatgcatgcatatttatgcatgtacagggaagtatccagacaccaatttttaataaaatgaattccccaaagggagtcttgactgaattaaggctgttgtttataggaagccagatataatgatgtgaaaaaaactaaattttaattccaatcacccgcagtaacgggggcagggggaaaa

SEQ ID NO: 14459 - DNA, 346 bp, Homo sapiens
acgcgtccgctctaaacacagagtctgcagcccctaactgacaccctgtccttcctcctaggaagtgctggactccctggtcagcaatgtcaacattgagctgctcaatgccctccgctaccatatggtgggcaggcgagtcctgactgatgagctgaaacacggcatgaccctcacctctatgtaccagaattccaacatccagatccaccactatcctaatgggattgtaactgtgaactgtgcccggctgctgaaagccgaccaccatgcaaccaacggggtggtgcacctcatcgataaggtcatcttcaccatcaccaacaacatccagcagatcattgag

SEQ ID NO: 14460 - DNA, 321 bp, Homo sapiens
cgtccgggcggccgaggcggaggcagcggcggcgggatggcggacgccaacaaggccgaggtgcccggggccactggtggcgacagcccgcacctgcagcccgcagagccgccgggcgagccgcggcgagagccgcaccccgcggaggcggagaagcagcagccgcagcacagcagcagctccaatggcgttaaaatggagaatgatgaatcagcaaaagaagagaaatctgacttaaaggaaaaatctacaggaagtaagaaggccaatagatttcatccttattcaaaagacaagaattcgggcactggagaaaagaag

SEQ ID NO: 14461 - DNA, 505 bp, Homo sapiens
ggtgtcgacccacgcgtccgtgctttttttcgacatactggtttttctttctgtttttcttctctttcttctatttcttgtggatattatggctaataacacaacaagtttagggagtccatggccagaaaacttttgggaggaccttatcatgtccttcactgtatccatggcaatcgggctggtacttggaggatttatttgggctgtgttcatttgtctgtctcgaagaagaagagccagtgctcccatctcacagtggagttcaagcaggagatctaggtcttcttacacccacggcctcaacagaactggattttaccgccacagtggctgtgaacgtcgaagcaacctcagcctggccagtctcaccttccagcgacaagcttccctggaacaagcaaattcctttccaagaaaatcaagtttcagagcttctactttccatccctttctgcaatgtccaccacttcctgtggaaactgagagtcagctggtgactctc

SEQ ID NO: 14462 - DNA, 446 bp, Homo sapiens
ccacccgtccaatcacacagcctttattgagctttacaactaacaacctgatagttggcagttaattcacagttacagataatgcttttatttacataaatataccaagtagtaccctcttattgtattcacttcatctattttcttagaatacttgcaattactaatgaccccttccctttccctcctgctgccctgtccaccctctttccccttctaacatccttagagggatgaaatctcagcatatgttgcaggacaccaaaaggaagaaaacaatcaagcaaataaaataaacagtcaaacaaaccaggagtttaaaacaacaaccccaacaacagaagccttggcaaagaggaatgagtgatcagcaagtgaacacactctatgtcaactctccttttatccagctgagatttatggtaacttatttaattaatggtcct

SEQ ID NO: 14463 - DNA, 481 bp, Homo sapiens
cgacccacgcgtccggagccgagagtgtgtggagcagttacagctggaagaccgggtcctctgcctccacagtagatggcgaatcctctatgcgggactggcaaatggcactgtggtcaccttcaacataaagaacaacaaacgacttgagatctttgaatgccatggccctcgggcagtcagctgtcttgctacagctcaggaaggtgcccgaaaactgctggtcgtggggtcttatgactgcacaattagtgtacgcgatgcccggaatggactgctcctcagaactctggagggccatagcaaaaccattctttgcatgaaggtggtgaatgatctcgtgttcagtggctccagtgatcagtcagtccatgctcacaacattcacactggtgagctcgtgcggatctataaaggtcacaatcatgcagtgactgtggtgaatatcctaggaaaagtgatggtgactgcttgcctggat

SEQ ID NO: 14464 - DNA, 490 bp, Homo sapiens
cgcgtccggatcaaaattttcatccctgaggttaacaattaccatcaaaatgttttgtggagactatgtgcaaggaaccatcttcccagctcccaatttcaatcccataatggatgcccaaatgctaggaggagcactccaaggatttgactgtgacaaagacatgctgatcaacattctgactcagcgctgcaatgcacaaaggatgatgattgcagaggcataccagagcatgtatggccgggacctgattggggatatgagggagcagctttcggatcacttcaaagatgtgatggctggcctcatgtacccaccaccactgtatgatgctcatgagctctggcatgccatgaagggagtaggcactgatgagaattgcctcattgaaatactagcttcaagaacaaatggagaaattttccagatgcgagaagcctactgcttgcaatacagcaataacctccaagaggacatttattcagagacc

SEQ ID NO: 14465 - DNA, 505 bp, Homo sapiens
tcgacccacgcgtccgatcctggatctggagagagagctctccaagcaaatcaacgtgtgcctctgagccagatgacggggtgggaccccggttagtaaggaccgggcgcccagtggctaaggcggtgccctggtgaccaaggagagccagacctgttgctcaggccgagctcctggttgccagcgagttaccacgggaccagtcgcgtgtatggctgagactcattcccagtttccagggcccggtatttggacactagttgccaagtctggggcctggggattttagggaccagcggttgtgaccatctttcctgagcaccaagggcttccccttttgttgccaaaaaggtagttctcgcgcttgctaggctggcctctcttgcctccccttggccggggcaacaccagttactgtgagcatcaccctggtgtggtgagtcacctctagtcggccctcttgctgctgccaaccaaattagtattagctttgagcactgcactg

SEQ ID NO: 14466 - DNA, 477 bp, Homo sapiens
ggactactgcgaagttcaaattggtccagaaacagttatgaccactctttatactgccaagaaatacgcagtcccagccttggaagcacactgtgtagaatttctcaccaaacatcttagggcagataatgcctttatgttacttactcaggctcgattatttgatgaacctcagcttgctagtctttgtctagatacaatagacaaaagcacaatggatgcaataagtgcagaagggtttactgatattgatatagatacactctgtgcagttttagagagagacacactcagtattcgagaaagtcgactttttggagctgttgtacgctgggcagaagcagaatgtcagagacaacaattacctgtgacttttgggaataaacaaaaagttctaggaaaagcactttccttaatccggttcccactgatgacaattgaggaatttgcagcaggtcctgctcaatctggaatttt

SEQ ID NO: 14467 - DNA, 535 bp, Homo sapiens
acccacgcgtccgagcagccatccaagttgcccctacttagtggcttgccctctgcctgcctcagctgctgcctgaccggctgggggaggcactggcgggaggcctcgggctcccctggaagggcgctgggctggcgggtcagctggtggttcttaggtttccttctgtttgttaaaagggacaatgtggccacttctctgtggaaagggagttggttggggggttgagatggcccgtgttcataactcagtttcctgttttgcacgatgtaaaaaccctgtctttttgcacgatacagccaaaagtattggctgatttcttgctgagtgccctcttagttggtgtgtgaggtcttggtgggctcaggccagctgtttgcgagtgtgggaactcataggttctgtctttgtctcttcctttcacctcattctggtagcagcataaaggttaggcaatcactgggacccgcatggtgttcctccaaagaatagggtaaaggagagctgggagggagccctcttcgttgggtgactc

SEQ ID NO: 14468 - DNA, 342 bp, Homo sapiens
acccacgcgtccgagttaagtggtgagagagctagcaaatcatacattgcattccccaaagcatctgaacgtacttctagaaaacaaaccaaccaaaagggaaaatatgcatgctttttgtaattaactggtgctttgaaaatcttttttaagggagaaaaatctcaaccaaagttatgctcatccagacaagctgacctttgagttaatttcagcacaactcattcttcagtgcctcatgactgaaaacaaaaaacaaaaaaagaaagcatcttcacaatgaagcttccagatagcaccgttttgctaaaagatacattctcattgttttccaacagtgat

SEQ ID NO: 14469 - DNA, 225 bp, Homo sapiens
cgcgtccgcaatttaggaagaccccggcgacctgttcctcacccccgcttcgccctcacactttcgggatgtctgcgattcctgctgaggagagcgaccagctgctgatccgaccccttggagctgggcaagaagtaggaagatcatgtattattctcgagttcaaaggaagaaaaataatgctcgactgtgggatccaccctggcctagaaggaatggatgctc

SEQ ID NO: 14470 - DNA, 325 bp, Homo sapiens
gcgtcgaaataacaatacaggactctttcgaggccctgtaattggaatgagtccactttaaatcctttaacgaggatccattggagggcacttccagaatacctcctcccccagcgcccgctgccagccccacaccaggtgtgagaaccaaggtctggtggaggcagctccaggcactgcccagtccgacacaacctgcaaaaatccattagagccactgcccccagagatgtcaggaaccatgctgatgctggccgttctgctgccactggccttctttctgctccttgccaccgtcttctcctgcatctggaagagccaccct

SEQ ID NO: 14471 - DNA, 213 bp, Homo sapiens
ccgaacctcctggttccaagtgggagacatggtgctgtcggagctagcggcgcgcctcaactgcgccgagtacaagaactgggtgaaggcgggccactgcctgctactgctgcgcagctgcctgcagggttttcgtcggccgcaaggtgctctccttccaccgcggcctactcgccgcagcccccggcctggggcctccgcgccgtctgccgc

SEQ ID NO: 14472 - DNA, 243 bp, Homo sapiens
ggatccttttgcctaaagatgtaaacaaaactcaagacagaaggaatcagggaatatgtgctattgtgtgcatcttgtttacatttgggatcaagtgatggcaaaagaagtaatgtgaccactgaaattgttttcattgttttaaataccaagtactcattttcttgatttgaaagtttaacatgacttttaaggacatttctttaaaaagaaagtaaacagggaatgaaggtggtgggaaaa

SEQ ID NO: 14473 - DNA, 272 bp, Homo sapiens
ggctcattccctgaggccggcccgcgtcccgtcaggcgccgcgcggggttagcgcggggtcagcggaggtcagcgggggtcagcagcagcggctccgagggcgcggcggacgcaggatgtacacgctgctgtcgggcttgtacaagtacatgtttcagaaggacgagtactgcatcctgatcctgggcctggacaatgctgggaagacgaccttcctggagcagtcgaaaacccgatttaacaagaactacaaggggatgagtctattcaaa

SEQ ID NO: 14474 - DNA, 312 bp, Homo sapiens
cacgcgtccgatttcttgtgtgctttgaaaaaagtttcagcttgctgtctcttttagtgttttaaagaagtgttatacaaagcattgtttgcaaaatatagggagaataatggagtccactttaattttgaaatttttgtgtgagcttttgatccaagtttattcagcttttttccaacttttaaaaaattttgttaaaaagccccttgctttagaaaaatttttaaatattttaatgtcttgccaacaaatttgttttaaaaattaataaaacttggggcaaattcatttggtcatttaaaaaaaaaaaaa

SEQ ID NO: 14475 - DNA, 446 bp, Homo sapiens
cgcgtccgcagccatcttgggatctgggcaagtgagcgagctccttcctcaccgggctgactagcctctcctttccctgtccccctccatcgctgctctgcaggaagccagcccccagggccagtcccggaggggctgatccgcatctacagcatgaggttctgcccctattctcacaggacccgcctcgtcctcaaggccaaagacatcagacatgaagtggtcaacattaacctgagaaacaagcctgaatggtactatacaaagcacccttttggccacattcctgtcctggagaccagccaatgtcaactgatctatgaatctgttattgcttgtgagtacctggatgatgcttatccaggaaggaagctgtttccatatgacccttatgaacgagctcgccaaaagatgttattggagctattttgtaaggtcccacattt

SEQ ID NO: 14476 - DNA, 367 bp, Homo sapiens
ggcccatcgccccggcccgttcaagcagcataataaagctcataaaggcggacggcatcggtgtcggggatctgcacagcgggacggcatgggccgtctggcactgaaaaccctaatcaagaaggtgtgaaaagaactcaccagattcgacctgaggcatcttgccagccagctccgaaagcagaagaaggaggcggttctggcagagaagagacagcttggtggcaaggatggccctcctcatcaggtactggtggtgcccctgcacagaagaatttccctgccagaggccatgcagctgcttcaagatagggacactggaacagtacacttgaatgaattgggaaacacccagaactttatgctg

SEQ ID NO: 14477 - DNA, 525 bp, Homo sapiens
gtccttttttacaagggtctattgtttcgattagtttccttgcaggaggtagaaggtttcctccatcccgagtaattcatagagtgtttggcttgtctaccttcctcctgactgaagtcacctgatactttttgttttttcaagaaggaagagagaaccctgttgcctcagttactagcaatgatacaattctcaaaatctggtctttttttgtttctttgaaatagtttctccatgttgtgtgacacagcagcccctgtcttatcatagttgtcttccctccaccacctgtaccagagatgttggatatgttggaggtgaaggtgtgcaaggtttttaactaactgttctaattaaaggattctgcaggaaagaacatgggtttacaaaagagaagcttttgtattattagtaattttttttctttgatgaatttatgtgcttagtttggagaatcgagagttggctgggaaaagatttctgaggagttaagggactttggtgctgtttgggaaaacatttgct

SEQ ID NO: 14478 - DNA, 436 bp, Homo sapiens
gtaagcgctgatgaggctgaagaaaaggaagacaaaactgagtacttggaggaacgaagagtaatgggatatccaataaactgagaatgtttcttcacaatctcctttattcttcgttcctccaagtactcagtttggtcttctttcaggtgtaggaacgtgataaagaagtaagcgatgatgaggctgaagaaaaggaagacaaagaagaagaaaaaaaaaaaaaaagggcggccgctagactagtctagagaaaaaacctcccacacctccccctgaacctgaaacataaaatgaatgcaattgttgttgttaacttgtttattgcagcttataatggttacaaataaagcaatagcatcacaaatttcacaaataaagcatttttttcactgcattctagttgtgggttgtccaaactcatcaatgtatctta

SEQ ID NO: 14479 - DNA, 516 bp, Homo sapiens
gttggacaaccacagctggggctaggaatggttcagaaggtttaaggccggaatgggtaatgaaggggcccggcgctaaccctgtagggacctgttttgcttctgtttaaaccaaatgggcaggctgtcattacacacaccctgtgtcttcatatgtggccgccagtataatggaatgtgcttacaagggccagcaggagtgcctggtcgagacgggagccctggggccaatggcattccgggtacacctgggatcccaggtcgggatggattcaaaggagaaaagggggaatgtctgagggaaagctttgaggagtcctggacacccaactacaagcagtgttcatggagttcattgaattatggcatagatcttgggaaaattgtggagtgtacatttacaaagatgcgttcaaatagtgctctaagagttttgttcagaggctcacttcggctaaaatgcaaaaatgcatgctgtccgcgttggtatttcacattcaatggagctgaatgttt

SEQ ID NO: 14480 - DNA, 538 bp, Homo sapiens
cgcggtcgcgtgggtggaaatgtaaacaagaatagactgttcattcctgatggcttttagtctatactaacatattgtttgtcatggcatccgagactgaaaagacccatgctttactgcagacttgtagcactgaatctcttatttccagccttggtctgggggcattttgcctcgtagctgacagacttcttcagttttccacaattcagcaaaatgactggcttcgtgctctctcagataatgcagtacattgtgtaattggcatgtggtcatgggcggtagtcactggaatcaagaagaagactgactttggagaaatcattttagctggatttttagcctctgttattgatgtagaccacttttttctagctggatccatgtctttaaaggctgctttgactctcccgcgaagacctttccttcactgttctactgtgatttccgttgtggttctgaccctgaaatttactatgcaccttttcaagctcaaagactcatggtgctttcttccctggatgttatttatatcctg

SEQ ID NO: 14481 - DNA, 525 bp, Homo sapiens
ttgactatggtaaacttattttattgaagttttcaaccggaaaatagtaagtggaatatgatacaactgttattttcagaacatatttctttagggctatttaaaataacctttttaaagggcaaaaactttcaatttgagagaacaaattcctctcctctgtgggaaatattggctgagattttgtatagaataagagacatgtatgtaacatatatttatattcagcataagtctactgcaatcatgtacacatcttagcaagacgagaggattttgtttagtctttgtttatgacttctacagtttcctgtatctagtgttaagttgtaaggaaaaactaaacatgcaatttaaaggtaaacttgataactatttatggaacataagcatacaccaatggttatttctcacagttttcatgcgcatttgtttattgtttacttggattaggctcattaaaaaccataatgctggtcacaattagaatgctaatatttggggaagctatgcagagaatatttt

SEQ ID NO: 14482 - DNA, 543 bp, Homo sapiens
cgcgtccgttcttgtgtgccaatgtatacctaacgggagtcccagaagacaggagagaaaaaaagaaagaaataaaaagaatatttgaatttaaaattgcttgaaaatgtctcaaatttgatgaaaaatattactctgcacattcaacccatgaactataagttgtataaaatcaaaaagtttcacaccaaggcgtgtcatagccaaactgtcaaaagccaaagacacagaatcttgaaagcagtgagagcaaagcagacaagggatccccaataggattaacagcagatttctcatcagaagccatgcaagccagaaggctatgggagacatactcaaaatgctgaaataaaagactgtcaacaaacatttccacatccagcaaaaatcaaaaacgaaggagaaatctgttgcatgtgagctgaatagaatttgtattctgctgttgttggatgaagtattctttaaatgtcaattagatcaatttgattgatgatgctcttcagttcaactatattccctatctgataattccagaatctc

SEQ ID NO: 14483 - DNA, 531 bp, Homo sapiens
gtcctatgtcaatacatgtactcagatagttacatccctatataaaaagtatgtttacatttaaaaaattagtagataacttcctttctttcaagtgcacaatttcattttgacttgagtcaacttttgttttggaacaaattaagtaagggagctgcccaatcctgtctgatatttcttgaggctgccctctatcattttatctttcccatgggcagagatgttgtaagtgggattcttaatatcaccattcttgggactggtatacataaggcagccgtgaaactggaaagtcattttgatgactgatgtgatacatccagaggtaaaatgcatttaaacatattaaagtatttgccaaagatacaattttcttgctgacataaaaatcacacaaacaagtcccccccaaaccacaactgtctctcaaatagcttaaaaaaattgaaaaacattttaggatttttcaagttttctagattttaaaagatgttcagctattagaggaatgttaaaaattttatattatct

SEQ ID NO: 14484 - DNA, 535 bp, Homo sapiens
cgcgtccgtggatggctgccccatcccgaccctccagctcatggtgtctggggcctgcggctagactcttggtacattctggaactctctcctttcctggctggggctctgaccacaaactcccctccaggctgcccctgggacatggtggtgatgtgggtgcaggagccagtgtctgttgtcgggactcgcaagtgccctcatcacagccacccccaccacgagtgtctccccagtgcagactcaagttatgcttgaaatgaaaaagtctatctggtagtgggtaaacgtagacctggcactgttccacgcgggcgccccaagcctgccactcctgtgtccctgcctccctgggctcccgagataggcaccactgtatcctccagctccttccttccttcccccaggaacacggaggccaccgagggggctgggcctatcaggaggacacaggctgcagcctggcacccacccctcccatcttcaccccacatggaagacttgtcttcaacttggccactgtctttgcagagct

SEQ ID NO: 14485 - DNA, 476 bp, Homo sapiens
  misc_feature 413, 449, 466: n = A,T,C or G
cgcgtccggattacaaaaaaaaaaaaaaaaaaaaaaaaaaattaatggggtgcctttttgttatagtttctattttctgttttgtaggacaagctgcattttctgtaaatataggtctggactaaaggatacataaagaatgcacaaaatgtcaacatcagcagagatgcccagatctatttatctctaagtatatttgaagtgattgctgtttatatgttgtcattttaaaattgtgtgtcagtaaagctacctgtaaaatttcagtccaaaaaaaataaagctctcagggagacatgaataaaatcaatgaacattagaaaataaaatatagatgcttaccattaacctaccaactcttaatatccttaaattatgtgatatataaagaggactgttacttttttactttntttttttttttttttggctttgctttatttatttgnagttgggggctaacggnatctcttttc

SEQ ID NO: 14486 - DNA, 536 bp, Homo sapiens
cgatcttctttgggctggttcagcagccgcccacccacctctgagtctgacctggaacctgccacagatgggccagcctccgagaccactaccctcagcccagaggccaccacctttaatgacaccagaatccctgatgcagctggtggcacggccggcgtgggtaccatgcttctgtcctttgggatcatcacggtgataggcctggctgtggccttggttttgtacatcaggaagaagaagaggctggagaagctacgccaccagctcatgcccatgtacaacttcgaccccacggaggaacaagatgagttggagcaggagctgctggagcatgggcgggacgccgcctctgtacaggctgctacttctgtgcaggccatgcagggcaagactactctgccctcccagggcccactccagagacccagccggctggtgtttaccgatgtggccaatgccatccatgtgtgagtggcctgggacaagcctggacttctgatagagacccatcacggtgcctacagagctcccca

SEQ ID NO: 14487 - DNA, 502 bp, Homo sapiens
cgacccacgcgtccggtgctctcatgtcatctcagagttccagcttatcagaggcatgtagcagggaggcttattccagccataactgggctctacctccagcctccagaagtaatccccaacctgcatatccttgggcaacccgaagaatgaaagaagaagctataaaaccccctttgaaagctttcatgaagcagaggaggatgggtctgaacgactttattcagaagattgccaataactcctatgcatgcaaacaccctgaagttcagtccatcttgaagatctcccaacctcaggagcctgagcttatgaatgccaacccttctcctccaccaagtccttctcagcaaatcaaccttggcccgtcgtccaatcctcatgctaaaccatctgactttcacttcttgaaagtgatcggaaagggcagttttggaaaggttcttctagcaagacacaaggcagaagaagtgttctatgcagtcaaagttttacagaagaa

SEQ ID NO: 14488 - DNA, 477 bp, Homo sapiens
cgacccacgcgtccggactgatcataaaccaatgctggtattgcaccttctggaactatgggcttgagaaaacccccaggatcacttctccttggcttccttattttcttgaggcaggtcgcacgttctacctgcccaagacgtgtgatatcagcttctcagatccagacgacctcctcaacttcaagctggtcatctgtcctgatgagggcttctacaagagtgggaagtttgtgttcagttttaaggtgggccagggttacccgcatgatccccccaaggtgaagtgtgagacaatggtctattcaccccaacattgacctcgagggcaacgtctgccttaacatcctcagagaggactggaagccagtccttacgataaactccataatttatgggctgcaggatctttttttggagcccaaccccgaggacccactgaacaaggaggccgcaaaggtcctgcagaacaaccgg

SEQ ID NO: 14489 - DNA, 441 bp, Homo sapiens
gtccggcccgtcccacccgccgccagctcaccatggatgatgatatcgccgcgctcgtcgtctacaacggctccggcatgtgcatggccggcttcgcgggcgaggatgcccctcggtctcgttttcccctccatcgtggggcgccccatgcaccagggcgtgatggtgggcatgggtcagaaggatttctatgtgggcgacgaggcccagagcaatgagaggcatgctcaccctgaagtacccccatcgagcacggcatctgcaccaactgggacgacatggagaaaatctggcaccacaccttctacaatgagctgcgtgtggctcccgaggagcaccccgtgctgctgaccgaggcccccctgaaccccaaggccaaccgggagaagatgacccagatcatgtttgagacctttaacaccccagccctgtacgttgcta

SEQ ID NO: 14490 - DNA, 507 bp, Homo sapiens
  misc_feature 16: n = A,T,C or G
cgtccgctgtggctgnggcggggccggggctggggtcggggccaggggtcggcggtggcggcggacgggcgtacggtgcctgggctctctccgctcgctgaggcgccgctggggagtcgaaccctgatgatgggacctgtgaattcagcggggtgccaagtcgttttctgtgtgggttgagagacaggctgtgcagcccactgttgcataggactaactactacaaatcatgctgagaccgagctatttttgctgcttagaggctttgcagccttgagaggaattttgttgtcagagaataaaaggaggttgtccataattgactttaagcagcaatcagtaaaacattgagctcttcagctccgcctttcttgctctgaaaattggaaaaccaagaaggttttgatgttttgtgtgacgccacctgaattagaaaccaagatgaacataaccaaaggtggtctggtgttgtttttcagcaaactcgaattcatcatgtatggagct

SEQ ID NO: 14491 - DNA, 483 bp, Homo sapiens
gcgtccgacgcgtcctcttcaagatgctctgcggcttttgggctgtgttgacatcaaggatctaccagtgtctgagcagcaggagagagccttcacgctggggctagcaggacttctcggcgagggagtttttaactttggagaacttctcatgcaccctgtgctggagttcctgaggaatactgaccggcagtggctgattgacaccctctatgccttcaacagtggcaacgtatagcggttccagactctgaagactgcctggggccagcagcctgatttagcagctaatgaagcccagcttctgaggaaaattcagttggttgtgcctcatgggagatgactttcacacgacctgccaatcacaagacatactcactttttgaagaaaattgcccaaagtggctaaaaatcacagtgaaatgagggtggaagcttctggtggatgaaggccctttcggtggggctggtgaaaggcagtat

SEQ ID NO: 14492 - DNA, 482 bp, Homo sapiens
cgtccgcagccggctggctcgagtggccttcgtcgtcccttggcgccctgggagagtcgctgacgggtggactgacggaccgcctgaggacggccgggcagggcggtgaaagcgccagccctatggcgcgggtcgcgtgaggcggaaggccgaggacggccggcggcggcgcccgccccggcgatgcgggccccgcccgtcgcctcaggtgccatttggattgtactttagtggcacgatgtactctgagtggaggtcactgcatttggtgattcagaatgatcaaggccataccagtgtgctgcacagctatccagagagcgttggacgagaggtggcaaatgctgtaatccgtcctcttgggcaggtgttaggtaccccttcagtggctggtagtgagaatttgttaaaaactgacaaagaagtaaaatggaccatggaagtaatttgctatggactgacccttccattggatggagaga

SEQ ID NO: 14493 - DNA, 505 bp, Homo sapiens
cgacccacgcgtccggtctcggcgcccgctgccctctcaccgccccacgcaggatcccggcctggtcaccgggcagtgtgatgcttcccgactgccgcggggacagcgaggcacacacagggcttgggccgcgccggaggccacacggcctggctgagttgctcctggtctcccgcctctcccaggcgacccggaggtagcatttcccaggaggcacgggcccccccagggggatgggcacagccacgccagatggacgagaagaccaagaaagcagaggaaatggccctgagcctcacccgagcagtggcgggcggggatgaacaggtggcaatgaagtgtgccatctggctggcagagcaacgggtgcccctgagtgtgcaactgaagcctgaggtctccccaacgcaggacatcagattcctcatggtgcaaaatggccattccagctccatccagccatcacatcacaggaggaagggaagaaagacacccctccacactc

SEQ ID NO: 14494 - DNA, 464 bp, Homo sapiens
tgtcacaagctcgtaaagactagggtgccctctgcgcctccttaaggatgcagggtgagcatctcctctccacacctgcctggcacccctgggggggtccaggattgaggattcatctacctgccaggcctcaggcccaggacccaggaggcctccccacctaccccagcacacacactccctgccactgttctgcgctttaattgtgggagaagagaggagaggagggctcagcggtggggcagcctgtccggggcgctgacccaccatcaccctgctctgcccagcctcgcgtgacctcagagaggtggggataggggacaccttcagcctccagcatgtgtggccactgtacccccacccacccttgggggagcatgatgggcaggtgagggcaggatggagaccaagggagtcagtgagcagaagccctgggagtgtccggtcggggttggactgaggac

SEQ ID NO: 14495 - DNA, 469 bp, Homo sapiens
gtccgccaggcccaccatcaccaccgcctctggccgacacccccatcttgcacctgtgccctcaccaccaacactacacagcacaccagccgctgcagggctcccatgggctgagtggggagcagttttcccctggcctcagttcccagctacccccgcccacccacgcatacacacatgccctcctggacaaggctaacatcccacttagccgcaccctgcacctgctgcgtccccactcccttggtggtggggacattgctctctgggcttttggtttgggggcgccctctctgctcctttactgttccctctggcttcccatagaggggcctgggagggttcccctggccttaaaaggggcccaagccccatctaatcctggcacgccctacttcactgccctggcagcagcaggggtggccaaatggaggggggtgctggcccccaagaatcccccagccaaact

SEQ ID NO: 14496 - DNA, 479 bp, Homo sapiens
tcgacccacgcgtccggcaagcgggaccggtaggggccggagcagcggcggcggcgctcggactgtcccatccgccccgtattgaggcgctgggagcggcggggcgacaggaaagcgatggtgaaagcggggccgtgaggggggcggagccgggagccggacccgcagtagcggcagcagcggcgccgcctcccagagttcagacccaggaagcggccgggagggcaggagcgaatcgggccgccgccgccatggagctgagagtcgggaacaggtaccggctgggccggaagatcggcagcggctccttcggagacatctatctcggtacggacattgctgcaggagaagaggttgccatcaagcttgaatgtgtcaaaaccaaacaccctcagctccacattgagagcaaaatctacaagatgatgcatggaggagtgggcattcccaccatcagatggtgcggggcaaaaggggac

SEQ ID NO: 14497 - DNA, 448 bp, Homo sapiens
cgcgtccggggtgatttgagctacatcttgttgagcaaggggagtgaaaccacagaaactgttaaattgaacgtaaataactttggaaaacagttttgacactagaacaaggtcgcttctcttttcctcttctctcccaacctgttaacctagtgctagatagtcagctgctgttgcaggtagaaaagctcaccaatgccacatttgttcattctgttcaacctgttttgacctcccaggcatctgaacaggatgacatcatcttattatatcttactttacacatacgtgtatgtacacacacacacacaatacaagacatttttcctgttttagaaaatatagcccttgtttggattactgctgtctgagcactagaaatttctaatggaaagaggcctctgaatggctaagggaacatctggaaaggaaggaaaatgagcctaaa

SEQ ID NO: 14498 - DNA, 508 bp, Homo sapiens
tcgaccacgcgtccgcggacgcgtgggcggacgcgtgggggccctccgggaagatggcggccgtgcaggcggccgaggtgaaagtggatggcagcgagccgaaactgagcaagaagtggtggtaatcattagttccagggtgctctgccatgttgacgcaagctgctgtaaggcttgttagggggtccctgcgcaaaacctcctgggcagagtggggtcacagggaactgcgactgggtcaacttgctcctttcacagcgcctcacaaggacaagtcattttctgatcaaagaagtgagctgaagagacgcctgaaagctgagaagaaagtagcagagaaggaggccaaacagaaagagctcagtgagaaacagctaagccaagccactgctgctgccaccaaccacaccactgataatggtgtgggtcctgaggaagagagcgtggacccaaatcaatactacaaaatccgcagtcaagcaattcatcagctgaaggtcaatgggga

SEQ ID NO: 14499 - DNA, 509 bp, Homo sapiens
tcgacccacgcgtccggctccacgagcctggagagctcggactgcgagtccctggacagcagcaacagtggcttcgggccggaggaagacacggcttacctggatggggtgtcgttgcccgacttcgagctgctcagtgaccctgaggatgaacacttgtgtgccaacctgatgcagctgctgcaggagagcctggcccaggcgcggctgggctctcgacgccctgcgcgcctgctgatgcctagccagttggtaagccaggtgggcaaagaactactgcgcctggcctacagcgagccgtgcggcctgcggggggcgctgctggacgtctgcgtggagcagggcaagagctgccacagcgtgggccagctggcactcgaccccagcctggtgcccaccttccagctgaccctcgtgctgcgcctggactcacgactctggcccaagatccaggggctgtttagctccgccaactttccctttctccctggcttcagccagtccctgac

SEQ ID NO: 14500 - DNA, 487 bp, Homo sapiens
acgcgtacggtgggatagtaaaagagaagacgcggagaagaggagaggacctacaagaacggaggacaggggcgcacgatggtcccggggggagcggaaacaaaggcacgcaaaacggaaaagcgtgtgtaggggagcggaaaaggaagtcaccaccgtggcctgcgacgaaatggcgaaaagtcttttgaagacagcctctctgtctggaaggacaaaattgctacatcaaacaggattgtcactttatagtacatcccatggattttatgaggaagaagtgaaaaaaacactttagcagttttcctggtggatccattgaccttcagaaggaagacaatggcattggcattcttactctgaacaatccaagtagaatgaatgcctttttcaggtgttatgatgctacaacttctggaaaaagtaattgaattggaaaattggacagaggggaaaggcctcattggccggggggcaaaaaatactt

SEQ ID NO: 14501 - DNA, 507 bp, Homo sapiens
cgtgtcgacccacgcgtccgcggacgcgtgggcggacgcgtgggcggacgcgtgggcggacgcgtgggatttgtgtacaaattgaaatgtctgtactgatcctcaaccaataaaatctcagttatgaaaaaaaaaaaaaaagggcggccgctagactagcctagagaaaaaacctgccacacctccccctgaacctgaaacataaaatgaatgcaattgttgttgttaacttgtttattgcagcttataatggttacaaataaagcaatagcatcacaaatttcacaaataaagcatttttttcactgcattctagttgtggtttgtccaaactcatcaatgtatcttatcatgtctggatccccgggtaccgagctcgaattaattcctcttccgcttcctcgctcactgactcgctgcgctcggtcgttcggctgcggcgagcggtatcagctcactcaaaggcggtaatacggttatccacagaatcaggggataacgcaggaa

SEQ ID NO: 14502 - DNA, 508 bp, Homo sapiens
gtgtcgacccacgcgtccggtcgcccgcccagtcgcccctcagccgcttcccctcgccatggaggcgaggccgccgccgccgccgcggggctcggagccgcgggccgggcggcggccctgagggctagtggcggcccgaaacgccgccgcggagccgaggcggagccgctgtcctcgtccccagcggtcccgcccaacgcccgactctgtgacacaactaaaaaaaaacaaaggtatttatggaattccactgagtggtaatggatgatgcagttcaaataactaagataagcatggattcctggttcattcttgttctgctcggcagtggtctgatatgtgtcagtgccaacaatgctaccacagttgcaccttctgtaggaattacaagattaattaactcatcaacggcagaaccagttaaagaagaggccaaaacttcaaatccaacttcttcactaacttctctttctgtggcaccaacattcagcccaaatataactctggg

SEQ ID NO: 14503 - DNA, 503 bp, Homo sapiens
cgtgtcgacccacgcgtccgggccacatggccgacgtcgccgcttggagctgaagtgccgccgccgccgggcagccacggggaatccgcccgcatcgccgccctcgccggccgggcggccgtggggcccagagcgccggaggccagggctggggcggcaccgcgcagcggccacggggtcccgttagagcagcgcccggcggctatgccgagagcccggagcggccggaggagcagaggggccggcgggagggaggaaacctttctgcgagtacgagccaaccggcagacccgactgaatgctcggattgggaaaatgaaacggaggaagcaagatgaagggcagagggaaggctcctgcatggctgaggatgatgctgtggacatcgagcatgagaacaacaaccgctttgaggagtatgagtggtgtggacagaagcggatacgggccaccactctcctggaaggtggcttccgaggctctggcttattcatgtgcagcgg

SEQ ID NO: 14504 - DNA, 351 bp, Homo sapiens
ggtagttttgaaatagatgtgtatatggactgttatgaagggtttttttctttatagcccaattaagttatgtttggctcggtgcatttttgatttatttaattagtaatttaagtaaagtgtttggtaaatcattgtgaagtttcatattcattatgggagagttgatgtgcagtaatgcatgatgtttaacaattttaacaccaaaaatgttaattcctgcatataatcaactgtaaataataaattaggtgtttttctgtatatgattagaatgcaataagatgtacccttagttaaaatcttttgaaatcacaaatcttattgggcttgaaaaatggaaagatttct

SEQ ID NO: 14505 - DNA, 488 bp, Homo sapiens
ttaaaggctctgactcttgatcttgaagccggacgcggcactggcactcggcttcagtttccactgtgacagatggaggtctcctttcgccccagcccaggtggccaagcccatcctggcctcagaacatgctgagcacattttgtagggtggcacctttttatccaagttactagctacacatcagtgtttaaagagaaaaaagtgacctttcatttttttttttcttgaaacttgaggaaacaagatacatactactgattttttttttttcttaaaactaaatgcatgactgcagagcggtagaggtgtatatttttcatactgtggggcaaagtatttgtgctgctttttggagatggactggaacgtctggtttctgtccccgggcccggcagctacgtctattttctgtagaaggtgccacagtgagacctggagccaccccttcctgccctggcgccgtttagagctgggagcccgtggac

SEQ ID NO: 14506 - DNA, 430 bp, Homo sapiens
  misc_feature 307: n = A,T,C or G
gcgtccgttccggtgctacggttccaaacagcccccgaaaacgctacgtgagctgggccctgggccagaggcagaaaacggacggaagaaaaggtctggccggagatgggtctcactctgtcacccagactggagtgcagtgagtggtgcgatcatagcttactgcagcctgaaactcctgggctcaagtgatcttctcgcctcagcctcctgagtagctggagctacaggtgtgagctacccagcatggctcatttgagatttctgagtagagaagtaacatgattaaacttgggtattgagattnaaaaataaaaagaacaacaaaaaagatgatactactacaactgacaaaaaggggcggccgctagactagtctagagaaaaaacctcccacacctccccctgaacctgaaacataaaatgaatg

SEQ ID NO: 14507 - DNA, 643 bp, Homo sapiens
  misc_feature 613: n = A,T,C or G
ggaacctccacctagatttcagaagatgtatggaaacgcctagatgccctggcagaagtttgctgcaggggcggggctctcatgaagaacctctgctaaggcagtgtggaagggaaatgtggggttggagcccccaaacagagtccttagtggggtgctgcctagtggagctgtgagaagagggccatcatcctccagaccccagaatggtagatccactgacagcttgaactgtgcacctggaagagccgcagacactcaatgccagcccgtgaaagcagccagaagggaggctgtaccctgcaaaaccacaggggcagagctgcccaagactgtgggaacccacctcatgcttcagtgtaacctggatgtgagacctggagtcaaaggagatcattctggagctttaaagtttgactgccatgcaggatttcggacttgcatgggccctgtaacccctttgttttggccaatttctcccgtttggaacggctgtaattacccaatacgtgtatccccatcgtatctaggaagtaactagcttgcttttgtttttacagactcataagtggaagggacttgccttgtctcagatgagactttggactgtggnactttgggttagtgctgaaatgagttaaga

SEQ ID NO: 14508 - DNA, 502 bp, Homo sapiens
cggaactttatagaatttatgcagttctacagaacgttaagttttgtacttgacgtttctgtttattagctaaattgttcctcaggtgtgtgtatatatatatacatatatatatatatatatatatgtatatatatacacatatatacgtatatatacatatatatgtatatggagtctcgctctgttgcccaggctggagtgcagtggcacgatcccagctcactgcaacctccgcctcccgggttcgggcgattcttctgcctcagcctccctggtagctggggctgcagccatgtgccaccaagcccagctaatttgtatttttggtggagacagggtttcaccatgttggtgaggctggtctggaactgacctcaagtgatctgcccacctcggcctcccaaggtgttgggattaacaggtgtgagccaccacgcctgtcccagtatattgtttaacaagtttattttgggtgaaaaattctctttaatgggaagaa

SEQ ID NO: 14509 - DNA, 523 bp, Homo sapiens
cgacccacgcgtccggcgccccctcccggccgccatgttggctggtgtgtgggtgtcaaactgagccagacgcggcggtggcggcggctccgcgggctacggtcgctcccgcctctcgagcgctgccggtggccgcagcggcgcacccacgccggcccggaggagcagagtgctaagtgctgggtgctcactggtgatgaggcagatgaaggttaccaaacttgtggacaggagcctcatatcagagacgtggacctcactgtagcctggtcatggcttccagcttttcgaatctgaggctccaaaggaggaaatgaccattcagggatcttactccagcttgattacggagactgaaccttcatagggtgcgcacttaccaaggacaggaaggtttctctgtttgaagggctttaaacttataacaaagaaaataaaaatgacgacttcgtctatcagacggcagatgaaaaacatcgtgaacaattactcagaggcagaaatcaaagtccgggaagccacc

SEQ ID NO: 14510 - DNA, 477 bp, Homo sapiens
gcgttcgagacagttcatactggagacaaaccctacaaatgtaatgaatgtggcaaaacctttaaacggaactcaagcctcactgcacatcatataatccatgcaggaaagaaaccatatacatgtgatgtatgtggcaaggtcttttatcagaattcacaacttgtaaggcaccagataattcatactggagagacaccttacaaatgtaatgaatgtggcaaggtcttctttcaacgttcacgtcttgcagggcaccggagaattcatactggagagaaaccctacaaatgtaatgaatgtggcaaggtcttcagtcaacattcacatcttgcagtgcatcagagagttcatactggagagaaaccttacaaatgtaatgaatgtggcaaagcctttaattggggctcattactaactgtacatcagagaattcataccggagagaaaccttacaaatgtaatgtgtgtggcaag

SEQ ID NO: 14511 - DNA, 503 bp, Homo sapiens
ccacgcgtccgctgttggagcagtagacttctcacatctttttgtcacttcatcgtttgactggacagtaaagctttggacaactaagaataacaagcctttgtattcatttgaagataatgcagactatgtttatgatgttatgtggtcacctacccacccagccctgtttgcctgtgtggatggcatggggagattggatttgtggaatctcaataatgacacagaggtaccaactgccagcatttctgtggagggtaatcctgctcttaatcgtgtgagatggacccattctggcagagagattgctgtgggtgattctgaaggacagattgttatatacgatgtgggagagattgctgttccccgcaatgatgaatgggcacggtttggccgaacacttgcagaaattaatgcaaaccgagctgatgcagaggaggaagcagctacccgaatacctgcttagttcctgaaaaggggagtgtaactagtggatttgggaa

SEQ ID NO: 14512 - DNA, 404 bp, Homo sapiens
cctccacaggtgggccgagtaggaaccaagaaaacttcttttgtcaactttacagatatctgtaaactattacatcgtcaggccaaacatctccttgcatttttgttggctgaattgggtacaagtggttctatagatggtaataaccaacttgaaatcaaaggaagattccaacagaaacagatagaaaatgtcttgagaagatatatcaaggaatttgtcacttgtcacacatgccgatcaccggacacaatcctgcagaaggacacacgactctatttcctacagggccgaaacttgtcattctagatgttctggtgccagtatcaaaaccggctttcaggctgtcacggtcaagcgagcacagctccgtgccaaagctaactaatttgctaatcactgat

SEQ ID NO: 14513 - DNA, 144 bp, Homo sapiens
gacccacgcgtccggctgcgttgggcttgcgtgcggctcgctaagactatggcgtccgggcctcattcgacagctactgctgccgcagccgcctcatcggccgccgcaagcgcggatcggctccagctccgggatcgacgacca

SEQ ID NO: 14514 - DNA, 315 bp, Homo sapiens
acccacgcgtacgtttgtgttgtaatggtttgtatacttctttacacaacctatccattacttaaggaatctgctcttattcttctacaaactgttcgggaacaaattgatatcagaaatttgataaaagaacttcgaaatgtttgaaggagtcgaggaagttcatgaattacatgtttggcaactcgctggaagcagaatcattgccactgctcacataaaatgtgaagatccaacattatacatgggggtggctaaaaccattaaagacgttttttatattcacggaatttacgcttctaccattcaggctga

SEQ ID NO: 14515 - DNA, 463 bp, Homo sapiens
cgacccacgcgtccgggccagtctacaaggtttgtagataaaatagaaacataccttccttgaaaagcagaataaattttttaaaggcaggaaggaagtgtttgaaccatgtgtcaacaagctttactgtcaaagcaggcttttggtatgggaagaaaaatacttataaatacttgttttaatatttgctttattaaaatacatttaaaatacagcatttttaaatctctaagctcaacttgaagatataagaacagtaaatttgataaaaatgagaaattacattcccatttctttaacaatttgtaaattccaattatcctgaacatttaacaccatttacatattttattaatcacattttcttaaacatttgataagagatttaatattttgatccaactaccaaaaaagcagacttgtgtacttgacagatttttctaaacactttacaacttacgat

SEQ ID NO: 14516 - DNA, 459 bp, Homo sapiens
gacccacgcgtccgcggacgcgtgggtgtggagcctgttacctccgcatttgacacgagtctgctgtgaaccccgcaacctcctccccacctcccatctctccttccaggcccatccctggcccagagcaggagggagggagggacgatggcggtgggtttttgtatctgaatttgctgtcttgaacataaagaatctatctgctgttgaaaaaaaaaaaaaaaaaaagggcggccgctagactagtctagagaaaaaacctcccacacctccccctgaacctgaaacataaaatgaatgcaattgttgttgttaacttgtttattgcagcttataatggttacaaataaagcaatagcatcacaaattttacaaataaagcatttttttcactgcattctagttgggggttgtccaaactcatcaatggatcttatcatgtctggatccccgggtacc

SEQ ID NO: 14517 - DNA, 545 bp, Homo sapiens
gcgtccggcttcgttctcccgtccctccccgcgccttggcgcggggggtcgactagccaagtgaggcgggaggcgactcggacctttccctgcatttcgtttcggccagtgccgggggctacccgccctggggcctgggatccttggggcccgtgaggcccactcttagcggccggggcctaccgcggcccgccgctggccctcatgaggcatagcctgaccaagctgctggcagcctcgggcagcaactccccaacccgcagtgagagcccggagccggctgcaacttgttcgctgccctctgacctgacccgggctgcagcgggggaggaggagacggcggcggccggatctcccggccgcaagcagcagtttggcgacgaaggagagttggaagccgggagggggagccgcggcggcgtggccgtgcgcgcgccctcccccgaggagatggaggaggaggcgatcgccagcctcccgggggaagagacggaggatatggactttctgtctgggctggaactggcggatctcctggaccccag

SEQ ID NO: 14518 - DNA, 569 bp, Homo sapiens
gcgtccggccaggcagtgatggaatcccggggtcagcaggagagaagggtgaaccaggtctaccaggaagaggattcccagggtttccaggggccaaaggagacaaaggttcaaagggtgaggtgggtttcccaggattagccgggagcccaggaattcctggatccaaaggagagcaaggattcatgggtcctccggggccccagggacagccggggttaccgggatccccaggccatgccacggaggggcccaaaggagaccgcggacctcagggccagcctggcctgccaggacttccgggacccatggggcctccagggcttcctgggattgatggagttaaaggtgacaaaggaaatccaggctggccaggagcacccggtgtcccagggcccaagggagaccctggattccagggcatgcctggtattggtggctctccaggaatcacaggctctaagggtgatatggggcctccaggagttccaggatttcaaggtccaaaaggtcttcctggcctccagggaattaaaggtgatcaaggcgatcaaggcgtcccgggagct

SEQ ID NO: 14519 - DNA, 503 bp, Homo sapiens
gctattgtcacacctttgaaaccagttgacaacacttactacaaagaggcagaaaaagaaaatcttgttgaacagtccataccgtcaaatgctggttcttccctggaagttgaggcagccatatcaagaaaaactccagcccagccttagagaagatctcttaagctttctgctcataaggatttggaacagaaagaaaagcatcatgtaaaaatgaaagccaagagatgtgccactcctgtaatcatcgatgaaattctaccctctaagaaaatgaaagtttttaacaacaaaaagaagccagaggaagaaggcagtgctcatcaagatactgctgaaaagaatgcatcttccccagagaaagcccagggtagacatactgtgccttgtatgccacctgcaaagcataagtttctaaaaagtactgaggagcaagagctggagaagagtatgaaaatgcagcaagaagtggtggagatgcggaaaagaatgaagaattcaag

SEQ ID NO: 14520 - DNA, 548 bp, Homo sapiens
cgacccacgcgtccgagcaaacataagaaaccatgagtcattttgtcatttagagtattctgataaaatctcttgaaaatactgaaatcaaaaggttaatgattttttgttcattctgatttgtcattttattatctgtctagcagaaaaatcaaatgggtaaattagcactttagacagccaacatagtgaaaccctcatctctactaaaagttggcaattaaatctgaatttacagatacagataacagtttatcagaaatcatatttttcctgaagaaaatttaaaattaggagttgtgggcctggtgcggtggcttacgcctgtaatcccagcactttgggaggctgaggtgagcagatcacttgaggtcaggagttcgagaccagcatagccaacatagtgaaaccctcatctctactaaaagtacaaaaattagccaggtgtggtggcgtgtgcctgtagtcccagctactcgggaggctgaggcgggagaatcgtttgaacccgggaggcggaggctgcagtgagccgagattgcgccact

SEQ ID NO: 14521 - DNA, 565 bp, Homo sapiens
cgacccacgcgtccggtcggcgtctgggcctcgtccccttctctctgtctcccttgcctcccccatcacgtcccctgacaccgacaccccattgctcccacagtctccccaggctccactttggtccccagcgctgtctgcccgaggatttgcctgaaggctgcccccaactctgcacccgccccccgagggccaccgaggaccatgactaagacagatcctgccccgatggccccgccaccccgaggagaggaggaagaagaggaggaggaggatgaacccgtccccgaggcccccagccccacccaggagcgccggcagaagcctgttgtgcacccctcggcacctgcccccctccctaaggactacgctttcaccttcttcgatcccaatgacccggcgtgccaggagatcctgtttgaccctcagaccaccatccccgagctgtttgccattgtgcgccagtgggtgccccaagtccagcacaagatagacgtcatcggcaatgagattctgcgccgaggctgccatgtgaacgatcgtgacgggctgaccgacatgacac

SEQ ID NO: 14522 - DNA, 423 bp, Homo sapiens
ccacgcgtccggggtcttcttgctgtgaggtcgcgttccccagtgttacggagggtccttgaggcaggagtgaaaattgggtctgggggttagtcctggggtggaggtctgggcacgccgggtcggaccccctccatcttcggttttgcacaccccgctttccagcgcggagtcgcggcgggtagggcggcgtcacgtgcgtgacgtcatccagcggcgcctcgcgaggctccagtggccttgacctcccgcggcgtgggaggctgcgcggcgatgctgcagttcgtccgggccggggcgcgggcctggctttggcctaccggcagccagggcctgagttccctggcggaagaagcagcgcgtgcgaccgagaacccggagcaagtggcgagcgaggggctcccggagcccgtgctgcgcaaa

SEQ ID NO: 14523 - DNA, 393 bp, Homo sapiens
gcgtcgaatagggtatgagaagaagctctgagcagagcaccgaaagtggccactaccagcatgaagagcccaacaattcaaactggtgaagtgagaaaaacagaatgcagctttcaaggttcgtttcaagcagtaggcttgtgggactctgagagatgctgctgcccatgacatgcggaaattatcatgatcaactacccagcttggatttcacccagtggccaacagctttgtgtgggagacggcaagggttggatttttcaaaagagtaaaccagacccgtgaccaaggtgttgactaagaagtggagtcatgcttcacacggccatatcatgctggcagccattcctgggtctggctgtggtgttaatcttcatgggatccaccattggc

SEQ ID NO: 14524 - DNA, 240 bp, Homo sapiens
  misc_feature 17: n = A,T,C or G
tgctggtttgtcttgcngctgctgctgctaggggtggtgggagcagccgtgggacgcgtggccgggagcgggggtgacagcctgggagggcgggggcttatcttccttgtcctcctcctgtcctgtctattaccagcgtgggcgtggctgacactaaagactgtgtagccatcaacccgagtgcagtttcgatggaaaatgaaggttgcacgttttcaaaaaatacctaatggcgaaaat

SEQ ID NO: 14525 - DNA, 461 bp, Homo sapiens
ccacgcgtccgattttacaacctagtaataatgtggataaatgtatctacatgacacatgtcaagaccaaaataactgtgaatgacacaccttgctgtaaatgaactgtgctaaccctgactgtgggcttgagaacaaagatgaactctagaactctagcagcctaactgctgcttctcaaataactgtgtgaacagtgagatattactgtttgtttctaaaaatcctactgtgcccagtttccttcactacatgccctgcattttttatttaaatatttagctgtagcgccatcagatatggatgccttctaacaattgctgtttgtaaaataaatcaggatggtagaaagtgattatatggaaaattggaacctggatgagaccttttcgttgaattctgaagagtaatgatgtgaaaattgatacagggcaagagatgattcttttggttttcttcta

SEQ ID NO: 14526 - DNA, 453 bp, Homo sapiens
ttgcctgacaaatactacactttacaaacaatgttaacactgtgattccttcattgttttaagaagttaacctagggccgggcatggtggctcatacctgtaatcctagcactctgggaggccgaggcaggaggatccctttagcccaggagttaaagaccagcctgggcaacatagggagaccctgtcttttttttgggcagcgtggtgggggataaataaataaaaggaaaaaaaacttagcctagaattagaattaatttaattgaattcatctaaagatgtctctggtgatttttatatgttccgctatataattgatgctttatagttttatcataatccaacaacttcagttatatttaattattgttaaggagtttaagactagaaagactagagtgctttctagtccaatagagggtcagtgaaacagcttttgacatcagattt

SEQ ID NO: 14527 - DNA, 477 bp, Homo sapiens
cgcgtccgggaaaacagaacttgcccaggtcctcttctccaccaatagatgcagcatccgcagagccctatggcttccgtgcctcagtgttattcgatacaatgcaacaccatctagccttgaatagagatttgtccacacctggcctggagaaggacagtggagggaagacacctggtgactttagctatgcctatcaaaagcctgaggaaacaaccaggtccccagatgaagaagattatgacttgagttatgagaagaccacccggacctcagatgtgggtggctattactatagaaaatagagagaaccacaaaatctccaagtgacagtggctactcctatgagaccattgggaaaactaccaagacccctgaagatggtgactattcctatgaaattattgagaagaccacacggacccctgagaggggtgggtactcatatgacataagtggaaagaccaccagcccccc

SEQ ID NO: 14528 - DNA, 450 bp, Homo sapiens
gcgtccggcttaggcggggggaacagccgcctgcgctctcttgggaccctagatttgggggaggaggtaacgagaggcggagagggtggctcctcaggtatacacccctcctgtcctccgccaccccacctttgatttctcttccctcaacccagcactccagccccaccccagggtcaatttttgcccccttccatctgagcagtgttaccaggccccagggggaccggaggatcgggggccgggtggggggtcccatggagtactccagcacacgcaggggctccctgcagcggggggggccttcgccctggaagcctggacgccgagatagacttgctgagcagcacgctggccgagctgaatgggggtcggggtcatgcgtcacggcgaccagaccgacaggcatatgagcccccgccaccttctgcctaccgcacgggctccctg

SEQ ID NO: 14529 - DNA, 483 bp, Homo sapiens
gcccaagggttgcagtctgtagacccctgatctagacccttaagtagccttgtttgtgcctgaagtttacagatgatccccaacttatttttattttatttttttgagatggagtctctctctggagcccaggttggagtacagtggcaagatcttggctcactgcaacctccacattccgggttcaagtaattctcccgcctcagcttcctgagtagctgggattacaggcgtgtgccaccatgccagcttttttgtattttgtatgttagccatgttggcaaggctggcctcaacccctgacctcaagtgatctgcccacctcagcctcccaaagtgctgggattacaggagtgagccaccatgcccgaaccccaacttatgtttgacttacaatgtttggactttatgatggtgcaaatgttatatgccttcagtagaaactgtacttcaaaatttgatttttgatcttttatttttatt

SEQ ID NO: 14530 - DNA, 473 bp, Homo sapiens
tccgctgccgaagtcagttccttgtggagccggagctgggcgcggattcgccgaggcaccgaggcactcagaggaggtgagagagcggcggcagacggcaggggaccccgggccggcggcccagagccgagccaagcgtgcccgcgtgtgtccctgcgtgtccgcgaggatgcgtgttcgcgggtgtgtgctgcgttcacaggtgtttctgcggcaggcgccatgtcagaaccggctggggatgtccgtcagaacccatgcggcagcaaggcctgccgccgcctcttcggcccagtggacagcgagcagctgagccgcgactgtgatgcgctaatggcgggctgcatccaggaggcccgtgagcgatggaacttcgactttgtcaccgagacaccactggagggtgactttccctgggagcgtgtgcggggccttggcctgcccaagctctaccttttcacggggccccggcg

SEQ ID NO: 14531 - DNA, 356 bp, Homo sapiens
gtccggcgtaagctcgtcttcctccgcgccaagttccggcgccgctcttgcgggagcgtgccgcatcaccccgggggcccctacgcgaggatctccggggccgttggcagcgcctggcacttctgagctcggcggacgagagcctgcaggtttcctccagtcagggacggcgaagggcggaaagcgcaggaggaggcagtgttaggccttaggccgggtgggccgggtcaggagagacgcgcccattttttgccatccggggtgcgcgaggtcctttcgggacccggccggcgacccgtagcttgggcacgcgcctgtcgcatcccgcatgaaggaagggtccggcctgaggcccg

SEQ ID NO: 14532 - DNA, 427 bp, Homo sapiens
gtgtccacccacgcgtccgggcgggcgtggggcggtgggaggtagtgaagaagggtcggcggcctggggtcggcgccggcgccggcggccgaggaggcggtaggaaccgcagggcgctcggggaagcaaacggagtgtggaaatacgacctgacccctgcaatccagaccacaagcaccctttatgagcggggctttgagaatattatgaaacggtataataaggagcaggtcccaccccctgctgtggaacctaagaaaccagggaacaagaagcagtcaaagaaggtggcatctcctcccaaccaaaaccagaagcagggccgtttccgcaacctggaggaagcactgaaagctctggatgtggtagacctgcagaaggaactggccaagatccagagtgtgttttttggaaacccatccatatg

SEQ ID NO: 14533 - DNA, 402 bp, Homo sapiens
tcgacccacgcgtccgggagcagagtcgactgggagcgaccgagcgggccgccgccgccgccatgaaccccgaatatgactacctgtttaagctgcttttgattggcgactcaggcgtgggcaagtcatgcctgctcctgcggtttgctgatgacacgtacacagagagctacatcagcaccatcggggtggacttcaagatccgaaccatcgagctggatggcaaaactatcaaacttcagatctgggacacagcgggccaggaacggttccggaccatcacttccagctactaccggggggctcatggcatcatcgtggtgtatgacgtcactgaccaggaatcctacgccaacgtgaagcagtggctgcaggagattgaccgctatgccagcgagaacg

SEQ ID NO: 14534 - DNA, 511 bp, Homo sapiens
cacccacgcgtccgcggacgcgtgggcggagctgctgtgcagtggaacgcgctgggccgcgggcagcgtcgcctcacgcggagcagagctgagctgaagcgggacccggagcccgagcagccgccgccatggcaatcaaatttctggaagtcatcaagcccttctgtgtcatcctgccggaaattcagaagccagagaggaagattcagtttaaggagaaagtgctgtggaccgctatcaccctctttatcttcttagtgtgctgccagattcccctgtttgggatcatgtcttcagattcagctgaccctttctattggatgagagtgattctagcctctaacagaggcacattgatggagctagggatctctcctattgtcacgtctggccttataatgcaactcttggctggcgccaagataattgaagttggtgacaccccaaaagaccgagctctcttcaacggagcccaaaagttatttggcatgatcattactatcggccagtc

SEQ ID NO: 14535 - DNA, 499 bp, Homo sapiens
ccacgcgtccgcgcttctgttacggccagtgcaactctttctacatccccaggcacatccggaaggaggaaggttcctttcagtcctgctccttctgcaagcccaagaaattcactaccatgatggtcacactcaactgccctgaactacagccacctaccaagaagaagagagtcacacgtgtgaagcagtgtcgttgcatatccatcgatttggattaagccaaatccaggtgcacccagcatgtcctaggaatgcagccccaggaagtcccagacctaaaacaaccagattcttacttggcttaaacctagaggccagaagaacccccagctgcctcctggcaggagcctggcttgtgcgtagttcgtgtgcatgagtgtggatgggtgcctgtgggtgtttttagacaccagagaaaacacagtctctgctagagagcactccctattttgtaaacatatctgctttaagggggatgtaccagaaacccacctca

SEQ ID NO: 14536 - DNA, 443 bp, Homo sapiens
gcgtccgataagattaaattaatgcaaagttgcaagaatgtagtaactctgatcagctacaaggaaaggaggaaagagtaaatgaagaaagtcatctaactgaaaaggaatatatagaacattgtaacacccctacaactgattctgattcatctatagcagttaaagcactacaaatagatagctttggtttagttacatgctttcaacaagagtctcttgatgtttctcaaatgatacttggaaaatctcagcaacctgagtcaaaaatgcaatctgaatttataaaagaaaaaagtgctacttgttcaaatgaggaaaaaggtaacttaaacgagtcagtaataactgaagagaaagaaacagatgggagatcacctatcttcattactgaacaaaactacggttcacaatatacctggattcgacagcataaaagaaac

SEQ ID NO: 14537 - DNA, 480 bp, Homo sapiens
cgcgtccggctgctgaaaggggatttaggcccggaagatccgagtccatccgcggcggggagagggcaagcgggaccggtaggggccggagcagcggcggcggcgctcggactgtcccatccgccccgtattgaggcgctgggagcggcggggcgacaggaaagcgatggtgaaagcggggccgtgaggggggcggagccgggagccggacccgcagtagcggcagcagcggcgccgcctcccagagttcagacccaggaagcggccgggagggcaggagcgaatcgggccgccgccgccatggagctgagagtcgggaacaggtaccggctgggccggaagatcggcagcggctccttcggagacatctatcttggtacggacattgctgcaagagaagaggttgccatcaagcttgaattgtgtcaaaaccaaacaccctcagctccacattgagagcaaaatctacaagatgatgca

SEQ ID NO: 14538 - DNA, 499 bp, Homo sapiens
tcgaccacgcgtccgacagttgattctgaatttttaaggctttcctaataggctgatcacagagaataatccattttgaaggtataaaactgcactgtatgtctgtcacttgtagctgaactgattcacattttgacaaaagagagaaaatacaaaaatgagttttgcaaatgtaataactttttctgcatatagaactaaataattgaaaaatatgggctatagttctcaaaggtagatagtaaaatcactggctttttccagctgtatgtttttccactgtgcgtgtacacacacactggaaaataattaggctgattttgcaggtcttcattgttagagattctgaagtatttactgtcaattcataggtttcagtttatttaggaaattagtgtttgacagctttttttaaattatttcactgaagctgagattattagtgatacaaagttaaaatttcaatatttaatttctctatatattattaatattaaat

SEQ ID NO: 14539 - DNA, 516 bp, Homo sapiens
tcgacccacgcgtccggtactacatcccctgaagaaacatgtgcccaggtgattcgtgaagctaagagaacagcaccaagtatagtgtatgttcctcatatccacgtgtggtgggaaatagttggaccgacacttaaagccacatttaccacattattacagaatattccttcatttgctccagttttactacttgcaacttctgacaaaccccattccgctttgccagaagaggtgcaagaattgtttatccgtgattatggagagatttttaatgtccagttaccggataaagaagaacggacaaaattttttgaagatttaattctaaaacaagctgctaagcctcctatatcaaaaaagaaagcagttttgcaggctttggaggtactcccagtagcaccaccacctgagccaagatcactgacagcagaagaagtgaaacgactagaagaacaagaagaagatacatttagagaactgaggattttcttaagaaatgttacacataggctt

SEQ ID NO: 14540 - DNA, 516 bp, Homo sapiens
tcgacccacgcgtccggcctttaaaagaagacttgaattcctatggaacaataaagacacagcagaaaacagggattctcctgtttcagaggaaataaaaatgacctgtcaacaatttatccattatcaccgtgacctctgtatccgaaacattgtcaaagaaagaaggtgtggtgcaaagacttctgctggaactttctgtggctgtgacctggtgagctggctaattgaagtcggccttgcctccgaccgtggtgaagctgtgatatacggagacaggctggtacaagggggagtcatccaacatattaccaacgagtatgaattccgggatgagtacttgttttacagatttcttcaaaagagtcctgaacagagtcctcctgctattaatgcaaacactctccaacaggaaagatataaagaaattgagcattcatccccaccctcacattcccctaagacctaaattatgcaggggagaaccctacatggaatcatattctagccgcgtat

SEQ ID NO: 14541 - DNA, 518 bp, Homo sapiens
tcgccccgcgtccgctggagtgctgctgaggagcgagggcccatctggggtctctggaagtcggtgcccaggcctgaaggatagccccccttgcgcttccctgggctgcggccggccttctcagaacgaagggcgtccttccaccccgcggcgcaggtgaccgctgccatggcttttccccatcggccggacgcccctgagctgcctgacttctccatgctgaagaggctggctcgagaccagctcatctatctgctggagcagcttcctggaaaaaaggatttattcattgaggcagatctcatgagccctttggatcgaattgccaatgtctccatcctgaagcaacacgaagtagacaagctatacaaggtggagaacaagccagccctcagctccaatgaacaattgtgcttcttggtcagaccccgcatcaagaatatgcgatacattgccagtcttgtcaatgctgacaaattggctggccgaactcgcaaatacaaagtgatcttcagccc

SEQ ID NO: 14542 - DNA, 335 bp, Homo sapiens
gcgtccggtgcatctgaggactggtgggaaggcaggcacaacgggattgacgggctggtgcctcaccagtatatagtggtgcaggatatggatgatacgttttcagacactctgagccaaaaagccgacagtgaggccagcagtgggccagtcacggaagacaagtcctcatccaaggacatgaactccccgacagaccgtcatcctgacggctatttagccaggcaacgaaaaagaggagagccaccccctccagtaaggcgtcctggcaggaccagtgatggccattgcccgctccaccctccacatgccctttttaactcctcagttgacct

SEQ ID NO: 14543 - DNA, 519 bp, Homo sapiens
tcgacccacgcgtccggaaggccgatgctgtgggggtgggcgtggagagaattcttctgtgggtcctctggtgttgagtggtcggcttggtgtggtgtgcggaggagctccaggcccgtcggcgcggagtggtctcacgtgtgaaacatggctacagattggctgggaagtattgtgtccatcaattgtggagatagcttgggtgtctatcagggaagagtgtcagctgtggatcaggtcagccagaccatttctctcacccggcctttccataatggagtgaagtgtcttgttccagaagtcaccttcagggcaggtgacattacggagttaaaaattctggagataccaggacctggagacaaccaacattttggagaccttcatcaaacagaattaggcccctctggtgctggctgccaagtgggcattaatcagaatggcacaggcaagtttgtcaagaagccagcctcttccagcagtgcccctcagaatatccctaagaggacagatgtgaag

SEQ ID NO: 14544 - DNA, 513 bp, Homo sapiens
gcgtccgccagtccaagtgctggctttccctgtatctgcctctgccaggcaacacttatcaggctcccaatcagcaggagcctccatgctccactttgaacagcctctatgctccagcaatggggcatttgtgaagagtgacttgattaacttttctgaccatgggtataatacagttgcttcagagggcagtggttctgggtgtgatttttacactgtaacattgtatacagtgtcatggataattactatttttttctggtcattaacactcacctactctagtactaggatttcagaccaaggtcctcatgacgcctggatattttagtatctatatccaataatcttttctctcctactgaatatccaggcaaagatgaaatcgttttctttaaaactgtcaaattctgtaaaactcaggagccagttcaagggaacaagcatcttcacaatagatggaatcaagagttaaatgttatagtggcaagcttgtctactgggcaacagaca

SEQ ID NO: 14545 - DNA, 481 bp, Homo sapiens
gcccacgcgtccgccgccgcgtccgctcccggtccctggcccctcagcggcatggcgtgcggggcgacgctgaagcggcccatggagttcgaggcggcgctgctgagccccggctccccgaagcggcggcgctgcgcccctctgcccggccccactccgggcctcaggcccccggacgccgagccgccgccgccgtttcagacgcagaccccaccgcagagtctgcagcagcccgccccgcccggcagcgagcggcgccttccaactccggagcaaatttttcagaacataaaacaagaatatagtcgttatcagaggtggagacatttagaagttgttcttaatcagagtgaagcttgtgcttcggaaagtcaacctcactcctcagcactcacagcacctagctctccaggttcctcatggatgaagaaggaccagcccacatttaccctccgacaagttggcataatatgtgagcgcc

SEQ ID NO: 14546 - DNA, 395 bp, Homo sapiens
gcgtccgttaaactgggtctttataaaagtaaaaggccaacatttaattattttgcaaagcaacctaagagctaaagatgtaatttttctggcgattgtaaatcttttgtgtctcctgaagacttcccttaaaattagctctgagtgaaaaatcaaaagagacaaaggacattttggaatccatatttaaggctgggggaaaagggttttttagcacaacctttccaaaagttttatatggagattaataaacacaccaagaattgattttgtagccaacattcattcaatactgttatatcagaggagtaggagagaggaaacatttgacttatctggaaaagcaaaatgtacttaagaataagaataacatgggccattcacctttatgttat

SEQ ID NO: 14547 - DNA, 420 bp, Homo sapiens
tcgacccacgcgtccgctctgctccttgtctccctctccctttttctgtctttgccgggtctctgggtctctgacccccatccggccctcatggctttgggtctggagctattgaagcaatgttcatcatgcctagtggcgtataagaagaccccgttcaacggtccatgcacgcaccacttaaaagccgttcatctcagtcacagtccagagcactactgagtctgcccaggacacctacctggacagccaggaccacaagagcgaggtgactagccagtcaggcctgagcaactcttcggacagcctggacaggagtacccgaccgcccagcgtgacacggggtggagacgccccagcccctgaggccccagatccacccccaaaacatgccgctttgaaaagtgaacaagggacgct

SEQ ID NO: 14548 - DNA, 513 bp, Homo sapiens
gagtcgacccacgcgtccgggggagccggacgccagagtcccctctccacgccgtgcagctgcgctggggcccccggcgccgacccccgctgctgccgctgctgttgctgctgctgccgccgccacccagggtcgggggcttcaacttagacgcggaggccccagcagtactctcggggcccccgggctccttcttcggattctcagtggagttttaccggccgggaacagacggggtcagtgtgctggtgggagcacccaaggctaataccagccagccaggagtgctgcagggtggtgctgtctacctctgtccttggggtgccagccccacacagtgcacccccattgaatttgacagcaaaggctctcggctcctggagtcctcactgtccagctcagagggagaggagcctgtggagtacaagctttgcaagtggttcggggcaacagttcgagcccatggctcctccatcttggcatgcgctccactgtacagctggcgcacagaga

SEQ ID NO: 14549 - DNA, 150 bp, Homo sapiens
gtagtcgacccacgcgtccggtgaaacacaaaaccaaggagtacattaagaagtacatgcagaagtttggggctgtttacaaacccaaagaggacactgaattatagggactgttgggccagggtgggaggatgggtggtcaggtaagac

SEQ ID NO: 14550 - DNA, 480 bp, Homo sapiens
  misc_feature 238: n = A,T,C or G
gcgtcgcttagtgattcttatagatagtatatataaaagtacattttaatagaaagccagggttttaaggaatttcacatgtataaggtggctccatagctttatttgtaagtaggctggataaatggtgcttaaatggtaatgtactccacttcttcctattggaagattaacattatttaccaagaaggacttaagggagtagggggcgcagattagcattgctcaagagtatgtnaaaaaaaaaaaaaaaaaaaggaaccaaaccactggaaataatcaaatgcaaaaaggtaacaaattcataactggaaagcaaagagaagaacaagtatgatttggatgataaagcattgttttaatggtgaaaacttcacagatcactaatgtttctagaggttaacttcaagtgggcaagctggggtttttaggtaggtcagtggcctagttcctaaagccacagtattaggatctgttaaa

SEQ ID NO: 14551 - DNA, 462 bp, Homo sapiens
gcgtccgggaaaagtttgccttccaggccgaagttaacagaatgatgaaacttatcatcaattcattgtataaaaataaagagattttcctgagagaactgatttcaaatgcttctgatgctttagataagataaggctaatatcactgactgatgaaaatgctctttctggaaatgaggaactaacagtcaaaattaagtgtgataaggagaagaacctgctgcatgtcacagacaccggtgtaggaatgaccagagaagagttggttaaaaaccttggtaccatagccaaatctgggacaagcgagtttttaaacaaaatgactgaagcacaggaagatggccagtcaacttttgaattgattggccagtttggtgtccggtttctattcccccttccttgtagcagataaaggttttgtcactttaaaacacaacaacgatacccagcacatctgggag

SEQ ID NO: 14552 - DNA, 537 bp, Homo sapiens
  misc_feature 514: n = A,T,C or G
gcgtccgcgggtaaaatgttatggtaagcatgcacagtttgcagtctacagtttttttatgtagcacaaaataggtgtacctttataagtacattcaattttatgatttacatttatcatgtaatttttaaaaaaatccatctatctaggatatgttgatacaaagtctgcttttgctattctttttgcttaaatactcctatcattttctgaattacttggtatttagaactcctagcaccacggggaagaatagaggtatcatcaaacgtggcaaattttctttcaggaataataaagagcatgattccacagcttttctgggatgtttgagattcttttttagtactaagcaaaattctcatcacagaatgtagcccaggccaatttataactaaatctctatttgttcggatgatgcttctaaaacagcattgataggttaaagaagcttggtatttttaatttacttcaatgattagctcaattgcttacttggagttttaatcctggnatatgtacattggattcatgact

SEQ ID NO: 14553 - DNA, 502 bp, Homo sapiens
ccacgcgtccgctgatctcgggctcctatttcatttacattgtgtgcacaccaagtaaccagtgggaaaactttagagggtacttaaaccccagaaaattctgaaaccgggctcttgagccgctatcctcgggcctgctcccaccctgtggagtgcactttcgttttcaataaatctctgcttttgttgcttcattctttccttgctttgtttgtgtgtttgtccagttctttgttcaacacgccaagaacctggacactcttcactggtaacatattttggcaagccaaccaggagaaaagaatttctgcttggacactgcatagctgctgggaaaatgaacatcagtgttgatttggaaacgaattatgccgagttggttctagatgtgggaagagtcactcttgtagagaacagtaggaaaaaaatgaaggattgttaactgagaaaaaagcagatgaaagtgtctcacgagctatgtgtgctctgctcaattctgggg

SEQ ID NO: 14554 - DNA, 455 bp, Homo sapiens
gcgtccggtcctttggcactgtcatctgtgtccctcgagtgagcatcaccagagctgcagtgattgagcacctactacgggctctgtgctgagtccttccagtgtgcctctcactgaatcctcaccccactggcatgaggtttgccccatttgactgatgagggtgcagagccagggagccttgttcactggttcattgagtacatttacaaatattatttacagagtgggagaagagcgtatagggtcttaatgccatggttgggactttggaatttaattcaagtgatgtgggagtacttgccagatggatggagggtgaaataatgcttaagccctcagccttactccatctgccttgatcaggagtgactcctacgaggaggtggcaggaactggcacctctgatcctcagctctaagggtctgatgcttttcacaccttaagagatttgc

SEQ ID NO: 14555 - DNA, 492 bp, Homo sapiens
cgacccacgcgtccgcaccggcccgatgagctgcagcggctccggcgcggaccccgaggcggcgccggcctccgccgcctcggccccgggccccgcgcccccggactgggctcccgccgcgctgccctccagcaccgccgcggagaacaaggccagccccgcggggacagcggggggacctggggctggagcagctgctgggggcacgggacccttggcggtgcgggccggggagccagctgagcggcgtggggcggctccggtgacggcgggtggcgcggcgcccccggagggggccatatctaacggggtttacgtactgccgagcgcggccaacggagacgtgaagcccgtggggtccagcacgcctttggtggacttcttgatgcagctggaagattacacgcctacgatcccagatgcagtgactggttactacctgaaccgtgctggcttttgaggccctagacccacgcataattcgggttcatt

SEQ ID NO: 14556 - DNA, 492 bp, Homo sapiens
ccacgcgtccggctgaaggctcccctggggttgctggcctcctggggcagaagggagagaaaggcgatgctggcaactccattggaggaggcagaggggggcctggccctccagggctccctgggcccccagggccaaagggagaagcaggtgtcgatggccaggttggccccccagggcagccaggagacaagggggagcgtggagcagctggagaacagggaccagatggccccaagggctccaagggagaaccagggaaaggagagatggtggattacaatggaaacatcaatgaggctctccaggagatccggacgctggccttgatggggcctcctggtcttcctgggcaaattggcccacctggagctccagggattccaggccagaagggggagattggactgccaggcccctcaagcacgatggggaaaagggacctcgcggtaaaccaggagacatgggcccttctggtccccaaggcccccc

SEQ ID NO: 14557 - DNA, 508 bp, Homo sapiens
gtcgacccacgcgtccggttttttttttttttgagacagagttttgctcttgttgcccaggctggagtgtgatggctcgatcttggctcaccacaacctctgcctcctgggttcaagcaattctcctgcctcagcctcttgagtagcttggtttataggcgcatgccaccatgcctggctaattttgtgtttttagtagagacagggtttctccatgttggtcaggctggtctcaaactcccaacctcaggtgatctgccctccttggcctcccagagtgctgggattacaggtgtgagccactgtgccgggcccgtcccctccttttttaggcctgaatacaaagtagaagatcactttccttcactgtgctgagaatttctagatactacagttcttactcctctcttccctttgttattcaatgtgaccaggatggcggaggggatctgtgtcactgtaggtactgtgcccaggaaggctgggtgaagtgaccatctaaattgca

SEQ ID NO: 14558 - DNA, 433 bp, Homo sapiens
gagtcgacccacgcgtccggcactctgttcttccgccgctccgccgtcgcgtttctctgccggtgagcgccccgccccggggcctgagctggacgtcgcaggcctgcgccccccgaccccggctggccccgcttccagctgccgaggcctcgtcgcgccttccccgggaacaaaaggcggggtcgcaatggaagaagagatcgccgcgctggtcattgacaatggctccggcatgtgcaaagctggttttgctggggacgacgctccccgagccgtgtttccttccatcgtcgggcgccccagacaccagggcgtcatggtgggcatgggccagaaggactcctacgtgggcgacgaggcccagagcaagcgtggcatcctgacccttgagtaccccattgagcatggcaatcgtcaccaactgggacgacat

SEQ ID NO: 14559 - DNA, 432 bp, Homo sapiens
ccacgcgtccggaccggggaagacgcctcttcgccgcctccgaaaaccgaggcagcgagcgacccccagcatcccgcggcctccgaaggggccgacgccgccgccgcctcgccgccactgctgcgctgcctagtgctcaccggctttggaggctacgacaaggtgaagctgcagagccggccggcagcgcccccggcccctgggcccggccagctgacgctgcgtctgcgggcctgcgggctcaacttcgcagacctcatggctaggcaggggctgtacgaccgtctgccgccgctgcctgtcactccgggcatggagggcgcgggtgttgtgatcgcagcgggcgagggagtcagcgaccgcaaggcaggagaccgggtggatggtgttgaaccggtcacgggatgtggcaggaagaggtgactgtgccct

SEQ ID NO: 14560 - DNA, 533 bp, Homo sapiens
cgacccacgcgtccgcttgtcttttttgggggtgtgaattttttgcattgttctgatcatattctttatcatgtaatttatgttcttttttactaagtattatgtgtggttattatagattttcacaaagatatattgctggtaatatattttattgtgtagtcttataatttacttaaccttctttcaattgttagaaatttaggctatttccagattttcagtattgtaaataatgctgtgatgaccaattttgtgaataaaatgtttttatgtatttcagattattcccttaggatagtctctcagtgccaagttgtcaaaaacatctctattttgcttatcttcctgctctcttgctgccttagggggtagtaaactgaaacataaagtaaacatgcatacaaataaaaaacataaaacaaaaataagcaacctgatggtaataggtgaaaagtggtaacctgttttaactttgaattcttgccgggcgcggtggctcacgcctgtaatcccagcactttgggaggctg

SEQ ID NO: 14561 - DNA, 440 bp, Homo sapiens
cgtccggtaaaccagccggagcggcgcggcagcggcaggaccgccgtggcgcctagagtagcgacccggggggagcgcggggcgacgctggctgcagggacccggtgacagcgtgagaggttttgacaagcttgcatcatgcgtgagtataagctagtcgttcttggctcaggaggcgttggaaagtctgctttgactgtacaatttgttcaaggaatttttgtagaaaaatacgatcctacgatagaagattcttatagaaagcaagttgaagtagatgcacaacagtgtatgcttgaaatcttggatactgcaggaacggagcaatttaacagcaatgagggatttatacatgaaaaatggacaaggatttgcatttagtttattccatcacagcacagtccacatttaacgattttacaagacctgagagaacagat

SEQ ID NO: 14562 - DNA, 397 bp, Homo sapiens
cctgccaattatagactatatagggggaagagcactggatttggagtcaagaaacctggacacttggctccacacttccttagctgggtaactttgggcaaaccgcttggtctctcaagcctaaggttcttcagctataaaatgggaataatacttcactaactacctcacagagttgtggtaagaatataatcagataactggataaaaacactatataaactggaaagcgccgtacaaatgtgagagatcagttttattatcaaatcactgttttccactgcctcttgaatcggctttattctaaccaaccattacatctttctcatcttttggagtatgggtaattgaggcttggggtgtgtcatcagggactggagttatttcagctcccatg

SEQ ID NO: 14563 - DNA, 439 bp, Homo sapiens
tcgacccacgcgtccgctatttactacctccttatgaggaagtggtgaaccgacctccaactcctcccccaccatacagtgccttccagctacagcagcagcagctgctgcctccacagtgtggccctgcaggtggcagtcccccgggcatcgatcccaccaggggatcccagggggcacagagcagccccttgtctgagcccagcagaagcagcacaagacccccaagcatcgctgaccctgatccctctgacctaccagttgaccgagcagccaccaaagccccagggatggagcccagtggctctgtggctggcctgggggagctggacccgggggccttcctggacaaagatgcagaatgtagggaggagctgctgaaagatgacagctctgaacacggcgcacccgacagcaaagagaagacgcctgggagaca

SEQ ID NO: 14564 - DNA, 525 bp, Homo sapiens
gagtcgaccacgcgtccggaaaacgcaaaagaaggagctcggaatataagaacgtcagaacgagtgacactaatagtggataacactagatttgttgtagacccatccatttttactgcacagccaaatacaatgttgggcaggatgtttggatctggccgagaacataactttacacgacccaatgagaaaggagagtatgaggtggcagagggaattggttccactgtgtttcgagcgattctggattactataaaacaggaataatccgttgtcctgatggcatatctattcctgaactgagagaagcatgtgactatctttgtatctcttttgaatatagcactattaaatgtagagatctcagtgccctaatgcatgagttatcaaatgatggtgctcgtagacaatttgaattttatctggaagaaatgatcctccctctcatggtagctagtgcccagagtggggaacgggaatgtatatagtggtgcttacagatgatgatgtggttgatgggatga

SEQ ID NO: 14565 - DNA, 477 bp, Homo sapiens
cgacccacgcgtccgctttaaccaaccataagaaatcagaaaagcaagataaagttcagcacacagtatgtatggattgcagtagctacagtacatactgttatcggtgtgatgattttgtggttaatgacaccaagctgggactggtacagaaagtcagagaacacttacagaacttggaaaactcagctttcacagctgacaggcataagaaaagaaaacttttggaaaactcaacactaaacagcaagttattaaaagtaaatggaagcaccactgccatttgtgccacaggccttcggaatttggggaacacatgtttcatgaatgccatccttcagtcactcagtaacattgagcagttttgctgttatttcaaagaactgcccgccgtggagttaaggaatgggaaaacagcaggaaggcggacataccacaccaggagccaaggggataacaatgtgtttttggtagaag

SEQ ID NO: 14566 - DNA, 234 bp, Homo sapiens
cgtccggcgcttgttgaggatttactgggcacccagctccatgtgcaagacttttcccaacacagccttggccaggcagatggtgtggcagggccagaggtttccgtagcctcttgggtgatagaaaggggcccacgccctgggctggggctcataagggactcaaaggaggcccttgcccttattggactcagactgatggcagaacacacagggagatctggaaccacaggc

SEQ ID NO: 14567 - DNA, 511 bp, Homo sapiens
tcgcccgggggccatggcagcagcggctactgcagccgagggggtccccagtcgggggcctcccggggaagtcattcatctgagtgtgggaggcaagagattcagtacctctcgccagactctcacctggatcccagactccttcttctccagtcttctgagcggacgcatctcgacgctgaaagatgagaccggagcaatcttcatcgacagggaccctacagtcttcgcccccatcctcaacttcctgcgcaccaaagagttggatcccaggggtgtccacggttccagcctcctccatgaagcccagttctatgggctcactcctctggttcgtcgcctgcagcttcgagaggagttggatcgatcttcttgtggaaacgtcctcttcaatggttacctgccgccaccagtgttcccagtgaagcggcggaaccggcacagcctagtggggcctcagcagctaggaggacggccagcccctgtccgacggagcaacacgatgcccccc

SEQ ID NO: 14568 - DNA, 503 bp, Homo sapiens
gtccgttctagatcgcgagcggccgcccttttttttttttttatctttctgtttttccactaaaagctccgtttttccatcttcccattactctccctttcctgtgtacactcctgaagacaggcatcctcataaggtgttctgaattaactttagggtgttctccaggtactttgcatctttttatatttcttgtaaattgttaatttctaagctccatgattaaagagaattcaccactaaaaaaaaaaaaaaagggcggccgctagactagtctagagaaaaaacctcccacacctccccctgaacctgaaacataaaatgaatgcaattgttgttgttaacttgtttattgcagcttataatggttacaaataaagcaatagcatcacaaatttcacaaataaagcatttttttcactgcattctagttgtggtttgtccaaactcatcaatgtatcttatcatgtctggatccccgggtaccgagctcgaattaattc

SEQ ID NO: 14569 - DNA, 503 bp, Homo sapiens
ccacgcgtccgggctggcgagcgccgccgccggcggagaccgacgctcggccagagccagcccgcggcgcccgggcctggccggctgcttcccgcctcagagggcggccccgcctacgtcgccgcagactttgcctaggcgggcgaagctgaacgtgaggtccctcgggcctgcacggtccggcgcggtccggagccgcggcgcatgagattccccaggaagccatcacactccttcccactgcggttctgggagcatgaaggcgttgcttatcccctatgtctggatcactggatgtaggctgggagtgtctgctgatcactgggagtgctgtcccttggaacaggaggagtaagattgagagagttctacctggtcgctcaagctggaatgcagtggcgccatgttggctcactgcaacctcagcctccccggttcaagcaagtctcatgcctcaaccacctgagtagctgggattacagcacccctgcagtggaccattg

SEQ ID NO: 14570 - DNA, 533 bp, Homo sapiens
gacccacgcgtccgttttattttgcacttttatgggtgacagtttttagcataacctttgataaaatacactcaagtgacttggacttagatgcttatccttacgtccttggtaccttttttgtattaacaaacactgcaatttatagattacatttgtaggaagttatgcttttttctggtttttgttttactttcaacctaggttataagactgttattctatagctccaacttaaggtgcctttttaattccctacagttttatgggtgttatcagtgctggagaatcatgtagttaatcccaaagtgctgggattacaggcgtgagccaccgcgcccagcctacattcacttctaaagtctatgtaatggtggtcattttttcccttttagaatacattaaatggttgatttggggaggaaaacttattctgaatattaacggtggtgaaaggggacagtttttaccctaaagtgcaaaagtgaaacatacaaaataagactaattttttagagtaactcagtaatttc

SEQ ID NO: 14571 - DNA, 458 bp, Homo sapiens
gcgtccggccagctgatgccgggagctaactaccgcgccggggccggggccggggccggggcccgacgtccccgcggtgcccgggaccgcgaggaggacggcgggggcctggagcccgcggccgtggcccgcgacctattgaggggcacatctaacatgtcatttgaggagctgttggaattgcagagccaagtggggactaatacgtacaaacaattggtagctggaaatagtcctaagaaacaagcttctagaccacctatccaaaatgcatgtgttgcagataagcacaggcctttggaaatgtcagccaagatccgagtaccatttttacgtcaggttgttcccattagtaaaaaggtagcccgggaccctcggtttgatgatctgtcaggggaatataatccttgaggtgtttgacaaaacataccaattcttgaatgacctccgtgcgaaag

SEQ ID NO: 14572 - DNA, 472 bp, Homo sapiens
gctggagaggcggtagcggcggcggcggcggtggtatcggcggcagctgtgagggggttccgggaagatggtgctgatcaaggggttccgggtggttttgccatgttctgttcaggagtatcaggttgggcagctttactctgttgcagaagctagtaagaatgagactggtggtggagaaggaattgaagtcttaaagaatgaaccttatgagaaggatggagaaaagggacagtttacgcacaaaatttatcacctaaagagcaaagtgcctgcattcgtgaggatgattgctcccgagggctccttggtgtttcatgagaaagcctggaatgcgtacccctactgtagaacaattgtaacgaatgaatatatgaaagatgattttcttcattaaaatcgaaacatggcacaaaccagacttgggaacattagaaaatgtacatggtttagatccaaacacatggaaaac

SEQ ID NO: 14573 - DNA, 421 bp, Homo sapiens
cacgcgtccggcggagaagactcaaaagagtgtgaagattgctcctggagcagttgtatgtgtagaaagtgaaatcagaggagatgtaactatcggacctcggacagtgatccaccctaaagcaagaattattgcggaagccgggccaatagtgattggcgaagggaacctaatagaagaacaggctccttatcataaatgcttacccagataatatcactcctgacactgaagatccagaaccaaaacctatgatcattggcaccaataatgtgtttgaagttggctgttattcccaagccatgaagatgggagataataatgtcattgaatcaaaagcatatgtaggcagaaatgtaatattgacaagtggctgcattattggggcttgttgcaacctaaatacatttgaagtcatccc

SEQ ID NO: 14574 - DNA, 512 bp, Homo sapiens
tcgacccacgcgtccgggggatctgtgcctggcatggggacgagttctggcctccttagggtacggggagagcttggactttggtcctgacgtggtggacgacacaccttcgaagagtggacgttacctcagttgtctgttgttagagtttaatcgatcactcctctgttttgttgtgttctttcccagaaataactttaccaaaggaaagctattttgcgaactatcttctccagcggagatggccaatgtgctttgtaacagagccagactggtttcctatctcccaggattttgctctttagttaaaagggttgtcaatcccaaagccttttcgactgcaggatcatcaggttcggatgagtctcatgtggctgctgcacctccagatatatgctctcgaacagtgtggcctgatgaaactatgggaccctttggacctcaagatcagaggttccagcttcctgggaacataggttttgattgtcacctcaatgggactgcttcacaga

SEQ ID NO: 14575 - DNA, 339 bp, Homo sapiens
tgggacagagcccccgatccgccagcaccacctgaggatttagaaaccgccccagcgatggaagagggtcaggagctggagaggaaagcaatagaagaactgcttaaggaggcaaaacgtgggaaaactagagctgaaacaatgggacccatgggttgcttattacagggacaagatacaaactaaaatcagccaaaataagacacaaagattaaagccactgttatcctctgctccgtgaagaggacatgctaccctcccagcatcagtgtgtgataataagcatggaatattgccaagcaaggaagctcatctgcggctcagcattcaaagttttta

SEQ ID NO: 14576 - DNA, 482 bp, Homo sapiens
agtcgaccacgcgtccgggacccgccacatgggccgcgttcgcaccaaaaccgtgaagaaggcggcccgggtcatcatagaaaagtactacacgcgcctgggcaacgacttccacacgaacaagcgcgtgtgcgaggagatcgccattatccccagcaaaaagctccgcaacaagatagcaggttatgtcacgcatctgatgaagcgaattcagagaggcccagtaagaggtatctccatcaagctgcaggaggaggagagagaaaggagagacaattatgttcctgaggtctcagccttggatcaggagattattgaagtagatcctgacactaaggaaatgctgaagcttttggacttcggcagtctgtccaaccttcaggtcactcagcctacagttgggatgaatttcaaaacgcctcggggacctgtttgaattttttctggagtgctgtattattttcaataaaattgggacaaca

SEQ ID NO: 14577 - DNA, 509 bp, Homo sapiens
gggtagtcacccacgcgtccgcagcctggcctgtgagaccctcgtggacaacaacctgcgggtcaccaactggaaccgcaagctgggctgcaagtgccagtacaagcacattgtggactggtgtggctgctcccccaacgacttcaagccacaggacttcctccggctgcagcaagtctccagacccaccttcttcgcccggaagttcgagtcgactgtgaaccaggaggtgctggaaatcctggacttccacctgtatggcagctacccccccggcacgccagccctcaaggcctactgggagaacacctacgacgcggctgatggccccagtgggctcagtgatgtcatgctcactgcttacacagccttcgcccgcctcagcctgcaccatgccgccactgctgcacccccaatgggcaccccactctgcaggtttgagcccaggggcttgccgtccagcgtgcacctgtatttctatgacgaccatttccagggctacctggtga

SEQ ID NO: 14578 - DNA, 488 bp, Homo sapiens
gcgtccgaagagttatgcttaagaccagccagccttgatagtggcagaacatccactagcaatagcaataataatgcttcactacatgaagtcaaagcaggtgcagttaataaccaaagcaggccacaaagccacagcagtggagaatttagcctgcttcatgaccatgaggcttggtccagcagtggtagcagtccaatccagtacttgaaaagacagaccagatcaagcccagtgctccagcacaaaatatctgaaacactggagagtcgacatcacaagatcaaaactggttcccctggaagtgaagttgttactctacaacagtttttggaagaaagcaataagcttacctcagtacagataaagtcctcaagtcaagagaatcttttagatgaagtaatgaaaagtttgtctgtctcttctgactttttgggaaaagacaaaccagttagctgtggtctggccaggtcagtaagtggaaaaac

SEQ ID NO: 14579 - DNA, 386 bp, Homo sapiens
gcgtccgcgccgggccgctctagccggtgaggccggcgggctctctgtggctgcggctgggaaaccgcgcggaggaggtgcccggccggggaccagccctggtccagcgcctccctgtctcagcatggacgaggagagcctggagtcggccttgcagacctaccgtgcgcagctgcagcaggtggagctggccttgggcgccggcctggattcgtctgagcaggctgacctgcgccagctgcagggggacctgaaggagctcatcgagctcaccgaggccagcctggtgtctgtcaggaagagcaggttgttggccgcgctggacgaagagcgcccgggccgccaggaagatgctgagtaccaggctttccgggaggccatcactg

SEQ ID NO: 14580 - DNA, 472 bp, Homo sapiens
  misc_feature 437: n = A,T,C or G
atacggagtcgacccacgcgtccgggttgcactcttcctatagcccagagggcgagagggcctgtggcctgggggaaggaggacgaggttctgcctggatcccagcagtaggacgctgtgccatttgggaacaaaggaatagtctgcctggaatccctgcagatcttggggccggaggccagtccaacccttggagcaggaagaaacgcaaagttgtcaagaaccaagtcgagctgcctcagagccggcccgcagtagctgcagactccgcccgcgacgtgtgcgcgcttctctgggccagagcgagcctgttttgtgctcgggttaagagatttgtcccagctataccatgggccgcactcgggaagctggctgcgtggccgctggtgtggttatcggggctggtgcctgctactgtgtatacagactggcttggngaagagacgagaacgagaaaatctgggacgaagac

SEQ ID NO: 14581 - DNA, 433 bp, Homo sapiens
ggagtcgacccacgcgtccgctaggaaccttggagaagattagttccccacttagattcttaaggagtaaaaagggctgagttatgcctttaagtgctgtcaagaattcacttgggtttgggacatttgctggtgtaatgctagatgcccacagcaacataatattgtactttgtcaaaggtcggtaaattctctgtttctcagcagccctttccccaaaaggtatggtgtctatttatagtaaaaatagctaatctctttttaccatctcacatgataactctttggagtcatgtcaagtgccccaaatttgtctgtgattttcccatctctgagctctttatctgcctgcgtttccttgtttttctggggccagagtctcatatctgcctttcttttggtgtatcaccttctgactagccttcattgcttg

SEQ ID NO: 14582 - DNA, 422 bp, Homo sapiens
gagtcgacccacgcgtccgcggctggtggtgggctcgggccgctcgccttgcccgtcttcgcttccggaggtcgctactgccgcctcagcggccccggagcgggggcgcccgggggtccttcgcccccggccacggtccccgcgccggggcttcgccgcccccagtgtccgagctggatcgtgcggacgcctggctcctccgaaaagcgcacgagacagccttcctctcctggttccgcaatggcctcctggcatcgggcatcggggtcatctccttcatgcagagtgacatgggtcgggaagcagcatatgaccatcccccgaccttggccctgttgctaccctgcctctcccgcaggcttcttcctgctgggcggcctgtgcgtggtgtggggcagcgccttgtacgccgtgggcctggc

SEQ ID NO: 14583 - DNA, 550 bp, Homo sapiens
gcgtccgctcgctgcagccccgcctgggccacggcaccctcgagcgccagccccgcgccccacccgggagcagcgagccaccggcgcgctccccaggagcccctgcaggcgccggccctggtccagcgcctccctctctcagcatggacgaggagagcctggagtcggccttgcagacctaccgtgcgcagctgcagcaggtggagctggccttgggcgccggcctggattcgtctgagcaggctgacctgcgccagctgcagggggacctgaaggagctcatcgagctcaccgaggccagcctggtgtctgtcaggaagagcaggttgttggccgcgctggacgaagagcgcccgggccgccaggaagatgctgagtaccaggctttccgggaggccatcactgaggcggtggaggcaccagcagcggcccgtgggtccggatcagagaccgttcctaaagcagaggcggggccagaatctgcggcaggtgggcaggaggaggaagagggagaggacgaggaagagctgagtgggcaaaagtgagcgcg

SEQ ID NO: 14584 - DNA, 484 bp, Homo sapiens
cgcccacgcgtccggaaattgtacccctagagaaaatcccattaacttgttaaattagtggaattaacaacaaataaagcatgtttgagacctggcaaaaattcctctggtagtatttataaatagagctgcatgcctctagtatgaaaaccgtatcagttgcaagtgccacttctacaagttactcagtttactctttgtatcagtaactttaaaggttggatgatccttgctggttaaagctaaatctcaacctagcaactaaatgaaaatatttagaatcatcagaatctgaacagactaaaattatcagcgataagcagaatcaagcagggtataagttttatctcaattatttgaaattgactgagttttcttaaagtgtaaagctgaaatttgctaccatgtttttgatgaccacagtgcagattggttgggttttagattgaatgactctctgctataattatcatgactttgaaat

SEQ ID NO: 14585 - DNA, 469 bp, Homo sapiens
tcgacccacgcgtccgaacctttgggagactccaagacagcagctccgaggtcggcgggggtctgggtggccatggaggagccccctgtgcgagaagaggaagaggaggagggagaggaggacgaggagagggacgaggttgggcccgagggggcgctgggcaagagccccttccagctgaccgccgaggacgtgtatgacatctcctacctgttgggccgcgagcttatggccctgggcagcgacccccgggtgacgcagctgcagttcaaagtcgtccgcgtcctggagatgctggaggcgctggtgaatgagggcagcctggcgctggaggagctgaagatggagagggaccacctcaggaaggaggtggaggggctgcggagacagagcccttcggccagcggggaggtgaacctgggcccaaacaaaatggtggttgacctgacagatcccaaccgaccccgct

SEQ ID NO: 14586 - DNA, 431 bp, Homo sapiens
acgcgtccggcaggttatatcattccaccagcatagtcttcattttcaacaaacgaatcatgaagccagataaattcctcatgttgccgaacaactgaaaactatgcaggttatatcattccaccagcaccaccaagacctgatttttgatgcttcaagggaaaaactacagaagcttggtgaaggagaagggtcaatgactaaggaagaattcacaaagatgaaacaggaactggaagctgaatatttggcaatattcaagaagacagttgctatgcatgaagtgttcatgtgtcgtgtggcagcacatcctattttgagaagagaattaaattttcaatgtttcttggaatatcatcaagatttgagtgtgcgaggaagacatatgactgaggaactttgtagactttcttttaaaaacatggttaaat

SEQ ID NO: 14587 - DNA, 486 bp, Homo sapiens
ggagtcgacccacgcgtccggcggcgagcgggactggccattggagtgctccgctgcggagggaggggaccccgactcgagtaagtttgcgagagcactacgcagtcagtcgggggcagcagcaagatgcgaagcgagccgtacagatcccgggctctccgaacgcaacttcgccctgcttgagcgaggctgcggtttccgaggccctctccagccaaggaaaagctacacaaaaagcctggatcactcatcgaaccacccctgaagccagtgaaggctctctcgcctcgccctctagcgttcgtctggagtagcgccaccccggcttcctggggacacaggtttggcaccatggggcccaccagcgtcccgctggtcaaggcccaccgcagctcggtctctgactacggcaactatgatatcattcgccggcattacaactacacgggaaagctgaatatcagcgcggacaaggagaacagcatt

SEQ ID NO: 14588 - DNA, 453 bp, Homo sapiens
cacgcgtacgccgagcgccgctccggctgcaccgcgctcgctccgagtttcaggctcgtgctaagctagcgccgtcgtcgtctcccttcagtcgccatcatgattatctaccgggacctcatcagccacgatgagatgttctccgacatctacaagatccgggagatcgcggacgggttgtgcctggaggtggaggggaagatggtcagtaggacagaaggtaacattgatgactcgctcattggtggaaatgcctccgctgaaggccccgagggcgaaggtaccgaaagcacaagtaattcactggtgtcgatattgtcatgaaccatcaccttgcaggaaacaaagtttacaaaagaagcctacaagaagtaccatcaaagaatacatgaaatcaatcaaagggaaacttgaagaacagagaccagaaagagtaaaaccttttattgacag

SEQ ID NO: 14589 - DNA, 554 bp, Homo sapiens
tcgacccacgcgtccggtggagggtcaggagctgccccggatcctctccatgtagttgcgaagctcctcagggtccttcagccccatgtcctcacacacccagcggatgtcctcctcgcctgccacaaggatggactgcacagcaggggcccctacaggctcctcaggtgactgggctggaggggctggcgcaaatgtcacaaactctactcgcttccgccgccccccagcctcctttcgggccagggtgcttgaggagctggtggtgcccccaggagggccaggggccagggtaggggcctcccctcctcccccactctcacaggggcagctcccctcccccttgggcgggccaggggactgccggtccagctggcggctcagttcctcctggtcagtgcccagccagacccagttgtggggctgggggaggtggggtcagtggcactgtcgggaggttctttgcgctgatagcgcaggacgaagaccacaccattgaccaagaagatgaaaatggccacgcagaagactcccagcagggcgtacatgcccag

SEQ ID NO: 14590 - DNA, 467 bp, Homo sapiens
cgcgtccggcggcggcggcggcggcagcggcagccagaggactcccagcggctggagcagaagtgttagcggccagagctcccagacccctacccacagccaggcgggacgcgcacagtccctccacgcggaaagaagtaccttcgccggtcaccggctcctgcagggtgcaaatatatacagagcttcataatcagcccaagaccacatagagcaaacatgaatgatatttcccaaaaggctgagattaaagaaatgcttgcttctgatgatgaggaagatgtatcttctaaagtagaaaaggcttatgttccaaaattaacaggaactgcgaagggtagatttgctgaaatggagaaacaaagacaagaggaacaaaggaagagaacggaggtggaacgaaaacgcacaattgagcaggatatgttagaaaagaggaaaatccagcgtgaattagcaaaaagggc

SEQ ID NO: 14591 - DNA, 366 bp, Homo sapiens
gcgtccgacccactgaagacgtctgcgtgagaatagagaccaccgaggccgactcgcgggccgttgcacccaccgccaaggacaaaaggagcccagcgctactagctgcacccgattcctcccagtgcttagcatgaagaaagccgaaatgggacgattcagtatttccccggatgaagacagcagctagctacagtttccaacagctgacttcaactacttcctaccccaccaagcaagctgctctgaaaaggccattatgcaagatgtagatcctgaaaaccagaactttttacttgaaatcgaatttggggaagaagaagtatgaaacagaatttcatccaggtactacttcctttggaatgt

SEQ ID NO: 14592 - DNA, 466 bp, Homo sapiens
cacgcgtacggcctgttgggctgtctggggggtggccatttagggatcgtggggacggggtccaccccaagaagaaagaaaggcccgtccacaggcccggctctgggccacgtgccccggaagcaggtgtgtccagagtcagctgagggctctccccacaccacccagcaggcgctggtgctccttctgcctcatgggaccagtccagcttccagccgctctggctcgagggtggtctgaccacttccttctgagtgggcttctctgggagctctccagtggcactgctggacctgcccacgtttctgtaaaatcaggaatacgtggctttagtaagcagaccaagcgcttcgtggcagggaaagcaacgtgcggggaagtcactgaaaagtgctgcctaaggaagtttggaaatagtccctgttccagattgccttgaattttaaaacattttgctttggaaagt

SEQ ID NO: 14593 - DNA, 374 bp, Homo sapiens
ggcccactgggccccagggcggctggcattgccagcaatctacaagccatgtccacccagatgttccagactaagcgctgctttcgactggcccccacctttagcaacctgctcctgcagcccaccaccaaccctcatacctcggccagccacaggccttgcgtcaatggggatgtagacaagccttcagagccagcctctgaggagggctctgagttggaggggagtgagtccagtggacgctcctgtcggaatgagcgcagcatccacgagaagcttcaggtcctgatggccgaaggcctgctgcctgctgtgaaagtcttcctggactggcttctgaccaaccccgacctcatatcgtgtgtgcgcagagc

SEQ ID NO: 14594 - DNA, 470 bp, Homo sapiens
cccacgcgtccggccgccagaacacaggtgtcgtgaaaactacccctaaaagccaaaatgggaaaggaaaagactcatatcaacattgtcgtcattggacacgtagattcgggcaagtccaccactactggccatctgatctataaatgcggtggcatcgacaaaagaaccattgaaaaatttgagaaggaggctgctgagatgggaaagggctccttcaagtatgcctgggtcttggataaactgaaagctgagcgtgaacgtggtatcaccattgatatcttcttgtggaaatttgagaccagcaagtactatgtgactatcattgatgccccaggacacagagactttatcaaaaacatgattacagggacatcttaggctgactgtgctgtcctgattggtgctgctggtgttggtgaatttgaagctggtatcttcaagaatgggcagaccctaaagcatgccct

SEQ ID NO: 14595 - DNA, 453 bp, Homo sapiens
gcgtccgatggcgtgatgtctcacagaaagttctccgctcccagacatgggtccctcggcttcctgcctcggaagcgcagcagcaggcatcgtgggaaggtgaagagcttccctaaggatgacccatccaagccggtccaccatacagccttcctgggatacaaggctggcatgactcacatcgtgcgggaagtcgacaggccgggatccaaggtgaacaagaaggaggtggtggaggctgtgaccattgtagagacaccacccatggtggttgtgggcattgtgggctacgtggaaacccctcgaggcctccggaccttcaagactgtctttgctgagcacaatcagtgatgaatgcagaaggcgtttctataagaattggcataaatctaagaagaaggcctttaccaagtactgcaagaaatggcaggatgaggatggcaagaagcagct

SEQ ID NO: 14596 - DNA, 460 bp, Homo sapiens
ccgggctgggtcccagcacttgaccccagctgcactgctgtacagggctgccgtcacccgaagtcagaaacgtggcatctcatcggaagaggaggaaggagaggtagacagtgaagtagagctgacatcaagccagaggtggcctcagagcctgaacatgcgccagtcactatctaccttcagctcagagaatccatcagatggggaggaaggcacagctagtgaaccttcccccagtggcacacctgaagttggcagcaccaacactgatgagcggccagatgagcggtctgatgacatgtgctcccagggctcagaaatcccactggacccaccttcttcagaggtcatccctggccctgaacccagctccctgcccattccacaccaagaacttcttagagagcggggcccttccaattctgaggactcttactgtgacagcactgaattggacaac

SEQ ID NO: 14597 - DNA, 482 bp, Homo sapiens
cgcgtccgccgttgcgcccccgccggtgagcgcggggagcgccgcaagcccaacgccgggggcagccccgctccggtgcgccgccggccggaggcctcgccggtgcagaaaaaggagaagaaggacaaggagcgggaaaacgagaaggagaagagtgccctagcccgggagcgcagcctcaagaagcgccagtcgctgcccgcctccccacgtgcccgcctctctgccagcaccgcctctgagctcagccccaaatccaaggccaggccatcctctccctccacatcctggcacaggcctgcctccccctgccccagcccagggccaggccacactctgcctccaaagccaccgtccccccgaggcaccactgcatcccccaaggggcgggttcggaggaaggaggaggcaaaggagagccccagcgccgcagggcccgaggacaagagccagagcaagcgcagggccagtaacgagaagga

SEQ ID NO: 14598 - DNA, 448 bp, Homo sapiens
  misc_feature 426: n = A,T,C or G
cgacccacgcgtccgtttaagagttgcatattttactttatttttattaaattaaaagctacagtctggcagcgattccagaacagggtaaggaggttcctcacaggggtcagagaagagcggagaaagacagactgacggagactgagacacaggagagaaaggacaaggttaagggagaactgtatctgatgaacacacacagccggctccatggcgggtgacggggagctcacatcagcccaatttctcctccccggcacccgaagttcagcggtggagcagtatgtgggggcggttaggaatcaagagaccctcccttccccaccctaggtcctttctcggcttggtcgtggagcacagcacataccagaaaaagccaagggcaatggaggggcagggaaaccgggagtatatgtacacggngaggggagaacagagccttgga

SEQ ID NO: 14599 - DNA, 623 bp, Homo sapiens
cgacccacgcgtccgcacacccttcctgtactcagtcctcagtttgcctggtgagagagcagcctcctcccgtgtgctctgccagctggacccagactggccatattaccagtgagaccaaaaagatggaggtggggaggtagctctgaggtctgggaaaccattccagctcctgccagttttaacttgtgtttaattcctggcacagttgtcctggaaatgcctttttctcttgcctgggaaccactagaaggggatgttgtctgtgttggccagggccatgcaaattcaacatcttgtttctgcccttcccccgtgtagctgaggctaggtgttggcattacccagtgcttgttcttcagagagcaaaagcactgctcgtcatgtctgaaatttagtgagtgagctcacccactaggctggtgtttcctgcccgtggctgcacattggaagcaccggggcactttgagaactacagatgcctgggtcccagagcatctaaggtgctctagggtgtgtccaggacacagccctggttgaggaccactgctatattgtatggcctcttttaaaaaagttaattttacttggaaatgatttcaaagctacagaaaagttgcaag

SEQ ID NO: 14600 - DNA, 487 bp, Homo sapiens
  misc_feature 425: n = A,T,C or G
gggggccggcccgccgcctctgctgttgggcagcgcctccgacatgaaggctgagctgtcgcaacttattagcgacctgggcgagctcagcttcggcaacgacgtgcgcaccctgcaggccgacttgcgggtgacgcgcctgctgtcaggcgacagcacgggcagcgagagctccatcgagggcgggggccctgacgccacctccgccaccgccggggactcgtcccgccaggccgacggcgccagtgcagacgagccccactcgggctgagctcctccgcgcgtcgccggcgctccaccgtggctacccatccgtggtcccgacaacctccctgtcccttgcccgcccccaggaagggggaaatggggcatttggggcccagacctacacttggagcccaggtccagcgttcccccgaccgctntcccctaccttccggcccccgctcccgccccagcacttttggctctgttgcgcgtggggatg

SEQ ID NO: 14601 - DNA, 612 bp, Homo sapiens
atcatcatcttcatcatgggtgccagcatccacctggtgggtgactctgtcaaccaccgcctgctcttcagtggctaccagcaccacctgtctgtccgtgagaaccccatcatcaagaatctcaagccggagacgctgatcgactcctttgagctgctctactattatgatgagtacctgggtcactgcatgtggtacatccccttcttcctcatcctcttcatgtacttcagcggctgctttactgcctctaaagctgagagcttgattccagggcctgccctgctcctggtggcacccagtggcctgtactactggtacctggtcaccgagggccagatcttcatcctcttcatcttcaccttcttcgccatgctggccctcgtcctgcaccagaagcgcaagcgcctcttcctggacagcaacggcctcttcctcttctcctccttcgcactgaccctcttgcttgtggcgctctgggtcgcctggctgtggaatgaccctgttctcaggaagaagtacccgggtgtcatctacgtccctgagccctgggctttctacacccttcacgtcagcagtcggcactgagtccctggcaccaggctctggcgc

SEQ ID NO: 14602 - DNA, 651 bp, Homo sapiens
  misc_feature 469: n = A,T,C or G
gcgtccggtttgttcgttataggtttaataagtctattgaggaagacctactcctgtgtgaatctttgcaaagtaatgctaccggtgaagaaatattcaactgtatcaacagttttatgcagaaacatgaaattgaatgggaaaaatgtgttgatgtttgtagtgatgcttctagggcagtggatgggaaaattgccgaagctgtcaccttaataaaatatgtggctcccgaaagcaccagtagtcactgcctattatacagacatgcactggcagttaaaataatgcctacatctctaaaaaatgtgctagaccaggcagtacaaatcatcaattatattaaagctcgaccacatcaatccagactattaaaaattttatgtgaggaaatgggtgctcagcacacagcacttcttctaaatacagaggtgaggtggctttctcgaggtaaagttcttgtaagactttntgaacttcgtcgtgaacttttggttttcatggattctgcttttcgactatctgattgtttaacaaattcatcttggctgctaagacttgcatatcttgcagatatttttactaaattaaatgaagttaatttgtcaatgcaaggaaaaaatgtgaaccgttttacagtatttgataaaatgt

SEQ ID NO: 14603 - DNA, 673 bp, Homo sapiens
ggagtcgacccacgcgtccgcggacgcgtgggtgtgactggcacccaatgccatgcctttatggtcacttggtagtataaaggcatggcatttgttgtgactggcacccaatgtttgattttttttttaaaactatccaattaaaattaaggtctgggagtgttctgtttcccattactttaatactcacctcctcccagactttctacacctgttgcacctcaggcagaggatgttctggacctccccctcttggtccctactagagacctctcaacagatctgtgggcccagtcattgggttttatcagtgcttaatgtgaactaagttttttacttccacagaatacaagccactaccttctgacctccccaccccccaccaacccccatcttttaatatgctgtggggcatagaactccggaatgaccagcatgatattttcagagtcttgtccccggggtattagcacctctttttgaacagggaattgattcaagattggacatggtctcctctgattatcaggtactggggctgagggcattaaaaatagtaagcctccctcctcgtcccctgcctcaagaaattgcctccttatttatcaacatctttttcctccctttccctgagagctcacagtacaatgttttagaagccccatttgcacag

SEQ ID NO: 14604 - DNA, 548 bp, Homo sapiens
tcgacccacgcgtccggtgttcctcccatgagaattagtggtcagacattgcagagggcatcagaagcgggtagatgaaatagcgaaaggaaacaggctagcagaccaaagagctaagtcagcagtaagaaggccccaaggtcccaaaacacttgaggcccctctgatttgggagggctacataagggaaataaagcctcagtattcccctacagagatagaatgggccacctctcgaggtatacttttcaaccctcaggatggttacaatcagaagattgcaaagtacgcttgccagcctccagccaatggaagattcttaaaatcctccactgagcctttcacttaggaaagcataagacatcagtgcatccaaagattgttctcaggagaaaatctactaaaaatggtcaaataggttgttaatactcgtgaaaccctcttaaaaataatccctttaacagatgacttcttccccaccacaatcaaaggatgggaagttactcaggggaggactggcagatagacttcacccatatgcccaaaat

SEQ ID NO: 14605 - DNA, 727 bp, Homo sapiens
gacccacgcgtccgatgaccaggctgccccgcctcctggttctgcccaagttctccctggagactgaagtcgacctcaggaagcccctagagaacctgggaatgaccgacatgttcagacagtttcaggctgacttcacgagtctttcagaccaagagcctctcacgtcgcgcaggcgctgcagaaagtgaagatcgaggtgaacgagagtggcacggtggcctcctcatccacagctgtcatagtctcagcccgcatggcccccgaggagatcatcatggacagacccttcctctttgtggtccggcacaaccccacaggtgagcctggaacccatcacgttccacatcctcccacccattctttctctcaggaactagtcccgacagatgcagacatccctctatccctgagagggctctgggcagggaacccataaccctaccctgcttcctgtcccaagaggaggctaccttctatcacccacagacagtgccgggtccccgctctgtgactcaggcagctgcgactccagacagctcactcatctgcctagatctcagtccttccacccacatccagcctgatgagctgtcccactccttctgcttctcaacccccatggttcttccaccctcaggaacagtccttttcatgggccaagtgatggaaccctgaccctggggaaagacgccttcatctgggacaaaactggagatgcatcggg

SEQ ID NO: 14606 - DNA, 602 bp, Homo sapiens
tcgacccacgcgtccgcccacgcgtccgccttcttctgggcactgactgcccttctggtcgcttcagctgctgccttccagggtcttctgctgctgttgccgccaccaccatctgtacccacaggggagttaggatcaggcctccaggtgggagccccaggagcagaggaagaggtggaagagtcctcaccactgcaagagccaccaagccaggcagcaggcaccacccctggtccagaccctaaggcctatcagcttctatcagcccgcagtgcctgcctgctgggcctgttggccgccaccaacgcgctgaccaatggcgtgctgcctgccgtgcagagcttttcctgcttaccctacgggcgtctggcctaccacctggctgtggtgctgggcagtgctgccaatcccctggcctgcttcctggccatgggtgtgctgtgcaggtacacaaggacccccagcccctgtgcgggtggaactcagggctgggagccaggtcctggcgcagtcagccctgacattctgctcgctcactgcaggtccttggcagggctgggcggcctctctctgcttggcgtgttctgtgggggctacctgat

SEQ ID NO: 14607 - DNA, 530 bp, Homo sapiens
agtcgacccacgcgtccggtcttcgcaggtggccactcgggcccgcagccgctgggtaagggtgatgcctagcctggcttattgcaccttccttttggcggttggcttggcgcgaatcttcatcttagcacatttccctcaccaggtgctggctggcctaataactggcgctgtcctgggctggctgatgactccccgagtgcctatggagcgggagctaagcttctatgggttgactgcactggccctcatgctaggcaccagcctcatctattggaccctctttacactgggcctggatctttcttggtccatcagcctagccttcaagtggtgtgagcggcctgagtggatacacgtggatagccggccctttgcctccctgagccgtgactcaggggctgccctgggcctgggcattgccttgcactctccctgctatgcccaggtgcgtcgggcacagctgggaaatggccagaagatagcctgccttgtgctggccatggggctggtgggccccctggactggc

SEQ ID NO: 14608 - DNA, 475 bp, Homo sapiens
cgcgtccgcccttaagagacaagattgagaaagagccatgtggcttggctctagaaacgtcattatcattaggaccatcagattttagattaagctgctattgaattaataaaatcccaatgaagcagagttatagggatagatttatagctggcagagtggtatcaaaggagaaaaacagtgaaaaagccaatttcactggttcgttcaatccagcttgttgctaatattagttacccttgttttaatgacagagagtggctggaatctgtagctaggggaggggcaacactgttagatgtgaggaaaggaagtgccaaaaatgcctggacagatggcttgtcccaaggccaggacacacactttaaaatccaacattcacctaagcaagtaattcttaaagatcttacagaaacgcagagtcaatcaggtttataaaggaaggcttaggggagagaggaggcctgggggcctg

SEQ ID NO: 14609 - DNA, 528 bp, Homo sapiens
agtcgacccacgcgtccgcagcatcgtccgagacttcccagactcccggccagccatcgaggacctcaagtactgcctggagaggacggaccagaggcagcagctgctcgtgtccctcaaggctgccctggagactcggctcctgcatccaggcgtcaacacgtgtgacatcatcaccctctatatctctgccatcaaggcgctgcgcgtgctggacccttccatggtcatcctggaggtggcctgtgagcctatccgccgctacctgaggacgcgggaggacacagtgcggcagattgtggctgggctgacgggggactcggacgggacaggggacctggctgttgagctgtccaagaccgacccggcgagcctggagacaggccaggacagtgaggatgactcaggcgagccagaggactgggtcccggaccctgtggatgcccgatcagggaagtcgagctccagcgggcgttcatcggacatcatcagcctgctggtcagcatctacggcagcaaggacctctt

SEQ ID NO: 14610 - DNA, 538 bp, Homo sapiens
acaattgaaaactgggaaaaatagtctcgtggttcggtttgttagtttgagacgcagtctcactctgtcgcccaggctagagtacggtggcccaatctcagctcactgcaacctccaacctcccaggttcaagcaattctcttgcctcagcctcccgggtaactgggattacaggcgcgcaccaccacgcccagctaatttttgtgtttttagtagagatgagattttgccatgttggccaggttggtcttgaactcctgacctcaagtgatccacccacctcggcctcccaaagtgctgggattacaggtgtgagccaccgtatctggctctcatattttttatatacagattgaatatccctaatttgaaaacctgaaatctgaaatcttccaaaatccaaaactttttgagcagttacatgatatttgaatgaactgctcataagaacattttggatttcagatttccagattagagatgctgaaaaggtaagtataagacaaatattccaaaatctgaagaaaatcagaaatgc

SEQ ID NO: 14611 - DNA, 459 bp, Homo sapiens
gaaaccaaagtgctctgtatcctccagtctccgcgcctccacccagctcaggaacccgcgaaccctctcttgaccactatgagcctcccgtccagccgcgcggcccgtgtgccgggtccttcgggctccttgtgcgcgctgctcgcgctgctgctcctgctgaccccgccggggcccctcgccagcgctggtcctgtctctgctgtgctgacagagctgcgttgcacttgtttacgcgttacgctgagagtaaaccccaaaacgattggtaaactgcaggtgttccccgcaggcccgcagtgctccaaggtggaagtggtagcctccctgaagaacgggaagcaagtttgtctggacccggaagccccttttctaaagaaaggtcatccagaaaattttggacagtggaaacaagaaaaactgagtaacaaaaaagaccctgcatcataaaattgccca

SEQ ID NO: 14612 - DNA, 490 bp, Homo sapiens
cacgcgtccgccactggctcctccgcaagacctcgtctttgcttgtcctgctcagatgctggtcatcctgggcatgtccccagtgtggactctggactgggaagggggcaggcccctttggacctgcagttggcctcagcagaaggccttgccttgtgtatgtgactccatatcccgggagcagttgacctttgccaaacactttacagttctggaggaggaggtaacatagatgcctgggcctgatggtggggccatacccatgtgtcgcctctcactctggcagcctcagaggccccttgctgctggctcccatctccctcccatttgcagaccaggaaggaagagcaagctgtacaaagggaagcagagcctggggtggggtgtgagcagggtgacccctcatctgaaaggcccaaaccagggggaagcaccagcctcagtgcagccccctcctgaccccacctagaatggaagccttcacctgcag

SEQ ID NO: 14613 - DNA, 543 bp, Homo sapiens
agtcgacccacgcgtccggtgattccagggtgcagaagggattcatattcccagaacgctttaagtgtacacctgcaggataaagagataccggttacattattaaatgattctagggattcactgggggatatttttgttgcttttactttcatggttagagctacaaagaacagtgatttttttttttttctcccttccccattcagaaacattatacattgggccatttttctttctcccaaagaagattcatggatagtcagactgaactgtgtgcaacaggaaaagtcaaaagggaaaaggcagctgatgaggttacatggttacatgttctacatcatgcagagtagcttgaaatctagtctggagaaaactggatcaagattctagcccactggagttgcaaggaatgagaggcaaaaattctaaagatttgggttatattttcaacttgggggacagagagaaatggagagcaggaattacagtttcaacaaacatcatgatagtctgggtagtcaagacagagatttaagtaaa

SEQ ID NO: 14614 - DNA, 293 bp, Homo sapiens
gcacgcgtcctcccacgcgtccgactagttctagatcgcgagcggcgcgctttttttttttttttcacgcttaattcactttatttttcttgtataaaaaccctatgttgtagccacagctggggcctgagtccgctgcacggagactctggtgtgggtcttgacgaggtggtcagtgaactcctgatagggagacttggtgaatacagtctccttccataggtcgggggtcaggtagctgtaggtcttaaaaaaggcatcaaaggtggcctttggcgaagttgcccagggtg

SEQ ID NO: 14615 - DNA, 430 bp, Homo sapiens
gcgtccgaaaaaatgataatgtgcataaaattcaacccagctttcaaagtccagtcaaaatatcagaaatcatgaggtccaatggattttgtttagcaaataccgaaacaatagttattgaccacagtataccaaatggaagagaccagcacctgggcgtggacccaacagagcatttatttgagaatggcagtgagtttccctcagagctggaggacggggacgacccagcagcctacgtcaccaacctgtcatattaccacctggtccccttcgagacagacatttgggactgaacctctctatcaggcctcccccgcctcagctgttcactgccagctctgatgctgtccactgtgctggcccccatggtcacagctgctgccccagctctggaactccaagaacgtcccaggccccactgacgcca

SEQ ID NO: 14616 - DNA, 530 bp, Homo sapiens
cgcgtccgcacaacaagacactccaattgtgatttgagttgaggatctctgcctgccttcctgccgtccttccttcttccccgatccatgctacttttaggggctgcggagagcagcagcagagctgagtaatgatacagggcaccacggagagaaagtagaccatttcactcctgggaagatggggtatttcccacttccagcaacgaaataacaaatgaaaagttgcatacttattgatgtattgtatgagccagtagcattttatgtacaaaacagaagtcaatgcaacagtatgtatgtgtgcctgtgtgtgtataaaaataaccattgaagctaacttgctaatgtacttaggcaagccacttcccatctctgggcctcgtctttcctccctctaaaatcaaagagctgaattatgtgatccttgaggtctcttccacttataataccaactgtcttgtcagactggcaaattatattggcctctccttatgtggtgggttttttgggtggtcatagtttcttat

SEQ ID NO: 14617 - DNA, 477 bp, Homo sapiens
acgcgtccgctcctgagtagctgggatgacaggcgtgcacctggcagctttttaaagtgttgatggtaatctgaggcaatctaagggagtcattttttaagtgactttatacagaaagattggtaagagccaaggggtagaagtggcataaatgtctaaagcagggaagtgacaggactttcattgttcttggctgaggagaagcgggagtggctgatggaagcacctaaatgatgcctttgtctgtgggaaggcaaatgatgccccagagctctaaccaaaggttttgcagccgccgaaaaacaggaaagttgggaagcgggggtaggactacactgaatcattaacagtgctgtaaactaccatgtggccattaacaatgacctttaggggagttttcctaaacgatcactctggagcggccgctagactagtctagagaaaaaacctcccacaccttcccctgaacctgaaaca

SEQ ID NO: 14618 - DNA, 514 bp, Homo sapiens
gtcgacgtcaaacacccgcaggctgtcgatttcatcatcaaagaaatcaagacgataaggcagctcactccccatcgggaagagatccagcaacgcgccgcgcgtggcgtattcgccgtgctccatcacctggtcaacatggcgataaccggcgctgccagttgggttcgtaatgcatctcgtgacaggcgctgaccttttttcatcaccagcgcatgaccgtggagaaaactgtgtgggcaaacgcgctgcataagcgtattcaccggaacaatcagtacgccacgctgcatcgtcggtagctggtaaagggtggaaaggcgcgaggagataatgtcctgatgaggcgaaaaactgtcgtagggaagagtttcccagtccgccagattcatcaccatttgatcggtaaactggctgatttcatcatgcaaacgcagagcattttgcatatctggtgcaatgagtaccaccggaccggcgtgacgttcggcaatttccgctaccagcgttgcac

SEQ ID NO: 14619 - DNA, 623 bp, Homo sapiens
cacgcgtccgtttatttttatgcccactttttgtggataagattctttagataaaatctaaagaattttaagtgactttctccaggtcatgaagattcaatgggtagaattgaatcagaattgaaatgttccagattcatattcttgtgtgtgtttgataaaattcatggcttccaaagtaactgaacacttcctttgggcccttggagggaaaatccatatttttactaattacacttttttttttagacatctggcagttctttgaacttaaacatattctcatggccatagttccaaattaagcccgacgcagttgctaaaaatcttgctgcactgttgaatactaataatgcaacatttattggatgtttttgcattttgatgaccttcatgattcatttataagtctttgtaagtgcttaagtgaccccctcactagtgaaaataataaatgttctatatcatttattattatttgtgtattctctacatgatatatttttttaaggaagagtaactccacatgtcagaatgagtgatattatcctagggcaaagcgcaaatagggcagtttgtttctactctgcaaatatggcatgtataggaacaaaactcttttg

SEQ ID NO: 14620 - DNA, 639 bp, Homo sapiens
cacgcgtccgggaggatggacgtactggtgtctgagtgctccgcgcggctgctgcagcaggaagaagagattaaatctctgactgctgaaattgaccggttgaaaaactgtggctgtttaggagcttctccaaatttggagcagttacaagaagaaaatttaaaataaagtatcgactgaatattcttcgaaagagtcttcaggcagaaaggaacaaaccaactaaaaatatgattaacattattagccgcctacaagaggtctttggtcatgcaattaaggctgcatatccagatttggaaaatcctcctctgctagtgacaccaagtcagcaggccaagtttggggactatcagtgtaatagtgctatgggtatttctcagatgctcaaaaccaaggaacagaaagttaatccaagagaaattgctgaaaacattaccaaacacctcccagacaatgaatgtattgaaaaagttgaaattgctggtcctggttttattaatgtccacttaagaaaggattttgtatcagaacaattgaccagtcttctagtgaatggagttcaactacctgctctgggagagaataaaaaggttatagttgacttttcctcccctaatatagctaaagagatgcatg

SEQ ID NO: 14621 - DNA, 472 bp, Homo sapiens
tcgacccacgcgtccgctaatttataagctttacaagtatttattttataaggcttagacagaattattggagttttaaattaagtgtattggaaaagaaaggatggtatgtgtatgaaatgttaagatcctacgcaacactgctatttttttcctttaatatttggctgcataacaaaagccactagactgttactgtcttgtctgtccatgtgttaacagcatttcttaatgatgtatatatggagtggtcttcaatcatagtgaagaatttaaagagaaagtcaattgtattggcatttttaataagaacaaaattagttcgtctaaggggactggctggccacatatttgttccttgcccatatgctttctacttcttgttcttattatgaaattatgaatttgaagcctctgaaatggtgatcagttttcaacatctttcaaaaacaaaattactatttcctccata

SEQ ID NO: 14622 - DNA, 441 bp, Homo sapiens
gcgtccgcggctgctgtgtgtgagcagtggacacgtgaggggggggtgggtgagagagacaggcagctcggattcaactaccttagataatatttctgaaaacctaccagccagagggtagggcacaaagatggatgtaatgcactttgggaggccaaggcgggaggattgcttgagcccaggagttcaagaccagcctgggcaacataccaagacccccgtctctttaaaaatatatatattttaaatatacttaaatatatatttctaatatctttaaatatatatatatattttaaagaccaatttatgggagaattgcacacagatgtgaaatgaatgtaatctaatagaagcctaatcagcccaccatgttctccactgaaaaatcctctttttttggggtttttctttcttttttttttgattttgcactggacg

SEQ ID NO: 14623 - DNA, 311 bp, Homo sapiens
aagaggattcccagggtttccaggggccaaaggagacaaaggttcaaagggtgaggtgggtttcccaggattagccgggagcccaggaattcctggatccaaaggagagcaaggattcatgggtcctccggggccccagggacagccggggttaccgggatccccaggccatgccacggaggggcccaaaggagaccgcggacctcagggccagcctggcctgccaggacttccgggacccatggggcctccagggcttcctgggattgatggagttaaaggtgacaaaggaaatccaggctggccaggag

SEQ ID NO: 14624 - DNA, 571 bp, Homo sapiens
  misc_feature 434, 479: n = A,T,C or G
gcgtccgcccacgcgtccgctttttccaaacaaggagcatccaaagacacagtgacttgagctatagatagtaaaaatcatacgagagttgaactgagtcaggtttaggaagcaagtttggttgcatcaattaagcaggctcttttcaattgactgatgctggggccttcagttttattctcagtatagattgccagtattgttaagagtatccaaaggcctttctagatggagacagaataactgacttgaacatacagtgtgcctgtaagtgtccaggctcagagctggtgaaaacccttctgttgggcgtgtgcagggttaaactcctgaagtaacttgtgaggacttcagtgcttgctggtgtcctgggcagcaccatgaatgcctttaccaagacatgccaagttggatcccccgaatgaagcagatgnggcttgtggtgtgacccttgctccctgctacacagagcatcgcanggctggcctgtgtggtttccagatgagggtctgggtcccggagcttgtgttgagagctcagtggacccaccccgcttgctgaaccctcacag

SEQ ID NO: 14625 - DNA, 391 bp, Homo sapiens
gcgtccgcggacgcgtgggcgcacgccggcggcgcggaggccggctctgcgcttcgggccgccccctccccccaccccgctcacacccggcacttacttcggctgtctccgctgccctccagcggagacgcagctcctcaggcgcccggcggtatttgttgggtcggcggcgtcagggattcgcagtggcctgtggtcggcgtcgtccggccactggtgcgcccccgcggcaggcagagctcacgctcctgtcccccggctggtccggggtctgggcgccgcgtcgacggcggctccgcaggacgcgcagaccgggccgcagcccatgccccgagcggactgcattatgaggcacctgccttacttctgcccgggtcaaagtggtgcgggg

SEQ ID NO: 14626 - DNA, 451 bp, Homo sapiens
gtcgacccacgcgtccgatttaaatgccactaaattttaaattcatacctttccatgattcaaaattcaaaagatcccatgggagatggttggaaaatctccacttcatcctccaagccattcaagtttcctttccagaagcaactgctactgcctttcattcatatgttcttctaaagatagtctacatttggaaatgtatgttaaaagcacgtatttttaaaatttttttcctaaatagtaacacattgtatgtctgctgtgtactttgctatttttatttattttagtgtttcttatatagcagatggaatgaatttgaagttcccagggctgaggatccatgccttctttgtttctaagttatctttcccatagcttttcattatctttcatatgatccagtatatgttaaatatgtcctacatatacatttagacaaccaccattt

SEQ ID NO: 14627 - DNA, 414 bp, Homo sapiens
ataggacgtcgacccacgcgtccgcccacgcgtccgaggggcaacagcagagcctacagcagggggcacactccggcgggtccagccgcctgcacgacctctactggcaggccatgaaaaccctgggagtccagcgccccaagttggagaagaaggatgccaaggagatccccagtgccacccagagccccatcagtaagaagcggaagaaaaagggattcttgccagagacgaagaagcgcaagaaacgcaagtcagaggatggcacgccagcggaggatggcacacctgcagccaccggcgggagccagccccccagcatgggcaggaagaagaggaacaggacaaaggctaaggtcccagcccaggcaaacgggacgccaaccaccaagagtccagcccctggcgccccca

SEQ ID NO: 14628 - DNA, 517 bp, Homo sapiens
ggagtcgacccacgcgtccgattcaatatatacttctgaatggcaccttactttttggaaacaaatcttctgttatttacaaaataataatttttaaaaaacataaaaaaaaaatccaaagctgctctcgataatagtcaacatttgcatatatatggaatttcttactttttttctcccaaactctatttaataaacttattttaatgtttgtgtatttcatgtataattgtgatctcaattataaaagtttaattcagcatgtctttgagccaatataattactgcacacccactaaattgggatcagccattataaataatgtagttttagaataataaaacatgacacatatatatatatataaatatatagtatatattggcacatcggtgaaagtttatatgtgcagaagtttttttctttctcaagttaaaaattattttttgccatatgtaatttttgtgttgcaggctgtcgagagataaaaatgattttaaatctgtgtactgatga

SEQ ID NO: 14629 - DNA, 392 bp, Homo sapiens
gcgtccgaatatagtattttttaatttttgtggggatggattctcaaatacttgtgattttaaaagattctaaagctaaaacacaacttgattttaaaaagaatgattctccttacacaattataaatatttgcagtaaatattttccttataatactgttttgaccccatttaaaaagtattagattatattcctttgatccaatgaaaactgaaccttataaatggttagctgaaagtagaccttattcttgtccttctttagaagagtaaagatttgtcctagggaagatggctgacttcggttcccaacatgcgtatgcatttagactgtagctcctcagccctgtggacacaaaatttggacagcttattaggtttacgttagcaat

SEQ ID NO: 14630 - DNA, 455 bp, Homo sapiens
gccctggaggctacttgtaaatccttagaagaaaagctggatctggtcacgaacaagcagcacagccccatccaggttcccatggtggccggctcccctctcggggcaacccagacgtgcaacaaagtgcgatgcgctgtgcctgggcgtcggcagaacaccattgtggtgaaggtgccgggccaagaagacagccaccacgaggacggggagagcggctcggaggccagcgactctgtgtccagctgtgggcaggcgggcagtcagagcatcgggagcaacgtcacgctcatcaccctgaactcggaagaggactaccccaatggcacctggctgggcgacgagaacaaccccgagatgcgggtacgctgcgccatcatcccctgcgacatgctgcacatcagcaccaactgccgcacggccgagaagatggcgctaacgctgctggactacct

SEQ ID NO: 14631 - DNA, 395 bp, Homo sapiens
cgcgtccgcccacgcgtccgggccacggcgcgcctgctctgggctctccgcgtgccgcatcgctttcttttcttcctctggagcagctatggcggcggcgaagaccctgaaccccaaggccaaggtggccggagcgcaggcggcgctggcgttcaacattagcggggcgcggggtctgcaggacgtgctgaggaccaacctggggcccaaagggaccataaagatggccttcatcccagaataatcactgaaggatttgaagctgtgaaggaaaagcccttcattttttggaagaagtcaaagtaagcagagagatggacaaggaaacacttaaagatgtggccagggcatctctttgtactaaagttcatgctgaacttgcagatgtcttaaca

SEQ ID NO: 14632 - DNA, 352 bp, Homo sapiens
gcgtccgccacgcgtccgcaaacatgaggttctctctactggtcctcttaactgtggtgttgaggcttatatttgtgtaatttttggtgggtgaaaggaattttgctaagtaaatctcttctgtgtttgaactgaagtctgtattgtaactatgtttaaagtaattgttccagagacaaatatttctagacactttttctttacaaacaaaagcattcggagggagggggatggtgactgagatgagaggggagagctgaacagatgacccctgcccagatcagccagaagccacccaaagcagtggagcccaggagtcccacttcaagccagcaagccgaatagctgatgt

SEQ ID NO: 14633 - DNA, 420 bp, Homo sapiens
atacggagtcgacccacgcgtccgccctcccatggcaaataatataataaccagtgaattttcaggaatttaaaaattagcttttttccacttaaaggagaaaaatatttgggactagcagcagaggcagtaagagatgtgaaccttggtgagctctgatacagtgagaagagattatactcatgaaagagaatgttagtgttacagagaagcagccgatagcaaatcgactgtagagacttggcggcggtggcattgccccaggtcgtcagcagtgtggtattatctatgagaacttgagcgacagagtatttcttgatgaatttatagatcatttgagatgttgagttactttagtttagttttgttttgttttttcaaataagtagagactattgttaaaaacgagaaaggaaaatg

SEQ ID NO: 14634 - DNA, 495 bp, Homo sapiens
cgcgtccgcccacgcgtccgggaaacccccttcgatgacctccagagcctcccaaacgacgtgatctcttccctgaagaacaggctgaaaaaggtctccacaaccactggggatggtgtggccagagcgttcctcaaggcccaggctgctttcttcggtagctaccgaaacgctctgaaaatcgagccggaggagccgatcactttctgtgaggaagccttcgtgtcccactaccgctccggagccatgaggcagttcctgcagaacgccacacagctgcagctcttcaagcagtttattgatggtcgattagatcttctcaattccggcgaaggtttcagtgatgtttttgaagaggaaatcaacatgggcgagtacgctggcagtgacaaactgtaccatcagtggctctccactgtccggaaaggaagtggagcaattctgaatactgtaaagaccaaagcaaatccggccatgaagactgtctacaagttc

SEQ ID NO: 14635 - DNA, 437 bp, Homo sapiens
gcgtacgcggtgcggttggcggcggcggctgggccgggggctgccggctgcgctcgggccgtgcgcggcggccgtgcggtcacgccatggacttcaacatgaagaagctggcgtcggacgcgggcatcttcttcacccgggcggtgcagttcacggaggagaaatttggccaggctgagaagactgagcttgatgcccactttgaaaaccttctggcccgggcagacagcaccaagaactggacagagaagatcttgaggcagacagaggtgctgctgcagcccaaccccagtgcccgagtggaggagttcctgtatgagaagctggacaggaaggtcccctcaagggtcaccaacggggagctgctggctcagtacatggcagacgcggccagtgagctggggccgaccaccccctatgggaagacactgatcaag

SEQ ID NO: 14636 - DNA, 563 bp, Homo sapiens
gcgtccggtgcatcttgcccattgatttctaaatgtattaactacttaaattaatcctgaatcttttcccaggcttaagtgggataatgttttattgtagatgcatatttcctggctctacccagtctttctttgaagactttatcatcctattttctgaatccagtggctgactttaatcttctctggaggaactagataatttctagactaatgcttacactcatgatccagattgtaatttctgaactccttcttccaaatagaatcaaaacaagaaaggggaaagcctctcaaagcaactgtgcgttaataatgaaacactctttttttctaatccaaggagggtttcatactttttcttagtttcttgccctcttcccttctgatcaataattgtaataggaaatttgcaattgtgccaatactcagattcaatactgaactactttcttgcattgtaattcaaattccaaggttaacaactagctgtatgtttccaaaacaatcttattgtatatggattttcttaggggaagtttccagaaatgattttttttttt

SEQ ID NO: 14637 - DNA, 563 bp, Homo sapiens
cgccacgcttgggaagccgatcaggctcaagagcaacatggaggtctgcacttaatcgctcctctccgggggcggccataccgaggaggcgtctcttccgtgcaggcaggctctcctggggacctcagagattctctccagcggcagcggaaaacggacaatgggtggattcgggtccagattctggtaggagggagtttgggatcgagatctggaaaaaagcactagactggaagaggacgcgatggagtcggagccgctggcggggacaaaaaccagaggccggggaaggcgccggtgggaggcaaggcacggatggactttacctgcgcacgcgtcgcagccatctccgcgcacagtggtggccaccgcgactggtgctgaagtgttggcgcgtgccgggcgctccgctgggacccgggttgctggccctgagtctcagctttctcatctgtacggttgggacaagtacagtaaccctcgcccgtcaagacgggccagggctgtggcgagggtccacgccttagagcaggcaggagtagggctgattggagccattgtac

SEQ ID NO: 14638 - DNA, 491 bp, Homo sapiens
  misc_feature 392, 393, 431: n = A,T,C or G
agtcgacccacgcgtccgaacatcgtcaactacggcatcccagcccaccgtgacatcgacgagtgcatgttgttcgggtcggagatttgcaaggagggcaagtgcgtgaacacgcagcctggctacgagtgctactgcaagcagggcttctactacgacgggaacctgctggaatgcgtggacgtggacgagtgcctggacgagtccaactgccggaacggagtgtgtgagaacacgcgcggcggctaccgctgtgcctgcacgccccctgccgagtacagtcccgcgcagcgccagtgcctgagcccggaagagatggacgtggacgagtgccaggacccggcagcctgccgccctggccgctgcgtcaacctgccgggctcctaccgtgnngagtgtcgcccgccttgggtgcccgggccctccggcgncgattgccagctccccgagagcccggccgagcgtgccccggagcgggccgacgtgtgctg

SEQ ID NO: 14639 - DNA, 513 bp, Homo sapiens
gagtcgacccacgcgtccgggcggaccggccaggcccccggcacttcctcgtcctcggcccgggtgccctgcccccgtccaggagccctaggagtgctacggggggccggagccttgcccgggccgctgccccgtccctggattcggggctggacgcagcaagcggtgcgctgtgtccccaagctccccgtcctcgggggagcttttggaagagtcccagatggaagcgaccaggctccggcagaaggcagaggagctagtgaaggacaacgagctgctcccaccaccttctccctccttgggctccttcgaccccctggctgagctcacaggaaaggactcaaatgtcacagtatctcccacagcccctgcatgccccagtgacaagccagcaccagtccagaagcctccatccagtggcaccttctctgaatttgaagtggtcactcctgaggagcagaattcaccagagagcagcagccatgccaatgcgatggcagcttgggccccctg

SEQ ID NO: 14640 - DNA, 485 bp, Homo sapiens
gtccggaagggtgtacatgtgtctcttaatacctttggttttgggaagatctcaggaacggcctgcctcaccgtctatgtacagcccatagtatcccttcactacaaattctctgaagaccacctaaatatcacttgctctgccactgcccgcccagcccccatggtcttctggaaggtccctcggtcagggattgaaaatagtacagtgactctgtctcacccaaatgggaccacgtctgttaccagcatcctccatatcaaagaccctaagaatcaggtggggaaggaggtgatctgccaggtgctgcacctggggactgtgaccgactttaagcaaaccgtcaacaaaggctattggttttcagttccgctattgctaagcattgtttccctggtaattcttctcgtcctaatctcaatcttactgtactggaaacgtcaccggaatcaggaccgagagccctaaataagtcacacagcacc

SEQ ID NO: 14641 - DNA, 557 bp, Homo sapiens
gcgtccgactagttctagatcgcgagcggctgcccttttttcttttctttttttttttttttgagacacagtctcactctgtcaccaggctagagtgcagtggcacgatctcagctcactgcaacctctgcctcccaggttcaagtaattctcctgcctcagcctcccaagtagctgggactacaggcacgtgccaccacgcccagctaatttttgtatttttagcagagatggggtttcaccacattggccaggatggtctcgatctcaacctcgtgatccacccacctcggtctcccaaagcgctgggattacaggcgtgagccaccgcgccaagccaaggtctgcatttttctttagaactcagaacacccaatagtcctaggcccccatcctcgcatggcagcaagctaaataagcatcttcccactgcgagttggggcatgacccagcctatggtttgccatactccctctttttctccgtgttttcattaattgtgaacctgacctgcatcaccctttcatgtcagtgctctccaaacctgcttgcttgca

SEQ ID NO: 14642 - DNA, 536 bp, Homo sapiens
atctactgcagtattccatataggcttggattaaaaccagggacaatgggcagcaataggccataggttaagcagcagcaactagtcaccactggactgtcttcttctccccttccccatatcccacattctcctaaacatgatgtacgtgtagcaacagtcttttaaagtcagatggtcagactaattatttttacaatttaagtgtaagtgatgtacatgaatggactctgtgaatcggaaaacttacgtaacagcagagaatacgtatgttatatggaataacctgagttgaaggtacaattttttttccagctcttttattcctttaactgcttaacaaaagaaagagtctccaaagtttaaaaaacctttgaaaaatatacagcttgatattatttacataaaatatgaatccaggttccaatatcaaacaaacattgctatgtcagaaacacagtggaaggcaggaacgtaactcactgccttttagatgcaaagactaatagacacgttctcctatctcgactatcttt

SEQ ID NO: 14643 - DNA, 581 bp, Homo sapiens
agtcgacccacgcgtccgctcttttcttctctataaagtgaattattccttttttttgttttatgtaagtgtatatattcttagtttttcttgaaatcattgtaatgttaactttgttgtttcaaatatcttggtgattgcttcattatctcttcaacaaaaaaaacctttaattttgccattgaaactgtagaactatgccatgcttttattagaagcagtgctctgtgttaacaacaagaatggtgtaattagaattgggatgtggatatttactgtatgacaacacatttacagttctgtaatgcaaggatgcagtttaaaaatgtgaagtagtgatggtttttgaaataagctttaaaatatagggatcttgaaggctccctggggtaactattttataacttagataaaatggctagtcatatctgtgtgtttgtaaagttatttttttaatattttaagattacaattttaacaaatgtagaaatgagccaaactatttaaattttaaaacagtaaaacaaaatgaaacttaatagctcacaaaattccagtccatgtttcatgacttattttag

SEQ ID NO: 14644 - DNA, 536 bp, Homo sapiens
gtcgacccacgcgtccgctttgaagcaggaaaagacagtctctagagcaacatggaaaggatccagtatttgttttcaggcaaaagcaagcctccaaaagccccttggttcttctctgtgtgtctcgccccttctgccttgtacaccagactgccggcaagcaagcggggaggtggcgaacagctgggatcctccagtgaaaagtttgctcagcgcgagagatgtcaagaggctgggattgtcgcctatcgggaggtggggagctctctcactcacacttcctgggaaatgaaggagaactaataggcagcccgcatttgcagccagccaacctgggtggtattccttgaagtgaagcgctcataaatcccttctggggccagagccggtttcacaagctgcaggatttgggtggcctgcctgctctttgggagcgggcttgggaagctgaagaaattgaatcaggacctcaggccctttacagactcccttctacacttggttgctgattaagaacattatgtggcatttaaaat

SEQ ID NO: 14645 - DNA, 555 bp, Homo sapiens
agtcgccacgcgtccgcccacgcgtccgctcagaaacccctgccctttcccttcagaaaacgatggcaggcattcctctgagtttacaagcagagactcactccaacccaaactagctgggagttcagaaccatggtggaataaagaaatgtgcatctggtctcttctgttgtttttatttcatatcagattaaatttctttaccatgttggctaagtctaaatattagagatgaggctgtgcctactccctggccagctctgctgatagcctatgatgggttccaatgggaaatgactctttactattaaaagacaaggaaagctctgacttcgtacttctctgatgaatggcaatgtaaatgaacaaggctccatgtgactggagcatggaagtgaatgctactttcttaatttaatctgccctgtcctacctgctcctctgattgttagccatcacataacttattgaatgcttgccatgtgccaggcactgtgctgagtgccatacatacatttcatttaattatccaataatcctacttactattgttta

SEQ ID NO: 14646 - DNA, 339 bp, Homo sapiens
gcgtccgaattctataacatctctgtgaggaaggaatttttatccttattttacagatgaggaagctgtttggagataatttaagtgacttgcctggggaatctagccagtagtagagtactgattaatcaggtgctgacatctgctctgctttgtgtatgtaattcagcagtgcttcaaagatccaagaagctgtagcagatctcaatacactctcctataaaattagtgaataatcaccatgacaaaattggtatggcggaacagtcattatacattatttagactcattccttcttccagtgcccttatgattatttcctacctttaccattgatc

SEQ ID NO: 14647 - DNA, 560 bp, Homo sapiens
gcgtccgcccacgcgtccgcccacgcgtccgatattgcttcagaaaactgaatgtgtatgtcggtcatattgcctttataaccatgctaatatctatgctttatacatactcaaacttgccttgccttaaaaaaatacatactacatacttaaatcaggaattctagccatctcacagaataccaactaaaactaagtgcattgagatctgagattggtaaacccagattcatttaccacagctgtaattaagtttttagaaactattctctttttggggaaatccattgaagttaatttctgttatcttattagaagaaaatgatgttgatatgtgtttcagattttccatttgaaatcttataattaatttgatttatttactgtaagtaggaggtataaatgacactcttaaattggaaggaggggtgttttagtgtctgttttaggtcaaaattagtgattctatttttatcaaaagttttatcctgaagtttcaggaccactcttccttaataaacttgttaatggaaagcgagctttatgaacatttaaaaatg

SEQ ID NO: 14648 - DNA, 459 bp, Homo sapiens
acgcgtccgcagagaatccttaataactggcagagcactttattcttctggtgagctccctgaatatttatttttctgattataaattttctatattagtagcattttttaattattacttcttcactatagagcatttacttttagtctctagatgtatattttggaatgctgtacttggcataacatagattaaaatcataatgcatgactaaaaactccttggatttatttcccattttaaaatttttagcggtaagttcagatttataatctttctctagacttccatggtctgaatgttgcctgctgaagtagcaacctaaaaagtatcccctgcttatgcttctccagttggccctccatgtccataggcttcgcatctgtgattcagcccactgtgggtcaaaaatatttggggaaaaaaatggatggttgcgcctttgctgaacatgtaca

SEQ ID NO: 14649 - DNA, 400 bp, Homo sapiens
gcgtccgatcccttgtataccatcgtagacttcatactggagagaaaccttacaaatgtgaagaatgtgatgaagctttcagtttcaaatcgaaccttgaaagacataggagaattcatactggagagaaaccttacaagtgtaatgattgtggcaagaccttcagtcagacatcatcccttgtataccatcgtagacttcatactggagagaaaccttacaaatgtgaagaatgtgatgaagctttcagtttcaaatcaaaccttgaaagacataggataattcatactggagagaaactttacaagtgtaatgaatgtggcaagacctttagtcggaagtcatcccttacacgccattgtagacttcatactggagagaaaccttaccagtgtaatga

SEQ ID NO: 14650 - DNA, 403 bp, Homo sapiens
gcgtccgcgctccgctgccgggggcgggagggaggaatggttgcttcacgccccgggggaagagacgggaagctcggctctgggttgcgggccccggggtctccgcgtggggcgcaccgtccgacccgcccctcccggtgtgcagcgccccgcaccgccccgccttgcctgggagaagccggcgggacgcgccgggctggagtgggcgggtataggctttgagctaggccgcttccgggaggcggtgctcacaccccatttcctttctccacatacaggtcaggtggcgtttgctgtggtgggtaggcccacctgctctggagacctccgcgctggcccccgcgagcctcctgccctggcccggcgctgcggctctgccgcgggggcagcatgggtgggcccc

SEQ ID NO: 14651 - DNA, 461 bp, Homo sapiens
agtcgacccacgcgtccgttccttgattcctggaagtccagtgggttctgcagctgaaaaagccctgggtcccagcagcagagagacaggacagaggggatgcttgggcggggagggacggtaacctgcagaacagattccatttttatagaacgagtacacgtttgctaaaacagtcctgctttcccagactggattcccaccacagggacagtcggaactcaggactagctccagcgacatctttcctccgaattcaagccttctatcacaatgtcaaaacagctatttataaagccattttcattgtacttgataacagcacgagtcccaaaacttttagaaataaaataggacattggcttgattgaaaagagggactttttaaaaattgttctttcgtcagaagccttttggatgacttacaatagctctgatgaagataccaccccagcgtcagt

SEQ ID NO: 14652 - DNA, 513 bp, Homo sapiens
  misc_feature 489: n = A,T,C or G
acggagtgaccacgcgtccgaaaaaaatagcattatacctcttccttgtctcaaccgccatgaaaattctgaacactccaaattcagttgaataatccaaaacaaaatttataagtataaaataattttacttcttatagtaatagtatactttaaaaagcctcagggtatattatcttctaaacagctacaattcagtgcagctacattaaccaactatgttctctagttgagaacaactaggcctatttcactgctgtgtagcctcagtgcctaacatgggtgccaaataaatattcgtagaattacactgaattgtaaaaaccattcgtttttgtttacaattgccaaaaatctcaaaaggccctgtatttatgtaattctttgaaattattattttattttgatttctcagttattgactggctgggtgtgacttagtacataagtactcaatattataaaaacctcaaataattgacttgattntacacaacatccttcccttttcta

SEQ ID NO: 14653 - DNA, 468 bp, Homo sapiens
tttggataattcttggcttaatttcttagctacttgaaggttaatttgcaagacttttaaaaccttagaaaagttttaaggttgcaaagttatcaacactggggcagagggtggagaggccaatgcgggtagaaggaggcagttatgtttatattgaaggtgaaatttttctttcatttagaatggaaaacatccccaaatgtatcattataaactagtcagccttgactacacaaaattgacctttaagttgcttgagaaaaacacaatgcaaatcgttcagaagggtcaacatcctttggtgctaaaatcttgtgtatgttttcagaatggctttttctgtatgttatagaataatcactaaaggaaaggtagttgaatttaaagtcatgaagcaagactctttaattcagttattttaaacaagaattaaaaccccaaacattcttggcaggctttgaagcacac

SEQ ID NO: 14654 - DNA, 523 bp, Homo sapiens
tccggaacaacaacagaaagctgtgtttgtcttttttctctaaatatatctcccgtatgagatttcaggtccccatgttttcaccaagcaatctgctatgtcagccaacccagcatcactttctacaggaggttatgatttttgccatttactagaggaagatgttttatgaaatcaagttggggtttgaattcaggtgcagtcatcagttctttaggggctgcaatgttctaaaaaaaataagtaatcagattttaagaaaaaagtgatgatttcttattgatatttttgtaacagaatatagctcttaactgaaaatccagaaccagaaacataaatcttgagtttcttttcatgtacataaaaagcaatagcgttttagtatagatagccctgagccaaaaagtaatagaaatttctctagatatttaatacagagagtgtatagactgactctaagttaaataatgtgcaaaatatcttaaacattcctccccttattcaacaattatgtatcagtgat

SEQ ID NO: 14655 - DNA, 487 bp, Homo sapiens
cgtcctaaaaaggaaccagaggccacttgtatatataggtctcttcagcatttattggtggcagaagaggaagatttctgaagagtgcagctgcctgaaccgagccctgccgaacagctgagaattgcactgcaaccatgagtgagaacaataagaattccttggagagcagcctacggcaactaaaatgccatttcacctggaacttgatggagggagaaaactccttggatgattttgaagacaaagtattttaccggactgagtttcagaatcgtgaattcaaagccacaatgtgcaacctactggcctatctaaagcacctcaaagggcaaaacgaggcaaccctggaatgcttacgtaaagctgaagagttaatccagcaagagcatgctgaccaggcagaaatcagaagtctggtcacctggggaaactatgcctgggtctactatcacatgggccgactctcagacgttcagatttatgt

SEQ ID NO: 14656 - DNA, 468 bp, Homo sapiens
cccacgcgtccgtccgcctccagcgcatccgcttcagcaaggcctgcctgaagaacgtcttctcggtcctactcatcttcatctacctgctgctcatggctgtggccgtcttcctggtctaccggaccatcacagactttcgtgagaaactcaagcaccctgtcatgtctgtgtcttacaaggaagtggatcgctatgatgccccaggtattgccttgtaccccggtcaggcccagttgctcagctgtaagcaccatttcgaggtcattcctcctctgacaagccctggccagccgggtgacatgaattgcaccacccagaggatcaactacacggaccccttctccaatcagactgtgaaatctgccctgattgtccaggggccccgggaagtgaaaaagcgggagctggtcttcctccagttccgcctgaacaagaatagtgaggactttaacgccattgattacc

SEQ ID NO: 14657 - DNA, 400 bp, Homo sapiens
cccacgcgtccggtaagtattttggaattcaaccctcgaattattttttctcatttcagcatagtgataggggatgcaatgaggcttcattattttttatgacctgcccctcatttgctctgatgttccctaaattctgtaatcatatcataacttttgttatgaatagagaggaatgggctcactgaaacctgacactagaaattggtgggtgatgctcataactgcaaacacttagcttattgaagtgcctctatttacatgttctttagttataatatgtatttttctaacagaaatacacgtctgtaattggtatatattatactttgtatgtgtcacaacaaaagctaaacagaggctaaagtctttagcagagaagaatgaattacaaatttac

SEQ ID NO: 14658 - DNA, 518 bp, Homo sapiens
aaactgtttgggaaaatacgttgagggagagaagaccttgggccaagatgctaaatgggaatgcaaagcttgagctgctctgcaagagaaaataagcaggacagaggatttgctctggacagagatggaagagccgggaacagagaagtgtggggaagagataggaaccagcacgatggcaggggcaaagggctcaagggtgaggaggccgtgggacccacagagtgggagaaaaggaacattgttgtttggtggcacgtaagctccttgactgtctgcagcacccagaatctcattaaagcttatttattgtacctccagcagctgtgtgcaatggggtcttttgtggaaatcaaggagcagacaggtttcatgtgtactgtcaccacgtgggatggaaccagaggcatggaagcaagacgctaaatgaagagggccataaaggctggggattcccaggcaccttaagaacagcttgtcttttttttttttctgtccaaaaaaaatgtttaagggac

SEQ ID NO: 14659 - DNA, 531 bp, Homo sapiens
agtttaaagactttaaggacattcaaagtttaaaatagtgttcaaattgcaaaatttggcaatcttcatataaattggtttcttttctaacttttcaaaaactaacattaaatgtcaattataggaaaacatagttggaaatgtaatcatccaaagatcatttttaaaatgaaatttaattagcacatattgaacatttgacttaattgttaaaccccagttttgttttgtttttttaatcagatttttgcacactgattagtttttgtgttgtggcttttgttgctttattattcaaggttttttttttttttcttccccatgggggagattgtcttccaatgtttaactacgtttaaataaataaaaattgaattttattgttcatttatataaaatctgataccttgatgtaatttcacaatacagttccaatttttatggctttataattacaatgatattttcttctataataaaaaccaaagtaaacatttaaattggagaactgatatttttcatttatatgaa

SEQ ID NO: 14660 - DNA, 517 bp, Homo sapiens
agcaccctaaagaaaataagtatcccagtcgacatcagtgacagtgatatgatgctgaacatcatcaacagctctattactaccaaagccatcagtcggtggtcatctttggcttgcaacattgccctggatgctgtcaagatggtacagtttgaggagaatggtcggaaagagattgacataaaaaaatatgcaagagtggaaaaagataccttgggggcatcattgaaggactcctgtgtcttgcgtggagtcatgattaacaaggatgtgacccatccacgtatgcggcgctatatcaagaaccctcgcattgtgctgctggattcttctctggaatacaagaaaggagaaagccagactgacattgagattacacgagaggaggacttcacccgaattctccagatggaggaagagtacatccagcagctctgtgaggacattatccaactgaagcccgatgtggtcataactgaaaaggggatctcagatttagcttagcactaccttatgc

SEQ ID NO: 14661 - DNA, 511 bp, Homo sapiens
ttttttttttttttttacaactcaaaaaaagaaatcttttaataaaaattactcataaaaatcctaataaattttaaagagcaagatattccttattacatttataaaagaacatttggtccttttacaaaaagatcccttttaatttaaatacatttcttatttacagattaaacataaaatatcatctacagttgcaaagcatattgcacattacagagaagcatttgtgtatttccgtaagttttcccagagtttccaactctatacttttttttgtaaaaagatttacctttcttatgcaaaataaataaaaatgcagcttgtgttttgctatttaaaactaaaacaaaataacctttaaaaatattattcctctgccttgcagaaagaaggaagagggtatagaatcagggagttccacaggtacttgataatttttaccagattcacgtccaaattcaagcgggagcataaccctgagccctgtgaaacctgggacacagggccc

SEQ ID NO: 14662 - DNA, 538 bp, Homo sapiens
  misc_feature 391: n = A,T,C or G
tccggggaaactttatatggttggggataagaattgaatgcaaattaatgaactagatttgcatttatggagttacctcatcatggagttaccttggtctgtcccacgtcaattaatcttgattccttattttcatagaccatcctctagaacagtgttttcacactgtgtatcatgatcctataatgcaggggtgtccaagcttttgtcttcccttggctacactggtagaagaattgtcttgggccacacataaaatatactaacactaatgatagctgataagctaaacaaacaaaaaaatcacaaaaaatctcataatgtttttttgagattgtgctgtttttttagttgtgttttcaatggagaaatacatcatctgttgtcccanaaaaaaaaaggttaatatgaataataataaataatattcaaaaaaaaaaaaaaaaaaggggcggccgttagactagtttagagaaaaaaccttccacaccttcccctgaacctgaaacataaaatgaatgcaattggtggtggtaac

SEQ ID NO: 14663 - DNA, 550 bp, Homo sapiens
tccggcgcgttcgtgcgtcctagttccagtacagcgtggagggtttaggcagcgtgttctgattctttgcgggacggcgagcgcatttgtgctttgcccgccgcggcctaggaggccttttgaggccgcgtagtcggtgtttttgaactgactctacagcttctggcaggccgtgcggcgccctgacccggcctcaccatgttggtgctgtttgaaacgtctgtgggttacgccatctttaaggttctaaatgagaagaaacttcaagaggttgatagtttatggaaagaatttgaaactccagagaaagcaaacaaaatagtaaagctaaaacattttgagaaatttcaggatacagcagaagcattagcagcattcacagctctgatggagggcaaaatcaataagcagctgaaaaaagttctgaagaaaatagtaaaagaagcccatgaaccgctggcagtagctgatgctaaactaggaggggtcataaaggaaaagctgaatctcagttgtatccatagtcctgttgttaatgaacttatgagag

SEQ ID NO: 14664 - DNA, 287 bp, Homo sapiens
cacgcgtccgcccacgcgtccgcggacgcgtgggctaaaacccatcaggcaagatcaccacgcattgagatattttcatatcaagataaagtcgcacattttccacaatacattgctaaaataaagaggagaaaggcttaggaagtttttttgcagagagtgctggtaaagaattgagcaagtttgctattgtattgtaatgtttctctcaggtttgttcttcctatcatgtttgatattccatgaataattgagatcagccctatgtaagttaagatcataatatg

SEQ ID NO: 14665 - DNA, 435 bp, Homo sapiens
ggacgcgtgggctccatctgagctcttgggtgaccaggtgcattgtcaatgagggtaatattttgaaagacatctttattatgagcagtaggtctcaacagtgggcttaaaatgtgcagtaaatcatgctgtaaacagatgtgttgtcatccaggttttgtgccatgtctagagcacaggctgagtagatttagcataattctgaaggaccccaggattttcagaatgataaatgtgcattcgcttccacttacagtcaccagctgcattaacccctaacaagaatcagcctgtcctttgtagctttggaggcaggcatgaacttctcctagatggcatcttccaagagggctatttttgtctacattgaaattctgcttagtgtagccacctgcttcaatgatcctagctagatattctgagtaactcactaca

SEQ ID NO: 14666 - DNA, 453 bp, Homo sapiens
atacggagttgaccacgcgtccgggcgccctctccagcaatcaagtcttgctccctggcctgccctccggcaccctggagccccgctttccacacagccttgctcctcccggcctggcttgctgcctgcaggcctctcagggtccttcaccgtctctccagtctcggatccggacccgtggatctcagcctcagaccctcctctggccccggccttgccctcgggcacggcccctttcctcttcagccctggggtcctgctccccgagccagaatattgtcctccttggaggtccccaaagaaggagtctcccaagatctcccaacgttggagggagtccaagcccagggggaacttgacataccaccagtacatgcccccagagccgagacggattcagggggcagacccccaagccgaggtgtccgccctgggtcctcctgggccatctct

SEQ ID NO: 14667 - DNA, 487 bp, Homo sapiens
agtcgacccacgcgtccggaaaatatcccaggttgtagcagcagtggaagttgctctcaagggagtggtattttacactatgctcatggcgacagtcagcaaactcacctgttgaagcaaggaagaagctccatgggcactggtctcagtggtgggaaacgtcctagtcaggaagaggacacacagagtattggtcctaaagtccagagacagagcactaattaggtaaatattttagagctgtatttcttgctttagaagagtatataattaacataaattaagataatttcaaaaatggagcaaatctctattttcaaaccagaaaatcttgaggcattaatttttaagcaatttttacaaactcagttaatttttggtcaagagacatgcatctgtactggagaaattgttgcaccagttttatattcatctgaaccaatgctctttaaattagagatgtttatgattttgtggtcaagttttt

SEQ ID NO: 14668 - DNA, 582 bp, Homo sapiens
gcgtccgccacctttcactcacctgaggactccacagaagatggtatattatgggaaaccttcttgtaaaaacaactatgagaattatattgacatagtgaaatatgtgttcagcgcttacaagagagagtcccctctcatcgtcaacactatgggatgggtttcagaccaggggctcctgcttctcattgatctgatccgattgctgtctcccagccacgtggttcagttccgctctgaccacagtaaatatatgccagaccttaccccgcagtatgtagatgacatggatggcttgtacacaaaaagcaagaccaagatgagaaatcgacgtttcagactcgcagcatttgcagatgctttggaatttgctgatgaagaaaaagagagtccagttgagttcactggacataaactgataggtgtttatacagactttgcattcagaataactccaagaaataggtaactaaccctcatttggctgaagaattatttttccttccgtcgaaaaagacctgccattctcaattcctctaaaggcctgagtcctctaagatcttcaggtccctgtcacagctg

SEQ ID NO: 14669 - DNA, 378 bp, Homo sapiens
agtcgacccacgcgtccgctgacgcgtgggcggacgcgtgggcggacgcgtgggctctcgcactctgttcttccgccgctccgccgtcgcgtttctctgccggtcgcaatggaagaagagatcgccgcgctggtcattgacaatggctccggcatgtgcaaagctggttttgctggggacgacgctccccgagccgtgtttactttcatcgtcgggcgccccaaacaccagggcgtcatggtgggcatgggccagaaggactcctacgtgggcgacgaggcccagagcaagcgtggcattctgaccctgaagtaccccattgagcatggaattgtcaccaactgggacgacatggagaaagatctggccccacacctt

SEQ ID NO: 14670 - DNA, 519 bp, Homo sapiens
gtcgacccacgcgtccgggcgccaggctagggcggcctggccactgagccggggtgcagtggcagcgggagagtacctggcgatggcgatatgagcggtgcgggggtggcggctgggacgcggccccccagctcgccgaccccgggctctcggcgccggcgccagcgcccctctgtgggcgtccagtccttgaggccgcagagcccgcagctcaggcagagcgacccgcagaaacggaacctggacctggagaaaagcctgcagttcctgcagcagcagcactcggagatgctggccaagctccatgaggagatcgagcatctgaagcgggaaaacaagggtgagccggcgcggggccctaggccggccctgcctccccaggcacactcaacactgccgctcccgcagcacagaaacacagccattaactccagcacacgcctgggctcagggggaacacaggacgatctccattacaagctcataatgaatcagacatcacagaagaaagatggcccc

SEQ ID NO: 14671 - DNA, 473 bp, Homo sapiens
tccgtgaaggccaagaccgagaggtgccagaagagaacaaacctccatccagacacgcgggcggaaaggctccaggggtccagggccagatggcgccgcctctgcccgactcagaaagagagaaacaagagccggagcagggagaggttgggaagaggcctggacaggccccaggccttggaggaggcgggtgatcttcctgaagatccccagaaagttccagaagcagatggtcagccagctgtccagcctgcaaaggaggacctggggccaggagacaggggcctgcatcctcggccccaggcagtgctgtctgagcagcagaacggcctggcggtgggtggaggggaaaaaggccaaggggggaccgccgccaggcaacgccgccggggacacagggcagcccgcagaggacagcgaccacggtgggaagccttcccttccagcggagaagccggcttcagggcctgggc

SEQ ID NO: 14672 - DNA, 470 bp, Homo sapiens
ccacgcgtccgcagaaacatatgtgtagtgtgctgcagcataagatggaagaacttaaagaaggcctgcggcaaagagatgagcttattgagaaacatggcttagttataatccccgatggcactcccaatggtgatgtcagtcatgaaccagtggctggagccatcactgttgtgtctcaggaagctgctcaggtcttggagtcagcaggagaagggccattagatgtaaggctacgaaaacttgctggagagaaggaagaactactgtcacagattagaaaactgaagcttcagttagaggaggaacgacagaaatgctccaggaatgatggcacagtgggtgacctggcaggactgcagaatggctcagacttgcagttcatcgaaatgcagagagatgccaatagacaaattagcgaatacaaatttaagctttcaaaagcagaacaggatataactaccttggag

SEQ ID NO: 14673 - DNA, 411 bp, Homo sapiens
ccgctcgcctgccaccggtgcacccagtccgctcacccagcccagtccgtccggtcctcaccgcctgccggccggcccaccccccaccgcagccatggacgccatcaagaagaagatgcagatgctgaagctggacaaggagaacgccatcgaccgcgccgagcagggccgaagccgacaagaagcaagctgaggaccgctgcaagcagctggaggaggagcagcaggccctccagaagaagctgaaggggacagaggatgaggtggaaaagtattctgaatccgtgaaggaggcccaggagaaactggagcaggccgagaagaaggccactgatgctgaggcagatgtggcctccctgaaccgccgcattcagctgggtgaggaggagctggaccgggcccaggagcgcc

SEQ ID NO: 14674 - DNA, 470 bp, Homo sapiens
  misc_feature 170: n = A,T,C or G
tttctgcatatcagtcagcataaataataaatccagaaaacgtgctgtatttgttgttgtttcctccatgggctttcccgccatctaatttgatatagacttcatctcccggctccaaatgaagaaccacactgttactggcatagtcgtaattctgatcagcatcttgngcaattgcactagcacgcacctacgtgaaacagacaagaattaggatgcgtaaatgagaattctcaagttttcttttttgccattcatgtagcatcacaagctgacttgctgccatagtacagaatttagcatagcaaagtccatgttgacctcaaagctttatgaggatagtgctgtggcagtttccgctacgttagtgagaaggaggacagaaagggacaaaatagtgcttcagtggggaccattctggcagtcttatctaactacacattctaaactatgcatacaatttattatct

SEQ ID NO: 14675 - DNA, 501 bp, Homo sapiens
gcgtccggctgcgggcggtcggggctccgggccggggcggcggcgccatcttgtgcccggggccggtggggaggccggggagggggccccggggggcgcaggggactacgggaacggcctggagtctgaggaactggagcctgaggagcccccggcagccaagaggaggaggaggagccgggactggtcgagggtgacccgggggacggcgccattgaggacccggagctggaagctatcaaagctcgagtcagggagatggaggaagaagctgagaagctaaaggagctacagaacgaggtagagaagcagatgaatatgagtccacctccaggcaatgctggcccggtgatcatgtccattgaggagaagatggaggctgatgcccgttccatctatgttggcaatgtggactatggtgcaacagcagaagagctggaagctcacttttatggctgtggttcagtcaaccgtgttaccatactgtgtgacaaatttagt

SEQ ID NO: 14676 - DNA, 389 bp, Homo sapiens
acccacgcgtccggcaaaccgggaaaggagaggatcccggagccggtgagaattctctgttttttctctaccatcctttccaggccttttcctcacctaatgagtcgtagagacgagggcccaaagaggtctgtaaggggctggtgaaagattagtggtccagggccctacatccgggagggggttcgggataaagagaactagtcttgggaacaatgtaggtgggaactttaaggaatgggaaaagcggcccttaaaggtggccggaggccccaatggaagtaaagcggaccctgtgtaggtatagagttgagtcaagtggagtcactgcctctgtccctctggtcagcgtgatggccagaggcctgggggccccccactgggtggcc

SEQ ID NO: 14677 - DNA, 406 bp, Homo sapiens
acccacgcgtccggccgggagtggtggtgggcacctgtaatcccagttactcgggaggctgaggcaagagaatctcttgagctcaggaggcagaggttgcagtgagctgagattgcgccactgcactccagcctgggtgacagagggagactccgtcccaaaaaaaagaaaagagaaacagctgtcacctcccgcaggacccaaatcctctctctgagcaccgtcatccaccacatggctgggcctgggttccaagaacaagccaagccttttagggcctaattgaaggttgaagccgccagtttcaccccaaaggagacagcccctgctcctagatgcccttggcctccgcagtgcagcccccaggtgtcctgactgaagcacaggccatagccccattttcccg

SEQ ID NO: 14678 - DNA, 462 bp, Homo sapiens
gcgtccgaagtggatgaaaattggtaccatggggaagtcaatggaatccatggctttttccccaccaactttgtgcagattattaaaccgttacctcagcccccacctcagtgcaaagcactttatgactttgaagtgaaagacaaggaagcagacaaagattgccttccatttgcaaaggatgatgttctgactgtgatccgaagagtggatgaaaactgggctgaaggaatgctggcagacaaaataggaatatttccaatttcatatgttgagtttaactcggctgctaagcagctgatagaatgggataagcctcctgtgccaggagttgatgctggagaatgttcctcggcagcagcccagagcagcactgccccaaagcactccgacaccaagaagaacaccaaaaagcggcactccttcacttccctcactatggccaacaagtcctcccaggca

SEQ ID NO: 14679 - DNA, 479 bp, Homo sapiens
tcacccacgcgtccgaagtatttgaagtgatgctggctacagaccgctcccactatgcaaaatgtaacccatacatggattctccacaatcaataggttttgctgaactgctgagccttggcagtgggcgcctttgaggcttaaaagtgcctcaagattctgtcaatcgggtggcatgctatcttcttttgacgcactattaccagccagcaaagaaaatcctggggagcttctgaaccccgaaggcacctgttaccaccgttcagtgaaacttgcttcagaggcagaaagaagcaggtttccaagcaacaatcagtgctccacacatgcatgcatatgcgctagaacttctatttgatcagttgcatgaaggagctaaagctcttgatgtaggatctggaagtggaatccttactgcatgttttgcacgtatggttggatgtactggaaaagtcataggaattgatcacattaaagag

SEQ ID NO: 14680 - DNA, 465 bp, Homo sapiens
ccacgcgtccggagagaatgggccgcgcgcgcccgcggccggggaaagcctgtcgggaacccgggagagcctggcccagggccccgacgccgcaaccaccgacgaactcagctctctcgggtctgactcggaggccaacggcttcgccgagcgccgcatcgacaagttcggcttcatcgtgggctcgcagggcgccgagggcgcgctggaggaagtacccctggaggtgctgaggcagagggagtccaagtggctggacatgctcaacaactgggacaaatggatggccaagaagcacaaaaagattcgtctgcggtgccaaaagggcatcccgccttctctgcgaggccgtgcttggcagtacctgtcaggaggcaaggtgaagttacagcagaaccctggaaagtttgacgagctggacatgtcccctggggaccccaagtgctgggacgtgatggagcgtga

SEQ ID NO: 14681 - DNA, 448 bp, Homo sapiens
cccacgcgtccggctttacaacgggcaaatactggaaaccatcggaggcaaacagctcagagtcttcgtatatcgtacagctgtctgcattgaaaattcatgcatggggaaagggagtaagcaagggagaaacggtgcgattcacatattccgcgagatcatcaagccagcaaagaaatccctccatgaaaagttaaaacaagataagcgctttagcacctttctcagcctacttgaagctgcagacttgaaagagctcctgacacaacctggagactggacattatttgtgccaaccaatgatgcttttaagggaatgactagtgaagaaaaagaaattctgatacgggacaaaaatgctctttaaaacattattctttattacctgacaccaggagttttcattggaaaaggatttgaacctggtgttactaacattttaaagacc

SEQ ID NO: 14682 - DNA, 396 bp, Homo sapiens
cttgaaccaggaaggcggaggttgtcgggggctgagattgcaccactgtgctccagcctgggcgacagagggagtccctttctcaaaaaaataataataaaaataaagatggcagtaggaaggtttcagcttgagatgctgtcttttcttctgtttttatgcataaatacaacgaagacgggagaggagatggaaagcaaagatgattaagtgaaataattgtgggaaacaatagagggatagactttgcttataggggatgtggacagagcagaaaaatgggaggaatggggaggattcagttagagaaggaagaaaccggtaccaaggggctggggctttaggccctggggcctccagtgcccgtataaggctgtggcagaagccctgcccatt

SEQ ID NO: 14683 - DNA, 245 bp, Homo sapiens
ggttttttggcctattttactggcttttccttctccaaactttgaggcgtgatttcattcattgaagaatcaatacatattttgtttcaaaatgtttgaaacaaaagacatagatggtagacttttattaaaacatatatggatgtggaaagcacatatattaatgcagtcatcccttttcaggtgggaagagagcaaaccagttgattttttaattcatccttagtacacagagaatatacttt

SEQ ID NO: 14684 - DNA, 552 bp, Homo sapiens
agtcacccacgcgtccgcaggggtgttaatgacattagcagcaagagctatgagaaataactttagacattatttcattgaaccttcccaactgaaattattttatgatgttataacatggatagtaactcaagtagcaataagttacacagttgtgccatttgtgcttctttctataaaaccatcactcacgttttacagctcctggtattattgcctgcacattcttggtatcttagtattattgttgttgccagtgaaaaaaactcaaagaagaaagaatacacatgaaaacattcagctctcacaatccaaaaagtttgatgaaggagaaaattctttgggacagaacagtttttctacaacaaacaatgtttgcaatcagaatcaagaaatagcctcgagacattcatcactaaagcagtgatcgggaaggctctgagggctgtttttttttttgatgttaacagaaaccaatcttagcaccttttcaaggggtttgagtttgttggaaaagcaattaaactgggggaaatggacagttatagataa

SEQ ID NO: 14685 - DNA, 548 bp, Homo sapiens
gtcacccacgcgtccggttaaaactgcctctttagatgtggatgccttaatgctgtaacacatttgaaaacattggcaatacttaagttgctgccatgattacagatggaattattggctaccaaagagacgcaattgatgatgagaagcatgattcttgcttccatataaccaaagttaatcttaattgcaatttgactccgtttccttggtagggatagactttcttcagattccaagtgctctcttaaatggcaaattaagttaaagaatactactgctccattcccctcacttattctccagttaattgcttgtcagttccatttcaagaaagcagtgatgttccaggtttgattcagttttcctgtgcacactattgccaaatttttttttagcaaagattctgcactggaacgtagacagttggaaacagtactacctactagaggtatgtgttttctctttctccccgctttcacctctttctttcccaattcaaaacagccaagtgagccctgttctggtattttgaatcattagagaaa

SEQ ID NO: 14686 - DNA, 347 bp, Homo sapiens
tcgacccacgcgtccggctctgcccagtcgacccggtctcctccggcttccctccggccaacagcgcgctcaggctcgcctcaggcccctccaacggaacaggagtcgaggggcagtgaggccgggatgcgtgcgagcgcggggcgcggctggcgctgggccgtgggggcggggcggcgtgcgtgccagcggcgtgcgattctgtgaggcctgctctgcgccggcggggaagcgcgggcgacgctacgctggacgtccttacctgccggaggagagaaagtgccgtcagctgtaggggcgtcttttaatcgtttcgctgaaattagcagttccgagcttcggagccc

SEQ ID NO: 14687 - DNA, 502 bp, Homo sapiens
gcgtccgcggacgcgtgggcggacgcgtgggcggacgcgtgggcggacgcgtgggcggacgcgtgggcggacgcgtgggcggacgcgtgggcggacgcgtgggagaatgtgctataccccagaaattccatcgatctgtcatgggccccaaaggttccagaatccagcagattactcgggatttcagtgttcaaattaaattcccagacagagaggagaacgcagttcacagtacagagccagttgtccaggagaatggggacgaagctggggaggggagagaggctaaagattgtgaccccggctctccaaggaggtgtgacatcatcatcatctctggccggaaagaaaagtgtgaggctgccaaggaagctctggaggcattggttcctgtcaccattgaagtagaggtgccctttgaccttcaccggtacgttattgggcagaaaggaagtggggaccccaagatgatggatgagtttggggtgaacatacatgttcc

SEQ ID NO: 14688 - DNA, 523 bp, Homo sapiens
gcgtccgctggaggcactggacgagatgctgacgcacgacatcgccaagctcatgcccctgctgcggcaggaggagctggagagcaccgaggtgggcgtgcaggggggcgcttttgagggcacccacatgggcccgtttgtggagcggggacctgacgaggccatggaggacggcgaggagggctcggacgacgaggccgagtgggtggtgaccaaggacaagtccaaatacgacgagatcttctacaacctggcgcctgccgacggcaagctgagcggctccaaggccaagacctggatggtggggaccaagctccccaactcagtgctggggcgcatctggaagctcagcgatgtggaccgcgacggcatgctggatgatgaagagttcgcgctggccagccacctcatcgaggccaagctggaaggccacgggctgcccgccaacctgccccgtcgcctggtgccaccctccaagcgacgccacaagggctccgccgagtgagccgggcccccctcccat

SEQ ID NO: 14689 - DNA, 566 bp, Homo sapiens
gcgtccgcctggctaacatggccgaaaggtcgtattctccgggggaggacggaggcccggagaggagggggtggagtgcctggttttccagtcaggcggccggagggcagccctcaagaacggccctgaccgcccgcggggtgaggggccctttctgggcaggacccgccccttggtcccgcagagccttggtacttggacctgaaccttgctccgagagggagtcctcgcggacgtcagccaagattccagaatgactactatcttgacttacccctttaaaaatcttcccactgcatcaaaatgggccctcagattttccataagacctctgagctgttcctcccagctacgagctgccccagctgtccagaccaaaacgaagaagacgttagccaaacccaatataaggaatgttgtggtggtggatgggtgttcgcactccatttttgctgtctggcacttcatataaagacctgatgccacatgatttggctagagcagcgcttacgggtttgttgcatcggaccaatgtccctaggaagtagttgattatatcatctttg

SEQ ID NO: 14690 - DNA, 438 bp, Homo sapiens
gtcaccacgcgtccgggggacatggtggtgagcaggacagaattcctgtcctcatgagtcttacattctagaaggaaggagcagataaaatctaaataaggttatgagattgtgacgaagcgtccgattacacctcaacaagaaggcaactgacaaacagccttatagcaagctcccaggtgtctctcttctgaaaccactgaaaggggtagatcctaacttaatcaacaacctggaaacattctttgaattggattatcccaaacctttatttttctcggtagcaccaatgaaaagaatagagaagacacagatgtgatagccttaatgcagcacttattaatatgaagtgctcctttgtgtacaagatcatgatgatccagccattgatgtatgtaagaagcttcttggaaaatatccaaatgttgatgctagatt

SEQ ID NO: 14691 - DNA, 349 bp, Homo sapiens
  misc_feature 76, 83, 86, 93, 94, 95, 102, 105, 132, 150: n = A,T,C or G
cagccgggctagcttctcctgcatctcccgaacgtgctccagctgctcaaaggagcgttccttccctggaacgaancccctgnctnaaccctnnnaaagagnccnggaaccctggaaccctggaaccatggncccagccatcccccatgnactgggccctacagccctatccacacacccgctgaaaccagcccccaggactcaccgaaggcctgggggcggccagagtggaaatcattgagcaggttcaggagtcccccctccatctcatagacatcagtcacctcggtcaggaaggagtgctgcaggggcgtgcctgcagagccgcttccacctccagccaggactg

SEQ ID NO: 14692 - DNA, 340 bp, Homo sapiens
  misc_feature 77, 145: n = A,T,C or G
cggttctcgtctcctcccggccggcggagcgagtggaggctgcagcccagctcgtctcggcgcccgcgtcgccgtcncgaagccccccgccccgcttccgccgcgtcggaatgagctcccggaaagtgctggccattcaggcccnaaagcggaggccgaaaagagagaaacatccgaaaaaaaatcaagcagaagattgagctgctgatgtcagttaactctgagaagtcgtcctcttcagaaaggccggagcctcaacagaaagctcctttagttcctcctcctccaccgccaccaccaccaccaccgccacctttgccagaccccacacccccggagc

SEQ ID NO: 14693 - DNA, 357 bp, Homo sapiens
  misc_feature 11: n = A,T,C or G
cgcgtcctcgnacgcgtgggcggccactcatttgcattatcttaaatcacaaataattacttaattggctggagtgtgtgctttgcaacttttataccagagtaaaatttgtatttaaaacaaaaaataagaatgcccatcactaggagaaacactcctcacagaaaacacacacacacacacacacacacaatttaaaaactgagtaaatttaaatgtatgaaagtacgggacaaattgatttcaacaaataaatttcatttctctagctacttatgtctggccttattttgagcgttacaattttattgccttcatttgcctatttagactgatgtagtttgatatgatgaagtt

SEQ ID NO: 14694 - DNA, 371 bp, Homo sapiens
gagtcgacccacgcgtccgccccgcgtccggttagttctacctggtgcccatgttctgattgtgtgtgggattgcatggtgtcctgattgcatctaggtggagcggatggaatgtgctgggccactgttgggtggagagcagcacattcttacagaggagatggagcgttatgagcatagtatgtggataggtatcttcacctgcccgcccctgagtcagcctccttgacttgatagcttgaagaatccttttccactgaaatagaggataattaattgacacatctgaaatccccaatcaatcaatcaagagaaaggtagaactaaaaactccttaacttactgttgcttacacccctgaaagtctgttt

SEQ ID NO: 14695 - DNA, 341 bp, Homo sapiens
  misc_feature 62, 74, 79, 80, 82, 137, 138, 139, 144, 145, 146, 147, 148,149, 153: n = A,T,C or G
cgtccggcgccctccagccccgtccgggagtccccggcccgctgcggtgccgtgagtacctncaaccccctgcnccccnnanggaggcccaggggcttagccaccagggctcggaagtgggggccgaatccggtgcnnngcccnnnnnnaggngagcagagccggagttggggagactggttgctgaaaagccaggagtcaaaatgactgagcgctttgactgccaccattgcaacgaatctctctttggcaagaagtacatcctgcgggaggagagcccctactgcgtggtgtgctttgagaccctgttcgccaacacctgcgaggagtgtgggaagccc

SEQ ID NO: 14696 - DNA, 365 bp, Homo sapiens
  misc_feature 104: n = A,T,C or G
gggagccgacccacgcgtccggtgcactcaacagaacggcccttcaaatgtgagaaatgtgaggcagctttcgccacgaaggatcggctgcgggcgcacacagnacgacacgaggagaaagtgccatgtcacgtgtgtggcaagatgctgagctcggcttatatttcggaccacatgaaggtgcacagccagggtcctcaccatgtctgtgagctctgcaacaaaggcttcaccacggcagcatacctgcgcatccacgcggtgaaggaccacgggctccaggccccgcgggctgaccgcatcctgtgcaagctgtgcagcgtgcactgcaagacccctgcccagctggccggccacatgcagac

SEQ ID NO: 14697 - DNA, 356 bp, Homo sapiens
  misc_feature 78, 95, 152, 153, 154, 157, 160, 161, 163, 164, 165: n = A,T,C or G
acgcgtccggcggtgccgcggggatggcgggagccggagctggagccggagctcgcggcggagcgggggcgggggtcnaggctcgagctcgcganccaccgcccgcgcaccgcgcacatcctcgccaccctcggcctgcggctcagccctcnnnccncannannnatggcggttcagggggcctggggtctggggacaacgccccgaccactgaggctcttttcgtggcactgggcgcgggcgtgacggcgctcagccatcccctgctctacgtgaagctgctcatccaggtgggtcatgagccgatgccccccacccttgggaccaatgtgctggggaggaaggtcctctatctg

SEQ ID NO: 14698 - DNA, 377 bp, Homo sapiens
gcgtccggcgtgtaaccagccggagcggcgcggcagcggcaggaccgccgtggcgcctagagtagcgacccggggggagcgcggggcgacgctggctgcagggacccggtgacagcgtgagaggttcgcagagtactaggttttgacaagcttgcatcatgcgtgagtataagctagtcgttcttggctcaggaggcgttggaaagtctgctttgactgtacaatttgttcaaggaatttttgtagaaaaatacgatcctacgatagaagattcttatagaaagcaagttgaagtagatgcacaacagtgtatgcttgaaatcttggatactgcaggaacggagcaatttacagcaatgagggatttatacatgaaa

SEQ ID NO: 14699 - DNA, 80 bp, Homo sapiens
acccacgcgtccgcacgccagtgcctccctttacctactaatgaggcaaaactttgagattggtgaataacatttgccag

SEQ ID NO: 14700 - DNA, 426 bp, Homo sapiens
gcgtccggttttcccactgcagctttttaatggttaaccttcatctaattttttttctcccactggtttatagatcctctgacttgtgtgtgtttatagcttttgtttcgcggggttgtggtgaggaaggggtgatggcatgcggagttctttatcttcagtgagaatgtccctgcccgcctgagagccagcttccgcgttggaggcacgtgttcagagagctgctgagcgccaccctctacccggctgacatacaacacagacctgtgccgaatgctaatttgtggcttttacgaccctaccccaccccctgttttcaggggtttagactacatttgaaatccaaacttcgagtatataacttcttattgagcccaactgctttcttttttttttttcgccttccctgccccttttccatttctt

SEQ ID NO: 14701 - DNA, 501 bp, Homo sapiens
gcgtccggtgagattctaccgtagtgggcggggacagagtgccctgcaggagattctgggcaaggttatccaggatgtgctagaagacaaagtgctcagcgtccacacagaccctgtccacctctataagaactggatcaaccagactgaggcccagacagggcagcgcagccatctcccatatgatgtcaccccggagcaggccttgagccaccccgaggtccagagacgactggacatcgccctacgcaacctcctcgccatgactgataagttccttttagccatcacctcatctgtggaccaaattccgtatgggatgcgatatgtggccaaagtcctgaaggcaactctggcagagaaattccctgacgccacagacagcgaggtctataaggtggtcgggaacctcctgtactaccgcttcctgaacccactgtggtggctcctgacgccttcacattgtggccatggcagctggtggagccctggctgcccccc

SEQ ID NO: 14702 - DNA, 319 bp, Homo sapiens
  misc_feature 31: n = A,T,C or G
aggggagggaaatttatttctctgcttttcntattatacaagttgtttacagaaactgcaaattaaaaaattacactggcatttgcagtccttaaaataaattaaaagttctcaacttttttttttttgctaaacatttttttaagtatgagtccttgtttaaaaagaaaaagattaaaacagaaaatattttctataaataatacatgtattttggttttagtgctcccgccctaaggtttgaagtttacttttatccagtacctttttcctccatgatcaccttttttcgtctttcccctttcccactcgtgcacac

SEQ ID NO: 14703 - DNA, 365 bp, Homo sapiens
cgcgtcctacatccccaggcacatccggaaggaggaaggttcctttcagtcctgctccttctgcgggggcaagagattcactaccatgatggtcacactcaactgccctgaactacagccacctaccaagaagaagagagtcacacgtgtgaagcagtgtcgttgcatatccatcgatttggattaagccaaatccaggtgcacccagcatgtcctaggaatgcaggcgcaggaagtcccagacctaaaacaaccagattcttacttggcttaaacctagaggccagaagaacccccagctgcctcctggcaggagcctgcttgtgcgtagttcgtgtgcatgagtgtggatgggtgcctgtggg

SEQ ID NO: 14704 - DNA, 344 bp, Homo sapiens
gcgtccgcccgagagaagaggtacggtcgaagccaggagccaggccgagcgggagctgaccaggcttgactcgggtacagaacgaggcaccagtccccttgcgaaccgaagggcctcgcagtggatggaggaggcccagccctgaggtcaacgccaaccaggctagcctggcacggggcctacagggtgggtaggcgggcgtgccgcagccgtccagggccttccctcaggtcccgggcgaggggcctacgctgcggcccggcaacaaggcccgactcggcccctcgggaccagagccccacccgatcggaagcggatcctttaccagggccatatgccagtga

SEQ ID NO: 14705 - DNA, 483 bp, Homo sapiens
ctaacagagcccataggggaaatagagtcacttgtgagtacatgccttttgaggtgaccttggctctcagcacaagatatttacagcctttgagcttgatattctagaattgctacagagattagctctggaaaagaaatagactagaaggataaagggaaggaatcatagcttatgaaggttttactctgcatcagaccgctttctagttctatgacttaacgtcctataggctgtaaggttctctgcgtgaacacttctttcctggcctcctttctgccccattccttttaaactcagttgctgagtttattatcccctgtgcatccctgggcatgttcattcacatatgaaacaatcaggtagaccttgctatttcttatctctgatttgatggaaaatataatctttggcgctgcagtgggaatattggtttggggttggatacttacaaaccctctgatcttgggcttaaattatact

SEQ ID NO: 14706 - DNA, 451 bp, Homo sapiens
cgacccacgcgtccgcgttgaacagctttaagaacaatgtgaatgaaatcttagcaacttggttagtaatctgaaaagtctattaatgtatacttgaaattctgtttgtataaaaatgcattttcccctttattttaacactgtgtaaaagaacattatgcatgtgagtggtttgagaattaaatggtttaatactcaaaaaaaaaaaaaaaaaaaaaaaaaaaaaaaaaaaaaaaaaaaaaaaaaaaaaaaaaaaaaaaaaaaaaaaaaaaaaaggggggggcctttaattttttttaaaaaaaaaacttccaaaccttcccctggaccttaaaaaaaaaaagaaggccattggggggggaaacctggtttttggccctttaaaggggtccaaaaaaaggaattgccttccaaatttccaaaaaaaagcctttttttcaccggattttaa

SEQ ID NO: 14707 - DNA, 538 bp, Homo sapiens
ggtgtcgacccacgcgtccgggctgccgtaacaatcgcccaaacctggtgacttaaataacaaatatttattttctcgtagctctggaagccggaagtccaaaaccaataacttggcagggctgtgctccctctgggagatctcggggagcctccttgctacatgttccgcttctggggacttctggtggtgtttccctggagggccaaggcctccgggcggcccgtgcattcggtgaacacctccaaagagctctgagtcacaaagccttgggaaactttattttattctttctaggacattatcagtagtcccgaggagacatcaattacaaaacaaaaaaaaaaaaaaaaaaaagtgcggccgctagactagtctagagaaaaaacctcccacacctccccctgaacctgaaacataaaatgaatgcaattgttgttgttaacttgtttattgcagcttataatggttacaaataaagcaatagcatcacaaatttcacaaataaagcatttttttcactgcattctagttgtgg

SEQ ID NO: 14708 - DNA, 424 bp, Homo sapiens
  misc_feature 366: n = A,T,C or G
cccgacgtagccgcatcttctttggtcgccgccgagccacatgtggacaccagggaggtgaagtcgggtcaacggttggtcgtatgggcgcctgtcaccaggctgcttttactttggtaaagggatattgtgccatcatgacccctcattgacctaaactacaatggtttacatgttccaatatgattccacccatggcaaattcatggaccgtcaagctgaaaacgggaagctggtaatcaatggaaatcccatcaccatcttccaggagcgagatccctccaaaatcaagtggggcgatgctggcgctgagtacgtcgtgggagtccacttggcggtcttcaccaccatgggagaaggctgggngctcatttgcagggggggagccaaaaggggtcatcattctctgccccctctgctgatg

SEQ ID NO: 14709 - DNA, 541 bp, Homo sapiens
cagctgagtgtagtttacttcggtcttgcctcactgggaggccacgttggtgacgatgcacacgaagccccggtacttgtccaggttaaccatgtgcccgtcgatgtccttggcggaaaactcgtgcatggagcgcgcacagcgccagtcgtcccgggacgcgcacgggtcctgggacttgggacattcgtggatctccggtcgcaagctgcggggacaaggcttcttccgccggcgccgcgccctcctgcgcctgcacgctggggccttccgccgccgaggggctcgcggccgctagactagtctagagaaaaaacctcccacacctccccctgaacctgaaacataaaatgaatgcaattgttgctgttaacttgtttattgcagcttataatggttacaaataaagcaatagcatcacaaatttcacaaataaagcatttttttcactgcattctagttgtggtttgtccaaactcatcaatgtatcttatcatgtctggatccccgggtaccgagctcgaattaattcctcttccgc

SEQ ID NO: 14710 - DNA, 481 bp, Homo sapiens
gcgtccgatcggaagtggcgctcgtgcattcaacttgttcccgctcatggaacccctctttaaaaagacgcagggcacctgtgagcgcaggagcgagcctaaggccacccagcggcagcgcccgtgtcctgggcactcagcgtgctgggcagagcaggtgcgatggccccagtcctagcagccctcgcccatgtcctgtgcccttacatggctcccggactgtgcagggagccgatacgtttgctgatagcaatactggaaccaccgggtgcgatggcagtgaggagactgcccagtgcctttggggctgtgcttgcaataaagaaagaatttcctggaaaggcagtctgcaaaagagggaaccggtgactcagaaagacagatgttttggtaatttaccccaaatgtgccatccacatagtgctttttcctcttgcccttcggcttgtttgaatctcacaattatgtatttaattctcaa

SEQ ID NO: 14711 - DNA, 532 bp, Homo sapiens
  misc_feature 466, 467, 505, 514: n = A,T,C or G
cacgcgtccggtcgaagcgaggacgtggtgggtcctctggtgcgaaattccggatttccttgggtcttccggtaggagctgtaatcaattgtgctgacaacacaggagccaaaaacctgtatatcatctccgtgaaggggatcaagggacggctgaacagacttcccgctgctggtgtgggtgacatggtgatggccacagtcaagaaaggcaaaccagagctcagaaaaaaggtacatccagcagtggtcattcgacaacgaaagtcataccgtagaaaagatggcgtgtttctttattttgaagataatgcaggagtcatagtgaacaataaaggcgagatgaaaggttctgccattacaggaccagtagcaaagggagtgtgcagacttgtggccccggattgcatccaatgctggcagcattgcatgattctccagtatatttgtaaaaaaaaaaaaaaaannaaagtgcggccgctagactagtctagagaaaaaacctnccacacctncccctgaacctgaaacat

SEQ ID NO: 14712 - DNA, 484 bp, Homo sapiens
gcgtccgtggtagattggccctaagaagcccctgcctgaccacgtgagcattgtggaacccaaagatgagatactgcccaccacccccatctcagaacagaagggtgggaagccagagccgcctgccatgccccagccagtccccacagcataacagggcctccttggcagctgtattctggagtctggatgttgctctctaaagacctttaataaaattttgaacctggctatagattgaacacagggttatgcaattcccggccaggagcgcggccgctagactagtctagagaaaaaacctcccacacctccccctgaacctgaaacataaaatgaatgcaatggttgttgttaacttgtttattgcagcttataatggttacaaataaagcaattgcatcacaaatttcacaaataaagcatttttttcactgcattctagttgtggtttgtccaaactcatcaatgtatcttatcatgt

SEQ ID NO: 14713 - DNA, 499 bp, Homo sapiens
  misc_feature 314, 315, 317, 324, 370, 379: n = A,T,C or G
cgaccacgcgtccgtgacaatcgagtagtactcccgattgaagcccccattcgtataataattacatcacaagacgtcttgcactcatgagctgtccccacattaggcttaaaaacagatgcaattcccggccgtctaaaccaaaccactttcaccgctacacgaccgggggtatactacgggcaatgctctgaaatctgtggagcaaaccacagtttcatgcccatcgtcctagaattaattcccctaaaaatctttgaaatagggcccgtatttaccctatagcaccccctctaccccctctagagccaaannanaaaaaanaaaaaaaaaaagtgcggccgctagactagtctagagaaaaaacctnccacacctncccctgaacctgaaacataaaatgaatgcaattgtttgttgttaaacttgtttattgcagcttataatggttacaaataaagcaatagcatcacaaattttacaaataaagcattttttt

SEQ ID NO: 14714 - DNA, 520 bp, Homo sapiens
  misc_feature 319, 342: n = A,T,C or G
agaatatctgtgtgcttagggaggaaactttttgatctgcagaaaagccagaagacatctaggacatccataaaaattcatcagagagcattttactactgagctgcaaagggaaaaacttaaaatggatatgaaaagtgaagaaagtgatcataggagaaaaccatttcagatgacaagagcacctcaaaggcagcagcctcaaggagcagccatggccccagacttgtcgcacggatgcagaaaacttaatggaggaggctgaggtcagaatgggaagagtttttaaaaaataaaaaggggagctaatatgtgaggnacaaaaaaacaaccaaaaaaaanaaagtgcggccgctagactagtctagagaaaaaacctcccacacctccccctgaacctgaaacataaaatgaatgcaattgttggttgttaacttgtttattgcagcttataaatggttacaaataaagcaatagcatcacaaatttcacaaataaagcatttttttcactgcattct

SEQ ID NO: 14715 - DNA, 469 bp, Homo sapiens
tccggttaaatgtgccatttcccgggttgatgctgccacactttgtagagagtttagcaacacagtgtgcttagtcagcgtaagaatcctcactaaagcaggaaaagttccattcaagtgccaatgatagagtcaacaggagggttaatgttggaaacacaatcaggtgtggattggtgctactttgaacaaaaggtccccctgtggtcttttgttcaacattgtacaatgtagaactctgtccaacactaatttattttgtcttgagttttactacaagatgagactatgggatcccgcatgcctgaattcactaaagccaaggtctgtaagccacgctgctcttctgagacttccattcctttctgattggcacacgtgcagctcatgacaatctgtaagataacaatcagtgtgggatttccactctttttcagtcctttcatgttaaaagatttagacaccacat

SEQ ID NO: 14716 - DNA, 496 bp, Homo sapiens
  misc_feature 392, 393, 398, 403, 415: n = A,T,C or G
ggtgtcgacccacgcgtccggagcagcagccatggccctacgctaccctatggccgtgggcctcaacaagggccacaaagtgaccaagaacgtgagcaagcccaggcacagccgacgccgcgggcgtctgaccaaacacaccaagttcgtgcgggacatgattcgggaggtgtgtggctttgccccgtacgagcggcgcgccatggagttactgaaggtctccaaggacaaacgggccctcaaatttatcaagaaaagggtggggacgcacatccgcgccaagaggaagcgggaggagctgagcaacgtactggccgccatgaggaaagctgctgccaagaaagactgagcccctcccctgccctctccctgaaataaagaacagcttggcnngatanaaaanaaaaaaaaaaanaagggtgcggccgctagactagtctagagaaaaaaccttccacaccttcccctgaacctgaaacataaaatgaatgcaatt

SEQ ID NO: 14717 - DNA, 386 bp, Homo sapiens
  misc_feature 342: n = A,T,C or G
cgaccacgcgtccgcagggaacgtgattagtgaaaggaagataaacgtggatgttactccaaaacttcgtttaatgaatgcttaaagaattcaaattttatctgcctctcttgtaatttggatctcttcttaatgtacatagtgctaacatgaagacctttttctgcactatatgcaaacagggtaactaactaaaacaaagccactttcaatcttcaatccttgaaggtatatctaggtttatgacagtaattgtgtttacattttatggtgcctagtattgacaaaatgttatttccctacattaaacatgactccatagaccttttcatttgtgggttnttatttcctatgatgtatactgccactaaccttccaaaaattac

SEQ ID NO: 14718 - DNA, 538 bp, Homo sapiens
cgacccacgcgtccgcgagtcccgcgttctctccttgaatccactcgccagcccgccgccctctgccgccgcaccctgcacacccgcccctctcctgtgccaggcaaggtgaccccatggcaaggcgcaagccagaagggtccagcttcaacatgacccacctgtccatggctatggccttttcctttcccccagttgccagtgggcaactccaccctcagctgggcaacacccagcaccagacagagttaggaaaggaacttgctactaccagcaccatgccctaccaatatccagcactgaccccggagcagaagaaggagctgtctgacatcgctcaccgcatcgtggcacctggcaagggcatcctggctgcagatgagtccactgggagcattgccaagcggctgcagtccattggcaccgagaacaccgaggagaaccggcgcttctaccgccagctgctgctgacagctgacagccgcgtgaacccctgatggggggtgtcatcctcttccatgagacactctaccagaag

SEQ ID NO: 14719 - DNA, 568 bp, Homo sapiens
acgcgtccgacaacatttggcatcagggttgtatctgttggtggaggacacaacgccaaaaggaaatgggatttcctggttaggcctgcggcttggcagatgattgttatgggaaagacactgagtctgtttaggcaatttcttcctctttactaataaagtgttcctattttgaaagcaatgctgagttgtggacatgtgtataaaccgtaatgctgtaagttaggcctctcttgtctagaatctcagcctcttcatactctctcccccttttttgccatattattttccttatcactaactatatattttacctgtctcacttactatctgtctctcctctcagagtgttactccaggagggcagagataactgtttagtccaggctgtgccttcggtgctcaaaataatgcctgggtgcaaaataaatatatcttgaatgaaataatgaagtaatctttaaaatggtgctccgagcataattttcatatagtaacacaatagtttgcattagttgtctctttcagggatatggaattgttcaacataagaaaatcaggcctggca

SEQ ID NO: 14720 - DNA, 562 bp, Homo sapiens
gagtcacccacgcgtccgaatttgttttatggattgaatcatgtctcctctaaaaagatttattgatgttctaaccctccatgtctcgtattgtaaccttatttggaatagggttgttgcagaagtaattagttacattaagatgaagtcatgctggagtagggtgagcccctaatctaagaggactggtgtccttataggaagaggaaaatgccacatgaagagagagagagatgcccaaggaggtgtcatgctgcaatgagggcagagattggaactgtgcagctgcatgccaaggaacaccaaagatttcagcaaactactggaagctaggaaaaagcaaagaattcccctaaatatttcagtgggagcatagccctgccaacaccttatttcagatttctatcctccacaactatgaggcaataagctactgctgttttaagctcctcagtgtgaactattttgtcatggcagccttaggaaactaacacaatttacaaacagattaagttcactaatcaaaagacagccacttgcaattgggttttttttttttagc

SEQ ID NO: 14721 - DNA, 539 bp, Homo sapiens
ccacgcgtccggcgggtgagccgctggcgcgccgggccgggcgggggattggctgagggcgacgcgagagaggggagacccggactgaggagaggacggggtggagggtccgggccggaggctagcctgaggagaccgggggcggaggggagacccgggccgcggaggaaagggatggaggagaggaagccgccgggcgccagcgggacccccgggctgaggggagaggcgccccaggccgggtgaaaagtggccgaggagacctgggctgggctggcaagtcccggaccggggaggaggggagcagccctccgatgtgagggatcgcagaggaatgagcttcgttctggattaaaaaaaaaaaaaaaaaaaagtgcggccgctagactagtctagagaaaaaacctcccacacctccccctgaacctgaaacataaaatgaatgcaattggttgttgttaaccttgtttattgcagcttataatgggtacaaataaagcaatagcatcacaaatttcacaaaaaagcatttttttact

SEQ ID NO: 14722 - DNA, 460 bp, Homo sapiens
gagtcacccacgcgtccgcagcgctcgccccctgccctgagaacaggaaagggcccggaagggctgactcaccgggccgacgctcacacgaaaatgggatgcactttatttgctggtgcaaaggcaggtgagggtgcctactgtgtgaccgctggccctactgcctggtggcgctgaagggaaggagccagtgagcctgaccccgggaggggccgtccccgtgtgccgcgtttggcggggccccacgcggctcccccaggcccgggtctggggccccaggctttcccctgacttgcggacgatcgtcccaggctttgggtttcttggatgggggttcttaatgccagacatcagtacataagtgcattctgaaagaggttccagctatcacttgtgaccatatatatatacatatatattcgatctacaaagggtttatttgcgagatggattaacggtg

SEQ ID NO: 14723 - DNA, 571 bp, Homo sapiens
gcgtccttgatattttgagaaaaatacatgtgagtcattttttctgtttctcttttctcttaacgattatcactgtaattctgaatctgaaaggtaaaacaattagtcaaaatattattgccatcattctacctgtgttatgaaactacttattcatagttaattctcattaacacttacatttccataaagaaaactcaagtattaataaaagagactttactggcttaagagggctgtgaaagatttttgatagtgaatcatgaccctaagggagagatttgtgtgataaaagtattgtatataatagatcagcgatttttgtaaggcaaacagaatttgtaagttggcagatcttcctaagttgcaaaatgtaatgatgagcttggtggagaagaatgagtcgttcttggaatacctatgtgcagccactacccatctcaatgtcaccttgtttgcattcttggatagcttgtatatgtagtagtttgatgaataatttaaagaaaaacacctaaaatttgaaaaatgattgtagggatcaaaaaaggcagatgaaattacttaatac

SEQ ID NO: 14724 - DNA, 520 bp, Homo sapiens
cacgcgtcgtgcctgacccattcctgatccaaggccaggtggttgtcttattgcaccatactccttgcttcctgatgctgggcaatgaggcagatagcactgggtgtgagaatgatcaaggatctggaccccaaagaatagactggatggaaagacaaactgcacaggcagatgtttgcctcataatagtcgtaagtggagtcctggaatttggacaagtgctgttgggatatagtcaacttattctttgagtaatgtgactaaaggaaaaaactttgattaaaaaaaaaaaaaaaaaaaaaaagtgcggcggccgggcgcgcggggtgggcggcgagcggagccggccggagcgggccgggcagcggccgctagactagtctagagaaaaaacctcccacacctccccctgaacctgaaacataaaatgaatgcaattgttgttgttaacttgtttattgcagcttataatggttacaaataaagcaatagcatcacaaatttcacaaataaagcattt

SEQ ID NO: 14725 - DNA, 582 bp, Homo sapiens
gcgtccgacaaaaggaacataagcgaaacacacaaaccagcctcaacttacacttggttactcaaaagaacaagagtcaatggtacttgtcctagcgttttggaagaggaaaacaggaacccaccaaaccaaccaatcaaccaaacaaagaaaaaattccacaatgaaagaatgtattttgtctttttgcattttggtgtataagccatcaatattcagcaaaatgattcctttctttaaaaaaaaaaaatgtggaggaaagtagaaatttaccaaggttgttggcccagggcgttaaattcacagatttttttaacgagaaaaacacacagaagaagctacctcaggtgtttttacctcagcaccttgctcttgtgtttcccttagagattttgtaaagctgatagttggagcatttttttatttttttaataaaaatgagttggaaaaaaaataagatatcaactgccagcctggagaaggtgacagtccaagtgtgcaacagctgttctgaattgtcttccgctagccaagaacctatatggccttcttttggacaaaccttgaaaatgtttatttaaa

SEQ ID NO: 14726 - DNA, 574 bp, Homo sapiens
gcgtccaagaggttatcccataccttttcccaaattcccttgtcattaattttccaattatgcttcttccaagtgcctgaccatccagccaaaccattggctacagcccatgaatcagtatacaatggcgctactggtcatttctctttccatacaaagtgcacaacctggtatactcttcaaagttctgcccactgggaagatttgccttcaccactgtccttcagggataggggctatagagctgcagctgtccactttcaggtggtgcctgcatatcgtgcataaccatctgtgaaccaagccctagtcttgtcttcctctgtcaactgatcatagggaactccccatgaggccatcagtgcaggctaagggaaagaaggcaaggtggcaggagtggagaccatggacatttgagctactttctcaggtaacttacttgtgtcttcaggacctgctcaagccagatcacatatataccactttaatttgatgatttgatgctgaatgctgctgtgcatggcccccttgatggctagatgggtcagaaagcacccagttcataataagcaat

SEQ ID NO: 14727 - DNA, 537 bp, Homo sapiens
gcgtccgctaacacttaaaggatgaagagaggaaaaatctacagtgtaggcacagaaatgcctagaaatgagagaaaaaaaaaacaggagcgcatactgcctcagaaacaccaagagtagtttgggaagaaaggagtcaacaataacaactatcaaaggaatgaatggccaacagtgtagcctcaagtagggtagtgtgagtagttgatagaccaaaaatcctcagcaaaatactagcgaacagattcaacagcatactgaatggattatacaccatggccaagtgggatttatcccaggaatacaaaggtagttcagcattagaaaatcaatcaatgccaacacacctcattaacagaaaaagtaaagaactgcatacatgatcccacaattgatgctgaaaaggcatgacaaaatccaacatgctttcatgatttaaaaaaaaaaaaaaaaaaaaaggtgcggccgctagactagtctagagaaaaaaccttccacaccttcccctgaacctgaaacataaaatgaatgcaattg

SEQ ID NO: 14728 - DNA, 527 bp, Homo sapiens
agttaccacgcgtccgccacacttgaccccagagatcacgccactgtcagctgccctggctcaaacaattgcccagggaatggcacctccacctgtctccatggctcctgtggctgtatctgtggctcctgtggcccctgtggctgtatcgatggcccaacccttggcaggaatcacaatgagccacaccaccactcccatggtgacttaccctatcgcttcccagagcatgcgcatcacggccatgccacactgatggggctaatggacactcccctggtatagcctcgcagggctggggtcagggggcccttgcccactcacctagccttccccatccctgtctgaagggctcccttgagaactaggacaagagactacaaggagtatgtcctgaggaggggttgggatggtgttgttttctctcacctcccttttatgagggtcctcttgtccatcttcaagcctcacagtgggggcttgcagaggagtgcagactgaagccagcagagaggaaagactgactg

SEQ ID NO: 14729 - DNA, 371 bp, Homo sapiens
ccacgcgtccgtggcaggagaggttcaaatgcattgcatcaacctactatagaggagctcaaggtaaggggctgggtgaagtggggtaggtgggtctcagagtgcacatggcttctcatatggagctggaaggattggggaaatgagcagtagtgtcttccctgtcaacctggggctgtttctgccactcttccagccatcatcattgtcttcaacctgaatgatgtggcatctctggaacataccaagtaagtgagcatcctgcaatataatgggaggctccgggaagagagggttcagaacagaggggtggtcaggaagaagaagaatgcatgtaggaccagagagggggttattgggcctatgaatgt

SEQ ID NO: 14730 - DNA, 455 bp, Homo sapiens
gcctccagcctgggcaatagaatgaatgagactccatctcaaaaataaataaataaataaaatactgagaaaaagaatctttattgtttcctgtaaaataaattttccttttagcaaagctcttttccctttgactctcgccgcctagatttcggtaccaggaccacacatttttaaagatgctcctcaccgccgtacagctcctgtacagcccagaaagctccgtgcgcacgaagctcatccagctcccggtggtctacgtgatgctcatgcagcactcgctgtttctgccgactctactgacgtctgacggagaggagagcccggacagccaagtaaaaggtgacccctcaccccagcccttccattccgtatccagattttatctcctgatttccttacactggctgcactgaggctcatctccctccggctctcggagctaaggaagcatt

SEQ ID NO: 14731 - DNA, 552 bp, Homo sapiens
cgacccacgcgtccgccgagatggcgcccctgcactccagcctgggtgacagagtgagaccttgcgtttaaaaaaaaaaaaaaaggaaaaggaaaaaaaagttctactgtgggtaaaatgctatcatgctatcaaacagcatcacatgctacagagaagtcttgtgaaaggatgtcagtgtggcaaacttcattgtcttttaagaaattgccacagctatcgtaatcttcaaccaccaccaccctgatgagtcagtagccatcgttaacgttggcgtaagaccctccaccagcaaaaagattgttagcatttttttagcagtgatgtatttatcaattatacataatgctattgtacacttcttaatagactatggtatagtgtaaccataatttatgcactgggaaaccaacaaattcatgagattcgctttattgtagtgctctggaattgagcctgccgtgtttctgaggtatacctgtgtatttagtatgttccttgtatataaaaccccattttatagggtaggaaactaaggcttaaagtttgagc

SEQ ID NO: 14732 - DNA, 345 bp, Homo sapiens
cctgtatgctttaaactgatgcgagatgattttgttttttgcataatcaatacttaagggtgcaatcaactgttagtaattgtgcagtagagtaaagccctgtggtgtatcaactactagttaagagtctcagttgatttctgtaatgtttgacctaataatagcccgtttcgtctctgacccaacagaggaagcacagatcaaatcaccttggagtggtcaccagggggacagggagccccccaccaatgtatcaatgggtgatttatgatgccttctgccctttggcgagtgaatgggtttcccataggggaagttggcctccctccgtgagctttggaaaat

SEQ ID NO: 14733 - DNA, 501 bp, Homo sapiens
gcgtccgcagccgcaggccattcaccatccctcaggtgctgagaaccaaagtgcctagagaagggcaggaggaggatgacgacgatgaggaagacgatgctgacgaggaggctcccaagcccgaccattttgttcaggaccctgcagtgctgagagagaaggcagaagccaggcgcatggcctttctcgccaagaaagggtaccggcatgacagctcaacagcagtggccggcagcccccgaggccatgggcagagccgcgagacaacccaggaacgcaggaagaaggaagccaacaaggcgacaagagccaaccacaaccggagaaccatggccgaccgcaagaggagcaaaggcatgatcccatcctgagacctggtgcagggccagtggggaggcagcggcaccagactcaccaggccgcgctcccatcgcctggggcctcctcactaggggccccaagttcaactcaacccctcaacagcctcagctttgcagcccc

SEQ ID NO: 14734 - DNA, 453 bp, Homo sapiens
  misc_feature 419: n = A,T,C or G
atgggtattctaaggagagaccatatgttaggtcacaaacattcaaaaaattgaaatattatcaagcaactactctgaccacaatgatgtaaaactagaaatcaaaaccaagaggaattttagaaactatagaagcacatggaaattaaacaatctgtttcttaatgaccagtgagccaatgaaaaaatcaagaagaaatttgcaaattgtttgaaagaagttataatggaaacacactatactaaaacctataaaacagcaaaagcaggactaagaggaaaatgtatagctattaaagtgcctacatttttaaaaaatgaaaaaactttagataaatcacttatctatgaatttgaaaaaaaaaaaaaaaaaaagtgcggccgctagactagtctagagaaaaaaccttccacacctncccctgaacctgaaacataaaatgaatgcaattg

SEQ ID NO: 14735 - DNA, 463 bp, Homo sapiens
ccggaagcttatttttaataagctgaaaccgaagctttaattttaatttaaatagttccatgtgcccatattggacagtatagctccagggtttattaaaccaccattcctggtgataggatagagcccagcacaaactaatctgggcaacaaatcaaagggcacaagtcgcatgtaggttccaaactcagtacattttagagaaaaggagtttgattatgtagtagaaggaagaactgcctggtgggactcatgatcttcctttaagagcaaggctcaaagacctggggagttttgatttgatgctatgatgtctcctggggctcagaatattatgaaatgaggagtgaatctctgagtgaaaagaactcaagctgcttgttgcattgcggaatgtctctaagaggtagagaggcgtctgttaagtggcttgtatgaaggtttcagaaggtaagatgagccc

SEQ ID NO: 14736 - DNA, 458 bp, Homo sapiens
tcttataaacatacctagtccatttaactgtaatagatatagaagtatccttcaataaccaacaacaaatgcttgtttccaacaggctctgatggttgtatataggaaaccttgataccaatacgtccagctgacccagaaaaaaatcagagcttagttaaatcactgctgctcaaggctgttgtatctggtaacgctcgaaatggagttgcactcactgccctggatcaggatcacgtcgcagtcctaggaagtccactagcagcttctaagggtaactgacatccaattcattaagaaggcctttgtatgtttccttcacggtgtaccttttagtcttccttttctttttcatttcattattacccagactaattcattctctttatcagcatactcaattttttttgtgcctttctaaatcttcttgaattgggttttatttttattttgcattg

SEQ ID NO: 14737 - DNA, 544 bp, Homo sapiens
  misc_feature 455: n = A,T,C or G
gtccggcctctgcactagggactggggaggacatggagaataatatagtaccagcacagacagacaggcagcttctggagccagactgtctgtgtgatcttgggtaagtaatctagcctaaccatagagatgataacaattgtacctgccacaggctcatggggctattgtgatggtgaaatgtaaagatgtaaagtatagagaaaggatgtaaaactgcccgacatatagtaagggccatttaaaagatgcctgttattgtccctcttcttgagagcatattaagggctcaaatctagccagagtctggcgggtacagaggtaaacaaataatggcaggttggttaagtactggacaccagtgatgtccaaggtctctaggatgccctggagaaataatgaactcttctaagattgtttggaagggatttataaaggacatctaggctgggttntgagtgaggtatgggagttcgctggtcaagaatgtaggaattacaaaagcataaagtgcatattttaaaaaaaagaaaaaaaaaagtgc

SEQ ID NO: 14738 - DNA, 430 bp, Homo sapiens
tcacccacgcgtccggaaaatgttttagaaagcaccttgaagattagtatttttatgtaacttctgttggagagatgtcttcaggagactgaagtagaagagcgactgtcaaaatggaaagtcccagagacatccaatttatgtaaatcaacatcacctgaattcagaatctcatccagatttcaacaaagacttctgaatgccaacaaagaagaggactgaatttacagactctcactctaacaatatatgctgttcaatttgaaaacagaataaaattattttggcagaaaaaaaaaaaaaaaaaaaaaaaaaaaaaaaaaaaaaaaaaaaaaaaaaaaaaaaaaaaaagggggcggccgttagactagtttagagaaaaaacctcccacacctccccctgaacctgaaacataaaaggaatgcaatg

SEQ ID NO: 14739 - DNA, 506 bp, Homo sapiens
agtgtcacagctggctttcctcacttgggaaaagggtactgccagtctagcagcctcctctgtactcagccaggacacccagcgcgtgggacctgtttgtgtctgttttgcttccttgggaacggcacagtcactcaccctgccatttgcggaaatgacctggtgcactttgactgttaagcaatgcgttattgctgtagtcaaggttagtgcaagcaaggaaacattcccagtaaggtatttgtttccattttctgtctgtgcttctgtcagaaacttgctaggactttagtggccaataaaaaagaaattctagcttgatcgacccacgcgtccggtaatgattgatgaggacatgactgcccgaattagcatggctgatgtcaagttctctttccaatgtcctggtcgcatgtatgcacctgcctgggtagcccccgaagctctgcagaagaagcctgaagacacaaacagacgctcagcagacatgtggagttttgcagtgc

SEQ ID NO: 14740 - DNA, 530 bp, Homo sapiens
gacgcgtgcgacaaacataagatcacgtgacagtgaccttaatatataaatgtgtgtgttgtgattgttctactgaccagccatttcctgtctccctcttcttatgcctccctgttaaattagacacaacaacattgaaatcagaccaattaataaccctacagtggtctctgagagaggctaacagctaatcctcttgtgctaaacagccaaattgtgaatgcaaaggaaaagttctcaaaggaaattaaaagtgctactccagtgaacacatgaatgataagaaagtgaaacagtccgggcgtggtgggtcacgcctgtagtcccagcactttgggaggctgaggtgggtggatcacctgaggtcaggagctcaagaccagcctggccaacatagtgaaaccctgtctctactaaaaatacaaaaattagctgagtgtggtggtgcacacttgtaatcccagacactcgggaagctaaagcgagagaatcacttgaaccccagaggtgaacattgcagtgagctgaga

SEQ ID NO: 14741 - DNA, 558 bp, Homo sapiens
gagtctattaacatacggagctgaatctgccgcagctagaaatgctcaagaaccagctggaccaggaagtggagttcttgtccacgtccattgctcagctcaaagtggtacagaccaagtatgtggaagccaaggactgtctgaacgtgctgaacaagagcaacgagggtatggggtaggcgggtgagggtaacctaaagtggcgaacctgcttctctcgtcccacctcctaacccagtttttcttacctgaaacgagaaaatccattacatatcgtataccgcttcatgaaccctttgcatgttgcctgcctagaattgaaaagtacaggacattcctctgctcctattgcccctgtttccgttcttttcacactgtctgtgggtgctgtgccctgttggaactctctttaacgtcttacgttggagccggtaaccttccccaggtgtttgtcttcattgctttacagggaaagaatgactcgtcccactgacgagttctatgtatgttcctgggaagctgcatgatgtggaacacgtgctcatcgatgtgggaact

SEQ ID NO: 14742 - DNA, 531 bp, Homo sapiens
  misc_feature 511: n = A,T,C or G
tccgtaattaggcagctgctttgtctgggagggggctttgtgtcgagtctccctgaatgagcagggctggcgacagttgtcaaaacacatggtgcttggtcagagcccccgtagaagccccttgtcctccgcatggcctccgcctgcacccggggcgtggaatgtgctcttgtgtgtccctggctgtctgcttgcttctacactggcccctgcagatggagggggtggggtacaggggttcctataagaagcagacacttggggtttttcccaggccctgttgcaggagggtgcgtgggctggtttccctgaaggcgcctgggcgtgttggtgttaactgatctgagatcttctgtggccctgatgtctatgagcatgccccagcttgcagggggctgagtagccgggcaccaccaggaggctgcgtgccctgtgcttgggtgtacccatgccctgtcagcatcgttggtctgttagggtcagggacttcggcttcttgtttagtaccctncatcccttccagttgatcat

SEQ ID NO: 14743 - DNA, 512 bp, Homo sapiens
  misc_feature 405, 407, 416: n = A,T,C or G
gctcggacgcgtgtcagttccttaaagctgttggtccaaggctaccctcagttccttgccacatgggcttctccaacaaggccatttacattaacaaagccaatgagaaagagagttaccgggcatggtcgctcacacctcttaatcccagcactttgggagcccgaggcgggtggatcacttgaggttaggagttcgagaccagcctggccaatatgctgaaaccccgtatctactaaaaatacaaaaaaattagcctggcatggtggtgggcacctgtaatcccagctactcaggaagctgaagcaggagaatcacttgaacttgggagtcgtaggttgcagtgagccaagatcgagccattccactccagcctgtgcaacaagagcgagattccatctcatncnaaaaaaagnttaagaaaaaaaaaaaaaaatggtgcggccgctagactagtctagagaaaaaacctgccacacctgcccctgaacctgaaacataaaatgaatgca

SEQ ID NO: 14744 - DNA, 470 bp, Homo sapiens
tcgacccacgcgtgcgtaacacagttttcccttccatattcctctcttgagtttatgcacatctctataaatcattagttttctattttattacataaaattcttttagaaaatgcaaatagtgaactttgtgaatggatttttccatactcatctacaattcctccattttaaatgactacttttattttttaatttaaaaaatctacttcagtatcatgagtaggtcttacatcagtgatgggttctttttgtagtgagacatacaaatctgatgttaatgtttgctcttagaagtcatactccatggtcttcaaagaccaaaaaatgaggttttgcttttgtaatcaggaaaaaaaaaattaatgaaccttaaaaaaaacaaaaaaaaaaacatgtgcggccgctagactagtctagagaaaaaaccttccacacctgcccctgaacctgaaacataaaatgaatgc

SEQ ID NO: 14745 - DNA, 564 bp, Homo sapiens
  misc_feature 496: n = A,T,C or G
ccacgcgtcctgagaggtcaggccggtcctgggggcagcaggcccggccacactccccaccgcgaccggggctctgggctcgcttcctgcttcagtttccccaagctccgggggagactccgctactaccaccacgtcgataacgcaaacctagagggactcagggtaaactgaggcactcaaactgccgaggagctccgcctcccgagagacatttaatccggggggatttgcaggaaacttctaaattaagggtagcggctgctgcagctgagggggggcacaccggtccctgcgcccgggcagctgccgtgagctcacgccccgaaatagccccaggggccccagccgcagctgccactgggtccggctgtcactcagaggaagcacggagcccccagcccaagggtcccctccccttcgcatcgccggggtttttccagccgaccgtcggccactttttcctccgacggctggcagggaagagggggatggnggcgggaccccaagggaggcggtccccaatgggtgggcgaagggggcggccgctagactagtctagag

SEQ ID NO: 14746 - DNA, 493 bp, Homo sapiens
gcgtccgcacacccccaggtgcccgcgctggccccccaggcgtggtggcctgcacggaggggaccacttacgtctgctccgtctgcccagcaaagtttgaccaaatcgagcagttcaacgaccacatgaggatgcatgtgtctgacggataagtagtatctttctctctttcttatgaacaaaacaaaacaacaacaaaaaacaaacaaacaaaaaagctatggcactagaatttaagaaatgttttggtttcatttttactttctgtttttgtttttgtttcgtttcattttgtactacatgaagaactgttttttgcctgctggtacattacatttccggaggcttgggtgaataatagttttcccagtctccctcggatggtggccttaaggcctggtagtgcttcaagaggtccactggttggatctctagctactggcctctaaatacaacccttctttacaaaaaaatcttttaaaaaaaaaaaaaa

SEQ ID NO: 14747 - DNA, 556 bp, Homo sapiens
  misc_feature 462, 513: n = A,T,C or G
cgacccacgcgtccggcagcatcaagagttatttttctgactgtcaagtttcaacattcaggtctgtccccaacaggcaccacaccggggtggactccctgtgtaacttctcgccactggctcggagagtagacagagttgccatctatgaggaatttctgcggatgacccggaatggtacccagctgcagaacttcaccctggacaggagcagtgtccttgtggatgggtattctcccaacagaaatgagcccttaactgggaattctgaccttcccttctgggctgtcatcctcatcggcttggcaggactcctgggactcatcacatgcctgatctgcggtgtcctggtgaccacccgccggcggaagaaggaaggagaatacaacgtccagcaacagtgcccaggctactaccagtcacacctagacctggaggatctgcaatgactgggaactgccngtgcctggggtgcctttcccccagccagggtccaaaagaagcttggctggngcagaaataaaccatattggtcggaaaaaaaaaaaaaaaaaaa

SEQ ID NO: 14748 - DNA, 517 bp, Homo sapiens
gttcggatcaagaccatcctggctacagtgaaaccccgtttctactagaactacaaaaaattagccgggcgtggtggcaggcacctatagtcccagctactcgggaagctgaggcaggagaatggcgtgaacctgggaggtggaggttgcagtgagccaagatggcaccagtgcactccagcctgggcgacagaggtagactctgtctcagaaaaaaaaaaaaaaaaaaaatcagtcactggatttgggcccaccctacctgcatatgacctcatgttaacttgatgacatctgcaaagaccccattcccaaaaaggtcaccttcaccagtaagttgggggttaggacttgaatatagctttttggttgatgtaattcaacccacagcactgcctttgtcattccatgttatgttttttgagatttttgagatttgccaatatatgaagctataaattatcaaggaaaataaataattcaaaatctaagctgttgaaactctaaattattttaagcc

SEQ ID NO: 14749 - DNA, 639 bp, Homo sapiens
tgtttttttatttctactgtcaaatgatgtgcaaaaccttttactggttgcatggaaatcagccaagttttataatccttaaatcttaatgttcctcaaagcttggattaaatacatatggatgttactctcttgcaccaaattatcttgatacattcaaatttgtctggttaaaaaataggtggtagatattgaggccaagaatattgcaaaatacatgaagcttcatgcacttaaagaagtatttttagaataagaatttgcatacttacctagtgaaacttttctagaattatttttcactctaagtcatgtatgtttctctttgattatttgcatgttatgtttaataagctactagcaaaataaaacgagttgacccacgcgtccggacacaagaaaggaatataattcatacactattgcatttttaataaatcttttgaaatttgcagaattagattgtattgtgtattttcggttaaatgataattgaatgtaaatatttagatgcagcaccatattttataacccagctgtagcatttcttcatattttaaggaaaccccccacctccttcttttaagggcgcttcttgctctctgaaatgccctgctaaatgcttctcttaattatttg

SEQ ID NO: 14750 - DNA, 568 bp, Homo sapiens
tctgaattatacaaaaagatagatttttaaagttatttggagggagtgtacacattgtttatttaatagtgagggctattatacaagcaggatggtgtaaaataatccctttatatgtatgagcatagttaatttggtaaacaacagacaattacatactgtgatcataaggactttagtatcagttaccatatagcaggtactctttagtcaggatatacctatataggtgctaaattaaaaatcaaccttatatctcaaatttacttcctagtagagtgtaacgctgccataattgcaagcctaattatggggttgtccatactgcagtcccatcagtactcatacaccaaagggtcgggcctgtgaagactggaaaaagaataaaatatcttttgattgagatactacaagcaaaaatgactttctggctaccattactgcaaagaacaaaactcaactgaaaacaatatgtagcaattaaaaagtactcattatcttcaaaacacactttttaactaattgagactctaaattcaatggttctactataattttataccctagt

SEQ ID NO: 14751 - DNA, 363 bp, Homo sapiens
  misc_feature 45: n = A,T,C or G
cgacccacgcgtgcggaactcttacccataaccctaatgatgcangtcatatgggggaacactttgtaaatggtcaggataaaaaccaaatctgggtgccagatcccagcactactttttattactggagaaatgggggggatagaaaattctactttgaattatttagttttttttaaagagtgggttgtgtttgtgcttctcccacctttcagcatttatagaacatgctgccccacatacaaagtcaagaccacttacttttatgtgacactagtagtttggggttaatgttttgggtaagaacagctgcatatgagtaaagttaccccaaccacagtgaggaggaagatgttcacatac

SEQ ID NO: 14752 - DNA, 575 bp, Homo sapiens
gagtcacccacgcgtccggtctgcgaggcccgggcctgggcacaaagggagagaggcctccattgtcccgcaggggccaaaatgcagaccgtgcatccccggtgacctcggggaccgtgctctgatcagcaggattttcttggactctggggtccttgtcctgctcaggcatccctgccctgctctccttgagggccctcaacactatcttccctggacacaagtctggggacagccgggtgttgaggaccccaaaggggtgactacctgctcctgggccccacagagtccttgtgctcagtgtagtggctgagctgggggatgccctggaattcggagcacacagcactggcttactgtggtacctgtgcagtgaaattggagacagaatcaccaggatggaacacaggtcttgcaggatcacggaaaaccttcttagagttgtcttgacaccactgatgttgagtgtccgggtgtttgtaggatggcctgccactcagtccaggggcaggagcaacggggagatcccacagcaaagtgaactgggcgatgggctgaaggggctctaggcaact

SEQ ID NO: 14753 - DNA, 485 bp, Homo sapiens
cgcgtccgacttgaccctgtattttgggagtcgaacggagaatggaaactgaaagtggaaatcaggaaaaggtaatggaagaagaaagcactgaaaagaaaaaagaagttgaaaaaaagaaacggtcacgagttaaacaggtgcttgcagatattgctaagcaagtggacttctggtttggggatgcaaatcttcacaaggatagatttcttcgagaacagatagaaaaatctagagatggatatgttgatatatcactacttgtgtcttttaacaaaatgaaaaaattgactactgatgggaagttaattgccagagcattgagaagttcagctgttgtagagcttgatttggaaggcaccagaatccggaggaaaaaacctctgggggaaagaccaaaggatgaggatgaacgcacagtgtatgtggagttacttcccaaaaatgttaatcacagctggattgaaagagtatttgggaaatgt

SEQ ID NO: 14754 - DNA, 571 bp, Homo sapiens
cgcgtccgagactttacactctgaataaatcatgtaacaaaattgcactcgcaccccttacgtttatacaaatttttaaaataaataataactagaaaagcaagaggaaaccaaacccaaaattattagaagaaaagaaatgataaagattggggcagaaattaatgaattgatactaaaaatagtacaaaagatggatgaaagaaaaagttgtttttttttttttaaaagataagcaaaatcaacaaacctttagccggactgtaaaagagagaatatccatatgaataaaatcagagatgaaaaaggagtcattacatctgataacacagaaattcaaaatattttagagactattatgagcaactatatgcagtaaattggaaaacttagaagaaatggatgaattccgagacacataaaaacataccaagattgaaccatgaagaaatccaaaacttgaatagaacaacattaacaagatggaagcggtagtaaaaagcctcttatcaaagtagaccaggacctggtgttttcgctactgaattctgccaaacgctgaaagaagagc

SEQ ID NO: 14755 - DNA, 618 bp, Homo sapiens
tctactaaaaatacataaattatcctggtgtggtggcgtgtgcctgtaatcccagctacgctggaggctgaggcatgagactcgcttgaatccaggaggcagaggttgttttaagctgagaccacaccactgcactgcagcctgggtgacagagcaagactccgtctcaaaaaaaaaataagctattgatgggctatatattgttaagctatagggtgtggttacagtgtccagtgtagcattgatcgattaatttatagcctcttgtggcaacagcaagcagcttccagagatgaatacacagcttgagtaggcaggggggagtaggacatgacggctgcctcatcttaacaccttgggcctgataatttaaaaggactcacagtcctcagataaacatgactttcttttctcatgaggaaacagagaaggtggctaaagggtatctctttctctcatgatcccaaacctatcaggtttttatttcccacaccagccagttttccagctccttggatgccaactggatgtcctggaattccattcaattctgagactaacaacctgggttgcagtgcaccgtcctccctaccggcatctggatgaattcaccaccct

SEQ ID NO: 14756 - DNA, 555 bp, Homo sapiens
  misc_feature 540, 541: n = A,T,C or G
tgctgtaccagaccagaggccagctccatgtcctccgcgtcggcaatgatacccactgccaaccaacaaaaattggctgcaaccatcccctaccaggacccggcccctacagggtgaagttcctggtgatgaatgacgaaggacccgtggctgaaaccaagtggtccagcgacactcgcctgcagcaagcccaggcacttcgggctgtccccggcccccagagcccgggcaccgtggtcatcatcgccatcctgtctatcctcctggccgtcctcctcacggtcctcctggctgtgctcatatacacctgcttcaacagctgcaggagcacttccctatcaggcccagaggaggcagggagtgtgagaagatacaccacgcacctcgcgttcagcactcctgccgagggggcttcctgaggggttccagaggggcccacgtgtccctccacctcctccctggcccaggctgcagagcctgagctgggacacgccctgaagcttctggaccctgagagagattggttcttttctttactcnntttttttttttttt

SEQ ID NO: 14757 - DNA, 581 bp, Homo sapiens
cgactcacgctgctagaaaaggttagactaactgggagttataatttgtcttggagatttaagaaagtttttgaagaggttctctgtgttgagatgaagaggaagattgagacaaagcacaatggagagtaggggagagagcacttcagaatgtttgaaggtgctaagaggaagtgcttgacacacgggaggaactgagaaagaaggctagggccatcggctggagggacaggacaggtggagatgtaagcatgggcctccagaccatggtaaggccactggatctttactttaatgcatttgtgcatgtgattaaaaaaaaaaaaaaaaaaaaagtgcggccgctagactagtctagagaaaaaacctgccacacctccccctgaacctgaaacataaaatgaatgcaattgttgttgttaacttgtttattgcagcttataatggttacaaataaagcaatagcatcacaaatttcacaaataaagcatttttttcactgcattctagttgtggtttgtccaaactcatcaatgtatcttatcatgtctggatccccgggtaccgagctcgaattaatt

SEQ ID NO: 14758 - DNA, 488 bp, Homo sapiens
cgcgtccgaaaaagacatatgtacaagtctatttcctatagcactatttgtaatacctagcactatttgtaatatctaaagactgtaaacaacgcaggtgcccacaaaaggaaaatggtttgacaaacttacgaacatccttttaaaggagtactagacaggtacaaaaaggaatgaagaatgtatatattactatggagtgaatcttcagggtatatgactaagtgaaaaaatgcaaggtgaagtagtatgtaacatatggtacagtttacttaagagagaaatacagatgtatatacacattacctaaagcaaaatgaggaccctactgggctgccatcccagctggactgctgctgtggagctcagcatcaagtacttccaggagaagcttcagcaggacctagaggcagagcatggtagaggtagaggatacagccctcataccaccgagctgtatgtccatctttcaagtcctggtggtgccc

SEQ ID NO: 14759 - DNA, 455 bp, Homo sapiens
gagtcgacccacgcgtccggagagagctgtctttgcagttactaggtttcatcaaacttgtttttttcagtatggtaggtttaaaaatggggatacatttttgtttttatttgcatttttaaatattttcttaggttagttggctacttaaatttctttttctgaaaactttgtatttatagccttttaaaattcttattgacttgcctgaactatttgtaaattacagaaattagccctttgtcgtatgtgttgcaggtgcttttccagtttgccagtggtcattcattttggtttatggtacttttgatagaccagaatctttgacttttatttagtgagatttatccatctttttctgtgtggcatcttggtattatagcattaatattctcttttcttttttttttttgtttacgagatggagtctgactctgccgcccaggctggcgtgc

SEQ ID NO: 14760 - DNA, 381 bp, Homo sapiens
gcgtccggttgggacggcaccaggcgaggtgttgagttggctcggctcaaggttcttcggggtgtgagctggcatgaggacctgttggaagtgggatccaggcctggggcaggcttccagctgcctcgatttgtgcgtgtgaacactctcaagacctgctccgtttatgtagttatttcaagagacaaggtttctcctatcagggtcgggcttccaggctggatggagtgccctggcgcgatctcggctcaccgcaacctctgcctcctgggttcaagcgattctcctgcttcagccttctgagcagctgggattatgaaggggtggcctgcccctccacatctgtgggatatctcatcagagatgccagtggggcttgag

SEQ ID NO: 14761 - DNA, 583 bp, Homo sapiens
  misc_feature 556: n = A,T,C or G
ccacgcgtccggctcaaggaggtgattaaagaatgtgtaatttagtatttttaagatgtttagagttttaaaaacttacgttgttgctgtcattgtatttaaataggggtaaggaatataaactgatataagtaattttttttaaattcttcagatataatgaagatctggaacttgaagatgccattcatacagccatcttaaccctaaaggaaagctttgaagggcaaatgacagaggataacatagaagttggaatctgcaatgaagctggatttaggaggcttactccaactgaagttaaggattacttggctgccatagcataacaatgaagtgactgaaaaatccagaatttcagataatctatctacttaaacatgtttaaagtatgttttgttttgcagactttttgcatacttatttctacatggtttaaatcgactgtttttaaaatgacacttataaatcctaataaactgttaaacccaaaaaaaaaaaaaaaaaaaaaagtgcggccgctagactagtctagagaaaaaacctcccacacctncccctgaacctgaaacataaaatgaat

SEQ ID NO: 14762 - DNA, 620 bp, Homo sapiens
cgacccacgcgtccggcgttctacccttccggcccgtgttctatccgccgcctccaccttccatccggcgccggctttcggcgcgacggtcgccgcgttccatcgtcgcgcggcccttcgggcgcccgagcccgcaatgtcgggccccaacggagacctggggatgccggtggaggcgggagcggaaggcgaggaggacggcttcggggaagcagaatacgctgccatcaactccatgctggaccagatcaactcctgtctggaccacctggaggagaagaatgaccacctgcacgcccgcctacaggagctgctggagtccaaccggcagacacgcctggagttccagcagcagctcggggaggcccccagtgatgccagcccctaggctccaagagcccccaaccgggacccaaccctgcctccctgggctaggctctggcctgggcactcaccccctggcttagacaccttctcaagggctggccttcagggacccctggtgggtctgcctgcctgggccacccttcctgcctgggccttcccttggcctacctgggccagcccccaccacctggcatgccctcctggggccaagagtgggcctgcaacccacccac

SEQ ID NO: 14763 - DNA, 367 bp, Homo sapiens
cgacccacgcgtccgctacctcaaggccctgggcaccgagcggtcctacaaatccgcactggactacaccaaacgaagtctggggattttcattgacctccagaagaaagagaaggaggcgcatgcctggctgcaagcagggaagatctattacatcttgcggcagagcgagctggtggacctctacattcaggtggcacagaacgtgggcctgtacacaggcgaccccaacctggggctggagctgtttgaggcggctggagacatacttttcgacggggcctgcgagcgggagaaagctgtgtccttctaccgggaccgggccctgcccatggcagtgactacgggcaaccgcaaggcggagctg

SEQ ID NO: 14764 - DNA, 1041 bp, Homo sapiens
  misc_feature 29, 32, 76, 80, 83, 84, 85, 86, 87, 88, 89, 90, 91, 114,117, 118, 120, 121, 122, 123, 124, 128, 130, 135, 136, 140,141, 142, 149, 155, 157, 159, 160, 161, 162, 167, 168, 170,172, 173, 174, 175, 182, 183, 185, 186, 187, 188, 189: n = A,T,C or G
  misc_feature 196, 198, 200, 201, 211, 231, 291, 301, 342, 418, 470, 572,647, 855, 868, 1006: n = A,T,C or G
caacacccctcaccaaaaacatgccgcanccncccaatattatattaacacaatatatatttgaacaaacaccaantatnttnnnnnnnnnaaggttttcctgctgtcggtcgngannannnnntggnanaggannccannnaaaaganaacccnanannnnaaccnngnannnngaaaccnngnnnnnaaaaaangnanngggagagagngaagacaggggggagggggnaaaacaaagagaggaacaacccacacgacaaaccccagagacccacacccaaaacaccancaaaaacccnggcaaccggagaaaagaaaagaaagccgcccaccgcacagnacgaggggccaaggcagaagaaaaaccgaagaagggcccaaaggggcgggagcaagaaggaaagaaaaaacaaacnccgcaaaaacagggaaaacacggggaaaagggaaaccaaacaaacacaaaangaccccggggaaaaaaaaaaacagaaccccaaaacaccgggggaaaacacgggaaaccggacaaaacaaaagcgcgagggcacggggcgggcacaaagaagnaaaaacaccgaaagacaaagaaagacaccaggaacacagcaccgagaggagaagcccaaaacaacacagaaaacngaaaccaagaagaaagaccacagacaccacggaggccaagaaggaaaaaaagaaaggggaaacaaaacaaaaacccggcgcaaaacaaacaccccgggaaacaaggccacaaagaagcaaaaaaaaaaggggcccacagggcaaaacaaacaaacaccaaaaaaggggacaggcgccccaaaacaaaaaccgacaaaaaaaaaaaaanacacaaaacaaanacccgcggaaccggaaaacacaaaaaaaaaagcgcaacaagggcgccgaacaacacccaagagaggacacgccgaacagaagggaacacaaaaaaagcaaaaggcgaaagcaaaagccccacaaaaaacaacaccgancaagaaccgcaaaaacacgggaaagagaccaaaca

SEQ ID NO: 14765 - DNA, 698 bp, Homo sapiens
cgcgtccgcgtttttatgtgtgtatgtacaaaacaaaatacctttttgaaattacataagtgatacatgcttattgtgaaagagttggataatacaatatactgtaaagaagatgaaaaccactcataaattccaacctgtaaatactttcgtgttcatatttggcatctaatgtatcctttatgtatatttaaatatatattttattcaagtataggatcatgtacctccctgttttataattttcttttttaatttttcagtgtattgtggacatcttttctcatcaacaaatacatcccacaatgttcatttttgtgcctcattataccatggaatagtgacatcctagtatgtttaagacattccttattaatgaacaattaggctacttccaatttttaattataaaggacattttgaaggacttccttgtacatattattctattgctttatcatctttttgggataatttcatgtagtatatttccagttatttaaatgagaaagtacatggtttataacaaatggtatttaacgtccaagtcactgctatctaaaggggtaatttttaaggtataaaataatttggcttataaaaaatgcgtgggaaaaatatcctagaaatatttaaggattaacttctaaattgtaaattgacatatttaatgatagattcaaaaaaaaaaaaaaaaa

SEQ ID NO: 14766 - DNA, 640 bp, Homo sapiens
cgcgtccggaagaaattgtgcaccctcacaaaacatacaaagtttaaaagtttggatctttttctcagcaggtatcagttgtaaataatgaattaggggccaaaatgcaaaacgaaaaatgaagcagctacatgtagttagtaatttctagtttgaactgaattgaatattgtggcttcatatgtattattttatattgtacttttttcattattgatggtttggactttaataagagaaattccatagtttttaatatcccagaagtgagacaatttgaacagtgtattctagaaaacaatacactaactgaacagaagtgaatgcttatatatattatgatagccttaaacctttttcctctaatgccttaactgtcaaataattataaccttttaaagcataggactatagtcagcatgctagactgagaggtaaacactgatgcaattagaacaggtactgatgctgtcagtgtttaacactatgtttagctgtgtttatgctataaaagtgcaatattagacactagctagtactgctgcctcatgtaactccaaagaaaacaggatttcattaagtgcattgaatgtggctatttctctaagttactcatattgtcctttgcttgaatgcaatg

SEQ ID NO: 14767 - DNA, 589 bp, Homo sapiens
ccacgcgtccggctgggcttaagggatctttccaggtagctgggactgcaggcatatgccactgtgcccagctgctcccttagtcttgactatgtatttttttttttttggttgttttattaggatagagtcctaagaatggcattactgggttaataggtatgaacattagatctttaatacatacagtcgaattacttttcataaagccatatacctttttatattcccaccgatactatccctatcactaagtattaacttattttcatctttgccaatatgatcatccaaagtgaggcagaggttgcagtgagccaaggtcacaccactgtgctctagcctgggtgccagagtgagactgtgtgtcaaaagaaaaaaaaaggggggggtgccgggtgcggtggctcacgcctgttattccagcgctttgggaggccgaggtgggcggatcacctgagtttgggagtttgagaccagcctgaccaacatggagaaaccctgtctctactaaaaatacaaaattagccagacgtggtggcacatgcctgtaatcccagctactcgggaggctgaggcaggagaatcg

SEQ ID NO: 14768 - DNA, 606 bp, Homo sapiens
  misc_feature 463: n = A,T,C or G
tcgacccacgcgtcccggacgcgtgggtcggccatgaacaagttttcaagtatcagttgatttatgatataggcttatccatttggttataaaatcatatgtttattacataatcattgacaaatagtttctgtataataactggcagagtagctctaaaacatatgcaaggaaataaataaagaaaaaacttacaataaagagagtaactcatattttaacagttttgtgaaaaaaatagaaaatattttatgtagcttatagtacatatatttttttacaacagaagaatcgcattctgattttccatatggatcatttccctatgttgctagaccagtacactggcaacctggtcatacagcttttcttgtcaagttgaggaaggtcaaaccacaacttaactgagtactccagatgacagtaactgacttgaagatggaaaaatatcaaaatagaactntatattgaaaatcactgcttccatagattggcatttttagctattactatgacttatataacttatacatataattttgaaaataacaactaaaagatgtataacatagcaaaactgcttaaacatcccattttgacacttgt

SEQ ID NO: 14769 - DNA, 575 bp, Homo sapiens
  misc_feature 481, 483, 484, 486, 489, 491, 492, 495, 496, 498, 499: n = A,T,C or G
tcgacccacgcatccgacccacgcgtccgccagacctcacgtcaaccggctgcaccccactttccagcctgcgccccagatctgcagccttcgcccctagatacacccgcctggtgatgaggcgctcctcgcgttccttccgggctccaggtgtccgtgagcctcccttccgccctggcctccggtctctgccttgctcgtgcttctaccaccacccttcccctcccaacccggtggatcctctcgtctcccccagtctccagtgcaccggctttccctcgtcctctgcgcagtccatctcagctcatctctccaattcaatgccatcatctctcctcaccatctctcggtgccctggaatgtttgctgtcagatgtcccctgtgaaacccacaaacgcttgcgatttggcctccttgttttattttgtgtagtcctacaacgtcttgttactaccccctattacaacacttataactcananngnaanannaannannggtgcggccgctagactagtctagagaaaaaacctcccacacctccccctgaacctgaaacataaaatgaatgcaa

SEQ ID NO: 14770 - DNA, 708 bp, Homo sapiens
acccacgcgtccgcggagatccggcacactgcggaccgctggcgcgtgtccctggatgtcaaccacttcgccccggacgagctgacggtcaagaccaaggatggcgtggtggagatcaccggcaagcacgaggagcggcaggacgagcatggctacatctcccggtgcttcacgcggaaatacacgctgccccccggtgtggaccccacccaagtttcctcctccctgtcccctgagggcacactgaccgtggaggcccccatgcccaagctagccacgcagtccaacgagatcaccatcccagtcaccttcgagtcgcgggcccagcttgggggcccagaagctgcaaaatccgatgagactgccgccaagtaaagcccctagcttgagtcgacccacgcgtccgatttaaatatttgtcccattgtttgtgattaggatgtaagctttgtggaatgtaattaaccctgctttacgaagtcaccatattataataggaaaaacactgcctaggaggcaagagatctgaattccagttctgatgctgccactgtgtaaggaagtagttttataaaccatgggcaaatcatctgagctttctcatctgtaaagttagggagagggaataattagttgatctgtaaaaaaatcagcttcaaaacgttatggctaaatctgtagaatgtatgcccaattgctaaacggatg

SEQ ID NO: 14771 - DNA, 508 bp, Homo sapiens
cgacccacgcgtccgaaaaaccaaagcctgattgagatcttggaaccgctgtgcgccggccgaccctctaccaggggaccacccagccccgcgcggtggccgactgcataggcgggactgcgcttcgaggcttaaggtcgacagatcggaggcatcgctgtgttgtctgtgcggagaagccaaaaagtgattacgtctatttgcaagaccgttcatgttgttttcagttcatggtatgattaaaacccgatcctttgttaccatgccacttaggtacgaaaaaataattgtgttcgatatgttggcagtcacccaaaagtatccaaaaagccatgaaacagtaaaggtgaacaagtacgaagtgaaaataatattcgtcctttgttttctttctggagtgctcaaaacaccctatcaaaccatttttctcagcatagaaccaagtgtggtcagggtaacagctaatatttacaaggtaagaaacgagccctgcgatatttagtcactt

SEQ ID NO: 14772 - DNA, 477 bp, Homo sapiens
ggtttgaacgcgttttcccaaagtttatgtgttggaaacttgacccccaatgcagcagtgttggaaggtgcctactaggtggtgtctgggtcatgggggtatgaccctcatggatggataaatgccatgactgaggcggtgggctccttataaaagaatgagtttgggtgaaacctcgtctctactaaaaatacaaaaattagctgggtgtggtggcacatacctgtaatcccagctactcgggaggctgaggcagaatggcttgaaccagggagtcggaggttgcggtgagcagagatcgcaccactgcactccagcctgatgacggagcaagactccgtctcaaaaaaaaaaaaaaaaaaaaaagtgcggccgctagactagtctagagaaaaaaccttccacacctccccctgaacctgaaacataaaatgaatgcaattgttgttgttaacttgtttattgcagcttataatg

SEQ ID NO: 14773 - DNA, 516 bp, Homo sapiens
cggcgagaagcctgggggtcctggctgaactgggctgggtgaagggggccccctgacccccttggggtccgggctgggctgggtgaggggcggtttccgacccccagccaggttcccaggcaggatgagctggggttggggtggctaggccgtgggccttgggagctgggcagtctgggctgggctgggctgggcagggcgccacatggaagctggaggagcaacgggagcgctgggcgtggggtgcaaattgcccagtgccttctgtttcccaggcagctctgtggccatggatatgttccagaaggtagagaagatcggagagggcacctatggggtggtgtacaaggccaagaacagggagacagggcagctggtggccctgaagaagatcagactggatttggagatggagggggtcccaagcactgccatcagggagatctcgctgctcaaggaactgaagcaccccaacatcgtccgactgctggacgtggtgcacaacgagaggaagct

SEQ ID NO: 14774 - DNA, 524 bp, Homo sapiens
cactcatcaattaggttttatttttatttctttcctctacccccagaaacaagcctgttaattttttttccttctcctctggcgactgtgtgatgaatcctttcttgcgtgatcaggttgcggatagacttgtaagggtgtttgctgcatacagtgtaagcattgtgaccgccaataaacttcaatggtttctactgaaaaaaaaaaaaaaaaaaaaaggacgcgtctacttcccactgggtccctcccacaacacatggaaattcaagatgagatctgagtggggacacagccaaaccaaatcaaaaggatatacaaaataaccagaaaacaatgaacaaaatgacaggaataagttctcacctatcaataataactttgaatatgtgttaaattacctacctaaaagatagagacaggcttaatggataaaaaatgactcaacaacgtctacaagaaactcacttcacttgtaaagacacacacagactgaaagtgaagggattgaaaaagatatgccacac

SEQ ID NO: 14775 - DNA, 514 bp, Homo sapiens
agtcaccacgcgtccggagaataacaagggggcacgcttccagtagatgtgttggggaaggaggagggcagaggggacaggggacaggattcagctttgtggtgggtcctgagggttcctaccaggggtagccaggatctgggaaacagatcagcgactctagtctgaagtggctgcctggttcgggggctgccttcagcaagattcaggcaggagagacggaaatagccaccttccaggcgtgagtcctggagataaaaatggattttaacctaggactgccgggagctggccctccgcggctgctcagactagggctgtgtgtgctggctctcgcctgtttccggtgtctaactggcttgtttctctttatggcttggcttcattccgacctggggtggggccacatccaacccactgcccactggctgtccgtctggcctgccccgcggtttcaaccacagtggtgaagcagcgcttgcagatgtacaactcgcagcaccggtcagcaatc

SEQ ID NO: 14776 - DNA, 564 bp, Homo sapiens
gaatatctttatccattaacattaaattgaattttttgcaaatgatcaaaaggtcattccgagtaaattctgttgtatagtgcagatgatcaagctgagtatttgccatgtttttattttagaaaagagatgttgctataacataagtaaatagattctcgtatgtggcagataaatttacttgtaatctgctctagagtgaaattattttttacatataagcattgtcatcattctaaggattattgaataatgaatataaaatgttcttgtgtatttgtgtatgtgtatataattttttgaaagtttctttatcctattgacccttctcataaacagtagcatatatatattatatgtagtagaatttatataggaacattgtctttttcccagtaatgctgattctaaactagttatgtaaatttcatgttacatgacattaagaatagtggggtgctaaatatatttagaaatgatttccaaaattgttgtatttctaacatagaaggatattgtcattttaaaataatgtaaagaaaaaatgcccccaactatctcttt

SEQ ID NO: 14777 - DNA, 460 bp, Homo sapiens
gcaccacactaccctgttgacacagcctggatccagagttcagcagaccttgagacaatgaaaacaaacttagtaataatcatttttcaatcattgcagtaattattgatttggacaaaaatcaattgacgtcaaaaccttaaagtgacgtttctctgcctatggagtggtcattcttttattcctttagtttcataataaattttcttttacttaaaaaaacttatagtttgatgaagagtgagatatatacctcatctcaaagaatcttcacacacacacttattaattacaaaaggaaaatcagtaattttgcagtggagacatatggccaactccaccttacccaagtggctgaaagtcactgcaccagtaatggcacaaaccaatgtgagatgattcctgatatgatacactaaaaaaggcactgtctcttctgcatgttgcagacaaaaagtgg

SEQ ID NO: 14778 - DNA, 177 bp, Homo sapiens
taacagcattttatatcgagtttgacgatcagtaaatattgcggacaatgacagcttttaactcttcaagtcacctaaagctattatgcaggaggatttagaagtcacattcattaaacccaagtgctatgggtgtaaaattcatgatagctggcccacaggtcatgaattgaggag

SEQ ID NO: 14779 - DNA, 464 bp, Homo sapiens
cgaacgtctgaaacgtggaggaaccttcagttctgggaactccctgcccctttcccggaaaattcatgagtaatccacctgtttagcatataatcaagaagtaaccataggcatagtatatcaagcagcccacactgctgctttgcctatggggtagccacttttattcctttactttttattaaacttgctttcacttaaaaaaaaaaaaaaaaaaaaagtgcggccgctagactagtctagagaaaaaacctcccacacctccccctgaacctgaaacataaaatgaatgcaattgttgttgttaacttgtttattgcagcttataatggttacaaataaagcaatagcatcaacaaatttcacaaataaagcatttttttcactgcattctagttgtggtttgtccaaactcatcaatgtatcttatcatgtctggatccccgggtaccgagctcgaatta

SEQ ID NO: 14780 - DNA, 495 bp, Homo sapiens
  misc_feature 393, 394: n = A,T,C or G
ccgaaaatccaaatccataatgaaagagattgataagtgtgactacaaaaggtttaaaacttttttcatagcaaattatctcagaaactaaattaaaagacaagggagaccaggtgcagtggctcacgctgtaatcccagcactttgggaggccgagggaggtgcattgttctagcccaggagttcgagaccagcctgggcaacatggtgaagccctgtctctacccaaaatacaaaaattagccaggcgtggtggcttatgcctgcagtcccagctacttgggaggctgaggtaagaggatggcttgagcccaggaaatcaagggtgcagtgagctgcgattatgattgtgccactgcactctagcctgcatgtccaagtgaatcctacagnnaaaaaaaaagagaaaaaaaaaaaaaaaggtgcggccgctagactagtcttgagaaaaaaccttccacaccttcccctgaacctgaaacataaaatgaatgc

SEQ ID NO: 14781 - DNA, 479 bp, Homo sapiens
aaatgcctctctcagagtcggaccctcacctccttcctggaactgcctttggccccagaaccatgagacaatccccaccctgagaagctccgatcactgggaggagagagaaagcctccagctttgggattcaggcttcagaagtttttagcagcctttgctcattggagaggtggggaggataagtctataaggaatcctatttccccagctctcccacagagaggacaaaagaagtcttcacacgttgtggaactttcctgcaacttctggatgcagacaagcctcagagcagactgttctggctccagcgaatatcggctgccaagctgtgagcatccagggatccccgtctgcctggctgtcctgaagtcagaaggcgccttggtcatactgtgtggggtgtgtggattttcagttgcctctctttttttctcctttttcaacagctggcggagtagccaacacccctgacagca

SEQ ID NO: 14782 - DNA, 516 bp, Homo sapiens
cgatggactgtgtcatacaggacggccctgctgcattggcaccaagggcaggtgtgagatcacctcccgggagtactgtgacttcatgaggggctacttccatgaggaggccacgctctgctctcaggtaggtctgcagagtgtccgtcgttcccctcccccagctactgtgatgctgatatgctgctctgcgcaggtgcactgcatggatgatgtgtgtgggctcctgccttttctcaaccccgaggtgcctgaccagttctaccgcctgtggctatccctcttcctgcacgccgggatcttgcactgcctggtgtccatctgcttccagatgactgtcctgcgggacctggagaagctggcaggctggcaccgcatagccatcatctacctgctgagtggtgtcaccggcaacctggccagtgccatcttcctgccataccgagcagaggtgggtcctgctggcttccaattcggcatcctggcctgcctcttcgtggagctcttccagagctg

SEQ ID NO: 14783 - DNA, 534 bp, Homo sapiens
cgggcagagcccccggagccatggccagcccttccggcagctccaaagccacaggcaagccccgaggctgggatggccggcccaggagggaggaggacgacgtacctcccgaggagaagaggctgcggctggggctggaagggggaagcgcacagcccgaggactgcgaggacggggaggacgcgccgcggccaggcagggaggagaccggcacccagacaggtggcgacggcagaggaacacagtggctcacgcctgtaatcccagcactttggcaggtcgaggctggcggatcgcctggggtcaggagttcgagaccaggctggccaacatggcgaaactgtctctgctaaaaatacggaagttggctgggagtgatggcacgcacctgtaatcccagctgcttgggaagctgaggcaggagaatcgtttgaagcggggaaagcgaggttgcagtcagctgagatcacaccactgcacttcagccagcctgggtgacagagcgacacttctgtttcaaaaataaacgaatca

SEQ ID NO: 14784 - DNA, 501 bp, Homo sapiens
gtggccgtcctgtgtaggacagactctctttgactccctaggatttaccccagtgcctagcatgtttcacagcttagaggaaaacaacatttgttgactgacttttgatctccattttttggtgagatgcagtggcttacacctgtaatcccagcactttgggaggctgaagcgggcggattacttgaggctaggaattcaagatcagcctggacaacatggcaaaaaataccaaaaataaaaaaaaataaataaataaaaaatttagccagacatggtggcaggcacctgtggtcccagctacttgggaagccaaatcgcttaaacctatgaggtggaggttgcagtgagccaagattgcaccactgcactccagccttggtgacagagtgagaccctgcctcaaaaaaaaaaaaaaaaaaaagtgcggccgctagactagtctagagaaaaaacctcccacaccttcccctgaacctgaaacataaaatgaatgcaatt

SEQ ID NO: 14785 - DNA, 372 bp, Homo sapiens
cgacccacgcgatccggaatttggggtggaatgtgatgagattaaaatgtagctttggtataacttcatgtgtatttcaaaatatactgaacgtcaacatgatttgaataaagaaaatgtattttctacttgaaccacataacactgttatttaaaacagttttctgcagtctaaaaaaaaaaaataaaaaaaacaaagaattgtgcggccgctagactagtctagagaaaaaacctcccacacctccccctgaacctgaaacataaaatgaatgcaattgttgttgttaacttgtttattgcagcttataatggttacaaataaagcattagcatcacaaatttcacaaataaagcatttttttcactgca

SEQ ID NO: 14786 - DNA, 258 bp, Homo sapiens
cgacccacgcgtgcggcagaatggctcccgcaaagaagggtggcgagaagaaaaagggccgttctgccatcaacgaagtggtaacccgagagtgcaccatcaacattcacaagcgcatccatggagtgggcttcaagaagcgtgcacctcgggcactcaaagagattcggaaaattgccatgaaggagatgggaactccagatgtgcgcattgacaccaggctcaacaaagctggctgggccaaaggaataagggaat

SEQ ID NO: 14787 - DNA, 477 bp, Homo sapiens
cggagagagcccagggatgccttatggtcagaacaaatttatagacaacaaaagggaagtgacgtgcagaaatcagaagtgaggtacagaaacagctggactgattacagctcaacatttgccttttttgaacaaatctgaacactcagcagtgtatgagtggttgacgtatggctgctgtgattggccagacctcagctattgttacaggcacatactcttaagtcaggttttcaatcctatctgactataaagttaggttacagtttgtcctcatggactcaaatttagaagtatggcgtccttctcaggccatatttagttcagtttaacaagtgcatatggcttctgacaaaggtgtggcccctttaggactccaaagacgctgtcacttacatggtattcagggaagacacagaggatctgtgagcagcctgcagccaagctttgagatcatattgagatttttttgtaata

SEQ ID NO: 14788 - DNA, 328 bp, Homo sapiens
ccggaagctcacctgcagctacagagctgggagcagagcacccacgcacaccccgaatggctatggaagctgcagggcgccagggacactgggagtccctgctctcatggcaaagcagggacgggggacttaaaagccaccaacaggaaaatcggggaaaaaagggagatggtggtaacagttggacactatttcttggcaaaaccgtggaaaaacacgttctacaccagcaggtggcaaattgtggccgccatctgtgtttgcaaataaagtttaactggaaaaaaaaaaaaaaaaaaaaaaaaaaataaacaaataaataaaaaaa

SEQ ID NO: 14789 - DNA, 337 bp, Homo sapiens
ccgctcccctacatgagctgtcccgcctagtggcctgcgaaccctaacctccacaacaacctcatctcctccgaaggcctgcctgacgaggccttcgagtccctcacccagctgcagcacctctgcgtggctcacaacaagctctcagtggcccctcagtttctgcctccggtccctccgagtcgcggatctggctgccaaccaagtgatggagatcttccccctcacctttggggagaagccggcactcaggtccgtgtacctgcacaacaaccagctgagcaaccctggcctgtcccccgacgcctttcgcggtttcgaggccatcgccaccctc

SEQ ID NO: 14790 - DNA, 469 bp, Homo sapiens
acccacgcgtccgccgattttcaggtgccgtctgtcacccctttctttgactaggaaagggaactccctgaccccttgcactttccgagtgaggcaatgcctcgccctgcttcagctcgcacatggtgcgcgcacccactgacctgcgcccactgtctggcactccgtagtgagatgaacccggtacctcagatggaaatgcagaaatcacccatcttctgcgtcactcaagctgggagctgtagaccggagctgttcctattcgggcatcttggctcctccgctctatttgcagttcttaaagggctattgtactctctgggattgtacgaacttggactggattggaactgcaacagaaaatcttccaggcaagtgccaaagacttacatacacaacagggacagctgatgccaggcgcacacctatgggagctccttccaccctctgggaggctccttgagctgac

SEQ ID NO: 14791 - DNA, 551 bp, Homo sapiens
gatccactagtaacggccgccagtgtgctggaattcgccctttcgagcggccgcccgggcaggtactttcattcagtgtatagggaaaaaagcatgtattgggccaccggaagacaagctaataaataggctggaagtaatattctaccagcaggaactcaacagctccagttaaatgctttgatatagtggctcctttgcagagccaaaacaagatttattaaatttccttcaaactgtttatctttaaaacaaatataaggttttaattatactgctgaagcaaatgtgaatgccaaagactatgttttgcagttttgctttcctcccaataaatattaatgtatgtaattctagagggtaaaaatgtaaataggtttggacaatatttgcacccttgtttgtgttatgaaaaaaatttttccaaggcgagctagagagaaagatgtttggcatgccaaattaacttgcatgtttgttaaaaaaacaaacacatgttttgaagagaaaccagatctgaacgtgtatttgttgaagtttgcaaaataaaa

SEQ ID NO: 14792 - DNA, 463 bp, Homo sapiens
  misc_feature 93, 99: n = A,T,C or G
ggcgaattgggccctctagatgcatgctcgagcggccgccagtgtgatggatatctgcagaattcgccctttcgagcggccgcccgggcaggnactttntttttggtttatattttttttttgtttttttatttttttttttttttttttttttttttttttttttttttttttttttttttttttttttaaaaaaaaaagaaaaagggggggaataaagggggccaaaccaaaaaaaaacccccagggggggggggggggcaaaaaaaaaaaaaaaaaaaccccccccggacccaaaaggggaaaaaaaaaaaccccggggggaaaaaaaaaaaaaacctgggggcccaaaagggggggaaaaaaaaaaaaaaaccccgaaattggggggggggggcgcccccaaaaaaaacccccggaagggggggcaaaaaagggggttaattggggaaccggaaaaaaa

SEQ ID NO: 14793 - DNA, 532 bp, Homo sapiens
cataatggaaaatgtcacgtaaactagatcatggaacaaaatcctctccttgtggaaatatcccatgcagcttgttgatacaacttactatcttattgcctaacaaaaaaatttcttatcattcgttcaaaaaagcaaaatcatggaaaatttttgttgtccaggcaaataaaaggtcacttttaatttagctgcaatttcagtgttcctcactatgtggcatttaaatgtcccctgatgtcattaagcaccatccaaaaagtctgcttcataatctattttcaagacttggtgattctgaaagttttggattttgtgactttcgctctcatgaaaaaaaatattcctacttaaattttaagtctataattcaatttaaatatgtgtgcgtctcatccaggataggataggttgtcttctatcttccattatacctatttactttttttgcaagaaaagagaagcatgaattctaaagatgttccccatgggctttgattgtgtctacactatgatgacctttatataatca

SEQ ID NO: 14794 - DNA, 582 bp, Homo sapiens
cgaatcgggccctctagatgcatgctcgagcggccgccagtgtgatggatatctgcagaattcgccctttcgagcgttcgcccgttcaggtacagacttagaaattatctaaagatttcatctttttacctcatatttcttaggaatttaatggttatatgttgtctttttttcctatgtcttttggctcaagcaacatgtatatcagtgttgactttttctttcttagatctagtttaaaaaaaaaaccacataacaattctttgaagaaaggaagggattaaataatttttttccctaacactttcttgaaggtcaggggctttatctatgaaaaagtagtaaatagttctttgtaacctgtgtgaagcagcagccagccttaaagtagtccattcttgctaatggttagaacagtgaatactagtggaattgtttgggctgcttttagtttctcttaatcaaaattactagatgatagaattcaagaacttgttacatgtattacttggtgtatcgataatcatttaaaagtaaagactctgtcatgcatttttccccattctttttttttccctgtct

SEQ ID NO: 14795 - DNA, 182 bp, Homo sapiens
gccgccagcgtcctccacttcggccttagcgaggtcacgaccgacgaacgcggagcgatcaggaatatttctgaagagtgcagctgcctgaaccgagccctgccgaacagctgacaattgcactgcaaccatgagtgagaacaataagaattccttggagagcagcctacggcaactaaaat

SEQ ID NO: 14796 - DNA, 497 bp, Homo sapiens
ttagcgtggtcgcggccgaggtactatgtgtcttcagagcatgcagaagtcctcgctggagtttcataaggccaatgagtgccaggagcgccctgttgagtgtaagttctgcaaactggacatgcagctcagcaagctggagctccacgagtcctactgtggcagccggacagagctctgccaaggctgtggccagttcatcatgcaccgcatgctcgcccagcacagagatgtctgtcggagtgaacaggcccagctcgggaaaggggaaagaatttcagctcctgaaagggaaatctactgtcattattgcaaccaaatgattccagaaaataagtatttacaccatatgggattcccagaccatgaggccaaagtaaatcctaatcccacacacaggaatggcatggacctgtgattttgagttttcaaggggcgtaagtttttattctccacacctcaaaatacccgacccaaaaaaaaataaaaaaaaaaaa

SEQ ID NO: 14797 - DNA, 522 bp, Homo sapiens
cactagtaacggccgccagtgtgctgcaattcgcccttagcgtggtcgcggccgaggtacttctccgatttcaagaactgatgaaattagaaaaaacacctacagaacagtggatagcctggagcagaccattaaacagctcgaaaatacaatcagtgaaatgagtcccaaagccctagttgatacctcatgttcttccaacagagattctgctgcaagttcatcccacatagcccaagaggcctctccccgacccttgctagttccggatgaaggtcccactgccctagagccccctacgtcgataccttcagcttcacgtaagggctccagcggggccccacagacgagcaggatgcctgtccccatgagtgccaagaacagacccggaaccctggacaaacccggcaagcagtccaaactgcaagatccccgccaatatcgccaggctaatggaagtgctaagaaatctggtggggactttaaagcctacttccccctacttacctgcttctaaagatt

SEQ ID NO: 14798 - DNA, 661 bp, Homo sapiens
ctcggatccactagtaacggccgccagtgtgctggaattcgccctttcgagcggccgcccgggcaggttcatggattggagcagcttcaccaacccctgcaaagtgactctgaagaagacgacaagccctgctccagtcacacccggaagctgactggtccacgcacagctgaagcatgaggaaactcatcgcgggactaattttccttaaaatttacacttgcacagtaaggacttcaactgaccttcctcagactgagaactgtttccagtatatacatcaagtcactgagagaacatcaccaccctgaagccagagactaacactgcaggactcagcaggactatttaagaaacaactgaagcatcaaaccaactttccccacaagtcctcggatctttcctgccatgctgatgccatatattccaacgtgatcaacctggctccccagaaggaggacgactgtgctgtctacaccaacatgcccccttttcatcaccccaggaggacattgccagaccaagtggaatatgtctccattgtattccactgatgggaagctaatgagatgctcagagggggggtcagacctgaccccagctgaatcttggcataccctttgctttagatttaatgtgggggttaaaaaaaaaaaaaata

SEQ ID NO: 14799 - DNA, 555 bp, Homo sapiens
ccctctagatgcatgctcgagcggccgccagtgtgatggatatctgcagaattcgccctttcgagcggccgcccgggcaggtactttttttttttttttttttttttccgcggggtgagctactttagaatctttggctggttttacagttttgggttttcttagcacttggcctggtccatttggtttggaagaatctgtttcttctgatttttaaccaaagggttttttgacaaatggttttggaaaccttttaccttcttctgtggaagttgtgggttttttagaaaagaaaaattggggtttatcattttttctaggcctgaaagttttgggcattcctctttcagaatctagattaatacctaaaaatcttaaaacttgttttttgagaatatttactcttctgacaaattcttcgattaaactttcctcagattttaagttagctaaaacaaaaatcccttgttggggttttttaattccgaatgctaactctgttctttcaagtttttcaattttttcgatgttcttagcatcaaaaccagattttaa

SEQ ID NO: 14800 - DNA, 323 bp, Homo sapiens
ctcggatccactagtaacggccgccagtgtgctggaattcgccctttcgagcggccgcccgggcaggtacgggttatcagacccacaacacgaagctcctgccttttaagactacaaagaggcagctcaaaattagactgcacaggtaagcgaggaactgcagtctaagcctggactctgccttctgccctccccccgcgtactcaagcaataaaatgattgtttaactaacaaaaaaaaaaaaagaaaaaaaaaaaaacaaaataaataaaaaaaaagaaaaaaaatagagaataaagcttccggggaataaaaaaaaaaat

SEQ ID NO: 14801 - DNA, 583 bp, Homo sapiens
gctcggatccactagtaacggccgccagtgtgctggaattcgccctttcgagcggccgcccgggcaggttctttttttttttttcttttgccgagtgagctactgtaggatcttttgctggttatacagtttttggttttcttagcactttgtcttgttcatttcgtttagaagaatctgtttcttctgattttttaacacaaggttttttgacaaatggtttttgaaaacttttaccttcttctgttgaagttgttggttttttagaagagaaaaatttgtgtttatcattttttctaggtctgaaagttttgcgcattcctctttcagaatctagattaataactaaaaatcttaaaacttgttttttgagaatatttactcttctgacaaattcttcgattaaactttcctcagattttaagttagctaaaacaaaaattccttgtttgagttttttaatttcggatgctaactctgttctttcaagtttttcaattttttcgatgttcttagcatcaaaaacagattttaaaacgtcttcaattacttttaaatctgttcctggagctaaaacagtcat

SEQ ID NO: 14802 - DNA, 571 bp, Homo sapiens
ggcgaattgggccctctagatgcatgctcgagcggccgccagtgtgatggatatctgcagaattcgcccttagcgtggtcgcggccgaggtacgtgcttatacaagatgtcaattatgtggtcgtccacatgctgtattacgtaaatttaaaatttgtagaatttgcttccgtgaactagctcacaaaggacaaataccaggtattaagaaagcgagttgataatatgataatcacagatccaatagcagatatgatcacaagaatcaaaaatgccttcacacgtaaacacaaaaatgttattattcctcattctaagaaaaaagaaagaatcttacaaatcttcttagatgaaggatatataaaaggatttactgtatctggtgaagttaaaaaagaaattaatgttgagcttaaatacaaaggaaatacaagttcaattgttggaattaaaagagtttccaagccttctttaagagtttattcttcagcttctgatttacctaaaattgtatcgggatatggaaccgttatagtttcaacatctaaaggattattaactgataaacaag

SEQ ID NO: 14803 - DNA, 571 bp, Homo sapiens
ggcgaattgggccctctagatgcatgctcgagcggccgccagtgtgatggatatctgcagaattcgccctttcgagcggtcgcccgggcaggtgggcaggtacttcagcaagtcctctttctcctcagcagtaagctcagccggcaggtgcctgaccagaagggttcggtcgccccgaggcggggaaagcgaggaggagctcgtgcatccccttgatatcgcaagcggctgctcgggagctgccattttccttggagaagcaaaaacagaaatcgtgggaagaagtctcagtcaaaatcgcggcatcaacacaagctgggagaaatattttttccgcctcgcgctaaggattctggaaaccaggaaataccgagaaagaaagtcaccttctcgcgagaactgcgccaccgaaaagcggcaacccttcgaagactcttcggggaagggcgcggtgctaatgatttaaattccaggggtctccggaaagacttacaagcaaaaattggcccagagatgtgcgagggttaacacaaggtgtcaatcaaagaaggaaacaggaaccccaaccact

SEQ ID NO: 14804 - DNA, 521 bp, Homo sapiens
gctcgagcggccgccagtgtgatggatatctgcagaattcgccctttcgagcggccgcccgggcaggtacaaattgagctctctattcataacctcaatgtatgtattcctgcccattaatatactttgcaccagcaaaagcgatttccaacatatgtgttttggaggtaattaagtaactctgtataaaaataaatgcacttttccctcctttccccagtgaatggaaaacttccatactttcaaaataataataaaaaaataatttttaagagcaacagccctcaactctttgctggtgcctgccatactgcctttcttcactccattcttagctctgctagtttcttcttgtatgtcatgataaaaagggaatgtgggtgtgtaacttttgtgtatgtcccgtttccaaatttccctctccaaaaagccaaccaaataaacaaacaaacaaacgaaaaaaacagtgcaacaaaacacaaatagcattccaacagtttggcaagtgatgcgttcacctg

SEQ ID NO: 14805 - DNA, 689 bp, Homo sapiens
tttcgagcggccgcccgggcaggcacataaaacattattccttccttggcctaaaaactcatcgccacctacattaaagctaatatgcctgattactgtttttagagaacttattttattagggcagttccaagctcaaaaatacgctaactggcaccttgttagctacataaaaatgcaccctagacccgaaacttactagactcattataaaattttctttaaggtgtccacgcagtccctggtcacacttgaagcagtccggagaaatatcagccctaccccagtaatccccagaaggaacttacacttttttttaatcttttcctacaacttcatattttataaataaaaagacaaaaatgtcaggcctgtgagctgaagcttagccattgtaacccctgtgacctgcacatatccgtccaggtggcctgcaggagccaagaagtctggagcagccgaaaaaccacatagaagtgaaacagccagttcctgccttaactaattaacccaccttacgacatttcaccattatgacttgtccaccattatgacttgttcctgccctggcccaactgatcaatcaaacctgtgacattcttctcctggacaatgagtcccatcatttctccaccatgcaccttgtgaccccctcctctgctgaggataaccacctttaactgtaactt

SEQ ID NO: 14806 - DNA, 413 bp, Homo sapiens
ctaaagggaacaaaagctgggtaccgggccccccctcgaggtcgacggtatcgataagcttgatatcgaatttttgcattccgggggatccactagttctagagcgccaccgcggtggagctccaattcgccctatagtgagtcgtattacgcgcgctcactggccgtcgttttacaacgtcgtgactgggaaaaccctggcgttacccaacttaatcgccttgcagcacatccccctttcgccagctggcgtaatagcgaagaggcccgcaccgatcgcccttcccaacagttgcgcagcctgaatggcgaatgggacgcgccctgtagcggcgcattaagcgcggcgggtgtggtggttacgcgcagcgtgaccgctacacttgccagcgccctagcgcccgctcctttcg

SEQ ID NO: 14807 - DNA, 616 bp, Homo sapiens
taccgagctcggatccactagtaacggccgccagtgtgctggaattcgccctttcgagcggccgcccgggcaggtacagggtctgtcagaaactgttggaatcttacataaagtcaagtctcagaaatgtccgatgcttcaccatattcttatattctatgcaattgttgtctgtgcactaatcatctcgaccttctacatgagatacagaattaatactctggaggagcagctggggttactaacctccattgtggacacccataatactgaacaggcagcaccatctggcctgaggtcacaagtacctcggccgcgaccacgctaagggcgaattctgcagatatccatcacactggcggccgctcgagcatgcatctagagggcccaattcgccctatagtgagtcgtattacaattcactggccgtcgttttacaacgtcgtgactgggaaaaccctggcgttacccaacttaatcgccttgcagcacatccccctttcgccagctggcgtaatagcgaagaggcccgcaccgatcgcccttcccaacagttgcgcagcctgaatggcgaatggacgcgccctgtagcggcgcattaagcgcggcgggtgtg

SEQ ID NO: 14808 - DNA, 494 bp, Homo sapiens
cactagtaacggccgccagtgtgctggaattcgccctttcgagcggccgcccgggcaggtacgcggggtttgttccaacttttctgctaatctgggaggtgttgggcgcggacagtcgagatgtcagagaaaaagcagccggagacttaggtctgttagaggaagacgacgagtttgaagagttccctgccgaagactgggctggcttagatgaagatgaagatgcacatgtctgggaggataattgggatgatgacaatgtagaggatgacttctctaatcagttacgagctgaactagagaaacatggttataagatggagacttcatagcatccagaagaagtgttgaagtaacctaaacttgacctgcttaatacattctaaggcaaagaacccaggatgggacactaaaaaaatgtgtttatttcattatctgctcggatttaattgggtttttggaacacaaaaaataaatgttttgatggtcaaaaa

SEQ ID NO: 14809 - DNA, 263 bp, Homo sapiens
  misc_feature 55: n = A,T,C or G
cactagtaacggccgccagtgtgctggaattcgccctttcgagcggccgcccggncaggtacgcggggtaagtgtctgcgccgccactgtccggccacagcctaacgctcttcgctgtcgtttgtggtctcgcgcagggcggccccggttctggtgtttggcgtcggaattaaacaaccaccatgtcgagcaaaaaggcaaagaccaagaccaccaagaagcgccctcagcgtgcaacatccaatgtgttagccatgtttgac

SEQ ID NO: 14810 - DNA, 675 bp, Homo sapiens
gctcggatccactagtaacggccgccagtgtgctggaattcgcccttagcgtggtcgcggccgaggtactgtgatatttacatatttttgagaaaaattcccaagccaggcgaatgtggattggaataaagacataggcagtgtataccaccatagcaataatggttagtaagatggtgttaaacatagatcgctcccagggctctaaaacagcacagcagctaatgatttggtattgatagtagagccaggagaaatattccttcacacgcctcagatccatggttggctccttcaagctgcagtaagtttgtcctaagaaagtccaggtctggttcttcagccttgctccttcgcgaaatgatcctgtgtgggttagttctcctctctgggttgctgtttcctcatctaccagttgggtgtatctccctgcggcttaggtgagcgccgaggctttggctcctccccagctgctgcgagctttccgctgcccccgcgtacctgcccgggcggccgctcgaaagggcgaattctgcagatatccatcacactggcggccgctcgagcatgcatctagagggcccaattcgccctatagtgagtcgtattacaattcactggccgtcgttttacaacgtcgagactgggaaaaccctggcgttacccaacttaatc

SEQ ID NO: 14811 - DNA, 369 bp, Homo sapiens
  misc_feature 33: n = A,T,C or G
gaggaggcgtggatcccccgggctgaaggaatncgatatcaagcttatcgataccgtttacctctatggggggcccggtacccagcttttgttccctttagtgagggttaattgcgcgcttggcgtaatcatggtcatagctggttcctgtgtgaaattgttatccgctcacaattccacacaacatacgagccgggagcataaagtgtaaagcctggggtgcctaatgagtgagctaactcacattaattgcgttgcgctcactgcccgctttccagtcgggaaacctgtcgtgccaactgcataaatgaatcggccaacgcgcggggagaggcggtttgcgtattgggcgctcttccgcttcctcgc

SEQ ID NO: 14812 - DNA, 826 bp, Homo sapiens
  misc_feature 13, 14, 18, 24, 50, 71, 294: n = A,T,C or G
ttcacgtcggacnncccncgtagnaaagggaacaaaagccgccgaccggncccaaccaccaggtcgacggnaccgaaaagcacgatattgaagttttgcagcccggccgacggggggaggggagcccgcggaggggccccaacccccccaacagagaggcgcattacgcgcgcacacgggccgccagaagacaacgtcaagacggggaaaaccccggcgctacccaacataagcgccgtgcagcacaaacccccaacgccagcaggcggaagagcgaagaggcccgcaccagancgcccgaacccaacaggagcgcagcccgaaaggcgaacgggacgcgccctgcagcgggacaaaaagcgcagcggcagaggaggagacccgcagcgagaccgctacaccagccagcgcccaaacgcccgcaccaatcgccggacagccggccaggacacgccacggaccgccggcgatcccccggcaagccctaaaacgggggcacgccctgagggggccgaaacaaaggcggaacggggagccagaaccaccaaaaaaaccgcacaagggggaaagggacaacgaaaggggcccaccgccccagaaagacggggccccaccccgaggacgtgggaaaccaccggcccaaaaaggcgggacccgcggaccaaacagggaacaacacggaaaccgcgacaggggccaaaccctgagaaggaaaaagggaaacagagccgaaaagggcccaacgcggaaaaaagaaggaccgaaaaaacaaaaagtcacaggcgagagcacacaaaaggcaccccgaaccaataagcgggacact

SEQ ID NO: 14813 - DNA, 574 bp, Homo sapiens
  misc_feature 66: n = A,T,C or G
accgggccccccctcgaggtcgacggtatcgataagcttgatatcgaattattgagcctggggganccactagttctagagcgttcgaggtacttatcaataatggggtttttaaagtcataatactttgtccagtagatgcagagttgctggtagtttatgactaattccaagaccgtccgaaatccctgggctgtgttgaaatgtgttttcatgctccctcgctcccaagcatagaccgtcaggagctccagggcatactgaggtggcagcttcccaagcttcttcttacaattttggtacctgcccgggcggccgccaccgcggtggagctccaattcgccctatagtgagtcgtattacgcgcgctcactggccgtcgttttacaacgtcgtgactgggaaaaccctggcgttacccaacttaatcgccttgcagcacatccccctttcgccagctggcgtaatagcgaagaggcccgcaccgatcgcccttcccaacagttgcgcagcctgaatggcgaatgggacccgccctgtagcggcgcattaagcgcggcgggtgtggtggtta

SEQ ID NO: 14814 - DNA, 455 bp, Homo sapiens
ggcgaattggagctccaccgcggtggcggccgcccggtcaggtacactcggaaatggaaggcgatgttttagtctttcttcatctcggtatggaaatccacctgcagctgtgggtccatgacgaaagggatgatcggtgtccctgtgattatcacacaagaaccagtagacaaggacacaggccgtgtgtgtggtacctcggccgctctagaactagtggatcccccgggctgcaggaattcgatatcaagcttatcgataccgtcgacctcgagggggggcccggtacccagcttttgttccctttagtgagggttaattgcgcgcttggcgtaatcatggtcatagctgtttcctgtgtgaaattgttatccgctcacaattccacacaacatacgagccgggagcataaagtgtaaagcctggcgtgcctaatgagtgaacttactcacatt

SEQ ID NO: 14815 - DNA, 397 bp, Homo sapiens
  misc_feature 37: n = A,T,C or G
cacaacataccatccgggatcttaaagtgttaagccnggggtgcctagggagtgagctaactcacattaactgcgttgcgctcactgcccgcttccagtcgggaaacctgtcgcgccagctgcaattaatgaatcggccaacgcgcggggagaggcggcaagcgaattgggcgctcttccgcttcctcgctcactgactcgctgcgctcggtcgttcggctgcggcgagcgagatcagctcactcaaaggcggtaatacggatatccacagaaacaggggataacgcaggaaagaacatgtgagcaaaaagccagcaaaaggccaggaaccgcaaaaaggcccgcatgctggcgattaaccaaaggctccgcccccctggacgagcatcacaaaaat

SEQ ID NO: 14816 - DNA, 795 bp, Homo sapiens
  misc_feature 10, 12, 13, 14, 15, 17, 18, 66, 77, 105, 153, 161, 162, 175,181, 185, 186, 187, 218, 252, 297, 316, 320, 327, 339, 341,385, 392, 408, 423, 424, 462, 464, 517, 541, 542, 546, 592,738, 760: n = A,T,C or G
ttcaatttcnannnncnngttacaaatgtcgcaaccgggccccccctcgagggcgacgggatcganaagctcgaaancgaaattatgcagattgggggacccacnaacgcgggagcggcgccaccgcggaggagcaccaacacgcccaacagngaggcgannacgcgcgcccacnggccgncgannnacaacgacgagacggggaaaacccaggcggnacccaacaaaaacgccgggcagcacaacccccanacgccagcagggcgaaaagcgaagaggcccgcaccgagcgccccncccaacagaggcgcagccngaanggcgaangggacgcgcccngnagcggcgcaaaaaacgcggcgggcgggggggaaacgcgcagcgngaccgcnacacaagccagcgcgncagcgcccgcgccanncgcggacaaccccacacaacacgccacggacgccggcngnccccgccaagcgcaaaaacgggggcccccacaagggggccgaacaagagcganaacggaccccgaccccaaaaaaanngaanagggcgaagggccacggagggggccaccgccccgagagacgggganccgcccccagacggaggagaccaaggaccacaaaaaaggggacccgagggccaaacaggaacaacacacaacccaaacccgggcgacgccgaggaaccaaaaaggagagggccgacaacggccaaggggaaaaaaagaagccgagnaaacaaaaagaacagcgacagngacaaacaaaaaaacgcgccaaagaagggggaccc

SEQ ID NO: 14817 - DNA, 417 bp, Homo sapiens
ggcgggaccccgggctgcaggaatacgaaacaactatcgaaccgtctatttcgagggtgggcccggaacccagctggggttcccttaagtgagggataatcgcgcgcttggcgtaatcatggcatagctgaatcctgtgtgaaattgttatccgctcacaattccacacaacatacgagccgggagcataaagtgaaaagcctggggtgcctaatgagtgagctaactcacattaattgcgttgcgctcactgcccgctatccagtcgggaaacctgacgagccagctgcattaatgaatcgggcaacgcgcggggagaggcggtatgcgaattgggcgctcttccgcttcctcgctcactgactcgctgcgctcggtcgtacggctggggcgagcggtatcagctcactcaaaggc

SEQ ID NO: 14818 - DNA, 496 bp, Homo sapiens
  misc_feature 80, 323, 381: n = A,T,C or G
ccctctagatgcatgctcgagcggccgccagtgtgatggatatctgcagaattcgcccttagttttgtctttttcgacgnaccacacacataggtagccagcattcatggaacaggcaccgtgggctgggctgcaccacaccatctttccatgtgttatctctttctagagacttcttgaaaattggtaggattatcatatcatatgttcttggaaacatctgttgactatttctgtacatcatggctcggacttgggtcaagctcttggcaccaatgtcctggcatgagtgttggatgccagcaatcaggtaagggacaaanttgtggattgaccctatgtcctgcacagcaccagacactccctgggccactttgattntgtcagcttcactgaaatatctgttctggctgctgaggtgcttgtccatggcatcgagagaacccataccgcgatatttctttagccggatcccatcggaaaagaagtattcacc

SEQ ID NO: 14819 - DNA, 533 bp, Homo sapiens
tggagctccaccgcggtggcggccgaggtacatttttaaagagttgttttttggccgggcgctttggctcattcctgtaatcccagcactttgggaggccgaggtgggcggatcacgaggtctggagtttgagaccatcctggctaacacagtgaaatcccgtctctactaaaaatacaaaaaattagccaggcgtggtggctggcacctgtagtcccagctacttgggaggctgaggcaggagaatggcgtgaacctggaaggaagaggttgcagtgagccaagattgcgcccctgcactccagcctgggcaacagagcaagactccatctcaaaaaaaaaaaaaaaaaaagtacctgcccgggcggccgctctagaactagtggatcccccgggctgcaggaattcgatatcaagcttatcgataccgtcgacctggagggggggcccggtacccagcttttgttccctttagtgagggttaattgcgcgcttggcgtaatcatggtcatagctgtttcctgtgtgaaatt

SEQ ID NO: 14820 - DNA, 417 bp, Homo sapiens
cgcgtccgccctcgtcaattgttgatgctctttcccctccccgaggtctcgcagcaaagcctggtgggctggccttgtgtggctgcttctccaggcctggtcaggacccagcaggctcagggtctgctcctgatgctgtgctctgggacaggcacgccactgtgtgaaacactaagcaaggtaatcgagcatttcgagatcacagactccagcttcctggtccacccagcatgtagtcagcactctgaccttgacaccagagctccacagcggctaggagttgacttcctgtgtcatgacctcaggaaataaatttccttgactttaaaaaaaaaaaaaaaaagaggggggcccttaaactattttaaaaaaaaaatttcccccacctccccttggccctgaaccactaaaaaatgg

SEQ ID NO: 14821 - DNA, 432 bp, Homo sapiens
ctggttctgctgagacgcgtgtggctccctccacgcaacagccaaaatggtgaagctgatcgagagcaaggaagcttttcaggaggccctggccgccgcgggagacaagcttgtcgtggtggacttctctgctacgtggtgtggaccttgcaaaatgatcaagcccttcttccattccctctgtgacaagtattccaatgtggcgttccttgaagtgtatgtggatgactgccaggatgttgctgcagactgtgaagtctaatgcatgccgaccttccagctctataaaaagggtcaaaaggggggggagttctacggcgctaacaaggaaaagcttgaagcctctattactgaatatgcctaatcatgctctgaaaagtgtgaccagctaccagctggttaaaacctgtacctttgttaatttgcaaaaaa

SEQ ID NO: 14822 - DNA, 420 bp, Homo sapiens
tcgacccacgcgtccgcactggtttctgttgaagcagcttgtgtggcacctgtggagtccttgtgtgattattcttgttcgaggtacttagggcaagtcacatgccctccatcccatggctcagagatgaagagtatatgcaaaacatgtgcctcgctcttggtcactaactgctgccctgatgtgggttattatttttggagttggggtcttgtggaggcatggctggtgatgctgtgtgtattcagagggaggggagagtggagagcgtgttgctaacctgtaaacaaagctggtttgttttaggaagactgcatgtgctggaagcttgaaagttcccagtccagaagcagaattattacttccagaccctacaccttattctttataaaacaaagcctctacctcaccaatcacttg

SEQ ID NO: 14823 - DNA, 418 bp, Homo sapiens
tatagggcgaattgggccctctagatgcatgctcgagcggccgccagtgtgatggatatctgcagaattggccctttcgagcggccgcccgggcaggtactttcttaatgccttcgttggagtcctgatcctcatctttaaaaaaaaaaaaaacagcttagcctaagccacattcactttttttagtttacaaaatggatttaacagccacaatgtgatttttgccacaactgtgtgattttaatattctctaatatcatgggcggatttagaattgcacgatatacctggagatatctcagtggaatgaatttttgctttaagagaaatgacagtcgtctgtctctggaattgataatacagctgcatcctagtcccatctgatattaagaaaataaccgtaatctttacaaaacac

SEQ ID NO: 14824 - DNA, 404 bp, Homo sapiens
  misc_feature 84, 85, 87, 92, 93, 94, 124, 173, 179, 216, 274, 284, 348: n = A,T,C or G
ttttacactcctatggcgaattggccctttatcatctcagcgccccatgtatgatatctcaaatgcgcctgaggtggaccaacnngntcccnnnagacacacacccaaatttcttgtattcgcngctcaaggaagccaaaatgacagatatataaggcgcatctacagccacnaataanggcataccagaagccaccccggcggggccttatctangacttccagacttcaaaactactgctggccttccttcactgtgcctgggggaggcttngagagaccangtggactggagtaaactgttagagacacctggtctgtaaagatgtccagaagaccacgagcctncagcccattgtgcaacaaccacccaccaacaccaaaggaggtgcccaagacaacct

SEQ ID NO: 14825 - DNA, 433 bp, Homo sapiens
acgactcactatagggcgaattgggccctctagatgcatgctcgagcggccgccagtgtgatggatatctgcagaattcgcccttagcgtggtcgcggccgaggtacaccaagaccaattgctaaaatcttggattatggaaaatttaagtatgaaagaaagaaaaaacaaaaagttgaaaaagaaaaacaatctttcacaaacaatagagaaattcgtttatcttttggaatcaatttaagtgatataaaaatcaaagcaaaaaaagccaaagaatttttattagataacgacagagtaaaagtggctcttcgtcttagagggcgtgaaaatacaagacctgaacaaggtaaattaattttaaattctttttttgatgaagtaaaatcgattgcaaaattaagtaaagaaatgcaatcagttggtaattttt

SEQ ID NO: 14826 - DNA, 414 bp, Homo sapiens
agggcgaattgggccctctagatgcatgctcgagcggccgccagtgtgatggatatctgcagaattggcccttgcgagcggccgcccgggcaggtacaaattgagctctctattcataacctcaatgtatgtattcctgcccattaatatactttgcaccagcaaaagcgatttccaacatatgtgttttggaggtaattaagtaactctgtataaaaataaatgcacttttccctcctttccccagtgaatggaaaacttccatactttcaaaataataataaaaaaataatttttaagagcaacagccctcaactctttgctggtgcctgccatactgcctttcttcactccattcttagctctgctagtttcttcttgtatgtcatgataaaaagggaatggtgggtgtgt

SEQ ID NO: 14827 - DNA, 399 bp, Homo sapiens
cgactcactatagggcgaattgggccctctagatgcatgctcgagcggccgccagtgtgatggatatctgcagaattcgcgccttagcgtggtcgcggccgaggtacactggaggctggagcctgcagatggcatggctctgcggctcaccttgctgcagttggtggtggtgacagagactgcagcttgactgtagtgaatttggaaattatctgtctggaagctctgagtttatcttgggacctcaagaggagaggatcacccaactcacagcaatcaaactccaaatggtgctataaactgaaccacacatggacacgtcagtcttccgaggacccttagatcaaccccaggaggagccctagctgctgttccccattcgacgcccctttccagcag

SEQ ID NO: 14828 - DNA, 208 bp, Homo sapiens
  misc_feature 78, 125, 126, 127, 165, 174: n = A,T,C or G
gattctacatcttagcgattgggccctctaatctccgagcggcccccatggatgttctcaatggggcttttgccaaanccggccgcggcagtctgctgaaatggccttttggcttttgggttttnnngggcccgttcctccaaacccctggggggtgggaaaaanttttttttnccccccccttaaaaaaaaagggatttttcccccc

SEQ ID NO: 14829 - DNA, 485 bp, Homo sapiens
  misc_feature 91, 93: n = A,T,C or G
ttgggccctctagatgcatgctcgagcggccgccagtgtgatggatatctgcagaattcgccctttcgagcggccgcccgggcaggaactnantttattttttttttttgttttttcttggtttttttatttttttttatttttttttatattttttttaattatatattttttatatttttttgggggaaaaaaaaaaaaaattttaaagaaagggggggagaaaagaattaacaaaaaaaaaaaaaaaaaaagaaaagggtctcaaagggggggggggcaaaaaagggaaaaaaggaaaaggcataaattagggggaaaaaaaaaaaatttaaaaaaaaggtaggaggggggggaaggtaaaaaaaaaaaaaaagttttggaaatgggggaaagaaaaaattaaaaaaaaaaggaaattttaaaaaaaaaaaaggggaaaaaaaaaaacccaattgggtgtttgaacccaaaaaaaaaaaaaa

SEQ ID NO: 14830 - DNA, 537 bp, Homo sapiens
  misc_feature 277: n = A,T,C or G
attgggccctctagatgcatgctcgagcggccgccagtgtgatggatatctgcagaattcgccctttcgagcggccgcccgggcaggtactctgtctctgtagtctctccattctaaagtttaatttggaaaggtctgtcctgaattatcaaagtaagaatactcagatttccataagctcttctcacctcctcttagcccaactcaaactccatcagaccttctcaccttgattttgagctggaatgtttcaatgagcaaaataaattagacaaangttaaaaaaaaaaaaaaaaaaaaaggtacctcggccgcgaccacgctaagggcgaattccagcacactggcggccgttactagtggatccgagctcggtaccaagcttggcgtaatcatggtcatagctgtttcctgtgtgaaattgttatccgctcacaattccacacaacatacgagccggaagcataaagtgtaaagcctggggtgcctaatgagtgagctaactcacattagttgcgttgcgctcactgcccgctt

SEQ ID NO: 14831 - DNA, 466 bp, Homo sapiens
gggccctctagatgcatgctcgagcggccgacagtgtgatggatatctgcagaattcgcccttagcgtggtcgcggccgaggtacctgaccccggtcctcaaggaatcaaagtttaaggaaacaggtgtaattaccccagaagagtttgtggcagctggagatcacctagtccaccactgtccaacatggcaatgggctacaggggaagaattgaaagtgaaggcatacctaccaacaggcaaacaatttttggtaaccaaaaatgtgccgtgctataagcggtgcaaacagatggaatattcagatgaattggaagctatcattgaagaagatgatggtgatggcggatgggtagatacatatcacaacacaggtattacaggaataacggaagccgttaaagagatcacactggaaaataaggacaatataaggcttcaagattgctcagcactatgtgaagag

SEQ ID NO: 14832 - DNA, 372 bp, Homo sapiens
  misc_feature 82: n = A,T,C or G
ttgggccctctagatgcatgctcgagcggccgccagtgtgatggatatctgcagaattcgcccttagcgtggtcgcagccgnggcactttcttttttttttttttttttttgctttttttttttatatatttttttttatttttttttatacctttccaaaacatatacttttaacatttatttataatggccagctcccaacattttaaaaaaactgcaccccccaatgggtgaacaaagtaaagagtagtaacctaaagttcaactgagtaagccactgtggaaccttaaatggtgaggtcttccaatttcaaagtgatgtgtcttcaacttgtatcatcatttcagcggaaaaacataatttaattttg

SEQ ID NO: 14833 - DNA, 194 bp, Homo sapiens
ggcgtcgcgacccccgaggacctcctctactcgctctgtggcatacactagtcctgggcactcaaccgcggagagcccccgaccccggggtagcggctgagcctcagccgggaccgggaccggagcccgcgcggagcatggatccgggctgggggcagcgggacgtgggctgggtggccctcctgatcctcttc

SEQ ID NO: 14834 - DNA, 263 bp, Homo sapiens
ctcagcgaatttgtgtgtttgtgtttgtttggggtttttgtttttatttcttacattagagttcatattttctgggatttaaattataggtgtattttcctattctcttgagaagtagactaaacagtctttgcaatgatgacggatgcacacagaagaaaacattagaagacattactttctatcctctcatgtggttgagcattcttacagccaaatgactaaattgggtttttaggaggagcagctgtcactacatgtga

SEQ ID NO: 14835 - DNA, 548 bp, Homo sapiens
ccacgcgtccgagctcgctcagcactcccaggtccttagcactcccaggtcgtagctggcgcagtcagtaggaactgtaactatgtctctgatgcaccacgtgtttagacacagcacagtccttttttctgttcctacggtggaagtagtttctctttgggcatgctgacagcactttttcatagcctcaccgatgagccctttctgcgggagtgactccatgcctgtatacagagtatttatacagatgttttagcatcttcatatgcggtgttaacccctagttctgtacagcatattctgttcaagtatttttttacaagcttgtgctgtaggcacatgccttctgctgcagaagtggacacccgtggcacacccaccccgccccagtggggtgccatgccttcctgggacattgccacttctgccctggaactcatgcaggtacgtagtagctgctattgccagaacagcaaagccaagcaagagatggtccatgcttttctgacgttctcagaatagtggctagcctaaaacctgacaagcgc

SEQ ID NO: 14836 - DNA, 538 bp, Homo sapiens
acgcctatcacatagtcaaacccagtccctggccactgacaggagctctgtcagctttcttaataacgtccggcttaatcatatgatttcacttctactctatcaccctactaacactaggcctactaaccaacacactaaccttatatcaatgatgacgtgacatcgtacgagaaagcacataccaaggccaccacacaatacccgtccaaaaaagccttcggtacggaataacactatttatcatctcaaaagtattcttttttatcggcttcttctgagcattttaccactcaagcctcgccccaacaccctgcttagggggccattgaccaccaacaggcatcacccccctgaaccccatagaagtacccctcctaaacacctttgttttacttgcatctggggttacaatcacctgagcttaccacagcctcattaaataatgaccgaaaacaaacaatccaagccctgctcatcacaatcctactaggtacctatttcaccctactacaagccttagaatactttgaagcac

SEQ ID NO: 14837 - DNA, 532 bp, Homo sapiens
accttatgtcttgtcagatgtctaggcctggccgggcgcggtggctcacacctgtaatcccagcactttgggaggccgaggcgggtggatcacgagggcaggagtttgagaccagcctgatcaacatggtgaaaccccgtctctactaaaaatacagaaattagccgggcatcgcggcacatgcctgtaatcccagctactcgggaggccgaggcaagagaatcgcttgaacccaggaggtggaagttgcagtgagccaaaatcacgccactgcactccagcctgggcagcagagtgagactccgtctgaaaaacaaaacaaaacaaaaaagctaaaccagatgtctaggccaatgataattatttttgatgcagtgtggattagttcttttgttaaccccactgtcttggggaatgatgcctgctgggaaaatgagtttttgactgaaacatggaaccttcactgctttttttctggtttctatgaagggttggaacatagaaaacacaaaaactcaccttgaaatttgag

SEQ ID NO: 14838 - DNA, 466 bp, Homo sapiens
ctcacgcgtccgctgatctgctttgggacggcctttatatacttcctcctttccaggccttccaccaccagtgaccactattcgacatctggcccactctcagtcatcctcctgcttatgcttgtcttctccttgaaggcttcccactgcatgtaggacaaaggtcagattttgtaacaggccaggcctggacttcatagtctgggatccactaatttatggtctcagtctcatcccttggaggattacctctgtccttcgcacgctctgtgctccagacttatattaaaagcaaacaaataaaacttggttttcagaaaatgcctgactctttattaccacctgcttttgcacctgctctgagggtactttactgagcaagtagaaaagggtgttccttgtttcttttatgcttcatagaattttgttcatttagcaattataactcttatgaaactgtgttaag

SEQ ID NO: 14839 - DNA, 553 bp, Homo sapiens
agctctctccataacaattctcctacaaatcaccttaattctgacattcatggccacagaactaattatattctacattctatttgaaaccacccttatccccaccctaattatcattactaaatgaggcagccaagcaaaacgccttaacgcaagaacttactttctattctacacactaaccggctctctacccctactcatcatactaagccacacctacaacaacacaggctcactaaacatcacactactaacactcacagaccaaaaactaacaaccacctggtcccacagctttacctggctagcatgcataataaacctttatgacaaaaatacccctttatggcttacacctatgactccccaaagcccatgttgaagcccccattgcagggtcaataatccttgccgcagtactcctaaaactaggcggctattgcataaaacggattactcccattcttaacccccttaacggaaatacatagcctaaccattcctcatattatccttatggggcataaatataacaaagcctaacatgcct

SEQ ID NO: 14840 - DNA, 425 bp, Homo sapiens
attggagctccaccgcggtggcggccgaggtacctgctacttttaaacaatttcaactgcagctctctttcactaagtaagatgggtaaagcatgccatttctgtttgcttgagatttttactttttagaaacacacatgctttcactgccatctgacacttctccacacgctttcatcttgtaaacctgaattctatttcgagtacctatcaaatactttctggaggtggggcacgctccgctcggtcatgatgctgatccacttgggaacatcagttcctttcctcttcactccagcgtcatagagatcccgagcatcttggtcaatcagttcataatcaatgacagagccatcctctgctcttctaccctttgccagggcaaccatcagcttgcggaagtcaccagatgtgtccgaaataat

SEQ ID NO: 14841 - DNA, 195 bp, Homo sapiens
agcttttgttccctttagtgaggggtaattgcgcgccttggcgaatcatgggcataggtgtttcctgggtgaaattgttatccgggggggggccacacaacatgcgagccggaagcataaagtgtaaagcctggggggcctaaggagggagctaactcacattaattgcagtggcgctcactggccgctttccag

SEQ ID NO: 14842 - DNA, 462 bp, Homo sapiens
agctccccgcggtggcggccgcccgggcaggtacctgttgtgtccctttctcttcaaagatcctgagcaaaacagagatacgctttccattacctcatgggggggccctggaccgcagtgcttgcattgctatggtcgcctatcatctcgctccatgaggctgtggagctagctgattcctgtgtgaaattgttatccgctcacaattccacacaacatacgagccgggagcataaagtgtaaagcctggggtgcctaatgagtgagctaactcacattaattgcgttgcgctcactgcccgctttccagtcgggaaacctgtcgtgccagctgcattaatgaatcggccaacgcgcggggagaggcggattgcgtattgggcgctcttccgctttctcgctcactgactcgctgcgctcggtcgtttggctgcggcgagcggtattagcttactcaaaggc

SEQ ID NO: 14843 - DNA, 495 bp, Homo sapiens
gcgaattggagctccaccgcggtggcggccgctctagaactagtggatcccccgggctgcaggaattcgatatcaagcttatcgataccgtcgacctcgagggggggcccggtacccagcttttgttccctttagtgagggttaattgcgcgcttggcgtaatcatggttatagggtgtttcctgtgtgaaattgttatccgctcacaattccacacaacatacgagccgggagcataaagtgtaaagcctggggtgcctaatgagtgagctaactcacattaattgcgttgcgctcactgcccgctttccagtcgggaaacctgtcgtgccagctgcattaatgaatcggccaacgcgcggggagaggcggcttgcgtattgggcgctcttccgcttcctcggtcactgactcgctgcgctcggtcgttcggctgcggcgagcggtatcagctcactcaaaggcggtaatacgggtattcacagaatcagggga

SEQ ID NO: 14844 - DNA, 519 bp, Homo sapiens
ttagggcgaattggagctccaccgcggtggcggccgctctagaactagtggatcccccgggctgcaggaattcgatatcaagcttatcgataccgtcgacctcgagggggggcccggtacccagcttttgttccctttagtgagggttaattgcgcgcttggcgtaatcatggtccatagctggtttcctgtgtgaaattgttatccgctcacaattccacacaacatacgagccgggagcataaagtgtaaagcctggggtgcctaatgagtgagctaactcacattaattgcgttgcgctcactgcccgctttccagtcgggaaacctgtcgtgccagctgcattaatgaatcggccaacgcgcggggagaggcggtttgcgtattgggcgctcttccgctttctcgcttcactgactcgctgcgctcggtcgttcggctgcggcgagcggtatcagctcactcaaaggcggtaatacgggtttccacagaatcaggggataacgcaggaaagaaca

SEQ ID NO: 14845 - DNA, 438 bp, Homo sapiens
gagctccaccgcggtggcggccgaggtacctaacctaccttaagactgggataactattggaaacaatagctaataccggatatagttatttatcgcatgatgagtaatagaaaggagcttcacagcttcacttaaaaatgggggtgcggaacattagttagttggtagggtaatggcctaccaagacgatgatgtttagccgggccgagaggctgtacctgcccgggcggccgctctagaactagtggatcccccgggctgcaggaattcgatatcaagcttatcgataccgtcgacctcgagggggggcccggtacccagcttttgttccctttagtgagggttaattgcgcgcttggcgtaatcatggtcatagctgtttcctgtgtgaaattgttatccgctcacaattccacacaacatacgagccgggagca

SEQ ID NO: 14846 - DNA, 491 bp, Homo sapiens
ctatacggcgaattggagctccaccgcggtggcggctgcccgggcaggtacttttttttttttttttttttttttgggatggagtcttgctctgttgcccaggctggagtgcaggggcgcaatcttggctcactgcaaccttttccttccaggttcacgccattctcctgcctcagcctcccaagtagttgggactacaggtgccagccaccacgcctggctaattttttgtatttttagtagagacgggatttcactgtgttagccaggatggtctcaaactccagacctcgtgatccgcccaccttggcctcccaaagtgctgggattacaggcatgagccactgcgcccggccaaaaaacaactttttaaaaatgtacctcggccgctctagaactagtggatcccccgggctgcaggaatttgatatcaagcttatcgataccgtcgaccttgagggggggcccggtacccagcttttgttcccttt

SEQ ID NO: 14847 - DNA, 404 bp, Homo sapiens
ggtggcggtaccttgtctggagaatgcagtgacagcaccggcccagcttgagaacccagcggctgtgcagagggcagccgaccactatagccagcagatggcccagcaactgaggctccccacagacacgctccaggagctgctggacgtgcatgcagcctgtgagagggaagccattgcagtcttcatggagcactccttcaaggatgaaaaccatgaattccagaagaagcttgtggacaccatagagaaaaagaagggagactttgtgctgcagaatgaagaggcatctgccaaatattgccaggctgagcttaagcggctttcagagcacctgacagaaagcattttgagaggaattttctctgtttcctggaggacacaatctctacttagaagaaaag

SEQ ID NO: 14848 - DNA, 396 bp, Homo sapiens
gcgaattggagctccaccgcggtggcggccgcccggccaggtacccttggaagatgggaaaggtgagggaaatattagaagcagggtcagaacatccactaagaacatagcacctcagtagagcttacattatagagccagggtagagttattactgaatagcttaggatgatgaacattaaccttcctacaggagtagtagcagctgatttggcgaccattattggtcaccttttagtgtcactgcaaactaagaacaattatggcttgacatatactccatgtatggaagtgatgggagaggcaaaactctgtgtggtccatccttggatgcactgcgtcgattttgctcccctctggttttaaggagatcttacagacctttacttgctaact

SEQ ID NO: 14849 - DNA, 438 bp, Homo sapiens
actatagggcgaattggagctccaccgcggtggcggccgaggtacttttttttttttttttttttgcaactcgagacgttagtttactccagagtcatggagacagtgaatggagtgtgtgtgtgtgtgtgcgtgtgcgtgagtgagagagagagagaggaagaagggagggagggatggttacaggagtgtgggaaagtcaacaggaaaaggagggaaggttcgctgtgaactgacagtaactgtgacatcacaggcatgtgcggagtccccgcccccccaggcactgtgccaaggccagtacctgcccgggcggccgctctagaactagtggatcccccgggctgcaagaattcgatattaagcttatcgattccgacgacctcgagggggggcccggtacccagcttttgttttctttagtgagggttaattgcg

SEQ ID NO: 14850 - DNA, 519 bp, Homo sapiens
gaattggatctccaccgcggtggcggccgaggtaccttttaaatctagcccagtataaacattagcctgcttaatatttagacatttataggtagaattctgagcactcaactcatgtttggcattttaaagtaaaaacaagtgtgacttcgaggaccaaagaaattgtcagctatacatttatctttatgaactcatttatattcctttttaatgactcgttgttctaacatttcctagaagtgttcttataaaggtctaatgtatccacaggctgttgtcttattagtaaatgcaaagtaatgactttgtctgttttactctagtctttagtactggttgtcaggattcagccgaatggcttgcctcagagggtcaatggcgttctgagatggtggccagttgtccagacggtagcttgctattgccagtccagaggtgaattctgggttctttggcttcttttccagagccttctcaaagcacaccttcgctctttcattttggtttcctccacac

SEQ ID NO: 14851 - DNA, 551 bp, Homo sapiens
cgaattggagctccaccgcggtggcggccgaggtactggtgaaagttcttgatgagggtctcaatggccctctccacatcactgaattcctgagcatcctctgcgttggctgaccgacactgtcccatggtgcccactgtgtctggtcctttggtgagagttctgttgtcctatagctggccccagaggagctgatggctcatgatctgttggcagccgctgagacaagacaggaggccccgcgtacctgcccgggcggccgctctagaactagtggatcccccgggctgcaggaattcgatatcaagcttatcgataccgtcgacctcgagggggggcccggtacccagcttttgttccctttagtgagggttaattgcgcgcttggcgtaatcatggtcatagctgtttcctgtgtgaaattgttatccgctcacaattccacacaacatacgagccgggagcataaagtgtaaagcctggggtgcctaatgagtgagctaactcacattaattgcgttgggctcactggccgcttttcagtcgggaaa

SEQ ID NO: 14852 - DNA, 464 bp, Homo sapiens
actactatagggcgaattggagctccaccgcggtggcggccgaggtacccggtgcgcataagaggaagatttctgaagagtgcagctgcctgaaccgagccctgccgaacagttgctaattgcactgcagccatgagtgagaacaattagaatcccttggagggcagcctacggcaactaaaatgccatttcacctggaacttgatggagggagaaaactccttgtatgattttgaagacaaagtattttaccggactgagcttcaaaatcgtgaattcaaagccacaatgtgcaacctactggcctatctaaagcaccttagagggcaaaacgaggcagccctggaatgcttacgtaaagctgaagagttaatccagtaagagcttgctgaccaggcagaaatcataagtctggtcacctgtggaaactatgcctgggtctactatcacatgggccgactctc

SEQ ID NO: 14853 - DNA, 471 bp, Homo sapiens
cgaattggagctccaccgcggtggcggccgaggtactcagaagtcatatgttatttacaattgggtttgtgtgggatgggaagtagggcggatgagccagtacttttgcaatgaagatgcaatagtcattgtcctgtcccactgtctcctgtttcctcaccccatggcagcttacatgacccattcccaaagggtccaccgagtcctgaactcagattgatcaccaacatttcttgccttcagcagaattcaacactagtaaagggagtagaggcacagactagggtcagggagagggtggtaaacacacagcacactttcttggcacaacccaagttcagagacaaggcctcctcagatgaggaagatgatacccttagacaccacgacctgattgtcctcttgcatggaagcaaaagcagcctggatctcaactgaagagaagggctctttgctgtcccggttgatgga

SEQ ID NO: 14854 - DNA, 576 bp, Homo sapiens
tatagggcgaattggagctccaccgcggtggcggccgcccgggcaggtacggggaatggaatggaatggaatgcaatggaatggaatcttccggaatggaatggaatggaatggaacggaatggaacggaatggaacggaatggaatggaatggaatggaatgcaatggaatggaatcttccggaatggaatggaatggaatggaatcaacccgagtgcaatggaatggagtggaatggaatggaatggaatggaacaacccgaatggaatcgaatgtaatggagttgaatagaatcaatccgaatgtaatggaatggaatggaacggaatggaattgaatggaatggaatggaatgcaatggaatggaatcaacccgagtgcaatggaatggagaggaatggaatggaatggaagggagactacccgaatggaatggaatgtaatggagtgtaagggaattgaatagaatcaatccgaatgtaatggaatggaatggaatggaatgcaatggaatggaatctttccgaatggaatggaatggaatggaattaacccgagtgcaatggattggagt

SEQ ID NO: 14855 - DNA, 403 bp, Homo sapiens
ctatagggcgaattggagctccaccgcggtggcggccgaggtacgcggggaactgaaaatccacaagacagaatagccagatctcagaggagcctggctaagcaaaaccctgcagaacggctgcctaatttacagcacccatgaggaaaggccacttaaggatgcagcaagaaggagccatctgcaatccaggaagaaattccttgccaggaaccaaattggttgacaccttcatctaggacttctagcctcgagaacttacaaatggtgatgatcatcaggtcaaggatagtctggagcaattgaaatgtcactttacatgggagttatccattgatgacgatgaaatgcctgatttagaaaacagagtcttggatcagattgaattcctagacaccaaatt

SEQ ID NO: 14856 - DNA, 453 bp, Homo sapiens
actactatagggcgaattggagctccaccgcggtggcggccgaggtacgcggggaactgaaaatccacaagacagaatagccagatctcagaggagcctggctaagcaaaaccctgcagaacggctgcctaatttacagcaaccatgaggaaaggccacttaaggatgcagcaagaaggagccatctgcaatccaggaagaaattccttgccaggaaccaaattggttgtcaccttcatctaggacttctagcctcgagaacttacaaatggtgatgatcatcaggtcaaggatagtctggagcaattgagatgtcactttacatgggagttatccattgatgacgatgaaatgcctgatttagaaaacagagtcttggatcagattgaattcctagacaccaaatacagtgtgggaatacacaacctactagcctatgtgaaacacctgaaa

SEQ ID NO: 14857 - DNA, 297 bp, Homo sapiens
ctatagggcgaattggagctccaccgcggtggcggccgcccgggcaggtactatcattaatgtattatatacactgatactttaaaacttgtgtggaaaaaactaacttataattttgtatcacacaccctggatatgtgttctgtttctaagcgacatttgtgagagattattgtaaaatgagagcgagcaaataaaacttaatttaatctttgcagatacatacttatgggaaatttgaacaaatgagtgaaactctgtgtttttagtaggctgtgataaacattttcggagcac

SEQ ID NO: 14858 - DNA, 558 bp, Homo sapiens
gagctccaccgcggtggcggccgggccgcgaggtggttacattcgtcgaaggacaccagctgcggaatttgcggctttggcagattgaaatcatggcaggtccagaaagtgatgcgcaataccagttcactggtattaaaaaatatttcaactcttatactctcacaggtagaatgaactgtgtacagaatccattctcattctttacttgctacattatgaccatgaggagggcagagtagaggtgaactctctgtatacttgctgaaagtcttcttgtacctcggccgctctagaactagtggatcccccgggctgcaggaattcgatatcaagcttatcgataccgtcgacctcgagggggggcccggaacccagcttttgttccctttagtgagggttaattgcgcgcttggcgtaatcatgggcatagctgattcctgtgtgaaattggtatccgctcacaattccacacaacatacgagccgggagcataaagtgtaaagcctggggtgcctaatgagtgagctaactcacattaattgcgttgcgctcact

SEQ ID NO: 14859 - DNA, 293 bp, Homo sapiens
ttggagctccaccgcggtggcggccgcccgggcaggtactttcagtagagatggggtttcactatgttggtcactatggtcttgatctcttgatctcgtgatctacccaccttgggttcccaaaatgttgggattacaggtgtgagccactgcaccaggcaaactgcgatcttttagtggtgcctcttctctcttttgacttaaggatgttgtcccttaaggaaacctggaggctactactgtgatacactacttgagagatggattgttgctctttcttctacagtctttac

SEQ ID NO: 14860 - DNA, 447 bp, Homo sapiens
atagggcgaattggagctccaccgcggtggcggccgcccgggcaggtacaagagatagaaagaccagtccttgctgaaagacaagtctgaatgctccactttttcaattctctctgcattcttcagtaagtcaacttcaatgtcggatggatgaaacccagacacatagcaattcaggaaatttgactttccattctctgctggatgacgtgagtaaacctgaatctttggagtacaggacaataaagactacttctatctgcggaacaactagctttctatttagttctagatgttgaaactgacgatggctgacataaaagtcacatttacaaaaagtgtcttcaaatgcttgactagggaaaaacccctttcaatagaggagcatgtgcaacaattccacaaataatcgctattcagggcaaggcacattgatatggaaatttt

SEQ ID NO: 14861 - DNA, 430 bp, Homo sapiens
aattggagctccaccgcggtggcggccgaggtaccccaagactcagcactagtctgatgacctgctaattcactgacagcatagggctgtctgttgtttttgcgcaagttggtgtgaacaaagttcacaatatctggtcgaataggagccttgaatacagcaggcaaagtgacatttttgccagatgactcccccttttcggagtaccttgttcaaaaaacaccgctgagtcacttccaggtgctgttaagttttctttagtgaagatgtctataccagagggagcatagttccagatgatttcctcagcggcaatgtagtagtgtctaacatgcttcccacggatattatcctttgatgaagacttgttacactcctggacctggaaaaaggcttgcaaaccggctttcagatggtttagattctgaca

SEQ ID NO: 14862 - DNA, 174 bp, Homo sapiens
tatagggcgaattggagctccaccgcggtggcggccgcccgggcaggtacctgaatgtagaaacaatgaggatggacctggtttaataatggaagaacagcacaagtgttcttcgaagagccttgaacataaaacacagacacctcctgtggaggagaatgtaactcagaaaat

SEQ ID NO: 14863 - DNA, 364 bp, Homo sapiens
gactactatagggcgaattggagctccaccgcggtggcggccgacgtacgcggggccagaagaggaagatttctgaagagtgcggctgtctgaaccgagccctgccgaacaggtgagaattgcactgcaaccatgagtgagaacattaagagttccttggagagcacgctacggcaactaaaatgccattttacctggaacttgatggagggagaaaactccttggatgattttgaagacaaagtattttaccggactgagttttaaaaatcgtgaattgagagccacagtgtgcgacctactgggctatctaaagcacctaaaagggcaaaacgggggaaccctggattgcttacgtaaagct

SEQ ID NO: 14864 - DNA, 474 bp, Homo sapiens
actacttagggcgaattggagctccaccgcggtggcggccgcccggccaggtaccatatgaagtgtgaagacaaggccatacaccactttatagagggtgtgaaactcaaccacaggtccagggagaaagaaacgatgaaagacatactgctaaaaattgccacaatgcgactttctaaaaatggagcagatcctgaggctttgcatgtcttggcattccttcaggagctgaatgaaaaaatgcaacaagcagatgaagactctgagaggggtttggagtctggaatcctcatcccttcatcatcaagctggaatggcgaatgaacaatacagatgtggggcccactaggctactgctgaaagggagctgaaattccttcacctagttggtattgaaaatatgtcatgactgggatggtgaaagattggactaagacactggccataccactggacagggttatgttaacaccc

SEQ ID NO: 14865 - DNA, 521 bp, Homo sapiens
ggcgaattggagctccaccgcggtggcggccgcccgggcaggtacttttttttttttttttttttttgttttatcatatttaggttatttattaatgaagggatttgacattttcaggaatacaaattttgcaccctgatgacctcaaatgcgtgcaacaagatgtttaatacagaaaataacacaaaaactgttgttacagtggttagaatttttaactttaaaaaaccatgaatttgtattgttttaattgcacaataaaataatgttgatatatacttaagcttaaattaattccaacaggcaaacattttccaacccagagtgtggctgatgttgggtcagctgactctattttggttcacaccaactttgatgtctaggctatttcaacatctacctagaaaattttaatcgttccaagcattccgtgaattttgtgatttctcagaagattttctgagttaaaagaagtgtttatatcacttaatatccaacatttttaaaggggggaaaacccc

SEQ ID NO: 14866 - DNA, 472 bp, Homo sapiens
ttggagctccaccgcggtggcggccgaggtaccttatcagctaattgggctcctttgaaatgctgaggatctgcttacgcaggttaactctttgaggaagggggttgggtaagtagcccttaatgtcttgtaaatcaaggggccagatggcgttcgtcaggctttcccagctaagggagagtctactcatatgggaaacaagcctaggtaattaaggagacaaaaagggaaaatttaaaaatagggttagtaaaaacaaggttaaaatagggttagtaaaaaaacaaggtcaggcattacaaaaggattctcctgtctcagcctccactgggattacaggctcgcaccaccaagcccagttaacttttgtatttttagtacctgcccgggcggccgctctagaactagtggatcccccgggctgcaggaattcgatatcaagcttatcgataccgtcgacctcgaggggggg

SEQ ID NO: 14867 - DNA, 427 bp, Homo sapiens
agggcgaattggagctccaccgcggtggcggccgaggtacttttttttttttttttttttttgtgagcaagcacgtgcactttattgaatgacactgtaaacaggtgtgtgggtataaactgctgtatctaggggcaggaccaagggggcaggggcaacagccccagcgtgcagggccagcattgcacagtggagtgcaaaggttgcaggctatgggcggttactagtaaccccgtttttcctgtattatcggcaacataatatggaagactgtaacagagccgaataccagttacaggatgaatccaatggtcatgaggatgcccagaatcagggcccagatgttcaggcacttggcggaggaggcataggcctgggccccggtcacgaacccaaccatcttcctgtccctagacttcacggagta

SEQ ID NO: 14868 - DNA, 578 bp, Homo sapiens
ttggagctccaccgcggtggcggccgcccgggcaggtactcttacccttgtccctctcctaaagggagcacaaggaaactgaagagactgaaaaagaagagagtttgtagctgcaaaagaatagggatagcaaggaaacccagaactgcattcccctaagtggggccatcccatgtgattgaattgtccatagcttgcctatggtgagaaatgtgcatgctccgtgagctggtctcttgaaacaggacttatgcttcctctatattctggttaaattttccaaacacataagttcactgagcacagatttcttatccagagacaagtagaatctaaccgcagactgttggcagagtttccaggcacttagccatgttcccttcctgactcaaatccccaaaggccttcactctcactgagaatcacactactgtcccatagataaggcaggcattgaagcacctgtcgtgatcctctaggggggagaatgaaaggttatttcctgcattgcatcatcatagcttttaatataatgctacagaatcatatccacattaggttagagttcagatatttgg

SEQ ID NO: 14869 - DNA, 350 bp, Homo sapiens
gcgaattggagctccaccgcggtggcggccgaggtgccgggctctacagaatagaggcaatactttagcttaagcctgtctgctgaccagagaatggaattatgcgtggactcaaggaacaaaaggaaactaggcagggaaggggaagaaaagtgcccatctgaatcaaactgtagctgccattaaggcacatcttgtgggggtcacagattgtaggctgttttttggaagataccggttcagcacaggatgtccatttggctacttggctacacccctggctgaggtgccatgaggacaatgtcactcaagttcctggccagccaaactcccggagcaaagagccccaa

SEQ ID NO: 14870 - DNA, 387 bp, Homo sapiens
ttggagctccaccgcggtggcggccgaggggcttgttttttttttttttttttttttttataactgataattctttattactaaaggtttatttacatagtgtttaaagcgtaataaaaaataaattacaatacaaaagtgctctttaggaaggagacactaaacaacaggcccatattaccccttgactatttagccaagacataagctacaaattttgccggaaaaactgtccatacatttttaactacttcttcattattcttatggaccatcatccaggacatctgtttgaagaaatatccagttataatattttcaaaggttagaattgtgaagaaaaaatataaaatgtgattaaaggatatatagccttcagatgtaatt

SEQ ID NO: 14871 - DNA, 220 bp, Homo sapiens
  misc_feature 17: n = A,T,C or G
aggccgaattggagctncaccgcggtggcggccgaggcactagatgacttttctttttttttttttttttttcctgttatacaaagagcagatttttattgaacttgtgcgttaactatattaccatacaatttaaatattcatgaatagtttcccaagtctggagcgaccacatagggagaaaatgtaaatgtctcaattttttgtccaccaaaagttt

SEQ ID NO: 14872 - DNA, 487 bp, Homo sapiens
gctccaccgcggtggcggccgaggtacaaaggaataaaaatgttacaacctaaaaaaacaaaacaccgtaaaacatttagagtaaaacatgacaaacgtgctgcttttagaggaaaagaagtttcatttgaagaatttggacttcaagctacaacatctcaatgaataagtgcaagacaaattgaatcagcaaggattgcgattacaagaagaatgggtcgtgaaggacaagttaacataagaatcttccctcatctatctcttactaaaaagcctattggagttagaatgggatctggtaaaggttcagctgaaaaatgagtagctgttgttaaagaaaatacagttatgtttgaagttggtggagttaaagaagaaatagctcgtgatgcacttcgtttaggtggacacaaactaccagtaaaatgaagaataattagcaagggagaataatggaattcatagatttaaagaaaaaaactactga

SEQ ID NO: 14873 - DNA, 338 bp, Homo sapiens
  misc_feature 16: n = A,T,C or G
ggagctccaccgcggnggcggccgaggtacatttgcctgtcttcctactgtccttcctttttattataagatacatatatagaccccatagaagaaaatataaatttcataggctgttaaaagaggctaggcctaagttataatgcctgctctctcacagccccatttccccaaggggcattatcaccagagccattttttctagctgtaaacaatgccaccagcttgagtgatagtgtccctgtagggtgctctcacttctcaaggaccaaatacaccttagcagaggccaaggttttatgaccaagtgaatgggggcgaacataaaatgcacaggt

SEQ ID NO: 14874 - DNA, 470 bp, Homo sapiens
tggagctccaccgcggtggcggccgcccgggcaggtacttttttttttttttttttttttgactttatatataatactttattttatacaattcagtatatcatgttaacatatttcacttttaattttatgatatgtgtgacatatttttaattttatggattcaattatactatcataatttttttaaagtttgtatctttcattaataaggaggttccttattaatggattttttttcctgtagcttctgagaacacatttttagatacccggcttctagttatacctgaagctccacagtgtagacatgttttggccaaccttgttttatcggtgtatgaaatttgtgctaataggatggatccaattgtcattacattagaaaactaaatgggaaacatttcttctacattctgtgcaacataacaaaattattcatagagattattcaactaaataaagtgatt

SEQ ID NO: 14875 - DNA, 379 bp, Homo sapiens
ctatagggcgaattggagctccaccgcggtggcggccgcccgggcaggtacttttttttttttttttttttttgactttatatataatactttattttatacaattcagtatatcatgttaacatatttcacttttaattttatgatatgtgtgacatatttttaattttatggattcaattatactatcataatttttttaaagtttgtatctttcattaataaggaggttccttattaatggattttttttcctgtagcttctgagaacacatttttagatacccggcttctagttatacctgaagctccacagtgtagacatgttttggccaaccttgttttatcggtgtatgaaatttgtgctaataggatggat

SEQ ID NO: 14876 - DNA, 720 bp, Homo sapiens
gtaacacgactcactatagggcgaattggagctccaccgcggtggcggccgcccgggcaggtacacgggcaaaggggcttgagaaggcccggaggcgaagccgaagagaagcaactgtgccccggagaagagaagctcgcccattccagactgggaaccagctttcagtgaagatggcagggccagaactgttgctcgactccaacatccgcctctgggtggtcttacccatcgttatcatcactttcttcgtaggcatgatccgccactacgtgtccatcctgctgcagagcgacaagaagctcacccaggaacaagtatctgacagtcaagtcctaattcgaagcagagtcctcagggaaaatggaaaatacattcccaaacagtctttcttgacacgaaaatattatttcaacaacccagaggatggatttttcaaaaaaactaaacggaaggtagtgccaccttctcctatgactgatcctactatgttgacagacatgatgaaagggaatgtaacaaatgtcctccctatgattcttattggtggatggatcaacatgacattctcaggctttgtcacaaccaaggtcccatttccactgaccctccgttttaagcctatgttacagcaaggaatcgagctactcacattagatgcatcctgggtgagttctgcatcctggtacaccacaatggctgagcacttcctgacgttgc

SEQ ID NO: 14877 - DNA, 485 bp, Homo sapiens
cgactcactatagggcgaattggagctccaccgcggtggcggccgcccgggcaggtactcgggggaatgcaacacactcaaagcctgttagtacactacatcaaacacgttcaagactccccaattgaacggattggattcaaagatatacccaccacttttagcaaatggtgaagtgctaaatcacacaattaatcaaatggctgagttagctaaagacgcatacgttattataggtccatacgcaagacgtttcttgcttgggacacctactgctgcttttttaaaaaaaccttttattatggtaagaaaacctaaaaaattaccaggacaccttattagttccgagtaccaattataatatggctaatcaactgtagaaatgcacactaatatgttgaaaaaaggccaaaaagtaccaattattgatgatgttctagctactggcggcacaatgtacgcgactattaacttaatcgaatctc

SEQ ID NO: 14878 - DNA, 689 bp, Homo sapiens
gtaatacgactcactatagggcgaattggagctccaccgcggtggcggccgaggtacagcctctcggcccggctaaacatcatcgtcttggggggccattaccctaccaactaactaatgttccgcacccccatttttaagtgaagctgtgaagctcctttctattactcatcatgcgataaataactatatccggtattagctattgtttccaatagttatcccagtcttaaaggtaggttaggtacctgcccgggcggccgctctagaactagtggatcccccgggctgcaggaattcgatatcaagcttatcgataccgtcgacctcgagggggggcccggtacccagcttttgttccctttagtgagggttaattgcgcgcttggcgtaatcatggtcatagctgtttcctgtgtgaaattgttatccgctcacaattccacacaacatacgagccgggagcataaagtgtaaagcctggggtgcctaatgagtgagctaaactcacattaattgcgttgcgctcactgcccgctttccagtcgggaaacctgtcgtgccagctgcattaatgaatcggccaacgcgcggggagaggcggtttgcgtattgggcgctcttccgcttcctcgctcactgactcgctgcgctcggtcgttcggctgcggcgagcggtatcagctcac

SEQ ID NO: 14879 - DNA, 675 bp, Homo sapiens
cgtaacacgactcactatagggcgaattggagctccaccgcggtggcggccgaggtacacttctagcacctagcagagagaggcttcactacatcatgcttcctgacatctctccctttgaagagcagtcagactcctgctttgctcttcagacttaatttgggggtttaacaggtgaggttgctgggggaactcttttacaacatctctctgaaagaatccgggctgccagtttcatttggtttgggtgtcagtagcatgatggaaagacaaaaaaacacaacttgacatctgcagaaatgggttcaaattttacctgcaactcaccaattctgtggccttggttcagcaattaaactccctaaaattcagttttttctttgtaaaatggggttatgaacagtaccaaatgaagtgtgaagacaaggccatccaccactttatagagggtgtaaaaataaaccagaaatcaagggagaaagaaaagatgaaagacaaactgcaaaaaattgccaaaatgcgactttctaaaaatggagcagattctgaggctttgcatgtcttggcattccttcaggagctgaatgaaaaaatgcaacaagcagatgaagactctgagaggggtttggagtctggaagcctcatcccttcagcatcaagctggaatggggaatg

SEQ ID NO: 14880 - DNA, 361 bp, Homo sapiens
gaattggagctccaccgcggtggcggccgcccggccaggtactgtgcacgtcggttataggctgcgtgtcaggacaggctcagattatccactgcactgcaattggagctagagggggaaatggtggggccatctgggccataaaggcattcagggtgactgggtcactgcacaaggcactcgctgggttctgtatttcacattgataggatactgcatctttccttttaacgctaagtagactgagggtcatgttgccattgtacaattgtagtctgcgactgaccgggaggttctaaccattaacccaccacaagtaggtcgtgtactgaacctcaagttcacatgtgaaggccacagt

SEQ ID NO: 14881 - DNA, 338 bp, Homo sapiens
attgagctccaccgccgtggcggccgcccgggcaggtacatgtgtgtgtgggtgaaatggagatttggaattgaactctctgcctgtaaatgttccccaaataattgttgtgtgtatgatacgtgtataataaaagtattcttgttagaatctgaaaaaaaaaaaataaaaaataatttaaaataaaggttccttggccgttttaaaactagtggatcccccgggctgcaggaattcgatatcaagcttatctataccgtcgacctctagggggggcccggtacccaacttttgtttcctttagtgagggttaattgctcgcttggcgtaaacatggt

SEQ ID NO: 14882 - DNA, 374 bp, Homo sapiens
ggcggccgcccgggcaggtacgcggggacacaagacatcatcttgaaggaaggatggctttggccagaccaagaccgagacttggagacctgattgagatttctcgctttggctatgcacactgggccatctacgtgggagatggctatgtggtccatctggctccggcaagtcactggtgcagtcacgacagtaggtgtggcagcaggcctgctggctgccgcaagccttgtggggatcctgctggccagaagcaagcgggaaaggcaataaatccaagaaattgtcccaacaaccaccaattcttacggaggaatattattttagccagcaggagtggagtttggtttacttgatttactggtttgtgttca

SEQ ID NO: 14883 - DNA, 458 bp, Homo sapiens
ttggagctccaccgcggtggcggccgcccgggcaggtaccatttggagtttaattgcttcgctccgatgaatgaattcctggccaatgcaccaaaatgatacggctccgatgactggaggaacaccagggtccttggtctcgcaccagtttagataaaatgacacagacacacatgtaatggttttaaggagtggagagtttattaggcaagaaggaaggaagaagaaaacagctcccccatacagagacagagggaggggggattagaacaaacagaaacttccccgcgtacctcggccgctctagaactagtggatcccccgggctgcaggaattcgatatcaagcttatcgataccgtcgacctcgagggggggcccggtacccagcttttgttccctttagtgagggttaattgcgcgcttggcgtaatcatggtcatagctgtttcctgtgtg

SEQ ID NO: 14884 - DNA, 442 bp, Homo sapiens
gaattggagctccaccgcggtggcggccgcccgggcaggtacagcgtcatataggctttgcctttaatgatctcttacggttagaaaacacaataaaaacaaactgttcggctactggacaggttgtatattaccagatcatcactagcagatgtcagttggacatttgagtcctttatgaaattcataaataaagaattgttctttctttgtggttttaataagagttcaagaattgttcagagtcttgtaaatgttattttaataatccctttaaattttatctgttgctgttacctcttgaaatatgatttatttagattgctaatcccacttatttaggaaatgccaagaggtatttccttggggaaatggtgcctcttacagtgtaaattttttcttctttacctttgctaatatcatgggaagaatttttcttatc

SEQ ID NO: 14885 - DNA, 431 bp, Homo sapiens
ggcgattggagctccaccgcggtggcggccgcccgggcaggtacccatcctacccggcctgggctgacccatggggaaggctggctaatttcagtgcttctgcttggttgttcagggccatttcaggtttgggtgttttctggggatgttaacatgggattcaggctcaactcacaagaaacttttccatctcatgatggatgctgttgggcatgtccaatgtatgacttcatgagttacacagatgctaattcgtaggggcacttggaatcacatggttgttttgtgtcccatggtcaagcattctatcttatcagggcctacagtaacatgccaaaagttgcttccaacatatttctctgctttggatggggcatatttctgtgctgtggatgacatggccttactccagaatcccaggccctccactg

SEQ ID NO: 14886 - DNA, 290 bp, Homo sapiens
ctccaccgcggtggcggccgcccgggcaggtacatccccagtcgtggccctctggacaagtggcgggccctgcactcatgagggcttccaatgtgctgcccccctcttaatactcattgtcaatttgagaaaaaggacatatgagtttttgcatttattaatgaaacttcctttgaaaaactgctttgaattatgatctctgattcattgtccattttactaccaaatattaactaaggccttattaatttttatataaattatatcttgtcctaaaaaaaaaaaaaaaa

SEQ ID NO: 14887 - DNA, 455 bp, Homo sapiens
attggagctccaccgcggtggcggccgcccgggcaggtacccacgtaaagacgttaggtcaaggtgtagcccatgaggtggcaagaaatgggctacattttctaccccagaaaactacgatagcccttatgaaacttaagggtcgttgaaaaaaactattcacaaatataaaaaaaataaagtacctcggccgctctagaactagtggatcccccgggctgcaggaattcgatatcaagcttatcgataccgtcgacctcgagggggggcccggtacccagcttttgttccctttagtgagggttaattgcgcgcttggcgtaatcatggtcatagctgtttcctgtgtgaaattgttatccgctcacaattccacacaacatacgagccgggagcataaagtgtaaagcctggggtgcctaatgagtgagctaactcacattaattgcgttgcg

SEQ ID NO: 14888 - DNA, 138 bp, Homo sapiens
agggcgaattggagctccaccgcggtggcggccgtccggtcaggtacgcggggcacagcggcttccttgatccttgccacccgcgactgaacaccgacagcagcagcctcaccatgaagttgctgatggtcctcatgc

SEQ ID NO: 14889 - DNA, 366 bp, Homo sapiens
gactcactatagggcgaattggagctccaccgcggtggcggccgaggtacgggacaacacaaattactgcaactccaacaactatggcaataacaatcacagcaatgacccaaacatccaaactgtcaagtattccttcctcaggtttaggatatcctggataatttgagactggaggcttgtaagtaggcctaggacctgaggcactggacgctggagattttgtagtggaagaagtcgacactttaagacactttggaactgggggatcccaagtacttgtggaaggtggacaccatcacatccagggccttctccagagggcacgccatgacagcagtcaggatcaaaccaagaaagaagaag

SEQ ID NO: 14890 - DNA, 287 bp, Homo sapiens
actactatagggcgaattggagctccaccgcggtggcggccgaggtacttttttttttttttttttttttgcgagatggagacttgctctgttgcccaagctggagtgcaggggcgcaatcttggctcactgcaacctcttccttccaggttcacgccattctcctgcctcagcctcccaagtagctgggactacaggtgccagccaccacgcctggctaattttttgtatttttagtagagacgggatttcactgtgttagccaggatggtctcaaactccagacc

SEQ ID NO: 14891 - DNA, 453 bp, Homo sapiens
tatacactactatagggcgaattggagctccaccgcggtggcggccgaggtacaagatagtcatctcagtaaaaggtctattatctaacttgccaaacttgtttactgagagccctaaggaactaaaactgccataatgccgtgcacagcttgaaaagcaattagagtaagcaagattagtttttcctcccttccagttcctcagcaggcctggctgaaggcccaggagggaaggaaatataagaaccaacaataaaaatagcaatagcaataagaagaatgccatcccatggagcacaccataattctggaaccacctctcccggatcaggcttccattgctcacgatgctcacgctgggcggccgctctagaactagtggatcccccgggctgcaggaattcgatatcaagcttatcgataccgtcgaccttgagggggggcccggtaccc

SEQ ID NO: 14892 - DNA, 351 bp, Homo sapiens
actcactatagggcgaattggagctccaccgcggtggcggccgcccgggcaggtacgcggggacgaagttccggtccaggtctctgacttcgggcttgttcgctggtggcgtcggagccgagccggactggtcaggatgatcacggacgtgcagctcgccatcttcgccaacatgctgggcgtgtcgctattcttgcttgacgttctctatcactacgtggccgtgaacaatcccaagaagcaggaatgaaagtggcgctttctccgccccagggttccaggacatagtctgaggcaagatggagggtttgagggggctttacacttcaatttatgcctttcacccatcac

SEQ ID NO: 14893 - DNA, 410 bp, Homo sapiens
ggcgaattggagctccaccgcggtggcggccgaggtactcctgggcaacagcgagactccgtctcaaaaaaaaaaaaaaaaaaagaaaccatttattttaaaaatgattagattgctatgcctcaactcatagaagatgaacccttcaagaaaacgtgaagtagaacgggtgggccagaaatgaaaacagggcaagtaaagtatttctttggaaaacattttatcaaaccaaatgttaaaaagactttccttttgtaaaactggattagagaagacttttgaatgggttatctttaggatgatcagtattagagcacttaaaaactgcagaaaaaactgaaagttatgttccagataactttccgttgtttaccaaatttttttagacttggtcatcatcaggaagcatt

SEQ ID NO: 14894 - DNA, 483 bp, Homo sapiens
atagggcgaattggagctccaccgcggtggcggccgaggtactccagggcttcattcatatttccttccaatttgtagacgaacccaaggaggctcaagctttccagatctaatgcctttctccgaagtttccttaaaaccaatttcttcaaagaattgatacttttatccctttgttaatgatgcctgttctatttttatagcttttaaataatggataattgcattgacgtcagatttcttttgaaattcctgaaaccgaccatagtggaaatgtatgtcttgcattgtttcttctaccactggtttcatgcataacaatttttgaaaattctcttcagcttttctgtgattgcctgcttctatatacattcttgccaggtctagatgagccacctcaaatgtgggctttttttccactgcagattcaaaatgaaatatggctgatcttatcattttgtctagcttttctctgttctgccc

SEQ ID NO: 14895 - DNA, 508 bp, Homo sapiens
gagctccaccgcggtggcggccgcccggccaggtacctgctgggagaagttctgaacaactatatctgggatacacagaaaagtatggaagaagagaaagaaaagcctaaattggaatgagatccaagactaaacgcatgagctagattgatgccgccatttgaagaacctccttccccttgggcattggcagagggggagaaaaggcttcaaaggaacttggtggcatcagcacccccctccctcaatgaggacaccttttatatataaatatgtataaaacatagaatacagttgtttccaaaagaactcaccctcactgtgtgttaaagaattctttccaaaggcattactgataataacattttttccttttctagttataaaaccaggaattggaccttggatttttattttggcaattgtaactccatctaattaagaaagaatgaaagtttattgcacttctttttgagaaatatgttaaagtcaaaggggcatatataga

SEQ ID NO: 14896 - DNA, 434 bp, Homo sapiens
gagctccaccgcggtggcggccgcccgggcaggtactcactgagctcaagacacacttggtgcttgcagtgctgatacctgctctttgccggcccccgcgtaccatcccatgtggaatctgtgagtgtcctcttaagtagcgtgggctagccaatctgccgttcatggtgtattgtaaactccgaaattccatatgtaataggatgcaagtctaagcgtttcatgtggacataaatgtatctaaataaaactttccctagcactgtggctgacctcacccttacttttatactttagtatgaaactgatgagaactttggtagtgagtattttttttatatatatacatatatatgtatctatctatatatatatctcaagcatctttcaggtctttgtgtgtggcttttttaaagccctgttgtaaaaaatta

SEQ ID NO: 14897 - DNA, 421 bp, Homo sapiens
cgaattggagctccaccgcggtggcggccgaggtacatttttaaagagttgttttttggccgggcgcagtggctcatgcctgtaatcccagcactttgggaggccgaggtgggcggatcacgaggtctggagtttgagaccattctggctaacacagtgaaatcccgtctttactaaaaattacaaaaaattagccaggcgtggtggctggcaccagtagtcccagttacttgggaggctgaggcaggagaatggcgtgaacctggaaggaagaggttgcagtgagccaagattgtgcccctgcactccagcctgggcaacagagcaagactccattttagaaaaaatacacaataagtaaagttcctgcccgggcggtcgctctagaaataggggatccccccgggctgcaggaatttta

SEQ ID NO: 14898 - DNA, 587 bp, Homo sapiens
ggcgaattggagctccaccgcggtggcggccgaggtactatcccagccccccaggttcgcctaatagtcttggctacttccctacagctgctaatcttagcggtgtccctccacagcctggcacggtggtcagaatgcagggcctggcctacaatactggagttaaggaaattcttaacttcttccaaggttaccagtatgcaaccgaggatggacttatacacacaaatgaccaggccaggactctacccaaagaatgggtttgtatttaagggccccagcagttagaacatcctcagaaaagaagtgtttgaaagatgtatggtgatcttgaaacctccagacacaagaaaacttctagcaaattcaggggaaggtttgtctacactcaggctgcagtattttcagcaaacttgattggacaaacgggcctgtgccttatcttttggtgggagtgaaaaaattttggccagtgaagccaaatcgtaacttacagcaagcagcatgcagcatacctggctctttgctgattgcaaataggcattaaaatgtgaatttggaatcagatgtctccattactttcagtt

SEQ ID NO: 14899 - DNA, 495 bp, Homo sapiens
ctatacggcgaattggagctccaccgcggtggcggccgaggtacgcggggactcgcgtcggttggcgactcccggacgtaggtagtttgttgggccgggttctgaggccttgcttctctttacttttccactctaggccacgatgccgcagtacgcgggggggtgaagaaggggccggccttcaagcaacagcgacgcaagatggcagccaccacgggctcgggagtaaaagtccctcgcaatttccgactgttggaagaactcgaagaaggccagaaaggagtaggagatggcacagttagctggggtctagaagatgacgaagacatgacacttacaagatggacagggatgataattgggcctccaagaacaatttatgaaaaccgaatatacagccttaaaatagaatgtggacctaaatacccagaagcacccccctttgtaagatttgtaacaaaaattaatatgaatggagtaaatagttctatggag

SEQ ID NO: 14900 - DNA, 358 bp, Homo sapiens
tactatagggcgaattggagctccaccgcggtggcggccgaggtaccttaaagtcctcctggctctgaagcttcataagatgcgtgaagaaggtgaagaggaaggtgaaggagtcgagcggccgcccgggcaggtacttttttttttttttttttttttttttggggtttatcatatttaggttatttattaatgaaaatatatgacattttcaggaatacaaattttgcaccctgtgacctcaaatgcgtgcaacaagatgtttaatacagaaaataacacaaaaactgttgttacaggggttagaatttttaactttaaaaaaccatgaatttgtttggtttaaatggcacaaaaa

SEQ ID NO: 14901 - DNA, 335 bp, Homo sapiens
tactatagggcgaattggagctccaccgcggtggcggccgaggtacttcttacagtcttcaggaaattcattaaatcagtgcctccagttcctttggcttccagttttgaagggtcttcagaggtcttattctcctttggctgctggcttgcaggaatcaggatgtactgttcctgttggccgagtggagactggtgttctcaaacccggtatggtggtcacctttgctccagtcaacgttacaacggaagtaaaatctgtcgaaatgcaccatgaagctttgagtgaagctcttcctggggacaatgtgggcttcaatgtcaagaatgtgtctg

SEQ ID NO: 14902 - DNA, 268 bp, Homo sapiens
atagggcgaattggagctccaccgcggtggcggccgcccgggcaggtacttgtagagtggtgctgctttaattcataaatcacaaataaaagccaattagctctataactaaaaaaaaaaaaaaaaaaaaaaaaaaaaaaaaaaaaaaaaaaaaaaaggaaaaaaaaaaaaaaaaaaaaaaaaaggtccggggcattcggggaggcataaccacacttggggtggttatagggctggaaaacgctgaaaatgactgttttcattgggg

SEQ ID NO: 14903 - DNA, 399 bp, Homo sapiens
agggcgaattggagctccaccgcggtggcggccgcccgggcaggtacttttttttttttttttttttttttttttgccaattgttattgagtttttatttcataatcataaacttaactctgcaatccagctaggcatgggagggaacaaggaaaacatggaacccaaagggaactgcagcgagagcacaaagattctaggatactgcgagcaaatggggtggaggggtgctctcctgagctacaaaaggaatgatctggtggcaagaaattaaccagtgcttttattaactaagcacttaaactatgcactttttctgaaatatttttgtaacacttttttgtatttttgccatttgaaaggttgcggtgtagttggtctgtaattaagttgcagatt

SEQ ID NO: 14904 - DNA, 453 bp, Homo sapiens
actattgggcgaattggagctccaccgcggtggcggccgcccgggcaggtacaaatgatgaaacggaaagacaaaggaaattttccatttttgaagaaaaagtgttcagtgttaatggagcctggggaaaccacatggactttggtcagctctatcagttcttaaacaccaaaggatgtggggatgttttccagatgttctttggtgtaaaaggacaatgacatcaagagtggttgaaagtatcttgccactgttggccttttgattttttttcccactttttcttgaaagattaagtaattttattttagttccattctagaatgttggggagtggggcacaagaaaaaatagtatagctgaaatgcatctgttaaaaatgtcatgattgaaagcataactgagtttcaaattacaaccttaaaattgttgttagatatttattcacatatc

SEQ ID NO: 14905 - DNA, 472 bp, Homo sapiens
atagggcgaattggagctccaccgcggtggcggccgagtagcagccaggaaggagagactgggatggttttttatctgtcgctttcttaaatcaagggccgccgggccggagatggatggagggaccggggatttgggaactcgaaaacgagctgagggaagggagcctgtggaaatagactggagtctgggtagtgtcgtttcctagagaatggtctcgaagtaacttctcggtaaagtcttcacggaatttccagaccacgcttgcccactgggaggcttttaggacccgagacgtgtgcaggcttttccagccaaaatgaagtttaatccctttgtgacttccgaccgaagcaagaatcgcaaaaggcatttcaatgcaccttcccacattcgaaggaagattatgtcttcccctctttccaaagagctgagacagaagtacgcggggcatgcgaagctttccactatg

SEQ ID NO: 14906 - DNA, 370 bp, Homo sapiens
attggagctccaccgcggtggcggccgaggtactttttttttttttttttttttagttacataaattaacccatttattataggccagtgatgtctcaaagagtagaggagcgtctactggtctttcaactccttcagtcttctgatggcggactttaccgtgacagcggaagtggtattgcacctgattttatttccagttttcatccgaatccactggggaatgggacgattttgcttttgtttcttggccaggaatcgcttaatcctgaaagtcttgtgagaagacatggcgagcagcggagtcaagaacacaccacgatggcggagaaaggaccccgcgttacatttgaacacacggttgtgttaa

SEQ ID NO: 14907 - DNA, 334 bp, Homo sapiens
tatagggcgaattggagctccaccgcggtggcggccgaggtactcatcggccagcacggagatgcacaggttaaatggtttaccatcctgaaagggcatattgtggcatgtcacctcatactgccaagccccattcacgcggctgttcatgaccacccaatgaccaaagtacctgcccgggcggccgctctagaactagtggatcccccgggctgcaggaattcgatatcaagcttatcgataccgtcgacctcgagggggggcccggtacccagcttttgttccctttagtgagggttaattgcgcgcttggcgtaatcatggtcatagctgt

SEQ ID NO: 14908 - DNA, 430 bp, Homo sapiens
tcactatagggcgaattggagctccaccgcggtggcggccgaggtacgcgggggggcccgaagcgtttactttgaaaaaattagagtgttcaaagcaggcccgagccgcctggataccgaaggtaggaataatggaataggaccgcgggtctattttgatggttttcggaactgaggccatgattaagagggacggccggtctagaactagtggatcccccgggctgcaggaattcgatatcaagcttatcgattccggcgacctcgagggggggcccggtacccagcttttgttccctttagtgagggttaattgcgcgcttggcgtaatcatggacatagctgtttcctgtgtgaaatcgttatccggtcacaattccacacatcatacgagccgggagcataaagtgtaaagcctggggtgcctaat

SEQ ID NO: 14909 - DNA, 531 bp, Homo sapiens
tatagggcgaattggagctccaccgcggtggcggccgaggtacgcggggactcgcgtcggttggcgactcccggacgtaggtagtttgttgggccgggttgtgaggccttgcttctctttacttttccactctaggccacgatgccgcagtacgcgggggggtgaagaaggggccggccttcaagcaacagcgacgcaagatggcagccaccacgggctcgggagtaaaagtccctcgcaatttccgactgttggaagaactcgaagaaggccagaaaggagtaggagatggcacagttagctggggtctagaagatgacgaagacatgacacttacaagatggacagggatgataattgggcctccaagaacaatttatgaaaaccgaatatacagccttaaaatagaatgtggacctaaatacccagaagcacccccctttgtaagatttgtaacaaaaattaatatgaatggagtaaatagttctaatggagtggtggacccaagagccatatcagtgctagcaaaat

SEQ ID NO: 14910 - DNA, 437 bp, Homo sapiens
ctactatagggcgaattggagctccaccgcggcggcggccgcccgggcaggtacgcggggaactgaaaatccacaagacagaatagccagatctcagaggagcctggctaagcaaaaccctgcagaacggctgcctaatttacagcaaccatgaggaaaggccacttaaggatgcagcaagaaggagccatctgcaatccaggaagaaattccttgccaggaaccaaattggttgtcaccttcatctaggacttctagcctcgagaacttacaaatggtgatgatcatcaggtcaaggatagtctggagcaattgagatgtcactttacatgggaggtatccattgatgaccatgaaatgcctgatttaaaaaacagagtcttggatcagattgaattcctagacaccaaatacagtgtgggaatacacaacttact

SEQ ID NO: 14911 - DNA, 433 bp, Homo sapiens
acgactactatagggcgaattggagctccaccgcggtggcggccgcccgggcaggtactttttttttttttttttttttttttttgggcaaagaaacctttaatgaggattcaaggttaataaggaagacccagagggccagcactcagccccaacctcctcacgtgtaccaagaaaaataaagaagaggctgcagaatatgctaaacttttggccaagagaatgaaggaggctaaggagaagcgccaggaacaaattgcgaagagacgcagactttcctctctgcgagcttctacttctaagtctgaatccagtcagaaataagattttttgagtaacaaataaataagatcagagtcggtaaaaaaaaaaaaaaaaaaaaaaaggtccgcgggagacactgaggggcaccagaggagcagactacaagaat

SEQ ID NO: 14912 - DNA, 519 bp, Homo sapiens
ctcactatagggcgaattggagctccaccgcggtggcggccgcccgggcaggtacaaagactattgtagagactatccgggttagtttgcaagggaagccaatgatgagtaatttgaaagaaattcacctggtgagcaatgaggaccctactgttgctgcctttaaagctgcttcagaattcatcctagggaagagtgagctgggacaagaaaccaccccttctttcaatgcaatggtcgtgaacaacctgaccctccagattgtccagggccacattgaatggcagacggcagatgtaattgttaattctgtaaacccacatgatattacagttggacctgtggcaaagtcaattctacaacaagcaggagttgaaatgaaatcggaatttcttgccacaaaggctaaacagtttcaacggtcccagttggtacctcggccgctctagaactagtggatcccccgggctgcaggaattcgatatcaagcttatcgataccgtcgacctcgaggggggg

SEQ ID NO: 14913 - DNA, 558 bp, Homo sapiens
ctactatagggcgaattggagctccaccgcggtggcggccgcccgggcaggtacccaggacaaatctctccacttggaatggagatcccaatccttctgcagcccgaacatccacctgcgcacctaggaaaatgcccaaaaggatttcaatatccaaacaactggcttcagtgaaagctctgaggaagtgctcagatctggaaaaagctattgccaccactgctctgattttcagaaattcttctgactctgatggtaaacttgaaaaagctattgccaaagatctgctgcaaacccaatttaggaatttcgcagagggacaagaaaccaagccaaaatacagagagatcctttctgaacttgatgagcacacagaaaataagctagattttgaagacttcatgatcttgctcttaagcatcactgtcatgtcagatctgctacaaaatatacggaatgtaaaaattatgaaatgaacagttttaaatatgctgtataaaataatggcaaaagacagtgttattaaaatgtttccatctcaaaaaaaaaaaaaaaaaa

SEQ ID NO: 14914 - DNA, 539 bp, Homo sapiens
actactatagggcgaattggagctccaccgcggtggcggccgaggtacaaaagttgaaagtcacaaaaccatagaaaagtctcagtttcctactgtagaattcttggcatttcagtagtcacagttaaacttgttctaggtttttcagatgctcttttccaggacttcatatgttttgatatttttaaaaattctttctttcaacttttttgattataagccttgcttgcttcgatttgggatttaggcatcgttgtcctttattttctttcagggcaataatcacttctattttgtcacagttgttacttgggtacctaaaacccgaagaaccttctgtaagaagtgtggcaagcatcagcctcacaaagtgacacagtataagaagggcaaggattctttgtatgcccagggaaggaggcgctatgatcggaagcagagtggctatggtgggcagacaaagccaattttccggaagaaggctaagaccacaaagaagattgtgctaaggctggaatgtgttgagcctaactgcagat

SEQ ID NO: 14915 - DNA, 485 bp, Homo sapiens
atagggcgaattggagctccaccgcggtggcggccgaggtacttttttttttttttttttttttttttctttttttttttttgcgagcacagaggtcagcaacaagtttattttgcagctagcaaggtaacagggtagggcatggttacatgtttaggtcaacttcctttgtcgcggttgattggtttgtctttatgggggggggtggggtaggagaattccaatctgaatcccacagaaactcgggggctgtccaaactgaacctcctaagaaggcgcactcaacccagctgtcttgggttcatgagaaaaaatcccaagaaggaaagccataagaacacacagagccaaaaagcctacccaagcatgcatcagatacaggaagtaactatgctcacaataaaaaagcagtttccagaacagctgaacagctgccatcacagaaaccaaccgaaccaaagactaaaccacaagacatgattttt

SEQ ID NO: 14916 - DNA, 237 bp, Homo sapiens
gactcactatagggcgaattggagctccaccgcggtggcggccgaggtacaagatagtcatctcagtaaaaggtctattatctaacttgccaaacttgtttactgagagccctaaggaactaaaactgccataatgccgtgcacagcttgaaaagcaattagagtaagcaagattagtttttcctcccttccagttcctcagcaggcctggctgaaggcccaggagggagggaattt

SEQ ID NO: 14917 - DNA, 518 bp, Homo sapiens
tactatagggcgaattggagctccaccgcggtggcggccgcccgggcaggtacgcgggggccgagagaagcagtagtcaataaagagagtgccgtatttcgcagattggagctgagctgtggctgccagaagatagcgaacgaatggaaactgaaagtggaaatcaggaaaaggtaatggaagaagaaagcactgaaaagaaaaaagaagttgaaaaaaagaaacggtcacgagtaaacaggtgcttgcagatattgctaagcaagtggacttctggtttggggatgcaaatcttcacaaggatagatttcttcgagaacagatagaaaaatctagagatggatatgttgatatatcactacttgtgtcttttaacaaaatgaaaaaattgactactgatgggaagttaattgccagagcattgagaagttcagctgttgtagagcttgatttggaaggcaccagaatccggaggaaaaaacctctgggggaaagaccaaaggatgaggatgaacgca

SEQ ID NO: 14918 - DNA, 540 bp, Homo sapiens
ctatagggcgaattggagctccaccgcggtggcggccgcccgggcaggtaccctgatgctacagacgaggacatcacctcacacatggaaagcgaggagttgaatggtgcatacaaggccatccccgttgcccaggacctgaacgcgccttctgattgggacagccgtgggaaggcagttatgaatacgagtcaagctggatgaccacgagtgtctgaacacccacagctcacaagccagtccaagattatataaagcggaaacgccgatgatgagagcaatgagcattccgatgtgattgatagtcaggaactttccaaagtcagccgtgaattccacagccatgaatttcacagccatgaagatatgctggttgtagaccccaaaagtaaggaagaagataaacacctgaaatttcgtatttctcatgaattagatagtgcatcttctgaggtcaattaaaaggagaaaaaaatccaatttctcactttgcatttagtcaaaaaaaaaaaatgctttatagcaaaatgaaagagaaca

SEQ ID NO: 14919 - DNA, 502 bp, Homo sapiens
  misc_feature 456: n = A,T,C or G
cgcgtaatacgactcactatagggcgaattggagctccaccgcggtggcggccgaggtactgtctcttttggaaaagttcttgatccccaatgcttcacaagcagagagcaaagtcttctatttgaaaatgaaaggagattactaccgttacttggctgaggttgccgctggtgatgacaagaaagggatgtcgatcagtcacaacaagcataccaagaagcttttgaaatcagcaaaaaggaaatgcaaccaacacatcctatcagactgggtctggcccttaacttctctgtgttctattatgagattctgaactccccagagaaagcctgctctcttgcaaagacagcttttgatgaagccattgctgaacttgatacattaagtgaagagtcatacaaagacagcacgctaataatgcaattactgagagacaacttgacattgtggacatncgatacccaaggagacgaagcttgagcaggagaaggaggggaaaat

SEQ ID NO: 14920 - DNA, 345 bp, Homo sapiens
gcgtaatacgactcactatagggcgaattggagctccaccgcggtggcggccgaggtacttttttttttttttttttttttttttggcaagcacgtgcactttattgaatgacactgctgacaggtgtgtgggtataaactgatgtatctaggggcaggaccaagggggcagggtcaacatcccaaggtgcatggccagcattgcccagtggagtgcacaggttgcaggttatggtcggatactagtaaccccgtttttccgtggttatctggaacatattacgggagactgtcacagagccgcatgccaatcacaggatgaatccaatggtcatgaggatgccc

SEQ ID NO: 14921 - DNA, 524 bp, Homo sapiens
acgactcactatagggcgaattggagctccaccgcggtggcggccgcccggcaggtacagtggtccttttcagagttggacttctagactcacctgttctcactccctgttttaattcaacccagccatgcaatgccaaataatagaattgctccctaccagctgaacagggaggagtctgtgcagttctgacacttgttgttgaacatggctaaatacaatgggtatcgctgagactaagttgtagaaattaacaaatgtgctgcttggttaaaatggctacactcatctgactcattctttattctattttagttggtttgtatcttgcctaaggtgcgtagtccaactcttggtattaccctcctaatagtcatactagtagtcatactccctggtgtagtgtattctctaaaagctttaaatgtctgcatgcagccagccatcaaatagtgaatggtctctctttggctggaattacaaaactcagagaaatgtgtcatcaggagaacatcataacccat

SEQ ID NO: 14922 - DNA, 507 bp, Homo sapiens
cgcgtacgcgcgtaatacgactcactatagggcgaattggagctccaccgcggtggcggccgcccgggcaggtaccaaaattgtaagaagaagcttgggaagctgccacctcagtatgccctggagctcctgacggtctatgcttgggagcgagggagcatgaaaacacatttcaacacagcccagggatttcggacggcttggaattagtcataaactaccagcaactctgcatctactggacaaagtattatgactttaaaaaccccattattgaaaagtacacaggaggcaaagtgtttcacattatagacttcacttccaactccttggaatgttcatttctttggcttacaggagagactagacaggaaggccaggcaatgcttaggcaactaaaatgaggttgggggtaatgctaacgtcaccctcacagggatggccacggggactgttattcgcaagctggttttctaggcctgttagctggaagcatggtgagcacca

SEQ ID NO: 14923 - DNA, 436 bp, Homo sapiens
cgactactatagggcgaattggagctccaccgcggtggcggccgaggtacaagataggcatctcagtaaaaggtctattatctaactagccaaacttgttcactgagagccctaaggaactaaaactgccataatgccgtgcacagcttgaaaagcaattagagcaagcaagatagttgttctccttgcagctctgagaaggcctggctgaaggcccaggagggaaggaaatataagaaccagcaataaaaatagcaatagcaataagaagaatgccatcccatggagcacaccatagttgtggaaccacctctcccggatcaggcttacattgctcacgatgctcacgctgggcagtcgcaactctactttgcagaacctcaccaactagcccaggtattctccccgctttggaaaaaaggtctctccacctgaa

SEQ ID NO: 14924 - DNA, 565 bp, Homo sapiens
cgcgtaatacgactcactatagggcgaattggagctccaccgcggtggcggccgcccgggcaggtacacaatttttagaatagttgatgtctttaagatggatattttacaatttcagtaaaaaaaatacaacatgaagctgctgctgtcacagatcactgtagtaaaaagatataaatgcaataccatgtcgagaacaatatatatatcctctgatattttacaaactttgtactgtgtccaacagctgaaggaatttgaggggaagactttagtgtcagtcaccaaagaaggcctggaacttccagaggatgaagaagagaaaaagaagcaggaagagaaaaaaacaaagtttgagaacctctgcaaaatcatgaaagacatattggagaaaaaagttgaaaaggtggttgtgtcaaaccgattggtgacatctccatgctgtattgtcacaagcacatatggctggacagcaaacatggagagaatcatgaaagctcaagccctaagagacaactcaacaatgggttacatggcagcaaagaaacacctggagataaaccct

SEQ ID NO: 14925 - DNA, 555 bp, Homo sapiens
ccttgtcctcttcttcagtgacttaaaacaattccaggatcagaagagaagccattttgacatcctcgataaaactggggataggctgtagttctgtctgttcacgaagtggttgaaaaacaatttcgagaccagagtctgatgggttcaccatccaggtgttcacaaaaaatcagagaatctctttcgaggtgctggccgccttcaacgctctgagtaagcattgctgggtgtcaggagagaaaagccaaagaagcgggtgccagacagctctgtgcaacctctaggccatgagtgggatagataccactgctgctgtaaaaaatgggagaccatagaccctcaggagaaaagaatcccttctaccctggactcgctctcttctctggaactaacttctcccccataccctgattgtctttggagaaaatgttctggattctagaatctaaggcagagccttttaagccatactgtacctgcccgggcggccgctctagaactagtggatcccccgggctgcaggaattcgatatcaagcttatcgataccgtc

SEQ ID NO: 14926 - DNA, 426 bp, Homo sapiens
cgcgtatacgactcactatagggcgaattggagctccaccgcggtggcggccgaggtacagacagggtttcttcatgttggtcaggctggactcgaactcctggtctcaactgcctcagcctcccaaagtgctggattataggcatgagataccgtgcctggcctccatcactgattctatgtatgcacatgactccttttttacttttacttaggaggcttaaaacacaattattcattcaatataattataaagcagagtctttgttaatttctgaacttggtaaaaacattttttatattttatctatagctcattaatttaggtatcaaaaatgtgttttagtttaggtagcccaagctgccaattgtttgatatcatcatcctcttcttctgccctctgggaagatgctgctcgggatcga

SEQ ID NO: 14927 - DNA, 636 bp, Homo sapiens
cgtaatacgactcactatagggcgaattggagctccaccgcggtggcggccgcccgggcaggtactccaaagattcaggtttactcacgtcatccagcagagaatggaaagtcaaatttcctgaattgctatgtgtctgggtttcatccatccgacattgaagttgacttactgaagaatggagagagaattgaaaaagtggagcattcagacttgtctttcagcaaggactggtctttctatctcttgtacactgtatgcatcatcagtccaaagtttttcagagttctatgtgactggttgaggaaacactgcttgaatttccccatagcctctgcagcggcatcactgtctatgaactcttgaagaagctctttgtattcaggtatagatatgtcggaattgatggtcttttcaaccatgtcctccaggagtttgcagccagaatctgcatagcagtgcaggaggagggccgccagcatgaggaccatcagcagcttcatggcgaggcggctgctgtctgtgttcagtcgtgtgtggcagggatcaaggaagttgctgtccccgcgtacctcggccgctctagaactagtggatcccccgggctgcaggaattcgatatcaagcttatcgata

SEQ ID NO: 14928 - DNA, 279 bp, Homo sapiens
agggcgaatttgagctccaccgcggtggcggccgaggtactggttgccagggattcagccgaatggcttgcctcagagggtcaatggcgttctgagatggtggccagttgtccagacggtagcttgctattgccagtccagaggtgaattctgggttctttggcttcttttccagagccttctcaaagcacaccttcgctctttcattttggtttcctccacactttaaccgtgtccacccttcttcacagtcaagctctggactctcaattttatagg

SEQ ID NO: 14929 - DNA, 367 bp, Homo sapiens
acgactcactatagggtgaattggagctccaccgcggtggcggccgaggtactcttggtttatcaatgggacgttccagcaatccacacaagagctctttatccccaacatcactgtgaataatagcggatcctatatgtgccaagcccataactcagccactggcctcaataggaccacagtcacgatgatcacagtctctggaagtgctcctgtcctctcagctgtggccaccgtcggcatcacgattggagtgctggccagggtggctctgatatagcagccctggtgtattttcgatatttcaggaagactggcagattggaccagaccctgaattcttctagctcctccaatcccattttat

SEQ ID NO: 14930 - DNA, 492 bp, Homo sapiens
actcaccgcggtggcctcacttttaaccttctggattccgcccaccactttcaagctcactattgaatccacgccgttcaatgtcacagaggggaaggaggtgcttctacttgtccacaatctgccccagcatctttttggctacagctggtacagctttcttcgtcctccatgctaagagatgtaaaagcttaagggtcaaacaataccaattgtataggcttcaaaaaccatctaagttagggcattctctagttttagctaagatacacctggaacactgacaagtcatcacttacatagaataatgtgaagtaaattttttgaaaaataaattttagtggaacaatcctgaaggataacaccagaagaatagcaggttaccagtaaggtgtcagccaatttgttccagtcacttttgaatccatgttctataatctaaaaattattctctttccctaagctgagagcttcctatcatgtcagtatcta

SEQ ID NO: 14931 - DNA, 243 bp, Homo sapiens
  misc_feature 33, 42, 60, 61, 62, 80, 82, 83, 92, 116, 124, 133, 134, 157,161, 180, 204: n = A,T,C or G
gcgccgaaagcgaagagggaagcttcagccccnccaacagcngaagccaaagcgaaggcnnnaaaggccaagaaggcagngnngaaaggggnccacagccacaaaaagaagaaganccgcacgncacccaccnnccggcggccgctctagaacaagnggancccccgggctgcaggaatncgaaatcaagccaatcgataccgnccacctcgagggggggcccggtacccagcttttgttccc

SEQ ID NO: 14932 - DNA, 269 bp, Homo sapiens
gcggtggcggccgaggtactgagagaggtggtggacatacttacagagcaactgcgtgacattcagctggagaattacacacccaaggaacccctcaccctgcaggccaggatgccttgtgagcagaaagctgaaggacacagcagtggatcttggcagttcagtttcggtgggcagatcttcctcctctttgactcagagaagagaatgtggacaacggttcatcctggagccagaaagatgaaagaaaagtgggagaatgacaaggt

SEQ ID NO: 14933 - DNA, 695 bp, Homo sapiens
  misc_feature 29, 48, 59, 63, 94, 95, 97, 101, 106, 113: n = A,T,C or G
ggcgatcctatgaatacaggcgaattgancgtacatcggggcggccgnctagaattagnggancccatgaaccgcaggaattagaactcaagcnnancganaccgncgggccncgtttgggggcccggaacccagcttttggtcccattagggaggggtaaatgcgcgcttggcgaaatcaaggtcatagctgtttcctgggtgaaattggtatccgctcacaattccacacaacaaacgagccgggagcataaagtgtaaagcccggggtgcccaaagagtggagcaacctcaaataaattgccggagcggtcaatgccccggtttccaagccggaaaaaaccggtgggccaaattgaaaaaaaagaaaagggcacaaaccccccaaaaaaaaccccttttggaaaaaggggccccatttacccgataccccgggaacaaaaaaaatttagggccccgggggcgatcagattgggggcaaacggggtttaacgttaacctaaaagggggggaaaaaaaccgggtttccaaaaaaaaaaaagggggaaaacaccccgaaaaaaacaaaagggggaaaaaaaaggcccaaaaaaggggcccgaaacccctaaaaagggggcccccctttgcggggggttaataaaaaaaggaccccccccccgcggggggggaaaaaaaaaaaaaaaccccccaag

SEQ ID NO: 14934 - DNA, 217 bp, Homo sapiens
cccccaggaacagaagagaaggggacgtgacaagcacgaaaccgggggggaaaagcagaagcgccgacagcccacgaagaggcggaaaaacaaaaccgagagccagaagacccgggaggggaacaccagccaggggcccacaaaaaaacagagaaccccccgcgaggggcaggccgccgacaacgcgcggagcaaaaaggagaaacccagcccccgg

SEQ ID NO: 14935 - DNA, 428 bp, Homo sapiens
agggcgaattggagctccaccgcggtggcggccgcccgggcaggcactttttttttttttttttttgggggttttttttttttttttttttttttttttttttttttttttttttttttttttttttttttttttttttttttttttttgaaaaaaccgccaatttttttaaagggaaacttccgggggttaaggggtggggggaaaaatttgggggggaaaagggtttttttcaccccactgggtggggcggccctgaagggggggggcaaccccccggcaaaagagggggcagggggccccccttgggggttttcccggggggggggccccatgaaaattttttgccccggggggggggggcccccagtttgccccaaaaggccaggtccccggggcctgtaaaaaaaagggggcccccccggggg

SEQ ID NO: 14936 - DNA, 395 bp, Homo sapiens
tatatagggcgaattggagctccaccgcggtggcggccgcccgggcaggtacccgggtggttaaacttcgcaaaatgcctagatattatcctactgaagatgtgcctcgaaagctgttgagccacggcaaaaaacccttcagtcagcacgtgagaaaactgcgagccagcattacccccgggaccattctgatcatcctcactggacgccacaggggcaagagggtggttttcctgaagcagctggctagtggcttattacttgtgactggacctctggtcctcaatcgagttcctctacgaagaacacaccagaaatttgtcattgccacttcaaccaaaatcgatattagcaatgtaaaaatcccaaaacatcttactgatgcttacttcaag

SEQ ID NO: 14937 - DNA, 474 bp, Homo sapiens
tatagggcgaattggagctccaccgcggtggcggccgcccgggcaggtacttttttttttttttttttttttttaccggaaattgtcttttatttttctttgctggggttcaaggtcatttctttaatcaaacctcagagttggatatagagtcatcaaaagaaaaatcattcttcttcctctctgtttccctaaaaataaaacagtcacaggagactttccttttttcttaattgttctcatctcatctttaattattgctgctgctgttatgtgtttatgtttccctttttttttaagttttgagggtagatcgtgtcactgggcgtaagatactgagaaatcaggtagcttcactggctggtaggggacttttgcttttgaaacgtcacaggctgtcttcctttggatgtaatggacgtcctgatgacccaagccatctgcttagctgtgttctgaccagggccttgggga

SEQ ID NO: 14938 - DNA, 377 bp, Homo sapiens
cactactatagggcgaattggagctccaccgcggtggcggccgcccgggcaggtacttttttttttttttttttttttttttttttattagggttgaaaaggtaagtcctatattagatacataggggctggtagtcttatcctctctataaatacacactttttgtcactgccccttccctgccatgcagagtccccatggctgaatctccctatgtctccaagtgtgcgtcacttgctgtcctctgggctgggtcccatgtgctgtgcccacagtcttatacagccagtgacttcagagccaggacacagctcagcagtctgtcatgaggctccatgtcttcccattttcctgcggcctgatccaggggaggctt

SEQ ID NO: 14939 - DNA, 427 bp, Homo sapiens
tatagggcgaattggagctccaccgcggtggcggccgcccgggcaggtacaatacactagaaaccaacataatgtatttctttaaaacctgtgtgaaaaaataaatgttccaccagtagggataggggaaaagtaaccaaaagagagaaagagaaaggaatgctggtttatcttttgagattgtaatcgaatggagaaatttgcagtattttagccactattaggaattttttttttgtaaaatgaagactgaactctgttcaaatgctttcatgaacctggtttgagacggtaggaaagcaacaaaacgtgggaacctggtgactaagggcctggtgcaaggacttgggaaatgtcattgataatagatggtggggttttcccccctttaaaaatgttggatattaagggatataaacactttttt

SEQ ID NO: 14940 - DNA, 362 bp, Homo sapiens
gaattggagctccaccgcggtggcggccgcccgggcaggtacttttttttttttttttttttttttttttatacattaaatatttattaatgttttgggaatgttgtgtatcagtaattatacctagtaaaaagaaagatccacatccaaatttttcagaaacgggtggccaggttaggaggaagaagagcattttaaaaaccaaaaccaaaacaaggaaaagctaaaaagagttttttccaaatatcctgaattcatagaggttgaattcacattttcagcctttatcccccaaagtgaattttaagggacttgaaaagcttataccccatctgaaaacatgctgcatgatttcctttttt

SEQ ID NO: 14941 - DNA, 498 bp, Homo sapiens
  misc_feature 454: n = A,T,C or G
actactatagggcgaattggagctccaccgcggtggcggccgaggtacagagagctgtgtgcatgctgagcaacaccacagccattgctgaggcctgggctcgcctggaccacaagtttgacctgatgtatgccaagcgtgcctttgttcactggtacgggaaggattcctgccagggtgattctgggggtccgctggtatgtggagaccacctccgaggccttgtgtcatggggtaacatcccctgtggatcaaaggagaagccaggagtctacaccaacgtctgcagatacacgaactggatccaaaaaaccattcaggccaagtgaccctgacatgtgacatctacctcccgacctaccaccccactggctggttccagaacgtctctcacctagaccttgcctcccctcctctcctgcccagctctgaccctgatgcttaataaacgcancgacgggagggtcctgattctccctggttttaccccagctccat

SEQ ID NO: 14942 - DNA, 285 bp, Homo sapiens
cactactatagggcgaattggagctccaccgcggtggcggccgcccgggcaggtactttttttttttttttttttttgggatggagtcttgctctgttgcccaggctggagtgcaggggcgcaatcttggctcactgcaacctcttccttccaggttcacgccattctcctgcctcagcctcccaagtagctgggactacaggtgccagccaccacgcctggctaattttttgtatttttagtagagacgggatttcactgtgttagccaggatggtctcaaact

SEQ ID NO: 14943 - DNA, 432 bp, Homo sapiens
ggcggccgaggtacggccacactgggactgagatacggcccagactcctacgggaggcagcagtaaggaattttccacaatgagcgaaagcttgatggagcgacacagcgtgcaggatgaagttcttcggaatgtaaactgctgttataagggaaaaaaaaaaaaaaaaaaaaaaaaaaggtacctgcccgggcggccgctctagaactagtggatcccccgggctgcaggaattcgatatcaagcttatcgataccgtcgacctcgagggggggcccggtacccagcttttgttccctttagtgagggttaattgcgcgcttggcgaaatcatggtcatagctgtttcctgtgtgaaattgttatccgctcacaattccacacaacatacgagccgggagcataaagtgtaaagcctggggggcctaatga

SEQ ID NO: 14944 - DNA, 229 bp, Homo sapiens
acgactactatagggcgaattggagctccaccgcggtggcggccgcccgggcaggtactttttttttgtttattattttttttttttcccggccatattccattcttttagaacttgaattgcactgccatccacaaaggcttgcacggttttatccacattaaaatcaaactgttggagcaccaggactatttcattattgcttttgtggggaacaactgatctaact

SEQ ID NO: 14945 - DNA, 484 bp, Homo sapiens
ctactatagggcgaattggagctccaccgcggtggcggccgcccgggcaggtactctttgttttggcacacttttcctgacaaacagccagtgttctcaacacataaatactagtccacgttaacaacaatagcatatgagaccgctctccgtaaagatgccagattggatgcaaatggactggaaataccttggagggtttcacaaaaataagacaaagggcaaaggaactttgccaaaggagatggagagcaattctttaaagttagtgggagggaggaagcaaagagctcataaatacaagcctcttaaaatgggacgcatttgcctcgcgcctacttgggtgtctgcagctcagcttggtgccccacacaggacaccgactttaagtggctgcctttgcaaggctgagaggccatgaagggttgatgcctgaaagtgtcagcgccttctagtggaaacatggggcatggccgctttggac

SEQ ID NO: 14946 - DNA, 337 bp, Homo sapiens
tacgactcactatagggcgaattggagctccaccgcggtggcggccgcgccgaagtctctactgaggaaagctatgaggatactctgttcgtaagctcccggtgaattttgttccacagactcggaagaaaggttggataagagttcactggagattgacaagtacctgaggagcccctacccagtgcgatcttaacggcattggtggaagctggggtcagaaaagagaaatgaccatttggaggggcggggcctcctagaagaaccttcttagacaatggggggaggatgggactttgttttttccaagaataaacttcaactcctgtcaaaaaaa

SEQ ID NO: 14947 - DNA, 659 bp, Homo sapiens
tacgactcactatagggcgaattggagctccaccgcggtggcggccgaggtacttcccaccacagtgttgaaagggagagcaaagtcttatggataaaccctcctttcttttggggacacatggctctcacttgagaagctcacctgtgctgaatgtccacatggtcactaaacatgttatccttaaacccccgttgcctgagttgaaagggctctctcttattaggttttcatgggaacatgaggcagcaaatctattgctaagactttaccaggctcaaatcatctgaggctgatagatatttgacttggtaagacttaagtaaggctctggctcccaggggcataagcaacagtttcttgaatgtgccatctgagaagggagacccaggttatgagttttcctttgaacacattggtcttttctcaaagttcctgccttgctagactgttagctctttgaggacagggactatgtcttatcaatcactattattttcctgttacctagcatgggacaagtaccacctgctggggatcactctctaggatcacccctccatccacaatttcatccacagccaagaacagcccctccatgttctccagcagtgctcgcttttctacatttttcctcagcatctggctcaatgagtcga

SEQ ID NO: 14948 - DNA, 518 bp, Homo sapiens
  misc_feature 62: n = A,T,C or G
tacgactcactatgggcgaattggagctccaccgcggtggcggccgcccgggcaggactttnttttttttttttttttttctttttttttttttttttttttttggccttttttaatatctttatttgacaaaataaaagtcagcaacctatctcgatttccaattttttgctgggtttgaaatccaattgagacctaaagcatagctctggccttggagagatttccaggagagtcagagcccagaagggagcaggatccaggaggccctcatctcccagcactccagctgagccagccgggttatggaacatcactgagcaattaaaatattatcaacagacaaaaaaagtttattgaatacaaaactcaaaggcatcaacagtcctgggcccaagagatccatggcaggaagtcaagagttctgcttcagggtcggtctgggcagccctggaagaagtcattgcacatgacagtgatgagtgccaggaaaacagcatactcctggaagtccacct

SEQ ID NO: 14949 - DNA, 504 bp, Homo sapiens
gcgaattggagctccaccgcggtggcggccgaggtacctgggctctttcaggtcccccttcctctgcagactcagcctccaggctgtttagctctcccagatagctgcccctgccacgcaggccaggagtcttcacactcaggcaccaggcctggtccaggaggagctgggcacagtcgtggttcaagtgtccacatgcacctgttagtccctgagaggtggtgggaatggctgcttcattcctcgaggatgcccgggccccacctgggcttgtctttctgtttagagggaagtgtaacatatctgccatgaggaacataaattcatgtaaagccattttctcttaaacaaaacaaaactttctaagtacaattgttacaaataacgcagacttcaaaaacaaaaaaatcacaacccaaacaaaccaaattttaaatgatcagaattggcagcacaaagaaaacgccctctcctgacttgtattgtggcagtctgaacgccccc

SEQ ID NO: 14950 - DNA, 459 bp, Homo sapiens
  misc_feature 419: n = A,T,C or G
ctccaccgcggtggcggccgcccgggcaggtacttttttttttttttttttttttttctaactttatatataatactttattttatacaattcagtatatcatgttaacatatttcacttttaattttatgatatgtgtgacatatttttaattttatggattcaattatactatcataatttttttaaagtttgtatctttcattaataaggaggttccttattaatggattttttttcctgtagcttctgagaacacatttttagatacccggcttctagttatacctgaagctccacagtgtaaacatgttttggccaaccttgttttatcggtgtatgaaatttgtgctaataggatggatccaattgtcattacattagaaaactaaatgggaaacatttcttctacattctgngcaacataacaaaattatacatagagattattcaactaaa

SEQ ID NO: 14951 - DNA, 478 bp, Homo sapiens
gggcgaattggagctccaccgcggtggcggccgcccgggcaggtacgcggggcccttctagaggcaggcagagggaagagaaagggtctgttgtttttctctcctgtttctcgctccctctctgctgatcacaaagctgctgaccgggtcagaaagtcctgatggaaatccaccagcgctgggcaggcccctcctcctccagggagcttgtccttgcctaatttttcttcgtcctgatgagaacaaaaaagagagagagaagaaaagaaaaaccacaaacttcctttgaaaaccagcttgtagtcagggcccggagcgcatgccatagactcggcgactcaggaatcctgaagactctctgagcgacctggagcaccttggctgtgtccctgcctgccttcaccctcctccagtgcccccagtactaaggaatctttctgctttggggtttatcagaattctcagaatctcaaataac

SEQ ID NO: 14952 - DNA, 474 bp, Homo sapiens
actcactatagggcgaattggagctccaccgcggtggcggccgcccgggcaggtacgcggggacacaagacatcatcttgaaggaaggatggctttggccagaccaagaccaagacttggagacctgattgagatttctcgctttggctatgcacactgggccatctacgtgggagatggctatgtggtccatctggctccggcaagtgaaattgctggagctggtgcggccagtgtcctgtctgccctgaccaacaaagccatagtgaagaaggaactgctgtctgtggtggctgggggagacaactacagggtcaataacaagcacgatgacagatacacaccactgccttccaacaaaatcgtcaagcgggcagaggagttggtggggcaggagttgccttattcgctgaccagtgacaactgcgagcacttcgtgaaccatctgcgctatggcgtctcccgcagtgacca

SEQ ID NO: 14953 - DNA, 433 bp, Homo sapiens
tactatagggcgaattggagctccaccgcggtggcggccgcccggccaggtactaggagatattgatcctagtcaattaggcattgtagactgtcatgaccacttaataaaaaattatggacctgaagctcacgagcatccagattttattatgatgtcaaaagatgctgcaattaaagaactgaatgaatatgtagcaaacggaggaaaaactgttgttacagtggaccctcctaacgtagggcgtgatgtttatcaaatgttagatattgcaaagaagttagacggaaacgctaacatctttatggcaactggggtccatgaagctgcattttatgacaaaggagctgattgacttgctttgacttccacaggttaaattgccaaaatggagcgtagctgaaatccaaaaacgaatggatgaatataacta

SEQ ID NO: 14954 - DNA, 358 bp, Homo sapiens
agggcgaattggagctccaccgcggtggcggccgagggacctgcaggcctcctacacctacctctctctgggcttctatttcgaccgcgatgatgtggctctggaaggcgtgagccactttttccgcgaattggccgaggagaagcgcgagggctacgagcgtctcctgaagatgcaaaaccagcgtggcggccgctctagaactagtggatcccccgggctgcaggaattcgatatcaagcttatcgataccgtcgacctcgagggggggcccggtacccagcttttgttccctttagtgagggttaattgcgcgctaggcgtaatcatggtcatagcgtgctactgtgtgaaattg

SEQ ID NO: 14955 - DNA, 461 bp, Homo sapiens
ttggagctccaccgcggtggcggccgcccgggcaggtacgtttcagagtttcataagacacagtctcaacaggagtttttttaataaatgctctatctctagttccagaaactgaattccaagaagctacactgaggataattcagctctgatattgtgattactgtgatgttctttcattcatacagtaagtatctgcccaatacgtaactaccgagatctattgcttcctacataattagacaagctcctcacacatatgggcccatgccgggcacatagcaggcactcaacaggtgtttgcttaactacagaagaataatataattgcctttcttcttaactgttttacctttttctatacttgatatatttgaaaaacaacatgctttgcaaactaaaatctaacatgcattactaactttataaaaagatccttagtatttttcaaaaagggaaaa

SEQ ID NO: 14956 - DNA, 427 bp, Homo sapiens
tacgactactatagggcgaattggagctccaccgcggtggcggccgcagagcttaagagacccttcagcttctcggtgtaggtcaccagtcatgtcacgctcacaaccctttcgcctccctctaggtcaggcaccgcatccaagttaagcaaccgacgccggctccttggtgtcccaacaaggtctagtagaaaagcaactttataattcgtttcacagatttgattaagagccaactgagtagtgggccttgtgctagggctccgagggcccaaggaccccatggaaccagatttagtcgctgacctctaggagctcacaggtgagtgactcccccgcgtacctcggccgctctagaactagtggatcccccgggctgcaggaattcgatatcaagcttatcgataccgtcgacctcgaggggggg

SEQ ID NO: 14957 - DNA, 311 bp, Homo sapiens
ggcgaattggagctccaccgcggtggcggccgcccgggcaggtaccgctgtgtccgggtgggtggtcagaatgccgcgctccaggtgttcacagctgcttcgtggaagaccatgtgctccgatgactggaagggtcactacgcaaatgttgcctgtgcccaactgggtttcccaagctatgtgagttcagataacctcagagtgagctcgctggaggggcagttccgggaggagtttgtgtccatcgatcacctcttgccagatgacaaggtgactgcattacaccactcagtatatgtgagggagggatg

SEQ ID NO: 14958 - DNA, 408 bp, Homo sapiens
ggcgaattggagctccaccgcggtggcggccgcccgggcaggtacattggcacgtcacgatgtcttgagtttcattcactaggtggcagcctgcatcgttccactgcaaatgactgaaatcccaaaacacacaatgaggctggctcaggtttgactctatcttggaaaaaaataggaaaacttcatttatggaatagttttgaataaccgtggatatcacaggtccattgacctgagcatttccatttttggaaacgggtagaatgttccccagagtcaacgaggccatgctgataatagtttctggaagggatctctggaattggtctgacccaattaacacacggcctctgatgggaatagatgtattttggggacacattttaatctgataagctgtaacccctt

SEQ ID NO: 14959 - DNA, 481 bp, Homo sapiens
actactatagggcgaattggagctccaccgcggtggcggccgtcatcacagtgacagatgtcaatgacaatcctccagagtttactgccatgacgttttatggtgaagttcctgagaacagggtagacatcatagtagctaatctaactgcgaccgataaggatcaaccccatacaccagcctggaacgcagtgtacctcggccgctctagaactagtggatcccccgggctgcaggaattcgatatcaagcttatcgataccgtcgacctcgagggggggcccggtacccagcttttgttccctttagtgagggttaattgcgcgcttggcgtaatcatggtcatcagctgtttcctgtgtgaaaattgttatccgctcacaattccacacaacatacgagccgggagcataaaagtgtaaagcctggcggtgcctaaatgagtgagctaactcacattattttgcgttgcgctcactgc

SEQ ID NO: 14960 - DNA, 410 bp, Homo sapiens
actactatagggcgaattggagctccaccgcggtggcggccgcccgggcaggtacaatatgaacctgtgctttgcagcaggccaacttgtaaagctgttctcaacccactttgtcaggttgattatcgagcaaaactttgggcctgtaatttctgttttcaaagaaatcagtttcctccagcttatggaggcatatctgaggtgaatcaacctgccgaattgatgccccagttttctacaattgagtacgcggcgacagcggcttccttgatccttgccacccgcgactgaacaccgacagcagcagcctcaccatgaagttgctgatggtccttatgctggcggccctctcccagcactgatactcaggctctggctgccccttattggagaatgtgatttccaagaca

SEQ ID NO: 14961 - DNA, 413 bp, Homo sapiens
ttggagctccaccgcggtggcggccgcccgggcaggtacgcggggccctgtgctgtctgcacacgaggagagcggcctgacggaagtggaccaccatatgtggaaactacagtctatgctttgaagcgcagaagggaataaacatttaaagactcccccggcgacctgcaggatggacttttccatgggggccgcagcagcagcttacaatgaaaaatcacagactgccgctcttggagaaaactatagttggcaaattcccattaaccacaatgacttcaaaattttaaaacataatgagcgccaggtgcgtgaagacctccagaataagtgcggctgtatctataccctggtctgtccaggtcaggaaggcaacagcaaatctgtgcaagtgttaagaaaaatgcttactc

SEQ ID NO: 14962 - DNA, 477 bp, Homo sapiens
ctactatagggcgaattggagctccaccgcggtggcggccgcccgggcaggtactcctgaaatggcttctgcagagatggacctatgccggggacagcacacctggactcaaaaggcagggattggataggaagaggaataaaatataaaaatcagagaactgctgaaattctgtgacccctttttagttaaaaaaaaaaaaaaaaagaaataaaagtacctcggccgctctagaactagtggatcccccgggctgcaggaattcgatatcaagcttatcgataccgtcgacctcgagggggggcccggtacccagcttttgttccctttagtgagggttaattgcgcgcttggcgtaatcatggtcatagctgtttcctgtgtgaaattgttatccgctcacaattccacacaacatacgagccgggagcataaaagtgtaaagcctggggtgcctaatgagtgagctaactcaca

SEQ ID NO: 14963 - DNA, 374 bp, Homo sapiens
  misc_feature 332, 352, 353: n = A,T,C or G
ttgagctccaccgggggcggccgggacattttaaagagttgttttttggccgggcgcagtggctcatgcctgtaatcccagcactttgggaggccgaggtgggcggatcacgaggtctggagtttgagaccatcctggctaacacagtgaaatcccgtctctactaaaaatacaaaaaattagccaggcgtggtggctggcacctgtagtcccagctacttgggaggctgaggcaggagaatggcgtgaacctggaaggaagaggttgcagtgagccaagattgcgcccctgcactccagcctgggcaacagagcaagactccatcccaaanaaaaaaaatttaaaaaaaannttgtacctgcccgggcggccg

SEQ ID NO: 14964 - DNA, 448 bp, Homo sapiens
cgcggtggcggccgcccgggcaggtacttggggaaggcgtatcgtgcgtcagtattacagcagaagcaggaggagagctggcgggaagacatgcaccccttgaagacccagagagaggccgtctgtctaccgcgtagcagttacatcagactgagacacttcctgtttacaggagactataaaattcctgccccgtgctcatttggggctgacgccattttagacctcagcccatctgcacccaggcgctcactgaaacagtgtgttgctccacaccgccttgttttgcttgttggcgcgctctcagggttccgaccaatccaagagccttgcagaaagcattaacgtgcttttctctttggcagagtttttctttgctctgatcttggagacatccctctgcctagtggaaacataaggaatacagaaagaatgcaaggagatagac

SEQ ID NO: 14965 - DNA, 478 bp, Homo sapiens
agggcgaattggagctccaccgcggtggcggccgcccgggcaggtacaccatgttaagagatagcaatgcaaccgcagccaagatgtctttagatgtaatgattgaactctacagaaggaacatctggaatgatgcaaaaactgtcaatgttatcacaactgcatgtttctctaaggtcaccaagatattagttgccgctttgacattctttcttgggaaagatgaagatgaaaaacaggacagtgactccgaatctgaggatgatggaccaacagcaagagacctgctagtaccctctcttccagcacccaggccagtattgagatcgattctctctatgaaggaatcgacttctatacctccattacccgtgcccgatttgaagaactgaatgctgacctgttccgtggcaccctggacccagtagagaaagcccttcgagatgccaaactagacaagtcacagattcatgatatt

SEQ ID NO: 14966 - DNA, 361 bp, Homo sapiens
agggcgaattggagctccaccgcggtggcggccgcccgggcaggtacagtggcgtgggcctgctttcccgccagtgcccactcaaagtttcttacggcataggcgatgaggagcatgatcaggaaggccgggtgattgtggctgaatttgactcgtttgtgctggtaacagcatatgtacccttgtcctcttcttcagtgacttaaaacaattccaggatcagaagagaagccaacgtgacatcctcgataaaactggggataagctgaagttctgtctgttcacgaagtggttgaaaaacaatttcgagatccagaagtcccttgatgggttcaccatccaaggtgttcacaaaaaatca

SEQ ID NO: 14967 - DNA, 477 bp, Homo sapiens
tactatagggcgaattggagctccaccgcggtggcggccgcccggcccggtaccttcacctgctttggagaaatcctgaatgtgtccccagaaatgagacgagaagtcttctcctgatcaaaggtcttttcttgattgaagggttcgtggtttcacaggcttcaaggaaagaagccatggacctcagtggtgagtgttacagctccattagagaaacatgcagacccccccgcgtacctcggccgctctagaactagtggatcccccgggctgcaggaattcgatatcaagcttatcgataccgtcgacctcgagggggggcccggtacccagcttttgttccctttagtgagggttaattgcgcgcttggcgtaatcatggtcatagctgtttcctgtgtgaaattgttatccgctcacaattccacacaacatacgagccgggagcataaagtgtaaagcctggggtgcctaatg

SEQ ID NO: 14968 - DNA, 443 bp, Homo sapiens
ggtactttcctcttccctagaaaggcaggactagtcgctaacggtgaaggaccacggcaggcgtccctgagtggtctgacacctttgaaacgtgagtgaataatcagagaggtgtccctgcaatgataaacaccaaggaaaggctgccttcccagtctgagaccagcgccagagttttgggtccacggataaaacgtgtctcgtttgtctctaccagaaaatgaacggaattgaaattaagacaagggagagattaaaaaaaaaaaaagaaaaaataaaggtacctcggccgctctagaactagtggatcccccgggctgcatggaattcgatatcaagcttatcgataccgtcgacctcgagggggggcccggtacccagcttttgttccctttagtgagggttaaatgcgcgcttggcgtaatcatggtcatagcctgtta

SEQ ID NO: 14969 - DNA, 610 bp, Homo sapiens
tacgactcactatagggcgaattggagctccaccgcggtggcggccgaggtacgcttcgacccacgcgtccgagaaaagactattaattatttgtgcctttaaaggttaattatttcaaccttaaaagaatcttataagaacccattaataaaaaagaatgcaaatatattgcccaaaaaaatacacaaattattgtctttcatataggggaggaaataaatatgtttcatctgaattgtctgaagtaagtcatgaatggagtcagggtaaaaaaaaaaaaaaaaaaagtgcggccacctgcccgggcggccgctctagaactagtggatcccccgggctgcaggaattcgatatcaagcttatcgataccgtcgacctcgagggggggcccggtacccagcttttgttccctttagtgagggttaattgcgcgcttggcgtaatcatggtcatagctgtttcctgtgtgaaattgttatccgctcacaattccacacaacatacgagccgggagcataaagtgtaaagcctggggtgcctaatgagtgagctaactcacattaattgcgttgcgctcactgcccgctttccagtcgggaaacctgtcgt

SEQ ID NO: 14970 - DNA, 506 bp, Homo sapiens
ctcactatagggcgaattggagctccaccgcggtggcggccgcccgggcaggtcaagcttcgacccacgcgtccgcgaatactgcatactgtgtaaggtagtatataagtttatgagagaagtggagagctttcttccttgaaaagtcggtatttgttgagataccatttgcctcacagagaggtgttccccactcccatccccattgccagataataaatattttgagaaaagtgacctaaaacagctgaaatcttaggtgcatctgtctgcagacctccttaagcaggctgtatcttacaattcccttactgcactgggtaagtgttaacttagtttttgttgtttgctcttttgctttaaatattctccaaattacacctcggccgctctagaactagtggatcccccgggctgcaggaattcgatatcaagcttatcgataccgtcgacctcgagggggggcccggtacccagcttttgttccctttagtgagggttaattg

SEQ ID NO: 14971 - DNA, 562 bp, Homo sapiens
cgcgtaatacgactcactatagggcgaattggagctccaccgcggtggcggccgaggtgtacaagcttcgacccacgcgtccgaaagattcttgggtgagcatggtggctcatgtctgtcatctcagcaatttgggaggcaagggcaggaggatagtttgagcccatgagtttgagaccagcctggacaacatagtgagaccccatctcagcaaaaaaaaaaaaaaaaaaaaaaaaaaaaaagtgcggccggccgcactttttttttttttttttttgctcaatagaagtttggaataattccaggtaatttaaagcatatttttcaattggtgtaagctgctccatgaagtcagctagctcctctaattgggatggttcttcatcacacggcatgttctcagagtctgatgacagaacatcagtgggtggtcccagcacccccttctgggcggacttttgggcatcctcctccagatactcaatacttttgagggcctgaggaaagtctttttgaaagggtttgcaattttgggtgcaatggttttcgtgacaaaaggttc

SEQ ID NO: 14972 - DNA, 686 bp, Homo sapiens
cccgcgtaatacgactcactatagggcgaattggagctccaccgcggtggcggccgaggtcactttttttttttttttttaaaataattcttttaattattgatgctttgaataagaagtccattttactaaatttagtataaattatcggacgcgtgggtcgaagcttgacctgcccgggcggccgctctagaactagtggatcccccgggctgcaggaattcgatatcaagcttatcgataccgtcgacctcgagggggggcccggtacccagcttttgttccctttagtgagggttaattgcgcgcttggcgtaatcatggtcatagctgtttcctgtgtgaaattgttatccgctcacaattccacacaacatacgagccgggagcataaagtgtaaagcctggggtgcctaatgagtgagctaactcacattaattgcgttgcgctcactgcccgctttccagtcgggaaacctgtcgtgccagctgcattaatgaatcggccaacgcgcggggagaggcggtttgcgtattgggcgctcttccgcttcctcgctcacttgactcgctgcgctcgggcgttcggctgcggcgagcggtatcagctcactcaaaggcggtaatacggttatccacagaatcaggggataacgcaggaaagaacatgtgaacaaaaggccagc

SEQ ID NO: 14973 - DNA, 705 bp, Homo sapiens
cactatacggcgaattggagctccaccgcggtggcggccgaggtactcactgacacgtttctcttgacactgagatggtcgcaaacaaaacaccgttcttgcctggatgaagcaagagttcacataaaagagctttataaaatgtctatgaaggagaattgataatatcagaagagctccagcacttcaattgaatataatcctctattattcttttcttgatttaatttctgtagctcccgaaaacttacttcaatcttgttgagctcagaataaacagatatctaaagaaaagagtttcagagtaacttttaccataatgtctacatagaaacaaatcttccaagagtaagctatttaaggacaaattttaagaataattgtaattcaggtgatacttgggtttttgtacaagcttcgacccacgcgtccgacctgcccgggcggccgctctagaactagtggatcccccgggctgcaggaattcgatatcaagcttatcgataccgtcgacctcgagggggggcccggtacccagcttttgttccctttagtgagggttaaattgcgcgcttggcgtaatcatggtcatagctgtttcctgtgtgaaattgttatcccgttacaattccacacaacatacgaacccggagcataaagtgtaaaacctggggtgcctaatgagtgagctaacttacattaatt

SEQ ID NO: 14974 - DNA, 626 bp, Homo sapiens
ctatacggcgaattggagctccaccgcggtggcggccgcccgggcaggtcaagcttcgacccacgcgtccgataatttatactaaatttagtaaaatggacttcttattcaaagcatcaataattaaaagaattattttaaaaaaaaaaaaaaaaaaaaaaagtgacctcggccgctctagaactagtggatcccccgggctgcaggaattcgatatcaagcttatcgataccgtcgacctcgagggggggcccggtacccagcttttgttccctttagtgagggttaattgcgcgcttggcgtaatcatggtcatagctgtttcctgtgtgaaattgttatccgctcacaattccacacaacatacgagccgggagcataaagtgtaaagcctggggtgcctaatgagtgagctaactcacattaattgcgttgcgctcactgcccgctttccagtcgggaaacctgtcgtgccagctgcattaatgaatcggccaacgcgcggggagaggcggtttgcgtattgggcgctcttccgcttcctcgctcactgactcgctgcgctcggtcgttcggctgcggcgagcggtatcagctcactcaaaggcggtaatacggttatccac

SEQ ID NO: 14975 - DNA, 632 bp, Homo sapiens
gagctccaccgcggaggcggccgctctagaactagtggatcccccgggctgcaggaattcgatatcaagcttatcgataccgtcgacctcgagggggggcccggtacccagcttttgttccctttagtgagggttaattgcgcgcttggcgtaatcatggtcatagctgtttcctgtgtgaaattgttatccgctcacaattccacacaacatacgagccgggagcataaagtgtaaagcctggggtgcctaatgagtgagctaactcacattaattgcgttgcgctcactgcccgctttccagacgggaaacctgtcgtgccagctgcattaatgaatcggccaacgcgcggggagaggcggtttgcgtattgggcgctcttccgcttcctcgctcactgactcgctgcgctcggtcgttcggctgcggcgagcggtatcagctcactcaaaggcggtaatacggttatccacagaaatcaggggataacgcaggaaagaacatgtgagcaaaaggccagcaaaaggccaggaaccggaaaaaggccgggttgctggcgtttttccataggctccgcccccctgacgagcattacaaaaatcgacgctcaagtcagaggtggggaaacccc

SEQ ID NO: 14976 - DNA, 450 bp, Homo sapiens
gcgtaatatctactcactatagggcgaattggagctccaccggggtggcggccgaggtcttcgacccacgcgttcgattttactctgtgtattcgggtggtgggttatagtttaccaagttgtccaaaatggataattcatgtgagataggcaagagcaagtgttgtatcccaataccatttggtgaaaaagttgaacttcagaaaggataagtagtttgccaagatcacctggcaacctgcatagtcaaatttgagatggaactcagctactccaatatctgtatttgcagaataattctggtgtgcctattttgttggtggcggtgtttttgagacggagtctcactctgttgcccaggctgcagtgcaatggcacgatctcagcttactgtaactttcacctccttgcttaaagtgattcttctgcctcatactcctgagtagctgg

SEQ ID NO: 14977 - DNA, 610 bp, Homo sapiens
tacgactcactatagggcgaattggagctccaccgcggtggcggccgcccgggcaggtttttttttttttttttgcaacattgccctttgatgtccccatgagggccaggcccaggcagaacccatcccattttatccttaaactcagaaggaaatttgtctaaatattaaaggattaatatgggaataaaaaatgaaccttaaaccctgccactgatacacaagctgtctctcttagagttcaatgaacacttcaggagagtatttccaacaatatttagatattggaatatctaaatattgttgatttagataaccaccctagatttctcaccaccctagaacatttagtggggagacattcttttctcctttttctgataacttggtcagaagtgattgactgtgcaaatggtatttctccggacgcgtgggtcgaagcttgacctcggccgctctagaactagtggatcccccgggctgcaggaattcgatatcaagcttatcgataccgtcgacctcgagggggggcccggtacccagcttttgttccctttagtgagggttaattgcgcgcttggcgtaatcatggtcatagctggttcctgtg

SEQ ID NO: 14978 - DNA, 495 bp, Homo sapiens
gtaatacgactcactatacggcgtatagggccaattggagctccaccgcggtggcggccgaggtacatgtgccaccattgttatatctttaactatatcctggactacttgcccctgatcatctatgagtagacaataattagtaaggtcaaatttttcacaaactcctccttcagctgctagcaagtaatcaagagctagtctattttgatagatagcatttctcatcagagtctcttgccaggcaagaacagtcaaggcttgagtggtgttcttatgtctgcatactaaaactgcttggcaccatatgacacggccgagcatgtagatgggggttcgatatccccatgagacatcttgtgcccaagtggcaggtccatagtattgtaagattttttcagggggccattcatcgtctttccaatcacctatggctatgcttcatttttcacaggaagcacagactgggaagcccaaagtttacctgtttttatg

SEQ ID NO: 14979 - DNA, 670 bp, Homo sapiens
atacgactcactatagggcgaattggagctccaccgcggtggcggccgacctgcccgggtggccgctcgaggccgcccgggcaggttttatttaacattcaaacttcattaagacatgtgcaatatggcaattttactggggattaaaccctacctaggattgcttgctggggcttagcaacagggtccagttcacacttagcactaattaaatactttattgaataaatacaataccaaacaaaatgcattcaaatgccggacgcgtgggtcgactcaagctaggtcggacgcgtacctcggccgctctagaactagtggatcccccgggctgcaggaattcgatatcaagcttatcgataccgtcgacctcgagggggggcccggtacccagcttttgttccctttagtgagggttaattgcgcgcttggcgtaatcatggtcatagctgtttcctgtgtgaaattgttatccgctcacaattccacacaacatacgagccgggagcataaagtgtaaagcctggggtgcctaatgagtgagctaactcacattaattgcgttgcgctcactgcccgctttccagtcgggaaacctgtcgtgccagctgcattaatgaatcggccaacgcgcggggagaggcggtttgcgtattgggcgctcttccgc

SEQ ID NO: 14980 - DNA, 588 bp, Homo sapiens
tacgactcactatagggcgaattggagctccaccgcggtggcggccgcacttttttttttttttttttttttaaaaattcaaaaaattagtttattagcttaatataattaggtcaatggaatcctgttttgatctcaatacttcccatattgcaatatataaatgtgacaaattcagctgttttgcggcataaataagtgtctaagctgggcagttagtctacccgtttatagttcatgttcttcatggctttgcagcatttgtcactttctatgatgtgttcaaagaccagaaaaggccacacttgacctgtcagctggtccttgaacagctgtaggtttttttttttttgagacagagtctccctctgttgtccaggctggagtgcagtagcgcaacctcgactcactgcaacctctgcctccaggttcaagtgattctcctcctcagactcctgagtagctgggattacaggcacatgccaccatgcccggctgatttttatatttttagtagagatggggtttcaccatgttggccaggctggtcttgaaacctcggccgcttctagaactagtggatccccc

SEQ ID NO: 14981 - DNA, 242 bp, Homo sapiens
ggcgaattggagctccaccgcggtggcggccgcccggcaggacctcagattaaaaatattgctgaggtcagacgccacaattttcatgactttcttcagaagtagcacattttcgtgacttccgctgtcctctgaaaaacaaagttatttggaacatgttcatgcaaaagtgattctgaccaagtctaaatcgagcttttctactgacatgaaactgttggaaactgatcttattttataag

SEQ ID NO: 14982 - DNA, 332 bp, Homo sapiens
gcgaattggagctccaccgcggtggcggccgaggtgtacaagcttcgacccacgcgtccgagcagaacttggcagcaacagaggaagggcccctggagccggctgtcgtggatgcctttaatcaagcctggcatttggttgctcacgaatgtcccaactacttccgctaggcccatcatggctcaggctgcccaaggcttttctgtcacctcttttgttctctcacactgaccagtcttacctgcccgggcggccgctctagaactagtggatcccccgggctgcaggaattcgatatcaagcttatcgataccgtcgacctcgaggggggg

SEQ ID NO: 14983 - DNA, 269 bp, Homo sapiens
attggagctccaccgcggtggcggccgcccgggcgggtcttcgacccacgcgtccgtagtaataggaattaactgaccccttttggatgggggagagcatcaggctggggtcaggtaagtgtaaatggccttctgagcatgctcttctaggctgactcccagccctgacttgaaaccattagcgctaacttgctctgttttgagaaaaactttccaaacttttgcatgagaaactagaaaaaggaatgtatgccacgtaactggattac

SEQ ID NO: 14984 - DNA, 413 bp, Homo sapiens
  misc_feature 235: n = A,T,C or G
agctccaccgcggtggcggccgcccgggcaggtacaattagttatcaattcatgggctatggccactggtttgctggatggtcagggacttggaaggaacatgactggaaaattggtgacaaaacggtctgtggaagaggtatatacacagatctttctgaatgggtgaaaaatgtgaggatatttgtgtctcatatgaatgccaccaaagaatgacttcagcagaagaggattntaataaccaagtagataggatgacctgttcagcccctttctccaaccatgcaggtaactgcccaatgagctcatgaataaagtggccatggtggcagggttgttcggacgcgtggttcgaagcttgacctcggccgctctagaactaggtggatcccccgggctgcaggaattcgata

SEQ ID NO: 14985 - DNA, 287 bp, Homo sapiens
ggcgaattggagctccaccgctgtggcggggtggcgggcggcggagtaagacttcgtctcaaaaaaaacaaaaacaaaaacaaaaacaaagaagttagcctggttgggcatggtggctcatatctgtaatcctagcactttgggaggcccactgggatcatttgaggccagaaatttgagacgagcctgggcaacgtagtgaaccctcatctttaccaaaaaaaaaaaaaaaaagtgcggccgctttaaaactagtggatcccccgggctggaggaattcgatatta

SEQ ID NO: 14986 - DNA, 232 bp, Homo sapiens
tatagggcgaattggagctccaccgcggtggcggccgaggtggacttgattcataaccaaccaacccaggctgtcatgctaaaaaaaagggcagaatctttgctgctgaactactgcatagggtgactaccattgctcctttagtttagtttggctagcataaggtggtcttgccatgtaaaaaaagccctttcaggtaatcaaaatgtttttttttttacttttgctggtg

SEQ ID NO: 14987 - DNA, 292 bp, Homo sapiens
ttgagctcaccgggtggcggccgggtctccaaagtgctggaatcacaggaatgagccaccacacccagccaaattgggcacaaatttaaaatttgacttttattaatgatatggtaaagagatctagcttggtcatgacacccttgtgttatacggtgacaggcaaatcatttaaaaatatctaaactataatttcctgtagttcacatgaattggatattctgaagcggacgcgtgggtcgacttgtaacctgcccgggcggccgctctagaactagtggatcccccgggc

SEQ ID NO: 14988 - DNA, 285 bp, Homo sapiens
ttggagctccaccgcggtggcggccgaggtacatttttggggggagagacacagatttttacactaatatatggacctagcttgaggcaattttaatcccctgcactaggcaggtaataataaaggttgagttttccaaaaaaaaaaaaaaaaaaaaaagtgcggccacctgcccgggcggccggccgcccgggcaggtctcgggcccgagaagacctcctttttccaggctttaggtatcaccactaaaatctccaggggcaccattgaaattctgagtgatgt

SEQ ID NO: 14989 - DNA, 477 bp, Homo sapiens
aattggagctccaccgcggtggcggccgaggtacgcgtccgagctaacgaatgctagactaactagataccaaagcttgctctgtgaaaattcccgcataaccactgaagtgggcgacaccctaaccctgcacaccttactcctggtatcagagagcccagttgaacataaactgcgtagaggtgttagactcaacctaccctagtaggcccaacctccgagaccaaccttaaacatcagtagactgcgagctgtatgtggataggagcagtttcgccaacccctgcaaagtgactctgaaaaagacgacaagccctgctccagtcgcacccggaagctgactggtccacgcacgggcaaaacatgaggaaactcatagcgggactcatttcccttaaaatttggacttgtatagtaaggactttaactgaccttcctcagactgaaggctgtttccaggatatacatcaagtcact

SEQ ID NO: 14990 - DNA, 153 bp, Homo sapiens
gagctccaccgcggtggcggccgcccgggcaggtcttgagtcgacccacgcgtccgcctagcaaagctgttccactgaatgcatctaagcaagatggacctatgccaaaaccaccacagggtttcacttaatgataccgaaacaaggaaacta

SEQ ID NO: 14991 - DNA, 419 bp, Homo sapiens
actatagggcgaattggagctccaccgcggtggcggccgaggtacaatatgctacagggaagaaaagttccaaaaacaagaaaaagttggaaaaggcaatgaaagtgctcaagaaacagaaaaaaaaaaaaaaaaaaaaaagtgcggccggccgcacttttttttttttttttttttcaatattatttatcaaaataaatttattaaaagttttcaaagaccactttaaagtgtagctgccttaaagacagatttttggtactcataacggacactgcagttttcaacaccatagcactcattctatttcacacatcatttttaacaatgcaaacacggaccatttcagttttagcattacatgagacaacagttcctcggccgttttagaactagaggatcccccgggctgcaggaat

SEQ ID NO: 14992 - DNA, 300 bp, Homo sapiens
ctatacggcgaattggagctccaccgcggtggcggccgaggtacaaagtatgtaatccaggaagtgaccagcctgatgcgtgttatgactcactgtaagcctcccatgattaaggactgatccttttctaagtgacagaagtaaagtaatagctaataaaaaacaagaaataaaaaaaaacgtgcggccgctctataactagtggatcccccgggctgcaagaatttgatataaagcttatatgataccgtctacctctagggggggcccgcgacccaacttttgttccctttaatgagg

SEQ ID NO: 14993 - DNA, 458 bp, Homo sapiens
agggcgaattggagctccaccgcggtggcggccgcccgggcaggtcttgagtcgacccacgcgtccgccggagagaattgtaatacgactcactatagtgatctagatcacgagcagccgcactttttttttttttttttttttttttttggacgaattcaggagtcctttattagccggcagccgagagacagctagcgctcaaaattctcttggccccgaagaaggagctagattttcttttatactttggtttaaacaggggagagggggagtctagttgaaacaatcttacagaagtaaagtaggcaaaaagttaaaaggataaacggttacaggaaagtaaacagttccaggtgcagaggctttaagtctatcctaaggtgatggacgccgggctttgggcgttattaaccggacacaaacgcaggggctctgggtgctattaaccgggcgaa

SEQ ID NO: 14994 - DNA, 524 bp, Homo sapiens
attggagctccaccgcggtggcggccgaggtcatgcttcgacccacgcgtccggtttgtttttttcttacggcaactcaaagcaaagagctggaggagccaggcattataattgcttactctcatcgcttagcgccccaggtgggatgtgtttccaaaacacatttttgtatttataaggaaatgtagttaggattaattttattgtcctaattagaactcacattttggttaaatcctcaatttcattaaaaaaaaaaaaaaaaaaaaaaggtgcggccgctctagaactagtggatcccccgggctgcaggaattcgatatcaagcttatcgataccgtcgacctcgagggggggcccggtacccagcttttgttccctttagtgagggttaattgcgcgcttggcgtaatcatggtcatagctgtttcctgtgtgaaattgttatccgctcacaattccacacaacatacgagccgggagcataaagtgtaaagcctggggtgcctaatgagtgagctaac

SEQ ID NO: 14995 - DNA, 574 bp, Homo sapiens
agggcgaattggagctccaccgcggtggcggccgcccgggctggtcttgagtcgacccacgcgtccggtgatatgtcacaatgccgtgtagccagagcctagacaaaagttacagcacctgggagatcagtgcagagatatgtcacaatgtccccagtaggcagagaccaggcaacagttggatcacctcgggatcagtgcagagacatgtctcaatccccctgtgggcacagcctagacaagagttaaatcacctcggttaacagtgcagagatatgtcaatattcccctgtaggccgagcctacacaagtgttacatcactaaggtgatcaacgcatagatatgtcaaaatatgccgtgaaagcagagtctagacaagagttacatcacctgggcgatcagtgcagaggtatgtgacaaggcccctttaagcagagcctagacaatagttacatcacctgagtgatcagtgcagagggtctgtcacaatgcccctttaggcagagcttaaacacctcggccgctctaaaactagtggatcccccgggctgcaggaattcgatatcaagctta

SEQ ID NO: 14996 - DNA, 508 bp, Homo sapiens
atagggggaattggagctccaccgcggtggcggccgaggtacttgacctcacagccatctgggatgagccgcttttcagccaccatgtcttcaaattcatcagcatggaactgggtgaagccccacttctttgagatgtggatcttctggcggccaggaaacttgaacttggccctgcgcagggcctcaatcacatgctccttgttctgcagcttggtgcggatggacatgataacttggccaatgtgaaccctggccacagtgccctggggctttccaaaggcacctcgcatgcctgtttggagcctgtcagccccagcacaggacaacatcttgttgatgcggatgacgtggaaggggtggagccgcacccggatatggaagccatctttgccacaactttttaccatgtacctgcccgggcggtcgctctagaactagtggatcccccgggctgcaggaatttgatataaagcttattgataccgtcgacctcgagggggggccc

SEQ ID NO: 14997 - DNA, 524 bp, Homo sapiens
actatagggcgaattggagctccaccgcggtggcggccgaggtctagcttgagtcgacccacgcgtccgaaaaaaaaaaaaaaaaaaaaaaaaaaaaaaaaaaaaaaaaaaaaaaaaaaaaaaaaaaaaaaaaaaaaaaaaaaggggcggccggccgcccgggcgggtcccatcacacagaaggaggagggagctaatccagtaccaaacattcaaagattaaattgtagatttgcacagggttttgggccctgtggattaatattataacaccttcctttaaaagacaggcttttttaagcgttagtcacaatataccaaaattggctattcatattaaaaccaccttttaaactttataacagtacccaatttttattgttttaaaaaacaaaacccaatgagaactgggaatggaattcaaatcctccaaatttttgctttgctccaagctgccatccataaaacaggtttaatttggaaatttttccattgggggaagtgtcaacaagaaacaatttaaa

SEQ ID NO: 14998 - DNA, 505 bp, Homo sapiens
agggcgaattggagctccaccgcggtggcggccgcccgggcaggtaccatttctactgtagaggaaaatatatgacaattatcactgtcactgcctgacatacaaaaatggaacagaacagtggggtaatgaagggaggggagggaaagggaagagcaggagagagaggagttggaggagaggggaaacaaagggaaaagggtctattaaacagaggcctagagaagctaaaatttggaaatggcaaatctgagaagagcctgaataaaaagtggggctgaggccatgcacagtggctcacgcctataatctcagcactttgggaggccgaggcaggtggatcacctgagatcaggagttcgagaccagcctggccaacatggcaaaacacctcggccgctctagaactagtggatcccccgggctgcaggaattcgatatcaagcttatcgataccgtcgacctcgagggggggcccggtacccagcttttgttccttttatga

SEQ ID NO: 14999 - DNA, 522 bp, Homo sapiens
acgactacttagggcgaattggagctccaccgcggtggcggccgaggtcaagcttcgacccacgcgtccgaaaaatgggagacaatttcacatggactttggaaaatatttttttcctttgcattcatctctcaaacttagtttttatctttgaccaaccgaacatgaccaaaaaccaaaagtgcattcaaccttaccaaaaaaaaaaaaaaaaagacctgcccgggcggccgctctagaactagtggatcccccgggctgcaggaattcgatatcaagcttatcgataccgtcgacctcgagggggggcccggtacccagcttttgttccctttagtgagggttaattgcgcgcttggcgtaatcatggtcatagctgtttcctgtgtgaaattgttatccgctcacaattccacacaacatacgagccgggagcataaagtgtaaagcctggggtgcctaatgagtgagctaactcacattaattgcgttgcgctcactgcccgctttccagtcgggaaa

SEQ ID NO: 15000 - DNA, 432 bp, Homo sapiens
ctatagggcgaattggagctccaccgcggtggcggccgcccgggcaggtctcctgcctcagcctcctgagtagctgggactagagggatgaaccaccatgcccaggtaattttttaatttttagtaaaggtcgggtctcactatctttccctgctcagctggtctggaactcctgggttcaagtgatcttcccacctcagcctcccaaagtgctgggattaaagaagtaaactaccacactcagccacacataggtaatttaaaatatttccatagtcacaattaaaaacacatataaataggtaaaattaataacattttatttaacccaatatattaaaatatttccactttaaaaagagacctcggccgctctagaactagtggatcccccgggctgcaagaattcgatatcaagcttatcgataccgt

SEQ ID NO: 15001 - DNA, 576 bp, Homo sapiens
ctatagggcgaattggagctccaccgcggtggcggccgaggtattcgacccacgcgtccgtagtttttatctttgaccaaccgaacatgaccaaaaaccaaaagtgcattcaaccttaccaaaaaaaaaaaaaaaaaaaaaggtgcggccgctctagaactagtggatcccccgggctgcaggaattcgatatcaagcttatcgataccgtcgacctcgagggggggcccggtacccagcttttgttccctttagtgagggttaattgcgcgcttggcgtaatcatggtcatagctgtttcctgtgtgaaattgttatccgctcacaattccacacaacatacgagccgggagcataaagtgtaaagcctggggtgcctaatgagtgagctaactcacattaattgcgttgcgctcactgcccgctttccagtcgggaaacctgtcgtgccagctgcattaatgaatcggccaacgcgcggggagaggcggtttgcgtattgggcgctcttacgcttgctcgctcactgactcgctgcgctcggtcgttcggctgcggcgagcggtatcagctcac

SEQ ID NO: 15002 - DNA, 392 bp, Homo sapiens
tatttagcttaactggtttttttttatttgttgaaggggtgggtgttatttcagtctttttcttattgggttgaccagacttggtaaaatctgtaagaaagttccataattatggggaagatttcctctgaattggctaaattcctgtagctgaaaaaaaaaaaaaaaaaaaaaaaaaggggcggccgctctagaactagtggatcccccgggctgcaggaattcgatatcaagcttatcgataccgtcgacctcgagggggggcccggtacccagcttttgttccctttagtgagggttaattgcgcgcttggcgtaatcatggtcatagctgtttcctgtgtgaaattgttatccgcttcacaattccacacaacatacgagccgggagc

SEQ ID NO: 15003 - DNA, 463 bp, Homo sapiens
ctatagggcgaattggagctccaccgcggtggcggccgcccgggcaggtacaaaaaaaaaaaaaaaacaaaaaaaaaccacttcaactaattcatctgacaatgctgttcatattcatgacgccatttttttgtttgttgttgttgttgttttcctaataataaagaaggagacttagggctgttgggctgatatatgtttgggggtcccacctccccgcctcatccgtacctcggccgaccagtgcaaatatctacccagttagaagagtaaataccatcttagtgttattatcaaaatattctgaactcatgaacctcctcagactgttgctgggactcccagatatcaatactctgagaaccactgatctaatgtttctttagtcagtttctatttgttctctagtataaccaagcataaaagtaatatacttccgcctctctctcccccaactgacttt

SEQ ID NO: 15004 - DNA, 514 bp, Homo sapiens
gggcgaattggagctccaccgcggtggcggccgaggtcttcgacccacgcgtccgctcagggcacaaagtgatcatttgggatcctaagttaaaaaggaaatgcaagagtaggatactccaattccagagtctttgcaggaggctaatcccacaagaagggtagcatcagagaagtgggcattggtcttagtggtggatcatcaggtagacaagtgatagtgtgtgtaacccatctgaaattcattttaccgtcaccactcttacaaaggacagtttattcccaaggacagtgctgacggggagggggacaggcagggagttaggagggttttcgaggatttcaaacaggtggaacccatccatccctattcccaagggccacttacaactctaagggtggttacaggattaactaccagttcattttcaaaatgctgctttgaactcagagggttgatacttttaatttgtaattttttgtaaaactttttacaaaatagtaaagtatttcac

SEQ ID NO: 15005 - DNA, 476 bp, Homo sapiens
gcgaattggagctccaccgcggtggcggccgcccgggcaggttacaagcttcgacccacgcgtccggtcattattaccctcactgtcaacccaacacaggcatgctcataaggaaaggttaaaaaaaaaaaaaaaaaaaaagtgcggcctcgagcggccgcccgggcaggtacaaaaaaaaccttacataaattaagaatgaatacatttacaggcgtaaatgcaaaccgcttccaactcaaagcaagtaacagcccacggtgttctggccaaagacatcagctaagaaaggaaactgggtcctacggcttggactttccaaccctgacagacccgcaagacaaaacaactggttcttgccagcctctagagaaatcccagaacactcagccctgacacgttaataccaaggggaacagttaacttcaatacaaggtcaaaatcagcaacaagttctacaatccagtgctgatatc

SEQ ID NO: 15006 - DNA, 444 bp, Homo sapiens
gggcgaattggagctccaccgcggtggcggccgaggtcaagcttttacccacgcgtccgtttatgttcagcaataaaggttctatccgtaaaaaaaaaaaaaaaaaaagggcggccggccgcccgggcaggtactatgactgacacatgattcatggctaaaaagctctgtctggataactccttaggaggcctaacatccccaccaccatcaacctacagccctgcctttttttttttttttgaagtttgtcaccacagtgtgtctggggctagatttcaaataatacatttaagtaacctgcccgggcacacgcctaataacgagggtttttttttatatcaattaacgttaaaaattgcatcaactataccatcgaccacgaggggggatattaaaaccaaaccttaagattcaaccggcatgtgcttttataaaggagcc

SEQ ID NO: 15007 - DNA, 495 bp, Homo sapiens
acgactactatagggcgaattggagctccaccgcggtggcggccgaggtactccagcctgggcgacagagcaaggctcagtctcaaaaaaaaaaaaaaaaaaaaggagaggaatagtaaatttatagtggagaaatctgcagtcactaacttaaccaaataaccacatggatgtatcccttattaaaggtaatcgaaagggcacagcgttacttctgtggaattcttgcccaaaatgcataatctcaatcaaatcataagaaaacatcaaaattgagaggcattctacaaaaccaataattaaccaatattcatcaaaagtgtcaaggtcataaaagacaagatgtttatagaaatacattaattttggtttctacttaaattttattttttaaaataattgttttagagatgtggccttgttagttggccaggatgatctcgaactcctgacctcaagtgagcctcctaccccagcctcccaaagtcctggaat

SEQ ID NO: 15008 - DNA, 346 bp, Homo sapiens
actatagggcgaattggagctccaccgcggtggcggccgaggtgggatttttttttttgtttttttcttttttttttggtttgttttaaatcagtgcataaatttttcttttctcatttcagcagatggacaaacagatggactctacagctaagtggaatatcaaaggtagaggggtgattctgtgagactgataggcctgactattctcaattctccccactgcagtgttcacgcggacgcgtgggtcgaagacctgcccgggcggccgctctagaactagtggatcccccgggctgcaggaattcgatatcaagcttatcgataccgtcgacctcgagggggg

SEQ ID NO: 15009 - DNA, 473 bp, Homo sapiens
ctatagggcgaattggagctccaccgcggtggcggccgcccgggcaggtcgcgtcgtaacagtgtaacatgtattatggtaacttctaatcttgtggccttagacagtctagtccaaaggcataaagaaagtttgctttaaaaaaaaaaaaaggaatggttatcttcaaaacaaaaacaaaaaaaaaaaagtgcggccgctctaaaactagtggatcccccgggctgcaggaattcgatatcaagcttatcgataccgtcaacctcgagggggggcccggtacccagcttttgttccctttagtgagggttaattgcgcgcttggcgtaatcatggtcatagctgtttcctgtgtgaaattgttatccgctcacaattccacacaacatactagccgggagcataaagtgtcaagcctggggcgcctaatgagtgagctaactcacattaattgcgttgcgctcactgcccgc

SEQ ID NO: 15010 - DNA, 289 bp, Homo sapiens
ggcgaattggagctccaccgcggtggcggccgaggtacgactcatatagggatctagatcacgagcggccggccgcccgggcaggtctcccatcttgcgcaagttggtcacgtggtcacccaattctttgatggctttcacctgctcattcaggtaatgtgtctcaatgaagtcaccggacgcgtgggtcgaagacctcggccgctctagaactagtggatcccccgggctgcaggaattcgatatcaagcttatcgataccgtcgacctcgagggggggcccggtacc

SEQ ID NO: 15011 - DNA, 499 bp, Homo sapiens
gcgaattggagctccaccgcggtggcggccgttaaaggaataatctgcagaacatcttgatttacaagggacaaaatgatgcaaattatatgctgtccaacctactggtgaactggatcagaatggtccaaggactgttaaacagaggaagtatttacattttgaaaacttgcggacgcgtgggtcgaagcttgtacacctcggccgctctagaactagtggatcccccgggctgcaggaattcgatatcaagcttatcgataccgtcgacctcgagggggggcccggtacccagcttttgttccctttagtgagggttaattgcgcgcttggcgtaatcatggtcatagctgtttcctgtgtgaaattgttatccgctcacaattccacacaacatacgagccgggagcataaagtgtaaagcctggggtgcctaatgagtgagctaactcacattaattgcgttgcgctcactgcccgctttccagtcgggaaacct

SEQ ID NO: 15012 - DNA, 463 bp, Homo sapiens
agggcgaattggagctccaccgcggtggcggccgcccgggctggtacataaaagaattttttggtctttaaatcgatacaaatgtctatcaactttaatcaagttgtaacttatattgaagacattttgatacataataaaaaattatgacaatgtcctggaaaaaaaaaaaaaaaaagtgcggccgacctcggccgttctagaactagtggatcccccgggctgcaggaattggatgtcaagcttatcgataccggcgaccttgagggggggcccggtacccagcttttgttccctttagtgagggttaattgcgcgcttggcgtaatcatggtcatagctgtttcctgtgtgaaattgttatccgctcacaattccacacaacatacgagccgggagcataaagtgtaaagcctggggtgcctaatgagtgagctaactcacattaattgcgttgcgctca

SEQ ID NO: 15013 - DNA, 536 bp, Homo sapiens
ctatagggcgaattggagctccaccgcggtggcggccgcccgggcaggtaccatacttgtcattgcgtagacttcttatcaaaatttcacatttatctgtaggaaaatgtaaagttggtaaaaattgtttacacaaatcacacattttccatccttgacaattgcagtgtttttttttaaatattgctgtattagacaattttaactgaagtaggttgtagaggctataaacctgattaatagagcagtattagacaattctaactgaagtaggttgcagaggctagaagaaacctgattaatacggacgcgtgacctcggccgctctagaactagtggatcccccgggctgcaggaattcgatatcaagcttatcgataccgtcgacctcgagggggggcccggtacccagcttttgttccctttagtgagggttaattgcgcgctaggcgtaatcatggtcatagctgtttcctgtgtgaaattgttatccgctcacaattccacacaacatacgagccgggagcataaagtgt

SEQ ID NO: 15014 - DNA, 456 bp, Homo sapiens
ctactatagggcgaattggagctccaccgcggtggcggccgaggtaagcttcgacccacgcgtgcgagtcagggaaggtttgtttatgttacatttatttcaccagaactattttaatatatcaaaggggtttactatgccaaacaaaattctagggaaaaatactgctaaaaatggatgcctcatcagaacatgctgttgagtccaatgtgccataagacattttagcatgttaaatagcacttttaatagcaaaaaaaggcacatcaactgcgaagttatccttagtttgcaaatgctttttctagattaatgatttttcaatcattagggtacctgcccgggcggccgctctagaactagtggatcccccgggctgcaggaattcgatatcaagcttatcgataccgtcgacctcgagggggggcccggtacccagcttttgttccctttagt

SEQ ID NO: 15015 - DNA, 520 bp, Homo sapiens
acttagggcgaattggagctccaccgcggtggcggccgctacctgcccgggcggccggccgcacttttttttttttttttttttcaagttttatgatttatttaacttgtggaacaaaaatcggacgcgtgggtcggacgcgtgggtcgaagctacctcggccgctctagaactagtggatcccccgggctgcaggaattcgatatcaagcttatcgataccgtcgacctcgagggggggcccggtacccagcttttgttccctttagtgagggttaattgcgcgcttggcgtaatcatggtcatagctgtttcctgtgtgaaattgttatccgctcacaattccacacaacatacgagccgggagcataaagtgtaaagcctggggtgcctaatgagtgagctaactcacattaattgcgttgcgctcactgcccgctttccagtcgggaaacctgtcgtgccagctgcattaatgaatcggccaacgcgcggggagaggcggtttgcgtattgggcgc

SEQ ID NO: 15016 - DNA, 502 bp, Homo sapiens
agggcgaattggagctccaccgcggtggcggccgctacctccaagcaggatgatgggctagacatggagcatacataaacgggcaagattcagtccctgaccgcaaggcacttacagtctagttgggaagggagacacaaatgtacctcggccgctctagaactagtggatcccccgggctgcaggaattcgatatcaagcttatcgataccgtcgacctcgagggggggcccggtacccagcttttgttccctttagtgagggttaattgcgcgcttggcgtaatcatggtcatagctgtttcctgtgtgaaattgttatccgctcacaattccacacaacatacgagccgggagcataaagtgtaaagcctggggtgcctaatgagtgagctaactcacattaattgcgttgcgctcactgcccgctttccagtcgggaaacctgtcgtgccagctgcattaatgaatcggccaacgcgcggggagaggcggtttgcgta

SEQ ID NO: 15017 - DNA, 523 bp, Homo sapiens
tactatagggcgaattggagctccaccgcggtggcggccgcccgggcaggtaccagagactccaggaaaaatcaaaaatttgtttttgcaattagccgagcacgtagcccagtctctaaatgtcacttcatattatgtttgtaaaacaactgtaataagagatcaatggccataagaagcctgagaattagtgcctacagacccagttcctgatgaattctcagcccaaaagaatcaccctgatcatttctaggttctaaaagtttcaattattggacaatattgcatagcttgaaaaaaaaaaaaaaaaaaagtgcggcctcgagcggccgcccgggcaggtactttgagcaggataataacataaatttcatttaaaaagttgtatttatagccccagtaaccggaaagaattataagtaattatggaagtattatattctgaccataccaagagttaaaaacaaagagttcctactaaagaggaatattttcaagatgatctggtcacatcatgtgcata

SEQ ID NO: 15018 - DNA, 511 bp, Homo sapiens
ctatagggcgaattggagctccaccgcggtggcggccgaggtacaagcttcgacccacgcgtccgatgaacaactggctgctctgtcccagggtccaatatccaagcccaagaggaaaagagagaaaaaaaaaaaaaaaaaaaaaaaagtgcggccggccgcccgggcaggtacagataaatataggaaactacttcagattattggacaaataagaatttcagtgtgtcactacctataattaagtagcagcacaccacaaccacagcaagtaaacactaatctcctctactgcctttttggggtcttttccagtcacaggagctaatttacagggataccactgggtttcaaccaatctctgaaagttcctttattatgagttttgaaatttaactagtgcatcacctacaattctgttggctagtttttttcttactcttcactaattagttttaatacaatatgtaatgttttcaaatttttataaacataagtgttgcggacgcgt

SEQ ID NO: 15019 - DNA, 567 bp, Homo sapiens
agggcgaattggagctccaccgcggtggcggccgaggtcttcgacccacgcgtccgaaactttaatttttaggaataacatattgacttactgaactgaagcattctgagttgaaaggagccccagaggaaaggagttctgtgttgctcacatgttaaaagcttgctcaccttcagagcagagggaatacctatcttcagatatccgcccattttcatctcttcattatagtcaaacagtgtgacttgagagtgttgctctggtgtctgtattctggcttatgaagattatttgaaaaagaactcttactacattgaaatgcagacttttaaaaatttaaatattggattaggcagtcaaaaaaccaaacaagcataaaaggtcagtaagttgtaatcttaaaagtaaaggtggaaaactcattataaatggaagaaaagttttgatttccttttttgtttgatgggcagtatgccatattatatccaaagttggtttaaaaaatacttccatcaactatttttatttaaaataaacatttgagggaagttaccaaggcagcttttt

SEQ ID NO: 15020 - DNA, 545 bp, Homo sapiens
acgactactatagggcgaattggagctccaccgcggtggcggccgaggtatactttgcaccttgaaaatataaaataaaataaatttaaaaataaaggtaattttgttcttccatgtcagctgaaaataagtgaagactgggtcagtaataacattgctttgctgaattcagagaattctaataaaatatttttagttgggaagctatctgtattaaaaaaaatgatctaaggctggtaacagtggccatacttataatcccagtgctttgggaggccaaggcagaaaaatcacttgaggccaggagtttgagatcagcctgggcaacatagtaagaccttatctctacccggacgcgtgggtcgactcaagacctgcccgggcggccggccgcacttttttttttttttttttttaagctgctccttgaggataagggctaactcacaggcagtgcaccaagagccactataaaaagatccttaatgagcaaaatatatcccctattattttcctacaagttgctttttacttgagtaggaacc

SEQ ID NO: 15021 - DNA, 503 bp, Homo sapiens
cgcgtctacgactactatagggcgaattggagctccaccgcggtggcggccgcccgggcaggtcaagtcgacccacgcgtccgcttgttttgctctatcccataggagttggtatgttgtgtttccaatatcatttactaaaagaaattttcctttttatttcttcattgaccaactggtcatttgcatgttctttaattactatgtgtttgtatagttttcaaaatttctcttattaatttctaggttttcctgtggtcagagaagatgcttgatactactttaattttttgaatgttttaatacttgttttgtgacctaacatatgatctacccttgagaattatctatatgctgaggaaaataatgtgtattacacagccattggatgaaatattctgtaactatctcttaagtacctcggccgctctagaactagtggatcccccgggctgcaggaattcgatatcaagcttatcgataccgtcgacctcgaggggggg

SEQ ID NO: 15022 - DNA, 478 bp, Homo sapiens
  misc_feature 449: n = A,T,C or G
gaattggagctccaccgcggtggcggccgaggtacagctttatttatttcttttaggaattgcaggttcctaacaaagtaggggtgaggggggtgttacaaaccagtcactaggcaggaacattagactccaaaagcagagaaatgcttaatttttcttctacctgtttcaccacattcatgtagaactgtagtaaaaaagatggtgaatcaggctgaatcaatctaaataacaacttaaggctcccaaatcacatgaacctaggaccactaaatccaatgtcagacgtgtttaaatggtgcactgctctacatttttctattatgcaaagagctagaaaataatggtagtgtcattatgacattccatgaaaatgaagaaaatctttcaggaaaaattaagaaaataaaaatgtttactaaagaaagaatggtccggctaagtgctanagtttatatccattttttttaaaccaact

SEQ ID NO: 15023 - DNA, 379 bp, Homo sapiens
acgtctactatagggcgaattggagctccaccgcggtggcggccgaggtactatcagctttattttacctgcaaaaatattttagctacacttggaaaaaaataaacttgagaatataacttcacatttctaaggccagcggacgcgtggtcgaagctcgacctgcccgggcggttacctttactgagggttaattgcgcgcttggcgtaatcatggacatagctgttgcctgtgagaaattgttatccgctcacaattccacacaacatacgatccgggagcataaagggtaaagcctggggtgcctaatgagtgagctaacttacattaattgcgttgcgcttactgcccgcttttcagtcgggaaacctgtagtgc

SEQ ID NO: 15024 - DNA, 463 bp, Homo sapiens
tcactaagggcgaattggagctccaccgcggtggcggccgaggtacgattttcccttcgcttgaatattatccctgtatattgcatgaatgagagatttcccatatttccatcagagtaataaatatacttgctttaattcttaagcataagtaaacatgatataaaaatatatgctgaattacttgtgaagaatgcatttaaagctattttaaatgtgtttttatttgtaagacattacttattaagaaattggttattatgcttactgttctaatctggtggtaaaggtattcttaagaatttgcaggtactacagattttcaaaactgaatgagagaaaattgtataaccatcctgctgttccacctgcccgggcggccgctctagaactagtggatcccccgggctgcaggaattcgatatcaagcttatcgataccgtcgacctcgagggggggcccg

SEQ ID NO: 15025 - DNA, 377 bp, Homo sapiens
gctccaccgcggtggcggccgaggtgtacaagcttcgacccacgcgtccggtggcgagtgcctgtaatcccagctactgggaggctgcgacagaagaatcacttgaacctgggaggcagaggttgcagttagccaagatcatgccactgcactccagcctaggcaacagaatgagactccatctcaaaggagaaaagaaaaaaaaaaaagaaagtgcggccacctgcccgggcggccggccgcacttttttttttttttttttgccatacaggttcattttattgagtggaaagcttacaaaaggtgcactggccccttccctccccacgtgacactcattccttccaatgcaaactctggtggatccacactcact

SEQ ID NO: 15026 - DNA, 439 bp, Homo sapiens
tatagggcgaattggagctccaccgcggtggcggccgcacttttttttttttttttttttttttttttttttttttttttttttttagggttgagggggaatgctggagattgtaatgggtatggagacatatcatataagtaatgctagggtgagtggtaggaagttttttcataggaggtgtatgagttggtcgtagcggaatcgggggtatgctgttcgaatacctgcccgggcggccggccgcactttttttttttttttttactttggctgggggttttttcttttcttttttttttcagctacaggaatttagccaattcagaggaaatcttccccataattatggaactttcttacagattttaccaagtttggtcaacccaataagaaaaagactggaataacaacaactcctttaacaaataaaaaaaaa

SEQ ID NO: 15027 - DNA, 459 bp, Homo sapiens
gggcgaattggagctccaccgcggtggcggccgccctgtctgttttttttttgttcgcgagatacaatcttagctttttatttgtaggaaaaaataaacagatttccctgcccaacatggcgtcacaagaaatgaggcaataaagggaaaaatgcacattctaaacggacgcgtgggttgtagcttgacctctgccgctctagaactagtggatcccccgggctgcaggaatttgctctcaagcttatcgttaccgacgacctcgagggggggcccggtacccagcttttgttctctttagtgagggtgaattgcgcgcttggcgtaatcatggccatagctgcttcctgtgagaaattgttattcgcttacaattccacacaatatactagcctggagcataaagtgtaaagcctggggtgcctaatgagtgagctaactcacattaattgcgttgcg

SEQ ID NO: 15028 - DNA, 494 bp, Homo sapiens
agggcgaattggagctccaccgcggtggcggccgaggtcaagcttcgacccacgcgtccgagaagagtttgcaaatgcaacaaaatatttaattaccggttgttaaaactggtttagcacaatttatattttccctctcttgcctttcttatttgcaataaaaggtattgagccattttttaaatgacatttttgataaattatgtttgtacctgcccgggcggccgctctagaactagtggatcccccgggctgcaggaattcgatatcaagcttatcgataccgtcgacctcgagggggggcccggtacccagcttttgttccctttagtgagggttaattgcgcgcttggcgtaatcatggtcatagctgtttcctgtgtgaaattgttatccgctcacaattccacacaacatacgagccgggagcataaagtgtaaagcctggggtgcctaatgagtgagctaactcacattaattgcgttgcgctcac

SEQ ID NO: 15029 - DNA, 495 bp, Homo sapiens
tatagggcgaattggagctccaccgcggtggcggccgaggtcttcgacccacgcgtccgccgcacttttttttttttttttttttggtttctgggtgaagtttattctgttttcacatctaggttgttggggagagtgatagacaaagttctggattctgggcatcgtcggcgcatgcttgtaatcctacttgggaggttgagacaggaggatcacttgaggctaggagttggaggctgcagtgtacctgcccgggcggccgctctagaactagtggatcccccgggctgcaggaattcgatatcaagcttatcgataccgtcgacctcgagggggggcccggtacccagcttttgttccctttagtgagggttaattgcgcgcttggcgtaatcatggtcatagctgtttcctgtgtgaaattgttatccgctcacaattccacacaacatacgagccgggagcataaagtgtaaagcctggggtgcctaatga

SEQ ID NO: 15030 - DNA, 523 bp, Homo sapiens
ctactatagggcgaattggagctccaccgcggtggcggccgaggtcggccgcacttttttttttttttttttttttttcttctttctcttgcctggattcagtcccagaaatgttaggactacctcagttttgctccaaaccaaactcaaacaacagcagccactggaaatcaaggaaacttcactaagaatttaacagatcatcaaaacaccgcctccttcccattttagccggacgcgtgggtcgaagcttgtacacctgcccgggcggccgctctagaactagtggatcccccgggctgcaggaattcgatatcaagcttatcgataccgtcgacctcgagggggggcccggtacccagcttttgttccctttagtgagggttaattgcgcgcttggcgtaatcatggtcatagctgtttcctgtgtgaaattgttatccgctcacaattccacacaacatacgagccgggagcataaagtgtaaagcctggggtgcctaatgagtgagctaactcacat

SEQ ID NO: 15031 - DNA, 506 bp, Homo sapiens
agggcgaattggagctccaccgcggtggcggccgcccgggcaggtcaagcttcgacccacgcgtccgttctaaatgatcgacaactctcaagcaataacttgactgttgaatagaagattaagaaaagttggttaaaaaaaaaaaaaaaaaaaagtgcggccgctctagaactagtggatcccccgggctgcaggaattcgatatcaagcttatcgataccgtcgacctcgagggggggcccggtacccagcttttgttccctttagtgagggttaattgcgcgcttggcgtaatcatggtcatagctgtttcctgtgtgaaattgttatccgctcacaattccacacaacatacgagccgggagcataaagtgtaaagcctggggtgcctaatgagtgagctaactcacattaattgcgttgcgctcactgcccgctttccagtcgggaaacctgtcgtgccagctgcattaatgaatccggcaacgcgcggggagaggcggttt

SEQ ID NO: 15032 - DNA, 535 bp, Homo sapiens
acactactatagggcgaattggagctccaccgcggtggcggccgcccgggcaggtacaagctcgacccacgcgtccgaaataataaagctagaagtaatatttttccttttgtctattttccaaattgactcgatattgatggctacttttgtaagtttttatttaagtttaaagggaatatttattgatcacctctatgtgctcagtacctcggccgctctagaactagtggatcccccgggctgcaggaattcgatatcaagcttatcgataccgtcgacctcgagggggggcccggtacccagcttttgttccctttagtgagggttaattgcgcgcttggcgtaatcatggtcatagctgtttcctgtgtgaaattgttatccgctcacaattccacacaacatacgagccgggagcataaagtgtaaagcctggggtgcctaatgagtgagctaactcacattaattgcgttgcgctcactgcccgctttacagtcgggaaacctgtcgtgccagctgcattaatgaatc

SEQ ID NO: 15033 - DNA, 324 bp, Homo sapiens
gggcgaattggagctccaccgcggtggcggccgaggtaagcttcgacccacgcgtccgcaaagttcaccaaattcgctacagcctaagactagcctcaccagtcctttttcccattaatcaaaactttgcagaagagacaatgatttttaccattcattcaaccagtttgcacagagagaggctgaagcctgacttgtaagaaactcttgtccttttgccagtgtgccaggtttctgggttccccttctctgagtggctttgatgaccctgcttgctgtgccatagctatgggggggccaagccatgttacccaaaaaaaaaaa

SEQ ID NO: 15034 - DNA, 321 bp, Homo sapiens
ggcgaattggagctccaccgcggtggcggccgcactttttttttttttttttaagctgctccttgaggataagggctaactcacaggcagtgcaccaagagccactatgaaaagatccttaatgagcaaaatatattccctattattttcctacaagttgctttttacttgagtaggaacccttgattgatttttgcggacgcgtgggtcgaagcttgacctcggccggtctagaactagtggatcccccggtctgcaggaattctatatcaagcttatcgataccgtctacctacagggggggcccgggacccagctttt

SEQ ID NO: 15035 - DNA, 613 bp, Homo sapiens
caccactacttagggcgaattggagctccaccgcggtggcggccgaggtacacctggtatgccagatgagaatgacaggagccatccgcaagcagttggcggctttcttagaaggcttctatgagatcattccaaagcgcctcatttccatcttcactgagcaggagttagagctgcttatatcaggactgcccaccattgacatcgatgatctgaaatccaacactgaataccacaagtacctgcccgggcggccggccgcacttttttttttttttttacctgaaaatgcttattctagcttcacatttgattgtttggctaagaagaaaattatttattagacttaattttcctcacgagtttaaagattgcttcagatcttaaacttctaatgaggaaagctgagaagtccaatgccattctgattcttgcaacttacaagtagtctttttttgtctagacgctttcaggaccttcttttttcctcagtcagtgtatccaaaccttcacagtgatatcttttgggtacctcggccgctctagaacagtggatcccccgggctgaggaattcgatatcaagcttatcgataccgtcgacctcgggggggg

SEQ ID NO: 15036 - DNA, 580 bp, Homo sapiens
accactacttagggcgaattggagctccaccgcggtggcggccgaggcaagcttcgacccacgcgtccgcaaagttcaccaaattcgctacagcctaagactagcctcaccagtcctttttgccattaatcaaaactttgcagaagagacaatgatttttaccattcattcaaccagtttgcacagagagaggctgaagcctgacttgtaagaaactcttgtccttttgccagtgtgccaggtttctgggttccccttctctgagtggctttgatgaccctgcttgctgtgccatagctatggggggggccaagccatgttacccaaaaaaaaaaaaaaaaaaaaagtgcggccggccgcccgggcaggtgtcactttcaacttggttatgcctaaaacaaagtctccctcatctccaaacaatttctcccgactttctttcttttttgagatggagtcttgctctgtcgcccacgctggagtgcagtggcatgatcttggctccctgcaacgtctacctcttgtgttcaattgattctcctgtctcagcctcccaagtagctgggattatggcacatgc

SEQ ID NO: 15037 - DNA, 375 bp, Homo sapiens
tactatagggcgaattggagctccaccgcggtggcggccgcacttttttttttttttttttttttttttttaaatgctcaaaagaacaatttttatgtaagtttgtgatagaggcctcaggtaattctacaaaaattaaaacccattttcaatgcaaaattcccgaacataaacaaatgcttttaaaaatatggatggtgtggttactcttttagtaatacttggattatcatcaaagatttaactttatttttttgtgtgtgtgtgtgttttttttttttgtgtgtgttttttttttttttttttattatactctaagttttagggtacctgcccgggcggccgctctagaactagtggatcccccgggctgca

SEQ ID NO: 15038 - DNA, 541 bp, Homo sapiens
  misc_feature 504: n = A,T,C or G
cactacttagggcgaattggagctccaccgcggtggcggccgaggtgtacaagcttcgacccacgcgtccgactttttgtcttagacccagttagggtcaccttacagtgcaggtggaaagaaagcaggactgctgagaggagctcaggacgctctagaactagtggatcccccgggctgcaggaattcgatatcaagcttatcgataccgtcgacctcgagggggggcccggtacccagcttttgttccctttagtgagggttaattgcgcgcttggcgtaatcatggtcatagctgtttcctgtgtgaaattgttatccgctcacaattccacacaacatacgagccgggagcataaagtgtaaagcctggggtgcctaatgagtgagctaactcacattaattgcgttgcgctcactgcccgctttccagtcgggaaacctgtcgtgccagctgcattaatgaatcggccaacgcgcggggagaggcggtttgcgtattgngcgctcttccgcttcctcgctcactgactcgctgcgc

SEQ ID NO: 15039 - DNA, 458 bp, Homo sapiens
tcacactactatagggcgaattggagctccaccgcggtggcggccgaggtgtacaagcttcgacccacgcgtccggattaaagtcctacgtgatctgagttcagaccggagtaatccaggtcggtttctatctacttcaaattcctccctgtacctgcccgggcggccgctctagaactagtggatcccccgggctgcaggaattcgatatcaagcttatcgataccgtcgacctcgagggggggcccggtacccagcttttgttccctttagtgagggttaattgcgcgcttggcgtaatcatggtcatagctgtttcctgtgtgaaattgttatccgctcacaattccacacaacatacgagccgggagcataaagtgtaaagcctggggtgcctaatgagtgagctaactcacattaattgcgttgcgctcactgcccgctttccagtcgggaaa

SEQ ID NO: 15040 - DNA, 463 bp, Homo sapiens
ctatagggcgaattggagctccaccgcggtggcggccgaggtgtacaagcttcgacccacgcgtccgccacacgtaactgagatgctcctttaaataaagcgtttgtgtttgaggttaaaaaaaaaaaaaagaaaaaaaaaagtgcggccgctctagaactaatggatcccccgggctgcaggaattcgatatcaagcttatcgataccggcgaccttaagggggggcccggtacccagcttttgttccctttagtgagggttaattgcgcgcttggcgtaatcatggtcatagctgtttcctgtgtgaaattgttatccgctcacaattccacacaacatacgagccgggagcataaagtgtaaagcctggggtgcctaatgagtgagctaactcacattaattgcgttgcgctcactgtccgctttccattcgggaaacctggcgtgccagctgcattaat

SEQ ID NO: 15041 - DNA, 503 bp, Homo sapiens
ctatagggcgaattggagctccaccgcggtggcggccgcactcttaattttttttttttttattatctaaatcagctttatttaagaatttccaacaatgacaactcttataagaggcatccaagcacaggacacagaactgcaacaaacagcattcttacggacgcgtgggtcgaagacctcggccgctctagaactagtggatcccccgggctgcaggaattcgatatcaagcttatcgataccgacgacctcgagggggggcccggtacccagcttttgttccctttagtgagggttaattgcgcgcttggcgtaatcatggtcatagctgtttcctgtgtgaaattgttatccgctcacaattccacacaacatacgagccgggagcataaagtgtaaagcctggggtgcctaatgagtgagctaactaacattaattgcgttgcgctcactgcccgctttccagtcgggaaacctggcttgccagctgcattaatgaa

SEQ ID NO: 15042 - DNA, 490 bp, Homo sapiens
tatagggcgaattggagctccaccgcggtggcggccgaggtacagaatggtaaaaattccaatcagtcaaaagaggtcaatgaattaaaaggcttgcaactttttcaaaaaaaaaaaaaaaaaaaagtgcggccggccgcccgggcaggtcgagcggcagcacttttttttttttttttttttttatggtttttatttttcaatttttattttggttttcttacaaaggttgacattttccataacaggtgtaagagtgttgaaaaaaaaattcaaatttttgggggagcgggggaaggagttaatgaaactgtattgcacaatgctctgatcaatccttctttttccggacgcgtgggtcgaagacctcggccgctctagaactagtggatcccccgggctgcaggaattcgatatcaagcttatcgataccgtcgacctctagggggggcccggtacccagcttttgttccttttagtgagggttaat

SEQ ID NO: 15043 - DNA, 575 bp, Homo sapiens
agggcgaattggagctccaccgcggtggcggccgcccgggcaggtctcttgtctagtatactcaaggcagcctagtaaattattatttatctatacaatactggaaaaactggtagacaaaaacatgacttgaattgctaaaaaaaaaaaaaaaaaaaaggagggagaatgaaaacttccggacgcgtgggtcgaagcttgacctcggccgctctagaactagtggatcccccgggctgcaggaattcgatatcaagcttatcgataccgtcgacctcgagggggggcccggtacccagcttttgttccctttagtgagggttaattgcgcgcttggcgtaatcatggtcatagctgtttcctgtgtgaaattgttatccgctcacaattccacacaacatacgagccgggagcataaagtgtaaagcctggggtgcctaatgagtgagctaactcacattaattgcgttgcgctcactgcccgctttccagtcgggaaacctgtcgtgccaactgcattaatgaatcggccaacgcgcggggagaggccggttgcgtattgggcgctcttccgc

SEQ ID NO: 15044 - DNA, 411 bp, Homo sapiens
ggcgaattggagctccaccgcggtggcggccgaggtgcatttacatacaactgatccaaacaggaagtaaaagcattatgaaaaaagaacatgatgcaaatcatttcccggtgacaaaaggagggatctgcgtgaattacagcaaatcaaatgatttccacattataaaagcaagccatggcttctacagatattttaattccttgggaggaagtttcacctcatcggacgcgtgggtcgaagacctgcccgggcggccggccgcactgttcttttggtctgtttttgctttaaaaaattcaaaaaattagttttttaccttaatataattaggtcaatggaatcctgttttgatctaataacttccaatattgcaattattaaatgtgacaaattcacctgttcgggggc

SEQ ID NO: 15045 - DNA, 497 bp, Homo sapiens
tatagggcgaattggagctccaccgcggtggcggccgcccgggcaggtcaagcttcgacccacgcgtccgatttttgtctcctgaggtcaaactgtgcccatctttactgcccctgtgttggtgtcattcctttcagcgcactccatgttctggcaaaacacccacagctcacgttctcgttgtagccacattacgcctttgcattactcttttgccactgacctcactgtcagtcttcttgtcacgctgtttcctccaggtgactctgacatcattagaagcatgccagaacagactggtgaaaagtaaaccttttcacctacaaaatttcacctgcaaaccttaaacctgcaaaattttcctttaataaaatttgcttgttttaaaaaaaaaaaaaaaaaaaaaagtgcggccgctctaagaactagtggatcccccgggctgcaggaattcgatatcaagcttatcgataccgtcgacctcgagggggggcccg

SEQ ID NO: 15046 - DNA, 471 bp, Homo sapiens
cactacttagggcgaattggagctccaccgcggtggcggccgaggtcaagcttcgacccacgcgtccgctgatctgtgattaaagcagtaatattttaagatggactgggaaaaacatcaactcctgaagttagaaataagaatggtttgtaaaatccacagctatatcctgatgctggatggtattaatcttgtgtagtcttcaactggttagtgtgaaatagttctgccacctctgacgcaccactgccaatgctgtacgtacctgcccgggcggccgctctagaactagtggatcccccgggctgcaggaattcgatatcaagcttatcgataccgtcgacctcgagggggggcccggtacccagcttttgttccctttagtgagggttaattgcgcgcttggcgtaatcatggtcatagcttgttcctgtgtgaaattgttatccgctcacaattccacacaacata

SEQ ID NO: 15047 - DNA, 517 bp, Homo sapiens
agggcgaattggagctccaccgcggtggcggccgaggtgtcgacccacgcgtccgcattttcaggcttctgcagctgtagattctcactgtgaatcccttgcttgctcatgcataagtgtatttgcaataccaaatatacaggtttagtattttgcctgttagtgattgtttcacatgtgtaacgttttggttgagatgttaaatggtggacgagtacctgcccgggcggccgctctagaactagtggatcccccgggctgcaggaattcgatatcaagcttatcgataccgtcgacctcgagggggggcccggtacccagcttttgttccctttagtgagggttaattgcgcgcttggcgtaatcatggtcatagctgtttcctgtgtgaaattgttatccgctcacaattccacacaacatacgagccgggagcataaagtgtaaagcctggggtgcctaatgagtgagctaactcacattaattgcgttgcgctcactgcccgcttttcagtcg

SEQ ID NO: 15048 - DNA, 472 bp, Homo sapiens
agggcgaattggagctccaccgcggtggcggccgcccgggcaggtggccgcacttttttttttttttttttttactattcgttaggcttttatttttctctatgttctgcagtaactaaggaaaatcatggtaaatgtcaatcttcacacaacagcagacacaaagggtttcagaaaccggacgcgtgggtcgaagcttgtacacctcggccgctctagaactagtggatcccccgggctgcaggaattcgatatcaagcttatcgataccgtcgacctcgagggggggcccggtacccagcttttgttccctttagtgagggttaattgcgcgcttggcgtaatcatggtcatagctgtttcctgtgtgaaattgttatccgctcacaattccacacaacatacgagccgggagcataaagtgtaaagcctggggtgcctaatgagtgagctaactcacattaattgcgtt

SEQ ID NO: 15049 - DNA, 454 bp, Homo sapiens
tgtacaagcttcgacccacgcgtccggtttctgaaaccctttgtgtctgctgttgtgtgaagattgacatttaccatgattttccttagttactgcagaacatagagaaaaataaaagcctaacgaatagtaaaaaaaaaaaaaaaaaaaagtgcggccacctgcccgggcggccggccgcacttttttttttttttttttttcactgtttaaggaatttttattaaagcaagaattttataatccaaattacgtttccttgctcagttatcaattctgttacttaaaacagaactgacattctgagctattccacagtaaagaattacaaaattaaagaaaggaatgctttaaatttttgtacctgcccgggcggccgctctagaactagtggatcccccgggctgcaggaattcgatatcaagcttatcgataccgtcgacctcgagggggg

SEQ ID NO: 15050 - DNA, 522 bp, Homo sapiens
actatagggcgaattggagctccaccgcggtggcggccgcactttttttttttttttttttctttctacttttagggtttatttactggtagtttcaggtctggaaatacaaaaaggaacatgacatgggttctgcccttgaggtgctcccagtctggtgagggacacaacacctttcaggggacaaccgtggtacctcggccgctctagaactagtggatcccccgggctgcaggaattcgatatcaagcttatcgataccgtcgacctcgagggggggcccggtacccagcttttgttccctttagtgagggttaattgcgcgcttggcgtaatcatggtcatagctgtttcctgtgtgaaattgttatccgctcacaattccacacaacatacgagccgggagcataaagtgtaaagcctggggtgcctaatgagtgagctaactcacattaattgcgttgcgctcactgcccgctttccagtcgggaaacctgtcgtgccagctgcattaatgaatcg

SEQ ID NO: 15051 - DNA, 289 bp, Homo sapiens
agggcgaattggagctccaccgcggtggcggccgcccgggcaggtgccgcacttttttttttttttttttttttttttttttagaatttagccacttttcaggccttcttccggataatttggaactttcctttggatttgatcaagttggatagagttgatcaaaccctgatcaagttggatagagttgatcaaacccaatgggaaaaagaccaaaacaacaataaaaaacagacaacaacaacaaaaaacagttaggcaaaacaaacaatggcacaatttatatgat

SEQ ID NO: 15052 - DNA, 502 bp, Homo sapiens
ggcgaattggagctccaccgcggtggcggccgcccgggcaggtactgaggaaatattttgtaaagtgagctttgggtataacttagccccatcattatttagagaatagaggaggaagaaagaggaaggattttaaaggcagacaatgacagaccattcaggataggtagggttttaaagggagcggacgcgtgggtcgaagacctcggccgctctagaactagtggatcccccgggctgcaggaattcgatatcaagcttatcgataccgtcgacctcgagggggggcccggtacccagcttttgttccctttagtgagggttaattgcgcgcttggcgtaatcatggtcatagctgtttcctgtgtgaaattgttatccgctcacaattccacacaacatacgagccgggagcataaagtgtaaagcctggggtgcctaatgagtgagctaactcacattaattgcgttgcgctcactgcccgctttccagtcgggaaac

SEQ ID NO: 15053 - DNA, 613 bp, Homo sapiens
cgcggtggcggccgaggtaccctaaaatttaaagtataataataataaatttttttttaaaaaaagagtgttgtctttgtcttgtattttctgcagtttgcatgtgatattcttaggtatagattttttttagtatttgtcctgtatattgttattcgagcttctgggatctgtgttttggtgtctatcattaactttggaatattctcagtcattactgcttcaaacattcattctgttgctttttctcttctggtattatcattacacatatatcacaccttttgtaattctcccacagttcatagatattctgttgtatttatttattttttctctttgccttttagttttagagatttctattgacatcacttaaagatgattgatgagttgatgagaattgagagaattgatgagaattgttgatgagaattattcatttgtgttagtgtttttcatttctgccattgtcttttgatttttagagcttccatctctctgcttacattacccatctgttcttgcatgtcgccaacttcttctagtagagcacttagcatattgcgtttgttttaaattctcaatctcataattccaacatctgagtttg

SEQ ID NO: 15054 - DNA, 441 bp, Homo sapiens
tatagggcgaattggagctccaccgcggtggcggccgaggtacaaccttgaccgtgaccgtttgctatattcctttttctatgaaataatgtgaatgataataaaacagctttgacttgaaaaaaaaaaaaaaaaaaaaagtgcggccgctctagaactagtggatcccccgggctgcaggaattcgatatcaagcttatcgataccgtcgacctcgagggggggcccggtacccagcttttgttccctttagtgagggttaattgcgcgcttggcgtaatcatggtcatagctgtttcctgtgtgaaattgttatccgctcacaattccacacaacatacgagccgggagcataaagtgtaaagcctggggtgcctaatgagtgagctaactcacattaattgcgttgcgctcactgcccgctttccagtcgggaaacct

SEQ ID NO: 15055 - DNA, 480 bp, Homo sapiens
agggcgaattggagctccaccgcggtggcggccgcccgggcaggtattttatagaaaagaaaacagaggctcagagaggttaatttttcctggatgtcctagatgttgaatgttacaaccttaattgaccgattccagaatcagagctattaaacacaaaactattttaattctctctaaattcttaaagacccaagaaaaacaaactttattgagataattaggaattttttttaaaatatcggacgcgtgggtcgaagcttgacctcggccgctctagaactagtggatcccccgggctgcaggaattcgatatcaagcttatcgataccgtcgacctcgagggggggcccggtacccagcttttgttccctttagtgagggttaattgcgcgcttggcgtaatcatggtcatagctgtttcctgtgtgaaattgttatccgctcacaattccacacaacatacgagccgggagcata

SEQ ID NO: 15056 - DNA, 404 bp, Homo sapiens
actatacggcgaattggagctccaccgcggtggcggccgaggtcaagcttcgacccacgcgtccgtggtgaacacagagaagacagtcttgtatatattcctctggattctggggagctttgaccttggagctttgtacctgcccgggcggccgctctagaactagtggatcccccgggctgcaggaattcgatatcaagcttatcgataccgtcgacctcgagggggggcccggtacccagcttttgttccctttagtgagggttaattgcgcgcttggcgtaatcatggtcatagctgtttcctgtgtgaaattgttatccgctcacaattccacacaacatacgagccgggagcataaagtgtaaagcctggggtgcctaatgagtgagctaactcacatt

SEQ ID NO: 15057 - DNA, 553 bp, Homo sapiens
  misc_feature 430: n = A,T,C or G
cgaattggagctccaccgcggtggcggccgaggtcttcgacccacgcgtccgcaacacctatgtttataaaaatttgaaaacattacatattgtatttaaaactaattagtggagagtaagaaaaaaactagccaacagaattgtaggtgatgcattagttaaatttcaaaactcataataaaggaactttcagagattggttgaaacccagtggtatccctgtaaattagctcctgtgactggaaaagaccccaaaaaggcagtagaggagattagtgtttacttgctgtggttgtggtgtgctgctacttaattataggtagtgacacactgaaattcttatttgtccaataatctgaagtagtttcctatatttatctgtacctgcccgggcggccggccgcactttttttttttttttttgctggngtttttttcttttctttttttttcagctacaggaatttagccaattcagaggaaatcttccccataattatggaacttttttacagattttaccaagtctggtcaacccaataagaaaaagac

SEQ ID NO: 15058 - DNA, 466 bp, Homo sapiens
gcgaattggagctccaccgcggtggcggccgcactgtgttgcttattttttgttttctttaaacaccacttagtttatttcaggacaagaatttaccatataacggtcttttggcataaattctgtctccccccacttttttttttttgaaaataaccattcctttttttttttttttaaagcaaactttctttatgcctttggactagactgcctaaggccccaagattagaagttgccataatacatgttccactgttaactttaagcaaacttcacttttgttgaaaaccttgaaagttggggattccaattatcctttgctattaaacggacgcgggggtcgaagcttgtcctaggccgctctagaactagtggatcccccgggctgcaggaattggatatcaagcttatcgataccgcctacctcgagggggggcccgggacccagcttttgttcccttta

SEQ ID NO: 15059 - DNA, 425 bp, Homo sapiens
atagggctaatcggagctccaccgcggtggcggccgcccgggcaggtacatctctatcagagcttttgggtgaccaggcacactgtcaatgagcagtaatacgttgaaaggaatctttggggttttttttggtttggtttttgttttgtcgttatttttttgtttgtttgttttttgtttttgtttttttagcagtaggcctcaacagtggacttaaaatactcagtaaaccatgctgttaacagataagctgtcatccagactttgttgttccatttctagagcacagagcagatttagcagaattcttaaggctttaggattttcagaatggtaaatgagcactggcttcaacttagtcaccagctgcattggcccctaacaagacagtcagcctggcctttgaagcgttgcaaccgggcact

SEQ ID NO: 15060 - DNA, 396 bp, Homo sapiens
  misc_feature 305: n = A,T,C or G
gcgaattggagctccaccgcggtggcggccgaggtactaaactgcacatatttaaaacatataatttgatacattttgactcacaaaacaatcaccacaatcaagatgatgaagtatatagatcactcccaaaagtttccctgtagtcttttgcagtcctttcttcatggccttcttcatccatccaccccatctcggtaaccaatgatctgctttctgtcaccacaaattagtgagcactgtctagaattttatgtaaactgaataataaagattttactctttcgcttcttcgggaacgcgcnactacctgatcccaaactgaggctttaccccatccaaaaggggtcagttaattcctatcactacggacgcctgggtcgaagacctgcccgg

SEQ ID NO: 15061 - DNA, 405 bp, Homo sapiens
actactatagggcgaattggagctccaccgcggtggcggccgaggtcttcgacccacgcgtccgcactttttttttttttttttttttttttttttttttttggaatcatcattaactttatttggcactcttgatagacattggtccactccaacataaaaagtagaattcacccacttccacttaatattctatagaatgaagttgtacctgcccgggcggccggccgcccgggcaggtactctaatggtggggagaacttaagacccggtaggggccaaacttaacttttaggcattccggagaatttccaagacaaaactgcaatccagctgcttatctaggaatacgggttaggctgaaaacttttatcgctttacaaaagggaataaacctaacactta

SEQ ID NO: 15062 - DNA, 464 bp, Homo sapiens
gactcactatagggcgaattggagctccaccgcggtggcggccgaggtacaaagatttttttacacaaagaaacttaatgctgtattaataaattcagtgtgtagcttcaattgggatagttccaaaagtgaagattttgtgaggaataagtgcaaattttttttttattttaaaaaattctttgaaactcttaagtctttgtgtctgcaataaaattgtacctgcccgggcggccggccgcacttttttttttttttttttttttttttttggaaatgtttgaagttaactcattttatttctaggatttggatttcaacattttaatttctttggaatataagtcactttttgcaagctaaaaaatagaatcaaactaaggtgatctagtcctctaggcatccaggctgatccttggaatcatgagcagaatgatgacatactacaaggtgctagcaatacg

SEQ ID NO: 15063 - DNA, 448 bp, Homo sapiens
tacgactcactatagggcgaattggagctccaccgcggtggcggccgaggtggacttgattcataaccaaccaacccaggctgtcatgctaaaaaaaagggcagaatctttgctgctgaactactgcatagggtgactaccattgctcctttagtttagtttggctagcagaaggtggtcttgccatgtaaataaagcctctcaggtaatcaaaatgtttctttttttacttttgctggtgtttttttcttttctttttttttcagctacaggaatttagccaattcagaggaaatcttccccataattatggaactttcttacagattttaccaagtctggtcaacccaataagaaaaagactgaaataacaacaacaacttcaacaaataaaaaaaaacagttaagctaaataaacagatgattgcagaatttatgtgattactgg

SEQ ID NO: 15064 - DNA, 522 bp, Homo sapiens
actactatagggcgaattggagctccaccgcggtggcggccgaggtacttcttacatagtgattgatgtctcatgtctccctaaaatgtataaaaccaagctgtggccggaccaccttgggcacatgtcatcaggacttcttgaggctatgtcactgggcatgtcttcaaccttggcaaaataaactttctaaattaattgagacctgtctcaaattttgggggttcacaggtgagtgggctcaggcatgtgcactagtatgactaaaggtcatagactattagactattagtctatgaccttcctctagaaacactcgactggtaagggaagaatgcctcaactgagcatgtgcacaactcccataaacacacttgtgcttgcggagcctctcaagtgctggcaggccactgctcaggtggattcttccctcctacccggagggaagaatcaggggagaagggacacaagcccctgaatgcatgccaacacgtaaaacctcaaatcaaaactcaaaccatg

SEQ ID NO: 15065 - DNA, 282 bp, Homo sapiens
ctcactatagggcgaattggagctccaccgcggtggcggccgaggtaccttcaggtattgcctatttaatgatcatatatacttgcataatatcatcccttcccttgatttctttcaatctaaaaataaatatgagaaaaacaaaaaaaaaaaaaaaaaagtgcggccgctctagaactagtggatcccccgggctgcaggaattcgatatcaagcttatcgataccgtcgacctcgagggggggcccggtacccagcttttgttccctttagggagggtta

SEQ ID NO: 15066 - DNA, 512 bp, Homo sapiens
tacgactcactatagggcgaattggagctccaccgcggtggcggccgaggtacagaggactcaagaccagatggccaactagaagcagccaggaagaacatctctcatggagagaccaggaatttgggaagactggcacactctgagcagatcttttgaaggaaaacattgagggtggatgaagggaggatgcagagcatgggctgagggggcaggaatctcagaagcctgcacagggcttccaagcactagcattccttactagcccccattaactcctggggaaggggtgagttgaataggtggggagtggcccgctcttaccatgaaactccagaatcctagcagcaagagaccccatgacccctgtggacacgagctgtccggacgcgtgggtcgaagacctgcccgggcggccgctctagaactagtggatcccccgggctgcaggaattcgatatcaagcttatcgataccgtcgacctcgagggggggcccggtacccagctttt

SEQ ID NO: 15067 - DNA, 371 bp, Homo sapiens
actactatagggcgaattggagctccaccgcggtggcggccgctccctgcccgggcggccggccgcactttttttttttatttttggaaaaatttaatgactctggggataaaactacgaattaaatttatacgattttttaaaggctattaagcagaataatattcgctaaattttccttgtgcataacaaactgtggttctaccatgtaatgtttaaaaaaatgtataaccacaattttacgctcctctgtaacatgacaaggactccattcaatgacatttaagaacttaatgggttgatgacaatgaaccacattttctaattttatgacatgaagagtacctgggccgctctagaactaggggatc

SEQ ID NO: 15068 - DNA, 530 bp, Homo sapiens
actactatagggcgaattggagctccaccgcggtggcggccgaggtcaagcttcgacccacgcgtccgataagccaaaaaatgggagacaatttcacatggactttggaaaatatttttttcctttgcattcatctctcaaacttagtttttatctttgaccaaccgaacatgaccaaaaaccaaaagtgcattcaaccttaccaaaaaaaaaaaaaaagtgcggccggccgcactttgtttctactgggtttagaccgtcgtgagacaggttagttttaccctactgatgatgtgttgttgccatggtaatcctgctcagtacctcggccgctctagaactagtggatcccccgggctgcaggaattcgatatcaagcttatcgataccgtcgacctcgagggggggcccggtacccagcttttgttccctttagtgagggttaattgcgcgcttggcgtaatcatggtcatagctgtttcctgtgtgaaattgttatccgctcacaatccacacaacatacgagccgg

SEQ ID NO: 15069 - DNA, 523 bp, Homo sapiens
tacgactcactatagggcgaattggagctccaccgcggtggcggccgcccgggcaggtacctgctccatttctcctgcaacatgtggatacagtaatatgatcataccctcccttgttcccctctaggccactttcccctttaaatattaacaccatcataatcatctttggagaaagacacctggatctgtcctgaaccttggcaaaaaataaataaataaataaaaataaaaaactcttctcaattgattaatacctgtcacagatacattttggtttacaaatcaatgaacaatggagggaactctgtccttaatcttggtacctcggccgctctagaactagtggatcccccgggctgcaggaattcgatatcaagcttatcgataccgtcgacctcgagggggggcccggtacccagcttttgttccctttagtgagggttaattgcgcgcttggcgtaatcatggtcatagctgtttcctgtgtgaaattgttatccgctcacaattccacacaaca

SEQ ID NO: 15070 - DNA, 517 bp, Homo sapiens
gactcactatagggcgaattggagctccaccgcggtggcggccgaggtctcttgtttgatattacacttctacgtagattatataatattgcttgtggacataatttgatcaataatatataatgtcagtcactacagtgatccagaatcttattctggctatggaggaagcttaattattaagcaacatcttcctaaaaagcttctgaatttctgattcataagaaaaacaaaacaaatgaaaagagtatctctaactgaaataacactgaagttcgagcttgggccccctcctttgtgttcaacataattaactcttcaagatgaaaccggacgcgtgggtcgaagcttgacctgcccgggcggccggccgcccgggcaggtgtttcttctgggatatctttttcttctgggcaacctcctcttctggtttaggaacaatctgttccttttccgtaaggatcatctcaatgtggcagggagagctcatgtatgggttaatccgaccatgagctct

SEQ ID NO: 15071 - DNA, 491 bp, Homo sapiens
gactcactatagggcgaattggagctccaccgcggtggcggccgcccgggcaggtcttcgacccacgcgtccgggcaattatcaaaaacacttggaaaaagatttttattcctacttttaaacatacatcaaaatctaaaataaaactaggcaccttcagctgggcctggtggctcatgcctgtaatcccagcactttgggaggctgaagtgggcagatcactggatgtcagaagttcgagaccagcctggcctacatggcgaaaccccctctctactaaaaatacaaaaattagccgggcttggtggtggggacctgtaatcccagctactcgggaggctgaggcaggagaatcacttgaacctgggaggtggaggttgcagttagctgagatcacaccactgcactccagcctgggccacagagcaagactccatcttagaacaaaaaacaaacaaacaaacaaacctcatgcaccttcaagaaaatac

SEQ ID NO: 15072 - DNA, 482 bp, Homo sapiens
gggcgaattggagctccaccgcggtggcggccgaggtcttcgacccacgcgtgcgctttaacacacactaggctctttgtgtattatgattcagtgctatttgtaactgtgtcccagtgaccaaattgcactcgactcgatcagctgttcatccatttcgtgttttttcctgtcaaacattaatccagcaaatatatgaggtatttaccaatttattttcttagtattacaaaataattcattagcataaagtacctgcccgggcggccgctctagaactagtggatcccccgggctgcaggaattcgatatcaagcttatcgataccgtcgacctcgagggggggcccggtacccagcttttgttccctttagtgagggttaattgcgcgcttggcgtaatcatggtcatagctgtttcctgtgtgaaattgttatccgctcacaattccacacaacatacgagccgggagcataaagtgt

SEQ ID NO: 15073 - DNA, 421 bp, Homo sapiens
  misc_feature 401: n = A,T,C or G
gactcactatagggcgaattggagctccaccgcggtggcggccgccgggcaggtaaatcatagagctgccccaacatctagacagtctctcctactgattataaatgagtgaaaactatcagttagaaaaatctaatttaagttgttaatacatgtttctttggtgagcacctggatatatttatcacaaattcttttatacaaatgtcgaaaatgctttcaacaaacctaagtgtcctaattacatgccacttttaagcatcactttaaggtaaacaaaaatgaaaaccataattttaaattaaaatttgcggacgcggggggtcgactcaagacctcggccgctctaaactagtggatcccccgggctgcaggaattcgatatcaagcttatcgatacncgtcgacctcggggggggcc

SEQ ID NO: 15074 - DNA, 487 bp, Homo sapiens
ctatagggcgaattggagctccaccgcggtggcggccgcccgggcaggtgcttcgacccacgcgtccggatggcttgggtcatcaggacgtccattacatccaaaggaagacagcctgtgacgtttcaaaagcaaaagtcccctaccagccagtgaagctacctgatttctcagtatcttacgcccagtgacacgatctaccctcaaaacttaaaaaaaaaaaaaagggaaacataaacacataacagcagacctcggccgctctagaactagtggatcccccgggctgcaggaattcgatatcaagcttatcgataccgtcgacctcgagggggggcccggtacccagcttttgttccctttagtgagggttaattgcgcgcttggcgtaatcatggtcatagctgtttcctgtgtgaaattgttatccgctcacaattccacacaacatacgagccgggagcataaagtgtaaagcctggggtgc

SEQ ID NO: 15075 - DNA, 393 bp, Homo sapiens
ttggagctccaccgcggtggcggccgaggtcaagcttcgacccacgcgtccgagcttgagtcgacccacgcgtccgtgaaaatgttgtctcctttctaaattctctgccgatttgggaaaaagcaaacttgactttaccccgaggaattggtgaaaaattacttttacgccttgcagctgtggaacttggtcttacagcctctgctcttctgcccaaacgggccatgcagtttggatcaagaattgcaaaaatggaaaaaattaatgaaaaggcatctgataaatgtggacggctccaaatcatgtccttagaaaatctttctattgaaaaggagactaaattgtaatgtgattcacaatgtaacaatataaaaataagtttttatataatta

SEQ ID NO: 15076 - DNA, 264 bp, Homo sapiens
ccaccgcggtggcggccaggtttaagaccagcctggccaacatggtgaaaccccatctctactaaaaatataaaaatcagccgggcatggtggcatgtgcctgtaatcccagctactcaggagtctgaggaggagaatcacttgaacctggaggcagaggttgcagtgagtcgaggttgcgctactgcactccagcctggacaacagagggagactctgtctcaaaaaaaaaaaacctacagctgttcaaggaccagctgacag

SEQ ID NO: 15077 - DNA, 485 bp, Homo sapiens
ctcactatagggcgaattggagctccaccgcggtggcggccgccgggcagggccagagacttcaagtctatctgaaaagtctccagaggtctaaccccagataaatagccaacagggtgtagagtacattttacaccccaaagagtgtgccccatggtgatgaaaataaagtgaacatgttgcaaaatgaaaaaaaaaacctcggccgctctagaactagtggatcccccgggctgcaggaattcgatatcaagcttatcgataccgtcgacctcgagggggggcccggtacccagcttttgttccctttagtgagggttaattgcgcgcttggcgtaatcatggtcatagctgtttcctgtgtgaaattgttatccgctcacaattccacacaacatacgagccgggagcataaagtgtaaagcctggggtgcctaatgagtgagctaactcacattaattgcgttgcgctcactgcccgcttt

SEQ ID NO: 15078 - DNA, 448 bp, Homo sapiens
ctactatagggcgaattggagctccaccgcggtggcggccgcccgggcaggtacccaacacaaactattcaataaagtaatctgctttaaaaataaaacacactgaaaggccgaggcaggtggatcacctgacatcattagttcaagaccagtgtggccaaactggtgaaaattagtctcgactaaaaatacaaacattagctgggcgtggtggcaggcgcctctaattccagctactcaggaggatgaggcaggagaatcacttgaagcaaggaggtggaagttgcagtgagctgagatcgtgccattgcactgcagcctgggcaacagagtgagactccgtctcaaaaacaccaccaccaacaaaataaacacaacagaattattctgcaaatacagatattggagtagctgagttccatctcaaatttgactatgcaggttgaca

SEQ ID NO: 15079 - DNA, 596 bp, Homo sapiens
gcgcgtaatacgactcactatagggcgaattggagctccaccgcggtggcggccgagcaagtgggcctgtagccgactcttaatccaggttggtgctattcaaagagatcatctttcacccgagggatttctgggcatctattttgcggatcagaaagtagagaaagaaggtaactttgctgaaagctagtctggggagttagtagctgatacagatcagcatttcctaactatgagatttcataatattctctcttgtctcgattctgagtcactggtgcctgctgtggtggcattgttcatgaacatgtacctgcccgggcggccgctctagaactagtggatcccccgggctgcaggaattcgatatcaagcttatcgataccgtcgacctcgagggggggcccggtacccagcttttgttccctttagtgagggttaattgcgcgcttggcgtaatcatggtcatagctgtttcctgtgtgaaattgttatccgctcacaattccacacaacatacgagccgggagcataaagtgtaaagcctggggtgcctaatgagtgagctaactcacattaattgcgttgcgctcact

SEQ ID NO: 15080 - DNA, 586 bp, Homo sapiens
actatagggcgaattggagctccaccgcggtggcggccgaggtcatgtgcacattgtgcaggttagttacatatgtatacatgtgccatgctggtgcgctgcacccactaactcgtcatctagcattaggtatatctcccaatgctatccctcccgcctcctcccaccccacaacagtccccagaggtgatattccccttcctgtgtccatgtgttctcattgttcaattcccacctatgagtgagaatatgcagtgtttggttttttgttcttgcgatagtttactgagaatgatgatttccaatttcatccacgtccctacaaaggacatgaacttgagaattcttaatgcagtgctttaatacagtaaaaatttttagtctttgttttctacaaaatgcatttgaaaagtgcactcttgatcttgtattttctttcctttcctttagaatcatattagcagttggacgtatatataaaatattagtgtacctgcccgggcggccgctctagaactagtggatccccccgggctgcaagaaattcgatatcaagcttatcgataccgtcgacctcgaggggggg

SEQ ID NO: 15081 - DNA, 559 bp, Homo sapiens
  misc_feature 131, 132: n = A,T,C or G
ctactatagggcgaattggagctccaccgcggtggcggccgggtgtcaagcttcgacccacgcgtccgagcagaacttggcagcaacagaggaagggcccctggagccggctgtcgtggatgcctttaatnncaagcctggcatttggttggctcaacgaatgtcccaactacttccgctaggcccatcatgctcaggctgcccaaggcttttctgtcacctcttttgttctctcacactgaccagtcttacctgcccgggcggccggccgcccgggcaggtaccaagtgaatttaaataattggtgtggattggccagtagctaagtgggcttttaaagagtattgaagattgaaagggtttttctttcttttttaaaaaagaaaaacaaactattgattgtagataatgaaaagctagggtttgccctcttcatgtctactctccttccaaatagttatatccaaaactgtttttccctctcccctaccttgtcccccctattaaaatagaaacagggattgattaatgtcccgctcctgaatacatgtaaaaattt

SEQ ID NO: 15082 - DNA, 424 bp, Homo sapiens
gcgtaatacgactcactatagggcgaattggagctccaccgcggtggcggccgaggtacacagctatgcactttccgtttgtgacttttgccaccctgtcagccatggggagcccactgtgggactgaaaccctgagctgaatgcggcctcatgtctcagagaaacactggcaagttggtcagagccgcgtctgcatcgaggcgtagctgagcggcaggatggggggctgcctgcccagggtctctcaccgtggcgtaagcagagccatggcttgcctaggaccctatagataccatcactctttctcagctcgactggagtttgcacctttgcaggggcaaagtaactccctgcaccctgaaccaccccccattcctgttcatttcagcagataatgatggaggggggggggggtgtccatcg

SEQ ID NO: 15083 - DNA, 527 bp, Homo sapiens
  misc_feature 177: n = A,T,C or G
ctactatagggcgaattggagctccaccgcggtggcggccgaggtaagcttcgacccacgcgtccgctatcatatttcaaatcctaatggagacaaaacaaaagtgatggtcagtatttctttgaaattctacaaggaacttcaggcacatggtgctgatgagttattaaagagggngtcggagtttttgtaaatccagaatcaggatacaatgtctctttgctatatgaccttgaaaatcttccggcatccaaggattccattgtgcatcaagctggcatgttgaagcgaaattgttttgcctctgtctttgaaaaatacttccaattccaagaagagggcaaggaaggagagaacagggcagttatccattatagggatgatgagaccatgtatgttgagtctaaaaaggacagagtcacagtagtcttcagcacagtgtttaaggatgacgacgatgtggtcattggaaaggtgttcatgcaggagttcaaagaaggacgcagagccagccacacagccccaca

SEQ ID NO: 15084 - DNA, 521 bp, Homo sapiens
actatagggcgaattggagctccaccgcggtggcggccgcccggcaggtacagcctcacatacacagatgcaggtgaagtcaccaaagctgatctctcattcgttctggggacagttagcagcgtagtggtcccactgcagcaaaagtttgaaattcattttcttcaggaaaatacccagccagtctctcagtggaaaccctggttatgtcgtggggctcccattagctgctggattccagcctcataagggtggagctctcccgtgtcagctcgtagcacagaaggtgaagagcctgctgtggggccagtgcttcccagattacgtggccccttttggaaattcccaggcccaggacatgctggactgggtgcccatccacttcatcacccagtcattcaacaggaaggattcctgccagctcccaggggctttggttatagaagtgaagtggactaaatacggatccctgctgaatccacaggccaaaatagtcaatgtaactgcaaatctaatttcat

SEQ ID NO: 15085 - DNA, 327 bp, Homo sapiens
  misc_feature 10: n = A,T,C or G
ccgcactttnttttttttttttttttttttttttttttttttttttttttttttttttttttttttttttttttttttttttttttttttttttttttttcttttttttttttttttttttttttccaaaaaacccttttaagggggcaaaaacccgggcccaaaatttggggggggggtttccaaaaaaaaaacccccccccccccaaaaaaaaaggggccccccccgggggggggaatatttaaaaaactttttcccccccccccccccgggggggggcccccccccccccttttttccccccttaagggggggaaaaccccccc

SEQ ID NO: 15086 - DNA, 571 bp, Homo sapiens
gactactatagggcgaattggagctccaccgcggtggcggccgaggtcttcgacccacgcgtccgcactgagtgttcaccataatttgagattcttggcatgttaacttttcattatggaatattgaataatttcaatattattcatacatttctttatgttcaaacatacacaaaaatagaatatgaaactctacccatcacccagctgcaacaaatatcaatactttaccgttcttaatacatctaaccccttactttttgtttgtttcttttggtgaagtatttaattgtaatttttttttaagagacaggatctcactctgtcacccaggccagagtgcagtggtacctgcccgggcggccgctctagaactagtggatcccccgggctgcaggaattcgatatcaagcttatcgataccgtcgacctcgagggggggcccggtacccagcttttgttccctttagtgagggttaattgcgcgcttggcgtaatcatggtcatagctgtttcctgtgtgaaattgttatccgctcacaattccacacaacatacgagccgggagcat

SEQ ID NO: 15087 - DNA, 581 bp, Homo sapiens
gtaatacgactcactatagggcgaattggagctccaccgcggtggcggccgcactttttttttttttttttttaataacaaacacttatccaacacttagtatgtggcaggcactgtttcaagcactttacacatacaaactcatcccggacgcgtgggttgaagcttgtacaccgaggccgattagaactagtggatcccccgggctgcaggaattcgatatcaagcttatcgataccgtcgacctcgagggggggcccggtacccagcttttgttccctttagtgagggttaattgcgcgcttggcgtaatcatggtcatagctgtttcctgtgtgaaattgttatccgctcacaattccacacaacatacgagccgggagcataaagtgtaaagcctggggtgcctaatgagtgagctaactcacattaattgcgttgcgctcactgcccgctttccagtcgggaaacctgtcgtgccagctgcattaatgaatcggccaacgcgcggggagaggcggtttgcgtattgggcgctcttccgcttcctcggtcactgactcgctgcgctcggtcgttcg

SEQ ID NO: 15088 - DNA, 556 bp, Homo sapiens
cgtaatacgactcactatagggcgaattggagctccaccgcggtggcggccgaggtcaagcttcgacccacgcgtccggattatttcagctcttgacctgtcccctctggctgcctctgagtctgaatctcccaaagagagaaaccaatttctaagaggactggattgcagaagactcggggacaacatttgatccaagatcttaaatgttatattgataaccatgctcagcaatgagctattagattcattttgggaaatctccataatttcaatttgtaaactttgttaagacctgtctacattgttatatgtgtgtgacttgagtaatgttatcaacgtttttgtaaatatttactatgtttttctattagctaaattccaacaattttgtacctgcccgggcggccggccgcccgggcaggtaccctaataaaggcagcaaaatgcattaatccactatgaatggagttttacattttaatttatgcctaatatttataaaagaatttcattcataggctactcacagttgttatctgacgcttacagaagt

SEQ ID NO: 15089 - DNA, 527 bp, Homo sapiens
ctactatagggcgaattggagctccaccgcggtggcggccgaggtgtacaagcttcgacccacgcgtccgactttttgtcttagacccagttagggtcaccttacagtgcaggtggaaagaaagcaggactgctgagaggagctcaggacccattttccaggactattgccttctcaaaactttggagagcaggaaaatagattcccaagtgaaagaggtggcagaaataaaaaaaaaaaaaaaaaaaaagtgcggccgctctagaactagtggatcccccgggctgcaggaattcgatatcaagcttatcgataccgtcgacctcgagggggggcccggtacccagcttttgttccctttagtgagggttaattgcgcgcttggcgtaatcatggtcatagctgtttcctgtgtgaaattgttatccgctcacaattccacacaacatacgagccgggagcataaagtgtaaagcctggggtgcctaatgagtgagctaactcacattaattgcgttgcgctcact

SEQ ID NO: 15090 - DNA, 506 bp, Homo sapiens
  misc_feature 481: n = A,T,C or G
tactatagggcgaattggagctccaccgcggtggcggccgcccggcaggtacacagttctgactgcaatacctttttcagactgcaaagggagctcaggatccagaagtcattaaaagaacggacgcgtgggtcgaagcttgtacctcggccgctctagaactagtggatcccccgggctgaggaatcatatcaagcttatcgataccgtcgacctcgagggggggcccggtacccagcttttgttccctttagtgagggttaattgcgcgcttggcgtaatcatggtcatagctgtttcctgtgtgaaattgttatccgctcacaattccacacaacatacgagccgggagcataaagtgtaaagcctggggtgcctaatgagtgagctaactcacattaattgcgttgcgctcactgcccgctttccagtcgggaaacctgtcgtgccagctgcattaatgaatcggccaacgcgcggngagaggcggtttgcgtattgggcgc

SEQ ID NO: 15091 - DNA, 377 bp, Homo sapiens
  misc_feature 136, 137, 161, 217, 225, 226, 245, 254, 255, 263, 264, 271,272, 280, 281, 300, 301, 302, 322, 323, 336, 347, 348, 370,371: n = A,T,C or G
tactatagggcgaattggagctccaccgcggtggcggccgagtaagcttcgacccacgcgtccgcagaaatactgaaagacttttgcctaaagtggcattattgactgctggtgtgatgctttactgtaatgtganntaaattattaaattggttgcaaangtgccaaaaaaaaaaaaaaaaaaaagaccttgcccggcggccgcttctagaaacantagtgganntcccccgggctttgcaggnaaattcganntatcaagnncttatcnngataccgnntcgacctttcgaggggggnnngcccggtaccccaagctttnnttgttcccttttnaagtgagggtnntaattgcgccgcccttggcgtnnaatcat

SEQ ID NO: 15092 - DNA, 515 bp, Homo sapiens
  misc_feature 44: n = A,T,C or G
actatagggcgaattggagctccaccgcggtggcggccgcactnttttttttttttttttttttttttttttttttaaaaaaagcctcattatcctgtagtccattttggaaagtaaagcccaagaaagcaaaagatgaaggttctaaagctagtttgactgacctagagtacctcggccgctctagactagtggatcccccgggctgcaggaattcgatatcaagcttatcgataccgtcgacctcgagggggggcccggtacccagcttttgttccctttagtgagggttaattgcgcgcttggcgtaatcatggtcatagctgtttcctgtgtgaaattgttatccgctcacaattccacacaacatacgagccgggagcataaagtgtaaagcctggggtgcctaatgagtgagctaactcacattaattgcgttgcgctcactgcccgctttccagtcgggaaacctgtcgtgccagctgcattaatgaatcggccaacgcgcggggaga

SEQ ID NO: 15093 - DNA, 247 bp, Homo sapiens
cgcgcgtaatacgactcactatagggcgaattggagctccaccgcggtggcggccgaccggccaggtcaagcttagacccacgcgttcgtgataacttctgctaagtgccaggcattgtattacatgctgtgagcacagagatgaataataacaataggttcacagaaaagatgaattgattgagagaaaaagaccctccaggagccctcagcgtattacggggttggtgttggagggtggaggaat

SEQ ID NO: 15094 - DNA, 605 bp, Homo sapiens
  misc_feature 131, 132: n = A,T,C or G
gactactatagggcgaattggagctccaccgcggtggcggccgaggtacccaaaagatatcactgtgaaggtttggatacactgactgaggaaaaaagaaggtcctgaaagcgtctagacaaaaaaagacnntacttgtaagttgcaaggaaatcagaatgggcattggacttctcagctttcctcattagaagttagatctgaagcaatctttaaactcgtgaggaaaattaagtctaataaataattttcttcttagccaaacaatcaaatgtgaagctagaataagcattttcaggtaaaaaaaaaaaaaaaaaaagtgcggccggccgcccgggcaggtacataatatacagaggtataatctgtaacatcaataatgtaaagtggggaagggcaaggtggaaaaggagtagaatgcttgtatgtgactaaaattatgttggtatcagtttaaaatatattattataactttagaatgctatacccattcccacagtaattcccatagtaaccaaaaagaaaatatctgtaggatacacacaaaagaaaatcagaagtagatgcaaacttgtcactacaggaaaaaaaaagctatcaaaat

SEQ ID NO: 15095 - DNA, 576 bp, Homo sapiens
  misc_feature 195, 206: n = A,T,C or G
cgcgcgtaatacgactcactatagggcgaattggagctccaccgcggtggcggccgaggtgtacaagcttcgacccacgcgtccgaagaaggctctcctctgttccaggagaaggaagggacagatgagaagtcacttcaagttcccagaatactcaggagctgaacttgtcaaggtttagatgtggcaaagcanggccaggcatnggtgacctcatgcccatgtaatcccagcattttgggaggccaaggcaggaggatcacttgagcccaggagtttgaaagcagcccgggcaacatagtgaaacctcatctctagaaaaaatacaaaaaaattagccaggcgtgttggtgtacctgcccgggcggccgctctagaactagtggatcccccgggctgcaggaattcgatatcaagcttatcgataccgtcgacctcgagggggggcccggtacccagcttttgttccctttagtgagggttaattgcgcgcttggcgtaatcatggtcatagctgtttcctgtgtgaaattgttatccgctcacaattccacacaacatacgagccgggagcat

SEQ ID NO: 15096 - DNA, 366 bp, Homo sapiens
ctataggggagcgcgcgtaatacgactcactatagggcgaattggagctccaccgcggtggcggccgaggtacatctgcaagctttaaagcagtaggttcagacttcctggaagaactgacacttgaagctgactagggtctacttgagctcatactcactttggctaagccacagtatgagggaagggtgtgcaggaataaccgcttccatttttatatcgttcattcctgaaaatccaacaggagattcttttcactccctaaaatcaactgttctgtgtataaagcatatctggatatctgatcttaaatggaaagaggatctgaaaacggccccaacttttctaaaactttaaaattggccc

SEQ ID NO: 15097 - DNA, 575 bp, Homo sapiens
gactcactatagggcgaattggagctccaccgcggtggcggccgaggtcttcgacccacgcgtccgagaatagctactgaagtcctaaagagcaagcctaactcaagccattggcacacaggcattagacagaaagctggaagttgaaatggtggagtccaacttgcctggaccagcttaatggttctgctctggtaacgtttttatccatggatgacttgcttgggtaaggacatgaagacagttcctgtcataccttttaaaggtatggagagtcggcttgactacactgtgtggagcaagttttaaagaagcaaaggactcagaattcatgattgaagaaatgcaggcagacctgttatcctaaactagggtttttacctgcccgggcggccggccgcccgggcaggtacccaacacaaactattcaataaagtaatctgctttaaaaataaaacacactgaaaggccgaggcaggtggatcacctgacatcattagttcaagaccagtgtggccaaactggtgaaaattagtctcgactaaaaatacaaacattagctgggcgtggtggca

SEQ ID NO: 15098 - DNA, 254 bp, Homo sapiens
ctactatagggcgaattggagctccaccgcggtggcggccgaggtatcacgagcggccggccgcccgggcaggtcaatcatagagctgccccaacatctagacagtctctcctactgattataaatgagtgaaaactatcagttagaaaaatctaatttaagttgttaatacatgtttctttggtgagcacctggatatatttatcacaaattcttttatacaaatgtcgaaaatgctttcaacaaacctaagt

SEQ ID NO: 15099 - DNA, 506 bp, Homo sapiens
gaattggagctccaccgcggtggcggccgcactttttttttttttttttttttttaaagcactggtgctcttcttaagtgaaatgttaacacagggctcaatacataaaagagaaagtgaagttgttccatttggggggtcccataaggggcctcatgtttccctaggtgttaccccttcagacacagcacagcctacaaagcggacgcgtggggtcgaagcacctgcccgggcggtcgatctagaactagtggatcccccgggctgcaggaattcgatatcaaccttatcgataccgcctaccttgagggggggcccggcacccagcttttgttccctttagtgagggttaattgcgcgcttggcgtaatcatggacatagctgtttcctgtgtgaaattgttatccgctcacaattccacacaacatactagccgggagcataaagtgtaaagcctggggtgcctaatgagtgagctaactcacattaattgcgttgcgctcac

SEQ ID NO: 15100 - DNA, 530 bp, Homo sapiens
actactatagggcgaattggagctccaccgcggcggcggccgaggtcaagcttcgacccacgcgtccggtctattttgattttggggggtaatcagcattattcttcagaaggggacctgttttcttcaagggaagaaacactcttattcccaaactacagaataatgtgttaaacatgctaaatagttctatcaggaaaacaaatcactgtatttatctccgcaggctatttgttcagagaggccttttgtttaaatataaatgtttaaatataaatgtttgtctggattggctataacatgtctttcagcattaggcttttaagaaacacagggttttgtattctttactaaagatatcagagctcttaatgttgcttaaatgagggtgactgtcaagtacctgcccgggcggccggccgcccgggcaggtcttcgacccacgcgtccgggcaattatcaaaaacacttggaaaaagatttttattcctacttttaaacatacatcaaaatctaaaataaaactaggc

SEQ ID NO: 15101 - DNA, 399 bp, Homo sapiens
tacgactcactatagggcgaattggagctccaccgcggtggcggccgcccgggcaggtcttcgacccacgcgtccgattgaagcctctctgaagttaaacccaactatgtttattaaaatgtgtgaaactgaaagtgggctaggttctaccaaggctgtggaactctcctacgagttctgctgatcaggaaatttaagaatttatcttaaaaatgcaaggaaaaaagactgccttggcaattgtgaatgctgctttcaatctcctagcaccgagcctggcacttaggcagctttcagtaagtgggtgaatgaatgactgaatgaatgaatgaatggctcagctgaggaatgtaactttggtcaagacctcggccgctctagaactagtggatcccccgg

SEQ ID NO: 15102 - DNA, 308 bp, Homo sapiens
  misc_feature 162, 173, 193: n = A,T,C or G
tcccgccttgttcttctccccctttctcccctccctatatagtaatggactccccgtgggcgcgatcatttatttttgtcgccagaacaagtctgggattggagaggaatggacggtaaacaagtgattgaaattgtttaacgccaacctgagacgcgcgtnataacccaccnccttttaggggcgatatggnactccaccgcggtggcggccgcccgggcggtacatattacagaggttatctgaacatcatatgtaagtggggaaggcaagtggaaaggatagatgcttgttgggactaaattagt

SEQ ID NO: 15103 - DNA, 436 bp, Homo sapiens
  misc_feature 61, 68, 69, 72, 76, 77, 84, 85, 86, 102, 120, 149, 156, 157,176, 188: n = A,T,C or G
gagctgcgcgtaatacgcactacactttcaggtgcgtaattggagctccaccgtcggttgngacccgnnggncccnnccccgcnnnaaaaaaggggggtttnaaaaaaaacccctttttnaacccctttttttggagttgggcccttgntaagttnngtaacccccccaatttttnctttaaatatgnaaaatttttgggttttaaaattttaaaaaggggttgggccccccaaaaaaaaaaaaaaaatttttaaaaattaaattttaaaaaaagggcctcttttgggggttttttttttttttttggagaaaaaaaaacaaacaatcccagccacccaaaattttataaaaaggttgggcccgggggcccccgcttttttttaaaaaaaacttaaaggtgtgggtatttcccccccccccgggggtctttttgga

SEQ ID NO: 15104 - DNA, 412 bp, Homo sapiens
gcgcgcgtatacgactcactatagggcgaattggagctccaccgcggtggcggccgaggtgcggccggccgcccgggcaggtacaagcttcgacccacgcgtccgcacaaacattttttcaatgtagcaaaatcaaacttaaaaaaaaaaaaagaagaaaagaagaagatgccgacagtgcggagtctagccttttgtaaacttcatattgcacactaggactataagccattgctagctcattttgaattttaacgtgtaatttttgttttattttctttctgtggggaaacaatgcttgatccaccaatgctctttttaatgttttataactatgtatgtgtatatatataaatatcaaataatatgtatgcacatatgtgtgtgtatatatctatatgtatatacatat

SEQ ID NO: 15105 - DNA, 393 bp, Homo sapiens
tacgactcactatagtgcgaattggagctccaccgcggtggccccgggcaggtcgagcgaccgcactttttttttttttttttttacctgaaaatgcttattctagcttcacatttgattgtttggctaagaagaaaattatttattagacttaattttcctcacgagtttaaagattgcttcagatcttaaacttctaatgaggaaagctgagaagtccaatgccattctgattcttgcaacttacaagtagtctttttttgtctagacgctttcaggaccttcttttttcctcagtcagtgtatccaaaccttcacagtgatatcttttgggtacctcggccgctctagaactagtggatcccccgggctgcaggaattcgatatcaagct

SEQ ID NO: 15106 - DNA, 393 bp, Homo sapiens
  misc_feature 222: n = A,T,C or G
tacgactactatagggcgaattggagctccaccgcggtggcggccgaggtactcatagcatttttccccacatagtctttcaaaatctgcatttatttcaaaatctgaccttcataactcaactatacatgaattgctggtattgtcttttaacttggccaaagaacagttttctgagttagctattatttccaccataaaattgggggtaagatttggcanaaaaaaaaaaaaaaaaagtgcggccgctctagaactagtggatcccccgggctgcaggaattcgatatcaagcttatcgataccgtcgacctcgagggggggcccggtacccagcttttgttccctttagtgagggttaattgcgcgcttggcgtaatcatggtcatagct

SEQ ID NO: 15107 - DNA, 383 bp, Homo sapiens
tacgactcactatagggcgaattggagctccaccgcggtggcggccgaggtactacccattttaattacacagtaaacagaagcacgggtaagtgacatactcatactttaagcaataagaattagaagaaaccatagaagcttggggccttctctctagctctaacccaaagaaaatgaattttattttttttttttaaaagaaaacagcatcaatcacttaagattttcttcctctttttttttttttttttacacttgcttattagtatagtatctcgttccaaagccggacgcgtgggtcgaagcttgtacacctgcccgggcggccgctctagaactagtggatcccccgggctgcaggaattcgatatcaagcttat

SEQ ID NO: 15108 - DNA, 359 bp, Homo sapiens
tggagcctcaccgcggtggcggccgcccgggcaggtcaagcttcgacccacgcgtccgtcttattttttactcttaggcaatgcggaatatcaatcccagcacagcaaattctccaaaatgtcaggtaggctcttatctgatgttttagcactggaaaaaaaaaaaaaaaaaaaaaagtgcggccgacctcggccgctctagaactagtggatcccccgggctgcaggaattcgatatcaagcttatcgataccgtcgacctcgagggggggccccggacccagcttttgttccctttagtgagggttaattgcgcgcttggcgtaatcatggtcatagctgtttcctgtgtgaaattg

SEQ ID NO: 15109 - DNA, 341 bp, Homo sapiens
tacgactcactatagggcgaattggagctccaccgcggtggcggccgaggtcttcgacccacgcgtccgaaatgactggttatttagaaaagaaggatgtttagaataaaacaggaagtccaaacatgtcataagtggtttgtgtatgtcataataagggattataaaaagaggatttatgtgaaaaaaattttatgtgatcaagttgtctacaattacaaggaaattatttataatagacgttctagagatctatattaaaaaaaaaaacaaaaaaaaaacctgcccgggcggacgctcgaggacccccgggcaggtcacagataaatatatgaaactac

SEQ ID NO: 15110 - DNA, 385 bp, Homo sapiens
ctactatagggcgaattggagctccaccgcggtggcggccgcccgggcaggtcaagcttcgacccacgcgtccgtctgaacctacaccccgtctcttcacggtttagacttactaaaataaatacaaggtgattttcatcttcaggtagagtgaagccttttaattaaggcgtcacaggtgcagctattctaccttaatgaaatgggtagtgattttcccaccattatttatttcggtgataatatgctgcatattcaagtctcttgtagttattttcacccaaagtagttgacaatttgatgcttctggtgatgtttatggcttcattttatgtaattttttaagtaagttccactagaaacagttcatcttataccttcaaaa

SEQ ID NO: 15111 - DNA, 387 bp, Homo sapiens
ctactatagggcgaattggagctccaccgcggtggcggccgaggtactataagaacacattaattcaatggaaatacactttgctaatattttaatggtatagatctgctaatgaattctcttaaaaacatactgtattctgttgctgtgtgtttcattttaaattgagcattaagggaatgcagcatttaaatcagaactctgccaatgcttttatctagaggcgtgttgccatttttgtcttatatgaaatttctgtcccaagaaaggcaggattacatctttttttttttttagcagtttgagtcggcgtagtgtattctttggtatcagaatactcatatagctttgggattttgaattggaaatattcatgatgtgtgaaaa

SEQ ID NO: 15112 - DNA, 401 bp, Homo sapiens
  misc_feature 230: n = A,T,C or G
gcgtaatacgactcactatagggcgaattggagctccaccgcggtggcggccgctgttcgtatttcttattctacaacaagggtcagcctacaggcaaaacacatcccattgtcatttttttgtaaataaagttgtattggaacatggccactctcatttgttttctattatttatggctgctttcacttacaacctgagtggttgccacagaaactgtatggcctgcanagtctagaatatttactatgtagctttatcttttttttttggagacagtgtgccactctattgcccaggctggagtgcggtggtgtgatcatggctcattgcagccttaaactcctgggctcaagcaatcctcccgcctcggtttcccaagtagttgggactacaggcatg

SEQ ID NO: 15113 - DNA, 223 bp, Homo sapiens
cgactcactatagggcgaattggagctccaccgcggtggcggccgcccgggcaggtacccagtaatcacataaattctgcaatcatctgtttatttagcttaactgtttttttttatttgttgaagttgttgctgttatttcagtctttttcttattgggttgaccagacttggtaaaatctgtatgatagttccataattatggggaagatttcctctgaat

SEQ ID NO: 15114 - DNA, 138 bp, Homo sapiens
gaatggagctccaccgcggtggcggtcgcccggtcaggtctagcttagtcgacccacgcgtccgggcctaactaatatctcggctgagtgctactaacagattataataaattgtcatcagtgaaaaaaaaaaaaaaa

SEQ ID NO: 15115 - DNA, 383 bp, Homo sapiens
tacgactcactatagggcgaattggagctccaccgcggtggcggccgcccgggcaggtcaagcttcgacccacgcgtccgatttcaggttgacttttctcacctttaacctctttatatagcacagtgcaatctggccctactgccacttcatctgggttatctgtagcttgagttgtaaaaaaaaaaaaaaaaagtgcggccgctctagaactagtggatcccccgggctgcaggaattcgatatcaagcttatcgataccgtcgacctcgagggggggcccggtacccagcttttgttccctttagtgagggttaattgcgcgcttggcgtaatcatggtcatagctgtttcctgtgtgaaattgttatccgctcacaatt

SEQ ID NO: 15116 - DNA, 387 bp, Homo sapiens
tacactactatagggcgaattggagctccaccgcggtggcggccgaggtactgttgtctcatgtaatgctaaaactgaaatggtccgtgtttgcattgttaaaaatgatgtgtgaaatagaatgagtgctatggtgttgaaaactgcagtgtccgttatgagtgccaaaaatctgtcttgaaggcagctacactttgaagtggtctttgaatacttttaataaatttattttgataaataatattgaaaaaaaaaaaaaaaaaagtgcggcctcgagcggccgcccgggcaggtacaggcacctatagaatttaaaggggagatttctttattttgtattcaatgtattaataagatttttaaaacatattttggagaaattgctaa

SEQ ID NO: 15117 - DNA, 353 bp, Homo sapiens
gactcactatattgcgaattggagctccaccgcggtggcggccgaggtcctagcttgagtcgacccacgcgtccgatttttgcctccagactacagatcagaaaactgagactcagaatgtttcaattccttgtttaagatcacaaaactagtttgaggtataatggaaactgaaaaaaaaaaaaaaaaaaggtgcggccgctctagaactagtggattccccgggctgcaggaattcgatatcaagcttatcgataccgtccaccttgagggggggcccggtacccagcttttgttccctttagtgagggttaattgcgcgcttgtcgtaatcatgtccatagctgtttcct

SEQ ID NO: 15118 - DNA, 255 bp, Homo sapiens
ctcactatagttcgaattggagctccaccgcggtggcggccgaggtcaagcttcgacccacgcgtgcggaagttttcattctccctctttttttttttttttttagcaattcaagtcatgtttttgtctacaagtttttccagtattgtatagataaataataatttactacgctgccttgagtatactagacaagagacctgcccgggcggccgctctagaactagtggatcccccgggctgcaggaatttcat

SEQ ID NO: 15119 - DNA, 220 bp, Homo sapiens
ctcactatattgcgaattggagctccaccgcggtggcggccgcccgggcaggtatcaagtgcttggattctgaactgccaaaagaaaactgcacttcccctcttaagtaaaaccgaaatgagtctcttaggcaaatgtattcatcagcccagataaaaaaaaaaaccagttaatgtgagcgttagtcactgctcatttcccaggaagatcatacaaatac

SEQ ID NO: 15120 - DNA, 371 bp, Homo sapiens
cgcgcgtatacgactcactatagggcgaattggagctccaccgcggtggcggccgaggtacaagcttcgacccacgcgtccgatacgactcactatagggatctacctgcttgagtcgacccacgcgtccgaacacatacaaaagaattaaacccacaagctgcctctgacagcagcctgtgagggagtgcagaacacctggccgggtcaccctgtgaccctctcactttggttggaactttagggggtgggagggggcgttggatttaaaaatgccaaaacttacctataaattaagaagagtttgtattacaaattttcactgctgctcctctttcccgtgctttgtcttttttttaatgctttttttt

SEQ ID NO: 15121 - DNA, 301 bp, Homo sapiens
gactcactatagggcgaattggagctccaccgcggtggcggccgaggtggccgcactttttttttttttttttttttaaagtttggggtctgtcaggagacagaggcttttttgaattcactgtgaagagaagaacccgaaccttaagacggcagatccctgagagtctttctggctggtttgagcggacgcgtgggtcgacacctgcccgggcggccgctctagaactagtggatcccccgggcctgcaggaattcgatatcaagcttatcgataccgtcgacctgcgagggggggcccg

SEQ ID NO: 15122 - DNA, 188 bp, Homo sapiens
tcgcgtatacgactcactatagggcgaattggagctccaccgcggtggcggccgaggtacttcaaagttattgcacatacacttgtttactttgtatgttttgcaggattaaactttgtataatctttttgcaaaatttttttttcagtatgcatgcttgcaagatgaaaataaaacctgtttgcctg

SEQ ID NO: 15123 - DNA, 210 bp, Homo sapiens
aattggagctccaccgcggtggctggccgaggtacaagcttcgtatcactcgtccgagcttgagtcgacccacgcgtccgcgtttatgatttttaaaacacacgttgaaataaaaatgatctgaacttaaatttctggtccgggtgacatcatctctgcactgcaatagcccattattacatttgtaagtcttttctgttttaatttatt

SEQ ID NO: 15124 - DNA, 335 bp, Homo sapiens
tagggcgaattggagctccaccgcggtggcggccgcccgggcaggtacatctctatcagagcttttgggtgaccaggcacactgtcaatgagcagtaatactttgaaaggaatctttggggttttttttggtttggtttttgttttgttgttatttttttgtttgtttgttttttgtttttgtttttttagcagtaggcctcaacagtggacttaaaatactcagtaaaccatgctgttaacagataagctgtcatccagactttgttgttccatttctagagcacagagcagatttagcagaattcttaaggctttatgatttttacaatggta

SEQ ID NO: 15125 - DNA, 415 bp, Homo sapiens
  misc_feature 27, 29, 51, 57, 63, 64, 66, 67, 68, 69, 70, 71, 72, 77, 78,79, 84, 96, 107, 109, 112, 117, 120, 127, 128, 152, 157,167, 168, 170, 172, 173, 176, 177, 180, 182, 183, 184, 186,187, 188, 189, 192, 195, 197, 200, 202, 206, 210, 212: n = A,T,C or G
  misc_feature 213, 214, 222, 240, 271, 277, 278, 279, 280, 285, 286, 292,293, 308, 309, 313, 319, 320, 323, 326, 336, 337, 372, 373,376, 381, 389, 390: n = A,T,C or G
gactcgcgggaaccacccaccaggccncngaagttgtaccccacgcccggnggcggncgaggnngnnnnnnnttttnnnggggnggttaggccccnaccccccccananagncaggnaanaaggggnntttgacaaagaagggggagacaanccccnaaaaaaccanncnanngcnngangnnnannnnaancanancangnaagnaagnannnacgcgccnttttcaaaaaattttttnacgagggggggggggcccccccaaaaaaaangaagannnngaagnncccccnngaaagcgggggacgnnaggnaaaaannagnggnaagaggagannaaaggggggggaaaaagggaaagagggaagggggnnaanaaggnaaaacaannagaaaaaaaaaaaggaaaaaaaaga

SEQ ID NO: 15126 - DNA, 373 bp, Homo sapiens
tagggcgaattggagctccccgcggtggcggccgcccgggcaggttttttttttttttttttctttctgttccttggactagataatctgaaatcaactgtcttcagttttgcagactcttgtgccagctaaaatgttctgttgagccccagaagctaattttcttttcagttattatgattttcagctttagaatttatttttttaatataatttctacctcttttttatattctccattgggtgagacattcacatactttcttccagttttttttagacgtagtttccttgagttctttgagcatatttaaaatagttgatttaaaggatttggctagttactccaccatctgagtttcctcagggaaaa

SEQ ID NO: 15127 - DNA, 240 bp, Homo sapiens
gcgaattggagctccaccgcggtggcggccgcccgggcaggtcaagtcgacccacgcgtccgcttgttttgctctatcccataggagttggtatgttgtgtttccaatatcatttactaaaagaaactttcctttttatttcttcattgaccaactggtcatttgcatgttctttaattactattgtgtctgtatagctgtcaaaatttctcttattaatttctagcgtttcctgtggtc

SEQ ID NO: 15128 - DNA, 309 bp, Homo sapiens
gcgaatggagctccccgcggtggcggccgcacttttttttttttttttttttagtctttctacttttagggtttattcactggcagtttcaggtctggaaatacaaaaaggaacatgacatgggttctgcccttgaggtgctcccagtctggtgagggacacaacacctttcaggggacaaccgtggtacctcggccgttctaaaactagtggatcccccgggctgcaggaattctatatcaagcttatcgataccgtctacctttagggggggcccggtacccagcttttgtttcctttagtgaggtt

SEQ ID NO: 15129 - DNA, 363 bp, Homo sapiens
cgactcactatagggcgaattggagctccaccgcggtggcggccgaggtcaagcttcgacccacgcgtccggcctgggacagatccttagtctttccttgacttttatgacccagaggtgaaaggccaaatgttttgtagaatgtccttaaacttgggtttatctgaggtttccttgtgattgaattcaggttagacatctttgatgggactgtcatagaactgatgctgtgttctaattgcatcttatcaggtgacttatgatttctgtttgtcccattattgatgctgttactttagatcacttgattaaggtggtgcctgcctggcttctccagtgtgaaattccttttcttctttgtaa

SEQ ID NO: 15130 - DNA, 385 bp, Homo sapiens
agggcgaattggagctccacgcggtggcggccgaggtaatttttctgcttgcccaagaaacaaagcttctgtggaaccatggaagaagatgaaaatgagactggcaaagaacaaatgctgaatctgaagaagatttgggcaaataatctgcatacttttaattgggaataagatggaaaatatgaatgctaaatcaaattttttaaaaaaatacacccggacgcgtgacctgcccgggcggccggccgcacttttttttttttttttttcagtattatttatcaaaataaatttattaaaagtattcaaagaccacttcaaagtgtagctgccttcaagacagatttttggcactcataacggacactgcagttttcaacaccat

SEQ ID NO: 15131 - DNA, 327 bp, Homo sapiens
gcgcgtgatacgactcactatagggcgaattggagctccaccgcggtggcggccgcacttttttttttttttttttttttttttttttagggggggaggaaggcaaggcactgggaaagactcacaacagatatgaccctagtcgtaaagaaatccataattgccagtaacacgacatatttaagaacaggaaaagacagacaagaaaagagggacttttttaaaaaacattactaaagaattggacatagaagagtgaaattgagaaggtaaggaggagggggaaggatgtaaaaactatgacaatacacgagttattcaaagagt

SEQ ID NO: 15132 - DNA, 340 bp, Homo sapiens
caccgcggtggcggccgcccgggcaggtacataatatacagaggtataatctgtaacatcaataatgtaaagtggggaagggcaaggtggaaaaggagtagaatgcttgtatgtgactaaaattatgttggtatcagtttaaaatatattattataactttagaatgctatacccattcccacagtaattcccatagtaaccaaaaagaaaatatcttgtaggatacacacaaaagaaaatcagaagtacatgcaaacttgtcactacaggaaaaaaaaagctatcaaaatagaaaacaataaatggagaaaaataagacaccaaaagctataagactca

SEQ ID NO: 15133 - DNA, 261 bp, Homo sapiens
gcgcgtatacgactcactatagggcgaattggagctccaccgtggtggcggccgcccgggcaggtgccgaactttttttttttttttttttctttttttttatggaaaaaatatgtgattatttttaatgatttacgtataaaagaaaaactttatgatacaatttgacagactacttcataaaaaattttacttacatacaatgttttgcaatttttgggcaacccccaaactctattgacatattccaattcataaaag

SEQ ID NO: 15134 - DNA, 348 bp, Homo sapiens
gcgaattggagctccccgcggtggcggccgaggtcttcgacccacgcgtccgattttgtgagaatgattgttctttcacttgggctgtttgagagcataattatggtaatcatgagattaatgtttcatgatttctacctccaaagtgtgaagacaagtaaaacaatgtttctaaattgtcttattttgttggcggagaagattacaatggctattagtgctacatttggtcaaatgtaatcacttaaatagctttttgtcacctttaactaaagcagaataaaaaacctgccccgggcgggcggccgcccgggcaggtaccattccgacgtttgaatggtggagttg

SEQ ID NO: 15135 - DNA, 166 bp, Homo sapiens
  misc_feature 148: n = A,T,C or G
gggcgaattggagctccaccgcggtggccggccgaggtacaagcttcgacccacgcgtacgcttctcttagaattttggggaaattgatagtccagtgactcctactccacttttgggtgaaggacgatttggaatttgaagtggggngagacaggcctgtgaagt

SEQ ID NO: 15136 - DNA, 201 bp, Homo sapiens
actcactatagggcgaattggagctccaccgcggtggcggccgcccgggcaggtcaagcttcgacccacgcgtccgaaaaaaaaaaaaaaaagtatgttggagaccgactgggggtgaggggctggcagcaggagacagataacatgtcctcagaatgcagagtgatgaaggctggaactaaggccacaactggagagatg

SEQ ID NO: 15137 - DNA, 161 bp, Homo sapiens
cgtaatacgactcactatagggcgaattggagctccaccgcggtggcggccgaggttttttttttttttttcagtgcttcccaaagctagcggacataacgggtagcttgacgctggactcttgtgccttgcgtgaagcacttggagtatagtctgagagt

SEQ ID NO: 15138 - DNA, 393 bp, Homo sapiens
gtaatacgactcactatagggcgaattggagctccaccgcggtggcggccgcccgggcaggttttcttatgagtgggaggtgactgatcgtggaggtggatttcttatgagtgggaggtgactgatcgtggaggtggatttcttatgagtgggaggtgactgatcgtggaggtggatttcttatgattggcttatcaccatccctccttggtgctgtttttgcaacagtgagtgatttcttgtgagatccggttgtttaaatccagaggcacctacccctaccctctagctcccattcctgccatgtaagacacctgctccccctttttcttaccccatgattggaagctttctgaggcctccccagaagctgatgccagccctatgcttcct

SEQ ID NO: 15139 - DNA, 361 bp, Homo sapiens
cgactcactatagggcgaattggagctccaccgcggtggcggccgcccgggcaggtcttcgacccacgcgtccgcacattttgatggtcagtcaataacttaagcagttaccaaaatactaggtatccaaggagcgagaggtgggcgagcataagaaacacatttctcatggcacagctctgccaaagccctgcagaatcatttacacataggtctttggttagtagcccctggcacagaattctgatcttaaacaaatattgtctataatcaagtagagcaatgcaattaaaaaaaaaaaaagcacaggttttggggccatgctgaaatcccagccttgctatttgctggctgagtgacc

SEQ ID NO: 15140 - DNA, 374 bp, Homo sapiens
gactactatagggcgaattggagctccaccgcggtggcggccgaggtgtacaagcttcgacccacgcgtccgggatgagtttgtatgtgtaaagtgcttgaaacagtgcctgccacatactaagtgttggataagtgtttgttattaaaaaaaaaaaaaaaaaaaagtgcggcctgccgcccgggcaggtactggcgtggattctgcataatggtgatcacacgttgcacctcatcctcagtgagttctcccgccctcttggagaggtcaatgtatgctttcctcaacaccacatgagcatattttcggcccacacccttaatggcagtgatggcaaaggctattttccgccgcccatcgatgttggtgttgag

SEQ ID NO: 15141 - DNA, 361 bp, Homo sapiens
cgactcactatagggcgaattggagctccaccgcggtggcggccgaggtattcaacaagggccctgagagagggacaggcagcccctgtgaatcttgctgttcagcagagacaggagtcagcacgtgtgagggcagcagggaagtcttcctggaggagtgagacctggcgatgaggaggcacggcagggaggtggaacaggcaggagagactcttcaggaattgaggagatagaatagaggacactaaagccttagagaggccaggggtggtggcttggcaggatcatcgcttgaggctaggagtttaaaagcagccctgtgcaacatagcgagaccccttctctaaacacaaaaaataaa

SEQ ID NO: 15142 - DNA, 385 bp, Homo sapiens
gtaatacgactactatagggcgaattggagctccaccgcggtggcggccgcccgggcaggtacccagtaatcacataaatctctgcatcatctgtttatttagcttaactgttttttttatttgttgaagctgttgttgttatttcagtctttttcttattgggttgaccagacttggtaaatctgtaagaaagttccataattatgggggaagatttcctctgattgggctaaattcctggtagctgaaaaaaaaaaaaaaaaaaaaaaggggggcccaccttggccggttttaaactaagggatcccccgggccggaagaattccattttaagcttattggttcccgcgaccctgagggggggccccggacccaacttttggt

SEQ ID NO: 15143 - DNA, 360 bp, Homo sapiens
gactcactatagggcgaattggagctccaccgcggtggcggccgcccgggcaggtcttcgacccatgcgtccgagcaaaattcaactaataatacaatctggattccatagccaagggttttatttacaatctcctagtaggaagtctttattttagctttcaatgtgttgaacttataaggaaatttaacgtatacatgagtattatatttatggaatgtgaagatatacagaatggaaatggtaaataatgtgaattcgtattgactttgaggaatcttagaatcatgtagccctgttgcaacaagaaatagggaacttctgaagaacagaagaacagatcaccttggagctctacta

SEQ ID NO: 15144 - DNA, 374 bp, Homo sapiens
tacgactcactatagggcgaattggagctccaccgcggtggcggccgaggtcaagcttcgacccacgcgtccggtttgtttttttcttacggcaactcaaagcaaagagctggaggagccagccattataattgcttactctcatcgcttagcgccccaggtgggatgtgtttccaaaacacatttttgtatttataaggaaatgtagttaggattaattttattgtcctaattagaactcacattttggttaaatcctcaatttcattaaaaaaaaaaaaaaaaaaaagtgcggccggccgctcgacctcggccgctctagaactagtggatcccccgggctgcaggaattcgatatcaagcttatcgatacc

SEQ ID NO: 15145 - DNA, 398 bp, Homo sapiens
gcgtaatacgactcactatagggcgaattggagctccaccgcggtggcggccgaggtgcttcgacccacgcgtccgacttaattgagaaggtggaatcctcctatccctgaactcgggggaatggaatctcgctgatcttccaggactagctccctgatcattccagcccctctgaacaacagggcccctggagatagaagtagtcctatttcaccccaactacaacattaatgggaaaaaagaagcaggaattcctgaattttatgactatgacgttgccctgatcaagctcaagaataagctgaaatatggccagactatcaggcccatttgtctcccctgcaccgagggaacaactcgagctttgaggcttcctccaactaccacttgccagcac

SEQ ID NO: 15146 - DNA, 368 bp, Homo sapiens
gtatacgactcactatagggcgaattggagctccaccgcggtggcggccgaggtacaacttctcttttttggagttttccttgcttctatcaagaaagacaattttcctgtttccatgacgttggagtttggctcacttccaacagggaaaaggagtgtttttttttgttttgttttgtttttcctgcttcttgaatggtagagagcagtctatagccagagactcgtccctaggtaagtaactgaattggggtttgtcttggttaaagttaagattaacgaccaactggtcttaatttctccttaccattagagcactcagttatcatataaattgtgccattgtttgttttgcctaactgtttttt

SEQ ID NO: 15147 - DNA, 388 bp, Homo sapiens
cgtaatacgactcactatagggcgaattggagctccaccgcggtggcggccgaggtcaaccgccagggtcaaacggaacacaacccactctcaggaagacatccctaacacaaatccagggactttgtttcttaaccttaaaattggaaacacttcttgctaccagggatggggggtggggctcagcgtttggggaaacggagtgggagtcttttgctgaaccggacgcgtgggtcgaagctggacctgcccgggcggccggccgcacttttttttttttttttttttgagagtggctatttcattaagatttaatagttttttttggactaagtagtggaaaaacttttatacttaactgagacattttgtcaaggctaaaaaaaag

SEQ ID NO: 15148 - DNA, 367 bp, Homo sapiens
cgactcactatagggcgaattggagctccaccgcggtggcggccgaggtacatcccactatttcttttcttttagctagaaaggtataacgttaaaacccttttaccaaataaaatgattttatttagaaaatgccgggcactaaaaaaaaaaaaaaaaaaaaaaaagtacggccgctctagaactagtggatcccccgggctgcaggaattcgatatcaagcttatcgataccgtcgacctcgagggggggcccggaacccagcttttgttccctttagtgagggttaattgcgcgcttggcgtaatcatggtcatagctgtttcctgtgggaaattgttatccgatcacaattccacacaacata

SEQ ID NO: 15149 - DNA, 379 bp, Homo sapiens
ctcactatagggcgaattggagctcaccgcggtggcggccgaggtacctattttgtatatgtgagatgtttaaataaattgtgaaaaaaatgaaataaagcatgtttggttttccaaaaaaaaaaaaaaaaaaaagtgcggccggccgctacctgcccgggcggccgctctagaactagtggatcccccgggctgcaggaattcgatatcaagcttatcgataccgtcgacctcgagggggggcccggtacccagcttttgttccctttagtgagggttaattgcgcgcttggcgtaatcatggtcatagctgtttcctgtgtgaaattgttatccgctcacaattccacacaacttacgagccgggagcataaagtgt

SEQ ID NO: 15150 - DNA, 385 bp, Homo sapiens
cgtaatacgactactatagggcgaattggagctccaccgcggtggcggccgaggacaatgctgtagataatgcagcccatgcaatacacccaagaacactagagtcctacacccaagtacaatatgataaagcagccctctgcaagtggtgctggataccactaagaagtctactgcagccatgttggttatgattttccatgcagaagggtacagttagttcatatttatgtattgcacataatcatgctattcagcattgatgctatattgtattatgtaaataataaaagccatgtacagagggaaaaaaaaaaaaaaaaaaaaaagggcggccgctctagaactagtggatcccccgggctgcaggaattcgatatcaagc

SEQ ID NO: 15151 - DNA, 368 bp, Homo sapiens
agggcgaattggagctccacgcggtggcggccgaggtattcgacccacgcgtccgtagtttttatctttgaccaaccgaacatgaccaaaaaccaaaagtgcattcaaccttaccaaaaaaaaaaaaaaaaaaaaaaaagtgcggccgctctagaactagtggatcccccgggctgcaggaattcgatatcaagcttatcgataccgtcgaccttgagggggggcccggtacccagcttttgttccctttagtgagggttaattgcgcgcttggcgtaatcatggtcatagctgtttcctgtgtgaaattgttatccgttcacaattccacacaacatacagagccgggagcataaagtgtaaagcct

SEQ ID NO: 15152 - DNA, 281 bp, Homo sapiens
actactatagggcgaattggagctccaccgcggtggcggccgaggtcttgagtcgacccacgcgtccgagtcaagagaacagcacattagttccagaagaaagatggaaattctgaaaactgaatgtcaagaaaaggagtcaagaacaattcacagtatgagaagaaaaatggaaaaaaaaactttatttaaaaaagaaaaaagtccagattgtagttatacttttgcttgtttttcagtttccccaacacacagcagatacctggtgagctcagatagtc

SEQ ID NO: 15153 - DNA, 349 bp, Homo sapiens
gactactatagggcgaattggagctccaccgcggtggcggccgctgttcgtatttcttattctacaacaagggtcagcctacaggcaaaacacatcccattgtcatttttttgtaaataaagttgtattggaacatggccactctcatttgttttctattatttatggctgctttcacttacaacctgagtggttgccgcagaaactgtatggcctgcaaagtctaaaatatttactatgtagctttttcttttctttttggagacagtgtgccactctattgcccaggctggagtgcggtggtgtgatcatggctcattgcagcctcaaactcctgggctcaagcaat

SEQ ID NO: 15154 - DNA, 570 bp, Homo sapiens
  misc_feature 196: n = A,T,C or G
tagggcgaattggagcttcaccgcggtggcggccgaggtcaagcttcgacccacgcgtccggaaaatgttttttttttttaatttaaggtttaaaattcctttgccaaatcaaaaaaaaaaaaaaaaaaaataaaacggttgcttgcctggtcggtcggccggacttactttttttttttttttttttttttttancaggcaggcaggttgtattttttttttttttggctggttttctttaaaaaaaatttttttttttgaagtatgtttttatgattttttttttttttttctattttttttttaataggttgggtttgtttggttttatttttttttacccctcttcctctttttttttttttatataggtttgctccccccctccgtgtggggtatgttatttttttattttcttttttttttccccttcctctctctcttggggggggggcctcccccccctccttttttttttttttttttttgtggggggatatttttctccccttgctttatttttttgttatatattttttttctttttttggaaattttttttttttttt

SEQ ID NO: 15155 - DNA, 477 bp, Homo sapiens
ctactatagggcgaattggagctccaccgcggtggcggccgcccgggcaggtcttgagtcgacccacgcgtccgataaaacaccgccttcagtgtaaaaattttacatggtatctgaacaacatttatccagaggtgtatgtgccagaccttaatcctgttatatctggatacgtgagtattttcctgttccttttttaattaatatactccttgccaccaacctttatgtggttctaagaaaattgctgaaatactttctttattgcttttgagattttacattataatcattaacattactttctaaattattttaaaaatatataaatcacatggattaaaaaacttttcataacttgaaaattttcctttagattaaaagcgttggtcagcctctatgtctggatgttggagaaaacaatcaaggaggcaaaccattaattatgtatacatgtcatggacttgggggaaacca

SEQ ID NO: 15156 - DNA, 201 bp, Homo sapiens
agggcgaattggagctccaccgcggtggcggccgaggtcttttttttttttttttttttaatggttaagctactcaaattgttttcagagccagagtaaaaaccaaaaaaaatactcatcaatatcaattgccaaattcagtctgaaaacatttcacacacagcttacccaagtataaagctgctgcgggacttctgaaaa

SEQ ID NO: 15157 - DNA, 136 bp, Homo sapiens
tatagggcgaattggagctccaccgcggtggcggccgaggtgtcattttatttttacgttgttagatatggggagtagtgtgattgaggtggagtagattaggcgtaggtagaagtagaggttaaggagggtgatg

SEQ ID NO: 15158 - DNA, 479 bp, Homo sapiens
cgactactatagggcgaattggagctccaccgcggtggcggccgaggtcaagcttcgacccacgcgtccggcctgggacagatccttagtctttccttgacttttatgacccagaggtgaaaggccaaatgttttgtagaatgtccttaaacttgggtttatctgaggtttccttgtgattgaattcaggttagacatctttgatgggactgtcatagaactgatgctgtgttctaattgcatcttatcaggtgacttatgatttctgtttgtcccattattgatgctgttacttagatcacttgattaaggtggtgtctgcctggcttctccagtgtgaaatttcttttcttctttgtaatattttgtggggaagtaactttaagactatgtaactgtttcatttcttttcttttcttttgagacagggtctggctctgttgcccagcctaaagtgcaatggtgcaatcacaccttac

SEQ ID NO: 15159 - DNA, 369 bp, Homo sapiens
ctactatagggcgaattggagctccaccgcggtggcggccgaggtgtacaagcttcgacccacgcgtccgaaagattcttggctgagcatggtggctcatgtctgtcatctcagcaatttgggaggcaagggcaggaggatagtttgagcccatgagtttgagaccagcctggacaacatagtgagaccccatctcagcaaaaaaaaaaaaaaaaaaaaaaaaaaaaaggtgcggccggccgcccgggcaggtacatgactatatcaggatttcaaattgaggaaaccattgaccgcgagacttctggcaatttagagcaactactccttgctgttgtgaaatctattcgaagtatacctgcctacctt

SEQ ID NO: 15160 - DNA, 235 bp, Homo sapiens
gactcactatagggcgaattggagctccaccgcggtggcggccgaggtacctattaagctcatgaaccatagaggtatctcggtggcccctcattaccatctgctgttctttcagctgtttagctacatctttggctgaggaaccagacacttcaatccatgtcttagagaagaatgcacatgaccccaacatgaagatgatataaacaacgacatggacaggatcctcaaagat

SEQ ID NO: 15161 - DNA, 219 bp, Homo sapiens
gactactatagggcgaattggagctccaccgcggtggcggccgaggtggccgcactttttttttttttttttttgaaaatagtttattattttattgttttttgtttatacatgttaagtttcaactttcaataataaaattcaataaatttgattccttaatcataaaaacttgctttacacattagttacatgttgtcaaagtccatacaaaacatc

SEQ ID NO: 15162 - DNA, 400 bp, Homo sapiens
ctatagggcgatttggagctccaccgcggtggcggccgcccgggcaggtcaagcttcgacccacgcgtccgataatttatactaaatttagtaaaatggacttcttattcaaagcatcaataattaaaagaattattttaaaaaaaaaaaaaaaaagtgacctcggccgctctagaactagtggatcccccgggctgcaggaattcgatatcaagcttatcgataccgtcgacctcgagggggggcccggtacccagcttttgttccctttagtgagggttaattgcgcgcttggcgtaatcatggtcatagctgtttcctgtgtgaaattgttatccgctcacaattccacacaacatacgagccgggagcataaagtgtaaagcctggggtgcctaat

SEQ ID NO: 15163 - DNA, 447 bp, Homo sapiens
tatagggcgaattggagctccaccgcggtggcggccgaggacaagcttcgacccacgcgtccgcttaatagcaaaggataattgaaatcccaaacttacaaggttttcaacaaaagtgaagtttgcttaaagttaacagtgtaacatgtattatggtaacttctaatcttgtggccttagacagtctagtccaaaggcataaagaaagtttgctttaaaaaaaaaaaaaaggaatggttatcttcaaaaaaaaaaaaaagtggggggagacagaatttatgtaaaaagagtgttatatggtaaattcttgtcctgaaataaactaactggtgtttaaagaaaaaaaaaaaaaaaaaaggtgcggccgctctagaactagtggatcccccgggctgcaggaattcgatatcaagcttatcgataccgtcgaccttgagggggggcccg

SEQ ID NO: 15164 - DNA, 221 bp, Homo sapiens
cgactcactatagggcgaattggagctccaccgcggtggcggccgcactttttttttttttttttttttttacctgaaaatgcttattctagcttcacatttgattgtttggctaagaagaaaattatttattagacttaattttcctcacgagtttaaagattgcttcagatcttaaacttctaatgaggaaagctgagaagtccaatgccattctgatt

SEQ ID NO: 15165 - DNA, 264 bp, Homo sapiens
cactactatagggcgaattggagctccaccgcggtggcggccgcactttttttttttttttttttttttttttgaaatgtttgaagttaactcattttatttctaggatttggatttcaacattttaatttctttggaatataagtcactttttgcaagctaaaaaatagaatcaaactaaggtgatctagtcctctaggcatccaggctgatccttggaatcatgagcagaatgatgacatactacaaggtgctagcaatacg

SEQ ID NO: 15166 - DNA, 187 bp, Homo sapiens
ggcgaattggagctccaccgcggtggcggccgcactttttttttttttttttttttttttttttttattggtatttagtttttatttcataatcataaacttaactctgcaatccagctaggcatgggagggaacaaggaaaacatggaacccaaagggaactgcagcgagagcacaaaagattcta

SEQ ID NO: 15167 - DNA, 480 bp, Homo sapiens
ctactatagggcgaattggagctccaccgcggtggcggccgcccgggcaggacacaggaggccttattacttttaaattatacaacattttttgcttaaaatttttttaataaaattttttcttttatgacttttgcagacaattttttaaacatgttttaactttttgacttattacaaacattcttttctttaaacaaccagttaatttatttcaggacaagaatttatcatataactctttttatataaattctgcctctcccctttatttttgaagataaccattgtttttttaaagcaaactttctttatgtgttttgactagactgtctaaggccacaagattagaagttaccataatacatgttacactgttaacttttagcaaacttcacttttgttgaaaaccttataagtttgtgatttcaattatcctttgctattaataagaccttgttcagtctaaattaacttaaa

SEQ ID NO: 15168 - DNA, 376 bp, Homo sapiens
actcactatagggcgaattggagctccaccgcggtggcggccgaggtcaagcttcgacccacgcgtccgggagaattacccgaaaaacaaccacactgcttcaatcctggacaggatgcaggcagattttaagtgctgtggggctgctaactacacagattgggagaaaatcccttccatgtcgaagaaccgagtccccgactcctgctgcattaatgttactgtgggctgtgggattaatttcaacgagaaggcgatccataaggagggctgtgtggagaaagattgggggcttggctgaaggaaaaaatgtgcttggttggtaagctgcagcaagccctttggaatttgcttttttgtcgagggtttttgggaa

SEQ ID NO: 15169 - DNA, 392 bp, Homo sapiens
tacgactactatagggcgaattggagctccaccgcggtggcggccgcccgggcaggtgccgcacttttttttttttttttttttttttttagaatttagccacttctcaggccttcttccccataatttggaactttcctttggatttgatcaagttggatagagttgatcaaaccctgatcaagttggatagagttgatcaaacccaatgggaaaaagaccaaaacaacaataaaaaacagacaacaacaacaaaaaacagttaggcaaaacaaacaatggcacaatttatatgataactgagtgctctaatggtaaggagaaattaagaccagttggtcgttaatcttaactttaaccaagacaaaccccaattcagttacttacctagg

SEQ ID NO: 15170 - DNA, 481 bp, Homo sapiens
acgactcactatagggcgaattggagctccaccgcggtggcggccgaggttacaagcttcgacccacgcgtccgcgaaagcgaagaaggaagctcctgcccctcctaaagctgaagccaaagcgaaggctttaaaggccaagaaggcagtgttgaaaggtgtccacagccacaaaaagaagaagatccgcacgtcacccaccttccggcggccgctctagaactagtggatcccccgggctgcaggaattcgatatcaagcttatcgataccgtcgacctcgagggggggtcccggtacccagcttttgttccctttagtgagggttaattgcgcgcttggcgtaatcatggtcatagctgtttcctgtgtgaaattgttatccgctcacaattccacacaacatacgagccgggagcataaagtgtaaagcctggggtgcctaatgagtgagctaactcacattaattgcgttgcgctca

SEQ ID NO: 15171 - DNA, 151 bp, Homo sapiens
tatacgactcactatagggcgaattggagctccaccgcggtggcggccgcccgggcaggtactttttctaatatacttttctattacacatgaaaggcatgacagtgaactgagataagattctttgtgttttgaaacatcttatctacta

SEQ ID NO: 15172 - DNA, 464 bp, Homo sapiens
cactactatagggcgaattggagctccaccgcggtggcggccgaggtacttcaaagttattgcacatacacttgtttactttgtatgttttgcaggattaaactttgtataatctttttacaaaatttttttttcagtatgcaagcttgcaagatgaaaataaaacctgtttgcctgataaaaaaaaaaaaaaaaaaaaaaaaaaaaatgtgcggccgctctagaactagtggatcccccgggctgcaggaattcgatatcaagcttatcgataccgtcgacctcgagggggggcccggtacccagcttttgttccctttagtgagggttaattgcgcgcttggcgtaatcatggtcatagctgttttcctgtgtgaaaatgttatccgctcacaattccacacaacatacgagccgggagcataaagtgtaaagcctggggtgcctaatgagggagctaactc

SEQ ID NO: 15173 - DNA, 421 bp, Homo sapiens
cactactatagggcgaattggagctccaccgcggtggcggccgaggtagctgattacaccaacttgaatgaaacgacttctcttgtgaactatcaaggggccgccagaatcacctctgcaagtattggggtcagcatagggactcactcctccagtacaaaggaaccgaggggtgaccacctctgagatgtccttgactttgtcatagcctggggcatattgagcatctctctcacagctgcctttcttatccccattcttgatgtagaccggccgcccgggcaggtgcacatacaccaaatgtctgaacctgcggttcctctcgtactgagcaggattaccatggcaacaacacatcatcagtagggtaaaactaacctgtctcacgacggtctaaacccagctcacgttccctattagt

SEQ ID NO: 15174 - DNA, 288 bp, Homo sapiens
tacgactactatagggcgaattggagctccaccgcggtggcggccgcacttttttttttttttttttttaagaaatagggtctcactctgtcccccaggctggagccattatagctcactacagcttctgactcctaggctcaagggatcctgccacctcagcctccctggtagctgggactataggcaggagatcgcttgaaccgggaggcggaggttgctgtaagctgagatcgcgccattgctttccagcctgggtgccagagcaaaactctgtctcaaaaaaaa

SEQ ID NO: 15175 - DNA, 455 bp, Homo sapiens
cgactcactatagggcgaattggagctccaccgcggtggcggccgcactttttttttttttttttttcctttggagacacagtctcactcttgcccaggttggtctaaaactcctgggctcaagcaatcctcccgctttcagcctcccaaagtgctggggttacagccgtgtgccactgtgtctggcccttttctttttcataggagaagggttgttgactcccaggaaacgtcacctggaaccaagaatgtgaactcaaggacccccgcctgttggcagctgcatttacttgactcctgttcactgtttcttagccttgtcctttctctcctgccagttctaggggacactgcttctcctggttgacctcatcaatgcccaaccagtggttctcaaggtgtggtccctggagcaacaggatcagcctcgctgggagcttgttagagatgcaagc

SEQ ID NO: 15176 - DNA, 461 bp, Homo sapiens
atacactactatagggcgattgagctccaccgcggtggcggccgggtttaagaccagcctggccaacatggtgaaaccccatctctactaaaaatataaaaatcagccgggcatggtggcatgtgcctgtaatcccagctactcaggagtctgaggaggagaatcacttgaacctggaggcagaggttgcagtgagtcgaggttgcgctactgcactccagcctggacaacagagggagactctgtctcaaaaaaaaaaaaacctacagctgttcaaggaccagctgacaggtcaagtgtggccttttctggtctttgaacacatcatagaaagtgacaaatgctgcaaagccatgaagaacatgaactataaacgggtagactaactgcccagcttagacacttatctatgccacaaaacagctgaatttgtcacatttatatattgcaatatgggaagt

SEQ ID NO: 15177 - DNA, 353 bp, Homo sapiens
tacgactactatagggcgaattggagctccaccgcggtggcggccgaggtcttcgacccacgcgtccggtggcttatgcctgtaatcccagcactttgggaggccgaggcaggcggatcacaaggtcaagagatggagaccatcctggccaacgtggtgaaaccccatctctactaaaaatacaaaaagtagctgggcgtggtggcacacgcctgtagtcccggctactcgggaggctaaggcaggagaatcgcttgaacctgggaggcggaggttgcagtgagcggagaccacgtcgctgcactccagcctggtgacagaccgagactctttttcaaaaaaaaaaaaaaaaa

SEQ ID NO: 15178 - DNA, 496 bp, Homo sapiens
tacgactcactatagggcgaattggagctccaccgcggtggcggccgaggtcaagcttcgacccacgcgtgcgcaatttttaggcccacaaggagtcaagcacctcaaggagatcttcagtttgaacttggtgtagacacagggatactgatgaatcaatattcaaattagctgttacctacttaagaaagagaggagaccttggggatttcgaggaaggctctagaactagtggatcccccgggctgcaggaattcgatatcaagcttatcgataccgtcgacctcgagggggggcccggtacccagcttttgttccctttagtgagggttaattgcgcgcttggcgtaatcatggtcatagctgtttcctgtgtgaaattgttatccgctcacaattccacacaacatacgagccgggagcataaagtgtaaagcctggggtgcctaatgagtgagctaactcacattaattgcgttgcgctcactgcccgctt

SEQ ID NO: 15179 - DNA, 499 bp, Homo sapiens
tacgactactatagggcgaattggagctccaccgcggtggcggccgaggtacttagagtcgggatgcacaacttcaaccaccgacttatcaatgcagccgcctgtgtattgcaattggccgttaccttaagcactgagccacccgggtttagttcagccatttcaagaagtatatttaacgtcggtagttctgctttattaaaatgcagcagaggtacctgcccgggcggccggccgcacttttttttttttttttttttaatgaaattgaggatttaaccaaaatgtgagttctaattaggacaataaaattaatcctaactacatttccttataaatacaaaaatgtgttttggaaacacatcccacctggggcgctaagcgatgagagtaagcaattataatggctgactcctccagctctttgctttgagttgccgtaagaaaaaaacaaaccggacgcgtgggtcgaagcttgacctcggccgctctagaacta

SEQ ID NO: 15180 - DNA, 498 bp, Homo sapiens
acgactactatagggcgaattggagctccaccgcggtggcggccgctacctgcccggcggccggccgcccgggcaggtcttcgacccacgcgtccgaactaattggctttttagaaacaccccacaaaagctcagaaattggctttaaaaaaacaaccaccaaaaaaaatcaattggctaaaaaaaaaaaaaaaaaaaaaagtgggccgctcacctcggccgctctagaactagtggatcccccgggctgcaggaattcgatatcaagcttatcgataccgtcgacctcgagggggggcccggtacccagcttttgttccctttagtgagggttaattgcgcgcttggcgtaatcatggtcatagctgtttcctgtgtgaaattgttatccgctcacaattccacacaacatacgagccgggagcataaagtgtaaagcctggggtgcctaatgagtgagctaactcacattaattgcgttgcgctcactgcccgctt

SEQ ID NO: 15181 - DNA, 498 bp, Homo sapiens
ctactatagggcgaattggagctccaccgcggtggcggccgcccgggcaggtcttcgacccacgcgtccggacagctcgtgtccacaggggtcatggggtctcttgctgctaggattctggagtttcatggtaagagcgggccactccccacctattcaactcaccccttccccaggagttaatgggggctagtaaggaatgctagtgcttggaagccctgtgcaggcttctgagattcctgccccctcagcccatgctctgcatcctcccttcatccaccctcaatgttttccttcaaaagatctgctcagagtgtgccagtcttcccaaattcctggtctctccatgagagatgttcttcctggctgcttctagttggccatctggtcttgagtcctctgtacctcggccctctagaactagtggatcccccgggctgcaggaattcgatatcaagcttatcgataccgtcgacctcgagggggggcccggtaccc

SEQ ID NO: 15182 - DNA, 385 bp, Homo sapiens
atacactcgactactatagggcgaattggagctccaccgcggtggcggccgcacttttttttttttttttttttttttttttttgggtttctctttgaaaggttattggtttctttaaaaaaaaaaaaacctataccttttatattttacattcacctctcagaatatttaatgggacctgcccgggcggccgctctagaactagtggatcccccgggctgcaggaattcgatatcaagcttatcgataccgtcgacctcgagggggggcccggtacccagcttttgttccctttagtgagggttaattgcgcgcttggcgtaatcatggtcatagctgtttcctgtgggaaattgttatccgctcacaattccacacaacatac

SEQ ID NO: 15183 - DNA, 381 bp, Homo sapiens
tacgactactatagggcgaattggagctccaccgcggtggcggccgaggtactgagcaggattaccatggcaacaacacatcatcagtagggtaaaactaacctgtctcacgacggtctaaacccagtagaaacaaagtgcggccgctctagaactagtggatcccccgggctgcaggaattcgatatcaagcttatcgataccgtcgacctcgagggggggcccggtacccagcttttgttccctttagtgagggttaattgcgcgcttggcgtaatcatggtcatagctgtttcctgtgtgaaattgttatccgctcacaattccacacaacatacgagccgggagcataaagtgtaaagcctggggtgcctaatgagt

SEQ ID NO: 15184 - DNA, 412 bp, Homo sapiens
tacgactactatagggcgaattggagctccaccgcggtggcggccgaggtactttaaagttattttagtcatgaaattttatatgcagagagaaaaagttaccgagacagaaaacaaatctaagtcgagcggccgctctagaactagtggatcccccgggctgcaggaattcgatatcaagcttatcgataccgtcgacctcgagggggggcccggtacccagcttttgttccctttagtgagggttaattgcgcgcttggcgtaatcatggtcatagctgtttcctgtgtgaaattgttatccgctcacaattccacacaacatacgagccgggagcataaagtgtaaagcctggggtgcctaatgagtgagctaactcacattaattgcgttgcgctcactgcccgcttt

SEQ ID NO: 15185 - DNA, 446 bp, Homo sapiens
cactactatagggcgaattggagctccaccgcggtggcggccgaggtttaagaccagcctggccaacatggtgaaaccccatctctactaaaaatataaaaatcagccgggcatggtggcatgtgcctgtaatcccagctactcaggagtctgaggaggagaatcacttgaacctggaggcagaggttgcagtgagtcgaggttgcgctactgcactccagcctggacaacagagggagactctgtctcaaaaaaaaaaaaacctacagctgttcaaggaccagctgacaggtcaagtgtggccttttctggtctttgaacacatcatagaaagtgacaaatgctgcaaagccatgaataacatgaactataaacgggtagactaactgcccagcttagacacttatctatgccacaaaacagctgaatttgtcacatttatatat

SEQ ID NO: 15186 - DNA, 365 bp, Homo sapiens
tactatagggcgaattggagctccaccgcggtggcggccgaggtacagataggtaggattccagtctggagaaacccctaaaccactacaccctgcctcagagtagggaagaattttcagtatgtatgtggagacaggctcggacgcgtgggtcgaagacctgcccgttcggccgctctagaactagtggatcccccgggctggaggaattcgatatcaagcttatcgataccgtcgacctcgagggggggcccgggacccagctgttgctgcctttagtgagggttaattgcgcgcttggcgtaatcatgggcataggtgttttctgagagaaaatgctatccgttcacaattccacacaacat

SEQ ID NO: 15187 - DNA, 451 bp, Homo sapiens
tactatagggcgaattggagctccaccgcggtggcggccgaggtctgattacaaaaatttaaaaaatagcaacttcaggcataaagggttaaggggcagatcttcacaaactccacacaagccagcaagcacagcacctgcccgggcggccgctctagaactagtggatcccccgggctgcaggaattcgatatcaagcttatcgataccgtcgacctcgagggggggcccggtacccagcttttgttccctttagtgagggttaattgcgcgcttggcgtaatcatggtcatagctgtttcctgtgtgaaattgttatccgctcacaattccacacaacatacgagccgggagcataaagtgtaaagcctggggtgcctaatgagtgagctaactcacattaattgcgttgcgctcactgcccgctttccagtcgggaaacctgtcgtgc

SEQ ID NO: 15188 - DNA, 450 bp, Homo sapiens
tactatagggcgaattggagctccaccgcggtggcggccgcactttttttttttttttttttttttaacctttccttatgagcatgcctgtgttgggttgacagcgagggtaataatggcttgttggttgattgtagcggacgcgtgggtcgaagcttgaccttggccgctctagaactagtggatcccccggtctgcaggaattcgatatcaagcttatcgataccgtttaccttgagggggggcccggtacccagcttttgttccctttagcgagggttaattgcgcgcttggcgtaatcatggtcatagactgtttcctgtgtgaaattgttatccgctcacaattgcacacaacatacgagccgggagcataaagtgtaaagcctggggtgcctaatgagcgagctaactcacattaattgcgttgcgctcactgtccgcttttca

SEQ ID NO: 15189 - DNA, 335 bp, Homo sapiens
gcgaattggagctccaccgcggtggcggccgagcttgtacagtatgtgaagaagttgcacctcagagctgatcatgatcaagttaaaaacaccagacatacattatacgtctaataaatttccttcaggtcatgaccagcatgaaaaaatcagacacagacactcagcaaccattctgtaaatgtgtacctcggccgctctagaactagtggatcccccgggctgcaggaattcgatatcaagcttatcgataccgtcgacctcgagggggggcccggtacccagcttttgttccctttagtgagggttaattgcgcgctttggcgtaatcatgg

SEQ ID NO: 15190 - DNA, 327 bp, Homo sapiens
tatagggcgaattggagcctccaccgggggggcggccgagggcctgatctaactgctgccaagacatgccaaggtcaccagcttcccgtcctgaccaacagccacctctcagaaggctggcttaactactcagccccagtcttcttagcagatggcaaggagctctggccaagattttagtctaaacagaaccctaggctgctgatgcaacatcaagcacagtataaggtcacccctttgcggggggacggctactgaaccctggcattccaattagaaacgtgtttcaaggacacagttactccggcctcagaactctccaatgtg

SEQ ID NO: 15191 - DNA, 210 bp, Homo sapiens
cggcggccggcgtacccccgggatgtggtttaagtggattactgcctagctgagccaaaatgtttgcttgtacctcggccgctctagaactagtggatcccccgggctgcaggaattcgatatcaagcttatcgataccgtcgacctcgagggggggcccggtacccagcttttgttccctttagtgagggttaattgcgcgcttggcgt

SEQ ID NO: 15192 - DNA, 262 bp, Homo sapiens
ctactatagggcgaattggagctccaccgcggtggcggccgaggtgcggccggccgcccgggcaggtcacgcgtccggcctgctgctttggacatgatgctgactggtagaagcattcgtgcagacagggcaaagaaaatgggactggttgaccaactggtggaacccctgggaccaggactaaaacctccagaggaacggacaatagaatacctagaagaagttgcaattacttttgccaaaggactagctgataagaaga

SEQ ID NO: 15193 - DNA, 362 bp, Homo sapiens
catgcatggaacacatataccaaacatctttctgataacattaaacatttttaaaagatgttaaatgttcttttcattgtggtgcttcagattcctgattctagaacttgtgtgtgtggaacctgtgtgctaactattctgttggaatttaccagcaaagaattatctaagaattttcaaactaaatgatgggggaaggaactaacatttttgcagtccctggaaatgtaaaatgttgtacctgcccgggcggccgctctaaactagcggatcccccgggctgcaggaattcgatatcaagcttatcgataccgtcgacctcgagggggggcccggtcccagcttttgttccctttatgagg

SEQ ID NO: 15194 - DNA, 461 bp, Homo sapiens
actactatagggcgaattggagctccaccgcggtggcggccgcactttttttttttttttttttttttttttttggggtttctctttgaaaggttattgttttctttaaaaaaaaaaaaaacctataccttttatattttacattcacctctcagaatatttaatggtacctgcccgggcggccgctctagaactagtggatcccccgggctgcaggaattcgatatcaagcttatcgataccgtcgacctcgagggggggcccggtacccagcttttgttccctttagtgagggttaattgcgcgcttggcgtaatcatgggcatagctgtttcctgggtgaaattgttatccgctcacaattccacacaacatacgagccgggagcataaagggtaaagcccggggtgcctaatgagggagctaactcacattaattgcggtgcgctcactgcccgctt

SEQ ID NO: 15195 - DNA, 427 bp, Homo sapiens
cactactatagggcgaattggagctccaccgcggtggcggccgaggtcaagcttcgacccacgcgtccgatcctcttctgctgttctggaaagaaacagaccagtggtatggagtataagaaaactgatgcacctcaaccggatgtgaaggaagaggaagaagagaaggaagaggaaaaggacaagggagatgaggaggaggaaggagaagagaaacttgaagagaatcatgctgttgcatttagaactttctgctttgcacaggaaagagtcacacaattaatcaacatgtatattttctctatacatagagctctatttctctacggttttataaaagccttgggttccaaccaggcagtagatgtgcttctgaaccgcaaggagcaaacactgaaataaaatagtttatttacctgcccgggcg

SEQ ID NO: 15196 - DNA, 355 bp, Homo sapiens
ctatagggcgaattggagctccaccgcggtggcggccgcacttttttttttttttttttttgtatttttagtagagatgaggtttcaccatgttgaccaggctggtctcgaactcctgacctcaggtgatccacccacctcagcctcccaaaatgctgggattacagcgtgagccaccaggcccggccaatttttgtaacttttacaaagatatttaatttaaaatcgattttaataaaaggtagacatccaaaaacacaggatgatgaatgcacttcaatgttaggggaatatctttaaaactgattattgtcaaacattaaatccatataacccaagcaaactgcacacacct

SEQ ID NO: 15197 - DNA, 491 bp, Homo sapiens
atagggcgaattggagctccaccgcggtggcggccgaggtgttcactttaaacaaaaaatgtttacttctaaggatatagcacaaagggaacataatatacagataaatgagaagtttcgattctgcatcaagcattattcaatcggacgcgtgggtcgaagcttgtaaacctgcccgggcggccgctcgaggccgcactttttttttttttttttttgagacggagtctcgctctgtcacccaggctggagtgcagtggcgcaatctcggctcactgcaacctccacctcccaggttcaagtgattctcctgcctcagcctcctgagtagctgggattacaggcacccaccaccacacctggctaatttttgtatttttagtagagacgaaggtttcaccatgttggccagagctggtctcaaactcctgacctcaggcgatctacccgcctaagcctcccaaagtgcttggatgacaggcgtgagacac

SEQ ID NO: 15198 - DNA, 384 bp, Homo sapiens
ctatagggcgaatgggctctacacgcggggtggcggccgaggtcaagcttcgacccacgcgtccgcaaaaattagccaggtgtggtggcacactcctgtaatcccagctactcaggaggctgaggcaggagaatcgcttgaatccaggaggtggaggttgcagtaagccgagaacctactgcactctggcctgggcgacagagcaagactgtcttgggaaaaaaaaaaaaaaaaaagtgcggccgaccgaccgggcaggtcctagcttgagtcgacccacgcgtccgtgcctggcctgcttgttgttttcatctcatcctgatttccaaatacaggatagaagccgaattggtgttcactaacaagcacaggaactttgttata

SEQ ID NO: 15199 - DNA, 425 bp, Homo sapiens
cactactatatgggcgaattggagctccaccgcggtggcggccgacgaccaattgataaaatagctctagggaaagttatcttatttagcattagctccctcacaacttttttcattcatacttctattggccagtctcatacctgaagtattttaaatgagtttacaattatttcacttaccttcagaaaaaaaaaggaacaaaaactcttaatgactggtaacatgcaaatttgatgtagaaatattattgtttaaaatttatatatttctatttatttttattaatttattattcacacattatttcacttatctttactgaattatattgaatgtggttttattcctgtgtatctaccacttatatgataaaattgataatcatttaaacataatttaaatacatatggagacgtattttc

SEQ ID NO: 15200 - DNA, 439 bp, Homo sapiens
tactatagggcgaattggagctccaccgcggtggcggccgcacttttttttttttttttttttttttttttttggttttctctttgaaagtttattgttttctttaaaaaaaaaaaaaaacctataccttttatattttacattcacctttcaaaatatttaatggtacctgcccgggcggccgctttagaactagtggatcccccgggctgcaggaattcgatatcaagcttatcgataccgtcgacctcgagggggggcccggtacccaaattttgttccctttagggagggtgaattgcgcgcttggcgcaatcatggacatagctgtttcctgtgtgaaaacgttatccgctcacaattgcacacaacatacgagccgggagcataaagtgtaaagcctggggtgcctaatgagtgagctaactcacattaattg

SEQ ID NO: 15201 - DNA, 495 bp, Homo sapiens
ctactatagggcgaattggagctccaccgcggtggcggccgaggtcaagcttcgacccacgcgtccgtggtgaacacagagaagacagtcttgtatatattcctctgtattctggggagctttgaccttggagctttgtacctgcccgggcggccgctctagaactagtggatcccccgggctgcaggaattcgatatcaagcttatcgataccgtcgacctcgagggggggcccggtacccagcttttgttccctttagtgagggttaattgcgcgcttggcgtaatcatggtcatagctgtttcctgtgtgaaattgttatccgctcacaattccacacaacatacgagccgggagcataaagtgtaaagcctggggtgcctaatgagtgagctaactcacattaattgcgttgcgctcactgcccgctttccagtcgggaaacctgtcgtgccagctgcattaatgaatcggccaacgcgcggggagaggcg

SEQ ID NO: 15202 - DNA, 172 bp, Homo sapiens
cgcgtatacgactactatagggcgaattggagctccaccgcggtggcggccgcccgggcaggtctactcaagtagtctttaccccctactcaagtagggggtaaagtgtagaacaaggagtttgatctgtgttcaactgattgtgaaccatcaattgagataactcactacc

SEQ ID NO: 15203 - DNA, 365 bp, Homo sapiens
  misc_feature 35, 212: n = A,T,C or G
gactcactctagggcgaatacagctccaccgcggnggcggccgaggttgacatgtcacaggcaggaatactggccagcttaaaacttatgctatctgcggggccatttttaggatgggtgagtcagatgattccattctccgattggccaaggccgatggcatcgtctcaaagaacttttgactggagtgttcacagatgttgtatattcgncataaatgaataatgaaaaacctacccgggcggccgctctagaactagcggatcccccgcgctgcaggaattcgatatcaagcttatcgataccggcgacctctagggggggcccggtacccagctcttgctgcctttagtgagggctaattg

SEQ ID NO: 15204 - DNA, 383 bp, Homo sapiens
agcgcgcgtaatacgactactatagggcgaattggagctccaccgcggtggcggccgaggtattcgacccacgcgtccgtagtttttatctttgaccaaccgaacatgaccaaaaaccaaaagtgcattcaaccttaccaaaaaaaaaaaaaaaaaaaaaaaaaagtgcggccggccgcccgggcaggtaccagtagcaacatatgagtatttctctagataacttttttttgacaaggtctcactctgttgcccaggctggagtgcaatggtgcaatcttggctcactgcagccttgaccttccctagctcagctgaacctcccatctcaggacaccattgcctccactgcccatcctgcatctgcctgcctaccccaaaag

SEQ ID NO: 15205 - DNA, 399 bp, Homo sapiens
gcgtaatacgactactatagggcgaattggagctccaccgcggtggcggccgaggtacattttcactcctgctctaaaacttgcctcagtctctcactgtgccttatgcccctcagctgaattctttcttctgagcaggcaggaattgaggttgctgcagacgtgtatgcatttgccaccagtaacatacttggtgccacatgactaggatatgttctctagtgctaacatgttcgtttacagttcttaggactccctgatagaaaaaaacacaaaaaaaaacacaaaaaaacccaaccaaccaaacaaacaaacaaaaaaaaacacaggagtttctcccaaaaagaagtctgcagtgtcttttctgttttctctgaaggtatcccagggtgttagatt

SEQ ID NO: 15206 - DNA, 355 bp, Homo sapiens
  misc_feature 112, 113, 114, 115, 116, 117, 118, 119, 120, 121, 122, 124,129, 136, 142: n = A,T,C or G
tcactatagggcgaattggagctccccgcggtggcggccgaatgttgcaggctactctctgccgaccaggccgccgcccgtccctcgtgactacagcaggtacctgcccggnnnnnnnnnnngnaacgnatgtttncacctnctttttcaacctttaccccaccattagtgtattttactataaaaacagtggaaccacagccctaaagtcctgctgatttaaagtccttttgtcttaattgtatttaaaaaaaaaaaaaaaaaaaaagtggagggcgctctataactagtggatcccccggcctgaaggaatattatatcaagcttatcgataccgactaccttgagggggggc

SEQ ID NO: 15207 - DNA, 378 bp, Homo sapiens
  misc_feature 39, 66, 87, 217, 241, 263, 272, 277: n = A,T,C or G
acgactcactattttggggaaaacgagctccaccgcggnggcggccgcccgggcttgttcaagctncgacaaaaccgtccgataatnaatactaaatttagtaaaatggactttttattcaaagcatcaataattaacagaattattttaaaaaaaaaaaaaaaaaaagtgacctcggccgctctagaactagtgttttccccgggctgttttaatncgagatcaagcttatcgataccgncgacctcgagggggggcccggnacccagctnggggnccctttagtgagggttaattgcgcgcttggcgtaatcatggtcatagctgtttcctgtgtgaaattgttatccgctcacaattccacacaacatacgagcc

SEQ ID NO: 15208 - DNA, 377 bp, Homo sapiens
gcgtaatacgactactatagggcgaattggagctccaccgcggtggcggccgaggtaccctcaccttggtcatctatcctgaaataaggcttagttagtattggcctgaatgttttgtgttttttttttgtttttttttttttttttactgttactttgaaaaatatgtatgtataccttatcatatctgcctatatcacttactttggggagatactcagagctttgtggttatcagtatactaaaaaaaaaaaaaaaaaaagtgcggccacctgcccgggcggccgctctagaactagtggatcccccgggctgcaggaattcgatatcaagcttatcgataccgtcgacctcgagggggggcccggtacccagc

SEQ ID NO: 15209 - DNA, 402 bp, Homo sapiens
ccctactaaagggaacaaaagctgggtaccgggccccccctcgaggtcgacggtatcgataagcttgatatcgaattcctgcagcccgggggatccactagttctagagcggccgaggtacgcgggggagcctgtccagctggcccgggccctggcctggttctcaagtgtttcctagacagagaggcacctgggtcagtattagtctatttatcagaggtgtaaataatctatgtatagtttttctccttttagattattttgtatttgtttaaaagaagttttgtcaaaatacaaaaatataaagaaatgactgaaagttgttgacagggtttttaagaaataattattctaattgtttttgtttgtttgattttgccttgtaaactagcgccaaggaac

SEQ ID NO: 15210 - DNA, 390 bp, Homo sapiens
agggaacaaatgctgggtaccgggccccccctcgaggtcgacggtatcgataagcttgatatcgaattcctgcagcccgggggatccactagttctagagcggtcgcccgggcaggtacgatgggaggacagctttgtagaaaggacattattcagctaatagcaaactttgtggatcccaatccgagattttcctgctgaaagacaagaagtatctcatataaaagtgctgtaacagaatttgtatactccagaataagcttctgtaattcttagctgccaatgtgttaaggcgtgatgactcggtttctgtttatctgaacatcaatactagggtctggataatttcaatgcatgccaccagcttatcaaccctttggctttgatttt

SEQ ID NO: 15211 - DNA, 306 bp, Homo sapiens
ccctcactaaagggaacagaagctgggtaccgggccccccctcgaggtcgacggtatcgataagcttgatatcgaattcctgcagcccgggggatccactagttctagagcggccgcccgggcaggacgcgggaccagaatgcagttccagcttaggaagccacaaacaagccacccaggaggaacaaaacaccgcccgcgtggatttttcaaatttccccggaaagtaagtctcgctcctgccaaagaaaagtctgggtttgaagagtctctggagcccaggatgccagcttgtgccaatgactg

SEQ ID NO: 15212 - DNA, 435 bp, Homo sapiens
accctcctaaagggaacaaaagctgggtaccgggccccccctcgaggtcgacggtatcgataagcttgatatcgaattcctgcagcccgggggatccactagttctagagcggccgcccgggcaggtaccttgctaagttcagaccttctcttcctttcctttcctttcctctcctgcccattttcctgttcttctgtccttcaatacttctgtagcttcccattcatgttctcttctcccagcaggcctcattgtgtgcagaaactgtggtgggggctgtgctgcctcctccctgcctcctgcctcctgcggctgttggatttgggaatgacctttggtgagagtctcactgctccagggtctatttttggtcccaaaggctagacctatagagttggatcaccttttttcttttccggggaaataaatgggtt

SEQ ID NO: 15213 - DNA, 552 bp, Homo sapiens
aaccctcactaaagggaacaaaagctgggtaccgggccccccctcgaggtcgacggtatcgataagcttgatatcgaattcctgcagcccgggggatccactagttctagagcggccgaggtacagagaactgaatttacacaataaagtgttaccctataccagtgattctaaaattttggtctggggaacctttcatggggttcatgaggtcaaaactattttcatgataatgttattttgcctgttatattctcattctcgagtatacagtagagttttccagaggccacatgatccatgacatcacaacaaaatgaatagagacagatgaaaatctagctggcttctgctacatgaatcagacattaaggggtccagagaccataaagtgtgacaaccaccactcttcacaacctatatataatatctcaaaataatgttaattctctatcctcaaagtttatttccttatatctacattttctatgatcaacacactcactacaaaaaagtccactagcgttgcccaagtgcttccgtgagttggct

SEQ ID NO: 15214 - DNA, 443 bp, Homo sapiens
aatacgacctactatagggcgaattggagctccaccgcggtggcggccgcccgggcaggtaccacaaaaacagttacatggtagagttccaatcacacagaaaggaatccattcagcaaatttccaaagttgcagactgtttgggcccacccagaattccaccaggactggacggcccccaccaggctatactggatatgtggacacagagcttatgctaagctgcctgatcaggacaggtagctgtataattggcaccattaagccatctttcttcttactgcccataaaaacaggtgaacttctaggcttcccagtctatgcttcctgcaaaaaatgaagcatagccataagtgattagaaaaataatgaatggccctctgaaagaatcatacaatactatagacccgccacttaggcacaagaaggctcatgaggatatc

SEQ ID NO: 15215 - DNA, 435 bp, Homo sapiens
aatacgactactatagggcgaattggagctccaccgcggtggcggccgaggtaccttgggattgcaggtgcccacccttgcgcctggctaatttttgtatttttagtagagacggggttttgtcatgttgtccaggctggtctcgaagtcgagctcaggtgatccgcccatctcagccttccaaaatgctgggattacaggtgtgtgccaccatgcccagccaacacacacatttatttaatgcaagttttacctagcacagagaagcagtgagagtcagttacttatatattgaattggaccaagtaacttgtgaagaagctagtaaatatatggaggctaaaaagctgagtggttctgttctaacaaggtctgcacagtaatctcttggcctcgacttctcatccttaaaaataaggagatcgtcctatgttt

SEQ ID NO: 15216 - DNA, 252 bp, Homo sapiens
  misc_feature 1: n = A,T,C or G
ncggaaccccgtcgttataacgaacttcccctatgggggccttattttggagacctcccccccccccgttggggggggccccccccgggaaaaaaaaatttttttttttttttttttaaaaaaaaaaatttgggggggcccgggccccccttttttaaaaaaaaaaaaaacacccccccccccttttttttttttatataatagaggagggggcccccccccaatatattttttttttgggggggggggggc

SEQ ID NO: 15217 - DNA, 591 bp, Homo sapiens
ggcgaattggagctccaccgcggtggcggccgaggtacgcgggggcggaggtcagggacaagatggtgccaccggtgcaggtctctccgctcatcaagctcggccgctctagaactagtggatcccccgggctgcaggaattcgatatcaagcttatcgataccgtcgacctcgagggggggcccggtacccagcttttgttccctttagtgagggttaattgcgcgcttggcgtaatcatggtcatagctgtttcctgtgtgaaattgttatccgctcacaattccacacaacatacgagccgggagcataaagtgtaaagcctggggtgcctaatgagtgagctaactcacattaattgcgttgcgctcactgcccgctttccagtcgggaaacctgtcgtgccagctgcattaatgaatcggccaacgcgcggggagaggcggtttgcgtattgggcgctcttccgcttcctcgctcactgactcgctgcgctcggtcgttcggctgcggcgagcggtatcagctcactcaaaggcggtaatacggttatccacagaatcaggggataacgcaggaaagaacatgtga

SEQ ID NO: 15218 - DNA, 552 bp, Homo sapiens
ggcgaattggagctcaccgcggtggcggccgaggtacagcgtggagggtttaggcagcgtgttctgattctttgcgggacggcgagcgcatttgtgctttgcccgccgcggcctaggaggccttttgaggccgcgtagtcggtgtttttgaactgactctacagcttctggcaggccgtgcggcgccctgacccggcctcaccatgttggtgctgtttgaaacgtctgtgggttacgccatctttaaggttctaaatgagaagaaacttcaagaggttgatagtttatggaaagaatttgaaactccagagaaagcagaaaaaaaaaaataaaaacatagtacctgcccgggcggccgctctagaactagtggatcccccgggctgcaggaattcgatatcaagcttatcgataccggcgacctcgagggggggcccggtacccagcttttgttccctttagtgagggttaattgcgcgcttggcgtaatcatggtcatagctgtttcctgtgtgaaaatgttatccgctcacaattccacacaacatacga

SEQ ID NO: 15219 - DNA, 461 bp, Homo sapiens
cgcggtggcggccgaggcaccagggtctgattgtctgtgtgtcagaatgggattagtgaccttataaatgagggagctcgtttgtccctgccaggacatgaggttacagcaaaatgatggctgtctattaaccagcaagttggcctttgccagaccccagatctgcagactaccttgatcttggactttccatcctgcacaaatctaagacataaattactgatgtttatcaaccactcagtttatggtgttcttgttatagcagcctgaactaagacaacaggtcgatcttaaggcatagctacaatcaagtctttccatgctcagaatctccatctgctggccaagcatagtggttcgcacttgtaatcctggcactttggtaggccaaggcgggtgggtcacctgaggtcaggagttcgagaccagcttggctaacatggcgaaactttgtctctact

SEQ ID NO: 15220 - DNA, 479 bp, Homo sapiens
ctatagggcgaattggagctccaccgcggtggcggccgaggtactgggaactggatgacttttcttgtccatatcaccatggaaatctgtgtgctgggcatggagagtgggaagcaggcagatgccaatgcttcagtggctgggaaggtgatcgatgccagtgcccttcagcagcagcccagcactgtgtcaattcaaagggccaagtgtgcaggggaagaggcacttgtgtgtgtggaaggtgtgagtgcaccgatcccaggagcatcgggcgttctagaactagtggatcccccgggctgcatgaattccatatcaagcttatcgataccggtgacctcaagggggggcccggtacccagtttttgctccctttagtgagggttaattgcgcgcttggcgtaatcatggtcatagctggttcctgtgtgaaatcgttatcccttcacaatttcacacaacatacgagccgggtgcat

SEQ ID NO: 15221 - DNA, 554 bp, Homo sapiens
tggagctccaccgcggtggcggccgaggtactatagtctgaatgtctgtgtctcagaatgggattagtgaccttataaatgagggagcttgtttgtcccttccactacatgaggttacagcaaaaagatggctgtctatgaaccagcaagtaggcctttgccagaccccaaatctgcagactaccttgatcttggactttccatcctgcacaaatctaagaaataaattactgttgtttatcaaccactcagtttatggtatttttgttatagcagcctgaactaagacaacaggtagatcttaaggcatagctacaattaagtctttccatgctcagaatctccatctgctggccaagcatagtggttcgcacttgtaatcctggcactttgggaggccaaggcgggtgggtcacctgaggtcaggagtttgagaccagcttggctaacatggcaaaactctgtctctactaaaaatacaaaaattagccgggtgtggcggtgggtgcctgtaatcccagctactcgggaggctgaggcaaaagaatcgcttg

SEQ ID NO: 15222 - DNA, 425 bp, Homo sapiens
ggcgaattggagctccaccgcggtggcggccgcccggccgggaccactgttctttctttttttttttcgcggatggggacttgtgaattttcctaaaggcgctatttaacatgggaggagagcgtgtgcggctccagtccagcccgctgttcactttccaccctcgctccacctgcctctggctattttaggcctatgctctccgacactctttcctttgaaaccctcctccacagttgcagcccatcctcccggctccctcctaggctgtactgcgtgctctgtcctcgggtttaagagacaacttcccaaggcacaaacctgttttcccccctaggggtgggaggaagcaaatgactctgttcctggagcgggcgcccgggcaggtaccagtcgtgggactgcatgctactggctagagcttg

SEQ ID NO: 15223 - DNA, 52 bp, Homo sapiens
gcgattggagctccaccgcggtggcggccgaggtacttttcttttttttttt

SEQ ID NO: 15224 - DNA, 436 bp, Homo sapiens
aatacgactactatagggcgaattggagctccaccgcggtggcggccgcccgggcaatctaagaagacatgatcactaaatgtgatgtgggatcccagatgggatcctggaccaggtaaaaactaaagtaatgtttcaacttcagtaaataataatgtatcaatattggtccattaattgtggcaaatgtgccacactaatgcaaagcgttagtaacagggaaaactgggagcagggtatatgagaactttttgaactgttttcacaattctcctgtaaatctaaaactcttctgaaaatagagtttattctttaaaagtgtctggaggatgtgcacaagggtgtggcagcagaggggctacaggtaaaaaatcatgacatctggaatatttccttcaatttttgctccacacggtgactatcttaccctgctccc

SEQ ID NO: 15225 - DNA, 578 bp, Homo sapiens
ggcgaattggagctccaccgcggtggcggccgaggtccccggggggtctgaggacccgaggtcgtaggtggatctttttcacggagcaaagagcaggaggacaggggattgatctcccaagggaggtccccccgatccgagtcacagcaccaaatttcatgcgcatctgtgtaaagagaccaacaagcaggctttgtgtgagcagcaaggctgtttatttcacctgggtgcaggcgggctgagtctgaaaagagagtcagtgaaggaagatggggtggggccgttttgtaagatttgggtaggtaaaggaaaattacagtcaaaggggggttgttctctggcaggagtgggggtcacatggtgctcagtaggggagcttttgagccaggatgagccaggagaaggaatttcacaagataatgtcatcagttaaggcaagaacaggccattttcatttcttttgtggtggaatgtcatcaattaaggcaggaaccagccatctggatgtgtacctgcccgggcggccgctctagaactagtggatcccccgggctgcaggaattcgatatcaagcttat

SEQ ID NO: 15226 - DNA, 505 bp, Homo sapiens
ctatagggcgaattggagctccaccgcggtggcggccgcccgggcaggtactaacaaatgcagtagccaacaagattaccatgcaatcattaaggagaaccaaagtaagagagccactcaaaccagattttgaacgctactaaaattaaagtagttctttgatgaatatgaatgagtagggaaaggattctttgtaatagtgatacctctgtggtaagagaagggtggtatgtgagttttagtctacagattatggcaaattcagtgacaacaatcaaatggtctaagattgacagtagcacagttttactctgtgaaggtaatgttcaggacaaatttcaagaaaactagaaaaccattctttacagctgaaatctttccctaaccattgttatttccacttttaagtcctcaagagatgagaaaagggaggtaaggcttccttatacatttcctgcacaatgaaacatttttcctcctccaggcaaagattcaagcagaactg

SEQ ID NO: 15227 - DNA, 373 bp, Homo sapiens
ctactatagggcgaattggagctccaccgcggtggcggccgcccggccaggtacaccttcttagacctcaacctcgaactctcaaaatttaggatgtctcagccctactgaggccgggagtcacctcgtcactgagggccctcggtgcgaagatgaacctttcaccgtctttactgcattctggagtgcaaaaataaaatccactgaagagtcacaaggcccgctgtgcataatcggtttcactttgaccttttttttttttttgagacagggtctaactctgtgacccaggctggagtgcaatggcacattctcggctcactgaagcttacgcctcctgggtccaggtgattctcccaccttggcctcccgg

SEQ ID NO: 15228 - DNA, 563 bp, Homo sapiens
tactatagggcgaattggagctccaccgcggtggcggccggccgggcaggtacatgtaatgctcctgaactgtatgcttcgcacggctgacatgctaagttttgttctgtgtatgttatgactattttttaaaaagtaaacaaaaaagaattagctggaaataccagcacaggcaaacccctggagacagaaagcaggtgagtggttgctggggcttgagcaggaggaagggcgagggactgcagaatggccatgggctttgccttctagcatgatgagaatgttctggaattagacagtggtaacgcttgttcaacactgccagtgtagttaatgtcactgaattatacactttaaatggctaacatgaccaattttatgttatatatattggactaccacaaaaaaactagctggcacctaaaaacattccattgaacaggccccttcagatctgtgtcttttactgcatgcaaattacaccacagagcagcacctatggcagcgtggatcacaggctctgttttaggatagagaaaggacaacaaggtgtccccccatat

SEQ ID NO: 15229 - DNA, 540 bp, Homo sapiens
gggcgaattggagctccaccgcggtggcggccgaggtacttcttttctttactttttttttttttgagacggaggctcactctgtcgccaggctggcgcgatcttggctcactgcaacctctgcctcacgggttcaagcgattttcctgcttcagcctcctgagtagctgggactacaggcacacgccaccatgcccagctcatttttgtatttttagtggagatggggtttcaccatgttggccaggatggcctccatctcttgaccttgtgatccgcccgactcggccttccaaaatgctgggattacaggcgtgagccatcaagtctggcgagagagattgtttctagatgagggtgggggcggttgtccttagcccaaagcttgtgccagtctctatcagaaataaatgcccccaaaaccaaaaaaaaaaaaaaataaggtacctgcccgggcggccgatatagaactagtggatcccccgggctgcaggaattcgatatcaagcttatcgataccgtcgacctcgagggggggcc

SEQ ID NO: 15230 - DNA, 425 bp, Homo sapiens
ataccacctcactatagggcgaattggagctccaccgcggtggcggccgggcaggtactacgtcagcaatttctccaaagagcggcgcgacagcatatggcaccagcccattttcaatttgctgagcatcggccaaagcctgtatgcgaaagccaaggagctggacagagtgaaggaaattcaggagcagctcttccatatcaagaagctgttgaagacctgtaggtttgctaacagggcgataaaggagttcgagcaggtgccgggacacttgactgatgagctccacctgttctcccttgaggacctggtcaggatcaagaaagggctgctggcacccttactcaaggacattctgaaagcttcccttgcacatgtggctggctgtgagctgtgtcaaggaaagggctttatttgtgaatttt

SEQ ID NO: 15231 - DNA, 406 bp, Homo sapiens
taataccactcactatagggcgaattggagctccacgcggtggcggccgcccgggcaggtacaattgttttagaagataatttgtgtttctctcttcagtttcgcatattactaaagacaaatcatggtaggattggcttgtttattatacttggcctaactatttgtatacaatgcagcaagaatgattattttttacttaggcttttaagtaggctctgatggaactttgttccatagcaggaatctcagataagactttgtaaaacccgtaaaactcagccgagccatggatttatgccattaaatacccatgagttgggtgaaatttcctctccttttgagggcccaagataaacctggggcgtctgcacttgtcaaaaagtgatattctttacttacacag

SEQ ID NO: 15232 - DNA, 407 bp, Homo sapiens
  misc_feature 282: n = A,T,C or G
ctatagggctaattggagctccacgcggtggcggccgaggtacacaggtagaatcttacttcaactgtaaatgggcccacagaaccctctaaatccccttgtaaatttaactgctagtccaaagaggaacagctctttgtacactaggaaaaaaccttgtagagagagtaaaaaatttaacacccatagtaagcctaaaagcagccaccaattaagaaagcgttcaggctcaacacccactacctaaaagatcccaaaaaaaataaaataaagtacgccacngagtgttaaattttcagagaagaatttctctttagttctttgcacgaaggtacagataaagacactttttcaaaaatggcactggtatcagaattcctcaagcaggcctggtttattgaaaatga

SEQ ID NO: 15233 - DNA, 421 bp, Homo sapiens
taatacgactcactatagggcgaattggagctccaccgcggtggcggccgcccgggcaggtacgcggggactgaaaatcggactgtgcaactcacctggcagccactcccagagctcctggaactctggcccaaggttctctgactgactccttcttggcttactggctgaagactgacgctgcctgatcgcctcagaagccccgcagaccatcatggacgccgagctttaggtaactcacagtggaggcccgcctgcacccaggtgaaataaacagccttgttgctcacacaaagcctgtttggtggtctcttcacacagacgcgcatgaaagggaagacatacaaaaacaaggcctctgaggtaggtacctcggccgctctagaactagtggatcccccgggctgcaggaattcgatat

SEQ ID NO: 15234 - DNA, 505 bp, Homo sapiens
ctactatagggcgaattggagctccaccgcggtggcggccgaggtactttttttttttttttttttgggtttccggggtcgtcttgggggtctcaatatttttggctcctctcctttacagacaccttgtattttcaaagtttttcttgtagtcgaattcctgatcagaagtttgaatggttgttactgctgtgtttttcatgtcaacaatttcttttctttgtttcctgacaaggtgtcctcttgcagctgactgtattattatagcgctttctttccttttctcctgtatttttgggtatcttcttgaacacaagaatgctctgacacaagcttgaatcaaaataagcttgtcaatagcttcctttcgcattagatttaactgctccacgtgataatacttaaggaacacttttgtttttccaagagcccagttatcgagaccagctttttccaaaatggtggcacaggtgtcagggctcatgcggggctcctcgctcgactt

SEQ ID NO: 15235 - DNA, 585 bp, Homo sapiens
ctacttagggcgaattggagctccaccgcggtggcggccgaggtactttttttttttttttttttttactttttaaacttcttgttaaaaatgaagacacaaacaaacacattagcctaggcttacacagggtcaggattatcaagatgtcacttaggcgattgaaatttttcagctccattaccatcttatgggaccaccatcctataagcagtctgtcattgacctaaacatcattattcagcacaagcgtatttcaaatttagagttttactttgatgttcttctttttttctttttctttttttgagacggagtctcactctgtcgcccaggctgcagtgcagtggtgcaatctcggctcactgcaacctccagtttgggccacagagcgagacagcgagactcggtctcaaaaaaaaaaagaaaagaaaagtacctgcccggccgctctagaactagtggatcccccgggctgcaggaattcgatatcaagcttatcgataccgtcgacctcgagggggggcccggtacccagcttttgttccctttagtgagggttaattgcgcgcttggcgtaatcat

SEQ ID NO: 15236 - DNA, 543 bp, Homo sapiens
  misc_feature 424: n = A,T,C or G
agggcgaattggagctccaccgcggtggcggccgaggtacgcggggaaataaactcaaaggataggttcaacaccataatagagaggacagacaaaaagaatctgtgaacttgaaaattgaacaataggaatgacccaatttgaataacagagataaatgaacagagcctcagggaattgtgggagtataacaaaagatctaacactgatgtcgtcaaagtcccaaaggagagagaggggatggggctgaaaaagcacctgaagaagtaatggctggaagctccccaaatttggcaaaacacataagcctacagattcaagaagctgggtgaatcccaaatgagagaaatcccttcaaattcacacaaagacacattatagtcaaatttctgaaaactcccagataaaaagaaatagaaagatngggtacctgcccgggcggccgctctagaactagtggatcccccgggctgcaggaattcgatatcaagcttatcgataccgtcgacctcgagggggggcccggtacccacttttgttcct

SEQ ID NO: 15237 - DNA, 504 bp, Homo sapiens
ctactatagggcgaattggagctccaccgcggtggcggccgaggtactttttttctttttttttttttttttttttttgagacggagtctcactcttgtcacccaggctggagtgcagcggtgtgatcttggctcactgcaagctccacctcccaggttcaagccgttctcctgcctcagcctcccaagtagctgggactataggcgcctgccaccacgcacagctaatttttttgtatttttagtagagacaggttttcaccacgttggccagactggtctcaaaacttctaacctcaggtgatccacccgcctcaaagtgctgggattacaggcgtgagccaccgcacccggcccagactccttaaaatgtgagaagtagcactgaggaatgtgatcagattatggccttgattggcacatggggtcgctttccacggttggccttcttgttctccacggcatcttgtgcatagccatttgccatttcaggagctcagcatg

SEQ ID NO: 15238 - DNA, 564 bp, Homo sapiens
actactatagggcgaattggagctccaccgcggtggcggccgaggtacctgtgacatcataattgcaccctccgacatgatatctcttccaaatgcttgatgaaaaaggtgggaggatcacttgagccagggagttgaaggctgcagtgagccctgtttttgccaccacactccagcttgggattgattcctaaagactcatgttacgtgaggaagcagctcagaagaggaaaggaaaggagccaggcatggctcttcctcagggacgcctgactttccgggatgtggctatagaattctcattggcagagtggaaatgcctgaacccttcacagagggctttgtacctgcccgggcggccgctctagaactagtggatcccccgggctgcaggaattcgatatcaagcttatcgataccgtcgacctcgagggggggcccggtacccagcttttgttccctttagtgagggttaattgcgcgcttggcgtaatcatggtcatagctgtttcctgtgtgaaattgttatccgctcacaattccacacaacatacgagccgggag

SEQ ID NO: 15239 - DNA, 537 bp, Homo sapiens
ctactatagggcgaattggagctccaccgcggtggcggccgaggtactttttttttttttttttttttttttggggctggaaggggggcagagtctcactctgttgtctaggctggagtgcagtgacagaatcaccgctcactgcaacctctgccttccaggttcaagtgattctcgcgccttagcctccggagtagctgggattacaagctaatcccagctaggcgtgcgccaccacactcggctaatttttgttatttttattatagtagagacggggtttcaccatgttggccaggcttgtctcaaactccagacctcaagtgatccacccgccttggcctcccaaagtgctgggattacaggtgcgagtatatgcttttaaagggtatccaatcaagctaactatggtgatggaatgtctccagttcctctgtaatacacgtatcgtccagcccgcgtacctgcccgggcggccgttctagaactagtggatcccccgggctgcaggaattcgatatcaagcttatcgatacc

SEQ ID NO: 15240 - DNA, 570 bp, Homo sapiens
ggcgaattggagctccaccgcggtggcggccgcccgggcaggtacttgagattagggagtggtgatgactcttaacaagcatgctgccttcaagcatttgtttaacaaagcacaccttgcacagcccttaagccatttaaccctgagttgacacagcacatgtctcagggagcacagggttgggggtagggttacagattaacagcatcttaaggcagaagaatttttcttacagaacaaaatggagtctcctatgtctacttctttctacacagacacagtaacaatctgatctctcttgcttttccccacaacctcagcctctcagagtgctgggattacaggcatgagccaccgcgcccagcctcccttttaaagcactttctgaagtcaagcctgattcaggattgcaagcctgcagagaactatggtggtaaagcctaaaaagatagaatccttcccacacctgagaaggcagtatttttagaaggaaacaccagaatcacacttaagtcactgcaaaggcattcatgtttatacatttctgaaactgtcttacttgaactttat

SEQ ID NO: 15241 - DNA, 570 bp, Homo sapiens
gggcgaattggagctccaccgcggtggcggccgggcatggtggctcacgcctgtaatccctccactttgggaggccaaggcaggtggatcacctgaggttgggagttcgagaccagcctgaccaacatggagaaaccccgtctctactaaaaatacaaaattagctaggcgtggcggcacatgcccgtaatcccagctactccggaggctgaggcaggagaatcactcgaactcgggaggcagaggttgcggtgagctgagatcacaccattgcactccagcctggccaacaagagtgaaactccatctcaaagaagaaagaacgggaaacatgaagccttcctttaatgatgatagttgctaaagtgaattattcgaatctctttgcatgttttggctctgttaatctaactcttgtctctaaatagatgctgagagtgtaaatctagatgactataacatacacgtcattgcaagtgtattcaaacaatggcttcgagatttgcccaatcctctcatgacctttgaactttatgagggatttcttcgagctatgggccttcaggagag

SEQ ID NO: 15242 - DNA, 578 bp, Homo sapiens
ggcgaattggagctccaccgcggtggcggccgggcaggtacttattctttttttttttttttttggttatgaaaacttagggactaaaattaatataaaaattggcataatgttggattgaatctacattttggcagaagttaaacattcccacataatgtcaaaattatacatcatgcagttctgtttttttgtttgttttattttgttttgtttttgagtctggctctgtcacccaggctggagtgcagtggcgtgatctgcaacctctgccccccgggttcaagcgattctcctgcctcagcctcccgagtagctgagattacgggtgcgcgccaccacacttggctaatttttgtattattagtagagacggggtttcagcatgttggctaggccggtctctcctgacctcagggtgatcagcccacctcggcctcacaaagtgctgggattacaggcgtgagccaccttgcccagcccacatcatacagtttgaaatgaaactttgccacaaccagcctttgctgtagcacacacatatatcactgaacctgtttgaaataaagttttttttt

SEQ ID NO: 15243 - DNA, 596 bp, Homo sapiens
ctatagggcgaattggagctccaccgcggtggcggccgcccgggcaggtactttttttttttttttttttttttttttttttttttgggtcatttggccttagtttttaaaaacaaaagtgttaactagaatctaacaacagatcaaatccaaacacagcagtccagtggagaatcaaaacttttccggctttattctctgggaaaacccctggtctgttttcattcctattggtccaggccaccattctatgatatgaaggcctaaattaggaaagctaggtgagctgtgcaaattctgggtgtctgagccacctgttgtttggcgtgtgatgggggtggaggcccacacaggggtgttctcgctagtgttcaaatcacagaaacagggacgtaactagggtgaggggagcaaagcactcaccttgggcacaaaatttaaggagggccaaaaaacccagtaaccaagataaatacttttttaatgcaacatttttaaaaaatcacaattaatggaaaaagtcttttgaggacaatgtttcaaaaatttaaaatagaagggttccccgcgtacttttttttttttttttttttggg

SEQ ID NO: 15244 - DNA, 524 bp, Homo sapiens
ggcgaattggagctccaccgcggtggcggccgaggtacacacattacactatcccttatcaaatatactgaatgtaagtaggctgggtgcagtggctcatgcctgtaatttcagcaacttgggaggccaaggtgggtggatcacctgaggtggggagttggagaccagcctggccaacatggtgaaaccccatctctactaaaaatacaaaaattagccaggcgtggtggcacacgcctgtaatcccagctactcgggaggctgaggcaggagaactgcttgaactcgggaggtagaggttgcaatgagctgagactgcaccaccgcactccaccctgggtgacagagcaagacgacgtctcaaaaaaaaaaaagtaattaaagcttgtttcgattacttaggctcatcaatagtaagatcaacatggtacctgcccgggcggccgctctagaactagtggatcccccgggctgcaggaattcgatatcaagcttatcgataccgtcgacctcgagggggggcc

SEQ ID NO: 15245 - DNA, 571 bp, Homo sapiens
gggcgaattggagctccaccgcggtggcgggccggggtccattgtcctcaaaacgttagatctgggctctgattcctaactgccactcgtgatcacagaggtgcagagagtcattagccattgttgcacttccattgttgcaagcccctcaccttctggttgaagtgacttccaggagaattaaagagctggtgtttccctccccactcccattcatttttctcattttccccttttgggagccagacataaacacaattgcatatatgagagaaatcagaaagtcatggcacagcctaggggatggtgcaggctcagaaaagacctctgagaagaccttagatttatacttcagactcatcttaggcaaagagggcttacaacaatcaaaaaaacaaaaataataaaaacagtaacaaaaacagcaaaccctggagaagaggaagaatctgatttccagagttaacacattagtaaattctaatgtctggttttcaacaaaaatatcacagaggatacagagaaacaggaaagtgtaacccattaaatgaaacctaagagactaaaaaac

SEQ ID NO: 15246 - DNA, 398 bp, Homo sapiens
actactatagggcgaattggagctccaccgcggtggcggccgaggtaccggaaggtcagggcttgagtcgtagccagggatagattagggtgagaatagacaggatggaggacacgaggccacaaagccccacaatcccagggccacagcgccagaggcctagtttgtccagaggaatgaagagatcacaggcatttctgaccacgtctagcagaagtgggggatgacctgtaagggctcgagccaggagcaggacttgcagccgaagtttcagagccagttggggcagacctgctcctggagtccctggtcccccaagtcccccagtttaaatttcctcctgggactcctcttcaaaaacctttaattcgccggttccaggaaaagaattttggttc

SEQ ID NO: 15247 - DNA, 497 bp, Homo sapiens
actcactatagggcgaattggagctccaccgcggtggcggccgcccgggcaggtacgcggggcttctgttgggcgtttctgctgagaggcgggaggcgccgagagtctgtgcgaaggtccgtggacagactgctttgcctgttgttgctcttcggaggcggcgatccccgaaggcgagctgaaatacggctgcaggctacaatttgcagccgaccattatggatgacaaggagccgaagaggtggcccaccctcagggaccgcttgtgctcggatggcttcttatttccccaataccccattaaaccgtatcatctgaaggggatccacagagttgtcttctatcgtgatctggaggaactgaagttcgttctgctcacgcgttatgacatcaataagagagacaggaaggaaaggaccgccctacatttggcctgtgccactggccaaccggaaatggtacctcggccgctctagaactagtggatcccccgggct

SEQ ID NO: 15248 - DNA, 551 bp, Homo sapiens
ctactatagggcgaattggagctccaccgcggtggcggccgaggtacctcaagaagtaagtggaacacctttccctgtcatagttattttcatccagacatctggtggaagcatcagattccgacaaacaaggatttatgtcaggatctctcagcctctgtgttaccgagggcattctaacagtcttcttactccggcctccgcttcgccagcacccaggccgtctccagctccaaacacccccgcgtacctgcccgggcggccgctctagaactagtggatcccccgggctgcaggaattcgatatcaagcttatcgataccgtcgacctcgagggggggcccggtacccagcttttgttccctttagtgagggttaattgcgcgcttggcgtaatcatggtcatagctgtttcctgtgtgaaattgttatccgctcacaattccacacaacatacgagccgggacctaaagtgtaaagcctggggtgcctaatgagtgagctaactcacattatttgcgttgcgctcactgcccgctttccagtcggga

SEQ ID NO: 15249 - DNA, 356 bp, Homo sapiens
actactatagggcgaattggagctccaccgcggtggcggccgcccgggcaggtacttttttttttttttttttttgtttttatttttttatttatgttggcagaaaagctgaggcagggcttctgacataaggtaaaagtgtcttggaacatgtcctgggtccagggtctataaccccttgtggcctatggaacaccaagctctgtgccaaagggtggaaggctgccctgccgcactacaatctaagcccagagcataaaaccccttgtagcctgtggaatatatccagactcgctggccccttgctccttgctctcccaagatcacaaattgattgcatttcgaattaaaaaaac

SEQ ID NO: 15250 - DNA, 315 bp, Homo sapiens
actactatagggcgaattggagctccaccgcggtggcggccgcccgggcaggtacgcggggtccctacaaatgcaacgtctgcaataaagtcttcacccagcgctgctctctggagtcccacctgaagaaaatccatggggtgtagcagcagtatgcctataagcagcggcgggacaagctctacgtctgcgaggattgcggctacacgggccccacccaggaggacctgtacctcggccgctctagaactagtggatcccccgggctgcaggaattcaatatcaacctattgattcccgcgacctcgagggggg

SEQ ID NO: 15251 - DNA, 495 bp, Homo sapiens
cacactacttagggcgaattggagctccaccgcggtggcggccgaggtaccttggaagaccttattcgatatcttgaaccagagagatggcagttggacttagaagatctatataggccaacttggcaacttcttggcaaggcttttgtttttggaagaaaatccagagtggtggatctgaaccttctaacagaggaggtaagattatacagctgcacacctcgtaacttctcagtgtccataagggaagaactaaagagaaccgataccattttctggccaggttgtctcctggttaaacgctgtggtgggaactgtgcctgttgtctccacaattgcaatgaatgtcaatgtgtcccaagcaaagttactaaaaaataccacgaggtccttcagttgagaccaaagaccggtgtcaggggattgcacaaatcactcaccgacgtggccctggagcaccatgaggagtgtgactgtgtgtgcagagggagcaca

SEQ ID NO: 15252 - DNA, 304 bp, Homo sapiens
accgcggtggcggtcgaccgggcaggtccccgggggtgccccgaaagcagttgttgttggttgggggccttctggccggtgacggagactgcccaggtgtggtcaccatgttcctctccgcggtcttttttgccaagagcaagtcaaatgaaacaaagagtccttttcgtggaaaagaaaaaaatacgctccctttaaacggtggattgaaaatgactttgatttataaagagaagactgagggcggggatactgattcagaaatcctgtatcgtgtaataaaagaagaggaaaaggcatggaa

SEQ ID NO: 15253 - DNA, 508 bp, Homo sapiens
cgactcactatagggcgaattggagctccaccgcggtggcggccgcccgggcaggtacagctgcatcagctgctcgtaggacatgtccagcagctggtcgaggtccacgccgcggtaggtgaacttgcggaaggtccgcttcttcttctgctctacttctgccacccgcgtaccacggctatccttatagctttttaattaaatgaagccaagtgggatttgcataaagtgaatgtttaccatgaagataaactgttcctgactttatactattttgaattcattcatttcattgtgatcagctagcttattcttgtgtacctcggccgctctagaactagtggatcccccgggctgcaggaattcgatatcaagcttatcgataccgtcgacctcgagggggggcccggtacccagcttttgttccctttagtgagggttaattgcgcgcttggcgtaatcatggtcatagctgttttctgtgtgaaattgttatccgctcacaatt

SEQ ID NO: 15254 - DNA, 393 bp, Homo sapiens
cactactatagggcgaattggagctccaccgcggtggcggccggacatggcgcccgccgccgcttcccccccgcgtacttttttttttttttttttttttttttttctttctttttttttttttttttttttttttttttttttttttttttttttttttttttttttttttttttttttttttttatttttttttttttggggggaaattaaaaacctttttttccaaaaaaaaaaaaaaaaaaaaaaattacaaatttattacccaaaaaaaaaggggcccccgggccgtttaaaaaaaagggggccccccgggcggcggagaatttaaaagaagtttttgtaacccggccaaaatggggggggggccgaaaccaaaatttttttcctttt

SEQ ID NO: 15255 - DNA, 316 bp, Homo sapiens
tacgactcactatagggcgaattggagctccaccgcggtggcggccgaggtacttctctttttttttttttttttttacatcccatatgacattgactgattaaaaaggcctgatcggttttgttatcttcccacacttcgtttaatttaacttgtgttttgtatctcttataaaccataagataggccaggcgcagtgcctcatgcctgtaattgcagcactttgggaggctgaggcgggtgaatcacccaaggtcaggagttcaagaccagcctgacaacatggtgaaacactgtttctactaaaaatacaaaa

SEQ ID NO: 15256 - DNA, 429 bp, Homo sapiens
atacgactcactatagggcgaattggagctccaccgcggtggcccgcccgggcaggacaaaacaaagacttttcatcaactcttttagatatgctagaagagctaaaggaaaccatggacagagaacaaaaaaattaggaaagcaatgcctcatccaatacagaatatcaataaagagattgaaattgtagaaaagaaccaaatagaaattctggagttgaaaagtattataactaaaactgaaaattcactagaggtattcagcagcagactggagaagtcagaagaaagaatcaacaggcttcaagataggtcaattaagattatacagtctgaggagcagaaaggaaaaagaatgaagaaaaatgaacagagcataaaagacctctgggactctatcaagcataccagtatatgcatgaggggagt

SEQ ID NO: 15257 - DNA, 240 bp, Homo sapiens
gactcactatagggcgaattggagctccaccgcggtggcggccgcccgggcaggtacagagtgtaagcgagctacaccaaagaatggtgattagcgctcccagggtggggaaaaatgaggattgtttatataggcaaaatggaggtgccaaacagaattataacattttcggaactaaggctcatttaaagatacaaatttgattggctactattgattacacttgaaggggatttgtta

SEQ ID NO: 15258 - DNA, 282 bp, Homo sapiens
ctcactatagggcgaattggagctccaccgcggtggcggccgcccgggcaggtacatcacaacagtaaaattttgctctttgcttctggaggaacaccctacaacaggtaattaaaaaatttaaaaataatatgaaaggggagctaaatacctgaaaatttaaacaaaatgaagcaaaaaaaagggaaacaaattcattgcaagagatggaaattacattttaaaggctgaaaataataaagaaattcactaaacaacaggccctattgtcctggctccttc

SEQ ID NO: 15259 - DNA, 448 bp, Homo sapiens
taatacgactcactatagggcgaattggagctccaccgcggtggcggccgcagccttggagcaggcaagatctccaccctcctgggtgcgggtgcagactcaggcatccctgcacttttgggggcctgcttttgcaggctcggaagtgcttgcctctgcagcttggcttctccctgctattggcaccagctctcagatcaaagcaggggggtaagcctggaagccatgaacagggagggcctgaaggctgagggccaggctgccagtcccacctgtaggagtgggaactggtgccttttccaggccagtaagtatgcacttcctcccccgaggcccgtaaaatgccccaggctcagccagaactgagcagagggtgggacgaccagcaacagggaggagctaccctctctgctaagagcttcagagacctgtagagacggcagaacaa

SEQ ID NO: 15260 - DNA, 523 bp, Homo sapiens
tacgactcactatagggcgaattggagctccaccgcggtggcggccgaggtactagtctcaaaagctggggactctgagccttacctagagtctcagcaggtggaccattaagattaacatttctagtaggtgagttcaatcacaaaaatatttcttgttccatagattttattgtggccatgtcagtgaacacccacaagttttgctcagaatattttaggtgtaagctaaatccctaaattgttcagagttcccacagccctgtagcagcagagcgagaactttaaccagactttttcaatcccaaagctaatctggaggccaacagtgttcaaaaccttggtgactgaggaaccatttagagttttttcaggctcaggaatcacatggtcgttgttgggcttggggtaagtttcacaggcgatgaagctgacgttgagtcacttgacttctggagccataatttattttctcccagcaacctcctactggggattctcatgtttatggatacagtttggc

SEQ ID NO: 15261 - DNA, 425 bp, Homo sapiens
  misc_feature 22, 79, 84, 90, 112, 120: n = A,T,C or G
gagaggaacacaggcgctgagnatggagcagctttggagacccacccgacctgcagccctgacatgagcgcctggatanctggngctgangccaagactagacaccccaagnagacggcncacagcaaccttttaccttttttttcgccgcgtggcctcgctctgtgcacagatatgggtttataattttctgaaagttacccactgaagcccatttcttcgttgagtcatcttgtaatttccagctttctccccgctaaggaagatatctagtgttggggatcctggcccctcaacctcctgtggaacccagcagttctgttatatcccctgctaccctagatgaattaagacggttaaatactgtgtggaacttttattagataacacactttttattagataacgcttaaaggaagtcagta

SEQ ID NO: 15262 - DNA, 448 bp, Homo sapiens
  misc_feature 54, 58: n = A,T,C or G
tataggttttattggagcacaccgcggtggcggccgaggtaccaggacattatnctcnctattcatctagcaccgaagccaaatttgggtctaaaatcttgtgatggcaaccaggagcttttaaacttccttcgtagtgatctcattgaagttgcaacaaggttacaaaaaggaggacttggatatgtggaagaaacatcagaatttgaagcctttttcatttcattagagaaattgaaggattttggtgagtgtgtgattgcccttcaggccagtgtcataaagaaatttctccaaggcttcatggctcccaaacaaaaaaaaaaaaagaaaaaaaaaaaaaaaagtacaaacttagaagaaaattggaagatagaaacaagatagaaaatgaaaatattgtcaagagtttcagatagaaaatgaaaaacaagctaagacaagtatt

SEQ ID NO: 15263 - DNA, 576 bp, Homo sapiens
  misc_feature 560: n = A,T,C or G
tatacgactcactatagggtgaattggagctccaccgcggtggcggccgcccgggcaggtactagattaccttcctcgccactctctccacatgagagagtcagctgccctttctcctgtgcctctgcaggaagaactctcttgcatggcacatctcagctcctcattgagggatagttttctttgataagaaacctggagtccatttactctgacctctctttaaatctatatccagagccactagcccaggaaaaacttgggtgacccgtaatttctcttctcctgctgtccttttgctcttacgccccaccccaactccccttaaattttacaggcttatgacagtttgtatgtgctcagccaatgagcagaaaacctggaaagaatttctggactttagcccaccagtttgtctggttgactaacctgctgagagctaaaattggcacccattgccccgtgccttcaggcagtctcctggggcagagtatgccaccatccgaatatcaggcactgagtggggatgtgggtgatgctcacatgactggctagagctntgggggtgggtggggg

SEQ ID NO: 15264 - DNA, 271 bp, Homo sapiens
ctactatagggcgaattggagctccaccgcggtggcggccgcccgggcaggtactatttcatatattgtgtgagccccacaaatgtctattttaaaaagagtatagtccctggccaggcgcggtggctcacgcctgtaatcccagcagtttgggaggccgaggtgggcggatcacctgaggtctggagttcgagaccagcctgaccaatatggtgaaaccccgtttctactaaaaatacaaaattagctgggcatggtggagcatgcctgt

SEQ ID NO: 15265 - DNA, 335 bp, Homo sapiens
actcactatagggcgaattggagctccaccgcggtggcggccgaggtacttttttttcttttttttttttttagtttttgaaatcccgtctctactaaaaatacaaaaaaaaaaaaaaaaaaaaattggccgggcatggtggcgcatgcctgtaatcccagctactcaggaggctgaggcaggataattgcttgaacccgggaggtggaggttgcagtgagccgagatcgtgccactgcactccagcctgggcaacagagtgagactttgtctcggaaaaaaaaaaaaaaagatctggcggttgaaaataaccagaatgaaaatagctagaaaac

SEQ ID NO: 15266 - DNA, 510 bp, Homo sapiens
gactcactatagggcgaattggagctccaccgcggtggcggccgcccgggcaggtacctccattgtttctaggaagtaactaacttgcttttgattttacaggcttgtaggtggaatgggcttgccttgtctcagatgagactttggactgtggacttttgagttaatgctgaaatgagttgagactttgggggactattgggaaggcatgattggttttgaaatgtgaagataggagatttgggagggaccggggtgaaatgatatggtttcgtcctgtgtccctcacccaagtctcatgttgcaagtcccacaattcccacgtattgttagaggtgattgaataatgggggtgggtctttcctgtgctgttcttgggatagtgaatgggtctcatgagatctgatggttttaaaaacgggagtttctctgcacaagctctctcttttcctgctgccatccatgtaagatgtgactggcggctgggcgcagtggctcacgcctgtaatc

SEQ ID NO: 15267 - DNA, 464 bp, Homo sapiens
tatagggcgaattggagctccaccgcggtggcggccgcccgggcaggaccatgacaccaagcattcctgtcccctcccccgcaatggcaatcaagtgtcacagaaaaatagccttttaaaattaccatgagccttttatttttatttatttttacacccaggctggagtgcagtggcgtgatcacggctcactgtagcctcaaactcctgggctcaagcaatcctcctgccttggcctcccaaagttggctcagggttgatgagccactgtgctcagccaaccatgaggtttttagagatgatcttgtctaaacccttctcgcctgttttgcagaaaagaaaattgagatcccagagaaatgaagtaacttgcccaaggtcattcagcaggcaagatagaactagatccccaaattgcaaactagctgtccagagttctttcctcaatgagcaatttaaaagct

SEQ ID NO: 15268 - DNA, 263 bp, Homo sapiens
actactatagggcgaattggagctccaccgcggtggcggccgaggtactaactgtctgggatcgtagtcgattaaacagagccacctttgttcctgaggcaatgcataagtcagcatttttcaatgactgcttctttttggaaggtttggagatgacttttatccgcttgctgaggaacacaccaatgtcatcactgttgccatagaacatctttacagacaacatgaagtgctttcgcttgtctgagtcagatatatacaat

SEQ ID NO: 15269 - DNA, 186 bp, Homo sapiens
actactatagggcgaattggagctccaccgcggtggcggccgcccgggcaggtactttttttttttttttttttttggcataaaaagtgcacaagtttgtcctatgtgttaaaacatcttaatttggatgtatttttatccaaaatgatgcatacttggatgcattaaaagcacaccaacaaaaat

SEQ ID NO: 15270 - DNA, 198 bp, Homo sapiens
actactatagggcgaattggagctccaccgcggtggcggccgaggtacgcggggggtgctgaaatccggcatgttcttgtcacactgggtgagaagatgacagaggaagaagtagagatgctggtggcagggcatgaggacagcaatggttgtatcaactatgaagcgtttgtgaggcatatcctgtcggggggacgg

SEQ ID NO: 15271 - DNA, 289 bp, Homo sapiens
cactactatagggcgaattggagctccaccgcggtggcggccgtgtctcaccacatcctggctccagtgtggatgcagagagagtgtgacagaggatctgcctgcgaaccacctgggattagtcaagtcccaaggtgcccagagtgggactagttcttcacagtgtggcagctgcactaatctgtttgtgagggaatatccattccttaactctactctcctaattatgggaatttctttttgtttcagaataaaccccatttgtatagaaaaaaaaaaaaaaaaaaaa

SEQ ID NO: 15272 - DNA, 188 bp, Homo sapiens
agggcgaattggagctccaccgcggtggcggccgaggtacaggatctttttggcagagccccaagtaaagctgtcaatcctgatgaggctgtggccattggagctgccattcagggaggtgtgttggccggcgatgtcacggatgtgctgctccttgatgtcactcccctgtctctgggtattgaaac

SEQ ID NO: 15273 - DNA, 385 bp, Homo sapiens
tacgactcactatagggcgaattggagctccaccgcggtggcggccgcccgggcaggtactcttttttttttttttttttttttttaagacggagtctcgctctgtcgcccaggctggagtgcagtggcgggatctcggctcacttcaagctccgcctcccaggttcacgccattctcctgcctcagcctcccgagcagctgggactacaggctcccatcaccacgctcggctaagtttttgtaattttagtagagacagggtttcaccatgttagccaggatggtctcgatctcctgacctcgtgatctgcccgcctcggcctcccaaagtgctgggattacaggcgtgagccaccgtgccaggccaatatgaaagtttttaac

SEQ ID NO: 15274 - DNA, 228 bp, Homo sapiens
actactatagggcgaattggagctccaccgcggtggcggccgaggtacgcggggactcagaggccgccatcaaccgccagatcaacctggagctctacgcctcctacgtttacctgtccatgtcttactactttgaccgcgatgatgtggctttgaagaactttgccaaatactttcttcaccaatctcatgaggagagggaacatgctgagaaactgatgaagctgc

SEQ ID NO: 15275 - DNA, 284 bp, Homo sapiens
tacgactcactatagggcgaattggagctccaccgcggtggcggccgcccgggcaggtacttttttttttttttttttttttttttagacagggtctccctctgtcacccaggctggagtgcagtggcacaatcatggctcacggcaacctcgaccccctgggtccaagtgatccttccacctcagcattccacaagatgatggaaccacaggcatgcactactatgcctggctaattcttttattttttgtgcagacagaggtctccctatgttgcccaggct

SEQ ID NO: 15276 - DNA, 463 bp, Homo sapiens
tacgactcactatagggcgaattggagctccaccgcggtggcggccgaggtacttcttgtaaattccttcttgatatgagccgcaatgcccctctctatgttgtatttctccagcgcctgagtagcgcactccaccgagtcctgttgcatctcttccgacatgtccgcatttttgatcacggcctttcggtcgccccgcgtacctgcccggccgctctagaactagtggatcccccgggctgcaggaattcgatatcaagcttatcgataccgtcgacctcgagggggggcccggtacccagcttttgttccctttagtgagggttaattgcgcgcttggcgtaatcatggtcatagctgtttcctgtgtgaaattgttatccgctcacaattccacacaacatacgagccgggagcataaagtgtaaagcctggggtgcctaatgagtgagctaactcacat

SEQ ID NO: 15277 - DNA, 202 bp, Homo sapiens
tagggcgaattggagctccaccgcggtggcggccgaggtactactgctgaggtctccaggacagaagtcacctcctctggtagaacatccatccctggcccttctcagtccacagttttgccagaaatatccacaggaacaatgacaaggctttttgcctagcccaccatgacagaatcagcagaaatgaccatccccactc

SEQ ID NO: 15278 - DNA, 437 bp, Homo sapiens
cactactatagggcgaattggagctccaccgcggtggcggccgcccgggcaggtacttttttttttttttttttttttttttaggggacacggtctatccgcaagctggggattctgccattctcatcatagttttgaagccggggttctgaaatctcatgacagatctccagcttgaactcacggaatggtttttctaggccctgctcataatacagctgcaggtaaccagtgtctgtcagtttgacgaagatcggtccccagtgcctggaggacatgatgtttttcttctcagggatcctcaacatcattggccacccgtcacgaggctgggaccgtgctgatccaggcgggtgagcatctagttcaatccaggctactgggtcatcatcaggtagagttgcactgccaaagtgatcagggtcatcaatttggag

SEQ ID NO: 15279 - DNA, 212 bp, Homo sapiens
tacgactcactatagggcgaattggagctccaccgcggtggcggccgcccggcaggtactgggccgggtgcagtggttcacgcctgtaatcccagcactttgggaggccgaggcaggcagatcacgaggtcaggagatcgagaccatcctggctaacacggtgaaaccctgtctctactaaaattacaaaaacttacccgagcgtggggatg

SEQ ID NO: 15280 - DNA, 180 bp, Homo sapiens
ctactatagggcgaattggagctccaccgcggtggcggccgaggtacttttttttttttttttgattgttatttagtttttatttcataatcataaacttaactctgcaatccagctaggcatgggagggaacaaggaaaacatggaacccaaagggaactgcagcgagagcacaaagat

SEQ ID NO: 15281 - DNA, 206 bp, Homo sapiens
ctcactatagggcgaattggagctccaccgcggtggcggccgcccgggcaggtacttttttttttttttttttttttttttaggggacacggtctatccgcaagctggggattctgccattctcatcatagttttgaagccggggttctgaaatctcatgacagatctccagcttgaactcacggaatggtttttttaggccctgc

SEQ ID NO: 15282 - DNA, 529 bp, Homo sapiens
tcactactatagggcgaattggagctccaccgcggtggcggcaggtggagagagggtggaaagtgagcagcgggctgggctggagccgcacacgctctcctcccatgttaaatagcacctttagaaaaattcacaagtccccatccacaaaaaaaaaaaaaaagaaaaagtactattctagtcttaagaataaagaccatgttcagccaggcgtgggggctgccccctgaattccaaccctttgggggggtggggggggcaaaatcacggggtcaggcattcgagaccagcaaccacggggtcaggcattcgagaccagcctggccaacatggtgaaaccctgtctctactaaaaatacaaaaattagttcggcatgggtggtgcacacctgtaatcctagctactcaggaaggtgaggcaggagaatcacttgaacctaggaggcggagactgcagtgagccaagattatgccaatgcactccagtatgagtgacagagcaagactgtcttcaaaaaaaaaaaaaaaa

SEQ ID NO: 15283 - DNA, 226 bp, Homo sapiens
ctcactatagggcgaattggagctccaccgcggtggcggccgaggtacgcgggggggagctcggattttaaggcagtagcctgctgatgctcccagctgaataaagcccttccttctacaatttggtgtctgaggggttttgtctgcggctcgtcctgctacatttcttggttccctgaccaggaaacgaggtaactgatggacagccgaggcagccccttaggcg

SEQ ID NO: 15284 - DNA, 168 bp, Homo sapiens
gctccaccgcggtggcgggcgaggtacttttttttttttttttttttttttgctggtaggaaatgctttaataaaaatgcaatctctaaggggccatggcatcattaaaagaaaggatgtcatgcccagatccagaacttgaaggtggcaggcaccagcaagcaccat

SEQ ID NO: 15285 - DNA, 315 bp, Homo sapiens
tacgactcactatagggcgaattggagctccaccgcggtggcggccgaggtacgcgggggaagaagaggaagaagaagaagcagaaggaatggaaagcctggagaaagaggatgaaatgacggatgaagcagttggagactctgctgagaagcctccttctacttttgcctcacctgagactgctccagaagtggagaccagcagaactccaccagcctggtgaaccccgaacccttcaatcaagaaaagacctttgatcaggagaagacttctcgtctcatttctggggacacattcaagatttctccaaagca

SEQ ID NO: 15286 - DNA, 493 bp, Homo sapiens
cactatagggcgaattggagctccaccgcggtggcggccgcccgggcaggtacttcttttttttttttgtggaggacttgggcttctctgcccatattgcagtgttggtgtgtcccagagttctatccttactctaaacgatctccatttttgagcttatccacacagtggactgtggggttctggtctttggccttctgcctaggacgtgctttcctaggtatccacatgcctgctctcattattctgatgtcttaactcagagggcaactttgagttaaggctttctatcactacatttaaaatggtgggacctttcctgtctacccagctagcctgatgtttgcttgtccattgcacttttcttctgacttcttagatgaggacaggacttaaaaaaattggatatctattttctgctgtttccccaaaatatttttcttgtgttgggtctaaaagaccatgtgctgttctgtcacccacgctggagttc

SEQ ID NO: 15287 - DNA, 471 bp, Homo sapiens
ctatacggcgaattggagctccaccgcggtggcggccgcccgggcaggtacgcggggggatttccgatgagtgacccttacaagtccttcttgatcctgaactgggttaggagccgctgctgctgctcgtgttgaatctagaacctgagccagacatgggactggaggacgagcaaaagatgcttaccgaatccggagatcctgatgaggaggaagaggaagaggaggaattagtggatcctctaacaacagtgagaaagcaatgcgagcagttggagaaatgtgtaaaggcccgggagcggctagagctctgtgatgagcgtgtatcctctcgatcacatacagaagaggattgcacggaggagctctttgacttcttgcatgcgagggaccattgcgtggcccacaaactctttaacaacttgaaataaatgtgcggacttaattcaccccagtctttatcatctgggc

SEQ ID NO: 15288 - DNA, 454 bp, Homo sapiens
ctatagggcgaattggagctccaccgcggtggcggccgaggtacattatgttttcgttttcattcatctcaatagtttcttcttggagatttggggggaaaatgatagacaggaggcaggactagattgcagccctcacccggacagacagcagctcacagggactcgcatcatgaactttggctccagaactactgcaggaatataccaggaaagccaagagaatccacagaccctctgaaggaagcagattgctccttcaggacccaagagacaccctaaatactgtgttggtatcgttggcagagaaacctcaagacggttcacattacaggactctgtgcagacaaccctcggtacctgcccggcggccgctctagaactagtggatcccccgggctgcaggaattcgatatcaagcttatcgataccgtcgacctcgagggggggcccg

SEQ ID NO: 15289 - DNA, 440 bp, Homo sapiens
ctatacggcgaattggagctccaccgcggtggcggccgaggtactacaagaacatcggtctgggcttcaagacacccaaggaggtgcggggaacctcagaagaaagaaggggaacctggcgttcctgcacgtgtgcccacgacgagttgccctgcctgcatctaagtggcttctggggctgctgggaattgtagttgcttccctgaggccacgcccctggctcttttaaggaaccgcccgcccaaggctcactcctttatctttcctatcctttcaggctattgagggcacctacattgacaagaaatgccccttcactggtaatgtgtccattcgagggcggatcctctctggtaagtgcgggagttactggtgtctggggcctgaaatactgaaagaagggtcttggggcccaaactcctgggtcctgggtgagaggg

SEQ ID NO: 15290 - DNA, 496 bp, Homo sapiens
ctatagggcgaattggagctccaccgcggtggcggccgcccggccgggtacccccatcacagaagtcaagcaggctgaggaagtggcctctaccaggcaggagatcttccaggagcggttggctgcagggccagagttccacggtcttgggcccctgttcaagttctaggctgagcccatggccctcaccgagtcagagacggagtatgtcatccgatgcaccaaacacaccttcaccaaccacatggtttttcagtttgactgcacaaacacactcaatgaccataccttggagaatgtcacagtgcagatggagcccactgcggcctatgaggcgctctgttacgtgcctgcccggagcctgccctacaaccagcccgggacctgctacacactggtggcactgcccaaagaagaccccacagctgtggcctgcacattcaggtgcatgaagaagttcactgtctaggactgtgagcccaccactggggagact

SEQ ID NO: 15291 - DNA, 450 bp, Homo sapiens
gctccaccgcggtggcggccgacgcacccgggacgcacagtaaatccatgtgttggtgggcttgtctataaaaaagcaatcaagaacgataatgtcgaaaaagaaaggaatttataggtcgggaacacatgaatgtcagacatttgaagaactatagtaaaatgatcaacactaaatatactggagaaaactttgttaatatgccaatgaggtaggcctgatctttgaaatagtgaataggaatacaatgcatttcctcagtgatcactgattagaatgagttagtgggatccttgggaagccaaacggagcggaattcttgatcatgtcccatacagaccagtgaatccacgacccgcagacctgcccccccgcaacagcttataccatggaatgaggacaaggcgatactctgagctgcggactgaactggcagacacaaactgtacc

SEQ ID NO: 15292 - DNA, 442 bp, Homo sapiens
agggcgaattggagctccaccgcggtggcggccgaggtacaaggaagcctggttgaagtcttttccttgagaggcctggatttgttcacatattcagatttcaactggctttataacaggtttccttatgtgcctcatattggctccaggttcactgggtttaaaaggagccaaagcaccataaggttttggcaaaggaagagtggcatctgcttctgggatgtaggcattcggacgctgctctgcagttgtgtaaacaccattgggcagctggcgattatctgcttccaagaactcctgagacttttcagcgatggccaaggcgtgcatttcttcatctcgaaggactttcaaccattctttctcaatttccttattgagtggcagacctttttctatcctggaattgcaagtgaagatgaaagtcttctttctccctgac

SEQ ID NO: 15293 - DNA, 408 bp, Homo sapiens
  misc_feature 102, 112: n = A,T,C or G
cgtccgtgcggggtgccggtggcgcccgagtccgcttgtccgccttcctctctgacttgtaccggggcctgtctctgcagaggtcaggggaggcggggcccncacacgtccncagtggcagcgggagcggcagctacgggttcgcggagcccccgaccccccaagggctagaggagcgctcggcggaccaaagaaagcccgcgagcggctgcgcgcgcaccaataggtgcggggctcggagccgcgcagactgcgccgtccctccctccgcccccgccccgccgccgccgccgccgccgattccccctactcctgctcctgccttggctcctccgccgagcgtttcgcactccgagagccgtagcggcagcggtgcgtcctgcctgcagagagccaggccggagaagc

SEQ ID NO: 15294 - DNA, 431 bp, Homo sapiens
cccacgcgtccgttcccagacagttccatccaagggagaattaagtagagaaatttgtctgcaatctcagtgaaggacaaatctacgacaccaggaggaacaggaattaagcctttcctggaacgctttggagagcgttgtcaagaacatagcaaagaaagtccagctcgtagcacaccccacagaacccccattattactccaaatacaaaggccatccaagaaagattattcaagcaagacacatcttcatctactacccatttagcacaacagctcaagcaggaacgtcaaaaagaactagcatgtcttcgtggccgatttgacaagggcaatatatggagtgcagaaaaaggcggaaactcaaaaagcaaacaactagaaaccaaacaggaaactcactgtcagagcactcccctcaaaaaacacca

SEQ ID NO: 15295 - DNA, 486 bp, Homo sapiens
tatagcgcgaattggagctccaccgcggtggcggccgaggtaccagcctcctctattcctcccaatctcaaggttactcttaaatactagtaaatgcaaaaagaacttgtaaagtggcaaggcatggcctatcaaaagtcagcccaagggcagttttcagccctgcctcacctgggtctagttcagctgacggatgagctgattgatgcgttcaccccgatagccaggtgtgcccatctccttgaggaagcccactctatttttggtagcatgacgggccactgagaggtggaaagggcacaagaaccatgagatctcctggaaatgcttccctgggaaggcaatttcatgaatgaggtcttccaagcaaatgacgccaaacttccccaggtgctcctcaatcactgtacctgcccgggcggccgctctagaactagtggatcccccgggctgcaggaattcgatatcaagcttatcgatacccgt

SEQ ID NO: 15296 - DNA, 514 bp, Homo sapiens
ctactatagggcgaattggagctccaccgcggtggcggccgcgcgggcaggtaccccgagtccagcggagacaaaggagttagaaagagacagaataagagtttaaaaggcaggtccaggggaccggagcgttggaggcttgctcatggcccagagctctttggctccgcccaatttattgatttacaagctctttgttcttagggcagatgggaggggtaggaagggatgaggaaaaggattaatcagtgaaggagaactcgtgagtcattcaataatatgtatagtagtggtggtttctgtgaatttccttgagtaaaggcgtgtgtctaaactactcaagatctttaacttatcgggattgaaatggatgggagtgagtttcaggaggagccaagatgtttgattatactccactgcttcagggagtgttatctcccggagcaacctgtggaatgccgcagagcgtttatgctctaagggtataaagacatgaaagcaataaggagacttt

SEQ ID NO: 15297 - DNA, 418 bp, Homo sapiens
atagggcgaattggagctccaccgcggtggcggccgaggtacgcgggatagtgaaaccccgtctttactaattttttgtatgtttggtagagacagggtttcaccgtgttggccaatatggtctcgatctcctggctcatgcctgtggtcccagcactgtgggaggctgatgcaggaggatcatctgaggccaagagttcgggatcagcctgggcaacatagtgataccctatctcttaaaaaagaagaagtttttaaatttgaaataataataggtacctgcccgggcggccgttttagaactagtggatcccccgggctgcaggaatttgatattaagcttatcgataccgtcgacctcgagggggggcccggtacccagcttttgttccctttagtgagggttaattgcgcgctt

SEQ ID NO: 15298 - DNA, 563 bp, Homo sapiens
actactatagggcgaattggagctccaccgcggtggcggccgggcaggtacgcgggatgattgaattttgtttccgcctaaaatagtaatctataagatataaactcgagttagggtttacattttttacttatgaacacagggcactagggccacttcagtctaatttcctgctttttaattactttaacactccacaggaggaggactggttttcctctgtgacttcctaatgtatggcaagcaggacttcttctaatccactaccctcttcccctagcttaactaaggcttgcagtaaaattataaatttccactttctttcctacattctcaaatgtaggaaatgaggacaaacaacttcctctctccaatttacaacactatcaactatttgtcctttattgtgcatttcagacacagtgttttaattgttaatcatgtttttacactgcagtggatggcaggtttttaaagatttgttttctgtttgtaaacacttttttattggagacagagtttattctttgtggccaagctggagtgcaatggcatgatcttag

SEQ ID NO: 15299 - DNA, 461 bp, Homo sapiens
atagggcgaattggagctccaccgcggtggcggccgcccgggcaggtacttttttttttttttgagatggaattttgctcttttgcccagtctggagtgcagtggcatgatctcagctcactgcaacctccacccactgggttcaagcgattcttctgccttagcctcccaaagtgctgggattacaggcgtgagccaccgtgcctggccctgtctctcttaagagtaggttcattgtctgtcttagagtcacttctattgcaactcattttctttttccagggcacagatcgaccaagctgccgttccctattctgcaggacaggactattctagcatacctgcttcgtccacccaggcagggtttggggtggtctcttctgtgcctgcagtccccatttgacacttggttgccaccatctttggagattattgtttggaatgatggttccattggcttt

SEQ ID NO: 15300 - DNA, 457 bp, Homo sapiens
ttggagctccaccgcggtggcggccgaggtacttctttctttttttttttttttttttgagatggagtctcgctctatcgcccaggctggagtgcagtggcgcgatcttggcgcactgcaagctctacctcctgggttcacaccattctcctgcctcagcctcccaagtagctgggactacaggcgcctgccaccatgcctggctaatttttagtagagacggggtttcgcagtgttagccaggaaggtctcaatctcctgacctcctgatccgcccgcctcggcctcccaaagtgctgggattacaggcgtgagccaccgcgcccagttgtgcatttctggtttctaagaatcaaaccacttggctgtttttagaagttacttcccatgttataaagctgaggaagcttttttttttttttttttgagacagagtctctgtcacccaggctggagt

SEQ ID NO: 15301 - DNA, 493 bp, Homo sapiens
gggcgaattggagctccaccgcggtggcggccgcccggccaggtacgcggaggcactcagggagctcagattttgagacagtggctggccgatgctcccagctgaataaagcccttccttctacaaaaaaagaaaaagaaaaaagaagacaggatatctgaaattaagactgcagatggagtagtttctgaaaatgacagggtccaaggggtgaccacgggaccaagtggctgaactggaatgaagttaagaagcagtaagaaacatccgataatatggtgatcagctcaacagaatgacatattcaccatgtccccaaggaggagatgactgagatttcaaattctcaagcagcctcaatgcagccagagatttaagagggctatgtgtccagaaggagactctgggcaaacgcagaatggattcagattactcaaattcctgtcagatttcttaacctggtgggctataccaaacccaaaaactttaagca

SEQ ID NO: 15302 - DNA, 464 bp, Homo sapiens
agggcgaattggagctccaccgcggtggcggccgaggtacgctggatagcctccaggccagaaagagagagtagcgcgagcacagctaaggccacggagcgagacatctcgggccgaatgctgtcagcttcaggaatgcccccccgcgtactttttttttttttttttccgctctacaaggggtagagggggggctacaatgtgaatacggcccctattttaaagattattaggggggtaaattataggacgacgggcatgaaactgcggtttgttgcacagattacataacatcgaccgcagtatacccccggccgtgtagcggcgaaagaggtttgttttaaacgaccggcaatagcatctgtttttaagactaatgtggggacagctcatgagggcaagacgacttgtggtgaaattattatacgaatgggggctgcaataaggaggacctgcccgggcgg

SEQ ID NO: 15303 - DNA, 507 bp, Homo sapiens
atagggcgaattggagctccaccgcggtggcgggttaattgcgcgcttggcgtaatcatggtcatagctgtttcctgtgtgaaattgttatccgctcacaattccacacaacatacgagccgggagcataaagtgtaaagcctggggtgcctaatgagtgagctaactcacattaattgcgttgcgctcactgcccgctttccagtcgggaaacctgtcgtgccagctgcattaatgaatcggccaacgcgcggggagaggcggtttgcgtattgggcgctcttccgcttcctcgctcactgactcgctgcgctcggtcgttcggctgcggcgagcggtatcagctcactcaaaggcggtaatacggttatccacagaatcaggggataacgcaggaaagaacatgtgagcaaaaggccagcaaaaggccaagaaccgtaaaaaggccgcgttgctggcggttttccataggctcccgccccctgacgagcataaaaaaatcgacgc

SEQ ID NO: 15304 - DNA, 299 bp, Homo sapiens
tatagggcgaattggagctccaccgcggtggcggccgcccgggcaggtacgcggggggatttccgctgagtgacccttacaagtccttcttgatcctgaactgggttaggtgccgctgttgctgctcgtgttggatctagaaccgtagccagacatgggactggaggacgagcaaaagatgcttaccgaatccggagatcctgaggaggaggaagaggaagaggaggaattagtggatcccctaacaacagtgagagagcaatgcgagcagttggagaaatgtgtaaaggcccgggagc

SEQ ID NO: 15305 - DNA, 505 bp, Homo sapiens
  misc_feature 48: n = A,T,C or G
cgactactatagggcgaattggagctccaccgcggtggcggccgaggnacttttttttttttttttttttttttgggtatgaaaacttagggactaaaattaatataaaaattggcataatgttggattgaatctacattttggcagaagttaaacattcccacataatgtcaaaattatacatcatgcagttctgtttttttgtttgttttattttgttttgtttttgagtctggctctgtcacccaggctggagtgcagtggcgtgatctgcaacctctgccccccgggttcaagcgattctcctgcctcagcctcccgagtagctgagattacaggtgcgcgccaccacacttggctaatttttgtattattagtagagacggggtttcggcatgttggctaggccggtctctcctgacctcagggtgatcagcccgccccggcctcacaaagtgctgggattgcaggcgtgagccaccttgcccagcccacatcatacagt

SEQ ID NO: 15306 - DNA, 526 bp, Homo sapiens
ggcgaattggagctccaccgtgcaggcgggcgacggacgcaataacgcctgccacatattaagtatgtaataagcatttattattacttatcagggtatgatttatgaattgcggaacctccgattatgggagagtctggcttcaatcaagggctgaaattccatttccactgacattttttccttccccatcccccgattctgtcctgcaacagggtaacaagaaggggcccttaggccgttgggactttgatacccagcaagaatacagcgagtatatgaacaaccaagaagctttgcccaaagctgcattccagtatggtatcaaaatgtctgaagggcggaaaaccaggcgcttcaaggaaaccaatgacaaagcacaacttgatcgccagtggaagaagattagtgcaatcattgaaaagaggaagaagatggaagctgatggggttgaacccaaaagaccaaaatactaatcactagttacaaccagagatgctccacaaggatatgctccccactgttt

SEQ ID NO: 15307 - DNA, 518 bp, Homo sapiens
ctatagggcgaattggagctccaccgcggtggcggccgaggtacatagtgtcgcgaactcaaatcggcatttagatagatccagtggtttaaacggcacgtttttgcctataaaaaaagtgcaaaaaagatgtggtttacaagttaaagctacagaatccctttttgctgtaattgcaccagttttaaagcctctggacagagcagtatttcgtttaaaactttgtttttcttaaaagcttacagtgtttggctaattctcctcccctttttacaagacgggggccggagggtggacactggtggcaggttaagggatactgtcactttaagaagcctgcagattgaagtgtaaacatggagaaattaggggctgattttttaaactgtgtgagatattaaccagccgccctgttataaaatcaggaaatccaaacagcgatttacaccgattaacaccccctttatatattttttacaaaaatacactgagaaaataataaaacgttttcatctctc

SEQ ID NO: 15308 - DNA, 524 bp, Homo sapiens
gggcgaattggagctccaccgcggtggcggccgaggtacttttctttttctttttctttttttttttaatgtgagacaggatctcattctgttgcctaggctggagtgcagtggcgcaatctcggctcactgcaacctctgcctcctgggctcaagcaattctcccacctcagcctcccaaatagctgggatcactggcacaaaccaccatgcccagctaattttgtattttttgtagagacagggtttcaccatgttgcctaggctggtctcaacctcctgggctcaagcaatcctcctgcctcggcctcccaaagtgctgggattacagatgtgagccaccgcatccagccccacaccctcatttataccaattacctgcccagtaactgtggacttttgcttcctcacccctgctctgatctggaaggagagggattatgttatagcttgtcagcacagtcccaagttcaatatttctgcggcaaaaacttccttcaaaaaataaatgtacctgcccgggc

SEQ ID NO: 15309 - DNA, 499 bp, Homo sapiens
  misc_feature 419: n = A,T,C or G
agggcgaattggagctccaccgcggtggcggccgaggtacttccctcttcccgctgaagggaaattcacagaagctatagttgatgcagagccgaaatatctgatagttgtgcgacctgctccacctccaagtcaaaagaagtcatgttcaggtaaaactcgttctcgcaaacctctgcagctggtggttggcactctgacaccgagctcggtcttcctgtcatggggtttcctcatcaacccacaccatgactggacattgccaagtcactgtcccaatgacagattttatacaattcgctatcgagaaaaggataaagaaaagaagtggatttttcaaatctgtccagccactgaaacaattgtggaaaacctaaagcccaacacagtttatgaatttggagtgaaagacaatgtgnaaggtggaatttggagtaagattttcaatcacaagactgttgttggaagtaaaaaagtaaatgggaaaatccaaagtacc

SEQ ID NO: 15310 - DNA, 465 bp, Homo sapiens
  misc_feature 406: n = A,T,C or G
tatagggcgaattggagctccaccgcggtggcggccgcccgggcaggtacgcgggggctgactcctttttcggactcagtctgcctgcacccatgtgattaaaaagctttattgctcacacaaagcctgtttggttatctcttcacacagacatgcgtgacacttggtgctgaagacccgggatgggggactccttcgggagactggtcccctgtcctcaccctcactccatgaggagatccacctacaacctcgggtcctcagtccaaccagcctaaggaacatctcaccaatttcaaatcagatcttggcttagtggctgaagactgatgctgcccaattacctcggaagcctcctggaccatcacagatactttgagtaatctcttatagtggaaggatgcanagttggaataagagcaatgaccacctctcctgagagacctgtttgttcccacatctgta

SEQ ID NO: 15311 - DNA, 505 bp, Homo sapiens
agggcgaattggagctccaccgcggtggcggccgcccgggcaggtaccatatgtttcaaagtagctgttcatccacagataaagagatcaagaaactctcatatacatacgctaggaaatattctccagccatcaaaataatgaagcagtgtcatttagagcaacacagatgaaccgcggagacctgcctcctactccaccatcacatggaacccaccactgcttctccgaagctcgctctgaccacgccgctgctgctgcaggggcctcgcaggaagtgcagtctcccccgcgtacctcggccgctctagaactagtggatcccccgggctgcaggaattcgatatcaagcttatcgataccgtcgacctcgagggggggcccggtacccagcttttgttccctttagtggagggttaattgcgcgcttggcgtaatcatggtcatagctgtttcctgtgtgaaattgttatccgctcacaattccacacaacatacgagccgg

SEQ ID NO: 15312 - DNA, 542 bp, Homo sapiens
gggcgaattggagctccaccgcggtggcggccgaggtactttggtatgtttttgtcttgaaaagaggttttctagctagaaattcggggcccagaaggtcaaggctccagagatccccttctcatcatccttcagttgtctgaggagacagaggatcacatgtgtcacagtgagtgctgattccccagaatctgcagtcttaagctcccctgctgacgcacacagccagttctctgcttcatattcatgtgacccactgtgaagtgacaggcagctgccaattctgtcatataagaagcagctctgcccatgcaactttgaaagttcctgcacttctccatagactgctccttcatggaaataaacacatcatcacactgtgggtgcctaagctaagtttgtttgcagtttgatgatgcccagctccttttcaactcagccttaattggcactttaagggccaggatgaggtttctcttaggccaagtcgagatttccagatttccttttgtccaaggctgaccagttaaaagttattcaca

SEQ ID NO: 15313 - DNA, 532 bp, Homo sapiens
ggcgaattggagctccaccgcggtggcggccgccgggcaggtactttttttttttttttttgagacagagtctagctctgcgcccaggctggagtgcagtggcaccatctcggctcactgcaacctccacctcctgggttcaagcaagtctcctgcctcagcctcctgagtatctgggattacaggcacatgccaccacgcccggctaatttttgtatttttagtggagacggggtttcacttgttggtcaggctggtctcaatctcctgacctcgggatccatctgcctggtcctcccaaagtgctgggattacaggcgtgagtcaccgtgcccggcgagaagcaactcttaaaatactttattccttcctctaggaccctttaaatggtgaaaatgggcagatgagtagcaataagtggacctttgttactcttctgagttagaaaaattctaatttagtacctcggccgctctagaactagtggatcccccgggctgcaggaattcgatatcaagcttatcgataccgt

SEQ ID NO: 15314 - DNA, 526 bp, Homo sapiens
gggcgaattggacctgcaccgcggtggcccggccgggcaggtaccataaaccgtagcaggctcagcatatattttcccttccttaagtcagtaactttcaccttttcacttacaggaagcactttacggcttctctttagcatatgcaaattgccagcattaccactcttggactttggggccactgttaagtaaagtaagggttacttgaacataagcactgtaggccggggcatggtggctcacgcctgtaatcccagcacttgtggtaggccaaggtgggtagatcacccgagctcaggagttcgagaccagcctggccaacatggtgaaaccccacctttactaaaaatacaaaaattagccaggtttggtggctgtatacctgtgatcgcagctattcaagaggctaaggcaggagaatcgcttgaacctgggaggcggaggttgcaatgagccgagatcgtgccactgcactccagcctgggtgacagagcgagactctgcctcaaaaaaaaaaaaaaag

SEQ ID NO: 15315 - DNA, 548 bp, Homo sapiens
ccaccgcggtggcggccgcccgggcaggtacttcttgatttcatcatacaagacaagcacaaaagcaccacccatgcctctgagaacattggaccatgcacccttgaaaaaagctttgcctccttcatcacgagcaatcttccgccagcagtcaagcgtgcctgtgtacagatggggttttgccatgtggaccaggctggtctcgaactcctggcctcaagtgatgcacctgcctcggcctgccgaagtgctgggattataggagtgagccaccacgcccggctacgagttgggttttaacagaagaggaccttgaatgctgaagcttcacagggcggccaaactaactcgctgatttttgcaagaccacagtgtaaaggtcggatgtccacctgaagaaggggtgggtgcaactctctgggtgctgcacacaccatgaccagcctgggcatgcagcaccccagctcccatccattcacactggttgcctttgtgaggtccattttgagagggctctcagaggcccttttaatgagaaaaaaaaatag

SEQ ID NO: 15316 - DNA, 507 bp, Homo sapiens
tatagggcgaattggagctccaccgcggtggcggccgaggtacctttgacccatcatcttgggaggtggggaggaccgcgagggtccaggcagggtgtaggggaatgtattagtccaaggagatttccctcttcatccgcagcagtgtatctattctatacctggctatgggagagaccccttgcatgggagggaccccttgctatggcccctttagccaggcagtgggatctacctgtggcccggcctccctaatgtcattcacattgaatggggatgaggtcggacagtggctcatagagccgagtatgagccctagctgtgggctagaaatgtccttaataaacatccttattttttagaaaaaaaaaaaaaaaaaaaataaggtacctgcccgggcggccgctctagaactagtggatcccccgggctgcaggaattcaatatcaagcttatcgataccgtcgacctcgagggggggcccggtacccaacttttgttcccttt

SEQ ID NO: 15317 - DNA, 521 bp, Homo sapiens
gcgaattggagctccaccgcggtggcggccgggcaggtacgcgggtggacacaatttccacaacctttcagatgctgatgtagagctattgggaaagaacttccaaactcaggaagtttgcagagagcagacagctagagataactcgggacccagagttggtcgacagatgttagatgtatcctagcttttagctataaaccactcaaagattcagcccccagatcccacagtcagaactgaatctgcgttgttgggaagccagcagtggccttgggaaggaagccatggctgtggttcagagagggtgggctggcaagccactttcggggaaaactccttccgccccaggtttcttcttctcttaaggagagattattttcaccaacccgctgccttcatgctgcctttaaagctagatcatggttgccttgcttagagaattactgcaaatcagccccagtgcttggcgatgcatttacagatttctaggccccttaggttttgtagagtgtgagccc

SEQ ID NO: 15318 - DNA, 539 bp, Homo sapiens
tggagctccaccgcggtggcggccgcccgggcagggacttttttttttttttttttttttttttttacggagtgtatgtggacagtgccaactttattgaagacaggtccctttgagactacaggcccagccactcataaggctgaggcaggaggatcgcatgagcccaggagtctgaggccgcagcgagccatggtcacaccaccgcaccccagtctggcaacagagcaagaccctgtctccaaaaaacaaacacaaaaacaaaacaaaacagccaaaagcaggctagaggatgctaaatgagactttcctaaatctccattttggctgggacccaaagctgaggacaaaaattggcaaatatatccatatgttgcagatttgctgccgatccatgaatgatttgttaaggagtagcccaaagctcctctaccacaggaggcaagagtgatggagaaaatatcagaaagtgcaagctttttgaaaggggctggagtgccttgggtctgcaagctaagtgagggtatactttaaaacac

SEQ ID NO: 15319 - DNA, 511 bp, Homo sapiens
cactatagggcgaattggagctccaccgcggtggcggccgaggtacatggagttttgatcaacggacttatgccacctctcctaggaactaaaatgccagggccaggctgtgtatttctttcccaggaaattagctttccagcccctttatatatggaaggctgggttaaagttatggttccagaagcttccaaatcctgaaatagatgttttaaagatgcaacctcaaacaccaatgctgttgttaaagagcctatggggaattgctgctgctctagaactagtggatcccccgggctgcaggaattcgatatcaagcttatcgataccgtcgacctcgagggggggcccggtacccagcttttgttccctttagtgagggttaattgcgcgcttggcgtaatcatggtcatagctgtttcctgtgtgaaattgttatccgctcacaattccacacaacatacgagccgggagcataaagtgtaaagcctggggtgcctaatgagtgagc

SEQ ID NO: 15320 - DNA, 452 bp, Homo sapiens
cgcgaattggagctccaccgtggtggcggccgaggtaccaaaaagactctcaaaaaccaatactcccacgggcaagggaatagccaagtttgttgcggtttgcaatgaatgacatcagccctgtgtaggtctcaatcaaaatgggttcagttaacaccatcagtttctttcctcttccagatccagttgaattcttgtgggcattctggatagctggaacaagcttagacatgaacccagacaacttgcaaatttcaaggaatttctcactggtggatttcataggatgctcagtgaaagtagcataaggaacttcagtggaccatgggttccagcgggacagaagagactgctcctccggactcccccagtagatcttaaggccttctccttgtctcttgtccagggacatcccagggaaggtgaacttgcccaggcagatgcgatagaca

SEQ ID NO: 15321 - DNA, 460 bp, Homo sapiens
atagggcgaattggagctgcaccgcggtggcggccgtccgggcaggtacgcggggggcatatcagatacgagggcaccatgtagcacagctggaccccctggggattttggatgctgatctggactcctccgtgcccgctgacattatctcatccacagacaaacttgggttctatggcctggatgagtctgacctcgacaaggtcttccacttgcccaccaccactttcatcgggggacaggaatcagcacttcctctgcgggagatcatccgtcggctggagatggcctactgccagcatattggggtggagttcatgttcatcaatgacctggagcagtgccagtggatccggcagaagtttgagacccctgggatcatgcagttcacaaatgaggagaaacggaccctgctggccaggcttgtgcggtccaccaagtttgaggagtttctacagcg

SEQ ID NO: 15322 - DNA, 527 bp, Homo sapiens
  misc_feature 456: n = A,T,C or G
agctccaccgcggtggcggccgcccgggcaggtacagcgtggagggtttaggcagcgtgttctgattctttgcgggacggcgagcgcatttgtgctttgcccgccgcggcctaggaggccttttgaggccgcgtagtcggtgtttttgaacttactctacagcttctggcaggccgtgcggcgccctgacccggcctcaccatgttggtgctgtttgaaacgtctgtgggttacgccatctttaaggttctaaatgagaagaaacttcaagaggttgatagtttatggaaagaatttgaaactccagagaaagcaaacaaaatagtaaagctaaaacattttgagaaatttcaggatacagcagaagcattagcagcattcacagctctgatggagggcaaaatcaataagcagcttgaaaaaagttctgaagaaaatagtaaaagaagcccatanaccgctggcagtagctgatgctaaactaggaggggtcataaaggaaaagctgaatctcagttgtatccata

SEQ ID NO: 15323 - DNA, 572 bp, Homo sapiens
ggcgaattggagctccaccgcggtggcggccgaggtaccttgggtctgaaggggtcactcaagcgctctgctatctctgcagctaaaacgggtgtcaggttttcagctgctactaaagataatgagcataagcgttcaccgaccaagactccagccagaaagcctgcacatgtgaccgtgtctgggggcaccccaaaaggcgaggctgtgcttgggacacacaaattaaagaccatcacggggaattctgctgctgttattaccccattcaagttgacaactgaggcaacgcagactccagtctccaataagaaaccagtgtttgatcttaaagcaagtttgtctcgtcccctcaactatgaaccacacaaaggaaagctaaaaccatgggggcaatctaaagaaaataattatctaaatcaacatgtcaacagaattaacttctacaagaaaacttacaaacaaccccatctccggacaaaggaagagcaacggaagaaacgcgagcaagaacgaaaggagaagaaagcaaaggttttgggaatgcgaaagggcctcattttggctgaaga

SEQ ID NO: 15324 - DNA, 469 bp, Homo sapiens
actatagggtgaacggcgaattggagctccaccgcggtggcggccgcccgggcaggtactttttttttttttttaacatctttgtttttaaaatagaatgatagaactttgccaggctttaagatcttggcttaatttaatgtattaatctgtttgtgcaaacataataccaccatttaaaaatgttagggggatgagttgcagtttttataatagattttttttaaagtttggtattgtaaaacattcacacctctgtccctcaaaattgataattacgtttaaagggcagccatttgtggttagaatcttgttttgtttgcttccattattgagttcctcctaaggaaattgaggagagggactgaatagaagcccaaattcatataaaagttgcgtttaagttgtattaaaaatagatatataagaaaaaattctttcacttgatgtttgttagaccaaaaagtgt

SEQ ID NO: 15325 - DNA, 542 bp, Homo sapiens
ctcactatagggcgaattggagctccaccgcggtggcggccgggcaggactttttttttctttttttttttttttggaaacttccttttcttagttgttgtattcttgaagagcctgggccatgaagagcttgcctaagttttgggcagtgaactccttgatgttctggcagtaagtgtttatctggcctgcaatgagcagcgagtccatcctggcaggcggctgtggtggtttgaagagtttggacaggtcctcctcagggagcgggggttctcctcggctctggcgctgcatattctcctgctggcgacgctgctgatactgatgtttctgctgctgttgtttactagtattcctcatgtatgtgttgtatttaactatatcttggcttatttcatccactctgtccatcagcaactgtagattcttccccaaatgattgctgctggcaaggctgagcaattcatgtttatctgcaacagctgacttcttttcaagttcccacattaggacattgatcagatgtgaatttttaattacaa

SEQ ID NO: 15326 - DNA, 526 bp, Homo sapiens
  misc_feature 268: n = A,T,C or G
tcaccgcggtggcggccgcccgggcaggacaaacgatgtgtccgtgatgactggtggggctcatgtaatccccacctaagaaaagtagaaagtgcaactttatcttttaggttaataagtgctgagagatggaggtttttccttctcattttgatggagatgcctagaaaacctcgcctgacactctttgtccaacgcaggatagagaacatagcaacagaaagggtgaggcaaaaggcatggctggtgaagaagcactgcatggtantatgatggggggccctggtccggatcgtattcacatgtttttttctttttatacagaaataggaatctaccagacagtaataaatgccacttctcacagaaagtctgacaggcttccactgcctctgagagaacaacaacatgttggctccataacataaagaaaaacaatgctgggtgcggtgcggtggctcgtgcctatgatcccagcactttgggtggctgaggcaggaggactgcttgagcacaggagtttgag

SEQ ID NO: 15327 - DNA, 464 bp, Homo sapiens
  misc_feature 286: n = A,T,C or G
accgcggtggcgggcggccgcccgggcaggtacttttttttttttttttttttttgtggagacaggatcttgctctgtcacccagacagatgtgcagtggcataatcatggctcactgcagcctcaacctctggggctcaagcaatcctcctgcctcagcctcccaagtagctgggaccacaggtgtgcacccccactcctggctaatttttttattttttgtaaagatggggtcttgctatgtttcccaggttaagtctcaaactcctggtgtcaagcgatcctnctgcctcagactcccatgcactgcgattacaggtgtgagccaccaagcccagccccagcaccacttttaactagctgcataatcttgggtaaactactaacctttccaaagtacctcggccgctctagaactagtggatcccccgggctgcaggaattcgatatcaagcttatcgata

SEQ ID NO: 15328 - DNA, 136 bp, Homo sapiens
gctccaccgcggtggcggccgcccgggcaggtacaatgagatggatacaattagtaaaaccttaaaattaaaaaagctgtagacaacagaaggtaaactggaaatccatttacagttcaaaagactcactaataac

SEQ ID NO: 15329 - DNA, 561 bp, Homo sapiens
accgcggtggcggccgaggtaccaagtgtgggaagatgttgagcaactggaactcatgcgtggcaggtagggatgtaaaatggcacaaagactttgtaaaatactttggcaaattgtgaaaaagttaaacacatagctaccatacaacccagccatcccactccagtatttaacccacgtgaaatgaaaacttatgtccaaacaaagacttgtacttttctatgatgacccgggccggcttcttcaacggtttttgttgcgaacgcgagccatgttggcgggtcctttggtaaaagaccccgcgtacctgcccgggcggccgctctagaactagtggatcccccgggctgcaagaattcgatatcaagcttatcgataccgtcgacctcgagggggggcccggtacccagcttttgttccctttagtgagggttaattgcgcgcttggcgtaatcatggtcatagctgtttcctgtgtgaaattgttatccgctcacaattccacacaacatacgagccgggagcataaagtgtaaagcctggggtgcctaatgagtgagc

SEQ ID NO: 15330 - DNA, 285 bp, Homo sapiens
gagctccaccgcggtggcggccgaggtacagaaagtctagatgatcttgtagtgccagaaagtaagaaagtaataaaaagatgacaggtctgtcacaatgatacagaagccaatgtgacaaagcgtctcaatagttaaatctcgaatttgagtagtaaaagtgacacagttttagattataacccaaagaactaaataaatatccatgagccctattgatataaatgacaattaagggttttttgttttggtttttttggttgctttggtttttgtttttttgag

SEQ ID NO: 15331 - DNA, 485 bp, Homo sapiens
agctccaccgcggtggcggccgaggtactagtgcgccggcctgcaggaattcgatatcaagcttatcgataccgtcgacctcgagggggggcccggtacccagcttttgttccctttagtgagggttaattgcgcgcttggcgtaatcatggtcatagctgtttcctgtgtgaaattgttatccgctcacaattccacacaacatacgagccgggagcataaagtgtaaagcctggggtgcctaatgagtgaactaacttacattaattgcgttgcgctcactggccgcttttcagttcgggaaacctgtcgtgccacttgctttaatgaatcgcccaacgcgcggggagaggcggtttgcgtattgggcgctcttccgcttcctcgctcactgactcgctgcgctcggtcgttcggctgcggcgagcggtatcagctcactcaaaggcggtaatacggttatccacagaatcaggggataacgc

SEQ ID NO: 15332 - DNA, 559 bp, Homo sapiens
  misc_feature 22, 520: n = A,T,C or G
cggcaggtactttgtttctttnttttcctttttctttttttaagacatggtcttgctctgttgcccaggctgcaatgcaatggtgccacctcggctcactgcagcctcgacctcctgggttcaagcaattttcctgcctcagcttcccaggtagctgggattacaggcgcccgccaccacaccaggccacatctatgtatttagagacagagtcttgctccagcctgggaagacagagccagacttccgtttcaaaaaaaaaaaaaaagggaaagataggaggaaattttgaacccagtgcccgttccttgcagatctgcgaacagtggcaccagcctctagtctcagtgtgaggtttgactccaggacgatgaatttaagctgggactgccaagaaaacacaaccttcagcaagtgtttcttaactgacaagaagaacagagtcgtggaacccaagctcagtaacaacgaatgtacgtgcacatttcgtgaaatttgtctgcatgaaggagtcacattngagggtcacgtgaatactagtcaaagaggatttcaacag

SEQ ID NO: 15333 - DNA, 234 bp, Homo sapiens
accgcggtggcggccgcccgggcaggtacgcgggtgctacacggaggatgaagctaaggagctggctgcggaggtggaggttcaagacggccccaatgaagatggggagatgttcatgcggccagggaagctgtccgactatttcccaaaaccataccccaccagtgaggttgttggagctgccaacaccggagcattgccccctgacctcagctacatcgtgcgagctaggca

SEQ ID NO: 15334 - DNA, 482 bp, Homo sapiens
  misc_feature 339: n = A,T,C or G
gctatttttccacctatgtccacaccttctcatgaactttcaaggtcagaggcagataccagtgccattagaaatacagattcaacaacgtgggatcagcacctaggaatcaggagtttgggcagaactggggacttaacaactgttcctatcaccccactgacaaccacgtggaccagtgtgattgaacactcaacacaagcacaggacaccctttctgaaccgatgagtcctactcacgtgacacagtcactcaaagatcaaacatctataccaagcctagcatcccctttccatcttactggaagtctaacctgaggctcggacacaggggagaangctctctgaggcaaccactttgtggaaaccatctacagacacactgtccagagagattgagactggcccaacaaacattcaatccactccacccatggacaacacaacaacagggagcagtagtagtggagtcaccctgggca

SEQ ID NO: 15335 - DNA, 213 bp, Homo sapiens
gtggccgttatattcagaagtggttccaggtcttagcacaaaacatggatgcactttaggccatgcatggtggctcacacctgtaatcccagcactctaggaggccaaggtggaaggatcccttcagctcaagagtttgagaccagcctgagcaacatagggagaccctatctctaccaaaaaaaaaaaaaaaaaaaaaaaagtacctgcccg

SEQ ID NO: 15336 - DNA, 232 bp, Homo sapiens
tggcggccgaggtacttttaggatgactggtaaactatggaatatcagacgtggacatctggcagacattttctttaaaatgaataaagtgagcttatcacctcaaggaaaacaactgaagccatctgttgccaatgataaaaatatgagatttaaaaaaatgttgaagtttcaggctaaaattaaaattttgaaaaacttatattggccaccacaagtttgacaccttacc

SEQ ID NO: 15337 - DNA, 531 bp, Homo sapiens
  misc_feature 325: n = A,T,C or G
accgcggtggcggccgaggtactttttttcttttcttttctttttttttttttttgagacggaatcttgctctgtcacccaggctggagtgcagtggcgcaatctcggctcactgtgagctccacctcccgggttcacgccattctcctgcctcagcctcttgagtggctgggactacaggtgcccaccaccacgcctggctacttttttttgtatttttattagagacggggtttcactgggttagcccagaatagcctcgatctcctgaccttgtgatctgcccgccttggccttgtagccctttttgacccttaagggacgngcactggaatattgtttgggagcccaatgtttttgaggcaggcttagggagcaggaaaccatacaggtgtagcagcctttccagctgatccccatgccctgctgcacctggagggctggaacaagctattctcatattggggaaaagggctgatgggacctcagtcatgtggcagagaatctgaaagccagaagctggcaggtctg

SEQ ID NO: 15338 - DNA, 232 bp, Homo sapiens
ggcggccgaggtacttggttccttttcttttctttttttttttttttgagacggaatcttgctctgtcacccaggctggagtgcagtggcgcaatctcggctcactgtgggctccaggtcccgggttcacgccattctcctgcctcagcctctagagtggctgggactacaggtgcccaccaccacgcctggctacttttttttgtatttttattagagacggggtttcact

SEQ ID NO: 15339 - DNA, 526 bp, Homo sapiens
tggcggccgcccgggcaggacctgttttatcccagctgagaggcaaggagaacctttgtttcttaaaaaataagctggtttcagccaggtgcggtggctcacgcctgtaatcccagctctttgggaggccgaggcgggcggatcacctgaagccaggagttcgagaccagcctggacaacatggtgagaccttgtctttattaaaaatgcaaaaatttggccaggcgcggtggctcaccgcttggaatcccagcactttgggagtccgaggcaggtggatcacaaggtcaagagaatgagaccaatccgggttacacagggaaaccccatctttgctaaaattttttaaaaaacaaatttggctgggcatggtggtgggcacctgtagtcctagctacttgggagcctgaggcaggagaatggtgtgaacccgggaggcggagcttgcagtgagccgagatcgcaccactgcactgcagcctgggggacagagtgagactccgtctcaaaaacataacaaaacaaa

SEQ ID NO: 15340 - DNA, 495 bp, Homo sapiens
  misc_feature 272: n = A,T,C or G
tggagctccaccgcggtggcggccgaggtaccagaagaccttagaaaaaggaggaaaggaggagaggcagataatttggatgaattcctcaaagaatttgaaaatccagaggttcctagagaggaccagcaacagcagcatcagcagcgtgatgttatcgatgagcccattattgaagagccaagccgcctccaggagtcagtgatggaggccagcagaacaaacatagatgagtcagctatgccttcaccaccaacctaggggagtaagcnaaaagctggacaaattgacccaaagcctgtgatgcctcctcaacaggtagagcagatggaaataccacctgtagagcttgcccagaggaacctgcaaatatctgtcagctaataccagagttagaacttctgccagaaaaaaaaaaaaaaaaaagtacctgccccggcggccgctctagaactagtggatcccccgggctgcaggaattcgatatcaagctta

SEQ ID NO: 15341 - DNA, 234 bp, Homo sapiens
cgcggtggcggccgaggtacttcgttttattttttattattttcttatttaggggagaacttttaccttttcacttaatgcacttctctttggtgtatctgtattgcgagcaacactactcttgctcttgagggccattaagtaaaataagagttactcaggctgggtgcagtggctcatgcctgtaatcccagcactctgggaggccgaggcgggcggatcatgaggtcagga

SEQ ID NO: 15342 - DNA, 230 bp, Homo sapiens
ggagctccaccgcggtggcggccgaggtacaacatactgctttgatagatatatacaaaacaccacctgcttttgatggaaacggggcccagaagcagatcctgagatgaggattaatgtgcaattcatgtaatatataacacagtattcaggaagtgctcacaggataaaccaatgagggagtgggttcaggggcaggacagggaagggaactaaactgagcaagggac

SEQ ID NO: 15343 - DNA, 555 bp, Homo sapiens
agctccaccgcggtggcggccgaggtacagataattcaaatctattatctaatgtattaggttaatttctatttgttctatactttttttttttttttgagatggagtcttgctgtgtcgcccaggctggagtgcagtggtgcaatcttggctcactgcaagctccgcctcctgggttcatgccattctcctgcctcggccttccaagtagctgggactacaggtgcccgccccgacacctggctaatttttaaaaaaatatttcttagtagagacagggtttcaccgtgttagccaggatggtctcgatctcctgacctcgtgatcccgccgctttgggcctccaaaagactggggatacaggcggtgagccaccgcacccggcctattgacattatttaaggtttcagattttcttttgtgtgtctagtaattcgtcttttattgtcaaagataatttgcttatttgactcagaaaaatgatttgtgggcatacaatattgtatgtggtacctgcccgggcggccgctctagaactagtggatcccccgggct

SEQ ID NO: 15344 - DNA, 503 bp, Homo sapiens
  misc_feature 404: n = A,T,C or G
agctccaccgcggtggcggccgaggtacagataattcaaatctattatctaatgtattaggttaatttctatttgttctatactttttttttttttttgagatggagtcttgctctgtcgcccaggctggagtgcagtggtgcaatcttggctcactgcaagctccgcctcctgggttcatgccattctcctgcctcggccttccaagtagctgggactacaggtgcccgccccgacacctggctaatttttaaaaaaattatttttagtagagacagggtttcaccgtgttagccaggatggtctcgatctcctgacctcggggacccgcccgtttggccctccaaaagtactgggattacagggcgtgagccaccgcacccggcctattgacattttttaanggtttcagattttcttttgtgtgtctagtaattcgtcttttattgtcaaagataatttgcttatttgacttaaaaaaatgatttgtgggcatacaatat

SEQ ID NO: 15345 - DNA, 439 bp, Homo sapiens
agctccaccgcggtggcggccgaggtacagataataacatctgatatccacatggggtctggaggtgcaagccaccttcctttcatcccacggtctcacagcagccctggaaagaggctgctctctgttggaggctaagggccagtgttggaaggagctcgggtggaaagtgtggtctgcatgaggggctcccgtgaatagaggagaggggtggcaggtacctgcccgggcggccgatctagaactagtggatcccccgggctgcaggaattctatatcaagcttatcgataccgtcgacctcgagggggggcccggtacccagcttttgttccctttagtgagggttaattgcgcgcttggcgtaatcatggtcatagctgcttcctgtgtgaaattgttatccggtcacaatttcacacaacatacgagccgggagc

SEQ ID NO: 15346 - DNA, 497 bp, Homo sapiens
agggcgaattggagctccaccgcggtggcggccgcagaaggtcccggcagcagcaggaagaagacggaccccgcgatgagggcggcggcaaggagcaccttcatgttgcgttcggagccccgcgtaccctatggacagttgtgtccccaaggaaggatgagaatagctactgaagtcctaaagagcaagcctaactcaagccattggcacacaggcattagacagaaagctggaagttgaaatggtggagtccaacttgcctggaccagcttaatggttctgctcctggtaacgtttttatccatggatgacttgcttgggtaaggacatgaagacagttcctgtcataccttttaaaggtatggagagtcggcttgactacactgtgtggagcaagttttaaagaagcaaaggactcagaattcatgattgaagaaatgcaggcagacctgttatcctaaactaagggtttttaatgaccacaacaagcaagcatg

SEQ ID NO: 15347 - DNA, 519 bp, Homo sapiens
agggcgaattggagctccaccgcggtggcggccgaggtacctcatcccctcagtgactaagaattgcagtatttaagaggtagcaggaatgggctgagagtggtgtttgctttctccaccagaagggcacactttcatctaatttggggtatcactgagctgaagacaaagagaagggggagaaaacctagcagaccaccatgtgctatgggaagtgtgcacgatgcatcggacattctctggtggggctcgccctcctgtgcatcgcggctaatattttgctttactttcccaatggggaaacaaagtatgcctccgaaaaccacctcagccgcttcgtgtggttcttttctggcatcgtaggaggtggcctgctgatgctcctgccagcatttgtcttcattgggctggaacaggatgactgcttgggctgctgtggccatgaaaactgtggcaaacgatgtgcgatgctttcttctgtattggctgctctcattggaattgcaggatctggctact

SEQ ID NO: 15348 - DNA, 532 bp, Homo sapiens
acgactactatagggcgaattggagctccaccgcggtggcggccgcccgggcaggtacagatagcaaagactgggaccacagtggagggatgcctaatccagacaagggcaggaataggcagggaaggcttcctagaggaagtgatttccaagctgaaacttgacagatggaacagaagttagccagagatgggaaaactatttttggtcaatggaagaacaggtggttgagatagaatctgacacatgagagcaaaaaaaaaagttcagtgatgggagaatacagcgtgagaataagacaatatgaaactggcgatataagtaagtgatcatcacaaggctttgtaggacatactagggagtttaagactttttattctgagggcaatggggaatcacaagagggagttaggcactttacacaactcatttgccttggaggcggtataacttacgcaagaaggagaaaatgggctttgaaacagacttgaacctagctttgtcactgccttatttggtgcccttggacaca

SEQ ID NO: 15349 - DNA, 295 bp, Homo sapiens
agggcgaattggagctccaccgcggtggcggccgaggtacctgcaggcctcctacacctacctctctctgggctcctatttcgaccgcgatgatgtggctctggaaggcgtgagccacttcttccgcgaattggccgaggagaagcgcgagggctactagcgtctcctgaagatgcaaagccagcgtggcggccgctctagaactagtggatcccccgggctgcaggaattccatatcaagcttatcgataccgtcgacctctagggggggcccggtacccagctttggttccct

SEQ ID NO: 15350 - DNA, 454 bp, Homo sapiens
gcgaattggagctccaccgcggtggcggccgaggtacctgtggatatcatagaaagtgtagtttcaaaggagatggacaaacgatacctacagtttgatattaaggcctttgtggaaaataatcctgccattaaatggtgtcctactccaggctgtgacagagcagtaagactaacgaaacaagggtcaaatacatctggatctgatacactcagcttcccattgctgagagctcctgctgttgattgtggaaaaggacacctcttctgctgggagtgccttggtgaagcacatgagccttgtgactgccaaacatggaagaattggctgcaaaaaataaccgaaatgaaaccagaagaacttgtgggagttagtgaagcctacgaggatgccgccaattgtctctggttattaactaactccaagccttgtgccaactgtaagtcttcaatac

SEQ ID NO: 15351 - DNA, 489 bp, Homo sapiens
gcgaattggagctccaccgcggtggcggccgaggtaccttttttttttttttttttttttgagacggagtctcgcccaggctggagtgcagtggcgcaatctggtctcactgggagctgcgcctcccgggttcgtgccattctcctgcctcacactgtcgagtagctgggactacaggcacccaccaccaagcccagctacttgggatcgcatgagcctgggagtttgaggcagcagtgagccatgatcactccagcctgggcaacagagtgagactctctcacaaaaattaactttacttaattacttttattattgccataatcgctccattttattgttgttgttgttgttgtaaaccaaattgtaaaaccattttatatttgttgcaaaccaaaaagtttctgagacaggtctcaatttatttagaagtttattttaccaaggctaagggcatgcacccaggcccaagggctgtgcctttttcct

SEQ ID NO: 15352 - DNA, 460 bp, Homo sapiens
agctccaccgcggtggcggccgaggtactttttttttttttttttttttgtgataaggctaatattttttaaaaggaggcacagtgaatttaagacattgacatttatagccgtagctcgacgcttactcttggaggcccaattatcatccctgtccatcttgtaagtgtcatgtcttcgtcatcttctagaccccagctaactgtgccatctcctactcctttctggccttcttcgagttcttccaacagtcggaaattgcgagggacttttactcccgagcccgtggtggctgccatcttgcgtcgctgttgcttgaaggccggccccttctccccgcgtcctgcccgggcggccgctctagaactagtggatcccccgggctgcaggaattcgatatcaagcttatcgataccgtcgacctcgagggggggcccggtacccagcttttgttcccttt

SEQ ID NO: 15353 - DNA, 396 bp, Homo sapiens
cggtggcggccgaggtactctccgcctaagtccatagagaggctaacacccttctagtttattagtctttgctaaacctatgaaattctgaatctaatgctaatttatatgcattgtggaggtcactcaaaaatgtttctctcaacagctgtgataagtataggcttattttgatgtctaaagatctgttacctgtatctgatttcatcttccaacacatattcagttgaatatcaactatgtcctgtgctcaggacaagtgtgcatgagaacatcatacactaagtttatcattaaatgggaaacgagcagacattttaaaaagcacccaaaccggccgctctagaactagtggatcccccgggctgcaggaattcgatatcaaacttatcgata

SEQ ID NO: 15354 - DNA, 418 bp, Homo sapiens
tggagctccaccgcggtggcggccgaggtacgcgggggctgactctcttctcagattcagcccagttgcacccaagtaaaataaacagtcttgttgctcacacaaagcctgttggtggactctcttcatatggactcatgtgacatttggtgccgaagacctgagacaggaggactcctttgggagaccggtcccctgtcctcgccctctctccatgagatccacccatgaccctgggttctcaacccagccgaaggaacttcttcaccaattttaaatcggggacgcaaagccaacaagaatgaagaagtggccaggtatggtggctcatgcctgtaatcccagcacttatggaggccgaggaggaagaattgcttgaggccaggaatcccagaccagcctggacaacatggcaaaa

SEQ ID NO: 15355 - DNA, 510 bp, Homo sapiens
gcgaattggagctccaccgcggtggcggccgcccgggcaggtacacggtcagtccgggtcctaagggcgcagggtagggcattccactgggagttcaaaggggaaacgaagatggttcccactgctgctcagacagtgtcgctaaaattccctcactcattttcaagtcttgttttacataatggcttttaaagcaacttttgttaatgctactgatccttaatgcaacctattaatgtcccttttggtgacatctgggtttcatacagaaaaaaaaaaagtcaaaaaggggaaacaaaaatatatatacacattttatatataaacttaaaaaccttgtaccttggccgctctagaactagtggatcccccgggctgcaggaattcgatatcaagcttatcgataccgtcgacctcgagggggggcccggtacccagcttttgttccctttagtgagggttaattgcgcgcttggcgtaatcatggtcatagctgtttcctgtgtgaaa

SEQ ID NO: 15356 - DNA, 590 bp, Homo sapiens
ttggagctccaccgcggtggcggccgaggtactatggcagttttgcctcaggtgctgaacatttctcagccctggctaaaagggagcagcacagggagagaaacaggataggaaagcagaatggcgagcagcctatggcccagggcctgtaatcccttcccaagactagctgctcagggtggtgcagggacaggaccagaccctgcgcctatttcctgccttctttcccctatagggaactctgtaggctgagccactgtcctgctcttatgacattatatcttgtgcctttctcctcagcagtgagcagtgagctactcctggcccaggccctaggggaaatggatcagtctttgaggtttctatttggggaggggagtacctgcccgggcggccgctctagaactagtggatcccccgggctgcaggaattcgatatcaagcttatcgataccgtcgacctcgagggggggcccggtacccagcttttgttccctttagtgagggttaattgcgcgcctggcgtaatcatggtcatagctgtttcctgtgtgaaattgttatccgctcacaattccacacaacatacg

SEQ ID NO: 15357 - DNA, 593 bp, Homo sapiens
agctccaccgctgtggcggccgaggtacttgtttttttttttttttgagacaaggtctcgctctgtcacccaggctggactgcagtgacatgatatcggtcactgcaacctctgcctcctgggttcaagggtgattctcgtgcctcagcctctcaggtaactgggattacaggcatgcaccaccatgcctcgtattttttttgcgtgtgtttttagtagagacgtgtttcactatgttgcccggctgatctccaactcctgtagtcaagtgatctgcccgcctcagcctcccaaagtgctgggattatagacatgagccaccacacctgatgtctgatgcttatttattatgtgaccttagcgaagtgtggtagtcattagtgctggtctatctctataccttccccaggcaaggtaggattgcacttcccgcttcacttgtgattaggtggagccatgtgactactttcggccgctctagaactagtggatcaccccgggctgcaggaattcgatatcaagcttatcgataccgtcgaccttgagggggggcccggtacccagcttttgttccctttagtgagggttaattg

SEQ ID NO: 15358 - DNA, 533 bp, Homo sapiens
ctccaccgcggtggcggccgaggtactagaaactttccaaggagtcttgggtgtgtagccaagaggagccatgagctatggactcctcaagcacgggaagaggaggtgtgtgctgagaacagagaggccctgccctctgtccactagcgagaatccctagctgccccagcccagtctttctccccggcattcacaaactttgcaagcgtggtccagggccttctccagatctgttccaacttggagtgtgaagggcttgagcatacgggggaagagagtctgcagaaattgggggaaaacttttaaaagataccctcattgtgtcaaagagtgtgccaatctatttttgtatcagcattggaagtgcacctttcccctggggcgtgtgggtgtgtgaatgtgcaagtgtctgagagatactgcatcagccctagaccctcaagagccagtcccgccctttacagagcatccctttacctggggccatgggtcaggctgaccttcaacaattatttctagaagatttctggata

SEQ ID NO: 15359 - DNA, 449 bp, Homo sapiens
gctccaccgcggtggcggccgaggtacgcgggggacttctggcttgttcgctggtggcgtcggagccgagccggactggtcaggatgatcacggacgtgcaactcgccatcttcgccaacatgctgggcgtgtcgttcttcttgattgtcgatctctatcactacgtggccgtaaacaattccaagaagcaggaatgaaagtggcgctttcttcgccccagggttccaggacatagtctgaggcaagatggaaggtatgaggggccttcacacttaactttatcccttttacccatcacaacatacaaagcaactacacctggattttttcaaacaacttttatttcctcagagtctttcttaatcctatggaacaaagaagctgccactgaatagggcccagtataggggcctgcttttctactccttcccccaatataaaaatatag

SEQ ID NO: 15360 - DNA, 495 bp, Homo sapiens
ataggcaattggagctccaccgcggtggcggccgaggtaccttatgtagcccaagaaattcaagaggaaattgatgggctccttcaggagcagcgtgcagatatggaccagttcactgcctcaatctcagagacccctgtggacgtccgggtgagctctgaggagagtgaggagatcccaccgttccaccctttccaccccttcccagccctacctgagaacgaagacacttcagccggagttgtacctgcccggggcggccgttctagaaactagtggatcccccgggctgcaggaattcgatatcaagcttatcgataccgtcgacctcgagggggggcccggtacccagcttttgttccctttagtgagggttaattgcgcgcttggcgtaatcatggtcatagctgtttcctgtgtgaaattgttatccgctcacaattccacacaacatacgagccggtagcataaagtgtaaagcctgtggtgcctaat

SEQ ID NO: 15361 - DNA, 413 bp, Homo sapiens
  misc_feature 357: n = A,T,C or G
cgcggtggcggccgggcaggtactttttttttttttttttttttggaaacagggtcttgctatgttgcccagactgatctcaaactcctggcctcaagcaatcctcctggcttagcctctcaaagtgctaggattacaggtataagccactgcactaagtccagtgaatcattttccagacaacatttactgaatatccgacactgccttccacagacggggaggtttcccaaagaggccgtgctttttgagaagctggcaagataaccctggggtggagggaaggtggcccgcagctgagaccaccaccttactgtccccaaatcctcaccagaggttgctgacacttccctcttncccatcctcatactacttttcaaattagaaacagtagaaaatgggatgattaggct

SEQ ID NO: 15362 - DNA, 216 bp, Homo sapiens
gctccaccgcggtggcggccgcccggcaggtaccaatcatataatatatataacattgctatcagactaaaaacacattcttagctaaagataacttaccatttagagtcaaaacgcaggaatcttactcctggttccatttttgtcccacttgcttcactaggtatgtcatgctctatctcttatcctatgcagactttatggcagtagccatta

SEQ ID NO: 15363 - DNA, 527 bp, Homo sapiens
agctccaccgcggtggcggccgaggtacaagcgctttgaatatcatgggcaccatgactgtgaccctacaggtaggattggatcactccatgagagtagccggcaggtttctacaatggcctgggaatggactgattatttttatacattttctggcctgagagaaagccaaggtcccctgctgttcacagcaaccctgcctgggagcttggaatcttggtaatctgcccggtgggatctatggaggtagtctcaccccttttggtcttttgtgggaaattaagagaaataattatcagacatatcatcacctccagtggaactacagagacctggacccagctgcactattttaatgtaaaaataacagtatggccaggtgcagtggctcacgcctgtaatcccatcactttgagcagccaaggcgggcggatcacgaggtcaggagattaagaccatcctggccaatatggtgaaaccctgtctctactaaaatacaaaaaattagctgggcatggtgttgcgtg

SEQ ID NO: 15364 - DNA, 363 bp, Homo sapiens
ggcgaattggagctccaccgcggtggcggccgaggtaccctatattcttcttgatttctagccttttattggctctcagattgccagagttgggactcaatagtaagtaaccattctggtgaggtggaagcgattctaccagggtgtgttatcatgacagcagaatcactgcgtttttctctctactctgtggcatagactctatgccatatagtgacgtgtgaaaggcttgaggcttcctaacctactagacacccttggtcattctagtcagtatggcacgtgctgactgtgttttgagtctctagctgtaaaatcacattactgcacttccttgcatttatctcatacaaaaatggggat

SEQ ID NO: 15365 - DNA, 221 bp, Homo sapiens
gctcaccgcggtggcggccgcccgggcaggtacttatttttcttttttttttttgggggtgggggcctggggattttttttaaggggctttttaacatgggaggagagcctgttccggttcagcccaggccggtggttaattttcaaccttttttcaactggctttgggtttttaaggctttgtttttcgaacttttttctttggaaaccttcttcacaag

SEQ ID NO: 15366 - DNA, 616 bp, Homo sapiens
actactatagggcgaattggagctccaccgcggtggcggccgcccgggcgggtacgcgggggtctccagagtgagtgttccggagagcacgtgttagggaaggaggaggctgcgggctaacctgccgggagggaggatgctactgcctgtttcctattagtgacaacccacctcctaatcacgtcctgcttcaaacaaggtaacatcacaggacagcctccgaaacaataactgtttgaatatccttaatcttcggcaacttcaataactccccaaaatatatgtaatcagagaattaacttttacaacttttggttattgtttgcttgaaccataaagcagagctctttctgggataaaaaaaaaaaaaaaaaaaaaaaaaaagtacctcggccgctctaaaactatggatcccccgggctgcaggaattcgatatcaagcttatcgataccgtcgacctcgagggggggcccggtacccagcttttgttccctttagtgagggttaattgcgcgcttggcgtaatcatggtcatagctgtttcctgtgtgaaattgttatccgctcacaattccacacaacatacgagccgggagcataaagtgtaaagcctgg

SEQ ID NO: 15367 - DNA, 612 bp, Homo sapiens
ctactatagggcgaattggagctccaccgcggtggcggccgaggtacttcacaatacaactcttgcagaaagtatgaagacactctgtgatggtggtggcatccacgaagtagccggcgcataggcagcaaacaatgtgttcattcaagtctttgatcttcactcgaacctcctcctgaccctcctttcccaggggagactacacaacgtcggcgacacaacgcgcaggcccccgcgtacctgcccgggcggccgctctagaactagtggatcccccgggctgcaggaattcgatatcaagcttatcgataccgtcgacctcgagggggggcccggtacccagcttttgttccctttagtgagggttaattgcgcgcttggcgtaatcatggtcatagctgtttccttgtgaaattgttatccgctcacaattccacacaacatacgagccgggagcataaagtgtaaagcctggggtgcctaatgagtgagctaactcacattaattgcgttgcgctcactgcccgcttttcagtcgggaaacctgtcgtgccagctgcattaatgaatcggccaacgcgcggtgagaggcggcttgcgtattgggcgctc

SEQ ID NO: 15368 - DNA, 617 bp, Homo sapiens
acgactcactatagggcgaattggagctccaccgcggtggcggccgaggtacataacaagcaataataaaagtcctctgccgaagacagaatagtgtaaaacctttccttcccctgcccttacagatttctagagaagataatttgggaataaaaggtataaaaggtttttgagaaaagagagatcaaaggacattcagagttcgggaggatatctgggaagcagacttagcttagatcctaaagggtgtagaagatctgcattgctggggaggagtgtgggagtggtaaaccagtcaaagaattcacagatgtgctgggaggaggagaaggggagcagaagcaggaaaacagtctggctgaaacactggttgtatttcaaagagcagtagcaaatcagggtggataaatgtgtgggcctaagcagctggtgagcattaaatgtgtaagaatcaaattgtatccttagcaaacctctgaagatttctgatgtagatttttatgagtgttggtaaatttatataggatgcatatgggtagtacctgcccgggcggccgctctagaactagtggatcccccgggctgcaagaattcgatatcaagcttatcgataccgt

SEQ ID NO: 15369 - DNA, 536 bp, Homo sapiens
actatagggcgaattggagctccaccgcggtggcggccgaggtacatagtgtcgcgaactcaaatcggcatttagatagatccagtggtttaaacggcacgtttttgcttataaaaaaagtgcaaaaaagatgtggtttacaagttaaagctacagaatccctttttgctgtaattgcaccagttttaaagcctctggacagagcagtatttcgtttaaaactttgtttttcttaaaagcttacagtgtttggctaattctcctcccctttttacaagacgggggccggagggtggacactggtggcaggttaagggatactgtcactttaagaagcctgcagattgaagtgtaaacatggagaaattaggggctgattttttaaactgtgtgagatattaaccagccgccctgttataaaatcaggaaatccaaacagcgatttacaccgattaacaccccctttatatattttttacaaaaatacactgagaaaataatcaaacgttttcatctctcttgtctttttttggttt

SEQ ID NO: 15370 - DNA, 465 bp, Homo sapiens
actatagggcgaattggagctccaccgcggtggcggccgcgcgggcaggtacaccaaatggattacaagcagcatccagcagaagacagaccccccaaccctgcccaccagggctcacactctacaaaaccctgagggcctagaaatctgtaaatgcatcgccaagcactggggctgatttgcagtaattctctaagcaaggcaaacatgatctagctttgaaggcagcatgaaggcagcgggttggtgagaataatctcttcttaagagaagaagaaacctggggcggaaggagttttccccgaagtggcttcccgcgtacagaacacagaacttatttctgtcagttatttaatacattgaaaatttagtgaaatgttcaaagagaatagatgtttcccaaaacaacaatctttatgttaaaaatagtcattaaaagatctgttgtaattaaaaaaaaaaaaa

SEQ ID NO: 15371 - DNA, 586 bp, Homo sapiens
tatacggcgaattggagctccaccgcggtggcggccgaggtacgcggggggtaaggtatagtagttggcagcagaatggacccattgaggataactataaaattacagaaaatatttaaatgcaacttattgctatagaagcaaagaggactaaagggcaaaattctagagagtggtaaatctcagaaagcacaagcataaaatgcagctctgggggccctttccacttctggctatagggaagaacctgaatactgaacttgattcaggcagaggaccataacctgggggtcaggggaaggcatgggggggaccagaaaccagaagaacgatcaagactgcaatgaaaaaaatggatacattaggagcttcaaacacatataatttctcaagaaatttccagattctcatgctgcatagggcaggagcctgaaaagctaatttgagaagataataagtaggatttttgttttgttttgcattttgcagtacctgcccgtgcggccgctctagaactagtggatcccccgggctgcaggaattcgatatcaagcttatcgataccgtcgacctcgagggggggccc

SEQ ID NO: 15372 - DNA, 530 bp, Homo sapiens
agggcgaattggagctccaccgcggtggcggccgcccggggaggtaccactgaatccaaggctctcttgggtagcctatgtgcctcttggatggtatgtggaagccaaggactgtctgaacgtgctgaacaagagcaacgaggggaaagaattactcgtcccactgacgagttctatgtatgtccctgggaagctgcatgatgtggaacacgtgctcatcgatgtgggaactgggtacctcggccgctctagaactagtggatcccccgggctgcaggaattcgatatcaagcttatcgataccgtcgacctcgagggggggcccggtacccagcttttgttccctttagtgagggttaattgcgcgcttggcgtaatcatggtcatagctgtttcctgtgtgaaattgttatcgctcacaattccacacaacatacgagccgggagcataaagtgtaaagcctggggtgcctaatgagtgagctaactcacattaattgcgttgcgctcactgcccgctttccagtcgg

SEQ ID NO: 15373 - DNA, 523 bp, Homo sapiens
tatacggcgaattggagctccaccgcggtggccccgggcaggtacttgaacagtaggaggaggtggttcctcattcgtctcccgggagcgtcctcttctcagtcaggctggcaccatgacccaaggaacctcggcgagtgacggataaacaccagtcggcccgcgactaagagctgcgcccccgcgtacgcgggtcaccagggtcagtttctttaatgatggtttccaactggcctaatacattaagtaagactggctgataacatgaccagacagacataaagaccctgttgggaatgacattgaactctcaaagtcaagatttcttacacaaatctatcagctggagaaaatgaaggcagtgtggtatatgtgtgcaaataaggacattatgaagcttaaatatggaatgtctcttggacccccgatgtcatctgtattctctttttcttcttgtacctcgggcgctctagaactagtggatcccccgggctgcaagaattcgatatcaagcttatcgata

SEQ ID NO: 15374 - DNA, 410 bp, Homo sapiens
ggcgaattggagctccaccgcggtggcggccgcccgggcaggtaccatcttggctcactgcaacctcaacctcctgggttcaagcgatcctgctgccccagcaccaccccctctccaagtagctgggactacagaagtgcatcaccatgcccagctagctaacttgaatttttagtagagacagggtttcaccaggttgcccaggctggtcttctgagctcaagcaatccacctaccttggccttccaaagtgctgggattacaggcgtgagccaccgcacccggccacattttatatattattttgcatagccttcattgtcttagcaaagtcagaagaagaccaataacataatgttgtttaattaacaacaacggcaacaacaacaacaaaacaacccaggatgggg

SEQ ID NO: 15375 - DNA, 286 bp, Homo sapiens
  misc_feature 37: n = A,T,C or G
atcggagctccaccgcggtggcggccgaggtactttnttttttttttttttttttttttttctccagaggctagtttttcttcagtccttaagaactctgctccttatatgggcttcggtggcagtcatggggcagcaccgcaggtctacagtggggtggaggtgttcgggccttgcgggcttcatgaccttgatttctggcggtcggggggcagcacccgcaggtctacagtggggggaaggtgttcgatccttgtgggcttaatgaccttgattcctgactacc

SEQ ID NO: 15376 - DNA, 499 bp, Homo sapiens
  misc_feature 48: n = A,T,C or G
gcgaattggagctccaccgcggtggcggccgcccgggcaggtactttnttttttttttttttttattttttttttttttttttttttttttttttttttttttttttttttttttttttttttttttttttttttcaaaaattttttttttttttaaaaaaaaaacccccccccccccaaaataccccccaaacaaaaaaaaaaccggtttaaaaaaatttcccggggatttcccccccaaaactttgtttgggccaaaaaaaaccggggttttttttgggggcccaaccctaaaaaaaaaattttaaaattttttgggggggcccggggaaaccccaatttttacctttggggggttaaaaaaaacaaaaggggaaaggaaaaaaatggcccaacaaattgggttttttaaaattccgcccattaaaattttttcttaaaccccaaaaggggaaggggaccttggttttttaaggtaatggggggccaggggggggtt

SEQ ID NO: 15377 - DNA, 615 bp, Homo sapiens
  misc_feature 561: n = A,T,C or G
cactacttagggcgaattggagctccaccgcggtggcggccgaggtactggaacagggataagttcttggataaggtgccaacatacctataaaagctgatttttgagtaaattattgattctaacatatgtaatggatttggtgtgataattttctgatctttaactataagtgactttttattctccaccagaaaagataaatgactgagaatgtaagtctgcgctctgattaacacaatggagaaacggaaaaactatctctgttaaaaactgattcctgtcattcttctgatatcaaataagaggaaggaaaataaactttttgtgtgtagatagaaaaacatacctgaggccaggtgcagtggatcacgcctgtaatcccagcactttgggaggccaaggcgggcgatcagctgaggtcaggagttcgagaccagcctggccaacatggtgaaatcacgtctctactaaaaatacaaaaattatctgggtgtagtggtgcgtgcctgtaatcccagctactcgggaggctgaagcaggagaatcactttaattcangaggtggagggttgcagtgagccgagatcatgccactgcactccagcctgggca

SEQ ID NO: 15378 - DNA, 303 bp, Homo sapiens
atcggagctccaccgcggtggcggccgggcaggtactctggctgcagactgaccttgctcaggtccgagaaggatggggcagccactggagtggatgccatctgcacccaccgtcttgaccccaaaagccctggagtggacagggagcagctatactgggagctgagccagctgaccaatggcatcaaagagctgggcccctacaccctggacaggaacagtctctatgtcaatggtttcacccatcagacctctgcgcccaacaccagcactcctgggacctccacagtggaccttgggacc

SEQ ID NO: 15379 - DNA, 411 bp, Homo sapiens
agggcgaattggagctccaccgcggtggcggccgaggtacagagggagggacatacaatatttaataggatatttctacagaacaataacttatattatgtccttgtaaaaatctgtacctctttaaaacatttaactgaaacatccatttttttttagctttgctaatcaaaattgttttaagaattaaaactaggttgtaactaatgtcagtacctgcccgggcggccgcccgggcaggtacataggcatcctattcactgcaccctgtcacacccggcaccccccgccccgcacattatttgaaagactgggaatttaatggttagggacagtaaatctacttctttttccagggacgactgtcccctttaaagttaaagtcaatacaagaaaactgtctatttttag

SEQ ID NO: 15380 - DNA, 512 bp, Homo sapiens
actatacggcgaattggagctccaccgcggtggcggtaatacggttatccacagaatcaggggataacgcaggaaagaacatgtgagcaaaaggccagcaaaaggccaggaaccgtaaaaaggccgcgttgctggcgtttttccataggctccgcccccctgacgagcatcacaaaaatcgacgctcaagtcagaggtggcgaaacccgacaggactataaagataccaggcgtttccccctggaagctccctcgtgcgctctcctgttccgaccctgccgcttaccggatacctgtccgcctttctcccttcgggaagcgtggcgctttctcatagctcacgctgtaggtatctcagttcggtgtaggtcgttcgctccaagctgggctgtgtgcacgaaccccccgttcagcccgaccgctgcgccttatccggtaactatcgtcttgagtccaacccggtaagacacgacttaatcgcactggcagcagccactggtaacaggattagc

SEQ ID NO: 15381 - DNA, 365 bp, Homo sapiens
tcactatacggcgaattggagctccaccgcggtggcggccgaggtactgcaactgccagaacttggtattgtagctgctgcccgctgactagcagctggactgattttgaataaaaatgaaagcattaaagggtttccctacaaaacatttttctttaaaatacttttgaaatggctataagcagttgactttcacccttggagagcatcacactgtgtgaggttcagtgattgttgacccttcccagcccctactgcttctttaagttatctgtgtgcgtgcgcttcctctcaatcttttttgcacgctcatttctttttctctgacccatgagaaaggaaaacttactgatgataatttttaa

SEQ ID NO: 15382 - DNA, 345 bp, Homo sapiens
agggcgaattggagctccaccgcggtggcggccgcccgggcaggtactaattttttttttttttttttggtagaagtggtgtctcactatattgccttggctggtattgaattcttgggctcaagcaatcctcccctcttggcctcccaaagtgctgggattacaggcatgagccacctcacccagcccacttattcatctttttgcctgcaagctacaccaccaaagccccaggtcaaacatctttctccacagactgtgagaaaagagcctttcttcctcctaatttgtaatggctttcagctctatatgtctagcttcaatcctgacatctgcagcttacat

SEQ ID NO: 15383 - DNA, 483 bp, Homo sapiens
ggcgaattggagctccaccgcggtggcggccgaggtacaatgaggcttggctctgtgtgatgcactctaaccagcccacacttcagcagcggcatcatttggattcagggagagtttctgcagcatgaaggagtaggaagaacacagggtgagttcacaggaatccctacttttccatgtgaccttgtttggcctgaagtgattttcttgacctctctgggcctgactttcctcatctgtaaagtggagggtttgaaaatatcacagaaaacaaaataccttaaaggatgctctggcacacagcaggtatttccatataatgatacctcccattcctttttatgtgagctatatcccctgaaacccaggtttgactaaattgagaccaactttcataatatacacaatgacttgtagatatgaatttttgtgtggtgaagatgggagtgaaaaagtagaaaagtcaaatctcattgaataaaa

SEQ ID NO: 15384 - DNA, 447 bp, Homo sapiens
ggcggccgcccgggcaggtactttcttttctttttttattttttttgaggcagagtctcgctctgttgcccaggctggagtgcagcggtgcgatcttggctcactgcaagctccgcctcccgggttcacgccattctcctgcctgagcctcccaaggagctgggactacaggctcccgccaccacgcctggctaatttttttgtattgttagtaaagacgggtttcatcgtgttagccaggatggtctcgatctcctgacctcatgatccgcccgcctttgtttcccaaagggctgggattacaggcctgagccattgtgcccagccaaaatgtgcctttgcaaagtttgcgaaatcagattttgtttcccaatagaaccaaaatatttatgaggatgctagcattttccaagcatagtaattagttcacaactgagaaatattatg

SEQ ID NO: 15385 - DNA, 401 bp, Homo sapiens
ctatagggcgaattggagctccaccgcggtggcggccgcccgggcaggtaccttattacatatgatttttattagtttctggaggcaaatttaatttttattttaaaatcaaaatctattttaaaagaaatagttctcaaaaagacaacgatgactgggtgtggtggtgtgtgcctgtagttcaggctgctcgggagacagaggcaggagaaccacttgaggccagttcagtctagcctgggtaacatagcaggaccctgtccctaaaataataaaaaatttaaaaaccacaataatgtgagttacaaaaaagtgtaacttatgaaaagtcgtatttatattgacctttgtaagagctcaattatttcaggaagcaaggagtatcaccattctgagtaata

SEQ ID NO: 15386 - DNA, 462 bp, Homo sapiens
tatagggcgaattggagctccaccgcggtggcggccgcccgggcaggtacgcgggggcaggggtgggagcatttatggtgatcagatgtgcctggcaagcccctgttcagacattgctcacattccaaatgttttcgtgtagaatattgcacaggtctggggacgctctacctgtgccctgtgagtgttaataatggtggagaaagagtgtagctgtgcccttgagagagaaggtgagggaaagagtgcaccagtcagctgaccgtcagctggctaggctcttcactgagtcctatgtcgcagtgcacaaatcactgcccatcacgcctcagtttcctcatctggtaaatggtgataacatcaatctgcccccccgccagggtgctgttatgagggtcaaaagtggtagtggagggtaatactgggtgaggccattgtgtgtgggaggagaaaggctttaca

SEQ ID NO: 15387 - DNA, 584 bp, Homo sapiens
  misc_feature 386, 436, 473: n = A,T,C or G
cactatagggcgaattggagctccaccgcggtggcggccgcccgggcaggtaccttattacatatgatttttattagtttctggaggcaaatttaatttttattttaaaatcaaaatctattttaaaagaaatagttctcaaaaagacaacgatgactgggtgtggtggtgtgtgcctgtagttcaggctgctcgggagacagaggcaggagaaccacttgaggccagttcagtctagcctgggtaacatagcaggaccctgtccctaaaataataaaaaatttaaaaaccacaataatgtgagttacaaaaaaagtgtaacttattaaaaagtcggaatttatattgaccctttgtaagagcttaaattattttcaagaaggcangggagtatcacccattcttgagtaataccaatttcaacttaatctttatnttcttctacttgaagttcagtggcctatctaccacanaacattcctatatcaagtgtgcaaattaatttggagacaataggctttttacgacaatgaattggtttaactttaaaaagttggtttttatctcacattttataatacgat

SEQ ID NO: 15388 - DNA, 290 bp, Homo sapiens
  misc_feature 40: n = A,T,C or G
cgaattggagctccaccgcggtggcggccgaggtacttantttttttttttttttttttttttttcatttttataagaatatataaaaaatgatataaatggacatttacggtagtgggggaaggcatatatctacgttaaaaggcaggacatttttaaaagctctattttctaaatgaaaactactaaagcggggtggtttgtggcggggccatttgtggccttgtaggaccttcggggactgataatcaaagtttccggggtgttttaaaagcctttttggtttttta

SEQ ID NO: 15389 - DNA, 449 bp, Homo sapiens
actatagggcgaattggagctccaccgcggtggcgctttccagtcgggaaacctgtcgtgccagctgcattaatgaatcggccaacgcgcggggagaggcggtttgcgtattgggcgctcttccgcttcctcgctcactgactcgctgcgctcggtcgttcggctgcggcgagcggtattagctcactcaaaggcggtaatacggttatccacagaatcaggggataacgcaggaaagaacatgtgagcaaaaggccagcaaaaggccaggaaccgtaaaaaggccgcgttgctggcgtttttccataggctccgcccccctgacgagcattacaaaaatcgacgctcaagtcagaggtggcgaaacccgacaggactataaagataccaggcgtttccccctggaagctcccttgtgcgctcttctgtttcgaccctgccgcttaccg

SEQ ID NO: 15390 - DNA, 445 bp, Homo sapiens
gcgaattggagctccaccgcggtggcggccgaggtacgcgggatgtggtctaatcaaagccatctcaatttgtagatgaagaaggcaaggactaatgacaagaaatgaattgttggccgggcatggtggctcacgcctgtaataccaacactttgggaggccaaggctggtggatcacctgggcttgggagttcgagaccagcctaaccaacatggagaaaccccgcctctacaaaaaaaaaaatacaaaaattagctgggcatgatggcgggcgcgccccctaattccagctactcctgaggctgaggcaggagaattgcttgaacccaggaggcggaggttgcggtgagctaagatcgcaccattgcactccgcactccggcctggacaacaagagcaaaaactctgtctcaaaaaaaaaaaaaaaaagtacctgcccgggcg

SEQ ID NO: 15391 - DNA, 364 bp, Homo sapiens
actatagggcgaattggagctccaccgcggtggcggccgacgcaccaggtactctgtgggatactcattagagttgctcggtggagatggaatgatggtggggtgcattttaacatggctgagtgctttctgcttaaggacctgatgtattaatgctctccaggtcattcatatttgggggaaggaacaaagagggtacctcggccgctctagaactagtggatcccccgggctgcaggaattcgatatcaagcttatcgataccgtcgacctcgagggggggcccggtacccaacttttgttccctttagtgagggttaattgcgcgcttggcgtaatcatggtcatagctgtttcctgtgtg

SEQ ID NO: 15392 - DNA, 359 bp, Homo sapiens
ctacttagggcgaattggagctccaccgcggtggcggccgaggtacagtagcatgatcttggcttactgcaacctccgcctccctggttcaagcaattctcctgcctcagcctgccgaatagctgggattacaggcatgcaccaccatacccggctaatttttgtatttttagtagagatggggttcaccatgttggccaggctggtctcgaactcctgacctcaggtgattcacccgtcttggcctcccaaagtgctgggattacaggtgtgagccactgtgcccggcctccattacacctctttattctagttcaactcagaccgtgaagttagcatacaggtcctcaagagtttga

SEQ ID NO: 15393 - DNA, 447 bp, Homo sapiens
ctactatagggcgaattggagctccaccgcggtggccggccgcccgggcaggtacttttttttttttttttttttttgagatataaattggtatgttcacatgttggtaagaaagatctaatagctagaaaaggaactgctgaagttgcaggaaagagaagagaaatataaggaatgaaacctgaaaaatagagggcagagtcagaggggtggagaaggaaggggccctgacgggaggtggaccactttttccaaggcacatgcaggcaggcacctttctggagggtcccatggctggctatgtgtggcagtgcatgaaatagtcactgaatatgctcccttgctgtcctctgcttgtgctcaccgaggagtgactgtgtctactggaaacaagtttgccttttcactgttctaaataaagggatcaatgacctcaaatctaaagag

SEQ ID NO: 15394 - DNA, 424 bp, Homo sapiens
agggcgaattggagctccaccgcggtggcggccgaggtacgcggggggctgcgtgcggcgggaatcatggctgctcgcagagctctgcacttcgtattcaaagtgggaaaccgcttccagacggcgcgtttctatcgggacgtcctggggatgaaggtggagtcttgctctgtcgccaggctggagtgcagtggcgcgatctcggctcactgctctgactacacccggataacagaagacagtttctcaaagccttatgatgggaaatggagtaaaacaatggtgggatttgggcctgaggatgatcattttgtcgcagaactgacttacaattatggcggtggagactacaagcttggcaatgactttatgggaatcacgctcgcttctagccaggctggcagcaacgccaggaagctggagt

SEQ ID NO: 15395 - DNA, 373 bp, Homo sapiens
  misc_feature 43: n = A,T,C or G
ggcgaactggagctccaccgcggtggcggccgcccgggcaggnactttttttttttttttttttttttttttttaatggggatttgtctattaaaataggttgttggaaggaccccaaaggaccctttttggatcaggaatcaataatcccacgagacggggccccagcatttatggccgcagcataaaacttggccaccttctcattggggttgccctgggctgagtcaaaccacattttgatgcagcggccgttttagaactagtggatcccccgggctgcaggaattccatattaagcttatcgataccgtcgaccttgagggggggcccgggtcccagcttttgttccctttaatgagggttaattgcg

SEQ ID NO: 15396 - DNA, 347 bp, Homo sapiens
agggcgaattggagctccaccgcggtggcggccgaggtactaacagggtgtctggtcttagaagcctcccttcagatcccagctgaccctggtgactgcctggccttgatgttggctgcagccttctgatagaaccacatggattccacccacagctggccaggcttgttacatgggtcagggaatacaaatggcccccccccagggagcaggtgttggcctcagttttcagggacccttggtgttgctccttacctagagcccattaatctaccccatcaactctctgccatgaaagccatcttccaggagccctgttttttggagctgaactgcacagattatag

SEQ ID NO: 15397 - DNA, 349 bp, Homo sapiens
actactcactatagggcgaattggagctccaccgcggtggcggccgaggtactcaaagacgaatcatgaaaaagaaaaaaactttatttcaaacaggttcagtgatatatgtgggtgctgcagcaaaggctggttgtggcaaagtttcatttcaaactgtatgatgtgggctgggcaaggtggcttacgcctgtaatcccagcactttgtgcccgcgtactcagctgtgttcatgtggtggtctgtggaaagaaaagaagactcgtttggaaatgaagctgtccctttccaagcagtctctggtgcttttcttctctcaaaatgggatcccgtaaatatttgaatagag

SEQ ID NO: 15398 - DNA, 502 bp, Homo sapiens
tatacggcgaattggagctccaccgcggtggcggccgcccgggcaggtacttggtttaatttcacagtgagggagtcggttggtgatctctaagaaatccccaagcacctggtgttgggaaagtccctcaaataaagaagtgttcttttctttttttttcctctctctctttctatttatttattttttgagatggagtcttgctctgtcacccagactggagtgcagtggcaggatctcagctcactgcaacctccacctcccgggttcaagcgattctcctgcctcagcctcccgaatagctgggattacagacacccaccaccacgcccagctaatttttgtatttttagtagagacggggtttcactatgttttgtcaggctggtctcgaactcccaacctcaggtgatccacccaccttaaccttccaaagtgctgagattacaggcgcaagccgcagcgcccagccaagaaatgttctttaaacatcacaaataaa

SEQ ID NO: 15399 - DNA, 534 bp, Homo sapiens
gagctccaccgcggtggcggccgaggtacatgaaaagacatatataaaatgtataatacagacaaagggtcctgttacacagttggaagtggttccctcagattttgggcctaggaaggtaggtgatttaaactcactgaaagcatgtacaccttgctgttgctgctgctgccactgctgctgtttcatctgttcctgctgccgctggaatcgtggaggtaaagacttctgaaactgtttgaaatagccagataatacagccggccgctctagaactagtggatcccccgggctgcaggaattcgatatcaagcttatcgataccgtcgacctcgagggggggcccggtacccagcttttgttccctttagtgagggttaattgcgcgcttggcgtaatcatggtcatagctgtttcctgtgtgaaattgttatccgctcacaattccacacaacatacgagccgggagctaaagtgtaaagcctggggtgcctaatgagtgagctaactcacattaattgcgttgcgctcact

SEQ ID NO: 15400 - DNA, 408 bp, Homo sapiens
ggcgaattggagctccaccgcggtggcggccgaggtactttcttttttttctttttctttttctttttttttaatgtgagacaggatctcattctgttgcctaggctggagtgcagtggcgcaatctcggctcactgcaacctctgcctcctgggctcaagcaattctcccacctcagcctcccaaatagctgggatcactggcacaaaccaccatgcccagctaattttgtattttttgtagagacagggtttcaccatgttgcccaggctggtctcaacctcctgggctcaagcaatcctcctgcctcggcctcccaaagtgctgggattacagatgtgagccaccgcattcagccccacaccctcatttataccaattacctgcccagtaactgtggacttttgc

SEQ ID NO: 15401 - DNA, 361 bp, Homo sapiens
atacgactactatagggcgaattggagctccaccgcggtggcggccgcccgggcaggtacttttcttttcttttcttttcttttttttcttttttttgagacggagttttgctcttgttgcccaggctggagtgcaatgacatgatctcagctcaccacaacgtccacctcccaggttcaagtgattctcctgcctcagccttcccaagtagctgggattataggcatgtgccaccaagcctggctaattttctatttttagtagagatggggtttctccatgtgggtcaggctggtcttgaactcctgacctcaggtgatccacccaccttggcctcccaaagtgctgggattacaagcg

SEQ ID NO: 15402 - DNA, 178 bp, Homo sapiens
tacactactatagggcgaattggagctccaccgcggtggcggccgaggtacaacatttagagaaccttagctgcccagaaaaactcagattttctgctttacaaaagaataaaaatcatcgaatttattaccctggactttattgaaatcagtgaagaatattcatacaaatacagtt

SEQ ID NO: 15403 - DNA, 305 bp, Homo sapiens
tacgactcactatagggcgaattggagctccaccgcggtggcggccgaggtactccaacccaagcaacagagcaagaccctgtctcaaaacaaaacaaaacaaaacaaacaaaaaaaatgaggtaggcatgttttattcccatcttacagatgaggagactgaggcaataataattcaatggcttatctaaagtcacaaagctagtaaggagcaaatccagttctgtctgcttccagcccaccttgtcccacttgcttctttattggagaaggggcagatatttactctgcagtccagggagcat

SEQ ID NO: 15404 - DNA, 154 bp, Homo sapiens
gactactatagggcgaattggagctccaccgcggtggcggccgcccgggcaggtactttttttttttttttttttttttgggtatataaactatttattaacagacaaggcctacagacttatttcttcttggacacacccacggggcgggcac

SEQ ID NO: 15405 - DNA, 166 bp, Homo sapiens
cactactatagggcgaattggagctccaccgcggtggcggccgcccgggcaggtacagtggagaaagaagggggaccccaccagggctatggagagacagtagaggcaggactgaaccgtcagcaaagattaaaaggatgacctgaggctggcaaccacaaaacca

SEQ ID NO: 15406 - DNA, 228 bp, Homo sapiens
tacgactcactatagggcgaattggagctccaccgcggtggcggccgcccgggcaggtacagagtcttttgcttcctcccacccctagggggaaaaactgctttgtgctttgggaagttgtctctgaaacccggggacagaggacgcaggacagactaggagggagccgtgaggatgggctgcagctgtggaggagggtttcagaggagagaggtcggagagcaaagg

SEQ ID NO: 15407 - DNA, 181 bp, Homo sapiens
tacgactcactatagggcgaattggagctccaccgcggtggcggccgcccgggcaggacgggaaggattcctgccagggtgattctgggggtccgctggtatgtggagaccacctccgaggccttgtgtcatggggtaacatcccctgtggatcaaaggagaagccaggagtctacaccaa

SEQ ID NO: 15408 - DNA, 295 bp, Homo sapiens
tatagggcgaattggagctccaccgcggtggcggccgggcaggtacttttttttttttttttttttggtagagatgaggtctcattatattgcccaggctggtctcaaattcctggcctcaagtaatcctctcgcctaggcccatagtattgggattacgggcgtgagccactgcgcccaggctttactagttttccatctatctttaggcctcctaagatttcttgtggggctccacttccaccagtcacacctttaactaccagggttctctaagtcctctcctcagcctgca

SEQ ID NO: 15409 - DNA, 370 bp, Homo sapiens
atacgactcactatagggcgaattggagctccaccgcggtggcggccgcccgggcaggtactgcactcaaaaaaattatttctcaatttgtttgctcatactattgattttttttctagaatctaaataattgtgaattaactatgatagcagtatgcacaaacagtaagtgaaatcagacctattaattctgagaggaaggaggtgtcaggattttcacagaagaagagcactaaggccaggcgcaatggcttcatgccttgaatcccaacactttgggaggctgaggcaagccgatcaaggaggtcaggagttttagaccagccaaacaaacatggggaaaccccgtctttactaaaaatccaaaatt

SEQ ID NO: 15410 - DNA, 364 bp, Homo sapiens
tatagggcgaattgtagctccaccgcggtggcggccgcccgggcaggtacataagcctaaacaatttcacctatgtaaaatattgatgtcataaccaaactatatggccccgtttcataaaggttactatattctatagagagtgaagaggtggcctttctatcccagcttaccctattcttgttattgttcaaattctcctgaagcttgcataactagctgccatcaggtaaatgctattggctagcagaagactgcagttctgttaatattagaaccagcagggggaacttgggaacttgacattaaaaatctagaaacggaattttaggatgggtctcgttagaaaacctgaattgttaat

SEQ ID NO: 15411 - DNA, 225 bp, Homo sapiens
tacactactatagggcgaattggagctccaccgcggtggcggccgcccggggaggtacttttttttttttttttttttgggcgggggtctttatttgagtttaggcatgattcgaatgaagaggatcatgctaatgaagatgaagcagacgataatgagcgtggcccagagcagccagttgactgacttctgcgtgtgctgctccagacgctctgactccgtctt

SEQ ID NO: 15412 - DNA, 271 bp, Homo sapiens
tggagctccaccgcggtggcggccgaggtacacctgtggtcccagttactccagaggctgaagtgagagagtctcgtgagcccagaaagttgaggctgcagtaagctgagccatgattgcaccactgcactgtagcctgtctacaaacaaataaacgaaaaaacaaaaagacttgtgaaaagtgctgatttttaattaggaaaagattaaacattggatagtcatggaattgtttactgaacattagaaattggttgcaagtgtctatgct

SEQ ID NO: 15413 - DNA, 390 bp, Homo sapiens
tacgactcactatagggcgaattggagctccaccgcggtggcggccgaggtacatatatgaatcactaagagttcagaaattaagctcactttaagaaaactcagccaggcacagtggctcacgcctgtaatcccagcactttgggaggccaaggcgggtggatcacgacgtcaggagtccaagaccagcttgacatggtgaaaccctgtctctactaaaaatacaaaaattagccgagcgtggtgacacacgcctgtaatcccagctactcaggaggcaaggcaggggaattgcttgaaccagggaggcggaggttgcagtgagcccagatcgcgccattgcactccagcctggacaagagagcgagactctgactccaaaaaaaaaaa

SEQ ID NO: 15414 - DNA, 491 bp, Homo sapiens
actactatagggcgaattggagctccaccgcggtggcggccgcccgggcaggtacttttttttttttttttttttttttggtagggacggggttttaccatgttggccaggatgatctcgatctcctgacctcatgatctgcctgtctcggccttccaaagtgctgggattacaggcatgagccactgggccaggccttttgtccattttttattgaactgcctatttcttcttactgatttgtagaaagtctttattctagtctggcaggtattttttttcaacacttccaagattattcattggctttggcagctaatgtttcatttgagaaaatgctacctgtattattgatgcccatgtgaaagtaatgagatttttctccacattgaagatttctctttaatctgtggctgatgttgtctttgaaggattctcgaccatccctgtatctctctctgtctctttctcacccactttgggttgggacc

SEQ ID NO: 15415 - DNA, 309 bp, Homo sapiens
ctactatagggcgaattggagctccaccgcggtggcggccgcccgggcaggtacaatttcttttttctttttttttttttttttttttctttttctttgagactgggtctcgctttgttgcccaggctggagtggagtggcgtgatcttggcttactgcagcctttgcctccccggctcgagcagtcctgcctcagcctccggagtagctgggaccacaggttcatgccaccatggccagccaacttttgcatgttttgtagagatggggtctcacagtgttgcccaggctggtctcaaactcctgggc

SEQ ID NO: 15416 - DNA, 425 bp, Homo sapiens
actactatagggcgaattggagctccaccgcggtggccggccgcccgggcaggtacttttttttttttttttttttttgttttttttttttttttttttccgaccaatatggtttatttctgccccagccaagcttctttggaccctggctggggggaaaggcaccccaggcaccggcaagttccagtcattgcagatcctccaggtctaggtgtgactggaagtagcctgggcactgttgctggacgttggattctccttccttcttccgccggcgggtggtcaccaggacaccgcagatcaggcatgtgatgagtcccaggagtcctgccaagccgatgaggatgacagcccataagggaaggtcagaattcccagttaagggctcattttctgttgggagaatacccatccacaaggacact

SEQ ID NO: 15417 - DNA, 490 bp, Homo sapiens
ctactatagggcgaattggagctccaccgcggtggcggccgaggtacttcagtggatgcaaatgaaattttatcttttgaaagtaagaggaactatggctgggcggggtggctcacacctgtaatctcagcactttgggaggccaaggtggggcggatcacctgaggtcaggagttcaagaccagcctggccaacacagtgaaaccctgcctctactaaaaatacaaaaattagccaggcgtggtggcacgctcctgtaatcccagctacttgggatgctgaagcaggagaatcttttgaacctgggaggcagaggttgcagggagttgagattgtcgagtatagtggattgagtgctgtggagccgagattgccaagtgcagtggatcgagtccactgcactccagtctgggcaatagagctaaactcagtctcaaaaaaaaaaaaaaaaaaagtacctgcccgggcggccgctctagaactagtggat

SEQ ID NO: 15418 - DNA, 460 bp, Homo sapiens
actactatagggcgaattggagctccaccgcggtggcggccgaggtacctttgctcaccaagctcttgaggccaagcttgatacggctgttgtttttttctacatcgtagccagcagccgcaagcgctttcttaagcgcggccagagaaacgccgctgcgctccttagaagctgccactgccttggtgataagctcagatactgggggtccggatgctttgcgtttcccagcagttgcgcctgccttcttcgcctttttcttcacaggtgttttttctgcgggtgcaggaatggtaggagcaagtggagcagtctccgacatgtttttgtcttcccagaaaagacaataagtaatctcaaactgtcagaacagcatgtcccccgcgtacctgcccgggcggccgctctagaactagtggatcccccgggctgcaggaattcgatatcaagcttatcgata

SEQ ID NO: 15419 - DNA, 486 bp, Homo sapiens
actactatagggcgaattggagctccaccgcggtggcggccgaggtacgcgggaggaaggggagggcttggtgttccctacgcgaaggtctgactcaatgcttattccctcttcttcctctctctgcagactgaagaattgaaccgggaggtcgctggccacacggagcagctccagatgagcaggtccgaggttactgacctgcggcgcacccttcagggtcttgagattgagctgcggtcacagctgagcatgaaagctgccttggaagacacactggcagaaacggaggcgcgctttggagcccagctggcgcatatccaggcgctgatcagcggtattgaagcccagctgggcgatgtgcgagctgatagtgagcggcagaatcaggagtacctgcccggccgctctagaactagtggatcccccgggctgcaggaattcgatatcaagcttatcgataccgtcgacctcggggggggcccg

SEQ ID NO: 15420 - DNA, 365 bp, Homo sapiens
gactactatagggcgaattggagctccaccgcggtggcggccgaggtacgcgggtgtgaggaggtggggagaccaccccacccccatgtccaccatgaccctcttcccacgctgacctgtgctccctccccaatcatctttcctgttccagagaggtggggctgaggtgtctccatctctgtctcaacttcatggtgcactgagctgtaacttcttccttccctattaaaattagaacctgagtataaatttactttctcaaattcttgccatgagaggttgatgagttaattaaaggagaagattcctaaaatttgagagacaaaataaatggaacacatcatagaaggctgagaaaaaaagta

SEQ ID NO: 15421 - DNA, 488 bp, Homo sapiens
cactactatagggcgaattggagctccaccgcggtggcggccgaggtacttttttttttttttttttttttttttctttctttttttttttttttttttttttttttttttttttgcatcaaaaagctttatttccatttggtccaaggcttgttaggaatagttaaaaaagctgcctattggctggagggagaggcttaggcagaagccctattactttgcagggggcccttcaaaagtcgctgggctcaaaaggctcttagtcgtgcttgagagtgagcctttcgaagagatactcgcccagcccagccttcgggccacccagcctgtggaggttggtcaggtggtcacccatctttttgataagcttcacttcctcatttaggaagggagtctccaggaagtcacagagatgggggttccgtgcgggcagaacccagggcatgaagatccaaaagggcctggttcaactttttttccagggccat

SEQ ID NO: 15422 - DNA, 473 bp, Homo sapiens
gactcactatagggcgaattggagctccaccgcggtggcggccgaggtacttttttttttttttttttttttgtttgagacagagtctcactctgtcactgaggctggagtgcagtggcgcgatctgggctcactgcaacttccaccccttcggtgtaagtgattctcctgcctcagcctcccaagtagcttggatcacaggcgcccgccaccacacccggctaatttttgtatttttagtagagacatggtttcaccaaatttttaaagaaaaataaaggtgcatgatcaacaatcaaacttctaggaccgtcccctagcaggagagcagcagcagcagcagcacacagacctgcccggcggccgctctagaactagtggatcccccgggctgcaggaattcgatatcaagcttatcgataccgtcgacctcgagggggggcccggtacccagcttttgttccctttagtga

SEQ ID NO: 15423 - DNA, 405 bp, Homo sapiens
actcacttagggcgaattggagctccaccgcggtggcggccgaggtactgagctaaccacttctaagaaactccaacaaaggaaccatgtgtcttctattctgacttaacttcatttgtcataaggtttggatattaatttcaaggggagttgaaatagtgcgagatggagaatagtgaatgagtttctaccactctatactaatctcactatttgtattgagcccaaaataactatgaaaggagacgaaaatttgtgacaaaggattgcgaagagctctccatcttcatgatgttatgaggattggtgaccaacattagaaatatataatggagcaattgcggatttcccctcaaatcagatgcctctaacgactttcctgctacatatttccggaaggagaaa

SEQ ID NO: 15424 - DNA, 501 bp, Homo sapiens
gccctaacactactatagggcgaattggagctccaccgcggtggcggccgaggtacggggagtgggggtgaagcgtgttctctacataggcaacacagccgcctaagtcacaaagtcagtggtcggccgaggtactttggtaaggagatagggaaggaattaaggctattactctgaagaaagttggggggccagggctcctatttttttgctgaggagatggaagatcagggcttgtattcaataagaatgggaggggccaggggatgcctggcaaaagccttgcactgtgaggtgcaggtagaggcttttattctggtgagaggacatggactctctctctcccctcaggtaactgtgccctgtacctgcccgggcggccgctctagaactagtggatcccccgggctgcaggaattcgatatcaagcttatcgataccgtcgacctcgagggggggcccggtacccagcttttgttccctttagtgagggttaattgc

SEQ ID NO: 15425 - DNA, 469 bp, Homo sapiens
tgagctccaccgcggtggcggccgaggtctgaattgctttccaccttatatgagagaccctgttttggacaatatttatttttttggcaaatttgatcttaccctttaccagttctataatttggataaaagctgattatgtcctacaatgtcaaagtcagctaactgccgtctacttaagacttctggtcatttccaacttatagaggaagggagtctctaaaatctcttcttcagaaggcacctcacttctcagacttaaaactccacatcaagtgttccattaaaagaagataaggcattctgagtgcaaacaaatgggggcttgttaaactacacaccagcagtcagtgaggaaaactttgaacaattattgagttgctttcttgggtctctataatcaataacctgtctgcagatatctatctatataaagatattatatataaatataaatttacatatatat

SEQ ID NO: 15426 - DNA, 493 bp, Homo sapiens
cctaatacactactatagggcgaattggagctccaccgcggtggcggccgaggtacatgtctcttctcctctgactctgggaatgagatttttctactcccacggcttgaactctccttatgggagtgtctccacatgccaaaatcagaggaagtcagaataaaacctcccaaggctgaaaactagagctggcacgtagtacctgcccgggcggccgctctagaactagtggatcccccgggctgcaggaattcgatatcaagcttatcgataccgtcgacctcgagggggggcccggtacccagcttttgttccctttagtgagggttaattgcgcgcttggcgtaatcatggtcatagctgtttcctgtgtgaaattgttatccgctcacaattccacacaacatacgagccgggagcataaagtgtaaagcctggggtgcctaatgagtgagctaactcacattaattgcgttgcgctcactgcccgctt

SEQ ID NO: 15427 - DNA, 285 bp, Homo sapiens
actatagggcgaattggagctccaccgcggtggcggccgaggtacagagaagaggagaccccaacacgcttcaagctttgagtggagaggacacagcctctgctgggacagggaacagagggatgcggagaccctgaagatgcttttggacagtggtctgaggttgggacagtggcaggagataccattcacccaggatctccaggacaagagatcagcctggcagttacatgtgttttttttcaaactggttgccaggttggcatgagcgatgacatcagagat

SEQ ID NO: 15428 - DNA, 382 bp, Homo sapiens
gactcactatagggcgaattggagctccaccgcggtggcggccgcccgggcaggttccttattacatatgatttttattagtttctggaggcaaatggaatttttattttaaaatcaaaatctattttaaaagaaatagttctcaaaaagacaacgatgactgggtgtggtggtgtgtgcctgtagatcaggctgctcgggagacagaggcaggagaaccacttgaggccagttcagtctagcctgggtaacatagcaggaccctgtccctaaaataataaaaaatttaaaaaccacaataatgtgagttacaaaaaagtgtaacttatgaaaagtcgtatttatattgacctttgtaagagctcaattattttaggaagca

SEQ ID NO: 15429 - DNA, 354 bp, Homo sapiens
gactactatagggcgaattggagctccaccgcggtggcggccgcccgggcaggtaccccctgacactccagagctactgagaaatactcctttgtctttctgcacttgtagccaggctgagctttgtgaaagaagattgtgtatgtgtgtactttctttttttttttttttttttttcttttttttttttttttttttttttttttttttttttttttgggcaaaaacacaaactttattgaggcccttagccctagttttttttttcctgcacagtcttggttccccggagacgtccaattcggggggcagtaatgagacccacttttgggccagcaggggcattttttcgga

SEQ ID NO: 15430 - DNA, 265 bp, Homo sapiens
gactactatagggcgaattggagctccaccgcggtggcggccgcccgggcaggtgcgcgggtgggtgacgctggtgaagtggcccacggaagtgcacatgtctctgcctgctcttccagggtgatttttttgatgtttggctcttggtccttgtttccactggctttccatccccatggggcagaaacagtggctcctgggagcagaaaaggaattgaggtgggcaggcagaagagcctggattgctcactgttttgggaaactt

SEQ ID NO: 15431 - DNA, 120 bp, Homo sapiens
cactactatagggcgaattggagctccaccgcggtggcggccgcccgggcaggtactcgggggcgcgtgagcagctgcagcggcagaggcagcatccagcggcggcgccagcagttccag

SEQ ID NO: 15432 - DNA, 132 bp, Homo sapiens
ctatagggcgaattggagctccaccgcggtggccagtaaatgaactaatctacaagcgtggttatggcaaaatcaataagaagcgaattgctttgacagataacgctttgattgctcgatctcttggtaaat

SEQ ID NO: 15433 - DNA, 122 bp, Homo sapiens
actactatagggcgaattggagctccaccgcggtggcggccgagggactttgtttttttttttttttgtcagaaaaactcctttattaccatctccctattacatttctattctagggttag

SEQ ID NO: 15434 - DNA, 123 bp, Homo sapiens
ctatagggcgaattggagctccaccgcggtggcggccgaggtacttttttttttttctttttttttttttggtgggggtgtataggtctggggagtgcctttcaggtgcttgctccatagaca

SEQ ID NO: 15435 - DNA, 134 bp, Homo sapiens
acgactcactatagggcgaattggagctccaccgcggtggcggccgaggtacagagtcttttgcttcctcccacccctagggggaaaaactgctttgtgctttgggaagttgtctctgaaaccacggtggacag

SEQ ID NO: 15436 - DNA, 429 bp, Homo sapiens
actcactatagggctgattggagctccaccgcggtggcggccgaggtacaaacgggtttcccaccttgccagggatcctggggacaacagatgtaaaactcctgagtctctgtgtgtgtgcctgagtggccagtctgccagaactccacacagctctgtgtattgaacccaaggccttggtggcctgggctcatgagcaggtctcctgatccatggattgcagagatccatgggagaagcatgatttcccaggcagggtcgcacattcactcattgcttcccttggctggggattggggttcctttggctctgtgccactcctgggtgggccattgcctcacccttctttcctcagttcttcgtgggttggttgcctagtcagtcacaatgtgagaacctggcgatttcagttaaggggctgaattcac

SEQ ID NO: 15437 - DNA, 430 bp, Homo sapiens
  misc_feature 51: n = A,T,C or G
cactactatagggtcgattggagctccaccgcggtggcggccgaggtacanctcgccagcgagttttgccacgggagtgtgcggaacaaaggagacaggctcatttataatctgacgcgggcaccctactgctgcgttcggtttccattggctgggacgggacctcaccttctgtatttgtcccgactggctagcacttagaactttttaaaagaggcaaaggcatacgagagacaaaggaaggaggaagtaacttgtggaatattgagaaaggtaaaaacacctttaaataaggaagaggaacaggctatgacctaatgcttgttaggatcagtataagcatgttagggcaaatatttaggctaaattgtgggagctaagaacataaagtatattgattttttattatggctagcagatatttaagaat

SEQ ID NO: 15438 - DNA, 432 bp, Homo sapiens
cactatagggtgaattggagctccaccgcggtggcgggccgaggtacaatttaatttttctgcttgcgggggaaagggagcttctgtggaaccatggaagaagatgaaaatgagactggcaaagaacaaatgctgaatctgaagaagaggacaactttgggcaaataatctgcatacttttaattgggaataagatggaaaatatgaatgctaaatcaaattttttaagggatacaccacacgatacgactccccgcgtacatctttgctgtggctcacagattgttcctcccattccccttgccgctttttgcctatcgatgggtagcaagagtctttgaaataagcccatttgagccctggataacaagggataaagtggagcggatgcacatcacagacatgaaattgcctcacctgcctggcttagaa

SEQ ID NO: 15439 - DNA, 389 bp, Homo sapiens
ggagctccaccgcggtggcggccgcccgggcaggtacttttttttttttttttgcttttttttttttttttttttttttttttttttttttttttttttttttttttttttttttttctttctttttttttttttttttttgggcggggaaaacaccctttaataaccccggagaaaaaacggggggaaccccgggggggccccccccccccccaaaaaagggcccccccccccaagttaaaaaatgagttttcaaaaacccaaaaaggggaatttttttaccccaaaaaagggttttacaaatggccattctcggggggggaggtttctaaaaaaaaaaaaaaaaaaaaaaaaggggcccccgccccttaaaaaaaaagggccccccc

SEQ ID NO: 15440 - DNA, 394 bp, Homo sapiens
attggagctccaccgcggtggcggccgaggaagagaagacaccagtgcctcagaaactgctcggtcagacggtgatagcgagccacgcattcacagggccactgctgctcacagaagcagtgaggatgatgccaggatgatgtctgcctcgcgcctggctgggactctgatcccagccatggccttcctctcctgcgtgagaccagaaagctgggagccctgcgtggaggtatgtggctggagtcagctcctctgaactttccctcacttctgcccagaacttctcactgtgtgccctggtttgtttatttttgcaaaaaaaaaaaaaaaaaaagtacctgcccgggcggccgctctagaactagtggatcccccgggctgcaggaattcgata

SEQ ID NO: 15441 - DNA, 529 bp, Homo sapiens
gactcactatagggcgaattggagctccaccgcggtggcggccgcccgggcaggtactttccaatgaatggtaactgatccaggcacgttatcacacttcctagtcatctccacctttcctgtattgcctgtggcttgttgtttaagattaagaatcaaagagattaagaagtatcacttcaagtcttgctctgctcacttctatgtttgcagtcaaattattccttatgttggtgacctaaagagaattactttcattcatttcatttcccccgtagcagatggaagtgagaaacctctgagaaaatgaaaacatccttaaccactatctttcccttttatttgattattttatgtcagaaatttgcaaaagtttttttctcctccttctcttccttgttgcttaactttttaattcatgccatatgcagatatccaattatgtgcatcctgtgaataaaccacgtcttggtcactgtcatattttgaaccatctcatcagagatgaataatatctttttaccagaga

SEQ ID NO: 15442 - DNA, 386 bp, Homo sapiens
atacgactcactatagggcgaattggagctccaccgcggtggcggccgaggtacgtattactgtttcccattatatgttacaaatgaaatgaacacattctcataagttaaaaaaatatagaatatatatttttctttttccttttctttttttttttctgagacagagtctcgttctgtcacccaggctggaggctaaggtgggaggatcacttgaggccaggagtttgagatcagcctgagcaacatagtgagacccccatctctaaaaaaaaaataagaaataaaaatcagcgacgaggcatagcggctcatgcctgtaatcccagcactttgggaggccaaggcaggcaggtcgcttgaggtcaggagtttaagaccagtct

SEQ ID NO: 15443 - DNA, 533 bp, Homo sapiens
ctactatagggcgaattggagctccaccgcggtggcggccgcccgggcaggtactttttttttttttttttttttttccaaaacaaaacatgcttagcatgcacacttttaccacttttttcgagtggaaagtttattggcaatattaaatttcaccctagataggatatgagaatgttttgataaatcacaatttatagtatattaatgccatgtgagaattttgtttcccaagtaagagctcacatggaacttggtcattaaaccttaaagaaacctttctcacatatctataggcctcaaattgaaataatctataaatgaatttgtagatttctttttagtttaattcctgagtatacagggcaaaagcttatatcctttatataaacttctgctttggtctaaaactgatatatcttcacgttgaggtttcatctgaaatgcaccacgtttgctgacttgcttcaatatgaatttgtatggctataaaattgtgccctaactcaagctatttttatgttcacctgaat

SEQ ID NO: 15444 - DNA, 472 bp, Homo sapiens
cactactatagggcgaattggagctccaccgcggtggcggccgagggactttttttttttttttttttttttttcgggactttagatagctggattattcttcttttctctttttgtctttcatgtagttattaatgagatggatataaaaccaactactaggtacatatccccaaaaaatgaagtcaatatgttgaagagatatctgaactctcatgattattgcaagactattcacaatagccaagatagggaatcaacctaagtatccatcaacagatgaggagataaagataatgtagcatatatatacaacagaatctattcagccttaacaacaacaaaataaatcttgtcatttaagacaacacagataaacctggaaaatattatcttaaatgaaataagccaggcatacaaagacaaatactgcatgatctcacttaagtgtggaatccaaaaaagtcgactc

SEQ ID NO: 15445 - DNA, 364 bp, Homo sapiens
agggcgaattggagctccaccgcggtggcggccgaggtacacaactccactaacctgggaaccttgcccccatcccccatagcagccacagcgagacctgcccaaggagagtctgagctcagacatgcctagccctgccccaacttgatgggccttcctatctaccctggtagctgaaggcaaaggacatatacccttgggagttctagggccccgcccatcgccagttcctctccatactaccacagctgatgctctctgggaagtgccacctcccagcagcaggccaatcagcacaaaaatagaacattaaaccaccaaagctaagaaccctcagagaatccatttaacccccctgccacct

SEQ ID NO: 15446 - DNA, 480 bp, Homo sapiens
ctactatagggcgaattggagctccaccgcggtggcggccgaggtacttttttttttttttttttccctgtatttttctttttcccgagatgaagtcatgctctgttgctcaggctggagtgcagtagtgtgatctcggctcactgcaacctccgcttcccaggttcaagcgattatcctgcctcagcctcccaagtagctgtgattacaggcatgcatcaccatgtctggctagtttttgtatttttagtagagacagagcttcaccatgtttgccaggctggtctcaaacccctgacttcaggtgatccacctgcctcagcctcctagagtgctgggattacaggaatgagcgaccacacctggtttgtttcttaaaaaacatcttatatttctctgcttaacgtgctcaatgttgaacatgtgaaatataataacttttcataatctcttctgattctgtctctatatcatctttgg

SEQ ID NO: 15447 - DNA, 264 bp, Homo sapiens
atagggcgaattggagctccaccgtggtggcggccgaggtacagagtcttttgctttctctcacccctagggggaaaaactgctttgtgctttgggaagttgtctgtgaaacccggggacagaggactcaggacagactaggatggagccgggaggatgggctgcaactgtggaggagggtttcagaggagagtggtcggatagcagaggcctgagaagctcataggcaggttgagagaggtttgaaagtgaccagcgggctga

SEQ ID NO: 15448 - DNA, 414 bp, Homo sapiens
tgggagctccaccgcggtggcggccgcccgggcaggtactagttattttaaattccactcataacttatcggccaaaagaagtcacatgggtccacctaatcacaagtggagcgggaagtgcaatactaccttgcctggggaaggtatagagatagaccagcactaatgactaccacacttcgctaaggtcacataataaataagcatcacacatcatgtgtggtggctcatgtctataatcccagcactttgggaggcttgggcgggcagatcacttgactacatgagttggagatcagccccgacaacataatgaaacacgtctctactaaaaacacacgcaaaaaaatacaaggcatggtggtgcatgcctgtaatcccaggtaccagagaggctgaggcactagaataac

SEQ ID NO: 15449 - DNA, 193 bp, Homo sapiens
ggcgaattggagctccaccgcggtggcggccgagtgctcggagttggtattgacatagcctttgtagaaacagtgcttgagttccgcttcgtgttcggaataaaacttggtctgattcaccccgggcgtcccgaggagggtgacagtgaacagcggagcgataaatccggcattggcggtgagattaaataga

SEQ ID NO: 15450 - DNA, 282 bp, Homo sapiens
cgggcggcgggccgggcgccaggtacctgagaaaaatttagttctccttggccaggcatggtggctcacaccggtaatggtagcactttgggaggccaaggccagcaagttgcttgagctcaggagtttgagaccagcctgagcaatatggcgaaaccccatctctacaaaatatacaaacattatccaggtgtggtggcgaacgctttcagtccgagctactgatgaggctgaagtgggaggatggcttgagcctgggaagtggaggtttcagtgagctga

SEQ ID NO: 15451 - DNA, 531 bp, Homo sapiens
ctactatagggcgaattggagctccaccgcggtggcggccgaggtacttttttttttttttttttttttttatgagatggagtctcgctctgttgcccaggctggggtgcagtggtgtgatctcagctcactgcaagctccacctcctgggttcacgccattctcctgcctcagcttcccaagtagctgggactacaggcacctgccaccacacccggctaattttggttttgtatttttagtagagacagggtttcactgtgttagccaggatggtctcgatctcccgacctcgtgatccgcccgcctcagcctcccaaagtgctgggattacaagtatgagccactgagcccggcctctctgtagcttttaagatgttcttaggtgacttatgagaatgaaaaaatggagaattttccgtcttcctgccatgaaatcaattaatggcaattgctactgaaagctgttctgtttttaaacagtaaaaatgacagtgttttctcagccaacaggaagtgctgattattctg

SEQ ID NO: 15452 - DNA, 506 bp, Homo sapiens
ctactatagggcgaattggagctccaccgcggtggcggccgaggtactttttttttttttttttggggggttgctattattgttattgtttctagatgaatgtgagaagccaaattattcagtgtcttaaagaccatattaaaaactcctgccaggcgcagcagcacgtgcccatgatcccaactacttgggaggctgaggcagaaggatcgcctgagtccagaaatgctgggctatagtgcactaagtcaattgggtatctgcactaagttcggcataaacgtgagggaccacaaggttgcctaaggagaggtgaaccagaccagcctggaaacagagcaagtcaaaactcctgtcctgatgagtagtgggactgcacctgtgcataaccactgtacctgcccgggcggccgctctagaactagtggatcccccgggctgcaggaattcgatatcaagcttatcgataccgtcgacctcgagggggggcccggtacccagctttt

SEQ ID NO: 15453 - DNA, 216 bp, Homo sapiens
ggcgaattggagctccaccgcggtggcggccgaggtacgcggggacagacgagatctcgatcgaaggcgagatggcggacgtgctagatcttcacgaggctgggggcgaagatttcgccatggatgaggatggggacgagagcattcacaaactgaaagaaaaagcgaagaaacggaagggtcgcggctttggctccgaagaggggtcccgagcgc

SEQ ID NO: 15454 - DNA, 511 bp, Homo sapiens
ggcgaattggagctccaccgcggtggcggccgaggtactattaaaaaaacagtttatgtgcaaggtgtataagaaaagtaaaacatacctttggtaaaaagattataaaggggcataagaatgtggatttttacctacattaaagggttaaaaacaattattgttttaaaagtttaagcaagttttaaaacgttaattataaagaaaattctgtgtgtaaacatattagctaaagttaaaaaggtatcatccagtttttctgtgaactggacattaaagtaaaaaatgccacaggtttttcttaaagcatcaacctgctctttaacaaaaattataaaaggttaaaaagagtctataaaatcttaccttatggtcaaacatgaaaaattggataaatatgtctacaaggttttattaaaattcagtttaaaattaataacacactaatataaaggtaaaatttagcttatctggtataaaaatcatacaagaaacattattaaatataaaa

SEQ ID NO: 15455 - DNA, 360 bp, Homo sapiens
ggcgaattggagctccaccgcggtggcggccgaggtactttttttttttttttttttttttttttgagacagtctccctctgtcacctaggctggagtgcagtggcacgatcttgggtcactgaaacctccgcctactgggttcaagcaggtctcctgcctcagcctccccagtcgctgggattacaggcacatgccaccacacctggctaatttttgtatttttagtagagacgggggtctcaccatgttggccaggctggtcttgaactcctgaccttagctgatccacctgccctgggctcccaaagtgctggaattacaggcgtgaaccactgcacccagcccttgacctgttctt

SEQ ID NO: 15456 - DNA, 386 bp, Homo sapiens
ggcgaattggagctccaccgcggtggcggccgaggtactacgaagccatcttggctctgtggaaccagctctacatcaacatgaagagcctggtgtgctggcactactgcatgattgacatagagaagatcagggccatgacaatcgccaaggtatgtcctcagggccacttaggctgcctggagggagggcagcgctgccccccgcagtgcctgtgtccaacagtacaaccttcttgctgtgtagcagtgcttttgtgtctcgtcaagcaagtcagctcacccctccttagaggttctggtctgtccaatagagaacgggagggattagcatatggctgattatgagagaaagaagcaatactaatttaggtggcctgacaagca

SEQ ID NO: 15457 - DNA, 296 bp, Homo sapiens
tatagggcgaattggagctccaccgcggtggcggccgcccgggcaggtacgcgggaagtgaactgagggccaccctgggaggaagccgactaggcgaattcacttactgaccggcctgggctgctctgagacatggaggaagccagtgaaggtggaggaaatgatcgtgtgcggaacctgcaaagtggggtggggggagttaagaatattatgccccagattgtggagcggatcctgccccggggggaaaacttggaacatctccgcaataagacagaggatctggaagccacatt

SEQ ID NO: 15458 - DNA, 452 bp, Homo sapiens
ggcgaattggagctccaccgcggtggcggccggggcaggtacccacttggatgactggggagaagggctgggctgctgctggggagtaacacaggccttggggcagggttcaggagttcattagtctggagtccagatcgccacccagggcccagcctgatgtagtgttcgcgttctctcagcgctgcagttttccgataaaggagaggactcctgtgtgccagagctctgaatgggagcctcttctcagtccagccaggcagagggtgaggctgccaccttatggccactgggggaattggctctgggcttggactccaataaggggccgggagctgcagagacctccaaaaggtctcttaactagtcctccaaaccaggtccagtcactctctgtgacccttgccatacgcatgttactctcaccttacacgccattgaagcccttgagc

SEQ ID NO: 15459 - DNA, 258 bp, Homo sapiens
ctactatagggcgaattggagctccaccgcggtggcggccgaggtactgccatacctggctaatttattttttgtggagatgggatctcactttgttgtccaatctgttctcaaactcttggcttcaagtgagcctcctgcctctgcctcccaaaatattggaattattggcatgagtcaccatgccagatcaagaaaatatttatgtataattttatcatacctcattggtcctaatgtttttttgcttgtttaggt

SEQ ID NO: 15460 - DNA, 500 bp, Homo sapiens
tacgactcactatagggcgaattggagctccaccgcggtggcggccgcccgggcaggtactttttttttttttttttttttcttttttttttttttttttttttttttttttttttttttttttttttttttttttttttttttttttttttttttttttttttttttttttttccccggggcccaaaaattttaatggccgggaaaaaaaaaaacccggggaaaggggccctttctttcccatccttttaccaaaaaaacccccttaaagggacaaaaaaacccccaggccctgttgtcaaaagggccctggggggaaaaaaaaaggggggggggattttctggccccaaaaacaggttggggggggggcaaatttctgtctcaagcccgaatttgtttcccaaggcccgtggttccccgggccgtttaaaaaaagggggaccccccgggggggggggattcgaaaaaaattttttttaacccgcccccccaggggggg

SEQ ID NO: 15461 - DNA, 463 bp, Homo sapiens
ggcgaattggagctccaccgcggtggcggccgaggtactttttttttttttttgagacggagtcttgctctgtcgcccaggctggagtgcagtggtgcgatctcggcccactgcaagcttcgcctcctgggttcacaccattctcctgcctcagcctactgagtagctgagactacaggcacccgccaccacgcccggctaattttttgtatttttagtagagagggcgtttcactgtgttagccaggatcgtcttgatctcctgacctcgtgatctgctcgcctcggcctcccaaagtgctgggcttacaggcgtgagccaccacacccggcccagtcttgtgtcttaaataccatttccacattgacacctccagaatatttatctctaaacctgacctccagaaggtgcagcaaattgtgtaaaccatgtctccactacacgcctaaagggcaagaccct

SEQ ID NO: 15462 - DNA, 339 bp, Homo sapiens
tactatagggcgaattggagctccaccgcggtggcggccgcccgggaggtgtccgaacaggcaggttggtgggttaaggtcttaatcttgactcgagatctctgcccggagttcacagagtaggcgacgaagccgaagcagctggagcgcgacccggaggagtctgacttctcgttgtcttcataattttcattcgttgctttcttcatggacttgcggctgggggaggatccccgctggtcgccgagcaggcgggcgggtaaaggtaggccgcgagagcgaggttaggagaggagaggaggccgcattacctcggccgctctagaactagtggatccc

SEQ ID NO: 15463 - DNA, 434 bp, Homo sapiens
actcactatagggcgaattggagctccaccgcggtggcggccgaggtacctgtgactaacaaggggtctgggaggatctgctgctcccatgccctcctttgtgtgttttaaatctgtttgagccttctgggctcctgtgaattagggagtggcagctcctcagtctaactcctattgtgaccaggttgcctaattggccctttggtttgggcacccactgtccttctgcgtggttggatagatgctgctcccaatgtccctgatctcttacagacccctctgattcttcactcttggctttgagagcccctgatgccctgcagtcttgactgagcttctaatggttgatcagacccttgaatgttgagctctttccatactagacttgaatattctcctgcccatttgatttgttaattaggattcattggctg

SEQ ID NO: 15464 - DNA, 294 bp, Homo sapiens
ggcgaattggagctccaccgcggtggcggccgcccgggcaggtacagacattttcaaagttgccagtgttactttaattggactgccttcgtaattcattgcctctgcttcaacaatgtgcaactcatcctttgcaccagcccctaaactgaccgttcttaaagatagctggtgctcattttcatcattatccaccttaaagtgataatctttgtcggcctttagttcacaaccgaaaagatagttctggggcctcagggggctcatgtccatgtccatcgaatcttccatcgg

SEQ ID NO: 15465 - DNA, 281 bp, Homo sapiens
ttggagctccaccgcggtggcggccgcccgggcaggacttgggaagctgaggcataagaatcacttgaacccgggaggtggaggttgcagagtgagccaagatcgcagcactgcactctagtctgggtgacagagcaagactctgtctcaaaaaaaaaaagactagagaatgtcagggaacacatgtgtatatttaaacaacttcactttgcatttaaaaactcgaaggacagcgaaggtgaaatcaattcacgggccacctagactttccagtctaggac

SEQ ID NO: 15466 - DNA, 263 bp, Homo sapiens
gcgaattggagctccaccgcggtggcggccgcccgggcaggtacaacagagacatgagcccttcgggacacatgcctgaggtagtgacaatccaactttggaagagtggaagccctagtttcaaattcaagcatgctttgagtataaattaagtttacctctttttgcacagcaacatggccaatctttcctaagctgctcagcttacaagaaaaggaatcatactgctaagaattcaaacttcagcagtcataggtaagtaa

SEQ ID NO: 15467 - DNA, 314 bp, Homo sapiens
ctactatagggcgaattggagctccaccgcggtggcggggtttcgccatgttggccagtctggtcttgaactcctgacctcaagtgatccacccaccttagcctcccacagtgctgggattacaggcatgagtcaccacacccggccagtagaactctttaaacctgaaaaatcagtcaactttgcagactagaggaggatgttgaacacctatgtgtgtttttttttctttaccaactatgcacctatttttcagacacctaaaagtaatgtctgtgaaacagtggttttctttttctacatattacagcagg

SEQ ID NO: 15468 - DNA, 204 bp, Homo sapiens
gcgaattggagctccacccccgtggcggccgcccgggcaggtacaagcttataaaattcaataatttgtattaaaatacaaaatccaataacaaccaggagttcttcggaagaaaaaaaaaatcacaaaacaaccccaacagtggtgaagaactatattaaagatggcttttcctaagacagagggagaacaaaagcaaatagc

SEQ ID NO: 15469 - DNA, 400 bp, Homo sapiens
agggcgaattggagctccaccgcggtggcggccaaaagctcccagattatttggaaaccatgttttcttcctagtccatggtaacaagaaaaagccagtggaagcatcattccaaacaataatctccaaagatggtggcaaccaagtgtcaaatggggactgcaggcacagaagagaccaccccaaaccctgcctgggtggacgaagcaggtatgctagaatagtcctgtcctgcagaatagggaacggcagcttggtcgatctgtgccctggaaaaagaaaatgagttgcaatagaagtgactctaagacagacaatgaacctactcttaagagagacagggccaggcacggtggctcacgcctgtaatcccagcactttgggaggctgaggcgggggg

SEQ ID NO: 15470 - DNA, 416 bp, Homo sapiens
gagctccaccgcggtggcggccgaggtacgcgggcagagacaatggaataaacagccaagaatgttaaaatagctattataaatatgatccttatgctcatagagaaaaggaaaaatataagtataatgtgaaaagaaatggaagatataaaaagaaatgcaacttctagaggtgaaaaatatgtctgaaatgaaaacaccatatagatggaattaccaggaaattagacactgcagaagaaaaaaatccatgatgttgaagtatattgcaattaaaactatccaaaatgaaactgagagggggaaaaaagcccctgaaatgtatgaagaaagcctcagtgacctgtgagacaatatcacaatggcctaacataagtgtaatttggaattccagaaggggagcagacagaaaaaaa

SEQ ID NO: 15471 - DNA, 365 bp, Homo sapiens
tactatagggcgaattggagctccaccgcggtggcggccgaggtacttttttttttttttttttttttttgagatagtgtgtgactctgtcaccaaggctggagtgcggtggcaagatcatagctcactgtagcctccatctctggagttcaagggatcctcccgcctcattctccgaagctaaattttttttttttttttttttagtagagacatggtttcactatgttgcccaggccaggtttaaccttttgacttgagcaattttttttgctttagccttccaaagtgttttgtataccgataccagccccttatgcccgggctctttcttttttaaagaaaggacactttaaatcactttt

SEQ ID NO: 15472 - DNA, 338 bp, Homo sapiens
cgggggcggccgggaaaggcccaggaaaggaagtcaagcaggagcgtctgtccgaacggaggctaggtaagaatatttcaccatgaaaatgttaaaagacataaaggaaggagctaaacaatatggacccaactctccttatatgagaacgttattagattccattgctcgtggaaatagacttattccttatgattgggaaattttacctaaatcttccctttcaccctctcagtatctacagtttaaaacctggtggattgatggagtacctcggccgctctagaactagtgggatcccccgggctgcaggaattcgatatcaagcttatcgatac

SEQ ID NO: 15473 - DNA, 415 bp, Homo sapiens
agggcgaattggagctccaccgcggtggcggccgaggtactttttttttttttttttttttttttttttttttggagtgaaacaggagtgctttatggtctgagtggagtgtttgggaggagtgcctcccggctcctgccttggggctcacctcccgggcggccgctctagaactaggggatcccccgggctgaaggaattcgatatcaagcttatcgataccgtcgacctcgggggggggcccggtccccagcttttgttccctttagggagggttaattgcgcgcttggcgtaatcatggtcatagctgttccctgtgtgaaattgttatccgctcacaattccacacaacatacgagccgggagcataaagtgtaaagcctggggggcctaatgggtgagctaactcacatt

SEQ ID NO: 15474 - DNA, 499 bp, Homo sapiens
gtaatacgactcactatagggcgaattggagctccaccgcggtggcggccgaggtacatcttctcctaaaaacaagggtagagccaatggaaagtaatggttctgttacatagaatgagttgtcgccttgatcttaaatgatgtattggtagatatacttcccaagtggattaaaaagttaaaacttacagcataacaaagtattagacttactgaggtgacttgaatatctccttttgattttcactctatttttcttttcacccatgggaaaatgataattttttaataaaccaaggctcttaccatagctgaactttaaaacttagactgtcttttctgtaaacgattctgaggcaaagggaaatgactagaagaggatgagtaaacaataacctgaaatgggaaactcgagggaagcacaggcttttttttgttttgttttgcttgattcgttttttgttctttggggtttttttgagacagaatttcgctctcg

SEQ ID NO: 15475 - DNA, 455 bp, Homo sapiens
tacactactatagggcgaattggagctccaccgcggtggcggccgaggtacagaggccggtgggctccctgacatcccttccaggcaacctgaaagcactgaaatagcttatggccctgtgccagggaccttggcccaagctgctgacctccagggtggggagggagctacccccaggagaagagtcactcagacagcagtatgagcaagccagccagcagctccgtgcctgcacccagctcaggggaatcccagggggttcagatgcccaggaaggaaaaggggacagcgctactgctatggaatgagaccaccacttctcctgttgtccttcccagcttctccccaacctccccttttccctagtttataagacaggagaaaagggagaaagcaaaaagctggaaagaaacagaagtaagataaatagctagacgaccttggcgccaccacct

SEQ ID NO: 15476 - DNA, 516 bp, Homo sapiens
tacactactatagggcgaattggagctccaccgcggtggcggccgcccgggcaggtacagaaaattagcaagagacattttctgcattgtgagaaatcaacatagacaccttaaagacccctttgagagtgtggctttttgaacttttcagattttgctcagtgacctgctaacacttacgtgagaggctccaggtgtaaatagaatctaatggcagaatctgtaagtgtaaacaagcatcttaggagtgagagatcaagaccacaaaatgtccagagctatgaccacagctatacctacccataaaatacgatactggagtagggtatttttgtctttttttcttacctaagagctagctaatcaggacaggtgatgcaggttctggagctctaccagggcagttctattttctttttttgagacagagtctcactgtcgccctgggctggagcgcaatggcacgatcttggtgcactgcaagctccgcctcccgggttcatgtcattctccctc

SEQ ID NO: 15477 - DNA, 396 bp, Homo sapiens
gactcactatagggcgaattggagctccaccgcggtggcggccgggcaggtactttttttttttttttttttttttcgaatatttctttcagtgttctcagattgacttgaccagcctaagacagatgccagggacatcctcttctttgcctctcaacacttcagtcagatgggaatatggaaggatcatatccaagaggatcatattttctgaagccaatccatagatgtcaggaaacgaaccattccaaatatacaggaggtagggtcactgcctctaagcctgaaactccagagttagaagctgaacttaaaggtcattcacccaacacttgcctgcctcctacaaaggacacagatgagactggtgcccaatcaagccaccagcctggaggg

SEQ ID NO: 15478 - DNA, 358 bp, Homo sapiens
cgcggtggcggccgaggtactgtccaaccaaaactttccacaagggaaaattttcctgggtgagcctcccagaaaagcccagcttagtgtaagccaaagacctcccaagtctgtcaccaattttttccctattactcacctgatcatgtgggcaatatcccagttggtctctgtagacaatggtccctctatttcaacacctttttcggtgacagtggcgatttgaaactggaagaaagcagagcattcaataatgcccacgccttaagtccttaaatgaaaggtcaggtggaggtcttccccaatgtgaaaataggagtcacacaagtaaggcaatctgttcttcaaagcataggct

SEQ ID NO: 15479 - DNA, 263 bp, Homo sapiens
gcgaatttgtcctccaccgcggtggcggccgaggtactataatctccttctccactggcaaacagattataccagaaaacagcagttccctatggagaacaattcacaattatccccaagtatacaatgccaggtaattgctttcggtagttattacttttttttttttgagacagagtcttgctctatcgcccaggctggagtgcaatggctcgatctcagctcactgcaacctccacctcccaggtcgaagtgattctcct

SEQ ID NO: 15480 - DNA, 412 bp, Homo sapiens
  misc_feature 12, 18, 41, 44, 47, 50, 51, 59, 90, 92, 105, 110, 129, 131,132, 133, 153, 156, 157, 158, 163, 166, 167, 169, 170, 171,172, 175, 178, 179, 240, 247, 250, 251, 252, 257, 276, 280,282, 311, 337, 368, 373, 375, 410: n = A,T,C or G
actgaaggacgnccccancgctggaggatgacgggccccgnggnggnggnncggggcanccctgggaagaacaggaaccggccccccccnangagaaggggacangagangcctcacacacaagggggnannnacccaaaaaccgggcgcagnggnnnacacnggnnannnnagnacnnggggagggcgaggttgttaaaaaacatgtgtgggagggggggggggcccgaaaaaaacagngaaaccnggnnnaaacnaaccccacaaaggggggcngggngnggaggagggagccagcaaccccagccacnagggaggcggaggcaggagaaaagcnagaacccaggaggcggagggggaagagaacngagancncgccacgggacaccagccgggggaacagagcaacnca

SEQ ID NO: 15481 - DNA, 391 bp, Homo sapiens
tcactatagggctaattggagctacaccgcggtggcggccgcccgggcaggtacgcggggtgccgcggggcttgctgggaagagaggcgaagccaggtcacctttcaaggacccagaagtagggttttggcctaggtacgggcagagatgggtcgagatttcccggctctcgctggcgtggctgtgattcaggactggctactgttacctcggccgctctagaactagtggatcccccgggctgcaggaattcgatatcaagcttatcgataccgtcgacctcgagggggggcccggtacccagcttttgttccctttagtgagggttaattgcgcgcttggcgtaatcatggtcatagctgtttcctgtgtgaaattgttatccgctcac

SEQ ID NO: 15482 - DNA, 399 bp, Homo sapiens
tactatagggctaattggagctccacgcggtggcggccgaggtactaccctctgcttttgcaaggactctactgtgtcatcttaagtgagacatgtgcatatgtatactagtaaaattctctgctttcctagcattggacaaaaacaaaaatcaacaaaagaattgcctcagtgtcttaaactgggatccttactagttgactaggcacttagttactgaaggatatgtgtggaattcaagttcttttcaacctataagaaatatcggccaggtgcagtggctcacgcctgtaatcccagcactttgggaggccgaggcaggaggatcacaaggtcaggatttcaagaccagcctggccaacatagtgaaatcctggctctactaaaaatacaaaaaaa

SEQ ID NO: 15483 - DNA, 371 bp, Homo sapiens
tcactatagggctgattggagctccacgcggtggccggccgcccgggcaggtactattactaggttcattgtttccagaggggtgaaacggggctttggagaggttaaataacttgcccagggtcacacagctattaagtggtaaagctgggatttacatgagcccagacaaagaacccaagaagctaagctattctcttgtaatacctccaacataggaggcaagaagtgaggtattatacaggttgaggagataaaggggagagaggtctgcagtgctaacaggaggagctgggattcattctggcctgttctgtttagatcatatagttttagttatacccatgaggtttcctactcaaaatggggct

SEQ ID NO: 15484 - DNA, 232 bp, Homo sapiens
actcacttagggcttattggagctccaccgcggtggcggccgcccgggcaggtacgcgggcatcagctccgtgggaactcacgagcctggggagagttcgtcatccccacatggaacctcagtatggccaacaggcagccctctggtggaaaaatcaacaatcagtcctgcagcaactgatggaacgctagtgaccaccataaagatgttaagccaggcagcacaaggaaat

SEQ ID NO: 15485 - DNA, 378 bp, Homo sapiens
actatagggcgaattggagctcaccgcggtggcggccgaggtactactgctgaggtctccaggacagaagtcacctcctctggtagaacatccatccctggcccttctcagtccacagttttgccagaaatatccacaagaacaatgacaaggctctttgcctcgcccaccatgacagaatcagcagaaatgaccatccccactcaaacaggtccttctgggtctacctcacaggatacccttaccttggacacacccaccacaaagtcccaggcaaagactcattcaactttggctcagagatttccacactcagagatgaccactctcatgagcagaggtcctggagatatgtcatggcaaagctctccctctctg

SEQ ID NO: 15486 - DNA, 273 bp, Homo sapiens
cgactcactatagggcgaattggagctccaccgcggtggcggccgcccgggcaggtacagttggacctgctggcattcgaggccctcagggtcaccaaggccctgctggcccccctggtccccctggcccttctggatctccaggtgtaagcggtggtggttatgactttggttacgatggagacttttacagggctgaccagtctcgcttatcaccttctctcagacctatggactatgaagttgatgctactctgaagtttttgaacaacc

SEQ ID NO: 15487 - DNA, 408 bp, Homo sapiens
ctactatagggcgaattggagctccaccgcggtggcggccgcccgggcaggtactgtagattgagatataacaaaaagatgatttctgaaataatattgggaaaagaatttaccggatggtattttgtatctttgcacacctctgttgttatgatgctataaggcaatcttgtccaaccagcagctcacaggccacatgccacccaagatggctttgaatagggccctatacaaattcgtaaactttcttaaaacattatgaaattttttttttttttttttacaataaggctcttgaaaattgtcattacttgtgttttcctatacattcatctgtgtgaaagcctttttcttctttgatttaaaaaaattaactatacagttaatggtttagaacttagaactact

SEQ ID NO: 15488 - DNA, 383 bp, Homo sapiens
ctcactatagggctgaattggagctccaccgcggtggcggccgaggtacactcaaaggctatgttctctctcaggactcaagatgaattactggcagaattcctcactacatcctttaatggaaacctctgtcggtcctcatcatcagtgctttcatattctgattcttcactagataattcctcatcctcgtctggcaaaggaggttcctcaggtggctgaggagatgtgggtggaagaggtgcatgcaatggcatatagtcttcatacatgggaggtcgcgcagtaattggtccaaaaggtgtgggcaaattcattttattcataatatgaaggacctgtacctgcccgggcggccgctctagaactagtggatcccccgg

SEQ ID NO: 15489 - DNA, 387 bp, Homo sapiens
agggcgtattggagctccccgcggtggcggccgaggtactcaatgtttagctcccacttagaagtaagaacatgcccagcactttgggaggccgaggtgggtggatcatgaggtcaagagatcgagaccatcttggctaacaaagtgaaaccctgtctctactaaaaacataaaaaattggccgggtgtggtggtgggcacctgtagtcctagctactcgggaggctgagacaggagaatcgcctgaaccggggaggtggaggttgcagtgagctgagatggtgcccaacaagagggaaactccttttcaaaaaaaaaaaaaaagaaaacacaggtataattcctaccatgttcttacaggatcataacttcaaatggtcacccgcg

SEQ ID NO: 15490 - DNA, 322 bp, Homo sapiens
gcggccgcccgggtaggtaccaaagttagatcctcctgttatgagcaggaagccctttattagtttttctctatcaatccatcttttataatttccaaaataggataaggagaagcttaaatatgaaatgtatttaaaggtcttatcctaccaggtgttttctgtatgtaaatgcctaatttcctgtttggttaaggaactgttctcagacttttgtggcattgagtcagttgctctggttaattctgttctctgagagattatcctgatctttacctagacaagttaataactgtcagatatcattccaataaatgataag

SEQ ID NO: 15491 - DNA, 572 bp, Homo sapiens
  misc_feature 60, 67, 70, 98, 104, 105, 107: n = A,T,C or G
cggcattgagcctattgacatccagggcgaattggagcaacacccgcgggggcggccgcncagttcnagnggagcttcaacccgcagtttttaaccancaagcnnancgaaaccggcgacctttaggggggggcccggtacccaacttttgttccccttaaggaggggtaaattgcgcgctcggccgaatcatgggcatagctgggtccctggggaaaaaggaattccgctcaccattccacaacaacataaccaacccgggagcataaaagtggtaaagccccgggggtgccccaatgaagtgaggctaaactcaccattaaattggggtggggcacaacttgccccgtttttccaatacggaaaacccttatttgtaccaacgtgcatttaaaaagaaacgggccaacccctccgataagaaggaccatttccccaatagggcccccctttccccttttccctcgtaaaacagaacctcgttgcgccttggatcgattcacgttgcgggaaaaaaacggttataaagcttaactcaaaaggggggtaataacggggtattccacaagaaa

SEQ ID NO: 15492 - DNA, 233 bp, Homo sapiens
ccggggaccttttgtgggggcccggtacttatcttttgttccctttagtgagggtgaattgcgcgcttggcgtaatcatggtcatagctgtttcctgcgggaaaaagttatccgctcacaattccacacaacatactagccgggagcataaagagtaaagcctggggtgcctaatgagggagctaactcacattaatatgcgttgcgctcactgcccgcttttcagacgggaa

SEQ ID NO: 15493 - DNA, 293 bp, Homo sapiens
atagggctaattggagctccaccgcggtggcggccgccctggcaggtactttttttttttttttatatttttcccctaaccagttctaacgcaggtcaattagtttttcagaagtctctctcttctcatgttttttcctgctttgaaactcaagggttctcttttacttaatagatcaagatccaacactaatttgacatttaatcaagactctttacaagttgactatctcttactggctgtgggacttctgcggaaggcaaactgagttaggttaatttatgcaaaacaca

SEQ ID NO: 15494 - DNA, 380 bp, Homo sapiens
gggcgaattggagctccaccgcggtggcggccgaggtactttgctggcctttgcccaaattatgctttccccatttggtatgacctgacaccattgtgatcagtctgatgacctggcagcatcccatctgcctacccagttcactcttgctccatttcagggcctcttacagcaactcctcacatatcattttgacactgactcatgccttctcaggctcagctaacatcagcccattcattgatacagcaagacaatttgagaaccactatgtgctctgccagagtgaataacaaaacgcagtacctgcccgggcggtcggtctagaactagttggatcccccgggctgcaagaattgcatatccagcttatcgatacc

SEQ ID NO: 15495 - DNA, 244 bp, Homo sapiens
agggcgaattggagctccaccgcggtggcggccgcccgggcaggtactttttttttttttttttttttttttcctaaccagttctaacgcaagtcaattagtttttcagaagtctctctcttctcatgttttttcctgctttgaaactcaggggttctcttttacttaatagatcaagatcccccactaatttgacatttaatcaagactctctacaagcagactatctcttaccggctggggg

SEQ ID NO: 15496 - DNA, 659 bp, Homo sapiens
  misc_feature 11, 20, 31, 535, 576, 577, 578, 579, 638: n = A,T,C or G
aacaaacacancgaatttancgccaaagccncggggggcgacagaaagagtcgggagagagggtagaaaacaacaggttccgaaacaccgaaagcgaccggcgggccaaggaggcggctttacacgacgggagcccacgccaaaccccgagcccaccagcacgacggcacgaaacccgcggcagcaggtacccagggcagacgaagaaaaaagggaaagcgggcaaaaacaacaaccggggaacacaacagaagccgggaaaaaaaacgggaacgcgcgggacacaaaagaaggaaaacccgagggggaacccaaagggaaaggtggcggaatgacaacgggaaaaaaaaaagaaggcacagggggcgaaaaaaaacaggaacccgaaggggaacccccggggcccgggtcccagaaaaccaagggaggtaaccccccccaaggacccgacagggaaaaaccccggaagaaaaaaaaggccaggaaacgggaaaacacgggcagaaccccccaaagggggggggggcccgaaggnaaacccaacgccctggggggggtccccccttttcaaaattnnnnaagggttctacaaaatgccacccggctgggaccggaaaaaaacatggggggccaaaaancacaggaaaagaaaccacagt

SEQ ID NO: 15497 - DNA, 461 bp, Homo sapiens
  misc_feature 354, 407, 408: n = A,T,C or G
ctccaccgcggtggcggccgcccgggcaggtaccatgccgatctctgagaagttatgttgcaccactgtgaaggtctagatgcaagcttggctccctcagaaaggcgcttcccttttgcatggctgaggatccttgaaggaacctggtcagtctccggttcagcttccgacaccagagtggaacccagtaagcaccatcaggaatggatttcactacaagtgtggataactctgattttcaaaggagtagttacttgcaaattacatccttgctgaattcaggaggtatgaaaccctattttaccatgttagaaaacagcccaggattttctcattgctctgccatcatatatngtctatgacttgagcccttatttttccatctgcaaaacaataatgcctatatnngtctttgcattataggattaggaaatcttcattcaaggtttagttaggatcat

SEQ ID NO: 15498 - DNA, 513 bp, Homo sapiens
acgactcactatagggcgaattggagctccaccgcggtggtcgagcggccgcccgggcaggtacttttcttcttgaagtgagtttagatcacgtttcagcaaacgtcctctggagctccttcctctggggaaggagcagcggagggctgtcatcaccactgcactcttccaaccttctcttctgctcattcaccagttccatcctcatctgaccatattactccaggaacttcccttttcccttgtaaattctgttccatttttggccaaaccatggtttgcctctgctgcattagtttgaagtcattttttttccagacattgtggcggtagttcccagatgtccgaaaagatgaagttatcagtgcacgagcagccagggcttttctttatgttgattcaccttaggacacagcccaacaatgcctgcaattgtcattagcccgtgaagaggttcgcttaggctgccacagcacagagtcccagctgcgccgtttctccccccccgcgtac

SEQ ID NO: 15499 - DNA, 479 bp, Homo sapiens
gactcactatagggcgaattggagctccaccgcggtggcggccgaggtactaattttttttttttttttttttttgtatttttagtagagacgggtttcaccttgttagccaggatggtctctatctcctgaccttgtcatccgcccacctcagcctcccaaagtgctgggattataggtgtcagccaccgcgcccggcctgaatatcttttttatttttaagctttcaataaatcttactgacatctaattgataaaagttgcacatatttaatgtatacattttgatgaggttggacatatgcatacactcgtggtacctgcccgggcggccgctctagaactagtggatcccccgggctgcaggaattcgatatcaagcttatcgattccgtcgaccttgagggggggcccgggacccagcttttgttccctttagtgagggttaattgcgcgcttggcgtaatcatggtcatagc

SEQ ID NO: 15500 - DNA, 459 bp, Homo sapiens
ctatagggcgaattggagctccaccgcggtggcggccgaggtactttttttttttttttttttgagacggagtttcactcttgtcacccaggctggagtgcaatggcgcaattagggttcactgcaacctctgcctcccgggttcaagcagttctcctgcctcagcctcctgagtagctgggattacaggcatccaccaccgtgcccagctaatttttgtatttttagtagagacggggttttgccatgttggacaggttgatctcaaactcctgacctcaggtgatctaccctcctcggcctcccagagtgttgggattacaggcatgagccaccatgccaggctgctaattctcctttttagtgagttagggaactgagcctcagaaaacttaaacgatttctcagaaaacactcaagtgataaagtggccacattggaaaggagtttttatcttct

SEQ ID NO: 15501 - DNA, 477 bp, Homo sapiens
agggcgaattggagctccaccgcggtggcggccgaggtactaattttttttttttttttttttttggatttttagtagagacgggtttcaccttgttagccaggatggtctctatctcctgaccttgtcatccgcccacctcagcctcccaaagtgctgggattataggtgtcagccaccgcgcccggcctgaatatcttttttatttttaagctttcaataaatcttactgacatctaattgataaaagttgcacatatttaatgtatacattttgatgaggttggacatatgcatacactcgtggtacctgcccgggcggccgctctagaactagtggatcccccgggctgcaggaattcgatatcaagcttatcgataccgtcgacctcgagggggggcccggtacccagcttttgttccctttagtgagggttaattgcgcgcttggcgtaatcatggtcatagctgtttcct

SEQ ID NO: 15502 - DNA, 494 bp, Homo sapiens
  misc_feature 455: n = A,T,C or G
tacgactcactatagggcgaattggagctccaccgcggtggcggccgaggtacaatacaatctagatgacggtgcagactaagtcaagaactaaagttgtgcagtaacccgagttaaggcatgaatgcggacacacacatgcacacacacagcacccatgctatcaagacacaggattttttcagttgcctcatgagaggcaacctgggcttggcagttaatcagaactgctgagcattccagaaaatgccccccacgactttatgctaacagctgtgtgtatgttttaatcaaaaaattaaagaagaaaaaaaacctaaaaaacaaagaaaaaaacaaacaaaaaatcaccaaaaacctagaaaccccttaatctcttacaatggctcttgagcatggaactcatgtagcagcatcaatggctggctctttaacaatttggaaaaaaaggttgntttactatgtatttctttggtagtcatcactacaaagtt

SEQ ID NO: 15503 - DNA, 321 bp, Homo sapiens
tacgactcactatagggcgaattggagctccaccgcggtggcggccgaggtacttttttttttttttttttttttttgcttttatgtctttatgtatttatttttttttgagacagggtcttgctgtgttgcccaggctggagtgcagtggcctggtcatggcatcaaggctcactgcagcctggacctcctggttcaagggatcctcttgtttgagtcccctgagacaaaaccccaccccccgctacataatttttttggatacaggggctcattctgttgcctaagcttgtttggaactcctgggctcaagggatcttg

SEQ ID NO: 15504 - DNA, 230 bp, Homo sapiens
tacgactcactatagggcgaattggagctccaccgcggtggcggccgcccgggcaggtacttttttttttttttttttttttttttttttaggagagatggggtttcaccatattggtcaggctggtcttgaactcctgaccttgtgacccacccgccttggtctcccaaagtgctgggattacaggcataagcccccgtgcccggcccacatgggattattttatataa

SEQ ID NO: 15505 - DNA, 284 bp, Homo sapiens
ctactatagggcgaattggagctccaccgcggtggcggccgcccgggcaggtactttttttttttttttttttgagacggagtttcactcttgtcacccaggctggagtgcaatggcgcaattagggttcactgcaacctctgcctcccgggttcaagcagttctcctgcctcagcctcctgagtagctgggattacaggcatccaccaccgtgcccagctaatttttgtatttttagtagagacggggttttgccatgttggacaggttgatctcaaactcct

SEQ ID NO: 15506 - DNA, 432 bp, Homo sapiens
ctatagggcgaattggagctccaccgcggtggcggccgcccgggcaggtaccaggtcttctatgtgggtgtcaggatatgctccctcacggcttccgaaggcccccagcaaaagatctaacattcttgctcaaagttgcgagagaaagtagcacatggagtagctgggttggggcggcggcctcttctcttcagctcccttagcttggctccgtaagtggatcacttgccaaatgctttagatgattgcctctcaataattgaaaggtggtggtagttgtattgctgcactgtcggtgttaagagaaattactctcacaagagcagaggcctgaagattctttcttctgaagggatgatgagcctggactctctggactcctagattatgaactcctgcagtggaccatgtcctattttttggaggcgttgg

SEQ ID NO: 15507 - DNA, 415 bp, Homo sapiens
ctcactatagggcgaattggagctccaccgcggtggcggccgaggtaccttcaatacctttagttgtctcccacacacgcgtgtgtgtgtgaaatcttctacaatatcttcccttttttagaccatgttcactgtcaaaaaggtgctttaagagcagtctttggctgggcacggtggctcacacccgcaatcccagcaccctgggaggccgaggcaggcggatcacgaggtcaggagatcaagaccatcttggctaacaggatggtcttaagggacagtgaaaccctgtctcaactaaaaatacaaaaaattagctgggcgtggtggcacgctcctgtaatcccagctactcatgaggctaaggcaggataaatcacttgaacctgggaggtagaggctgcaatgagcccagatt

SEQ ID NO: 15508 - DNA, 268 bp, Homo sapiens
tactatagggcgaattggagctccaccgcggtggcggccgcccgggcaggacccgagatggtgtcaacttatgtcaggacccatgggccctccctatgcacacagcactcttggaatctcatccttttccatggctctggctcacactttcacagcatttactcctaaatatgccccctgtgttcaagggtgattctcgtgcctcagcctctcaggtaactgccattacaggcatgcaccaccatgcctggtttttttttgggggggg

SEQ ID NO: 15509 - DNA, 231 bp, Homo sapiens
tatagggcgaattggagctccaccgcggtggcggccgaggtacagatttgaatggctttgacttttggcagctgcacagtgctaggactggaccatgaaatatctctgggctctgacaattacatttgggttaacctaagcctgatcccatgtgttcctggaagagaagccccatgacattcaaagtccttgacaatctgacaccagcttttctaaccatataaggccctt

SEQ ID NO: 15510 - DNA, 507 bp, Homo sapiens
actactatagggcgtcgagcggccgcgcgggcaggtacgcgggcacactgaggaattatgactactatgcaagccgagttccagaatctattaaaaatgcacttgttccttaagggaaagtttcatttggccgggcgcggtggctcatgcctgtggtcccagcactttgggaggccgaggcaggtggatcacttgagctcaggagtttgagaccagcctgggcaatatcgtgagaccccatctctacaaaaatacaaattaactgggcatcctgtcatgcgcctgtcgtcccagctacttgagaggctgaggcagaggaatctcttgggcccggaaggcggaggttgcagtgggctgggatcgtgccactgcactccagcctgagtgacaggagttaagccctgtctcagaaaaaaaagacaaaaacccaaaaagtacctcggccgctctagaactagtggatcccccgggctgcaggaattcgatatcaagcttatcgataccgtc

SEQ ID NO: 15511 - DNA, 534 bp, Homo sapiens
ccttttcttttttagttgtagggcgcgcgtatacgactcactatagggcgaattggagctccaccgcggtggcggccgctctagaactagtggatcccccgggctgcaggaattcgatatcaagcttatcgataccgtcgacctcgagggggggcccggtacccagcttttgttccctttagtgagggttaattgcgcgcttggcgtaatcatggtcatagctgtttcctgtgagaaattgttatccgctcacaattccacacaacatacgagccgggagcataaagtgtaaagcctggggtgcctaatgagtgagctaactcacattaattgcgttgcgctcactgcccgctttccagtcgggaaacctgtcgtgccagctgcattaatgaatcggccaacgcgcggggagaggcggtttgcgtattgggcgctcttccgcttccttgctcactgactcgctgcgctcggtcgttcggctgcggcgagcggtatcagctcactcaaaggcggtaatacggttatccacagaat

SEQ ID NO: 15512 - DNA, 504 bp, Homo sapiens
actactatagggcgaattggagctccaccgcggtggcggccgaggtacgcgggatgataataagatgcaatttgaatcttcatcatacgaaggatactttctagcttgtgaaaaagagagagacctttttaaactcattttgaaaaaagaggatgaattgggggatagatctataatgttcactgttcaaaacgaagactagctattaaaatttcatgccgggcgcagtggctcacgcctgtaatcccagccctttgggaggctgaggcgggcagatcaccagaggtcaggtgttcaagaccagcctgaccaacatggtgaaacctcatctctaccaaaaaaaaaaaaaaaaaaaagtacctgccccggcggccgctctagaactagtggatcccccgggctgcaggaattcgatatcaagcttatcgataccgtcgacctcgagggggggcccggtacccagcttttgttccctttagtgagggttaattgcgcgcttggcgt

SEQ ID NO: 15513 - DNA, 476 bp, Homo sapiens
acgactcactatagggcgaattggagctccaccgcggtggcggccgaggtactgagcccttcattccccaaactcagactcttagctcttttgtcaactctgggcaaaggtcagcattggaatcgagcggccgccgggcaggtacattttctctcatccacttccgattctcttcattggctgcaatatctttttcttcaaatcctattttgttggcttctaggaaaccaagcacatcttgttgtttcttcttaatcgctgtagagccagaggaagatgcaatatatacacggatcaccatcctgggaacagcggctgcggttgtttgggtcctgaaaagggctgtggagcagctgcagcaatggctggaatccagctaggggctgaaacaacggttggcagaaagggtgggggaagtgggaaaaggagaaactcgccagagccccgccttcgcctttagcagcttccaccgagct

SEQ ID NO: 15514 - DNA, 502 bp, Homo sapiens
actactatagggcgaattggagctccaccgcggtggcggccgaggtactaacctcttaccttccaaggtggtagaacatgcttgaaaagatagtaagtgaaaaggggtagccagtgctttactcacaagactgcttgaacatgagactcaaggagggacctcagcaggcctggggtgttcagcaactattcctggccggggcatcttgcaaaggagttgctgtgacagtaagctcttccactttgagaccgtcacctcagccacggctcccacctgggctcaggaatggtcaggcaacacgtggggcccaggatggcggtggatgactaaactgccgaagaccgcgccgctgcgactacgaagtacctgcccgggcggccgctctagaactagtggatcccccgggctgcaggaattcgatatcaagcttatcgataccgtcgacctcgagggggggcccggtacccagcttttgttccctttagtgagggttaattgcgcg

SEQ ID NO: 15515 - DNA, 479 bp, Homo sapiens
actactatagggcgaattggagctccaccgcggtggcggccgcccgggcaggtacaagtatgcaagttttctgtaaacagattactttcaaacagttgggagccccagggagataatagaaggtatcctactcaacagcagtatatagaatgctgtagaagaggaatattgtaagaacaagaactatctcttgaaaactaaaaatatgataactgaaatataaatttaaataggattggaagctaaagctaggaaattaccctagaatgttttttgagaaatggaaaatacgaagaccaaaaaaataaaataaaactatgctgtgaaagagaaagattagcatttgagaaggcggaagttggtcctgctcagatgcggttttcagatgccttattctaaaaatagtgatagaaaacaaatttctacaaagcaaaattacaataaatttattaaactcttgcacaaagctgggttcttat

SEQ ID NO: 15516 - DNA, 457 bp, Homo sapiens
  misc_feature 428: n = A,T,C or G
tacgactcactatggggcgaattggagctccaccgcggtggcggccgaggtacagacgggtgcctgtagtcccagctacttgggaggctgaggcaggagaacttgtttgaacccggaggtgaaagttgcagggagccgaggttgtgccactgcactccagcctgggagacagagcaagactctgtctccaaaacaaacaaacaaacaaaaaaaccctgtagcttgggatcagccttctcttctgttgtttttctttaaaaaataaaaattaaaaataggcttcaagtgatcctcccgccatgacctccaaaactgctgggattgtaggtgtgagcactgcacccagccgtatgtttttttctacataaaaaacagcacaggattatcttccaaagctaacaaatatgttcaaataaccacaaccccanttgaaaaaaaaaaataaagtacctgcccg

SEQ ID NO: 15517 - DNA, 286 bp, Homo sapiens
gggcccttttcctttttttttgaccccttaagtgagggttaattgcgcgcttggcgtaatcatggacatagctgtttcctgtgtgaaattgttatccgctcacaattccacacaacatacgagccgggagcataaagtgtaaagcctggggtgcctaatgagtgagctaactcacattaattgcgttgcgctcactgcccgcttttcagtcgggaaacctgtcgtgccagctgcattaatgaatcggccaacgcgcggggagaggcgggttgcgttattgggcgct

SEQ ID NO: 15518 - DNA, 420 bp, Homo sapiens
ccgcggtggcggccgtccgggcaggtacttctttcagagggtttcatctcctccacaagtattttttgtttctttggctggtctgggtccaatgctgttgccatccccagcttcagactgttctccttgttttggagaactttctttggactgtatcttcagagacactcctggtcaaggggcctcagaggacccaaacgctctgaaacagcgtcttagctcatcgccgagtgtcagctctagctcttcggagcgctttcttctccccccgcgtacctcggccgctctagaactagtggatcccccgggctgcaggaattcgatatcaagcttatcgataccgtcgacctcgagggggggcccggtacccagcttttgttccctttagtgagggttaattgcgcgcttggcgtaatcatg

SEQ ID NO: 15519 - DNA, 379 bp, Homo sapiens
tacgactcactatagggcgaattggagctccaccgcggtggcggccgaggtacagagaaaatattttttaaaaatctcatcaggctaggtgaggtggctcgtgtctgtaatcccagcactttgggaggccacgctgggtaggttgcttgagtccaggagttcaagaccagcctggccaacatggcaaaacaccgtctctacaaaaataatacaaaaattagtgaggcatggtggcacacacttgtagtctcagctatattacttgagaggctgaggtgagaggatcacgtaagcatgggaggcagaagttgcagtgagcctagaatgcgccactgcactccagcctgggcgatagagcaagactgtctcaaaaaaaaaa

SEQ ID NO: 15520 - DNA, 450 bp, Homo sapiens
ggtggcggccgcccgggctaggacttttttttttttttttttttttgccagcttttctaagcaaatagattgtctgaattagtcacagaataattttgtgaaaattcatgtttaagtagcaactaccctttctttttttatatatttttaaggtattagtttatcttcttctaactggtgcagtcacttaatgttttcattaatcttcgacctggagagtgaaatactgatatttctagaaaaaaattctactcctctgattatttgaaatgctgaggaaaatgtccctcccatagtaaaacttgtaaataaggaactatatcatattcagtagctgtgttctgttccatcttttttttttttttgagatggagttttgcttgttgcccaggctggagtgcagcggcacgatcttggttcactgcaacctccgcctcccaggttcaagcg

SEQ ID NO: 15521 - DNA, 420 bp, Homo sapiens
gtaatacgactcactatagggcgaattggagctccaccgcggtggcggccgcccgggcaggtacattctctgttcattacttagttcttaaggatatgtgttcatccattctgtcgctggctcagagtttgcttcactctctagaccagagtataatttcatttggcagtctcctatacaaatatgcatttaagttttttgacacgtacgcgggggactcaacagaaatgggtttccagaagaataatgaaaagttgtgggtaggaaaatgaatcatttggactcttcaatgaaatggagtgagcccaggagagctcagccaacagaggcactctgggaacctgttagtaaagccaggctggccaaatgccatttgattttgaacctcgtaggtccccactcaccctctgccaggagcta

SEQ ID NO: 15522 - DNA, 139 bp, Homo sapiens
gtggcggccgaggtacgcgggtgttcctttttgttcaaagtctatttttattccttgatatttttctttttttttttttgtggatggggacttgtgaatttttctaaaggtgctatttaaacatgggaggagagcgtgt

SEQ ID NO: 15523 - DNA, 493 bp, Homo sapiens
ctactatagggcgaattggagctccaccgcggtggcggccgctcgggcaggtacatgccaccacgcctggcttattattattgttttgttttggagacaagagtctcgttctgtcgcccaggctggagtgcagtggcacaatctcagctcactgcagcctccgcctcctggattcaagcaattctcctgccagagcagctgggattacgggcacgtgccaccatgcccggctaatttttgtatttttagtagagatagggtttcaccatgttggccagcctggtctcgaactcctgacctcaagtgatctgccacctcggcctcccaaagtgccgaggttacaggcatgagccactgcacccggcctattattattaacttagtgtttgctaagtgctttatagatacggacttgcttaaatcttataatagtcctgaaagatgggtgataacctcatttaagaaattagcttattcagagctctaggcatta

SEQ ID NO: 15524 - DNA, 414 bp, Homo sapiens
tacgactcactatagggcgaattggagctccaccgcggtggcggccgaggtacgcggggggctctgagaggagtctaccttgccttcttatgggaagggagaccctaaaaaactttctcctctttgtcctcctttttctcccccactctgaggtttccccaagagaaccagattggcagggagaagcattgcggggcaattgttcctccttgacaatgtagcaataaatagatgctgccaagggcagaaaatggggaggttagctcagagcagagtagtctctagagaaaggaagaatcctcaacggcaccctggggtgctagctcctttttagaatgtcagcagagctgagattaatatctgggcttttcctgaactattctggttattgagcccttcctgttagacctaccg

SEQ ID NO: 15525 - DNA, 435 bp, Homo sapiens
agcgcgcgtaatacgactcactatagggcgaattggagctccaccgcggtggcggccgggcaggtactttttttttttttttttttttgcaacattgccctttgatgtccccatgagggccaggcccaggcagaacccatcccattttatccttaaactcagaaggaaatttgtctaaatattaaaggattaatatgggaataaaaaatgaaccttaaaccctgccactgatacacaagctgtctctcttagagttcaatgaacacttcaggagagtatttccaacaatatttagatattggaatatctaaatattgttgatttagataaccaccctagatttctcaccaccctagaacatttagtggggagacattcttttctcctttttctgataacttggtcagaagtgattgactgtgcaaatggtatttc

SEQ ID NO: 15526 - DNA, 254 bp, Homo sapiens
  misc_feature 17, 23, 41, 43, 51, 55, 61, 66, 68, 100, 118, 129, 148, 149,173, 179, 182, 184, 215, 231, 238, 248: n = A,T,C or G
cccgagcccggggcacnagcccnggcacagaagggcagagncngaggcganggcnccgggnccccngnccgccacacaggttttttttttttacacaacncacggggggcagccgccngaaaggagacngcccccgggggcagaacanngggggccgggcccctccccacaanaaagangcncnccgacaaaaaaaaaaaaaaaaaaaaggaccncggccgcccaagaacnaggggancccccgggcngcagga

SEQ ID NO: 15527 - DNA, 131 bp, Homo sapiens
actatagggcgttttggagctccaccgcggtggcggccgctctagaactagtggatccccctggctgcaggaattcgatatcaagcttatcgataccgtcgacctcgagggggggcccggtacccagcttt

SEQ ID NO: 15528 - DNA, 101 bp, Homo sapiens
tggagctacaccgcggtggcggccgcccgggcaggtacgttcttttggcttttcctttcggtaagatggtcttcagagctccttaaacacatttagaaaaa

SEQ ID NO: 15529 - DNA, 233 bp, Homo sapiens
gcggcggcggccgaggtacagagaagccatcacctcagagggcagctaaaacaagatgccttttttttctctcaacaccatgattcctttaacaacatgtctccagcattcccaggtaggccaaggagtcctacagaaaaaccttgggttagacctacagggggtctggctggtgttaacagaagggattctttttttggggcggcaggccacggagaaagctgactaggctg

SEQ ID NO: 15530 - DNA, 443 bp, Homo sapiens
  misc_feature 17, 31, 40, 66, 71, 74, 76, 79, 88, 109, 110, 111, 112, 113,115, 123, 136, 167, 173, 177, 187, 194, 205, 207, 210, 218,226, 251, 261, 281, 313, 314, 317, 321, 327, 331, 333, 336,337, 348, 353, 359, 362, 371, 375, 376, 380, 382: n = A,T,C or G
  misc_feature 398, 399, 405, 407, 417: n = A,T,C or G
gtgtcgtacgagactcnggaaaaacccaccnagggctaanggagctacccgccgcggcggccgagncaagnaancnccnttagcggcncggtcacccaccccccccccnnnnncnacccagangaggagggttccngcccccaggggaacaccccccaaacacagcncggccncggncgggaccagngccaggnggacagccagngnccnggccagangaaaggcngccgctttttcttttttgggggggnccggcggggncccccccaaaaaaaaccagncaccaccaggcggagcagggaggagagaaagnntcngccnggcccngcancnggnnccagcccaccngcccnccccgngancgggacccngganncccncnggggcggaccacagcnncccccnancccaaccaanaaagggaccacgggcagcaaaaaaaa

SEQ ID NO: 15531 - DNA, 196 bp, Homo sapiens
gcgtaatacgactcactatagggcgaattggagctccaccgcggtggcggccgaggtaccctgaggtgctccgctggggactctgctcattctgggggtgcagttgacggctggtcgtgatctttcccgtaatctgtcccctcttacggaacctagtctccgttctgtccatggcctttttctggacactgctagg

SEQ ID NO: 15532 - DNA, 161 bp, Homo sapiens
gtaatacgactactatagggctaattggagctccaccgcggtggcggccgcccgggcaggtactgttcctgttggccgagtggagactggtgttctaaacccggttggtggtcacctttgctcagtcaacgtacaacggaagtaaatctgcgaatgcacca

SEQ ID NO: 15533 - DNA, 435 bp, Homo sapiens
gtaatacgactcactatagggcgaattggagctccaccgcggtggcggccgaggtactttttttttttttttttttttgggttaggatggttctaacctgatgggttgtgtttacagtggggtttcccccaaaggttatcttcctgctttcctctgtaaatagggcagttgctgcaacagattaaatacactcgggccacctgtgggttagtgggtcaagaatttttgacagaaaggctataggctgccggtggcccccgtgtgtttgggtgagcacccctagagctatccctttattcacattgacgaagaggtggaatggctgttctagggaaggtagaactaaggcagttatgagcaggtgttttaattcctctacttgttggacctcccgtggtgtccaaagaagaggatcaggtctctcttgagtaagtt

SEQ ID NO: 15534 - DNA, 137 bp, Homo sapiens
taatacgactcactatagggcgtattggagctccaccgcggtggcggccgctctagaactagtggatccctcgggctgcaggaatacgatatcaagcttatcgataccgtcgacctcgagggggggcccgggaccca

SEQ ID NO: 15535 - DNA, 217 bp, Homo sapiens
actcactatagggcgaattggagctccaccgtggtggccggccgcccgggcaggtaccatctcttgggaaaaccatgctacctcttctctctgttctctattttgccactagagaaatagaaaataaggctgggagcagtggcttatacctgtaatcccagcactttgggaggctgaggcgggagaatcacctgaggtcaagagtttaagaccagcc

SEQ ID NO: 15536 - DNA, 532 bp, Homo sapiens
acgactcactatagggcgaattggagctccaccgcggtggcggccgaggtactccaatccgggtgacagagggaagactctgtcttaaaaagaaaaaaaaatcaatagaaatcggtttttatttatttatagtatgtgctttgagtggttctcaatcaaattgatttttcccccttccaggggatatttgaaatatctggaggcatttttgtttgccccatctttgggtatcatattggcatctagtaggtagaggccagggttgttgctaagcaccctataatccacaggacagcacccaaaaacagttacccagcccaaaatgtcagtattgtcaaggttgagaagccttaatttagatgtaatgttaagagttcagtaaattggccaggcacggtggctcacgcctgtaatctcctagcactttgggaggcaaaggcaggcagattgcctgagctcaggagttcgagatcaccccgggcaacaaggtgaaacgctctgtctactaaaatacaaatacaaataaattagc

SEQ ID NO: 15537 - DNA, 510 bp, Homo sapiens
tactatagggcgaattggagctccaccgcggtggcggccgcccgggctggtactcctcttgctaccacctttgtttgcagaagatgaaggggagagggagcttctccctatggcctcatggcttcttgtgagacagatcagtccagccagatacagagcaaagcagctttgcatcaccgcgggccagttgctgatgcccagctttatgtctaaaaaaaaaaagtggaagcctcaagggggatggaggatagcaagaagaatgggtgccttggccccagaggcattgtagggagaggaagacaatgtatctcatcagggttctcaacattatgagattatcacacatcaactatctttggaggggctgagtgattgagttatggctctgactcctctctgggggtggagagtgaagatgacaaagaaggccatctgtcccctaggagacacagttgcagtataagacaggacagaagagaacagaaaaacaaatccaactggaaaaagggg

SEQ ID NO: 15538 - DNA, 373 bp, Homo sapiens
ctactatagggcgaattggagctccaccgcggtggcggccgaggtaccttagagcaacatgcaaagcttcccttctcagcaatcccaggttggggccccctgtcttcctatcgtcctacccgtcacaaccaccactgcaggcttctgatgctctgttttcctcctctgtctcagttcagttgctctgagttagagaggagctctctgggactggagcaaatgactgcaccggccctcatgggacttccatttcagtggattcaggggaaagcagcacgtgtttttgagagaccttggcaacgcaggcgaccttgacgtcgaccaaaagaagagagatttgaaatgcttgttttacagcctccggtcaaaaaaa

SEQ ID NO: 15539 - DNA, 394 bp, Homo sapiens
tactatagggcgatttggagctccaccgcggtggcggccgcccggtcaggtaccagagcttagcagggaattatggacaacaaaagctctaaatcctcttgcatcgacacgttcaatttgcactgaccaatctgttggcacagtaactgtttataagctaaatttctacattttggctacaagtatcccaaattcaccttttaaaaaatcctatgtagatgccatctggtgttaatgatttgcacaccccttaaattgaaaatattttaaataaatctcacggttttatatagaatgattaatgtgtatattttaaaaagacaatctgagaataaacacttcccctaattgttgtcttaataatgaccaagagctgaagaaaaatgattcacac

SEQ ID NO: 15540 - DNA, 188 bp, Homo sapiens
gcggccgaggtactctgggagagtctctcctgccttcactattaactccagcggcctcttccccttcctggtgctgcttgccctgggaactctggcaccttgggctggggaaggctctggaaagtccttcaaagctggagtctgtcctcctaagaaatctgcccagtgccttagatacaagaaacctg

SEQ ID NO: 15541 - DNA, 521 bp, Homo sapiens
agggcgaattggagctccaccgcggtggcggcggaacacttgaggtcatgagtctgagaccagcctggccaatacggaaaagccccgtctctaacaaaaatacaaaaatacaaaaattgggtgtggtggtgtgcacctgtagtcccagctactcagaaggctgaagtaggagaatcgcttgaacctgggaggcagagattgcaccactgcactccagcctgggtgacagagagacactccatctcaaaaaaagaaaagaaaggaaaaaaagaaaagaaaagaaatgttgaggcaaatgaatatacaaacacattttagattagcatttgaattagtaaactgcataaaaaagatccaacatgagctgacatcatccaatccattgagggcccaaatagagcaaaaaggcagaggaagagcaaattctctattcttgagctggagtatccatcttcttctgctctcagatatctgagctcctggttctcaaacattcggattctgggacttacacctccagc

SEQ ID NO: 15542 - DNA, 539 bp, Homo sapiens
agggcgaattggagctccaccgcggtggcggccgaggtacagaaagaagagtatccatttcaactactaggttaactgcctttgatgagcttgattttacctgggtcactaattccacagaaccaatgtaggtgtctgggcggagcaaaatatgctccaattgtgttttcttttgatagattctttcaacagacagtcttttcttagcatcttcatttttctttattttgttgacttgcatattttcatttacaggctgcaatggtgacacttccatggtgacggtcgtgaaggggctcaagaaccctgaaagcgactaaacaggcaggaccccacgagaccacccccgaccaagccgcttctccacagacgcgcgtcccccgcgtacccgcccgggcggccgttctagaactagtggatcccccgggctgcaggaattcgatatcaagcttatcgataccgtcgacctcgagggggggcccggtacccagcttttgttccctttagtgagggttaattgcgcgcttggcgtaatcatg

SEQ ID NO: 15543 - DNA, 425 bp, Homo sapiens
tatagggcgaattggagctccaccgcggtggcggccgaggtactttatttttttttttttttttttttatttttttttttttttttttctttttttttttttttttttttttttttttttttttttttttttttttttttttttttttttttttttttttttggggggggaaaattctcttttaaaaaggggaaaaaaaaaaagggggggggggccaaggaaaaaaaaaggggggtgggggcaaacccccccccccatttgggaaaccccccaaggaaaccaaaacttttggggggccacccccttataaaaaaaacggggtaaaaaaaaaaaaaaaatttttgggggaatttttggtgggccccccctaaaccgcggggggagtatttccaattttcaaaccccccgggggggaaaaaaaggga

SEQ ID NO: 15544 - DNA, 263 bp, Homo sapiens
ctcactatagggcgaattggagctccaccgcggtggcggccgaggtacttttttttgttttgttttggttttttttttttggcttgactcaggatttaaaaactggaacggtgaaggtgacagcagtcggttggagcgagcatcccccaaagttcacaatgtggccgaggactttgattgcacattgttgtttttttaatagtcattccaaatatgagatgcattgttacaggaagtcccttgccatcctaaaagccacccca

SEQ ID NO: 15545 - DNA, 248 bp, Homo sapiens
tacactactatagggcgaattggagctccaccgcggtggcggccgatgtactttttttttttttttttttttttttttttttttttttttttttttttttttttttttttttaaccctttgactcttttttaaagccccgggaggatttccttgcccagctcccaagaatgtttgcccttttcagtctgttccacttttaggaggcagccaccaggccttagccatcccgggtacctgggccgtttta

SEQ ID NO: 15546 - DNA, 301 bp, Homo sapiens
ctatagggcgatttggagctccaccgcggtggcggccgcccgggcaggtacaaagattcctcactgcgtgctaagaaaacagatccaggccgggcacgggggctcacacctataatcccagcactttggaaggctgaggcgggtgaatcacctgagatcaggagttcgagaccagcctggccaacatggcaaaaccctgtctctactaaaaacacaaaaatttgccgggcatggtggcagatgcctgtaatcccagctacttgagaggccaaggcaggagaatcgctcgaacctgggaggc

SEQ ID NO: 15547 - DNA, 240 bp, Homo sapiens
tcactactctaaggcgaattggagctccaccgcggtggcggccgggcaggtactttcttttttttttttttttgagatgaagttttgctcttgttgcccaggatggagtgcaatggtgcaatctcagctcactgcaacctccgcctcctgggttcaagtgattctcctgcctcatccttcctagtagctgggattacaggtgcccaccaccacacccagctaatttttgtatttttagta

SEQ ID NO: 15548 - DNA, 549 bp, Homo sapiens
  misc_feature 36, 39, 46, 98, 196, 344: n = A,T,C or G
gcagatggtatattgaggtacagggcgatttgagcnacnattcggnggcggccgcccggttggaaccaggtttttaacccccgtttttaaacccgcanaaccgcaagagagcggggggagataaagggaaacacagcagcagaccaaagaaaacaaaaggagggcaaacccaacccccagcccggaaagaccgaanaaaaccaacaagaaaaacggcccacagcaggggcgccaacagcgacgaatgcctgggccagaagagacaggggagaacaggaggggcagggagaagacagcccaaacccccgggccgggggccatccggcggcaccccgagaccagancaagagagcgggaaaagaaagaaaagccagagggagagggaagacagcaaacctggacaggcgcaaccagagcccgaagcccggaacaagccaaaacacaagccggaagacccgccggccccagggaagaggcccttgagaaaacagggggggggctaaaggcatcaaatgggtgaactttggcggaaaaaaatgaggaaccccc

SEQ ID NO: 15549 - DNA, 351 bp, Homo sapiens
gtggcggccgaggtactgatcatggaactctcggggaggaaagatgttttccttctacccatcttatgttcattggctggggctcctggaacagaagacagatttacaaaagagaaaggcacacaaatttatgtaatataagttttacatgacatgggagcctttataaggaaatgacccaaggaaatggttaaacctgagtggttttgtgttaggtttgatgagcaatgaaaagctatggagaactatgataggaggagtgtgagctaaacgcaatgaactgggggaaacttaacaaggtctgttaaaatttctctctgtatccttctttggaggtcagcatgtttcctc

SEQ ID NO: 15550 - DNA, 302 bp, Homo sapiens
tacgactcactatagggcgaattggagctccaccgcggtggcggccgaggtactttttttttttttttttttttttttctcaaaacggccttccttagtcctgtaaaacctggaatgcacatagtcctgtaatggccatcccagaagtgaatctacatgattattcaaattcaaatacctaagaaaaaaaatcacttgaagttctgcaacttcccaaatgcaaattcctgagaaagaaacttgactgagccagttcaactttctgtattggattataaatcctatcttgctggctggtctgt

SEQ ID NO: 15551 - DNA, 529 bp, Homo sapiens
actactatagggcgaattggagctccaccgcggtggcggccgcccgggcaggtactttttttttttttttttttttttgggtttttagtagagacagggtttcaccatgttggtcaggctggtcttgacctcctgacctcatgatccaccggcttcggcctcctgaagtgctaggattacaggtgtgagccactgcgcccagccctgagaaatagttcttctaattgtcatccagttttcatctgagtcctgttgttctttggatatgtgcccttccagagcacagcaggggttgttcaagtcttccagaaaagcagctcttgtttctcctcatgtggtgggagtggagtcagagcgtggctcaggccccacattctcagctgtttggatctggggactcgaagtttctggtggttacttctgaaagtcttttccaggataattattcttgctcggtttctctgccatctctgacaggctgttttccctgcttcccccgctgccctgaaggggccagaggaacagggca

SEQ ID NO: 15552 - DNA, 432 bp, Homo sapiens
ctactatagggcgaattggagctccaccgcggtggcggccgaggtacttttttttttttttttttctttttttctctgtggaaaaagaaagaatttgactttatttagaaagtctacaaaatacagaagacgataactcgcttgctgtaagtcaggaaataaataaattctaggagccgggcaatattttttaacttttttttgagacaggagtttgctatgttgcccaggctggagtgcagtggtgcgatctcagctcactacaacctctgccttctgggcttaagtgatcctcctgcctcagcctcccaagtagctgggactacaggcatgagccaccatgcatggctaatttttgtattttttgtagagacggggtttcaccatgttgtccaggctggtctcaaactcctgggctcaagcgatccccct

SEQ ID NO: 15553 - DNA, 498 bp, Homo sapiens
cactatagggcgaattggagctccaccgcggtggcggccgaggtactttttttctttttttttttttttttggagacagggtgtttatctgtcacccaggctagagtgcagtggcgggattactgctcactgcaacctcgacctcctgggctcaagtgatcctcccagctcagccttcaagagtagctgggactgcagacctgcaccaccacgtccagctgcccggttaatttttttctgtcggtttgaagaggggagaaggtctcactatgttgcccaggcttgtctcaaactcccgggctcaagcaatcctcccactgtggcgtcccaaagtgctggggttacaggtgtgagccaccacacactgggctctgctctgcctttctgagtttggtttctgcttatggaggggagcttgttcccgttcttcccacaagaacccaggatgtggcacagcttccctgccgttttcctttactcaattggctacgcctccca

SEQ ID NO: 15554 - DNA, 427 bp, Homo sapiens
agggcgaattggagctccaccgcggtggcggccgcccgggcaggtacaactggaaacagccaccggagagagaactgtctcgccttcgccggctttaccagggtcatctccaagaagagagtggccccccacctgagtcaatgcccaagatgccccctagaacaccagcggaagcctcctccactgggcagacaggccctcagagtgctctgtaggagctgtagactgggaagagaggccaggcgtggtggctcactcctgtaatcccagcactttgggaaagccaaggtgggcctgaatcactttgatcccaaggaggtttgagaccagccttgggcaccaatggtgaaaacctcgtctttaccaaaaaatacaaaaattagctgggtgtgggtggtgcacaccttgtagtctcaactattgggga

SEQ ID NO: 15555 - DNA, 411 bp, Homo sapiens
ctatagggcgaattggagctccaccgcggtggcggccgaggtacccatgtcaatggagtaatgctcccaggagagttatggctgctctgctatgtcatgcaggttgttagggaagtaggggaaagctagaagttacaggccttacccagctcccatgcaacccaaaaggccagtctcactcccaccgtgccccaccctgacagcaccaagtttgtttccaggcagtgagtgagcagggctgagaacttgtcccaggctaccagcctgccagctgagaaagaaagcatggcttttgcatctttttgcctgttgagtctgcgcactggatttatgccctccctcgagttttggccgggagacttcacgtttggttcaaggtggttacaaaagtttactgggaggtttcctttt

SEQ ID NO: 15556 - DNA, 292 bp, Homo sapiens
tagggcgaattggagctccaccgcggtggcggccgcccgggcaggtactttttttttttttttttttttggatttttagtagagacagggtttcatcatgttggccaggctggtctcgaattcctgacctcaggtgatccgcctgccttgaccttccaaagtgctgaaattacaggcatgagccacgatgcccagcctgaggaacagatttctatatggcaaataataaaggcaaataaaaattaatgctaaaatagaatgaggaaagtattctttcttcaccagaatggtt

SEQ ID NO: 15557 - DNA, 407 bp, Homo sapiens
agggcgaattggagctccaccgcggtggcggccgaggtactttaacttctttttttttttttttgagatgagttttgctcttgttgcccagactggagtgcaatggcgcaatctcggctcacaacaacctctgccacccgggttcaagcgattctcctgcctcggcctcctgagtagctgggattacaggcatgcatcactatgcccagctaagtttgtatttttagtagagacggggtttctccatgttggtcaggttggtctcgaactcccgacctcaggcgatctgcccgcctcggcctcccaaagtgctgggattacaagtatgagccaccgcacccagcctaagatccaagattcttatgttttctctccttgccttttgtacctgcccggggcgtgagcgg

SEQ ID NO: 15558 - DNA, 337 bp, Homo sapiens
cctccaccgcggtcggcggccgaggtactttttttattttttattttttttattattttttatggggacggagtggccctcttgttgcccaggctggagcgccatggcgtgatcttggctcactgcagtcctttgcgcttccgggttcaagtgattctcctgcctcagcctccccagtagctgggattacaggcatgcttttcaccatgcccagctaattttggatttttagtagaaacggggtttcaccatattggtcaggctggtctcgaacttcagacctcaagtgattccgcccaccttgggcttcacaaactgctgggattacaggcgtgag

SEQ ID NO: 15559 - DNA, 437 bp, Homo sapiens
actactatagggcgaattggagctccaccgcggtggcggccgcccgggcaggtactttttttttttttttttttttttttccctcatctttctttgataatgggtgaagccaaggataggcaggaaccccaagttccctctctcctgggattgtcacaaaattccccctctccccatcgcatctattttttgtttgttttcttttcttcccaaagagggaaaaataccatgggctttagaggaatcatcgctcactgtgggaaccttgccccctccccaagccaccccactgtgcccataaacgtgctgcctgtaaccaattgttcctgttgaataacaatgcgagctgaggggctttttctgcctgagctgcaaatagattaggctgctcccttttatgtgtgcaaagacattacccaaaagcccccaggatgcca

SEQ ID NO: 15560 - DNA, 409 bp, Homo sapiens
actactatagggcgaattggagctccaccgcggtggcggccgcccgagcaggtacctcagaatgtaactgtatgtggaggtctttaaagcaatgattaagttaaaataaggctattagagtggggccctaactctaaatgactggatttatatgaaggagctagaagaaggacagacacaccagggtcctgtgtgcacagagggacaaccatgtgaagaggcagcaagaggccaactgcaagccgaagagagaggtctcaggggagaccaaccctgccagcactttgatctcaggcttccagcccccagaccagtgataaaataaatttctgctgtttaagccaccctgtctgtggcattttgttctagtggccctagcaaactaatacactcatatatgttgaaaaac

SEQ ID NO: 15561 - DNA, 253 bp, Homo sapiens
ggcggccgaggtaccattagcttgcaggggctgaagcatgtttgtccacaaccccaaccaccagatctatcgttctctttctgtcaccttttttctcttttttccttcttcccttgcactgaggtcctggaggccttgatgaggcccagcaaacaggcattctcacagctgggtttatagtctttgggccccttactcagtatcctgggaaccctgggccaggaagttacagtggtcaatcataattgctgaa

SEQ ID NO: 15562 - DNA, 547 bp, Homo sapiens
  misc_feature 16, 18, 33, 47, 66, 67, 94, 96: n = A,T,C or G
gggaatgatcatgagncntgccgggatgagcgnaagaccgcggcggnagatagggcatggggtacnnagtaggaaatcccaagtaacaaacccncnaaaaacaaagggaggaggggaggctaaggagaaggcagcggtggaaaaggagcaagggagggaggcgcaacccaactgagtgaaggaagacggcagggaagcggggccacatcctgggatcacgagggaagaacggaaacaagctcccaaccaaaagcagaaaccaaacgcagaaaggcaaagcaaagcccagagagcggaggcccaagccaaaaagcccggaacccagggagggcaaagaggggagaaaggttagagccccaagaatagagaaacagcctggggaaaacaaggggaaaaaccgagactacaaaaaatacaaaaaacaaccgggagagggggcacaaataacaaaggagggagaagggggaaaggaaaacttgagggcgaaaaaaaaaagggcggcaaagaaagaacggggaccaacgaagaaaaaaaaaggaaagacaag

SEQ ID NO: 15563 - DNA, 238 bp, Homo sapiens
atagcataccttgagatgcagtcgattgcatacctattgggtcccaatcctcaatctgggcagttgtgaagccggatagtgactgagatcactgggtagaccttgtccaccttggcattcttgtctgccaaggtccatggcccatggggatggggacaatttgagtgggaccctgcccaattggcttattccccagagccaggagcattttactgcttaagaggtcacaaaggttttt

SEQ ID NO: 15564 - DNA, 293 bp, Homo sapiens
gggcgaatttgagctccaccgcggtggcggccgggcaggaatttttcttttttcttttttttttaagttagtggttatttaaaaatctgaaatataggctgggcgtggtggcttacgcctgtaatcccagcactttgggaggctgaaattgggcggatcatctgagctcgggagttcaggaccagcctgaccaacatagagaaaccccgtctctactaaaaatacaaaattagccaggcgtggtggcacatgcctgtaatcccagctgtttaggaaggccgaggcatgaaaat

SEQ ID NO: 15565 - DNA, 199 bp, Homo sapiens
ccacaagggggggccggagccagggggcaggaccagggagagggaagccccagccctgagacagacgcaccacgtcaagcacagcgcaccaaaactgcagacgaggaaggaagcaaaagcaccccactgcacaaaggggaaacagaggcgcgggagcgcgggccaggggacggccgcacaagaacaaggggaccccccg

SEQ ID NO: 15566 - DNA, 482 bp, Homo sapiens
ctactatagggcgaattggagctccaccgcggtggcggccgaggtacgcggggatgcgcagtcgtgagtcctcttgtccttgagcgtcaaccttctttccctgaagtggctggggttcctgtttccttctttgattgacaacttgtgttaaccctcgcacatctctgggccaatttttgcttgaaaatggcagctcccgagcagccgcttgcgatatcaaggggatgcacgagctcctcctcgctttccccgcctcggggcgaccgaacccttctggtcaggcacctgccggctgagcttactgctgaggagaaagaggacttgccgaagtacctgcccgggcggccgctctagaactagtggatcccccgggctgcaggaattcgatatcaagcttatcgataccgtcgacctcgagggggggcccggtacccagcttttgttccctttagtgagggttaattgcgccttggcgtaatcat

SEQ ID NO: 15567 - DNA, 420 bp, Homo sapiens
gctacaccccggcggcggccgcccgggttggtaccctctgtcacggcttcttttggttggaaaagggaatttcccaaccccgggtgaggcaatgccccgccctgctccgtgggctgcacctgctgtctgtcaagccccaatgagatgaaccctgtacgcgggggcctgggatctcaaaatggcggccccgtgcggaaacagcgtctgggagcagccatgttgcctactgaacaaagccgctgaagattaagaatgggcaaaatcgccccatacggaacagcgcagccttgggagcccgatacctggctcgcgaacacgaagcgggagaagttggccaatatggatgtgacagcggttcccattaagcggtgataggatttttgggacctgataatcaagctaggggtcagcaggggggtt

SEQ ID NO: 15568 - DNA, 172 bp, Homo sapiens
gtatactactcactatagggcgaattggagctccaccgcggtggcggccgcccgggcaggtacgcggggtgggcattctgggtaacgagctatttacttcctgcgggtgcacaggctgaggtcgtctatctccctgttgttcttcccatcgtgcgaagatggcacctggaga

SEQ ID NO: 15569 - DNA, 449 bp, Homo sapiens
ctcactatagggcgaattggagctccaccgcggtggcctttcatgtgatctttgtggcagtgggacaggaagtaggcgcgggccctcaggttctccctatcgaagcggtctatggagatagttggatactcggccatctgcccctcgaaagaactcatagcgccgtcgatcccagagttcgggaccccaaaaccgcagctgaagccaaggccagccctgaccgcccccgcgtacctcggccgctctagaactagtggatcccccgggctgcaggaattcgatatcaagcttatcgataccgtcgacctcgagggggggcccggtacccagcttttgttccctttagtgagggttaattgcgcgcttggcgtaatcatggtcatagctgtttcctgtgtgaaattgttatccgttcacaatttcacacaacatacgagccgggagcataa

SEQ ID NO: 15570 - DNA, 331 bp, Homo sapiens
gctattttggaggctgaggtgggatgattgcttgagtctgggaggcagaagttgcagtaagccgagatcatgccactgcacaagctaggtgacagaatgagactctgtctcaaaaataattaaaaagcctctgccccaaactcgttaaaagattttataaccacaactgctgtttctgtgtagatgcatctgcatgcccaggagcagtaaatgcaataaaatcatttggttatactttgaacacaaaataaacggttgaggcttttactttcgaaaaaaaaaaaaaaaaaaaggttccttggccgctctaaactagtggatcccccgggct

SEQ ID NO: 15571 - DNA, 422 bp, Homo sapiens
atagggcgaattggagctccaccgcggtggcggccgctctagaactagtggatcccccgggctgcaggaattcgatatcaagcttatcgataccgtcgacctcgagggggggcccggtacccagcttttgttccctttagtgagggttaattgcgcgcttggcgtaatcatggtcatagctgtttcctgtgtgaaattgttatccgctcacaattccacacaacatacgagccgggagcataaagtgtaaagcctggggtgcctaatgagtgagctaactcacattaattgcgttgcgctcactgcccgctttttcagtcgggaaacctgtcgtgccagctgcattaatgaatcggccaacgcccggtgagaggccggtttgcgtattgggcgctcttccgcttcctcgctcactgactcgc

SEQ ID NO: 15572 - DNA, 447 bp, Homo sapiens
agggcgaattggagctccaccgcggtggcggccgaggtacttgtcctcagcttgggcttcttcctcctccatcacctgaaacactggacctgggggtagccccgccccagccctcagtcacccccacttcccacttgcagtcttgtagctagaacttctctaagcctatacgtttctgtggagtaaatattgggattggggggaaagagggagcaacggcccatagccttggggttggacatctctagtgtagctgccacattgatttttctataatcacttggggtttgtacctgcccggacacatccagtaggctaaggggatgctttccttttctggggtttttcggggggttttttggagcggggagagggatgaagaggtgctccccttaatttctttattgagaatgatgccgtggatacttgaatttagcagttgtcaca

SEQ ID NO: 15573 - DNA, 364 bp, Homo sapiens
tatagggcgatattggagctccaccgcggtggcggccgggcatttactttgcggttatgggacttgatttacagagggatcgggcactgaaggtgcagttcttaaaatcacacctgtaggctggctcctcgctgtgggtatccaggtgcttctggaggtcaataagattcttgcagttgtagtcacaacagtcacatttaaagggccggtcctcactgtgacgaaagcgcatgtggttgcggagggaggaaggcagcgggcaggtcatgtcacacagagggcacttatagtgattcacatggttgcgcatgtggtcccgcaatagccgttctgtggcaaattctcttggaacagtgagaacact

SEQ ID NO: 15574 - DNA, 466 bp, Homo sapiens
atagggcgaattggagctccaccgcggtggcggccgctctagaactagtggatcccccgggctgcaggaattcgatatcaagcttatcgataccgtcgacctcgagggggggcccggtacccagcttttgttccctttagtgagggttaattgcgcgcttggcgtaatcatggtcatagctgtttcctgtgtgaaattgttatccgctcacaattccacacaacatacgagccgggagcataaagtgtaaagcctggggtgcctaatgagtgagctaactcacattaattgcgttgcgctcactgcccgctttccagtcgggaaacctgtcgtgccagctgcattaatgaatcggccaacgcgcggggagaggcggtttgcgtattgggcgctcttccgcttcctcgctcactgactcgctgcgctcggtcgttcggctgcggcgagcggtatcagcttactcaaa

SEQ ID NO: 15575 - DNA, 402 bp, Homo sapiens
ggtggcggccgaggattttttttttttttttccggaggtaatacaagatttatttagcaaaaatacatatatccattattgcaagacttaaatgagatgttaaatgttcaacccaattttctttcctggataagtttttctttcatatccctgtcagttttgaaaacataataccagaagaaggggggcccaattccacagagagctcccaagaatgagtttctgggagtgagtctgaagttgagataaacctttgctgatcttgcttacgttcaatgcatctgggcagcgtctttgatgagccctggcggttaggctggtggcactgaagcaggcctccagggtctcctgtttaagcaggattttaaggccaaccctgcggcttgcgcctgctgggtttct

SEQ ID NO: 15576 - DNA, 420 bp, Homo sapiens
atagggcgaattggagctccaccgcggtggcggccgcccgggcaggtactttgggaggctgacgcaggaggaccgcttgagctcaggagttcaagaccagcctgagcaccatagtgagacctcatctctactaaaaaaaaaaataaaataccaggcatggtagcatgtgcctgtagtcccagctactctagtcccagctacttgggaggctgaggtgagaggatcacttgagcccaggagatcgaggctgcagtgagccattatcacgccactgcactccagcctgggcaactaagcaagaccctgtctcaaaaaaattttaaaaaatttaaaaaataagaaaatccaagctaggttgaaatctgaatgttgagcaggtcagtgaggcacaaactagctaagaaagtcaaccctgcccac

SEQ ID NO: 15577 - DNA, 421 bp, Homo sapiens
  misc_feature 384, 389: n = A,T,C or G
tatagggcgaattggagctccaccgcggtggcggccgaggtacagaaaattagcaagagacattttctgcattgtgagaaatcaacatagacaccttaaagacccctttgagagtgtggctttttgaacttttcagattttgctcagtgacctgctaacacttacgtgagaggctccaggtgtaaatagaatctaatggcagaatctgtaagtgtaaacaagcatcttaggagtgagagatcaagaccacaaaatgtccagagctatgaccacagctatacctacccataaaatacgatactggagtagggtatttttgtcttttttcttacctaagagctagctaatcaggacaggtgatgcaggttctggagctctaccggngcagntctattttctttttttgagacagagtctcact

SEQ ID NO: 15578 - DNA, 476 bp, Homo sapiens
actactatagggcgaattggagctccaccgcggtggcggccgaggtacagctcttctcttgtctttctgagctcttaccagaattgccttccgtgtctttttttttggagatggagtctcactctgtcacccaggctggagtgcagtggcgcaatctcagctcactgcaacctctgcctccctggttcaagcgattctcctgcctcagcctcccgaggggctgggactacgggtgcacgccaccatgcctggctaattttttgtattttagtagcgacagggtttcactgtgttgcccaggctggccttgaactcctgagctcgggcaatctgcccgcctcattctcccaacatgctaggattataggcatgagccaccacgccctgcggtgtccatatttctaacagcagtcacttcagagccatctaggtttcttctaacatgcacctcaaaactctctggcctctactaccta

SEQ ID NO: 15579 - DNA, 217 bp, Homo sapiens
gtggcggccgcccggcaggtacagctgcatcagctgctcgtaggacatgtccagcagctggtcgaggtccacgccgcggtaggtgaacttgcggaaggtccgcttcttcttctgctctacttctgccacccgcgtaccacggctatccttatagctttttaattaaatgaagccaagtgggatttgcataaagtgaatgtttaccatgaagataaac

SEQ ID NO: 15580 - DNA, 663 bp, Homo sapiens
acgactcactatagggcgaattggagctccaccgcggtggcggccgcccgggcaggtactttcccctcccccagaaaagcaggacttgccgctaagggtgaaggaccaaggcaggcgtccctgagtggtctgacacctttgaaacgtgagtgaataatcagagaggtgtccctgcatgattaaacaccaaggaaaggctgccttcccagtctgtgaccagcgccagagttttgggtccacggataaaacgtgtctcgtttgtctctaccagaaaatgaaaggaattgaaattaagagaagggagagattaaaaaaaaaaaaagaaaaaaaaaaagtacctcggccgctctagaactagtggatcccccgggctgcaggaattcgatatcaagcttatcgataccgtcgacctcgagggggggcccggtacccagcttttgttccctttagtgagggttaattgcgcgcttggcgtaatcatggtcatagctgtttcctgtgtgaaattgttatccgctcacaattccacacaacatacgagccgggagcataaagtgtaaagcctggggtgcctaatgagtgagctaactcacattaattgcgttgcgctcactgcccgctttccagtcgggaaacctgtcgtgccagctgcattaatgaatc

SEQ ID NO: 15581 - DNA, 587 bp, Homo sapiens
tacgactcactatagggcgaattggagctccaccgcggtggcggccgcccgggcaggtactttccccttccccagaaaagcgggacttgccgctaagggtgaaggaccaaggcgggcatccctgcatggtctgacacccttgaaacgtgggtgaataatcagagaggtgtccctgcaatgattaaacagcaagggaaggctgccttcccagtccgtgaccagcgctggagttttgggtccacagataaaacgtgtctcctttgtctctaccagaaaatgaaaggaattgaaactaagagaagggagagattaaaaaaaaaaacgaaaaaaaaaaagtacctcggccgctctagaactagtggatcccccgggctgcaggaattcgatatcaagcttatcgataccgtcgacctcgagggggggcccggtacccagcttttgttccctttagtgagggttaattgcgcgcttggcgtaatcatggtcatagctgtttcctgtgtgaaattgtaatccgctcacaattccacacaacatacgagccgggagcataaagtgtaaagcctggggtgcctaatgagtgagct

SEQ ID NO: 15582 - DNA, 654 bp, Homo sapiens
  misc_feature 542, 606: n = A,T,C or G
acgactactatagggcgaattggagctccaccgcggtggcggccgaggtacaaattgtcgtttttattcctcttattgggatatcattttaaaaactttattgggtttttattgttgttgtttgatccctaaccctacaaagagccttcctattcccctcgctgttggagcaaaccattataccttacttccagcaagcaaagtgctttgacttcttgcttcagtcatcagccagcaagagggaacaaaactgttcttttgcattttgccgctgagatatggcattgcactgcttatatgccaagctaatttatagcaagatattgatcaaatatagaaagttgatattcaacctcacaagggctctcaaagtataatctttctatagccaactgctaatgcaaattaaaacatatttcattttaacatgatttcaaaatcagtttttcatactaccctttgctggaagaaactaaaaatatagcaaatgcagaaccacaaacaattcgaatggggtagaaacattgtaaatatttactctntgcaaaccctggtggtattttattttggcttcatttcaatcattgaagtatattcttatggaanatgtacctgccccggcggccgctctagaactagtggatcccccgggct

SEQ ID NO: 15583 - DNA, 610 bp, Homo sapiens
gtatacgactactatagggcgaattggagctccaccgcggtggcggccgaggtactaatttgaatttgtaatgagtctgatggtatatttcaattttttgctttgagggactggctgctacattgcagaatatcttatatccctgactgctttccactaaatgtcagtggtgaccccaatccaatattatgacaactgaacatgcttatgcatccctcatgcctttattttttattttgggaaatctttcagcttcagtttttgctgatatttatgtgattctttgttctgcaattcaaatttctgggagccaaacagtctccttggttcagattactgttttttgactagagcttctcgcttcagattctgtcataagattatggcttaacctatggttgtcctttgatttggtgccatatgaaataaaacattattttctatggctatgtattaagaattttgtgcaattctgtttttcttagaaggctgagggtgtgttgtcagacaccatgactgatgtgacaggtgtattttattatgcggccgctctagaactagtggatcccccgggctgcaggaattcgatatcaagcttatcgataccgtc

SEQ ID NO: 15584 - DNA, 527 bp, Homo sapiens
gactactatagggcgaattggagctccaccgcggtggcggccgaggtactccttcgtaaaccatggagagccagcccaatgcacagcagtggatatcatctttctcagagtccagtatcacagaatcacgactttgtccagctgcaggtgcctgcaggtcacactggctaactacttctggatgggctcttctttctgaggttctgccaacttgtctactacatagggttgatcatcctgttcaggaaatatttctttcatttgctctgagcttaatattgtaatttgtatttgatctgctgggtctttggagtcaggactggttttatcagcagtttgatcttctgaggtctggtatgtagtttgctggcccacagaaccttcacgtgtattcacagcctcaatgccataaggaaactcttttagaagttctgacagctggtcatgtaagtataagacaggtgccttatcactgtggatttcatttcttgcaggatcttggggagtatagttgctggatgcatcta

SEQ ID NO: 15585 - DNA, 472 bp, Homo sapiens
ccctctagatgcatgctcgagcggccgccagtgtgatggatatctgcagaattcgcccttagcgtggtcgcggccgacgtacaaggtgaaccctgaacattctgtgtcagaaagctaatgaagtgcccagagaatgataaatacaatcaaaagacaaagcgacaagcatgaaaggccaaatatgagataatttgggaatttaaaaaatgaacataatggatcgtaacacattgaattttttaaaattcttgagcctgtagtgatactggaggaaggagtcttttgtttacacaagaatgccagaaaataaatgtaaaagggataataaaattaggaaatgactattttgcagcctgtaatgaagttcagacaaaggtcatcagtgcatgctaaaactactgggtgaaagtgtattggagaacatgatattcacatagtatcaaaaagtcattccattgattgattacttatt

SEQ ID NO: 15586 - DNA, 501 bp, Homo sapiens
atagggcgaattgggccctctagatgcatgctcgagcggccgccagtgtgatggatatctgcagaattcgccctttcgagcggccgcccgggcaggtacgcggggtggggatattttgtctcacagattgtaagaaaggggtatggaaatccccaggcaacagtgtgctcctcagcttgctgaaacagaccaaagactatgttctaatcaaaccttccaggaatctcatggaaatttcatttaatgcctctccaggcacttttctgaaagcccccacgttagggatgtcttggctaagacatctctcatggtatccacagcaaccctgatgaagctcatttctggagaagaagaaagtctctcaacacctctgctaagtcatcattctcccatcctcactgcagcagttcctggaatctcatgaagggaagctgggacccaccgcacaccctctgcaatacctcacagtaacttggaaatgccgacttaattcacaggcag

SEQ ID NO: 15587 - DNA, 404 bp, Homo sapiens
gactcactatagggcgaattgggccctctagatgcatgctcgagcggccgccagtgtgatggatatctgcagaattcgcccttagcgtggtcgcggccgaggtacagtcctagccacagtagtaatcaccactggcctgactgagccctcaccctttatacagtgtctcctgccaccctcctgggagaggctgttctcggcacagctggcctggggtcacacagctggtaggtgtaaagcaggcattggagtccaggtagtctcactccgtagcctgtctctttagccactggaaatgtagagcaaagcgagaattgtccaaagagataagctaataaagaggaaaacaggctgggtgcaatggctcatgcctgtaatcccagcactttgggaggccaaggagg

SEQ ID NO: 15588 - DNA, 457 bp, Homo sapiens
  misc_feature 148, 151, 153: n = A,T,C or G
gcgaattgggccctctagatgcatgctcgagcggccgccagtgtgatggatatctgcagaattcgcccttagcggccgcccgggcaggtacatcaccctgctgagggacatccaggacaaggtcaccacactctacaaaggcagtcanctncntgacacattccgcttctgcctggtcaccaacttgacgatggactccgtgttggtcactgtcaaggcattgttctcctccaatttggaccccagcctggtggagcaagtctttctagataagaccctgaatgcctcattccattggctgggctccacctaccagttggtggacatccatgtgacagaaatggagtcatcagtttatcaaccaacaagcagctccagcacccagcacttctacctgaatttcaccatcaccaacctaccatattcccaggacaaagcccagccaggcaccaccaat

SEQ ID NO: 15589 - DNA, 570 bp, Homo sapiens
agatgcatgctcgagcggccgccagtgtgatggatatctgcagaattcgcccttagcgtggtcgcggccgaggtacaaatagagctggaatgatgatgatcacaatgaagatgacaacagtggtggcaatgacacggctgccactacttggagtggcctcggagtttaatatcaaaggctggcctgggtttgagctggttgagggagaagtgagtgtattgcatacatgagaaaacctgagcaaaggaaagatgagactcaaatggcagcactaagaccattttgcactggagtatcagatatattttgaaaagaagactgtagagtgactttttgaaagacatgggggattagcaggtaaagagaagcttgaagtggtatttagagatgctacatttagtgacttcagaaggtataaactgaagcagcaatgtagattaatattcaagatatggggataaaagggtgactaaagtgggatccaaagcaaatgggtgccagaaaaacaatgaaagaagaactgatggaagctatgatctaatttacatttaagggaatgaggaaaacagt

SEQ ID NO: 15590 - DNA, 482 bp, Homo sapiens
  misc_feature 383: n = A,T,C or G
ccctctagatgcatgctcgagcggccgccagtgtgatggatatctgcagaattcgcccttagcgtggtcgcggccgaggtacctccttcagtgagttgttggcaactaggcagtgaaatgagggagtgaccgctcatggctcatgaactttgcaagttgtgcaactcaactgtcccaccttgaaagggctcaggaaggtaaagagtgttgttttgggacacagggattgttgcatttaaatctttgtgactgtggtttggtctcagactggtttttcatgcataagttcttcttaccctcaggcatctgggattttacctgtttttcttccagtggtgtgccctctccgccacattgtggagcgtgctttctcaatccttcangaagagattcaaagactttgttttttaacaatatgcaggatgggcgtagtgactcatgcctgtaattccagcactttgggaggctgaagtgggtggatc

SEQ ID NO: 15591 - DNA, 382 bp, Homo sapiens
ctactatagggcgaattgggccctctagatgcatgctcgagcggccgccagtgtgatggatatctgcagaattcgcccttagcgtggtcgcggccgaggtacattatttagtgtaatgcctaatgttagtcctctttatagcatattttatacaatttctattatttaacaggccttgggaattcaaagatgaaatgtgtgtccctcaagtaactcactaatctattgttataagtagattgtaattcatgagtgctgtaacagctatcctatgacagcactgaagaggatgtggacttcctagatgaatatgtattgagttgtaggggagtaagaattcacctaccagtgaactagtggacctgaagtggtattccagatt

SEQ ID NO: 15592 - DNA, 648 bp, Homo sapiens
tacgactcactatagggcgaattgggccctctagatgcatgctcgagcggccgccagtgtgatggatatctgcagaattcgcccttagcgtggtcgcggccgaggtacagttctcagtttttcttataggagaaatatggtatatgtttataagaatcttttatgagattatagatttcaatgctgtggatagtgtcttgcacccaaacaagaaagtccataatggaatgatcttccctcagcttcctatcgatttagttacctcttgaaagcacaaaaattaaaacattgccatatgttgaatttttaaaaagcacttggagtgagcgaacatttcctgataaatgccttttagagataggttcttgatattcagacatctgcagaaatgttctggttcccaaagtcatttcacttcgaaataaaacacagctccttcaaacagcactttttccacataaatctagttgcctctccctgtggacattcagaactgatagaacaaacactactcttttgaatttgatggttcgtgtcctttaaagtgtttgaagacctatgcagagcctgtaacacttgggtagtacctgcccgggcggccgctcgaaagggcgaaatccagcacactggcggccgttactagtggat

SEQ ID NO: 15593 - DNA, 402 bp, Homo sapiens
actatagggcgaattgggccctctagatgcatgctcgagcggccgccagtgtgatggatatctgcagaattcgcccttagcgtggtcgcggccgaggtacaaatttattaagctctaggttcatcagatgaccaggaaaacatagactatcaggacacagacaaagcagaactgcagaattatagaaaattcaaggtctcatggaggaaaagcagtatctacaataagaaagagaccccaaacagcactctagatttctttaagagggattatatttcctccttcctcccattctcccttcatttcttcctacctccctcttttcatcctcttctccttttatcttttcatcattcctttcttaagcattttacttagttactactatgttctaagcactgg

SEQ ID NO: 15594 - DNA, 668 bp, Homo sapiens
  misc_feature 339: n = A,T,C or G
actactatagggcgaattgggccctctagatgcatgctcgagcggccgccagtgtgatggatatctgcagaattcgccctttgagcggccgcccgggcaggtacaaaattgctaattttattccagtgatgattatttttaactttggtgattacgtatcaaattaaggtaattctataaaaatctacagccagtaaactgaaactatagctaaaactgtagctactgtttttatattttcttagatgcatgttgttttattataatagtttaatgtagtggttgaatggaatatgtggttttcttctagaataccttatgtgatttattctatgactnttttcctttgaacccttatgactcttagtatgtaaattttcttaaattatactcttttgttgtttattctaaactacttgaggcagatctcaaaagttgaataattactgtgcatctcagagaattgtcttgtgtctttcaaatatatttagttgtctttagcagtaactcttacatggttatttgcatgacttaataaacatttcaatgcccccaagttacctagcagaaaaagtccacttttaaagacatctgtaagagagaactttatttttcttaaattggaagcacatcatttagtccttactaaaatgtagacttgtagtgta

SEQ ID NO: 15595 - DNA, 478 bp, Homo sapiens
  misc_feature 343: n = A,T,C or G
ccctctagatgcatgctcgagcggccgccagtgtgatggatatctgcagaattcgcccttagcgtggtcgcggccgacgtacacagcaaatacaatcttatgtcagttataaagaataataaataattttttgaaaagcaaagtgacttgtccataaccacaatatttttcattttcaaatctcatttttatttcttatgccacattgcctataattatacagctaacaattatcccatgctcagaagaaataaaactgacgtagttagtaatcagtaatatatcattcccttaaaacaagtattgctgacttaatatgcataaaactgctgtcacataccanatatgaccaacaggttaagggtgagaacaatttcactgactacaatatttatagcaaaataagtgtctatatagtggaagaaatatgcttaaagagaaatacgaaaatgccaatagaaaaataaactaaattatg

SEQ ID NO: 15596 - DNA, 601 bp, Homo sapiens
tacgactactatagggcgaattgggccctctagatgcatgctcgagcggccgccagtgtgatggatatctgcagaattcgcccttagcggccgcccgggcaggtacttttttttttttttttttttttttttttgcgtgtgagacgaagtttcgctcttgttgcccaggctggagtttgacccacaaaataaggttcccagatcaccatcaactaaagttcaaaatagacaaaccctatccatcctagccagtgattatttagtatttgtggaaagcctctaaatttaaagggtccacgaacaaagacagagacaaaagaataagagcaacatgtaggaaaaagagatttacacagactctaaaacattaacaaaaccaagatttgtattaccagaaaaagagttatttcgtctaagaaacaaaaataagctgctattggaaaaaaaaaaaaaacagttggaagcttaaaaggaaacttaaggaaacctccccgaaagaagaattaaatgggggaaattgaaataggagagaaaactagaaagcccaaaaataaaattgaaatgacaacatccatttgggaacaaaaaaaaaaggaaaaaa

SEQ ID NO: 15597 - DNA, 475 bp, Homo sapiens
ctactatagggcgaattgggccctctagatgcatgctcgagcggccgccagtgtgatggatatctgcagaattcgcccttagcgtggtcgcgaccgaggtacagcaggcctaatgataagacagcctacctgggctccagcctgcctgtaactgtgtgaacttagcaagtccttcactcagtcagactttgctttctacatctgaaaaagtcaaaagaaagaaaataaaaacctcagcctacctccctctcagggttgttacaagggggaaaagagcataaacagatgcaagaagtgcttccttaaagagttcaatatgaattgtttttctgtttaggttatgttaaatctatttcatattattaatcccttccagatgacacccatcaaacaaacacccaaatggtccatgtctgaaagaccacagacttttcttttgggaaaaaaaaaaaaagctaggccaagcctgagatac

SEQ ID NO: 15598 - DNA, 542 bp, Homo sapiens
  misc_feature 110, 111, 112: n = A,T,C or G
cgactactatagggcgaattgggccctctagatgcatgctcgagcggccgccagtgtgatggatatctgcagaattcgccctttcgagcggccgcccgggcaggtacttnnntttttttttttttttcttttttgagacagtgtctcgcactgtcacccaggctggagtgcagcggtgtgacaggcacatgccaccatgcctgactaattttatcgttttcttttttttttcaggtagagatggggtttcaccttgttgtccaggctggtctcgaactcctgacctcaggtgatccacctgccttggcctccttacgtgctgggattacaggtgtgagtcaccacgcccagccattgatctgttgcctcttactagagcttcttgttggattccagttttttcccactctattttattcatttgtggcctttggaaaatagatctgttcatttcatttacccaccaaaaaaggataagttcttactctttgaaataaaaatcaaactccttagtctgcctcctgaaataaaaatcaaattcc

SEQ ID NO: 15599 - DNA, 405 bp, Homo sapiens
  misc_feature 321: n = A,T,C or G
cgactcactataggcgatttgggccctctagatgcatgctcgagcggccgccagtgtgatggatatctgcagaattcgcccttagcgtggtcgcggccgaggtacctattgtatcagaaaaatgctaattaattttttgcacataaagggcattttaaacttggttttattctttgtgataaatatggatgatgaatggtaatgttaaacagaattcaaaagttatcagtttggctagccagacacagtagtatatgcctatagtcctagctacccaggaggctgaggccagaggagcccggaagttcacgtttagcctgngcagcatagtgagacactgtcttttataaaaacaacagcaaaaatgatcagtttgggatagtaagacaaatggctttttttttg

SEQ ID NO: 15600 - DNA, 539 bp, Homo sapiens
cgaattgggccctctagatgcatgctcgagcggccgccagtgtgatggatatctgcagaattcgcccttggccgcccgggcaggtacgcggggaaaaaaatatttttatcttttagaatatcagtttgtcccttacagtaatgtaaaattacatttattttatctttaggatataacatctcaaacagaggctattaacttttacactatgtgtaaagaaacaacttgagaggcaactttattatgcaaccacgatcatgaaggggatgaataaaccaactacttagaaaaaaaagtgctctattatcatggaatggttttcattgatcctttcttgtatttctggaatcactagaactaatctccaatctatgcactgaattttgacatacgataaatgccatgatttcattaatgattaaaatacttgtctgaagtataactttttaaatattaagtgatgatattcattgacaagggacaacctaaatctggtttctcctgcctgcaaagaactttagggattaaatatttatcct

SEQ ID NO: 15601 - DNA, 463 bp, Homo sapiens
ctcactatagggcgaattgagccctctagatgcatgctcgagcggccgccagtgtgatggatatctgcagaattcgcccttagcgtggtcgcggccgaggtacaaataaagtattccaagggttcagaatagaaaatgatttcttccagcttggggacatttgggaaattgggatatcctttggggaaatgtagtaatcagtatattctgggaaaacatagtagagaatgaataaataaattccattgaatttggaatatgttgtccattctccctgtaactaatgctatcaagataaagtagaaataccacatttcagaaacagctggagtagacaggtcttcataggctagcttggaaacctaatagctattaataatgaaattttaattatactctggattctaaacaatgaacacacagtgatctttttgacttgctgctggttattagttggggatgg

SEQ ID NO: 15602 - DNA, 400 bp, Homo sapiens
gactcactatagggcgaattgggccctctagatgcatgctcgagcggccgccagtgtgatggatatctgcagaattcgcccttagcgtggtcgcggccgaggtactgattgttgaactccgagtcacactcattatgacctgggaggcagatgtctagccttcagctaattatgatgggcagtatggaggagagtgtgagtcaaaccttccatggaggaaaaggagtgaacactcagggagactggagccgtttaaaaggacatggggaggatctaatcaggatcttgaaaatttaatgttctcaaaagttatttctatcagtcttaagtaatagatgaatttctttttgccactgcaaagatgatactgtcttgataaccattctctatcatcatgccc

SEQ ID NO: 15603 - DNA, 513 bp, Homo sapiens
acgactactatagggcgaattgggccctctagatgcatgctcgagcggccgccagtgtgatggatatctgcagaattcgccctttcgagcggccgcccgggcaggtaccacctgactcagctgggtgcatttgaccagttttgcccccatctgtaaatatccctcagtccccatggagctgtagaggtgagtgatgaagcagtgacagctctgggtaggaactcagcttaatttcaagttccagaccctctccatcctcaggttcttcttctgtaaaatgaagatccctttgcggtgaaacgttttgcagctctggaatctgagggtgtaggaggagctacagaagaggggtataggactcacctgaataaaggtggcatctgtgattactgtgggcgagggtgagagggaagaggatactgacgctaagccttgccttcttagtccaaattttggttgtgcattaaatatgtcttaattttttttataacttaacctcaccccaaatttgag

SEQ ID NO: 15604 - DNA, 692 bp, Homo sapiens
acgactactatagggcgaattgggccctctagatgcatgctcgagcggccgccagtgtgatggatatctgcagaattcgcccttagcgtggtcgcggccgaggtacagaaggctaagtatcgctaatttctattcagagacacagggactctacccttgttcctggctttataaagctgctcagttctaatgtgcactgcacacaacagctgccagggccacaaacacccccaagcagacgttaggctctcaacccctaagatacagttttcctctcaatagctcataagactctgccctctgacgtgagaaaatagaattctgttgtgctttttaagtatgcctatggcatcttttaaaatataccatatatgatccagtatttctttgtgtttggagtgtgaatctgcaggtgaaagagtgtgttctacacgtgcccgatccatcctcattacacaaattcaccctctactttaaaacagggaatttgggcctttgacaggaaacaagccggacagtcatggggccaagctggaatcaaatgtaaatatttaatttcctcctgttaaaagcagagtggacccacagtccctcccaaagtaaaatgcacaataatgtgtcaagagccctggactttatgcttctcggacgttagcaaagatcaagcgcagaccactggctttggggtctga

SEQ ID NO: 15605 - DNA, 619 bp, Homo sapiens
  misc_feature 336: n = A,T,C or G
ctactatagggcgaattgtgccctctagatgcatgctcgagcggccgccagtgtgatggatatctgcagaattcgccctttcgagcggccgcccgggcaggtacccaactaggaattggggctcagcaaagtgccctggaggaagtgatacccaagctgagagatgaagaataatgagtggggtagccagggataggtgagagggaacatcctccaggcagaaggagaagcagacacaatggagggtgtggcaagagatgaacctgaaaggcagtcttggaccagatcagagaggaccttataagctacatcatgaagcttaaaatgaatccttangtcattggacagctgtggagaaagagtttgtaagggagggaagttatatgaatacacaggaattttttaaggtggctatggtagtagtgtgaaaagagaaatgattaacagtaggcaagctcagagaaagaagccgccaaggaggctgtcaccataatccagcagaaagaagatggtggcctggactggggaagtgactgtagggatggagagaaatggatgggcttgggaaatgagaagggataggatccacagggcttaggatttgagtgaatagaaaaga

SEQ ID NO: 15606 - DNA, 485 bp, Homo sapiens
agggcgaattgggccctctagatgcatgctcgagcggccgccagtgtgatggatatctgcagaattcgcccttagcgtggtcgcggccgaggtaccactgcactccagcctgggcgacaaaatgagaccctgtctcaaaagaaagccctctccttagctgagcagaggaagggaaggagtgtggctatgagaatatgatttatgccattttctgtttttaaatctagaagatcttctaagcacaaatacagctacaatgaaatattttacagacaaaatgttaatagaccatattctttgaattaaatttgtttttaattttctctacacattttttttttcctggagtctcttagctctaaatatatcaatcagatttataattttttttacctgattcagatgtcttacatttttatattaaatgaaccttaagcatgattcttttggtaagccagtatgaatgccagtggttggggggcggg

SEQ ID NO: 15607 - DNA, 457 bp, Homo sapiens
  misc_feature 154: n = A,T,C or G
ctactatagggcgaattgggccctctagatgcatgctcgagcggccgccagtgtgatggatatctgcagaattcgcccttagtgtggtcgcggccgaggtacagtccacaaaatggtttgcttctgaaaaagcagtagtagtcttacatccaanattattcctaaaataaagtttcgacccacatatataatgaaattgaaactgcctacattggcaaagccagaaagagagtaaaaaagatggggtaggccagttgcggtggctcatgcctgtaatcccagtacctgcccgggcggccgctcgaaagggcgaattccagcacactggcggccgttactagtggatccgagctcggtaccaagcttggcgtaatcatggtcatagctgtttcctgtgtgaaattgttatccgctcacaattccacacaacatacgagccggaagcataaagtgtaaa

SEQ ID NO: 15608 - DNA, 647 bp, Homo sapiens
cgactactatagggcgaattgggccctctagatgcatgctcgagcggccgccagtgtgatggatatctgcagaattcgcccttagcgtggtcgcggccgaggtactgtctgtgacaagagcaagaaatacattttgaagtggtttgttttagtagctaaagttatcctgactgatacatttgataaaggatatttaccagcagttcacaatgaacatactactacatgtatatattaaagatcatagcctgcacaataaaaagaagaaaataaataaattagaaaataaatagtttagaaacaaagacacagtattagttctagttacagaatatgattctccaaatagtatatgctatcagcttcatcaacaagtaaccagaataccaaagaagacatagaaatggctaacaagtatataaaaacatgctcaacatcactaattatcagagaaatgcaaatcaaagccacaatgagatattaagtcacacctgacaggatcactattatcaaaactacaaaagtcaatacttattggcaaggatgtagagaaattgaaacagcatggaagtttctcaaaatattaaaaatagaactaccatatgatctgcaaccacttctgggtatttatccaaaagaattgcaat

SEQ ID NO: 15609 - DNA, 428 bp, Homo sapiens
ctatagggcgaattgcgccctctagatgcatgctcgagcggccgccagtgtgatggatatctgcagaattcgcccttagcgtggtcgcggccgagggacttttttttttttttttttttttttttttttggagacggggtctcacactgttgcccaggctggagtgcagtggtgcaaacatggctcactgcagcctcgacttcctgggtccaatcaatcctcctgcctcagcctccagagtagctgggactacaggcatgtgtcaccactctagactaattaaaaacaaaaaattgtagagacagtgtctcgccatgttgtccaggctggtcttaaactcctggcaatccttctgccttgacctcccagtttgctgggttacaggtatgaggaacctgcctggcacccagtttttttaaatcaagttt

SEQ ID NO: 15610 - DNA, 462 bp, Homo sapiens
ctatagggcgaattgggccctctagatgcatgctcgagcggccgccagtgtgatggatatctgcagaattcgcccttagcgtggtcgcggccgaggtacaggcgtgagccaccatgcccagcctgaatcccccttctcaaaagtaacttccattcactttgtccctggcagtctgctggtgaccatgatttctaaggctcactcatgggaccaaaggcaagaagaaagggaggagggtggtaaccagataaactttgcaacccctttgataggactttttgggtgagaatttttatgaaaaataatatatacttctactatagatctgcctctagtttcaacctctagttttagcactgattttttccccttaatttccagaagcatgatataataatctttttcaaagaaagtgggaagaatgtccacagatgttaggagaagacaattatgtaggaaaaa

SEQ ID NO: 15611 - DNA, 619 bp, Homo sapiens
actatagggcgaattgggccctctagatgcatgctcgagcggccgccagtgtgatggatatctgcagaattcgcccttagcgtggtcgcggccgaggtaccctgggggtgtcatcaaccaagattagaaatatgggaagatgaaatggtttttaggaaagataatgattttaattttagaactgtcaaatctgaggtgaatccttcaaaaaagtcaaatgatagttccaaagagtgaccatgaaatctgacaaataagagttatcttagcaaggagcagtctcatggaaataataaaagctgaaacaaatagtagtgattgaggagtaaatgagaggtgaagcagtggagataatacaggttctgtttggaggagacttggcaataaaggtgaaaaaataggatggatgagatagcactcagcaatgaaatgtaacagaattgatgcaacacgggtgaatctcaaaatcatgccaagtgaaagaagtatagtccctataatcacctatagtcccaattactcaggaagctgaggcaggagaactgcctgaggccaggagtttaagaccagtctgggcaacacagcaagaccccattctctaaaaaaattaaaaaacatt

SEQ ID NO: 15612 - DNA, 564 bp, Homo sapiens
ctatacatgcatgctcgagcggccgccagtgtgatggatatctgcagaattcgcccttcgagcggccgcccgggcaggtactcctatcagtgatgtatgagagttacagttgcttcacatgtctgtcaacatttacactgtcactgttttttatattagccattttagcatatatgaaataactgattttaatttacattacatttccctgattaatgagttgagcactttttcatatgcttatttttcatttgtatatctttcaagaagtgtctttcatgtcttttctcattttaaagttgggtgtctttttattgtaggtgtaattctttgtattttgaatataaatcctttgatagatatgctatgattttttaaagactctatgtattcacttattgggatctttcgatgaacaaattttttttattaaaatccactttatcagttttttaattttatggttttatgaccctaaagtcaccaaagaacatattttcttctacaagttttatggtttgggattttatggttagggtttggatccatctaaaattaattttt

SEQ ID NO: 15613 - DNA, 455 bp, Homo sapiens
  misc_feature 233: n = A,T,C or G
ctactatagggcgaattgggccctctagatgcatgctcgagcggccgccagtgtgatggatatctgcagaattcgccctttcgagcggccgcccgggcaggtacatctctccatatgcagcaggaatgtcttttttatttaagggcacatttacacaaagagcaaatggtccagactcagtcttccataacctagagtctgaattgatcactctataaaatggaaaaatgttncttttctttttttttttttttttttttttggggttttaactttttttgagacagtgtctcactttgtcagctaggctagagtgcagtgacacgatcacagatcactgcagccttgacctcctgggctcaggtgatcttcccatttcagcctgctgagtagctgggaccacaggcgcgtgccatcacacctgcctaatttttgtattttttgtagagacagga

SEQ ID NO: 15614 - DNA, 451 bp, Homo sapiens
  misc_feature 155: n = A,T,C or G
ctactatagggcgaattgggccctctagatgcatgctcgagcggccgccagtgtgatggatatctgcagaattcgccctttcgagcggccgcccgggcaggtactgtagttataaaactgacactgtttacaattaacagtgttctagaatccanttgtttggagggtattttacattatgaaatattgacttcagatggtcactgctattttcgagatctatgactatgtttcaaggagatccattggtctgacaaaataagagatgtatattcctgaaaattgcatgtcctctggagtctgttgtctggatggtatcagagaggtattagaactgtcctcagaggtcattacaattttctcatagtgtttgtcaaggaaagagttgggtgtgaaaggtcttctatagtattgggtcctaaccaagtcaggaagagaagcaaatgccatt

SEQ ID NO: 15615 - DNA, 521 bp, Homo sapiens
aatactatagggcgaattgggccctctagatgcatgctcgagcggccgccagtgtgatggatatctgcagaattcgcccttagcgtggtcgcggccgaggtacttaagtaaagaaattaacctctaataatacaatatttttattagttaaaaataaaggacatatgtatctacacacacatatatgctatacataaatacatatgagaaagacaaaaattgagagattaagagacagagagagtttgagatagagagttcaaaaaaaaagcaaatgatataaatttacaagagtaaatagaataatcatgtgaagggtattaggagttctttgttttatcttttaacatttctgtaagtttaaaattatttcaaaataaaagatctaaatatttttcaaaaaataaaacaaaatttttggaaaatctaaaaaattttcaaaaaataaaacataaacataaaaaccagaaatctgtctaatacaaatgttaacttagtgtttgatgagtacctgcccgggc

SEQ ID NO: 15616 - DNA, 392 bp, Homo sapiens
tatagggcgaattgggccctctagatgcatgctcgagcggccgccagtgtgatggatatctgcagaattcgcccttagcgtggtcgcggccgaggtactaacaaggccagaagccttctaccttcagtcttgctctggcaaccccacctcttctttcatcttctcccatctagggagatgtctaatgggcatgatagttagaggtggtgagaggatagggacaggaaagtcctgcctgtgggacaacagggatcagggactcaacaagtcttaggcctctcaccaggaccagcatgttgggaagctgcctctccatccatattcagtctcagaatgggcagctgcttcccctgcaccctcatcttggtctggtcttggtgatagggtgggga

SEQ ID NO: 15617 - DNA, 611 bp, Homo sapiens
tcgactactatagggcgaattgggccctctagatgcatgctcgagcggccgccagtgtgatggatatctgcagaattcgccctttcgagcggccgcccgggcaggtacagtggtgacaagatctcagctcactgcaacctctgcctcccaggttcaagtgattctcctgcctgagcctcctgaatagctaggattacaggcacgtgccaccatgcctggctaatttttgtatttttagtagagacaatgtttcaccatgttgcccaggctagtctcaaactcctgacctcaaatgatccacctgcctcagcctcccaaagtgctggattacaggcgtgagccactgtgcctgccctaagcctgtgtgttttattcttctgacttgcaggctaaagcggcagctcttccatatctcattgctatctcctagggcttccgctaggagactgatctggggctagaggcctccctctgtgtacacgagaatgctggaaatgtcacctctcagggctctgcctgcctctcagccctgaaagccatggtggaaaggggtggcgcttacatagacatctgaggaaagaagtgagggaaggtaaagggtggtgcagtaa

SEQ ID NO: 15618 - DNA, 472 bp, Homo sapiens
ctactatagggcgaattgggccctctagatgcatgctcgagcggccgccagtgtgatggatatctgcagaattcgcccttggccgcccgggcaggtacattatcattattttatatcttgctcaatcttttaggcgtcaatctcacatcaaaaagtttattggcctataacggcacgagccaacttcaaattattttttaaaagttttgtgtatttgtagattatgaatctctggtaactacttgtaacatttggctctgttttctgtgaatatttatccctagctaaaaaaaattcttacatcttcagaagagctataatgttgacacctaactacactgtaatactacacagtaataggacactaagcagatagataggtttttaaaaaatatttgtattttcagcacctggtaatacagtggtctagtacctcggccgcgaccacgctaaaggcgaattccagcacact

SEQ ID NO: 15619 - DNA, 341 bp, Homo sapiens
ccctctagatgcatgctctagcggccgccactgtgatggatatctgcagaattcgcccttagcgtggtcgcggccgaggtacttcgttggtgcctcagtctttaaggattaactaggaagaattttctttctgcatagaaactttataaaataactgacattgttacataattcaggcataatatttacattatactctttcttgaatggctgacgttgcataccaagggtgatcttgtaaactctccatcaatttccttggctcttcacttttagaacctattttcctgacattaacaaccttgggtggtagattactggtatattttattttttcttct

SEQ ID NO: 15620 - DNA, 643 bp, Homo sapiens
  misc_feature 181: n = A,T,C or G
atacgactcactatagggcgaattgggccctctagatgcatgctcgagcggccgccagtgtgatggatatctgcagaattcgccctttcgagcggccgcccgggcaggtacatcaccctgctgagggacatccaggacaaggtcaccacactctacaaaggcagtcaactacatgacacanttccgcttctgcctggtcaccaacttgacgatggactccgtgttggtcactgtcaaggcattgttctcctccaatttggaccccagcctggtggagcaagtctttctagataagaccctgaatgcctcattccattggctgggctccacctaccagttggtggacatccatgtgacagaaatggagtcatcagtttatcaaccaacaagcagctccagcacccagcacttctacctgaatttcaccatcaccaacctaccatattcccaggacaaagcccagccaggcaccaccaattaccagaggaacaaaaggaatattgaggatgcgctcaaccaactcttccgaaacagcagcatcaagagttatttttctgactgtcaagtttcaacattcaggtccgtccccaacaggcaccacaccggggtggactccctgtgtaacttctcgccactggctcgg

SEQ ID NO: 15621 - DNA, 392 bp, Homo sapiens
gggcgaattgggccctctagatgcatgctcgagcggccgccagtgtgatggatatctgcagaattcgcccttagcgtggtcgcggccgaggtactttgctagtatttgtgggttttgtattttacatttaaatcttaatgtaagatttaaatgtaaatcttaaacatcttaaacacatatagtttaaggtgtgaggggagatttaactaatctgttttttccttttattccacttattaaacccaaatgtttaatcagttgtcctaatattgtttagtgaataataattgcaaataatatgtttttatatttgcaaggcaatttccttcatctttattcttcttttaaaaaaatttctggactatttctacattatcatcatcatcatcatt

SEQ ID NO: 15622 - DNA, 573 bp, Homo sapiens
  misc_feature 475: n = A,T,C or G
acgactactatagggcgaattgtgccctctagatgcatgctcgagcggccgccagtgtgatggatatctgcagaattcgcccttagcgtggtcgcggccgaggtacatatggatttgatacgtagatatagatttaagactagaaatacttatagatatattggtatataaatggtattccagtgcccttttataggataaaattcattcttatattagaaaaatccattcatacataatttttgattattcaagacataaatgttgaacaactaagtgctagacaatatggtaggtgcaaaattaacactagaaaattcttccccagagcactgatttatcattacacaagcacaaatctttaattctctaatcacataaaattattttcttctaataacttcatctcaaattccctttggtttctgtgaaagaatcttataatatgtcactatacatacaaattatgaaaaanttatgcaaacatacatccttttcaggaagaaccacaaatcttcctgacttgaggatacattagaaggcaaattatttaatcacagaatacaatgaagt

SEQ ID NO: 15623 - DNA, 548 bp, Homo sapiens
  misc_feature 315: n = A,T,C or G
ggtcgcggccgaggtacttagaacactgttgatggagtatatctgttgtgagcctggtttctgtgtatgtgtccaattcagtgataggagaagaaagcctgtaattacatttgcataaagtggttggctgctaaagagatgtaattccattattccaaacttttaattcatattttaaaatataaaaactagtatatatatcaaggaatattttaggaaatcttgtagttacctgtaagtgtctaactgtgtattcaatcagtaaccaatatggaaattgcagagtttcttcatcagaagatatgagtttaaatnttatatttggcatgcacagcaatatattaaatgctgtgcttaactagaaagtattgtgcagtgtgatggccttttaacctccacaatatacattttatttttattccctagacttgcacatgaagtgcatatgttcatatttacccgtttggagatgggtaagatacaaccagcatagctccctctccatggccatctttgaatttcatgcaactttcccttttcctgtcccc

SEQ ID NO: 15624 - DNA, 340 bp, Homo sapiens
agatgcatgctcgagcggccgccagtgtgatggatatctgcataattcacccttagcgtggtcgcagccgatgtactatttgggggatcaagatgtgcagtatttaaactgtatattggtacaaaactagtcactgttgggaagaatgctgggaataccacaaactagtttggcaaaggggaaaagaatgtttaaaaagtgctgattgtattgtaaacatagtagtgataatacaaggaaagcttttattcctgagcaaagcaaagttacaaagatgtttgccacttgtttcaatttttaaacacagcagctataaacctgaacacatatgctatcatga

SEQ ID NO: 15625 - DNA, 663 bp, Homo sapiens
tatagggcgaattgggccctctagatgcatgctcgagcggccgccagtgtgatggatatctgcagaattcgcccttagcgtggtcgcggccgaggtacagttctcagtttttcttataggagaaatatggtatatgtttataagaatcttttatgagattatagatttcaatgctgtggatagtgtcttgcacccaaacaagaaagtccataatggaatgatcttccctcagcttcctatcgatttagttacctcttgaaagcacaaaaattaaaacattgccatatgttgaatttttaaaaagcacttggagtgagcgaacatttcctgataaatgccttttagagataggttcttgatattcagacatctgcagaaatgttctggttcccaaagtcatttcacttcgaaataaaacacagctccttcaaacagcactttttccacataaatctagttgcctctccctgtggacattcagaactgatagaacaaacactactcttttgaatttgatggttcgtgtcctttaaagtgtttgaggacctatgcagagcctgtaacacttgggtagtacctgcccgggcggccgctcgaaagggcgaattccagcacactggcggccgttactagtggatccgagctcggtaccaagcttggcgt

SEQ ID NO: 15626 - DNA, 383 bp, Homo sapiens
tagggcgaattgggccctctagatgcatgctcgagcggccgccagtgtgatggatatctgcagaattcgcccttcgagcggccgcccgggcaggtacaattgggtaggcccagaagaggaaagagagcaaaatagagtagtcaggaaaagagggcccagtttgggcgcctgttagctcctgtgtggtgtgaaaggcactcagatgttcctgcatctctgatggaaaacacagaacctggctcagctgagagacaacagctctgtcatggggaggttgaagtgaccccacagcaaagtggagaggaagttgttgaacagaagctgtggcagagactcaaagaggcctataatgctggtgagaactatggtggcctgagtcatct

SEQ ID NO: 15627 - DNA, 456 bp, Homo sapiens
ctcactatatgagctatatggcgaactgtagcacctctagcatgcatgctcgagcggccgccagtgtgatggatatctgcagaattcgcccttagcgtggtcgcggccgaggtactcacctgccacatcctaatctcagctcctctctctcccaccctcatccaccttccataacatgctttagtcccaccctactgtcagttattcctgcaaagaatacaacttacagccgggcgcggtggctcacacctgcaatcccagcactttgggaggccgaggtgggtggatcacgaggtcaggagattgaaaccatcctggctaacacggtgaaaccccatctctactaaaaatacaaaaaaaaaaaaattagctgggcatggtggcgggtgcctgtagtcccagctacttaggaagctgaggcaagagaatggcgtaaacctgggaggtggagattgc

SEQ ID NO: 15628 - DNA, 393 bp, Homo sapiens
ctactatagggcgaattgggccctctagatgcatgctcgagcggccgccagtgtgatggatatctgcagaattcgccctttgagcggccgcccgggcaggtactttgtttatggatctgttgaatctgaggagaagtgattgctttgagttagctagttttaaattcatgacactttcccaacataattaggtatttgaacctaagtgtgtgctagtgtattgtatatttttcattaattactttattgaaagttgctttgggaatcaattcacttcaatatattttactgttctcagtgaagaatgtgactaataagtatttggactttcaaaaagtgatacagtctttgtgatagttttttacctttacattaatgagttggaaaataact

SEQ ID NO: 15629 - DNA, 489 bp, Homo sapiens
atgcatgctcgagcggccgccagtgtgatggatatctgcagaattcgccctttcgagcggccgcccgggcaggtaccacttcacaccagcctgggtgacagagtgagactctgtctcggaaaaaaaaaaaaaaaaacgaaaacaaacaaaaaaataaaatgttcacttttgggctctatgcccaacaagtgaggttgctggactgtgactacaaggacacctgagctgtaactgtgtccatgcatctcattttctcttgagaagactaaagaactgacctttaaaataaacacagctccatggtggcccctttcaaagtcatcacctcaggaggccacacacgtgcctgaaggatgctgccttggcttgcaaacctctcaagctcccccagagtagccttcagggtcccctccccgctacacaacagcagccagctttgctagcagtcacttctatgcttctctcccactgacagttactgtgagtgag

SEQ ID NO: 15630 - DNA, 578 bp, Homo sapiens
ttgtaatacgactcactatagggcgaattgggccctctagatgcatgctcgagcggccgccagtgtgatggatatctgcagaattcgcccttagcgtggtcgcggccgaggtacatttacagaaaggccactgcagctgcatcatagttctataactcttcaaagtccccaggcaccctaagtagatagcttgaagcttcacctttacaaagtccaatccattgcatcaaaagcctacattatcccatttcctgtggcctagagattacaaatcacctgaagtaataccaaaacccagtgagtaaagacggaagtaaatctagtgagtttccaaccacccaccgcccccgagatcttaaaggaagcagtaacaagcaactagaactcacatgagaatttataggccaagagattttaatgtaagcattcttataattaaatacctcttacaaaaaatgccatttaatcagacaaggggaaaaaagtagcatcaaaagagatgctgacaaggagacaatgaaatcaaatggatcccctaacacatgcacagtccaacaggtcttatttaattgatcact

SEQ ID NO: 15631 - DNA, 517 bp, Homo sapiens
gactcactatagggcgaattgggccctctagatgcatgctcgagcggccgccagtgtgatggatatctgcagaattcgccctttcgagcggccgcccgggcaggtacttttagtagagacggggtttcaccgtgttagccaggatggtctcagtcccctgaccttgtgatccacccacctaggcctcccaaagtgctgggattacagacgtgagtcaccgcgcgcagcccgcttttgtggtttcaaaagttctcacttgctaatgtcatgttagagatacaaatttaaagtatgctaaatcagtggagagaacagatgtttaatctatagacacttatacatgcactaagaaagttgactactatactgaagtcccttataagaagggagttgttaaggataaggaatgtggattgggctctttcagagactccatacaggtatatttaattagcaaaggagtcaaaaaaacaccagttgttatcaacagcactttgcacatgttgggatatgattt

SEQ ID NO: 15632 - DNA, 441 bp, Homo sapiens
tactatagggcgaattgggccctctagatgcatgctcgagcggccgccagtgtgatggatatctgcagaattcgcccttagcgtggtcgcggccgaggtacagagtattttaatctttaggggatcaagatgtcagatgcaaacaaagctgccattgcagcagaaaaggaagctctgaacttgaagttaccccccattgtccatctcccagaaaacataggcgttgatacaccaacacaaagtaagctgctaaaatacagaagatccaaggagcagcagcagaaaattaatcagttagtaattgatggagccaaaagaaatttagacagaacactgggtaaaagaacacctctattaccaccacctgattatcctcaaactatgaccagtgaaatgaaaaaaaaaggagtgaggtcaagtttttatatttcttgtttgaaa

SEQ ID NO: 15633 - DNA, 481 bp, Homo sapiens
ctactatagggcgaattgggccctctagatgcatgctcgagcggccgccagtgtgatggatatctgcagaattcgcccttagcgtggtcgcggccgaggtactgagtttgtgttgttaagagttaaggccttaaacttggctcaaaataaatttaactgtgatttctctaatttttagtgcctactgtttcaccagacacctagagtcaatagtgtcctagaatctacggtgtccagggcttgagcaagatactttagtgaatataaacactaacgagaccttgccttttctcaagcctacaggatatcagcctatttgaaaagtgacactggctttacacccagaagcccacaaaatagaatgatgtaactgaattttttggtagctctctgggtaatttatgtggtgttagactcttgggtttgaaagaaagagactcgtgatcccattctggcatgacagaaactttattggaagatg

SEQ ID NO: 15634 - DNA, 454 bp, Homo sapiens
tgggccctctagatgcatgctcgagcggccgccagtgtgatggatatctgcagaattcgcccttagcgtggtcgcggccgaggtacaaattataatacacataccagacaaattttattaaataataaagaagggagagagaaagagcaagacacttttttaagcaccatgtgccaggccagtgcttgaatctcttcctacgttacttctccttattatttaaccgttatttaaatgttactactcccattttacagatggagaaatttagcttaaggtaatgacaagattgaacttcaagttttctgactccaaaatatgccctctttcgaccacaccgtattatctctaaatatggaaaacatttcaaaagtagcaagcgtcttcagaacaaaaacaaaaacaatccaaggggcttacacattataaacatggtttcggggtcatatgcaca

SEQ ID NO: 15635 - DNA, 744 bp, Homo sapiens
ctatagggcgaattgggccctctagatgcatgctcgagcggccgccagtgtgatggatatctgcagaattcgcccttagcgtggtcgcggccgaggtacttggagaaaatgcacaaaatctgactaaggagccataagactctgggtgcaaataattgaaaaaaatattttagaagcataatatcaattcatctagttttaaagttttcacaaattataatagggaattctgcttatttcacaaaataattatctgaccttaagaggatttttcctaacatcacataaacctgatggctttacacagtgatgatgagctattatttcattttcatcctgataaactacataagaattgcaatttttatatgcaattattcataatgtatgtttggatttccctgtttaaattctattagagtcctactttatgaaaaatctatcatttaatattctatttaatactgagatgaacatacataaaagcaaacagatgaagaagatgagtaatatctcaggatctgtagccatcagactatgagcaaatcataatatattattataagtcccttctgttacagtcagatatttcagaaaaataacaataatgtattaaaaacggaacttctctggtctttaaatagcacaagtaattcaactgataaatctagataatacttatagctctctatacctatggtttggttttgccttttctaaattaaactggattttcaaactatt

SEQ ID NO: 15636 - DNA, 505 bp, Homo sapiens
agggcgaattgggccctctagatgcatgctcgagcggccgccagtgtgatggatatctgcagaattcgcccttagcgtggtcgcggccgaggtactgcaaaattgcaagggcaaactttgtgtcttaccactatgatgggagaagagttaaataaacaacataacaacaaactaacttatatactctggtgaacacctcgatttcattgataaaaggattatacatttattttcaagaactgattacacttttacaaagttgaccatatattagttaataaagcaaatctgagaacatattaaaacaattatcatataaactacattctttgatcagaatgaaattaaattagaactcagtataaataaagaacaccaaataatgtgcaagtctggaaacatccttcaaagtaacctataggtccacctgcttggaaataaaccaaacaaatgttatgttcctgcccgggcggccgctcgaagggcgaattccagcccactggcg

SEQ ID NO: 15637 - DNA, 394 bp, Homo sapiens
ctactatagggcgaattgggccctctagatgcatgctcgagcggccgccagtgtgatggatatctgcagaattcgcccttagcgtggtcgcggccgaggtacgcataggaaggaagctgtccaagccctccattgctctttgagctcatcatgtgattatagggaaggggaaagggaatgatttcctcagaaaaatatactgatcaccatatattctttcgggatgctaaacaagtatccagaaaaacatttacatgtaatacatctacaaatcctcttttccagtaatgcttatgtcctgtcatctgagatataaaattctttctgggttactaatttcttaatttggccaatttatttaagatgctcttcaaagttttaaattaattgacta

SEQ ID NO: 15638 - DNA, 574 bp, Homo sapiens
acgactcactatagggcgaattgggccctctagatgcatgctcgagcggccgccagtgtgatggatatctgcagaattcgcccttagcgtggtcgcggccgaggtacaatttccactcttaaaaatttactaaggtttgctttgtggcttaagatatggttaatttttatgaatgttctctctgtcacactattatttagcattgttaaatatctaatgtcaattagctgagaaagagaaatgaggcaaacaaattagaaaggagaaggtaacattattactatcagatgttataaaagaaccaacaggacaatctatataaacatccccgcgtacctgcccgggcggccgaagggcgaattccagcacactggcggccgttactagtggatccgagctcggtaccaagcttggcgtaatcatggtcatagctgtttcctgtgtgaaattgttatccgctcacaattccacacaacatacgagccggaagcataaagtgttaagcctggggtgcctaatgagtgaactaactcacataaattgcgttgcgctcactgcccgctttccagtcggg

SEQ ID NO: 15639 - DNA, 458 bp, Homo sapiens
gggcgaatttggccctctagatgcatgctcgagcggccgccagtgtgatggatatctgcagaattcgccctttttgtggtcgcggccgaggtacagtccacaaaatggtttgcttctgaaaaagcagtagtagtcttacatccaagattattcctaaaataaagtttcgacccacatatataatgaaattgaaactgcctacattggcaaagccagaaagagagtaaaaaagatggggtaggccagttgcggtggctcatgcctgtaatcccagtacctgcccgggcggccgctcgaaagggcgaattccagcacactggcggccgttactagtggatccgagctcggtaccaagcttggcgtaatcatggtcatagctgtttcctgtgtgaaattgttatccgctcacaattccacacaacatacgagccggaagcataaagtgtaaagcctggggg

SEQ ID NO: 15640 - DNA, 391 bp, Homo sapiens
  misc_feature 368: n = A,T,C or G
tacgactactatagggcgaattgggccctctagatgcatgctcgagcggccgccagtgtgatggatatctgcagaattcgcccttagcgtggtcgcggccgaggtacttttaatgtttcttatacttgtttcttcagaatttaattagttttaaaggaatttttctcattataaaatacataaactctcaaattctttttgttttgttttgtttttttgatgtaagttctcgctctgtcacccagcctggaggttgcagtgagccgagatcacactactgcactccagcctggtgacagagcgagactccatcacataaaaccaaaagggaccaaaaagaacttgattcttatctttgattgcctagnacaccctgacccttcacccttta

SEQ ID NO: 15641 - DNA, 498 bp, Homo sapiens
ctatagggcgaattgggccctctagatgcatgctcgagcggccgccagtgtgatggatatctgcagaattcgcccttagcttagcgtgggcccgggcgaagtacatttacagaaaggccactgcagctgcatcatagttctataactcttcaaagtccccaggcaccctaagtagatagcttgaagcttcacctttacaaagtccaatccattgcatcaaaagcctacattatcccatttcctgtggcctagagattacaaatcacctgaagtaataccaaaacccagtgagtaaagacggaagtaaatctagtgagttttcaaccacccaccgcccccgagatcttaaaggaagcagtaacaagccactagaactcacatgagaatttataggccaagagattttaatgtaagcattcttataattaaatacctcttacaaaaaatgccatttaatcagacaaggggaaaaaagtagcatcaaaagaaatgctgaca

SEQ ID NO: 15642 - DNA, 515 bp, Homo sapiens
tgctcgagcggccgccagtgtgatggatatctgcagaattcgcccttagcgtggtcgcggccgaggtaccagccagttttgagatatacctggtttgctttaatgttattaaattgctttggtgagttttgcaaatggacaattgaactttgttctgccaaattcttttttattgcatttaaacttcagggttttttatttccggcttattatgaatggattagtcattttgtgaataactcttcattgagtttagggagaaataggacgttagatccgaagatgctatttgtttaatcaccagaatggacaaaattatacttcatttactatcagggaggcatggggagaatagaggcctaggggtgcgtcttgtggctcttactgtttttgtgtatctggtttttttttttttttttgagagggcttcccattatgttgcccgtgctggaccccaactcctgatttactggctctagagatcttctcgcctcagtctcccaaggacctgggac

SEQ ID NO: 15643 - DNA, 539 bp, Homo sapiens
gcgaattgcgccctctagatgcatgctcgagcggccgccagtgtgatggatatctgcagaattcgcccttcgagcggccgcccgggcaggtacgcgggcaagtctgcatggcaaaaaaggtgtccacaagtgtgaatggctcatttttaatgacagccaacagccacttgtaaaagatgtaattgaaattgttcagagattaggttccgtctgctttgtcctccttctcaaaagttttcatggatccaagctattcttaagcattgtttaatactagaaatagcctttatggactaataataagaaagaaaaaggcaaattttaaaagatattccaaattcaaagaaaataagtttggcagcctgacttttgattatctgtaaaaatcaaggccaatagtttgaacggaagagtaaatatgaaggttttctaaacagttttttctggaagagagggttggaggtgagaagttctccttttttcagcagcagtgcctacaaaaaacataaatggtgtttctgtgaacctcaaaaagtaaa

SEQ ID NO: 15644 - DNA, 497 bp, Homo sapiens
tatagggcgaattgggccctctagatgcatgctcgagcggccgccagtgtgatggatatctgcagaattcgcccttagcgtggtcgcggccgaggtacttgaaaactctgattcccagagggagggtaacatagagcaaagccccctacttacccacaaagaatattcggtgtgtggcaaaaaggggaaacttgttattttaagtcactaataaaaacctagctcaatctaatatactagctcaatctaatacactaattttgtttttaaattagtgtaaactaatttaaacctagctcagtctaatacactaattttgtttttaaatgataatacagtaatgaatacctagaagacaaaggttaagggaaaggaaaagagaaagaggtgctgagaaaaaaaacaaggggagtttgaactgaaagttaaagagctcattaaaattttgacagatcatccatcttttcatctgaactccgtatctataaatcctgatt

SEQ ID NO: 15645 - DNA, 315 bp, Homo sapiens
ctactatagggcgaattgggccctctagatgcatgctcgagcggccgccagtgtgatggatatctgcagaattcgcccttagcgtggtcgcggccgaggtacctccccatcagtgacattaacattacatattaattcaacaggacatctcctatatgccaggtagtgttctaagtgctgagtgagttataactgtaacaaaacatgcctgccacttaagaaacttacagggtaatgagttaaaatgaacacataaataaggtaacctgggataatgggaaatgctaggaggaaaataaatgggaggctgggcgg

SEQ ID NO: 15646 - DNA, 397 bp, Homo sapiens
tagggcgaattgggccctctagatgcatgctcgagcggccgccagtgtgatggatatctgcagaattcgccctttggccgcccgggcaggtactgaaacatcaaaacaccagaatgaacatcaggagggaaacatgaaagtagccactccaagtaaggctccagaacatactcaaatgaaggaaccagggctttactgcgtgacctagatcaacaacagagctgttctccttctttcagctaatcaggagcatttagttgggattgggaaagaggcaaaatatacatagaggtagaaaatgaagatttatatggataacttcacagctgttttcctgtgaaccacatttctagcaataaactaatccaattgggagggaaaacaatatgtgaagaag

SEQ ID NO: 15647 - DNA, 565 bp, Homo sapiens
  misc_feature 392: n = A,T,C or G
tagggcgaattgggccctctagatgcatgctcgagcggccgccagtgtgatggatatctgcagaattcgccctttcgagcggccgcccgggcaggtacttgtgttgtttgaatggtattttgaaagcaattgcatagttactattgattcctcaaaatgcataatggggatgcttctgaccgacttgccttttagcaagttgaaggtaggtatgcacgacagggctctgacttcaccagaactaataagttagattgcaatagtaggagacagatataaataatgaaggaagctagagttatgacggctttctggaaaaatgttggaattgaaagaaaatgtggaaagagagttgagtggaagaaagactaatagagtaggagtattagttntatgagaatgtgagtaaatctaatattggataaatgaatctaaggctactaatactacatttttgcaacttacatttttgagtatttgggtagtaaaatactccgataaaaacttttagagtggtcacctctcagtcacatattttgtggtttatactacatatacttggttt

SEQ ID NO: 15648 - DNA, 480 bp, Homo sapiens
tacgactcactatagggcgaattgggccctctagatgcatgctcgagcggccgccagtgtgatggatatctgcagaattcgcccttagcgtggtcgcggccgaggtacgcggggcaagcaggtgttccatgagctgagccagcagacccatggcatcacccggctgggcccctactctctggacaaagacagcctctaccttaacggatggactccgtgttggtcactgtcaaggcattgttctcctccaatttggaccccagtctggtggagcaagtctttctagataagaccctgaatgcctcattccattggctgggctccacctaccagttggtggacatccatgtgacagaaatggagtcatcagtttatcaaccaacaagcagctccagcacccagcacttctacctgaatttcaccatcaccaacctaccatattcccaggacaaagcccagccaggcaccaccaattaccag

SEQ ID NO: 15649 - DNA, 463 bp, Homo sapiens
  misc_feature 22: n = A,T,C or G
gactcactatagggcgaatggngccctctagatgcatgctcgagcggccgccagtgtgatggatatctgcagaattcgccctttcgagcggccgcccgggcaggtactttcccaggctattagtattatctaatgagtggcttaaagataccagaaacactgactgaggtctcacctgcttctggctgaatgaatgggagcttctagccattgaataagaggcagtagccaatgtttcttattctgaatggtccaggttgacttttataagagaaacactcagccttttaattgctgaaggtctggcccatagactaagattgcacattcttagtctaggttacacttgaactagactgcacccactgacgatatattcagttcaggtgttaactcacttggataagcatatggcctgtcctatctgaatataggttgagacatgtattggaatcatctgact

SEQ ID NO: 15650 - DNA, 343 bp, Homo sapiens
gcgaattgggccctctagatgcatgctcgagcggccgccagtgtgatggatatctgcagaattcgcccttagcgtggtcgcagccgaggtactaaaaactaacatttattgagcactgactagataccataaactgaaattgtctttgatctttgattaattaatctcacaatcgcttgcttttctgaagtatatcattcaatcctttgaatgtccctaatgcacagataaggaaataggctgctatgcagataaggaatacatattcttgtggattcaacccagatctgacttgaggctaaactcctaaccattctatcactacccttaccatttactccat

SEQ ID NO: 15651 - DNA, 666 bp, Homo sapiens
gcgaatggcgccctctagatgcatgctcgagcggccgccagtgtgatggatatctgcagaattcgccctttgccgcccgggcaggtacgtttgtttatcaagctagaaaattcagataataaagtcagcatctggatgaggtaacacattttttctgccattcctaacttcctctcctggtattcaagtcatagataccggcctttatccccaaagagtcaattctattgttctttctttcatatagatgagagtcagagaaacaaagtaaggtttgggagaaatggacatggtatagttttagctaaacattctaatatacaaaaaaaaatttaagttgttttgaaacaaataacacccaaagtctacacatttatagtaataaataattatccagctaattcagataaaaatttgtttctaactgggaaggccagaagtctgtatttctacagacaatttaaaatcgagcctggaagcaaatatccagataatttggatccccttcctccagtttacccaaaggaacaagttgtttcaagtagggcacagttatacccatgtttgatccacatggatgaaatttactacttcatgaaccccaagaggacacctgtaacaataatgctatttataagattttctcagttttagtgtattacatat

SEQ ID NO: 15652 - DNA, 407 bp, Homo sapiens
tacgactcctatagggcgaattgggccctctagatgcatgctcgagcggccgccagtgtgatggatatctgcagaattcgccctttcgagcggccgcccgggcaggtacccagaggaccagatgattgatgggttctaccacgagcatctaatagcgactgctgcagaactggtgtggaaaaggtttctattttataaaagaaagtatccagaaggctaaaggcagttgtggaatttatttcttcccagtgctctgattgtcaaaatttgaataaagctcagtgaaaggaggacagtaattaatgacttgatagccaaacatcgtaatgatgatttagtgatatactagactggatgaaagagaggtcactgtcttttcactatggattcatcataaacagtatcat

SEQ ID NO: 15653 - DNA, 550 bp, Homo sapiens
gggccctctagatgcatgctcgagcggccgccagtgtgatggatatctgcagaattcgcccttagcgtggtcgcggccgaggtaccaactcattataagcagatcacagtcatatagtgagagagaaggaaaagaaaaacctatgtagatctagaggaattacctaagaattcctaattacataggattagctctgggctaacatcaaattttaagtaattactaaaataatttcttttctttcttttttttttgagacagagtctcattttgtcaccaaggctagagtgtagtggcttgatctcagctcaactgcaacctccacctcccgggttcaggtgattctcctgtctccaagtagctgggattacaggcatgcaccaccacctccagcttctttttttatttttagtagagatggggtttcactatgtcggccaggctggtctccaactccttttcttaaggtgatcacccgcctcaaccttccaaagtgccaagggttacaggcatgaaccaccccgcccagcctaatataatttctaatctg

SEQ ID NO: 15654 - DNA, 453 bp, Homo sapiens
  misc_feature 123, 126, 151: n = A,T,C or G
tatagggcgaattgggccctctagatgcatgctcgagcggccgccagtgtgatggatatctgcagaattcgccctttagcggccgcccgggcaggtacagttctgctcagaatgccctatctnctnactgaaactaagataggttacatgncctattttgggagaactaattttgcaattcctgccaatttttatgcattttgcccttgtttccataattcagcacctccatcatctcttcatcacctccatcaagatactttcacttccttttaaaagcaaagatctctatttaatgtaatgcttctcagtttattatttacatttttattttttcaccatgctatcatttttactgggattgtcactgctttggttaatgctctggttacaaagtggcattgctgtggggcagtcagctgtaaccctacttcttcccataagctctctgat

SEQ ID NO: 15655 - DNA, 588 bp, Homo sapiens
tatagggcgaattgggccctctagatgcatgctcgagcggccgccagtgtgatggatatctgcagaattcgcccttagcgtggtcgcggccgatgtacaaggtgatacattctagccttctacaaagtgcacttagaccatgatattctttcatgatggcagacaaatgaggagtttcttttcattatctaatgaaaaaagagttggtctatattttctcagtgtattcctatagggaagagagtcttattgttgataacctttcagacaagtagatgcttctgcatcctatgaggtattcccaaagcccctctttaatctccaccattgtgcataattttgtgataatgaagcagttattttcttctcttgatagacattttatgaaggcagagactatgccactcttgcttacagttgtagctccagcatctaacatggtgtcttaacacatagaagatgctcagtaattacttgttaaatgaatggatgggtgggtggatatgccctaatatgatgcagcttgattatgctgaagtctggctggattaagacatcattcaagaagtaaatacagtatctttaact

SEQ ID NO: 15656 - DNA, 399 bp, Homo sapiens
ctactatagggcgaattgggccctctagatgcatgctcgagcggccgccagtgtgatggatatctgcagaattcgcccttagcggccgcccgggcaggtacttagatttgcttagatacctgtaaaagtgggattggtatgggataaaacgttcttgtgctgcttgcaaaagtctttggaatattctttgggatattttggtgcttaggaagtgcttttcaggttatattaatatatgcttagtcttcatgctttcaagtcctgtgggacgttaatgttagtcttttaagttgagtcctttttggttatattaagaggtagttctgatgtttcaaaggccatccagaaataggaatgcctgaacaggaatttccaattaagtcggtcagaatcctgaac

SEQ ID NO: 15657 - DNA, 372 bp, Homo sapiens
ggcgaattgggccctctagatgcatgctcgagcggccgccagtgtgatggatatctgcagaattcgcccttgagcggccgcccgggcaggtacgcgggacacaaactaacctctaatgtcaatatactgtgaaaaacactgtgatacagatatgtggagggtagtatgaggacacaaaaaagagtgacagctaacccaaccaaggtggtctggagaggcttcctgggagactgatttagacttaagtgttatggactaagtaagagctacctgagtgaagaaggagggaaaggagactccatacagaagagctgaggaatgaggagtgtcctagggtagtcatggtttccttttttttttttatgagaccga

SEQ ID NO: 15658 - DNA, 235 bp, Homo sapiens
catgctcgagcggccgccagtgtgatggatatctgcagaattcgcccttacgagcggccgcccgggcaggtaccagtgattacctgcccctcctaccctgggcctgccccatcccccacttaagaactacaaactaaactactgatgaaaacatttatatatgtgatacgaaagagtcctgtgagaaatatcaactgtagtaagcactgcagaaaaaggtggaaaatttgtaggc

SEQ ID NO: 15659 - DNA, 547 bp, Homo sapiens
  misc_feature 174: n = A,T,C or G
acgactcactatatggcgaattgtgccgtatgcatgcatgctcgagcggccgccagtgtgatggatatctgcagaattcgccctttgagcggccgcccgggcaggtactatcttttatttagatatgctgagataattacagatgaaatgtttttggggttttttttctacatnaatctgttgtaattaactggtgaggagaaagtgggtgtataaacacattgctgcaattaagtgatggagacatgagtgttcattgcactacaattacattttattgaaaatttcctcactcaaatttatggaataggtatctgttagaaactattgatcattctctctaaatttgaaaaaagaagctgtatttgactcttatgtcccaataaaacttaaaaaatgctgcccgagaattgtttggtgtgaaaaaaaaggaaactacaaagtcttttattagtacctcggccgcgaccacgctaagggcgaattccagcacactggcggccgttactagtggatccgagctcggtaccaagcttggcgtaatcat

SEQ ID NO: 15660 - DNA, 642 bp, Homo sapiens
  misc_feature 548: n = A,T,C or G
ggcgaattgggccctctagatgcatgctcgagcggccgccagtgtgatggatatctgcagaattcgccctttcgagcggccgcccgggcaggtactacccaaacctaaatttagaaacaggattagaaaaatatcattcctattcttcttggctataaattacccatacaaagttaaatttaattatacattcttaatagtcttggatagacagggcttcacagataaattgtaatttaagcaagaattattttttcctgtttaaccctaaacacaataatgtggtctttactagctcatctcaattgaatatcatgccttagtatttgggctttatataatttagtgtgtatattaatttctgctcctgagctcttataaatgaaactgctgggagctgtgcacaaggcttaaactaaagaaacctcttaaagacagtgtggatatcactgaaagtattttgggggaaaactaaattttaatgtaaaagagaacaacttttagaaagaagagaaccataaaaataaaatgcagcactcctttgactntgtctaattccttgtgtctttctgggtggaattctgtaatcaatgtgttttaaaaatacatcagcacctttttgcttctccctataatgaaaaa

SEQ ID NO: 15661 - DNA, 474 bp, Homo sapiens
tctagatgcatgctcgagcggccgccagtgtgatggatatctgcagaattcgcccttagcgtggtcgcggccgaggtacttgtttttggccacaggaatcttaagtgacttaattaacaggtgagtggcattgctcctgaacagagctacctagttataatctgtgttacctttgctttaaaatgttctctttactccatttccttagttgatatgcttgaggcatcttgttgaatccatcatttattcacccactcattcatttcacatgtatttgcagttgcaaagcaggcagtaggaataaaattaggatcaaaataaggtagtagtaacgaaatttgctgagtatgttctgagagaatagctgaatatacatttctaaatggacgacaaatccatttggaagtcttctcctcctgttattttgtaaatgtccctgctcctcacaattgggtaaggtgtgatatggtgaga

SEQ ID NO: 15662 - DNA, 500 bp, Homo sapiens
gaattgggccctctagatgcatgctcgagcggccgccagtgtgatggatatctgcagaattcgcccttagcgtggtcgcggccgaggtacgtaaatggaaattatcccgcaaattacggcatctccaaatgtagcgtggaaactaatattgacatgtcaacacaggattaatacatagtaatcaaagagtgcttaaaaattcattaaaaatgaagtcccacctctaaaagtgaaatgtgcaaattaaagtagcagttagataatgttttgtcatttaggtaaaaattacaaagaatcggccgggcgcggtggctcacgcctgtaatcccagcactctgggaggccgaggccggcagatcacctgaggtcaggagttcaagaccagcctggccatggtgaaaccccgtctctactaaatataccaaaaattagttgggcgtggtggcaggctcctgagtaactgagatacaggcacgggccaccgtgcccagcttgtatac

SEQ ID NO: 15663 - DNA, 545 bp, Homo sapiens
ccctctagatgcatgctcgagcggccgccagtgtgatggatatctgcagaattcgcccttagcgtggtcgcggccgaggtacagcaagataagtgacctactgagggacagagttcaaaataaaataggtttcagtcactcaatgaagtgtttgctgggagatctcgcctggtcctgtggtcctttagtgaaatatggggaaaccagcaggggacgtaggtcagatagtttataatggtgagttataggttgtatattataaggagcatttctcagcactgaagaaatttcactagattccagctcacctttccaaactattaaaagcaaaacgggactgtttttcaaaaattggaaagtaaacctggcttcttgttagaaatttggaaaatattgagaagttttagacccagtccctttaaccttaaggagctcacatgcaataagatggaagggcaggggagatcaggacagaaaactaccgatatggccgtgagagcatggaagcttagatcagtgaattcttcttgaatttacctttttat

SEQ ID NO: 15664 - DNA, 559 bp, Homo sapiens
ctcactatagggcgaattgggccctctagatgcatgctcgagcggccgccagtgtgatggatatctgcagaattcgcccttagcgtggtcgcggccgaggtacaaacattaagtgtgtaattcaatgagttttgacaaataatgcagttttgtaaaaactttggtgaaattggaaaataaccgcaccccagtcaccttgtttttttggctactactaaattgactctgatcacatggaagtgtaataattttctttagtgtgaatgccctgagccatgaggtaaccctgttctgaagtggtttccttgcttgtaaataaataatgttgacatgtaaagcaggaccaccaaactgtaagtcttgtagtaattttaatgtatttttcactctggacaaaaagatgtgtctttattcctgataaatattaatagttctagaagaggacattttccaaattaaagaattaggtattttttcataattcccgggtagtatctgatattttccatagctctttggagaagattcttgtttaagatgcatgggtacctgcccgggc

SEQ ID NO: 15665 - DNA, 386 bp, Homo sapiens
tagggcgaattgggccctctagatgcatgctcgagcggccgccagtgtgatggatatctgcagaattcgcccttagcgtggtcgcggccgaggtacaaatttattaagctctaggttcatcagatgaccaggaaaacatagactatcaggacacagacaaagcagaactgcagaattatagaaaattcaaggtctcatggaggaaaagcagtatctacaataagaaagagaccccaaacagcactctagatttctttaagagggattatatttcctccttcctcccattctcccttcatttcttcctacctccctcttttcatcctcttctccttttatcttttcatcattcctttcttaagcattttacttagttactactatgt

SEQ ID NO: 15666 - DNA, 540 bp, Homo sapiens
gactactatagggcgaattgggccctctagatgcatgctcgagcggccgccagtgtgatggatatctgcagaattcgcccttagcgtggtcgcggccgaggtacaagccgtgtctaaggagctggttggagagtttttgcaatttgttcaacttgataaagaggcctctgatcctttcagcctaaatgaattacgagatgaattatcaaggaaacagaaagaagaattatggcaaaggctgaagaatttattgacagatgtgttgttagaaagcccagtggatgggtggcaggtagtggaagcccagggtgaagacaatatggaaaccgaacatggctcaaaaatgagaaaaagcatagaaataatttatgcaattacatctgtgattcttgcttctgtgtctgtaataaatgaaagtgagaactacgaagccctactggaatgtgttattatattaaatggtattttatatgcattacctgagtctgaacgaaaactacagagttctattcaggatttgtgtgttacctggtgggagaa

SEQ ID NO: 15667 - DNA, 441 bp, Homo sapiens
tatagggcgaattgggccctctagatgcatgctcgagcggccgccagtgtgatggatatctgcagaattcgcccttagcgtggtcgcggccgaggtacaacgtgggcaagcatctgtgcatatgaaatgctgtttttctaaaagatttctcacattggcaaactgagagattttcttctggaacacaggaaagattatattaatgcttatagccataccatgtctgaatatgggaggatgacagacacagaacgagaccagatagaccaggatgcccagatattcatgaggacctgttcagaagcaaagggcgaattccagcacactggcggccgttactagtggatccgagctcggtaccaagcttggcgtaatcatggtcatagctggctcctgtgtgaaattgttatccgctcacaattccacacaacatacgagccg

SEQ ID NO: 15668 - DNA, 598 bp, Homo sapiens
ccctctagatgcatgctcgagcggccgccagtgtgatggatatctgcagaattcgcccttgagcggccgcccgggcaggtccgggcaggtacactgcataaagccagagttaaaacttcactgccagcctctgaacagaaggctgttctatccacactatcacaagacctggtggagttgaggcaactgctgaattaccatacagggaagaatgaattcaagaaaattcccatgcaagataggctcttaaaaaataaatttacacaagaaaatcagcactgtaaaggtaattgataagcccaatagaagggaaacctatacaaagaaatagaaataactaagcaatctgaaatggactttaaataatgatgtttacaattctctaagaggaaaaggagcattagcatcagtgaaacaaaagtagggctatagaaaaaacaatacttatgaaaaaaaccaattggaaatttttagatggaaaagcgcgaagtaaaaaattcaacacatggtctaaagaataaactgcacacagctggagggaaaattaattaattttacgaaaaaacaattaatcttacagaatggtaagagataaaga

SEQ ID NO: 15669 - DNA, 536 bp, Homo sapiens
tacgactcactatagggcgaattgggccctctagatgcatgctcgagcggccgccagtgtgatggatatctgcagaattcgcccttagcgtggtcgcggccgaggtacaaactattctctttcctattgcattttcccttgagaacatgaactgacaaggaacaaggtgaaggagtttgactggactttagggataatataactcccttaaaagaagtgttaaaatgaaggagagattttacaaatggcaagtagcataaaaaatgggaattgtaaagaattagtatagatgatttttgactggggaaacttaaacactaattactttcagaaagaatttgagatgattttctttagtaggggtgatagtggtaaggcccttctatgaagtatgtgatggattggactacttctgagagccctttcttctcttaaaatcttacggtaaaagtttttgaaaaatcatatttcaagaacttttttcttcttccacattagcatcttcagataataagaaacagattcctaatgaagct

SEQ ID NO: 15670 - DNA, 400 bp, Homo sapiens
gactactatagggcgaattgggccctctagatgcatgctcgagcggccgccagtgtgatggatatctgcagaattcgccctttcgagcggccgcccgggcaggtacgcggggatggctggatttttttcttttactttaagaagtctgtcttttaactgactacattatttatatgaaatagaattctagtatattttgactcagttttcccaacttatttcgtattttctttttactgcatccactttttaactggcatcaacccccttcttttgggttggttgtgttttacgcacctcctcctcttttcctcactccactggtttgcaagttatacatttgatttcttttctttcagtgccatgctctgataaaataaaggacatttattacagaaaa

SEQ ID NO: 15671 - DNA, 613 bp, Homo sapiens
  misc_feature 335: n = A,T,C or G
tatagggcgatatgggccctctagatgcatgctcgagcggccgccagtgtgatggatatctgcagaattcgcccttagcgtggtcgcggccgaggtacacaagtcacgattatacagtttaatgagtaaacactgatcacacccatataaaccactgcccaggccaataagtaaaatcttacaagcaaccccaaaaaaactctaggcctctacctttagaatgcgtttgcagtatttaggactattgtagttccaaaattactaaaagtaatgaatcattaatgtatgtgtattacatgttagaaattttatttattttttgaagcatgcatgtntatcattcttaatatactttctcctgtttaatctcttataaaccttaaactgtagtgactcttaggagagtgaaattcatgaatataaaggtagtccataaaacgtgatttgtagattttaaatctgaaaaacattctcatatgcaccataaattttgtcactgttctatttgatttgcatatctctacggtgaatgaattgttactctgaagaggatggggaagctttcccatttaacaggataaaactgagggaaatgagaaatatattaagaaag

SEQ ID NO: 15672 - DNA, 396 bp, Homo sapiens
gactactatagggcgaattgggccctctagatgcatgctcgagcggccgccagtgtgatggatatctgcagaattcgcccttagcgtggtcgcggccgaggtacaaatttattaagctctaggttcatcagatgaccaggaaaacatagactatcaggacacagacaaagcagaactgcagaattatagaaaattcaaggtctcatggaggaaaagcagtatctacaataagaaagagaccccaaacagcactctagatttctttaagagggattatatttcctccttcctcccattctcccttcatttcttcctacctccctcttttcatcctcttctccttttatcttttcatcattcctttcttaagcattttacttagttactactatgttc

SEQ ID NO: 15673 - DNA, 472 bp, Homo sapiens
cgaattgggccctctagatgcatgctcgagcggccgccagtgtgatggatatctgcagaattcgcccttagcgtggtcgcggccgaggtacaaaattgcttgagtctgaagaacctgctatggagcatatacatcttcaattaacctacaactggtcttcagtaaaacctctgtccctgacacactgaattggtgtaagtcatttttaaaacttctggccaaaacccaaccataatagctttcttgtaagccatcttcatatacctaaagaaacatgtgaaaggccgggcacgatggctcactcctgtaatcccagcactttgggaagacaaggggggcagatgacccgaggtcaggagtacctgcccgggcggtccctcgaaagggcgaattccagcacactggcggcccgtactagtggatccgagctcggaaccaagcttggcgtaatcatggttattgcttgtttcct

SEQ ID NO: 15674 - DNA, 488 bp, Homo sapiens
aatacgactactatagggcgaattgggccctctagatgcatgctcgagcggccgccagtgtgatggatatctgcagaattcgcccttagcgtggtcgcggccgaggtacccactgatgtcgtcatggtggcaagtcagtgttggccctgtcctaaccacagggaaggggttctctacagaaaagtagagtttagatctgagaaggtagttgagaatgagtgccgtatagtgaataatagtagatttttaccccattttacccctttgtctttggttgtatatatattcacataccattctaattatacatatagtttcaaaaatgcctctgcttctccaaacacaactatactttatatatattttcaaaaacagttctacctccttcttccaaagataaatatctgtgttttgtgtcctccatggccacccctaagagaggtgcaaggaggatttcattcctgggaattacctactttaatagcctg

SEQ ID NO: 15675 - DNA, 582 bp, Homo sapiens
actcactatagggcgaattgggccctctagatgcatgctcgagcggccgccagtgtgatggatatctgcagaattcgcccttagcgtggtcgcggccgaggtacttttttttttttttttttttttttggagatggagtctccctctatcgcccaggctggagtgcagtagcacagtctcggctgccaggcctccccaatctcttcttctcacagggcagggctgaacagtatctcctcctggctgcatccgagcccagaagtcaaaacctaaggggtccctgcttggctgggacagaggccgcagacctaggtccagctctgactcgacagtggcacatccctgtgaagtagggcttgggggcttcccatgaacagctttcagagtgagtgcagtagagtggggctggaggacagttttgacagatcttgagcaggtgcttgaattttaacccaacatccacccttacccatgacccaggtgacatttcagaggagggttcacctgccctgcaaagtaagagctgcaaaatcagcagctcttgcacaaaggcaaagtggcagggagcaagggagggagtgt

SEQ ID NO: 15676 - DNA, 456 bp, Homo sapiens
  misc_feature 320: n = A,T,C or G
ccctctagatgcatgctcgagcggccgccagtgtgatggatatctgcagaattcgcccttagcgtggtcgcggccgaggtaccaatgaggaagagagttttgtaaaagcaagcaggctggctgtcattaaaagttatcttaaataacttgtcgcagcccactcccaccagtcctgaaaatagttcattcaagtggtaaaacaagacaaggcagaggacgatgtctctaacttccctgatgtgagatctaaagccccattcctaactcttggttttagaattgaggaaagtggaataaatgcatttggaaaggatctgttntcttcccaggtttcctgcctggggtgaaaataaaggttcaggggatggaagcaactttgaggaacataaagaggtattggggttcatcaattcatctttgtttcaagatggttcccccccaccctccacaatgcaa

SEQ ID NO: 15677 - DNA, 467 bp, Homo sapiens
actatagggcgaattgcgccctctagatgcatgctcgagcggccgccagtgtgatggatatctgcagaattcgcccttagcgtggtcgcggccgaggtacaaagaagctgagtgatttgttgaggtcccagtggagtgtcagacctaaacttccagtttcccaattacttaaataaggttcttctcatcagaccctctttcctcatctctctactaaaaaactacagtgaataacttccactgtcatcaaatagaaactttctgtgctggtttcccctaccccacctttctgtgcttgataacagaagctgttgggagccccaccttcagtcttatttgtccttccttgcgggttttctttggcagttgaatttacttctgctaaatgcagaatgatgcctgaaagcgttgctgcaacaacttatgcacactttcatgccaaccgtcacccttttaaaccttttttt

SEQ ID NO: 15678 - DNA, 385 bp, Homo sapiens
ttgggccctctagatgcatgctcgagcggccgccagtgtgatggatatctgcagaattcgcccttggccgcccgggcaggtacaataatgggattgtggttataagggagaatgcctctattcttcagagaggcacacagatttacttgcttttaaatggtctagcaaaaataaaaacaaatccactcataaaactaatatgacaaagtagatggttctataggtgttcaatgcatcatcctttcaattttctaaatatttgaaattttcttaataaaaagatagggaaacaaaggtggcttggaggaaacaaaaacaaaaacaaaacaagaagatccagtctaatggaaagatgcaatggactcagggatcctgcagccaaagg

SEQ ID NO: 15679 - DNA, 390 bp, Homo sapiens
actactatagggcgaattgggccctctagatgcatgctcgagcggccgccagtgtgatggatatctgcagaattcgcccttagcgtggtcgcggccgaggtactgttgttccagactgtatgattgaaatagctgttattttcccagtttctgtagatcacatataggaagttctgcataatcatagtgatgaaaactcatgtttaaaaaatccatatataattagcgtgatacaacacagcatcttaacactgaggctttaagttttaataattctgttattctcagtaacactgaaagttgcctgtgctctttctgtcacacaattgattccaatgtattttaaaatgtgtttttctgagtcatttgttgccttgttactttttaaaa

SEQ ID NO: 15680 - DNA, 533 bp, Homo sapiens
ctatagggcgaattgtgccctctagatgcatgctcgagcggccgccagtgtgatggatatctgcagaattcgccctttcgagcggccgcccgggcaggtacttagctgggaatctgcatctttagagttcaaaactgtgcagtttttcctctgattacgattattatgttgaactccaaagggtcatttacattcctttataacactggagctctggtgtatcgaattgtgttatgagataagccactagcagggacttgaacattccattttctttagattttgttgtatcagcatgtgaatatgctgaatacaacttgtatcctaaagcatacaagctataacattttcacgttggactcaaatttcttcatcatctgtattggatgaattttgtatactgttttgttggtggatttctaacataagattgccagctcctgctagctttttaaaaagatcctcatgttgctgtagctggatgatcacatgtcatttaattttcgatccttaaaatggagtgcgggctacct

SEQ ID NO: 15681 - DNA, 651 bp, Homo sapiens
ggcgaattgggccctctagatgcatgctcgagcggccgccagtgtgatggatatctgcagaattcgcccttagcgtggtcgcggccgaggtacctggaaggccccactgttacttcttcatacaggcaaaagctaatcaactatttcaccttgcagctaagtaggacagagtgacttggagaagtgcagatgaactcccgtggctttttcagcagcagggaagtaaacagaagctgcatgattgccttcttaatctctttgtgtctcaaaacctttataaaaggggacactttgctgagttgctgagttattggcagtttgttggcaaagacaaaagtgcaatggcaacagaatacttcgattcattgaagcagtatgagaaaaactgcgaaggcgaggacaacatgagttgcttagctgatctttatgaaaccttggggcgatttctcaaggatctaggccttctcagtcaggtaagctcagcagatcaatggcaagccagagacaggtgggatttttgtgttcactcttctctttttccaagatgttaatgtggttttcatttgttgtgctataatccttaatatttaatcagatgacagatcttgcaacatttcactcactttaactggcctttcaccccttttcccc

SEQ ID NO: 15682 - DNA, 552 bp, Homo sapiens
gactcactatagggcgaattgggccctctagatgcatgctcgagcggccgccagtgtgatggatatctgcagaattcgcccttcgacggccgccgggcaggtacttgagtctcttaactctgtaaaatcaaaacctaaagaaaacaaaaagattatcccttgcattcgaatactgtttagtcagtgtatatcaatttttttttactgtatcactgcattcagaggtatcaaattttgcttgcagcgctgtaaaagtttaccagtcagatttgtcggcccggcatggtggctcacacctgtaatcccagcactttgagaggccaaggcgggaggattgcttgaggctgaaagtttgagaccagcctgggcgacatgatgaaactccatctctactaaaaacacaaaaattggccaggcttggtgccatgcacccgtggtctcagctacttgggaggttgagtggggaggatcgtttgagcccaggagattgaggcttcagtgagtgattgcacccttgcactccaacccagacaacagagtgagagcctgtct

SEQ ID NO: 15683 - DNA, 707 bp, Homo sapiens
  misc_feature 567: n = A,T,C or G
tatagggcgaattgggccctctagatgcatgctcgagcggccgccagtgtgatggatatctgcagaattcgccctttcgagcggccgcccgggcaggtacttgtgttgtttgaatggtattttgaaagcaattgcatagttactattgattcctcaaaatgcataatggggatgcttctgaccgacttgccttttagcaagttgaaggtaggtatgcacgacagggctctgacttcaccagaactaataagttagattgcaatagtaggagacagatataaataatgaaggaagctagagttatgacggctttctggaaaaatgttggaattgaaagaaaatgtggaaagagagttgagtggaagaaagactaatagagtaggagtattagttttatgagaatgtgagtaaatctaatattggataaatgaatctaaggctactaatactacatttttgcaacttacatttttgagtatttgggtagtaaatcactccgataaaaacttttagagtgttcacctctcagtcacatattttgtgttttatactacatatacttgtttnttagtccaaaatattggttgatttctgtataccctactttgtaaaagcataaactagcatttaaaattaataaattaattgcatgttattttttttttttaaagcattttcctggtgatatatggctttgaaattttaaa

SEQ ID NO: 15684 - DNA, 477 bp, Homo sapiens
atacgactactatagggcgaattgggccctctagatgcatgctcgagcggccgccagtgtgatggatatctgcagaattcgcccttagcggccgcccgggcaggtacgtgtctgtggtcccgactactggggaggccaaggtgggagaattgcttacgaccaggagtttgagtccagcctgggcaacatagcaacaccccatatcttatttaaaaaaaagcactctatgtttgttttgggcctctttgagaacatttactatgaaattttatttatctttgtttcctttcagttcttcttttgtttattgtgattatctttcatataacaatgtgcttaaatagctggtggttcttgataggtcactcaacagtgagcaaactgatggatcctgtgtttgtgagcagtgtttattggctgtgatagagggtggggacctagatgcttttaggggatcctcctgttatccatttctga

SEQ ID NO: 15685 - DNA, 622 bp, Homo sapiens
ctatagggcgaattgggccctctagatgcatgctcgagcggccgccagtgtgatggatatctgcagaattcgccctttcgagcggccgcccgggcaggtactggaagaatgagataatttatttggcaaaattcatatgtatatgttatgccaaacacttggctaatatctggatgagatgggcaatttacagactatgtaatcaactagggttctatctgtagttgtgttatgagaaacaatggttcattaattcacggaaatgtgaattaaaaatgtcattaagcgaaagactctgttagcttgaattcctattgggatatgcaagacacataacatttatgcatatttgtgatgttctaatccatttttagggaataggatattatataaagcaccctagtttaaacaaatacatgattacggttgtcaatagagatagatataaatagtgacctgtgtaattattttgctaatgctgaaattttttttcagacaagtggatccaaaatctaccaatgatcttgcattacattaaggggaaaagtatctccttaatggggaatctttacttttttttttccaaattgtgcctatacacatgatcttatggatagataat

SEQ ID NO: 15686 - DNA, 469 bp, Homo sapiens
acactactatagggcgaattgggccctctagatgcatgctcgagcggccgccagtgtgatggatatctgcagaattcgccctttcgagcggccgcccgggcaggtacaacagcttcctaactggtgtctcccttcctctcagccgtgcttccatcattctcgcaccctgcagagagttatgtcttcacaatgcaattttggtgttaccccttaacttaaaaacttccagtgcacttaggacaaaatccaatattcttaagcccccaaagactcttcatgatctgaccctatcttgctttcaacattcatcccctccaatgttctctctcaggttctaagctttccacaaattgctacatctgcaaagattactgcccccagccttactccatcttctttacctaaatcaatctactcagttttcaattcattcttggattaaacttcagttctttagggaagccctttc

SEQ ID NO: 15687 - DNA, 384 bp, Homo sapiens
agggcgaattgggccctctagatgcatgctcgagcggccgccagtgtgatggatatctgcagaattcgccctttcgagcggccgcccgggcaggtactgatcattcaatgagagaatatgtcaaaaaatagttggtgcatagtagatgctcaagaaatgtcaaattctcctgccttttcacttagattcttaaaagtatgaatggtttcatatcctcattgacaaagtatttctctgaaaaattctaagaataaaaaatcctacatctctgaataattacattcatgactcagggtgaattaaagcttcactttgcctggaaagacgcaaaagaaacttgaagacaaaacaagaagcagatcacaaagacataaagtatagtgg

SEQ ID NO: 15688 - DNA, 474 bp, Homo sapiens
gaatacgactactatagggcgaattgggccctctagatgcatgctcgagcggccgccagtgtgatggatatctgcagaattcgcccttagcgtggtcgcggccgaggtacacacttctgtaacttaatatgtcatttggataccttttctcaagaagactcaaataaataattttattatgccttaaatattaccaagtcagaatactcacagatggatactctgtccaaatgagtatttgtgattgcgcatttacacacacatataatttgtcattggtaattttgttgcagaaattattgtgagaaaataaattttaaaagaaaatacgattctatgaatacattttatattttacctttttctggcacatactgttgcatcaaactgattaattaatgtaattatgttaaacttctccagttaaaaaagagaatatacactgcaaagctgaatgtgtatactacttgttga

SEQ ID NO: 15689 - DNA, 420 bp, Homo sapiens
aatacactactatagggcgaattgggccctctagatgcatgctcgagcggccgccagtgtgatggatatctgcagaattcgcccttagcgtggtcgcggccgaggtacttaaagagctcgtggtgtgtgccaggagtgtgttttccatgcattcttcctgagaagtaggtttgattatacagtatctattttacagataaaggttgaggttcttttttttctaaggtgttattagacagctatagacatggacaccaaaactggccgagcctacggcattgtaaaggcttggcttaccttccatcaccctcagcagttctgctggaagggaaaaatggaaacagggcccttaattttttctcattattggattaattggaagcactaggcatggtgtgctgcctggtggatagtataggc

SEQ ID NO: 15690 - DNA, 597 bp, Homo sapiens
  misc_feature 527, 533: n = A,T,C or G
gactcactatagggcgaattgggccctctagatgcatgctcgagcggccgccagtgtgatggatatctgcagaattcgccctttcgagcggccgcccgggcaggtacatttaaaaggtgatgctaatactttaaaatgtttaagatatagatttaaaaagcattgtaaattgtatactgcagtgtcgtctacatggcattggacaggacataatgtaaaacataaaagtgcaattgttacacttacatatgatagtgaatggcaacgtgaccaatttttgtctcaagttaaaataccaaaaactattacagtgtctactggatttatgtctatatgacaaatcttgatactgcatccacaacattactggcgtgctttttgctttgcttttgtgtgcttttgtgtgtctgcctattaatacgtccgctacttttgtctgtgtctacatacacatcattaatactattggtattactattgtggataacagcagcctctgcgtttaggtgttttattgtatatattgnatttgnttatataccattatttttaatacatacacgtgcacgctttttaattacataatgtatatgtacc

SEQ ID NO: 15691 - DNA, 518 bp, Homo sapiens
  misc_feature 164: n = A,T,C or G
ccctctagatgcatgctcgagcggccgccagtgtgatggatatctgcagaattcgcccttagcgtggtcgcggccgaggtacataacacatttatgtgtctatgtgtatatactatttatgtaaacatataatatatgcaaaacatatatgcatatacacatancgatatatgcaaatctgtatatagaaaaacttagtttactcaagattattaaaattgatcctgggaacaaaacaatacaccttttctaggcatttatccctactatagagacagagaaagaaagattgtgagagggagacacacacattcagatgagccttcagggaattgtatgaacttttgaaccagagatggagagccagagcccagcctgttcccactgtaataaacatttttttcttcaattaattaaggtttggaaagaaaaaaaaaccacagaggagaagtaatttagcatgcaatgcatactttacagatggatcctaccttcggatgcttattaaatctatgcat

SEQ ID NO: 15692 - DNA, 474 bp, Homo sapiens
gaattgggccctctagatgcatgctcgagcggccgccagtgtgatggatatctgcagaattcgccctttcgagcggccgcccgggcaggtacgcgggctccaatttaattcttttagttgaatgagcttctttctcgcttgttacagactcacttagggctcattcctccctgccttagtcccagtatggtctcagtaatgacatgcagtatggggactttggactcctgtttgaacaaaccagctttgagatgataaaaatttgaatatgaattgagttcttgaagataagaaattgttaattttgtcaggtttgttaatggcatggtagttactctaaaaacaaatttctgggcgagtgtagtggctcatgcctgcaatcctagtacctcggccgcgaccacgctaagggcgaattccagcacactggcggccgttactagtggatccgagctcggtaccaagcttggcgta

SEQ ID NO: 15693 - DNA, 583 bp, Homo sapiens
cgcgtccgctttcttatttggaaagaaaacaacactcaccacggcattcacaatgctggggaccttatgaatgggaatggagaggctgcactaatgtaagtggggtcaacatccctgctggagggcagatgcaagtggggtcaacatccctgctggagggcagatgcaattttggcaaactaatgacttttggaagccattttctagactgcatttttctcttctttcttagaatgcttttctcaaggggaaaaagaaagcagaggtgtaaatggtatctggccgttcgaagagcccgtctgggagactctctgctgaccacagcactgtctctccccagggcccagtcccacagtgtcactgagtccagagtcgggactccaacaagccctccgcattccagcatgactgtggtaaaaacaaaaaaaatctattttattctagtccatcacattttctatatttgctaaagaaatctcgatcactccataaatgatcggttaaaattaaaaatataggctgggtacagcagcttatgccctgtaatcccaatgctttgggacactgaagctggaagatcact

SEQ ID NO: 15694 - DNA, 460 bp, Homo sapiens
gggccctctagatgcatgctcgagcggccgccagtgtgatggatatctgcagaattcgcccttagcgtggtcgcggccgaggtacaataatcgtttttggaatgatggagtaaatggtggatttcatgcctcaacttgaatacactctctggtggctgaaaccgaggaagaatgttgctccaaaatattaacgggtgataacttgcttttctattttaaaatagaaaaattaattctcccattctcttgcatggaaagaaccactcaaacggaaattattttgtatttagtcactatttagttattattttttccaaaattaaggctcatgctcagaagctatttttcttaatatgtttgagtttttaaaaattggaaaaaatatctcttccaccaagaatttggcaaaagaaagctagaattaaacaccgcaataataaatttcacaacactatgaaaa

SEQ ID NO: 15695 - DNA, 497 bp, Homo sapiens
tatctgtctactggggccctctacatgcatgctcgagcggccgccagtgtgatggatatctgcagaattcgcccttagcgtggtcgcggccgaggtacactcacagccctgtcctgagcctgtgttaaagccggcactctatttttctggtgtcatgtcagctgctcacatgtctgtccctcactccatgccccacatccccttgttccagggtccggctcgcagtcagcacttttaccatgggaatgcatgccttagtttagcccaccttccctgggaaaaagagctggatatacacacaacatacccatgtctcaattgtctggtatgcaagtgatatgacatatttgtgttaataaatttgagtcttatatgcatttgtgtgcaggcagtcactcaaactgggacacttttgatctaaataaatactaaggtggatccttggacaattggcaaagccaggactgtcagataaatggtccccttgggcctagcat

SEQ ID NO: 15696 - DNA, 394 bp, Homo sapiens
ctatagggcgaattgggccctctagatgcatgctcgagcggccgccagtgtgatggatatctgcagaattcgcccttagcgtggtcgcggccgaggtactaaaaactagtaatgcaaaggcagcaatgttagcaaaatttaaagagttatacggggtgagttttacagaattagtaagaccatttaaaagtaataaatcaacgtgttgcgattggtgtattgctgcatttggacttacacccagtatagctgacagtataaaaacactattacaacaatattgtttatatttacacattcaaagtttagcatgttcatggggaatggttgtgttactattagtaagatataaatgtggaaaaaatagagaaacaattgaaaaattgctgtctaa

SEQ ID NO: 15697 - DNA, 676 bp, Homo sapiens
  misc_feature 487: n = A,T,C or G
tacgactcacttagggtcgattgggccctctagatgcatgctcgagcggccgccagtgtgatggatatctgcagaattcgccctttcgagcggccgcccgggcaggtacgcggggagcgcgcggaagaaaaaccagcaagaaggcggcgggggaagatggcggtcctggggtagagtttgcaagctttctgactaggctagtcgagcaactattcgggtcatggcgtcaaactcaactaagtctttcctggcagatgccggctatggcgaacaggaactggatgccaactctgcccttatggaattggacaaaggcctaagatctggcaaacttggtgaacagtgtgaagcagttgttcgctttcccagactttttcagaagtatccattccctattcttatcaattctgcattcctaaagttagctgatattttcagagttggaaataatttcctgaggctatgtgttcttaaagttacccaacanagtgagaaacatttggagaagattctaaatgtggatgaatttgtgaagagaattttttctgtgattcatagtaatgatcctgtggcaagagccatcaccctccggatgttgggaagtctggcatcaataattcctgagaggaagaatgctcatcatagtattcgtcagagtttagattcacatgataat

SEQ ID NO: 15698 - DNA, 559 bp, Homo sapiens
gactactatagggcgaattgggccctctagatgcatgctcgagcggccgccagtgtgatggatatctgcagaattcgccctttcgagcggccgcccgggcaggtactttttttttttttttttttttttggtggactcagggtcttactctgtcacccaggctggagtgcagtggtgcaatctcagtttaaacccccaagtctgtggtattttgttatagtccccctggaaattaatacaggattcatggtctgccaaagtctcattccctgctcagaccgacaatggatagtgggatcctttgtgatatgtgctctgtgagttagaagtagtaacttagagctgttgaggacaatacctttgcaccccatccactgaattttgttttcaaagatacagtctgaaactcccagagggtgagtgcctttccagtgtgtcagagccattagcggctgagcagaccgctgagcatgtagatttctaggtcagggccctctccccaaagaatcatactccctggttgaactgaacctaaatcaggtttaaaactagacagatg

SEQ ID NO: 15699 - DNA, 582 bp, Homo sapiens
atatggcgaatggggccctctagatgcatgctcgagcggccgccagtgtgatggatatctgcagaattcgcccttagcgtggtcgcggccgaggtaccaacagcagtgaaccagggcctagttgtcagcaaccaagacctctgctgacccagaagcagacaggtgaccctttcaccaaaacttcaatcatcagtcttctcttttctttttttgaaacagagtcttgctctgtcgcccatgctggagtgcagtggcgcgatctcgactcactgcaagctctgccttccaagttcacgccattctcctgcctcagcctcccgagtaactgggactacaggcgcccgccaccatgcccggctaattttttgtatttttcatagagacatggtttcaccatgttagccatgatggtctcgatctcctgacctcgtgatccacatgccttggcctcccaaagtgctgggattacaggtgtgagccactgcgcccggctagttttctctttttgtcgtgtctaccttcctacttgcctcacaccagtcaattggctttctgggtcaagcctgaggaatgaatctcatg

SEQ ID NO: 15700 - DNA, 600 bp, Homo sapiens
acgactactatagggcgaattgggccctctagatgcatgctcgagcggccgccagtgtgatggatatctgcagaattcgccctttcgagcggccgcccgggcaggtacatttaaaaggtgatgctaatactttaaaacgtttaagatatagatttaaaaagcattgtaaattgtatactgcagtgtcgtctacatggcattggacaggacataatgtaaaacataaaagtgcaattgttacacttacatatgatagtgaatggcaacgtgaccaatttttgtctcaagttaaaataccaaaaactattacagtgtctactggatttatgtctatatgacaaatcttgatactgcatccacaacattattggcgtgctttttgctttgcttttgtgtgcttttgtgtgtctgcctattaatacgtccgctgcttttgtctgtgtctacatacacatcattaatactattggtattactattgtggataacagcagcctctgcgtttaggtgttttattgtatatattgtatttgtttatataccattatttttaatacatacacatgcacgctttttaattacataatgtatatgtacctc

SEQ ID NO: 15701 - DNA, 425 bp, Homo sapiens
gcatgctcgagcggccgccagtgtgatggatatctgcagaattcgcccttagcgtggtcgcggccgaggtacaagagttggaaaaacagagttgaaaggaaaaatgaggataatcttatttaaaagattattgaatgcctaagtgcctttaataactccacaaggaccctcatgtaaacaaaattcagcaatagcaacaaaacaaagcctctgaaatgctcattgttccccagtgagataagctttaaagagcagaaatacgaaaaacaaaaccaaatctcaagtcaaacttaaaaatgttactttatgggagaggacaggcaaggcggcaagaacatagaagcagtgccacctgaagctggcatgataaggttgatttaactgcactgaaagtgacagaatctgaaagaacgactttacaaatg

SEQ ID NO: 15702 - DNA, 625 bp, Homo sapiens
atatggcgaatggggccctctagatgcatgctcgagcggccgccagtgtgatggatatctgcagaattcgcccttagcgtggtcgcggccgaggtacaaagagaagaactcatgtcaatggaaagtctgtttatccttaaagccacatttgtagactagacagttccaaaatatcccttggcaatcccttttgcaaagtaattggaaaatgctgtgccaagtgataaaaagcatttcaagtttctgcctaatgtctgttatagttttcaaagccctgaattgcaaaacaagattaaaactagttctgaaataaacaacaagtatttactgaagaacaactatgaggcactctgctggaactttggggatttgaagatgtgtaagactgagcttacaatttagttggggagatcagacgtgtgcacagccaaggttaagctctaatacagcatgaaaatatctgaaatgtcaaaaaacaccagcaactgtttccatctcagggagtgaggctactatcctccaaaggcaagtcctagccccatcaaaataaaaaaaaatctgcttctaggtaataataacacacataaaaacaaatcaaagagatcactgtcaatttaaaaaatgt

SEQ ID NO: 15703 - DNA, 679 bp, Homo sapiens
  misc_feature 558: n = A,T,C or G
ataggtcgaattgggccctctagatgcatgctcgagcggccgccagtgttatggatatctgcagaattcgccctttcgagcggccgcccgggcaggtacatatacattatgtaattaaaaagcgtgcatgtgtatgtattaaaaataatggtatataaacaaatacaatatatacaataaaacacctaaacgcagaggctgctgttatccacaatagtaatactaatagtattaatgatgtgtatgtagacacagacaaaagcagcggacgtattaataggcagacacacaaaagcacacaaaagcaaagcaaaaagcacgccagtaatgttgtggatgcagtatcaagatttgtcatatagacataaatccagtagacactgtaatagtttttggtattttaacttgagacaaaaattggtcacgttgccattcactatcatatgtaagtgtaacaattgcacttttatgttttacattatgtcctgtccaatgccatgtagacgacactgcagtatacaatttacaatgctttttaaatctatatcttaaacattntaaagtattagtatcaccttttaaatgtacctcggccgcgaccacgctaagggcgaattccagcacactggcggccgttactagtggatccgagctcggtaccaagcttggcgtaatcatg

SEQ ID NO: 15704 - DNA, 615 bp, Homo sapiens
actatagggcgaattgggccctctagatgcatgctcgagcggccgccagtgtgatggatatctgcagaattcgccctttcgagcggccgcccgggcaggtaccaggactgtcctagtgcggggaataaaagtgaaattatagtcctttctcctgaagaaatcagggtctagtggaaaggaaggtgggaccggaaggaagctggccggtggagcttggccctgtgctaagcattcctatccacttaactgtgggtaatcgtctgaaactccctacagacctgggagtaagctattgtattgaaggggctgtatggagtcagggagagaagccaggctttagagtcagatggctctaatcgtgcatctcaccctctctgtgtccccaagctctccctctgtaagatggggacaatgacagcacccacctcccaggtctacagtgggactgacgtgagggtgcagggcagtgtgggaatggagcctgcacatggtgggtggtcaggtagcagccactgtgctgtcactcccatttgggaagtgagcaagtctcctaccaggcaatagtgaggaagcaacagattcaaatataggtttacctaacatagtcccaggaat

SEQ ID NO: 15705 - DNA, 383 bp, Homo sapiens
agggcgaattgggccctctagatgcatgctcgagcggccgccagtgtgatggatatctgcagaattcgcccttagcgtggtcgcggccgaggtacattgtatactgcagtgtcgtctacatggcattggacaggacataatgtaaaacataaaagtgcaattgttacacttacatatgatagtgaatggcaacgtgaccaatttttgtctcaagttaaaataccaaaaactattacagtgtctactggatttatgtctatatgacaaatcttgatactgcatccacaacattattggcgtgctttttgctttgcttttgtgtgcttttgtgtgtctgcctattaatacgtccgctgcttttgtctgtgtctacatacacatca

SEQ ID NO: 15706 - DNA, 568 bp, Homo sapiens
ctatagggcgaatagggccctctagatgcatgctcgagcggccgccagtgtgatggatatctgcagaattcgccctttcgagcggccgcccgggcaggtacttttctccaagtcaatgaatccaatctttaatggatctgggatgctctctgaccaggtcctgttatgagtttcctgtgttataattaaaaaccccaaactgattaagcatgagaggatacttcctgctctcagataaattatttattatattctgtattatccttgtaatttttctggatatgaataaataacaatgtatctcagaaaaacacattttgaaaagccttataaagttaaaactttaaatgcttttcatcaaaatgttatgaccaataaaaatgccattcatgtatctcatcacactttctatacattttgtagtgatatgtatttatacatactgcagttggaaatagggaatgcttttttggtttcccacggtaggctgcaggttttaaaagcagaagtcctgaacctctgaaggcaacataagaaaagtattcatttgaaacctgtagtgttaaaa

SEQ ID NO: 15707 - DNA, 579 bp, Homo sapiens
atatggcgaattgggccctctagatgcatgctcgagcggccgccagtgtgatggatatctgcagaattcgcccttagcgtggtcgcggccgaggtacttgtgtgggtgtcttaccttgcattagaatatcctaggcctttctaattcttcctcttgaattccctgtgtcactcatctgaggtcatctcttggatttaaatacatttggtctgaaattctcaaactgctgaataaaatgccatagtaagtccaactatatggtttcatgtagggtaaagtaaccattgtggaaggattacgataaaactgtgtgacaataaatagaataaaagatggcaaaacaatctgtaaattacaaagtgttataaaaatgcattgaatttctagtgttcttacactttcatatttctcattggcacatcaatcagaccttgccttcctaaagtgggaggaagaaaaaggctgcacctgtctgggctgagggtctgggcagaacactagcaaaacttttactaaatcttcatgtcaccaccccaaactcattagggcccaaacttatttcattatcttcactatccc

SEQ ID NO: 15708 - DNA, 381 bp, Homo sapiens
ttgggccctctagatgcatgctcgagcggccgccagtgtgatggatatctgcagaattcgcccttcggccgcccgggcaggtacatttaaaaggtgatgctaatactttaaaatgtttaagatatagatttaaaaagcattgtaaattgtatactgcagtgtcgtctgcatggcattggacaggacataatgtaaaacataaaagtgcaattgttacacttacatatgatagtgaatggcaacgtgaccaatttttgtctcaagttaaaataccaaaaactattacagtgtctactggatttatgtctatatgacaaatcttgatactgcatccacaacattactggcgtgctttttgctttgcttttgtgtgcttttgtg

SEQ ID NO: 15709 - DNA, 580 bp, Homo sapiens
ggggccctctagatgcatgctcgagcggccgccagtgtgatggatatctgcagaattcgcccttagcgtggtcgcggccgaggtaccatttgggattatggtttttaaaagcttgagaatattacttatttacttttgcagctttccatgcagctgtttttttttctctctgtttttgactttggagataaagttactgatttttatctttacttttctctttattttgtgccttggtcttgaaaaagtaataaatatttcttactgaggccccctcctgctttgttctgccatctaaggtgattacaatgctcaagtctctttgttggttgcccttgactaatgcttttcagcagccccgggctcagctcctggttcccagtatggcacaatgaccaggcagatatctcgacacaactctactacttcttcgacatcttctggtggatacagacgaactccctctgtgactgctcaattttctgctcagcctcatgttaatggaggtccactttattctcaaaattcaagtaagcttgtgctttgcaggcatacagcaacagtggagctccttttgaag

SEQ ID NO: 15710 - DNA, 515 bp, Homo sapiens
tatatggcgaatggggccctctagatgcatgctcgagcggccgccagtgtgatggatatctgcagaattcgccctttcgagcggccgcccgggcaggtacatgttccttcccttactttggggagtctaggttgtgaatttgaaacaaaatcagattcttttcatcttccctttcccctcaaattcctgagaaaacctccaaccttctaaatttatagcaaatcaactataattatgtgtttccatttgaaattcaagctaaaataacatactttaaaaagtgtatcttaaaaatcatatttcgcttcaaaaaaacttgttaaaagtaatttgcatcagatcctggagtcgacttgaagaattctcctacatctgacacccagttaggccctttgagaaagagagaaaagagaattttttaatgcatgtttgattatggccatctcttttcttagaaggtagaagatagcaccatgccgattcgtcgaactgtgaattctacccgggaaactcct

SEQ ID NO: 15711 - DNA, 391 bp, Homo sapiens
agggcgaattgggccctctagatgcatgctcgagcggccgccagtgtgatggatatctgcagaattcgcccttagcgtggtcgcggccgaggtacatttaaaaggtgatgctaatactttaaaatgtttaagatatagatttaaaaagcattgtaaattgtatactgcagtgtcgtctacatggcattggacaggacataatgtaaaacataaaagtgcaattgttacacttacatatgatagtgaatggcaacgtgaccaatttttgtctcaagttaaaataccaaaaactattacagtgtctactggatttatgtctatatgacaaatcttgatactgcatccacaacattattggcgtgctttttgctttgcttttgtgtgcttttgt

SEQ ID NO: 15712 - DNA, 532 bp, Homo sapiens
tatatggcgaattgggccctctagatgcatgctcgagcggccgccagtgtgatggatatctgcagaattcgccctttcgagcggccgcccgggcaggtacatctgcacattgtgcaggttagttacatatgtatacatgtgccatgctggtgcactgcacccactaaatcgtcatctagaagtgttttctaattttatttgtaatttcttctttgttccattggctgttgaagaatgtgttgtttggccgagcacagtggcccacgcctgtgatcccagcactttgggaggccgaggcaggtggatcacgaggtcaggagatccccgcgtacatctatttaaaagtcaatacacaggaaaaaggtctggaagaatatatactagaaaagaatggttacctctaggggatggagtgtcaaggtgaattttggtttattcatactgtctaaatgattgcttaataactcaggtattgctttcaaaaagtaagaggaagggtgggaaataccctgttctctcagaattttaagtc

SEQ ID NO: 15713 - DNA, 536 bp, Homo sapiens
tagggcgaattgtgccctctagatgcatgctcgagcggccgccagtgtgatggatatctgcagaattcgcccttagcgtggtcgcggccgaggtacgcgggtaggagcaggaggagcagtgggggaagctggtattatttataccactctttgtattttatcactttttataagtctgaaattatttcaaaatgaaaatgtaaaaagaacaaggagtttctcactattctttgtccccctaaaaagaccatctttttaaaaagattaaggaattcatacaaaataagtaagaattaacaattataggaagtttgggccaagcacagtggctcatgcctgtaatcccagcgctttgggaagctgaggtgggtggattgcttgggcctaagagttcaagactaaccctggtaacagcgagaccctgtctctacaaaaaataaaaaatactaactgggcatggtggtgcacacctatagtcccagatactcaagaggctgaagtgggaggattgcttgaacctgggaggccaaggcttc

SEQ ID NO: 15714 - DNA, 389 bp, Homo sapiens
ggcgaattgggccctctagatgcatgctcgagcggccgccagtgtgatggatatctgcagaattcgccctttcgagcggccgcccgggcaggtacattttcatattctccacctttgttccttgccctttgccttcaaagatatgtagatgttccttaactccaaaaattataaaaacaaacaaaaaaactttaccactgttcattatcaaagttactattcatttatccattcaatatttagagtagctaacaagacaaaacaaaataattgctgctttcgtggcttatagtggggaagggtgataaacaccatgatgaaggagagaagagtgctattgtgggggcacaaattatggggatctgatccttttttttaagggaggcatc

SEQ ID NO: 15715 - DNA, 381 bp, Homo sapiens
attgggccctctagatgcatgctcgagcggccgccagtgtgatggatatctgcagaattcgccctttcgagcggccgcccgggcaggtacatttaaaaggtgatgctaatactttaaaatgtttaagatatagatttaaaaagcattgtaaattgtatactgcagtgtcgtctacatggcattggacaggacataatgtaaaacataaaagtgcaattgttacacttacatatgatagtgaatggcaacgtgaccaatttttgtctcaagttaaaataccaaaaactattacagtgtctactggatttatgtctatatgacaaatcttgatactgcatccacaacattactggcgtgctttttgctttgcttttgtgtgct

SEQ ID NO: 15716 - DNA, 606 bp, Homo sapiens
ggcgaattgggccctctagatgcatgctcgagcggccgccagtgtgatggatatctgcagaattcgcccttagcgtggtcgcggccgaggtaccatgttctaaaggcaatcgagtcataatacactgaaagcagtccaagagcagcaagagactttgctgcagctgtagatcactggatcggtaactcgtagttaaaggaaatccctacccactcccatccagcccctaccccctaattatgggacaaaatagccaattcaatgagatttaaacaggaagttcacaagaggaactcttatacctatgaggacccattaaccagggattccacaaccagtagaatattatctactggtagctatttaagccttacctgacaggtctccaagccagccgcagcagccacatccctctctgcgccataaacgtctcgcctcagtttcctgaaattcccaactgagaagggaatatagccagcaggcactcccaaccctgttatgattctacagttctactgttagtaaatttcccaggggcatcacaatctgtgtccttacacatgcatacacagaggagcttccttctaggatgagctcctcattaca

SEQ ID NO: 15717 - DNA, 390 bp, Homo sapiens
tatagggcgaattgggccctctagatgcatgctcgagcggccgccagtgtgatggatatctgcagaattcgcccttagcgtggtcgcggccgaggtactaagtctatcgccatgctgtgtcacgtgggcaggtcttcttggcattcatcttgaacatgacccaaatcctggctccatcttccctcttacttttcctttgccccatttttcttccttattttttatgtatgtttaccttgccctgtaggcgcatttgtaagctggctcaaatccttttgggaacaaggtgggttataaatgcacacgttcctacacaggatgttgttagtcatttcataaggtctcttgtggaggagattagccaatagcttcttttgtaaccttaggcac

SEQ ID NO: 15718 - DNA, 471 bp, Homo sapiens
tatagtggcgaatggggccctctagatgcatgctcgagcggccgccagtgtgatggatatctgcagaattcgcccttagcgtggtcgtggccgaggtacaaaacacatttggtcctgagatttttcagaagcaattttaagtgtaataggaatcctcagaaggaagaaagtaaacatgttctgagcaactcctcctccaggcactacaataaaagagaagggaactggacctggaaagacagacagtccatagagaagtggagagggaagaggaagagagcatgctgcttaatgcaggttgacatttctgtttgtgaagctaattaaattccagaaggattaaatacttaatactttacgtctgtatgtatgtatgtatttatttatttatatttttttgagatggagtctcactctgtcacccaggctggagtgcaaaagcacaatcttggctcactgcaacctccacct

SEQ ID NO: 15719 - DNA, 389 bp, Homo sapiens
tagggcgaattgggccctctagatgcatgctcgagcggccgccagtgtgatggatatctgcagaattcgcccttagcgtggtcgcggccgaggtacatgattctacactgaatctgcatttcactcccatatctataccagaaggttatcagtggaagagaaattcagttatctgaatggacatgatcttctcaggagcagtcagtggttaattgggacaagaaaacacaagtcattatcattgagaaatctgaagcaaattgaggcaggttgtcacctttcaccaggaaacaaattagccctgtctttaaaaagacttctttctctctctgctgactggggattcctgtcaactgccaatgaaatagggagagtgtagattaatggca

SEQ ID NO: 15720 - DNA, 387 bp, Homo sapiens
tatagggcgaattgggccctctagatgcatgctcgagcggccgccagtgtgatggatatctgcagaattcgcccttagcgtggtcgcggccgaggtactaaccatatgaaaatagttgctaccttgttggacaggacagatatacaaagcatttccatttttacagaaaatgtgtatggataccatggaggtttgaaataaatgctgagttcattcaaactatagtgaaatacagcatgtgaaaaagtaattacttattgactataataaatgcttcataaaatataatagatgctgattctggccaagattgacaaaatctaatgcagcctacatgtctcagtggttaatactaagactctgaataaaatacaagcaaataaacac

SEQ ID NO: 15721 - DNA, 481 bp, Homo sapiens
  misc_feature 437, 451: n = A,T,C or G
cgaattgggccctctagatgcatgctcgagcggccgccagtgtgatggatatctgcagaattcgcccttagcgtggtcgcggccgaggtacctttgccagtttctggcatattaacagctgagatcagataagtgaacagcgatagaggtagtgaggtttaggattcaggtctgccaccgggagcgcacctctgggctcaggtctctcatttgtaaaatgggacatttaggtcagatcagcattttcaaaagtgtgacatgttagtaaataagatgattttatgtggttgacagatgaatgtattacctttagtggttatatgtttattttcatggttacttttatttataataaattttgtgactagctaagaatcaattatctctttaaaatatatttaagtttaaaatgtgggccaacttaggaaaaaaaaaanaaaaaaaaaaaaanaaaagttcagctcccagtctactgatgttt

SEQ ID NO: 15722 - DNA, 382 bp, Homo sapiens
ttgggccctctagatgcatgctcgagcggccgccagtgtgatggatatctgcagaattcgccctttcgagcggccgcccgggcaggtacatttaaaaggtgatgctaatactttaaaatgtttaagatatagatttaaaaagcattgtaaattgtatactgcagtgtcgtctacatggcattggacaggacataatgtaaaacataaaagtgcaattgttacacttacatatgatagtgaatggcaacgtggccaatttttgtctcaagttaaaataccaaaaactattacagtgtctactggatttatgtctatatgacaaatcttgatactgcatccacaacattactggcgtgctttttgctttgcttttgtgtgcttt

SEQ ID NO: 15723 - DNA, 650 bp, Homo sapiens
  misc_feature 137: n = A,T,C or G
ccctctagatgcatgctcgagcggccgccagtgtgatggatatctgcagaattcgcccttcgagcggccgcccgggcaggtactgaatggaagagagagttggaacagtgaacatattctactttttcaagaatttnctcttttaaaggtatgggaaaaagatgcacaaaattcatttgaggatagcatagatctaaaggcatttaaaaccttgagtcttgaacatatttataggcacggaaaaaattctacagaaaggaaagattgtaattataggagagagaaaaacagtgatatttctgaggatattgtggggagtgggtgctaaaggaccattggatatatcattcttaaacagaagggaaaggatgggtacctcggccgcgaccacgctaagggcgaattccagcacaactggcggccgttactagtggatccgagctcggtaccaagcttggcgtaatcatggtcatagctgtttcctgtgtgaaattgttatccgctcacaattccacacaacatacgagccggaagcataaagtgtaaagcctggggtgcctaaatgagtgagctaactcacattaattgcgttgcgctcactggccgctttccaatcgggaaaacctgtcgtgccagctgcattaatgaat

SEQ ID NO: 15724 - DNA, 597 bp, Homo sapiens
acgactactatagggcgaattgggccctctagatgcatgctcgagcggccgccagtgtgatggatatctgcagaattcgccctttgagcggccgcccgggcaggtacatttaaaaggtgatgctaatactttaaaatgtttaagatatagatttaaaaagcattgtaaattgtatactgcagtgtcgtctacatggcattggacaggacataatgtaaaacataaaagtgcaattgttacacttacatatgatagtgaatggcaacgtgaccaattttcgtctcaagttaaaataccaaaaactattacagtgtctactggatttatgtctatatgacaaatcttgatactgcatccacaacattactggcgtgctttttgctttgcttttgtgtgcttttgtgtgtctgcctattaatacgtccgctgcttttgtctgtgtctacatacacatcattaatactattggtattactattgtggataacagcagcctctgcgtttaggtgttttattgtatatattgtatttgtttatataccattatttttaatacatacacatgcacgctttttaattacataatgtatatgtacc

SEQ ID NO: 15725 - DNA, 381 bp, Homo sapiens
agggcgaattgggccctctagatgcatgctcgagcggccgccagtgtgatggatatctgcagaattcgcccttagcgtggtcgcggccgaggtacaaatagggtcacctactctcaaattctgcggttcaaattgtggttggagatgagatgttctatttctgcatctctcctggaccatcttagagcagtgcaaagtttactggatcttccagtgcattattggcccttggtgtgatgacgagagagcaggaaggaggtctccagctccttttctgagttcagatgttccctagcccaagaagactaatcatgcacctggtttcctgctctgaaaaataagaagtgattttggcagcctttgaatctggatggaaggtgg

SEQ ID NO: 15726 - DNA, 392 bp, Homo sapiens
actactatagggcgaattgggccctctagatgcatgctcgagcggccgccagtgtgatggatatctgcagaattcgccctttcgagcggccgcccgggcaggtacatttaaaaggtgatgctaatactttaaaatgtttaagatatagatttaaaaagcattgtaaattgtatactgcagtgtcgtctacatggcattggacaggacataatgtaaaacataaaagtgcaattgttacacttacatatgatagtgaatggcaacgtgaccaatttttgtctcaagttaaaataccaaaaactattacagtgtctactggatttatgtctatatgacaaatcttgatactgcatccacaacattactggcgtgctttttgctttgcttttgtg

SEQ ID NO: 15727 - DNA, 389 bp, Homo sapiens
tagggcgaattgggccctctagatgcatgctcgagcggccgccagtgtgatggatatctgcagaattcgcccttagcgtggtcgcggccgaggtacatttaaaaggtgatgctaatactttaaaatgtttaagatatagatttaaaaagcattgtaaattgtatactgcagtgtcgtctacatggcattggacaggacataatgtaaaacataaaagtgcaattgttacacttacatatgatagtgaatggcaacgtgaccaatttttgtctcaagttaaaataccaaaaactattacagcgtctactggatttatgtctatatgacaaatcttgatactgcatccacaacattactggcgtgctttttgctttgcttttgtgtgcttt

SEQ ID NO: 15728 - DNA, 666 bp, Homo sapiens
  misc_feature 569: n = A,T,C or G
tacgactcactatagggcgaattgggccctctagatgcatgctcgagcggccgccagtgtgatggatatctgcagaattcgccctttcgagcggccgcccgggcaggtacatatacattatgtaattaaaaagcgtgcatgtgtatgtattaaaaataatggtatataaacaaatacaatatatacaataaaacacctaaacgcagaggctgctgttatccacaatagtaataccaatagtattaatgatgtgtatgtagacacagacaaaagcagcggacgtattaataggcagacacacaaaagcacacaaaagcaaagcaaaaagcacgccagtaatgttgtggatgcagtatcaagatttgtcatatagacataaatccagtagacactgtaatagtttttggtattttaacttgagacaaaaattggtcacgttgtcattcactatcatatgtaagtgtaacaattgcacttttatgttttacattatgtcctgtccaatgccatgtagacgacactgcagtatacaatttacaatgctttttaaatctatatcttaaacattntaaagtattagcatcaccttttaaatgtacctcggccgcgaccacgctaagggcgaattccagcacactggcggccgttactagtggatccgagctc

SEQ ID NO: 15729 - DNA, 373 bp, Homo sapiens
ctactatagggcgaattgggccctctagatgcatgctcgagcggccgccagtgtgatggatatctgcagaattcgcccttagcgtggtcgcggccgaggtactttataaatttaatctataatgatgtattagcaatcatagggaacaccatgatggtcagtgttcagacttgatgaagactgaagcatgagagagggccagacagatattgtggagtccgtgcagctttctactaatttctatttaccaataaatatgcctgggataatataggagaattatagaaaggaacaaggaaactaatcaaggagaaagtagagggcggtttccaatgagagaatttcatctgcttctaatctaaaaaaaaaagac

SEQ ID NO: 15730 - DNA, 445 bp, Homo sapiens
atagggcgaattgtgccctctagatgcatgctcgagcggccgccagtgtgatggatatctgcagaattcgcccttcggccgcccgggcaggtactatagttagagacttgtagttgattttttccaaattgatctgctatttcttggagctctttaatttaaaaacatttaataacttttttattaggcagctaatcagtttcactgaggtagaagagttggaaggcatggaaaagtataaaactttattttgaattagttggatttccatggttatttaaaaactaggcccacctattttctaaggcacttttcatttgtaatatcactgaaattgaaattccttctggtttgttagaactctgataggaaatggcagccagaagaataggaaaatttaccttcaggactttctgccagataatattgatgaatattttaggtt

SEQ ID NO: 15731 - DNA, 543 bp, Homo sapiens
gtaatacgactcactatagggcgaattgggccctctagatgcatgctcgagcggccgccagtgtgatggatatctgcagaattcgccctttcgagcggccgcccgggcaggtacatatgggtttatagacatatatatattcacacatatatgaatatgtatacatatatattttttaagctcttatctaaagtggtttttaagtgatgtgaagtttaacctcagcatcaaagtatattctaaaatataaaacaactattttttatcattctacattttttatttacatcaactgtatcacccattacatatttgataaagaggttatgcctcagtaattctgaagctgaaggcttaaaatctcagcccagtgactctggagaatcacgtgttagttaaagggaaagcggcggcctcacatgctgcgtaagtttcattctcaggcatcctttctgagggacctacttttactggagatcattctgctaaataaggtaacatctagcctcaatggcagtcatgttagttaaccccctaaacctt

SEQ ID NO: 15732 - DNA, 426 bp, Homo sapiens
acgactcactatagggcgaattgggccctctagatgcatgctcgagcggccgccagtgtgatggatatctgcagaattcgccctttcgagcggccgcccgggcaggtacaggaagacacgcttgaaagagtccctaatgacactgagcaacaattccccatgtttgttacactggaagttgttctatctaccttatgcgcctgtctttaattcctggcatctcacaagtctgaaagacagttattatcatttatacaggaagaaactagggctcctataggggaaatgacttgttaatatcataagactagcaaagcttacttactcaattcctaatgctcttcagagcatattatatctgaactctatattaaatttgtggttggtgttgctaaattagtcctgaattaaactgatttttatatt

SEQ ID NO: 15733 - DNA, 573 bp, Homo sapiens
cactatatggcgaattgggccctctagatgcatgctcgagcggccgccagtgtgatggatatctgcagaattcgccctttcgagcggccgcccgggcaggtacatggattaggttatgcctggtcaccaccagtcctaaatgtgtctgtgggggacacagtggcatggcattggcaaacacatccgtttcttagagggataggatataggattttttctgtctccagtcctggaagtgtaatttatgatggcaaaggattcacaagtggaagacaaaaatctacatcaggtatgtttctgcttattgggttttgcatcatgtcactttttcctaaatgtaataaaatgacattttgtgtagatttaatacagtatttttacataaataatatacacaaatgcgtaaggtatttggcattttattgctgcagtaaaaatgttactaatgagtgtaagcaagttattttatacatattcaagtgtgttctgatattagaaatatcttatattgattctgtgataatcaaccaattgaaaaacatattgaaaaagcaaaatgcaataaaataggaa

SEQ ID NO: 15734 - DNA, 339 bp, Homo sapiens
atggggccctctagatgcatgctcgagcggccgccagtgtgatggatatctgcagaattcgccctttcgagcggccgcccgggcaggtacgcgggcagtcaatcggaaactattgttgactctcctttaaaaatatatccaaaatattaaaagactgacagcctctaagactaccacttcagtccaagccaccgtaattgctggctattgtaacagctgacatcttgggctggaggtgtggtgagggtggttaacagaatcccaatacaaacttcagatcaattaaatgagaatcacaggcatgcatgaatcacgtgtctgtgtgtgtatgtgtatgtg

SEQ ID NO: 15735 - DNA, 575 bp, Homo sapiens
  misc_feature 241, 242: n = A,T,C or G
attgggccctctagatgcatgctctagcggccgccagtgtgatggatatctgcagaattcgccctttcgagcggccgcccgggcaggtactggcatgaagcacttcacctcaaggagggttctccttgtgggctagggcttcccagaaccctgaggtggaggtggactggagctggaccttgggaggaaactctaggtgtaacagcacaggaggagaccaagctggagttttggagagagnnatggttcaggagagcagggcaagataggtaatatagaaagtcaatggctggaaacaaaggggcaaaagaggagctaaccttcctgaattctcaactatatattagcttttttaatggccacaattaactccataatggaggccatgtgtgttaacaagagaatgcatggctggaaaaacagaatccagtctgggttgcttaagccaaagaaggatatctggctcggtgttgtggctcatgcctctaatcccagcactttgggaggtcaaagcgggaggattgcttgagcctaggaattcaagaccagtctgggcaaaatagtgagaccccatc

SEQ ID NO: 15736 - DNA, 381 bp, Homo sapiens
tacgactcatatagggcgaattgggccctctagatgcatgctcgagcggccgccagtgtgatggatatctgcagaattcgcccttagcgtggtcgcggccgaggtacatgtgcacaacgtgcaggtttgttacatatgtatacatgtgccaccatgttggcgatagcacagtattatttagtgttcaattacattcttcaaattcccctctttcttgtctctccaaatattttcaagtctcttacagaaaaaaatgtgccttgtttttctcccagatgcctgtctttagcacttagcatggtgctgagggtatgtgaagttgattggtttgtgagtggggaaaaaggagatttctaaagcactagaaaagatccgcctctc

SEQ ID NO: 15737 - DNA, 616 bp, Homo sapiens
atggagtcagcccgcgggaacgaccgaaccccctcagagcgggaagaggggcgcgggacggacgggcgggggacggcgggggcagaaccgggaaggccacccgtcggaacccggcgacacacccgtaccgagacgccgcgaggacgacacgctcccaacacgaggcccacgccgcggaccataccgggcgcggccgctagactagtctagagaaaaaacctcccacacctccccctgaacctgaaacataaaatgaatgcaattgttgttgttaacttgtttattgcagcttataatggttacaaataaagcaatagcatcacaaatttcacaaataaagcatttttttcactgcattctagttgtggtttgtccaaactcatcaatgtatcttatcatgtctggatccccgggtaccgagctcgaattaattcctcttccgcttcctcgctcactgactcgctgcgctcggtcgttcggctgcggcgagcggtatcagctcactcaaaggcggtaatacgggtatccacagaatcaggggataacgcaagaaagaacatgtgagcaaaaggccagcaaaaggccaggaaccgtaaaaaggccgcgttgctggcgt

SEQ ID NO: 15738 - DNA, 605 bp, Homo sapiens
atacgactactatagggcgaattgtgccctctagatgcatgctcgagcggccgccagtgtgatggatatctgcagaattcgcccttagcgtggtcgcggccgaggtactttttttttttttttttttttttttgaggctgagtctctctctgtcatccaggctggagtgcagttgtatgatcttggttcactgcaatctcctcctcctgggttcaagtgattcttctgcctcagcctcccaagtagctgggatcacaggcggccgctaccacatgcggctaatttttgtatttttaggagagacagggttttactatattggccaggctggtctcaaactcctcaaaccccaagtgatcctcctgcctcagcctcccaaagtgccaaggattaaggcgtgcgtgagccactgtgcctggcctaggataaatttattagtatcaggaatccttatgcttcttttgaatgattattttctcttaatgttaaagtataacttttgggtatacatttcatatgttagctccattccaggcttcattttgtgtctcaattcccaatccttaattttcgttttactgagtcttttttttttttagttaaaa

SEQ ID NO: 15739 - DNA, 362 bp, Homo sapiens
cggccgcccgggcaggtgtacaagctagcttgagtcgacccacgcgtccgggtgcacctgtggcatgcctgagaggattaccttgatcacattatttaaggtaggaagcctgcccactatgagtagcatcattccctaagatgaagatgagatcttgtataaaaaggaaaaaggtgagacataagagagagtgggagtgagatcagatgaattagaaaaataaggagaaactggactgagcaaccagtattcgttgctgtgaaaattctttatgtacctcggccgccaccgcggtggagctccagcttttgttccctttagtgagggttaattgcgcgcttggcgtaatcatggtcatagct

SEQ ID NO: 15740 - DNA, 688 bp, Homo sapiens
ccacgcgtccggtaaaaagtcagatatattatcaaggagatctggatattgtaaaacccgattagaaattgggtttccccctgttttggagcgatacacgtcaatagtgaccttggtaaaaccacatttggtaaaggcctcttgtactgatgggaaacttttcaatcatctggagactgtttggcgattcagcccaggtcttcctggctatccaagaacatgtaccttggatttttcaatttcttttgaattccgctcccttctgcactctcagctcgctacactgttctttgatgaagttgtgaaacaaatggtagcggcctttgaaagaagagcttgtaaactgtatggtccagagacaaacattcctcgggaattaatgcttcatgaaattcaccacacctgagaggaaaacgagagctgcctccatccatcttgactagtttgttcacttttaagaagccatttcaccagctattgagaagtcagacagcatttgttaaacctgccttgactccaagcctgctccattgaaaatttatacattgaatatggactcacttgtacatagaatcatttcttcaatcaagtgtaactctaaataacgtgtacatttgcaagctctgcctgcctttgtaataatggatgtcatcactgttgctaggataccacattccttatttgagtg

SEQ ID NO: 15741 - DNA, 649 bp, Homo sapiens
  misc_feature 552: n = A,T,C or G
tacgactcactatagggcgaattgggccctctagatgcatgctcgagcggccgccagtgtgatggatatctgcagaattcgcccttagcgtggtcgcggccgaggtacagtcttttgttcaatcacagtatctgggtgtaatagacagtagctatttatttaattagtctatatttttatcttcagtgggctttaaatgacttgtttattaaataaattataaattaataagtgaatgagttataaaatcccaaaagtaatcttattttatggggtcagactttggaaaggagagcctcttccctgaaatcttgaatacatggcatttttaatgccaggacacaatacacaaatctgtatatttttgtataatatctgatttcatttactgtataagaaagacttggataatatttttcaatttttaatttatttgttatttttttgggaacagggtctcactctgctgcccaggctgaagtgcagtggtgtgatcttggctcactgcagccttgatctcgtagactcaagcaatcctcctacctcagcctnccagtaactgggaccacaggtgcacaccaccatccccagctgatttttgtgttttttgtagagttgggttctcaccatgttaacctaggctggtcta

SEQ ID NO: 15742 - DNA, 449 bp, Homo sapiens
ccgggccccccctcgaggtcgacggtatcgataagcttgatatcgaattcctgcagcccgggggatccactagttctagagcggccgaggtacaagctagcttgagtcgacccacgcgtccgatttaatgtctacactgtagctgtcacagacacaccagaagagggcatcagatcccattacagatggttgtgagccaccatatggttgctgggaatagaacttacgtcctctggaagagcaagaagccagtgctcttaaccattgagccatctctccagccccagcctggggttggttggcatttctatgggacatctttggccaacaactcagctgaatgcactacagtctctgtacctgcccgggcggccgccaccgcggtggagctccagcttttgttccctttagtgagggttaattgcgcgcttggcgtaatcatggtcata

SEQ ID NO: 15743 - DNA, 526 bp, Homo sapiens
cgactcactatagggcgaattgagccctctagatgcatgctcgagcggccgccagtgtgatggatatctgcagaattcgccctttgagcggccgcccgggcaggtaccagtaaatgctgcctcatcacctacacccttggtttacttctcagataaactcaggaagtttaaatggcattctgagaatctgtagctgcaacatagtgagcccaggagtcccggtccagcagctagtattaaattctctgttgctagcttggacctctctcgatatctaggaattgtctgcagtgtgcggtggcacagtaacaaccatttgtttctcaacaagaatctgataatgttgcttgaacctcctgaaccagtgctgcatgctctgcttcttcatatgtttgtccttagatttgaccaaaaacaataactgataatgtaatacaaattccccagctccctgtgagctgggttgagcccaggaagtctgtacctcggccgcgaccacgctaagggcgaattccaacacactggc

SEQ ID NO: 15744 - DNA, 596 bp, Homo sapiens
atacgactactatagggcgaattgggccctctagatgcatgctcgagcggccgccagtgtgatggatatctgcagaattcgccctttgagcggccgcccgggcaggtacatttaaaaggtgatgctaatactttaaaatgtttaagatatagatttaaaaagcattgtaaattgtatactgcagtgtcgtctacatggcattggacaggacataatgtaaaacataaaagtgtaattgttacacttacatatgatagtgaatggcaacgtgaccaatttttgtctcaagttaaaataccaaaaactattacagtgtctactggatttatgtctatatgacaaatcttgatactgcatccacaacattactggcgtgctttttgctttgcttttgtgtgcttttgtgtgtctgcctattaatacgtccgctgcttttgtctgtgtctacatacacatcattaatactattggtattactattgtggataacagcagcctctgcgtttaggtggtttattggatatattggatttggttatataccattatttttaatacatacacatgcacgctttttaattacataatgtatatgt

SEQ ID NO: 15745 - DNA, 389 bp, Homo sapiens
tagggcgaattgggccctctagatgcatgctcgagcggccgccagtgtgatggatatctgcagaattcgcccttagcgtggtcgcggccgaggcacccccaaataagcctcagttcccatatttaaacttttttctcataggaaagctacaggaattttaagatatcacatggttacatttgcttttcttccagatggagctaaattgctatatgatacagggtttattttatatttctcatattaaagatgaaaaagtgaaaattgagtagttgactcaaaattatatgtatatatatatatatatgttaacagttgaatacaaacaagattacaagcagtgaaacattcaaatagttttggcaactccaaatattttgtgtttcaca

SEQ ID NO: 15746 - DNA, 390 bp, Homo sapiens
tagggcgaattgggccctctagatgcatgctcgagcggccgccagtgtgatggatatctgcagaattcgccctttcgagcggccgcccgggcaggtacatatcttttatatgctcatatgctcctgtagtcgttagttttaattcttaaaaatgtgataattgtaataaacttttattatatcttatgtaaaataattgtgtgtctgagagagactaaaactcatgccctacttctcatgatttctctttctcttttgtttccctttcacagacagaagaattatagcctcagtatttatgtatatttttgaaagagtgaagtggggactgagaaggtatatctacatgctatgcctttagatagcattctgtttcaaatctccttttct

SEQ ID NO: 15747 - DNA, 535 bp, Homo sapiens
  misc_feature 469: n = A,T,C or G
gactactatagggcgaattgtgccctctagatgcatgctcgagcggccgccagtgtgatggatatctgcagaattcgcccttgagcggccgcccgggcaggtacatctaaaaacctttttacttccaaaaacctttttggctctctcaagaatttgctctcaatataggagtggtaaatactgttggtgatataaacacagggaaaaaacagggagaatcaaagacagattaatcattcaacaaagacttactatctaccaggagcctgacagtgtatcaggtagtgcctcatgcactggaccaacagtgggaaataagatgagggtaatccttgtcctcacagaacctccattcttagaggaaagaaggaaattaaacatgaaattaccactgagatgaattatgaaaggggaagcagatggtcctgtcatagggcagaaaaaggtatagaagagaaaaaggaggcanagtggaaatgcagataaagcagagatatattacaataaagcctagagaaagataagaaaagtacct

SEQ ID NO: 15748 - DNA, 513 bp, Homo sapiens
atacgactcactatagggcgaattgggccctctagatgcatgctcgagcggccgccagtgtgatggatatctgcagaattcgccctttcgagcggccgcccgggcaggtacatcaccctgctgagggacatccaggacaaggtcaccacactctacaaaggcagtcaactacatgacacattccgcttctgcctagtcaccaacttgacgatggactccgtgttggtcactgtcaaggcattgttctcctccaatttggaccccagcctggtggagcaagtctttctagataagaccctgaatgcctcattccattggctgggctccacctaccagttggtggacatccatgtgacagaaatggagtcatcagtttatcaaccaacaagcagctccagcacccagcacttctacctgaatttcaccatcaccaacctaccatattcccaggacaaagcccagccaggcaccaccaattaccagaggaacaaaaggaatattgaggatgcgctc

SEQ ID NO: 15749 - DNA, 389 bp, Homo sapiens
ctatagggcgaattgggccctctagatgcatgctcgagcggccgccagtgtgatggatatctgcagaattcgcccttagcgtggtcgcggccgaggtactgcagtgtcgtctacatggcattggacaggacataatgtaaaacataaaagtgcaattgttacacttacatatgatagtgaatggcaacgtgaccaatttttgtctcaagttaaaataccaaaaactattacagtgtctactggatttatgtctatatgacaaatcttgatactgcatccacaacattactggcgtgctttttgctttgcttttgtgtgcctttgtgtgtctgcctattaatacgtccgctgcttttgtctgtgtctacatacacatcattaatactatt

SEQ ID NO: 15750 - DNA, 388 bp, Homo sapiens
agggcgaattgggccctctagatgcatgctcgagcggccgccagtgtgatggatatctgcagaattcgcccttagcgtggtcgcggccgaggtactcaataaatactttcctaaatacttacattaaagctatttctgtaataaaaaagttcttcaagtcaacacaatccacaagtatttgttttgttcttagtgtaagcttagcacaagtctaggaaagggtttagcattgaagtctatttagggagacaaagtcacaggcaacatatttaaataatgttaccaaacccaatcctatctgccaaaatgctgggaggagatggtgagtgccacaaaggttcagaaaggaaactgacttcagaaagtggtatgaggtgttacattttgc

SEQ ID NO: 15751 - DNA, 641 bp, Homo sapiens
  misc_feature 384: n = A,T,C or G
gactcactatagggcgaattgggccctctagatgcatgctcgagcggccgccagtgtgatggatatctgcagaattcgccctttcgagcggccgcccgggcaggtacttaattacctcaaaagaaaactgtcaacccaggaactaaagtttatccatttggacttacaagataaccttaataccccattgccactgtatccgatgctgtcagaggcccacctacatctccccctacactcagcatttcagtgcatactgatagaattgtgctatcacctgcaaatacctctttagggcacgccagaagtgtgcaggagataacatatctggctgaaactttcaatccctgacagaggggatttgggatacaaatacttcgactntctcacccactggtggggataaccctgaggaatgttcttcagggttccacaggactcctctgagggacttgtaacagttccccccaagagtaacctgttcagtgctgtgcctctcttggctttctttcatgcctctattctcaattccagctctactcctgagtttccttgctcactttccaggaacagtttgaattcaaattcttctctcaggctctgcttctgagggaaatcagtctaagacaatcccaaatcac

SEQ ID NO: 15752 - DNA, 637 bp, Homo sapiens
tacgactcactatagggcgaattgggccctctagatgcatgctcgagcggccgccagtgtgatggatatctgcagaattcgccctttgagcggccgcccgggcaggtacatatacattatgtaattaaaaagcgtgcatgtgtatgtattaaaaataatggtatataaacaaatacaatatatacaataaaacacctaaacgcagaggctgctgttatccacaatagtaataccaatagtattaatgatgtgtatgtagacacagacaaaagcagcggacgtattaataggcagacacacaaaagcacacaaaagcaaagcaaaaagcacgccaataatgttgtggatgcagtatcaagatttgtcatatagacataaatccagtagacactgtaatagtttttggtattttaacttgagacaaaaattggtcacgttgccattcactatcatatgtaagtgtaacaattgcacttttatgttttacattatgtcctgtccaatgccatgtagacgacactgcagtatacaatgtacctcggccgcgaccacgctaagggcgaattccagcacactggcggccgttactagtggatccgagctcggtaccaagcttggcgtaatcatggtcatagct

SEQ ID NO: 15753 - DNA, 550 bp, Homo sapiens
  misc_feature 480, 481, 482, 483, 505, 506, 507: n = A,T,C or G
ctatatggcgaatggggccctctagatgcatgctcgagcggccgccagtgtgatggatatctgcagaattcgcccttagcgtggtcgcggccgaggtacaccaatgccaaaaattttgttagggaaacatttttctcctttctccctctcagggagagatgattaagaaaaatcaagttctagtggcagctgggtcttagagagaaggtttttcctacctgattatccagttgttttggggatggcagttcacactgcttggagcagagtctaatttcccgaagattaataatattaaagaaagttaaatgaagcaaacagcatgccacactgtgcagagccccagtcagaaccacactgcccaattcccttctgctattgggaagataattactgaatctttgttcctgtgaagtaaatgaattttgaatcctctgtatgtttaattatccaaaattgaacctttgttattttcctttnnnnaaaaaaaaaaaaaaaaaaaaannnttttccctcccgggggggccttttggggggcaattcccccccc

SEQ ID NO: 15754 - DNA, 561 bp, Homo sapiens
  misc_feature 521: n = A,T,C or G
cactatagggcgaattgggccctctagatgcatgctcgagcggccgccagtgtgatggatatctgcagaattcgcccttcgagcggccgcccgggcaggacatttaaaaggtgatgctaatactttaaaatgtttaagatatagatttaaaaagcattgtaaattgtatactgcagtgtcgtctacatggcattggacaggacataatgtaaaacataaaagtgcaattgttacacttacatatgatagtgaatggcaacgtgaccaatttttgtctcaagttaaaataccaaaaactattacagtgtctactggatttatgtctatatgacaaatcttgatactgcatccacaacattactggcgtgctttttgctttgcttttgtgtgcttttgtgtgtctgcctattaatacgtccgctgcttttgtctgtgtctacatacacatcattaatactattggtattactattgtggataacagcagcctctgcgtttaggtgttttattgtatatattgnatttgtttatataccattatttttaatacatacacatgca

SEQ ID NO: 15755 - DNA, 549 bp, Homo sapiens
  misc_feature 238, 239: n = A,T,C or G
gccctctagatgcatgctcgagcggccgccagtgtgatggatatctgcagaattcgccctttcgagcggccgcccgggcaggtacctgaaacctgtaactttacatgagtagaaatccgaaatgttataaggcaattgttacagcaagaaaggaaaagactagttatgtgatgtgctcacatccagaaatctaatagcagatgactcaccaatcataatagagcatgtcagttaaagnnctccgtgacttcagtccagacaggatcaagtccccactctactcctgtccagtgtctgaatttagacaaatgacttatcctctcgatgtttaagttctcatcctgataatggcagcacctacctcacagatttgtgaagaatagaaagttactacatggctgctcatcacaacagtgatgaatacattgcagggacactttaactggtgtacctcggccgcgaccacgctaagggcgaattccagcacactggcggccgttactagtggatccgagctcggtaccaagcttggcgtaatcatggtcatag

SEQ ID NO: 15756 - DNA, 390 bp, Homo sapiens
gggcgaattgggccctctagatgcatgctcgagcggccgccagtgtgatggatatctgcagaattcgccctttcgagcggccgcccgggcaggtacatttaaaaggtgatgctaatactttaaaatgtttaagatatagatttaaaaagcattgtaaattgtatactgcagtgtcgtctacatggcattggacaggacataatgtaaaacataaaagtgcaattgttacacttacatatgatagtgaatggcaacgtgaccaattttttgtctcaagttaaaataccaaaaactattacagtgtctactggatttatgtctatatgacaaatcttgatactgcatccacaacattactggcgtgctttttgctttgcttttgtgtgcttt

SEQ ID NO: 15757 - DNA, 388 bp, Homo sapiens
actatagggcgatttgggccctctagatgcatgctcgagcggccgccagtgtgatggatatctgcagaattcgccctttcgagcggccgcccgggcaggtacaatgggcctacgataatgacatagtagacgatagtgaaattgcatataaatatgcacaattggcagacactaatagtaatgcaagtgcctttctaaaaagtaattcacaggcaaaaattgtaaaggattgtgcaacaatgtgtagacattataaacgagcagaaaaaaaacaaatgagtatgagtcaatggataaaatatagatgtgatagggtagatgatggaggtgattggaagcaaattgttatgtttttaaggtatcaaggtgtagagtttatgtcattttt

SEQ ID NO: 15758 - DNA, 575 bp, Homo sapiens
gaattgggccctctagatgcatgctcgagcggccgccagtgtgatggatatctgcagaattcgcccttgagcggccgcccgggcaggtaccctctacagaaaagccagctgaatgtaaaactcccctagtgcccttttctccttataatggtatagttattcttgtccctgactactctgattgtatgccagggccttcaaattatttgcattttatatcttgttcatctttaataattataacagcaggaaacttagcctaataaagtcattccattcataactggaactctaattctaaaaaagaaattaattaaagaaaattattgatgtgaccaaggtttagctacatgtataatccacaacagaaatttttctatcagtaaaaaattggaagcaacctataggtctgacaatatggaattatttaaataaatgatgattgatccactgtaagtcagaattgctgccaacattaagggcttaactgaggtcatgaattcaaaatgtgaccaaacactatgtgtgtctgtgtgttttcttccagtcctggttactccacaggtgcaaaacat

SEQ ID NO: 15759 - DNA, 463 bp, Homo sapiens
  misc_feature 160, 339: n = A,T,C or G
ccctctagatgcatgctcgagcggccgccagtgtgatggatatctgcagaattcgcccttagcgtggtcgcggccgaggtacgcgggtgtaattatatgttttcattttctcttagctgtatagctagcagtggaattgtgggatcatatgtaactgtantatcttttgaggaactgccaaattgttttccaaagcagctataccattttatgttcctgctagcagtgaatgcagacatgatcgctacacgcaatttctgccttttctttgtcatcataggataaaggatgtttttatgttgcctaatttgacttgaagactgttggctttgatgactnttaaaaatattaaataaaactttatttacttccttaggtctgtcatctgataacaaacctatggttaacttggataagctgaaggaaagagctcaaagatttggtttgaatgtctcttcaatct

SEQ ID NO: 15760 - DNA, 394 bp, Homo sapiens
atagggcgaattgggccctctagatgcatgctcgagcggccgccagtgtgatggatatctgcagaattcgcccttagcgtggtcgcggccgaggtactgcaagcaacagttactgcgacgtgagcagcaacgaagtatcctctcctgaaactattaggcagcacttggccaaccacaccgccgcgacccataccaaagccgtcgccttgggcaccgaagaaacacagacgactatccagcgaccaagatcagagccagacaccggaaacccctgccacaccactaagttgttgcacagagactcagtggacagtgctccaatcctcactgcatttaacagctcacacaaaggacggattaactgtaatagtaacactacacccatagtacctgc

SEQ ID NO: 15761 - DNA, 398 bp, Homo sapiens
actactatagggcgaattgggccctctagatgcatgctcgagcggccgccagtgtgatggatatctgcagaattcgcccttcgagcggccgcccgggcaggtacgcgggcatagttagctgtttattgctttcctgctcttattctcagtccccaggaccaaatgttgaccactaccttcccccacatataattaggttatttaccgaacgccatgcaggtggctgttaaaaggaagatatatacttaccttataaactcaacttttccctgttgtctttctgtctcacccctacctccatgctttaaattaacttttcaggcttaggccttatctctcagtagagccatataaggtatgtgtaaaagcaggaaaatgtttcctggggatgaagcttt

SEQ ID NO: 15762 - DNA, 600 bp, Homo sapiens
  misc_feature 247, 248: n = A,T,C or G
atatggcgactggggccctctagatgcatgctcgagcggccgccagtgtgatggatatctgcagaattcgccctttcgagcggccgcccgggcaggtacatgactgtcctaacaaaaaacaaaatgaaggcagaagtagatttttaattggctgtttcatctttcataaaagctaagaacatagtagcagaatgtagctttctggaggtgacgtgtagaggggcctgagctgaggtccaagtatttnncttgctcaaagagtagattcagaattcccagtgagaggggaggagggagaatgttccttaaactgttttcctaaacatctttaaaaacaaacaaacaaacatggtttttaataggagctcaactgcaaatgctaacaggtagtattttctgttaaggtcctgatgcatgcaaatgtattgagaaagattatactaaatatttttctcttattcaaccacaggttttcagaatattggattttatagaacaaaatttccaaaaagaattttgagggctccatggatttgtccactttttattgtcaagtgagaacaattttttttttttccacaaaaaagactactatctaac

SEQ ID NO: 15763 - DNA, 521 bp, Homo sapiens
ggccctgtagatgcatgctggagcggccgccagtgtgatggatatctgcagaattcgccctttggagcggccgcccgggcaggtaccctagaacttaaagtatgataataaaaaataaataaataattttaaaaaatagatttaaagaaatctctacaattctttaaagaatacatttaattttgacatgttagaattatatttgattgaatttagttactgtaaatattagattaaaatatttttgttttattcttgttttctttttcctagtcctcctggtagaaacaaagtttgagtatgatacacaatctggttaggtctcagaacaaccattatgatgtcggatgagccattcattaataataattgaaacaataatacaaataaagctatcctttatagagcacttatttatatgcaaagtgctgttataagatggatatatatttatttctcattaaatcattaagagaaagttactattattatttcccttttaaagatgagaaagttgctgg

SEQ ID NO: 15764 - DNA, 400 bp, Homo sapiens
acgactcactatagggcgatgtgggccctctagatgcatgctcgagcggccgccagtgtgatggatatctgcagaattcgccctttcgagcggccgcccgggcaggtacattgtatactgcagtgtcgtctacatggcattggacaggacataatgtaaaacataaaagtgcaattgttacacttacatatgatagtgaatggcaacgtgaccaatttttgtctcaagttaaaataccaaaaactattacagtgtctactggatttatgtctatatgacaaatcttgatactgcatccacaacattattggcgtgctttttgctttgcttttgtgtgcctttgtgtgtctgcctattaatacgtccgctgcttttgtctgtgtctacatacacatcatta

SEQ ID NO: 15765 - DNA, 543 bp, Homo sapiens
tatatggcgaatggggccctctagatgcatgctcgagcggccgccagtgtgatggatatctgcagaattcgccctttcgagcggccgcccgggcaggtacgcgggttgctctcctttttaactttgggttttctaagactagaaacatgaaagtgctgaagatgggcatgaaaaataatggagaggaaaaccatggggatagtgaagataatgaaataagtttgggccctaatgagtttggggtggtgacatgaagatttagtaaaagttttgctagtgttctgcccagaccctcagcccagacaggtgcagcctttttcttcctcccactttaggaaggcaaggtctgattgatgtgccaatgagaaatatgaaagtgtaagaacactagaaattcaatgcatttttataacactttgtaatttacagattgttttgccatcttttattctatttattgtcacacagttttatcgtaatccttccacaatggttactttaccctacatgaaaccatatagttggacttactatggcatttta

SEQ ID NO: 15766 - DNA, 597 bp, Homo sapiens
  misc_feature 250, 251: n = A,T,C or G
actatattgcgaatggggccctctagatgcatgctcgagcggccgccagtgtgatggatatctgcagaattcgcccttagcgtggtcgcggccgaggtacatgctagtttatgttttaggagtttagtttctatttctctgtttagctaattctctatcttttggccactccttttttattcccctcaaacagtcgctttctcttcccatctctatagcaacttgtaatatactataggaataattatgnncatgcaacaatgcaacaatttaatatataagtgcattacatttcttatttttatttttcttaaaaaaaattagccgggtatggtggtctgtgtagagatggggtttctccatgttgcccaggccagttttgaactcctggactctagcaatccacccactttagcctctcaaagtgctgggattacaggcatgagcagccacatagctttcttagcatgccctttgtatgatcccagacctaagtccaagggatttatcaatgatacgcatccatcttcctaaggggaatactactgccaagatttctgcgtattgtttaaaatgtctcttgaaaaaaatatctac

SEQ ID NO: 15767 - DNA, 441 bp, Homo sapiens
attcgccctttgagcggccgcccgggcaggtacttaaagttggttgttttttaatggggatgtggaatggaggggtaaatattttgtgttttttaatgaggaatcccaaacactagagttttttctttatattgcaaaggcactgatgccccttctcacaaaatatttcatgcttcagtattggcctaaagttgactatctttatataaattaaaatcttctcatgttttagtggtgttttagaagatcttgacatgttactttttgaattaaagtgaaacgcatagcatatggactcaacaaaaccattctctgtgaataaaatgtgtcacattctataataaaactatatatagcatgttattccatattctgtatgattaattttagagattatatcttgaattctgctatcaatctacaatatttattcattcattc

SEQ ID NO: 15768 - DNA, 279 bp, Homo sapiens
tatagggcgaattggcctctagtgctgctcggcggcgccagtgtgatggatatctgcagaattcgccttagcgtggtcgcggcgagtaccgggggccaggcggaagcccggctcggccagcatccgagagcccggactggaggagttgagaagaggaggaagaataatgggaggagcaggacctttttaacttgacaaatagtgtctgagagagagctccattttatttctgttgaattgatttagtactgataggcatataccaagctggcagaagca

SEQ ID NO: 15769 - DNA, 410 bp, Homo sapiens
actactatagggcgaattgggccctctagatgcatgctcgagcggccgccagtgtgatggatatctgcagaattcgcccttggccgcccgggcaggtacgcgggggagtatcttgcagccagcgtggactcgaggatctcttcaaggtttttgcttttggatgcccgctccttagttaagggcctgaaagtgaggtcatgggctctgatttaatgaaggactggcctcaccaggcagcaattgctgggttctgcctgagttcgtgaatgctgaagatggcggcccaattgatcgcagcttccagaaagaagggatcctttctgaatgggatgggcagtgaacttcacacctacccttggcaggctggagaaactgaccaagagtctagaaggaagctaatgtgcctcaat

SEQ ID NO: 15770 - DNA, 597 bp, Homo sapiens
atacgactcactatagggcgaattgggccctctagatgcatgctcgagcggccgccagtgtgatggatatctgcagaattcgcccttagcgtggtcgcggccgaggtacatttaaaaggtgatgctaatactttaaaatgtttaagatatagatttaaaaagcattgtaaattgtatactgcagtgtcgtctacatggcactggacaggacataatgtaaaacataaaagtgcaattgttacacttacatatgatagtgaatggcaacgtgaccaatttttgtctcaagttaaaataccaaaaactattacagtgtctactggatttatgtctatatgacaaatcttgatactgcatccacaacattactggcgtgctttttgctttgcttttgtgtgcttttgtgtgtctgcctattaatacgtccgctgcttttgtctgtgtctacatacacatcattaatactattggtattactattgtggataacagcagcctctgcgtttaggtgttttattgtatatattggatttggttatataccattattttttatacatacacatgcacgctttttaatacataatgtatatgtac

SEQ ID NO: 15771 - DNA, 461 bp, Homo sapiens
atacgactcactatagggcgaattgggccctctagatgcatgctcgagcggccgccagtgtgatggatatctgcagaattcgcccttcgagcggccgcccgggcaggtacttcaaatacaactcaggcacttcagatggctttgtaaactgggtcaatgctattccatctgaaaggaaattacagaattattttcaattcaattatacatccctgcaaaataatttgagggcagctttgaatgctgtaagtgagttgtgatgccatctatattaatcctaaaacttatcttcaaattgattcccaaagtccaacacactttttatttaataaatatttacaggccaggcacggtggctcaagcctgcaatcccagcacttttgggaggccaaggcaggcggatcacaagatcaggagattgagaacatcctgaccaacatggtgaaaccccgcctctacta

SEQ ID NO: 15772 - DNA, 398 bp, Homo sapiens
atacgactcacttagggcgaattgggccctctagatgcatgctcgagcggccgccagtgtgatggatatctgcagaattcgcccttagcgtggtcgcggccgaggtactttattaaggaactcttaatggaataggcttttgggtttttctagtttgcaggatgatgaaaaacatggctgctgtatttgttggctttcctgagtttattcatatagtaacaggtaactccaaaccttcagtggtttacagccacagaagtttatttctcactcacgtgatctgtgggctgggagatggctgtggctctgtgctccatgtattttcttcattctaggatccaggctttcgtgagtaaatacagaaagatttttgtaatatatcaactgtttaaagtttg

SEQ ID NO: 15773 - DNA, 533 bp, Homo sapiens
ccctctagatgcatgctcgagcggccgccagtgtgatggatatctgcagaattcgcccttagcgtggtcgcggccgaggtacatttgctgacgtttttcttcagaaaaaaactaattttatggtaaaattctttccaaatttatttttctgctttattccttcttttccaaaattaacaagtcaattcagctatctatgtagaaaactgatttattccttgtgtgtatgttagcaacgtttataatctcttaatattattaattccatagactattagccataaaaattaaatgttgacattctaccctattcataaagtaaacagcaaaaaaatttaaattattagtttgttgttgttagagaactatctctgttttaatgcctctcatttttagagaataaacctgacttaaaatcacctttgtagaaatgtggctaatagcttattctgttagcatgaggaatctatcttaaaaacaagaggcagggtgcagtagctcatgcctataatcccagcattttgggaggccta

SEQ ID NO: 15774 - DNA, 509 bp, Homo sapiens
ggggccctctagatgcatgctcgagcggccgccagtgtgatggatatctgcagaattcgccctttcgagcggccgcccgggcaggtactcacagccaggcagaggagtctgacagacccaaggattagaagccgtgtggttgccccttcccaagaataacccttgcttgggtgtctgagactgcaagtataatcctgcatcagaggagagagagcagggagctggggccagggcttgtggctgtagacacaagtggaagaaaccccagatctcttttcttttctagggcacttcttgctattgtaatttgaaaatgtattatttgaataatgagggatgtctttctcctgcaggactggtagctccttggaggaagggcctactggtcttgcatctgtctccctaccccaaggccaggcacatatgggaactatttgttgggtgtgtgtagtttcaagttctgcctctacccctgcctagtggttgcccttctgcaagccacttaaccc

SEQ ID NO: 15775 - DNA, 476 bp, Homo sapiens
gtaatacgactcactatagggcgaattgggccctctagatgcatgctcgagcggccgccagtgtgatggatatctgcagaattcgcccttagcgtggtcgcggccgaggtacaaacctggccgtctaatgctgttaatagtgcagcattttaggtcctctttacccaggactgcctgttcaacaattagggattaattgcttcccggattatccaaatccaaagtgtctttaacccagctacctatgggtcactggctcattaacatgcacttcctcagacttctcacttgaacagctaaagtcaagctggaactcattttctttttactgatcagagaaaaataaatctacagtttggaatttttcttaaattagagttattctaatcaacagaatttaattcaacagattgtttgaattcaacattgtacctgcccgggcgggcgctcgaaagggcgaattccagcacactggc

SEQ ID NO: 15776 - DNA, 490 bp, Homo sapiens
atatggcgactggggccctctagatgcatgctcgagcggccgccagtgtgatggatatctgcagaattcgcccttagcgtggtcgcggccgaggtacagattgaggtttgtttatcctttttaattccagtttgttcttggctttcttagttctgaaaattgaaatctgccttcattttcactgatgcctgtgttgtaatgtgtcagtaaactgggtattcttccaagcagttggttgattccaggcttctgcatatctttgtgctgttctggaatttgttttctgtccatcaccgcatttacctgcccatactctgaggctaacatatccagaaacttttaaacttaacttccatttttcagaacagccatctgctttagaataaatgatttccgtttatccagagaaaagtaactaggtcttagagacttcgtgtattcgtccgttctcacatgtggcaaaatatggtttggtttttctttttttttt

SEQ ID NO: 15777 - DNA, 529 bp, Homo sapiens
acgactactatagggcgaattgggccctctagatgcatgctcgagcggccgccagtgtgatggatatctgcagaattcgcccttcgagcggccgcccgggcaggtacttagcactggttttcaagctgaaaagtaagtataagtcagcaataaatagttgccatttatgaatacacaggacaaagaaaattgagcacctagtggctgatgtttgcaaaatattaaataacttaagttcattgaatacaattagagtcaaattaatgaagcttagagatctagtgttatttaaactactagtagtgggccaagtgttgccattaacatttttttaatgatgaaatagaatagtaaaaatatgtttattttacctaataggttcattctagctttaaaaaaagtgttgtttcatgaagcttttgtgtattttgcatatatagataccccagtgtaaactgtatttgttactttggctcatagtccaaaaactcttgaaagccactaatctagcccagtgccttcatttcat

SEQ ID NO: 15778 - DNA, 610 bp, Homo sapiens
ctatatggcgaatggggccctctagatgcatgctcgagcggccgccagtgtgatggatatctgcagaattcgcccttagcgtggtcgcggccgaggtacagtgaggttacttcaagcaaacagttctgagctgtcagggtatttcagccacctcctgacaggcagaaggccctcagaggtctgccatcttgcctcgcctagccgctcgcaggaagaaatctcccttcttttgccttgcagctggtgttcacctctctgccttaagtattcatgcaagccttcaaagtctccttccattctctatttagccaagcactttggggttgaaagttgaaaatagccaaaaacccagctcaaactagattaaggatgctcacggggaatgcaacagaatggacaaggttagaatggaggcttccccgaaaattaagctccagaagtttagtgctttcttggggctactctctattaaaaatatatatattttaaaaactttattcatagtgtaacaatacaaataaggggtcagatagctggggttccagttatgactccagcactttttagctctgtggcctttcctcacctgtttctccatctgtaaaatagt

SEQ ID NO: 15779 - DNA, 581 bp, Homo sapiens
tatatggcgaatggggccctctagatgcatgctcgagcggccgccagtgtgatggatatctgcagaattcgccctttcgagcggccgcccgggcaggtactgaggtgcctcatgaaaattagattattttggatgtattttcaggtagacacaagcccattctttaaatcagtttttgttcttaaagtagaactattttttcagttaatataaaaaaaaaaagaaccccttttttgtggggttgaaatctggggttttcctgaatgtatttttggctctgaaggaaggttgaattcccgaccttttttcagtcccctgaaatccatcatcttttgcctgccactgtagcaaatcaacggctgatactggtgcttctaagagcacaggaagctatcaacctgaatttttctttcacagtcagaaaaagtcatgagggtggatgagattaaaaaaaaaaaaaaaaaaaaaaaaagggtttcttgggggggaaccccctttgggggaaaatcccccccctgggggggcgtttttagggggtccaacctggggcccaaatggggggaaaaatggggaaaaagggg

SEQ ID NO: 15780 - DNA, 501 bp, Homo sapiens
atacgactcactatagggcgaattgggccctctagatgcatgctcgagcggccgccagtgtgatggatatctgcagaattcgccctttcgagcggccgcccgggcaggtacgcgggcttatctgtgttttcggctaacaagcggtggacgcctcctcgaagcatccgcttcactgcagaagaaggggacttggggttcaccttgagagggaacgcccccgttcaggttcacttcctggatccttactgctctgcctcggtggcaggagcccgggaaggagattatattgtctccattcagcttgtggattgtaagtggctgacgctgagtgaggttatgaagctgctgaagagctttggcgaggacgagatcgagatgaaagtcgtgagcctcctggactccacatcatccatgcataataagagtgccacatactccgtgggaatgcagaaaacgtacctcgggcgcgaccacgcttagggcgaattccagcacactggc

SEQ ID NO: 15781 - DNA, 382 bp, Homo sapiens
tagggcgaattgggccctctagatgcatgctcgagcggccgccagtgtgatggatatctgcagaattcgccctttcgagcggccgcccgggcaggtacatttaaaaggtgatgctaatactttaaaatgtttaagatatagatttaaaaagcattgtaaattgtatactgcagtgtcgtctacatggcattggacaggacataatgtaaaacataaaagtgcaattgttacacttacatatgatagtgaatggcaacgtgaccaatttttgtctcaagttaaaataccaaaaactattacagtgtctactggatttatgtctatatgacaaatcttgatactgcatccacaacattactggcgtgctttttgctttgctttt

SEQ ID NO: 15782 - DNA, 567 bp, Homo sapiens
tatatggcgaatggggccctctagatgcatgctcgagcggccgccagtgtgatggatatctgcagaattcgcccttagcgtggtcgcggccgaggtactgggaagacaaagatggataaaacagagtccttgatccagagagcagagtctagagttaggcaggcacacaaagaaatgataatgagataatgtgatatgtgctataatagaggtatgttccaagggcaacgggataaagcaaatgattctgtctggtataaaaggagaggatctcaaagacagcatcatgttaaccagctcttaagggataggctcacctacagagatatgaaggaagggaactctaaacagagggaatggtatcaataaagagatgaaggcatcaagtgtagtgagcagaaagaaatctgggtatcaggaataaagatatctaagctgagctggcatatgtagacaagagtaggaacgttcatgtggtgtaatgctagccccatgggctaatcagtgtttggggtcacaaggatgaagattaagagtgtttcatgtcaacaaaattttttggaatca

SEQ ID NO: 15783 - DNA, 480 bp, Homo sapiens
ctcactatatggcgaatggggccctctagatgcatgctcgagcggccgccagtgtgatggatatctgcagaattcgcccttagcgtggtcgcggccgacgtacatgagcaccctggagatactaaaactcttattctgactaaatgtctttcaagagcagcctccagatttttctgcattcttgctaccttgttaacttgcagtgccttacagtttaccattggctgtcctgaaataccctcttagaactaagatcatacaattggaaatcatgggtagaaatcatgaaatcatgggtagaaataaagaaggtggaagaagcagctaggtttccaaagcagcaaaatgtcagatacattctgaagcagccagtttccccagtgtccccaccccaccccgtatggggctcacattctatttttctctttgtcctttttttaaattctcaagtattgtgcaacagcaagttgactttatctg

SEQ ID NO: 15784 - DNA, 332 bp, Homo sapiens
  misc_feature 181, 327: n = A,T,C or G
agatgcatgctcgagcggccgccagtgtgatggatatctgcagaattcgccctttcgagcggccgcccgggcaggtacatttaaaaggtgatgctaatactttaaaatgtttaagatatagatttaaaaagcattgtaaattgtatactcgcagtcgtcgtctatcatggcatgtggacanggatcatactgtaaaacatcaaaagtgcacattgttcacacttacattatgatgagtgacatggcacacgtgaccatatttattgtctcaatgttcaaaatacccaaaacactattacacgtggctatctggatttaatgtctatnatgac

SEQ ID NO: 15785 - DNA, 385 bp, Homo sapiens
tatagggcgaattgggccctctagatgcatgctcgagcggccgccagtgtgatggatatctgcagaattcgcccttagcgtggtcgcggccgaggtactaaaaactagtaatgcaaaggcagcaatgttagcaaaatttaaagagttatacggggtgagttttacagaattagtaagaccatttaaaagtaataaatcaacgtgttgcgattggtgtattgctgcatttggacttacacccagtatagctgacagtatgaaaacactattacaacaatattgtttatatttacacattcaaagtttagcatgttcatggggaatggttgtgttactattagtaagatataaatgtggaaaaaatagagaaacaattgaaaaattc

SEQ ID NO: 15786 - DNA, 458 bp, Homo sapiens
attgggccctctagatgcatgctcgagcggccgccagtgtgatggatatctgcagaattcgcccttagcgtggtcgcggccgaggtacgcgggctcctaatattggaaaggagaatggagactattttgtgttccaacattaactaaaaatactaccaattgcagaagaaaaaaaagatggtatataaaataaatcataatgaaaaaagtaacaaaatagcatcctttttgttttccaaatgaaacaaaaacttttcacctagaggtgcttatagaatgtgacctgatactaagtaaatacaaaattgtcactgctaaataattttccaagcaaagataatgacactaaaatatgtttattcgttctcaacggtagcctgcttctcttggaattccagtcagctttggcaagaatgtctttatccaagtgtctccagagtattctgggcagctcaaaa

SEQ ID NO: 15787 - DNA, 388 bp, Homo sapiens
actatagggcgaattgggccctctagatgcatgctcgagcggccgccagtgtgatggatatctgcagaattcgcccttagcgtggtcgcggccgaggtactatgggtgtagtgttactattacagttaatccgtcctttgtgtgagctgttaaatgcagtgaggattggagcactgtccactgagtctctgtgcaacaacttagtggtgtggcaggggtttccggtgtctggctctgatcttggtcgctggatagtcgtctgtgtttcttcggtgcccaaggcgacggctttggtatgggtcgcggcggtgtggttggccaagtgctgcctaatagtttcaggagaggatacttcgttgctgctgcaggatcagccatggtagattat

SEQ ID NO: 15788 - DNA, 508 bp, Homo sapiens
  misc_feature 25: n = A,T,C or G
tatagggctgaattgggccctctanatgcatgctcgacggccgccagtgtgatggatatctgcagaattcgcccttagcgtggtcgcggccgaggtacaagcatttggattcatagcccttagaatctactgtttccaaagctagtcgaatatcagaaaagcagcttggtaaagtgcaaataactttgttcagggaatcaggaagcacagcttagaatcccagagctccctctaactgtctgtaatgtaaactcaggtaattcccttcactaggtatcaaatgtctcatctataaaatgaagggtatatatgtgaccagtgatgctactttgacgtattttgagttaatcagagatttttctgctcaaaatctttggaagaaaagctactaatgggtggcagagagtggcaaacgttctatctaaactatagacctcctcctcttcagaaacctctgatgaattgtgctacatagaataaaatataaaatcttttgtatactttactg

SEQ ID NO: 15789 - DNA, 605 bp, Homo sapiens
tacgactcactatagggcgaattgggccctctagatgcatgctcgagcggccgccagtgtgatggatatctgcagaattcgcccttagcgtggtcgcggccgaggtacattgtatactgcagtgtcgtctacatggcattggacaggacataatgtaaaacataaaagtgcaattgttacacttacatatgatagtgaatggcaacgtgaccaatttttgtctcaagttaaaataccaaaaactattacagtgtctactggatttatgtctatatgacaaatcttgatactgcatccacaacattattggcgtgctttttgctttgcttttgtgtgcttttgtgtgtctgcctattaatacgtccgctgcttttgtctgtgtctacatacacatcattaatactattggtattactattgtggataacagcagcctctgcgtttaggtgttttattgtatatattgtatttgtttatataccattatttttaatacatacacatgcacgctttttaattacataatgtatatgtacctgcccgggcggccgctcgaagggcgaattccagcacactggcggccgttactagtggatccgagctcg

SEQ ID NO: 15790 - DNA, 622 bp, Homo sapiens
  misc_feature 491: n = A,T,C or G
ctatatggcgaatggggccctctagatgcatgctcgagcggccgccagtgtgatggatatctgcagaattcgccctttcgagcggccgcccgggcaggtacgcgggtttgtctcccaaaatgtgagaacctccattaagtccagaaacagttttttaaaaaggacactttttaaattttatttaatcactattcactcattgtctgttatgtgtcaggtcttgtgccaatattagaagcatagtgatatatatgacctggttccagctttggggagctcaaaatttagttgatgagacacacaatttcatcatcagaatgcaatattataggtgttaaaatcgaggtggataaagtggttgtttttctgtctttcagtttgcctgggagtcatacttcagaataagggctaaaattggggtctaagaaaggtgtgaataaggaaaacattaaatacttttacctaaaagagagttgggagagacagtttangggacaagttactgaataagaaaaattagtaagacgtcagcagggcatagagtggcagaagtaagcaagagaatggaaggctcacggagttcacatcccacaggaccgagaagagctgaggtgtggatctg

SEQ ID NO: 15791 - DNA, 464 bp, Homo sapiens
attgggccctctagatgcatgctcgagcggccgccagtgtgatggatatctgcagaattcgcccttagcgtggtcgcggccgaggtacatgagcaccctggagatactaaaactcttattctgactaaatgtctttcaagagcagcctccagatttttctgcattcttgctaccttgttaacttgcagtgccttacagtttaccattggctgtcctgaaataccctcttagaactaagataatacaatttgaaatcatgggtagaaatcatgaaatcatgggtagaaataaagaaggtggaagaagcagctaggtttccaaagcagcaaaatgtcagatacattctgaagcagccagtttccccagtgtccccaccccaccccgtatggggctcacattctatttttctctttgtcctttttttaaattctcaagtattgtgcaacagcaagttgactttatct

SEQ ID NO: 15792 - DNA, 394 bp, Homo sapiens
tagggcgaattgggccctctagatgcatgctcgagcggccgccagtgtgatggatatctgcagaattcgcccttagcgtggtcgcggccgaggtacaatgggcagtgtttggatccttccctggaatcagtgacgaatgcatggtgttctgcccaatgagaatgaaccatttgaacaaatcaagtaacctcaaaggtgtaattctcttggcatcgttaatgattattggtaggagtaaataagtgcaattcttttgttgttcttttttggagatgaggtgtctctgtgttgcccaggctggcctcaaatccctgggcttaagcaatcctcctgcctcagccttgagtagctgggatcacagacatgtacgcggggagctcaaagcccgcaagag

SEQ ID NO: 15793 - DNA, 639 bp, Homo sapiens
  misc_feature 532, 552, 574, 576: n = A,T,C or G
acgactcactatagggcgaattgggccctctagatgcatgctcgagcggccgccagtgtgatggatatctgcagaattcgccctttcgagcggccgcccgggcaggtacatttaaaaggtgatgctaatactttaaaatgtttaagatatagatttaaaaagcattgtaaattgtatactgcagtgtcgcctacatggcattggacaggacataatgtaaaacataaaagtgcaattgctacacttacatatgatagtgaatggcaacgtgaccaatttttgtctcaagttaaaataccaaaaactattacagtgtctactggatttatgtctatatgacaaatcttgatactgcatccacaacattactggcgtgctttttgctttgcttttgtgtgcttttgtgtgtctgcctattaatacgtccgctgcttttgtctgtgtctacatacacatcattaatactattggtattactattgtggataacagcagcctctgcgtttaggtgttttattgtatatattggatntgtttatataccattatttntaatacatacacatgcacgctntntaattacataatgtatatgtacctcggccgcgaccacgctaagggcgaattccagcacactgg

SEQ ID NO: 15794 - DNA, 639 bp, Homo sapiens
cgactcactataggtcgaattgggccctctagatgcatgctcgagcggccgccagtgtgatggatatctgcagaattcgccctttcgagcggccgcccgggcaggtacatttaaaaggtgatgctaatactttaaaatgtttaagatatagatttaaaaagcattgtaaattgtatactgcagtgtcgtctacatggcattggacaggacataatgtaaaacataaaagtgcaattgttacacttacatatgatagtgaatggcaacgtgaccaatttttgtctcaagttaaaataccaaaaactattacagtgtctactggatttatgtctatatgacaaatcttgatactgcatccacaacattactggcgtgctttttgctttgcttttgtgtgcttttgtgtgtctgcctattaatacgtccgctgcttttgtctgtgtctacatacacatcattaatactattggtattactattgtggataacagcagcctctgcgtttaggtgttttattgtatatattggatttgcttatataccattatttttaatacatacacatgcacgctttttaattacataatgtatatgtaccttggccgcgaccacgctaagggcgaattccagcacactggc

SEQ ID NO: 15795 - DNA, 418 bp, Homo sapiens
catgctcgacggccgccagtgtgatggatatctgcagaattcgcccttagcgtggtcgcggccgaggtactaattagaaaatatagcttgagccaccgtgccaggcctgttttgtttgtttttgtagagacatggcttcaccatgtctcccaggctgtcctgccttggcctcccaaagcactgggattataggcatgagctaccacacctggccttaacggttttcattaatataaatataactacgtattcccaatgccacattcataaatgagaaattttaattattgatatctttaagtttttaacagaaacagtgatacaaagctgactgttaaaattacttagtttttaaaacaatctgcaagtcagtctgtgaatggtatttacatatttaacatttgtttataagaaatat

SEQ ID NO: 15796 - DNA, 637 bp, Homo sapiens
  misc_feature 512: n = A,T,C or G
tacgactcactatagggcgaattgggccctctagatgcatgctcgagcggccgccagtgtgatggatatctgcagaattcgcccttagcgtggtcgcggccgaggtacattgtatactgcagtgtcgtctacatggcattggactggacataatgtaaaacataaaagtgcaattgttacacttacatatgatagtgaatggcaacgtgaccaatttttgtctcaagttaaaataccaaaaactattacagtgtctactggatttatgtctatatgacaaatcttgatactgcatccacaacattattggcgtgctttttgctttgcttttgtgtgcttttgtgtgtctgcctattaatacgtccgctgcttttgtctgtgtctacatacacatcattaatactattggtattactattgtggataacaacagcctctgcgtttaggcgttttattgtatatattggatttgtttatataccattatttttaatacatacacatgcacgctntttaattacataatgtatatgtacctgcccgggcggccgctcgaaagggcgaattccagcacactggcggccgttactagtggatccgagctcggtaccaagcttggcgtaatcatggtcatagc

SEQ ID NO: 15797 - DNA, 391 bp, Homo sapiens
ggcgaattgggccctctagatgcatgctcgagcggccgccagtgtgatggatatctgcagaattcgcccttagcgtggtcgcggccgaggtacatttaaaaggtgatgctaatactttaaaatgtttaagatatagatttaaaaagcattgtaaattgtatactgcagtgtcgtctacatggcattggacaggacataatgtaaaacataaaagtgcaattgttacacttacatatgatagtgaatggcaacgtgaccaatttttgtctcaagttaaaataccaaaaactattacagtgtctactggatttatgtctatatgacaaatcttgatactgcatccacaacattactggcgtgctttttgctttgcttttgtgtgcttttgtgt

SEQ ID NO: 15798 - DNA, 617 bp, Homo sapiens
ctatatggcgaatggggccctctagatgcatgctcgagcggccgccagtgtgatggatatctgcagaattcgcccttagcgtggtcgcggccgaggtacattcattaacatgggaaaaaatgaaatgctgattctgaattcccagtatgaaatcccttattgaaacagttccatctcagcatgagctttatgggggatttcataagaggccgtcctctccaaagtccccaaataaagcatctggggatgattctcctcaaattctcctcaaatgcaatgttaacctttaagaaaaaccagaagaaacaaatttaaaataccaacaaatgatgcctgttttgcatcattaaccgtaagtgttcacattgagaaatccatacaattgaaacataaaatctagtatctatctaaaaataaaaacaaaaatagaatggaatgaaaaacacatgcaactggagttattaagctagtattgctcttttgtattttatctttctgtttacttataatttctccctattgcacaataagcaatttatagtaaattgtagatcttatatatcactgcattccagccacctggcatttttccctaacatattagcccgataaatatt

SEQ ID NO: 15799 - DNA, 383 bp, Homo sapiens
tagggcgaattgggccctctagatgcatgctcgagcggccgccagtgtgatggatatctgcagaattcgccctttcgagcggccgcccgggcaggtacgcgggggtttgtttaaacttaagtaagccttagtagtttatggcaattttaaataacctttgaaaatatacaagcagatacatacattagctctaaatgtatatataattattttattgaaactcacattttcggcgaggcgcggtggctcacatctgtattcccagcactttcggagtccgaggcaggcagatcacaaggttaagagatcgagactctcctggctaacatggtgaaaccctgtctctactaaaaatacaaaaaaattagcctggtgtggtggta

SEQ ID NO: 15800 - DNA, 379 bp, Homo sapiens
ttgggccctctagatgcatgctcgagcggccgccagtgtgatggatatctgcagaattcgcccttagcgtggtcgcggccgaggtacatttaaaaggtgatgctaatactttaaaatgtttaagatatagatttaaaaagcattgtaaattgtatactgcagtgtcgcctacatggcattggacaggacataatgtaaaacataaaagtgcaattgttacacttacatatgatagtgaatggcaacgtgaccaatttttgtctcaagttaaaataccaaaaactattacagtgtctactggatttatgtctatatgacaaatcttgatactgcatccacaacattactggcgtgctttttgctttgcttttgtgtgctt

SEQ ID NO: 15801 - DNA, 618 bp, Homo sapiens
ctatatggcgaatggggccctctagatgcatgctcgagcggccgccagtgtgatggatatctgcagaattcgcccttcgagcggccgcccgggcaggtacagtagtagagtgagcggaagcacttttggctgaagtgcaacattagtgattgaggaagtgcaggtccgtaatatcttaccccaaaccctggggctcactgagcttccgagttcagagtttttcagaattgatgaacacatccagaaggcccatggggcagatacaccttagacatattgatgaaagtggagttggaattgggttgtggaagtcgtaggacgtgaattctaggtttcttggagtgtggagtatggtgtctaccgtttggaaacagagaagaatgacattatgagttttatttataaaataagaatttcttctttgtattaaaatagatttttatataggaaattttcattaccttcagtatcagaaaggcccccaaatctatttcaccgtttccataataaattgtgaaagaaagatttgattgggatattgtctttaaaaatgaaaccaaaaagtatgggaaaatactttaattttagagttaacaacatttatagttacaatcatga

SEQ ID NO: 15802 - DNA, 393 bp, Homo sapiens
  misc_feature 313, 373: n = A,T,C or G
tacgactactatagggcgaattgggccctctagatgcatgctcgagcggccgccagtgtgatggatatctgcagaattcgcccttagcgtggtcgcggccgaggtacttcccacgtcctcccagaccttgaatgcaccgctgcctgggcccgtgtttcagccacacctgccccctataacctagctccaaccttcatcccttggtgagcctcccctggcaagtcatagaaacccagagggagttccttatttcctggtcacccggcacagctgtttgcaatcttcactgtccattaggcacctcaaggggctnttaaaaatattcattcctgggccccaccccgagaggtttattaagtgtgtgaactactgngatgggttgtggggagagag

SEQ ID NO: 15803 - DNA, 475 bp, Homo sapiens
  misc_feature 399, 400, 401, 402, 403, 404, 424, 425, 426: n = A,T,C or G
atgcatgctcgagcggccgacagtgtgatggatatctgcagaattcgcccttagcgtggtcgcggccgaggtacgcggggatcgtatccatttaataataaccagctgatgggatgctgtgaggttaaatgggatgcgtagggaacgtgggtttgtaggttctccatagagggtagctgctgctcttattattgagactcttgttgtaggacagtctctctctcgctctcgctcgcgctctcgctcttttagacagggtctcgctcggttgcccaggctggagtgcagtggcacgatcatagcttattgcacccttgaactcctgggctcaagagatcctctgcctcaacttcttgagtagctgggataaagacatgtgctacccgcctggttaaattnnnnnnaaaaaaaaaaaaaaaaaaannnccccttgccggggggggctttcaaaggggcaaattcccccccctggggg

SEQ ID NO: 15804 - DNA, 636 bp, Homo sapiens
tactactcactatagggcgaattgtgccctctagatgcatgctcgagcggccgccagtgtgatggatatctgcagaattcgcccttagcgtggtcgcggccgaggtacttcctctttcttttcacttcatctttacgggcatattaatgagtggagtaaagcactcagaagaacacaggaaaagaggattcatgtatgtcagaggagctgaaggctctcaataggttcagagaatgcaggtcttccagctgctgagggtgtatgcttccactatgcctcatagcaacccctgaacaaagtggggtctctaaagttctattaacaggctcaattactaaacacctttaaccagaaaatattccctctgggtccttttcctttacattccatgagttggagaagggaaggaattagtgtagtagttgaatgaatggctgaatgaaatgatacagttgatagtgtaagactctacaagcagcaaaagtcttgactataaaagatacttccttaaaactgagaagaagatattcatttttgtcccccactccccggattttcatctcttaaccattctccgcattcctccaaaatgtgtcctgtttggcaggatctcatgctctactttcttggtctaca

SEQ ID NO: 15805 - DNA, 466 bp, Homo sapiens
tatagtggcgaatggggccctctagatgcatgctcgagcggccgccagtgtgatggatatctgcagaattcgccctttcgagcggccgcccgggcaggtacttagcactggttttcaagctgaaaagtaagtataagtcagcaataaatagttgccatttatgaatacacaggacaaagaaaattgagcacctagtggctgatgtttgcaaaatattaaataacttaagttcattgaatacaattagagtcaaattaatgaagcttagagatctagtgttatttaaactactagtagtgggccaagtgttgccattaacatttttttaatgatgaaatagaatagtaaaaatatgtttattttacctaataggttcattccagctttaaaaaaagtgttgtttcatgaagcttttgtgtattttgcatatatagataccccagtgtaaactgtatttgttactttg

SEQ ID NO: 15806 - DNA, 475 bp, Homo sapiens
ctacttactatacggcgaattgcgccctctagatgcatgctccagcggccgccagtgtgatggatatctgcagaattcgccctttcgagcggccgcccgggcaggtaccatcatgaagagactgaacgtgcaagatgctgtctcctcccaaatagactcactactgagcatgtctctgaatttctcaagtgtgtctgacagtctgagggactgctgctgttccctgattggcaggtgagggcaggttgggaggtctgaggaagacccatgccagatacctgagaaccacctttgtgtccagtgaacagataggctagacccaagaagaaatgccatcccagagagctggcttatctgaaagttgtagttgtttttcctttaataaagaagtgggtggcccaaatatctttgatctgcttgccttctcttccccacctgccagtgtgaaaggttcttaacttggtggcccgtgtaa

SEQ ID NO: 15807 - DNA, 605 bp, Homo sapiens
tatagggcgaattgggccctctagatgcatgctcgagcggccgccagtgtgatggatatctgcagaattcgccctttcgagcggccgcccgggcaggtacgcgggctccaatttaattcttttagttgaatgagcttctttctcgcttgttacagactcacttaggctcattcctccctgccttagtcccagtatggtctcagtaatgacatgcagtatggggactttggactcctgtttgaacaaaccagctttgagatgataaaaatttgaatatgaattgagttcttgaagataagaaattgttaattttgtcaggtttgttaatggcatggtagttactctaaaaacaaatttctgggcgagtgtagtggctcatgcctgcaatcctagtacctcggccgcgaccacgctaagggcgaattccagcacactggcggccgttactagtggatccgagctcggtaccaagcttggcgtaatcatggtcatagcttgttcctgtgtgaaattgttatccgctcacaattccacacaacatacgagccggaagcataaagtgtaaagcctggggtgcctaatgagtgagctaactcacattaatt

SEQ ID NO: 15808 - DNA, 519 bp, Homo sapiens
tacgactactatatactatatggcgaattgtgccctctagatgcatgctcgagcggccgccagtgtgatggatatctgcagaattcgcccttagcgtggtcgcggccgaggtactaataaggctaggctactttaaggaatttctattttgaaccatataactagtattaaacagccataggccgtcttctaaccccagctagatattttgcaaaatgtttttgttataataaaggtaacagaggccaggcatggtggctcacgcctataatctcagcactttgggaggcttaggcgggtggattacctgagatggtttcaagaccagcctggttaacatggcgaaaccacgtctgctaaaaatacaaaaattagctgggcgtggtggcaggtgcctgtagtcccagctacttggaaggctgaggcaggagaattgcttggacctgggaagtggtagttgcagtgagctgaattcgtgcgattgcactccagcctgggtgacggagcaagactccatct

SEQ ID NO: 15809 - DNA, 340 bp, Homo sapiens
  misc_feature 164, 171, 182, 226, 247, 318: n = A,T,C or G
atgcatgctcgagcggccgccagtgtgatggatatctgcagaattcgcccttcgagcggccgcccgggcaggtacaggtggctgtgagtaaatactgtttctttggctaaatcttagtgagcaaaatgacacatatatgtatttttataagtccccctgatagncctctgntgcctcccgtncttttgtttcagtaatccccttgagtagagctgcatgtaagttntcaggaacatgcctttccttngtggggagggaatcctgtattcaacaatattccagagtatttaactaagtggatcacattcatgaagtggntctaccttcgtttgctccttct

SEQ ID NO: 15810 - DNA, 532 bp, Homo sapiens
gggccctctagatgcatgctcgagcggccgccagtgtgatggatatctgcagaattcgcccttagcgtggtcgcggccgaggtacataaattttttttttttttttttttttcggagacaggatcttgttctgtcgcccagcgtggagtagcataatcatagctcactgcagccttgaactcctatgctcaagtgatcctcctgcctcagcatcccaaaatgctgggattacaagcgtgcaccactatgcctggctaatttattttatttcattttttgtagagattgagtctcgttttgttgccccggctgatcacagttacttttgagtatatataatcaggggctatcaggaacacaagaggcccagttacttccatttcttgagattttctgtatattaaaaaatttaaaaggggatattctgggggatttattatcaaaactgtgggatatgttaaatgtgtacctggccgggcggccgtttgaaagggcgaattccagcacactggcggccgttactagtggatcc

SEQ ID NO: 15811 - DNA, 402 bp, Homo sapiens
agggcgaattgggccctctagatgcatgctcgagcggccgccagtgtgatggatatctgcagaattcgcccttagcgtggtcgcggccgaggtacattcaaagccctgctccacaccttgccctggccaggtccacctttgaggtgatgacgacagttgctgagaaaagagaaaagaccactggctcactacttgtttctgctgctataatagagaggagaaaatgatgaaatgctctttttaccttcctgtgtgaagattgcctggtcataaaagggagtcagaggtctgacttctctatttccatcccttaggggactctttaacaacaaaaagaatgtattacaagtatgtcaagctgataacgcaaggcttttcctcctggaagattggtgtaggtga

SEQ ID NO: 15812 - DNA, 569 bp, Homo sapiens
  misc_feature 531, 537: n = A,T,C or G
atacgactcactatagggcgaattgggccctctagatgcatgctcgagcggccgccagtgtgatggatatctgcagaattcgccctttcgagcggccgcccgggcaggtacatttaaaaggtgatgctaatactttaaaatgtttaagatatagatttaaaaagcattgtaaattgtatactgcagtgtcgtctacatggcattggacaggacataatgtaaaacataaaagtgcaattgttgcacttacatatgatagtgaatggcaacgtgaccaatttttgtctcaagttaaaataccaaaaactattacagtgtctactggatttatgtctatatgacaaatcttgatactgcatccacaacattactggcgtgctttttgctttgcttttgtgtgcttttgtgtgtctgcctattaatacgtccgctgcttttgtctgtgtctacatacacatcattaatactattggtattactattgtggataacagcagcctctgcgtttaggtgttttattgtatatattgnatttgnttatataccattatttttaatacatacacatg

SEQ ID NO: 15813 - DNA, 598 bp, Homo sapiens
acgactactatagggcgaattgagccctctagatgcatgctcgagcggccgccagtgtgatggatatctgcagaattcgccctttagcggccgcccgggcaggtacgtttaaaaggtgatgctaatactttaaaatgtttaagataccgatttaaaaagcattgtaaattgtatactgcagtgtcgtctacatggcattggacaggacataatgtaaaacataaaagtgcaattgttacacttacatatgatagtgaatggcaacgtgaccaatttttgtctcaagttaaaataccaaaaactattacagtgtctactggatttatgtctatatgacaaatcttgatactgcatccacaacattactggcgtgctttttgctttgcttttgtgtgcttttgtgtgtctgcctattaatacgtccgctgcttttgtctgtgtctacatacacatcattaatactattggtattactattgtggataacagcagcctctgcgtttaggtgttttattggatatattgtatttgtttatataccattatttttaatacatacacatgcacgctttttaattacataatgtatatgtacctc

SEQ ID NO: 15814 - DNA, 388 bp, Homo sapiens
gactcactatagggcgaattgggccctctagatgcatgctcgagcggccgccagtgtgatggatatctgcagaattcgcccttggccgcccgggcaggtacccaaagatgtttacttgagagtagtttattcctttcagctcctcagctctatacattcttccagggaaccgtagatcttggtgcctatttgagccccaaaggatcagttagttttacaaaggacaatcgtattctctgtcacatcctttttggccatgcctcaaaagcagtcccacaatgtaagctactgctcataggctcaatgcagtccaccttcaaagcaagagaaataatttcatgagtaactccaactgccgccttgttatagggaaggcatcatgttggag

SEQ ID NO: 15815 - DNA, 332 bp, Homo sapiens
tacgactcctatagggcgaattgggccctctagatgcatgctcgagcggccgccagtgtgatggatatctgcagaattcgccctttcgagcggccgcccgggcaggtactaaagtcaagtttcagttgtttggaagtttgtgggggttttaatttttttcctttaaaaagttctgcctgtcccatcttcaaagcttgcgatccttgctcttgttttttcttcccctgtgcttcgcctgttagcggactcctctgataaactgcctaacgatcaacgtaaatgagtagatggcctctcttttctttcctttcttttgtgacctattattagct

SEQ ID NO: 15816 - DNA, 572 bp, Homo sapiens
gtaatacgactcactatagggcgaattgggccctctagatgcatgctcgagcggccgccagtgtgatggatatctgcagaattcgccctttcgagcggccgcccgggcaggtacatttaaaaggtgatgctaatactttaaaatgtttaagatatagatttaaaaagcattgtaaattgtatactgcagcgtcgtctacatggcattggacaggacataatgtaaaacataaaagtgcaattgttacacttacatatgatagtgaatggcaacgtgaccaatttttgtctcaagttaaaataccaaaaactattacagtgtctactggatttatgtctatatgacaaatcttgatactgcatccacaacattactggcgtgctttttgccttgcttttgtgtgcttttgtgtgtctgcctattaatacgtccgctgcttttgtctgtgtctacatacacatcattaatactattggtattactattgtggataacagcaacctctgcgtttaggtgtgttattgaatatattggatttgtttatataccattatttttaatacatacacatg

SEQ ID NO: 15817 - DNA, 593 bp, Homo sapiens
  misc_feature 527: n = A,T,C or G
ctatagggcgaatcgagccctctagatgcatgctcgagcggccgccagtgtgatggatatctgcagaattcgccctttcgagcggccgcccgggcaggtacatttaaaaggtgatgctaatactttaaaatgtttaagatatagatttaaaaagcattgtaaattgtatactgcagcgtcgtctacatggcattggacaggacataatgtaaaacataaaagtgcaattgttacacttacatatgatagtgaatggcaacgtgaccaatttttgtctcaagttaaaataccaaaaactattacagtgtctactggatttatgtctatatgacaaatcttgatactgcatccacaacattactggcgtgctttttgccttgcttttgtgtgcttttgtgtgtctgcctattaatacgtccgctgcttttgtctgtgtctacatacacatcattaatactattggtattactattgtggataacagcagcctctgcgtttaggtgttttattgtatatattgtatttgnttatataccattatttttaatacatacacatgcacgctttttaattacataatgtatatgtacctc

SEQ ID NO: 15818 - DNA, 399 bp, Homo sapiens
ctactatagggcgaattgggccctctagatgcatgctcgagcggccgccagtgtgatggatatctgcagaattcgcccttagcgtggtcgcggccgaggacaatgctctataaaacatacagatatccctgttttagtgtccagttctcatttaatatcagatcagatagatattatattctagttctatttagtggttcatagaacctaattatgttgtccagcatcatctttcccacttggaaattctaggaagatgaccacatccactgcaaacaagaacattttttttttctatcagtgtagtttgcctcttttattttacagttttgtatcttatcttaatgaactggccatactttagaacaaagttgaatattaggttcttcatttcaaatt

SEQ ID NO: 15819 - DNA, 521 bp, Homo sapiens
  misc_feature 176, 195, 204: n = A,T,C or G
aatacgactcactatagggcgaattgggccctctagatgcatgctcgagcggccgccagtgtgatggatatctgcagaattcgcccttagcgtggtcgcggccgaggtacccaggagccaggaagagcagaggggagcatcagtgtccacatgttgggggatacctctgtgatctngtccacccctagtggacanagccacatnattcaggccaatgcccagtaagggactggtaacaatatttctgtaagtcctccagctgccccagggagtcagctgtgccatcaggtcccatggccttgctcaggagaccagagtgaacatgacaaaaggagagccacttctccttcaacctctgttcactgctaagttaccttgcttctggaggaaaacagatccttcctcaagcttgtcagccacctcccctgaggccttccgtgcctcttttagattctcgtacgcggggatgacaagcaaaggaacatacttgcctggagatagcctttgcgatatttaaatgt

SEQ ID NO: 15820 - DNA, 500 bp, Homo sapiens
ctataggcgaattgggccctctagatgcatgctcgagcggccgccagtgtgatggatatctgcagaattcgcccttagcgtggtcgcggccgaggtactgggattgcagtcaggagccactgtgcctggcctctgggcaaaccatttctctccttggctactaggatgggtaattttcttgcccttcatgattgatccttctctctaccctttaacacatcctttcccatttccacctcttaatactccattaccagtattttctaaggttccacatttaaactccattctctgtctctgtatttctctctgcctctggctctgtctcttatcttcatacttttcaccccaccctgctggcaatctcattctaccccaggaatttaactctatcctgtctttgttatgtttaaagaagagccacaaggagagggccagaaacttttatcattttttataaggattttccctaagggacatctgcctttttttttttttaa

SEQ ID NO: 15821 - DNA, 627 bp, Homo sapiens
tacgactcatatagggcgaattgggccctctagatgcatgctcgagcggccgccagtgtgatggatatctgcagaattcgcccttagcggccgcccgggcaggtactcacttcctcttggtgccttaagagctttcctcaaattgtatttctgagcagggacatttacaagcctgcatggaactgaaggatctcctgtctgaagattctcacaagtaattgatagaatgagatttatttgacaaataacaaaaccatctgccaaatccatgattaaatggcagggactctgggtctcttgtgcttagtgagggaaggaaggaggtggtatgttttcagtgaaacactcactgaatggaactccaggctggagggagagtgaagagggaagagaatacagtccttgctattttcctcagctgattcataatacattaacaccctcatttacatggcctattagaagttatttatattccaattacaggctatttgaatattgcatttgtagtcgaattacagggtttaaggaaagctcgtttgttttcaagaaaggattctggtttaaagacaaagaaatgggcagcttgcagatacgggcagcttgcagaagctctgggcacaccac

SEQ ID NO: 15822 - DNA, 373 bp, Homo sapiens
attgggcccctctagatgcatgcctcgacggccgccagtgtgatggatatctgcagaattcgcccttcgagcggccgcccgggcaggtacctggcacaaggtaagtgctcagtcaatgtttgtgttatcattttattgcttgagctatggtcttttcctgattctttcttgcgaccacagcaccccacaggtttttgagttatcttggaactaagtggacccaacagggaatctattatcatggataaatgaaaaactgaatgaataaaatttactggtttccaaaggaaagcagagaatagattcaaattccaattatttaataaacaccaaacacaacaatatatactgaactgaagaagttggatgggat

SEQ ID NO: 15823 - DNA, 579 bp, Homo sapiens
attgtaatacgactcactatagggcgaattgggccctctagatgcatgctcgagcggccgccagtgtgatggatatctgcagaattcgccctttcgagcggccgcccgggcaggtacatttaaaaggtgatgctaatactttaaaatgtttaagatatagatttaaaaagcattgtaaattgtatactgcagtgtcgtctacatggcattggacaggacataacgtaaaacataaaagtgcaattgttacacttacatatgatagtgaatggcaacgtgaccaatttttgtctcaagttaaaataccaaaaactattacagtgtctactggatttatgtctatatgacaaatcttgatactgcatccacaacattactggcgtgctttttgctttgcttttgtgtgcttttgtgtgtccgcctattaatacgtccgctgcttttgtctgtgtctacatacacatcattaatactattggtattactattgtggataacagcagcctctgcgtttaggtgttttattgtatatattggatttgtttatataccattatttttaatacatacacatgcacg

SEQ ID NO: 15824 - DNA, 694 bp, Homo sapiens
  misc_feature 24: n = A,T,C or G
acgactcactattgggcgaatcgngccctctagatgcatgctcgagcggccgccagtgtgatggatatctgcagaattcgcccttagcgtggtcgcggccgaggtactgttttccacagagtgggaagataagaacacatgtagagatgataaaatgtcattggctccaagagacaagctccgaaatccatggtggttgaagaacatcaaagaggagcaattatttcagtcattagggcagttccacctgttctaattgaacatttttaggatgtagaagatgcatcatacattggtatctattcagaaggtggggacatctgctgtctgtcatgtatctgggagatgtttatctcaacaggaggcaataataatatggtaaaccaaacctaatattatcatgatgcattaaaactgggttaattgaagcaataaaatcaaagtaacagtaaatgcttatacaacatgttaagtaatatttacttcaatcttagaaatgaaatgataattttacattctagcagatgtatttcttgatacctgttctgagaggacagaaacaaggctcaaaattcatgcaagaggctaataacaacttagttgatagtaaaatatggagcattggatgtagagtgcattaaccttcttggttaatctgaggtgacctataagtgggcatattgttttttgggga

SEQ ID NO: 15825 - DNA, 379 bp, Homo sapiens
  misc_feature 330: n = A,T,C or G
gtatacgactcactatagggcgaattgggccctctagatgcatgctcgagcggccgccagtgtgatggatatctgcagaattcgccctttcgagcggccgcccgggcaggtactccagcctgggtgacagagcaagactccgtctcaaaaaacaaagttaaggttggggagttaaggttgggtagaatgcattaaccaggcattagaattgcaatgttgggttcaagattaccacttgggcactgaagtgaagattaagggttagaagttaggatttagtacctcggccgcgaccacgctaagggcgaattccagcacactggcgggcgntactagtggatccgagctcggtaccaagcttggcgtaatcatggtcata

SEQ ID NO: 15826 - DNA, 465 bp, Homo sapiens
  misc_feature 420: n = A,T,C or G
atagtggcgaatggggccctctagatgcatgctcgagcggccgccagtgtgatggatatctgcagaattcgccctttcgagcggccgcccgggcaggtacatatcaaatttccaatttatatggaaccatttaatagagatttttttctataattataaacgataatttctaaagctgtagattaacccaataacatagacacttcttaataacagcttttggaaattggaacaagaagtctgcaaaggcggccgggcacagtggctcacgcctgcaatcttaacactttgcgaggtcgagatgggcatatcacctcaagtcagcagttccagaccagcctgaccaacatgctgaaaccccatctctactaaaaatacaaaaaattagccagatgtggtggcacgtgcctgtaatcccanctacccaggaggctgaggcaggaaaatcgctggaagccgggaggc

SEQ ID NO: 15827 - DNA, 689 bp, Homo sapiens
acgactactatagggcgaattgggccctctagatgcatgctcgagcggccgccagtgtgatggatatctgcagaattcgcccttcgagcggccgcccgggcaggtacatttaaaaggtgatgctaatactttaaaatgtttaagatatagatttaaaaagcattgtaaattgtatactgcagtgtcgtctacatggcattggacaggacataatgtaaaacataaaagtgcaattgttacacttacatatgatagtgaatggcaacgtgaccaatttttgtctcaagttaaaataccaaaaactattacagtgtctactggatttatgtctatatgacaaatcttgatactgcatccacaacattactggcgtgctttttgctttgcttttgtgtgcttttgtgtgtctgcctattaatacgtccgctgcttttgtctgtgtctacatacacatcattaatactattggtattactattgtggataacagcagcctctgcgtttaggtgttttattgtatatattgtatttgtttatataccattatttttaatacatacacatgcacgctttttaattacataatgtatatgtacctcggccgcgaccacgctaagggcgaattccagcacactggcggccgttactagtggatccgagctcggtaccaagcttggcgtaatcatggt

SEQ ID NO: 15828 - DNA, 573 bp, Homo sapiens
cgactcactatagggcgaattgggccctctagatgcatgctcgagcggccgccagtgtgatggatatctgcagaattcgcccttcgagcggccgcccgggcaggtacagacctacgtgaccatatagactattggaaacacatgcgcctagaatgtgctatttattacaaggccagagaaatgggatttaaacatattaaccaccaggtggtgccaacgctggctgtaccaaagaataaagcattacaagcaattgaactgcaactaacgttagaaacaatatataactcacaatatagtaatgaaaagtggacattacaagacgttagccttgaagtgtatttaactgcaccaacaggatgtataaaaaaacatggatatacagtggaagtgcagtttgatggagacatatgcaatacaatgcattatacaaactggacacatatatatatttgtgaagaagcatcagtaactgtggtagagggtcaagttgactattatggtttatattatgttcatgaaggaatacgaacatattttgtgcagtttaaaggtgatgcaaaaaaatatagt

SEQ ID NO: 15829 - DNA, 384 bp, Homo sapiens
tagggcgaattgggccctctagatgcatgctcgagcggccgccagtgtgatggatatctgcagaattcgccctttcgagcggccgcccgggcaggtacatttaaaaggtgatgctaataccttaaaatgtttaagatatagatttaaaaagcattgtaaattgtatactgcagtgtcgtctacatggcattggacaggacataatgtaaaacataaaagtgcaattgttacacttacatatgatagtgaatggcaacgtgaccaatttttgtctcaagttaaaataccaaaaactattacagtgtctactggatttatgtctatatgacaaatcttgatactgcatccacaacattactggcgtgctttttgctttgcttttgt

SEQ ID NO: 15830 - DNA, 686 bp, Homo sapiens
acgactactatagggcgaattgggccctctagatgcatgctcgagcggccgccagtgtgatggatatctgcagaattcgcccttcgagcggccgcccgggcaggtacatttaaaaggtgatgctaatactttaaaatgtttaagatatagatttaaaaagcattgtaaattgtatactgcagtgtcgtctacatggcattggacaggacataatgtaaaacataaaagtgcaattgttacacttacatatgatagtgaatggcaacgtgaccaatttttgtctcaagttaaaataccaaaaactattacagtgtctactggatttatgtctatatgacaaatcttgatactgcatccacaacattactggcgtgctttttgctttgcttttgtgtgcttttgtgtgtctgcctattaatacgtccgctgcttttgtctgtgtctacatacacatcattaatactattggtattactattgtggataacagcagcctctgcgtttaggtgttttattgtatatattgtatttgtttatataccattatttttaatacatacacatgcacgctttttaattacataatgtatatgtacctcggccgcgaccacgctaagggcgaattccagcacactggcggccgttactagtggatccgagctcggtaccaagcttggcgtaatcat

SEQ ID NO: 15831 - DNA, 380 bp, Homo sapiens
attgggccctctagatgcatgctcgagcggccgccagtgtgatggatatctgcagaattcgcccttgagcggccgcccgggcaggtactcgtggcccatgttggttcaatttttatagcttcagttatccaaaggtgacacagaatacccataatgatgactgggcatgcgttttacctttgggcagacaccccatctttttattctgaaatttaaaataattcagattcttttggggaggggattagtttaaacattaataaacagaatataaacaggcagatggatgggtagataagcggtattcgggaatttgagggcttgggacagaaatagattccttttcctttttaggttttctttcctaacttgctgcttcc

SEQ ID NO: 15832 - DNA, 556 bp, Homo sapiens
  misc_feature 467: n = A,T,C or G
tacgactcactatagggcgaattgggccctctagatgcatgctcgagcggccgccagtgtgatggatatctgcagaattcgcccttcgagcggccgcccgggcaggtacatatacattatgtaattaaaaagcgtgcatgtgtatgtattaaaaataatggtatataaacaaatacaatatatacaataaaacacctaaacgcagaggctgctgttatccacaatagtaataccaatagtattaatgatgtgtatgtagacacagacaaaagcagcggacgtattaataggcagacacacaaaagcacacaaaagcaaagcaaaaagcacgccagtaatgttgtggatgcagtaccaagatttgtcatatagacataaatccagtagacactgtaatagtttttggtattttaacttgagacaaaaattggtcacgttacgcatatgtaagtgtaacaattgcactnttatgttttacattatgtcctgtccaatgccatgtagacgacactgcagtatacaatttacaatgctttttaaatctatatcttaaaca

SEQ ID NO: 15833 - DNA, 615 bp, Homo sapiens
  misc_feature 487: n = A,T,C or G
atatggcgaatggggccctctagatgcatgctcgagcggccgccagtgtgatggatatctgcagaattcgcccttagcgtggtcgcggccgaggtacgcggggtgtattgactaattgccctccagtaaagttgctgcaaattattcttctaccagcagtgtcttagagttactgtttccttagagacatgcaatgttctttattgtctttgtcagtaagtcaagctaaacaaatatttaagctttattgtttatttctttgataactgcttcatgtgctcttgtcatttgtgcatcttctgtgaattgcctgtttttgtcttttgcccattttatttattgaattgcctttttaaaaactgatttgttcatgcctgtaatcccaacactttgggactccaaggcagatggatcacgaggtcaagagatcgagaccatcctggtcagtgtggtgaaatcccgtctctactaaaaatacaaaacttanctaggtgtggtgatgcccacctgtagtcccagctgctcaagaggctgaggcaggagaatcgcttgaaccagggaggcagatgttgcagtgagccgagatcacgccactgcactccagcctggtgacag

SEQ ID NO: 15834 - DNA, 400 bp, Homo sapiens
gactactatagggcgaattgggccctctagatgcatgctcgagcggccgccagtgtgatggatatctgcagaattcgcccttagcgtggtcgcggccgaggtacatcaagtgctttttaaaaagttgatattgttggttatttttcttttattaaaatccacagccctgtgggctgctgtcccatccttatcgggctcattcaagaccagcattgacatttctaatttgcaaatttaaagattgtcaggaaatggtttaaacacccagtatgattggggagctttttgactgtgggtgacaagagtgggctcacctctgggaagacagtaggggcaggggaggagagctgggctagatttagggagagttaggaatagctaacatttattaagcacttaa

SEQ ID NO: 15835 - DNA, 485 bp, Homo sapiens
ccctctagatgcatgctcgagcggccgccagtgtgatggatatctgcagaattcgcccttagcgtggtcgcggccgaggtactgtgtttagaagggattaccaaaggctggagcgatttaagctatgcactagccttgccctcttaggttgcattctctatagccactggttctcaaacattagggtgcactgtaaccattacagagcttgtgaaaagtgcagaaacctgagcctcaccttatgagattctgattcatccagggggaggacaggaatctgtatttttcataacaacctcaagtaatctttattctgagggtctcgggattgctaagttgataacacacaaatctttaatcaggcagttaaattcttttttactcggccaggcgcagaggctcatgccagtaatcccaacactctgggaggctgaagtgggtggatcacctgacgtcaggagttctagaccaacctgaccaacatg

SEQ ID NO: 15836 - DNA, 544 bp, Homo sapiens
gcgaatggggccctctagatgcatgctcgagcggccgccagtgtgatggatatctgcagaattcgcccttagcgtggtcgcggccgaggtacacatttatgtgtgggtgtacaacatttttctgtgattatatgggtagttttgaaagaatatacttatgagccagagcaagaaattggaaccaatatgtgtagaggttattgcttttctctgcttagtgtgtcttggaaaaaagttctttacaggtaaataattttaaataccaatacccttagtatggatcagcaaattaggggctctgagaagtcctttcattacaagagttgtttagctttgatttattgttttctaaacttatttgagctgggatgctttttcagagcagacacattctagtatattcttgttttatctgcactatagatatgtattgttacataccttcagcttggcaaggcagactaataaggaggttccaagacttcccttggtttaatgagaacattcaaaaggtgcaggcataaggtaaggtatgtttgaggac

SEQ ID NO: 15837 - DNA, 377 bp, Homo sapiens
attgggccctctagatgcatgctcgagcggccgccagtgtgatggatatctgcagaattcgccctttcgagcggccgcccgggcaggtacaatgaaaggccaactccctctttggacacagggggcttggttgtattctaccaaactcccactagggggagtgttttagcagtgtgggctgtgcccttcacattctaaacaactgattttcattagtgattctcatgaacaaaaaacttcacctcttcacctatcatgaatactcaacttataaggccaggtgctgtataaatccccgccctcaacacccagactcccaaatgcaggtagctgagctgatgactttttataagcaatgctaccttaaaaatatgcag

SEQ ID NO: 15838 - DNA, 490 bp, Homo sapiens
tacgactcactatagggcgaattgggccctctagatgcatgctcgagcggccgccagtgtgatggatatctgcagaattcgccctttgagcggccgcccgggcaggtacgcgggggcaacagagccagactccatctcaaaaaaaaaaagaaagaaagaaagaaatgaaagtggtcttgtgtggagtctctgccctctaaccttgtagttggcccaacttagcacaatttcttatgtgatatttcagttaatagtgcctcttaggcactattatcatcaatcccattttggagattgggaaaatgagataaggaacctgactgaggtcacacagttatcaaatgacaaaagcgaaatttaaaagcagataccagcagggcttgatggctcacgcctgtaatcccagcactttgggaggccaaggcgggaggatcatgaggtcaggagattgaaaccatcctggctaacacggtgaaaccccatctctact

SEQ ID NO: 15839 - DNA, 648 bp, Homo sapiens
  misc_feature 627, 628, 629: n = A,T,C or G
gcgaattgggccctctagatgcatgctcgagcggccgccagtgtgatggatatctgcagaattcgcccttagcgtggtcgcggccgaggtacagtgagttcgtcatacatctagatgaggatgtaaaagaacaaaaacttggaatttccctccctctccatgcagctttgaagagtctttaatccaagggaaacctacagttctttctctgccgtaggttctcttctcctctcttccacttcctccagctcctgtttgtctcttcctccctgtgtgtcttactaccttgttttgggggtttgttttctctcctgatttttacctctttcagtcctcaaaatggtctgaataaactggagattaatttatttttgaaagaagtgtttgtatctactaagtgaggttatggaagagatccaaaaatgttctgggtggcaggagaagacatttaaaatacacagttaataagccacatttagataatctataattgactgtagtttattcagaaatgtcttttgttaaataaagcttctaagtgaagtctcaaagccacagaattaagaaaggctgtttgtttagtcaatgtgattactgctcatatttttaaaaggaaaaaaaagcctnnnaaaaagaaaaaaaaaaaaa

SEQ ID NO: 15840 - DNA, 448 bp, Homo sapiens
  misc_feature 13: n = A,T,C or G
catgctcgacggncgccagtgtgatggatatctgcagaattcgccctttcgacggccgcccgggcaggtacttaggcatggtcagtaagatctggccaatgacatgtaagcagaaatgatacatactaatgatatcctgaataagaatggggtgtgaccactactattgtttttcctgttcctgctggctggaatatagtaaagtaggaagctgaagcagtaatattaaaccatgaaatagaaaatacatgttaaatatggcagagcactaagatggaagaaatttgggtcacttgcatgatgatgtgtgtgcctattactaaatctgctttgttatctgagagaatacagtctcctcattaaactaaataacattcactatgacagcattgttaatctatgaggtgccacagaatcccttatagattacctgctaaacctgtacctc

SEQ ID NO: 15841 - DNA, 492 bp, Homo sapiens
gcgaattgggccctctagatgcatgctcgagcggccgccagtgtgatggatatctgcagaattcgcccttagcgtggtcgcggccgaggacacatgaaactattactagtttcgtatcaaaataaaactagttaatattccgtcaggccaatcgctaacataatatactccaataaaaatttattgacatatatccactaccaaaaaaaaaaaaaaaaacttggttttcttttaaaaaaaaatttttaggggaaaaagggcgtttttttaaccaaaattttagtaaggggtgctaatgtttacccttttaaaaaaattttttgggcccaaaaaaaaatttttggggcaaaatggtgttttaaaaaccaaaatattagttgggggggccaaggtttaacaatattcccctgccaagtaattttttggaaaaccgggtttttggggacccttcccccaaaaaaaacccttccttttcccaattaaaaaaaaaaa
